United States Patent Application Publication US 2018/0305689 A1 - sequence listing, part 141

SEQ ID NO: 1949358 - RNA, 19 nt, Artificial Sequence
  Description of Artificial Sequence: Synthetic oligonucleotide
  Sense strand starting at position 3469 of SEQ ID NO: 1880197
cagaguaaguuccugaagu

SEQ ID NO: 1949359 - RNA, 19 nt, Artificial Sequence
  Description of Artificial Sequence: Synthetic oligonucleotide
  Antisense strand to SEQ ID NO: 1949358
acuucaggaacuuacucug

SEQ ID NO: 1949360 - RNA, 19 nt, Artificial Sequence
  Description of Artificial Sequence: Synthetic oligonucleotide
  Sense strand starting at position 3471 of SEQ ID NO: 1880197
gaguaaguuccugaaguuu

SEQ ID NO: 1949361 - RNA, 19 nt, Artificial Sequence
  Description of Artificial Sequence: Synthetic oligonucleotide
  Antisense strand to SEQ ID NO: 1949360
aaacuucaggaacuuacuc

SEQ ID NO: 1949362 - RNA, 19 nt, Artificial Sequence
  Description of Artificial Sequence: Synthetic oligonucleotide
  Sense strand starting at position 3489 of SEQ ID NO: 1880197
ucaggugugguguaacuau

SEQ ID NO: 1949363 - RNA, 19 nt, Artificial Sequence
  Description of Artificial Sequence: Synthetic oligonucleotide
  Antisense strand to SEQ ID NO: 1949362
auaguuacaccacaccuga

SEQ ID NO: 1949364 - RNA, 19 nt, Artificial Sequence
  Description of Artificial Sequence: Synthetic oligonucleotide
  Sense strand starting at position 3496 of SEQ ID NO: 1880197
ugguguaacuauguaauau

SEQ ID NO: 1949365 - RNA, 19 nt, Artificial Sequence
  Description of Artificial Sequence: Synthetic oligonucleotide
  Antisense strand to SEQ ID NO: 1949364
auauuacauaguuacacca

SEQ ID NO: 1949366 - RNA, 19 nt, Artificial Sequence
  Description of Artificial Sequence: Synthetic oligonucleotide
  Sense strand starting at position 3516 of SEQ ID NO: 1880197
uagauaagugaacgcacau

SEQ ID NO: 1949367 - RNA, 19 nt, Artificial Sequence
  Description of Artificial Sequence: Synthetic oligonucleotide
  Antisense strand to SEQ ID NO: 1949366
augugcguucacuuaucua

SEQ ID NO: 1949368 - RNA, 19 nt, Artificial Sequence
  Description of Artificial Sequence: Synthetic oligonucleotide
  Sense strand starting at position 3529 of SEQ ID NO: 1880197
gcacauugggcuuaaguaa

SEQ ID NO: 1949369 - RNA, 19 nt, Artificial Sequence
  Description of Artificial Sequence: Synthetic oligonucleotide
  Antisense strand to SEQ ID NO: 1949368
uuacuuaagcccaaugugc

SEQ ID NO: 1949370 - RNA, 19 nt, Artificial Sequence
  Description of Artificial Sequence: Synthetic oligonucleotide
  Sense strand starting at position 3583 of SEQ ID NO: 1880197
aguaguugaaacuguacuu

SEQ ID NO: 1949371 - RNA, 19 nt, Artificial Sequence
  Description of Artificial Sequence: Synthetic oligonucleotide
  Antisense strand to SEQ ID NO: 1949370
aaguacaguuucaacuacu

SEQ ID NO: 1949372 - RNA, 19 nt, Artificial Sequence
  Description of Artificial Sequence: Synthetic oligonucleotide
  Sense strand starting at position 3673 of SEQ ID NO: 1880197
uuggcauacuugguaaaug

SEQ ID NO: 1949373 - RNA, 19 nt, Artificial Sequence
  Description of Artificial Sequence: Synthetic oligonucleotide
  Antisense strand to SEQ ID NO: 1949372
cauuuaccaaguaugccaa

SEQ ID NO: 1949374 - RNA, 19 nt, Artificial Sequence
  Description of Artificial Sequence: Synthetic oligonucleotide
  Sense strand starting at position 3765 of SEQ ID NO: 1880197
cuucgaauuuggcagauuu

SEQ ID NO: 1949375 - RNA, 19 nt, Artificial Sequence
  Description of Artificial Sequence: Synthetic oligonucleotide
  Antisense strand to SEQ ID NO: 1949374
aaaucugccaaauucgaag

SEQ ID NO: 1949376 - RNA, 19 nt, Artificial Sequence
  Description of Artificial Sequence: Synthetic oligonucleotide
  Sense strand starting at position 3915 of SEQ ID NO: 1880197
ucugauucuuaagcuuaga

SEQ ID NO: 1949377 - RNA, 19 nt, Artificial Sequence
  Description of Artificial Sequence: Synthetic oligonucleotide
  Antisense strand to SEQ ID NO: 1949376
ucuaagcuuaagaaucaga

SEQ ID NO: 1949378 - RNA, 19 nt, Artificial Sequence
  Description of Artificial Sequence: Synthetic oligonucleotide
  Sense strand starting at position 197 of SEQ ID NO: 1880198
guugcagugaacugauagu

SEQ ID NO: 1949379 - RNA, 19 nt, Artificial Sequence
  Description of Artificial Sequence: Synthetic oligonucleotide
  Antisense strand to SEQ ID NO: 1949378
acuaucaguucacugcaac

SEQ ID NO: 1949380 - RNA, 19 nt, Artificial Sequence
  Description of Artificial Sequence: Synthetic oligonucleotide
  Sense strand starting at position 576 of SEQ ID NO: 1880198
gcaagucauccauggauaa

SEQ ID NO: 1949381 - RNA, 19 nt, Artificial Sequence
  Description of Artificial Sequence: Synthetic oligonucleotide
  Antisense strand to SEQ ID NO: 1949380
uuauccauggaugacuugc

SEQ ID NO: 1949382 - RNA, 19 nt, Artificial Sequence
  Description of Artificial Sequence: Synthetic oligonucleotide
  Sense strand starting at position 690 of SEQ ID NO: 1880198
aguguuaccuuugucuaca

SEQ ID NO: 1949383 - RNA, 19 nt, Artificial Sequence
  Description of Artificial Sequence: Synthetic oligonucleotide
  Antisense strand to SEQ ID NO: 1949382
uguagacaaagguaacacu

SEQ ID NO: 1949384 - RNA, 19 nt, Artificial Sequence
  Description of Artificial Sequence: Synthetic oligonucleotide
  Sense strand starting at position 837 of SEQ ID NO: 1880198
gccuuaagccauuagcuca

SEQ ID NO: 1949385 - RNA, 19 nt, Artificial Sequence
  Description of Artificial Sequence: Synthetic oligonucleotide
  Antisense strand to SEQ ID NO: 1949384
ugagcuaauggcuuaaggc

SEQ ID NO: 1949386 - RNA, 19 nt, Artificial Sequence
  Description of Artificial Sequence: Synthetic oligonucleotide
  Sense strand starting at position 959 of SEQ ID NO: 1880198
aagaaauaagaguggucuu

SEQ ID NO: 1949387 - RNA, 19 nt, Artificial Sequence
  Description of Artificial Sequence: Synthetic oligonucleotide
  Antisense strand to SEQ ID NO: 1949386
aagaccacucuuauuucuu

SEQ ID NO: 1949388 - RNA, 19 nt, Artificial Sequence
  Description of Artificial Sequence: Synthetic oligonucleotide
  Sense strand starting at position 960 of SEQ ID NO: 1880198
agaaauaagaguggucuua

SEQ ID NO: 1949389 - RNA, 19 nt, Artificial Sequence
  Description of Artificial Sequence: Synthetic oligonucleotide
  Antisense strand to SEQ ID NO: 1949388
uaagaccacucuuauuucu

SEQ ID NO: 1949390 - RNA, 19 nt, Artificial Sequence
  Description of Artificial Sequence: Synthetic oligonucleotide
  Sense strand starting at position 962 of SEQ ID NO: 1880198
aaauaagaguggucuuaga

SEQ ID NO: 1949391 - RNA, 19 nt, Artificial Sequence
  Description of Artificial Sequence: Synthetic oligonucleotide
  Antisense strand to SEQ ID NO: 1949390
ucuaagaccacucuuauuu

SEQ ID NO: 1949392 - RNA, 19 nt, Artificial Sequence
  Description of Artificial Sequence: Synthetic oligonucleotide
  Sense strand starting at position 1023 of SEQ ID NO: 1880198
ugccuuuagucaguuagag

SEQ ID NO: 1949393 - RNA, 19 nt, Artificial Sequence
  Description of Artificial Sequence: Synthetic oligonucleotide
  Antisense strand to SEQ ID NO: 1949392
cucuaacugacuaaaggca

SEQ ID NO: 1949394 - RNA, 19 nt, Artificial Sequence
  Description of Artificial Sequence: Synthetic oligonucleotide
  Sense strand starting at position 1064 of SEQ ID NO: 1880198
gucagcauuugcuuaucau

SEQ ID NO: 1949395 - RNA, 19 nt, Artificial Sequence
  Description of Artificial Sequence: Synthetic oligonucleotide
  Antisense strand to SEQ ID NO: 1949394
augauaagcaaaugcugac

SEQ ID NO: 1949396 - RNA, 19 nt, Artificial Sequence
  Description of Artificial Sequence: Synthetic oligonucleotide
  Sense strand starting at position 1191 of SEQ ID NO: 1880198
uaggaaguuugcccaguua

SEQ ID NO: 1949397 - RNA, 19 nt, Artificial Sequence
  Description of Artificial Sequence: Synthetic oligonucleotide
  Antisense strand to SEQ ID NO: 1949396
uaacugggcaaacuuccua

SEQ ID NO: 1949398 - RNA, 19 nt, Artificial Sequence
  Description of Artificial Sequence: Synthetic oligonucleotide
  Sense strand starting at position 1207 of SEQ ID NO: 1880198
uuaccugcuuacuuggaua

SEQ ID NO: 1949399 - RNA, 19 nt, Artificial Sequence
  Description of Artificial Sequence: Synthetic oligonucleotide
  Antisense strand to SEQ ID NO: 1949398
uauccaaguaagcagguaa

SEQ ID NO: 1949400 - RNA, 19 nt, Artificial Sequence
  Description of Artificial Sequence: Synthetic oligonucleotide
  Sense strand starting at position 1209 of SEQ ID NO: 1880198
accugcuuacuuggauaca

SEQ ID NO: 1949401 - RNA, 19 nt, Artificial Sequence
  Description of Artificial Sequence: Synthetic oligonucleotide
  Antisense strand to SEQ ID NO: 1949400
uguauccaaguaagcaggu

SEQ ID NO: 1949402 - RNA, 19 nt, Artificial Sequence
  Description of Artificial Sequence: Synthetic oligonucleotide
  Sense strand starting at position 1212 of SEQ ID NO: 1880198
ugcuuacuuggauacaguu

SEQ ID NO: 1949403 - RNA, 19 nt, Artificial Sequence
  Description of Artificial Sequence: Synthetic oligonucleotide
  Antisense strand to SEQ ID NO: 1949402
aacuguauccaaguaagca

SEQ ID NO: 1949404 - RNA, 19 nt, Artificial Sequence
  Description of Artificial Sequence: Synthetic oligonucleotide
  Sense strand starting at position 1393 of SEQ ID NO: 1880198
augauuaaaucugcugaac

SEQ ID NO: 1949405 - RNA, 19 nt, Artificial Sequence
  Description of Artificial Sequence: Synthetic oligonucleotide
  Antisense strand to SEQ ID NO: 1949404
guucagcagauuuaaucau

SEQ ID NO: 1949406 - RNA, 19 nt, Artificial Sequence
  Description of Artificial Sequence: Synthetic oligonucleotide
  Sense strand starting at position 1658 of SEQ ID NO: 1880198
agguguacucucuauguuc

SEQ ID NO: 1949407 - RNA, 19 nt, Artificial Sequence
  Description of Artificial Sequence: Synthetic oligonucleotide
  Antisense strand to SEQ ID NO: 1949406
gaacauagagaguacaccu

SEQ ID NO: 1949408 - RNA, 19 nt, Artificial Sequence
  Description of Artificial Sequence: Synthetic oligonucleotide
  Sense strand starting at position 1691 of SEQ ID NO: 1880198
uugggugccucaguuaaga

SEQ ID NO: 1949409 - RNA, 19 nt, Artificial Sequence
  Description of Artificial Sequence: Synthetic oligonucleotide
  Antisense strand to SEQ ID NO: 1949408
ucuuaacugaggcacccaa

SEQ ID NO: 1949410 - RNA, 19 nt, Artificial Sequence
  Description of Artificial Sequence: Synthetic oligonucleotide
  Sense strand starting at position 1693 of SEQ ID NO: 1880198
gggugccucaguuaagaua

SEQ ID NO: 1949411 - RNA, 19 nt, Artificial Sequence
  Description of Artificial Sequence: Synthetic oligonucleotide
  Antisense strand to SEQ ID NO: 1949410
uaucuuaacugaggcaccc

SEQ ID NO: 1949412 - RNA, 19 nt, Artificial Sequence
  Description of Artificial Sequence: Synthetic oligonucleotide
  Sense strand starting at position 1707 of SEQ ID NO: 1880198
agauaauggugguuaagau

SEQ ID NO: 1949413 - RNA, 19 nt, Artificial Sequence
  Description of Artificial Sequence: Synthetic oligonucleotide
  Antisense strand to SEQ ID NO: 1949412
aucuuaaccaccauuaucu

SEQ ID NO: 1949414 - RNA, 19 nt, Artificial Sequence
  Description of Artificial Sequence: Synthetic oligonucleotide
  Sense strand starting at position 1716 of SEQ ID NO: 1880198
ugguuaagauccucaucau

SEQ ID NO: 1949415 - RNA, 19 nt, Artificial Sequence
  Description of Artificial Sequence: Synthetic oligonucleotide
  Antisense strand to SEQ ID NO: 1949414
augaugaggaucuuaacca

SEQ ID NO: 1949416 - RNA, 19 nt, Artificial Sequence
  Description of Artificial Sequence: Synthetic oligonucleotide
  Sense strand starting at position 1717 of SEQ ID NO: 1880198
gguuaagauccucaucauu

SEQ ID NO: 1949417 - RNA, 19 nt, Artificial Sequence
  Description of Artificial Sequence: Synthetic oligonucleotide
  Antisense strand to SEQ ID NO: 1949416
aaugaugaggaucuuaacc

SEQ ID NO: 1949418 - RNA, 19 nt, Artificial Sequence
  Description of Artificial Sequence: Synthetic oligonucleotide
  Sense strand starting at position 1738 of SEQ ID NO: 1880198
agcacucaagaguagcaaa

SEQ ID NO: 1949419 - RNA, 19 nt, Artificial Sequence
  Description of Artificial Sequence: Synthetic oligonucleotide
  Antisense strand to SEQ ID NO: 1949418
uuugcuacucuugagugcu

SEQ ID NO: 1949420 - RNA, 19 nt, Artificial Sequence
  Description of Artificial Sequence: Synthetic oligonucleotide
  Sense strand starting at position 2195 of SEQ ID NO: 1880198
accaaugaugcagguaaca

SEQ ID NO: 1949421 - RNA, 19 nt, Artificial Sequence
  Description of Artificial Sequence: Synthetic oligonucleotide
  Antisense strand to SEQ ID NO: 1949420
uguuaccugcaucauuggu

SEQ ID NO: 1949422 - RNA, 19 nt, Artificial Sequence
  Description of Artificial Sequence: Synthetic oligonucleotide
  Sense strand starting at position 2220 of SEQ ID NO: 1880198
ucauuaucuagcgacaggu

SEQ ID NO: 1949423 - RNA, 19 nt, Artificial Sequence
  Description of Artificial Sequence: Synthetic oligonucleotide
  Antisense strand to SEQ ID NO: 1949422
accugucgcuagauaauga

SEQ ID NO: 1949424 - RNA, 19 nt, Artificial Sequence
  Description of Artificial Sequence: Synthetic oligonucleotide
  Sense strand starting at position 2222 of SEQ ID NO: 1880198
auuaucuagcgacagguaa

SEQ ID NO: 1949425 - RNA, 19 nt, Artificial Sequence
  Description of Artificial Sequence: Synthetic oligonucleotide
  Antisense strand to SEQ ID NO: 1949424
uuaccugucgcuagauaau

SEQ ID NO: 1949426 - RNA, 19 nt, Artificial Sequence
  Description of Artificial Sequence: Synthetic oligonucleotide
  Sense strand starting at position 2310 of SEQ ID NO: 1880198
guggcucacggcuuguaau

SEQ ID NO: 1949427 - RNA, 19 nt, Artificial Sequence
  Description of Artificial Sequence: Synthetic oligonucleotide
  Antisense strand to SEQ ID NO: 1949426
auuacaagccgugagccac

SEQ ID NO: 1949428 - RNA, 19 nt, Artificial Sequence
  Description of Artificial Sequence: Synthetic oligonucleotide
  Sense strand starting at position 2322 of SEQ ID NO: 1880198
uuguaaucccaguauguug

SEQ ID NO: 1949429 - RNA, 19 nt, Artificial Sequence
  Description of Artificial Sequence: Synthetic oligonucleotide
  Antisense strand to SEQ ID NO: 1949428
caacauacugggauuacaa

SEQ ID NO: 1949430 - RNA, 19 nt, Artificial Sequence
  Description of Artificial Sequence: Synthetic oligonucleotide
  Sense strand starting at position 2506 of SEQ ID NO: 1880198
ggagguugccauuaaccga

SEQ ID NO: 1949431 - RNA, 19 nt, Artificial Sequence
  Description of Artificial Sequence: Synthetic oligonucleotide
  Antisense strand to SEQ ID NO: 1949430
ucgguuaauggcaaccucc

SEQ ID NO: 1949432 - RNA, 19 nt, Artificial Sequence
  Description of Artificial Sequence: Synthetic oligonucleotide
  Sense strand starting at position 2557 of SEQ ID NO: 1880198
gaacgaggcucggucucaa

SEQ ID NO: 1949433 - RNA, 19 nt, Artificial Sequence
  Description of Artificial Sequence: Synthetic oligonucleotide
  Antisense strand to SEQ ID NO: 1949432
uugagaccgagccucguuc

SEQ ID NO: 1949434 - RNA, 19 nt, Artificial Sequence
  Description of Artificial Sequence: Synthetic oligonucleotide
  Sense strand starting at position 2691 of SEQ ID NO: 1880198
ggucacggcccuuaacaau

SEQ ID NO: 1949435 - RNA, 19 nt, Artificial Sequence
  Description of Artificial Sequence: Synthetic oligonucleotide
  Antisense strand to SEQ ID NO: 1949434
auuguuaagggccgugacc

SEQ ID NO: 1949436 - RNA, 19 nt, Artificial Sequence
  Description of Artificial Sequence: Synthetic oligonucleotide
  Sense strand starting at position 2697 of SEQ ID NO: 1880198
ggcccuuaacaauagcuua

SEQ ID NO: 1949437 - RNA, 19 nt, Artificial Sequence
  Description of Artificial Sequence: Synthetic oligonucleotide
  Antisense strand to SEQ ID NO: 1949436
uaagcuauuguuaagggcc

SEQ ID NO: 1949438 - RNA, 19 nt, Artificial Sequence
  Description of Artificial Sequence: Synthetic oligonucleotide
  Sense strand starting at position 3031 of SEQ ID NO: 1880198
gucgacuccuaccucgaaa

SEQ ID NO: 1949439 - RNA, 19 nt, Artificial Sequence
  Description of Artificial Sequence: Synthetic oligonucleotide
  Antisense strand to SEQ ID NO: 1949438
uuucgagguaggagucgac

SEQ ID NO: 1949440 - RNA, 19 nt, Artificial Sequence
  Description of Artificial Sequence: Synthetic oligonucleotide
  Sense strand starting at position 3065 of SEQ ID NO: 1880198
ugggcuccuguauauaaga

SEQ ID NO: 1949441 - RNA, 19 nt, Artificial Sequence
  Description of Artificial Sequence: Synthetic oligonucleotide
  Antisense strand to SEQ ID NO: 1949440
ucuuauauacaggagccca

SEQ ID NO: 1949442 - RNA, 19 nt, Artificial Sequence
  Description of Artificial Sequence: Synthetic oligonucleotide
  Sense strand starting at position 3067 of SEQ ID NO: 1880198
ggcuccuguauauaagagu

SEQ ID NO: 1949443 - RNA, 19 nt, Artificial Sequence
  Description of Artificial Sequence: Synthetic oligonucleotide
  Antisense strand to SEQ ID NO: 1949442
acucuuauauacaggagcc

SEQ ID NO: 1949444 - RNA, 19 nt, Artificial Sequence
  Description of Artificial Sequence: Synthetic oligonucleotide
  Sense strand starting at position 3352 of SEQ ID NO: 1880198
cgguguaaggcugagugau

SEQ ID NO: 1949445 - RNA, 19 nt, Artificial Sequence
  Description of Artificial Sequence: Synthetic oligonucleotide
  Antisense strand to SEQ ID NO: 1949444
aucacucagccuuacaccg

SEQ ID NO: 1949446 - RNA, 19 nt, Artificial Sequence
  Description of Artificial Sequence: Synthetic oligonucleotide
  Sense strand starting at position 3354 of SEQ ID NO: 1880198
guguaaggcugagugauuu

SEQ ID NO: 1949447 - RNA, 19 nt, Artificial Sequence
  Description of Artificial Sequence: Synthetic oligonucleotide
  Antisense strand to SEQ ID NO: 1949446
aaaucacucagccuuacac

SEQ ID NO: 1949448 - RNA, 19 nt, Artificial Sequence
  Description of Artificial Sequence: Synthetic oligonucleotide
  Sense strand starting at position 3857 of SEQ ID NO: 1880198
cuccgaaguuccucaguga

SEQ ID NO: 1949449 - RNA, 19 nt, Artificial Sequence
  Description of Artificial Sequence: Synthetic oligonucleotide
  Antisense strand to SEQ ID NO: 1949448
ucacugaggaacuucggag

SEQ ID NO: 1949450 - RNA, 19 nt, Artificial Sequence
  Description of Artificial Sequence: Synthetic oligonucleotide
  Sense strand starting at position 3860 of SEQ ID NO: 1880198
cgaaguuccucagugacau

SEQ ID NO: 1949451 - RNA, 19 nt, Artificial Sequence
  Description of Artificial Sequence: Synthetic oligonucleotide
  Antisense strand to SEQ ID NO: 1949450
augucacugaggaacuucg

SEQ ID NO: 1949452 - RNA, 19 nt, Artificial Sequence
  Description of Artificial Sequence: Synthetic oligonucleotide
  Sense strand starting at position 3861 of SEQ ID NO: 1880198
gaaguuccucagugacauu

SEQ ID NO: 1949453 - RNA, 19 nt, Artificial Sequence
  Description of Artificial Sequence: Synthetic oligonucleotide
  Antisense strand to SEQ ID NO: 1949452
aaugucacugaggaacuuc

SEQ ID NO: 1949454 - RNA, 19 nt, Artificial Sequence
  Description of Artificial Sequence: Synthetic oligonucleotide
  Sense strand starting at position 3911 of SEQ ID NO: 1880198
cuuccuaacgcagaagaaa

SEQ ID NO: 1949455 - RNA, 19 nt, Artificial Sequence
  Description of Artificial Sequence: Synthetic oligonucleotide
  Antisense strand to SEQ ID NO: 1949454
uuucuucugcguuaggaag

SEQ ID NO: 1949456 - RNA, 19 nt, Artificial Sequence
  Description of Artificial Sequence: Synthetic oligonucleotide
  Sense strand starting at position 3923 of SEQ ID NO: 1880198
gaagaaagcugcucaagug

SEQ ID NO: 1949457 - RNA, 19 nt, Artificial Sequence
  Description of Artificial Sequence: Synthetic oligonucleotide
  Antisense strand to SEQ ID NO: 1949456
cacuugagcagcuuucuuc

SEQ ID NO: 1949458 - RNA, 19 nt, Artificial Sequence
  Description of Artificial Sequence: Synthetic oligonucleotide
  Sense strand starting at position 100 of SEQ ID NO: 1880199
gaauguuaccgccagauac

SEQ ID NO: 1949459 - RNA, 19 nt, Artificial Sequence
  Description of Artificial Sequence: Synthetic oligonucleotide
  Antisense strand to SEQ ID NO: 1949458
guaucuggcgguaacauuc

SEQ ID NO: 1949460 - RNA, 19 nt, Artificial Sequence
  Description of Artificial Sequence: Synthetic oligonucleotide
  Sense strand starting at position 102 of SEQ ID NO: 1880199
auguuaccgccagauacau

SEQ ID NO: 1949461 - RNA, 19 nt, Artificial Sequence
  Description of Artificial Sequence: Synthetic oligonucleotide
  Antisense strand to SEQ ID NO: 1949460
auguaucuggcgguaacau

SEQ ID NO: 1949462 - RNA, 19 nt, Artificial Sequence
  Description of Artificial Sequence: Synthetic oligonucleotide
  Sense strand starting at position 111 of SEQ ID NO: 1880199
ccagauacaucagauagga

SEQ ID NO: 1949463 - RNA, 19 nt, Artificial Sequence
  Description of Artificial Sequence: Synthetic oligonucleotide
  Antisense strand to SEQ ID NO: 1949462
uccuaucugauguaucugg

SEQ ID NO: 1949464 - RNA, 19 nt, Artificial Sequence
  Description of Artificial Sequence: Synthetic oligonucleotide
  Sense strand starting at position 146 of SEQ ID NO: 1880199
ugcucaucagcguuagucu

SEQ ID NO: 1949465 - RNA, 19 nt, Artificial Sequence
  Description of Artificial Sequence: Synthetic oligonucleotide
  Antisense strand to SEQ ID NO: 1949464
agacuaacgcugaugagca

SEQ ID NO: 1949466 - RNA, 19 nt, Artificial Sequence
  Description of Artificial Sequence: Synthetic oligonucleotide
  Sense strand starting at position 154 of SEQ ID NO: 1880199
agcguuagucugcugaacu

SEQ ID NO: 1949467 - RNA, 19 nt, Artificial Sequence
  Description of Artificial Sequence: Synthetic oligonucleotide
  Antisense strand to SEQ ID NO: 1949466
aguucagcagacuaacgcu

SEQ ID NO: 1949468 - RNA, 19 nt, Artificial Sequence
  Description of Artificial Sequence: Synthetic oligonucleotide
  Sense strand starting at position 171 of SEQ ID NO: 1880199
cuauguuaucaucauugua

SEQ ID NO: 1949469 - RNA, 19 nt, Artificial Sequence
  Description of Artificial Sequence: Synthetic oligonucleotide
  Antisense strand to SEQ ID NO: 1949468
uacaaugaugauaacauag

SEQ ID NO: 1949470 - RNA, 19 nt, Artificial Sequence
  Description of Artificial Sequence: Synthetic oligonucleotide
  Sense strand starting at position 173 of SEQ ID NO: 1880199
auguuaucaucauuguauc

SEQ ID NO: 1949471 - RNA, 19 nt, Artificial Sequence
  Description of Artificial Sequence: Synthetic oligonucleotide
  Antisense strand to SEQ ID NO: 1949470
gauacaaugaugauaacau

SEQ ID NO: 1949472 - RNA, 19 nt, Artificial Sequence
  Description of Artificial Sequence: Synthetic oligonucleotide
  Sense strand starting at position 185 of SEQ ID NO: 1880199
uuguaucggcuuuacaaca

SEQ ID NO: 1949473 - RNA, 19 nt, Artificial Sequence
  Description of Artificial Sequence: Synthetic oligonucleotide
  Antisense strand to SEQ ID NO: 1949472
uguuguaaagccgauacaa

SEQ ID NO: 1949474 - RNA, 19 nt, Artificial Sequence
  Description of Artificial Sequence: Synthetic oligonucleotide
  Sense strand starting at position 799 of SEQ ID NO: 1880199
gcaagucauccauggauaa

SEQ ID NO: 1949475 - RNA, 19 nt, Artificial Sequence
  Description of Artificial Sequence: Synthetic oligonucleotide
  Antisense strand to SEQ ID NO: 1949474
uuauccauggaugacuugc

SEQ ID NO: 1949476 - RNA, 19 nt, Artificial Sequence
  Description of Artificial Sequence: Synthetic oligonucleotide
  Sense strand starting at position 1060 of SEQ ID NO: 1880199
gccuuaagccauuagcuca

SEQ ID NO: 1949477 - RNA, 19 nt, Artificial Sequence
  Description of Artificial Sequence: Synthetic oligonucleotide
  Antisense strand to SEQ ID NO: 1949476
ugagcuaauggcuuaaggc

SEQ ID NO: 1949478 - RNA, 19 nt, Artificial Sequence
  Description of Artificial Sequence: Synthetic oligonucleotide
  Sense strand starting at position 1182 of SEQ ID NO: 1880199
aagaaauaagaguggucuu

SEQ ID NO: 1949479 - RNA, 19 nt, Artificial Sequence
  Description of Artificial Sequence: Synthetic oligonucleotide
  Antisense strand to SEQ ID NO: 1949478
aagaccacucuuauuucuu

SEQ ID NO: 1949480 - RNA, 19 nt, Artificial Sequence
  Description of Artificial Sequence: Synthetic oligonucleotide
  Sense strand starting at position 1183 of SEQ ID NO: 1880199
agaaauaagaguggucuua

SEQ ID NO: 1949481 - RNA, 19 nt, Artificial Sequence
  Description of Artificial Sequence: Synthetic oligonucleotide
  Antisense strand to SEQ ID NO: 1949480
uaagaccacucuuauuucu

SEQ ID NO: 1949482 - RNA, 19 nt, Artificial Sequence
  Description of Artificial Sequence: Synthetic oligonucleotide
  Sense strand starting at position 1185 of SEQ ID NO: 1880199
aaauaagaguggucuuaga

SEQ ID NO: 1949483 - RNA, 19 nt, Artificial Sequence
  Description of Artificial Sequence: Synthetic oligonucleotide
  Antisense strand to SEQ ID NO: 1949482
ucuaagaccacucuuauuu

SEQ ID NO: 1949484 - RNA, 19 nt, Artificial Sequence
  Description of Artificial Sequence: Synthetic oligonucleotide
  Sense strand starting at position 1246 of SEQ ID NO: 1880199
ugccuuuagucaguuagag

SEQ ID NO: 1949485 - RNA, 19 nt, Artificial Sequence
  Description of Artificial Sequence: Synthetic oligonucleotide
  Antisense strand to SEQ ID NO: 1949484
cucuaacugacuaaaggca

SEQ ID NO: 1949486 - RNA, 19 nt, Artificial Sequence
  Description of Artificial Sequence: Synthetic oligonucleotide
  Sense strand starting at position 1287 of SEQ ID NO: 1880199
gucagcauuugcuuaucau

SEQ ID NO: 1949487 - RNA, 19 nt, Artificial Sequence
  Description of Artificial Sequence: Synthetic oligonucleotide
  Antisense strand to SEQ ID NO: 1949486
augauaagcaaaugcugac

SEQ ID NO: 1949488 - RNA, 19 nt, Artificial Sequence
  Description of Artificial Sequence: Synthetic oligonucleotide
  Sense strand starting at position 1414 of SEQ ID NO: 1880199
uaggaaguuugcccaguua

SEQ ID NO: 1949489 - RNA, 19 nt, Artificial Sequence
  Description of Artificial Sequence: Synthetic oligonucleotide
  Antisense strand to SEQ ID NO: 1949488
uaacugggcaaacuuccua

SEQ ID NO: 1949490 - RNA, 19 nt, Artificial Sequence
  Description of Artificial Sequence: Synthetic oligonucleotide
  Sense strand starting at position 1430 of SEQ ID NO: 1880199
uuaccugcuuacuuggaua

SEQ ID NO: 1949491 - RNA, 19 nt, Artificial Sequence
  Description of Artificial Sequence: Synthetic oligonucleotide
  Antisense strand to SEQ ID NO: 1949490
uauccaaguaagcagguaa

SEQ ID NO: 1949492 - RNA, 19 nt, Artificial Sequence
  Description of Artificial Sequence: Synthetic oligonucleotide
  Sense strand starting at position 1432 of SEQ ID NO: 1880199
accugcuuacuuggauaca

SEQ ID NO: 1949493 - RNA, 19 nt, Artificial Sequence
  Description of Artificial Sequence: Synthetic oligonucleotide
  Antisense strand to SEQ ID NO: 1949492
uguauccaaguaagcaggu

SEQ ID NO: 1949494 - RNA, 19 nt, Artificial Sequence
  Description of Artificial Sequence: Synthetic oligonucleotide
  Sense strand starting at position 1435 of SEQ ID NO: 1880199
ugcuuacuuggauacaguu

SEQ ID NO: 1949495 - RNA, 19 nt, Artificial Sequence
  Description of Artificial Sequence: Synthetic oligonucleotide
  Antisense strand to SEQ ID NO: 1949494
aacuguauccaaguaagca

SEQ ID NO: 1949496 - RNA, 19 nt, Artificial Sequence
  Description of Artificial Sequence: Synthetic oligonucleotide
  Sense strand starting at position 1616 of SEQ ID NO: 1880199
augauuaaaucugcugaac

SEQ ID NO: 1949497 - RNA, 19 nt, Artificial Sequence
  Description of Artificial Sequence: Synthetic oligonucleotide
  Antisense strand to SEQ ID NO: 1949496
guucagcagauuuaaucau

SEQ ID NO: 1949498 - RNA, 19 nt, Artificial Sequence
  Description of Artificial Sequence: Synthetic oligonucleotide
  Sense strand starting at position 1881 of SEQ ID NO: 1880199
agguguacucucuauguuc

SEQ ID NO: 1949499 - RNA, 19 nt, Artificial Sequence
  Description of Artificial Sequence: Synthetic oligonucleotide
  Antisense strand to SEQ ID NO: 1949498
gaacauagagaguacaccu

SEQ ID NO: 1949500 - RNA, 19 nt, Artificial Sequence
  Description of Artificial Sequence: Synthetic oligonucleotide
  Sense strand starting at position 1914 of SEQ ID NO: 1880199
uugggugccucaguuaaga

SEQ ID NO: 1949501 - RNA, 19 nt, Artificial Sequence
  Description of Artificial Sequence: Synthetic oligonucleotide
  Antisense strand to SEQ ID NO: 1949500
ucuuaacugaggcacccaa

SEQ ID NO: 1949502 - RNA, 19 nt, Artificial Sequence
  Description of Artificial Sequence: Synthetic oligonucleotide
  Sense strand starting at position 1916 of SEQ ID NO: 1880199
gggugccucaguuaagaua

SEQ ID NO: 1949503 - RNA, 19 nt, Artificial Sequence
  Description of Artificial Sequence: Synthetic oligonucleotide
  Antisense strand to SEQ ID NO: 1949502
uaucuuaacugaggcaccc

SEQ ID NO: 1949504 - RNA, 19 nt, Artificial Sequence
  Description of Artificial Sequence: Synthetic oligonucleotide
  Sense strand starting at position 1930 of SEQ ID NO: 1880199
agauaauggugguuaagau

SEQ ID NO: 1949505 - RNA, 19 nt, Artificial Sequence
  Description of Artificial Sequence: Synthetic oligonucleotide
  Antisense strand to SEQ ID NO: 1949504
aucuuaaccaccauuaucu

SEQ ID NO: 1949506 - RNA, 19 nt, Artificial Sequence
  Description of Artificial Sequence: Synthetic oligonucleotide
  Sense strand starting at position 1939 of SEQ ID NO: 1880199
ugguuaagauccucaucau

SEQ ID NO: 1949507 - RNA, 19 nt, Artificial Sequence
  Description of Artificial Sequence: Synthetic oligonucleotide
  Antisense strand to SEQ ID NO: 1949506
augaugaggaucuuaacca

SEQ ID NO: 1949508 - RNA, 19 nt, Artificial Sequence
  Description of Artificial Sequence: Synthetic oligonucleotide
  Sense strand starting at position 1940 of SEQ ID NO: 1880199
gguuaagauccucaucauu

SEQ ID NO: 1949509 - RNA, 19 nt, Artificial Sequence
  Description of Artificial Sequence: Synthetic oligonucleotide
  Antisense strand to SEQ ID NO: 1949508
aaugaugaggaucuuaacc

SEQ ID NO: 1949510 - RNA, 19 nt, Artificial Sequence
  Description of Artificial Sequence: Synthetic oligonucleotide
  Sense strand starting at position 1961 of SEQ ID NO: 1880199
agcacucaagaguagcaaa

SEQ ID NO: 1949511 - RNA, 19 nt, Artificial Sequence
  Description of Artificial Sequence: Synthetic oligonucleotide
  Antisense strand to SEQ ID NO: 1949510
uuugcuacucuugagugcu

SEQ ID NO: 1949512 - RNA, 19 nt, Artificial Sequence
  Description of Artificial Sequence: Synthetic oligonucleotide
  Sense strand starting at position 2418 of SEQ ID NO: 1880199
accaaugaugcagguaaca

SEQ ID NO: 1949513 - RNA, 19 nt, Artificial Sequence
  Description of Artificial Sequence: Synthetic oligonucleotide
  Antisense strand to SEQ ID NO: 1949512
uguuaccugcaucauuggu

SEQ ID NO: 1949514 - RNA, 19 nt, Artificial Sequence
  Description of Artificial Sequence: Synthetic oligonucleotide
  Sense strand starting at position 2443 of SEQ ID NO: 1880199
ucauuaucuagcgacaggu

SEQ ID NO: 1949515 - RNA, 19 nt, Artificial Sequence
  Description of Artificial Sequence: Synthetic oligonucleotide
  Antisense strand to SEQ ID NO: 1949514
accugucgcuagauaauga

SEQ ID NO: 1949516 - RNA, 19 nt, Artificial Sequence
  Description of Artificial Sequence: Synthetic oligonucleotide
  Sense strand starting at position 2445 of SEQ ID NO: 1880199
auuaucuagcgacagguaa

SEQ ID NO: 1949517 - RNA, 19 nt, Artificial Sequence
  Description of Artificial Sequence: Synthetic oligonucleotide
  Antisense strand to SEQ ID NO: 1949516
uuaccugucgcuagauaau

SEQ ID NO: 1949518 - RNA, 19 nt, Artificial Sequence
  Description of Artificial Sequence: Synthetic oligonucleotide
  Sense strand starting at position 2533 of SEQ ID NO: 1880199
guggcucacggcuuguaau

SEQ ID NO: 1949519 - RNA, 19 nt, Artificial Sequence
  Description of Artificial Sequence: Synthetic oligonucleotide
  Antisense strand to SEQ ID NO: 1949518
auuacaagccgugagccac

SEQ ID NO: 1949520 - RNA, 19 nt, Artificial Sequence
  Description of Artificial Sequence: Synthetic oligonucleotide
  Sense strand starting at position 2545 of SEQ ID NO: 1880199
uuguaaucccaguauguug

SEQ ID NO: 1949521 - RNA, 19 nt, Artificial Sequence
  Description of Artificial Sequence: Synthetic oligonucleotide
  Antisense strand to SEQ ID NO: 1949520
caacauacugggauuacaa

SEQ ID NO: 1949522 - RNA, 19 nt, Artificial Sequence
  Description of Artificial Sequence: Synthetic oligonucleotide
  Sense strand starting at position 2729 of SEQ ID NO: 1880199
ggagguugccauuaaccga

SEQ ID NO: 1949523 - RNA, 19 nt, Artificial Sequence
  Description of Artificial Sequence: Synthetic oligonucleotide
  Antisense strand to SEQ ID NO: 1949522
ucgguuaauggcaaccucc

SEQ ID NO: 1949524 - RNA, 19 nt, Artificial Sequence
  Description of Artificial Sequence: Synthetic oligonucleotide
  Sense strand starting at position 2914 of SEQ ID NO: 1880199
ggucacggcccuuaacaau

SEQ ID NO: 1949525 - RNA, 19 nt, Artificial Sequence
  Description of Artificial Sequence: Synthetic oligonucleotide
  Antisense strand to SEQ ID NO: 1949524
auuguuaagggccgugacc

SEQ ID NO: 1949526 - RNA, 19 nt, Artificial Sequence
  Description of Artificial Sequence: Synthetic oligonucleotide
  Sense strand starting at position 2920 of SEQ ID NO: 1880199
ggcccuuaacaauagcuua

SEQ ID NO: 1949527 - RNA, 19 nt, Artificial Sequence
  Description of Artificial Sequence: Synthetic oligonucleotide
  Antisense strand to SEQ ID NO: 1949526
uaagcuauuguuaagggcc

SEQ ID NO: 1949528 - RNA, 19 nt, Artificial Sequence
  Description of Artificial Sequence: Synthetic oligonucleotide
  Sense strand starting at position 3254 of SEQ ID NO: 1880199
gucgacuccuaccucgaaa

SEQ ID NO: 1949529 - RNA, 19 nt, Artificial Sequence
  Description of Artificial Sequence: Synthetic oligonucleotide
  Antisense strand to SEQ ID NO: 1949528
uuucgagguaggagucgac

SEQ ID NO: 1949530 - RNA, 19 nt, Artificial Sequence
  Description of Artificial Sequence: Synthetic oligonucleotide
  Sense strand starting at position 3288 of SEQ ID NO: 1880199
ugggcuccuguauauaaga

SEQ ID NO: 1949531 - RNA, 19 nt, Artificial Sequence
  Description of Artificial Sequence: Synthetic oligonucleotide
  Antisense strand to SEQ ID NO: 1949530
ucuuauauacaggagccca

SEQ ID NO: 1949532 - RNA, 19 nt, Artificial Sequence
  Description of Artificial Sequence: Synthetic oligonucleotide
  Sense strand starting at position 3290 of SEQ ID NO: 1880199
ggcuccuguauauaagagu

SEQ ID NO: 1949533 - RNA, 19 nt, Artificial Sequence
  Description of Artificial Sequence: Synthetic oligonucleotide
  Antisense strand to SEQ ID NO: 1949532
acucuuauauacaggagcc

SEQ ID NO: 1949534 - RNA, 19 nt, Artificial Sequence
  Description of Artificial Sequence: Synthetic oligonucleotide
  Sense strand starting at position 3575 of SEQ ID NO: 1880199
cgguguaaggcugagugau

SEQ ID NO: 1949535 - RNA, 19 nt, Artificial Sequence
  Description of Artificial Sequence: Synthetic oligonucleotide
  Antisense strand to SEQ ID NO: 1949534
aucacucagccuuacaccg

SEQ ID NO: 1949536 - RNA, 19 nt, Artificial Sequence
  Description of Artificial Sequence: Synthetic oligonucleotide
  Sense strand starting at position 3577 of SEQ ID NO: 1880199
guguaaggcugagugauuu

SEQ ID NO: 1949537 - RNA, 19 nt, Artificial Sequence
  Description of Artificial Sequence: Synthetic oligonucleotide
  Antisense strand to SEQ ID NO: 1949536
aaaucacucagccuuacac

SEQ ID NO: 1949538 - RNA, 19 nt, Artificial Sequence
  Description of Artificial Sequence: Synthetic oligonucleotide
  Sense strand starting at position 49 of SEQ ID NO: 1880200
uuggcagaaucauuacauc

SEQ ID NO: 1949539 - RNA, 19 nt, Artificial Sequence
  Description of Artificial Sequence: Synthetic oligonucleotide
  Antisense strand to SEQ ID NO: 1949538
gauguaaugauucugccaa

SEQ ID NO: 1949540 - RNA, 19 nt, Artificial Sequence
  Description of Artificial Sequence: Synthetic oligonucleotide
  Sense strand starting at position 57 of SEQ ID NO: 1880200
aucauuacaucauugguua

SEQ ID NO: 1949541 - RNA, 19 nt, Artificial Sequence
  Description of Artificial Sequence: Synthetic oligonucleotide
  Antisense strand to SEQ ID NO: 1949540
uaaccaaugauguaaugau

SEQ ID NO: 1949542 - RNA, 19 nt, Artificial Sequence
  Description of Artificial Sequence: Synthetic oligonucleotide
  Sense strand starting at position 61 of SEQ ID NO: 1880200
uuacaucauugguuacacu

SEQ ID NO: 1949543 - RNA, 19 nt, Artificial Sequence
  Description of Artificial Sequence: Synthetic oligonucleotide
  Antisense strand to SEQ ID NO: 1949542
aguguaaccaaugauguaa

SEQ ID NO: 1949544 - RNA, 19 nt, Artificial Sequence
  Description of Artificial Sequence: Synthetic oligonucleotide
  Sense strand starting at position 105 of SEQ ID NO: 1880200
ugacucaccuaguuuagga

SEQ ID NO: 1949545 - RNA, 19 nt, Artificial Sequence
  Description of Artificial Sequence: Synthetic oligonucleotide
  Antisense strand to SEQ ID NO: 1949544
uccuaaacuaggugaguca

SEQ ID NO: 1949546 - RNA, 19 nt, Artificial Sequence
  Description of Artificial Sequence: Synthetic oligonucleotide
  Sense strand starting at position 319 of SEQ ID NO: 1880200
caugaauucugaguccuga

SEQ ID NO: 1949547 - RNA, 19 nt, Artificial Sequence
  Description of Artificial Sequence: Synthetic oligonucleotide
  Antisense strand to SEQ ID NO: 1949546
ucaggacucagaauucaug

SEQ ID NO: 1949548 - RNA, 19 nt, Artificial Sequence
  Description of Artificial Sequence: Synthetic oligonucleotide
  Sense strand starting at position 444 of SEQ ID NO: 1880200
gaauguuaccgccagauac

SEQ ID NO: 1949549 - RNA, 19 nt, Artificial Sequence
  Description of Artificial Sequence: Synthetic oligonucleotide
  Antisense strand to SEQ ID NO: 1949548
guaucuggcgguaacauuc

SEQ ID NO: 1949550 - RNA, 19 nt, Artificial Sequence
  Description of Artificial Sequence: Synthetic oligonucleotide
  Sense strand starting at position 446 of SEQ ID NO: 1880200
auguuaccgccagauacau

SEQ ID NO: 1949551 - RNA, 19 nt, Artificial Sequence
  Description of Artificial Sequence: Synthetic oligonucleotide
  Antisense strand to SEQ ID NO: 1949550
auguaucuggcgguaacau

SEQ ID NO: 1949552 - RNA, 19 nt, Artificial Sequence
  Description of Artificial Sequence: Synthetic oligonucleotide
  Sense strand starting at position 455 of SEQ ID NO: 1880200
ccagauacaucagauagga

SEQ ID NO: 1949553 - RNA, 19 nt, Artificial Sequence
  Description of Artificial Sequence: Synthetic oligonucleotide
  Antisense strand to SEQ ID NO: 1949552
uccuaucugauguaucugg

SEQ ID NO: 1949554 - RNA, 19 nt, Artificial Sequence
  Description of Artificial Sequence: Synthetic oligonucleotide
  Sense strand starting at position 490 of SEQ ID NO: 1880200
ugcucaucagcguuagucu

SEQ ID NO: 1949555 - RNA, 19 nt, Artificial Sequence
  Description of Artificial Sequence: Synthetic oligonucleotide
  Antisense strand to SEQ ID NO: 1949554
agacuaacgcugaugagca

SEQ ID NO: 1949556 - RNA, 19 nt, Artificial Sequence
  Description of Artificial Sequence: Synthetic oligonucleotide
  Sense strand starting at position 498 of SEQ ID NO: 1880200
agcguuagucugcugaacu

SEQ ID NO: 1949557 - RNA, 19 nt, Artificial Sequence
  Description of Artificial Sequence: Synthetic oligonucleotide
  Antisense strand to SEQ ID NO: 1949556
aguucagcagacuaacgcu

SEQ ID NO: 1949558 - RNA, 19 nt, Artificial Sequence
  Description of Artificial Sequence: Synthetic oligonucleotide
  Sense strand starting at position 515 of SEQ ID NO: 1880200
cuauguuaucaucauugua

SEQ ID NO: 1949559 - RNA, 19 nt, Artificial Sequence
  Description of Artificial Sequence: Synthetic oligonucleotide
  Antisense strand to SEQ ID NO: 1949558
uacaaugaugauaacauag

SEQ ID NO: 1949560 - RNA, 19 nt, Artificial Sequence
  Description of Artificial Sequence: Synthetic oligonucleotide
  Sense strand starting at position 517 of SEQ ID NO: 1880200
auguuaucaucauuguauc

SEQ ID NO: 1949561 - RNA, 19 nt, Artificial Sequence
  Description of Artificial Sequence: Synthetic oligonucleotide
  Antisense strand to SEQ ID NO: 1949560
gauacaaugaugauaacau

SEQ ID NO: 1949562 - RNA, 19 nt, Artificial Sequence
  Description of Artificial Sequence: Synthetic oligonucleotide
  Sense strand starting at position 529 of SEQ ID NO: 1880200
uuguaucggcuuuacaaca

SEQ ID NO: 1949563 - RNA, 19 nt, Artificial Sequence
  Description of Artificial Sequence: Synthetic oligonucleotide
  Antisense strand to SEQ ID NO: 1949562
uguuguaaagccgauacaa

SEQ ID NO: 1949564 - RNA, 19 nt, Artificial Sequence
  Description of Artificial Sequence: Synthetic oligonucleotide
  Sense strand starting at position 1143 of SEQ ID NO: 1880200
gcaagucauccauggauaa

SEQ ID NO: 1949565 - RNA, 19 nt, Artificial Sequence
  Description of Artificial Sequence: Synthetic oligonucleotide
  Antisense strand to SEQ ID NO: 1949564
uuauccauggaugacuugc

SEQ ID NO: 1949566 - RNA, 19 nt, Artificial Sequence
  Description of Artificial Sequence: Synthetic oligonucleotide
  Sense strand starting at position 1526 of SEQ ID NO: 1880200
aagaaauaagaguggucuu

SEQ ID NO: 1949567 - RNA, 19 nt, Artificial Sequence
  Description of Artificial Sequence: Synthetic oligonucleotide
  Antisense strand to SEQ ID NO: 1949566
aagaccacucuuauuucuu

SEQ ID NO: 1949568 - RNA, 19 nt, Artificial Sequence
  Description of Artificial Sequence: Synthetic oligonucleotide
  Sense strand starting at position 1527 of SEQ ID NO: 1880200
agaaauaagaguggucuua

SEQ ID NO: 1949569 - RNA, 19 nt, Artificial Sequence
  Description of Artificial Sequence: Synthetic oligonucleotide
  Antisense strand to SEQ ID NO: 1949568
uaagaccacucuuauuucu

SEQ ID NO: 1949570 - RNA, 19 nt, Artificial Sequence
  Description of Artificial Sequence: Synthetic oligonucleotide
  Sense strand starting at position 1529 of SEQ ID NO: 1880200
aaauaagaguggucuuaga

SEQ ID NO: 1949571 - RNA, 19 nt, Artificial Sequence
  Description of Artificial Sequence: Synthetic oligonucleotide
  Antisense strand to SEQ ID NO: 1949570
ucuaagaccacucuuauuu

SEQ ID NO: 1949572 - RNA, 19 nt, Artificial Sequence
  Description of Artificial Sequence: Synthetic oligonucleotide
  Sense strand starting at position 1631 of SEQ ID NO: 1880200
gucagcauuugcuuaucau

SEQ ID NO: 1949573 - RNA, 19 nt, Artificial Sequence
  Description of Artificial Sequence: Synthetic oligonucleotide
  Antisense strand to SEQ ID NO: 1949572
augauaagcaaaugcugac

SEQ ID NO: 1949574 - RNA, 19 nt, Artificial Sequence
  Description of Artificial Sequence: Synthetic oligonucleotide
  Sense strand starting at position 1758 of SEQ ID NO: 1880200
uaggaaguuugcccaguua

SEQ ID NO: 1949575 - RNA, 19 nt, Artificial Sequence
  Description of Artificial Sequence: Synthetic oligonucleotide
  Antisense strand to SEQ ID NO: 1949574
uaacugggcaaacuuccua

SEQ ID NO: 1949576 - RNA, 19 nt, Artificial Sequence
  Description of Artificial Sequence: Synthetic oligonucleotide
  Sense strand starting at position 1774 of SEQ ID NO: 1880200
uuaccugcuuacuuggaua

SEQ ID NO: 1949577 - RNA, 19 nt, Artificial Sequence
  Description of Artificial Sequence: Synthetic oligonucleotide
  Antisense strand to SEQ ID NO: 1949576
uauccaaguaagcagguaa

SEQ ID NO: 1949578 - RNA, 19 nt, Artificial Sequence
  Description of Artificial Sequence: Synthetic oligonucleotide
  Sense strand starting at position 1776 of SEQ ID NO: 1880200
accugcuuacuuggauaca

SEQ ID NO: 1949579 - RNA, 19 nt, Artificial Sequence
  Description of Artificial Sequence: Synthetic oligonucleotide
  Antisense strand to SEQ ID NO: 1949578
uguauccaaguaagcaggu

SEQ ID NO: 1949580 - RNA, 19 nt, Artificial Sequence
  Description of Artificial Sequence: Synthetic oligonucleotide
  Sense strand starting at position 1779 of SEQ ID NO: 1880200
ugcuuacuuggauacaguu

SEQ ID NO: 1949581 - RNA, 19 nt, Artificial Sequence
  Description of Artificial Sequence: Synthetic oligonucleotide
  Antisense strand to SEQ ID NO: 1949580
aacuguauccaaguaagca

SEQ ID NO: 1949582 - RNA, 19 nt, Artificial Sequence
  Description of Artificial Sequence: Synthetic oligonucleotide
  Sense strand starting at position 1960 of SEQ ID NO: 1880200
augauuaaaucugcugaac

SEQ ID NO: 1949583 - RNA, 19 nt, Artificial Sequence
  Description of Artificial Sequence: Synthetic oligonucleotide
  Antisense strand to SEQ ID NO: 1949582
guucagcagauuuaaucau

SEQ ID NO: 1949584 - RNA, 19 nt, Artificial Sequence
  Description of Artificial Sequence: Synthetic oligonucleotide
  Sense strand starting at position 2225 of SEQ ID NO: 1880200
agguguacucucuauguuc

SEQ ID NO: 1949585 - RNA, 19 nt, Artificial Sequence
  Description of Artificial Sequence: Synthetic oligonucleotide
  Antisense strand to SEQ ID NO: 1949584
gaacauagagaguacaccu

SEQ ID NO: 1949586 - RNA, 19 nt, Artificial Sequence
  Description of Artificial Sequence: Synthetic oligonucleotide
  Sense strand starting at position 2260 of SEQ ID NO: 1880200
gggugccucaguuaagaua

SEQ ID NO: 1949587 - RNA, 19 nt, Artificial Sequence
  Description of Artificial Sequence: Synthetic oligonucleotide
  Antisense strand to SEQ ID NO: 1949586
uaucuuaacugaggcaccc

SEQ ID NO: 1949588 - RNA, 19 nt, Artificial Sequence
  Description of Artificial Sequence: Synthetic oligonucleotide
  Sense strand starting at position 2274 of SEQ ID NO: 1880200
agauaauggugguuaagau

SEQ ID NO: 1949589 - RNA, 19 nt, Artificial Sequence
  Description of Artificial Sequence: Synthetic oligonucleotide
  Antisense strand to SEQ ID NO: 1949588
aucuuaaccaccauuaucu

SEQ ID NO: 1949590 - RNA, 19 nt, Artificial Sequence
  Description of Artificial Sequence: Synthetic oligonucleotide
  Sense strand starting at position 2283 of SEQ ID NO: 1880200
ugguuaagauccucaucau

SEQ ID NO: 1949591 - RNA, 19 nt, Artificial Sequence
  Description of Artificial Sequence: Synthetic oligonucleotide
  Antisense strand to SEQ ID NO: 1949590
augaugaggaucuuaacca

SEQ ID NO: 1949592 - RNA, 19 nt, Artificial Sequence
  Description of Artificial Sequence: Synthetic oligonucleotide
  Sense strand starting at position 2284 of SEQ ID NO: 1880200
gguuaagauccucaucauu

SEQ ID NO: 1949593 - RNA, 19 nt, Artificial Sequence
  Description of Artificial Sequence: Synthetic oligonucleotide
  Antisense strand to SEQ ID NO: 1949592
aaugaugaggaucuuaacc

SEQ ID NO: 1949594 - RNA, 19 nt, Artificial Sequence
  Description of Artificial Sequence: Synthetic oligonucleotide
  Sense strand starting at position 2305 of SEQ ID NO: 1880200
agcacucaagaguagcaaa

SEQ ID NO: 1949595 - RNA, 19 nt, Artificial Sequence
  Description of Artificial Sequence: Synthetic oligonucleotide
  Antisense strand to SEQ ID NO: 1949594
uuugcuacucuugagugcu

SEQ ID NO: 1949596 - RNA, 19 nt, Artificial Sequence
  Description of Artificial Sequence: Synthetic oligonucleotide
  Sense strand starting at position 2762 of SEQ ID NO: 1880200
accaaugaugcagguaaca

SEQ ID NO: 1949597 - RNA, 19 nt, Artificial Sequence
  Description of Artificial Sequence: Synthetic oligonucleotide
  Antisense strand to SEQ ID NO: 1949596
uguuaccugcaucauuggu

SEQ ID NO: 1949598 - RNA, 19 nt, Artificial Sequence
  Description of Artificial Sequence: Synthetic oligonucleotide
  Sense strand starting at position 2787 of SEQ ID NO: 1880200
ucauuaucuagcgacaggu

SEQ ID NO: 1949599 - RNA, 19 nt, Artificial Sequence
  Description of Artificial Sequence: Synthetic oligonucleotide
  Antisense strand to SEQ ID NO: 1949598
accugucgcuagauaauga

SEQ ID NO: 1949600 - RNA, 19 nt, Artificial Sequence
  Description of Artificial Sequence: Synthetic oligonucleotide
  Sense strand starting at position 2789 of SEQ ID NO: 1880200
auuaucuagcgacagguaa

SEQ ID NO: 1949601 - RNA, 19 nt, Artificial Sequence
  Description of Artificial Sequence: Synthetic oligonucleotide
  Antisense strand to SEQ ID NO: 1949600
uuaccugucgcuagauaau

SEQ ID NO: 1949602 - RNA, 19 nt, Artificial Sequence
  Description of Artificial Sequence: Synthetic oligonucleotide
  Sense strand starting at position 2877 of SEQ ID NO: 1880200
guggcucacggcuuguaau

SEQ ID NO: 1949603 - RNA, 19 nt, Artificial Sequence
  Description of Artificial Sequence: Synthetic oligonucleotide
  Antisense strand to SEQ ID NO: 1949602
auuacaagccgugagccac

SEQ ID NO: 1949604 - RNA, 19 nt, Artificial Sequence
  Description of Artificial Sequence: Synthetic oligonucleotide
  Sense strand starting at position 2889 of SEQ ID NO: 1880200
uuguaaucccaguauguug

SEQ ID NO: 1949605 - RNA, 19 nt, Artificial Sequence
  Description of Artificial Sequence: Synthetic oligonucleotide
  Antisense strand to SEQ ID NO: 1949604
caacauacugggauuacaa

SEQ ID NO: 1949606 - RNA, 19 nt, Artificial Sequence
  Description of Artificial Sequence: Synthetic oligonucleotide
  Sense strand starting at position 3073 of SEQ ID NO: 1880200
ggagguugccauuaaccga

SEQ ID NO: 1949607 - RNA, 19 nt, Artificial Sequence
  Description of Artificial Sequence: Synthetic oligonucleotide
  Antisense strand to SEQ ID NO: 1949606
ucgguuaauggcaaccucc

SEQ ID NO: 1949608 - RNA, 19 nt, Artificial Sequence
  Description of Artificial Sequence: Synthetic oligonucleotide
  Sense strand starting at position 3258 of SEQ ID NO: 1880200
ggucacggcccuuaacaau

SEQ ID NO: 1949609 - RNA, 19 nt, Artificial Sequence
  Description of Artificial Sequence: Synthetic oligonucleotide
  Antisense strand to SEQ ID NO: 1949608
auuguuaagggccgugacc

SEQ ID NO: 1949610 - RNA, 19 nt, Artificial Sequence
  Description of Artificial Sequence: Synthetic oligonucleotide
  Sense strand starting at position 3264 of SEQ ID NO: 1880200
ggcccuuaacaauagcuua

SEQ ID NO: 1949611 - RNA, 19 nt, Artificial Sequence
  Description of Artificial Sequence: Synthetic oligonucleotide
  Antisense strand to SEQ ID NO: 1949610
uaagcuauuguuaagggcc

SEQ ID NO: 1949612 - RNA, 19 nt, Artificial Sequence
  Description of Artificial Sequence: Synthetic oligonucleotide
  Sense strand starting at position 3632 of SEQ ID NO: 1880200
ugggcuccuguauauaaga

SEQ ID NO: 1949613 - RNA, 19 nt, Artificial Sequence
  Description of Artificial Sequence: Synthetic oligonucleotide
  Antisense strand to SEQ ID NO: 1949612
ucuuauauacaggagccca

SEQ ID NO: 1949614 - RNA, 19 nt, Artificial Sequence
  Description of Artificial Sequence: Synthetic oligonucleotide
  Sense strand starting at position 3634 of SEQ ID NO: 1880200
ggcuccuguauauaagagu

SEQ ID NO: 1949615 - RNA, 19 nt, Artificial Sequence
  Description of Artificial Sequence: Synthetic oligonucleotide
  Antisense strand to SEQ ID NO: 1949614
acucuuauauacaggagcc

SEQ ID NO: 1949616 - RNA, 19 nt, Artificial Sequence
  Description of Artificial Sequence: Synthetic oligonucleotide
  Sense strand starting at position 3921 of SEQ ID NO: 1880200
guguaaggcugagugauuu

SEQ ID NO: 1949617 - RNA, 19 nt, Artificial Sequence
  Description of Artificial Sequence: Synthetic oligonucleotide
  Antisense strand to SEQ ID NO: 1949616
aaaucacucagccuuacac

SEQ ID NO: 1949618 - RNA, 19 nt, Artificial Sequence
  Description of Artificial Sequence: Synthetic oligonucleotide
  Sense strand starting at position 485 of SEQ ID NO: 1880201
ucaaguaaucagugagaga

SEQ ID NO: 1949619 - RNA, 19 nt, Artificial Sequence
  Description of Artificial Sequence: Synthetic oligonucleotide
  Antisense strand to SEQ ID NO: 1949618
ucucucacugauuacuuga

SEQ ID NO: 1949620 - RNA, 19 nt, Artificial Sequence
  Description of Artificial Sequence: Synthetic oligonucleotide
  Sense strand starting at position 501 of SEQ ID NO: 1880201
agaguucaaguuggauuga

SEQ ID NO: 1949621 - RNA, 19 nt, Artificial Sequence
  Description of Artificial Sequence: Synthetic oligonucleotide
  Antisense strand to SEQ ID NO: 1949620
ucaauccaacuugaacucu

SEQ ID NO: 1949622 - RNA, 19 nt, Artificial Sequence
  Description of Artificial Sequence: Synthetic oligonucleotide
  Sense strand starting at position 734 of SEQ ID NO: 1880201
uuggcagaaucauuacauc

SEQ ID NO: 1949623 - RNA, 19 nt, Artificial Sequence
  Description of Artificial Sequence: Synthetic oligonucleotide
  Antisense strand to SEQ ID NO: 1949622
gauguaaugauucugccaa

SEQ ID NO: 1949624 - RNA, 19 nt, Artificial Sequence
  Description of Artificial Sequence: Synthetic oligonucleotide
  Sense strand starting at position 742 of SEQ ID NO: 1880201
aucauuacaucauugguua

SEQ ID NO: 1949625 - RNA, 19 nt, Artificial Sequence
  Description of Artificial Sequence: Synthetic oligonucleotide
  Antisense strand to SEQ ID NO: 1949624
uaaccaaugauguaaugau

SEQ ID NO: 1949626 - RNA, 19 nt, Artificial Sequence
  Description of Artificial Sequence: Synthetic oligonucleotide
  Sense strand starting at position 746 of SEQ ID NO: 1880201
uuacaucauugguuacacu

SEQ ID NO: 1949627 - RNA, 19 nt, Artificial Sequence
  Description of Artificial Sequence: Synthetic oligonucleotide
  Antisense strand to SEQ ID NO: 1949626
aguguaaccaaugauguaa

SEQ ID NO: 1949628 - RNA, 19 nt, Artificial Sequence
  Description of Artificial Sequence: Synthetic oligonucleotide
  Sense strand starting at position 790 of SEQ ID NO: 1880201
ugacucaccuaguuuagga

SEQ ID NO: 1949629 - RNA, 19 nt, Artificial Sequence
  Description of Artificial Sequence: Synthetic oligonucleotide
  Antisense strand to SEQ ID NO: 1949628
uccuaaacuaggugaguca

SEQ ID NO: 1949630 - RNA, 19 nt, Artificial Sequence
  Description of Artificial Sequence: Synthetic oligonucleotide
  Sense strand starting at position 1004 of SEQ ID NO: 1880201
caugaauucugaguccuga

SEQ ID NO: 1949631 - RNA, 19 nt, Artificial Sequence
  Description of Artificial Sequence: Synthetic oligonucleotide
  Antisense strand to SEQ ID NO: 1949630
ucaggacucagaauucaug

SEQ ID NO: 1949632 - RNA, 19 nt, Artificial Sequence
  Description of Artificial Sequence: Synthetic oligonucleotide
  Sense strand starting at position 1129 of SEQ ID NO: 1880201
gaauguuaccgccagauac

SEQ ID NO: 1949633 - RNA, 19 nt, Artificial Sequence
  Description of Artificial Sequence: Synthetic oligonucleotide
  Antisense strand to SEQ ID NO: 1949632
guaucuggcgguaacauuc

SEQ ID NO: 1949634 - RNA, 19 nt, Artificial Sequence
  Description of Artificial Sequence: Synthetic oligonucleotide
  Sense strand starting at position 1131 of SEQ ID NO: 1880201
auguuaccgccagauacau

SEQ ID NO: 1949635 - RNA, 19 nt, Artificial Sequence
  Description of Artificial Sequence: Synthetic oligonucleotide
  Antisense strand to SEQ ID NO: 1949634
auguaucuggcgguaacau

SEQ ID NO: 1949636 - RNA, 19 nt, Artificial Sequence
  Description of Artificial Sequence: Synthetic oligonucleotide
  Sense strand starting at position 1140 of SEQ ID NO: 1880201
ccagauacaucagauagga

SEQ ID NO: 1949637 - RNA, 19 nt, Artificial Sequence
  Description of Artificial Sequence: Synthetic oligonucleotide
  Antisense strand to SEQ ID NO: 1949636
uccuaucugauguaucugg

SEQ ID NO: 1949638 - RNA, 19 nt, Artificial Sequence
  Description of Artificial Sequence: Synthetic oligonucleotide
  Sense strand starting at position 1175 of SEQ ID NO: 1880201
ugcucaucagcguuagucu

SEQ ID NO: 1949639 - RNA, 19 nt, Artificial Sequence
  Description of Artificial Sequence: Synthetic oligonucleotide
  Antisense strand to SEQ ID NO: 1949638
agacuaacgcugaugagca

SEQ ID NO: 1949640 - RNA, 19 nt, Artificial Sequence
  Description of Artificial Sequence: Synthetic oligonucleotide
  Sense strand starting at position 1183 of SEQ ID NO: 1880201
agcguuagucugcugaacu

SEQ ID NO: 1949641 - RNA, 19 nt, Artificial Sequence
  Description of Artificial Sequence: Synthetic oligonucleotide
  Antisense strand to SEQ ID NO: 1949640
aguucagcagacuaacgcu

SEQ ID NO: 1949642 - RNA, 19 nt, Artificial Sequence
  Description of Artificial Sequence: Synthetic oligonucleotide
  Sense strand starting at position 1200 of SEQ ID NO: 1880201
cuauguuaucaucauugua

SEQ ID NO: 1949643 - RNA, 19 nt, Artificial Sequence
  Description of Artificial Sequence: Synthetic oligonucleotide
  Antisense strand to SEQ ID NO: 1949642
uacaaugaugauaacauag

SEQ ID NO: 1949644 - RNA, 19 nt, Artificial Sequence
  Description of Artificial Sequence: Synthetic oligonucleotide
  Sense strand starting at position 1202 of SEQ ID NO: 1880201
auguuaucaucauuguauc

SEQ ID NO: 1949645 - RNA, 19 nt, Artificial Sequence
  Description of Artificial Sequence: Synthetic oligonucleotide
  Antisense strand to SEQ ID NO: 1949644
gauacaaugaugauaacau

SEQ ID NO: 1949646 - RNA, 19 nt, Artificial Sequence
  Description of Artificial Sequence: Synthetic oligonucleotide
  Sense strand starting at position 1214 of SEQ ID NO: 1880201
uuguaucggcuuuacaaca

SEQ ID NO: 1949647 - RNA, 19 nt, Artificial Sequence
  Description of Artificial Sequence: Synthetic oligonucleotide
  Antisense strand to SEQ ID NO: 1949646
uguuguaaagccgauacaa

SEQ ID NO: 1949648 - RNA, 19 nt, Artificial Sequence
  Description of Artificial Sequence: Synthetic oligonucleotide
  Sense strand starting at position 1828 of SEQ ID NO: 1880201
gcaagucauccauggauaa

SEQ ID NO: 1949649 - RNA, 19 nt, Artificial Sequence
  Description of Artificial Sequence: Synthetic oligonucleotide
  Antisense strand to SEQ ID NO: 1949648
uuauccauggaugacuugc

SEQ ID NO: 1949650 - RNA, 19 nt, Artificial Sequence
  Description of Artificial Sequence: Synthetic oligonucleotide
  Sense strand starting at position 2211 of SEQ ID NO: 1880201
aagaaauaagaguggucuu

SEQ ID NO: 1949651 - RNA, 19 nt, Artificial Sequence
  Description of Artificial Sequence: Synthetic oligonucleotide
  Antisense strand to SEQ ID NO: 1949650
aagaccacucuuauuucuu

SEQ ID NO: 1949652 - RNA, 19 nt, Artificial Sequence
  Description of Artificial Sequence: Synthetic oligonucleotide
  Sense strand starting at position 2212 of SEQ ID NO: 1880201
agaaauaagaguggucuua

SEQ ID NO: 1949653 - RNA, 19 nt, Artificial Sequence
  Description of Artificial Sequence: Synthetic oligonucleotide
  Antisense strand to SEQ ID NO: 1949652
uaagaccacucuuauuucu

SEQ ID NO: 1949654 - RNA, 19 nt, Artificial Sequence
  Description of Artificial Sequence: Synthetic oligonucleotide
  Sense strand starting at position 2214 of SEQ ID NO: 1880201
aaauaagaguggucuuaga

SEQ ID NO: 1949655 - RNA, 19 nt, Artificial Sequence
  Description of Artificial Sequence: Synthetic oligonucleotide
  Antisense strand to SEQ ID NO: 1949654
ucuaagaccacucuuauuu

SEQ ID NO: 1949656 - RNA, 19 nt, Artificial Sequence
  Description of Artificial Sequence: Synthetic oligonucleotide
  Sense strand starting at position 2316 of SEQ ID NO: 1880201
gucagcauuugcuuaucau

SEQ ID NO: 1949657 - RNA, 19 nt, Artificial Sequence
  Description of Artificial Sequence: Synthetic oligonucleotide
  Antisense strand to SEQ ID NO: 1949656
augauaagcaaaugcugac

SEQ ID NO: 1949658 - RNA, 19 nt, Artificial Sequence
  Description of Artificial Sequence: Synthetic oligonucleotide
  Sense strand starting at position 2443 of SEQ ID NO: 1880201
uaggaaguuugcccaguua

SEQ ID NO: 1949659 - RNA, 19 nt, Artificial Sequence
  Description of Artificial Sequence: Synthetic oligonucleotide
  Antisense strand to SEQ ID NO: 1949658
uaacugggcaaacuuccua

SEQ ID NO: 1949660 - RNA, 19 nt, Artificial Sequence
  Description of Artificial Sequence: Synthetic oligonucleotide
  Sense strand starting at position 2459 of SEQ ID NO: 1880201
uuaccugcuuacuuggaua

SEQ ID NO: 1949661 - RNA, 19 nt, Artificial Sequence
  Description of Artificial Sequence: Synthetic oligonucleotide
  Antisense strand to SEQ ID NO: 1949660
uauccaaguaagcagguaa

SEQ ID NO: 1949662 - RNA, 19 nt, Artificial Sequence
  Description of Artificial Sequence: Synthetic oligonucleotide
  Sense strand starting at position 2461 of SEQ ID NO: 1880201
accugcuuacuuggauaca

SEQ ID NO: 1949663 - RNA, 19 nt, Artificial Sequence
  Description of Artificial Sequence: Synthetic oligonucleotide
  Antisense strand to SEQ ID NO: 1949662
uguauccaaguaagcaggu

SEQ ID NO: 1949664 - RNA, 19 nt, Artificial Sequence
  Description of Artificial Sequence: Synthetic oligonucleotide
  Sense strand starting at position 2464 of SEQ ID NO: 1880201
ugcuuacuuggauacaguu

SEQ ID NO: 1949665 - RNA, 19 nt, Artificial Sequence
  Description of Artificial Sequence: Synthetic oligonucleotide
  Antisense strand to SEQ ID NO: 1949664
aacuguauccaaguaagca

SEQ ID NO: 1949666 - RNA, 19 nt, Artificial Sequence
  Description of Artificial Sequence: Synthetic oligonucleotide
  Sense strand starting at position 2645 of SEQ ID NO: 1880201
augauuaaaucugcugaac

SEQ ID NO: 1949667 - RNA, 19 nt, Artificial Sequence
  Description of Artificial Sequence: Synthetic oligonucleotide
  Antisense strand to SEQ ID NO: 1949666
guucagcagauuuaaucau

SEQ ID NO: 1949668 - RNA, 19 nt, Artificial Sequence
  Description of Artificial Sequence: Synthetic oligonucleotide
  Sense strand starting at position 2910 of SEQ ID NO: 1880201
agguguacucucuauguuc

SEQ ID NO: 1949669 - RNA, 19 nt, Artificial Sequence
  Description of Artificial Sequence: Synthetic oligonucleotide
  Antisense strand to SEQ ID NO: 1949668
gaacauagagaguacaccu

SEQ ID NO: 1949670 - RNA, 19 nt, Artificial Sequence
  Description of Artificial Sequence: Synthetic oligonucleotide
  Sense strand starting at position 2943 of SEQ ID NO: 1880201
uugggugccucaguuaaga

SEQ ID NO: 1949671 - RNA, 19 nt, Artificial Sequence
  Description of Artificial Sequence: Synthetic oligonucleotide
  Antisense strand to SEQ ID NO: 1949670
ucuuaacugaggcacccaa

SEQ ID NO: 1949672 - RNA, 19 nt, Artificial Sequence
  Description of Artificial Sequence: Synthetic oligonucleotide
  Sense strand starting at position 2945 of SEQ ID NO: 1880201
gggugccucaguuaagaua

SEQ ID NO: 1949673 - RNA, 19 nt, Artificial Sequence
  Description of Artificial Sequence: Synthetic oligonucleotide
  Antisense strand to SEQ ID NO: 1949672
uaucuuaacugaggcaccc

SEQ ID NO: 1949674 - RNA, 19 nt, Artificial Sequence
  Description of Artificial Sequence: Synthetic oligonucleotide
  Sense strand starting at position 2959 of SEQ ID NO: 1880201
agauaauggugguuaagau

SEQ ID NO: 1949675 - RNA, 19 nt, Artificial Sequence
  Description of Artificial Sequence: Synthetic oligonucleotide
  Antisense strand to SEQ ID NO: 1949674
aucuuaaccaccauuaucu

SEQ ID NO: 1949676 - RNA, 19 nt, Artificial Sequence
  Description of Artificial Sequence: Synthetic oligonucleotide
  Sense strand starting at position 2968 of SEQ ID NO: 1880201
ugguuaagauccucaucau

SEQ ID NO: 1949677 - RNA, 19 nt, Artificial Sequence
  Description of Artificial Sequence: Synthetic oligonucleotide
  Antisense strand to SEQ ID NO: 1949676
augaugaggaucuuaacca

SEQ ID NO: 1949678 - RNA, 19 nt, Artificial Sequence
  Description of Artificial Sequence: Synthetic oligonucleotide
  Sense strand starting at position 2969 of SEQ ID NO: 1880201
gguuaagauccucaucauu

SEQ ID NO: 1949679 - RNA, 19 nt, Artificial Sequence
  Description of Artificial Sequence: Synthetic oligonucleotide
  Antisense strand to SEQ ID NO: 1949678
aaugaugaggaucuuaacc

SEQ ID NO: 1949680 - RNA, 19 nt, Artificial Sequence
  Description of Artificial Sequence: Synthetic oligonucleotide
  Sense strand starting at position 2990 of SEQ ID NO: 1880201
agcacucaagaguagcaaa

SEQ ID NO: 1949681 - RNA, 19 nt, Artificial Sequence
  Description of Artificial Sequence: Synthetic oligonucleotide
  Antisense strand to SEQ ID NO: 1949680
uuugcuacucuugagugcu

SEQ ID NO: 1949682 - RNA, 19 nt, Artificial Sequence
  Description of Artificial Sequence: Synthetic oligonucleotide
  Sense strand starting at position 3447 of SEQ ID NO: 1880201
accaaugaugcagguaaca

SEQ ID NO: 1949683 - RNA, 19 nt, Artificial Sequence
  Description of Artificial Sequence: Synthetic oligonucleotide
  Antisense strand to SEQ ID NO: 1949682
uguuaccugcaucauuggu

SEQ ID NO: 1949684 - RNA, 19 nt, Artificial Sequence
  Description of Artificial Sequence: Synthetic oligonucleotide
  Sense strand starting at position 3472 of SEQ ID NO: 1880201
ucauuaucuagcgacaggu

SEQ ID NO: 1949685 - RNA, 19 nt, Artificial Sequence
  Description of Artificial Sequence: Synthetic oligonucleotide
  Antisense strand to SEQ ID NO: 1949684
accugucgcuagauaauga

SEQ ID NO: 1949686 - RNA, 19 nt, Artificial Sequence
  Description of Artificial Sequence: Synthetic oligonucleotide
  Sense strand starting at position 3474 of SEQ ID NO: 1880201
auuaucuagcgacagguaa

SEQ ID NO: 1949687 - RNA, 19 nt, Artificial Sequence
  Description of Artificial Sequence: Synthetic oligonucleotide
  Antisense strand to SEQ ID NO: 1949686
uuaccugucgcuagauaau

SEQ ID NO: 1949688 - RNA, 19 nt, Artificial Sequence
  Description of Artificial Sequence: Synthetic oligonucleotide
  Sense strand starting at position 3562 of SEQ ID NO: 1880201
guggcucacggcuuguaau

SEQ ID NO: 1949689 - RNA, 19 nt, Artificial Sequence
  Description of Artificial Sequence: Synthetic oligonucleotide
  Antisense strand to SEQ ID NO: 1949688
auuacaagccgugagccac

SEQ ID NO: 1949690 - RNA, 19 nt, Artificial Sequence
  Description of Artificial Sequence: Synthetic oligonucleotide
  Sense strand starting at position 3574 of SEQ ID NO: 1880201
uuguaaucccaguauguug

SEQ ID NO: 1949691 - RNA, 19 nt, Artificial Sequence
  Description of Artificial Sequence: Synthetic oligonucleotide
  Antisense strand to SEQ ID NO: 1949690
caacauacugggauuacaa

SEQ ID NO: 1949692 - RNA, 19 nt, Artificial Sequence
  Description of Artificial Sequence: Synthetic oligonucleotide
  Sense strand starting at position 3758 of SEQ ID NO: 1880201
ggagguugccauuaaccga

SEQ ID NO: 1949693 - RNA, 19 nt, Artificial Sequence
  Description of Artificial Sequence: Synthetic oligonucleotide
  Antisense strand to SEQ ID NO: 1949692
ucgguuaauggcaaccucc

SEQ ID NO: 1949694 - RNA, 19 nt, Artificial Sequence
  Description of Artificial Sequence: Synthetic oligonucleotide
  Sense strand starting at position 3943 of SEQ ID NO: 1880201
ggucacggcccuuaacaau

SEQ ID NO: 1949695 - RNA, 19 nt, Artificial Sequence
  Description of Artificial Sequence: Synthetic oligonucleotide
  Antisense strand to SEQ ID NO: 1949694
auuguuaagggccgugacc

SEQ ID NO: 1949696 - RNA, 19 nt, Artificial Sequence
  Description of Artificial Sequence: Synthetic oligonucleotide
  Sense strand starting at position 3949 of SEQ ID NO: 1880201
ggcccuuaacaauagcuua

SEQ ID NO: 1949697 - RNA, 19 nt, Artificial Sequence
  Description of Artificial Sequence: Synthetic oligonucleotide
  Antisense strand to SEQ ID NO: 1949696
uaagcuauuguuaagggcc

SEQ ID NO: 1949698 - RNA, 19 nt, Artificial Sequence
  Description of Artificial Sequence: Synthetic oligonucleotide
  Sense strand starting at position 741 of SEQ ID NO: 1880202
ucaaguaaucagugagaga

SEQ ID NO: 1949699 - RNA, 19 nt, Artificial Sequence
  Description of Artificial Sequence: Synthetic oligonucleotide
  Antisense strand to SEQ ID NO: 1949698
ucucucacugauuacuuga

SEQ ID NO: 1949700 - RNA, 19 nt, Artificial Sequence
  Description of Artificial Sequence: Synthetic oligonucleotide
  Sense strand starting at position 757 of SEQ ID NO: 1880202
agaguucaaguuggauuga

SEQ ID NO: 1949701 - RNA, 19 nt, Artificial Sequence
  Description of Artificial Sequence: Synthetic oligonucleotide
  Antisense strand to SEQ ID NO: 1949700
ucaauccaacuugaacucu

SEQ ID NO: 1949702 - RNA, 19 nt, Artificial Sequence
  Description of Artificial Sequence: Synthetic oligonucleotide
  Sense strand starting at position 852 of SEQ ID NO: 1880202
gcuuguuguggucauuaaa

SEQ ID NO: 1949703 - RNA, 19 nt, Artificial Sequence
  Description of Artificial Sequence: Synthetic oligonucleotide
  Antisense strand to SEQ ID NO: 1949702
uuuaaugaccacaacaagc

SEQ ID NO: 1949704 - RNA, 19 nt, Artificial Sequence
  Description of Artificial Sequence: Synthetic oligonucleotide
  Sense strand starting at position 990 of SEQ ID NO: 1880202
uuggcagaaucauuacauc

SEQ ID NO: 1949705 - RNA, 19 nt, Artificial Sequence
  Description of Artificial Sequence: Synthetic oligonucleotide
  Antisense strand to SEQ ID NO: 1949704
gauguaaugauucugccaa

SEQ ID NO: 1949706 - RNA, 19 nt, Artificial Sequence
  Description of Artificial Sequence: Synthetic oligonucleotide
  Sense strand starting at position 998 of SEQ ID NO: 1880202
aucauuacaucauugguua

SEQ ID NO: 1949707 - RNA, 19 nt, Artificial Sequence
  Description of Artificial Sequence: Synthetic oligonucleotide
  Antisense strand to SEQ ID NO: 1949706
uaaccaaugauguaaugau

SEQ ID NO: 1949708 - RNA, 19 nt, Artificial Sequence
  Description of Artificial Sequence: Synthetic oligonucleotide
  Sense strand starting at position 1002 of SEQ ID NO: 1880202
uuacaucauugguuacacu

SEQ ID NO: 1949709 - RNA, 19 nt, Artificial Sequence
  Description of Artificial Sequence: Synthetic oligonucleotide
  Antisense strand to SEQ ID NO: 1949708
aguguaaccaaugauguaa

SEQ ID NO: 1949710 - RNA, 19 nt, Artificial Sequence
  Description of Artificial Sequence: Synthetic oligonucleotide
  Sense strand starting at position 1046 of SEQ ID NO: 1880202
ugacucaccuaguuuagga

SEQ ID NO: 1949711 - RNA, 19 nt, Artificial Sequence
  Description of Artificial Sequence: Synthetic oligonucleotide
  Antisense strand to SEQ ID NO: 1949710
uccuaaacuaggugaguca

SEQ ID NO: 1949712 - RNA, 19 nt, Artificial Sequence
  Description of Artificial Sequence: Synthetic oligonucleotide
  Sense strand starting at position 1069 of SEQ ID NO: 1880202
aggucugccuguuugaaga

SEQ ID NO: 1949713 - RNA, 19 nt, Artificial Sequence
  Description of Artificial Sequence: Synthetic oligonucleotide
  Antisense strand to SEQ ID NO: 1949712
ucuucaaacaggcagaccu

SEQ ID NO: 1949714 - RNA, 19 nt, Artificial Sequence
  Description of Artificial Sequence: Synthetic oligonucleotide
  Sense strand starting at position 1260 of SEQ ID NO: 1880202
caugaauucugaguccuga

SEQ ID NO: 1949715 - RNA, 19 nt, Artificial Sequence
  Description of Artificial Sequence: Synthetic oligonucleotide
  Antisense strand to SEQ ID NO: 1949714
ucaggacucagaauucaug

SEQ ID NO: 1949716 - RNA, 19 nt, Artificial Sequence
  Description of Artificial Sequence: Synthetic oligonucleotide
  Sense strand starting at position 1385 of SEQ ID NO: 1880202
gaauguuaccgccagauac

SEQ ID NO: 1949717 - RNA, 19 nt, Artificial Sequence
  Description of Artificial Sequence: Synthetic oligonucleotide
  Antisense strand to SEQ ID NO: 1949716
guaucuggcgguaacauuc

SEQ ID NO: 1949718 - RNA, 19 nt, Artificial Sequence
  Description of Artificial Sequence: Synthetic oligonucleotide
  Sense strand starting at position 1387 of SEQ ID NO: 1880202
auguuaccgccagauacau

SEQ ID NO: 1949719 - RNA, 19 nt, Artificial Sequence
  Description of Artificial Sequence: Synthetic oligonucleotide
  Antisense strand to SEQ ID NO: 1949718
auguaucuggcgguaacau

SEQ ID NO: 1949720 - RNA, 19 nt, Artificial Sequence
  Description of Artificial Sequence: Synthetic oligonucleotide
  Sense strand starting at position 1396 of SEQ ID NO: 1880202
ccagauacaucagauagga

SEQ ID NO: 1949721 - RNA, 19 nt, Artificial Sequence
  Description of Artificial Sequence: Synthetic oligonucleotide
  Antisense strand to SEQ ID NO: 1949720
uccuaucugauguaucugg

SEQ ID NO: 1949722 - RNA, 19 nt, Artificial Sequence
  Description of Artificial Sequence: Synthetic oligonucleotide
  Sense strand starting at position 1431 of SEQ ID NO: 1880202
ugcucaucagcguuagucu

SEQ ID NO: 1949723 - RNA, 19 nt, Artificial Sequence
  Description of Artificial Sequence: Synthetic oligonucleotide
  Antisense strand to SEQ ID NO: 1949722
agacuaacgcugaugagca

SEQ ID NO: 1949724 - RNA, 19 nt, Artificial Sequence
  Description of Artificial Sequence: Synthetic oligonucleotide
  Sense strand starting at position 1439 of SEQ ID NO: 1880202
agcguuagucugcugaacu

SEQ ID NO: 1949725 - RNA, 19 nt, Artificial Sequence
  Description of Artificial Sequence: Synthetic oligonucleotide
  Antisense strand to SEQ ID NO: 1949724
aguucagcagacuaacgcu

SEQ ID NO: 1949726 - RNA, 19 nt, Artificial Sequence
  Description of Artificial Sequence: Synthetic oligonucleotide
  Sense strand starting at position 1456 of SEQ ID NO: 1880202
cuauguuaucaucauugua

SEQ ID NO: 1949727 - RNA, 19 nt, Artificial Sequence
  Description of Artificial Sequence: Synthetic oligonucleotide
  Antisense strand to SEQ ID NO: 1949726
uacaaugaugauaacauag

SEQ ID NO: 1949728 - RNA, 19 nt, Artificial Sequence
  Description of Artificial Sequence: Synthetic oligonucleotide
  Sense strand starting at position 1458 of SEQ ID NO: 1880202
auguuaucaucauuguauc

SEQ ID NO: 1949729 - RNA, 19 nt, Artificial Sequence
  Description of Artificial Sequence: Synthetic oligonucleotide
  Antisense strand to SEQ ID NO: 1949728
gauacaaugaugauaacau

SEQ ID NO: 1949730 - RNA, 19 nt, Artificial Sequence
  Description of Artificial Sequence: Synthetic oligonucleotide
  Sense strand starting at position 1470 of SEQ ID NO: 1880202
uuguaucggcuuuacaaca

SEQ ID NO: 1949731 - RNA, 19 nt, Artificial Sequence
  Description of Artificial Sequence: Synthetic oligonucleotide
  Antisense strand to SEQ ID NO: 1949730
uguuguaaagccgauacaa

SEQ ID NO: 1949732 - RNA, 19 nt, Artificial Sequence
  Description of Artificial Sequence: Synthetic oligonucleotide
  Sense strand starting at position 2084 of SEQ ID NO: 1880202
gcaagucauccauggauaa

SEQ ID NO: 1949733 - RNA, 19 nt, Artificial Sequence
  Description of Artificial Sequence: Synthetic oligonucleotide
  Antisense strand to SEQ ID NO: 1949732
uuauccauggaugacuugc

SEQ ID NO: 1949734 - RNA, 19 nt, Artificial Sequence
  Description of Artificial Sequence: Synthetic oligonucleotide
  Sense strand starting at position 2345 of SEQ ID NO: 1880202
gccuuaagccauuagcuca

SEQ ID NO: 1949735 - RNA, 19 nt, Artificial Sequence
  Description of Artificial Sequence: Synthetic oligonucleotide
  Antisense strand to SEQ ID NO: 1949734
ugagcuaauggcuuaaggc

SEQ ID NO: 1949736 - RNA, 19 nt, Artificial Sequence
  Description of Artificial Sequence: Synthetic oligonucleotide
  Sense strand starting at position 2467 of SEQ ID NO: 1880202
aagaaauaagaguggucuu

SEQ ID NO: 1949737 - RNA, 19 nt, Artificial Sequence
  Description of Artificial Sequence: Synthetic oligonucleotide
  Antisense strand to SEQ ID NO: 1949736
aagaccacucuuauuucuu

SEQ ID NO: 1949738 - RNA, 19 nt, Artificial Sequence
  Description of Artificial Sequence: Synthetic oligonucleotide
  Sense strand starting at position 2468 of SEQ ID NO: 1880202
agaaauaagaguggucuua

SEQ ID NO: 1949739 - RNA, 19 nt, Artificial Sequence
  Description of Artificial Sequence: Synthetic oligonucleotide
  Antisense strand to SEQ ID NO: 1949738
uaagaccacucuuauuucu

SEQ ID NO: 1949740 - RNA, 19 nt, Artificial Sequence
  Description of Artificial Sequence: Synthetic oligonucleotide
  Sense strand starting at position 2470 of SEQ ID NO: 1880202
aaauaagaguggucuuaga

SEQ ID NO: 1949741 - RNA, 19 nt, Artificial Sequence
  Description of Artificial Sequence: Synthetic oligonucleotide
  Antisense strand to SEQ ID NO: 1949740
ucuaagaccacucuuauuu

SEQ ID NO: 1949742 - RNA, 19 nt, Artificial Sequence
  Description of Artificial Sequence: Synthetic oligonucleotide
  Sense strand starting at position 2572 of SEQ ID NO: 1880202
gucagcauuugcuuaucau

SEQ ID NO: 1949743 - RNA, 19 nt, Artificial Sequence
  Description of Artificial Sequence: Synthetic oligonucleotide
  Antisense strand to SEQ ID NO: 1949742
augauaagcaaaugcugac

SEQ ID NO: 1949744 - RNA, 19 nt, Artificial Sequence
  Description of Artificial Sequence: Synthetic oligonucleotide
  Sense strand starting at position 2699 of SEQ ID NO: 1880202
uaggaaguuugcccaguua

SEQ ID NO: 1949745 - RNA, 19 nt, Artificial Sequence
  Description of Artificial Sequence: Synthetic oligonucleotide
  Antisense strand to SEQ ID NO: 1949744
uaacugggcaaacuuccua

SEQ ID NO: 1949746 - RNA, 19 nt, Artificial Sequence
  Description of Artificial Sequence: Synthetic oligonucleotide
  Sense strand starting at position 2715 of SEQ ID NO: 1880202
uuaccugcuuacuuggaua

SEQ ID NO: 1949747 - RNA, 19 nt, Artificial Sequence
  Description of Artificial Sequence: Synthetic oligonucleotide
  Antisense strand to SEQ ID NO: 1949746
uauccaaguaagcagguaa

SEQ ID NO: 1949748 - RNA, 19 nt, Artificial Sequence
  Description of Artificial Sequence: Synthetic oligonucleotide
  Sense strand starting at position 2717 of SEQ ID NO: 1880202
accugcuuacuuggauaca

SEQ ID NO: 1949749 - RNA, 19 nt, Artificial Sequence
  Description of Artificial Sequence: Synthetic oligonucleotide
  Antisense strand to SEQ ID NO: 1949748
uguauccaaguaagcaggu

SEQ ID NO: 1949750 - RNA, 19 nt, Artificial Sequence
  Description of Artificial Sequence: Synthetic oligonucleotide
  Sense strand starting at position 2720 of SEQ ID NO: 1880202
ugcuuacuuggauacaguu

SEQ ID NO: 1949751 - RNA, 19 nt, Artificial Sequence
  Description of Artificial Sequence: Synthetic oligonucleotide
  Antisense strand to SEQ ID NO: 1949750
aacuguauccaaguaagca

SEQ ID NO: 1949752 - RNA, 19 nt, Artificial Sequence
  Description of Artificial Sequence: Synthetic oligonucleotide
  Sense strand starting at position 2901 of SEQ ID NO: 1880202
augauuaaaucugcugaac

SEQ ID NO: 1949753 - RNA, 19 nt, Artificial Sequence
  Description of Artificial Sequence: Synthetic oligonucleotide
  Antisense strand to SEQ ID NO: 1949752
guucagcagauuuaaucau

SEQ ID NO: 1949754 - RNA, 19 nt, Artificial Sequence
  Description of Artificial Sequence: Synthetic oligonucleotide
  Sense strand starting at position 3166 of SEQ ID NO: 1880202
agguguacucucuauguuc

SEQ ID NO: 1949755 - RNA, 19 nt, Artificial Sequence
  Description of Artificial Sequence: Synthetic oligonucleotide
  Antisense strand to SEQ ID NO: 1949754
gaacauagagaguacaccu

SEQ ID NO: 1949756 - RNA, 19 nt, Artificial Sequence
  Description of Artificial Sequence: Synthetic oligonucleotide
  Sense strand starting at position 3199 of SEQ ID NO: 1880202
uugggugccucaguuaaga

SEQ ID NO: 1949757 - RNA, 19 nt, Artificial Sequence
  Description of Artificial Sequence: Synthetic oligonucleotide
  Antisense strand to SEQ ID NO: 1949756
ucuuaacugaggcacccaa

SEQ ID NO: 1949758 - RNA, 19 nt, Artificial Sequence
  Description of Artificial Sequence: Synthetic oligonucleotide
  Sense strand starting at position 3201 of SEQ ID NO: 1880202
gggugccucaguuaagaua

SEQ ID NO: 1949759 - RNA, 19 nt, Artificial Sequence
  Description of Artificial Sequence: Synthetic oligonucleotide
  Antisense strand to SEQ ID NO: 1949758
uaucuuaacugaggcaccc

SEQ ID NO: 1949760 - RNA, 19 nt, Artificial Sequence
  Description of Artificial Sequence: Synthetic oligonucleotide
  Sense strand starting at position 3215 of SEQ ID NO: 1880202
agauaauggugguuaagau

SEQ ID NO: 1949761 - RNA, 19 nt, Artificial Sequence
  Description of Artificial Sequence: Synthetic oligonucleotide
  Antisense strand to SEQ ID NO: 1949760
aucuuaaccaccauuaucu

SEQ ID NO: 1949762 - RNA, 19 nt, Artificial Sequence
  Description of Artificial Sequence: Synthetic oligonucleotide
  Sense strand starting at position 3224 of SEQ ID NO: 1880202
ugguuaagauccucaucau

SEQ ID NO: 1949763 - RNA, 19 nt, Artificial Sequence
  Description of Artificial Sequence: Synthetic oligonucleotide
  Antisense strand to SEQ ID NO: 1949762
augaugaggaucuuaacca

SEQ ID NO: 1949764 - RNA, 19 nt, Artificial Sequence
  Description of Artificial Sequence: Synthetic oligonucleotide
  Sense strand starting at position 3225 of SEQ ID NO: 1880202
gguuaagauccucaucauu

SEQ ID NO: 1949765 - RNA, 19 nt, Artificial Sequence
  Description of Artificial Sequence: Synthetic oligonucleotide
  Antisense strand to SEQ ID NO: 1949764
aaugaugaggaucuuaacc

SEQ ID NO: 1949766 - RNA, 19 nt, Artificial Sequence
  Description of Artificial Sequence: Synthetic oligonucleotide
  Sense strand starting at position 3246 of SEQ ID NO: 1880202
agcacucaagaguagcaaa

SEQ ID NO: 1949767 - RNA, 19 nt, Artificial Sequence
  Description of Artificial Sequence: Synthetic oligonucleotide
  Antisense strand to SEQ ID NO: 1949766
uuugcuacucuugagugcu

SEQ ID NO: 1949768 - RNA, 19 nt, Artificial Sequence
  Description of Artificial Sequence: Synthetic oligonucleotide
  Sense strand starting at position 3703 of SEQ ID NO: 1880202
accaaugaugcagguaaca

SEQ ID NO: 1949769 - RNA, 19 nt, Artificial Sequence
  Description of Artificial Sequence: Synthetic oligonucleotide
  Antisense strand to SEQ ID NO: 1949768
uguuaccugcaucauuggu

SEQ ID NO: 1949770 - RNA, 19 nt, Artificial Sequence
  Description of Artificial Sequence: Synthetic oligonucleotide
  Sense strand starting at position 3728 of SEQ ID NO: 1880202
ucauuaucuagcgacaggu

SEQ ID NO: 1949771 - RNA, 19 nt, Artificial Sequence
  Description of Artificial Sequence: Synthetic oligonucleotide
  Antisense strand to SEQ ID NO: 1949770
accugucgcuagauaauga

SEQ ID NO: 1949772 - RNA, 19 nt, Artificial Sequence
  Description of Artificial Sequence: Synthetic oligonucleotide
  Sense strand starting at position 3730 of SEQ ID NO: 1880202
auuaucuagcgacagguaa

SEQ ID NO: 1949773 - RNA, 19 nt, Artificial Sequence
  Description of Artificial Sequence: Synthetic oligonucleotide
  Antisense strand to SEQ ID NO: 1949772
uuaccugucgcuagauaau

SEQ ID NO: 1949774 - RNA, 19 nt, Artificial Sequence
  Description of Artificial Sequence: Synthetic oligonucleotide
  Sense strand starting at position 3818 of SEQ ID NO: 1880202
guggcucacggcuuguaau

SEQ ID NO: 1949775 - RNA, 19 nt, Artificial Sequence
  Description of Artificial Sequence: Synthetic oligonucleotide
  Antisense strand to SEQ ID NO: 1949774
auuacaagccgugagccac

SEQ ID NO: 1949776 - RNA, 19 nt, Artificial Sequence
  Description of Artificial Sequence: Synthetic oligonucleotide
  Sense strand starting at position 3830 of SEQ ID NO: 1880202
uuguaaucccaguauguug

SEQ ID NO: 1949777 - RNA, 19 nt, Artificial Sequence
  Description of Artificial Sequence: Synthetic oligonucleotide
  Antisense strand to SEQ ID NO: 1949776
caacauacugggauuacaa

SEQ ID NO: 1949778 - RNA, 19 nt, Artificial Sequence
  Description of Artificial Sequence: Synthetic oligonucleotide
  Sense strand starting at position 56 of SEQ ID NO: 1880203
caaugagauugugaaauga

SEQ ID NO: 1949779 - RNA, 19 nt, Artificial Sequence
  Description of Artificial Sequence: Synthetic oligonucleotide
  Antisense strand to SEQ ID NO: 1949778
ucauuucacaaucucauug

SEQ ID NO: 1949780 - RNA, 19 nt, Artificial Sequence
  Description of Artificial Sequence: Synthetic oligonucleotide
  Sense strand starting at position 135 of SEQ ID NO: 1880203
ggcucaggccugugaaauc

SEQ ID NO: 1949781 - RNA, 19 nt, Artificial Sequence
  Description of Artificial Sequence: Synthetic oligonucleotide
  Antisense strand to SEQ ID NO: 1949780
gauuucacaggccugagcc

SEQ ID NO: 1949782 - RNA, 19 nt, Artificial Sequence
  Description of Artificial Sequence: Synthetic oligonucleotide
  Sense strand starting at position 199 of SEQ ID NO: 1880203
aaaugaguugguugugaug

SEQ ID NO: 1949783 - RNA, 19 nt, Artificial Sequence
  Description of Artificial Sequence: Synthetic oligonucleotide
  Antisense strand to SEQ ID NO: 1949782
caucacaaccaacucauuu

SEQ ID NO: 1949784 - RNA, 19 nt, Artificial Sequence
  Description of Artificial Sequence: Synthetic oligonucleotide
  Sense strand starting at position 1268 of SEQ ID NO: 1880203
ucaaguaaucagugagaga

SEQ ID NO: 1949785 - RNA, 19 nt, Artificial Sequence
  Description of Artificial Sequence: Synthetic oligonucleotide
  Antisense strand to SEQ ID NO: 1949784
ucucucacugauuacuuga

SEQ ID NO: 1949786 - RNA, 19 nt, Artificial Sequence
  Description of Artificial Sequence: Synthetic oligonucleotide
  Sense strand starting at position 1284 of SEQ ID NO: 1880203
agaguucaaguuggauuga

SEQ ID NO: 1949787 - RNA, 19 nt, Artificial Sequence
  Description of Artificial Sequence: Synthetic oligonucleotide
  Antisense strand to SEQ ID NO: 1949786
ucaauccaacuugaacucu

SEQ ID NO: 1949788 - RNA, 19 nt, Artificial Sequence
  Description of Artificial Sequence: Synthetic oligonucleotide
  Sense strand starting at position 1379 of SEQ ID NO: 1880203
gcuuguuguggucauuaaa

SEQ ID NO: 1949789 - RNA, 19 nt, Artificial Sequence
  Description of Artificial Sequence: Synthetic oligonucleotide
  Antisense strand to SEQ ID NO: 1949788
uuuaaugaccacaacaagc

SEQ ID NO: 1949790 - RNA, 19 nt, Artificial Sequence
  Description of Artificial Sequence: Synthetic oligonucleotide
  Sense strand starting at position 1517 of SEQ ID NO: 1880203
uuggcagaaucauuacauc

SEQ ID NO: 1949791 - RNA, 19 nt, Artificial Sequence
  Description of Artificial Sequence: Synthetic oligonucleotide
  Antisense strand to SEQ ID NO: 1949790
gauguaaugauucugccaa

SEQ ID NO: 1949792 - RNA, 19 nt, Artificial Sequence
  Description of Artificial Sequence: Synthetic oligonucleotide
  Sense strand starting at position 1525 of SEQ ID NO: 1880203
aucauuacaucauugguua

SEQ ID NO: 1949793 - RNA, 19 nt, Artificial Sequence
  Description of Artificial Sequence: Synthetic oligonucleotide
  Antisense strand to SEQ ID NO: 1949792
uaaccaaugauguaaugau

SEQ ID NO: 1949794 - RNA, 19 nt, Artificial Sequence
  Description of Artificial Sequence: Synthetic oligonucleotide
  Sense strand starting at position 1529 of SEQ ID NO: 1880203
uuacaucauugguuacacu

SEQ ID NO: 1949795 - RNA, 19 nt, Artificial Sequence
  Description of Artificial Sequence: Synthetic oligonucleotide
  Antisense strand to SEQ ID NO: 1949794
aguguaaccaaugauguaa

SEQ ID NO: 1949796 - RNA, 19 nt, Artificial Sequence
  Description of Artificial Sequence: Synthetic oligonucleotide
  Sense strand starting at position 1573 of SEQ ID NO: 1880203
ugacucaccuaguuuagga

SEQ ID NO: 1949797 - RNA, 19 nt, Artificial Sequence
  Description of Artificial Sequence: Synthetic oligonucleotide
  Antisense strand to SEQ ID NO: 1949796
uccuaaacuaggugaguca

SEQ ID NO: 1949798 - RNA, 19 nt, Artificial Sequence
  Description of Artificial Sequence: Synthetic oligonucleotide
  Sense strand starting at position 1596 of SEQ ID NO: 1880203
aggucugccuguuugaaga

SEQ ID NO: 1949799 - RNA, 19 nt, Artificial Sequence
  Description of Artificial Sequence: Synthetic oligonucleotide
  Antisense strand to SEQ ID NO: 1949798
ucuucaaacaggcagaccu

SEQ ID NO: 1949800 - RNA, 19 nt, Artificial Sequence
  Description of Artificial Sequence: Synthetic oligonucleotide
  Sense strand starting at position 1787 of SEQ ID NO: 1880203
caugaauucugaguccuga

SEQ ID NO: 1949801 - RNA, 19 nt, Artificial Sequence
  Description of Artificial Sequence: Synthetic oligonucleotide
  Antisense strand to SEQ ID NO: 1949800
ucaggacucagaauucaug

SEQ ID NO: 1949802 - RNA, 19 nt, Artificial Sequence
  Description of Artificial Sequence: Synthetic oligonucleotide
  Sense strand starting at position 1912 of SEQ ID NO: 1880203
gaauguuaccgccagauac

SEQ ID NO: 1949803 - RNA, 19 nt, Artificial Sequence
  Description of Artificial Sequence: Synthetic oligonucleotide
  Antisense strand to SEQ ID NO: 1949802
guaucuggcgguaacauuc

SEQ ID NO: 1949804 - RNA, 19 nt, Artificial Sequence
  Description of Artificial Sequence: Synthetic oligonucleotide
  Sense strand starting at position 1914 of SEQ ID NO: 1880203
auguuaccgccagauacau

SEQ ID NO: 1949805 - RNA, 19 nt, Artificial Sequence
  Description of Artificial Sequence: Synthetic oligonucleotide
  Antisense strand to SEQ ID NO: 1949804
auguaucuggcgguaacau

SEQ ID NO: 1949806 - RNA, 19 nt, Artificial Sequence
  Description of Artificial Sequence: Synthetic oligonucleotide
  Sense strand starting at position 1923 of SEQ ID NO: 1880203
ccagauacaucagauagga

SEQ ID NO: 1949807 - RNA, 19 nt, Artificial Sequence
  Description of Artificial Sequence: Synthetic oligonucleotide
  Antisense strand to SEQ ID NO: 1949806
uccuaucugauguaucugg

SEQ ID NO: 1949808 - RNA, 19 nt, Artificial Sequence
  Description of Artificial Sequence: Synthetic oligonucleotide
  Sense strand starting at position 1958 of SEQ ID NO: 1880203
ugcucaucagcguuagucu

SEQ ID NO: 1949809 - RNA, 19 nt, Artificial Sequence
  Description of Artificial Sequence: Synthetic oligonucleotide
  Antisense strand to SEQ ID NO: 1949808
agacuaacgcugaugagca

SEQ ID NO: 1949810 - RNA, 19 nt, Artificial Sequence
  Description of Artificial Sequence: Synthetic oligonucleotide
  Sense strand starting at position 1966 of SEQ ID NO: 1880203
agcguuagucugcugaacu

SEQ ID NO: 1949811 - RNA, 19 nt, Artificial Sequence
  Description of Artificial Sequence: Synthetic oligonucleotide
  Antisense strand to SEQ ID NO: 1949810
aguucagcagacuaacgcu

SEQ ID NO: 1949812 - RNA, 19 nt, Artificial Sequence
  Description of Artificial Sequence: Synthetic oligonucleotide
  Sense strand starting at position 1983 of SEQ ID NO: 1880203
cuauguuaucaucauugua

SEQ ID NO: 1949813 - RNA, 19 nt, Artificial Sequence
  Description of Artificial Sequence: Synthetic oligonucleotide
  Antisense strand to SEQ ID NO: 1949812
uacaaugaugauaacauag

SEQ ID NO: 1949814 - RNA, 19 nt, Artificial Sequence
  Description of Artificial Sequence: Synthetic oligonucleotide
  Sense strand starting at position 1985 of SEQ ID NO: 1880203
auguuaucaucauuguauc

SEQ ID NO: 1949815 - RNA, 19 nt, Artificial Sequence
  Description of Artificial Sequence: Synthetic oligonucleotide
  Antisense strand to SEQ ID NO: 1949814
gauacaaugaugauaacau

SEQ ID NO: 1949816 - RNA, 19 nt, Artificial Sequence
  Description of Artificial Sequence: Synthetic oligonucleotide
  Sense strand starting at position 1997 of SEQ ID NO: 1880203
uuguaucggcuuuacaaca

SEQ ID NO: 1949817 - RNA, 19 nt, Artificial Sequence
  Description of Artificial Sequence: Synthetic oligonucleotide
  Antisense strand to SEQ ID NO: 1949816
uguuguaaagccgauacaa

SEQ ID NO: 1949818 - RNA, 19 nt, Artificial Sequence
  Description of Artificial Sequence: Synthetic oligonucleotide
  Sense strand starting at position 2232 of SEQ ID NO: 1880203
guugcagugaacugauagu

SEQ ID NO: 1949819 - RNA, 19 nt, Artificial Sequence
  Description of Artificial Sequence: Synthetic oligonucleotide
  Antisense strand to SEQ ID NO: 1949818
acuaucaguucacugcaac

SEQ ID NO: 1949820 - RNA, 19 nt, Artificial Sequence
  Description of Artificial Sequence: Synthetic oligonucleotide
  Sense strand starting at position 2611 of SEQ ID NO: 1880203
gcaagucauccauggauaa

SEQ ID NO: 1949821 - RNA, 19 nt, Artificial Sequence
  Description of Artificial Sequence: Synthetic oligonucleotide
  Antisense strand to SEQ ID NO: 1949820
uuauccauggaugacuugc

SEQ ID NO: 1949822 - RNA, 19 nt, Artificial Sequence
  Description of Artificial Sequence: Synthetic oligonucleotide
  Sense strand starting at position 2872 of SEQ ID NO: 1880203
gccuuaagccauuagcuca

SEQ ID NO: 1949823 - RNA, 19 nt, Artificial Sequence
  Description of Artificial Sequence: Synthetic oligonucleotide
  Antisense strand to SEQ ID NO: 1949822
ugagcuaauggcuuaaggc

SEQ ID NO: 1949824 - RNA, 19 nt, Artificial Sequence
  Description of Artificial Sequence: Synthetic oligonucleotide
  Sense strand starting at position 2994 of SEQ ID NO: 1880203
aagaaauaagaguggucuu

SEQ ID NO: 1949825 - RNA, 19 nt, Artificial Sequence
  Description of Artificial Sequence: Synthetic oligonucleotide
  Antisense strand to SEQ ID NO: 1949824
aagaccacucuuauuucuu

SEQ ID NO: 1949826 - RNA, 19 nt, Artificial Sequence
  Description of Artificial Sequence: Synthetic oligonucleotide
  Sense strand starting at position 2995 of SEQ ID NO: 1880203
agaaauaagaguggucuua

SEQ ID NO: 1949827 - RNA, 19 nt, Artificial Sequence
  Description of Artificial Sequence: Synthetic oligonucleotide
  Antisense strand to SEQ ID NO: 1949826
uaagaccacucuuauuucu

SEQ ID NO: 1949828 - RNA, 19 nt, Artificial Sequence
  Description of Artificial Sequence: Synthetic oligonucleotide
  Sense strand starting at position 2997 of SEQ ID NO: 1880203
aaauaagaguggucuuaga

SEQ ID NO: 1949829 - RNA, 19 nt, Artificial Sequence
  Description of Artificial Sequence: Synthetic oligonucleotide
  Antisense strand to SEQ ID NO: 1949828
ucuaagaccacucuuauuu

SEQ ID NO: 1949830 - RNA, 19 nt, Artificial Sequence
  Description of Artificial Sequence: Synthetic oligonucleotide
  Sense strand starting at position 3058 of SEQ ID NO: 1880203
ugccuuuagucaguuagag

SEQ ID NO: 1949831 - RNA, 19 nt, Artificial Sequence
  Description of Artificial Sequence: Synthetic oligonucleotide
  Antisense strand to SEQ ID NO: 1949830
cucuaacugacuaaaggca

SEQ ID NO: 1949832 - RNA, 19 nt, Artificial Sequence
  Description of Artificial Sequence: Synthetic oligonucleotide
  Sense strand starting at position 3099 of SEQ ID NO: 1880203
gucagcauuugcuuaucau

SEQ ID NO: 1949833 - RNA, 19 nt, Artificial Sequence
  Description of Artificial Sequence: Synthetic oligonucleotide
  Antisense strand to SEQ ID NO: 1949832
augauaagcaaaugcugac

SEQ ID NO: 1949834 - RNA, 19 nt, Artificial Sequence
  Description of Artificial Sequence: Synthetic oligonucleotide
  Sense strand starting at position 3226 of SEQ ID NO: 1880203
uaggaaguuugcccaguua

SEQ ID NO: 1949835 - RNA, 19 nt, Artificial Sequence
  Description of Artificial Sequence: Synthetic oligonucleotide
  Antisense strand to SEQ ID NO: 1949834
uaacugggcaaacuuccua

SEQ ID NO: 1949836 - RNA, 19 nt, Artificial Sequence
  Description of Artificial Sequence: Synthetic oligonucleotide
  Sense strand starting at position 3242 of SEQ ID NO: 1880203
uuaccugcuuacuuggaua

SEQ ID NO: 1949837 - RNA, 19 nt, Artificial Sequence
  Description of Artificial Sequence: Synthetic oligonucleotide
  Antisense strand to SEQ ID NO: 1949836
uauccaaguaagcagguaa

SEQ ID NO: 1949838 - RNA, 19 nt, Artificial Sequence
  Description of Artificial Sequence: Synthetic oligonucleotide
  Sense strand starting at position 3244 of SEQ ID NO: 1880203
accugcuuacuuggauaca

SEQ ID NO: 1949839 - RNA, 19 nt, Artificial Sequence
  Description of Artificial Sequence: Synthetic oligonucleotide
  Antisense strand to SEQ ID NO: 1949838
uguauccaaguaagcaggu

SEQ ID NO: 1949840 - RNA, 19 nt, Artificial Sequence
  Description of Artificial Sequence: Synthetic oligonucleotide
  Sense strand starting at position 3247 of SEQ ID NO: 1880203
ugcuuacuuggauacaguu

SEQ ID NO: 1949841 - RNA, 19 nt, Artificial Sequence
  Description of Artificial Sequence: Synthetic oligonucleotide
  Antisense strand to SEQ ID NO: 1949840
aacuguauccaaguaagca

SEQ ID NO: 1949842 - RNA, 19 nt, Artificial Sequence
  Description of Artificial Sequence: Synthetic oligonucleotide
  Sense strand starting at position 3428 of SEQ ID NO: 1880203
augauuaaaucugcugaac

SEQ ID NO: 1949843 - RNA, 19 nt, Artificial Sequence
  Description of Artificial Sequence: Synthetic oligonucleotide
  Antisense strand to SEQ ID NO: 1949842
guucagcagauuuaaucau

SEQ ID NO: 1949844 - RNA, 19 nt, Artificial Sequence
  Description of Artificial Sequence: Synthetic oligonucleotide
  Sense strand starting at position 3693 of SEQ ID NO: 1880203
agguguacucucuauguuc

SEQ ID NO: 1949845 - RNA, 19 nt, Artificial Sequence
  Description of Artificial Sequence: Synthetic oligonucleotide
  Antisense strand to SEQ ID NO: 1949844
gaacauagagaguacaccu

SEQ ID NO: 1949846 - RNA, 19 nt, Artificial Sequence
  Description of Artificial Sequence: Synthetic oligonucleotide
  Sense strand starting at position 3726 of SEQ ID NO: 1880203
uugggugccucaguuaaga

SEQ ID NO: 1949847 - RNA, 19 nt, Artificial Sequence
  Description of Artificial Sequence: Synthetic oligonucleotide
  Antisense strand to SEQ ID NO: 1949846
ucuuaacugaggcacccaa

SEQ ID NO: 1949848 - RNA, 19 nt, Artificial Sequence
  Description of Artificial Sequence: Synthetic oligonucleotide
  Sense strand starting at position 3728 of SEQ ID NO: 1880203
gggugccucaguuaagaua

SEQ ID NO: 1949849 - RNA, 19 nt, Artificial Sequence
  Description of Artificial Sequence: Synthetic oligonucleotide
  Antisense strand to SEQ ID NO: 1949848
uaucuuaacugaggcaccc

SEQ ID NO: 1949850 - RNA, 19 nt, Artificial Sequence
  Description of Artificial Sequence: Synthetic oligonucleotide
  Sense strand starting at position 3742 of SEQ ID NO: 1880203
agauaauggugguuaagau

SEQ ID NO: 1949851 - RNA, 19 nt, Artificial Sequence
  Description of Artificial Sequence: Synthetic oligonucleotide
  Antisense strand to SEQ ID NO: 1949850
aucuuaaccaccauuaucu

SEQ ID NO: 1949852 - RNA, 19 nt, Artificial Sequence
  Description of Artificial Sequence: Synthetic oligonucleotide
  Sense strand starting at position 3751 of SEQ ID NO: 1880203
ugguuaagauccucaucau

SEQ ID NO: 1949853 - RNA, 19 nt, Artificial Sequence
  Description of Artificial Sequence: Synthetic oligonucleotide
  Antisense strand to SEQ ID NO: 1949852
augaugaggaucuuaacca

SEQ ID NO: 1949854 - RNA, 19 nt, Artificial Sequence
  Description of Artificial Sequence: Synthetic oligonucleotide
  Sense strand starting at position 3752 of SEQ ID NO: 1880203
gguuaagauccucaucauu

SEQ ID NO: 1949855 - RNA, 19 nt, Artificial Sequence
  Description of Artificial Sequence: Synthetic oligonucleotide
  Antisense strand to SEQ ID NO: 1949854
aaugaugaggaucuuaacc

SEQ ID NO: 1949856 - RNA, 19 nt, Artificial Sequence
  Description of Artificial Sequence: Synthetic oligonucleotide
  Sense strand starting at position 3773 of SEQ ID NO: 1880203
agcacucaagaguagcaaa

SEQ ID NO: 1949857 - RNA, 19 nt, Artificial Sequence
  Description of Artificial Sequence: Synthetic oligonucleotide
  Antisense strand to SEQ ID NO: 1949856
uuugcuacucuugagugcu

SEQ ID NO: 1949858 - RNA, 19 nt, Artificial Sequence
  Description of Artificial Sequence: Synthetic oligonucleotide
  Sense strand starting at position 614 of SEQ ID NO: 1880204
gugugagacauucggguga

SEQ ID NO: 1949859 - RNA, 19 nt, Artificial Sequence
  Description of Artificial Sequence: Synthetic oligonucleotide
  Antisense strand to SEQ ID NO: 1949858
ucacccgaaugucucacac

SEQ ID NO: 1949860 - RNA, 19 nt, Artificial Sequence
  Description of Artificial Sequence: Synthetic oligonucleotide
  Sense strand starting at position 643 of SEQ ID NO: 1880204
augaaagaaugugcuuauu

SEQ ID NO: 1949861 - RNA, 19 nt, Artificial Sequence
  Description of Artificial Sequence: Synthetic oligonucleotide
  Antisense strand to SEQ ID NO: 1949860
aauaagcacauucuuucau

SEQ ID NO: 1949862 - RNA, 19 nt, Artificial Sequence
  Description of Artificial Sequence: Synthetic oligonucleotide
  Sense strand starting at position 742 of SEQ ID NO: 1880204
caaugagauugugaaauga

SEQ ID NO: 1949863 - RNA, 19 nt, Artificial Sequence
  Description of Artificial Sequence: Synthetic oligonucleotide
  Antisense strand to SEQ ID NO: 1949862
ucauuucacaaucucauug

SEQ ID NO: 1949864 - RNA, 19 nt, Artificial Sequence
  Description of Artificial Sequence: Synthetic oligonucleotide
  Sense strand starting at position 821 of SEQ ID NO: 1880204
ggcucaggccugugaaauc

SEQ ID NO: 1949865 - RNA, 19 nt, Artificial Sequence
  Description of Artificial Sequence: Synthetic oligonucleotide
  Antisense strand to SEQ ID NO: 1949864
gauuucacaggccugagcc

SEQ ID NO: 1949866 - RNA, 19 nt, Artificial Sequence
  Description of Artificial Sequence: Synthetic oligonucleotide
  Sense strand starting at position 885 of SEQ ID NO: 1880204
aaaugaguugguugugaug

SEQ ID NO: 1949867 - RNA, 19 nt, Artificial Sequence
  Description of Artificial Sequence: Synthetic oligonucleotide
  Antisense strand to SEQ ID NO: 1949866
caucacaaccaacucauuu

SEQ ID NO: 1949868 - RNA, 19 nt, Artificial Sequence
  Description of Artificial Sequence: Synthetic oligonucleotide
  Sense strand starting at position 1954 of SEQ ID NO: 1880204
ucaaguaaucagugagaga

SEQ ID NO: 1949869 - RNA, 19 nt, Artificial Sequence
  Description of Artificial Sequence: Synthetic oligonucleotide
  Antisense strand to SEQ ID NO: 1949868
ucucucacugauuacuuga

SEQ ID NO: 1949870 - RNA, 19 nt, Artificial Sequence
  Description of Artificial Sequence: Synthetic oligonucleotide
  Sense strand starting at position 1970 of SEQ ID NO: 1880204
agaguucaaguuggauuga

SEQ ID NO: 1949871 - RNA, 19 nt, Artificial Sequence
  Description of Artificial Sequence: Synthetic oligonucleotide
  Antisense strand to SEQ ID NO: 1949870
ucaauccaacuugaacucu

SEQ ID NO: 1949872 - RNA, 19 nt, Artificial Sequence
  Description of Artificial Sequence: Synthetic oligonucleotide
  Sense strand starting at position 2065 of SEQ ID NO: 1880204
gcuuguuguggucauuaaa

SEQ ID NO: 1949873 - RNA, 19 nt, Artificial Sequence
  Description of Artificial Sequence: Synthetic oligonucleotide
  Antisense strand to SEQ ID NO: 1949872
uuuaaugaccacaacaagc

SEQ ID NO: 1949874 - RNA, 19 nt, Artificial Sequence
  Description of Artificial Sequence: Synthetic oligonucleotide
  Sense strand starting at position 2133 of SEQ ID NO: 1880204
ugaugcuuguuaguagagu

SEQ ID NO: 1949875 - RNA, 19 nt, Artificial Sequence
  Description of Artificial Sequence: Synthetic oligonucleotide
  Antisense strand to SEQ ID NO: 1949874
acucuacuaacaagcauca

SEQ ID NO: 1949876 - RNA, 19 nt, Artificial Sequence
  Description of Artificial Sequence: Synthetic oligonucleotide
  Sense strand starting at position 2147 of SEQ ID NO: 1880204
agaguaaccucagaaucaa

SEQ ID NO: 1949877 - RNA, 19 nt, Artificial Sequence
  Description of Artificial Sequence: Synthetic oligonucleotide
  Antisense strand to SEQ ID NO: 1949876
uugauucugagguuacucu

SEQ ID NO: 1949878 - RNA, 19 nt, Artificial Sequence
  Description of Artificial Sequence: Synthetic oligonucleotide
  Sense strand starting at position 2203 of SEQ ID NO: 1880204
uuggcagaaucauuacauc

SEQ ID NO: 1949879 - RNA, 19 nt, Artificial Sequence
  Description of Artificial Sequence: Synthetic oligonucleotide
  Antisense strand to SEQ ID NO: 1949878
gauguaaugauucugccaa

SEQ ID NO: 1949880 - RNA, 19 nt, Artificial Sequence
  Description of Artificial Sequence: Synthetic oligonucleotide
  Sense strand starting at position 2211 of SEQ ID NO: 1880204
aucauuacaucauugguua

SEQ ID NO: 1949881 - RNA, 19 nt, Artificial Sequence
  Description of Artificial Sequence: Synthetic oligonucleotide
  Antisense strand to SEQ ID NO: 1949880
uaaccaaugauguaaugau

SEQ ID NO: 1949882 - RNA, 19 nt, Artificial Sequence
  Description of Artificial Sequence: Synthetic oligonucleotide
  Sense strand starting at position 2215 of SEQ ID NO: 1880204
uuacaucauugguuacacu

SEQ ID NO: 1949883 - RNA, 19 nt, Artificial Sequence
  Description of Artificial Sequence: Synthetic oligonucleotide
  Antisense strand to SEQ ID NO: 1949882
aguguaaccaaugauguaa

SEQ ID NO: 1949884 - RNA, 19 nt, Artificial Sequence
  Description of Artificial Sequence: Synthetic oligonucleotide
  Sense strand starting at position 2259 of SEQ ID NO: 1880204
ugacucaccuaguuuagga

SEQ ID NO: 1949885 - RNA, 19 nt, Artificial Sequence
  Description of Artificial Sequence: Synthetic oligonucleotide
  Antisense strand to SEQ ID NO: 1949884
uccuaaacuaggugaguca

SEQ ID NO: 1949886 - RNA, 19 nt, Artificial Sequence
  Description of Artificial Sequence: Synthetic oligonucleotide
  Sense strand starting at position 2282 of SEQ ID NO: 1880204
aggucugccuguuugaaga

SEQ ID NO: 1949887 - RNA, 19 nt, Artificial Sequence
  Description of Artificial Sequence: Synthetic oligonucleotide
  Antisense strand to SEQ ID NO: 1949886
ucuucaaacaggcagaccu

SEQ ID NO: 1949888 - RNA, 19 nt, Artificial Sequence
  Description of Artificial Sequence: Synthetic oligonucleotide
  Sense strand starting at position 2473 of SEQ ID NO: 1880204
caugaauucugaguccuga

SEQ ID NO: 1949889 - RNA, 19 nt, Artificial Sequence
  Description of Artificial Sequence: Synthetic oligonucleotide
  Antisense strand to SEQ ID NO: 1949888
ucaggacucagaauucaug

SEQ ID NO: 1949890 - RNA, 19 nt, Artificial Sequence
  Description of Artificial Sequence: Synthetic oligonucleotide
  Sense strand starting at position 2598 of SEQ ID NO: 1880204
gaauguuaccgccagauac

SEQ ID NO: 1949891 - RNA, 19 nt, Artificial Sequence
  Description of Artificial Sequence: Synthetic oligonucleotide
  Antisense strand to SEQ ID NO: 1949890
guaucuggcgguaacauuc

SEQ ID NO: 1949892 - RNA, 19 nt, Artificial Sequence
  Description of Artificial Sequence: Synthetic oligonucleotide
  Sense strand starting at position 2600 of SEQ ID NO: 1880204
auguuaccgccagauacau

SEQ ID NO: 1949893 - RNA, 19 nt, Artificial Sequence
  Description of Artificial Sequence: Synthetic oligonucleotide
  Antisense strand to SEQ ID NO: 1949892
auguaucuggcgguaacau

SEQ ID NO: 1949894 - RNA, 19 nt, Artificial Sequence
  Description of Artificial Sequence: Synthetic oligonucleotide
  Sense strand starting at position 2609 of SEQ ID NO: 1880204
ccagauacaucagauagga

SEQ ID NO: 1949895 - RNA, 19 nt, Artificial Sequence
  Description of Artificial Sequence: Synthetic oligonucleotide
  Antisense strand to SEQ ID NO: 1949894
uccuaucugauguaucugg

SEQ ID NO: 1949896 - RNA, 19 nt, Artificial Sequence
  Description of Artificial Sequence: Synthetic oligonucleotide
  Sense strand starting at position 2644 of SEQ ID NO: 1880204
ugcucaucagcguuagucu

SEQ ID NO: 1949897 - RNA, 19 nt, Artificial Sequence
  Description of Artificial Sequence: Synthetic oligonucleotide
  Antisense strand to SEQ ID NO: 1949896
agacuaacgcugaugagca

SEQ ID NO: 1949898 - RNA, 19 nt, Artificial Sequence
  Description of Artificial Sequence: Synthetic oligonucleotide
  Sense strand starting at position 2652 of SEQ ID NO: 1880204
agcguuagucugcugaacu

SEQ ID NO: 1949899 - RNA, 19 nt, Artificial Sequence
  Description of Artificial Sequence: Synthetic oligonucleotide
  Antisense strand to SEQ ID NO: 1949898
aguucagcagacuaacgcu

SEQ ID NO: 1949900 - RNA, 19 nt, Artificial Sequence
  Description of Artificial Sequence: Synthetic oligonucleotide
  Sense strand starting at position 2669 of SEQ ID NO: 1880204
cuauguuaucaucauugua

SEQ ID NO: 1949901 - RNA, 19 nt, Artificial Sequence
  Description of Artificial Sequence: Synthetic oligonucleotide
  Antisense strand to SEQ ID NO: 1949900
uacaaugaugauaacauag

SEQ ID NO: 1949902 - RNA, 19 nt, Artificial Sequence
  Description of Artificial Sequence: Synthetic oligonucleotide
  Sense strand starting at position 2671 of SEQ ID NO: 1880204
auguuaucaucauuguauc

SEQ ID NO: 1949903 - RNA, 19 nt, Artificial Sequence
  Description of Artificial Sequence: Synthetic oligonucleotide
  Antisense strand to SEQ ID NO: 1949902
gauacaaugaugauaacau

SEQ ID NO: 1949904 - RNA, 19 nt, Artificial Sequence
  Description of Artificial Sequence: Synthetic oligonucleotide
  Sense strand starting at position 2683 of SEQ ID NO: 1880204
uuguaucggcuuuacaaca

SEQ ID NO: 1949905 - RNA, 19 nt, Artificial Sequence
  Description of Artificial Sequence: Synthetic oligonucleotide
  Antisense strand to SEQ ID NO: 1949904
uguuguaaagccgauacaa

SEQ ID NO: 1949906 - RNA, 19 nt, Artificial Sequence
  Description of Artificial Sequence: Synthetic oligonucleotide
  Sense strand starting at position 2918 of SEQ ID NO: 1880204
guugcagugaacugauagu

SEQ ID NO: 1949907 - RNA, 19 nt, Artificial Sequence
  Description of Artificial Sequence: Synthetic oligonucleotide
  Antisense strand to SEQ ID NO: 1949906
acuaucaguucacugcaac

SEQ ID NO: 1949908 - RNA, 19 nt, Artificial Sequence
  Description of Artificial Sequence: Synthetic oligonucleotide
  Sense strand starting at position 3297 of SEQ ID NO: 1880204
gcaagucauccauggauaa

SEQ ID NO: 1949909 - RNA, 19 nt, Artificial Sequence
  Description of Artificial Sequence: Synthetic oligonucleotide
  Antisense strand to SEQ ID NO: 1949908
uuauccauggaugacuugc

SEQ ID NO: 1949910 - RNA, 19 nt, Artificial Sequence
  Description of Artificial Sequence: Synthetic oligonucleotide
  Sense strand starting at position 3411 of SEQ ID NO: 1880204
aguguuaccuuugucuaca

SEQ ID NO: 1949911 - RNA, 19 nt, Artificial Sequence
  Description of Artificial Sequence: Synthetic oligonucleotide
  Antisense strand to SEQ ID NO: 1949910
uguagacaaagguaacacu

SEQ ID NO: 1949912 - RNA, 19 nt, Artificial Sequence
  Description of Artificial Sequence: Synthetic oligonucleotide
  Sense strand starting at position 3412 of SEQ ID NO: 1880204
guguuaccuuugucuacau

SEQ ID NO: 1949913 - RNA, 19 nt, Artificial Sequence
  Description of Artificial Sequence: Synthetic oligonucleotide
  Antisense strand to SEQ ID NO: 1949912
auguagacaaagguaacac

SEQ ID NO: 1949914 - RNA, 19 nt, Artificial Sequence
  Description of Artificial Sequence: Synthetic oligonucleotide
  Sense strand starting at position 3558 of SEQ ID NO: 1880204
gccuuaagccauuagcuca

SEQ ID NO: 1949915 - RNA, 19 nt, Artificial Sequence
  Description of Artificial Sequence: Synthetic oligonucleotide
  Antisense strand to SEQ ID NO: 1949914
ugagcuaauggcuuaaggc

SEQ ID NO: 1949916 - RNA, 19 nt, Artificial Sequence
  Description of Artificial Sequence: Synthetic oligonucleotide
  Sense strand starting at position 3680 of SEQ ID NO: 1880204
aagaaauaagaguggucuu

SEQ ID NO: 1949917 - RNA, 19 nt, Artificial Sequence
  Description of Artificial Sequence: Synthetic oligonucleotide
  Antisense strand to SEQ ID NO: 1949916
aagaccacucuuauuucuu

SEQ ID NO: 1949918 - RNA, 19 nt, Artificial Sequence
  Description of Artificial Sequence: Synthetic oligonucleotide
  Sense strand starting at position 3681 of SEQ ID NO: 1880204
agaaauaagaguggucuua

SEQ ID NO: 1949919 - RNA, 19 nt, Artificial Sequence
  Description of Artificial Sequence: Synthetic oligonucleotide
  Antisense strand to SEQ ID NO: 1949918
uaagaccacucuuauuucu

SEQ ID NO: 1949920 - RNA, 19 nt, Artificial Sequence
  Description of Artificial Sequence: Synthetic oligonucleotide
  Sense strand starting at position 3683 of SEQ ID NO: 1880204
aaauaagaguggucuuaga

SEQ ID NO: 1949921 - RNA, 19 nt, Artificial Sequence
  Description of Artificial Sequence: Synthetic oligonucleotide
  Antisense strand to SEQ ID NO: 1949920
ucuaagaccacucuuauuu

SEQ ID NO: 1949922 - RNA, 19 nt, Artificial Sequence
  Description of Artificial Sequence: Synthetic oligonucleotide
  Sense strand starting at position 3744 of SEQ ID NO: 1880204
ugccuuuagucaguuagag

SEQ ID NO: 1949923 - RNA, 19 nt, Artificial Sequence
  Description of Artificial Sequence: Synthetic oligonucleotide
  Antisense strand to SEQ ID NO: 1949922
cucuaacugacuaaaggca

SEQ ID NO: 1949924 - RNA, 19 nt, Artificial Sequence
  Description of Artificial Sequence: Synthetic oligonucleotide
  Sense strand starting at position 3785 of SEQ ID NO: 1880204
gucagcauuugcuuaucau

SEQ ID NO: 1949925 - RNA, 19 nt, Artificial Sequence
  Description of Artificial Sequence: Synthetic oligonucleotide
  Antisense strand to SEQ ID NO: 1949924
augauaagcaaaugcugac

SEQ ID NO: 1949926 - RNA, 19 nt, Artificial Sequence
  Description of Artificial Sequence: Synthetic oligonucleotide
  Sense strand starting at position 3911 of SEQ ID NO: 1880204
guaggaaguuugcccaguu

SEQ ID NO: 1949927 - RNA, 19 nt, Artificial Sequence
  Description of Artificial Sequence: Synthetic oligonucleotide
  Antisense strand to SEQ ID NO: 1949926
aacugggcaaacuuccuac

SEQ ID NO: 1949928 - RNA, 19 nt, Artificial Sequence
  Description of Artificial Sequence: Synthetic oligonucleotide
  Sense strand starting at position 3912 of SEQ ID NO: 1880204
uaggaaguuugcccaguua

SEQ ID NO: 1949929 - RNA, 19 nt, Artificial Sequence
  Description of Artificial Sequence: Synthetic oligonucleotide
  Antisense strand to SEQ ID NO: 1949928
uaacugggcaaacuuccua

SEQ ID NO: 1949930 - RNA, 19 nt, Artificial Sequence
  Description of Artificial Sequence: Synthetic oligonucleotide
  Sense strand starting at position 3928 of SEQ ID NO: 1880204
uuaccugcuuacuuggaua

SEQ ID NO: 1949931 - RNA, 19 nt, Artificial Sequence
  Description of Artificial Sequence: Synthetic oligonucleotide
  Antisense strand to SEQ ID NO: 1949930
uauccaaguaagcagguaa

SEQ ID NO: 1949932 - RNA, 19 nt, Artificial Sequence
  Description of Artificial Sequence: Synthetic oligonucleotide
  Sense strand starting at position 3930 of SEQ ID NO: 1880204
accugcuuacuuggauaca

SEQ ID NO: 1949933 - RNA, 19 nt, Artificial Sequence
  Description of Artificial Sequence: Synthetic oligonucleotide
  Antisense strand to SEQ ID NO: 1949932
uguauccaaguaagcaggu

SEQ ID NO: 1949934 - RNA, 19 nt, Artificial Sequence
  Description of Artificial Sequence: Synthetic oligonucleotide
  Sense strand starting at position 3933 of SEQ ID NO: 1880204
ugcuuacuuggauacaguu

SEQ ID NO: 1949935 - RNA, 19 nt, Artificial Sequence
  Description of Artificial Sequence: Synthetic oligonucleotide
  Antisense strand to SEQ ID NO: 1949934
aacuguauccaaguaagca

SEQ ID NO: 1949936 - RNA, 19 nt, Artificial Sequence
  Description of Artificial Sequence: Synthetic oligonucleotide
  Sense strand starting at position 3979 of SEQ ID NO: 1880204
cugucuaaugccuguaauu

SEQ ID NO: 1949937 - RNA, 19 nt, Artificial Sequence
  Description of Artificial Sequence: Synthetic oligonucleotide
  Antisense strand to SEQ ID NO: 1949936
aauuacaggcauuagacag

SEQ ID NO: 1949938 - RNA, 19 nt, Artificial Sequence
  Description of Artificial Sequence: Synthetic oligonucleotide
  Sense strand starting at position 33 of SEQ ID NO: 1880205
cugcaacagcuaugaagaa

SEQ ID NO: 1949939 - RNA, 19 nt, Artificial Sequence
  Description of Artificial Sequence: Synthetic oligonucleotide
  Antisense strand to SEQ ID NO: 1949938
uucuucauagcuguugcag

SEQ ID NO: 1949940 - RNA, 19 nt, Artificial Sequence
  Description of Artificial Sequence: Synthetic oligonucleotide
  Sense strand starting at position 367 of SEQ ID NO: 1880205
ggguuucuucuagaaccau

SEQ ID NO: 1949941 - RNA, 19 nt, Artificial Sequence
  Description of Artificial Sequence: Synthetic oligonucleotide
  Antisense strand to SEQ ID NO: 1949940
augguucuagaagaaaccc

SEQ ID NO: 1949942 - RNA, 19 nt, Artificial Sequence
  Description of Artificial Sequence: Synthetic oligonucleotide
  Sense strand starting at position 373 of SEQ ID NO: 1880205
cuucuagaaccauguaaug

SEQ ID NO: 1949943 - RNA, 19 nt, Artificial Sequence
  Description of Artificial Sequence: Synthetic oligonucleotide
  Antisense strand to SEQ ID NO: 1949942
cauuacaugguucuagaag

SEQ ID NO: 1949944 - RNA, 19 nt, Artificial Sequence
  Description of Artificial Sequence: Synthetic oligonucleotide
  Sense strand starting at position 623 of SEQ ID NO: 1880205
uuggauuucugccaacaaa

SEQ ID NO: 1949945 - RNA, 19 nt, Artificial Sequence
  Description of Artificial Sequence: Synthetic oligonucleotide
  Antisense strand to SEQ ID NO: 1949944
uuuguuggcagaaauccaa

SEQ ID NO: 1949946 - RNA, 19 nt, Artificial Sequence
  Description of Artificial Sequence: Synthetic oligonucleotide
  Sense strand starting at position 775 of SEQ ID NO: 1880205
ggucacuuauugcuucuga

SEQ ID NO: 1949947 - RNA, 19 nt, Artificial Sequence
  Description of Artificial Sequence: Synthetic oligonucleotide
  Antisense strand to SEQ ID NO: 1949946
ucagaagcaauaagugacc

SEQ ID NO: 1949948 - RNA, 19 nt, Artificial Sequence
  Description of Artificial Sequence: Synthetic oligonucleotide
  Sense strand starting at position 1065 of SEQ ID NO: 1880205
ccggauaaccuaggaauau

SEQ ID NO: 1949949 - RNA, 19 nt, Artificial Sequence
  Description of Artificial Sequence: Synthetic oligonucleotide
  Antisense strand to SEQ ID NO: 1949948
auauuccuagguuauccgg

SEQ ID NO: 1949950 - RNA, 19 nt, Artificial Sequence
  Description of Artificial Sequence: Synthetic oligonucleotide
  Sense strand starting at position 1155 of SEQ ID NO: 1880205
caaacucagcuuugagguu

SEQ ID NO: 1949951 - RNA, 19 nt, Artificial Sequence
  Description of Artificial Sequence: Synthetic oligonucleotide
  Antisense strand to SEQ ID NO: 1949950
aaccucaaagcugaguuug

SEQ ID NO: 1949952 - RNA, 19 nt, Artificial Sequence
  Description of Artificial Sequence: Synthetic oligonucleotide
  Sense strand starting at position 1168 of SEQ ID NO: 1880205
gagguugaauuggccagau

SEQ ID NO: 1949953 - RNA, 19 nt, Artificial Sequence
  Description of Artificial Sequence: Synthetic oligonucleotide
  Antisense strand to SEQ ID NO: 1949952
aucuggccaauucaaccuc

SEQ ID NO: 1949954 - RNA, 19 nt, Artificial Sequence
  Description of Artificial Sequence: Synthetic oligonucleotide
  Sense strand starting at position 1473 of SEQ ID NO: 1880205
ucauaaauggcucaguuaa

SEQ ID NO: 1949955 - RNA, 19 nt, Artificial Sequence
  Description of Artificial Sequence: Synthetic oligonucleotide
  Antisense strand to SEQ ID NO: 1949954
uuaacugagccauuuauga

SEQ ID NO: 1949956 - RNA, 19 nt, Artificial Sequence
  Description of Artificial Sequence: Synthetic oligonucleotide
  Sense strand starting at position 1475 of SEQ ID NO: 1880205
auaaauggcucaguuaaau

SEQ ID NO: 1949957 - RNA, 19 nt, Artificial Sequence
  Description of Artificial Sequence: Synthetic oligonucleotide
  Antisense strand to SEQ ID NO: 1949956
auuuaacugagccauuuau

SEQ ID NO: 1949958 - RNA, 19 nt, Artificial Sequence
  Description of Artificial Sequence: Synthetic oligonucleotide
  Sense strand starting at position 1488 of SEQ ID NO: 1880205
uuaaauuggcuaugcucua

SEQ ID NO: 1949959 - RNA, 19 nt, Artificial Sequence
  Description of Artificial Sequence: Synthetic oligonucleotide
  Antisense strand to SEQ ID NO: 1949958
uagagcauagccaauuuaa

SEQ ID NO: 1949960 - RNA, 19 nt, Artificial Sequence
  Description of Artificial Sequence: Synthetic oligonucleotide
  Sense strand starting at position 1493 of SEQ ID NO: 1880205
uuggcuaugcucuaugauc

SEQ ID NO: 1949961 - RNA, 19 nt, Artificial Sequence
  Description of Artificial Sequence: Synthetic oligonucleotide
  Antisense strand to SEQ ID NO: 1949960
gaucauagagcauagccaa

SEQ ID NO: 1949962 - RNA, 19 nt, Artificial Sequence
  Description of Artificial Sequence: Synthetic oligonucleotide
  Sense strand starting at position 1495 of SEQ ID NO: 1880205
ggcuaugcucuaugaucag

SEQ ID NO: 1949963 - RNA, 19 nt, Artificial Sequence
  Description of Artificial Sequence: Synthetic oligonucleotide
  Antisense strand to SEQ ID NO: 1949962
cugaucauagagcauagcc

SEQ ID NO: 1949964 - RNA, 19 nt, Artificial Sequence
  Description of Artificial Sequence: Synthetic oligonucleotide
  Sense strand starting at position 1499 of SEQ ID NO: 1880205
augcucuaugaucaguaaa

SEQ ID NO: 1949965 - RNA, 19 nt, Artificial Sequence
  Description of Artificial Sequence: Synthetic oligonucleotide
  Antisense strand to SEQ ID NO: 1949964
uuuacugaucauagagcau

SEQ ID NO: 1949966 - RNA, 19 nt, Artificial Sequence
  Description of Artificial Sequence: Synthetic oligonucleotide
  Sense strand starting at position 1501 of SEQ ID NO: 1880205
gcucuaugaucaguaaagg

SEQ ID NO: 1949967 - RNA, 19 nt, Artificial Sequence
  Description of Artificial Sequence: Synthetic oligonucleotide
  Antisense strand to SEQ ID NO: 1949966
ccuuuacugaucauagagc

SEQ ID NO: 1949968 - RNA, 19 nt, Artificial Sequence
  Description of Artificial Sequence: Synthetic oligonucleotide
  Sense strand starting at position 1502 of SEQ ID NO: 1880205
cucuaugaucaguaaaggu

SEQ ID NO: 1949969 - RNA, 19 nt, Artificial Sequence
  Description of Artificial Sequence: Synthetic oligonucleotide
  Antisense strand to SEQ ID NO: 1949968
accuuuacugaucauagag

SEQ ID NO: 1949970 - RNA, 19 nt, Artificial Sequence
  Description of Artificial Sequence: Synthetic oligonucleotide
  Sense strand starting at position 1658 of SEQ ID NO: 1880205
auguaucucagagguagac

SEQ ID NO: 1949971 - RNA, 19 nt, Artificial Sequence
  Description of Artificial Sequence: Synthetic oligonucleotide
  Antisense strand to SEQ ID NO: 1949970
gucuaccucugagauacau

SEQ ID NO: 1949972 - RNA, 19 nt, Artificial Sequence
  Description of Artificial Sequence: Synthetic oligonucleotide
  Sense strand starting at position 1690 of SEQ ID NO: 1880205
cccuacuauugguuuaaga

SEQ ID NO: 1949973 - RNA, 19 nt, Artificial Sequence
  Description of Artificial Sequence: Synthetic oligonucleotide
  Antisense strand to SEQ ID NO: 1949972
ucuuaaaccaauaguaggg

SEQ ID NO: 1949974 - RNA, 19 nt, Artificial Sequence
  Description of Artificial Sequence: Synthetic oligonucleotide
  Sense strand starting at position 1920 of SEQ ID NO: 1880205
acuuaagacuggcucagaa

SEQ ID NO: 1949975 - RNA, 19 nt, Artificial Sequence
  Description of Artificial Sequence: Synthetic oligonucleotide
  Antisense strand to SEQ ID NO: 1949974
uucugagccagucuuaagu

SEQ ID NO: 1949976 - RNA, 19 nt, Artificial Sequence
  Description of Artificial Sequence: Synthetic oligonucleotide
  Sense strand starting at position 1941 of SEQ ID NO: 1880205
augcucucaucagugaacu

SEQ ID NO: 1949977 - RNA, 19 nt, Artificial Sequence
  Description of Artificial Sequence: Synthetic oligonucleotide
  Antisense strand to SEQ ID NO: 1949976
aguucacugaugagagcau

SEQ ID NO: 1949978 - RNA, 19 nt, Artificial Sequence
  Description of Artificial Sequence: Synthetic oligonucleotide
  Sense strand starting at position 1942 of SEQ ID NO: 1880205
ugcucucaucagugaacua

SEQ ID NO: 1949979 - RNA, 19 nt, Artificial Sequence
  Description of Artificial Sequence: Synthetic oligonucleotide
  Antisense strand to SEQ ID NO: 1949978
uaguucacugaugagagca

SEQ ID NO: 1949980 - RNA, 19 nt, Artificial Sequence
  Description of Artificial Sequence: Synthetic oligonucleotide
  Sense strand starting at position 1949 of SEQ ID NO: 1880205
aucagugaacuauagucua

SEQ ID NO: 1949981 - RNA, 19 nt, Artificial Sequence
  Description of Artificial Sequence: Synthetic oligonucleotide
  Antisense strand to SEQ ID NO: 1949980
uagacuauaguucacugau

SEQ ID NO: 1949982 - RNA, 19 nt, Artificial Sequence
  Description of Artificial Sequence: Synthetic oligonucleotide
  Sense strand starting at position 1952 of SEQ ID NO: 1880205
agugaacuauagucuaagu

SEQ ID NO: 1949983 - RNA, 19 nt, Artificial Sequence
  Description of Artificial Sequence: Synthetic oligonucleotide
  Antisense strand to SEQ ID NO: 1949982
acuuagacuauaguucacu

SEQ ID NO: 1949984 - RNA, 19 nt, Artificial Sequence
  Description of Artificial Sequence: Synthetic oligonucleotide
  Sense strand starting at position 1971 of SEQ ID NO: 1880205
gagggcaaguguguaucau

SEQ ID NO: 1949985 - RNA, 19 nt, Artificial Sequence
  Description of Artificial Sequence: Synthetic oligonucleotide
  Antisense strand to SEQ ID NO: 1949984
augauacacacuugcccuc

SEQ ID NO: 1949986 - RNA, 19 nt, Artificial Sequence
  Description of Artificial Sequence: Synthetic oligonucleotide
  Sense strand starting at position 2025 of SEQ ID NO: 1880205
aggugaaagcacugcucau

SEQ ID NO: 1949987 - RNA, 19 nt, Artificial Sequence
  Description of Artificial Sequence: Synthetic oligonucleotide
  Antisense strand to SEQ ID NO: 1949986
augagcagugcuuucaccu

SEQ ID NO: 1949988 - RNA, 19 nt, Artificial Sequence
  Description of Artificial Sequence: Synthetic oligonucleotide
  Sense strand starting at position 2050 of SEQ ID NO: 1880205
cuguaaucaccucaaacgu

SEQ ID NO: 1949989 - RNA, 19 nt, Artificial Sequence
  Description of Artificial Sequence: Synthetic oligonucleotide
  Antisense strand to SEQ ID NO: 1949988
acguuugaggugauuacag

SEQ ID NO: 1949990 - RNA, 19 nt, Artificial Sequence
  Description of Artificial Sequence: Synthetic oligonucleotide
  Sense strand starting at position 2131 of SEQ ID NO: 1880205
gccagaccuuguccaaaug

SEQ ID NO: 1949991 - RNA, 19 nt, Artificial Sequence
  Description of Artificial Sequence: Synthetic oligonucleotide
  Antisense strand to SEQ ID NO: 1949990
cauuuggacaaggucuggc

SEQ ID NO: 1949992 - RNA, 19 nt, Artificial Sequence
  Description of Artificial Sequence: Synthetic oligonucleotide
  Sense strand starting at position 2347 of SEQ ID NO: 1880205
auuguaaauuguuucccua

SEQ ID NO: 1949993 - RNA, 19 nt, Artificial Sequence
  Description of Artificial Sequence: Synthetic oligonucleotide
  Antisense strand to SEQ ID NO: 1949992
uagggaaacaauuuacaau

SEQ ID NO: 1949994 - RNA, 19 nt, Artificial Sequence
  Description of Artificial Sequence: Synthetic oligonucleotide
  Sense strand starting at position 2349 of SEQ ID NO: 1880205
uguaaauuguuucccuaua

SEQ ID NO: 1949995 - RNA, 19 nt, Artificial Sequence
  Description of Artificial Sequence: Synthetic oligonucleotide
  Antisense strand to SEQ ID NO: 1949994
uauagggaaacaauuuaca

SEQ ID NO: 1949996 - RNA, 19 nt, Artificial Sequence
  Description of Artificial Sequence: Synthetic oligonucleotide
  Sense strand starting at position 2350 of SEQ ID NO: 1880205
guaaauuguuucccuauaa

SEQ ID NO: 1949997 - RNA, 19 nt, Artificial Sequence
  Description of Artificial Sequence: Synthetic oligonucleotide
  Antisense strand to SEQ ID NO: 1949996
uuauagggaaacaauuuac

SEQ ID NO: 1949998 - RNA, 19 nt, Artificial Sequence
  Description of Artificial Sequence: Synthetic oligonucleotide
  Sense strand starting at position 2354 of SEQ ID NO: 1880205
auuguuucccuauaauggu

SEQ ID NO: 1949999 - RNA, 19 nt, Artificial Sequence
  Description of Artificial Sequence: Synthetic oligonucleotide
  Antisense strand to SEQ ID NO: 1949998
accauuauagggaaacaau

SEQ ID NO: 1950000 - RNA, 19 nt, Artificial Sequence
  Description of Artificial Sequence: Synthetic oligonucleotide
  Sense strand starting at position 2593 of SEQ ID NO: 1880205
gugguaguguuaucaaaua

SEQ ID NO: 1950001 - RNA, 19 nt, Artificial Sequence
  Description of Artificial Sequence: Synthetic oligonucleotide
  Antisense strand to SEQ ID NO: 1950000
uauuugauaacacuaccac

SEQ ID NO: 1950002 - RNA, 19 nt, Artificial Sequence
  Description of Artificial Sequence: Synthetic oligonucleotide
  Sense strand starting at position 2638 of SEQ ID NO: 1880205
gcaagugagacagagcaau

SEQ ID NO: 1950003 - RNA, 19 nt, Artificial Sequence
  Description of Artificial Sequence: Synthetic oligonucleotide
  Antisense strand to SEQ ID NO: 1950002
auugcucugucucacuugc

SEQ ID NO: 1950004 - RNA, 19 nt, Artificial Sequence
  Description of Artificial Sequence: Synthetic oligonucleotide
  Sense strand starting at position 2733 of SEQ ID NO: 1880205
uaaugucagugcucugaca

SEQ ID NO: 1950005 - RNA, 19 nt, Artificial Sequence
  Description of Artificial Sequence: Synthetic oligonucleotide
  Antisense strand to SEQ ID NO: 1950004
ugucagagcacugacauua

SEQ ID NO: 1950006 - RNA, 19 nt, Artificial Sequence
  Description of Artificial Sequence: Synthetic oligonucleotide
  Sense strand starting at position 2931 of SEQ ID NO: 1880205
gcagcaggugccuauaauc

SEQ ID NO: 1950007 - RNA, 19 nt, Artificial Sequence
  Description of Artificial Sequence: Synthetic oligonucleotide
  Antisense strand to SEQ ID NO: 1950006
gauuauaggcaccugcugc

SEQ ID NO: 1950008 - RNA, 19 nt, Artificial Sequence
  Description of Artificial Sequence: Synthetic oligonucleotide
  Sense strand starting at position 3012 of SEQ ID NO: 1880205
agcugagaucgagacacuu

SEQ ID NO: 1950009 - RNA, 19 nt, Artificial Sequence
  Description of Artificial Sequence: Synthetic oligonucleotide
  Antisense strand to SEQ ID NO: 1950008
aagugucucgaucucagcu

SEQ ID NO: 1950010 - RNA, 19 nt, Artificial Sequence
  Description of Artificial Sequence: Synthetic oligonucleotide
  Sense strand starting at position 3294 of SEQ ID NO: 1880205
gggcucucaccugacuauu

SEQ ID NO: 1950011 - RNA, 19 nt, Artificial Sequence
  Description of Artificial Sequence: Synthetic oligonucleotide
  Antisense strand to SEQ ID NO: 1950010
aauagucaggugagagccc

SEQ ID NO: 1950012 - RNA, 19 nt, Artificial Sequence
  Description of Artificial Sequence: Synthetic oligonucleotide
  Sense strand starting at position 3779 of SEQ ID NO: 1880205
uauuauucugaaugaugug

SEQ ID NO: 1950013 - RNA, 19 nt, Artificial Sequence
  Description of Artificial Sequence: Synthetic oligonucleotide
  Antisense strand to SEQ ID NO: 1950012
cacaucauucagaauaaua

SEQ ID NO: 1950014 - RNA, 19 nt, Artificial Sequence
  Description of Artificial Sequence: Synthetic oligonucleotide
  Sense strand starting at position 3875 of SEQ ID NO: 1880205
aguuccuaacaauguguuu

SEQ ID NO: 1950015 - RNA, 19 nt, Artificial Sequence
  Description of Artificial Sequence: Synthetic oligonucleotide
  Antisense strand to SEQ ID NO: 1950014
aaacacauuguuaggaacu

SEQ ID NO: 1950016 - RNA, 19 nt, Artificial Sequence
  Description of Artificial Sequence: Synthetic oligonucleotide
  Sense strand starting at position 3983 of SEQ ID NO: 1880205
gguacaaauuauucuuggu

SEQ ID NO: 1950017 - RNA, 19 nt, Artificial Sequence
  Description of Artificial Sequence: Synthetic oligonucleotide
  Antisense strand to SEQ ID NO: 1950016
accaagaauaauuuguacc

SEQ ID NO: 1950018 - RNA, 19 nt, Artificial Sequence
  Description of Artificial Sequence: Synthetic oligonucleotide
  Sense strand starting at position 292 of SEQ ID NO: 1880206
gcuccuauauuugacugaa

SEQ ID NO: 1950019 - RNA, 19 nt, Artificial Sequence
  Description of Artificial Sequence: Synthetic oligonucleotide
  Antisense strand to SEQ ID NO: 1950018
uucagucaaauauaggagc

SEQ ID NO: 1950020 - RNA, 19 nt, Artificial Sequence
  Description of Artificial Sequence: Synthetic oligonucleotide
  Sense strand starting at position 329 of SEQ ID NO: 1880206
uauugucaguucuugagau

SEQ ID NO: 1950021 - RNA, 19 nt, Artificial Sequence
  Description of Artificial Sequence: Synthetic oligonucleotide
  Antisense strand to SEQ ID NO: 1950020
aucucaagaacugacaaua

SEQ ID NO: 1950022 - RNA, 19 nt, Artificial Sequence
  Description of Artificial Sequence: Synthetic oligonucleotide
  Sense strand starting at position 558 of SEQ ID NO: 1880206
gaaagaaacuggcaggaua

SEQ ID NO: 1950023 - RNA, 19 nt, Artificial Sequence
  Description of Artificial Sequence: Synthetic oligonucleotide
  Antisense strand to SEQ ID NO: 1950022
uauccugccaguuucuuuc

SEQ ID NO: 1950024 - RNA, 19 nt, Artificial Sequence
  Description of Artificial Sequence: Synthetic oligonucleotide
  Sense strand starting at position 630 of SEQ ID NO: 1880206
ugcagcugucccuagacuu

SEQ ID NO: 1950025 - RNA, 19 nt, Artificial Sequence
  Description of Artificial Sequence: Synthetic oligonucleotide
  Antisense strand to SEQ ID NO: 1950024
aagucuagggacagcugca

SEQ ID NO: 1950026 - RNA, 19 nt, Artificial Sequence
  Description of Artificial Sequence: Synthetic oligonucleotide
  Sense strand starting at position 1746 of SEQ ID NO: 1880206
auugaucaccucugaaguu

SEQ ID NO: 1950027 - RNA, 19 nt, Artificial Sequence
  Description of Artificial Sequence: Synthetic oligonucleotide
  Antisense strand to SEQ ID NO: 1950026
aacuucagaggugaucaau

SEQ ID NO: 1950028 - RNA, 19 nt, Artificial Sequence
  Description of Artificial Sequence: Synthetic oligonucleotide
  Sense strand starting at position 1833 of SEQ ID NO: 1880206
gccuucugcuucccauaga

SEQ ID NO: 1950029 - RNA, 19 nt, Artificial Sequence
  Description of Artificial Sequence: Synthetic oligonucleotide
  Antisense strand to SEQ ID NO: 1950028
ucuaugggaagcagaaggc

SEQ ID NO: 1950030 - RNA, 19 nt, Artificial Sequence
  Description of Artificial Sequence: Synthetic oligonucleotide
  Sense strand starting at position 1836 of SEQ ID NO: 1880206
uucugcuucccauagagau

SEQ ID NO: 1950031 - RNA, 19 nt, Artificial Sequence
  Description of Artificial Sequence: Synthetic oligonucleotide
  Antisense strand to SEQ ID NO: 1950030
aucucuaugggaagcagaa

SEQ ID NO: 1950032 - RNA, 19 nt, Artificial Sequence
  Description of Artificial Sequence: Synthetic oligonucleotide
  Sense strand starting at position 1846 of SEQ ID NO: 1880206
cauagagauuguccugcaa

SEQ ID NO: 1950033 - RNA, 19 nt, Artificial Sequence
  Description of Artificial Sequence: Synthetic oligonucleotide
  Antisense strand to SEQ ID NO: 1950032
uugcaggacaaucucuaug

SEQ ID NO: 1950034 - RNA, 19 nt, Artificial Sequence
  Description of Artificial Sequence: Synthetic oligonucleotide
  Sense strand starting at position 1872 of SEQ ID NO: 1880206
guaagccauuguguuacua

SEQ ID NO: 1950035 - RNA, 19 nt, Artificial Sequence
  Description of Artificial Sequence: Synthetic oligonucleotide
  Antisense strand to SEQ ID NO: 1950034
uaguaacacaauggcuuac

SEQ ID NO: 1950036 - RNA, 19 nt, Artificial Sequence
  Description of Artificial Sequence: Synthetic oligonucleotide
  Sense strand starting at position 1876 of SEQ ID NO: 1880206
gccauuguguuacuaauuc

SEQ ID NO: 1950037 - RNA, 19 nt, Artificial Sequence
  Description of Artificial Sequence: Synthetic oligonucleotide
  Antisense strand to SEQ ID NO: 1950036
gaauuaguaacacaauggc

SEQ ID NO: 1950038 - RNA, 19 nt, Artificial Sequence
  Description of Artificial Sequence: Synthetic oligonucleotide
  Sense strand starting at position 1938 of SEQ ID NO: 1880206
gucccauauccgcauuucu

SEQ ID NO: 1950039 - RNA, 19 nt, Artificial Sequence
  Description of Artificial Sequence: Synthetic oligonucleotide
  Antisense strand to SEQ ID NO: 1950038
agaaaugcggauaugggac

SEQ ID NO: 1950040 - RNA, 19 nt, Artificial Sequence
  Description of Artificial Sequence: Synthetic oligonucleotide
  Sense strand starting at position 2012 of SEQ ID NO: 1880206
cagugugugcuacauggaa

SEQ ID NO: 1950041 - RNA, 19 nt, Artificial Sequence
  Description of Artificial Sequence: Synthetic oligonucleotide
  Antisense strand to SEQ ID NO: 1950040
uuccauguagcacacacug

SEQ ID NO: 1950042 - RNA, 19 nt, Artificial Sequence
  Description of Artificial Sequence: Synthetic oligonucleotide
  Sense strand starting at position 2184 of SEQ ID NO: 1880206
gguaaaucauguucuaacc

SEQ ID NO: 1950043 - RNA, 19 nt, Artificial Sequence
  Description of Artificial Sequence: Synthetic oligonucleotide
  Antisense strand to SEQ ID NO: 1950042
gguuagaacaugauuuacc

SEQ ID NO: 1950044 - RNA, 19 nt, Artificial Sequence
  Description of Artificial Sequence: Synthetic oligonucleotide
  Sense strand starting at position 2203 of SEQ ID NO: 1880206
aucuuugcccucugguaau

SEQ ID NO: 1950045 - RNA, 19 nt, Artificial Sequence
  Description of Artificial Sequence: Synthetic oligonucleotide
  Antisense strand to SEQ ID NO: 1950044
auuaccagagggcaaagau

SEQ ID NO: 1950046 - RNA, 19 nt, Artificial Sequence
  Description of Artificial Sequence: Synthetic oligonucleotide
  Sense strand starting at position 2213 of SEQ ID NO: 1880206
ucugguaaugaauagcuaa

SEQ ID NO: 1950047 - RNA, 19 nt, Artificial Sequence
  Description of Artificial Sequence: Synthetic oligonucleotide
  Antisense strand to SEQ ID NO: 1950046
uuagcuauucauuaccaga

SEQ ID NO: 1950048 - RNA, 19 nt, Artificial Sequence
  Description of Artificial Sequence: Synthetic oligonucleotide
  Sense strand starting at position 2492 of SEQ ID NO: 1880206
ggaggcaauuagccaagau

SEQ ID NO: 1950049 - RNA, 19 nt, Artificial Sequence
  Description of Artificial Sequence: Synthetic oligonucleotide
  Antisense strand to SEQ ID NO: 1950048
aucuuggcuaauugccucc

SEQ ID NO: 1950050 - RNA, 19 nt, Artificial Sequence
  Description of Artificial Sequence: Synthetic oligonucleotide
  Sense strand starting at position 2598 of SEQ ID NO: 1880206
guaaccuuauaguucuauu

SEQ ID NO: 1950051 - RNA, 19 nt, Artificial Sequence
  Description of Artificial Sequence: Synthetic oligonucleotide
  Antisense strand to SEQ ID NO: 1950050
aauagaacuauaagguuac

SEQ ID NO: 1950052 - RNA, 19 nt, Artificial Sequence
  Description of Artificial Sequence: Synthetic oligonucleotide
  Sense strand starting at position 2609 of SEQ ID NO: 1880206
guucuauuagguugacuac

SEQ ID NO: 1950053 - RNA, 19 nt, Artificial Sequence
  Description of Artificial Sequence: Synthetic oligonucleotide
  Antisense strand to SEQ ID NO: 1950052
guagucaaccuaauagaac

SEQ ID NO: 1950054 - RNA, 19 nt, Artificial Sequence
  Description of Artificial Sequence: Synthetic oligonucleotide
  Sense strand starting at position 2612 of SEQ ID NO: 1880206
cuauuagguugacuacuua

SEQ ID NO: 1950055 - RNA, 19 nt, Artificial Sequence
  Description of Artificial Sequence: Synthetic oligonucleotide
  Antisense strand to SEQ ID NO: 1950054
uaaguagucaaccuaauag

SEQ ID NO: 1950056 - RNA, 19 nt, Artificial Sequence
  Description of Artificial Sequence: Synthetic oligonucleotide
  Sense strand starting at position 2687 of SEQ ID NO: 1880206
agcuuuggguagucacuaa

SEQ ID NO: 1950057 - RNA, 19 nt, Artificial Sequence
  Description of Artificial Sequence: Synthetic oligonucleotide
  Antisense strand to SEQ ID NO: 1950056
uuagugacuacccaaagcu

SEQ ID NO: 1950058 - RNA, 19 nt, Artificial Sequence
  Description of Artificial Sequence: Synthetic oligonucleotide
  Sense strand starting at position 2691 of SEQ ID NO: 1880206
uuggguagucacuaacuua

SEQ ID NO: 1950059 - RNA, 19 nt, Artificial Sequence
  Description of Artificial Sequence: Synthetic oligonucleotide
  Antisense strand to SEQ ID NO: 1950058
uaaguuagugacuacccaa

SEQ ID NO: 1950060 - RNA, 19 nt, Artificial Sequence
  Description of Artificial Sequence: Synthetic oligonucleotide
  Sense strand starting at position 2719 of SEQ ID NO: 1880206
auagguccauagucacaaa

SEQ ID NO: 1950061 - RNA, 19 nt, Artificial Sequence
  Description of Artificial Sequence: Synthetic oligonucleotide
  Antisense strand to SEQ ID NO: 1950060
uuugugacuauggaccuau

SEQ ID NO: 1950062 - RNA, 19 nt, Artificial Sequence
  Description of Artificial Sequence: Synthetic oligonucleotide
  Sense strand starting at position 2738 of SEQ ID NO: 1880206
ugaggacagcuuuacaugu

SEQ ID NO: 1950063 - RNA, 19 nt, Artificial Sequence
  Description of Artificial Sequence: Synthetic oligonucleotide
  Antisense strand to SEQ ID NO: 1950062
acauguaaagcuguccuca

SEQ ID NO: 1950064 - RNA, 19 nt, Artificial Sequence
  Description of Artificial Sequence: Synthetic oligonucleotide
  Sense strand starting at position 2784 of SEQ ID NO: 1880206
acccuuaauuaagaggcaa

SEQ ID NO: 1950065 - RNA, 19 nt, Artificial Sequence
  Description of Artificial Sequence: Synthetic oligonucleotide
  Antisense strand to SEQ ID NO: 1950064
uugccucuuaauuaagggu

SEQ ID NO: 1950066 - RNA, 19 nt, Artificial Sequence
  Description of Artificial Sequence: Synthetic oligonucleotide
  Sense strand starting at position 2800 of SEQ ID NO: 1880206
caaggaagcuaugacagau

SEQ ID NO: 1950067 - RNA, 19 nt, Artificial Sequence
  Description of Artificial Sequence: Synthetic oligonucleotide
  Antisense strand to SEQ ID NO: 1950066
aucugucauagcuuccuug

SEQ ID NO: 1950068 - RNA, 19 nt, Artificial Sequence
  Description of Artificial Sequence: Synthetic oligonucleotide
  Sense strand starting at position 2830 of SEQ ID NO: 1880206
gcaguaauaggucagcuau

SEQ ID NO: 1950069 - RNA, 19 nt, Artificial Sequence
  Description of Artificial Sequence: Synthetic oligonucleotide
  Antisense strand to SEQ ID NO: 1950068
auagcugaccuauuacugc

SEQ ID NO: 1950070 - RNA, 19 nt, Artificial Sequence
  Description of Artificial Sequence: Synthetic oligonucleotide
  Sense strand starting at position 2832 of SEQ ID NO: 1880206
aguaauaggucagcuauua

SEQ ID NO: 1950071 - RNA, 19 nt, Artificial Sequence
  Description of Artificial Sequence: Synthetic oligonucleotide
  Antisense strand to SEQ ID NO: 1950070
uaauagcugaccuauuacu

SEQ ID NO: 1950072 - RNA, 19 nt, Artificial Sequence
  Description of Artificial Sequence: Synthetic oligonucleotide
  Sense strand starting at position 2936 of SEQ ID NO: 1880206
ucugaaaccugucugaaac

SEQ ID NO: 1950073 - RNA, 19 nt, Artificial Sequence
  Description of Artificial Sequence: Synthetic oligonucleotide
  Antisense strand to SEQ ID NO: 1950072
guuucagacagguuucaga

SEQ ID NO: 1950074 - RNA, 19 nt, Artificial Sequence
  Description of Artificial Sequence: Synthetic oligonucleotide
  Sense strand starting at position 2937 of SEQ ID NO: 1880206
cugaaaccugucugaaacu

SEQ ID NO: 1950075 - RNA, 19 nt, Artificial Sequence
  Description of Artificial Sequence: Synthetic oligonucleotide
  Antisense strand to SEQ ID NO: 1950074
aguuucagacagguuucag

SEQ ID NO: 1950076 - RNA, 19 nt, Artificial Sequence
  Description of Artificial Sequence: Synthetic oligonucleotide
  Sense strand starting at position 3068 of SEQ ID NO: 1880206
ggauuaagcugaucaacuu

SEQ ID NO: 1950077 - RNA, 19 nt, Artificial Sequence
  Description of Artificial Sequence: Synthetic oligonucleotide
  Antisense strand to SEQ ID NO: 1950076
aaguugaucagcuuaaucc

SEQ ID NO: 1950078 - RNA, 19 nt, Artificial Sequence
  Description of Artificial Sequence: Synthetic oligonucleotide
  Sense strand starting at position 3270 of SEQ ID NO: 1880206
ucagaaguucgagacccau

SEQ ID NO: 1950079 - RNA, 19 nt, Artificial Sequence
  Description of Artificial Sequence: Synthetic oligonucleotide
  Antisense strand to SEQ ID NO: 1950078
augggucucgaacuucuga

SEQ ID NO: 1950080 - RNA, 19 nt, Artificial Sequence
  Description of Artificial Sequence: Synthetic oligonucleotide
  Sense strand starting at position 3543 of SEQ ID NO: 1880206
agcccugguccugaaacau

SEQ ID NO: 1950081 - RNA, 19 nt, Artificial Sequence
  Description of Artificial Sequence: Synthetic oligonucleotide
  Antisense strand to SEQ ID NO: 1950080
auguuucaggaccagggcu

SEQ ID NO: 1950082 - RNA, 19 nt, Artificial Sequence
  Description of Artificial Sequence: Synthetic oligonucleotide
  Sense strand starting at position 3579 of SEQ ID NO: 1880206
gcagcuugcagguauugua

SEQ ID NO: 1950083 - RNA, 19 nt, Artificial Sequence
  Description of Artificial Sequence: Synthetic oligonucleotide
  Antisense strand to SEQ ID NO: 1950082
uacaauaccugcaagcugc

SEQ ID NO: 1950084 - RNA, 19 nt, Artificial Sequence
  Description of Artificial Sequence: Synthetic oligonucleotide
  Sense strand starting at position 3599 of SEQ ID NO: 1880206
ugaccugcgcugucaaagu

SEQ ID NO: 1950085 - RNA, 19 nt, Artificial Sequence
  Description of Artificial Sequence: Synthetic oligonucleotide
  Antisense strand to SEQ ID NO: 1950084
acuuugacagcgcagguca

SEQ ID NO: 1950086 - RNA, 19 nt, Artificial Sequence
  Description of Artificial Sequence: Synthetic oligonucleotide
  Sense strand starting at position 3610 of SEQ ID NO: 1880206
gucaaagucuuuccagguu

SEQ ID NO: 1950087 - RNA, 19 nt, Artificial Sequence
  Description of Artificial Sequence: Synthetic oligonucleotide
  Antisense strand to SEQ ID NO: 1950086
aaccuggaaagacuuugac

SEQ ID NO: 1950088 - RNA, 19 nt, Artificial Sequence
  Description of Artificial Sequence: Synthetic oligonucleotide
  Sense strand starting at position 3775 of SEQ ID NO: 1880206
aguccucgaucaccagaaa

SEQ ID NO: 1950089 - RNA, 19 nt, Artificial Sequence
  Description of Artificial Sequence: Synthetic oligonucleotide
  Antisense strand to SEQ ID NO: 1950088
uuucuggugaucgaggacu

SEQ ID NO: 1950090 - RNA, 19 nt, Artificial Sequence
  Description of Artificial Sequence: Synthetic oligonucleotide
  Sense strand starting at position 3879 of SEQ ID NO: 1880206
ugguccucagaaugauaca

SEQ ID NO: 1950091 - RNA, 19 nt, Artificial Sequence
  Description of Artificial Sequence: Synthetic oligonucleotide
  Antisense strand to SEQ ID NO: 1950090
uguaucauucugaggacca

SEQ ID NO: 1950092 - RNA, 19 nt, Artificial Sequence
  Description of Artificial Sequence: Synthetic oligonucleotide
  Sense strand starting at position 3940 of SEQ ID NO: 1880206
ucaguuaagcugugucaca

SEQ ID NO: 1950093 - RNA, 19 nt, Artificial Sequence
  Description of Artificial Sequence: Synthetic oligonucleotide
  Antisense strand to SEQ ID NO: 1950092
ugugacacagcuuaacuga

SEQ ID NO: 1950094 - RNA, 19 nt, Artificial Sequence
  Description of Artificial Sequence: Synthetic oligonucleotide
  Sense strand starting at position 3941 of SEQ ID NO: 1880206
caguuaagcugugucacau

SEQ ID NO: 1950095 - RNA, 19 nt, Artificial Sequence
  Description of Artificial Sequence: Synthetic oligonucleotide
  Antisense strand to SEQ ID NO: 1950094
augugacacagcuuaacug

SEQ ID NO: 1950096 - RNA, 19 nt, Artificial Sequence
  Description of Artificial Sequence: Synthetic oligonucleotide
  Sense strand starting at position 3982 of SEQ ID NO: 1880206
gagucuuaugcugguuaac

SEQ ID NO: 1950097 - RNA, 19 nt, Artificial Sequence
  Description of Artificial Sequence: Synthetic oligonucleotide
  Antisense strand to SEQ ID NO: 1950096
guuaaccagcauaagacuc

SEQ ID NO: 1950098 - RNA, 19 nt, Artificial Sequence
  Description of Artificial Sequence: Synthetic oligonucleotide
  Sense strand starting at position 66 of SEQ ID NO: 1880207
guuaaauaaucaguaggua

SEQ ID NO: 1950099 - RNA, 19 nt, Artificial Sequence
  Description of Artificial Sequence: Synthetic oligonucleotide
  Antisense strand to SEQ ID NO: 1950098
uaccuacugauuauuuaac

SEQ ID NO: 1950100 - RNA, 19 nt, Artificial Sequence
  Description of Artificial Sequence: Synthetic oligonucleotide
  Sense strand starting at position 176 of SEQ ID NO: 1880207
auguguggacaucaaaugu

SEQ ID NO: 1950101 - RNA, 19 nt, Artificial Sequence
  Description of Artificial Sequence: Synthetic oligonucleotide
  Antisense strand to SEQ ID NO: 1950100
acauuugauguccacacau

SEQ ID NO: 1950102 - RNA, 19 nt, Artificial Sequence
  Description of Artificial Sequence: Synthetic oligonucleotide
  Sense strand starting at position 182 of SEQ ID NO: 1880207
ggacaucaaauguggcaua

SEQ ID NO: 1950103 - RNA, 19 nt, Artificial Sequence
  Description of Artificial Sequence: Synthetic oligonucleotide
  Antisense strand to SEQ ID NO: 1950102
uaugccacauuugaugucc

SEQ ID NO: 1950104 - RNA, 19 nt, Artificial Sequence
  Description of Artificial Sequence: Synthetic oligonucleotide
  Sense strand starting at position 203 of SEQ ID NO: 1880207
uggugagaagacugucauu

SEQ ID NO: 1950105 - RNA, 19 nt, Artificial Sequence
  Description of Artificial Sequence: Synthetic oligonucleotide
  Antisense strand to SEQ ID NO: 1950104
aaugacagucuucucacca

SEQ ID NO: 1950106 - RNA, 19 nt, Artificial Sequence
  Description of Artificial Sequence: Synthetic oligonucleotide
  Sense strand starting at position 492 of SEQ ID NO: 1880207
cucagagacuuaccuuagu

SEQ ID NO: 1950107 - RNA, 19 nt, Artificial Sequence
  Description of Artificial Sequence: Synthetic oligonucleotide
  Antisense strand to SEQ ID NO: 1950106
acuaagguaagucucugag

SEQ ID NO: 1950108 - RNA, 19 nt, Artificial Sequence
  Description of Artificial Sequence: Synthetic oligonucleotide
  Sense strand starting at position 518 of SEQ ID NO: 1880207
cugagaugaccuugugacu

SEQ ID NO: 1950109 - RNA, 19 nt, Artificial Sequence
  Description of Artificial Sequence: Synthetic oligonucleotide
  Antisense strand to SEQ ID NO: 1950108
agucacaaggucaucucag

SEQ ID NO: 1950110 - RNA, 19 nt, Artificial Sequence
  Description of Artificial Sequence: Synthetic oligonucleotide
  Sense strand starting at position 963 of SEQ ID NO: 1880207
acuuaaguggguuggcaaa

SEQ ID NO: 1950111 - RNA, 19 nt, Artificial Sequence
  Description of Artificial Sequence: Synthetic oligonucleotide
  Antisense strand to SEQ ID NO: 1950110
uuugccaacccacuuaagu

SEQ ID NO: 1950112 - RNA, 19 nt, Artificial Sequence
  Description of Artificial Sequence: Synthetic oligonucleotide
  Sense strand starting at position 1044 of SEQ ID NO: 1880207
uucuccucagaguaaguuu

SEQ ID NO: 1950113 - RNA, 19 nt, Artificial Sequence
  Description of Artificial Sequence: Synthetic oligonucleotide
  Antisense strand to SEQ ID NO: 1950112
aaacuuacucugaggagaa

SEQ ID NO: 1950114 - RNA, 19 nt, Artificial Sequence
  Description of Artificial Sequence: Synthetic oligonucleotide
  Sense strand starting at position 1052 of SEQ ID NO: 1880207
agaguaaguuuccuaaucu

SEQ ID NO: 1950115 - RNA, 19 nt, Artificial Sequence
  Description of Artificial Sequence: Synthetic oligonucleotide
  Antisense strand to SEQ ID NO: 1950114
agauuaggaaacuuacucu

SEQ ID NO: 1950116 - RNA, 19 nt, Artificial Sequence
  Description of Artificial Sequence: Synthetic oligonucleotide
  Sense strand starting at position 1175 of SEQ ID NO: 1880207
uuuggauacuugcuuaaca

SEQ ID NO: 1950117 - RNA, 19 nt, Artificial Sequence
  Description of Artificial Sequence: Synthetic oligonucleotide
  Antisense strand to SEQ ID NO: 1950116
uguuaagcaaguauccaaa

SEQ ID NO: 1950118 - RNA, 19 nt, Artificial Sequence
  Description of Artificial Sequence: Synthetic oligonucleotide
  Sense strand starting at position 1176 of SEQ ID NO: 1880207
uuggauacuugcuuaacaa

SEQ ID NO: 1950119 - RNA, 19 nt, Artificial Sequence
  Description of Artificial Sequence: Synthetic oligonucleotide
  Antisense strand to SEQ ID NO: 1950118
uuguuaagcaaguauccaa

SEQ ID NO: 1950120 - RNA, 19 nt, Artificial Sequence
  Description of Artificial Sequence: Synthetic oligonucleotide
  Sense strand starting at position 1441 of SEQ ID NO: 1880207
ccacuuguuggugaugacu

SEQ ID NO: 1950121 - RNA, 19 nt, Artificial Sequence
  Description of Artificial Sequence: Synthetic oligonucleotide
  Antisense strand to SEQ ID NO: 1950120
agucaucaccaacaagugg

SEQ ID NO: 1950122 - RNA, 19 nt, Artificial Sequence
  Description of Artificial Sequence: Synthetic oligonucleotide
  Sense strand starting at position 1625 of SEQ ID NO: 1880207
cagcuuguuguugucagua

SEQ ID NO: 1950123 - RNA, 19 nt, Artificial Sequence
  Description of Artificial Sequence: Synthetic oligonucleotide
  Antisense strand to SEQ ID NO: 1950122
uacugacaacaacaagcug

SEQ ID NO: 1950124 - RNA, 19 nt, Artificial Sequence
  Description of Artificial Sequence: Synthetic oligonucleotide
  Sense strand starting at position 1839 of SEQ ID NO: 1880207
aguuauaagcuugacuaca

SEQ ID NO: 1950125 - RNA, 19 nt, Artificial Sequence
  Description of Artificial Sequence: Synthetic oligonucleotide
  Antisense strand to SEQ ID NO: 1950124
uguagucaagcuuauaacu

SEQ ID NO: 1950126 - RNA, 19 nt, Artificial Sequence
  Description of Artificial Sequence: Synthetic oligonucleotide
  Sense strand starting at position 1909 of SEQ ID NO: 1880207
acauaaugugcugauaaau

SEQ ID NO: 1950127 - RNA, 19 nt, Artificial Sequence
  Description of Artificial Sequence: Synthetic oligonucleotide
  Antisense strand to SEQ ID NO: 1950126
auuuaucagcacauuaugu

SEQ ID NO: 1950128 - RNA, 19 nt, Artificial Sequence
  Description of Artificial Sequence: Synthetic oligonucleotide
  Sense strand starting at position 1918 of SEQ ID NO: 1880207
gcugauaaaugcuuaauaa

SEQ ID NO: 1950129 - RNA, 19 nt, Artificial Sequence
  Description of Artificial Sequence: Synthetic oligonucleotide
  Antisense strand to SEQ ID NO: 1950128
uuauuaagcauuuaucagc

SEQ ID NO: 1950130 - RNA, 19 nt, Artificial Sequence
  Description of Artificial Sequence: Synthetic oligonucleotide
  Sense strand starting at position 1970 of SEQ ID NO: 1880207
cagcguuugccaguuucca

SEQ ID NO: 1950131 - RNA, 19 nt, Artificial Sequence
  Description of Artificial Sequence: Synthetic oligonucleotide
  Antisense strand to SEQ ID NO: 1950130
uggaaacuggcaaacgcug

SEQ ID NO: 1950132 - RNA, 19 nt, Artificial Sequence
  Description of Artificial Sequence: Synthetic oligonucleotide
  Sense strand starting at position 1971 of SEQ ID NO: 1880207
agcguuugccaguuuccau

SEQ ID NO: 1950133 - RNA, 19 nt, Artificial Sequence
  Description of Artificial Sequence: Synthetic oligonucleotide
  Antisense strand to SEQ ID NO: 1950132
auggaaacuggcaaacgcu

SEQ ID NO: 1950134 - RNA, 19 nt, Artificial Sequence
  Description of Artificial Sequence: Synthetic oligonucleotide
  Sense strand starting at position 1989 of SEQ ID NO: 1880207
ugguguaaauucuccuaac

SEQ ID NO: 1950135 - RNA, 19 nt, Artificial Sequence
  Description of Artificial Sequence: Synthetic oligonucleotide
  Antisense strand to SEQ ID NO: 1950134
guuaggagaauuuacacca

SEQ ID NO: 1950136 - RNA, 19 nt, Artificial Sequence
  Description of Artificial Sequence: Synthetic oligonucleotide
  Sense strand starting at position 1990 of SEQ ID NO: 1880207
gguguaaauucuccuaaca

SEQ ID NO: 1950137 - RNA, 19 nt, Artificial Sequence
  Description of Artificial Sequence: Synthetic oligonucleotide
  Antisense strand to SEQ ID NO: 1950136
uguuaggagaauuuacacc

SEQ ID NO: 1950138 - RNA, 19 nt, Artificial Sequence
  Description of Artificial Sequence: Synthetic oligonucleotide
  Sense strand starting at position 2355 of SEQ ID NO: 1880207
ggacuuacuuugucaagua

SEQ ID NO: 1950139 - RNA, 19 nt, Artificial Sequence
  Description of Artificial Sequence: Synthetic oligonucleotide
  Antisense strand to SEQ ID NO: 1950138
uacuugacaaaguaagucc

SEQ ID NO: 1950140 - RNA, 19 nt, Artificial Sequence
  Description of Artificial Sequence: Synthetic oligonucleotide
  Sense strand starting at position 2391 of SEQ ID NO: 1880207
auacaagauugauugccuu

SEQ ID NO: 1950141 - RNA, 19 nt, Artificial Sequence
  Description of Artificial Sequence: Synthetic oligonucleotide
  Antisense strand to SEQ ID NO: 1950140
aaggcaaucaaucuuguau

SEQ ID NO: 1950142 - RNA, 19 nt, Artificial Sequence
  Description of Artificial Sequence: Synthetic oligonucleotide
  Sense strand starting at position 2419 of SEQ ID NO: 1880207
agcagaagugagggugaau

SEQ ID NO: 1950143 - RNA, 19 nt, Artificial Sequence
  Description of Artificial Sequence: Synthetic oligonucleotide
  Antisense strand to SEQ ID NO: 1950142
auucacccucacuucugcu

SEQ ID NO: 1950144 - RNA, 19 nt, Artificial Sequence
  Description of Artificial Sequence: Synthetic oligonucleotide
  Sense strand starting at position 2460 of SEQ ID NO: 1880207
gaaggccuguauucuagaa

SEQ ID NO: 1950145 - RNA, 19 nt, Artificial Sequence
  Description of Artificial Sequence: Synthetic oligonucleotide
  Antisense strand to SEQ ID NO: 1950144
uucuagaauacaggccuuc

SEQ ID NO: 1950146 - RNA, 19 nt, Artificial Sequence
  Description of Artificial Sequence: Synthetic oligonucleotide
  Sense strand starting at position 2536 of SEQ ID NO: 1880207
gugagaccauauccacuaa

SEQ ID NO: 1950147 - RNA, 19 nt, Artificial Sequence
  Description of Artificial Sequence: Synthetic oligonucleotide
  Antisense strand to SEQ ID NO: 1950146
uuaguggauauggucucac

SEQ ID NO: 1950148 - RNA, 19 nt, Artificial Sequence
  Description of Artificial Sequence: Synthetic oligonucleotide
  Sense strand starting at position 2556 of SEQ ID NO: 1880207
gccugcugggugugaauuu

SEQ ID NO: 1950149 - RNA, 19 nt, Artificial Sequence
  Description of Artificial Sequence: Synthetic oligonucleotide
  Antisense strand to SEQ ID NO: 1950148
aaauucacacccagcaggc

SEQ ID NO: 1950150 - RNA, 19 nt, Artificial Sequence
  Description of Artificial Sequence: Synthetic oligonucleotide
  Sense strand starting at position 2594 of SEQ ID NO: 1880207
agaguugggccagauuauc

SEQ ID NO: 1950151 - RNA, 19 nt, Artificial Sequence
  Description of Artificial Sequence: Synthetic oligonucleotide
  Antisense strand to SEQ ID NO: 1950150
gauaaucuggcccaacucu

SEQ ID NO: 1950152 - RNA, 19 nt, Artificial Sequence
  Description of Artificial Sequence: Synthetic oligonucleotide
  Sense strand starting at position 2600 of SEQ ID NO: 1880207
gggccagauuaucuguaug

SEQ ID NO: 1950153 - RNA, 19 nt, Artificial Sequence
  Description of Artificial Sequence: Synthetic oligonucleotide
  Antisense strand to SEQ ID NO: 1950152
cauacagauaaucuggccc

SEQ ID NO: 1950154 - RNA, 19 nt, Artificial Sequence
  Description of Artificial Sequence: Synthetic oligonucleotide
  Sense strand starting at position 2603 of SEQ ID NO: 1880207
ccagauuaucuguaugcuc

SEQ ID NO: 1950155 - RNA, 19 nt, Artificial Sequence
  Description of Artificial Sequence: Synthetic oligonucleotide
  Antisense strand to SEQ ID NO: 1950154
gagcauacagauaaucugg

SEQ ID NO: 1950156 - RNA, 19 nt, Artificial Sequence
  Description of Artificial Sequence: Synthetic oligonucleotide
  Sense strand starting at position 2812 of SEQ ID NO: 1880207
ccaaguguccgucaaugga

SEQ ID NO: 1950157 - RNA, 19 nt, Artificial Sequence
  Description of Artificial Sequence: Synthetic oligonucleotide
  Antisense strand to SEQ ID NO: 1950156
uccauugacggacacuugg

SEQ ID NO: 1950158 - RNA, 19 nt, Artificial Sequence
  Description of Artificial Sequence: Synthetic oligonucleotide
  Sense strand starting at position 2951 of SEQ ID NO: 1880207
ggauaaaugcugcauaauu

SEQ ID NO: 1950159 - RNA, 19 nt, Artificial Sequence
  Description of Artificial Sequence: Synthetic oligonucleotide
  Antisense strand to SEQ ID NO: 1950158
aauuaugcagcauuuaucc

SEQ ID NO: 1950160 - RNA, 19 nt, Artificial Sequence
  Description of Artificial Sequence: Synthetic oligonucleotide
  Sense strand starting at position 3581 of SEQ ID NO: 1880207
uuuguauuacgugugucuu

SEQ ID NO: 1950161 - RNA, 19 nt, Artificial Sequence
  Description of Artificial Sequence: Synthetic oligonucleotide
  Antisense strand to SEQ ID NO: 1950160
aagacacacguaauacaaa

SEQ ID NO: 1950162 - RNA, 19 nt, Artificial Sequence
  Description of Artificial Sequence: Synthetic oligonucleotide
  Sense strand starting at position 3699 of SEQ ID NO: 1880207
cccucaguaggugauagua

SEQ ID NO: 1950163 - RNA, 19 nt, Artificial Sequence
  Description of Artificial Sequence: Synthetic oligonucleotide
  Antisense strand to SEQ ID NO: 1950162
uacuaucaccuacugaggg

SEQ ID NO: 1950164 - RNA, 19 nt, Artificial Sequence
  Description of Artificial Sequence: Synthetic oligonucleotide
  Sense strand starting at position 3731 of SEQ ID NO: 1880207
aaaucacgaguguaaauua

SEQ ID NO: 1950165 - RNA, 19 nt, Artificial Sequence
  Description of Artificial Sequence: Synthetic oligonucleotide
  Antisense strand to SEQ ID NO: 1950164
uaauuuacacucgugauuu

SEQ ID NO: 1950166 - RNA, 19 nt, Artificial Sequence
  Description of Artificial Sequence: Synthetic oligonucleotide
  Sense strand starting at position 3766 of SEQ ID NO: 1880207
caaugagguucuucggaga

SEQ ID NO: 1950167 - RNA, 19 nt, Artificial Sequence
  Description of Artificial Sequence: Synthetic oligonucleotide
  Antisense strand to SEQ ID NO: 1950166
ucuccgaagaaccucauug

SEQ ID NO: 1950168 - RNA, 19 nt, Artificial Sequence
  Description of Artificial Sequence: Synthetic oligonucleotide
  Sense strand starting at position 3771 of SEQ ID NO: 1880207
agguucuucggagaaaccu

SEQ ID NO: 1950169 - RNA, 19 nt, Artificial Sequence
  Description of Artificial Sequence: Synthetic oligonucleotide
  Antisense strand to SEQ ID NO: 1950168
agguuucuccgaagaaccu

SEQ ID NO: 1950170 - RNA, 19 nt, Artificial Sequence
  Description of Artificial Sequence: Synthetic oligonucleotide
  Sense strand starting at position 3777 of SEQ ID NO: 1880207
uucggagaaaccuguuuau

SEQ ID NO: 1950171 - RNA, 19 nt, Artificial Sequence
  Description of Artificial Sequence: Synthetic oligonucleotide
  Antisense strand to SEQ ID NO: 1950170
auaaacagguuucuccgaa

SEQ ID NO: 1950172 - RNA, 19 nt, Artificial Sequence
  Description of Artificial Sequence: Synthetic oligonucleotide
  Sense strand starting at position 3780 of SEQ ID NO: 1880207
ggagaaaccuguuuauauu

SEQ ID NO: 1950173 - RNA, 19 nt, Artificial Sequence
  Description of Artificial Sequence: Synthetic oligonucleotide
  Antisense strand to SEQ ID NO: 1950172
aauauaaacagguuucucc

SEQ ID NO: 1950174 - RNA, 19 nt, Artificial Sequence
  Description of Artificial Sequence: Synthetic oligonucleotide
  Sense strand starting at position 3883 of SEQ ID NO: 1880207
cucugauuagccuguauuu

SEQ ID NO: 1950175 - RNA, 19 nt, Artificial Sequence
  Description of Artificial Sequence: Synthetic oligonucleotide
  Antisense strand to SEQ ID NO: 1950174
aaauacaggcuaaucagag

SEQ ID NO: 1950176 - RNA, 19 nt, Artificial Sequence
  Description of Artificial Sequence: Synthetic oligonucleotide
  Sense strand starting at position 3962 of SEQ ID NO: 1880207
gcacacauuugcuuugauu

SEQ ID NO: 1950177 - RNA, 19 nt, Artificial Sequence
  Description of Artificial Sequence: Synthetic oligonucleotide
  Antisense strand to SEQ ID NO: 1950176
aaucaaagcaaaugugugc

SEQ ID NO: 1950178 - RNA, 19 nt, Artificial Sequence
  Description of Artificial Sequence: Synthetic oligonucleotide
  Sense strand starting at position 8 of SEQ ID NO: 1880208
uagauuccuuagucugaga

SEQ ID NO: 1950179 - RNA, 19 nt, Artificial Sequence
  Description of Artificial Sequence: Synthetic oligonucleotide
  Antisense strand to SEQ ID NO: 1950178
ucucagacuaaggaaucua

SEQ ID NO: 1950180 - RNA, 19 nt, Artificial Sequence
  Description of Artificial Sequence: Synthetic oligonucleotide
  Sense strand starting at position 15 of SEQ ID NO: 1880208
cuuagucugagagagcuuu

SEQ ID NO: 1950181 - RNA, 19 nt, Artificial Sequence
  Description of Artificial Sequence: Synthetic oligonucleotide
  Antisense strand to SEQ ID NO: 1950180
aaagcucucucagacuaag

SEQ ID NO: 1950182 - RNA, 19 nt, Artificial Sequence
  Description of Artificial Sequence: Synthetic oligonucleotide
  Sense strand starting at position 21 of SEQ ID NO: 1880208
cugagagagcuuuaggcaa

SEQ ID NO: 1950183 - RNA, 19 nt, Artificial Sequence
  Description of Artificial Sequence: Synthetic oligonucleotide
  Antisense strand to SEQ ID NO: 1950182
uugccuaaagcucucucag

SEQ ID NO: 1950184 - RNA, 19 nt, Artificial Sequence
  Description of Artificial Sequence: Synthetic oligonucleotide
  Sense strand starting at position 132 of SEQ ID NO: 1880208
cgcccagaggucuaagcaa

SEQ ID NO: 1950185 - RNA, 19 nt, Artificial Sequence
  Description of Artificial Sequence: Synthetic oligonucleotide
  Antisense strand to SEQ ID NO: 1950184
uugcuuagaccucugggcg

SEQ ID NO: 1950186 - RNA, 19 nt, Artificial Sequence
  Description of Artificial Sequence: Synthetic oligonucleotide
  Sense strand starting at position 231 of SEQ ID NO: 1880208
ucuuaagagucagcuagaa

SEQ ID NO: 1950187 - RNA, 19 nt, Artificial Sequence
  Description of Artificial Sequence: Synthetic oligonucleotide
  Antisense strand to SEQ ID NO: 1950186
uucuagcugacucuuaaga

SEQ ID NO: 1950188 - RNA, 19 nt, Artificial Sequence
  Description of Artificial Sequence: Synthetic oligonucleotide
  Sense strand starting at position 570 of SEQ ID NO: 1880208
ccaacugucguugaucuga

SEQ ID NO: 1950189 - RNA, 19 nt, Artificial Sequence
  Description of Artificial Sequence: Synthetic oligonucleotide
  Antisense strand to SEQ ID NO: 1950188
ucagaucaacgacaguugg

SEQ ID NO: 1950190 - RNA, 19 nt, Artificial Sequence
  Description of Artificial Sequence: Synthetic oligonucleotide
  Sense strand starting at position 589 of SEQ ID NO: 1880208
acaugaaguauguguggaa

SEQ ID NO: 1950191 - RNA, 19 nt, Artificial Sequence
  Description of Artificial Sequence: Synthetic oligonucleotide
  Antisense strand to SEQ ID NO: 1950190
uuccacacauacuucaugu

SEQ ID NO: 1950192 - RNA, 19 nt, Artificial Sequence
  Description of Artificial Sequence: Synthetic oligonucleotide
  Sense strand starting at position 590 of SEQ ID NO: 1880208
caugaaguauguguggaau

SEQ ID NO: 1950193 - RNA, 19 nt, Artificial Sequence
  Description of Artificial Sequence: Synthetic oligonucleotide
  Antisense strand to SEQ ID NO: 1950192
auuccacacauacuucaug

SEQ ID NO: 1950194 - RNA, 19 nt, Artificial Sequence
  Description of Artificial Sequence: Synthetic oligonucleotide
  Sense strand starting at position 593 of SEQ ID NO: 1880208
gaaguauguguggaauaua

SEQ ID NO: 1950195 - RNA, 19 nt, Artificial Sequence
  Description of Artificial Sequence: Synthetic oligonucleotide
  Antisense strand to SEQ ID NO: 1950194
uauauuccacacauacuuc

SEQ ID NO: 1950196 - RNA, 19 nt, Artificial Sequence
  Description of Artificial Sequence: Synthetic oligonucleotide
  Sense strand starting at position 690 of SEQ ID NO: 1880208
gugauagucuguuuaaaua

SEQ ID NO: 1950197 - RNA, 19 nt, Artificial Sequence
  Description of Artificial Sequence: Synthetic oligonucleotide
  Antisense strand to SEQ ID NO: 1950196
uauuuaaacagacuaucac

SEQ ID NO: 1950198 - RNA, 19 nt, Artificial Sequence
  Description of Artificial Sequence: Synthetic oligonucleotide
  Sense strand starting at position 698 of SEQ ID NO: 1880208
cuguuuaaauauucggaau

SEQ ID NO: 1950199 - RNA, 19 nt, Artificial Sequence
  Description of Artificial Sequence: Synthetic oligonucleotide
  Antisense strand to SEQ ID NO: 1950198
auuccgaauauuuaaacag

SEQ ID NO: 1950200 - RNA, 19 nt, Artificial Sequence
  Description of Artificial Sequence: Synthetic oligonucleotide
  Sense strand starting at position 766 of SEQ ID NO: 1880208
auauacuccucuuuggagu

SEQ ID NO: 1950201 - RNA, 19 nt, Artificial Sequence
  Description of Artificial Sequence: Synthetic oligonucleotide
  Antisense strand to SEQ ID NO: 1950200
acuccaaagaggaguauau

SEQ ID NO: 1950202 - RNA, 19 nt, Artificial Sequence
  Description of Artificial Sequence: Synthetic oligonucleotide
  Sense strand starting at position 773 of SEQ ID NO: 1880208
ccucuuuggagucagagua

SEQ ID NO: 1950203 - RNA, 19 nt, Artificial Sequence
  Description of Artificial Sequence: Synthetic oligonucleotide
  Antisense strand to SEQ ID NO: 1950202
uacucugacuccaaagagg

SEQ ID NO: 1950204 - RNA, 19 nt, Artificial Sequence
  Description of Artificial Sequence: Synthetic oligonucleotide
  Sense strand starting at position 816 of SEQ ID NO: 1880208
uuugcucucccagaguaaa

SEQ ID NO: 1950205 - RNA, 19 nt, Artificial Sequence
  Description of Artificial Sequence: Synthetic oligonucleotide
  Antisense strand to SEQ ID NO: 1950204
uuuacucugggagagcaaa

SEQ ID NO: 1950206 - RNA, 19 nt, Artificial Sequence
  Description of Artificial Sequence: Synthetic oligonucleotide
  Sense strand starting at position 1450 of SEQ ID NO: 1880208
gaggaagaugucuguguca

SEQ ID NO: 1950207 - RNA, 19 nt, Artificial Sequence
  Description of Artificial Sequence: Synthetic oligonucleotide
  Antisense strand to SEQ ID NO: 1950206
ugacacagacaucuuccuc

SEQ ID NO: 1950208 - RNA, 19 nt, Artificial Sequence
  Description of Artificial Sequence: Synthetic oligonucleotide
  Sense strand starting at position 1452 of SEQ ID NO: 1880208
ggaagaugucugugucaga

SEQ ID NO: 1950209 - RNA, 19 nt, Artificial Sequence
  Description of Artificial Sequence: Synthetic oligonucleotide
  Antisense strand to SEQ ID NO: 1950208
ucugacacagacaucuucc

SEQ ID NO: 1950210 - RNA, 19 nt, Artificial Sequence
  Description of Artificial Sequence: Synthetic oligonucleotide
  Sense strand starting at position 1453 of SEQ ID NO: 1880208
gaagaugucugugucagag

SEQ ID NO: 1950211 - RNA, 19 nt, Artificial Sequence
  Description of Artificial Sequence: Synthetic oligonucleotide
  Antisense strand to SEQ ID NO: 1950210
cucugacacagacaucuuc

SEQ ID NO: 1950212 - RNA, 19 nt, Artificial Sequence
  Description of Artificial Sequence: Synthetic oligonucleotide
  Sense strand starting at position 2184 of SEQ ID NO: 1880208
ggagaaaggguuggcugua

SEQ ID NO: 1950213 - RNA, 19 nt, Artificial Sequence
  Description of Artificial Sequence: Synthetic oligonucleotide
  Antisense strand to SEQ ID NO: 1950212
uacagccaacccuuucucc

SEQ ID NO: 1950214 - RNA, 19 nt, Artificial Sequence
  Description of Artificial Sequence: Synthetic oligonucleotide
  Sense strand starting at position 2194 of SEQ ID NO: 1880208
uuggcuguacccuggagaa

SEQ ID NO: 1950215 - RNA, 19 nt, Artificial Sequence
  Description of Artificial Sequence: Synthetic oligonucleotide
  Antisense strand to SEQ ID NO: 1950214
uucuccaggguacagccaa

SEQ ID NO: 1950216 - RNA, 19 nt, Artificial Sequence
  Description of Artificial Sequence: Synthetic oligonucleotide
  Sense strand starting at position 2196 of SEQ ID NO: 1880208
ggcuguacccuggagaaga

SEQ ID NO: 1950217 - RNA, 19 nt, Artificial Sequence
  Description of Artificial Sequence: Synthetic oligonucleotide
  Antisense strand to SEQ ID NO: 1950216
ucuucuccaggguacagcc

SEQ ID NO: 1950218 - RNA, 19 nt, Artificial Sequence
  Description of Artificial Sequence: Synthetic oligonucleotide
  Sense strand starting at position 2532 of SEQ ID NO: 1880208
cggucauuucacugucgag

SEQ ID NO: 1950219 - RNA, 19 nt, Artificial Sequence
  Description of Artificial Sequence: Synthetic oligonucleotide
  Antisense strand to SEQ ID NO: 1950218
cucgacagugaaaugaccg

SEQ ID NO: 1950220 - RNA, 19 nt, Artificial Sequence
  Description of Artificial Sequence: Synthetic oligonucleotide
  Sense strand starting at position 2610 of SEQ ID NO: 1880208
ggacgucuuccugaaguua

SEQ ID NO: 1950221 - RNA, 19 nt, Artificial Sequence
  Description of Artificial Sequence: Synthetic oligonucleotide
  Antisense strand to SEQ ID NO: 1950220
uaacuucaggaagacgucc

SEQ ID NO: 1950222 - RNA, 19 nt, Artificial Sequence
  Description of Artificial Sequence: Synthetic oligonucleotide
  Sense strand starting at position 2621 of SEQ ID NO: 1880208
ugaaguuaaugagcagaau

SEQ ID NO: 1950223 - RNA, 19 nt, Artificial Sequence
  Description of Artificial Sequence: Synthetic oligonucleotide
  Antisense strand to SEQ ID NO: 1950222
auucugcucauuaacuuca

SEQ ID NO: 1950224 - RNA, 19 nt, Artificial Sequence
  Description of Artificial Sequence: Synthetic oligonucleotide
  Sense strand starting at position 2624 of SEQ ID NO: 1880208
aguuaaugagcagaauguu

SEQ ID NO: 1950225 - RNA, 19 nt, Artificial Sequence
  Description of Artificial Sequence: Synthetic oligonucleotide
  Antisense strand to SEQ ID NO: 1950224
aacauucugcucauuaacu

SEQ ID NO: 1950226 - RNA, 19 nt, Artificial Sequence
  Description of Artificial Sequence: Synthetic oligonucleotide
  Sense strand starting at position 2632 of SEQ ID NO: 1880208
agcagaauguuaccaagac

SEQ ID NO: 1950227 - RNA, 19 nt, Artificial Sequence
  Description of Artificial Sequence: Synthetic oligonucleotide
  Antisense strand to SEQ ID NO: 1950226
gucuugguaacauucugcu

SEQ ID NO: 1950228 - RNA, 19 nt, Artificial Sequence
  Description of Artificial Sequence: Synthetic oligonucleotide
  Sense strand starting at position 2947 of SEQ ID NO: 1880208
gaggcaaggccuuaauaau

SEQ ID NO: 1950229 - RNA, 19 nt, Artificial Sequence
  Description of Artificial Sequence: Synthetic oligonucleotide
  Antisense strand to SEQ ID NO: 1950228
auuauuaaggccuugccuc

SEQ ID NO: 1950230 - RNA, 19 nt, Artificial Sequence
  Description of Artificial Sequence: Synthetic oligonucleotide
  Sense strand starting at position 3059 of SEQ ID NO: 1880208
auuuguuucugugcuugau

SEQ ID NO: 1950231 - RNA, 19 nt, Artificial Sequence
  Description of Artificial Sequence: Synthetic oligonucleotide
  Antisense strand to SEQ ID NO: 1950230
aucaagcacagaaacaaau

SEQ ID NO: 1950232 - RNA, 19 nt, Artificial Sequence
  Description of Artificial Sequence: Synthetic oligonucleotide
  Sense strand starting at position 3071 of SEQ ID NO: 1880208
gcuugaugauuucuguacu

SEQ ID NO: 1950233 - RNA, 19 nt, Artificial Sequence
  Description of Artificial Sequence: Synthetic oligonucleotide
  Antisense strand to SEQ ID NO: 1950232
aguacagaaaucaucaagc

SEQ ID NO: 1950234 - RNA, 19 nt, Artificial Sequence
  Description of Artificial Sequence: Synthetic oligonucleotide
  Sense strand starting at position 3160 of SEQ ID NO: 1880208
augacagucuguucucaau

SEQ ID NO: 1950235 - RNA, 19 nt, Artificial Sequence
  Description of Artificial Sequence: Synthetic oligonucleotide
  Antisense strand to SEQ ID NO: 1950234
auugagaacagacugucau

SEQ ID NO: 1950236 - RNA, 19 nt, Artificial Sequence
  Description of Artificial Sequence: Synthetic oligonucleotide
  Sense strand starting at position 3195 of SEQ ID NO: 1880208
uuccaucuugcagauugua

SEQ ID NO: 1950237 - RNA, 19 nt, Artificial Sequence
  Description of Artificial Sequence: Synthetic oligonucleotide
  Antisense strand to SEQ ID NO: 1950236
uacaaucugcaagauggaa

SEQ ID NO: 1950238 - RNA, 19 nt, Artificial Sequence
  Description of Artificial Sequence: Synthetic oligonucleotide
  Sense strand starting at position 3270 of SEQ ID NO: 1880208
ggauccugauauguauuaa

SEQ ID NO: 1950239 - RNA, 19 nt, Artificial Sequence
  Description of Artificial Sequence: Synthetic oligonucleotide
  Antisense strand to SEQ ID NO: 1950238
uuaauacauaucaggaucc

SEQ ID NO: 1950240 - RNA, 19 nt, Artificial Sequence
  Description of Artificial Sequence: Synthetic oligonucleotide
  Sense strand starting at position 3280 of SEQ ID NO: 1880208
auguauuaaccacaguauc

SEQ ID NO: 1950241 - RNA, 19 nt, Artificial Sequence
  Description of Artificial Sequence: Synthetic oligonucleotide
  Antisense strand to SEQ ID NO: 1950240
gauacugugguuaauacau

SEQ ID NO: 1950242 - RNA, 19 nt, Artificial Sequence
  Description of Artificial Sequence: Synthetic oligonucleotide
  Sense strand starting at position 3372 of SEQ ID NO: 1880208
ugauaagcuuauucugacu

SEQ ID NO: 1950243 - RNA, 19 nt, Artificial Sequence
  Description of Artificial Sequence: Synthetic oligonucleotide
  Antisense strand to SEQ ID NO: 1950242
agucagaauaagcuuauca

SEQ ID NO: 1950244 - RNA, 19 nt, Artificial Sequence
  Description of Artificial Sequence: Synthetic oligonucleotide
  Sense strand starting at position 3377 of SEQ ID NO: 1880208
agcuuauucugacuaguaa

SEQ ID NO: 1950245 - RNA, 19 nt, Artificial Sequence
  Description of Artificial Sequence: Synthetic oligonucleotide
  Antisense strand to SEQ ID NO: 1950244
uuacuagucagaauaagcu

SEQ ID NO: 1950246 - RNA, 19 nt, Artificial Sequence
  Description of Artificial Sequence: Synthetic oligonucleotide
  Sense strand starting at position 3378 of SEQ ID NO: 1880208
gcuuauucugacuaguaag

SEQ ID NO: 1950247 - RNA, 19 nt, Artificial Sequence
  Description of Artificial Sequence: Synthetic oligonucleotide
  Antisense strand to SEQ ID NO: 1950246
cuuacuagucagaauaagc

SEQ ID NO: 1950248 - RNA, 19 nt, Artificial Sequence
  Description of Artificial Sequence: Synthetic oligonucleotide
  Sense strand starting at position 3455 of SEQ ID NO: 1880208
cucacagaauugcuagaaa

SEQ ID NO: 1950249 - RNA, 19 nt, Artificial Sequence
  Description of Artificial Sequence: Synthetic oligonucleotide
  Antisense strand to SEQ ID NO: 1950248
uuucuagcaauucugugag

SEQ ID NO: 1950250 - RNA, 19 nt, Artificial Sequence
  Description of Artificial Sequence: Synthetic oligonucleotide
  Sense strand starting at position 3577 of SEQ ID NO: 1880208
cuaccauugccugauacug

SEQ ID NO: 1950251 - RNA, 19 nt, Artificial Sequence
  Description of Artificial Sequence: Synthetic oligonucleotide
  Antisense strand to SEQ ID NO: 1950250
caguaucaggcaaugguag

SEQ ID NO: 1950252 - RNA, 19 nt, Artificial Sequence
  Description of Artificial Sequence: Synthetic oligonucleotide
  Sense strand starting at position 3627 of SEQ ID NO: 1880208
ugucauuaacacugauguu

SEQ ID NO: 1950253 - RNA, 19 nt, Artificial Sequence
  Description of Artificial Sequence: Synthetic oligonucleotide
  Antisense strand to SEQ ID NO: 1950252
aacaucaguguuaaugaca

SEQ ID NO: 1950254 - RNA, 19 nt, Artificial Sequence
  Description of Artificial Sequence: Synthetic oligonucleotide
  Sense strand starting at position 3691 of SEQ ID NO: 1880208
cugagaacuucccugcuau

SEQ ID NO: 1950255 - RNA, 19 nt, Artificial Sequence
  Description of Artificial Sequence: Synthetic oligonucleotide
  Antisense strand to SEQ ID NO: 1950254
auagcagggaaguucucag

SEQ ID NO: 1950256 - RNA, 19 nt, Artificial Sequence
  Description of Artificial Sequence: Synthetic oligonucleotide
  Sense strand starting at position 3692 of SEQ ID NO: 1880208
ugagaacuucccugcuauu

SEQ ID NO: 1950257 - RNA, 19 nt, Artificial Sequence
  Description of Artificial Sequence: Synthetic oligonucleotide
  Antisense strand to SEQ ID NO: 1950256
aauagcagggaaguucuca

SEQ ID NO: 1950258 - RNA, 19 nt, Artificial Sequence
  Description of Artificial Sequence: Synthetic oligonucleotide
  Sense strand starting at position 55 of SEQ ID NO: 1880209
augguaucucucgaaaugu

SEQ ID NO: 1950259 - RNA, 19 nt, Artificial Sequence
  Description of Artificial Sequence: Synthetic oligonucleotide
  Antisense strand to SEQ ID NO: 1950258
acauuucgagagauaccau

SEQ ID NO: 1950260 - RNA, 19 nt, Artificial Sequence
  Description of Artificial Sequence: Synthetic oligonucleotide
  Sense strand starting at position 66 of SEQ ID NO: 1880209
cgaaaugucuuauuguacu

SEQ ID NO: 1950261 - RNA, 19 nt, Artificial Sequence
  Description of Artificial Sequence: Synthetic oligonucleotide
  Antisense strand to SEQ ID NO: 1950260
aguacaauaagacauuucg

SEQ ID NO: 1950262 - RNA, 19 nt, Artificial Sequence
  Description of Artificial Sequence: Synthetic oligonucleotide
  Sense strand starting at position 324 of SEQ ID NO: 1880209
agaguucauggagggcuua

SEQ ID NO: 1950263 - RNA, 19 nt, Artificial Sequence
  Description of Artificial Sequence: Synthetic oligonucleotide
  Antisense strand to SEQ ID NO: 1950262
uaagcccuccaugaacucu

SEQ ID NO: 1950264 - RNA, 19 nt, Artificial Sequence
  Description of Artificial Sequence: Synthetic oligonucleotide
  Sense strand starting at position 368 of SEQ ID NO: 1880209
aagugauaugugggcugau

SEQ ID NO: 1950265 - RNA, 19 nt, Artificial Sequence
  Description of Artificial Sequence: Synthetic oligonucleotide
  Antisense strand to SEQ ID NO: 1950264
aucagcccacauaucacuu

SEQ ID NO: 1950266 - RNA, 19 nt, Artificial Sequence
  Description of Artificial Sequence: Synthetic oligonucleotide
  Sense strand starting at position 369 of SEQ ID NO: 1880209
agugauaugugggcugaua

SEQ ID NO: 1950267 - RNA, 19 nt, Artificial Sequence
  Description of Artificial Sequence: Synthetic oligonucleotide
  Antisense strand to SEQ ID NO: 1950266
uaucagcccacauaucacu

SEQ ID NO: 1950268 - RNA, 19 nt, Artificial Sequence
  Description of Artificial Sequence: Synthetic oligonucleotide
  Sense strand starting at position 371 of SEQ ID NO: 1880209
ugauaugugggcugauauc

SEQ ID NO: 1950269 - RNA, 19 nt, Artificial Sequence
  Description of Artificial Sequence: Synthetic oligonucleotide
  Antisense strand to SEQ ID NO: 1950268
gauaucagcccacauauca

SEQ ID NO: 1950270 - RNA, 19 nt, Artificial Sequence
  Description of Artificial Sequence: Synthetic oligonucleotide
  Sense strand starting at position 378 of SEQ ID NO: 1880209
ugggcugauaucugaggca

SEQ ID NO: 1950271 - RNA, 19 nt, Artificial Sequence
  Description of Artificial Sequence: Synthetic oligonucleotide
  Antisense strand to SEQ ID NO: 1950270
ugccucagauaucagccca

SEQ ID NO: 1950272 - RNA, 19 nt, Artificial Sequence
  Description of Artificial Sequence: Synthetic oligonucleotide
  Sense strand starting at position 383 of SEQ ID NO: 1880209
ugauaucugaggcagguau

SEQ ID NO: 1950273 - RNA, 19 nt, Artificial Sequence
  Description of Artificial Sequence: Synthetic oligonucleotide
  Antisense strand to SEQ ID NO: 1950272
auaccugccucagauauca

SEQ ID NO: 1950274 - RNA, 19 nt, Artificial Sequence
  Description of Artificial Sequence: Synthetic oligonucleotide
  Sense strand starting at position 385 of SEQ ID NO: 1880209
auaucugaggcagguauaa

SEQ ID NO: 1950275 - RNA, 19 nt, Artificial Sequence
  Description of Artificial Sequence: Synthetic oligonucleotide
  Antisense strand to SEQ ID NO: 1950274
uuauaccugccucagauau

SEQ ID NO: 1950276 - RNA, 19 nt, Artificial Sequence
  Description of Artificial Sequence: Synthetic oligonucleotide
  Sense strand starting at position 428 of SEQ ID NO: 1880209
agcauuagagguggaggaa

SEQ ID NO: 1950277 - RNA, 19 nt, Artificial Sequence
  Description of Artificial Sequence: Synthetic oligonucleotide
  Antisense strand to SEQ ID NO: 1950276
uuccuccaccucuaaugcu

SEQ ID NO: 1950278 - RNA, 19 nt, Artificial Sequence
  Description of Artificial Sequence: Synthetic oligonucleotide
  Sense strand starting at position 555 of SEQ ID NO: 1880209
gagauagagugugcucacu

SEQ ID NO: 1950279 - RNA, 19 nt, Artificial Sequence
  Description of Artificial Sequence: Synthetic oligonucleotide
  Antisense strand to SEQ ID NO: 1950278
agugagcacacucuaucuc

SEQ ID NO: 1950280 - RNA, 19 nt, Artificial Sequence
  Description of Artificial Sequence: Synthetic oligonucleotide
  Sense strand starting at position 557 of SEQ ID NO: 1880209
gauagagugugcucacuca

SEQ ID NO: 1950281 - RNA, 19 nt, Artificial Sequence
  Description of Artificial Sequence: Synthetic oligonucleotide
  Antisense strand to SEQ ID NO: 1950280
ugagugagcacacucuauc

SEQ ID NO: 1950282 - RNA, 19 nt, Artificial Sequence
  Description of Artificial Sequence: Synthetic oligonucleotide
  Sense strand starting at position 573 of SEQ ID NO: 1880209
ucaguaggucuuuauccua

SEQ ID NO: 1950283 - RNA, 19 nt, Artificial Sequence
  Description of Artificial Sequence: Synthetic oligonucleotide
  Antisense strand to SEQ ID NO: 1950282
uaggauaaagaccuacuga

SEQ ID NO: 1950284 - RNA, 19 nt, Artificial Sequence
  Description of Artificial Sequence: Synthetic oligonucleotide
  Sense strand starting at position 613 of SEQ ID NO: 1880209
gcauucuaagcaugugauu

SEQ ID NO: 1950285 - RNA, 19 nt, Artificial Sequence
  Description of Artificial Sequence: Synthetic oligonucleotide
  Antisense strand to SEQ ID NO: 1950284
aaucacaugcuuagaaugc

SEQ ID NO: 1950286 - RNA, 19 nt, Artificial Sequence
  Description of Artificial Sequence: Synthetic oligonucleotide
  Sense strand starting at position 710 of SEQ ID NO: 1880209
cgcacagacuuccuuaaca

SEQ ID NO: 1950287 - RNA, 19 nt, Artificial Sequence
  Description of Artificial Sequence: Synthetic oligonucleotide
  Antisense strand to SEQ ID NO: 1950286
uguuaaggaagucugugcg

SEQ ID NO: 1950288 - RNA, 19 nt, Artificial Sequence
  Description of Artificial Sequence: Synthetic oligonucleotide
  Sense strand starting at position 1227 of SEQ ID NO: 1880209
aguuguuucucacuuagaa

SEQ ID NO: 1950289 - RNA, 19 nt, Artificial Sequence
  Description of Artificial Sequence: Synthetic oligonucleotide
  Antisense strand to SEQ ID NO: 1950288
uucuaagugagaaacaacu

SEQ ID NO: 1950290 - RNA, 19 nt, Artificial Sequence
  Description of Artificial Sequence: Synthetic oligonucleotide
  Sense strand starting at position 1436 of SEQ ID NO: 1880209
cugacuuccugagugcauu

SEQ ID NO: 1950291 - RNA, 19 nt, Artificial Sequence
  Description of Artificial Sequence: Synthetic oligonucleotide
  Antisense strand to SEQ ID NO: 1950290
aaugcacucaggaagucag

SEQ ID NO: 1950292 - RNA, 19 nt, Artificial Sequence
  Description of Artificial Sequence: Synthetic oligonucleotide
  Sense strand starting at position 1437 of SEQ ID NO: 1880209
ugacuuccugagugcauuu

SEQ ID NO: 1950293 - RNA, 19 nt, Artificial Sequence
  Description of Artificial Sequence: Synthetic oligonucleotide
  Antisense strand to SEQ ID NO: 1950292
aaaugcacucaggaaguca

SEQ ID NO: 1950294 - RNA, 19 nt, Artificial Sequence
  Description of Artificial Sequence: Synthetic oligonucleotide
  Sense strand starting at position 1503 of SEQ ID NO: 1880209
cuuuacuacugacuugaga

SEQ ID NO: 1950295 - RNA, 19 nt, Artificial Sequence
  Description of Artificial Sequence: Synthetic oligonucleotide
  Antisense strand to SEQ ID NO: 1950294
ucucaagucaguaguaaag

SEQ ID NO: 1950296 - RNA, 19 nt, Artificial Sequence
  Description of Artificial Sequence: Synthetic oligonucleotide
  Sense strand starting at position 2289 of SEQ ID NO: 1880209
ucuggagcuguggaucauu

SEQ ID NO: 1950297 - RNA, 19 nt, Artificial Sequence
  Description of Artificial Sequence: Synthetic oligonucleotide
  Antisense strand to SEQ ID NO: 1950296
aaugauccacagcuccaga

SEQ ID NO: 1950298 - RNA, 19 nt, Artificial Sequence
  Description of Artificial Sequence: Synthetic oligonucleotide
  Sense strand starting at position 2389 of SEQ ID NO: 1880209
ugccuuuaucaggagauuc

SEQ ID NO: 1950299 - RNA, 19 nt, Artificial Sequence
  Description of Artificial Sequence: Synthetic oligonucleotide
  Antisense strand to SEQ ID NO: 1950298
gaaucuccugauaaaggca

SEQ ID NO: 1950300 - RNA, 19 nt, Artificial Sequence
  Description of Artificial Sequence: Synthetic oligonucleotide
  Sense strand starting at position 2397 of SEQ ID NO: 1880209
ucaggagauuccuuaccgu

SEQ ID NO: 1950301 - RNA, 19 nt, Artificial Sequence
  Description of Artificial Sequence: Synthetic oligonucleotide
  Antisense strand to SEQ ID NO: 1950300
acgguaaggaaucuccuga

SEQ ID NO: 1950302 - RNA, 19 nt, Artificial Sequence
  Description of Artificial Sequence: Synthetic oligonucleotide
  Sense strand starting at position 2877 of SEQ ID NO: 1880209
cagagagauuugggacaga

SEQ ID NO: 1950303 - RNA, 19 nt, Artificial Sequence
  Description of Artificial Sequence: Synthetic oligonucleotide
  Antisense strand to SEQ ID NO: 1950302
ucugucccaaaucucucug

SEQ ID NO: 1950304 - RNA, 19 nt, Artificial Sequence
  Description of Artificial Sequence: Synthetic oligonucleotide
  Sense strand starting at position 2906 of SEQ ID NO: 1880209
aacaguuaaucgcuuggaa

SEQ ID NO: 1950305 - RNA, 19 nt, Artificial Sequence
  Description of Artificial Sequence: Synthetic oligonucleotide
  Antisense strand to SEQ ID NO: 1950304
uuccaagcgauuaacuguu

SEQ ID NO: 1950306 - RNA, 19 nt, Artificial Sequence
  Description of Artificial Sequence: Synthetic oligonucleotide
  Sense strand starting at position 2908 of SEQ ID NO: 1880209
caguuaaucgcuuggaauu

SEQ ID NO: 1950307 - RNA, 19 nt, Artificial Sequence
  Description of Artificial Sequence: Synthetic oligonucleotide
  Antisense strand to SEQ ID NO: 1950306
aauuccaagcgauuaacug

SEQ ID NO: 1950308 - RNA, 19 nt, Artificial Sequence
  Description of Artificial Sequence: Synthetic oligonucleotide
  Sense strand starting at position 2909 of SEQ ID NO: 1880209
aguuaaucgcuuggaauuu

SEQ ID NO: 1950309 - RNA, 19 nt, Artificial Sequence
  Description of Artificial Sequence: Synthetic oligonucleotide
  Antisense strand to SEQ ID NO: 1950308
aaauuccaagcgauuaacu

SEQ ID NO: 1950310 - RNA, 19 nt, Artificial Sequence
  Description of Artificial Sequence: Synthetic oligonucleotide
  Sense strand starting at position 2918 of SEQ ID NO: 1880209
cuuggaauuugugaaggca

SEQ ID NO: 1950311 - RNA, 19 nt, Artificial Sequence
  Description of Artificial Sequence: Synthetic oligonucleotide
  Antisense strand to SEQ ID NO: 1950310
ugccuucacaaauuccaag

SEQ ID NO: 1950312 - RNA, 19 nt, Artificial Sequence
  Description of Artificial Sequence: Synthetic oligonucleotide
  Sense strand starting at position 2944 of SEQ ID NO: 1880209
acguaaauuuaggguaaag

SEQ ID NO: 1950313 - RNA, 19 nt, Artificial Sequence
  Description of Artificial Sequence: Synthetic oligonucleotide
  Antisense strand to SEQ ID NO: 1950312
cuuuacccuaaauuuacgu

SEQ ID NO: 1950314 - RNA, 19 nt, Artificial Sequence
  Description of Artificial Sequence: Synthetic oligonucleotide
  Sense strand starting at position 2954 of SEQ ID NO: 1880209
aggguaaagguaggugaaa

SEQ ID NO: 1950315 - RNA, 19 nt, Artificial Sequence
  Description of Artificial Sequence: Synthetic oligonucleotide
  Antisense strand to SEQ ID NO: 1950314
uuucaccuaccuuuacccu

SEQ ID NO: 1950316 - RNA, 19 nt, Artificial Sequence
  Description of Artificial Sequence: Synthetic oligonucleotide
  Sense strand starting at position 3035 of SEQ ID NO: 1880209
cuagccuggccugacuaau

SEQ ID NO: 1950317 - RNA, 19 nt, Artificial Sequence
  Description of Artificial Sequence: Synthetic oligonucleotide
  Antisense strand to SEQ ID NO: 1950316
auuagucaggccaggcuag

SEQ ID NO: 1950318 - RNA, 19 nt, Artificial Sequence
  Description of Artificial Sequence: Synthetic oligonucleotide
  Sense strand starting at position 3258 of SEQ ID NO: 1880209
cuccguuuggccucuucua

SEQ ID NO: 1950319 - RNA, 19 nt, Artificial Sequence
  Description of Artificial Sequence: Synthetic oligonucleotide
  Antisense strand to SEQ ID NO: 1950318
uagaagaggccaaacggag

SEQ ID NO: 1950320 - RNA, 19 nt, Artificial Sequence
  Description of Artificial Sequence: Synthetic oligonucleotide
  Sense strand starting at position 3472 of SEQ ID NO: 1880209
uauugauaguauucuuggu

SEQ ID NO: 1950321 - RNA, 19 nt, Artificial Sequence
  Description of Artificial Sequence: Synthetic oligonucleotide
  Antisense strand to SEQ ID NO: 1950320
accaagaauacuaucaaua

SEQ ID NO: 1950322 - RNA, 19 nt, Artificial Sequence
  Description of Artificial Sequence: Synthetic oligonucleotide
  Sense strand starting at position 3476 of SEQ ID NO: 1880209
gauaguauucuuggugcua

SEQ ID NO: 1950323 - RNA, 19 nt, Artificial Sequence
  Description of Artificial Sequence: Synthetic oligonucleotide
  Antisense strand to SEQ ID NO: 1950322
uagcaccaagaauacuauc

SEQ ID NO: 1950324 - RNA, 19 nt, Artificial Sequence
  Description of Artificial Sequence: Synthetic oligonucleotide
  Sense strand starting at position 3477 of SEQ ID NO: 1880209
auaguauucuuggugcuag

SEQ ID NO: 1950325 - RNA, 19 nt, Artificial Sequence
  Description of Artificial Sequence: Synthetic oligonucleotide
  Antisense strand to SEQ ID NO: 1950324
cuagcaccaagaauacuau

SEQ ID NO: 1950326 - RNA, 19 nt, Artificial Sequence
  Description of Artificial Sequence: Synthetic oligonucleotide
  Sense strand starting at position 3492 of SEQ ID NO: 1880209
cuagaaauacaguggugaa

SEQ ID NO: 1950327 - RNA, 19 nt, Artificial Sequence
  Description of Artificial Sequence: Synthetic oligonucleotide
  Antisense strand to SEQ ID NO: 1950326
uucaccacuguauuucuag

SEQ ID NO: 1950328 - RNA, 19 nt, Artificial Sequence
  Description of Artificial Sequence: Synthetic oligonucleotide
  Sense strand starting at position 3539 of SEQ ID NO: 1880209
gcuuauguucugcaggacu

SEQ ID NO: 1950329 - RNA, 19 nt, Artificial Sequence
  Description of Artificial Sequence: Synthetic oligonucleotide
  Antisense strand to SEQ ID NO: 1950328
aguccugcagaacauaagc

SEQ ID NO: 1950330 - RNA, 19 nt, Artificial Sequence
  Description of Artificial Sequence: Synthetic oligonucleotide
  Sense strand starting at position 3942 of SEQ ID NO: 1880209
acgaauagaugagauaauc

SEQ ID NO: 1950331 - RNA, 19 nt, Artificial Sequence
  Description of Artificial Sequence: Synthetic oligonucleotide
  Antisense strand to SEQ ID NO: 1950330
gauuaucucaucuauucgu

SEQ ID NO: 1950332 - RNA, 19 nt, Artificial Sequence
  Description of Artificial Sequence: Synthetic oligonucleotide
  Sense strand starting at position 3951 of SEQ ID NO: 1880209
ugagauaaucacuggcagu

SEQ ID NO: 1950333 - RNA, 19 nt, Artificial Sequence
  Description of Artificial Sequence: Synthetic oligonucleotide
  Antisense strand to SEQ ID NO: 1950332
acugccagugauuaucuca

SEQ ID NO: 1950334 - RNA, 19 nt, Artificial Sequence
  Description of Artificial Sequence: Synthetic oligonucleotide
  Sense strand starting at position 3958 of SEQ ID NO: 1880209
aucacuggcagugauaagu

SEQ ID NO: 1950335 - RNA, 19 nt, Artificial Sequence
  Description of Artificial Sequence: Synthetic oligonucleotide
  Antisense strand to SEQ ID NO: 1950334
acuuaucacugccagugau

SEQ ID NO: 1950336 - RNA, 19 nt, Artificial Sequence
  Description of Artificial Sequence: Synthetic oligonucleotide
  Sense strand starting at position 3968 of SEQ ID NO: 1880209
gugauaaguacugagcaga

SEQ ID NO: 1950337 - RNA, 19 nt, Artificial Sequence
  Description of Artificial Sequence: Synthetic oligonucleotide
  Antisense strand to SEQ ID NO: 1950336
ucugcucaguacuuaucac

SEQ ID NO: 1950338 - RNA, 19 nt, Artificial Sequence
  Description of Artificial Sequence: Synthetic oligonucleotide
  Sense strand starting at position 277 of SEQ ID NO: 1880210
uagcaauuacuugaaguga

SEQ ID NO: 1950339 - RNA, 19 nt, Artificial Sequence
  Description of Artificial Sequence: Synthetic oligonucleotide
  Antisense strand to SEQ ID NO: 1950338
ucacuucaaguaauugcua

SEQ ID NO: 1950340 - RNA, 19 nt, Artificial Sequence
  Description of Artificial Sequence: Synthetic oligonucleotide
  Sense strand starting at position 293 of SEQ ID NO: 1880210
ugaaauaauuagcuguaga

SEQ ID NO: 1950341 - RNA, 19 nt, Artificial Sequence
  Description of Artificial Sequence: Synthetic oligonucleotide
  Antisense strand to SEQ ID NO: 1950340
ucuacagcuaauuauuuca

SEQ ID NO: 1950342 - RNA, 19 nt, Artificial Sequence
  Description of Artificial Sequence: Synthetic oligonucleotide
  Sense strand starting at position 329 of SEQ ID NO: 1880210
ucaauaauugauuggcuua

SEQ ID NO: 1950343 - RNA, 19 nt, Artificial Sequence
  Description of Artificial Sequence: Synthetic oligonucleotide
  Antisense strand to SEQ ID NO: 1950342
uaagccaaucaauuauuga

SEQ ID NO: 1950344 - RNA, 19 nt, Artificial Sequence
  Description of Artificial Sequence: Synthetic oligonucleotide
  Sense strand starting at position 478 of SEQ ID NO: 1880210
uagugaugauuaucuaaag

SEQ ID NO: 1950345 - RNA, 19 nt, Artificial Sequence
  Description of Artificial Sequence: Synthetic oligonucleotide
  Antisense strand to SEQ ID NO: 1950344
cuuuagauaaucaucacua

SEQ ID NO: 1950346 - RNA, 19 nt, Artificial Sequence
  Description of Artificial Sequence: Synthetic oligonucleotide
  Sense strand starting at position 677 of SEQ ID NO: 1880210
cuagaaagaucagcuauca

SEQ ID NO: 1950347 - RNA, 19 nt, Artificial Sequence
  Description of Artificial Sequence: Synthetic oligonucleotide
  Antisense strand to SEQ ID NO: 1950346
ugauagcugaucuuucuag

SEQ ID NO: 1950348 - RNA, 19 nt, Artificial Sequence
  Description of Artificial Sequence: Synthetic oligonucleotide
  Sense strand starting at position 918 of SEQ ID NO: 1880210
guaauuggucuuuaaccua

SEQ ID NO: 1950349 - RNA, 19 nt, Artificial Sequence
  Description of Artificial Sequence: Synthetic oligonucleotide
  Antisense strand to SEQ ID NO: 1950348
uagguuaaagaccaauuac

SEQ ID NO: 1950350 - RNA, 19 nt, Artificial Sequence
  Description of Artificial Sequence: Synthetic oligonucleotide
  Sense strand starting at position 1082 of SEQ ID NO: 1880210
gauaauaauuccgugaagu

SEQ ID NO: 1950351 - RNA, 19 nt, Artificial Sequence
  Description of Artificial Sequence: Synthetic oligonucleotide
  Antisense strand to SEQ ID NO: 1950350
acuucacggaauuauuauc

SEQ ID NO: 1950352 - RNA, 19 nt, Artificial Sequence
  Description of Artificial Sequence: Synthetic oligonucleotide
  Sense strand starting at position 1083 of SEQ ID NO: 1880210
auaauaauuccgugaagua

SEQ ID NO: 1950353 - RNA, 19 nt, Artificial Sequence
  Description of Artificial Sequence: Synthetic oligonucleotide
  Antisense strand to SEQ ID NO: 1950352
uacuucacggaauuauuau

SEQ ID NO: 1950354 - RNA, 19 nt, Artificial Sequence
  Description of Artificial Sequence: Synthetic oligonucleotide
  Sense strand starting at position 1084 of SEQ ID NO: 1880210
uaauaauuccgugaaguau

SEQ ID NO: 1950355 - RNA, 19 nt, Artificial Sequence
  Description of Artificial Sequence: Synthetic oligonucleotide
  Antisense strand to SEQ ID NO: 1950354
auacuucacggaauuauua

SEQ ID NO: 1950356 - RNA, 19 nt, Artificial Sequence
  Description of Artificial Sequence: Synthetic oligonucleotide
  Sense strand starting at position 1259 of SEQ ID NO: 1880210
guagcauuauaucugagag

SEQ ID NO: 1950357 - RNA, 19 nt, Artificial Sequence
  Description of Artificial Sequence: Synthetic oligonucleotide
  Antisense strand to SEQ ID NO: 1950356
cucucagauauaaugcuac

SEQ ID NO: 1950358 - RNA, 19 nt, Artificial Sequence
  Description of Artificial Sequence: Synthetic oligonucleotide
  Sense strand starting at position 1326 of SEQ ID NO: 1880210
uguguuauaguagaaguag

SEQ ID NO: 1950359 - RNA, 19 nt, Artificial Sequence
  Description of Artificial Sequence: Synthetic oligonucleotide
  Antisense strand to SEQ ID NO: 1950358
cuacuucuacuauaacaca

SEQ ID NO: 1950360 - RNA, 19 nt, Artificial Sequence
  Description of Artificial Sequence: Synthetic oligonucleotide
  Sense strand starting at position 1335 of SEQ ID NO: 1880210
guagaaguaguaugaacuu

SEQ ID NO: 1950361 - RNA, 19 nt, Artificial Sequence
  Description of Artificial Sequence: Synthetic oligonucleotide
  Antisense strand to SEQ ID NO: 1950360
aaguucauacuacuucuac

SEQ ID NO: 1950362 - RNA, 19 nt, Artificial Sequence
  Description of Artificial Sequence: Synthetic oligonucleotide
  Sense strand starting at position 1403 of SEQ ID NO: 1880210
auaaucuucgguuaguaau

SEQ ID NO: 1950363 - RNA, 19 nt, Artificial Sequence
  Description of Artificial Sequence: Synthetic oligonucleotide
  Antisense strand to SEQ ID NO: 1950362
auuacuaaccgaagauuau

SEQ ID NO: 1950364 - RNA, 19 nt, Artificial Sequence
  Description of Artificial Sequence: Synthetic oligonucleotide
  Sense strand starting at position 1405 of SEQ ID NO: 1880210
aaucuucgguuaguaauuu

SEQ ID NO: 1950365 - RNA, 19 nt, Artificial Sequence
  Description of Artificial Sequence: Synthetic oligonucleotide
  Antisense strand to SEQ ID NO: 1950364
aaauuacuaaccgaagauu

SEQ ID NO: 1950366 - RNA, 19 nt, Artificial Sequence
  Description of Artificial Sequence: Synthetic oligonucleotide
  Sense strand starting at position 1463 of SEQ ID NO: 1880210
gcagaaauguuaccuuaaa

SEQ ID NO: 1950367 - RNA, 19 nt, Artificial Sequence
  Description of Artificial Sequence: Synthetic oligonucleotide
  Antisense strand to SEQ ID NO: 1950366
uuuaagguaacauuucugc

SEQ ID NO: 1950368 - RNA, 19 nt, Artificial Sequence
  Description of Artificial Sequence: Synthetic oligonucleotide
  Sense strand starting at position 1979 of SEQ ID NO: 1880210
cuagaagcauuccucugau

SEQ ID NO: 1950369 - RNA, 19 nt, Artificial Sequence
  Description of Artificial Sequence: Synthetic oligonucleotide
  Antisense strand to SEQ ID NO: 1950368
aucagaggaaugcuucuag

SEQ ID NO: 1950370 - RNA, 19 nt, Artificial Sequence
  Description of Artificial Sequence: Synthetic oligonucleotide
  Sense strand starting at position 2080 of SEQ ID NO: 1880210
agaguaggugcuuacccua

SEQ ID NO: 1950371 - RNA, 19 nt, Artificial Sequence
  Description of Artificial Sequence: Synthetic oligonucleotide
  Antisense strand to SEQ ID NO: 1950370
uaggguaagcaccuacucu

SEQ ID NO: 1950372 - RNA, 19 nt, Artificial Sequence
  Description of Artificial Sequence: Synthetic oligonucleotide
  Sense strand starting at position 2244 of SEQ ID NO: 1880210
gaagcauggcuaggagacu

SEQ ID NO: 1950373 - RNA, 19 nt, Artificial Sequence
  Description of Artificial Sequence: Synthetic oligonucleotide
  Antisense strand to SEQ ID NO: 1950372
agucuccuagccaugcuuc

SEQ ID NO: 1950374 - RNA, 19 nt, Artificial Sequence
  Description of Artificial Sequence: Synthetic oligonucleotide
  Sense strand starting at position 2976 of SEQ ID NO: 1880210
ucaacagauguuuacaugu

SEQ ID NO: 1950375 - RNA, 19 nt, Artificial Sequence
  Description of Artificial Sequence: Synthetic oligonucleotide
  Antisense strand to SEQ ID NO: 1950374
acauguaaacaucuguuga

SEQ ID NO: 1950376 - RNA, 19 nt, Artificial Sequence
  Description of Artificial Sequence: Synthetic oligonucleotide
  Sense strand starting at position 2986 of SEQ ID NO: 1880210
uuuacaugucaggaauagu

SEQ ID NO: 1950377 - RNA, 19 nt, Artificial Sequence
  Description of Artificial Sequence: Synthetic oligonucleotide
  Antisense strand to SEQ ID NO: 1950376
acuauuccugacauguaaa

SEQ ID NO: 1950378 - RNA, 19 nt, Artificial Sequence
  Description of Artificial Sequence: Synthetic oligonucleotide
  Sense strand starting at position 3047 of SEQ ID NO: 1880210
cucuacucucgugaaacuu

SEQ ID NO: 1950379 - RNA, 19 nt, Artificial Sequence
  Description of Artificial Sequence: Synthetic oligonucleotide
  Antisense strand to SEQ ID NO: 1950378
aaguuucacgagaguagag

SEQ ID NO: 1950380 - RNA, 19 nt, Artificial Sequence
  Description of Artificial Sequence: Synthetic oligonucleotide
  Sense strand starting at position 3123 of SEQ ID NO: 1880210
cuugauaaauggucaagug

SEQ ID NO: 1950381 - RNA, 19 nt, Artificial Sequence
  Description of Artificial Sequence: Synthetic oligonucleotide
  Antisense strand to SEQ ID NO: 1950380
cacuugaccauuuaucaag

SEQ ID NO: 1950382 - RNA, 19 nt, Artificial Sequence
  Description of Artificial Sequence: Synthetic oligonucleotide
  Sense strand starting at position 3124 of SEQ ID NO: 1880210
uugauaaauggucaagugu

SEQ ID NO: 1950383 - RNA, 19 nt, Artificial Sequence
  Description of Artificial Sequence: Synthetic oligonucleotide
  Antisense strand to SEQ ID NO: 1950382
acacuugaccauuuaucaa

SEQ ID NO: 1950384 - RNA, 19 nt, Artificial Sequence
  Description of Artificial Sequence: Synthetic oligonucleotide
  Sense strand starting at position 3141 of SEQ ID NO: 1880210
guguguaagagacaaugua

SEQ ID NO: 1950385 - RNA, 19 nt, Artificial Sequence
  Description of Artificial Sequence: Synthetic oligonucleotide
  Antisense strand to SEQ ID NO: 1950384
uacauugucucuuacacac

SEQ ID NO: 1950386 - RNA, 19 nt, Artificial Sequence
  Description of Artificial Sequence: Synthetic oligonucleotide
  Sense strand starting at position 3187 of SEQ ID NO: 1880210
ggucucugauaaucuagga

SEQ ID NO: 1950387 - RNA, 19 nt, Artificial Sequence
  Description of Artificial Sequence: Synthetic oligonucleotide
  Antisense strand to SEQ ID NO: 1950386
uccuagauuaucagagacc

SEQ ID NO: 1950388 - RNA, 19 nt, Artificial Sequence
  Description of Artificial Sequence: Synthetic oligonucleotide
  Sense strand starting at position 3204 of SEQ ID NO: 1880210
gaaagcguucuugacagau

SEQ ID NO: 1950389 - RNA, 19 nt, Artificial Sequence
  Description of Artificial Sequence: Synthetic oligonucleotide
  Antisense strand to SEQ ID NO: 1950388
aucugucaagaacgcuuuc

SEQ ID NO: 1950390 - RNA, 19 nt, Artificial Sequence
  Description of Artificial Sequence: Synthetic oligonucleotide
  Sense strand starting at position 3208 of SEQ ID NO: 1880210
gcguucuugacagauaagg

SEQ ID NO: 1950391 - RNA, 19 nt, Artificial Sequence
  Description of Artificial Sequence: Synthetic oligonucleotide
  Antisense strand to SEQ ID NO: 1950390
ccuuaucugucaagaacgc

SEQ ID NO: 1950392 - RNA, 19 nt, Artificial Sequence
  Description of Artificial Sequence: Synthetic oligonucleotide
  Sense strand starting at position 3350 of SEQ ID NO: 1880210
agaccaauuugacaggcua

SEQ ID NO: 1950393 - RNA, 19 nt, Artificial Sequence
  Description of Artificial Sequence: Synthetic oligonucleotide
  Antisense strand to SEQ ID NO: 1950392
uagccugucaaauuggucu

SEQ ID NO: 1950394 - RNA, 19 nt, Artificial Sequence
  Description of Artificial Sequence: Synthetic oligonucleotide
  Sense strand starting at position 3367 of SEQ ID NO: 1880210
uacuauuuauguuagagag

SEQ ID NO: 1950395 - RNA, 19 nt, Artificial Sequence
  Description of Artificial Sequence: Synthetic oligonucleotide
  Antisense strand to SEQ ID NO: 1950394
cucucuaacauaaauagua

SEQ ID NO: 1950396 - RNA, 19 nt, Artificial Sequence
  Description of Artificial Sequence: Synthetic oligonucleotide
  Sense strand starting at position 3431 of SEQ ID NO: 1880210
ugguuuauccuauagguaa

SEQ ID NO: 1950397 - RNA, 19 nt, Artificial Sequence
  Description of Artificial Sequence: Synthetic oligonucleotide
  Antisense strand to SEQ ID NO: 1950396
uuaccuauaggauaaacca

SEQ ID NO: 1950398 - RNA, 19 nt, Artificial Sequence
  Description of Artificial Sequence: Synthetic oligonucleotide
  Sense strand starting at position 3503 of SEQ ID NO: 1880210
aaauuugauugugagacaa

SEQ ID NO: 1950399 - RNA, 19 nt, Artificial Sequence
  Description of Artificial Sequence: Synthetic oligonucleotide
  Antisense strand to SEQ ID NO: 1950398
uugucucacaaucaaauuu

SEQ ID NO: 1950400 - RNA, 19 nt, Artificial Sequence
  Description of Artificial Sequence: Synthetic oligonucleotide
  Sense strand starting at position 3505 of SEQ ID NO: 1880210
auuugauugugagacaaau

SEQ ID NO: 1950401 - RNA, 19 nt, Artificial Sequence
  Description of Artificial Sequence: Synthetic oligonucleotide
  Antisense strand to SEQ ID NO: 1950400
auuugucucacaaucaaau

SEQ ID NO: 1950402 - RNA, 19 nt, Artificial Sequence
  Description of Artificial Sequence: Synthetic oligonucleotide
  Sense strand starting at position 3575 of SEQ ID NO: 1880210
gcagaaacuuugguaauag

SEQ ID NO: 1950403 - RNA, 19 nt, Artificial Sequence
  Description of Artificial Sequence: Synthetic oligonucleotide
  Antisense strand to SEQ ID NO: 1950402
cuauuaccaaaguuucugc

SEQ ID NO: 1950404 - RNA, 19 nt, Artificial Sequence
  Description of Artificial Sequence: Synthetic oligonucleotide
  Sense strand starting at position 3695 of SEQ ID NO: 1880210
ucuguauaaucuuugaaug

SEQ ID NO: 1950405 - RNA, 19 nt, Artificial Sequence
  Description of Artificial Sequence: Synthetic oligonucleotide
  Antisense strand to SEQ ID NO: 1950404
cauucaaagauuauacaga

SEQ ID NO: 1950406 - RNA, 19 nt, Artificial Sequence
  Description of Artificial Sequence: Synthetic oligonucleotide
  Sense strand starting at position 3713 of SEQ ID NO: 1880210
ggaugcuucuacuugaaag

SEQ ID NO: 1950407 - RNA, 19 nt, Artificial Sequence
  Description of Artificial Sequence: Synthetic oligonucleotide
  Antisense strand to SEQ ID NO: 1950406
cuuucaaguagaagcaucc

SEQ ID NO: 1950408 - RNA, 19 nt, Artificial Sequence
  Description of Artificial Sequence: Synthetic oligonucleotide
  Sense strand starting at position 3715 of SEQ ID NO: 1880210
augcuucuacuugaaagau

SEQ ID NO: 1950409 - RNA, 19 nt, Artificial Sequence
  Description of Artificial Sequence: Synthetic oligonucleotide
  Antisense strand to SEQ ID NO: 1950408
aucuuucaaguagaagcau

SEQ ID NO: 1950410 - RNA, 19 nt, Artificial Sequence
  Description of Artificial Sequence: Synthetic oligonucleotide
  Sense strand starting at position 3828 of SEQ ID NO: 1880210
uuguaucuccaccagaugu

SEQ ID NO: 1950411 - RNA, 19 nt, Artificial Sequence
  Description of Artificial Sequence: Synthetic oligonucleotide
  Antisense strand to SEQ ID NO: 1950410
acaucugguggagauacaa

SEQ ID NO: 1950412 - RNA, 19 nt, Artificial Sequence
  Description of Artificial Sequence: Synthetic oligonucleotide
  Sense strand starting at position 3846 of SEQ ID NO: 1880210
uccuaaacgcaguauauaa

SEQ ID NO: 1950413 - RNA, 19 nt, Artificial Sequence
  Description of Artificial Sequence: Synthetic oligonucleotide
  Antisense strand to SEQ ID NO: 1950412
uuauauacugcguuuagga

SEQ ID NO: 1950414 - RNA, 19 nt, Artificial Sequence
  Description of Artificial Sequence: Synthetic oligonucleotide
  Sense strand starting at position 3891 of SEQ ID NO: 1880210
ugugaauugcaucaccaac

SEQ ID NO: 1950415 - RNA, 19 nt, Artificial Sequence
  Description of Artificial Sequence: Synthetic oligonucleotide
  Antisense strand to SEQ ID NO: 1950414
guuggugaugcaauucaca

SEQ ID NO: 1950416 - RNA, 19 nt, Artificial Sequence
  Description of Artificial Sequence: Synthetic oligonucleotide
  Sense strand starting at position 3976 of SEQ ID NO: 1880210
ucaaguccuguuuauucua

SEQ ID NO: 1950417 - RNA, 19 nt, Artificial Sequence
  Description of Artificial Sequence: Synthetic oligonucleotide
  Antisense strand to SEQ ID NO: 1950416
uagaauaaacaggacuuga

SEQ ID NO: 1950418 - RNA, 19 nt, Artificial Sequence
  Description of Artificial Sequence: Synthetic oligonucleotide
  Sense strand starting at position 244 of SEQ ID NO: 1880211
gggcuaaccucaccaaaga

SEQ ID NO: 1950419 - RNA, 19 nt, Artificial Sequence
  Description of Artificial Sequence: Synthetic oligonucleotide
  Antisense strand to SEQ ID NO: 1950418
ucuuuggugagguuagccc

SEQ ID NO: 1950420 - RNA, 19 nt, Artificial Sequence
  Description of Artificial Sequence: Synthetic oligonucleotide
  Sense strand starting at position 300 of SEQ ID NO: 1880211
gcaggaaguuucuccaaau

SEQ ID NO: 1950421 - RNA, 19 nt, Artificial Sequence
  Description of Artificial Sequence: Synthetic oligonucleotide
  Antisense strand to SEQ ID NO: 1950420
auuuggagaaacuuccugc

SEQ ID NO: 1950422 - RNA, 19 nt, Artificial Sequence
  Description of Artificial Sequence: Synthetic oligonucleotide
  Sense strand starting at position 395 of SEQ ID NO: 1880211
guaacagcuggucaucaaa

SEQ ID NO: 1950423 - RNA, 19 nt, Artificial Sequence
  Description of Artificial Sequence: Synthetic oligonucleotide
  Antisense strand to SEQ ID NO: 1950422
uuugaugaccagcuguuac

SEQ ID NO: 1950424 - RNA, 19 nt, Artificial Sequence
  Description of Artificial Sequence: Synthetic oligonucleotide
  Sense strand starting at position 433 of SEQ ID NO: 1880211
ggacgacagcccuaagacu

SEQ ID NO: 1950425 - RNA, 19 nt, Artificial Sequence
  Description of Artificial Sequence: Synthetic oligonucleotide
  Antisense strand to SEQ ID NO: 1950424
agucuuagggcugucgucc

SEQ ID NO: 1950426 - RNA, 19 nt, Artificial Sequence
  Description of Artificial Sequence: Synthetic oligonucleotide
  Sense strand starting at position 485 of SEQ ID NO: 1880211
ggaguauuggauugacuug

SEQ ID NO: 1950427 - RNA, 19 nt, Artificial Sequence
  Description of Artificial Sequence: Synthetic oligonucleotide
  Antisense strand to SEQ ID NO: 1950426
caagucaauccaauacucc

SEQ ID NO: 1950428 - RNA, 19 nt, Artificial Sequence
  Description of Artificial Sequence: Synthetic oligonucleotide
  Sense strand starting at position 486 of SEQ ID NO: 1880211
gaguauuggauugacuugu

SEQ ID NO: 1950429 - RNA, 19 nt, Artificial Sequence
  Description of Artificial Sequence: Synthetic oligonucleotide
  Antisense strand to SEQ ID NO: 1950428
acaagucaauccaauacuc

SEQ ID NO: 1950430 - RNA, 19 nt, Artificial Sequence
  Description of Artificial Sequence: Synthetic oligonucleotide
  Sense strand starting at position 497 of SEQ ID NO: 1880211
ugacuuguugcccaucaca

SEQ ID NO: 1950431 - RNA, 19 nt, Artificial Sequence
  Description of Artificial Sequence: Synthetic oligonucleotide
  Antisense strand to SEQ ID NO: 1950430
ugugaugggcaacaaguca

SEQ ID NO: 1950432 - RNA, 19 nt, Artificial Sequence
  Description of Artificial Sequence: Synthetic oligonucleotide
  Sense strand starting at position 560 of SEQ ID NO: 1880211
agccucacugaaugguaua

SEQ ID NO: 1950433 - RNA, 19 nt, Artificial Sequence
  Description of Artificial Sequence: Synthetic oligonucleotide
  Antisense strand to SEQ ID NO: 1950432
uauaccauucagugaggcu

SEQ ID NO: 1950434 - RNA, 19 nt, Artificial Sequence
  Description of Artificial Sequence: Synthetic oligonucleotide
  Sense strand starting at position 565 of SEQ ID NO: 1880211
cacugaaugguauaugguu

SEQ ID NO: 1950435 - RNA, 19 nt, Artificial Sequence
  Description of Artificial Sequence: Synthetic oligonucleotide
  Antisense strand to SEQ ID NO: 1950434
aaccauauaccauucagug

SEQ ID NO: 1950436 - RNA, 19 nt, Artificial Sequence
  Description of Artificial Sequence: Synthetic oligonucleotide
  Sense strand starting at position 570 of SEQ ID NO: 1880211
aaugguauaugguuacagu

SEQ ID NO: 1950437 - RNA, 19 nt, Artificial Sequence
  Description of Artificial Sequence: Synthetic oligonucleotide
  Antisense strand to SEQ ID NO: 1950436
acuguaaccauauaccauu

SEQ ID NO: 1950438 - RNA, 19 nt, Artificial Sequence
  Description of Artificial Sequence: Synthetic oligonucleotide
  Sense strand starting at position 571 of SEQ ID NO: 1880211
augguauaugguuacaguu

SEQ ID NO: 1950439 - RNA, 19 nt, Artificial Sequence
  Description of Artificial Sequence: Synthetic oligonucleotide
  Antisense strand to SEQ ID NO: 1950438
aacuguaaccauauaccau

SEQ ID NO: 1950440 - RNA, 19 nt, Artificial Sequence
  Description of Artificial Sequence: Synthetic oligonucleotide
  Sense strand starting at position 622 of SEQ ID NO: 1880211
gagauaaaguuagcugaua

SEQ ID NO: 1950441 - RNA, 19 nt, Artificial Sequence
  Description of Artificial Sequence: Synthetic oligonucleotide
  Antisense strand to SEQ ID NO: 1950440
uaucagcuaacuuuaucuc

SEQ ID NO: 1950442 - RNA, 19 nt, Artificial Sequence
  Description of Artificial Sequence: Synthetic oligonucleotide
  Sense strand starting at position 819 of SEQ ID NO: 1880211
aauguuauucuugagcuag

SEQ ID NO: 1950443 - RNA, 19 nt, Artificial Sequence
  Description of Artificial Sequence: Synthetic oligonucleotide
  Antisense strand to SEQ ID NO: 1950442
cuagcucaagaauaacauu

SEQ ID NO: 1950444 - RNA, 19 nt, Artificial Sequence
  Description of Artificial Sequence: Synthetic oligonucleotide
  Sense strand starting at position 821 of SEQ ID NO: 1880211
uguuauucuugagcuagga

SEQ ID NO: 1950445 - RNA, 19 nt, Artificial Sequence
  Description of Artificial Sequence: Synthetic oligonucleotide
  Antisense strand to SEQ ID NO: 1950444
uccuagcucaagaauaaca

SEQ ID NO: 1950446 - RNA, 19 nt, Artificial Sequence
  Description of Artificial Sequence: Synthetic oligonucleotide
  Sense strand starting at position 825 of SEQ ID NO: 1880211
auucuugagcuaggaauag

SEQ ID NO: 1950447 - RNA, 19 nt, Artificial Sequence
  Description of Artificial Sequence: Synthetic oligonucleotide
  Antisense strand to SEQ ID NO: 1950446
cuauuccuagcucaagaau

SEQ ID NO: 1950448 - RNA, 19 nt, Artificial Sequence
  Description of Artificial Sequence: Synthetic oligonucleotide
  Sense strand starting at position 1356 of SEQ ID NO: 1880211
guugaaucauugccuccaa

SEQ ID NO: 1950449 - RNA, 19 nt, Artificial Sequence
  Description of Artificial Sequence: Synthetic oligonucleotide
  Antisense strand to SEQ ID NO: 1950448
uuggaggcaaugauucaac

SEQ ID NO: 1950450 - RNA, 19 nt, Artificial Sequence
  Description of Artificial Sequence: Synthetic oligonucleotide
  Sense strand starting at position 1380 of SEQ ID NO: 1880211
aacucuuaccgugacaaag

SEQ ID NO: 1950451 - RNA, 19 nt, Artificial Sequence
  Description of Artificial Sequence: Synthetic oligonucleotide
  Antisense strand to SEQ ID NO: 1950450
cuuugucacgguaagaguu

SEQ ID NO: 1950452 - RNA, 19 nt, Artificial Sequence
  Description of Artificial Sequence: Synthetic oligonucleotide
  Sense strand starting at position 1398 of SEQ ID NO: 1880211
gucaguagggcugaucuua

SEQ ID NO: 1950453 - RNA, 19 nt, Artificial Sequence
  Description of Artificial Sequence: Synthetic oligonucleotide
  Antisense strand to SEQ ID NO: 1950452
uaagaucagcccuacugac

SEQ ID NO: 1950454 - RNA, 19 nt, Artificial Sequence
  Description of Artificial Sequence: Synthetic oligonucleotide
  Sense strand starting at position 1409 of SEQ ID NO: 1880211
ugaucuuagaaguguagga

SEQ ID NO: 1950455 - RNA, 19 nt, Artificial Sequence
  Description of Artificial Sequence: Synthetic oligonucleotide
  Antisense strand to SEQ ID NO: 1950454
uccuacacuucuaagauca

SEQ ID NO: 1950456 - RNA, 19 nt, Artificial Sequence
  Description of Artificial Sequence: Synthetic oligonucleotide
  Sense strand starting at position 1433 of SEQ ID NO: 1880211
gaguguuacgugguuguac

SEQ ID NO: 1950457 - RNA, 19 nt, Artificial Sequence
  Description of Artificial Sequence: Synthetic oligonucleotide
  Antisense strand to SEQ ID NO: 1950456
guacaaccacguaacacuc

SEQ ID NO: 1950458 - RNA, 19 nt, Artificial Sequence
  Description of Artificial Sequence: Synthetic oligonucleotide
  Sense strand starting at position 1578 of SEQ ID NO: 1880211
ggguguugggaaugagaca

SEQ ID NO: 1950459 - RNA, 19 nt, Artificial Sequence
  Description of Artificial Sequence: Synthetic oligonucleotide
  Antisense strand to SEQ ID NO: 1950458
ugucucauucccaacaccc

SEQ ID NO: 1950460 - RNA, 19 nt, Artificial Sequence
  Description of Artificial Sequence: Synthetic oligonucleotide
  Sense strand starting at position 1686 of SEQ ID NO: 1880211
gggcuuagcgaauagaaga

SEQ ID NO: 1950461 - RNA, 19 nt, Artificial Sequence
  Description of Artificial Sequence: Synthetic oligonucleotide
  Antisense strand to SEQ ID NO: 1950460
ucuucuauucgcuaagccc

SEQ ID NO: 1950462 - RNA, 19 nt, Artificial Sequence
  Description of Artificial Sequence: Synthetic oligonucleotide
  Sense strand starting at position 2051 of SEQ ID NO: 1880211
ugacuugugagguauugcu

SEQ ID NO: 1950463 - RNA, 19 nt, Artificial Sequence
  Description of Artificial Sequence: Synthetic oligonucleotide
  Antisense strand to SEQ ID NO: 1950462
agcaauaccucacaaguca

SEQ ID NO: 1950464 - RNA, 19 nt, Artificial Sequence
  Description of Artificial Sequence: Synthetic oligonucleotide
  Sense strand starting at position 2058 of SEQ ID NO: 1880211
ugagguauugcugagcaca

SEQ ID NO: 1950465 - RNA, 19 nt, Artificial Sequence
  Description of Artificial Sequence: Synthetic oligonucleotide
  Antisense strand to SEQ ID NO: 1950464
ugugcucagcaauaccuca

SEQ ID NO: 1950466 - RNA, 19 nt, Artificial Sequence
  Description of Artificial Sequence: Synthetic oligonucleotide
  Sense strand starting at position 2061 of SEQ ID NO: 1880211
gguauugcugagcacauaa

SEQ ID NO: 1950467 - RNA, 19 nt, Artificial Sequence
  Description of Artificial Sequence: Synthetic oligonucleotide
  Antisense strand to SEQ ID NO: 1950466
uuaugugcucagcaauacc

SEQ ID NO: 1950468 - RNA, 19 nt, Artificial Sequence
  Description of Artificial Sequence: Synthetic oligonucleotide
  Sense strand starting at position 2071 of SEQ ID NO: 1880211
agcacauaauggucaagau

SEQ ID NO: 1950469 - RNA, 19 nt, Artificial Sequence
  Description of Artificial Sequence: Synthetic oligonucleotide
  Antisense strand to SEQ ID NO: 1950468
aucuugaccauuaugugcu

SEQ ID NO: 1950470 - RNA, 19 nt, Artificial Sequence
  Description of Artificial Sequence: Synthetic oligonucleotide
  Sense strand starting at position 2081 of SEQ ID NO: 1880211
ggucaagauagcugcauaa

SEQ ID NO: 1950471 - RNA, 19 nt, Artificial Sequence
  Description of Artificial Sequence: Synthetic oligonucleotide
  Antisense strand to SEQ ID NO: 1950470
uuaugcagcuaucuugacc

SEQ ID NO: 1950472 - RNA, 19 nt, Artificial Sequence
  Description of Artificial Sequence: Synthetic oligonucleotide
  Sense strand starting at position 2155 of SEQ ID NO: 1880211
cagaaagguucuguuggau

SEQ ID NO: 1950473 - RNA, 19 nt, Artificial Sequence
  Description of Artificial Sequence: Synthetic oligonucleotide
  Antisense strand to SEQ ID NO: 1950472
auccaacagaaccuuucug

SEQ ID NO: 1950474 - RNA, 19 nt, Artificial Sequence
  Description of Artificial Sequence: Synthetic oligonucleotide
  Sense strand starting at position 2167 of SEQ ID NO: 1880211
guuggauucugaguggaac

SEQ ID NO: 1950475 - RNA, 19 nt, Artificial Sequence
  Description of Artificial Sequence: Synthetic oligonucleotide
  Antisense strand to SEQ ID NO: 1950474
guuccacucagaauccaac

SEQ ID NO: 1950476 - RNA, 19 nt, Artificial Sequence
  Description of Artificial Sequence: Synthetic oligonucleotide
  Sense strand starting at position 2178 of SEQ ID NO: 1880211
aguggaaccucuuuggaua

SEQ ID NO: 1950477 - RNA, 19 nt, Artificial Sequence
  Description of Artificial Sequence: Synthetic oligonucleotide
  Antisense strand to SEQ ID NO: 1950476
uauccaaagagguuccacu

SEQ ID NO: 1950478 - RNA, 19 nt, Artificial Sequence
  Description of Artificial Sequence: Synthetic oligonucleotide
  Sense strand starting at position 2179 of SEQ ID NO: 1880211
guggaaccucuuuggauau

SEQ ID NO: 1950479 - RNA, 19 nt, Artificial Sequence
  Description of Artificial Sequence: Synthetic oligonucleotide
  Antisense strand to SEQ ID NO: 1950478
auauccaaagagguuccac

SEQ ID NO: 1950480 - RNA, 19 nt, Artificial Sequence
  Description of Artificial Sequence: Synthetic oligonucleotide
  Sense strand starting at position 2209 of SEQ ID NO: 1880211
ucaagauugagccaagugu

SEQ ID NO: 1950481 - RNA, 19 nt, Artificial Sequence
  Description of Artificial Sequence: Synthetic oligonucleotide
  Antisense strand to SEQ ID NO: 1950480
acacuuggcucaaucuuga

SEQ ID NO: 1950482 - RNA, 19 nt, Artificial Sequence
  Description of Artificial Sequence: Synthetic oligonucleotide
  Sense strand starting at position 2222 of SEQ ID NO: 1880211
aaguguugacaugggaaga

SEQ ID NO: 1950483 - RNA, 19 nt, Artificial Sequence
  Description of Artificial Sequence: Synthetic oligonucleotide
  Antisense strand to SEQ ID NO: 1950482
ucuucccaugucaacacuu

SEQ ID NO: 1950484 - RNA, 19 nt, Artificial Sequence
  Description of Artificial Sequence: Synthetic oligonucleotide
  Sense strand starting at position 2382 of SEQ ID NO: 1880211
uaaugagaguguuccucag

SEQ ID NO: 1950485 - RNA, 19 nt, Artificial Sequence
  Description of Artificial Sequence: Synthetic oligonucleotide
  Antisense strand to SEQ ID NO: 1950484
cugaggaacacucucauua

SEQ ID NO: 1950486 - RNA, 19 nt, Artificial Sequence
  Description of Artificial Sequence: Synthetic oligonucleotide
  Sense strand starting at position 2386 of SEQ ID NO: 1880211
gagaguguuccucagguuu

SEQ ID NO: 1950487 - RNA, 19 nt, Artificial Sequence
  Description of Artificial Sequence: Synthetic oligonucleotide
  Antisense strand to SEQ ID NO: 1950486
aaaccugaggaacacucuc

SEQ ID NO: 1950488 - RNA, 19 nt, Artificial Sequence
  Description of Artificial Sequence: Synthetic oligonucleotide
  Sense strand starting at position 2399 of SEQ ID NO: 1880211
agguuucugguuuaucuua

SEQ ID NO: 1950489 - RNA, 19 nt, Artificial Sequence
  Description of Artificial Sequence: Synthetic oligonucleotide
  Antisense strand to SEQ ID NO: 1950488
uaagauaaaccagaaaccu

SEQ ID NO: 1950490 - RNA, 19 nt, Artificial Sequence
  Description of Artificial Sequence: Synthetic oligonucleotide
  Sense strand starting at position 2973 of SEQ ID NO: 1880211
gggacugauacuuggguca

SEQ ID NO: 1950491 - RNA, 19 nt, Artificial Sequence
  Description of Artificial Sequence: Synthetic oligonucleotide
  Antisense strand to SEQ ID NO: 1950490
ugacccaaguaucaguccc

SEQ ID NO: 1950492 - RNA, 19 nt, Artificial Sequence
  Description of Artificial Sequence: Synthetic oligonucleotide
  Sense strand starting at position 2976 of SEQ ID NO: 1880211
acugauacuugggucauua

SEQ ID NO: 1950493 - RNA, 19 nt, Artificial Sequence
  Description of Artificial Sequence: Synthetic oligonucleotide
  Antisense strand to SEQ ID NO: 1950492
uaaugacccaaguaucagu

SEQ ID NO: 1950494 - RNA, 19 nt, Artificial Sequence
  Description of Artificial Sequence: Synthetic oligonucleotide
  Sense strand starting at position 3384 of SEQ ID NO: 1880211
uuuaaacuugcuuagugau

SEQ ID NO: 1950495 - RNA, 19 nt, Artificial Sequence
  Description of Artificial Sequence: Synthetic oligonucleotide
  Antisense strand to SEQ ID NO: 1950494
aucacuaagcaaguuuaaa

SEQ ID NO: 1950496 - RNA, 19 nt, Artificial Sequence
  Description of Artificial Sequence: Synthetic oligonucleotide
  Sense strand starting at position 3775 of SEQ ID NO: 1880211
aguucuuguagagauuaug

SEQ ID NO: 1950497 - RNA, 19 nt, Artificial Sequence
  Description of Artificial Sequence: Synthetic oligonucleotide
  Antisense strand to SEQ ID NO: 1950496
cauaaucucuacaagaacu

SEQ ID NO: 1950498 - RNA, 19 nt, Artificial Sequence
  Description of Artificial Sequence: Synthetic oligonucleotide
  Sense strand starting at position 63 of SEQ ID NO: 1880212
cccguaauuguauacaagu

SEQ ID NO: 1950499 - RNA, 19 nt, Artificial Sequence
  Description of Artificial Sequence: Synthetic oligonucleotide
  Antisense strand to SEQ ID NO: 1950498
acuuguauacaauuacggg

SEQ ID NO: 1950500 - RNA, 19 nt, Artificial Sequence
  Description of Artificial Sequence: Synthetic oligonucleotide
  Sense strand starting at position 271 of SEQ ID NO: 1880212
acugcuaauuaugugucaa

SEQ ID NO: 1950501 - RNA, 19 nt, Artificial Sequence
  Description of Artificial Sequence: Synthetic oligonucleotide
  Antisense strand to SEQ ID NO: 1950500
uugacacauaauuagcagu

SEQ ID NO: 1950502 - RNA, 19 nt, Artificial Sequence
  Description of Artificial Sequence: Synthetic oligonucleotide
  Sense strand starting at position 336 of SEQ ID NO: 1880212
agacuagcuuuguuaugua

SEQ ID NO: 1950503 - RNA, 19 nt, Artificial Sequence
  Description of Artificial Sequence: Synthetic oligonucleotide
  Antisense strand to SEQ ID NO: 1950502
uacauaacaaagcuagucu

SEQ ID NO: 1950504 - RNA, 19 nt, Artificial Sequence
  Description of Artificial Sequence: Synthetic oligonucleotide
  Sense strand starting at position 340 of SEQ ID NO: 1880212
uagcuuuguuauguaaaug

SEQ ID NO: 1950505 - RNA, 19 nt, Artificial Sequence
  Description of Artificial Sequence: Synthetic oligonucleotide
  Antisense strand to SEQ ID NO: 1950504
cauuuacauaacaaagcua

SEQ ID NO: 1950506 - RNA, 19 nt, Artificial Sequence
  Description of Artificial Sequence: Synthetic oligonucleotide
  Sense strand starting at position 341 of SEQ ID NO: 1880212
agcuuuguuauguaaaugu

SEQ ID NO: 1950507 - RNA, 19 nt, Artificial Sequence
  Description of Artificial Sequence: Synthetic oligonucleotide
  Antisense strand to SEQ ID NO: 1950506
acauuuacauaacaaagcu

SEQ ID NO: 1950508 - RNA, 19 nt, Artificial Sequence
  Description of Artificial Sequence: Synthetic oligonucleotide
  Sense strand starting at position 402 of SEQ ID NO: 1880212
guugaauaauauguuccuu

SEQ ID NO: 1950509 - RNA, 19 nt, Artificial Sequence
  Description of Artificial Sequence: Synthetic oligonucleotide
  Antisense strand to SEQ ID NO: 1950508
aaggaacauauuauucaac

SEQ ID NO: 1950510 - RNA, 19 nt, Artificial Sequence
  Description of Artificial Sequence: Synthetic oligonucleotide
  Sense strand starting at position 404 of SEQ ID NO: 1880212
ugaauaauauguuccuuga

SEQ ID NO: 1950511 - RNA, 19 nt, Artificial Sequence
  Description of Artificial Sequence: Synthetic oligonucleotide
  Antisense strand to SEQ ID NO: 1950510
ucaaggaacauauuauuca

SEQ ID NO: 1950512 - RNA, 19 nt, Artificial Sequence
  Description of Artificial Sequence: Synthetic oligonucleotide
  Sense strand starting at position 969 of SEQ ID NO: 1880212
uuucgugguccugaugaau

SEQ ID NO: 1950513 - RNA, 19 nt, Artificial Sequence
  Description of Artificial Sequence: Synthetic oligonucleotide
  Antisense strand to SEQ ID NO: 1950512
auucaucaggaccacgaaa

SEQ ID NO: 1950514 - RNA, 19 nt, Artificial Sequence
  Description of Artificial Sequence: Synthetic oligonucleotide
  Sense strand starting at position 1041 of SEQ ID NO: 1880212
ggugucaccagaggauauu

SEQ ID NO: 1950515 - RNA, 19 nt, Artificial Sequence
  Description of Artificial Sequence: Synthetic oligonucleotide
  Antisense strand to SEQ ID NO: 1950514
aauauccucuggugacacc

SEQ ID NO: 1950516 - RNA, 19 nt, Artificial Sequence
  Description of Artificial Sequence: Synthetic oligonucleotide
  Sense strand starting at position 1195 of SEQ ID NO: 1880212
auugcuacuguugauaaga

SEQ ID NO: 1950517 - RNA, 19 nt, Artificial Sequence
  Description of Artificial Sequence: Synthetic oligonucleotide
  Antisense strand to SEQ ID NO: 1950516
ucuuaucaacaguagcaau

SEQ ID NO: 1950518 - RNA, 19 nt, Artificial Sequence
  Description of Artificial Sequence: Synthetic oligonucleotide
  Sense strand starting at position 1285 of SEQ ID NO: 1880212
aaagccaacguuuauguaa

SEQ ID NO: 1950519 - RNA, 19 nt, Artificial Sequence
  Description of Artificial Sequence: Synthetic oligonucleotide
  Antisense strand to SEQ ID NO: 1950518
uuacauaaacguuggcuuu

SEQ ID NO: 1950520 - RNA, 19 nt, Artificial Sequence
  Description of Artificial Sequence: Synthetic oligonucleotide
  Sense strand starting at position 1297 of SEQ ID NO: 1880212
uauguaauaccaugggcua

SEQ ID NO: 1950521 - RNA, 19 nt, Artificial Sequence
  Description of Artificial Sequence: Synthetic oligonucleotide
  Antisense strand to SEQ ID NO: 1950520
uagcccaugguauuacaua

SEQ ID NO: 1950522 - RNA, 19 nt, Artificial Sequence
  Description of Artificial Sequence: Synthetic oligonucleotide
  Sense strand starting at position 1298 of SEQ ID NO: 1880212
auguaauaccaugggcuau

SEQ ID NO: 1950523 - RNA, 19 nt, Artificial Sequence
  Description of Artificial Sequence: Synthetic oligonucleotide
  Antisense strand to SEQ ID NO: 1950522
auagcccaugguauuacau

SEQ ID NO: 1950524 - RNA, 19 nt, Artificial Sequence
  Description of Artificial Sequence: Synthetic oligonucleotide
  Sense strand starting at position 1309 of SEQ ID NO: 1880212
ugggcuauuucuccagucu

SEQ ID NO: 1950525 - RNA, 19 nt, Artificial Sequence
  Description of Artificial Sequence: Synthetic oligonucleotide
  Antisense strand to SEQ ID NO: 1950524
agacuggagaaauagccca

SEQ ID NO: 1950526 - RNA, 19 nt, Artificial Sequence
  Description of Artificial Sequence: Synthetic oligonucleotide
  Sense strand starting at position 1400 of SEQ ID NO: 1880212
cuuuaucaacccugggaaa

SEQ ID NO: 1950527 - RNA, 19 nt, Artificial Sequence
  Description of Artificial Sequence: Synthetic oligonucleotide
  Antisense strand to SEQ ID NO: 1950526
uuucccaggguugauaaag

SEQ ID NO: 1950528 - RNA, 19 nt, Artificial Sequence
  Description of Artificial Sequence: Synthetic oligonucleotide
  Sense strand starting at position 1401 of SEQ ID NO: 1880212
uuuaucaacccugggaaau

SEQ ID NO: 1950529 - RNA, 19 nt, Artificial Sequence
  Description of Artificial Sequence: Synthetic oligonucleotide
  Antisense strand to SEQ ID NO: 1950528
auuucccaggguugauaaa

SEQ ID NO: 1950530 - RNA, 19 nt, Artificial Sequence
  Description of Artificial Sequence: Synthetic oligonucleotide
  Sense strand starting at position 1402 of SEQ ID NO: 1880212
uuaucaacccugggaaauc

SEQ ID NO: 1950531 - RNA, 19 nt, Artificial Sequence
  Description of Artificial Sequence: Synthetic oligonucleotide
  Antisense strand to SEQ ID NO: 1950530
gauuucccaggguugauaa

SEQ ID NO: 1950532 - RNA, 19 nt, Artificial Sequence
  Description of Artificial Sequence: Synthetic oligonucleotide
  Sense strand starting at position 1785 of SEQ ID NO: 1880212
gugucauuaugaucuaauc

SEQ ID NO: 1950533 - RNA, 19 nt, Artificial Sequence
  Description of Artificial Sequence: Synthetic oligonucleotide
  Antisense strand to SEQ ID NO: 1950532
gauuagaucauaaugacac

SEQ ID NO: 1950534 - RNA, 19 nt, Artificial Sequence
  Description of Artificial Sequence: Synthetic oligonucleotide
  Sense strand starting at position 1838 of SEQ ID NO: 1880212
ucaucagagguuuggauca

SEQ ID NO: 1950535 - RNA, 19 nt, Artificial Sequence
  Description of Artificial Sequence: Synthetic oligonucleotide
  Antisense strand to SEQ ID NO: 1950534
ugauccaaaccucugauga

SEQ ID NO: 1950536 - RNA, 19 nt, Artificial Sequence
  Description of Artificial Sequence: Synthetic oligonucleotide
  Sense strand starting at position 1944 of SEQ ID NO: 1880212
aaagcagaucggugcucaa

SEQ ID NO: 1950537 - RNA, 19 nt, Artificial Sequence
  Description of Artificial Sequence: Synthetic oligonucleotide
  Antisense strand to SEQ ID NO: 1950536
uugagcaccgaucugcuuu

SEQ ID NO: 1950538 - RNA, 19 nt, Artificial Sequence
  Description of Artificial Sequence: Synthetic oligonucleotide
  Sense strand starting at position 1978 of SEQ ID NO: 1880212
gagucaugaggcugagaac

SEQ ID NO: 1950539 - RNA, 19 nt, Artificial Sequence
  Description of Artificial Sequence: Synthetic oligonucleotide
  Antisense strand to SEQ ID NO: 1950538
guucucagccucaugacuc

SEQ ID NO: 1950540 - RNA, 19 nt, Artificial Sequence
  Description of Artificial Sequence: Synthetic oligonucleotide
  Sense strand starting at position 2122 of SEQ ID NO: 1880212
gaaauauccuguucugagg

SEQ ID NO: 1950541 - RNA, 19 nt, Artificial Sequence
  Description of Artificial Sequence: Synthetic oligonucleotide
  Antisense strand to SEQ ID NO: 1950540
ccucagaacaggauauuuc

SEQ ID NO: 1950542 - RNA, 19 nt, Artificial Sequence
  Description of Artificial Sequence: Synthetic oligonucleotide
  Sense strand starting at position 2149 of SEQ ID NO: 1880212
uggauuaagugcucaugac

SEQ ID NO: 1950543 - RNA, 19 nt, Artificial Sequence
  Description of Artificial Sequence: Synthetic oligonucleotide
  Antisense strand to SEQ ID NO: 1950542
gucaugagcacuuaaucca

SEQ ID NO: 1950544 - RNA, 19 nt, Artificial Sequence
  Description of Artificial Sequence: Synthetic oligonucleotide
  Sense strand starting at position 2150 of SEQ ID NO: 1880212
ggauuaagugcucaugacu

SEQ ID NO: 1950545 - RNA, 19 nt, Artificial Sequence
  Description of Artificial Sequence: Synthetic oligonucleotide
  Antisense strand to SEQ ID NO: 1950544
agucaugagcacuuaaucc

SEQ ID NO: 1950546 - RNA, 19 nt, Artificial Sequence
  Description of Artificial Sequence: Synthetic oligonucleotide
  Sense strand starting at position 2231 of SEQ ID NO: 1880212
ucucuaacuggugguccaa

SEQ ID NO: 1950547 - RNA, 19 nt, Artificial Sequence
  Description of Artificial Sequence: Synthetic oligonucleotide
  Antisense strand to SEQ ID NO: 1950546
uuggaccaccaguuagaga

SEQ ID NO: 1950548 - RNA, 19 nt, Artificial Sequence
  Description of Artificial Sequence: Synthetic oligonucleotide
  Sense strand starting at position 2248 of SEQ ID NO: 1880212
aaggcugucuuucuugauu

SEQ ID NO: 1950549 - RNA, 19 nt, Artificial Sequence
  Description of Artificial Sequence: Synthetic oligonucleotide
  Antisense strand to SEQ ID NO: 1950548
aaucaagaaagacagccuu

SEQ ID NO: 1950550 - RNA, 19 nt, Artificial Sequence
  Description of Artificial Sequence: Synthetic oligonucleotide
  Sense strand starting at position 2386 of SEQ ID NO: 1880212
aguauaauuugccaauuug

SEQ ID NO: 1950551 - RNA, 19 nt, Artificial Sequence
  Description of Artificial Sequence: Synthetic oligonucleotide
  Antisense strand to SEQ ID NO: 1950550
caaauuggcaaauuauacu

SEQ ID NO: 1950552 - RNA, 19 nt, Artificial Sequence
  Description of Artificial Sequence: Synthetic oligonucleotide
  Sense strand starting at position 2428 of SEQ ID NO: 1880212
auaguucuaucauuggcaa

SEQ ID NO: 1950553 - RNA, 19 nt, Artificial Sequence
  Description of Artificial Sequence: Synthetic oligonucleotide
  Antisense strand to SEQ ID NO: 1950552
uugccaaugauagaacuau

SEQ ID NO: 1950554 - RNA, 19 nt, Artificial Sequence
  Description of Artificial Sequence: Synthetic oligonucleotide
  Sense strand starting at position 2429 of SEQ ID NO: 1880212
uaguucuaucauuggcaag

SEQ ID NO: 1950555 - RNA, 19 nt, Artificial Sequence
  Description of Artificial Sequence: Synthetic oligonucleotide
  Antisense strand to SEQ ID NO: 1950554
cuugccaaugauagaacua

SEQ ID NO: 1950556 - RNA, 19 nt, Artificial Sequence
  Description of Artificial Sequence: Synthetic oligonucleotide
  Sense strand starting at position 2441 of SEQ ID NO: 1880212
uggcaaguccugugaucac

SEQ ID NO: 1950557 - RNA, 19 nt, Artificial Sequence
  Description of Artificial Sequence: Synthetic oligonucleotide
  Antisense strand to SEQ ID NO: 1950556
gugaucacaggacuugcca

SEQ ID NO: 1950558 - RNA, 19 nt, Artificial Sequence
  Description of Artificial Sequence: Synthetic oligonucleotide
  Sense strand starting at position 2607 of SEQ ID NO: 1880212
uauauaauccuggguuuga

SEQ ID NO: 1950559 - RNA, 19 nt, Artificial Sequence
  Description of Artificial Sequence: Synthetic oligonucleotide
  Antisense strand to SEQ ID NO: 1950558
ucaaacccaggauuauaua

SEQ ID NO: 1950560 - RNA, 19 nt, Artificial Sequence
  Description of Artificial Sequence: Synthetic oligonucleotide
  Sense strand starting at position 2608 of SEQ ID NO: 1880212
auauaauccuggguuugac

SEQ ID NO: 1950561 - RNA, 19 nt, Artificial Sequence
  Description of Artificial Sequence: Synthetic oligonucleotide
  Antisense strand to SEQ ID NO: 1950560
gucaaacccaggauuauau

SEQ ID NO: 1950562 - RNA, 19 nt, Artificial Sequence
  Description of Artificial Sequence: Synthetic oligonucleotide
  Sense strand starting at position 2618 of SEQ ID NO: 1880212
ggguuugaccuauauucuu

SEQ ID NO: 1950563 - RNA, 19 nt, Artificial Sequence
  Description of Artificial Sequence: Synthetic oligonucleotide
  Antisense strand to SEQ ID NO: 1950562
aagaauauaggucaaaccc

SEQ ID NO: 1950564 - RNA, 19 nt, Artificial Sequence
  Description of Artificial Sequence: Synthetic oligonucleotide
  Sense strand starting at position 2623 of SEQ ID NO: 1880212
ugaccuauauucuuugugu

SEQ ID NO: 1950565 - RNA, 19 nt, Artificial Sequence
  Description of Artificial Sequence: Synthetic oligonucleotide
  Antisense strand to SEQ ID NO: 1950564
acacaaagaauauagguca

SEQ ID NO: 1950566 - RNA, 19 nt, Artificial Sequence
  Description of Artificial Sequence: Synthetic oligonucleotide
  Sense strand starting at position 2693 of SEQ ID NO: 1880212
cagauuccacaguggaauc

SEQ ID NO: 1950567 - RNA, 19 nt, Artificial Sequence
  Description of Artificial Sequence: Synthetic oligonucleotide
  Antisense strand to SEQ ID NO: 1950566
gauuccacuguggaaucug

SEQ ID NO: 1950568 - RNA, 19 nt, Artificial Sequence
  Description of Artificial Sequence: Synthetic oligonucleotide
  Sense strand starting at position 2734 of SEQ ID NO: 1880212
ccuugcugcccucaaagau

SEQ ID NO: 1950569 - RNA, 19 nt, Artificial Sequence
  Description of Artificial Sequence: Synthetic oligonucleotide
  Antisense strand to SEQ ID NO: 1950568
aucuuugagggcagcaagg

SEQ ID NO: 1950570 - RNA, 19 nt, Artificial Sequence
  Description of Artificial Sequence: Synthetic oligonucleotide
  Sense strand starting at position 2744 of SEQ ID NO: 1880212
cucaaagauguguacuaca

SEQ ID NO: 1950571 - RNA, 19 nt, Artificial Sequence
  Description of Artificial Sequence: Synthetic oligonucleotide
  Antisense strand to SEQ ID NO: 1950570
uguaguacacaucuuugag

SEQ ID NO: 1950572 - RNA, 19 nt, Artificial Sequence
  Description of Artificial Sequence: Synthetic oligonucleotide
  Sense strand starting at position 2856 of SEQ ID NO: 1880212
uuuauugaaccaugccuga

SEQ ID NO: 1950573 - RNA, 19 nt, Artificial Sequence
  Description of Artificial Sequence: Synthetic oligonucleotide
  Antisense strand to SEQ ID NO: 1950572
ucaggcaugguucaauaaa

SEQ ID NO: 1950574 - RNA, 19 nt, Artificial Sequence
  Description of Artificial Sequence: Synthetic oligonucleotide
  Sense strand starting at position 2860 of SEQ ID NO: 1880212
uugaaccaugccugagaca

SEQ ID NO: 1950575 - RNA, 19 nt, Artificial Sequence
  Description of Artificial Sequence: Synthetic oligonucleotide
  Antisense strand to SEQ ID NO: 1950574
ugucucaggcaugguucaa

SEQ ID NO: 1950576 - RNA, 19 nt, Artificial Sequence
  Description of Artificial Sequence: Synthetic oligonucleotide
  Sense strand starting at position 3970 of SEQ ID NO: 1880212
ucaguucugcuuugaacca

SEQ ID NO: 1950577 - RNA, 19 nt, Artificial Sequence
  Description of Artificial Sequence: Synthetic oligonucleotide
  Antisense strand to SEQ ID NO: 1950576
ugguucaaagcagaacuga

SEQ ID NO: 1950578 - RNA, 19 nt, Artificial Sequence
  Description of Artificial Sequence: Synthetic oligonucleotide
  Sense strand starting at position 1838 of SEQ ID NO: 1880213
cgguuaagacauuauacca

SEQ ID NO: 1950579 - RNA, 19 nt, Artificial Sequence
  Description of Artificial Sequence: Synthetic oligonucleotide
  Antisense strand to SEQ ID NO: 1950578
ugguauaaugucuuaaccg

SEQ ID NO: 1950580 - RNA, 19 nt, Artificial Sequence
  Description of Artificial Sequence: Synthetic oligonucleotide
  Sense strand starting at position 2833 of SEQ ID NO: 1880213
uuggcuuucucccugaauc

SEQ ID NO: 1950581 - RNA, 19 nt, Artificial Sequence
  Description of Artificial Sequence: Synthetic oligonucleotide
  Antisense strand to SEQ ID NO: 1950580
gauucagggagaaagccaa

SEQ ID NO: 1950582 - RNA, 19 nt, Artificial Sequence
  Description of Artificial Sequence: Synthetic oligonucleotide
  Sense strand starting at position 2835 of SEQ ID NO: 1880213
ggcuuucucccugaaucca

SEQ ID NO: 1950583 - RNA, 19 nt, Artificial Sequence
  Description of Artificial Sequence: Synthetic oligonucleotide
  Antisense strand to SEQ ID NO: 1950582
uggauucagggagaaagcc

SEQ ID NO: 1950584 - RNA, 19 nt, Artificial Sequence
  Description of Artificial Sequence: Synthetic oligonucleotide
  Sense strand starting at position 3223 of SEQ ID NO: 1880213
cggagaugguuguaucgcu

SEQ ID NO: 1950585 - RNA, 19 nt, Artificial Sequence
  Description of Artificial Sequence: Synthetic oligonucleotide
  Antisense strand to SEQ ID NO: 1950584
agcgauacaaccaucuccg

SEQ ID NO: 1950586 - RNA, 19 nt, Artificial Sequence
  Description of Artificial Sequence: Synthetic oligonucleotide
  Sense strand starting at position 3224 of SEQ ID NO: 1880213
ggagaugguuguaucgcuu

SEQ ID NO: 1950587 - RNA, 19 nt, Artificial Sequence
  Description of Artificial Sequence: Synthetic oligonucleotide
  Antisense strand to SEQ ID NO: 1950586
aagcgauacaaccaucucc

SEQ ID NO: 1950588 - RNA, 19 nt, Artificial Sequence
  Description of Artificial Sequence: Synthetic oligonucleotide
  Sense strand starting at position 3378 of SEQ ID NO: 1880213
uguggacuaugcgagcuau

SEQ ID NO: 1950589 - RNA, 19 nt, Artificial Sequence
  Description of Artificial Sequence: Synthetic oligonucleotide
  Antisense strand to SEQ ID NO: 1950588
auagcucgcauaguccaca

SEQ ID NO: 1950590 - RNA, 19 nt, Artificial Sequence
  Description of Artificial Sequence: Synthetic oligonucleotide
  Sense strand starting at position 3388 of SEQ ID NO: 1880213
gcgagcuaugacugggaaa

SEQ ID NO: 1950591 - RNA, 19 nt, Artificial Sequence
  Description of Artificial Sequence: Synthetic oligonucleotide
  Antisense strand to SEQ ID NO: 1950590
uuucccagucauagcucgc

SEQ ID NO: 1950592 - RNA, 19 nt, Artificial Sequence
  Description of Artificial Sequence: Synthetic oligonucleotide
  Sense strand starting at position 3476 of SEQ ID NO: 1880213
ccugaaauaugaugaggua

SEQ ID NO: 1950593 - RNA, 19 nt, Artificial Sequence
  Description of Artificial Sequence: Synthetic oligonucleotide
  Antisense strand to SEQ ID NO: 1950592
uaccucaucauauuucagg

SEQ ID NO: 1950594 - RNA, 19 nt, Artificial Sequence
  Description of Artificial Sequence: Synthetic oligonucleotide
  Sense strand starting at position 2993 of SEQ ID NO: 1880214
cuauuuauguaagucugua

SEQ ID NO: 1950595 - RNA, 19 nt, Artificial Sequence
  Description of Artificial Sequence: Synthetic oligonucleotide
  Antisense strand to SEQ ID NO: 1950594
uacagacuuacauaaauag

SEQ ID NO: 1950596 - RNA, 19 nt, Artificial Sequence
  Description of Artificial Sequence: Synthetic oligonucleotide
  Sense strand starting at position 3230 of SEQ ID NO: 1880214
gguuguaucgcuugagcuc

SEQ ID NO: 1950597 - RNA, 19 nt, Artificial Sequence
  Description of Artificial Sequence: Synthetic oligonucleotide
  Antisense strand to SEQ ID NO: 1950596
gagcucaagcgauacaacc

SEQ ID NO: 1950598 - RNA, 19 nt, Artificial Sequence
  Description of Artificial Sequence: Synthetic oligonucleotide
  Sense strand starting at position 3773 of SEQ ID NO: 1880214
gcaagauacuccucugaaa

SEQ ID NO: 1950599 - RNA, 19 nt, Artificial Sequence
  Description of Artificial Sequence: Synthetic oligonucleotide
  Antisense strand to SEQ ID NO: 1950598
uuucagaggaguaucuugc

SEQ ID NO: 1950600 - RNA, 19 nt, Artificial Sequence
  Description of Artificial Sequence: Synthetic oligonucleotide
  Sense strand starting at position 3776 of SEQ ID NO: 1880214
agauacuccucugaaagaa

SEQ ID NO: 1950601 - RNA, 19 nt, Artificial Sequence
  Description of Artificial Sequence: Synthetic oligonucleotide
  Antisense strand to SEQ ID NO: 1950600
uucuuucagaggaguaucu

SEQ ID NO: 1950602 - RNA, 19 nt, Artificial Sequence
  Description of Artificial Sequence: Synthetic oligonucleotide
  Sense strand starting at position 3824 of SEQ ID NO: 1880214
gaagaucccugcggaugaa

SEQ ID NO: 1950603 - RNA, 19 nt, Artificial Sequence
  Description of Artificial Sequence: Synthetic oligonucleotide
  Antisense strand to SEQ ID NO: 1950602
uucauccgcagggaucuuc

SEQ ID NO: 1950604 - RNA, 19 nt, Artificial Sequence
  Description of Artificial Sequence: Synthetic oligonucleotide
  Sense strand starting at position 3827 of SEQ ID NO: 1880214
gaucccugcggaugaagau

SEQ ID NO: 1950605 - RNA, 19 nt, Artificial Sequence
  Description of Artificial Sequence: Synthetic oligonucleotide
  Antisense strand to SEQ ID NO: 1950604
aucuucauccgcagggauc

SEQ ID NO: 1950606 - RNA, 19 nt, Artificial Sequence
  Description of Artificial Sequence: Synthetic oligonucleotide
  Sense strand starting at position 3495 of SEQ ID NO: 1880215
cgccauguccaccaacauu

SEQ ID NO: 1950607 - RNA, 19 nt, Artificial Sequence
  Description of Artificial Sequence: Synthetic oligonucleotide
  Antisense strand to SEQ ID NO: 1950606
aauguugguggacauggcg

SEQ ID NO: 1950608 - RNA, 19 nt, Artificial Sequence
  Description of Artificial Sequence: Synthetic oligonucleotide
  Sense strand starting at position 17 of SEQ ID NO: 1880216
uauaaucaucgauaugagu

SEQ ID NO: 1950609 - RNA, 19 nt, Artificial Sequence
  Description of Artificial Sequence: Synthetic oligonucleotide
  Antisense strand to SEQ ID NO: 1950608
acucauaucgaugauuaua

SEQ ID NO: 1950610 - RNA, 19 nt, Artificial Sequence
  Description of Artificial Sequence: Synthetic oligonucleotide
  Sense strand starting at position 41 of SEQ ID NO: 1880216
aagcaugaaugggaauuua

SEQ ID NO: 1950611 - RNA, 19 nt, Artificial Sequence
  Description of Artificial Sequence: Synthetic oligonucleotide
  Antisense strand to SEQ ID NO: 1950610
uaaauucccauucaugcuu

SEQ ID NO: 1950612 - RNA, 19 nt, Artificial Sequence
  Description of Artificial Sequence: Synthetic oligonucleotide
  Sense strand starting at position 84 of SEQ ID NO: 1880216
cuuuaauaacgagagcaau

SEQ ID NO: 1950613 - RNA, 19 nt, Artificial Sequence
  Description of Artificial Sequence: Synthetic oligonucleotide
  Antisense strand to SEQ ID NO: 1950612
auugcucucguuauuaaag

SEQ ID NO: 1950614 - RNA, 19 nt, Artificial Sequence
  Description of Artificial Sequence: Synthetic oligonucleotide
  Sense strand starting at position 90 of SEQ ID NO: 1880216
uaacgagagcaauguguga

SEQ ID NO: 1950615 - RNA, 19 nt, Artificial Sequence
  Description of Artificial Sequence: Synthetic oligonucleotide
  Antisense strand to SEQ ID NO: 1950614
ucacacauugcucucguua

SEQ ID NO: 1950616 - RNA, 19 nt, Artificial Sequence
  Description of Artificial Sequence: Synthetic oligonucleotide
  Sense strand starting at position 94 of SEQ ID NO: 1880216
gagagcaaugugugaguca

SEQ ID NO: 1950617 - RNA, 19 nt, Artificial Sequence
  Description of Artificial Sequence: Synthetic oligonucleotide
  Antisense strand to SEQ ID NO: 1950616
ugacucacacauugcucuc

SEQ ID NO: 1950618 - RNA, 19 nt, Artificial Sequence
  Description of Artificial Sequence: Synthetic oligonucleotide
  Sense strand starting at position 97 of SEQ ID NO: 1880216
agcaaugugugagucagaa

SEQ ID NO: 1950619 - RNA, 19 nt, Artificial Sequence
  Description of Artificial Sequence: Synthetic oligonucleotide
  Antisense strand to SEQ ID NO: 1950618
uucugacucacacauugcu

SEQ ID NO: 1950620 - RNA, 19 nt, Artificial Sequence
  Description of Artificial Sequence: Synthetic oligonucleotide
  Sense strand starting at position 271 of SEQ ID NO: 1880216
ggacggcgaguguagaaau

SEQ ID NO: 1950621 - RNA, 19 nt, Artificial Sequence
  Description of Artificial Sequence: Synthetic oligonucleotide
  Antisense strand to SEQ ID NO: 1950620
auuucuacacucgccgucc

SEQ ID NO: 1950622 - RNA, 19 nt, Artificial Sequence
  Description of Artificial Sequence: Synthetic oligonucleotide
  Sense strand starting at position 386 of SEQ ID NO: 1880216
auguccaaguccuuaagau

SEQ ID NO: 1950623 - RNA, 19 nt, Artificial Sequence
  Description of Artificial Sequence: Synthetic oligonucleotide
  Antisense strand to SEQ ID NO: 1950622
aucuuaaggacuuggacau

SEQ ID NO: 1950624 - RNA, 19 nt, Artificial Sequence
  Description of Artificial Sequence: Synthetic oligonucleotide
  Sense strand starting at position 387 of SEQ ID NO: 1880216
uguccaaguccuuaagaug

SEQ ID NO: 1950625 - RNA, 19 nt, Artificial Sequence
  Description of Artificial Sequence: Synthetic oligonucleotide
  Antisense strand to SEQ ID NO: 1950624
caucuuaaggacuuggaca

SEQ ID NO: 1950626 - RNA, 19 nt, Artificial Sequence
  Description of Artificial Sequence: Synthetic oligonucleotide
  Sense strand starting at position 396 of SEQ ID NO: 1880216
ccuuaagauguauaggcaa

SEQ ID NO: 1950627 - RNA, 19 nt, Artificial Sequence
  Description of Artificial Sequence: Synthetic oligonucleotide
  Antisense strand to SEQ ID NO: 1950626
uugccuauacaucuuaagg

SEQ ID NO: 1950628 - RNA, 19 nt, Artificial Sequence
  Description of Artificial Sequence: Synthetic oligonucleotide
  Sense strand starting at position 399 of SEQ ID NO: 1880216
uaagauguauaggcaauau

SEQ ID NO: 1950629 - RNA, 19 nt, Artificial Sequence
  Description of Artificial Sequence: Synthetic oligonucleotide
  Antisense strand to SEQ ID NO: 1950628
auauugccuauacaucuua

SEQ ID NO: 1950630 - RNA, 19 nt, Artificial Sequence
  Description of Artificial Sequence: Synthetic oligonucleotide
  Sense strand starting at position 491 of SEQ ID NO: 1880216
agcagacauauguauggua

SEQ ID NO: 1950631 - RNA, 19 nt, Artificial Sequence
  Description of Artificial Sequence: Synthetic oligonucleotide
  Antisense strand to SEQ ID NO: 1950630
uaccauacauaugucugcu

SEQ ID NO: 1950632 - RNA, 19 nt, Artificial Sequence
  Description of Artificial Sequence: Synthetic oligonucleotide
  Sense strand starting at position 493 of SEQ ID NO: 1880216
cagacauauguaugguaca

SEQ ID NO: 1950633 - RNA, 19 nt, Artificial Sequence
  Description of Artificial Sequence: Synthetic oligonucleotide
  Antisense strand to SEQ ID NO: 1950632
uguaccauacauaugucug

SEQ ID NO: 1950634 - RNA, 19 nt, Artificial Sequence
  Description of Artificial Sequence: Synthetic oligonucleotide
  Sense strand starting at position 1028 of SEQ ID NO: 1880216
agggaauggugagaacaaa

SEQ ID NO: 1950635 - RNA, 19 nt, Artificial Sequence
  Description of Artificial Sequence: Synthetic oligonucleotide
  Antisense strand to SEQ ID NO: 1950634
uuuguucucaccauucccu

SEQ ID NO: 1950636 - RNA, 19 nt, Artificial Sequence
  Description of Artificial Sequence: Synthetic oligonucleotide
  Sense strand starting at position 1368 of SEQ ID NO: 1880216
gggcgugaaccucgaagaa

SEQ ID NO: 1950637 - RNA, 19 nt, Artificial Sequence
  Description of Artificial Sequence: Synthetic oligonucleotide
  Antisense strand to SEQ ID NO: 1950636
uucuucgagguucacgccc

SEQ ID NO: 1950638 - RNA, 19 nt, Artificial Sequence
  Description of Artificial Sequence: Synthetic oligonucleotide
  Sense strand starting at position 1377 of SEQ ID NO: 1880216
ccucgaagaaugugaacuu

SEQ ID NO: 1950639 - RNA, 19 nt, Artificial Sequence
  Description of Artificial Sequence: Synthetic oligonucleotide
  Antisense strand to SEQ ID NO: 1950638
aaguucacauucuucgagg

SEQ ID NO: 1950640 - RNA, 19 nt, Artificial Sequence
  Description of Artificial Sequence: Synthetic oligonucleotide
  Sense strand starting at position 1901 of SEQ ID NO: 1880216
gacucuucucgcgagacuu

SEQ ID NO: 1950641 - RNA, 19 nt, Artificial Sequence
  Description of Artificial Sequence: Synthetic oligonucleotide
  Antisense strand to SEQ ID NO: 1950640
aagucucgcgagaagaguc

SEQ ID NO: 1950642 - RNA, 19 nt, Artificial Sequence
  Description of Artificial Sequence: Synthetic oligonucleotide
  Sense strand starting at position 1970 of SEQ ID NO: 1880216
cgguucuuucccgcgagaa

SEQ ID NO: 1950643 - RNA, 19 nt, Artificial Sequence
  Description of Artificial Sequence: Synthetic oligonucleotide
  Antisense strand to SEQ ID NO: 1950642
uucucgcgggaaagaaccg

SEQ ID NO: 1950644 - RNA, 19 nt, Artificial Sequence
  Description of Artificial Sequence: Synthetic oligonucleotide
  Sense strand starting at position 2240 of SEQ ID NO: 1880216
cagagaggcugccuuaaau

SEQ ID NO: 1950645 - RNA, 19 nt, Artificial Sequence
  Description of Artificial Sequence: Synthetic oligonucleotide
  Antisense strand to SEQ ID NO: 1950644
auuuaaggcagccucucug

SEQ ID NO: 1950646 - RNA, 19 nt, Artificial Sequence
  Description of Artificial Sequence: Synthetic oligonucleotide
  Sense strand starting at position 2252 of SEQ ID NO: 1880216
cuuaaauuucccgguuggu

SEQ ID NO: 1950647 - RNA, 19 nt, Artificial Sequence
  Description of Artificial Sequence: Synthetic oligonucleotide
  Antisense strand to SEQ ID NO: 1950646
accaaccgggaaauuuaag

SEQ ID NO: 1950648 - RNA, 19 nt, Artificial Sequence
  Description of Artificial Sequence: Synthetic oligonucleotide
  Sense strand starting at position 2357 of SEQ ID NO: 1880216
uuguauugaguguguaaag

SEQ ID NO: 1950649 - RNA, 19 nt, Artificial Sequence
  Description of Artificial Sequence: Synthetic oligonucleotide
  Antisense strand to SEQ ID NO: 1950648
cuuuacacacucaauacaa

SEQ ID NO: 1950650 - RNA, 19 nt, Artificial Sequence
  Description of Artificial Sequence: Synthetic oligonucleotide
  Sense strand starting at position 2619 of SEQ ID NO: 1880216
ucagaacgccuuuauauuc

SEQ ID NO: 1950651 - RNA, 19 nt, Artificial Sequence
  Description of Artificial Sequence: Synthetic oligonucleotide
  Antisense strand to SEQ ID NO: 1950650
gaauauaaaggcguucuga

SEQ ID NO: 1950652 - RNA, 19 nt, Artificial Sequence
  Description of Artificial Sequence: Synthetic oligonucleotide
  Sense strand starting at position 2638 of SEQ ID NO: 1880216
uuguguauuacggaagauu

SEQ ID NO: 1950653 - RNA, 19 nt, Artificial Sequence
  Description of Artificial Sequence: Synthetic oligonucleotide
  Antisense strand to SEQ ID NO: 1950652
aaucuuccguaauacacaa

SEQ ID NO: 1950654 - RNA, 19 nt, Artificial Sequence
  Description of Artificial Sequence: Synthetic oligonucleotide
  Sense strand starting at position 2641 of SEQ ID NO: 1880216
uguauuacggaagauucca

SEQ ID NO: 1950655 - RNA, 19 nt, Artificial Sequence
  Description of Artificial Sequence: Synthetic oligonucleotide
  Antisense strand to SEQ ID NO: 1950654
uggaaucuuccguaauaca

SEQ ID NO: 1950656 - RNA, 19 nt, Artificial Sequence
  Description of Artificial Sequence: Synthetic oligonucleotide
  Sense strand starting at position 3099 of SEQ ID NO: 1880216
aaacuccacguuuguaaga

SEQ ID NO: 1950657 - RNA, 19 nt, Artificial Sequence
  Description of Artificial Sequence: Synthetic oligonucleotide
  Antisense strand to SEQ ID NO: 1950656
ucuuacaaacguggaguuu

SEQ ID NO: 1950658 - RNA, 19 nt, Artificial Sequence
  Description of Artificial Sequence: Synthetic oligonucleotide
  Sense strand starting at position 3109 of SEQ ID NO: 1880216
uuuguaagagaaugagcau

SEQ ID NO: 1950659 - RNA, 19 nt, Artificial Sequence
  Description of Artificial Sequence: Synthetic oligonucleotide
  Antisense strand to SEQ ID NO: 1950658
augcucauucucuuacaaa

SEQ ID NO: 1950660 - RNA, 19 nt, Artificial Sequence
  Description of Artificial Sequence: Synthetic oligonucleotide
  Sense strand starting at position 3135 of SEQ ID NO: 1880216
gcaaauaaucuuuaguaug

SEQ ID NO: 1950661 - RNA, 19 nt, Artificial Sequence
  Description of Artificial Sequence: Synthetic oligonucleotide
  Antisense strand to SEQ ID NO: 1950660
cauacuaaagauuauuugc

SEQ ID NO: 1950662 - RNA, 19 nt, Artificial Sequence
  Description of Artificial Sequence: Synthetic oligonucleotide
  Sense strand starting at position 3181 of SEQ ID NO: 1880216
gccauuuccugcucgauaa

SEQ ID NO: 1950663 - RNA, 19 nt, Artificial Sequence
  Description of Artificial Sequence: Synthetic oligonucleotide
  Antisense strand to SEQ ID NO: 1950662
uuaucgagcaggaaauggc

SEQ ID NO: 1950664 - RNA, 19 nt, Artificial Sequence
  Description of Artificial Sequence: Synthetic oligonucleotide
  Sense strand starting at position 3182 of SEQ ID NO: 1880216
ccauuuccugcucgauaag

SEQ ID NO: 1950665 - RNA, 19 nt, Artificial Sequence
  Description of Artificial Sequence: Synthetic oligonucleotide
  Antisense strand to SEQ ID NO: 1950664
cuuaucgagcaggaaaugg

SEQ ID NO: 1950666 - RNA, 19 nt, Artificial Sequence
  Description of Artificial Sequence: Synthetic oligonucleotide
  Sense strand starting at position 3185 of SEQ ID NO: 1880216
uuuccugcucgauaagagu

SEQ ID NO: 1950667 - RNA, 19 nt, Artificial Sequence
  Description of Artificial Sequence: Synthetic oligonucleotide
  Antisense strand to SEQ ID NO: 1950666
acucuuaucgagcaggaaa

SEQ ID NO: 1950668 - RNA, 19 nt, Artificial Sequence
  Description of Artificial Sequence: Synthetic oligonucleotide
  Sense strand starting at position 3338 of SEQ ID NO: 1880216
ugugucaaucagcaucuaa

SEQ ID NO: 1950669 - RNA, 19 nt, Artificial Sequence
  Description of Artificial Sequence: Synthetic oligonucleotide
  Antisense strand to SEQ ID NO: 1950668
uuagaugcugauugacaca

SEQ ID NO: 1950670 - RNA, 19 nt, Artificial Sequence
  Description of Artificial Sequence: Synthetic oligonucleotide
  Sense strand starting at position 3358 of SEQ ID NO: 1880216
acaauuaagugauucgaua

SEQ ID NO: 1950671 - RNA, 19 nt, Artificial Sequence
  Description of Artificial Sequence: Synthetic oligonucleotide
  Antisense strand to SEQ ID NO: 1950670
uaucgaaucacuuaauugu

SEQ ID NO: 1950672 - RNA, 19 nt, Artificial Sequence
  Description of Artificial Sequence: Synthetic oligonucleotide
  Sense strand starting at position 3365 of SEQ ID NO: 1880216
agugauucgauacagguga

SEQ ID NO: 1950673 - RNA, 19 nt, Artificial Sequence
  Description of Artificial Sequence: Synthetic oligonucleotide
  Antisense strand to SEQ ID NO: 1950672
ucaccuguaucgaaucacu

SEQ ID NO: 1950674 - RNA, 19 nt, Artificial Sequence
  Description of Artificial Sequence: Synthetic oligonucleotide
  Sense strand starting at position 3369 of SEQ ID NO: 1880216
auucgauacaggugaugau

SEQ ID NO: 1950675 - RNA, 19 nt, Artificial Sequence
  Description of Artificial Sequence: Synthetic oligonucleotide
  Antisense strand to SEQ ID NO: 1950674
aucaucaccuguaucgaau

SEQ ID NO: 1950676 - RNA, 19 nt, Artificial Sequence
  Description of Artificial Sequence: Synthetic oligonucleotide
  Sense strand starting at position 3378 of SEQ ID NO: 1880216
aggugaugauaguuuguag

SEQ ID NO: 1950677 - RNA, 19 nt, Artificial Sequence
  Description of Artificial Sequence: Synthetic oligonucleotide
  Antisense strand to SEQ ID NO: 1950676
cuacaaacuaucaucaccu

SEQ ID NO: 1950678 - RNA, 19 nt, Artificial Sequence
  Description of Artificial Sequence: Synthetic oligonucleotide
  Sense strand starting at position 3558 of SEQ ID NO: 1880216
gucagacauugugcuagaa

SEQ ID NO: 1950679 - RNA, 19 nt, Artificial Sequence
  Description of Artificial Sequence: Synthetic oligonucleotide
  Antisense strand to SEQ ID NO: 1950678
uucuagcacaaugucugac

SEQ ID NO: 1950680 - RNA, 19 nt, Artificial Sequence
  Description of Artificial Sequence: Synthetic oligonucleotide
  Sense strand starting at position 3562 of SEQ ID NO: 1880216
gacauugugcuagaagcuu

SEQ ID NO: 1950681 - RNA, 19 nt, Artificial Sequence
  Description of Artificial Sequence: Synthetic oligonucleotide
  Antisense strand to SEQ ID NO: 1950680
aagcuucuagcacaauguc

SEQ ID NO: 1950682 - RNA, 19 nt, Artificial Sequence
  Description of Artificial Sequence: Synthetic oligonucleotide
  Sense strand starting at position 3568 of SEQ ID NO: 1880216
gugcuagaagcuugaaauu

SEQ ID NO: 1950683 - RNA, 19 nt, Artificial Sequence
  Description of Artificial Sequence: Synthetic oligonucleotide
  Antisense strand to SEQ ID NO: 1950682
aauuucaagcuucuagcac

SEQ ID NO: 1950684 - RNA, 19 nt, Artificial Sequence
  Description of Artificial Sequence: Synthetic oligonucleotide
  Sense strand starting at position 3619 of SEQ ID NO: 1880216
gggcgauggcaaugagaaa

SEQ ID NO: 1950685 - RNA, 19 nt, Artificial Sequence
  Description of Artificial Sequence: Synthetic oligonucleotide
  Antisense strand to SEQ ID NO: 1950684
uuucucauugccaucgccc

SEQ ID NO: 1950686 - RNA, 19 nt, Artificial Sequence
  Description of Artificial Sequence: Synthetic oligonucleotide
  Sense strand starting at position 3651 of SEQ ID NO: 1880216
agguuuguuauaugaaaga

SEQ ID NO: 1950687 - RNA, 19 nt, Artificial Sequence
  Description of Artificial Sequence: Synthetic oligonucleotide
  Antisense strand to SEQ ID NO: 1950686
ucuuucauauaacaaaccu

SEQ ID NO: 1950688 - RNA, 19 nt, Artificial Sequence
  Description of Artificial Sequence: Synthetic oligonucleotide
  Sense strand starting at position 2091 of SEQ ID NO: 1880217
ggguccgucgggaguuaaa

SEQ ID NO: 1950689 - RNA, 19 nt, Artificial Sequence
  Description of Artificial Sequence: Synthetic oligonucleotide
  Antisense strand to SEQ ID NO: 1950688
uuuaacucccgacggaccc

SEQ ID NO: 1950690 - RNA, 19 nt, Artificial Sequence
  Description of Artificial Sequence: Synthetic oligonucleotide
  Sense strand starting at position 2370 of SEQ ID NO: 1880217
gccaguacucucugaugcu

SEQ ID NO: 1950691 - RNA, 19 nt, Artificial Sequence
  Description of Artificial Sequence: Synthetic oligonucleotide
  Antisense strand to SEQ ID NO: 1950690
agcaucagagaguacuggc

SEQ ID NO: 1950692 - RNA, 19 nt, Artificial Sequence
  Description of Artificial Sequence: Synthetic oligonucleotide
  Sense strand starting at position 2379 of SEQ ID NO: 1880217
cucugaugcuccuuaagga

SEQ ID NO: 1950693 - RNA, 19 nt, Artificial Sequence
  Description of Artificial Sequence: Synthetic oligonucleotide
  Antisense strand to SEQ ID NO: 1950692
uccuuaaggagcaucagag

SEQ ID NO: 1950694 - RNA, 19 nt, Artificial Sequence
  Description of Artificial Sequence: Synthetic oligonucleotide
  Sense strand starting at position 2459 of SEQ ID NO: 1880217
ccucauacagcaggaauaa

SEQ ID NO: 1950695 - RNA, 19 nt, Artificial Sequence
  Description of Artificial Sequence: Synthetic oligonucleotide
  Antisense strand to SEQ ID NO: 1950694
uuauuccugcuguaugagg

SEQ ID NO: 1950696 - RNA, 19 nt, Artificial Sequence
  Description of Artificial Sequence: Synthetic oligonucleotide
  Sense strand starting at position 2485 of SEQ ID NO: 1880217
uuuaaugcuugagaacuca

SEQ ID NO: 1950697 - RNA, 19 nt, Artificial Sequence
  Description of Artificial Sequence: Synthetic oligonucleotide
  Antisense strand to SEQ ID NO: 1950696
ugaguucucaagcauuaaa

SEQ ID NO: 1950698 - RNA, 19 nt, Artificial Sequence
  Description of Artificial Sequence: Synthetic oligonucleotide
  Sense strand starting at position 2603 of SEQ ID NO: 1880217
ucagauuaccucugugcuu

SEQ ID NO: 1950699 - RNA, 19 nt, Artificial Sequence
  Description of Artificial Sequence: Synthetic oligonucleotide
  Antisense strand to SEQ ID NO: 1950698
aagcacagagguaaucuga

SEQ ID NO: 1950700 - RNA, 19 nt, Artificial Sequence
  Description of Artificial Sequence: Synthetic oligonucleotide
  Sense strand starting at position 2605 of SEQ ID NO: 1880217
agauuaccucugugcuuua

SEQ ID NO: 1950701 - RNA, 19 nt, Artificial Sequence
  Description of Artificial Sequence: Synthetic oligonucleotide
  Antisense strand to SEQ ID NO: 1950700
uaaagcacagagguaaucu

SEQ ID NO: 1950702 - RNA, 19 nt, Artificial Sequence
  Description of Artificial Sequence: Synthetic oligonucleotide
  Sense strand starting at position 2663 of SEQ ID NO: 1880217
ugugcuuuggaguguuaaa

SEQ ID NO: 1950703 - RNA, 19 nt, Artificial Sequence
  Description of Artificial Sequence: Synthetic oligonucleotide
  Antisense strand to SEQ ID NO: 1950702
uuuaacacuccaaagcaca

SEQ ID NO: 1950704 - RNA, 19 nt, Artificial Sequence
  Description of Artificial Sequence: Synthetic oligonucleotide
  Sense strand starting at position 3212 of SEQ ID NO: 1880217
gaugcaaaggccugauuga

SEQ ID NO: 1950705 - RNA, 19 nt, Artificial Sequence
  Description of Artificial Sequence: Synthetic oligonucleotide
  Antisense strand to SEQ ID NO: 1950704
ucaaucaggccuuugcauc

SEQ ID NO: 1950706 - RNA, 19 nt, Artificial Sequence
  Description of Artificial Sequence: Synthetic oligonucleotide
  Sense strand starting at position 3273 of SEQ ID NO: 1880217
auggacaucuuuggagaga

SEQ ID NO: 1950707 - RNA, 19 nt, Artificial Sequence
  Description of Artificial Sequence: Synthetic oligonucleotide
  Antisense strand to SEQ ID NO: 1950706
ucucuccaaagauguccau

SEQ ID NO: 1950708 - RNA, 19 nt, Artificial Sequence
  Description of Artificial Sequence: Synthetic oligonucleotide
  Sense strand starting at position 3274 of SEQ ID NO: 1880217
uggacaucuuuggagagau

SEQ ID NO: 1950709 - RNA, 19 nt, Artificial Sequence
  Description of Artificial Sequence: Synthetic oligonucleotide
  Antisense strand to SEQ ID NO: 1950708
aucucuccaaagaugucca

SEQ ID NO: 1950710 - RNA, 19 nt, Artificial Sequence
  Description of Artificial Sequence: Synthetic oligonucleotide
  Sense strand starting at position 3284 of SEQ ID NO: 1880217
uggagagauggacgugaau

SEQ ID NO: 1950711 - RNA, 19 nt, Artificial Sequence
  Description of Artificial Sequence: Synthetic oligonucleotide
  Antisense strand to SEQ ID NO: 1950710
auucacguccaucucucca

SEQ ID NO: 1950712 - RNA, 19 nt, Artificial Sequence
  Description of Artificial Sequence: Synthetic oligonucleotide
  Sense strand starting at position 3286 of SEQ ID NO: 1880217
gagagauggacgugaauuc

SEQ ID NO: 1950713 - RNA, 19 nt, Artificial Sequence
  Description of Artificial Sequence: Synthetic oligonucleotide
  Antisense strand to SEQ ID NO: 1950712
gaauucacguccaucucuc

SEQ ID NO: 1950714 - RNA, 19 nt, Artificial Sequence
  Description of Artificial Sequence: Synthetic oligonucleotide
  Sense strand starting at position 3293 of SEQ ID NO: 1880217
ggacgugaauuccuacaag

SEQ ID NO: 1950715 - RNA, 19 nt, Artificial Sequence
  Description of Artificial Sequence: Synthetic oligonucleotide
  Antisense strand to SEQ ID NO: 1950714
cuuguaggaauucacgucc

SEQ ID NO: 1950716 - RNA, 19 nt, Artificial Sequence
  Description of Artificial Sequence: Synthetic oligonucleotide
  Sense strand starting at position 3341 of SEQ ID NO: 1880217
ggagguacuuuguguauaa

SEQ ID NO: 1950717 - RNA, 19 nt, Artificial Sequence
  Description of Artificial Sequence: Synthetic oligonucleotide
  Antisense strand to SEQ ID NO: 1950716
uuauacacaaaguaccucc

SEQ ID NO: 1950718 - RNA, 19 nt, Artificial Sequence
  Description of Artificial Sequence: Synthetic oligonucleotide
  Sense strand starting at position 3342 of SEQ ID NO: 1880217
gagguacuuuguguauaag

SEQ ID NO: 1950719 - RNA, 19 nt, Artificial Sequence
  Description of Artificial Sequence: Synthetic oligonucleotide
  Antisense strand to SEQ ID NO: 1950718
cuuauacacaaaguaccuc

SEQ ID NO: 1950720 - RNA, 19 nt, Artificial Sequence
  Description of Artificial Sequence: Synthetic oligonucleotide
  Sense strand starting at position 3345 of SEQ ID NO: 1880217
guacuuuguguauaagggu

SEQ ID NO: 1950721 - RNA, 19 nt, Artificial Sequence
  Description of Artificial Sequence: Synthetic oligonucleotide
  Antisense strand to SEQ ID NO: 1950720
acccuuauacacaaaguac

SEQ ID NO: 1950722 - RNA, 19 nt, Artificial Sequence
  Description of Artificial Sequence: Synthetic oligonucleotide
  Sense strand starting at position 3359 of SEQ ID NO: 1880217
aggguuguguggagaggau

SEQ ID NO: 1950723 - RNA, 19 nt, Artificial Sequence
  Description of Artificial Sequence: Synthetic oligonucleotide
  Antisense strand to SEQ ID NO: 1950722
auccucuccacacaacccu

SEQ ID NO: 1950724 - RNA, 19 nt, Artificial Sequence
  Description of Artificial Sequence: Synthetic oligonucleotide
  Sense strand starting at position 3360 of SEQ ID NO: 1880217
ggguuguguggagaggaua

SEQ ID NO: 1950725 - RNA, 19 nt, Artificial Sequence
  Description of Artificial Sequence: Synthetic oligonucleotide
  Antisense strand to SEQ ID NO: 1950724
uauccucuccacacaaccc

SEQ ID NO: 1950726 - RNA, 19 nt, Artificial Sequence
  Description of Artificial Sequence: Synthetic oligonucleotide
  Sense strand starting at position 3375 of SEQ ID NO: 1880217
gauauuuaguuugguggua

SEQ ID NO: 1950727 - RNA, 19 nt, Artificial Sequence
  Description of Artificial Sequence: Synthetic oligonucleotide
  Antisense strand to SEQ ID NO: 1950726
uaccaccaaacuaaauauc

SEQ ID NO: 1950728 - RNA, 19 nt, Artificial Sequence
  Description of Artificial Sequence: Synthetic oligonucleotide
  Sense strand starting at position 3383 of SEQ ID NO: 1880217
guuuggugguaccguguua

SEQ ID NO: 1950729 - RNA, 19 nt, Artificial Sequence
  Description of Artificial Sequence: Synthetic oligonucleotide
  Antisense strand to SEQ ID NO: 1950728
uaacacgguaccaccaaac

SEQ ID NO: 1950730 - RNA, 19 nt, Artificial Sequence
  Description of Artificial Sequence: Synthetic oligonucleotide
  Sense strand starting at position 3405 of SEQ ID NO: 1880217
gacacuaggagucagugua

SEQ ID NO: 1950731 - RNA, 19 nt, Artificial Sequence
  Description of Artificial Sequence: Synthetic oligonucleotide
  Antisense strand to SEQ ID NO: 1950730
uacacugacuccuaguguc

SEQ ID NO: 1950732 - RNA, 19 nt, Artificial Sequence
  Description of Artificial Sequence: Synthetic oligonucleotide
  Sense strand starting at position 3469 of SEQ ID NO: 1880217
guuugacuauauuccguuu

SEQ ID NO: 1950733 - RNA, 19 nt, Artificial Sequence
  Description of Artificial Sequence: Synthetic oligonucleotide
  Antisense strand to SEQ ID NO: 1950732
aaacggaauauagucaaac

SEQ ID NO: 1950734 - RNA, 19 nt, Artificial Sequence
  Description of Artificial Sequence: Synthetic oligonucleotide
  Sense strand starting at position 3531 of SEQ ID NO: 1880217
gguguaugccuguagucag

SEQ ID NO: 1950735 - RNA, 19 nt, Artificial Sequence
  Description of Artificial Sequence: Synthetic oligonucleotide
  Antisense strand to SEQ ID NO: 1950734
cugacuacaggcauacacc

SEQ ID NO: 1950736 - RNA, 19 nt, Artificial Sequence
  Description of Artificial Sequence: Synthetic oligonucleotide
  Sense strand starting at position 3534 of SEQ ID NO: 1880217
guaugccuguagucagcua

SEQ ID NO: 1950737 - RNA, 19 nt, Artificial Sequence
  Description of Artificial Sequence: Synthetic oligonucleotide
  Antisense strand to SEQ ID NO: 1950736
uagcugacuacaggcauac

SEQ ID NO: 1950738 - RNA, 19 nt, Artificial Sequence
  Description of Artificial Sequence: Synthetic oligonucleotide
  Sense strand starting at position 3578 of SEQ ID NO: 1880217
guuugagcuuaggaauuua

SEQ ID NO: 1950739 - RNA, 19 nt, Artificial Sequence
  Description of Artificial Sequence: Synthetic oligonucleotide
  Antisense strand to SEQ ID NO: 1950738
uaaauuccuaagcucaaac

SEQ ID NO: 1950740 - RNA, 19 nt, Artificial Sequence
  Description of Artificial Sequence: Synthetic oligonucleotide
  Sense strand starting at position 3688 of SEQ ID NO: 1880217
ggauguccuaaaggcuaua

SEQ ID NO: 1950741 - RNA, 19 nt, Artificial Sequence
  Description of Artificial Sequence: Synthetic oligonucleotide
  Antisense strand to SEQ ID NO: 1950740
uauagccuuuaggacaucc

SEQ ID NO: 1950742 - RNA, 19 nt, Artificial Sequence
  Description of Artificial Sequence: Synthetic oligonucleotide
  Sense strand starting at position 3746 of SEQ ID NO: 1880217
agagcagaauguucuaaug

SEQ ID NO: 1950743 - RNA, 19 nt, Artificial Sequence
  Description of Artificial Sequence: Synthetic oligonucleotide
  Antisense strand to SEQ ID NO: 1950742
cauuagaacauucugcucu

SEQ ID NO: 1950744 - RNA, 19 nt, Artificial Sequence
  Description of Artificial Sequence: Synthetic oligonucleotide
  Sense strand starting at position 3758 of SEQ ID NO: 1880217
ucuaauguauccuagggca

SEQ ID NO: 1950745 - RNA, 19 nt, Artificial Sequence
  Description of Artificial Sequence: Synthetic oligonucleotide
  Antisense strand to SEQ ID NO: 1950744
ugcccuaggauacauuaga

SEQ ID NO: 1950746 - RNA, 19 nt, Artificial Sequence
  Description of Artificial Sequence: Synthetic oligonucleotide
  Sense strand starting at position 3760 of SEQ ID NO: 1880217
uaauguauccuagggcaga

SEQ ID NO: 1950747 - RNA, 19 nt, Artificial Sequence
  Description of Artificial Sequence: Synthetic oligonucleotide
  Antisense strand to SEQ ID NO: 1950746
ucugcccuaggauacauua

SEQ ID NO: 1950748 - RNA, 19 nt, Artificial Sequence
  Description of Artificial Sequence: Synthetic oligonucleotide
  Sense strand starting at position 3761 of SEQ ID NO: 1880217
aauguauccuagggcagaa

SEQ ID NO: 1950749 - RNA, 19 nt, Artificial Sequence
  Description of Artificial Sequence: Synthetic oligonucleotide
  Antisense strand to SEQ ID NO: 1950748
uucugcccuaggauacauu

SEQ ID NO: 1950750 - RNA, 19 nt, Artificial Sequence
  Description of Artificial Sequence: Synthetic oligonucleotide
  Sense strand starting at position 3848 of SEQ ID NO: 1880217
uuugucuguuuagagauag

SEQ ID NO: 1950751 - RNA, 19 nt, Artificial Sequence
  Description of Artificial Sequence: Synthetic oligonucleotide
  Antisense strand to SEQ ID NO: 1950750
cuaucucuaaacagacaaa

SEQ ID NO: 1950752 - RNA, 19 nt, Artificial Sequence
  Description of Artificial Sequence: Synthetic oligonucleotide
  Sense strand starting at position 3868 of SEQ ID NO: 1880217
gugucugucacccagucua

SEQ ID NO: 1950753 - RNA, 19 nt, Artificial Sequence
  Description of Artificial Sequence: Synthetic oligonucleotide
  Antisense strand to SEQ ID NO: 1950752
uagacugggugacagacac

SEQ ID NO: 1950754 - RNA, 19 nt, Artificial Sequence
  Description of Artificial Sequence: Synthetic oligonucleotide
  Sense strand starting at position 3888 of SEQ ID NO: 1880217
agggcagugucacagucau

SEQ ID NO: 1950755 - RNA, 19 nt, Artificial Sequence
  Description of Artificial Sequence: Synthetic oligonucleotide
  Antisense strand to SEQ ID NO: 1950754
augacugugacacugcccu

SEQ ID NO: 1950756 - RNA, 19 nt, Artificial Sequence
  Description of Artificial Sequence: Synthetic oligonucleotide
  Sense strand starting at position 3938 of SEQ ID NO: 1880217
agggauuccucccaccaca

SEQ ID NO: 1950757 - RNA, 19 nt, Artificial Sequence
  Description of Artificial Sequence: Synthetic oligonucleotide
  Antisense strand to SEQ ID NO: 1950756
uguggugggaggaaucccu

SEQ ID NO: 1950758 - RNA, 19 nt, Artificial Sequence
  Description of Artificial Sequence: Synthetic oligonucleotide
  Sense strand starting at position 193 of SEQ ID NO: 1880218
gcuacagcuuccuuugaag

SEQ ID NO: 1950759 - RNA, 19 nt, Artificial Sequence
  Description of Artificial Sequence: Synthetic oligonucleotide
  Antisense strand to SEQ ID NO: 1950758
cuucaaaggaagcuguagc

SEQ ID NO: 1950760 - RNA, 19 nt, Artificial Sequence
  Description of Artificial Sequence: Synthetic oligonucleotide
  Sense strand starting at position 253 of SEQ ID NO: 1880218
aagguaccucuuggauuaa

SEQ ID NO: 1950761 - RNA, 19 nt, Artificial Sequence
  Description of Artificial Sequence: Synthetic oligonucleotide
  Antisense strand to SEQ ID NO: 1950760
uuaauccaagagguaccuu

SEQ ID NO: 1950762 - RNA, 19 nt, Artificial Sequence
  Description of Artificial Sequence: Synthetic oligonucleotide
  Sense strand starting at position 540 of SEQ ID NO: 1880218
auaucacaguuaucauugu

SEQ ID NO: 1950763 - RNA, 19 nt, Artificial Sequence
  Description of Artificial Sequence: Synthetic oligonucleotide
  Antisense strand to SEQ ID NO: 1950762
acaaugauaacugugauau

SEQ ID NO: 1950764 - RNA, 19 nt, Artificial Sequence
  Description of Artificial Sequence: Synthetic oligonucleotide
  Sense strand starting at position 582 of SEQ ID NO: 1880218
aguauauuauaggcccauu

SEQ ID NO: 1950765 - RNA, 19 nt, Artificial Sequence
  Description of Artificial Sequence: Synthetic oligonucleotide
  Antisense strand to SEQ ID NO: 1950764
aaugggccuauaauauacu

SEQ ID NO: 1950766 - RNA, 19 nt, Artificial Sequence
  Description of Artificial Sequence: Synthetic oligonucleotide
  Sense strand starting at position 593 of SEQ ID NO: 1880218
ggcccauuagagcaaguuu

SEQ ID NO: 1950767 - RNA, 19 nt, Artificial Sequence
  Description of Artificial Sequence: Synthetic oligonucleotide
  Antisense strand to SEQ ID NO: 1950766
aaacuugcucuaaugggcc

SEQ ID NO: 1950768 - RNA, 19 nt, Artificial Sequence
  Description of Artificial Sequence: Synthetic oligonucleotide
  Sense strand starting at position 674 of SEQ ID NO: 1880218
aggcguuccauugauugau

SEQ ID NO: 1950769 - RNA, 19 nt, Artificial Sequence
  Description of Artificial Sequence: Synthetic oligonucleotide
  Antisense strand to SEQ ID NO: 1950768
aucaaucaauggaacgccu

SEQ ID NO: 1950770 - RNA, 19 nt, Artificial Sequence
  Description of Artificial Sequence: Synthetic oligonucleotide
  Sense strand starting at position 677 of SEQ ID NO: 1880218
cguuccauugauugauaca

SEQ ID NO: 1950771 - RNA, 19 nt, Artificial Sequence
  Description of Artificial Sequence: Synthetic oligonucleotide
  Antisense strand to SEQ ID NO: 1950770
uguaucaaucaauggaacg

SEQ ID NO: 1950772 - RNA, 19 nt, Artificial Sequence
  Description of Artificial Sequence: Synthetic oligonucleotide
  Sense strand starting at position 689 of SEQ ID NO: 1880218
ugauacaaagucuguuagu

SEQ ID NO: 1950773 - RNA, 19 nt, Artificial Sequence
  Description of Artificial Sequence: Synthetic oligonucleotide
  Antisense strand to SEQ ID NO: 1950772
acuaacagacuuuguauca

SEQ ID NO: 1950774 - RNA, 19 nt, Artificial Sequence
  Description of Artificial Sequence: Synthetic oligonucleotide
  Sense strand starting at position 690 of SEQ ID NO: 1880218
gauacaaagucuguuaguc

SEQ ID NO: 1950775 - RNA, 19 nt, Artificial Sequence
  Description of Artificial Sequence: Synthetic oligonucleotide
  Antisense strand to SEQ ID NO: 1950774
gacuaacagacuuuguauc

SEQ ID NO: 1950776 - RNA, 19 nt, Artificial Sequence
  Description of Artificial Sequence: Synthetic oligonucleotide
  Sense strand starting at position 698 of SEQ ID NO: 1880218
gucuguuagucucugagaa

SEQ ID NO: 1950777 - RNA, 19 nt, Artificial Sequence
  Description of Artificial Sequence: Synthetic oligonucleotide
  Antisense strand to SEQ ID NO: 1950776
uucucagagacuaacagac

SEQ ID NO: 1950778 - RNA, 19 nt, Artificial Sequence
  Description of Artificial Sequence: Synthetic oligonucleotide
  Sense strand starting at position 714 of SEQ ID NO: 1880218
gaacaugaaugucuuguuu

SEQ ID NO: 1950779 - RNA, 19 nt, Artificial Sequence
  Description of Artificial Sequence: Synthetic oligonucleotide
  Antisense strand to SEQ ID NO: 1950778
aaacaagacauucauguuc

SEQ ID NO: 1950780 - RNA, 19 nt, Artificial Sequence
  Description of Artificial Sequence: Synthetic oligonucleotide
  Sense strand starting at position 752 of SEQ ID NO: 1880218
uuauuaaaccaugguuaga

SEQ ID NO: 1950781 - RNA, 19 nt, Artificial Sequence
  Description of Artificial Sequence: Synthetic oligonucleotide
  Antisense strand to SEQ ID NO: 1950780
ucuaaccaugguuuaauaa

SEQ ID NO: 1950782 - RNA, 19 nt, Artificial Sequence
  Description of Artificial Sequence: Synthetic oligonucleotide
  Sense strand starting at position 769 of SEQ ID NO: 1880218
gacaguuagacacgcgaaa

SEQ ID NO: 1950783 - RNA, 19 nt, Artificial Sequence
  Description of Artificial Sequence: Synthetic oligonucleotide
  Antisense strand to SEQ ID NO: 1950782
uuucgcgugucuaacuguc

SEQ ID NO: 1950784 - RNA, 19 nt, Artificial Sequence
  Description of Artificial Sequence: Synthetic oligonucleotide
  Sense strand starting at position 771 of SEQ ID NO: 1880218
caguuagacacgcgaaaug

SEQ ID NO: 1950785 - RNA, 19 nt, Artificial Sequence
  Description of Artificial Sequence: Synthetic oligonucleotide
  Antisense strand to SEQ ID NO: 1950784
cauuucgcgugucuaacug

SEQ ID NO: 1950786 - RNA, 19 nt, Artificial Sequence
  Description of Artificial Sequence: Synthetic oligonucleotide
  Sense strand starting at position 848 of SEQ ID NO: 1880218
gcuguauugccuuaagaga

SEQ ID NO: 1950787 - RNA, 19 nt, Artificial Sequence
  Description of Artificial Sequence: Synthetic oligonucleotide
  Antisense strand to SEQ ID NO: 1950786
ucucuuaaggcaauacagc

SEQ ID NO: 1950788 - RNA, 19 nt, Artificial Sequence
  Description of Artificial Sequence: Synthetic oligonucleotide
  Sense strand starting at position 917 of SEQ ID NO: 1880218
auccucuguugacuugaaa

SEQ ID NO: 1950789 - RNA, 19 nt, Artificial Sequence
  Description of Artificial Sequence: Synthetic oligonucleotide
  Antisense strand to SEQ ID NO: 1950788
uuucaagucaacagaggau

SEQ ID NO: 1950790 - RNA, 19 nt, Artificial Sequence
  Description of Artificial Sequence: Synthetic oligonucleotide
  Sense strand starting at position 920 of SEQ ID NO: 1880218
cucuguugacuugaaagua

SEQ ID NO: 1950791 - RNA, 19 nt, Artificial Sequence
  Description of Artificial Sequence: Synthetic oligonucleotide
  Antisense strand to SEQ ID NO: 1950790
uacuuucaagucaacagag

SEQ ID NO: 1950792 - RNA, 19 nt, Artificial Sequence
  Description of Artificial Sequence: Synthetic oligonucleotide
  Sense strand starting at position 1178 of SEQ ID NO: 1880218
cuuccucauacgugaagga

SEQ ID NO: 1950793 - RNA, 19 nt, Artificial Sequence
  Description of Artificial Sequence: Synthetic oligonucleotide
  Antisense strand to SEQ ID NO: 1950792
uccuucacguaugaggaag

SEQ ID NO: 1950794 - RNA, 19 nt, Artificial Sequence
  Description of Artificial Sequence: Synthetic oligonucleotide
  Sense strand starting at position 1179 of SEQ ID NO: 1880218
uuccucauacgugaaggaa

SEQ ID NO: 1950795 - RNA, 19 nt, Artificial Sequence
  Description of Artificial Sequence: Synthetic oligonucleotide
  Antisense strand to SEQ ID NO: 1950794
uuccuucacguaugaggaa

SEQ ID NO: 1950796 - RNA, 19 nt, Artificial Sequence
  Description of Artificial Sequence: Synthetic oligonucleotide
  Sense strand starting at position 1789 of SEQ ID NO: 1880218
cguuauucgcggucagcca

SEQ ID NO: 1950797 - RNA, 19 nt, Artificial Sequence
  Description of Artificial Sequence: Synthetic oligonucleotide
  Antisense strand to SEQ ID NO: 1950796
uggcugaccgcgaauaacg

SEQ ID NO: 1950798 - RNA, 19 nt, Artificial Sequence
  Description of Artificial Sequence: Synthetic oligonucleotide
  Sense strand starting at position 2254 of SEQ ID NO: 1880218
caucgagcugucuagagga

SEQ ID NO: 1950799 - RNA, 19 nt, Artificial Sequence
  Description of Artificial Sequence: Synthetic oligonucleotide
  Antisense strand to SEQ ID NO: 1950798
uccucuagacagcucgaug

SEQ ID NO: 1950800 - RNA, 19 nt, Artificial Sequence
  Description of Artificial Sequence: Synthetic oligonucleotide
  Sense strand starting at position 2501 of SEQ ID NO: 1880218
cguuaagagacucguagaa

SEQ ID NO: 1950801 - RNA, 19 nt, Artificial Sequence
  Description of Artificial Sequence: Synthetic oligonucleotide
  Antisense strand to SEQ ID NO: 1950800
uucuacgagucucuuaacg

SEQ ID NO: 1950802 - RNA, 19 nt, Artificial Sequence
  Description of Artificial Sequence: Synthetic oligonucleotide
  Sense strand starting at position 2858 of SEQ ID NO: 1880218
gggccggucugugugauuu

SEQ ID NO: 1950803 - RNA, 19 nt, Artificial Sequence
  Description of Artificial Sequence: Synthetic oligonucleotide
  Antisense strand to SEQ ID NO: 1950802
aaaucacacagaccggccc

SEQ ID NO: 1950804 - RNA, 19 nt, Artificial Sequence
  Description of Artificial Sequence: Synthetic oligonucleotide
  Sense strand starting at position 2862 of SEQ ID NO: 1880218
cggucugugugauuuggau

SEQ ID NO: 1950805 - RNA, 19 nt, Artificial Sequence
  Description of Artificial Sequence: Synthetic oligonucleotide
  Antisense strand to SEQ ID NO: 1950804
auccaaaucacacagaccg

SEQ ID NO: 1950806 - RNA, 19 nt, Artificial Sequence
  Description of Artificial Sequence: Synthetic oligonucleotide
  Sense strand starting at position 2864 of SEQ ID NO: 1880218
gucugugugauuuggauca

SEQ ID NO: 1950807 - RNA, 19 nt, Artificial Sequence
  Description of Artificial Sequence: Synthetic oligonucleotide
  Antisense strand to SEQ ID NO: 1950806
ugauccaaaucacacagac

SEQ ID NO: 1950808 - RNA, 19 nt, Artificial Sequence
  Description of Artificial Sequence: Synthetic oligonucleotide
  Sense strand starting at position 2897 of SEQ ID NO: 1880218
uccuaagaguuauuagguu

SEQ ID NO: 1950809 - RNA, 19 nt, Artificial Sequence
  Description of Artificial Sequence: Synthetic oligonucleotide
  Antisense strand to SEQ ID NO: 1950808
aaccuaauaacucuuagga

SEQ ID NO: 1950810 - RNA, 19 nt, Artificial Sequence
  Description of Artificial Sequence: Synthetic oligonucleotide
  Sense strand starting at position 2903 of SEQ ID NO: 1880218
gaguuauuagguugaccaa

SEQ ID NO: 1950811 - RNA, 19 nt, Artificial Sequence
  Description of Artificial Sequence: Synthetic oligonucleotide
  Antisense strand to SEQ ID NO: 1950810
uuggucaaccuaauaacuc

SEQ ID NO: 1950812 - RNA, 19 nt, Artificial Sequence
  Description of Artificial Sequence: Synthetic oligonucleotide
  Sense strand starting at position 2949 of SEQ ID NO: 1880218
uggucagcuguugaguaaa

SEQ ID NO: 1950813 - RNA, 19 nt, Artificial Sequence
  Description of Artificial Sequence: Synthetic oligonucleotide
  Antisense strand to SEQ ID NO: 1950812
uuuacucaacagcugacca

SEQ ID NO: 1950814 - RNA, 19 nt, Artificial Sequence
  Description of Artificial Sequence: Synthetic oligonucleotide
  Sense strand starting at position 3067 of SEQ ID NO: 1880218
uccaaagauguauggauua

SEQ ID NO: 1950815 - RNA, 19 nt, Artificial Sequence
  Description of Artificial Sequence: Synthetic oligonucleotide
  Antisense strand to SEQ ID NO: 1950814
uaauccauacaucuuugga

SEQ ID NO: 1950816 - RNA, 19 nt, Artificial Sequence
  Description of Artificial Sequence: Synthetic oligonucleotide
  Sense strand starting at position 3072 of SEQ ID NO: 1880218
agauguauggauuaguguu

SEQ ID NO: 1950817 - RNA, 19 nt, Artificial Sequence
  Description of Artificial Sequence: Synthetic oligonucleotide
  Antisense strand to SEQ ID NO: 1950816
aacacuaauccauacaucu

SEQ ID NO: 1950818 - RNA, 19 nt, Artificial Sequence
  Description of Artificial Sequence: Synthetic oligonucleotide
  Sense strand starting at position 3078 of SEQ ID NO: 1880218
auggauuaguguucucuca

SEQ ID NO: 1950819 - RNA, 19 nt, Artificial Sequence
  Description of Artificial Sequence: Synthetic oligonucleotide
  Antisense strand to SEQ ID NO: 1950818
ugagagaacacuaauccau

SEQ ID NO: 1950820 - RNA, 19 nt, Artificial Sequence
  Description of Artificial Sequence: Synthetic oligonucleotide
  Sense strand starting at position 3080 of SEQ ID NO: 1880218
ggauuaguguucucucacc

SEQ ID NO: 1950821 - RNA, 19 nt, Artificial Sequence
  Description of Artificial Sequence: Synthetic oligonucleotide
  Antisense strand to SEQ ID NO: 1950820
ggugagagaacacuaaucc

SEQ ID NO: 1950822 - RNA, 19 nt, Artificial Sequence
  Description of Artificial Sequence: Synthetic oligonucleotide
  Sense strand starting at position 3086 of SEQ ID NO: 1880218
guguucucucaccaaucca

SEQ ID NO: 1950823 - RNA, 19 nt, Artificial Sequence
  Description of Artificial Sequence: Synthetic oligonucleotide
  Antisense strand to SEQ ID NO: 1950822
uggauuggugagagaacac

SEQ ID NO: 1950824 - RNA, 19 nt, Artificial Sequence
  Description of Artificial Sequence: Synthetic oligonucleotide
  Sense strand starting at position 3158 of SEQ ID NO: 1880218
guggagugugggcaaagaa

SEQ ID NO: 1950825 - RNA, 19 nt, Artificial Sequence
  Description of Artificial Sequence: Synthetic oligonucleotide
  Antisense strand to SEQ ID NO: 1950824
uucuuugcccacacuccac

SEQ ID NO: 1950826 - RNA, 19 nt, Artificial Sequence
  Description of Artificial Sequence: Synthetic oligonucleotide
  Sense strand starting at position 3476 of SEQ ID NO: 1880218
cuuugaccucagggaucua

SEQ ID NO: 1950827 - RNA, 19 nt, Artificial Sequence
  Description of Artificial Sequence: Synthetic oligonucleotide
  Antisense strand to SEQ ID NO: 1950826
uagaucccugaggucaaag

SEQ ID NO: 1950828 - RNA, 19 nt, Artificial Sequence
  Description of Artificial Sequence: Synthetic oligonucleotide
  Sense strand starting at position 3505 of SEQ ID NO: 1880218
gagauugggucuuccucca

SEQ ID NO: 1950829 - RNA, 19 nt, Artificial Sequence
  Description of Artificial Sequence: Synthetic oligonucleotide
  Antisense strand to SEQ ID NO: 1950828
uggaggaagacccaaucuc

SEQ ID NO: 1950830 - RNA, 19 nt, Artificial Sequence
  Description of Artificial Sequence: Synthetic oligonucleotide
  Sense strand starting at position 3510 of SEQ ID NO: 1880218
ugggucuuccuccagggaa

SEQ ID NO: 1950831 - RNA, 19 nt, Artificial Sequence
  Description of Artificial Sequence: Synthetic oligonucleotide
  Antisense strand to SEQ ID NO: 1950830
uucccuggaggaagaccca

SEQ ID NO: 1950832 - RNA, 19 nt, Artificial Sequence
  Description of Artificial Sequence: Synthetic oligonucleotide
  Sense strand starting at position 3525 of SEQ ID NO: 1880218
ggaagcuucucaccaacua

SEQ ID NO: 1950833 - RNA, 19 nt, Artificial Sequence
  Description of Artificial Sequence: Synthetic oligonucleotide
  Antisense strand to SEQ ID NO: 1950832
uaguuggugagaagcuucc

SEQ ID NO: 1950834 - RNA, 19 nt, Artificial Sequence
  Description of Artificial Sequence: Synthetic oligonucleotide
  Sense strand starting at position 3551 of SEQ ID NO: 1880218
cggagagcaaucugaggau

SEQ ID NO: 1950835 - RNA, 19 nt, Artificial Sequence
  Description of Artificial Sequence: Synthetic oligonucleotide
  Antisense strand to SEQ ID NO: 1950834
auccucagauugcucuccg

SEQ ID NO: 1950836 - RNA, 19 nt, Artificial Sequence
  Description of Artificial Sequence: Synthetic oligonucleotide
  Sense strand starting at position 3947 of SEQ ID NO: 1880218
agccuaugacucuagauac

SEQ ID NO: 1950837 - RNA, 19 nt, Artificial Sequence
  Description of Artificial Sequence: Synthetic oligonucleotide
  Antisense strand to SEQ ID NO: 1950836
guaucuagagucauaggcu

SEQ ID NO: 1950838 - RNA, 19 nt, Artificial Sequence
  Description of Artificial Sequence: Synthetic oligonucleotide
  Sense strand starting at position 81 of SEQ ID NO: 1880219
gcuuaaauguguccauuug

SEQ ID NO: 1950839 - RNA, 19 nt, Artificial Sequence
  Description of Artificial Sequence: Synthetic oligonucleotide
  Antisense strand to SEQ ID NO: 1950838
caaauggacacauuuaagc

SEQ ID NO: 1950840 - RNA, 19 nt, Artificial Sequence
  Description of Artificial Sequence: Synthetic oligonucleotide
  Sense strand starting at position 428 of SEQ ID NO: 1880219
ggccucuauguggaaauua

SEQ ID NO: 1950841 - RNA, 19 nt, Artificial Sequence
  Description of Artificial Sequence: Synthetic oligonucleotide
  Antisense strand to SEQ ID NO: 1950840
uaauuuccacauagaggcc

SEQ ID NO: 1950842 - RNA, 19 nt, Artificial Sequence
  Description of Artificial Sequence: Synthetic oligonucleotide
  Sense strand starting at position 470 of SEQ ID NO: 1880219
uucgucagaggguaucuau

SEQ ID NO: 1950843 - RNA, 19 nt, Artificial Sequence
  Description of Artificial Sequence: Synthetic oligonucleotide
  Antisense strand to SEQ ID NO: 1950842
auagauacccucugacgaa

SEQ ID NO: 1950844 - RNA, 19 nt, Artificial Sequence
  Description of Artificial Sequence: Synthetic oligonucleotide
  Sense strand starting at position 646 of SEQ ID NO: 1880219
cuccuaaauggucaguguu

SEQ ID NO: 1950845 - RNA, 19 nt, Artificial Sequence
  Description of Artificial Sequence: Synthetic oligonucleotide
  Antisense strand to SEQ ID NO: 1950844
aacacugaccauuuaggag

SEQ ID NO: 1950846 - RNA, 19 nt, Artificial Sequence
  Description of Artificial Sequence: Synthetic oligonucleotide
  Sense strand starting at position 820 of SEQ ID NO: 1880219
uuugguaugaauugguaca

SEQ ID NO: 1950847 - RNA, 19 nt, Artificial Sequence
  Description of Artificial Sequence: Synthetic oligonucleotide
  Antisense strand to SEQ ID NO: 1950846
uguaccaauucauaccaaa

SEQ ID NO: 1950848 - RNA, 19 nt, Artificial Sequence
  Description of Artificial Sequence: Synthetic oligonucleotide
  Sense strand starting at position 821 of SEQ ID NO: 1880219
uugguaugaauugguacau

SEQ ID NO: 1950849 - RNA, 19 nt, Artificial Sequence
  Description of Artificial Sequence: Synthetic oligonucleotide
  Antisense strand to SEQ ID NO: 1950848
auguaccaauucauaccaa

SEQ ID NO: 1950850 - RNA, 19 nt, Artificial Sequence
  Description of Artificial Sequence: Synthetic oligonucleotide
  Sense strand starting at position 822 of SEQ ID NO: 1880219
ugguaugaauugguacauu

SEQ ID NO: 1950851 - RNA, 19 nt, Artificial Sequence
  Description of Artificial Sequence: Synthetic oligonucleotide
  Antisense strand to SEQ ID NO: 1950850
aauguaccaauucauacca

SEQ ID NO: 1950852 - RNA, 19 nt, Artificial Sequence
  Description of Artificial Sequence: Synthetic oligonucleotide
  Sense strand starting at position 833 of SEQ ID NO: 1880219
gguacauuaugcuuggaca

SEQ ID NO: 1950853 - RNA, 19 nt, Artificial Sequence
  Description of Artificial Sequence: Synthetic oligonucleotide
  Antisense strand to SEQ ID NO: 1950852
uguccaagcauaauguacc

SEQ ID NO: 1950854 - RNA, 19 nt, Artificial Sequence
  Description of Artificial Sequence: Synthetic oligonucleotide
  Sense strand starting at position 834 of SEQ ID NO: 1880219
guacauuaugcuuggacaa

SEQ ID NO: 1950855 - RNA, 19 nt, Artificial Sequence
  Description of Artificial Sequence: Synthetic oligonucleotide
  Antisense strand to SEQ ID NO: 1950854
uuguccaagcauaauguac

SEQ ID NO: 1950856 - RNA, 19 nt, Artificial Sequence
  Description of Artificial Sequence: Synthetic oligonucleotide
  Sense strand starting at position 867 of SEQ ID NO: 1880219
ucauuaacuuggcugauca

SEQ ID NO: 1950857 - RNA, 19 nt, Artificial Sequence
  Description of Artificial Sequence: Synthetic oligonucleotide
  Antisense strand to SEQ ID NO: 1950856
ugaucagccaaguuaauga

SEQ ID NO: 1950858 - RNA, 19 nt, Artificial Sequence
  Description of Artificial Sequence: Synthetic oligonucleotide
  Sense strand starting at position 931 of SEQ ID NO: 1880219
ggaaccugcucauuaagaa

SEQ ID NO: 1950859 - RNA, 19 nt, Artificial Sequence
  Description of Artificial Sequence: Synthetic oligonucleotide
  Antisense strand to SEQ ID NO: 1950858
uucuuaaugagcagguucc

SEQ ID NO: 1950860 - RNA, 19 nt, Artificial Sequence
  Description of Artificial Sequence: Synthetic oligonucleotide
  Sense strand starting at position 1040 of SEQ ID NO: 1880219
uagucaguuccagacuaug

SEQ ID NO: 1950861 - RNA, 19 nt, Artificial Sequence
  Description of Artificial Sequence: Synthetic oligonucleotide
  Antisense strand to SEQ ID NO: 1950860
cauagucuggaacugacua

SEQ ID NO: 1950862 - RNA, 19 nt, Artificial Sequence
  Description of Artificial Sequence: Synthetic oligonucleotide
  Sense strand starting at position 1100 of SEQ ID NO: 1880219
aaggaauguuggguccuaa

SEQ ID NO: 1950863 - RNA, 19 nt, Artificial Sequence
  Description of Artificial Sequence: Synthetic oligonucleotide
  Antisense strand to SEQ ID NO: 1950862
uuaggacccaacauuccuu

SEQ ID NO: 1950864 - RNA, 19 nt, Artificial Sequence
  Description of Artificial Sequence: Synthetic oligonucleotide
  Sense strand starting at position 1389 of SEQ ID NO: 1880219
acagacgcccgagaugauu

SEQ ID NO: 1950865 - RNA, 19 nt, Artificial Sequence
  Description of Artificial Sequence: Synthetic oligonucleotide
  Antisense strand to SEQ ID NO: 1950864
aaucaucucgggcgucugu

SEQ ID NO: 1950866 - RNA, 19 nt, Artificial Sequence
  Description of Artificial Sequence: Synthetic oligonucleotide
  Sense strand starting at position 1640 of SEQ ID NO: 1880219
gcuccuuucgcuguauagu

SEQ ID NO: 1950867 - RNA, 19 nt, Artificial Sequence
  Description of Artificial Sequence: Synthetic oligonucleotide
  Antisense strand to SEQ ID NO: 1950866
acuauacagcgaaaggagc

SEQ ID NO: 1950868 - RNA, 19 nt, Artificial Sequence
  Description of Artificial Sequence: Synthetic oligonucleotide
  Sense strand starting at position 2010 of SEQ ID NO: 1880219
gaugcaacucucgcgugau

SEQ ID NO: 1950869 - RNA, 19 nt, Artificial Sequence
  Description of Artificial Sequence: Synthetic oligonucleotide
  Antisense strand to SEQ ID NO: 1950868
aucacgcgagaguugcauc

SEQ ID NO: 1950870 - RNA, 19 nt, Artificial Sequence
  Description of Artificial Sequence: Synthetic oligonucleotide
  Sense strand starting at position 2084 of SEQ ID NO: 1880219
gccaucuuggcugaccaau

SEQ ID NO: 1950871 - RNA, 19 nt, Artificial Sequence
  Description of Artificial Sequence: Synthetic oligonucleotide
  Antisense strand to SEQ ID NO: 1950870
auuggucagccaagauggc

SEQ ID NO: 1950872 - RNA, 19 nt, Artificial Sequence
  Description of Artificial Sequence: Synthetic oligonucleotide
  Sense strand starting at position 2107 of SEQ ID NO: 1880219
cgcgauauucugucugcag

SEQ ID NO: 1950873 - RNA, 19 nt, Artificial Sequence
  Description of Artificial Sequence: Synthetic oligonucleotide
  Antisense strand to SEQ ID NO: 1950872
cugcagacagaauaucgcg

SEQ ID NO: 1950874 - RNA, 19 nt, Artificial Sequence
  Description of Artificial Sequence: Synthetic oligonucleotide
  Sense strand starting at position 2553 of SEQ ID NO: 1880219
uaaggcagacuuuauguaa

SEQ ID NO: 1950875 - RNA, 19 nt, Artificial Sequence
  Description of Artificial Sequence: Synthetic oligonucleotide
  Antisense strand to SEQ ID NO: 1950874
uuacauaaagucugccuua

SEQ ID NO: 1950876 - RNA, 19 nt, Artificial Sequence
  Description of Artificial Sequence: Synthetic oligonucleotide
  Sense strand starting at position 2556 of SEQ ID NO: 1880219
ggcagacuuuauguaagag

SEQ ID NO: 1950877 - RNA, 19 nt, Artificial Sequence
  Description of Artificial Sequence: Synthetic oligonucleotide
  Antisense strand to SEQ ID NO: 1950876
cucuuacauaaagucugcc

SEQ ID NO: 1950878 - RNA, 19 nt, Artificial Sequence
  Description of Artificial Sequence: Synthetic oligonucleotide
  Sense strand starting at position 2570 of SEQ ID NO: 1880219
aagagagcccauggugaua

SEQ ID NO: 1950879 - RNA, 19 nt, Artificial Sequence
  Description of Artificial Sequence: Synthetic oligonucleotide
  Antisense strand to SEQ ID NO: 1950878
uaucaccaugggcucucuu

SEQ ID NO: 1950880 - RNA, 19 nt, Artificial Sequence
  Description of Artificial Sequence: Synthetic oligonucleotide
  Sense strand starting at position 2609 of SEQ ID NO: 1880219
cagaucuugcagugaagaa

SEQ ID NO: 1950881 - RNA, 19 nt, Artificial Sequence
  Description of Artificial Sequence: Synthetic oligonucleotide
  Antisense strand to SEQ ID NO: 1950880
uucuucacugcaagaucug

SEQ ID NO: 1950882 - RNA, 19 nt, Artificial Sequence
  Description of Artificial Sequence: Synthetic oligonucleotide
  Sense strand starting at position 2737 of SEQ ID NO: 1880219
agaaguuucuugcuaaacu

SEQ ID NO: 1950883 - RNA, 19 nt, Artificial Sequence
  Description of Artificial Sequence: Synthetic oligonucleotide
  Antisense strand to SEQ ID NO: 1950882
aguuuagcaagaaacuucu

SEQ ID NO: 1950884 - RNA, 19 nt, Artificial Sequence
  Description of Artificial Sequence: Synthetic oligonucleotide
  Sense strand starting at position 2762 of SEQ ID NO: 1880219
acaggauuauugcugaaag

SEQ ID NO: 1950885 - RNA, 19 nt, Artificial Sequence
  Description of Artificial Sequence: Synthetic oligonucleotide
  Antisense strand to SEQ ID NO: 1950884
cuuucagcaauaauccugu

SEQ ID NO: 1950886 - RNA, 19 nt, Artificial Sequence
  Description of Artificial Sequence: Synthetic oligonucleotide
  Sense strand starting at position 2764 of SEQ ID NO: 1880219
aggauuauugcugaaagca

SEQ ID NO: 1950887 - RNA, 19 nt, Artificial Sequence
  Description of Artificial Sequence: Synthetic oligonucleotide
  Antisense strand to SEQ ID NO: 1950886
ugcuuucagcaauaauccu

SEQ ID NO: 1950888 - RNA, 19 nt, Artificial Sequence
  Description of Artificial Sequence: Synthetic oligonucleotide
  Sense strand starting at position 2799 of SEQ ID NO: 1880219
uguugaggguggucagaua

SEQ ID NO: 1950889 - RNA, 19 nt, Artificial Sequence
  Description of Artificial Sequence: Synthetic oligonucleotide
  Antisense strand to SEQ ID NO: 1950888
uaucugaccacccucaaca

SEQ ID NO: 1950890 - RNA, 19 nt, Artificial Sequence
  Description of Artificial Sequence: Synthetic oligonucleotide
  Sense strand starting at position 2849 of SEQ ID NO: 1880219
auuccauacguuggaaacu

SEQ ID NO: 1950891 - RNA, 19 nt, Artificial Sequence
  Description of Artificial Sequence: Synthetic oligonucleotide
  Antisense strand to SEQ ID NO: 1950890
aguuuccaacguauggaau

SEQ ID NO: 1950892 - RNA, 19 nt, Artificial Sequence
  Description of Artificial Sequence: Synthetic oligonucleotide
  Sense strand starting at position 3182 of SEQ ID NO: 1880219
ggauuaagacgccaagagu

SEQ ID NO: 1950893 - RNA, 19 nt, Artificial Sequence
  Description of Artificial Sequence: Synthetic oligonucleotide
  Antisense strand to SEQ ID NO: 1950892
acucuuggcgucuuaaucc

SEQ ID NO: 1950894 - RNA, 19 nt, Artificial Sequence
  Description of Artificial Sequence: Synthetic oligonucleotide
  Sense strand starting at position 3388 of SEQ ID NO: 1880219
cggagaauguggcuauaau

SEQ ID NO: 1950895 - RNA, 19 nt, Artificial Sequence
  Description of Artificial Sequence: Synthetic oligonucleotide
  Antisense strand to SEQ ID NO: 1950894
auuauagccacauucuccg

SEQ ID NO: 1950896 - RNA, 19 nt, Artificial Sequence
  Description of Artificial Sequence: Synthetic oligonucleotide
  Sense strand starting at position 3473 of SEQ ID NO: 1880219
ggagaagcccugcaaaguu

SEQ ID NO: 1950897 - RNA, 19 nt, Artificial Sequence
  Description of Artificial Sequence: Synthetic oligonucleotide
  Antisense strand to SEQ ID NO: 1950896
aacuuugcagggcuucucc

SEQ ID NO: 1950898 - RNA, 19 nt, Artificial Sequence
  Description of Artificial Sequence: Synthetic oligonucleotide
  Sense strand starting at position 3545 of SEQ ID NO: 1880219
agugucuggaauugaguga

SEQ ID NO: 1950899 - RNA, 19 nt, Artificial Sequence
  Description of Artificial Sequence: Synthetic oligonucleotide
  Antisense strand to SEQ ID NO: 1950898
ucacucaauuccagacacu

SEQ ID NO: 1950900 - RNA, 19 nt, Artificial Sequence
  Description of Artificial Sequence: Synthetic oligonucleotide
  Sense strand starting at position 3549 of SEQ ID NO: 1880219
ucuggaauugagugagcca

SEQ ID NO: 1950901 - RNA, 19 nt, Artificial Sequence
  Description of Artificial Sequence: Synthetic oligonucleotide
  Antisense strand to SEQ ID NO: 1950900
uggcucacucaauuccaga

SEQ ID NO: 1950902 - RNA, 19 nt, Artificial Sequence
  Description of Artificial Sequence: Synthetic oligonucleotide
  Sense strand starting at position 3679 of SEQ ID NO: 1880219
aaaccauucgaggguguua

SEQ ID NO: 1950903 - RNA, 19 nt, Artificial Sequence
  Description of Artificial Sequence: Synthetic oligonucleotide
  Antisense strand to SEQ ID NO: 1950902
uaacacccucgaaugguuu

SEQ ID NO: 1950904 - RNA, 19 nt, Artificial Sequence
  Description of Artificial Sequence: Synthetic oligonucleotide
  Sense strand starting at position 3690 of SEQ ID NO: 1880219
ggguguuaaccagggagau

SEQ ID NO: 1950905 - RNA, 19 nt, Artificial Sequence
  Description of Artificial Sequence: Synthetic oligonucleotide
  Antisense strand to SEQ ID NO: 1950904
aucucccugguuaacaccc

SEQ ID NO: 1950906 - RNA, 19 nt, Artificial Sequence
  Description of Artificial Sequence: Synthetic oligonucleotide
  Sense strand starting at position 3691 of SEQ ID NO: 1880219
gguguuaaccagggagaug

SEQ ID NO: 1950907 - RNA, 19 nt, Artificial Sequence
  Description of Artificial Sequence: Synthetic oligonucleotide
  Antisense strand to SEQ ID NO: 1950906
caucucccugguuaacacc

SEQ ID NO: 1950908 - RNA, 19 nt, Artificial Sequence
  Description of Artificial Sequence: Synthetic oligonucleotide
  Sense strand starting at position 3692 of SEQ ID NO: 1880219
guguuaaccagggagaugu

SEQ ID NO: 1950909 - RNA, 19 nt, Artificial Sequence
  Description of Artificial Sequence: Synthetic oligonucleotide
  Antisense strand to SEQ ID NO: 1950908
acaucucccugguuaacac

SEQ ID NO: 1950910 - RNA, 19 nt, Artificial Sequence
  Description of Artificial Sequence: Synthetic oligonucleotide
  Sense strand starting at position 3838 of SEQ ID NO: 1880219
ggagcauuggguugauauu

SEQ ID NO: 1950911 - RNA, 19 nt, Artificial Sequence
  Description of Artificial Sequence: Synthetic oligonucleotide
  Antisense strand to SEQ ID NO: 1950910
aauaucaacccaaugcucc

SEQ ID NO: 1950912 - RNA, 19 nt, Artificial Sequence
  Description of Artificial Sequence: Synthetic oligonucleotide
  Sense strand starting at position 3955 of SEQ ID NO: 1880219
aguggauggcuguaucacu

SEQ ID NO: 1950913 - RNA, 19 nt, Artificial Sequence
  Description of Artificial Sequence: Synthetic oligonucleotide
  Antisense strand to SEQ ID NO: 1950912
agugauacagccauccacu

SEQ ID NO: 1950914 - RNA, 19 nt, Artificial Sequence
  Description of Artificial Sequence: Synthetic oligonucleotide
  Sense strand starting at position 3981 of SEQ ID NO: 1880219
auaaguaagcucgagagua

SEQ ID NO: 1950915 - RNA, 19 nt, Artificial Sequence
  Description of Artificial Sequence: Synthetic oligonucleotide
  Antisense strand to SEQ ID NO: 1950914
uacucucgagcuuacuuau

SEQ ID NO: 1950916 - RNA, 19 nt, Artificial Sequence
  Description of Artificial Sequence: Synthetic oligonucleotide
  Sense strand starting at position 3983 of SEQ ID NO: 1880219
aaguaagcucgagaguaag

SEQ ID NO: 1950917 - RNA, 19 nt, Artificial Sequence
  Description of Artificial Sequence: Synthetic oligonucleotide
  Antisense strand to SEQ ID NO: 1950916
cuuacucucgagcuuacuu

SEQ ID NO: 1950918 - RNA, 19 nt, Artificial Sequence
  Description of Artificial Sequence: Synthetic oligonucleotide
  Sense strand starting at position 102 of SEQ ID NO: 1880220
ugugucuguauagguaaau

SEQ ID NO: 1950919 - RNA, 19 nt, Artificial Sequence
  Description of Artificial Sequence: Synthetic oligonucleotide
  Antisense strand to SEQ ID NO: 1950918
auuuaccuauacagacaca

SEQ ID NO: 1950920 - RNA, 19 nt, Artificial Sequence
  Description of Artificial Sequence: Synthetic oligonucleotide
  Sense strand starting at position 103 of SEQ ID NO: 1880220
gugucuguauagguaaaug

SEQ ID NO: 1950921 - RNA, 19 nt, Artificial Sequence
  Description of Artificial Sequence: Synthetic oligonucleotide
  Antisense strand to SEQ ID NO: 1950920
cauuuaccuauacagacac

SEQ ID NO: 1950922 - RNA, 19 nt, Artificial Sequence
  Description of Artificial Sequence: Synthetic oligonucleotide
  Sense strand starting at position 123 of SEQ ID NO: 1880220
guuucuugagggcagcaua

SEQ ID NO: 1950923 - RNA, 19 nt, Artificial Sequence
  Description of Artificial Sequence: Synthetic oligonucleotide
  Antisense strand to SEQ ID NO: 1950922
uaugcugcccucaagaaac

SEQ ID NO: 1950924 - RNA, 19 nt, Artificial Sequence
  Description of Artificial Sequence: Synthetic oligonucleotide
  Sense strand starting at position 141 of SEQ ID NO: 1880220
auaguuaggucuucucucu

SEQ ID NO: 1950925 - RNA, 19 nt, Artificial Sequence
  Description of Artificial Sequence: Synthetic oligonucleotide
  Antisense strand to SEQ ID NO: 1950924
agagagaagaccuaacuau

SEQ ID NO: 1950926 - RNA, 19 nt, Artificial Sequence
  Description of Artificial Sequence: Synthetic oligonucleotide
  Sense strand starting at position 347 of SEQ ID NO: 1880220
gguaauaugucuuaauuug

SEQ ID NO: 1950927 - RNA, 19 nt, Artificial Sequence
  Description of Artificial Sequence: Synthetic oligonucleotide
  Antisense strand to SEQ ID NO: 1950926
caaauuaagacauauuacc

SEQ ID NO: 1950928 - RNA, 19 nt, Artificial Sequence
  Description of Artificial Sequence: Synthetic oligonucleotide
  Sense strand starting at position 408 of SEQ ID NO: 1880220
cuguaauuaccaugagauu

SEQ ID NO: 1950929 - RNA, 19 nt, Artificial Sequence
  Description of Artificial Sequence: Synthetic oligonucleotide
  Antisense strand to SEQ ID NO: 1950928
aaucucaugguaauuacag

SEQ ID NO: 1950930 - RNA, 19 nt, Artificial Sequence
  Description of Artificial Sequence: Synthetic oligonucleotide
  Sense strand starting at position 655 of SEQ ID NO: 1880220
guguaccaccauuauagua

SEQ ID NO: 1950931 - RNA, 19 nt, Artificial Sequence
  Description of Artificial Sequence: Synthetic oligonucleotide
  Antisense strand to SEQ ID NO: 1950930
uacuauaauggugguacac

SEQ ID NO: 1950932 - RNA, 19 nt, Artificial Sequence
  Description of Artificial Sequence: Synthetic oligonucleotide
  Sense strand starting at position 671 of SEQ ID NO: 1880220
guaauauagucuucugggu

SEQ ID NO: 1950933 - RNA, 19 nt, Artificial Sequence
  Description of Artificial Sequence: Synthetic oligonucleotide
  Antisense strand to SEQ ID NO: 1950932
acccagaagacuauauuac

SEQ ID NO: 1950934 - RNA, 19 nt, Artificial Sequence
  Description of Artificial Sequence: Synthetic oligonucleotide
  Sense strand starting at position 685 of SEQ ID NO: 1880220
uggguuugucuaugaacuu

SEQ ID NO: 1950935 - RNA, 19 nt, Artificial Sequence
  Description of Artificial Sequence: Synthetic oligonucleotide
  Antisense strand to SEQ ID NO: 1950934
aaguucauagacaaaccca

SEQ ID NO: 1950936 - RNA, 19 nt, Artificial Sequence
  Description of Artificial Sequence: Synthetic oligonucleotide
  Sense strand starting at position 2081 of SEQ ID NO: 1880220
uuuguuuguaugggaaaua

SEQ ID NO: 1950937 - RNA, 19 nt, Artificial Sequence
  Description of Artificial Sequence: Synthetic oligonucleotide
  Antisense strand to SEQ ID NO: 1950936
uauuucccauacaaacaaa

SEQ ID NO: 1950938 - RNA, 19 nt, Artificial Sequence
  Description of Artificial Sequence: Synthetic oligonucleotide
  Sense strand starting at position 2124 of SEQ ID NO: 1880220
aauaaucuugcuggguaca

SEQ ID NO: 1950939 - RNA, 19 nt, Artificial Sequence
  Description of Artificial Sequence: Synthetic oligonucleotide
  Antisense strand to SEQ ID NO: 1950938
uguacccagcaagauuauu

SEQ ID NO: 1950940 - RNA, 19 nt, Artificial Sequence
  Description of Artificial Sequence: Synthetic oligonucleotide
  Sense strand starting at position 2135 of SEQ ID NO: 1880220
uggguacaguauucuuaga

SEQ ID NO: 1950941 - RNA, 19 nt, Artificial Sequence
  Description of Artificial Sequence: Synthetic oligonucleotide
  Antisense strand to SEQ ID NO: 1950940
ucuaagaauacuguaccca

SEQ ID NO: 1950942 - RNA, 19 nt, Artificial Sequence
  Description of Artificial Sequence: Synthetic oligonucleotide
  Sense strand starting at position 2137 of SEQ ID NO: 1880220
gguacaguauucuuagaug

SEQ ID NO: 1950943 - RNA, 19 nt, Artificial Sequence
  Description of Artificial Sequence: Synthetic oligonucleotide
  Antisense strand to SEQ ID NO: 1950942
caucuaagaauacuguacc

SEQ ID NO: 1950944 - RNA, 19 nt, Artificial Sequence
  Description of Artificial Sequence: Synthetic oligonucleotide
  Sense strand starting at position 2210 of SEQ ID NO: 1880220
uaugguuugcauugaaaca

SEQ ID NO: 1950945 - RNA, 19 nt, Artificial Sequence
  Description of Artificial Sequence: Synthetic oligonucleotide
  Antisense strand to SEQ ID NO: 1950944
uguuucaaugcaaaccaua

SEQ ID NO: 1950946 - RNA, 19 nt, Artificial Sequence
  Description of Artificial Sequence: Synthetic oligonucleotide
  Sense strand starting at position 2338 of SEQ ID NO: 1880220
gccuuaggguagucuuacu

SEQ ID NO: 1950947 - RNA, 19 nt, Artificial Sequence
  Description of Artificial Sequence: Synthetic oligonucleotide
  Antisense strand to SEQ ID NO: 1950946
aguaagacuacccuaaggc

SEQ ID NO: 1950948 - RNA, 19 nt, Artificial Sequence
  Description of Artificial Sequence: Synthetic oligonucleotide
  Sense strand starting at position 2457 of SEQ ID NO: 1880220
cuacgcuugcucuugcuua

SEQ ID NO: 1950949 - RNA, 19 nt, Artificial Sequence
  Description of Artificial Sequence: Synthetic oligonucleotide
  Antisense strand to SEQ ID NO: 1950948
uaagcaagagcaagcguag

SEQ ID NO: 1950950 - RNA, 19 nt, Artificial Sequence
  Description of Artificial Sequence: Synthetic oligonucleotide
  Sense strand starting at position 2702 of SEQ ID NO: 1880220
ugguuagggugguugcaaa

SEQ ID NO: 1950951 - RNA, 19 nt, Artificial Sequence
  Description of Artificial Sequence: Synthetic oligonucleotide
  Antisense strand to SEQ ID NO: 1950950
uuugcaaccacccuaacca

SEQ ID NO: 1950952 - RNA, 19 nt, Artificial Sequence
  Description of Artificial Sequence: Synthetic oligonucleotide
  Sense strand starting at position 2716 of SEQ ID NO: 1880220
gcaaacuccugaccuuaga

SEQ ID NO: 1950953 - RNA, 19 nt, Artificial Sequence
  Description of Artificial Sequence: Synthetic oligonucleotide
  Antisense strand to SEQ ID NO: 1950952
ucuaaggucaggaguuugc

SEQ ID NO: 1950954 - RNA, 19 nt, Artificial Sequence
  Description of Artificial Sequence: Synthetic oligonucleotide
  Sense strand starting at position 3210 of SEQ ID NO: 1880220
gccagucuucgagcucacu

SEQ ID NO: 1950955 - RNA, 19 nt, Artificial Sequence
  Description of Artificial Sequence: Synthetic oligonucleotide
  Antisense strand to SEQ ID NO: 1950954
agugagcucgaagacuggc

SEQ ID NO: 1950956 - RNA, 19 nt, Artificial Sequence
  Description of Artificial Sequence: Synthetic oligonucleotide
  Sense strand starting at position 3213 of SEQ ID NO: 1880220
agucuucgagcucacugau

SEQ ID NO: 1950957 - RNA, 19 nt, Artificial Sequence
  Description of Artificial Sequence: Synthetic oligonucleotide
  Antisense strand to SEQ ID NO: 1950956
aucagugagcucgaagacu

SEQ ID NO: 1950958 - RNA, 19 nt, Artificial Sequence
  Description of Artificial Sequence: Synthetic oligonucleotide
  Sense strand starting at position 3349 of SEQ ID NO: 1880220
uuguuaaacuucucuggua

SEQ ID NO: 1950959 - RNA, 19 nt, Artificial Sequence
  Description of Artificial Sequence: Synthetic oligonucleotide
  Antisense strand to SEQ ID NO: 1950958
uaccagagaaguuuaacaa

SEQ ID NO: 1950960 - RNA, 19 nt, Artificial Sequence
  Description of Artificial Sequence: Synthetic oligonucleotide
  Sense strand starting at position 3350 of SEQ ID NO: 1880220
uguuaaacuucucugguaa

SEQ ID NO: 1950961 - RNA, 19 nt, Artificial Sequence
  Description of Artificial Sequence: Synthetic oligonucleotide
  Antisense strand to SEQ ID NO: 1950960
uuaccagagaaguuuaaca

SEQ ID NO: 1950962 - RNA, 19 nt, Artificial Sequence
  Description of Artificial Sequence: Synthetic oligonucleotide
  Sense strand starting at position 3351 of SEQ ID NO: 1880220
guuaaacuucucugguaaa

SEQ ID NO: 1950963 - RNA, 19 nt, Artificial Sequence
  Description of Artificial Sequence: Synthetic oligonucleotide
  Antisense strand to SEQ ID NO: 1950962
uuuaccagagaaguuuaac

SEQ ID NO: 1950964 - RNA, 19 nt, Artificial Sequence
  Description of Artificial Sequence: Synthetic oligonucleotide
  Sense strand starting at position 3387 of SEQ ID NO: 1880220
agccaucucuuggcgauaa

SEQ ID NO: 1950965 - RNA, 19 nt, Artificial Sequence
  Description of Artificial Sequence: Synthetic oligonucleotide
  Antisense strand to SEQ ID NO: 1950964
uuaucgccaagagauggcu

SEQ ID NO: 1950966 - RNA, 19 nt, Artificial Sequence
  Description of Artificial Sequence: Synthetic oligonucleotide
  Sense strand starting at position 3389 of SEQ ID NO: 1880220
ccaucucuuggcgauaaca

SEQ ID NO: 1950967 - RNA, 19 nt, Artificial Sequence
  Description of Artificial Sequence: Synthetic oligonucleotide
  Antisense strand to SEQ ID NO: 1950966
uguuaucgccaagagaugg

SEQ ID NO: 1950968 - RNA, 19 nt, Artificial Sequence
  Description of Artificial Sequence: Synthetic oligonucleotide
  Sense strand starting at position 3402 of SEQ ID NO: 1880220
auaacaggguuuccuuuaa

SEQ ID NO: 1950969 - RNA, 19 nt, Artificial Sequence
  Description of Artificial Sequence: Synthetic oligonucleotide
  Antisense strand to SEQ ID NO: 1950968
uuaaaggaaacccuguuau

SEQ ID NO: 1950970 - RNA, 19 nt, Artificial Sequence
  Description of Artificial Sequence: Synthetic oligonucleotide
  Sense strand starting at position 3430 of SEQ ID NO: 1880220
uuuaauucuuggucagaga

SEQ ID NO: 1950971 - RNA, 19 nt, Artificial Sequence
  Description of Artificial Sequence: Synthetic oligonucleotide
  Antisense strand to SEQ ID NO: 1950970
ucucugaccaagaauuaaa

SEQ ID NO: 1950972 - RNA, 19 nt, Artificial Sequence
  Description of Artificial Sequence: Synthetic oligonucleotide
  Sense strand starting at position 3468 of SEQ ID NO: 1880220
uagggucagucauuguauu

SEQ ID NO: 1950973 - RNA, 19 nt, Artificial Sequence
  Description of Artificial Sequence: Synthetic oligonucleotide
  Antisense strand to SEQ ID NO: 1950972
aauacaaugacugacccua

SEQ ID NO: 1950974 - RNA, 19 nt, Artificial Sequence
  Description of Artificial Sequence: Synthetic oligonucleotide
  Sense strand starting at position 3469 of SEQ ID NO: 1880220
agggucagucauuguauuu

SEQ ID NO: 1950975 - RNA, 19 nt, Artificial Sequence
  Description of Artificial Sequence: Synthetic oligonucleotide
  Antisense strand to SEQ ID NO: 1950974
aaauacaaugacugacccu

SEQ ID NO: 1950976 - RNA, 19 nt, Artificial Sequence
  Description of Artificial Sequence: Synthetic oligonucleotide
  Sense strand starting at position 3542 of SEQ ID NO: 1880220
gguauacaccuaugucuuu

SEQ ID NO: 1950977 - RNA, 19 nt, Artificial Sequence
  Description of Artificial Sequence: Synthetic oligonucleotide
  Antisense strand to SEQ ID NO: 1950976
aaagacauagguguauacc

SEQ ID NO: 1950978 - RNA, 19 nt, Artificial Sequence
  Description of Artificial Sequence: Synthetic oligonucleotide
  Sense strand starting at position 3547 of SEQ ID NO: 1880220
acaccuaugucuuuguauu

SEQ ID NO: 1950979 - RNA, 19 nt, Artificial Sequence
  Description of Artificial Sequence: Synthetic oligonucleotide
  Antisense strand to SEQ ID NO: 1950978
aauacaaagacauaggugu

SEQ ID NO: 1950980 - RNA, 19 nt, Artificial Sequence
  Description of Artificial Sequence: Synthetic oligonucleotide
  Sense strand starting at position 3549 of SEQ ID NO: 1880220
accuaugucuuuguauuga

SEQ ID NO: 1950981 - RNA, 19 nt, Artificial Sequence
  Description of Artificial Sequence: Synthetic oligonucleotide
  Antisense strand to SEQ ID NO: 1950980
ucaauacaaagacauaggu

SEQ ID NO: 1950982 - RNA, 19 nt, Artificial Sequence
  Description of Artificial Sequence: Synthetic oligonucleotide
  Sense strand starting at position 3571 of SEQ ID NO: 1880220
auuaguuacuuauuccagu

SEQ ID NO: 1950983 - RNA, 19 nt, Artificial Sequence
  Description of Artificial Sequence: Synthetic oligonucleotide
  Antisense strand to SEQ ID NO: 1950982
acuggaauaaguaacuaau

SEQ ID NO: 1950984 - RNA, 19 nt, Artificial Sequence
  Description of Artificial Sequence: Synthetic oligonucleotide
  Sense strand starting at position 3699 of SEQ ID NO: 1880220
ucaccuuggcuuuaguaaa

SEQ ID NO: 1950985 - RNA, 19 nt, Artificial Sequence
  Description of Artificial Sequence: Synthetic oligonucleotide
  Antisense strand to SEQ ID NO: 1950984
uuuacuaaagccaagguga

SEQ ID NO: 1950986 - RNA, 19 nt, Artificial Sequence
  Description of Artificial Sequence: Synthetic oligonucleotide
  Sense strand starting at position 3723 of SEQ ID NO: 1880220
agagcauugucuguccuga

SEQ ID NO: 1950987 - RNA, 19 nt, Artificial Sequence
  Description of Artificial Sequence: Synthetic oligonucleotide
  Antisense strand to SEQ ID NO: 1950986
ucaggacagacaaugcucu

SEQ ID NO: 1950988 - RNA, 19 nt, Artificial Sequence
  Description of Artificial Sequence: Synthetic oligonucleotide
  Sense strand starting at position 3725 of SEQ ID NO: 1880220
agcauugucuguccugaau

SEQ ID NO: 1950989 - RNA, 19 nt, Artificial Sequence
  Description of Artificial Sequence: Synthetic oligonucleotide
  Antisense strand to SEQ ID NO: 1950988
auucaggacagacaaugcu

SEQ ID NO: 1950990 - RNA, 19 nt, Artificial Sequence
  Description of Artificial Sequence: Synthetic oligonucleotide
  Sense strand starting at position 3803 of SEQ ID NO: 1880220
ugggcagaccuguggaaua

SEQ ID NO: 1950991 - RNA, 19 nt, Artificial Sequence
  Description of Artificial Sequence: Synthetic oligonucleotide
  Antisense strand to SEQ ID NO: 1950990
uauuccacaggucugccca

SEQ ID NO: 1950992 - RNA, 19 nt, Artificial Sequence
  Description of Artificial Sequence: Synthetic oligonucleotide
  Sense strand starting at position 3816 of SEQ ID NO: 1880220
ggaauauacuuccugcaau

SEQ ID NO: 1950993 - RNA, 19 nt, Artificial Sequence
  Description of Artificial Sequence: Synthetic oligonucleotide
  Antisense strand to SEQ ID NO: 1950992
auugcaggaaguauauucc

SEQ ID NO: 1950994 - RNA, 19 nt, Artificial Sequence
  Description of Artificial Sequence: Synthetic oligonucleotide
  Sense strand starting at position 3978 of SEQ ID NO: 1880220
ugaugcuucccauggguua

SEQ ID NO: 1950995 - RNA, 19 nt, Artificial Sequence
  Description of Artificial Sequence: Synthetic oligonucleotide
  Antisense strand to SEQ ID NO: 1950994
uaacccaugggaagcauca

SEQ ID NO: 1950996 - RNA, 19 nt, Artificial Sequence
  Description of Artificial Sequence: Synthetic oligonucleotide
  Sense strand starting at position 3979 of SEQ ID NO: 1880220
gaugcuucccauggguuaa

SEQ ID NO: 1950997 - RNA, 19 nt, Artificial Sequence
  Description of Artificial Sequence: Synthetic oligonucleotide
  Antisense strand to SEQ ID NO: 1950996
uuaacccaugggaagcauc

SEQ ID NO: 1950998 - RNA, 19 nt, Artificial Sequence
  Description of Artificial Sequence: Synthetic oligonucleotide
  Sense strand starting at position 79 of SEQ ID NO: 1880221
aauaacuaucgauguaugu

SEQ ID NO: 1950999 - RNA, 19 nt, Artificial Sequence
  Description of Artificial Sequence: Synthetic oligonucleotide
  Antisense strand to SEQ ID NO: 1950998
acauacaucgauaguuauu

SEQ ID NO: 1951000 - RNA, 19 nt, Artificial Sequence
  Description of Artificial Sequence: Synthetic oligonucleotide
  Sense strand starting at position 96 of SEQ ID NO: 1880221
guaacacaauguuucuaua

SEQ ID NO: 1951001 - RNA, 19 nt, Artificial Sequence
  Description of Artificial Sequence: Synthetic oligonucleotide
  Antisense strand to SEQ ID NO: 1951000
uauagaaacauuguguuac

SEQ ID NO: 1951002 - RNA, 19 nt, Artificial Sequence
  Description of Artificial Sequence: Synthetic oligonucleotide
  Sense strand starting at position 106 of SEQ ID NO: 1880221
guuucuauauaagcugaua

SEQ ID NO: 1951003 - RNA, 19 nt, Artificial Sequence
  Description of Artificial Sequence: Synthetic oligonucleotide
  Antisense strand to SEQ ID NO: 1951002
uaucagcuuauauagaaac

SEQ ID NO: 1951004 - RNA, 19 nt, Artificial Sequence
  Description of Artificial Sequence: Synthetic oligonucleotide
  Sense strand starting at position 354 of SEQ ID NO: 1880221
auguacauacaguguuuaa

SEQ ID NO: 1951005 - RNA, 19 nt, Artificial Sequence
  Description of Artificial Sequence: Synthetic oligonucleotide
  Antisense strand to SEQ ID NO: 1951004
uuaaacacuguauguacau

SEQ ID NO: 1951006 - RNA, 19 nt, Artificial Sequence
  Description of Artificial Sequence: Synthetic oligonucleotide
  Sense strand starting at position 474 of SEQ ID NO: 1880221
guagguauucgagaauaau

SEQ ID NO: 1951007 - RNA, 19 nt, Artificial Sequence
  Description of Artificial Sequence: Synthetic oligonucleotide
  Antisense strand to SEQ ID NO: 1951006
auuauucucgaauaccuac

SEQ ID NO: 1951008 - RNA, 19 nt, Artificial Sequence
  Description of Artificial Sequence: Synthetic oligonucleotide
  Sense strand starting at position 477 of SEQ ID NO: 1880221
gguauucgagaauaauagu

SEQ ID NO: 1951009 - RNA, 19 nt, Artificial Sequence
  Description of Artificial Sequence: Synthetic oligonucleotide
  Antisense strand to SEQ ID NO: 1951008
acuauuauucucgaauacc

SEQ ID NO: 1951010 - RNA, 19 nt, Artificial Sequence
  Description of Artificial Sequence: Synthetic oligonucleotide
  Sense strand starting at position 571 of SEQ ID NO: 1880221
gucuuuauugaauagcauu

SEQ ID NO: 1951011 - RNA, 19 nt, Artificial Sequence
  Description of Artificial Sequence: Synthetic oligonucleotide
  Antisense strand to SEQ ID NO: 1951010
aaugcuauucaauaaagac

SEQ ID NO: 1951012 - RNA, 19 nt, Artificial Sequence
  Description of Artificial Sequence: Synthetic oligonucleotide
  Sense strand starting at position 682 of SEQ ID NO: 1880221
ggauccacaugauaaauuu

SEQ ID NO: 1951013 - RNA, 19 nt, Artificial Sequence
  Description of Artificial Sequence: Synthetic oligonucleotide
  Antisense strand to SEQ ID NO: 1951012
aaauuuaucauguggaucc

SEQ ID NO: 1951014 - RNA, 19 nt, Artificial Sequence
  Description of Artificial Sequence: Synthetic oligonucleotide
  Sense strand starting at position 731 of SEQ ID NO: 1880221
cugagaaacuugguauaau

SEQ ID NO: 1951015 - RNA, 19 nt, Artificial Sequence
  Description of Artificial Sequence: Synthetic oligonucleotide
  Antisense strand to SEQ ID NO: 1951014
auuauaccaaguuucucag

SEQ ID NO: 1951016 - RNA, 19 nt, Artificial Sequence
  Description of Artificial Sequence: Synthetic oligonucleotide
  Sense strand starting at position 943 of SEQ ID NO: 1880221
guaucuguccuauaaguug

SEQ ID NO: 1951017 - RNA, 19 nt, Artificial Sequence
  Description of Artificial Sequence: Synthetic oligonucleotide
  Antisense strand to SEQ ID NO: 1951016
caacuuauaggacagauac

SEQ ID NO: 1951018 - RNA, 19 nt, Artificial Sequence
  Description of Artificial Sequence: Synthetic oligonucleotide
  Sense strand starting at position 954 of SEQ ID NO: 1880221
auaaguugccacgaaucaa

SEQ ID NO: 1951019 - RNA, 19 nt, Artificial Sequence
  Description of Artificial Sequence: Synthetic oligonucleotide
  Antisense strand to SEQ ID NO: 1951018
uugauucguggcaacuuau

SEQ ID NO: 1951020 - RNA, 19 nt, Artificial Sequence
  Description of Artificial Sequence: Synthetic oligonucleotide
  Sense strand starting at position 1119 of SEQ ID NO: 1880221
gagaccauuuauugagaag

SEQ ID NO: 1951021 - RNA, 19 nt, Artificial Sequence
  Description of Artificial Sequence: Synthetic oligonucleotide
  Antisense strand to SEQ ID NO: 1951020
cuucucaauaaauggucuc

SEQ ID NO: 1951022 - RNA, 19 nt, Artificial Sequence
  Description of Artificial Sequence: Synthetic oligonucleotide
  Sense strand starting at position 1426 of SEQ ID NO: 1880221
cuauguauucuuuaaagug

SEQ ID NO: 1951023 - RNA, 19 nt, Artificial Sequence
  Description of Artificial Sequence: Synthetic oligonucleotide
  Antisense strand to SEQ ID NO: 1951022
cacuuuaaagaauacauag

SEQ ID NO: 1951024 - RNA, 19 nt, Artificial Sequence
  Description of Artificial Sequence: Synthetic oligonucleotide
  Sense strand starting at position 1777 of SEQ ID NO: 1880221
ugcccucaccuuugaagaa

SEQ ID NO: 1951025 - RNA, 19 nt, Artificial Sequence
  Description of Artificial Sequence: Synthetic oligonucleotide
  Antisense strand to SEQ ID NO: 1951024
uucuucaaaggugagggca

SEQ ID NO: 1951026 - RNA, 19 nt, Artificial Sequence
  Description of Artificial Sequence: Synthetic oligonucleotide
  Sense strand starting at position 2012 of SEQ ID NO: 1880221
ucgcgagauuucccuaauc

SEQ ID NO: 1951027 - RNA, 19 nt, Artificial Sequence
  Description of Artificial Sequence: Synthetic oligonucleotide
  Antisense strand to SEQ ID NO: 1951026
gauuagggaaaucucgcga

SEQ ID NO: 1951028 - RNA, 19 nt, Artificial Sequence
  Description of Artificial Sequence: Synthetic oligonucleotide
  Sense strand starting at position 2014 of SEQ ID NO: 1880221
gcgagauuucccuaaucgc

SEQ ID NO: 1951029 - RNA, 19 nt, Artificial Sequence
  Description of Artificial Sequence: Synthetic oligonucleotide
  Antisense strand to SEQ ID NO: 1951028
gcgauuagggaaaucucgc

SEQ ID NO: 1951030 - RNA, 19 nt, Artificial Sequence
  Description of Artificial Sequence: Synthetic oligonucleotide
  Sense strand starting at position 2023 of SEQ ID NO: 1880221
cccuaaucgcuaggaacaa

SEQ ID NO: 1951031 - RNA, 19 nt, Artificial Sequence
  Description of Artificial Sequence: Synthetic oligonucleotide
  Antisense strand to SEQ ID NO: 1951030
uuguuccuagcgauuaggg

SEQ ID NO: 1951032 - RNA, 19 nt, Artificial Sequence
  Description of Artificial Sequence: Synthetic oligonucleotide
  Sense strand starting at position 2036 of SEQ ID NO: 1880221
gaacaauuguuucccggau

SEQ ID NO: 1951033 - RNA, 19 nt, Artificial Sequence
  Description of Artificial Sequence: Synthetic oligonucleotide
  Antisense strand to SEQ ID NO: 1951032
auccgggaaacaauuguuc

SEQ ID NO: 1951034 - RNA, 19 nt, Artificial Sequence
  Description of Artificial Sequence: Synthetic oligonucleotide
  Sense strand starting at position 2037 of SEQ ID NO: 1880221
aacaauuguuucccggauu

SEQ ID NO: 1951035 - RNA, 19 nt, Artificial Sequence
  Description of Artificial Sequence: Synthetic oligonucleotide
  Antisense strand to SEQ ID NO: 1951034
aauccgggaaacaauuguu

SEQ ID NO: 1951036 - RNA, 19 nt, Artificial Sequence
  Description of Artificial Sequence: Synthetic oligonucleotide
  Sense strand starting at position 2054 of SEQ ID NO: 1880221
uucuguauuuccuuggagu

SEQ ID NO: 1951037 - RNA, 19 nt, Artificial Sequence
  Description of Artificial Sequence: Synthetic oligonucleotide
  Antisense strand to SEQ ID NO: 1951036
acuccaaggaaauacagaa

SEQ ID NO: 1951038 - RNA, 19 nt, Artificial Sequence
  Description of Artificial Sequence: Synthetic oligonucleotide
  Sense strand starting at position 2055 of SEQ ID NO: 1880221
ucuguauuuccuuggagug

SEQ ID NO: 1951039 - RNA, 19 nt, Artificial Sequence
  Description of Artificial Sequence: Synthetic oligonucleotide
  Antisense strand to SEQ ID NO: 1951038
cacuccaaggaaauacaga

SEQ ID NO: 1951040 - RNA, 19 nt, Artificial Sequence
  Description of Artificial Sequence: Synthetic oligonucleotide
  Sense strand starting at position 2117 of SEQ ID NO: 1880221
acugucaggcucuaugaca

SEQ ID NO: 1951041 - RNA, 19 nt, Artificial Sequence
  Description of Artificial Sequence: Synthetic oligonucleotide
  Antisense strand to SEQ ID NO: 1951040
ugucauagagccugacagu

SEQ ID NO: 1951042 - RNA, 19 nt, Artificial Sequence
  Description of Artificial Sequence: Synthetic oligonucleotide
  Sense strand starting at position 2238 of SEQ ID NO: 1880221
ggguaauuccuaugauaag

SEQ ID NO: 1951043 - RNA, 19 nt, Artificial Sequence
  Description of Artificial Sequence: Synthetic oligonucleotide
  Antisense strand to SEQ ID NO: 1951042
cuuaucauaggaauuaccc

SEQ ID NO: 1951044 - RNA, 19 nt, Artificial Sequence
  Description of Artificial Sequence: Synthetic oligonucleotide
  Sense strand starting at position 2796 of SEQ ID NO: 1880221
gagcaaaggcauuggaguu

SEQ ID NO: 1951045 - RNA, 19 nt, Artificial Sequence
  Description of Artificial Sequence: Synthetic oligonucleotide
  Antisense strand to SEQ ID NO: 1951044
aacuccaaugccuuugcuc

SEQ ID NO: 1951046 - RNA, 19 nt, Artificial Sequence
  Description of Artificial Sequence: Synthetic oligonucleotide
  Sense strand starting at position 2802 of SEQ ID NO: 1880221
aggcauuggaguugugaga

SEQ ID NO: 1951047 - RNA, 19 nt, Artificial Sequence
  Description of Artificial Sequence: Synthetic oligonucleotide
  Antisense strand to SEQ ID NO: 1951046
ucucacaacuccaaugccu

SEQ ID NO: 1951048 - RNA, 19 nt, Artificial Sequence
  Description of Artificial Sequence: Synthetic oligonucleotide
  Sense strand starting at position 2847 of SEQ ID NO: 1880221
gcguucugugugaggauua

SEQ ID NO: 1951049 - RNA, 19 nt, Artificial Sequence
  Description of Artificial Sequence: Synthetic oligonucleotide
  Antisense strand to SEQ ID NO: 1951048
uaauccucacacagaacgc

SEQ ID NO: 1951050 - RNA, 19 nt, Artificial Sequence
  Description of Artificial Sequence: Synthetic oligonucleotide
  Sense strand starting at position 3277 of SEQ ID NO: 1880221
ugacuuuguggacggagau

SEQ ID NO: 1951051 - RNA, 19 nt, Artificial Sequence
  Description of Artificial Sequence: Synthetic oligonucleotide
  Antisense strand to SEQ ID NO: 1951050
aucuccguccacaaaguca

SEQ ID NO: 1951052 - RNA, 19 nt, Artificial Sequence
  Description of Artificial Sequence: Synthetic oligonucleotide
  Sense strand starting at position 3343 of SEQ ID NO: 1880221
aaacuuguaguaugaagaa

SEQ ID NO: 1951053 - RNA, 19 nt, Artificial Sequence
  Description of Artificial Sequence: Synthetic oligonucleotide
  Antisense strand to SEQ ID NO: 1951052
uucuucauacuacaaguuu

SEQ ID NO: 1951054 - RNA, 19 nt, Artificial Sequence
  Description of Artificial Sequence: Synthetic oligonucleotide
  Sense strand starting at position 3350 of SEQ ID NO: 1880221
uaguaugaagaaugguuua

SEQ ID NO: 1951055 - RNA, 19 nt, Artificial Sequence
  Description of Artificial Sequence: Synthetic oligonucleotide
  Antisense strand to SEQ ID NO: 1951054
uaaaccauucuucauacua

SEQ ID NO: 1951056 - RNA, 19 nt, Artificial Sequence
  Description of Artificial Sequence: Synthetic oligonucleotide
  Sense strand starting at position 3355 of SEQ ID NO: 1880221
ugaagaaugguuuaggcuu

SEQ ID NO: 1951057 - RNA, 19 nt, Artificial Sequence
  Description of Artificial Sequence: Synthetic oligonucleotide
  Antisense strand to SEQ ID NO: 1951056
aagccuaaaccauucuuca

SEQ ID NO: 1951058 - RNA, 19 nt, Artificial Sequence
  Description of Artificial Sequence: Synthetic oligonucleotide
  Sense strand starting at position 3398 of SEQ ID NO: 1880221
uuuaauagccugggugaga

SEQ ID NO: 1951059 - RNA, 19 nt, Artificial Sequence
  Description of Artificial Sequence: Synthetic oligonucleotide
  Antisense strand to SEQ ID NO: 1951058
ucucacccaggcuauuaaa

SEQ ID NO: 1951060 - RNA, 19 nt, Artificial Sequence
  Description of Artificial Sequence: Synthetic oligonucleotide
  Sense strand starting at position 3428 of SEQ ID NO: 1880221
gagcuaugacacggacagu

SEQ ID NO: 1951061 - RNA, 19 nt, Artificial Sequence
  Description of Artificial Sequence: Synthetic oligonucleotide
  Antisense strand to SEQ ID NO: 1951060
acuguccgugucauagcuc

SEQ ID NO: 1951062 - RNA, 19 nt, Artificial Sequence
  Description of Artificial Sequence: Synthetic oligonucleotide
  Sense strand starting at position 3601 of SEQ ID NO: 1880221
gugcuaaguuacuuaauuu

SEQ ID NO: 1951063 - RNA, 19 nt, Artificial Sequence
  Description of Artificial Sequence: Synthetic oligonucleotide
  Antisense strand to SEQ ID NO: 1951062
aaauuaaguaacuuagcac

SEQ ID NO: 1951064 - RNA, 19 nt, Artificial Sequence
  Description of Artificial Sequence: Synthetic oligonucleotide
  Sense strand starting at position 3674 of SEQ ID NO: 1880221
acuuucucugggcaucaua

SEQ ID NO: 1951065 - RNA, 19 nt, Artificial Sequence
  Description of Artificial Sequence: Synthetic oligonucleotide
  Antisense strand to SEQ ID NO: 1951064
uaugaugcccagagaaagu

SEQ ID NO: 1951066 - RNA, 19 nt, Artificial Sequence
  Description of Artificial Sequence: Synthetic oligonucleotide
  Sense strand starting at position 3677 of SEQ ID NO: 1880221
uucucugggcaucauaaua

SEQ ID NO: 1951067 - RNA, 19 nt, Artificial Sequence
  Description of Artificial Sequence: Synthetic oligonucleotide
  Antisense strand to SEQ ID NO: 1951066
uauuaugaugcccagagaa

SEQ ID NO: 1951068 - RNA, 19 nt, Artificial Sequence
  Description of Artificial Sequence: Synthetic oligonucleotide
  Sense strand starting at position 3709 of SEQ ID NO: 1880221
uucuaaggacuuuagcaau

SEQ ID NO: 1951069 - RNA, 19 nt, Artificial Sequence
  Description of Artificial Sequence: Synthetic oligonucleotide
  Antisense strand to SEQ ID NO: 1951068
auugcuaaaguccuuagaa

SEQ ID NO: 1951070 - RNA, 19 nt, Artificial Sequence
  Description of Artificial Sequence: Synthetic oligonucleotide
  Sense strand starting at position 3792 of SEQ ID NO: 1880221
aguaaaggaugauccaguu

SEQ ID NO: 1951071 - RNA, 19 nt, Artificial Sequence
  Description of Artificial Sequence: Synthetic oligonucleotide
  Antisense strand to SEQ ID NO: 1951070
aacuggaucauccuuuacu

SEQ ID NO: 1951072 - RNA, 19 nt, Artificial Sequence
  Description of Artificial Sequence: Synthetic oligonucleotide
  Sense strand starting at position 3842 of SEQ ID NO: 1880221
gagucuagauacucugaaa

SEQ ID NO: 1951073 - RNA, 19 nt, Artificial Sequence
  Description of Artificial Sequence: Synthetic oligonucleotide
  Antisense strand to SEQ ID NO: 1951072
uuucagaguaucuagacuc

SEQ ID NO: 1951074 - RNA, 19 nt, Artificial Sequence
  Description of Artificial Sequence: Synthetic oligonucleotide
  Sense strand starting at position 3880 of SEQ ID NO: 1880221
gagagaugauacuaagaau

SEQ ID NO: 1951075 - RNA, 19 nt, Artificial Sequence
  Description of Artificial Sequence: Synthetic oligonucleotide
  Antisense strand to SEQ ID NO: 1951074
auucuuaguaucaucucuc

SEQ ID NO: 1951076 - RNA, 19 nt, Artificial Sequence
  Description of Artificial Sequence: Synthetic oligonucleotide
  Sense strand starting at position 3919 of SEQ ID NO: 1880221
ggcaauaauugaucuaauu

SEQ ID NO: 1951077 - RNA, 19 nt, Artificial Sequence
  Description of Artificial Sequence: Synthetic oligonucleotide
  Antisense strand to SEQ ID NO: 1951076
aauuagaucaauuauugcc

SEQ ID NO: 1951078 - RNA, 19 nt, Artificial Sequence
  Description of Artificial Sequence: Synthetic oligonucleotide
  Sense strand starting at position 24 of SEQ ID NO: 1880222
cugccaucuuuaucugaag

SEQ ID NO: 1951079 - RNA, 19 nt, Artificial Sequence
  Description of Artificial Sequence: Synthetic oligonucleotide
  Antisense strand to SEQ ID NO: 1951078
cuucagauaaagauggcag

SEQ ID NO: 1951080 - RNA, 19 nt, Artificial Sequence
  Description of Artificial Sequence: Synthetic oligonucleotide
  Sense strand starting at position 88 of SEQ ID NO: 1880222
auuccugaucuuuguauua

SEQ ID NO: 1951081 - RNA, 19 nt, Artificial Sequence
  Description of Artificial Sequence: Synthetic oligonucleotide
  Antisense strand to SEQ ID NO: 1951080
uaauacaaagaucaggaau

SEQ ID NO: 1951082 - RNA, 19 nt, Artificial Sequence
  Description of Artificial Sequence: Synthetic oligonucleotide
  Sense strand starting at position 142 of SEQ ID NO: 1880222
uuaugagaguaucucaaac

SEQ ID NO: 1951083 - RNA, 19 nt, Artificial Sequence
  Description of Artificial Sequence: Synthetic oligonucleotide
  Antisense strand to SEQ ID NO: 1951082
guuugagauacucucauaa

SEQ ID NO: 1951084 - RNA, 19 nt, Artificial Sequence
  Description of Artificial Sequence: Synthetic oligonucleotide
  Sense strand starting at position 169 of SEQ ID NO: 1880222
aucucuagaaugugaggau

SEQ ID NO: 1951085 - RNA, 19 nt, Artificial Sequence
  Description of Artificial Sequence: Synthetic oligonucleotide
  Antisense strand to SEQ ID NO: 1951084
auccucacauucuagagau

SEQ ID NO: 1951086 - RNA, 19 nt, Artificial Sequence
  Description of Artificial Sequence: Synthetic oligonucleotide
  Sense strand starting at position 364 of SEQ ID NO: 1880222
auggcaucugccugaagga

SEQ ID NO: 1951087 - RNA, 19 nt, Artificial Sequence
  Description of Artificial Sequence: Synthetic oligonucleotide
  Antisense strand to SEQ ID NO: 1951086
uccuucaggcagaugccau

SEQ ID NO: 1951088 - RNA, 19 nt, Artificial Sequence
  Description of Artificial Sequence: Synthetic oligonucleotide
  Sense strand starting at position 365 of SEQ ID NO: 1880222
uggcaucugccugaaggau

SEQ ID NO: 1951089 - RNA, 19 nt, Artificial Sequence
  Description of Artificial Sequence: Synthetic oligonucleotide
  Antisense strand to SEQ ID NO: 1951088
auccuucaggcagaugcca

SEQ ID NO: 1951090 - RNA, 19 nt, Artificial Sequence
  Description of Artificial Sequence: Synthetic oligonucleotide
  Sense strand starting at position 505 of SEQ ID NO: 1880222
aacauaaaucaguggguuu

SEQ ID NO: 1951091 - RNA, 19 nt, Artificial Sequence
  Description of Artificial Sequence: Synthetic oligonucleotide
  Antisense strand to SEQ ID NO: 1951090
aaacccacugauuuauguu

SEQ ID NO: 1951092 - RNA, 19 nt, Artificial Sequence
  Description of Artificial Sequence: Synthetic oligonucleotide
  Sense strand starting at position 518 of SEQ ID NO: 1880222
ggguuugguuucuugauuu

SEQ ID NO: 1951093 - RNA, 19 nt, Artificial Sequence
  Description of Artificial Sequence: Synthetic oligonucleotide
  Antisense strand to SEQ ID NO: 1951092
aaaucaagaaaccaaaccc

SEQ ID NO: 1951094 - RNA, 19 nt, Artificial Sequence
  Description of Artificial Sequence: Synthetic oligonucleotide
  Sense strand starting at position 577 of SEQ ID NO: 1880222
aaaguacugcugcagauaa

SEQ ID NO: 1951095 - RNA, 19 nt, Artificial Sequence
  Description of Artificial Sequence: Synthetic oligonucleotide
  Antisense strand to SEQ ID NO: 1951094
uuaucugcagcaguacuuu

SEQ ID NO: 1951096 - RNA, 19 nt, Artificial Sequence
  Description of Artificial Sequence: Synthetic oligonucleotide
  Sense strand starting at position 579 of SEQ ID NO: 1880222
aguacugcugcagauaaca

SEQ ID NO: 1951097 - RNA, 19 nt, Artificial Sequence
  Description of Artificial Sequence: Synthetic oligonucleotide
  Antisense strand to SEQ ID NO: 1951096
uguuaucugcagcaguacu

SEQ ID NO: 1951098 - RNA, 19 nt, Artificial Sequence
  Description of Artificial Sequence: Synthetic oligonucleotide
  Sense strand starting at position 605 of SEQ ID NO: 1880222
cauagauuauagguagauc

SEQ ID NO: 1951099 - RNA, 19 nt, Artificial Sequence
  Description of Artificial Sequence: Synthetic oligonucleotide
  Antisense strand to SEQ ID NO: 1951098
gaucuaccuauaaucuaug

SEQ ID NO: 1951100 - RNA, 19 nt, Artificial Sequence
  Description of Artificial Sequence: Synthetic oligonucleotide
  Sense strand starting at position 655 of SEQ ID NO: 1880222
uuugaaacugucugaaugu

SEQ ID NO: 1951101 - RNA, 19 nt, Artificial Sequence
  Description of Artificial Sequence: Synthetic oligonucleotide
  Antisense strand to SEQ ID NO: 1951100
acauucagacaguuucaaa

SEQ ID NO: 1951102 - RNA, 19 nt, Artificial Sequence
  Description of Artificial Sequence: Synthetic oligonucleotide
  Sense strand starting at position 670 of SEQ ID NO: 1880222
augugucuugcauacaaua

SEQ ID NO: 1951103 - RNA, 19 nt, Artificial Sequence
  Description of Artificial Sequence: Synthetic oligonucleotide
  Antisense strand to SEQ ID NO: 1951102
uauuguaugcaagacacau

SEQ ID NO: 1951104 - RNA, 19 nt, Artificial Sequence
  Description of Artificial Sequence: Synthetic oligonucleotide
  Sense strand starting at position 785 of SEQ ID NO: 1880222
gcauacuaccagugauuga

SEQ ID NO: 1951105 - RNA, 19 nt, Artificial Sequence
  Description of Artificial Sequence: Synthetic oligonucleotide
  Antisense strand to SEQ ID NO: 1951104
ucaaucacugguaguaugc

SEQ ID NO: 1951106 - RNA, 19 nt, Artificial Sequence
  Description of Artificial Sequence: Synthetic oligonucleotide
  Sense strand starting at position 792 of SEQ ID NO: 1880222
accagugauugaucacuua

SEQ ID NO: 1951107 - RNA, 19 nt, Artificial Sequence
  Description of Artificial Sequence: Synthetic oligonucleotide
  Antisense strand to SEQ ID NO: 1951106
uaagugaucaaucacuggu

SEQ ID NO: 1951108 - RNA, 19 nt, Artificial Sequence
  Description of Artificial Sequence: Synthetic oligonucleotide
  Sense strand starting at position 795 of SEQ ID NO: 1880222
agugauugaucacuuagaa

SEQ ID NO: 1951109 - RNA, 19 nt, Artificial Sequence
  Description of Artificial Sequence: Synthetic oligonucleotide
  Antisense strand to SEQ ID NO: 1951108
uucuaagugaucaaucacu

SEQ ID NO: 1951110 - RNA, 19 nt, Artificial Sequence
  Description of Artificial Sequence: Synthetic oligonucleotide
  Sense strand starting at position 994 of SEQ ID NO: 1880222
auaaauauccuagacgugu

SEQ ID NO: 1951111 - RNA, 19 nt, Artificial Sequence
  Description of Artificial Sequence: Synthetic oligonucleotide
  Antisense strand to SEQ ID NO: 1951110
acacgucuaggauauuuau

SEQ ID NO: 1951112 - RNA, 19 nt, Artificial Sequence
  Description of Artificial Sequence: Synthetic oligonucleotide
  Sense strand starting at position 998 of SEQ ID NO: 1880222
auauccuagacgugugaaa

SEQ ID NO: 1951113 - RNA, 19 nt, Artificial Sequence
  Description of Artificial Sequence: Synthetic oligonucleotide
  Antisense strand to SEQ ID NO: 1951112
uuucacacgucuaggauau

SEQ ID NO: 1951114 - RNA, 19 nt, Artificial Sequence
  Description of Artificial Sequence: Synthetic oligonucleotide
  Sense strand starting at position 1009 of SEQ ID NO: 1880222
gugugaaauuaauucucac

SEQ ID NO: 1951115 - RNA, 19 nt, Artificial Sequence
  Description of Artificial Sequence: Synthetic oligonucleotide
  Antisense strand to SEQ ID NO: 1951114
gugagaauuaauuucacac

SEQ ID NO: 1951116 - RNA, 19 nt, Artificial Sequence
  Description of Artificial Sequence: Synthetic oligonucleotide
  Sense strand starting at position 1222 of SEQ ID NO: 1880222
gugcuuguuguaaagacgu

SEQ ID NO: 1951117 - RNA, 19 nt, Artificial Sequence
  Description of Artificial Sequence: Synthetic oligonucleotide
  Antisense strand to SEQ ID NO: 1951116
acgucuuuacaacaagcac

SEQ ID NO: 1951118 - RNA, 19 nt, Artificial Sequence
  Description of Artificial Sequence: Synthetic oligonucleotide
  Sense strand starting at position 1456 of SEQ ID NO: 1880222
guggguauugcggaaggau

SEQ ID NO: 1951119 - RNA, 19 nt, Artificial Sequence
  Description of Artificial Sequence: Synthetic oligonucleotide
  Antisense strand to SEQ ID NO: 1951118
auccuuccgcaauacccac

SEQ ID NO: 1951120 - RNA, 19 nt, Artificial Sequence
  Description of Artificial Sequence: Synthetic oligonucleotide
  Sense strand starting at position 2388 of SEQ ID NO: 1880222
acaggucuccuugguugaa

SEQ ID NO: 1951121 - RNA, 19 nt, Artificial Sequence
  Description of Artificial Sequence: Synthetic oligonucleotide
  Antisense strand to SEQ ID NO: 1951120
uucaaccaaggagaccugu

SEQ ID NO: 1951122 - RNA, 19 nt, Artificial Sequence
  Description of Artificial Sequence: Synthetic oligonucleotide
  Sense strand starting at position 2389 of SEQ ID NO: 1880222
caggucuccuugguugaaa

SEQ ID NO: 1951123 - RNA, 19 nt, Artificial Sequence
  Description of Artificial Sequence: Synthetic oligonucleotide
  Antisense strand to SEQ ID NO: 1951122
uuucaaccaaggagaccug

SEQ ID NO: 1951124 - RNA, 19 nt, Artificial Sequence
  Description of Artificial Sequence: Synthetic oligonucleotide
  Sense strand starting at position 2430 of SEQ ID NO: 1880222
cagauuugguaauaguaag

SEQ ID NO: 1951125 - RNA, 19 nt, Artificial Sequence
  Description of Artificial Sequence: Synthetic oligonucleotide
  Antisense strand to SEQ ID NO: 1951124
cuuacuauuaccaaaucug

SEQ ID NO: 1951126 - RNA, 19 nt, Artificial Sequence
  Description of Artificial Sequence: Synthetic oligonucleotide
  Sense strand starting at position 2702 of SEQ ID NO: 1880222
uuggaacucugaguuggaa

SEQ ID NO: 1951127 - RNA, 19 nt, Artificial Sequence
  Description of Artificial Sequence: Synthetic oligonucleotide
  Antisense strand to SEQ ID NO: 1951126
uuccaacucagaguuccaa

SEQ ID NO: 1951128 - RNA, 19 nt, Artificial Sequence
  Description of Artificial Sequence: Synthetic oligonucleotide
  Sense strand starting at position 2704 of SEQ ID NO: 1880222
ggaacucugaguuggaauu

SEQ ID NO: 1951129 - RNA, 19 nt, Artificial Sequence
  Description of Artificial Sequence: Synthetic oligonucleotide
  Antisense strand to SEQ ID NO: 1951128
aauuccaacucagaguucc

SEQ ID NO: 1951130 - RNA, 19 nt, Artificial Sequence
  Description of Artificial Sequence: Synthetic oligonucleotide
  Sense strand starting at position 2828 of SEQ ID NO: 1880222
uuuguaaaccugugaccau

SEQ ID NO: 1951131 - RNA, 19 nt, Artificial Sequence
  Description of Artificial Sequence: Synthetic oligonucleotide
  Antisense strand to SEQ ID NO: 1951130
auggucacagguuuacaaa

SEQ ID NO: 1951132 - RNA, 19 nt, Artificial Sequence
  Description of Artificial Sequence: Synthetic oligonucleotide
  Sense strand starting at position 2835 of SEQ ID NO: 1880222
accugugaccauugugaac

SEQ ID NO: 1951133 - RNA, 19 nt, Artificial Sequence
  Description of Artificial Sequence: Synthetic oligonucleotide
  Antisense strand to SEQ ID NO: 1951132
guucacaauggucacaggu

SEQ ID NO: 1951134 - RNA, 19 nt, Artificial Sequence
  Description of Artificial Sequence: Synthetic oligonucleotide
  Sense strand starting at position 2951 of SEQ ID NO: 1880222
uuaguaauuugagaaccug

SEQ ID NO: 1951135 - RNA, 19 nt, Artificial Sequence
  Description of Artificial Sequence: Synthetic oligonucleotide
  Antisense strand to SEQ ID NO: 1951134
cagguucucaaauuacuaa

SEQ ID NO: 1951136 - RNA, 19 nt, Artificial Sequence
  Description of Artificial Sequence: Synthetic oligonucleotide
  Sense strand starting at position 3035 of SEQ ID NO: 1880222
ugcuaauuccuagagcaaa

SEQ ID NO: 1951137 - RNA, 19 nt, Artificial Sequence
  Description of Artificial Sequence: Synthetic oligonucleotide
  Antisense strand to SEQ ID NO: 1951136
uuugcucuaggaauuagca

SEQ ID NO: 1951138 - RNA, 19 nt, Artificial Sequence
  Description of Artificial Sequence: Synthetic oligonucleotide
  Sense strand starting at position 3094 of SEQ ID NO: 1880222
acacuuauguaaguaaggu

SEQ ID NO: 1951139 - RNA, 19 nt, Artificial Sequence
  Description of Artificial Sequence: Synthetic oligonucleotide
  Antisense strand to SEQ ID NO: 1951138
accuuacuuacauaagugu

SEQ ID NO: 1951140 - RNA, 19 nt, Artificial Sequence
  Description of Artificial Sequence: Synthetic oligonucleotide
  Sense strand starting at position 3274 of SEQ ID NO: 1880222
auuguuauugaaggaucaa

SEQ ID NO: 1951141 - RNA, 19 nt, Artificial Sequence
  Description of Artificial Sequence: Synthetic oligonucleotide
  Antisense strand to SEQ ID NO: 1951140
uugauccuucaauaacaau

SEQ ID NO: 1951142 - RNA, 19 nt, Artificial Sequence
  Description of Artificial Sequence: Synthetic oligonucleotide
  Sense strand starting at position 3343 of SEQ ID NO: 1880222
agcuccaugagagaguuua

SEQ ID NO: 1951143 - RNA, 19 nt, Artificial Sequence
  Description of Artificial Sequence: Synthetic oligonucleotide
  Antisense strand to SEQ ID NO: 1951142
uaaacucucucauggagcu

SEQ ID NO: 1951144 - RNA, 19 nt, Artificial Sequence
  Description of Artificial Sequence: Synthetic oligonucleotide
  Sense strand starting at position 3354 of SEQ ID NO: 1880222
agaguuuaugauggacauc

SEQ ID NO: 1951145 - RNA, 19 nt, Artificial Sequence
  Description of Artificial Sequence: Synthetic oligonucleotide
  Antisense strand to SEQ ID NO: 1951144
gauguccaucauaaacucu

SEQ ID NO: 1951146 - RNA, 19 nt, Artificial Sequence
  Description of Artificial Sequence: Synthetic oligonucleotide
  Sense strand starting at position 3491 of SEQ ID NO: 1880222
gcuaguucugaguaaccca

SEQ ID NO: 1951147 - RNA, 19 nt, Artificial Sequence
  Description of Artificial Sequence: Synthetic oligonucleotide
  Antisense strand to SEQ ID NO: 1951146
uggguuacucagaacuagc

SEQ ID NO: 1951148 - RNA, 19 nt, Artificial Sequence
  Description of Artificial Sequence: Synthetic oligonucleotide
  Sense strand starting at position 3494 of SEQ ID NO: 1880222
aguucugaguaacccaauu

SEQ ID NO: 1951149 - RNA, 19 nt, Artificial Sequence
  Description of Artificial Sequence: Synthetic oligonucleotide
  Antisense strand to SEQ ID NO: 1951148
aauuggguuacucagaacu

SEQ ID NO: 1951150 - RNA, 19 nt, Artificial Sequence
  Description of Artificial Sequence: Synthetic oligonucleotide
  Sense strand starting at position 3597 of SEQ ID NO: 1880222
uaaccagauuaugugaguu

SEQ ID NO: 1951151 - RNA, 19 nt, Artificial Sequence
  Description of Artificial Sequence: Synthetic oligonucleotide
  Antisense strand to SEQ ID NO: 1951150
aacucacauaaucugguua

SEQ ID NO: 1951152 - RNA, 19 nt, Artificial Sequence
  Description of Artificial Sequence: Synthetic oligonucleotide
  Sense strand starting at position 3601 of SEQ ID NO: 1880222
cagauuaugugaguuucca

SEQ ID NO: 1951153 - RNA, 19 nt, Artificial Sequence
  Description of Artificial Sequence: Synthetic oligonucleotide
  Antisense strand to SEQ ID NO: 1951152
uggaaacucacauaaucug

SEQ ID NO: 1951154 - RNA, 19 nt, Artificial Sequence
  Description of Artificial Sequence: Synthetic oligonucleotide
  Sense strand starting at position 3605 of SEQ ID NO: 1880222
uuaugugaguuuccauaac

SEQ ID NO: 1951155 - RNA, 19 nt, Artificial Sequence
  Description of Artificial Sequence: Synthetic oligonucleotide
  Antisense strand to SEQ ID NO: 1951154
guuauggaaacucacauaa

SEQ ID NO: 1951156 - RNA, 19 nt, Artificial Sequence
  Description of Artificial Sequence: Synthetic oligonucleotide
  Sense strand starting at position 3626 of SEQ ID NO: 1880222
agauuaacaucgcuacuau

SEQ ID NO: 1951157 - RNA, 19 nt, Artificial Sequence
  Description of Artificial Sequence: Synthetic oligonucleotide
  Antisense strand to SEQ ID NO: 1951156
auaguagcgauguuaaucu

SEQ ID NO: 1951158 - RNA, 19 nt, Artificial Sequence
  Description of Artificial Sequence: Synthetic oligonucleotide
  Sense strand starting at position 270 of SEQ ID NO: 1880223
agauuagugguaggcaaua

SEQ ID NO: 1951159 - RNA, 19 nt, Artificial Sequence
  Description of Artificial Sequence: Synthetic oligonucleotide
  Antisense strand to SEQ ID NO: 1951158
uauugccuaccacuaaucu

SEQ ID NO: 1951160 - RNA, 19 nt, Artificial Sequence
  Description of Artificial Sequence: Synthetic oligonucleotide
  Sense strand starting at position 272 of SEQ ID NO: 1880223
auuagugguaggcaauaaa

SEQ ID NO: 1951161 - RNA, 19 nt, Artificial Sequence
  Description of Artificial Sequence: Synthetic oligonucleotide
  Antisense strand to SEQ ID NO: 1951160
uuuauugccuaccacuaau

SEQ ID NO: 1951162 - RNA, 19 nt, Artificial Sequence
  Description of Artificial Sequence: Synthetic oligonucleotide
  Sense strand starting at position 319 of SEQ ID NO: 1880223
ggcacaaagucacugauaa

SEQ ID NO: 1951163 - RNA, 19 nt, Artificial Sequence
  Description of Artificial Sequence: Synthetic oligonucleotide
  Antisense strand to SEQ ID NO: 1951162
uuaucagugacuuugugcc

SEQ ID NO: 1951164 - RNA, 19 nt, Artificial Sequence
  Description of Artificial Sequence: Synthetic oligonucleotide
  Sense strand starting at position 320 of SEQ ID NO: 1880223
gcacaaagucacugauaag

SEQ ID NO: 1951165 - RNA, 19 nt, Artificial Sequence
  Description of Artificial Sequence: Synthetic oligonucleotide
  Antisense strand to SEQ ID NO: 1951164
cuuaucagugacuuugugc

SEQ ID NO: 1951166 - RNA, 19 nt, Artificial Sequence
  Description of Artificial Sequence: Synthetic oligonucleotide
  Sense strand starting at position 449 of SEQ ID NO: 1880223
aagaaagaugguugucaca

SEQ ID NO: 1951167 - RNA, 19 nt, Artificial Sequence
  Description of Artificial Sequence: Synthetic oligonucleotide
  Antisense strand to SEQ ID NO: 1951166
ugugacaaccaucuuucuu

SEQ ID NO: 1951168 - RNA, 19 nt, Artificial Sequence
  Description of Artificial Sequence: Synthetic oligonucleotide
  Sense strand starting at position 451 of SEQ ID NO: 1880223
gaaagaugguugucacauu

SEQ ID NO: 1951169 - RNA, 19 nt, Artificial Sequence
  Description of Artificial Sequence: Synthetic oligonucleotide
  Antisense strand to SEQ ID NO: 1951168
aaugugacaaccaucuuuc

SEQ ID NO: 1951170 - RNA, 19 nt, Artificial Sequence
  Description of Artificial Sequence: Synthetic oligonucleotide
  Sense strand starting at position 480 of SEQ ID NO: 1880223
cuaaauauccucugaacga

SEQ ID NO: 1951171 - RNA, 19 nt, Artificial Sequence
  Description of Artificial Sequence: Synthetic oligonucleotide
  Antisense strand to SEQ ID NO: 1951170
ucguucagaggauauuuag

SEQ ID NO: 1951172 - RNA, 19 nt, Artificial Sequence
  Description of Artificial Sequence: Synthetic oligonucleotide
  Sense strand starting at position 539 of SEQ ID NO: 1880223
auaaacaaccguugagaga

SEQ ID NO: 1951173 - RNA, 19 nt, Artificial Sequence
  Description of Artificial Sequence: Synthetic oligonucleotide
  Antisense strand to SEQ ID NO: 1951172
ucucucaacgguuguuuau

SEQ ID NO: 1951174 - RNA, 19 nt, Artificial Sequence
  Description of Artificial Sequence: Synthetic oligonucleotide
  Sense strand starting at position 548 of SEQ ID NO: 1880223
cguugagagaaaugcugaa

SEQ ID NO: 1951175 - RNA, 19 nt, Artificial Sequence
  Description of Artificial Sequence: Synthetic oligonucleotide
  Antisense strand to SEQ ID NO: 1951174
uucagcauuucucucaacg

SEQ ID NO: 1951176 - RNA, 19 nt, Artificial Sequence
  Description of Artificial Sequence: Synthetic oligonucleotide
  Sense strand starting at position 595 of SEQ ID NO: 1880223
ucaacauucccguagagcu

SEQ ID NO: 1951177 - RNA, 19 nt, Artificial Sequence
  Description of Artificial Sequence: Synthetic oligonucleotide
  Antisense strand to SEQ ID NO: 1951176
agcucuacgggaauguuga

SEQ ID NO: 1951178 - RNA, 19 nt, Artificial Sequence
  Description of Artificial Sequence: Synthetic oligonucleotide
  Sense strand starting at position 886 of SEQ ID NO: 1880223
auugacagauccucuuuga

SEQ ID NO: 1951179 - RNA, 19 nt, Artificial Sequence
  Description of Artificial Sequence: Synthetic oligonucleotide
  Antisense strand to SEQ ID NO: 1951178
ucaaagaggaucugucaau

SEQ ID NO: 1951180 - RNA, 19 nt, Artificial Sequence
  Description of Artificial Sequence: Synthetic oligonucleotide
  Sense strand starting at position 889 of SEQ ID NO: 1880223
gacagauccucuuugagau

SEQ ID NO: 1951181 - RNA, 19 nt, Artificial Sequence
  Description of Artificial Sequence: Synthetic oligonucleotide
  Antisense strand to SEQ ID NO: 1951180
aucucaaagaggaucuguc

SEQ ID NO: 1951182 - RNA, 19 nt, Artificial Sequence
  Description of Artificial Sequence: Synthetic oligonucleotide
  Sense strand starting at position 890 of SEQ ID NO: 1880223
acagauccucuuugagaua

SEQ ID NO: 1951183 - RNA, 19 nt, Artificial Sequence
  Description of Artificial Sequence: Synthetic oligonucleotide
  Antisense strand to SEQ ID NO: 1951182
uaucucaaagaggaucugu

SEQ ID NO: 1951184 - RNA, 19 nt, Artificial Sequence
  Description of Artificial Sequence: Synthetic oligonucleotide
  Sense strand starting at position 1089 of SEQ ID NO: 1880223
cagagcuuucgguugcuuu

SEQ ID NO: 1951185 - RNA, 19 nt, Artificial Sequence
  Description of Artificial Sequence: Synthetic oligonucleotide
  Antisense strand to SEQ ID NO: 1951184
aaagcaaccgaaagcucug

SEQ ID NO: 1951186 - RNA, 19 nt, Artificial Sequence
  Description of Artificial Sequence: Synthetic oligonucleotide
  Sense strand starting at position 1387 of SEQ ID NO: 1880223
ccacaaggcucaucggaaa

SEQ ID NO: 1951187 - RNA, 19 nt, Artificial Sequence
  Description of Artificial Sequence: Synthetic oligonucleotide
  Antisense strand to SEQ ID NO: 1951186
uuuccgaugagccuugugg

SEQ ID NO: 1951188 - RNA, 19 nt, Artificial Sequence
  Description of Artificial Sequence: Synthetic oligonucleotide
  Sense strand starting at position 1991 of SEQ ID NO: 1880223
acgcguuaucugucuuaca

SEQ ID NO: 1951189 - RNA, 19 nt, Artificial Sequence
  Description of Artificial Sequence: Synthetic oligonucleotide
  Antisense strand to SEQ ID NO: 1951188
uguaagacagauaacgcgu

SEQ ID NO: 1951190 - RNA, 19 nt, Artificial Sequence
  Description of Artificial Sequence: Synthetic oligonucleotide
  Sense strand starting at position 2051 of SEQ ID NO: 1880223
guguguucuguggaaccau

SEQ ID NO: 1951191 - RNA, 19 nt, Artificial Sequence
  Description of Artificial Sequence: Synthetic oligonucleotide
  Antisense strand to SEQ ID NO: 1951190
augguuccacagaacacac

SEQ ID NO: 1951192 - RNA, 19 nt, Artificial Sequence
  Description of Artificial Sequence: Synthetic oligonucleotide
  Sense strand starting at position 2223 of SEQ ID NO: 1880223
uauuauuucugauagggug

SEQ ID NO: 1951193 - RNA, 19 nt, Artificial Sequence
  Description of Artificial Sequence: Synthetic oligonucleotide
  Antisense strand to SEQ ID NO: 1951192
cacccuaucagaaauaaua

SEQ ID NO: 1951194 - RNA, 19 nt, Artificial Sequence
  Description of Artificial Sequence: Synthetic oligonucleotide
  Sense strand starting at position 2226 of SEQ ID NO: 1880223
uauuucugauagggugaaa

SEQ ID NO: 1951195 - RNA, 19 nt, Artificial Sequence
  Description of Artificial Sequence: Synthetic oligonucleotide
  Antisense strand to SEQ ID NO: 1951194
uuucacccuaucagaaaua

SEQ ID NO: 1951196 - RNA, 19 nt, Artificial Sequence
  Description of Artificial Sequence: Synthetic oligonucleotide
  Sense strand starting at position 2387 of SEQ ID NO: 1880223
ugggucuuuaaugguagau

SEQ ID NO: 1951197 - RNA, 19 nt, Artificial Sequence
  Description of Artificial Sequence: Synthetic oligonucleotide
  Antisense strand to SEQ ID NO: 1951196
aucuaccauuaaagaccca

SEQ ID NO: 1951198 - RNA, 19 nt, Artificial Sequence
  Description of Artificial Sequence: Synthetic oligonucleotide
  Sense strand starting at position 2397 of SEQ ID NO: 1880223
augguagauaaauacguua

SEQ ID NO: 1951199 - RNA, 19 nt, Artificial Sequence
  Description of Artificial Sequence: Synthetic oligonucleotide
  Antisense strand to SEQ ID NO: 1951198
uaacguauuuaucuaccau

SEQ ID NO: 1951200 - RNA, 19 nt, Artificial Sequence
  Description of Artificial Sequence: Synthetic oligonucleotide
  Sense strand starting at position 2399 of SEQ ID NO: 1880223
gguagauaaauacguuagu

SEQ ID NO: 1951201 - RNA, 19 nt, Artificial Sequence
  Description of Artificial Sequence: Synthetic oligonucleotide
  Antisense strand to SEQ ID NO: 1951200
acuaacguauuuaucuacc

SEQ ID NO: 1951202 - RNA, 19 nt, Artificial Sequence
  Description of Artificial Sequence: Synthetic oligonucleotide
  Sense strand starting at position 2400 of SEQ ID NO: 1880223
guagauaaauacguuagua

SEQ ID NO: 1951203 - RNA, 19 nt, Artificial Sequence
  Description of Artificial Sequence: Synthetic oligonucleotide
  Antisense strand to SEQ ID NO: 1951202
uacuaacguauuuaucuac

SEQ ID NO: 1951204 - RNA, 19 nt, Artificial Sequence
  Description of Artificial Sequence: Synthetic oligonucleotide
  Sense strand starting at position 3176 of SEQ ID NO: 1880223
aaagcugugugaucuuaac

SEQ ID NO: 1951205 - RNA, 19 nt, Artificial Sequence
  Description of Artificial Sequence: Synthetic oligonucleotide
  Antisense strand to SEQ ID NO: 1951204
guuaagaucacacagcuuu

SEQ ID NO: 1951206 - RNA, 19 nt, Artificial Sequence
  Description of Artificial Sequence: Synthetic oligonucleotide
  Sense strand starting at position 3184 of SEQ ID NO: 1880223
gugaucuuaacgcaaguua

SEQ ID NO: 1951207 - RNA, 19 nt, Artificial Sequence
  Description of Artificial Sequence: Synthetic oligonucleotide
  Antisense strand to SEQ ID NO: 1951206
uaacuugcguuaagaucac

SEQ ID NO: 1951208 - RNA, 19 nt, Artificial Sequence
  Description of Artificial Sequence: Synthetic oligonucleotide
  Sense strand starting at position 3193 of SEQ ID NO: 1880223
acgcaaguuacauaaggau

SEQ ID NO: 1951209 - RNA, 19 nt, Artificial Sequence
  Description of Artificial Sequence: Synthetic oligonucleotide
  Antisense strand to SEQ ID NO: 1951208
auccuuauguaacuugcgu

SEQ ID NO: 1951210 - RNA, 19 nt, Artificial Sequence
  Description of Artificial Sequence: Synthetic oligonucleotide
  Sense strand starting at position 3207 of SEQ ID NO: 1880223
aggauucuaugucucaguu

SEQ ID NO: 1951211 - RNA, 19 nt, Artificial Sequence
  Description of Artificial Sequence: Synthetic oligonucleotide
  Antisense strand to SEQ ID NO: 1951210
aacugagacauagaauccu

SEQ ID NO: 1951212 - RNA, 19 nt, Artificial Sequence
  Description of Artificial Sequence: Synthetic oligonucleotide
  Sense strand starting at position 3280 of SEQ ID NO: 1880223
accaguuacuaugcugaaa

SEQ ID NO: 1951213 - RNA, 19 nt, Artificial Sequence
  Description of Artificial Sequence: Synthetic oligonucleotide
  Antisense strand to SEQ ID NO: 1951212
uuucagcauaguaacuggu

SEQ ID NO: 1951214 - RNA, 19 nt, Artificial Sequence
  Description of Artificial Sequence: Synthetic oligonucleotide
  Sense strand starting at position 3291 of SEQ ID NO: 1880223
ugcugaaaugccuagaaca

SEQ ID NO: 1951215 - RNA, 19 nt, Artificial Sequence
  Description of Artificial Sequence: Synthetic oligonucleotide
  Antisense strand to SEQ ID NO: 1951214
uguucuaggcauuucagca

SEQ ID NO: 1951216 - RNA, 19 nt, Artificial Sequence
  Description of Artificial Sequence: Synthetic oligonucleotide
  Sense strand starting at position 3293 of SEQ ID NO: 1880223
cugaaaugccuagaacagu

SEQ ID NO: 1951217 - RNA, 19 nt, Artificial Sequence
  Description of Artificial Sequence: Synthetic oligonucleotide
  Antisense strand to SEQ ID NO: 1951216
acuguucuaggcauuucag

SEQ ID NO: 1951218 - RNA, 19 nt, Artificial Sequence
  Description of Artificial Sequence: Synthetic oligonucleotide
  Sense strand starting at position 3329 of SEQ ID NO: 1880223
aguccuaaggguuagcuau

SEQ ID NO: 1951219 - RNA, 19 nt, Artificial Sequence
  Description of Artificial Sequence: Synthetic oligonucleotide
  Antisense strand to SEQ ID NO: 1951218
auagcuaacccuuaggacu

SEQ ID NO: 1951220 - RNA, 19 nt, Artificial Sequence
  Description of Artificial Sequence: Synthetic oligonucleotide
  Sense strand starting at position 3331 of SEQ ID NO: 1880223
uccuaaggguuagcuauua

SEQ ID NO: 1951221 - RNA, 19 nt, Artificial Sequence
  Description of Artificial Sequence: Synthetic oligonucleotide
  Antisense strand to SEQ ID NO: 1951220
uaauagcuaacccuuagga

SEQ ID NO: 1951222 - RNA, 19 nt, Artificial Sequence
  Description of Artificial Sequence: Synthetic oligonucleotide
  Sense strand starting at position 3376 of SEQ ID NO: 1880223
gaggaagauuuauaauugu

SEQ ID NO: 1951223 - RNA, 19 nt, Artificial Sequence
  Description of Artificial Sequence: Synthetic oligonucleotide
  Antisense strand to SEQ ID NO: 1951222
acaauuauaaaucuuccuc

SEQ ID NO: 1951224 - RNA, 19 nt, Artificial Sequence
  Description of Artificial Sequence: Synthetic oligonucleotide
  Sense strand starting at position 3390 of SEQ ID NO: 1880223
auugucacuucuguaauca

SEQ ID NO: 1951225 - RNA, 19 nt, Artificial Sequence
  Description of Artificial Sequence: Synthetic oligonucleotide
  Antisense strand to SEQ ID NO: 1951224
ugauuacagaagugacaau

SEQ ID NO: 1951226 - RNA, 19 nt, Artificial Sequence
  Description of Artificial Sequence: Synthetic oligonucleotide
  Sense strand starting at position 3391 of SEQ ID NO: 1880223
uugucacuucuguaaucau

SEQ ID NO: 1951227 - RNA, 19 nt, Artificial Sequence
  Description of Artificial Sequence: Synthetic oligonucleotide
  Antisense strand to SEQ ID NO: 1951226
augauuacagaagugacaa

SEQ ID NO: 1951228 - RNA, 19 nt, Artificial Sequence
  Description of Artificial Sequence: Synthetic oligonucleotide
  Sense strand starting at position 3759 of SEQ ID NO: 1880223
guguuuauauucuuacuga

SEQ ID NO: 1951229 - RNA, 19 nt, Artificial Sequence
  Description of Artificial Sequence: Synthetic oligonucleotide
  Antisense strand to SEQ ID NO: 1951228
ucaguaagaauauaaacac

SEQ ID NO: 1951230 - RNA, 19 nt, Artificial Sequence
  Description of Artificial Sequence: Synthetic oligonucleotide
  Sense strand starting at position 3825 of SEQ ID NO: 1880223
guugcauuuggcugcuaua

SEQ ID NO: 1951231 - RNA, 19 nt, Artificial Sequence
  Description of Artificial Sequence: Synthetic oligonucleotide
  Antisense strand to SEQ ID NO: 1951230
uauagcagccaaaugcaac

SEQ ID NO: 1951232 - RNA, 19 nt, Artificial Sequence
  Description of Artificial Sequence: Synthetic oligonucleotide
  Sense strand starting at position 3846 of SEQ ID NO: 1880223
caaguuaucugacuuggaa

SEQ ID NO: 1951233 - RNA, 19 nt, Artificial Sequence
  Description of Artificial Sequence: Synthetic oligonucleotide
  Antisense strand to SEQ ID NO: 1951232
uuccaagucagauaacuug

SEQ ID NO: 1951234 - RNA, 19 nt, Artificial Sequence
  Description of Artificial Sequence: Synthetic oligonucleotide
  Sense strand starting at position 3848 of SEQ ID NO: 1880223
aguuaucugacuuggaaug

SEQ ID NO: 1951235 - RNA, 19 nt, Artificial Sequence
  Description of Artificial Sequence: Synthetic oligonucleotide
  Antisense strand to SEQ ID NO: 1951234
cauuccaagucagauaacu

SEQ ID NO: 1951236 - RNA, 19 nt, Artificial Sequence
  Description of Artificial Sequence: Synthetic oligonucleotide
  Sense strand starting at position 3849 of SEQ ID NO: 1880223
guuaucugacuuggaaugu

SEQ ID NO: 1951237 - RNA, 19 nt, Artificial Sequence
  Description of Artificial Sequence: Synthetic oligonucleotide
  Antisense strand to SEQ ID NO: 1951236
acauuccaagucagauaac

SEQ ID NO: 1951238 - RNA, 19 nt, Artificial Sequence
  Description of Artificial Sequence: Synthetic oligonucleotide
  Sense strand starting at position 5 of SEQ ID NO: 1880224
acaggaagcguucauggaa

SEQ ID NO: 1951239 - RNA, 19 nt, Artificial Sequence
  Description of Artificial Sequence: Synthetic oligonucleotide
  Antisense strand to SEQ ID NO: 1951238
uuccaugaacgcuuccugu

SEQ ID NO: 1951240 - RNA, 19 nt, Artificial Sequence
  Description of Artificial Sequence: Synthetic oligonucleotide
  Sense strand starting at position 356 of SEQ ID NO: 1880224
uuggaugugaucuaguuga

SEQ ID NO: 1951241 - RNA, 19 nt, Artificial Sequence
  Description of Artificial Sequence: Synthetic oligonucleotide
  Antisense strand to SEQ ID NO: 1951240
ucaacuagaucacauccaa

SEQ ID NO: 1951242 - RNA, 19 nt, Artificial Sequence
  Description of Artificial Sequence: Synthetic oligonucleotide
  Sense strand starting at position 474 of SEQ ID NO: 1880224
guuugagaacuucgaggaa

SEQ ID NO: 1951243 - RNA, 19 nt, Artificial Sequence
  Description of Artificial Sequence: Synthetic oligonucleotide
  Antisense strand to SEQ ID NO: 1951242
uuccucgaaguucucaaac

SEQ ID NO: 1951244 - RNA, 19 nt, Artificial Sequence
  Description of Artificial Sequence: Synthetic oligonucleotide
  Sense strand starting at position 699 of SEQ ID NO: 1880224
agaguuagagcacaagcuu

SEQ ID NO: 1951245 - RNA, 19 nt, Artificial Sequence
  Description of Artificial Sequence: Synthetic oligonucleotide
  Antisense strand to SEQ ID NO: 1951244
aagcuugugcucuaacucu

SEQ ID NO: 1951246 - RNA, 19 nt, Artificial Sequence
  Description of Artificial Sequence: Synthetic oligonucleotide
  Sense strand starting at position 1453 of SEQ ID NO: 1880224
gggaucaucuucccuagaa

SEQ ID NO: 1951247 - RNA, 19 nt, Artificial Sequence
  Description of Artificial Sequence: Synthetic oligonucleotide
  Antisense strand to SEQ ID NO: 1951246
uucuagggaagaugauccc

SEQ ID NO: 1951248 - RNA, 19 nt, Artificial Sequence
  Description of Artificial Sequence: Synthetic oligonucleotide
  Sense strand starting at position 1454 of SEQ ID NO: 1880224
ggaucaucuucccuagaac

SEQ ID NO: 1951249 - RNA, 19 nt, Artificial Sequence
  Description of Artificial Sequence: Synthetic oligonucleotide
  Antisense strand to SEQ ID NO: 1951248
guucuagggaagaugaucc

SEQ ID NO: 1951250 - RNA, 19 nt, Artificial Sequence
  Description of Artificial Sequence: Synthetic oligonucleotide
  Sense strand starting at position 2078 of SEQ ID NO: 1880224
gguuuagcgccugcucaua

SEQ ID NO: 1951251 - RNA, 19 nt, Artificial Sequence
  Description of Artificial Sequence: Synthetic oligonucleotide
  Antisense strand to SEQ ID NO: 1951250
uaugagcaggcgcuaaacc

SEQ ID NO: 1951252 - RNA, 19 nt, Artificial Sequence
  Description of Artificial Sequence: Synthetic oligonucleotide
  Sense strand starting at position 2113 of SEQ ID NO: 1880224
cgucuuccggugggaauuu

SEQ ID NO: 1951253 - RNA, 19 nt, Artificial Sequence
  Description of Artificial Sequence: Synthetic oligonucleotide
  Antisense strand to SEQ ID NO: 1951252
aaauucccaccggaagacg

SEQ ID NO: 1951254 - RNA, 19 nt, Artificial Sequence
  Description of Artificial Sequence: Synthetic oligonucleotide
  Sense strand starting at position 2122 of SEQ ID NO: 1880224
gugggaauuucuucacgug

SEQ ID NO: 1951255 - RNA, 19 nt, Artificial Sequence
  Description of Artificial Sequence: Synthetic oligonucleotide
  Antisense strand to SEQ ID NO: 1951254
cacgugaagaaauucccac

SEQ ID NO: 1951256 - RNA, 19 nt, Artificial Sequence
  Description of Artificial Sequence: Synthetic oligonucleotide
  Sense strand starting at position 2151 of SEQ ID NO: 1880224
ggagacugaguuuagcuuu

SEQ ID NO: 1951257 - RNA, 19 nt, Artificial Sequence
  Description of Artificial Sequence: Synthetic oligonucleotide
  Antisense strand to SEQ ID NO: 1951256
aaagcuaaacucagucucc

SEQ ID NO: 1951258 - RNA, 19 nt, Artificial Sequence
  Description of Artificial Sequence: Synthetic oligonucleotide
  Sense strand starting at position 2157 of SEQ ID NO: 1880224
ugaguuuagcuuuacugag

SEQ ID NO: 1951259 - RNA, 19 nt, Artificial Sequence
  Description of Artificial Sequence: Synthetic oligonucleotide
  Antisense strand to SEQ ID NO: 1951258
cucaguaaagcuaaacuca

SEQ ID NO: 1951260 - RNA, 19 nt, Artificial Sequence
  Description of Artificial Sequence: Synthetic oligonucleotide
  Sense strand starting at position 2182 of SEQ ID NO: 1880224
uaaauuuaggcggguaagu

SEQ ID NO: 1951261 - RNA, 19 nt, Artificial Sequence
  Description of Artificial Sequence: Synthetic oligonucleotide
  Antisense strand to SEQ ID NO: 1951260
acuuacccgccuaaauuua

SEQ ID NO: 1951262 - RNA, 19 nt, Artificial Sequence
  Description of Artificial Sequence: Synthetic oligonucleotide
  Sense strand starting at position 2217 of SEQ ID NO: 1880224
gugguuccugcguuuaaau

SEQ ID NO: 1951263 - RNA, 19 nt, Artificial Sequence
  Description of Artificial Sequence: Synthetic oligonucleotide
  Antisense strand to SEQ ID NO: 1951262
auuuaaacgcaggaaccac

SEQ ID NO: 1951264 - RNA, 19 nt, Artificial Sequence
  Description of Artificial Sequence: Synthetic oligonucleotide
  Sense strand starting at position 2475 of SEQ ID NO: 1880224
agccacaugcuuugaauuu

SEQ ID NO: 1951265 - RNA, 19 nt, Artificial Sequence
  Description of Artificial Sequence: Synthetic oligonucleotide
  Antisense strand to SEQ ID NO: 1951264
aaauucaaagcauguggcu

SEQ ID NO: 1951266 - RNA, 19 nt, Artificial Sequence
  Description of Artificial Sequence: Synthetic oligonucleotide
  Sense strand starting at position 2499 of SEQ ID NO: 1880224
guuuacucuggguauaaug

SEQ ID NO: 1951267 - RNA, 19 nt, Artificial Sequence
  Description of Artificial Sequence: Synthetic oligonucleotide
  Antisense strand to SEQ ID NO: 1951266
cauuauacccagaguaaac

SEQ ID NO: 1951268 - RNA, 19 nt, Artificial Sequence
  Description of Artificial Sequence: Synthetic oligonucleotide
  Sense strand starting at position 2510 of SEQ ID NO: 1880224
guauaaugcagagaugcaa

SEQ ID NO: 1951269 - RNA, 19 nt, Artificial Sequence
  Description of Artificial Sequence: Synthetic oligonucleotide
  Antisense strand to SEQ ID NO: 1951268
uugcaucucugcauuauac

SEQ ID NO: 1951270 - RNA, 19 nt, Artificial Sequence
  Description of Artificial Sequence: Synthetic oligonucleotide
  Sense strand starting at position 2528 of SEQ ID NO: 1880224
aaaucugagccaggguaau

SEQ ID NO: 1951271 - RNA, 19 nt, Artificial Sequence
  Description of Artificial Sequence: Synthetic oligonucleotide
  Antisense strand to SEQ ID NO: 1951270
auuacccuggcucagauuu

SEQ ID NO: 1951272 - RNA, 19 nt, Artificial Sequence
  Description of Artificial Sequence: Synthetic oligonucleotide
  Sense strand starting at position 2538 of SEQ ID NO: 1880224
caggguaauuguuuagaaa

SEQ ID NO: 1951273 - RNA, 19 nt, Artificial Sequence
  Description of Artificial Sequence: Synthetic oligonucleotide
  Antisense strand to SEQ ID NO: 1951272
uuucuaaacaauuacccug

SEQ ID NO: 1951274 - RNA, 19 nt, Artificial Sequence
  Description of Artificial Sequence: Synthetic oligonucleotide
  Sense strand starting at position 2589 of SEQ ID NO: 1880224
ggucuugaacuagaguagu

SEQ ID NO: 1951275 - RNA, 19 nt, Artificial Sequence
  Description of Artificial Sequence: Synthetic oligonucleotide
  Antisense strand to SEQ ID NO: 1951274
acuacucuaguucaagacc

SEQ ID NO: 1951276 - RNA, 19 nt, Artificial Sequence
  Description of Artificial Sequence: Synthetic oligonucleotide
  Sense strand starting at position 2705 of SEQ ID NO: 1880224
caucuuuaggaguaagucu

SEQ ID NO: 1951277 - RNA, 19 nt, Artificial Sequence
  Description of Artificial Sequence: Synthetic oligonucleotide
  Antisense strand to SEQ ID NO: 1951276
agacuuacuccuaaagaug

SEQ ID NO: 1951278 - RNA, 19 nt, Artificial Sequence
  Description of Artificial Sequence: Synthetic oligonucleotide
  Sense strand starting at position 2824 of SEQ ID NO: 1880224
guguucuauuuccuagacu

SEQ ID NO: 1951279 - RNA, 19 nt, Artificial Sequence
  Description of Artificial Sequence: Synthetic oligonucleotide
  Antisense strand to SEQ ID NO: 1951278
agucuaggaaauagaacac

SEQ ID NO: 1951280 - RNA, 19 nt, Artificial Sequence
  Description of Artificial Sequence: Synthetic oligonucleotide
  Sense strand starting at position 3111 of SEQ ID NO: 1880224
ggcaguaucuuauuuaucu

SEQ ID NO: 1951281 - RNA, 19 nt, Artificial Sequence
  Description of Artificial Sequence: Synthetic oligonucleotide
  Antisense strand to SEQ ID NO: 1951280
agauaaauaagauacugcc

SEQ ID NO: 1951282 - RNA, 19 nt, Artificial Sequence
  Description of Artificial Sequence: Synthetic oligonucleotide
  Sense strand starting at position 3112 of SEQ ID NO: 1880224
gcaguaucuuauuuaucuu

SEQ ID NO: 1951283 - RNA, 19 nt, Artificial Sequence
  Description of Artificial Sequence: Synthetic oligonucleotide
  Antisense strand to SEQ ID NO: 1951282
aagauaaauaagauacugc

SEQ ID NO: 1951284 - RNA, 19 nt, Artificial Sequence
  Description of Artificial Sequence: Synthetic oligonucleotide
  Sense strand starting at position 3157 of SEQ ID NO: 1880224
cggucuuuaauggaucauu

SEQ ID NO: 1951285 - RNA, 19 nt, Artificial Sequence
  Description of Artificial Sequence: Synthetic oligonucleotide
  Antisense strand to SEQ ID NO: 1951284
aaugauccauuaaagaccg

SEQ ID NO: 1951286 - RNA, 19 nt, Artificial Sequence
  Description of Artificial Sequence: Synthetic oligonucleotide
  Sense strand starting at position 3298 of SEQ ID NO: 1880224
cucagaagacuguggauua

SEQ ID NO: 1951287 - RNA, 19 nt, Artificial Sequence
  Description of Artificial Sequence: Synthetic oligonucleotide
  Antisense strand to SEQ ID NO: 1951286
uaauccacagucuucugag

SEQ ID NO: 1951288 - RNA, 19 nt, Artificial Sequence
  Description of Artificial Sequence: Synthetic oligonucleotide
  Sense strand starting at position 3308 of SEQ ID NO: 1880224
uguggauuaagauguacag

SEQ ID NO: 1951289 - RNA, 19 nt, Artificial Sequence
  Description of Artificial Sequence: Synthetic oligonucleotide
  Antisense strand to SEQ ID NO: 1951288
cuguacaucuuaauccaca

SEQ ID NO: 1951290 - RNA, 19 nt, Artificial Sequence
  Description of Artificial Sequence: Synthetic oligonucleotide
  Sense strand starting at position 3333 of SEQ ID NO: 1880224
acugauaucucaucuugua

SEQ ID NO: 1951291 - RNA, 19 nt, Artificial Sequence
  Description of Artificial Sequence: Synthetic oligonucleotide
  Antisense strand to SEQ ID NO: 1951290
uacaagaugagauaucagu

SEQ ID NO: 1951292 - RNA, 19 nt, Artificial Sequence
  Description of Artificial Sequence: Synthetic oligonucleotide
  Sense strand starting at position 3345 of SEQ ID NO: 1880224
ucuuguaauagguaugagu

SEQ ID NO: 1951293 - RNA, 19 nt, Artificial Sequence
  Description of Artificial Sequence: Synthetic oligonucleotide
  Antisense strand to SEQ ID NO: 1951292
acucauaccuauuacaaga

SEQ ID NO: 1951294 - RNA, 19 nt, Artificial Sequence
  Description of Artificial Sequence: Synthetic oligonucleotide
  Sense strand starting at position 3385 of SEQ ID NO: 1880224
gggccugugacagaugaug

SEQ ID NO: 1951295 - RNA, 19 nt, Artificial Sequence
  Description of Artificial Sequence: Synthetic oligonucleotide
  Antisense strand to SEQ ID NO: 1951294
caucaucugucacaggccc

SEQ ID NO: 1951296 - RNA, 19 nt, Artificial Sequence
  Description of Artificial Sequence: Synthetic oligonucleotide
  Sense strand starting at position 3387 of SEQ ID NO: 1880224
gccugugacagaugaugaa

SEQ ID NO: 1951297 - RNA, 19 nt, Artificial Sequence
  Description of Artificial Sequence: Synthetic oligonucleotide
  Antisense strand to SEQ ID NO: 1951296
uucaucaucugucacaggc

SEQ ID NO: 1951298 - RNA, 19 nt, Artificial Sequence
  Description of Artificial Sequence: Synthetic oligonucleotide
  Sense strand starting at position 3467 of SEQ ID NO: 1880224
uagaaacuguggguaagua

SEQ ID NO: 1951299 - RNA, 19 nt, Artificial Sequence
  Description of Artificial Sequence: Synthetic oligonucleotide
  Antisense strand to SEQ ID NO: 1951298
uacuuacccacaguuucua

SEQ ID NO: 1951300 - RNA, 19 nt, Artificial Sequence
  Description of Artificial Sequence: Synthetic oligonucleotide
  Sense strand starting at position 3549 of SEQ ID NO: 1880224
gaauaaccagacugguuua

SEQ ID NO: 1951301 - RNA, 19 nt, Artificial Sequence
  Description of Artificial Sequence: Synthetic oligonucleotide
  Antisense strand to SEQ ID NO: 1951300
uaaaccagucugguuauuc

SEQ ID NO: 1951302 - RNA, 19 nt, Artificial Sequence
  Description of Artificial Sequence: Synthetic oligonucleotide
  Sense strand starting at position 3639 of SEQ ID NO: 1880224
uugcccuuggauuaauaau

SEQ ID NO: 1951303 - RNA, 19 nt, Artificial Sequence
  Description of Artificial Sequence: Synthetic oligonucleotide
  Antisense strand to SEQ ID NO: 1951302
auuauuaauccaagggcaa

SEQ ID NO: 1951304 - RNA, 19 nt, Artificial Sequence
  Description of Artificial Sequence: Synthetic oligonucleotide
  Sense strand starting at position 3656 of SEQ ID NO: 1880224
auagauagucuguauuaug

SEQ ID NO: 1951305 - RNA, 19 nt, Artificial Sequence
  Description of Artificial Sequence: Synthetic oligonucleotide
  Antisense strand to SEQ ID NO: 1951304
cauaauacagacuaucuau

SEQ ID NO: 1951306 - RNA, 19 nt, Artificial Sequence
  Description of Artificial Sequence: Synthetic oligonucleotide
  Sense strand starting at position 3666 of SEQ ID NO: 1880224
uguauuaugcuagauacac

SEQ ID NO: 1951307 - RNA, 19 nt, Artificial Sequence
  Description of Artificial Sequence: Synthetic oligonucleotide
  Antisense strand to SEQ ID NO: 1951306
guguaucuagcauaauaca

SEQ ID NO: 1951308 - RNA, 19 nt, Artificial Sequence
  Description of Artificial Sequence: Synthetic oligonucleotide
  Sense strand starting at position 3720 of SEQ ID NO: 1880224
ucuggcauugauuaaauau

SEQ ID NO: 1951309 - RNA, 19 nt, Artificial Sequence
  Description of Artificial Sequence: Synthetic oligonucleotide
  Antisense strand to SEQ ID NO: 1951308
auauuuaaucaaugccaga

SEQ ID NO: 1951310 - RNA, 19 nt, Artificial Sequence
  Description of Artificial Sequence: Synthetic oligonucleotide
  Sense strand starting at position 3741 of SEQ ID NO: 1880224
gggagucauaggugaagau

SEQ ID NO: 1951311 - RNA, 19 nt, Artificial Sequence
  Description of Artificial Sequence: Synthetic oligonucleotide
  Antisense strand to SEQ ID NO: 1951310
aucuucaccuaugacuccc

SEQ ID NO: 1951312 - RNA, 19 nt, Artificial Sequence
  Description of Artificial Sequence: Synthetic oligonucleotide
  Sense strand starting at position 3763 of SEQ ID NO: 1880224
gucucugccauugaggaaa

SEQ ID NO: 1951313 - RNA, 19 nt, Artificial Sequence
  Description of Artificial Sequence: Synthetic oligonucleotide
  Antisense strand to SEQ ID NO: 1951312
uuuccucaauggcagagac

SEQ ID NO: 1951314 - RNA, 19 nt, Artificial Sequence
  Description of Artificial Sequence: Synthetic oligonucleotide
  Sense strand starting at position 3791 of SEQ ID NO: 1880224
ggaaguguucaagaaguug

SEQ ID NO: 1951315 - RNA, 19 nt, Artificial Sequence
  Description of Artificial Sequence: Synthetic oligonucleotide
  Antisense strand to SEQ ID NO: 1951314
caacuucuugaacacuucc

SEQ ID NO: 1951316 - RNA, 19 nt, Artificial Sequence
  Description of Artificial Sequence: Synthetic oligonucleotide
  Sense strand starting at position 3837 of SEQ ID NO: 1880224
aauagaauugaucguguaa

SEQ ID NO: 1951317 - RNA, 19 nt, Artificial Sequence
  Description of Artificial Sequence: Synthetic oligonucleotide
  Antisense strand to SEQ ID NO: 1951316
uuacacgaucaauucuauu

SEQ ID NO: 1951318 - RNA, 19 nt, Artificial Sequence
  Description of Artificial Sequence: Synthetic oligonucleotide
  Sense strand starting at position 44 of SEQ ID NO: 1880225
acaggaagcguucauggaa

SEQ ID NO: 1951319 - RNA, 19 nt, Artificial Sequence
  Description of Artificial Sequence: Synthetic oligonucleotide
  Antisense strand to SEQ ID NO: 1951318
uuccaugaacgcuuccugu

SEQ ID NO: 1951320 - RNA, 19 nt, Artificial Sequence
  Description of Artificial Sequence: Synthetic oligonucleotide
  Sense strand starting at position 395 of SEQ ID NO: 1880225
uuggaugugaucuaguuga

SEQ ID NO: 1951321 - RNA, 19 nt, Artificial Sequence
  Description of Artificial Sequence: Synthetic oligonucleotide
  Antisense strand to SEQ ID NO: 1951320
ucaacuagaucacauccaa

SEQ ID NO: 1951322 - RNA, 19 nt, Artificial Sequence
  Description of Artificial Sequence: Synthetic oligonucleotide
  Sense strand starting at position 513 of SEQ ID NO: 1880225
guuugagaacuucgaggaa

SEQ ID NO: 1951323 - RNA, 19 nt, Artificial Sequence
  Description of Artificial Sequence: Synthetic oligonucleotide
  Antisense strand to SEQ ID NO: 1951322
uuccucgaaguucucaaac

SEQ ID NO: 1951324 - RNA, 19 nt, Artificial Sequence
  Description of Artificial Sequence: Synthetic oligonucleotide
  Sense strand starting at position 738 of SEQ ID NO: 1880225
agaguuagagcacaagcuu

SEQ ID NO: 1951325 - RNA, 19 nt, Artificial Sequence
  Description of Artificial Sequence: Synthetic oligonucleotide
  Antisense strand to SEQ ID NO: 1951324
aagcuugugcucuaacucu

SEQ ID NO: 1951326 - RNA, 19 nt, Artificial Sequence
  Description of Artificial Sequence: Synthetic oligonucleotide
  Sense strand starting at position 1492 of SEQ ID NO: 1880225
gggaucaucuucccuagaa

SEQ ID NO: 1951327 - RNA, 19 nt, Artificial Sequence
  Description of Artificial Sequence: Synthetic oligonucleotide
  Antisense strand to SEQ ID NO: 1951326
uucuagggaagaugauccc

SEQ ID NO: 1951328 - RNA, 19 nt, Artificial Sequence
  Description of Artificial Sequence: Synthetic oligonucleotide
  Sense strand starting at position 1493 of SEQ ID NO: 1880225
ggaucaucuucccuagaac

SEQ ID NO: 1951329 - RNA, 19 nt, Artificial Sequence
  Description of Artificial Sequence: Synthetic oligonucleotide
  Antisense strand to SEQ ID NO: 1951328
guucuagggaagaugaucc

SEQ ID NO: 1951330 - RNA, 19 nt, Artificial Sequence
  Description of Artificial Sequence: Synthetic oligonucleotide
  Sense strand starting at position 2117 of SEQ ID NO: 1880225
gguuuagcgccugcucaua

SEQ ID NO: 1951331 - RNA, 19 nt, Artificial Sequence
  Description of Artificial Sequence: Synthetic oligonucleotide
  Antisense strand to SEQ ID NO: 1951330
uaugagcaggcgcuaaacc

SEQ ID NO: 1951332 - RNA, 19 nt, Artificial Sequence
  Description of Artificial Sequence: Synthetic oligonucleotide
  Sense strand starting at position 2152 of SEQ ID NO: 1880225
cgucuuccggugggaauuu

SEQ ID NO: 1951333 - RNA, 19 nt, Artificial Sequence
  Description of Artificial Sequence: Synthetic oligonucleotide
  Antisense strand to SEQ ID NO: 1951332
aaauucccaccggaagacg

SEQ ID NO: 1951334 - RNA, 19 nt, Artificial Sequence
  Description of Artificial Sequence: Synthetic oligonucleotide
  Sense strand starting at position 2161 of SEQ ID NO: 1880225
gugggaauuucuucacgug

SEQ ID NO: 1951335 - RNA, 19 nt, Artificial Sequence
  Description of Artificial Sequence: Synthetic oligonucleotide
  Antisense strand to SEQ ID NO: 1951334
cacgugaagaaauucccac

SEQ ID NO: 1951336 - RNA, 19 nt, Artificial Sequence
  Description of Artificial Sequence: Synthetic oligonucleotide
  Sense strand starting at position 2190 of SEQ ID NO: 1880225
ggagacugaguuuagcuuu

SEQ ID NO: 1951337 - RNA, 19 nt, Artificial Sequence
  Description of Artificial Sequence: Synthetic oligonucleotide
  Antisense strand to SEQ ID NO: 1951336
aaagcuaaacucagucucc

SEQ ID NO: 1951338 - RNA, 19 nt, Artificial Sequence
  Description of Artificial Sequence: Synthetic oligonucleotide
  Sense strand starting at position 2196 of SEQ ID NO: 1880225
ugaguuuagcuuuacugag

SEQ ID NO: 1951339 - RNA, 19 nt, Artificial Sequence
  Description of Artificial Sequence: Synthetic oligonucleotide
  Antisense strand to SEQ ID NO: 1951338
cucaguaaagcuaaacuca

SEQ ID NO: 1951340 - RNA, 19 nt, Artificial Sequence
  Description of Artificial Sequence: Synthetic oligonucleotide
  Sense strand starting at position 2221 of SEQ ID NO: 1880225
uaaauuuaggcggguaagu

SEQ ID NO: 1951341 - RNA, 19 nt, Artificial Sequence
  Description of Artificial Sequence: Synthetic oligonucleotide
  Antisense strand to SEQ ID NO: 1951340
acuuacccgccuaaauuua

SEQ ID NO: 1951342 - RNA, 19 nt, Artificial Sequence
  Description of Artificial Sequence: Synthetic oligonucleotide
  Sense strand starting at position 2256 of SEQ ID NO: 1880225
gugguuccugcguuuaaau

SEQ ID NO: 1951343 - RNA, 19 nt, Artificial Sequence
  Description of Artificial Sequence: Synthetic oligonucleotide
  Antisense strand to SEQ ID NO: 1951342
auuuaaacgcaggaaccac

SEQ ID NO: 1951344 - RNA, 19 nt, Artificial Sequence
  Description of Artificial Sequence: Synthetic oligonucleotide
  Sense strand starting at position 2514 of SEQ ID NO: 1880225
agccacaugcuuugaauuu

SEQ ID NO: 1951345 - RNA, 19 nt, Artificial Sequence
  Description of Artificial Sequence: Synthetic oligonucleotide
  Antisense strand to SEQ ID NO: 1951344
aaauucaaagcauguggcu

SEQ ID NO: 1951346 - RNA, 19 nt, Artificial Sequence
  Description of Artificial Sequence: Synthetic oligonucleotide
  Sense strand starting at position 2538 of SEQ ID NO: 1880225
guuuacucuggguauaaug

SEQ ID NO: 1951347 - RNA, 19 nt, Artificial Sequence
  Description of Artificial Sequence: Synthetic oligonucleotide
  Antisense strand to SEQ ID NO: 1951346
cauuauacccagaguaaac

SEQ ID NO: 1951348 - RNA, 19 nt, Artificial Sequence
  Description of Artificial Sequence: Synthetic oligonucleotide
  Sense strand starting at position 2549 of SEQ ID NO: 1880225
guauaaugcagagaugcaa

SEQ ID NO: 1951349 - RNA, 19 nt, Artificial Sequence
  Description of Artificial Sequence: Synthetic oligonucleotide
  Antisense strand to SEQ ID NO: 1951348
uugcaucucugcauuauac

SEQ ID NO: 1951350 - RNA, 19 nt, Artificial Sequence
  Description of Artificial Sequence: Synthetic oligonucleotide
  Sense strand starting at position 2567 of SEQ ID NO: 1880225
aaaucugagccaggguaau

SEQ ID NO: 1951351 - RNA, 19 nt, Artificial Sequence
  Description of Artificial Sequence: Synthetic oligonucleotide
  Antisense strand to SEQ ID NO: 1951350
auuacccuggcucagauuu

SEQ ID NO: 1951352 - RNA, 19 nt, Artificial Sequence
  Description of Artificial Sequence: Synthetic oligonucleotide
  Sense strand starting at position 2577 of SEQ ID NO: 1880225
caggguaauuguuuagaaa

SEQ ID NO: 1951353 - RNA, 19 nt, Artificial Sequence
  Description of Artificial Sequence: Synthetic oligonucleotide
  Antisense strand to SEQ ID NO: 1951352
uuucuaaacaauuacccug

SEQ ID NO: 1951354 - RNA, 19 nt, Artificial Sequence
  Description of Artificial Sequence: Synthetic oligonucleotide
  Sense strand starting at position 2628 of SEQ ID NO: 1880225
ggucuugaacuagaguagu

SEQ ID NO: 1951355 - RNA, 19 nt, Artificial Sequence
  Description of Artificial Sequence: Synthetic oligonucleotide
  Antisense strand to SEQ ID NO: 1951354
acuacucuaguucaagacc

SEQ ID NO: 1951356 - RNA, 19 nt, Artificial Sequence
  Description of Artificial Sequence: Synthetic oligonucleotide
  Sense strand starting at position 2744 of SEQ ID NO: 1880225
caucuuuaggaguaagucu

SEQ ID NO: 1951357 - RNA, 19 nt, Artificial Sequence
  Description of Artificial Sequence: Synthetic oligonucleotide
  Antisense strand to SEQ ID NO: 1951356
agacuuacuccuaaagaug

SEQ ID NO: 1951358 - RNA, 19 nt, Artificial Sequence
  Description of Artificial Sequence: Synthetic oligonucleotide
  Sense strand starting at position 2863 of SEQ ID NO: 1880225
guguucuauuuccuagacu

SEQ ID NO: 1951359 - RNA, 19 nt, Artificial Sequence
  Description of Artificial Sequence: Synthetic oligonucleotide
  Antisense strand to SEQ ID NO: 1951358
agucuaggaaauagaacac

SEQ ID NO: 1951360 - RNA, 19 nt, Artificial Sequence
  Description of Artificial Sequence: Synthetic oligonucleotide
  Sense strand starting at position 3150 of SEQ ID NO: 1880225
ggcaguaucuuauuuaucu

SEQ ID NO: 1951361 - RNA, 19 nt, Artificial Sequence
  Description of Artificial Sequence: Synthetic oligonucleotide
  Antisense strand to SEQ ID NO: 1951360
agauaaauaagauacugcc

SEQ ID NO: 1951362 - RNA, 19 nt, Artificial Sequence
  Description of Artificial Sequence: Synthetic oligonucleotide
  Sense strand starting at position 3151 of SEQ ID NO: 1880225
gcaguaucuuauuuaucuu

SEQ ID NO: 1951363 - RNA, 19 nt, Artificial Sequence
  Description of Artificial Sequence: Synthetic oligonucleotide
  Antisense strand to SEQ ID NO: 1951362
aagauaaauaagauacugc

SEQ ID NO: 1951364 - RNA, 19 nt, Artificial Sequence
  Description of Artificial Sequence: Synthetic oligonucleotide
  Sense strand starting at position 3196 of SEQ ID NO: 1880225
cggucuuuaauggaucauu

SEQ ID NO: 1951365 - RNA, 19 nt, Artificial Sequence
  Description of Artificial Sequence: Synthetic oligonucleotide
  Antisense strand to SEQ ID NO: 1951364
aaugauccauuaaagaccg

SEQ ID NO: 1951366 - RNA, 19 nt, Artificial Sequence
  Description of Artificial Sequence: Synthetic oligonucleotide
  Sense strand starting at position 3337 of SEQ ID NO: 1880225
cucagaagacuguggauua

SEQ ID NO: 1951367 - RNA, 19 nt, Artificial Sequence
  Description of Artificial Sequence: Synthetic oligonucleotide
  Antisense strand to SEQ ID NO: 1951366
uaauccacagucuucugag

SEQ ID NO: 1951368 - RNA, 19 nt, Artificial Sequence
  Description of Artificial Sequence: Synthetic oligonucleotide
  Sense strand starting at position 3347 of SEQ ID NO: 1880225
uguggauuaagauguacag

SEQ ID NO: 1951369 - RNA, 19 nt, Artificial Sequence
  Description of Artificial Sequence: Synthetic oligonucleotide
  Antisense strand to SEQ ID NO: 1951368
cuguacaucuuaauccaca

SEQ ID NO: 1951370 - RNA, 19 nt, Artificial Sequence
  Description of Artificial Sequence: Synthetic oligonucleotide
  Sense strand starting at position 3372 of SEQ ID NO: 1880225
acugauaucucaucuugua

SEQ ID NO: 1951371 - RNA, 19 nt, Artificial Sequence
  Description of Artificial Sequence: Synthetic oligonucleotide
  Antisense strand to SEQ ID NO: 1951370
uacaagaugagauaucagu

SEQ ID NO: 1951372 - RNA, 19 nt, Artificial Sequence
  Description of Artificial Sequence: Synthetic oligonucleotide
  Sense strand starting at position 3384 of SEQ ID NO: 1880225
ucuuguaauagguaugagu

SEQ ID NO: 1951373 - RNA, 19 nt, Artificial Sequence
  Description of Artificial Sequence: Synthetic oligonucleotide
  Antisense strand to SEQ ID NO: 1951372
acucauaccuauuacaaga

SEQ ID NO: 1951374 - RNA, 19 nt, Artificial Sequence
  Description of Artificial Sequence: Synthetic oligonucleotide
  Sense strand starting at position 3424 of SEQ ID NO: 1880225
gggccugugacagaugaug

SEQ ID NO: 1951375 - RNA, 19 nt, Artificial Sequence
  Description of Artificial Sequence: Synthetic oligonucleotide
  Antisense strand to SEQ ID NO: 1951374
caucaucugucacaggccc

SEQ ID NO: 1951376 - RNA, 19 nt, Artificial Sequence
  Description of Artificial Sequence: Synthetic oligonucleotide
  Sense strand starting at position 3426 of SEQ ID NO: 1880225
gccugugacagaugaugaa

SEQ ID NO: 1951377 - RNA, 19 nt, Artificial Sequence
  Description of Artificial Sequence: Synthetic oligonucleotide
  Antisense strand to SEQ ID NO: 1951376
uucaucaucugucacaggc

SEQ ID NO: 1951378 - RNA, 19 nt, Artificial Sequence
  Description of Artificial Sequence: Synthetic oligonucleotide
  Sense strand starting at position 3506 of SEQ ID NO: 1880225
uagaaacuguggguaagua

SEQ ID NO: 1951379 - RNA, 19 nt, Artificial Sequence
  Description of Artificial Sequence: Synthetic oligonucleotide
  Antisense strand to SEQ ID NO: 1951378
uacuuacccacaguuucua

SEQ ID NO: 1951380 - RNA, 19 nt, Artificial Sequence
  Description of Artificial Sequence: Synthetic oligonucleotide
  Sense strand starting at position 3588 of SEQ ID NO: 1880225
gaauaaccagacugguuua

SEQ ID NO: 1951381 - RNA, 19 nt, Artificial Sequence
  Description of Artificial Sequence: Synthetic oligonucleotide
  Antisense strand to SEQ ID NO: 1951380
uaaaccagucugguuauuc

SEQ ID NO: 1951382 - RNA, 19 nt, Artificial Sequence
  Description of Artificial Sequence: Synthetic oligonucleotide
  Sense strand starting at position 3678 of SEQ ID NO: 1880225
uugcccuuggauuaauaau

SEQ ID NO: 1951383 - RNA, 19 nt, Artificial Sequence
  Description of Artificial Sequence: Synthetic oligonucleotide
  Antisense strand to SEQ ID NO: 1951382
auuauuaauccaagggcaa

SEQ ID NO: 1951384 - RNA, 19 nt, Artificial Sequence
  Description of Artificial Sequence: Synthetic oligonucleotide
  Sense strand starting at position 3695 of SEQ ID NO: 1880225
auagauagucuguauuaug

SEQ ID NO: 1951385 - RNA, 19 nt, Artificial Sequence
  Description of Artificial Sequence: Synthetic oligonucleotide
  Antisense strand to SEQ ID NO: 1951384
cauaauacagacuaucuau

SEQ ID NO: 1951386 - RNA, 19 nt, Artificial Sequence
  Description of Artificial Sequence: Synthetic oligonucleotide
  Sense strand starting at position 3705 of SEQ ID NO: 1880225
uguauuaugcuagauacac

SEQ ID NO: 1951387 - RNA, 19 nt, Artificial Sequence
  Description of Artificial Sequence: Synthetic oligonucleotide
  Antisense strand to SEQ ID NO: 1951386
guguaucuagcauaauaca

SEQ ID NO: 1951388 - RNA, 19 nt, Artificial Sequence
  Description of Artificial Sequence: Synthetic oligonucleotide
  Sense strand starting at position 3759 of SEQ ID NO: 1880225
ucuggcauugauuaaauau

SEQ ID NO: 1951389 - RNA, 19 nt, Artificial Sequence
  Description of Artificial Sequence: Synthetic oligonucleotide
  Antisense strand to SEQ ID NO: 1951388
auauuuaaucaaugccaga

SEQ ID NO: 1951390 - RNA, 19 nt, Artificial Sequence
  Description of Artificial Sequence: Synthetic oligonucleotide
  Sense strand starting at position 3780 of SEQ ID NO: 1880225
gggagucauaggugaagau

SEQ ID NO: 1951391 - RNA, 19 nt, Artificial Sequence
  Description of Artificial Sequence: Synthetic oligonucleotide
  Antisense strand to SEQ ID NO: 1951390
aucuucaccuaugacuccc

SEQ ID NO: 1951392 - RNA, 19 nt, Artificial Sequence
  Description of Artificial Sequence: Synthetic oligonucleotide
  Sense strand starting at position 3802 of SEQ ID NO: 1880225
gucucugccauugaggaaa

SEQ ID NO: 1951393 - RNA, 19 nt, Artificial Sequence
  Description of Artificial Sequence: Synthetic oligonucleotide
  Antisense strand to SEQ ID NO: 1951392
uuuccucaauggcagagac

SEQ ID NO: 1951394 - RNA, 19 nt, Artificial Sequence
  Description of Artificial Sequence: Synthetic oligonucleotide
  Sense strand starting at position 3830 of SEQ ID NO: 1880225
ggaaguguucaagaaguug

SEQ ID NO: 1951395 - RNA, 19 nt, Artificial Sequence
  Description of Artificial Sequence: Synthetic oligonucleotide
  Antisense strand to SEQ ID NO: 1951394
caacuucuugaacacuucc

SEQ ID NO: 1951396 - RNA, 19 nt, Artificial Sequence
  Description of Artificial Sequence: Synthetic oligonucleotide
  Sense strand starting at position 3876 of SEQ ID NO: 1880225
aauagaauugaucguguaa

SEQ ID NO: 1951397 - RNA, 19 nt, Artificial Sequence
  Description of Artificial Sequence: Synthetic oligonucleotide
  Antisense strand to SEQ ID NO: 1951396
uuacacgaucaauucuauu

SEQ ID NO: 1951398 - RNA, 19 nt, Artificial Sequence
  Description of Artificial Sequence: Synthetic oligonucleotide
  Sense strand starting at position 20 of SEQ ID NO: 1880226
acauauuuauccuuucguu

SEQ ID NO: 1951399 - RNA, 19 nt, Artificial Sequence
  Description of Artificial Sequence: Synthetic oligonucleotide
  Antisense strand to SEQ ID NO: 1951398
aacgaaaggauaaauaugu

SEQ ID NO: 1951400 - RNA, 19 nt, Artificial Sequence
  Description of Artificial Sequence: Synthetic oligonucleotide
  Sense strand starting at position 70 of SEQ ID NO: 1880226
agcacaaauguuugcuuaa

SEQ ID NO: 1951401 - RNA, 19 nt, Artificial Sequence
  Description of Artificial Sequence: Synthetic oligonucleotide
  Antisense strand to SEQ ID NO: 1951400
uuaagcaaacauuugugcu

SEQ ID NO: 1951402 - RNA, 19 nt, Artificial Sequence
  Description of Artificial Sequence: Synthetic oligonucleotide
  Sense strand starting at position 73 of SEQ ID NO: 1880226
acaaauguuugcuuaauag

SEQ ID NO: 1951403 - RNA, 19 nt, Artificial Sequence
  Description of Artificial Sequence: Synthetic oligonucleotide
  Antisense strand to SEQ ID NO: 1951402
cuauuaagcaaacauuugu

SEQ ID NO: 1951404 - RNA, 19 nt, Artificial Sequence
  Description of Artificial Sequence: Synthetic oligonucleotide
  Sense strand starting at position 79 of SEQ ID NO: 1880226
guuugcuuaauagaucgaa

SEQ ID NO: 1951405 - RNA, 19 nt, Artificial Sequence
  Description of Artificial Sequence: Synthetic oligonucleotide
  Antisense strand to SEQ ID NO: 1951404
uucgaucuauuaagcaaac

SEQ ID NO: 1951406 - RNA, 19 nt, Artificial Sequence
  Description of Artificial Sequence: Synthetic oligonucleotide
  Sense strand starting at position 88 of SEQ ID NO: 1880226
auagaucgaagcuaaguua

SEQ ID NO: 1951407 - RNA, 19 nt, Artificial Sequence
  Description of Artificial Sequence: Synthetic oligonucleotide
  Antisense strand to SEQ ID NO: 1951406
uaacuuagcuucgaucuau

SEQ ID NO: 1951408 - RNA, 19 nt, Artificial Sequence
  Description of Artificial Sequence: Synthetic oligonucleotide
  Sense strand starting at position 207 of SEQ ID NO: 1880226
auguuagaauuuccugcuu

SEQ ID NO: 1951409 - RNA, 19 nt, Artificial Sequence
  Description of Artificial Sequence: Synthetic oligonucleotide
  Antisense strand to SEQ ID NO: 1951408
aagcaggaaauucuaacau

SEQ ID NO: 1951410 - RNA, 19 nt, Artificial Sequence
  Description of Artificial Sequence: Synthetic oligonucleotide
  Sense strand starting at position 225 of SEQ ID NO: 1880226
ucaauaucucuugguuuag

SEQ ID NO: 1951411 - RNA, 19 nt, Artificial Sequence
  Description of Artificial Sequence: Synthetic oligonucleotide
  Antisense strand to SEQ ID NO: 1951410
cuaaaccaagagauauuga

SEQ ID NO: 1951412 - RNA, 19 nt, Artificial Sequence
  Description of Artificial Sequence: Synthetic oligonucleotide
  Sense strand starting at position 236 of SEQ ID NO: 1880226
ugguuuaguagucacugua

SEQ ID NO: 1951413 - RNA, 19 nt, Artificial Sequence
  Description of Artificial Sequence: Synthetic oligonucleotide
  Antisense strand to SEQ ID NO: 1951412
uacagugacuacuaaacca

SEQ ID NO: 1951414 - RNA, 19 nt, Artificial Sequence
  Description of Artificial Sequence: Synthetic oligonucleotide
  Sense strand starting at position 246 of SEQ ID NO: 1880226
gucacuguauuccugauaa

SEQ ID NO: 1951415 - RNA, 19 nt, Artificial Sequence
  Description of Artificial Sequence: Synthetic oligonucleotide
  Antisense strand to SEQ ID NO: 1951414
uuaucaggaauacagugac

SEQ ID NO: 1951416 - RNA, 19 nt, Artificial Sequence
  Description of Artificial Sequence: Synthetic oligonucleotide
  Sense strand starting at position 501 of SEQ ID NO: 1880226
uugaucucacagugguaga

SEQ ID NO: 1951417 - RNA, 19 nt, Artificial Sequence
  Description of Artificial Sequence: Synthetic oligonucleotide
  Antisense strand to SEQ ID NO: 1951416
ucuaccacugugagaucaa

SEQ ID NO: 1951418 - RNA, 19 nt, Artificial Sequence
  Description of Artificial Sequence: Synthetic oligonucleotide
  Sense strand starting at position 565 of SEQ ID NO: 1880226
agaugaagagguuggcuaa

SEQ ID NO: 1951419 - RNA, 19 nt, Artificial Sequence
  Description of Artificial Sequence: Synthetic oligonucleotide
  Antisense strand to SEQ ID NO: 1951418
uuagccaaccucuucaucu

SEQ ID NO: 1951420 - RNA, 19 nt, Artificial Sequence
  Description of Artificial Sequence: Synthetic oligonucleotide
  Sense strand starting at position 566 of SEQ ID NO: 1880226
gaugaagagguuggcuaau

SEQ ID NO: 1951421 - RNA, 19 nt, Artificial Sequence
  Description of Artificial Sequence: Synthetic oligonucleotide
  Antisense strand to SEQ ID NO: 1951420
auuagccaaccucuucauc

SEQ ID NO: 1951422 - RNA, 19 nt, Artificial Sequence
  Description of Artificial Sequence: Synthetic oligonucleotide
  Sense strand starting at position 608 of SEQ ID NO: 1880226
gaaggaauaugcucuaaug

SEQ ID NO: 1951423 - RNA, 19 nt, Artificial Sequence
  Description of Artificial Sequence: Synthetic oligonucleotide
  Antisense strand to SEQ ID NO: 1951422
cauuagagcauauuccuuc

SEQ ID NO: 1951424 - RNA, 19 nt, Artificial Sequence
  Description of Artificial Sequence: Synthetic oligonucleotide
  Sense strand starting at position 610 of SEQ ID NO: 1880226
aggaauaugcucuaauguu

SEQ ID NO: 1951425 - RNA, 19 nt, Artificial Sequence
  Description of Artificial Sequence: Synthetic oligonucleotide
  Antisense strand to SEQ ID NO: 1951424
aacauuagagcauauuccu

SEQ ID NO: 1951426 - RNA, 19 nt, Artificial Sequence
  Description of Artificial Sequence: Synthetic oligonucleotide
  Sense strand starting at position 633 of SEQ ID NO: 1880226
agcagaguugggugaauac

SEQ ID NO: 1951427 - RNA, 19 nt, Artificial Sequence
  Description of Artificial Sequence: Synthetic oligonucleotide
  Antisense strand to SEQ ID NO: 1951426
guauucacccaacucugcu

SEQ ID NO: 1951428 - RNA, 19 nt, Artificial Sequence
  Description of Artificial Sequence: Synthetic oligonucleotide
  Sense strand starting at position 889 of SEQ ID NO: 1880226
gggagaaaguugcucaucu

SEQ ID NO: 1951429 - RNA, 19 nt, Artificial Sequence
  Description of Artificial Sequence: Synthetic oligonucleotide
  Antisense strand to SEQ ID NO: 1951428
agaugagcaacuuucuccc

SEQ ID NO: 1951430 - RNA, 19 nt, Artificial Sequence
  Description of Artificial Sequence: Synthetic oligonucleotide
  Sense strand starting at position 890 of SEQ ID NO: 1880226
ggagaaaguugcucaucuc

SEQ ID NO: 1951431 - RNA, 19 nt, Artificial Sequence
  Description of Artificial Sequence: Synthetic oligonucleotide
  Antisense strand to SEQ ID NO: 1951430
gagaugagcaacuuucucc

SEQ ID NO: 1951432 - RNA, 19 nt, Artificial Sequence
  Description of Artificial Sequence: Synthetic oligonucleotide
  Sense strand starting at position 891 of SEQ ID NO: 1880226
gagaaaguugcucaucucu

SEQ ID NO: 1951433 - RNA, 19 nt, Artificial Sequence
  Description of Artificial Sequence: Synthetic oligonucleotide
  Antisense strand to SEQ ID NO: 1951432
agagaugagcaacuuucuc

SEQ ID NO: 1951434 - RNA, 19 nt, Artificial Sequence
  Description of Artificial Sequence: Synthetic oligonucleotide
  Sense strand starting at position 1186 of SEQ ID NO: 1880226
aggaaaggcuaucuuaaug

SEQ ID NO: 1951435 - RNA, 19 nt, Artificial Sequence
  Description of Artificial Sequence: Synthetic oligonucleotide
  Antisense strand to SEQ ID NO: 1951434
cauuaagauagccuuuccu

SEQ ID NO: 1951436 - RNA, 19 nt, Artificial Sequence
  Description of Artificial Sequence: Synthetic oligonucleotide
  Sense strand starting at position 1274 of SEQ ID NO: 1880226
aaggauaauccugguaguu

SEQ ID NO: 1951437 - RNA, 19 nt, Artificial Sequence
  Description of Artificial Sequence: Synthetic oligonucleotide
  Antisense strand to SEQ ID NO: 1951436
aacuaccaggauuauccuu

SEQ ID NO: 1951438 - RNA, 19 nt, Artificial Sequence
  Description of Artificial Sequence: Synthetic oligonucleotide
  Sense strand starting at position 1516 of SEQ ID NO: 1880226
aaagauauauuagcaggua

SEQ ID NO: 1951439 - RNA, 19 nt, Artificial Sequence
  Description of Artificial Sequence: Synthetic oligonucleotide
  Antisense strand to SEQ ID NO: 1951438
uaccugcuaauauaucuuu

SEQ ID NO: 1951440 - RNA, 19 nt, Artificial Sequence
  Description of Artificial Sequence: Synthetic oligonucleotide
  Sense strand starting at position 1519 of SEQ ID NO: 1880226
gauauauuagcagguaaca

SEQ ID NO: 1951441 - RNA, 19 nt, Artificial Sequence
  Description of Artificial Sequence: Synthetic oligonucleotide
  Antisense strand to SEQ ID NO: 1951440
uguuaccugcuaauauauc

SEQ ID NO: 1951442 - RNA, 19 nt, Artificial Sequence
  Description of Artificial Sequence: Synthetic oligonucleotide
  Sense strand starting at position 1574 of SEQ ID NO: 1880226
ggcacuuugggaugguuaa

SEQ ID NO: 1951443 - RNA, 19 nt, Artificial Sequence
  Description of Artificial Sequence: Synthetic oligonucleotide
  Antisense strand to SEQ ID NO: 1951442
uuaaccaucccaaagugcc

SEQ ID NO: 1951444 - RNA, 19 nt, Artificial Sequence
  Description of Artificial Sequence: Synthetic oligonucleotide
  Sense strand starting at position 1575 of SEQ ID NO: 1880226
gcacuuugggaugguuaag

SEQ ID NO: 1951445 - RNA, 19 nt, Artificial Sequence
  Description of Artificial Sequence: Synthetic oligonucleotide
  Antisense strand to SEQ ID NO: 1951444
cuuaaccaucccaaagugc

SEQ ID NO: 1951446 - RNA, 19 nt, Artificial Sequence
  Description of Artificial Sequence: Synthetic oligonucleotide
  Sense strand starting at position 1680 of SEQ ID NO: 1880226
gaccgcuaacucgagaauu

SEQ ID NO: 1951447 - RNA, 19 nt, Artificial Sequence
  Description of Artificial Sequence: Synthetic oligonucleotide
  Antisense strand to SEQ ID NO: 1951446
aauucucgaguuagcgguc

SEQ ID NO: 1951448 - RNA, 19 nt, Artificial Sequence
  Description of Artificial Sequence: Synthetic oligonucleotide
  Sense strand starting at position 1682 of SEQ ID NO: 1880226
ccgcuaacucgagaauuag

SEQ ID NO: 1951449 - RNA, 19 nt, Artificial Sequence
  Description of Artificial Sequence: Synthetic oligonucleotide
  Antisense strand to SEQ ID NO: 1951448
cuaauucucgaguuagcgg

SEQ ID NO: 1951450 - RNA, 19 nt, Artificial Sequence
  Description of Artificial Sequence: Synthetic oligonucleotide
  Sense strand starting at position 2006 of SEQ ID NO: 1880226
gugucuauugguuacuaca

SEQ ID NO: 1951451 - RNA, 19 nt, Artificial Sequence
  Description of Artificial Sequence: Synthetic oligonucleotide
  Antisense strand to SEQ ID NO: 1951450
uguaguaaccaauagacac

SEQ ID NO: 1951452 - RNA, 19 nt, Artificial Sequence
  Description of Artificial Sequence: Synthetic oligonucleotide
  Sense strand starting at position 2262 of SEQ ID NO: 1880226
aggaaaugguaguaauuuc

SEQ ID NO: 1951453 - RNA, 19 nt, Artificial Sequence
  Description of Artificial Sequence: Synthetic oligonucleotide
  Antisense strand to SEQ ID NO: 1951452
gaaauuacuaccauuuccu

SEQ ID NO: 1951454 - RNA, 19 nt, Artificial Sequence
  Description of Artificial Sequence: Synthetic oligonucleotide
  Sense strand starting at position 2376 of SEQ ID NO: 1880226
uggaucugccauuaacuau

SEQ ID NO: 1951455 - RNA, 19 nt, Artificial Sequence
  Description of Artificial Sequence: Synthetic oligonucleotide
  Antisense strand to SEQ ID NO: 1951454
auaguuaauggcagaucca

SEQ ID NO: 1951456 - RNA, 19 nt, Artificial Sequence
  Description of Artificial Sequence: Synthetic oligonucleotide
  Sense strand starting at position 2644 of SEQ ID NO: 1880226
agaauaguguugcucccaa

SEQ ID NO: 1951457 - RNA, 19 nt, Artificial Sequence
  Description of Artificial Sequence: Synthetic oligonucleotide
  Antisense strand to SEQ ID NO: 1951456
uugggagcaacacuauucu

SEQ ID NO: 1951458 - RNA, 19 nt, Artificial Sequence
  Description of Artificial Sequence: Synthetic oligonucleotide
  Sense strand starting at position 2656 of SEQ ID NO: 1880226
cucccaauuguugaguuaa

SEQ ID NO: 1951459 - RNA, 19 nt, Artificial Sequence
  Description of Artificial Sequence: Synthetic oligonucleotide
  Antisense strand to SEQ ID NO: 1951458
uuaacucaacaauugggag

SEQ ID NO: 1951460 - RNA, 19 nt, Artificial Sequence
  Description of Artificial Sequence: Synthetic oligonucleotide
  Sense strand starting at position 2658 of SEQ ID NO: 1880226
cccaauuguugaguuaaau

SEQ ID NO: 1951461 - RNA, 19 nt, Artificial Sequence
  Description of Artificial Sequence: Synthetic oligonucleotide
  Antisense strand to SEQ ID NO: 1951460
auuuaacucaacaauuggg

SEQ ID NO: 1951462 - RNA, 19 nt, Artificial Sequence
  Description of Artificial Sequence: Synthetic oligonucleotide
  Sense strand starting at position 2680 of SEQ ID NO: 1880226
auguaaaucgucuagugug

SEQ ID NO: 1951463 - RNA, 19 nt, Artificial Sequence
  Description of Artificial Sequence: Synthetic oligonucleotide
  Antisense strand to SEQ ID NO: 1951462
cacacuagacgauuuacau

SEQ ID NO: 1951464 - RNA, 19 nt, Artificial Sequence
  Description of Artificial Sequence: Synthetic oligonucleotide
  Sense strand starting at position 2888 of SEQ ID NO: 1880226
acuuuaaagcuggagcaaa

SEQ ID NO: 1951465 - RNA, 19 nt, Artificial Sequence
  Description of Artificial Sequence: Synthetic oligonucleotide
  Antisense strand to SEQ ID NO: 1951464
uuugcuccagcuuuaaagu

SEQ ID NO: 1951466 - RNA, 19 nt, Artificial Sequence
  Description of Artificial Sequence: Synthetic oligonucleotide
  Sense strand starting at position 3398 of SEQ ID NO: 1880226
gugcuuaauagggacuuua

SEQ ID NO: 1951467 - RNA, 19 nt, Artificial Sequence
  Description of Artificial Sequence: Synthetic oligonucleotide
  Antisense strand to SEQ ID NO: 1951466
uaaagucccuauuaagcac

SEQ ID NO: 1951468 - RNA, 19 nt, Artificial Sequence
  Description of Artificial Sequence: Synthetic oligonucleotide
  Sense strand starting at position 3753 of SEQ ID NO: 1880226
ugaggaauuuaaggucaaa

SEQ ID NO: 1951469 - RNA, 19 nt, Artificial Sequence
  Description of Artificial Sequence: Synthetic oligonucleotide
  Antisense strand to SEQ ID NO: 1951468
uuugaccuuaaauuccuca

SEQ ID NO: 1951470 - RNA, 19 nt, Artificial Sequence
  Description of Artificial Sequence: Synthetic oligonucleotide
  Sense strand starting at position 3825 of SEQ ID NO: 1880226
ccaugcuuucucuagaaga

SEQ ID NO: 1951471 - RNA, 19 nt, Artificial Sequence
  Description of Artificial Sequence: Synthetic oligonucleotide
  Antisense strand to SEQ ID NO: 1951470
ucuucuagagaaagcaugg

SEQ ID NO: 1951472 - RNA, 19 nt, Artificial Sequence
  Description of Artificial Sequence: Synthetic oligonucleotide
  Sense strand starting at position 3827 of SEQ ID NO: 1880226
augcuuucucuagaagagu

SEQ ID NO: 1951473 - RNA, 19 nt, Artificial Sequence
  Description of Artificial Sequence: Synthetic oligonucleotide
  Antisense strand to SEQ ID NO: 1951472
acucuucuagagaaagcau

SEQ ID NO: 1951474 - RNA, 19 nt, Artificial Sequence
  Description of Artificial Sequence: Synthetic oligonucleotide
  Sense strand starting at position 3838 of SEQ ID NO: 1880226
agaagaguuugcucccagu

SEQ ID NO: 1951475 - RNA, 19 nt, Artificial Sequence
  Description of Artificial Sequence: Synthetic oligonucleotide
  Antisense strand to SEQ ID NO: 1951474
acugggagcaaacucuucu

SEQ ID NO: 1951476 - RNA, 19 nt, Artificial Sequence
  Description of Artificial Sequence: Synthetic oligonucleotide
  Sense strand starting at position 3879 of SEQ ID NO: 1880226
agaggugccugacuagaau

SEQ ID NO: 1951477 - RNA, 19 nt, Artificial Sequence
  Description of Artificial Sequence: Synthetic oligonucleotide
  Antisense strand to SEQ ID NO: 1951476
auucuagucaggcaccucu

SEQ ID NO: 1951478 - RNA, 19 nt, Artificial Sequence
  Description of Artificial Sequence: Synthetic oligonucleotide
  Sense strand starting at position 68 of SEQ ID NO: 1880227
ccaaguauaucagucaagu

SEQ ID NO: 1951479 - RNA, 19 nt, Artificial Sequence
  Description of Artificial Sequence: Synthetic oligonucleotide
  Antisense strand to SEQ ID NO: 1951478
acuugacugauauacuugg

SEQ ID NO: 1951480 - RNA, 19 nt, Artificial Sequence
  Description of Artificial Sequence: Synthetic oligonucleotide
  Sense strand starting at position 91 of SEQ ID NO: 1880227
auuuacuguuugccacauu

SEQ ID NO: 1951481 - RNA, 19 nt, Artificial Sequence
  Description of Artificial Sequence: Synthetic oligonucleotide
  Antisense strand to SEQ ID NO: 1951480
aauguggcaaacaguaaau

SEQ ID NO: 1951482 - RNA, 19 nt, Artificial Sequence
  Description of Artificial Sequence: Synthetic oligonucleotide
  Sense strand starting at position 110 of SEQ ID NO: 1880227
ccaggucccuuaccugaaa

SEQ ID NO: 1951483 - RNA, 19 nt, Artificial Sequence
  Description of Artificial Sequence: Synthetic oligonucleotide
  Antisense strand to SEQ ID NO: 1951482
uuucagguaagggaccugg

SEQ ID NO: 1951484 - RNA, 19 nt, Artificial Sequence
  Description of Artificial Sequence: Synthetic oligonucleotide
  Sense strand starting at position 188 of SEQ ID NO: 1880227
uugcuuauugcacaaguaa

SEQ ID NO: 1951485 - RNA, 19 nt, Artificial Sequence
  Description of Artificial Sequence: Synthetic oligonucleotide
  Antisense strand to SEQ ID NO: 1951484
uuacuugugcaauaagcaa

SEQ ID NO: 1951486 - RNA, 19 nt, Artificial Sequence
  Description of Artificial Sequence: Synthetic oligonucleotide
  Sense strand starting at position 612 of SEQ ID NO: 1880227
gccagaugugaagggaaga

SEQ ID NO: 1951487 - RNA, 19 nt, Artificial Sequence
  Description of Artificial Sequence: Synthetic oligonucleotide
  Antisense strand to SEQ ID NO: 1951486
ucuucccuucacaucuggc

SEQ ID NO: 1951488 - RNA, 19 nt, Artificial Sequence
  Description of Artificial Sequence: Synthetic oligonucleotide
  Sense strand starting at position 780 of SEQ ID NO: 1880227
acaucauauugugucugaa

SEQ ID NO: 1951489 - RNA, 19 nt, Artificial Sequence
  Description of Artificial Sequence: Synthetic oligonucleotide
  Antisense strand to SEQ ID NO: 1951488
uucagacacaauaugaugu

SEQ ID NO: 1951490 - RNA, 19 nt, Artificial Sequence
  Description of Artificial Sequence: Synthetic oligonucleotide
  Sense strand starting at position 782 of SEQ ID NO: 1880227
aucauauugugucugaaua

SEQ ID NO: 1951491 - RNA, 19 nt, Artificial Sequence
  Description of Artificial Sequence: Synthetic oligonucleotide
  Antisense strand to SEQ ID NO: 1951490
uauucagacacaauaugau

SEQ ID NO: 1951492 - RNA, 19 nt, Artificial Sequence
  Description of Artificial Sequence: Synthetic oligonucleotide
  Sense strand starting at position 834 of SEQ ID NO: 1880227
ugagacuugaaauguguga

SEQ ID NO: 1951493 - RNA, 19 nt, Artificial Sequence
  Description of Artificial Sequence: Synthetic oligonucleotide
  Antisense strand to SEQ ID NO: 1951492
ucacacauuucaagucuca

SEQ ID NO: 1951494 - RNA, 19 nt, Artificial Sequence
  Description of Artificial Sequence: Synthetic oligonucleotide
  Sense strand starting at position 836 of SEQ ID NO: 1880227
agacuugaaaugugugaua

SEQ ID NO: 1951495 - RNA, 19 nt, Artificial Sequence
  Description of Artificial Sequence: Synthetic oligonucleotide
  Antisense strand to SEQ ID NO: 1951494
uaucacacauuucaagucu

SEQ ID NO: 1951496 - RNA, 19 nt, Artificial Sequence
  Description of Artificial Sequence: Synthetic oligonucleotide
  Sense strand starting at position 838 of SEQ ID NO: 1880227
acuugaaaugugugauaca

SEQ ID NO: 1951497 - RNA, 19 nt, Artificial Sequence
  Description of Artificial Sequence: Synthetic oligonucleotide
  Antisense strand to SEQ ID NO: 1951496
uguaucacacauuucaagu

SEQ ID NO: 1951498 - RNA, 19 nt, Artificial Sequence
  Description of Artificial Sequence: Synthetic oligonucleotide
  Sense strand starting at position 1462 of SEQ ID NO: 1880227
cggccugcugaguucuuua

SEQ ID NO: 1951499 - RNA, 19 nt, Artificial Sequence
  Description of Artificial Sequence: Synthetic oligonucleotide
  Antisense strand to SEQ ID NO: 1951498
uaaagaacucagcaggccg

SEQ ID NO: 1951500 - RNA, 19 nt, Artificial Sequence
  Description of Artificial Sequence: Synthetic oligonucleotide
  Sense strand starting at position 1614 of SEQ ID NO: 1880227
aggaguagucuuuaggucu

SEQ ID NO: 1951501 - RNA, 19 nt, Artificial Sequence
  Description of Artificial Sequence: Synthetic oligonucleotide
  Antisense strand to SEQ ID NO: 1951500
agaccuaaagacuacuccu

SEQ ID NO: 1951502 - RNA, 19 nt, Artificial Sequence
  Description of Artificial Sequence: Synthetic oligonucleotide
  Sense strand starting at position 1676 of SEQ ID NO: 1880227
ucaagaaagugguuaugca

SEQ ID NO: 1951503 - RNA, 19 nt, Artificial Sequence
  Description of Artificial Sequence: Synthetic oligonucleotide
  Antisense strand to SEQ ID NO: 1951502
ugcauaaccacuuucuuga

SEQ ID NO: 1951504 - RNA, 19 nt, Artificial Sequence
  Description of Artificial Sequence: Synthetic oligonucleotide
  Sense strand starting at position 1677 of SEQ ID NO: 1880227
caagaaagugguuaugcaa

SEQ ID NO: 1951505 - RNA, 19 nt, Artificial Sequence
  Description of Artificial Sequence: Synthetic oligonucleotide
  Antisense strand to SEQ ID NO: 1951504
uugcauaaccacuuucuug

SEQ ID NO: 1951506 - RNA, 19 nt, Artificial Sequence
  Description of Artificial Sequence: Synthetic oligonucleotide
  Sense strand starting at position 1700 of SEQ ID NO: 1880227
gccugugagcucucaacgu

SEQ ID NO: 1951507 - RNA, 19 nt, Artificial Sequence
  Description of Artificial Sequence: Synthetic oligonucleotide
  Antisense strand to SEQ ID NO: 1951506
acguugagagcucacaggc

SEQ ID NO: 1951508 - RNA, 19 nt, Artificial Sequence
  Description of Artificial Sequence: Synthetic oligonucleotide
  Sense strand starting at position 1764 of SEQ ID NO: 1880227
ucuccagggccuuaucauu

SEQ ID NO: 1951509 - RNA, 19 nt, Artificial Sequence
  Description of Artificial Sequence: Synthetic oligonucleotide
  Antisense strand to SEQ ID NO: 1951508
aaugauaaggcccuggaga

SEQ ID NO: 1951510 - RNA, 19 nt, Artificial Sequence
  Description of Artificial Sequence: Synthetic oligonucleotide
  Sense strand starting at position 2474 of SEQ ID NO: 1880227
ucggucuacucauuucuga

SEQ ID NO: 1951511 - RNA, 19 nt, Artificial Sequence
  Description of Artificial Sequence: Synthetic oligonucleotide
  Antisense strand to SEQ ID NO: 1951510
ucagaaaugaguagaccga

SEQ ID NO: 1951512 - RNA, 19 nt, Artificial Sequence
  Description of Artificial Sequence: Synthetic oligonucleotide
  Sense strand starting at position 2709 of SEQ ID NO: 1880227
gugcuaauggcugccucau

SEQ ID NO: 1951513 - RNA, 19 nt, Artificial Sequence
  Description of Artificial Sequence: Synthetic oligonucleotide
  Antisense strand to SEQ ID NO: 1951512
augaggcagccauuagcac

SEQ ID NO: 1951514 - RNA, 19 nt, Artificial Sequence
  Description of Artificial Sequence: Synthetic oligonucleotide
  Sense strand starting at position 2724 of SEQ ID NO: 1880227
ucaucauauuaccugguga

SEQ ID NO: 1951515 - RNA, 19 nt, Artificial Sequence
  Description of Artificial Sequence: Synthetic oligonucleotide
  Antisense strand to SEQ ID NO: 1951514
ucaccagguaauaugauga

SEQ ID NO: 1951516 - RNA, 19 nt, Artificial Sequence
  Description of Artificial Sequence: Synthetic oligonucleotide
  Sense strand starting at position 2758 of SEQ ID NO: 1880227
gaugaaaggugguucccau

SEQ ID NO: 1951517 - RNA, 19 nt, Artificial Sequence
  Description of Artificial Sequence: Synthetic oligonucleotide
  Antisense strand to SEQ ID NO: 1951516
augggaaccaccuuucauc

SEQ ID NO: 1951518 - RNA, 19 nt, Artificial Sequence
  Description of Artificial Sequence: Synthetic oligonucleotide
  Sense strand starting at position 2782 of SEQ ID NO: 1880227
gcaaauguucuuuacauug

SEQ ID NO: 1951519 - RNA, 19 nt, Artificial Sequence
  Description of Artificial Sequence: Synthetic oligonucleotide
  Antisense strand to SEQ ID NO: 1951518
caauguaaagaacauuugc

SEQ ID NO: 1951520 - RNA, 19 nt, Artificial Sequence
  Description of Artificial Sequence: Synthetic oligonucleotide
  Sense strand starting at position 2837 of SEQ ID NO: 1880227
aguggaccuucuucucaga

SEQ ID NO: 1951521 - RNA, 19 nt, Artificial Sequence
  Description of Artificial Sequence: Synthetic oligonucleotide
  Antisense strand to SEQ ID NO: 1951520
ucugagaagaagguccacu

SEQ ID NO: 1951522 - RNA, 19 nt, Artificial Sequence
  Description of Artificial Sequence: Synthetic oligonucleotide
  Sense strand starting at position 2839 of SEQ ID NO: 1880227
uggaccuucuucucagaaa

SEQ ID NO: 1951523 - RNA, 19 nt, Artificial Sequence
  Description of Artificial Sequence: Synthetic oligonucleotide
  Antisense strand to SEQ ID NO: 1951522
uuucugagaagaaggucca

SEQ ID NO: 1951524 - RNA, 19 nt, Artificial Sequence
  Description of Artificial Sequence: Synthetic oligonucleotide
  Sense strand starting at position 2900 of SEQ ID NO: 1880227
cucuucgacccuggaaauu

SEQ ID NO: 1951525 - RNA, 19 nt, Artificial Sequence
  Description of Artificial Sequence: Synthetic oligonucleotide
  Antisense strand to SEQ ID NO: 1951524
aauuuccagggucgaagag

SEQ ID NO: 1951526 - RNA, 19 nt, Artificial Sequence
  Description of Artificial Sequence: Synthetic oligonucleotide
  Sense strand starting at position 2966 of SEQ ID NO: 1880227
cuguuaugacacuggauaa

SEQ ID NO: 1951527 - RNA, 19 nt, Artificial Sequence
  Description of Artificial Sequence: Synthetic oligonucleotide
  Antisense strand to SEQ ID NO: 1951526
uuauccagugucauaacag

SEQ ID NO: 1951528 - RNA, 19 nt, Artificial Sequence
  Description of Artificial Sequence: Synthetic oligonucleotide
  Sense strand starting at position 2967 of SEQ ID NO: 1880227
uguuaugacacuggauaag

SEQ ID NO: 1951529 - RNA, 19 nt, Artificial Sequence
  Description of Artificial Sequence: Synthetic oligonucleotide
  Antisense strand to SEQ ID NO: 1951528
cuuauccagugucauaaca

SEQ ID NO: 1951530 - RNA, 19 nt, Artificial Sequence
  Description of Artificial Sequence: Synthetic oligonucleotide
  Sense strand starting at position 2979 of SEQ ID NO: 1880227
ggauaagacugguuagcuu

SEQ ID NO: 1951531 - RNA, 19 nt, Artificial Sequence
  Description of Artificial Sequence: Synthetic oligonucleotide
  Antisense strand to SEQ ID NO: 1951530
aagcuaaccagucuuaucc

SEQ ID NO: 1951532 - RNA, 19 nt, Artificial Sequence
  Description of Artificial Sequence: Synthetic oligonucleotide
  Sense strand starting at position 3026 of SEQ ID NO: 1880227
gagagugacucuucccauu

SEQ ID NO: 1951533 - RNA, 19 nt, Artificial Sequence
  Description of Artificial Sequence: Synthetic oligonucleotide
  Antisense strand to SEQ ID NO: 1951532
aaugggaagagucacucuc

SEQ ID NO: 1951534 - RNA, 19 nt, Artificial Sequence
  Description of Artificial Sequence: Synthetic oligonucleotide
  Sense strand starting at position 3066 of SEQ ID NO: 1880227
gugggagaugccugaaauu

SEQ ID NO: 1951535 - RNA, 19 nt, Artificial Sequence
  Description of Artificial Sequence: Synthetic oligonucleotide
  Antisense strand to SEQ ID NO: 1951534
aauuucaggcaucucccac

SEQ ID NO: 1951536 - RNA, 19 nt, Artificial Sequence
  Description of Artificial Sequence: Synthetic oligonucleotide
  Sense strand starting at position 3095 of SEQ ID NO: 1880227
agcaaauauuuguugcuuu

SEQ ID NO: 1951537 - RNA, 19 nt, Artificial Sequence
  Description of Artificial Sequence: Synthetic oligonucleotide
  Antisense strand to SEQ ID NO: 1951536
aaagcaacaaauauuugcu

SEQ ID NO: 1951538 - RNA, 19 nt, Artificial Sequence
  Description of Artificial Sequence: Synthetic oligonucleotide
  Sense strand starting at position 3398 of SEQ ID NO: 1880227
cuuagaauuguagaaugcu

SEQ ID NO: 1951539 - RNA, 19 nt, Artificial Sequence
  Description of Artificial Sequence: Synthetic oligonucleotide
  Antisense strand to SEQ ID NO: 1951538
agcauucuacaauucuaag

SEQ ID NO: 1951540 - RNA, 19 nt, Artificial Sequence
  Description of Artificial Sequence: Synthetic oligonucleotide
  Sense strand starting at position 3401 of SEQ ID NO: 1880227
agaauuguagaaugcuaga

SEQ ID NO: 1951541 - RNA, 19 nt, Artificial Sequence
  Description of Artificial Sequence: Synthetic oligonucleotide
  Antisense strand to SEQ ID NO: 1951540
ucuagcauucuacaauucu

SEQ ID NO: 1951542 - RNA, 19 nt, Artificial Sequence
  Description of Artificial Sequence: Synthetic oligonucleotide
  Sense strand starting at position 3632 of SEQ ID NO: 1880227
cugagaugagacuguaagu

SEQ ID NO: 1951543 - RNA, 19 nt, Artificial Sequence
  Description of Artificial Sequence: Synthetic oligonucleotide
  Antisense strand to SEQ ID NO: 1951542
acuuacagucucaucucag

SEQ ID NO: 1951544 - RNA, 19 nt, Artificial Sequence
  Description of Artificial Sequence: Synthetic oligonucleotide
  Sense strand starting at position 3774 of SEQ ID NO: 1880227
guucucauucugcauugga

SEQ ID NO: 1951545 - RNA, 19 nt, Artificial Sequence
  Description of Artificial Sequence: Synthetic oligonucleotide
  Antisense strand to SEQ ID NO: 1951544
uccaaugcagaaugagaac

SEQ ID NO: 1951546 - RNA, 19 nt, Artificial Sequence
  Description of Artificial Sequence: Synthetic oligonucleotide
  Sense strand starting at position 3777 of SEQ ID NO: 1880227
cucauucugcauuggaaua

SEQ ID NO: 1951547 - RNA, 19 nt, Artificial Sequence
  Description of Artificial Sequence: Synthetic oligonucleotide
  Antisense strand to SEQ ID NO: 1951546
uauuccaaugcagaaugag

SEQ ID NO: 1951548 - RNA, 19 nt, Artificial Sequence
  Description of Artificial Sequence: Synthetic oligonucleotide
  Sense strand starting at position 3782 of SEQ ID NO: 1880227
ucugcauuggaauacauau

SEQ ID NO: 1951549 - RNA, 19 nt, Artificial Sequence
  Description of Artificial Sequence: Synthetic oligonucleotide
  Antisense strand to SEQ ID NO: 1951548
auauguauuccaaugcaga

SEQ ID NO: 1951550 - RNA, 19 nt, Artificial Sequence
  Description of Artificial Sequence: Synthetic oligonucleotide
  Sense strand starting at position 3870 of SEQ ID NO: 1880227
aagugcuuacuaugacaug

SEQ ID NO: 1951551 - RNA, 19 nt, Artificial Sequence
  Description of Artificial Sequence: Synthetic oligonucleotide
  Antisense strand to SEQ ID NO: 1951550
caugucauaguaagcacuu

SEQ ID NO: 1951552 - RNA, 19 nt, Artificial Sequence
  Description of Artificial Sequence: Synthetic oligonucleotide
  Sense strand starting at position 3898 of SEQ ID NO: 1880227
gagagcauuguguaaaugu

SEQ ID NO: 1951553 - RNA, 19 nt, Artificial Sequence
  Description of Artificial Sequence: Synthetic oligonucleotide
  Antisense strand to SEQ ID NO: 1951552
acauuuacacaaugcucuc

SEQ ID NO: 1951554 - RNA, 19 nt, Artificial Sequence
  Description of Artificial Sequence: Synthetic oligonucleotide
  Sense strand starting at position 3942 of SEQ ID NO: 1880227
cuuaauaacuagcugcaga

SEQ ID NO: 1951555 - RNA, 19 nt, Artificial Sequence
  Description of Artificial Sequence: Synthetic oligonucleotide
  Antisense strand to SEQ ID NO: 1951554
ucugcagcuaguuauuaag

SEQ ID NO: 1951556 - RNA, 19 nt, Artificial Sequence
  Description of Artificial Sequence: Synthetic oligonucleotide
  Sense strand starting at position 3962 of SEQ ID NO: 1880227
cucauaugaucuuuaugga

SEQ ID NO: 1951557 - RNA, 19 nt, Artificial Sequence
  Description of Artificial Sequence: Synthetic oligonucleotide
  Antisense strand to SEQ ID NO: 1951556
uccauaaagaucauaugag

SEQ ID NO: 1951558 - RNA, 19 nt, Artificial Sequence
  Description of Artificial Sequence: Synthetic oligonucleotide
  Sense strand starting at position 283 of SEQ ID NO: 1880228
agaauuccuguuugucaga

SEQ ID NO: 1951559 - RNA, 19 nt, Artificial Sequence
  Description of Artificial Sequence: Synthetic oligonucleotide
  Antisense strand to SEQ ID NO: 1951558
ucugacaaacaggaauucu

SEQ ID NO: 1951560 - RNA, 19 nt, Artificial Sequence
  Description of Artificial Sequence: Synthetic oligonucleotide
  Sense strand starting at position 284 of SEQ ID NO: 1880228
gaauuccuguuugucagaa

SEQ ID NO: 1951561 - RNA, 19 nt, Artificial Sequence
  Description of Artificial Sequence: Synthetic oligonucleotide
  Antisense strand to SEQ ID NO: 1951560
uucugacaaacaggaauuc

SEQ ID NO: 1951562 - RNA, 19 nt, Artificial Sequence
  Description of Artificial Sequence: Synthetic oligonucleotide
  Sense strand starting at position 312 of SEQ ID NO: 1880228
ggaccauuguuucucagaa

SEQ ID NO: 1951563 - RNA, 19 nt, Artificial Sequence
  Description of Artificial Sequence: Synthetic oligonucleotide
  Antisense strand to SEQ ID NO: 1951562
uucugagaaacaauggucc

SEQ ID NO: 1951564 - RNA, 19 nt, Artificial Sequence
  Description of Artificial Sequence: Synthetic oligonucleotide
  Sense strand starting at position 313 of SEQ ID NO: 1880228
gaccauuguuucucagaag

SEQ ID NO: 1951565 - RNA, 19 nt, Artificial Sequence
  Description of Artificial Sequence: Synthetic oligonucleotide
  Antisense strand to SEQ ID NO: 1951564
cuucugagaaacaaugguc

SEQ ID NO: 1951566 - RNA, 19 nt, Artificial Sequence
  Description of Artificial Sequence: Synthetic oligonucleotide
  Sense strand starting at position 330 of SEQ ID NO: 1880228
aguacauaguagguaagaa

SEQ ID NO: 1951567 - RNA, 19 nt, Artificial Sequence
  Description of Artificial Sequence: Synthetic oligonucleotide
  Antisense strand to SEQ ID NO: 1951566
uucuuaccuacuauguacu

SEQ ID NO: 1951568 - RNA, 19 nt, Artificial Sequence
  Description of Artificial Sequence: Synthetic oligonucleotide
  Sense strand starting at position 352 of SEQ ID NO: 1880228
aguggauccugacugcaaa

SEQ ID NO: 1951569 - RNA, 19 nt, Artificial Sequence
  Description of Artificial Sequence: Synthetic oligonucleotide
  Antisense strand to SEQ ID NO: 1951568
uuugcagucaggauccacu

SEQ ID NO: 1951570 - RNA, 19 nt, Artificial Sequence
  Description of Artificial Sequence: Synthetic oligonucleotide
  Sense strand starting at position 388 of SEQ ID NO: 1880228
uacuguggucucgaacaaa

SEQ ID NO: 1951571 - RNA, 19 nt, Artificial Sequence
  Description of Artificial Sequence: Synthetic oligonucleotide
  Antisense strand to SEQ ID NO: 1951570
uuuguucgagaccacagua

SEQ ID NO: 1951572 - RNA, 19 nt, Artificial Sequence
  Description of Artificial Sequence: Synthetic oligonucleotide
  Sense strand starting at position 391 of SEQ ID NO: 1880228
uguggucucgaacaaagua

SEQ ID NO: 1951573 - RNA, 19 nt, Artificial Sequence
  Description of Artificial Sequence: Synthetic oligonucleotide
  Antisense strand to SEQ ID NO: 1951572
uacuuuguucgagaccaca

SEQ ID NO: 1951574 - RNA, 19 nt, Artificial Sequence
  Description of Artificial Sequence: Synthetic oligonucleotide
  Sense strand starting at position 399 of SEQ ID NO: 1880228
cgaacaaaguacuuaacuu

SEQ ID NO: 1951575 - RNA, 19 nt, Artificial Sequence
  Description of Artificial Sequence: Synthetic oligonucleotide
  Antisense strand to SEQ ID NO: 1951574
aaguuaaguacuuuguucg

SEQ ID NO: 1951576 - RNA, 19 nt, Artificial Sequence
  Description of Artificial Sequence: Synthetic oligonucleotide
  Sense strand starting at position 512 of SEQ ID NO: 1880228
ucaaauuacuaaguguagu

SEQ ID NO: 1951577 - RNA, 19 nt, Artificial Sequence
  Description of Artificial Sequence: Synthetic oligonucleotide
  Antisense strand to SEQ ID NO: 1951576
acuacacuuaguaauuuga

SEQ ID NO: 1951578 - RNA, 19 nt, Artificial Sequence
  Description of Artificial Sequence: Synthetic oligonucleotide
  Sense strand starting at position 520 of SEQ ID NO: 1880228
cuaaguguaguauauguua

SEQ ID NO: 1951579 - RNA, 19 nt, Artificial Sequence
  Description of Artificial Sequence: Synthetic oligonucleotide
  Antisense strand to SEQ ID NO: 1951578
uaacauauacuacacuuag

SEQ ID NO: 1951580 - RNA, 19 nt, Artificial Sequence
  Description of Artificial Sequence: Synthetic oligonucleotide
  Sense strand starting at position 617 of SEQ ID NO: 1880228
gauagaaaguucuuuguga

SEQ ID NO: 1951581 - RNA, 19 nt, Artificial Sequence
  Description of Artificial Sequence: Synthetic oligonucleotide
  Antisense strand to SEQ ID NO: 1951580
ucacaaagaacuuucuauc

SEQ ID NO: 1951582 - RNA, 19 nt, Artificial Sequence
  Description of Artificial Sequence: Synthetic oligonucleotide
  Sense strand starting at position 618 of SEQ ID NO: 1880228
auagaaaguucuuugugac

SEQ ID NO: 1951583 - RNA, 19 nt, Artificial Sequence
  Description of Artificial Sequence: Synthetic oligonucleotide
  Antisense strand to SEQ ID NO: 1951582
gucacaaagaacuuucuau

SEQ ID NO: 1951584 - RNA, 19 nt, Artificial Sequence
  Description of Artificial Sequence: Synthetic oligonucleotide
  Sense strand starting at position 619 of SEQ ID NO: 1880228
uagaaaguucuuugugacu

SEQ ID NO: 1951585 - RNA, 19 nt, Artificial Sequence
  Description of Artificial Sequence: Synthetic oligonucleotide
  Antisense strand to SEQ ID NO: 1951584
agucacaaagaacuuucua

SEQ ID NO: 1951586 - RNA, 19 nt, Artificial Sequence
  Description of Artificial Sequence: Synthetic oligonucleotide
  Sense strand starting at position 673 of SEQ ID NO: 1880228
uauagagaucuuggguuug

SEQ ID NO: 1951587 - RNA, 19 nt, Artificial Sequence
  Description of Artificial Sequence: Synthetic oligonucleotide
  Antisense strand to SEQ ID NO: 1951586
caaacccaagaucucuaua

SEQ ID NO: 1951588 - RNA, 19 nt, Artificial Sequence
  Description of Artificial Sequence: Synthetic oligonucleotide
  Sense strand starting at position 678 of SEQ ID NO: 1880228
agaucuuggguuugggagu

SEQ ID NO: 1951589 - RNA, 19 nt, Artificial Sequence
  Description of Artificial Sequence: Synthetic oligonucleotide
  Antisense strand to SEQ ID NO: 1951588
acucccaaacccaagaucu

SEQ ID NO: 1951590 - RNA, 19 nt, Artificial Sequence
  Description of Artificial Sequence: Synthetic oligonucleotide
  Sense strand starting at position 747 of SEQ ID NO: 1880228
cagagucaugccgaaauga

SEQ ID NO: 1951591 - RNA, 19 nt, Artificial Sequence
  Description of Artificial Sequence: Synthetic oligonucleotide
  Antisense strand to SEQ ID NO: 1951590
ucauuucggcaugacucug

SEQ ID NO: 1951592 - RNA, 19 nt, Artificial Sequence
  Description of Artificial Sequence: Synthetic oligonucleotide
  Sense strand starting at position 766 of SEQ ID NO: 1880228
aaauguugacuuugaguaa

SEQ ID NO: 1951593 - RNA, 19 nt, Artificial Sequence
  Description of Artificial Sequence: Synthetic oligonucleotide
  Antisense strand to SEQ ID NO: 1951592
uuacucaaagucaacauuu

SEQ ID NO: 1951594 - RNA, 19 nt, Artificial Sequence
  Description of Artificial Sequence: Synthetic oligonucleotide
  Sense strand starting at position 769 of SEQ ID NO: 1880228
uguugacuuugaguaacua

SEQ ID NO: 1951595 - RNA, 19 nt, Artificial Sequence
  Description of Artificial Sequence: Synthetic oligonucleotide
  Antisense strand to SEQ ID NO: 1951594
uaguuacucaaagucaaca

SEQ ID NO: 1951596 - RNA, 19 nt, Artificial Sequence
  Description of Artificial Sequence: Synthetic oligonucleotide
  Sense strand starting at position 770 of SEQ ID NO: 1880228
guugacuuugaguaacuaa

SEQ ID NO: 1951597 - RNA, 19 nt, Artificial Sequence
  Description of Artificial Sequence: Synthetic oligonucleotide
  Antisense strand to SEQ ID NO: 1951596
uuaguuacucaaagucaac

SEQ ID NO: 1951598 - RNA, 19 nt, Artificial Sequence
  Description of Artificial Sequence: Synthetic oligonucleotide
  Sense strand starting at position 821 of SEQ ID NO: 1880228
agugguaagaguuauucuu

SEQ ID NO: 1951599 - RNA, 19 nt, Artificial Sequence
  Description of Artificial Sequence: Synthetic oligonucleotide
  Antisense strand to SEQ ID NO: 1951598
aagaauaacucuuaccacu

SEQ ID NO: 1951600 - RNA, 19 nt, Artificial Sequence
  Description of Artificial Sequence: Synthetic oligonucleotide
  Sense strand starting at position 878 of SEQ ID NO: 1880228
ucaaguuaugaguagugua

SEQ ID NO: 1951601 - RNA, 19 nt, Artificial Sequence
  Description of Artificial Sequence: Synthetic oligonucleotide
  Antisense strand to SEQ ID NO: 1951600
uacacuacucauaacuuga

SEQ ID NO: 1951602 - RNA, 19 nt, Artificial Sequence
  Description of Artificial Sequence: Synthetic oligonucleotide
  Sense strand starting at position 883 of SEQ ID NO: 1880228
uuaugaguaguguagaaca

SEQ ID NO: 1951603 - RNA, 19 nt, Artificial Sequence
  Description of Artificial Sequence: Synthetic oligonucleotide
  Antisense strand to SEQ ID NO: 1951602
uguucuacacuacucauaa

SEQ ID NO: 1951604 - RNA, 19 nt, Artificial Sequence
  Description of Artificial Sequence: Synthetic oligonucleotide
  Sense strand starting at position 885 of SEQ ID NO: 1880228
augaguaguguagaacagu

SEQ ID NO: 1951605 - RNA, 19 nt, Artificial Sequence
  Description of Artificial Sequence: Synthetic oligonucleotide
  Antisense strand to SEQ ID NO: 1951604
acuguucuacacuacucau

SEQ ID NO: 1951606 - RNA, 19 nt, Artificial Sequence
  Description of Artificial Sequence: Synthetic oligonucleotide
  Sense strand starting at position 924 of SEQ ID NO: 1880228
uccagcuuccuggauuaau

SEQ ID NO: 1951607 - RNA, 19 nt, Artificial Sequence
  Description of Artificial Sequence: Synthetic oligonucleotide
  Antisense strand to SEQ ID NO: 1951606
auuaauccaggaagcugga

SEQ ID NO: 1951608 - RNA, 19 nt, Artificial Sequence
  Description of Artificial Sequence: Synthetic oligonucleotide
  Sense strand starting at position 953 of SEQ ID NO: 1880228
gaaugaaguugguugauaa

SEQ ID NO: 1951609 - RNA, 19 nt, Artificial Sequence
  Description of Artificial Sequence: Synthetic oligonucleotide
  Antisense strand to SEQ ID NO: 1951608
uuaucaaccaacuucauuc

SEQ ID NO: 1951610 - RNA, 19 nt, Artificial Sequence
  Description of Artificial Sequence: Synthetic oligonucleotide
  Sense strand starting at position 954 of SEQ ID NO: 1880228
aaugaaguugguugauaau

SEQ ID NO: 1951611 - RNA, 19 nt, Artificial Sequence
  Description of Artificial Sequence: Synthetic oligonucleotide
  Antisense strand to SEQ ID NO: 1951610
auuaucaaccaacuucauu

SEQ ID NO: 1951612 - RNA, 19 nt, Artificial Sequence
  Description of Artificial Sequence: Synthetic oligonucleotide
  Sense strand starting at position 964 of SEQ ID NO: 1880228
guugauaauguuuagccua

SEQ ID NO: 1951613 - RNA, 19 nt, Artificial Sequence
  Description of Artificial Sequence: Synthetic oligonucleotide
  Antisense strand to SEQ ID NO: 1951612
uaggcuaaacauuaucaac

SEQ ID NO: 1951614 - RNA, 19 nt, Artificial Sequence
  Description of Artificial Sequence: Synthetic oligonucleotide
  Sense strand starting at position 969 of SEQ ID NO: 1880228
uaauguuuagccuagcaag

SEQ ID NO: 1951615 - RNA, 19 nt, Artificial Sequence
  Description of Artificial Sequence: Synthetic oligonucleotide
  Antisense strand to SEQ ID NO: 1951614
cuugcuaggcuaaacauua

SEQ ID NO: 1951616 - RNA, 19 nt, Artificial Sequence
  Description of Artificial Sequence: Synthetic oligonucleotide
  Sense strand starting at position 1016 of SEQ ID NO: 1880228
uggcuuaggcagcaaauua

SEQ ID NO: 1951617 - RNA, 19 nt, Artificial Sequence
  Description of Artificial Sequence: Synthetic oligonucleotide
  Antisense strand to SEQ ID NO: 1951616
uaauuugcugccuaagcca

SEQ ID NO: 1951618 - RNA, 19 nt, Artificial Sequence
  Description of Artificial Sequence: Synthetic oligonucleotide
  Sense strand starting at position 1075 of SEQ ID NO: 1880228
auaccuuauucuuuaggua

SEQ ID NO: 1951619 - RNA, 19 nt, Artificial Sequence
  Description of Artificial Sequence: Synthetic oligonucleotide
  Antisense strand to SEQ ID NO: 1951618
uaccuaaagaauaagguau

SEQ ID NO: 1951620 - RNA, 19 nt, Artificial Sequence
  Description of Artificial Sequence: Synthetic oligonucleotide
  Sense strand starting at position 1184 of SEQ ID NO: 1880228
cugcuaagguaucccagaa

SEQ ID NO: 1951621 - RNA, 19 nt, Artificial Sequence
  Description of Artificial Sequence: Synthetic oligonucleotide
  Antisense strand to SEQ ID NO: 1951620
uucugggauaccuuagcag

SEQ ID NO: 1951622 - RNA, 19 nt, Artificial Sequence
  Description of Artificial Sequence: Synthetic oligonucleotide
  Sense strand starting at position 1318 of SEQ ID NO: 1880228
agggaagccuucccuucua

SEQ ID NO: 1951623 - RNA, 19 nt, Artificial Sequence
  Description of Artificial Sequence: Synthetic oligonucleotide
  Antisense strand to SEQ ID NO: 1951622
uagaagggaaggcuucccu

SEQ ID NO: 1951624 - RNA, 19 nt, Artificial Sequence
  Description of Artificial Sequence: Synthetic oligonucleotide
  Sense strand starting at position 1389 of SEQ ID NO: 1880228
gggagacuugauuguccuu

SEQ ID NO: 1951625 - RNA, 19 nt, Artificial Sequence
  Description of Artificial Sequence: Synthetic oligonucleotide
  Antisense strand to SEQ ID NO: 1951624
aaggacaaucaagucuccc

SEQ ID NO: 1951626 - RNA, 19 nt, Artificial Sequence
  Description of Artificial Sequence: Synthetic oligonucleotide
  Sense strand starting at position 1562 of SEQ ID NO: 1880228
gaggacuucugacuguaau

SEQ ID NO: 1951627 - RNA, 19 nt, Artificial Sequence
  Description of Artificial Sequence: Synthetic oligonucleotide
  Antisense strand to SEQ ID NO: 1951626
auuacagucagaaguccuc

SEQ ID NO: 1951628 - RNA, 19 nt, Artificial Sequence
  Description of Artificial Sequence: Synthetic oligonucleotide
  Sense strand starting at position 1563 of SEQ ID NO: 1880228
aggacuucugacuguaauc

SEQ ID NO: 1951629 - RNA, 19 nt, Artificial Sequence
  Description of Artificial Sequence: Synthetic oligonucleotide
  Antisense strand to SEQ ID NO: 1951628
gauuacagucagaaguccu

SEQ ID NO: 1951630 - RNA, 19 nt, Artificial Sequence
  Description of Artificial Sequence: Synthetic oligonucleotide
  Sense strand starting at position 3362 of SEQ ID NO: 1880228
cuccgaaaguaaguacuua

SEQ ID NO: 1951631 - RNA, 19 nt, Artificial Sequence
  Description of Artificial Sequence: Synthetic oligonucleotide
  Antisense strand to SEQ ID NO: 1951630
uaaguacuuacuuucggag

SEQ ID NO: 1951632 - RNA, 19 nt, Artificial Sequence
  Description of Artificial Sequence: Synthetic oligonucleotide
  Sense strand starting at position 3720 of SEQ ID NO: 1880228
ugaggaaucuugguagguu

SEQ ID NO: 1951633 - RNA, 19 nt, Artificial Sequence
  Description of Artificial Sequence: Synthetic oligonucleotide
  Antisense strand to SEQ ID NO: 1951632
aaccuaccaagauuccuca

SEQ ID NO: 1951634 - RNA, 19 nt, Artificial Sequence
  Description of Artificial Sequence: Synthetic oligonucleotide
  Sense strand starting at position 3955 of SEQ ID NO: 1880228
cccucaguccuugauguau

SEQ ID NO: 1951635 - RNA, 19 nt, Artificial Sequence
  Description of Artificial Sequence: Synthetic oligonucleotide
  Antisense strand to SEQ ID NO: 1951634
auacaucaaggacugaggg

SEQ ID NO: 1951636 - RNA, 19 nt, Artificial Sequence
  Description of Artificial Sequence: Synthetic oligonucleotide
  Sense strand starting at position 3964 of SEQ ID NO: 1880228
cuugauguaucauuugcua

SEQ ID NO: 1951637 - RNA, 19 nt, Artificial Sequence
  Description of Artificial Sequence: Synthetic oligonucleotide
  Antisense strand to SEQ ID NO: 1951636
uagcaaaugauacaucaag

SEQ ID NO: 1951638 - RNA, 19 nt, Artificial Sequence
  Description of Artificial Sequence: Synthetic oligonucleotide
  Sense strand starting at position 3570 of SEQ ID NO: 1880229
cagucaaacugauauguga

SEQ ID NO: 1951639 - RNA, 19 nt, Artificial Sequence
  Description of Artificial Sequence: Synthetic oligonucleotide
  Antisense strand to SEQ ID NO: 1951638
ucacauaucaguuugacug

SEQ ID NO: 1951640 - RNA, 19 nt, Artificial Sequence
  Description of Artificial Sequence: Synthetic oligonucleotide
  Sense strand starting at position 3648 of SEQ ID NO: 1880229
agcaaaugauucuguaaga

SEQ ID NO: 1951641 - RNA, 19 nt, Artificial Sequence
  Description of Artificial Sequence: Synthetic oligonucleotide
  Antisense strand to SEQ ID NO: 1951640
ucuuacagaaucauuugcu

SEQ ID NO: 1951642 - RNA, 19 nt, Artificial Sequence
  Description of Artificial Sequence: Synthetic oligonucleotide
  Sense strand starting at position 3649 of SEQ ID NO: 1880229
gcaaaugauucuguaagag

SEQ ID NO: 1951643 - RNA, 19 nt, Artificial Sequence
  Description of Artificial Sequence: Synthetic oligonucleotide
  Antisense strand to SEQ ID NO: 1951642
cucuuacagaaucauuugc

SEQ ID NO: 1951644 - RNA, 19 nt, Artificial Sequence
  Description of Artificial Sequence: Synthetic oligonucleotide
  Sense strand starting at position 3659 of SEQ ID NO: 1880229
cuguaagagucagauugga

SEQ ID NO: 1951645 - RNA, 19 nt, Artificial Sequence
  Description of Artificial Sequence: Synthetic oligonucleotide
  Antisense strand to SEQ ID NO: 1951644
uccaaucugacucuuacag

SEQ ID NO: 1951646 - RNA, 19 nt, Artificial Sequence
  Description of Artificial Sequence: Synthetic oligonucleotide
  Sense strand starting at position 3716 of SEQ ID NO: 1880229
guaagucuuuccucugauc

SEQ ID NO: 1951647 - RNA, 19 nt, Artificial Sequence
  Description of Artificial Sequence: Synthetic oligonucleotide
  Antisense strand to SEQ ID NO: 1951646
gaucagaggaaagacuuac

SEQ ID NO: 1951648 - RNA, 19 nt, Artificial Sequence
  Description of Artificial Sequence: Synthetic oligonucleotide
  Sense strand starting at position 3719 of SEQ ID NO: 1880229
agucuuuccucugaucagu

SEQ ID NO: 1951649 - RNA, 19 nt, Artificial Sequence
  Description of Artificial Sequence: Synthetic oligonucleotide
  Antisense strand to SEQ ID NO: 1951648
acugaucagaggaaagacu

SEQ ID NO: 1951650 - RNA, 19 nt, Artificial Sequence
  Description of Artificial Sequence: Synthetic oligonucleotide
  Sense strand starting at position 3785 of SEQ ID NO: 1880229
agcauuuggucuuauuucu

SEQ ID NO: 1951651 - RNA, 19 nt, Artificial Sequence
  Description of Artificial Sequence: Synthetic oligonucleotide
  Antisense strand to SEQ ID NO: 1951650
agaaauaagaccaaaugcu

SEQ ID NO: 1951652 - RNA, 19 nt, Artificial Sequence
  Description of Artificial Sequence: Synthetic oligonucleotide
  Sense strand starting at position 3791 of SEQ ID NO: 1880229
uggucuuauuucuacacua

SEQ ID NO: 1951653 - RNA, 19 nt, Artificial Sequence
  Description of Artificial Sequence: Synthetic oligonucleotide
  Antisense strand to SEQ ID NO: 1951652
uaguguagaaauaagacca

SEQ ID NO: 1951654 - RNA, 19 nt, Artificial Sequence
  Description of Artificial Sequence: Synthetic oligonucleotide
  Sense strand starting at position 3816 of SEQ ID NO: 1880229
aaaugaaguuguuucuuga

SEQ ID NO: 1951655 - RNA, 19 nt, Artificial Sequence
  Description of Artificial Sequence: Synthetic oligonucleotide
  Antisense strand to SEQ ID NO: 1951654
ucaagaaacaacuucauuu

SEQ ID NO: 1951656 - RNA, 19 nt, Artificial Sequence
  Description of Artificial Sequence: Synthetic oligonucleotide
  Sense strand starting at position 3819 of SEQ ID NO: 1880229
ugaaguuguuucuugagua

SEQ ID NO: 1951657 - RNA, 19 nt, Artificial Sequence
  Description of Artificial Sequence: Synthetic oligonucleotide
  Antisense strand to SEQ ID NO: 1951656
uacucaagaaacaacuuca

SEQ ID NO: 1951658 - RNA, 19 nt, Artificial Sequence
  Description of Artificial Sequence: Synthetic oligonucleotide
  Sense strand starting at position 3823 of SEQ ID NO: 1880229
guuguuucuugaguauaca

SEQ ID NO: 1951659 - RNA, 19 nt, Artificial Sequence
  Description of Artificial Sequence: Synthetic oligonucleotide
  Antisense strand to SEQ ID NO: 1951658
uguauacucaagaaacaac

SEQ ID NO: 1951660 - RNA, 19 nt, Artificial Sequence
  Description of Artificial Sequence: Synthetic oligonucleotide
  Sense strand starting at position 3824 of SEQ ID NO: 1880229
uuguuucuugaguauacau

SEQ ID NO: 1951661 - RNA, 19 nt, Artificial Sequence
  Description of Artificial Sequence: Synthetic oligonucleotide
  Antisense strand to SEQ ID NO: 1951660
auguauacucaagaaacaa

SEQ ID NO: 1951662 - RNA, 19 nt, Artificial Sequence
  Description of Artificial Sequence: Synthetic oligonucleotide
  Sense strand starting at position 3915 of SEQ ID NO: 1880229
uaguaagucuucucuggac

SEQ ID NO: 1951663 - RNA, 19 nt, Artificial Sequence
  Description of Artificial Sequence: Synthetic oligonucleotide
  Antisense strand to SEQ ID NO: 1951662
guccagagaagacuuacua

SEQ ID NO: 1951664 - RNA, 19 nt, Artificial Sequence
  Description of Artificial Sequence: Synthetic oligonucleotide
  Sense strand starting at position 3917 of SEQ ID NO: 1880229
guaagucuucucuggacaa

SEQ ID NO: 1951665 - RNA, 19 nt, Artificial Sequence
  Description of Artificial Sequence: Synthetic oligonucleotide
  Antisense strand to SEQ ID NO: 1951664
uuguccagagaagacuuac

SEQ ID NO: 1951666 - RNA, 19 nt, Artificial Sequence
  Description of Artificial Sequence: Synthetic oligonucleotide
  Sense strand starting at position 332 of SEQ ID NO: 1880230
aacagaaaguuauguauga

SEQ ID NO: 1951667 - RNA, 19 nt, Artificial Sequence
  Description of Artificial Sequence: Synthetic oligonucleotide
  Antisense strand to SEQ ID NO: 1951666
ucauacauaacuuucuguu

SEQ ID NO: 1951668 - RNA, 19 nt, Artificial Sequence
  Description of Artificial Sequence: Synthetic oligonucleotide
  Sense strand starting at position 333 of SEQ ID NO: 1880230
acagaaaguuauguaugau

SEQ ID NO: 1951669 - RNA, 19 nt, Artificial Sequence
  Description of Artificial Sequence: Synthetic oligonucleotide
  Antisense strand to SEQ ID NO: 1951668
aucauacauaacuuucugu

SEQ ID NO: 1951670 - RNA, 19 nt, Artificial Sequence
  Description of Artificial Sequence: Synthetic oligonucleotide
  Sense strand starting at position 336 of SEQ ID NO: 1880230
gaaaguuauguaugaucuu

SEQ ID NO: 1951671 - RNA, 19 nt, Artificial Sequence
  Description of Artificial Sequence: Synthetic oligonucleotide
  Antisense strand to SEQ ID NO: 1951670
aagaucauacauaacuuuc

SEQ ID NO: 1951672 - RNA, 19 nt, Artificial Sequence
  Description of Artificial Sequence: Synthetic oligonucleotide
  Sense strand starting at position 339 of SEQ ID NO: 1880230
aguuauguaugaucuugga

SEQ ID NO: 1951673 - RNA, 19 nt, Artificial Sequence
  Description of Artificial Sequence: Synthetic oligonucleotide
  Antisense strand to SEQ ID NO: 1951672
uccaagaucauacauaacu

SEQ ID NO: 1951674 - RNA, 19 nt, Artificial Sequence
  Description of Artificial Sequence: Synthetic oligonucleotide
  Sense strand starting at position 343 of SEQ ID NO: 1880230
auguaugaucuuggacaag

SEQ ID NO: 1951675 - RNA, 19 nt, Artificial Sequence
  Description of Artificial Sequence: Synthetic oligonucleotide
  Antisense strand to SEQ ID NO: 1951674
cuuguccaagaucauacau

SEQ ID NO: 1951676 - RNA, 19 nt, Artificial Sequence
  Description of Artificial Sequence: Synthetic oligonucleotide
  Sense strand starting at position 372 of SEQ ID NO: 1880230
ucuagugucuuaucuguaa

SEQ ID NO: 1951677 - RNA, 19 nt, Artificial Sequence
  Description of Artificial Sequence: Synthetic oligonucleotide
  Antisense strand to SEQ ID NO: 1951676
uuacagauaagacacuaga

SEQ ID NO: 1951678 - RNA, 19 nt, Artificial Sequence
  Description of Artificial Sequence: Synthetic oligonucleotide
  Sense strand starting at position 419 of SEQ ID NO: 1880230
uagagaugcugugaggauu

SEQ ID NO: 1951679 - RNA, 19 nt, Artificial Sequence
  Description of Artificial Sequence: Synthetic oligonucleotide
  Antisense strand to SEQ ID NO: 1951678
aauccucacagcaucucua

SEQ ID NO: 1951680 - RNA, 19 nt, Artificial Sequence
  Description of Artificial Sequence: Synthetic oligonucleotide
  Sense strand starting at position 433 of SEQ ID NO: 1880230
ggauuaagugcacacagua

SEQ ID NO: 1951681 - RNA, 19 nt, Artificial Sequence
  Description of Artificial Sequence: Synthetic oligonucleotide
  Antisense strand to SEQ ID NO: 1951680
uacugugugcacuuaaucc

SEQ ID NO: 1951682 - RNA, 19 nt, Artificial Sequence
  Description of Artificial Sequence: Synthetic oligonucleotide
  Sense strand starting at position 509 of SEQ ID NO: 1880230
ugaaguaacuguuugcacu

SEQ ID NO: 1951683 - RNA, 19 nt, Artificial Sequence
  Description of Artificial Sequence: Synthetic oligonucleotide
  Antisense strand to SEQ ID NO: 1951682
agugcaaacaguuacuuca

SEQ ID NO: 1951684 - RNA, 19 nt, Artificial Sequence
  Description of Artificial Sequence: Synthetic oligonucleotide
  Sense strand starting at position 574 of SEQ ID NO: 1880230
uguggagacuucucccaaa

SEQ ID NO: 1951685 - RNA, 19 nt, Artificial Sequence
  Description of Artificial Sequence: Synthetic oligonucleotide
  Antisense strand to SEQ ID NO: 1951684
uuugggagaagucuccaca

SEQ ID NO: 1951686 - RNA, 19 nt, Artificial Sequence
  Description of Artificial Sequence: Synthetic oligonucleotide
  Sense strand starting at position 599 of SEQ ID NO: 1880230
acuucuucggaaggacaua

SEQ ID NO: 1951687 - RNA, 19 nt, Artificial Sequence
  Description of Artificial Sequence: Synthetic oligonucleotide
  Antisense strand to SEQ ID NO: 1951686
uauguccuuccgaagaagu

SEQ ID NO: 1951688 - RNA, 19 nt, Artificial Sequence
  Description of Artificial Sequence: Synthetic oligonucleotide
  Sense strand starting at position 733 of SEQ ID NO: 1880230
ggugcuuacucggugccaa

SEQ ID NO: 1951689 - RNA, 19 nt, Artificial Sequence
  Description of Artificial Sequence: Synthetic oligonucleotide
  Antisense strand to SEQ ID NO: 1951688
uuggcaccgaguaagcacc

SEQ ID NO: 1951690 - RNA, 19 nt, Artificial Sequence
  Description of Artificial Sequence: Synthetic oligonucleotide
  Sense strand starting at position 900 of SEQ ID NO: 1880230
cuacuuugccaagguaauu

SEQ ID NO: 1951691 - RNA, 19 nt, Artificial Sequence
  Description of Artificial Sequence: Synthetic oligonucleotide
  Antisense strand to SEQ ID NO: 1951690
aauuaccuuggcaaaguag

SEQ ID NO: 1951692 - RNA, 19 nt, Artificial Sequence
  Description of Artificial Sequence: Synthetic oligonucleotide
  Sense strand starting at position 965 of SEQ ID NO: 1880230
gggcaaaugcccuaauaag

SEQ ID NO: 1951693 - RNA, 19 nt, Artificial Sequence
  Description of Artificial Sequence: Synthetic oligonucleotide
  Antisense strand to SEQ ID NO: 1951692
cuuauuagggcauuugccc

SEQ ID NO: 1951694 - RNA, 19 nt, Artificial Sequence
  Description of Artificial Sequence: Synthetic oligonucleotide
  Sense strand starting at position 1016 of SEQ ID NO: 1880230
guccaagauuuccaaguuu

SEQ ID NO: 1951695 - RNA, 19 nt, Artificial Sequence
  Description of Artificial Sequence: Synthetic oligonucleotide
  Antisense strand to SEQ ID NO: 1951694
aaacuuggaaaucuuggac

SEQ ID NO: 1951696 - RNA, 19 nt, Artificial Sequence
  Description of Artificial Sequence: Synthetic oligonucleotide
  Sense strand starting at position 1606 of SEQ ID NO: 1880230
gcgguguguccagcggaga

SEQ ID NO: 1951697 - RNA, 19 nt, Artificial Sequence
  Description of Artificial Sequence: Synthetic oligonucleotide
  Antisense strand to SEQ ID NO: 1951696
ucuccgcuggacacaccgc

SEQ ID NO: 1951698 - RNA, 19 nt, Artificial Sequence
  Description of Artificial Sequence: Synthetic oligonucleotide
  Sense strand starting at position 2300 of SEQ ID NO: 1880230
guuccuuggucuuuauaua

SEQ ID NO: 1951699 - RNA, 19 nt, Artificial Sequence
  Description of Artificial Sequence: Synthetic oligonucleotide
  Antisense strand to SEQ ID NO: 1951698
uauauaaagaccaaggaac

SEQ ID NO: 1951700 - RNA, 19 nt, Artificial Sequence
  Description of Artificial Sequence: Synthetic oligonucleotide
  Sense strand starting at position 2431 of SEQ ID NO: 1880230
gcuuguugucacgcucuga

SEQ ID NO: 1951701 - RNA, 19 nt, Artificial Sequence
  Description of Artificial Sequence: Synthetic oligonucleotide
  Antisense strand to SEQ ID NO: 1951700
ucagagcgugacaacaagc

SEQ ID NO: 1951702 - RNA, 19 nt, Artificial Sequence
  Description of Artificial Sequence: Synthetic oligonucleotide
  Sense strand starting at position 2432 of SEQ ID NO: 1880230
cuuguugucacgcucugau

SEQ ID NO: 1951703 - RNA, 19 nt, Artificial Sequence
  Description of Artificial Sequence: Synthetic oligonucleotide
  Antisense strand to SEQ ID NO: 1951702
aucagagcgugacaacaag

SEQ ID NO: 1951704 - RNA, 19 nt, Artificial Sequence
  Description of Artificial Sequence: Synthetic oligonucleotide
  Sense strand starting at position 2587 of SEQ ID NO: 1880230
gcgcgauaugaacgacagu

SEQ ID NO: 1951705 - RNA, 19 nt, Artificial Sequence
  Description of Artificial Sequence: Synthetic oligonucleotide
  Antisense strand to SEQ ID NO: 1951704
acugucguucauaucgcgc

SEQ ID NO: 1951706 - RNA, 19 nt, Artificial Sequence
  Description of Artificial Sequence: Synthetic oligonucleotide
  Sense strand starting at position 2637 of SEQ ID NO: 1880230
cugugcgacguccuaagua

SEQ ID NO: 1951707 - RNA, 19 nt, Artificial Sequence
  Description of Artificial Sequence: Synthetic oligonucleotide
  Antisense strand to SEQ ID NO: 1951706
uacuuaggacgucgcacag

SEQ ID NO: 1951708 - RNA, 19 nt, Artificial Sequence
  Description of Artificial Sequence: Synthetic oligonucleotide
  Sense strand starting at position 2792 of SEQ ID NO: 1880230
gugaaaugaccguggacug

SEQ ID NO: 1951709 - RNA, 19 nt, Artificial Sequence
  Description of Artificial Sequence: Synthetic oligonucleotide
  Antisense strand to SEQ ID NO: 1951708
caguccacggucauuucac

SEQ ID NO: 1951710 - RNA, 19 nt, Artificial Sequence
  Description of Artificial Sequence: Synthetic oligonucleotide
  Sense strand starting at position 2793 of SEQ ID NO: 1880230
ugaaaugaccguggacuga

SEQ ID NO: 1951711 - RNA, 19 nt, Artificial Sequence
  Description of Artificial Sequence: Synthetic oligonucleotide
  Antisense strand to SEQ ID NO: 1951710
ucaguccacggucauuuca

SEQ ID NO: 1951712 - RNA, 19 nt, Artificial Sequence
  Description of Artificial Sequence: Synthetic oligonucleotide
  Sense strand starting at position 2915 of SEQ ID NO: 1880230
cuagaaggcuucuuccagu

SEQ ID NO: 1951713 - RNA, 19 nt, Artificial Sequence
  Description of Artificial Sequence: Synthetic oligonucleotide
  Antisense strand to SEQ ID NO: 1951712
acuggaagaagccuucuag

SEQ ID NO: 1951714 - RNA, 19 nt, Artificial Sequence
  Description of Artificial Sequence: Synthetic oligonucleotide
  Sense strand starting at position 3221 of SEQ ID NO: 1880230
aagagauucgccugccuug

SEQ ID NO: 1951715 - RNA, 19 nt, Artificial Sequence
  Description of Artificial Sequence: Synthetic oligonucleotide
  Antisense strand to SEQ ID NO: 1951714
caaggcaggcgaaucucuu

SEQ ID NO: 1951716 - RNA, 19 nt, Artificial Sequence
  Description of Artificial Sequence: Synthetic oligonucleotide
  Sense strand starting at position 3299 of SEQ ID NO: 1880230
uuuaauauguuggagagua

SEQ ID NO: 1951717 - RNA, 19 nt, Artificial Sequence
  Description of Artificial Sequence: Synthetic oligonucleotide
  Antisense strand to SEQ ID NO: 1951716
uacucuccaacauauuaaa

SEQ ID NO: 1951718 - RNA, 19 nt, Artificial Sequence
  Description of Artificial Sequence: Synthetic oligonucleotide
  Sense strand starting at position 3321 of SEQ ID NO: 1880230
ugaggaggcuucuuaugac

SEQ ID NO: 1951719 - RNA, 19 nt, Artificial Sequence
  Description of Artificial Sequence: Synthetic oligonucleotide
  Antisense strand to SEQ ID NO: 1951718
gucauaagaagccuccuca

SEQ ID NO: 1951720 - RNA, 19 nt, Artificial Sequence
  Description of Artificial Sequence: Synthetic oligonucleotide
  Sense strand starting at position 3338 of SEQ ID NO: 1880230
acauguuauuuggaaaguu

SEQ ID NO: 1951721 - RNA, 19 nt, Artificial Sequence
  Description of Artificial Sequence: Synthetic oligonucleotide
  Antisense strand to SEQ ID NO: 1951720
aacuuuccaaauaacaugu

SEQ ID NO: 1951722 - RNA, 19 nt, Artificial Sequence
  Description of Artificial Sequence: Synthetic oligonucleotide
  Sense strand starting at position 3350 of SEQ ID NO: 1880230
gaaaguuauugagagaaca

SEQ ID NO: 1951723 - RNA, 19 nt, Artificial Sequence
  Description of Artificial Sequence: Synthetic oligonucleotide
  Antisense strand to SEQ ID NO: 1951722
uguucucucaauaacuuuc

SEQ ID NO: 1951724 - RNA, 19 nt, Artificial Sequence
  Description of Artificial Sequence: Synthetic oligonucleotide
  Sense strand starting at position 3369 of SEQ ID NO: 1880230
ggaaauauuucucguccuc

SEQ ID NO: 1951725 - RNA, 19 nt, Artificial Sequence
  Description of Artificial Sequence: Synthetic oligonucleotide
  Antisense strand to SEQ ID NO: 1951724
gaggacgagaaauauuucc

SEQ ID NO: 1951726 - RNA, 19 nt, Artificial Sequence
  Description of Artificial Sequence: Synthetic oligonucleotide
  Sense strand starting at position 3450 of SEQ ID NO: 1880230
ggucaaaugucaucaguca

SEQ ID NO: 1951727 - RNA, 19 nt, Artificial Sequence
  Description of Artificial Sequence: Synthetic oligonucleotide
  Antisense strand to SEQ ID NO: 1951726
ugacugaugacauuugacc

SEQ ID NO: 1951728 - RNA, 19 nt, Artificial Sequence
  Description of Artificial Sequence: Synthetic oligonucleotide
  Sense strand starting at position 3451 of SEQ ID NO: 1880230
gucaaaugucaucagucac

SEQ ID NO: 1951729 - RNA, 19 nt, Artificial Sequence
  Description of Artificial Sequence: Synthetic oligonucleotide
  Antisense strand to SEQ ID NO: 1951728
gugacugaugacauuugac

SEQ ID NO: 1951730 - RNA, 19 nt, Artificial Sequence
  Description of Artificial Sequence: Synthetic oligonucleotide
  Sense strand starting at position 3457 of SEQ ID NO: 1880230
ugucaucagucaccugaau

SEQ ID NO: 1951731 - RNA, 19 nt, Artificial Sequence
  Description of Artificial Sequence: Synthetic oligonucleotide
  Antisense strand to SEQ ID NO: 1951730
auucaggugacugaugaca

SEQ ID NO: 1951732 - RNA, 19 nt, Artificial Sequence
  Description of Artificial Sequence: Synthetic oligonucleotide
  Sense strand starting at position 3550 of SEQ ID NO: 1880230
ugagucaggcauugggaau

SEQ ID NO: 1951733 - RNA, 19 nt, Artificial Sequence
  Description of Artificial Sequence: Synthetic oligonucleotide
  Antisense strand to SEQ ID NO: 1951732
auucccaaugccugacuca

SEQ ID NO: 1951734 - RNA, 19 nt, Artificial Sequence
  Description of Artificial Sequence: Synthetic oligonucleotide
  Sense strand starting at position 3551 of SEQ ID NO: 1880230
gagucaggcauugggaaua

SEQ ID NO: 1951735 - RNA, 19 nt, Artificial Sequence
  Description of Artificial Sequence: Synthetic oligonucleotide
  Antisense strand to SEQ ID NO: 1951734
uauucccaaugccugacuc

SEQ ID NO: 1951736 - RNA, 19 nt, Artificial Sequence
  Description of Artificial Sequence: Synthetic oligonucleotide
  Sense strand starting at position 3576 of SEQ ID NO: 1880230
ggcauaauauucugaagga

SEQ ID NO: 1951737 - RNA, 19 nt, Artificial Sequence
  Description of Artificial Sequence: Synthetic oligonucleotide
  Antisense strand to SEQ ID NO: 1951736
uccuucagaauauuaugcc

SEQ ID NO: 1951738 - RNA, 19 nt, Artificial Sequence
  Description of Artificial Sequence: Synthetic oligonucleotide
  Sense strand starting at position 3577 of SEQ ID NO: 1880230
gcauaauauucugaaggaa

SEQ ID NO: 1951739 - RNA, 19 nt, Artificial Sequence
  Description of Artificial Sequence: Synthetic oligonucleotide
  Antisense strand to SEQ ID NO: 1951738
uuccuucagaauauuaugc

SEQ ID NO: 1951740 - RNA, 19 nt, Artificial Sequence
  Description of Artificial Sequence: Synthetic oligonucleotide
  Sense strand starting at position 3639 of SEQ ID NO: 1880230
aguuuaaggccuuaagauu

SEQ ID NO: 1951741 - RNA, 19 nt, Artificial Sequence
  Description of Artificial Sequence: Synthetic oligonucleotide
  Antisense strand to SEQ ID NO: 1951740
aaucuuaaggccuuaaacu

SEQ ID NO: 1951742 - RNA, 19 nt, Artificial Sequence
  Description of Artificial Sequence: Synthetic oligonucleotide
  Sense strand starting at position 3676 of SEQ ID NO: 1880230
aacaguauuugauaugguu

SEQ ID NO: 1951743 - RNA, 19 nt, Artificial Sequence
  Description of Artificial Sequence: Synthetic oligonucleotide
  Antisense strand to SEQ ID NO: 1951742
aaccauaucaaauacuguu

SEQ ID NO: 1951744 - RNA, 19 nt, Artificial Sequence
  Description of Artificial Sequence: Synthetic oligonucleotide
  Sense strand starting at position 3745 of SEQ ID NO: 1880230
ccauguguccuaggaggaa

SEQ ID NO: 1951745 - RNA, 19 nt, Artificial Sequence
  Description of Artificial Sequence: Synthetic oligonucleotide
  Antisense strand to SEQ ID NO: 1951744
uuccuccuaggacacaugg

SEQ ID NO: 1951746 - RNA, 19 nt, Artificial Sequence
  Description of Artificial Sequence: Synthetic oligonucleotide
  Sense strand starting at position 163 of SEQ ID NO: 1880231
gagggagagugcuuaagga

SEQ ID NO: 1951747 - RNA, 19 nt, Artificial Sequence
  Description of Artificial Sequence: Synthetic oligonucleotide
  Antisense strand to SEQ ID NO: 1951746
uccuuaagcacucucccuc

SEQ ID NO: 1951748 - RNA, 19 nt, Artificial Sequence
  Description of Artificial Sequence: Synthetic oligonucleotide
  Sense strand starting at position 173 of SEQ ID NO: 1880231
gcuuaaggaggucaccauu

SEQ ID NO: 1951749 - RNA, 19 nt, Artificial Sequence
  Description of Artificial Sequence: Synthetic oligonucleotide
  Antisense strand to SEQ ID NO: 1951748
aauggugaccuccuuaagc

SEQ ID NO: 1951750 - RNA, 19 nt, Artificial Sequence
  Description of Artificial Sequence: Synthetic oligonucleotide
  Sense strand starting at position 179 of SEQ ID NO: 1880231
ggaggucaccauugcaaga

SEQ ID NO: 1951751 - RNA, 19 nt, Artificial Sequence
  Description of Artificial Sequence: Synthetic oligonucleotide
  Antisense strand to SEQ ID NO: 1951750
ucuugcaauggugaccucc

SEQ ID NO: 1951752 - RNA, 19 nt, Artificial Sequence
  Description of Artificial Sequence: Synthetic oligonucleotide
  Sense strand starting at position 210 of SEQ ID NO: 1880231
accagucaccuuuguugau

SEQ ID NO: 1951753 - RNA, 19 nt, Artificial Sequence
  Description of Artificial Sequence: Synthetic oligonucleotide
  Antisense strand to SEQ ID NO: 1951752
aucaacaaaggugacuggu

SEQ ID NO: 1951754 - RNA, 19 nt, Artificial Sequence
  Description of Artificial Sequence: Synthetic oligonucleotide
  Sense strand starting at position 222 of SEQ ID NO: 1880231
uguugaucuugccuacaac

SEQ ID NO: 1951755 - RNA, 19 nt, Artificial Sequence
  Description of Artificial Sequence: Synthetic oligonucleotide
  Antisense strand to SEQ ID NO: 1951754
guuguaggcaagaucaaca

SEQ ID NO: 1951756 - RNA, 19 nt, Artificial Sequence
  Description of Artificial Sequence: Synthetic oligonucleotide
  Sense strand starting at position 223 of SEQ ID NO: 1880231
guugaucuugccuacaaca

SEQ ID NO: 1951757 - RNA, 19 nt, Artificial Sequence
  Description of Artificial Sequence: Synthetic oligonucleotide
  Antisense strand to SEQ ID NO: 1951756
uguuguaggcaagaucaac

SEQ ID NO: 1951758 - RNA, 19 nt, Artificial Sequence
  Description of Artificial Sequence: Synthetic oligonucleotide
  Sense strand starting at position 225 of SEQ ID NO: 1880231
ugaucuugccuacaacaga

SEQ ID NO: 1951759 - RNA, 19 nt, Artificial Sequence
  Description of Artificial Sequence: Synthetic oligonucleotide
  Antisense strand to SEQ ID NO: 1951758
ucuguuguaggcaagauca

SEQ ID NO: 1951760 - RNA, 19 nt, Artificial Sequence
  Description of Artificial Sequence: Synthetic oligonucleotide
  Sense strand starting at position 256 of SEQ ID NO: 1880231
ucgaguguugucuuggcga

SEQ ID NO: 1951761 - RNA, 19 nt, Artificial Sequence
  Description of Artificial Sequence: Synthetic oligonucleotide
  Antisense strand to SEQ ID NO: 1951760
ucgccaagacaacacucga

SEQ ID NO: 1951762 - RNA, 19 nt, Artificial Sequence
  Description of Artificial Sequence: Synthetic oligonucleotide
  Sense strand starting at position 261 of SEQ ID NO: 1880231
uguugucuuggcgagaaua

SEQ ID NO: 1951763 - RNA, 19 nt, Artificial Sequence
  Description of Artificial Sequence: Synthetic oligonucleotide
  Antisense strand to SEQ ID NO: 1951762
uauucucgccaagacaaca

SEQ ID NO: 1951764 - RNA, 19 nt, Artificial Sequence
  Description of Artificial Sequence: Synthetic oligonucleotide
  Sense strand starting at position 263 of SEQ ID NO: 1880231
uugucuuggcgagaauaga

SEQ ID NO: 1951765 - RNA, 19 nt, Artificial Sequence
  Description of Artificial Sequence: Synthetic oligonucleotide
  Antisense strand to SEQ ID NO: 1951764
ucuauucucgccaagacaa

SEQ ID NO: 1951766 - RNA, 19 nt, Artificial Sequence
  Description of Artificial Sequence: Synthetic oligonucleotide
  Sense strand starting at position 364 of SEQ ID NO: 1880231
ccggaucuucucugccaca

SEQ ID NO: 1951767 - RNA, 19 nt, Artificial Sequence
  Description of Artificial Sequence: Synthetic oligonucleotide
  Antisense strand to SEQ ID NO: 1951766
uguggcagagaagauccgg

SEQ ID NO: 1951768 - RNA, 19 nt, Artificial Sequence
  Description of Artificial Sequence: Synthetic oligonucleotide
  Sense strand starting at position 418 of SEQ ID NO: 1880231
gucaauuacuggucaggca

SEQ ID NO: 1951769 - RNA, 19 nt, Artificial Sequence
  Description of Artificial Sequence: Synthetic oligonucleotide
  Antisense strand to SEQ ID NO: 1951768
ugccugaccaguaauugac

SEQ ID NO: 1951770 - RNA, 19 nt, Artificial Sequence
  Description of Artificial Sequence: Synthetic oligonucleotide
  Sense strand starting at position 449 of SEQ ID NO: 1880231
guuagagaaugggaucaaa

SEQ ID NO: 1951771 - RNA, 19 nt, Artificial Sequence
  Description of Artificial Sequence: Synthetic oligonucleotide
  Antisense strand to SEQ ID NO: 1951770
uuugaucccauucucuaac

SEQ ID NO: 1951772 - RNA, 19 nt, Artificial Sequence
  Description of Artificial Sequence: Synthetic oligonucleotide
  Sense strand starting at position 522 of SEQ ID NO: 1880231
cagcguuagucaccucaaa

SEQ ID NO: 1951773 - RNA, 19 nt, Artificial Sequence
  Description of Artificial Sequence: Synthetic oligonucleotide
  Antisense strand to SEQ ID NO: 1951772
uuugaggugacuaacgcug

SEQ ID NO: 1951774 - RNA, 19 nt, Artificial Sequence
  Description of Artificial Sequence: Synthetic oligonucleotide
  Sense strand starting at position 901 of SEQ ID NO: 1880231
guugcucucagaggacaga

SEQ ID NO: 1951775 - RNA, 19 nt, Artificial Sequence
  Description of Artificial Sequence: Synthetic oligonucleotide
  Antisense strand to SEQ ID NO: 1951774
ucuguccucugagagcaac

SEQ ID NO: 1951776 - RNA, 19 nt, Artificial Sequence
  Description of Artificial Sequence: Synthetic oligonucleotide
  Sense strand starting at position 977 of SEQ ID NO: 1880231
guuugagacucacuuggaa

SEQ ID NO: 1951777 - RNA, 19 nt, Artificial Sequence
  Description of Artificial Sequence: Synthetic oligonucleotide
  Antisense strand to SEQ ID NO: 1951776
uuccaagugagucucaaac

SEQ ID NO: 1951778 - RNA, 19 nt, Artificial Sequence
  Description of Artificial Sequence: Synthetic oligonucleotide
  Sense strand starting at position 1086 of SEQ ID NO: 1880231
guguccacaacguagaaau

SEQ ID NO: 1951779 - RNA, 19 nt, Artificial Sequence
  Description of Artificial Sequence: Synthetic oligonucleotide
  Antisense strand to SEQ ID NO: 1951778
auuucuacguuguggacac

SEQ ID NO: 1951780 - RNA, 19 nt, Artificial Sequence
  Description of Artificial Sequence: Synthetic oligonucleotide
  Sense strand starting at position 1183 of SEQ ID NO: 1880231
gcacacucgcucuggauaa

SEQ ID NO: 1951781 - RNA, 19 nt, Artificial Sequence
  Description of Artificial Sequence: Synthetic oligonucleotide
  Antisense strand to SEQ ID NO: 1951780
uuauccagagcgagugugc

SEQ ID NO: 1951782 - RNA, 19 nt, Artificial Sequence
  Description of Artificial Sequence: Synthetic oligonucleotide
  Sense strand starting at position 1185 of SEQ ID NO: 1880231
acacucgcucuggauaaga

SEQ ID NO: 1951783 - RNA, 19 nt, Artificial Sequence
  Description of Artificial Sequence: Synthetic oligonucleotide
  Antisense strand to SEQ ID NO: 1951782
ucuuauccagagcgagugu

SEQ ID NO: 1951784 - RNA, 19 nt, Artificial Sequence
  Description of Artificial Sequence: Synthetic oligonucleotide
  Sense strand starting at position 1243 of SEQ ID NO: 1880231
ggcuaucucccacgggaau

SEQ ID NO: 1951785 - RNA, 19 nt, Artificial Sequence
  Description of Artificial Sequence: Synthetic oligonucleotide
  Antisense strand to SEQ ID NO: 1951784
auucccgugggagauagcc

SEQ ID NO: 1951786 - RNA, 19 nt, Artificial Sequence
  Description of Artificial Sequence: Synthetic oligonucleotide
  Sense strand starting at position 1326 of SEQ ID NO: 1880231
agaaucuaugccuguguca

SEQ ID NO: 1951787 - RNA, 19 nt, Artificial Sequence
  Description of Artificial Sequence: Synthetic oligonucleotide
  Antisense strand to SEQ ID NO: 1951786
ugacacaggcauagauucu

SEQ ID NO: 1951788 - RNA, 19 nt, Artificial Sequence
  Description of Artificial Sequence: Synthetic oligonucleotide
  Sense strand starting at position 1737 of SEQ ID NO: 1880231
ccacauguucucugcuacu

SEQ ID NO: 1951789 - RNA, 19 nt, Artificial Sequence
  Description of Artificial Sequence: Synthetic oligonucleotide
  Antisense strand to SEQ ID NO: 1951788
aguagcagagaacaugugg

SEQ ID NO: 1951790 - RNA, 19 nt, Artificial Sequence
  Description of Artificial Sequence: Synthetic oligonucleotide
  Sense strand starting at position 1807 of SEQ ID NO: 1880231
acaggcuuacccugcagau

SEQ ID NO: 1951791 - RNA, 19 nt, Artificial Sequence
  Description of Artificial Sequence: Synthetic oligonucleotide
  Antisense strand to SEQ ID NO: 1951790
aucugcaggguaagccugu

SEQ ID NO: 1951792 - RNA, 19 nt, Artificial Sequence
  Description of Artificial Sequence: Synthetic oligonucleotide
  Sense strand starting at position 1827 of SEQ ID NO: 1880231
cugacuggcagaugugaaa

SEQ ID NO: 1951793 - RNA, 19 nt, Artificial Sequence
  Description of Artificial Sequence: Synthetic oligonucleotide
  Antisense strand to SEQ ID NO: 1951792
uuucacaucugccagucag

SEQ ID NO: 1951794 - RNA, 19 nt, Artificial Sequence
  Description of Artificial Sequence: Synthetic oligonucleotide
  Sense strand starting at position 2260 of SEQ ID NO: 1880231
cuagacagugggcauuauu

SEQ ID NO: 1951795 - RNA, 19 nt, Artificial Sequence
  Description of Artificial Sequence: Synthetic oligonucleotide
  Antisense strand to SEQ ID NO: 1951794
aauaaugcccacugucuag

SEQ ID NO: 1951796 - RNA, 19 nt, Artificial Sequence
  Description of Artificial Sequence: Synthetic oligonucleotide
  Sense strand starting at position 2325 of SEQ ID NO: 1880231
ugcuauagugcccagggau

SEQ ID NO: 1951797 - RNA, 19 nt, Artificial Sequence
  Description of Artificial Sequence: Synthetic oligonucleotide
  Antisense strand to SEQ ID NO: 1951796
aucccugggcacuauagca

SEQ ID NO: 1951798 - RNA, 19 nt, Artificial Sequence
  Description of Artificial Sequence: Synthetic oligonucleotide
  Sense strand starting at position 2378 of SEQ ID NO: 1880231
gcaagugcucuuuauuagg

SEQ ID NO: 1951799 - RNA, 19 nt, Artificial Sequence
  Description of Artificial Sequence: Synthetic oligonucleotide
  Antisense strand to SEQ ID NO: 1951798
ccuaauaaagagcacuugc

SEQ ID NO: 1951800 - RNA, 19 nt, Artificial Sequence
  Description of Artificial Sequence: Synthetic oligonucleotide
  Sense strand starting at position 2409 of SEQ ID NO: 1880231
cugacaagugccuguuucu

SEQ ID NO: 1951801 - RNA, 19 nt, Artificial Sequence
  Description of Artificial Sequence: Synthetic oligonucleotide
  Antisense strand to SEQ ID NO: 1951800
agaaacaggcacuugucag

SEQ ID NO: 1951802 - RNA, 19 nt, Artificial Sequence
  Description of Artificial Sequence: Synthetic oligonucleotide
  Sense strand starting at position 2662 of SEQ ID NO: 1880231
cugaguucccgucaccuaa

SEQ ID NO: 1951803 - RNA, 19 nt, Artificial Sequence
  Description of Artificial Sequence: Synthetic oligonucleotide
  Antisense strand to SEQ ID NO: 1951802
uuaggugacgggaacucag

SEQ ID NO: 1951804 - RNA, 19 nt, Artificial Sequence
  Description of Artificial Sequence: Synthetic oligonucleotide
  Sense strand starting at position 3528 of SEQ ID NO: 1880231
ggcuuaaugcagcaaugaa

SEQ ID NO: 1951805 - RNA, 19 nt, Artificial Sequence
  Description of Artificial Sequence: Synthetic oligonucleotide
  Antisense strand to SEQ ID NO: 1951804
uucauugcugcauuaagcc

SEQ ID NO: 1951806 - RNA, 19 nt, Artificial Sequence
  Description of Artificial Sequence: Synthetic oligonucleotide
  Sense strand starting at position 3689 of SEQ ID NO: 1880231
ccuacucuagcuuggaauu

SEQ ID NO: 1951807 - RNA, 19 nt, Artificial Sequence
  Description of Artificial Sequence: Synthetic oligonucleotide
  Antisense strand to SEQ ID NO: 1951806
aauuccaagcuagaguagg

SEQ ID NO: 1951808 - RNA, 19 nt, Artificial Sequence
  Description of Artificial Sequence: Synthetic oligonucleotide
  Sense strand starting at position 3763 of SEQ ID NO: 1880231
gaggcuauuguuuguuaga

SEQ ID NO: 1951809 - RNA, 19 nt, Artificial Sequence
  Description of Artificial Sequence: Synthetic oligonucleotide
  Antisense strand to SEQ ID NO: 1951808
ucuaacaaacaauagccuc

SEQ ID NO: 1951810 - RNA, 19 nt, Artificial Sequence
  Description of Artificial Sequence: Synthetic oligonucleotide
  Sense strand starting at position 3764 of SEQ ID NO: 1880231
aggcuauuguuuguuagac

SEQ ID NO: 1951811 - RNA, 19 nt, Artificial Sequence
  Description of Artificial Sequence: Synthetic oligonucleotide
  Antisense strand to SEQ ID NO: 1951810
gucuaacaaacaauagccu

SEQ ID NO: 1951812 - RNA, 19 nt, Artificial Sequence
  Description of Artificial Sequence: Synthetic oligonucleotide
  Sense strand starting at position 3793 of SEQ ID NO: 1880231
acagccaggcuuuguauaa

SEQ ID NO: 1951813 - RNA, 19 nt, Artificial Sequence
  Description of Artificial Sequence: Synthetic oligonucleotide
  Antisense strand to SEQ ID NO: 1951812
uuauacaaagccuggcugu

SEQ ID NO: 1951814 - RNA, 19 nt, Artificial Sequence
  Description of Artificial Sequence: Synthetic oligonucleotide
  Sense strand starting at position 3794 of SEQ ID NO: 1880231
cagccaggcuuuguauaaa

SEQ ID NO: 1951815 - RNA, 19 nt, Artificial Sequence
  Description of Artificial Sequence: Synthetic oligonucleotide
  Antisense strand to SEQ ID NO: 1951814
uuuauacaaagccuggcug

SEQ ID NO: 1951816 - RNA, 19 nt, Artificial Sequence
  Description of Artificial Sequence: Synthetic oligonucleotide
  Sense strand starting at position 3806 of SEQ ID NO: 1880231
guauaaagagcuuagcaau

SEQ ID NO: 1951817 - RNA, 19 nt, Artificial Sequence
  Description of Artificial Sequence: Synthetic oligonucleotide
  Antisense strand to SEQ ID NO: 1951816
auugcuaagcucuuuauac

SEQ ID NO: 1951818 - RNA, 19 nt, Artificial Sequence
  Description of Artificial Sequence: Synthetic oligonucleotide
  Sense strand starting at position 3851 of SEQ ID NO: 1880231
uugacuccuugcuuuaaag

SEQ ID NO: 1951819 - RNA, 19 nt, Artificial Sequence
  Description of Artificial Sequence: Synthetic oligonucleotide
  Antisense strand to SEQ ID NO: 1951818
cuuuaaagcaaggagucaa

SEQ ID NO: 1951820 - RNA, 19 nt, Artificial Sequence
  Description of Artificial Sequence: Synthetic oligonucleotide
  Sense strand starting at position 3869 of SEQ ID NO: 1880231
gaggaucuauuagauuucu

SEQ ID NO: 1951821 - RNA, 19 nt, Artificial Sequence
  Description of Artificial Sequence: Synthetic oligonucleotide
  Antisense strand to SEQ ID NO: 1951820
agaaaucuaauagauccuc

SEQ ID NO: 1951822 - RNA, 19 nt, Artificial Sequence
  Description of Artificial Sequence: Synthetic oligonucleotide
  Sense strand starting at position 3935 of SEQ ID NO: 1880231
ucccuucgaguuuacagaa

SEQ ID NO: 1951823 - RNA, 19 nt, Artificial Sequence
  Description of Artificial Sequence: Synthetic oligonucleotide
  Antisense strand to SEQ ID NO: 1951822
uucuguaaacucgaaggga

SEQ ID NO: 1951824 - RNA, 19 nt, Artificial Sequence
  Description of Artificial Sequence: Synthetic oligonucleotide
  Sense strand starting at position 3956 of SEQ ID NO: 1880231
gcagauagguaagcaaaua

SEQ ID NO: 1951825 - RNA, 19 nt, Artificial Sequence
  Description of Artificial Sequence: Synthetic oligonucleotide
  Antisense strand to SEQ ID NO: 1951824
uauuugcuuaccuaucugc

SEQ ID NO: 1951826 - RNA, 19 nt, Artificial Sequence
  Description of Artificial Sequence: Synthetic oligonucleotide
  Sense strand starting at position 8 of SEQ ID NO: 1880232
gaauaucacguuugugaag

SEQ ID NO: 1951827 - RNA, 19 nt, Artificial Sequence
  Description of Artificial Sequence: Synthetic oligonucleotide
  Antisense strand to SEQ ID NO: 1951826
cuucacaaacgugauauuc

SEQ ID NO: 1951828 - RNA, 19 nt, Artificial Sequence
  Description of Artificial Sequence: Synthetic oligonucleotide
  Sense strand starting at position 36 of SEQ ID NO: 1880232
acgaguuuggcccagauau

SEQ ID NO: 1951829 - RNA, 19 nt, Artificial Sequence
  Description of Artificial Sequence: Synthetic oligonucleotide
  Antisense strand to SEQ ID NO: 1951828
auaucugggccaaacucgu

SEQ ID NO: 1951830 - RNA, 19 nt, Artificial Sequence
  Description of Artificial Sequence: Synthetic oligonucleotide
  Sense strand starting at position 88 of SEQ ID NO: 1880232
ggaacaguaagcuguaauu

SEQ ID NO: 1951831 - RNA, 19 nt, Artificial Sequence
  Description of Artificial Sequence: Synthetic oligonucleotide
  Antisense strand to SEQ ID NO: 1951830
aauuacagcuuacuguucc

SEQ ID NO: 1951832 - RNA, 19 nt, Artificial Sequence
  Description of Artificial Sequence: Synthetic oligonucleotide
  Sense strand starting at position 117 of SEQ ID NO: 1880232
gagucuggucucuaauucu

SEQ ID NO: 1951833 - RNA, 19 nt, Artificial Sequence
  Description of Artificial Sequence: Synthetic oligonucleotide
  Antisense strand to SEQ ID NO: 1951832
agaauuagagaccagacuc

SEQ ID NO: 1951834 - RNA, 19 nt, Artificial Sequence
  Description of Artificial Sequence: Synthetic oligonucleotide
  Sense strand starting at position 152 of SEQ ID NO: 1880232
guaaguugucauuaucauc

SEQ ID NO: 1951835 - RNA, 19 nt, Artificial Sequence
  Description of Artificial Sequence: Synthetic oligonucleotide
  Antisense strand to SEQ ID NO: 1951834
gaugauaaugacaacuuac

SEQ ID NO: 1951836 - RNA, 19 nt, Artificial Sequence
  Description of Artificial Sequence: Synthetic oligonucleotide
  Sense strand starting at position 188 of SEQ ID NO: 1880232
uuccuaugacauggaggua

SEQ ID NO: 1951837 - RNA, 19 nt, Artificial Sequence
  Description of Artificial Sequence: Synthetic oligonucleotide
  Antisense strand to SEQ ID NO: 1951836
uaccuccaugucauaggaa

SEQ ID NO: 1951838 - RNA, 19 nt, Artificial Sequence
  Description of Artificial Sequence: Synthetic oligonucleotide
  Sense strand starting at position 231 of SEQ ID NO: 1880232
gguugcuguguagaucaaa

SEQ ID NO: 1951839 - RNA, 19 nt, Artificial Sequence
  Description of Artificial Sequence: Synthetic oligonucleotide
  Antisense strand to SEQ ID NO: 1951838
uuugaucuacacagcaacc

SEQ ID NO: 1951840 - RNA, 19 nt, Artificial Sequence
  Description of Artificial Sequence: Synthetic oligonucleotide
  Sense strand starting at position 234 of SEQ ID NO: 1880232
ugcuguguagaucaaauau

SEQ ID NO: 1951841 - RNA, 19 nt, Artificial Sequence
  Description of Artificial Sequence: Synthetic oligonucleotide
  Antisense strand to SEQ ID NO: 1951840
auauuugaucuacacagca

SEQ ID NO: 1951842 - RNA, 19 nt, Artificial Sequence
  Description of Artificial Sequence: Synthetic oligonucleotide
  Sense strand starting at position 313 of SEQ ID NO: 1880232
cagaaaguuguaggaauuc

SEQ ID NO: 1951843 - RNA, 19 nt, Artificial Sequence
  Description of Artificial Sequence: Synthetic oligonucleotide
  Antisense strand to SEQ ID NO: 1951842
gaauuccuacaacuuucug

SEQ ID NO: 1951844 - RNA, 19 nt, Artificial Sequence
  Description of Artificial Sequence: Synthetic oligonucleotide
  Sense strand starting at position 625 of SEQ ID NO: 1880232
gcucauauguuauuucuuu

SEQ ID NO: 1951845 - RNA, 19 nt, Artificial Sequence
  Description of Artificial Sequence: Synthetic oligonucleotide
  Antisense strand to SEQ ID NO: 1951844
aaagaaauaacauaugagc

SEQ ID NO: 1951846 - RNA, 19 nt, Artificial Sequence
  Description of Artificial Sequence: Synthetic oligonucleotide
  Sense strand starting at position 1204 of SEQ ID NO: 1880232
uauugugaacauggacuua

SEQ ID NO: 1951847 - RNA, 19 nt, Artificial Sequence
  Description of Artificial Sequence: Synthetic oligonucleotide
  Antisense strand to SEQ ID NO: 1951846
uaaguccauguucacaaua

SEQ ID NO: 1951848 - RNA, 19 nt, Artificial Sequence
  Description of Artificial Sequence: Synthetic oligonucleotide
  Sense strand starting at position 1227 of SEQ ID NO: 1880232
gcuugacguguugaaauua

SEQ ID NO: 1951849 - RNA, 19 nt, Artificial Sequence
  Description of Artificial Sequence: Synthetic oligonucleotide
  Antisense strand to SEQ ID NO: 1951848
uaauuucaacacgucaagc

SEQ ID NO: 1951850 - RNA, 19 nt, Artificial Sequence
  Description of Artificial Sequence: Synthetic oligonucleotide
  Sense strand starting at position 1314 of SEQ ID NO: 1880232
uugucuguccuguaaacca

SEQ ID NO: 1951851 - RNA, 19 nt, Artificial Sequence
  Description of Artificial Sequence: Synthetic oligonucleotide
  Antisense strand to SEQ ID NO: 1951850
ugguuuacaggacagacaa

SEQ ID NO: 1951852 - RNA, 19 nt, Artificial Sequence
  Description of Artificial Sequence: Synthetic oligonucleotide
  Sense strand starting at position 1408 of SEQ ID NO: 1880232
gugguuacuguuggagaag

SEQ ID NO: 1951853 - RNA, 19 nt, Artificial Sequence
  Description of Artificial Sequence: Synthetic oligonucleotide
  Antisense strand to SEQ ID NO: 1951852
cuucuccaacaguaaccac

SEQ ID NO: 1951854 - RNA, 19 nt, Artificial Sequence
  Description of Artificial Sequence: Synthetic oligonucleotide
  Sense strand starting at position 1410 of SEQ ID NO: 1880232
gguuacuguuggagaagga

SEQ ID NO: 1951855 - RNA, 19 nt, Artificial Sequence
  Description of Artificial Sequence: Synthetic oligonucleotide
  Antisense strand to SEQ ID NO: 1951854
uccuucuccaacaguaacc

SEQ ID NO: 1951856 - RNA, 19 nt, Artificial Sequence
  Description of Artificial Sequence: Synthetic oligonucleotide
  Sense strand starting at position 1521 of SEQ ID NO: 1880232
augugaaggugucuccaca

SEQ ID NO: 1951857 - RNA, 19 nt, Artificial Sequence
  Description of Artificial Sequence: Synthetic oligonucleotide
  Antisense strand to SEQ ID NO: 1951856
uguggagacaccuucacau

SEQ ID NO: 1951858 - RNA, 19 nt, Artificial Sequence
  Description of Artificial Sequence: Synthetic oligonucleotide
  Sense strand starting at position 1548 of SEQ ID NO: 1880232
agugaaaucuaccugagac

SEQ ID NO: 1951859 - RNA, 19 nt, Artificial Sequence
  Description of Artificial Sequence: Synthetic oligonucleotide
  Antisense strand to SEQ ID NO: 1951858
gucucagguagauuucacu

SEQ ID NO: 1951860 - RNA, 19 nt, Artificial Sequence
  Description of Artificial Sequence: Synthetic oligonucleotide
  Sense strand starting at position 1613 of SEQ ID NO: 1880232
ucacgaguugcccagagau

SEQ ID NO: 1951861 - RNA, 19 nt, Artificial Sequence
  Description of Artificial Sequence: Synthetic oligonucleotide
  Antisense strand to SEQ ID NO: 1951860
aucucugggcaacucguga

SEQ ID NO: 1951862 - RNA, 19 nt, Artificial Sequence
  Description of Artificial Sequence: Synthetic oligonucleotide
  Sense strand starting at position 1615 of SEQ ID NO: 1880232
acgaguugcccagagauuc

SEQ ID NO: 1951863 - RNA, 19 nt, Artificial Sequence
  Description of Artificial Sequence: Synthetic oligonucleotide
  Antisense strand to SEQ ID NO: 1951862
gaaucucugggcaacucgu

SEQ ID NO: 1951864 - RNA, 19 nt, Artificial Sequence
  Description of Artificial Sequence: Synthetic oligonucleotide
  Sense strand starting at position 1623 of SEQ ID NO: 1880232
cccagagauucccugaagu

SEQ ID NO: 1951865 - RNA, 19 nt, Artificial Sequence
  Description of Artificial Sequence: Synthetic oligonucleotide
  Antisense strand to SEQ ID NO: 1951864
acuucagggaaucucuggg

SEQ ID NO: 1951866 - RNA, 19 nt, Artificial Sequence
  Description of Artificial Sequence: Synthetic oligonucleotide
  Sense strand starting at position 1728 of SEQ ID NO: 1880232
ugaucaaacgucugagaaa

SEQ ID NO: 1951867 - RNA, 19 nt, Artificial Sequence
  Description of Artificial Sequence: Synthetic oligonucleotide
  Antisense strand to SEQ ID NO: 1951866
uuucucagacguuugauca

SEQ ID NO: 1951868 - RNA, 19 nt, Artificial Sequence
  Description of Artificial Sequence: Synthetic oligonucleotide
  Sense strand starting at position 2451 of SEQ ID NO: 1880232
gagguauuaccacagugcu

SEQ ID NO: 1951869 - RNA, 19 nt, Artificial Sequence
  Description of Artificial Sequence: Synthetic oligonucleotide
  Antisense strand to SEQ ID NO: 1951868
agcacugugguaauaccuc

SEQ ID NO: 1951870 - RNA, 19 nt, Artificial Sequence
  Description of Artificial Sequence: Synthetic oligonucleotide
  Sense strand starting at position 2479 of SEQ ID NO: 1880232
gguugagagaguggucaga

SEQ ID NO: 1951871 - RNA, 19 nt, Artificial Sequence
  Description of Artificial Sequence: Synthetic oligonucleotide
  Antisense strand to SEQ ID NO: 1951870
ucugaccacucucucaacc

SEQ ID NO: 1951872 - RNA, 19 nt, Artificial Sequence
  Description of Artificial Sequence: Synthetic oligonucleotide
  Sense strand starting at position 2481 of SEQ ID NO: 1880232
uugagagaguggucagaag

SEQ ID NO: 1951873 - RNA, 19 nt, Artificial Sequence
  Description of Artificial Sequence: Synthetic oligonucleotide
  Antisense strand to SEQ ID NO: 1951872
cuucugaccacucucucaa

SEQ ID NO: 1951874 - RNA, 19 nt, Artificial Sequence
  Description of Artificial Sequence: Synthetic oligonucleotide
  Sense strand starting at position 2562 of SEQ ID NO: 1880232
aggacuuucuaggcaaagu

SEQ ID NO: 1951875 - RNA, 19 nt, Artificial Sequence
  Description of Artificial Sequence: Synthetic oligonucleotide
  Antisense strand to SEQ ID NO: 1951874
acuuugccuagaaaguccu

SEQ ID NO: 1951876 - RNA, 19 nt, Artificial Sequence
  Description of Artificial Sequence: Synthetic oligonucleotide
  Sense strand starting at position 2563 of SEQ ID NO: 1880232
ggacuuucuaggcaaagug

SEQ ID NO: 1951877 - RNA, 19 nt, Artificial Sequence
  Description of Artificial Sequence: Synthetic oligonucleotide
  Antisense strand to SEQ ID NO: 1951876
cacuuugccuagaaagucc

SEQ ID NO: 1951878 - RNA, 19 nt, Artificial Sequence
  Description of Artificial Sequence: Synthetic oligonucleotide
  Sense strand starting at position 2628 of SEQ ID NO: 1880232
ugaguaauguaucuagaga

SEQ ID NO: 1951879 - RNA, 19 nt, Artificial Sequence
  Description of Artificial Sequence: Synthetic oligonucleotide
  Antisense strand to SEQ ID NO: 1951878
ucucuagauacauuacuca

SEQ ID NO: 1951880 - RNA, 19 nt, Artificial Sequence
  Description of Artificial Sequence: Synthetic oligonucleotide
  Sense strand starting at position 2726 of SEQ ID NO: 1880232
aaguuacuacgauggauaa

SEQ ID NO: 1951881 - RNA, 19 nt, Artificial Sequence
  Description of Artificial Sequence: Synthetic oligonucleotide
  Antisense strand to SEQ ID NO: 1951880
uuauccaucguaguaacuu

SEQ ID NO: 1951882 - RNA, 19 nt, Artificial Sequence
  Description of Artificial Sequence: Synthetic oligonucleotide
  Sense strand starting at position 2728 of SEQ ID NO: 1880232
guuacuacgauggauaagu

SEQ ID NO: 1951883 - RNA, 19 nt, Artificial Sequence
  Description of Artificial Sequence: Synthetic oligonucleotide
  Antisense strand to SEQ ID NO: 1951882
acuuauccaucguaguaac

SEQ ID NO: 1951884 - RNA, 19 nt, Artificial Sequence
  Description of Artificial Sequence: Synthetic oligonucleotide
  Sense strand starting at position 2737 of SEQ ID NO: 1880232
auggauaagugagcauuaa

SEQ ID NO: 1951885 - RNA, 19 nt, Artificial Sequence
  Description of Artificial Sequence: Synthetic oligonucleotide
  Antisense strand to SEQ ID NO: 1951884
uuaaugcucacuuauccau

SEQ ID NO: 1951886 - RNA, 19 nt, Artificial Sequence
  Description of Artificial Sequence: Synthetic oligonucleotide
  Sense strand starting at position 2741 of SEQ ID NO: 1880232
auaagugagcauuaaguuc

SEQ ID NO: 1951887 - RNA, 19 nt, Artificial Sequence
  Description of Artificial Sequence: Synthetic oligonucleotide
  Antisense strand to SEQ ID NO: 1951886
gaacuuaaugcucacuuau

SEQ ID NO: 1951888 - RNA, 19 nt, Artificial Sequence
  Description of Artificial Sequence: Synthetic oligonucleotide
  Sense strand starting at position 2793 of SEQ ID NO: 1880232
ccauuucucuaggagaaug

SEQ ID NO: 1951889 - RNA, 19 nt, Artificial Sequence
  Description of Artificial Sequence: Synthetic oligonucleotide
  Antisense strand to SEQ ID NO: 1951888
cauucuccuagagaaaugg

SEQ ID NO: 1951890 - RNA, 19 nt, Artificial Sequence
  Description of Artificial Sequence: Synthetic oligonucleotide
  Sense strand starting at position 3422 of SEQ ID NO: 1880232
gugcauuucuugucuccca

SEQ ID NO: 1951891 - RNA, 19 nt, Artificial Sequence
  Description of Artificial Sequence: Synthetic oligonucleotide
  Antisense strand to SEQ ID NO: 1951890
ugggagacaagaaaugcac

SEQ ID NO: 1951892 - RNA, 19 nt, Artificial Sequence
  Description of Artificial Sequence: Synthetic oligonucleotide
  Sense strand starting at position 3493 of SEQ ID NO: 1880232
acuauaugucaagaacugu

SEQ ID NO: 1951893 - RNA, 19 nt, Artificial Sequence
  Description of Artificial Sequence: Synthetic oligonucleotide
  Antisense strand to SEQ ID NO: 1951892
acaguucuugacauauagu

SEQ ID NO: 1951894 - RNA, 19 nt, Artificial Sequence
  Description of Artificial Sequence: Synthetic oligonucleotide
  Sense strand starting at position 3600 of SEQ ID NO: 1880232
agguauuauagagguauuc

SEQ ID NO: 1951895 - RNA, 19 nt, Artificial Sequence
  Description of Artificial Sequence: Synthetic oligonucleotide
  Antisense strand to SEQ ID NO: 1951894
gaauaccucuauaauaccu

SEQ ID NO: 1951896 - RNA, 19 nt, Artificial Sequence
  Description of Artificial Sequence: Synthetic oligonucleotide
  Sense strand starting at position 3682 of SEQ ID NO: 1880232
ucagaaagaucauauuuga

SEQ ID NO: 1951897 - RNA, 19 nt, Artificial Sequence
  Description of Artificial Sequence: Synthetic oligonucleotide
  Antisense strand to SEQ ID NO: 1951896
ucaaauaugaucuuucuga

SEQ ID NO: 1951898 - RNA, 19 nt, Artificial Sequence
  Description of Artificial Sequence: Synthetic oligonucleotide
  Sense strand starting at position 3780 of SEQ ID NO: 1880232
acaauaagagcaugaucuu

SEQ ID NO: 1951899 - RNA, 19 nt, Artificial Sequence
  Description of Artificial Sequence: Synthetic oligonucleotide
  Antisense strand to SEQ ID NO: 1951898
aagaucaugcucuuauugu

SEQ ID NO: 1951900 - RNA, 19 nt, Artificial Sequence
  Description of Artificial Sequence: Synthetic oligonucleotide
  Sense strand starting at position 3787 of SEQ ID NO: 1880232
gagcaugaucuuggaaauc

SEQ ID NO: 1951901 - RNA, 19 nt, Artificial Sequence
  Description of Artificial Sequence: Synthetic oligonucleotide
  Antisense strand to SEQ ID NO: 1951900
gauuuccaagaucaugcuc

SEQ ID NO: 1951902 - RNA, 19 nt, Artificial Sequence
  Description of Artificial Sequence: Synthetic oligonucleotide
  Sense strand starting at position 3843 of SEQ ID NO: 1880232
acagcaguccuagaaccua

SEQ ID NO: 1951903 - RNA, 19 nt, Artificial Sequence
  Description of Artificial Sequence: Synthetic oligonucleotide
  Antisense strand to SEQ ID NO: 1951902
uagguucuaggacugcugu

SEQ ID NO: 1951904 - RNA, 19 nt, Artificial Sequence
  Description of Artificial Sequence: Synthetic oligonucleotide
  Sense strand starting at position 3891 of SEQ ID NO: 1880232
gugguaacaucagcuauga

SEQ ID NO: 1951905 - RNA, 19 nt, Artificial Sequence
  Description of Artificial Sequence: Synthetic oligonucleotide
  Antisense strand to SEQ ID NO: 1951904
ucauagcugauguuaccac

SEQ ID NO: 1951906 - RNA, 19 nt, Artificial Sequence
  Description of Artificial Sequence: Synthetic oligonucleotide
  Sense strand starting at position 9 of SEQ ID NO: 1880233
uuugcucacuaugugauuu

SEQ ID NO: 1951907 - RNA, 19 nt, Artificial Sequence
  Description of Artificial Sequence: Synthetic oligonucleotide
  Antisense strand to SEQ ID NO: 1951906
aaaucacauagugagcaaa

SEQ ID NO: 1951908 - RNA, 19 nt, Artificial Sequence
  Description of Artificial Sequence: Synthetic oligonucleotide
  Sense strand starting at position 129 of SEQ ID NO: 1880233
ugugacaguaccugguauu

SEQ ID NO: 1951909 - RNA, 19 nt, Artificial Sequence
  Description of Artificial Sequence: Synthetic oligonucleotide
  Antisense strand to SEQ ID NO: 1951908
aauaccagguacugucaca

SEQ ID NO: 1951910 - RNA, 19 nt, Artificial Sequence
  Description of Artificial Sequence: Synthetic oligonucleotide
  Sense strand starting at position 130 of SEQ ID NO: 1880233
gugacaguaccugguauuu

SEQ ID NO: 1951911 - RNA, 19 nt, Artificial Sequence
  Description of Artificial Sequence: Synthetic oligonucleotide
  Antisense strand to SEQ ID NO: 1951910
aaauaccagguacugucac

SEQ ID NO: 1951912 - RNA, 19 nt, Artificial Sequence
  Description of Artificial Sequence: Synthetic oligonucleotide
  Sense strand starting at position 132 of SEQ ID NO: 1880233
gacaguaccugguauuuaa

SEQ ID NO: 1951913 - RNA, 19 nt, Artificial Sequence
  Description of Artificial Sequence: Synthetic oligonucleotide
  Antisense strand to SEQ ID NO: 1951912
uuaaauaccagguacuguc

SEQ ID NO: 1951914 - RNA, 19 nt, Artificial Sequence
  Description of Artificial Sequence: Synthetic oligonucleotide
  Sense strand starting at position 346 of SEQ ID NO: 1880233
gguaauucccagcaagaau

SEQ ID NO: 1951915 - RNA, 19 nt, Artificial Sequence
  Description of Artificial Sequence: Synthetic oligonucleotide
  Antisense strand to SEQ ID NO: 1951914
auucuugcugggaauuacc

SEQ ID NO: 1951916 - RNA, 19 nt, Artificial Sequence
  Description of Artificial Sequence: Synthetic oligonucleotide
  Sense strand starting at position 641 of SEQ ID NO: 1880233
ccaacucuagcuugagcaa

SEQ ID NO: 1951917 - RNA, 19 nt, Artificial Sequence
  Description of Artificial Sequence: Synthetic oligonucleotide
  Antisense strand to SEQ ID NO: 1951916
uugcucaagcuagaguugg

SEQ ID NO: 1951918 - RNA, 19 nt, Artificial Sequence
  Description of Artificial Sequence: Synthetic oligonucleotide
  Sense strand starting at position 714 of SEQ ID NO: 1880233
ugcuuacaaugcucaauga

SEQ ID NO: 1951919 - RNA, 19 nt, Artificial Sequence
  Description of Artificial Sequence: Synthetic oligonucleotide
  Antisense strand to SEQ ID NO: 1951918
ucauugagcauuguaagca

SEQ ID NO: 1951920 - RNA, 19 nt, Artificial Sequence
  Description of Artificial Sequence: Synthetic oligonucleotide
  Sense strand starting at position 715 of SEQ ID NO: 1880233
gcuuacaaugcucaaugaa

SEQ ID NO: 1951921 - RNA, 19 nt, Artificial Sequence
  Description of Artificial Sequence: Synthetic oligonucleotide
  Antisense strand to SEQ ID NO: 1951920
uucauugagcauuguaagc

SEQ ID NO: 1951922 - RNA, 19 nt, Artificial Sequence
  Description of Artificial Sequence: Synthetic oligonucleotide
  Sense strand starting at position 868 of SEQ ID NO: 1880233
ugccaauuacacgaucaua

SEQ ID NO: 1951923 - RNA, 19 nt, Artificial Sequence
  Description of Artificial Sequence: Synthetic oligonucleotide
  Antisense strand to SEQ ID NO: 1951922
uaugaucguguaauuggca

SEQ ID NO: 1951924 - RNA, 19 nt, Artificial Sequence
  Description of Artificial Sequence: Synthetic oligonucleotide
  Sense strand starting at position 913 of SEQ ID NO: 1880233
gacagugauuuguaacauc

SEQ ID NO: 1951925 - RNA, 19 nt, Artificial Sequence
  Description of Artificial Sequence: Synthetic oligonucleotide
  Antisense strand to SEQ ID NO: 1951924
gauguuacaaaucacuguc

SEQ ID NO: 1951926 - RNA, 19 nt, Artificial Sequence
  Description of Artificial Sequence: Synthetic oligonucleotide
  Sense strand starting at position 916 of SEQ ID NO: 1880233
agugauuuguaacaucuga

SEQ ID NO: 1951927 - RNA, 19 nt, Artificial Sequence
  Description of Artificial Sequence: Synthetic oligonucleotide
  Antisense strand to SEQ ID NO: 1951926
ucagauguuacaaaucacu

SEQ ID NO: 1951928 - RNA, 19 nt, Artificial Sequence
  Description of Artificial Sequence: Synthetic oligonucleotide
  Sense strand starting at position 927 of SEQ ID NO: 1880233
acaucugaacugugugaaa

SEQ ID NO: 1951929 - RNA, 19 nt, Artificial Sequence
  Description of Artificial Sequence: Synthetic oligonucleotide
  Antisense strand to SEQ ID NO: 1951928
uuucacacaguucagaugu

SEQ ID NO: 1951930 - RNA, 19 nt, Artificial Sequence
  Description of Artificial Sequence: Synthetic oligonucleotide
  Sense strand starting at position 999 of SEQ ID NO: 1880233
acguguaucaguucugcau

SEQ ID NO: 1951931 - RNA, 19 nt, Artificial Sequence
  Description of Artificial Sequence: Synthetic oligonucleotide
  Antisense strand to SEQ ID NO: 1951930
augcagaacugauacacgu

SEQ ID NO: 1951932 - RNA, 19 nt, Artificial Sequence
  Description of Artificial Sequence: Synthetic oligonucleotide
  Sense strand starting at position 1000 of SEQ ID NO: 1880233
cguguaucaguucugcauu

SEQ ID NO: 1951933 - RNA, 19 nt, Artificial Sequence
  Description of Artificial Sequence: Synthetic oligonucleotide
  Antisense strand to SEQ ID NO: 1951932
aaugcagaacugauacacg

SEQ ID NO: 1951934 - RNA, 19 nt, Artificial Sequence
  Description of Artificial Sequence: Synthetic oligonucleotide
  Sense strand starting at position 1019 of SEQ ID NO: 1880233
gugaaauucucaguaugag

SEQ ID NO: 1951935 - RNA, 19 nt, Artificial Sequence
  Description of Artificial Sequence: Synthetic oligonucleotide
  Antisense strand to SEQ ID NO: 1951934
cucauacugagaauuucac

SEQ ID NO: 1951936 - RNA, 19 nt, Artificial Sequence
  Description of Artificial Sequence: Synthetic oligonucleotide
  Sense strand starting at position 1136 of SEQ ID NO: 1880233
ggagaaggcggguagucau

SEQ ID NO: 1951937 - RNA, 19 nt, Artificial Sequence
  Description of Artificial Sequence: Synthetic oligonucleotide
  Antisense strand to SEQ ID NO: 1951936
augacuacccgccuucucc

SEQ ID NO: 1951938 - RNA, 19 nt, Artificial Sequence
  Description of Artificial Sequence: Synthetic oligonucleotide
  Sense strand starting at position 1285 of SEQ ID NO: 1880233
gaaguuucuaaacggguga

SEQ ID NO: 1951939 - RNA, 19 nt, Artificial Sequence
  Description of Artificial Sequence: Synthetic oligonucleotide
  Antisense strand to SEQ ID NO: 1951938
ucacccguuuagaaacuuc

SEQ ID NO: 1951940 - RNA, 19 nt, Artificial Sequence
  Description of Artificial Sequence: Synthetic oligonucleotide
  Sense strand starting at position 1287 of SEQ ID NO: 1880233
aguuucuaaacgggugaga

SEQ ID NO: 1951941 - RNA, 19 nt, Artificial Sequence
  Description of Artificial Sequence: Synthetic oligonucleotide
  Antisense strand to SEQ ID NO: 1951940
ucucacccguuuagaaacu

SEQ ID NO: 1951942 - RNA, 19 nt, Artificial Sequence
  Description of Artificial Sequence: Synthetic oligonucleotide
  Sense strand starting at position 1442 of SEQ ID NO: 1880233
aggugaagucgcuaucgag

SEQ ID NO: 1951943 - RNA, 19 nt, Artificial Sequence
  Description of Artificial Sequence: Synthetic oligonucleotide
  Antisense strand to SEQ ID NO: 1951942
cucgauagcgacuucaccu

SEQ ID NO: 1951944 - RNA, 19 nt, Artificial Sequence
  Description of Artificial Sequence: Synthetic oligonucleotide
  Sense strand starting at position 1870 of SEQ ID NO: 1880233
gcgguaauugugggaaaug

SEQ ID NO: 1951945 - RNA, 19 nt, Artificial Sequence
  Description of Artificial Sequence: Synthetic oligonucleotide
  Antisense strand to SEQ ID NO: 1951944
cauuucccacaauuaccgc

SEQ ID NO: 1951946 - RNA, 19 nt, Artificial Sequence
  Description of Artificial Sequence: Synthetic oligonucleotide
  Sense strand starting at position 2529 of SEQ ID NO: 1880233
cuuucagacggauguaaga

SEQ ID NO: 1951947 - RNA, 19 nt, Artificial Sequence
  Description of Artificial Sequence: Synthetic oligonucleotide
  Antisense strand to SEQ ID NO: 1951946
ucuuacauccgucugaaag

SEQ ID NO: 1951948 - RNA, 19 nt, Artificial Sequence
  Description of Artificial Sequence: Synthetic oligonucleotide
  Sense strand starting at position 2543 of SEQ ID NO: 1880233
uaagauuagcugugucaag

SEQ ID NO: 1951949 - RNA, 19 nt, Artificial Sequence
  Description of Artificial Sequence: Synthetic oligonucleotide
  Antisense strand to SEQ ID NO: 1951948
cuugacacagcuaaucuua

SEQ ID NO: 1951950 - RNA, 19 nt, Artificial Sequence
  Description of Artificial Sequence: Synthetic oligonucleotide
  Sense strand starting at position 2572 of SEQ ID NO: 1880233
acaggagacuacuacauaa

SEQ ID NO: 1951951 - RNA, 19 nt, Artificial Sequence
  Description of Artificial Sequence: Synthetic oligonucleotide
  Antisense strand to SEQ ID NO: 1951950
uuauguaguagucuccugu

SEQ ID NO: 1951952 - RNA, 19 nt, Artificial Sequence
  Description of Artificial Sequence: Synthetic oligonucleotide
  Sense strand starting at position 2718 of SEQ ID NO: 1880233
guuaauuagggccgaaaga

SEQ ID NO: 1951953 - RNA, 19 nt, Artificial Sequence
  Description of Artificial Sequence: Synthetic oligonucleotide
  Antisense strand to SEQ ID NO: 1951952
ucuuucggcccuaauuaac

SEQ ID NO: 1951954 - RNA, 19 nt, Artificial Sequence
  Description of Artificial Sequence: Synthetic oligonucleotide
  Sense strand starting at position 2781 of SEQ ID NO: 1880233
uaugcauagucagugaaga

SEQ ID NO: 1951955 - RNA, 19 nt, Artificial Sequence
  Description of Artificial Sequence: Synthetic oligonucleotide
  Antisense strand to SEQ ID NO: 1951954
ucuucacugacuaugcaua

SEQ ID NO: 1951956 - RNA, 19 nt, Artificial Sequence
  Description of Artificial Sequence: Synthetic oligonucleotide
  Sense strand starting at position 2782 of SEQ ID NO: 1880233
augcauagucagugaagau

SEQ ID NO: 1951957 - RNA, 19 nt, Artificial Sequence
  Description of Artificial Sequence: Synthetic oligonucleotide
  Antisense strand to SEQ ID NO: 1951956
aucuucacugacuaugcau

SEQ ID NO: 1951958 - RNA, 19 nt, Artificial Sequence
  Description of Artificial Sequence: Synthetic oligonucleotide
  Sense strand starting at position 2783 of SEQ ID NO: 1880233
ugcauagucagugaagaua

SEQ ID NO: 1951959 - RNA, 19 nt, Artificial Sequence
  Description of Artificial Sequence: Synthetic oligonucleotide
  Antisense strand to SEQ ID NO: 1951958
uaucuucacugacuaugca

SEQ ID NO: 1951960 - RNA, 19 nt, Artificial Sequence
  Description of Artificial Sequence: Synthetic oligonucleotide
  Sense strand starting at position 3232 of SEQ ID NO: 1880233
uuauuucuugcauggcaau

SEQ ID NO: 1951961 - RNA, 19 nt, Artificial Sequence
  Description of Artificial Sequence: Synthetic oligonucleotide
  Antisense strand to SEQ ID NO: 1951960
auugccaugcaagaaauaa

SEQ ID NO: 1951962 - RNA, 19 nt, Artificial Sequence
  Description of Artificial Sequence: Synthetic oligonucleotide
  Sense strand starting at position 3358 of SEQ ID NO: 1880233
gagagcuagagauguugaa

SEQ ID NO: 1951963 - RNA, 19 nt, Artificial Sequence
  Description of Artificial Sequence: Synthetic oligonucleotide
  Antisense strand to SEQ ID NO: 1951962
uucaacaucucuagcucuc

SEQ ID NO: 1951964 - RNA, 19 nt, Artificial Sequence
  Description of Artificial Sequence: Synthetic oligonucleotide
  Sense strand starting at position 3405 of SEQ ID NO: 1880233
auugacuugucugcgagag

SEQ ID NO: 1951965 - RNA, 19 nt, Artificial Sequence
  Description of Artificial Sequence: Synthetic oligonucleotide
  Antisense strand to SEQ ID NO: 1951964
cucucgcagacaagucaau

SEQ ID NO: 1951966 - RNA, 19 nt, Artificial Sequence
  Description of Artificial Sequence: Synthetic oligonucleotide
  Sense strand starting at position 3440 of SEQ ID NO: 1880233
gaagcaaauuuguggaaac

SEQ ID NO: 1951967 - RNA, 19 nt, Artificial Sequence
  Description of Artificial Sequence: Synthetic oligonucleotide
  Antisense strand to SEQ ID NO: 1951966
guuuccacaaauuugcuuc

SEQ ID NO: 1951968 - RNA, 19 nt, Artificial Sequence
  Description of Artificial Sequence: Synthetic oligonucleotide
  Sense strand starting at position 3475 of SEQ ID NO: 1880233
auagaaccaguuugucuau

SEQ ID NO: 1951969 - RNA, 19 nt, Artificial Sequence
  Description of Artificial Sequence: Synthetic oligonucleotide
  Antisense strand to SEQ ID NO: 1951968
auagacaaacugguucuau

SEQ ID NO: 1951970 - RNA, 19 nt, Artificial Sequence
  Description of Artificial Sequence: Synthetic oligonucleotide
  Sense strand starting at position 3477 of SEQ ID NO: 1880233
agaaccaguuugucuauua

SEQ ID NO: 1951971 - RNA, 19 nt, Artificial Sequence
  Description of Artificial Sequence: Synthetic oligonucleotide
  Antisense strand to SEQ ID NO: 1951970
uaauagacaaacugguucu

SEQ ID NO: 1951972 - RNA, 19 nt, Artificial Sequence
  Description of Artificial Sequence: Synthetic oligonucleotide
  Sense strand starting at position 3704 of SEQ ID NO: 1880233
acguaaugcacaggacuuu

SEQ ID NO: 1951973 - RNA, 19 nt, Artificial Sequence
  Description of Artificial Sequence: Synthetic oligonucleotide
  Antisense strand to SEQ ID NO: 1951972
aaaguccugugcauuacgu

SEQ ID NO: 1951974 - RNA, 19 nt, Artificial Sequence
  Description of Artificial Sequence: Synthetic oligonucleotide
  Sense strand starting at position 3790 of SEQ ID NO: 1880233
aaagguaaaugggaucuga

SEQ ID NO: 1951975 - RNA, 19 nt, Artificial Sequence
  Description of Artificial Sequence: Synthetic oligonucleotide
  Antisense strand to SEQ ID NO: 1951974
ucagaucccauuuaccuuu

SEQ ID NO: 1951976 - RNA, 19 nt, Artificial Sequence
  Description of Artificial Sequence: Synthetic oligonucleotide
  Sense strand starting at position 3825 of SEQ ID NO: 1880233
uaagauugcgcagaaagcu

SEQ ID NO: 1951977 - RNA, 19 nt, Artificial Sequence
  Description of Artificial Sequence: Synthetic oligonucleotide
  Antisense strand to SEQ ID NO: 1951976
agcuuucugcgcaaucuua

SEQ ID NO: 1951978 - RNA, 19 nt, Artificial Sequence
  Description of Artificial Sequence: Synthetic oligonucleotide
  Sense strand starting at position 3835 of SEQ ID NO: 1880233
cagaaagcucuguaguagu

SEQ ID NO: 1951979 - RNA, 19 nt, Artificial Sequence
  Description of Artificial Sequence: Synthetic oligonucleotide
  Antisense strand to SEQ ID NO: 1951978
acuacuacagagcuuucug

SEQ ID NO: 1951980 - RNA, 19 nt, Artificial Sequence
  Description of Artificial Sequence: Synthetic oligonucleotide
  Sense strand starting at position 3842 of SEQ ID NO: 1880233
cucuguaguaguggagauu

SEQ ID NO: 1951981 - RNA, 19 nt, Artificial Sequence
  Description of Artificial Sequence: Synthetic oligonucleotide
  Antisense strand to SEQ ID NO: 1951980
aaucuccacuacuacagag

SEQ ID NO: 1951982 - RNA, 19 nt, Artificial Sequence
  Description of Artificial Sequence: Synthetic oligonucleotide
  Sense strand starting at position 3843 of SEQ ID NO: 1880233
ucuguaguaguggagauua

SEQ ID NO: 1951983 - RNA, 19 nt, Artificial Sequence
  Description of Artificial Sequence: Synthetic oligonucleotide
  Antisense strand to SEQ ID NO: 1951982
uaaucuccacuacuacaga

SEQ ID NO: 1951984 - RNA, 19 nt, Artificial Sequence
  Description of Artificial Sequence: Synthetic oligonucleotide
  Sense strand starting at position 3845 of SEQ ID NO: 1880233
uguaguaguggagauuaua

SEQ ID NO: 1951985 - RNA, 19 nt, Artificial Sequence
  Description of Artificial Sequence: Synthetic oligonucleotide
  Antisense strand to SEQ ID NO: 1951984
uauaaucuccacuacuaca

SEQ ID NO: 1951986 - RNA, 19 nt, Artificial Sequence
  Description of Artificial Sequence: Synthetic oligonucleotide
  Sense strand starting at position 260 of SEQ ID NO: 1880234
ucgcaucaccuagaacuau

SEQ ID NO: 1951987 - RNA, 19 nt, Artificial Sequence
  Description of Artificial Sequence: Synthetic oligonucleotide
  Antisense strand to SEQ ID NO: 1951986
auaguucuaggugaugcga

SEQ ID NO: 1951988 - RNA, 19 nt, Artificial Sequence
  Description of Artificial Sequence: Synthetic oligonucleotide
  Sense strand starting at position 325 of SEQ ID NO: 1880234
augaauuaaugugcacauu

SEQ ID NO: 1951989 - RNA, 19 nt, Artificial Sequence
  Description of Artificial Sequence: Synthetic oligonucleotide
  Antisense strand to SEQ ID NO: 1951988
aaugugcacauuaauucau

SEQ ID NO: 1951990 - RNA, 19 nt, Artificial Sequence
  Description of Artificial Sequence: Synthetic oligonucleotide
  Sense strand starting at position 813 of SEQ ID NO: 1880234
guuauugauagcggaacaa

SEQ ID NO: 1951991 - RNA, 19 nt, Artificial Sequence
  Description of Artificial Sequence: Synthetic oligonucleotide
  Antisense strand to SEQ ID NO: 1951990
uuguuccgcuaucaauaac

SEQ ID NO: 1951992 - RNA, 19 nt, Artificial Sequence
  Description of Artificial Sequence: Synthetic oligonucleotide
  Sense strand starting at position 830 of SEQ ID NO: 1880234
aagcuaucccaucagguga

SEQ ID NO: 1951993 - RNA, 19 nt, Artificial Sequence
  Description of Artificial Sequence: Synthetic oligonucleotide
  Antisense strand to SEQ ID NO: 1951992
ucaccugaugggauagcuu

SEQ ID NO: 1951994 - RNA, 19 nt, Artificial Sequence
  Description of Artificial Sequence: Synthetic oligonucleotide
  Sense strand starting at position 997 of SEQ ID NO: 1880234
auggauguuuaauucugau

SEQ ID NO: 1951995 - RNA, 19 nt, Artificial Sequence
  Description of Artificial Sequence: Synthetic oligonucleotide
  Antisense strand to SEQ ID NO: 1951994
aucagaauuaaacauccau

SEQ ID NO: 1951996 - RNA, 19 nt, Artificial Sequence
  Description of Artificial Sequence: Synthetic oligonucleotide
  Sense strand starting at position 1173 of SEQ ID NO: 1880234
cugacaaaggcugauguua

SEQ ID NO: 1951997 - RNA, 19 nt, Artificial Sequence
  Description of Artificial Sequence: Synthetic oligonucleotide
  Antisense strand to SEQ ID NO: 1951996
uaacaucagccuuugucag

SEQ ID NO: 1951998 - RNA, 19 nt, Artificial Sequence
  Description of Artificial Sequence: Synthetic oligonucleotide
  Sense strand starting at position 1215 of SEQ ID NO: 1880234
gcagacaaccugggaucua

SEQ ID NO: 1951999 - RNA, 19 nt, Artificial Sequence
  Description of Artificial Sequence: Synthetic oligonucleotide
  Antisense strand to SEQ ID NO: 1951998
uagaucccagguugucugc

SEQ ID NO: 1952000 - RNA, 19 nt, Artificial Sequence
  Description of Artificial Sequence: Synthetic oligonucleotide
  Sense strand starting at position 1237 of SEQ ID NO: 1880234
ccaguuugcaacugagaug

SEQ ID NO: 1952001 - RNA, 19 nt, Artificial Sequence
  Description of Artificial Sequence: Synthetic oligonucleotide
  Antisense strand to SEQ ID NO: 1952000
caucucaguugcaaacugg

SEQ ID NO: 1952002 - RNA, 19 nt, Artificial Sequence
  Description of Artificial Sequence: Synthetic oligonucleotide
  Sense strand starting at position 1249 of SEQ ID NO: 1880234
ugagauggcacgugagaca

SEQ ID NO: 1952003 - RNA, 19 nt, Artificial Sequence
  Description of Artificial Sequence: Synthetic oligonucleotide
  Antisense strand to SEQ ID NO: 1952002
ugucucacgugccaucuca

SEQ ID NO: 1952004 - RNA, 19 nt, Artificial Sequence
  Description of Artificial Sequence: Synthetic oligonucleotide
  Sense strand starting at position 1366 of SEQ ID NO: 1880234
gcaguaugucuggaauaug

SEQ ID NO: 1952005 - RNA, 19 nt, Artificial Sequence
  Description of Artificial Sequence: Synthetic oligonucleotide
  Antisense strand to SEQ ID NO: 1952004
cauauuccagacauacugc

SEQ ID NO: 1952006 - RNA, 19 nt, Artificial Sequence
  Description of Artificial Sequence: Synthetic oligonucleotide
  Sense strand starting at position 1369 of SEQ ID NO: 1880234
guaugucuggaauauggua

SEQ ID NO: 1952007 - RNA, 19 nt, Artificial Sequence
  Description of Artificial Sequence: Synthetic oligonucleotide
  Antisense strand to SEQ ID NO: 1952006
uaccauauuccagacauac

SEQ ID NO: 1952008 - RNA, 19 nt, Artificial Sequence
  Description of Artificial Sequence: Synthetic oligonucleotide
  Sense strand starting at position 1396 of SEQ ID NO: 1880234
guaagcauuugcucaauga

SEQ ID NO: 1952009 - RNA, 19 nt, Artificial Sequence
  Description of Artificial Sequence: Synthetic oligonucleotide
  Antisense strand to SEQ ID NO: 1952008
ucauugagcaaaugcuuac

SEQ ID NO: 1952010 - RNA, 19 nt, Artificial Sequence
  Description of Artificial Sequence: Synthetic oligonucleotide
  Sense strand starting at position 2233 of SEQ ID NO: 1880234
gugguacagucgcuauuua

SEQ ID NO: 1952011 - RNA, 19 nt, Artificial Sequence
  Description of Artificial Sequence: Synthetic oligonucleotide
  Antisense strand to SEQ ID NO: 1952010
uaaauagcgacuguaccac

SEQ ID NO: 1952012 - RNA, 19 nt, Artificial Sequence
  Description of Artificial Sequence: Synthetic oligonucleotide
  Sense strand starting at position 2234 of SEQ ID NO: 1880234
ugguacagucgcuauuuau

SEQ ID NO: 1952013 - RNA, 19 nt, Artificial Sequence
  Description of Artificial Sequence: Synthetic oligonucleotide
  Antisense strand to SEQ ID NO: 1952012
auaaauagcgacuguacca

SEQ ID NO: 1952014 - RNA, 19 nt, Artificial Sequence
  Description of Artificial Sequence: Synthetic oligonucleotide
  Sense strand starting at position 2237 of SEQ ID NO: 1880234
uacagucgcuauuuauuga

SEQ ID NO: 1952015 - RNA, 19 nt, Artificial Sequence
  Description of Artificial Sequence: Synthetic oligonucleotide
  Antisense strand to SEQ ID NO: 1952014
ucaauaaauagcgacugua

SEQ ID NO: 1952016 - RNA, 19 nt, Artificial Sequence
  Description of Artificial Sequence: Synthetic oligonucleotide
  Sense strand starting at position 2279 of SEQ ID NO: 1880234
ugacaugaauuguuucuaa

SEQ ID NO: 1952017 - RNA, 19 nt, Artificial Sequence
  Description of Artificial Sequence: Synthetic oligonucleotide
  Antisense strand to SEQ ID NO: 1952016
uuagaaacaauucauguca

SEQ ID NO: 1952018 - RNA, 19 nt, Artificial Sequence
  Description of Artificial Sequence: Synthetic oligonucleotide
  Sense strand starting at position 2832 of SEQ ID NO: 1880234
ggaagacuugcuggaagau

SEQ ID NO: 1952019 - RNA, 19 nt, Artificial Sequence
  Description of Artificial Sequence: Synthetic oligonucleotide
  Antisense strand to SEQ ID NO: 1952018
aucuuccagcaagucuucc

SEQ ID NO: 1952020 - RNA, 19 nt, Artificial Sequence
  Description of Artificial Sequence: Synthetic oligonucleotide
  Sense strand starting at position 2852 of SEQ ID NO: 1880234
ggauauuauugaguugagu

SEQ ID NO: 1952021 - RNA, 19 nt, Artificial Sequence
  Description of Artificial Sequence: Synthetic oligonucleotide
  Antisense strand to SEQ ID NO: 1952020
acucaacucaauaauaucc

SEQ ID NO: 1952022 - RNA, 19 nt, Artificial Sequence
  Description of Artificial Sequence: Synthetic oligonucleotide
  Sense strand starting at position 2959 of SEQ ID NO: 1880234
ugugaauacuuacuggagu

SEQ ID NO: 1952023 - RNA, 19 nt, Artificial Sequence
  Description of Artificial Sequence: Synthetic oligonucleotide
  Antisense strand to SEQ ID NO: 1952022
acuccaguaaguauucaca

SEQ ID NO: 1952024 - RNA, 19 nt, Artificial Sequence
  Description of Artificial Sequence: Synthetic oligonucleotide
  Sense strand starting at position 3037 of SEQ ID NO: 1880234
agggaaguuaauuguuuga

SEQ ID NO: 1952025 - RNA, 19 nt, Artificial Sequence
  Description of Artificial Sequence: Synthetic oligonucleotide
  Antisense strand to SEQ ID NO: 1952024
ucaaacaauuaacuucccu

SEQ ID NO: 1952026 - RNA, 19 nt, Artificial Sequence
  Description of Artificial Sequence: Synthetic oligonucleotide
  Sense strand starting at position 3040 of SEQ ID NO: 1880234
gaaguuaauuguuugagau

SEQ ID NO: 1952027 - RNA, 19 nt, Artificial Sequence
  Description of Artificial Sequence: Synthetic oligonucleotide
  Antisense strand to SEQ ID NO: 1952026
aucucaaacaauuaacuuc

SEQ ID NO: 1952028 - RNA, 19 nt, Artificial Sequence
  Description of Artificial Sequence: Synthetic oligonucleotide
  Sense strand starting at position 3041 of SEQ ID NO: 1880234
aaguuaauuguuugagauc

SEQ ID NO: 1952029 - RNA, 19 nt, Artificial Sequence
  Description of Artificial Sequence: Synthetic oligonucleotide
  Antisense strand to SEQ ID NO: 1952028
gaucucaaacaauuaacuu

SEQ ID NO: 1952030 - RNA, 19 nt, Artificial Sequence
  Description of Artificial Sequence: Synthetic oligonucleotide
  Sense strand starting at position 3088 of SEQ ID NO: 1880234
ggcucaaauguuggagacu

SEQ ID NO: 1952031 - RNA, 19 nt, Artificial Sequence
  Description of Artificial Sequence: Synthetic oligonucleotide
  Antisense strand to SEQ ID NO: 1952030
agucuccaacauuugagcc

SEQ ID NO: 1952032 - RNA, 19 nt, Artificial Sequence
  Description of Artificial Sequence: Synthetic oligonucleotide
  Sense strand starting at position 3353 of SEQ ID NO: 1880234
ugcugaucuauggagagcu

SEQ ID NO: 1952033 - RNA, 19 nt, Artificial Sequence
  Description of Artificial Sequence: Synthetic oligonucleotide
  Antisense strand to SEQ ID NO: 1952032
agcucuccauagaucagca

SEQ ID NO: 1952034 - RNA, 19 nt, Artificial Sequence
  Description of Artificial Sequence: Synthetic oligonucleotide
  Sense strand starting at position 3369 of SEQ ID NO: 1880234
gcuugcuguccuguuugua

SEQ ID NO: 1952035 - RNA, 19 nt, Artificial Sequence
  Description of Artificial Sequence: Synthetic oligonucleotide
  Antisense strand to SEQ ID NO: 1952034
uacaaacaggacagcaagc

SEQ ID NO: 1952036 - RNA, 19 nt, Artificial Sequence
  Description of Artificial Sequence: Synthetic oligonucleotide
  Sense strand starting at position 3424 of SEQ ID NO: 1880234
cugucucugcuauagaacu

SEQ ID NO: 1952037 - RNA, 19 nt, Artificial Sequence
  Description of Artificial Sequence: Synthetic oligonucleotide
  Antisense strand to SEQ ID NO: 1952036
aguucuauagcagagacag

SEQ ID NO: 1952038 - RNA, 19 nt, Artificial Sequence
  Description of Artificial Sequence: Synthetic oligonucleotide
  Sense strand starting at position 3432 of SEQ ID NO: 1880234
gcuauagaacucuaagguc

SEQ ID NO: 1952039 - RNA, 19 nt, Artificial Sequence
  Description of Artificial Sequence: Synthetic oligonucleotide
  Antisense strand to SEQ ID NO: 1952038
gaccuuagaguucuauagc

SEQ ID NO: 1952040 - RNA, 19 nt, Artificial Sequence
  Description of Artificial Sequence: Synthetic oligonucleotide
  Sense strand starting at position 3440 of SEQ ID NO: 1880234
acucuaagguccuugacuu

SEQ ID NO: 1952041 - RNA, 19 nt, Artificial Sequence
  Description of Artificial Sequence: Synthetic oligonucleotide
  Antisense strand to SEQ ID NO: 1952040
aagucaaggaccuuagagu

SEQ ID NO: 1952042 - RNA, 19 nt, Artificial Sequence
  Description of Artificial Sequence: Synthetic oligonucleotide
  Sense strand starting at position 3494 of SEQ ID NO: 1880234
cccacuagauguuuacuga

SEQ ID NO: 1952043 - RNA, 19 nt, Artificial Sequence
  Description of Artificial Sequence: Synthetic oligonucleotide
  Antisense strand to SEQ ID NO: 1952042
ucaguaaacaucuaguggg

SEQ ID NO: 1952044 - RNA, 19 nt, Artificial Sequence
  Description of Artificial Sequence: Synthetic oligonucleotide
  Sense strand starting at position 3495 of SEQ ID NO: 1880234
ccacuagauguuuacugau

SEQ ID NO: 1952045 - RNA, 19 nt, Artificial Sequence
  Description of Artificial Sequence: Synthetic oligonucleotide
  Antisense strand to SEQ ID NO: 1952044
aucaguaaacaucuagugg

SEQ ID NO: 1952046 - RNA, 19 nt, Artificial Sequence
  Description of Artificial Sequence: Synthetic oligonucleotide
  Sense strand starting at position 3556 of SEQ ID NO: 1880234
gagauucgcaggcaugaua

SEQ ID NO: 1952047 - RNA, 19 nt, Artificial Sequence
  Description of Artificial Sequence: Synthetic oligonucleotide
  Antisense strand to SEQ ID NO: 1952046
uaucaugccugcgaaucuc

SEQ ID NO: 1952048 - RNA, 19 nt, Artificial Sequence
  Description of Artificial Sequence: Synthetic oligonucleotide
  Sense strand starting at position 3567 of SEQ ID NO: 1880234
gcaugauaaugauuacagu

SEQ ID NO: 1952049 - RNA, 19 nt, Artificial Sequence
  Description of Artificial Sequence: Synthetic oligonucleotide
  Antisense strand to SEQ ID NO: 1952048
acuguaaucauuaucaugc

SEQ ID NO: 1952050 - RNA, 19 nt, Artificial Sequence
  Description of Artificial Sequence: Synthetic oligonucleotide
  Sense strand starting at position 3573 of SEQ ID NO: 1880234
uaaugauuacaguggguua

SEQ ID NO: 1952051 - RNA, 19 nt, Artificial Sequence
  Description of Artificial Sequence: Synthetic oligonucleotide
  Antisense strand to SEQ ID NO: 1952050
uaacccacuguaaucauua

SEQ ID NO: 1952052 - RNA, 19 nt, Artificial Sequence
  Description of Artificial Sequence: Synthetic oligonucleotide
  Sense strand starting at position 3575 of SEQ ID NO: 1880234
augauuacaguggguuaga

SEQ ID NO: 1952053 - RNA, 19 nt, Artificial Sequence
  Description of Artificial Sequence: Synthetic oligonucleotide
  Antisense strand to SEQ ID NO: 1952052
ucuaacccacuguaaucau

SEQ ID NO: 1952054 - RNA, 19 nt, Artificial Sequence
  Description of Artificial Sequence: Synthetic oligonucleotide
  Sense strand starting at position 3576 of SEQ ID NO: 1880234
ugauuacaguggguuagaa

SEQ ID NO: 1952055 - RNA, 19 nt, Artificial Sequence
  Description of Artificial Sequence: Synthetic oligonucleotide
  Antisense strand to SEQ ID NO: 1952054
uucuaacccacuguaauca

SEQ ID NO: 1952056 - RNA, 19 nt, Artificial Sequence
  Description of Artificial Sequence: Synthetic oligonucleotide
  Sense strand starting at position 3703 of SEQ ID NO: 1880234
ggaauagauuaggugugua

SEQ ID NO: 1952057 - RNA, 19 nt, Artificial Sequence
  Description of Artificial Sequence: Synthetic oligonucleotide
  Antisense strand to SEQ ID NO: 1952056
uacacaccuaaucuauucc

SEQ ID NO: 1952058 - RNA, 19 nt, Artificial Sequence
  Description of Artificial Sequence: Synthetic oligonucleotide
  Sense strand starting at position 3708 of SEQ ID NO: 1880234
agauuagguguguaguuua

SEQ ID NO: 1952059 - RNA, 19 nt, Artificial Sequence
  Description of Artificial Sequence: Synthetic oligonucleotide
  Antisense strand to SEQ ID NO: 1952058
uaaacuacacaccuaaucu

SEQ ID NO: 1952060 - RNA, 19 nt, Artificial Sequence
  Description of Artificial Sequence: Synthetic oligonucleotide
  Sense strand starting at position 3723 of SEQ ID NO: 1880234
uuuacaguuguugagaaua

SEQ ID NO: 1952061 - RNA, 19 nt, Artificial Sequence
  Description of Artificial Sequence: Synthetic oligonucleotide
  Antisense strand to SEQ ID NO: 1952060
uauucucaacaacuguaaa

SEQ ID NO: 1952062 - RNA, 19 nt, Artificial Sequence
  Description of Artificial Sequence: Synthetic oligonucleotide
  Sense strand starting at position 3809 of SEQ ID NO: 1880234
aggucugugccuuagacau

SEQ ID NO: 1952063 - RNA, 19 nt, Artificial Sequence
  Description of Artificial Sequence: Synthetic oligonucleotide
  Antisense strand to SEQ ID NO: 1952062
augucuaaggcacagaccu

SEQ ID NO: 1952064 - RNA, 19 nt, Artificial Sequence
  Description of Artificial Sequence: Synthetic oligonucleotide
  Sense strand starting at position 3871 of SEQ ID NO: 1880234
cuggguacccuuuaaacau

SEQ ID NO: 1952065 - RNA, 19 nt, Artificial Sequence
  Description of Artificial Sequence: Synthetic oligonucleotide
  Antisense strand to SEQ ID NO: 1952064
auguuuaaaggguacccag

SEQ ID NO: 1952066 - RNA, 19 nt, Artificial Sequence
  Description of Artificial Sequence: Synthetic oligonucleotide
  Sense strand starting at position 29 of SEQ ID NO: 1880235
gaaguuuacaguggacagu

SEQ ID NO: 1952067 - RNA, 19 nt, Artificial Sequence
  Description of Artificial Sequence: Synthetic oligonucleotide
  Antisense strand to SEQ ID NO: 1952066
acuguccacuguaaacuuc

SEQ ID NO: 1952068 - RNA, 19 nt, Artificial Sequence
  Description of Artificial Sequence: Synthetic oligonucleotide
  Sense strand starting at position 69 of SEQ ID NO: 1880235
ugaacaucugccuagguga

SEQ ID NO: 1952069 - RNA, 19 nt, Artificial Sequence
  Description of Artificial Sequence: Synthetic oligonucleotide
  Antisense strand to SEQ ID NO: 1952068
ucaccuaggcagauguuca

SEQ ID NO: 1952070 - RNA, 19 nt, Artificial Sequence
  Description of Artificial Sequence: Synthetic oligonucleotide
  Sense strand starting at position 88 of SEQ ID NO: 1880235
cugaguuugcaggauguau

SEQ ID NO: 1952071 - RNA, 19 nt, Artificial Sequence
  Description of Artificial Sequence: Synthetic oligonucleotide
  Antisense strand to SEQ ID NO: 1952070
auacauccugcaaacucag

SEQ ID NO: 1952072 - RNA, 19 nt, Artificial Sequence
  Description of Artificial Sequence: Synthetic oligonucleotide
  Sense strand starting at position 90 of SEQ ID NO: 1880235
gaguuugcaggauguauua

SEQ ID NO: 1952073 - RNA, 19 nt, Artificial Sequence
  Description of Artificial Sequence: Synthetic oligonucleotide
  Antisense strand to SEQ ID NO: 1952072
uaauacauccugcaaacuc

SEQ ID NO: 1952074 - RNA, 19 nt, Artificial Sequence
  Description of Artificial Sequence: Synthetic oligonucleotide
  Sense strand starting at position 92 of SEQ ID NO: 1880235
guuugcaggauguauuagu

SEQ ID NO: 1952075 - RNA, 19 nt, Artificial Sequence
  Description of Artificial Sequence: Synthetic oligonucleotide
  Antisense strand to SEQ ID NO: 1952074
acuaauacauccugcaaac

SEQ ID NO: 1952076 - RNA, 19 nt, Artificial Sequence
  Description of Artificial Sequence: Synthetic oligonucleotide
  Sense strand starting at position 371 of SEQ ID NO: 1880235
gcaacuguaucauucugau

SEQ ID NO: 1952077 - RNA, 19 nt, Artificial Sequence
  Description of Artificial Sequence: Synthetic oligonucleotide
  Antisense strand to SEQ ID NO: 1952076
aucagaaugauacaguugc

SEQ ID NO: 1952078 - RNA, 19 nt, Artificial Sequence
  Description of Artificial Sequence: Synthetic oligonucleotide
  Sense strand starting at position 377 of SEQ ID NO: 1880235
guaucauucugaucucuac

SEQ ID NO: 1952079 - RNA, 19 nt, Artificial Sequence
  Description of Artificial Sequence: Synthetic oligonucleotide
  Antisense strand to SEQ ID NO: 1952078
guagagaucagaaugauac

SEQ ID NO: 1952080 - RNA, 19 nt, Artificial Sequence
  Description of Artificial Sequence: Synthetic oligonucleotide
  Sense strand starting at position 572 of SEQ ID NO: 1880235
ucagguugugaacaucuuu

SEQ ID NO: 1952081 - RNA, 19 nt, Artificial Sequence
  Description of Artificial Sequence: Synthetic oligonucleotide
  Antisense strand to SEQ ID NO: 1952080
aaagauguucacaaccuga

SEQ ID NO: 1952082 - RNA, 19 nt, Artificial Sequence
  Description of Artificial Sequence: Synthetic oligonucleotide
  Sense strand starting at position 577 of SEQ ID NO: 1880235
uugugaacaucuuugggca

SEQ ID NO: 1952083 - RNA, 19 nt, Artificial Sequence
  Description of Artificial Sequence: Synthetic oligonucleotide
  Antisense strand to SEQ ID NO: 1952082
ugcccaaagauguucacaa

SEQ ID NO: 1952084 - RNA, 19 nt, Artificial Sequence
  Description of Artificial Sequence: Synthetic oligonucleotide
  Sense strand starting at position 622 of SEQ ID NO: 1880235
ggguuccuagcuuagugau

SEQ ID NO: 1952085 - RNA, 19 nt, Artificial Sequence
  Description of Artificial Sequence: Synthetic oligonucleotide
  Antisense strand to SEQ ID NO: 1952084
aucacuaagcuaggaaccc

SEQ ID NO: 1952086 - RNA, 19 nt, Artificial Sequence
  Description of Artificial Sequence: Synthetic oligonucleotide
  Sense strand starting at position 704 of SEQ ID NO: 1880235
guaccuaacuucucugagu

SEQ ID NO: 1952087 - RNA, 19 nt, Artificial Sequence
  Description of Artificial Sequence: Synthetic oligonucleotide
  Antisense strand to SEQ ID NO: 1952086
acucagagaaguuagguac

SEQ ID NO: 1952088 - RNA, 19 nt, Artificial Sequence
  Description of Artificial Sequence: Synthetic oligonucleotide
  Sense strand starting at position 944 of SEQ ID NO: 1880235
cucagcuuugccugagaau

SEQ ID NO: 1952089 - RNA, 19 nt, Artificial Sequence
  Description of Artificial Sequence: Synthetic oligonucleotide
  Antisense strand to SEQ ID NO: 1952088
auucucaggcaaagcugag

SEQ ID NO: 1952090 - RNA, 19 nt, Artificial Sequence
  Description of Artificial Sequence: Synthetic oligonucleotide
  Sense strand starting at position 945 of SEQ ID NO: 1880235
ucagcuuugccugagaauu

SEQ ID NO: 1952091 - RNA, 19 nt, Artificial Sequence
  Description of Artificial Sequence: Synthetic oligonucleotide
  Antisense strand to SEQ ID NO: 1952090
aauucucaggcaaagcuga

SEQ ID NO: 1952092 - RNA, 19 nt, Artificial Sequence
  Description of Artificial Sequence: Synthetic oligonucleotide
  Sense strand starting at position 955 of SEQ ID NO: 1880235
cugagaauuucgucagucu

SEQ ID NO: 1952093 - RNA, 19 nt, Artificial Sequence
  Description of Artificial Sequence: Synthetic oligonucleotide
  Antisense strand to SEQ ID NO: 1952092
agacugacgaaauucucag

SEQ ID NO: 1952094 - RNA, 19 nt, Artificial Sequence
  Description of Artificial Sequence: Synthetic oligonucleotide
  Sense strand starting at position 990 of SEQ ID NO: 1880235
gggugagccugcuuaaaug

SEQ ID NO: 1952095 - RNA, 19 nt, Artificial Sequence
  Description of Artificial Sequence: Synthetic oligonucleotide
  Antisense strand to SEQ ID NO: 1952094
cauuuaagcaggcucaccc

SEQ ID NO: 1952096 - RNA, 19 nt, Artificial Sequence
  Description of Artificial Sequence: Synthetic oligonucleotide
  Sense strand starting at position 1006 of SEQ ID NO: 1880235
auggaacacucugaagaug

SEQ ID NO: 1952097 - RNA, 19 nt, Artificial Sequence
  Description of Artificial Sequence: Synthetic oligonucleotide
  Antisense strand to SEQ ID NO: 1952096
caucuucagaguguuccau

SEQ ID NO: 1952098 - RNA, 19 nt, Artificial Sequence
  Description of Artificial Sequence: Synthetic oligonucleotide
  Sense strand starting at position 1017 of SEQ ID NO: 1880235
ugaagaugauauccuguga

SEQ ID NO: 1952099 - RNA, 19 nt, Artificial Sequence
  Description of Artificial Sequence: Synthetic oligonucleotide
  Antisense strand to SEQ ID NO: 1952098
ucacaggauaucaucuuca

SEQ ID NO: 1952100 - RNA, 19 nt, Artificial Sequence
  Description of Artificial Sequence: Synthetic oligonucleotide
  Sense strand starting at position 1021 of SEQ ID NO: 1880235
gaugauauccugugauaaa

SEQ ID NO: 1952101 - RNA, 19 nt, Artificial Sequence
  Description of Artificial Sequence: Synthetic oligonucleotide
  Antisense strand to SEQ ID NO: 1952100
uuuaucacaggauaucauc

SEQ ID NO: 1952102 - RNA, 19 nt, Artificial Sequence
  Description of Artificial Sequence: Synthetic oligonucleotide
  Sense strand starting at position 1137 of SEQ ID NO: 1880235
ugggacagcuguucugaca

SEQ ID NO: 1952103 - RNA, 19 nt, Artificial Sequence
  Description of Artificial Sequence: Synthetic oligonucleotide
  Antisense strand to SEQ ID NO: 1952102
ugucagaacagcuguccca

SEQ ID NO: 1952104 - RNA, 19 nt, Artificial Sequence
  Description of Artificial Sequence: Synthetic oligonucleotide
  Sense strand starting at position 1192 of SEQ ID NO: 1880235
guccaucuugcagagucaa

SEQ ID NO: 1952105 - RNA, 19 nt, Artificial Sequence
  Description of Artificial Sequence: Synthetic oligonucleotide
  Antisense strand to SEQ ID NO: 1952104
uugacucugcaagauggac

SEQ ID NO: 1952106 - RNA, 19 nt, Artificial Sequence
  Description of Artificial Sequence: Synthetic oligonucleotide
  Sense strand starting at position 1218 of SEQ ID NO: 1880235
ccagauuccuggucuuauc

SEQ ID NO: 1952107 - RNA, 19 nt, Artificial Sequence
  Description of Artificial Sequence: Synthetic oligonucleotide
  Antisense strand to SEQ ID NO: 1952106
gauaagaccaggaaucugg

SEQ ID NO: 1952108 - RNA, 19 nt, Artificial Sequence
  Description of Artificial Sequence: Synthetic oligonucleotide
  Sense strand starting at position 1232 of SEQ ID NO: 1880235
uuaucugagagcuacguga

SEQ ID NO: 1952109 - RNA, 19 nt, Artificial Sequence
  Description of Artificial Sequence: Synthetic oligonucleotide
  Antisense strand to SEQ ID NO: 1952108
ucacguagcucucagauaa

SEQ ID NO: 1952110 - RNA, 19 nt, Artificial Sequence
  Description of Artificial Sequence: Synthetic oligonucleotide
  Sense strand starting at position 1427 of SEQ ID NO: 1880235
acaaauguuuauuccgcau

SEQ ID NO: 1952111 - RNA, 19 nt, Artificial Sequence
  Description of Artificial Sequence: Synthetic oligonucleotide
  Antisense strand to SEQ ID NO: 1952110
augcggaauaaacauuugu

SEQ ID NO: 1952112 - RNA, 19 nt, Artificial Sequence
  Description of Artificial Sequence: Synthetic oligonucleotide
  Sense strand starting at position 1505 of SEQ ID NO: 1880235
ggaauuaugcuaugggagg

SEQ ID NO: 1952113 - RNA, 19 nt, Artificial Sequence
  Description of Artificial Sequence: Synthetic oligonucleotide
  Antisense strand to SEQ ID NO: 1952112
ccucccauagcauaauucc

SEQ ID NO: 1952114 - RNA, 19 nt, Artificial Sequence
  Description of Artificial Sequence: Synthetic oligonucleotide
  Sense strand starting at position 1542 of SEQ ID NO: 1880235
guggaucaucuugggucua

SEQ ID NO: 1952115 - RNA, 19 nt, Artificial Sequence
  Description of Artificial Sequence: Synthetic oligonucleotide
  Antisense strand to SEQ ID NO: 1952114
uagacccaagaugauccac

SEQ ID NO: 1952116 - RNA, 19 nt, Artificial Sequence
  Description of Artificial Sequence: Synthetic oligonucleotide
  Sense strand starting at position 1544 of SEQ ID NO: 1880235
ggaucaucuugggucuaga

SEQ ID NO: 1952117 - RNA, 19 nt, Artificial Sequence
  Description of Artificial Sequence: Synthetic oligonucleotide
  Antisense strand to SEQ ID NO: 1952116
ucuagacccaagaugaucc

SEQ ID NO: 1952118 - RNA, 19 nt, Artificial Sequence
  Description of Artificial Sequence: Synthetic oligonucleotide
  Sense strand starting at position 1555 of SEQ ID NO: 1880235
ggucuagauccugauacuu

SEQ ID NO: 1952119 - RNA, 19 nt, Artificial Sequence
  Description of Artificial Sequence: Synthetic oligonucleotide
  Antisense strand to SEQ ID NO: 1952118
aaguaucaggaucuagacc

SEQ ID NO: 1952120 - RNA, 19 nt, Artificial Sequence
  Description of Artificial Sequence: Synthetic oligonucleotide
  Sense strand starting at position 1734 of SEQ ID NO: 1880235
ggaugugaggaauagcagu

SEQ ID NO: 1952121 - RNA, 19 nt, Artificial Sequence
  Description of Artificial Sequence: Synthetic oligonucleotide
  Antisense strand to SEQ ID NO: 1952120
acugcuauuccucacaucc

SEQ ID NO: 1952122 - RNA, 19 nt, Artificial Sequence
  Description of Artificial Sequence: Synthetic oligonucleotide
  Sense strand starting at position 1756 of SEQ ID NO: 1880235
ugucauagacauggagacu

SEQ ID NO: 1952123 - RNA, 19 nt, Artificial Sequence
  Description of Artificial Sequence: Synthetic oligonucleotide
  Antisense strand to SEQ ID NO: 1952122
agucuccaugucuaugaca

SEQ ID NO: 1952124 - RNA, 19 nt, Artificial Sequence
  Description of Artificial Sequence: Synthetic oligonucleotide
  Sense strand starting at position 1899 of SEQ ID NO: 1880235
gagaaaugcccgcauguua

SEQ ID NO: 1952125 - RNA, 19 nt, Artificial Sequence
  Description of Artificial Sequence: Synthetic oligonucleotide
  Antisense strand to SEQ ID NO: 1952124
uaacaugcgggcauuucuc

SEQ ID NO: 1952126 - RNA, 19 nt, Artificial Sequence
  Description of Artificial Sequence: Synthetic oligonucleotide
  Sense strand starting at position 1966 of SEQ ID NO: 1880235
cgccuuuggaagugaacuu

SEQ ID NO: 1952127 - RNA, 19 nt, Artificial Sequence
  Description of Artificial Sequence: Synthetic oligonucleotide
  Antisense strand to SEQ ID NO: 1952126
aaguucacuuccaaaggcg

SEQ ID NO: 1952128 - RNA, 19 nt, Artificial Sequence
  Description of Artificial Sequence: Synthetic oligonucleotide
  Sense strand starting at position 2462 of SEQ ID NO: 1880235
ccgggaaaguucucggcaa

SEQ ID NO: 1952129 - RNA, 19 nt, Artificial Sequence
  Description of Artificial Sequence: Synthetic oligonucleotide
  Antisense strand to SEQ ID NO: 1952128
uugccgagaacuuucccgg

SEQ ID NO: 1952130 - RNA, 19 nt, Artificial Sequence
  Description of Artificial Sequence: Synthetic oligonucleotide
  Sense strand starting at position 2464 of SEQ ID NO: 1880235
gggaaaguucucggcaaag

SEQ ID NO: 1952131 - RNA, 19 nt, Artificial Sequence
  Description of Artificial Sequence: Synthetic oligonucleotide
  Antisense strand to SEQ ID NO: 1952130
cuuugccgagaacuuuccc

SEQ ID NO: 1952132 - RNA, 19 nt, Artificial Sequence
  Description of Artificial Sequence: Synthetic oligonucleotide
  Sense strand starting at position 2466 of SEQ ID NO: 1880235
gaaaguucucggcaaagcu

SEQ ID NO: 1952133 - RNA, 19 nt, Artificial Sequence
  Description of Artificial Sequence: Synthetic oligonucleotide
  Antisense strand to SEQ ID NO: 1952132
agcuuugccgagaacuuuc

SEQ ID NO: 1952134 - RNA, 19 nt, Artificial Sequence
  Description of Artificial Sequence: Synthetic oligonucleotide
  Sense strand starting at position 2644 of SEQ ID NO: 1880235
gcgugagcugacucaguuu

SEQ ID NO: 1952135 - RNA, 19 nt, Artificial Sequence
  Description of Artificial Sequence: Synthetic oligonucleotide
  Antisense strand to SEQ ID NO: 1952134
aaacugagucagcucacgc

SEQ ID NO: 1952136 - RNA, 19 nt, Artificial Sequence
  Description of Artificial Sequence: Synthetic oligonucleotide
  Sense strand starting at position 2776 of SEQ ID NO: 1880235
ugaguaucccgccagguaa

SEQ ID NO: 1952137 - RNA, 19 nt, Artificial Sequence
  Description of Artificial Sequence: Synthetic oligonucleotide
  Antisense strand to SEQ ID NO: 1952136
uuaccuggcgggauacuca

SEQ ID NO: 1952138 - RNA, 19 nt, Artificial Sequence
  Description of Artificial Sequence: Synthetic oligonucleotide
  Sense strand starting at position 2886 of SEQ ID NO: 1880235
ugggacuucuagcuugaga

SEQ ID NO: 1952139 - RNA, 19 nt, Artificial Sequence
  Description of Artificial Sequence: Synthetic oligonucleotide
  Antisense strand to SEQ ID NO: 1952138
ucucaagcuagaaguccca

SEQ ID NO: 1952140 - RNA, 19 nt, Artificial Sequence
  Description of Artificial Sequence: Synthetic oligonucleotide
  Sense strand starting at position 2888 of SEQ ID NO: 1880235
ggacuucuagcuugagaca

SEQ ID NO: 1952141 - RNA, 19 nt, Artificial Sequence
  Description of Artificial Sequence: Synthetic oligonucleotide
  Antisense strand to SEQ ID NO: 1952140
ugucucaagcuagaagucc

SEQ ID NO: 1952142 - RNA, 19 nt, Artificial Sequence
  Description of Artificial Sequence: Synthetic oligonucleotide
  Sense strand starting at position 2889 of SEQ ID NO: 1880235
gacuucuagcuugagacau

SEQ ID NO: 1952143 - RNA, 19 nt, Artificial Sequence
  Description of Artificial Sequence: Synthetic oligonucleotide
  Antisense strand to SEQ ID NO: 1952142
augucucaagcuagaaguc

SEQ ID NO: 1952144 - RNA, 19 nt, Artificial Sequence
  Description of Artificial Sequence: Synthetic oligonucleotide
  Sense strand starting at position 3930 of SEQ ID NO: 1880235
gggauuuagauucgugugu

SEQ ID NO: 1952145 - RNA, 19 nt, Artificial Sequence
  Description of Artificial Sequence: Synthetic oligonucleotide
  Antisense strand to SEQ ID NO: 1952144
acacacgaaucuaaauccc

SEQ ID NO: 1952146 - RNA, 19 nt, Artificial Sequence
  Description of Artificial Sequence: Synthetic oligonucleotide
  Sense strand starting at position 46 of SEQ ID NO: 1880236
uggagucauggccacucua

SEQ ID NO: 1952147 - RNA, 19 nt, Artificial Sequence
  Description of Artificial Sequence: Synthetic oligonucleotide
  Antisense strand to SEQ ID NO: 1952146
uagaguggccaugacucca

SEQ ID NO: 1952148 - RNA, 19 nt, Artificial Sequence
  Description of Artificial Sequence: Synthetic oligonucleotide
  Sense strand starting at position 109 of SEQ ID NO: 1880236
uuucuuucccacugaggau

SEQ ID NO: 1952149 - RNA, 19 nt, Artificial Sequence
  Description of Artificial Sequence: Synthetic oligonucleotide
  Antisense strand to SEQ ID NO: 1952148
auccucagugggaaagaaa

SEQ ID NO: 1952150 - RNA, 19 nt, Artificial Sequence
  Description of Artificial Sequence: Synthetic oligonucleotide
  Sense strand starting at position 349 of SEQ ID NO: 1880236
auauuuaggucugaucaug

SEQ ID NO: 1952151 - RNA, 19 nt, Artificial Sequence
  Description of Artificial Sequence: Synthetic oligonucleotide
  Antisense strand to SEQ ID NO: 1952150
caugaucagaccuaaauau

SEQ ID NO: 1952152 - RNA, 19 nt, Artificial Sequence
  Description of Artificial Sequence: Synthetic oligonucleotide
  Sense strand starting at position 437 of SEQ ID NO: 1880236
gggacugauucccuuccuu

SEQ ID NO: 1952153 - RNA, 19 nt, Artificial Sequence
  Description of Artificial Sequence: Synthetic oligonucleotide
  Antisense strand to SEQ ID NO: 1952152
aaggaagggaaucaguccc

SEQ ID NO: 1952154 - RNA, 19 nt, Artificial Sequence
  Description of Artificial Sequence: Synthetic oligonucleotide
  Sense strand starting at position 452 of SEQ ID NO: 1880236
ccuuuaucucaagggcacu

SEQ ID NO: 1952155 - RNA, 19 nt, Artificial Sequence
  Description of Artificial Sequence: Synthetic oligonucleotide
  Antisense strand to SEQ ID NO: 1952154
agugcccuugagauaaagg

SEQ ID NO: 1952156 - RNA, 19 nt, Artificial Sequence
  Description of Artificial Sequence: Synthetic oligonucleotide
  Sense strand starting at position 480 of SEQ ID NO: 1880236
gcaguuuggacccaugaca

SEQ ID NO: 1952157 - RNA, 19 nt, Artificial Sequence
  Description of Artificial Sequence: Synthetic oligonucleotide
  Antisense strand to SEQ ID NO: 1952156
ugucauggguccaaacugc

SEQ ID NO: 1952158 - RNA, 19 nt, Artificial Sequence
  Description of Artificial Sequence: Synthetic oligonucleotide
  Sense strand starting at position 721 of SEQ ID NO: 1880236
augucauccuuucugaaag

SEQ ID NO: 1952159 - RNA, 19 nt, Artificial Sequence
  Description of Artificial Sequence: Synthetic oligonucleotide
  Antisense strand to SEQ ID NO: 1952158
cuuucagaaaggaugacau

SEQ ID NO: 1952160 - RNA, 19 nt, Artificial Sequence
  Description of Artificial Sequence: Synthetic oligonucleotide
  Sense strand starting at position 926 of SEQ ID NO: 1880236
auuauuagcuaggcagaca

SEQ ID NO: 1952161 - RNA, 19 nt, Artificial Sequence
  Description of Artificial Sequence: Synthetic oligonucleotide
  Antisense strand to SEQ ID NO: 1952160
ugucugccuagcuaauaau

SEQ ID NO: 1952162 - RNA, 19 nt, Artificial Sequence
  Description of Artificial Sequence: Synthetic oligonucleotide
  Sense strand starting at position 979 of SEQ ID NO: 1880236
ccuugagaagcuuauguuc

SEQ ID NO: 1952163 - RNA, 19 nt, Artificial Sequence
  Description of Artificial Sequence: Synthetic oligonucleotide
  Antisense strand to SEQ ID NO: 1952162
gaacauaagcuucucaagg

SEQ ID NO: 1952164 - RNA, 19 nt, Artificial Sequence
  Description of Artificial Sequence: Synthetic oligonucleotide
  Sense strand starting at position 982 of SEQ ID NO: 1880236
ugagaagcuuauguucuau

SEQ ID NO: 1952165 - RNA, 19 nt, Artificial Sequence
  Description of Artificial Sequence: Synthetic oligonucleotide
  Antisense strand to SEQ ID NO: 1952164
auagaacauaagcuucuca

SEQ ID NO: 1952166 - RNA, 19 nt, Artificial Sequence
  Description of Artificial Sequence: Synthetic oligonucleotide
  Sense strand starting at position 1056 of SEQ ID NO: 1880236
gaaagaccucuuugguaag

SEQ ID NO: 1952167 - RNA, 19 nt, Artificial Sequence
  Description of Artificial Sequence: Synthetic oligonucleotide
  Antisense strand to SEQ ID NO: 1952166
cuuaccaaagaggucuuuc

SEQ ID NO: 1952168 - RNA, 19 nt, Artificial Sequence
  Description of Artificial Sequence: Synthetic oligonucleotide
  Sense strand starting at position 1067 of SEQ ID NO: 1880236
uugguaagguaauauuuga

SEQ ID NO: 1952169 - RNA, 19 nt, Artificial Sequence
  Description of Artificial Sequence: Synthetic oligonucleotide
  Antisense strand to SEQ ID NO: 1952168
ucaaauauuaccuuaccaa

SEQ ID NO: 1952170 - RNA, 19 nt, Artificial Sequence
  Description of Artificial Sequence: Synthetic oligonucleotide
  Sense strand starting at position 1072 of SEQ ID NO: 1880236
aagguaauauuugagcuga

SEQ ID NO: 1952171 - RNA, 19 nt, Artificial Sequence
  Description of Artificial Sequence: Synthetic oligonucleotide
  Antisense strand to SEQ ID NO: 1952170
ucagcucaaauauuaccuu

SEQ ID NO: 1952172 - RNA, 19 nt, Artificial Sequence
  Description of Artificial Sequence: Synthetic oligonucleotide
  Sense strand starting at position 1229 of SEQ ID NO: 1880236
ggcaauuuauguucucauu

SEQ ID NO: 1952173 - RNA, 19 nt, Artificial Sequence
  Description of Artificial Sequence: Synthetic oligonucleotide
  Antisense strand to SEQ ID NO: 1952172
aaugagaacauaaauugcc

SEQ ID NO: 1952174 - RNA, 19 nt, Artificial Sequence
  Description of Artificial Sequence: Synthetic oligonucleotide
  Sense strand starting at position 1368 of SEQ ID NO: 1880236
gauuuccaaugugaggauu

SEQ ID NO: 1952175 - RNA, 19 nt, Artificial Sequence
  Description of Artificial Sequence: Synthetic oligonucleotide
  Antisense strand to SEQ ID NO: 1952174
aauccucacauuggaaauc

SEQ ID NO: 1952176 - RNA, 19 nt, Artificial Sequence
  Description of Artificial Sequence: Synthetic oligonucleotide
  Sense strand starting at position 1547 of SEQ ID NO: 1880236
uggcucguaagagauagau

SEQ ID NO: 1952177 - RNA, 19 nt, Artificial Sequence
  Description of Artificial Sequence: Synthetic oligonucleotide
  Antisense strand to SEQ ID NO: 1952176
aucuaucucuuacgagcca

SEQ ID NO: 1952178 - RNA, 19 nt, Artificial Sequence
  Description of Artificial Sequence: Synthetic oligonucleotide
  Sense strand starting at position 1549 of SEQ ID NO: 1880236
gcucguaagagauagauau

SEQ ID NO: 1952179 - RNA, 19 nt, Artificial Sequence
  Description of Artificial Sequence: Synthetic oligonucleotide
  Antisense strand to SEQ ID NO: 1952178
auaucuaucucuuacgagc

SEQ ID NO: 1952180 - RNA, 19 nt, Artificial Sequence
  Description of Artificial Sequence: Synthetic oligonucleotide
  Sense strand starting at position 1657 of SEQ ID NO: 1880236
ggcccuuuccaaggaaacu

SEQ ID NO: 1952181 - RNA, 19 nt, Artificial Sequence
  Description of Artificial Sequence: Synthetic oligonucleotide
  Antisense strand to SEQ ID NO: 1952180
aguuuccuuggaaagggcc

SEQ ID NO: 1952182 - RNA, 19 nt, Artificial Sequence
  Description of Artificial Sequence: Synthetic oligonucleotide
  Sense strand starting at position 1748 of SEQ ID NO: 1880236
gaaagaggcuuggcucaaa

SEQ ID NO: 1952183 - RNA, 19 nt, Artificial Sequence
  Description of Artificial Sequence: Synthetic oligonucleotide
  Antisense strand to SEQ ID NO: 1952182
uuugagccaagccucuuuc

SEQ ID NO: 1952184 - RNA, 19 nt, Artificial Sequence
  Description of Artificial Sequence: Synthetic oligonucleotide
  Sense strand starting at position 1798 of SEQ ID NO: 1880236
ccaaaugaccauuguagga

SEQ ID NO: 1952185 - RNA, 19 nt, Artificial Sequence
  Description of Artificial Sequence: Synthetic oligonucleotide
  Antisense strand to SEQ ID NO: 1952184
uccuacaauggucauuugg

SEQ ID NO: 1952186 - RNA, 19 nt, Artificial Sequence
  Description of Artificial Sequence: Synthetic oligonucleotide
  Sense strand starting at position 2051 of SEQ ID NO: 1880236
ggcugccaucgcgagauuu

SEQ ID NO: 1952187 - RNA, 19 nt, Artificial Sequence
  Description of Artificial Sequence: Synthetic oligonucleotide
  Antisense strand to SEQ ID NO: 1952186
aaaucucgcgauggcagcc

SEQ ID NO: 1952188 - RNA, 19 nt, Artificial Sequence
  Description of Artificial Sequence: Synthetic oligonucleotide
  Sense strand starting at position 2455 of SEQ ID NO: 1880236
guaguaacucgggauggaa

SEQ ID NO: 1952189 - RNA, 19 nt, Artificial Sequence
  Description of Artificial Sequence: Synthetic oligonucleotide
  Antisense strand to SEQ ID NO: 1952188
uuccaucccgaguuacuac

SEQ ID NO: 1952190 - RNA, 19 nt, Artificial Sequence
  Description of Artificial Sequence: Synthetic oligonucleotide
  Sense strand starting at position 2578 of SEQ ID NO: 1880236
ggguaauagggugggaauu

SEQ ID NO: 1952191 - RNA, 19 nt, Artificial Sequence
  Description of Artificial Sequence: Synthetic oligonucleotide
  Antisense strand to SEQ ID NO: 1952190
aauucccacccuauuaccc

SEQ ID NO: 1952192 - RNA, 19 nt, Artificial Sequence
  Description of Artificial Sequence: Synthetic oligonucleotide
  Sense strand starting at position 2654 of SEQ ID NO: 1880236
agggaacggugcuuggaau

SEQ ID NO: 1952193 - RNA, 19 nt, Artificial Sequence
  Description of Artificial Sequence: Synthetic oligonucleotide
  Antisense strand to SEQ ID NO: 1952192
auuccaagcaccguucccu

SEQ ID NO: 1952194 - RNA, 19 nt, Artificial Sequence
  Description of Artificial Sequence: Synthetic oligonucleotide
  Sense strand starting at position 2798 of SEQ ID NO: 1880236
ugaauuggaugugcucuaa

SEQ ID NO: 1952195 - RNA, 19 nt, Artificial Sequence
  Description of Artificial Sequence: Synthetic oligonucleotide
  Antisense strand to SEQ ID NO: 1952194
uuagagcacauccaauuca

SEQ ID NO: 1952196 - RNA, 19 nt, Artificial Sequence
  Description of Artificial Sequence: Synthetic oligonucleotide
  Sense strand starting at position 2802 of SEQ ID NO: 1880236
uuggaugugcucuaaaguc

SEQ ID NO: 1952197 - RNA, 19 nt, Artificial Sequence
  Description of Artificial Sequence: Synthetic oligonucleotide
  Antisense strand to SEQ ID NO: 1952196
gacuuuagagcacauccaa

SEQ ID NO: 1952198 - RNA, 19 nt, Artificial Sequence
  Description of Artificial Sequence: Synthetic oligonucleotide
  Sense strand starting at position 2852 of SEQ ID NO: 1880236
gagaaagucuuggccugga

SEQ ID NO: 1952199 - RNA, 19 nt, Artificial Sequence
  Description of Artificial Sequence: Synthetic oligonucleotide
  Antisense strand to SEQ ID NO: 1952198
uccaggccaagacuuucuc

SEQ ID NO: 1952200 - RNA, 19 nt, Artificial Sequence
  Description of Artificial Sequence: Synthetic oligonucleotide
  Sense strand starting at position 2895 of SEQ ID NO: 1880236
cagagcguucuugggauuu

SEQ ID NO: 1952201 - RNA, 19 nt, Artificial Sequence
  Description of Artificial Sequence: Synthetic oligonucleotide
  Antisense strand to SEQ ID NO: 1952200
aaaucccaagaacgcucug

SEQ ID NO: 1952202 - RNA, 19 nt, Artificial Sequence
  Description of Artificial Sequence: Synthetic oligonucleotide
  Sense strand starting at position 3089 of SEQ ID NO: 1880236
agcucuucccaucaaaggu

SEQ ID NO: 1952203 - RNA, 19 nt, Artificial Sequence
  Description of Artificial Sequence: Synthetic oligonucleotide
  Antisense strand to SEQ ID NO: 1952202
accuuugaugggaagagcu

SEQ ID NO: 1952204 - RNA, 19 nt, Artificial Sequence
  Description of Artificial Sequence: Synthetic oligonucleotide
  Sense strand starting at position 3190 of SEQ ID NO: 1880236
ugccuucuacuacagagua

SEQ ID NO: 1952205 - RNA, 19 nt, Artificial Sequence
  Description of Artificial Sequence: Synthetic oligonucleotide
  Antisense strand to SEQ ID NO: 1952204
uacucuguaguagaaggca

SEQ ID NO: 1952206 - RNA, 19 nt, Artificial Sequence
  Description of Artificial Sequence: Synthetic oligonucleotide
  Sense strand starting at position 3234 of SEQ ID NO: 1880236
ggcuuuauagaacacggau

SEQ ID NO: 1952207 - RNA, 19 nt, Artificial Sequence
  Description of Artificial Sequence: Synthetic oligonucleotide
  Antisense strand to SEQ ID NO: 1952206
auccguguucuauaaagcc

SEQ ID NO: 1952208 - RNA, 19 nt, Artificial Sequence
  Description of Artificial Sequence: Synthetic oligonucleotide
  Sense strand starting at position 3237 of SEQ ID NO: 1880236
uuuauagaacacggauauu

SEQ ID NO: 1952209 - RNA, 19 nt, Artificial Sequence
  Description of Artificial Sequence: Synthetic oligonucleotide
  Antisense strand to SEQ ID NO: 1952208
aauauccguguucuauaaa

SEQ ID NO: 1952210 - RNA, 19 nt, Artificial Sequence
  Description of Artificial Sequence: Synthetic oligonucleotide
  Sense strand starting at position 3326 of SEQ ID NO: 1880236
uuucucuuugaguaggcau

SEQ ID NO: 1952211 - RNA, 19 nt, Artificial Sequence
  Description of Artificial Sequence: Synthetic oligonucleotide
  Antisense strand to SEQ ID NO: 1952210
augccuacucaaagagaaa

SEQ ID NO: 1952212 - RNA, 19 nt, Artificial Sequence
  Description of Artificial Sequence: Synthetic oligonucleotide
  Sense strand starting at position 3605 of SEQ ID NO: 1880236
uccaguugucaucaaaugu

SEQ ID NO: 1952213 - RNA, 19 nt, Artificial Sequence
  Description of Artificial Sequence: Synthetic oligonucleotide
  Antisense strand to SEQ ID NO: 1952212
acauuugaugacaacugga

SEQ ID NO: 1952214 - RNA, 19 nt, Artificial Sequence
  Description of Artificial Sequence: Synthetic oligonucleotide
  Sense strand starting at position 3813 of SEQ ID NO: 1880236
ggaggaaagucugauuucu

SEQ ID NO: 1952215 - RNA, 19 nt, Artificial Sequence
  Description of Artificial Sequence: Synthetic oligonucleotide
  Antisense strand to SEQ ID NO: 1952214
agaaaucagacuuuccucc

SEQ ID NO: 1952216 - RNA, 19 nt, Artificial Sequence
  Description of Artificial Sequence: Synthetic oligonucleotide
  Sense strand starting at position 3821 of SEQ ID NO: 1880236
gucugauuucucugcucaa

SEQ ID NO: 1952217 - RNA, 19 nt, Artificial Sequence
  Description of Artificial Sequence: Synthetic oligonucleotide
  Antisense strand to SEQ ID NO: 1952216
uugagcagagaaaucagac

SEQ ID NO: 1952218 - RNA, 19 nt, Artificial Sequence
  Description of Artificial Sequence: Synthetic oligonucleotide
  Sense strand starting at position 3837 of SEQ ID NO: 1880236
caagauaaauguguuguua

SEQ ID NO: 1952219 - RNA, 19 nt, Artificial Sequence
  Description of Artificial Sequence: Synthetic oligonucleotide
  Antisense strand to SEQ ID NO: 1952218
uaacaacacauuuaucuug

SEQ ID NO: 1952220 - RNA, 19 nt, Artificial Sequence
  Description of Artificial Sequence: Synthetic oligonucleotide
  Sense strand starting at position 3849 of SEQ ID NO: 1880236
guuguuagacuauggacuu

SEQ ID NO: 1952221 - RNA, 19 nt, Artificial Sequence
  Description of Artificial Sequence: Synthetic oligonucleotide
  Antisense strand to SEQ ID NO: 1952220
aaguccauagucuaacaac

SEQ ID NO: 1952222 - RNA, 19 nt, Artificial Sequence
  Description of Artificial Sequence: Synthetic oligonucleotide
  Sense strand starting at position 3909 of SEQ ID NO: 1880236
gcuguuuacggauaugaaa

SEQ ID NO: 1952223 - RNA, 19 nt, Artificial Sequence
  Description of Artificial Sequence: Synthetic oligonucleotide
  Antisense strand to SEQ ID NO: 1952222
uuucauauccguaaacagc

SEQ ID NO: 1952224 - RNA, 19 nt, Artificial Sequence
  Description of Artificial Sequence: Synthetic oligonucleotide
  Sense strand starting at position 3911 of SEQ ID NO: 1880236
uguuuacggauaugaaauu

SEQ ID NO: 1952225 - RNA, 19 nt, Artificial Sequence
  Description of Artificial Sequence: Synthetic oligonucleotide
  Antisense strand to SEQ ID NO: 1952224
aauuucauauccguaaaca

SEQ ID NO: 1952226 - RNA, 19 nt, Artificial Sequence
  Description of Artificial Sequence: Synthetic oligonucleotide
  Sense strand starting at position 14 of SEQ ID NO: 1880237
gugggucacccuuaauaau

SEQ ID NO: 1952227 - RNA, 19 nt, Artificial Sequence
  Description of Artificial Sequence: Synthetic oligonucleotide
  Antisense strand to SEQ ID NO: 1952226
auuauuaagggugacccac

SEQ ID NO: 1952228 - RNA, 19 nt, Artificial Sequence
  Description of Artificial Sequence: Synthetic oligonucleotide
  Sense strand starting at position 46 of SEQ ID NO: 1880237
uguauaggacuuuacacuu

SEQ ID NO: 1952229 - RNA, 19 nt, Artificial Sequence
  Description of Artificial Sequence: Synthetic oligonucleotide
  Antisense strand to SEQ ID NO: 1952228
aaguguaaaguccuauaca

SEQ ID NO: 1952230 - RNA, 19 nt, Artificial Sequence
  Description of Artificial Sequence: Synthetic oligonucleotide
  Sense strand starting at position 92 of SEQ ID NO: 1880237
uuugauucucccuaagcag

SEQ ID NO: 1952231 - RNA, 19 nt, Artificial Sequence
  Description of Artificial Sequence: Synthetic oligonucleotide
  Antisense strand to SEQ ID NO: 1952230
cugcuuagggagaaucaaa

SEQ ID NO: 1952232 - RNA, 19 nt, Artificial Sequence
  Description of Artificial Sequence: Synthetic oligonucleotide
  Sense strand starting at position 98 of SEQ ID NO: 1880237
ucucccuaagcagaguaau

SEQ ID NO: 1952233 - RNA, 19 nt, Artificial Sequence
  Description of Artificial Sequence: Synthetic oligonucleotide
  Antisense strand to SEQ ID NO: 1952232
auuacucugcuuagggaga

SEQ ID NO: 1952234 - RNA, 19 nt, Artificial Sequence
  Description of Artificial Sequence: Synthetic oligonucleotide
  Sense strand starting at position 189 of SEQ ID NO: 1880237
acuuguuaagcacagacau

SEQ ID NO: 1952235 - RNA, 19 nt, Artificial Sequence
  Description of Artificial Sequence: Synthetic oligonucleotide
  Antisense strand to SEQ ID NO: 1952234
augucugugcuuaacaagu

SEQ ID NO: 1952236 - RNA, 19 nt, Artificial Sequence
  Description of Artificial Sequence: Synthetic oligonucleotide
  Sense strand starting at position 308 of SEQ ID NO: 1880237
agaacaagaaaucguguca

SEQ ID NO: 1952237 - RNA, 19 nt, Artificial Sequence
  Description of Artificial Sequence: Synthetic oligonucleotide
  Antisense strand to SEQ ID NO: 1952236
ugacacgauuucuuguucu

SEQ ID NO: 1952238 - RNA, 19 nt, Artificial Sequence
  Description of Artificial Sequence: Synthetic oligonucleotide
  Sense strand starting at position 370 of SEQ ID NO: 1880237
gaaucaggugacuggcaaa

SEQ ID NO: 1952239 - RNA, 19 nt, Artificial Sequence
  Description of Artificial Sequence: Synthetic oligonucleotide
  Antisense strand to SEQ ID NO: 1952238
uuugccagucaccugauuc

SEQ ID NO: 1952240 - RNA, 19 nt, Artificial Sequence
  Description of Artificial Sequence: Synthetic oligonucleotide
  Sense strand starting at position 535 of SEQ ID NO: 1880237
gacagaaagccuuauguug

SEQ ID NO: 1952241 - RNA, 19 nt, Artificial Sequence
  Description of Artificial Sequence: Synthetic oligonucleotide
  Antisense strand to SEQ ID NO: 1952240
caacauaaggcuuucuguc

SEQ ID NO: 1952242 - RNA, 19 nt, Artificial Sequence
  Description of Artificial Sequence: Synthetic oligonucleotide
  Sense strand starting at position 544 of SEQ ID NO: 1880237
ccuuauguugcugugucua

SEQ ID NO: 1952243 - RNA, 19 nt, Artificial Sequence
  Description of Artificial Sequence: Synthetic oligonucleotide
  Antisense strand to SEQ ID NO: 1952242
uagacacagcaacauaagg

SEQ ID NO: 1952244 - RNA, 19 nt, Artificial Sequence
  Description of Artificial Sequence: Synthetic oligonucleotide
  Sense strand starting at position 632 of SEQ ID NO: 1880237
guguuaauaguacaucaua

SEQ ID NO: 1952245 - RNA, 19 nt, Artificial Sequence
  Description of Artificial Sequence: Synthetic oligonucleotide
  Antisense strand to SEQ ID NO: 1952244
uaugauguacuauuaacac

SEQ ID NO: 1952246 - RNA, 19 nt, Artificial Sequence
  Description of Artificial Sequence: Synthetic oligonucleotide
  Sense strand starting at position 659 of SEQ ID NO: 1880237
ccguuaagaacuuaugugu

SEQ ID NO: 1952247 - RNA, 19 nt, Artificial Sequence
  Description of Artificial Sequence: Synthetic oligonucleotide
  Antisense strand to SEQ ID NO: 1952246
acacauaaguucuuaacgg

SEQ ID NO: 1952248 - RNA, 19 nt, Artificial Sequence
  Description of Artificial Sequence: Synthetic oligonucleotide
  Sense strand starting at position 662 of SEQ ID NO: 1880237
uuaagaacuuauguguaac

SEQ ID NO: 1952249 - RNA, 19 nt, Artificial Sequence
  Description of Artificial Sequence: Synthetic oligonucleotide
  Antisense strand to SEQ ID NO: 1952248
guuacacauaaguucuuaa

SEQ ID NO: 1952250 - RNA, 19 nt, Artificial Sequence
  Description of Artificial Sequence: Synthetic oligonucleotide
  Sense strand starting at position 665 of SEQ ID NO: 1880237
agaacuuauguguaacgua

SEQ ID NO: 1952251 - RNA, 19 nt, Artificial Sequence
  Description of Artificial Sequence: Synthetic oligonucleotide
  Antisense strand to SEQ ID NO: 1952250
uacguuacacauaaguucu

SEQ ID NO: 1952252 - RNA, 19 nt, Artificial Sequence
  Description of Artificial Sequence: Synthetic oligonucleotide
  Sense strand starting at position 670 of SEQ ID NO: 1880237
uuauguguaacguaagaaa

SEQ ID NO: 1952253 - RNA, 19 nt, Artificial Sequence
  Description of Artificial Sequence: Synthetic oligonucleotide
  Antisense strand to SEQ ID NO: 1952252
uuucuuacguuacacauaa

SEQ ID NO: 1952254 - RNA, 19 nt, Artificial Sequence
  Description of Artificial Sequence: Synthetic oligonucleotide
  Sense strand starting at position 753 of SEQ ID NO: 1880237
ccacaugggugccugagau

SEQ ID NO: 1952255 - RNA, 19 nt, Artificial Sequence
  Description of Artificial Sequence: Synthetic oligonucleotide
  Antisense strand to SEQ ID NO: 1952254
aucucaggcacccaugugg

SEQ ID NO: 1952256 - RNA, 19 nt, Artificial Sequence
  Description of Artificial Sequence: Synthetic oligonucleotide
  Sense strand starting at position 788 of SEQ ID NO: 1880237
ucugaugguucaguguaga

SEQ ID NO: 1952257 - RNA, 19 nt, Artificial Sequence
  Description of Artificial Sequence: Synthetic oligonucleotide
  Antisense strand to SEQ ID NO: 1952256
ucuacacugaaccaucaga

SEQ ID NO: 1952258 - RNA, 19 nt, Artificial Sequence
  Description of Artificial Sequence: Synthetic oligonucleotide
  Sense strand starting at position 860 of SEQ ID NO: 1880237
gggcuauguauauacagca

SEQ ID NO: 1952259 - RNA, 19 nt, Artificial Sequence
  Description of Artificial Sequence: Synthetic oligonucleotide
  Antisense strand to SEQ ID NO: 1952258
ugcuguauauacauagccc

SEQ ID NO: 1952260 - RNA, 19 nt, Artificial Sequence
  Description of Artificial Sequence: Synthetic oligonucleotide
  Sense strand starting at position 867 of SEQ ID NO: 1880237
guauauacagcauauauga

SEQ ID NO: 1952261 - RNA, 19 nt, Artificial Sequence
  Description of Artificial Sequence: Synthetic oligonucleotide
  Antisense strand to SEQ ID NO: 1952260
ucauauaugcuguauauac

SEQ ID NO: 1952262 - RNA, 19 nt, Artificial Sequence
  Description of Artificial Sequence: Synthetic oligonucleotide
  Sense strand starting at position 1060 of SEQ ID NO: 1880237
cacugaucugucugaucag

SEQ ID NO: 1952263 - RNA, 19 nt, Artificial Sequence
  Description of Artificial Sequence: Synthetic oligonucleotide
  Antisense strand to SEQ ID NO: 1952262
cugaucagacagaucagug

SEQ ID NO: 1952264 - RNA, 19 nt, Artificial Sequence
  Description of Artificial Sequence: Synthetic oligonucleotide
  Sense strand starting at position 1063 of SEQ ID NO: 1880237
ugaucugucugaucagagu

SEQ ID NO: 1952265 - RNA, 19 nt, Artificial Sequence
  Description of Artificial Sequence: Synthetic oligonucleotide
  Antisense strand to SEQ ID NO: 1952264
acucugaucagacagauca

SEQ ID NO: 1952266 - RNA, 19 nt, Artificial Sequence
  Description of Artificial Sequence: Synthetic oligonucleotide
  Sense strand starting at position 1069 of SEQ ID NO: 1880237
gucugaucagagugagcca

SEQ ID NO: 1952267 - RNA, 19 nt, Artificial Sequence
  Description of Artificial Sequence: Synthetic oligonucleotide
  Antisense strand to SEQ ID NO: 1952266
uggcucacucugaucagac

SEQ ID NO: 1952268 - RNA, 19 nt, Artificial Sequence
  Description of Artificial Sequence: Synthetic oligonucleotide
  Sense strand starting at position 1175 of SEQ ID NO: 1880237
agaaguauggcccauaggu

SEQ ID NO: 1952269 - RNA, 19 nt, Artificial Sequence
  Description of Artificial Sequence: Synthetic oligonucleotide
  Antisense strand to SEQ ID NO: 1952268
accuaugggccauacuucu

SEQ ID NO: 1952270 - RNA, 19 nt, Artificial Sequence
  Description of Artificial Sequence: Synthetic oligonucleotide
  Sense strand starting at position 1177 of SEQ ID NO: 1880237
aaguauggcccauagguga

SEQ ID NO: 1952271 - RNA, 19 nt, Artificial Sequence
  Description of Artificial Sequence: Synthetic oligonucleotide
  Antisense strand to SEQ ID NO: 1952270
ucaccuaugggccauacuu

SEQ ID NO: 1952272 - RNA, 19 nt, Artificial Sequence
  Description of Artificial Sequence: Synthetic oligonucleotide
  Sense strand starting at position 2022 of SEQ ID NO: 1880237
gagacucuugcgcaaggga

SEQ ID NO: 1952273 - RNA, 19 nt, Artificial Sequence
  Description of Artificial Sequence: Synthetic oligonucleotide
  Antisense strand to SEQ ID NO: 1952272
ucccuugcgcaagagucuc

SEQ ID NO: 1952274 - RNA, 19 nt, Artificial Sequence
  Description of Artificial Sequence: Synthetic oligonucleotide
  Sense strand starting at position 2310 of SEQ ID NO: 1880237
gucuuugcugcagaagacu

SEQ ID NO: 1952275 - RNA, 19 nt, Artificial Sequence
  Description of Artificial Sequence: Synthetic oligonucleotide
  Antisense strand to SEQ ID NO: 1952274
agucuucugcagcaaagac

SEQ ID NO: 1952276 - RNA, 19 nt, Artificial Sequence
  Description of Artificial Sequence: Synthetic oligonucleotide
  Sense strand starting at position 2533 of SEQ ID NO: 1880237
cuauguggcagaugugaac

SEQ ID NO: 1952277 - RNA, 19 nt, Artificial Sequence
  Description of Artificial Sequence: Synthetic oligonucleotide
  Antisense strand to SEQ ID NO: 1952276
guucacaucugccacauag

SEQ ID NO: 1952278 - RNA, 19 nt, Artificial Sequence
  Description of Artificial Sequence: Synthetic oligonucleotide
  Sense strand starting at position 2719 of SEQ ID NO: 1880237
aaaugauucgguuggauuc

SEQ ID NO: 1952279 - RNA, 19 nt, Artificial Sequence
  Description of Artificial Sequence: Synthetic oligonucleotide
  Antisense strand to SEQ ID NO: 1952278
gaauccaaccgaaucauuu

SEQ ID NO: 1952280 - RNA, 19 nt, Artificial Sequence
  Description of Artificial Sequence: Synthetic oligonucleotide
  Sense strand starting at position 2753 of SEQ ID NO: 1880237
cuuugauauguugggauuc

SEQ ID NO: 1952281 - RNA, 19 nt, Artificial Sequence
  Description of Artificial Sequence: Synthetic oligonucleotide
  Antisense strand to SEQ ID NO: 1952280
gaaucccaacauaucaaag

SEQ ID NO: 1952282 - RNA, 19 nt, Artificial Sequence
  Description of Artificial Sequence: Synthetic oligonucleotide
  Sense strand starting at position 2813 of SEQ ID NO: 1880237
gagguugguggcuggauua

SEQ ID NO: 1952283 - RNA, 19 nt, Artificial Sequence
  Description of Artificial Sequence: Synthetic oligonucleotide
  Antisense strand to SEQ ID NO: 1952282
uaauccagccaccaaccuc

SEQ ID NO: 1952284 - RNA, 19 nt, Artificial Sequence
  Description of Artificial Sequence: Synthetic oligonucleotide
  Sense strand starting at position 2890 of SEQ ID NO: 1880237
ggcacuuaucuggaggcca

SEQ ID NO: 1952285 - RNA, 19 nt, Artificial Sequence
  Description of Artificial Sequence: Synthetic oligonucleotide
  Antisense strand to SEQ ID NO: 1952284
uggccuccagauaagugcc

SEQ ID NO: 1952286 - RNA, 19 nt, Artificial Sequence
  Description of Artificial Sequence: Synthetic oligonucleotide
  Sense strand starting at position 2999 of SEQ ID NO: 1880237
caggaaguguuugcuaaac

SEQ ID NO: 1952287 - RNA, 19 nt, Artificial Sequence
  Description of Artificial Sequence: Synthetic oligonucleotide
  Antisense strand to SEQ ID NO: 1952286
guuuagcaaacacuuccug

SEQ ID NO: 1952288 - RNA, 19 nt, Artificial Sequence
  Description of Artificial Sequence: Synthetic oligonucleotide
  Sense strand starting at position 3141 of SEQ ID NO: 1880237
uuccuaguugugugaauuu

SEQ ID NO: 1952289 - RNA, 19 nt, Artificial Sequence
  Description of Artificial Sequence: Synthetic oligonucleotide
  Antisense strand to SEQ ID NO: 1952288
aaauucacacaacuaggaa

SEQ ID NO: 1952290 - RNA, 19 nt, Artificial Sequence
  Description of Artificial Sequence: Synthetic oligonucleotide
  Sense strand starting at position 3161 of SEQ ID NO: 1880237
ggugguuuccuuuaggaca

SEQ ID NO: 1952291 - RNA, 19 nt, Artificial Sequence
  Description of Artificial Sequence: Synthetic oligonucleotide
  Antisense strand to SEQ ID NO: 1952290
uguccuaaaggaaaccacc

SEQ ID NO: 1952292 - RNA, 19 nt, Artificial Sequence
  Description of Artificial Sequence: Synthetic oligonucleotide
  Sense strand starting at position 3193 of SEQ ID NO: 1880237
uuuggaagucuuuggaauc

SEQ ID NO: 1952293 - RNA, 19 nt, Artificial Sequence
  Description of Artificial Sequence: Synthetic oligonucleotide
  Antisense strand to SEQ ID NO: 1952292
gauuccaaagacuuccaaa

SEQ ID NO: 1952294 - RNA, 19 nt, Artificial Sequence
  Description of Artificial Sequence: Synthetic oligonucleotide
  Sense strand starting at position 3271 of SEQ ID NO: 1880237
ggugguuguagggauauaa

SEQ ID NO: 1952295 - RNA, 19 nt, Artificial Sequence
  Description of Artificial Sequence: Synthetic oligonucleotide
  Antisense strand to SEQ ID NO: 1952294
uuauaucccuacaaccacc

SEQ ID NO: 1952296 - RNA, 19 nt, Artificial Sequence
  Description of Artificial Sequence: Synthetic oligonucleotide
  Sense strand starting at position 3481 of SEQ ID NO: 1880237
auauacguuccauaugaag

SEQ ID NO: 1952297 - RNA, 19 nt, Artificial Sequence
  Description of Artificial Sequence: Synthetic oligonucleotide
  Antisense strand to SEQ ID NO: 1952296
cuucauauggaacguauau

SEQ ID NO: 1952298 - RNA, 19 nt, Artificial Sequence
  Description of Artificial Sequence: Synthetic oligonucleotide
  Sense strand starting at position 3483 of SEQ ID NO: 1880237
auacguuccauaugaaggu

SEQ ID NO: 1952299 - RNA, 19 nt, Artificial Sequence
  Description of Artificial Sequence: Synthetic oligonucleotide
  Antisense strand to SEQ ID NO: 1952298
accuucauauggaacguau

SEQ ID NO: 1952300 - RNA, 19 nt, Artificial Sequence
  Description of Artificial Sequence: Synthetic oligonucleotide
  Sense strand starting at position 3643 of SEQ ID NO: 1880237
ugcauuucugcagguccua

SEQ ID NO: 1952301 - RNA, 19 nt, Artificial Sequence
  Description of Artificial Sequence: Synthetic oligonucleotide
  Antisense strand to SEQ ID NO: 1952300
uaggaccugcagaaaugca

SEQ ID NO: 1952302 - RNA, 19 nt, Artificial Sequence
  Description of Artificial Sequence: Synthetic oligonucleotide
  Sense strand starting at position 3924 of SEQ ID NO: 1880237
aagccaagugguuaccauu

SEQ ID NO: 1952303 - RNA, 19 nt, Artificial Sequence
  Description of Artificial Sequence: Synthetic oligonucleotide
  Antisense strand to SEQ ID NO: 1952302
aaugguaaccacuuggcuu

SEQ ID NO: 1952304 - RNA, 19 nt, Artificial Sequence
  Description of Artificial Sequence: Synthetic oligonucleotide
  Sense strand starting at position 3958 of SEQ ID NO: 1880237
cccaucucaucacugguua

SEQ ID NO: 1952305 - RNA, 19 nt, Artificial Sequence
  Description of Artificial Sequence: Synthetic oligonucleotide
  Antisense strand to SEQ ID NO: 1952304
uaaccagugaugagauggg

SEQ ID NO: 1952306 - RNA, 19 nt, Artificial Sequence
  Description of Artificial Sequence: Synthetic oligonucleotide
  Sense strand starting at position 1984 of SEQ ID NO: 1880238
acauuaagugucuaucaca

SEQ ID NO: 1952307 - RNA, 19 nt, Artificial Sequence
  Description of Artificial Sequence: Synthetic oligonucleotide
  Antisense strand to SEQ ID NO: 1952306
ugugauagacacuuaaugu

SEQ ID NO: 1952308 - RNA, 19 nt, Artificial Sequence
  Description of Artificial Sequence: Synthetic oligonucleotide
  Sense strand starting at position 2130 of SEQ ID NO: 1880238
aauauaucaggugguaaua

SEQ ID NO: 1952309 - RNA, 19 nt, Artificial Sequence
  Description of Artificial Sequence: Synthetic oligonucleotide
  Antisense strand to SEQ ID NO: 1952308
uauuaccaccugauauauu

SEQ ID NO: 1952310 - RNA, 19 nt, Artificial Sequence
  Description of Artificial Sequence: Synthetic oligonucleotide
  Sense strand starting at position 2150 of SEQ ID NO: 1880238
ugggcacucugagaaauag

SEQ ID NO: 1952311 - RNA, 19 nt, Artificial Sequence
  Description of Artificial Sequence: Synthetic oligonucleotide
  Antisense strand to SEQ ID NO: 1952310
cuauuucucagagugccca

SEQ ID NO: 1952312 - RNA, 19 nt, Artificial Sequence
  Description of Artificial Sequence: Synthetic oligonucleotide
  Sense strand starting at position 2209 of SEQ ID NO: 1880238
guugcugucacauauagug

SEQ ID NO: 1952313 - RNA, 19 nt, Artificial Sequence
  Description of Artificial Sequence: Synthetic oligonucleotide
  Antisense strand to SEQ ID NO: 1952312
cacuauaugugacagcaac

SEQ ID NO: 1952314 - RNA, 19 nt, Artificial Sequence
  Description of Artificial Sequence: Synthetic oligonucleotide
  Sense strand starting at position 2211 of SEQ ID NO: 1880238
ugcugucacauauaguguu

SEQ ID NO: 1952315 - RNA, 19 nt, Artificial Sequence
  Description of Artificial Sequence: Synthetic oligonucleotide
  Antisense strand to SEQ ID NO: 1952314
aacacuauaugugacagca

SEQ ID NO: 1952316 - RNA, 19 nt, Artificial Sequence
  Description of Artificial Sequence: Synthetic oligonucleotide
  Sense strand starting at position 2219 of SEQ ID NO: 1880238
cauauaguguugucagaga

SEQ ID NO: 1952317 - RNA, 19 nt, Artificial Sequence
  Description of Artificial Sequence: Synthetic oligonucleotide
  Antisense strand to SEQ ID NO: 1952316
ucucugacaacacuauaug

SEQ ID NO: 1952318 - RNA, 19 nt, Artificial Sequence
  Description of Artificial Sequence: Synthetic oligonucleotide
  Sense strand starting at position 2224 of SEQ ID NO: 1880238
aguguugucagagaaggcu

SEQ ID NO: 1952319 - RNA, 19 nt, Artificial Sequence
  Description of Artificial Sequence: Synthetic oligonucleotide
  Antisense strand to SEQ ID NO: 1952318
agccuucucugacaacacu

SEQ ID NO: 1952320 - RNA, 19 nt, Artificial Sequence
  Description of Artificial Sequence: Synthetic oligonucleotide
  Sense strand starting at position 2233 of SEQ ID NO: 1880238
agagaaggcuucucucuua

SEQ ID NO: 1952321 - RNA, 19 nt, Artificial Sequence
  Description of Artificial Sequence: Synthetic oligonucleotide
  Antisense strand to SEQ ID NO: 1952320
uaagagagaagccuucucu

SEQ ID NO: 1952322 - RNA, 19 nt, Artificial Sequence
  Description of Artificial Sequence: Synthetic oligonucleotide
  Sense strand starting at position 2248 of SEQ ID NO: 1880238
cuuauuaagugacauuuga

SEQ ID NO: 1952323 - RNA, 19 nt, Artificial Sequence
  Description of Artificial Sequence: Synthetic oligonucleotide
  Antisense strand to SEQ ID NO: 1952322
ucaaaugucacuuaauaag

SEQ ID NO: 1952324 - RNA, 19 nt, Artificial Sequence
  Description of Artificial Sequence: Synthetic oligonucleotide
  Sense strand starting at position 2283 of SEQ ID NO: 1880238
aggugucugauggaacauu

SEQ ID NO: 1952325 - RNA, 19 nt, Artificial Sequence
  Description of Artificial Sequence: Synthetic oligonucleotide
  Antisense strand to SEQ ID NO: 1952324
aauguuccaucagacaccu

SEQ ID NO: 1952326 - RNA, 19 nt, Artificial Sequence
  Description of Artificial Sequence: Synthetic oligonucleotide
  Sense strand starting at position 2340 of SEQ ID NO: 1880238
ggguuauguuugguauguu

SEQ ID NO: 1952327 - RNA, 19 nt, Artificial Sequence
  Description of Artificial Sequence: Synthetic oligonucleotide
  Antisense strand to SEQ ID NO: 1952326
aacauaccaaacauaaccc

SEQ ID NO: 1952328 - RNA, 19 nt, Artificial Sequence
  Description of Artificial Sequence: Synthetic oligonucleotide
  Sense strand starting at position 2343 of SEQ ID NO: 1880238
uuauguuugguauguuuga

SEQ ID NO: 1952329 - RNA, 19 nt, Artificial Sequence
  Description of Artificial Sequence: Synthetic oligonucleotide
  Antisense strand to SEQ ID NO: 1952328
ucaaacauaccaaacauaa

SEQ ID NO: 1952330 - RNA, 19 nt, Artificial Sequence
  Description of Artificial Sequence: Synthetic oligonucleotide
  Sense strand starting at position 2514 of SEQ ID NO: 1880238
guagaagggcaaugugaug

SEQ ID NO: 1952331 - RNA, 19 nt, Artificial Sequence
  Description of Artificial Sequence: Synthetic oligonucleotide
  Antisense strand to SEQ ID NO: 1952330
caucacauugcccuucuac

SEQ ID NO: 1952332 - RNA, 19 nt, Artificial Sequence
  Description of Artificial Sequence: Synthetic oligonucleotide
  Sense strand starting at position 2526 of SEQ ID NO: 1880238
ugugauguggcucacucuu

SEQ ID NO: 1952333 - RNA, 19 nt, Artificial Sequence
  Description of Artificial Sequence: Synthetic oligonucleotide
  Antisense strand to SEQ ID NO: 1952332
aagagugagccacaucaca

SEQ ID NO: 1952334 - RNA, 19 nt, Artificial Sequence
  Description of Artificial Sequence: Synthetic oligonucleotide
  Sense strand starting at position 2551 of SEQ ID NO: 1880238
gugacaagccuagauugua

SEQ ID NO: 1952335 - RNA, 19 nt, Artificial Sequence
  Description of Artificial Sequence: Synthetic oligonucleotide
  Antisense strand to SEQ ID NO: 1952334
uacaaucuaggcuugucac

SEQ ID NO: 1952336 - RNA, 19 nt, Artificial Sequence
  Description of Artificial Sequence: Synthetic oligonucleotide
  Sense strand starting at position 2667 of SEQ ID NO: 1880238
gugagaagugucugaauuc

SEQ ID NO: 1952337 - RNA, 19 nt, Artificial Sequence
  Description of Artificial Sequence: Synthetic oligonucleotide
  Antisense strand to SEQ ID NO: 1952336
gaauucagacacuucucac

SEQ ID NO: 1952338 - RNA, 19 nt, Artificial Sequence
  Description of Artificial Sequence: Synthetic oligonucleotide
  Sense strand starting at position 2698 of SEQ ID NO: 1880238
guagguaggagcugacaau

SEQ ID NO: 1952339 - RNA, 19 nt, Artificial Sequence
  Description of Artificial Sequence: Synthetic oligonucleotide
  Antisense strand to SEQ ID NO: 1952338
auugucagcuccuaccuac

SEQ ID NO: 1952340 - RNA, 19 nt, Artificial Sequence
  Description of Artificial Sequence: Synthetic oligonucleotide
  Sense strand starting at position 2711 of SEQ ID NO: 1880238
gacaauauuugccgauaug

SEQ ID NO: 1952341 - RNA, 19 nt, Artificial Sequence
  Description of Artificial Sequence: Synthetic oligonucleotide
  Antisense strand to SEQ ID NO: 1952340
cauaucggcaaauauuguc

SEQ ID NO: 1952342 - RNA, 19 nt, Artificial Sequence
  Description of Artificial Sequence: Synthetic oligonucleotide
  Sense strand starting at position 2721 of SEQ ID NO: 1880238
gccgauaugggaugugaga

SEQ ID NO: 1952343 - RNA, 19 nt, Artificial Sequence
  Description of Artificial Sequence: Synthetic oligonucleotide
  Antisense strand to SEQ ID NO: 1952342
ucucacaucccauaucggc

SEQ ID NO: 1952344 - RNA, 19 nt, Artificial Sequence
  Description of Artificial Sequence: Synthetic oligonucleotide
  Sense strand starting at position 2723 of SEQ ID NO: 1880238
cgauaugggaugugagaaa

SEQ ID NO: 1952345 - RNA, 19 nt, Artificial Sequence
  Description of Artificial Sequence: Synthetic oligonucleotide
  Antisense strand to SEQ ID NO: 1952344
uuucucacaucccauaucg

SEQ ID NO: 1952346 - RNA, 19 nt, Artificial Sequence
  Description of Artificial Sequence: Synthetic oligonucleotide
  Sense strand starting at position 2806 of SEQ ID NO: 1880238
guagcuaugaacugagaug

SEQ ID NO: 1952347 - RNA, 19 nt, Artificial Sequence
  Description of Artificial Sequence: Synthetic oligonucleotide
  Antisense strand to SEQ ID NO: 1952346
caucucaguucauagcuac

SEQ ID NO: 1952348 - RNA, 19 nt, Artificial Sequence
  Description of Artificial Sequence: Synthetic oligonucleotide
  Sense strand starting at position 2952 of SEQ ID NO: 1880238
gaauuaggagucugaaguu

SEQ ID NO: 1952349 - RNA, 19 nt, Artificial Sequence
  Description of Artificial Sequence: Synthetic oligonucleotide
  Antisense strand to SEQ ID NO: 1952348
aacuucagacuccuaauuc

SEQ ID NO: 1952350 - RNA, 19 nt, Artificial Sequence
  Description of Artificial Sequence: Synthetic oligonucleotide
  Sense strand starting at position 3003 of SEQ ID NO: 1880238
gggagcccugaguauauga

SEQ ID NO: 1952351 - RNA, 19 nt, Artificial Sequence
  Description of Artificial Sequence: Synthetic oligonucleotide
  Antisense strand to SEQ ID NO: 1952350
ucauauacucagggcuccc

SEQ ID NO: 1952352 - RNA, 19 nt, Artificial Sequence
  Description of Artificial Sequence: Synthetic oligonucleotide
  Sense strand starting at position 3008 of SEQ ID NO: 1880238
cccugaguauaugaugaua

SEQ ID NO: 1952353 - RNA, 19 nt, Artificial Sequence
  Description of Artificial Sequence: Synthetic oligonucleotide
  Antisense strand to SEQ ID NO: 1952352
uaucaucauauacucaggg

SEQ ID NO: 1952354 - RNA, 19 nt, Artificial Sequence
  Description of Artificial Sequence: Synthetic oligonucleotide
  Sense strand starting at position 3099 of SEQ ID NO: 1880238
aaguuuggagcucacuaaa

SEQ ID NO: 1952355 - RNA, 19 nt, Artificial Sequence
  Description of Artificial Sequence: Synthetic oligonucleotide
  Antisense strand to SEQ ID NO: 1952354
uuuagugagcuccaaacuu

SEQ ID NO: 1952356 - RNA, 19 nt, Artificial Sequence
  Description of Artificial Sequence: Synthetic oligonucleotide
  Sense strand starting at position 3280 of SEQ ID NO: 1880238
ccagaugacuugucuaagg

SEQ ID NO: 1952357 - RNA, 19 nt, Artificial Sequence
  Description of Artificial Sequence: Synthetic oligonucleotide
  Antisense strand to SEQ ID NO: 1952356
ccuuagacaagucaucugg

SEQ ID NO: 1952358 - RNA, 19 nt, Artificial Sequence
  Description of Artificial Sequence: Synthetic oligonucleotide
  Sense strand starting at position 3346 of SEQ ID NO: 1880238
auuccuaaugcagaguuau

SEQ ID NO: 1952359 - RNA, 19 nt, Artificial Sequence
  Description of Artificial Sequence: Synthetic oligonucleotide
  Antisense strand to SEQ ID NO: 1952358
auaacucugcauuaggaau

SEQ ID NO: 1952360 - RNA, 19 nt, Artificial Sequence
  Description of Artificial Sequence: Synthetic oligonucleotide
  Sense strand starting at position 3435 of SEQ ID NO: 1880238
acuguaaguuugcccuaga

SEQ ID NO: 1952361 - RNA, 19 nt, Artificial Sequence
  Description of Artificial Sequence: Synthetic oligonucleotide
  Antisense strand to SEQ ID NO: 1952360
ucuagggcaaacuuacagu

SEQ ID NO: 1952362 - RNA, 19 nt, Artificial Sequence
  Description of Artificial Sequence: Synthetic oligonucleotide
  Sense strand starting at position 3436 of SEQ ID NO: 1880238
cuguaaguuugcccuagag

SEQ ID NO: 1952363 - RNA, 19 nt, Artificial Sequence
  Description of Artificial Sequence: Synthetic oligonucleotide
  Antisense strand to SEQ ID NO: 1952362
cucuagggcaaacuuacag

SEQ ID NO: 1952364 - RNA, 19 nt, Artificial Sequence
  Description of Artificial Sequence: Synthetic oligonucleotide
  Sense strand starting at position 3438 of SEQ ID NO: 1880238
guaaguuugcccuagagca

SEQ ID NO: 1952365 - RNA, 19 nt, Artificial Sequence
  Description of Artificial Sequence: Synthetic oligonucleotide
  Antisense strand to SEQ ID NO: 1952364
ugcucuagggcaaacuuac

SEQ ID NO: 1952366 - RNA, 19 nt, Artificial Sequence
  Description of Artificial Sequence: Synthetic oligonucleotide
  Sense strand starting at position 3533 of SEQ ID NO: 1880238
uacagaguccugugggaaa

SEQ ID NO: 1952367 - RNA, 19 nt, Artificial Sequence
  Description of Artificial Sequence: Synthetic oligonucleotide
  Antisense strand to SEQ ID NO: 1952366
uuucccacaggacucugua

SEQ ID NO: 1952368 - RNA, 19 nt, Artificial Sequence
  Description of Artificial Sequence: Synthetic oligonucleotide
  Sense strand starting at position 3735 of SEQ ID NO: 1880238
acucuacugccagaauugu

SEQ ID NO: 1952369 - RNA, 19 nt, Artificial Sequence
  Description of Artificial Sequence: Synthetic oligonucleotide
  Antisense strand to SEQ ID NO: 1952368
acaauucuggcaguagagu

SEQ ID NO: 1952370 - RNA, 19 nt, Artificial Sequence
  Description of Artificial Sequence: Synthetic oligonucleotide
  Sense strand starting at position 3744 of SEQ ID NO: 1880238
ccagaauugugaggagaga

SEQ ID NO: 1952371 - RNA, 19 nt, Artificial Sequence
  Description of Artificial Sequence: Synthetic oligonucleotide
  Antisense strand to SEQ ID NO: 1952370
ucucuccucacaauucugg

SEQ ID NO: 1952372 - RNA, 19 nt, Artificial Sequence
  Description of Artificial Sequence: Synthetic oligonucleotide
  Sense strand starting at position 3941 of SEQ ID NO: 1880238
uuguguuaaagcuauuagu

SEQ ID NO: 1952373 - RNA, 19 nt, Artificial Sequence
  Description of Artificial Sequence: Synthetic oligonucleotide
  Antisense strand to SEQ ID NO: 1952372
acuaauagcuuuaacacaa

SEQ ID NO: 1952374 - RNA, 19 nt, Artificial Sequence
  Description of Artificial Sequence: Synthetic oligonucleotide
  Sense strand starting at position 3947 of SEQ ID NO: 1880238
uaaagcuauuaguugguua

SEQ ID NO: 1952375 - RNA, 19 nt, Artificial Sequence
  Description of Artificial Sequence: Synthetic oligonucleotide
  Antisense strand to SEQ ID NO: 1952374
uaaccaacuaauagcuuua

SEQ ID NO: 1952376 - RNA, 19 nt, Artificial Sequence
  Description of Artificial Sequence: Synthetic oligonucleotide
  Sense strand starting at position 3949 of SEQ ID NO: 1880238
aagcuauuaguugguuaga

SEQ ID NO: 1952377 - RNA, 19 nt, Artificial Sequence
  Description of Artificial Sequence: Synthetic oligonucleotide
  Antisense strand to SEQ ID NO: 1952376
ucuaaccaacuaauagcuu

SEQ ID NO: 1952378 - RNA, 19 nt, Artificial Sequence
  Description of Artificial Sequence: Synthetic oligonucleotide
  Sense strand starting at position 3950 of SEQ ID NO: 1880238
agcuauuaguugguuagau

SEQ ID NO: 1952379 - RNA, 19 nt, Artificial Sequence
  Description of Artificial Sequence: Synthetic oligonucleotide
  Antisense strand to SEQ ID NO: 1952378
aucuaaccaacuaauagcu

SEQ ID NO: 1952380 - RNA, 19 nt, Artificial Sequence
  Description of Artificial Sequence: Synthetic oligonucleotide
  Sense strand starting at position 3951 of SEQ ID NO: 1880238
gcuauuaguugguuagaug

SEQ ID NO: 1952381 - RNA, 19 nt, Artificial Sequence
  Description of Artificial Sequence: Synthetic oligonucleotide
  Antisense strand to SEQ ID NO: 1952380
caucuaaccaacuaauagc

SEQ ID NO: 1952382 - RNA, 19 nt, Artificial Sequence
  Description of Artificial Sequence: Synthetic oligonucleotide
  Sense strand starting at position 3952 of SEQ ID NO: 1880238
cuauuaguugguuagaugu

SEQ ID NO: 1952383 - RNA, 19 nt, Artificial Sequence
  Description of Artificial Sequence: Synthetic oligonucleotide
  Antisense strand to SEQ ID NO: 1952382
acaucuaaccaacuaauag

SEQ ID NO: 1952384 - RNA, 19 nt, Artificial Sequence
  Description of Artificial Sequence: Synthetic oligonucleotide
  Sense strand starting at position 3958 of SEQ ID NO: 1880238
guugguuagauguaaacac

SEQ ID NO: 1952385 - RNA, 19 nt, Artificial Sequence
  Description of Artificial Sequence: Synthetic oligonucleotide
  Antisense strand to SEQ ID NO: 1952384
guguuuacaucuaaccaac

SEQ ID NO: 1952386 - RNA, 19 nt, Artificial Sequence
  Description of Artificial Sequence: Synthetic oligonucleotide
  Sense strand starting at position 37 of SEQ ID NO: 1880240
ucccgacucagcgugaguu

SEQ ID NO: 1952387 - RNA, 19 nt, Artificial Sequence
  Description of Artificial Sequence: Synthetic oligonucleotide
  Antisense strand to SEQ ID NO: 1952386
aacucacgcugagucggga

SEQ ID NO: 1952388 - RNA, 19 nt, Artificial Sequence
  Description of Artificial Sequence: Synthetic oligonucleotide
  Sense strand starting at position 47 of SEQ ID NO: 1880240
gcgugaguucucuccgcag

SEQ ID NO: 1952389 - RNA, 19 nt, Artificial Sequence
  Description of Artificial Sequence: Synthetic oligonucleotide
  Antisense strand to SEQ ID NO: 1952388
cugcggagagaacucacgc

SEQ ID NO: 1952390 - RNA, 19 nt, Artificial Sequence
  Description of Artificial Sequence: Synthetic oligonucleotide
  Sense strand starting at position 63 of SEQ ID NO: 1880240
cagagcuuauugcuacuga

SEQ ID NO: 1952391 - RNA, 19 nt, Artificial Sequence
  Description of Artificial Sequence: Synthetic oligonucleotide
  Antisense strand to SEQ ID NO: 1952390
ucaguagcaauaagcucug

SEQ ID NO: 1952392 - RNA, 19 nt, Artificial Sequence
  Description of Artificial Sequence: Synthetic oligonucleotide
  Sense strand starting at position 73 of SEQ ID NO: 1880240
ugcuacugauguguugaga

SEQ ID NO: 1952393 - RNA, 19 nt, Artificial Sequence
  Description of Artificial Sequence: Synthetic oligonucleotide
  Antisense strand to SEQ ID NO: 1952392
ucucaacacaucaguagca

SEQ ID NO: 1952394 - RNA, 19 nt, Artificial Sequence
  Description of Artificial Sequence: Synthetic oligonucleotide
  Sense strand starting at position 76 of SEQ ID NO: 1880240
uacugauguguugagaucu

SEQ ID NO: 1952395 - RNA, 19 nt, Artificial Sequence
  Description of Artificial Sequence: Synthetic oligonucleotide
  Antisense strand to SEQ ID NO: 1952394
agaucucaacacaucagua

SEQ ID NO: 1952396 - RNA, 19 nt, Artificial Sequence
  Description of Artificial Sequence: Synthetic oligonucleotide
  Sense strand starting at position 82 of SEQ ID NO: 1880240
uguguugagaucuacgcau

SEQ ID NO: 1952397 - RNA, 19 nt, Artificial Sequence
  Description of Artificial Sequence: Synthetic oligonucleotide
  Antisense strand to SEQ ID NO: 1952396
augcguagaucucaacaca

SEQ ID NO: 1952398 - RNA, 19 nt, Artificial Sequence
  Description of Artificial Sequence: Synthetic oligonucleotide
  Sense strand starting at position 190 of SEQ ID NO: 1880240
acagcagguguucagugaa

SEQ ID NO: 1952399 - RNA, 19 nt, Artificial Sequence
  Description of Artificial Sequence: Synthetic oligonucleotide
  Antisense strand to SEQ ID NO: 1952398
uucacugaacaccugcugu

SEQ ID NO: 1952400 - RNA, 19 nt, Artificial Sequence
  Description of Artificial Sequence: Synthetic oligonucleotide
  Sense strand starting at position 308 of SEQ ID NO: 1880240
aggcuugcuccacaucaca

SEQ ID NO: 1952401 - RNA, 19 nt, Artificial Sequence
  Description of Artificial Sequence: Synthetic oligonucleotide
  Antisense strand to SEQ ID NO: 1952400
ugugauguggagcaagccu

SEQ ID NO: 1952402 - RNA, 19 nt, Artificial Sequence
  Description of Artificial Sequence: Synthetic oligonucleotide
  Sense strand starting at position 542 of SEQ ID NO: 1880240
cugguaucuuuacuuggaa

SEQ ID NO: 1952403 - RNA, 19 nt, Artificial Sequence
  Description of Artificial Sequence: Synthetic oligonucleotide
  Antisense strand to SEQ ID NO: 1952402
uuccaaguaaagauaccag

SEQ ID NO: 1952404 - RNA, 19 nt, Artificial Sequence
  Description of Artificial Sequence: Synthetic oligonucleotide
  Sense strand starting at position 543 of SEQ ID NO: 1880240
ugguaucuuuacuuggaaa

SEQ ID NO: 1952405 - RNA, 19 nt, Artificial Sequence
  Description of Artificial Sequence: Synthetic oligonucleotide
  Antisense strand to SEQ ID NO: 1952404
uuuccaaguaaagauacca

SEQ ID NO: 1952406 - RNA, 19 nt, Artificial Sequence
  Description of Artificial Sequence: Synthetic oligonucleotide
  Sense strand starting at position 544 of SEQ ID NO: 1880240
gguaucuuuacuuggaaag

SEQ ID NO: 1952407 - RNA, 19 nt, Artificial Sequence
  Description of Artificial Sequence: Synthetic oligonucleotide
  Antisense strand to SEQ ID NO: 1952406
cuuuccaaguaaagauacc

SEQ ID NO: 1952408 - RNA, 19 nt, Artificial Sequence
  Description of Artificial Sequence: Synthetic oligonucleotide
  Sense strand starting at position 868 of SEQ ID NO: 1880240
ccacaaucaucucagagga

SEQ ID NO: 1952409 - RNA, 19 nt, Artificial Sequence
  Description of Artificial Sequence: Synthetic oligonucleotide
  Antisense strand to SEQ ID NO: 1952408
uccucugagaugauugugg

SEQ ID NO: 1952410 - RNA, 19 nt, Artificial Sequence
  Description of Artificial Sequence: Synthetic oligonucleotide
  Sense strand starting at position 870 of SEQ ID NO: 1880240
acaaucaucucagaggauc

SEQ ID NO: 1952411 - RNA, 19 nt, Artificial Sequence
  Description of Artificial Sequence: Synthetic oligonucleotide
  Antisense strand to SEQ ID NO: 1952410
gauccucugagaugauugu

SEQ ID NO: 1952412 - RNA, 19 nt, Artificial Sequence
  Description of Artificial Sequence: Synthetic oligonucleotide
  Sense strand starting at position 905 of SEQ ID NO: 1880240
ccuacagaccaguauguau

SEQ ID NO: 1952413 - RNA, 19 nt, Artificial Sequence
  Description of Artificial Sequence: Synthetic oligonucleotide
  Antisense strand to SEQ ID NO: 1952412
auacauacuggucuguagg

SEQ ID NO: 1952414 - RNA, 19 nt, Artificial Sequence
  Description of Artificial Sequence: Synthetic oligonucleotide
  Sense strand starting at position 918 of SEQ ID NO: 1880240
auguaucuggcuugugaua

SEQ ID NO: 1952415 - RNA, 19 nt, Artificial Sequence
  Description of Artificial Sequence: Synthetic oligonucleotide
  Antisense strand to SEQ ID NO: 1952414
uaucacaagccagauacau

SEQ ID NO: 1952416 - RNA, 19 nt, Artificial Sequence
  Description of Artificial Sequence: Synthetic oligonucleotide
  Sense strand starting at position 988 of SEQ ID NO: 1880240
aggguuuacucccuaagua

SEQ ID NO: 1952417 - RNA, 19 nt, Artificial Sequence
  Description of Artificial Sequence: Synthetic oligonucleotide
  Antisense strand to SEQ ID NO: 1952416
uacuuagggaguaaacccu

SEQ ID NO: 1952418 - RNA, 19 nt, Artificial Sequence
  Description of Artificial Sequence: Synthetic oligonucleotide
  Sense strand starting at position 989 of SEQ ID NO: 1880240
ggguuuacucccuaaguag

SEQ ID NO: 1952419 - RNA, 19 nt, Artificial Sequence
  Description of Artificial Sequence: Synthetic oligonucleotide
  Antisense strand to SEQ ID NO: 1952418
cuacuuagggaguaaaccc

SEQ ID NO: 1952420 - RNA, 19 nt, Artificial Sequence
  Description of Artificial Sequence: Synthetic oligonucleotide
  Sense strand starting at position 1025 of SEQ ID NO: 1880240
cccguaaacguagugucau

SEQ ID NO: 1952421 - RNA, 19 nt, Artificial Sequence
  Description of Artificial Sequence: Synthetic oligonucleotide
  Antisense strand to SEQ ID NO: 1952420
augacacuacguuuacggg

SEQ ID NO: 1952422 - RNA, 19 nt, Artificial Sequence
  Description of Artificial Sequence: Synthetic oligonucleotide
  Sense strand starting at position 1134 of SEQ ID NO: 1880240
agcguuggcacugacauuu

SEQ ID NO: 1952423 - RNA, 19 nt, Artificial Sequence
  Description of Artificial Sequence: Synthetic oligonucleotide
  Antisense strand to SEQ ID NO: 1952422
aaaugucagugccaacgcu

SEQ ID NO: 1952424 - RNA, 19 nt, Artificial Sequence
  Description of Artificial Sequence: Synthetic oligonucleotide
  Sense strand starting at position 1282 of SEQ ID NO: 1880240
cagagucacugugcucaau

SEQ ID NO: 1952425 - RNA, 19 nt, Artificial Sequence
  Description of Artificial Sequence: Synthetic oligonucleotide
  Antisense strand to SEQ ID NO: 1952424
auugagcacagugacucug

SEQ ID NO: 1952426 - RNA, 19 nt, Artificial Sequence
  Description of Artificial Sequence: Synthetic oligonucleotide
  Sense strand starting at position 1284 of SEQ ID NO: 1880240
gagucacugugcucaauca

SEQ ID NO: 1952427 - RNA, 19 nt, Artificial Sequence
  Description of Artificial Sequence: Synthetic oligonucleotide
  Antisense strand to SEQ ID NO: 1952426
ugauugagcacagugacuc

SEQ ID NO: 1952428 - RNA, 19 nt, Artificial Sequence
  Description of Artificial Sequence: Synthetic oligonucleotide
  Sense strand starting at position 1504 of SEQ ID NO: 1880240
cugguugucccacaggaga

SEQ ID NO: 1952429 - RNA, 19 nt, Artificial Sequence
  Description of Artificial Sequence: Synthetic oligonucleotide
  Antisense strand to SEQ ID NO: 1952428
ucuccugugggacaaccag

SEQ ID NO: 1952430 - RNA, 19 nt, Artificial Sequence
  Description of Artificial Sequence: Synthetic oligonucleotide
  Sense strand starting at position 1970 of SEQ ID NO: 1880240
cgguuuaaagccugugaga

SEQ ID NO: 1952431 - RNA, 19 nt, Artificial Sequence
  Description of Artificial Sequence: Synthetic oligonucleotide
  Antisense strand to SEQ ID NO: 1952430
ucucacaggcuuuaaaccg

SEQ ID NO: 1952432 - RNA, 19 nt, Artificial Sequence
  Description of Artificial Sequence: Synthetic oligonucleotide
  Sense strand starting at position 1972 of SEQ ID NO: 1880240
guuuaaagccugugagauc

SEQ ID NO: 1952433 - RNA, 19 nt, Artificial Sequence
  Description of Artificial Sequence: Synthetic oligonucleotide
  Antisense strand to SEQ ID NO: 1952432
gaucucacaggcuuuaaac

SEQ ID NO: 1952434 - RNA, 19 nt, Artificial Sequence
  Description of Artificial Sequence: Synthetic oligonucleotide
  Sense strand starting at position 2333 of SEQ ID NO: 1880240
aaaucuuaggcuuguuagu

SEQ ID NO: 1952435 - RNA, 19 nt, Artificial Sequence
  Description of Artificial Sequence: Synthetic oligonucleotide
  Antisense strand to SEQ ID NO: 1952434
acuaacaagccuaagauuu

SEQ ID NO: 1952436 - RNA, 19 nt, Artificial Sequence
  Description of Artificial Sequence: Synthetic oligonucleotide
  Sense strand starting at position 2350 of SEQ ID NO: 1880240
guguuugacuuuccacuca

SEQ ID NO: 1952437 - RNA, 19 nt, Artificial Sequence
  Description of Artificial Sequence: Synthetic oligonucleotide
  Antisense strand to SEQ ID NO: 1952436
ugaguggaaagucaaacac

SEQ ID NO: 1952438 - RNA, 19 nt, Artificial Sequence
  Description of Artificial Sequence: Synthetic oligonucleotide
  Sense strand starting at position 2720 of SEQ ID NO: 1880240
cuccuuguucugggaaaug

SEQ ID NO: 1952439 - RNA, 19 nt, Artificial Sequence
  Description of Artificial Sequence: Synthetic oligonucleotide
  Antisense strand to SEQ ID NO: 1952438
cauuucccagaacaaggag

SEQ ID NO: 1952440 - RNA, 19 nt, Artificial Sequence
  Description of Artificial Sequence: Synthetic oligonucleotide
  Sense strand starting at position 2813 of SEQ ID NO: 1880240
ccucgcuucccagauacau

SEQ ID NO: 1952441 - RNA, 19 nt, Artificial Sequence
  Description of Artificial Sequence: Synthetic oligonucleotide
  Antisense strand to SEQ ID NO: 1952440
auguaucugggaagcgagg

SEQ ID NO: 1952442 - RNA, 19 nt, Artificial Sequence
  Description of Artificial Sequence: Synthetic oligonucleotide
  Sense strand starting at position 3705 of SEQ ID NO: 1880240
cuuuauuaugcugaaacag

SEQ ID NO: 1952443 - RNA, 19 nt, Artificial Sequence
  Description of Artificial Sequence: Synthetic oligonucleotide
  Antisense strand to SEQ ID NO: 1952442
cuguuucagcauaauaaag

SEQ ID NO: 1952444 - RNA, 19 nt, Artificial Sequence
  Description of Artificial Sequence: Synthetic oligonucleotide
  Sense strand starting at position 3773 of SEQ ID NO: 1880240
agccacuggucugcauuua

SEQ ID NO: 1952445 - RNA, 19 nt, Artificial Sequence
  Description of Artificial Sequence: Synthetic oligonucleotide
  Antisense strand to SEQ ID NO: 1952444
uaaaugcagaccaguggcu

SEQ ID NO: 1952446 - RNA, 19 nt, Artificial Sequence
  Description of Artificial Sequence: Synthetic oligonucleotide
  Sense strand starting at position 3862 of SEQ ID NO: 1880240
aagcuuugauuuguuugua

SEQ ID NO: 1952447 - RNA, 19 nt, Artificial Sequence
  Description of Artificial Sequence: Synthetic oligonucleotide
  Antisense strand to SEQ ID NO: 1952446
uacaaacaaaucaaagcuu

SEQ ID NO: 1952448 - RNA, 19 nt, Artificial Sequence
  Description of Artificial Sequence: Synthetic oligonucleotide
  Sense strand starting at position 3863 of SEQ ID NO: 1880240
agcuuugauuuguuuguau

SEQ ID NO: 1952449 - RNA, 19 nt, Artificial Sequence
  Description of Artificial Sequence: Synthetic oligonucleotide
  Antisense strand to SEQ ID NO: 1952448
auacaaacaaaucaaagcu

SEQ ID NO: 1952450 - RNA, 19 nt, Artificial Sequence
  Description of Artificial Sequence: Synthetic oligonucleotide
  Sense strand starting at position 3874 of SEQ ID NO: 1880240
guuuguauagauugaaugu

SEQ ID NO: 1952451 - RNA, 19 nt, Artificial Sequence
  Description of Artificial Sequence: Synthetic oligonucleotide
  Antisense strand to SEQ ID NO: 1952450
acauucaaucuauacaaac

SEQ ID NO: 1952452 - RNA, 19 nt, Artificial Sequence
  Description of Artificial Sequence: Synthetic oligonucleotide
  Sense strand starting at position 3883 of SEQ ID NO: 1880240
gauugaaugucggucccaa

SEQ ID NO: 1952453 - RNA, 19 nt, Artificial Sequence
  Description of Artificial Sequence: Synthetic oligonucleotide
  Antisense strand to SEQ ID NO: 1952452
uugggaccgacauucaauc

SEQ ID NO: 1952454 - RNA, 19 nt, Artificial Sequence
  Description of Artificial Sequence: Synthetic oligonucleotide
  Sense strand starting at position 3922 of SEQ ID NO: 1880240
uuggcuucgcuaucgauca

SEQ ID NO: 1952455 - RNA, 19 nt, Artificial Sequence
  Description of Artificial Sequence: Synthetic oligonucleotide
  Antisense strand to SEQ ID NO: 1952454
ugaucgauagcgaagccaa

SEQ ID NO: 1952456 - RNA, 19 nt, Artificial Sequence
  Description of Artificial Sequence: Synthetic oligonucleotide
  Sense strand starting at position 3924 of SEQ ID NO: 1880240
ggcuucgcuaucgaucaaa

SEQ ID NO: 1952457 - RNA, 19 nt, Artificial Sequence
  Description of Artificial Sequence: Synthetic oligonucleotide
  Antisense strand to SEQ ID NO: 1952456
uuugaucgauagcgaagcc

SEQ ID NO: 1952458 - RNA, 19 nt, Artificial Sequence
  Description of Artificial Sequence: Synthetic oligonucleotide
  Sense strand starting at position 3934 of SEQ ID NO: 1880240
ucgaucaaauugucaccau

SEQ ID NO: 1952459 - RNA, 19 nt, Artificial Sequence
  Description of Artificial Sequence: Synthetic oligonucleotide
  Antisense strand to SEQ ID NO: 1952458
auggugacaauuugaucga

SEQ ID NO: 1952460 - RNA, 19 nt, Artificial Sequence
  Description of Artificial Sequence: Synthetic oligonucleotide
  Sense strand starting at position 3937 of SEQ ID NO: 1880240
aucaaauugucaccaugag

SEQ ID NO: 1952461 - RNA, 19 nt, Artificial Sequence
  Description of Artificial Sequence: Synthetic oligonucleotide
  Antisense strand to SEQ ID NO: 1952460
cucauggugacaauuugau

SEQ ID NO: 1952462 - RNA, 19 nt, Artificial Sequence
  Description of Artificial Sequence: Synthetic oligonucleotide
  Sense strand starting at position 3938 of SEQ ID NO: 1880240
ucaaauugucaccaugagu

SEQ ID NO: 1952463 - RNA, 19 nt, Artificial Sequence
  Description of Artificial Sequence: Synthetic oligonucleotide
  Antisense strand to SEQ ID NO: 1952462
acucauggugacaauuuga

SEQ ID NO: 1952464 - RNA, 19 nt, Artificial Sequence
  Description of Artificial Sequence: Synthetic oligonucleotide
  Sense strand starting at position 3949 of SEQ ID NO: 1880240
ccaugaguuucuguuaacu

SEQ ID NO: 1952465 - RNA, 19 nt, Artificial Sequence
  Description of Artificial Sequence: Synthetic oligonucleotide
  Antisense strand to SEQ ID NO: 1952464
aguuaacagaaacucaugg

SEQ ID NO: 1952466 - RNA, 19 nt, Artificial Sequence
  Description of Artificial Sequence: Synthetic oligonucleotide
  Sense strand starting at position 102 of SEQ ID NO: 1880239
guggacagcaaguauagau

SEQ ID NO: 1952467 - RNA, 19 nt, Artificial Sequence
  Description of Artificial Sequence: Synthetic oligonucleotide
  Antisense strand to SEQ ID NO: 1952466
aucuauacuugcuguccac

SEQ ID NO: 1952468 - RNA, 19 nt, Artificial Sequence
  Description of Artificial Sequence: Synthetic oligonucleotide
  Sense strand starting at position 334 of SEQ ID NO: 1880239
cccugagugugagcucaaa

SEQ ID NO: 1952469 - RNA, 19 nt, Artificial Sequence
  Description of Artificial Sequence: Synthetic oligonucleotide
  Antisense strand to SEQ ID NO: 1952468
uuugagcucacacucaggg

SEQ ID NO: 1952470 - RNA, 19 nt, Artificial Sequence
  Description of Artificial Sequence: Synthetic oligonucleotide
  Sense strand starting at position 492 of SEQ ID NO: 1880239
gacucaguguccucuuugu

SEQ ID NO: 1952471 - RNA, 19 nt, Artificial Sequence
  Description of Artificial Sequence: Synthetic oligonucleotide
  Antisense strand to SEQ ID NO: 1952470
acaaagaggacacugaguc

SEQ ID NO: 1952472 - RNA, 19 nt, Artificial Sequence
  Description of Artificial Sequence: Synthetic oligonucleotide
  Sense strand starting at position 639 of SEQ ID NO: 1880239
ucccgacucagcgugaguu

SEQ ID NO: 1952473 - RNA, 19 nt, Artificial Sequence
  Description of Artificial Sequence: Synthetic oligonucleotide
  Antisense strand to SEQ ID NO: 1952472
aacucacgcugagucggga

SEQ ID NO: 1952474 - RNA, 19 nt, Artificial Sequence
  Description of Artificial Sequence: Synthetic oligonucleotide
  Sense strand starting at position 649 of SEQ ID NO: 1880239
gcgugaguucucuccgcag

SEQ ID NO: 1952475 - RNA, 19 nt, Artificial Sequence
  Description of Artificial Sequence: Synthetic oligonucleotide
  Antisense strand to SEQ ID NO: 1952474
cugcggagagaacucacgc

SEQ ID NO: 1952476 - RNA, 19 nt, Artificial Sequence
  Description of Artificial Sequence: Synthetic oligonucleotide
  Sense strand starting at position 651 of SEQ ID NO: 1880239
gugaguucucuccgcagag

SEQ ID NO: 1952477 - RNA, 19 nt, Artificial Sequence
  Description of Artificial Sequence: Synthetic oligonucleotide
  Antisense strand to SEQ ID NO: 1952476
cucugcggagagaacucac

SEQ ID NO: 1952478 - RNA, 19 nt, Artificial Sequence
  Description of Artificial Sequence: Synthetic oligonucleotide
  Sense strand starting at position 653 of SEQ ID NO: 1880239
gaguucucuccgcagagcu

SEQ ID NO: 1952479 - RNA, 19 nt, Artificial Sequence
  Description of Artificial Sequence: Synthetic oligonucleotide
  Antisense strand to SEQ ID NO: 1952478
agcucugcggagagaacuc

SEQ ID NO: 1952480 - RNA, 19 nt, Artificial Sequence
  Description of Artificial Sequence: Synthetic oligonucleotide
  Sense strand starting at position 655 of SEQ ID NO: 1880239
guucucuccgcagagcuua

SEQ ID NO: 1952481 - RNA, 19 nt, Artificial Sequence
  Description of Artificial Sequence: Synthetic oligonucleotide
  Antisense strand to SEQ ID NO: 1952480
uaagcucugcggagagaac

SEQ ID NO: 1952482 - RNA, 19 nt, Artificial Sequence
  Description of Artificial Sequence: Synthetic oligonucleotide
  Sense strand starting at position 665 of SEQ ID NO: 1880239
cagagcuuauugcuacuga

SEQ ID NO: 1952483 - RNA, 19 nt, Artificial Sequence
  Description of Artificial Sequence: Synthetic oligonucleotide
  Antisense strand to SEQ ID NO: 1952482
ucaguagcaauaagcucug

SEQ ID NO: 1952484 - RNA, 19 nt, Artificial Sequence
  Description of Artificial Sequence: Synthetic oligonucleotide
  Sense strand starting at position 675 of SEQ ID NO: 1880239
ugcuacugauguguugaga

SEQ ID NO: 1952485 - RNA, 19 nt, Artificial Sequence
  Description of Artificial Sequence: Synthetic oligonucleotide
  Antisense strand to SEQ ID NO: 1952484
ucucaacacaucaguagca

SEQ ID NO: 1952486 - RNA, 19 nt, Artificial Sequence
  Description of Artificial Sequence: Synthetic oligonucleotide
  Sense strand starting at position 678 of SEQ ID NO: 1880239
uacugauguguugagaucu

SEQ ID NO: 1952487 - RNA, 19 nt, Artificial Sequence
  Description of Artificial Sequence: Synthetic oligonucleotide
  Antisense strand to SEQ ID NO: 1952486
agaucucaacacaucagua

SEQ ID NO: 1952488 - RNA, 19 nt, Artificial Sequence
  Description of Artificial Sequence: Synthetic oligonucleotide
  Sense strand starting at position 684 of SEQ ID NO: 1880239
uguguugagaucuacgcau

SEQ ID NO: 1952489 - RNA, 19 nt, Artificial Sequence
  Description of Artificial Sequence: Synthetic oligonucleotide
  Antisense strand to SEQ ID NO: 1952488
augcguagaucucaacaca

SEQ ID NO: 1952490 - RNA, 19 nt, Artificial Sequence
  Description of Artificial Sequence: Synthetic oligonucleotide
  Sense strand starting at position 686 of SEQ ID NO: 1880239
uguugagaucuacgcaucu

SEQ ID NO: 1952491 - RNA, 19 nt, Artificial Sequence
  Description of Artificial Sequence: Synthetic oligonucleotide
  Antisense strand to SEQ ID NO: 1952490
agaugcguagaucucaaca

SEQ ID NO: 1952492 - RNA, 19 nt, Artificial Sequence
  Description of Artificial Sequence: Synthetic oligonucleotide
  Sense strand starting at position 792 of SEQ ID NO: 1880239
acagcagguguucagugaa

SEQ ID NO: 1952493 - RNA, 19 nt, Artificial Sequence
  Description of Artificial Sequence: Synthetic oligonucleotide
  Antisense strand to SEQ ID NO: 1952492
uucacugaacaccugcugu

SEQ ID NO: 1952494 - RNA, 19 nt, Artificial Sequence
  Description of Artificial Sequence: Synthetic oligonucleotide
  Sense strand starting at position 795 of SEQ ID NO: 1880239
gcagguguucagugaaccu

SEQ ID NO: 1952495 - RNA, 19 nt, Artificial Sequence
  Description of Artificial Sequence: Synthetic oligonucleotide
  Antisense strand to SEQ ID NO: 1952494
agguucacugaacaccugc

SEQ ID NO: 1952496 - RNA, 19 nt, Artificial Sequence
  Description of Artificial Sequence: Synthetic oligonucleotide
  Sense strand starting at position 910 of SEQ ID NO: 1880239
aggcuugcuccacaucaca

SEQ ID NO: 1952497 - RNA, 19 nt, Artificial Sequence
  Description of Artificial Sequence: Synthetic oligonucleotide
  Antisense strand to SEQ ID NO: 1952496
ugugauguggagcaagccu

SEQ ID NO: 1952498 - RNA, 19 nt, Artificial Sequence
  Description of Artificial Sequence: Synthetic oligonucleotide
  Sense strand starting at position 1144 of SEQ ID NO: 1880239
cugguaucuuuacuuggaa

SEQ ID NO: 1952499 - RNA, 19 nt, Artificial Sequence
  Description of Artificial Sequence: Synthetic oligonucleotide
  Antisense strand to SEQ ID NO: 1952498
uuccaaguaaagauaccag

SEQ ID NO: 1952500 - RNA, 19 nt, Artificial Sequence
  Description of Artificial Sequence: Synthetic oligonucleotide
  Sense strand starting at position 1145 of SEQ ID NO: 1880239
ugguaucuuuacuuggaaa

SEQ ID NO: 1952501 - RNA, 19 nt, Artificial Sequence
  Description of Artificial Sequence: Synthetic oligonucleotide
  Antisense strand to SEQ ID NO: 1952500
uuuccaaguaaagauacca

SEQ ID NO: 1952502 - RNA, 19 nt, Artificial Sequence
  Description of Artificial Sequence: Synthetic oligonucleotide
  Sense strand starting at position 1146 of SEQ ID NO: 1880239
gguaucuuuacuuggaaag

SEQ ID NO: 1952503 - RNA, 19 nt, Artificial Sequence
  Description of Artificial Sequence: Synthetic oligonucleotide
  Antisense strand to SEQ ID NO: 1952502
cuuuccaaguaaagauacc

SEQ ID NO: 1952504 - RNA, 19 nt, Artificial Sequence
  Description of Artificial Sequence: Synthetic oligonucleotide
  Sense strand starting at position 1470 of SEQ ID NO: 1880239
ccacaaucaucucagagga

SEQ ID NO: 1952505 - RNA, 19 nt, Artificial Sequence
  Description of Artificial Sequence: Synthetic oligonucleotide
  Antisense strand to SEQ ID NO: 1952504
uccucugagaugauugugg

SEQ ID NO: 1952506 - RNA, 19 nt, Artificial Sequence
  Description of Artificial Sequence: Synthetic oligonucleotide
  Sense strand starting at position 1472 of SEQ ID NO: 1880239
acaaucaucucagaggauc

SEQ ID NO: 1952507 - RNA, 19 nt, Artificial Sequence
  Description of Artificial Sequence: Synthetic oligonucleotide
  Antisense strand to SEQ ID NO: 1952506
gauccucugagaugauugu

SEQ ID NO: 1952508 - RNA, 19 nt, Artificial Sequence
  Description of Artificial Sequence: Synthetic oligonucleotide
  Sense strand starting at position 1507 of SEQ ID NO: 1880239
ccuacagaccaguauguau

SEQ ID NO: 1952509 - RNA, 19 nt, Artificial Sequence
  Description of Artificial Sequence: Synthetic oligonucleotide
  Antisense strand to SEQ ID NO: 1952508
auacauacuggucuguagg

SEQ ID NO: 1952510 - RNA, 19 nt, Artificial Sequence
  Description of Artificial Sequence: Synthetic oligonucleotide
  Sense strand starting at position 1518 of SEQ ID NO: 1880239
guauguaucuggcuuguga

SEQ ID NO: 1952511 - RNA, 19 nt, Artificial Sequence
  Description of Artificial Sequence: Synthetic oligonucleotide
  Antisense strand to SEQ ID NO: 1952510
ucacaagccagauacauac

SEQ ID NO: 1952512 - RNA, 19 nt, Artificial Sequence
  Description of Artificial Sequence: Synthetic oligonucleotide
  Sense strand starting at position 1520 of SEQ ID NO: 1880239
auguaucuggcuugugaua

SEQ ID NO: 1952513 - RNA, 19 nt, Artificial Sequence
  Description of Artificial Sequence: Synthetic oligonucleotide
  Antisense strand to SEQ ID NO: 1952512
uaucacaagccagauacau

SEQ ID NO: 1952514 - RNA, 19 nt, Artificial Sequence
  Description of Artificial Sequence: Synthetic oligonucleotide
  Sense strand starting at position 1590 of SEQ ID NO: 1880239
aggguuuacucccuaagua

SEQ ID NO: 1952515 - RNA, 19 nt, Artificial Sequence
  Description of Artificial Sequence: Synthetic oligonucleotide
  Antisense strand to SEQ ID NO: 1952514
uacuuagggaguaaacccu

SEQ ID NO: 1952516 - RNA, 19 nt, Artificial Sequence
  Description of Artificial Sequence: Synthetic oligonucleotide
  Sense strand starting at position 1591 of SEQ ID NO: 1880239
ggguuuacucccuaaguag

SEQ ID NO: 1952517 - RNA, 19 nt, Artificial Sequence
  Description of Artificial Sequence: Synthetic oligonucleotide
  Antisense strand to SEQ ID NO: 1952516
cuacuuagggaguaaaccc

SEQ ID NO: 1952518 - RNA, 19 nt, Artificial Sequence
  Description of Artificial Sequence: Synthetic oligonucleotide
  Sense strand starting at position 1627 of SEQ ID NO: 1880239
cccguaaacguagugucau

SEQ ID NO: 1952519 - RNA, 19 nt, Artificial Sequence
  Description of Artificial Sequence: Synthetic oligonucleotide
  Antisense strand to SEQ ID NO: 1952518
augacacuacguuuacggg

SEQ ID NO: 1952520 - RNA, 19 nt, Artificial Sequence
  Description of Artificial Sequence: Synthetic oligonucleotide
  Sense strand starting at position 1736 of SEQ ID NO: 1880239
agcguuggcacugacauuu

SEQ ID NO: 1952521 - RNA, 19 nt, Artificial Sequence
  Description of Artificial Sequence: Synthetic oligonucleotide
  Antisense strand to SEQ ID NO: 1952520
aaaugucagugccaacgcu

SEQ ID NO: 1952522 - RNA, 19 nt, Artificial Sequence
  Description of Artificial Sequence: Synthetic oligonucleotide
  Sense strand starting at position 1884 of SEQ ID NO: 1880239
cagagucacugugcucaau

SEQ ID NO: 1952523 - RNA, 19 nt, Artificial Sequence
  Description of Artificial Sequence: Synthetic oligonucleotide
  Antisense strand to SEQ ID NO: 1952522
auugagcacagugacucug

SEQ ID NO: 1952524 - RNA, 19 nt, Artificial Sequence
  Description of Artificial Sequence: Synthetic oligonucleotide
  Sense strand starting at position 1886 of SEQ ID NO: 1880239
gagucacugugcucaauca

SEQ ID NO: 1952525 - RNA, 19 nt, Artificial Sequence
  Description of Artificial Sequence: Synthetic oligonucleotide
  Antisense strand to SEQ ID NO: 1952524
ugauugagcacagugacuc

SEQ ID NO: 1952526 - RNA, 19 nt, Artificial Sequence
  Description of Artificial Sequence: Synthetic oligonucleotide
  Sense strand starting at position 1933 of SEQ ID NO: 1880239
cgccgcguagucguguaaa

SEQ ID NO: 1952527 - RNA, 19 nt, Artificial Sequence
  Description of Artificial Sequence: Synthetic oligonucleotide
  Antisense strand to SEQ ID NO: 1952526
uuuacacgacuacgcggcg

SEQ ID NO: 1952528 - RNA, 19 nt, Artificial Sequence
  Description of Artificial Sequence: Synthetic oligonucleotide
  Sense strand starting at position 2106 of SEQ ID NO: 1880239
cugguugucccacaggaga

SEQ ID NO: 1952529 - RNA, 19 nt, Artificial Sequence
  Description of Artificial Sequence: Synthetic oligonucleotide
  Antisense strand to SEQ ID NO: 1952528
ucuccugugggacaaccag

SEQ ID NO: 1952530 - RNA, 19 nt, Artificial Sequence
  Description of Artificial Sequence: Synthetic oligonucleotide
  Sense strand starting at position 2572 of SEQ ID NO: 1880239
cgguuuaaagccugugaga

SEQ ID NO: 1952531 - RNA, 19 nt, Artificial Sequence
  Description of Artificial Sequence: Synthetic oligonucleotide
  Antisense strand to SEQ ID NO: 1952530
ucucacaggcuuuaaaccg

SEQ ID NO: 1952532 - RNA, 19 nt, Artificial Sequence
  Description of Artificial Sequence: Synthetic oligonucleotide
  Sense strand starting at position 2574 of SEQ ID NO: 1880239
guuuaaagccugugagauc

SEQ ID NO: 1952533 - RNA, 19 nt, Artificial Sequence
  Description of Artificial Sequence: Synthetic oligonucleotide
  Antisense strand to SEQ ID NO: 1952532
gaucucacaggcuuuaaac

SEQ ID NO: 1952534 - RNA, 19 nt, Artificial Sequence
  Description of Artificial Sequence: Synthetic oligonucleotide
  Sense strand starting at position 2935 of SEQ ID NO: 1880239
aaaucuuaggcuuguuagu

SEQ ID NO: 1952535 - RNA, 19 nt, Artificial Sequence
  Description of Artificial Sequence: Synthetic oligonucleotide
  Antisense strand to SEQ ID NO: 1952534
acuaacaagccuaagauuu

SEQ ID NO: 1952536 - RNA, 19 nt, Artificial Sequence
  Description of Artificial Sequence: Synthetic oligonucleotide
  Sense strand starting at position 2945 of SEQ ID NO: 1880239
cuuguuaguguuugacuuu

SEQ ID NO: 1952537 - RNA, 19 nt, Artificial Sequence
  Description of Artificial Sequence: Synthetic oligonucleotide
  Antisense strand to SEQ ID NO: 1952536
aaagucaaacacuaacaag

SEQ ID NO: 1952538 - RNA, 19 nt, Artificial Sequence
  Description of Artificial Sequence: Synthetic oligonucleotide
  Sense strand starting at position 2948 of SEQ ID NO: 1880239
guuaguguuugacuuucca

SEQ ID NO: 1952539 - RNA, 19 nt, Artificial Sequence
  Description of Artificial Sequence: Synthetic oligonucleotide
  Antisense strand to SEQ ID NO: 1952538
uggaaagucaaacacuaac

SEQ ID NO: 1952540 - RNA, 19 nt, Artificial Sequence
  Description of Artificial Sequence: Synthetic oligonucleotide
  Sense strand starting at position 2952 of SEQ ID NO: 1880239
guguuugacuuuccacuca

SEQ ID NO: 1952541 - RNA, 19 nt, Artificial Sequence
  Description of Artificial Sequence: Synthetic oligonucleotide
  Antisense strand to SEQ ID NO: 1952540
ugaguggaaagucaaacac

SEQ ID NO: 1952542 - RNA, 19 nt, Artificial Sequence
  Description of Artificial Sequence: Synthetic oligonucleotide
  Sense strand starting at position 3322 of SEQ ID NO: 1880239
cuccuuguucugggaaaug

SEQ ID NO: 1952543 - RNA, 19 nt, Artificial Sequence
  Description of Artificial Sequence: Synthetic oligonucleotide
  Antisense strand to SEQ ID NO: 1952542
cauuucccagaacaaggag

SEQ ID NO: 1952544 - RNA, 19 nt, Artificial Sequence
  Description of Artificial Sequence: Synthetic oligonucleotide
  Sense strand starting at position 3415 of SEQ ID NO: 1880239
ccucgcuucccagauacau

SEQ ID NO: 1952545 - RNA, 19 nt, Artificial Sequence
  Description of Artificial Sequence: Synthetic oligonucleotide
  Antisense strand to SEQ ID NO: 1952544
auguaucugggaagcgagg

SEQ ID NO: 1952546 - RNA, 19 nt, Artificial Sequence
  Description of Artificial Sequence: Synthetic oligonucleotide
  Sense strand starting at position 227 of SEQ ID NO: 1880242
cugagaaacuuguuuccac

SEQ ID NO: 1952547 - RNA, 19 nt, Artificial Sequence
  Description of Artificial Sequence: Synthetic oligonucleotide
  Antisense strand to SEQ ID NO: 1952546
guggaaacaaguuucucag

SEQ ID NO: 1952548 - RNA, 19 nt, Artificial Sequence
  Description of Artificial Sequence: Synthetic oligonucleotide
  Sense strand starting at position 242 of SEQ ID NO: 1880242
ccaccaauacugggacauu

SEQ ID NO: 1952549 - RNA, 19 nt, Artificial Sequence
  Description of Artificial Sequence: Synthetic oligonucleotide
  Antisense strand to SEQ ID NO: 1952548
aaugucccaguauuggugg

SEQ ID NO: 1952550 - RNA, 19 nt, Artificial Sequence
  Description of Artificial Sequence: Synthetic oligonucleotide
  Sense strand starting at position 271 of SEQ ID NO: 1880242
uugguaagauuccuauggu

SEQ ID NO: 1952551 - RNA, 19 nt, Artificial Sequence
  Description of Artificial Sequence: Synthetic oligonucleotide
  Antisense strand to SEQ ID NO: 1952550
accauaggaaucuuaccaa

SEQ ID NO: 1952552 - RNA, 19 nt, Artificial Sequence
  Description of Artificial Sequence: Synthetic oligonucleotide
  Sense strand starting at position 274 of SEQ ID NO: 1880242
guaagauuccuaugguacu

SEQ ID NO: 1952553 - RNA, 19 nt, Artificial Sequence
  Description of Artificial Sequence: Synthetic oligonucleotide
  Antisense strand to SEQ ID NO: 1952552
aguaccauaggaaucuuac

SEQ ID NO: 1952554 - RNA, 19 nt, Artificial Sequence
  Description of Artificial Sequence: Synthetic oligonucleotide
  Sense strand starting at position 383 of SEQ ID NO: 1880242
gggauaauaugagauggaa

SEQ ID NO: 1952555 - RNA, 19 nt, Artificial Sequence
  Description of Artificial Sequence: Synthetic oligonucleotide
  Antisense strand to SEQ ID NO: 1952554
uuccaucucauauuauccc

SEQ ID NO: 1952556 - RNA, 19 nt, Artificial Sequence
  Description of Artificial Sequence: Synthetic oligonucleotide
  Sense strand starting at position 440 of SEQ ID NO: 1880242
ccuagacaagcugaguaau

SEQ ID NO: 1952557 - RNA, 19 nt, Artificial Sequence
  Description of Artificial Sequence: Synthetic oligonucleotide
  Antisense strand to SEQ ID NO: 1952556
auuacucagcuugucuagg

SEQ ID NO: 1952558 - RNA, 19 nt, Artificial Sequence
  Description of Artificial Sequence: Synthetic oligonucleotide
  Sense strand starting at position 442 of SEQ ID NO: 1880242
uagacaagcugaguaauua

SEQ ID NO: 1952559 - RNA, 19 nt, Artificial Sequence
  Description of Artificial Sequence: Synthetic oligonucleotide
  Antisense strand to SEQ ID NO: 1952558
uaauuacucagcuugucua

SEQ ID NO: 1952560 - RNA, 19 nt, Artificial Sequence
  Description of Artificial Sequence: Synthetic oligonucleotide
  Sense strand starting at position 451 of SEQ ID NO: 1880242
ugaguaauuacucacgguc

SEQ ID NO: 1952561 - RNA, 19 nt, Artificial Sequence
  Description of Artificial Sequence: Synthetic oligonucleotide
  Antisense strand to SEQ ID NO: 1952560
gaccgugaguaauuacuca

SEQ ID NO: 1952562 - RNA, 19 nt, Artificial Sequence
  Description of Artificial Sequence: Synthetic oligonucleotide
  Sense strand starting at position 465 of SEQ ID NO: 1880242
cggucauagagugaagucu

SEQ ID NO: 1952563 - RNA, 19 nt, Artificial Sequence
  Description of Artificial Sequence: Synthetic oligonucleotide
  Antisense strand to SEQ ID NO: 1952562
agacuucacucuaugaccg

SEQ ID NO: 1952564 - RNA, 19 nt, Artificial Sequence
  Description of Artificial Sequence: Synthetic oligonucleotide
  Sense strand starting at position 611 of SEQ ID NO: 1880242
ugcauuggccaagauaaau

SEQ ID NO: 1952565 - RNA, 19 nt, Artificial Sequence
  Description of Artificial Sequence: Synthetic oligonucleotide
  Antisense strand to SEQ ID NO: 1952564
auuuaucuuggccaaugca

SEQ ID NO: 1952566 - RNA, 19 nt, Artificial Sequence
  Description of Artificial Sequence: Synthetic oligonucleotide
  Sense strand starting at position 710 of SEQ ID NO: 1880242
augagagguucccuauuaa

SEQ ID NO: 1952567 - RNA, 19 nt, Artificial Sequence
  Description of Artificial Sequence: Synthetic oligonucleotide
  Antisense strand to SEQ ID NO: 1952566
uuaauagggaaccucucau

SEQ ID NO: 1952568 - RNA, 19 nt, Artificial Sequence
  Description of Artificial Sequence: Synthetic oligonucleotide
  Sense strand starting at position 742 of SEQ ID NO: 1880242
augccaagacuuggacaua

SEQ ID NO: 1952569 - RNA, 19 nt, Artificial Sequence
  Description of Artificial Sequence: Synthetic oligonucleotide
  Antisense strand to SEQ ID NO: 1952568
uauguccaagucuuggcau

SEQ ID NO: 1952570 - RNA, 19 nt, Artificial Sequence
  Description of Artificial Sequence: Synthetic oligonucleotide
  Sense strand starting at position 859 of SEQ ID NO: 1880242
aauuccuggguuggugaua

SEQ ID NO: 1952571 - RNA, 19 nt, Artificial Sequence
  Description of Artificial Sequence: Synthetic oligonucleotide
  Antisense strand to SEQ ID NO: 1952570
uaucaccaacccaggaauu

SEQ ID NO: 1952572 - RNA, 19 nt, Artificial Sequence
  Description of Artificial Sequence: Synthetic oligonucleotide
  Sense strand starting at position 1068 of SEQ ID NO: 1880242
aaagaucuauauguguaga

SEQ ID NO: 1952573 - RNA, 19 nt, Artificial Sequence
  Description of Artificial Sequence: Synthetic oligonucleotide
  Antisense strand to SEQ ID NO: 1952572
ucuacacauauagaucuuu

SEQ ID NO: 1952574 - RNA, 19 nt, Artificial Sequence
  Description of Artificial Sequence: Synthetic oligonucleotide
  Sense strand starting at position 1070 of SEQ ID NO: 1880242
agaucuauauguguagauu

SEQ ID NO: 1952575 - RNA, 19 nt, Artificial Sequence
  Description of Artificial Sequence: Synthetic oligonucleotide
  Antisense strand to SEQ ID NO: 1952574
aaucuacacauauagaucu

SEQ ID NO: 1952576 - RNA, 19 nt, Artificial Sequence
  Description of Artificial Sequence: Synthetic oligonucleotide
  Sense strand starting at position 1071 of SEQ ID NO: 1880242
gaucuauauguguagauua

SEQ ID NO: 1952577 - RNA, 19 nt, Artificial Sequence
  Description of Artificial Sequence: Synthetic oligonucleotide
  Antisense strand to SEQ ID NO: 1952576
uaaucuacacauauagauc

SEQ ID NO: 1952578 - RNA, 19 nt, Artificial Sequence
  Description of Artificial Sequence: Synthetic oligonucleotide
  Sense strand starting at position 1176 of SEQ ID NO: 1880242
agaauacuuguccagcuca

SEQ ID NO: 1952579 - RNA, 19 nt, Artificial Sequence
  Description of Artificial Sequence: Synthetic oligonucleotide
  Antisense strand to SEQ ID NO: 1952578
ugagcuggacaaguauucu

SEQ ID NO: 1952580 - RNA, 19 nt, Artificial Sequence
  Description of Artificial Sequence: Synthetic oligonucleotide
  Sense strand starting at position 1426 of SEQ ID NO: 1880242
uguaaucucugauccuaag

SEQ ID NO: 1952581 - RNA, 19 nt, Artificial Sequence
  Description of Artificial Sequence: Synthetic oligonucleotide
  Antisense strand to SEQ ID NO: 1952580
cuuaggaucagagauuaca

SEQ ID NO: 1952582 - RNA, 19 nt, Artificial Sequence
  Description of Artificial Sequence: Synthetic oligonucleotide
  Sense strand starting at position 1510 of SEQ ID NO: 1880242
ccgugaugcuauuugagug

SEQ ID NO: 1952583 - RNA, 19 nt, Artificial Sequence
  Description of Artificial Sequence: Synthetic oligonucleotide
  Antisense strand to SEQ ID NO: 1952582
cacucaaauagcaucacgg

SEQ ID NO: 1952584 - RNA, 19 nt, Artificial Sequence
  Description of Artificial Sequence: Synthetic oligonucleotide
  Sense strand starting at position 1511 of SEQ ID NO: 1880242
cgugaugcuauuugaguga

SEQ ID NO: 1952585 - RNA, 19 nt, Artificial Sequence
  Description of Artificial Sequence: Synthetic oligonucleotide
  Antisense strand to SEQ ID NO: 1952584
ucacucaaauagcaucacg

SEQ ID NO: 1952586 - RNA, 19 nt, Artificial Sequence
  Description of Artificial Sequence: Synthetic oligonucleotide
  Sense strand starting at position 1570 of SEQ ID NO: 1880242
cuagaagucaaggguucuu

SEQ ID NO: 1952587 - RNA, 19 nt, Artificial Sequence
  Description of Artificial Sequence: Synthetic oligonucleotide
  Antisense strand to SEQ ID NO: 1952586
aagaacccuugacuucuag

SEQ ID NO: 1952588 - RNA, 19 nt, Artificial Sequence
  Description of Artificial Sequence: Synthetic oligonucleotide
  Sense strand starting at position 1575 of SEQ ID NO: 1880242
agucaaggguucuuccaaa

SEQ ID NO: 1952589 - RNA, 19 nt, Artificial Sequence
  Description of Artificial Sequence: Synthetic oligonucleotide
  Antisense strand to SEQ ID NO: 1952588
uuuggaagaacccuugacu

SEQ ID NO: 1952590 - RNA, 19 nt, Artificial Sequence
  Description of Artificial Sequence: Synthetic oligonucleotide
  Sense strand starting at position 2049 of SEQ ID NO: 1880242
agacuugagucuuuaucug

SEQ ID NO: 1952591 - RNA, 19 nt, Artificial Sequence
  Description of Artificial Sequence: Synthetic oligonucleotide
  Antisense strand to SEQ ID NO: 1952590
cagauaaagacucaagucu

SEQ ID NO: 1952592 - RNA, 19 nt, Artificial Sequence
  Description of Artificial Sequence: Synthetic oligonucleotide
  Sense strand starting at position 2337 of SEQ ID NO: 1880242
agagaaguguacuuuggca

SEQ ID NO: 1952593 - RNA, 19 nt, Artificial Sequence
  Description of Artificial Sequence: Synthetic oligonucleotide
  Antisense strand to SEQ ID NO: 1952592
ugccaaaguacacuucucu

SEQ ID NO: 1952594 - RNA, 19 nt, Artificial Sequence
  Description of Artificial Sequence: Synthetic oligonucleotide
  Sense strand starting at position 2513 of SEQ ID NO: 1880242
gaggucacucaugauccuu

SEQ ID NO: 1952595 - RNA, 19 nt, Artificial Sequence
  Description of Artificial Sequence: Synthetic oligonucleotide
  Antisense strand to SEQ ID NO: 1952594
aaggaucaugagugaccuc

SEQ ID NO: 1952596 - RNA, 19 nt, Artificial Sequence
  Description of Artificial Sequence: Synthetic oligonucleotide
  Sense strand starting at position 2515 of SEQ ID NO: 1880242
ggucacucaugauccuuaa

SEQ ID NO: 1952597 - RNA, 19 nt, Artificial Sequence
  Description of Artificial Sequence: Synthetic oligonucleotide
  Antisense strand to SEQ ID NO: 1952596
uuaaggaucaugagugacc

SEQ ID NO: 1952598 - RNA, 19 nt, Artificial Sequence
  Description of Artificial Sequence: Synthetic oligonucleotide
  Sense strand starting at position 2880 of SEQ ID NO: 1880242
ucguaaucaucauuaucag

SEQ ID NO: 1952599 - RNA, 19 nt, Artificial Sequence
  Description of Artificial Sequence: Synthetic oligonucleotide
  Antisense strand to SEQ ID NO: 1952598
cugauaaugaugauuacga

SEQ ID NO: 1952600 - RNA, 19 nt, Artificial Sequence
  Description of Artificial Sequence: Synthetic oligonucleotide
  Sense strand starting at position 2912 of SEQ ID NO: 1880242
aguuuaguuccagaccaug

SEQ ID NO: 1952601 - RNA, 19 nt, Artificial Sequence
  Description of Artificial Sequence: Synthetic oligonucleotide
  Antisense strand to SEQ ID NO: 1952600
cauggucuggaacuaaacu

SEQ ID NO: 1952602 - RNA, 19 nt, Artificial Sequence
  Description of Artificial Sequence: Synthetic oligonucleotide
  Sense strand starting at position 3059 of SEQ ID NO: 1880242
uauaaauggcucuaguuag

SEQ ID NO: 1952603 - RNA, 19 nt, Artificial Sequence
  Description of Artificial Sequence: Synthetic oligonucleotide
  Antisense strand to SEQ ID NO: 1952602
cuaacuagagccauuuaua

SEQ ID NO: 1952604 - RNA, 19 nt, Artificial Sequence
  Description of Artificial Sequence: Synthetic oligonucleotide
  Sense strand starting at position 3066 of SEQ ID NO: 1880242
ggcucuaguuagucauuua

SEQ ID NO: 1952605 - RNA, 19 nt, Artificial Sequence
  Description of Artificial Sequence: Synthetic oligonucleotide
  Antisense strand to SEQ ID NO: 1952604
uaaaugacuaacuagagcc

SEQ ID NO: 1952606 - RNA, 19 nt, Artificial Sequence
  Description of Artificial Sequence: Synthetic oligonucleotide
  Sense strand starting at position 3069 of SEQ ID NO: 1880242
ucuaguuagucauuuaugu

SEQ ID NO: 1952607 - RNA, 19 nt, Artificial Sequence
  Description of Artificial Sequence: Synthetic oligonucleotide
  Antisense strand to SEQ ID NO: 1952606
acauaaaugacuaacuaga

SEQ ID NO: 1952608 - RNA, 19 nt, Artificial Sequence
  Description of Artificial Sequence: Synthetic oligonucleotide
  Sense strand starting at position 3164 of SEQ ID NO: 1880242
gcuggaguccacuauugag

SEQ ID NO: 1952609 - RNA, 19 nt, Artificial Sequence
  Description of Artificial Sequence: Synthetic oligonucleotide
  Antisense strand to SEQ ID NO: 1952608
cucaauaguggacuccagc

SEQ ID NO: 1952610 - RNA, 19 nt, Artificial Sequence
  Description of Artificial Sequence: Synthetic oligonucleotide
  Sense strand starting at position 3188 of SEQ ID NO: 1880242
ccagucacuagagguagau

SEQ ID NO: 1952611 - RNA, 19 nt, Artificial Sequence
  Description of Artificial Sequence: Synthetic oligonucleotide
  Antisense strand to SEQ ID NO: 1952610
aucuaccucuagugacugg

SEQ ID NO: 1952612 - RNA, 19 nt, Artificial Sequence
  Description of Artificial Sequence: Synthetic oligonucleotide
  Sense strand starting at position 3257 of SEQ ID NO: 1880242
cuccuuucucuggagauua

SEQ ID NO: 1952613 - RNA, 19 nt, Artificial Sequence
  Description of Artificial Sequence: Synthetic oligonucleotide
  Antisense strand to SEQ ID NO: 1952612
uaaucuccagagaaaggag

SEQ ID NO: 1952614 - RNA, 19 nt, Artificial Sequence
  Description of Artificial Sequence: Synthetic oligonucleotide
  Sense strand starting at position 3462 of SEQ ID NO: 1880242
gcccucuuagguuaagauu

SEQ ID NO: 1952615 - RNA, 19 nt, Artificial Sequence
  Description of Artificial Sequence: Synthetic oligonucleotide
  Antisense strand to SEQ ID NO: 1952614
aaucuuaaccuaagagggc

SEQ ID NO: 1952616 - RNA, 19 nt, Artificial Sequence
  Description of Artificial Sequence: Synthetic oligonucleotide
  Sense strand starting at position 3616 of SEQ ID NO: 1880242
guuugacauuuaguugguu

SEQ ID NO: 1952617 - RNA, 19 nt, Artificial Sequence
  Description of Artificial Sequence: Synthetic oligonucleotide
  Antisense strand to SEQ ID NO: 1952616
aaccaacuaaaugucaaac

SEQ ID NO: 1952618 - RNA, 19 nt, Artificial Sequence
  Description of Artificial Sequence: Synthetic oligonucleotide
  Sense strand starting at position 3628 of SEQ ID NO: 1880242
guugguuccuaauuaaaca

SEQ ID NO: 1952619 - RNA, 19 nt, Artificial Sequence
  Description of Artificial Sequence: Synthetic oligonucleotide
  Antisense strand to SEQ ID NO: 1952618
uguuuaauuaggaaccaac

SEQ ID NO: 1952620 - RNA, 19 nt, Artificial Sequence
  Description of Artificial Sequence: Synthetic oligonucleotide
  Sense strand starting at position 3749 of SEQ ID NO: 1880242
aaucaugucuagguggaga

SEQ ID NO: 1952621 - RNA, 19 nt, Artificial Sequence
  Description of Artificial Sequence: Synthetic oligonucleotide
  Antisense strand to SEQ ID NO: 1952620
ucuccaccuagacaugauu

SEQ ID NO: 1952622 - RNA, 19 nt, Artificial Sequence
  Description of Artificial Sequence: Synthetic oligonucleotide
  Sense strand starting at position 3765 of SEQ ID NO: 1880242
agagccaucuccuugagga

SEQ ID NO: 1952623 - RNA, 19 nt, Artificial Sequence
  Description of Artificial Sequence: Synthetic oligonucleotide
  Antisense strand to SEQ ID NO: 1952622
uccucaaggagauggcucu

SEQ ID NO: 1952624 - RNA, 19 nt, Artificial Sequence
  Description of Artificial Sequence: Synthetic oligonucleotide
  Sense strand starting at position 3766 of SEQ ID NO: 1880242
gagccaucuccuugaggaa

SEQ ID NO: 1952625 - RNA, 19 nt, Artificial Sequence
  Description of Artificial Sequence: Synthetic oligonucleotide
  Antisense strand to SEQ ID NO: 1952624
uuccucaaggagauggcuc

SEQ ID NO: 1952626 - RNA, 19 nt, Artificial Sequence
  Description of Artificial Sequence: Synthetic oligonucleotide
  Sense strand starting at position 4 of SEQ ID NO: 1880241
auaagugaguauuccaaca

SEQ ID NO: 1952627 - RNA, 19 nt, Artificial Sequence
  Description of Artificial Sequence: Synthetic oligonucleotide
  Antisense strand to SEQ ID NO: 1952626
uguuggaauacucacuuau

SEQ ID NO: 1952628 - RNA, 19 nt, Artificial Sequence
  Description of Artificial Sequence: Synthetic oligonucleotide
  Sense strand starting at position 109 of SEQ ID NO: 1880241
ucaguuauuucccagagga

SEQ ID NO: 1952629 - RNA, 19 nt, Artificial Sequence
  Description of Artificial Sequence: Synthetic oligonucleotide
  Antisense strand to SEQ ID NO: 1952628
uccucugggaaauaacuga

SEQ ID NO: 1952630 - RNA, 19 nt, Artificial Sequence
  Description of Artificial Sequence: Synthetic oligonucleotide
  Sense strand starting at position 759 of SEQ ID NO: 1880241
ccacuagagucaccuggaa

SEQ ID NO: 1952631 - RNA, 19 nt, Artificial Sequence
  Description of Artificial Sequence: Synthetic oligonucleotide
  Antisense strand to SEQ ID NO: 1952630
uuccaggugacucuagugg

SEQ ID NO: 1952632 - RNA, 19 nt, Artificial Sequence
  Description of Artificial Sequence: Synthetic oligonucleotide
  Sense strand starting at position 849 of SEQ ID NO: 1880241
gccauacacucgcuuauca

SEQ ID NO: 1952633 - RNA, 19 nt, Artificial Sequence
  Description of Artificial Sequence: Synthetic oligonucleotide
  Antisense strand to SEQ ID NO: 1952632
ugauaagcgaguguauggc

SEQ ID NO: 1952634 - RNA, 19 nt, Artificial Sequence
  Description of Artificial Sequence: Synthetic oligonucleotide
  Sense strand starting at position 864 of SEQ ID NO: 1880241
aucagcucugcucggaaga

SEQ ID NO: 1952635 - RNA, 19 nt, Artificial Sequence
  Description of Artificial Sequence: Synthetic oligonucleotide
  Antisense strand to SEQ ID NO: 1952634
ucuuccgagcagagcugau

SEQ ID NO: 1952636 - RNA, 19 nt, Artificial Sequence
  Description of Artificial Sequence: Synthetic oligonucleotide
  Sense strand starting at position 865 of SEQ ID NO: 1880241
ucagcucugcucggaagaa

SEQ ID NO: 1952637 - RNA, 19 nt, Artificial Sequence
  Description of Artificial Sequence: Synthetic oligonucleotide
  Antisense strand to SEQ ID NO: 1952636
uucuuccgagcagagcuga

SEQ ID NO: 1952638 - RNA, 19 nt, Artificial Sequence
  Description of Artificial Sequence: Synthetic oligonucleotide
  Sense strand starting at position 866 of SEQ ID NO: 1880241
cagcucugcucggaagaaa

SEQ ID NO: 1952639 - RNA, 19 nt, Artificial Sequence
  Description of Artificial Sequence: Synthetic oligonucleotide
  Antisense strand to SEQ ID NO: 1952638
uuucuuccgagcagagcug

SEQ ID NO: 1952640 - RNA, 19 nt, Artificial Sequence
  Description of Artificial Sequence: Synthetic oligonucleotide
  Sense strand starting at position 899 of SEQ ID NO: 1880241
ucggcuugcacugaucaca

SEQ ID NO: 1952641 - RNA, 19 nt, Artificial Sequence
  Description of Artificial Sequence: Synthetic oligonucleotide
  Antisense strand to SEQ ID NO: 1952640
ugugaucagugcaagccga

SEQ ID NO: 1952642 - RNA, 19 nt, Artificial Sequence
  Description of Artificial Sequence: Synthetic oligonucleotide
  Sense strand starting at position 923 of SEQ ID NO: 1880241
gcaauaaaggccugaaucu

SEQ ID NO: 1952643 - RNA, 19 nt, Artificial Sequence
  Description of Artificial Sequence: Synthetic oligonucleotide
  Antisense strand to SEQ ID NO: 1952642
agauucaggccuuuauugc

SEQ ID NO: 1952644 - RNA, 19 nt, Artificial Sequence
  Description of Artificial Sequence: Synthetic oligonucleotide
  Sense strand starting at position 930 of SEQ ID NO: 1880241
aggccugaaucugacagaa

SEQ ID NO: 1952645 - RNA, 19 nt, Artificial Sequence
  Description of Artificial Sequence: Synthetic oligonucleotide
  Antisense strand to SEQ ID NO: 1952644
uucugucagauucaggccu

SEQ ID NO: 1952646 - RNA, 19 nt, Artificial Sequence
  Description of Artificial Sequence: Synthetic oligonucleotide
  Sense strand starting at position 932 of SEQ ID NO: 1880241
gccugaaucugacagaagu

SEQ ID NO: 1952647 - RNA, 19 nt, Artificial Sequence
  Description of Artificial Sequence: Synthetic oligonucleotide
  Antisense strand to SEQ ID NO: 1952646
acuucugucagauucaggc

SEQ ID NO: 1952648 - RNA, 19 nt, Artificial Sequence
  Description of Artificial Sequence: Synthetic oligonucleotide
  Sense strand starting at position 942 of SEQ ID NO: 1880241
gacagaaguuccugccuuc

SEQ ID NO: 1952649 - RNA, 19 nt, Artificial Sequence
  Description of Artificial Sequence: Synthetic oligonucleotide
  Antisense strand to SEQ ID NO: 1952648
gaaggcaggaacuucuguc

SEQ ID NO: 1952650 - RNA, 19 nt, Artificial Sequence
  Description of Artificial Sequence: Synthetic oligonucleotide
  Sense strand starting at position 990 of SEQ ID NO: 1880241
uugguuggcuccuacauuu

SEQ ID NO: 1952651 - RNA, 19 nt, Artificial Sequence
  Description of Artificial Sequence: Synthetic oligonucleotide
  Antisense strand to SEQ ID NO: 1952650
aaauguaggagccaaccaa

SEQ ID NO: 1952652 - RNA, 19 nt, Artificial Sequence
  Description of Artificial Sequence: Synthetic oligonucleotide
  Sense strand starting at position 1007 of SEQ ID NO: 1880241
uugcacuaacguugagaga

SEQ ID NO: 1952653 - RNA, 19 nt, Artificial Sequence
  Description of Artificial Sequence: Synthetic oligonucleotide
  Antisense strand to SEQ ID NO: 1952652
ucucucaacguuagugcaa

SEQ ID NO: 1952654 - RNA, 19 nt, Artificial Sequence
  Description of Artificial Sequence: Synthetic oligonucleotide
  Sense strand starting at position 1008 of SEQ ID NO: 1880241
ugcacuaacguugagagaa

SEQ ID NO: 1952655 - RNA, 19 nt, Artificial Sequence
  Description of Artificial Sequence: Synthetic oligonucleotide
  Antisense strand to SEQ ID NO: 1952654
uucucucaacguuagugca

SEQ ID NO: 1952656 - RNA, 19 nt, Artificial Sequence
  Description of Artificial Sequence: Synthetic oligonucleotide
  Sense strand starting at position 1010 of SEQ ID NO: 1880241
cacuaacguugagagaagu

SEQ ID NO: 1952657 - RNA, 19 nt, Artificial Sequence
  Description of Artificial Sequence: Synthetic oligonucleotide
  Antisense strand to SEQ ID NO: 1952656
acuucucucaacguuagug

SEQ ID NO: 1952658 - RNA, 19 nt, Artificial Sequence
  Description of Artificial Sequence: Synthetic oligonucleotide
  Sense strand starting at position 1016 of SEQ ID NO: 1880241
cguugagagaaguacuauc

SEQ ID NO: 1952659 - RNA, 19 nt, Artificial Sequence
  Description of Artificial Sequence: Synthetic oligonucleotide
  Antisense strand to SEQ ID NO: 1952658
gauaguacuucucucaacg

SEQ ID NO: 1952660 - RNA, 19 nt, Artificial Sequence
  Description of Artificial Sequence: Synthetic oligonucleotide
  Sense strand starting at position 1952 of SEQ ID NO: 1880241
ccugcuacgcccugaaaua

SEQ ID NO: 1952661 - RNA, 19 nt, Artificial Sequence
  Description of Artificial Sequence: Synthetic oligonucleotide
  Antisense strand to SEQ ID NO: 1952660
uauuucagggcguagcagg

SEQ ID NO: 1952662 - RNA, 19 nt, Artificial Sequence
  Description of Artificial Sequence: Synthetic oligonucleotide
  Sense strand starting at position 2149 of SEQ ID NO: 1880241
gagggaguguuaccauggu

SEQ ID NO: 1952663 - RNA, 19 nt, Artificial Sequence
  Description of Artificial Sequence: Synthetic oligonucleotide
  Antisense strand to SEQ ID NO: 1952662
accaugguaacacucccuc

SEQ ID NO: 1952664 - RNA, 19 nt, Artificial Sequence
  Description of Artificial Sequence: Synthetic oligonucleotide
  Sense strand starting at position 2153 of SEQ ID NO: 1880241
gaguguuaccaugguaacu

SEQ ID NO: 1952665 - RNA, 19 nt, Artificial Sequence
  Description of Artificial Sequence: Synthetic oligonucleotide
  Antisense strand to SEQ ID NO: 1952664
aguuaccaugguaacacuc

SEQ ID NO: 1952666 - RNA, 19 nt, Artificial Sequence
  Description of Artificial Sequence: Synthetic oligonucleotide
  Sense strand starting at position 2548 of SEQ ID NO: 1880241
cauucuauuuggcauggua

SEQ ID NO: 1952667 - RNA, 19 nt, Artificial Sequence
  Description of Artificial Sequence: Synthetic oligonucleotide
  Antisense strand to SEQ ID NO: 1952666
uaccaugccaaauagaaug

SEQ ID NO: 1952668 - RNA, 19 nt, Artificial Sequence
  Description of Artificial Sequence: Synthetic oligonucleotide
  Sense strand starting at position 2561 of SEQ ID NO: 1880241
augguaugaacuuaagugu

SEQ ID NO: 1952669 - RNA, 19 nt, Artificial Sequence
  Description of Artificial Sequence: Synthetic oligonucleotide
  Antisense strand to SEQ ID NO: 1952668
acacuuaaguucauaccau

SEQ ID NO: 1952670 - RNA, 19 nt, Artificial Sequence
  Description of Artificial Sequence: Synthetic oligonucleotide
  Sense strand starting at position 2564 of SEQ ID NO: 1880241
guaugaacuuaaguguucu

SEQ ID NO: 1952671 - RNA, 19 nt, Artificial Sequence
  Description of Artificial Sequence: Synthetic oligonucleotide
  Antisense strand to SEQ ID NO: 1952670
agaacacuuaaguucauac

SEQ ID NO: 1952672 - RNA, 19 nt, Artificial Sequence
  Description of Artificial Sequence: Synthetic oligonucleotide
  Sense strand starting at position 2570 of SEQ ID NO: 1880241
acuuaaguguucuauuuag

SEQ ID NO: 1952673 - RNA, 19 nt, Artificial Sequence
  Description of Artificial Sequence: Synthetic oligonucleotide
  Antisense strand to SEQ ID NO: 1952672
cuaaauagaacacuuaagu

SEQ ID NO: 1952674 - RNA, 19 nt, Artificial Sequence
  Description of Artificial Sequence: Synthetic oligonucleotide
  Sense strand starting at position 2576 of SEQ ID NO: 1880241
guguucuauuuagaacaga

SEQ ID NO: 1952675 - RNA, 19 nt, Artificial Sequence
  Description of Artificial Sequence: Synthetic oligonucleotide
  Antisense strand to SEQ ID NO: 1952674
ucuguucuaaauagaacac

SEQ ID NO: 1952676 - RNA, 19 nt, Artificial Sequence
  Description of Artificial Sequence: Synthetic oligonucleotide
  Sense strand starting at position 2766 of SEQ ID NO: 1880241
ccgucaggcucccuguuau

SEQ ID NO: 1952677 - RNA, 19 nt, Artificial Sequence
  Description of Artificial Sequence: Synthetic oligonucleotide
  Antisense strand to SEQ ID NO: 1952676
auaacagggagccugacgg

SEQ ID NO: 1952678 - RNA, 19 nt, Artificial Sequence
  Description of Artificial Sequence: Synthetic oligonucleotide
  Sense strand starting at position 3119 of SEQ ID NO: 1880241
ccuccaaaccuuggaauga

SEQ ID NO: 1952679 - RNA, 19 nt, Artificial Sequence
  Description of Artificial Sequence: Synthetic oligonucleotide
  Antisense strand to SEQ ID NO: 1952678
ucauuccaagguuuggagg

SEQ ID NO: 1952680 - RNA, 19 nt, Artificial Sequence
  Description of Artificial Sequence: Synthetic oligonucleotide
  Sense strand starting at position 3120 of SEQ ID NO: 1880241
cuccaaaccuuggaaugau

SEQ ID NO: 1952681 - RNA, 19 nt, Artificial Sequence
  Description of Artificial Sequence: Synthetic oligonucleotide
  Antisense strand to SEQ ID NO: 1952680
aucauuccaagguuuggag

SEQ ID NO: 1952682 - RNA, 19 nt, Artificial Sequence
  Description of Artificial Sequence: Synthetic oligonucleotide
  Sense strand starting at position 3174 of SEQ ID NO: 1880241
guagcucaugucuguaagu

SEQ ID NO: 1952683 - RNA, 19 nt, Artificial Sequence
  Description of Artificial Sequence: Synthetic oligonucleotide
  Antisense strand to SEQ ID NO: 1952682
acuuacagacaugagcuac

SEQ ID NO: 1952684 - RNA, 19 nt, Artificial Sequence
  Description of Artificial Sequence: Synthetic oligonucleotide
  Sense strand starting at position 3176 of SEQ ID NO: 1880241
agcucaugucuguaagucu

SEQ ID NO: 1952685 - RNA, 19 nt, Artificial Sequence
  Description of Artificial Sequence: Synthetic oligonucleotide
  Antisense strand to SEQ ID NO: 1952684
agacuuacagacaugagcu

SEQ ID NO: 1952686 - RNA, 19 nt, Artificial Sequence
  Description of Artificial Sequence: Synthetic oligonucleotide
  Sense strand starting at position 3677 of SEQ ID NO: 1880241
acagacgacuguuacuaga

SEQ ID NO: 1952687 - RNA, 19 nt, Artificial Sequence
  Description of Artificial Sequence: Synthetic oligonucleotide
  Antisense strand to SEQ ID NO: 1952686
ucuaguaacagucgucugu

SEQ ID NO: 1952688 - RNA, 19 nt, Artificial Sequence
  Description of Artificial Sequence: Synthetic oligonucleotide
  Sense strand starting at position 3679 of SEQ ID NO: 1880241
agacgacuguuacuagauc

SEQ ID NO: 1952689 - RNA, 19 nt, Artificial Sequence
  Description of Artificial Sequence: Synthetic oligonucleotide
  Antisense strand to SEQ ID NO: 1952688
gaucuaguaacagucgucu

SEQ ID NO: 1952690 - RNA, 19 nt, Artificial Sequence
  Description of Artificial Sequence: Synthetic oligonucleotide
  Sense strand starting at position 3713 of SEQ ID NO: 1880241
agacaugagugccuguaaa

SEQ ID NO: 1952691 - RNA, 19 nt, Artificial Sequence
  Description of Artificial Sequence: Synthetic oligonucleotide
  Antisense strand to SEQ ID NO: 1952690
uuuacaggcacucaugucu

SEQ ID NO: 1952692 - RNA, 19 nt, Artificial Sequence
  Description of Artificial Sequence: Synthetic oligonucleotide
  Sense strand starting at position 3723 of SEQ ID NO: 1880241
gccuguaaacuguacuaua

SEQ ID NO: 1952693 - RNA, 19 nt, Artificial Sequence
  Description of Artificial Sequence: Synthetic oligonucleotide
  Antisense strand to SEQ ID NO: 1952692
uauaguacaguuuacaggc

SEQ ID NO: 1952694 - RNA, 19 nt, Artificial Sequence
  Description of Artificial Sequence: Synthetic oligonucleotide
  Sense strand starting at position 3726 of SEQ ID NO: 1880241
uguaaacuguacuauagaa

SEQ ID NO: 1952695 - RNA, 19 nt, Artificial Sequence
  Description of Artificial Sequence: Synthetic oligonucleotide
  Antisense strand to SEQ ID NO: 1952694
uucuauaguacaguuuaca

SEQ ID NO: 1952696 - RNA, 19 nt, Artificial Sequence
  Description of Artificial Sequence: Synthetic oligonucleotide
  Sense strand starting at position 3809 of SEQ ID NO: 1880241
aggaacuguuuaugaguua

SEQ ID NO: 1952697 - RNA, 19 nt, Artificial Sequence
  Description of Artificial Sequence: Synthetic oligonucleotide
  Antisense strand to SEQ ID NO: 1952696
uaacucauaaacaguuccu

SEQ ID NO: 1952698 - RNA, 19 nt, Artificial Sequence
  Description of Artificial Sequence: Synthetic oligonucleotide
  Sense strand starting at position 3812 of SEQ ID NO: 1880241
aacuguuuaugaguuagaa

SEQ ID NO: 1952699 - RNA, 19 nt, Artificial Sequence
  Description of Artificial Sequence: Synthetic oligonucleotide
  Antisense strand to SEQ ID NO: 1952698
uucuaacucauaaacaguu

SEQ ID NO: 1952700 - RNA, 19 nt, Artificial Sequence
  Description of Artificial Sequence: Synthetic oligonucleotide
  Sense strand starting at position 1 of SEQ ID NO: 1880243
cauggauugcaguggagaa

SEQ ID NO: 1952701 - RNA, 19 nt, Artificial Sequence
  Description of Artificial Sequence: Synthetic oligonucleotide
  Antisense strand to SEQ ID NO: 1952700
uucuccacugcaauccaug

SEQ ID NO: 1952702 - RNA, 19 nt, Artificial Sequence
  Description of Artificial Sequence: Synthetic oligonucleotide
  Sense strand starting at position 273 of SEQ ID NO: 1880243
aguaauugcgaauauuauc

SEQ ID NO: 1952703 - RNA, 19 nt, Artificial Sequence
  Description of Artificial Sequence: Synthetic oligonucleotide
  Antisense strand to SEQ ID NO: 1952702
gauaauauucgcaauuacu

SEQ ID NO: 1952704 - RNA, 19 nt, Artificial Sequence
  Description of Artificial Sequence: Synthetic oligonucleotide
  Sense strand starting at position 300 of SEQ ID NO: 1880243
gccgauguuggauauugaa

SEQ ID NO: 1952705 - RNA, 19 nt, Artificial Sequence
  Description of Artificial Sequence: Synthetic oligonucleotide
  Antisense strand to SEQ ID NO: 1952704
uucaauauccaacaucggc

SEQ ID NO: 1952706 - RNA, 19 nt, Artificial Sequence
  Description of Artificial Sequence: Synthetic oligonucleotide
  Sense strand starting at position 414 of SEQ ID NO: 1880243
agaguauauuguuuaccag

SEQ ID NO: 1952707 - RNA, 19 nt, Artificial Sequence
  Description of Artificial Sequence: Synthetic oligonucleotide
  Antisense strand to SEQ ID NO: 1952706
cugguaaacaauauacucu

SEQ ID NO: 1952708 - RNA, 19 nt, Artificial Sequence
  Description of Artificial Sequence: Synthetic oligonucleotide
  Sense strand starting at position 415 of SEQ ID NO: 1880243
gaguauauuguuuaccaga

SEQ ID NO: 1952709 - RNA, 19 nt, Artificial Sequence
  Description of Artificial Sequence: Synthetic oligonucleotide
  Antisense strand to SEQ ID NO: 1952708
ucugguaaacaauauacuc

SEQ ID NO: 1952710 - RNA, 19 nt, Artificial Sequence
  Description of Artificial Sequence: Synthetic oligonucleotide
  Sense strand starting at position 417 of SEQ ID NO: 1880243
guauauuguuuaccagauu

SEQ ID NO: 1952711 - RNA, 19 nt, Artificial Sequence
  Description of Artificial Sequence: Synthetic oligonucleotide
  Antisense strand to SEQ ID NO: 1952710
aaucugguaaacaauauac

SEQ ID NO: 1952712 - RNA, 19 nt, Artificial Sequence
  Description of Artificial Sequence: Synthetic oligonucleotide
  Sense strand starting at position 510 of SEQ ID NO: 1880243
cucuguggucuggacauaa

SEQ ID NO: 1952713 - RNA, 19 nt, Artificial Sequence
  Description of Artificial Sequence: Synthetic oligonucleotide
  Antisense strand to SEQ ID NO: 1952712
uuauguccagaccacagag

SEQ ID NO: 1952714 - RNA, 19 nt, Artificial Sequence
  Description of Artificial Sequence: Synthetic oligonucleotide
  Sense strand starting at position 816 of SEQ ID NO: 1880243
ggagccuucuuacccaaga

SEQ ID NO: 1952715 - RNA, 19 nt, Artificial Sequence
  Description of Artificial Sequence: Synthetic oligonucleotide
  Antisense strand to SEQ ID NO: 1952714
ucuuggguaagaaggcucc

SEQ ID NO: 1952716 - RNA, 19 nt, Artificial Sequence
  Description of Artificial Sequence: Synthetic oligonucleotide
  Sense strand starting at position 848 of SEQ ID NO: 1880243
ggaaauggcuccuuagaga

SEQ ID NO: 1952717 - RNA, 19 nt, Artificial Sequence
  Description of Artificial Sequence: Synthetic oligonucleotide
  Antisense strand to SEQ ID NO: 1952716
ucucuaaggagccauuucc

SEQ ID NO: 1952718 - RNA, 19 nt, Artificial Sequence
  Description of Artificial Sequence: Synthetic oligonucleotide
  Sense strand starting at position 962 of SEQ ID NO: 1880243
ccuacugacuugcuugaaa

SEQ ID NO: 1952719 - RNA, 19 nt, Artificial Sequence
  Description of Artificial Sequence: Synthetic oligonucleotide
  Antisense strand to SEQ ID NO: 1952718
uuucaagcaagucaguagg

SEQ ID NO: 1952720 - RNA, 19 nt, Artificial Sequence
  Description of Artificial Sequence: Synthetic oligonucleotide
  Sense strand starting at position 1125 of SEQ ID NO: 1880243
ucacuuagagcuuggagga

SEQ ID NO: 1952721 - RNA, 19 nt, Artificial Sequence
  Description of Artificial Sequence: Synthetic oligonucleotide
  Antisense strand to SEQ ID NO: 1952720
uccuccaagcucuaaguga

SEQ ID NO: 1952722 - RNA, 19 nt, Artificial Sequence
  Description of Artificial Sequence: Synthetic oligonucleotide
  Sense strand starting at position 1126 of SEQ ID NO: 1880243
cacuuagagcuuggaggaa

SEQ ID NO: 1952723 - RNA, 19 nt, Artificial Sequence
  Description of Artificial Sequence: Synthetic oligonucleotide
  Antisense strand to SEQ ID NO: 1952722
uuccuccaagcucuaagug

SEQ ID NO: 1952724 - RNA, 19 nt, Artificial Sequence
  Description of Artificial Sequence: Synthetic oligonucleotide
  Sense strand starting at position 1146 of SEQ ID NO: 1880243
aagguuuacuggcugggaa

SEQ ID NO: 1952725 - RNA, 19 nt, Artificial Sequence
  Description of Artificial Sequence: Synthetic oligonucleotide
  Antisense strand to SEQ ID NO: 1952724
uucccagccaguaaaccuu

SEQ ID NO: 1952726 - RNA, 19 nt, Artificial Sequence
  Description of Artificial Sequence: Synthetic oligonucleotide
  Sense strand starting at position 1392 of SEQ ID NO: 1880243
agggaucccugcuuugaag

SEQ ID NO: 1952727 - RNA, 19 nt, Artificial Sequence
  Description of Artificial Sequence: Synthetic oligonucleotide
  Antisense strand to SEQ ID NO: 1952726
cuucaaagcagggaucccu

SEQ ID NO: 1952728 - RNA, 19 nt, Artificial Sequence
  Description of Artificial Sequence: Synthetic oligonucleotide
  Sense strand starting at position 1394 of SEQ ID NO: 1880243
ggaucccugcuuugaagaa

SEQ ID NO: 1952729 - RNA, 19 nt, Artificial Sequence
  Description of Artificial Sequence: Synthetic oligonucleotide
  Antisense strand to SEQ ID NO: 1952728
uucuucaaagcagggaucc

SEQ ID NO: 1952730 - RNA, 19 nt, Artificial Sequence
  Description of Artificial Sequence: Synthetic oligonucleotide
  Sense strand starting at position 1516 of SEQ ID NO: 1880243
aggaguggugcaagcugua

SEQ ID NO: 1952731 - RNA, 19 nt, Artificial Sequence
  Description of Artificial Sequence: Synthetic oligonucleotide
  Antisense strand to SEQ ID NO: 1952730
uacagcuugcaccacuccu

SEQ ID NO: 1952732 - RNA, 19 nt, Artificial Sequence
  Description of Artificial Sequence: Synthetic oligonucleotide
  Sense strand starting at position 1569 of SEQ ID NO: 1880243
acaggauacuuucuugguu

SEQ ID NO: 1952733 - RNA, 19 nt, Artificial Sequence
  Description of Artificial Sequence: Synthetic oligonucleotide
  Antisense strand to SEQ ID NO: 1952732
aaccaagaaaguauccugu

SEQ ID NO: 1952734 - RNA, 19 nt, Artificial Sequence
  Description of Artificial Sequence: Synthetic oligonucleotide
  Sense strand starting at position 1570 of SEQ ID NO: 1880243
caggauacuuucuugguua

SEQ ID NO: 1952735 - RNA, 19 nt, Artificial Sequence
  Description of Artificial Sequence: Synthetic oligonucleotide
  Antisense strand to SEQ ID NO: 1952734
uaaccaagaaaguauccug

SEQ ID NO: 1952736 - RNA, 19 nt, Artificial Sequence
  Description of Artificial Sequence: Synthetic oligonucleotide
  Sense strand starting at position 2126 of SEQ ID NO: 1880243
aaaggauaguccucugggu

SEQ ID NO: 1952737 - RNA, 19 nt, Artificial Sequence
  Description of Artificial Sequence: Synthetic oligonucleotide
  Antisense strand to SEQ ID NO: 1952736
acccagaggacuauccuuu

SEQ ID NO: 1952738 - RNA, 19 nt, Artificial Sequence
  Description of Artificial Sequence: Synthetic oligonucleotide
  Sense strand starting at position 2128 of SEQ ID NO: 1880243
aggauaguccucuggguca

SEQ ID NO: 1952739 - RNA, 19 nt, Artificial Sequence
  Description of Artificial Sequence: Synthetic oligonucleotide
  Antisense strand to SEQ ID NO: 1952738
ugacccagaggacuauccu

SEQ ID NO: 1952740 - RNA, 19 nt, Artificial Sequence
  Description of Artificial Sequence: Synthetic oligonucleotide
  Sense strand starting at position 2130 of SEQ ID NO: 1880243
gauaguccucugggucaga

SEQ ID NO: 1952741 - RNA, 19 nt, Artificial Sequence
  Description of Artificial Sequence: Synthetic oligonucleotide
  Antisense strand to SEQ ID NO: 1952740
ucugacccagaggacuauc

SEQ ID NO: 1952742 - RNA, 19 nt, Artificial Sequence
  Description of Artificial Sequence: Synthetic oligonucleotide
  Sense strand starting at position 2131 of SEQ ID NO: 1880243
auaguccucugggucagau

SEQ ID NO: 1952743 - RNA, 19 nt, Artificial Sequence
  Description of Artificial Sequence: Synthetic oligonucleotide
  Antisense strand to SEQ ID NO: 1952742
aucugacccagaggacuau

SEQ ID NO: 1952744 - RNA, 19 nt, Artificial Sequence
  Description of Artificial Sequence: Synthetic oligonucleotide
  Sense strand starting at position 2247 of SEQ ID NO: 1880243
uaguucuuuguguaaggau

SEQ ID NO: 1952745 - RNA, 19 nt, Artificial Sequence
  Description of Artificial Sequence: Synthetic oligonucleotide
  Antisense strand to SEQ ID NO: 1952744
auccuuacacaaagaacua

SEQ ID NO: 1952746 - RNA, 19 nt, Artificial Sequence
  Description of Artificial Sequence: Synthetic oligonucleotide
  Sense strand starting at position 2650 of SEQ ID NO: 1880243
ucaccuugucuggaugcua

SEQ ID NO: 1952747 - RNA, 19 nt, Artificial Sequence
  Description of Artificial Sequence: Synthetic oligonucleotide
  Antisense strand to SEQ ID NO: 1952746
uagcauccagacaagguga

SEQ ID NO: 1952748 - RNA, 19 nt, Artificial Sequence
  Description of Artificial Sequence: Synthetic oligonucleotide
  Sense strand starting at position 2767 of SEQ ID NO: 1880243
uuuauuaacauguggagag

SEQ ID NO: 1952749 - RNA, 19 nt, Artificial Sequence
  Description of Artificial Sequence: Synthetic oligonucleotide
  Antisense strand to SEQ ID NO: 1952748
cucuccacauguuaauaaa

SEQ ID NO: 1952750 - RNA, 19 nt, Artificial Sequence
  Description of Artificial Sequence: Synthetic oligonucleotide
  Sense strand starting at position 2815 of SEQ ID NO: 1880243
uuucucuguucuuugagga

SEQ ID NO: 1952751 - RNA, 19 nt, Artificial Sequence
  Description of Artificial Sequence: Synthetic oligonucleotide
  Antisense strand to SEQ ID NO: 1952750
uccucaaagaacagagaaa

SEQ ID NO: 1952752 - RNA, 19 nt, Artificial Sequence
  Description of Artificial Sequence: Synthetic oligonucleotide
  Sense strand starting at position 2866 of SEQ ID NO: 1880243
gaggauggauucucaagca

SEQ ID NO: 1952753 - RNA, 19 nt, Artificial Sequence
  Description of Artificial Sequence: Synthetic oligonucleotide
  Antisense strand to SEQ ID NO: 1952752
ugcuugagaauccauccuc

SEQ ID NO: 1952754 - RNA, 19 nt, Artificial Sequence
  Description of Artificial Sequence: Synthetic oligonucleotide
  Sense strand starting at position 2890 of SEQ ID NO: 1880243
acugaagacaaguggcauu

SEQ ID NO: 1952755 - RNA, 19 nt, Artificial Sequence
  Description of Artificial Sequence: Synthetic oligonucleotide
  Antisense strand to SEQ ID NO: 1952754
aaugccacuugucuucagu

SEQ ID NO: 1952756 - RNA, 19 nt, Artificial Sequence
  Description of Artificial Sequence: Synthetic oligonucleotide
  Sense strand starting at position 3569 of SEQ ID NO: 1880243
cacgccuggccagagaauu

SEQ ID NO: 1952757 - RNA, 19 nt, Artificial Sequence
  Description of Artificial Sequence: Synthetic oligonucleotide
  Antisense strand to SEQ ID NO: 1952756
aauucucuggccaggcgug

SEQ ID NO: 1952758 - RNA, 19 nt, Artificial Sequence
  Description of Artificial Sequence: Synthetic oligonucleotide
  Sense strand starting at position 3588 of SEQ ID NO: 1880243
uuuauuggcauagaagagu

SEQ ID NO: 1952759 - RNA, 19 nt, Artificial Sequence
  Description of Artificial Sequence: Synthetic oligonucleotide
  Antisense strand to SEQ ID NO: 1952758
acucuucuaugccaauaaa

SEQ ID NO: 1952760 - RNA, 19 nt, Artificial Sequence
  Description of Artificial Sequence: Synthetic oligonucleotide
  Sense strand starting at position 3616 of SEQ ID NO: 1880243
cugggaguucagggcauua

SEQ ID NO: 1952761 - RNA, 19 nt, Artificial Sequence
  Description of Artificial Sequence: Synthetic oligonucleotide
  Antisense strand to SEQ ID NO: 1952760
uaaugcccugaacucccag

SEQ ID NO: 1952762 - RNA, 19 nt, Artificial Sequence
  Description of Artificial Sequence: Synthetic oligonucleotide
  Sense strand starting at position 3628 of SEQ ID NO: 1880243
ggcauuagagcguaaagaa

SEQ ID NO: 1952763 - RNA, 19 nt, Artificial Sequence
  Description of Artificial Sequence: Synthetic oligonucleotide
  Antisense strand to SEQ ID NO: 1952762
uucuuuacgcucuaaugcc

SEQ ID NO: 1952764 - RNA, 19 nt, Artificial Sequence
  Description of Artificial Sequence: Synthetic oligonucleotide
  Sense strand starting at position 3738 of SEQ ID NO: 1880243
uugggauacuaaucccaug

SEQ ID NO: 1952765 - RNA, 19 nt, Artificial Sequence
  Description of Artificial Sequence: Synthetic oligonucleotide
  Antisense strand to SEQ ID NO: 1952764
caugggauuaguaucccaa

SEQ ID NO: 1952766 - RNA, 19 nt, Artificial Sequence
  Description of Artificial Sequence: Synthetic oligonucleotide
  Sense strand starting at position 3753 of SEQ ID NO: 1880243
caugauaacugggauuuag

SEQ ID NO: 1952767 - RNA, 19 nt, Artificial Sequence
  Description of Artificial Sequence: Synthetic oligonucleotide
  Antisense strand to SEQ ID NO: 1952766
cuaaaucccaguuaucaug

SEQ ID NO: 1952768 - RNA, 19 nt, Artificial Sequence
  Description of Artificial Sequence: Synthetic oligonucleotide
  Sense strand starting at position 3775 of SEQ ID NO: 1880243
ggucaaugauaugcucaag

SEQ ID NO: 1952769 - RNA, 19 nt, Artificial Sequence
  Description of Artificial Sequence: Synthetic oligonucleotide
  Antisense strand to SEQ ID NO: 1952768
cuugagcauaucauugacc

SEQ ID NO: 1952770 - RNA, 19 nt, Artificial Sequence
  Description of Artificial Sequence: Synthetic oligonucleotide
  Sense strand starting at position 3804 of SEQ ID NO: 1880243
aaguguuggacccagguuu

SEQ ID NO: 1952771 - RNA, 19 nt, Artificial Sequence
  Description of Artificial Sequence: Synthetic oligonucleotide
  Antisense strand to SEQ ID NO: 1952770
aaaccuggguccaacacuu

SEQ ID NO: 1952772 - RNA, 19 nt, Artificial Sequence
  Description of Artificial Sequence: Synthetic oligonucleotide
  Sense strand starting at position 3815 of SEQ ID NO: 1880243
ccagguuugcuugacagua

SEQ ID NO: 1952773 - RNA, 19 nt, Artificial Sequence
  Description of Artificial Sequence: Synthetic oligonucleotide
  Antisense strand to SEQ ID NO: 1952772
uacugucaagcaaaccugg

SEQ ID NO: 1952774 - RNA, 19 nt, Artificial Sequence
  Description of Artificial Sequence: Synthetic oligonucleotide
  Sense strand starting at position 3845 of SEQ ID NO: 1880243
uuaacauuguguucugaga

SEQ ID NO: 1952775 - RNA, 19 nt, Artificial Sequence
  Description of Artificial Sequence: Synthetic oligonucleotide
  Antisense strand to SEQ ID NO: 1952774
ucucagaacacaauguuaa

SEQ ID NO: 1952776 - RNA, 19 nt, Artificial Sequence
  Description of Artificial Sequence: Synthetic oligonucleotide
  Sense strand starting at position 3927 of SEQ ID NO: 1880243
acagaacuuugagaauaga

SEQ ID NO: 1952777 - RNA, 19 nt, Artificial Sequence
  Description of Artificial Sequence: Synthetic oligonucleotide
  Antisense strand to SEQ ID NO: 1952776
ucuauucucaaaguucugu

SEQ ID NO: 1952778 - RNA, 19 nt, Artificial Sequence
  Description of Artificial Sequence: Synthetic oligonucleotide
  Sense strand starting at position 3961 of SEQ ID NO: 1880243
ucaaaugcccacgagacau

SEQ ID NO: 1952779 - RNA, 19 nt, Artificial Sequence
  Description of Artificial Sequence: Synthetic oligonucleotide
  Antisense strand to SEQ ID NO: 1952778
augucucgugggcauuuga

SEQ ID NO: 1952780 - RNA, 19 nt, Artificial Sequence
  Description of Artificial Sequence: Synthetic oligonucleotide
  Sense strand starting at position 66 of SEQ ID NO: 1880244
cuggaugagccucaaucau

SEQ ID NO: 1952781 - RNA, 19 nt, Artificial Sequence
  Description of Artificial Sequence: Synthetic oligonucleotide
  Antisense strand to SEQ ID NO: 1952780
augauugaggcucauccag

SEQ ID NO: 1952782 - RNA, 19 nt, Artificial Sequence
  Description of Artificial Sequence: Synthetic oligonucleotide
  Sense strand starting at position 125 of SEQ ID NO: 1880244
uagacagugcuaugaagac

SEQ ID NO: 1952783 - RNA, 19 nt, Artificial Sequence
  Description of Artificial Sequence: Synthetic oligonucleotide
  Antisense strand to SEQ ID NO: 1952782
gucuucauagcacugucua

SEQ ID NO: 1952784 - RNA, 19 nt, Artificial Sequence
  Description of Artificial Sequence: Synthetic oligonucleotide
  Sense strand starting at position 146 of SEQ ID NO: 1880244
ccagcauagaguuagaggu

SEQ ID NO: 1952785 - RNA, 19 nt, Artificial Sequence
  Description of Artificial Sequence: Synthetic oligonucleotide
  Antisense strand to SEQ ID NO: 1952784
accucuaacucuaugcugg

SEQ ID NO: 1952786 - RNA, 19 nt, Artificial Sequence
  Description of Artificial Sequence: Synthetic oligonucleotide
  Sense strand starting at position 150 of SEQ ID NO: 1880244
cauagaguuagagguuaga

SEQ ID NO: 1952787 - RNA, 19 nt, Artificial Sequence
  Description of Artificial Sequence: Synthetic oligonucleotide
  Antisense strand to SEQ ID NO: 1952786
ucuaaccucuaacucuaug

SEQ ID NO: 1952788 - RNA, 19 nt, Artificial Sequence
  Description of Artificial Sequence: Synthetic oligonucleotide
  Sense strand starting at position 167 of SEQ ID NO: 1880244
gagaauuaggcagguaauc

SEQ ID NO: 1952789 - RNA, 19 nt, Artificial Sequence
  Description of Artificial Sequence: Synthetic oligonucleotide
  Antisense strand to SEQ ID NO: 1952788
gauuaccugccuaauucuc

SEQ ID NO: 1952790 - RNA, 19 nt, Artificial Sequence
  Description of Artificial Sequence: Synthetic oligonucleotide
  Sense strand starting at position 199 of SEQ ID NO: 1880244
ucucaaaggaggugacauu

SEQ ID NO: 1952791 - RNA, 19 nt, Artificial Sequence
  Description of Artificial Sequence: Synthetic oligonucleotide
  Antisense strand to SEQ ID NO: 1952790
aaugucaccuccuuugaga

SEQ ID NO: 1952792 - RNA, 19 nt, Artificial Sequence
  Description of Artificial Sequence: Synthetic oligonucleotide
  Sense strand starting at position 244 of SEQ ID NO: 1880244
ugggcuaagugacuaucua

SEQ ID NO: 1952793 - RNA, 19 nt, Artificial Sequence
  Description of Artificial Sequence: Synthetic oligonucleotide
  Antisense strand to SEQ ID NO: 1952792
uagauagucacuuagccca

SEQ ID NO: 1952794 - RNA, 19 nt, Artificial Sequence
  Description of Artificial Sequence: Synthetic oligonucleotide
  Sense strand starting at position 248 of SEQ ID NO: 1880244
cuaagugacuaucuagaag

SEQ ID NO: 1952795 - RNA, 19 nt, Artificial Sequence
  Description of Artificial Sequence: Synthetic oligonucleotide
  Antisense strand to SEQ ID NO: 1952794
cuucuagauagucacuuag

SEQ ID NO: 1952796 - RNA, 19 nt, Artificial Sequence
  Description of Artificial Sequence: Synthetic oligonucleotide
  Sense strand starting at position 602 of SEQ ID NO: 1880244
aaccaagguccauguguuu

SEQ ID NO: 1952797 - RNA, 19 nt, Artificial Sequence
  Description of Artificial Sequence: Synthetic oligonucleotide
  Antisense strand to SEQ ID NO: 1952796
aaacacauggaccuugguu

SEQ ID NO: 1952798 - RNA, 19 nt, Artificial Sequence
  Description of Artificial Sequence: Synthetic oligonucleotide
  Sense strand starting at position 1156 of SEQ ID NO: 1880244
ccauaugguguccaaacua

SEQ ID NO: 1952799 - RNA, 19 nt, Artificial Sequence
  Description of Artificial Sequence: Synthetic oligonucleotide
  Antisense strand to SEQ ID NO: 1952798
uaguuuggacaccauaugg

SEQ ID NO: 1952800 - RNA, 19 nt, Artificial Sequence
  Description of Artificial Sequence: Synthetic oligonucleotide
  Sense strand starting at position 1171 of SEQ ID NO: 1880244
acuauucccugggaaagaa

SEQ ID NO: 1952801 - RNA, 19 nt, Artificial Sequence
  Description of Artificial Sequence: Synthetic oligonucleotide
  Antisense strand to SEQ ID NO: 1952800
uucuuucccagggaauagu

SEQ ID NO: 1952802 - RNA, 19 nt, Artificial Sequence
  Description of Artificial Sequence: Synthetic oligonucleotide
  Sense strand starting at position 1325 of SEQ ID NO: 1880244
gacacuguagccuaagagu

SEQ ID NO: 1952803 - RNA, 19 nt, Artificial Sequence
  Description of Artificial Sequence: Synthetic oligonucleotide
  Antisense strand to SEQ ID NO: 1952802
acucuuaggcuacaguguc

SEQ ID NO: 1952804 - RNA, 19 nt, Artificial Sequence
  Description of Artificial Sequence: Synthetic oligonucleotide
  Sense strand starting at position 1338 of SEQ ID NO: 1880244
aagaguaaagccuaacagu

SEQ ID NO: 1952805 - RNA, 19 nt, Artificial Sequence
  Description of Artificial Sequence: Synthetic oligonucleotide
  Antisense strand to SEQ ID NO: 1952804
acuguuaggcuuuacucuu

SEQ ID NO: 1952806 - RNA, 19 nt, Artificial Sequence
  Description of Artificial Sequence: Synthetic oligonucleotide
  Sense strand starting at position 1399 of SEQ ID NO: 1880244
ccuaacuucccagguguaa

SEQ ID NO: 1952807 - RNA, 19 nt, Artificial Sequence
  Description of Artificial Sequence: Synthetic oligonucleotide
  Antisense strand to SEQ ID NO: 1952806
uuacaccugggaaguuagg

SEQ ID NO: 1952808 - RNA, 19 nt, Artificial Sequence
  Description of Artificial Sequence: Synthetic oligonucleotide
  Sense strand starting at position 1403 of SEQ ID NO: 1880244
acuucccagguguaaauau

SEQ ID NO: 1952809 - RNA, 19 nt, Artificial Sequence
  Description of Artificial Sequence: Synthetic oligonucleotide
  Antisense strand to SEQ ID NO: 1952808
auauuuacaccugggaagu

SEQ ID NO: 1952810 - RNA, 19 nt, Artificial Sequence
  Description of Artificial Sequence: Synthetic oligonucleotide
  Sense strand starting at position 1411 of SEQ ID NO: 1880244
gguguaaauaugggcaaau

SEQ ID NO: 1952811 - RNA, 19 nt, Artificial Sequence
  Description of Artificial Sequence: Synthetic oligonucleotide
  Antisense strand to SEQ ID NO: 1952810
auuugcccauauuuacacc

SEQ ID NO: 1952812 - RNA, 19 nt, Artificial Sequence
  Description of Artificial Sequence: Synthetic oligonucleotide
  Sense strand starting at position 1412 of SEQ ID NO: 1880244
guguaaauaugggcaaauu

SEQ ID NO: 1952813 - RNA, 19 nt, Artificial Sequence
  Description of Artificial Sequence: Synthetic oligonucleotide
  Antisense strand to SEQ ID NO: 1952812
aauuugcccauauuuacac

SEQ ID NO: 1952814 - RNA, 19 nt, Artificial Sequence
  Description of Artificial Sequence: Synthetic oligonucleotide
  Sense strand starting at position 1422 of SEQ ID NO: 1880244
gggcaaauuacguaagcuc

SEQ ID NO: 1952815 - RNA, 19 nt, Artificial Sequence
  Description of Artificial Sequence: Synthetic oligonucleotide
  Antisense strand to SEQ ID NO: 1952814
gagcuuacguaauuugccc

SEQ ID NO: 1952816 - RNA, 19 nt, Artificial Sequence
  Description of Artificial Sequence: Synthetic oligonucleotide
  Sense strand starting at position 1479 of SEQ ID NO: 1880244
ggcuacucugcagauuaac

SEQ ID NO: 1952817 - RNA, 19 nt, Artificial Sequence
  Description of Artificial Sequence: Synthetic oligonucleotide
  Antisense strand to SEQ ID NO: 1952816
guuaaucugcagaguagcc

SEQ ID NO: 1952818 - RNA, 19 nt, Artificial Sequence
  Description of Artificial Sequence: Synthetic oligonucleotide
  Sense strand starting at position 1543 of SEQ ID NO: 1880244
agagaaguuaaguggcagu

SEQ ID NO: 1952819 - RNA, 19 nt, Artificial Sequence
  Description of Artificial Sequence: Synthetic oligonucleotide
  Antisense strand to SEQ ID NO: 1952818
acugccacuuaacuucucu

SEQ ID NO: 1952820 - RNA, 19 nt, Artificial Sequence
  Description of Artificial Sequence: Synthetic oligonucleotide
  Sense strand starting at position 1554 of SEQ ID NO: 1880244
guggcaguuauugguauuu

SEQ ID NO: 1952821 - RNA, 19 nt, Artificial Sequence
  Description of Artificial Sequence: Synthetic oligonucleotide
  Antisense strand to SEQ ID NO: 1952820
aaauaccaauaacugccac

SEQ ID NO: 1952822 - RNA, 19 nt, Artificial Sequence
  Description of Artificial Sequence: Synthetic oligonucleotide
  Sense strand starting at position 2204 of SEQ ID NO: 1880244
ucgguaauccugggucaca

SEQ ID NO: 1952823 - RNA, 19 nt, Artificial Sequence
  Description of Artificial Sequence: Synthetic oligonucleotide
  Antisense strand to SEQ ID NO: 1952822
ugugacccaggauuaccga

SEQ ID NO: 1952824 - RNA, 19 nt, Artificial Sequence
  Description of Artificial Sequence: Synthetic oligonucleotide
  Sense strand starting at position 2447 of SEQ ID NO: 1880244
ccaagcauuucgcuagugu

SEQ ID NO: 1952825 - RNA, 19 nt, Artificial Sequence
  Description of Artificial Sequence: Synthetic oligonucleotide
  Antisense strand to SEQ ID NO: 1952824
acacuagcgaaaugcuugg

SEQ ID NO: 1952826 - RNA, 19 nt, Artificial Sequence
  Description of Artificial Sequence: Synthetic oligonucleotide
  Sense strand starting at position 2448 of SEQ ID NO: 1880244
caagcauuucgcuaguguc

SEQ ID NO: 1952827 - RNA, 19 nt, Artificial Sequence
  Description of Artificial Sequence: Synthetic oligonucleotide
  Antisense strand to SEQ ID NO: 1952826
gacacuagcgaaaugcuug

SEQ ID NO: 1952828 - RNA, 19 nt, Artificial Sequence
  Description of Artificial Sequence: Synthetic oligonucleotide
  Sense strand starting at position 2523 of SEQ ID NO: 1880244
uggccucgugauggaauau

SEQ ID NO: 1952829 - RNA, 19 nt, Artificial Sequence
  Description of Artificial Sequence: Synthetic oligonucleotide
  Antisense strand to SEQ ID NO: 1952828
auauuccaucacgaggcca

SEQ ID NO: 1952830 - RNA, 19 nt, Artificial Sequence
  Description of Artificial Sequence: Synthetic oligonucleotide
  Sense strand starting at position 2602 of SEQ ID NO: 1880244
acugccugguucccagaaa

SEQ ID NO: 1952831 - RNA, 19 nt, Artificial Sequence
  Description of Artificial Sequence: Synthetic oligonucleotide
  Antisense strand to SEQ ID NO: 1952830
uuucugggaaccaggcagu

SEQ ID NO: 1952832 - RNA, 19 nt, Artificial Sequence
  Description of Artificial Sequence: Synthetic oligonucleotide
  Sense strand starting at position 2870 of SEQ ID NO: 1880244
ggaagucuauagucccuga

SEQ ID NO: 1952833 - RNA, 19 nt, Artificial Sequence
  Description of Artificial Sequence: Synthetic oligonucleotide
  Antisense strand to SEQ ID NO: 1952832
ucagggacuauagacuucc

SEQ ID NO: 1952834 - RNA, 19 nt, Artificial Sequence
  Description of Artificial Sequence: Synthetic oligonucleotide
  Sense strand starting at position 2873 of SEQ ID NO: 1880244
agucuauagucccugacca

SEQ ID NO: 1952835 - RNA, 19 nt, Artificial Sequence
  Description of Artificial Sequence: Synthetic oligonucleotide
  Antisense strand to SEQ ID NO: 1952834
uggucagggacuauagacu

SEQ ID NO: 1952836 - RNA, 19 nt, Artificial Sequence
  Description of Artificial Sequence: Synthetic oligonucleotide
  Sense strand starting at position 2875 of SEQ ID NO: 1880244
ucuauagucccugaccaca

SEQ ID NO: 1952837 - RNA, 19 nt, Artificial Sequence
  Description of Artificial Sequence: Synthetic oligonucleotide
  Antisense strand to SEQ ID NO: 1952836
uguggucagggacuauaga

SEQ ID NO: 1952838 - RNA, 19 nt, Artificial Sequence
  Description of Artificial Sequence: Synthetic oligonucleotide
  Sense strand starting at position 2925 of SEQ ID NO: 1880244
gcuggucaacucugaggaa

SEQ ID NO: 1952839 - RNA, 19 nt, Artificial Sequence
  Description of Artificial Sequence: Synthetic oligonucleotide
  Antisense strand to SEQ ID NO: 1952838
uuccucagaguugaccagc

SEQ ID NO: 1952840 - RNA, 19 nt, Artificial Sequence
  Description of Artificial Sequence: Synthetic oligonucleotide
  Sense strand starting at position 3210 of SEQ ID NO: 1880244
cucuccauccuguguaaug

SEQ ID NO: 1952841 - RNA, 19 nt, Artificial Sequence
  Description of Artificial Sequence: Synthetic oligonucleotide
  Antisense strand to SEQ ID NO: 1952840
cauuacacaggauggagag

SEQ ID NO: 1952842 - RNA, 19 nt, Artificial Sequence
  Description of Artificial Sequence: Synthetic oligonucleotide
  Sense strand starting at position 3350 of SEQ ID NO: 1880244
ucugcauucccaggacaga

SEQ ID NO: 1952843 - RNA, 19 nt, Artificial Sequence
  Description of Artificial Sequence: Synthetic oligonucleotide
  Antisense strand to SEQ ID NO: 1952842
ucuguccugggaaugcaga

SEQ ID NO: 1952844 - RNA, 19 nt, Artificial Sequence
  Description of Artificial Sequence: Synthetic oligonucleotide
  Sense strand starting at position 3628 of SEQ ID NO: 1880244
cagugucauuaguccugaa

SEQ ID NO: 1952845 - RNA, 19 nt, Artificial Sequence
  Description of Artificial Sequence: Synthetic oligonucleotide
  Antisense strand to SEQ ID NO: 1952844
uucaggacuaaugacacug

SEQ ID NO: 1952846 - RNA, 19 nt, Artificial Sequence
  Description of Artificial Sequence: Synthetic oligonucleotide
  Sense strand starting at position 3632 of SEQ ID NO: 1880244
gucauuaguccugaaugaa

SEQ ID NO: 1952847 - RNA, 19 nt, Artificial Sequence
  Description of Artificial Sequence: Synthetic oligonucleotide
  Antisense strand to SEQ ID NO: 1952846
uucauucaggacuaaugac

SEQ ID NO: 1952848 - RNA, 19 nt, Artificial Sequence
  Description of Artificial Sequence: Synthetic oligonucleotide
  Sense strand starting at position 3665 of SEQ ID NO: 1880244
gccaucucagguugaucua

SEQ ID NO: 1952849 - RNA, 19 nt, Artificial Sequence
  Description of Artificial Sequence: Synthetic oligonucleotide
  Antisense strand to SEQ ID NO: 1952848
uagaucaaccugagauggc

SEQ ID NO: 1952850 - RNA, 19 nt, Artificial Sequence
  Description of Artificial Sequence: Synthetic oligonucleotide
  Sense strand starting at position 3666 of SEQ ID NO: 1880244
ccaucucagguugaucuau

SEQ ID NO: 1952851 - RNA, 19 nt, Artificial Sequence
  Description of Artificial Sequence: Synthetic oligonucleotide
  Antisense strand to SEQ ID NO: 1952850
auagaucaaccugagaugg

SEQ ID NO: 1952852 - RNA, 19 nt, Artificial Sequence
  Description of Artificial Sequence: Synthetic oligonucleotide
  Sense strand starting at position 3668 of SEQ ID NO: 1880244
aucucagguugaucuauau

SEQ ID NO: 1952853 - RNA, 19 nt, Artificial Sequence
  Description of Artificial Sequence: Synthetic oligonucleotide
  Antisense strand to SEQ ID NO: 1952852
auauagaucaaccugagau

SEQ ID NO: 1952854 - RNA, 19 nt, Artificial Sequence
  Description of Artificial Sequence: Synthetic oligonucleotide
  Sense strand starting at position 3697 of SEQ ID NO: 1880244
ucacucagauagguucuua

SEQ ID NO: 1952855 - RNA, 19 nt, Artificial Sequence
  Description of Artificial Sequence: Synthetic oligonucleotide
  Antisense strand to SEQ ID NO: 1952854
uaagaaccuaucugaguga

SEQ ID NO: 1952856 - RNA, 19 nt, Artificial Sequence
  Description of Artificial Sequence: Synthetic oligonucleotide
  Sense strand starting at position 3701 of SEQ ID NO: 1880244
ucagauagguucuuaaagg

SEQ ID NO: 1952857 - RNA, 19 nt, Artificial Sequence
  Description of Artificial Sequence: Synthetic oligonucleotide
  Antisense strand to SEQ ID NO: 1952856
ccuuuaagaaccuaucuga

SEQ ID NO: 1952858 - RNA, 19 nt, Artificial Sequence
  Description of Artificial Sequence: Synthetic oligonucleotide
  Sense strand starting at position 3863 of SEQ ID NO: 1880244
aaaggcuguucuguuauga

SEQ ID NO: 1952859 - RNA, 19 nt, Artificial Sequence
  Description of Artificial Sequence: Synthetic oligonucleotide
  Antisense strand to SEQ ID NO: 1952858
ucauaacagaacagccuuu

SEQ ID NO: 1952860 - RNA, 19 nt, Artificial Sequence
  Description of Artificial Sequence: Synthetic oligonucleotide
  Sense strand starting at position 50 of SEQ ID NO: 1880245
gacagaugccucugaccag

SEQ ID NO: 1952861 - RNA, 19 nt, Artificial Sequence
  Description of Artificial Sequence: Synthetic oligonucleotide
  Antisense strand to SEQ ID NO: 1952860
cuggucagaggcaucuguc

SEQ ID NO: 1952862 - RNA, 19 nt, Artificial Sequence
  Description of Artificial Sequence: Synthetic oligonucleotide
  Sense strand starting at position 54 of SEQ ID NO: 1880245
gaugccucugaccagugau

SEQ ID NO: 1952863 - RNA, 19 nt, Artificial Sequence
  Description of Artificial Sequence: Synthetic oligonucleotide
  Antisense strand to SEQ ID NO: 1952862
aucacuggucagaggcauc

SEQ ID NO: 1952864 - RNA, 19 nt, Artificial Sequence
  Description of Artificial Sequence: Synthetic oligonucleotide
  Sense strand starting at position 57 of SEQ ID NO: 1880245
gccucugaccagugaugga

SEQ ID NO: 1952865 - RNA, 19 nt, Artificial Sequence
  Description of Artificial Sequence: Synthetic oligonucleotide
  Antisense strand to SEQ ID NO: 1952864
uccaucacuggucagaggc

SEQ ID NO: 1952866 - RNA, 19 nt, Artificial Sequence
  Description of Artificial Sequence: Synthetic oligonucleotide
  Sense strand starting at position 91 of SEQ ID NO: 1880245
ugaugaauagcucagcguu

SEQ ID NO: 1952867 - RNA, 19 nt, Artificial Sequence
  Description of Artificial Sequence: Synthetic oligonucleotide
  Antisense strand to SEQ ID NO: 1952866
aacgcugagcuauucauca

SEQ ID NO: 1952868 - RNA, 19 nt, Artificial Sequence
  Description of Artificial Sequence: Synthetic oligonucleotide
  Sense strand starting at position 1430 of SEQ ID NO: 1880245
acacgucccucuucucaua

SEQ ID NO: 1952869 - RNA, 19 nt, Artificial Sequence
  Description of Artificial Sequence: Synthetic oligonucleotide
  Antisense strand to SEQ ID NO: 1952868
uaugagaagagggacgugu

SEQ ID NO: 1952870 - RNA, 19 nt, Artificial Sequence
  Description of Artificial Sequence: Synthetic oligonucleotide
  Sense strand starting at position 2062 of SEQ ID NO: 1880245
ggagccauuucuuacauuc

SEQ ID NO: 1952871 - RNA, 19 nt, Artificial Sequence
  Description of Artificial Sequence: Synthetic oligonucleotide
  Antisense strand to SEQ ID NO: 1952870
gaauguaagaaauggcucc

SEQ ID NO: 1952872 - RNA, 19 nt, Artificial Sequence
  Description of Artificial Sequence: Synthetic oligonucleotide
  Sense strand starting at position 2148 of SEQ ID NO: 1880245
ccugguugggagcacuaaa

SEQ ID NO: 1952873 - RNA, 19 nt, Artificial Sequence
  Description of Artificial Sequence: Synthetic oligonucleotide
  Antisense strand to SEQ ID NO: 1952872
uuuagugcucccaaccagg

SEQ ID NO: 1952874 - RNA, 19 nt, Artificial Sequence
  Description of Artificial Sequence: Synthetic oligonucleotide
  Sense strand starting at position 2209 of SEQ ID NO: 1880245
aggaacgugcacuagagau

SEQ ID NO: 1952875 - RNA, 19 nt, Artificial Sequence
  Description of Artificial Sequence: Synthetic oligonucleotide
  Antisense strand to SEQ ID NO: 1952874
aucucuagugcacguuccu

SEQ ID NO: 1952876 - RNA, 19 nt, Artificial Sequence
  Description of Artificial Sequence: Synthetic oligonucleotide
  Sense strand starting at position 2211 of SEQ ID NO: 1880245
gaacgugcacuagagauga

SEQ ID NO: 1952877 - RNA, 19 nt, Artificial Sequence
  Description of Artificial Sequence: Synthetic oligonucleotide
  Antisense strand to SEQ ID NO: 1952876
ucaucucuagugcacguuc

SEQ ID NO: 1952878 - RNA, 19 nt, Artificial Sequence
  Description of Artificial Sequence: Synthetic oligonucleotide
  Sense strand starting at position 2213 of SEQ ID NO: 1880245
acgugcacuagagaugaaa

SEQ ID NO: 1952879 - RNA, 19 nt, Artificial Sequence
  Description of Artificial Sequence: Synthetic oligonucleotide
  Antisense strand to SEQ ID NO: 1952878
uuucaucucuagugcacgu

SEQ ID NO: 1952880 - RNA, 19 nt, Artificial Sequence
  Description of Artificial Sequence: Synthetic oligonucleotide
  Sense strand starting at position 2215 of SEQ ID NO: 1880245
gugcacuagagaugaaaga

SEQ ID NO: 1952881 - RNA, 19 nt, Artificial Sequence
  Description of Artificial Sequence: Synthetic oligonucleotide
  Antisense strand to SEQ ID NO: 1952880
ucuuucaucucuagugcac

SEQ ID NO: 1952882 - RNA, 19 nt, Artificial Sequence
  Description of Artificial Sequence: Synthetic oligonucleotide
  Sense strand starting at position 3034 of SEQ ID NO: 1880245
ucguguucucgcucacugu

SEQ ID NO: 1952883 - RNA, 19 nt, Artificial Sequence
  Description of Artificial Sequence: Synthetic oligonucleotide
  Antisense strand to SEQ ID NO: 1952882
acagugagcgagaacacga

SEQ ID NO: 1952884 - RNA, 19 nt, Artificial Sequence
  Description of Artificial Sequence: Synthetic oligonucleotide
  Sense strand starting at position 3176 of SEQ ID NO: 1880245
agaaucuugucuuuggcaa

SEQ ID NO: 1952885 - RNA, 19 nt, Artificial Sequence
  Description of Artificial Sequence: Synthetic oligonucleotide
  Antisense strand to SEQ ID NO: 1952884
uugccaaagacaagauucu

SEQ ID NO: 1952886 - RNA, 19 nt, Artificial Sequence
  Description of Artificial Sequence: Synthetic oligonucleotide
  Sense strand starting at position 3177 of SEQ ID NO: 1880245
gaaucuugucuuuggcaaa

SEQ ID NO: 1952887 - RNA, 19 nt, Artificial Sequence
  Description of Artificial Sequence: Synthetic oligonucleotide
  Antisense strand to SEQ ID NO: 1952886
uuugccaaagacaagauuc

SEQ ID NO: 1952888 - RNA, 19 nt, Artificial Sequence
  Description of Artificial Sequence: Synthetic oligonucleotide
  Sense strand starting at position 3207 of SEQ ID NO: 1880245
aaagaucuucccugagagu

SEQ ID NO: 1952889 - RNA, 19 nt, Artificial Sequence
  Description of Artificial Sequence: Synthetic oligonucleotide
  Antisense strand to SEQ ID NO: 1952888
acucucagggaagaucuuu

SEQ ID NO: 1952890 - RNA, 19 nt, Artificial Sequence
  Description of Artificial Sequence: Synthetic oligonucleotide
  Sense strand starting at position 3216 of SEQ ID NO: 1880245
cccugagaguaagugaaua

SEQ ID NO: 1952891 - RNA, 19 nt, Artificial Sequence
  Description of Artificial Sequence: Synthetic oligonucleotide
  Antisense strand to SEQ ID NO: 1952890
uauucacuuacucucaggg

SEQ ID NO: 1952892 - RNA, 19 nt, Artificial Sequence
  Description of Artificial Sequence: Synthetic oligonucleotide
  Sense strand starting at position 3231 of SEQ ID NO: 1880245
aauauuggagcuugaguau

SEQ ID NO: 1952893 - RNA, 19 nt, Artificial Sequence
  Description of Artificial Sequence: Synthetic oligonucleotide
  Antisense strand to SEQ ID NO: 1952892
auacucaagcuccaauauu

SEQ ID NO: 1952894 - RNA, 19 nt, Artificial Sequence
  Description of Artificial Sequence: Synthetic oligonucleotide
  Sense strand starting at position 3273 of SEQ ID NO: 1880245
ccugaaacaugauauugaa

SEQ ID NO: 1952895 - RNA, 19 nt, Artificial Sequence
  Description of Artificial Sequence: Synthetic oligonucleotide
  Antisense strand to SEQ ID NO: 1952894
uucaauaucauguuucagg

SEQ ID NO: 1952896 - RNA, 19 nt, Artificial Sequence
  Description of Artificial Sequence: Synthetic oligonucleotide
  Sense strand starting at position 3292 of SEQ ID NO: 1880245
uuuccagaugcuuagguga

SEQ ID NO: 1952897 - RNA, 19 nt, Artificial Sequence
  Description of Artificial Sequence: Synthetic oligonucleotide
  Antisense strand to SEQ ID NO: 1952896
ucaccuaagcaucuggaaa

SEQ ID NO: 1952898 - RNA, 19 nt, Artificial Sequence
  Description of Artificial Sequence: Synthetic oligonucleotide
  Sense strand starting at position 3306 of SEQ ID NO: 1880245
ggugaaagguuguuaagga

SEQ ID NO: 1952899 - RNA, 19 nt, Artificial Sequence
  Description of Artificial Sequence: Synthetic oligonucleotide
  Antisense strand to SEQ ID NO: 1952898
uccuuaacaaccuuucacc

SEQ ID NO: 1952900 - RNA, 19 nt, Artificial Sequence
  Description of Artificial Sequence: Synthetic oligonucleotide
  Sense strand starting at position 3335 of SEQ ID NO: 1880245
uacugaagcugucugaaga

SEQ ID NO: 1952901 - RNA, 19 nt, Artificial Sequence
  Description of Artificial Sequence: Synthetic oligonucleotide
  Antisense strand to SEQ ID NO: 1952900
ucuucagacagcuucagua

SEQ ID NO: 1952902 - RNA, 19 nt, Artificial Sequence
  Description of Artificial Sequence: Synthetic oligonucleotide
  Sense strand starting at position 3480 of SEQ ID NO: 1880245
gcaaauuugggcugauguu

SEQ ID NO: 1952903 - RNA, 19 nt, Artificial Sequence
  Description of Artificial Sequence: Synthetic oligonucleotide
  Antisense strand to SEQ ID NO: 1952902
aacaucagcccaaauuugc

SEQ ID NO: 1952904 - RNA, 19 nt, Artificial Sequence
  Description of Artificial Sequence: Synthetic oligonucleotide
  Sense strand starting at position 3524 of SEQ ID NO: 1880245
ccuuguucccaccagaaga

SEQ ID NO: 1952905 - RNA, 19 nt, Artificial Sequence
  Description of Artificial Sequence: Synthetic oligonucleotide
  Antisense strand to SEQ ID NO: 1952904
ucuucuggugggaacaagg

SEQ ID NO: 1952906 - RNA, 19 nt, Artificial Sequence
  Description of Artificial Sequence: Synthetic oligonucleotide
  Sense strand starting at position 3566 of SEQ ID NO: 1880245
ggaguucugaugugaaguu

SEQ ID NO: 1952907 - RNA, 19 nt, Artificial Sequence
  Description of Artificial Sequence: Synthetic oligonucleotide
  Antisense strand to SEQ ID NO: 1952906
aacuucacaucagaacucc

SEQ ID NO: 1952908 - RNA, 19 nt, Artificial Sequence
  Description of Artificial Sequence: Synthetic oligonucleotide
  Sense strand starting at position 3575 of SEQ ID NO: 1880245
augugaaguuaacucaaua

SEQ ID NO: 1952909 - RNA, 19 nt, Artificial Sequence
  Description of Artificial Sequence: Synthetic oligonucleotide
  Antisense strand to SEQ ID NO: 1952908
uauugaguuaacuucacau

SEQ ID NO: 1952910 - RNA, 19 nt, Artificial Sequence
  Description of Artificial Sequence: Synthetic oligonucleotide
  Sense strand starting at position 3602 of SEQ ID NO: 1880245
uucuacuuauuugagggaa

SEQ ID NO: 1952911 - RNA, 19 nt, Artificial Sequence
  Description of Artificial Sequence: Synthetic oligonucleotide
  Antisense strand to SEQ ID NO: 1952910
uucccucaaauaaguagaa

SEQ ID NO: 1952912 - RNA, 19 nt, Artificial Sequence
  Description of Artificial Sequence: Synthetic oligonucleotide
  Sense strand starting at position 3604 of SEQ ID NO: 1880245
cuacuuauuugagggaauu

SEQ ID NO: 1952913 - RNA, 19 nt, Artificial Sequence
  Description of Artificial Sequence: Synthetic oligonucleotide
  Antisense strand to SEQ ID NO: 1952912
aauucccucaaauaaguag

SEQ ID NO: 1952914 - RNA, 19 nt, Artificial Sequence
  Description of Artificial Sequence: Synthetic oligonucleotide
  Sense strand starting at position 3653 of SEQ ID NO: 1880245
uaucuauggcagcaggaau

SEQ ID NO: 1952915 - RNA, 19 nt, Artificial Sequence
  Description of Artificial Sequence: Synthetic oligonucleotide
  Antisense strand to SEQ ID NO: 1952914
auuccugcugccauagaua

SEQ ID NO: 1952916 - RNA, 19 nt, Artificial Sequence
  Description of Artificial Sequence: Synthetic oligonucleotide
  Sense strand starting at position 3691 of SEQ ID NO: 1880245
cuguuagauuauuuccugu

SEQ ID NO: 1952917 - RNA, 19 nt, Artificial Sequence
  Description of Artificial Sequence: Synthetic oligonucleotide
  Antisense strand to SEQ ID NO: 1952916
acaggaaauaaucuaacag

SEQ ID NO: 1952918 - RNA, 19 nt, Artificial Sequence
  Description of Artificial Sequence: Synthetic oligonucleotide
  Sense strand starting at position 3693 of SEQ ID NO: 1880245
guuagauuauuuccuguuu

SEQ ID NO: 1952919 - RNA, 19 nt, Artificial Sequence
  Description of Artificial Sequence: Synthetic oligonucleotide
  Antisense strand to SEQ ID NO: 1952918
aaacaggaaauaaucuaac

SEQ ID NO: 1952920 - RNA, 19 nt, Artificial Sequence
  Description of Artificial Sequence: Synthetic oligonucleotide
  Sense strand starting at position 3701 of SEQ ID NO: 1880245
auuuccuguuuggaauaau

SEQ ID NO: 1952921 - RNA, 19 nt, Artificial Sequence
  Description of Artificial Sequence: Synthetic oligonucleotide
  Antisense strand to SEQ ID NO: 1952920
auuauuccaaacaggaaau

SEQ ID NO: 1952922 - RNA, 19 nt, Artificial Sequence
  Description of Artificial Sequence: Synthetic oligonucleotide
  Sense strand starting at position 3704 of SEQ ID NO: 1880245
uccuguuuggaauaauucu

SEQ ID NO: 1952923 - RNA, 19 nt, Artificial Sequence
  Description of Artificial Sequence: Synthetic oligonucleotide
  Antisense strand to SEQ ID NO: 1952922
agaauuauuccaaacagga

SEQ ID NO: 1952924 - RNA, 19 nt, Artificial Sequence
  Description of Artificial Sequence: Synthetic oligonucleotide
  Sense strand starting at position 3730 of SEQ ID NO: 1880245
uugcucauguaaucaagaa

SEQ ID NO: 1952925 - RNA, 19 nt, Artificial Sequence
  Description of Artificial Sequence: Synthetic oligonucleotide
  Antisense strand to SEQ ID NO: 1952924
uucuugauuacaugagcaa

SEQ ID NO: 1952926 - RNA, 19 nt, Artificial Sequence
  Description of Artificial Sequence: Synthetic oligonucleotide
  Sense strand starting at position 3757 of SEQ ID NO: 1880245
ucaguuauuuauggagaau

SEQ ID NO: 1952927 - RNA, 19 nt, Artificial Sequence
  Description of Artificial Sequence: Synthetic oligonucleotide
  Antisense strand to SEQ ID NO: 1952926
auucuccauaaauaacuga

SEQ ID NO: 1952928 - RNA, 19 nt, Artificial Sequence
  Description of Artificial Sequence: Synthetic oligonucleotide
  Sense strand starting at position 3795 of SEQ ID NO: 1880245
aagugucaaggccagauua

SEQ ID NO: 1952929 - RNA, 19 nt, Artificial Sequence
  Description of Artificial Sequence: Synthetic oligonucleotide
  Antisense strand to SEQ ID NO: 1952928
uaaucuggccuugacacuu

SEQ ID NO: 1952930 - RNA, 19 nt, Artificial Sequence
  Description of Artificial Sequence: Synthetic oligonucleotide
  Sense strand starting at position 3797 of SEQ ID NO: 1880245
gugucaaggccagauuacu

SEQ ID NO: 1952931 - RNA, 19 nt, Artificial Sequence
  Description of Artificial Sequence: Synthetic oligonucleotide
  Antisense strand to SEQ ID NO: 1952930
aguaaucuggccuugacac

SEQ ID NO: 1952932 - RNA, 19 nt, Artificial Sequence
  Description of Artificial Sequence: Synthetic oligonucleotide
  Sense strand starting at position 3803 of SEQ ID NO: 1880245
aggccagauuacuuaagga

SEQ ID NO: 1952933 - RNA, 19 nt, Artificial Sequence
  Description of Artificial Sequence: Synthetic oligonucleotide
  Antisense strand to SEQ ID NO: 1952932
uccuuaaguaaucuggccu

SEQ ID NO: 1952934 - RNA, 19 nt, Artificial Sequence
  Description of Artificial Sequence: Synthetic oligonucleotide
  Sense strand starting at position 3822 of SEQ ID NO: 1880245
augccacgugcucagaaau

SEQ ID NO: 1952935 - RNA, 19 nt, Artificial Sequence
  Description of Artificial Sequence: Synthetic oligonucleotide
  Antisense strand to SEQ ID NO: 1952934
auuucugagcacguggcau

SEQ ID NO: 1952936 - RNA, 19 nt, Artificial Sequence
  Description of Artificial Sequence: Synthetic oligonucleotide
  Sense strand starting at position 3891 of SEQ ID NO: 1880245
cuaucaugguugcccuuaa

SEQ ID NO: 1952937 - RNA, 19 nt, Artificial Sequence
  Description of Artificial Sequence: Synthetic oligonucleotide
  Antisense strand to SEQ ID NO: 1952936
uuaagggcaaccaugauag

SEQ ID NO: 1952938 - RNA, 19 nt, Artificial Sequence
  Description of Artificial Sequence: Synthetic oligonucleotide
  Sense strand starting at position 3948 of SEQ ID NO: 1880245
ggcuuuacucugucgccua

SEQ ID NO: 1952939 - RNA, 19 nt, Artificial Sequence
  Description of Artificial Sequence: Synthetic oligonucleotide
  Antisense strand to SEQ ID NO: 1952938
uaggcgacagaguaaagcc

SEQ ID NO: 1952940 - RNA, 19 nt, Artificial Sequence
  Description of Artificial Sequence: Synthetic oligonucleotide
  Sense strand starting at position 46 of SEQ ID NO: 1880246
cucucucauugggauauau

SEQ ID NO: 1952941 - RNA, 19 nt, Artificial Sequence
  Description of Artificial Sequence: Synthetic oligonucleotide
  Antisense strand to SEQ ID NO: 1952940
auauaucccaaugagagag

SEQ ID NO: 1952942 - RNA, 19 nt, Artificial Sequence
  Description of Artificial Sequence: Synthetic oligonucleotide
  Sense strand starting at position 55 of SEQ ID NO: 1880246
ugggauauaugguaauaac

SEQ ID NO: 1952943 - RNA, 19 nt, Artificial Sequence
  Description of Artificial Sequence: Synthetic oligonucleotide
  Antisense strand to SEQ ID NO: 1952942
guuauuaccauauauccca

SEQ ID NO: 1952944 - RNA, 19 nt, Artificial Sequence
  Description of Artificial Sequence: Synthetic oligonucleotide
  Sense strand starting at position 58 of SEQ ID NO: 1880246
gauauaugguaauaacagu

SEQ ID NO: 1952945 - RNA, 19 nt, Artificial Sequence
  Description of Artificial Sequence: Synthetic oligonucleotide
  Antisense strand to SEQ ID NO: 1952944
acuguuauuaccauauauc

SEQ ID NO: 1952946 - RNA, 19 nt, Artificial Sequence
  Description of Artificial Sequence: Synthetic oligonucleotide
  Sense strand starting at position 91 of SEQ ID NO: 1880246
uuaaucuuugccugguagu

SEQ ID NO: 1952947 - RNA, 19 nt, Artificial Sequence
  Description of Artificial Sequence: Synthetic oligonucleotide
  Antisense strand to SEQ ID NO: 1952946
acuaccaggcaaagauuaa

SEQ ID NO: 1952948 - RNA, 19 nt, Artificial Sequence
  Description of Artificial Sequence: Synthetic oligonucleotide
  Sense strand starting at position 92 of SEQ ID NO: 1880246
uaaucuuugccugguaguu

SEQ ID NO: 1952949 - RNA, 19 nt, Artificial Sequence
  Description of Artificial Sequence: Synthetic oligonucleotide
  Antisense strand to SEQ ID NO: 1952948
aacuaccaggcaaagauua

SEQ ID NO: 1952950 - RNA, 19 nt, Artificial Sequence
  Description of Artificial Sequence: Synthetic oligonucleotide
  Sense strand starting at position 94 of SEQ ID NO: 1880246
aucuuugccugguaguuaa

SEQ ID NO: 1952951 - RNA, 19 nt, Artificial Sequence
  Description of Artificial Sequence: Synthetic oligonucleotide
  Antisense strand to SEQ ID NO: 1952950
uuaacuaccaggcaaagau

SEQ ID NO: 1952952 - RNA, 19 nt, Artificial Sequence
  Description of Artificial Sequence: Synthetic oligonucleotide
  Sense strand starting at position 97 of SEQ ID NO: 1880246
uuugccugguaguuaauaa

SEQ ID NO: 1952953 - RNA, 19 nt, Artificial Sequence
  Description of Artificial Sequence: Synthetic oligonucleotide
  Antisense strand to SEQ ID NO: 1952952
uuauuaacuaccaggcaaa

SEQ ID NO: 1952954 - RNA, 19 nt, Artificial Sequence
  Description of Artificial Sequence: Synthetic oligonucleotide
  Sense strand starting at position 101 of SEQ ID NO: 1880246
ccugguaguuaauaauuaa

SEQ ID NO: 1952955 - RNA, 19 nt, Artificial Sequence
  Description of Artificial Sequence: Synthetic oligonucleotide
  Antisense strand to SEQ ID NO: 1952954
uuaauuauuaacuaccagg

SEQ ID NO: 1952956 - RNA, 19 nt, Artificial Sequence
  Description of Artificial Sequence: Synthetic oligonucleotide
  Sense strand starting at position 278 of SEQ ID NO: 1880246
ucagcaacccuuuagguau

SEQ ID NO: 1952957 - RNA, 19 nt, Artificial Sequence
  Description of Artificial Sequence: Synthetic oligonucleotide
  Antisense strand to SEQ ID NO: 1952956
auaccuaaaggguugcuga

SEQ ID NO: 1952958 - RNA, 19 nt, Artificial Sequence
  Description of Artificial Sequence: Synthetic oligonucleotide
  Sense strand starting at position 284 of SEQ ID NO: 1880246
acccuuuagguauggacau

SEQ ID NO: 1952959 - RNA, 19 nt, Artificial Sequence
  Description of Artificial Sequence: Synthetic oligonucleotide
  Antisense strand to SEQ ID NO: 1952958
auguccauaccuaaagggu

SEQ ID NO: 1952960 - RNA, 19 nt, Artificial Sequence
  Description of Artificial Sequence: Synthetic oligonucleotide
  Sense strand starting at position 285 of SEQ ID NO: 1880246
cccuuuagguauggacauu

SEQ ID NO: 1952961 - RNA, 19 nt, Artificial Sequence
  Description of Artificial Sequence: Synthetic oligonucleotide
  Antisense strand to SEQ ID NO: 1952960
aauguccauaccuaaaggg

SEQ ID NO: 1952962 - RNA, 19 nt, Artificial Sequence
  Description of Artificial Sequence: Synthetic oligonucleotide
  Sense strand starting at position 351 of SEQ ID NO: 1880246
ggcccaaaguuguugaaug

SEQ ID NO: 1952963 - RNA, 19 nt, Artificial Sequence
  Description of Artificial Sequence: Synthetic oligonucleotide
  Antisense strand to SEQ ID NO: 1952962
cauucaacaacuuugggcc

SEQ ID NO: 1952964 - RNA, 19 nt, Artificial Sequence
  Description of Artificial Sequence: Synthetic oligonucleotide
  Sense strand starting at position 352 of SEQ ID NO: 1880246
gcccaaaguuguugaauga

SEQ ID NO: 1952965 - RNA, 19 nt, Artificial Sequence
  Description of Artificial Sequence: Synthetic oligonucleotide
  Antisense strand to SEQ ID NO: 1952964
ucauucaacaacuuugggc

SEQ ID NO: 1952966 - RNA, 19 nt, Artificial Sequence
  Description of Artificial Sequence: Synthetic oligonucleotide
  Sense strand starting at position 353 of SEQ ID NO: 1880246
cccaaaguuguugaaugau

SEQ ID NO: 1952967 - RNA, 19 nt, Artificial Sequence
  Description of Artificial Sequence: Synthetic oligonucleotide
  Antisense strand to SEQ ID NO: 1952966
aucauucaacaacuuuggg

SEQ ID NO: 1952968 - RNA, 19 nt, Artificial Sequence
  Description of Artificial Sequence: Synthetic oligonucleotide
  Sense strand starting at position 377 of SEQ ID NO: 1880246
cagugacuuugugacagau

SEQ ID NO: 1952969 - RNA, 19 nt, Artificial Sequence
  Description of Artificial Sequence: Synthetic oligonucleotide
  Antisense strand to SEQ ID NO: 1952968
aucugucacaaagucacug

SEQ ID NO: 1952970 - RNA, 19 nt, Artificial Sequence
  Description of Artificial Sequence: Synthetic oligonucleotide
  Sense strand starting at position 379 of SEQ ID NO: 1880246
gugacuuugugacagauua

SEQ ID NO: 1952971 - RNA, 19 nt, Artificial Sequence
  Description of Artificial Sequence: Synthetic oligonucleotide
  Antisense strand to SEQ ID NO: 1952970
uaaucugucacaaagucac

SEQ ID NO: 1952972 - RNA, 19 nt, Artificial Sequence
  Description of Artificial Sequence: Synthetic oligonucleotide
  Sense strand starting at position 399 of SEQ ID NO: 1880246
agagauaggugcuuagcau

SEQ ID NO: 1952973 - RNA, 19 nt, Artificial Sequence
  Description of Artificial Sequence: Synthetic oligonucleotide
  Antisense strand to SEQ ID NO: 1952972
augcuaagcaccuaucucu

SEQ ID NO: 1952974 - RNA, 19 nt, Artificial Sequence
  Description of Artificial Sequence: Synthetic oligonucleotide
  Sense strand starting at position 400 of SEQ ID NO: 1880246
gagauaggugcuuagcauu

SEQ ID NO: 1952975 - RNA, 19 nt, Artificial Sequence
  Description of Artificial Sequence: Synthetic oligonucleotide
  Antisense strand to SEQ ID NO: 1952974
aaugcuaagcaccuaucuc

SEQ ID NO: 1952976 - RNA, 19 nt, Artificial Sequence
  Description of Artificial Sequence: Synthetic oligonucleotide
  Sense strand starting at position 961 of SEQ ID NO: 1880246
gagcucagcucucauuaga

SEQ ID NO: 1952977 - RNA, 19 nt, Artificial Sequence
  Description of Artificial Sequence: Synthetic oligonucleotide
  Antisense strand to SEQ ID NO: 1952976
ucuaaugagagcugagcuc

SEQ ID NO: 1952978 - RNA, 19 nt, Artificial Sequence
  Description of Artificial Sequence: Synthetic oligonucleotide
  Sense strand starting at position 971 of SEQ ID NO: 1880246
cucauuagagccugcguaa

SEQ ID NO: 1952979 - RNA, 19 nt, Artificial Sequence
  Description of Artificial Sequence: Synthetic oligonucleotide
  Antisense strand to SEQ ID NO: 1952978
uuacgcaggcucuaaugag

SEQ ID NO: 1952980 - RNA, 19 nt, Artificial Sequence
  Description of Artificial Sequence: Synthetic oligonucleotide
  Sense strand starting at position 1017 of SEQ ID NO: 1880246
gacagaugccucugaccag

SEQ ID NO: 1952981 - RNA, 19 nt, Artificial Sequence
  Description of Artificial Sequence: Synthetic oligonucleotide
  Antisense strand to SEQ ID NO: 1952980
cuggucagaggcaucuguc

SEQ ID NO: 1952982 - RNA, 19 nt, Artificial Sequence
  Description of Artificial Sequence: Synthetic oligonucleotide
  Sense strand starting at position 1021 of SEQ ID NO: 1880246
gaugccucugaccagugau

SEQ ID NO: 1952983 - RNA, 19 nt, Artificial Sequence
  Description of Artificial Sequence: Synthetic oligonucleotide
  Antisense strand to SEQ ID NO: 1952982
aucacuggucagaggcauc

SEQ ID NO: 1952984 - RNA, 19 nt, Artificial Sequence
  Description of Artificial Sequence: Synthetic oligonucleotide
  Sense strand starting at position 1024 of SEQ ID NO: 1880246
gccucugaccagugaugga

SEQ ID NO: 1952985 - RNA, 19 nt, Artificial Sequence
  Description of Artificial Sequence: Synthetic oligonucleotide
  Antisense strand to SEQ ID NO: 1952984
uccaucacuggucagaggc

SEQ ID NO: 1952986 - RNA, 19 nt, Artificial Sequence
  Description of Artificial Sequence: Synthetic oligonucleotide
  Sense strand starting at position 1049 of SEQ ID NO: 1880246
ccaucuuccugaugaauag

SEQ ID NO: 1952987 - RNA, 19 nt, Artificial Sequence
  Description of Artificial Sequence: Synthetic oligonucleotide
  Antisense strand to SEQ ID NO: 1952986
cuauucaucaggaagaugg

SEQ ID NO: 1952988 - RNA, 19 nt, Artificial Sequence
  Description of Artificial Sequence: Synthetic oligonucleotide
  Sense strand starting at position 1058 of SEQ ID NO: 1880246
ugaugaauagcucagcguu

SEQ ID NO: 1952989 - RNA, 19 nt, Artificial Sequence
  Description of Artificial Sequence: Synthetic oligonucleotide
  Antisense strand to SEQ ID NO: 1952988
aacgcugagcuauucauca

SEQ ID NO: 1952990 - RNA, 19 nt, Artificial Sequence
  Description of Artificial Sequence: Synthetic oligonucleotide
  Sense strand starting at position 1784 of SEQ ID NO: 1880246
ugccgugauuccucccgau

SEQ ID NO: 1952991 - RNA, 19 nt, Artificial Sequence
  Description of Artificial Sequence: Synthetic oligonucleotide
  Antisense strand to SEQ ID NO: 1952990
aucgggaggaaucacggca

SEQ ID NO: 1952992 - RNA, 19 nt, Artificial Sequence
  Description of Artificial Sequence: Synthetic oligonucleotide
  Sense strand starting at position 2397 of SEQ ID NO: 1880246
acacgucccucuucucaua

SEQ ID NO: 1952993 - RNA, 19 nt, Artificial Sequence
  Description of Artificial Sequence: Synthetic oligonucleotide
  Antisense strand to SEQ ID NO: 1952992
uaugagaagagggacgugu

SEQ ID NO: 1952994 - RNA, 19 nt, Artificial Sequence
  Description of Artificial Sequence: Synthetic oligonucleotide
  Sense strand starting at position 2547 of SEQ ID NO: 1880246
cgggcugcucccgggauua

SEQ ID NO: 1952995 - RNA, 19 nt, Artificial Sequence
  Description of Artificial Sequence: Synthetic oligonucleotide
  Antisense strand to SEQ ID NO: 1952994
uaaucccgggagcagcccg

SEQ ID NO: 1952996 - RNA, 19 nt, Artificial Sequence
  Description of Artificial Sequence: Synthetic oligonucleotide
  Sense strand starting at position 3029 of SEQ ID NO: 1880246
ggagccauuucuuacauuc

SEQ ID NO: 1952997 - RNA, 19 nt, Artificial Sequence
  Description of Artificial Sequence: Synthetic oligonucleotide
  Antisense strand to SEQ ID NO: 1952996
gaauguaagaaauggcucc

SEQ ID NO: 1952998 - RNA, 19 nt, Artificial Sequence
  Description of Artificial Sequence: Synthetic oligonucleotide
  Sense strand starting at position 3088 of SEQ ID NO: 1880246
gggauuaguuucggaggaa

SEQ ID NO: 1952999 - RNA, 19 nt, Artificial Sequence
  Description of Artificial Sequence: Synthetic oligonucleotide
  Antisense strand to SEQ ID NO: 1952998
uuccuccgaaacuaauccc

SEQ ID NO: 1953000 - RNA, 19 nt, Artificial Sequence
  Description of Artificial Sequence: Synthetic oligonucleotide
  Sense strand starting at position 3089 of SEQ ID NO: 1880246
ggauuaguuucggaggaaa

SEQ ID NO: 1953001 - RNA, 19 nt, Artificial Sequence
  Description of Artificial Sequence: Synthetic oligonucleotide
  Antisense strand to SEQ ID NO: 1953000
uuuccuccgaaacuaaucc

SEQ ID NO: 1953002 - RNA, 19 nt, Artificial Sequence
  Description of Artificial Sequence: Synthetic oligonucleotide
  Sense strand starting at position 3115 of SEQ ID NO: 1880246
ccugguugggagcacuaaa

SEQ ID NO: 1953003 - RNA, 19 nt, Artificial Sequence
  Description of Artificial Sequence: Synthetic oligonucleotide
  Antisense strand to SEQ ID NO: 1953002
uuuagugcucccaaccagg

SEQ ID NO: 1953004 - RNA, 19 nt, Artificial Sequence
  Description of Artificial Sequence: Synthetic oligonucleotide
  Sense strand starting at position 3176 of SEQ ID NO: 1880246
aggaacgugcacuagagau

SEQ ID NO: 1953005 - RNA, 19 nt, Artificial Sequence
  Description of Artificial Sequence: Synthetic oligonucleotide
  Antisense strand to SEQ ID NO: 1953004
aucucuagugcacguuccu

SEQ ID NO: 1953006 - RNA, 19 nt, Artificial Sequence
  Description of Artificial Sequence: Synthetic oligonucleotide
  Sense strand starting at position 3178 of SEQ ID NO: 1880246
gaacgugcacuagagauga

SEQ ID NO: 1953007 - RNA, 19 nt, Artificial Sequence
  Description of Artificial Sequence: Synthetic oligonucleotide
  Antisense strand to SEQ ID NO: 1953006
ucaucucuagugcacguuc

SEQ ID NO: 1953008 - RNA, 19 nt, Artificial Sequence
  Description of Artificial Sequence: Synthetic oligonucleotide
  Sense strand starting at position 3180 of SEQ ID NO: 1880246
acgugcacuagagaugaaa

SEQ ID NO: 1953009 - RNA, 19 nt, Artificial Sequence
  Description of Artificial Sequence: Synthetic oligonucleotide
  Antisense strand to SEQ ID NO: 1953008
uuucaucucuagugcacgu

SEQ ID NO: 1953010 - RNA, 19 nt, Artificial Sequence
  Description of Artificial Sequence: Synthetic oligonucleotide
  Sense strand starting at position 3182 of SEQ ID NO: 1880246
gugcacuagagaugaaaga

SEQ ID NO: 1953011 - RNA, 19 nt, Artificial Sequence
  Description of Artificial Sequence: Synthetic oligonucleotide
  Antisense strand to SEQ ID NO: 1953010
ucuuucaucucuagugcac

SEQ ID NO: 1953012 - RNA, 19 nt, Artificial Sequence
  Description of Artificial Sequence: Synthetic oligonucleotide
  Sense strand starting at position 3911 of SEQ ID NO: 1880246
ugcucuuugcugggaugca

SEQ ID NO: 1953013 - RNA, 19 nt, Artificial Sequence
  Description of Artificial Sequence: Synthetic oligonucleotide
  Antisense strand to SEQ ID NO: 1953012
ugcaucccagcaaagagca

SEQ ID NO: 1953014 - RNA, 19 nt, Artificial Sequence
  Description of Artificial Sequence: Synthetic oligonucleotide
  Sense strand starting at position 73 of SEQ ID NO: 1880247
uuaaaugaauggcauaaga

SEQ ID NO: 1953015 - RNA, 19 nt, Artificial Sequence
  Description of Artificial Sequence: Synthetic oligonucleotide
  Antisense strand to SEQ ID NO: 1953014
ucuuaugccauucauuuaa

SEQ ID NO: 1953016 - RNA, 19 nt, Artificial Sequence
  Description of Artificial Sequence: Synthetic oligonucleotide
  Sense strand starting at position 113 of SEQ ID NO: 1880247
ucaggauagacucgaauuc

SEQ ID NO: 1953017 - RNA, 19 nt, Artificial Sequence
  Description of Artificial Sequence: Synthetic oligonucleotide
  Antisense strand to SEQ ID NO: 1953016
gaauucgagucuauccuga

SEQ ID NO: 1953018 - RNA, 19 nt, Artificial Sequence
  Description of Artificial Sequence: Synthetic oligonucleotide
  Sense strand starting at position 455 of SEQ ID NO: 1880247
ggcuauuuauuguaacucu

SEQ ID NO: 1953019 - RNA, 19 nt, Artificial Sequence
  Description of Artificial Sequence: Synthetic oligonucleotide
  Antisense strand to SEQ ID NO: 1953018
agaguuacaauaaauagcc

SEQ ID NO: 1953020 - RNA, 19 nt, Artificial Sequence
  Description of Artificial Sequence: Synthetic oligonucleotide
  Sense strand starting at position 555 of SEQ ID NO: 1880247
gcuuauuacucagcagauc

SEQ ID NO: 1953021 - RNA, 19 nt, Artificial Sequence
  Description of Artificial Sequence: Synthetic oligonucleotide
  Antisense strand to SEQ ID NO: 1953020
gaucugcugaguaauaagc

SEQ ID NO: 1953022 - RNA, 19 nt, Artificial Sequence
  Description of Artificial Sequence: Synthetic oligonucleotide
  Sense strand starting at position 566 of SEQ ID NO: 1880247
agcagaucguaaucugacu

SEQ ID NO: 1953023 - RNA, 19 nt, Artificial Sequence
  Description of Artificial Sequence: Synthetic oligonucleotide
  Antisense strand to SEQ ID NO: 1953022
agucagauuacgaucugcu

SEQ ID NO: 1953024 - RNA, 19 nt, Artificial Sequence
  Description of Artificial Sequence: Synthetic oligonucleotide
  Sense strand starting at position 571 of SEQ ID NO: 1880247
aucguaaucugacuauacu

SEQ ID NO: 1953025 - RNA, 19 nt, Artificial Sequence
  Description of Artificial Sequence: Synthetic oligonucleotide
  Antisense strand to SEQ ID NO: 1953024
aguauagucagauuacgau

SEQ ID NO: 1953026 - RNA, 19 nt, Artificial Sequence
  Description of Artificial Sequence: Synthetic oligonucleotide
  Sense strand starting at position 572 of SEQ ID NO: 1880247
ucguaaucugacuauacuu

SEQ ID NO: 1953027 - RNA, 19 nt, Artificial Sequence
  Description of Artificial Sequence: Synthetic oligonucleotide
  Antisense strand to SEQ ID NO: 1953026
aaguauagucagauuacga

SEQ ID NO: 1953028 - RNA, 19 nt, Artificial Sequence
  Description of Artificial Sequence: Synthetic oligonucleotide
  Sense strand starting at position 580 of SEQ ID NO: 1880247
ugacuauacuuacugagca

SEQ ID NO: 1953029 - RNA, 19 nt, Artificial Sequence
  Description of Artificial Sequence: Synthetic oligonucleotide
  Antisense strand to SEQ ID NO: 1953028
ugcucaguaaguauaguca

SEQ ID NO: 1953030 - RNA, 19 nt, Artificial Sequence
  Description of Artificial Sequence: Synthetic oligonucleotide
  Sense strand starting at position 594 of SEQ ID NO: 1880247
gagcauaugcuauaugcca

SEQ ID NO: 1953031 - RNA, 19 nt, Artificial Sequence
  Description of Artificial Sequence: Synthetic oligonucleotide
  Antisense strand to SEQ ID NO: 1953030
uggcauauagcauaugcuc

SEQ ID NO: 1953032 - RNA, 19 nt, Artificial Sequence
  Description of Artificial Sequence: Synthetic oligonucleotide
  Sense strand starting at position 609 of SEQ ID NO: 1880247
gccauacacuguccuaaug

SEQ ID NO: 1953033 - RNA, 19 nt, Artificial Sequence
  Description of Artificial Sequence: Synthetic oligonucleotide
  Antisense strand to SEQ ID NO: 1953032
cauuaggacaguguauggc

SEQ ID NO: 1953034 - RNA, 19 nt, Artificial Sequence
  Description of Artificial Sequence: Synthetic oligonucleotide
  Sense strand starting at position 621 of SEQ ID NO: 1880247
ccuaaugaugaaugugaau

SEQ ID NO: 1953035 - RNA, 19 nt, Artificial Sequence
  Description of Artificial Sequence: Synthetic oligonucleotide
  Antisense strand to SEQ ID NO: 1953034
auucacauucaucauuagg

SEQ ID NO: 1953036 - RNA, 19 nt, Artificial Sequence
  Description of Artificial Sequence: Synthetic oligonucleotide
  Sense strand starting at position 657 of SEQ ID NO: 1880247
accauaacucuaggaggua

SEQ ID NO: 1953037 - RNA, 19 nt, Artificial Sequence
  Description of Artificial Sequence: Synthetic oligonucleotide
  Antisense strand to SEQ ID NO: 1953036
uaccuccuagaguuauggu

SEQ ID NO: 1953038 - RNA, 19 nt, Artificial Sequence
  Description of Artificial Sequence: Synthetic oligonucleotide
  Sense strand starting at position 1206 of SEQ ID NO: 1880247
ugacuacgauguuuacauu

SEQ ID NO: 1953039 - RNA, 19 nt, Artificial Sequence
  Description of Artificial Sequence: Synthetic oligonucleotide
  Antisense strand to SEQ ID NO: 1953038
aauguaaacaucguaguca

SEQ ID NO: 1953040 - RNA, 19 nt, Artificial Sequence
  Description of Artificial Sequence: Synthetic oligonucleotide
  Sense strand starting at position 1214 of SEQ ID NO: 1880247
auguuuacauucucguaca

SEQ ID NO: 1953041 - RNA, 19 nt, Artificial Sequence
  Description of Artificial Sequence: Synthetic oligonucleotide
  Antisense strand to SEQ ID NO: 1953040
uguacgagaauguaaacau

SEQ ID NO: 1953042 - RNA, 19 nt, Artificial Sequence
  Description of Artificial Sequence: Synthetic oligonucleotide
  Sense strand starting at position 1238 of SEQ ID NO: 1880247
gcugcaacgagauguauua

SEQ ID NO: 1953043 - RNA, 19 nt, Artificial Sequence
  Description of Artificial Sequence: Synthetic oligonucleotide
  Antisense strand to SEQ ID NO: 1953042
uaauacaucucguugcagc

SEQ ID NO: 1953044 - RNA, 19 nt, Artificial Sequence
  Description of Artificial Sequence: Synthetic oligonucleotide
  Sense strand starting at position 1825 of SEQ ID NO: 1880247
ucgcgaaaccgagaugcuu

SEQ ID NO: 1953045 - RNA, 19 nt, Artificial Sequence
  Description of Artificial Sequence: Synthetic oligonucleotide
  Antisense strand to SEQ ID NO: 1953044
aagcaucucgguuucgcga

SEQ ID NO: 1953046 - RNA, 19 nt, Artificial Sequence
  Description of Artificial Sequence: Synthetic oligonucleotide
  Sense strand starting at position 1834 of SEQ ID NO: 1880247
cgagaugcuuccuugucuu

SEQ ID NO: 1953047 - RNA, 19 nt, Artificial Sequence
  Description of Artificial Sequence: Synthetic oligonucleotide
  Antisense strand to SEQ ID NO: 1953046
aagacaaggaagcaucucg

SEQ ID NO: 1953048 - RNA, 19 nt, Artificial Sequence
  Description of Artificial Sequence: Synthetic oligonucleotide
  Sense strand starting at position 2177 of SEQ ID NO: 1880247
uggguuacuuggguuuauu

SEQ ID NO: 1953049 - RNA, 19 nt, Artificial Sequence
  Description of Artificial Sequence: Synthetic oligonucleotide
  Antisense strand to SEQ ID NO: 1953048
aauaaacccaaguaaccca

SEQ ID NO: 1953050 - RNA, 19 nt, Artificial Sequence
  Description of Artificial Sequence: Synthetic oligonucleotide
  Sense strand starting at position 2187 of SEQ ID NO: 1880247
ggguuuauuucugacuuua

SEQ ID NO: 1953051 - RNA, 19 nt, Artificial Sequence
  Description of Artificial Sequence: Synthetic oligonucleotide
  Antisense strand to SEQ ID NO: 1953050
uaaagucagaaauaaaccc

SEQ ID NO: 1953052 - RNA, 19 nt, Artificial Sequence
  Description of Artificial Sequence: Synthetic oligonucleotide
  Sense strand starting at position 2238 of SEQ ID NO: 1880247
acacucgucugacuuuaua

SEQ ID NO: 1953053 - RNA, 19 nt, Artificial Sequence
  Description of Artificial Sequence: Synthetic oligonucleotide
  Antisense strand to SEQ ID NO: 1953052
uauaaagucagacgagugu

SEQ ID NO: 1953054 - RNA, 19 nt, Artificial Sequence
  Description of Artificial Sequence: Synthetic oligonucleotide
  Sense strand starting at position 2301 of SEQ ID NO: 1880247
uuaauauaugcucguuagg

SEQ ID NO: 1953055 - RNA, 19 nt, Artificial Sequence
  Description of Artificial Sequence: Synthetic oligonucleotide
  Antisense strand to SEQ ID NO: 1953054
ccuaacgagcauauauuaa

SEQ ID NO: 1953056 - RNA, 19 nt, Artificial Sequence
  Description of Artificial Sequence: Synthetic oligonucleotide
  Sense strand starting at position 2738 of SEQ ID NO: 1880247
cucguuacuuggguuaauu

SEQ ID NO: 1953057 - RNA, 19 nt, Artificial Sequence
  Description of Artificial Sequence: Synthetic oligonucleotide
  Antisense strand to SEQ ID NO: 1953056
aauuaacccaaguaacgag

SEQ ID NO: 1953058 - RNA, 19 nt, Artificial Sequence
  Description of Artificial Sequence: Synthetic oligonucleotide
  Sense strand starting at position 2747 of SEQ ID NO: 1880247
uggguuaauuucugacuuu

SEQ ID NO: 1953059 - RNA, 19 nt, Artificial Sequence
  Description of Artificial Sequence: Synthetic oligonucleotide
  Antisense strand to SEQ ID NO: 1953058
aaagucagaaauuaaccca

SEQ ID NO: 1953060 - RNA, 19 nt, Artificial Sequence
  Description of Artificial Sequence: Synthetic oligonucleotide
  Sense strand starting at position 2748 of SEQ ID NO: 1880247
ggguuaauuucugacuuua

SEQ ID NO: 1953061 - RNA, 19 nt, Artificial Sequence
  Description of Artificial Sequence: Synthetic oligonucleotide
  Antisense strand to SEQ ID NO: 1953060
uaaagucagaaauuaaccc

SEQ ID NO: 1953062 - RNA, 19 nt, Artificial Sequence
  Description of Artificial Sequence: Synthetic oligonucleotide
  Sense strand starting at position 3141 of SEQ ID NO: 1880247
uuaauauaugcucguugua

SEQ ID NO: 1953063 - RNA, 19 nt, Artificial Sequence
  Description of Artificial Sequence: Synthetic oligonucleotide
  Antisense strand to SEQ ID NO: 1953062
uacaacgagcauauauuaa

SEQ ID NO: 1953064 - RNA, 19 nt, Artificial Sequence
  Description of Artificial Sequence: Synthetic oligonucleotide
  Sense strand starting at position 3315 of SEQ ID NO: 1880247
ggagcuuaugccuggguau

SEQ ID NO: 1953065 - RNA, 19 nt, Artificial Sequence
  Description of Artificial Sequence: Synthetic oligonucleotide
  Antisense strand to SEQ ID NO: 1953064
auacccaggcauaagcucc

SEQ ID NO: 1953066 - RNA, 19 nt, Artificial Sequence
  Description of Artificial Sequence: Synthetic oligonucleotide
  Sense strand starting at position 3316 of SEQ ID NO: 1880247
gagcuuaugccuggguaua

SEQ ID NO: 1953067 - RNA, 19 nt, Artificial Sequence
  Description of Artificial Sequence: Synthetic oligonucleotide
  Antisense strand to SEQ ID NO: 1953066
uauacccaggcauaagcuc

SEQ ID NO: 1953068 - RNA, 19 nt, Artificial Sequence
  Description of Artificial Sequence: Synthetic oligonucleotide
  Sense strand starting at position 3344 of SEQ ID NO: 1880247
gcacaagagagcgagaauu

SEQ ID NO: 1953069 - RNA, 19 nt, Artificial Sequence
  Description of Artificial Sequence: Synthetic oligonucleotide
  Antisense strand to SEQ ID NO: 1953068
aauucucgcucucuugugc

SEQ ID NO: 1953070 - RNA, 19 nt, Artificial Sequence
  Description of Artificial Sequence: Synthetic oligonucleotide
  Sense strand starting at position 3352 of SEQ ID NO: 1880247
gagcgagaauucccugacu

SEQ ID NO: 1953071 - RNA, 19 nt, Artificial Sequence
  Description of Artificial Sequence: Synthetic oligonucleotide
  Antisense strand to SEQ ID NO: 1953070
agucagggaauucucgcuc

SEQ ID NO: 1953072 - RNA, 19 nt, Artificial Sequence
  Description of Artificial Sequence: Synthetic oligonucleotide
  Sense strand starting at position 3354 of SEQ ID NO: 1880247
gcgagaauucccugacucu

SEQ ID NO: 1953073 - RNA, 19 nt, Artificial Sequence
  Description of Artificial Sequence: Synthetic oligonucleotide
  Antisense strand to SEQ ID NO: 1953072
agagucagggaauucucgc

SEQ ID NO: 1953074 - RNA, 19 nt, Artificial Sequence
  Description of Artificial Sequence: Synthetic oligonucleotide
  Sense strand starting at position 3355 of SEQ ID NO: 1880247
cgagaauucccugacucuc

SEQ ID NO: 1953075 - RNA, 19 nt, Artificial Sequence
  Description of Artificial Sequence: Synthetic oligonucleotide
  Antisense strand to SEQ ID NO: 1953074
gagagucagggaauucucg

SEQ ID NO: 1953076 - RNA, 19 nt, Artificial Sequence
  Description of Artificial Sequence: Synthetic oligonucleotide
  Sense strand starting at position 3410 of SEQ ID NO: 1880247
cacggaaagugauaucaag

SEQ ID NO: 1953077 - RNA, 19 nt, Artificial Sequence
  Description of Artificial Sequence: Synthetic oligonucleotide
  Antisense strand to SEQ ID NO: 1953076
cuugauaucacuuuccgug

SEQ ID NO: 1953078 - RNA, 19 nt, Artificial Sequence
  Description of Artificial Sequence: Synthetic oligonucleotide
  Sense strand starting at position 3471 of SEQ ID NO: 1880247
ggguaugaaggucagcaua

SEQ ID NO: 1953079 - RNA, 19 nt, Artificial Sequence
  Description of Artificial Sequence: Synthetic oligonucleotide
  Antisense strand to SEQ ID NO: 1953078
uaugcugaccuucauaccc

SEQ ID NO: 1953080 - RNA, 19 nt, Artificial Sequence
  Description of Artificial Sequence: Synthetic oligonucleotide
  Sense strand starting at position 3567 of SEQ ID NO: 1880247
acaaucucggcucagaaua

SEQ ID NO: 1953081 - RNA, 19 nt, Artificial Sequence
  Description of Artificial Sequence: Synthetic oligonucleotide
  Antisense strand to SEQ ID NO: 1953080
uauucugagccgagauugu

SEQ ID NO: 1953082 - RNA, 19 nt, Artificial Sequence
  Description of Artificial Sequence: Synthetic oligonucleotide
  Sense strand starting at position 3575 of SEQ ID NO: 1880247
ggcucagaauagcuagaau

SEQ ID NO: 1953083 - RNA, 19 nt, Artificial Sequence
  Description of Artificial Sequence: Synthetic oligonucleotide
  Antisense strand to SEQ ID NO: 1953082
auucuagcuauucugagcc

SEQ ID NO: 1953084 - RNA, 19 nt, Artificial Sequence
  Description of Artificial Sequence: Synthetic oligonucleotide
  Sense strand starting at position 3811 of SEQ ID NO: 1880247
gccaaugauuaucuuuagu

SEQ ID NO: 1953085 - RNA, 19 nt, Artificial Sequence
  Description of Artificial Sequence: Synthetic oligonucleotide
  Antisense strand to SEQ ID NO: 1953084
acuaaagauaaucauuggc

SEQ ID NO: 1953086 - RNA, 19 nt, Artificial Sequence
  Description of Artificial Sequence: Synthetic oligonucleotide
  Sense strand starting at position 3884 of SEQ ID NO: 1880247
agcauuucuuccugagaug

SEQ ID NO: 1953087 - RNA, 19 nt, Artificial Sequence
  Description of Artificial Sequence: Synthetic oligonucleotide
  Antisense strand to SEQ ID NO: 1953086
caucucaggaagaaaugcu

SEQ ID NO: 1953088 - RNA, 19 nt, Artificial Sequence
  Description of Artificial Sequence: Synthetic oligonucleotide
  Sense strand starting at position 3887 of SEQ ID NO: 1880247
auuucuuccugagaugaga

SEQ ID NO: 1953089 - RNA, 19 nt, Artificial Sequence
  Description of Artificial Sequence: Synthetic oligonucleotide
  Antisense strand to SEQ ID NO: 1953088
ucucaucucaggaagaaau

SEQ ID NO: 1953090 - RNA, 19 nt, Artificial Sequence
  Description of Artificial Sequence: Synthetic oligonucleotide
  Sense strand starting at position 3910 of SEQ ID NO: 1880247
ccacaaccuugguuggaua

SEQ ID NO: 1953091 - RNA, 19 nt, Artificial Sequence
  Description of Artificial Sequence: Synthetic oligonucleotide
  Antisense strand to SEQ ID NO: 1953090
uauccaaccaagguugugg

SEQ ID NO: 1953092 - RNA, 19 nt, Artificial Sequence
  Description of Artificial Sequence: Synthetic oligonucleotide
  Sense strand starting at position 3912 of SEQ ID NO: 1880247
acaaccuugguuggauaau

SEQ ID NO: 1953093 - RNA, 19 nt, Artificial Sequence
  Description of Artificial Sequence: Synthetic oligonucleotide
  Antisense strand to SEQ ID NO: 1953092
auuauccaaccaagguugu

SEQ ID NO: 1953094 - RNA, 19 nt, Artificial Sequence
  Description of Artificial Sequence: Synthetic oligonucleotide
  Sense strand starting at position 46 of SEQ ID NO: 1880248
cugacauaucuaugagagu

SEQ ID NO: 1953095 - RNA, 19 nt, Artificial Sequence
  Description of Artificial Sequence: Synthetic oligonucleotide
  Antisense strand to SEQ ID NO: 1953094
acucucauagauaugucag

SEQ ID NO: 1953096 - RNA, 19 nt, Artificial Sequence
  Description of Artificial Sequence: Synthetic oligonucleotide
  Sense strand starting at position 52 of SEQ ID NO: 1880248
uaucuaugagagugcauga

SEQ ID NO: 1953097 - RNA, 19 nt, Artificial Sequence
  Description of Artificial Sequence: Synthetic oligonucleotide
  Antisense strand to SEQ ID NO: 1953096
ucaugcacucucauagaua

SEQ ID NO: 1953098 - RNA, 19 nt, Artificial Sequence
  Description of Artificial Sequence: Synthetic oligonucleotide
  Sense strand starting at position 63 of SEQ ID NO: 1880248
gugcaugacaaauguaaag

SEQ ID NO: 1953099 - RNA, 19 nt, Artificial Sequence
  Description of Artificial Sequence: Synthetic oligonucleotide
  Antisense strand to SEQ ID NO: 1953098
cuuuacauuugucaugcac

SEQ ID NO: 1953100 - RNA, 19 nt, Artificial Sequence
  Description of Artificial Sequence: Synthetic oligonucleotide
  Sense strand starting at position 106 of SEQ ID NO: 1880248
augauagagguuuguuuac

SEQ ID NO: 1953101 - RNA, 19 nt, Artificial Sequence
  Description of Artificial Sequence: Synthetic oligonucleotide
  Antisense strand to SEQ ID NO: 1953100
guaaacaaaccucuaucau

SEQ ID NO: 1953102 - RNA, 19 nt, Artificial Sequence
  Description of Artificial Sequence: Synthetic oligonucleotide
  Sense strand starting at position 112 of SEQ ID NO: 1880248
gagguuuguuuacccauga

SEQ ID NO: 1953103 - RNA, 19 nt, Artificial Sequence
  Description of Artificial Sequence: Synthetic oligonucleotide
  Antisense strand to SEQ ID NO: 1953102
ucauggguaaacaaaccuc

SEQ ID NO: 1953104 - RNA, 19 nt, Artificial Sequence
  Description of Artificial Sequence: Synthetic oligonucleotide
  Sense strand starting at position 116 of SEQ ID NO: 1880248
uuuguuuacccaugauaca

SEQ ID NO: 1953105 - RNA, 19 nt, Artificial Sequence
  Description of Artificial Sequence: Synthetic oligonucleotide
  Antisense strand to SEQ ID NO: 1953104
uguaucauggguaaacaaa

SEQ ID NO: 1953106 - RNA, 19 nt, Artificial Sequence
  Description of Artificial Sequence: Synthetic oligonucleotide
  Sense strand starting at position 117 of SEQ ID NO: 1880248
uuguuuacccaugauacag

SEQ ID NO: 1953107 - RNA, 19 nt, Artificial Sequence
  Description of Artificial Sequence: Synthetic oligonucleotide
  Antisense strand to SEQ ID NO: 1953106
cuguaucauggguaaacaa

SEQ ID NO: 1953108 - RNA, 19 nt, Artificial Sequence
  Description of Artificial Sequence: Synthetic oligonucleotide
  Sense strand starting at position 141 of SEQ ID NO: 1880248
ugaauccacugaucaaugu

SEQ ID NO: 1953109 - RNA, 19 nt, Artificial Sequence
  Description of Artificial Sequence: Synthetic oligonucleotide
  Antisense strand to SEQ ID NO: 1953108
acauugaucaguggauuca

SEQ ID NO: 1953110 - RNA, 19 nt, Artificial Sequence
  Description of Artificial Sequence: Synthetic oligonucleotide
  Sense strand starting at position 145 of SEQ ID NO: 1880248
uccacugaucaaugugaug

SEQ ID NO: 1953111 - RNA, 19 nt, Artificial Sequence
  Description of Artificial Sequence: Synthetic oligonucleotide
  Antisense strand to SEQ ID NO: 1953110
caucacauugaucagugga

SEQ ID NO: 1953112 - RNA, 19 nt, Artificial Sequence
  Description of Artificial Sequence: Synthetic oligonucleotide
  Sense strand starting at position 243 of SEQ ID NO: 1880248
gugguauggaacuaguagu

SEQ ID NO: 1953113 - RNA, 19 nt, Artificial Sequence
  Description of Artificial Sequence: Synthetic oligonucleotide
  Antisense strand to SEQ ID NO: 1953112
acuacuaguuccauaccac

SEQ ID NO: 1953114 - RNA, 19 nt, Artificial Sequence
  Description of Artificial Sequence: Synthetic oligonucleotide
  Sense strand starting at position 250 of SEQ ID NO: 1880248
ggaacuaguaguugccaga

SEQ ID NO: 1953115 - RNA, 19 nt, Artificial Sequence
  Description of Artificial Sequence: Synthetic oligonucleotide
  Antisense strand to SEQ ID NO: 1953114
ucuggcaacuacuaguucc

SEQ ID NO: 1953116 - RNA, 19 nt, Artificial Sequence
  Description of Artificial Sequence: Synthetic oligonucleotide
  Sense strand starting at position 429 of SEQ ID NO: 1880248
uaauuaaguuggguaucaa

SEQ ID NO: 1953117 - RNA, 19 nt, Artificial Sequence
  Description of Artificial Sequence: Synthetic oligonucleotide
  Antisense strand to SEQ ID NO: 1953116
uugauacccaacuuaauua

SEQ ID NO: 1953118 - RNA, 19 nt, Artificial Sequence
  Description of Artificial Sequence: Synthetic oligonucleotide
  Sense strand starting at position 611 of SEQ ID NO: 1880248
uguacagaauccuccuagu

SEQ ID NO: 1953119 - RNA, 19 nt, Artificial Sequence
  Description of Artificial Sequence: Synthetic oligonucleotide
  Antisense strand to SEQ ID NO: 1953118
acuaggaggauucuguaca

SEQ ID NO: 1953120 - RNA, 19 nt, Artificial Sequence
  Description of Artificial Sequence: Synthetic oligonucleotide
  Sense strand starting at position 647 of SEQ ID NO: 1880248
aguuuccggagauaaacuu

SEQ ID NO: 1953121 - RNA, 19 nt, Artificial Sequence
  Description of Artificial Sequence: Synthetic oligonucleotide
  Antisense strand to SEQ ID NO: 1953120
aaguuuaucuccggaaacu

SEQ ID NO: 1953122 - RNA, 19 nt, Artificial Sequence
  Description of Artificial Sequence: Synthetic oligonucleotide
  Sense strand starting at position 855 of SEQ ID NO: 1880248
ucaccuauuugagaaggaa

SEQ ID NO: 1953123 - RNA, 19 nt, Artificial Sequence
  Description of Artificial Sequence: Synthetic oligonucleotide
  Antisense strand to SEQ ID NO: 1953122
uuccuucucaaauagguga

SEQ ID NO: 1953124 - RNA, 19 nt, Artificial Sequence
  Description of Artificial Sequence: Synthetic oligonucleotide
  Sense strand starting at position 921 of SEQ ID NO: 1880248
aaggucuuucuuggaauau

SEQ ID NO: 1953125 - RNA, 19 nt, Artificial Sequence
  Description of Artificial Sequence: Synthetic oligonucleotide
  Antisense strand to SEQ ID NO: 1953124
auauuccaagaaagaccuu

SEQ ID NO: 1953126 - RNA, 19 nt, Artificial Sequence
  Description of Artificial Sequence: Synthetic oligonucleotide
  Sense strand starting at position 1016 of SEQ ID NO: 1880248
ucuauaagagccugcugaa

SEQ ID NO: 1953127 - RNA, 19 nt, Artificial Sequence
  Description of Artificial Sequence: Synthetic oligonucleotide
  Antisense strand to SEQ ID NO: 1953126
uucagcaggcucuuauaga

SEQ ID NO: 1953128 - RNA, 19 nt, Artificial Sequence
  Description of Artificial Sequence: Synthetic oligonucleotide
  Sense strand starting at position 1037 of SEQ ID NO: 1880248
agggcaauuuaguaaauau

SEQ ID NO: 1953129 - RNA, 19 nt, Artificial Sequence
  Description of Artificial Sequence: Synthetic oligonucleotide
  Antisense strand to SEQ ID NO: 1953128
auauuuacuaaauugcccu

SEQ ID NO: 1953130 - RNA, 19 nt, Artificial Sequence
  Description of Artificial Sequence: Synthetic oligonucleotide
  Sense strand starting at position 1069 of SEQ ID NO: 1880248
gguuuaacucaucauccag

SEQ ID NO: 1953131 - RNA, 19 nt, Artificial Sequence
  Description of Artificial Sequence: Synthetic oligonucleotide
  Antisense strand to SEQ ID NO: 1953130
cuggaugaugaguuaaacc

SEQ ID NO: 1953132 - RNA, 19 nt, Artificial Sequence
  Description of Artificial Sequence: Synthetic oligonucleotide
  Sense strand starting at position 1573 of SEQ ID NO: 1880248
gaggacuggucagaauuug

SEQ ID NO: 1953133 - RNA, 19 nt, Artificial Sequence
  Description of Artificial Sequence: Synthetic oligonucleotide
  Antisense strand to SEQ ID NO: 1953132
caaauucugaccaguccuc

SEQ ID NO: 1953134 - RNA, 19 nt, Artificial Sequence
  Description of Artificial Sequence: Synthetic oligonucleotide
  Sense strand starting at position 2073 of SEQ ID NO: 1880248
gcggguuugcugagaucug

SEQ ID NO: 1953135 - RNA, 19 nt, Artificial Sequence
  Description of Artificial Sequence: Synthetic oligonucleotide
  Antisense strand to SEQ ID NO: 1953134
cagaucucagcaaacccgc

SEQ ID NO: 1953136 - RNA, 19 nt, Artificial Sequence
  Description of Artificial Sequence: Synthetic oligonucleotide
  Sense strand starting at position 2216 of SEQ ID NO: 1880248
caccgagcucauuaaagga

SEQ ID NO: 1953137 - RNA, 19 nt, Artificial Sequence
  Description of Artificial Sequence: Synthetic oligonucleotide
  Antisense strand to SEQ ID NO: 1953136
uccuuuaaugagcucggug

SEQ ID NO: 1953138 - RNA, 19 nt, Artificial Sequence
  Description of Artificial Sequence: Synthetic oligonucleotide
  Sense strand starting at position 2370 of SEQ ID NO: 1880248
gggaaauguagauguucug

SEQ ID NO: 1953139 - RNA, 19 nt, Artificial Sequence
  Description of Artificial Sequence: Synthetic oligonucleotide
  Antisense strand to SEQ ID NO: 1953138
cagaacaucuacauuuccc

SEQ ID NO: 1953140 - RNA, 19 nt, Artificial Sequence
  Description of Artificial Sequence: Synthetic oligonucleotide
  Sense strand starting at position 2413 of SEQ ID NO: 1880248
gcguuuccacaguaauuug

SEQ ID NO: 1953141 - RNA, 19 nt, Artificial Sequence
  Description of Artificial Sequence: Synthetic oligonucleotide
  Antisense strand to SEQ ID NO: 1953140
caaauuacuguggaaacgc

SEQ ID NO: 1953142 - RNA, 19 nt, Artificial Sequence
  Description of Artificial Sequence: Synthetic oligonucleotide
  Sense strand starting at position 2546 of SEQ ID NO: 1880248
gcacguauugcccuuugca

SEQ ID NO: 1953143 - RNA, 19 nt, Artificial Sequence
  Description of Artificial Sequence: Synthetic oligonucleotide
  Antisense strand to SEQ ID NO: 1953142
ugcaaagggcaauacgugc

SEQ ID NO: 1953144 - RNA, 19 nt, Artificial Sequence
  Description of Artificial Sequence: Synthetic oligonucleotide
  Sense strand starting at position 2855 of SEQ ID NO: 1880248
gcuaguguucuagacuaga

SEQ ID NO: 1953145 - RNA, 19 nt, Artificial Sequence
  Description of Artificial Sequence: Synthetic oligonucleotide
  Antisense strand to SEQ ID NO: 1953144
ucuagucuagaacacuagc

SEQ ID NO: 1953146 - RNA, 19 nt, Artificial Sequence
  Description of Artificial Sequence: Synthetic oligonucleotide
  Sense strand starting at position 2878 of SEQ ID NO: 1880248
acaugcuuuccucacaguu

SEQ ID NO: 1953147 - RNA, 19 nt, Artificial Sequence
  Description of Artificial Sequence: Synthetic oligonucleotide
  Antisense strand to SEQ ID NO: 1953146
aacugugaggaaagcaugu

SEQ ID NO: 1953148 - RNA, 19 nt, Artificial Sequence
  Description of Artificial Sequence: Synthetic oligonucleotide
  Sense strand starting at position 2977 of SEQ ID NO: 1880248
uuagucucuucuuuggaca

SEQ ID NO: 1953149 - RNA, 19 nt, Artificial Sequence
  Description of Artificial Sequence: Synthetic oligonucleotide
  Antisense strand to SEQ ID NO: 1953148
uguccaaagaagagacuaa

SEQ ID NO: 1953150 - RNA, 19 nt, Artificial Sequence
  Description of Artificial Sequence: Synthetic oligonucleotide
  Sense strand starting at position 3020 of SEQ ID NO: 1880248
uguuauugacucuacgaug

SEQ ID NO: 1953151 - RNA, 19 nt, Artificial Sequence
  Description of Artificial Sequence: Synthetic oligonucleotide
  Antisense strand to SEQ ID NO: 1953150
caucguagagucaauaaca

SEQ ID NO: 1953152 - RNA, 19 nt, Artificial Sequence
  Description of Artificial Sequence: Synthetic oligonucleotide
  Sense strand starting at position 3025 of SEQ ID NO: 1880248
uugacucuacgauguuaaa

SEQ ID NO: 1953153 - RNA, 19 nt, Artificial Sequence
  Description of Artificial Sequence: Synthetic oligonucleotide
  Antisense strand to SEQ ID NO: 1953152
uuuaacaucguagagucaa

SEQ ID NO: 1953154 - RNA, 19 nt, Artificial Sequence
  Description of Artificial Sequence: Synthetic oligonucleotide
  Sense strand starting at position 3061 of SEQ ID NO: 1880248
acaauuaaacguugaugua

SEQ ID NO: 1953155 - RNA, 19 nt, Artificial Sequence
  Description of Artificial Sequence: Synthetic oligonucleotide
  Antisense strand to SEQ ID NO: 1953154
uacaucaacguuuaauugu

SEQ ID NO: 1953156 - RNA, 19 nt, Artificial Sequence
  Description of Artificial Sequence: Synthetic oligonucleotide
  Sense strand starting at position 3062 of SEQ ID NO: 1880248
caauuaaacguugauguag

SEQ ID NO: 1953157 - RNA, 19 nt, Artificial Sequence
  Description of Artificial Sequence: Synthetic oligonucleotide
  Antisense strand to SEQ ID NO: 1953156
cuacaucaacguuuaauug

SEQ ID NO: 1953158 - RNA, 19 nt, Artificial Sequence
  Description of Artificial Sequence: Synthetic oligonucleotide
  Sense strand starting at position 3162 of SEQ ID NO: 1880248
gugguaaggauugggaaau

SEQ ID NO: 1953159 - RNA, 19 nt, Artificial Sequence
  Description of Artificial Sequence: Synthetic oligonucleotide
  Antisense strand to SEQ ID NO: 1953158
auuucccaauccuuaccac

SEQ ID NO: 1953160 - RNA, 19 nt, Artificial Sequence
  Description of Artificial Sequence: Synthetic oligonucleotide
  Sense strand starting at position 3511 of SEQ ID NO: 1880248
ugcuguuucgaauaauuga

SEQ ID NO: 1953161 - RNA, 19 nt, Artificial Sequence
  Description of Artificial Sequence: Synthetic oligonucleotide
  Antisense strand to SEQ ID NO: 1953160
ucaauuauucgaaacagca

SEQ ID NO: 1953162 - RNA, 19 nt, Artificial Sequence
  Description of Artificial Sequence: Synthetic oligonucleotide
  Sense strand starting at position 3625 of SEQ ID NO: 1880248
aagcauaaacaguagugau

SEQ ID NO: 1953163 - RNA, 19 nt, Artificial Sequence
  Description of Artificial Sequence: Synthetic oligonucleotide
  Antisense strand to SEQ ID NO: 1953162
aucacuacuguuuaugcuu

SEQ ID NO: 1953164 - RNA, 19 nt, Artificial Sequence
  Description of Artificial Sequence: Synthetic oligonucleotide
  Sense strand starting at position 3629 of SEQ ID NO: 1880248
auaaacaguagugauguua

SEQ ID NO: 1953165 - RNA, 19 nt, Artificial Sequence
  Description of Artificial Sequence: Synthetic oligonucleotide
  Antisense strand to SEQ ID NO: 1953164
uaacaucacuacuguuuau

SEQ ID NO: 1953166 - RNA, 19 nt, Artificial Sequence
  Description of Artificial Sequence: Synthetic oligonucleotide
  Sense strand starting at position 3648 of SEQ ID NO: 1880248
aaguauauggguuagccaa

SEQ ID NO: 1953167 - RNA, 19 nt, Artificial Sequence
  Description of Artificial Sequence: Synthetic oligonucleotide
  Antisense strand to SEQ ID NO: 1953166
uuggcuaacccauauacuu

SEQ ID NO: 1953168 - RNA, 19 nt, Artificial Sequence
  Description of Artificial Sequence: Synthetic oligonucleotide
  Sense strand starting at position 3924 of SEQ ID NO: 1880248
guuggaguccgagaugauu

SEQ ID NO: 1953169 - RNA, 19 nt, Artificial Sequence
  Description of Artificial Sequence: Synthetic oligonucleotide
  Antisense strand to SEQ ID NO: 1953168
aaucaucucggacuccaac

SEQ ID NO: 1953170 - RNA, 19 nt, Artificial Sequence
  Description of Artificial Sequence: Synthetic oligonucleotide
  Sense strand starting at position 3932 of SEQ ID NO: 1880248
ccgagaugauuggcuaaac

SEQ ID NO: 1953171 - RNA, 19 nt, Artificial Sequence
  Description of Artificial Sequence: Synthetic oligonucleotide
  Antisense strand to SEQ ID NO: 1953170
guuuagccaaucaucucgg

SEQ ID NO: 1953172 - RNA, 19 nt, Artificial Sequence
  Description of Artificial Sequence: Synthetic oligonucleotide
  Sense strand starting at position 3933 of SEQ ID NO: 1880248
cgagaugauuggcuaaacu

SEQ ID NO: 1953173 - RNA, 19 nt, Artificial Sequence
  Description of Artificial Sequence: Synthetic oligonucleotide
  Antisense strand to SEQ ID NO: 1953172
aguuuagccaaucaucucg

SEQ ID NO: 1953174 - RNA, 19 nt, Artificial Sequence
  Description of Artificial Sequence: Synthetic oligonucleotide
  Sense strand starting at position 35 of SEQ ID NO: 1880249
gguggauaugcagggcuaa

SEQ ID NO: 1953175 - RNA, 19 nt, Artificial Sequence
  Description of Artificial Sequence: Synthetic oligonucleotide
  Antisense strand to SEQ ID NO: 1953174
uuagcccugcauauccacc

SEQ ID NO: 1953176 - RNA, 19 nt, Artificial Sequence
  Description of Artificial Sequence: Synthetic oligonucleotide
  Sense strand starting at position 46 of SEQ ID NO: 1880249
agggcuaaugcugaguuga

SEQ ID NO: 1953177 - RNA, 19 nt, Artificial Sequence
  Description of Artificial Sequence: Synthetic oligonucleotide
  Antisense strand to SEQ ID NO: 1953176
ucaacucagcauuagcccu

SEQ ID NO: 1953178 - RNA, 19 nt, Artificial Sequence
  Description of Artificial Sequence: Synthetic oligonucleotide
  Sense strand starting at position 48 of SEQ ID NO: 1880249
ggcuaaugcugaguugaau

SEQ ID NO: 1953179 - RNA, 19 nt, Artificial Sequence
  Description of Artificial Sequence: Synthetic oligonucleotide
  Antisense strand to SEQ ID NO: 1953178
auucaacucagcauuagcc

SEQ ID NO: 1953180 - RNA, 19 nt, Artificial Sequence
  Description of Artificial Sequence: Synthetic oligonucleotide
  Sense strand starting at position 51 of SEQ ID NO: 1880249
uaaugcugaguugaauuau

SEQ ID NO: 1953181 - RNA, 19 nt, Artificial Sequence
  Description of Artificial Sequence: Synthetic oligonucleotide
  Antisense strand to SEQ ID NO: 1953180
auaauucaacucagcauua

SEQ ID NO: 1953182 - RNA, 19 nt, Artificial Sequence
  Description of Artificial Sequence: Synthetic oligonucleotide
  Sense strand starting at position 478 of SEQ ID NO: 1880249
uuugauggucaagguguau

SEQ ID NO: 1953183 - RNA, 19 nt, Artificial Sequence
  Description of Artificial Sequence: Synthetic oligonucleotide
  Antisense strand to SEQ ID NO: 1953182
auacaccuugaccaucaaa

SEQ ID NO: 1953184 - RNA, 19 nt, Artificial Sequence
  Description of Artificial Sequence: Synthetic oligonucleotide
  Sense strand starting at position 582 of SEQ ID NO: 1880249
guuacugguguuucgcuua

SEQ ID NO: 1953185 - RNA, 19 nt, Artificial Sequence
  Description of Artificial Sequence: Synthetic oligonucleotide
  Antisense strand to SEQ ID NO: 1953184
uaagcgaaacaccaguaac

SEQ ID NO: 1953186 - RNA, 19 nt, Artificial Sequence
  Description of Artificial Sequence: Synthetic oligonucleotide
  Sense strand starting at position 626 of SEQ ID NO: 1880249
uauguugaauggcuuacaa

SEQ ID NO: 1953187 - RNA, 19 nt, Artificial Sequence
  Description of Artificial Sequence: Synthetic oligonucleotide
  Antisense strand to SEQ ID NO: 1953186
uuguaagccauucaacaua

SEQ ID NO: 1953188 - RNA, 19 nt, Artificial Sequence
  Description of Artificial Sequence: Synthetic oligonucleotide
  Sense strand starting at position 663 of SEQ ID NO: 1880249
cuguaacaaccguauaagu

SEQ ID NO: 1953189 - RNA, 19 nt, Artificial Sequence
  Description of Artificial Sequence: Synthetic oligonucleotide
  Antisense strand to SEQ ID NO: 1953188
acuuauacgguuguuacag

SEQ ID NO: 1953190 - RNA, 19 nt, Artificial Sequence
  Description of Artificial Sequence: Synthetic oligonucleotide
  Sense strand starting at position 665 of SEQ ID NO: 1880249
guaacaaccguauaaguaa

SEQ ID NO: 1953191 - RNA, 19 nt, Artificial Sequence
  Description of Artificial Sequence: Synthetic oligonucleotide
  Antisense strand to SEQ ID NO: 1953190
uuacuuauacgguuguuac

SEQ ID NO: 1953192 - RNA, 19 nt, Artificial Sequence
  Description of Artificial Sequence: Synthetic oligonucleotide
  Sense strand starting at position 752 of SEQ ID NO: 1880249
cccaaaucacaagguugau

SEQ ID NO: 1953193 - RNA, 19 nt, Artificial Sequence
  Description of Artificial Sequence: Synthetic oligonucleotide
  Antisense strand to SEQ ID NO: 1953192
aucaaccuugugauuuggg

SEQ ID NO: 1953194 - RNA, 19 nt, Artificial Sequence
  Description of Artificial Sequence: Synthetic oligonucleotide
  Sense strand starting at position 1022 of SEQ ID NO: 1880249
augaauuauugcucucuag

SEQ ID NO: 1953195 - RNA, 19 nt, Artificial Sequence
  Description of Artificial Sequence: Synthetic oligonucleotide
  Antisense strand to SEQ ID NO: 1953194
cuagagagcaauaauucau

SEQ ID NO: 1953196 - RNA, 19 nt, Artificial Sequence
  Description of Artificial Sequence: Synthetic oligonucleotide
  Sense strand starting at position 1026 of SEQ ID NO: 1880249
auuauugcucucuagcaga

SEQ ID NO: 1953197 - RNA, 19 nt, Artificial Sequence
  Description of Artificial Sequence: Synthetic oligonucleotide
  Antisense strand to SEQ ID NO: 1953196
ucugcuagagagcaauaau

SEQ ID NO: 1953198 - RNA, 19 nt, Artificial Sequence
  Description of Artificial Sequence: Synthetic oligonucleotide
  Sense strand starting at position 1031 of SEQ ID NO: 1880249
ugcucucuagcagaagagu

SEQ ID NO: 1953199 - RNA, 19 nt, Artificial Sequence
  Description of Artificial Sequence: Synthetic oligonucleotide
  Antisense strand to SEQ ID NO: 1953198
acucuucugcuagagagca

SEQ ID NO: 1953200 - RNA, 19 nt, Artificial Sequence
  Description of Artificial Sequence: Synthetic oligonucleotide
  Sense strand starting at position 1037 of SEQ ID NO: 1880249
cuagcagaagagugcaauu

SEQ ID NO: 1953201 - RNA, 19 nt, Artificial Sequence
  Description of Artificial Sequence: Synthetic oligonucleotide
  Antisense strand to SEQ ID NO: 1953200
aauugcacucuucugcuag

SEQ ID NO: 1953202 - RNA, 19 nt, Artificial Sequence
  Description of Artificial Sequence: Synthetic oligonucleotide
  Sense strand starting at position 1046 of SEQ ID NO: 1880249
gagugcaauucuguuaaag

SEQ ID NO: 1953203 - RNA, 19 nt, Artificial Sequence
  Description of Artificial Sequence: Synthetic oligonucleotide
  Antisense strand to SEQ ID NO: 1953202
cuuuaacagaauugcacuc

SEQ ID NO: 1953204 - RNA, 19 nt, Artificial Sequence
  Description of Artificial Sequence: Synthetic oligonucleotide
  Sense strand starting at position 1060 of SEQ ID NO: 1880249
uaaaguaccguagagacua

SEQ ID NO: 1953205 - RNA, 19 nt, Artificial Sequence
  Description of Artificial Sequence: Synthetic oligonucleotide
  Antisense strand to SEQ ID NO: 1953204
uagucucuacgguacuuua

SEQ ID NO: 1953206 - RNA, 19 nt, Artificial Sequence
  Description of Artificial Sequence: Synthetic oligonucleotide
  Sense strand starting at position 1158 of SEQ ID NO: 1880249
augucucaagcagaaguaa

SEQ ID NO: 1953207 - RNA, 19 nt, Artificial Sequence
  Description of Artificial Sequence: Synthetic oligonucleotide
  Antisense strand to SEQ ID NO: 1953206
uuacuucugcuugagacau

SEQ ID NO: 1953208 - RNA, 19 nt, Artificial Sequence
  Description of Artificial Sequence: Synthetic oligonucleotide
  Sense strand starting at position 1243 of SEQ ID NO: 1880249
ugcuuugagcaagaaccua

SEQ ID NO: 1953209 - RNA, 19 nt, Artificial Sequence
  Description of Artificial Sequence: Synthetic oligonucleotide
  Antisense strand to SEQ ID NO: 1953208
uagguucuugcucaaagca

SEQ ID NO: 1953210 - RNA, 19 nt, Artificial Sequence
  Description of Artificial Sequence: Synthetic oligonucleotide
  Sense strand starting at position 1416 of SEQ ID NO: 1880249
caugguuaccgugaggauu

SEQ ID NO: 1953211 - RNA, 19 nt, Artificial Sequence
  Description of Artificial Sequence: Synthetic oligonucleotide
  Antisense strand to SEQ ID NO: 1953210
aauccucacgguaaccaug

SEQ ID NO: 1953212 - RNA, 19 nt, Artificial Sequence
  Description of Artificial Sequence: Synthetic oligonucleotide
  Sense strand starting at position 1573 of SEQ ID NO: 1880249
agugcaacuuguuuaaaca

SEQ ID NO: 1953213 - RNA, 19 nt, Artificial Sequence
  Description of Artificial Sequence: Synthetic oligonucleotide
  Antisense strand to SEQ ID NO: 1953212
uguuuaaacaaguugcacu

SEQ ID NO: 1953214 - RNA, 19 nt, Artificial Sequence
  Description of Artificial Sequence: Synthetic oligonucleotide
  Sense strand starting at position 1574 of SEQ ID NO: 1880249
gugcaacuuguuuaaacaa

SEQ ID NO: 1953215 - RNA, 19 nt, Artificial Sequence
  Description of Artificial Sequence: Synthetic oligonucleotide
  Antisense strand to SEQ ID NO: 1953214
uuguuuaaacaaguugcac

SEQ ID NO: 1953216 - RNA, 19 nt, Artificial Sequence
  Description of Artificial Sequence: Synthetic oligonucleotide
  Sense strand starting at position 1663 of SEQ ID NO: 1880249
ucagucucccacugaggaa

SEQ ID NO: 1953217 - RNA, 19 nt, Artificial Sequence
  Description of Artificial Sequence: Synthetic oligonucleotide
  Antisense strand to SEQ ID NO: 1953216
uuccucagugggagacuga

SEQ ID NO: 1953218 - RNA, 19 nt, Artificial Sequence
  Description of Artificial Sequence: Synthetic oligonucleotide
  Sense strand starting at position 2071 of SEQ ID NO: 1880249
gcgcgaacgcucucuaguu

SEQ ID NO: 1953219 - RNA, 19 nt, Artificial Sequence
  Description of Artificial Sequence: Synthetic oligonucleotide
  Antisense strand to SEQ ID NO: 1953218
aacuagagagcguucgcgc

SEQ ID NO: 1953220 - RNA, 19 nt, Artificial Sequence
  Description of Artificial Sequence: Synthetic oligonucleotide
  Sense strand starting at position 2188 of SEQ ID NO: 1880249
gccgauaacucucugagaa

SEQ ID NO: 1953221 - RNA, 19 nt, Artificial Sequence
  Description of Artificial Sequence: Synthetic oligonucleotide
  Antisense strand to SEQ ID NO: 1953220
uucucagagaguuaucggc

SEQ ID NO: 1953222 - RNA, 19 nt, Artificial Sequence
  Description of Artificial Sequence: Synthetic oligonucleotide
  Sense strand starting at position 2189 of SEQ ID NO: 1880249
ccgauaacucucugagaaa

SEQ ID NO: 1953223 - RNA, 19 nt, Artificial Sequence
  Description of Artificial Sequence: Synthetic oligonucleotide
  Antisense strand to SEQ ID NO: 1953222
uuucucagagaguuaucgg

SEQ ID NO: 1953224 - RNA, 19 nt, Artificial Sequence
  Description of Artificial Sequence: Synthetic oligonucleotide
  Sense strand starting at position 2370 of SEQ ID NO: 1880249
cugaacgaguguucagaaa

SEQ ID NO: 1953225 - RNA, 19 nt, Artificial Sequence
  Description of Artificial Sequence: Synthetic oligonucleotide
  Antisense strand to SEQ ID NO: 1953224
uuucugaacacucguucag

SEQ ID NO: 1953226 - RNA, 19 nt, Artificial Sequence
  Description of Artificial Sequence: Synthetic oligonucleotide
  Sense strand starting at position 2404 of SEQ ID NO: 1880249
agcauaagcaugugaucug

SEQ ID NO: 1953227 - RNA, 19 nt, Artificial Sequence
  Description of Artificial Sequence: Synthetic oligonucleotide
  Antisense strand to SEQ ID NO: 1953226
cagaucacaugcuuaugcu

SEQ ID NO: 1953228 - RNA, 19 nt, Artificial Sequence
  Description of Artificial Sequence: Synthetic oligonucleotide
  Sense strand starting at position 2407 of SEQ ID NO: 1880249
auaagcaugugaucuggaa

SEQ ID NO: 1953229 - RNA, 19 nt, Artificial Sequence
  Description of Artificial Sequence: Synthetic oligonucleotide
  Antisense strand to SEQ ID NO: 1953228
uuccagaucacaugcuuau

SEQ ID NO: 1953230 - RNA, 19 nt, Artificial Sequence
  Description of Artificial Sequence: Synthetic oligonucleotide
  Sense strand starting at position 2411 of SEQ ID NO: 1880249
gcaugugaucuggaagcca

SEQ ID NO: 1953231 - RNA, 19 nt, Artificial Sequence
  Description of Artificial Sequence: Synthetic oligonucleotide
  Antisense strand to SEQ ID NO: 1953230
uggcuuccagaucacaugc

SEQ ID NO: 1953232 - RNA, 19 nt, Artificial Sequence
  Description of Artificial Sequence: Synthetic oligonucleotide
  Sense strand starting at position 2477 of SEQ ID NO: 1880249
uuaauuuacugugagugaa

SEQ ID NO: 1953233 - RNA, 19 nt, Artificial Sequence
  Description of Artificial Sequence: Synthetic oligonucleotide
  Antisense strand to SEQ ID NO: 1953232
uucacucacaguaaauuaa

SEQ ID NO: 1953234 - RNA, 19 nt, Artificial Sequence
  Description of Artificial Sequence: Synthetic oligonucleotide
  Sense strand starting at position 2532 of SEQ ID NO: 1880249
ggaucacucugacugauau

SEQ ID NO: 1953235 - RNA, 19 nt, Artificial Sequence
  Description of Artificial Sequence: Synthetic oligonucleotide
  Antisense strand to SEQ ID NO: 1953234
auaucagucagagugaucc

SEQ ID NO: 1953236 - RNA, 19 nt, Artificial Sequence
  Description of Artificial Sequence: Synthetic oligonucleotide
  Sense strand starting at position 2533 of SEQ ID NO: 1880249
gaucacucugacugauaug

SEQ ID NO: 1953237 - RNA, 19 nt, Artificial Sequence
  Description of Artificial Sequence: Synthetic oligonucleotide
  Antisense strand to SEQ ID NO: 1953236
cauaucagucagagugauc

SEQ ID NO: 1953238 - RNA, 19 nt, Artificial Sequence
  Description of Artificial Sequence: Synthetic oligonucleotide
  Sense strand starting at position 2740 of SEQ ID NO: 1880249
gcugaauauacuggaaugu

SEQ ID NO: 1953239 - RNA, 19 nt, Artificial Sequence
  Description of Artificial Sequence: Synthetic oligonucleotide
  Antisense strand to SEQ ID NO: 1953238
acauuccaguauauucagc

SEQ ID NO: 1953240 - RNA, 19 nt, Artificial Sequence
  Description of Artificial Sequence: Synthetic oligonucleotide
  Sense strand starting at position 2781 of SEQ ID NO: 1880249
gcaagcuugcuugaagauc

SEQ ID NO: 1953241 - RNA, 19 nt, Artificial Sequence
  Description of Artificial Sequence: Synthetic oligonucleotide
  Antisense strand to SEQ ID NO: 1953240
gaucuucaagcaagcuugc

SEQ ID NO: 1953242 - RNA, 19 nt, Artificial Sequence
  Description of Artificial Sequence: Synthetic oligonucleotide
  Sense strand starting at position 3364 of SEQ ID NO: 1880249
gaucgcauacucuagagau

SEQ ID NO: 1953243 - RNA, 19 nt, Artificial Sequence
  Description of Artificial Sequence: Synthetic oligonucleotide
  Antisense strand to SEQ ID NO: 1953242
aucucuagaguaugcgauc

SEQ ID NO: 1953244 - RNA, 19 nt, Artificial Sequence
  Description of Artificial Sequence: Synthetic oligonucleotide
  Sense strand starting at position 3366 of SEQ ID NO: 1880249
ucgcauacucuagagauca

SEQ ID NO: 1953245 - RNA, 19 nt, Artificial Sequence
  Description of Artificial Sequence: Synthetic oligonucleotide
  Antisense strand to SEQ ID NO: 1953244
ugaucucuagaguaugcga

SEQ ID NO: 1953246 - RNA, 19 nt, Artificial Sequence
  Description of Artificial Sequence: Synthetic oligonucleotide
  Sense strand starting at position 3599 of SEQ ID NO: 1880249
gggugaauuuaacagccaa

SEQ ID NO: 1953247 - RNA, 19 nt, Artificial Sequence
  Description of Artificial Sequence: Synthetic oligonucleotide
  Antisense strand to SEQ ID NO: 1953246
uuggcuguuaaauucaccc

SEQ ID NO: 1953248 - RNA, 19 nt, Artificial Sequence
  Description of Artificial Sequence: Synthetic oligonucleotide
  Sense strand starting at position 3756 of SEQ ID NO: 1880249
gcauguaaacaacagaagu

SEQ ID NO: 1953249 - RNA, 19 nt, Artificial Sequence
  Description of Artificial Sequence: Synthetic oligonucleotide
  Antisense strand to SEQ ID NO: 1953248
acuucuguuguuuacaugc

SEQ ID NO: 1953250 - RNA, 19 nt, Artificial Sequence
  Description of Artificial Sequence: Synthetic oligonucleotide
  Sense strand starting at position 3809 of SEQ ID NO: 1880249
aagagugguggccagaauu

SEQ ID NO: 1953251 - RNA, 19 nt, Artificial Sequence
  Description of Artificial Sequence: Synthetic oligonucleotide
  Antisense strand to SEQ ID NO: 1953250
aauucuggccaccacucuu

SEQ ID NO: 1953252 - RNA, 19 nt, Artificial Sequence
  Description of Artificial Sequence: Synthetic oligonucleotide
  Sense strand starting at position 3899 of SEQ ID NO: 1880249
agaagucuacauuguaaua

SEQ ID NO: 1953253 - RNA, 19 nt, Artificial Sequence
  Description of Artificial Sequence: Synthetic oligonucleotide
  Antisense strand to SEQ ID NO: 1953252
uauuacaauguagacuucu

SEQ ID NO: 1953254 - RNA, 19 nt, Artificial Sequence
  Description of Artificial Sequence: Synthetic oligonucleotide
  Sense strand starting at position 111 of SEQ ID NO: 1880250
caccguguacuuuauuaga

SEQ ID NO: 1953255 - RNA, 19 nt, Artificial Sequence
  Description of Artificial Sequence: Synthetic oligonucleotide
  Antisense strand to SEQ ID NO: 1953254
ucuaauaaaguacacggug

SEQ ID NO: 1953256 - RNA, 19 nt, Artificial Sequence
  Description of Artificial Sequence: Synthetic oligonucleotide
  Sense strand starting at position 120 of SEQ ID NO: 1880250
cuuuauuagagucaggguu

SEQ ID NO: 1953257 - RNA, 19 nt, Artificial Sequence
  Description of Artificial Sequence: Synthetic oligonucleotide
  Antisense strand to SEQ ID NO: 1953256
aacccugacucuaauaaag

SEQ ID NO: 1953258 - RNA, 19 nt, Artificial Sequence
  Description of Artificial Sequence: Synthetic oligonucleotide
  Sense strand starting at position 483 of SEQ ID NO: 1880250
ggacauagagauugugguu

SEQ ID NO: 1953259 - RNA, 19 nt, Artificial Sequence
  Description of Artificial Sequence: Synthetic oligonucleotide
  Antisense strand to SEQ ID NO: 1953258
aaccacaaucucuaugucc

SEQ ID NO: 1953260 - RNA, 19 nt, Artificial Sequence
  Description of Artificial Sequence: Synthetic oligonucleotide
  Sense strand starting at position 800 of SEQ ID NO: 1880250
aggaauaacuuguccaagu

SEQ ID NO: 1953261 - RNA, 19 nt, Artificial Sequence
  Description of Artificial Sequence: Synthetic oligonucleotide
  Antisense strand to SEQ ID NO: 1953260
acuuggacaaguuauuccu

SEQ ID NO: 1953262 - RNA, 19 nt, Artificial Sequence
  Description of Artificial Sequence: Synthetic oligonucleotide
  Sense strand starting at position 801 of SEQ ID NO: 1880250
ggaauaacuuguccaaguu

SEQ ID NO: 1953263 - RNA, 19 nt, Artificial Sequence
  Description of Artificial Sequence: Synthetic oligonucleotide
  Antisense strand to SEQ ID NO: 1953262
aacuuggacaaguuauucc

SEQ ID NO: 1953264 - RNA, 19 nt, Artificial Sequence
  Description of Artificial Sequence: Synthetic oligonucleotide
  Sense strand starting at position 813 of SEQ ID NO: 1880250
ccaaguuaauaugcugaga

SEQ ID NO: 1953265 - RNA, 19 nt, Artificial Sequence
  Description of Artificial Sequence: Synthetic oligonucleotide
  Antisense strand to SEQ ID NO: 1953264
ucucagcauauuaacuugg

SEQ ID NO: 1953266 - RNA, 19 nt, Artificial Sequence
  Description of Artificial Sequence: Synthetic oligonucleotide
  Sense strand starting at position 853 of SEQ ID NO: 1880250
uguauauagauaugcgaga

SEQ ID NO: 1953267 - RNA, 19 nt, Artificial Sequence
  Description of Artificial Sequence: Synthetic oligonucleotide
  Antisense strand to SEQ ID NO: 1953266
ucucgcauaucuauauaca

SEQ ID NO: 1953268 - RNA, 19 nt, Artificial Sequence
  Description of Artificial Sequence: Synthetic oligonucleotide
  Sense strand starting at position 854 of SEQ ID NO: 1880250
guauauagauaugcgagau

SEQ ID NO: 1953269 - RNA, 19 nt, Artificial Sequence
  Description of Artificial Sequence: Synthetic oligonucleotide
  Antisense strand to SEQ ID NO: 1953268
aucucgcauaucuauauac

SEQ ID NO: 1953270 - RNA, 19 nt, Artificial Sequence
  Description of Artificial Sequence: Synthetic oligonucleotide
  Sense strand starting at position 1004 of SEQ ID NO: 1880250
gaguaaauauuaucaggua

SEQ ID NO: 1953271 - RNA, 19 nt, Artificial Sequence
  Description of Artificial Sequence: Synthetic oligonucleotide
  Antisense strand to SEQ ID NO: 1953270
uaccugauaauauuuacuc

SEQ ID NO: 1953272 - RNA, 19 nt, Artificial Sequence
  Description of Artificial Sequence: Synthetic oligonucleotide
  Sense strand starting at position 1019 of SEQ ID NO: 1880250
gguacacaauucuugagua

SEQ ID NO: 1953273 - RNA, 19 nt, Artificial Sequence
  Description of Artificial Sequence: Synthetic oligonucleotide
  Antisense strand to SEQ ID NO: 1953272
uacucaagaauuguguacc

SEQ ID NO: 1953274 - RNA, 19 nt, Artificial Sequence
  Description of Artificial Sequence: Synthetic oligonucleotide
  Sense strand starting at position 1024 of SEQ ID NO: 1880250
acaauucuugaguauguga

SEQ ID NO: 1953275 - RNA, 19 nt, Artificial Sequence
  Description of Artificial Sequence: Synthetic oligonucleotide
  Antisense strand to SEQ ID NO: 1953274
ucacauacucaagaauugu

SEQ ID NO: 1953276 - RNA, 19 nt, Artificial Sequence
  Description of Artificial Sequence: Synthetic oligonucleotide
  Sense strand starting at position 1026 of SEQ ID NO: 1880250
aauucuugaguaugugaca

SEQ ID NO: 1953277 - RNA, 19 nt, Artificial Sequence
  Description of Artificial Sequence: Synthetic oligonucleotide
  Antisense strand to SEQ ID NO: 1953276
ugucacauacucaagaauu

SEQ ID NO: 1953278 - RNA, 19 nt, Artificial Sequence
  Description of Artificial Sequence: Synthetic oligonucleotide
  Sense strand starting at position 1027 of SEQ ID NO: 1880250
auucuugaguaugugacau

SEQ ID NO: 1953279 - RNA, 19 nt, Artificial Sequence
  Description of Artificial Sequence: Synthetic oligonucleotide
  Antisense strand to SEQ ID NO: 1953278
augucacauacucaagaau

SEQ ID NO: 1953280 - RNA, 19 nt, Artificial Sequence
  Description of Artificial Sequence: Synthetic oligonucleotide
  Sense strand starting at position 1081 of SEQ ID NO: 1880250
uuaagucauguuuaccuga

SEQ ID NO: 1953281 - RNA, 19 nt, Artificial Sequence
  Description of Artificial Sequence: Synthetic oligonucleotide
  Antisense strand to SEQ ID NO: 1953280
ucagguaaacaugacuuaa

SEQ ID NO: 1953282 - RNA, 19 nt, Artificial Sequence
  Description of Artificial Sequence: Synthetic oligonucleotide
  Sense strand starting at position 1086 of SEQ ID NO: 1880250
ucauguuuaccugauuacu

SEQ ID NO: 1953283 - RNA, 19 nt, Artificial Sequence
  Description of Artificial Sequence: Synthetic oligonucleotide
  Antisense strand to SEQ ID NO: 1953282
aguaaucagguaaacauga

SEQ ID NO: 1953284 - RNA, 19 nt, Artificial Sequence
  Description of Artificial Sequence: Synthetic oligonucleotide
  Sense strand starting at position 1231 of SEQ ID NO: 1880250
gcauaaccauggcuaaaua

SEQ ID NO: 1953285 - RNA, 19 nt, Artificial Sequence
  Description of Artificial Sequence: Synthetic oligonucleotide
  Antisense strand to SEQ ID NO: 1953284
uauuuagccaugguuaugc

SEQ ID NO: 1953286 - RNA, 19 nt, Artificial Sequence
  Description of Artificial Sequence: Synthetic oligonucleotide
  Sense strand starting at position 2194 of SEQ ID NO: 1880250
ggaccugagaucuguguga

SEQ ID NO: 1953287 - RNA, 19 nt, Artificial Sequence
  Description of Artificial Sequence: Synthetic oligonucleotide
  Antisense strand to SEQ ID NO: 1953286
ucacacagaucucaggucc

SEQ ID NO: 1953288 - RNA, 19 nt, Artificial Sequence
  Description of Artificial Sequence: Synthetic oligonucleotide
  Sense strand starting at position 2358 of SEQ ID NO: 1880250
gggccagggaugugagaaa

SEQ ID NO: 1953289 - RNA, 19 nt, Artificial Sequence
  Description of Artificial Sequence: Synthetic oligonucleotide
  Antisense strand to SEQ ID NO: 1953288
uuucucacaucccuggccc

SEQ ID NO: 1953290 - RNA, 19 nt, Artificial Sequence
  Description of Artificial Sequence: Synthetic oligonucleotide
  Sense strand starting at position 2488 of SEQ ID NO: 1880250
aggagcuuuaagugaugga

SEQ ID NO: 1953291 - RNA, 19 nt, Artificial Sequence
  Description of Artificial Sequence: Synthetic oligonucleotide
  Antisense strand to SEQ ID NO: 1953290
uccaucacuuaaagcuccu

SEQ ID NO: 1953292 - RNA, 19 nt, Artificial Sequence
  Description of Artificial Sequence: Synthetic oligonucleotide
  Sense strand starting at position 2492 of SEQ ID NO: 1880250
gcuuuaagugauggaaaua

SEQ ID NO: 1953293 - RNA, 19 nt, Artificial Sequence
  Description of Artificial Sequence: Synthetic oligonucleotide
  Antisense strand to SEQ ID NO: 1953292
uauuuccaucacuuaaagc

SEQ ID NO: 1953294 - RNA, 19 nt, Artificial Sequence
  Description of Artificial Sequence: Synthetic oligonucleotide
  Sense strand starting at position 2501 of SEQ ID NO: 1880250
gauggaaauaugcgaguca

SEQ ID NO: 1953295 - RNA, 19 nt, Artificial Sequence
  Description of Artificial Sequence: Synthetic oligonucleotide
  Antisense strand to SEQ ID NO: 1953294
ugacucgcauauuuccauc

SEQ ID NO: 1953296 - RNA, 19 nt, Artificial Sequence
  Description of Artificial Sequence: Synthetic oligonucleotide
  Sense strand starting at position 2514 of SEQ ID NO: 1880250
gagucaaucaguggauggu

SEQ ID NO: 1953297 - RNA, 19 nt, Artificial Sequence
  Description of Artificial Sequence: Synthetic oligonucleotide
  Antisense strand to SEQ ID NO: 1953296
accauccacugauugacuc

SEQ ID NO: 1953298 - RNA, 19 nt, Artificial Sequence
  Description of Artificial Sequence: Synthetic oligonucleotide
  Sense strand starting at position 2680 of SEQ ID NO: 1880250
uugugugaccuugaugaag

SEQ ID NO: 1953299 - RNA, 19 nt, Artificial Sequence
  Description of Artificial Sequence: Synthetic oligonucleotide
  Antisense strand to SEQ ID NO: 1953298
cuucaucaaggucacacaa

SEQ ID NO: 1953300 - RNA, 19 nt, Artificial Sequence
  Description of Artificial Sequence: Synthetic oligonucleotide
  Sense strand starting at position 2763 of SEQ ID NO: 1880250
aggguuauuugaggaugaa

SEQ ID NO: 1953301 - RNA, 19 nt, Artificial Sequence
  Description of Artificial Sequence: Synthetic oligonucleotide
  Antisense strand to SEQ ID NO: 1953300
uucauccucaaauaacccu

SEQ ID NO: 1953302 - RNA, 19 nt, Artificial Sequence
  Description of Artificial Sequence: Synthetic oligonucleotide
  Sense strand starting at position 2996 of SEQ ID NO: 1880250
cgcugugauccggucccau

SEQ ID NO: 1953303 - RNA, 19 nt, Artificial Sequence
  Description of Artificial Sequence: Synthetic oligonucleotide
  Antisense strand to SEQ ID NO: 1953302
augggaccggaucacagcg

SEQ ID NO: 1953304 - RNA, 19 nt, Artificial Sequence
  Description of Artificial Sequence: Synthetic oligonucleotide
  Sense strand starting at position 3029 of SEQ ID NO: 1880250
auguuuguugaagaaucau

SEQ ID NO: 1953305 - RNA, 19 nt, Artificial Sequence
  Description of Artificial Sequence: Synthetic oligonucleotide
  Antisense strand to SEQ ID NO: 1953304
augauucuucaacaaacau

SEQ ID NO: 1953306 - RNA, 19 nt, Artificial Sequence
  Description of Artificial Sequence: Synthetic oligonucleotide
  Sense strand starting at position 3038 of SEQ ID NO: 1880250
gaagaaucauguuccuggu

SEQ ID NO: 1953307 - RNA, 19 nt, Artificial Sequence
  Description of Artificial Sequence: Synthetic oligonucleotide
  Antisense strand to SEQ ID NO: 1953306
accaggaacaugauucuuc

SEQ ID NO: 1953308 - RNA, 19 nt, Artificial Sequence
  Description of Artificial Sequence: Synthetic oligonucleotide
  Sense strand starting at position 3055 of SEQ ID NO: 1880250
gugucagaauagguaacua

SEQ ID NO: 1953309 - RNA, 19 nt, Artificial Sequence
  Description of Artificial Sequence: Synthetic oligonucleotide
  Antisense strand to SEQ ID NO: 1953308
uaguuaccuauucugacac

SEQ ID NO: 1953310 - RNA, 19 nt, Artificial Sequence
  Description of Artificial Sequence: Synthetic oligonucleotide
  Sense strand starting at position 3195 of SEQ ID NO: 1880250
uggucauguguugaacaca

SEQ ID NO: 1953311 - RNA, 19 nt, Artificial Sequence
  Description of Artificial Sequence: Synthetic oligonucleotide
  Antisense strand to SEQ ID NO: 1953310
uguguucaacacaugacca

SEQ ID NO: 1953312 - RNA, 19 nt, Artificial Sequence
  Description of Artificial Sequence: Synthetic oligonucleotide
  Sense strand starting at position 3257 of SEQ ID NO: 1880250
uggaguaacuuggcuagaa

SEQ ID NO: 1953313 - RNA, 19 nt, Artificial Sequence
  Description of Artificial Sequence: Synthetic oligonucleotide
  Antisense strand to SEQ ID NO: 1953312
uucuagccaaguuacucca

SEQ ID NO: 1953314 - RNA, 19 nt, Artificial Sequence
  Description of Artificial Sequence: Synthetic oligonucleotide
  Sense strand starting at position 3258 of SEQ ID NO: 1880250
ggaguaacuuggcuagaau

SEQ ID NO: 1953315 - RNA, 19 nt, Artificial Sequence
  Description of Artificial Sequence: Synthetic oligonucleotide
  Antisense strand to SEQ ID NO: 1953314
auucuagccaaguuacucc

SEQ ID NO: 1953316 - RNA, 19 nt, Artificial Sequence
  Description of Artificial Sequence: Synthetic oligonucleotide
  Sense strand starting at position 3261 of SEQ ID NO: 1880250
guaacuuggcuagaauaug

SEQ ID NO: 1953317 - RNA, 19 nt, Artificial Sequence
  Description of Artificial Sequence: Synthetic oligonucleotide
  Antisense strand to SEQ ID NO: 1953316
cauauucuagccaaguuac

SEQ ID NO: 1953318 - RNA, 19 nt, Artificial Sequence
  Description of Artificial Sequence: Synthetic oligonucleotide
  Sense strand starting at position 3344 of SEQ ID NO: 1880250
cugugaauacgucaauuga

SEQ ID NO: 1953319 - RNA, 19 nt, Artificial Sequence
  Description of Artificial Sequence: Synthetic oligonucleotide
  Antisense strand to SEQ ID NO: 1953318
ucaauugacguauucacag

SEQ ID NO: 1953320 - RNA, 19 nt, Artificial Sequence
  Description of Artificial Sequence: Synthetic oligonucleotide
  Sense strand starting at position 3355 of SEQ ID NO: 1880250
ucaauugacuaagcagauu

SEQ ID NO: 1953321 - RNA, 19 nt, Artificial Sequence
  Description of Artificial Sequence: Synthetic oligonucleotide
  Antisense strand to SEQ ID NO: 1953320
aaucugcuuagucaauuga

SEQ ID NO: 1953322 - RNA, 19 nt, Artificial Sequence
  Description of Artificial Sequence: Synthetic oligonucleotide
  Sense strand starting at position 3364 of SEQ ID NO: 1880250
uaagcagauuccuugagga

SEQ ID NO: 1953323 - RNA, 19 nt, Artificial Sequence
  Description of Artificial Sequence: Synthetic oligonucleotide
  Antisense strand to SEQ ID NO: 1953322
uccucaaggaaucugcuua

SEQ ID NO: 1953324 - RNA, 19 nt, Artificial Sequence
  Description of Artificial Sequence: Synthetic oligonucleotide
  Sense strand starting at position 3503 of SEQ ID NO: 1880250
augacuugaccaugccaaa

SEQ ID NO: 1953325 - RNA, 19 nt, Artificial Sequence
  Description of Artificial Sequence: Synthetic oligonucleotide
  Antisense strand to SEQ ID NO: 1953324
uuuggcauggucaagucau

SEQ ID NO: 1953326 - RNA, 19 nt, Artificial Sequence
  Description of Artificial Sequence: Synthetic oligonucleotide
  Sense strand starting at position 3612 of SEQ ID NO: 1880250
agucaauacuuacuguacu

SEQ ID NO: 1953327 - RNA, 19 nt, Artificial Sequence
  Description of Artificial Sequence: Synthetic oligonucleotide
  Antisense strand to SEQ ID NO: 1953326
aguacaguaaguauugacu

SEQ ID NO: 1953328 - RNA, 19 nt, Artificial Sequence
  Description of Artificial Sequence: Synthetic oligonucleotide
  Sense strand starting at position 3620 of SEQ ID NO: 1880250
cuuacuguacuguaccaua

SEQ ID NO: 1953329 - RNA, 19 nt, Artificial Sequence
  Description of Artificial Sequence: Synthetic oligonucleotide
  Antisense strand to SEQ ID NO: 1953328
uaugguacaguacaguaag

SEQ ID NO: 1953330 - RNA, 19 nt, Artificial Sequence
  Description of Artificial Sequence: Synthetic oligonucleotide
  Sense strand starting at position 3630 of SEQ ID NO: 1880250
uguaccauagucgaggaaa

SEQ ID NO: 1953331 - RNA, 19 nt, Artificial Sequence
  Description of Artificial Sequence: Synthetic oligonucleotide
  Antisense strand to SEQ ID NO: 1953330
uuuccucgacuaugguaca

SEQ ID NO: 1953332 - RNA, 19 nt, Artificial Sequence
  Description of Artificial Sequence: Synthetic oligonucleotide
  Sense strand starting at position 3868 of SEQ ID NO: 1880250
ggugaaucccaggagcacu

SEQ ID NO: 1953333 - RNA, 19 nt, Artificial Sequence
  Description of Artificial Sequence: Synthetic oligonucleotide
  Antisense strand to SEQ ID NO: 1953332
agugcuccugggauucacc

SEQ ID NO: 1953334 - RNA, 19 nt, Artificial Sequence
  Description of Artificial Sequence: Synthetic oligonucleotide
  Sense strand starting at position 3 of SEQ ID NO: 1880251
caggcagccugcuuagauu

SEQ ID NO: 1953335 - RNA, 19 nt, Artificial Sequence
  Description of Artificial Sequence: Synthetic oligonucleotide
  Antisense strand to SEQ ID NO: 1953334
aaucuaagcaggcugccug

SEQ ID NO: 1953336 - RNA, 19 nt, Artificial Sequence
  Description of Artificial Sequence: Synthetic oligonucleotide
  Sense strand starting at position 130 of SEQ ID NO: 1880251
ugacguccuggaggucaua

SEQ ID NO: 1953337 - RNA, 19 nt, Artificial Sequence
  Description of Artificial Sequence: Synthetic oligonucleotide
  Antisense strand to SEQ ID NO: 1953336
uaugaccuccaggacguca

SEQ ID NO: 1953338 - RNA, 19 nt, Artificial Sequence
  Description of Artificial Sequence: Synthetic oligonucleotide
  Sense strand starting at position 223 of SEQ ID NO: 1880251
acaugcucugaugagucau

SEQ ID NO: 1953339 - RNA, 19 nt, Artificial Sequence
  Description of Artificial Sequence: Synthetic oligonucleotide
  Antisense strand to SEQ ID NO: 1953338
augacucaucagagcaugu

SEQ ID NO: 1953340 - RNA, 19 nt, Artificial Sequence
  Description of Artificial Sequence: Synthetic oligonucleotide
  Sense strand starting at position 265 of SEQ ID NO: 1880251
aggagauggugacugguua

SEQ ID NO: 1953341 - RNA, 19 nt, Artificial Sequence
  Description of Artificial Sequence: Synthetic oligonucleotide
  Antisense strand to SEQ ID NO: 1953340
uaaccagucaccaucuccu

SEQ ID NO: 1953342 - RNA, 19 nt, Artificial Sequence
  Description of Artificial Sequence: Synthetic oligonucleotide
  Sense strand starting at position 266 of SEQ ID NO: 1880251
ggagauggugacugguuaa

SEQ ID NO: 1953343 - RNA, 19 nt, Artificial Sequence
  Description of Artificial Sequence: Synthetic oligonucleotide
  Antisense strand to SEQ ID NO: 1953342
uuaaccagucaccaucucc

SEQ ID NO: 1953344 - RNA, 19 nt, Artificial Sequence
  Description of Artificial Sequence: Synthetic oligonucleotide
  Sense strand starting at position 303 of SEQ ID NO: 1880251
cuuucugugccagaagauc

SEQ ID NO: 1953345 - RNA, 19 nt, Artificial Sequence
  Description of Artificial Sequence: Synthetic oligonucleotide
  Antisense strand to SEQ ID NO: 1953344
gaucuucuggcacagaaag

SEQ ID NO: 1953346 - RNA, 19 nt, Artificial Sequence
  Description of Artificial Sequence: Synthetic oligonucleotide
  Sense strand starting at position 1583 of SEQ ID NO: 1880251
gcacuuaagugacuuguca

SEQ ID NO: 1953347 - RNA, 19 nt, Artificial Sequence
  Description of Artificial Sequence: Synthetic oligonucleotide
  Antisense strand to SEQ ID NO: 1953346
ugacaagucacuuaagugc

SEQ ID NO: 1953348 - RNA, 19 nt, Artificial Sequence
  Description of Artificial Sequence: Synthetic oligonucleotide
  Sense strand starting at position 1590 of SEQ ID NO: 1880251
agugacuugucaucgguca

SEQ ID NO: 1953349 - RNA, 19 nt, Artificial Sequence
  Description of Artificial Sequence: Synthetic oligonucleotide
  Antisense strand to SEQ ID NO: 1953348
ugaccgaugacaagucacu

SEQ ID NO: 1953350 - RNA, 19 nt, Artificial Sequence
  Description of Artificial Sequence: Synthetic oligonucleotide
  Sense strand starting at position 1619 of SEQ ID NO: 1880251
aagaguugcgggugggauu

SEQ ID NO: 1953351 - RNA, 19 nt, Artificial Sequence
  Description of Artificial Sequence: Synthetic oligonucleotide
  Antisense strand to SEQ ID NO: 1953350
aaucccacccgcaacucuu

SEQ ID NO: 1953352 - RNA, 19 nt, Artificial Sequence
  Description of Artificial Sequence: Synthetic oligonucleotide
  Sense strand starting at position 1643 of SEQ ID NO: 1880251
ucaguucugucuguuguca

SEQ ID NO: 1953353 - RNA, 19 nt, Artificial Sequence
  Description of Artificial Sequence: Synthetic oligonucleotide
  Antisense strand to SEQ ID NO: 1953352
ugacaacagacagaacuga

SEQ ID NO: 1953354 - RNA, 19 nt, Artificial Sequence
  Description of Artificial Sequence: Synthetic oligonucleotide
  Sense strand starting at position 1647 of SEQ ID NO: 1880251
uucugucuguugucagauc

SEQ ID NO: 1953355 - RNA, 19 nt, Artificial Sequence
  Description of Artificial Sequence: Synthetic oligonucleotide
  Antisense strand to SEQ ID NO: 1953354
gaucugacaacagacagaa

SEQ ID NO: 1953356 - RNA, 19 nt, Artificial Sequence
  Description of Artificial Sequence: Synthetic oligonucleotide
  Sense strand starting at position 1744 of SEQ ID NO: 1880251
gcaggaaccuggguaguaa

SEQ ID NO: 1953357 - RNA, 19 nt, Artificial Sequence
  Description of Artificial Sequence: Synthetic oligonucleotide
  Antisense strand to SEQ ID NO: 1953356
uuacuacccagguuccugc

SEQ ID NO: 1953358 - RNA, 19 nt, Artificial Sequence
  Description of Artificial Sequence: Synthetic oligonucleotide
  Sense strand starting at position 2062 of SEQ ID NO: 1880251
aggcuugacacaugaacag

SEQ ID NO: 1953359 - RNA, 19 nt, Artificial Sequence
  Description of Artificial Sequence: Synthetic oligonucleotide
  Antisense strand to SEQ ID NO: 1953358
cuguucaugugucaagccu

SEQ ID NO: 1953360 - RNA, 19 nt, Artificial Sequence
  Description of Artificial Sequence: Synthetic oligonucleotide
  Sense strand starting at position 2193 of SEQ ID NO: 1880251
agaggguugccuggugagu

SEQ ID NO: 1953361 - RNA, 19 nt, Artificial Sequence
  Description of Artificial Sequence: Synthetic oligonucleotide
  Antisense strand to SEQ ID NO: 1953360
acucaccaggcaacccucu

SEQ ID NO: 1953362 - RNA, 19 nt, Artificial Sequence
  Description of Artificial Sequence: Synthetic oligonucleotide
  Sense strand starting at position 2441 of SEQ ID NO: 1880251
ggagcaagguaucuaucaa

SEQ ID NO: 1953363 - RNA, 19 nt, Artificial Sequence
  Description of Artificial Sequence: Synthetic oligonucleotide
  Antisense strand to SEQ ID NO: 1953362
uugauagauaccuugcucc

SEQ ID NO: 1953364 - RNA, 19 nt, Artificial Sequence
  Description of Artificial Sequence: Synthetic oligonucleotide
  Sense strand starting at position 2599 of SEQ ID NO: 1880251
gcuggugggucuuccuuau

SEQ ID NO: 1953365 - RNA, 19 nt, Artificial Sequence
  Description of Artificial Sequence: Synthetic oligonucleotide
  Antisense strand to SEQ ID NO: 1953364
auaaggaagacccaccagc

SEQ ID NO: 1953366 - RNA, 19 nt, Artificial Sequence
  Description of Artificial Sequence: Synthetic oligonucleotide
  Sense strand starting at position 2807 of SEQ ID NO: 1880251
cccagauggucauugguga

SEQ ID NO: 1953367 - RNA, 19 nt, Artificial Sequence
  Description of Artificial Sequence: Synthetic oligonucleotide
  Antisense strand to SEQ ID NO: 1953366
ucaccaaugaccaucuggg

SEQ ID NO: 1953368 - RNA, 19 nt, Artificial Sequence
  Description of Artificial Sequence: Synthetic oligonucleotide
  Sense strand starting at position 2808 of SEQ ID NO: 1880251
ccagauggucauuggugaa

SEQ ID NO: 1953369 - RNA, 19 nt, Artificial Sequence
  Description of Artificial Sequence: Synthetic oligonucleotide
  Antisense strand to SEQ ID NO: 1953368
uucaccaaugaccaucugg

SEQ ID NO: 1953370 - RNA, 19 nt, Artificial Sequence
  Description of Artificial Sequence: Synthetic oligonucleotide
  Sense strand starting at position 2994 of SEQ ID NO: 1880251
aguagagacccuugaaagu

SEQ ID NO: 1953371 - RNA, 19 nt, Artificial Sequence
  Description of Artificial Sequence: Synthetic oligonucleotide
  Antisense strand to SEQ ID NO: 1953370
acuuucaagggucucuacu

SEQ ID NO: 1953372 - RNA, 19 nt, Artificial Sequence
  Description of Artificial Sequence: Synthetic oligonucleotide
  Sense strand starting at position 3156 of SEQ ID NO: 1880251
aauggaguccuauagcaug

SEQ ID NO: 1953373 - RNA, 19 nt, Artificial Sequence
  Description of Artificial Sequence: Synthetic oligonucleotide
  Antisense strand to SEQ ID NO: 1953372
caugcuauaggacuccauu

SEQ ID NO: 1953374 - RNA, 19 nt, Artificial Sequence
  Description of Artificial Sequence: Synthetic oligonucleotide
  Sense strand starting at position 3161 of SEQ ID NO: 1880251
aguccuauagcauguguca

SEQ ID NO: 1953375 - RNA, 19 nt, Artificial Sequence
  Description of Artificial Sequence: Synthetic oligonucleotide
  Antisense strand to SEQ ID NO: 1953374
ugacacaugcuauaggacu

SEQ ID NO: 1953376 - RNA, 19 nt, Artificial Sequence
  Description of Artificial Sequence: Synthetic oligonucleotide
  Sense strand starting at position 3251 of SEQ ID NO: 1880251
cuugcccugaugugugaua

SEQ ID NO: 1953377 - RNA, 19 nt, Artificial Sequence
  Description of Artificial Sequence: Synthetic oligonucleotide
  Antisense strand to SEQ ID NO: 1953376
uaucacacaucagggcaag

SEQ ID NO: 1953378 - RNA, 19 nt, Artificial Sequence
  Description of Artificial Sequence: Synthetic oligonucleotide
  Sense strand starting at position 3252 of SEQ ID NO: 1880251
uugcccugaugugugauau

SEQ ID NO: 1953379 - RNA, 19 nt, Artificial Sequence
  Description of Artificial Sequence: Synthetic oligonucleotide
  Antisense strand to SEQ ID NO: 1953378
auaucacacaucagggcaa

SEQ ID NO: 1953380 - RNA, 19 nt, Artificial Sequence
  Description of Artificial Sequence: Synthetic oligonucleotide
  Sense strand starting at position 3253 of SEQ ID NO: 1880251
ugcccugaugugugauaua

SEQ ID NO: 1953381 - RNA, 19 nt, Artificial Sequence
  Description of Artificial Sequence: Synthetic oligonucleotide
  Antisense strand to SEQ ID NO: 1953380
uauaucacacaucagggca

SEQ ID NO: 1953382 - RNA, 19 nt, Artificial Sequence
  Description of Artificial Sequence: Synthetic oligonucleotide
  Sense strand starting at position 3256 of SEQ ID NO: 1880251
ccugaugugugauauacca

SEQ ID NO: 1953383 - RNA, 19 nt, Artificial Sequence
  Description of Artificial Sequence: Synthetic oligonucleotide
  Antisense strand to SEQ ID NO: 1953382
ugguauaucacacaucagg

SEQ ID NO: 1953384 - RNA, 19 nt, Artificial Sequence
  Description of Artificial Sequence: Synthetic oligonucleotide
  Sense strand starting at position 3298 of SEQ ID NO: 1880251
uuuauccuucuugauggau

SEQ ID NO: 1953385 - RNA, 19 nt, Artificial Sequence
  Description of Artificial Sequence: Synthetic oligonucleotide
  Antisense strand to SEQ ID NO: 1953384
auccaucaagaaggauaaa

SEQ ID NO: 1953386 - RNA, 19 nt, Artificial Sequence
  Description of Artificial Sequence: Synthetic oligonucleotide
  Sense strand starting at position 3304 of SEQ ID NO: 1880251
cuucuugauggaugucgaa

SEQ ID NO: 1953387 - RNA, 19 nt, Artificial Sequence
  Description of Artificial Sequence: Synthetic oligonucleotide
  Antisense strand to SEQ ID NO: 1953386
uucgacauccaucaagaag

SEQ ID NO: 1953388 - RNA, 19 nt, Artificial Sequence
  Description of Artificial Sequence: Synthetic oligonucleotide
  Sense strand starting at position 3317 of SEQ ID NO: 1880251
gucgaaguguucccagugu

SEQ ID NO: 1953389 - RNA, 19 nt, Artificial Sequence
  Description of Artificial Sequence: Synthetic oligonucleotide
  Antisense strand to SEQ ID NO: 1953388
acacugggaacacuucgac

SEQ ID NO: 1953390 - RNA, 19 nt, Artificial Sequence
  Description of Artificial Sequence: Synthetic oligonucleotide
  Sense strand starting at position 3347 of SEQ ID NO: 1880251
gacagugaauauucuugua

SEQ ID NO: 1953391 - RNA, 19 nt, Artificial Sequence
  Description of Artificial Sequence: Synthetic oligonucleotide
  Antisense strand to SEQ ID NO: 1953390
uacaagaauauucacuguc

SEQ ID NO: 1953392 - RNA, 19 nt, Artificial Sequence
  Description of Artificial Sequence: Synthetic oligonucleotide
  Sense strand starting at position 3349 of SEQ ID NO: 1880251
cagugaauauucuuguaug

SEQ ID NO: 1953393 - RNA, 19 nt, Artificial Sequence
  Description of Artificial Sequence: Synthetic oligonucleotide
  Antisense strand to SEQ ID NO: 1953392
cauacaagaauauucacug

SEQ ID NO: 1953394 - RNA, 19 nt, Artificial Sequence
  Description of Artificial Sequence: Synthetic oligonucleotide
  Sense strand starting at position 3352 of SEQ ID NO: 1880251
ugaauauucuuguaugaug

SEQ ID NO: 1953395 - RNA, 19 nt, Artificial Sequence
  Description of Artificial Sequence: Synthetic oligonucleotide
  Antisense strand to SEQ ID NO: 1953394
caucauacaagaauauuca

SEQ ID NO: 1953396 - RNA, 19 nt, Artificial Sequence
  Description of Artificial Sequence: Synthetic oligonucleotide
  Sense strand starting at position 3354 of SEQ ID NO: 1880251
aauauucuuguaugauggu

SEQ ID NO: 1953397 - RNA, 19 nt, Artificial Sequence
  Description of Artificial Sequence: Synthetic oligonucleotide
  Antisense strand to SEQ ID NO: 1953396
accaucauacaagaauauu

SEQ ID NO: 1953398 - RNA, 19 nt, Artificial Sequence
  Description of Artificial Sequence: Synthetic oligonucleotide
  Sense strand starting at position 3363 of SEQ ID NO: 1880251
guaugaugguguuugcaca

SEQ ID NO: 1953399 - RNA, 19 nt, Artificial Sequence
  Description of Artificial Sequence: Synthetic oligonucleotide
  Antisense strand to SEQ ID NO: 1953398
ugugcaaacaccaucauac

SEQ ID NO: 1953400 - RNA, 19 nt, Artificial Sequence
  Description of Artificial Sequence: Synthetic oligonucleotide
  Sense strand starting at position 3370 of SEQ ID NO: 1880251
gguguuugcacauguguuu

SEQ ID NO: 1953401 - RNA, 19 nt, Artificial Sequence
  Description of Artificial Sequence: Synthetic oligonucleotide
  Antisense strand to SEQ ID NO: 1953400
aaacacaugugcaaacacc

SEQ ID NO: 1953402 - RNA, 19 nt, Artificial Sequence
  Description of Artificial Sequence: Synthetic oligonucleotide
  Sense strand starting at position 3426 of SEQ ID NO: 1880251
guuggauaugugcacucga

SEQ ID NO: 1953403 - RNA, 19 nt, Artificial Sequence
  Description of Artificial Sequence: Synthetic oligonucleotide
  Antisense strand to SEQ ID NO: 1953402
ucgagugcacauauccaac

SEQ ID NO: 1953404 - RNA, 19 nt, Artificial Sequence
  Description of Artificial Sequence: Synthetic oligonucleotide
  Sense strand starting at position 3431 of SEQ ID NO: 1880251
auaugugcacucgaucuua

SEQ ID NO: 1953405 - RNA, 19 nt, Artificial Sequence
  Description of Artificial Sequence: Synthetic oligonucleotide
  Antisense strand to SEQ ID NO: 1953404
uaagaucgagugcacauau

SEQ ID NO: 1953406 - RNA, 19 nt, Artificial Sequence
  Description of Artificial Sequence: Synthetic oligonucleotide
  Sense strand starting at position 3436 of SEQ ID NO: 1880251
ugcacucgaucuuaaauaa

SEQ ID NO: 1953407 - RNA, 19 nt, Artificial Sequence
  Description of Artificial Sequence: Synthetic oligonucleotide
  Antisense strand to SEQ ID NO: 1953406
uuauuuaagaucgagugca

SEQ ID NO: 1953408 - RNA, 19 nt, Artificial Sequence
  Description of Artificial Sequence: Synthetic oligonucleotide
  Sense strand starting at position 3620 of SEQ ID NO: 1880251
uuauaaagucagugcuacu

SEQ ID NO: 1953409 - RNA, 19 nt, Artificial Sequence
  Description of Artificial Sequence: Synthetic oligonucleotide
  Antisense strand to SEQ ID NO: 1953408
aguagcacugacuuuauaa

SEQ ID NO: 1953410 - RNA, 19 nt, Artificial Sequence
  Description of Artificial Sequence: Synthetic oligonucleotide
  Sense strand starting at position 3630 of SEQ ID NO: 1880251
agugcuacuugaucaagaa

SEQ ID NO: 1953411 - RNA, 19 nt, Artificial Sequence
  Description of Artificial Sequence: Synthetic oligonucleotide
  Antisense strand to SEQ ID NO: 1953410
uucuugaucaaguagcacu

SEQ ID NO: 1953412 - RNA, 19 nt, Artificial Sequence
  Description of Artificial Sequence: Synthetic oligonucleotide
  Sense strand starting at position 3631 of SEQ ID NO: 1880251
gugcuacuugaucaagaaa

SEQ ID NO: 1953413 - RNA, 19 nt, Artificial Sequence
  Description of Artificial Sequence: Synthetic oligonucleotide
  Antisense strand to SEQ ID NO: 1953412
uuucuugaucaaguagcac

SEQ ID NO: 1953414 - RNA, 19 nt, Artificial Sequence
  Description of Artificial Sequence: Synthetic oligonucleotide
  Sense strand starting at position 7 of SEQ ID NO: 1880252
aggauugcagcagaaucau

SEQ ID NO: 1953415 - RNA, 19 nt, Artificial Sequence
  Description of Artificial Sequence: Synthetic oligonucleotide
  Antisense strand to SEQ ID NO: 1953414
augauucugcugcaauccu

SEQ ID NO: 1953416 - RNA, 19 nt, Artificial Sequence
  Description of Artificial Sequence: Synthetic oligonucleotide
  Sense strand starting at position 13 of SEQ ID NO: 1880252
gcagcagaaucauuccaua

SEQ ID NO: 1953417 - RNA, 19 nt, Artificial Sequence
  Description of Artificial Sequence: Synthetic oligonucleotide
  Antisense strand to SEQ ID NO: 1953416
uauggaaugauucugcugc

SEQ ID NO: 1953418 - RNA, 19 nt, Artificial Sequence
  Description of Artificial Sequence: Synthetic oligonucleotide
  Sense strand starting at position 180 of SEQ ID NO: 1880252
uuagaauggagauguaggu

SEQ ID NO: 1953419 - RNA, 19 nt, Artificial Sequence
  Description of Artificial Sequence: Synthetic oligonucleotide
  Antisense strand to SEQ ID NO: 1953418
accuacaucuccauucuaa

SEQ ID NO: 1953420 - RNA, 19 nt, Artificial Sequence
  Description of Artificial Sequence: Synthetic oligonucleotide
  Sense strand starting at position 193 of SEQ ID NO: 1880252
guagguaauggauggagua

SEQ ID NO: 1953421 - RNA, 19 nt, Artificial Sequence
  Description of Artificial Sequence: Synthetic oligonucleotide
  Antisense strand to SEQ ID NO: 1953420
uacuccauccauuaccuac

SEQ ID NO: 1953422 - RNA, 19 nt, Artificial Sequence
  Description of Artificial Sequence: Synthetic oligonucleotide
  Sense strand starting at position 245 of SEQ ID NO: 1880252
acugaucgcucacuuacaa

SEQ ID NO: 1953423 - RNA, 19 nt, Artificial Sequence
  Description of Artificial Sequence: Synthetic oligonucleotide
  Antisense strand to SEQ ID NO: 1953422
uuguaagugagcgaucagu

SEQ ID NO: 1953424 - RNA, 19 nt, Artificial Sequence
  Description of Artificial Sequence: Synthetic oligonucleotide
  Sense strand starting at position 710 of SEQ ID NO: 1880252
agaaaucuggaguggccua

SEQ ID NO: 1953425 - RNA, 19 nt, Artificial Sequence
  Description of Artificial Sequence: Synthetic oligonucleotide
  Antisense strand to SEQ ID NO: 1953424
uaggccacuccagauuucu

SEQ ID NO: 1953426 - RNA, 19 nt, Artificial Sequence
  Description of Artificial Sequence: Synthetic oligonucleotide
  Sense strand starting at position 715 of SEQ ID NO: 1880252
ucuggaguggccuaagagu

SEQ ID NO: 1953427 - RNA, 19 nt, Artificial Sequence
  Description of Artificial Sequence: Synthetic oligonucleotide
  Antisense strand to SEQ ID NO: 1953426
acucuuaggccacuccaga

SEQ ID NO: 1953428 - RNA, 19 nt, Artificial Sequence
  Description of Artificial Sequence: Synthetic oligonucleotide
  Sense strand starting at position 838 of SEQ ID NO: 1880252
gcccauuauguccaucaga

SEQ ID NO: 1953429 - RNA, 19 nt, Artificial Sequence
  Description of Artificial Sequence: Synthetic oligonucleotide
  Antisense strand to SEQ ID NO: 1953428
ucugauggacauaaugggc

SEQ ID NO: 1953430 - RNA, 19 nt, Artificial Sequence
  Description of Artificial Sequence: Synthetic oligonucleotide
  Sense strand starting at position 1219 of SEQ ID NO: 1880252
aauguaggccaagauagua

SEQ ID NO: 1953431 - RNA, 19 nt, Artificial Sequence
  Description of Artificial Sequence: Synthetic oligonucleotide
  Antisense strand to SEQ ID NO: 1953430
uacuaucuuggccuacauu

SEQ ID NO: 1953432 - RNA, 19 nt, Artificial Sequence
  Description of Artificial Sequence: Synthetic oligonucleotide
  Sense strand starting at position 1533 of SEQ ID NO: 1880252
uggagaagcucuguaccuu

SEQ ID NO: 1953433 - RNA, 19 nt, Artificial Sequence
  Description of Artificial Sequence: Synthetic oligonucleotide
  Antisense strand to SEQ ID NO: 1953432
aagguacagagcuucucca

SEQ ID NO: 1953434 - RNA, 19 nt, Artificial Sequence
  Description of Artificial Sequence: Synthetic oligonucleotide
  Sense strand starting at position 1534 of SEQ ID NO: 1880252
ggagaagcucuguaccuua

SEQ ID NO: 1953435 - RNA, 19 nt, Artificial Sequence
  Description of Artificial Sequence: Synthetic oligonucleotide
  Antisense strand to SEQ ID NO: 1953434
uaagguacagagcuucucc

SEQ ID NO: 1953436 - RNA, 19 nt, Artificial Sequence
  Description of Artificial Sequence: Synthetic oligonucleotide
  Sense strand starting at position 1573 of SEQ ID NO: 1880252
ucuucuacucagggaugau

SEQ ID NO: 1953437 - RNA, 19 nt, Artificial Sequence
  Description of Artificial Sequence: Synthetic oligonucleotide
  Antisense strand to SEQ ID NO: 1953436
aucaucccugaguagaaga

SEQ ID NO: 1953438 - RNA, 19 nt, Artificial Sequence
  Description of Artificial Sequence: Synthetic oligonucleotide
  Sense strand starting at position 1601 of SEQ ID NO: 1880252
ugaugcaagcuccaagaaa

SEQ ID NO: 1953439 - RNA, 19 nt, Artificial Sequence
  Description of Artificial Sequence: Synthetic oligonucleotide
  Antisense strand to SEQ ID NO: 1953438
uuucuuggagcuugcauca

SEQ ID NO: 1953440 - RNA, 19 nt, Artificial Sequence
  Description of Artificial Sequence: Synthetic oligonucleotide
  Sense strand starting at position 1628 of SEQ ID NO: 1880252
ugggaccucuuauugcaaa

SEQ ID NO: 1953441 - RNA, 19 nt, Artificial Sequence
  Description of Artificial Sequence: Synthetic oligonucleotide
  Antisense strand to SEQ ID NO: 1953440
uuugcaauaagagguccca

SEQ ID NO: 1953442 - RNA, 19 nt, Artificial Sequence
  Description of Artificial Sequence: Synthetic oligonucleotide
  Sense strand starting at position 1802 of SEQ ID NO: 1880252
gguacuaguugaguccuaa

SEQ ID NO: 1953443 - RNA, 19 nt, Artificial Sequence
  Description of Artificial Sequence: Synthetic oligonucleotide
  Antisense strand to SEQ ID NO: 1953442
uuaggacucaacuaguacc

SEQ ID NO: 1953444 - RNA, 19 nt, Artificial Sequence
  Description of Artificial Sequence: Synthetic oligonucleotide
  Sense strand starting at position 1815 of SEQ ID NO: 1880252
uccuaaaguccguacuuaa

SEQ ID NO: 1953445 - RNA, 19 nt, Artificial Sequence
  Description of Artificial Sequence: Synthetic oligonucleotide
  Antisense strand to SEQ ID NO: 1953444
uuaaguacggacuuuagga

SEQ ID NO: 1953446 - RNA, 19 nt, Artificial Sequence
  Description of Artificial Sequence: Synthetic oligonucleotide
  Sense strand starting at position 1826 of SEQ ID NO: 1880252
guacuuaaugcauagcgaa

SEQ ID NO: 1953447 - RNA, 19 nt, Artificial Sequence
  Description of Artificial Sequence: Synthetic oligonucleotide
  Antisense strand to SEQ ID NO: 1953446
uucgcuaugcauuaaguac

SEQ ID NO: 1953448 - RNA, 19 nt, Artificial Sequence
  Description of Artificial Sequence: Synthetic oligonucleotide
  Sense strand starting at position 2531 of SEQ ID NO: 1880252
ugcuuugagcuuuauacag

SEQ ID NO: 1953449 - RNA, 19 nt, Artificial Sequence
  Description of Artificial Sequence: Synthetic oligonucleotide
  Antisense strand to SEQ ID NO: 1953448
cuguauaaagcucaaagca

SEQ ID NO: 1953450 - RNA, 19 nt, Artificial Sequence
  Description of Artificial Sequence: Synthetic oligonucleotide
  Sense strand starting at position 2792 of SEQ ID NO: 1880252
auucuugcaguuuaccaua

SEQ ID NO: 1953451 - RNA, 19 nt, Artificial Sequence
  Description of Artificial Sequence: Synthetic oligonucleotide
  Antisense strand to SEQ ID NO: 1953450
uaugguaaacugcaagaau

SEQ ID NO: 1953452 - RNA, 19 nt, Artificial Sequence
  Description of Artificial Sequence: Synthetic oligonucleotide
  Sense strand starting at position 2868 of SEQ ID NO: 1880252
cauucccugugguugauaa

SEQ ID NO: 1953453 - RNA, 19 nt, Artificial Sequence
  Description of Artificial Sequence: Synthetic oligonucleotide
  Antisense strand to SEQ ID NO: 1953452
uuaucaaccacagggaaug

SEQ ID NO: 1953454 - RNA, 19 nt, Artificial Sequence
  Description of Artificial Sequence: Synthetic oligonucleotide
  Sense strand starting at position 2991 of SEQ ID NO: 1880252
gaaccuuggucuuucugau

SEQ ID NO: 1953455 - RNA, 19 nt, Artificial Sequence
  Description of Artificial Sequence: Synthetic oligonucleotide
  Antisense strand to SEQ ID NO: 1953454
aucagaaagaccaagguuc

SEQ ID NO: 1953456 - RNA, 19 nt, Artificial Sequence
  Description of Artificial Sequence: Synthetic oligonucleotide
  Sense strand starting at position 3079 of SEQ ID NO: 1880252
uuuaucucuguguaaacau

SEQ ID NO: 1953457 - RNA, 19 nt, Artificial Sequence
  Description of Artificial Sequence: Synthetic oligonucleotide
  Antisense strand to SEQ ID NO: 1953456
auguuuacacagagauaaa

SEQ ID NO: 1953458 - RNA, 19 nt, Artificial Sequence
  Description of Artificial Sequence: Synthetic oligonucleotide
  Sense strand starting at position 3086 of SEQ ID NO: 1880252
cuguguaaacaugauguau

SEQ ID NO: 1953459 - RNA, 19 nt, Artificial Sequence
  Description of Artificial Sequence: Synthetic oligonucleotide
  Antisense strand to SEQ ID NO: 1953458
auacaucauguuuacacag

SEQ ID NO: 1953460 - RNA, 19 nt, Artificial Sequence
  Description of Artificial Sequence: Synthetic oligonucleotide
  Sense strand starting at position 3090 of SEQ ID NO: 1880252
guaaacaugauguauguga

SEQ ID NO: 1953461 - RNA, 19 nt, Artificial Sequence
  Description of Artificial Sequence: Synthetic oligonucleotide
  Antisense strand to SEQ ID NO: 1953460
ucacauacaucauguuuac

SEQ ID NO: 1953462 - RNA, 19 nt, Artificial Sequence
  Description of Artificial Sequence: Synthetic oligonucleotide
  Sense strand starting at position 3094 of SEQ ID NO: 1880252
acaugauguaugugaaagu

SEQ ID NO: 1953463 - RNA, 19 nt, Artificial Sequence
  Description of Artificial Sequence: Synthetic oligonucleotide
  Antisense strand to SEQ ID NO: 1953462
acuuucacauacaucaugu

SEQ ID NO: 1953464 - RNA, 19 nt, Artificial Sequence
  Description of Artificial Sequence: Synthetic oligonucleotide
  Sense strand starting at position 3179 of SEQ ID NO: 1880252
ccuugagaacagugcuaaa

SEQ ID NO: 1953465 - RNA, 19 nt, Artificial Sequence
  Description of Artificial Sequence: Synthetic oligonucleotide
  Antisense strand to SEQ ID NO: 1953464
uuuagcacuguucucaagg

SEQ ID NO: 1953466 - RNA, 19 nt, Artificial Sequence
  Description of Artificial Sequence: Synthetic oligonucleotide
  Sense strand starting at position 3244 of SEQ ID NO: 1880252
ggaaguuacuucucccuuu

SEQ ID NO: 1953467 - RNA, 19 nt, Artificial Sequence
  Description of Artificial Sequence: Synthetic oligonucleotide
  Antisense strand to SEQ ID NO: 1953466
aaagggagaaguaacuucc

SEQ ID NO: 1953468 - RNA, 19 nt, Artificial Sequence
  Description of Artificial Sequence: Synthetic oligonucleotide
  Sense strand starting at position 3331 of SEQ ID NO: 1880252
acuguuucguuuguaauuu

SEQ ID NO: 1953469 - RNA, 19 nt, Artificial Sequence
  Description of Artificial Sequence: Synthetic oligonucleotide
  Antisense strand to SEQ ID NO: 1953468
aaauuacaaacgaaacagu

SEQ ID NO: 1953470 - RNA, 19 nt, Artificial Sequence
  Description of Artificial Sequence: Synthetic oligonucleotide
  Sense strand starting at position 3391 of SEQ ID NO: 1880252
auaggaaugaugggugcaa

SEQ ID NO: 1953471 - RNA, 19 nt, Artificial Sequence
  Description of Artificial Sequence: Synthetic oligonucleotide
  Antisense strand to SEQ ID NO: 1953470
uugcacccaucauuccuau

SEQ ID NO: 1953472 - RNA, 19 nt, Artificial Sequence
  Description of Artificial Sequence: Synthetic oligonucleotide
  Sense strand starting at position 3392 of SEQ ID NO: 1880252
uaggaaugaugggugcaau

SEQ ID NO: 1953473 - RNA, 19 nt, Artificial Sequence
  Description of Artificial Sequence: Synthetic oligonucleotide
  Antisense strand to SEQ ID NO: 1953472
auugcacccaucauuccua

SEQ ID NO: 1953474 - RNA, 19 nt, Artificial Sequence
  Description of Artificial Sequence: Synthetic oligonucleotide
  Sense strand starting at position 3393 of SEQ ID NO: 1880252
aggaaugaugggugcaaua

SEQ ID NO: 1953475 - RNA, 19 nt, Artificial Sequence
  Description of Artificial Sequence: Synthetic oligonucleotide
  Antisense strand to SEQ ID NO: 1953474
uauugcacccaucauuccu

SEQ ID NO: 1953476 - RNA, 19 nt, Artificial Sequence
  Description of Artificial Sequence: Synthetic oligonucleotide
  Sense strand starting at position 3410 of SEQ ID NO: 1880252
uaaaguagagguugauuga

SEQ ID NO: 1953477 - RNA, 19 nt, Artificial Sequence
  Description of Artificial Sequence: Synthetic oligonucleotide
  Antisense strand to SEQ ID NO: 1953476
ucaaucaaccucuacuuua

SEQ ID NO: 1953478 - RNA, 19 nt, Artificial Sequence
  Description of Artificial Sequence: Synthetic oligonucleotide
  Sense strand starting at position 3469 of SEQ ID NO: 1880252
agauucugagcuugacauc

SEQ ID NO: 1953479 - RNA, 19 nt, Artificial Sequence
  Description of Artificial Sequence: Synthetic oligonucleotide
  Antisense strand to SEQ ID NO: 1953478
gaugucaagcucagaaucu

SEQ ID NO: 1953480 - RNA, 19 nt, Artificial Sequence
  Description of Artificial Sequence: Synthetic oligonucleotide
  Sense strand starting at position 3691 of SEQ ID NO: 1880252
auaccuugauuugaagagu

SEQ ID NO: 1953481 - RNA, 19 nt, Artificial Sequence
  Description of Artificial Sequence: Synthetic oligonucleotide
  Antisense strand to SEQ ID NO: 1953480
acucuucaaaucaagguau

SEQ ID NO: 1953482 - RNA, 19 nt, Artificial Sequence
  Description of Artificial Sequence: Synthetic oligonucleotide
  Sense strand starting at position 3819 of SEQ ID NO: 1880252
ggguuuaccaaguaucuag

SEQ ID NO: 1953483 - RNA, 19 nt, Artificial Sequence
  Description of Artificial Sequence: Synthetic oligonucleotide
  Antisense strand to SEQ ID NO: 1953482
cuagauacuugguaaaccc

SEQ ID NO: 1953484 - RNA, 19 nt, Artificial Sequence
  Description of Artificial Sequence: Synthetic oligonucleotide
  Sense strand starting at position 3826 of SEQ ID NO: 1880252
ccaaguaucuaggucuaau

SEQ ID NO: 1953485 - RNA, 19 nt, Artificial Sequence
  Description of Artificial Sequence: Synthetic oligonucleotide
  Antisense strand to SEQ ID NO: 1953484
auuagaccuagauacuugg

SEQ ID NO: 1953486 - RNA, 19 nt, Artificial Sequence
  Description of Artificial Sequence: Synthetic oligonucleotide
  Sense strand starting at position 3829 of SEQ ID NO: 1880252
aguaucuaggucuaauguu

SEQ ID NO: 1953487 - RNA, 19 nt, Artificial Sequence
  Description of Artificial Sequence: Synthetic oligonucleotide
  Antisense strand to SEQ ID NO: 1953486
aacauuagaccuagauacu

SEQ ID NO: 1953488 - RNA, 19 nt, Artificial Sequence
  Description of Artificial Sequence: Synthetic oligonucleotide
  Sense strand starting at position 3913 of SEQ ID NO: 1880252
uggccacauuccuuugaga

SEQ ID NO: 1953489 - RNA, 19 nt, Artificial Sequence
  Description of Artificial Sequence: Synthetic oligonucleotide
  Antisense strand to SEQ ID NO: 1953488
ucucaaaggaauguggcca

SEQ ID NO: 1953490 - RNA, 19 nt, Artificial Sequence
  Description of Artificial Sequence: Synthetic oligonucleotide
  Sense strand starting at position 3915 of SEQ ID NO: 1880252
gccacauuccuuugagaaa

SEQ ID NO: 1953491 - RNA, 19 nt, Artificial Sequence
  Description of Artificial Sequence: Synthetic oligonucleotide
  Antisense strand to SEQ ID NO: 1953490
uuucucaaaggaauguggc

SEQ ID NO: 1953492 - RNA, 19 nt, Artificial Sequence
  Description of Artificial Sequence: Synthetic oligonucleotide
  Sense strand starting at position 3965 of SEQ ID NO: 1880252
gagcauaggaauugggauu

SEQ ID NO: 1953493 - RNA, 19 nt, Artificial Sequence
  Description of Artificial Sequence: Synthetic oligonucleotide
  Antisense strand to SEQ ID NO: 1953492
aaucccaauuccuaugcuc

SEQ ID NO: 1953494 - RNA, 19 nt, Artificial Sequence
  Description of Artificial Sequence: Synthetic oligonucleotide
  Sense strand starting at position 118 of SEQ ID NO: 1880253
uagguaauaccuuggaauc

SEQ ID NO: 1953495 - RNA, 19 nt, Artificial Sequence
  Description of Artificial Sequence: Synthetic oligonucleotide
  Antisense strand to SEQ ID NO: 1953494
gauuccaagguauuaccua

SEQ ID NO: 1953496 - RNA, 19 nt, Artificial Sequence
  Description of Artificial Sequence: Synthetic oligonucleotide
  Sense strand starting at position 119 of SEQ ID NO: 1880253
agguaauaccuuggaauca

SEQ ID NO: 1953497 - RNA, 19 nt, Artificial Sequence
  Description of Artificial Sequence: Synthetic oligonucleotide
  Antisense strand to SEQ ID NO: 1953496
ugauuccaagguauuaccu

SEQ ID NO: 1953498 - RNA, 19 nt, Artificial Sequence
  Description of Artificial Sequence: Synthetic oligonucleotide
  Sense strand starting at position 195 of SEQ ID NO: 1880253
accauuguuguguaauaaa

SEQ ID NO: 1953499 - RNA, 19 nt, Artificial Sequence
  Description of Artificial Sequence: Synthetic oligonucleotide
  Antisense strand to SEQ ID NO: 1953498
uuuauuacacaacaauggu

SEQ ID NO: 1953500 - RNA, 19 nt, Artificial Sequence
  Description of Artificial Sequence: Synthetic oligonucleotide
  Sense strand starting at position 260 of SEQ ID NO: 1880253
acaauugugugaguaagga

SEQ ID NO: 1953501 - RNA, 19 nt, Artificial Sequence
  Description of Artificial Sequence: Synthetic oligonucleotide
  Antisense strand to SEQ ID NO: 1953500
uccuuacucacacaauugu

SEQ ID NO: 1953502 - RNA, 19 nt, Artificial Sequence
  Description of Artificial Sequence: Synthetic oligonucleotide
  Sense strand starting at position 344 of SEQ ID NO: 1880253
ugguuaccucuccauguga

SEQ ID NO: 1953503 - RNA, 19 nt, Artificial Sequence
  Description of Artificial Sequence: Synthetic oligonucleotide
  Antisense strand to SEQ ID NO: 1953502
ucacauggagagguaacca

SEQ ID NO: 1953504 - RNA, 19 nt, Artificial Sequence
  Description of Artificial Sequence: Synthetic oligonucleotide
  Sense strand starting at position 569 of SEQ ID NO: 1880253
gggagguauguugagguca

SEQ ID NO: 1953505 - RNA, 19 nt, Artificial Sequence
  Description of Artificial Sequence: Synthetic oligonucleotide
  Antisense strand to SEQ ID NO: 1953504
ugaccucaacauaccuccc

SEQ ID NO: 1953506 - RNA, 19 nt, Artificial Sequence
  Description of Artificial Sequence: Synthetic oligonucleotide
  Sense strand starting at position 754 of SEQ ID NO: 1880253
guuacauggcagcaugaua

SEQ ID NO: 1953507 - RNA, 19 nt, Artificial Sequence
  Description of Artificial Sequence: Synthetic oligonucleotide
  Antisense strand to SEQ ID NO: 1953506
uaucaugcugccauguaac

SEQ ID NO: 1953508 - RNA, 19 nt, Artificial Sequence
  Description of Artificial Sequence: Synthetic oligonucleotide
  Sense strand starting at position 772 of SEQ ID NO: 1880253
augugcuuuaagcagagaa

SEQ ID NO: 1953509 - RNA, 19 nt, Artificial Sequence
  Description of Artificial Sequence: Synthetic oligonucleotide
  Antisense strand to SEQ ID NO: 1953508
uucucugcuuaaagcacau

SEQ ID NO: 1953510 - RNA, 19 nt, Artificial Sequence
  Description of Artificial Sequence: Synthetic oligonucleotide
  Sense strand starting at position 774 of SEQ ID NO: 1880253
gugcuuuaagcagagaaau

SEQ ID NO: 1953511 - RNA, 19 nt, Artificial Sequence
  Description of Artificial Sequence: Synthetic oligonucleotide
  Antisense strand to SEQ ID NO: 1953510
auuucucugcuuaaagcac

SEQ ID NO: 1953512 - RNA, 19 nt, Artificial Sequence
  Description of Artificial Sequence: Synthetic oligonucleotide
  Sense strand starting at position 785 of SEQ ID NO: 1880253
agagaaauaccagguagcu

SEQ ID NO: 1953513 - RNA, 19 nt, Artificial Sequence
  Description of Artificial Sequence: Synthetic oligonucleotide
  Antisense strand to SEQ ID NO: 1953512
agcuaccugguauuucucu

SEQ ID NO: 1953514 - RNA, 19 nt, Artificial Sequence
  Description of Artificial Sequence: Synthetic oligonucleotide
  Sense strand starting at position 999 of SEQ ID NO: 1880253
guaucucuuggguauggau

SEQ ID NO: 1953515 - RNA, 19 nt, Artificial Sequence
  Description of Artificial Sequence: Synthetic oligonucleotide
  Antisense strand to SEQ ID NO: 1953514
auccauacccaagagauac

SEQ ID NO: 1953516 - RNA, 19 nt, Artificial Sequence
  Description of Artificial Sequence: Synthetic oligonucleotide
  Sense strand starting at position 1008 of SEQ ID NO: 1880253
ggguauggauucuugggaa

SEQ ID NO: 1953517 - RNA, 19 nt, Artificial Sequence
  Description of Artificial Sequence: Synthetic oligonucleotide
  Antisense strand to SEQ ID NO: 1953516
uucccaagaauccauaccc

SEQ ID NO: 1953518 - RNA, 19 nt, Artificial Sequence
  Description of Artificial Sequence: Synthetic oligonucleotide
  Sense strand starting at position 1159 of SEQ ID NO: 1880253
acugaaugaucucuacugu

SEQ ID NO: 1953519 - RNA, 19 nt, Artificial Sequence
  Description of Artificial Sequence: Synthetic oligonucleotide
  Antisense strand to SEQ ID NO: 1953518
acaguagagaucauucagu

SEQ ID NO: 1953520 - RNA, 19 nt, Artificial Sequence
  Description of Artificial Sequence: Synthetic oligonucleotide
  Sense strand starting at position 1160 of SEQ ID NO: 1880253
cugaaugaucucuacuguu

SEQ ID NO: 1953521 - RNA, 19 nt, Artificial Sequence
  Description of Artificial Sequence: Synthetic oligonucleotide
  Antisense strand to SEQ ID NO: 1953520
aacaguagagaucauucag

SEQ ID NO: 1953522 - RNA, 19 nt, Artificial Sequence
  Description of Artificial Sequence: Synthetic oligonucleotide
  Sense strand starting at position 1546 of SEQ ID NO: 1880253
uuaggaggccuggauugua

SEQ ID NO: 1953523 - RNA, 19 nt, Artificial Sequence
  Description of Artificial Sequence: Synthetic oligonucleotide
  Antisense strand to SEQ ID NO: 1953522
uacaauccaggccuccuaa

SEQ ID NO: 1953524 - RNA, 19 nt, Artificial Sequence
  Description of Artificial Sequence: Synthetic oligonucleotide
  Sense strand starting at position 1554 of SEQ ID NO: 1880253
ccuggauuguaauccugau

SEQ ID NO: 1953525 - RNA, 19 nt, Artificial Sequence
  Description of Artificial Sequence: Synthetic oligonucleotide
  Antisense strand to SEQ ID NO: 1953524
aucaggauuacaauccagg

SEQ ID NO: 1953526 - RNA, 19 nt, Artificial Sequence
  Description of Artificial Sequence: Synthetic oligonucleotide
  Sense strand starting at position 1691 of SEQ ID NO: 1880253
auuguucuccauggacuaa

SEQ ID NO: 1953527 - RNA, 19 nt, Artificial Sequence
  Description of Artificial Sequence: Synthetic oligonucleotide
  Antisense strand to SEQ ID NO: 1953526
uuaguccauggagaacaau

SEQ ID NO: 1953528 - RNA, 19 nt, Artificial Sequence
  Description of Artificial Sequence: Synthetic oligonucleotide
  Sense strand starting at position 1798 of SEQ ID NO: 1880253
ucauguauugacuaagccu

SEQ ID NO: 1953529 - RNA, 19 nt, Artificial Sequence
  Description of Artificial Sequence: Synthetic oligonucleotide
  Antisense strand to SEQ ID NO: 1953528
aggcuuagucaauacauga

SEQ ID NO: 1953530 - RNA, 19 nt, Artificial Sequence
  Description of Artificial Sequence: Synthetic oligonucleotide
  Sense strand starting at position 1892 of SEQ ID NO: 1880253
aaaggaguccaguggacua

SEQ ID NO: 1953531 - RNA, 19 nt, Artificial Sequence
  Description of Artificial Sequence: Synthetic oligonucleotide
  Antisense strand to SEQ ID NO: 1953530
uaguccacuggacuccuuu

SEQ ID NO: 1953532 - RNA, 19 nt, Artificial Sequence
  Description of Artificial Sequence: Synthetic oligonucleotide
  Sense strand starting at position 1970 of SEQ ID NO: 1880253
ugcagaaacuccucuaaag

SEQ ID NO: 1953533 - RNA, 19 nt, Artificial Sequence
  Description of Artificial Sequence: Synthetic oligonucleotide
  Antisense strand to SEQ ID NO: 1953532
cuuuagaggaguuucugca

SEQ ID NO: 1953534 - RNA, 19 nt, Artificial Sequence
  Description of Artificial Sequence: Synthetic oligonucleotide
  Sense strand starting at position 2009 of SEQ ID NO: 1880253
gcugucauugggagugguu

SEQ ID NO: 1953535 - RNA, 19 nt, Artificial Sequence
  Description of Artificial Sequence: Synthetic oligonucleotide
  Antisense strand to SEQ ID NO: 1953534
aaccacucccaaugacagc

SEQ ID NO: 1953536 - RNA, 19 nt, Artificial Sequence
  Description of Artificial Sequence: Synthetic oligonucleotide
  Sense strand starting at position 2054 of SEQ ID NO: 1880253
auggauaacuuugucaagu

SEQ ID NO: 1953537 - RNA, 19 nt, Artificial Sequence
  Description of Artificial Sequence: Synthetic oligonucleotide
  Antisense strand to SEQ ID NO: 1953536
acuugacaaaguuauccau

SEQ ID NO: 1953538 - RNA, 19 nt, Artificial Sequence
  Description of Artificial Sequence: Synthetic oligonucleotide
  Sense strand starting at position 2151 of SEQ ID NO: 1880253
gccuaugggauacauguuu

SEQ ID NO: 1953539 - RNA, 19 nt, Artificial Sequence
  Description of Artificial Sequence: Synthetic oligonucleotide
  Antisense strand to SEQ ID NO: 1953538
aaacauguaucccauaggc

SEQ ID NO: 1953540 - RNA, 19 nt, Artificial Sequence
  Description of Artificial Sequence: Synthetic oligonucleotide
  Sense strand starting at position 2231 of SEQ ID NO: 1880253
gucuguuugacugagacaa

SEQ ID NO: 1953541 - RNA, 19 nt, Artificial Sequence
  Description of Artificial Sequence: Synthetic oligonucleotide
  Antisense strand to SEQ ID NO: 1953540
uugucucagucaaacagac

SEQ ID NO: 1953542 - RNA, 19 nt, Artificial Sequence
  Description of Artificial Sequence: Synthetic oligonucleotide
  Sense strand starting at position 2444 of SEQ ID NO: 1880253
gaaugcuguguuuagaaau

SEQ ID NO: 1953543 - RNA, 19 nt, Artificial Sequence
  Description of Artificial Sequence: Synthetic oligonucleotide
  Antisense strand to SEQ ID NO: 1953542
auuucuaaacacagcauuc

SEQ ID NO: 1953544 - RNA, 19 nt, Artificial Sequence
  Description of Artificial Sequence: Synthetic oligonucleotide
  Sense strand starting at position 2488 of SEQ ID NO: 1880253
aauguuauaggguaagagu

SEQ ID NO: 1953545 - RNA, 19 nt, Artificial Sequence
  Description of Artificial Sequence: Synthetic oligonucleotide
  Antisense strand to SEQ ID NO: 1953544
acucuuacccuauaacauu

SEQ ID NO: 1953546 - RNA, 19 nt, Artificial Sequence
  Description of Artificial Sequence: Synthetic oligonucleotide
  Sense strand starting at position 2508 of SEQ ID NO: 1880253
gcugaugugggagacuuua

SEQ ID NO: 1953547 - RNA, 19 nt, Artificial Sequence
  Description of Artificial Sequence: Synthetic oligonucleotide
  Antisense strand to SEQ ID NO: 1953546
uaaagucucccacaucagc

SEQ ID NO: 1953548 - RNA, 19 nt, Artificial Sequence
  Description of Artificial Sequence: Synthetic oligonucleotide
  Sense strand starting at position 2518 of SEQ ID NO: 1880253
gagacuuuacuuugcagau

SEQ ID NO: 1953549 - RNA, 19 nt, Artificial Sequence
  Description of Artificial Sequence: Synthetic oligonucleotide
  Antisense strand to SEQ ID NO: 1953548
aucugcaaaguaaagucuc

SEQ ID NO: 1953550 - RNA, 19 nt, Artificial Sequence
  Description of Artificial Sequence: Synthetic oligonucleotide
  Sense strand starting at position 2519 of SEQ ID NO: 1880253
agacuuuacuuugcagaua

SEQ ID NO: 1953551 - RNA, 19 nt, Artificial Sequence
  Description of Artificial Sequence: Synthetic oligonucleotide
  Antisense strand to SEQ ID NO: 1953550
uaucugcaaaguaaagucu

SEQ ID NO: 1953552 - RNA, 19 nt, Artificial Sequence
  Description of Artificial Sequence: Synthetic oligonucleotide
  Sense strand starting at position 2751 of SEQ ID NO: 1880253
ggugaagcugcauucguuu

SEQ ID NO: 1953553 - RNA, 19 nt, Artificial Sequence
  Description of Artificial Sequence: Synthetic oligonucleotide
  Antisense strand to SEQ ID NO: 1953552
aaacgaaugcagcuucacc

SEQ ID NO: 1953554 - RNA, 19 nt, Artificial Sequence
  Description of Artificial Sequence: Synthetic oligonucleotide
  Sense strand starting at position 2777 of SEQ ID NO: 1880253
uaauguuugcuagagagac

SEQ ID NO: 1953555 - RNA, 19 nt, Artificial Sequence
  Description of Artificial Sequence: Synthetic oligonucleotide
  Antisense strand to SEQ ID NO: 1953554
gucucucuagcaaacauua

SEQ ID NO: 1953556 - RNA, 19 nt, Artificial Sequence
  Description of Artificial Sequence: Synthetic oligonucleotide
  Sense strand starting at position 2793 of SEQ ID NO: 1880253
gacaguaaaguguagugaa

SEQ ID NO: 1953557 - RNA, 19 nt, Artificial Sequence
  Description of Artificial Sequence: Synthetic oligonucleotide
  Antisense strand to SEQ ID NO: 1953556
uucacuacacuuuacuguc

SEQ ID NO: 1953558 - RNA, 19 nt, Artificial Sequence
  Description of Artificial Sequence: Synthetic oligonucleotide
  Sense strand starting at position 2810 of SEQ ID NO: 1880253
aaugguuguuaacuacaga

SEQ ID NO: 1953559 - RNA, 19 nt, Artificial Sequence
  Description of Artificial Sequence: Synthetic oligonucleotide
  Antisense strand to SEQ ID NO: 1953558
ucuguaguuaacaaccauu

SEQ ID NO: 1953560 - RNA, 19 nt, Artificial Sequence
  Description of Artificial Sequence: Synthetic oligonucleotide
  Sense strand starting at position 3233 of SEQ ID NO: 1880253
ggugguggugauuauuacu

SEQ ID NO: 1953561 - RNA, 19 nt, Artificial Sequence
  Description of Artificial Sequence: Synthetic oligonucleotide
  Antisense strand to SEQ ID NO: 1953560
aguaauaaucaccaccacc

SEQ ID NO: 1953562 - RNA, 19 nt, Artificial Sequence
  Description of Artificial Sequence: Synthetic oligonucleotide
  Sense strand starting at position 3612 of SEQ ID NO: 1880253
acguuauaccucuagacuu

SEQ ID NO: 1953563 - RNA, 19 nt, Artificial Sequence
  Description of Artificial Sequence: Synthetic oligonucleotide
  Antisense strand to SEQ ID NO: 1953562
aagucuagagguauaacgu

SEQ ID NO: 1953564 - RNA, 19 nt, Artificial Sequence
  Description of Artificial Sequence: Synthetic oligonucleotide
  Sense strand starting at position 3614 of SEQ ID NO: 1880253
guuauaccucuagacuuac

SEQ ID NO: 1953565 - RNA, 19 nt, Artificial Sequence
  Description of Artificial Sequence: Synthetic oligonucleotide
  Antisense strand to SEQ ID NO: 1953564
guaagucuagagguauaac

SEQ ID NO: 1953566 - RNA, 19 nt, Artificial Sequence
  Description of Artificial Sequence: Synthetic oligonucleotide
  Sense strand starting at position 3782 of SEQ ID NO: 1880253
agacuaaaucucuaguguu

SEQ ID NO: 1953567 - RNA, 19 nt, Artificial Sequence
  Description of Artificial Sequence: Synthetic oligonucleotide
  Antisense strand to SEQ ID NO: 1953566
aacacuagagauuuagucu

SEQ ID NO: 1953568 - RNA, 19 nt, Artificial Sequence
  Description of Artificial Sequence: Synthetic oligonucleotide
  Sense strand starting at position 3951 of SEQ ID NO: 1880253
aggucucuauuaguaauaa

SEQ ID NO: 1953569 - RNA, 19 nt, Artificial Sequence
  Description of Artificial Sequence: Synthetic oligonucleotide
  Antisense strand to SEQ ID NO: 1953568
uuauuacuaauagagaccu

SEQ ID NO: 1953570 - RNA, 19 nt, Artificial Sequence
  Description of Artificial Sequence: Synthetic oligonucleotide
  Sense strand starting at position 3961 of SEQ ID NO: 1880253
uaguaauaaccuuacguga

SEQ ID NO: 1953571 - RNA, 19 nt, Artificial Sequence
  Description of Artificial Sequence: Synthetic oligonucleotide
  Antisense strand to SEQ ID NO: 1953570
ucacguaagguuauuacua

SEQ ID NO: 1953572 - RNA, 19 nt, Artificial Sequence
  Description of Artificial Sequence: Synthetic oligonucleotide
  Sense strand starting at position 3966 of SEQ ID NO: 1880253
auaaccuuacgugauugua

SEQ ID NO: 1953573 - RNA, 19 nt, Artificial Sequence
  Description of Artificial Sequence: Synthetic oligonucleotide
  Antisense strand to SEQ ID NO: 1953572
uacaaucacguaagguuau

SEQ ID NO: 1953574 - RNA, 19 nt, Artificial Sequence
  Description of Artificial Sequence: Synthetic oligonucleotide
  Sense strand starting at position 15 of SEQ ID NO: 1880254
gugagagauaagcagaguu

SEQ ID NO: 1953575 - RNA, 19 nt, Artificial Sequence
  Description of Artificial Sequence: Synthetic oligonucleotide
  Antisense strand to SEQ ID NO: 1953574
aacucugcuuaucucucac

SEQ ID NO: 1953576 - RNA, 19 nt, Artificial Sequence
  Description of Artificial Sequence: Synthetic oligonucleotide
  Sense strand starting at position 67 of SEQ ID NO: 1880254
uuaaguggcuuguuagaga

SEQ ID NO: 1953577 - RNA, 19 nt, Artificial Sequence
  Description of Artificial Sequence: Synthetic oligonucleotide
  Antisense strand to SEQ ID NO: 1953576
ucucuaacaagccacuuaa

SEQ ID NO: 1953578 - RNA, 19 nt, Artificial Sequence
  Description of Artificial Sequence: Synthetic oligonucleotide
  Sense strand starting at position 72 of SEQ ID NO: 1880254
uggcuuguuagagaaccau

SEQ ID NO: 1953579 - RNA, 19 nt, Artificial Sequence
  Description of Artificial Sequence: Synthetic oligonucleotide
  Antisense strand to SEQ ID NO: 1953578
augguucucuaacaagcca

SEQ ID NO: 1953580 - RNA, 19 nt, Artificial Sequence
  Description of Artificial Sequence: Synthetic oligonucleotide
  Sense strand starting at position 104 of SEQ ID NO: 1880254
gcgagacagaguuauggaa

SEQ ID NO: 1953581 - RNA, 19 nt, Artificial Sequence
  Description of Artificial Sequence: Synthetic oligonucleotide
  Antisense strand to SEQ ID NO: 1953580
uuccauaacucugucucgc

SEQ ID NO: 1953582 - RNA, 19 nt, Artificial Sequence
  Description of Artificial Sequence: Synthetic oligonucleotide
  Sense strand starting at position 134 of SEQ ID NO: 1880254
gagaguuugugggcaagaa

SEQ ID NO: 1953583 - RNA, 19 nt, Artificial Sequence
  Description of Artificial Sequence: Synthetic oligonucleotide
  Antisense strand to SEQ ID NO: 1953582
uucuugcccacaaacucuc

SEQ ID NO: 1953584 - RNA, 19 nt, Artificial Sequence
  Description of Artificial Sequence: Synthetic oligonucleotide
  Sense strand starting at position 198 of SEQ ID NO: 1880254
cccugcuaacuugagagau

SEQ ID NO: 1953585 - RNA, 19 nt, Artificial Sequence
  Description of Artificial Sequence: Synthetic oligonucleotide
  Antisense strand to SEQ ID NO: 1953584
aucucucaaguuagcaggg

SEQ ID NO: 1953586 - RNA, 19 nt, Artificial Sequence
  Description of Artificial Sequence: Synthetic oligonucleotide
  Sense strand starting at position 219 of SEQ ID NO: 1880254
gcaaauaaaugaucaguca

SEQ ID NO: 1953587 - RNA, 19 nt, Artificial Sequence
  Description of Artificial Sequence: Synthetic oligonucleotide
  Antisense strand to SEQ ID NO: 1953586
ugacugaucauuuauuugc

SEQ ID NO: 1953588 - RNA, 19 nt, Artificial Sequence
  Description of Artificial Sequence: Synthetic oligonucleotide
  Sense strand starting at position 455 of SEQ ID NO: 1880254
ugagauagcuuuccuaagg

SEQ ID NO: 1953589 - RNA, 19 nt, Artificial Sequence
  Description of Artificial Sequence: Synthetic oligonucleotide
  Antisense strand to SEQ ID NO: 1953588
ccuuaggaaagcuaucuca

SEQ ID NO: 1953590 - RNA, 19 nt, Artificial Sequence
  Description of Artificial Sequence: Synthetic oligonucleotide
  Sense strand starting at position 473 of SEQ ID NO: 1880254
gucacauagcccgugguuu

SEQ ID NO: 1953591 - RNA, 19 nt, Artificial Sequence
  Description of Artificial Sequence: Synthetic oligonucleotide
  Antisense strand to SEQ ID NO: 1953590
aaaccacgggcuaugugac

SEQ ID NO: 1953592 - RNA, 19 nt, Artificial Sequence
  Description of Artificial Sequence: Synthetic oligonucleotide
  Sense strand starting at position 622 of SEQ ID NO: 1880254
ucauucuuuccguagaucu

SEQ ID NO: 1953593 - RNA, 19 nt, Artificial Sequence
  Description of Artificial Sequence: Synthetic oligonucleotide
  Antisense strand to SEQ ID NO: 1953592
agaucuacggaaagaauga

SEQ ID NO: 1953594 - RNA, 19 nt, Artificial Sequence
  Description of Artificial Sequence: Synthetic oligonucleotide
  Sense strand starting at position 624 of SEQ ID NO: 1880254
auucuuuccguagaucuua

SEQ ID NO: 1953595 - RNA, 19 nt, Artificial Sequence
  Description of Artificial Sequence: Synthetic oligonucleotide
  Antisense strand to SEQ ID NO: 1953594
uaagaucuacggaaagaau

SEQ ID NO: 1953596 - RNA, 19 nt, Artificial Sequence
  Description of Artificial Sequence: Synthetic oligonucleotide
  Sense strand starting at position 725 of SEQ ID NO: 1880254
aaacuuacuguuggcagau

SEQ ID NO: 1953597 - RNA, 19 nt, Artificial Sequence
  Description of Artificial Sequence: Synthetic oligonucleotide
  Antisense strand to SEQ ID NO: 1953596
aucugccaacaguaaguuu

SEQ ID NO: 1953598 - RNA, 19 nt, Artificial Sequence
  Description of Artificial Sequence: Synthetic oligonucleotide
  Sense strand starting at position 1072 of SEQ ID NO: 1880254
ggagguauggcuuguacag

SEQ ID NO: 1953599 - RNA, 19 nt, Artificial Sequence
  Description of Artificial Sequence: Synthetic oligonucleotide
  Antisense strand to SEQ ID NO: 1953598
cuguacaagccauaccucc

SEQ ID NO: 1953600 - RNA, 19 nt, Artificial Sequence
  Description of Artificial Sequence: Synthetic oligonucleotide
  Sense strand starting at position 1296 of SEQ ID NO: 1880254
acuccuuaacacuggugau

SEQ ID NO: 1953601 - RNA, 19 nt, Artificial Sequence
  Description of Artificial Sequence: Synthetic oligonucleotide
  Antisense strand to SEQ ID NO: 1953600
aucaccaguguuaaggagu

SEQ ID NO: 1953602 - RNA, 19 nt, Artificial Sequence
  Description of Artificial Sequence: Synthetic oligonucleotide
  Sense strand starting at position 1317 of SEQ ID NO: 1880254
ucaagcaugcaguaacaau

SEQ ID NO: 1953603 - RNA, 19 nt, Artificial Sequence
  Description of Artificial Sequence: Synthetic oligonucleotide
  Antisense strand to SEQ ID NO: 1953602
auuguuacugcaugcuuga

SEQ ID NO: 1953604 - RNA, 19 nt, Artificial Sequence
  Description of Artificial Sequence: Synthetic oligonucleotide
  Sense strand starting at position 1387 of SEQ ID NO: 1880254
gcuacaaagucuuuagauu

SEQ ID NO: 1953605 - RNA, 19 nt, Artificial Sequence
  Description of Artificial Sequence: Synthetic oligonucleotide
  Antisense strand to SEQ ID NO: 1953604
aaucuaaagacuuuguagc

SEQ ID NO: 1953606 - RNA, 19 nt, Artificial Sequence
  Description of Artificial Sequence: Synthetic oligonucleotide
  Sense strand starting at position 1396 of SEQ ID NO: 1880254
ucuuuagauucccuuagua

SEQ ID NO: 1953607 - RNA, 19 nt, Artificial Sequence
  Description of Artificial Sequence: Synthetic oligonucleotide
  Antisense strand to SEQ ID NO: 1953606
uacuaagggaaucuaaaga

SEQ ID NO: 1953608 - RNA, 19 nt, Artificial Sequence
  Description of Artificial Sequence: Synthetic oligonucleotide
  Sense strand starting at position 1398 of SEQ ID NO: 1880254
uuuagauucccuuaguauu

SEQ ID NO: 1953609 - RNA, 19 nt, Artificial Sequence
  Description of Artificial Sequence: Synthetic oligonucleotide
  Antisense strand to SEQ ID NO: 1953608
aauacuaagggaaucuaaa

SEQ ID NO: 1953610 - RNA, 19 nt, Artificial Sequence
  Description of Artificial Sequence: Synthetic oligonucleotide
  Sense strand starting at position 1560 of SEQ ID NO: 1880254
agaugcucagcugauuaau

SEQ ID NO: 1953611 - RNA, 19 nt, Artificial Sequence
  Description of Artificial Sequence: Synthetic oligonucleotide
  Antisense strand to SEQ ID NO: 1953610
auuaaucagcugagcaucu

SEQ ID NO: 1953612 - RNA, 19 nt, Artificial Sequence
  Description of Artificial Sequence: Synthetic oligonucleotide
  Sense strand starting at position 1572 of SEQ ID NO: 1880254
gauuaauagccacguuaaa

SEQ ID NO: 1953613 - RNA, 19 nt, Artificial Sequence
  Description of Artificial Sequence: Synthetic oligonucleotide
  Antisense strand to SEQ ID NO: 1953612
uuuaacguggcuauuaauc

SEQ ID NO: 1953614 - RNA, 19 nt, Artificial Sequence
  Description of Artificial Sequence: Synthetic oligonucleotide
  Sense strand starting at position 2046 of SEQ ID NO: 1880254
uucuuaauuugggaaauuc

SEQ ID NO: 1953615 - RNA, 19 nt, Artificial Sequence
  Description of Artificial Sequence: Synthetic oligonucleotide
  Antisense strand to SEQ ID NO: 1953614
gaauuucccaaauuaagaa

SEQ ID NO: 1953616 - RNA, 19 nt, Artificial Sequence
  Description of Artificial Sequence: Synthetic oligonucleotide
  Sense strand starting at position 2170 of SEQ ID NO: 1880254
uucuguggaaucugaagaa

SEQ ID NO: 1953617 - RNA, 19 nt, Artificial Sequence
  Description of Artificial Sequence: Synthetic oligonucleotide
  Antisense strand to SEQ ID NO: 1953616
uucuucagauuccacagaa

SEQ ID NO: 1953618 - RNA, 19 nt, Artificial Sequence
  Description of Artificial Sequence: Synthetic oligonucleotide
  Sense strand starting at position 2456 of SEQ ID NO: 1880254
cugcguuuaggcucugagu

SEQ ID NO: 1953619 - RNA, 19 nt, Artificial Sequence
  Description of Artificial Sequence: Synthetic oligonucleotide
  Antisense strand to SEQ ID NO: 1953618
acucagagccuaaacgcag

SEQ ID NO: 1953620 - RNA, 19 nt, Artificial Sequence
  Description of Artificial Sequence: Synthetic oligonucleotide
  Sense strand starting at position 2457 of SEQ ID NO: 1880254
ugcguuuaggcucugaguu

SEQ ID NO: 1953621 - RNA, 19 nt, Artificial Sequence
  Description of Artificial Sequence: Synthetic oligonucleotide
  Antisense strand to SEQ ID NO: 1953620
aacucagagccuaaacgca

SEQ ID NO: 1953622 - RNA, 19 nt, Artificial Sequence
  Description of Artificial Sequence: Synthetic oligonucleotide
  Sense strand starting at position 2469 of SEQ ID NO: 1880254
cugaguuuaggcuaccaca

SEQ ID NO: 1953623 - RNA, 19 nt, Artificial Sequence
  Description of Artificial Sequence: Synthetic oligonucleotide
  Antisense strand to SEQ ID NO: 1953622
ugugguagccuaaacucag

SEQ ID NO: 1953624 - RNA, 19 nt, Artificial Sequence
  Description of Artificial Sequence: Synthetic oligonucleotide
  Sense strand starting at position 2582 of SEQ ID NO: 1880254
gccagucacccgcuugauu

SEQ ID NO: 1953625 - RNA, 19 nt, Artificial Sequence
  Description of Artificial Sequence: Synthetic oligonucleotide
  Antisense strand to SEQ ID NO: 1953624
aaucaagcgggugacuggc

SEQ ID NO: 1953626 - RNA, 19 nt, Artificial Sequence
  Description of Artificial Sequence: Synthetic oligonucleotide
  Sense strand starting at position 2683 of SEQ ID NO: 1880254
cucucagcuguagaggauu

SEQ ID NO: 1953627 - RNA, 19 nt, Artificial Sequence
  Description of Artificial Sequence: Synthetic oligonucleotide
  Antisense strand to SEQ ID NO: 1953626
aauccucuacagcugagag

SEQ ID NO: 1953628 - RNA, 19 nt, Artificial Sequence
  Description of Artificial Sequence: Synthetic oligonucleotide
  Sense strand starting at position 2695 of SEQ ID NO: 1880254
gaggauuuguccuagguag

SEQ ID NO: 1953629 - RNA, 19 nt, Artificial Sequence
  Description of Artificial Sequence: Synthetic oligonucleotide
  Antisense strand to SEQ ID NO: 1953628
cuaccuaggacaaauccuc

SEQ ID NO: 1953630 - RNA, 19 nt, Artificial Sequence
  Description of Artificial Sequence: Synthetic oligonucleotide
  Sense strand starting at position 3147 of SEQ ID NO: 1880254
ugucuuggauucccacaau

SEQ ID NO: 1953631 - RNA, 19 nt, Artificial Sequence
  Description of Artificial Sequence: Synthetic oligonucleotide
  Antisense strand to SEQ ID NO: 1953630
auugugggaauccaagaca

SEQ ID NO: 1953632 - RNA, 19 nt, Artificial Sequence
  Description of Artificial Sequence: Synthetic oligonucleotide
  Sense strand starting at position 3189 of SEQ ID NO: 1880254
cagcuuugccaucaggauu

SEQ ID NO: 1953633 - RNA, 19 nt, Artificial Sequence
  Description of Artificial Sequence: Synthetic oligonucleotide
  Antisense strand to SEQ ID NO: 1953632
aauccugauggcaaagcug

SEQ ID NO: 1953634 - RNA, 19 nt, Artificial Sequence
  Description of Artificial Sequence: Synthetic oligonucleotide
  Sense strand starting at position 3204 of SEQ ID NO: 1880254
gauugcagucuuugagaga

SEQ ID NO: 1953635 - RNA, 19 nt, Artificial Sequence
  Description of Artificial Sequence: Synthetic oligonucleotide
  Antisense strand to SEQ ID NO: 1953634
ucucucaaagacugcaauc

SEQ ID NO: 1953636 - RNA, 19 nt, Artificial Sequence
  Description of Artificial Sequence: Synthetic oligonucleotide
  Sense strand starting at position 3354 of SEQ ID NO: 1880254
aggugugucaaugauuaaa

SEQ ID NO: 1953637 - RNA, 19 nt, Artificial Sequence
  Description of Artificial Sequence: Synthetic oligonucleotide
  Antisense strand to SEQ ID NO: 1953636
uuuaaucauugacacaccu

SEQ ID NO: 1953638 - RNA, 19 nt, Artificial Sequence
  Description of Artificial Sequence: Synthetic oligonucleotide
  Sense strand starting at position 3443 of SEQ ID NO: 1880254
cugugauuacgugucuggu

SEQ ID NO: 1953639 - RNA, 19 nt, Artificial Sequence
  Description of Artificial Sequence: Synthetic oligonucleotide
  Antisense strand to SEQ ID NO: 1953638
accagacacguaaucacag

SEQ ID NO: 1953640 - RNA, 19 nt, Artificial Sequence
  Description of Artificial Sequence: Synthetic oligonucleotide
  Sense strand starting at position 3444 of SEQ ID NO: 1880254
ugugauuacgugucugguu

SEQ ID NO: 1953641 - RNA, 19 nt, Artificial Sequence
  Description of Artificial Sequence: Synthetic oligonucleotide
  Antisense strand to SEQ ID NO: 1953640
aaccagacacguaaucaca

SEQ ID NO: 1953642 - RNA, 19 nt, Artificial Sequence
  Description of Artificial Sequence: Synthetic oligonucleotide
  Sense strand starting at position 3531 of SEQ ID NO: 1880254
guuccauacgaucauggaa

SEQ ID NO: 1953643 - RNA, 19 nt, Artificial Sequence
  Description of Artificial Sequence: Synthetic oligonucleotide
  Antisense strand to SEQ ID NO: 1953642
uuccaugaucguauggaac

SEQ ID NO: 1953644 - RNA, 19 nt, Artificial Sequence
  Description of Artificial Sequence: Synthetic oligonucleotide
  Sense strand starting at position 3550 of SEQ ID NO: 1880254
ccuggaggaguccgaaauu

SEQ ID NO: 1953645 - RNA, 19 nt, Artificial Sequence
  Description of Artificial Sequence: Synthetic oligonucleotide
  Antisense strand to SEQ ID NO: 1953644
aauuucggacuccuccagg

SEQ ID NO: 1953646 - RNA, 19 nt, Artificial Sequence
  Description of Artificial Sequence: Synthetic oligonucleotide
  Sense strand starting at position 3709 of SEQ ID NO: 1880254
auaugcuuacaugagucau

SEQ ID NO: 1953647 - RNA, 19 nt, Artificial Sequence
  Description of Artificial Sequence: Synthetic oligonucleotide
  Antisense strand to SEQ ID NO: 1953646
augacucauguaagcauau

SEQ ID NO: 1953648 - RNA, 19 nt, Artificial Sequence
  Description of Artificial Sequence: Synthetic oligonucleotide
  Sense strand starting at position 3719 of SEQ ID NO: 1880254
augagucauuguguauuag

SEQ ID NO: 1953649 - RNA, 19 nt, Artificial Sequence
  Description of Artificial Sequence: Synthetic oligonucleotide
  Antisense strand to SEQ ID NO: 1953648
cuaauacacaaugacucau

SEQ ID NO: 1953650 - RNA, 19 nt, Artificial Sequence
  Description of Artificial Sequence: Synthetic oligonucleotide
  Sense strand starting at position 3729 of SEQ ID NO: 1880254
guguauuagcagcagaaca

SEQ ID NO: 1953651 - RNA, 19 nt, Artificial Sequence
  Description of Artificial Sequence: Synthetic oligonucleotide
  Antisense strand to SEQ ID NO: 1953650
uguucugcugcuaauacac

SEQ ID NO: 1953652 - RNA, 19 nt, Artificial Sequence
  Description of Artificial Sequence: Synthetic oligonucleotide
  Sense strand starting at position 3731 of SEQ ID NO: 1880254
guauuagcagcagaacaau

SEQ ID NO: 1953653 - RNA, 19 nt, Artificial Sequence
  Description of Artificial Sequence: Synthetic oligonucleotide
  Antisense strand to SEQ ID NO: 1953652
auuguucugcugcuaauac

SEQ ID NO: 1953654 - RNA, 19 nt, Artificial Sequence
  Description of Artificial Sequence: Synthetic oligonucleotide
  Sense strand starting at position 18 of SEQ ID NO: 1880255
ugcacuuauccagaucgga

SEQ ID NO: 1953655 - RNA, 19 nt, Artificial Sequence
  Description of Artificial Sequence: Synthetic oligonucleotide
  Antisense strand to SEQ ID NO: 1953654
uccgaucuggauaagugca

SEQ ID NO: 1953656 - RNA, 19 nt, Artificial Sequence
  Description of Artificial Sequence: Synthetic oligonucleotide
  Sense strand starting at position 113 of SEQ ID NO: 1880255
guguaaacucuauaaccuc

SEQ ID NO: 1953657 - RNA, 19 nt, Artificial Sequence
  Description of Artificial Sequence: Synthetic oligonucleotide
  Antisense strand to SEQ ID NO: 1953656
gagguuauagaguuuacac

SEQ ID NO: 1953658 - RNA, 19 nt, Artificial Sequence
  Description of Artificial Sequence: Synthetic oligonucleotide
  Sense strand starting at position 146 of SEQ ID NO: 1880255
uguggagaugcuggaucaa

SEQ ID NO: 1953659 - RNA, 19 nt, Artificial Sequence
  Description of Artificial Sequence: Synthetic oligonucleotide
  Antisense strand to SEQ ID NO: 1953658
uugauccagcaucuccaca

SEQ ID NO: 1953660 - RNA, 19 nt, Artificial Sequence
  Description of Artificial Sequence: Synthetic oligonucleotide
  Sense strand starting at position 249 of SEQ ID NO: 1880255
ugagacaaaucaguaguuu

SEQ ID NO: 1953661 - RNA, 19 nt, Artificial Sequence
  Description of Artificial Sequence: Synthetic oligonucleotide
  Antisense strand to SEQ ID NO: 1953660
aaacuacugauuugucuca

SEQ ID NO: 1953662 - RNA, 19 nt, Artificial Sequence
  Description of Artificial Sequence: Synthetic oligonucleotide
  Sense strand starting at position 321 of SEQ ID NO: 1880255
cguucuucuccagauggga

SEQ ID NO: 1953663 - RNA, 19 nt, Artificial Sequence
  Description of Artificial Sequence: Synthetic oligonucleotide
  Antisense strand to SEQ ID NO: 1953662
ucccaucuggagaagaacg

SEQ ID NO: 1953664 - RNA, 19 nt, Artificial Sequence
  Description of Artificial Sequence: Synthetic oligonucleotide
  Sense strand starting at position 501 of SEQ ID NO: 1880255
ccaagaaugcaauaucagu

SEQ ID NO: 1953665 - RNA, 19 nt, Artificial Sequence
  Description of Artificial Sequence: Synthetic oligonucleotide
  Antisense strand to SEQ ID NO: 1953664
acugauauugcauucuugg

SEQ ID NO: 1953666 - RNA, 19 nt, Artificial Sequence
  Description of Artificial Sequence: Synthetic oligonucleotide
  Sense strand starting at position 790 of SEQ ID NO: 1880255
ggcucugaucuccaucuuu

SEQ ID NO: 1953667 - RNA, 19 nt, Artificial Sequence
  Description of Artificial Sequence: Synthetic oligonucleotide
  Antisense strand to SEQ ID NO: 1953666
aaagauggagaucagagcc

SEQ ID NO: 1953668 - RNA, 19 nt, Artificial Sequence
  Description of Artificial Sequence: Synthetic oligonucleotide
  Sense strand starting at position 860 of SEQ ID NO: 1880255
ugaggagaugccugaggua

SEQ ID NO: 1953669 - RNA, 19 nt, Artificial Sequence
  Description of Artificial Sequence: Synthetic oligonucleotide
  Antisense strand to SEQ ID NO: 1953668
uaccucaggcaucuccuca

SEQ ID NO: 1953670 - RNA, 19 nt, Artificial Sequence
  Description of Artificial Sequence: Synthetic oligonucleotide
  Sense strand starting at position 1082 of SEQ ID NO: 1880255
aaccaaauacuggguaagu

SEQ ID NO: 1953671 - RNA, 19 nt, Artificial Sequence
  Description of Artificial Sequence: Synthetic oligonucleotide
  Antisense strand to SEQ ID NO: 1953670
acuuacccaguauuugguu

SEQ ID NO: 1953672 - RNA, 19 nt, Artificial Sequence
  Description of Artificial Sequence: Synthetic oligonucleotide
  Sense strand starting at position 1083 of SEQ ID NO: 1880255
accaaauacuggguaaguu

SEQ ID NO: 1953673 - RNA, 19 nt, Artificial Sequence
  Description of Artificial Sequence: Synthetic oligonucleotide
  Antisense strand to SEQ ID NO: 1953672
aacuuacccaguauuuggu

SEQ ID NO: 1953674 - RNA, 19 nt, Artificial Sequence
  Description of Artificial Sequence: Synthetic oligonucleotide
  Sense strand starting at position 1112 of SEQ ID NO: 1880255
ggcuuuggaguccaacaaa

SEQ ID NO: 1953675 - RNA, 19 nt, Artificial Sequence
  Description of Artificial Sequence: Synthetic oligonucleotide
  Antisense strand to SEQ ID NO: 1953674
uuuguuggacuccaaagcc

SEQ ID NO: 1953676 - RNA, 19 nt, Artificial Sequence
  Description of Artificial Sequence: Synthetic oligonucleotide
  Sense strand starting at position 1231 of SEQ ID NO: 1880255
uaugguugucuugagauua

SEQ ID NO: 1953677 - RNA, 19 nt, Artificial Sequence
  Description of Artificial Sequence: Synthetic oligonucleotide
  Antisense strand to SEQ ID NO: 1953676
uaaucucaagacaaccaua

SEQ ID NO: 1953678 - RNA, 19 nt, Artificial Sequence
  Description of Artificial Sequence: Synthetic oligonucleotide
  Sense strand starting at position 1362 of SEQ ID NO: 1880255
gcuuuagagcuagacagaa

SEQ ID NO: 1953679 - RNA, 19 nt, Artificial Sequence
  Description of Artificial Sequence: Synthetic oligonucleotide
  Antisense strand to SEQ ID NO: 1953678
uucugucuagcucuaaagc

SEQ ID NO: 1953680 - RNA, 19 nt, Artificial Sequence
  Description of Artificial Sequence: Synthetic oligonucleotide
  Sense strand starting at position 1410 of SEQ ID NO: 1880255
ugugacuuugggcaugaua

SEQ ID NO: 1953681 - RNA, 19 nt, Artificial Sequence
  Description of Artificial Sequence: Synthetic oligonucleotide
  Antisense strand to SEQ ID NO: 1953680
uaucaugcccaaagucaca

SEQ ID NO: 1953682 - RNA, 19 nt, Artificial Sequence
  Description of Artificial Sequence: Synthetic oligonucleotide
  Sense strand starting at position 1412 of SEQ ID NO: 1880255
ugacuuugggcaugauaau

SEQ ID NO: 1953683 - RNA, 19 nt, Artificial Sequence
  Description of Artificial Sequence: Synthetic oligonucleotide
  Antisense strand to SEQ ID NO: 1953682
auuaucaugcccaaaguca

SEQ ID NO: 1953684 - RNA, 19 nt, Artificial Sequence
  Description of Artificial Sequence: Synthetic oligonucleotide
  Sense strand starting at position 1476 of SEQ ID NO: 1880255
uagaauaaugagugauggu

SEQ ID NO: 1953685 - RNA, 19 nt, Artificial Sequence
  Description of Artificial Sequence: Synthetic oligonucleotide
  Antisense strand to SEQ ID NO: 1953684
accaucacucauuauucua

SEQ ID NO: 1953686 - RNA, 19 nt, Artificial Sequence
  Description of Artificial Sequence: Synthetic oligonucleotide
  Sense strand starting at position 1483 of SEQ ID NO: 1880255
augagugauggugguaaga

SEQ ID NO: 1953687 - RNA, 19 nt, Artificial Sequence
  Description of Artificial Sequence: Synthetic oligonucleotide
  Antisense strand to SEQ ID NO: 1953686
ucuuaccaccaucacucau

SEQ ID NO: 1953688 - RNA, 19 nt, Artificial Sequence
  Description of Artificial Sequence: Synthetic oligonucleotide
  Sense strand starting at position 1678 of SEQ ID NO: 1880255
gguucuugagacuggcaaa

SEQ ID NO: 1953689 - RNA, 19 nt, Artificial Sequence
  Description of Artificial Sequence: Synthetic oligonucleotide
  Antisense strand to SEQ ID NO: 1953688
uuugccagucucaagaacc

SEQ ID NO: 1953690 - RNA, 19 nt, Artificial Sequence
  Description of Artificial Sequence: Synthetic oligonucleotide
  Sense strand starting at position 1679 of SEQ ID NO: 1880255
guucuugagacuggcaaag

SEQ ID NO: 1953691 - RNA, 19 nt, Artificial Sequence
  Description of Artificial Sequence: Synthetic oligonucleotide
  Antisense strand to SEQ ID NO: 1953690
cuuugccagucucaagaac

SEQ ID NO: 1953692 - RNA, 19 nt, Artificial Sequence
  Description of Artificial Sequence: Synthetic oligonucleotide
  Sense strand starting at position 1830 of SEQ ID NO: 1880255
ucacuuagagcaggaugaa

SEQ ID NO: 1953693 - RNA, 19 nt, Artificial Sequence
  Description of Artificial Sequence: Synthetic oligonucleotide
  Antisense strand to SEQ ID NO: 1953692
uucauccugcucuaaguga

SEQ ID NO: 1953694 - RNA, 19 nt, Artificial Sequence
  Description of Artificial Sequence: Synthetic oligonucleotide
  Sense strand starting at position 2031 of SEQ ID NO: 1880255
uagucaccuggugaaacau

SEQ ID NO: 1953695 - RNA, 19 nt, Artificial Sequence
  Description of Artificial Sequence: Synthetic oligonucleotide
  Antisense strand to SEQ ID NO: 1953694
auguuucaccaggugacua

SEQ ID NO: 1953696 - RNA, 19 nt, Artificial Sequence
  Description of Artificial Sequence: Synthetic oligonucleotide
  Sense strand starting at position 2040 of SEQ ID NO: 1880255
ggugaaacaugagcuuuga

SEQ ID NO: 1953697 - RNA, 19 nt, Artificial Sequence
  Description of Artificial Sequence: Synthetic oligonucleotide
  Antisense strand to SEQ ID NO: 1953696
ucaaagcucauguuucacc

SEQ ID NO: 1953698 - RNA, 19 nt, Artificial Sequence
  Description of Artificial Sequence: Synthetic oligonucleotide
  Sense strand starting at position 2044 of SEQ ID NO: 1880255
aaacaugagcuuugaguca

SEQ ID NO: 1953699 - RNA, 19 nt, Artificial Sequence
  Description of Artificial Sequence: Synthetic oligonucleotide
  Antisense strand to SEQ ID NO: 1953698
ugacucaaagcucauguuu

SEQ ID NO: 1953700 - RNA, 19 nt, Artificial Sequence
  Description of Artificial Sequence: Synthetic oligonucleotide
  Sense strand starting at position 2143 of SEQ ID NO: 1880255
agggucaguccaggaaaca

SEQ ID NO: 1953701 - RNA, 19 nt, Artificial Sequence
  Description of Artificial Sequence: Synthetic oligonucleotide
  Antisense strand to SEQ ID NO: 1953700
uguuuccuggacugacccu

SEQ ID NO: 1953702 - RNA, 19 nt, Artificial Sequence
  Description of Artificial Sequence: Synthetic oligonucleotide
  Sense strand starting at position 2195 of SEQ ID NO: 1880255
agcucugcucguuuccgaa

SEQ ID NO: 1953703 - RNA, 19 nt, Artificial Sequence
  Description of Artificial Sequence: Synthetic oligonucleotide
  Antisense strand to SEQ ID NO: 1953702
uucggaaacgagcagagcu

SEQ ID NO: 1953704 - RNA, 19 nt, Artificial Sequence
  Description of Artificial Sequence: Synthetic oligonucleotide
  Sense strand starting at position 2288 of SEQ ID NO: 1880255
aagcacguugcguuuauaa

SEQ ID NO: 1953705 - RNA, 19 nt, Artificial Sequence
  Description of Artificial Sequence: Synthetic oligonucleotide
  Antisense strand to SEQ ID NO: 1953704
uuauaaacgcaacgugcuu

SEQ ID NO: 1953706 - RNA, 19 nt, Artificial Sequence
  Description of Artificial Sequence: Synthetic oligonucleotide
  Sense strand starting at position 2360 of SEQ ID NO: 1880255
ugggaaggugauggucauu

SEQ ID NO: 1953707 - RNA, 19 nt, Artificial Sequence
  Description of Artificial Sequence: Synthetic oligonucleotide
  Antisense strand to SEQ ID NO: 1953706
aaugaccaucaccuuccca

SEQ ID NO: 1953708 - RNA, 19 nt, Artificial Sequence
  Description of Artificial Sequence: Synthetic oligonucleotide
  Sense strand starting at position 2618 of SEQ ID NO: 1880255
gggaaauggcugggaagua

SEQ ID NO: 1953709 - RNA, 19 nt, Artificial Sequence
  Description of Artificial Sequence: Synthetic oligonucleotide
  Antisense strand to SEQ ID NO: 1953708
uacuucccagccauuuccc

SEQ ID NO: 1953710 - RNA, 19 nt, Artificial Sequence
  Description of Artificial Sequence: Synthetic oligonucleotide
  Sense strand starting at position 2691 of SEQ ID NO: 1880255
uucuuaaauccugggcaag

SEQ ID NO: 1953711 - RNA, 19 nt, Artificial Sequence
  Description of Artificial Sequence: Synthetic oligonucleotide
  Antisense strand to SEQ ID NO: 1953710
cuugcccaggauuuaagaa

SEQ ID NO: 1953712 - RNA, 19 nt, Artificial Sequence
  Description of Artificial Sequence: Synthetic oligonucleotide
  Sense strand starting at position 2758 of SEQ ID NO: 1880255
caaggaauguuccugucau

SEQ ID NO: 1953713 - RNA, 19 nt, Artificial Sequence
  Description of Artificial Sequence: Synthetic oligonucleotide
  Antisense strand to SEQ ID NO: 1953712
augacaggaacauuccuug

SEQ ID NO: 1953714 - RNA, 19 nt, Artificial Sequence
  Description of Artificial Sequence: Synthetic oligonucleotide
  Sense strand starting at position 2900 of SEQ ID NO: 1880255
gcacaagagucacccauaa

SEQ ID NO: 1953715 - RNA, 19 nt, Artificial Sequence
  Description of Artificial Sequence: Synthetic oligonucleotide
  Antisense strand to SEQ ID NO: 1953714
uuaugggugacucuugugc

SEQ ID NO: 1953716 - RNA, 19 nt, Artificial Sequence
  Description of Artificial Sequence: Synthetic oligonucleotide
  Sense strand starting at position 3058 of SEQ ID NO: 1880255
uuucucucagucugggaaa

SEQ ID NO: 1953717 - RNA, 19 nt, Artificial Sequence
  Description of Artificial Sequence: Synthetic oligonucleotide
  Antisense strand to SEQ ID NO: 1953716
uuucccagacugagagaaa

SEQ ID NO: 1953718 - RNA, 19 nt, Artificial Sequence
  Description of Artificial Sequence: Synthetic oligonucleotide
  Sense strand starting at position 3156 of SEQ ID NO: 1880255
agucgaacucgugaaugac

SEQ ID NO: 1953719 - RNA, 19 nt, Artificial Sequence
  Description of Artificial Sequence: Synthetic oligonucleotide
  Antisense strand to SEQ ID NO: 1953718
gucauucacgaguucgacu

SEQ ID NO: 1953720 - RNA, 19 nt, Artificial Sequence
  Description of Artificial Sequence: Synthetic oligonucleotide
  Sense strand starting at position 3168 of SEQ ID NO: 1880255
gaaugacagucuguaugau

SEQ ID NO: 1953721 - RNA, 19 nt, Artificial Sequence
  Description of Artificial Sequence: Synthetic oligonucleotide
  Antisense strand to SEQ ID NO: 1953720
aucauacagacugucauuc

SEQ ID NO: 1953722 - RNA, 19 nt, Artificial Sequence
  Description of Artificial Sequence: Synthetic oligonucleotide
  Sense strand starting at position 3169 of SEQ ID NO: 1880255
aaugacagucuguaugauu

SEQ ID NO: 1953723 - RNA, 19 nt, Artificial Sequence
  Description of Artificial Sequence: Synthetic oligonucleotide
  Antisense strand to SEQ ID NO: 1953722
aaucauacagacugucauu

SEQ ID NO: 1953724 - RNA, 19 nt, Artificial Sequence
  Description of Artificial Sequence: Synthetic oligonucleotide
  Sense strand starting at position 3174 of SEQ ID NO: 1880255
cagucuguaugauuggaau

SEQ ID NO: 1953725 - RNA, 19 nt, Artificial Sequence
  Description of Artificial Sequence: Synthetic oligonucleotide
  Antisense strand to SEQ ID NO: 1953724
auuccaaucauacagacug

SEQ ID NO: 1953726 - RNA, 19 nt, Artificial Sequence
  Description of Artificial Sequence: Synthetic oligonucleotide
  Sense strand starting at position 3180 of SEQ ID NO: 1880255
guaugauuggaaugucaaa

SEQ ID NO: 1953727 - RNA, 19 nt, Artificial Sequence
  Description of Artificial Sequence: Synthetic oligonucleotide
  Antisense strand to SEQ ID NO: 1953726
uuugacauuccaaucauac

SEQ ID NO: 1953728 - RNA, 19 nt, Artificial Sequence
  Description of Artificial Sequence: Synthetic oligonucleotide
  Sense strand starting at position 3629 of SEQ ID NO: 1880255
aggauaacuuucccuuuga

SEQ ID NO: 1953729 - RNA, 19 nt, Artificial Sequence
  Description of Artificial Sequence: Synthetic oligonucleotide
  Antisense strand to SEQ ID NO: 1953728
ucaaagggaaaguuauccu

SEQ ID NO: 1953730 - RNA, 19 nt, Artificial Sequence
  Description of Artificial Sequence: Synthetic oligonucleotide
  Sense strand starting at position 3630 of SEQ ID NO: 1880255
ggauaacuuucccuuugac

SEQ ID NO: 1953731 - RNA, 19 nt, Artificial Sequence
  Description of Artificial Sequence: Synthetic oligonucleotide
  Antisense strand to SEQ ID NO: 1953730
gucaaagggaaaguuaucc

SEQ ID NO: 1953732 - RNA, 19 nt, Artificial Sequence
  Description of Artificial Sequence: Synthetic oligonucleotide
  Sense strand starting at position 3919 of SEQ ID NO: 1880255
gggugauagacaugaugug

SEQ ID NO: 1953733 - RNA, 19 nt, Artificial Sequence
  Description of Artificial Sequence: Synthetic oligonucleotide
  Antisense strand to SEQ ID NO: 1953732
cacaucaugucuaucaccc

SEQ ID NO: 1953734 - RNA, 19 nt, Artificial Sequence
  Description of Artificial Sequence: Synthetic oligonucleotide
  Sense strand starting at position 141 of SEQ ID NO: 1880256
uggagagaaucagaagaca

SEQ ID NO: 1953735 - RNA, 19 nt, Artificial Sequence
  Description of Artificial Sequence: Synthetic oligonucleotide
  Antisense strand to SEQ ID NO: 1953734
ugucuucugauucucucca

SEQ ID NO: 1953736 - RNA, 19 nt, Artificial Sequence
  Description of Artificial Sequence: Synthetic oligonucleotide
  Sense strand starting at position 241 of SEQ ID NO: 1880256
uccauaugauggcuucuau

SEQ ID NO: 1953737 - RNA, 19 nt, Artificial Sequence
  Description of Artificial Sequence: Synthetic oligonucleotide
  Antisense strand to SEQ ID NO: 1953736
auagaagccaucauaugga

SEQ ID NO: 1953738 - RNA, 19 nt, Artificial Sequence
  Description of Artificial Sequence: Synthetic oligonucleotide
  Sense strand starting at position 880 of SEQ ID NO: 1880256
ugagaaugccgagguaaug

SEQ ID NO: 1953739 - RNA, 19 nt, Artificial Sequence
  Description of Artificial Sequence: Synthetic oligonucleotide
  Antisense strand to SEQ ID NO: 1953738
cauuaccucggcauucuca

SEQ ID NO: 1953740 - RNA, 19 nt, Artificial Sequence
  Description of Artificial Sequence: Synthetic oligonucleotide
  Sense strand starting at position 2278 of SEQ ID NO: 1880256
aggacaguguauucuaauc

SEQ ID NO: 1953741 - RNA, 19 nt, Artificial Sequence
  Description of Artificial Sequence: Synthetic oligonucleotide
  Antisense strand to SEQ ID NO: 1953740
gauuagaauacacuguccu

SEQ ID NO: 1953742 - RNA, 19 nt, Artificial Sequence
  Description of Artificial Sequence: Synthetic oligonucleotide
  Sense strand starting at position 2283 of SEQ ID NO: 1880256
aguguauucuaaucccuag

SEQ ID NO: 1953743 - RNA, 19 nt, Artificial Sequence
  Description of Artificial Sequence: Synthetic oligonucleotide
  Antisense strand to SEQ ID NO: 1953742
cuagggauuagaauacacu

SEQ ID NO: 1953744 - RNA, 19 nt, Artificial Sequence
  Description of Artificial Sequence: Synthetic oligonucleotide
  Sense strand starting at position 2473 of SEQ ID NO: 1880256
aaauguauguaucuuggua

SEQ ID NO: 1953745 - RNA, 19 nt, Artificial Sequence
  Description of Artificial Sequence: Synthetic oligonucleotide
  Antisense strand to SEQ ID NO: 1953744
uaccaagauacauacauuu

SEQ ID NO: 1953746 - RNA, 19 nt, Artificial Sequence
  Description of Artificial Sequence: Synthetic oligonucleotide
  Sense strand starting at position 2551 of SEQ ID NO: 1880256
uuggguugugagugaaaua

SEQ ID NO: 1953747 - RNA, 19 nt, Artificial Sequence
  Description of Artificial Sequence: Synthetic oligonucleotide
  Antisense strand to SEQ ID NO: 1953746
uauuucacucacaacccaa

SEQ ID NO: 1953748 - RNA, 19 nt, Artificial Sequence
  Description of Artificial Sequence: Synthetic oligonucleotide
  Sense strand starting at position 2552 of SEQ ID NO: 1880256
uggguugugagugaaauag

SEQ ID NO: 1953749 - RNA, 19 nt, Artificial Sequence
  Description of Artificial Sequence: Synthetic oligonucleotide
  Antisense strand to SEQ ID NO: 1953748
cuauuucacucacaaccca

SEQ ID NO: 1953750 - RNA, 19 nt, Artificial Sequence
  Description of Artificial Sequence: Synthetic oligonucleotide
  Sense strand starting at position 2562 of SEQ ID NO: 1880256
gugaaauaggguggucuga

SEQ ID NO: 1953751 - RNA, 19 nt, Artificial Sequence
  Description of Artificial Sequence: Synthetic oligonucleotide
  Antisense strand to SEQ ID NO: 1953750
ucagaccacccuauuucac

SEQ ID NO: 1953752 - RNA, 19 nt, Artificial Sequence
  Description of Artificial Sequence: Synthetic oligonucleotide
  Sense strand starting at position 2700 of SEQ ID NO: 1880256
ucuggcaacuucuuggaaa

SEQ ID NO: 1953753 - RNA, 19 nt, Artificial Sequence
  Description of Artificial Sequence: Synthetic oligonucleotide
  Antisense strand to SEQ ID NO: 1953752
uuuccaagaaguugccaga

SEQ ID NO: 1953754 - RNA, 19 nt, Artificial Sequence
  Description of Artificial Sequence: Synthetic oligonucleotide
  Sense strand starting at position 2702 of SEQ ID NO: 1880256
uggcaacuucuuggaaaca

SEQ ID NO: 1953755 - RNA, 19 nt, Artificial Sequence
  Description of Artificial Sequence: Synthetic oligonucleotide
  Antisense strand to SEQ ID NO: 1953754
uguuuccaagaaguugcca

SEQ ID NO: 1953756 - RNA, 19 nt, Artificial Sequence
  Description of Artificial Sequence: Synthetic oligonucleotide
  Sense strand starting at position 2761 of SEQ ID NO: 1880256
ggugcagcuauuguguuua

SEQ ID NO: 1953757 - RNA, 19 nt, Artificial Sequence
  Description of Artificial Sequence: Synthetic oligonucleotide
  Antisense strand to SEQ ID NO: 1953756
uaaacacaauagcugcacc

SEQ ID NO: 1953758 - RNA, 19 nt, Artificial Sequence
  Description of Artificial Sequence: Synthetic oligonucleotide
  Sense strand starting at position 2764 of SEQ ID NO: 1880256
gcagcuauuguguuuaagu

SEQ ID NO: 1953759 - RNA, 19 nt, Artificial Sequence
  Description of Artificial Sequence: Synthetic oligonucleotide
  Antisense strand to SEQ ID NO: 1953758
acuuaaacacaauagcugc

SEQ ID NO: 1953760 - RNA, 19 nt, Artificial Sequence
  Description of Artificial Sequence: Synthetic oligonucleotide
  Sense strand starting at position 2766 of SEQ ID NO: 1880256
agcuauuguguuuaaguaa

SEQ ID NO: 1953761 - RNA, 19 nt, Artificial Sequence
  Description of Artificial Sequence: Synthetic oligonucleotide
  Antisense strand to SEQ ID NO: 1953760
uuacuuaaacacaauagcu

SEQ ID NO: 1953762 - RNA, 19 nt, Artificial Sequence
  Description of Artificial Sequence: Synthetic oligonucleotide
  Sense strand starting at position 2918 of SEQ ID NO: 1880256
ugccucaauccuggacuga

SEQ ID NO: 1953763 - RNA, 19 nt, Artificial Sequence
  Description of Artificial Sequence: Synthetic oligonucleotide
  Antisense strand to SEQ ID NO: 1953762
ucaguccaggauugaggca

SEQ ID NO: 1953764 - RNA, 19 nt, Artificial Sequence
  Description of Artificial Sequence: Synthetic oligonucleotide
  Sense strand starting at position 2954 of SEQ ID NO: 1880256
caggaccugaggugugaau

SEQ ID NO: 1953765 - RNA, 19 nt, Artificial Sequence
  Description of Artificial Sequence: Synthetic oligonucleotide
  Antisense strand to SEQ ID NO: 1953764
auucacaccucagguccug

SEQ ID NO: 1953766 - RNA, 19 nt, Artificial Sequence
  Description of Artificial Sequence: Synthetic oligonucleotide
  Sense strand starting at position 2956 of SEQ ID NO: 1880256
ggaccugaggugugaauau

SEQ ID NO: 1953767 - RNA, 19 nt, Artificial Sequence
  Description of Artificial Sequence: Synthetic oligonucleotide
  Antisense strand to SEQ ID NO: 1953766
auauucacaccucaggucc

SEQ ID NO: 1953768 - RNA, 19 nt, Artificial Sequence
  Description of Artificial Sequence: Synthetic oligonucleotide
  Sense strand starting at position 3095 of SEQ ID NO: 1880256
gaggcaguggguuaugaaa

SEQ ID NO: 1953769 - RNA, 19 nt, Artificial Sequence
  Description of Artificial Sequence: Synthetic oligonucleotide
  Antisense strand to SEQ ID NO: 1953768
uuucauaacccacugccuc

SEQ ID NO: 1953770 - RNA, 19 nt, Artificial Sequence
  Description of Artificial Sequence: Synthetic oligonucleotide
  Sense strand starting at position 3136 of SEQ ID NO: 1880256
accugaaggagguguuagu

SEQ ID NO: 1953771 - RNA, 19 nt, Artificial Sequence
  Description of Artificial Sequence: Synthetic oligonucleotide
  Antisense strand to SEQ ID NO: 1953770
acuaacaccuccuucaggu

SEQ ID NO: 1953772 - RNA, 19 nt, Artificial Sequence
  Description of Artificial Sequence: Synthetic oligonucleotide
  Sense strand starting at position 3145 of SEQ ID NO: 1880256
agguguuagucucuaaaua

SEQ ID NO: 1953773 - RNA, 19 nt, Artificial Sequence
  Description of Artificial Sequence: Synthetic oligonucleotide
  Antisense strand to SEQ ID NO: 1953772
uauuuagagacuaacaccu

SEQ ID NO: 1953774 - RNA, 19 nt, Artificial Sequence
  Description of Artificial Sequence: Synthetic oligonucleotide
  Sense strand starting at position 3146 of SEQ ID NO: 1880256
gguguuagucucuaaauaa

SEQ ID NO: 1953775 - RNA, 19 nt, Artificial Sequence
  Description of Artificial Sequence: Synthetic oligonucleotide
  Antisense strand to SEQ ID NO: 1953774
uuauuuagagacuaacacc

SEQ ID NO: 1953776 - RNA, 19 nt, Artificial Sequence
  Description of Artificial Sequence: Synthetic oligonucleotide
  Sense strand starting at position 3238 of SEQ ID NO: 1880256
ugaccagggugucuugaau

SEQ ID NO: 1953777 - RNA, 19 nt, Artificial Sequence
  Description of Artificial Sequence: Synthetic oligonucleotide
  Antisense strand to SEQ ID NO: 1953776
auucaagacacccugguca

SEQ ID NO: 1953778 - RNA, 19 nt, Artificial Sequence
  Description of Artificial Sequence: Synthetic oligonucleotide
  Sense strand starting at position 3244 of SEQ ID NO: 1880256
gggugucuugaauaugaca

SEQ ID NO: 1953779 - RNA, 19 nt, Artificial Sequence
  Description of Artificial Sequence: Synthetic oligonucleotide
  Antisense strand to SEQ ID NO: 1953778
ugucauauucaagacaccc

SEQ ID NO: 1953780 - RNA, 19 nt, Artificial Sequence
  Description of Artificial Sequence: Synthetic oligonucleotide
  Sense strand starting at position 3379 of SEQ ID NO: 1880256
ucaucaaaguuguuaagga

SEQ ID NO: 1953781 - RNA, 19 nt, Artificial Sequence
  Description of Artificial Sequence: Synthetic oligonucleotide
  Antisense strand to SEQ ID NO: 1953780
uccuuaacaacuuugauga

SEQ ID NO: 1953782 - RNA, 19 nt, Artificial Sequence
  Description of Artificial Sequence: Synthetic oligonucleotide
  Sense strand starting at position 3387 of SEQ ID NO: 1880256
guuguuaaggaagagguuu

SEQ ID NO: 1953783 - RNA, 19 nt, Artificial Sequence
  Description of Artificial Sequence: Synthetic oligonucleotide
  Antisense strand to SEQ ID NO: 1953782
aaaccucuuccuuaacaac

SEQ ID NO: 1953784 - RNA, 19 nt, Artificial Sequence
  Description of Artificial Sequence: Synthetic oligonucleotide
  Sense strand starting at position 3398 of SEQ ID NO: 1880256
agagguuucuaaguuacca

SEQ ID NO: 1953785 - RNA, 19 nt, Artificial Sequence
  Description of Artificial Sequence: Synthetic oligonucleotide
  Antisense strand to SEQ ID NO: 1953784
ugguaacuuagaaaccucu

SEQ ID NO: 1953786 - RNA, 19 nt, Artificial Sequence
  Description of Artificial Sequence: Synthetic oligonucleotide
  Sense strand starting at position 3402 of SEQ ID NO: 1880256
guuucuaaguuaccaaacu

SEQ ID NO: 1953787 - RNA, 19 nt, Artificial Sequence
  Description of Artificial Sequence: Synthetic oligonucleotide
  Antisense strand to SEQ ID NO: 1953786
aguuugguaacuuagaaac

SEQ ID NO: 1953788 - RNA, 19 nt, Artificial Sequence
  Description of Artificial Sequence: Synthetic oligonucleotide
  Sense strand starting at position 3460 of SEQ ID NO: 1880256
ggaagccaagccugugaua

SEQ ID NO: 1953789 - RNA, 19 nt, Artificial Sequence
  Description of Artificial Sequence: Synthetic oligonucleotide
  Antisense strand to SEQ ID NO: 1953788
uaucacaggcuuggcuucc

SEQ ID NO: 1953790 - RNA, 19 nt, Artificial Sequence
  Description of Artificial Sequence: Synthetic oligonucleotide
  Sense strand starting at position 3472 of SEQ ID NO: 1880256
ugugauaauucuguagaag

SEQ ID NO: 1953791 - RNA, 19 nt, Artificial Sequence
  Description of Artificial Sequence: Synthetic oligonucleotide
  Antisense strand to SEQ ID NO: 1953790
cuucuacagaauuaucaca

SEQ ID NO: 1953792 - RNA, 19 nt, Artificial Sequence
  Description of Artificial Sequence: Synthetic oligonucleotide
  Sense strand starting at position 3473 of SEQ ID NO: 1880256
gugauaauucuguagaagc

SEQ ID NO: 1953793 - RNA, 19 nt, Artificial Sequence
  Description of Artificial Sequence: Synthetic oligonucleotide
  Antisense strand to SEQ ID NO: 1953792
gcuucuacagaauuaucac

SEQ ID NO: 1953794 - RNA, 19 nt, Artificial Sequence
  Description of Artificial Sequence: Synthetic oligonucleotide
  Sense strand starting at position 3563 of SEQ ID NO: 1880256
uuaucuuuggcagaacagu

SEQ ID NO: 1953795 - RNA, 19 nt, Artificial Sequence
  Description of Artificial Sequence: Synthetic oligonucleotide
  Antisense strand to SEQ ID NO: 1953794
acuguucugccaaagauaa

SEQ ID NO: 1953796 - RNA, 19 nt, Artificial Sequence
  Description of Artificial Sequence: Synthetic oligonucleotide
  Sense strand starting at position 3600 of SEQ ID NO: 1880256
uccugccauccugagugaa

SEQ ID NO: 1953797 - RNA, 19 nt, Artificial Sequence
  Description of Artificial Sequence: Synthetic oligonucleotide
  Antisense strand to SEQ ID NO: 1953796
uucacucaggauggcagga

SEQ ID NO: 1953798 - RNA, 19 nt, Artificial Sequence
  Description of Artificial Sequence: Synthetic oligonucleotide
  Sense strand starting at position 3602 of SEQ ID NO: 1880256
cugccauccugagugaaag

SEQ ID NO: 1953799 - RNA, 19 nt, Artificial Sequence
  Description of Artificial Sequence: Synthetic oligonucleotide
  Antisense strand to SEQ ID NO: 1953798
cuuucacucaggauggcag

SEQ ID NO: 1953800 - RNA, 19 nt, Artificial Sequence
  Description of Artificial Sequence: Synthetic oligonucleotide
  Sense strand starting at position 3629 of SEQ ID NO: 1880256
ugcuaauugccagagaaag

SEQ ID NO: 1953801 - RNA, 19 nt, Artificial Sequence
  Description of Artificial Sequence: Synthetic oligonucleotide
  Antisense strand to SEQ ID NO: 1953800
cuuucucuggcaauuagca

SEQ ID NO: 1953802 - RNA, 19 nt, Artificial Sequence
  Description of Artificial Sequence: Synthetic oligonucleotide
  Sense strand starting at position 3761 of SEQ ID NO: 1880256
gaaggcuccugagcuacua

SEQ ID NO: 1953803 - RNA, 19 nt, Artificial Sequence
  Description of Artificial Sequence: Synthetic oligonucleotide
  Antisense strand to SEQ ID NO: 1953802
uaguagcucaggagccuuc

SEQ ID NO: 1953804 - RNA, 19 nt, Artificial Sequence
  Description of Artificial Sequence: Synthetic oligonucleotide
  Sense strand starting at position 3784 of SEQ ID NO: 1880256
ccagacugggugugaaaga

SEQ ID NO: 1953805 - RNA, 19 nt, Artificial Sequence
  Description of Artificial Sequence: Synthetic oligonucleotide
  Antisense strand to SEQ ID NO: 1953804
ucuuucacacccagucugg

SEQ ID NO: 1953806 - RNA, 19 nt, Artificial Sequence
  Description of Artificial Sequence: Synthetic oligonucleotide
  Sense strand starting at position 3848 of SEQ ID NO: 1880256
aguggaaugcagcagacau

SEQ ID NO: 1953807 - RNA, 19 nt, Artificial Sequence
  Description of Artificial Sequence: Synthetic oligonucleotide
  Antisense strand to SEQ ID NO: 1953806
augucugcugcauuccacu

SEQ ID NO: 1953808 - RNA, 19 nt, Artificial Sequence
  Description of Artificial Sequence: Synthetic oligonucleotide
  Sense strand starting at position 3882 of SEQ ID NO: 1880256
aggguagcuuuguccaaga

SEQ ID NO: 1953809 - RNA, 19 nt, Artificial Sequence
  Description of Artificial Sequence: Synthetic oligonucleotide
  Antisense strand to SEQ ID NO: 1953808
ucuuggacaaagcuacccu

SEQ ID NO: 1953810 - RNA, 19 nt, Artificial Sequence
  Description of Artificial Sequence: Synthetic oligonucleotide
  Sense strand starting at position 3884 of SEQ ID NO: 1880256
gguagcuuuguccaagauu

SEQ ID NO: 1953811 - RNA, 19 nt, Artificial Sequence
  Description of Artificial Sequence: Synthetic oligonucleotide
  Antisense strand to SEQ ID NO: 1953810
aaucuuggacaaagcuacc

SEQ ID NO: 1953812 - RNA, 19 nt, Artificial Sequence
  Description of Artificial Sequence: Synthetic oligonucleotide
  Sense strand starting at position 3972 of SEQ ID NO: 1880256
ggaagcagauacuccuuaa

SEQ ID NO: 1953813 - RNA, 19 nt, Artificial Sequence
  Description of Artificial Sequence: Synthetic oligonucleotide
  Antisense strand to SEQ ID NO: 1953812
uuaaggaguaucugcuucc

SEQ ID NO: 1953814 - RNA, 19 nt, Artificial Sequence
  Description of Artificial Sequence: Synthetic oligonucleotide
  Sense strand starting at position 150 of SEQ ID NO: 1880257
accacugugccugagauau

SEQ ID NO: 1953815 - RNA, 19 nt, Artificial Sequence
  Description of Artificial Sequence: Synthetic oligonucleotide
  Antisense strand to SEQ ID NO: 1953814
auaucucaggcacaguggu

SEQ ID NO: 1953816 - RNA, 19 nt, Artificial Sequence
  Description of Artificial Sequence: Synthetic oligonucleotide
  Sense strand starting at position 154 of SEQ ID NO: 1880257
cugugccugagauauagaa

SEQ ID NO: 1953817 - RNA, 19 nt, Artificial Sequence
  Description of Artificial Sequence: Synthetic oligonucleotide
  Antisense strand to SEQ ID NO: 1953816
uucuauaucucaggcacag

SEQ ID NO: 1953818 - RNA, 19 nt, Artificial Sequence
  Description of Artificial Sequence: Synthetic oligonucleotide
  Sense strand starting at position 273 of SEQ ID NO: 1880257
uuuaacaucguagagucaa

SEQ ID NO: 1953819 - RNA, 19 nt, Artificial Sequence
  Description of Artificial Sequence: Synthetic oligonucleotide
  Antisense strand to SEQ ID NO: 1953818
uugacucuacgauguuaaa

SEQ ID NO: 1953820 - RNA, 19 nt, Artificial Sequence
  Description of Artificial Sequence: Synthetic oligonucleotide
  Sense strand starting at position 313 of SEQ ID NO: 1880257
aaacguacuguccaaagaa

SEQ ID NO: 1953821 - RNA, 19 nt, Artificial Sequence
  Description of Artificial Sequence: Synthetic oligonucleotide
  Antisense strand to SEQ ID NO: 1953820
uucuuuggacaguacguuu

SEQ ID NO: 1953822 - RNA, 19 nt, Artificial Sequence
  Description of Artificial Sequence: Synthetic oligonucleotide
  Sense strand starting at position 378 of SEQ ID NO: 1880257
uugauuauuuaggacgaaa

SEQ ID NO: 1953823 - RNA, 19 nt, Artificial Sequence
  Description of Artificial Sequence: Synthetic oligonucleotide
  Antisense strand to SEQ ID NO: 1953822
uuucguccuaaauaaucaa

SEQ ID NO: 1953824 - RNA, 19 nt, Artificial Sequence
  Description of Artificial Sequence: Synthetic oligonucleotide
  Sense strand starting at position 438 of SEQ ID NO: 1880257
uggccucuagucuagaaca

SEQ ID NO: 1953825 - RNA, 19 nt, Artificial Sequence
  Description of Artificial Sequence: Synthetic oligonucleotide
  Antisense strand to SEQ ID NO: 1953824
uguucuagacuagaggcca

SEQ ID NO: 1953826 - RNA, 19 nt, Artificial Sequence
  Description of Artificial Sequence: Synthetic oligonucleotide
  Sense strand starting at position 440 of SEQ ID NO: 1880257
gccucuagucuagaacacu

SEQ ID NO: 1953827 - RNA, 19 nt, Artificial Sequence
  Description of Artificial Sequence: Synthetic oligonucleotide
  Antisense strand to SEQ ID NO: 1953826
aguguucuagacuagaggc

SEQ ID NO: 1953828 - RNA, 19 nt, Artificial Sequence
  Description of Artificial Sequence: Synthetic oligonucleotide
  Sense strand starting at position 589 of SEQ ID NO: 1880257
ugcuuugaauaaccagaau

SEQ ID NO: 1953829 - RNA, 19 nt, Artificial Sequence
  Description of Artificial Sequence: Synthetic oligonucleotide
  Antisense strand to SEQ ID NO: 1953828
auucugguuauucaaagca

SEQ ID NO: 1953830 - RNA, 19 nt, Artificial Sequence
  Description of Artificial Sequence: Synthetic oligonucleotide
  Sense strand starting at position 669 of SEQ ID NO: 1880257
uggcuucugcaggacuaau

SEQ ID NO: 1953831 - RNA, 19 nt, Artificial Sequence
  Description of Artificial Sequence: Synthetic oligonucleotide
  Antisense strand to SEQ ID NO: 1953830
auuaguccugcagaagcca

SEQ ID NO: 1953832 - RNA, 19 nt, Artificial Sequence
  Description of Artificial Sequence: Synthetic oligonucleotide
  Sense strand starting at position 680 of SEQ ID NO: 1880257
ggacuaauggccugagcaa

SEQ ID NO: 1953833 - RNA, 19 nt, Artificial Sequence
  Description of Artificial Sequence: Synthetic oligonucleotide
  Antisense strand to SEQ ID NO: 1953832
uugcucaggccauuagucc

SEQ ID NO: 1953834 - RNA, 19 nt, Artificial Sequence
  Description of Artificial Sequence: Synthetic oligonucleotide
  Sense strand starting at position 681 of SEQ ID NO: 1880257
gacuaauggccugagcaau

SEQ ID NO: 1953835 - RNA, 19 nt, Artificial Sequence
  Description of Artificial Sequence: Synthetic oligonucleotide
  Antisense strand to SEQ ID NO: 1953834
auugcucaggccauuaguc

SEQ ID NO: 1953836 - RNA, 19 nt, Artificial Sequence
  Description of Artificial Sequence: Synthetic oligonucleotide
  Sense strand starting at position 1087 of SEQ ID NO: 1880257
uaaugagcucggugaagac

SEQ ID NO: 1953837 - RNA, 19 nt, Artificial Sequence
  Description of Artificial Sequence: Synthetic oligonucleotide
  Antisense strand to SEQ ID NO: 1953836
gucuucaccgagcucauua

SEQ ID NO: 1953838 - RNA, 19 nt, Artificial Sequence
  Description of Artificial Sequence: Synthetic oligonucleotide
  Sense strand starting at position 2107 of SEQ ID NO: 1880257
aggagaaagguuuguccau

SEQ ID NO: 1953839 - RNA, 19 nt, Artificial Sequence
  Description of Artificial Sequence: Synthetic oligonucleotide
  Antisense strand to SEQ ID NO: 1953838
auggacaaaccuuucuccu

SEQ ID NO: 1953840 - RNA, 19 nt, Artificial Sequence
  Description of Artificial Sequence: Synthetic oligonucleotide
  Sense strand starting at position 2108 of SEQ ID NO: 1880257
ggagaaagguuuguccaug

SEQ ID NO: 1953841 - RNA, 19 nt, Artificial Sequence
  Description of Artificial Sequence: Synthetic oligonucleotide
  Antisense strand to SEQ ID NO: 1953840
cauggacaaaccuuucucc

SEQ ID NO: 1953842 - RNA, 19 nt, Artificial Sequence
  Description of Artificial Sequence: Synthetic oligonucleotide
  Sense strand starting at position 2183 of SEQ ID NO: 1880257
acaaaugucguguauuaau

SEQ ID NO: 1953843 - RNA, 19 nt, Artificial Sequence
  Description of Artificial Sequence: Synthetic oligonucleotide
  Antisense strand to SEQ ID NO: 1953842
auuaauacacgacauuugu

SEQ ID NO: 1953844 - RNA, 19 nt, Artificial Sequence
  Description of Artificial Sequence: Synthetic oligonucleotide
  Sense strand starting at position 2342 of SEQ ID NO: 1880257
agucguuaaguguauauuu

SEQ ID NO: 1953845 - RNA, 19 nt, Artificial Sequence
  Description of Artificial Sequence: Synthetic oligonucleotide
  Antisense strand to SEQ ID NO: 1953844
aaauauacacuuaacgacu

SEQ ID NO: 1953846 - RNA, 19 nt, Artificial Sequence
  Description of Artificial Sequence: Synthetic oligonucleotide
  Sense strand starting at position 2487 of SEQ ID NO: 1880257
ugugcuacagauuauguga

SEQ ID NO: 1953847 - RNA, 19 nt, Artificial Sequence
  Description of Artificial Sequence: Synthetic oligonucleotide
  Antisense strand to SEQ ID NO: 1953846
ucacauaaucuguagcaca

SEQ ID NO: 1953848 - RNA, 19 nt, Artificial Sequence
  Description of Artificial Sequence: Synthetic oligonucleotide
  Sense strand starting at position 2508 of SEQ ID NO: 1880257
ccaugaaauaaacguggua

SEQ ID NO: 1953849 - RNA, 19 nt, Artificial Sequence
  Description of Artificial Sequence: Synthetic oligonucleotide
  Antisense strand to SEQ ID NO: 1953848
uaccacguuuauuucaugg

SEQ ID NO: 1953850 - RNA, 19 nt, Artificial Sequence
  Description of Artificial Sequence: Synthetic oligonucleotide
  Sense strand starting at position 2510 of SEQ ID NO: 1880257
augaaauaaacgugguaaa

SEQ ID NO: 1953851 - RNA, 19 nt, Artificial Sequence
  Description of Artificial Sequence: Synthetic oligonucleotide
  Antisense strand to SEQ ID NO: 1953850
uuuaccacguuuauuucau

SEQ ID NO: 1953852 - RNA, 19 nt, Artificial Sequence
  Description of Artificial Sequence: Synthetic oligonucleotide
  Sense strand starting at position 2511 of SEQ ID NO: 1880257
ugaaauaaacgugguaaau

SEQ ID NO: 1953853 - RNA, 19 nt, Artificial Sequence
  Description of Artificial Sequence: Synthetic oligonucleotide
  Antisense strand to SEQ ID NO: 1953852
auuuaccacguuuauuuca

SEQ ID NO: 1953854 - RNA, 19 nt, Artificial Sequence
  Description of Artificial Sequence: Synthetic oligonucleotide
  Sense strand starting at position 2607 of SEQ ID NO: 1880257
uaugaaguguugguuuaaa

SEQ ID NO: 1953855 - RNA, 19 nt, Artificial Sequence
  Description of Artificial Sequence: Synthetic oligonucleotide
  Antisense strand to SEQ ID NO: 1953854
uuuaaaccaacacuucaua

SEQ ID NO: 1953856 - RNA, 19 nt, Artificial Sequence
  Description of Artificial Sequence: Synthetic oligonucleotide
  Sense strand starting at position 2638 of SEQ ID NO: 1880257
uguaacuuucuugaaguuu

SEQ ID NO: 1953857 - RNA, 19 nt, Artificial Sequence
  Description of Artificial Sequence: Synthetic oligonucleotide
  Antisense strand to SEQ ID NO: 1953856
aaacuucaagaaaguuaca

SEQ ID NO: 1953858 - RNA, 19 nt, Artificial Sequence
  Description of Artificial Sequence: Synthetic oligonucleotide
  Sense strand starting at position 2649 of SEQ ID NO: 1880257
ugaaguuuaucuccggaaa

SEQ ID NO: 1953859 - RNA, 19 nt, Artificial Sequence
  Description of Artificial Sequence: Synthetic oligonucleotide
  Antisense strand to SEQ ID NO: 1953858
uuuccggagauaaacuuca

SEQ ID NO: 1953860 - RNA, 19 nt, Artificial Sequence
  Description of Artificial Sequence: Synthetic oligonucleotide
  Sense strand starting at position 2650 of SEQ ID NO: 1880257
gaaguuuaucuccggaaac

SEQ ID NO: 1953861 - RNA, 19 nt, Artificial Sequence
  Description of Artificial Sequence: Synthetic oligonucleotide
  Antisense strand to SEQ ID NO: 1953860
guuuccggagauaaacuuc

SEQ ID NO: 1953862 - RNA, 19 nt, Artificial Sequence
  Description of Artificial Sequence: Synthetic oligonucleotide
  Sense strand starting at position 2652 of SEQ ID NO: 1880257
aguuuaucuccggaaacuc

SEQ ID NO: 1953863 - RNA, 19 nt, Artificial Sequence
  Description of Artificial Sequence: Synthetic oligonucleotide
  Antisense strand to SEQ ID NO: 1953862
gaguuuccggagauaaacu

SEQ ID NO: 1953864 - RNA, 19 nt, Artificial Sequence
  Description of Artificial Sequence: Synthetic oligonucleotide
  Sense strand starting at position 2752 of SEQ ID NO: 1880257
aguccagaaugauuggcau

SEQ ID NO: 1953865 - RNA, 19 nt, Artificial Sequence
  Description of Artificial Sequence: Synthetic oligonucleotide
  Antisense strand to SEQ ID NO: 1953864
augccaaucauucuggacu

SEQ ID NO: 1953866 - RNA, 19 nt, Artificial Sequence
  Description of Artificial Sequence: Synthetic oligonucleotide
  Sense strand starting at position 2805 of SEQ ID NO: 1880257
ucuguaauauugcuaugaa

SEQ ID NO: 1953867 - RNA, 19 nt, Artificial Sequence
  Description of Artificial Sequence: Synthetic oligonucleotide
  Antisense strand to SEQ ID NO: 1953866
uucauagcaauauuacaga

SEQ ID NO: 1953868 - RNA, 19 nt, Artificial Sequence
  Description of Artificial Sequence: Synthetic oligonucleotide
  Sense strand starting at position 2987 of SEQ ID NO: 1880257
acguuuaauccugagaguu

SEQ ID NO: 1953869 - RNA, 19 nt, Artificial Sequence
  Description of Artificial Sequence: Synthetic oligonucleotide
  Antisense strand to SEQ ID NO: 1953868
aacucucaggauuaaacgu

SEQ ID NO: 1953870 - RNA, 19 nt, Artificial Sequence
  Description of Artificial Sequence: Synthetic oligonucleotide
  Sense strand starting at position 3016 of SEQ ID NO: 1880257
gccagauuucugggucuuu

SEQ ID NO: 1953871 - RNA, 19 nt, Artificial Sequence
  Description of Artificial Sequence: Synthetic oligonucleotide
  Antisense strand to SEQ ID NO: 1953870
aaagacccagaaaucuggc

SEQ ID NO: 1953872 - RNA, 19 nt, Artificial Sequence
  Description of Artificial Sequence: Synthetic oligonucleotide
  Sense strand starting at position 3051 of SEQ ID NO: 1880257
ggcaacuacuaguuccaua

SEQ ID NO: 1953873 - RNA, 19 nt, Artificial Sequence
  Description of Artificial Sequence: Synthetic oligonucleotide
  Antisense strand to SEQ ID NO: 1953872
uauggaacuaguaguugcc

SEQ ID NO: 1953874 - RNA, 19 nt, Artificial Sequence
  Description of Artificial Sequence: Synthetic oligonucleotide
  Sense strand starting at position 3155 of SEQ ID NO: 1880257
ucacauugaucaguggauu

SEQ ID NO: 1953875 - RNA, 19 nt, Artificial Sequence
  Description of Artificial Sequence: Synthetic oligonucleotide
  Antisense strand to SEQ ID NO: 1953874
aauccacugaucaauguga

SEQ ID NO: 1953876 - RNA, 19 nt, Artificial Sequence
  Description of Artificial Sequence: Synthetic oligonucleotide
  Sense strand starting at position 3156 of SEQ ID NO: 1880257
cacauugaucaguggauuc

SEQ ID NO: 1953877 - RNA, 19 nt, Artificial Sequence
  Description of Artificial Sequence: Synthetic oligonucleotide
  Antisense strand to SEQ ID NO: 1953876
gaauccacugaucaaugug

SEQ ID NO: 1953878 - RNA, 19 nt, Artificial Sequence
  Description of Artificial Sequence: Synthetic oligonucleotide
  Sense strand starting at position 3180 of SEQ ID NO: 1880257
ccuguaucauggguaaaca

SEQ ID NO: 1953879 - RNA, 19 nt, Artificial Sequence
  Description of Artificial Sequence: Synthetic oligonucleotide
  Antisense strand to SEQ ID NO: 1953878
uguuuacccaugauacagg

SEQ ID NO: 1953880 - RNA, 19 nt, Artificial Sequence
  Description of Artificial Sequence: Synthetic oligonucleotide
  Sense strand starting at position 3234 of SEQ ID NO: 1880257
ucuuuacauuugucaugca

SEQ ID NO: 1953881 - RNA, 19 nt, Artificial Sequence
  Description of Artificial Sequence: Synthetic oligonucleotide
  Antisense strand to SEQ ID NO: 1953880
ugcaugacaaauguaaaga

SEQ ID NO: 1953882 - RNA, 19 nt, Artificial Sequence
  Description of Artificial Sequence: Synthetic oligonucleotide
  Sense strand starting at position 3258 of SEQ ID NO: 1880257
auagauaugucagcuuuga

SEQ ID NO: 1953883 - RNA, 19 nt, Artificial Sequence
  Description of Artificial Sequence: Synthetic oligonucleotide
  Antisense strand to SEQ ID NO: 1953882
ucaaagcugacauaucuau

SEQ ID NO: 1953884 - RNA, 19 nt, Artificial Sequence
  Description of Artificial Sequence: Synthetic oligonucleotide
  Sense strand starting at position 3369 of SEQ ID NO: 1880257
uauugagauguguaaauuc

SEQ ID NO: 1953885 - RNA, 19 nt, Artificial Sequence
  Description of Artificial Sequence: Synthetic oligonucleotide
  Antisense strand to SEQ ID NO: 1953884
gaauuuacacaucucaaua

SEQ ID NO: 1953886 - RNA, 19 nt, Artificial Sequence
  Description of Artificial Sequence: Synthetic oligonucleotide
  Sense strand starting at position 3394 of SEQ ID NO: 1880257
aauguaggauuccuuggaa

SEQ ID NO: 1953887 - RNA, 19 nt, Artificial Sequence
  Description of Artificial Sequence: Synthetic oligonucleotide
  Antisense strand to SEQ ID NO: 1953886
uuccaaggaauccuacauu

SEQ ID NO: 1953888 - RNA, 19 nt, Artificial Sequence
  Description of Artificial Sequence: Synthetic oligonucleotide
  Sense strand starting at position 3397 of SEQ ID NO: 1880257
guaggauuccuuggaaaua

SEQ ID NO: 1953889 - RNA, 19 nt, Artificial Sequence
  Description of Artificial Sequence: Synthetic oligonucleotide
  Antisense strand to SEQ ID NO: 1953888
uauuuccaaggaauccuac

SEQ ID NO: 1953890 - RNA, 19 nt, Artificial Sequence
  Description of Artificial Sequence: Synthetic oligonucleotide
  Sense strand starting at position 3452 of SEQ ID NO: 1880257
uaguucugaugauugugaa

SEQ ID NO: 1953891 - RNA, 19 nt, Artificial Sequence
  Description of Artificial Sequence: Synthetic oligonucleotide
  Antisense strand to SEQ ID NO: 1953890
uucacaaucaucagaacua

SEQ ID NO: 1953892 - RNA, 19 nt, Artificial Sequence
  Description of Artificial Sequence: Synthetic oligonucleotide
  Sense strand starting at position 3453 of SEQ ID NO: 1880257
aguucugaugauugugaaa

SEQ ID NO: 1953893 - RNA, 19 nt, Artificial Sequence
  Description of Artificial Sequence: Synthetic oligonucleotide
  Antisense strand to SEQ ID NO: 1953892
uuucacaaucaucagaacu

SEQ ID NO: 1953894 - RNA, 19 nt, Artificial Sequence
  Description of Artificial Sequence: Synthetic oligonucleotide
  Sense strand starting at position 56 of SEQ ID NO: 1880258
cuaacagugucuucccaga

SEQ ID NO: 1953895 - RNA, 19 nt, Artificial Sequence
  Description of Artificial Sequence: Synthetic oligonucleotide
  Antisense strand to SEQ ID NO: 1953894
ucugggaagacacuguuag

SEQ ID NO: 1953896 - RNA, 19 nt, Artificial Sequence
  Description of Artificial Sequence: Synthetic oligonucleotide
  Sense strand starting at position 308 of SEQ ID NO: 1880258
cucuaaaugcaucagugaa

SEQ ID NO: 1953897 - RNA, 19 nt, Artificial Sequence
  Description of Artificial Sequence: Synthetic oligonucleotide
  Antisense strand to SEQ ID NO: 1953896
uucacugaugcauuuagag

SEQ ID NO: 1953898 - RNA, 19 nt, Artificial Sequence
  Description of Artificial Sequence: Synthetic oligonucleotide
  Sense strand starting at position 310 of SEQ ID NO: 1880258
cuaaaugcaucagugaauc

SEQ ID NO: 1953899 - RNA, 19 nt, Artificial Sequence
  Description of Artificial Sequence: Synthetic oligonucleotide
  Antisense strand to SEQ ID NO: 1953898
gauucacugaugcauuuag

SEQ ID NO: 1953900 - RNA, 19 nt, Artificial Sequence
  Description of Artificial Sequence: Synthetic oligonucleotide
  Sense strand starting at position 331 of SEQ ID NO: 1880258
acugguauguuucuauuau

SEQ ID NO: 1953901 - RNA, 19 nt, Artificial Sequence
  Description of Artificial Sequence: Synthetic oligonucleotide
  Antisense strand to SEQ ID NO: 1953900
auaauagaaacauaccagu

SEQ ID NO: 1953902 - RNA, 19 nt, Artificial Sequence
  Description of Artificial Sequence: Synthetic oligonucleotide
  Sense strand starting at position 596 of SEQ ID NO: 1880258
gggagaaccacuugaacgu

SEQ ID NO: 1953903 - RNA, 19 nt, Artificial Sequence
  Description of Artificial Sequence: Synthetic oligonucleotide
  Antisense strand to SEQ ID NO: 1953902
acguucaagugguucuccc

SEQ ID NO: 1953904 - RNA, 19 nt, Artificial Sequence
  Description of Artificial Sequence: Synthetic oligonucleotide
  Sense strand starting at position 678 of SEQ ID NO: 1880258
agacucuguguuuacuuua

SEQ ID NO: 1953905 - RNA, 19 nt, Artificial Sequence
  Description of Artificial Sequence: Synthetic oligonucleotide
  Antisense strand to SEQ ID NO: 1953904
uaaaguaaacacagagucu

SEQ ID NO: 1953906 - RNA, 19 nt, Artificial Sequence
  Description of Artificial Sequence: Synthetic oligonucleotide
  Sense strand starting at position 683 of SEQ ID NO: 1880258
cuguguuuacuuuaacaga

SEQ ID NO: 1953907 - RNA, 19 nt, Artificial Sequence
  Description of Artificial Sequence: Synthetic oligonucleotide
  Antisense strand to SEQ ID NO: 1953906
ucuguuaaaguaaacacag

SEQ ID NO: 1953908 - RNA, 19 nt, Artificial Sequence
  Description of Artificial Sequence: Synthetic oligonucleotide
  Sense strand starting at position 970 of SEQ ID NO: 1880258
agagauacauucuugcuau

SEQ ID NO: 1953909 - RNA, 19 nt, Artificial Sequence
  Description of Artificial Sequence: Synthetic oligonucleotide
  Antisense strand to SEQ ID NO: 1953908
auagcaagaauguaucucu

SEQ ID NO: 1953910 - RNA, 19 nt, Artificial Sequence
  Description of Artificial Sequence: Synthetic oligonucleotide
  Sense strand starting at position 1365 of SEQ ID NO: 1880258
ugcagaaagcugugaaucu

SEQ ID NO: 1953911 - RNA, 19 nt, Artificial Sequence
  Description of Artificial Sequence: Synthetic oligonucleotide
  Antisense strand to SEQ ID NO: 1953910
agauucacagcuuucugca

SEQ ID NO: 1953912 - RNA, 19 nt, Artificial Sequence
  Description of Artificial Sequence: Synthetic oligonucleotide
  Sense strand starting at position 1706 of SEQ ID NO: 1880258
uggauccucugaucuggaa

SEQ ID NO: 1953913 - RNA, 19 nt, Artificial Sequence
  Description of Artificial Sequence: Synthetic oligonucleotide
  Antisense strand to SEQ ID NO: 1953912
uuccagaucagaggaucca

SEQ ID NO: 1953914 - RNA, 19 nt, Artificial Sequence
  Description of Artificial Sequence: Synthetic oligonucleotide
  Sense strand starting at position 1734 of SEQ ID NO: 1880258
uuaucauugugauuaucag

SEQ ID NO: 1953915 - RNA, 19 nt, Artificial Sequence
  Description of Artificial Sequence: Synthetic oligonucleotide
  Antisense strand to SEQ ID NO: 1953914
cugauaaucacaaugauaa

SEQ ID NO: 1953916 - RNA, 19 nt, Artificial Sequence
  Description of Artificial Sequence: Synthetic oligonucleotide
  Sense strand starting at position 1768 of SEQ ID NO: 1880258
gcagcauuauuuccaggca

SEQ ID NO: 1953917 - RNA, 19 nt, Artificial Sequence
  Description of Artificial Sequence: Synthetic oligonucleotide
  Antisense strand to SEQ ID NO: 1953916
ugccuggaaauaaugcugc

SEQ ID NO: 1953918 - RNA, 19 nt, Artificial Sequence
  Description of Artificial Sequence: Synthetic oligonucleotide
  Sense strand starting at position 1965 of SEQ ID NO: 1880258
cagcuucgagaaugagaaa

SEQ ID NO: 1953919 - RNA, 19 nt, Artificial Sequence
  Description of Artificial Sequence: Synthetic oligonucleotide
  Antisense strand to SEQ ID NO: 1953918
uuucucauucucgaagcug

SEQ ID NO: 1953920 - RNA, 19 nt, Artificial Sequence
  Description of Artificial Sequence: Synthetic oligonucleotide
  Sense strand starting at position 2031 of SEQ ID NO: 1880258
aagagugggugaucaauau

SEQ ID NO: 1953921 - RNA, 19 nt, Artificial Sequence
  Description of Artificial Sequence: Synthetic oligonucleotide
  Antisense strand to SEQ ID NO: 1953920
auauugaucacccacucuu

SEQ ID NO: 1953922 - RNA, 19 nt, Artificial Sequence
  Description of Artificial Sequence: Synthetic oligonucleotide
  Sense strand starting at position 2035 of SEQ ID NO: 1880258
gugggugaucaauauguuu

SEQ ID NO: 1953923 - RNA, 19 nt, Artificial Sequence
  Description of Artificial Sequence: Synthetic oligonucleotide
  Antisense strand to SEQ ID NO: 1953922
aaacauauugaucacccac

SEQ ID NO: 1953924 - RNA, 19 nt, Artificial Sequence
  Description of Artificial Sequence: Synthetic oligonucleotide
  Sense strand starting at position 2037 of SEQ ID NO: 1880258
gggugaucaauauguuuac

SEQ ID NO: 1953925 - RNA, 19 nt, Artificial Sequence
  Description of Artificial Sequence: Synthetic oligonucleotide
  Antisense strand to SEQ ID NO: 1953924
guaaacauauugaucaccc

SEQ ID NO: 1953926 - RNA, 19 nt, Artificial Sequence
  Description of Artificial Sequence: Synthetic oligonucleotide
  Sense strand starting at position 2117 of SEQ ID NO: 1880258
auguaaacaucuuugguaa

SEQ ID NO: 1953927 - RNA, 19 nt, Artificial Sequence
  Description of Artificial Sequence: Synthetic oligonucleotide
  Antisense strand to SEQ ID NO: 1953926
uuaccaaagauguuuacau

SEQ ID NO: 1953928 - RNA, 19 nt, Artificial Sequence
  Description of Artificial Sequence: Synthetic oligonucleotide
  Sense strand starting at position 2118 of SEQ ID NO: 1880258
uguaaacaucuuugguaaa

SEQ ID NO: 1953929 - RNA, 19 nt, Artificial Sequence
  Description of Artificial Sequence: Synthetic oligonucleotide
  Antisense strand to SEQ ID NO: 1953928
uuuaccaaagauguuuaca

SEQ ID NO: 1953930 - RNA, 19 nt, Artificial Sequence
  Description of Artificial Sequence: Synthetic oligonucleotide
  Sense strand starting at position 2172 of SEQ ID NO: 1880258
uuugaaguaucccuuagca

SEQ ID NO: 1953931 - RNA, 19 nt, Artificial Sequence
  Description of Artificial Sequence: Synthetic oligonucleotide
  Antisense strand to SEQ ID NO: 1953930
ugcuaagggauacuucaaa

SEQ ID NO: 1953932 - RNA, 19 nt, Artificial Sequence
  Description of Artificial Sequence: Synthetic oligonucleotide
  Sense strand starting at position 2174 of SEQ ID NO: 1880258
ugaaguaucccuuagcaac

SEQ ID NO: 1953933 - RNA, 19 nt, Artificial Sequence
  Description of Artificial Sequence: Synthetic oligonucleotide
  Antisense strand to SEQ ID NO: 1953932
guugcuaagggauacuuca

SEQ ID NO: 1953934 - RNA, 19 nt, Artificial Sequence
  Description of Artificial Sequence: Synthetic oligonucleotide
  Sense strand starting at position 2187 of SEQ ID NO: 1880258
agcaacugguuccuuaaga

SEQ ID NO: 1953935 - RNA, 19 nt, Artificial Sequence
  Description of Artificial Sequence: Synthetic oligonucleotide
  Antisense strand to SEQ ID NO: 1953934
ucuuaaggaaccaguugcu

SEQ ID NO: 1953936 - RNA, 19 nt, Artificial Sequence
  Description of Artificial Sequence: Synthetic oligonucleotide
  Sense strand starting at position 2188 of SEQ ID NO: 1880258
gcaacugguuccuuaagac

SEQ ID NO: 1953937 - RNA, 19 nt, Artificial Sequence
  Description of Artificial Sequence: Synthetic oligonucleotide
  Antisense strand to SEQ ID NO: 1953936
gucuuaaggaaccaguugc

SEQ ID NO: 1953938 - RNA, 19 nt, Artificial Sequence
  Description of Artificial Sequence: Synthetic oligonucleotide
  Sense strand starting at position 2263 of SEQ ID NO: 1880258
cuguuuaauguacgaacca

SEQ ID NO: 1953939 - RNA, 19 nt, Artificial Sequence
  Description of Artificial Sequence: Synthetic oligonucleotide
  Antisense strand to SEQ ID NO: 1953938
ugguucguacauuaaacag

SEQ ID NO: 1953940 - RNA, 19 nt, Artificial Sequence
  Description of Artificial Sequence: Synthetic oligonucleotide
  Sense strand starting at position 2788 of SEQ ID NO: 1880258
uguggacugguagguaaau

SEQ ID NO: 1953941 - RNA, 19 nt, Artificial Sequence
  Description of Artificial Sequence: Synthetic oligonucleotide
  Antisense strand to SEQ ID NO: 1953940
auuuaccuaccaguccaca

SEQ ID NO: 1953942 - RNA, 19 nt, Artificial Sequence
  Description of Artificial Sequence: Synthetic oligonucleotide
  Sense strand starting at position 2794 of SEQ ID NO: 1880258
cugguagguaaaugaaaug

SEQ ID NO: 1953943 - RNA, 19 nt, Artificial Sequence
  Description of Artificial Sequence: Synthetic oligonucleotide
  Antisense strand to SEQ ID NO: 1953942
cauuucauuuaccuaccag

SEQ ID NO: 1953944 - RNA, 19 nt, Artificial Sequence
  Description of Artificial Sequence: Synthetic oligonucleotide
  Sense strand starting at position 2916 of SEQ ID NO: 1880258
gaaguuaaagugugcaaau

SEQ ID NO: 1953945 - RNA, 19 nt, Artificial Sequence
  Description of Artificial Sequence: Synthetic oligonucleotide
  Antisense strand to SEQ ID NO: 1953944
auuugcacacuuuaacuuc

SEQ ID NO: 1953946 - RNA, 19 nt, Artificial Sequence
  Description of Artificial Sequence: Synthetic oligonucleotide
  Sense strand starting at position 2917 of SEQ ID NO: 1880258
aaguuaaagugugcaaauc

SEQ ID NO: 1953947 - RNA, 19 nt, Artificial Sequence
  Description of Artificial Sequence: Synthetic oligonucleotide
  Antisense strand to SEQ ID NO: 1953946
gauuugcacacuuuaacuu

SEQ ID NO: 1953948 - RNA, 19 nt, Artificial Sequence
  Description of Artificial Sequence: Synthetic oligonucleotide
  Sense strand starting at position 2957 of SEQ ID NO: 1880258
uaggcuucugagugacgga

SEQ ID NO: 1953949 - RNA, 19 nt, Artificial Sequence
  Description of Artificial Sequence: Synthetic oligonucleotide
  Antisense strand to SEQ ID NO: 1953948
uccgucacucagaagccua

SEQ ID NO: 1953950 - RNA, 19 nt, Artificial Sequence
  Description of Artificial Sequence: Synthetic oligonucleotide
  Sense strand starting at position 3193 of SEQ ID NO: 1880258
gagcaugugcugcuccuua

SEQ ID NO: 1953951 - RNA, 19 nt, Artificial Sequence
  Description of Artificial Sequence: Synthetic oligonucleotide
  Antisense strand to SEQ ID NO: 1953950
uaaggagcagcacaugcuc

SEQ ID NO: 1953952 - RNA, 19 nt, Artificial Sequence
  Description of Artificial Sequence: Synthetic oligonucleotide
  Sense strand starting at position 3257 of SEQ ID NO: 1880258
aacaucgguuuguuuggaa

SEQ ID NO: 1953953 - RNA, 19 nt, Artificial Sequence
  Description of Artificial Sequence: Synthetic oligonucleotide
  Antisense strand to SEQ ID NO: 1953952
uuccaaacaaaccgauguu

SEQ ID NO: 1953954 - RNA, 19 nt, Artificial Sequence
  Description of Artificial Sequence: Synthetic oligonucleotide
  Sense strand starting at position 3345 of SEQ ID NO: 1880258
ugcuguguugcauuauagu

SEQ ID NO: 1953955 - RNA, 19 nt, Artificial Sequence
  Description of Artificial Sequence: Synthetic oligonucleotide
  Antisense strand to SEQ ID NO: 1953954
acuauaaugcaacacagca

SEQ ID NO: 1953956 - RNA, 19 nt, Artificial Sequence
  Description of Artificial Sequence: Synthetic oligonucleotide
  Sense strand starting at position 3361 of SEQ ID NO: 1880258
agucauggguucuccuaaa

SEQ ID NO: 1953957 - RNA, 19 nt, Artificial Sequence
  Description of Artificial Sequence: Synthetic oligonucleotide
  Antisense strand to SEQ ID NO: 1953956
uuuaggagaacccaugacu

SEQ ID NO: 1953958 - RNA, 19 nt, Artificial Sequence
  Description of Artificial Sequence: Synthetic oligonucleotide
  Sense strand starting at position 3398 of SEQ ID NO: 1880258
cccuuuaauugggauauuu

SEQ ID NO: 1953959 - RNA, 19 nt, Artificial Sequence
  Description of Artificial Sequence: Synthetic oligonucleotide
  Antisense strand to SEQ ID NO: 1953958
aaauaucccaauuaaaggg

SEQ ID NO: 1953960 - RNA, 19 nt, Artificial Sequence
  Description of Artificial Sequence: Synthetic oligonucleotide
  Sense strand starting at position 3415 of SEQ ID NO: 1880258
uuagguuugccauaauggu

SEQ ID NO: 1953961 - RNA, 19 nt, Artificial Sequence
  Description of Artificial Sequence: Synthetic oligonucleotide
  Antisense strand to SEQ ID NO: 1953960
accauuauggcaaaccuaa

SEQ ID NO: 1953962 - RNA, 19 nt, Artificial Sequence
  Description of Artificial Sequence: Synthetic oligonucleotide
  Sense strand starting at position 3475 of SEQ ID NO: 1880258
agauauacucaaggcagua

SEQ ID NO: 1953963 - RNA, 19 nt, Artificial Sequence
  Description of Artificial Sequence: Synthetic oligonucleotide
  Antisense strand to SEQ ID NO: 1953962
uacugccuugaguauaucu

SEQ ID NO: 1953964 - RNA, 19 nt, Artificial Sequence
  Description of Artificial Sequence: Synthetic oligonucleotide
  Sense strand starting at position 3508 of SEQ ID NO: 1880258
aguuacugagcucaacaga

SEQ ID NO: 1953965 - RNA, 19 nt, Artificial Sequence
  Description of Artificial Sequence: Synthetic oligonucleotide
  Antisense strand to SEQ ID NO: 1953964
ucuguugagcucaguaacu

SEQ ID NO: 1953966 - RNA, 19 nt, Artificial Sequence
  Description of Artificial Sequence: Synthetic oligonucleotide
  Sense strand starting at position 3587 of SEQ ID NO: 1880258
ccucacaguuaugugguaa

SEQ ID NO: 1953967 - RNA, 19 nt, Artificial Sequence
  Description of Artificial Sequence: Synthetic oligonucleotide
  Antisense strand to SEQ ID NO: 1953966
uuaccacauaacugugagg

SEQ ID NO: 1953968 - RNA, 19 nt, Artificial Sequence
  Description of Artificial Sequence: Synthetic oligonucleotide
  Sense strand starting at position 3588 of SEQ ID NO: 1880258
cucacaguuaugugguaag

SEQ ID NO: 1953969 - RNA, 19 nt, Artificial Sequence
  Description of Artificial Sequence: Synthetic oligonucleotide
  Antisense strand to SEQ ID NO: 1953968
cuuaccacauaacugugag

SEQ ID NO: 1953970 - RNA, 19 nt, Artificial Sequence
  Description of Artificial Sequence: Synthetic oligonucleotide
  Sense strand starting at position 3646 of SEQ ID NO: 1880258
cuucucuaaggauguaauu

SEQ ID NO: 1953971 - RNA, 19 nt, Artificial Sequence
  Description of Artificial Sequence: Synthetic oligonucleotide
  Antisense strand to SEQ ID NO: 1953970
aauuacauccuuagagaag

SEQ ID NO: 1953972 - RNA, 19 nt, Artificial Sequence
  Description of Artificial Sequence: Synthetic oligonucleotide
  Sense strand starting at position 3946 of SEQ ID NO: 1880258
gggugugaauggucagauu

SEQ ID NO: 1953973 - RNA, 19 nt, Artificial Sequence
  Description of Artificial Sequence: Synthetic oligonucleotide
  Antisense strand to SEQ ID NO: 1953972
aaucugaccauucacaccc

SEQ ID NO: 1953974 - RNA, 19 nt, Artificial Sequence
  Description of Artificial Sequence: Synthetic oligonucleotide
  Sense strand starting at position 600 of SEQ ID NO: 1880259
cagcucauuccaggaggaa

SEQ ID NO: 1953975 - RNA, 19 nt, Artificial Sequence
  Description of Artificial Sequence: Synthetic oligonucleotide
  Antisense strand to SEQ ID NO: 1953974
uuccuccuggaaugagcug

SEQ ID NO: 1953976 - RNA, 19 nt, Artificial Sequence
  Description of Artificial Sequence: Synthetic oligonucleotide
  Sense strand starting at position 673 of SEQ ID NO: 1880259
ccucgauccaguuaggaua

SEQ ID NO: 1953977 - RNA, 19 nt, Artificial Sequence
  Description of Artificial Sequence: Synthetic oligonucleotide
  Antisense strand to SEQ ID NO: 1953976
uauccuaacuggaucgagg

SEQ ID NO: 1953978 - RNA, 19 nt, Artificial Sequence
  Description of Artificial Sequence: Synthetic oligonucleotide
  Sense strand starting at position 681 of SEQ ID NO: 1880259
caguuaggauaagugcuua

SEQ ID NO: 1953979 - RNA, 19 nt, Artificial Sequence
  Description of Artificial Sequence: Synthetic oligonucleotide
  Antisense strand to SEQ ID NO: 1953978
uaagcacuuauccuaacug

SEQ ID NO: 1953980 - RNA, 19 nt, Artificial Sequence
  Description of Artificial Sequence: Synthetic oligonucleotide
  Sense strand starting at position 685 of SEQ ID NO: 1880259
uaggauaagugcuuauugu

SEQ ID NO: 1953981 - RNA, 19 nt, Artificial Sequence
  Description of Artificial Sequence: Synthetic oligonucleotide
  Antisense strand to SEQ ID NO: 1953980
acaauaagcacuuauccua

SEQ ID NO: 1953982 - RNA, 19 nt, Artificial Sequence
  Description of Artificial Sequence: Synthetic oligonucleotide
  Sense strand starting at position 686 of SEQ ID NO: 1880259
aggauaagugcuuauugua

SEQ ID NO: 1953983 - RNA, 19 nt, Artificial Sequence
  Description of Artificial Sequence: Synthetic oligonucleotide
  Antisense strand to SEQ ID NO: 1953982
uacaauaagcacuuauccu

SEQ ID NO: 1953984 - RNA, 19 nt, Artificial Sequence
  Description of Artificial Sequence: Synthetic oligonucleotide
  Sense strand starting at position 734 of SEQ ID NO: 1880259
caaggcguccuuggauuau

SEQ ID NO: 1953985 - RNA, 19 nt, Artificial Sequence
  Description of Artificial Sequence: Synthetic oligonucleotide
  Antisense strand to SEQ ID NO: 1953984
auaauccaaggacgccuug

SEQ ID NO: 1953986 - RNA, 19 nt, Artificial Sequence
  Description of Artificial Sequence: Synthetic oligonucleotide
  Sense strand starting at position 743 of SEQ ID NO: 1880259
cuuggauuauauucuagga

SEQ ID NO: 1953987 - RNA, 19 nt, Artificial Sequence
  Description of Artificial Sequence: Synthetic oligonucleotide
  Antisense strand to SEQ ID NO: 1953986
uccuagaauauaauccaag

SEQ ID NO: 1953988 - RNA, 19 nt, Artificial Sequence
  Description of Artificial Sequence: Synthetic oligonucleotide
  Sense strand starting at position 1102 of SEQ ID NO: 1880259
cccugacucuuaccuggua

SEQ ID NO: 1953989 - RNA, 19 nt, Artificial Sequence
  Description of Artificial Sequence: Synthetic oligonucleotide
  Antisense strand to SEQ ID NO: 1953988
uaccagguaagagucaggg

SEQ ID NO: 1953990 - RNA, 19 nt, Artificial Sequence
  Description of Artificial Sequence: Synthetic oligonucleotide
  Sense strand starting at position 1103 of SEQ ID NO: 1880259
ccugacucuuaccugguaa

SEQ ID NO: 1953991 - RNA, 19 nt, Artificial Sequence
  Description of Artificial Sequence: Synthetic oligonucleotide
  Antisense strand to SEQ ID NO: 1953990
uuaccagguaagagucagg

SEQ ID NO: 1953992 - RNA, 19 nt, Artificial Sequence
  Description of Artificial Sequence: Synthetic oligonucleotide
  Sense strand starting at position 1105 of SEQ ID NO: 1880259
ugacucuuaccugguaagu

SEQ ID NO: 1953993 - RNA, 19 nt, Artificial Sequence
  Description of Artificial Sequence: Synthetic oligonucleotide
  Antisense strand to SEQ ID NO: 1953992
acuuaccagguaagaguca

SEQ ID NO: 1953994 - RNA, 19 nt, Artificial Sequence
  Description of Artificial Sequence: Synthetic oligonucleotide
  Sense strand starting at position 1530 of SEQ ID NO: 1880259
acuagugagccucagaaac

SEQ ID NO: 1953995 - RNA, 19 nt, Artificial Sequence
  Description of Artificial Sequence: Synthetic oligonucleotide
  Antisense strand to SEQ ID NO: 1953994
guuucugaggcucacuagu

SEQ ID NO: 1953996 - RNA, 19 nt, Artificial Sequence
  Description of Artificial Sequence: Synthetic oligonucleotide
  Sense strand starting at position 1611 of SEQ ID NO: 1880259
cagaguugauggucccaga

SEQ ID NO: 1953997 - RNA, 19 nt, Artificial Sequence
  Description of Artificial Sequence: Synthetic oligonucleotide
  Antisense strand to SEQ ID NO: 1953996
ucugggaccaucaacucug

SEQ ID NO: 1953998 - RNA, 19 nt, Artificial Sequence
  Description of Artificial Sequence: Synthetic oligonucleotide
  Sense strand starting at position 1642 of SEQ ID NO: 1880259
guuggaaauccugaggcau

SEQ ID NO: 1953999 - RNA, 19 nt, Artificial Sequence
  Description of Artificial Sequence: Synthetic oligonucleotide
  Antisense strand to SEQ ID NO: 1953998
augccucaggauuuccaac

SEQ ID NO: 1954000 - RNA, 19 nt, Artificial Sequence
  Description of Artificial Sequence: Synthetic oligonucleotide
  Sense strand starting at position 1653 of SEQ ID NO: 1880259
ugaggcaucccuugaauua

SEQ ID NO: 1954001 - RNA, 19 nt, Artificial Sequence
  Description of Artificial Sequence: Synthetic oligonucleotide
  Antisense strand to SEQ ID NO: 1954000
uaauucaagggaugccuca

SEQ ID NO: 1954002 - RNA, 19 nt, Artificial Sequence
  Description of Artificial Sequence: Synthetic oligonucleotide
  Sense strand starting at position 1666 of SEQ ID NO: 1880259
gaauuaaggcccugggaug

SEQ ID NO: 1954003 - RNA, 19 nt, Artificial Sequence
  Description of Artificial Sequence: Synthetic oligonucleotide
  Antisense strand to SEQ ID NO: 1954002
caucccagggccuuaauuc

SEQ ID NO: 1954004 - RNA, 19 nt, Artificial Sequence
  Description of Artificial Sequence: Synthetic oligonucleotide
  Sense strand starting at position 1781 of SEQ ID NO: 1880259
agaguccugaguuggaaga

SEQ ID NO: 1954005 - RNA, 19 nt, Artificial Sequence
  Description of Artificial Sequence: Synthetic oligonucleotide
  Antisense strand to SEQ ID NO: 1954004
ucuuccaacucaggacucu

SEQ ID NO: 1954006 - RNA, 19 nt, Artificial Sequence
  Description of Artificial Sequence: Synthetic oligonucleotide
  Sense strand starting at position 1829 of SEQ ID NO: 1880259
gcgugcucuggagaacuca

SEQ ID NO: 1954007 - RNA, 19 nt, Artificial Sequence
  Description of Artificial Sequence: Synthetic oligonucleotide
  Antisense strand to SEQ ID NO: 1954006
ugaguucuccagagcacgc

SEQ ID NO: 1954008 - RNA, 19 nt, Artificial Sequence
  Description of Artificial Sequence: Synthetic oligonucleotide
  Sense strand starting at position 2117 of SEQ ID NO: 1880259
uguaucuuacggugacaug

SEQ ID NO: 1954009 - RNA, 19 nt, Artificial Sequence
  Description of Artificial Sequence: Synthetic oligonucleotide
  Antisense strand to SEQ ID NO: 1954008
caugucaccguaagauaca

SEQ ID NO: 1954010 - RNA, 19 nt, Artificial Sequence
  Description of Artificial Sequence: Synthetic oligonucleotide
  Sense strand starting at position 2118 of SEQ ID NO: 1880259
guaucuuacggugacauga

SEQ ID NO: 1954011 - RNA, 19 nt, Artificial Sequence
  Description of Artificial Sequence: Synthetic oligonucleotide
  Antisense strand to SEQ ID NO: 1954010
ucaugucaccguaagauac

SEQ ID NO: 1954012 - RNA, 19 nt, Artificial Sequence
  Description of Artificial Sequence: Synthetic oligonucleotide
  Sense strand starting at position 2137 of SEQ ID NO: 1880259
ggaauuuguucucaucuga

SEQ ID NO: 1954013 - RNA, 19 nt, Artificial Sequence
  Description of Artificial Sequence: Synthetic oligonucleotide
  Antisense strand to SEQ ID NO: 1954012
ucagaugagaacaaauucc

SEQ ID NO: 1954014 - RNA, 19 nt, Artificial Sequence
  Description of Artificial Sequence: Synthetic oligonucleotide
  Sense strand starting at position 2225 of SEQ ID NO: 1880259
auacuauagccuggaccua

SEQ ID NO: 1954015 - RNA, 19 nt, Artificial Sequence
  Description of Artificial Sequence: Synthetic oligonucleotide
  Antisense strand to SEQ ID NO: 1954014
uagguccaggcuauaguau

SEQ ID NO: 1954016 - RNA, 19 nt, Artificial Sequence
  Description of Artificial Sequence: Synthetic oligonucleotide
  Sense strand starting at position 2238 of SEQ ID NO: 1880259
gaccuauaguaggugcaga

SEQ ID NO: 1954017 - RNA, 19 nt, Artificial Sequence
  Description of Artificial Sequence: Synthetic oligonucleotide
  Antisense strand to SEQ ID NO: 1954016
ucugcaccuacuauagguc

SEQ ID NO: 1954018 - RNA, 19 nt, Artificial Sequence
  Description of Artificial Sequence: Synthetic oligonucleotide
  Sense strand starting at position 2254 of SEQ ID NO: 1880259
agagguuagcucugcucaa

SEQ ID NO: 1954019 - RNA, 19 nt, Artificial Sequence
  Description of Artificial Sequence: Synthetic oligonucleotide
  Antisense strand to SEQ ID NO: 1954018
uugagcagagcuaaccucu

SEQ ID NO: 1954020 - RNA, 19 nt, Artificial Sequence
  Description of Artificial Sequence: Synthetic oligonucleotide
  Sense strand starting at position 2255 of SEQ ID NO: 1880259
gagguuagcucugcucaag

SEQ ID NO: 1954021 - RNA, 19 nt, Artificial Sequence
  Description of Artificial Sequence: Synthetic oligonucleotide
  Antisense strand to SEQ ID NO: 1954020
cuugagcagagcuaaccuc

SEQ ID NO: 1954022 - RNA, 19 nt, Artificial Sequence
  Description of Artificial Sequence: Synthetic oligonucleotide
  Sense strand starting at position 2258 of SEQ ID NO: 1880259
guuagcucugcucaagaca

SEQ ID NO: 1954023 - RNA, 19 nt, Artificial Sequence
  Description of Artificial Sequence: Synthetic oligonucleotide
  Antisense strand to SEQ ID NO: 1954022
ugucuugagcagagcuaac

SEQ ID NO: 1954024 - RNA, 19 nt, Artificial Sequence
  Description of Artificial Sequence: Synthetic oligonucleotide
  Sense strand starting at position 2337 of SEQ ID NO: 1880259
gaauaaugaucuccagugu

SEQ ID NO: 1954025 - RNA, 19 nt, Artificial Sequence
  Description of Artificial Sequence: Synthetic oligonucleotide
  Antisense strand to SEQ ID NO: 1954024
acacuggagaucauuauuc

SEQ ID NO: 1954026 - RNA, 19 nt, Artificial Sequence
  Description of Artificial Sequence: Synthetic oligonucleotide
  Sense strand starting at position 2346 of SEQ ID NO: 1880259
ucuccaguguccuugggau

SEQ ID NO: 1954027 - RNA, 19 nt, Artificial Sequence
  Description of Artificial Sequence: Synthetic oligonucleotide
  Antisense strand to SEQ ID NO: 1954026
aucccaaggacacuggaga

SEQ ID NO: 1954028 - RNA, 19 nt, Artificial Sequence
  Description of Artificial Sequence: Synthetic oligonucleotide
  Sense strand starting at position 2348 of SEQ ID NO: 1880259
uccaguguccuugggauua

SEQ ID NO: 1954029 - RNA, 19 nt, Artificial Sequence
  Description of Artificial Sequence: Synthetic oligonucleotide
  Antisense strand to SEQ ID NO: 1954028
uaaucccaaggacacugga

SEQ ID NO: 1954030 - RNA, 19 nt, Artificial Sequence
  Description of Artificial Sequence: Synthetic oligonucleotide
  Sense strand starting at position 2526 of SEQ ID NO: 1880259
aaaugacuguuggcaauga

SEQ ID NO: 1954031 - RNA, 19 nt, Artificial Sequence
  Description of Artificial Sequence: Synthetic oligonucleotide
  Antisense strand to SEQ ID NO: 1954030
ucauugccaacagucauuu

SEQ ID NO: 1954032 - RNA, 19 nt, Artificial Sequence
  Description of Artificial Sequence: Synthetic oligonucleotide
  Sense strand starting at position 2555 of SEQ ID NO: 1880259
cuagaauggugacuugaau

SEQ ID NO: 1954033 - RNA, 19 nt, Artificial Sequence
  Description of Artificial Sequence: Synthetic oligonucleotide
  Antisense strand to SEQ ID NO: 1954032
auucaagucaccauucuag

SEQ ID NO: 1954034 - RNA, 19 nt, Artificial Sequence
  Description of Artificial Sequence: Synthetic oligonucleotide
  Sense strand starting at position 2578 of SEQ ID NO: 1880259
guaguagcaguagagauaa

SEQ ID NO: 1954035 - RNA, 19 nt, Artificial Sequence
  Description of Artificial Sequence: Synthetic oligonucleotide
  Antisense strand to SEQ ID NO: 1954034
uuaucucuacugcuacuac

SEQ ID NO: 1954036 - RNA, 19 nt, Artificial Sequence
  Description of Artificial Sequence: Synthetic oligonucleotide
  Sense strand starting at position 2637 of SEQ ID NO: 1880259
gguagcaaucaccaaucuu

SEQ ID NO: 1954037 - RNA, 19 nt, Artificial Sequence
  Description of Artificial Sequence: Synthetic oligonucleotide
  Antisense strand to SEQ ID NO: 1954036
aagauuggugauugcuacc

SEQ ID NO: 1954038 - RNA, 19 nt, Artificial Sequence
  Description of Artificial Sequence: Synthetic oligonucleotide
  Sense strand starting at position 2687 of SEQ ID NO: 1880259
agauaaguaauaugguuga

SEQ ID NO: 1954039 - RNA, 19 nt, Artificial Sequence
  Description of Artificial Sequence: Synthetic oligonucleotide
  Antisense strand to SEQ ID NO: 1954038
ucaaccauauuacuuaucu

SEQ ID NO: 1954040 - RNA, 19 nt, Artificial Sequence
  Description of Artificial Sequence: Synthetic oligonucleotide
  Sense strand starting at position 2690 of SEQ ID NO: 1880259
uaaguaauaugguugagug

SEQ ID NO: 1954041 - RNA, 19 nt, Artificial Sequence
  Description of Artificial Sequence: Synthetic oligonucleotide
  Antisense strand to SEQ ID NO: 1954040
cacucaaccauauuacuua

SEQ ID NO: 1954042 - RNA, 19 nt, Artificial Sequence
  Description of Artificial Sequence: Synthetic oligonucleotide
  Sense strand starting at position 2691 of SEQ ID NO: 1880259
aaguaauaugguugagugu

SEQ ID NO: 1954043 - RNA, 19 nt, Artificial Sequence
  Description of Artificial Sequence: Synthetic oligonucleotide
  Antisense strand to SEQ ID NO: 1954042
acacucaaccauauuacuu

SEQ ID NO: 1954044 - RNA, 19 nt, Artificial Sequence
  Description of Artificial Sequence: Synthetic oligonucleotide
  Sense strand starting at position 2743 of SEQ ID NO: 1880259
gugcgcuuaguccagaaca

SEQ ID NO: 1954045 - RNA, 19 nt, Artificial Sequence
  Description of Artificial Sequence: Synthetic oligonucleotide
  Antisense strand to SEQ ID NO: 1954044
uguucuggacuaagcgcac

SEQ ID NO: 1954046 - RNA, 19 nt, Artificial Sequence
  Description of Artificial Sequence: Synthetic oligonucleotide
  Sense strand starting at position 2745 of SEQ ID NO: 1880259
gcgcuuaguccagaacaua

SEQ ID NO: 1954047 - RNA, 19 nt, Artificial Sequence
  Description of Artificial Sequence: Synthetic oligonucleotide
  Antisense strand to SEQ ID NO: 1954046
uauguucuggacuaagcgc

SEQ ID NO: 1954048 - RNA, 19 nt, Artificial Sequence
  Description of Artificial Sequence: Synthetic oligonucleotide
  Sense strand starting at position 3290 of SEQ ID NO: 1880259
cagagaaaccucuggcugu

SEQ ID NO: 1954049 - RNA, 19 nt, Artificial Sequence
  Description of Artificial Sequence: Synthetic oligonucleotide
  Antisense strand to SEQ ID NO: 1954048
acagccagagguuucucug

SEQ ID NO: 1954050 - RNA, 19 nt, Artificial Sequence
  Description of Artificial Sequence: Synthetic oligonucleotide
  Sense strand starting at position 3322 of SEQ ID NO: 1880259
ccuguauugaguuggcauu

SEQ ID NO: 1954051 - RNA, 19 nt, Artificial Sequence
  Description of Artificial Sequence: Synthetic oligonucleotide
  Antisense strand to SEQ ID NO: 1954050
aaugccaacucaauacagg

SEQ ID NO: 1954052 - RNA, 19 nt, Artificial Sequence
  Description of Artificial Sequence: Synthetic oligonucleotide
  Sense strand starting at position 3932 of SEQ ID NO: 1880259
cugugagugagcuggaaug

SEQ ID NO: 1954053 - RNA, 19 nt, Artificial Sequence
  Description of Artificial Sequence: Synthetic oligonucleotide
  Antisense strand to SEQ ID NO: 1954052
cauuccagcucacucacag

SEQ ID NO: 1954054 - RNA, 19 nt, Artificial Sequence
  Description of Artificial Sequence: Synthetic oligonucleotide
  Sense strand starting at position 88 of SEQ ID NO: 1880260
ccuuuaaauuagguauagu

SEQ ID NO: 1954055 - RNA, 19 nt, Artificial Sequence
  Description of Artificial Sequence: Synthetic oligonucleotide
  Antisense strand to SEQ ID NO: 1954054
acuauaccuaauuuaaagg

SEQ ID NO: 1954056 - RNA, 19 nt, Artificial Sequence
  Description of Artificial Sequence: Synthetic oligonucleotide
  Sense strand starting at position 99 of SEQ ID NO: 1880260
gguauaguuagacaucagu

SEQ ID NO: 1954057 - RNA, 19 nt, Artificial Sequence
  Description of Artificial Sequence: Synthetic oligonucleotide
  Antisense strand to SEQ ID NO: 1954056
acugaugucuaacuauacc

SEQ ID NO: 1954058 - RNA, 19 nt, Artificial Sequence
  Description of Artificial Sequence: Synthetic oligonucleotide
  Sense strand starting at position 301 of SEQ ID NO: 1880260
guaacagcucuugaguucu

SEQ ID NO: 1954059 - RNA, 19 nt, Artificial Sequence
  Description of Artificial Sequence: Synthetic oligonucleotide
  Antisense strand to SEQ ID NO: 1954058
agaacucaagagcuguuac

SEQ ID NO: 1954060 - RNA, 19 nt, Artificial Sequence
  Description of Artificial Sequence: Synthetic oligonucleotide
  Sense strand starting at position 678 of SEQ ID NO: 1880260
cuugaugaacuuugauguu

SEQ ID NO: 1954061 - RNA, 19 nt, Artificial Sequence
  Description of Artificial Sequence: Synthetic oligonucleotide
  Antisense strand to SEQ ID NO: 1954060
aacaucaaaguucaucaag

SEQ ID NO: 1954062 - RNA, 19 nt, Artificial Sequence
  Description of Artificial Sequence: Synthetic oligonucleotide
  Sense strand starting at position 698 of SEQ ID NO: 1880260
uuugcaacugauuauuagu

SEQ ID NO: 1954063 - RNA, 19 nt, Artificial Sequence
  Description of Artificial Sequence: Synthetic oligonucleotide
  Antisense strand to SEQ ID NO: 1954062
acuaauaaucaguugcaaa

SEQ ID NO: 1954064 - RNA, 19 nt, Artificial Sequence
  Description of Artificial Sequence: Synthetic oligonucleotide
  Sense strand starting at position 700 of SEQ ID NO: 1880260
ugcaacugauuauuaguaa

SEQ ID NO: 1954065 - RNA, 19 nt, Artificial Sequence
  Description of Artificial Sequence: Synthetic oligonucleotide
  Antisense strand to SEQ ID NO: 1954064
uuacuaauaaucaguugca

SEQ ID NO: 1954066 - RNA, 19 nt, Artificial Sequence
  Description of Artificial Sequence: Synthetic oligonucleotide
  Sense strand starting at position 715 of SEQ ID NO: 1880260
guaacugauauguguauca

SEQ ID NO: 1954067 - RNA, 19 nt, Artificial Sequence
  Description of Artificial Sequence: Synthetic oligonucleotide
  Antisense strand to SEQ ID NO: 1954066
ugauacacauaucaguuac

SEQ ID NO: 1954068 - RNA, 19 nt, Artificial Sequence
  Description of Artificial Sequence: Synthetic oligonucleotide
  Sense strand starting at position 772 of SEQ ID NO: 1880260
uaggauauagucugccuaa

SEQ ID NO: 1954069 - RNA, 19 nt, Artificial Sequence
  Description of Artificial Sequence: Synthetic oligonucleotide
  Antisense strand to SEQ ID NO: 1954068
uuaggcagacuauauccua

SEQ ID NO: 1954070 - RNA, 19 nt, Artificial Sequence
  Description of Artificial Sequence: Synthetic oligonucleotide
  Sense strand starting at position 773 of SEQ ID NO: 1880260
aggauauagucugccuaag

SEQ ID NO: 1954071 - RNA, 19 nt, Artificial Sequence
  Description of Artificial Sequence: Synthetic oligonucleotide
  Antisense strand to SEQ ID NO: 1954070
cuuaggcagacuauauccu

SEQ ID NO: 1954072 - RNA, 19 nt, Artificial Sequence
  Description of Artificial Sequence: Synthetic oligonucleotide
  Sense strand starting at position 775 of SEQ ID NO: 1880260
gauauagucugccuaagau

SEQ ID NO: 1954073 - RNA, 19 nt, Artificial Sequence
  Description of Artificial Sequence: Synthetic oligonucleotide
  Antisense strand to SEQ ID NO: 1954072
aucuuaggcagacuauauc

SEQ ID NO: 1954074 - RNA, 19 nt, Artificial Sequence
  Description of Artificial Sequence: Synthetic oligonucleotide
  Sense strand starting at position 827 of SEQ ID NO: 1880260
guuugugacuagguauaca

SEQ ID NO: 1954075 - RNA, 19 nt, Artificial Sequence
  Description of Artificial Sequence: Synthetic oligonucleotide
  Antisense strand to SEQ ID NO: 1954074
uguauaccuagucacaaac

SEQ ID NO: 1954076 - RNA, 19 nt, Artificial Sequence
  Description of Artificial Sequence: Synthetic oligonucleotide
  Sense strand starting at position 867 of SEQ ID NO: 1880260
guacuuccacauugaggau

SEQ ID NO: 1954077 - RNA, 19 nt, Artificial Sequence
  Description of Artificial Sequence: Synthetic oligonucleotide
  Antisense strand to SEQ ID NO: 1954076
auccucaauguggaaguac

SEQ ID NO: 1954078 - RNA, 19 nt, Artificial Sequence
  Description of Artificial Sequence: Synthetic oligonucleotide
  Sense strand starting at position 979 of SEQ ID NO: 1880260
uaaguaguacguuaucuag

SEQ ID NO: 1954079 - RNA, 19 nt, Artificial Sequence
  Description of Artificial Sequence: Synthetic oligonucleotide
  Antisense strand to SEQ ID NO: 1954078
cuagauaacguacuacuua

SEQ ID NO: 1954080 - RNA, 19 nt, Artificial Sequence
  Description of Artificial Sequence: Synthetic oligonucleotide
  Sense strand starting at position 986 of SEQ ID NO: 1880260
uacguuaucuagucaauag

SEQ ID NO: 1954081 - RNA, 19 nt, Artificial Sequence
  Description of Artificial Sequence: Synthetic oligonucleotide
  Antisense strand to SEQ ID NO: 1954080
cuauugacuagauaacgua

SEQ ID NO: 1954082 - RNA, 19 nt, Artificial Sequence
  Description of Artificial Sequence: Synthetic oligonucleotide
  Sense strand starting at position 993 of SEQ ID NO: 1880260
ucuagucaauagcuuugaa

SEQ ID NO: 1954083 - RNA, 19 nt, Artificial Sequence
  Description of Artificial Sequence: Synthetic oligonucleotide
  Antisense strand to SEQ ID NO: 1954082
uucaaagcuauugacuaga

SEQ ID NO: 1954084 - RNA, 19 nt, Artificial Sequence
  Description of Artificial Sequence: Synthetic oligonucleotide
  Sense strand starting at position 996 of SEQ ID NO: 1880260
agucaauagcuuugaaucu

SEQ ID NO: 1954085 - RNA, 19 nt, Artificial Sequence
  Description of Artificial Sequence: Synthetic oligonucleotide
  Antisense strand to SEQ ID NO: 1954084
agauucaaagcuauugacu

SEQ ID NO: 1954086 - RNA, 19 nt, Artificial Sequence
  Description of Artificial Sequence: Synthetic oligonucleotide
  Sense strand starting at position 1154 of SEQ ID NO: 1880260
accugucaaguguaacgau

SEQ ID NO: 1954087 - RNA, 19 nt, Artificial Sequence
  Description of Artificial Sequence: Synthetic oligonucleotide
  Antisense strand to SEQ ID NO: 1954086
aucguuacacuugacaggu

SEQ ID NO: 1954088 - RNA, 19 nt, Artificial Sequence
  Description of Artificial Sequence: Synthetic oligonucleotide
  Sense strand starting at position 1179 of SEQ ID NO: 1880260
ccaccuuccggucauuaua

SEQ ID NO: 1954089 - RNA, 19 nt, Artificial Sequence
  Description of Artificial Sequence: Synthetic oligonucleotide
  Antisense strand to SEQ ID NO: 1954088
uauaaugaccggaaggugg

SEQ ID NO: 1954090 - RNA, 19 nt, Artificial Sequence
  Description of Artificial Sequence: Synthetic oligonucleotide
  Sense strand starting at position 1181 of SEQ ID NO: 1880260
accuuccggucauuauaaa

SEQ ID NO: 1954091 - RNA, 19 nt, Artificial Sequence
  Description of Artificial Sequence: Synthetic oligonucleotide
  Antisense strand to SEQ ID NO: 1954090
uuuauaaugaccggaaggu

SEQ ID NO: 1954092 - RNA, 19 nt, Artificial Sequence
  Description of Artificial Sequence: Synthetic oligonucleotide
  Sense strand starting at position 1882 of SEQ ID NO: 1880260
cggagauaaucgaggaagu

SEQ ID NO: 1954093 - RNA, 19 nt, Artificial Sequence
  Description of Artificial Sequence: Synthetic oligonucleotide
  Antisense strand to SEQ ID NO: 1954092
acuuccucgauuaucuccg

SEQ ID NO: 1954094 - RNA, 19 nt, Artificial Sequence
  Description of Artificial Sequence: Synthetic oligonucleotide
  Sense strand starting at position 1883 of SEQ ID NO: 1880260
ggagauaaucgaggaaguc

SEQ ID NO: 1954095 - RNA, 19 nt, Artificial Sequence
  Description of Artificial Sequence: Synthetic oligonucleotide
  Antisense strand to SEQ ID NO: 1954094
gacuuccucgauuaucucc

SEQ ID NO: 1954096 - RNA, 19 nt, Artificial Sequence
  Description of Artificial Sequence: Synthetic oligonucleotide
  Sense strand starting at position 2115 of SEQ ID NO: 1880260
gugaugaggcguuagaaag

SEQ ID NO: 1954097 - RNA, 19 nt, Artificial Sequence
  Description of Artificial Sequence: Synthetic oligonucleotide
  Antisense strand to SEQ ID NO: 1954096
cuuucuaacgccucaucac

SEQ ID NO: 1954098 - RNA, 19 nt, Artificial Sequence
  Description of Artificial Sequence: Synthetic oligonucleotide
  Sense strand starting at position 2369 of SEQ ID NO: 1880260
aguuaacacggcuaguuua

SEQ ID NO: 1954099 - RNA, 19 nt, Artificial Sequence
  Description of Artificial Sequence: Synthetic oligonucleotide
  Antisense strand to SEQ ID NO: 1954098
uaaacuagccguguuaacu

SEQ ID NO: 1954100 - RNA, 19 nt, Artificial Sequence
  Description of Artificial Sequence: Synthetic oligonucleotide
  Sense strand starting at position 2527 of SEQ ID NO: 1880260
uugguaucauguuuagauc

SEQ ID NO: 1954101 - RNA, 19 nt, Artificial Sequence
  Description of Artificial Sequence: Synthetic oligonucleotide
  Antisense strand to SEQ ID NO: 1954100
gaucuaaacaugauaccaa

SEQ ID NO: 1954102 - RNA, 19 nt, Artificial Sequence
  Description of Artificial Sequence: Synthetic oligonucleotide
  Sense strand starting at position 2560 of SEQ ID NO: 1880260
agcugucuaccagaaacaa

SEQ ID NO: 1954103 - RNA, 19 nt, Artificial Sequence
  Description of Artificial Sequence: Synthetic oligonucleotide
  Antisense strand to SEQ ID NO: 1954102
uuguuucugguagacagcu

SEQ ID NO: 1954104 - RNA, 19 nt, Artificial Sequence
  Description of Artificial Sequence: Synthetic oligonucleotide
  Sense strand starting at position 2595 of SEQ ID NO: 1880260
uccguucucuuauuuguuu

SEQ ID NO: 1954105 - RNA, 19 nt, Artificial Sequence
  Description of Artificial Sequence: Synthetic oligonucleotide
  Antisense strand to SEQ ID NO: 1954104
aaacaaauaagagaacgga

SEQ ID NO: 1954106 - RNA, 19 nt, Artificial Sequence
  Description of Artificial Sequence: Synthetic oligonucleotide
  Sense strand starting at position 2782 of SEQ ID NO: 1880260
gguguucaagaacaagagu

SEQ ID NO: 1954107 - RNA, 19 nt, Artificial Sequence
  Description of Artificial Sequence: Synthetic oligonucleotide
  Antisense strand to SEQ ID NO: 1954106
acucuuguucuugaacacc

SEQ ID NO: 1954108 - RNA, 19 nt, Artificial Sequence
  Description of Artificial Sequence: Synthetic oligonucleotide
  Sense strand starting at position 2818 of SEQ ID NO: 1880260
gaggaaagaucugcggaca

SEQ ID NO: 1954109 - RNA, 19 nt, Artificial Sequence
  Description of Artificial Sequence: Synthetic oligonucleotide
  Antisense strand to SEQ ID NO: 1954108
uguccgcagaucuuuccuc

SEQ ID NO: 1954110 - RNA, 19 nt, Artificial Sequence
  Description of Artificial Sequence: Synthetic oligonucleotide
  Sense strand starting at position 2919 of SEQ ID NO: 1880260
acuaacgaauuugaaagau

SEQ ID NO: 1954111 - RNA, 19 nt, Artificial Sequence
  Description of Artificial Sequence: Synthetic oligonucleotide
  Antisense strand to SEQ ID NO: 1954110
aucuuucaaauucguuagu

SEQ ID NO: 1954112 - RNA, 19 nt, Artificial Sequence
  Description of Artificial Sequence: Synthetic oligonucleotide
  Sense strand starting at position 3049 of SEQ ID NO: 1880260
uucugagauuuagaaacag

SEQ ID NO: 1954113 - RNA, 19 nt, Artificial Sequence
  Description of Artificial Sequence: Synthetic oligonucleotide
  Antisense strand to SEQ ID NO: 1954112
cuguuucuaaaucucagaa

SEQ ID NO: 1954114 - RNA, 19 nt, Artificial Sequence
  Description of Artificial Sequence: Synthetic oligonucleotide
  Sense strand starting at position 3066 of SEQ ID NO: 1880260
agccguugaguugucaguu

SEQ ID NO: 1954115 - RNA, 19 nt, Artificial Sequence
  Description of Artificial Sequence: Synthetic oligonucleotide
  Antisense strand to SEQ ID NO: 1954114
aacugacaacucaacggcu

SEQ ID NO: 1954116 - RNA, 19 nt, Artificial Sequence
  Description of Artificial Sequence: Synthetic oligonucleotide
  Sense strand starting at position 3069 of SEQ ID NO: 1880260
cguugaguugucaguugaa

SEQ ID NO: 1954117 - RNA, 19 nt, Artificial Sequence
  Description of Artificial Sequence: Synthetic oligonucleotide
  Antisense strand to SEQ ID NO: 1954116
uucaacugacaacucaacg

SEQ ID NO: 1954118 - RNA, 19 nt, Artificial Sequence
  Description of Artificial Sequence: Synthetic oligonucleotide
  Sense strand starting at position 3364 of SEQ ID NO: 1880260
cucugaacuccugagcuaa

SEQ ID NO: 1954119 - RNA, 19 nt, Artificial Sequence
  Description of Artificial Sequence: Synthetic oligonucleotide
  Antisense strand to SEQ ID NO: 1954118
uuagcucaggaguucagag

SEQ ID NO: 1954120 - RNA, 19 nt, Artificial Sequence
  Description of Artificial Sequence: Synthetic oligonucleotide
  Sense strand starting at position 3465 of SEQ ID NO: 1880260
gucuguauauuugcauguu

SEQ ID NO: 1954121 - RNA, 19 nt, Artificial Sequence
  Description of Artificial Sequence: Synthetic oligonucleotide
  Antisense strand to SEQ ID NO: 1954120
aacaugcaaauauacagac

SEQ ID NO: 1954122 - RNA, 19 nt, Artificial Sequence
  Description of Artificial Sequence: Synthetic oligonucleotide
  Sense strand starting at position 3468 of SEQ ID NO: 1880260
uguauauuugcauguuaug

SEQ ID NO: 1954123 - RNA, 19 nt, Artificial Sequence
  Description of Artificial Sequence: Synthetic oligonucleotide
  Antisense strand to SEQ ID NO: 1954122
cauaacaugcaaauauaca

SEQ ID NO: 1954124 - RNA, 19 nt, Artificial Sequence
  Description of Artificial Sequence: Synthetic oligonucleotide
  Sense strand starting at position 3517 of SEQ ID NO: 1880260
auuagaguuuagcuaguua

SEQ ID NO: 1954125 - RNA, 19 nt, Artificial Sequence
  Description of Artificial Sequence: Synthetic oligonucleotide
  Antisense strand to SEQ ID NO: 1954124
uaacuagcuaaacucuaau

SEQ ID NO: 1954126 - RNA, 19 nt, Artificial Sequence
  Description of Artificial Sequence: Synthetic oligonucleotide
  Sense strand starting at position 3671 of SEQ ID NO: 1880260
uuggaaugaucgcuuagga

SEQ ID NO: 1954127 - RNA, 19 nt, Artificial Sequence
  Description of Artificial Sequence: Synthetic oligonucleotide
  Antisense strand to SEQ ID NO: 1954126
uccuaagcgaucauuccaa

SEQ ID NO: 1954128 - RNA, 19 nt, Artificial Sequence
  Description of Artificial Sequence: Synthetic oligonucleotide
  Sense strand starting at position 3819 of SEQ ID NO: 1880260
uuauaauagcacugagcuu

SEQ ID NO: 1954129 - RNA, 19 nt, Artificial Sequence
  Description of Artificial Sequence: Synthetic oligonucleotide
  Antisense strand to SEQ ID NO: 1954128
aagcucagugcuauuauaa

SEQ ID NO: 1954130 - RNA, 19 nt, Artificial Sequence
  Description of Artificial Sequence: Synthetic oligonucleotide
  Sense strand starting at position 3831 of SEQ ID NO: 1880260
ugagcuuagagucagaacu

SEQ ID NO: 1954131 - RNA, 19 nt, Artificial Sequence
  Description of Artificial Sequence: Synthetic oligonucleotide
  Antisense strand to SEQ ID NO: 1954130
aguucugacucuaagcuca

SEQ ID NO: 1954132 - RNA, 19 nt, Artificial Sequence
  Description of Artificial Sequence: Synthetic oligonucleotide
  Sense strand starting at position 3908 of SEQ ID NO: 1880260
agauguuaguccucuaauu

SEQ ID NO: 1954133 - RNA, 19 nt, Artificial Sequence
  Description of Artificial Sequence: Synthetic oligonucleotide
  Antisense strand to SEQ ID NO: 1954132
aauuagaggacuaacaucu

SEQ ID NO: 1954134 - RNA, 19 nt, Artificial Sequence
  Description of Artificial Sequence: Synthetic oligonucleotide
  Sense strand starting at position 275 of SEQ ID NO: 1880261
auuccuaucgaacagcaau

SEQ ID NO: 1954135 - RNA, 19 nt, Artificial Sequence
  Description of Artificial Sequence: Synthetic oligonucleotide
  Antisense strand to SEQ ID NO: 1954134
auugcuguucgauaggaau

SEQ ID NO: 1954136 - RNA, 19 nt, Artificial Sequence
  Description of Artificial Sequence: Synthetic oligonucleotide
  Sense strand starting at position 304 of SEQ ID NO: 1880261
ggcaauaucuugccacaaa

SEQ ID NO: 1954137 - RNA, 19 nt, Artificial Sequence
  Description of Artificial Sequence: Synthetic oligonucleotide
  Antisense strand to SEQ ID NO: 1954136
uuuguggcaagauauugcc

SEQ ID NO: 1954138 - RNA, 19 nt, Artificial Sequence
  Description of Artificial Sequence: Synthetic oligonucleotide
  Sense strand starting at position 682 of SEQ ID NO: 1880261
aaaucaccucgcgaggaaa

SEQ ID NO: 1954139 - RNA, 19 nt, Artificial Sequence
  Description of Artificial Sequence: Synthetic oligonucleotide
  Antisense strand to SEQ ID NO: 1954138
uuuccucgcgaggugauuu

SEQ ID NO: 1954140 - RNA, 19 nt, Artificial Sequence
  Description of Artificial Sequence: Synthetic oligonucleotide
  Sense strand starting at position 755 of SEQ ID NO: 1880261
ucacuuugagggugccaaa

SEQ ID NO: 1954141 - RNA, 19 nt, Artificial Sequence
  Description of Artificial Sequence: Synthetic oligonucleotide
  Antisense strand to SEQ ID NO: 1954140
uuuggcacccucaaaguga

SEQ ID NO: 1954142 - RNA, 19 nt, Artificial Sequence
  Description of Artificial Sequence: Synthetic oligonucleotide
  Sense strand starting at position 1814 of SEQ ID NO: 1880261
ggcagcucccauuaaucau

SEQ ID NO: 1954143 - RNA, 19 nt, Artificial Sequence
  Description of Artificial Sequence: Synthetic oligonucleotide
  Antisense strand to SEQ ID NO: 1954142
augauuaaugggagcugcc

SEQ ID NO: 1954144 - RNA, 19 nt, Artificial Sequence
  Description of Artificial Sequence: Synthetic oligonucleotide
  Sense strand starting at position 1835 of SEQ ID NO: 1880261
ggcuaauuucuuuguguaa

SEQ ID NO: 1954145 - RNA, 19 nt, Artificial Sequence
  Description of Artificial Sequence: Synthetic oligonucleotide
  Antisense strand to SEQ ID NO: 1954144
uuacacaaagaaauuagcc

SEQ ID NO: 1954146 - RNA, 19 nt, Artificial Sequence
  Description of Artificial Sequence: Synthetic oligonucleotide
  Sense strand starting at position 1836 of SEQ ID NO: 1880261
gcuaauuucuuuguguaaa

SEQ ID NO: 1954147 - RNA, 19 nt, Artificial Sequence
  Description of Artificial Sequence: Synthetic oligonucleotide
  Antisense strand to SEQ ID NO: 1954146
uuuacacaaagaaauuagc

SEQ ID NO: 1954148 - RNA, 19 nt, Artificial Sequence
  Description of Artificial Sequence: Synthetic oligonucleotide
  Sense strand starting at position 1933 of SEQ ID NO: 1880261
uuccuaccuuggcuugaaa

SEQ ID NO: 1954149 - RNA, 19 nt, Artificial Sequence
  Description of Artificial Sequence: Synthetic oligonucleotide
  Antisense strand to SEQ ID NO: 1954148
uuucaagccaagguaggaa

SEQ ID NO: 1954150 - RNA, 19 nt, Artificial Sequence
  Description of Artificial Sequence: Synthetic oligonucleotide
  Sense strand starting at position 1935 of SEQ ID NO: 1880261
ccuaccuuggcuugaaaug

SEQ ID NO: 1954151 - RNA, 19 nt, Artificial Sequence
  Description of Artificial Sequence: Synthetic oligonucleotide
  Antisense strand to SEQ ID NO: 1954150
cauuucaagccaagguagg

SEQ ID NO: 1954152 - RNA, 19 nt, Artificial Sequence
  Description of Artificial Sequence: Synthetic oligonucleotide
  Sense strand starting at position 2037 of SEQ ID NO: 1880261
agaaauaaguugucuuagg

SEQ ID NO: 1954153 - RNA, 19 nt, Artificial Sequence
  Description of Artificial Sequence: Synthetic oligonucleotide
  Antisense strand to SEQ ID NO: 1954152
ccuaagacaacuuauuucu

SEQ ID NO: 1954154 - RNA, 19 nt, Artificial Sequence
  Description of Artificial Sequence: Synthetic oligonucleotide
  Sense strand starting at position 2154 of SEQ ID NO: 1880261
guaauuugccuuuagucuc

SEQ ID NO: 1954155 - RNA, 19 nt, Artificial Sequence
  Description of Artificial Sequence: Synthetic oligonucleotide
  Antisense strand to SEQ ID NO: 1954154
gagacuaaaggcaaauuac

SEQ ID NO: 1954156 - RNA, 19 nt, Artificial Sequence
  Description of Artificial Sequence: Synthetic oligonucleotide
  Sense strand starting at position 2250 of SEQ ID NO: 1880261
gggcguuuggucccguuau

SEQ ID NO: 1954157 - RNA, 19 nt, Artificial Sequence
  Description of Artificial Sequence: Synthetic oligonucleotide
  Antisense strand to SEQ ID NO: 1954156
auaacgggaccaaacgccc

SEQ ID NO: 1954158 - RNA, 19 nt, Artificial Sequence
  Description of Artificial Sequence: Synthetic oligonucleotide
  Sense strand starting at position 2252 of SEQ ID NO: 1880261
gcguuuggucccguuaucu

SEQ ID NO: 1954159 - RNA, 19 nt, Artificial Sequence
  Description of Artificial Sequence: Synthetic oligonucleotide
  Antisense strand to SEQ ID NO: 1954158
agauaacgggaccaaacgc

SEQ ID NO: 1954160 - RNA, 19 nt, Artificial Sequence
  Description of Artificial Sequence: Synthetic oligonucleotide
  Sense strand starting at position 2275 of SEQ ID NO: 1880261
aggagugacauuggucaaa

SEQ ID NO: 1954161 - RNA, 19 nt, Artificial Sequence
  Description of Artificial Sequence: Synthetic oligonucleotide
  Antisense strand to SEQ ID NO: 1954160
uuugaccaaugucacuccu

SEQ ID NO: 1954162 - RNA, 19 nt, Artificial Sequence
  Description of Artificial Sequence: Synthetic oligonucleotide
  Sense strand starting at position 2277 of SEQ ID NO: 1880261
gagugacauuggucaaagg

SEQ ID NO: 1954163 - RNA, 19 nt, Artificial Sequence
  Description of Artificial Sequence: Synthetic oligonucleotide
  Antisense strand to SEQ ID NO: 1954162
ccuuugaccaaugucacuc

SEQ ID NO: 1954164 - RNA, 19 nt, Artificial Sequence
  Description of Artificial Sequence: Synthetic oligonucleotide
  Sense strand starting at position 2354 of SEQ ID NO: 1880261
cggcaagcucccguuuaca

SEQ ID NO: 1954165 - RNA, 19 nt, Artificial Sequence
  Description of Artificial Sequence: Synthetic oligonucleotide
  Antisense strand to SEQ ID NO: 1954164
uguaaacgggagcuugccg

SEQ ID NO: 1954166 - RNA, 19 nt, Artificial Sequence
  Description of Artificial Sequence: Synthetic oligonucleotide
  Sense strand starting at position 2378 of SEQ ID NO: 1880261
uccuaagccaugugagaag

SEQ ID NO: 1954167 - RNA, 19 nt, Artificial Sequence
  Description of Artificial Sequence: Synthetic oligonucleotide
  Antisense strand to SEQ ID NO: 1954166
cuucucacauggcuuagga

SEQ ID NO: 1954168 - RNA, 19 nt, Artificial Sequence
  Description of Artificial Sequence: Synthetic oligonucleotide
  Sense strand starting at position 2563 of SEQ ID NO: 1880261
acccuagagucagcucaaa

SEQ ID NO: 1954169 - RNA, 19 nt, Artificial Sequence
  Description of Artificial Sequence: Synthetic oligonucleotide
  Antisense strand to SEQ ID NO: 1954168
uuugagcugacucuagggu

SEQ ID NO: 1954170 - RNA, 19 nt, Artificial Sequence
  Description of Artificial Sequence: Synthetic oligonucleotide
  Sense strand starting at position 2583 of SEQ ID NO: 1880261
gucacaguucaguggaaga

SEQ ID NO: 1954171 - RNA, 19 nt, Artificial Sequence
  Description of Artificial Sequence: Synthetic oligonucleotide
  Antisense strand to SEQ ID NO: 1954170
ucuuccacugaacugugac

SEQ ID NO: 1954172 - RNA, 19 nt, Artificial Sequence
  Description of Artificial Sequence: Synthetic oligonucleotide
  Sense strand starting at position 2631 of SEQ ID NO: 1880261
uguacagaaggauguuaaa

SEQ ID NO: 1954173 - RNA, 19 nt, Artificial Sequence
  Description of Artificial Sequence: Synthetic oligonucleotide
  Antisense strand to SEQ ID NO: 1954172
uuuaacauccuucuguaca

SEQ ID NO: 1954174 - RNA, 19 nt, Artificial Sequence
  Description of Artificial Sequence: Synthetic oligonucleotide
  Sense strand starting at position 2757 of SEQ ID NO: 1880261
gcacuaauccucuaugacg

SEQ ID NO: 1954175 - RNA, 19 nt, Artificial Sequence
  Description of Artificial Sequence: Synthetic oligonucleotide
  Antisense strand to SEQ ID NO: 1954174
cgucauagaggauuagugc

SEQ ID NO: 1954176 - RNA, 19 nt, Artificial Sequence
  Description of Artificial Sequence: Synthetic oligonucleotide
  Sense strand starting at position 2824 of SEQ ID NO: 1880261
cggacuuuauaugauuuaa

SEQ ID NO: 1954177 - RNA, 19 nt, Artificial Sequence
  Description of Artificial Sequence: Synthetic oligonucleotide
  Antisense strand to SEQ ID NO: 1954176
uuaaaucauauaaaguccg

SEQ ID NO: 1954178 - RNA, 19 nt, Artificial Sequence
  Description of Artificial Sequence: Synthetic oligonucleotide
  Sense strand starting at position 2963 of SEQ ID NO: 1880261
gugggcagucccuaagaaa

SEQ ID NO: 1954179 - RNA, 19 nt, Artificial Sequence
  Description of Artificial Sequence: Synthetic oligonucleotide
  Antisense strand to SEQ ID NO: 1954178
uuucuuagggacugcccac

SEQ ID NO: 1954180 - RNA, 19 nt, Artificial Sequence
  Description of Artificial Sequence: Synthetic oligonucleotide
  Sense strand starting at position 3046 of SEQ ID NO: 1880261
cauaaacaugcauggugau

SEQ ID NO: 1954181 - RNA, 19 nt, Artificial Sequence
  Description of Artificial Sequence: Synthetic oligonucleotide
  Antisense strand to SEQ ID NO: 1954180
aucaccaugcauguuuaug

SEQ ID NO: 1954182 - RNA, 19 nt, Artificial Sequence
  Description of Artificial Sequence: Synthetic oligonucleotide
  Sense strand starting at position 3047 of SEQ ID NO: 1880261
auaaacaugcauggugauu

SEQ ID NO: 1954183 - RNA, 19 nt, Artificial Sequence
  Description of Artificial Sequence: Synthetic oligonucleotide
  Antisense strand to SEQ ID NO: 1954182
aaucaccaugcauguuuau

SEQ ID NO: 1954184 - RNA, 19 nt, Artificial Sequence
  Description of Artificial Sequence: Synthetic oligonucleotide
  Sense strand starting at position 3091 of SEQ ID NO: 1880261
uugucucaacucuggaaau

SEQ ID NO: 1954185 - RNA, 19 nt, Artificial Sequence
  Description of Artificial Sequence: Synthetic oligonucleotide
  Antisense strand to SEQ ID NO: 1954184
auuuccagaguugagacaa

SEQ ID NO: 1954186 - RNA, 19 nt, Artificial Sequence
  Description of Artificial Sequence: Synthetic oligonucleotide
  Sense strand starting at position 3093 of SEQ ID NO: 1880261
gucucaacucuggaaauuc

SEQ ID NO: 1954187 - RNA, 19 nt, Artificial Sequence
  Description of Artificial Sequence: Synthetic oligonucleotide
  Antisense strand to SEQ ID NO: 1954186
gaauuuccagaguugagac

SEQ ID NO: 1954188 - RNA, 19 nt, Artificial Sequence
  Description of Artificial Sequence: Synthetic oligonucleotide
  Sense strand starting at position 3268 of SEQ ID NO: 1880261
uggaacuuguuuccuggaa

SEQ ID NO: 1954189 - RNA, 19 nt, Artificial Sequence
  Description of Artificial Sequence: Synthetic oligonucleotide
  Antisense strand to SEQ ID NO: 1954188
uuccaggaaacaaguucca

SEQ ID NO: 1954190 - RNA, 19 nt, Artificial Sequence
  Description of Artificial Sequence: Synthetic oligonucleotide
  Sense strand starting at position 3272 of SEQ ID NO: 1880261
acuuguuuccuggaacucu

SEQ ID NO: 1954191 - RNA, 19 nt, Artificial Sequence
  Description of Artificial Sequence: Synthetic oligonucleotide
  Antisense strand to SEQ ID NO: 1954190
agaguuccaggaaacaagu

SEQ ID NO: 1954192 - RNA, 19 nt, Artificial Sequence
  Description of Artificial Sequence: Synthetic oligonucleotide
  Sense strand starting at position 3441 of SEQ ID NO: 1880261
augaccaaagauugucauu

SEQ ID NO: 1954193 - RNA, 19 nt, Artificial Sequence
  Description of Artificial Sequence: Synthetic oligonucleotide
  Antisense strand to SEQ ID NO: 1954192
aaugacaaucuuuggucau

SEQ ID NO: 1954194 - RNA, 19 nt, Artificial Sequence
  Description of Artificial Sequence: Synthetic oligonucleotide
  Sense strand starting at position 3540 of SEQ ID NO: 1880261
ccaggauacuugcccuaaa

SEQ ID NO: 1954195 - RNA, 19 nt, Artificial Sequence
  Description of Artificial Sequence: Synthetic oligonucleotide
  Antisense strand to SEQ ID NO: 1954194
uuuagggcaaguauccugg

SEQ ID NO: 1954196 - RNA, 19 nt, Artificial Sequence
  Description of Artificial Sequence: Synthetic oligonucleotide
  Sense strand starting at position 3573 of SEQ ID NO: 1880261
augcuaucagaugguaaau

SEQ ID NO: 1954197 - RNA, 19 nt, Artificial Sequence
  Description of Artificial Sequence: Synthetic oligonucleotide
  Antisense strand to SEQ ID NO: 1954196
auuuaccaucugauagcau

SEQ ID NO: 1954198 - RNA, 19 nt, Artificial Sequence
  Description of Artificial Sequence: Synthetic oligonucleotide
  Sense strand starting at position 3582 of SEQ ID NO: 1880261
gaugguaaaucacuggguu

SEQ ID NO: 1954199 - RNA, 19 nt, Artificial Sequence
  Description of Artificial Sequence: Synthetic oligonucleotide
  Antisense strand to SEQ ID NO: 1954198
aacccagugauuuaccauc

SEQ ID NO: 1954200 - RNA, 19 nt, Artificial Sequence
  Description of Artificial Sequence: Synthetic oligonucleotide
  Sense strand starting at position 3583 of SEQ ID NO: 1880261
augguaaaucacuggguua

SEQ ID NO: 1954201 - RNA, 19 nt, Artificial Sequence
  Description of Artificial Sequence: Synthetic oligonucleotide
  Antisense strand to SEQ ID NO: 1954200
uaacccagugauuuaccau

SEQ ID NO: 1954202 - RNA, 19 nt, Artificial Sequence
  Description of Artificial Sequence: Synthetic oligonucleotide
  Sense strand starting at position 3584 of SEQ ID NO: 1880261
ugguaaaucacuggguuau

SEQ ID NO: 1954203 - RNA, 19 nt, Artificial Sequence
  Description of Artificial Sequence: Synthetic oligonucleotide
  Antisense strand to SEQ ID NO: 1954202
auaacccagugauuuacca

SEQ ID NO: 1954204 - RNA, 19 nt, Artificial Sequence
  Description of Artificial Sequence: Synthetic oligonucleotide
  Sense strand starting at position 3585 of SEQ ID NO: 1880261
gguaaaucacuggguuaua

SEQ ID NO: 1954205 - RNA, 19 nt, Artificial Sequence
  Description of Artificial Sequence: Synthetic oligonucleotide
  Antisense strand to SEQ ID NO: 1954204
uauaacccagugauuuacc

SEQ ID NO: 1954206 - RNA, 19 nt, Artificial Sequence
  Description of Artificial Sequence: Synthetic oligonucleotide
  Sense strand starting at position 3586 of SEQ ID NO: 1880261
guaaaucacuggguuauaa

SEQ ID NO: 1954207 - RNA, 19 nt, Artificial Sequence
  Description of Artificial Sequence: Synthetic oligonucleotide
  Antisense strand to SEQ ID NO: 1954206
uuauaacccagugauuuac

SEQ ID NO: 1954208 - RNA, 19 nt, Artificial Sequence
  Description of Artificial Sequence: Synthetic oligonucleotide
  Sense strand starting at position 3712 of SEQ ID NO: 1880261
uguaauguccuaugagagg

SEQ ID NO: 1954209 - RNA, 19 nt, Artificial Sequence
  Description of Artificial Sequence: Synthetic oligonucleotide
  Antisense strand to SEQ ID NO: 1954208
ccucucauaggacauuaca

SEQ ID NO: 1954210 - RNA, 19 nt, Artificial Sequence
  Description of Artificial Sequence: Synthetic oligonucleotide
  Sense strand starting at position 3744 of SEQ ID NO: 1880261
augugaauccuagaaggcu

SEQ ID NO: 1954211 - RNA, 19 nt, Artificial Sequence
  Description of Artificial Sequence: Synthetic oligonucleotide
  Antisense strand to SEQ ID NO: 1954210
agccuucuaggauucacau

SEQ ID NO: 1954212 - RNA, 19 nt, Artificial Sequence
  Description of Artificial Sequence: Synthetic oligonucleotide
  Sense strand starting at position 3874 of SEQ ID NO: 1880261
gcagguugucauuaaaucc

SEQ ID NO: 1954213 - RNA, 19 nt, Artificial Sequence
  Description of Artificial Sequence: Synthetic oligonucleotide
  Antisense strand to SEQ ID NO: 1954212
ggauuuaaugacaaccugc

SEQ ID NO: 1954214 - RNA, 19 nt, Artificial Sequence
  Description of Artificial Sequence: Synthetic oligonucleotide
  Sense strand starting at position 259 of SEQ ID NO: 1880262
aagcuagauuuagaagaug

SEQ ID NO: 1954215 - RNA, 19 nt, Artificial Sequence
  Description of Artificial Sequence: Synthetic oligonucleotide
  Antisense strand to SEQ ID NO: 1954214
caucuucuaaaucuagcuu

SEQ ID NO: 1954216 - RNA, 19 nt, Artificial Sequence
  Description of Artificial Sequence: Synthetic oligonucleotide
  Sense strand starting at position 342 of SEQ ID NO: 1880262
caggaaugagcauguagaa

SEQ ID NO: 1954217 - RNA, 19 nt, Artificial Sequence
  Description of Artificial Sequence: Synthetic oligonucleotide
  Antisense strand to SEQ ID NO: 1954216
uucuacaugcucauuccug

SEQ ID NO: 1954218 - RNA, 19 nt, Artificial Sequence
  Description of Artificial Sequence: Synthetic oligonucleotide
  Sense strand starting at position 354 of SEQ ID NO: 1880262
uguagaauugcucauucca

SEQ ID NO: 1954219 - RNA, 19 nt, Artificial Sequence
  Description of Artificial Sequence: Synthetic oligonucleotide
  Antisense strand to SEQ ID NO: 1954218
uggaaugagcaauucuaca

SEQ ID NO: 1954220 - RNA, 19 nt, Artificial Sequence
  Description of Artificial Sequence: Synthetic oligonucleotide
  Sense strand starting at position 516 of SEQ ID NO: 1880262
acagguuccugagcauaaa

SEQ ID NO: 1954221 - RNA, 19 nt, Artificial Sequence
  Description of Artificial Sequence: Synthetic oligonucleotide
  Antisense strand to SEQ ID NO: 1954220
uuuaugcucaggaaccugu

SEQ ID NO: 1954222 - RNA, 19 nt, Artificial Sequence
  Description of Artificial Sequence: Synthetic oligonucleotide
  Sense strand starting at position 517 of SEQ ID NO: 1880262
cagguuccugagcauaaau

SEQ ID NO: 1954223 - RNA, 19 nt, Artificial Sequence
  Description of Artificial Sequence: Synthetic oligonucleotide
  Antisense strand to SEQ ID NO: 1954222
auuuaugcucaggaaccug

SEQ ID NO: 1954224 - RNA, 19 nt, Artificial Sequence
  Description of Artificial Sequence: Synthetic oligonucleotide
  Sense strand starting at position 519 of SEQ ID NO: 1880262
gguuccugagcauaaaugu

SEQ ID NO: 1954225 - RNA, 19 nt, Artificial Sequence
  Description of Artificial Sequence: Synthetic oligonucleotide
  Antisense strand to SEQ ID NO: 1954224
acauuuaugcucaggaacc

SEQ ID NO: 1954226 - RNA, 19 nt, Artificial Sequence
  Description of Artificial Sequence: Synthetic oligonucleotide
  Sense strand starting at position 534 of SEQ ID NO: 1880262
augugaauaaaguggcaaa

SEQ ID NO: 1954227 - RNA, 19 nt, Artificial Sequence
  Description of Artificial Sequence: Synthetic oligonucleotide
  Antisense strand to SEQ ID NO: 1954226
uuugccacuuuauucacau

SEQ ID NO: 1954228 - RNA, 19 nt, Artificial Sequence
  Description of Artificial Sequence: Synthetic oligonucleotide
  Sense strand starting at position 559 of SEQ ID NO: 1880262
agacacucauagcuguaua

SEQ ID NO: 1954229 - RNA, 19 nt, Artificial Sequence
  Description of Artificial Sequence: Synthetic oligonucleotide
  Antisense strand to SEQ ID NO: 1954228
uauacagcuaugagugucu

SEQ ID NO: 1954230 - RNA, 19 nt, Artificial Sequence
  Description of Artificial Sequence: Synthetic oligonucleotide
  Sense strand starting at position 605 of SEQ ID NO: 1880262
gugacagauacggagguua

SEQ ID NO: 1954231 - RNA, 19 nt, Artificial Sequence
  Description of Artificial Sequence: Synthetic oligonucleotide
  Antisense strand to SEQ ID NO: 1954230
uaaccuccguaucugucac

SEQ ID NO: 1954232 - RNA, 19 nt, Artificial Sequence
  Description of Artificial Sequence: Synthetic oligonucleotide
  Sense strand starting at position 607 of SEQ ID NO: 1880262
gacagauacggagguuaau

SEQ ID NO: 1954233 - RNA, 19 nt, Artificial Sequence
  Description of Artificial Sequence: Synthetic oligonucleotide
  Antisense strand to SEQ ID NO: 1954232
auuaaccuccguaucuguc

SEQ ID NO: 1954234 - RNA, 19 nt, Artificial Sequence
  Description of Artificial Sequence: Synthetic oligonucleotide
  Sense strand starting at position 856 of SEQ ID NO: 1880262
gaguguucugcaucugccu

SEQ ID NO: 1954235 - RNA, 19 nt, Artificial Sequence
  Description of Artificial Sequence: Synthetic oligonucleotide
  Antisense strand to SEQ ID NO: 1954234
aggcagaugcagaacacuc

SEQ ID NO: 1954236 - RNA, 19 nt, Artificial Sequence
  Description of Artificial Sequence: Synthetic oligonucleotide
  Sense strand starting at position 880 of SEQ ID NO: 1880262
gauggaagcucaguuuaug

SEQ ID NO: 1954237 - RNA, 19 nt, Artificial Sequence
  Description of Artificial Sequence: Synthetic oligonucleotide
  Antisense strand to SEQ ID NO: 1954236
cauaaacugagcuuccauc

SEQ ID NO: 1954238 - RNA, 19 nt, Artificial Sequence
  Description of Artificial Sequence: Synthetic oligonucleotide
  Sense strand starting at position 1063 of SEQ ID NO: 1880262
aaaguaugcuagucuagaa

SEQ ID NO: 1954239 - RNA, 19 nt, Artificial Sequence
  Description of Artificial Sequence: Synthetic oligonucleotide
  Antisense strand to SEQ ID NO: 1954238
uucuagacuagcauacuuu

SEQ ID NO: 1954240 - RNA, 19 nt, Artificial Sequence
  Description of Artificial Sequence: Synthetic oligonucleotide
  Sense strand starting at position 1119 of SEQ ID NO: 1880262
auuaauacuuagcuggaua

SEQ ID NO: 1954241 - RNA, 19 nt, Artificial Sequence
  Description of Artificial Sequence: Synthetic oligonucleotide
  Antisense strand to SEQ ID NO: 1954240
uauccagcuaaguauuaau

SEQ ID NO: 1954242 - RNA, 19 nt, Artificial Sequence
  Description of Artificial Sequence: Synthetic oligonucleotide
  Sense strand starting at position 1127 of SEQ ID NO: 1880262
uuagcuggauaacuuaaau

SEQ ID NO: 1954243 - RNA, 19 nt, Artificial Sequence
  Description of Artificial Sequence: Synthetic oligonucleotide
  Antisense strand to SEQ ID NO: 1954242
auuuaaguuauccagcuaa

SEQ ID NO: 1954244 - RNA, 19 nt, Artificial Sequence
  Description of Artificial Sequence: Synthetic oligonucleotide
  Sense strand starting at position 1184 of SEQ ID NO: 1880262
guagguaacauacgagaau

SEQ ID NO: 1954245 - RNA, 19 nt, Artificial Sequence
  Description of Artificial Sequence: Synthetic oligonucleotide
  Antisense strand to SEQ ID NO: 1954244
auucucguauguuaccuac

SEQ ID NO: 1954246 - RNA, 19 nt, Artificial Sequence
  Description of Artificial Sequence: Synthetic oligonucleotide
  Sense strand starting at position 1331 of SEQ ID NO: 1880262
cuggucuguggccaacaaa

SEQ ID NO: 1954247 - RNA, 19 nt, Artificial Sequence
  Description of Artificial Sequence: Synthetic oligonucleotide
  Antisense strand to SEQ ID NO: 1954246
uuuguuggccacagaccag

SEQ ID NO: 1954248 - RNA, 19 nt, Artificial Sequence
  Description of Artificial Sequence: Synthetic oligonucleotide
  Sense strand starting at position 1334 of SEQ ID NO: 1880262
gucuguggccaacaaauaa

SEQ ID NO: 1954249 - RNA, 19 nt, Artificial Sequence
  Description of Artificial Sequence: Synthetic oligonucleotide
  Antisense strand to SEQ ID NO: 1954248
uuauuuguuggccacagac

SEQ ID NO: 1954250 - RNA, 19 nt, Artificial Sequence
  Description of Artificial Sequence: Synthetic oligonucleotide
  Sense strand starting at position 1394 of SEQ ID NO: 1880262
acacaauguugaguggaaa

SEQ ID NO: 1954251 - RNA, 19 nt, Artificial Sequence
  Description of Artificial Sequence: Synthetic oligonucleotide
  Antisense strand to SEQ ID NO: 1954250
uuuccacucaacauugugu

SEQ ID NO: 1954252 - RNA, 19 nt, Artificial Sequence
  Description of Artificial Sequence: Synthetic oligonucleotide
  Sense strand starting at position 1503 of SEQ ID NO: 1880262
aauuguuccggguagaagu

SEQ ID NO: 1954253 - RNA, 19 nt, Artificial Sequence
  Description of Artificial Sequence: Synthetic oligonucleotide
  Antisense strand to SEQ ID NO: 1954252
acuucuacccggaacaauu

SEQ ID NO: 1954254 - RNA, 19 nt, Artificial Sequence
  Description of Artificial Sequence: Synthetic oligonucleotide
  Sense strand starting at position 1564 of SEQ ID NO: 1880262
ccgggcaagcuuuauauaa

SEQ ID NO: 1954255 - RNA, 19 nt, Artificial Sequence
  Description of Artificial Sequence: Synthetic oligonucleotide
  Antisense strand to SEQ ID NO: 1954254
uuauauaaagcuugcccgg

SEQ ID NO: 1954256 - RNA, 19 nt, Artificial Sequence
  Description of Artificial Sequence: Synthetic oligonucleotide
  Sense strand starting at position 1650 of SEQ ID NO: 1880262
guggaaugggacgagcaau

SEQ ID NO: 1954257 - RNA, 19 nt, Artificial Sequence
  Description of Artificial Sequence: Synthetic oligonucleotide
  Antisense strand to SEQ ID NO: 1954256
auugcucgucccauuccac

SEQ ID NO: 1954258 - RNA, 19 nt, Artificial Sequence
  Description of Artificial Sequence: Synthetic oligonucleotide
  Sense strand starting at position 2367 of SEQ ID NO: 1880262
ucgucuucccggguucauu

SEQ ID NO: 1954259 - RNA, 19 nt, Artificial Sequence
  Description of Artificial Sequence: Synthetic oligonucleotide
  Antisense strand to SEQ ID NO: 1954258
aaugaacccgggaagacga

SEQ ID NO: 1954260 - RNA, 19 nt, Artificial Sequence
  Description of Artificial Sequence: Synthetic oligonucleotide
  Sense strand starting at position 2389 of SEQ ID NO: 1880262
ucauuaauaggcgggaaca

SEQ ID NO: 1954261 - RNA, 19 nt, Artificial Sequence
  Description of Artificial Sequence: Synthetic oligonucleotide
  Antisense strand to SEQ ID NO: 1954260
uguucccgccuauuaauga

SEQ ID NO: 1954262 - RNA, 19 nt, Artificial Sequence
  Description of Artificial Sequence: Synthetic oligonucleotide
  Sense strand starting at position 2712 of SEQ ID NO: 1880262
gugacuggguccuuugaaa

SEQ ID NO: 1954263 - RNA, 19 nt, Artificial Sequence
  Description of Artificial Sequence: Synthetic oligonucleotide
  Antisense strand to SEQ ID NO: 1954262
uuucaaaggacccagucac

SEQ ID NO: 1954264 - RNA, 19 nt, Artificial Sequence
  Description of Artificial Sequence: Synthetic oligonucleotide
  Sense strand starting at position 2743 of SEQ ID NO: 1880262
acguauccgguagaacuaa

SEQ ID NO: 1954265 - RNA, 19 nt, Artificial Sequence
  Description of Artificial Sequence: Synthetic oligonucleotide
  Antisense strand to SEQ ID NO: 1954264
uuaguucuaccggauacgu

SEQ ID NO: 1954266 - RNA, 19 nt, Artificial Sequence
  Description of Artificial Sequence: Synthetic oligonucleotide
  Sense strand starting at position 2832 of SEQ ID NO: 1880262
gucugcauuugucuuuaca

SEQ ID NO: 1954267 - RNA, 19 nt, Artificial Sequence
  Description of Artificial Sequence: Synthetic oligonucleotide
  Antisense strand to SEQ ID NO: 1954266
uguaaagacaaaugcagac

SEQ ID NO: 1954268 - RNA, 19 nt, Artificial Sequence
  Description of Artificial Sequence: Synthetic oligonucleotide
  Sense strand starting at position 2939 of SEQ ID NO: 1880262
ucaggaagauaauaagaaa

SEQ ID NO: 1954269 - RNA, 19 nt, Artificial Sequence
  Description of Artificial Sequence: Synthetic oligonucleotide
  Antisense strand to SEQ ID NO: 1954268
uuucuuauuaucuuccuga

SEQ ID NO: 1954270 - RNA, 19 nt, Artificial Sequence
  Description of Artificial Sequence: Synthetic oligonucleotide
  Sense strand starting at position 2942 of SEQ ID NO: 1880262
ggaagauaauaagaaacaa

SEQ ID NO: 1954271 - RNA, 19 nt, Artificial Sequence
  Description of Artificial Sequence: Synthetic oligonucleotide
  Antisense strand to SEQ ID NO: 1954270
uuguuucuuauuaucuucc

SEQ ID NO: 1954272 - RNA, 19 nt, Artificial Sequence
  Description of Artificial Sequence: Synthetic oligonucleotide
  Sense strand starting at position 3022 of SEQ ID NO: 1880262
uugugaggucaauagauuc

SEQ ID NO: 1954273 - RNA, 19 nt, Artificial Sequence
  Description of Artificial Sequence: Synthetic oligonucleotide
  Antisense strand to SEQ ID NO: 1954272
gaaucuauugaccucacaa

SEQ ID NO: 1954274 - RNA, 19 nt, Artificial Sequence
  Description of Artificial Sequence: Synthetic oligonucleotide
  Sense strand starting at position 3118 of SEQ ID NO: 1880262
ucagcuuaagauuaugcaa

SEQ ID NO: 1954275 - RNA, 19 nt, Artificial Sequence
  Description of Artificial Sequence: Synthetic oligonucleotide
  Antisense strand to SEQ ID NO: 1954274
uugcauaaucuuaagcuga

SEQ ID NO: 1954276 - RNA, 19 nt, Artificial Sequence
  Description of Artificial Sequence: Synthetic oligonucleotide
  Sense strand starting at position 3446 of SEQ ID NO: 1880262
cuguaaauccuguaaauua

SEQ ID NO: 1954277 - RNA, 19 nt, Artificial Sequence
  Description of Artificial Sequence: Synthetic oligonucleotide
  Antisense strand to SEQ ID NO: 1954276
uaauuuacaggauuuacag

SEQ ID NO: 1954278 - RNA, 19 nt, Artificial Sequence
  Description of Artificial Sequence: Synthetic oligonucleotide
  Sense strand starting at position 3529 of SEQ ID NO: 1880262
uuuagauugcaguauagaa

SEQ ID NO: 1954279 - RNA, 19 nt, Artificial Sequence
  Description of Artificial Sequence: Synthetic oligonucleotide
  Antisense strand to SEQ ID NO: 1954278
uucuauacugcaaucuaaa

SEQ ID NO: 1954280 - RNA, 19 nt, Artificial Sequence
  Description of Artificial Sequence: Synthetic oligonucleotide
  Sense strand starting at position 3588 of SEQ ID NO: 1880262
gauaaagacuugucuauga

SEQ ID NO: 1954281 - RNA, 19 nt, Artificial Sequence
  Description of Artificial Sequence: Synthetic oligonucleotide
  Antisense strand to SEQ ID NO: 1954280
ucauagacaagucuuuauc

SEQ ID NO: 1954282 - RNA, 19 nt, Artificial Sequence
  Description of Artificial Sequence: Synthetic oligonucleotide
  Sense strand starting at position 3627 of SEQ ID NO: 1880262
auagucagucuguaagcaa

SEQ ID NO: 1954283 - RNA, 19 nt, Artificial Sequence
  Description of Artificial Sequence: Synthetic oligonucleotide
  Antisense strand to SEQ ID NO: 1954282
uugcuuacagacugacuau

SEQ ID NO: 1954284 - RNA, 19 nt, Artificial Sequence
  Description of Artificial Sequence: Synthetic oligonucleotide
  Sense strand starting at position 3677 of SEQ ID NO: 1880262
uuuauacuugggcacauaa

SEQ ID NO: 1954285 - RNA, 19 nt, Artificial Sequence
  Description of Artificial Sequence: Synthetic oligonucleotide
  Antisense strand to SEQ ID NO: 1954284
uuaugugcccaaguauaaa

SEQ ID NO: 1954286 - RNA, 19 nt, Artificial Sequence
  Description of Artificial Sequence: Synthetic oligonucleotide
  Sense strand starting at position 3786 of SEQ ID NO: 1880262
uuuauacauugagcgauaa

SEQ ID NO: 1954287 - RNA, 19 nt, Artificial Sequence
  Description of Artificial Sequence: Synthetic oligonucleotide
  Antisense strand to SEQ ID NO: 1954286
uuaucgcucaauguauaaa

SEQ ID NO: 1954288 - RNA, 19 nt, Artificial Sequence
  Description of Artificial Sequence: Synthetic oligonucleotide
  Sense strand starting at position 3787 of SEQ ID NO: 1880262
uuauacauugagcgauaag

SEQ ID NO: 1954289 - RNA, 19 nt, Artificial Sequence
  Description of Artificial Sequence: Synthetic oligonucleotide
  Antisense strand to SEQ ID NO: 1954288
cuuaucgcucaauguauaa

SEQ ID NO: 1954290 - RNA, 19 nt, Artificial Sequence
  Description of Artificial Sequence: Synthetic oligonucleotide
  Sense strand starting at position 3797 of SEQ ID NO: 1880262
agcgauaagauauggaaca

SEQ ID NO: 1954291 - RNA, 19 nt, Artificial Sequence
  Description of Artificial Sequence: Synthetic oligonucleotide
  Antisense strand to SEQ ID NO: 1954290
uguuccauaucuuaucgcu

SEQ ID NO: 1954292 - RNA, 19 nt, Artificial Sequence
  Description of Artificial Sequence: Synthetic oligonucleotide
  Sense strand starting at position 3859 of SEQ ID NO: 1880262
ugugaugguccugaaguua

SEQ ID NO: 1954293 - RNA, 19 nt, Artificial Sequence
  Description of Artificial Sequence: Synthetic oligonucleotide
  Antisense strand to SEQ ID NO: 1954292
uaacuucaggaccaucaca

SEQ ID NO: 1954294 - RNA, 19 nt, Artificial Sequence
  Description of Artificial Sequence: Synthetic oligonucleotide
  Sense strand starting at position 7 of SEQ ID NO: 1880263
gguuauuagggucaagagu

SEQ ID NO: 1954295 - RNA, 19 nt, Artificial Sequence
  Description of Artificial Sequence: Synthetic oligonucleotide
  Antisense strand to SEQ ID NO: 1954294
acucuugacccuaauaacc

SEQ ID NO: 1954296 - RNA, 19 nt, Artificial Sequence
  Description of Artificial Sequence: Synthetic oligonucleotide
  Sense strand starting at position 41 of SEQ ID NO: 1880263
ccaccugcaucccugagau

SEQ ID NO: 1954297 - RNA, 19 nt, Artificial Sequence
  Description of Artificial Sequence: Synthetic oligonucleotide
  Antisense strand to SEQ ID NO: 1954296
aucucagggaugcaggugg

SEQ ID NO: 1954298 - RNA, 19 nt, Artificial Sequence
  Description of Artificial Sequence: Synthetic oligonucleotide
  Sense strand starting at position 43 of SEQ ID NO: 1880263
accugcaucccugagauga

SEQ ID NO: 1954299 - RNA, 19 nt, Artificial Sequence
  Description of Artificial Sequence: Synthetic oligonucleotide
  Antisense strand to SEQ ID NO: 1954298
ucaucucagggaugcaggu

SEQ ID NO: 1954300 - RNA, 19 nt, Artificial Sequence
  Description of Artificial Sequence: Synthetic oligonucleotide
  Sense strand starting at position 209 of SEQ ID NO: 1880263
agaggagucucuguugauu

SEQ ID NO: 1954301 - RNA, 19 nt, Artificial Sequence
  Description of Artificial Sequence: Synthetic oligonucleotide
  Antisense strand to SEQ ID NO: 1954300
aaucaacagagacuccucu

SEQ ID NO: 1954302 - RNA, 19 nt, Artificial Sequence
  Description of Artificial Sequence: Synthetic oligonucleotide
  Sense strand starting at position 309 of SEQ ID NO: 1880263
gaugcaaagcauuacgaga

SEQ ID NO: 1954303 - RNA, 19 nt, Artificial Sequence
  Description of Artificial Sequence: Synthetic oligonucleotide
  Antisense strand to SEQ ID NO: 1954302
ucucguaaugcuuugcauc

SEQ ID NO: 1954304 - RNA, 19 nt, Artificial Sequence
  Description of Artificial Sequence: Synthetic oligonucleotide
  Sense strand starting at position 516 of SEQ ID NO: 1880263
acagucaucuggccuuaac

SEQ ID NO: 1954305 - RNA, 19 nt, Artificial Sequence
  Description of Artificial Sequence: Synthetic oligonucleotide
  Antisense strand to SEQ ID NO: 1954304
guuaaggccagaugacugu

SEQ ID NO: 1954306 - RNA, 19 nt, Artificial Sequence
  Description of Artificial Sequence: Synthetic oligonucleotide
  Sense strand starting at position 527 of SEQ ID NO: 1880263
gccuuaacuucucugaggu

SEQ ID NO: 1954307 - RNA, 19 nt, Artificial Sequence
  Description of Artificial Sequence: Synthetic oligonucleotide
  Antisense strand to SEQ ID NO: 1954306
accucagagaaguuaaggc

SEQ ID NO: 1954308 - RNA, 19 nt, Artificial Sequence
  Description of Artificial Sequence: Synthetic oligonucleotide
  Sense strand starting at position 528 of SEQ ID NO: 1880263
ccuuaacuucucugaggug

SEQ ID NO: 1954309 - RNA, 19 nt, Artificial Sequence
  Description of Artificial Sequence: Synthetic oligonucleotide
  Antisense strand to SEQ ID NO: 1954308
caccucagagaaguuaagg

SEQ ID NO: 1954310 - RNA, 19 nt, Artificial Sequence
  Description of Artificial Sequence: Synthetic oligonucleotide
  Sense strand starting at position 540 of SEQ ID NO: 1880263
ugaggugauaacgagucuu

SEQ ID NO: 1954311 - RNA, 19 nt, Artificial Sequence
  Description of Artificial Sequence: Synthetic oligonucleotide
  Antisense strand to SEQ ID NO: 1954310
aagacucguuaucaccuca

SEQ ID NO: 1954312 - RNA, 19 nt, Artificial Sequence
  Description of Artificial Sequence: Synthetic oligonucleotide
  Sense strand starting at position 827 of SEQ ID NO: 1880263
agauaaacgugagucgagu

SEQ ID NO: 1954313 - RNA, 19 nt, Artificial Sequence
  Description of Artificial Sequence: Synthetic oligonucleotide
  Antisense strand to SEQ ID NO: 1954312
acucgacucacguuuaucu

SEQ ID NO: 1954314 - RNA, 19 nt, Artificial Sequence
  Description of Artificial Sequence: Synthetic oligonucleotide
  Sense strand starting at position 891 of SEQ ID NO: 1880263
gccucugggaaguaacauu

SEQ ID NO: 1954315 - RNA, 19 nt, Artificial Sequence
  Description of Artificial Sequence: Synthetic oligonucleotide
  Antisense strand to SEQ ID NO: 1954314
aauguuacuucccagaggc

SEQ ID NO: 1954316 - RNA, 19 nt, Artificial Sequence
  Description of Artificial Sequence: Synthetic oligonucleotide
  Sense strand starting at position 1077 of SEQ ID NO: 1880263
cugaguugugacugacacu

SEQ ID NO: 1954317 - RNA, 19 nt, Artificial Sequence
  Description of Artificial Sequence: Synthetic oligonucleotide
  Antisense strand to SEQ ID NO: 1954316
agugucagucacaacucag

SEQ ID NO: 1954318 - RNA, 19 nt, Artificial Sequence
  Description of Artificial Sequence: Synthetic oligonucleotide
  Sense strand starting at position 1149 of SEQ ID NO: 1880263
gguaaaugcuguucugagg

SEQ ID NO: 1954319 - RNA, 19 nt, Artificial Sequence
  Description of Artificial Sequence: Synthetic oligonucleotide
  Antisense strand to SEQ ID NO: 1954318
ccucagaacagcauuuacc

SEQ ID NO: 1954320 - RNA, 19 nt, Artificial Sequence
  Description of Artificial Sequence: Synthetic oligonucleotide
  Sense strand starting at position 1355 of SEQ ID NO: 1880263
gguguuggugugaauugcu

SEQ ID NO: 1954321 - RNA, 19 nt, Artificial Sequence
  Description of Artificial Sequence: Synthetic oligonucleotide
  Antisense strand to SEQ ID NO: 1954320
agcaauucacaccaacacc

SEQ ID NO: 1954322 - RNA, 19 nt, Artificial Sequence
  Description of Artificial Sequence: Synthetic oligonucleotide
  Sense strand starting at position 1360 of SEQ ID NO: 1880263
uggugugaauugcucaaga

SEQ ID NO: 1954323 - RNA, 19 nt, Artificial Sequence
  Description of Artificial Sequence: Synthetic oligonucleotide
  Antisense strand to SEQ ID NO: 1954322
ucuugagcaauucacacca

SEQ ID NO: 1954324 - RNA, 19 nt, Artificial Sequence
  Description of Artificial Sequence: Synthetic oligonucleotide
  Sense strand starting at position 1362 of SEQ ID NO: 1880263
gugugaauugcucaagagu

SEQ ID NO: 1954325 - RNA, 19 nt, Artificial Sequence
  Description of Artificial Sequence: Synthetic oligonucleotide
  Antisense strand to SEQ ID NO: 1954324
acucuugagcaauucacac

SEQ ID NO: 1954326 - RNA, 19 nt, Artificial Sequence
  Description of Artificial Sequence: Synthetic oligonucleotide
  Sense strand starting at position 1683 of SEQ ID NO: 1880263
gugggauguuaagucaaau

SEQ ID NO: 1954327 - RNA, 19 nt, Artificial Sequence
  Description of Artificial Sequence: Synthetic oligonucleotide
  Antisense strand to SEQ ID NO: 1954326
auuugacuuaacaucccac

SEQ ID NO: 1954328 - RNA, 19 nt, Artificial Sequence
  Description of Artificial Sequence: Synthetic oligonucleotide
  Sense strand starting at position 1735 of SEQ ID NO: 1880263
ggcccaaugcuggaucaga

SEQ ID NO: 1954329 - RNA, 19 nt, Artificial Sequence
  Description of Artificial Sequence: Synthetic oligonucleotide
  Antisense strand to SEQ ID NO: 1954328
ucugauccagcauugggcc

SEQ ID NO: 1954330 - RNA, 19 nt, Artificial Sequence
  Description of Artificial Sequence: Synthetic oligonucleotide
  Sense strand starting at position 1852 of SEQ ID NO: 1880263
aguauauacuaccuccaga

SEQ ID NO: 1954331 - RNA, 19 nt, Artificial Sequence
  Description of Artificial Sequence: Synthetic oligonucleotide
  Antisense strand to SEQ ID NO: 1954330
ucuggagguaguauauacu

SEQ ID NO: 1954332 - RNA, 19 nt, Artificial Sequence
  Description of Artificial Sequence: Synthetic oligonucleotide
  Sense strand starting at position 1979 of SEQ ID NO: 1880263
guguauuggccuuaaauag

SEQ ID NO: 1954333 - RNA, 19 nt, Artificial Sequence
  Description of Artificial Sequence: Synthetic oligonucleotide
  Antisense strand to SEQ ID NO: 1954332
cuauuuaaggccaauacac

SEQ ID NO: 1954334 - RNA, 19 nt, Artificial Sequence
  Description of Artificial Sequence: Synthetic oligonucleotide
  Sense strand starting at position 2375 of SEQ ID NO: 1880263
aggucucucguggaggaga

SEQ ID NO: 1954335 - RNA, 19 nt, Artificial Sequence
  Description of Artificial Sequence: Synthetic oligonucleotide
  Antisense strand to SEQ ID NO: 1954334
ucuccuccacgagagaccu

SEQ ID NO: 1954336 - RNA, 19 nt, Artificial Sequence
  Description of Artificial Sequence: Synthetic oligonucleotide
  Sense strand starting at position 2432 of SEQ ID NO: 1880263
ugacaagaccacugaguuu

SEQ ID NO: 1954337 - RNA, 19 nt, Artificial Sequence
  Description of Artificial Sequence: Synthetic oligonucleotide
  Antisense strand to SEQ ID NO: 1954336
aaacucaguggucuuguca

SEQ ID NO: 1954338 - RNA, 19 nt, Artificial Sequence
  Description of Artificial Sequence: Synthetic oligonucleotide
  Sense strand starting at position 2443 of SEQ ID NO: 1880263
cugaguuugucacucaaga

SEQ ID NO: 1954339 - RNA, 19 nt, Artificial Sequence
  Description of Artificial Sequence: Synthetic oligonucleotide
  Antisense strand to SEQ ID NO: 1954338
ucuugagugacaaacucag

SEQ ID NO: 1954340 - RNA, 19 nt, Artificial Sequence
  Description of Artificial Sequence: Synthetic oligonucleotide
  Sense strand starting at position 2451 of SEQ ID NO: 1880263
gucacucaagacugaacuu

SEQ ID NO: 1954341 - RNA, 19 nt, Artificial Sequence
  Description of Artificial Sequence: Synthetic oligonucleotide
  Antisense strand to SEQ ID NO: 1954340
aaguucagucuugagugac

SEQ ID NO: 1954342 - RNA, 19 nt, Artificial Sequence
  Description of Artificial Sequence: Synthetic oligonucleotide
  Sense strand starting at position 2468 of SEQ ID NO: 1880263
uugccuaggucuccugaga

SEQ ID NO: 1954343 - RNA, 19 nt, Artificial Sequence
  Description of Artificial Sequence: Synthetic oligonucleotide
  Antisense strand to SEQ ID NO: 1954342
ucucaggagaccuaggcaa

SEQ ID NO: 1954344 - RNA, 19 nt, Artificial Sequence
  Description of Artificial Sequence: Synthetic oligonucleotide
  Sense strand starting at position 2652 of SEQ ID NO: 1880263
gucaaaggugaguggguua

SEQ ID NO: 1954345 - RNA, 19 nt, Artificial Sequence
  Description of Artificial Sequence: Synthetic oligonucleotide
  Antisense strand to SEQ ID NO: 1954344
uaacccacucaccuuugac

SEQ ID NO: 1954346 - RNA, 19 nt, Artificial Sequence
  Description of Artificial Sequence: Synthetic oligonucleotide
  Sense strand starting at position 2657 of SEQ ID NO: 1880263
aggugaguggguuagcaaa

SEQ ID NO: 1954347 - RNA, 19 nt, Artificial Sequence
  Description of Artificial Sequence: Synthetic oligonucleotide
  Antisense strand to SEQ ID NO: 1954346
uuugcuaacccacucaccu

SEQ ID NO: 1954348 - RNA, 19 nt, Artificial Sequence
  Description of Artificial Sequence: Synthetic oligonucleotide
  Sense strand starting at position 2709 of SEQ ID NO: 1880263
uaggcaagauucucguuaa

SEQ ID NO: 1954349 - RNA, 19 nt, Artificial Sequence
  Description of Artificial Sequence: Synthetic oligonucleotide
  Antisense strand to SEQ ID NO: 1954348
uuaacgagaaucuugccua

SEQ ID NO: 1954350 - RNA, 19 nt, Artificial Sequence
  Description of Artificial Sequence: Synthetic oligonucleotide
  Sense strand starting at position 2798 of SEQ ID NO: 1880263
guaccuuggaugggaaagu

SEQ ID NO: 1954351 - RNA, 19 nt, Artificial Sequence
  Description of Artificial Sequence: Synthetic oligonucleotide
  Antisense strand to SEQ ID NO: 1954350
acuuucccauccaagguac

SEQ ID NO: 1954352 - RNA, 19 nt, Artificial Sequence
  Description of Artificial Sequence: Synthetic oligonucleotide
  Sense strand starting at position 2923 of SEQ ID NO: 1880263
uggagcaaccauugaguaa

SEQ ID NO: 1954353 - RNA, 19 nt, Artificial Sequence
  Description of Artificial Sequence: Synthetic oligonucleotide
  Antisense strand to SEQ ID NO: 1954352
uuacucaaugguugcucca

SEQ ID NO: 1954354 - RNA, 19 nt, Artificial Sequence
  Description of Artificial Sequence: Synthetic oligonucleotide
  Sense strand starting at position 2926 of SEQ ID NO: 1880263
agcaaccauugaguaaaga

SEQ ID NO: 1954355 - RNA, 19 nt, Artificial Sequence
  Description of Artificial Sequence: Synthetic oligonucleotide
  Antisense strand to SEQ ID NO: 1954354
ucuuuacucaaugguugcu

SEQ ID NO: 1954356 - RNA, 19 nt, Artificial Sequence
  Description of Artificial Sequence: Synthetic oligonucleotide
  Sense strand starting at position 3036 of SEQ ID NO: 1880263
auuccuggguuccuaauua

SEQ ID NO: 1954357 - RNA, 19 nt, Artificial Sequence
  Description of Artificial Sequence: Synthetic oligonucleotide
  Antisense strand to SEQ ID NO: 1954356
uaauuaggaacccaggaau

SEQ ID NO: 1954358 - RNA, 19 nt, Artificial Sequence
  Description of Artificial Sequence: Synthetic oligonucleotide
  Sense strand starting at position 3040 of SEQ ID NO: 1880263
cuggguuccuaauuaauca

SEQ ID NO: 1954359 - RNA, 19 nt, Artificial Sequence
  Description of Artificial Sequence: Synthetic oligonucleotide
  Antisense strand to SEQ ID NO: 1954358
ugauuaauuaggaacccag

SEQ ID NO: 1954360 - RNA, 19 nt, Artificial Sequence
  Description of Artificial Sequence: Synthetic oligonucleotide
  Sense strand starting at position 3061 of SEQ ID NO: 1880263
uggcuuugagaacaucacu

SEQ ID NO: 1954361 - RNA, 19 nt, Artificial Sequence
  Description of Artificial Sequence: Synthetic oligonucleotide
  Antisense strand to SEQ ID NO: 1954360
agugauguucucaaagcca

SEQ ID NO: 1954362 - RNA, 19 nt, Artificial Sequence
  Description of Artificial Sequence: Synthetic oligonucleotide
  Sense strand starting at position 3103 of SEQ ID NO: 1880263
gguugcagugagggauaaa

SEQ ID NO: 1954363 - RNA, 19 nt, Artificial Sequence
  Description of Artificial Sequence: Synthetic oligonucleotide
  Antisense strand to SEQ ID NO: 1954362
uuuaucccucacugcaacc

SEQ ID NO: 1954364 - RNA, 19 nt, Artificial Sequence
  Description of Artificial Sequence: Synthetic oligonucleotide
  Sense strand starting at position 3104 of SEQ ID NO: 1880263
guugcagugagggauaaau

SEQ ID NO: 1954365 - RNA, 19 nt, Artificial Sequence
  Description of Artificial Sequence: Synthetic oligonucleotide
  Antisense strand to SEQ ID NO: 1954364
auuuaucccucacugcaac

SEQ ID NO: 1954366 - RNA, 19 nt, Artificial Sequence
  Description of Artificial Sequence: Synthetic oligonucleotide
  Sense strand starting at position 3119 of SEQ ID NO: 1880263
aaaugagaggcgggucuau

SEQ ID NO: 1954367 - RNA, 19 nt, Artificial Sequence
  Description of Artificial Sequence: Synthetic oligonucleotide
  Antisense strand to SEQ ID NO: 1954366
auagacccgccucucauuu

SEQ ID NO: 1954368 - RNA, 19 nt, Artificial Sequence
  Description of Artificial Sequence: Synthetic oligonucleotide
  Sense strand starting at position 3166 of SEQ ID NO: 1880263
gggugaugcccuggaaucu

SEQ ID NO: 1954369 - RNA, 19 nt, Artificial Sequence
  Description of Artificial Sequence: Synthetic oligonucleotide
  Antisense strand to SEQ ID NO: 1954368
agauuccagggcaucaccc

SEQ ID NO: 1954370 - RNA, 19 nt, Artificial Sequence
  Description of Artificial Sequence: Synthetic oligonucleotide
  Sense strand starting at position 3167 of SEQ ID NO: 1880263
ggugaugcccuggaaucua

SEQ ID NO: 1954371 - RNA, 19 nt, Artificial Sequence
  Description of Artificial Sequence: Synthetic oligonucleotide
  Antisense strand to SEQ ID NO: 1954370
uagauuccagggcaucacc

SEQ ID NO: 1954372 - RNA, 19 nt, Artificial Sequence
  Description of Artificial Sequence: Synthetic oligonucleotide
  Sense strand starting at position 3186 of SEQ ID NO: 1880263
ugcagugccagugcugaau

SEQ ID NO: 1954373 - RNA, 19 nt, Artificial Sequence
  Description of Artificial Sequence: Synthetic oligonucleotide
  Antisense strand to SEQ ID NO: 1954372
auucagcacuggcacugca

SEQ ID NO: 1954374 - RNA, 19 nt, Artificial Sequence
  Description of Artificial Sequence: Synthetic oligonucleotide
  Sense strand starting at position 2 of SEQ ID NO: 1880264
ggugucagcaauuaagaag

SEQ ID NO: 1954375 - RNA, 19 nt, Artificial Sequence
  Description of Artificial Sequence: Synthetic oligonucleotide
  Antisense strand to SEQ ID NO: 1954374
cuucuuaauugcugacacc

SEQ ID NO: 1954376 - RNA, 19 nt, Artificial Sequence
  Description of Artificial Sequence: Synthetic oligonucleotide
  Sense strand starting at position 226 of SEQ ID NO: 1880264
ucauguguuccuccgcuga

SEQ ID NO: 1954377 - RNA, 19 nt, Artificial Sequence
  Description of Artificial Sequence: Synthetic oligonucleotide
  Antisense strand to SEQ ID NO: 1954376
ucagcggaggaacacauga

SEQ ID NO: 1954378 - RNA, 19 nt, Artificial Sequence
  Description of Artificial Sequence: Synthetic oligonucleotide
  Sense strand starting at position 840 of SEQ ID NO: 1880264
gauauuaagcuguaguuau

SEQ ID NO: 1954379 - RNA, 19 nt, Artificial Sequence
  Description of Artificial Sequence: Synthetic oligonucleotide
  Antisense strand to SEQ ID NO: 1954378
auaacuacagcuuaauauc

SEQ ID NO: 1954380 - RNA, 19 nt, Artificial Sequence
  Description of Artificial Sequence: Synthetic oligonucleotide
  Sense strand starting at position 862 of SEQ ID NO: 1880264
ugauguugccauugaggga

SEQ ID NO: 1954381 - RNA, 19 nt, Artificial Sequence
  Description of Artificial Sequence: Synthetic oligonucleotide
  Antisense strand to SEQ ID NO: 1954380
ucccucaauggcaacauca

SEQ ID NO: 1954382 - RNA, 19 nt, Artificial Sequence
  Description of Artificial Sequence: Synthetic oligonucleotide
  Sense strand starting at position 863 of SEQ ID NO: 1880264
gauguugccauugagggaa

SEQ ID NO: 1954383 - RNA, 19 nt, Artificial Sequence
  Description of Artificial Sequence: Synthetic oligonucleotide
  Antisense strand to SEQ ID NO: 1954382
uucccucaauggcaacauc

SEQ ID NO: 1954384 - RNA, 19 nt, Artificial Sequence
  Description of Artificial Sequence: Synthetic oligonucleotide
  Sense strand starting at position 898 of SEQ ID NO: 1880264
acgggaucacucuguauua

SEQ ID NO: 1954385 - RNA, 19 nt, Artificial Sequence
  Description of Artificial Sequence: Synthetic oligonucleotide
  Antisense strand to SEQ ID NO: 1954384
uaauacagagugaucccgu

SEQ ID NO: 1954386 - RNA, 19 nt, Artificial Sequence
  Description of Artificial Sequence: Synthetic oligonucleotide
  Sense strand starting at position 899 of SEQ ID NO: 1880264
cgggaucacucuguauuau

SEQ ID NO: 1954387 - RNA, 19 nt, Artificial Sequence
  Description of Artificial Sequence: Synthetic oligonucleotide
  Antisense strand to SEQ ID NO: 1954386
auaauacagagugaucccg

SEQ ID NO: 1954388 - RNA, 19 nt, Artificial Sequence
  Description of Artificial Sequence: Synthetic oligonucleotide
  Sense strand starting at position 926 of SEQ ID NO: 1880264
acuguaugugaauguacaa

SEQ ID NO: 1954389 - RNA, 19 nt, Artificial Sequence
  Description of Artificial Sequence: Synthetic oligonucleotide
  Antisense strand to SEQ ID NO: 1954388
uuguacauucacauacagu

SEQ ID NO: 1954390 - RNA, 19 nt, Artificial Sequence
  Description of Artificial Sequence: Synthetic oligonucleotide
  Sense strand starting at position 1050 of SEQ ID NO: 1880264
uggauauuauuguuaaccu

SEQ ID NO: 1954391 - RNA, 19 nt, Artificial Sequence
  Description of Artificial Sequence: Synthetic oligonucleotide
  Antisense strand to SEQ ID NO: 1954390
agguuaacaauaauaucca

SEQ ID NO: 1954392 - RNA, 19 nt, Artificial Sequence
  Description of Artificial Sequence: Synthetic oligonucleotide
  Sense strand starting at position 1119 of SEQ ID NO: 1880264
agagucacucagcgacuaa

SEQ ID NO: 1954393 - RNA, 19 nt, Artificial Sequence
  Description of Artificial Sequence: Synthetic oligonucleotide
  Antisense strand to SEQ ID NO: 1954392
uuagucgcugagugacucu

SEQ ID NO: 1954394 - RNA, 19 nt, Artificial Sequence
  Description of Artificial Sequence: Synthetic oligonucleotide
  Sense strand starting at position 1491 of SEQ ID NO: 1880264
uuuagaauuagaggucuga

SEQ ID NO: 1954395 - RNA, 19 nt, Artificial Sequence
  Description of Artificial Sequence: Synthetic oligonucleotide
  Antisense strand to SEQ ID NO: 1954394
ucagaccucuaauucuaaa

SEQ ID NO: 1954396 - RNA, 19 nt, Artificial Sequence
  Description of Artificial Sequence: Synthetic oligonucleotide
  Sense strand starting at position 1601 of SEQ ID NO: 1880264
ggcuaaucggguuauacag

SEQ ID NO: 1954397 - RNA, 19 nt, Artificial Sequence
  Description of Artificial Sequence: Synthetic oligonucleotide
  Antisense strand to SEQ ID NO: 1954396
cuguauaacccgauuagcc

SEQ ID NO: 1954398 - RNA, 19 nt, Artificial Sequence
  Description of Artificial Sequence: Synthetic oligonucleotide
  Sense strand starting at position 1609 of SEQ ID NO: 1880264
ggguuauacagcuaguuug

SEQ ID NO: 1954399 - RNA, 19 nt, Artificial Sequence
  Description of Artificial Sequence: Synthetic oligonucleotide
  Antisense strand to SEQ ID NO: 1954398
caaacuagcuguauaaccc

SEQ ID NO: 1954400 - RNA, 19 nt, Artificial Sequence
  Description of Artificial Sequence: Synthetic oligonucleotide
  Sense strand starting at position 1715 of SEQ ID NO: 1880264
ugcaauugucaugaauaug

SEQ ID NO: 1954401 - RNA, 19 nt, Artificial Sequence
  Description of Artificial Sequence: Synthetic oligonucleotide
  Antisense strand to SEQ ID NO: 1954400
cauauucaugacaauugca

SEQ ID NO: 1954402 - RNA, 19 nt, Artificial Sequence
  Description of Artificial Sequence: Synthetic oligonucleotide
  Sense strand starting at position 1887 of SEQ ID NO: 1880264
ccaggaagaucucugcaga

SEQ ID NO: 1954403 - RNA, 19 nt, Artificial Sequence
  Description of Artificial Sequence: Synthetic oligonucleotide
  Antisense strand to SEQ ID NO: 1954402
ucugcagagaucuuccugg

SEQ ID NO: 1954404 - RNA, 19 nt, Artificial Sequence
  Description of Artificial Sequence: Synthetic oligonucleotide
  Sense strand starting at position 1888 of SEQ ID NO: 1880264
caggaagaucucugcagaa

SEQ ID NO: 1954405 - RNA, 19 nt, Artificial Sequence
  Description of Artificial Sequence: Synthetic oligonucleotide
  Antisense strand to SEQ ID NO: 1954404
uucugcagagaucuuccug

SEQ ID NO: 1954406 - RNA, 19 nt, Artificial Sequence
  Description of Artificial Sequence: Synthetic oligonucleotide
  Sense strand starting at position 1901 of SEQ ID NO: 1880264
gcagaauauuaaguaaguu

SEQ ID NO: 1954407 - RNA, 19 nt, Artificial Sequence
  Description of Artificial Sequence: Synthetic oligonucleotide
  Antisense strand to SEQ ID NO: 1954406
aacuuacuuaauauucugc

SEQ ID NO: 1954408 - RNA, 19 nt, Artificial Sequence
  Description of Artificial Sequence: Synthetic oligonucleotide
  Sense strand starting at position 1962 of SEQ ID NO: 1880264
cucagcuucguggagacau

SEQ ID NO: 1954409 - RNA, 19 nt, Artificial Sequence
  Description of Artificial Sequence: Synthetic oligonucleotide
  Antisense strand to SEQ ID NO: 1954408
augucuccacgaagcugag

SEQ ID NO: 1954410 - RNA, 19 nt, Artificial Sequence
  Description of Artificial Sequence: Synthetic oligonucleotide
  Sense strand starting at position 2053 of SEQ ID NO: 1880264
uccacauauccaugguuau

SEQ ID NO: 1954411 - RNA, 19 nt, Artificial Sequence
  Description of Artificial Sequence: Synthetic oligonucleotide
  Antisense strand to SEQ ID NO: 1954410
auaaccauggauaugugga

SEQ ID NO: 1954412 - RNA, 19 nt, Artificial Sequence
  Description of Artificial Sequence: Synthetic oligonucleotide
  Sense strand starting at position 2054 of SEQ ID NO: 1880264
ccacauauccaugguuauu

SEQ ID NO: 1954413 - RNA, 19 nt, Artificial Sequence
  Description of Artificial Sequence: Synthetic oligonucleotide
  Antisense strand to SEQ ID NO: 1954412
aauaaccauggauaugugg

SEQ ID NO: 1954414 - RNA, 19 nt, Artificial Sequence
  Description of Artificial Sequence: Synthetic oligonucleotide
  Sense strand starting at position 2056 of SEQ ID NO: 1880264
acauauccaugguuauuau

SEQ ID NO: 1954415 - RNA, 19 nt, Artificial Sequence
  Description of Artificial Sequence: Synthetic oligonucleotide
  Antisense strand to SEQ ID NO: 1954414
auaauaaccauggauaugu

SEQ ID NO: 1954416 - RNA, 19 nt, Artificial Sequence
  Description of Artificial Sequence: Synthetic oligonucleotide
  Sense strand starting at position 2252 of SEQ ID NO: 1880264
ucugauagcuauuuguuua

SEQ ID NO: 1954417 - RNA, 19 nt, Artificial Sequence
  Description of Artificial Sequence: Synthetic oligonucleotide
  Antisense strand to SEQ ID NO: 1954416
uaaacaaauagcuaucaga

SEQ ID NO: 1954418 - RNA, 19 nt, Artificial Sequence
  Description of Artificial Sequence: Synthetic oligonucleotide
  Sense strand starting at position 2307 of SEQ ID NO: 1880264
augucacugcccugaauga

SEQ ID NO: 1954419 - RNA, 19 nt, Artificial Sequence
  Description of Artificial Sequence: Synthetic oligonucleotide
  Antisense strand to SEQ ID NO: 1954418
ucauucagggcagugacau

SEQ ID NO: 1954420 - RNA, 19 nt, Artificial Sequence
  Description of Artificial Sequence: Synthetic oligonucleotide
  Sense strand starting at position 2308 of SEQ ID NO: 1880264
ugucacugcccugaaugaa

SEQ ID NO: 1954421 - RNA, 19 nt, Artificial Sequence
  Description of Artificial Sequence: Synthetic oligonucleotide
  Antisense strand to SEQ ID NO: 1954420
uucauucagggcagugaca

SEQ ID NO: 1954422 - RNA, 19 nt, Artificial Sequence
  Description of Artificial Sequence: Synthetic oligonucleotide
  Sense strand starting at position 2476 of SEQ ID NO: 1880264
gauuccuuguuaguagaac

SEQ ID NO: 1954423 - RNA, 19 nt, Artificial Sequence
  Description of Artificial Sequence: Synthetic oligonucleotide
  Antisense strand to SEQ ID NO: 1954422
guucuacuaacaaggaauc

SEQ ID NO: 1954424 - RNA, 19 nt, Artificial Sequence
  Description of Artificial Sequence: Synthetic oligonucleotide
  Sense strand starting at position 2640 of SEQ ID NO: 1880264
ugaugaagggcuuguaauc

SEQ ID NO: 1954425 - RNA, 19 nt, Artificial Sequence
  Description of Artificial Sequence: Synthetic oligonucleotide
  Antisense strand to SEQ ID NO: 1954424
gauuacaagcccuucauca

SEQ ID NO: 1954426 - RNA, 19 nt, Artificial Sequence
  Description of Artificial Sequence: Synthetic oligonucleotide
  Sense strand starting at position 2678 of SEQ ID NO: 1880264
augcauaggccuuaaauuc

SEQ ID NO: 1954427 - RNA, 19 nt, Artificial Sequence
  Description of Artificial Sequence: Synthetic oligonucleotide
  Antisense strand to SEQ ID NO: 1954426
gaauuuaaggccuaugcau

SEQ ID NO: 1954428 - RNA, 19 nt, Artificial Sequence
  Description of Artificial Sequence: Synthetic oligonucleotide
  Sense strand starting at position 2692 of SEQ ID NO: 1880264
aauucuaggucaucagguu

SEQ ID NO: 1954429 - RNA, 19 nt, Artificial Sequence
  Description of Artificial Sequence: Synthetic oligonucleotide
  Antisense strand to SEQ ID NO: 1954428
aaccugaugaccuagaauu

SEQ ID NO: 1954430 - RNA, 19 nt, Artificial Sequence
  Description of Artificial Sequence: Synthetic oligonucleotide
  Sense strand starting at position 2830 of SEQ ID NO: 1880264
agacaagucuggucaagau

SEQ ID NO: 1954431 - RNA, 19 nt, Artificial Sequence
  Description of Artificial Sequence: Synthetic oligonucleotide
  Antisense strand to SEQ ID NO: 1954430
aucuugaccagacuugucu

SEQ ID NO: 1954432 - RNA, 19 nt, Artificial Sequence
  Description of Artificial Sequence: Synthetic oligonucleotide
  Sense strand starting at position 3072 of SEQ ID NO: 1880264
uuucuugcugauuagacuu

SEQ ID NO: 1954433 - RNA, 19 nt, Artificial Sequence
  Description of Artificial Sequence: Synthetic oligonucleotide
  Antisense strand to SEQ ID NO: 1954432
aagucuaaucagcaagaaa

SEQ ID NO: 1954434 - RNA, 19 nt, Artificial Sequence
  Description of Artificial Sequence: Synthetic oligonucleotide
  Sense strand starting at position 3505 of SEQ ID NO: 1880264
gguauuguggaguagacuu

SEQ ID NO: 1954435 - RNA, 19 nt, Artificial Sequence
  Description of Artificial Sequence: Synthetic oligonucleotide
  Antisense strand to SEQ ID NO: 1954434
aagucuacuccacaauacc

SEQ ID NO: 1954436 - RNA, 19 nt, Artificial Sequence
  Description of Artificial Sequence: Synthetic oligonucleotide
  Sense strand starting at position 3663 of SEQ ID NO: 1880264
ggguaauacuuacuacuua

SEQ ID NO: 1954437 - RNA, 19 nt, Artificial Sequence
  Description of Artificial Sequence: Synthetic oligonucleotide
  Antisense strand to SEQ ID NO: 1954436
uaaguaguaaguauuaccc

SEQ ID NO: 1954438 - RNA, 19 nt, Artificial Sequence
  Description of Artificial Sequence: Synthetic oligonucleotide
  Sense strand starting at position 3736 of SEQ ID NO: 1880264
uucuuuaggugucugaaca

SEQ ID NO: 1954439 - RNA, 19 nt, Artificial Sequence
  Description of Artificial Sequence: Synthetic oligonucleotide
  Antisense strand to SEQ ID NO: 1954438
uguucagacaccuaaagaa

SEQ ID NO: 1954440 - RNA, 19 nt, Artificial Sequence
  Description of Artificial Sequence: Synthetic oligonucleotide
  Sense strand starting at position 3784 of SEQ ID NO: 1880264
uggucagacuaccucgauu

SEQ ID NO: 1954441 - RNA, 19 nt, Artificial Sequence
  Description of Artificial Sequence: Synthetic oligonucleotide
  Antisense strand to SEQ ID NO: 1954440
aaucgagguagucugacca

SEQ ID NO: 1954442 - RNA, 19 nt, Artificial Sequence
  Description of Artificial Sequence: Synthetic oligonucleotide
  Sense strand starting at position 3786 of SEQ ID NO: 1880264
gucagacuaccucgauuac

SEQ ID NO: 1954443 - RNA, 19 nt, Artificial Sequence
  Description of Artificial Sequence: Synthetic oligonucleotide
  Antisense strand to SEQ ID NO: 1954442
guaaucgagguagucugac

SEQ ID NO: 1954444 - RNA, 19 nt, Artificial Sequence
  Description of Artificial Sequence: Synthetic oligonucleotide
  Sense strand starting at position 3812 of SEQ ID NO: 1880264
acaucaguggaagguaaau

SEQ ID NO: 1954445 - RNA, 19 nt, Artificial Sequence
  Description of Artificial Sequence: Synthetic oligonucleotide
  Antisense strand to SEQ ID NO: 1954444
auuuaccuuccacugaugu

SEQ ID NO: 1954446 - RNA, 19 nt, Artificial Sequence
  Description of Artificial Sequence: Synthetic oligonucleotide
  Sense strand starting at position 3824 of SEQ ID NO: 1880264
gguaaaugccaguaaucug

SEQ ID NO: 1954447 - RNA, 19 nt, Artificial Sequence
  Description of Artificial Sequence: Synthetic oligonucleotide
  Antisense strand to SEQ ID NO: 1954446
cagauuacuggcauuuacc

SEQ ID NO: 1954448 - RNA, 19 nt, Artificial Sequence
  Description of Artificial Sequence: Synthetic oligonucleotide
  Sense strand starting at position 3888 of SEQ ID NO: 1880264
ugggaauccugaguuuacu

SEQ ID NO: 1954449 - RNA, 19 nt, Artificial Sequence
  Description of Artificial Sequence: Synthetic oligonucleotide
  Antisense strand to SEQ ID NO: 1954448
aguaaacucaggauuccca

SEQ ID NO: 1954450 - RNA, 19 nt, Artificial Sequence
  Description of Artificial Sequence: Synthetic oligonucleotide
  Sense strand starting at position 3926 of SEQ ID NO: 1880264
ucacuaaugguuggaacau

SEQ ID NO: 1954451 - RNA, 19 nt, Artificial Sequence
  Description of Artificial Sequence: Synthetic oligonucleotide
  Antisense strand to SEQ ID NO: 1954450
auguuccaaccauuaguga

SEQ ID NO: 1954452 - RNA, 19 nt, Artificial Sequence
  Description of Artificial Sequence: Synthetic oligonucleotide
  Sense strand starting at position 3935 of SEQ ID NO: 1880264
guuggaacaucaucuuuaa

SEQ ID NO: 1954453 - RNA, 19 nt, Artificial Sequence
  Description of Artificial Sequence: Synthetic oligonucleotide
  Antisense strand to SEQ ID NO: 1954452
uuaaagaugauguuccaac

SEQ ID NO: 1954454 - RNA, 19 nt, Artificial Sequence
  Description of Artificial Sequence: Synthetic oligonucleotide
  Sense strand starting at position 93 of SEQ ID NO: 1880266
aguaaauguuagguaaggu

SEQ ID NO: 1954455 - RNA, 19 nt, Artificial Sequence
  Description of Artificial Sequence: Synthetic oligonucleotide
  Antisense strand to SEQ ID NO: 1954454
accuuaccuaacauuuacu

SEQ ID NO: 1954456 - RNA, 19 nt, Artificial Sequence
  Description of Artificial Sequence: Synthetic oligonucleotide
  Sense strand starting at position 516 of SEQ ID NO: 1880266
cauaguuuguagguauaua

SEQ ID NO: 1954457 - RNA, 19 nt, Artificial Sequence
  Description of Artificial Sequence: Synthetic oligonucleotide
  Antisense strand to SEQ ID NO: 1954456
uauauaccuacaaacuaug

SEQ ID NO: 1954458 - RNA, 19 nt, Artificial Sequence
  Description of Artificial Sequence: Synthetic oligonucleotide
  Sense strand starting at position 831 of SEQ ID NO: 1880266
gcaggaacuguguaagcau

SEQ ID NO: 1954459 - RNA, 19 nt, Artificial Sequence
  Description of Artificial Sequence: Synthetic oligonucleotide
  Antisense strand to SEQ ID NO: 1954458
augcuuacacaguuccugc

SEQ ID NO: 1954460 - RNA, 19 nt, Artificial Sequence
  Description of Artificial Sequence: Synthetic oligonucleotide
  Sense strand starting at position 851 of SEQ ID NO: 1880266
uucuguaaucacuguacua

SEQ ID NO: 1954461 - RNA, 19 nt, Artificial Sequence
  Description of Artificial Sequence: Synthetic oligonucleotide
  Antisense strand to SEQ ID NO: 1954460
uaguacagugauuacagaa

SEQ ID NO: 1954462 - RNA, 19 nt, Artificial Sequence
  Description of Artificial Sequence: Synthetic oligonucleotide
  Sense strand starting at position 853 of SEQ ID NO: 1880266
cuguaaucacuguacuaaa

SEQ ID NO: 1954463 - RNA, 19 nt, Artificial Sequence
  Description of Artificial Sequence: Synthetic oligonucleotide
  Antisense strand to SEQ ID NO: 1954462
uuuaguacagugauuacag

SEQ ID NO: 1954464 - RNA, 19 nt, Artificial Sequence
  Description of Artificial Sequence: Synthetic oligonucleotide
  Sense strand starting at position 873 of SEQ ID NO: 1880266
uuaugauacucguuaccaa

SEQ ID NO: 1954465 - RNA, 19 nt, Artificial Sequence
  Description of Artificial Sequence: Synthetic oligonucleotide
  Antisense strand to SEQ ID NO: 1954464
uugguaacgaguaucauaa

SEQ ID NO: 1954466 - RNA, 19 nt, Artificial Sequence
  Description of Artificial Sequence: Synthetic oligonucleotide
  Sense strand starting at position 886 of SEQ ID NO: 1880266
uaccaaucugaaggguuau

SEQ ID NO: 1954467 - RNA, 19 nt, Artificial Sequence
  Description of Artificial Sequence: Synthetic oligonucleotide
  Antisense strand to SEQ ID NO: 1954466
auaacccuucagauuggua

SEQ ID NO: 1954468 - RNA, 19 nt, Artificial Sequence
  Description of Artificial Sequence: Synthetic oligonucleotide
  Sense strand starting at position 974 of SEQ ID NO: 1880266
ccaccaagauguuugaaau

SEQ ID NO: 1954469 - RNA, 19 nt, Artificial Sequence
  Description of Artificial Sequence: Synthetic oligonucleotide
  Antisense strand to SEQ ID NO: 1954468
auuucaaacaucuuggugg

SEQ ID NO: 1954470 - RNA, 19 nt, Artificial Sequence
  Description of Artificial Sequence: Synthetic oligonucleotide
  Sense strand starting at position 1002 of SEQ ID NO: 1880266
caaugugugaggcaguaua

SEQ ID NO: 1954471 - RNA, 19 nt, Artificial Sequence
  Description of Artificial Sequence: Synthetic oligonucleotide
  Antisense strand to SEQ ID NO: 1954470
uauacugccucacacauug

SEQ ID NO: 1954472 - RNA, 19 nt, Artificial Sequence
  Description of Artificial Sequence: Synthetic oligonucleotide
  Sense strand starting at position 1209 of SEQ ID NO: 1880266
aguauaaaguaucugcaaa

SEQ ID NO: 1954473 - RNA, 19 nt, Artificial Sequence
  Description of Artificial Sequence: Synthetic oligonucleotide
  Antisense strand to SEQ ID NO: 1954472
uuugcagauacuuuauacu

SEQ ID NO: 1954474 - RNA, 19 nt, Artificial Sequence
  Description of Artificial Sequence: Synthetic oligonucleotide
  Sense strand starting at position 1385 of SEQ ID NO: 1880266
aaccuuauuugguugugua

SEQ ID NO: 1954475 - RNA, 19 nt, Artificial Sequence
  Description of Artificial Sequence: Synthetic oligonucleotide
  Antisense strand to SEQ ID NO: 1954474
uacacaaccaaauaagguu

SEQ ID NO: 1954476 - RNA, 19 nt, Artificial Sequence
  Description of Artificial Sequence: Synthetic oligonucleotide
  Sense strand starting at position 1386 of SEQ ID NO: 1880266
accuuauuugguuguguau

SEQ ID NO: 1954477 - RNA, 19 nt, Artificial Sequence
  Description of Artificial Sequence: Synthetic oligonucleotide
  Antisense strand to SEQ ID NO: 1954476
auacacaaccaaauaaggu

SEQ ID NO: 1954478 - RNA, 19 nt, Artificial Sequence
  Description of Artificial Sequence: Synthetic oligonucleotide
  Sense strand starting at position 1389 of SEQ ID NO: 1880266
uuauuugguuguguaugua

SEQ ID NO: 1954479 - RNA, 19 nt, Artificial Sequence
  Description of Artificial Sequence: Synthetic oligonucleotide
  Antisense strand to SEQ ID NO: 1954478
uacauacacaaccaaauaa

SEQ ID NO: 1954480 - RNA, 19 nt, Artificial Sequence
  Description of Artificial Sequence: Synthetic oligonucleotide
  Sense strand starting at position 1399 of SEQ ID NO: 1880266
guguauguaccaggaauga

SEQ ID NO: 1954481 - RNA, 19 nt, Artificial Sequence
  Description of Artificial Sequence: Synthetic oligonucleotide
  Antisense strand to SEQ ID NO: 1954480
ucauuccugguacauacac

SEQ ID NO: 1954482 - RNA, 19 nt, Artificial Sequence
  Description of Artificial Sequence: Synthetic oligonucleotide
  Sense strand starting at position 1418 of SEQ ID NO: 1880266
aucucaacucacuguguga

SEQ ID NO: 1954483 - RNA, 19 nt, Artificial Sequence
  Description of Artificial Sequence: Synthetic oligonucleotide
  Antisense strand to SEQ ID NO: 1954482
ucacacagugaguugagau

SEQ ID NO: 1954484 - RNA, 19 nt, Artificial Sequence
  Description of Artificial Sequence: Synthetic oligonucleotide
  Sense strand starting at position 1420 of SEQ ID NO: 1880266
cucaacucacugugugaau

SEQ ID NO: 1954485 - RNA, 19 nt, Artificial Sequence
  Description of Artificial Sequence: Synthetic oligonucleotide
  Antisense strand to SEQ ID NO: 1954484
auucacacagugaguugag

SEQ ID NO: 1954486 - RNA, 19 nt, Artificial Sequence
  Description of Artificial Sequence: Synthetic oligonucleotide
  Sense strand starting at position 1429 of SEQ ID NO: 1880266
cugugugaauguuuagaga

SEQ ID NO: 1954487 - RNA, 19 nt, Artificial Sequence
  Description of Artificial Sequence: Synthetic oligonucleotide
  Antisense strand to SEQ ID NO: 1954486
ucucuaaacauucacacag

SEQ ID NO: 1954488 - RNA, 19 nt, Artificial Sequence
  Description of Artificial Sequence: Synthetic oligonucleotide
  Sense strand starting at position 1456 of SEQ ID NO: 1880266
agccuagagauguaacgau

SEQ ID NO: 1954489 - RNA, 19 nt, Artificial Sequence
  Description of Artificial Sequence: Synthetic oligonucleotide
  Antisense strand to SEQ ID NO: 1954488
aucguuacaucucuaggcu

SEQ ID NO: 1954490 - RNA, 19 nt, Artificial Sequence
  Description of Artificial Sequence: Synthetic oligonucleotide
  Sense strand starting at position 1484 of SEQ ID NO: 1880266
gaggcugagguuugaaaga

SEQ ID NO: 1954491 - RNA, 19 nt, Artificial Sequence
  Description of Artificial Sequence: Synthetic oligonucleotide
  Antisense strand to SEQ ID NO: 1954490
ucuuucaaaccucagccuc

SEQ ID NO: 1954492 - RNA, 19 nt, Artificial Sequence
  Description of Artificial Sequence: Synthetic oligonucleotide
  Sense strand starting at position 2374 of SEQ ID NO: 1880266
aguacaugaugagucaauu

SEQ ID NO: 1954493 - RNA, 19 nt, Artificial Sequence
  Description of Artificial Sequence: Synthetic oligonucleotide
  Antisense strand to SEQ ID NO: 1954492
aauugacucaucauguacu

SEQ ID NO: 1954494 - RNA, 19 nt, Artificial Sequence
  Description of Artificial Sequence: Synthetic oligonucleotide
  Sense strand starting at position 2391 of SEQ ID NO: 1880266
uuacauucugaaugaguga

SEQ ID NO: 1954495 - RNA, 19 nt, Artificial Sequence
  Description of Artificial Sequence: Synthetic oligonucleotide
  Antisense strand to SEQ ID NO: 1954494
ucacucauucagaauguaa

SEQ ID NO: 1954496 - RNA, 19 nt, Artificial Sequence
  Description of Artificial Sequence: Synthetic oligonucleotide
  Sense strand starting at position 2398 of SEQ ID NO: 1880266
cugaaugagugaucgaaag

SEQ ID NO: 1954497 - RNA, 19 nt, Artificial Sequence
  Description of Artificial Sequence: Synthetic oligonucleotide
  Antisense strand to SEQ ID NO: 1954496
cuuucgaucacucauucag

SEQ ID NO: 1954498 - RNA, 19 nt, Artificial Sequence
  Description of Artificial Sequence: Synthetic oligonucleotide
  Sense strand starting at position 2448 of SEQ ID NO: 1880266
aagugagcgcuuggaaaga

SEQ ID NO: 1954499 - RNA, 19 nt, Artificial Sequence
  Description of Artificial Sequence: Synthetic oligonucleotide
  Antisense strand to SEQ ID NO: 1954498
ucuuuccaagcgcucacuu

SEQ ID NO: 1954500 - RNA, 19 nt, Artificial Sequence
  Description of Artificial Sequence: Synthetic oligonucleotide
  Sense strand starting at position 2519 of SEQ ID NO: 1880266
augaucaggcuuuguacau

SEQ ID NO: 1954501 - RNA, 19 nt, Artificial Sequence
  Description of Artificial Sequence: Synthetic oligonucleotide
  Antisense strand to SEQ ID NO: 1954500
auguacaaagccugaucau

SEQ ID NO: 1954502 - RNA, 19 nt, Artificial Sequence
  Description of Artificial Sequence: Synthetic oligonucleotide
  Sense strand starting at position 2642 of SEQ ID NO: 1880266
gaguauguaccaggaauga

SEQ ID NO: 1954503 - RNA, 19 nt, Artificial Sequence
  Description of Artificial Sequence: Synthetic oligonucleotide
  Antisense strand to SEQ ID NO: 1954502
ucauuccugguacauacuc

SEQ ID NO: 1954504 - RNA, 19 nt, Artificial Sequence
  Description of Artificial Sequence: Synthetic oligonucleotide
  Sense strand starting at position 2778 of SEQ ID NO: 1880266
gcagauauaaccugaguga

SEQ ID NO: 1954505 - RNA, 19 nt, Artificial Sequence
  Description of Artificial Sequence: Synthetic oligonucleotide
  Antisense strand to SEQ ID NO: 1954504
ucacucagguuauaucugc

SEQ ID NO: 1954506 - RNA, 19 nt, Artificial Sequence
  Description of Artificial Sequence: Synthetic oligonucleotide
  Sense strand starting at position 2781 of SEQ ID NO: 1880266
gauauaaccugagugagcu

SEQ ID NO: 1954507 - RNA, 19 nt, Artificial Sequence
  Description of Artificial Sequence: Synthetic oligonucleotide
  Antisense strand to SEQ ID NO: 1954506
agcucacucagguuauauc

SEQ ID NO: 1954508 - RNA, 19 nt, Artificial Sequence
  Description of Artificial Sequence: Synthetic oligonucleotide
  Sense strand starting at position 2782 of SEQ ID NO: 1880266
auauaaccugagugagcuu

SEQ ID NO: 1954509 - RNA, 19 nt, Artificial Sequence
  Description of Artificial Sequence: Synthetic oligonucleotide
  Antisense strand to SEQ ID NO: 1954508
aagcucacucagguuauau

SEQ ID NO: 1954510 - RNA, 19 nt, Artificial Sequence
  Description of Artificial Sequence: Synthetic oligonucleotide
  Sense strand starting at position 2902 of SEQ ID NO: 1880266
aggugcaucccagaagugu

SEQ ID NO: 1954511 - RNA, 19 nt, Artificial Sequence
  Description of Artificial Sequence: Synthetic oligonucleotide
  Antisense strand to SEQ ID NO: 1954510
acacuucugggaugcaccu

SEQ ID NO: 1954512 - RNA, 19 nt, Artificial Sequence
  Description of Artificial Sequence: Synthetic oligonucleotide
  Sense strand starting at position 3081 of SEQ ID NO: 1880266
cgcauuugacaaugcaucu

SEQ ID NO: 1954513 - RNA, 19 nt, Artificial Sequence
  Description of Artificial Sequence: Synthetic oligonucleotide
  Antisense strand to SEQ ID NO: 1954512
agaugcauugucaaaugcg

SEQ ID NO: 1954514 - RNA, 19 nt, Artificial Sequence
  Description of Artificial Sequence: Synthetic oligonucleotide
  Sense strand starting at position 3347 of SEQ ID NO: 1880266
ugauaacacuuagaauaga

SEQ ID NO: 1954515 - RNA, 19 nt, Artificial Sequence
  Description of Artificial Sequence: Synthetic oligonucleotide
  Antisense strand to SEQ ID NO: 1954514
ucuauucuaaguguuauca

SEQ ID NO: 1954516 - RNA, 19 nt, Artificial Sequence
  Description of Artificial Sequence: Synthetic oligonucleotide
  Sense strand starting at position 3393 of SEQ ID NO: 1880266
ucugcaguugauugggaua

SEQ ID NO: 1954517 - RNA, 19 nt, Artificial Sequence
  Description of Artificial Sequence: Synthetic oligonucleotide
  Antisense strand to SEQ ID NO: 1954516
uaucccaaucaacugcaga

SEQ ID NO: 1954518 - RNA, 19 nt, Artificial Sequence
  Description of Artificial Sequence: Synthetic oligonucleotide
  Sense strand starting at position 3398 of SEQ ID NO: 1880266
aguugauugggauaacgug

SEQ ID NO: 1954519 - RNA, 19 nt, Artificial Sequence
  Description of Artificial Sequence: Synthetic oligonucleotide
  Antisense strand to SEQ ID NO: 1954518
cacguuaucccaaucaacu

SEQ ID NO: 1954520 - RNA, 19 nt, Artificial Sequence
  Description of Artificial Sequence: Synthetic oligonucleotide
  Sense strand starting at position 3425 of SEQ ID NO: 1880266
agauaaggugcugaguuau

SEQ ID NO: 1954521 - RNA, 19 nt, Artificial Sequence
  Description of Artificial Sequence: Synthetic oligonucleotide
  Antisense strand to SEQ ID NO: 1954520
auaacucagcaccuuaucu

SEQ ID NO: 1954522 - RNA, 19 nt, Artificial Sequence
  Description of Artificial Sequence: Synthetic oligonucleotide
  Sense strand starting at position 3511 of SEQ ID NO: 1880266
uguucuuaacuccauugga

SEQ ID NO: 1954523 - RNA, 19 nt, Artificial Sequence
  Description of Artificial Sequence: Synthetic oligonucleotide
  Antisense strand to SEQ ID NO: 1954522
uccaauggaguuaagaaca

SEQ ID NO: 1954524 - RNA, 19 nt, Artificial Sequence
  Description of Artificial Sequence: Synthetic oligonucleotide
  Sense strand starting at position 3631 of SEQ ID NO: 1880266
cuucuauagccuugagaaa

SEQ ID NO: 1954525 - RNA, 19 nt, Artificial Sequence
  Description of Artificial Sequence: Synthetic oligonucleotide
  Antisense strand to SEQ ID NO: 1954524
uuucucaaggcuauagaag

SEQ ID NO: 1954526 - RNA, 19 nt, Artificial Sequence
  Description of Artificial Sequence: Synthetic oligonucleotide
  Sense strand starting at position 3727 of SEQ ID NO: 1880266
guaggucuccuccaucaaa

SEQ ID NO: 1954527 - RNA, 19 nt, Artificial Sequence
  Description of Artificial Sequence: Synthetic oligonucleotide
  Antisense strand to SEQ ID NO: 1954526
uuugauggaggagaccuac

SEQ ID NO: 1954528 - RNA, 19 nt, Artificial Sequence
  Description of Artificial Sequence: Synthetic oligonucleotide
  Sense strand starting at position 3790 of SEQ ID NO: 1880266
ugaggauauuuggguagga

SEQ ID NO: 1954529 - RNA, 19 nt, Artificial Sequence
  Description of Artificial Sequence: Synthetic oligonucleotide
  Antisense strand to SEQ ID NO: 1954528
uccuacccaaauauccuca

SEQ ID NO: 1954530 - RNA, 19 nt, Artificial Sequence
  Description of Artificial Sequence: Synthetic oligonucleotide
  Sense strand starting at position 3866 of SEQ ID NO: 1880266
gguggcuguggcagaagua

SEQ ID NO: 1954531 - RNA, 19 nt, Artificial Sequence
  Description of Artificial Sequence: Synthetic oligonucleotide
  Antisense strand to SEQ ID NO: 1954530
uacuucugccacagccacc

SEQ ID NO: 1954532 - RNA, 19 nt, Artificial Sequence
  Description of Artificial Sequence: Synthetic oligonucleotide
  Sense strand starting at position 3951 of SEQ ID NO: 1880266
acaacauugcuuuggacua

SEQ ID NO: 1954533 - RNA, 19 nt, Artificial Sequence
  Description of Artificial Sequence: Synthetic oligonucleotide
  Antisense strand to SEQ ID NO: 1954532
uaguccaaagcaauguugu

SEQ ID NO: 1954534 - RNA, 19 nt, Artificial Sequence
  Description of Artificial Sequence: Synthetic oligonucleotide
  Sense strand starting at position 311 of SEQ ID NO: 1880267
gggaauagcugcgcugacu

SEQ ID NO: 1954535 - RNA, 19 nt, Artificial Sequence
  Description of Artificial Sequence: Synthetic oligonucleotide
  Antisense strand to SEQ ID NO: 1954534
agucagcgcagcuauuccc

SEQ ID NO: 1954536 - RNA, 19 nt, Artificial Sequence
  Description of Artificial Sequence: Synthetic oligonucleotide
  Sense strand starting at position 484 of SEQ ID NO: 1880267
gcucguuuccuguggguca

SEQ ID NO: 1954537 - RNA, 19 nt, Artificial Sequence
  Description of Artificial Sequence: Synthetic oligonucleotide
  Antisense strand to SEQ ID NO: 1954536
ugacccacaggaaacgagc

SEQ ID NO: 1954538 - RNA, 19 nt, Artificial Sequence
  Description of Artificial Sequence: Synthetic oligonucleotide
  Sense strand starting at position 577 of SEQ ID NO: 1880267
gaggucucaccaugucuca

SEQ ID NO: 1954539 - RNA, 19 nt, Artificial Sequence
  Description of Artificial Sequence: Synthetic oligonucleotide
  Antisense strand to SEQ ID NO: 1954538
ugagacauggugagaccuc

SEQ ID NO: 1954540 - RNA, 19 nt, Artificial Sequence
  Description of Artificial Sequence: Synthetic oligonucleotide
  Sense strand starting at position 862 of SEQ ID NO: 1880267
cucuguagguucuacaaca

SEQ ID NO: 1954541 - RNA, 19 nt, Artificial Sequence
  Description of Artificial Sequence: Synthetic oligonucleotide
  Antisense strand to SEQ ID NO: 1954540
uguuguagaaccuacagag

SEQ ID NO: 1954542 - RNA, 19 nt, Artificial Sequence
  Description of Artificial Sequence: Synthetic oligonucleotide
  Sense strand starting at position 939 of SEQ ID NO: 1880267
ggguaguagguaggagaau

SEQ ID NO: 1954543 - RNA, 19 nt, Artificial Sequence
  Description of Artificial Sequence: Synthetic oligonucleotide
  Antisense strand to SEQ ID NO: 1954542
auucuccuaccuacuaccc

SEQ ID NO: 1954544 - RNA, 19 nt, Artificial Sequence
  Description of Artificial Sequence: Synthetic oligonucleotide
  Sense strand starting at position 940 of SEQ ID NO: 1880267
gguaguagguaggagaauu

SEQ ID NO: 1954545 - RNA, 19 nt, Artificial Sequence
  Description of Artificial Sequence: Synthetic oligonucleotide
  Antisense strand to SEQ ID NO: 1954544
aauucuccuaccuacuacc

SEQ ID NO: 1954546 - RNA, 19 nt, Artificial Sequence
  Description of Artificial Sequence: Synthetic oligonucleotide
  Sense strand starting at position 948 of SEQ ID NO: 1880267
guaggagaauucuuccuag

SEQ ID NO: 1954547 - RNA, 19 nt, Artificial Sequence
  Description of Artificial Sequence: Synthetic oligonucleotide
  Antisense strand to SEQ ID NO: 1954546
cuaggaagaauucuccuac

SEQ ID NO: 1954548 - RNA, 19 nt, Artificial Sequence
  Description of Artificial Sequence: Synthetic oligonucleotide
  Sense strand starting at position 951 of SEQ ID NO: 1880267
ggagaauucuuccuaguca

SEQ ID NO: 1954549 - RNA, 19 nt, Artificial Sequence
  Description of Artificial Sequence: Synthetic oligonucleotide
  Antisense strand to SEQ ID NO: 1954548
ugacuaggaagaauucucc

SEQ ID NO: 1954550 - RNA, 19 nt, Artificial Sequence
  Description of Artificial Sequence: Synthetic oligonucleotide
  Sense strand starting at position 1070 of SEQ ID NO: 1880267
gagagcggucguucuaugu

SEQ ID NO: 1954551 - RNA, 19 nt, Artificial Sequence
  Description of Artificial Sequence: Synthetic oligonucleotide
  Antisense strand to SEQ ID NO: 1954550
acauagaacgaccgcucuc

SEQ ID NO: 1954552 - RNA, 19 nt, Artificial Sequence
  Description of Artificial Sequence: Synthetic oligonucleotide
  Sense strand starting at position 1079 of SEQ ID NO: 1880267
cguucuaugucgguucaga

SEQ ID NO: 1954553 - RNA, 19 nt, Artificial Sequence
  Description of Artificial Sequence: Synthetic oligonucleotide
  Antisense strand to SEQ ID NO: 1954552
ucugaaccgacauagaacg

SEQ ID NO: 1954554 - RNA, 19 nt, Artificial Sequence
  Description of Artificial Sequence: Synthetic oligonucleotide
  Sense strand starting at position 1145 of SEQ ID NO: 1880267
gcgcaagaaaccgaauagu

SEQ ID NO: 1954555 - RNA, 19 nt, Artificial Sequence
  Description of Artificial Sequence: Synthetic oligonucleotide
  Antisense strand to SEQ ID NO: 1954554
acuauucgguuucuugcgc

SEQ ID NO: 1954556 - RNA, 19 nt, Artificial Sequence
  Description of Artificial Sequence: Synthetic oligonucleotide
  Sense strand starting at position 1273 of SEQ ID NO: 1880267
gugcgcguuguccuaguua

SEQ ID NO: 1954557 - RNA, 19 nt, Artificial Sequence
  Description of Artificial Sequence: Synthetic oligonucleotide
  Antisense strand to SEQ ID NO: 1954556
uaacuaggacaacgcgcac

SEQ ID NO: 1954558 - RNA, 19 nt, Artificial Sequence
  Description of Artificial Sequence: Synthetic oligonucleotide
  Sense strand starting at position 1275 of SEQ ID NO: 1880267
gcgcguuguccuaguuaga

SEQ ID NO: 1954559 - RNA, 19 nt, Artificial Sequence
  Description of Artificial Sequence: Synthetic oligonucleotide
  Antisense strand to SEQ ID NO: 1954558
ucuaacuaggacaacgcgc

SEQ ID NO: 1954560 - RNA, 19 nt, Artificial Sequence
  Description of Artificial Sequence: Synthetic oligonucleotide
  Sense strand starting at position 1276 of SEQ ID NO: 1880267
cgcguuguccuaguuagag

SEQ ID NO: 1954561 - RNA, 19 nt, Artificial Sequence
  Description of Artificial Sequence: Synthetic oligonucleotide
  Antisense strand to SEQ ID NO: 1954560
cucuaacuaggacaacgcg

SEQ ID NO: 1954562 - RNA, 19 nt, Artificial Sequence
  Description of Artificial Sequence: Synthetic oligonucleotide
  Sense strand starting at position 1288 of SEQ ID NO: 1880267
guuagaguccgucagcguu

SEQ ID NO: 1954563 - RNA, 19 nt, Artificial Sequence
  Description of Artificial Sequence: Synthetic oligonucleotide
  Antisense strand to SEQ ID NO: 1954562
aacgcugacggacucuaac

SEQ ID NO: 1954564 - RNA, 19 nt, Artificial Sequence
  Description of Artificial Sequence: Synthetic oligonucleotide
  Sense strand starting at position 1294 of SEQ ID NO: 1880267
guccgucagcguuuccauu

SEQ ID NO: 1954565 - RNA, 19 nt, Artificial Sequence
  Description of Artificial Sequence: Synthetic oligonucleotide
  Antisense strand to SEQ ID NO: 1954564
aauggaaacgcugacggac

SEQ ID NO: 1954566 - RNA, 19 nt, Artificial Sequence
  Description of Artificial Sequence: Synthetic oligonucleotide
  Sense strand starting at position 1414 of SEQ ID NO: 1880267
ucugucugaucccaggaga

SEQ ID NO: 1954567 - RNA, 19 nt, Artificial Sequence
  Description of Artificial Sequence: Synthetic oligonucleotide
  Antisense strand to SEQ ID NO: 1954566
ucuccugggaucagacaga

SEQ ID NO: 1954568 - RNA, 19 nt, Artificial Sequence
  Description of Artificial Sequence: Synthetic oligonucleotide
  Sense strand starting at position 1417 of SEQ ID NO: 1880267
gucugaucccaggagaagu

SEQ ID NO: 1954569 - RNA, 19 nt, Artificial Sequence
  Description of Artificial Sequence: Synthetic oligonucleotide
  Antisense strand to SEQ ID NO: 1954568
acuucuccugggaucagac

SEQ ID NO: 1954570 - RNA, 19 nt, Artificial Sequence
  Description of Artificial Sequence: Synthetic oligonucleotide
  Sense strand starting at position 1565 of SEQ ID NO: 1880267
gugggaaugugaucugcau

SEQ ID NO: 1954571 - RNA, 19 nt, Artificial Sequence
  Description of Artificial Sequence: Synthetic oligonucleotide
  Antisense strand to SEQ ID NO: 1954570
augcagaucacauucccac

SEQ ID NO: 1954572 - RNA, 19 nt, Artificial Sequence
  Description of Artificial Sequence: Synthetic oligonucleotide
  Sense strand starting at position 1569 of SEQ ID NO: 1880267
gaaugugaucugcaugcgu

SEQ ID NO: 1954573 - RNA, 19 nt, Artificial Sequence
  Description of Artificial Sequence: Synthetic oligonucleotide
  Antisense strand to SEQ ID NO: 1954572
acgcaugcagaucacauuc

SEQ ID NO: 1954574 - RNA, 19 nt, Artificial Sequence
  Description of Artificial Sequence: Synthetic oligonucleotide
  Sense strand starting at position 1571 of SEQ ID NO: 1880267
augugaucugcaugcgugu

SEQ ID NO: 1954575 - RNA, 19 nt, Artificial Sequence
  Description of Artificial Sequence: Synthetic oligonucleotide
  Antisense strand to SEQ ID NO: 1954574
acacgcaugcagaucacau

SEQ ID NO: 1954576 - RNA, 19 nt, Artificial Sequence
  Description of Artificial Sequence: Synthetic oligonucleotide
  Sense strand starting at position 1629 of SEQ ID NO: 1880267
ugcaguagucucgagccua

SEQ ID NO: 1954577 - RNA, 19 nt, Artificial Sequence
  Description of Artificial Sequence: Synthetic oligonucleotide
  Antisense strand to SEQ ID NO: 1954576
uaggcucgagacuacugca

SEQ ID NO: 1954578 - RNA, 19 nt, Artificial Sequence
  Description of Artificial Sequence: Synthetic oligonucleotide
  Sense strand starting at position 2409 of SEQ ID NO: 1880267
cgcucauuggccugaauac

SEQ ID NO: 1954579 - RNA, 19 nt, Artificial Sequence
  Description of Artificial Sequence: Synthetic oligonucleotide
  Antisense strand to SEQ ID NO: 1954578
guauucaggccaaugagcg

SEQ ID NO: 1954580 - RNA, 19 nt, Artificial Sequence
  Description of Artificial Sequence: Synthetic oligonucleotide
  Sense strand starting at position 2612 of SEQ ID NO: 1880267
ggaaggguaugagagguua

SEQ ID NO: 1954581 - RNA, 19 nt, Artificial Sequence
  Description of Artificial Sequence: Synthetic oligonucleotide
  Antisense strand to SEQ ID NO: 1954580
uaaccucucauacccuucc

SEQ ID NO: 1954582 - RNA, 19 nt, Artificial Sequence
  Description of Artificial Sequence: Synthetic oligonucleotide
  Sense strand starting at position 3027 of SEQ ID NO: 1880267
gggauagcuugacaugaau

SEQ ID NO: 1954583 - RNA, 19 nt, Artificial Sequence
  Description of Artificial Sequence: Synthetic oligonucleotide
  Antisense strand to SEQ ID NO: 1954582
auucaugucaagcuauccc

SEQ ID NO: 1954584 - RNA, 19 nt, Artificial Sequence
  Description of Artificial Sequence: Synthetic oligonucleotide
  Sense strand starting at position 3036 of SEQ ID NO: 1880267
ugacaugaauucgcugaga

SEQ ID NO: 1954585 - RNA, 19 nt, Artificial Sequence
  Description of Artificial Sequence: Synthetic oligonucleotide
  Antisense strand to SEQ ID NO: 1954584
ucucagcgaauucauguca

SEQ ID NO: 1954586 - RNA, 19 nt, Artificial Sequence
  Description of Artificial Sequence: Synthetic oligonucleotide
  Sense strand starting at position 3038 of SEQ ID NO: 1880267
acaugaauucgcugagaga

SEQ ID NO: 1954587 - RNA, 19 nt, Artificial Sequence
  Description of Artificial Sequence: Synthetic oligonucleotide
  Antisense strand to SEQ ID NO: 1954586
ucucucagcgaauucaugu

SEQ ID NO: 1954588 - RNA, 19 nt, Artificial Sequence
  Description of Artificial Sequence: Synthetic oligonucleotide
  Sense strand starting at position 3039 of SEQ ID NO: 1880267
caugaauucgcugagagac

SEQ ID NO: 1954589 - RNA, 19 nt, Artificial Sequence
  Description of Artificial Sequence: Synthetic oligonucleotide
  Antisense strand to SEQ ID NO: 1954588
gucucucagcgaauucaug

SEQ ID NO: 1954590 - RNA, 19 nt, Artificial Sequence
  Description of Artificial Sequence: Synthetic oligonucleotide
  Sense strand starting at position 3092 of SEQ ID NO: 1880267
gugugguauguguagguuu

SEQ ID NO: 1954591 - RNA, 19 nt, Artificial Sequence
  Description of Artificial Sequence: Synthetic oligonucleotide
  Antisense strand to SEQ ID NO: 1954590
aaaccuacacauaccacac

SEQ ID NO: 1954592 - RNA, 19 nt, Artificial Sequence
  Description of Artificial Sequence: Synthetic oligonucleotide
  Sense strand starting at position 3166 of SEQ ID NO: 1880267
gaaggauguuucugacuga

SEQ ID NO: 1954593 - RNA, 19 nt, Artificial Sequence
  Description of Artificial Sequence: Synthetic oligonucleotide
  Antisense strand to SEQ ID NO: 1954592
ucagucagaaacauccuuc

SEQ ID NO: 1954594 - RNA, 19 nt, Artificial Sequence
  Description of Artificial Sequence: Synthetic oligonucleotide
  Sense strand starting at position 3170 of SEQ ID NO: 1880267
gauguuucugacugagccu

SEQ ID NO: 1954595 - RNA, 19 nt, Artificial Sequence
  Description of Artificial Sequence: Synthetic oligonucleotide
  Antisense strand to SEQ ID NO: 1954594
aggcucagucagaaacauc

SEQ ID NO: 1954596 - RNA, 19 nt, Artificial Sequence
  Description of Artificial Sequence: Synthetic oligonucleotide
  Sense strand starting at position 3677 of SEQ ID NO: 1880267
gggcgcucuggcucgagua

SEQ ID NO: 1954597 - RNA, 19 nt, Artificial Sequence
  Description of Artificial Sequence: Synthetic oligonucleotide
  Antisense strand to SEQ ID NO: 1954596
uacucgagccagagcgccc

SEQ ID NO: 1954598 - RNA, 19 nt, Artificial Sequence
  Description of Artificial Sequence: Synthetic oligonucleotide
  Sense strand starting at position 3678 of SEQ ID NO: 1880267
ggcgcucuggcucgaguaa

SEQ ID NO: 1954599 - RNA, 19 nt, Artificial Sequence
  Description of Artificial Sequence: Synthetic oligonucleotide
  Antisense strand to SEQ ID NO: 1954598
uuacucgagccagagcgcc

SEQ ID NO: 1954600 - RNA, 19 nt, Artificial Sequence
  Description of Artificial Sequence: Synthetic oligonucleotide
  Sense strand starting at position 3679 of SEQ ID NO: 1880267
gcgcucuggcucgaguaau

SEQ ID NO: 1954601 - RNA, 19 nt, Artificial Sequence
  Description of Artificial Sequence: Synthetic oligonucleotide
  Antisense strand to SEQ ID NO: 1954600
auuacucgagccagagcgc

SEQ ID NO: 1954602 - RNA, 19 nt, Artificial Sequence
  Description of Artificial Sequence: Synthetic oligonucleotide
  Sense strand starting at position 3690 of SEQ ID NO: 1880267
cgaguaauccgcuccgggu

SEQ ID NO: 1954603 - RNA, 19 nt, Artificial Sequence
  Description of Artificial Sequence: Synthetic oligonucleotide
  Antisense strand to SEQ ID NO: 1954602
acccggagcggauuacucg

SEQ ID NO: 1954604 - RNA, 19 nt, Artificial Sequence
  Description of Artificial Sequence: Synthetic oligonucleotide
  Sense strand starting at position 20 of SEQ ID NO: 1880268
uuaacauaucauuguguca

SEQ ID NO: 1954605 - RNA, 19 nt, Artificial Sequence
  Description of Artificial Sequence: Synthetic oligonucleotide
  Antisense strand to SEQ ID NO: 1954604
ugacacaaugauauguuaa

SEQ ID NO: 1954606 - RNA, 19 nt, Artificial Sequence
  Description of Artificial Sequence: Synthetic oligonucleotide
  Sense strand starting at position 27 of SEQ ID NO: 1880268
aucauugugucacugaguu

SEQ ID NO: 1954607 - RNA, 19 nt, Artificial Sequence
  Description of Artificial Sequence: Synthetic oligonucleotide
  Antisense strand to SEQ ID NO: 1954606
aacucagugacacaaugau

SEQ ID NO: 1954608 - RNA, 19 nt, Artificial Sequence
  Description of Artificial Sequence: Synthetic oligonucleotide
  Sense strand starting at position 33 of SEQ ID NO: 1880268
gugucacugaguuaagucu

SEQ ID NO: 1954609 - RNA, 19 nt, Artificial Sequence
  Description of Artificial Sequence: Synthetic oligonucleotide
  Antisense strand to SEQ ID NO: 1954608
agacuuaacucagugacac

SEQ ID NO: 1954610 - RNA, 19 nt, Artificial Sequence
  Description of Artificial Sequence: Synthetic oligonucleotide
  Sense strand starting at position 39 of SEQ ID NO: 1880268
cugaguuaagucuauuaca

SEQ ID NO: 1954611 - RNA, 19 nt, Artificial Sequence
  Description of Artificial Sequence: Synthetic oligonucleotide
  Antisense strand to SEQ ID NO: 1954610
uguaauagacuuaacucag

SEQ ID NO: 1954612 - RNA, 19 nt, Artificial Sequence
  Description of Artificial Sequence: Synthetic oligonucleotide
  Sense strand starting at position 76 of SEQ ID NO: 1880268
agauuuaaaugacauacga

SEQ ID NO: 1954613 - RNA, 19 nt, Artificial Sequence
  Description of Artificial Sequence: Synthetic oligonucleotide
  Antisense strand to SEQ ID NO: 1954612
ucguaugucauuuaaaucu

SEQ ID NO: 1954614 - RNA, 19 nt, Artificial Sequence
  Description of Artificial Sequence: Synthetic oligonucleotide
  Sense strand starting at position 175 of SEQ ID NO: 1880268
ggagauaaggguuaguggu

SEQ ID NO: 1954615 - RNA, 19 nt, Artificial Sequence
  Description of Artificial Sequence: Synthetic oligonucleotide
  Antisense strand to SEQ ID NO: 1954614
accacuaacccuuaucucc

SEQ ID NO: 1954616 - RNA, 19 nt, Artificial Sequence
  Description of Artificial Sequence: Synthetic oligonucleotide
  Sense strand starting at position 207 of SEQ ID NO: 1880268
uggagucccuacucauuau

SEQ ID NO: 1954617 - RNA, 19 nt, Artificial Sequence
  Description of Artificial Sequence: Synthetic oligonucleotide
  Antisense strand to SEQ ID NO: 1954616
auaaugaguagggacucca

SEQ ID NO: 1954618 - RNA, 19 nt, Artificial Sequence
  Description of Artificial Sequence: Synthetic oligonucleotide
  Sense strand starting at position 310 of SEQ ID NO: 1880268
ccacuuguguggccagaga

SEQ ID NO: 1954619 - RNA, 19 nt, Artificial Sequence
  Description of Artificial Sequence: Synthetic oligonucleotide
  Antisense strand to SEQ ID NO: 1954618
ucucuggccacacaagugg

SEQ ID NO: 1954620 - RNA, 19 nt, Artificial Sequence
  Description of Artificial Sequence: Synthetic oligonucleotide
  Sense strand starting at position 314 of SEQ ID NO: 1880268
uuguguggccagagagguu

SEQ ID NO: 1954621 - RNA, 19 nt, Artificial Sequence
  Description of Artificial Sequence: Synthetic oligonucleotide
  Antisense strand to SEQ ID NO: 1954620
aaccucucuggccacacaa

SEQ ID NO: 1954622 - RNA, 19 nt, Artificial Sequence
  Description of Artificial Sequence: Synthetic oligonucleotide
  Sense strand starting at position 352 of SEQ ID NO: 1880268
gaucccugcuuaucaguga

SEQ ID NO: 1954623 - RNA, 19 nt, Artificial Sequence
  Description of Artificial Sequence: Synthetic oligonucleotide
  Antisense strand to SEQ ID NO: 1954622
ucacugauaagcagggauc

SEQ ID NO: 1954624 - RNA, 19 nt, Artificial Sequence
  Description of Artificial Sequence: Synthetic oligonucleotide
  Sense strand starting at position 452 of SEQ ID NO: 1880268
uuuggaggcuuuccugaaa

SEQ ID NO: 1954625 - RNA, 19 nt, Artificial Sequence
  Description of Artificial Sequence: Synthetic oligonucleotide
  Antisense strand to SEQ ID NO: 1954624
uuucaggaaagccuccaaa

SEQ ID NO: 1954626 - RNA, 19 nt, Artificial Sequence
  Description of Artificial Sequence: Synthetic oligonucleotide
  Sense strand starting at position 525 of SEQ ID NO: 1880268
uaaagacuccucuggaggu

SEQ ID NO: 1954627 - RNA, 19 nt, Artificial Sequence
  Description of Artificial Sequence: Synthetic oligonucleotide
  Antisense strand to SEQ ID NO: 1954626
accuccagaggagucuuua

SEQ ID NO: 1954628 - RNA, 19 nt, Artificial Sequence
  Description of Artificial Sequence: Synthetic oligonucleotide
  Sense strand starting at position 730 of SEQ ID NO: 1880268
uuuaaaguugugcaacuau

SEQ ID NO: 1954629 - RNA, 19 nt, Artificial Sequence
  Description of Artificial Sequence: Synthetic oligonucleotide
  Antisense strand to SEQ ID NO: 1954628
auaguugcacaacuuuaaa

SEQ ID NO: 1954630 - RNA, 19 nt, Artificial Sequence
  Description of Artificial Sequence: Synthetic oligonucleotide
  Sense strand starting at position 753 of SEQ ID NO: 1880268
guuuaucaagcauagaggu

SEQ ID NO: 1954631 - RNA, 19 nt, Artificial Sequence
  Description of Artificial Sequence: Synthetic oligonucleotide
  Antisense strand to SEQ ID NO: 1954630
accucuaugcuugauaaac

SEQ ID NO: 1954632 - RNA, 19 nt, Artificial Sequence
  Description of Artificial Sequence: Synthetic oligonucleotide
  Sense strand starting at position 835 of SEQ ID NO: 1880268
cuuagaaugauguggagua

SEQ ID NO: 1954633 - RNA, 19 nt, Artificial Sequence
  Description of Artificial Sequence: Synthetic oligonucleotide
  Antisense strand to SEQ ID NO: 1954632
uacuccacaucauucuaag

SEQ ID NO: 1954634 - RNA, 19 nt, Artificial Sequence
  Description of Artificial Sequence: Synthetic oligonucleotide
  Sense strand starting at position 874 of SEQ ID NO: 1880268
gauacauaagcgcaucuga

SEQ ID NO: 1954635 - RNA, 19 nt, Artificial Sequence
  Description of Artificial Sequence: Synthetic oligonucleotide
  Antisense strand to SEQ ID NO: 1954634
ucagaugcgcuuauguauc

SEQ ID NO: 1954636 - RNA, 19 nt, Artificial Sequence
  Description of Artificial Sequence: Synthetic oligonucleotide
  Sense strand starting at position 944 of SEQ ID NO: 1880268
gguagagaugagcauguaa

SEQ ID NO: 1954637 - RNA, 19 nt, Artificial Sequence
  Description of Artificial Sequence: Synthetic oligonucleotide
  Antisense strand to SEQ ID NO: 1954636
uuacaugcucaucucuacc

SEQ ID NO: 1954638 - RNA, 19 nt, Artificial Sequence
  Description of Artificial Sequence: Synthetic oligonucleotide
  Sense strand starting at position 957 of SEQ ID NO: 1880268
auguaagguuccguccaga

SEQ ID NO: 1954639 - RNA, 19 nt, Artificial Sequence
  Description of Artificial Sequence: Synthetic oligonucleotide
  Antisense strand to SEQ ID NO: 1954638
ucuggacggaaccuuacau

SEQ ID NO: 1954640 - RNA, 19 nt, Artificial Sequence
  Description of Artificial Sequence: Synthetic oligonucleotide
  Sense strand starting at position 1011 of SEQ ID NO: 1880268
ggugaguucgcccucgguu

SEQ ID NO: 1954641 - RNA, 19 nt, Artificial Sequence
  Description of Artificial Sequence: Synthetic oligonucleotide
  Antisense strand to SEQ ID NO: 1954640
aaccgagggcgaacucacc

SEQ ID NO: 1954642 - RNA, 19 nt, Artificial Sequence
  Description of Artificial Sequence: Synthetic oligonucleotide
  Sense strand starting at position 1985 of SEQ ID NO: 1880268
ggauuugguuuaggaaaga

SEQ ID NO: 1954643 - RNA, 19 nt, Artificial Sequence
  Description of Artificial Sequence: Synthetic oligonucleotide
  Antisense strand to SEQ ID NO: 1954642
ucuuuccuaaaccaaaucc

SEQ ID NO: 1954644 - RNA, 19 nt, Artificial Sequence
  Description of Artificial Sequence: Synthetic oligonucleotide
  Sense strand starting at position 2023 of SEQ ID NO: 1880268
ccacaauuacuguauaagu

SEQ ID NO: 1954645 - RNA, 19 nt, Artificial Sequence
  Description of Artificial Sequence: Synthetic oligonucleotide
  Antisense strand to SEQ ID NO: 1954644
acuuauacaguaauugugg

SEQ ID NO: 1954646 - RNA, 19 nt, Artificial Sequence
  Description of Artificial Sequence: Synthetic oligonucleotide
  Sense strand starting at position 2033 of SEQ ID NO: 1880268
uguauaaguacaugugaca

SEQ ID NO: 1954647 - RNA, 19 nt, Artificial Sequence
  Description of Artificial Sequence: Synthetic oligonucleotide
  Antisense strand to SEQ ID NO: 1954646
ugucacauguacuuauaca

SEQ ID NO: 1954648 - RNA, 19 nt, Artificial Sequence
  Description of Artificial Sequence: Synthetic oligonucleotide
  Sense strand starting at position 2062 of SEQ ID NO: 1880268
uaaguuuagcaacgucaaa

SEQ ID NO: 1954649 - RNA, 19 nt, Artificial Sequence
  Description of Artificial Sequence: Synthetic oligonucleotide
  Antisense strand to SEQ ID NO: 1954648
uuugacguugcuaaacuua

SEQ ID NO: 1954650 - RNA, 19 nt, Artificial Sequence
  Description of Artificial Sequence: Synthetic oligonucleotide
  Sense strand starting at position 2218 of SEQ ID NO: 1880268
auucuuaguuaaguccaga

SEQ ID NO: 1954651 - RNA, 19 nt, Artificial Sequence
  Description of Artificial Sequence: Synthetic oligonucleotide
  Antisense strand to SEQ ID NO: 1954650
ucuggacuuaacuaagaau

SEQ ID NO: 1954652 - RNA, 19 nt, Artificial Sequence
  Description of Artificial Sequence: Synthetic oligonucleotide
  Sense strand starting at position 2322 of SEQ ID NO: 1880268
cgucucuaauauuuagagu

SEQ ID NO: 1954653 - RNA, 19 nt, Artificial Sequence
  Description of Artificial Sequence: Synthetic oligonucleotide
  Antisense strand to SEQ ID NO: 1954652
acucuaaauauuagagacg

SEQ ID NO: 1954654 - RNA, 19 nt, Artificial Sequence
  Description of Artificial Sequence: Synthetic oligonucleotide
  Sense strand starting at position 2390 of SEQ ID NO: 1880268
acuguuacuguagaagcau

SEQ ID NO: 1954655 - RNA, 19 nt, Artificial Sequence
  Description of Artificial Sequence: Synthetic oligonucleotide
  Antisense strand to SEQ ID NO: 1954654
augcuucuacaguaacagu

SEQ ID NO: 1954656 - RNA, 19 nt, Artificial Sequence
  Description of Artificial Sequence: Synthetic oligonucleotide
  Sense strand starting at position 2399 of SEQ ID NO: 1880268
guagaagcauuacuucuau

SEQ ID NO: 1954657 - RNA, 19 nt, Artificial Sequence
  Description of Artificial Sequence: Synthetic oligonucleotide
  Antisense strand to SEQ ID NO: 1954656
auagaaguaaugcuucuac

SEQ ID NO: 1954658 - RNA, 19 nt, Artificial Sequence
  Description of Artificial Sequence: Synthetic oligonucleotide
  Sense strand starting at position 2562 of SEQ ID NO: 1880268
gacaguuuguaacuuugau

SEQ ID NO: 1954659 - RNA, 19 nt, Artificial Sequence
  Description of Artificial Sequence: Synthetic oligonucleotide
  Antisense strand to SEQ ID NO: 1954658
aucaaaguuacaaacuguc

SEQ ID NO: 1954660 - RNA, 19 nt, Artificial Sequence
  Description of Artificial Sequence: Synthetic oligonucleotide
  Sense strand starting at position 2584 of SEQ ID NO: 1880268
aggaauaauuagcuaugca

SEQ ID NO: 1954661 - RNA, 19 nt, Artificial Sequence
  Description of Artificial Sequence: Synthetic oligonucleotide
  Antisense strand to SEQ ID NO: 1954660
ugcauagcuaauuauuccu

SEQ ID NO: 1954662 - RNA, 19 nt, Artificial Sequence
  Description of Artificial Sequence: Synthetic oligonucleotide
  Sense strand starting at position 2657 of SEQ ID NO: 1880268
agaggugcuuugcuauuua

SEQ ID NO: 1954663 - RNA, 19 nt, Artificial Sequence
  Description of Artificial Sequence: Synthetic oligonucleotide
  Antisense strand to SEQ ID NO: 1954662
uaaauagcaaagcaccucu

SEQ ID NO: 1954664 - RNA, 19 nt, Artificial Sequence
  Description of Artificial Sequence: Synthetic oligonucleotide
  Sense strand starting at position 2743 of SEQ ID NO: 1880268
guuggauguacucagauua

SEQ ID NO: 1954665 - RNA, 19 nt, Artificial Sequence
  Description of Artificial Sequence: Synthetic oligonucleotide
  Antisense strand to SEQ ID NO: 1954664
uaaucugaguacauccaac

SEQ ID NO: 1954666 - RNA, 19 nt, Artificial Sequence
  Description of Artificial Sequence: Synthetic oligonucleotide
  Sense strand starting at position 2888 of SEQ ID NO: 1880268
gcacaucagguuggugaua

SEQ ID NO: 1954667 - RNA, 19 nt, Artificial Sequence
  Description of Artificial Sequence: Synthetic oligonucleotide
  Antisense strand to SEQ ID NO: 1954666
uaucaccaaccugaugugc

SEQ ID NO: 1954668 - RNA, 19 nt, Artificial Sequence
  Description of Artificial Sequence: Synthetic oligonucleotide
  Sense strand starting at position 2901 of SEQ ID NO: 1880268
gugauaaacucuuuguuga

SEQ ID NO: 1954669 - RNA, 19 nt, Artificial Sequence
  Description of Artificial Sequence: Synthetic oligonucleotide
  Antisense strand to SEQ ID NO: 1954668
ucaacaaagaguuuaucac

SEQ ID NO: 1954670 - RNA, 19 nt, Artificial Sequence
  Description of Artificial Sequence: Synthetic oligonucleotide
  Sense strand starting at position 2902 of SEQ ID NO: 1880268
ugauaaacucuuuguugag

SEQ ID NO: 1954671 - RNA, 19 nt, Artificial Sequence
  Description of Artificial Sequence: Synthetic oligonucleotide
  Antisense strand to SEQ ID NO: 1954670
cucaacaaagaguuuauca

SEQ ID NO: 1954672 - RNA, 19 nt, Artificial Sequence
  Description of Artificial Sequence: Synthetic oligonucleotide
  Sense strand starting at position 3095 of SEQ ID NO: 1880268
gcagcugaaccaggagaau

SEQ ID NO: 1954673 - RNA, 19 nt, Artificial Sequence
  Description of Artificial Sequence: Synthetic oligonucleotide
  Antisense strand to SEQ ID NO: 1954672
auucuccugguucagcugc

SEQ ID NO: 1954674 - RNA, 19 nt, Artificial Sequence
  Description of Artificial Sequence: Synthetic oligonucleotide
  Sense strand starting at position 3311 of SEQ ID NO: 1880268
augcuagagcuccaccauu

SEQ ID NO: 1954675 - RNA, 19 nt, Artificial Sequence
  Description of Artificial Sequence: Synthetic oligonucleotide
  Antisense strand to SEQ ID NO: 1954674
aaugguggagcucuagcau

SEQ ID NO: 1954676 - RNA, 19 nt, Artificial Sequence
  Description of Artificial Sequence: Synthetic oligonucleotide
  Sense strand starting at position 3324 of SEQ ID NO: 1880268
accauuaaccagugcuagu

SEQ ID NO: 1954677 - RNA, 19 nt, Artificial Sequence
  Description of Artificial Sequence: Synthetic oligonucleotide
  Antisense strand to SEQ ID NO: 1954676
acuagcacugguuaauggu

SEQ ID NO: 1954678 - RNA, 19 nt, Artificial Sequence
  Description of Artificial Sequence: Synthetic oligonucleotide
  Sense strand starting at position 3756 of SEQ ID NO: 1880268
gccugcuaaggguaaaguu

SEQ ID NO: 1954679 - RNA, 19 nt, Artificial Sequence
  Description of Artificial Sequence: Synthetic oligonucleotide
  Antisense strand to SEQ ID NO: 1954678
aacuuuacccuuagcaggc

SEQ ID NO: 1954680 - RNA, 19 nt, Artificial Sequence
  Description of Artificial Sequence: Synthetic oligonucleotide
  Sense strand starting at position 3856 of SEQ ID NO: 1880268
ggagacagaugguaaucaa

SEQ ID NO: 1954681 - RNA, 19 nt, Artificial Sequence
  Description of Artificial Sequence: Synthetic oligonucleotide
  Antisense strand to SEQ ID NO: 1954680
uugauuaccaucugucucc

SEQ ID NO: 1954682 - RNA, 19 nt, Artificial Sequence
  Description of Artificial Sequence: Synthetic oligonucleotide
  Sense strand starting at position 3963 of SEQ ID NO: 1880268
agggagaggguuuguguaa

SEQ ID NO: 1954683 - RNA, 19 nt, Artificial Sequence
  Description of Artificial Sequence: Synthetic oligonucleotide
  Antisense strand to SEQ ID NO: 1954682
uuacacaaacccucucccu

SEQ ID NO: 1954684 - RNA, 19 nt, Artificial Sequence
  Description of Artificial Sequence: Synthetic oligonucleotide
  Sense strand starting at position 2025 of SEQ ID NO: 1880269
gggccucucgggaguugua

SEQ ID NO: 1954685 - RNA, 19 nt, Artificial Sequence
  Description of Artificial Sequence: Synthetic oligonucleotide
  Antisense strand to SEQ ID NO: 1954684
uacaacucccgagaggccc

SEQ ID NO: 1954686 - RNA, 19 nt, Artificial Sequence
  Description of Artificial Sequence: Synthetic oligonucleotide
  Sense strand starting at position 2032 of SEQ ID NO: 1880269
ucgggaguuguauugcgua

SEQ ID NO: 1954687 - RNA, 19 nt, Artificial Sequence
  Description of Artificial Sequence: Synthetic oligonucleotide
  Antisense strand to SEQ ID NO: 1954686
uacgcaauacaacucccga

SEQ ID NO: 1954688 - RNA, 19 nt, Artificial Sequence
  Description of Artificial Sequence: Synthetic oligonucleotide
  Sense strand starting at position 2069 of SEQ ID NO: 1880269
ggcgcuguugggagaugua

SEQ ID NO: 1954689 - RNA, 19 nt, Artificial Sequence
  Description of Artificial Sequence: Synthetic oligonucleotide
  Antisense strand to SEQ ID NO: 1954688
uacaucucccaacagcgcc

SEQ ID NO: 1954690 - RNA, 19 nt, Artificial Sequence
  Description of Artificial Sequence: Synthetic oligonucleotide
  Sense strand starting at position 2220 of SEQ ID NO: 1880269
ccuaaauuggccugacuuc

SEQ ID NO: 1954691 - RNA, 19 nt, Artificial Sequence
  Description of Artificial Sequence: Synthetic oligonucleotide
  Antisense strand to SEQ ID NO: 1954690
gaagucaggccaauuuagg

SEQ ID NO: 1954692 - RNA, 19 nt, Artificial Sequence
  Description of Artificial Sequence: Synthetic oligonucleotide
  Sense strand starting at position 2230 of SEQ ID NO: 1880269
ccugacuucgcagauaaua

SEQ ID NO: 1954693 - RNA, 19 nt, Artificial Sequence
  Description of Artificial Sequence: Synthetic oligonucleotide
  Antisense strand to SEQ ID NO: 1954692
uauuaucugcgaagucagg

SEQ ID NO: 1954694 - RNA, 19 nt, Artificial Sequence
  Description of Artificial Sequence: Synthetic oligonucleotide
  Sense strand starting at position 2242 of SEQ ID NO: 1880269
gauaauaaggcccgacuca

SEQ ID NO: 1954695 - RNA, 19 nt, Artificial Sequence
  Description of Artificial Sequence: Synthetic oligonucleotide
  Antisense strand to SEQ ID NO: 1954694
ugagucgggccuuauuauc

SEQ ID NO: 1954696 - RNA, 19 nt, Artificial Sequence
  Description of Artificial Sequence: Synthetic oligonucleotide
  Sense strand starting at position 2303 of SEQ ID NO: 1880269
agcuuaaucgugcugcagu

SEQ ID NO: 1954697 - RNA, 19 nt, Artificial Sequence
  Description of Artificial Sequence: Synthetic oligonucleotide
  Antisense strand to SEQ ID NO: 1954696
acugcagcacgauuaagcu

SEQ ID NO: 1954698 - RNA, 19 nt, Artificial Sequence
  Description of Artificial Sequence: Synthetic oligonucleotide
  Sense strand starting at position 2311 of SEQ ID NO: 1880269
cgugcugcagucuccauaa

SEQ ID NO: 1954699 - RNA, 19 nt, Artificial Sequence
  Description of Artificial Sequence: Synthetic oligonucleotide
  Antisense strand to SEQ ID NO: 1954698
uuauggagacugcagcacg

SEQ ID NO: 1954700 - RNA, 19 nt, Artificial Sequence
  Description of Artificial Sequence: Synthetic oligonucleotide
  Sense strand starting at position 2313 of SEQ ID NO: 1880269
ugcugcagucuccauaaga

SEQ ID NO: 1954701 - RNA, 19 nt, Artificial Sequence
  Description of Artificial Sequence: Synthetic oligonucleotide
  Antisense strand to SEQ ID NO: 1954700
ucuuauggagacugcagca

SEQ ID NO: 1954702 - RNA, 19 nt, Artificial Sequence
  Description of Artificial Sequence: Synthetic oligonucleotide
  Sense strand starting at position 2338 of SEQ ID NO: 1880269
cgagaauacuccgcccuga

SEQ ID NO: 1954703 - RNA, 19 nt, Artificial Sequence
  Description of Artificial Sequence: Synthetic oligonucleotide
  Antisense strand to SEQ ID NO: 1954702
ucagggcggaguauucucg

SEQ ID NO: 1954704 - RNA, 19 nt, Artificial Sequence
  Description of Artificial Sequence: Synthetic oligonucleotide
  Sense strand starting at position 2521 of SEQ ID NO: 1880269
uaguguuccgccucugauu

SEQ ID NO: 1954705 - RNA, 19 nt, Artificial Sequence
  Description of Artificial Sequence: Synthetic oligonucleotide
  Antisense strand to SEQ ID NO: 1954704
aaucagaggcggaacacua

SEQ ID NO: 1954706 - RNA, 19 nt, Artificial Sequence
  Description of Artificial Sequence: Synthetic oligonucleotide
  Sense strand starting at position 2540 of SEQ ID NO: 1880269
ggcagagugguucacgaac

SEQ ID NO: 1954707 - RNA, 19 nt, Artificial Sequence
  Description of Artificial Sequence: Synthetic oligonucleotide
  Antisense strand to SEQ ID NO: 1954706
guucgugaaccacucugcc

SEQ ID NO: 1954708 - RNA, 19 nt, Artificial Sequence
  Description of Artificial Sequence: Synthetic oligonucleotide
  Sense strand starting at position 2554 of SEQ ID NO: 1880269
cgaacuucgcucgcugauu

SEQ ID NO: 1954709 - RNA, 19 nt, Artificial Sequence
  Description of Artificial Sequence: Synthetic oligonucleotide
  Antisense strand to SEQ ID NO: 1954708
aaucagcgagcgaaguucg

SEQ ID NO: 1954710 - RNA, 19 nt, Artificial Sequence
  Description of Artificial Sequence: Synthetic oligonucleotide
  Sense strand starting at position 2644 of SEQ ID NO: 1880269
gcaccuccucccugagaca

SEQ ID NO: 1954711 - RNA, 19 nt, Artificial Sequence
  Description of Artificial Sequence: Synthetic oligonucleotide
  Antisense strand to SEQ ID NO: 1954710
ugucucagggaggaggugc

SEQ ID NO: 1954712 - RNA, 19 nt, Artificial Sequence
  Description of Artificial Sequence: Synthetic oligonucleotide
  Sense strand starting at position 3068 of SEQ ID NO: 1880269
caagucccugugggaaauu

SEQ ID NO: 1954713 - RNA, 19 nt, Artificial Sequence
  Description of Artificial Sequence: Synthetic oligonucleotide
  Antisense strand to SEQ ID NO: 1954712
aauuucccacagggacuug

SEQ ID NO: 1954714 - RNA, 19 nt, Artificial Sequence
  Description of Artificial Sequence: Synthetic oligonucleotide
  Sense strand starting at position 3077 of SEQ ID NO: 1880269
gugggaaauucccugggau

SEQ ID NO: 1954715 - RNA, 19 nt, Artificial Sequence
  Description of Artificial Sequence: Synthetic oligonucleotide
  Antisense strand to SEQ ID NO: 1954714
aucccagggaauuucccac

SEQ ID NO: 1954716 - RNA, 19 nt, Artificial Sequence
  Description of Artificial Sequence: Synthetic oligonucleotide
  Sense strand starting at position 3097 of SEQ ID NO: 1880269
aguaauucgcuggcuucga

SEQ ID NO: 1954717 - RNA, 19 nt, Artificial Sequence
  Description of Artificial Sequence: Synthetic oligonucleotide
  Antisense strand to SEQ ID NO: 1954716
ucgaagccagcgaauuacu

SEQ ID NO: 1954718 - RNA, 19 nt, Artificial Sequence
  Description of Artificial Sequence: Synthetic oligonucleotide
  Sense strand starting at position 3142 of SEQ ID NO: 1880269
aggccaguauagucacaaa

SEQ ID NO: 1954719 - RNA, 19 nt, Artificial Sequence
  Description of Artificial Sequence: Synthetic oligonucleotide
  Antisense strand to SEQ ID NO: 1954718
uuugugacuauacuggccu

SEQ ID NO: 1954720 - RNA, 19 nt, Artificial Sequence
  Description of Artificial Sequence: Synthetic oligonucleotide
  Sense strand starting at position 3181 of SEQ ID NO: 1880269
gcuguaugccuuuaaauac

SEQ ID NO: 1954721 - RNA, 19 nt, Artificial Sequence
  Description of Artificial Sequence: Synthetic oligonucleotide
  Antisense strand to SEQ ID NO: 1954720
guauuuaaaggcauacagc

SEQ ID NO: 1954722 - RNA, 19 nt, Artificial Sequence
  Description of Artificial Sequence: Synthetic oligonucleotide
  Sense strand starting at position 3347 of SEQ ID NO: 1880269
gggaaucacucccaagaag

SEQ ID NO: 1954723 - RNA, 19 nt, Artificial Sequence
  Description of Artificial Sequence: Synthetic oligonucleotide
  Antisense strand to SEQ ID NO: 1954722
cuucuugggagugauuccc

SEQ ID NO: 1954724 - RNA, 19 nt, Artificial Sequence
  Description of Artificial Sequence: Synthetic oligonucleotide
  Sense strand starting at position 3361 of SEQ ID NO: 1880269
agaagucggcgugauuaag

SEQ ID NO: 1954725 - RNA, 19 nt, Artificial Sequence
  Description of Artificial Sequence: Synthetic oligonucleotide
  Antisense strand to SEQ ID NO: 1954724
cuuaaucacgccgacuucu

SEQ ID NO: 1954726 - RNA, 19 nt, Artificial Sequence
  Description of Artificial Sequence: Synthetic oligonucleotide
  Sense strand starting at position 3490 of SEQ ID NO: 1880269
agaagaauauuccaggaaa

SEQ ID NO: 1954727 - RNA, 19 nt, Artificial Sequence
  Description of Artificial Sequence: Synthetic oligonucleotide
  Antisense strand to SEQ ID NO: 1954726
uuuccuggaauauucuucu

SEQ ID NO: 1954728 - RNA, 19 nt, Artificial Sequence
  Description of Artificial Sequence: Synthetic oligonucleotide
  Sense strand starting at position 3510 of SEQ ID NO: 1880269
gaggaacauuaugaguaaa

SEQ ID NO: 1954729 - RNA, 19 nt, Artificial Sequence
  Description of Artificial Sequence: Synthetic oligonucleotide
  Antisense strand to SEQ ID NO: 1954728
uuuacucauaauguuccuc

SEQ ID NO: 1954730 - RNA, 19 nt, Artificial Sequence
  Description of Artificial Sequence: Synthetic oligonucleotide
  Sense strand starting at position 3540 of SEQ ID NO: 1880269
augcaagugccagauaugu

SEQ ID NO: 1954731 - RNA, 19 nt, Artificial Sequence
  Description of Artificial Sequence: Synthetic oligonucleotide
  Antisense strand to SEQ ID NO: 1954730
acauaucuggcacuugcau

SEQ ID NO: 1954732 - RNA, 19 nt, Artificial Sequence
  Description of Artificial Sequence: Synthetic oligonucleotide
  Sense strand starting at position 3579 of SEQ ID NO: 1880269
aggauaaaguuccugagug

SEQ ID NO: 1954733 - RNA, 19 nt, Artificial Sequence
  Description of Artificial Sequence: Synthetic oligonucleotide
  Antisense strand to SEQ ID NO: 1954732
cacucaggaacuuuauccu

SEQ ID NO: 1954734 - RNA, 19 nt, Artificial Sequence
  Description of Artificial Sequence: Synthetic oligonucleotide
  Sense strand starting at position 3783 of SEQ ID NO: 1880269
ggaaguaucgugugauuuc

SEQ ID NO: 1954735 - RNA, 19 nt, Artificial Sequence
  Description of Artificial Sequence: Synthetic oligonucleotide
  Antisense strand to SEQ ID NO: 1954734
gaaaucacacgauacuucc

SEQ ID NO: 1954736 - RNA, 19 nt, Artificial Sequence
  Description of Artificial Sequence: Synthetic oligonucleotide
  Sense strand starting at position 3806 of SEQ ID NO: 1880269
accugugacguuugaagau

SEQ ID NO: 1954737 - RNA, 19 nt, Artificial Sequence
  Description of Artificial Sequence: Synthetic oligonucleotide
  Antisense strand to SEQ ID NO: 1954736
aucuucaaacgucacaggu

SEQ ID NO: 1954738 - RNA, 19 nt, Artificial Sequence
  Description of Artificial Sequence: Synthetic oligonucleotide
  Sense strand starting at position 3818 of SEQ ID NO: 1880269
ugaagauauggccauguau

SEQ ID NO: 1954739 - RNA, 19 nt, Artificial Sequence
  Description of Artificial Sequence: Synthetic oligonucleotide
  Antisense strand to SEQ ID NO: 1954738
auacauggccauaucuuca

SEQ ID NO: 1954740 - RNA, 19 nt, Artificial Sequence
  Description of Artificial Sequence: Synthetic oligonucleotide
  Sense strand starting at position 3820 of SEQ ID NO: 1880269
aagauauggccauguaucu

SEQ ID NO: 1954741 - RNA, 19 nt, Artificial Sequence
  Description of Artificial Sequence: Synthetic oligonucleotide
  Antisense strand to SEQ ID NO: 1954740
agauacauggccauaucuu

SEQ ID NO: 1954742 - RNA, 19 nt, Artificial Sequence
  Description of Artificial Sequence: Synthetic oligonucleotide
  Sense strand starting at position 3832 of SEQ ID NO: 1880269
uguaucucacccgggaaga

SEQ ID NO: 1954743 - RNA, 19 nt, Artificial Sequence
  Description of Artificial Sequence: Synthetic oligonucleotide
  Antisense strand to SEQ ID NO: 1954742
ucuucccgggugagauaca

SEQ ID NO: 1954744 - RNA, 19 nt, Artificial Sequence
  Description of Artificial Sequence: Synthetic oligonucleotide
  Sense strand starting at position 3833 of SEQ ID NO: 1880269
guaucucacccgggaagaa

SEQ ID NO: 1954745 - RNA, 19 nt, Artificial Sequence
  Description of Artificial Sequence: Synthetic oligonucleotide
  Antisense strand to SEQ ID NO: 1954744
uucuucccgggugagauac

SEQ ID NO: 1954746 - RNA, 19 nt, Artificial Sequence
  Description of Artificial Sequence: Synthetic oligonucleotide
  Sense strand starting at position 3878 of SEQ ID NO: 1880269
ggaccuuuaccgggauguu

SEQ ID NO: 1954747 - RNA, 19 nt, Artificial Sequence
  Description of Artificial Sequence: Synthetic oligonucleotide
  Antisense strand to SEQ ID NO: 1954746
aacaucccgguaaaggucc

SEQ ID NO: 1954748 - RNA, 19 nt, Artificial Sequence
  Description of Artificial Sequence: Synthetic oligonucleotide
  Sense strand starting at position 3879 of SEQ ID NO: 1880269
gaccuuuaccgggauguua

SEQ ID NO: 1954749 - RNA, 19 nt, Artificial Sequence
  Description of Artificial Sequence: Synthetic oligonucleotide
  Antisense strand to SEQ ID NO: 1954748
uaacaucccgguaaagguc

SEQ ID NO: 1954750 - RNA, 19 nt, Artificial Sequence
  Description of Artificial Sequence: Synthetic oligonucleotide
  Sense strand starting at position 3881 of SEQ ID NO: 1880269
ccuuuaccgggauguuaug

SEQ ID NO: 1954751 - RNA, 19 nt, Artificial Sequence
  Description of Artificial Sequence: Synthetic oligonucleotide
  Antisense strand to SEQ ID NO: 1954750
cauaacaucccgguaaagg

SEQ ID NO: 1954752 - RNA, 19 nt, Artificial Sequence
  Description of Artificial Sequence: Synthetic oligonucleotide
  Sense strand starting at position 3888 of SEQ ID NO: 1880269
cgggauguuaugcaggaga

SEQ ID NO: 1954753 - RNA, 19 nt, Artificial Sequence
  Description of Artificial Sequence: Synthetic oligonucleotide
  Antisense strand to SEQ ID NO: 1954752
ucuccugcauaacaucccg

SEQ ID NO: 1954754 - RNA, 19 nt, Artificial Sequence
  Description of Artificial Sequence: Synthetic oligonucleotide
  Sense strand starting at position 3890 of SEQ ID NO: 1880269
ggauguuaugcaggagaau

SEQ ID NO: 1954755 - RNA, 19 nt, Artificial Sequence
  Description of Artificial Sequence: Synthetic oligonucleotide
  Antisense strand to SEQ ID NO: 1954754
auucuccugcauaacaucc

SEQ ID NO: 1954756 - RNA, 19 nt, Artificial Sequence
  Description of Artificial Sequence: Synthetic oligonucleotide
  Sense strand starting at position 3893 of SEQ ID NO: 1880269
uguuaugcaggagaauuau

SEQ ID NO: 1954757 - RNA, 19 nt, Artificial Sequence
  Description of Artificial Sequence: Synthetic oligonucleotide
  Antisense strand to SEQ ID NO: 1954756
auaauucuccugcauaaca

SEQ ID NO: 1954758 - RNA, 19 nt, Artificial Sequence
  Description of Artificial Sequence: Synthetic oligonucleotide
  Sense strand starting at position 3910 of SEQ ID NO: 1880269
auggaaauguugucucacu

SEQ ID NO: 1954759 - RNA, 19 nt, Artificial Sequence
  Description of Artificial Sequence: Synthetic oligonucleotide
  Antisense strand to SEQ ID NO: 1954758
agugagacaacauuuccau

SEQ ID NO: 1954760 - RNA, 19 nt, Artificial Sequence
  Description of Artificial Sequence: Synthetic oligonucleotide
  Sense strand starting at position 3911 of SEQ ID NO: 1880269
uggaaauguugucucacua

SEQ ID NO: 1954761 - RNA, 19 nt, Artificial Sequence
  Description of Artificial Sequence: Synthetic oligonucleotide
  Antisense strand to SEQ ID NO: 1954760
uagugagacaacauuucca

SEQ ID NO: 1954762 - RNA, 19 nt, Artificial Sequence
  Description of Artificial Sequence: Synthetic oligonucleotide
  Sense strand starting at position 3919 of SEQ ID NO: 1880269
uugucucacuagguaagua

SEQ ID NO: 1954763 - RNA, 19 nt, Artificial Sequence
  Description of Artificial Sequence: Synthetic oligonucleotide
  Antisense strand to SEQ ID NO: 1954762
uacuuaccuagugagacaa

SEQ ID NO: 1954764 - RNA, 19 nt, Artificial Sequence
  Description of Artificial Sequence: Synthetic oligonucleotide
  Sense strand starting at position 2272 of SEQ ID NO: 1880270
gggccucucgggaguugua

SEQ ID NO: 1954765 - RNA, 19 nt, Artificial Sequence
  Description of Artificial Sequence: Synthetic oligonucleotide
  Antisense strand to SEQ ID NO: 1954764
uacaacucccgagaggccc

SEQ ID NO: 1954766 - RNA, 19 nt, Artificial Sequence
  Description of Artificial Sequence: Synthetic oligonucleotide
  Sense strand starting at position 2279 of SEQ ID NO: 1880270
ucgggaguuguauugcgua

SEQ ID NO: 1954767 - RNA, 19 nt, Artificial Sequence
  Description of Artificial Sequence: Synthetic oligonucleotide
  Antisense strand to SEQ ID NO: 1954766
uacgcaauacaacucccga

SEQ ID NO: 1954768 - RNA, 19 nt, Artificial Sequence
  Description of Artificial Sequence: Synthetic oligonucleotide
  Sense strand starting at position 2284 of SEQ ID NO: 1880270
aguuguauugcguacagag

SEQ ID NO: 1954769 - RNA, 19 nt, Artificial Sequence
  Description of Artificial Sequence: Synthetic oligonucleotide
  Antisense strand to SEQ ID NO: 1954768
cucuguacgcaauacaacu

SEQ ID NO: 1954770 - RNA, 19 nt, Artificial Sequence
  Description of Artificial Sequence: Synthetic oligonucleotide
  Sense strand starting at position 2316 of SEQ ID NO: 1880270
ggcgcuguugggagaugua

SEQ ID NO: 1954771 - RNA, 19 nt, Artificial Sequence
  Description of Artificial Sequence: Synthetic oligonucleotide
  Antisense strand to SEQ ID NO: 1954770
uacaucucccaacagcgcc

SEQ ID NO: 1954772 - RNA, 19 nt, Artificial Sequence
  Description of Artificial Sequence: Synthetic oligonucleotide
  Sense strand starting at position 2467 of SEQ ID NO: 1880270
ccuaaauuggccugacuuc

SEQ ID NO: 1954773 - RNA, 19 nt, Artificial Sequence
  Description of Artificial Sequence: Synthetic oligonucleotide
  Antisense strand to SEQ ID NO: 1954772
gaagucaggccaauuuagg

SEQ ID NO: 1954774 - RNA, 19 nt, Artificial Sequence
  Description of Artificial Sequence: Synthetic oligonucleotide
  Sense strand starting at position 2474 of SEQ ID NO: 1880270
uggccugacuucgcagaua

SEQ ID NO: 1954775 - RNA, 19 nt, Artificial Sequence
  Description of Artificial Sequence: Synthetic oligonucleotide
  Antisense strand to SEQ ID NO: 1954774
uaucugcgaagucaggcca

SEQ ID NO: 1954776 - RNA, 19 nt, Artificial Sequence
  Description of Artificial Sequence: Synthetic oligonucleotide
  Sense strand starting at position 2477 of SEQ ID NO: 1880270
ccugacuucgcagauaaua

SEQ ID NO: 1954777 - RNA, 19 nt, Artificial Sequence
  Description of Artificial Sequence: Synthetic oligonucleotide
  Antisense strand to SEQ ID NO: 1954776
uauuaucugcgaagucagg

SEQ ID NO: 1954778 - RNA, 19 nt, Artificial Sequence
  Description of Artificial Sequence: Synthetic oligonucleotide
  Sense strand starting at position 2489 of SEQ ID NO: 1880270
gauaauaaggcccgacuca

SEQ ID NO: 1954779 - RNA, 19 nt, Artificial Sequence
  Description of Artificial Sequence: Synthetic oligonucleotide
  Antisense strand to SEQ ID NO: 1954778
ugagucgggccuuauuauc

SEQ ID NO: 1954780 - RNA, 19 nt, Artificial Sequence
  Description of Artificial Sequence: Synthetic oligonucleotide
  Sense strand starting at position 2550 of SEQ ID NO: 1880270
agcuuaaucgugcugcagu

SEQ ID NO: 1954781 - RNA, 19 nt, Artificial Sequence
  Description of Artificial Sequence: Synthetic oligonucleotide
  Antisense strand to SEQ ID NO: 1954780
acugcagcacgauuaagcu

SEQ ID NO: 1954782 - RNA, 19 nt, Artificial Sequence
  Description of Artificial Sequence: Synthetic oligonucleotide
  Sense strand starting at position 2558 of SEQ ID NO: 1880270
cgugcugcagucuccauaa

SEQ ID NO: 1954783 - RNA, 19 nt, Artificial Sequence
  Description of Artificial Sequence: Synthetic oligonucleotide
  Antisense strand to SEQ ID NO: 1954782
uuauggagacugcagcacg

SEQ ID NO: 1954784 - RNA, 19 nt, Artificial Sequence
  Description of Artificial Sequence: Synthetic oligonucleotide
  Sense strand starting at position 2560 of SEQ ID NO: 1880270
ugcugcagucuccauaaga

SEQ ID NO: 1954785 - RNA, 19 nt, Artificial Sequence
  Description of Artificial Sequence: Synthetic oligonucleotide
  Antisense strand to SEQ ID NO: 1954784
ucuuauggagacugcagca

SEQ ID NO: 1954786 - RNA, 19 nt, Artificial Sequence
  Description of Artificial Sequence: Synthetic oligonucleotide
  Sense strand starting at position 2585 of SEQ ID NO: 1880270
cgagaauacuccgcccuga

SEQ ID NO: 1954787 - RNA, 19 nt, Artificial Sequence
  Description of Artificial Sequence: Synthetic oligonucleotide
  Antisense strand to SEQ ID NO: 1954786
ucagggcggaguauucucg

SEQ ID NO: 1954788 - RNA, 19 nt, Artificial Sequence
  Description of Artificial Sequence: Synthetic oligonucleotide
  Sense strand starting at position 2768 of SEQ ID NO: 1880270
uaguguuccgccucugauu

SEQ ID NO: 1954789 - RNA, 19 nt, Artificial Sequence
  Description of Artificial Sequence: Synthetic oligonucleotide
  Antisense strand to SEQ ID NO: 1954788
aaucagaggcggaacacua

SEQ ID NO: 1954790 - RNA, 19 nt, Artificial Sequence
  Description of Artificial Sequence: Synthetic oligonucleotide
  Sense strand starting at position 2787 of SEQ ID NO: 1880270
ggcagagugguucacgaac

SEQ ID NO: 1954791 - RNA, 19 nt, Artificial Sequence
  Description of Artificial Sequence: Synthetic oligonucleotide
  Antisense strand to SEQ ID NO: 1954790
guucgugaaccacucugcc

SEQ ID NO: 1954792 - RNA, 19 nt, Artificial Sequence
  Description of Artificial Sequence: Synthetic oligonucleotide
  Sense strand starting at position 2801 of SEQ ID NO: 1880270
cgaacuucgcucgcugauu

SEQ ID NO: 1954793 - RNA, 19 nt, Artificial Sequence
  Description of Artificial Sequence: Synthetic oligonucleotide
  Antisense strand to SEQ ID NO: 1954792
aaucagcgagcgaaguucg

SEQ ID NO: 1954794 - RNA, 19 nt, Artificial Sequence
  Description of Artificial Sequence: Synthetic oligonucleotide
  Sense strand starting at position 2891 of SEQ ID NO: 1880270
gcaccuccucccugagaca

SEQ ID NO: 1954795 - RNA, 19 nt, Artificial Sequence
  Description of Artificial Sequence: Synthetic oligonucleotide
  Antisense strand to SEQ ID NO: 1954794
ugucucagggaggaggugc

SEQ ID NO: 1954796 - RNA, 19 nt, Artificial Sequence
  Description of Artificial Sequence: Synthetic oligonucleotide
  Sense strand starting at position 3197 of SEQ ID NO: 1880270
gaacccuugugcucgagau

SEQ ID NO: 1954797 - RNA, 19 nt, Artificial Sequence
  Description of Artificial Sequence: Synthetic oligonucleotide
  Antisense strand to SEQ ID NO: 1954796
aucucgagcacaaggguuc

SEQ ID NO: 1954798 - RNA, 19 nt, Artificial Sequence
  Description of Artificial Sequence: Synthetic oligonucleotide
  Sense strand starting at position 3198 of SEQ ID NO: 1880270
aacccuugugcucgagaug

SEQ ID NO: 1954799 - RNA, 19 nt, Artificial Sequence
  Description of Artificial Sequence: Synthetic oligonucleotide
  Antisense strand to SEQ ID NO: 1954798
caucucgagcacaaggguu

SEQ ID NO: 1954800 - RNA, 19 nt, Artificial Sequence
  Description of Artificial Sequence: Synthetic oligonucleotide
  Sense strand starting at position 3201 of SEQ ID NO: 1880270
ccuugugcucgagauggca

SEQ ID NO: 1954801 - RNA, 19 nt, Artificial Sequence
  Description of Artificial Sequence: Synthetic oligonucleotide
  Antisense strand to SEQ ID NO: 1954800
ugccaucucgagcacaagg

SEQ ID NO: 1954802 - RNA, 19 nt, Artificial Sequence
  Description of Artificial Sequence: Synthetic oligonucleotide
  Sense strand starting at position 3315 of SEQ ID NO: 1880270
caagucccugugggaaauu

SEQ ID NO: 1954803 - RNA, 19 nt, Artificial Sequence
  Description of Artificial Sequence: Synthetic oligonucleotide
  Antisense strand to SEQ ID NO: 1954802
aauuucccacagggacuug

SEQ ID NO: 1954804 - RNA, 19 nt, Artificial Sequence
  Description of Artificial Sequence: Synthetic oligonucleotide
  Sense strand starting at position 3324 of SEQ ID NO: 1880270
gugggaaauucccugggau

SEQ ID NO: 1954805 - RNA, 19 nt, Artificial Sequence
  Description of Artificial Sequence: Synthetic oligonucleotide
  Antisense strand to SEQ ID NO: 1954804
aucccagggaauuucccac

SEQ ID NO: 1954806 - RNA, 19 nt, Artificial Sequence
  Description of Artificial Sequence: Synthetic oligonucleotide
  Sense strand starting at position 3344 of SEQ ID NO: 1880270
aguaauucgcuggcuucga

SEQ ID NO: 1954807 - RNA, 19 nt, Artificial Sequence
  Description of Artificial Sequence: Synthetic oligonucleotide
  Antisense strand to SEQ ID NO: 1954806
ucgaagccagcgaauuacu

SEQ ID NO: 1954808 - RNA, 19 nt, Artificial Sequence
  Description of Artificial Sequence: Synthetic oligonucleotide
  Sense strand starting at position 3357 of SEQ ID NO: 1880270
cuucgauauucugccucca

SEQ ID NO: 1954809 - RNA, 19 nt, Artificial Sequence
  Description of Artificial Sequence: Synthetic oligonucleotide
  Antisense strand to SEQ ID NO: 1954808
uggaggcagaauaucgaag

SEQ ID NO: 1954810 - RNA, 19 nt, Artificial Sequence
  Description of Artificial Sequence: Synthetic oligonucleotide
  Sense strand starting at position 3389 of SEQ ID NO: 1880270
aggccaguauagucacaaa

SEQ ID NO: 1954811 - RNA, 19 nt, Artificial Sequence
  Description of Artificial Sequence: Synthetic oligonucleotide
  Antisense strand to SEQ ID NO: 1954810
uuugugacuauacuggccu

SEQ ID NO: 1954812 - RNA, 19 nt, Artificial Sequence
  Description of Artificial Sequence: Synthetic oligonucleotide
  Sense strand starting at position 3425 of SEQ ID NO: 1880270
ccugcuguaugccuuuaaa

SEQ ID NO: 1954813 - RNA, 19 nt, Artificial Sequence
  Description of Artificial Sequence: Synthetic oligonucleotide
  Antisense strand to SEQ ID NO: 1954812
uuuaaaggcauacagcagg

SEQ ID NO: 1954814 - RNA, 19 nt, Artificial Sequence
  Description of Artificial Sequence: Synthetic oligonucleotide
  Sense strand starting at position 3428 of SEQ ID NO: 1880270
gcuguaugccuuuaaauac

SEQ ID NO: 1954815 - RNA, 19 nt, Artificial Sequence
  Description of Artificial Sequence: Synthetic oligonucleotide
  Antisense strand to SEQ ID NO: 1954814
guauuuaaaggcauacagc

SEQ ID NO: 1954816 - RNA, 19 nt, Artificial Sequence
  Description of Artificial Sequence: Synthetic oligonucleotide
  Sense strand starting at position 3504 of SEQ ID NO: 1880270
cacaaucuguagggagaaa

SEQ ID NO: 1954817 - RNA, 19 nt, Artificial Sequence
  Description of Artificial Sequence: Synthetic oligonucleotide
  Antisense strand to SEQ ID NO: 1954816
uuucucccuacagauugug

SEQ ID NO: 1954818 - RNA, 19 nt, Artificial Sequence
  Description of Artificial Sequence: Synthetic oligonucleotide
  Sense strand starting at position 3530 of SEQ ID NO: 1880270
ccacuuaagcguggcacaa

SEQ ID NO: 1954819 - RNA, 19 nt, Artificial Sequence
  Description of Artificial Sequence: Synthetic oligonucleotide
  Antisense strand to SEQ ID NO: 1954818
uugugccacgcuuaagugg

SEQ ID NO: 1954820 - RNA, 19 nt, Artificial Sequence
  Description of Artificial Sequence: Synthetic oligonucleotide
  Sense strand starting at position 3581 of SEQ ID NO: 1880270
agugcuguagugugggaau

SEQ ID NO: 1954821 - RNA, 19 nt, Artificial Sequence
  Description of Artificial Sequence: Synthetic oligonucleotide
  Antisense strand to SEQ ID NO: 1954820
auucccacacuacagcacu

SEQ ID NO: 1954822 - RNA, 19 nt, Artificial Sequence
  Description of Artificial Sequence: Synthetic oligonucleotide
  Sense strand starting at position 3583 of SEQ ID NO: 1880270
ugcuguagugugggaauca

SEQ ID NO: 1954823 - RNA, 19 nt, Artificial Sequence
  Description of Artificial Sequence: Synthetic oligonucleotide
  Antisense strand to SEQ ID NO: 1954822
ugauucccacacuacagca

SEQ ID NO: 1954824 - RNA, 19 nt, Artificial Sequence
  Description of Artificial Sequence: Synthetic oligonucleotide
  Sense strand starting at position 3594 of SEQ ID NO: 1880270
gggaaucacucccaagaag

SEQ ID NO: 1954825 - RNA, 19 nt, Artificial Sequence
  Description of Artificial Sequence: Synthetic oligonucleotide
  Antisense strand to SEQ ID NO: 1954824
cuucuugggagugauuccc

SEQ ID NO: 1954826 - RNA, 19 nt, Artificial Sequence
  Description of Artificial Sequence: Synthetic oligonucleotide
  Sense strand starting at position 3605 of SEQ ID NO: 1880270
ccaagaagucggcgugauu

SEQ ID NO: 1954827 - RNA, 19 nt, Artificial Sequence
  Description of Artificial Sequence: Synthetic oligonucleotide
  Antisense strand to SEQ ID NO: 1954826
aaucacgccgacuucuugg

SEQ ID NO: 1954828 - RNA, 19 nt, Artificial Sequence
  Description of Artificial Sequence: Synthetic oligonucleotide
  Sense strand starting at position 3608 of SEQ ID NO: 1880270
agaagucggcgugauuaag

SEQ ID NO: 1954829 - RNA, 19 nt, Artificial Sequence
  Description of Artificial Sequence: Synthetic oligonucleotide
  Antisense strand to SEQ ID NO: 1954828
cuuaaucacgccgacuucu

SEQ ID NO: 1954830 - RNA, 19 nt, Artificial Sequence
  Description of Artificial Sequence: Synthetic oligonucleotide
  Sense strand starting at position 3707 of SEQ ID NO: 1880270
cuuaaagaguaguagaauu

SEQ ID NO: 1954831 - RNA, 19 nt, Artificial Sequence
  Description of Artificial Sequence: Synthetic oligonucleotide
  Antisense strand to SEQ ID NO: 1954830
aauucuacuacucuuuaag

SEQ ID NO: 1954832 - RNA, 19 nt, Artificial Sequence
  Description of Artificial Sequence: Synthetic oligonucleotide
  Sense strand starting at position 3721 of SEQ ID NO: 1880270
gaauuucucuagugugaga

SEQ ID NO: 1954833 - RNA, 19 nt, Artificial Sequence
  Description of Artificial Sequence: Synthetic oligonucleotide
  Antisense strand to SEQ ID NO: 1954832
ucucacacuagagaaauuc

SEQ ID NO: 1954834 - RNA, 19 nt, Artificial Sequence
  Description of Artificial Sequence: Synthetic oligonucleotide
  Sense strand starting at position 3737 of SEQ ID NO: 1880270
agaagaauauuccaggaaa

SEQ ID NO: 1954835 - RNA, 19 nt, Artificial Sequence
  Description of Artificial Sequence: Synthetic oligonucleotide
  Antisense strand to SEQ ID NO: 1954834
uuuccuggaauauucuucu

SEQ ID NO: 1954836 - RNA, 19 nt, Artificial Sequence
  Description of Artificial Sequence: Synthetic oligonucleotide
  Sense strand starting at position 3756 of SEQ ID NO: 1880270
agaggaacauuaugaguaa

SEQ ID NO: 1954837 - RNA, 19 nt, Artificial Sequence
  Description of Artificial Sequence: Synthetic oligonucleotide
  Antisense strand to SEQ ID NO: 1954836
uuacucauaauguuccucu

SEQ ID NO: 1954838 - RNA, 19 nt, Artificial Sequence
  Description of Artificial Sequence: Synthetic oligonucleotide
  Sense strand starting at position 3757 of SEQ ID NO: 1880270
gaggaacauuaugaguaaa

SEQ ID NO: 1954839 - RNA, 19 nt, Artificial Sequence
  Description of Artificial Sequence: Synthetic oligonucleotide
  Antisense strand to SEQ ID NO: 1954838
uuuacucauaauguuccuc

SEQ ID NO: 1954840 - RNA, 19 nt, Artificial Sequence
  Description of Artificial Sequence: Synthetic oligonucleotide
  Sense strand starting at position 3787 of SEQ ID NO: 1880270
augcaagugccagauaugu

SEQ ID NO: 1954841 - RNA, 19 nt, Artificial Sequence
  Description of Artificial Sequence: Synthetic oligonucleotide
  Antisense strand to SEQ ID NO: 1954840
acauaucuggcacuugcau

SEQ ID NO: 1954842 - RNA, 19 nt, Artificial Sequence
  Description of Artificial Sequence: Synthetic oligonucleotide
  Sense strand starting at position 3826 of SEQ ID NO: 1880270
aggauaaaguuccugagug

SEQ ID NO: 1954843 - RNA, 19 nt, Artificial Sequence
  Description of Artificial Sequence: Synthetic oligonucleotide
  Antisense strand to SEQ ID NO: 1954842
cacucaggaacuuuauccu

SEQ ID NO: 1954844 - RNA, 19 nt, Artificial Sequence
  Description of Artificial Sequence: Synthetic oligonucleotide
  Sense strand starting at position 217 of SEQ ID NO: 1880271
uuccuuguccuuugagaua

SEQ ID NO: 1954845 - RNA, 19 nt, Artificial Sequence
  Description of Artificial Sequence: Synthetic oligonucleotide
  Antisense strand to SEQ ID NO: 1954844
uaucucaaaggacaaggaa

SEQ ID NO: 1954846 - RNA, 19 nt, Artificial Sequence
  Description of Artificial Sequence: Synthetic oligonucleotide
  Sense strand starting at position 329 of SEQ ID NO: 1880271
acgugucuccaaggaauga

SEQ ID NO: 1954847 - RNA, 19 nt, Artificial Sequence
  Description of Artificial Sequence: Synthetic oligonucleotide
  Antisense strand to SEQ ID NO: 1954846
ucauuccuuggagacacgu

SEQ ID NO: 1954848 - RNA, 19 nt, Artificial Sequence
  Description of Artificial Sequence: Synthetic oligonucleotide
  Sense strand starting at position 330 of SEQ ID NO: 1880271
cgugucuccaaggaaugau

SEQ ID NO: 1954849 - RNA, 19 nt, Artificial Sequence
  Description of Artificial Sequence: Synthetic oligonucleotide
  Antisense strand to SEQ ID NO: 1954848
aucauuccuuggagacacg

SEQ ID NO: 1954850 - RNA, 19 nt, Artificial Sequence
  Description of Artificial Sequence: Synthetic oligonucleotide
  Sense strand starting at position 478 of SEQ ID NO: 1880271
uuuaaacuguccucuguga

SEQ ID NO: 1954851 - RNA, 19 nt, Artificial Sequence
  Description of Artificial Sequence: Synthetic oligonucleotide
  Antisense strand to SEQ ID NO: 1954850
ucacagaggacaguuuaaa

SEQ ID NO: 1954852 - RNA, 19 nt, Artificial Sequence
  Description of Artificial Sequence: Synthetic oligonucleotide
  Sense strand starting at position 534 of SEQ ID NO: 1880271
aagagaucuggcugcuaaa

SEQ ID NO: 1954853 - RNA, 19 nt, Artificial Sequence
  Description of Artificial Sequence: Synthetic oligonucleotide
  Antisense strand to SEQ ID NO: 1954852
uuuagcagccagaucucuu

SEQ ID NO: 1954854 - RNA, 19 nt, Artificial Sequence
  Description of Artificial Sequence: Synthetic oligonucleotide
  Sense strand starting at position 567 of SEQ ID NO: 1880271
aagauauaaggguggcuga

SEQ ID NO: 1954855 - RNA, 19 nt, Artificial Sequence
  Description of Artificial Sequence: Synthetic oligonucleotide
  Antisense strand to SEQ ID NO: 1954854
ucagccacccuuauaucuu

SEQ ID NO: 1954856 - RNA, 19 nt, Artificial Sequence
  Description of Artificial Sequence: Synthetic oligonucleotide
  Sense strand starting at position 641 of SEQ ID NO: 1880271
guaagaugugcacacucaa

SEQ ID NO: 1954857 - RNA, 19 nt, Artificial Sequence
  Description of Artificial Sequence: Synthetic oligonucleotide
  Antisense strand to SEQ ID NO: 1954856
uugagugugcacaucuuac

SEQ ID NO: 1954858 - RNA, 19 nt, Artificial Sequence
  Description of Artificial Sequence: Synthetic oligonucleotide
  Sense strand starting at position 733 of SEQ ID NO: 1880271
uccacucauguguaauguu

SEQ ID NO: 1954859 - RNA, 19 nt, Artificial Sequence
  Description of Artificial Sequence: Synthetic oligonucleotide
  Antisense strand to SEQ ID NO: 1954858
aacauuacacaugagugga

SEQ ID NO: 1954860 - RNA, 19 nt, Artificial Sequence
  Description of Artificial Sequence: Synthetic oligonucleotide
  Sense strand starting at position 789 of SEQ ID NO: 1880271
acgacucacuacucugaaa

SEQ ID NO: 1954861 - RNA, 19 nt, Artificial Sequence
  Description of Artificial Sequence: Synthetic oligonucleotide
  Antisense strand to SEQ ID NO: 1954860
uuucagaguagugagucgu

SEQ ID NO: 1954862 - RNA, 19 nt, Artificial Sequence
  Description of Artificial Sequence: Synthetic oligonucleotide
  Sense strand starting at position 974 of SEQ ID NO: 1880271
cuuagaaauguggaguguu

SEQ ID NO: 1954863 - RNA, 19 nt, Artificial Sequence
  Description of Artificial Sequence: Synthetic oligonucleotide
  Antisense strand to SEQ ID NO: 1954862
aacacuccacauuucuaag

SEQ ID NO: 1954864 - RNA, 19 nt, Artificial Sequence
  Description of Artificial Sequence: Synthetic oligonucleotide
  Sense strand starting at position 977 of SEQ ID NO: 1880271
agaaauguggaguguuaug

SEQ ID NO: 1954865 - RNA, 19 nt, Artificial Sequence
  Description of Artificial Sequence: Synthetic oligonucleotide
  Antisense strand to SEQ ID NO: 1954864
cauaacacuccacauuucu

SEQ ID NO: 1954866 - RNA, 19 nt, Artificial Sequence
  Description of Artificial Sequence: Synthetic oligonucleotide
  Sense strand starting at position 1214 of SEQ ID NO: 1880271
ggagauaucuggcugcaca

SEQ ID NO: 1954867 - RNA, 19 nt, Artificial Sequence
  Description of Artificial Sequence: Synthetic oligonucleotide
  Antisense strand to SEQ ID NO: 1954866
ugugcagccagauaucucc

SEQ ID NO: 1954868 - RNA, 19 nt, Artificial Sequence
  Description of Artificial Sequence: Synthetic oligonucleotide
  Sense strand starting at position 1215 of SEQ ID NO: 1880271
gagauaucuggcugcacag

SEQ ID NO: 1954869 - RNA, 19 nt, Artificial Sequence
  Description of Artificial Sequence: Synthetic oligonucleotide
  Antisense strand to SEQ ID NO: 1954868
cugugcagccagauaucuc

SEQ ID NO: 1954870 - RNA, 19 nt, Artificial Sequence
  Description of Artificial Sequence: Synthetic oligonucleotide
  Sense strand starting at position 1255 of SEQ ID NO: 1880271
acuguacacgaucaauuau

SEQ ID NO: 1954871 - RNA, 19 nt, Artificial Sequence
  Description of Artificial Sequence: Synthetic oligonucleotide
  Antisense strand to SEQ ID NO: 1954870
auaauugaucguguacagu

SEQ ID NO: 1954872 - RNA, 19 nt, Artificial Sequence
  Description of Artificial Sequence: Synthetic oligonucleotide
  Sense strand starting at position 1356 of SEQ ID NO: 1880271
ucacgacucucugcucaaa

SEQ ID NO: 1954873 - RNA, 19 nt, Artificial Sequence
  Description of Artificial Sequence: Synthetic oligonucleotide
  Antisense strand to SEQ ID NO: 1954872
uuugagcagagagucguga

SEQ ID NO: 1954874 - RNA, 19 nt, Artificial Sequence
  Description of Artificial Sequence: Synthetic oligonucleotide
  Sense strand starting at position 1358 of SEQ ID NO: 1880271
acgacucucugcucaaaua

SEQ ID NO: 1954875 - RNA, 19 nt, Artificial Sequence
  Description of Artificial Sequence: Synthetic oligonucleotide
  Antisense strand to SEQ ID NO: 1954874
uauuugagcagagagucgu

SEQ ID NO: 1954876 - RNA, 19 nt, Artificial Sequence
  Description of Artificial Sequence: Synthetic oligonucleotide
  Sense strand starting at position 1359 of SEQ ID NO: 1880271
cgacucucugcucaaauaa

SEQ ID NO: 1954877 - RNA, 19 nt, Artificial Sequence
  Description of Artificial Sequence: Synthetic oligonucleotide
  Antisense strand to SEQ ID NO: 1954876
uuauuugagcagagagucg

SEQ ID NO: 1954878 - RNA, 19 nt, Artificial Sequence
  Description of Artificial Sequence: Synthetic oligonucleotide
  Sense strand starting at position 2201 of SEQ ID NO: 1880271
auguccauuuaugaguaau

SEQ ID NO: 1954879 - RNA, 19 nt, Artificial Sequence
  Description of Artificial Sequence: Synthetic oligonucleotide
  Antisense strand to SEQ ID NO: 1954878
auuacucauaaauggacau

SEQ ID NO: 1954880 - RNA, 19 nt, Artificial Sequence
  Description of Artificial Sequence: Synthetic oligonucleotide
  Sense strand starting at position 2335 of SEQ ID NO: 1880271
cuugcuucuagugggauua

SEQ ID NO: 1954881 - RNA, 19 nt, Artificial Sequence
  Description of Artificial Sequence: Synthetic oligonucleotide
  Antisense strand to SEQ ID NO: 1954880
uaaucccacuagaagcaag

SEQ ID NO: 1954882 - RNA, 19 nt, Artificial Sequence
  Description of Artificial Sequence: Synthetic oligonucleotide
  Sense strand starting at position 2425 of SEQ ID NO: 1880271
gcguguguuccaguagcaa

SEQ ID NO: 1954883 - RNA, 19 nt, Artificial Sequence
  Description of Artificial Sequence: Synthetic oligonucleotide
  Antisense strand to SEQ ID NO: 1954882
uugcuacuggaacacacgc

SEQ ID NO: 1954884 - RNA, 19 nt, Artificial Sequence
  Description of Artificial Sequence: Synthetic oligonucleotide
  Sense strand starting at position 2460 of SEQ ID NO: 1880271
acgugaaauugauuacaau

SEQ ID NO: 1954885 - RNA, 19 nt, Artificial Sequence
  Description of Artificial Sequence: Synthetic oligonucleotide
  Antisense strand to SEQ ID NO: 1954884
auuguaaucaauuucacgu

SEQ ID NO: 1954886 - RNA, 19 nt, Artificial Sequence
  Description of Artificial Sequence: Synthetic oligonucleotide
  Sense strand starting at position 2514 of SEQ ID NO: 1880271
ucaauauaugaucgauguu

SEQ ID NO: 1954887 - RNA, 19 nt, Artificial Sequence
  Description of Artificial Sequence: Synthetic oligonucleotide
  Antisense strand to SEQ ID NO: 1954886
aacaucgaucauauauuga

SEQ ID NO: 1954888 - RNA, 19 nt, Artificial Sequence
  Description of Artificial Sequence: Synthetic oligonucleotide
  Sense strand starting at position 2517 of SEQ ID NO: 1880271
auauaugaucgauguuaag

SEQ ID NO: 1954889 - RNA, 19 nt, Artificial Sequence
  Description of Artificial Sequence: Synthetic oligonucleotide
  Antisense strand to SEQ ID NO: 1954888
cuuaacaucgaucauauau

SEQ ID NO: 1954890 - RNA, 19 nt, Artificial Sequence
  Description of Artificial Sequence: Synthetic oligonucleotide
  Sense strand starting at position 2529 of SEQ ID NO: 1880271
uguuaagcucgcgccuaau

SEQ ID NO: 1954891 - RNA, 19 nt, Artificial Sequence
  Description of Artificial Sequence: Synthetic oligonucleotide
  Antisense strand to SEQ ID NO: 1954890
auuaggcgcgagcuuaaca

SEQ ID NO: 1954892 - RNA, 19 nt, Artificial Sequence
  Description of Artificial Sequence: Synthetic oligonucleotide
  Sense strand starting at position 2540 of SEQ ID NO: 1880271
cgccuaauugaagagacua

SEQ ID NO: 1954893 - RNA, 19 nt, Artificial Sequence
  Description of Artificial Sequence: Synthetic oligonucleotide
  Antisense strand to SEQ ID NO: 1954892
uagucucuucaauuaggcg

SEQ ID NO: 1954894 - RNA, 19 nt, Artificial Sequence
  Description of Artificial Sequence: Synthetic oligonucleotide
  Sense strand starting at position 2643 of SEQ ID NO: 1880271
ggucgugggauuggaguua

SEQ ID NO: 1954895 - RNA, 19 nt, Artificial Sequence
  Description of Artificial Sequence: Synthetic oligonucleotide
  Antisense strand to SEQ ID NO: 1954894
uaacuccaaucccacgacc

SEQ ID NO: 1954896 - RNA, 19 nt, Artificial Sequence
  Description of Artificial Sequence: Synthetic oligonucleotide
  Sense strand starting at position 2769 of SEQ ID NO: 1880271
gugucacuaggcugauuga

SEQ ID NO: 1954897 - RNA, 19 nt, Artificial Sequence
  Description of Artificial Sequence: Synthetic oligonucleotide
  Antisense strand to SEQ ID NO: 1954896
ucaaucagccuagugacac

SEQ ID NO: 1954898 - RNA, 19 nt, Artificial Sequence
  Description of Artificial Sequence: Synthetic oligonucleotide
  Sense strand starting at position 2770 of SEQ ID NO: 1880271
ugucacuaggcugauugau

SEQ ID NO: 1954899 - RNA, 19 nt, Artificial Sequence
  Description of Artificial Sequence: Synthetic oligonucleotide
  Antisense strand to SEQ ID NO: 1954898
aucaaucagccuagugaca

SEQ ID NO: 1954900 - RNA, 19 nt, Artificial Sequence
  Description of Artificial Sequence: Synthetic oligonucleotide
  Sense strand starting at position 2772 of SEQ ID NO: 1880271
ucacuaggcugauugauca

SEQ ID NO: 1954901 - RNA, 19 nt, Artificial Sequence
  Description of Artificial Sequence: Synthetic oligonucleotide
  Antisense strand to SEQ ID NO: 1954900
ugaucaaucagccuaguga

SEQ ID NO: 1954902 - RNA, 19 nt, Artificial Sequence
  Description of Artificial Sequence: Synthetic oligonucleotide
  Sense strand starting at position 2776 of SEQ ID NO: 1880271
uaggcugauugaucaguua

SEQ ID NO: 1954903 - RNA, 19 nt, Artificial Sequence
  Description of Artificial Sequence: Synthetic oligonucleotide
  Antisense strand to SEQ ID NO: 1954902
uaacugaucaaucagccua

SEQ ID NO: 1954904 - RNA, 19 nt, Artificial Sequence
  Description of Artificial Sequence: Synthetic oligonucleotide
  Sense strand starting at position 2944 of SEQ ID NO: 1880271
aucacaauggcuugaccau

SEQ ID NO: 1954905 - RNA, 19 nt, Artificial Sequence
  Description of Artificial Sequence: Synthetic oligonucleotide
  Antisense strand to SEQ ID NO: 1954904
auggucaagccauugugau

SEQ ID NO: 1954906 - RNA, 19 nt, Artificial Sequence
  Description of Artificial Sequence: Synthetic oligonucleotide
  Sense strand starting at position 2980 of SEQ ID NO: 1880271
cggccuuacaaucgauaua

SEQ ID NO: 1954907 - RNA, 19 nt, Artificial Sequence
  Description of Artificial Sequence: Synthetic oligonucleotide
  Antisense strand to SEQ ID NO: 1954906
uauaucgauuguaaggccg

SEQ ID NO: 1954908 - RNA, 19 nt, Artificial Sequence
  Description of Artificial Sequence: Synthetic oligonucleotide
  Sense strand starting at position 3169 of SEQ ID NO: 1880271
ucacuuaucucagugagag

SEQ ID NO: 1954909 - RNA, 19 nt, Artificial Sequence
  Description of Artificial Sequence: Synthetic oligonucleotide
  Antisense strand to SEQ ID NO: 1954908
cucucacugagauaaguga

SEQ ID NO: 1954910 - RNA, 19 nt, Artificial Sequence
  Description of Artificial Sequence: Synthetic oligonucleotide
  Sense strand starting at position 3170 of SEQ ID NO: 1880271
cacuuaucucagugagagu

SEQ ID NO: 1954911 - RNA, 19 nt, Artificial Sequence
  Description of Artificial Sequence: Synthetic oligonucleotide
  Antisense strand to SEQ ID NO: 1954910
acucucacugagauaagug

SEQ ID NO: 1954912 - RNA, 19 nt, Artificial Sequence
  Description of Artificial Sequence: Synthetic oligonucleotide
  Sense strand starting at position 3177 of SEQ ID NO: 1880271
cucagugagaguugccaaa

SEQ ID NO: 1954913 - RNA, 19 nt, Artificial Sequence
  Description of Artificial Sequence: Synthetic oligonucleotide
  Antisense strand to SEQ ID NO: 1954912
uuuggcaacucucacugag

SEQ ID NO: 1954914 - RNA, 19 nt, Artificial Sequence
  Description of Artificial Sequence: Synthetic oligonucleotide
  Sense strand starting at position 3179 of SEQ ID NO: 1880271
cagugagaguugccaaaua

SEQ ID NO: 1954915 - RNA, 19 nt, Artificial Sequence
  Description of Artificial Sequence: Synthetic oligonucleotide
  Antisense strand to SEQ ID NO: 1954914
uauuuggcaacucucacug

SEQ ID NO: 1954916 - RNA, 19 nt, Artificial Sequence
  Description of Artificial Sequence: Synthetic oligonucleotide
  Sense strand starting at position 3223 of SEQ ID NO: 1880271
agguauuaguucucauucu

SEQ ID NO: 1954917 - RNA, 19 nt, Artificial Sequence
  Description of Artificial Sequence: Synthetic oligonucleotide
  Antisense strand to SEQ ID NO: 1954916
agaaugagaacuaauaccu

SEQ ID NO: 1954918 - RNA, 19 nt, Artificial Sequence
  Description of Artificial Sequence: Synthetic oligonucleotide
  Sense strand starting at position 3415 of SEQ ID NO: 1880271
uguauuuaaugagauucca

SEQ ID NO: 1954919 - RNA, 19 nt, Artificial Sequence
  Description of Artificial Sequence: Synthetic oligonucleotide
  Antisense strand to SEQ ID NO: 1954918
uggaaucucauuaaauaca

SEQ ID NO: 1954920 - RNA, 19 nt, Artificial Sequence
  Description of Artificial Sequence: Synthetic oligonucleotide
  Sense strand starting at position 3825 of SEQ ID NO: 1880271
guccuuguaccauauguuu

SEQ ID NO: 1954921 - RNA, 19 nt, Artificial Sequence
  Description of Artificial Sequence: Synthetic oligonucleotide
  Antisense strand to SEQ ID NO: 1954920
aaacauaugguacaaggac

SEQ ID NO: 1954922 - RNA, 19 nt, Artificial Sequence
  Description of Artificial Sequence: Synthetic oligonucleotide
  Sense strand starting at position 3946 of SEQ ID NO: 1880271
uggcuuauggcguuuccua

SEQ ID NO: 1954923 - RNA, 19 nt, Artificial Sequence
  Description of Artificial Sequence: Synthetic oligonucleotide
  Antisense strand to SEQ ID NO: 1954922
uaggaaacgccauaagcca

SEQ ID NO: 1954924 - RNA, 19 nt, Artificial Sequence
  Description of Artificial Sequence: Synthetic oligonucleotide
  Sense strand starting at position 90 of SEQ ID NO: 1880272
gagcuaugacaaugucacu

SEQ ID NO: 1954925 - RNA, 19 nt, Artificial Sequence
  Description of Artificial Sequence: Synthetic oligonucleotide
  Antisense strand to SEQ ID NO: 1954924
agugacauugucauagcuc

SEQ ID NO: 1954926 - RNA, 19 nt, Artificial Sequence
  Description of Artificial Sequence: Synthetic oligonucleotide
  Sense strand starting at position 131 of SEQ ID NO: 1880272
agagcaagauccucuuaaa

SEQ ID NO: 1954927 - RNA, 19 nt, Artificial Sequence
  Description of Artificial Sequence: Synthetic oligonucleotide
  Antisense strand to SEQ ID NO: 1954926
uuuaagaggaucuugcucu

SEQ ID NO: 1954928 - RNA, 19 nt, Artificial Sequence
  Description of Artificial Sequence: Synthetic oligonucleotide
  Sense strand starting at position 757 of SEQ ID NO: 1880272
cgagacuccuucuuaaaga

SEQ ID NO: 1954929 - RNA, 19 nt, Artificial Sequence
  Description of Artificial Sequence: Synthetic oligonucleotide
  Antisense strand to SEQ ID NO: 1954928
ucuuuaagaaggagucucg

SEQ ID NO: 1954930 - RNA, 19 nt, Artificial Sequence
  Description of Artificial Sequence: Synthetic oligonucleotide
  Sense strand starting at position 813 of SEQ ID NO: 1880272
aagagugcccuccaauguu

SEQ ID NO: 1954931 - RNA, 19 nt, Artificial Sequence
  Description of Artificial Sequence: Synthetic oligonucleotide
  Antisense strand to SEQ ID NO: 1954930
aacauuggagggcacucuu

SEQ ID NO: 1954932 - RNA, 19 nt, Artificial Sequence
  Description of Artificial Sequence: Synthetic oligonucleotide
  Sense strand starting at position 853 of SEQ ID NO: 1880272
aaauauugugccuggagua

SEQ ID NO: 1954933 - RNA, 19 nt, Artificial Sequence
  Description of Artificial Sequence: Synthetic oligonucleotide
  Antisense strand to SEQ ID NO: 1954932
uacuccaggcacaauauuu

SEQ ID NO: 1954934 - RNA, 19 nt, Artificial Sequence
  Description of Artificial Sequence: Synthetic oligonucleotide
  Sense strand starting at position 854 of SEQ ID NO: 1880272
aauauugugccuggaguac

SEQ ID NO: 1954935 - RNA, 19 nt, Artificial Sequence
  Description of Artificial Sequence: Synthetic oligonucleotide
  Antisense strand to SEQ ID NO: 1954934
guacuccaggcacaauauu

SEQ ID NO: 1954936 - RNA, 19 nt, Artificial Sequence
  Description of Artificial Sequence: Synthetic oligonucleotide
  Sense strand starting at position 896 of SEQ ID NO: 1880272
aguguugugaacugaagag

SEQ ID NO: 1954937 - RNA, 19 nt, Artificial Sequence
  Description of Artificial Sequence: Synthetic oligonucleotide
  Antisense strand to SEQ ID NO: 1954936
cucuucaguucacaacacu

SEQ ID NO: 1954938 - RNA, 19 nt, Artificial Sequence
  Description of Artificial Sequence: Synthetic oligonucleotide
  Sense strand starting at position 1054 of SEQ ID NO: 1880272
gucucuugugcaguguuaa

SEQ ID NO: 1954939 - RNA, 19 nt, Artificial Sequence
  Description of Artificial Sequence: Synthetic oligonucleotide
  Antisense strand to SEQ ID NO: 1954938
uuaacacugcacaagagac

SEQ ID NO: 1954940 - RNA, 19 nt, Artificial Sequence
  Description of Artificial Sequence: Synthetic oligonucleotide
  Sense strand starting at position 1107 of SEQ ID NO: 1880272
agugucuugcguuucuaca

SEQ ID NO: 1954941 - RNA, 19 nt, Artificial Sequence
  Description of Artificial Sequence: Synthetic oligonucleotide
  Antisense strand to SEQ ID NO: 1954940
uguagaaacgcaagacacu

SEQ ID NO: 1954942 - RNA, 19 nt, Artificial Sequence
  Description of Artificial Sequence: Synthetic oligonucleotide
  Sense strand starting at position 1108 of SEQ ID NO: 1880272
gugucuugcguuucuacau

SEQ ID NO: 1954943 - RNA, 19 nt, Artificial Sequence
  Description of Artificial Sequence: Synthetic oligonucleotide
  Antisense strand to SEQ ID NO: 1954942
auguagaaacgcaagacac

SEQ ID NO: 1954944 - RNA, 19 nt, Artificial Sequence
  Description of Artificial Sequence: Synthetic oligonucleotide
  Sense strand starting at position 1158 of SEQ ID NO: 1880272
cuuguuaaugacugccuua

SEQ ID NO: 1954945 - RNA, 19 nt, Artificial Sequence
  Description of Artificial Sequence: Synthetic oligonucleotide
  Antisense strand to SEQ ID NO: 1954944
uaaggcagucauuaacaag

SEQ ID NO: 1954946 - RNA, 19 nt, Artificial Sequence
  Description of Artificial Sequence: Synthetic oligonucleotide
  Sense strand starting at position 1161 of SEQ ID NO: 1880272
guuaaugacugccuuaagu

SEQ ID NO: 1954947 - RNA, 19 nt, Artificial Sequence
  Description of Artificial Sequence: Synthetic oligonucleotide
  Antisense strand to SEQ ID NO: 1954946
acuuaaggcagucauuaac

SEQ ID NO: 1954948 - RNA, 19 nt, Artificial Sequence
  Description of Artificial Sequence: Synthetic oligonucleotide
  Sense strand starting at position 1163 of SEQ ID NO: 1880272
uaaugacugccuuaaguag

SEQ ID NO: 1954949 - RNA, 19 nt, Artificial Sequence
  Description of Artificial Sequence: Synthetic oligonucleotide
  Antisense strand to SEQ ID NO: 1954948
cuacuuaaggcagucauua

SEQ ID NO: 1954950 - RNA, 19 nt, Artificial Sequence
  Description of Artificial Sequence: Synthetic oligonucleotide
  Sense strand starting at position 1169 of SEQ ID NO: 1880272
cugccuuaaguagaaacaa

SEQ ID NO: 1954951 - RNA, 19 nt, Artificial Sequence
  Description of Artificial Sequence: Synthetic oligonucleotide
  Antisense strand to SEQ ID NO: 1954950
uuguuucuacuuaaggcag

SEQ ID NO: 1954952 - RNA, 19 nt, Artificial Sequence
  Description of Artificial Sequence: Synthetic oligonucleotide
  Sense strand starting at position 1264 of SEQ ID NO: 1880272
aaauaaggugacuguaacu

SEQ ID NO: 1954953 - RNA, 19 nt, Artificial Sequence
  Description of Artificial Sequence: Synthetic oligonucleotide
  Antisense strand to SEQ ID NO: 1954952
aguuacagucaccuuauuu

SEQ ID NO: 1954954 - RNA, 19 nt, Artificial Sequence
  Description of Artificial Sequence: Synthetic oligonucleotide
  Sense strand starting at position 1275 of SEQ ID NO: 1880272
cuguaacugucgucaauua

SEQ ID NO: 1954955 - RNA, 19 nt, Artificial Sequence
  Description of Artificial Sequence: Synthetic oligonucleotide
  Antisense strand to SEQ ID NO: 1954954
uaauugacgacaguuacag

SEQ ID NO: 1954956 - RNA, 19 nt, Artificial Sequence
  Description of Artificial Sequence: Synthetic oligonucleotide
  Sense strand starting at position 1276 of SEQ ID NO: 1880272
uguaacugucgucaauuau

SEQ ID NO: 1954957 - RNA, 19 nt, Artificial Sequence
  Description of Artificial Sequence: Synthetic oligonucleotide
  Antisense strand to SEQ ID NO: 1954956
auaauugacgacaguuaca

SEQ ID NO: 1954958 - RNA, 19 nt, Artificial Sequence
  Description of Artificial Sequence: Synthetic oligonucleotide
  Sense strand starting at position 2030 of SEQ ID NO: 1880272
gucaaugucccugauugga

SEQ ID NO: 1954959 - RNA, 19 nt, Artificial Sequence
  Description of Artificial Sequence: Synthetic oligonucleotide
  Antisense strand to SEQ ID NO: 1954958
uccaaucagggacauugac

SEQ ID NO: 1954960 - RNA, 19 nt, Artificial Sequence
  Description of Artificial Sequence: Synthetic oligonucleotide
  Sense strand starting at position 2032 of SEQ ID NO: 1880272
caaugucccugauuggaca

SEQ ID NO: 1954961 - RNA, 19 nt, Artificial Sequence
  Description of Artificial Sequence: Synthetic oligonucleotide
  Antisense strand to SEQ ID NO: 1954960
uguccaaucagggacauug

SEQ ID NO: 1954962 - RNA, 19 nt, Artificial Sequence
  Description of Artificial Sequence: Synthetic oligonucleotide
  Sense strand starting at position 2065 of SEQ ID NO: 1880272
gccuccuuugguuaugagu

SEQ ID NO: 1954963 - RNA, 19 nt, Artificial Sequence
  Description of Artificial Sequence: Synthetic oligonucleotide
  Antisense strand to SEQ ID NO: 1954962
acucauaaccaaaggaggc

SEQ ID NO: 1954964 - RNA, 19 nt, Artificial Sequence
  Description of Artificial Sequence: Synthetic oligonucleotide
  Sense strand starting at position 2227 of SEQ ID NO: 1880272
ucuguuccugagugucuaa

SEQ ID NO: 1954965 - RNA, 19 nt, Artificial Sequence
  Description of Artificial Sequence: Synthetic oligonucleotide
  Antisense strand to SEQ ID NO: 1954964
uuagacacucaggaacaga

SEQ ID NO: 1954966 - RNA, 19 nt, Artificial Sequence
  Description of Artificial Sequence: Synthetic oligonucleotide
  Sense strand starting at position 2230 of SEQ ID NO: 1880272
guuccugagugucuaaaca

SEQ ID NO: 1954967 - RNA, 19 nt, Artificial Sequence
  Description of Artificial Sequence: Synthetic oligonucleotide
  Antisense strand to SEQ ID NO: 1954966
uguuuagacacucaggaac

SEQ ID NO: 1954968 - RNA, 19 nt, Artificial Sequence
  Description of Artificial Sequence: Synthetic oligonucleotide
  Sense strand starting at position 2258 of SEQ ID NO: 1880272
ucaucuucuguuggagaaa

SEQ ID NO: 1954969 - RNA, 19 nt, Artificial Sequence
  Description of Artificial Sequence: Synthetic oligonucleotide
  Antisense strand to SEQ ID NO: 1954968
uuucuccaacagaagauga

SEQ ID NO: 1954970 - RNA, 19 nt, Artificial Sequence
  Description of Artificial Sequence: Synthetic oligonucleotide
  Sense strand starting at position 2380 of SEQ ID NO: 1880272
guggaacuguccuugcaag

SEQ ID NO: 1954971 - RNA, 19 nt, Artificial Sequence
  Description of Artificial Sequence: Synthetic oligonucleotide
  Antisense strand to SEQ ID NO: 1954970
cuugcaaggacaguuccac

SEQ ID NO: 1954972 - RNA, 19 nt, Artificial Sequence
  Description of Artificial Sequence: Synthetic oligonucleotide
  Sense strand starting at position 2431 of SEQ ID NO: 1880272
auguguuucugaccaaagg

SEQ ID NO: 1954973 - RNA, 19 nt, Artificial Sequence
  Description of Artificial Sequence: Synthetic oligonucleotide
  Antisense strand to SEQ ID NO: 1954972
ccuuuggucagaaacacau

SEQ ID NO: 1954974 - RNA, 19 nt, Artificial Sequence
  Description of Artificial Sequence: Synthetic oligonucleotide
  Sense strand starting at position 2625 of SEQ ID NO: 1880272
agacuaaaguugcccugau

SEQ ID NO: 1954975 - RNA, 19 nt, Artificial Sequence
  Description of Artificial Sequence: Synthetic oligonucleotide
  Antisense strand to SEQ ID NO: 1954974
aucagggcaacuuuagucu

SEQ ID NO: 1954976 - RNA, 19 nt, Artificial Sequence
  Description of Artificial Sequence: Synthetic oligonucleotide
  Sense strand starting at position 2626 of SEQ ID NO: 1880272
gacuaaaguugcccugauu

SEQ ID NO: 1954977 - RNA, 19 nt, Artificial Sequence
  Description of Artificial Sequence: Synthetic oligonucleotide
  Antisense strand to SEQ ID NO: 1954976
aaucagggcaacuuuaguc

SEQ ID NO: 1954978 - RNA, 19 nt, Artificial Sequence
  Description of Artificial Sequence: Synthetic oligonucleotide
  Sense strand starting at position 2632 of SEQ ID NO: 1880272
aguugcccugauuauacau

SEQ ID NO: 1954979 - RNA, 19 nt, Artificial Sequence
  Description of Artificial Sequence: Synthetic oligonucleotide
  Antisense strand to SEQ ID NO: 1954978
auguauaaucagggcaacu

SEQ ID NO: 1954980 - RNA, 19 nt, Artificial Sequence
  Description of Artificial Sequence: Synthetic oligonucleotide
  Sense strand starting at position 2781 of SEQ ID NO: 1880272
ugagacagcuaguuaggaa

SEQ ID NO: 1954981 - RNA, 19 nt, Artificial Sequence
  Description of Artificial Sequence: Synthetic oligonucleotide
  Antisense strand to SEQ ID NO: 1954980
uuccuaacuagcugucuca

SEQ ID NO: 1954982 - RNA, 19 nt, Artificial Sequence
  Description of Artificial Sequence: Synthetic oligonucleotide
  Sense strand starting at position 2929 of SEQ ID NO: 1880272
uucuuaucuccauagucag

SEQ ID NO: 1954983 - RNA, 19 nt, Artificial Sequence
  Description of Artificial Sequence: Synthetic oligonucleotide
  Antisense strand to SEQ ID NO: 1954982
cugacuauggagauaagaa

SEQ ID NO: 1954984 - RNA, 19 nt, Artificial Sequence
  Description of Artificial Sequence: Synthetic oligonucleotide
  Sense strand starting at position 2936 of SEQ ID NO: 1880272
cuccauagucaguacacuu

SEQ ID NO: 1954985 - RNA, 19 nt, Artificial Sequence
  Description of Artificial Sequence: Synthetic oligonucleotide
  Antisense strand to SEQ ID NO: 1954984
aaguguacugacuauggag

SEQ ID NO: 1954986 - RNA, 19 nt, Artificial Sequence
  Description of Artificial Sequence: Synthetic oligonucleotide
  Sense strand starting at position 3003 of SEQ ID NO: 1880272
ggaauaauggccugucagu

SEQ ID NO: 1954987 - RNA, 19 nt, Artificial Sequence
  Description of Artificial Sequence: Synthetic oligonucleotide
  Antisense strand to SEQ ID NO: 1954986
acugacaggccauuauucc

SEQ ID NO: 1954988 - RNA, 19 nt, Artificial Sequence
  Description of Artificial Sequence: Synthetic oligonucleotide
  Sense strand starting at position 3030 of SEQ ID NO: 1880272
ggaagcugauugucacuuu

SEQ ID NO: 1954989 - RNA, 19 nt, Artificial Sequence
  Description of Artificial Sequence: Synthetic oligonucleotide
  Antisense strand to SEQ ID NO: 1954988
aaagugacaaucagcuucc

SEQ ID NO: 1954990 - RNA, 19 nt, Artificial Sequence
  Description of Artificial Sequence: Synthetic oligonucleotide
  Sense strand starting at position 3267 of SEQ ID NO: 1880272
ggcagagugagucaggauu

SEQ ID NO: 1954991 - RNA, 19 nt, Artificial Sequence
  Description of Artificial Sequence: Synthetic oligonucleotide
  Antisense strand to SEQ ID NO: 1954990
aauccugacucacucugcc

SEQ ID NO: 1954992 - RNA, 19 nt, Artificial Sequence
  Description of Artificial Sequence: Synthetic oligonucleotide
  Sense strand starting at position 3273 of SEQ ID NO: 1880272
gugagucaggauugagaga

SEQ ID NO: 1954993 - RNA, 19 nt, Artificial Sequence
  Description of Artificial Sequence: Synthetic oligonucleotide
  Antisense strand to SEQ ID NO: 1954992
ucucucaauccugacucac

SEQ ID NO: 1954994 - RNA, 19 nt, Artificial Sequence
  Description of Artificial Sequence: Synthetic oligonucleotide
  Sense strand starting at position 3389 of SEQ ID NO: 1880272
gggaguguucugcuccggu

SEQ ID NO: 1954995 - RNA, 19 nt, Artificial Sequence
  Description of Artificial Sequence: Synthetic oligonucleotide
  Antisense strand to SEQ ID NO: 1954994
accggagcagaacacuccc

SEQ ID NO: 1954996 - RNA, 19 nt, Artificial Sequence
  Description of Artificial Sequence: Synthetic oligonucleotide
  Sense strand starting at position 3534 of SEQ ID NO: 1880272
uuugguggugcguuucaua

SEQ ID NO: 1954997 - RNA, 19 nt, Artificial Sequence
  Description of Artificial Sequence: Synthetic oligonucleotide
  Antisense strand to SEQ ID NO: 1954996
uaugaaacgcaccaccaaa

SEQ ID NO: 1954998 - RNA, 19 nt, Artificial Sequence
  Description of Artificial Sequence: Synthetic oligonucleotide
  Sense strand starting at position 3683 of SEQ ID NO: 1880272
ucguguccuccggaaugga

SEQ ID NO: 1954999 - RNA, 19 nt, Artificial Sequence
  Description of Artificial Sequence: Synthetic oligonucleotide
  Antisense strand to SEQ ID NO: 1954998
uccauuccggaggacacga

SEQ ID NO: 1955000 - RNA, 19 nt, Artificial Sequence
  Description of Artificial Sequence: Synthetic oligonucleotide
  Sense strand starting at position 3887 of SEQ ID NO: 1880272
ggcgcuggaugagugaauu

SEQ ID NO: 1955001 - RNA, 19 nt, Artificial Sequence
  Description of Artificial Sequence: Synthetic oligonucleotide
  Antisense strand to SEQ ID NO: 1955000
aauucacucauccagcgcc

SEQ ID NO: 1955002 - RNA, 19 nt, Artificial Sequence
  Description of Artificial Sequence: Synthetic oligonucleotide
  Sense strand starting at position 3902 of SEQ ID NO: 1880272
aauuaaauucccugggcgu

SEQ ID NO: 1955003 - RNA, 19 nt, Artificial Sequence
  Description of Artificial Sequence: Synthetic oligonucleotide
  Antisense strand to SEQ ID NO: 1955002
acgcccagggaauuuaauu

SEQ ID NO: 1955004 - RNA, 19 nt, Artificial Sequence
  Description of Artificial Sequence: Synthetic oligonucleotide
  Sense strand starting at position 560 of SEQ ID NO: 1880273
ugauaauguuguguuugga

SEQ ID NO: 1955005 - RNA, 19 nt, Artificial Sequence
  Description of Artificial Sequence: Synthetic oligonucleotide
  Antisense strand to SEQ ID NO: 1955004
uccaaacacaacauuauca

SEQ ID NO: 1955006 - RNA, 19 nt, Artificial Sequence
  Description of Artificial Sequence: Synthetic oligonucleotide
  Sense strand starting at position 563 of SEQ ID NO: 1880273
uaauguuguguuuggagag

SEQ ID NO: 1955007 - RNA, 19 nt, Artificial Sequence
  Description of Artificial Sequence: Synthetic oligonucleotide
  Antisense strand to SEQ ID NO: 1955006
cucuccaaacacaacauua

SEQ ID NO: 1955008 - RNA, 19 nt, Artificial Sequence
  Description of Artificial Sequence: Synthetic oligonucleotide
  Sense strand starting at position 564 of SEQ ID NO: 1880273
aauguuguguuuggagaga

SEQ ID NO: 1955009 - RNA, 19 nt, Artificial Sequence
  Description of Artificial Sequence: Synthetic oligonucleotide
  Antisense strand to SEQ ID NO: 1955008
ucucuccaaacacaacauu

SEQ ID NO: 1955010 - RNA, 19 nt, Artificial Sequence
  Description of Artificial Sequence: Synthetic oligonucleotide
  Sense strand starting at position 587 of SEQ ID NO: 1880273
guuagcauuugggaaugua

SEQ ID NO: 1955011 - RNA, 19 nt, Artificial Sequence
  Description of Artificial Sequence: Synthetic oligonucleotide
  Antisense strand to SEQ ID NO: 1955010
uacauucccaaaugcuaac

SEQ ID NO: 1955012 - RNA, 19 nt, Artificial Sequence
  Description of Artificial Sequence: Synthetic oligonucleotide
  Sense strand starting at position 677 of SEQ ID NO: 1880273
ugagguccugcuugccaua

SEQ ID NO: 1955013 - RNA, 19 nt, Artificial Sequence
  Description of Artificial Sequence: Synthetic oligonucleotide
  Antisense strand to SEQ ID NO: 1955012
uauggcaagcaggaccuca

SEQ ID NO: 1955014 - RNA, 19 nt, Artificial Sequence
  Description of Artificial Sequence: Synthetic oligonucleotide
  Sense strand starting at position 728 of SEQ ID NO: 1880273
uguggaguguuagaauacu

SEQ ID NO: 1955015 - RNA, 19 nt, Artificial Sequence
  Description of Artificial Sequence: Synthetic oligonucleotide
  Antisense strand to SEQ ID NO: 1955014
aguauucuaacacuccaca

SEQ ID NO: 1955016 - RNA, 19 nt, Artificial Sequence
  Description of Artificial Sequence: Synthetic oligonucleotide
  Sense strand starting at position 734 of SEQ ID NO: 1880273
guguuagaauacuuaaaug

SEQ ID NO: 1955017 - RNA, 19 nt, Artificial Sequence
  Description of Artificial Sequence: Synthetic oligonucleotide
  Antisense strand to SEQ ID NO: 1955016
cauuuaaguauucuaacac

SEQ ID NO: 1955018 - RNA, 19 nt, Artificial Sequence
  Description of Artificial Sequence: Synthetic oligonucleotide
  Sense strand starting at position 742 of SEQ ID NO: 1880273
auacuuaaauggcagacaa

SEQ ID NO: 1955019 - RNA, 19 nt, Artificial Sequence
  Description of Artificial Sequence: Synthetic oligonucleotide
  Antisense strand to SEQ ID NO: 1955018
uugucugccauuuaaguau

SEQ ID NO: 1955020 - RNA, 19 nt, Artificial Sequence
  Description of Artificial Sequence: Synthetic oligonucleotide
  Sense strand starting at position 774 of SEQ ID NO: 1880273
cuuugauguccugggauuc

SEQ ID NO: 1955021 - RNA, 19 nt, Artificial Sequence
  Description of Artificial Sequence: Synthetic oligonucleotide
  Antisense strand to SEQ ID NO: 1955020
gaaucccaggacaucaaag

SEQ ID NO: 1955022 - RNA, 19 nt, Artificial Sequence
  Description of Artificial Sequence: Synthetic oligonucleotide
  Sense strand starting at position 775 of SEQ ID NO: 1880273
uuugauguccugggauucu

SEQ ID NO: 1955023 - RNA, 19 nt, Artificial Sequence
  Description of Artificial Sequence: Synthetic oligonucleotide
  Antisense strand to SEQ ID NO: 1955022
agaaucccaggacaucaaa

SEQ ID NO: 1955024 - RNA, 19 nt, Artificial Sequence
  Description of Artificial Sequence: Synthetic oligonucleotide
  Sense strand starting at position 806 of SEQ ID NO: 1880273
cuagcuaacuuagaugaau

SEQ ID NO: 1955025 - RNA, 19 nt, Artificial Sequence
  Description of Artificial Sequence: Synthetic oligonucleotide
  Antisense strand to SEQ ID NO: 1955024
auucaucuaaguuagcuag

SEQ ID NO: 1955026 - RNA, 19 nt, Artificial Sequence
  Description of Artificial Sequence: Synthetic oligonucleotide
  Sense strand starting at position 951 of SEQ ID NO: 1880273
auggcaaccgaucaauuau

SEQ ID NO: 1955027 - RNA, 19 nt, Artificial Sequence
  Description of Artificial Sequence: Synthetic oligonucleotide
  Antisense strand to SEQ ID NO: 1955026
auaauugaucgguugccau

SEQ ID NO: 1955028 - RNA, 19 nt, Artificial Sequence
  Description of Artificial Sequence: Synthetic oligonucleotide
  Sense strand starting at position 1056 of SEQ ID NO: 1880273
aaaucacuguuugcuggaa

SEQ ID NO: 1955029 - RNA, 19 nt, Artificial Sequence
  Description of Artificial Sequence: Synthetic oligonucleotide
  Antisense strand to SEQ ID NO: 1955028
uuccagcaaacagugauuu

SEQ ID NO: 1955030 - RNA, 19 nt, Artificial Sequence
  Description of Artificial Sequence: Synthetic oligonucleotide
  Sense strand starting at position 1219 of SEQ ID NO: 1880273
uggugaaaucuccguuucu

SEQ ID NO: 1955031 - RNA, 19 nt, Artificial Sequence
  Description of Artificial Sequence: Synthetic oligonucleotide
  Antisense strand to SEQ ID NO: 1955030
agaaacggagauuucacca

SEQ ID NO: 1955032 - RNA, 19 nt, Artificial Sequence
  Description of Artificial Sequence: Synthetic oligonucleotide
  Sense strand starting at position 1220 of SEQ ID NO: 1880273
ggugaaaucuccguuucua

SEQ ID NO: 1955033 - RNA, 19 nt, Artificial Sequence
  Description of Artificial Sequence: Synthetic oligonucleotide
  Antisense strand to SEQ ID NO: 1955032
uagaaacggagauuucacc

SEQ ID NO: 1955034 - RNA, 19 nt, Artificial Sequence
  Description of Artificial Sequence: Synthetic oligonucleotide
  Sense strand starting at position 1838 of SEQ ID NO: 1880273
gcguccucccuauaaaucu

SEQ ID NO: 1955035 - RNA, 19 nt, Artificial Sequence
  Description of Artificial Sequence: Synthetic oligonucleotide
  Antisense strand to SEQ ID NO: 1955034
agauuuauagggaggacgc

SEQ ID NO: 1955036 - RNA, 19 nt, Artificial Sequence
  Description of Artificial Sequence: Synthetic oligonucleotide
  Sense strand starting at position 2847 of SEQ ID NO: 1880273
agucauucuuugguucuua

SEQ ID NO: 1955037 - RNA, 19 nt, Artificial Sequence
  Description of Artificial Sequence: Synthetic oligonucleotide
  Antisense strand to SEQ ID NO: 1955036
uaagaaccaaagaaugacu

SEQ ID NO: 1955038 - RNA, 19 nt, Artificial Sequence
  Description of Artificial Sequence: Synthetic oligonucleotide
  Sense strand starting at position 2848 of SEQ ID NO: 1880273
gucauucuuugguucuuaa

SEQ ID NO: 1955039 - RNA, 19 nt, Artificial Sequence
  Description of Artificial Sequence: Synthetic oligonucleotide
  Antisense strand to SEQ ID NO: 1955038
uuaagaaccaaagaaugac

SEQ ID NO: 1955040 - RNA, 19 nt, Artificial Sequence
  Description of Artificial Sequence: Synthetic oligonucleotide
  Sense strand starting at position 2857 of SEQ ID NO: 1880273
ugguucuuaacagggcaaa

SEQ ID NO: 1955041 - RNA, 19 nt, Artificial Sequence
  Description of Artificial Sequence: Synthetic oligonucleotide
  Antisense strand to SEQ ID NO: 1955040
uuugcccuguuaagaacca

SEQ ID NO: 1955042 - RNA, 19 nt, Artificial Sequence
  Description of Artificial Sequence: Synthetic oligonucleotide
  Sense strand starting at position 2971 of SEQ ID NO: 1880273
accagugguugcuacuaau

SEQ ID NO: 1955043 - RNA, 19 nt, Artificial Sequence
  Description of Artificial Sequence: Synthetic oligonucleotide
  Antisense strand to SEQ ID NO: 1955042
auuaguagcaaccacuggu

SEQ ID NO: 1955044 - RNA, 19 nt, Artificial Sequence
  Description of Artificial Sequence: Synthetic oligonucleotide
  Sense strand starting at position 3057 of SEQ ID NO: 1880273
ggccuuggugaacaucauu

SEQ ID NO: 1955045 - RNA, 19 nt, Artificial Sequence
  Description of Artificial Sequence: Synthetic oligonucleotide
  Antisense strand to SEQ ID NO: 1955044
aaugauguucaccaaggcc

SEQ ID NO: 1955046 - RNA, 19 nt, Artificial Sequence
  Description of Artificial Sequence: Synthetic oligonucleotide
  Sense strand starting at position 3192 of SEQ ID NO: 1880273
augaauagcucagaauauu

SEQ ID NO: 1955047 - RNA, 19 nt, Artificial Sequence
  Description of Artificial Sequence: Synthetic oligonucleotide
  Antisense strand to SEQ ID NO: 1955046
aauauucugagcuauucau

SEQ ID NO: 1955048 - RNA, 19 nt, Artificial Sequence
  Description of Artificial Sequence: Synthetic oligonucleotide
  Sense strand starting at position 3215 of SEQ ID NO: 1880273
gucauuugaugguaucaug

SEQ ID NO: 1955049 - RNA, 19 nt, Artificial Sequence
  Description of Artificial Sequence: Synthetic oligonucleotide
  Antisense strand to SEQ ID NO: 1955048
caugauaccaucaaaugac

SEQ ID NO: 1955050 - RNA, 19 nt, Artificial Sequence
  Description of Artificial Sequence: Synthetic oligonucleotide
  Sense strand starting at position 3222 of SEQ ID NO: 1880273
gaugguaucaugggugagu

SEQ ID NO: 1955051 - RNA, 19 nt, Artificial Sequence
  Description of Artificial Sequence: Synthetic oligonucleotide
  Antisense strand to SEQ ID NO: 1955050
acucacccaugauaccauc

SEQ ID NO: 1955052 - RNA, 19 nt, Artificial Sequence
  Description of Artificial Sequence: Synthetic oligonucleotide
  Sense strand starting at position 3224 of SEQ ID NO: 1880273
ugguaucaugggugagugu

SEQ ID NO: 1955053 - RNA, 19 nt, Artificial Sequence
  Description of Artificial Sequence: Synthetic oligonucleotide
  Antisense strand to SEQ ID NO: 1955052
acacucacccaugauacca

SEQ ID NO: 1955054 - RNA, 19 nt, Artificial Sequence
  Description of Artificial Sequence: Synthetic oligonucleotide
  Sense strand starting at position 3226 of SEQ ID NO: 1880273
guaucaugggugagugugu

SEQ ID NO: 1955055 - RNA, 19 nt, Artificial Sequence
  Description of Artificial Sequence: Synthetic oligonucleotide
  Antisense strand to SEQ ID NO: 1955054
acacacucacccaugauac

SEQ ID NO: 1955056 - RNA, 19 nt, Artificial Sequence
  Description of Artificial Sequence: Synthetic oligonucleotide
  Sense strand starting at position 3233 of SEQ ID NO: 1880273
gggugagugugucucacuu

SEQ ID NO: 1955057 - RNA, 19 nt, Artificial Sequence
  Description of Artificial Sequence: Synthetic oligonucleotide
  Antisense strand to SEQ ID NO: 1955056
aagugagacacacucaccc

SEQ ID NO: 1955058 - RNA, 19 nt, Artificial Sequence
  Description of Artificial Sequence: Synthetic oligonucleotide
  Sense strand starting at position 3271 of SEQ ID NO: 1880273
cuguuauucugagauucua

SEQ ID NO: 1955059 - RNA, 19 nt, Artificial Sequence
  Description of Artificial Sequence: Synthetic oligonucleotide
  Antisense strand to SEQ ID NO: 1955058
uagaaucucagaauaacag

SEQ ID NO: 1955060 - RNA, 19 nt, Artificial Sequence
  Description of Artificial Sequence: Synthetic oligonucleotide
  Sense strand starting at position 3279 of SEQ ID NO: 1880273
cugagauucuaaguuagga

SEQ ID NO: 1955061 - RNA, 19 nt, Artificial Sequence
  Description of Artificial Sequence: Synthetic oligonucleotide
  Antisense strand to SEQ ID NO: 1955060
uccuaacuuagaaucucag

SEQ ID NO: 1955062 - RNA, 19 nt, Artificial Sequence
  Description of Artificial Sequence: Synthetic oligonucleotide
  Sense strand starting at position 3283 of SEQ ID NO: 1880273
gauucuaaguuaggauuua

SEQ ID NO: 1955063 - RNA, 19 nt, Artificial Sequence
  Description of Artificial Sequence: Synthetic oligonucleotide
  Antisense strand to SEQ ID NO: 1955062
uaaauccuaacuuagaauc

SEQ ID NO: 1955064 - RNA, 19 nt, Artificial Sequence
  Description of Artificial Sequence: Synthetic oligonucleotide
  Sense strand starting at position 3363 of SEQ ID NO: 1880273
cauguaaagcucugugagu

SEQ ID NO: 1955065 - RNA, 19 nt, Artificial Sequence
  Description of Artificial Sequence: Synthetic oligonucleotide
  Antisense strand to SEQ ID NO: 1955064
acucacagagcuuuacaug

SEQ ID NO: 1955066 - RNA, 19 nt, Artificial Sequence
  Description of Artificial Sequence: Synthetic oligonucleotide
  Sense strand starting at position 3364 of SEQ ID NO: 1880273
auguaaagcucugugaguu

SEQ ID NO: 1955067 - RNA, 19 nt, Artificial Sequence
  Description of Artificial Sequence: Synthetic oligonucleotide
  Antisense strand to SEQ ID NO: 1955066
aacucacagagcuuuacau

SEQ ID NO: 1955068 - RNA, 19 nt, Artificial Sequence
  Description of Artificial Sequence: Synthetic oligonucleotide
  Sense strand starting at position 3365 of SEQ ID NO: 1880273
uguaaagcucugugaguua

SEQ ID NO: 1955069 - RNA, 19 nt, Artificial Sequence
  Description of Artificial Sequence: Synthetic oligonucleotide
  Antisense strand to SEQ ID NO: 1955068
uaacucacagagcuuuaca

SEQ ID NO: 1955070 - RNA, 19 nt, Artificial Sequence
  Description of Artificial Sequence: Synthetic oligonucleotide
  Sense strand starting at position 3368 of SEQ ID NO: 1880273
aaagcucugugaguuauua

SEQ ID NO: 1955071 - RNA, 19 nt, Artificial Sequence
  Description of Artificial Sequence: Synthetic oligonucleotide
  Antisense strand to SEQ ID NO: 1955070
uaauaacucacagagcuuu

SEQ ID NO: 1955072 - RNA, 19 nt, Artificial Sequence
  Description of Artificial Sequence: Synthetic oligonucleotide
  Sense strand starting at position 3372 of SEQ ID NO: 1880273
cucugugaguuauuacaaa

SEQ ID NO: 1955073 - RNA, 19 nt, Artificial Sequence
  Description of Artificial Sequence: Synthetic oligonucleotide
  Antisense strand to SEQ ID NO: 1955072
uuuguaauaacucacagag

SEQ ID NO: 1955074 - RNA, 19 nt, Artificial Sequence
  Description of Artificial Sequence: Synthetic oligonucleotide
  Sense strand starting at position 3397 of SEQ ID NO: 1880273
acaguuguauaaccaagaa

SEQ ID NO: 1955075 - RNA, 19 nt, Artificial Sequence
  Description of Artificial Sequence: Synthetic oligonucleotide
  Antisense strand to SEQ ID NO: 1955074
uucuugguuauacaacugu

SEQ ID NO: 1955076 - RNA, 19 nt, Artificial Sequence
  Description of Artificial Sequence: Synthetic oligonucleotide
  Sense strand starting at position 3473 of SEQ ID NO: 1880273
cccagugguaaguaagauu

SEQ ID NO: 1955077 - RNA, 19 nt, Artificial Sequence
  Description of Artificial Sequence: Synthetic oligonucleotide
  Antisense strand to SEQ ID NO: 1955076
aaucuuacuuaccacuggg

SEQ ID NO: 1955078 - RNA, 19 nt, Artificial Sequence
  Description of Artificial Sequence: Synthetic oligonucleotide
  Sense strand starting at position 3476 of SEQ ID NO: 1880273
agugguaaguaagauuauu

SEQ ID NO: 1955079 - RNA, 19 nt, Artificial Sequence
  Description of Artificial Sequence: Synthetic oligonucleotide
  Antisense strand to SEQ ID NO: 1955078
aauaaucuuacuuaccacu

SEQ ID NO: 1955080 - RNA, 19 nt, Artificial Sequence
  Description of Artificial Sequence: Synthetic oligonucleotide
  Sense strand starting at position 3606 of SEQ ID NO: 1880273
cccggaaucgagcgauucu

SEQ ID NO: 1955081 - RNA, 19 nt, Artificial Sequence
  Description of Artificial Sequence: Synthetic oligonucleotide
  Antisense strand to SEQ ID NO: 1955080
agaaucgcucgauuccggg

SEQ ID NO: 1955082 - RNA, 19 nt, Artificial Sequence
  Description of Artificial Sequence: Synthetic oligonucleotide
  Sense strand starting at position 3898 of SEQ ID NO: 1880273
aacugaguaguugggacua

SEQ ID NO: 1955083 - RNA, 19 nt, Artificial Sequence
  Description of Artificial Sequence: Synthetic oligonucleotide
  Antisense strand to SEQ ID NO: 1955082
uagucccaacuacucaguu

SEQ ID NO: 1955084 - RNA, 19 nt, Artificial Sequence
  Description of Artificial Sequence: Synthetic oligonucleotide
  Sense strand starting at position 53 of SEQ ID NO: 1880274
acagacaucuggucuauaa

SEQ ID NO: 1955085 - RNA, 19 nt, Artificial Sequence
  Description of Artificial Sequence: Synthetic oligonucleotide
  Antisense strand to SEQ ID NO: 1955084
uuauagaccagaugucugu

SEQ ID NO: 1955086 - RNA, 19 nt, Artificial Sequence
  Description of Artificial Sequence: Synthetic oligonucleotide
  Sense strand starting at position 154 of SEQ ID NO: 1880274
ccauaauaucacggguuau

SEQ ID NO: 1955087 - RNA, 19 nt, Artificial Sequence
  Description of Artificial Sequence: Synthetic oligonucleotide
  Antisense strand to SEQ ID NO: 1955086
auaacccgugauauuaugg

SEQ ID NO: 1955088 - RNA, 19 nt, Artificial Sequence
  Description of Artificial Sequence: Synthetic oligonucleotide
  Sense strand starting at position 158 of SEQ ID NO: 1880274
aauaucacggguuaucaau

SEQ ID NO: 1955089 - RNA, 19 nt, Artificial Sequence
  Description of Artificial Sequence: Synthetic oligonucleotide
  Antisense strand to SEQ ID NO: 1955088
auugauaacccgugauauu

SEQ ID NO: 1955090 - RNA, 19 nt, Artificial Sequence
  Description of Artificial Sequence: Synthetic oligonucleotide
  Sense strand starting at position 225 of SEQ ID NO: 1880274
aagagcagucuugauccau

SEQ ID NO: 1955091 - RNA, 19 nt, Artificial Sequence
  Description of Artificial Sequence: Synthetic oligonucleotide
  Antisense strand to SEQ ID NO: 1955090
auggaucaagacugcucuu

SEQ ID NO: 1955092 - RNA, 19 nt, Artificial Sequence
  Description of Artificial Sequence: Synthetic oligonucleotide
  Sense strand starting at position 607 of SEQ ID NO: 1880274
guuccuaaauuauuagagu

SEQ ID NO: 1955093 - RNA, 19 nt, Artificial Sequence
  Description of Artificial Sequence: Synthetic oligonucleotide
  Antisense strand to SEQ ID NO: 1955092
acucuaauaauuuaggaac

SEQ ID NO: 1955094 - RNA, 19 nt, Artificial Sequence
  Description of Artificial Sequence: Synthetic oligonucleotide
  Sense strand starting at position 655 of SEQ ID NO: 1880274
cauacaauggcuugagaga

SEQ ID NO: 1955095 - RNA, 19 nt, Artificial Sequence
  Description of Artificial Sequence: Synthetic oligonucleotide
  Antisense strand to SEQ ID NO: 1955094
ucucucaagccauuguaug

SEQ ID NO: 1955096 - RNA, 19 nt, Artificial Sequence
  Description of Artificial Sequence: Synthetic oligonucleotide
  Sense strand starting at position 696 of SEQ ID NO: 1880274
ggaauuucuugggagugga

SEQ ID NO: 1955097 - RNA, 19 nt, Artificial Sequence
  Description of Artificial Sequence: Synthetic oligonucleotide
  Antisense strand to SEQ ID NO: 1955096
uccacucccaagaaauucc

SEQ ID NO: 1955098 - RNA, 19 nt, Artificial Sequence
  Description of Artificial Sequence: Synthetic oligonucleotide
  Sense strand starting at position 716 of SEQ ID NO: 1880274
guggaaagaucucuacacu

SEQ ID NO: 1955099 - RNA, 19 nt, Artificial Sequence
  Description of Artificial Sequence: Synthetic oligonucleotide
  Antisense strand to SEQ ID NO: 1955098
aguguagagaucuuuccac

SEQ ID NO: 1955100 - RNA, 19 nt, Artificial Sequence
  Description of Artificial Sequence: Synthetic oligonucleotide
  Sense strand starting at position 849 of SEQ ID NO: 1880274
ucaagacuauuguugugaa

SEQ ID NO: 1955101 - RNA, 19 nt, Artificial Sequence
  Description of Artificial Sequence: Synthetic oligonucleotide
  Antisense strand to SEQ ID NO: 1955100
uucacaacaauagucuuga

SEQ ID NO: 1955102 - RNA, 19 nt, Artificial Sequence
  Description of Artificial Sequence: Synthetic oligonucleotide
  Sense strand starting at position 861 of SEQ ID NO: 1880274
uugugaagccuguaaauaa

SEQ ID NO: 1955103 - RNA, 19 nt, Artificial Sequence
  Description of Artificial Sequence: Synthetic oligonucleotide
  Antisense strand to SEQ ID NO: 1955102
uuauuuacaggcuucacaa

SEQ ID NO: 1955104 - RNA, 19 nt, Artificial Sequence
  Description of Artificial Sequence: Synthetic oligonucleotide
  Sense strand starting at position 943 of SEQ ID NO: 1880274
cuggaaugcccagaaaugu

SEQ ID NO: 1955105 - RNA, 19 nt, Artificial Sequence
  Description of Artificial Sequence: Synthetic oligonucleotide
  Antisense strand to SEQ ID NO: 1955104
acauuucugggcauuccag

SEQ ID NO: 1955106 - RNA, 19 nt, Artificial Sequence
  Description of Artificial Sequence: Synthetic oligonucleotide
  Sense strand starting at position 1122 of SEQ ID NO: 1880274
uccagugaugacugaccuu

SEQ ID NO: 1955107 - RNA, 19 nt, Artificial Sequence
  Description of Artificial Sequence: Synthetic oligonucleotide
  Antisense strand to SEQ ID NO: 1955106
aaggucagucaucacugga

SEQ ID NO: 1955108 - RNA, 19 nt, Artificial Sequence
  Description of Artificial Sequence: Synthetic oligonucleotide
  Sense strand starting at position 1179 of SEQ ID NO: 1880274
uuuacuacccuaugugaga

SEQ ID NO: 1955109 - RNA, 19 nt, Artificial Sequence
  Description of Artificial Sequence: Synthetic oligonucleotide
  Antisense strand to SEQ ID NO: 1955108
ucucacauaggguaguaaa

SEQ ID NO: 1955110 - RNA, 19 nt, Artificial Sequence
  Description of Artificial Sequence: Synthetic oligonucleotide
  Sense strand starting at position 1180 of SEQ ID NO: 1880274
uuacuacccuaugugagau

SEQ ID NO: 1955111 - RNA, 19 nt, Artificial Sequence
  Description of Artificial Sequence: Synthetic oligonucleotide
  Antisense strand to SEQ ID NO: 1955110
aucucacauaggguaguaa

SEQ ID NO: 1955112 - RNA, 19 nt, Artificial Sequence
  Description of Artificial Sequence: Synthetic oligonucleotide
  Sense strand starting at position 1190 of SEQ ID NO: 1880274
augugagaucucugauguu

SEQ ID NO: 1955113 - RNA, 19 nt, Artificial Sequence
  Description of Artificial Sequence: Synthetic oligonucleotide
  Antisense strand to SEQ ID NO: 1955112
aacaucagagaucucacau

SEQ ID NO: 1955114 - RNA, 19 nt, Artificial Sequence
  Description of Artificial Sequence: Synthetic oligonucleotide
  Sense strand starting at position 1303 of SEQ ID NO: 1880274
ugacuucugguggaagcuu

SEQ ID NO: 1955115 - RNA, 19 nt, Artificial Sequence
  Description of Artificial Sequence: Synthetic oligonucleotide
  Antisense strand to SEQ ID NO: 1955114
aagcuuccaccagaaguca

SEQ ID NO: 1955116 - RNA, 19 nt, Artificial Sequence
  Description of Artificial Sequence: Synthetic oligonucleotide
  Sense strand starting at position 1440 of SEQ ID NO: 1880274
ccgugugauuucucugaug

SEQ ID NO: 1955117 - RNA, 19 nt, Artificial Sequence
  Description of Artificial Sequence: Synthetic oligonucleotide
  Antisense strand to SEQ ID NO: 1955116
caucagagaaaucacacgg

SEQ ID NO: 1955118 - RNA, 19 nt, Artificial Sequence
  Description of Artificial Sequence: Synthetic oligonucleotide
  Sense strand starting at position 1442 of SEQ ID NO: 1880274
gugugauuucucugauggc

SEQ ID NO: 1955119 - RNA, 19 nt, Artificial Sequence
  Description of Artificial Sequence: Synthetic oligonucleotide
  Antisense strand to SEQ ID NO: 1955118
gccaucagagaaaucacac

SEQ ID NO: 1955120 - RNA, 19 nt, Artificial Sequence
  Description of Artificial Sequence: Synthetic oligonucleotide
  Sense strand starting at position 1465 of SEQ ID NO: 1880274
gaggauuccuuucucauag

SEQ ID NO: 1955121 - RNA, 19 nt, Artificial Sequence
  Description of Artificial Sequence: Synthetic oligonucleotide
  Antisense strand to SEQ ID NO: 1955120
cuaugagaaaggaauccuc

SEQ ID NO: 1955122 - RNA, 19 nt, Artificial Sequence
  Description of Artificial Sequence: Synthetic oligonucleotide
  Sense strand starting at position 1510 of SEQ ID NO: 1880274
ggguuucuugccuauauga

SEQ ID NO: 1955123 - RNA, 19 nt, Artificial Sequence
  Description of Artificial Sequence: Synthetic oligonucleotide
  Antisense strand to SEQ ID NO: 1955122
ucauauaggcaagaaaccc

SEQ ID NO: 1955124 - RNA, 19 nt, Artificial Sequence
  Description of Artificial Sequence: Synthetic oligonucleotide
  Sense strand starting at position 1512 of SEQ ID NO: 1880274
guuucuugccuauaugaaa

SEQ ID NO: 1955125 - RNA, 19 nt, Artificial Sequence
  Description of Artificial Sequence: Synthetic oligonucleotide
  Antisense strand to SEQ ID NO: 1955124
uuucauauaggcaagaaac

SEQ ID NO: 1955126 - RNA, 19 nt, Artificial Sequence
  Description of Artificial Sequence: Synthetic oligonucleotide
  Sense strand starting at position 1545 of SEQ ID NO: 1880274
ugagguaugacuugugaug

SEQ ID NO: 1955127 - RNA, 19 nt, Artificial Sequence
  Description of Artificial Sequence: Synthetic oligonucleotide
  Antisense strand to SEQ ID NO: 1955126
caucacaagucauaccuca

SEQ ID NO: 1955128 - RNA, 19 nt, Artificial Sequence
  Description of Artificial Sequence: Synthetic oligonucleotide
  Sense strand starting at position 1721 of SEQ ID NO: 1880274
ugacuuccggcagaauguu

SEQ ID NO: 1955129 - RNA, 19 nt, Artificial Sequence
  Description of Artificial Sequence: Synthetic oligonucleotide
  Antisense strand to SEQ ID NO: 1955128
aacauucugccggaaguca

SEQ ID NO: 1955130 - RNA, 19 nt, Artificial Sequence
  Description of Artificial Sequence: Synthetic oligonucleotide
  Sense strand starting at position 1780 of SEQ ID NO: 1880274
gaguucuuugauggauagu

SEQ ID NO: 1955131 - RNA, 19 nt, Artificial Sequence
  Description of Artificial Sequence: Synthetic oligonucleotide
  Antisense strand to SEQ ID NO: 1955130
acuauccaucaaagaacuc

SEQ ID NO: 1955132 - RNA, 19 nt, Artificial Sequence
  Description of Artificial Sequence: Synthetic oligonucleotide
  Sense strand starting at position 1781 of SEQ ID NO: 1880274
aguucuuugauggauagug

SEQ ID NO: 1955133 - RNA, 19 nt, Artificial Sequence
  Description of Artificial Sequence: Synthetic oligonucleotide
  Antisense strand to SEQ ID NO: 1955132
cacuauccaucaaagaacu

SEQ ID NO: 1955134 - RNA, 19 nt, Artificial Sequence
  Description of Artificial Sequence: Synthetic oligonucleotide
  Sense strand starting at position 1793 of SEQ ID NO: 1880274
gauagugaggguugacuua

SEQ ID NO: 1955135 - RNA, 19 nt, Artificial Sequence
  Description of Artificial Sequence: Synthetic oligonucleotide
  Antisense strand to SEQ ID NO: 1955134
uaagucaacccucacuauc

SEQ ID NO: 1955136 - RNA, 19 nt, Artificial Sequence
  Description of Artificial Sequence: Synthetic oligonucleotide
  Sense strand starting at position 1960 of SEQ ID NO: 1880274
uuugauuucugacagaagg

SEQ ID NO: 1955137 - RNA, 19 nt, Artificial Sequence
  Description of Artificial Sequence: Synthetic oligonucleotide
  Antisense strand to SEQ ID NO: 1955136
ccuucugucagaaaucaaa

SEQ ID NO: 1955138 - RNA, 19 nt, Artificial Sequence
  Description of Artificial Sequence: Synthetic oligonucleotide
  Sense strand starting at position 2038 of SEQ ID NO: 1880274
guaacacaugauuggcuaa

SEQ ID NO: 1955139 - RNA, 19 nt, Artificial Sequence
  Description of Artificial Sequence: Synthetic oligonucleotide
  Antisense strand to SEQ ID NO: 1955138
uuagccaaucauguguuac

SEQ ID NO: 1955140 - RNA, 19 nt, Artificial Sequence
  Description of Artificial Sequence: Synthetic oligonucleotide
  Sense strand starting at position 2041 of SEQ ID NO: 1880274
acacaugauuggcuaauga

SEQ ID NO: 1955141 - RNA, 19 nt, Artificial Sequence
  Description of Artificial Sequence: Synthetic oligonucleotide
  Antisense strand to SEQ ID NO: 1955140
ucauuagccaaucaugugu

SEQ ID NO: 1955142 - RNA, 19 nt, Artificial Sequence
  Description of Artificial Sequence: Synthetic oligonucleotide
  Sense strand starting at position 2092 of SEQ ID NO: 1880274
uucuuuccugaguguauuu

SEQ ID NO: 1955143 - RNA, 19 nt, Artificial Sequence
  Description of Artificial Sequence: Synthetic oligonucleotide
  Antisense strand to SEQ ID NO: 1955142
aaauacacucaggaaagaa

SEQ ID NO: 1955144 - RNA, 19 nt, Artificial Sequence
  Description of Artificial Sequence: Synthetic oligonucleotide
  Sense strand starting at position 2189 of SEQ ID NO: 1880274
gaguuagcucuugagcaau

SEQ ID NO: 1955145 - RNA, 19 nt, Artificial Sequence
  Description of Artificial Sequence: Synthetic oligonucleotide
  Antisense strand to SEQ ID NO: 1955144
auugcucaagagcuaacuc

SEQ ID NO: 1955146 - RNA, 19 nt, Artificial Sequence
  Description of Artificial Sequence: Synthetic oligonucleotide
  Sense strand starting at position 2203 of SEQ ID NO: 1880274
gcaauaguagcugacucau

SEQ ID NO: 1955147 - RNA, 19 nt, Artificial Sequence
  Description of Artificial Sequence: Synthetic oligonucleotide
  Antisense strand to SEQ ID NO: 1955146
augagucagcuacuauugc

SEQ ID NO: 1955148 - RNA, 19 nt, Artificial Sequence
  Description of Artificial Sequence: Synthetic oligonucleotide
  Sense strand starting at position 2255 of SEQ ID NO: 1880274
aggucuuucccauagaagc

SEQ ID NO: 1955149 - RNA, 19 nt, Artificial Sequence
  Description of Artificial Sequence: Synthetic oligonucleotide
  Antisense strand to SEQ ID NO: 1955148
gcuucuaugggaaagaccu

SEQ ID NO: 1955150 - RNA, 19 nt, Artificial Sequence
  Description of Artificial Sequence: Synthetic oligonucleotide
  Sense strand starting at position 2350 of SEQ ID NO: 1880274
ugaaucuugugauccuaag

SEQ ID NO: 1955151 - RNA, 19 nt, Artificial Sequence
  Description of Artificial Sequence: Synthetic oligonucleotide
  Antisense strand to SEQ ID NO: 1955150
cuuaggaucacaagauuca

SEQ ID NO: 1955152 - RNA, 19 nt, Artificial Sequence
  Description of Artificial Sequence: Synthetic oligonucleotide
  Sense strand starting at position 2427 of SEQ ID NO: 1880274
gcuuccaucucaucaggau

SEQ ID NO: 1955153 - RNA, 19 nt, Artificial Sequence
  Description of Artificial Sequence: Synthetic oligonucleotide
  Antisense strand to SEQ ID NO: 1955152
auccugaugagauggaagc

SEQ ID NO: 1955154 - RNA, 19 nt, Artificial Sequence
  Description of Artificial Sequence: Synthetic oligonucleotide
  Sense strand starting at position 2714 of SEQ ID NO: 1880274
auaaguauuuccuaugaga

SEQ ID NO: 1955155 - RNA, 19 nt, Artificial Sequence
  Description of Artificial Sequence: Synthetic oligonucleotide
  Antisense strand to SEQ ID NO: 1955154
ucucauaggaaauacuuau

SEQ ID NO: 1955156 - RNA, 19 nt, Artificial Sequence
  Description of Artificial Sequence: Synthetic oligonucleotide
  Sense strand starting at position 2725 of SEQ ID NO: 1880274
cuaugagaugcucauguaa

SEQ ID NO: 1955157 - RNA, 19 nt, Artificial Sequence
  Description of Artificial Sequence: Synthetic oligonucleotide
  Antisense strand to SEQ ID NO: 1955156
uuacaugagcaucucauag

SEQ ID NO: 1955158 - RNA, 19 nt, Artificial Sequence
  Description of Artificial Sequence: Synthetic oligonucleotide
  Sense strand starting at position 3083 of SEQ ID NO: 1880274
auccuagugccauaagauu

SEQ ID NO: 1955159 - RNA, 19 nt, Artificial Sequence
  Description of Artificial Sequence: Synthetic oligonucleotide
  Antisense strand to SEQ ID NO: 1955158
aaucuuauggcacuaggau

SEQ ID NO: 1955160 - RNA, 19 nt, Artificial Sequence
  Description of Artificial Sequence: Synthetic oligonucleotide
  Sense strand starting at position 3418 of SEQ ID NO: 1880274
uuacuaggcugaucucaaa

SEQ ID NO: 1955161 - RNA, 19 nt, Artificial Sequence
  Description of Artificial Sequence: Synthetic oligonucleotide
  Antisense strand to SEQ ID NO: 1955160
uuugagaucagccuaguaa

SEQ ID NO: 1955162 - RNA, 19 nt, Artificial Sequence
  Description of Artificial Sequence: Synthetic oligonucleotide
  Sense strand starting at position 3892 of SEQ ID NO: 1880274
uuaucaauucccuagguga

SEQ ID NO: 1955163 - RNA, 19 nt, Artificial Sequence
  Description of Artificial Sequence: Synthetic oligonucleotide
  Antisense strand to SEQ ID NO: 1955162
ucaccuagggaauugauaa

SEQ ID NO: 1955164 - RNA, 19 nt, Artificial Sequence
  Description of Artificial Sequence: Synthetic oligonucleotide
  Sense strand starting at position 126 of SEQ ID NO: 1880275
ugucuauucccuuaagucu

SEQ ID NO: 1955165 - RNA, 19 nt, Artificial Sequence
  Description of Artificial Sequence: Synthetic oligonucleotide
  Antisense strand to SEQ ID NO: 1955164
agacuuaagggaauagaca

SEQ ID NO: 1955166 - RNA, 19 nt, Artificial Sequence
  Description of Artificial Sequence: Synthetic oligonucleotide
  Sense strand starting at position 145 of SEQ ID NO: 1880275
acaggcacugucuaguaau

SEQ ID NO: 1955167 - RNA, 19 nt, Artificial Sequence
  Description of Artificial Sequence: Synthetic oligonucleotide
  Antisense strand to SEQ ID NO: 1955166
auuacuagacagugccugu

SEQ ID NO: 1955168 - RNA, 19 nt, Artificial Sequence
  Description of Artificial Sequence: Synthetic oligonucleotide
  Sense strand starting at position 247 of SEQ ID NO: 1880275
aaaguuaacgaucagcuau

SEQ ID NO: 1955169 - RNA, 19 nt, Artificial Sequence
  Description of Artificial Sequence: Synthetic oligonucleotide
  Antisense strand to SEQ ID NO: 1955168
auagcugaucguuaacuuu

SEQ ID NO: 1955170 - RNA, 19 nt, Artificial Sequence
  Description of Artificial Sequence: Synthetic oligonucleotide
  Sense strand starting at position 464 of SEQ ID NO: 1880275
gacacuuuagcggagaacu

SEQ ID NO: 1955171 - RNA, 19 nt, Artificial Sequence
  Description of Artificial Sequence: Synthetic oligonucleotide
  Antisense strand to SEQ ID NO: 1955170
aguucuccgcuaaaguguc

SEQ ID NO: 1955172 - RNA, 19 nt, Artificial Sequence
  Description of Artificial Sequence: Synthetic oligonucleotide
  Sense strand starting at position 699 of SEQ ID NO: 1880275
accagagguuucccagaga

SEQ ID NO: 1955173 - RNA, 19 nt, Artificial Sequence
  Description of Artificial Sequence: Synthetic oligonucleotide
  Antisense strand to SEQ ID NO: 1955172
ucucugggaaaccucuggu

SEQ ID NO: 1955174 - RNA, 19 nt, Artificial Sequence
  Description of Artificial Sequence: Synthetic oligonucleotide
  Sense strand starting at position 2081 of SEQ ID NO: 1880275
auucuagucggguaggaga

SEQ ID NO: 1955175 - RNA, 19 nt, Artificial Sequence
  Description of Artificial Sequence: Synthetic oligonucleotide
  Antisense strand to SEQ ID NO: 1955174
ucuccuacccgacuagaau

SEQ ID NO: 1955176 - RNA, 19 nt, Artificial Sequence
  Description of Artificial Sequence: Synthetic oligonucleotide
  Sense strand starting at position 2095 of SEQ ID NO: 1880275
ggagacaggaugugucauu

SEQ ID NO: 1955177 - RNA, 19 nt, Artificial Sequence
  Description of Artificial Sequence: Synthetic oligonucleotide
  Antisense strand to SEQ ID NO: 1955176
aaugacacauccugucucc

SEQ ID NO: 1955178 - RNA, 19 nt, Artificial Sequence
  Description of Artificial Sequence: Synthetic oligonucleotide
  Sense strand starting at position 2100 of SEQ ID NO: 1880275
caggaugugucauugaaau

SEQ ID NO: 1955179 - RNA, 19 nt, Artificial Sequence
  Description of Artificial Sequence: Synthetic oligonucleotide
  Antisense strand to SEQ ID NO: 1955178
auuucaaugacacauccug

SEQ ID NO: 1955180 - RNA, 19 nt, Artificial Sequence
  Description of Artificial Sequence: Synthetic oligonucleotide
  Sense strand starting at position 2137 of SEQ ID NO: 1880275
gaaguuuguccugagugca

SEQ ID NO: 1955181 - RNA, 19 nt, Artificial Sequence
  Description of Artificial Sequence: Synthetic oligonucleotide
  Antisense strand to SEQ ID NO: 1955180
ugcacucaggacaaacuuc

SEQ ID NO: 1955182 - RNA, 19 nt, Artificial Sequence
  Description of Artificial Sequence: Synthetic oligonucleotide
  Sense strand starting at position 2162 of SEQ ID NO: 1880275
gcagaauugcuaugauaac

SEQ ID NO: 1955183 - RNA, 19 nt, Artificial Sequence
  Description of Artificial Sequence: Synthetic oligonucleotide
  Antisense strand to SEQ ID NO: 1955182
guuaucauagcaauucugc

SEQ ID NO: 1955184 - RNA, 19 nt, Artificial Sequence
  Description of Artificial Sequence: Synthetic oligonucleotide
  Sense strand starting at position 2174 of SEQ ID NO: 1880275
ugauaacuguagccugaua

SEQ ID NO: 1955185 - RNA, 19 nt, Artificial Sequence
  Description of Artificial Sequence: Synthetic oligonucleotide
  Antisense strand to SEQ ID NO: 1955184
uaucaggcuacaguuauca

SEQ ID NO: 1955186 - RNA, 19 nt, Artificial Sequence
  Description of Artificial Sequence: Synthetic oligonucleotide
  Sense strand starting at position 2176 of SEQ ID NO: 1880275
auaacuguagccugauauu

SEQ ID NO: 1955187 - RNA, 19 nt, Artificial Sequence
  Description of Artificial Sequence: Synthetic oligonucleotide
  Antisense strand to SEQ ID NO: 1955186
aauaucaggcuacaguuau

SEQ ID NO: 1955188 - RNA, 19 nt, Artificial Sequence
  Description of Artificial Sequence: Synthetic oligonucleotide
  Sense strand starting at position 2588 of SEQ ID NO: 1880275
gaaagacugcgcgaccuau

SEQ ID NO: 1955189 - RNA, 19 nt, Artificial Sequence
  Description of Artificial Sequence: Synthetic oligonucleotide
  Antisense strand to SEQ ID NO: 1955188
auaggucgcgcagucuuuc

SEQ ID NO: 1955190 - RNA, 19 nt, Artificial Sequence
  Description of Artificial Sequence: Synthetic oligonucleotide
  Sense strand starting at position 2627 of SEQ ID NO: 1880275
cuugaugaggcaggagaau

SEQ ID NO: 1955191 - RNA, 19 nt, Artificial Sequence
  Description of Artificial Sequence: Synthetic oligonucleotide
  Antisense strand to SEQ ID NO: 1955190
auucuccugccucaucaag

SEQ ID NO: 1955192 - RNA, 19 nt, Artificial Sequence
  Description of Artificial Sequence: Synthetic oligonucleotide
  Sense strand starting at position 2754 of SEQ ID NO: 1880275
gcauuuacuuacccuugua

SEQ ID NO: 1955193 - RNA, 19 nt, Artificial Sequence
  Description of Artificial Sequence: Synthetic oligonucleotide
  Antisense strand to SEQ ID NO: 1955192
uacaaggguaaguaaaugc

SEQ ID NO: 1955194 - RNA, 19 nt, Artificial Sequence
  Description of Artificial Sequence: Synthetic oligonucleotide
  Sense strand starting at position 2787 of SEQ ID NO: 1880275
uucgcuaauccugagauag

SEQ ID NO: 1955195 - RNA, 19 nt, Artificial Sequence
  Description of Artificial Sequence: Synthetic oligonucleotide
  Antisense strand to SEQ ID NO: 1955194
cuaucucaggauuagcgaa

SEQ ID NO: 1955196 - RNA, 19 nt, Artificial Sequence
  Description of Artificial Sequence: Synthetic oligonucleotide
  Sense strand starting at position 2894 of SEQ ID NO: 1880275
cugcccuuacgugauauuu

SEQ ID NO: 1955197 - RNA, 19 nt, Artificial Sequence
  Description of Artificial Sequence: Synthetic oligonucleotide
  Antisense strand to SEQ ID NO: 1955196
aaauaucacguaagggcag

SEQ ID NO: 1955198 - RNA, 19 nt, Artificial Sequence
  Description of Artificial Sequence: Synthetic oligonucleotide
  Sense strand starting at position 2956 of SEQ ID NO: 1880275
uguguaagugcuguuuacu

SEQ ID NO: 1955199 - RNA, 19 nt, Artificial Sequence
  Description of Artificial Sequence: Synthetic oligonucleotide
  Antisense strand to SEQ ID NO: 1955198
aguaaacagcacuuacaca

SEQ ID NO: 1955200 - RNA, 19 nt, Artificial Sequence
  Description of Artificial Sequence: Synthetic oligonucleotide
  Sense strand starting at position 2968 of SEQ ID NO: 1880275
guuuacuaauuccugaaga

SEQ ID NO: 1955201 - RNA, 19 nt, Artificial Sequence
  Description of Artificial Sequence: Synthetic oligonucleotide
  Antisense strand to SEQ ID NO: 1955200
ucuucaggaauuaguaaac

SEQ ID NO: 1955202 - RNA, 19 nt, Artificial Sequence
  Description of Artificial Sequence: Synthetic oligonucleotide
  Sense strand starting at position 3009 of SEQ ID NO: 1880275
gggugucuggguuaauaga

SEQ ID NO: 1955203 - RNA, 19 nt, Artificial Sequence
  Description of Artificial Sequence: Synthetic oligonucleotide
  Antisense strand to SEQ ID NO: 1955202
ucuauuaacccagacaccc

SEQ ID NO: 1955204 - RNA, 19 nt, Artificial Sequence
  Description of Artificial Sequence: Synthetic oligonucleotide
  Sense strand starting at position 3016 of SEQ ID NO: 1880275
uggguuaauagauguugca

SEQ ID NO: 1955205 - RNA, 19 nt, Artificial Sequence
  Description of Artificial Sequence: Synthetic oligonucleotide
  Antisense strand to SEQ ID NO: 1955204
ugcaacaucuauuaaccca

SEQ ID NO: 1955206 - RNA, 19 nt, Artificial Sequence
  Description of Artificial Sequence: Synthetic oligonucleotide
  Sense strand starting at position 3039 of SEQ ID NO: 1880275
gagcgauauggucacuguu

SEQ ID NO: 1955207 - RNA, 19 nt, Artificial Sequence
  Description of Artificial Sequence: Synthetic oligonucleotide
  Antisense strand to SEQ ID NO: 1955206
aacagugaccauaucgcuc

SEQ ID NO: 1955208 - RNA, 19 nt, Artificial Sequence
  Description of Artificial Sequence: Synthetic oligonucleotide
  Sense strand starting at position 3080 of SEQ ID NO: 1880275
guauuauacaguuguggaa

SEQ ID NO: 1955209 - RNA, 19 nt, Artificial Sequence
  Description of Artificial Sequence: Synthetic oligonucleotide
  Antisense strand to SEQ ID NO: 1955208
uuccacaacuguauaauac

SEQ ID NO: 1955210 - RNA, 19 nt, Artificial Sequence
  Description of Artificial Sequence: Synthetic oligonucleotide
  Sense strand starting at position 3285 of SEQ ID NO: 1880275
ucuuuaaccugguuuggua

SEQ ID NO: 1955211 - RNA, 19 nt, Artificial Sequence
  Description of Artificial Sequence: Synthetic oligonucleotide
  Antisense strand to SEQ ID NO: 1955210
uaccaaaccagguuaaaga

SEQ ID NO: 1955212 - RNA, 19 nt, Artificial Sequence
  Description of Artificial Sequence: Synthetic oligonucleotide
  Sense strand starting at position 3289 of SEQ ID NO: 1880275
uaaccugguuugguagauu

SEQ ID NO: 1955213 - RNA, 19 nt, Artificial Sequence
  Description of Artificial Sequence: Synthetic oligonucleotide
  Antisense strand to SEQ ID NO: 1955212
aaucuaccaaaccagguua

SEQ ID NO: 1955214 - RNA, 19 nt, Artificial Sequence
  Description of Artificial Sequence: Synthetic oligonucleotide
  Sense strand starting at position 3292 of SEQ ID NO: 1880275
ccugguuugguagauugga

SEQ ID NO: 1955215 - RNA, 19 nt, Artificial Sequence
  Description of Artificial Sequence: Synthetic oligonucleotide
  Antisense strand to SEQ ID NO: 1955214
uccaaucuaccaaaccagg

SEQ ID NO: 1955216 - RNA, 19 nt, Artificial Sequence
  Description of Artificial Sequence: Synthetic oligonucleotide
  Sense strand starting at position 3322 of SEQ ID NO: 1880275
ggcuccaaaucagugacau

SEQ ID NO: 1955217 - RNA, 19 nt, Artificial Sequence
  Description of Artificial Sequence: Synthetic oligonucleotide
  Antisense strand to SEQ ID NO: 1955216
augucacugauuuggagcc

SEQ ID NO: 1955218 - RNA, 19 nt, Artificial Sequence
  Description of Artificial Sequence: Synthetic oligonucleotide
  Sense strand starting at position 3323 of SEQ ID NO: 1880275
gcuccaaaucagugacaug

SEQ ID NO: 1955219 - RNA, 19 nt, Artificial Sequence
  Description of Artificial Sequence: Synthetic oligonucleotide
  Antisense strand to SEQ ID NO: 1955218
caugucacugauuuggagc

SEQ ID NO: 1955220 - RNA, 19 nt, Artificial Sequence
  Description of Artificial Sequence: Synthetic oligonucleotide
  Sense strand starting at position 3352 of SEQ ID NO: 1880275
gaguguuaugcugagaccu

SEQ ID NO: 1955221 - RNA, 19 nt, Artificial Sequence
  Description of Artificial Sequence: Synthetic oligonucleotide
  Antisense strand to SEQ ID NO: 1955220
aggucucagcauaacacuc

SEQ ID NO: 1955222 - RNA, 19 nt, Artificial Sequence
  Description of Artificial Sequence: Synthetic oligonucleotide
  Sense strand starting at position 3394 of SEQ ID NO: 1880275
gucacaguucuuuauucca

SEQ ID NO: 1955223 - RNA, 19 nt, Artificial Sequence
  Description of Artificial Sequence: Synthetic oligonucleotide
  Antisense strand to SEQ ID NO: 1955222
uggaauaaagaacugugac

SEQ ID NO: 1955224 - RNA, 19 nt, Artificial Sequence
  Description of Artificial Sequence: Synthetic oligonucleotide
  Sense strand starting at position 3397 of SEQ ID NO: 1880275
acaguucuuuauuccagga

SEQ ID NO: 1955225 - RNA, 19 nt, Artificial Sequence
  Description of Artificial Sequence: Synthetic oligonucleotide
  Antisense strand to SEQ ID NO: 1955224
uccuggaauaaagaacugu

SEQ ID NO: 1955226 - RNA, 19 nt, Artificial Sequence
  Description of Artificial Sequence: Synthetic oligonucleotide
  Sense strand starting at position 3401 of SEQ ID NO: 1880275
uucuuuauuccaggaguug

SEQ ID NO: 1955227 - RNA, 19 nt, Artificial Sequence
  Description of Artificial Sequence: Synthetic oligonucleotide
  Antisense strand to SEQ ID NO: 1955226
caacuccuggaauaaagaa

SEQ ID NO: 1955228 - RNA, 19 nt, Artificial Sequence
  Description of Artificial Sequence: Synthetic oligonucleotide
  Sense strand starting at position 3427 of SEQ ID NO: 1880275
ggcugaugucaucacuaug

SEQ ID NO: 1955229 - RNA, 19 nt, Artificial Sequence
  Description of Artificial Sequence: Synthetic oligonucleotide
  Antisense strand to SEQ ID NO: 1955228
cauagugaugacaucagcc

SEQ ID NO: 1955230 - RNA, 19 nt, Artificial Sequence
  Description of Artificial Sequence: Synthetic oligonucleotide
  Sense strand starting at position 3432 of SEQ ID NO: 1880275
augucaucacuauggcuua

SEQ ID NO: 1955231 - RNA, 19 nt, Artificial Sequence
  Description of Artificial Sequence: Synthetic oligonucleotide
  Antisense strand to SEQ ID NO: 1955230
uaagccauagugaugacau

SEQ ID NO: 1955232 - RNA, 19 nt, Artificial Sequence
  Description of Artificial Sequence: Synthetic oligonucleotide
  Sense strand starting at position 3551 of SEQ ID NO: 1880275
guaaacacuuuacuaaagu

SEQ ID NO: 1955233 - RNA, 19 nt, Artificial Sequence
  Description of Artificial Sequence: Synthetic oligonucleotide
  Antisense strand to SEQ ID NO: 1955232
acuuuaguaaaguguuuac

SEQ ID NO: 1955234 - RNA, 19 nt, Artificial Sequence
  Description of Artificial Sequence: Synthetic oligonucleotide
  Sense strand starting at position 3559 of SEQ ID NO: 1880275
uuuacuaaagugugguaau

SEQ ID NO: 1955235 - RNA, 19 nt, Artificial Sequence
  Description of Artificial Sequence: Synthetic oligonucleotide
  Antisense strand to SEQ ID NO: 1955234
auuaccacacuuuaguaaa

SEQ ID NO: 1955236 - RNA, 19 nt, Artificial Sequence
  Description of Artificial Sequence: Synthetic oligonucleotide
  Sense strand starting at position 3630 of SEQ ID NO: 1880275
agucccacaucuuugaguu

SEQ ID NO: 1955237 - RNA, 19 nt, Artificial Sequence
  Description of Artificial Sequence: Synthetic oligonucleotide
  Antisense strand to SEQ ID NO: 1955236
aacucaaagaugugggacu

SEQ ID NO: 1955238 - RNA, 19 nt, Artificial Sequence
  Description of Artificial Sequence: Synthetic oligonucleotide
  Sense strand starting at position 3642 of SEQ ID NO: 1880275
uugaguuugcuguaucaca

SEQ ID NO: 1955239 - RNA, 19 nt, Artificial Sequence
  Description of Artificial Sequence: Synthetic oligonucleotide
  Antisense strand to SEQ ID NO: 1955238
ugugauacagcaaacucaa

SEQ ID NO: 1955240 - RNA, 19 nt, Artificial Sequence
  Description of Artificial Sequence: Synthetic oligonucleotide
  Sense strand starting at position 3661 of SEQ ID NO: 1880275
ugauuuauauccuagggaa

SEQ ID NO: 1955241 - RNA, 19 nt, Artificial Sequence
  Description of Artificial Sequence: Synthetic oligonucleotide
  Antisense strand to SEQ ID NO: 1955240
uucccuaggauauaaauca

SEQ ID NO: 1955242 - RNA, 19 nt, Artificial Sequence
  Description of Artificial Sequence: Synthetic oligonucleotide
  Sense strand starting at position 3820 of SEQ ID NO: 1880275
aaaguaugguggccucaga

SEQ ID NO: 1955243 - RNA, 19 nt, Artificial Sequence
  Description of Artificial Sequence: Synthetic oligonucleotide
  Antisense strand to SEQ ID NO: 1955242
ucugaggccaccauacuuu

SEQ ID NO: 1955244 - RNA, 19 nt, Artificial Sequence
  Description of Artificial Sequence: Synthetic oligonucleotide
  Sense strand starting at position 23 of SEQ ID NO: 1880276
agaggaaccucauauuucu

SEQ ID NO: 1955245 - RNA, 19 nt, Artificial Sequence
  Description of Artificial Sequence: Synthetic oligonucleotide
  Antisense strand to SEQ ID NO: 1955244
agaaauaugagguuccucu

SEQ ID NO: 1955246 - RNA, 19 nt, Artificial Sequence
  Description of Artificial Sequence: Synthetic oligonucleotide
  Sense strand starting at position 69 of SEQ ID NO: 1880276
agaagaauguaagaggaga

SEQ ID NO: 1955247 - RNA, 19 nt, Artificial Sequence
  Description of Artificial Sequence: Synthetic oligonucleotide
  Antisense strand to SEQ ID NO: 1955246
ucuccucuuacauucuucu

SEQ ID NO: 1955248 - RNA, 19 nt, Artificial Sequence
  Description of Artificial Sequence: Synthetic oligonucleotide
  Sense strand starting at position 230 of SEQ ID NO: 1880276
auaaucccugaguauugua

SEQ ID NO: 1955249 - RNA, 19 nt, Artificial Sequence
  Description of Artificial Sequence: Synthetic oligonucleotide
  Antisense strand to SEQ ID NO: 1955248
uacaauacucagggauuau

SEQ ID NO: 1955250 - RNA, 19 nt, Artificial Sequence
  Description of Artificial Sequence: Synthetic oligonucleotide
  Sense strand starting at position 239 of SEQ ID NO: 1880276
gaguauuguagguauagga

SEQ ID NO: 1955251 - RNA, 19 nt, Artificial Sequence
  Description of Artificial Sequence: Synthetic oligonucleotide
  Antisense strand to SEQ ID NO: 1955250
uccuauaccuacaauacuc

SEQ ID NO: 1955252 - RNA, 19 nt, Artificial Sequence
  Description of Artificial Sequence: Synthetic oligonucleotide
  Sense strand starting at position 397 of SEQ ID NO: 1880276
ggacucagucuaugcaaca

SEQ ID NO: 1955253 - RNA, 19 nt, Artificial Sequence
  Description of Artificial Sequence: Synthetic oligonucleotide
  Antisense strand to SEQ ID NO: 1955252
uguugcauagacugagucc

SEQ ID NO: 1955254 - RNA, 19 nt, Artificial Sequence
  Description of Artificial Sequence: Synthetic oligonucleotide
  Sense strand starting at position 568 of SEQ ID NO: 1880276
acuagagaguaguugaaca

SEQ ID NO: 1955255 - RNA, 19 nt, Artificial Sequence
  Description of Artificial Sequence: Synthetic oligonucleotide
  Antisense strand to SEQ ID NO: 1955254
uguucaacuacucucuagu

SEQ ID NO: 1955256 - RNA, 19 nt, Artificial Sequence
  Description of Artificial Sequence: Synthetic oligonucleotide
  Sense strand starting at position 975 of SEQ ID NO: 1880276
accagaaucuaugcauaag

SEQ ID NO: 1955257 - RNA, 19 nt, Artificial Sequence
  Description of Artificial Sequence: Synthetic oligonucleotide
  Antisense strand to SEQ ID NO: 1955256
cuuaugcauagauucuggu

SEQ ID NO: 1955258 - RNA, 19 nt, Artificial Sequence
  Description of Artificial Sequence: Synthetic oligonucleotide
  Sense strand starting at position 1069 of SEQ ID NO: 1880276
ggaauaguaucaguauaca

SEQ ID NO: 1955259 - RNA, 19 nt, Artificial Sequence
  Description of Artificial Sequence: Synthetic oligonucleotide
  Antisense strand to SEQ ID NO: 1955258
uguauacugauacuauucc

SEQ ID NO: 1955260 - RNA, 19 nt, Artificial Sequence
  Description of Artificial Sequence: Synthetic oligonucleotide
  Sense strand starting at position 1127 of SEQ ID NO: 1880276
ugcaacuaccuaggauuaa

SEQ ID NO: 1955261 - RNA, 19 nt, Artificial Sequence
  Description of Artificial Sequence: Synthetic oligonucleotide
  Antisense strand to SEQ ID NO: 1955260
uuaauccuagguaguugca

SEQ ID NO: 1955262 - RNA, 19 nt, Artificial Sequence
  Description of Artificial Sequence: Synthetic oligonucleotide
  Sense strand starting at position 1138 of SEQ ID NO: 1880276
aggauuaauuuagaagcau

SEQ ID NO: 1955263 - RNA, 19 nt, Artificial Sequence
  Description of Artificial Sequence: Synthetic oligonucleotide
  Antisense strand to SEQ ID NO: 1955262
augcuucuaaauuaauccu

SEQ ID NO: 1955264 - RNA, 19 nt, Artificial Sequence
  Description of Artificial Sequence: Synthetic oligonucleotide
  Sense strand starting at position 1481 of SEQ ID NO: 1880276
acuuucucccagcagagua

SEQ ID NO: 1955265 - RNA, 19 nt, Artificial Sequence
  Description of Artificial Sequence: Synthetic oligonucleotide
  Antisense strand to SEQ ID NO: 1955264
uacucugcugggagaaagu

SEQ ID NO: 1955266 - RNA, 19 nt, Artificial Sequence
  Description of Artificial Sequence: Synthetic oligonucleotide
  Sense strand starting at position 1654 of SEQ ID NO: 1880276
gaaaguguuaucuguggaa

SEQ ID NO: 1955267 - RNA, 19 nt, Artificial Sequence
  Description of Artificial Sequence: Synthetic oligonucleotide
  Antisense strand to SEQ ID NO: 1955266
uuccacagauaacacuuuc

SEQ ID NO: 1955268 - RNA, 19 nt, Artificial Sequence
  Description of Artificial Sequence: Synthetic oligonucleotide
  Sense strand starting at position 1656 of SEQ ID NO: 1880276
aaguguuaucuguggaaga

SEQ ID NO: 1955269 - RNA, 19 nt, Artificial Sequence
  Description of Artificial Sequence: Synthetic oligonucleotide
  Antisense strand to SEQ ID NO: 1955268
ucuuccacagauaacacuu

SEQ ID NO: 1955270 - RNA, 19 nt, Artificial Sequence
  Description of Artificial Sequence: Synthetic oligonucleotide
  Sense strand starting at position 1658 of SEQ ID NO: 1880276
guguuaucuguggaagaaa

SEQ ID NO: 1955271 - RNA, 19 nt, Artificial Sequence
  Description of Artificial Sequence: Synthetic oligonucleotide
  Antisense strand to SEQ ID NO: 1955270
uuucuuccacagauaacac

SEQ ID NO: 1955272 - RNA, 19 nt, Artificial Sequence
  Description of Artificial Sequence: Synthetic oligonucleotide
  Sense strand starting at position 1674 of SEQ ID NO: 1880276
aaaguaaugggaugguauc

SEQ ID NO: 1955273 - RNA, 19 nt, Artificial Sequence
  Description of Artificial Sequence: Synthetic oligonucleotide
  Antisense strand to SEQ ID NO: 1955272
gauaccaucccauuacuuu

SEQ ID NO: 1955274 - RNA, 19 nt, Artificial Sequence
  Description of Artificial Sequence: Synthetic oligonucleotide
  Sense strand starting at position 1675 of SEQ ID NO: 1880276
aaguaaugggaugguauca

SEQ ID NO: 1955275 - RNA, 19 nt, Artificial Sequence
  Description of Artificial Sequence: Synthetic oligonucleotide
  Antisense strand to SEQ ID NO: 1955274
ugauaccaucccauuacuu

SEQ ID NO: 1955276 - RNA, 19 nt, Artificial Sequence
  Description of Artificial Sequence: Synthetic oligonucleotide
  Sense strand starting at position 1827 of SEQ ID NO: 1880276
aucccauguguaugaaaua

SEQ ID NO: 1955277 - RNA, 19 nt, Artificial Sequence
  Description of Artificial Sequence: Synthetic oligonucleotide
  Antisense strand to SEQ ID NO: 1955276
uauuucauacacaugggau

SEQ ID NO: 1955278 - RNA, 19 nt, Artificial Sequence
  Description of Artificial Sequence: Synthetic oligonucleotide
  Sense strand starting at position 2075 of SEQ ID NO: 1880276
ggcgccugugaguuuaguu

SEQ ID NO: 1955279 - RNA, 19 nt, Artificial Sequence
  Description of Artificial Sequence: Synthetic oligonucleotide
  Antisense strand to SEQ ID NO: 1955278
aacuaaacucacaggcgcc

SEQ ID NO: 1955280 - RNA, 19 nt, Artificial Sequence
  Description of Artificial Sequence: Synthetic oligonucleotide
  Sense strand starting at position 2403 of SEQ ID NO: 1880276
ccugaauugggacggaguu

SEQ ID NO: 1955281 - RNA, 19 nt, Artificial Sequence
  Description of Artificial Sequence: Synthetic oligonucleotide
  Antisense strand to SEQ ID NO: 1955280
aacuccgucccaauucagg

SEQ ID NO: 1955282 - RNA, 19 nt, Artificial Sequence
  Description of Artificial Sequence: Synthetic oligonucleotide
  Sense strand starting at position 2532 of SEQ ID NO: 1880276
ucccaaucuccucacgaga

SEQ ID NO: 1955283 - RNA, 19 nt, Artificial Sequence
  Description of Artificial Sequence: Synthetic oligonucleotide
  Antisense strand to SEQ ID NO: 1955282
ucucgugaggagauuggga

SEQ ID NO: 1955284 - RNA, 19 nt, Artificial Sequence
  Description of Artificial Sequence: Synthetic oligonucleotide
  Sense strand starting at position 2601 of SEQ ID NO: 1880276
acauuaccuccgcaaggua

SEQ ID NO: 1955285 - RNA, 19 nt, Artificial Sequence
  Description of Artificial Sequence: Synthetic oligonucleotide
  Antisense strand to SEQ ID NO: 1955284
uaccuugcggagguaaugu

SEQ ID NO: 1955286 - RNA, 19 nt, Artificial Sequence
  Description of Artificial Sequence: Synthetic oligonucleotide
  Sense strand starting at position 2901 of SEQ ID NO: 1880276
uugggaaauucugacauuu

SEQ ID NO: 1955287 - RNA, 19 nt, Artificial Sequence
  Description of Artificial Sequence: Synthetic oligonucleotide
  Antisense strand to SEQ ID NO: 1955286
aaaugucagaauuucccaa

SEQ ID NO: 1955288 - RNA, 19 nt, Artificial Sequence
  Description of Artificial Sequence: Synthetic oligonucleotide
  Sense strand starting at position 3041 of SEQ ID NO: 1880276
guguuaguggcucugcuuu

SEQ ID NO: 1955289 - RNA, 19 nt, Artificial Sequence
  Description of Artificial Sequence: Synthetic oligonucleotide
  Antisense strand to SEQ ID NO: 1955288
aaagcagagccacuaacac

SEQ ID NO: 1955290 - RNA, 19 nt, Artificial Sequence
  Description of Artificial Sequence: Synthetic oligonucleotide
  Sense strand starting at position 3075 of SEQ ID NO: 1880276
aagccaguacucgacuaga

SEQ ID NO: 1955291 - RNA, 19 nt, Artificial Sequence
  Description of Artificial Sequence: Synthetic oligonucleotide
  Antisense strand to SEQ ID NO: 1955290
ucuagucgaguacuggcuu

SEQ ID NO: 1955292 - RNA, 19 nt, Artificial Sequence
  Description of Artificial Sequence: Synthetic oligonucleotide
  Sense strand starting at position 3078 of SEQ ID NO: 1880276
ccaguacucgacuagauag

SEQ ID NO: 1955293 - RNA, 19 nt, Artificial Sequence
  Description of Artificial Sequence: Synthetic oligonucleotide
  Antisense strand to SEQ ID NO: 1955292
cuaucuagucgaguacugg

SEQ ID NO: 1955294 - RNA, 19 nt, Artificial Sequence
  Description of Artificial Sequence: Synthetic oligonucleotide
  Sense strand starting at position 3080 of SEQ ID NO: 1880276
aguacucgacuagauaguu

SEQ ID NO: 1955295 - RNA, 19 nt, Artificial Sequence
  Description of Artificial Sequence: Synthetic oligonucleotide
  Antisense strand to SEQ ID NO: 1955294
aacuaucuagucgaguacu

SEQ ID NO: 1955296 - RNA, 19 nt, Artificial Sequence
  Description of Artificial Sequence: Synthetic oligonucleotide
  Sense strand starting at position 3085 of SEQ ID NO: 1880276
ucgacuagauaguuaauca

SEQ ID NO: 1955297 - RNA, 19 nt, Artificial Sequence
  Description of Artificial Sequence: Synthetic oligonucleotide
  Antisense strand to SEQ ID NO: 1955296
ugauuaacuaucuagucga

SEQ ID NO: 1955298 - RNA, 19 nt, Artificial Sequence
  Description of Artificial Sequence: Synthetic oligonucleotide
  Sense strand starting at position 3089 of SEQ ID NO: 1880276
cuagauaguuaaucagauu

SEQ ID NO: 1955299 - RNA, 19 nt, Artificial Sequence
  Description of Artificial Sequence: Synthetic oligonucleotide
  Antisense strand to SEQ ID NO: 1955298
aaucugauuaacuaucuag

SEQ ID NO: 1955300 - RNA, 19 nt, Artificial Sequence
  Description of Artificial Sequence: Synthetic oligonucleotide
  Sense strand starting at position 3210 of SEQ ID NO: 1880276
cuaaguuagccacaaauag

SEQ ID NO: 1955301 - RNA, 19 nt, Artificial Sequence
  Description of Artificial Sequence: Synthetic oligonucleotide
  Antisense strand to SEQ ID NO: 1955300
cuauuuguggcuaacuuag

SEQ ID NO: 1955302 - RNA, 19 nt, Artificial Sequence
  Description of Artificial Sequence: Synthetic oligonucleotide
  Sense strand starting at position 3255 of SEQ ID NO: 1880276
ugaaauaaaccuggguuua

SEQ ID NO: 1955303 - RNA, 19 nt, Artificial Sequence
  Description of Artificial Sequence: Synthetic oligonucleotide
  Antisense strand to SEQ ID NO: 1955302
uaaacccagguuuauuuca

SEQ ID NO: 1955304 - RNA, 19 nt, Artificial Sequence
  Description of Artificial Sequence: Synthetic oligonucleotide
  Sense strand starting at position 3257 of SEQ ID NO: 1880276
aaauaaaccuggguuuagu

SEQ ID NO: 1955305 - RNA, 19 nt, Artificial Sequence
  Description of Artificial Sequence: Synthetic oligonucleotide
  Antisense strand to SEQ ID NO: 1955304
acuaaacccagguuuauuu

SEQ ID NO: 1955306 - RNA, 19 nt, Artificial Sequence
  Description of Artificial Sequence: Synthetic oligonucleotide
  Sense strand starting at position 3384 of SEQ ID NO: 1880276
cuaauugguggcuauugau

SEQ ID NO: 1955307 - RNA, 19 nt, Artificial Sequence
  Description of Artificial Sequence: Synthetic oligonucleotide
  Antisense strand to SEQ ID NO: 1955306
aucaauagccaccaauuag

SEQ ID NO: 1955308 - RNA, 19 nt, Artificial Sequence
  Description of Artificial Sequence: Synthetic oligonucleotide
  Sense strand starting at position 3617 of SEQ ID NO: 1880276
uaggacucucaaugagagu

SEQ ID NO: 1955309 - RNA, 19 nt, Artificial Sequence
  Description of Artificial Sequence: Synthetic oligonucleotide
  Antisense strand to SEQ ID NO: 1955308
acucucauugagaguccua

SEQ ID NO: 1955310 - RNA, 19 nt, Artificial Sequence
  Description of Artificial Sequence: Synthetic oligonucleotide
  Sense strand starting at position 3686 of SEQ ID NO: 1880276
uguuuaaaugcaggauaaa

SEQ ID NO: 1955311 - RNA, 19 nt, Artificial Sequence
  Description of Artificial Sequence: Synthetic oligonucleotide
  Antisense strand to SEQ ID NO: 1955310
uuuauccugcauuuaaaca

SEQ ID NO: 1955312 - RNA, 19 nt, Artificial Sequence
  Description of Artificial Sequence: Synthetic oligonucleotide
  Sense strand starting at position 3876 of SEQ ID NO: 1880276
ccauguuauccagagcauu

SEQ ID NO: 1955313 - RNA, 19 nt, Artificial Sequence
  Description of Artificial Sequence: Synthetic oligonucleotide
  Antisense strand to SEQ ID NO: 1955312
aaugcucuggauaacaugg

SEQ ID NO: 1955314 - RNA, 19 nt, Artificial Sequence
  Description of Artificial Sequence: Synthetic oligonucleotide
  Sense strand starting at position 3930 of SEQ ID NO: 1880276
aggucaugugagugaacca

SEQ ID NO: 1955315 - RNA, 19 nt, Artificial Sequence
  Description of Artificial Sequence: Synthetic oligonucleotide
  Antisense strand to SEQ ID NO: 1955314
ugguucacucacaugaccu

SEQ ID NO: 1955316 - RNA, 19 nt, Artificial Sequence
  Description of Artificial Sequence: Synthetic oligonucleotide
  Sense strand starting at position 3935 of SEQ ID NO: 1880276
augugagugaaccaguaau

SEQ ID NO: 1955317 - RNA, 19 nt, Artificial Sequence
  Description of Artificial Sequence: Synthetic oligonucleotide
  Antisense strand to SEQ ID NO: 1955316
auuacugguucacucacau

SEQ ID NO: 1955318 - RNA, 19 nt, Artificial Sequence
  Description of Artificial Sequence: Synthetic oligonucleotide
  Sense strand starting at position 3946 of SEQ ID NO: 1880276
ccaguaauucuuuagguuu

SEQ ID NO: 1955319 - RNA, 19 nt, Artificial Sequence
  Description of Artificial Sequence: Synthetic oligonucleotide
  Antisense strand to SEQ ID NO: 1955318
aaaccuaaagaauuacugg

SEQ ID NO: 1955320 - RNA, 19 nt, Artificial Sequence
  Description of Artificial Sequence: Synthetic oligonucleotide
  Sense strand starting at position 3970 of SEQ ID NO: 1880276
uguugaguauaagcauaaa

SEQ ID NO: 1955321 - RNA, 19 nt, Artificial Sequence
  Description of Artificial Sequence: Synthetic oligonucleotide
  Antisense strand to SEQ ID NO: 1955320
uuuaugcuuauacucaaca

SEQ ID NO: 1955322 - RNA, 19 nt, Artificial Sequence
  Description of Artificial Sequence: Synthetic oligonucleotide
  Sense strand starting at position 3973 of SEQ ID NO: 1880276
ugaguauaagcauaaaguc

SEQ ID NO: 1955323 - RNA, 19 nt, Artificial Sequence
  Description of Artificial Sequence: Synthetic oligonucleotide
  Antisense strand to SEQ ID NO: 1955322
gacuuuaugcuuauacuca

SEQ ID NO: 1955324 - RNA, 19 nt, Artificial Sequence
  Description of Artificial Sequence: Synthetic oligonucleotide
  Sense strand starting at position 286 of SEQ ID NO: 1880277
cuauuugcuaaguguguca

SEQ ID NO: 1955325 - RNA, 19 nt, Artificial Sequence
  Description of Artificial Sequence: Synthetic oligonucleotide
  Antisense strand to SEQ ID NO: 1955324
ugacacacuuagcaaauag

SEQ ID NO: 1955326 - RNA, 19 nt, Artificial Sequence
  Description of Artificial Sequence: Synthetic oligonucleotide
  Sense strand starting at position 352 of SEQ ID NO: 1880277
caaugaguuagauguggca

SEQ ID NO: 1955327 - RNA, 19 nt, Artificial Sequence
  Description of Artificial Sequence: Synthetic oligonucleotide
  Antisense strand to SEQ ID NO: 1955326
ugccacaucuaacucauug

SEQ ID NO: 1955328 - RNA, 19 nt, Artificial Sequence
  Description of Artificial Sequence: Synthetic oligonucleotide
  Sense strand starting at position 394 of SEQ ID NO: 1880277
ucaugucacgucuaacuca

SEQ ID NO: 1955329 - RNA, 19 nt, Artificial Sequence
  Description of Artificial Sequence: Synthetic oligonucleotide
  Antisense strand to SEQ ID NO: 1955328
ugaguuagacgugacauga

SEQ ID NO: 1955330 - RNA, 19 nt, Artificial Sequence
  Description of Artificial Sequence: Synthetic oligonucleotide
  Sense strand starting at position 445 of SEQ ID NO: 1880277
uagagaaacugucuuaagc

SEQ ID NO: 1955331 - RNA, 19 nt, Artificial Sequence
  Description of Artificial Sequence: Synthetic oligonucleotide
  Antisense strand to SEQ ID NO: 1955330
gcuuaagacaguuucucua

SEQ ID NO: 1955332 - RNA, 19 nt, Artificial Sequence
  Description of Artificial Sequence: Synthetic oligonucleotide
  Sense strand starting at position 552 of SEQ ID NO: 1880277
cugcuuaugccacacagaa

SEQ ID NO: 1955333 - RNA, 19 nt, Artificial Sequence
  Description of Artificial Sequence: Synthetic oligonucleotide
  Antisense strand to SEQ ID NO: 1955332
uucuguguggcauaagcag

SEQ ID NO: 1955334 - RNA, 19 nt, Artificial Sequence
  Description of Artificial Sequence: Synthetic oligonucleotide
  Sense strand starting at position 684 of SEQ ID NO: 1880277
gcaaucacaugccuuagaa

SEQ ID NO: 1955335 - RNA, 19 nt, Artificial Sequence
  Description of Artificial Sequence: Synthetic oligonucleotide
  Antisense strand to SEQ ID NO: 1955334
uucuaaggcaugugauugc

SEQ ID NO: 1955336 - RNA, 19 nt, Artificial Sequence
  Description of Artificial Sequence: Synthetic oligonucleotide
  Sense strand starting at position 817 of SEQ ID NO: 1880277
cgagauaaggugcauagau

SEQ ID NO: 1955337 - RNA, 19 nt, Artificial Sequence
  Description of Artificial Sequence: Synthetic oligonucleotide
  Antisense strand to SEQ ID NO: 1955336
aucuaugcaccuuaucucg

SEQ ID NO: 1955338 - RNA, 19 nt, Artificial Sequence
  Description of Artificial Sequence: Synthetic oligonucleotide
  Sense strand starting at position 849 of SEQ ID NO: 1880277
cugugugaugcauauuauu

SEQ ID NO: 1955339 - RNA, 19 nt, Artificial Sequence
  Description of Artificial Sequence: Synthetic oligonucleotide
  Antisense strand to SEQ ID NO: 1955338
aauaauaugcaucacacag

SEQ ID NO: 1955340 - RNA, 19 nt, Artificial Sequence
  Description of Artificial Sequence: Synthetic oligonucleotide
  Sense strand starting at position 1171 of SEQ ID NO: 1880277
acauacucuuguuugguau

SEQ ID NO: 1955341 - RNA, 19 nt, Artificial Sequence
  Description of Artificial Sequence: Synthetic oligonucleotide
  Antisense strand to SEQ ID NO: 1955340
auaccaaacaagaguaugu

SEQ ID NO: 1955342 - RNA, 19 nt, Artificial Sequence
  Description of Artificial Sequence: Synthetic oligonucleotide
  Sense strand starting at position 1184 of SEQ ID NO: 1880277
ugguauucccaguaaauga

SEQ ID NO: 1955343 - RNA, 19 nt, Artificial Sequence
  Description of Artificial Sequence: Synthetic oligonucleotide
  Antisense strand to SEQ ID NO: 1955342
ucauuuacugggaauacca

SEQ ID NO: 1955344 - RNA, 19 nt, Artificial Sequence
  Description of Artificial Sequence: Synthetic oligonucleotide
  Sense strand starting at position 1441 of SEQ ID NO: 1880277
ccaguaaugagucauguuc

SEQ ID NO: 1955345 - RNA, 19 nt, Artificial Sequence
  Description of Artificial Sequence: Synthetic oligonucleotide
  Antisense strand to SEQ ID NO: 1955344
gaacaugacucauuacugg

SEQ ID NO: 1955346 - RNA, 19 nt, Artificial Sequence
  Description of Artificial Sequence: Synthetic oligonucleotide
  Sense strand starting at position 1588 of SEQ ID NO: 1880277
cuuacuuccugcuuuggaa

SEQ ID NO: 1955347 - RNA, 19 nt, Artificial Sequence
  Description of Artificial Sequence: Synthetic oligonucleotide
  Antisense strand to SEQ ID NO: 1955346
uuccaaagcaggaaguaag

SEQ ID NO: 1955348 - RNA, 19 nt, Artificial Sequence
  Description of Artificial Sequence: Synthetic oligonucleotide
  Sense strand starting at position 1915 of SEQ ID NO: 1880277
guaagaaacccacaguucu

SEQ ID NO: 1955349 - RNA, 19 nt, Artificial Sequence
  Description of Artificial Sequence: Synthetic oligonucleotide
  Antisense strand to SEQ ID NO: 1955348
agaacuguggguuucuuac

SEQ ID NO: 1955350 - RNA, 19 nt, Artificial Sequence
  Description of Artificial Sequence: Synthetic oligonucleotide
  Sense strand starting at position 1954 of SEQ ID NO: 1880277
cccugugguuaauccuuaa

SEQ ID NO: 1955351 - RNA, 19 nt, Artificial Sequence
  Description of Artificial Sequence: Synthetic oligonucleotide
  Antisense strand to SEQ ID NO: 1955350
uuaaggauuaaccacaggg

SEQ ID NO: 1955352 - RNA, 19 nt, Artificial Sequence
  Description of Artificial Sequence: Synthetic oligonucleotide
  Sense strand starting at position 1957 of SEQ ID NO: 1880277
ugugguuaauccuuaacca

SEQ ID NO: 1955353 - RNA, 19 nt, Artificial Sequence
  Description of Artificial Sequence: Synthetic oligonucleotide
  Antisense strand to SEQ ID NO: 1955352
ugguuaaggauuaaccaca

SEQ ID NO: 1955354 - RNA, 19 nt, Artificial Sequence
  Description of Artificial Sequence: Synthetic oligonucleotide
  Sense strand starting at position 1958 of SEQ ID NO: 1880277
gugguuaauccuuaaccaa

SEQ ID NO: 1955355 - RNA, 19 nt, Artificial Sequence
  Description of Artificial Sequence: Synthetic oligonucleotide
  Antisense strand to SEQ ID NO: 1955354
uugguuaaggauuaaccac

SEQ ID NO: 1955356 - RNA, 19 nt, Artificial Sequence
  Description of Artificial Sequence: Synthetic oligonucleotide
  Sense strand starting at position 2078 of SEQ ID NO: 1880277
gcacgaaguccagacucaa

SEQ ID NO: 1955357 - RNA, 19 nt, Artificial Sequence
  Description of Artificial Sequence: Synthetic oligonucleotide
  Antisense strand to SEQ ID NO: 1955356
uugagucuggacuucgugc

SEQ ID NO: 1955358 - RNA, 19 nt, Artificial Sequence
  Description of Artificial Sequence: Synthetic oligonucleotide
  Sense strand starting at position 2225 of SEQ ID NO: 1880277
ggaugcgucacagggacua

SEQ ID NO: 1955359 - RNA, 19 nt, Artificial Sequence
  Description of Artificial Sequence: Synthetic oligonucleotide
  Antisense strand to SEQ ID NO: 1955358
uagucccugugacgcaucc

SEQ ID NO: 1955360 - RNA, 19 nt, Artificial Sequence
  Description of Artificial Sequence: Synthetic oligonucleotide
  Sense strand starting at position 2406 of SEQ ID NO: 1880277
ucaauaaggccagagcuua

SEQ ID NO: 1955361 - RNA, 19 nt, Artificial Sequence
  Description of Artificial Sequence: Synthetic oligonucleotide
  Antisense strand to SEQ ID NO: 1955360
uaagcucuggccuuauuga

SEQ ID NO: 1955362 - RNA, 19 nt, Artificial Sequence
  Description of Artificial Sequence: Synthetic oligonucleotide
  Sense strand starting at position 2440 of SEQ ID NO: 1880277
gccucagcccaucauuaga

SEQ ID NO: 1955363 - RNA, 19 nt, Artificial Sequence
  Description of Artificial Sequence: Synthetic oligonucleotide
  Antisense strand to SEQ ID NO: 1955362
ucuaaugaugggcugaggc

SEQ ID NO: 1955364 - RNA, 19 nt, Artificial Sequence
  Description of Artificial Sequence: Synthetic oligonucleotide
  Sense strand starting at position 2465 of SEQ ID NO: 1880277
agggaaaguguccaccuuu

SEQ ID NO: 1955365 - RNA, 19 nt, Artificial Sequence
  Description of Artificial Sequence: Synthetic oligonucleotide
  Antisense strand to SEQ ID NO: 1955364
aaagguggacacuuucccu

SEQ ID NO: 1955366 - RNA, 19 nt, Artificial Sequence
  Description of Artificial Sequence: Synthetic oligonucleotide
  Sense strand starting at position 2489 of SEQ ID NO: 1880277
aaaguugaauguuucgauu

SEQ ID NO: 1955367 - RNA, 19 nt, Artificial Sequence
  Description of Artificial Sequence: Synthetic oligonucleotide
  Antisense strand to SEQ ID NO: 1955366
aaucgaaacauucaacuuu

SEQ ID NO: 1955368 - RNA, 19 nt, Artificial Sequence
  Description of Artificial Sequence: Synthetic oligonucleotide
  Sense strand starting at position 2622 of SEQ ID NO: 1880277
cccucaauucgugagugga

SEQ ID NO: 1955369 - RNA, 19 nt, Artificial Sequence
  Description of Artificial Sequence: Synthetic oligonucleotide
  Antisense strand to SEQ ID NO: 1955368
uccacucacgaauugaggg

SEQ ID NO: 1955370 - RNA, 19 nt, Artificial Sequence
  Description of Artificial Sequence: Synthetic oligonucleotide
  Sense strand starting at position 2624 of SEQ ID NO: 1880277
cucaauucgugaguggaga

SEQ ID NO: 1955371 - RNA, 19 nt, Artificial Sequence
  Description of Artificial Sequence: Synthetic oligonucleotide
  Antisense strand to SEQ ID NO: 1955370
ucuccacucacgaauugag

SEQ ID NO: 1955372 - RNA, 19 nt, Artificial Sequence
  Description of Artificial Sequence: Synthetic oligonucleotide
  Sense strand starting at position 2625 of SEQ ID NO: 1880277
ucaauucgugaguggagau

SEQ ID NO: 1955373 - RNA, 19 nt, Artificial Sequence
  Description of Artificial Sequence: Synthetic oligonucleotide
  Antisense strand to SEQ ID NO: 1955372
aucuccacucacgaauuga

SEQ ID NO: 1955374 - RNA, 19 nt, Artificial Sequence
  Description of Artificial Sequence: Synthetic oligonucleotide
  Sense strand starting at position 2626 of SEQ ID NO: 1880277
caauucgugaguggagauu

SEQ ID NO: 1955375 - RNA, 19 nt, Artificial Sequence
  Description of Artificial Sequence: Synthetic oligonucleotide
  Antisense strand to SEQ ID NO: 1955374
aaucuccacucacgaauug

SEQ ID NO: 1955376 - RNA, 19 nt, Artificial Sequence
  Description of Artificial Sequence: Synthetic oligonucleotide
  Sense strand starting at position 2826 of SEQ ID NO: 1880277
aggauagauucucuugccu

SEQ ID NO: 1955377 - RNA, 19 nt, Artificial Sequence
  Description of Artificial Sequence: Synthetic oligonucleotide
  Antisense strand to SEQ ID NO: 1955376
aggcaagagaaucuauccu

SEQ ID NO: 1955378 - RNA, 19 nt, Artificial Sequence
  Description of Artificial Sequence: Synthetic oligonucleotide
  Sense strand starting at position 2831 of SEQ ID NO: 1880277
agauucucuugccuuugaa

SEQ ID NO: 1955379 - RNA, 19 nt, Artificial Sequence
  Description of Artificial Sequence: Synthetic oligonucleotide
  Antisense strand to SEQ ID NO: 1955378
uucaaaggcaagagaaucu

SEQ ID NO: 1955380 - RNA, 19 nt, Artificial Sequence
  Description of Artificial Sequence: Synthetic oligonucleotide
  Sense strand starting at position 2973 of SEQ ID NO: 1880277
cuuuacauaucauuagugu

SEQ ID NO: 1955381 - RNA, 19 nt, Artificial Sequence
  Description of Artificial Sequence: Synthetic oligonucleotide
  Antisense strand to SEQ ID NO: 1955380
acacuaaugauauguaaag

SEQ ID NO: 1955382 - RNA, 19 nt, Artificial Sequence
  Description of Artificial Sequence: Synthetic oligonucleotide
  Sense strand starting at position 2995 of SEQ ID NO: 1880277
auacuugcugcugaaugua

SEQ ID NO: 1955383 - RNA, 19 nt, Artificial Sequence
  Description of Artificial Sequence: Synthetic oligonucleotide
  Antisense strand to SEQ ID NO: 1955382
uacauucagcagcaaguau

SEQ ID NO: 1955384 - RNA, 19 nt, Artificial Sequence
  Description of Artificial Sequence: Synthetic oligonucleotide
  Sense strand starting at position 3003 of SEQ ID NO: 1880277
ugcugaauguaauugaaua

SEQ ID NO: 1955385 - RNA, 19 nt, Artificial Sequence
  Description of Artificial Sequence: Synthetic oligonucleotide
  Antisense strand to SEQ ID NO: 1955384
uauucaauuacauucagca

SEQ ID NO: 1955386 - RNA, 19 nt, Artificial Sequence
  Description of Artificial Sequence: Synthetic oligonucleotide
  Sense strand starting at position 3107 of SEQ ID NO: 1880277
ccguuaaagcauuaagagu

SEQ ID NO: 1955387 - RNA, 19 nt, Artificial Sequence
  Description of Artificial Sequence: Synthetic oligonucleotide
  Antisense strand to SEQ ID NO: 1955386
acucuuaaugcuuuaacgg

SEQ ID NO: 1955388 - RNA, 19 nt, Artificial Sequence
  Description of Artificial Sequence: Synthetic oligonucleotide
  Sense strand starting at position 3473 of SEQ ID NO: 1880277
ucuauuaauuggguagcaa

SEQ ID NO: 1955389 - RNA, 19 nt, Artificial Sequence
  Description of Artificial Sequence: Synthetic oligonucleotide
  Antisense strand to SEQ ID NO: 1955388
uugcuacccaauuaauaga

SEQ ID NO: 1955390 - RNA, 19 nt, Artificial Sequence
  Description of Artificial Sequence: Synthetic oligonucleotide
  Sense strand starting at position 3474 of SEQ ID NO: 1880277
cuauuaauuggguagcaau

SEQ ID NO: 1955391 - RNA, 19 nt, Artificial Sequence
  Description of Artificial Sequence: Synthetic oligonucleotide
  Antisense strand to SEQ ID NO: 1955390
auugcuacccaauuaauag

SEQ ID NO: 1955392 - RNA, 19 nt, Artificial Sequence
  Description of Artificial Sequence: Synthetic oligonucleotide
  Sense strand starting at position 3580 of SEQ ID NO: 1880277
uuagaagugccauaacuug

SEQ ID NO: 1955393 - RNA, 19 nt, Artificial Sequence
  Description of Artificial Sequence: Synthetic oligonucleotide
  Antisense strand to SEQ ID NO: 1955392
caaguuauggcacuucuaa

SEQ ID NO: 1955394 - RNA, 19 nt, Artificial Sequence
  Description of Artificial Sequence: Synthetic oligonucleotide
  Sense strand starting at position 3610 of SEQ ID NO: 1880277
cuaguuagcagugaggaca

SEQ ID NO: 1955395 - RNA, 19 nt, Artificial Sequence
  Description of Artificial Sequence: Synthetic oligonucleotide
  Antisense strand to SEQ ID NO: 1955394
uguccucacugcuaacuag

SEQ ID NO: 1955396 - RNA, 19 nt, Artificial Sequence
  Description of Artificial Sequence: Synthetic oligonucleotide
  Sense strand starting at position 3767 of SEQ ID NO: 1880277
uaggcaggucuauaaauca

SEQ ID NO: 1955397 - RNA, 19 nt, Artificial Sequence
  Description of Artificial Sequence: Synthetic oligonucleotide
  Antisense strand to SEQ ID NO: 1955396
ugauuuauagaccugccua

SEQ ID NO: 1955398 - RNA, 19 nt, Artificial Sequence
  Description of Artificial Sequence: Synthetic oligonucleotide
  Sense strand starting at position 3845 of SEQ ID NO: 1880277
aagaguaguugcuccagga

SEQ ID NO: 1955399 - RNA, 19 nt, Artificial Sequence
  Description of Artificial Sequence: Synthetic oligonucleotide
  Antisense strand to SEQ ID NO: 1955398
uccuggagcaacuacucuu

SEQ ID NO: 1955400 - RNA, 19 nt, Artificial Sequence
  Description of Artificial Sequence: Synthetic oligonucleotide
  Sense strand starting at position 3977 of SEQ ID NO: 1880277
ugccaucugcuagaauacu

SEQ ID NO: 1955401 - RNA, 19 nt, Artificial Sequence
  Description of Artificial Sequence: Synthetic oligonucleotide
  Antisense strand to SEQ ID NO: 1955400
aguauucuagcagauggca

SEQ ID NO: 1955402 - RNA, 19 nt, Artificial Sequence
  Description of Artificial Sequence: Synthetic oligonucleotide
  Sense strand starting at position 3983 of SEQ ID NO: 1880277
cugcuagaauacuuuagau

SEQ ID NO: 1955403 - RNA, 19 nt, Artificial Sequence
  Description of Artificial Sequence: Synthetic oligonucleotide
  Antisense strand to SEQ ID NO: 1955402
aucuaaaguauucuagcag

SEQ ID NO: 1955404 - RNA, 19 nt, Artificial Sequence
  Description of Artificial Sequence: Synthetic oligonucleotide
  Sense strand starting at position 75 of SEQ ID NO: 1880278
aacuuauaccgagguuacu

SEQ ID NO: 1955405 - RNA, 19 nt, Artificial Sequence
  Description of Artificial Sequence: Synthetic oligonucleotide
  Antisense strand to SEQ ID NO: 1955404
aguaaccucgguauaaguu

SEQ ID NO: 1955406 - RNA, 19 nt, Artificial Sequence
  Description of Artificial Sequence: Synthetic oligonucleotide
  Sense strand starting at position 147 of SEQ ID NO: 1880278
agaaauuccugaucgucug

SEQ ID NO: 1955407 - RNA, 19 nt, Artificial Sequence
  Description of Artificial Sequence: Synthetic oligonucleotide
  Antisense strand to SEQ ID NO: 1955406
cagacgaucaggaauuucu

SEQ ID NO: 1955408 - RNA, 19 nt, Artificial Sequence
  Description of Artificial Sequence: Synthetic oligonucleotide
  Sense strand starting at position 258 of SEQ ID NO: 1880278
gcagacacauguuccaauu

SEQ ID NO: 1955409 - RNA, 19 nt, Artificial Sequence
  Description of Artificial Sequence: Synthetic oligonucleotide
  Antisense strand to SEQ ID NO: 1955408
aauuggaacaugugucugc

SEQ ID NO: 1955410 - RNA, 19 nt, Artificial Sequence
  Description of Artificial Sequence: Synthetic oligonucleotide
  Sense strand starting at position 356 of SEQ ID NO: 1880278
gggacuacuguauaugcaa

SEQ ID NO: 1955411 - RNA, 19 nt, Artificial Sequence
  Description of Artificial Sequence: Synthetic oligonucleotide
  Antisense strand to SEQ ID NO: 1955410
uugcauauacaguaguccc

SEQ ID NO: 1955412 - RNA, 19 nt, Artificial Sequence
  Description of Artificial Sequence: Synthetic oligonucleotide
  Sense strand starting at position 363 of SEQ ID NO: 1880278
cuguauaugcaaggauaca

SEQ ID NO: 1955413 - RNA, 19 nt, Artificial Sequence
  Description of Artificial Sequence: Synthetic oligonucleotide
  Antisense strand to SEQ ID NO: 1955412
uguauccuugcauauacag

SEQ ID NO: 1955414 - RNA, 19 nt, Artificial Sequence
  Description of Artificial Sequence: Synthetic oligonucleotide
  Sense strand starting at position 407 of SEQ ID NO: 1880278
gcauuaugccagcauaauc

SEQ ID NO: 1955415 - RNA, 19 nt, Artificial Sequence
  Description of Artificial Sequence: Synthetic oligonucleotide
  Antisense strand to SEQ ID NO: 1955414
gauuaugcuggcauaaugc

SEQ ID NO: 1955416 - RNA, 19 nt, Artificial Sequence
  Description of Artificial Sequence: Synthetic oligonucleotide
  Sense strand starting at position 554 of SEQ ID NO: 1880278
gcccacuaccaaugugaaa

SEQ ID NO: 1955417 - RNA, 19 nt, Artificial Sequence
  Description of Artificial Sequence: Synthetic oligonucleotide
  Antisense strand to SEQ ID NO: 1955416
uuucacauugguagugggc

SEQ ID NO: 1955418 - RNA, 19 nt, Artificial Sequence
  Description of Artificial Sequence: Synthetic oligonucleotide
  Sense strand starting at position 623 of SEQ ID NO: 1880278
cuagucagcguuuaucaua

SEQ ID NO: 1955419 - RNA, 19 nt, Artificial Sequence
  Description of Artificial Sequence: Synthetic oligonucleotide
  Antisense strand to SEQ ID NO: 1955418
uaugauaaacgcugacuag

SEQ ID NO: 1955420 - RNA, 19 nt, Artificial Sequence
  Description of Artificial Sequence: Synthetic oligonucleotide
  Sense strand starting at position 682 of SEQ ID NO: 1880278
aguuauugccaucgacaaa

SEQ ID NO: 1955421 - RNA, 19 nt, Artificial Sequence
  Description of Artificial Sequence: Synthetic oligonucleotide
  Antisense strand to SEQ ID NO: 1955420
uuugucgauggcaauaacu

SEQ ID NO: 1955422 - RNA, 19 nt, Artificial Sequence
  Description of Artificial Sequence: Synthetic oligonucleotide
  Sense strand starting at position 888 of SEQ ID NO: 1880278
aggaaauauuuagguuuga

SEQ ID NO: 1955423 - RNA, 19 nt, Artificial Sequence
  Description of Artificial Sequence: Synthetic oligonucleotide
  Antisense strand to SEQ ID NO: 1955422
ucaaaccuaaauauuuccu

SEQ ID NO: 1955424 - RNA, 19 nt, Artificial Sequence
  Description of Artificial Sequence: Synthetic oligonucleotide
  Sense strand starting at position 967 of SEQ ID NO: 1880278
ucaguaagcaugugaagug

SEQ ID NO: 1955425 - RNA, 19 nt, Artificial Sequence
  Description of Artificial Sequence: Synthetic oligonucleotide
  Antisense strand to SEQ ID NO: 1955424
cacuucacaugcuuacuga

SEQ ID NO: 1955426 - RNA, 19 nt, Artificial Sequence
  Description of Artificial Sequence: Synthetic oligonucleotide
  Sense strand starting at position 1122 of SEQ ID NO: 1880278
ccggacuacugacaauuua

SEQ ID NO: 1955427 - RNA, 19 nt, Artificial Sequence
  Description of Artificial Sequence: Synthetic oligonucleotide
  Antisense strand to SEQ ID NO: 1955426
uaaauugucaguaguccgg

SEQ ID NO: 1955428 - RNA, 19 nt, Artificial Sequence
  Description of Artificial Sequence: Synthetic oligonucleotide
  Sense strand starting at position 1166 of SEQ ID NO: 1880278
cgaggaauauaaccuugua

SEQ ID NO: 1955429 - RNA, 19 nt, Artificial Sequence
  Description of Artificial Sequence: Synthetic oligonucleotide
  Antisense strand to SEQ ID NO: 1955428
uacaagguuauauuccucg

SEQ ID NO: 1955430 - RNA, 19 nt, Artificial Sequence
  Description of Artificial Sequence: Synthetic oligonucleotide
  Sense strand starting at position 1169 of SEQ ID NO: 1880278
ggaauauaaccuuguagug

SEQ ID NO: 1955431 - RNA, 19 nt, Artificial Sequence
  Description of Artificial Sequence: Synthetic oligonucleotide
  Antisense strand to SEQ ID NO: 1955430
cacuacaagguuauauucc

SEQ ID NO: 1955432 - RNA, 19 nt, Artificial Sequence
  Description of Artificial Sequence: Synthetic oligonucleotide
  Sense strand starting at position 1179 of SEQ ID NO: 1880278
cuuguagugcuacaccaaa

SEQ ID NO: 1955433 - RNA, 19 nt, Artificial Sequence
  Description of Artificial Sequence: Synthetic oligonucleotide
  Antisense strand to SEQ ID NO: 1955432
uuugguguagcacuacaag

SEQ ID NO: 1955434 - RNA, 19 nt, Artificial Sequence
  Description of Artificial Sequence: Synthetic oligonucleotide
  Sense strand starting at position 1230 of SEQ ID NO: 1880278
uuauguuugaaguaaggca

SEQ ID NO: 1955435 - RNA, 19 nt, Artificial Sequence
  Description of Artificial Sequence: Synthetic oligonucleotide
  Antisense strand to SEQ ID NO: 1955434
ugccuuacuucaaacauaa

SEQ ID NO: 1955436 - RNA, 19 nt, Artificial Sequence
  Description of Artificial Sequence: Synthetic oligonucleotide
  Sense strand starting at position 1244 of SEQ ID NO: 1880278
aggcaagcuaaguguugaa

SEQ ID NO: 1955437 - RNA, 19 nt, Artificial Sequence
  Description of Artificial Sequence: Synthetic oligonucleotide
  Antisense strand to SEQ ID NO: 1955436
uucaacacuuagcuugccu

SEQ ID NO: 1955438 - RNA, 19 nt, Artificial Sequence
  Description of Artificial Sequence: Synthetic oligonucleotide
  Sense strand starting at position 1248 of SEQ ID NO: 1880278
aagcuaaguguugaaauuc

SEQ ID NO: 1955439 - RNA, 19 nt, Artificial Sequence
  Description of Artificial Sequence: Synthetic oligonucleotide
  Antisense strand to SEQ ID NO: 1955438
gaauuucaacacuuagcuu

SEQ ID NO: 1955440 - RNA, 19 nt, Artificial Sequence
  Description of Artificial Sequence: Synthetic oligonucleotide
  Sense strand starting at position 1257 of SEQ ID NO: 1880278
guugaaauucuaggaguga

SEQ ID NO: 1955441 - RNA, 19 nt, Artificial Sequence
  Description of Artificial Sequence: Synthetic oligonucleotide
  Antisense strand to SEQ ID NO: 1955440
ucacuccuagaauuucaac

SEQ ID NO: 1955442 - RNA, 19 nt, Artificial Sequence
  Description of Artificial Sequence: Synthetic oligonucleotide
  Sense strand starting at position 1258 of SEQ ID NO: 1880278
uugaaauucuaggagugaa

SEQ ID NO: 1955443 - RNA, 19 nt, Artificial Sequence
  Description of Artificial Sequence: Synthetic oligonucleotide
  Antisense strand to SEQ ID NO: 1955442
uucacuccuagaauuucaa

SEQ ID NO: 1955444 - RNA, 19 nt, Artificial Sequence
  Description of Artificial Sequence: Synthetic oligonucleotide
  Sense strand starting at position 1565 of SEQ ID NO: 1880278
ggauucuaguagucgcaaa

SEQ ID NO: 1955445 - RNA, 19 nt, Artificial Sequence
  Description of Artificial Sequence: Synthetic oligonucleotide
  Antisense strand to SEQ ID NO: 1955444
uuugcgacuacuagaaucc

SEQ ID NO: 1955446 - RNA, 19 nt, Artificial Sequence
  Description of Artificial Sequence: Synthetic oligonucleotide
  Sense strand starting at position 1566 of SEQ ID NO: 1880278
gauucuaguagucgcaaag

SEQ ID NO: 1955447 - RNA, 19 nt, Artificial Sequence
  Description of Artificial Sequence: Synthetic oligonucleotide
  Antisense strand to SEQ ID NO: 1955446
cuuugcgacuacuagaauc

SEQ ID NO: 1955448 - RNA, 19 nt, Artificial Sequence
  Description of Artificial Sequence: Synthetic oligonucleotide
  Sense strand starting at position 1572 of SEQ ID NO: 1880278
aguagucgcaaagaaagua

SEQ ID NO: 1955449 - RNA, 19 nt, Artificial Sequence
  Description of Artificial Sequence: Synthetic oligonucleotide
  Antisense strand to SEQ ID NO: 1955448
uacuuucuuugcgacuacu

SEQ ID NO: 1955450 - RNA, 19 nt, Artificial Sequence
  Description of Artificial Sequence: Synthetic oligonucleotide
  Sense strand starting at position 1584 of SEQ ID NO: 1880278
gaaaguaccuuggcuugua

SEQ ID NO: 1955451 - RNA, 19 nt, Artificial Sequence
  Description of Artificial Sequence: Synthetic oligonucleotide
  Antisense strand to SEQ ID NO: 1955450
uacaagccaagguacuuuc

SEQ ID NO: 1955452 - RNA, 19 nt, Artificial Sequence
  Description of Artificial Sequence: Synthetic oligonucleotide
  Sense strand starting at position 2491 of SEQ ID NO: 1880278
ugucguucgaguucgcaua

SEQ ID NO: 1955453 - RNA, 19 nt, Artificial Sequence
  Description of Artificial Sequence: Synthetic oligonucleotide
  Antisense strand to SEQ ID NO: 1955452
uaugcgaacucgaacgaca

SEQ ID NO: 1955454 - RNA, 19 nt, Artificial Sequence
  Description of Artificial Sequence: Synthetic oligonucleotide
  Sense strand starting at position 2991 of SEQ ID NO: 1880278
cuaggucgcgcgucuguua

SEQ ID NO: 1955455 - RNA, 19 nt, Artificial Sequence
  Description of Artificial Sequence: Synthetic oligonucleotide
  Antisense strand to SEQ ID NO: 1955454
uaacagacgcgcgaccuag

SEQ ID NO: 1955456 - RNA, 19 nt, Artificial Sequence
  Description of Artificial Sequence: Synthetic oligonucleotide
  Sense strand starting at position 3119 of SEQ ID NO: 1880278
cgaaguuuggaaugaugac

SEQ ID NO: 1955457 - RNA, 19 nt, Artificial Sequence
  Description of Artificial Sequence: Synthetic oligonucleotide
  Antisense strand to SEQ ID NO: 1955456
gucaucauuccaaacuucg

SEQ ID NO: 1955458 - RNA, 19 nt, Artificial Sequence
  Description of Artificial Sequence: Synthetic oligonucleotide
  Sense strand starting at position 3206 of SEQ ID NO: 1880278
acagaagcgucucugaagu

SEQ ID NO: 1955459 - RNA, 19 nt, Artificial Sequence
  Description of Artificial Sequence: Synthetic oligonucleotide
  Antisense strand to SEQ ID NO: 1955458
acuucagagacgcuucugu

SEQ ID NO: 1955460 - RNA, 19 nt, Artificial Sequence
  Description of Artificial Sequence: Synthetic oligonucleotide
  Sense strand starting at position 3217 of SEQ ID NO: 1880278
ucugaaguuugggucgaau

SEQ ID NO: 1955461 - RNA, 19 nt, Artificial Sequence
  Description of Artificial Sequence: Synthetic oligonucleotide
  Antisense strand to SEQ ID NO: 1955460
auucgacccaaacuucaga

SEQ ID NO: 1955462 - RNA, 19 nt, Artificial Sequence
  Description of Artificial Sequence: Synthetic oligonucleotide
  Sense strand starting at position 3302 of SEQ ID NO: 1880278
gcgagguucgaguuugcca

SEQ ID NO: 1955463 - RNA, 19 nt, Artificial Sequence
  Description of Artificial Sequence: Synthetic oligonucleotide
  Antisense strand to SEQ ID NO: 1955462
uggcaaacucgaaccucgc

SEQ ID NO: 1955464 - RNA, 19 nt, Artificial Sequence
  Description of Artificial Sequence: Synthetic oligonucleotide
  Sense strand starting at position 3490 of SEQ ID NO: 1880278
ucuuuaaggaaguguggaa

SEQ ID NO: 1955465 - RNA, 19 nt, Artificial Sequence
  Description of Artificial Sequence: Synthetic oligonucleotide
  Antisense strand to SEQ ID NO: 1955464
uuccacacuuccuuaaaga

SEQ ID NO: 1955466 - RNA, 19 nt, Artificial Sequence
  Description of Artificial Sequence: Synthetic oligonucleotide
  Sense strand starting at position 3544 of SEQ ID NO: 1880278
gauuuacacuguggacaga

SEQ ID NO: 1955467 - RNA, 19 nt, Artificial Sequence
  Description of Artificial Sequence: Synthetic oligonucleotide
  Antisense strand to SEQ ID NO: 1955466
ucuguccacaguguaaauc

SEQ ID NO: 1955468 - RNA, 19 nt, Artificial Sequence
  Description of Artificial Sequence: Synthetic oligonucleotide
  Sense strand starting at position 3555 of SEQ ID NO: 1880278
uggacagagauguguccuu

SEQ ID NO: 1955469 - RNA, 19 nt, Artificial Sequence
  Description of Artificial Sequence: Synthetic oligonucleotide
  Antisense strand to SEQ ID NO: 1955468
aaggacacaucucugucca

SEQ ID NO: 1955470 - RNA, 19 nt, Artificial Sequence
  Description of Artificial Sequence: Synthetic oligonucleotide
  Sense strand starting at position 3560 of SEQ ID NO: 1880278
agagauguguccuuuacac

SEQ ID NO: 1955471 - RNA, 19 nt, Artificial Sequence
  Description of Artificial Sequence: Synthetic oligonucleotide
  Antisense strand to SEQ ID NO: 1955470
guguaaaggacacaucucu

SEQ ID NO: 1955472 - RNA, 19 nt, Artificial Sequence
  Description of Artificial Sequence: Synthetic oligonucleotide
  Sense strand starting at position 3664 of SEQ ID NO: 1880278
ucgguuucucuucugcuua

SEQ ID NO: 1955473 - RNA, 19 nt, Artificial Sequence
  Description of Artificial Sequence: Synthetic oligonucleotide
  Antisense strand to SEQ ID NO: 1955472
uaagcagaagagaaaccga

SEQ ID NO: 1955474 - RNA, 19 nt, Artificial Sequence
  Description of Artificial Sequence: Synthetic oligonucleotide
  Sense strand starting at position 3685 of SEQ ID NO: 1880278
ggagaugcauguccugauu

SEQ ID NO: 1955475 - RNA, 19 nt, Artificial Sequence
  Description of Artificial Sequence: Synthetic oligonucleotide
  Antisense strand to SEQ ID NO: 1955474
aaucaggacaugcaucucc

SEQ ID NO: 1955476 - RNA, 19 nt, Artificial Sequence
  Description of Artificial Sequence: Synthetic oligonucleotide
  Sense strand starting at position 3854 of SEQ ID NO: 1880278
agcgacugauguuuacaaa

SEQ ID NO: 1955477 - RNA, 19 nt, Artificial Sequence
  Description of Artificial Sequence: Synthetic oligonucleotide
  Antisense strand to SEQ ID NO: 1955476
uuuguaaacaucagucgcu

SEQ ID NO: 1955478 - RNA, 19 nt, Artificial Sequence
  Description of Artificial Sequence: Synthetic oligonucleotide
  Sense strand starting at position 3855 of SEQ ID NO: 1880278
gcgacugauguuuacaaau

SEQ ID NO: 1955479 - RNA, 19 nt, Artificial Sequence
  Description of Artificial Sequence: Synthetic oligonucleotide
  Antisense strand to SEQ ID NO: 1955478
auuuguaaacaucagucgc

SEQ ID NO: 1955480 - RNA, 19 nt, Artificial Sequence
  Description of Artificial Sequence: Synthetic oligonucleotide
  Sense strand starting at position 3874 of SEQ ID NO: 1880278
uacuauguuggagguuaaa

SEQ ID NO: 1955481 - RNA, 19 nt, Artificial Sequence
  Description of Artificial Sequence: Synthetic oligonucleotide
  Antisense strand to SEQ ID NO: 1955480
uuuaaccuccaacauagua

SEQ ID NO: 1955482 - RNA, 19 nt, Artificial Sequence
  Description of Artificial Sequence: Synthetic oligonucleotide
  Sense strand starting at position 3919 of SEQ ID NO: 1880278
gucuaucauguuugaggag

SEQ ID NO: 1955483 - RNA, 19 nt, Artificial Sequence
  Description of Artificial Sequence: Synthetic oligonucleotide
  Antisense strand to SEQ ID NO: 1955482
cuccucaaacaugauagac

SEQ ID NO: 1955484 - RNA, 19 nt, Artificial Sequence
  Description of Artificial Sequence: Synthetic oligonucleotide
  Sense strand starting at position 142 of SEQ ID NO: 1880279
cuaggagaauauuaagaag

SEQ ID NO: 1955485 - RNA, 19 nt, Artificial Sequence
  Description of Artificial Sequence: Synthetic oligonucleotide
  Antisense strand to SEQ ID NO: 1955484
cuucuuaauauucuccuag

SEQ ID NO: 1955486 - RNA, 19 nt, Artificial Sequence
  Description of Artificial Sequence: Synthetic oligonucleotide
  Sense strand starting at position 164 of SEQ ID NO: 1880279
gugguuucucucuaccuaa

SEQ ID NO: 1955487 - RNA, 19 nt, Artificial Sequence
  Description of Artificial Sequence: Synthetic oligonucleotide
  Antisense strand to SEQ ID NO: 1955486
uuagguagagagaaaccac

SEQ ID NO: 1955488 - RNA, 19 nt, Artificial Sequence
  Description of Artificial Sequence: Synthetic oligonucleotide
  Sense strand starting at position 368 of SEQ ID NO: 1880279
gggaguguucugggaauug

SEQ ID NO: 1955489 - RNA, 19 nt, Artificial Sequence
  Description of Artificial Sequence: Synthetic oligonucleotide
  Antisense strand to SEQ ID NO: 1955488
caauucccagaacacuccc

SEQ ID NO: 1955490 - RNA, 19 nt, Artificial Sequence
  Description of Artificial Sequence: Synthetic oligonucleotide
  Sense strand starting at position 463 of SEQ ID NO: 1880279
aggguagucuauucucuau

SEQ ID NO: 1955491 - RNA, 19 nt, Artificial Sequence
  Description of Artificial Sequence: Synthetic oligonucleotide
  Antisense strand to SEQ ID NO: 1955490
auagagaauagacuacccu

SEQ ID NO: 1955492 - RNA, 19 nt, Artificial Sequence
  Description of Artificial Sequence: Synthetic oligonucleotide
  Sense strand starting at position 574 of SEQ ID NO: 1880279
ccuacauaucuacgaguaa

SEQ ID NO: 1955493 - RNA, 19 nt, Artificial Sequence
  Description of Artificial Sequence: Synthetic oligonucleotide
  Antisense strand to SEQ ID NO: 1955492
uuacucguagauauguagg

SEQ ID NO: 1955494 - RNA, 19 nt, Artificial Sequence
  Description of Artificial Sequence: Synthetic oligonucleotide
  Sense strand starting at position 809 of SEQ ID NO: 1880279
guaagaugugcucagguug

SEQ ID NO: 1955495 - RNA, 19 nt, Artificial Sequence
  Description of Artificial Sequence: Synthetic oligonucleotide
  Antisense strand to SEQ ID NO: 1955494
caaccugagcacaucuuac

SEQ ID NO: 1955496 - RNA, 19 nt, Artificial Sequence
  Description of Artificial Sequence: Synthetic oligonucleotide
  Sense strand starting at position 1039 of SEQ ID NO: 1880279
gaagguggguggucaaaug

SEQ ID NO: 1955497 - RNA, 19 nt, Artificial Sequence
  Description of Artificial Sequence: Synthetic oligonucleotide
  Antisense strand to SEQ ID NO: 1955496
cauuugaccacccaccuuc

SEQ ID NO: 1955498 - RNA, 19 nt, Artificial Sequence
  Description of Artificial Sequence: Synthetic oligonucleotide
  Sense strand starting at position 2096 of SEQ ID NO: 1880279
gauccugaaguuggugaaa

SEQ ID NO: 1955499 - RNA, 19 nt, Artificial Sequence
  Description of Artificial Sequence: Synthetic oligonucleotide
  Antisense strand to SEQ ID NO: 1955498
uuucaccaacuucaggauc

SEQ ID NO: 1955500 - RNA, 19 nt, Artificial Sequence
  Description of Artificial Sequence: Synthetic oligonucleotide
  Sense strand starting at position 2143 of SEQ ID NO: 1880279
ggcggagaagucuauccga

SEQ ID NO: 1955501 - RNA, 19 nt, Artificial Sequence
  Description of Artificial Sequence: Synthetic oligonucleotide
  Antisense strand to SEQ ID NO: 1955500
ucggauagacuucuccgcc

SEQ ID NO: 1955502 - RNA, 19 nt, Artificial Sequence
  Description of Artificial Sequence: Synthetic oligonucleotide
  Sense strand starting at position 2146 of SEQ ID NO: 1880279
ggagaagucuauccgagcu

SEQ ID NO: 1955503 - RNA, 19 nt, Artificial Sequence
  Description of Artificial Sequence: Synthetic oligonucleotide
  Antisense strand to SEQ ID NO: 1955502
agcucggauagacuucucc

SEQ ID NO: 1955504 - RNA, 19 nt, Artificial Sequence
  Description of Artificial Sequence: Synthetic oligonucleotide
  Sense strand starting at position 2232 of SEQ ID NO: 1880279
cuuugcuagguugaggaaa

SEQ ID NO: 1955505 - RNA, 19 nt, Artificial Sequence
  Description of Artificial Sequence: Synthetic oligonucleotide
  Antisense strand to SEQ ID NO: 1955504
uuuccucaaccuagcaaag

SEQ ID NO: 1955506 - RNA, 19 nt, Artificial Sequence
  Description of Artificial Sequence: Synthetic oligonucleotide
  Sense strand starting at position 2552 of SEQ ID NO: 1880279
gcaaaccucccaggaauau

SEQ ID NO: 1955507 - RNA, 19 nt, Artificial Sequence
  Description of Artificial Sequence: Synthetic oligonucleotide
  Antisense strand to SEQ ID NO: 1955506
auauuccugggagguuugc

SEQ ID NO: 1955508 - RNA, 19 nt, Artificial Sequence
  Description of Artificial Sequence: Synthetic oligonucleotide
  Sense strand starting at position 2561 of SEQ ID NO: 1880279
ccaggaauauauucugcau

SEQ ID NO: 1955509 - RNA, 19 nt, Artificial Sequence
  Description of Artificial Sequence: Synthetic oligonucleotide
  Antisense strand to SEQ ID NO: 1955508
augcagaauauauuccugg

SEQ ID NO: 1955510 - RNA, 19 nt, Artificial Sequence
  Description of Artificial Sequence: Synthetic oligonucleotide
  Sense strand starting at position 2564 of SEQ ID NO: 1880279
ggaauauauucugcauaac

SEQ ID NO: 1955511 - RNA, 19 nt, Artificial Sequence
  Description of Artificial Sequence: Synthetic oligonucleotide
  Antisense strand to SEQ ID NO: 1955510
guuaugcagaauauauucc

SEQ ID NO: 1955512 - RNA, 19 nt, Artificial Sequence
  Description of Artificial Sequence: Synthetic oligonucleotide
  Sense strand starting at position 2648 of SEQ ID NO: 1880279
auucuacuagcaggauaau

SEQ ID NO: 1955513 - RNA, 19 nt, Artificial Sequence
  Description of Artificial Sequence: Synthetic oligonucleotide
  Antisense strand to SEQ ID NO: 1955512
auuauccugcuaguagaau

SEQ ID NO: 1955514 - RNA, 19 nt, Artificial Sequence
  Description of Artificial Sequence: Synthetic oligonucleotide
  Sense strand starting at position 2778 of SEQ ID NO: 1880279
auaggauagcuugaggcua

SEQ ID NO: 1955515 - RNA, 19 nt, Artificial Sequence
  Description of Artificial Sequence: Synthetic oligonucleotide
  Antisense strand to SEQ ID NO: 1955514
uagccucaagcuauccuau

SEQ ID NO: 1955516 - RNA, 19 nt, Artificial Sequence
  Description of Artificial Sequence: Synthetic oligonucleotide
  Sense strand starting at position 2930 of SEQ ID NO: 1880279
aacagauugcugggccaua

SEQ ID NO: 1955517 - RNA, 19 nt, Artificial Sequence
  Description of Artificial Sequence: Synthetic oligonucleotide
  Antisense strand to SEQ ID NO: 1955516
uauggcccagcaaucuguu

SEQ ID NO: 1955518 - RNA, 19 nt, Artificial Sequence
  Description of Artificial Sequence: Synthetic oligonucleotide
  Sense strand starting at position 2955 of SEQ ID NO: 1880279
gaauucucugacugggcua

SEQ ID NO: 1955519 - RNA, 19 nt, Artificial Sequence
  Description of Artificial Sequence: Synthetic oligonucleotide
  Antisense strand to SEQ ID NO: 1955518
uagcccagucagagaauuc

SEQ ID NO: 1955520 - RNA, 19 nt, Artificial Sequence
  Description of Artificial Sequence: Synthetic oligonucleotide
  Sense strand starting at position 2975 of SEQ ID NO: 1880279
cggaaauaaugccugagaa

SEQ ID NO: 1955521 - RNA, 19 nt, Artificial Sequence
  Description of Artificial Sequence: Synthetic oligonucleotide
  Antisense strand to SEQ ID NO: 1955520
uucucaggcauuauuuccg

SEQ ID NO: 1955522 - RNA, 19 nt, Artificial Sequence
  Description of Artificial Sequence: Synthetic oligonucleotide
  Sense strand starting at position 2988 of SEQ ID NO: 1880279
ugagaaugugcauaucuaa

SEQ ID NO: 1955523 - RNA, 19 nt, Artificial Sequence
  Description of Artificial Sequence: Synthetic oligonucleotide
  Antisense strand to SEQ ID NO: 1955522
uuagauaugcacauucuca

SEQ ID NO: 1955524 - RNA, 19 nt, Artificial Sequence
  Description of Artificial Sequence: Synthetic oligonucleotide
  Sense strand starting at position 3032 of SEQ ID NO: 1880279
ccuagaagguuaguaucuu

SEQ ID NO: 1955525 - RNA, 19 nt, Artificial Sequence
  Description of Artificial Sequence: Synthetic oligonucleotide
  Antisense strand to SEQ ID NO: 1955524
aagauacuaaccuucuagg

SEQ ID NO: 1955526 - RNA, 19 nt, Artificial Sequence
  Description of Artificial Sequence: Synthetic oligonucleotide
  Sense strand starting at position 3185 of SEQ ID NO: 1880279
ggaugaaucggguguuuca

SEQ ID NO: 1955527 - RNA, 19 nt, Artificial Sequence
  Description of Artificial Sequence: Synthetic oligonucleotide
  Antisense strand to SEQ ID NO: 1955526
ugaaacacccgauucaucc

SEQ ID NO: 1955528 - RNA, 19 nt, Artificial Sequence
  Description of Artificial Sequence: Synthetic oligonucleotide
  Sense strand starting at position 3266 of SEQ ID NO: 1880279
ccgaauauucggugggaug

SEQ ID NO: 1955529 - RNA, 19 nt, Artificial Sequence
  Description of Artificial Sequence: Synthetic oligonucleotide
  Antisense strand to SEQ ID NO: 1955528
caucccaccgaauauucgg

SEQ ID NO: 1955530 - RNA, 19 nt, Artificial Sequence
  Description of Artificial Sequence: Synthetic oligonucleotide
  Sense strand starting at position 3268 of SEQ ID NO: 1880279
gaauauucggugggaugca

SEQ ID NO: 1955531 - RNA, 19 nt, Artificial Sequence
  Description of Artificial Sequence: Synthetic oligonucleotide
  Antisense strand to SEQ ID NO: 1955530
ugcaucccaccgaauauuc

SEQ ID NO: 1955532 - RNA, 19 nt, Artificial Sequence
  Description of Artificial Sequence: Synthetic oligonucleotide
  Sense strand starting at position 3301 of SEQ ID NO: 1880279
ucuuguagaguuuacagau

SEQ ID NO: 1955533 - RNA, 19 nt, Artificial Sequence
  Description of Artificial Sequence: Synthetic oligonucleotide
  Antisense strand to SEQ ID NO: 1955532
aucuguaaacucuacaaga

SEQ ID NO: 1955534 - RNA, 19 nt, Artificial Sequence
  Description of Artificial Sequence: Synthetic oligonucleotide
  Sense strand starting at position 3330 of SEQ ID NO: 1880279
cagacaaauuguguuaaga

SEQ ID NO: 1955535 - RNA, 19 nt, Artificial Sequence
  Description of Artificial Sequence: Synthetic oligonucleotide
  Antisense strand to SEQ ID NO: 1955534
ucuuaacacaauuugucug

SEQ ID NO: 1955536 - RNA, 19 nt, Artificial Sequence
  Description of Artificial Sequence: Synthetic oligonucleotide
  Sense strand starting at position 3338 of SEQ ID NO: 1880279
uuguguuaagagcaauaga

SEQ ID NO: 1955537 - RNA, 19 nt, Artificial Sequence
  Description of Artificial Sequence: Synthetic oligonucleotide
  Antisense strand to SEQ ID NO: 1955536
ucuauugcucuuaacacaa

SEQ ID NO: 1955538 - RNA, 19 nt, Artificial Sequence
  Description of Artificial Sequence: Synthetic oligonucleotide
  Sense strand starting at position 3365 of SEQ ID NO: 1880279
agcggaggacucugagaaa

SEQ ID NO: 1955539 - RNA, 19 nt, Artificial Sequence
  Description of Artificial Sequence: Synthetic oligonucleotide
  Antisense strand to SEQ ID NO: 1955538
uuucucagaguccuccgcu

SEQ ID NO: 1955540 - RNA, 19 nt, Artificial Sequence
  Description of Artificial Sequence: Synthetic oligonucleotide
  Sense strand starting at position 3470 of SEQ ID NO: 1880279
aagagucucccaggagagu

SEQ ID NO: 1955541 - RNA, 19 nt, Artificial Sequence
  Description of Artificial Sequence: Synthetic oligonucleotide
  Antisense strand to SEQ ID NO: 1955540
acucuccugggagacucuu

SEQ ID NO: 1955542 - RNA, 19 nt, Artificial Sequence
  Description of Artificial Sequence: Synthetic oligonucleotide
  Sense strand starting at position 3559 of SEQ ID NO: 1880279
augaaagagucagagaaga

SEQ ID NO: 1955543 - RNA, 19 nt, Artificial Sequence
  Description of Artificial Sequence: Synthetic oligonucleotide
  Antisense strand to SEQ ID NO: 1955542
ucuucucugacucuuucau

SEQ ID NO: 1955544 - RNA, 19 nt, Artificial Sequence
  Description of Artificial Sequence: Synthetic oligonucleotide
  Sense strand starting at position 3588 of SEQ ID NO: 1880279
gaugaagacugagagauaa

SEQ ID NO: 1955545 - RNA, 19 nt, Artificial Sequence
  Description of Artificial Sequence: Synthetic oligonucleotide
  Antisense strand to SEQ ID NO: 1955544
uuaucucucagucuucauc

SEQ ID NO: 1955546 - RNA, 19 nt, Artificial Sequence
  Description of Artificial Sequence: Synthetic oligonucleotide
  Sense strand starting at position 3632 of SEQ ID NO: 1880279
uguagacugcucuaagcau

SEQ ID NO: 1955547 - RNA, 19 nt, Artificial Sequence
  Description of Artificial Sequence: Synthetic oligonucleotide
  Antisense strand to SEQ ID NO: 1955546
augcuuagagcagucuaca

SEQ ID NO: 1955548 - RNA, 19 nt, Artificial Sequence
  Description of Artificial Sequence: Synthetic oligonucleotide
  Sense strand starting at position 3754 of SEQ ID NO: 1880279
gucugcuuuguagagaaug

SEQ ID NO: 1955549 - RNA, 19 nt, Artificial Sequence
  Description of Artificial Sequence: Synthetic oligonucleotide
  Antisense strand to SEQ ID NO: 1955548
cauucucuacaaagcagac

SEQ ID NO: 1955550 - RNA, 19 nt, Artificial Sequence
  Description of Artificial Sequence: Synthetic oligonucleotide
  Sense strand starting at position 3780 of SEQ ID NO: 1880279
cagaguccagauugaauca

SEQ ID NO: 1955551 - RNA, 19 nt, Artificial Sequence
  Description of Artificial Sequence: Synthetic oligonucleotide
  Antisense strand to SEQ ID NO: 1955550
ugauucaaucuggacucug

SEQ ID NO: 1955552 - RNA, 19 nt, Artificial Sequence
  Description of Artificial Sequence: Synthetic oligonucleotide
  Sense strand starting at position 3792 of SEQ ID NO: 1880279
ugaaucauacauuguauga

SEQ ID NO: 1955553 - RNA, 19 nt, Artificial Sequence
  Description of Artificial Sequence: Synthetic oligonucleotide
  Antisense strand to SEQ ID NO: 1955552
ucauacaauguaugauuca

SEQ ID NO: 1955554 - RNA, 19 nt, Artificial Sequence
  Description of Artificial Sequence: Synthetic oligonucleotide
  Sense strand starting at position 3824 of SEQ ID NO: 1880279
ggaguucgcagauagaagu

SEQ ID NO: 1955555 - RNA, 19 nt, Artificial Sequence
  Description of Artificial Sequence: Synthetic oligonucleotide
  Antisense strand to SEQ ID NO: 1955554
acuucuaucugcgaacucc

SEQ ID NO: 1955556 - RNA, 19 nt, Artificial Sequence
  Description of Artificial Sequence: Synthetic oligonucleotide
  Sense strand starting at position 3830 of SEQ ID NO: 1880279
cgcagauagaaguauguga

SEQ ID NO: 1955557 - RNA, 19 nt, Artificial Sequence
  Description of Artificial Sequence: Synthetic oligonucleotide
  Antisense strand to SEQ ID NO: 1955556
ucacauacuucuaucugcg

SEQ ID NO: 1955558 - RNA, 19 nt, Artificial Sequence
  Description of Artificial Sequence: Synthetic oligonucleotide
  Sense strand starting at position 3870 of SEQ ID NO: 1880279
cagguaugugcagaggaga

SEQ ID NO: 1955559 - RNA, 19 nt, Artificial Sequence
  Description of Artificial Sequence: Synthetic oligonucleotide
  Antisense strand to SEQ ID NO: 1955558
ucuccucugcacauaccug

SEQ ID NO: 1955560 - RNA, 19 nt, Artificial Sequence
  Description of Artificial Sequence: Synthetic oligonucleotide
  Sense strand starting at position 3897 of SEQ ID NO: 1880279
agggcaucaucaucaauua

SEQ ID NO: 1955561 - RNA, 19 nt, Artificial Sequence
  Description of Artificial Sequence: Synthetic oligonucleotide
  Antisense strand to SEQ ID NO: 1955560
uaauugaugaugaugcccu

SEQ ID NO: 1955562 - RNA, 19 nt, Artificial Sequence
  Description of Artificial Sequence: Synthetic oligonucleotide
  Sense strand starting at position 3983 of SEQ ID NO: 1880279
aacaacugguugucucaga

SEQ ID NO: 1955563 - RNA, 19 nt, Artificial Sequence
  Description of Artificial Sequence: Synthetic oligonucleotide
  Antisense strand to SEQ ID NO: 1955562
ucugagacaaccaguuguu

SEQ ID NO: 1955564 - RNA, 19 nt, Artificial Sequence
  Description of Artificial Sequence: Synthetic oligonucleotide
  Sense strand starting at position 286 of SEQ ID NO: 1880280
aggguagggucugugugau

SEQ ID NO: 1955565 - RNA, 19 nt, Artificial Sequence
  Description of Artificial Sequence: Synthetic oligonucleotide
  Antisense strand to SEQ ID NO: 1955564
aucacacagacccuacccu

SEQ ID NO: 1955566 - RNA, 19 nt, Artificial Sequence
  Description of Artificial Sequence: Synthetic oligonucleotide
  Sense strand starting at position 287 of SEQ ID NO: 1880280
ggguagggucugugugaua

SEQ ID NO: 1955567 - RNA, 19 nt, Artificial Sequence
  Description of Artificial Sequence: Synthetic oligonucleotide
  Antisense strand to SEQ ID NO: 1955566
uaucacacagacccuaccc

SEQ ID NO: 1955568 - RNA, 19 nt, Artificial Sequence
  Description of Artificial Sequence: Synthetic oligonucleotide
  Sense strand starting at position 290 of SEQ ID NO: 1880280
uagggucugugugauauuu

SEQ ID NO: 1955569 - RNA, 19 nt, Artificial Sequence
  Description of Artificial Sequence: Synthetic oligonucleotide
  Antisense strand to SEQ ID NO: 1955568
aaauaucacacagacccua

SEQ ID NO: 1955570 - RNA, 19 nt, Artificial Sequence
  Description of Artificial Sequence: Synthetic oligonucleotide
  Sense strand starting at position 292 of SEQ ID NO: 1880280
gggucugugugauauuucu

SEQ ID NO: 1955571 - RNA, 19 nt, Artificial Sequence
  Description of Artificial Sequence: Synthetic oligonucleotide
  Antisense strand to SEQ ID NO: 1955570
agaaauaucacacagaccc

SEQ ID NO: 1955572 - RNA, 19 nt, Artificial Sequence
  Description of Artificial Sequence: Synthetic oligonucleotide
  Sense strand starting at position 315 of SEQ ID NO: 1880280
gauucuugaucuugggaau

SEQ ID NO: 1955573 - RNA, 19 nt, Artificial Sequence
  Description of Artificial Sequence: Synthetic oligonucleotide
  Antisense strand to SEQ ID NO: 1955572
auucccaagaucaagaauc

SEQ ID NO: 1955574 - RNA, 19 nt, Artificial Sequence
  Description of Artificial Sequence: Synthetic oligonucleotide
  Sense strand starting at position 316 of SEQ ID NO: 1880280
auucuugaucuugggaauu

SEQ ID NO: 1955575 - RNA, 19 nt, Artificial Sequence
  Description of Artificial Sequence: Synthetic oligonucleotide
  Antisense strand to SEQ ID NO: 1955574
aauucccaagaucaagaau

SEQ ID NO: 1955576 - RNA, 19 nt, Artificial Sequence
  Description of Artificial Sequence: Synthetic oligonucleotide
  Sense strand starting at position 318 of SEQ ID NO: 1880280
ucuugaucuugggaauuag

SEQ ID NO: 1955577 - RNA, 19 nt, Artificial Sequence
  Description of Artificial Sequence: Synthetic oligonucleotide
  Antisense strand to SEQ ID NO: 1955576
cuaauucccaagaucaaga

SEQ ID NO: 1955578 - RNA, 19 nt, Artificial Sequence
  Description of Artificial Sequence: Synthetic oligonucleotide
  Sense strand starting at position 2287 of SEQ ID NO: 1880280
cggaauaucugcugaggug

SEQ ID NO: 1955579 - RNA, 19 nt, Artificial Sequence
  Description of Artificial Sequence: Synthetic oligonucleotide
  Antisense strand to SEQ ID NO: 1955578
caccucagcagauauuccg

SEQ ID NO: 1955580 - RNA, 19 nt, Artificial Sequence
  Description of Artificial Sequence: Synthetic oligonucleotide
  Sense strand starting at position 2288 of SEQ ID NO: 1880280
ggaauaucugcugagguga

SEQ ID NO: 1955581 - RNA, 19 nt, Artificial Sequence
  Description of Artificial Sequence: Synthetic oligonucleotide
  Antisense strand to SEQ ID NO: 1955580
ucaccucagcagauauucc

SEQ ID NO: 1955582 - RNA, 19 nt, Artificial Sequence
  Description of Artificial Sequence: Synthetic oligonucleotide
  Sense strand starting at position 2649 of SEQ ID NO: 1880280
gcacguucugcauauguaa

SEQ ID NO: 1955583 - RNA, 19 nt, Artificial Sequence
  Description of Artificial Sequence: Synthetic oligonucleotide
  Antisense strand to SEQ ID NO: 1955582
uuacauaugcagaacgugc

SEQ ID NO: 1955584 - RNA, 19 nt, Artificial Sequence
  Description of Artificial Sequence: Synthetic oligonucleotide
  Sense strand starting at position 3038 of SEQ ID NO: 1880280
ugacauauguagucaguuu

SEQ ID NO: 1955585 - RNA, 19 nt, Artificial Sequence
  Description of Artificial Sequence: Synthetic oligonucleotide
  Antisense strand to SEQ ID NO: 1955584
aaacugacuacauauguca

SEQ ID NO: 1955586 - RNA, 19 nt, Artificial Sequence
  Description of Artificial Sequence: Synthetic oligonucleotide
  Sense strand starting at position 3072 of SEQ ID NO: 1880280
aguaaucacgggugauuca

SEQ ID NO: 1955587 - RNA, 19 nt, Artificial Sequence
  Description of Artificial Sequence: Synthetic oligonucleotide
  Antisense strand to SEQ ID NO: 1955586
ugaaucacccgugauuacu

SEQ ID NO: 1955588 - RNA, 19 nt, Artificial Sequence
  Description of Artificial Sequence: Synthetic oligonucleotide
  Sense strand starting at position 3234 of SEQ ID NO: 1880280
uugugauugcacuguuaau

SEQ ID NO: 1955589 - RNA, 19 nt, Artificial Sequence
  Description of Artificial Sequence: Synthetic oligonucleotide
  Antisense strand to SEQ ID NO: 1955588
auuaacagugcaaucacaa

SEQ ID NO: 1955590 - RNA, 19 nt, Artificial Sequence
  Description of Artificial Sequence: Synthetic oligonucleotide
  Sense strand starting at position 3847 of SEQ ID NO: 1880280
augcuaugagcucagcagu

SEQ ID NO: 1955591 - RNA, 19 nt, Artificial Sequence
  Description of Artificial Sequence: Synthetic oligonucleotide
  Antisense strand to SEQ ID NO: 1955590
acugcugagcucauagcau

SEQ ID NO: 1955592 - RNA, 19 nt, Artificial Sequence
  Description of Artificial Sequence: Synthetic oligonucleotide
  Sense strand starting at position 3850 of SEQ ID NO: 1880280
cuaugagcucagcaguauu

SEQ ID NO: 1955593 - RNA, 19 nt, Artificial Sequence
  Description of Artificial Sequence: Synthetic oligonucleotide
  Antisense strand to SEQ ID NO: 1955592
aauacugcugagcucauag

SEQ ID NO: 1955594 - RNA, 19 nt, Artificial Sequence
  Description of Artificial Sequence: Synthetic oligonucleotide
  Sense strand starting at position 3853 of SEQ ID NO: 1880280
ugagcucagcaguauuguu

SEQ ID NO: 1955595 - RNA, 19 nt, Artificial Sequence
  Description of Artificial Sequence: Synthetic oligonucleotide
  Antisense strand to SEQ ID NO: 1955594
aacaauacugcugagcuca

SEQ ID NO: 1955596 - RNA, 19 nt, Artificial Sequence
  Description of Artificial Sequence: Synthetic oligonucleotide
  Sense strand starting at position 239 of SEQ ID NO: 1880281
gagagaggucauuacgugu

SEQ ID NO: 1955597 - RNA, 19 nt, Artificial Sequence
  Description of Artificial Sequence: Synthetic oligonucleotide
  Antisense strand to SEQ ID NO: 1955596
acacguaaugaccucucuc

SEQ ID NO: 1955598 - RNA, 19 nt, Artificial Sequence
  Description of Artificial Sequence: Synthetic oligonucleotide
  Sense strand starting at position 243 of SEQ ID NO: 1880281
gaggucauuacguguggaa

SEQ ID NO: 1955599 - RNA, 19 nt, Artificial Sequence
  Description of Artificial Sequence: Synthetic oligonucleotide
  Antisense strand to SEQ ID NO: 1955598
uuccacacguaaugaccuc

SEQ ID NO: 1955600 - RNA, 19 nt, Artificial Sequence
  Description of Artificial Sequence: Synthetic oligonucleotide
  Sense strand starting at position 245 of SEQ ID NO: 1880281
ggucauuacguguggaagg

SEQ ID NO: 1955601 - RNA, 19 nt, Artificial Sequence
  Description of Artificial Sequence: Synthetic oligonucleotide
  Antisense strand to SEQ ID NO: 1955600
ccuuccacacguaaugacc

SEQ ID NO: 1955602 - RNA, 19 nt, Artificial Sequence
  Description of Artificial Sequence: Synthetic oligonucleotide
  Sense strand starting at position 254 of SEQ ID NO: 1880281
guguggaaggguuggagau

SEQ ID NO: 1955603 - RNA, 19 nt, Artificial Sequence
  Description of Artificial Sequence: Synthetic oligonucleotide
  Antisense strand to SEQ ID NO: 1955602
aucuccaacccuuccacac

SEQ ID NO: 1955604 - RNA, 19 nt, Artificial Sequence
  Description of Artificial Sequence: Synthetic oligonucleotide
  Sense strand starting at position 255 of SEQ ID NO: 1880281
uguggaaggguuggagaua

SEQ ID NO: 1955605 - RNA, 19 nt, Artificial Sequence
  Description of Artificial Sequence: Synthetic oligonucleotide
  Antisense strand to SEQ ID NO: 1955604
uaucuccaacccuuccaca

SEQ ID NO: 1955606 - RNA, 19 nt, Artificial Sequence
  Description of Artificial Sequence: Synthetic oligonucleotide
  Sense strand starting at position 267 of SEQ ID NO: 1880281
ggagauauggucuguggga

SEQ ID NO: 1955607 - RNA, 19 nt, Artificial Sequence
  Description of Artificial Sequence: Synthetic oligonucleotide
  Antisense strand to SEQ ID NO: 1955606
ucccacagaccauaucucc

SEQ ID NO: 1955608 - RNA, 19 nt, Artificial Sequence
  Description of Artificial Sequence: Synthetic oligonucleotide
  Sense strand starting at position 268 of SEQ ID NO: 1880281
gagauauggucugugggag

SEQ ID NO: 1955609 - RNA, 19 nt, Artificial Sequence
  Description of Artificial Sequence: Synthetic oligonucleotide
  Antisense strand to SEQ ID NO: 1955608
cucccacagaccauaucuc

SEQ ID NO: 1955610 - RNA, 19 nt, Artificial Sequence
  Description of Artificial Sequence: Synthetic oligonucleotide
  Sense strand starting at position 269 of SEQ ID NO: 1880281
agauauggucugugggaga

SEQ ID NO: 1955611 - RNA, 19 nt, Artificial Sequence
  Description of Artificial Sequence: Synthetic oligonucleotide
  Antisense strand to SEQ ID NO: 1955610
ucucccacagaccauaucu

SEQ ID NO: 1955612 - RNA, 19 nt, Artificial Sequence
  Description of Artificial Sequence: Synthetic oligonucleotide
  Sense strand starting at position 360 of SEQ ID NO: 1880281
gggaguaugcuggguauga

SEQ ID NO: 1955613 - RNA, 19 nt, Artificial Sequence
  Description of Artificial Sequence: Synthetic oligonucleotide
  Antisense strand to SEQ ID NO: 1955612
ucauacccagcauacuccc

SEQ ID NO: 1955614 - RNA, 19 nt, Artificial Sequence
  Description of Artificial Sequence: Synthetic oligonucleotide
  Sense strand starting at position 361 of SEQ ID NO: 1880281
ggaguaugcuggguaugaa

SEQ ID NO: 1955615 - RNA, 19 nt, Artificial Sequence
  Description of Artificial Sequence: Synthetic oligonucleotide
  Antisense strand to SEQ ID NO: 1955614
uucauacccagcauacucc

SEQ ID NO: 1955616 - RNA, 19 nt, Artificial Sequence
  Description of Artificial Sequence: Synthetic oligonucleotide
  Sense strand starting at position 362 of SEQ ID NO: 1880281
gaguaugcuggguaugaac

SEQ ID NO: 1955617 - RNA, 19 nt, Artificial Sequence
  Description of Artificial Sequence: Synthetic oligonucleotide
  Antisense strand to SEQ ID NO: 1955616
guucauacccagcauacuc

SEQ ID NO: 1955618 - RNA, 19 nt, Artificial Sequence
  Description of Artificial Sequence: Synthetic oligonucleotide
  Sense strand starting at position 381 of SEQ ID NO: 1880281
agauaagucagagggcuaa

SEQ ID NO: 1955619 - RNA, 19 nt, Artificial Sequence
  Description of Artificial Sequence: Synthetic oligonucleotide
  Antisense strand to SEQ ID NO: 1955618
uuagcccucugacuuaucu

SEQ ID NO: 1955620 - RNA, 19 nt, Artificial Sequence
  Description of Artificial Sequence: Synthetic oligonucleotide
  Sense strand starting at position 429 of SEQ ID NO: 1880281
cccuccauuucguuccaua

SEQ ID NO: 1955621 - RNA, 19 nt, Artificial Sequence
  Description of Artificial Sequence: Synthetic oligonucleotide
  Antisense strand to SEQ ID NO: 1955620
uauggaacgaaauggaggg

SEQ ID NO: 1955622 - RNA, 19 nt, Artificial Sequence
  Description of Artificial Sequence: Synthetic oligonucleotide
  Sense strand starting at position 803 of SEQ ID NO: 1880281
gggagugcccuaugaaaca

SEQ ID NO: 1955623 - RNA, 19 nt, Artificial Sequence
  Description of Artificial Sequence: Synthetic oligonucleotide
  Antisense strand to SEQ ID NO: 1955622
uguuucauagggcacuccc

SEQ ID NO: 1955624 - RNA, 19 nt, Artificial Sequence
  Description of Artificial Sequence: Synthetic oligonucleotide
  Sense strand starting at position 898 of SEQ ID NO: 1880281
aacacuaaggguuguaaau

SEQ ID NO: 1955625 - RNA, 19 nt, Artificial Sequence
  Description of Artificial Sequence: Synthetic oligonucleotide
  Antisense strand to SEQ ID NO: 1955624
auuuacaacccuuaguguu

SEQ ID NO: 1955626 - RNA, 19 nt, Artificial Sequence
  Description of Artificial Sequence: Synthetic oligonucleotide
  Sense strand starting at position 907 of SEQ ID NO: 1880281
gguuguaaaugaccuaaag

SEQ ID NO: 1955627 - RNA, 19 nt, Artificial Sequence
  Description of Artificial Sequence: Synthetic oligonucleotide
  Antisense strand to SEQ ID NO: 1955626
cuuuaggucauuuacaacc

SEQ ID NO: 1955628 - RNA, 19 nt, Artificial Sequence
  Description of Artificial Sequence: Synthetic oligonucleotide
  Sense strand starting at position 970 of SEQ ID NO: 1880281
guggcuuaacuauguugaa

SEQ ID NO: 1955629 - RNA, 19 nt, Artificial Sequence
  Description of Artificial Sequence: Synthetic oligonucleotide
  Antisense strand to SEQ ID NO: 1955628
uucaacauaguuaagccac

SEQ ID NO: 1955630 - RNA, 19 nt, Artificial Sequence
  Description of Artificial Sequence: Synthetic oligonucleotide
  Sense strand starting at position 971 of SEQ ID NO: 1880281
uggcuuaacuauguugaaa

SEQ ID NO: 1955631 - RNA, 19 nt, Artificial Sequence
  Description of Artificial Sequence: Synthetic oligonucleotide
  Antisense strand to SEQ ID NO: 1955630
uuucaacauaguuaagcca

SEQ ID NO: 1955632 - RNA, 19 nt, Artificial Sequence
  Description of Artificial Sequence: Synthetic oligonucleotide
  Sense strand starting at position 1007 of SEQ ID NO: 1880281
ugcuuugcagcccaaagau

SEQ ID NO: 1955633 - RNA, 19 nt, Artificial Sequence
  Description of Artificial Sequence: Synthetic oligonucleotide
  Antisense strand to SEQ ID NO: 1955632
aucuuugggcugcaaagca

SEQ ID NO: 1955634 - RNA, 19 nt, Artificial Sequence
  Description of Artificial Sequence: Synthetic oligonucleotide
  Sense strand starting at position 1029 of SEQ ID NO: 1880281
agaauauaaucagagaggu

SEQ ID NO: 1955635 - RNA, 19 nt, Artificial Sequence
  Description of Artificial Sequence: Synthetic oligonucleotide
  Antisense strand to SEQ ID NO: 1955634
accucucugauuauauucu

SEQ ID NO: 1955636 - RNA, 19 nt, Artificial Sequence
  Description of Artificial Sequence: Synthetic oligonucleotide
  Sense strand starting at position 1088 of SEQ ID NO: 1880281
cauggccaccuuuagagau

SEQ ID NO: 1955637 - RNA, 19 nt, Artificial Sequence
  Description of Artificial Sequence: Synthetic oligonucleotide
  Antisense strand to SEQ ID NO: 1955636
aucucuaaagguggccaug

SEQ ID NO: 1955638 - RNA, 19 nt, Artificial Sequence
  Description of Artificial Sequence: Synthetic oligonucleotide
  Sense strand starting at position 1416 of SEQ ID NO: 1880281
agcacugcacccugagaaa

SEQ ID NO: 1955639 - RNA, 19 nt, Artificial Sequence
  Description of Artificial Sequence: Synthetic oligonucleotide
  Antisense strand to SEQ ID NO: 1955638
uuucucagggugcagugcu

SEQ ID NO: 1955640 - RNA, 19 nt, Artificial Sequence
  Description of Artificial Sequence: Synthetic oligonucleotide
  Sense strand starting at position 1428 of SEQ ID NO: 1880281
ugagaaagcuacccuagua

SEQ ID NO: 1955641 - RNA, 19 nt, Artificial Sequence
  Description of Artificial Sequence: Synthetic oligonucleotide
  Antisense strand to SEQ ID NO: 1955640
uacuaggguagcuuucuca

SEQ ID NO: 1955642 - RNA, 19 nt, Artificial Sequence
  Description of Artificial Sequence: Synthetic oligonucleotide
  Sense strand starting at position 1443 of SEQ ID NO: 1880281
aguagcuguggaugaguaa

SEQ ID NO: 1955643 - RNA, 19 nt, Artificial Sequence
  Description of Artificial Sequence: Synthetic oligonucleotide
  Antisense strand to SEQ ID NO: 1955642
uuacucauccacagcuacu

SEQ ID NO: 1955644 - RNA, 19 nt, Artificial Sequence
  Description of Artificial Sequence: Synthetic oligonucleotide
  Sense strand starting at position 1444 of SEQ ID NO: 1880281
guagcuguggaugaguaau

SEQ ID NO: 1955645 - RNA, 19 nt, Artificial Sequence
  Description of Artificial Sequence: Synthetic oligonucleotide
  Antisense strand to SEQ ID NO: 1955644
auuacucauccacagcuac

SEQ ID NO: 1955646 - RNA, 19 nt, Artificial Sequence
  Description of Artificial Sequence: Synthetic oligonucleotide
  Sense strand starting at position 1452 of SEQ ID NO: 1880281
ggaugaguaauggguguuc

SEQ ID NO: 1955647 - RNA, 19 nt, Artificial Sequence
  Description of Artificial Sequence: Synthetic oligonucleotide
  Antisense strand to SEQ ID NO: 1955646
gaacacccauuacucaucc

SEQ ID NO: 1955648 - RNA, 19 nt, Artificial Sequence
  Description of Artificial Sequence: Synthetic oligonucleotide
  Sense strand starting at position 2014 of SEQ ID NO: 1880281
aguaaagcucgcuaccauu

SEQ ID NO: 1955649 - RNA, 19 nt, Artificial Sequence
  Description of Artificial Sequence: Synthetic oligonucleotide
  Antisense strand to SEQ ID NO: 1955648
aaugguagcgagcuuuacu

SEQ ID NO: 1955650 - RNA, 19 nt, Artificial Sequence
  Description of Artificial Sequence: Synthetic oligonucleotide
  Sense strand starting at position 2191 of SEQ ID NO: 1880281
cugggacucaacugcgaaa

SEQ ID NO: 1955651 - RNA, 19 nt, Artificial Sequence
  Description of Artificial Sequence: Synthetic oligonucleotide
  Antisense strand to SEQ ID NO: 1955650
uuucgcaguugagucccag

SEQ ID NO: 1955652 - RNA, 19 nt, Artificial Sequence
  Description of Artificial Sequence: Synthetic oligonucleotide
  Sense strand starting at position 2193 of SEQ ID NO: 1880281
gggacucaacugcgaaaua

SEQ ID NO: 1955653 - RNA, 19 nt, Artificial Sequence
  Description of Artificial Sequence: Synthetic oligonucleotide
  Antisense strand to SEQ ID NO: 1955652
uauuucgcaguugaguccc

SEQ ID NO: 1955654 - RNA, 19 nt, Artificial Sequence
  Description of Artificial Sequence: Synthetic oligonucleotide
  Sense strand starting at position 2213 of SEQ ID NO: 1880281
aaagacaucgugugaaacu

SEQ ID NO: 1955655 - RNA, 19 nt, Artificial Sequence
  Description of Artificial Sequence: Synthetic oligonucleotide
  Antisense strand to SEQ ID NO: 1955654
aguuucacacgaugucuuu

SEQ ID NO: 1955656 - RNA, 19 nt, Artificial Sequence
  Description of Artificial Sequence: Synthetic oligonucleotide
  Sense strand starting at position 2223 of SEQ ID NO: 1880281
ugugaaacuccuuaucgcu

SEQ ID NO: 1955657 - RNA, 19 nt, Artificial Sequence
  Description of Artificial Sequence: Synthetic oligonucleotide
  Antisense strand to SEQ ID NO: 1955656
agcgauaaggaguuucaca

SEQ ID NO: 1955658 - RNA, 19 nt, Artificial Sequence
  Description of Artificial Sequence: Synthetic oligonucleotide
  Sense strand starting at position 2225 of SEQ ID NO: 1880281
ugaaacuccuuaucgcuua

SEQ ID NO: 1955659 - RNA, 19 nt, Artificial Sequence
  Description of Artificial Sequence: Synthetic oligonucleotide
  Antisense strand to SEQ ID NO: 1955658
uaagcgauaaggaguuuca

SEQ ID NO: 1955660 - RNA, 19 nt, Artificial Sequence
  Description of Artificial Sequence: Synthetic oligonucleotide
  Sense strand starting at position 2230 of SEQ ID NO: 1880281
cuccuuaucgcuuaacagu

SEQ ID NO: 1955661 - RNA, 19 nt, Artificial Sequence
  Description of Artificial Sequence: Synthetic oligonucleotide
  Antisense strand to SEQ ID NO: 1955660
acuguuaagcgauaaggag

SEQ ID NO: 1955662 - RNA, 19 nt, Artificial Sequence
  Description of Artificial Sequence: Synthetic oligonucleotide
  Sense strand starting at position 2244 of SEQ ID NO: 1880281
acagucuugugucucuaaa

SEQ ID NO: 1955663 - RNA, 19 nt, Artificial Sequence
  Description of Artificial Sequence: Synthetic oligonucleotide
  Antisense strand to SEQ ID NO: 1955662
uuuagagacacaagacugu

SEQ ID NO: 1955664 - RNA, 19 nt, Artificial Sequence
  Description of Artificial Sequence: Synthetic oligonucleotide
  Sense strand starting at position 2518 of SEQ ID NO: 1880281
ggcauccaugugcaagauu

SEQ ID NO: 1955665 - RNA, 19 nt, Artificial Sequence
  Description of Artificial Sequence: Synthetic oligonucleotide
  Antisense strand to SEQ ID NO: 1955664
aaucuugcacauggaugcc

SEQ ID NO: 1955666 - RNA, 19 nt, Artificial Sequence
  Description of Artificial Sequence: Synthetic oligonucleotide
  Sense strand starting at position 2521 of SEQ ID NO: 1880281
auccaugugcaagauucua

SEQ ID NO: 1955667 - RNA, 19 nt, Artificial Sequence
  Description of Artificial Sequence: Synthetic oligonucleotide
  Antisense strand to SEQ ID NO: 1955666
uagaaucuugcacauggau

SEQ ID NO: 1955668 - RNA, 19 nt, Artificial Sequence
  Description of Artificial Sequence: Synthetic oligonucleotide
  Sense strand starting at position 2548 of SEQ ID NO: 1880281
gcauauaaucgugugcuua

SEQ ID NO: 1955669 - RNA, 19 nt, Artificial Sequence
  Description of Artificial Sequence: Synthetic oligonucleotide
  Antisense strand to SEQ ID NO: 1955668
uaagcacacgauuauaugc

SEQ ID NO: 1955670 - RNA, 19 nt, Artificial Sequence
  Description of Artificial Sequence: Synthetic oligonucleotide
  Sense strand starting at position 2611 of SEQ ID NO: 1880281
cagaaagagcguuaccgua

SEQ ID NO: 1955671 - RNA, 19 nt, Artificial Sequence
  Description of Artificial Sequence: Synthetic oligonucleotide
  Antisense strand to SEQ ID NO: 1955670
uacgguaacgcucuuucug

SEQ ID NO: 1955672 - RNA, 19 nt, Artificial Sequence
  Description of Artificial Sequence: Synthetic oligonucleotide
  Sense strand starting at position 2864 of SEQ ID NO: 1880281
cugauagcccucuaaugcu

SEQ ID NO: 1955673 - RNA, 19 nt, Artificial Sequence
  Description of Artificial Sequence: Synthetic oligonucleotide
  Antisense strand to SEQ ID NO: 1955672
agcauuagagggcuaucag

SEQ ID NO: 1955674 - RNA, 19 nt, Artificial Sequence
  Description of Artificial Sequence: Synthetic oligonucleotide
  Sense strand starting at position 3334 of SEQ ID NO: 1880281
ucuauucguccugaccagu

SEQ ID NO: 1955675 - RNA, 19 nt, Artificial Sequence
  Description of Artificial Sequence: Synthetic oligonucleotide
  Antisense strand to SEQ ID NO: 1955674
acuggucaggacgaauaga

SEQ ID NO: 1955676 - RNA, 19 nt, Artificial Sequence
  Description of Artificial Sequence: Synthetic oligonucleotide
  Sense strand starting at position 25 of SEQ ID NO: 1880282
agucuaacuuggucauggu

SEQ ID NO: 1955677 - RNA, 19 nt, Artificial Sequence
  Description of Artificial Sequence: Synthetic oligonucleotide
  Antisense strand to SEQ ID NO: 1955676
accaugaccaaguuagacu

SEQ ID NO: 1955678 - RNA, 19 nt, Artificial Sequence
  Description of Artificial Sequence: Synthetic oligonucleotide
  Sense strand starting at position 26 of SEQ ID NO: 1880282
gucuaacuuggucaugguu

SEQ ID NO: 1955679 - RNA, 19 nt, Artificial Sequence
  Description of Artificial Sequence: Synthetic oligonucleotide
  Antisense strand to SEQ ID NO: 1955678
aaccaugaccaaguuagac

SEQ ID NO: 1955680 - RNA, 19 nt, Artificial Sequence
  Description of Artificial Sequence: Synthetic oligonucleotide
  Sense strand starting at position 118 of SEQ ID NO: 1880282
ggauguugaucuguagucu

SEQ ID NO: 1955681 - RNA, 19 nt, Artificial Sequence
  Description of Artificial Sequence: Synthetic oligonucleotide
  Antisense strand to SEQ ID NO: 1955680
agacuacagaucaacaucc

SEQ ID NO: 1955682 - RNA, 19 nt, Artificial Sequence
  Description of Artificial Sequence: Synthetic oligonucleotide
  Sense strand starting at position 122 of SEQ ID NO: 1880282
guugaucuguagucuucuu

SEQ ID NO: 1955683 - RNA, 19 nt, Artificial Sequence
  Description of Artificial Sequence: Synthetic oligonucleotide
  Antisense strand to SEQ ID NO: 1955682
aagaagacuacagaucaac

SEQ ID NO: 1955684 - RNA, 19 nt, Artificial Sequence
  Description of Artificial Sequence: Synthetic oligonucleotide
  Sense strand starting at position 160 of SEQ ID NO: 1880282
gugccaucagaaugaugcu

SEQ ID NO: 1955685 - RNA, 19 nt, Artificial Sequence
  Description of Artificial Sequence: Synthetic oligonucleotide
  Antisense strand to SEQ ID NO: 1955684
agcaucauucugauggcac

SEQ ID NO: 1955686 - RNA, 19 nt, Artificial Sequence
  Description of Artificial Sequence: Synthetic oligonucleotide
  Sense strand starting at position 232 of SEQ ID NO: 1880282
guuugaaaggauugguguu

SEQ ID NO: 1955687 - RNA, 19 nt, Artificial Sequence
  Description of Artificial Sequence: Synthetic oligonucleotide
  Antisense strand to SEQ ID NO: 1955686
aacaccaauccuuucaaac

SEQ ID NO: 1955688 - RNA, 19 nt, Artificial Sequence
  Description of Artificial Sequence: Synthetic oligonucleotide
  Sense strand starting at position 233 of SEQ ID NO: 1880282
uuugaaaggauugguguua

SEQ ID NO: 1955689 - RNA, 19 nt, Artificial Sequence
  Description of Artificial Sequence: Synthetic oligonucleotide
  Antisense strand to SEQ ID NO: 1955688
uaacaccaauccuuucaaa

SEQ ID NO: 1955690 - RNA, 19 nt, Artificial Sequence
  Description of Artificial Sequence: Synthetic oligonucleotide
  Sense strand starting at position 324 of SEQ ID NO: 1880282
gaagucuucugauccugga

SEQ ID NO: 1955691 - RNA, 19 nt, Artificial Sequence
  Description of Artificial Sequence: Synthetic oligonucleotide
  Antisense strand to SEQ ID NO: 1955690
uccaggaucagaagacuuc

SEQ ID NO: 1955692 - RNA, 19 nt, Artificial Sequence
  Description of Artificial Sequence: Synthetic oligonucleotide
  Sense strand starting at position 340 of SEQ ID NO: 1880282
ggacuucuuucuguugaga

SEQ ID NO: 1955693 - RNA, 19 nt, Artificial Sequence
  Description of Artificial Sequence: Synthetic oligonucleotide
  Antisense strand to SEQ ID NO: 1955692
ucucaacagaaagaagucc

SEQ ID NO: 1955694 - RNA, 19 nt, Artificial Sequence
  Description of Artificial Sequence: Synthetic oligonucleotide
  Sense strand starting at position 343 of SEQ ID NO: 1880282
cuucuuucuguugagaggu

SEQ ID NO: 1955695 - RNA, 19 nt, Artificial Sequence
  Description of Artificial Sequence: Synthetic oligonucleotide
  Antisense strand to SEQ ID NO: 1955694
accucucaacagaaagaag

SEQ ID NO: 1955696 - RNA, 19 nt, Artificial Sequence
  Description of Artificial Sequence: Synthetic oligonucleotide
  Sense strand starting at position 1214 of SEQ ID NO: 1880282
ucuagaaacuucggauuua

SEQ ID NO: 1955697 - RNA, 19 nt, Artificial Sequence
  Description of Artificial Sequence: Synthetic oligonucleotide
  Antisense strand to SEQ ID NO: 1955696
uaaauccgaaguuucuaga

SEQ ID NO: 1955698 - RNA, 19 nt, Artificial Sequence
  Description of Artificial Sequence: Synthetic oligonucleotide
  Sense strand starting at position 1215 of SEQ ID NO: 1880282
cuagaaacuucggauuuaa

SEQ ID NO: 1955699 - RNA, 19 nt, Artificial Sequence
  Description of Artificial Sequence: Synthetic oligonucleotide
  Antisense strand to SEQ ID NO: 1955698
uuaaauccgaaguuucuag

SEQ ID NO: 1955700 - RNA, 19 nt, Artificial Sequence
  Description of Artificial Sequence: Synthetic oligonucleotide
  Sense strand starting at position 1232 of SEQ ID NO: 1880282
aaagcucagcccgagagaa

SEQ ID NO: 1955701 - RNA, 19 nt, Artificial Sequence
  Description of Artificial Sequence: Synthetic oligonucleotide
  Antisense strand to SEQ ID NO: 1955700
uucucucgggcugagcuuu

SEQ ID NO: 1955702 - RNA, 19 nt, Artificial Sequence
  Description of Artificial Sequence: Synthetic oligonucleotide
  Sense strand starting at position 1277 of SEQ ID NO: 1880282
gcuagaaagcaucaccaga

SEQ ID NO: 1955703 - RNA, 19 nt, Artificial Sequence
  Description of Artificial Sequence: Synthetic oligonucleotide
  Antisense strand to SEQ ID NO: 1955702
ucuggugaugcuuucuagc

SEQ ID NO: 1955704 - RNA, 19 nt, Artificial Sequence
  Description of Artificial Sequence: Synthetic oligonucleotide
  Sense strand starting at position 1423 of SEQ ID NO: 1880282
ggguuagguuuauuucugu

SEQ ID NO: 1955705 - RNA, 19 nt, Artificial Sequence
  Description of Artificial Sequence: Synthetic oligonucleotide
  Antisense strand to SEQ ID NO: 1955704
acagaaauaaaccuaaccc

SEQ ID NO: 1955706 - RNA, 19 nt, Artificial Sequence
  Description of Artificial Sequence: Synthetic oligonucleotide
  Sense strand starting at position 1428 of SEQ ID NO: 1880282
agguuuauuucuguuguua

SEQ ID NO: 1955707 - RNA, 19 nt, Artificial Sequence
  Description of Artificial Sequence: Synthetic oligonucleotide
  Antisense strand to SEQ ID NO: 1955706
uaacaacagaaauaaaccu

SEQ ID NO: 1955708 - RNA, 19 nt, Artificial Sequence
  Description of Artificial Sequence: Synthetic oligonucleotide
  Sense strand starting at position 1635 of SEQ ID NO: 1880282
acccaagauuuccgagagu

SEQ ID NO: 1955709 - RNA, 19 nt, Artificial Sequence
  Description of Artificial Sequence: Synthetic oligonucleotide
  Antisense strand to SEQ ID NO: 1955708
acucucggaaaucuugggu

SEQ ID NO: 1955710 - RNA, 19 nt, Artificial Sequence
  Description of Artificial Sequence: Synthetic oligonucleotide
  Sense strand starting at position 2005 of SEQ ID NO: 1880282
ugcacuggucaggacgaau

SEQ ID NO: 1955711 - RNA, 19 nt, Artificial Sequence
  Description of Artificial Sequence: Synthetic oligonucleotide
  Antisense strand to SEQ ID NO: 1955710
auucguccugaccagugca

SEQ ID NO: 1955712 - RNA, 19 nt, Artificial Sequence
  Description of Artificial Sequence: Synthetic oligonucleotide
  Sense strand starting at position 2018 of SEQ ID NO: 1880282
acgaauagagccugacaaa

SEQ ID NO: 1955713 - RNA, 19 nt, Artificial Sequence
  Description of Artificial Sequence: Synthetic oligonucleotide
  Antisense strand to SEQ ID NO: 1955712
uuugucaggcucuauucgu

SEQ ID NO: 1955714 - RNA, 19 nt, Artificial Sequence
  Description of Artificial Sequence: Synthetic oligonucleotide
  Sense strand starting at position 2041 of SEQ ID NO: 1880282
gaguuaauuggccgagcga

SEQ ID NO: 1955715 - RNA, 19 nt, Artificial Sequence
  Description of Artificial Sequence: Synthetic oligonucleotide
  Antisense strand to SEQ ID NO: 1955714
ucgcucggccaauuaacuc

SEQ ID NO: 1955716 - RNA, 19 nt, Artificial Sequence
  Description of Artificial Sequence: Synthetic oligonucleotide
  Sense strand starting at position 2042 of SEQ ID NO: 1880282
aguuaauuggccgagcgaa

SEQ ID NO: 1955717 - RNA, 19 nt, Artificial Sequence
  Description of Artificial Sequence: Synthetic oligonucleotide
  Antisense strand to SEQ ID NO: 1955716
uucgcucggccaauuaacu

SEQ ID NO: 1955718 - RNA, 19 nt, Artificial Sequence
  Description of Artificial Sequence: Synthetic oligonucleotide
  Sense strand starting at position 2322 of SEQ ID NO: 1880282
uccguucuggccugagaac

SEQ ID NO: 1955719 - RNA, 19 nt, Artificial Sequence
  Description of Artificial Sequence: Synthetic oligonucleotide
  Antisense strand to SEQ ID NO: 1955718
guucucaggccagaacgga

SEQ ID NO: 1955720 - RNA, 19 nt, Artificial Sequence
  Description of Artificial Sequence: Synthetic oligonucleotide
  Sense strand starting at position 2331 of SEQ ID NO: 1880282
gccugagaacccggacuuu

SEQ ID NO: 1955721 - RNA, 19 nt, Artificial Sequence
  Description of Artificial Sequence: Synthetic oligonucleotide
  Antisense strand to SEQ ID NO: 1955720
aaaguccggguucucaggc

SEQ ID NO: 1955722 - RNA, 19 nt, Artificial Sequence
  Description of Artificial Sequence: Synthetic oligonucleotide
  Sense strand starting at position 2475 of SEQ ID NO: 1880282
guaagcauuagagggcuau

SEQ ID NO: 1955723 - RNA, 19 nt, Artificial Sequence
  Description of Artificial Sequence: Synthetic oligonucleotide
  Antisense strand to SEQ ID NO: 1955722
auagcccucuaaugcuuac

SEQ ID NO: 1955724 - RNA, 19 nt, Artificial Sequence
  Description of Artificial Sequence: Synthetic oligonucleotide
  Sense strand starting at position 2602 of SEQ ID NO: 1880282
aaggacuucgucuguaauu

SEQ ID NO: 1955725 - RNA, 19 nt, Artificial Sequence
  Description of Artificial Sequence: Synthetic oligonucleotide
  Antisense strand to SEQ ID NO: 1955724
aauuacagacgaaguccuu

SEQ ID NO: 1955726 - RNA, 19 nt, Artificial Sequence
  Description of Artificial Sequence: Synthetic oligonucleotide
  Sense strand starting at position 2603 of SEQ ID NO: 1880282
aggacuucgucuguaauuu

SEQ ID NO: 1955727 - RNA, 19 nt, Artificial Sequence
  Description of Artificial Sequence: Synthetic oligonucleotide
  Antisense strand to SEQ ID NO: 1955726
aaauuacagacgaaguccu

SEQ ID NO: 1955728 - RNA, 19 nt, Artificial Sequence
  Description of Artificial Sequence: Synthetic oligonucleotide
  Sense strand starting at position 2665 of SEQ ID NO: 1880282
ggaggccuccugugacuua

SEQ ID NO: 1955729 - RNA, 19 nt, Artificial Sequence
  Description of Artificial Sequence: Synthetic oligonucleotide
  Antisense strand to SEQ ID NO: 1955728
uaagucacaggaggccucc

SEQ ID NO: 1955730 - RNA, 19 nt, Artificial Sequence
  Description of Artificial Sequence: Synthetic oligonucleotide
  Sense strand starting at position 2695 of SEQ ID NO: 1880282
gccgucaguccauagggaa

SEQ ID NO: 1955731 - RNA, 19 nt, Artificial Sequence
  Description of Artificial Sequence: Synthetic oligonucleotide
  Antisense strand to SEQ ID NO: 1955730
uucccuauggacugacggc

SEQ ID NO: 1955732 - RNA, 19 nt, Artificial Sequence
  Description of Artificial Sequence: Synthetic oligonucleotide
  Sense strand starting at position 2714 of SEQ ID NO: 1880282
caccguaguauguaguaua

SEQ ID NO: 1955733 - RNA, 19 nt, Artificial Sequence
  Description of Artificial Sequence: Synthetic oligonucleotide
  Antisense strand to SEQ ID NO: 1955732
uauacuacauacuacggug

SEQ ID NO: 1955734 - RNA, 19 nt, Artificial Sequence
  Description of Artificial Sequence: Synthetic oligonucleotide
  Sense strand starting at position 2791 of SEQ ID NO: 1880282
gcuuaagcacacgauuaua

SEQ ID NO: 1955735 - RNA, 19 nt, Artificial Sequence
  Description of Artificial Sequence: Synthetic oligonucleotide
  Antisense strand to SEQ ID NO: 1955734
uauaaucgugugcuuaagc

SEQ ID NO: 1955736 - RNA, 19 nt, Artificial Sequence
  Description of Artificial Sequence: Synthetic oligonucleotide
  Sense strand starting at position 2799 of SEQ ID NO: 1880282
acacgauuauaugcuugau

SEQ ID NO: 1955737 - RNA, 19 nt, Artificial Sequence
  Description of Artificial Sequence: Synthetic oligonucleotide
  Antisense strand to SEQ ID NO: 1955736
aucaagcauauaaucgugu

SEQ ID NO: 1955738 - RNA, 19 nt, Artificial Sequence
  Description of Artificial Sequence: Synthetic oligonucleotide
  Sense strand starting at position 2843 of SEQ ID NO: 1880282
acuguauuguacucugcua

SEQ ID NO: 1955739 - RNA, 19 nt, Artificial Sequence
  Description of Artificial Sequence: Synthetic oligonucleotide
  Antisense strand to SEQ ID NO: 1955738
uagcagaguacaauacagu

SEQ ID NO: 1955740 - RNA, 19 nt, Artificial Sequence
  Description of Artificial Sequence: Synthetic oligonucleotide
  Sense strand starting at position 2845 of SEQ ID NO: 1880282
uguauuguacucugcuaaa

SEQ ID NO: 1955741 - RNA, 19 nt, Artificial Sequence
  Description of Artificial Sequence: Synthetic oligonucleotide
  Antisense strand to SEQ ID NO: 1955740
uuuagcagaguacaauaca

SEQ ID NO: 1955742 - RNA, 19 nt, Artificial Sequence
  Description of Artificial Sequence: Synthetic oligonucleotide
  Sense strand starting at position 2881 of SEQ ID NO: 1880282
gguugauccacuggucagu

SEQ ID NO: 1955743 - RNA, 19 nt, Artificial Sequence
  Description of Artificial Sequence: Synthetic oligonucleotide
  Antisense strand to SEQ ID NO: 1955742
acugaccaguggaucaacc

SEQ ID NO: 1955744 - RNA, 19 nt, Artificial Sequence
  Description of Artificial Sequence: Synthetic oligonucleotide
  Sense strand starting at position 2886 of SEQ ID NO: 1880282
auccacuggucagugaaca

SEQ ID NO: 1955745 - RNA, 19 nt, Artificial Sequence
  Description of Artificial Sequence: Synthetic oligonucleotide
  Antisense strand to SEQ ID NO: 1955744
uguucacugaccaguggau

SEQ ID NO: 1955746 - RNA, 19 nt, Artificial Sequence
  Description of Artificial Sequence: Synthetic oligonucleotide
  Sense strand starting at position 3080 of SEQ ID NO: 1880282
gugggcuacguguuucauu

SEQ ID NO: 1955747 - RNA, 19 nt, Artificial Sequence
  Description of Artificial Sequence: Synthetic oligonucleotide
  Antisense strand to SEQ ID NO: 1955746
aaugaaacacguagcccac

SEQ ID NO: 1955748 - RNA, 19 nt, Artificial Sequence
  Description of Artificial Sequence: Synthetic oligonucleotide
  Sense strand starting at position 3081 of SEQ ID NO: 1880282
ugggcuacguguuucauuu

SEQ ID NO: 1955749 - RNA, 19 nt, Artificial Sequence
  Description of Artificial Sequence: Synthetic oligonucleotide
  Antisense strand to SEQ ID NO: 1955748
aaaugaaacacguagccca

SEQ ID NO: 1955750 - RNA, 19 nt, Artificial Sequence
  Description of Artificial Sequence: Synthetic oligonucleotide
  Sense strand starting at position 3108 of SEQ ID NO: 1880282
caagacuguuaagcgauaa

SEQ ID NO: 1955751 - RNA, 19 nt, Artificial Sequence
  Description of Artificial Sequence: Synthetic oligonucleotide
  Antisense strand to SEQ ID NO: 1955750
uuaucgcuuaacagucuug

SEQ ID NO: 1955752 - RNA, 19 nt, Artificial Sequence
  Description of Artificial Sequence: Synthetic oligonucleotide
  Sense strand starting at position 3112 of SEQ ID NO: 1880282
acuguuaagcgauaaggag

SEQ ID NO: 1955753 - RNA, 19 nt, Artificial Sequence
  Description of Artificial Sequence: Synthetic oligonucleotide
  Antisense strand to SEQ ID NO: 1955752
cuccuuaucgcuuaacagu

SEQ ID NO: 1955754 - RNA, 19 nt, Artificial Sequence
  Description of Artificial Sequence: Synthetic oligonucleotide
  Sense strand starting at position 3127 of SEQ ID NO: 1880282
ggaguuucacacgaugucu

SEQ ID NO: 1955755 - RNA, 19 nt, Artificial Sequence
  Description of Artificial Sequence: Synthetic oligonucleotide
  Antisense strand to SEQ ID NO: 1955754
agacaucgugugaaacucc

SEQ ID NO: 1955756 - RNA, 19 nt, Artificial Sequence
  Description of Artificial Sequence: Synthetic oligonucleotide
  Sense strand starting at position 116 of SEQ ID NO: 1880283
ugaauugcuguugacaaua

SEQ ID NO: 1955757 - RNA, 19 nt, Artificial Sequence
  Description of Artificial Sequence: Synthetic oligonucleotide
  Antisense strand to SEQ ID NO: 1955756
uauugucaacagcaauuca

SEQ ID NO: 1955758 - RNA, 19 nt, Artificial Sequence
  Description of Artificial Sequence: Synthetic oligonucleotide
  Sense strand starting at position 144 of SEQ ID NO: 1880283
acuguucuucuuggcuuaa

SEQ ID NO: 1955759 - RNA, 19 nt, Artificial Sequence
  Description of Artificial Sequence: Synthetic oligonucleotide
  Antisense strand to SEQ ID NO: 1955758
uuaagccaagaagaacagu

SEQ ID NO: 1955760 - RNA, 19 nt, Artificial Sequence
  Description of Artificial Sequence: Synthetic oligonucleotide
  Sense strand starting at position 145 of SEQ ID NO: 1880283
cuguucuucuuggcuuaaa

SEQ ID NO: 1955761 - RNA, 19 nt, Artificial Sequence
  Description of Artificial Sequence: Synthetic oligonucleotide
  Antisense strand to SEQ ID NO: 1955760
uuuaagccaagaagaacag

SEQ ID NO: 1955762 - RNA, 19 nt, Artificial Sequence
  Description of Artificial Sequence: Synthetic oligonucleotide
  Sense strand starting at position 206 of SEQ ID NO: 1880283
gcuacaagacgucgauuau

SEQ ID NO: 1955763 - RNA, 19 nt, Artificial Sequence
  Description of Artificial Sequence: Synthetic oligonucleotide
  Antisense strand to SEQ ID NO: 1955762
auaaucgacgucuuguagc

SEQ ID NO: 1955764 - RNA, 19 nt, Artificial Sequence
  Description of Artificial Sequence: Synthetic oligonucleotide
  Sense strand starting at position 207 of SEQ ID NO: 1880283
cuacaagacgucgauuaua

SEQ ID NO: 1955765 - RNA, 19 nt, Artificial Sequence
  Description of Artificial Sequence: Synthetic oligonucleotide
  Antisense strand to SEQ ID NO: 1955764
uauaaucgacgucuuguag

SEQ ID NO: 1955766 - RNA, 19 nt, Artificial Sequence
  Description of Artificial Sequence: Synthetic oligonucleotide
  Sense strand starting at position 275 of SEQ ID NO: 1880283
gucaaagucuccuucugaa

SEQ ID NO: 1955767 - RNA, 19 nt, Artificial Sequence
  Description of Artificial Sequence: Synthetic oligonucleotide
  Antisense strand to SEQ ID NO: 1955766
uucagaaggagacuuugac

SEQ ID NO: 1955768 - RNA, 19 nt, Artificial Sequence
  Description of Artificial Sequence: Synthetic oligonucleotide
  Sense strand starting at position 348 of SEQ ID NO: 1880283
aauuauaagugcuuggguu

SEQ ID NO: 1955769 - RNA, 19 nt, Artificial Sequence
  Description of Artificial Sequence: Synthetic oligonucleotide
  Antisense strand to SEQ ID NO: 1955768
aacccaagcacuuauaauu

SEQ ID NO: 1955770 - RNA, 19 nt, Artificial Sequence
  Description of Artificial Sequence: Synthetic oligonucleotide
  Sense strand starting at position 349 of SEQ ID NO: 1880283
auuauaagugcuuggguua

SEQ ID NO: 1955771 - RNA, 19 nt, Artificial Sequence
  Description of Artificial Sequence: Synthetic oligonucleotide
  Antisense strand to SEQ ID NO: 1955770
uaacccaagcacuuauaau

SEQ ID NO: 1955772 - RNA, 19 nt, Artificial Sequence
  Description of Artificial Sequence: Synthetic oligonucleotide
  Sense strand starting at position 350 of SEQ ID NO: 1880283
uuauaagugcuuggguuaa

SEQ ID NO: 1955773 - RNA, 19 nt, Artificial Sequence
  Description of Artificial Sequence: Synthetic oligonucleotide
  Antisense strand to SEQ ID NO: 1955772
uuaacccaagcacuuauaa

SEQ ID NO: 1955774 - RNA, 19 nt, Artificial Sequence
  Description of Artificial Sequence: Synthetic oligonucleotide
  Sense strand starting at position 644 of SEQ ID NO: 1880283
gugucaggcgauagagcuu

SEQ ID NO: 1955775 - RNA, 19 nt, Artificial Sequence
  Description of Artificial Sequence: Synthetic oligonucleotide
  Antisense strand to SEQ ID NO: 1955774
aagcucuaucgccugacac

SEQ ID NO: 1955776 - RNA, 19 nt, Artificial Sequence
  Description of Artificial Sequence: Synthetic oligonucleotide
  Sense strand starting at position 776 of SEQ ID NO: 1880283
uccagaguguaucuuucuu

SEQ ID NO: 1955777 - RNA, 19 nt, Artificial Sequence
  Description of Artificial Sequence: Synthetic oligonucleotide
  Antisense strand to SEQ ID NO: 1955776
aagaaagauacacucugga

SEQ ID NO: 1955778 - RNA, 19 nt, Artificial Sequence
  Description of Artificial Sequence: Synthetic oligonucleotide
  Sense strand starting at position 893 of SEQ ID NO: 1880283
ucacuaucuuguguagacu

SEQ ID NO: 1955779 - RNA, 19 nt, Artificial Sequence
  Description of Artificial Sequence: Synthetic oligonucleotide
  Antisense strand to SEQ ID NO: 1955778
agucuacacaagauaguga

SEQ ID NO: 1955780 - RNA, 19 nt, Artificial Sequence
  Description of Artificial Sequence: Synthetic oligonucleotide
  Sense strand starting at position 929 of SEQ ID NO: 1880283
cagcaauuccgacgaucau

SEQ ID NO: 1955781 - RNA, 19 nt, Artificial Sequence
  Description of Artificial Sequence: Synthetic oligonucleotide
  Antisense strand to SEQ ID NO: 1955780
augaucgucggaauugcug

SEQ ID NO: 1955782 - RNA, 19 nt, Artificial Sequence
  Description of Artificial Sequence: Synthetic oligonucleotide
  Sense strand starting at position 930 of SEQ ID NO: 1880283
agcaauuccgacgaucauu

SEQ ID NO: 1955783 - RNA, 19 nt, Artificial Sequence
  Description of Artificial Sequence: Synthetic oligonucleotide
  Antisense strand to SEQ ID NO: 1955782
aaugaucgucggaauugcu

SEQ ID NO: 1955784 - RNA, 19 nt, Artificial Sequence
  Description of Artificial Sequence: Synthetic oligonucleotide
  Sense strand starting at position 938 of SEQ ID NO: 1880283
cgacgaucauucucagguu

SEQ ID NO: 1955785 - RNA, 19 nt, Artificial Sequence
  Description of Artificial Sequence: Synthetic oligonucleotide
  Antisense strand to SEQ ID NO: 1955784
aaccugagaaugaucgucg

SEQ ID NO: 1955786 - RNA, 19 nt, Artificial Sequence
  Description of Artificial Sequence: Synthetic oligonucleotide
  Sense strand starting at position 1397 of SEQ ID NO: 1880283
guuacccuuccaggaagaa

SEQ ID NO: 1955787 - RNA, 19 nt, Artificial Sequence
  Description of Artificial Sequence: Synthetic oligonucleotide
  Antisense strand to SEQ ID NO: 1955786
uucuuccuggaaggguaac

SEQ ID NO: 1955788 - RNA, 19 nt, Artificial Sequence
  Description of Artificial Sequence: Synthetic oligonucleotide
  Sense strand starting at position 2286 of SEQ ID NO: 1880283
caaaguaaggccgaaugau

SEQ ID NO: 1955789 - RNA, 19 nt, Artificial Sequence
  Description of Artificial Sequence: Synthetic oligonucleotide
  Antisense strand to SEQ ID NO: 1955788
aucauucggccuuacuuug

SEQ ID NO: 1955790 - RNA, 19 nt, Artificial Sequence
  Description of Artificial Sequence: Synthetic oligonucleotide
  Sense strand starting at position 2450 of SEQ ID NO: 1880283
cggccuuagccacaugagu

SEQ ID NO: 1955791 - RNA, 19 nt, Artificial Sequence
  Description of Artificial Sequence: Synthetic oligonucleotide
  Antisense strand to SEQ ID NO: 1955790
acucauguggcuaaggccg

SEQ ID NO: 1955792 - RNA, 19 nt, Artificial Sequence
  Description of Artificial Sequence: Synthetic oligonucleotide
  Sense strand starting at position 2690 of SEQ ID NO: 1880283
gcaguuaucucuuugggau

SEQ ID NO: 1955793 - RNA, 19 nt, Artificial Sequence
  Description of Artificial Sequence: Synthetic oligonucleotide
  Antisense strand to SEQ ID NO: 1955792
aucccaaagagauaacugc

SEQ ID NO: 1955794 - RNA, 19 nt, Artificial Sequence
  Description of Artificial Sequence: Synthetic oligonucleotide
  Sense strand starting at position 2691 of SEQ ID NO: 1880283
caguuaucucuuugggaua

SEQ ID NO: 1955795 - RNA, 19 nt, Artificial Sequence
  Description of Artificial Sequence: Synthetic oligonucleotide
  Antisense strand to SEQ ID NO: 1955794
uaucccaaagagauaacug

SEQ ID NO: 1955796 - RNA, 19 nt, Artificial Sequence
  Description of Artificial Sequence: Synthetic oligonucleotide
  Sense strand starting at position 2742 of SEQ ID NO: 1880283
guaggacugcuugauugua

SEQ ID NO: 1955797 - RNA, 19 nt, Artificial Sequence
  Description of Artificial Sequence: Synthetic oligonucleotide
  Antisense strand to SEQ ID NO: 1955796
uacaaucaagcaguccuac

SEQ ID NO: 1955798 - RNA, 19 nt, Artificial Sequence
  Description of Artificial Sequence: Synthetic oligonucleotide
  Sense strand starting at position 2929 of SEQ ID NO: 1880283
acacuugugaggugauaua

SEQ ID NO: 1955799 - RNA, 19 nt, Artificial Sequence
  Description of Artificial Sequence: Synthetic oligonucleotide
  Antisense strand to SEQ ID NO: 1955798
uauaucaccucacaagugu

SEQ ID NO: 1955800 - RNA, 19 nt, Artificial Sequence
  Description of Artificial Sequence: Synthetic oligonucleotide
  Sense strand starting at position 3088 of SEQ ID NO: 1880283
ucuugcaauugaguuguau

SEQ ID NO: 1955801 - RNA, 19 nt, Artificial Sequence
  Description of Artificial Sequence: Synthetic oligonucleotide
  Antisense strand to SEQ ID NO: 1955800
auacaacucaauugcaaga

SEQ ID NO: 1955802 - RNA, 19 nt, Artificial Sequence
  Description of Artificial Sequence: Synthetic oligonucleotide
  Sense strand starting at position 3141 of SEQ ID NO: 1880283
ucagauauguaguuugaaa

SEQ ID NO: 1955803 - RNA, 19 nt, Artificial Sequence
  Description of Artificial Sequence: Synthetic oligonucleotide
  Antisense strand to SEQ ID NO: 1955802
uuucaaacuacauaucuga

SEQ ID NO: 1955804 - RNA, 19 nt, Artificial Sequence
  Description of Artificial Sequence: Synthetic oligonucleotide
  Sense strand starting at position 3304 of SEQ ID NO: 1880283
ugccaauaccaaugucaug

SEQ ID NO: 1955805 - RNA, 19 nt, Artificial Sequence
  Description of Artificial Sequence: Synthetic oligonucleotide
  Antisense strand to SEQ ID NO: 1955804
caugacauugguauuggca

SEQ ID NO: 1955806 - RNA, 19 nt, Artificial Sequence
  Description of Artificial Sequence: Synthetic oligonucleotide
  Sense strand starting at position 3371 of SEQ ID NO: 1880283
acaguuaaaucuguaaucu

SEQ ID NO: 1955807 - RNA, 19 nt, Artificial Sequence
  Description of Artificial Sequence: Synthetic oligonucleotide
  Antisense strand to SEQ ID NO: 1955806
agauuacagauuuaacugu

SEQ ID NO: 1955808 - RNA, 19 nt, Artificial Sequence
  Description of Artificial Sequence: Synthetic oligonucleotide
  Sense strand starting at position 3511 of SEQ ID NO: 1880283
uauugcugccucuguagaa

SEQ ID NO: 1955809 - RNA, 19 nt, Artificial Sequence
  Description of Artificial Sequence: Synthetic oligonucleotide
  Antisense strand to SEQ ID NO: 1955808
uucuacagaggcagcaaua

SEQ ID NO: 1955810 - RNA, 19 nt, Artificial Sequence
  Description of Artificial Sequence: Synthetic oligonucleotide
  Sense strand starting at position 3515 of SEQ ID NO: 1880283
gcugccucuguagaagaau

SEQ ID NO: 1955811 - RNA, 19 nt, Artificial Sequence
  Description of Artificial Sequence: Synthetic oligonucleotide
  Antisense strand to SEQ ID NO: 1955810
auucuucuacagaggcagc

SEQ ID NO: 1955812 - RNA, 19 nt, Artificial Sequence
  Description of Artificial Sequence: Synthetic oligonucleotide
  Sense strand starting at position 3518 of SEQ ID NO: 1880283
gccucuguagaagaauauu

SEQ ID NO: 1955813 - RNA, 19 nt, Artificial Sequence
  Description of Artificial Sequence: Synthetic oligonucleotide
  Antisense strand to SEQ ID NO: 1955812
aauauucuucuacagaggc

SEQ ID NO: 1955814 - RNA, 19 nt, Artificial Sequence
  Description of Artificial Sequence: Synthetic oligonucleotide
  Sense strand starting at position 3539 of SEQ ID NO: 1880283
aguguauaugcauggguuu

SEQ ID NO: 1955815 - RNA, 19 nt, Artificial Sequence
  Description of Artificial Sequence: Synthetic oligonucleotide
  Antisense strand to SEQ ID NO: 1955814
aaacccaugcauauacacu

SEQ ID NO: 1955816 - RNA, 19 nt, Artificial Sequence
  Description of Artificial Sequence: Synthetic oligonucleotide
  Sense strand starting at position 3540 of SEQ ID NO: 1880283
guguauaugcauggguuua

SEQ ID NO: 1955817 - RNA, 19 nt, Artificial Sequence
  Description of Artificial Sequence: Synthetic oligonucleotide
  Antisense strand to SEQ ID NO: 1955816
uaaacccaugcauauacac

SEQ ID NO: 1955818 - RNA, 19 nt, Artificial Sequence
  Description of Artificial Sequence: Synthetic oligonucleotide
  Sense strand starting at position 3578 of SEQ ID NO: 1880283
guuccauuagaguaugugu

SEQ ID NO: 1955819 - RNA, 19 nt, Artificial Sequence
  Description of Artificial Sequence: Synthetic oligonucleotide
  Antisense strand to SEQ ID NO: 1955818
acacauacucuaauggaac

SEQ ID NO: 1955820 - RNA, 19 nt, Artificial Sequence
  Description of Artificial Sequence: Synthetic oligonucleotide
  Sense strand starting at position 3583 of SEQ ID NO: 1880283
auuagaguaugugucuguu

SEQ ID NO: 1955821 - RNA, 19 nt, Artificial Sequence
  Description of Artificial Sequence: Synthetic oligonucleotide
  Antisense strand to SEQ ID NO: 1955820
aacagacacauacucuaau

SEQ ID NO: 1955822 - RNA, 19 nt, Artificial Sequence
  Description of Artificial Sequence: Synthetic oligonucleotide
  Sense strand starting at position 3702 of SEQ ID NO: 1880283
gauugcuuugacuguugga

SEQ ID NO: 1955823 - RNA, 19 nt, Artificial Sequence
  Description of Artificial Sequence: Synthetic oligonucleotide
  Antisense strand to SEQ ID NO: 1955822
uccaacagucaaagcaauc

SEQ ID NO: 1955824 - RNA, 19 nt, Artificial Sequence
  Description of Artificial Sequence: Synthetic oligonucleotide
  Sense strand starting at position 3736 of SEQ ID NO: 1880283
auaugaauucuagguuugu

SEQ ID NO: 1955825 - RNA, 19 nt, Artificial Sequence
  Description of Artificial Sequence: Synthetic oligonucleotide
  Antisense strand to SEQ ID NO: 1955824
acaaaccuagaauucauau

SEQ ID NO: 1955826 - RNA, 19 nt, Artificial Sequence
  Description of Artificial Sequence: Synthetic oligonucleotide
  Sense strand starting at position 3737 of SEQ ID NO: 1880283
uaugaauucuagguuuguu

SEQ ID NO: 1955827 - RNA, 19 nt, Artificial Sequence
  Description of Artificial Sequence: Synthetic oligonucleotide
  Antisense strand to SEQ ID NO: 1955826
aacaaaccuagaauucaua

SEQ ID NO: 1955828 - RNA, 19 nt, Artificial Sequence
  Description of Artificial Sequence: Synthetic oligonucleotide
  Sense strand starting at position 3836 of SEQ ID NO: 1880283
ugguauugguucuuaugau

SEQ ID NO: 1955829 - RNA, 19 nt, Artificial Sequence
  Description of Artificial Sequence: Synthetic oligonucleotide
  Antisense strand to SEQ ID NO: 1955828
aucauaagaaccaauacca

SEQ ID NO: 1955830 - RNA, 19 nt, Artificial Sequence
  Description of Artificial Sequence: Synthetic oligonucleotide
  Sense strand starting at position 3842 of SEQ ID NO: 1880283
ugguucuuaugaucauaga

SEQ ID NO: 1955831 - RNA, 19 nt, Artificial Sequence
  Description of Artificial Sequence: Synthetic oligonucleotide
  Antisense strand to SEQ ID NO: 1955830
ucuaugaucauaagaacca

SEQ ID NO: 1955832 - RNA, 19 nt, Artificial Sequence
  Description of Artificial Sequence: Synthetic oligonucleotide
  Sense strand starting at position 3974 of SEQ ID NO: 1880283
ugcuguuguaaaugagaug

SEQ ID NO: 1955833 - RNA, 19 nt, Artificial Sequence
  Description of Artificial Sequence: Synthetic oligonucleotide
  Antisense strand to SEQ ID NO: 1955832
caucucauuuacaacagca

SEQ ID NO: 1955834 - RNA, 19 nt, Artificial Sequence
  Description of Artificial Sequence: Synthetic oligonucleotide
  Sense strand starting at position 3979 of SEQ ID NO: 1880283
uuguaaaugagauggcuuu

SEQ ID NO: 1955835 - RNA, 19 nt, Artificial Sequence
  Description of Artificial Sequence: Synthetic oligonucleotide
  Antisense strand to SEQ ID NO: 1955834
aaagccaucucauuuacaa

SEQ ID NO: 1955836 - RNA, 19 nt, Artificial Sequence
  Description of Artificial Sequence: Synthetic oligonucleotide
  Sense strand starting at position 1504 of SEQ ID NO: 1880284
aggcuugaacacugauaua

SEQ ID NO: 1955837 - RNA, 19 nt, Artificial Sequence
  Description of Artificial Sequence: Synthetic oligonucleotide
  Antisense strand to SEQ ID NO: 1955836
uauaucaguguucaagccu

SEQ ID NO: 1955838 - RNA, 19 nt, Artificial Sequence
  Description of Artificial Sequence: Synthetic oligonucleotide
  Sense strand starting at position 1573 of SEQ ID NO: 1880284
ggcguaauggccuguaauc

SEQ ID NO: 1955839 - RNA, 19 nt, Artificial Sequence
  Description of Artificial Sequence: Synthetic oligonucleotide
  Antisense strand to SEQ ID NO: 1955838
gauuacaggccauuacgcc

SEQ ID NO: 1955840 - RNA, 19 nt, Artificial Sequence
  Description of Artificial Sequence: Synthetic oligonucleotide
  Sense strand starting at position 2009 of SEQ ID NO: 1880284
ccaauuaugcugugaccau

SEQ ID NO: 1955841 - RNA, 19 nt, Artificial Sequence
  Description of Artificial Sequence: Synthetic oligonucleotide
  Antisense strand to SEQ ID NO: 1955840
auggucacagcauaauugg

SEQ ID NO: 1955842 - RNA, 19 nt, Artificial Sequence
  Description of Artificial Sequence: Synthetic oligonucleotide
  Sense strand starting at position 2013 of SEQ ID NO: 1880284
uuaugcugugaccauuaaa

SEQ ID NO: 1955843 - RNA, 19 nt, Artificial Sequence
  Description of Artificial Sequence: Synthetic oligonucleotide
  Antisense strand to SEQ ID NO: 1955842
uuuaauggucacagcauaa

SEQ ID NO: 1955844 - RNA, 19 nt, Artificial Sequence
  Description of Artificial Sequence: Synthetic oligonucleotide
  Sense strand starting at position 2016 of SEQ ID NO: 1880284
ugcugugaccauuaaagau

SEQ ID NO: 1955845 - RNA, 19 nt, Artificial Sequence
  Description of Artificial Sequence: Synthetic oligonucleotide
  Antisense strand to SEQ ID NO: 1955844
aucuuuaauggucacagca

SEQ ID NO: 1955846 - RNA, 19 nt, Artificial Sequence
  Description of Artificial Sequence: Synthetic oligonucleotide
  Sense strand starting at position 2075 of SEQ ID NO: 1880284
ucaugcuggucagaucaga

SEQ ID NO: 1955847 - RNA, 19 nt, Artificial Sequence
  Description of Artificial Sequence: Synthetic oligonucleotide
  Antisense strand to SEQ ID NO: 1955846
ucugaucugaccagcauga

SEQ ID NO: 1955848 - RNA, 19 nt, Artificial Sequence
  Description of Artificial Sequence: Synthetic oligonucleotide
  Sense strand starting at position 2183 of SEQ ID NO: 1880284
ugcugagggaucuggaaau

SEQ ID NO: 1955849 - RNA, 19 nt, Artificial Sequence
  Description of Artificial Sequence: Synthetic oligonucleotide
  Antisense strand to SEQ ID NO: 1955848
auuuccagaucccucagca

SEQ ID NO: 1955850 - RNA, 19 nt, Artificial Sequence
  Description of Artificial Sequence: Synthetic oligonucleotide
  Sense strand starting at position 2195 of SEQ ID NO: 1880284
uggaaauaugaacgcaaga

SEQ ID NO: 1955851 - RNA, 19 nt, Artificial Sequence
  Description of Artificial Sequence: Synthetic oligonucleotide
  Antisense strand to SEQ ID NO: 1955850
ucuugcguucauauuucca

SEQ ID NO: 1955852 - RNA, 19 nt, Artificial Sequence
  Description of Artificial Sequence: Synthetic oligonucleotide
  Sense strand starting at position 2280 of SEQ ID NO: 1880284
cuaggauagugcucacuuu

SEQ ID NO: 1955853 - RNA, 19 nt, Artificial Sequence
  Description of Artificial Sequence: Synthetic oligonucleotide
  Antisense strand to SEQ ID NO: 1955852
aaagugagcacuauccuag

SEQ ID NO: 1955854 - RNA, 19 nt, Artificial Sequence
  Description of Artificial Sequence: Synthetic oligonucleotide
  Sense strand starting at position 2310 of SEQ ID NO: 1880284
uacaaauggugcuaagaca

SEQ ID NO: 1955855 - RNA, 19 nt, Artificial Sequence
  Description of Artificial Sequence: Synthetic oligonucleotide
  Antisense strand to SEQ ID NO: 1955854
ugucuuagcaccauuugua

SEQ ID NO: 1955856 - RNA, 19 nt, Artificial Sequence
  Description of Artificial Sequence: Synthetic oligonucleotide
  Sense strand starting at position 2485 of SEQ ID NO: 1880284
gaaacuuuguaugaaucag

SEQ ID NO: 1955857 - RNA, 19 nt, Artificial Sequence
  Description of Artificial Sequence: Synthetic oligonucleotide
  Antisense strand to SEQ ID NO: 1955856
cugauucauacaaaguuuc

SEQ ID NO: 1955858 - RNA, 19 nt, Artificial Sequence
  Description of Artificial Sequence: Synthetic oligonucleotide
  Sense strand starting at position 2496 of SEQ ID NO: 1880284
ugaaucaggccaugaaauc

SEQ ID NO: 1955859 - RNA, 19 nt, Artificial Sequence
  Description of Artificial Sequence: Synthetic oligonucleotide
  Antisense strand to SEQ ID NO: 1955858
gauuucauggccugauuca

SEQ ID NO: 1955860 - RNA, 19 nt, Artificial Sequence
  Description of Artificial Sequence: Synthetic oligonucleotide
  Sense strand starting at position 2505 of SEQ ID NO: 1880284
ccaugaaauccuugcauga

SEQ ID NO: 1955861 - RNA, 19 nt, Artificial Sequence
  Description of Artificial Sequence: Synthetic oligonucleotide
  Antisense strand to SEQ ID NO: 1955860
ucaugcaaggauuucaugg

SEQ ID NO: 1955862 - RNA, 19 nt, Artificial Sequence
  Description of Artificial Sequence: Synthetic oligonucleotide
  Sense strand starting at position 2507 of SEQ ID NO: 1880284
augaaauccuugcaugaua

SEQ ID NO: 1955863 - RNA, 19 nt, Artificial Sequence
  Description of Artificial Sequence: Synthetic oligonucleotide
  Antisense strand to SEQ ID NO: 1955862
uaucaugcaaggauuucau

SEQ ID NO: 1955864 - RNA, 19 nt, Artificial Sequence
  Description of Artificial Sequence: Synthetic oligonucleotide
  Sense strand starting at position 2515 of SEQ ID NO: 1880284
cuugcaugauagcuauauc

SEQ ID NO: 1955865 - RNA, 19 nt, Artificial Sequence
  Description of Artificial Sequence: Synthetic oligonucleotide
  Antisense strand to SEQ ID NO: 1955864
gauauagcuaucaugcaag

SEQ ID NO: 1955866 - RNA, 19 nt, Artificial Sequence
  Description of Artificial Sequence: Synthetic oligonucleotide
  Sense strand starting at position 2568 of SEQ ID NO: 1880284
gccaguuacugaguacuaa

SEQ ID NO: 1955867 - RNA, 19 nt, Artificial Sequence
  Description of Artificial Sequence: Synthetic oligonucleotide
  Antisense strand to SEQ ID NO: 1955866
uuaguacucaguaacuggc

SEQ ID NO: 1955868 - RNA, 19 nt, Artificial Sequence
  Description of Artificial Sequence: Synthetic oligonucleotide
  Sense strand starting at position 2569 of SEQ ID NO: 1880284
ccaguuacugaguacuaac

SEQ ID NO: 1955869 - RNA, 19 nt, Artificial Sequence
  Description of Artificial Sequence: Synthetic oligonucleotide
  Antisense strand to SEQ ID NO: 1955868
guuaguacucaguaacugg

SEQ ID NO: 1955870 - RNA, 19 nt, Artificial Sequence
  Description of Artificial Sequence: Synthetic oligonucleotide
  Sense strand starting at position 2654 of SEQ ID NO: 1880284
uacgauaggcauuauuaua

SEQ ID NO: 1955871 - RNA, 19 nt, Artificial Sequence
  Description of Artificial Sequence: Synthetic oligonucleotide
  Antisense strand to SEQ ID NO: 1955870
uauaauaaugccuaucgua

SEQ ID NO: 1955872 - RNA, 19 nt, Artificial Sequence
  Description of Artificial Sequence: Synthetic oligonucleotide
  Sense strand starting at position 2814 of SEQ ID NO: 1880284
acccuaacacugugugaaa

SEQ ID NO: 1955873 - RNA, 19 nt, Artificial Sequence
  Description of Artificial Sequence: Synthetic oligonucleotide
  Antisense strand to SEQ ID NO: 1955872
uuucacacaguguuagggu

SEQ ID NO: 1955874 - RNA, 19 nt, Artificial Sequence
  Description of Artificial Sequence: Synthetic oligonucleotide
  Sense strand starting at position 2816 of SEQ ID NO: 1880284
ccuaacacugugugaaaca

SEQ ID NO: 1955875 - RNA, 19 nt, Artificial Sequence
  Description of Artificial Sequence: Synthetic oligonucleotide
  Antisense strand to SEQ ID NO: 1955874
uguuucacacaguguuagg

SEQ ID NO: 1955876 - RNA, 19 nt, Artificial Sequence
  Description of Artificial Sequence: Synthetic oligonucleotide
  Sense strand starting at position 2825 of SEQ ID NO: 1880284
gugugaaacaccuaguucu

SEQ ID NO: 1955877 - RNA, 19 nt, Artificial Sequence
  Description of Artificial Sequence: Synthetic oligonucleotide
  Antisense strand to SEQ ID NO: 1955876
agaacuagguguuucacac

SEQ ID NO: 1955878 - RNA, 19 nt, Artificial Sequence
  Description of Artificial Sequence: Synthetic oligonucleotide
  Sense strand starting at position 2855 of SEQ ID NO: 1880284
guaucauauugauuccauc

SEQ ID NO: 1955879 - RNA, 19 nt, Artificial Sequence
  Description of Artificial Sequence: Synthetic oligonucleotide
  Antisense strand to SEQ ID NO: 1955878
gauggaaucaauaugauac

SEQ ID NO: 1955880 - RNA, 19 nt, Artificial Sequence
  Description of Artificial Sequence: Synthetic oligonucleotide
  Sense strand starting at position 2863 of SEQ ID NO: 1880284
uugauuccaucuuagaguu

SEQ ID NO: 1955881 - RNA, 19 nt, Artificial Sequence
  Description of Artificial Sequence: Synthetic oligonucleotide
  Antisense strand to SEQ ID NO: 1955880
aacucuaagauggaaucaa

SEQ ID NO: 1955882 - RNA, 19 nt, Artificial Sequence
  Description of Artificial Sequence: Synthetic oligonucleotide
  Sense strand starting at position 2937 of SEQ ID NO: 1880284
agauaugacugggaaagga

SEQ ID NO: 1955883 - RNA, 19 nt, Artificial Sequence
  Description of Artificial Sequence: Synthetic oligonucleotide
  Antisense strand to SEQ ID NO: 1955882
uccuuucccagucauaucu

SEQ ID NO: 1955884 - RNA, 19 nt, Artificial Sequence
  Description of Artificial Sequence: Synthetic oligonucleotide
  Sense strand starting at position 2974 of SEQ ID NO: 1880284
aguauuugguaauguucua

SEQ ID NO: 1955885 - RNA, 19 nt, Artificial Sequence
  Description of Artificial Sequence: Synthetic oligonucleotide
  Antisense strand to SEQ ID NO: 1955884
uagaacauuaccaaauacu

SEQ ID NO: 1955886 - RNA, 19 nt, Artificial Sequence
  Description of Artificial Sequence: Synthetic oligonucleotide
  Sense strand starting at position 2992 of SEQ ID NO: 1880284
auuucucaagcucgauagu

SEQ ID NO: 1955887 - RNA, 19 nt, Artificial Sequence
  Description of Artificial Sequence: Synthetic oligonucleotide
  Antisense strand to SEQ ID NO: 1955886
acuaucgagcuugagaaau

SEQ ID NO: 1955888 - RNA, 19 nt, Artificial Sequence
  Description of Artificial Sequence: Synthetic oligonucleotide
  Sense strand starting at position 2993 of SEQ ID NO: 1880284
uuucucaagcucgauagua

SEQ ID NO: 1955889 - RNA, 19 nt, Artificial Sequence
  Description of Artificial Sequence: Synthetic oligonucleotide
  Antisense strand to SEQ ID NO: 1955888
uacuaucgagcuugagaaa

SEQ ID NO: 1955890 - RNA, 19 nt, Artificial Sequence
  Description of Artificial Sequence: Synthetic oligonucleotide
  Sense strand starting at position 2995 of SEQ ID NO: 1880284
ucucaagcucgauaguaaa

SEQ ID NO: 1955891 - RNA, 19 nt, Artificial Sequence
  Description of Artificial Sequence: Synthetic oligonucleotide
  Antisense strand to SEQ ID NO: 1955890
uuuacuaucgagcuugaga

SEQ ID NO: 1955892 - RNA, 19 nt, Artificial Sequence
  Description of Artificial Sequence: Synthetic oligonucleotide
  Sense strand starting at position 2998 of SEQ ID NO: 1880284
caagcucgauaguaaauau

SEQ ID NO: 1955893 - RNA, 19 nt, Artificial Sequence
  Description of Artificial Sequence: Synthetic oligonucleotide
  Antisense strand to SEQ ID NO: 1955892
auauuuacuaucgagcuug

SEQ ID NO: 1955894 - RNA, 19 nt, Artificial Sequence
  Description of Artificial Sequence: Synthetic oligonucleotide
  Sense strand starting at position 3139 of SEQ ID NO: 1880284
aagcuauuauagcugugua

SEQ ID NO: 1955895 - RNA, 19 nt, Artificial Sequence
  Description of Artificial Sequence: Synthetic oligonucleotide
  Antisense strand to SEQ ID NO: 1955894
uacacagcuauaauagcuu

SEQ ID NO: 1955896 - RNA, 19 nt, Artificial Sequence
  Description of Artificial Sequence: Synthetic oligonucleotide
  Sense strand starting at position 3142 of SEQ ID NO: 1880284
cuauuauagcuguguacuc

SEQ ID NO: 1955897 - RNA, 19 nt, Artificial Sequence
  Description of Artificial Sequence: Synthetic oligonucleotide
  Antisense strand to SEQ ID NO: 1955896
gaguacacagcuauaauag

SEQ ID NO: 1955898 - RNA, 19 nt, Artificial Sequence
  Description of Artificial Sequence: Synthetic oligonucleotide
  Sense strand starting at position 3144 of SEQ ID NO: 1880284
auuauagcuguguacucaa

SEQ ID NO: 1955899 - RNA, 19 nt, Artificial Sequence
  Description of Artificial Sequence: Synthetic oligonucleotide
  Antisense strand to SEQ ID NO: 1955898
uugaguacacagcuauaau

SEQ ID NO: 1955900 - RNA, 19 nt, Artificial Sequence
  Description of Artificial Sequence: Synthetic oligonucleotide
  Sense strand starting at position 3147 of SEQ ID NO: 1880284
auagcuguguacucaagua

SEQ ID NO: 1955901 - RNA, 19 nt, Artificial Sequence
  Description of Artificial Sequence: Synthetic oligonucleotide
  Antisense strand to SEQ ID NO: 1955900
uacuugaguacacagcuau

SEQ ID NO: 1955902 - RNA, 19 nt, Artificial Sequence
  Description of Artificial Sequence: Synthetic oligonucleotide
  Sense strand starting at position 3234 of SEQ ID NO: 1880284
uuagucuucucuguucuua

SEQ ID NO: 1955903 - RNA, 19 nt, Artificial Sequence
  Description of Artificial Sequence: Synthetic oligonucleotide
  Antisense strand to SEQ ID NO: 1955902
uaagaacagagaagacuaa

SEQ ID NO: 1955904 - RNA, 19 nt, Artificial Sequence
  Description of Artificial Sequence: Synthetic oligonucleotide
  Sense strand starting at position 3347 of SEQ ID NO: 1880284
ucuagacuguaagaaucua

SEQ ID NO: 1955905 - RNA, 19 nt, Artificial Sequence
  Description of Artificial Sequence: Synthetic oligonucleotide
  Antisense strand to SEQ ID NO: 1955904
uagauucuuacagucuaga

SEQ ID NO: 1955906 - RNA, 19 nt, Artificial Sequence
  Description of Artificial Sequence: Synthetic oligonucleotide
  Sense strand starting at position 3592 of SEQ ID NO: 1880284
aggauuccuugagucuaag

SEQ ID NO: 1955907 - RNA, 19 nt, Artificial Sequence
  Description of Artificial Sequence: Synthetic oligonucleotide
  Antisense strand to SEQ ID NO: 1955906
cuuagacucaaggaauccu

SEQ ID NO: 1955908 - RNA, 19 nt, Artificial Sequence
  Description of Artificial Sequence: Synthetic oligonucleotide
  Sense strand starting at position 3595 of SEQ ID NO: 1880284
auuccuugagucuaagagu

SEQ ID NO: 1955909 - RNA, 19 nt, Artificial Sequence
  Description of Artificial Sequence: Synthetic oligonucleotide
  Antisense strand to SEQ ID NO: 1955908
acucuuagacucaaggaau

SEQ ID NO: 1955910 - RNA, 19 nt, Artificial Sequence
  Description of Artificial Sequence: Synthetic oligonucleotide
  Sense strand starting at position 3725 of SEQ ID NO: 1880284
ucaacugaugcccaaguaa

SEQ ID NO: 1955911 - RNA, 19 nt, Artificial Sequence
  Description of Artificial Sequence: Synthetic oligonucleotide
  Antisense strand to SEQ ID NO: 1955910
uuacuugggcaucaguuga

SEQ ID NO: 1955912 - RNA, 19 nt, Artificial Sequence
  Description of Artificial Sequence: Synthetic oligonucleotide
  Sense strand starting at position 3954 of SEQ ID NO: 1880284
gcauacacuugagauaaua

SEQ ID NO: 1955913 - RNA, 19 nt, Artificial Sequence
  Description of Artificial Sequence: Synthetic oligonucleotide
  Antisense strand to SEQ ID NO: 1955912
uauuaucucaaguguaugc

SEQ ID NO: 1955914 - RNA, 19 nt, Artificial Sequence
  Description of Artificial Sequence: Synthetic oligonucleotide
  Sense strand starting at position 3983 of SEQ ID NO: 1880284
gugauaauuugucaacaau

SEQ ID NO: 1955915 - RNA, 19 nt, Artificial Sequence
  Description of Artificial Sequence: Synthetic oligonucleotide
  Antisense strand to SEQ ID NO: 1955914
auuguugacaaauuaucac

SEQ ID NO: 1955916 - RNA, 19 nt, Artificial Sequence
  Description of Artificial Sequence: Synthetic oligonucleotide
  Sense strand starting at position 777 of SEQ ID NO: 1880285
gacccaucagugugaccau

SEQ ID NO: 1955917 - RNA, 19 nt, Artificial Sequence
  Description of Artificial Sequence: Synthetic oligonucleotide
  Antisense strand to SEQ ID NO: 1955916
auggucacacugauggguc

SEQ ID NO: 1955918 - RNA, 19 nt, Artificial Sequence
  Description of Artificial Sequence: Synthetic oligonucleotide
  Sense strand starting at position 2059 of SEQ ID NO: 1880285
acaguaaauccugggagca

SEQ ID NO: 1955919 - RNA, 19 nt, Artificial Sequence
  Description of Artificial Sequence: Synthetic oligonucleotide
  Antisense strand to SEQ ID NO: 1955918
ugcucccaggauuuacugu

SEQ ID NO: 1955920 - RNA, 19 nt, Artificial Sequence
  Description of Artificial Sequence: Synthetic oligonucleotide
  Sense strand starting at position 2060 of SEQ ID NO: 1880285
caguaaauccugggagcaa

SEQ ID NO: 1955921 - RNA, 19 nt, Artificial Sequence
  Description of Artificial Sequence: Synthetic oligonucleotide
  Antisense strand to SEQ ID NO: 1955920
uugcucccaggauuuacug

SEQ ID NO: 1955922 - RNA, 19 nt, Artificial Sequence
  Description of Artificial Sequence: Synthetic oligonucleotide
  Sense strand starting at position 2061 of SEQ ID NO: 1880285
aguaaauccugggagcaag

SEQ ID NO: 1955923 - RNA, 19 nt, Artificial Sequence
  Description of Artificial Sequence: Synthetic oligonucleotide
  Antisense strand to SEQ ID NO: 1955922
cuugcucccaggauuuacu

SEQ ID NO: 1955924 - RNA, 19 nt, Artificial Sequence
  Description of Artificial Sequence: Synthetic oligonucleotide
  Sense strand starting at position 2075 of SEQ ID NO: 1880285
gcaagagacgccugaaugu

SEQ ID NO: 1955925 - RNA, 19 nt, Artificial Sequence
  Description of Artificial Sequence: Synthetic oligonucleotide
  Antisense strand to SEQ ID NO: 1955924
acauucaggcgucucuugc

SEQ ID NO: 1955926 - RNA, 19 nt, Artificial Sequence
  Description of Artificial Sequence: Synthetic oligonucleotide
  Sense strand starting at position 2196 of SEQ ID NO: 1880285
ccggcagguuucugacuga

SEQ ID NO: 1955927 - RNA, 19 nt, Artificial Sequence
  Description of Artificial Sequence: Synthetic oligonucleotide
  Antisense strand to SEQ ID NO: 1955926
ucagucagaaaccugccgg

SEQ ID NO: 1955928 - RNA, 19 nt, Artificial Sequence
  Description of Artificial Sequence: Synthetic oligonucleotide
  Sense strand starting at position 2199 of SEQ ID NO: 1880285
gcagguuucugacugaaua

SEQ ID NO: 1955929 - RNA, 19 nt, Artificial Sequence
  Description of Artificial Sequence: Synthetic oligonucleotide
  Antisense strand to SEQ ID NO: 1955928
uauucagucagaaaccugc

SEQ ID NO: 1955930 - RNA, 19 nt, Artificial Sequence
  Description of Artificial Sequence: Synthetic oligonucleotide
  Sense strand starting at position 2200 of SEQ ID NO: 1880285
cagguuucugacugaauau

SEQ ID NO: 1955931 - RNA, 19 nt, Artificial Sequence
  Description of Artificial Sequence: Synthetic oligonucleotide
  Antisense strand to SEQ ID NO: 1955930
auauucagucagaaaccug

SEQ ID NO: 1955932 - RNA, 19 nt, Artificial Sequence
  Description of Artificial Sequence: Synthetic oligonucleotide
  Sense strand starting at position 2209 of SEQ ID NO: 1880285
gacugaauauugguuagac

SEQ ID NO: 1955933 - RNA, 19 nt, Artificial Sequence
  Description of Artificial Sequence: Synthetic oligonucleotide
  Antisense strand to SEQ ID NO: 1955932
gucuaaccaauauucaguc

SEQ ID NO: 1955934 - RNA, 19 nt, Artificial Sequence
  Description of Artificial Sequence: Synthetic oligonucleotide
  Sense strand starting at position 2210 of SEQ ID NO: 1880285
acugaauauugguuagacu

SEQ ID NO: 1955935 - RNA, 19 nt, Artificial Sequence
  Description of Artificial Sequence: Synthetic oligonucleotide
  Antisense strand to SEQ ID NO: 1955934
agucuaaccaauauucagu

SEQ ID NO: 1955936 - RNA, 19 nt, Artificial Sequence
  Description of Artificial Sequence: Synthetic oligonucleotide
  Sense strand starting at position 2219 of SEQ ID NO: 1880285
ugguuagacucacacuaga

SEQ ID NO: 1955937 - RNA, 19 nt, Artificial Sequence
  Description of Artificial Sequence: Synthetic oligonucleotide
  Antisense strand to SEQ ID NO: 1955936
ucuagugugagucuaacca

SEQ ID NO: 1955938 - RNA, 19 nt, Artificial Sequence
  Description of Artificial Sequence: Synthetic oligonucleotide
  Sense strand starting at position 2275 of SEQ ID NO: 1880285
uuugauuccuaggccaacu

SEQ ID NO: 1955939 - RNA, 19 nt, Artificial Sequence
  Description of Artificial Sequence: Synthetic oligonucleotide
  Antisense strand to SEQ ID NO: 1955938
aguuggccuaggaaucaaa

SEQ ID NO: 1955940 - RNA, 19 nt, Artificial Sequence
  Description of Artificial Sequence: Synthetic oligonucleotide
  Sense strand starting at position 2294 of SEQ ID NO: 1880285
ccugcuugacacugaaaug

SEQ ID NO: 1955941 - RNA, 19 nt, Artificial Sequence
  Description of Artificial Sequence: Synthetic oligonucleotide
  Antisense strand to SEQ ID NO: 1955940
cauuucagugucaagcagg

SEQ ID NO: 1955942 - RNA, 19 nt, Artificial Sequence
  Description of Artificial Sequence: Synthetic oligonucleotide
  Sense strand starting at position 2304 of SEQ ID NO: 1880285
acugaaauguugcgagaac

SEQ ID NO: 1955943 - RNA, 19 nt, Artificial Sequence
  Description of Artificial Sequence: Synthetic oligonucleotide
  Antisense strand to SEQ ID NO: 1955942
guucucgcaacauuucagu

SEQ ID NO: 1955944 - RNA, 19 nt, Artificial Sequence
  Description of Artificial Sequence: Synthetic oligonucleotide
  Sense strand starting at position 2305 of SEQ ID NO: 1880285
cugaaauguugcgagaaca

SEQ ID NO: 1955945 - RNA, 19 nt, Artificial Sequence
  Description of Artificial Sequence: Synthetic oligonucleotide
  Antisense strand to SEQ ID NO: 1955944
uguucucgcaacauuucag

SEQ ID NO: 1955946 - RNA, 19 nt, Artificial Sequence
  Description of Artificial Sequence: Synthetic oligonucleotide
  Sense strand starting at position 2328 of SEQ ID NO: 1880285
aaagaugagccauggacuu

SEQ ID NO: 1955947 - RNA, 19 nt, Artificial Sequence
  Description of Artificial Sequence: Synthetic oligonucleotide
  Antisense strand to SEQ ID NO: 1955946
aaguccauggcucaucuuu

SEQ ID NO: 1955948 - RNA, 19 nt, Artificial Sequence
  Description of Artificial Sequence: Synthetic oligonucleotide
  Sense strand starting at position 2462 of SEQ ID NO: 1880285
gcuucugguuucugcugaa

SEQ ID NO: 1955949 - RNA, 19 nt, Artificial Sequence
  Description of Artificial Sequence: Synthetic oligonucleotide
  Antisense strand to SEQ ID NO: 1955948
uucagcagaaaccagaagc

SEQ ID NO: 1955950 - RNA, 19 nt, Artificial Sequence
  Description of Artificial Sequence: Synthetic oligonucleotide
  Sense strand starting at position 2465 of SEQ ID NO: 1880285
ucugguuucugcugaagaa

SEQ ID NO: 1955951 - RNA, 19 nt, Artificial Sequence
  Description of Artificial Sequence: Synthetic oligonucleotide
  Antisense strand to SEQ ID NO: 1955950
uucuucagcagaaaccaga

SEQ ID NO: 1955952 - RNA, 19 nt, Artificial Sequence
  Description of Artificial Sequence: Synthetic oligonucleotide
  Sense strand starting at position 2466 of SEQ ID NO: 1880285
cugguuucugcugaagaag

SEQ ID NO: 1955953 - RNA, 19 nt, Artificial Sequence
  Description of Artificial Sequence: Synthetic oligonucleotide
  Antisense strand to SEQ ID NO: 1955952
cuucuucagcagaaaccag

SEQ ID NO: 1955954 - RNA, 19 nt, Artificial Sequence
  Description of Artificial Sequence: Synthetic oligonucleotide
  Sense strand starting at position 3186 of SEQ ID NO: 1880285
cagcguggcugaucaucaa

SEQ ID NO: 1955955 - RNA, 19 nt, Artificial Sequence
  Description of Artificial Sequence: Synthetic oligonucleotide
  Antisense strand to SEQ ID NO: 1955954
uugaugaucagccacgcug

SEQ ID NO: 1955956 - RNA, 19 nt, Artificial Sequence
  Description of Artificial Sequence: Synthetic oligonucleotide
  Sense strand starting at position 3193 of SEQ ID NO: 1880285
gcugaucaucaauagguua

SEQ ID NO: 1955957 - RNA, 19 nt, Artificial Sequence
  Description of Artificial Sequence: Synthetic oligonucleotide
  Antisense strand to SEQ ID NO: 1955956
uaaccuauugaugaucagc

SEQ ID NO: 1955958 - RNA, 19 nt, Artificial Sequence
  Description of Artificial Sequence: Synthetic oligonucleotide
  Sense strand starting at position 3198 of SEQ ID NO: 1880285
ucaucaauagguuagcuaa

SEQ ID NO: 1955959 - RNA, 19 nt, Artificial Sequence
  Description of Artificial Sequence: Synthetic oligonucleotide
  Antisense strand to SEQ ID NO: 1955958
uuagcuaaccuauugauga

SEQ ID NO: 1955960 - RNA, 19 nt, Artificial Sequence
  Description of Artificial Sequence: Synthetic oligonucleotide
  Sense strand starting at position 3208 of SEQ ID NO: 1880285
guuagcuaaucuuuggaag

SEQ ID NO: 1955961 - RNA, 19 nt, Artificial Sequence
  Description of Artificial Sequence: Synthetic oligonucleotide
  Antisense strand to SEQ ID NO: 1955960
cuuccaaagauuagcuaac

SEQ ID NO: 1955962 - RNA, 19 nt, Artificial Sequence
  Description of Artificial Sequence: Synthetic oligonucleotide
  Sense strand starting at position 3211 of SEQ ID NO: 1880285
agcuaaucuuuggaaggga

SEQ ID NO: 1955963 - RNA, 19 nt, Artificial Sequence
  Description of Artificial Sequence: Synthetic oligonucleotide
  Antisense strand to SEQ ID NO: 1955962
ucccuuccaaagauuagcu

SEQ ID NO: 1955964 - RNA, 19 nt, Artificial Sequence
  Description of Artificial Sequence: Synthetic oligonucleotide
  Sense strand starting at position 3713 of SEQ ID NO: 1880285
gagagaucuugcucuccug

SEQ ID NO: 1955965 - RNA, 19 nt, Artificial Sequence
  Description of Artificial Sequence: Synthetic oligonucleotide
  Antisense strand to SEQ ID NO: 1955964
caggagagcaagaucucuc

SEQ ID NO: 1955966 - RNA, 19 nt, Artificial Sequence
  Description of Artificial Sequence: Synthetic oligonucleotide
  Sense strand starting at position 11 of SEQ ID NO: 1880286
ccagaaagcagagguaaau

SEQ ID NO: 1955967 - RNA, 19 nt, Artificial Sequence
  Description of Artificial Sequence: Synthetic oligonucleotide
  Antisense strand to SEQ ID NO: 1955966
auuuaccucugcuuucugg

SEQ ID NO: 1955968 - RNA, 19 nt, Artificial Sequence
  Description of Artificial Sequence: Synthetic oligonucleotide
  Sense strand starting at position 22 of SEQ ID NO: 1880286
agguaaauuguauggguga

SEQ ID NO: 1955969 - RNA, 19 nt, Artificial Sequence
  Description of Artificial Sequence: Synthetic oligonucleotide
  Antisense strand to SEQ ID NO: 1955968
ucacccauacaauuuaccu

SEQ ID NO: 1955970 - RNA, 19 nt, Artificial Sequence
  Description of Artificial Sequence: Synthetic oligonucleotide
  Sense strand starting at position 24 of SEQ ID NO: 1880286
guaaauuguaugggugaua

SEQ ID NO: 1955971 - RNA, 19 nt, Artificial Sequence
  Description of Artificial Sequence: Synthetic oligonucleotide
  Antisense strand to SEQ ID NO: 1955970
uaucacccauacaauuuac

SEQ ID NO: 1955972 - RNA, 19 nt, Artificial Sequence
  Description of Artificial Sequence: Synthetic oligonucleotide
  Sense strand starting at position 42 of SEQ ID NO: 1880286
acaaucacucaguggaguu

SEQ ID NO: 1955973 - RNA, 19 nt, Artificial Sequence
  Description of Artificial Sequence: Synthetic oligonucleotide
  Antisense strand to SEQ ID NO: 1955972
aacuccacugagugauugu

SEQ ID NO: 1955974 - RNA, 19 nt, Artificial Sequence
  Description of Artificial Sequence: Synthetic oligonucleotide
  Sense strand starting at position 122 of SEQ ID NO: 1880286
gauaaacaaugucuuggua

SEQ ID NO: 1955975 - RNA, 19 nt, Artificial Sequence
  Description of Artificial Sequence: Synthetic oligonucleotide
  Antisense strand to SEQ ID NO: 1955974
uaccaagacauuguuuauc

SEQ ID NO: 1955976 - RNA, 19 nt, Artificial Sequence
  Description of Artificial Sequence: Synthetic oligonucleotide
  Sense strand starting at position 511 of SEQ ID NO: 1880286
cacccaugggagugauacu

SEQ ID NO: 1955977 - RNA, 19 nt, Artificial Sequence
  Description of Artificial Sequence: Synthetic oligonucleotide
  Antisense strand to SEQ ID NO: 1955976
aguaucacucccaugggug

SEQ ID NO: 1955978 - RNA, 19 nt, Artificial Sequence
  Description of Artificial Sequence: Synthetic oligonucleotide
  Sense strand starting at position 545 of SEQ ID NO: 1880286
ccaguaagacaaggcuauu

SEQ ID NO: 1955979 - RNA, 19 nt, Artificial Sequence
  Description of Artificial Sequence: Synthetic oligonucleotide
  Antisense strand to SEQ ID NO: 1955978
aauagccuugucuuacugg

SEQ ID NO: 1955980 - RNA, 19 nt, Artificial Sequence
  Description of Artificial Sequence: Synthetic oligonucleotide
  Sense strand starting at position 632 of SEQ ID NO: 1880286
cccuuaguugcugaaucau

SEQ ID NO: 1955981 - RNA, 19 nt, Artificial Sequence
  Description of Artificial Sequence: Synthetic oligonucleotide
  Antisense strand to SEQ ID NO: 1955980
augauucagcaacuaaggg

SEQ ID NO: 1955982 - RNA, 19 nt, Artificial Sequence
  Description of Artificial Sequence: Synthetic oligonucleotide
  Sense strand starting at position 718 of SEQ ID NO: 1880286
cuuggacaauggucaucua

SEQ ID NO: 1955983 - RNA, 19 nt, Artificial Sequence
  Description of Artificial Sequence: Synthetic oligonucleotide
  Antisense strand to SEQ ID NO: 1955982
uagaugaccauuguccaag

SEQ ID NO: 1955984 - RNA, 19 nt, Artificial Sequence
  Description of Artificial Sequence: Synthetic oligonucleotide
  Sense strand starting at position 721 of SEQ ID NO: 1880286
ggacaauggucaucuacca

SEQ ID NO: 1955985 - RNA, 19 nt, Artificial Sequence
  Description of Artificial Sequence: Synthetic oligonucleotide
  Antisense strand to SEQ ID NO: 1955984
ugguagaugaccauugucc

SEQ ID NO: 1955986 - RNA, 19 nt, Artificial Sequence
  Description of Artificial Sequence: Synthetic oligonucleotide
  Sense strand starting at position 1114 of SEQ ID NO: 1880286
auagcuucuuaagugggaa

SEQ ID NO: 1955987 - RNA, 19 nt, Artificial Sequence
  Description of Artificial Sequence: Synthetic oligonucleotide
  Antisense strand to SEQ ID NO: 1955986
uucccacuuaagaagcuau

SEQ ID NO: 1955988 - RNA, 19 nt, Artificial Sequence
  Description of Artificial Sequence: Synthetic oligonucleotide
  Sense strand starting at position 1154 of SEQ ID NO: 1880286
ggcauccuuccagaaaugu

SEQ ID NO: 1955989 - RNA, 19 nt, Artificial Sequence
  Description of Artificial Sequence: Synthetic oligonucleotide
  Antisense strand to SEQ ID NO: 1955988
acauuucuggaaggaugcc

SEQ ID NO: 1955990 - RNA, 19 nt, Artificial Sequence
  Description of Artificial Sequence: Synthetic oligonucleotide
  Sense strand starting at position 1221 of SEQ ID NO: 1880286
agagaagcauaauagauuu

SEQ ID NO: 1955991 - RNA, 19 nt, Artificial Sequence
  Description of Artificial Sequence: Synthetic oligonucleotide
  Antisense strand to SEQ ID NO: 1955990
aaaucuauuaugcuucucu

SEQ ID NO: 1955992 - RNA, 19 nt, Artificial Sequence
  Description of Artificial Sequence: Synthetic oligonucleotide
  Sense strand starting at position 1307 of SEQ ID NO: 1880286
caggauaucuaguugauau

SEQ ID NO: 1955993 - RNA, 19 nt, Artificial Sequence
  Description of Artificial Sequence: Synthetic oligonucleotide
  Antisense strand to SEQ ID NO: 1955992
auaucaacuagauauccug

SEQ ID NO: 1955994 - RNA, 19 nt, Artificial Sequence
  Description of Artificial Sequence: Synthetic oligonucleotide
  Sense strand starting at position 1325 of SEQ ID NO: 1880286
uuuccaugucaucacagau

SEQ ID NO: 1955995 - RNA, 19 nt, Artificial Sequence
  Description of Artificial Sequence: Synthetic oligonucleotide
  Antisense strand to SEQ ID NO: 1955994
aucugugaugacauggaaa

SEQ ID NO: 1955996 - RNA, 19 nt, Artificial Sequence
  Description of Artificial Sequence: Synthetic oligonucleotide
  Sense strand starting at position 1359 of SEQ ID NO: 1880286
guggcuugacaucauauag

SEQ ID NO: 1955997 - RNA, 19 nt, Artificial Sequence
  Description of Artificial Sequence: Synthetic oligonucleotide
  Antisense strand to SEQ ID NO: 1955996
cuauaugaugucaagccac

SEQ ID NO: 1955998 - RNA, 19 nt, Artificial Sequence
  Description of Artificial Sequence: Synthetic oligonucleotide
  Sense strand starting at position 1443 of SEQ ID NO: 1880286
gcacuucuaccugaugauu

SEQ ID NO: 1955999 - RNA, 19 nt, Artificial Sequence
  Description of Artificial Sequence: Synthetic oligonucleotide
  Antisense strand to SEQ ID NO: 1955998
aaucaucagguagaagugc

SEQ ID NO: 1956000 - RNA, 19 nt, Artificial Sequence
  Description of Artificial Sequence: Synthetic oligonucleotide
  Sense strand starting at position 1467 of SEQ ID NO: 1880286
ugaggcuugcccuaacaau

SEQ ID NO: 1956001 - RNA, 19 nt, Artificial Sequence
  Description of Artificial Sequence: Synthetic oligonucleotide
  Antisense strand to SEQ ID NO: 1956000
auuguuagggcaagccuca

SEQ ID NO: 1956002 - RNA, 19 nt, Artificial Sequence
  Description of Artificial Sequence: Synthetic oligonucleotide
  Sense strand starting at position 1513 of SEQ ID NO: 1880286
agagaaguuacugguuagu

SEQ ID NO: 1956003 - RNA, 19 nt, Artificial Sequence
  Description of Artificial Sequence: Synthetic oligonucleotide
  Antisense strand to SEQ ID NO: 1956002
acuaaccaguaacuucucu

SEQ ID NO: 1956004 - RNA, 19 nt, Artificial Sequence
  Description of Artificial Sequence: Synthetic oligonucleotide
  Sense strand starting at position 1515 of SEQ ID NO: 1880286
agaaguuacugguuaguau

SEQ ID NO: 1956005 - RNA, 19 nt, Artificial Sequence
  Description of Artificial Sequence: Synthetic oligonucleotide
  Antisense strand to SEQ ID NO: 1956004
auacuaaccaguaacuucu

SEQ ID NO: 1956006 - RNA, 19 nt, Artificial Sequence
  Description of Artificial Sequence: Synthetic oligonucleotide
  Sense strand starting at position 1516 of SEQ ID NO: 1880286
gaaguuacugguuaguauu

SEQ ID NO: 1956007 - RNA, 19 nt, Artificial Sequence
  Description of Artificial Sequence: Synthetic oligonucleotide
  Antisense strand to SEQ ID NO: 1956006
aauacuaaccaguaacuuc

SEQ ID NO: 1956008 - RNA, 19 nt, Artificial Sequence
  Description of Artificial Sequence: Synthetic oligonucleotide
  Sense strand starting at position 1682 of SEQ ID NO: 1880286
aucagaguuuacuuuagau

SEQ ID NO: 1956009 - RNA, 19 nt, Artificial Sequence
  Description of Artificial Sequence: Synthetic oligonucleotide
  Antisense strand to SEQ ID NO: 1956008
aucuaaaguaaacucugau

SEQ ID NO: 1956010 - RNA, 19 nt, Artificial Sequence
  Description of Artificial Sequence: Synthetic oligonucleotide
  Sense strand starting at position 1720 of SEQ ID NO: 1880286
cauuccaagugguugaaau

SEQ ID NO: 1956011 - RNA, 19 nt, Artificial Sequence
  Description of Artificial Sequence: Synthetic oligonucleotide
  Antisense strand to SEQ ID NO: 1956010
auuucaaccacuuggaaug

SEQ ID NO: 1956012 - RNA, 19 nt, Artificial Sequence
  Description of Artificial Sequence: Synthetic oligonucleotide
  Sense strand starting at position 1721 of SEQ ID NO: 1880286
auuccaagugguugaaaug

SEQ ID NO: 1956013 - RNA, 19 nt, Artificial Sequence
  Description of Artificial Sequence: Synthetic oligonucleotide
  Antisense strand to SEQ ID NO: 1956012
cauuucaaccacuuggaau

SEQ ID NO: 1956014 - RNA, 19 nt, Artificial Sequence
  Description of Artificial Sequence: Synthetic oligonucleotide
  Sense strand starting at position 1872 of SEQ ID NO: 1880286
ucaguauugcaaugaaauu

SEQ ID NO: 1956015 - RNA, 19 nt, Artificial Sequence
  Description of Artificial Sequence: Synthetic oligonucleotide
  Antisense strand to SEQ ID NO: 1956014
aauuucauugcaauacuga

SEQ ID NO: 1956016 - RNA, 19 nt, Artificial Sequence
  Description of Artificial Sequence: Synthetic oligonucleotide
  Sense strand starting at position 1938 of SEQ ID NO: 1880286
gccugaguugugagguuug

SEQ ID NO: 1956017 - RNA, 19 nt, Artificial Sequence
  Description of Artificial Sequence: Synthetic oligonucleotide
  Antisense strand to SEQ ID NO: 1956016
caaaccucacaacucaggc

SEQ ID NO: 1956018 - RNA, 19 nt, Artificial Sequence
  Description of Artificial Sequence: Synthetic oligonucleotide
  Sense strand starting at position 1973 of SEQ ID NO: 1880286
ggccaaaguuuguuuauuu

SEQ ID NO: 1956019 - RNA, 19 nt, Artificial Sequence
  Description of Artificial Sequence: Synthetic oligonucleotide
  Antisense strand to SEQ ID NO: 1956018
aaauaaacaaacuuuggcc

SEQ ID NO: 1956020 - RNA, 19 nt, Artificial Sequence
  Description of Artificial Sequence: Synthetic oligonucleotide
  Sense strand starting at position 2150 of SEQ ID NO: 1880286
uucgucaucagucauggga

SEQ ID NO: 1956021 - RNA, 19 nt, Artificial Sequence
  Description of Artificial Sequence: Synthetic oligonucleotide
  Antisense strand to SEQ ID NO: 1956020
ucccaugacugaugacgaa

SEQ ID NO: 1956022 - RNA, 19 nt, Artificial Sequence
  Description of Artificial Sequence: Synthetic oligonucleotide
  Sense strand starting at position 2153 of SEQ ID NO: 1880286
gucaucagucaugggacaa

SEQ ID NO: 1956023 - RNA, 19 nt, Artificial Sequence
  Description of Artificial Sequence: Synthetic oligonucleotide
  Antisense strand to SEQ ID NO: 1956022
uugucccaugacugaugac

SEQ ID NO: 1956024 - RNA, 19 nt, Artificial Sequence
  Description of Artificial Sequence: Synthetic oligonucleotide
  Sense strand starting at position 2231 of SEQ ID NO: 1880286
ggucuauggcaauaguuac

SEQ ID NO: 1956025 - RNA, 19 nt, Artificial Sequence
  Description of Artificial Sequence: Synthetic oligonucleotide
  Antisense strand to SEQ ID NO: 1956024
guaacuauugccauagacc

SEQ ID NO: 1956026 - RNA, 19 nt, Artificial Sequence
  Description of Artificial Sequence: Synthetic oligonucleotide
  Sense strand starting at position 2331 of SEQ ID NO: 1880286
aguuuaaggcuuugaaauc

SEQ ID NO: 1956027 - RNA, 19 nt, Artificial Sequence
  Description of Artificial Sequence: Synthetic oligonucleotide
  Antisense strand to SEQ ID NO: 1956026
gauuucaaagccuuaaacu

SEQ ID NO: 1956028 - RNA, 19 nt, Artificial Sequence
  Description of Artificial Sequence: Synthetic oligonucleotide
  Sense strand starting at position 2338 of SEQ ID NO: 1880286
ggcuuugaaaucugugaaa

SEQ ID NO: 1956029 - RNA, 19 nt, Artificial Sequence
  Description of Artificial Sequence: Synthetic oligonucleotide
  Antisense strand to SEQ ID NO: 1956028
uuucacagauuucaaagcc

SEQ ID NO: 1956030 - RNA, 19 nt, Artificial Sequence
  Description of Artificial Sequence: Synthetic oligonucleotide
  Sense strand starting at position 2340 of SEQ ID NO: 1880286
cuuugaaaucugugaaagu

SEQ ID NO: 1956031 - RNA, 19 nt, Artificial Sequence
  Description of Artificial Sequence: Synthetic oligonucleotide
  Antisense strand to SEQ ID NO: 1956030
acuuucacagauuucaaag

SEQ ID NO: 1956032 - RNA, 19 nt, Artificial Sequence
  Description of Artificial Sequence: Synthetic oligonucleotide
  Sense strand starting at position 2747 of SEQ ID NO: 1880286
ggauauaccucaguucuua

SEQ ID NO: 1956033 - RNA, 19 nt, Artificial Sequence
  Description of Artificial Sequence: Synthetic oligonucleotide
  Antisense strand to SEQ ID NO: 1956032
uaagaacugagguauaucc

SEQ ID NO: 1956034 - RNA, 19 nt, Artificial Sequence
  Description of Artificial Sequence: Synthetic oligonucleotide
  Sense strand starting at position 3472 of SEQ ID NO: 1880286
uauugagacuugccagaag

SEQ ID NO: 1956035 - RNA, 19 nt, Artificial Sequence
  Description of Artificial Sequence: Synthetic oligonucleotide
  Antisense strand to SEQ ID NO: 1956034
cuucuggcaagucucaaua

SEQ ID NO: 1956036 - RNA, 19 nt, Artificial Sequence
  Description of Artificial Sequence: Synthetic oligonucleotide
  Sense strand starting at position 3720 of SEQ ID NO: 1880286
augauagaacuuggugauu

SEQ ID NO: 1956037 - RNA, 19 nt, Artificial Sequence
  Description of Artificial Sequence: Synthetic oligonucleotide
  Antisense strand to SEQ ID NO: 1956036
aaucaccaaguucuaucau

SEQ ID NO: 1956038 - RNA, 19 nt, Artificial Sequence
  Description of Artificial Sequence: Synthetic oligonucleotide
  Sense strand starting at position 3818 of SEQ ID NO: 1880286
gccauuuauugagauagga

SEQ ID NO: 1956039 - RNA, 19 nt, Artificial Sequence
  Description of Artificial Sequence: Synthetic oligonucleotide
  Antisense strand to SEQ ID NO: 1956038
uccuaucucaauaaauggc

SEQ ID NO: 1956040 - RNA, 19 nt, Artificial Sequence
  Description of Artificial Sequence: Synthetic oligonucleotide
  Sense strand starting at position 3833 of SEQ ID NO: 1880286
aggaaaguguggagggaua

SEQ ID NO: 1956041 - RNA, 19 nt, Artificial Sequence
  Description of Artificial Sequence: Synthetic oligonucleotide
  Antisense strand to SEQ ID NO: 1956040
uaucccuccacacuuuccu

SEQ ID NO: 1956042 - RNA, 19 nt, Artificial Sequence
  Description of Artificial Sequence: Synthetic oligonucleotide
  Sense strand starting at position 3856 of SEQ ID NO: 1880286
gguucuagggagcagauua

SEQ ID NO: 1956043 - RNA, 19 nt, Artificial Sequence
  Description of Artificial Sequence: Synthetic oligonucleotide
  Antisense strand to SEQ ID NO: 1956042
uaaucugcucccuagaacc

SEQ ID NO: 1956044 - RNA, 19 nt, Artificial Sequence
  Description of Artificial Sequence: Synthetic oligonucleotide
  Sense strand starting at position 3967 of SEQ ID NO: 1880286
ggaagauucuggccuagaa

SEQ ID NO: 1956045 - RNA, 19 nt, Artificial Sequence
  Description of Artificial Sequence: Synthetic oligonucleotide
  Antisense strand to SEQ ID NO: 1956044
uucuaggccagaaucuucc

SEQ ID NO: 1956046 - RNA, 19 nt, Artificial Sequence
  Description of Artificial Sequence: Synthetic oligonucleotide
  Sense strand starting at position 18 of SEQ ID NO: 1880287
agguuaauuuaucacagac

SEQ ID NO: 1956047 - RNA, 19 nt, Artificial Sequence
  Description of Artificial Sequence: Synthetic oligonucleotide
  Antisense strand to SEQ ID NO: 1956046
gucugugauaaauuaaccu

SEQ ID NO: 1956048 - RNA, 19 nt, Artificial Sequence
  Description of Artificial Sequence: Synthetic oligonucleotide
  Sense strand starting at position 35 of SEQ ID NO: 1880287
acgcaagaguuuccauaac

SEQ ID NO: 1956049 - RNA, 19 nt, Artificial Sequence
  Description of Artificial Sequence: Synthetic oligonucleotide
  Antisense strand to SEQ ID NO: 1956048
guuauggaaacucuugcgu

SEQ ID NO: 1956050 - RNA, 19 nt, Artificial Sequence
  Description of Artificial Sequence: Synthetic oligonucleotide
  Sense strand starting at position 96 of SEQ ID NO: 1880287
cugacaaagcagugaguaa

SEQ ID NO: 1956051 - RNA, 19 nt, Artificial Sequence
  Description of Artificial Sequence: Synthetic oligonucleotide
  Antisense strand to SEQ ID NO: 1956050
uuacucacugcuuugucag

SEQ ID NO: 1956052 - RNA, 19 nt, Artificial Sequence
  Description of Artificial Sequence: Synthetic oligonucleotide
  Sense strand starting at position 262 of SEQ ID NO: 1880287
augaauugaugcuuaacau

SEQ ID NO: 1956053 - RNA, 19 nt, Artificial Sequence
  Description of Artificial Sequence: Synthetic oligonucleotide
  Antisense strand to SEQ ID NO: 1956052
auguuaagcaucaauucau

SEQ ID NO: 1956054 - RNA, 19 nt, Artificial Sequence
  Description of Artificial Sequence: Synthetic oligonucleotide
  Sense strand starting at position 263 of SEQ ID NO: 1880287
ugaauugaugcuuaacauc

SEQ ID NO: 1956055 - RNA, 19 nt, Artificial Sequence
  Description of Artificial Sequence: Synthetic oligonucleotide
  Antisense strand to SEQ ID NO: 1956054
gauguuaagcaucaauuca

SEQ ID NO: 1956056 - RNA, 19 nt, Artificial Sequence
  Description of Artificial Sequence: Synthetic oligonucleotide
  Sense strand starting at position 369 of SEQ ID NO: 1880287
acaaguguuggcgaugaug

SEQ ID NO: 1956057 - RNA, 19 nt, Artificial Sequence
  Description of Artificial Sequence: Synthetic oligonucleotide
  Antisense strand to SEQ ID NO: 1956056
caucaucgccaacacuugu

SEQ ID NO: 1956058 - RNA, 19 nt, Artificial Sequence
  Description of Artificial Sequence: Synthetic oligonucleotide
  Sense strand starting at position 443 of SEQ ID NO: 1880287
auggaaaucaguugguuag

SEQ ID NO: 1956059 - RNA, 19 nt, Artificial Sequence
  Description of Artificial Sequence: Synthetic oligonucleotide
  Antisense strand to SEQ ID NO: 1956058
cuaaccaacugauuuccau

SEQ ID NO: 1956060 - RNA, 19 nt, Artificial Sequence
  Description of Artificial Sequence: Synthetic oligonucleotide
  Sense strand starting at position 444 of SEQ ID NO: 1880287
uggaaaucaguugguuagu

SEQ ID NO: 1956061 - RNA, 19 nt, Artificial Sequence
  Description of Artificial Sequence: Synthetic oligonucleotide
  Antisense strand to SEQ ID NO: 1956060
acuaaccaacugauuucca

SEQ ID NO: 1956062 - RNA, 19 nt, Artificial Sequence
  Description of Artificial Sequence: Synthetic oligonucleotide
  Sense strand starting at position 482 of SEQ ID NO: 1880287
agaauuauuguaugaccca

SEQ ID NO: 1956063 - RNA, 19 nt, Artificial Sequence
  Description of Artificial Sequence: Synthetic oligonucleotide
  Antisense strand to SEQ ID NO: 1956062
ugggucauacaauaauucu

SEQ ID NO: 1956064 - RNA, 19 nt, Artificial Sequence
  Description of Artificial Sequence: Synthetic oligonucleotide
  Sense strand starting at position 661 of SEQ ID NO: 1880287
gugguauauacagguacau

SEQ ID NO: 1956065 - RNA, 19 nt, Artificial Sequence
  Description of Artificial Sequence: Synthetic oligonucleotide
  Antisense strand to SEQ ID NO: 1956064
auguaccuguauauaccac

SEQ ID NO: 1956066 - RNA, 19 nt, Artificial Sequence
  Description of Artificial Sequence: Synthetic oligonucleotide
  Sense strand starting at position 738 of SEQ ID NO: 1880287
aaacauugcgcugagucaa

SEQ ID NO: 1956067 - RNA, 19 nt, Artificial Sequence
  Description of Artificial Sequence: Synthetic oligonucleotide
  Antisense strand to SEQ ID NO: 1956066
uugacucagcgcaauguuu

SEQ ID NO: 1956068 - RNA, 19 nt, Artificial Sequence
  Description of Artificial Sequence: Synthetic oligonucleotide
  Sense strand starting at position 757 of SEQ ID NO: 1880287
agaagccauucgcuaaaga

SEQ ID NO: 1956069 - RNA, 19 nt, Artificial Sequence
  Description of Artificial Sequence: Synthetic oligonucleotide
  Antisense strand to SEQ ID NO: 1956068
ucuuuagcgaauggcuucu

SEQ ID NO: 1956070 - RNA, 19 nt, Artificial Sequence
  Description of Artificial Sequence: Synthetic oligonucleotide
  Sense strand starting at position 758 of SEQ ID NO: 1880287
gaagccauucgcuaaagac

SEQ ID NO: 1956071 - RNA, 19 nt, Artificial Sequence
  Description of Artificial Sequence: Synthetic oligonucleotide
  Antisense strand to SEQ ID NO: 1956070
gucuuuagcgaauggcuuc

SEQ ID NO: 1956072 - RNA, 19 nt, Artificial Sequence
  Description of Artificial Sequence: Synthetic oligonucleotide
  Sense strand starting at position 876 of SEQ ID NO: 1880287
ccaacucagccaugagcaa

SEQ ID NO: 1956073 - RNA, 19 nt, Artificial Sequence
  Description of Artificial Sequence: Synthetic oligonucleotide
  Antisense strand to SEQ ID NO: 1956072
uugcucauggcugaguugg

SEQ ID NO: 1956074 - RNA, 19 nt, Artificial Sequence
  Description of Artificial Sequence: Synthetic oligonucleotide
  Sense strand starting at position 1016 of SEQ ID NO: 1880287
gccauuuccucuccgauaa

SEQ ID NO: 1956075 - RNA, 19 nt, Artificial Sequence
  Description of Artificial Sequence: Synthetic oligonucleotide
  Antisense strand to SEQ ID NO: 1956074
uuaucggagaggaaauggc

SEQ ID NO: 1956076 - RNA, 19 nt, Artificial Sequence
  Description of Artificial Sequence: Synthetic oligonucleotide
  Sense strand starting at position 1315 of SEQ ID NO: 1880287
gucacaguccuucgaaauu

SEQ ID NO: 1956077 - RNA, 19 nt, Artificial Sequence
  Description of Artificial Sequence: Synthetic oligonucleotide
  Antisense strand to SEQ ID NO: 1956076
aauuucgaaggacugugac

SEQ ID NO: 1956078 - RNA, 19 nt, Artificial Sequence
  Description of Artificial Sequence: Synthetic oligonucleotide
  Sense strand starting at position 1762 of SEQ ID NO: 1880287
uuugcaaugcuaggaggau

SEQ ID NO: 1956079 - RNA, 19 nt, Artificial Sequence
  Description of Artificial Sequence: Synthetic oligonucleotide
  Antisense strand to SEQ ID NO: 1956078
auccuccuagcauugcaaa

SEQ ID NO: 1956080 - RNA, 19 nt, Artificial Sequence
  Description of Artificial Sequence: Synthetic oligonucleotide
  Sense strand starting at position 2153 of SEQ ID NO: 1880287
ggucccuaaggguggaaau

SEQ ID NO: 1956081 - RNA, 19 nt, Artificial Sequence
  Description of Artificial Sequence: Synthetic oligonucleotide
  Antisense strand to SEQ ID NO: 1956080
auuuccacccuuagggacc

SEQ ID NO: 1956082 - RNA, 19 nt, Artificial Sequence
  Description of Artificial Sequence: Synthetic oligonucleotide
  Sense strand starting at position 2154 of SEQ ID NO: 1880287
gucccuaaggguggaaaua

SEQ ID NO: 1956083 - RNA, 19 nt, Artificial Sequence
  Description of Artificial Sequence: Synthetic oligonucleotide
  Antisense strand to SEQ ID NO: 1956082
uauuuccacccuuagggac

SEQ ID NO: 1956084 - RNA, 19 nt, Artificial Sequence
  Description of Artificial Sequence: Synthetic oligonucleotide
  Sense strand starting at position 2355 of SEQ ID NO: 1880287
caggaugugcucggaggaa

SEQ ID NO: 1956085 - RNA, 19 nt, Artificial Sequence
  Description of Artificial Sequence: Synthetic oligonucleotide
  Antisense strand to SEQ ID NO: 1956084
uuccuccgagcacauccug

SEQ ID NO: 1956086 - RNA, 19 nt, Artificial Sequence
  Description of Artificial Sequence: Synthetic oligonucleotide
  Sense strand starting at position 2454 of SEQ ID NO: 1880287
ggcguucucaguucucgga

SEQ ID NO: 1956087 - RNA, 19 nt, Artificial Sequence
  Description of Artificial Sequence: Synthetic oligonucleotide
  Antisense strand to SEQ ID NO: 1956086
uccgagaacugagaacgcc

SEQ ID NO: 1956088 - RNA, 19 nt, Artificial Sequence
  Description of Artificial Sequence: Synthetic oligonucleotide
  Sense strand starting at position 2597 of SEQ ID NO: 1880287
ucuggauuguccuucugaa

SEQ ID NO: 1956089 - RNA, 19 nt, Artificial Sequence
  Description of Artificial Sequence: Synthetic oligonucleotide
  Antisense strand to SEQ ID NO: 1956088
uucagaaggacaauccaga

SEQ ID NO: 1956090 - RNA, 19 nt, Artificial Sequence
  Description of Artificial Sequence: Synthetic oligonucleotide
  Sense strand starting at position 2751 of SEQ ID NO: 1880287
ggguucuggcccagugagu

SEQ ID NO: 1956091 - RNA, 19 nt, Artificial Sequence
  Description of Artificial Sequence: Synthetic oligonucleotide
  Antisense strand to SEQ ID NO: 1956090
acucacugggccagaaccc

SEQ ID NO: 1956092 - RNA, 19 nt, Artificial Sequence
  Description of Artificial Sequence: Synthetic oligonucleotide
  Sense strand starting at position 2796 of SEQ ID NO: 1880287
ggccguucagagcacuaaa

SEQ ID NO: 1956093 - RNA, 19 nt, Artificial Sequence
  Description of Artificial Sequence: Synthetic oligonucleotide
  Antisense strand to SEQ ID NO: 1956092
uuuagugcucugaacggcc

SEQ ID NO: 1956094 - RNA, 19 nt, Artificial Sequence
  Description of Artificial Sequence: Synthetic oligonucleotide
  Sense strand starting at position 2807 of SEQ ID NO: 1880287
gcacuaaagucauuacuga

SEQ ID NO: 1956095 - RNA, 19 nt, Artificial Sequence
  Description of Artificial Sequence: Synthetic oligonucleotide
  Antisense strand to SEQ ID NO: 1956094
ucaguaaugacuuuagugc

SEQ ID NO: 1956096 - RNA, 19 nt, Artificial Sequence
  Description of Artificial Sequence: Synthetic oligonucleotide
  Sense strand starting at position 2815 of SEQ ID NO: 1880287
gucauuacugauggaucua

SEQ ID NO: 1956097 - RNA, 19 nt, Artificial Sequence
  Description of Artificial Sequence: Synthetic oligonucleotide
  Antisense strand to SEQ ID NO: 1956096
uagauccaucaguaaugac

SEQ ID NO: 1956098 - RNA, 19 nt, Artificial Sequence
  Description of Artificial Sequence: Synthetic oligonucleotide
  Sense strand starting at position 2845 of SEQ ID NO: 1880287
ucccucugagaauggaauu

SEQ ID NO: 1956099 - RNA, 19 nt, Artificial Sequence
  Description of Artificial Sequence: Synthetic oligonucleotide
  Antisense strand to SEQ ID NO: 1956098
aauuccauucucagaggga

SEQ ID NO: 1956100 - RNA, 19 nt, Artificial Sequence
  Description of Artificial Sequence: Synthetic oligonucleotide
  Sense strand starting at position 2855 of SEQ ID NO: 1880287
aauggaauuccuggguuac

SEQ ID NO: 1956101 - RNA, 19 nt, Artificial Sequence
  Description of Artificial Sequence: Synthetic oligonucleotide
  Antisense strand to SEQ ID NO: 1956100
guaacccaggaauuccauu

SEQ ID NO: 1956102 - RNA, 19 nt, Artificial Sequence
  Description of Artificial Sequence: Synthetic oligonucleotide
  Sense strand starting at position 2993 of SEQ ID NO: 1880287
gugugucucagccaggaga

SEQ ID NO: 1956103 - RNA, 19 nt, Artificial Sequence
  Description of Artificial Sequence: Synthetic oligonucleotide
  Antisense strand to SEQ ID NO: 1956102
ucuccuggcugagacacac

SEQ ID NO: 1956104 - RNA, 19 nt, Artificial Sequence
  Description of Artificial Sequence: Synthetic oligonucleotide
  Sense strand starting at position 3105 of SEQ ID NO: 1880287
cacugugugcucgugagca

SEQ ID NO: 1956105 - RNA, 19 nt, Artificial Sequence
  Description of Artificial Sequence: Synthetic oligonucleotide
  Antisense strand to SEQ ID NO: 1956104
ugcucacgagcacacagug

SEQ ID NO: 1956106 - RNA, 19 nt, Artificial Sequence
  Description of Artificial Sequence: Synthetic oligonucleotide
  Sense strand starting at position 3259 of SEQ ID NO: 1880287
cucuuuccucauggguaaa

SEQ ID NO: 1956107 - RNA, 19 nt, Artificial Sequence
  Description of Artificial Sequence: Synthetic oligonucleotide
  Antisense strand to SEQ ID NO: 1956106
uuuacccaugaggaaagag

SEQ ID NO: 1956108 - RNA, 19 nt, Artificial Sequence
  Description of Artificial Sequence: Synthetic oligonucleotide
  Sense strand starting at position 3261 of SEQ ID NO: 1880287
cuuuccucauggguaaagu

SEQ ID NO: 1956109 - RNA, 19 nt, Artificial Sequence
  Description of Artificial Sequence: Synthetic oligonucleotide
  Antisense strand to SEQ ID NO: 1956108
acuuuacccaugaggaaag

SEQ ID NO: 1956110 - RNA, 19 nt, Artificial Sequence
  Description of Artificial Sequence: Synthetic oligonucleotide
  Sense strand starting at position 3262 of SEQ ID NO: 1880287
uuuccucauggguaaagua

SEQ ID NO: 1956111 - RNA, 19 nt, Artificial Sequence
  Description of Artificial Sequence: Synthetic oligonucleotide
  Antisense strand to SEQ ID NO: 1956110
uacuuuacccaugaggaaa

SEQ ID NO: 1956112 - RNA, 19 nt, Artificial Sequence
  Description of Artificial Sequence: Synthetic oligonucleotide
  Sense strand starting at position 3305 of SEQ ID NO: 1880287
aggauuuggugaggaucaa

SEQ ID NO: 1956113 - RNA, 19 nt, Artificial Sequence
  Description of Artificial Sequence: Synthetic oligonucleotide
  Antisense strand to SEQ ID NO: 1956112
uugauccucaccaaauccu

SEQ ID NO: 1956114 - RNA, 19 nt, Artificial Sequence
  Description of Artificial Sequence: Synthetic oligonucleotide
  Sense strand starting at position 3365 of SEQ ID NO: 1880287
cuggcauuauugguucuua

SEQ ID NO: 1956115 - RNA, 19 nt, Artificial Sequence
  Description of Artificial Sequence: Synthetic oligonucleotide
  Antisense strand to SEQ ID NO: 1956114
uaagaaccaauaaugccag

SEQ ID NO: 1956116 - RNA, 19 nt, Artificial Sequence
  Description of Artificial Sequence: Synthetic oligonucleotide
  Sense strand starting at position 3366 of SEQ ID NO: 1880287
uggcauuauugguucuuau

SEQ ID NO: 1956117 - RNA, 19 nt, Artificial Sequence
  Description of Artificial Sequence: Synthetic oligonucleotide
  Antisense strand to SEQ ID NO: 1956116
auaagaaccaauaaugcca

SEQ ID NO: 1956118 - RNA, 19 nt, Artificial Sequence
  Description of Artificial Sequence: Synthetic oligonucleotide
  Sense strand starting at position 3755 of SEQ ID NO: 1880287
ucucgauauccugagccca

SEQ ID NO: 1956119 - RNA, 19 nt, Artificial Sequence
  Description of Artificial Sequence: Synthetic oligonucleotide
  Antisense strand to SEQ ID NO: 1956118
ugggcucaggauaucgaga

SEQ ID NO: 1956120 - RNA, 19 nt, Artificial Sequence
  Description of Artificial Sequence: Synthetic oligonucleotide
  Sense strand starting at position 3871 of SEQ ID NO: 1880287
aagagugguccaggagcga

SEQ ID NO: 1956121 - RNA, 19 nt, Artificial Sequence
  Description of Artificial Sequence: Synthetic oligonucleotide
  Antisense strand to SEQ ID NO: 1956120
ucgcuccuggaccacucuu

SEQ ID NO: 1956122 - RNA, 19 nt, Artificial Sequence
  Description of Artificial Sequence: Synthetic oligonucleotide
  Sense strand starting at position 3872 of SEQ ID NO: 1880287
agagugguccaggagcgaa

SEQ ID NO: 1956123 - RNA, 19 nt, Artificial Sequence
  Description of Artificial Sequence: Synthetic oligonucleotide
  Antisense strand to SEQ ID NO: 1956122
uucgcuccuggaccacucu

SEQ ID NO: 1956124 - RNA, 19 nt, Artificial Sequence
  Description of Artificial Sequence: Synthetic oligonucleotide
  Sense strand starting at position 3980 of SEQ ID NO: 1880287
acaugaggugcucaguaag

SEQ ID NO: 1956125 - RNA, 19 nt, Artificial Sequence
  Description of Artificial Sequence: Synthetic oligonucleotide
  Antisense strand to SEQ ID NO: 1956124
cuuacugagcaccucaugu

SEQ ID NO: 1956126 - RNA, 19 nt, Artificial Sequence
  Description of Artificial Sequence: Synthetic oligonucleotide
  Sense strand starting at position 1 of SEQ ID NO: 1880288
ucagguuacgcuugaucca

SEQ ID NO: 1956127 - RNA, 19 nt, Artificial Sequence
  Description of Artificial Sequence: Synthetic oligonucleotide
  Antisense strand to SEQ ID NO: 1956126
uggaucaagcguaaccuga

SEQ ID NO: 1956128 - RNA, 19 nt, Artificial Sequence
  Description of Artificial Sequence: Synthetic oligonucleotide
  Sense strand starting at position 2 of SEQ ID NO: 1880288
cagguuacgcuugauccau

SEQ ID NO: 1956129 - RNA, 19 nt, Artificial Sequence
  Description of Artificial Sequence: Synthetic oligonucleotide
  Antisense strand to SEQ ID NO: 1956128
auggaucaagcguaaccug

SEQ ID NO: 1956130 - RNA, 19 nt, Artificial Sequence
  Description of Artificial Sequence: Synthetic oligonucleotide
  Sense strand starting at position 4 of SEQ ID NO: 1880288
gguuacgcuugauccauaa

SEQ ID NO: 1956131 - RNA, 19 nt, Artificial Sequence
  Description of Artificial Sequence: Synthetic oligonucleotide
  Antisense strand to SEQ ID NO: 1956130
uuauggaucaagcguaacc

SEQ ID NO: 1956132 - RNA, 19 nt, Artificial Sequence
  Description of Artificial Sequence: Synthetic oligonucleotide
  Sense strand starting at position 8 of SEQ ID NO: 1880288
acgcuugauccauaaauag

SEQ ID NO: 1956133 - RNA, 19 nt, Artificial Sequence
  Description of Artificial Sequence: Synthetic oligonucleotide
  Antisense strand to SEQ ID NO: 1956132
cuauuuauggaucaagcgu

SEQ ID NO: 1956134 - RNA, 19 nt, Artificial Sequence
  Description of Artificial Sequence: Synthetic oligonucleotide
  Sense strand starting at position 161 of SEQ ID NO: 1880288
uccagcuuuguuugcauaa

SEQ ID NO: 1956135 - RNA, 19 nt, Artificial Sequence
  Description of Artificial Sequence: Synthetic oligonucleotide
  Antisense strand to SEQ ID NO: 1956134
uuaugcaaacaaagcugga

SEQ ID NO: 1956136 - RNA, 19 nt, Artificial Sequence
  Description of Artificial Sequence: Synthetic oligonucleotide
  Sense strand starting at position 162 of SEQ ID NO: 1880288
ccagcuuuguuugcauaaa

SEQ ID NO: 1956137 - RNA, 19 nt, Artificial Sequence
  Description of Artificial Sequence: Synthetic oligonucleotide
  Antisense strand to SEQ ID NO: 1956136
uuuaugcaaacaaagcugg

SEQ ID NO: 1956138 - RNA, 19 nt, Artificial Sequence
  Description of Artificial Sequence: Synthetic oligonucleotide
  Sense strand starting at position 264 of SEQ ID NO: 1880288
uuuacuucugaggaggcua

SEQ ID NO: 1956139 - RNA, 19 nt, Artificial Sequence
  Description of Artificial Sequence: Synthetic oligonucleotide
  Antisense strand to SEQ ID NO: 1956138
uagccuccucagaaguaaa

SEQ ID NO: 1956140 - RNA, 19 nt, Artificial Sequence
  Description of Artificial Sequence: Synthetic oligonucleotide
  Sense strand starting at position 534 of SEQ ID NO: 1880288
accauaguauguguaugua

SEQ ID NO: 1956141 - RNA, 19 nt, Artificial Sequence
  Description of Artificial Sequence: Synthetic oligonucleotide
  Antisense strand to SEQ ID NO: 1956140
uacauacacauacuauggu

SEQ ID NO: 1956142 - RNA, 19 nt, Artificial Sequence
  Description of Artificial Sequence: Synthetic oligonucleotide
  Sense strand starting at position 573 of SEQ ID NO: 1880288
ccucgcuagcuauaacaaa

SEQ ID NO: 1956143 - RNA, 19 nt, Artificial Sequence
  Description of Artificial Sequence: Synthetic oligonucleotide
  Antisense strand to SEQ ID NO: 1956142
uuuguuauagcuagcgagg

SEQ ID NO: 1956144 - RNA, 19 nt, Artificial Sequence
  Description of Artificial Sequence: Synthetic oligonucleotide
  Sense strand starting at position 736 of SEQ ID NO: 1880288
gugcaugucucuuuauuuc

SEQ ID NO: 1956145 - RNA, 19 nt, Artificial Sequence
  Description of Artificial Sequence: Synthetic oligonucleotide
  Antisense strand to SEQ ID NO: 1956144
gaaauaaagagacaugcac

SEQ ID NO: 1956146 - RNA, 19 nt, Artificial Sequence
  Description of Artificial Sequence: Synthetic oligonucleotide
  Sense strand starting at position 744 of SEQ ID NO: 1880288
cucuuuauuuccuaagggu

SEQ ID NO: 1956147 - RNA, 19 nt, Artificial Sequence
  Description of Artificial Sequence: Synthetic oligonucleotide
  Antisense strand to SEQ ID NO: 1956146
acccuuaggaaauaaagag

SEQ ID NO: 1956148 - RNA, 19 nt, Artificial Sequence
  Description of Artificial Sequence: Synthetic oligonucleotide
  Sense strand starting at position 1073 of SEQ ID NO: 1880288
ucaucucauguguauauau

SEQ ID NO: 1956149 - RNA, 19 nt, Artificial Sequence
  Description of Artificial Sequence: Synthetic oligonucleotide
  Antisense strand to SEQ ID NO: 1956148
auauauacacaugagauga

SEQ ID NO: 1956150 - RNA, 19 nt, Artificial Sequence
  Description of Artificial Sequence: Synthetic oligonucleotide
  Sense strand starting at position 1582 of SEQ ID NO: 1880288
ugaaauaacucacgguauu

SEQ ID NO: 1956151 - RNA, 19 nt, Artificial Sequence
  Description of Artificial Sequence: Synthetic oligonucleotide
  Antisense strand to SEQ ID NO: 1956150
aauaccgugaguuauuuca

SEQ ID NO: 1956152 - RNA, 19 nt, Artificial Sequence
  Description of Artificial Sequence: Synthetic oligonucleotide
  Sense strand starting at position 1609 of SEQ ID NO: 1880288
gggaacgaguucucucauu

SEQ ID NO: 1956153 - RNA, 19 nt, Artificial Sequence
  Description of Artificial Sequence: Synthetic oligonucleotide
  Antisense strand to SEQ ID NO: 1956152
aaugagagaacucguuccc

SEQ ID NO: 1956154 - RNA, 19 nt, Artificial Sequence
  Description of Artificial Sequence: Synthetic oligonucleotide
  Sense strand starting at position 1614 of SEQ ID NO: 1880288
cgaguucucucauuaggca

SEQ ID NO: 1956155 - RNA, 19 nt, Artificial Sequence
  Description of Artificial Sequence: Synthetic oligonucleotide
  Antisense strand to SEQ ID NO: 1956154
ugccuaaugagagaacucg

SEQ ID NO: 1956156 - RNA, 19 nt, Artificial Sequence
  Description of Artificial Sequence: Synthetic oligonucleotide
  Sense strand starting at position 1733 of SEQ ID NO: 1880288
cugcuccagccagagaauu

SEQ ID NO: 1956157 - RNA, 19 nt, Artificial Sequence
  Description of Artificial Sequence: Synthetic oligonucleotide
  Antisense strand to SEQ ID NO: 1956156
aauucucuggcuggagcag

SEQ ID NO: 1956158 - RNA, 19 nt, Artificial Sequence
  Description of Artificial Sequence: Synthetic oligonucleotide
  Sense strand starting at position 1741 of SEQ ID NO: 1880288
gccagagaauuaugaggga

SEQ ID NO: 1956159 - RNA, 19 nt, Artificial Sequence
  Description of Artificial Sequence: Synthetic oligonucleotide
  Antisense strand to SEQ ID NO: 1956158
ucccucauaauucucuggc

SEQ ID NO: 1956160 - RNA, 19 nt, Artificial Sequence
  Description of Artificial Sequence: Synthetic oligonucleotide
  Sense strand starting at position 1977 of SEQ ID NO: 1880288
cccuguggaucuucugcaa

SEQ ID NO: 1956161 - RNA, 19 nt, Artificial Sequence
  Description of Artificial Sequence: Synthetic oligonucleotide
  Antisense strand to SEQ ID NO: 1956160
uugcagaagauccacaggg

SEQ ID NO: 1956162 - RNA, 19 nt, Artificial Sequence
  Description of Artificial Sequence: Synthetic oligonucleotide
  Sense strand starting at position 1980 of SEQ ID NO: 1880288
uguggaucuucugcaauuc

SEQ ID NO: 1956163 - RNA, 19 nt, Artificial Sequence
  Description of Artificial Sequence: Synthetic oligonucleotide
  Antisense strand to SEQ ID NO: 1956162
gaauugcagaagauccaca

SEQ ID NO: 1956164 - RNA, 19 nt, Artificial Sequence
  Description of Artificial Sequence: Synthetic oligonucleotide
  Sense strand starting at position 2082 of SEQ ID NO: 1880288
cgaauaacuucauggcggu

SEQ ID NO: 1956165 - RNA, 19 nt, Artificial Sequence
  Description of Artificial Sequence: Synthetic oligonucleotide
  Antisense strand to SEQ ID NO: 1956164
accgccaugaaguuauucg

SEQ ID NO: 1956166 - RNA, 19 nt, Artificial Sequence
  Description of Artificial Sequence: Synthetic oligonucleotide
  Sense strand starting at position 2565 of SEQ ID NO: 1880288
cgcuccuccucggaagaga

SEQ ID NO: 1956167 - RNA, 19 nt, Artificial Sequence
  Description of Artificial Sequence: Synthetic oligonucleotide
  Antisense strand to SEQ ID NO: 1956166
ucucuuccgaggaggagcg

SEQ ID NO: 1956168 - RNA, 19 nt, Artificial Sequence
  Description of Artificial Sequence: Synthetic oligonucleotide
  Sense strand starting at position 2624 of SEQ ID NO: 1880288
cgcggauugucuggcugaa

SEQ ID NO: 1956169 - RNA, 19 nt, Artificial Sequence
  Description of Artificial Sequence: Synthetic oligonucleotide
  Antisense strand to SEQ ID NO: 1956168
uucagccagacaauccgcg

SEQ ID NO: 1956170 - RNA, 19 nt, Artificial Sequence
  Description of Artificial Sequence: Synthetic oligonucleotide
  Sense strand starting at position 2664 of SEQ ID NO: 1880288
gucuguguggcuaguguaa

SEQ ID NO: 1956171 - RNA, 19 nt, Artificial Sequence
  Description of Artificial Sequence: Synthetic oligonucleotide
  Antisense strand to SEQ ID NO: 1956170
uuacacuagccacacagac

SEQ ID NO: 1956172 - RNA, 19 nt, Artificial Sequence
  Description of Artificial Sequence: Synthetic oligonucleotide
  Sense strand starting at position 2762 of SEQ ID NO: 1880288
gcgguuugcaacugcagau

SEQ ID NO: 1956173 - RNA, 19 nt, Artificial Sequence
  Description of Artificial Sequence: Synthetic oligonucleotide
  Antisense strand to SEQ ID NO: 1956172
aucugcaguugcaaaccgc

SEQ ID NO: 1956174 - RNA, 19 nt, Artificial Sequence
  Description of Artificial Sequence: Synthetic oligonucleotide
  Sense strand starting at position 3499 of SEQ ID NO: 1880288
gguugaguucuccauggaa

SEQ ID NO: 1956175 - RNA, 19 nt, Artificial Sequence
  Description of Artificial Sequence: Synthetic oligonucleotide
  Antisense strand to SEQ ID NO: 1956174
uuccauggagaacucaacc

SEQ ID NO: 1956176 - RNA, 19 nt, Artificial Sequence
  Description of Artificial Sequence: Synthetic oligonucleotide
  Sense strand starting at position 3501 of SEQ ID NO: 1880288
uugaguucuccauggaaac

SEQ ID NO: 1956177 - RNA, 19 nt, Artificial Sequence
  Description of Artificial Sequence: Synthetic oligonucleotide
  Antisense strand to SEQ ID NO: 1956176
guuuccauggagaacucaa

SEQ ID NO: 1956178 - RNA, 19 nt, Artificial Sequence
  Description of Artificial Sequence: Synthetic oligonucleotide
  Sense strand starting at position 3502 of SEQ ID NO: 1880288
ugaguucuccauggaaacu

SEQ ID NO: 1956179 - RNA, 19 nt, Artificial Sequence
  Description of Artificial Sequence: Synthetic oligonucleotide
  Antisense strand to SEQ ID NO: 1956178
aguuuccauggagaacuca

SEQ ID NO: 1956180 - RNA, 19 nt, Artificial Sequence
  Description of Artificial Sequence: Synthetic oligonucleotide
  Sense strand starting at position 3613 of SEQ ID NO: 1880288
cugcuacuuggguagaagu

SEQ ID NO: 1956181 - RNA, 19 nt, Artificial Sequence
  Description of Artificial Sequence: Synthetic oligonucleotide
  Antisense strand to SEQ ID NO: 1956180
acuucuacccaaguagcag

SEQ ID NO: 1956182 - RNA, 19 nt, Artificial Sequence
  Description of Artificial Sequence: Synthetic oligonucleotide
  Sense strand starting at position 35 of SEQ ID NO: 1880289
uaguauaaccugugagcau

SEQ ID NO: 1956183 - RNA, 19 nt, Artificial Sequence
  Description of Artificial Sequence: Synthetic oligonucleotide
  Antisense strand to SEQ ID NO: 1956182
augcucacagguuauacua

SEQ ID NO: 1956184 - RNA, 19 nt, Artificial Sequence
  Description of Artificial Sequence: Synthetic oligonucleotide
  Sense strand starting at position 36 of SEQ ID NO: 1880289
aguauaaccugugagcauu

SEQ ID NO: 1956185 - RNA, 19 nt, Artificial Sequence
  Description of Artificial Sequence: Synthetic oligonucleotide
  Antisense strand to SEQ ID NO: 1956184
aaugcucacagguuauacu

SEQ ID NO: 1956186 - RNA, 19 nt, Artificial Sequence
  Description of Artificial Sequence: Synthetic oligonucleotide
  Sense strand starting at position 42 of SEQ ID NO: 1880289
accugugagcauuaucaag

SEQ ID NO: 1956187 - RNA, 19 nt, Artificial Sequence
  Description of Artificial Sequence: Synthetic oligonucleotide
  Antisense strand to SEQ ID NO: 1956186
cuugauaaugcucacaggu

SEQ ID NO: 1956188 - RNA, 19 nt, Artificial Sequence
  Description of Artificial Sequence: Synthetic oligonucleotide
  Sense strand starting at position 44 of SEQ ID NO: 1880289
cugugagcauuaucaaguu

SEQ ID NO: 1956189 - RNA, 19 nt, Artificial Sequence
  Description of Artificial Sequence: Synthetic oligonucleotide
  Antisense strand to SEQ ID NO: 1956188
aacuugauaaugcucacag

SEQ ID NO: 1956190 - RNA, 19 nt, Artificial Sequence
  Description of Artificial Sequence: Synthetic oligonucleotide
  Sense strand starting at position 298 of SEQ ID NO: 1880289
cgacauccugccuggcuaa

SEQ ID NO: 1956191 - RNA, 19 nt, Artificial Sequence
  Description of Artificial Sequence: Synthetic oligonucleotide
  Antisense strand to SEQ ID NO: 1956190
uuagccaggcaggaugucg

SEQ ID NO: 1956192 - RNA, 19 nt, Artificial Sequence
  Description of Artificial Sequence: Synthetic oligonucleotide
  Sense strand starting at position 405 of SEQ ID NO: 1880289
gcccgaagugcugggacua

SEQ ID NO: 1956193 - RNA, 19 nt, Artificial Sequence
  Description of Artificial Sequence: Synthetic oligonucleotide
  Antisense strand to SEQ ID NO: 1956192
uagucccagcacuucgggc

SEQ ID NO: 1956194 - RNA, 19 nt, Artificial Sequence
  Description of Artificial Sequence: Synthetic oligonucleotide
  Sense strand starting at position 1279 of SEQ ID NO: 1880289
ggagaaagcagcuaaaguu

SEQ ID NO: 1956195 - RNA, 19 nt, Artificial Sequence
  Description of Artificial Sequence: Synthetic oligonucleotide
  Antisense strand to SEQ ID NO: 1956194
aacuuuagcugcuuucucc

SEQ ID NO: 1956196 - RNA, 19 nt, Artificial Sequence
  Description of Artificial Sequence: Synthetic oligonucleotide
  Sense strand starting at position 1899 of SEQ ID NO: 1880289
caaccucucccgggagaaa

SEQ ID NO: 1956197 - RNA, 19 nt, Artificial Sequence
  Description of Artificial Sequence: Synthetic oligonucleotide
  Antisense strand to SEQ ID NO: 1956196
uuucucccgggagagguug

SEQ ID NO: 1956198 - RNA, 19 nt, Artificial Sequence
  Description of Artificial Sequence: Synthetic oligonucleotide
  Sense strand starting at position 2290 of SEQ ID NO: 1880289
gggacccaucccugacuua

SEQ ID NO: 1956199 - RNA, 19 nt, Artificial Sequence
  Description of Artificial Sequence: Synthetic oligonucleotide
  Antisense strand to SEQ ID NO: 1956198
uaagucagggauggguccc

SEQ ID NO: 1956200 - RNA, 19 nt, Artificial Sequence
  Description of Artificial Sequence: Synthetic oligonucleotide
  Sense strand starting at position 3603 of SEQ ID NO: 1880289
augaaagacuucuagucac

SEQ ID NO: 1956201 - RNA, 19 nt, Artificial Sequence
  Description of Artificial Sequence: Synthetic oligonucleotide
  Antisense strand to SEQ ID NO: 1956200
gugacuagaagucuuucau

SEQ ID NO: 1956202 - RNA, 19 nt, Artificial Sequence
  Description of Artificial Sequence: Synthetic oligonucleotide
  Sense strand starting at position 3648 of SEQ ID NO: 1880289
acacaucuagcuugaagaa

SEQ ID NO: 1956203 - RNA, 19 nt, Artificial Sequence
  Description of Artificial Sequence: Synthetic oligonucleotide
  Antisense strand to SEQ ID NO: 1956202
uucuucaagcuagaugugu

SEQ ID NO: 1956204 - RNA, 19 nt, Artificial Sequence
  Description of Artificial Sequence: Synthetic oligonucleotide
  Sense strand starting at position 3679 of SEQ ID NO: 1880289
gagcccucugauuauguga

SEQ ID NO: 1956205 - RNA, 19 nt, Artificial Sequence
  Description of Artificial Sequence: Synthetic oligonucleotide
  Antisense strand to SEQ ID NO: 1956204
ucacauaaucagagggcuc

SEQ ID NO: 1956206 - RNA, 19 nt, Artificial Sequence
  Description of Artificial Sequence: Synthetic oligonucleotide
  Sense strand starting at position 3681 of SEQ ID NO: 1880289
gcccucugauuaugugaua

SEQ ID NO: 1956207 - RNA, 19 nt, Artificial Sequence
  Description of Artificial Sequence: Synthetic oligonucleotide
  Antisense strand to SEQ ID NO: 1956206
uaucacauaaucagagggc

SEQ ID NO: 1956208 - RNA, 19 nt, Artificial Sequence
  Description of Artificial Sequence: Synthetic oligonucleotide
  Sense strand starting at position 3915 of SEQ ID NO: 1880289
ggauaucauugcuucuaga

SEQ ID NO: 1956209 - RNA, 19 nt, Artificial Sequence
  Description of Artificial Sequence: Synthetic oligonucleotide
  Antisense strand to SEQ ID NO: 1956208
ucuagaagcaaugauaucc

SEQ ID NO: 1956210 - RNA, 19 nt, Artificial Sequence
  Description of Artificial Sequence: Synthetic oligonucleotide
  Sense strand starting at position 12 of SEQ ID NO: 1880290
cacgcaucuucccugugaa

SEQ ID NO: 1956211 - RNA, 19 nt, Artificial Sequence
  Description of Artificial Sequence: Synthetic oligonucleotide
  Antisense strand to SEQ ID NO: 1956210
uucacagggaagaugcgug

SEQ ID NO: 1956212 - RNA, 19 nt, Artificial Sequence
  Description of Artificial Sequence: Synthetic oligonucleotide
  Sense strand starting at position 13 of SEQ ID NO: 1880290
acgcaucuucccugugaag

SEQ ID NO: 1956213 - RNA, 19 nt, Artificial Sequence
  Description of Artificial Sequence: Synthetic oligonucleotide
  Antisense strand to SEQ ID NO: 1956212
cuucacagggaagaugcgu

SEQ ID NO: 1956214 - RNA, 19 nt, Artificial Sequence
  Description of Artificial Sequence: Synthetic oligonucleotide
  Sense strand starting at position 2775 of SEQ ID NO: 1880290
gcgggucucaaaugcucau

SEQ ID NO: 1956215 - RNA, 19 nt, Artificial Sequence
  Description of Artificial Sequence: Synthetic oligonucleotide
  Antisense strand to SEQ ID NO: 1956214
augagcauuugagacccgc

SEQ ID NO: 1956216 - RNA, 19 nt, Artificial Sequence
  Description of Artificial Sequence: Synthetic oligonucleotide
  Sense strand starting at position 3079 of SEQ ID NO: 1880290
agcacuguauucuguuauu

SEQ ID NO: 1956217 - RNA, 19 nt, Artificial Sequence
  Description of Artificial Sequence: Synthetic oligonucleotide
  Antisense strand to SEQ ID NO: 1956216
aauaacagaauacagugcu

SEQ ID NO: 1956218 - RNA, 19 nt, Artificial Sequence
  Description of Artificial Sequence: Synthetic oligonucleotide
  Sense strand starting at position 3404 of SEQ ID NO: 1880290
gagagaggcucucagcauu

SEQ ID NO: 1956219 - RNA, 19 nt, Artificial Sequence
  Description of Artificial Sequence: Synthetic oligonucleotide
  Antisense strand to SEQ ID NO: 1956218
aaugcugagagccucucuc

SEQ ID NO: 1956220 - RNA, 19 nt, Artificial Sequence
  Description of Artificial Sequence: Synthetic oligonucleotide
  Sense strand starting at position 3565 of SEQ ID NO: 1880290
gguuucugacagugacuua

SEQ ID NO: 1956221 - RNA, 19 nt, Artificial Sequence
  Description of Artificial Sequence: Synthetic oligonucleotide
  Antisense strand to SEQ ID NO: 1956220
uaagucacugucagaaacc

SEQ ID NO: 1956222 - RNA, 19 nt, Artificial Sequence
  Description of Artificial Sequence: Synthetic oligonucleotide
  Sense strand starting at position 3792 of SEQ ID NO: 1880290
gugacucucgcuuugcaau

SEQ ID NO: 1956223 - RNA, 19 nt, Artificial Sequence
  Description of Artificial Sequence: Synthetic oligonucleotide
  Antisense strand to SEQ ID NO: 1956222
auugcaaagcgagagucac

SEQ ID NO: 1956224 - RNA, 19 nt, Artificial Sequence
  Description of Artificial Sequence: Synthetic oligonucleotide
  Sense strand starting at position 3798 of SEQ ID NO: 1880290
cucgcuuugcaauggauca

SEQ ID NO: 1956225 - RNA, 19 nt, Artificial Sequence
  Description of Artificial Sequence: Synthetic oligonucleotide
  Antisense strand to SEQ ID NO: 1956224
ugauccauugcaaagcgag

SEQ ID NO: 1956226 - RNA, 19 nt, Artificial Sequence
  Description of Artificial Sequence: Synthetic oligonucleotide
  Sense strand starting at position 70 of SEQ ID NO: 1880291
gugcauagguugcuugaau

SEQ ID NO: 1956227 - RNA, 19 nt, Artificial Sequence
  Description of Artificial Sequence: Synthetic oligonucleotide
  Antisense strand to SEQ ID NO: 1956226
auucaagcaaccuaugcac

SEQ ID NO: 1956228 - RNA, 19 nt, Artificial Sequence
  Description of Artificial Sequence: Synthetic oligonucleotide
  Sense strand starting at position 71 of SEQ ID NO: 1880291
ugcauagguugcuugaaua

SEQ ID NO: 1956229 - RNA, 19 nt, Artificial Sequence
  Description of Artificial Sequence: Synthetic oligonucleotide
  Antisense strand to SEQ ID NO: 1956228
uauucaagcaaccuaugca

SEQ ID NO: 1956230 - RNA, 19 nt, Artificial Sequence
  Description of Artificial Sequence: Synthetic oligonucleotide
  Sense strand starting at position 524 of SEQ ID NO: 1880291
ugccauuccuuguaauugu

SEQ ID NO: 1956231 - RNA, 19 nt, Artificial Sequence
  Description of Artificial Sequence: Synthetic oligonucleotide
  Antisense strand to SEQ ID NO: 1956230
acaauuacaaggaauggca

SEQ ID NO: 1956232 - RNA, 19 nt, Artificial Sequence
  Description of Artificial Sequence: Synthetic oligonucleotide
  Sense strand starting at position 651 of SEQ ID NO: 1880291
uaguaaauaccuuguggaa

SEQ ID NO: 1956233 - RNA, 19 nt, Artificial Sequence
  Description of Artificial Sequence: Synthetic oligonucleotide
  Antisense strand to SEQ ID NO: 1956232
uuccacaagguauuuacua

SEQ ID NO: 1956234 - RNA, 19 nt, Artificial Sequence
  Description of Artificial Sequence: Synthetic oligonucleotide
  Sense strand starting at position 653 of SEQ ID NO: 1880291
guaaauaccuuguggaaau

SEQ ID NO: 1956235 - RNA, 19 nt, Artificial Sequence
  Description of Artificial Sequence: Synthetic oligonucleotide
  Antisense strand to SEQ ID NO: 1956234
auuuccacaagguauuuac

SEQ ID NO: 1956236 - RNA, 19 nt, Artificial Sequence
  Description of Artificial Sequence: Synthetic oligonucleotide
  Sense strand starting at position 987 of SEQ ID NO: 1880291
uagucagggaguugauaua

SEQ ID NO: 1956237 - RNA, 19 nt, Artificial Sequence
  Description of Artificial Sequence: Synthetic oligonucleotide
  Antisense strand to SEQ ID NO: 1956236
uauaucaacucccugacua

SEQ ID NO: 1956238 - RNA, 19 nt, Artificial Sequence
  Description of Artificial Sequence: Synthetic oligonucleotide
  Sense strand starting at position 2968 of SEQ ID NO: 1880291
gugugaugggcacguguga

SEQ ID NO: 1956239 - RNA, 19 nt, Artificial Sequence
  Description of Artificial Sequence: Synthetic oligonucleotide
  Antisense strand to SEQ ID NO: 1956238
ucacacgugcccaucacac

SEQ ID NO: 1956240 - RNA, 19 nt, Artificial Sequence
  Description of Artificial Sequence: Synthetic oligonucleotide
  Sense strand starting at position 3104 of SEQ ID NO: 1880291
agagucuaucuuuauccuu

SEQ ID NO: 1956241 - RNA, 19 nt, Artificial Sequence
  Description of Artificial Sequence: Synthetic oligonucleotide
  Antisense strand to SEQ ID NO: 1956240
aaggauaaagauagacucu

SEQ ID NO: 1956242 - RNA, 19 nt, Artificial Sequence
  Description of Artificial Sequence: Synthetic oligonucleotide
  Sense strand starting at position 3479 of SEQ ID NO: 1880291
ggcagugucuggugccaga

SEQ ID NO: 1956243 - RNA, 19 nt, Artificial Sequence
  Description of Artificial Sequence: Synthetic oligonucleotide
  Antisense strand to SEQ ID NO: 1956242
ucuggcaccagacacugcc

SEQ ID NO: 1956244 - RNA, 19 nt, Artificial Sequence
  Description of Artificial Sequence: Synthetic oligonucleotide
  Sense strand starting at position 3490 of SEQ ID NO: 1880291
gugccagaguccgcaguua

SEQ ID NO: 1956245 - RNA, 19 nt, Artificial Sequence
  Description of Artificial Sequence: Synthetic oligonucleotide
  Antisense strand to SEQ ID NO: 1956244
uaacugcggacucuggcac

SEQ ID NO: 1956246 - RNA, 19 nt, Artificial Sequence
  Description of Artificial Sequence: Synthetic oligonucleotide
  Sense strand starting at position 3654 of SEQ ID NO: 1880291
cugccaaccuggcuuaaga

SEQ ID NO: 1956247 - RNA, 19 nt, Artificial Sequence
  Description of Artificial Sequence: Synthetic oligonucleotide
  Antisense strand to SEQ ID NO: 1956246
ucuuaagccagguuggcag

SEQ ID NO: 1956248 - RNA, 19 nt, Artificial Sequence
  Description of Artificial Sequence: Synthetic oligonucleotide
  Sense strand starting at position 3656 of SEQ ID NO: 1880291
gccaaccuggcuuaagagu

SEQ ID NO: 1956249 - RNA, 19 nt, Artificial Sequence
  Description of Artificial Sequence: Synthetic oligonucleotide
  Antisense strand to SEQ ID NO: 1956248
acucuuaagccagguuggc

SEQ ID NO: 1956250 - RNA, 19 nt, Artificial Sequence
  Description of Artificial Sequence: Synthetic oligonucleotide
  Sense strand starting at position 3763 of SEQ ID NO: 1880291
gggugaagccacugacaca

SEQ ID NO: 1956251 - RNA, 19 nt, Artificial Sequence
  Description of Artificial Sequence: Synthetic oligonucleotide
  Antisense strand to SEQ ID NO: 1956250
ugugucaguggcuucaccc

SEQ ID NO: 1956252 - RNA, 19 nt, Artificial Sequence
  Description of Artificial Sequence: Synthetic oligonucleotide
  Sense strand starting at position 3804 of SEQ ID NO: 1880291
ugugaauaauugcaaccau

SEQ ID NO: 1956253 - RNA, 19 nt, Artificial Sequence
  Description of Artificial Sequence: Synthetic oligonucleotide
  Antisense strand to SEQ ID NO: 1956252
augguugcaauuauucaca

SEQ ID NO: 1956254 - RNA, 19 nt, Artificial Sequence
  Description of Artificial Sequence: Synthetic oligonucleotide
  Sense strand starting at position 3813 of SEQ ID NO: 1880291
uugcaaccaugugaauaau

SEQ ID NO: 1956255 - RNA, 19 nt, Artificial Sequence
  Description of Artificial Sequence: Synthetic oligonucleotide
  Antisense strand to SEQ ID NO: 1956254
auuauucacaugguugcaa

SEQ ID NO: 1956256 - RNA, 19 nt, Artificial Sequence
  Description of Artificial Sequence: Synthetic oligonucleotide
  Sense strand starting at position 131 of SEQ ID NO: 1880292
augugugauggcuaagaau

SEQ ID NO: 1956257 - RNA, 19 nt, Artificial Sequence
  Description of Artificial Sequence: Synthetic oligonucleotide
  Antisense strand to SEQ ID NO: 1956256
auucuuagccaucacacau

SEQ ID NO: 1956258 - RNA, 19 nt, Artificial Sequence
  Description of Artificial Sequence: Synthetic oligonucleotide
  Sense strand starting at position 164 of SEQ ID NO: 1880292
ugagcuugcccagauguga

SEQ ID NO: 1956259 - RNA, 19 nt, Artificial Sequence
  Description of Artificial Sequence: Synthetic oligonucleotide
  Antisense strand to SEQ ID NO: 1956258
ucacaucugggcaagcuca

SEQ ID NO: 1956260 - RNA, 19 nt, Artificial Sequence
  Description of Artificial Sequence: Synthetic oligonucleotide
  Sense strand starting at position 177 of SEQ ID NO: 1880292
augugacucccagagucau

SEQ ID NO: 1956261 - RNA, 19 nt, Artificial Sequence
  Description of Artificial Sequence: Synthetic oligonucleotide
  Antisense strand to SEQ ID NO: 1956260
augacucugggagucacau

SEQ ID NO: 1956262 - RNA, 19 nt, Artificial Sequence
  Description of Artificial Sequence: Synthetic oligonucleotide
  Sense strand starting at position 634 of SEQ ID NO: 1880292
cacguaaagcaugauucuu

SEQ ID NO: 1956263 - RNA, 19 nt, Artificial Sequence
  Description of Artificial Sequence: Synthetic oligonucleotide
  Antisense strand to SEQ ID NO: 1956262
aagaaucaugcuuuacgug

SEQ ID NO: 1956264 - RNA, 19 nt, Artificial Sequence
  Description of Artificial Sequence: Synthetic oligonucleotide
  Sense strand starting at position 760 of SEQ ID NO: 1880292
agagcuaugcuguaucauu

SEQ ID NO: 1956265 - RNA, 19 nt, Artificial Sequence
  Description of Artificial Sequence: Synthetic oligonucleotide
  Antisense strand to SEQ ID NO: 1956264
aaugauacagcauagcucu

SEQ ID NO: 1956266 - RNA, 19 nt, Artificial Sequence
  Description of Artificial Sequence: Synthetic oligonucleotide
  Sense strand starting at position 772 of SEQ ID NO: 1880292
uaucauugcuauguagaug

SEQ ID NO: 1956267 - RNA, 19 nt, Artificial Sequence
  Description of Artificial Sequence: Synthetic oligonucleotide
  Antisense strand to SEQ ID NO: 1956266
caucuacauagcaaugaua

SEQ ID NO: 1956268 - RNA, 19 nt, Artificial Sequence
  Description of Artificial Sequence: Synthetic oligonucleotide
  Sense strand starting at position 807 of SEQ ID NO: 1880292
ccucgauugcuugaauaca

SEQ ID NO: 1956269 - RNA, 19 nt, Artificial Sequence
  Description of Artificial Sequence: Synthetic oligonucleotide
  Antisense strand to SEQ ID NO: 1956268
uguauucaagcaaucgagg

SEQ ID NO: 1956270 - RNA, 19 nt, Artificial Sequence
  Description of Artificial Sequence: Synthetic oligonucleotide
  Sense strand starting at position 815 of SEQ ID NO: 1880292
gcuugaauacaugggagau

SEQ ID NO: 1956271 - RNA, 19 nt, Artificial Sequence
  Description of Artificial Sequence: Synthetic oligonucleotide
  Antisense strand to SEQ ID NO: 1956270
aucucccauguauucaagc

SEQ ID NO: 1956272 - RNA, 19 nt, Artificial Sequence
  Description of Artificial Sequence: Synthetic oligonucleotide
  Sense strand starting at position 873 of SEQ ID NO: 1880292
ucaugucaccuugauacuu

SEQ ID NO: 1956273 - RNA, 19 nt, Artificial Sequence
  Description of Artificial Sequence: Synthetic oligonucleotide
  Antisense strand to SEQ ID NO: 1956272
aaguaucaaggugacauga

SEQ ID NO: 1956274 - RNA, 19 nt, Artificial Sequence
  Description of Artificial Sequence: Synthetic oligonucleotide
  Sense strand starting at position 913 of SEQ ID NO: 1880292
gagaauuaccuacgacuga

SEQ ID NO: 1956275 - RNA, 19 nt, Artificial Sequence
  Description of Artificial Sequence: Synthetic oligonucleotide
  Antisense strand to SEQ ID NO: 1956274
ucagucguagguaauucuc

SEQ ID NO: 1956276 - RNA, 19 nt, Artificial Sequence
  Description of Artificial Sequence: Synthetic oligonucleotide
  Sense strand starting at position 917 of SEQ ID NO: 1880292
auuaccuacgacugagaau

SEQ ID NO: 1956277 - RNA, 19 nt, Artificial Sequence
  Description of Artificial Sequence: Synthetic oligonucleotide
  Antisense strand to SEQ ID NO: 1956276
auucucagucguagguaau

SEQ ID NO: 1956278 - RNA, 19 nt, Artificial Sequence
  Description of Artificial Sequence: Synthetic oligonucleotide
  Sense strand starting at position 930 of SEQ ID NO: 1880292
gagaauuaccuacagugcu

SEQ ID NO: 1956279 - RNA, 19 nt, Artificial Sequence
  Description of Artificial Sequence: Synthetic oligonucleotide
  Antisense strand to SEQ ID NO: 1956278
agcacuguagguaauucuc

SEQ ID NO: 1956280 - RNA, 19 nt, Artificial Sequence
  Description of Artificial Sequence: Synthetic oligonucleotide
  Sense strand starting at position 1068 of SEQ ID NO: 1880292
auggaaauuugacauccca

SEQ ID NO: 1956281 - RNA, 19 nt, Artificial Sequence
  Description of Artificial Sequence: Synthetic oligonucleotide
  Antisense strand to SEQ ID NO: 1956280
ugggaugucaaauuuccau

SEQ ID NO: 1956282 - RNA, 19 nt, Artificial Sequence
  Description of Artificial Sequence: Synthetic oligonucleotide
  Sense strand starting at position 1093 of SEQ ID NO: 1880292
aaugaaagcuguuuauaga

SEQ ID NO: 1956283 - RNA, 19 nt, Artificial Sequence
  Description of Artificial Sequence: Synthetic oligonucleotide
  Antisense strand to SEQ ID NO: 1956282
ucuauaaacagcuuucauu

SEQ ID NO: 1956284 - RNA, 19 nt, Artificial Sequence
  Description of Artificial Sequence: Synthetic oligonucleotide
  Sense strand starting at position 1377 of SEQ ID NO: 1880292
gauuuacacuguggaggaa

SEQ ID NO: 1956285 - RNA, 19 nt, Artificial Sequence
  Description of Artificial Sequence: Synthetic oligonucleotide
  Antisense strand to SEQ ID NO: 1956284
uuccuccacaguguaaauc

SEQ ID NO: 1956286 - RNA, 19 nt, Artificial Sequence
  Description of Artificial Sequence: Synthetic oligonucleotide
  Sense strand starting at position 1435 of SEQ ID NO: 1880292
uaaauaguguggucagaaa

SEQ ID NO: 1956287 - RNA, 19 nt, Artificial Sequence
  Description of Artificial Sequence: Synthetic oligonucleotide
  Antisense strand to SEQ ID NO: 1956286
uuucugaccacacuauuua

SEQ ID NO: 1956288 - RNA, 19 nt, Artificial Sequence
  Description of Artificial Sequence: Synthetic oligonucleotide
  Sense strand starting at position 1500 of SEQ ID NO: 1880292
aaaggugagccaugcagau

SEQ ID NO: 1956289 - RNA, 19 nt, Artificial Sequence
  Description of Artificial Sequence: Synthetic oligonucleotide
  Antisense strand to SEQ ID NO: 1956288
aucugcauggcucaccuuu

SEQ ID NO: 1956290 - RNA, 19 nt, Artificial Sequence
  Description of Artificial Sequence: Synthetic oligonucleotide
  Sense strand starting at position 1512 of SEQ ID NO: 1880292
ugcagauaucuagggagga

SEQ ID NO: 1956291 - RNA, 19 nt, Artificial Sequence
  Description of Artificial Sequence: Synthetic oligonucleotide
  Antisense strand to SEQ ID NO: 1956290
uccucccuagauaucugca

SEQ ID NO: 1956292 - RNA, 19 nt, Artificial Sequence
  Description of Artificial Sequence: Synthetic oligonucleotide
  Sense strand starting at position 1574 of SEQ ID NO: 1880292
gcagcugguguguucacua

SEQ ID NO: 1956293 - RNA, 19 nt, Artificial Sequence
  Description of Artificial Sequence: Synthetic oligonucleotide
  Antisense strand to SEQ ID NO: 1956292
uagugaacacaccagcugc

SEQ ID NO: 1956294 - RNA, 19 nt, Artificial Sequence
  Description of Artificial Sequence: Synthetic oligonucleotide
  Sense strand starting at position 1771 of SEQ ID NO: 1880292
gagagcuacguugagagua

SEQ ID NO: 1956295 - RNA, 19 nt, Artificial Sequence
  Description of Artificial Sequence: Synthetic oligonucleotide
  Antisense strand to SEQ ID NO: 1956294
uacucucaacguagcucuc

SEQ ID NO: 1956296 - RNA, 19 nt, Artificial Sequence
  Description of Artificial Sequence: Synthetic oligonucleotide
  Sense strand starting at position 1853 of SEQ ID NO: 1880292
gugauuuggccagguggca

SEQ ID NO: 1956297 - RNA, 19 nt, Artificial Sequence
  Description of Artificial Sequence: Synthetic oligonucleotide
  Antisense strand to SEQ ID NO: 1956296
ugccaccuggccaaaucac

SEQ ID NO: 1956298 - RNA, 19 nt, Artificial Sequence
  Description of Artificial Sequence: Synthetic oligonucleotide
  Sense strand starting at position 2071 of SEQ ID NO: 1880292
acaauaauugguugguuga

SEQ ID NO: 1956299 - RNA, 19 nt, Artificial Sequence
  Description of Artificial Sequence: Synthetic oligonucleotide
  Antisense strand to SEQ ID NO: 1956298
ucaaccaaccaauuauugu

SEQ ID NO: 1956300 - RNA, 19 nt, Artificial Sequence
  Description of Artificial Sequence: Synthetic oligonucleotide
  Sense strand starting at position 2072 of SEQ ID NO: 1880292
caauaauugguugguugau

SEQ ID NO: 1956301 - RNA, 19 nt, Artificial Sequence
  Description of Artificial Sequence: Synthetic oligonucleotide
  Antisense strand to SEQ ID NO: 1956300
aucaaccaaccaauuauug

SEQ ID NO: 1956302 - RNA, 19 nt, Artificial Sequence
  Description of Artificial Sequence: Synthetic oligonucleotide
  Sense strand starting at position 2258 of SEQ ID NO: 1880292
uugagaaagucugugguca

SEQ ID NO: 1956303 - RNA, 19 nt, Artificial Sequence
  Description of Artificial Sequence: Synthetic oligonucleotide
  Antisense strand to SEQ ID NO: 1956302
ugaccacagacuuucucaa

SEQ ID NO: 1956304 - RNA, 19 nt, Artificial Sequence
  Description of Artificial Sequence: Synthetic oligonucleotide
  Sense strand starting at position 2259 of SEQ ID NO: 1880292
ugagaaagucuguggucac

SEQ ID NO: 1956305 - RNA, 19 nt, Artificial Sequence
  Description of Artificial Sequence: Synthetic oligonucleotide
  Antisense strand to SEQ ID NO: 1956304
gugaccacagacuuucuca

SEQ ID NO: 1956306 - RNA, 19 nt, Artificial Sequence
  Description of Artificial Sequence: Synthetic oligonucleotide
  Sense strand starting at position 2323 of SEQ ID NO: 1880292
uuguuagaugcacauguua

SEQ ID NO: 1956307 - RNA, 19 nt, Artificial Sequence
  Description of Artificial Sequence: Synthetic oligonucleotide
  Antisense strand to SEQ ID NO: 1956306
uaacaugugcaucuaacaa

SEQ ID NO: 1956308 - RNA, 19 nt, Artificial Sequence
  Description of Artificial Sequence: Synthetic oligonucleotide
  Sense strand starting at position 2468 of SEQ ID NO: 1880292
cccuuuauccuguaagaag

SEQ ID NO: 1956309 - RNA, 19 nt, Artificial Sequence
  Description of Artificial Sequence: Synthetic oligonucleotide
  Antisense strand to SEQ ID NO: 1956308
cuucuuacaggauaaaggg

SEQ ID NO: 1956310 - RNA, 19 nt, Artificial Sequence
  Description of Artificial Sequence: Synthetic oligonucleotide
  Sense strand starting at position 2614 of SEQ ID NO: 1880292
ucaggauguguuuaccaaa

SEQ ID NO: 1956311 - RNA, 19 nt, Artificial Sequence
  Description of Artificial Sequence: Synthetic oligonucleotide
  Antisense strand to SEQ ID NO: 1956310
uuugguaaacacauccuga

SEQ ID NO: 1956312 - RNA, 19 nt, Artificial Sequence
  Description of Artificial Sequence: Synthetic oligonucleotide
  Sense strand starting at position 2757 of SEQ ID NO: 1880292
gcuaucuuagaauguuaga

SEQ ID NO: 1956313 - RNA, 19 nt, Artificial Sequence
  Description of Artificial Sequence: Synthetic oligonucleotide
  Antisense strand to SEQ ID NO: 1956312
ucuaacauucuaagauagc

SEQ ID NO: 1956314 - RNA, 19 nt, Artificial Sequence
  Description of Artificial Sequence: Synthetic oligonucleotide
  Sense strand starting at position 2767 of SEQ ID NO: 1880292
aauguuagagcuuggaaga

SEQ ID NO: 1956315 - RNA, 19 nt, Artificial Sequence
  Description of Artificial Sequence: Synthetic oligonucleotide
  Antisense strand to SEQ ID NO: 1956314
ucuuccaagcucuaacauu

SEQ ID NO: 1956316 - RNA, 19 nt, Artificial Sequence
  Description of Artificial Sequence: Synthetic oligonucleotide
  Sense strand starting at position 2768 of SEQ ID NO: 1880292
auguuagagcuuggaagaa

SEQ ID NO: 1956317 - RNA, 19 nt, Artificial Sequence
  Description of Artificial Sequence: Synthetic oligonucleotide
  Antisense strand to SEQ ID NO: 1956316
uucuuccaagcucuaacau

SEQ ID NO: 1956318 - RNA, 19 nt, Artificial Sequence
  Description of Artificial Sequence: Synthetic oligonucleotide
  Sense strand starting at position 3105 of SEQ ID NO: 1880292
cuagaaagcuaugcuugga

SEQ ID NO: 1956319 - RNA, 19 nt, Artificial Sequence
  Description of Artificial Sequence: Synthetic oligonucleotide
  Antisense strand to SEQ ID NO: 1956318
uccaagcauagcuuucuag

SEQ ID NO: 1956320 - RNA, 19 nt, Artificial Sequence
  Description of Artificial Sequence: Synthetic oligonucleotide
  Sense strand starting at position 3194 of SEQ ID NO: 1880292
ucgacuuaguaaucccuga

SEQ ID NO: 1956321 - RNA, 19 nt, Artificial Sequence
  Description of Artificial Sequence: Synthetic oligonucleotide
  Antisense strand to SEQ ID NO: 1956320
ucagggauuacuaagucga

SEQ ID NO: 1956322 - RNA, 19 nt, Artificial Sequence
  Description of Artificial Sequence: Synthetic oligonucleotide
  Sense strand starting at position 3875 of SEQ ID NO: 1880292
aguccuaagucauugacau

SEQ ID NO: 1956323 - RNA, 19 nt, Artificial Sequence
  Description of Artificial Sequence: Synthetic oligonucleotide
  Antisense strand to SEQ ID NO: 1956322
augucaaugacuuaggacu

SEQ ID NO: 1956324 - RNA, 19 nt, Artificial Sequence
  Description of Artificial Sequence: Synthetic oligonucleotide
  Sense strand starting at position 3876 of SEQ ID NO: 1880292
guccuaagucauugacaug

SEQ ID NO: 1956325 - RNA, 19 nt, Artificial Sequence
  Description of Artificial Sequence: Synthetic oligonucleotide
  Antisense strand to SEQ ID NO: 1956324
caugucaaugacuuaggac

SEQ ID NO: 1956326 - RNA, 19 nt, Artificial Sequence
  Description of Artificial Sequence: Synthetic oligonucleotide
  Sense strand starting at position 3882 of SEQ ID NO: 1880292
agucauugacauggguuaa

SEQ ID NO: 1956327 - RNA, 19 nt, Artificial Sequence
  Description of Artificial Sequence: Synthetic oligonucleotide
  Antisense strand to SEQ ID NO: 1956326
uuaacccaugucaaugacu

SEQ ID NO: 1956328 - RNA, 19 nt, Artificial Sequence
  Description of Artificial Sequence: Synthetic oligonucleotide
  Sense strand starting at position 3883 of SEQ ID NO: 1880292
gucauugacauggguuaaa

SEQ ID NO: 1956329 - RNA, 19 nt, Artificial Sequence
  Description of Artificial Sequence: Synthetic oligonucleotide
  Antisense strand to SEQ ID NO: 1956328
uuuaacccaugucaaugac

SEQ ID NO: 1956330 - RNA, 19 nt, Artificial Sequence
  Description of Artificial Sequence: Synthetic oligonucleotide
  Sense strand starting at position 3912 of SEQ ID NO: 1880292
ggaacuugaagcuguuuga

SEQ ID NO: 1956331 - RNA, 19 nt, Artificial Sequence
  Description of Artificial Sequence: Synthetic oligonucleotide
  Antisense strand to SEQ ID NO: 1956330
ucaaacagcuucaaguucc

SEQ ID NO: 1956332 - RNA, 19 nt, Artificial Sequence
  Description of Artificial Sequence: Synthetic oligonucleotide
  Sense strand starting at position 3927 of SEQ ID NO: 1880292
uugacuuuguuaccuggaa

SEQ ID NO: 1956333 - RNA, 19 nt, Artificial Sequence
  Description of Artificial Sequence: Synthetic oligonucleotide
  Antisense strand to SEQ ID NO: 1956332
uuccagguaacaaagucaa

SEQ ID NO: 1956334 - RNA, 19 nt, Artificial Sequence
  Description of Artificial Sequence: Synthetic oligonucleotide
  Sense strand starting at position 3928 of SEQ ID NO: 1880292
ugacuuuguuaccuggaaa

SEQ ID NO: 1956335 - RNA, 19 nt, Artificial Sequence
  Description of Artificial Sequence: Synthetic oligonucleotide
  Antisense strand to SEQ ID NO: 1956334
uuuccagguaacaaaguca

SEQ ID NO: 1956336 - RNA, 19 nt, Artificial Sequence
  Description of Artificial Sequence: Synthetic oligonucleotide
  Sense strand starting at position 63 of SEQ ID NO: 1880293
gaagauuaacagcgacauc

SEQ ID NO: 1956337 - RNA, 19 nt, Artificial Sequence
  Description of Artificial Sequence: Synthetic oligonucleotide
  Antisense strand to SEQ ID NO: 1956336
gaugucgcuguuaaucuuc

SEQ ID NO: 1956338 - RNA, 19 nt, Artificial Sequence
  Description of Artificial Sequence: Synthetic oligonucleotide
  Sense strand starting at position 127 of SEQ ID NO: 1880293
ugcuguauuugaccaaucu

SEQ ID NO: 1956339 - RNA, 19 nt, Artificial Sequence
  Description of Artificial Sequence: Synthetic oligonucleotide
  Antisense strand to SEQ ID NO: 1956338
agauuggucaaauacagca

SEQ ID NO: 1956340 - RNA, 19 nt, Artificial Sequence
  Description of Artificial Sequence: Synthetic oligonucleotide
  Sense strand starting at position 544 of SEQ ID NO: 1880293
gucccuugggucuacuuau

SEQ ID NO: 1956341 - RNA, 19 nt, Artificial Sequence
  Description of Artificial Sequence: Synthetic oligonucleotide
  Antisense strand to SEQ ID NO: 1956340
auaaguagacccaagggac

SEQ ID NO: 1956342 - RNA, 19 nt, Artificial Sequence
  Description of Artificial Sequence: Synthetic oligonucleotide
  Sense strand starting at position 550 of SEQ ID NO: 1880293
ugggucuacuuauucuaau

SEQ ID NO: 1956343 - RNA, 19 nt, Artificial Sequence
  Description of Artificial Sequence: Synthetic oligonucleotide
  Antisense strand to SEQ ID NO: 1956342
auuagaauaaguagaccca

SEQ ID NO: 1956344 - RNA, 19 nt, Artificial Sequence
  Description of Artificial Sequence: Synthetic oligonucleotide
  Sense strand starting at position 551 of SEQ ID NO: 1880293
gggucuacuuauucuaaua

SEQ ID NO: 1956345 - RNA, 19 nt, Artificial Sequence
  Description of Artificial Sequence: Synthetic oligonucleotide
  Antisense strand to SEQ ID NO: 1956344
uauuagaauaaguagaccc

SEQ ID NO: 1956346 - RNA, 19 nt, Artificial Sequence
  Description of Artificial Sequence: Synthetic oligonucleotide
  Sense strand starting at position 749 of SEQ ID NO: 1880293
ggaucuuaaacugguaugu

SEQ ID NO: 1956347 - RNA, 19 nt, Artificial Sequence
  Description of Artificial Sequence: Synthetic oligonucleotide
  Antisense strand to SEQ ID NO: 1956346
acauaccaguuuaagaucc

SEQ ID NO: 1956348 - RNA, 19 nt, Artificial Sequence
  Description of Artificial Sequence: Synthetic oligonucleotide
  Sense strand starting at position 753 of SEQ ID NO: 1880293
cuuaaacugguaugugaaa

SEQ ID NO: 1956349 - RNA, 19 nt, Artificial Sequence
  Description of Artificial Sequence: Synthetic oligonucleotide
  Antisense strand to SEQ ID NO: 1956348
uuucacauaccaguuuaag

SEQ ID NO: 1956350 - RNA, 19 nt, Artificial Sequence
  Description of Artificial Sequence: Synthetic oligonucleotide
  Sense strand starting at position 793 of SEQ ID NO: 1880293
ccugaaaggugguucuacu

SEQ ID NO: 1956351 - RNA, 19 nt, Artificial Sequence
  Description of Artificial Sequence: Synthetic oligonucleotide
  Antisense strand to SEQ ID NO: 1956350
aguagaaccaccuuucagg

SEQ ID NO: 1956352 - RNA, 19 nt, Artificial Sequence
  Description of Artificial Sequence: Synthetic oligonucleotide
  Sense strand starting at position 801 of SEQ ID NO: 1880293
gugguucuacuccagaauc

SEQ ID NO: 1956353 - RNA, 19 nt, Artificial Sequence
  Description of Artificial Sequence: Synthetic oligonucleotide
  Antisense strand to SEQ ID NO: 1956352
gauucuggaguagaaccac

SEQ ID NO: 1956354 - RNA, 19 nt, Artificial Sequence
  Description of Artificial Sequence: Synthetic oligonucleotide
  Sense strand starting at position 803 of SEQ ID NO: 1880293
gguucuacuccagaaucca

SEQ ID NO: 1956355 - RNA, 19 nt, Artificial Sequence
  Description of Artificial Sequence: Synthetic oligonucleotide
  Antisense strand to SEQ ID NO: 1956354
uggauucuggaguagaacc

SEQ ID NO: 1956356 - RNA, 19 nt, Artificial Sequence
  Description of Artificial Sequence: Synthetic oligonucleotide
  Sense strand starting at position 843 of SEQ ID NO: 1880293
aaaugcuaagucuaggagu

SEQ ID NO: 1956357 - RNA, 19 nt, Artificial Sequence
  Description of Artificial Sequence: Synthetic oligonucleotide
  Antisense strand to SEQ ID NO: 1956356
acuccuagacuuagcauuu

SEQ ID NO: 1956358 - RNA, 19 nt, Artificial Sequence
  Description of Artificial Sequence: Synthetic oligonucleotide
  Sense strand starting at position 1134 of SEQ ID NO: 1880293
gggugucauagucaacucu

SEQ ID NO: 1956359 - RNA, 19 nt, Artificial Sequence
  Description of Artificial Sequence: Synthetic oligonucleotide
  Antisense strand to SEQ ID NO: 1956358
agaguugacuaugacaccc

SEQ ID NO: 1956360 - RNA, 19 nt, Artificial Sequence
  Description of Artificial Sequence: Synthetic oligonucleotide
  Sense strand starting at position 1158 of SEQ ID NO: 1880293
augacauguccuuaucauu

SEQ ID NO: 1956361 - RNA, 19 nt, Artificial Sequence
  Description of Artificial Sequence: Synthetic oligonucleotide
  Antisense strand to SEQ ID NO: 1956360
aaugauaaggacaugucau

SEQ ID NO: 1956362 - RNA, 19 nt, Artificial Sequence
  Description of Artificial Sequence: Synthetic oligonucleotide
  Sense strand starting at position 1286 of SEQ ID NO: 1880293
ucgucacaucuugauaaca

SEQ ID NO: 1956363 - RNA, 19 nt, Artificial Sequence
  Description of Artificial Sequence: Synthetic oligonucleotide
  Antisense strand to SEQ ID NO: 1956362
uguuaucaagaugugacga

SEQ ID NO: 1956364 - RNA, 19 nt, Artificial Sequence
  Description of Artificial Sequence: Synthetic oligonucleotide
  Sense strand starting at position 1582 of SEQ ID NO: 1880293
gaaacaaauacgggugagu

SEQ ID NO: 1956365 - RNA, 19 nt, Artificial Sequence
  Description of Artificial Sequence: Synthetic oligonucleotide
  Antisense strand to SEQ ID NO: 1956364
acucacccguauuuguuuc

SEQ ID NO: 1956366 - RNA, 19 nt, Artificial Sequence
  Description of Artificial Sequence: Synthetic oligonucleotide
  Sense strand starting at position 1591 of SEQ ID NO: 1880293
acgggugaguccaaggaau

SEQ ID NO: 1956367 - RNA, 19 nt, Artificial Sequence
  Description of Artificial Sequence: Synthetic oligonucleotide
  Antisense strand to SEQ ID NO: 1956366
auuccuuggacucacccgu

SEQ ID NO: 1956368 - RNA, 19 nt, Artificial Sequence
  Description of Artificial Sequence: Synthetic oligonucleotide
  Sense strand starting at position 1672 of SEQ ID NO: 1880293
ggagcugcucugggagaca

SEQ ID NO: 1956369 - RNA, 19 nt, Artificial Sequence
  Description of Artificial Sequence: Synthetic oligonucleotide
  Antisense strand to SEQ ID NO: 1956368
ugucucccagagcagcucc

SEQ ID NO: 1956370 - RNA, 19 nt, Artificial Sequence
  Description of Artificial Sequence: Synthetic oligonucleotide
  Sense strand starting at position 2067 of SEQ ID NO: 1880293
gggucuacaggcugacauu

SEQ ID NO: 1956371 - RNA, 19 nt, Artificial Sequence
  Description of Artificial Sequence: Synthetic oligonucleotide
  Antisense strand to SEQ ID NO: 1956370
aaugucagccuguagaccc

SEQ ID NO: 1956372 - RNA, 19 nt, Artificial Sequence
  Description of Artificial Sequence: Synthetic oligonucleotide
  Sense strand starting at position 2161 of SEQ ID NO: 1880293
aaaguuugaugagugucau

SEQ ID NO: 1956373 - RNA, 19 nt, Artificial Sequence
  Description of Artificial Sequence: Synthetic oligonucleotide
  Antisense strand to SEQ ID NO: 1956372
augacacucaucaaacuuu

SEQ ID NO: 1956374 - RNA, 19 nt, Artificial Sequence
  Description of Artificial Sequence: Synthetic oligonucleotide
  Sense strand starting at position 2162 of SEQ ID NO: 1880293
aaguuugaugagugucaug

SEQ ID NO: 1956375 - RNA, 19 nt, Artificial Sequence
  Description of Artificial Sequence: Synthetic oligonucleotide
  Antisense strand to SEQ ID NO: 1956374
caugacacucaucaaacuu

SEQ ID NO: 1956376 - RNA, 19 nt, Artificial Sequence
  Description of Artificial Sequence: Synthetic oligonucleotide
  Sense strand starting at position 2276 of SEQ ID NO: 1880293
ugcauucuggcuggagaag

SEQ ID NO: 1956377 - RNA, 19 nt, Artificial Sequence
  Description of Artificial Sequence: Synthetic oligonucleotide
  Antisense strand to SEQ ID NO: 1956376
cuucuccagccagaaugca

SEQ ID NO: 1956378 - RNA, 19 nt, Artificial Sequence
  Description of Artificial Sequence: Synthetic oligonucleotide
  Sense strand starting at position 2398 of SEQ ID NO: 1880293
gcaucaaggagugguacaa

SEQ ID NO: 1956379 - RNA, 19 nt, Artificial Sequence
  Description of Artificial Sequence: Synthetic oligonucleotide
  Antisense strand to SEQ ID NO: 1956378
uuguaccacuccuugaugc

SEQ ID NO: 1956380 - RNA, 19 nt, Artificial Sequence
  Description of Artificial Sequence: Synthetic oligonucleotide
  Sense strand starting at position 3008 of SEQ ID NO: 1880293
ugaagaagcuuccuaagca

SEQ ID NO: 1956381 - RNA, 19 nt, Artificial Sequence
  Description of Artificial Sequence: Synthetic oligonucleotide
  Antisense strand to SEQ ID NO: 1956380
ugcuuaggaagcuucuuca

SEQ ID NO: 1956382 - RNA, 19 nt, Artificial Sequence
  Description of Artificial Sequence: Synthetic oligonucleotide
  Sense strand starting at position 3041 of SEQ ID NO: 1880293
gagacccugcuaugaguua

SEQ ID NO: 1956383 - RNA, 19 nt, Artificial Sequence
  Description of Artificial Sequence: Synthetic oligonucleotide
  Antisense strand to SEQ ID NO: 1956382
uaacucauagcagggucuc

SEQ ID NO: 1956384 - RNA, 19 nt, Artificial Sequence
  Description of Artificial Sequence: Synthetic oligonucleotide
  Sense strand starting at position 3094 of SEQ ID NO: 1880293
uauagagaaucuguuguaa

SEQ ID NO: 1956385 - RNA, 19 nt, Artificial Sequence
  Description of Artificial Sequence: Synthetic oligonucleotide
  Antisense strand to SEQ ID NO: 1956384
uuacaacagauucucuaua

SEQ ID NO: 1956386 - RNA, 19 nt, Artificial Sequence
  Description of Artificial Sequence: Synthetic oligonucleotide
  Sense strand starting at position 3112 of SEQ ID NO: 1880293
auaauugcaguguaauuga

SEQ ID NO: 1956387 - RNA, 19 nt, Artificial Sequence
  Description of Artificial Sequence: Synthetic oligonucleotide
  Antisense strand to SEQ ID NO: 1956386
ucaauuacacugcaauuau

SEQ ID NO: 1956388 - RNA, 19 nt, Artificial Sequence
  Description of Artificial Sequence: Synthetic oligonucleotide
  Sense strand starting at position 3115 of SEQ ID NO: 1880293
auugcaguguaauugaaga

SEQ ID NO: 1956389 - RNA, 19 nt, Artificial Sequence
  Description of Artificial Sequence: Synthetic oligonucleotide
  Antisense strand to SEQ ID NO: 1956388
ucuucaauuacacugcaau

SEQ ID NO: 1956390 - RNA, 19 nt, Artificial Sequence
  Description of Artificial Sequence: Synthetic oligonucleotide
  Sense strand starting at position 3117 of SEQ ID NO: 1880293
ugcaguguaauugaagaug

SEQ ID NO: 1956391 - RNA, 19 nt, Artificial Sequence
  Description of Artificial Sequence: Synthetic oligonucleotide
  Antisense strand to SEQ ID NO: 1956390
caucuucaauuacacugca

SEQ ID NO: 1956392 - RNA, 19 nt, Artificial Sequence
  Description of Artificial Sequence: Synthetic oligonucleotide
  Sense strand starting at position 3268 of SEQ ID NO: 1880293
ucaggagagaguuguuuag

SEQ ID NO: 1956393 - RNA, 19 nt, Artificial Sequence
  Description of Artificial Sequence: Synthetic oligonucleotide
  Antisense strand to SEQ ID NO: 1956392
cuaaacaacucucuccuga

SEQ ID NO: 1956394 - RNA, 19 nt, Artificial Sequence
  Description of Artificial Sequence: Synthetic oligonucleotide
  Sense strand starting at position 3270 of SEQ ID NO: 1880293
aggagagaguuguuuagug

SEQ ID NO: 1956395 - RNA, 19 nt, Artificial Sequence
  Description of Artificial Sequence: Synthetic oligonucleotide
  Antisense strand to SEQ ID NO: 1956394
cacuaaacaacucucuccu

SEQ ID NO: 1956396 - RNA, 19 nt, Artificial Sequence
  Description of Artificial Sequence: Synthetic oligonucleotide
  Sense strand starting at position 3272 of SEQ ID NO: 1880293
gagagaguuguuuagugga

SEQ ID NO: 1956397 - RNA, 19 nt, Artificial Sequence
  Description of Artificial Sequence: Synthetic oligonucleotide
  Antisense strand to SEQ ID NO: 1956396
uccacuaaacaacucucuc

SEQ ID NO: 1956398 - RNA, 19 nt, Artificial Sequence
  Description of Artificial Sequence: Synthetic oligonucleotide
  Sense strand starting at position 3277 of SEQ ID NO: 1880293
aguuguuuaguggaguaag

SEQ ID NO: 1956399 - RNA, 19 nt, Artificial Sequence
  Description of Artificial Sequence: Synthetic oligonucleotide
  Antisense strand to SEQ ID NO: 1956398
cuuacuccacuaaacaacu

SEQ ID NO: 1956400 - RNA, 19 nt, Artificial Sequence
  Description of Artificial Sequence: Synthetic oligonucleotide
  Sense strand starting at position 3383 of SEQ ID NO: 1880293
ggagaugucaccuggaguc

SEQ ID NO: 1956401 - RNA, 19 nt, Artificial Sequence
  Description of Artificial Sequence: Synthetic oligonucleotide
  Antisense strand to SEQ ID NO: 1956400
gacuccaggugacaucucc

SEQ ID NO: 1956402 - RNA, 19 nt, Artificial Sequence
  Description of Artificial Sequence: Synthetic oligonucleotide
  Sense strand starting at position 3408 of SEQ ID NO: 1880293
auggaugagucauuaggug

SEQ ID NO: 1956403 - RNA, 19 nt, Artificial Sequence
  Description of Artificial Sequence: Synthetic oligonucleotide
  Antisense strand to SEQ ID NO: 1956402
caccuaaugacucauccau

SEQ ID NO: 1956404 - RNA, 19 nt, Artificial Sequence
  Description of Artificial Sequence: Synthetic oligonucleotide
  Sense strand starting at position 3412 of SEQ ID NO: 1880293
augagucauuaggugaaga

SEQ ID NO: 1956405 - RNA, 19 nt, Artificial Sequence
  Description of Artificial Sequence: Synthetic oligonucleotide
  Antisense strand to SEQ ID NO: 1956404
ucuucaccuaaugacucau

SEQ ID NO: 1956406 - RNA, 19 nt, Artificial Sequence
  Description of Artificial Sequence: Synthetic oligonucleotide
  Sense strand starting at position 3413 of SEQ ID NO: 1880293
ugagucauuaggugaagaa

SEQ ID NO: 1956407 - RNA, 19 nt, Artificial Sequence
  Description of Artificial Sequence: Synthetic oligonucleotide
  Antisense strand to SEQ ID NO: 1956406
uucuucaccuaaugacuca

SEQ ID NO: 1956408 - RNA, 19 nt, Artificial Sequence
  Description of Artificial Sequence: Synthetic oligonucleotide
  Sense strand starting at position 3426 of SEQ ID NO: 1880293
gaagaaagugcaugcagau

SEQ ID NO: 1956409 - RNA, 19 nt, Artificial Sequence
  Description of Artificial Sequence: Synthetic oligonucleotide
  Antisense strand to SEQ ID NO: 1956408
aucugcaugcacuuucuuc

SEQ ID NO: 1956410 - RNA, 19 nt, Artificial Sequence
  Description of Artificial Sequence: Synthetic oligonucleotide
  Sense strand starting at position 3523 of SEQ ID NO: 1880293
cugucucauagaugaggga

SEQ ID NO: 1956411 - RNA, 19 nt, Artificial Sequence
  Description of Artificial Sequence: Synthetic oligonucleotide
  Antisense strand to SEQ ID NO: 1956410
ucccucaucuaugagacag

SEQ ID NO: 1956412 - RNA, 19 nt, Artificial Sequence
  Description of Artificial Sequence: Synthetic oligonucleotide
  Sense strand starting at position 3742 of SEQ ID NO: 1880293
gcugaagaaugaguaaugu

SEQ ID NO: 1956413 - RNA, 19 nt, Artificial Sequence
  Description of Artificial Sequence: Synthetic oligonucleotide
  Antisense strand to SEQ ID NO: 1956412
acauuacucauucuucagc

SEQ ID NO: 1956414 - RNA, 19 nt, Artificial Sequence
  Description of Artificial Sequence: Synthetic oligonucleotide
  Sense strand starting at position 3861 of SEQ ID NO: 1880293
uggugucagaggcaucaaa

SEQ ID NO: 1956415 - RNA, 19 nt, Artificial Sequence
  Description of Artificial Sequence: Synthetic oligonucleotide
  Antisense strand to SEQ ID NO: 1956414
uuugaugccucugacacca

SEQ ID NO: 1956416 - RNA, 19 nt, Artificial Sequence
  Description of Artificial Sequence: Synthetic oligonucleotide
  Sense strand starting at position 109 of SEQ ID NO: 1880294
ggagaaacuucccacauuu

SEQ ID NO: 1956417 - RNA, 19 nt, Artificial Sequence
  Description of Artificial Sequence: Synthetic oligonucleotide
  Antisense strand to SEQ ID NO: 1956416
aaaugugggaaguuucucc

SEQ ID NO: 1956418 - RNA, 19 nt, Artificial Sequence
  Description of Artificial Sequence: Synthetic oligonucleotide
  Sense strand starting at position 249 of SEQ ID NO: 1880294
agccuuugaugacucagaa

SEQ ID NO: 1956419 - RNA, 19 nt, Artificial Sequence
  Description of Artificial Sequence: Synthetic oligonucleotide
  Antisense strand to SEQ ID NO: 1956418
uucugagucaucaaaggcu

SEQ ID NO: 1956420 - RNA, 19 nt, Artificial Sequence
  Description of Artificial Sequence: Synthetic oligonucleotide
  Sense strand starting at position 285 of SEQ ID NO: 1880294
agccucuguuaggcaaauu

SEQ ID NO: 1956421 - RNA, 19 nt, Artificial Sequence
  Description of Artificial Sequence: Synthetic oligonucleotide
  Antisense strand to SEQ ID NO: 1956420
aauuugccuaacagaggcu

SEQ ID NO: 1956422 - RNA, 19 nt, Artificial Sequence
  Description of Artificial Sequence: Synthetic oligonucleotide
  Sense strand starting at position 296 of SEQ ID NO: 1880294
ggcaaauuacacuggugga

SEQ ID NO: 1956423 - RNA, 19 nt, Artificial Sequence
  Description of Artificial Sequence: Synthetic oligonucleotide
  Antisense strand to SEQ ID NO: 1956422
uccaccaguguaauuugcc

SEQ ID NO: 1956424 - RNA, 19 nt, Artificial Sequence
  Description of Artificial Sequence: Synthetic oligonucleotide
  Sense strand starting at position 326 of SEQ ID NO: 1880294
ucaccuuguuccuugggaa

SEQ ID NO: 1956425 - RNA, 19 nt, Artificial Sequence
  Description of Artificial Sequence: Synthetic oligonucleotide
  Antisense strand to SEQ ID NO: 1956424
uucccaaggaacaagguga

SEQ ID NO: 1956426 - RNA, 19 nt, Artificial Sequence
  Description of Artificial Sequence: Synthetic oligonucleotide
  Sense strand starting at position 327 of SEQ ID NO: 1880294
caccuuguuccuugggaaa

SEQ ID NO: 1956427 - RNA, 19 nt, Artificial Sequence
  Description of Artificial Sequence: Synthetic oligonucleotide
  Antisense strand to SEQ ID NO: 1956426
uuucccaaggaacaaggug

SEQ ID NO: 1956428 - RNA, 19 nt, Artificial Sequence
  Description of Artificial Sequence: Synthetic oligonucleotide
  Sense strand starting at position 390 of SEQ ID NO: 1880294
uuugcaucacgcuguauuu

SEQ ID NO: 1956429 - RNA, 19 nt, Artificial Sequence
  Description of Artificial Sequence: Synthetic oligonucleotide
  Antisense strand to SEQ ID NO: 1956428
aaauacagcgugaugcaaa

SEQ ID NO: 1956430 - RNA, 19 nt, Artificial Sequence
  Description of Artificial Sequence: Synthetic oligonucleotide
  Sense strand starting at position 1351 of SEQ ID NO: 1880294
augucauguccuugaagag

SEQ ID NO: 1956431 - RNA, 19 nt, Artificial Sequence
  Description of Artificial Sequence: Synthetic oligonucleotide
  Antisense strand to SEQ ID NO: 1956430
cucuucaaggacaugacau

SEQ ID NO: 1956432 - RNA, 19 nt, Artificial Sequence
  Description of Artificial Sequence: Synthetic oligonucleotide
  Sense strand starting at position 1363 of SEQ ID NO: 1880294
ugaagaggcuuugccaaau

SEQ ID NO: 1956433 - RNA, 19 nt, Artificial Sequence
  Description of Artificial Sequence: Synthetic oligonucleotide
  Antisense strand to SEQ ID NO: 1956432
auuuggcaaagccucuuca

SEQ ID NO: 1956434 - RNA, 19 nt, Artificial Sequence
  Description of Artificial Sequence: Synthetic oligonucleotide
  Sense strand starting at position 1399 of SEQ ID NO: 1880294
cccgguuguauuugagacu

SEQ ID NO: 1956435 - RNA, 19 nt, Artificial Sequence
  Description of Artificial Sequence: Synthetic oligonucleotide
  Antisense strand to SEQ ID NO: 1956434
agucucaaauacaaccggg

SEQ ID NO: 1956436 - RNA, 19 nt, Artificial Sequence
  Description of Artificial Sequence: Synthetic oligonucleotide
  Sense strand starting at position 1402 of SEQ ID NO: 1880294
gguuguauuugagacuuua

SEQ ID NO: 1956437 - RNA, 19 nt, Artificial Sequence
  Description of Artificial Sequence: Synthetic oligonucleotide
  Antisense strand to SEQ ID NO: 1956436
uaaagucucaaauacaacc

SEQ ID NO: 1956438 - RNA, 19 nt, Artificial Sequence
  Description of Artificial Sequence: Synthetic oligonucleotide
  Sense strand starting at position 1422 of SEQ ID NO: 1880294
agcgcuucuuacuuuagaa

SEQ ID NO: 1956439 - RNA, 19 nt, Artificial Sequence
  Description of Artificial Sequence: Synthetic oligonucleotide
  Antisense strand to SEQ ID NO: 1956438
uucuaaaguaagaagcgcu

SEQ ID NO: 1956440 - RNA, 19 nt, Artificial Sequence
  Description of Artificial Sequence: Synthetic oligonucleotide
  Sense strand starting at position 1424 of SEQ ID NO: 1880294
cgcuucuuacuuuagaagu

SEQ ID NO: 1956441 - RNA, 19 nt, Artificial Sequence
  Description of Artificial Sequence: Synthetic oligonucleotide
  Antisense strand to SEQ ID NO: 1956440
acuucuaaaguaagaagcg

SEQ ID NO: 1956442 - RNA, 19 nt, Artificial Sequence
  Description of Artificial Sequence: Synthetic oligonucleotide
  Sense strand starting at position 1502 of SEQ ID NO: 1880294
guaagcuuccuggagaaca

SEQ ID NO: 1956443 - RNA, 19 nt, Artificial Sequence
  Description of Artificial Sequence: Synthetic oligonucleotide
  Antisense strand to SEQ ID NO: 1956442
uguucuccaggaagcuuac

SEQ ID NO: 1956444 - RNA, 19 nt, Artificial Sequence
  Description of Artificial Sequence: Synthetic oligonucleotide
  Sense strand starting at position 1595 of SEQ ID NO: 1880294
ggcggaucgaaugaaugaa

SEQ ID NO: 1956445 - RNA, 19 nt, Artificial Sequence
  Description of Artificial Sequence: Synthetic oligonucleotide
  Antisense strand to SEQ ID NO: 1956444
uucauucauucgauccgcc

SEQ ID NO: 1956446 - RNA, 19 nt, Artificial Sequence
  Description of Artificial Sequence: Synthetic oligonucleotide
  Sense strand starting at position 2391 of SEQ ID NO: 1880294
cgcgaguguguccuguauu

SEQ ID NO: 1956447 - RNA, 19 nt, Artificial Sequence
  Description of Artificial Sequence: Synthetic oligonucleotide
  Antisense strand to SEQ ID NO: 1956446
aauacaggacacacucgcg

SEQ ID NO: 1956448 - RNA, 19 nt, Artificial Sequence
  Description of Artificial Sequence: Synthetic oligonucleotide
  Sense strand starting at position 2394 of SEQ ID NO: 1880294
gaguguguccuguauuccu

SEQ ID NO: 1956449 - RNA, 19 nt, Artificial Sequence
  Description of Artificial Sequence: Synthetic oligonucleotide
  Antisense strand to SEQ ID NO: 1956448
aggaauacaggacacacuc

SEQ ID NO: 1956450 - RNA, 19 nt, Artificial Sequence
  Description of Artificial Sequence: Synthetic oligonucleotide
  Sense strand starting at position 2413 of SEQ ID NO: 1880294
uccgcaaacguuuaucaaa

SEQ ID NO: 1956451 - RNA, 19 nt, Artificial Sequence
  Description of Artificial Sequence: Synthetic oligonucleotide
  Antisense strand to SEQ ID NO: 1956450
uuugauaaacguuugcgga

SEQ ID NO: 1956452 - RNA, 19 nt, Artificial Sequence
  Description of Artificial Sequence: Synthetic oligonucleotide
  Sense strand starting at position 2434 of SEQ ID NO: 1880294
uggcaaagauacuuccgau

SEQ ID NO: 1956453 - RNA, 19 nt, Artificial Sequence
  Description of Artificial Sequence: Synthetic oligonucleotide
  Antisense strand to SEQ ID NO: 1956452
aucggaaguaucuuugcca

SEQ ID NO: 1956454 - RNA, 19 nt, Artificial Sequence
  Description of Artificial Sequence: Synthetic oligonucleotide
  Sense strand starting at position 2446 of SEQ ID NO: 1880294
uuccgauacacucgcagaa

SEQ ID NO: 1956455 - RNA, 19 nt, Artificial Sequence
  Description of Artificial Sequence: Synthetic oligonucleotide
  Antisense strand to SEQ ID NO: 1956454
uucugcgaguguaucggaa

SEQ ID NO: 1956456 - RNA, 19 nt, Artificial Sequence
  Description of Artificial Sequence: Synthetic oligonucleotide
  Sense strand starting at position 2571 of SEQ ID NO: 1880294
aaaguaagcucugcagucu

SEQ ID NO: 1956457 - RNA, 19 nt, Artificial Sequence
  Description of Artificial Sequence: Synthetic oligonucleotide
  Antisense strand to SEQ ID NO: 1956456
agacugcagagcuuacuuu

SEQ ID NO: 1956458 - RNA, 19 nt, Artificial Sequence
  Description of Artificial Sequence: Synthetic oligonucleotide
  Sense strand starting at position 2572 of SEQ ID NO: 1880294
aaguaagcucugcagucua

SEQ ID NO: 1956459 - RNA, 19 nt, Artificial Sequence
  Description of Artificial Sequence: Synthetic oligonucleotide
  Antisense strand to SEQ ID NO: 1956458
uagacugcagagcuuacuu

SEQ ID NO: 1956460 - RNA, 19 nt, Artificial Sequence
  Description of Artificial Sequence: Synthetic oligonucleotide
  Sense strand starting at position 2848 of SEQ ID NO: 1880294
gaaguugugguguagaaag

SEQ ID NO: 1956461 - RNA, 19 nt, Artificial Sequence
  Description of Artificial Sequence: Synthetic oligonucleotide
  Antisense strand to SEQ ID NO: 1956460
cuuucuacaccacaacuuc

SEQ ID NO: 1956462 - RNA, 19 nt, Artificial Sequence
  Description of Artificial Sequence: Synthetic oligonucleotide
  Sense strand starting at position 2850 of SEQ ID NO: 1880294
aguugugguguagaaaguu

SEQ ID NO: 1956463 - RNA, 19 nt, Artificial Sequence
  Description of Artificial Sequence: Synthetic oligonucleotide
  Antisense strand to SEQ ID NO: 1956462
aacuuucuacaccacaacu

SEQ ID NO: 1956464 - RNA, 19 nt, Artificial Sequence
  Description of Artificial Sequence: Synthetic oligonucleotide
  Sense strand starting at position 2859 of SEQ ID NO: 1880294
guagaaaguucguucucca

SEQ ID NO: 1956465 - RNA, 19 nt, Artificial Sequence
  Description of Artificial Sequence: Synthetic oligonucleotide
  Antisense strand to SEQ ID NO: 1956464
uggagaacgaacuuucuac

SEQ ID NO: 1956466 - RNA, 19 nt, Artificial Sequence
  Description of Artificial Sequence: Synthetic oligonucleotide
  Sense strand starting at position 2862 of SEQ ID NO: 1880294
gaaaguucguucuccaauc

SEQ ID NO: 1956467 - RNA, 19 nt, Artificial Sequence
  Description of Artificial Sequence: Synthetic oligonucleotide
  Antisense strand to SEQ ID NO: 1956466
gauuggagaacgaacuuuc

SEQ ID NO: 1956468 - RNA, 19 nt, Artificial Sequence
  Description of Artificial Sequence: Synthetic oligonucleotide
  Sense strand starting at position 2898 of SEQ ID NO: 1880294
uucuuaaaucuagggcguu

SEQ ID NO: 1956469 - RNA, 19 nt, Artificial Sequence
  Description of Artificial Sequence: Synthetic oligonucleotide
  Antisense strand to SEQ ID NO: 1956468
aacgcccuagauuuaagaa

SEQ ID NO: 1956470 - RNA, 19 nt, Artificial Sequence
  Description of Artificial Sequence: Synthetic oligonucleotide
  Sense strand starting at position 2904 of SEQ ID NO: 1880294
aaucuagggcguugagagu

SEQ ID NO: 1956471 - RNA, 19 nt, Artificial Sequence
  Description of Artificial Sequence: Synthetic oligonucleotide
  Antisense strand to SEQ ID NO: 1956470
acucucaacgcccuagauu

SEQ ID NO: 1956472 - RNA, 19 nt, Artificial Sequence
  Description of Artificial Sequence: Synthetic oligonucleotide
  Sense strand starting at position 2987 of SEQ ID NO: 1880294
acuagauguaagcagaguu

SEQ ID NO: 1956473 - RNA, 19 nt, Artificial Sequence
  Description of Artificial Sequence: Synthetic oligonucleotide
  Antisense strand to SEQ ID NO: 1956472
aacucugcuuacaucuagu

SEQ ID NO: 1956474 - RNA, 19 nt, Artificial Sequence
  Description of Artificial Sequence: Synthetic oligonucleotide
  Sense strand starting at position 3090 of SEQ ID NO: 1880294
agaaucauuuccugggcca

SEQ ID NO: 1956475 - RNA, 19 nt, Artificial Sequence
  Description of Artificial Sequence: Synthetic oligonucleotide
  Antisense strand to SEQ ID NO: 1956474
uggcccaggaaaugauucu

SEQ ID NO: 1956476 - RNA, 19 nt, Artificial Sequence
  Description of Artificial Sequence: Synthetic oligonucleotide
  Sense strand starting at position 3339 of SEQ ID NO: 1880294
gaucauccagccuagguaa

SEQ ID NO: 1956477 - RNA, 19 nt, Artificial Sequence
  Description of Artificial Sequence: Synthetic oligonucleotide
  Antisense strand to SEQ ID NO: 1956476
uuaccuaggcuggaugauc

SEQ ID NO: 1956478 - RNA, 19 nt, Artificial Sequence
  Description of Artificial Sequence: Synthetic oligonucleotide
  Sense strand starting at position 3386 of SEQ ID NO: 1880294
augucauuuccuggguggu

SEQ ID NO: 1956479 - RNA, 19 nt, Artificial Sequence
  Description of Artificial Sequence: Synthetic oligonucleotide
  Antisense strand to SEQ ID NO: 1956478
accacccaggaaaugacau

SEQ ID NO: 1956480 - RNA, 19 nt, Artificial Sequence
  Description of Artificial Sequence: Synthetic oligonucleotide
  Sense strand starting at position 3446 of SEQ ID NO: 1880294
uuguguaccuuccuaggga

SEQ ID NO: 1956481 - RNA, 19 nt, Artificial Sequence
  Description of Artificial Sequence: Synthetic oligonucleotide
  Antisense strand to SEQ ID NO: 1956480
ucccuaggaagguacacaa

SEQ ID NO: 1956482 - RNA, 19 nt, Artificial Sequence
  Description of Artificial Sequence: Synthetic oligonucleotide
  Sense strand starting at position 3596 of SEQ ID NO: 1880294
gucugucuccuggagcuua

SEQ ID NO: 1956483 - RNA, 19 nt, Artificial Sequence
  Description of Artificial Sequence: Synthetic oligonucleotide
  Antisense strand to SEQ ID NO: 1956482
uaagcuccaggagacagac

SEQ ID NO: 1956484 - RNA, 19 nt, Artificial Sequence
  Description of Artificial Sequence: Synthetic oligonucleotide
  Sense strand starting at position 3663 of SEQ ID NO: 1880294
aauuaagaugagugcuaag

SEQ ID NO: 1956485 - RNA, 19 nt, Artificial Sequence
  Description of Artificial Sequence: Synthetic oligonucleotide
  Antisense strand to SEQ ID NO: 1956484
cuuagcacucaucuuaauu

SEQ ID NO: 1956486 - RNA, 19 nt, Artificial Sequence
  Description of Artificial Sequence: Synthetic oligonucleotide
  Sense strand starting at position 3768 of SEQ ID NO: 1880294
acagaagacuuggauguga

SEQ ID NO: 1956487 - RNA, 19 nt, Artificial Sequence
  Description of Artificial Sequence: Synthetic oligonucleotide
  Antisense strand to SEQ ID NO: 1956486
ucacauccaagucuucugu

SEQ ID NO: 1956488 - RNA, 19 nt, Artificial Sequence
  Description of Artificial Sequence: Synthetic oligonucleotide
  Sense strand starting at position 3788 of SEQ ID NO: 1880294
aagccagcgcucugaagaa

SEQ ID NO: 1956489 - RNA, 19 nt, Artificial Sequence
  Description of Artificial Sequence: Synthetic oligonucleotide
  Antisense strand to SEQ ID NO: 1956488
uucuucagagcgcuggcuu

SEQ ID NO: 1956490 - RNA, 19 nt, Artificial Sequence
  Description of Artificial Sequence: Synthetic oligonucleotide
  Sense strand starting at position 3896 of SEQ ID NO: 1880294
ggcaaugaguguucucuac

SEQ ID NO: 1956491 - RNA, 19 nt, Artificial Sequence
  Description of Artificial Sequence: Synthetic oligonucleotide
  Antisense strand to SEQ ID NO: 1956490
guagagaacacucauugcc

SEQ ID NO: 1956492 - RNA, 19 nt, Artificial Sequence
  Description of Artificial Sequence: Synthetic oligonucleotide
  Sense strand starting at position 3900 of SEQ ID NO: 1880294
augaguguucucuacauua

SEQ ID NO: 1956493 - RNA, 19 nt, Artificial Sequence
  Description of Artificial Sequence: Synthetic oligonucleotide
  Antisense strand to SEQ ID NO: 1956492
uaauguagagaacacucau

SEQ ID NO: 1956494 - RNA, 19 nt, Artificial Sequence
  Description of Artificial Sequence: Synthetic oligonucleotide
  Sense strand starting at position 3902 of SEQ ID NO: 1880294
gaguguucucuacauuagg

SEQ ID NO: 1956495 - RNA, 19 nt, Artificial Sequence
  Description of Artificial Sequence: Synthetic oligonucleotide
  Antisense strand to SEQ ID NO: 1956494
ccuaauguagagaacacuc

SEQ ID NO: 1956496 - RNA, 19 nt, Artificial Sequence
  Description of Artificial Sequence: Synthetic oligonucleotide
  Sense strand starting at position 312 of SEQ ID NO: 1880295
ggacgaguggacuauacuu

SEQ ID NO: 1956497 - RNA, 19 nt, Artificial Sequence
  Description of Artificial Sequence: Synthetic oligonucleotide
  Antisense strand to SEQ ID NO: 1956496
aaguauaguccacucgucc

SEQ ID NO: 1956498 - RNA, 19 nt, Artificial Sequence
  Description of Artificial Sequence: Synthetic oligonucleotide
  Sense strand starting at position 320 of SEQ ID NO: 1880295
ggacuauacuuucugcaac

SEQ ID NO: 1956499 - RNA, 19 nt, Artificial Sequence
  Description of Artificial Sequence: Synthetic oligonucleotide
  Antisense strand to SEQ ID NO: 1956498
guugcagaaaguauagucc

SEQ ID NO: 1956500 - RNA, 19 nt, Artificial Sequence
  Description of Artificial Sequence: Synthetic oligonucleotide
  Sense strand starting at position 336 of SEQ ID NO: 1880295
aacagaacuccgugcacua

SEQ ID NO: 1956501 - RNA, 19 nt, Artificial Sequence
  Description of Artificial Sequence: Synthetic oligonucleotide
  Antisense strand to SEQ ID NO: 1956500
uagugcacggaguucuguu

SEQ ID NO: 1956502 - RNA, 19 nt, Artificial Sequence
  Description of Artificial Sequence: Synthetic oligonucleotide
  Sense strand starting at position 441 of SEQ ID NO: 1880295
ccucaagauucuguguaga

SEQ ID NO: 1956503 - RNA, 19 nt, Artificial Sequence
  Description of Artificial Sequence: Synthetic oligonucleotide
  Antisense strand to SEQ ID NO: 1956502
ucuacacagaaucuugagg

SEQ ID NO: 1956504 - RNA, 19 nt, Artificial Sequence
  Description of Artificial Sequence: Synthetic oligonucleotide
  Sense strand starting at position 443 of SEQ ID NO: 1880295
ucaagauucuguguagagg

SEQ ID NO: 1956505 - RNA, 19 nt, Artificial Sequence
  Description of Artificial Sequence: Synthetic oligonucleotide
  Antisense strand to SEQ ID NO: 1956504
ccucuacacagaaucuuga

SEQ ID NO: 1956506 - RNA, 19 nt, Artificial Sequence
  Description of Artificial Sequence: Synthetic oligonucleotide
  Sense strand starting at position 491 of SEQ ID NO: 1880295
gaugaaggccauugaacau

SEQ ID NO: 1956507 - RNA, 19 nt, Artificial Sequence
  Description of Artificial Sequence: Synthetic oligonucleotide
  Antisense strand to SEQ ID NO: 1956506
auguucaauggccuucauc

SEQ ID NO: 1956508 - RNA, 19 nt, Artificial Sequence
  Description of Artificial Sequence: Synthetic oligonucleotide
  Sense strand starting at position 773 of SEQ ID NO: 1880295
gggcuuagcgcgagggaaa

SEQ ID NO: 1956509 - RNA, 19 nt, Artificial Sequence
  Description of Artificial Sequence: Synthetic oligonucleotide
  Antisense strand to SEQ ID NO: 1956508
uuucccucgcgcuaagccc

SEQ ID NO: 1956510 - RNA, 19 nt, Artificial Sequence
  Description of Artificial Sequence: Synthetic oligonucleotide
  Sense strand starting at position 2531 of SEQ ID NO: 1880295
gccucauggugagugaaau

SEQ ID NO: 1956511 - RNA, 19 nt, Artificial Sequence
  Description of Artificial Sequence: Synthetic oligonucleotide
  Antisense strand to SEQ ID NO: 1956510
auuucacucaccaugaggc

SEQ ID NO: 1956512 - RNA, 19 nt, Artificial Sequence
  Description of Artificial Sequence: Synthetic oligonucleotide
  Sense strand starting at position 2532 of SEQ ID NO: 1880295
ccucauggugagugaaaug

SEQ ID NO: 1956513 - RNA, 19 nt, Artificial Sequence
  Description of Artificial Sequence: Synthetic oligonucleotide
  Antisense strand to SEQ ID NO: 1956512
cauuucacucaccaugagg

SEQ ID NO: 1956514 - RNA, 19 nt, Artificial Sequence
  Description of Artificial Sequence: Synthetic oligonucleotide
  Sense strand starting at position 2719 of SEQ ID NO: 1880295
acaggaagcuuucuccgaa

SEQ ID NO: 1956515 - RNA, 19 nt, Artificial Sequence
  Description of Artificial Sequence: Synthetic oligonucleotide
  Antisense strand to SEQ ID NO: 1956514
uucggagaaagcuuccugu

SEQ ID NO: 1956516 - RNA, 19 nt, Artificial Sequence
  Description of Artificial Sequence: Synthetic oligonucleotide
  Sense strand starting at position 2720 of SEQ ID NO: 1880295
caggaagcuuucuccgaaa

SEQ ID NO: 1956517 - RNA, 19 nt, Artificial Sequence
  Description of Artificial Sequence: Synthetic oligonucleotide
  Antisense strand to SEQ ID NO: 1956516
uuucggagaaagcuuccug

SEQ ID NO: 1956518 - RNA, 19 nt, Artificial Sequence
  Description of Artificial Sequence: Synthetic oligonucleotide
  Sense strand starting at position 2722 of SEQ ID NO: 1880295
ggaagcuuucuccgaaagg

SEQ ID NO: 1956519 - RNA, 19 nt, Artificial Sequence
  Description of Artificial Sequence: Synthetic oligonucleotide
  Antisense strand to SEQ ID NO: 1956518
ccuuucggagaaagcuucc

SEQ ID NO: 1956520 - RNA, 19 nt, Artificial Sequence
  Description of Artificial Sequence: Synthetic oligonucleotide
  Sense strand starting at position 2770 of SEQ ID NO: 1880295
acucgagauggugggauau

SEQ ID NO: 1956521 - RNA, 19 nt, Artificial Sequence
  Description of Artificial Sequence: Synthetic oligonucleotide
  Antisense strand to SEQ ID NO: 1956520
auaucccaccaucucgagu

SEQ ID NO: 1956522 - RNA, 19 nt, Artificial Sequence
  Description of Artificial Sequence: Synthetic oligonucleotide
  Sense strand starting at position 2834 of SEQ ID NO: 1880295
augugagacccuggaaguu

SEQ ID NO: 1956523 - RNA, 19 nt, Artificial Sequence
  Description of Artificial Sequence: Synthetic oligonucleotide
  Antisense strand to SEQ ID NO: 1956522
aacuuccagggucucacau

SEQ ID NO: 1956524 - RNA, 19 nt, Artificial Sequence
  Description of Artificial Sequence: Synthetic oligonucleotide
  Sense strand starting at position 2859 of SEQ ID NO: 1880295
gggcuuggccuagacagau

SEQ ID NO: 1956525 - RNA, 19 nt, Artificial Sequence
  Description of Artificial Sequence: Synthetic oligonucleotide
  Antisense strand to SEQ ID NO: 1956524
aucugucuaggccaagccc

SEQ ID NO: 1956526 - RNA, 19 nt, Artificial Sequence
  Description of Artificial Sequence: Synthetic oligonucleotide
  Sense strand starting at position 2869 of SEQ ID NO: 1880295
uagacagaugcguggugaa

SEQ ID NO: 1956527 - RNA, 19 nt, Artificial Sequence
  Description of Artificial Sequence: Synthetic oligonucleotide
  Antisense strand to SEQ ID NO: 1956526
uucaccacgcaucugucua

SEQ ID NO: 1956528 - RNA, 19 nt, Artificial Sequence
  Description of Artificial Sequence: Synthetic oligonucleotide
  Sense strand starting at position 3054 of SEQ ID NO: 1880295
ggagauaauuaggugguuu

SEQ ID NO: 1956529 - RNA, 19 nt, Artificial Sequence
  Description of Artificial Sequence: Synthetic oligonucleotide
  Antisense strand to SEQ ID NO: 1956528
aaaccaccuaauuaucucc

SEQ ID NO: 1956530 - RNA, 19 nt, Artificial Sequence
  Description of Artificial Sequence: Synthetic oligonucleotide
  Sense strand starting at position 3092 of SEQ ID NO: 1880295
auggacucaucgguaaaga

SEQ ID NO: 1956531 - RNA, 19 nt, Artificial Sequence
  Description of Artificial Sequence: Synthetic oligonucleotide
  Antisense strand to SEQ ID NO: 1956530
ucuuuaccgaugaguccau

SEQ ID NO: 1956532 - RNA, 19 nt, Artificial Sequence
  Description of Artificial Sequence: Synthetic oligonucleotide
  Sense strand starting at position 3105 of SEQ ID NO: 1880295
uaaagaaaguaguugucuu

SEQ ID NO: 1956533 - RNA, 19 nt, Artificial Sequence
  Description of Artificial Sequence: Synthetic oligonucleotide
  Antisense strand to SEQ ID NO: 1956532
aagacaacuacuuucuuua

SEQ ID NO: 1956534 - RNA, 19 nt, Artificial Sequence
  Description of Artificial Sequence: Synthetic oligonucleotide
  Sense strand starting at position 3144 of SEQ ID NO: 1880295
augaauuaguuguuugcau

SEQ ID NO: 1956535 - RNA, 19 nt, Artificial Sequence
  Description of Artificial Sequence: Synthetic oligonucleotide
  Antisense strand to SEQ ID NO: 1956534
augcaaacaacuaauucau

SEQ ID NO: 1956536 - RNA, 19 nt, Artificial Sequence
  Description of Artificial Sequence: Synthetic oligonucleotide
  Sense strand starting at position 3146 of SEQ ID NO: 1880295
gaauuaguuguuugcauuu

SEQ ID NO: 1956537 - RNA, 19 nt, Artificial Sequence
  Description of Artificial Sequence: Synthetic oligonucleotide
  Antisense strand to SEQ ID NO: 1956536
aaaugcaaacaacuaauuc

SEQ ID NO: 1956538 - RNA, 19 nt, Artificial Sequence
  Description of Artificial Sequence: Synthetic oligonucleotide
  Sense strand starting at position 3160 of SEQ ID NO: 1880295
cauuuaguguccgugagug

SEQ ID NO: 1956539 - RNA, 19 nt, Artificial Sequence
  Description of Artificial Sequence: Synthetic oligonucleotide
  Antisense strand to SEQ ID NO: 1956538
cacucacggacacuaaaug

SEQ ID NO: 1956540 - RNA, 19 nt, Artificial Sequence
  Description of Artificial Sequence: Synthetic oligonucleotide
  Sense strand starting at position 3176 of SEQ ID NO: 1880295
gugacagaaccucagucuu

SEQ ID NO: 1956541 - RNA, 19 nt, Artificial Sequence
  Description of Artificial Sequence: Synthetic oligonucleotide
  Antisense strand to SEQ ID NO: 1956540
aagacugagguucugucac

SEQ ID NO: 1956542 - RNA, 19 nt, Artificial Sequence
  Description of Artificial Sequence: Synthetic oligonucleotide
  Sense strand starting at position 3228 of SEQ ID NO: 1880295
ugucuuaaagguuauguua

SEQ ID NO: 1956543 - RNA, 19 nt, Artificial Sequence
  Description of Artificial Sequence: Synthetic oligonucleotide
  Antisense strand to SEQ ID NO: 1956542
uaacauaaccuuuaagaca

SEQ ID NO: 1956544 - RNA, 19 nt, Artificial Sequence
  Description of Artificial Sequence: Synthetic oligonucleotide
  Sense strand starting at position 3247 of SEQ ID NO: 1880295
ggaaauaaguuuguuagga

SEQ ID NO: 1956545 - RNA, 19 nt, Artificial Sequence
  Description of Artificial Sequence: Synthetic oligonucleotide
  Antisense strand to SEQ ID NO: 1956544
uccuaacaaacuuauuucc

SEQ ID NO: 1956546 - RNA, 19 nt, Artificial Sequence
  Description of Artificial Sequence: Synthetic oligonucleotide
  Sense strand starting at position 3248 of SEQ ID NO: 1880295
gaaauaaguuuguuaggag

SEQ ID NO: 1956547 - RNA, 19 nt, Artificial Sequence
  Description of Artificial Sequence: Synthetic oligonucleotide
  Antisense strand to SEQ ID NO: 1956546
cuccuaacaaacuuauuuc

SEQ ID NO: 1956548 - RNA, 19 nt, Artificial Sequence
  Description of Artificial Sequence: Synthetic oligonucleotide
  Sense strand starting at position 3255 of SEQ ID NO: 1880295
guuuguuaggagugaauug

SEQ ID NO: 1956549 - RNA, 19 nt, Artificial Sequence
  Description of Artificial Sequence: Synthetic oligonucleotide
  Antisense strand to SEQ ID NO: 1956548
caauucacuccuaacaaac

SEQ ID NO: 1956550 - RNA, 19 nt, Artificial Sequence
  Description of Artificial Sequence: Synthetic oligonucleotide
  Sense strand starting at position 3310 of SEQ ID NO: 1880295
cgacucucaccugaguuaa

SEQ ID NO: 1956551 - RNA, 19 nt, Artificial Sequence
  Description of Artificial Sequence: Synthetic oligonucleotide
  Antisense strand to SEQ ID NO: 1956550
uuaacucaggugagagucg

SEQ ID NO: 1956552 - RNA, 19 nt, Artificial Sequence
  Description of Artificial Sequence: Synthetic oligonucleotide
  Sense strand starting at position 3318 of SEQ ID NO: 1880295
accugaguuaauuggauag

SEQ ID NO: 1956553 - RNA, 19 nt, Artificial Sequence
  Description of Artificial Sequence: Synthetic oligonucleotide
  Antisense strand to SEQ ID NO: 1956552
cuauccaauuaacucaggu

SEQ ID NO: 1956554 - RNA, 19 nt, Artificial Sequence
  Description of Artificial Sequence: Synthetic oligonucleotide
  Sense strand starting at position 3324 of SEQ ID NO: 1880295
guuaauuggauagagcauu

SEQ ID NO: 1956555 - RNA, 19 nt, Artificial Sequence
  Description of Artificial Sequence: Synthetic oligonucleotide
  Antisense strand to SEQ ID NO: 1956554
aaugcucuauccaauuaac

SEQ ID NO: 1956556 - RNA, 19 nt, Artificial Sequence
  Description of Artificial Sequence: Synthetic oligonucleotide
  Sense strand starting at position 3456 of SEQ ID NO: 1880295
auguguauccuccaagcuu

SEQ ID NO: 1956557 - RNA, 19 nt, Artificial Sequence
  Description of Artificial Sequence: Synthetic oligonucleotide
  Antisense strand to SEQ ID NO: 1956556
aagcuuggaggauacacau

SEQ ID NO: 1956558 - RNA, 19 nt, Artificial Sequence
  Description of Artificial Sequence: Synthetic oligonucleotide
  Sense strand starting at position 3482 of SEQ ID NO: 1880295
caauuaguagcugguuaag

SEQ ID NO: 1956559 - RNA, 19 nt, Artificial Sequence
  Description of Artificial Sequence: Synthetic oligonucleotide
  Antisense strand to SEQ ID NO: 1956558
cuuaaccagcuacuaauug

SEQ ID NO: 1956560 - RNA, 19 nt, Artificial Sequence
  Description of Artificial Sequence: Synthetic oligonucleotide
  Sense strand starting at position 3632 of SEQ ID NO: 1880295
gguauagacuaauccaaug

SEQ ID NO: 1956561 - RNA, 19 nt, Artificial Sequence
  Description of Artificial Sequence: Synthetic oligonucleotide
  Antisense strand to SEQ ID NO: 1956560
cauuggauuagucuauacc

SEQ ID NO: 1956562 - RNA, 19 nt, Artificial Sequence
  Description of Artificial Sequence: Synthetic oligonucleotide
  Sense strand starting at position 3637 of SEQ ID NO: 1880295
agacuaauccaaugauguu

SEQ ID NO: 1956563 - RNA, 19 nt, Artificial Sequence
  Description of Artificial Sequence: Synthetic oligonucleotide
  Antisense strand to SEQ ID NO: 1956562
aacaucauuggauuagucu

SEQ ID NO: 1956564 - RNA, 19 nt, Artificial Sequence
  Description of Artificial Sequence: Synthetic oligonucleotide
  Sense strand starting at position 3685 of SEQ ID NO: 1880295
ucagauaacugaucuguug

SEQ ID NO: 1956565 - RNA, 19 nt, Artificial Sequence
  Description of Artificial Sequence: Synthetic oligonucleotide
  Antisense strand to SEQ ID NO: 1956564
caacagaucaguuaucuga

SEQ ID NO: 1956566 - RNA, 19 nt, Artificial Sequence
  Description of Artificial Sequence: Synthetic oligonucleotide
  Sense strand starting at position 3688 of SEQ ID NO: 1880295
gauaacugaucuguugaaa

SEQ ID NO: 1956567 - RNA, 19 nt, Artificial Sequence
  Description of Artificial Sequence: Synthetic oligonucleotide
  Antisense strand to SEQ ID NO: 1956566
uuucaacagaucaguuauc

SEQ ID NO: 1956568 - RNA, 19 nt, Artificial Sequence
  Description of Artificial Sequence: Synthetic oligonucleotide
  Sense strand starting at position 3943 of SEQ ID NO: 1880295
ugccucagguauucuauca

SEQ ID NO: 1956569 - RNA, 19 nt, Artificial Sequence
  Description of Artificial Sequence: Synthetic oligonucleotide
  Antisense strand to SEQ ID NO: 1956568
ugauagaauaccugaggca

SEQ ID NO: 1956570 - RNA, 19 nt, Artificial Sequence
  Description of Artificial Sequence: Synthetic oligonucleotide
  Sense strand starting at position 3968 of SEQ ID NO: 1880295
cagaaucuaggucaguagu

SEQ ID NO: 1956571 - RNA, 19 nt, Artificial Sequence
  Description of Artificial Sequence: Synthetic oligonucleotide
  Antisense strand to SEQ ID NO: 1956570
acuacugaccuagauucug

SEQ ID NO: 1956572 - RNA, 19 nt, Artificial Sequence
  Description of Artificial Sequence: Synthetic oligonucleotide
  Sense strand starting at position 3970 of SEQ ID NO: 1880295
gaaucuaggucaguaguua

SEQ ID NO: 1956573 - RNA, 19 nt, Artificial Sequence
  Description of Artificial Sequence: Synthetic oligonucleotide
  Antisense strand to SEQ ID NO: 1956572
uaacuacugaccuagauuc

SEQ ID NO: 1956574 - RNA, 19 nt, Artificial Sequence
  Description of Artificial Sequence: Synthetic oligonucleotide
  Sense strand starting at position 3971 of SEQ ID NO: 1880295
aaucuaggucaguaguuau

SEQ ID NO: 1956575 - RNA, 19 nt, Artificial Sequence
  Description of Artificial Sequence: Synthetic oligonucleotide
  Antisense strand to SEQ ID NO: 1956574
auaacuacugaccuagauu

SEQ ID NO: 1956576 - RNA, 19 nt, Artificial Sequence
  Description of Artificial Sequence: Synthetic oligonucleotide
  Sense strand starting at position 3 of SEQ ID NO: 1880296
ucaguaggucaagaagcuu

SEQ ID NO: 1956577 - RNA, 19 nt, Artificial Sequence
  Description of Artificial Sequence: Synthetic oligonucleotide
  Antisense strand to SEQ ID NO: 1956576
aagcuucuugaccuacuga

SEQ ID NO: 1956578 - RNA, 19 nt, Artificial Sequence
  Description of Artificial Sequence: Synthetic oligonucleotide
  Sense strand starting at position 9 of SEQ ID NO: 1880296
ggucaagaagcuugaacau

SEQ ID NO: 1956579 - RNA, 19 nt, Artificial Sequence
  Description of Artificial Sequence: Synthetic oligonucleotide
  Antisense strand to SEQ ID NO: 1956578
auguucaagcuucuugacc

SEQ ID NO: 1956580 - RNA, 19 nt, Artificial Sequence
  Description of Artificial Sequence: Synthetic oligonucleotide
  Sense strand starting at position 18 of SEQ ID NO: 1880296
gcuugaacauguuuggaau

SEQ ID NO: 1956581 - RNA, 19 nt, Artificial Sequence
  Description of Artificial Sequence: Synthetic oligonucleotide
  Antisense strand to SEQ ID NO: 1956580
auuccaaacauguucaagc

SEQ ID NO: 1956582 - RNA, 19 nt, Artificial Sequence
  Description of Artificial Sequence: Synthetic oligonucleotide
  Sense strand starting at position 19 of SEQ ID NO: 1880296
cuugaacauguuuggaaua

SEQ ID NO: 1956583 - RNA, 19 nt, Artificial Sequence
  Description of Artificial Sequence: Synthetic oligonucleotide
  Antisense strand to SEQ ID NO: 1956582
uauuccaaacauguucaag

SEQ ID NO: 1956584 - RNA, 19 nt, Artificial Sequence
  Description of Artificial Sequence: Synthetic oligonucleotide
  Sense strand starting at position 264 of SEQ ID NO: 1880296
uccauucuguuagugucaa

SEQ ID NO: 1956585 - RNA, 19 nt, Artificial Sequence
  Description of Artificial Sequence: Synthetic oligonucleotide
  Antisense strand to SEQ ID NO: 1956584
uugacacuaacagaaugga

SEQ ID NO: 1956586 - RNA, 19 nt, Artificial Sequence
  Description of Artificial Sequence: Synthetic oligonucleotide
  Sense strand starting at position 507 of SEQ ID NO: 1880296
acgugucaauuccuuuaaa

SEQ ID NO: 1956587 - RNA, 19 nt, Artificial Sequence
  Description of Artificial Sequence: Synthetic oligonucleotide
  Antisense strand to SEQ ID NO: 1956586
uuuaaaggaauugacacgu

SEQ ID NO: 1956588 - RNA, 19 nt, Artificial Sequence
  Description of Artificial Sequence: Synthetic oligonucleotide
  Sense strand starting at position 535 of SEQ ID NO: 1880296
aucugugcuuagcuuuaua

SEQ ID NO: 1956589 - RNA, 19 nt, Artificial Sequence
  Description of Artificial Sequence: Synthetic oligonucleotide
  Antisense strand to SEQ ID NO: 1956588
uauaaagcuaagcacagau

SEQ ID NO: 1956590 - RNA, 19 nt, Artificial Sequence
  Description of Artificial Sequence: Synthetic oligonucleotide
  Sense strand starting at position 538 of SEQ ID NO: 1880296
ugugcuuagcuuuauaaug

SEQ ID NO: 1956591 - RNA, 19 nt, Artificial Sequence
  Description of Artificial Sequence: Synthetic oligonucleotide
  Antisense strand to SEQ ID NO: 1956590
cauuauaaagcuaagcaca

SEQ ID NO: 1956592 - RNA, 19 nt, Artificial Sequence
  Description of Artificial Sequence: Synthetic oligonucleotide
  Sense strand starting at position 602 of SEQ ID NO: 1880296
ucaccagcgucuuuaaaug

SEQ ID NO: 1956593 - RNA, 19 nt, Artificial Sequence
  Description of Artificial Sequence: Synthetic oligonucleotide
  Antisense strand to SEQ ID NO: 1956592
cauuuaaagacgcugguga

SEQ ID NO: 1956594 - RNA, 19 nt, Artificial Sequence
  Description of Artificial Sequence: Synthetic oligonucleotide
  Sense strand starting at position 626 of SEQ ID NO: 1880296
uuugcaacugcaugacuau

SEQ ID NO: 1956595 - RNA, 19 nt, Artificial Sequence
  Description of Artificial Sequence: Synthetic oligonucleotide
  Antisense strand to SEQ ID NO: 1956594
auagucaugcaguugcaaa

SEQ ID NO: 1956596 - RNA, 19 nt, Artificial Sequence
  Description of Artificial Sequence: Synthetic oligonucleotide
  Sense strand starting at position 660 of SEQ ID NO: 1880296
uuuguaauauagucccaua

SEQ ID NO: 1956597 - RNA, 19 nt, Artificial Sequence
  Description of Artificial Sequence: Synthetic oligonucleotide
  Antisense strand to SEQ ID NO: 1956596
uaugggacuauauuacaaa

SEQ ID NO: 1956598 - RNA, 19 nt, Artificial Sequence
  Description of Artificial Sequence: Synthetic oligonucleotide
  Sense strand starting at position 759 of SEQ ID NO: 1880296
cgacgugcuccuucuguga

SEQ ID NO: 1956599 - RNA, 19 nt, Artificial Sequence
  Description of Artificial Sequence: Synthetic oligonucleotide
  Antisense strand to SEQ ID NO: 1956598
ucacagaaggagcacgucg

SEQ ID NO: 1956600 - RNA, 19 nt, Artificial Sequence
  Description of Artificial Sequence: Synthetic oligonucleotide
  Sense strand starting at position 766 of SEQ ID NO: 1880296
cuccuucugugaccugaaa

SEQ ID NO: 1956601 - RNA, 19 nt, Artificial Sequence
  Description of Artificial Sequence: Synthetic oligonucleotide
  Antisense strand to SEQ ID NO: 1956600
uuucaggucacagaaggag

SEQ ID NO: 1956602 - RNA, 19 nt, Artificial Sequence
  Description of Artificial Sequence: Synthetic oligonucleotide
  Sense strand starting at position 850 of SEQ ID NO: 1880296
gaucucuccugccuggaga

SEQ ID NO: 1956603 - RNA, 19 nt, Artificial Sequence
  Description of Artificial Sequence: Synthetic oligonucleotide
  Antisense strand to SEQ ID NO: 1956602
ucuccaggcaggagagauc

SEQ ID NO: 1956604 - RNA, 19 nt, Artificial Sequence
  Description of Artificial Sequence: Synthetic oligonucleotide
  Sense strand starting at position 995 of SEQ ID NO: 1880296
cugagaguaagcuggaguu

SEQ ID NO: 1956605 - RNA, 19 nt, Artificial Sequence
  Description of Artificial Sequence: Synthetic oligonucleotide
  Antisense strand to SEQ ID NO: 1956604
aacuccagcuuacucucag

SEQ ID NO: 1956606 - RNA, 19 nt, Artificial Sequence
  Description of Artificial Sequence: Synthetic oligonucleotide
  Sense strand starting at position 1046 of SEQ ID NO: 1880296
aggguuugacaccgcagaa

SEQ ID NO: 1956607 - RNA, 19 nt, Artificial Sequence
  Description of Artificial Sequence: Synthetic oligonucleotide
  Antisense strand to SEQ ID NO: 1956606
uucugcggugucaaacccu

SEQ ID NO: 1956608 - RNA, 19 nt, Artificial Sequence
  Description of Artificial Sequence: Synthetic oligonucleotide
  Sense strand starting at position 1159 of SEQ ID NO: 1880296
gacagcagaucguucgaau

SEQ ID NO: 1956609 - RNA, 19 nt, Artificial Sequence
  Description of Artificial Sequence: Synthetic oligonucleotide
  Antisense strand to SEQ ID NO: 1956608
auucgaacgaucugcuguc

SEQ ID NO: 1956610 - RNA, 19 nt, Artificial Sequence
  Description of Artificial Sequence: Synthetic oligonucleotide
  Sense strand starting at position 1644 of SEQ ID NO: 1880296
ggguguucaccauggucca

SEQ ID NO: 1956611 - RNA, 19 nt, Artificial Sequence
  Description of Artificial Sequence: Synthetic oligonucleotide
  Antisense strand to SEQ ID NO: 1956610
uggaccauggugaacaccc

SEQ ID NO: 1956612 - RNA, 19 nt, Artificial Sequence
  Description of Artificial Sequence: Synthetic oligonucleotide
  Sense strand starting at position 2212 of SEQ ID NO: 1880296
gacuaaucaggacgaguuc

SEQ ID NO: 1956613 - RNA, 19 nt, Artificial Sequence
  Description of Artificial Sequence: Synthetic oligonucleotide
  Antisense strand to SEQ ID NO: 1956612
gaacucguccugauuaguc

SEQ ID NO: 1956614 - RNA, 19 nt, Artificial Sequence
  Description of Artificial Sequence: Synthetic oligonucleotide
  Sense strand starting at position 2369 of SEQ ID NO: 1880296
cgaggagcugacugggaau

SEQ ID NO: 1956615 - RNA, 19 nt, Artificial Sequence
  Description of Artificial Sequence: Synthetic oligonucleotide
  Antisense strand to SEQ ID NO: 1956614
auucccagucagcuccucg

SEQ ID NO: 1956616 - RNA, 19 nt, Artificial Sequence
  Description of Artificial Sequence: Synthetic oligonucleotide
  Sense strand starting at position 2450 of SEQ ID NO: 1880296
gaaugacagcugugauaaa

SEQ ID NO: 1956617 - RNA, 19 nt, Artificial Sequence
  Description of Artificial Sequence: Synthetic oligonucleotide
  Antisense strand to SEQ ID NO: 1956616
uuuaucacagcugucauuc

SEQ ID NO: 1956618 - RNA, 19 nt, Artificial Sequence
  Description of Artificial Sequence: Synthetic oligonucleotide
  Sense strand starting at position 2615 of SEQ ID NO: 1880296
aagaaugaguacccuguaa

SEQ ID NO: 1956619 - RNA, 19 nt, Artificial Sequence
  Description of Artificial Sequence: Synthetic oligonucleotide
  Antisense strand to SEQ ID NO: 1956618
uuacaggguacucauucuu

SEQ ID NO: 1956620 - RNA, 19 nt, Artificial Sequence
  Description of Artificial Sequence: Synthetic oligonucleotide
  Sense strand starting at position 2617 of SEQ ID NO: 1880296
gaaugaguacccuguaaga

SEQ ID NO: 1956621 - RNA, 19 nt, Artificial Sequence
  Description of Artificial Sequence: Synthetic oligonucleotide
  Antisense strand to SEQ ID NO: 1956620
ucuuacaggguacucauuc

SEQ ID NO: 1956622 - RNA, 19 nt, Artificial Sequence
  Description of Artificial Sequence: Synthetic oligonucleotide
  Sense strand starting at position 3136 of SEQ ID NO: 1880296
aaagcucugcuguaaagua

SEQ ID NO: 1956623 - RNA, 19 nt, Artificial Sequence
  Description of Artificial Sequence: Synthetic oligonucleotide
  Antisense strand to SEQ ID NO: 1956622
uacuuuacagcagagcuuu

SEQ ID NO: 1956624 - RNA, 19 nt, Artificial Sequence
  Description of Artificial Sequence: Synthetic oligonucleotide
  Sense strand starting at position 3141 of SEQ ID NO: 1880296
ucugcuguaaaguaggaau

SEQ ID NO: 1956625 - RNA, 19 nt, Artificial Sequence
  Description of Artificial Sequence: Synthetic oligonucleotide
  Antisense strand to SEQ ID NO: 1956624
auuccuacuuuacagcaga

SEQ ID NO: 1956626 - RNA, 19 nt, Artificial Sequence
  Description of Artificial Sequence: Synthetic oligonucleotide
  Sense strand starting at position 3143 of SEQ ID NO: 1880296
ugcuguaaaguaggaauua

SEQ ID NO: 1956627 - RNA, 19 nt, Artificial Sequence
  Description of Artificial Sequence: Synthetic oligonucleotide
  Antisense strand to SEQ ID NO: 1956626
uaauuccuacuuuacagca

SEQ ID NO: 1956628 - RNA, 19 nt, Artificial Sequence
  Description of Artificial Sequence: Synthetic oligonucleotide
  Sense strand starting at position 3190 of SEQ ID NO: 1880296
ccgggcuuacgccuguaau

SEQ ID NO: 1956629 - RNA, 19 nt, Artificial Sequence
  Description of Artificial Sequence: Synthetic oligonucleotide
  Antisense strand to SEQ ID NO: 1956628
auuacaggcguaagcccgg

SEQ ID NO: 1956630 - RNA, 19 nt, Artificial Sequence
  Description of Artificial Sequence: Synthetic oligonucleotide
  Sense strand starting at position 3506 of SEQ ID NO: 1880296
cuguuuauugggcaggagu

SEQ ID NO: 1956631 - RNA, 19 nt, Artificial Sequence
  Description of Artificial Sequence: Synthetic oligonucleotide
  Antisense strand to SEQ ID NO: 1956630
acuccugcccaauaaacag

SEQ ID NO: 1956632 - RNA, 19 nt, Artificial Sequence
  Description of Artificial Sequence: Synthetic oligonucleotide
  Sense strand starting at position 3508 of SEQ ID NO: 1880296
guuuauugggcaggaguuu

SEQ ID NO: 1956633 - RNA, 19 nt, Artificial Sequence
  Description of Artificial Sequence: Synthetic oligonucleotide
  Antisense strand to SEQ ID NO: 1956632
aaacuccugcccaauaaac

SEQ ID NO: 1956634 - RNA, 19 nt, Artificial Sequence
  Description of Artificial Sequence: Synthetic oligonucleotide
  Sense strand starting at position 3509 of SEQ ID NO: 1880296
uuuauugggcaggaguuua

SEQ ID NO: 1956635 - RNA, 19 nt, Artificial Sequence
  Description of Artificial Sequence: Synthetic oligonucleotide
  Antisense strand to SEQ ID NO: 1956634
uaaacuccugcccaauaaa

SEQ ID NO: 1956636 - RNA, 19 nt, Artificial Sequence
  Description of Artificial Sequence: Synthetic oligonucleotide
  Sense strand starting at position 3603 of SEQ ID NO: 1880296
agagcauucuggccaucua

SEQ ID NO: 1956637 - RNA, 19 nt, Artificial Sequence
  Description of Artificial Sequence: Synthetic oligonucleotide
  Antisense strand to SEQ ID NO: 1956636
uagauggccagaaugcucu

SEQ ID NO: 1956638 - RNA, 19 nt, Artificial Sequence
  Description of Artificial Sequence: Synthetic oligonucleotide
  Sense strand starting at position 3685 of SEQ ID NO: 1880296
caguauggauuccagaaua

SEQ ID NO: 1956639 - RNA, 19 nt, Artificial Sequence
  Description of Artificial Sequence: Synthetic oligonucleotide
  Antisense strand to SEQ ID NO: 1956638
uauucuggaauccauacug

SEQ ID NO: 1956640 - RNA, 19 nt, Artificial Sequence
  Description of Artificial Sequence: Synthetic oligonucleotide
  Sense strand starting at position 3759 of SEQ ID NO: 1880296
gccacuuagaguugauguc

SEQ ID NO: 1956641 - RNA, 19 nt, Artificial Sequence
  Description of Artificial Sequence: Synthetic oligonucleotide
  Antisense strand to SEQ ID NO: 1956640
gacaucaacucuaaguggc

SEQ ID NO: 1956642 - RNA, 19 nt, Artificial Sequence
  Description of Artificial Sequence: Synthetic oligonucleotide
  Sense strand starting at position 3765 of SEQ ID NO: 1880296
uagaguugaugucuuaaug

SEQ ID NO: 1956643 - RNA, 19 nt, Artificial Sequence
  Description of Artificial Sequence: Synthetic oligonucleotide
  Antisense strand to SEQ ID NO: 1956642
cauuaagacaucaacucua

SEQ ID NO: 1956644 - RNA, 19 nt, Artificial Sequence
  Description of Artificial Sequence: Synthetic oligonucleotide
  Sense strand starting at position 3773 of SEQ ID NO: 1880296
augucuuaaugggugggau

SEQ ID NO: 1956645 - RNA, 19 nt, Artificial Sequence
  Description of Artificial Sequence: Synthetic oligonucleotide
  Antisense strand to SEQ ID NO: 1956644
aucccacccauuaagacau

SEQ ID NO: 1956646 - RNA, 19 nt, Artificial Sequence
  Description of Artificial Sequence: Synthetic oligonucleotide
  Sense strand starting at position 3774 of SEQ ID NO: 1880296
ugucuuaaugggugggauu

SEQ ID NO: 1956647 - RNA, 19 nt, Artificial Sequence
  Description of Artificial Sequence: Synthetic oligonucleotide
  Antisense strand to SEQ ID NO: 1956646
aaucccacccauuaagaca

SEQ ID NO: 1956648 - RNA, 19 nt, Artificial Sequence
  Description of Artificial Sequence: Synthetic oligonucleotide
  Sense strand starting at position 3775 of SEQ ID NO: 1880296
gucuuaaugggugggauuc

SEQ ID NO: 1956649 - RNA, 19 nt, Artificial Sequence
  Description of Artificial Sequence: Synthetic oligonucleotide
  Antisense strand to SEQ ID NO: 1956648
gaaucccacccauuaagac

SEQ ID NO: 1956650 - RNA, 19 nt, Artificial Sequence
  Description of Artificial Sequence: Synthetic oligonucleotide
  Sense strand starting at position 3786 of SEQ ID NO: 1880296
ugggauuccucauaaugga

SEQ ID NO: 1956651 - RNA, 19 nt, Artificial Sequence
  Description of Artificial Sequence: Synthetic oligonucleotide
  Antisense strand to SEQ ID NO: 1956650
uccauuaugaggaauccca

SEQ ID NO: 1956652 - RNA, 19 nt, Artificial Sequence
  Description of Artificial Sequence: Synthetic oligonucleotide
  Sense strand starting at position 3824 of SEQ ID NO: 1880296
gggucaaguagcuaucaca

SEQ ID NO: 1956653 - RNA, 19 nt, Artificial Sequence
  Description of Artificial Sequence: Synthetic oligonucleotide
  Antisense strand to SEQ ID NO: 1956652
ugugauagcuacuugaccc

SEQ ID NO: 1956654 - RNA, 19 nt, Artificial Sequence
  Description of Artificial Sequence: Synthetic oligonucleotide
  Sense strand starting at position 3864 of SEQ ID NO: 1880296
uaucaauuccuguggaaag

SEQ ID NO: 1956655 - RNA, 19 nt, Artificial Sequence
  Description of Artificial Sequence: Synthetic oligonucleotide
  Antisense strand to SEQ ID NO: 1956654
cuuuccacaggaauugaua

SEQ ID NO: 1956656 - RNA, 19 nt, Artificial Sequence
  Description of Artificial Sequence: Synthetic oligonucleotide
  Sense strand starting at position 47 of SEQ ID NO: 1880297
acuuaauggcaguagcauu

SEQ ID NO: 1956657 - RNA, 19 nt, Artificial Sequence
  Description of Artificial Sequence: Synthetic oligonucleotide
  Antisense strand to SEQ ID NO: 1956656
aaugcuacugccauuaagu

SEQ ID NO: 1956658 - RNA, 19 nt, Artificial Sequence
  Description of Artificial Sequence: Synthetic oligonucleotide
  Sense strand starting at position 110 of SEQ ID NO: 1880297
caugguaaauuuggaagau

SEQ ID NO: 1956659 - RNA, 19 nt, Artificial Sequence
  Description of Artificial Sequence: Synthetic oligonucleotide
  Antisense strand to SEQ ID NO: 1956658
aucuuccaaauuuaccaug

SEQ ID NO: 1956660 - RNA, 19 nt, Artificial Sequence
  Description of Artificial Sequence: Synthetic oligonucleotide
  Sense strand starting at position 111 of SEQ ID NO: 1880297
augguaaauuuggaagauu

SEQ ID NO: 1956661 - RNA, 19 nt, Artificial Sequence
  Description of Artificial Sequence: Synthetic oligonucleotide
  Antisense strand to SEQ ID NO: 1956660
aaucuuccaaauuuaccau

SEQ ID NO: 1956662 - RNA, 19 nt, Artificial Sequence
  Description of Artificial Sequence: Synthetic oligonucleotide
  Sense strand starting at position 142 of SEQ ID NO: 1880297
uuuacacaucacgguaaau

SEQ ID NO: 1956663 - RNA, 19 nt, Artificial Sequence
  Description of Artificial Sequence: Synthetic oligonucleotide
  Antisense strand to SEQ ID NO: 1956662
auuuaccgugauguguaaa

SEQ ID NO: 1956664 - RNA, 19 nt, Artificial Sequence
  Description of Artificial Sequence: Synthetic oligonucleotide
  Sense strand starting at position 152 of SEQ ID NO: 1880297
acgguaaauuuggaagauu

SEQ ID NO: 1956665 - RNA, 19 nt, Artificial Sequence
  Description of Artificial Sequence: Synthetic oligonucleotide
  Antisense strand to SEQ ID NO: 1956664
aaucuuccaaauuuaccgu

SEQ ID NO: 1956666 - RNA, 19 nt, Artificial Sequence
  Description of Artificial Sequence: Synthetic oligonucleotide
  Sense strand starting at position 190 of SEQ ID NO: 1880297
agacgaggauucuuaacua

SEQ ID NO: 1956667 - RNA, 19 nt, Artificial Sequence
  Description of Artificial Sequence: Synthetic oligonucleotide
  Antisense strand to SEQ ID NO: 1956666
uaguuaagaauccucgucu

SEQ ID NO: 1956668 - RNA, 19 nt, Artificial Sequence
  Description of Artificial Sequence: Synthetic oligonucleotide
  Sense strand starting at position 382 of SEQ ID NO: 1880297
guguuuguacuuuaagaca

SEQ ID NO: 1956669 - RNA, 19 nt, Artificial Sequence
  Description of Artificial Sequence: Synthetic oligonucleotide
  Antisense strand to SEQ ID NO: 1956668
ugucuuaaaguacaaacac

SEQ ID NO: 1956670 - RNA, 19 nt, Artificial Sequence
  Description of Artificial Sequence: Synthetic oligonucleotide
  Sense strand starting at position 625 of SEQ ID NO: 1880297
ugugaccgucuccauaauu

SEQ ID NO: 1956671 - RNA, 19 nt, Artificial Sequence
  Description of Artificial Sequence: Synthetic oligonucleotide
  Antisense strand to SEQ ID NO: 1956670
aauuauggagacggucaca

SEQ ID NO: 1956672 - RNA, 19 nt, Artificial Sequence
  Description of Artificial Sequence: Synthetic oligonucleotide
  Sense strand starting at position 687 of SEQ ID NO: 1880297
auuagucaaucccuuagua

SEQ ID NO: 1956673 - RNA, 19 nt, Artificial Sequence
  Description of Artificial Sequence: Synthetic oligonucleotide
  Antisense strand to SEQ ID NO: 1956672
uacuaagggauugacuaau

SEQ ID NO: 1956674 - RNA, 19 nt, Artificial Sequence
  Description of Artificial Sequence: Synthetic oligonucleotide
  Sense strand starting at position 709 of SEQ ID NO: 1880297
guuaaauaauagccaggaa

SEQ ID NO: 1956675 - RNA, 19 nt, Artificial Sequence
  Description of Artificial Sequence: Synthetic oligonucleotide
  Antisense strand to SEQ ID NO: 1956674
uuccuggcuauuauuuaac

SEQ ID NO: 1956676 - RNA, 19 nt, Artificial Sequence
  Description of Artificial Sequence: Synthetic oligonucleotide
  Sense strand starting at position 740 of SEQ ID NO: 1880297
ccugaagguacauguaaag

SEQ ID NO: 1956677 - RNA, 19 nt, Artificial Sequence
  Description of Artificial Sequence: Synthetic oligonucleotide
  Antisense strand to SEQ ID NO: 1956676
cuuuacauguaccuucagg

SEQ ID NO: 1956678 - RNA, 19 nt, Artificial Sequence
  Description of Artificial Sequence: Synthetic oligonucleotide
  Sense strand starting at position 997 of SEQ ID NO: 1880297
gguuaaacgagcgaacaua

SEQ ID NO: 1956679 - RNA, 19 nt, Artificial Sequence
  Description of Artificial Sequence: Synthetic oligonucleotide
  Antisense strand to SEQ ID NO: 1956678
uauguucgcucguuuaacc

SEQ ID NO: 1956680 - RNA, 19 nt, Artificial Sequence
  Description of Artificial Sequence: Synthetic oligonucleotide
  Sense strand starting at position 1050 of SEQ ID NO: 1880297
ucccuagggcauugaugaa

SEQ ID NO: 1956681 - RNA, 19 nt, Artificial Sequence
  Description of Artificial Sequence: Synthetic oligonucleotide
  Antisense strand to SEQ ID NO: 1956680
uucaucaaugcccuaggga

SEQ ID NO: 1956682 - RNA, 19 nt, Artificial Sequence
  Description of Artificial Sequence: Synthetic oligonucleotide
  Sense strand starting at position 1251 of SEQ ID NO: 1880297
cuagguucuccacaccauu

SEQ ID NO: 1956683 - RNA, 19 nt, Artificial Sequence
  Description of Artificial Sequence: Synthetic oligonucleotide
  Antisense strand to SEQ ID NO: 1956682
aaugguguggagaaccuag

SEQ ID NO: 1956684 - RNA, 19 nt, Artificial Sequence
  Description of Artificial Sequence: Synthetic oligonucleotide
  Sense strand starting at position 1294 of SEQ ID NO: 1880297
cagggacccugauucuauu

SEQ ID NO: 1956685 - RNA, 19 nt, Artificial Sequence
  Description of Artificial Sequence: Synthetic oligonucleotide
  Antisense strand to SEQ ID NO: 1956684
aauagaaucagggucccug

SEQ ID NO: 1956686 - RNA, 19 nt, Artificial Sequence
  Description of Artificial Sequence: Synthetic oligonucleotide
  Sense strand starting at position 1364 of SEQ ID NO: 1880297
ccucaaucgcuugaauacu

SEQ ID NO: 1956687 - RNA, 19 nt, Artificial Sequence
  Description of Artificial Sequence: Synthetic oligonucleotide
  Antisense strand to SEQ ID NO: 1956686
aguauucaagcgauugagg

SEQ ID NO: 1956688 - RNA, 19 nt, Artificial Sequence
  Description of Artificial Sequence: Synthetic oligonucleotide
  Sense strand starting at position 1555 of SEQ ID NO: 1880297
uuuccucugccuuaggaaa

SEQ ID NO: 1956689 - RNA, 19 nt, Artificial Sequence
  Description of Artificial Sequence: Synthetic oligonucleotide
  Antisense strand to SEQ ID NO: 1956688
uuuccuaaggcagaggaaa

SEQ ID NO: 1956690 - RNA, 19 nt, Artificial Sequence
  Description of Artificial Sequence: Synthetic oligonucleotide
  Sense strand starting at position 1772 of SEQ ID NO: 1880297
ccauguuagcgccuucuuu

SEQ ID NO: 1956691 - RNA, 19 nt, Artificial Sequence
  Description of Artificial Sequence: Synthetic oligonucleotide
  Antisense strand to SEQ ID NO: 1956690
aaagaaggcgcuaacaugg

SEQ ID NO: 1956692 - RNA, 19 nt, Artificial Sequence
  Description of Artificial Sequence: Synthetic oligonucleotide
  Sense strand starting at position 1982 of SEQ ID NO: 1880297
gcgagaucggacugacaac

SEQ ID NO: 1956693 - RNA, 19 nt, Artificial Sequence
  Description of Artificial Sequence: Synthetic oligonucleotide
  Antisense strand to SEQ ID NO: 1956692
guugucaguccgaucucgc

SEQ ID NO: 1956694 - RNA, 19 nt, Artificial Sequence
  Description of Artificial Sequence: Synthetic oligonucleotide
  Sense strand starting at position 2708 of SEQ ID NO: 1880297
aucagaggccucugugaga

SEQ ID NO: 1956695 - RNA, 19 nt, Artificial Sequence
  Description of Artificial Sequence: Synthetic oligonucleotide
  Antisense strand to SEQ ID NO: 1956694
ucucacagaggccucugau

SEQ ID NO: 1956696 - RNA, 19 nt, Artificial Sequence
  Description of Artificial Sequence: Synthetic oligonucleotide
  Sense strand starting at position 2876 of SEQ ID NO: 1880297
gagaguuaaugagccugaa

SEQ ID NO: 1956697 - RNA, 19 nt, Artificial Sequence
  Description of Artificial Sequence: Synthetic oligonucleotide
  Antisense strand to SEQ ID NO: 1956696
uucaggcucauuaacucuc

SEQ ID NO: 1956698 - RNA, 19 nt, Artificial Sequence
  Description of Artificial Sequence: Synthetic oligonucleotide
  Sense strand starting at position 2879 of SEQ ID NO: 1880297
aguuaaugagccugaaguu

SEQ ID NO: 1956699 - RNA, 19 nt, Artificial Sequence
  Description of Artificial Sequence: Synthetic oligonucleotide
  Antisense strand to SEQ ID NO: 1956698
aacuucaggcucauuaacu

SEQ ID NO: 1956700 - RNA, 19 nt, Artificial Sequence
  Description of Artificial Sequence: Synthetic oligonucleotide
  Sense strand starting at position 2880 of SEQ ID NO: 1880297
guuaaugagccugaaguuc

SEQ ID NO: 1956701 - RNA, 19 nt, Artificial Sequence
  Description of Artificial Sequence: Synthetic oligonucleotide
  Antisense strand to SEQ ID NO: 1956700
gaacuucaggcucauuaac

SEQ ID NO: 1956702 - RNA, 19 nt, Artificial Sequence
  Description of Artificial Sequence: Synthetic oligonucleotide
  Sense strand starting at position 2927 of SEQ ID NO: 1880297
uuguaauggcauugacauu

SEQ ID NO: 1956703 - RNA, 19 nt, Artificial Sequence
  Description of Artificial Sequence: Synthetic oligonucleotide
  Antisense strand to SEQ ID NO: 1956702
aaugucaaugccauuacaa

SEQ ID NO: 1956704 - RNA, 19 nt, Artificial Sequence
  Description of Artificial Sequence: Synthetic oligonucleotide
  Sense strand starting at position 3082 of SEQ ID NO: 1880297
guaacaguaauguaguagu

SEQ ID NO: 1956705 - RNA, 19 nt, Artificial Sequence
  Description of Artificial Sequence: Synthetic oligonucleotide
  Antisense strand to SEQ ID NO: 1956704
acuacuacauuacuguuac

SEQ ID NO: 1956706 - RNA, 19 nt, Artificial Sequence
  Description of Artificial Sequence: Synthetic oligonucleotide
  Sense strand starting at position 3093 of SEQ ID NO: 1880297
guaguagugccauuguagu

SEQ ID NO: 1956707 - RNA, 19 nt, Artificial Sequence
  Description of Artificial Sequence: Synthetic oligonucleotide
  Antisense strand to SEQ ID NO: 1956706
acuacaauggcacuacuac

SEQ ID NO: 1956708 - RNA, 19 nt, Artificial Sequence
  Description of Artificial Sequence: Synthetic oligonucleotide
  Sense strand starting at position 3192 of SEQ ID NO: 1880297
cacaauuguuaggucuaga

SEQ ID NO: 1956709 - RNA, 19 nt, Artificial Sequence
  Description of Artificial Sequence: Synthetic oligonucleotide
  Antisense strand to SEQ ID NO: 1956708
ucuagaccuaacaauugug

SEQ ID NO: 1956710 - RNA, 19 nt, Artificial Sequence
  Description of Artificial Sequence: Synthetic oligonucleotide
  Sense strand starting at position 3195 of SEQ ID NO: 1880297
aauuguuaggucuagaacg

SEQ ID NO: 1956711 - RNA, 19 nt, Artificial Sequence
  Description of Artificial Sequence: Synthetic oligonucleotide
  Antisense strand to SEQ ID NO: 1956710
cguucuagaccuaacaauu

SEQ ID NO: 1956712 - RNA, 19 nt, Artificial Sequence
  Description of Artificial Sequence: Synthetic oligonucleotide
  Sense strand starting at position 3202 of SEQ ID NO: 1880297
aggucuagaacgcauugau

SEQ ID NO: 1956713 - RNA, 19 nt, Artificial Sequence
  Description of Artificial Sequence: Synthetic oligonucleotide
  Antisense strand to SEQ ID NO: 1956712
aucaaugcguucuagaccu

SEQ ID NO: 1956714 - RNA, 19 nt, Artificial Sequence
  Description of Artificial Sequence: Synthetic oligonucleotide
  Sense strand starting at position 3205 of SEQ ID NO: 1880297
ucuagaacgcauugauuaa

SEQ ID NO: 1956715 - RNA, 19 nt, Artificial Sequence
  Description of Artificial Sequence: Synthetic oligonucleotide
  Antisense strand to SEQ ID NO: 1956714
uuaaucaaugcguucuaga

SEQ ID NO: 1956716 - RNA, 19 nt, Artificial Sequence
  Description of Artificial Sequence: Synthetic oligonucleotide
  Sense strand starting at position 3296 of SEQ ID NO: 1880297
aaagaaguuugggucaauu

SEQ ID NO: 1956717 - RNA, 19 nt, Artificial Sequence
  Description of Artificial Sequence: Synthetic oligonucleotide
  Antisense strand to SEQ ID NO: 1956716
aauugacccaaacuucuuu

SEQ ID NO: 1956718 - RNA, 19 nt, Artificial Sequence
  Description of Artificial Sequence: Synthetic oligonucleotide
  Sense strand starting at position 3436 of SEQ ID NO: 1880297
guuaguuaucuacaugaug

SEQ ID NO: 1956719 - RNA, 19 nt, Artificial Sequence
  Description of Artificial Sequence: Synthetic oligonucleotide
  Antisense strand to SEQ ID NO: 1956718
caucauguagauaacuaac

SEQ ID NO: 1956720 - RNA, 19 nt, Artificial Sequence
  Description of Artificial Sequence: Synthetic oligonucleotide
  Sense strand starting at position 3439 of SEQ ID NO: 1880297
aguuaucuacaugaugcau

SEQ ID NO: 1956721 - RNA, 19 nt, Artificial Sequence
  Description of Artificial Sequence: Synthetic oligonucleotide
  Antisense strand to SEQ ID NO: 1956720
augcaucauguagauaacu

SEQ ID NO: 1956722 - RNA, 19 nt, Artificial Sequence
  Description of Artificial Sequence: Synthetic oligonucleotide
  Sense strand starting at position 3447 of SEQ ID NO: 1880297
acaugaugcauucgagaaa

SEQ ID NO: 1956723 - RNA, 19 nt, Artificial Sequence
  Description of Artificial Sequence: Synthetic oligonucleotide
  Antisense strand to SEQ ID NO: 1956722
uuucucgaaugcaucaugu

SEQ ID NO: 1956724 - RNA, 19 nt, Artificial Sequence
  Description of Artificial Sequence: Synthetic oligonucleotide
  Sense strand starting at position 3450 of SEQ ID NO: 1880297
ugaugcauucgagaaacac

SEQ ID NO: 1956725 - RNA, 19 nt, Artificial Sequence
  Description of Artificial Sequence: Synthetic oligonucleotide
  Antisense strand to SEQ ID NO: 1956724
guguuucucgaaugcauca

SEQ ID NO: 1956726 - RNA, 19 nt, Artificial Sequence
  Description of Artificial Sequence: Synthetic oligonucleotide
  Sense strand starting at position 3510 of SEQ ID NO: 1880297
aagaacuguuuagugauau

SEQ ID NO: 1956727 - RNA, 19 nt, Artificial Sequence
  Description of Artificial Sequence: Synthetic oligonucleotide
  Antisense strand to SEQ ID NO: 1956726
auaucacuaaacaguucuu

SEQ ID NO: 1956728 - RNA, 19 nt, Artificial Sequence
  Description of Artificial Sequence: Synthetic oligonucleotide
  Sense strand starting at position 3516 of SEQ ID NO: 1880297
uguuuagugauaugaacag

SEQ ID NO: 1956729 - RNA, 19 nt, Artificial Sequence
  Description of Artificial Sequence: Synthetic oligonucleotide
  Antisense strand to SEQ ID NO: 1956728
cuguucauaucacuaaaca

SEQ ID NO: 1956730 - RNA, 19 nt, Artificial Sequence
  Description of Artificial Sequence: Synthetic oligonucleotide
  Sense strand starting at position 3634 of SEQ ID NO: 1880297
ggaaacuaugccgaucugu

SEQ ID NO: 1956731 - RNA, 19 nt, Artificial Sequence
  Description of Artificial Sequence: Synthetic oligonucleotide
  Antisense strand to SEQ ID NO: 1956730
acagaucggcauaguuucc

SEQ ID NO: 1956732 - RNA, 19 nt, Artificial Sequence
  Description of Artificial Sequence: Synthetic oligonucleotide
  Sense strand starting at position 3802 of SEQ ID NO: 1880297
gucugauuccaugaacuug

SEQ ID NO: 1956733 - RNA, 19 nt, Artificial Sequence
  Description of Artificial Sequence: Synthetic oligonucleotide
  Antisense strand to SEQ ID NO: 1956732
caaguucauggaaucagac

SEQ ID NO: 1956734 - RNA, 19 nt, Artificial Sequence
  Description of Artificial Sequence: Synthetic oligonucleotide
  Sense strand starting at position 3939 of SEQ ID NO: 1880297
gcaggaaacuucuuguaga

SEQ ID NO: 1956735 - RNA, 19 nt, Artificial Sequence
  Description of Artificial Sequence: Synthetic oligonucleotide
  Antisense strand to SEQ ID NO: 1956734
ucuacaagaaguuuccugc

SEQ ID NO: 1956736 - RNA, 19 nt, Artificial Sequence
  Description of Artificial Sequence: Synthetic oligonucleotide
  Sense strand starting at position 25 of SEQ ID NO: 1880298
ccggcuuagagagacauua

SEQ ID NO: 1956737 - RNA, 19 nt, Artificial Sequence
  Description of Artificial Sequence: Synthetic oligonucleotide
  Antisense strand to SEQ ID NO: 1956736
uaaugucucucuaagccgg

SEQ ID NO: 1956738 - RNA, 19 nt, Artificial Sequence
  Description of Artificial Sequence: Synthetic oligonucleotide
  Sense strand starting at position 145 of SEQ ID NO: 1880298
augucagagcccugggaga

SEQ ID NO: 1956739 - RNA, 19 nt, Artificial Sequence
  Description of Artificial Sequence: Synthetic oligonucleotide
  Antisense strand to SEQ ID NO: 1956738
ucucccagggcucugacau

SEQ ID NO: 1956740 - RNA, 19 nt, Artificial Sequence
  Description of Artificial Sequence: Synthetic oligonucleotide
  Sense strand starting at position 202 of SEQ ID NO: 1880298
ucucccuauggcugucaua

SEQ ID NO: 1956741 - RNA, 19 nt, Artificial Sequence
  Description of Artificial Sequence: Synthetic oligonucleotide
  Antisense strand to SEQ ID NO: 1956740
uaugacagccauagggaga

SEQ ID NO: 1956742 - RNA, 19 nt, Artificial Sequence
  Description of Artificial Sequence: Synthetic oligonucleotide
  Sense strand starting at position 955 of SEQ ID NO: 1880298
uuccucuggcugugcuaaa

SEQ ID NO: 1956743 - RNA, 19 nt, Artificial Sequence
  Description of Artificial Sequence: Synthetic oligonucleotide
  Antisense strand to SEQ ID NO: 1956742
uuuagcacagccagaggaa

SEQ ID NO: 1956744 - RNA, 19 nt, Artificial Sequence
  Description of Artificial Sequence: Synthetic oligonucleotide
  Sense strand starting at position 1088 of SEQ ID NO: 1880298
accuuagccucagaaauga

SEQ ID NO: 1956745 - RNA, 19 nt, Artificial Sequence
  Description of Artificial Sequence: Synthetic oligonucleotide
  Antisense strand to SEQ ID NO: 1956744
ucauuucugaggcuaaggu

SEQ ID NO: 1956746 - RNA, 19 nt, Artificial Sequence
  Description of Artificial Sequence: Synthetic oligonucleotide
  Sense strand starting at position 1103 of SEQ ID NO: 1880298
augacauacuucucagggu

SEQ ID NO: 1956747 - RNA, 19 nt, Artificial Sequence
  Description of Artificial Sequence: Synthetic oligonucleotide
  Antisense strand to SEQ ID NO: 1956746
acccugagaaguaugucau

SEQ ID NO: 1956748 - RNA, 19 nt, Artificial Sequence
  Description of Artificial Sequence: Synthetic oligonucleotide
  Sense strand starting at position 1130 of SEQ ID NO: 1880298
ccucaagagucuuuccuga

SEQ ID NO: 1956749 - RNA, 19 nt, Artificial Sequence
  Description of Artificial Sequence: Synthetic oligonucleotide
  Antisense strand to SEQ ID NO: 1956748
ucaggaaagacucuugagg

SEQ ID NO: 1956750 - RNA, 19 nt, Artificial Sequence
  Description of Artificial Sequence: Synthetic oligonucleotide
  Sense strand starting at position 1132 of SEQ ID NO: 1880298
ucaagagucuuuccugaag

SEQ ID NO: 1956751 - RNA, 19 nt, Artificial Sequence
  Description of Artificial Sequence: Synthetic oligonucleotide
  Antisense strand to SEQ ID NO: 1956750
cuucaggaaagacucuuga

SEQ ID NO: 1956752 - RNA, 19 nt, Artificial Sequence
  Description of Artificial Sequence: Synthetic oligonucleotide
  Sense strand starting at position 1134 of SEQ ID NO: 1880298
aagagucuuuccugaagag

SEQ ID NO: 1956753 - RNA, 19 nt, Artificial Sequence
  Description of Artificial Sequence: Synthetic oligonucleotide
  Antisense strand to SEQ ID NO: 1956752
cucuucaggaaagacucuu

SEQ ID NO: 1956754 - RNA, 19 nt, Artificial Sequence
  Description of Artificial Sequence: Synthetic oligonucleotide
  Sense strand starting at position 1149 of SEQ ID NO: 1880298
agaggaccuuucuggucaa

SEQ ID NO: 1956755 - RNA, 19 nt, Artificial Sequence
  Description of Artificial Sequence: Synthetic oligonucleotide
  Antisense strand to SEQ ID NO: 1956754
uugaccagaaagguccucu

SEQ ID NO: 1956756 - RNA, 19 nt, Artificial Sequence
  Description of Artificial Sequence: Synthetic oligonucleotide
  Sense strand starting at position 1231 of SEQ ID NO: 1880298
ccuugacugggucagugua

SEQ ID NO: 1956757 - RNA, 19 nt, Artificial Sequence
  Description of Artificial Sequence: Synthetic oligonucleotide
  Antisense strand to SEQ ID NO: 1956756
uacacugacccagucaagg

SEQ ID NO: 1956758 - RNA, 19 nt, Artificial Sequence
  Description of Artificial Sequence: Synthetic oligonucleotide
  Sense strand starting at position 1265 of SEQ ID NO: 1880298
gugaauuuguggguucccu

SEQ ID NO: 1956759 - RNA, 19 nt, Artificial Sequence
  Description of Artificial Sequence: Synthetic oligonucleotide
  Antisense strand to SEQ ID NO: 1956758
agggaacccacaaauucac

SEQ ID NO: 1956760 - RNA, 19 nt, Artificial Sequence
  Description of Artificial Sequence: Synthetic oligonucleotide
  Sense strand starting at position 1373 of SEQ ID NO: 1880298
ugggauucccugggcuagu

SEQ ID NO: 1956761 - RNA, 19 nt, Artificial Sequence
  Description of Artificial Sequence: Synthetic oligonucleotide
  Antisense strand to SEQ ID NO: 1956760
acuagcccagggaauccca

SEQ ID NO: 1956762 - RNA, 19 nt, Artificial Sequence
  Description of Artificial Sequence: Synthetic oligonucleotide
  Sense strand starting at position 2061 of SEQ ID NO: 1880298
ggcccaauagugugcucua

SEQ ID NO: 1956763 - RNA, 19 nt, Artificial Sequence
  Description of Artificial Sequence: Synthetic oligonucleotide
  Antisense strand to SEQ ID NO: 1956762
uagagcacacuauugggcc

SEQ ID NO: 1956764 - RNA, 19 nt, Artificial Sequence
  Description of Artificial Sequence: Synthetic oligonucleotide
  Sense strand starting at position 2064 of SEQ ID NO: 1880298
ccaauagugugcucuacgu

SEQ ID NO: 1956765 - RNA, 19 nt, Artificial Sequence
  Description of Artificial Sequence: Synthetic oligonucleotide
  Antisense strand to SEQ ID NO: 1956764
acguagagcacacuauugg

SEQ ID NO: 1956766 - RNA, 19 nt, Artificial Sequence
  Description of Artificial Sequence: Synthetic oligonucleotide
  Sense strand starting at position 2290 of SEQ ID NO: 1880298
uaggcaagcucagugauuu

SEQ ID NO: 1956767 - RNA, 19 nt, Artificial Sequence
  Description of Artificial Sequence: Synthetic oligonucleotide
  Antisense strand to SEQ ID NO: 1956766
aaaucacugagcuugccua

SEQ ID NO: 1956768 - RNA, 19 nt, Artificial Sequence
  Description of Artificial Sequence: Synthetic oligonucleotide
  Sense strand starting at position 2702 of SEQ ID NO: 1880298
cguacuuccuguucaggua

SEQ ID NO: 1956769 - RNA, 19 nt, Artificial Sequence
  Description of Artificial Sequence: Synthetic oligonucleotide
  Antisense strand to SEQ ID NO: 1956768
uaccugaacaggaaguacg

SEQ ID NO: 1956770 - RNA, 19 nt, Artificial Sequence
  Description of Artificial Sequence: Synthetic oligonucleotide
  Sense strand starting at position 2714 of SEQ ID NO: 1880298
ucagguauccuggaagguu

SEQ ID NO: 1956771 - RNA, 19 nt, Artificial Sequence
  Description of Artificial Sequence: Synthetic oligonucleotide
  Antisense strand to SEQ ID NO: 1956770
aaccuuccaggauaccuga

SEQ ID NO: 1956772 - RNA, 19 nt, Artificial Sequence
  Description of Artificial Sequence: Synthetic oligonucleotide
  Sense strand starting at position 2723 of SEQ ID NO: 1880298
cuggaagguuucgugugaa

SEQ ID NO: 1956773 - RNA, 19 nt, Artificial Sequence
  Description of Artificial Sequence: Synthetic oligonucleotide
  Antisense strand to SEQ ID NO: 1956772
uucacacgaaaccuuccag

SEQ ID NO: 1956774 - RNA, 19 nt, Artificial Sequence
  Description of Artificial Sequence: Synthetic oligonucleotide
  Sense strand starting at position 2726 of SEQ ID NO: 1880298
gaagguuucgugugaaacg

SEQ ID NO: 1956775 - RNA, 19 nt, Artificial Sequence
  Description of Artificial Sequence: Synthetic oligonucleotide
  Antisense strand to SEQ ID NO: 1956774
cguuucacacgaaaccuuc

SEQ ID NO: 1956776 - RNA, 19 nt, Artificial Sequence
  Description of Artificial Sequence: Synthetic oligonucleotide
  Sense strand starting at position 2729 of SEQ ID NO: 1880298
gguuucgugugaaacguga

SEQ ID NO: 1956777 - RNA, 19 nt, Artificial Sequence
  Description of Artificial Sequence: Synthetic oligonucleotide
  Antisense strand to SEQ ID NO: 1956776
ucacguuucacacgaaacc

SEQ ID NO: 1956778 - RNA, 19 nt, Artificial Sequence
  Description of Artificial Sequence: Synthetic oligonucleotide
  Sense strand starting at position 2731 of SEQ ID NO: 1880298
uuucgugugaaacgugaca

SEQ ID NO: 1956779 - RNA, 19 nt, Artificial Sequence
  Description of Artificial Sequence: Synthetic oligonucleotide
  Antisense strand to SEQ ID NO: 1956778
ugucacguuucacacgaaa

SEQ ID NO: 1956780 - RNA, 19 nt, Artificial Sequence
  Description of Artificial Sequence: Synthetic oligonucleotide
  Sense strand starting at position 2779 of SEQ ID NO: 1880298
ggaacacauucuuauuggu

SEQ ID NO: 1956781 - RNA, 19 nt, Artificial Sequence
  Description of Artificial Sequence: Synthetic oligonucleotide
  Antisense strand to SEQ ID NO: 1956780
accaauaagaauguguucc

SEQ ID NO: 1956782 - RNA, 19 nt, Artificial Sequence
  Description of Artificial Sequence: Synthetic oligonucleotide
  Sense strand starting at position 2782 of SEQ ID NO: 1880298
acacauucuuauugguauu

SEQ ID NO: 1956783 - RNA, 19 nt, Artificial Sequence
  Description of Artificial Sequence: Synthetic oligonucleotide
  Antisense strand to SEQ ID NO: 1956782
aauaccaauaagaaugugu

SEQ ID NO: 1956784 - RNA, 19 nt, Artificial Sequence
  Description of Artificial Sequence: Synthetic oligonucleotide
  Sense strand starting at position 2792 of SEQ ID NO: 1880298
auugguauucccgagcuua

SEQ ID NO: 1956785 - RNA, 19 nt, Artificial Sequence
  Description of Artificial Sequence: Synthetic oligonucleotide
  Antisense strand to SEQ ID NO: 1956784
uaagcucgggaauaccaau

SEQ ID NO: 1956786 - RNA, 19 nt, Artificial Sequence
  Description of Artificial Sequence: Synthetic oligonucleotide
  Sense strand starting at position 2847 of SEQ ID NO: 1880298
ucacuuaaucucuggguaa

SEQ ID NO: 1956787 - RNA, 19 nt, Artificial Sequence
  Description of Artificial Sequence: Synthetic oligonucleotide
  Antisense strand to SEQ ID NO: 1956786
uuacccagagauuaaguga

SEQ ID NO: 1956788 - RNA, 19 nt, Artificial Sequence
  Description of Artificial Sequence: Synthetic oligonucleotide
  Sense strand starting at position 2858 of SEQ ID NO: 1880298
cuggguaauguccagcaca

SEQ ID NO: 1956789 - RNA, 19 nt, Artificial Sequence
  Description of Artificial Sequence: Synthetic oligonucleotide
  Antisense strand to SEQ ID NO: 1956788
ugugcuggacauuacccag

SEQ ID NO: 1956790 - RNA, 19 nt, Artificial Sequence
  Description of Artificial Sequence: Synthetic oligonucleotide
  Sense strand starting at position 2909 of SEQ ID NO: 1880298
gcauguaucuccucacguu

SEQ ID NO: 1956791 - RNA, 19 nt, Artificial Sequence
  Description of Artificial Sequence: Synthetic oligonucleotide
  Antisense strand to SEQ ID NO: 1956790
aacgugaggagauacaugc

SEQ ID NO: 1956792 - RNA, 19 nt, Artificial Sequence
  Description of Artificial Sequence: Synthetic oligonucleotide
  Sense strand starting at position 2949 of SEQ ID NO: 1880298
acuuuaaacuuuguagaga

SEQ ID NO: 1956793 - RNA, 19 nt, Artificial Sequence
  Description of Artificial Sequence: Synthetic oligonucleotide
  Antisense strand to SEQ ID NO: 1956792
ucucuacaaaguuuaaagu

SEQ ID NO: 1956794 - RNA, 19 nt, Artificial Sequence
  Description of Artificial Sequence: Synthetic oligonucleotide
  Sense strand starting at position 2950 of SEQ ID NO: 1880298
cuuuaaacuuuguagagau

SEQ ID NO: 1956795 - RNA, 19 nt, Artificial Sequence
  Description of Artificial Sequence: Synthetic oligonucleotide
  Antisense strand to SEQ ID NO: 1956794
aucucuacaaaguuuaaag

SEQ ID NO: 1956796 - RNA, 19 nt, Artificial Sequence
  Description of Artificial Sequence: Synthetic oligonucleotide
  Sense strand starting at position 2976 of SEQ ID NO: 1880298
ucagauguauuccacauuu

SEQ ID NO: 1956797 - RNA, 19 nt, Artificial Sequence
  Description of Artificial Sequence: Synthetic oligonucleotide
  Antisense strand to SEQ ID NO: 1956796
aaauguggaauacaucuga

SEQ ID NO: 1956798 - RNA, 19 nt, Artificial Sequence
  Description of Artificial Sequence: Synthetic oligonucleotide
  Sense strand starting at position 3045 of SEQ ID NO: 1880298
uuauuuguuucguauagcu

SEQ ID NO: 1956799 - RNA, 19 nt, Artificial Sequence
  Description of Artificial Sequence: Synthetic oligonucleotide
  Antisense strand to SEQ ID NO: 1956798
agcuauacgaaacaaauaa

SEQ ID NO: 1956800 - RNA, 19 nt, Artificial Sequence
  Description of Artificial Sequence: Synthetic oligonucleotide
  Sense strand starting at position 3047 of SEQ ID NO: 1880298
auuuguuucguauagcuuu

SEQ ID NO: 1956801 - RNA, 19 nt, Artificial Sequence
  Description of Artificial Sequence: Synthetic oligonucleotide
  Antisense strand to SEQ ID NO: 1956800
aaagcuauacgaaacaaau

SEQ ID NO: 1956802 - RNA, 19 nt, Artificial Sequence
  Description of Artificial Sequence: Synthetic oligonucleotide
  Sense strand starting at position 3050 of SEQ ID NO: 1880298
uguuucguauagcuuuauu

SEQ ID NO: 1956803 - RNA, 19 nt, Artificial Sequence
  Description of Artificial Sequence: Synthetic oligonucleotide
  Antisense strand to SEQ ID NO: 1956802
aauaaagcuauacgaaaca

SEQ ID NO: 1956804 - RNA, 19 nt, Artificial Sequence
  Description of Artificial Sequence: Synthetic oligonucleotide
  Sense strand starting at position 3285 of SEQ ID NO: 1880298
aagugauccgccuggguca

SEQ ID NO: 1956805 - RNA, 19 nt, Artificial Sequence
  Description of Artificial Sequence: Synthetic oligonucleotide
  Antisense strand to SEQ ID NO: 1956804
ugacccaggcggaucacuu

SEQ ID NO: 1956806 - RNA, 19 nt, Artificial Sequence
  Description of Artificial Sequence: Synthetic oligonucleotide
  Sense strand starting at position 3409 of SEQ ID NO: 1880298
guacacuaauuggaaaugu

SEQ ID NO: 1956807 - RNA, 19 nt, Artificial Sequence
  Description of Artificial Sequence: Synthetic oligonucleotide
  Antisense strand to SEQ ID NO: 1956806
acauuuccaauuaguguac

SEQ ID NO: 1956808 - RNA, 19 nt, Artificial Sequence
  Description of Artificial Sequence: Synthetic oligonucleotide
  Sense strand starting at position 3518 of SEQ ID NO: 1880298
acaaucuguuuggcuaauu

SEQ ID NO: 1956809 - RNA, 19 nt, Artificial Sequence
  Description of Artificial Sequence: Synthetic oligonucleotide
  Antisense strand to SEQ ID NO: 1956808
aauuagccaaacagauugu

SEQ ID NO: 1956810 - RNA, 19 nt, Artificial Sequence
  Description of Artificial Sequence: Synthetic oligonucleotide
  Sense strand starting at position 3600 of SEQ ID NO: 1880298
gggcuacguuggagaaguu

SEQ ID NO: 1956811 - RNA, 19 nt, Artificial Sequence
  Description of Artificial Sequence: Synthetic oligonucleotide
  Antisense strand to SEQ ID NO: 1956810
aacuucuccaacguagccc

SEQ ID NO: 1956812 - RNA, 19 nt, Artificial Sequence
  Description of Artificial Sequence: Synthetic oligonucleotide
  Sense strand starting at position 3601 of SEQ ID NO: 1880298
ggcuacguuggagaaguuu

SEQ ID NO: 1956813 - RNA, 19 nt, Artificial Sequence
  Description of Artificial Sequence: Synthetic oligonucleotide
  Antisense strand to SEQ ID NO: 1956812
aaacuucuccaacguagcc

SEQ ID NO: 1956814 - RNA, 19 nt, Artificial Sequence
  Description of Artificial Sequence: Synthetic oligonucleotide
  Sense strand starting at position 3607 of SEQ ID NO: 1880298
guuggagaaguuuaaccga

SEQ ID NO: 1956815 - RNA, 19 nt, Artificial Sequence
  Description of Artificial Sequence: Synthetic oligonucleotide
  Antisense strand to SEQ ID NO: 1956814
ucgguuaaacuucuccaac

SEQ ID NO: 1956816 - RNA, 19 nt, Artificial Sequence
  Description of Artificial Sequence: Synthetic oligonucleotide
  Sense strand starting at position 27 of SEQ ID NO: 1880299
agugacucggagcaaauua

SEQ ID NO: 1956817 - RNA, 19 nt, Artificial Sequence
  Description of Artificial Sequence: Synthetic oligonucleotide
  Antisense strand to SEQ ID NO: 1956816
uaauuugcuccgagucacu

SEQ ID NO: 1956818 - RNA, 19 nt, Artificial Sequence
  Description of Artificial Sequence: Synthetic oligonucleotide
  Sense strand starting at position 85 of SEQ ID NO: 1880299
auggcuaucaagugaaggu

SEQ ID NO: 1956819 - RNA, 19 nt, Artificial Sequence
  Description of Artificial Sequence: Synthetic oligonucleotide
  Antisense strand to SEQ ID NO: 1956818
accuucacuugauagccau

SEQ ID NO: 1956820 - RNA, 19 nt, Artificial Sequence
  Description of Artificial Sequence: Synthetic oligonucleotide
  Sense strand starting at position 204 of SEQ ID NO: 1880299
ugaagaguaucaucucuuc

SEQ ID NO: 1956821 - RNA, 19 nt, Artificial Sequence
  Description of Artificial Sequence: Synthetic oligonucleotide
  Antisense strand to SEQ ID NO: 1956820
gaagagaugauacucuuca

SEQ ID NO: 1956822 - RNA, 19 nt, Artificial Sequence
  Description of Artificial Sequence: Synthetic oligonucleotide
  Sense strand starting at position 207 of SEQ ID NO: 1880299
agaguaucaucucuucuca

SEQ ID NO: 1956823 - RNA, 19 nt, Artificial Sequence
  Description of Artificial Sequence: Synthetic oligonucleotide
  Antisense strand to SEQ ID NO: 1956822
ugagaagagaugauacucu

SEQ ID NO: 1956824 - RNA, 19 nt, Artificial Sequence
  Description of Artificial Sequence: Synthetic oligonucleotide
  Sense strand starting at position 513 of SEQ ID NO: 1880299
gagugcuaccacuguacaa

SEQ ID NO: 1956825 - RNA, 19 nt, Artificial Sequence
  Description of Artificial Sequence: Synthetic oligonucleotide
  Antisense strand to SEQ ID NO: 1956824
uuguacagugguagcacuc

SEQ ID NO: 1956826 - RNA, 19 nt, Artificial Sequence
  Description of Artificial Sequence: Synthetic oligonucleotide
  Sense strand starting at position 545 of SEQ ID NO: 1880299
uugguuggcagacaauaau

SEQ ID NO: 1956827 - RNA, 19 nt, Artificial Sequence
  Description of Artificial Sequence: Synthetic oligonucleotide
  Antisense strand to SEQ ID NO: 1956826
auuauugucugccaaccaa

SEQ ID NO: 1956828 - RNA, 19 nt, Artificial Sequence
  Description of Artificial Sequence: Synthetic oligonucleotide
  Sense strand starting at position 688 of SEQ ID NO: 1880299
gaguccuugugguuaacau

SEQ ID NO: 1956829 - RNA, 19 nt, Artificial Sequence
  Description of Artificial Sequence: Synthetic oligonucleotide
  Antisense strand to SEQ ID NO: 1956828
auguuaaccacaaggacuc

SEQ ID NO: 1956830 - RNA, 19 nt, Artificial Sequence
  Description of Artificial Sequence: Synthetic oligonucleotide
  Sense strand starting at position 695 of SEQ ID NO: 1880299
ugugguuaacaucauacca

SEQ ID NO: 1956831 - RNA, 19 nt, Artificial Sequence
  Description of Artificial Sequence: Synthetic oligonucleotide
  Antisense strand to SEQ ID NO: 1956830
ugguaugauguuaaccaca

SEQ ID NO: 1956832 - RNA, 19 nt, Artificial Sequence
  Description of Artificial Sequence: Synthetic oligonucleotide
  Sense strand starting at position 777 of SEQ ID NO: 1880299
gagcucguaucuguauuua

SEQ ID NO: 1956833 - RNA, 19 nt, Artificial Sequence
  Description of Artificial Sequence: Synthetic oligonucleotide
  Antisense strand to SEQ ID NO: 1956832
uaaauacagauacgagcuc

SEQ ID NO: 1956834 - RNA, 19 nt, Artificial Sequence
  Description of Artificial Sequence: Synthetic oligonucleotide
  Sense strand starting at position 966 of SEQ ID NO: 1880299
ggguguuaugagugagagg

SEQ ID NO: 1956835 - RNA, 19 nt, Artificial Sequence
  Description of Artificial Sequence: Synthetic oligonucleotide
  Antisense strand to SEQ ID NO: 1956834
ccucucacucauaacaccc

SEQ ID NO: 1956836 - RNA, 19 nt, Artificial Sequence
  Description of Artificial Sequence: Synthetic oligonucleotide
  Sense strand starting at position 1130 of SEQ ID NO: 1880299
cuuacuaucguccaaguga

SEQ ID NO: 1956837 - RNA, 19 nt, Artificial Sequence
  Description of Artificial Sequence: Synthetic oligonucleotide
  Antisense strand to SEQ ID NO: 1956836
ucacuuggacgauaguaag

SEQ ID NO: 1956838 - RNA, 19 nt, Artificial Sequence
  Description of Artificial Sequence: Synthetic oligonucleotide
  Sense strand starting at position 2215 of SEQ ID NO: 1880299
ccaaguuucugguuggacu

SEQ ID NO: 1956839 - RNA, 19 nt, Artificial Sequence
  Description of Artificial Sequence: Synthetic oligonucleotide
  Antisense strand to SEQ ID NO: 1956838
aguccaaccagaaacuugg

SEQ ID NO: 1956840 - RNA, 19 nt, Artificial Sequence
  Description of Artificial Sequence: Synthetic oligonucleotide
  Sense strand starting at position 2373 of SEQ ID NO: 1880299
uuacaucucuaaucguuga

SEQ ID NO: 1956841 - RNA, 19 nt, Artificial Sequence
  Description of Artificial Sequence: Synthetic oligonucleotide
  Antisense strand to SEQ ID NO: 1956840
ucaacgauuagagauguaa

SEQ ID NO: 1956842 - RNA, 19 nt, Artificial Sequence
  Description of Artificial Sequence: Synthetic oligonucleotide
  Sense strand starting at position 2724 of SEQ ID NO: 1880299
guucuuaccuaauugugau

SEQ ID NO: 1956843 - RNA, 19 nt, Artificial Sequence
  Description of Artificial Sequence: Synthetic oligonucleotide
  Antisense strand to SEQ ID NO: 1956842
aucacaauuagguaagaac

SEQ ID NO: 1956844 - RNA, 19 nt, Artificial Sequence
  Description of Artificial Sequence: Synthetic oligonucleotide
  Sense strand starting at position 2731 of SEQ ID NO: 1880299
ccuaauugugaugaaccuu

SEQ ID NO: 1956845 - RNA, 19 nt, Artificial Sequence
  Description of Artificial Sequence: Synthetic oligonucleotide
  Antisense strand to SEQ ID NO: 1956844
aagguucaucacaauuagg

SEQ ID NO: 1956846 - RNA, 19 nt, Artificial Sequence
  Description of Artificial Sequence: Synthetic oligonucleotide
  Sense strand starting at position 2820 of SEQ ID NO: 1880299
gcgucugugaaacaugauc

SEQ ID NO: 1956847 - RNA, 19 nt, Artificial Sequence
  Description of Artificial Sequence: Synthetic oligonucleotide
  Antisense strand to SEQ ID NO: 1956846
gaucauguuucacagacgc

SEQ ID NO: 1956848 - RNA, 19 nt, Artificial Sequence
  Description of Artificial Sequence: Synthetic oligonucleotide
  Sense strand starting at position 2825 of SEQ ID NO: 1880299
ugugaaacaugaucccuuu

SEQ ID NO: 1956849 - RNA, 19 nt, Artificial Sequence
  Description of Artificial Sequence: Synthetic oligonucleotide
  Antisense strand to SEQ ID NO: 1956848
aaagggaucauguuucaca

SEQ ID NO: 1956850 - RNA, 19 nt, Artificial Sequence
  Description of Artificial Sequence: Synthetic oligonucleotide
  Sense strand starting at position 3267 of SEQ ID NO: 1880299
gaauauggaguuugucauc

SEQ ID NO: 1956851 - RNA, 19 nt, Artificial Sequence
  Description of Artificial Sequence: Synthetic oligonucleotide
  Antisense strand to SEQ ID NO: 1956850
gaugacaaacuccauauuc

SEQ ID NO: 1956852 - RNA, 19 nt, Artificial Sequence
  Description of Artificial Sequence: Synthetic oligonucleotide
  Sense strand starting at position 3273 of SEQ ID NO: 1880299
ggaguuugucaucauuguc

SEQ ID NO: 1956853 - RNA, 19 nt, Artificial Sequence
  Description of Artificial Sequence: Synthetic oligonucleotide
  Antisense strand to SEQ ID NO: 1956852
gacaaugaugacaaacucc

SEQ ID NO: 1956854 - RNA, 19 nt, Artificial Sequence
  Description of Artificial Sequence: Synthetic oligonucleotide
  Sense strand starting at position 3278 of SEQ ID NO: 1880299
uugucaucauugucacaua

SEQ ID NO: 1956855 - RNA, 19 nt, Artificial Sequence
  Description of Artificial Sequence: Synthetic oligonucleotide
  Antisense strand to SEQ ID NO: 1956854
uaugugacaaugaugacaa

SEQ ID NO: 1956856 - RNA, 19 nt, Artificial Sequence
  Description of Artificial Sequence: Synthetic oligonucleotide
  Sense strand starting at position 3292 of SEQ ID NO: 1880299
acauaaaucuaggagaaua

SEQ ID NO: 1956857 - RNA, 19 nt, Artificial Sequence
  Description of Artificial Sequence: Synthetic oligonucleotide
  Antisense strand to SEQ ID NO: 1956856
uauucuccuagauuuaugu

SEQ ID NO: 1956858 - RNA, 19 nt, Artificial Sequence
  Description of Artificial Sequence: Synthetic oligonucleotide
  Sense strand starting at position 3326 of SEQ ID NO: 1880299
uuggcaauauucuuugagu

SEQ ID NO: 1956859 - RNA, 19 nt, Artificial Sequence
  Description of Artificial Sequence: Synthetic oligonucleotide
  Antisense strand to SEQ ID NO: 1956858
acucaaagaauauugccaa

SEQ ID NO: 1956860 - RNA, 19 nt, Artificial Sequence
  Description of Artificial Sequence: Synthetic oligonucleotide
  Sense strand starting at position 3327 of SEQ ID NO: 1880299
uggcaauauucuuugaguu

SEQ ID NO: 1956861 - RNA, 19 nt, Artificial Sequence
  Description of Artificial Sequence: Synthetic oligonucleotide
  Antisense strand to SEQ ID NO: 1956860
aacucaaagaauauugcca

SEQ ID NO: 1956862 - RNA, 19 nt, Artificial Sequence
  Description of Artificial Sequence: Synthetic oligonucleotide
  Sense strand starting at position 3328 of SEQ ID NO: 1880299
ggcaauauucuuugaguua

SEQ ID NO: 1956863 - RNA, 19 nt, Artificial Sequence
  Description of Artificial Sequence: Synthetic oligonucleotide
  Antisense strand to SEQ ID NO: 1956862
uaacucaaagaauauugcc

SEQ ID NO: 1956864 - RNA, 19 nt, Artificial Sequence
  Description of Artificial Sequence: Synthetic oligonucleotide
  Sense strand starting at position 3335 of SEQ ID NO: 1880299
uucuuugaguuacuaagau

SEQ ID NO: 1956865 - RNA, 19 nt, Artificial Sequence
  Description of Artificial Sequence: Synthetic oligonucleotide
  Antisense strand to SEQ ID NO: 1956864
aucuuaguaacucaaagaa

SEQ ID NO: 1956866 - RNA, 19 nt, Artificial Sequence
  Description of Artificial Sequence: Synthetic oligonucleotide
  Sense strand starting at position 3412 of SEQ ID NO: 1880299
guucauauugauggcagga

SEQ ID NO: 1956867 - RNA, 19 nt, Artificial Sequence
  Description of Artificial Sequence: Synthetic oligonucleotide
  Antisense strand to SEQ ID NO: 1956866
uccugccaucaauaugaac

SEQ ID NO: 1956868 - RNA, 19 nt, Artificial Sequence
  Description of Artificial Sequence: Synthetic oligonucleotide
  Sense strand starting at position 3417 of SEQ ID NO: 1880299
uauugauggcaggaucuuu

SEQ ID NO: 1956869 - RNA, 19 nt, Artificial Sequence
  Description of Artificial Sequence: Synthetic oligonucleotide
  Antisense strand to SEQ ID NO: 1956868
aaagauccugccaucaaua

SEQ ID NO: 1956870 - RNA, 19 nt, Artificial Sequence
  Description of Artificial Sequence: Synthetic oligonucleotide
  Sense strand starting at position 3422 of SEQ ID NO: 1880299
auggcaggaucuuuaucaa

SEQ ID NO: 1956871 - RNA, 19 nt, Artificial Sequence
  Description of Artificial Sequence: Synthetic oligonucleotide
  Antisense strand to SEQ ID NO: 1956870
uugauaaagauccugccau

SEQ ID NO: 1956872 - RNA, 19 nt, Artificial Sequence
  Description of Artificial Sequence: Synthetic oligonucleotide
  Sense strand starting at position 3425 of SEQ ID NO: 1880299
gcaggaucuuuaucaacuu

SEQ ID NO: 1956873 - RNA, 19 nt, Artificial Sequence
  Description of Artificial Sequence: Synthetic oligonucleotide
  Antisense strand to SEQ ID NO: 1956872
aaguugauaaagauccugc

SEQ ID NO: 1956874 - RNA, 19 nt, Artificial Sequence
  Description of Artificial Sequence: Synthetic oligonucleotide
  Sense strand starting at position 3437 of SEQ ID NO: 1880299
ucaacuuguuaagugauau

SEQ ID NO: 1956875 - RNA, 19 nt, Artificial Sequence
  Description of Artificial Sequence: Synthetic oligonucleotide
  Antisense strand to SEQ ID NO: 1956874
auaucacuuaacaaguuga

SEQ ID NO: 1956876 - RNA, 19 nt, Artificial Sequence
  Description of Artificial Sequence: Synthetic oligonucleotide
  Sense strand starting at position 3447 of SEQ ID NO: 1880299
aagugauauuccucuuacg

SEQ ID NO: 1956877 - RNA, 19 nt, Artificial Sequence
  Description of Artificial Sequence: Synthetic oligonucleotide
  Antisense strand to SEQ ID NO: 1956876
cguaagaggaauaucacuu

SEQ ID NO: 1956878 - RNA, 19 nt, Artificial Sequence
  Description of Artificial Sequence: Synthetic oligonucleotide
  Sense strand starting at position 3474 of SEQ ID NO: 1880299
auauaugauuuggagagcu

SEQ ID NO: 1956879 - RNA, 19 nt, Artificial Sequence
  Description of Artificial Sequence: Synthetic oligonucleotide
  Antisense strand to SEQ ID NO: 1956878
agcucuccaaaucauauau

SEQ ID NO: 1956880 - RNA, 19 nt, Artificial Sequence
  Description of Artificial Sequence: Synthetic oligonucleotide
  Sense strand starting at position 3486 of SEQ ID NO: 1880299
gagagcucacuuugucaag

SEQ ID NO: 1956881 - RNA, 19 nt, Artificial Sequence
  Description of Artificial Sequence: Synthetic oligonucleotide
  Antisense strand to SEQ ID NO: 1956880
cuugacaaagugagcucuc

SEQ ID NO: 1956882 - RNA, 19 nt, Artificial Sequence
  Description of Artificial Sequence: Synthetic oligonucleotide
  Sense strand starting at position 3487 of SEQ ID NO: 1880299
agagcucacuuugucaaga

SEQ ID NO: 1956883 - RNA, 19 nt, Artificial Sequence
  Description of Artificial Sequence: Synthetic oligonucleotide
  Antisense strand to SEQ ID NO: 1956882
ucuugacaaagugagcucu

SEQ ID NO: 1956884 - RNA, 19 nt, Artificial Sequence
  Description of Artificial Sequence: Synthetic oligonucleotide
  Sense strand starting at position 3616 of SEQ ID NO: 1880299
ucacgaggauuguucuaca

SEQ ID NO: 1956885 - RNA, 19 nt, Artificial Sequence
  Description of Artificial Sequence: Synthetic oligonucleotide
  Antisense strand to SEQ ID NO: 1956884
uguagaacaauccucguga

SEQ ID NO: 1956886 - RNA, 19 nt, Artificial Sequence
  Description of Artificial Sequence: Synthetic oligonucleotide
  Sense strand starting at position 3671 of SEQ ID NO: 1880299
uuugcuuaggcacauagaa

SEQ ID NO: 1956887 - RNA, 19 nt, Artificial Sequence
  Description of Artificial Sequence: Synthetic oligonucleotide
  Antisense strand to SEQ ID NO: 1956886
uucuaugugccuaagcaaa

SEQ ID NO: 1956888 - RNA, 19 nt, Artificial Sequence
  Description of Artificial Sequence: Synthetic oligonucleotide
  Sense strand starting at position 3741 of SEQ ID NO: 1880299
uugauacagucagugacaa

SEQ ID NO: 1956889 - RNA, 19 nt, Artificial Sequence
  Description of Artificial Sequence: Synthetic oligonucleotide
  Antisense strand to SEQ ID NO: 1956888
uugucacugacuguaucaa

SEQ ID NO: 1956890 - RNA, 19 nt, Artificial Sequence
  Description of Artificial Sequence: Synthetic oligonucleotide
  Sense strand starting at position 3812 of SEQ ID NO: 1880299
acccucuaugcuuaguaua

SEQ ID NO: 1956891 - RNA, 19 nt, Artificial Sequence
  Description of Artificial Sequence: Synthetic oligonucleotide
  Antisense strand to SEQ ID NO: 1956890
uauacuaagcauagagggu

SEQ ID NO: 1956892 - RNA, 19 nt, Artificial Sequence
  Description of Artificial Sequence: Synthetic oligonucleotide
  Sense strand starting at position 3829 of SEQ ID NO: 1880299
uaggcaguccuuuggaaga

SEQ ID NO: 1956893 - RNA, 19 nt, Artificial Sequence
  Description of Artificial Sequence: Synthetic oligonucleotide
  Antisense strand to SEQ ID NO: 1956892
ucuuccaaaggacugccua

SEQ ID NO: 1956894 - RNA, 19 nt, Artificial Sequence
  Description of Artificial Sequence: Synthetic oligonucleotide
  Sense strand starting at position 3926 of SEQ ID NO: 1880299
cuacuaaucuaggcugcua

SEQ ID NO: 1956895 - RNA, 19 nt, Artificial Sequence
  Description of Artificial Sequence: Synthetic oligonucleotide
  Antisense strand to SEQ ID NO: 1956894
uagcagccuagauuaguag

SEQ ID NO: 1956896 - RNA, 19 nt, Artificial Sequence
  Description of Artificial Sequence: Synthetic oligonucleotide
  Sense strand starting at position 30 of SEQ ID NO: 1880300
guauuauucucccuugaga

SEQ ID NO: 1956897 - RNA, 19 nt, Artificial Sequence
  Description of Artificial Sequence: Synthetic oligonucleotide
  Antisense strand to SEQ ID NO: 1956896
ucucaagggagaauaauac

SEQ ID NO: 1956898 - RNA, 19 nt, Artificial Sequence
  Description of Artificial Sequence: Synthetic oligonucleotide
  Sense strand starting at position 45 of SEQ ID NO: 1880300
gagaauagccagcaauguu

SEQ ID NO: 1956899 - RNA, 19 nt, Artificial Sequence
  Description of Artificial Sequence: Synthetic oligonucleotide
  Antisense strand to SEQ ID NO: 1956898
aacauugcuggcuauucuc

SEQ ID NO: 1956900 - RNA, 19 nt, Artificial Sequence
  Description of Artificial Sequence: Synthetic oligonucleotide
  Sense strand starting at position 479 of SEQ ID NO: 1880300
guaagaacauuugagggaa

SEQ ID NO: 1956901 - RNA, 19 nt, Artificial Sequence
  Description of Artificial Sequence: Synthetic oligonucleotide
  Antisense strand to SEQ ID NO: 1956900
uucccucaaauguucuuac

SEQ ID NO: 1956902 - RNA, 19 nt, Artificial Sequence
  Description of Artificial Sequence: Synthetic oligonucleotide
  Sense strand starting at position 516 of SEQ ID NO: 1880300
agguucuuagcccaaggaa

SEQ ID NO: 1956903 - RNA, 19 nt, Artificial Sequence
  Description of Artificial Sequence: Synthetic oligonucleotide
  Antisense strand to SEQ ID NO: 1956902
uuccuugggcuaagaaccu

SEQ ID NO: 1956904 - RNA, 19 nt, Artificial Sequence
  Description of Artificial Sequence: Synthetic oligonucleotide
  Sense strand starting at position 519 of SEQ ID NO: 1880300
uucuuagcccaaggaauua

SEQ ID NO: 1956905 - RNA, 19 nt, Artificial Sequence
  Description of Artificial Sequence: Synthetic oligonucleotide
  Antisense strand to SEQ ID NO: 1956904
uaauuccuugggcuaagaa

SEQ ID NO: 1956906 - RNA, 19 nt, Artificial Sequence
  Description of Artificial Sequence: Synthetic oligonucleotide
  Sense strand starting at position 561 of SEQ ID NO: 1880300
cuuugaagguaugcaugaa

SEQ ID NO: 1956907 - RNA, 19 nt, Artificial Sequence
  Description of Artificial Sequence: Synthetic oligonucleotide
  Antisense strand to SEQ ID NO: 1956906
uucaugcauaccuucaaag

SEQ ID NO: 1956908 - RNA, 19 nt, Artificial Sequence
  Description of Artificial Sequence: Synthetic oligonucleotide
  Sense strand starting at position 562 of SEQ ID NO: 1880300
uuugaagguaugcaugaau

SEQ ID NO: 1956909 - RNA, 19 nt, Artificial Sequence
  Description of Artificial Sequence: Synthetic oligonucleotide
  Antisense strand to SEQ ID NO: 1956908
auucaugcauaccuucaaa

SEQ ID NO: 1956910 - RNA, 19 nt, Artificial Sequence
  Description of Artificial Sequence: Synthetic oligonucleotide
  Sense strand starting at position 631 of SEQ ID NO: 1880300
caggguucgugacccagaa

SEQ ID NO: 1956911 - RNA, 19 nt, Artificial Sequence
  Description of Artificial Sequence: Synthetic oligonucleotide
  Antisense strand to SEQ ID NO: 1956910
uucugggucacgaacccug

SEQ ID NO: 1956912 - RNA, 19 nt, Artificial Sequence
  Description of Artificial Sequence: Synthetic oligonucleotide
  Sense strand starting at position 669 of SEQ ID NO: 1880300
guauaaguugaacaagcau

SEQ ID NO: 1956913 - RNA, 19 nt, Artificial Sequence
  Description of Artificial Sequence: Synthetic oligonucleotide
  Antisense strand to SEQ ID NO: 1956912
augcuuguucaacuuauac

SEQ ID NO: 1956914 - RNA, 19 nt, Artificial Sequence
  Description of Artificial Sequence: Synthetic oligonucleotide
  Sense strand starting at position 835 of SEQ ID NO: 1880300
cggagaaccucuguucuag

SEQ ID NO: 1956915 - RNA, 19 nt, Artificial Sequence
  Description of Artificial Sequence: Synthetic oligonucleotide
  Antisense strand to SEQ ID NO: 1956914
cuagaacagagguucuccg

SEQ ID NO: 1956916 - RNA, 19 nt, Artificial Sequence
  Description of Artificial Sequence: Synthetic oligonucleotide
  Sense strand starting at position 841 of SEQ ID NO: 1880300
accucuguucuagagaauc

SEQ ID NO: 1956917 - RNA, 19 nt, Artificial Sequence
  Description of Artificial Sequence: Synthetic oligonucleotide
  Antisense strand to SEQ ID NO: 1956916
gauucucuagaacagaggu

SEQ ID NO: 1956918 - RNA, 19 nt, Artificial Sequence
  Description of Artificial Sequence: Synthetic oligonucleotide
  Sense strand starting at position 849 of SEQ ID NO: 1880300
ucuagagaaucuucugacu

SEQ ID NO: 1956919 - RNA, 19 nt, Artificial Sequence
  Description of Artificial Sequence: Synthetic oligonucleotide
  Antisense strand to SEQ ID NO: 1956918
agucagaagauucucuaga

SEQ ID NO: 1956920 - RNA, 19 nt, Artificial Sequence
  Description of Artificial Sequence: Synthetic oligonucleotide
  Sense strand starting at position 887 of SEQ ID NO: 1880300
auuggucccuguuugagaa

SEQ ID NO: 1956921 - RNA, 19 nt, Artificial Sequence
  Description of Artificial Sequence: Synthetic oligonucleotide
  Antisense strand to SEQ ID NO: 1956920
uucucaaacagggaccaau

SEQ ID NO: 1956922 - RNA, 19 nt, Artificial Sequence
  Description of Artificial Sequence: Synthetic oligonucleotide
  Sense strand starting at position 895 of SEQ ID NO: 1880300
cuguuugagaauuggagua

SEQ ID NO: 1956923 - RNA, 19 nt, Artificial Sequence
  Description of Artificial Sequence: Synthetic oligonucleotide
  Antisense strand to SEQ ID NO: 1956922
uacuccaauucucaaacag

SEQ ID NO: 1956924 - RNA, 19 nt, Artificial Sequence
  Description of Artificial Sequence: Synthetic oligonucleotide
  Sense strand starting at position 1054 of SEQ ID NO: 1880300
agcauuccugugcacaaau

SEQ ID NO: 1956925 - RNA, 19 nt, Artificial Sequence
  Description of Artificial Sequence: Synthetic oligonucleotide
  Antisense strand to SEQ ID NO: 1956924
auuugugcacaggaaugcu

SEQ ID NO: 1956926 - RNA, 19 nt, Artificial Sequence
  Description of Artificial Sequence: Synthetic oligonucleotide
  Sense strand starting at position 1216 of SEQ ID NO: 1880300
cuuaguaaccgacaucaac

SEQ ID NO: 1956927 - RNA, 19 nt, Artificial Sequence
  Description of Artificial Sequence: Synthetic oligonucleotide
  Antisense strand to SEQ ID NO: 1956926
guugaugucgguuacuaag

SEQ ID NO: 1956928 - RNA, 19 nt, Artificial Sequence
  Description of Artificial Sequence: Synthetic oligonucleotide
  Sense strand starting at position 1343 of SEQ ID NO: 1880300
ugccauaacuggucaugag

SEQ ID NO: 1956929 - RNA, 19 nt, Artificial Sequence
  Description of Artificial Sequence: Synthetic oligonucleotide
  Antisense strand to SEQ ID NO: 1956928
cucaugaccaguuauggca

SEQ ID NO: 1956930 - RNA, 19 nt, Artificial Sequence
  Description of Artificial Sequence: Synthetic oligonucleotide
  Sense strand starting at position 1344 of SEQ ID NO: 1880300
gccauaacuggucaugaga

SEQ ID NO: 1956931 - RNA, 19 nt, Artificial Sequence
  Description of Artificial Sequence: Synthetic oligonucleotide
  Antisense strand to SEQ ID NO: 1956930
ucucaugaccaguuauggc

SEQ ID NO: 1956932 - RNA, 19 nt, Artificial Sequence
  Description of Artificial Sequence: Synthetic oligonucleotide
  Sense strand starting at position 1909 of SEQ ID NO: 1880300
gcccguuucguaucgaaac

SEQ ID NO: 1956933 - RNA, 19 nt, Artificial Sequence
  Description of Artificial Sequence: Synthetic oligonucleotide
  Antisense strand to SEQ ID NO: 1956932
guuucgauacgaaacgggc

SEQ ID NO: 1956934 - RNA, 19 nt, Artificial Sequence
  Description of Artificial Sequence: Synthetic oligonucleotide
  Sense strand starting at position 1924 of SEQ ID NO: 1880300
aaacacagguuaucagagu

SEQ ID NO: 1956935 - RNA, 19 nt, Artificial Sequence
  Description of Artificial Sequence: Synthetic oligonucleotide
  Antisense strand to SEQ ID NO: 1956934
acucugauaaccuguguuu

SEQ ID NO: 1956936 - RNA, 19 nt, Artificial Sequence
  Description of Artificial Sequence: Synthetic oligonucleotide
  Sense strand starting at position 1930 of SEQ ID NO: 1880300
agguuaucagagugggaga

SEQ ID NO: 1956937 - RNA, 19 nt, Artificial Sequence
  Description of Artificial Sequence: Synthetic oligonucleotide
  Antisense strand to SEQ ID NO: 1956936
ucucccacucugauaaccu

SEQ ID NO: 1956938 - RNA, 19 nt, Artificial Sequence
  Description of Artificial Sequence: Synthetic oligonucleotide
  Sense strand starting at position 2345 of SEQ ID NO: 1880300
uggccaguaggugauauaa

SEQ ID NO: 1956939 - RNA, 19 nt, Artificial Sequence
  Description of Artificial Sequence: Synthetic oligonucleotide
  Antisense strand to SEQ ID NO: 1956938
uuauaucaccuacuggcca

SEQ ID NO: 1956940 - RNA, 19 nt, Artificial Sequence
  Description of Artificial Sequence: Synthetic oligonucleotide
  Sense strand starting at position 2355 of SEQ ID NO: 1880300
gugauauaacgauaguaau

SEQ ID NO: 1956941 - RNA, 19 nt, Artificial Sequence
  Description of Artificial Sequence: Synthetic oligonucleotide
  Antisense strand to SEQ ID NO: 1956940
auuacuaucguuauaucac

SEQ ID NO: 1956942 - RNA, 19 nt, Artificial Sequence
  Description of Artificial Sequence: Synthetic oligonucleotide
  Sense strand starting at position 2684 of SEQ ID NO: 1880300
auaguauggauguacugua

SEQ ID NO: 1956943 - RNA, 19 nt, Artificial Sequence
  Description of Artificial Sequence: Synthetic oligonucleotide
  Antisense strand to SEQ ID NO: 1956942
uacaguacauccauacuau

SEQ ID NO: 1956944 - RNA, 19 nt, Artificial Sequence
  Description of Artificial Sequence: Synthetic oligonucleotide
  Sense strand starting at position 2689 of SEQ ID NO: 1880300
auggauguacuguaacuua

SEQ ID NO: 1956945 - RNA, 19 nt, Artificial Sequence
  Description of Artificial Sequence: Synthetic oligonucleotide
  Antisense strand to SEQ ID NO: 1956944
uaaguuacaguacauccau

SEQ ID NO: 1956946 - RNA, 19 nt, Artificial Sequence
  Description of Artificial Sequence: Synthetic oligonucleotide
  Sense strand starting at position 2802 of SEQ ID NO: 1880300
gugguuauaggauagauuc

SEQ ID NO: 1956947 - RNA, 19 nt, Artificial Sequence
  Description of Artificial Sequence: Synthetic oligonucleotide
  Antisense strand to SEQ ID NO: 1956946
gaaucuauccuauaaccac

SEQ ID NO: 1956948 - RNA, 19 nt, Artificial Sequence
  Description of Artificial Sequence: Synthetic oligonucleotide
  Sense strand starting at position 2884 of SEQ ID NO: 1880300
caagauggcuugcccagaa

SEQ ID NO: 1956949 - RNA, 19 nt, Artificial Sequence
  Description of Artificial Sequence: Synthetic oligonucleotide
  Antisense strand to SEQ ID NO: 1956948
uucugggcaagccaucuug

SEQ ID NO: 1956950 - RNA, 19 nt, Artificial Sequence
  Description of Artificial Sequence: Synthetic oligonucleotide
  Sense strand starting at position 3046 of SEQ ID NO: 1880300
cucugauaacuaggaaagu

SEQ ID NO: 1956951 - RNA, 19 nt, Artificial Sequence
  Description of Artificial Sequence: Synthetic oligonucleotide
  Antisense strand to SEQ ID NO: 1956950
acuuuccuaguuaucagag

SEQ ID NO: 1956952 - RNA, 19 nt, Artificial Sequence
  Description of Artificial Sequence: Synthetic oligonucleotide
  Sense strand starting at position 3073 of SEQ ID NO: 1880300
uguccauauguuuaccauu

SEQ ID NO: 1956953 - RNA, 19 nt, Artificial Sequence
  Description of Artificial Sequence: Synthetic oligonucleotide
  Antisense strand to SEQ ID NO: 1956952
aaugguaaacauauggaca

SEQ ID NO: 1956954 - RNA, 19 nt, Artificial Sequence
  Description of Artificial Sequence: Synthetic oligonucleotide
  Sense strand starting at position 3111 of SEQ ID NO: 1880300
cgugaaaucuuccuaccaa

SEQ ID NO: 1956955 - RNA, 19 nt, Artificial Sequence
  Description of Artificial Sequence: Synthetic oligonucleotide
  Antisense strand to SEQ ID NO: 1956954
uugguaggaagauuucacg

SEQ ID NO: 1956956 - RNA, 19 nt, Artificial Sequence
  Description of Artificial Sequence: Synthetic oligonucleotide
  Sense strand starting at position 3214 of SEQ ID NO: 1880300
gugucucugccauacagaa

SEQ ID NO: 1956957 - RNA, 19 nt, Artificial Sequence
  Description of Artificial Sequence: Synthetic oligonucleotide
  Antisense strand to SEQ ID NO: 1956956
uucuguauggcagagacac

SEQ ID NO: 1956958 - RNA, 19 nt, Artificial Sequence
  Description of Artificial Sequence: Synthetic oligonucleotide
  Sense strand starting at position 3283 of SEQ ID NO: 1880300
ucuugucuugcuuaaagac

SEQ ID NO: 1956959 - RNA, 19 nt, Artificial Sequence
  Description of Artificial Sequence: Synthetic oligonucleotide
  Antisense strand to SEQ ID NO: 1956958
gucuuuaagcaagacaaga

SEQ ID NO: 1956960 - RNA, 19 nt, Artificial Sequence
  Description of Artificial Sequence: Synthetic oligonucleotide
  Sense strand starting at position 3405 of SEQ ID NO: 1880300
uuuacaugccuggaaugua

SEQ ID NO: 1956961 - RNA, 19 nt, Artificial Sequence
  Description of Artificial Sequence: Synthetic oligonucleotide
  Antisense strand to SEQ ID NO: 1956960
uacauuccaggcauguaaa

SEQ ID NO: 1956962 - RNA, 19 nt, Artificial Sequence
  Description of Artificial Sequence: Synthetic oligonucleotide
  Sense strand starting at position 3517 of SEQ ID NO: 1880300
guucuauaauaguccuaua

SEQ ID NO: 1956963 - RNA, 19 nt, Artificial Sequence
  Description of Artificial Sequence: Synthetic oligonucleotide
  Antisense strand to SEQ ID NO: 1956962
uauaggacuauuauagaac

SEQ ID NO: 1956964 - RNA, 19 nt, Artificial Sequence
  Description of Artificial Sequence: Synthetic oligonucleotide
  Sense strand starting at position 3649 of SEQ ID NO: 1880300
aggcaaguccucuaucucu

SEQ ID NO: 1956965 - RNA, 19 nt, Artificial Sequence
  Description of Artificial Sequence: Synthetic oligonucleotide
  Antisense strand to SEQ ID NO: 1956964
agagauagaggacuugccu

SEQ ID NO: 1956966 - RNA, 19 nt, Artificial Sequence
  Description of Artificial Sequence: Synthetic oligonucleotide
  Sense strand starting at position 3699 of SEQ ID NO: 1880300
agacauuuaugugaacuuu

SEQ ID NO: 1956967 - RNA, 19 nt, Artificial Sequence
  Description of Artificial Sequence: Synthetic oligonucleotide
  Antisense strand to SEQ ID NO: 1956966
aaaguucacauaaaugucu

SEQ ID NO: 1956968 - RNA, 19 nt, Artificial Sequence
  Description of Artificial Sequence: Synthetic oligonucleotide
  Sense strand starting at position 3752 of SEQ ID NO: 1880300
auccauuaggguuggauca

SEQ ID NO: 1956969 - RNA, 19 nt, Artificial Sequence
  Description of Artificial Sequence: Synthetic oligonucleotide
  Antisense strand to SEQ ID NO: 1956968
ugauccaacccuaauggau

SEQ ID NO: 1956970 - RNA, 19 nt, Artificial Sequence
  Description of Artificial Sequence: Synthetic oligonucleotide
  Sense strand starting at position 3753 of SEQ ID NO: 1880300
uccauuaggguuggaucaa

SEQ ID NO: 1956971 - RNA, 19 nt, Artificial Sequence
  Description of Artificial Sequence: Synthetic oligonucleotide
  Antisense strand to SEQ ID NO: 1956970
uugauccaacccuaaugga

SEQ ID NO: 1956972 - RNA, 19 nt, Artificial Sequence
  Description of Artificial Sequence: Synthetic oligonucleotide
  Sense strand starting at position 3803 of SEQ ID NO: 1880300
uuaugcuaguaacuaagaa

SEQ ID NO: 1956973 - RNA, 19 nt, Artificial Sequence
  Description of Artificial Sequence: Synthetic oligonucleotide
  Antisense strand to SEQ ID NO: 1956972
uucuuaguuacuagcauaa

SEQ ID NO: 1956974 - RNA, 19 nt, Artificial Sequence
  Description of Artificial Sequence: Synthetic oligonucleotide
  Sense strand starting at position 3930 of SEQ ID NO: 1880300
ggcccuauugcagauggga

SEQ ID NO: 1956975 - RNA, 19 nt, Artificial Sequence
  Description of Artificial Sequence: Synthetic oligonucleotide
  Antisense strand to SEQ ID NO: 1956974
ucccaucugcaauagggcc

SEQ ID NO: 1956976 - RNA, 19 nt, Artificial Sequence
  Description of Artificial Sequence: Synthetic oligonucleotide
  Sense strand starting at position 116 of SEQ ID NO: 1880301
agaaacaauccagggcuau

SEQ ID NO: 1956977 - RNA, 19 nt, Artificial Sequence
  Description of Artificial Sequence: Synthetic oligonucleotide
  Antisense strand to SEQ ID NO: 1956976
auagcccuggauuguuucu

SEQ ID NO: 1956978 - RNA, 19 nt, Artificial Sequence
  Description of Artificial Sequence: Synthetic oligonucleotide
  Sense strand starting at position 150 of SEQ ID NO: 1880301
gguagaggcugucaccauu

SEQ ID NO: 1956979 - RNA, 19 nt, Artificial Sequence
  Description of Artificial Sequence: Synthetic oligonucleotide
  Antisense strand to SEQ ID NO: 1956978
aauggugacagccucuacc

SEQ ID NO: 1956980 - RNA, 19 nt, Artificial Sequence
  Description of Artificial Sequence: Synthetic oligonucleotide
  Sense strand starting at position 227 of SEQ ID NO: 1880301
uuguguugccucuguggua

SEQ ID NO: 1956981 - RNA, 19 nt, Artificial Sequence
  Description of Artificial Sequence: Synthetic oligonucleotide
  Antisense strand to SEQ ID NO: 1956980
uaccacagaggcaacacaa

SEQ ID NO: 1956982 - RNA, 19 nt, Artificial Sequence
  Description of Artificial Sequence: Synthetic oligonucleotide
  Sense strand starting at position 240 of SEQ ID NO: 1880301
gugguagaaccuugauaua

SEQ ID NO: 1956983 - RNA, 19 nt, Artificial Sequence
  Description of Artificial Sequence: Synthetic oligonucleotide
  Antisense strand to SEQ ID NO: 1956982
uauaucaagguucuaccac

SEQ ID NO: 1956984 - RNA, 19 nt, Artificial Sequence
  Description of Artificial Sequence: Synthetic oligonucleotide
  Sense strand starting at position 243 of SEQ ID NO: 1880301
guagaaccuugauauaaag

SEQ ID NO: 1956985 - RNA, 19 nt, Artificial Sequence
  Description of Artificial Sequence: Synthetic oligonucleotide
  Antisense strand to SEQ ID NO: 1956984
cuuuauaucaagguucuac

SEQ ID NO: 1956986 - RNA, 19 nt, Artificial Sequence
  Description of Artificial Sequence: Synthetic oligonucleotide
  Sense strand starting at position 336 of SEQ ID NO: 1880301
gaggacaguuaauaccuua

SEQ ID NO: 1956987 - RNA, 19 nt, Artificial Sequence
  Description of Artificial Sequence: Synthetic oligonucleotide
  Antisense strand to SEQ ID NO: 1956986
uaagguauuaacuguccuc

SEQ ID NO: 1956988 - RNA, 19 nt, Artificial Sequence
  Description of Artificial Sequence: Synthetic oligonucleotide
  Sense strand starting at position 538 of SEQ ID NO: 1880301
cugaacuugcaggguaaga

SEQ ID NO: 1956989 - RNA, 19 nt, Artificial Sequence
  Description of Artificial Sequence: Synthetic oligonucleotide
  Antisense strand to SEQ ID NO: 1956988
ucuuacccugcaaguucag

SEQ ID NO: 1956990 - RNA, 19 nt, Artificial Sequence
  Description of Artificial Sequence: Synthetic oligonucleotide
  Sense strand starting at position 561 of SEQ ID NO: 1880301
guaccacaucuuggauaga

SEQ ID NO: 1956991 - RNA, 19 nt, Artificial Sequence
  Description of Artificial Sequence: Synthetic oligonucleotide
  Antisense strand to SEQ ID NO: 1956990
ucuauccaagaugugguac

SEQ ID NO: 1956992 - RNA, 19 nt, Artificial Sequence
  Description of Artificial Sequence: Synthetic oligonucleotide
  Sense strand starting at position 763 of SEQ ID NO: 1880301
ggucuaagggccgaagaaa

SEQ ID NO: 1956993 - RNA, 19 nt, Artificial Sequence
  Description of Artificial Sequence: Synthetic oligonucleotide
  Antisense strand to SEQ ID NO: 1956992
uuucuucggcccuuagacc

SEQ ID NO: 1956994 - RNA, 19 nt, Artificial Sequence
  Description of Artificial Sequence: Synthetic oligonucleotide
  Sense strand starting at position 885 of SEQ ID NO: 1880301
uggccucuuccucagggaa

SEQ ID NO: 1956995 - RNA, 19 nt, Artificial Sequence
  Description of Artificial Sequence: Synthetic oligonucleotide
  Antisense strand to SEQ ID NO: 1956994
uucccugaggaagaggcca

SEQ ID NO: 1956996 - RNA, 19 nt, Artificial Sequence
  Description of Artificial Sequence: Synthetic oligonucleotide
  Sense strand starting at position 887 of SEQ ID NO: 1880301
gccucuuccucagggaaua

SEQ ID NO: 1956997 - RNA, 19 nt, Artificial Sequence
  Description of Artificial Sequence: Synthetic oligonucleotide
  Antisense strand to SEQ ID NO: 1956996
uauucccugaggaagaggc

SEQ ID NO: 1956998 - RNA, 19 nt, Artificial Sequence
  Description of Artificial Sequence: Synthetic oligonucleotide
  Sense strand starting at position 937 of SEQ ID NO: 1880301
agcacagaaucucuugagu

SEQ ID NO: 1956999 - RNA, 19 nt, Artificial Sequence
  Description of Artificial Sequence: Synthetic oligonucleotide
  Antisense strand to SEQ ID NO: 1956998
acucaagagauucugugcu

SEQ ID NO: 1957000 - RNA, 19 nt, Artificial Sequence
  Description of Artificial Sequence: Synthetic oligonucleotide
  Sense strand starting at position 939 of SEQ ID NO: 1880301
cacagaaucucuugaguga

SEQ ID NO: 1957001 - RNA, 19 nt, Artificial Sequence
  Description of Artificial Sequence: Synthetic oligonucleotide
  Antisense strand to SEQ ID NO: 1957000
ucacucaagagauucugug

SEQ ID NO: 1957002 - RNA, 19 nt, Artificial Sequence
  Description of Artificial Sequence: Synthetic oligonucleotide
  Sense strand starting at position 1262 of SEQ ID NO: 1880301
uauguuguggucgaaaggu

SEQ ID NO: 1957003 - RNA, 19 nt, Artificial Sequence
  Description of Artificial Sequence: Synthetic oligonucleotide
  Antisense strand to SEQ ID NO: 1957002
accuuucgaccacaacaua

SEQ ID NO: 1957004 - RNA, 19 nt, Artificial Sequence
  Description of Artificial Sequence: Synthetic oligonucleotide
  Sense strand starting at position 1264 of SEQ ID NO: 1880301
uguuguggucgaaaggugu

SEQ ID NO: 1957005 - RNA, 19 nt, Artificial Sequence
  Description of Artificial Sequence: Synthetic oligonucleotide
  Antisense strand to SEQ ID NO: 1957004
acaccuuucgaccacaaca

SEQ ID NO: 1957006 - RNA, 19 nt, Artificial Sequence
  Description of Artificial Sequence: Synthetic oligonucleotide
  Sense strand starting at position 1268 of SEQ ID NO: 1880301
guggucgaaaggugucaca

SEQ ID NO: 1957007 - RNA, 19 nt, Artificial Sequence
  Description of Artificial Sequence: Synthetic oligonucleotide
  Antisense strand to SEQ ID NO: 1957006
ugugacaccuuucgaccac

SEQ ID NO: 1957008 - RNA, 19 nt, Artificial Sequence
  Description of Artificial Sequence: Synthetic oligonucleotide
  Sense strand starting at position 1278 of SEQ ID NO: 1880301
ggugucacaugguuggaaa

SEQ ID NO: 1957009 - RNA, 19 nt, Artificial Sequence
  Description of Artificial Sequence: Synthetic oligonucleotide
  Antisense strand to SEQ ID NO: 1957008
uuuccaaccaugugacacc

SEQ ID NO: 1957010 - RNA, 19 nt, Artificial Sequence
  Description of Artificial Sequence: Synthetic oligonucleotide
  Sense strand starting at position 1279 of SEQ ID NO: 1880301
gugucacaugguuggaaau

SEQ ID NO: 1957011 - RNA, 19 nt, Artificial Sequence
  Description of Artificial Sequence: Synthetic oligonucleotide
  Antisense strand to SEQ ID NO: 1957010
auuuccaaccaugugacac

SEQ ID NO: 1957012 - RNA, 19 nt, Artificial Sequence
  Description of Artificial Sequence: Synthetic oligonucleotide
  Sense strand starting at position 1281 of SEQ ID NO: 1880301
gucacaugguuggaaauga

SEQ ID NO: 1957013 - RNA, 19 nt, Artificial Sequence
  Description of Artificial Sequence: Synthetic oligonucleotide
  Antisense strand to SEQ ID NO: 1957012
ucauuuccaaccaugugac

SEQ ID NO: 1957014 - RNA, 19 nt, Artificial Sequence
  Description of Artificial Sequence: Synthetic oligonucleotide
  Sense strand starting at position 1505 of SEQ ID NO: 1880301
agacguggaucccgagaaa

SEQ ID NO: 1957015 - RNA, 19 nt, Artificial Sequence
  Description of Artificial Sequence: Synthetic oligonucleotide
  Antisense strand to SEQ ID NO: 1957014
uuucucgggauccacgucu

SEQ ID NO: 1957016 - RNA, 19 nt, Artificial Sequence
  Description of Artificial Sequence: Synthetic oligonucleotide
  Sense strand starting at position 2680 of SEQ ID NO: 1880301
gucagagccuccucuuauc

SEQ ID NO: 1957017 - RNA, 19 nt, Artificial Sequence
  Description of Artificial Sequence: Synthetic oligonucleotide
  Antisense strand to SEQ ID NO: 1957016
gauaagaggaggcucugac

SEQ ID NO: 1957018 - RNA, 19 nt, Artificial Sequence
  Description of Artificial Sequence: Synthetic oligonucleotide
  Sense strand starting at position 2959 of SEQ ID NO: 1880301
ugcuuauuugcucgcaucu

SEQ ID NO: 1957019 - RNA, 19 nt, Artificial Sequence
  Description of Artificial Sequence: Synthetic oligonucleotide
  Antisense strand to SEQ ID NO: 1957018
agaugcgagcaaauaagca

SEQ ID NO: 1957020 - RNA, 19 nt, Artificial Sequence
  Description of Artificial Sequence: Synthetic oligonucleotide
  Sense strand starting at position 3278 of SEQ ID NO: 1880301
acugauauaugguggauga

SEQ ID NO: 1957021 - RNA, 19 nt, Artificial Sequence
  Description of Artificial Sequence: Synthetic oligonucleotide
  Antisense strand to SEQ ID NO: 1957020
ucauccaccauauaucagu

SEQ ID NO: 1957022 - RNA, 19 nt, Artificial Sequence
  Description of Artificial Sequence: Synthetic oligonucleotide
  Sense strand starting at position 3279 of SEQ ID NO: 1880301
cugauauaugguggaugag

SEQ ID NO: 1957023 - RNA, 19 nt, Artificial Sequence
  Description of Artificial Sequence: Synthetic oligonucleotide
  Antisense strand to SEQ ID NO: 1957022
cucauccaccauauaucag

SEQ ID NO: 1957024 - RNA, 19 nt, Artificial Sequence
  Description of Artificial Sequence: Synthetic oligonucleotide
  Sense strand starting at position 3288 of SEQ ID NO: 1880301
gguggaugagccuauauag

SEQ ID NO: 1957025 - RNA, 19 nt, Artificial Sequence
  Description of Artificial Sequence: Synthetic oligonucleotide
  Antisense strand to SEQ ID NO: 1957024
cuauauaggcucauccacc

SEQ ID NO: 1957026 - RNA, 19 nt, Artificial Sequence
  Description of Artificial Sequence: Synthetic oligonucleotide
  Sense strand starting at position 3433 of SEQ ID NO: 1880301
guccuacaguuuggaaacu

SEQ ID NO: 1957027 - RNA, 19 nt, Artificial Sequence
  Description of Artificial Sequence: Synthetic oligonucleotide
  Antisense strand to SEQ ID NO: 1957026
aguuuccaaacuguaggac

SEQ ID NO: 1957028 - RNA, 19 nt, Artificial Sequence
  Description of Artificial Sequence: Synthetic oligonucleotide
  Sense strand starting at position 3462 of SEQ ID NO: 1880301
ccugguuaaccuggugagu

SEQ ID NO: 1957029 - RNA, 19 nt, Artificial Sequence
  Description of Artificial Sequence: Synthetic oligonucleotide
  Antisense strand to SEQ ID NO: 1957028
acucaccagguuaaccagg

SEQ ID NO: 1957030 - RNA, 19 nt, Artificial Sequence
  Description of Artificial Sequence: Synthetic oligonucleotide
  Sense strand starting at position 3464 of SEQ ID NO: 1880301
ugguuaaccuggugaguga

SEQ ID NO: 1957031 - RNA, 19 nt, Artificial Sequence
  Description of Artificial Sequence: Synthetic oligonucleotide
  Antisense strand to SEQ ID NO: 1957030
ucacucaccagguuaacca

SEQ ID NO: 1957032 - RNA, 19 nt, Artificial Sequence
  Description of Artificial Sequence: Synthetic oligonucleotide
  Sense strand starting at position 3473 of SEQ ID NO: 1880301
uggugagugagacauccuu

SEQ ID NO: 1957033 - RNA, 19 nt, Artificial Sequence
  Description of Artificial Sequence: Synthetic oligonucleotide
  Antisense strand to SEQ ID NO: 1957032
aaggaugucucacucacca

SEQ ID NO: 1957034 - RNA, 19 nt, Artificial Sequence
  Description of Artificial Sequence: Synthetic oligonucleotide
  Sense strand starting at position 3547 of SEQ ID NO: 1880301
caaggauguuuggucaagu

SEQ ID NO: 1957035 - RNA, 19 nt, Artificial Sequence
  Description of Artificial Sequence: Synthetic oligonucleotide
  Antisense strand to SEQ ID NO: 1957034
acuugaccaaacauccuug

SEQ ID NO: 1957036 - RNA, 19 nt, Artificial Sequence
  Description of Artificial Sequence: Synthetic oligonucleotide
  Sense strand starting at position 3548 of SEQ ID NO: 1880301
aaggauguuuggucaaguu

SEQ ID NO: 1957037 - RNA, 19 nt, Artificial Sequence
  Description of Artificial Sequence: Synthetic oligonucleotide
  Antisense strand to SEQ ID NO: 1957036
aacuugaccaaacauccuu

SEQ ID NO: 1957038 - RNA, 19 nt, Artificial Sequence
  Description of Artificial Sequence: Synthetic oligonucleotide
  Sense strand starting at position 3560 of SEQ ID NO: 1880301
ucaaguuucugagcaguuc

SEQ ID NO: 1957039 - RNA, 19 nt, Artificial Sequence
  Description of Artificial Sequence: Synthetic oligonucleotide
  Antisense strand to SEQ ID NO: 1957038
gaacugcucagaaacuuga

SEQ ID NO: 1957040 - RNA, 19 nt, Artificial Sequence
  Description of Artificial Sequence: Synthetic oligonucleotide
  Sense strand starting at position 3571 of SEQ ID NO: 1880301
agcaguucuuuguuggcua

SEQ ID NO: 1957041 - RNA, 19 nt, Artificial Sequence
  Description of Artificial Sequence: Synthetic oligonucleotide
  Antisense strand to SEQ ID NO: 1957040
uagccaacaaagaacugcu

SEQ ID NO: 1957042 - RNA, 19 nt, Artificial Sequence
  Description of Artificial Sequence: Synthetic oligonucleotide
  Sense strand starting at position 3685 of SEQ ID NO: 1880301
gcuguaucccugcaggaug

SEQ ID NO: 1957043 - RNA, 19 nt, Artificial Sequence
  Description of Artificial Sequence: Synthetic oligonucleotide
  Antisense strand to SEQ ID NO: 1957042
cauccugcagggauacagc

SEQ ID NO: 1957044 - RNA, 19 nt, Artificial Sequence
  Description of Artificial Sequence: Synthetic oligonucleotide
  Sense strand starting at position 3823 of SEQ ID NO: 1880301
ggaaacggguuccuuuaau

SEQ ID NO: 1957045 - RNA, 19 nt, Artificial Sequence
  Description of Artificial Sequence: Synthetic oligonucleotide
  Antisense strand to SEQ ID NO: 1957044
auuaaaggaacccguuucc

SEQ ID NO: 1957046 - RNA, 19 nt, Artificial Sequence
  Description of Artificial Sequence: Synthetic oligonucleotide
  Sense strand starting at position 3832 of SEQ ID NO: 1880301
uuccuuuaaugugguggaa

SEQ ID NO: 1957047 - RNA, 19 nt, Artificial Sequence
  Description of Artificial Sequence: Synthetic oligonucleotide
  Antisense strand to SEQ ID NO: 1957046
uuccaccacauuaaaggaa

SEQ ID NO: 1957048 - RNA, 19 nt, Artificial Sequence
  Description of Artificial Sequence: Synthetic oligonucleotide
  Sense strand starting at position 3834 of SEQ ID NO: 1880301
ccuuuaaugugguggaaau

SEQ ID NO: 1957049 - RNA, 19 nt, Artificial Sequence
  Description of Artificial Sequence: Synthetic oligonucleotide
  Antisense strand to SEQ ID NO: 1957048
auuuccaccacauuaaagg

SEQ ID NO: 1957050 - RNA, 19 nt, Artificial Sequence
  Description of Artificial Sequence: Synthetic oligonucleotide
  Sense strand starting at position 3835 of SEQ ID NO: 1880301
cuuuaaugugguggaaaua

SEQ ID NO: 1957051 - RNA, 19 nt, Artificial Sequence
  Description of Artificial Sequence: Synthetic oligonucleotide
  Antisense strand to SEQ ID NO: 1957050
uauuuccaccacauuaaag

SEQ ID NO: 1957052 - RNA, 19 nt, Artificial Sequence
  Description of Artificial Sequence: Synthetic oligonucleotide
  Sense strand starting at position 3886 of SEQ ID NO: 1880301
guggucuacugggagaaga

SEQ ID NO: 1957053 - RNA, 19 nt, Artificial Sequence
  Description of Artificial Sequence: Synthetic oligonucleotide
  Antisense strand to SEQ ID NO: 1957052
ucuucucccaguagaccac

SEQ ID NO: 1957054 - RNA, 19 nt, Artificial Sequence
  Description of Artificial Sequence: Synthetic oligonucleotide
  Sense strand starting at position 3955 of SEQ ID NO: 1880301
acagauuccuccuccggaa

SEQ ID NO: 1957055 - RNA, 19 nt, Artificial Sequence
  Description of Artificial Sequence: Synthetic oligonucleotide
  Antisense strand to SEQ ID NO: 1957054
uuccggaggaggaaucugu

SEQ ID NO: 1957056 - RNA, 19 nt, Artificial Sequence
  Description of Artificial Sequence: Synthetic oligonucleotide
  Sense strand starting at position 79 of SEQ ID NO: 1880302
caggcauucugaccacagu

SEQ ID NO: 1957057 - RNA, 19 nt, Artificial Sequence
  Description of Artificial Sequence: Synthetic oligonucleotide
  Antisense strand to SEQ ID NO: 1957056
acuguggucagaaugccug

SEQ ID NO: 1957058 - RNA, 19 nt, Artificial Sequence
  Description of Artificial Sequence: Synthetic oligonucleotide
  Sense strand starting at position 82 of SEQ ID NO: 1880302
gcauucugaccacagucua

SEQ ID NO: 1957059 - RNA, 19 nt, Artificial Sequence
  Description of Artificial Sequence: Synthetic oligonucleotide
  Antisense strand to SEQ ID NO: 1957058
uagacuguggucagaaugc

SEQ ID NO: 1957060 - RNA, 19 nt, Artificial Sequence
  Description of Artificial Sequence: Synthetic oligonucleotide
  Sense strand starting at position 130 of SEQ ID NO: 1880302
gugccaagggaaugucuaa

SEQ ID NO: 1957061 - RNA, 19 nt, Artificial Sequence
  Description of Artificial Sequence: Synthetic oligonucleotide
  Antisense strand to SEQ ID NO: 1957060
uuagacauucccuuggcac

SEQ ID NO: 1957062 - RNA, 19 nt, Artificial Sequence
  Description of Artificial Sequence: Synthetic oligonucleotide
  Sense strand starting at position 137 of SEQ ID NO: 1880302
gggaaugucuaacuuucgu

SEQ ID NO: 1957063 - RNA, 19 nt, Artificial Sequence
  Description of Artificial Sequence: Synthetic oligonucleotide
  Antisense strand to SEQ ID NO: 1957062
acgaaaguuagacauuccc

SEQ ID NO: 1957064 - RNA, 19 nt, Artificial Sequence
  Description of Artificial Sequence: Synthetic oligonucleotide
  Sense strand starting at position 144 of SEQ ID NO: 1880302
ucuaacuuucguuggacua

SEQ ID NO: 1957065 - RNA, 19 nt, Artificial Sequence
  Description of Artificial Sequence: Synthetic oligonucleotide
  Antisense strand to SEQ ID NO: 1957064
uaguccaacgaaaguuaga

SEQ ID NO: 1957066 - RNA, 19 nt, Artificial Sequence
  Description of Artificial Sequence: Synthetic oligonucleotide
  Sense strand starting at position 145 of SEQ ID NO: 1880302
cuaacuuucguuggacuau

SEQ ID NO: 1957067 - RNA, 19 nt, Artificial Sequence
  Description of Artificial Sequence: Synthetic oligonucleotide
  Antisense strand to SEQ ID NO: 1957066
auaguccaacgaaaguuag

SEQ ID NO: 1957068 - RNA, 19 nt, Artificial Sequence
  Description of Artificial Sequence: Synthetic oligonucleotide
  Sense strand starting at position 157 of SEQ ID NO: 1880302
ggacuaucaaggugugaac

SEQ ID NO: 1957069 - RNA, 19 nt, Artificial Sequence
  Description of Artificial Sequence: Synthetic oligonucleotide
  Antisense strand to SEQ ID NO: 1957068
guucacaccuugauagucc

SEQ ID NO: 1957070 - RNA, 19 nt, Artificial Sequence
  Description of Artificial Sequence: Synthetic oligonucleotide
  Sense strand starting at position 159 of SEQ ID NO: 1880302
acuaucaaggugugaacua

SEQ ID NO: 1957071 - RNA, 19 nt, Artificial Sequence
  Description of Artificial Sequence: Synthetic oligonucleotide
  Antisense strand to SEQ ID NO: 1957070
uaguucacaccuugauagu

SEQ ID NO: 1957072 - RNA, 19 nt, Artificial Sequence
  Description of Artificial Sequence: Synthetic oligonucleotide
  Sense strand starting at position 166 of SEQ ID NO: 1880302
aggugugaacuauaaugcu

SEQ ID NO: 1957073 - RNA, 19 nt, Artificial Sequence
  Description of Artificial Sequence: Synthetic oligonucleotide
  Antisense strand to SEQ ID NO: 1957072
agcauuauaguucacaccu

SEQ ID NO: 1957074 - RNA, 19 nt, Artificial Sequence
  Description of Artificial Sequence: Synthetic oligonucleotide
  Sense strand starting at position 228 of SEQ ID NO: 1880302
ucagaugacccaugugcua

SEQ ID NO: 1957075 - RNA, 19 nt, Artificial Sequence
  Description of Artificial Sequence: Synthetic oligonucleotide
  Antisense strand to SEQ ID NO: 1957074
uagcacaugggucaucuga

SEQ ID NO: 1957076 - RNA, 19 nt, Artificial Sequence
  Description of Artificial Sequence: Synthetic oligonucleotide
  Sense strand starting at position 235 of SEQ ID NO: 1880302
acccaugugcuacaggaaa

SEQ ID NO: 1957077 - RNA, 19 nt, Artificial Sequence
  Description of Artificial Sequence: Synthetic oligonucleotide
  Antisense strand to SEQ ID NO: 1957076
uuuccuguagcacaugggu

SEQ ID NO: 1957078 - RNA, 19 nt, Artificial Sequence
  Description of Artificial Sequence: Synthetic oligonucleotide
  Sense strand starting at position 280 of SEQ ID NO: 1880302
uguacucacuuaucugagu

SEQ ID NO: 1957079 - RNA, 19 nt, Artificial Sequence
  Description of Artificial Sequence: Synthetic oligonucleotide
  Antisense strand to SEQ ID NO: 1957078
acucagauaagugaguaca

SEQ ID NO: 1957080 - RNA, 19 nt, Artificial Sequence
  Description of Artificial Sequence: Synthetic oligonucleotide
  Sense strand starting at position 285 of SEQ ID NO: 1880302
ucacuuaucugagugucac

SEQ ID NO: 1957081 - RNA, 19 nt, Artificial Sequence
  Description of Artificial Sequence: Synthetic oligonucleotide
  Antisense strand to SEQ ID NO: 1957080
gugacacucagauaaguga

SEQ ID NO: 1957082 - RNA, 19 nt, Artificial Sequence
  Description of Artificial Sequence: Synthetic oligonucleotide
  Sense strand starting at position 309 of SEQ ID NO: 1880302
uaagaagugcaaugucauu

SEQ ID NO: 1957083 - RNA, 19 nt, Artificial Sequence
  Description of Artificial Sequence: Synthetic oligonucleotide
  Antisense strand to SEQ ID NO: 1957082
aaugacauugcacuucuua

SEQ ID NO: 1957084 - RNA, 19 nt, Artificial Sequence
  Description of Artificial Sequence: Synthetic oligonucleotide
  Sense strand starting at position 752 of SEQ ID NO: 1880302
acuuaaguucugcaaguua

SEQ ID NO: 1957085 - RNA, 19 nt, Artificial Sequence
  Description of Artificial Sequence: Synthetic oligonucleotide
  Antisense strand to SEQ ID NO: 1957084
uaacuugcagaacuuaagu

SEQ ID NO: 1957086 - RNA, 19 nt, Artificial Sequence
  Description of Artificial Sequence: Synthetic oligonucleotide
  Sense strand starting at position 855 of SEQ ID NO: 1880302
agaaauacuuagcuguaca

SEQ ID NO: 1957087 - RNA, 19 nt, Artificial Sequence
  Description of Artificial Sequence: Synthetic oligonucleotide
  Antisense strand to SEQ ID NO: 1957086
uguacagcuaaguauuucu

SEQ ID NO: 1957088 - RNA, 19 nt, Artificial Sequence
  Description of Artificial Sequence: Synthetic oligonucleotide
  Sense strand starting at position 1010 of SEQ ID NO: 1880302
augucuuuggacggaauga

SEQ ID NO: 1957089 - RNA, 19 nt, Artificial Sequence
  Description of Artificial Sequence: Synthetic oligonucleotide
  Antisense strand to SEQ ID NO: 1957088
ucauuccguccaaagacau

SEQ ID NO: 1957090 - RNA, 19 nt, Artificial Sequence
  Description of Artificial Sequence: Synthetic oligonucleotide
  Sense strand starting at position 1011 of SEQ ID NO: 1880302
ugucuuuggacggaaugaa

SEQ ID NO: 1957091 - RNA, 19 nt, Artificial Sequence
  Description of Artificial Sequence: Synthetic oligonucleotide
  Antisense strand to SEQ ID NO: 1957090
uucauuccguccaaagaca

SEQ ID NO: 1957092 - RNA, 19 nt, Artificial Sequence
  Description of Artificial Sequence: Synthetic oligonucleotide
  Sense strand starting at position 1135 of SEQ ID NO: 1880302
augagaaauuccgugccau

SEQ ID NO: 1957093 - RNA, 19 nt, Artificial Sequence
  Description of Artificial Sequence: Synthetic oligonucleotide
  Antisense strand to SEQ ID NO: 1957092
auggcacggaauuucucau

SEQ ID NO: 1957094 - RNA, 19 nt, Artificial Sequence
  Description of Artificial Sequence: Synthetic oligonucleotide
  Sense strand starting at position 1236 of SEQ ID NO: 1880302
gccaguuuaacuuagagug

SEQ ID NO: 1957095 - RNA, 19 nt, Artificial Sequence
  Description of Artificial Sequence: Synthetic oligonucleotide
  Antisense strand to SEQ ID NO: 1957094
cacucuaaguuaaacuggc

SEQ ID NO: 1957096 - RNA, 19 nt, Artificial Sequence
  Description of Artificial Sequence: Synthetic oligonucleotide
  Sense strand starting at position 1252 of SEQ ID NO: 1880302
guggcagcugcuucuaauu

SEQ ID NO: 1957097 - RNA, 19 nt, Artificial Sequence
  Description of Artificial Sequence: Synthetic oligonucleotide
  Antisense strand to SEQ ID NO: 1957096
aauuagaagcagcugccac

SEQ ID NO: 1957098 - RNA, 19 nt, Artificial Sequence
  Description of Artificial Sequence: Synthetic oligonucleotide
  Sense strand starting at position 1531 of SEQ ID NO: 1880302
agaagcagaaguuguuaau

SEQ ID NO: 1957099 - RNA, 19 nt, Artificial Sequence
  Description of Artificial Sequence: Synthetic oligonucleotide
  Antisense strand to SEQ ID NO: 1957098
auuaacaacuucugcuucu

SEQ ID NO: 1957100 - RNA, 19 nt, Artificial Sequence
  Description of Artificial Sequence: Synthetic oligonucleotide
  Sense strand starting at position 1843 of SEQ ID NO: 1880302
gccgauuauccggcaucgu

SEQ ID NO: 1957101 - RNA, 19 nt, Artificial Sequence
  Description of Artificial Sequence: Synthetic oligonucleotide
  Antisense strand to SEQ ID NO: 1957100
acgaugccggauaaucggc

SEQ ID NO: 1957102 - RNA, 19 nt, Artificial Sequence
  Description of Artificial Sequence: Synthetic oligonucleotide
  Sense strand starting at position 1873 of SEQ ID NO: 1880302
augaaaggcuccucgcaga

SEQ ID NO: 1957103 - RNA, 19 nt, Artificial Sequence
  Description of Artificial Sequence: Synthetic oligonucleotide
  Antisense strand to SEQ ID NO: 1957102
ucugcgaggagccuuucau

SEQ ID NO: 1957104 - RNA, 19 nt, Artificial Sequence
  Description of Artificial Sequence: Synthetic oligonucleotide
  Sense strand starting at position 2125 of SEQ ID NO: 1880302
ggcugaaacuugccaaagu

SEQ ID NO: 1957105 - RNA, 19 nt, Artificial Sequence
  Description of Artificial Sequence: Synthetic oligonucleotide
  Antisense strand to SEQ ID NO: 1957104
acuuuggcaaguuucagcc

SEQ ID NO: 1957106 - RNA, 19 nt, Artificial Sequence
  Description of Artificial Sequence: Synthetic oligonucleotide
  Sense strand starting at position 2840 of SEQ ID NO: 1880302
agcucaaaggcaugucuga

SEQ ID NO: 1957107 - RNA, 19 nt, Artificial Sequence
  Description of Artificial Sequence: Synthetic oligonucleotide
  Antisense strand to SEQ ID NO: 1957106
ucagacaugccuuugagcu

SEQ ID NO: 1957108 - RNA, 19 nt, Artificial Sequence
  Description of Artificial Sequence: Synthetic oligonucleotide
  Sense strand starting at position 2952 of SEQ ID NO: 1880302
cacugaucgccguaauuua

SEQ ID NO: 1957109 - RNA, 19 nt, Artificial Sequence
  Description of Artificial Sequence: Synthetic oligonucleotide
  Antisense strand to SEQ ID NO: 1957108
uaaauuacggcgaucagug

SEQ ID NO: 1957110 - RNA, 19 nt, Artificial Sequence
  Description of Artificial Sequence: Synthetic oligonucleotide
  Sense strand starting at position 3051 of SEQ ID NO: 1880302
cuaacuugucucgaaugca

SEQ ID NO: 1957111 - RNA, 19 nt, Artificial Sequence
  Description of Artificial Sequence: Synthetic oligonucleotide
  Antisense strand to SEQ ID NO: 1957110
ugcauucgagacaaguuag

SEQ ID NO: 1957112 - RNA, 19 nt, Artificial Sequence
  Description of Artificial Sequence: Synthetic oligonucleotide
  Sense strand starting at position 3337 of SEQ ID NO: 1880302
guucccuuaggucauuaaa

SEQ ID NO: 1957113 - RNA, 19 nt, Artificial Sequence
  Description of Artificial Sequence: Synthetic oligonucleotide
  Antisense strand to SEQ ID NO: 1957112
uuuaaugaccuaagggaac

SEQ ID NO: 1957114 - RNA, 19 nt, Artificial Sequence
  Description of Artificial Sequence: Synthetic oligonucleotide
  Sense strand starting at position 3451 of SEQ ID NO: 1880302
gcugaaguaucacuccuua

SEQ ID NO: 1957115 - RNA, 19 nt, Artificial Sequence
  Description of Artificial Sequence: Synthetic oligonucleotide
  Antisense strand to SEQ ID NO: 1957114
uaaggagugauacuucagc

SEQ ID NO: 1957116 - RNA, 19 nt, Artificial Sequence
  Description of Artificial Sequence: Synthetic oligonucleotide
  Sense strand starting at position 3456 of SEQ ID NO: 1880302
aguaucacuccuuaaaggu

SEQ ID NO: 1957117 - RNA, 19 nt, Artificial Sequence
  Description of Artificial Sequence: Synthetic oligonucleotide
  Antisense strand to SEQ ID NO: 1957116
accuuuaaggagugauacu

SEQ ID NO: 1957118 - RNA, 19 nt, Artificial Sequence
  Description of Artificial Sequence: Synthetic oligonucleotide
  Sense strand starting at position 3511 of SEQ ID NO: 1880302
cauaucaccuguguaugua

SEQ ID NO: 1957119 - RNA, 19 nt, Artificial Sequence
  Description of Artificial Sequence: Synthetic oligonucleotide
  Antisense strand to SEQ ID NO: 1957118
uacauacacaggugauaug

SEQ ID NO: 1957120 - RNA, 19 nt, Artificial Sequence
  Description of Artificial Sequence: Synthetic oligonucleotide
  Sense strand starting at position 3515 of SEQ ID NO: 1880302
ucaccuguguauguagaua

SEQ ID NO: 1957121 - RNA, 19 nt, Artificial Sequence
  Description of Artificial Sequence: Synthetic oligonucleotide
  Antisense strand to SEQ ID NO: 1957120
uaucuacauacacagguga

SEQ ID NO: 1957122 - RNA, 19 nt, Artificial Sequence
  Description of Artificial Sequence: Synthetic oligonucleotide
  Sense strand starting at position 3589 of SEQ ID NO: 1880302
agagauuggcugcauguga

SEQ ID NO: 1957123 - RNA, 19 nt, Artificial Sequence
  Description of Artificial Sequence: Synthetic oligonucleotide
  Antisense strand to SEQ ID NO: 1957122
ucacaugcagccaaucucu

SEQ ID NO: 1957124 - RNA, 19 nt, Artificial Sequence
  Description of Artificial Sequence: Synthetic oligonucleotide
  Sense strand starting at position 3596 of SEQ ID NO: 1880302
ggcugcaugugacucauuu

SEQ ID NO: 1957125 - RNA, 19 nt, Artificial Sequence
  Description of Artificial Sequence: Synthetic oligonucleotide
  Antisense strand to SEQ ID NO: 1957124
aaaugagucacaugcagcc

SEQ ID NO: 1957126 - RNA, 19 nt, Artificial Sequence
  Description of Artificial Sequence: Synthetic oligonucleotide
  Sense strand starting at position 3600 of SEQ ID NO: 1880302
gcaugugacucauuuccca

SEQ ID NO: 1957127 - RNA, 19 nt, Artificial Sequence
  Description of Artificial Sequence: Synthetic oligonucleotide
  Antisense strand to SEQ ID NO: 1957126
ugggaaaugagucacaugc

SEQ ID NO: 1957128 - RNA, 19 nt, Artificial Sequence
  Description of Artificial Sequence: Synthetic oligonucleotide
  Sense strand starting at position 3671 of SEQ ID NO: 1880302
uuuguugaaucauugaacu

SEQ ID NO: 1957129 - RNA, 19 nt, Artificial Sequence
  Description of Artificial Sequence: Synthetic oligonucleotide
  Antisense strand to SEQ ID NO: 1957128
aguucaaugauucaacaaa

SEQ ID NO: 1957130 - RNA, 19 nt, Artificial Sequence
  Description of Artificial Sequence: Synthetic oligonucleotide
  Sense strand starting at position 3760 of SEQ ID NO: 1880302
cuaugaaaugggcauuagu

SEQ ID NO: 1957131 - RNA, 19 nt, Artificial Sequence
  Description of Artificial Sequence: Synthetic oligonucleotide
  Antisense strand to SEQ ID NO: 1957130
acuaaugcccauuucauag

SEQ ID NO: 1957132 - RNA, 19 nt, Artificial Sequence
  Description of Artificial Sequence: Synthetic oligonucleotide
  Sense strand starting at position 3845 of SEQ ID NO: 1880302
ggaccuuugggugguaguu

SEQ ID NO: 1957133 - RNA, 19 nt, Artificial Sequence
  Description of Artificial Sequence: Synthetic oligonucleotide
  Antisense strand to SEQ ID NO: 1957132
aacuaccacccaaaggucc

SEQ ID NO: 1957134 - RNA, 19 nt, Artificial Sequence
  Description of Artificial Sequence: Synthetic oligonucleotide
  Sense strand starting at position 3904 of SEQ ID NO: 1880302
gguuaaugaccuuguaaga

SEQ ID NO: 1957135 - RNA, 19 nt, Artificial Sequence
  Description of Artificial Sequence: Synthetic oligonucleotide
  Antisense strand to SEQ ID NO: 1957134
ucuuacaaggucauuaacc

SEQ ID NO: 1957136 - RNA, 19 nt, Artificial Sequence
  Description of Artificial Sequence: Synthetic oligonucleotide
  Sense strand starting at position 242 of SEQ ID NO: 1880303
agaagcucuguuuagcaua

SEQ ID NO: 1957137 - RNA, 19 nt, Artificial Sequence
  Description of Artificial Sequence: Synthetic oligonucleotide
  Antisense strand to SEQ ID NO: 1957136
uaugcuaaacagagcuucu

SEQ ID NO: 1957138 - RNA, 19 nt, Artificial Sequence
  Description of Artificial Sequence: Synthetic oligonucleotide
  Sense strand starting at position 353 of SEQ ID NO: 1880303
uugggaguucuguagagua

SEQ ID NO: 1957139 - RNA, 19 nt, Artificial Sequence
  Description of Artificial Sequence: Synthetic oligonucleotide
  Antisense strand to SEQ ID NO: 1957138
uacucuacagaacucccaa

SEQ ID NO: 1957140 - RNA, 19 nt, Artificial Sequence
  Description of Artificial Sequence: Synthetic oligonucleotide
  Sense strand starting at position 355 of SEQ ID NO: 1880303
gggaguucuguagaguagu

SEQ ID NO: 1957141 - RNA, 19 nt, Artificial Sequence
  Description of Artificial Sequence: Synthetic oligonucleotide
  Antisense strand to SEQ ID NO: 1957140
acuacucuacagaacuccc

SEQ ID NO: 1957142 - RNA, 19 nt, Artificial Sequence
  Description of Artificial Sequence: Synthetic oligonucleotide
  Sense strand starting at position 391 of SEQ ID NO: 1880303
acugccauagcucaggaaa

SEQ ID NO: 1957143 - RNA, 19 nt, Artificial Sequence
  Description of Artificial Sequence: Synthetic oligonucleotide
  Antisense strand to SEQ ID NO: 1957142
uuuccugagcuauggcagu

SEQ ID NO: 1957144 - RNA, 19 nt, Artificial Sequence
  Description of Artificial Sequence: Synthetic oligonucleotide
  Sense strand starting at position 415 of SEQ ID NO: 1880303
gcagucauuucucuuagca

SEQ ID NO: 1957145 - RNA, 19 nt, Artificial Sequence
  Description of Artificial Sequence: Synthetic oligonucleotide
  Antisense strand to SEQ ID NO: 1957144
ugcuaagagaaaugacugc

SEQ ID NO: 1957146 - RNA, 19 nt, Artificial Sequence
  Description of Artificial Sequence: Synthetic oligonucleotide
  Sense strand starting at position 487 of SEQ ID NO: 1880303
acaauauuauuggugguuu

SEQ ID NO: 1957147 - RNA, 19 nt, Artificial Sequence
  Description of Artificial Sequence: Synthetic oligonucleotide
  Antisense strand to SEQ ID NO: 1957146
aaaccaccaauaauauugu

SEQ ID NO: 1957148 - RNA, 19 nt, Artificial Sequence
  Description of Artificial Sequence: Synthetic oligonucleotide
  Sense strand starting at position 491 of SEQ ID NO: 1880303
uauuauuggugguuuagac

SEQ ID NO: 1957149 - RNA, 19 nt, Artificial Sequence
  Description of Artificial Sequence: Synthetic oligonucleotide
  Antisense strand to SEQ ID NO: 1957148
gucuaaaccaccaauaaua

SEQ ID NO: 1957150 - RNA, 19 nt, Artificial Sequence
  Description of Artificial Sequence: Synthetic oligonucleotide
  Sense strand starting at position 499 of SEQ ID NO: 1880303
gugguuuagacauggaaug

SEQ ID NO: 1957151 - RNA, 19 nt, Artificial Sequence
  Description of Artificial Sequence: Synthetic oligonucleotide
  Antisense strand to SEQ ID NO: 1957150
cauuccaugucuaaaccac

SEQ ID NO: 1957152 - RNA, 19 nt, Artificial Sequence
  Description of Artificial Sequence: Synthetic oligonucleotide
  Sense strand starting at position 500 of SEQ ID NO: 1880303
ugguuuagacauggaaugu

SEQ ID NO: 1957153 - RNA, 19 nt, Artificial Sequence
  Description of Artificial Sequence: Synthetic oligonucleotide
  Antisense strand to SEQ ID NO: 1957152
acauuccaugucuaaacca

SEQ ID NO: 1957154 - RNA, 19 nt, Artificial Sequence
  Description of Artificial Sequence: Synthetic oligonucleotide
  Sense strand starting at position 630 of SEQ ID NO: 1880303
uagguuuagcaagguuaag

SEQ ID NO: 1957155 - RNA, 19 nt, Artificial Sequence
  Description of Artificial Sequence: Synthetic oligonucleotide
  Antisense strand to SEQ ID NO: 1957154
cuuaaccuugcuaaaccua

SEQ ID NO: 1957156 - RNA, 19 nt, Artificial Sequence
  Description of Artificial Sequence: Synthetic oligonucleotide
  Sense strand starting at position 641 of SEQ ID NO: 1880303
agguuaaggaauugcuuga

SEQ ID NO: 1957157 - RNA, 19 nt, Artificial Sequence
  Description of Artificial Sequence: Synthetic oligonucleotide
  Antisense strand to SEQ ID NO: 1957156
ucaagcaauuccuuaaccu

SEQ ID NO: 1957158 - RNA, 19 nt, Artificial Sequence
  Description of Artificial Sequence: Synthetic oligonucleotide
  Sense strand starting at position 645 of SEQ ID NO: 1880303
uaaggaauugcuugagaua

SEQ ID NO: 1957159 - RNA, 19 nt, Artificial Sequence
  Description of Artificial Sequence: Synthetic oligonucleotide
  Antisense strand to SEQ ID NO: 1957158
uaucucaagcaauuccuua

SEQ ID NO: 1957160 - RNA, 19 nt, Artificial Sequence
  Description of Artificial Sequence: Synthetic oligonucleotide
  Sense strand starting at position 733 of SEQ ID NO: 1880303
guguaucuauaaccacaau

SEQ ID NO: 1957161 - RNA, 19 nt, Artificial Sequence
  Description of Artificial Sequence: Synthetic oligonucleotide
  Antisense strand to SEQ ID NO: 1957160
auugugguuauagauacac

SEQ ID NO: 1957162 - RNA, 19 nt, Artificial Sequence
  Description of Artificial Sequence: Synthetic oligonucleotide
  Sense strand starting at position 1000 of SEQ ID NO: 1880303
gaugauagugacugauacu

SEQ ID NO: 1957163 - RNA, 19 nt, Artificial Sequence
  Description of Artificial Sequence: Synthetic oligonucleotide
  Antisense strand to SEQ ID NO: 1957162
aguaucagucacuaucauc

SEQ ID NO: 1957164 - RNA, 19 nt, Artificial Sequence
  Description of Artificial Sequence: Synthetic oligonucleotide
  Sense strand starting at position 1072 of SEQ ID NO: 1880303
uggaauuauuuggauccaa

SEQ ID NO: 1957165 - RNA, 19 nt, Artificial Sequence
  Description of Artificial Sequence: Synthetic oligonucleotide
  Antisense strand to SEQ ID NO: 1957164
uuggauccaaauaauucca

SEQ ID NO: 1957166 - RNA, 19 nt, Artificial Sequence
  Description of Artificial Sequence: Synthetic oligonucleotide
  Sense strand starting at position 1378 of SEQ ID NO: 1880303
cuuucuaaauaggugaauu

SEQ ID NO: 1957167 - RNA, 19 nt, Artificial Sequence
  Description of Artificial Sequence: Synthetic oligonucleotide
  Antisense strand to SEQ ID NO: 1957166
aauucaccuauuuagaaag

SEQ ID NO: 1957168 - RNA, 19 nt, Artificial Sequence
  Description of Artificial Sequence: Synthetic oligonucleotide
  Sense strand starting at position 1538 of SEQ ID NO: 1880303
agggcuugcaguuagauca

SEQ ID NO: 1957169 - RNA, 19 nt, Artificial Sequence
  Description of Artificial Sequence: Synthetic oligonucleotide
  Antisense strand to SEQ ID NO: 1957168
ugaucuaacugcaagcccu

SEQ ID NO: 1957170 - RNA, 19 nt, Artificial Sequence
  Description of Artificial Sequence: Synthetic oligonucleotide
  Sense strand starting at position 2676 of SEQ ID NO: 1880303
cccuuagauucggccaaga

SEQ ID NO: 1957171 - RNA, 19 nt, Artificial Sequence
  Description of Artificial Sequence: Synthetic oligonucleotide
  Antisense strand to SEQ ID NO: 1957170
ucuuggccgaaucuaaggg

SEQ ID NO: 1957172 - RNA, 19 nt, Artificial Sequence
  Description of Artificial Sequence: Synthetic oligonucleotide
  Sense strand starting at position 2678 of SEQ ID NO: 1880303
cuuagauucggccaagauu

SEQ ID NO: 1957173 - RNA, 19 nt, Artificial Sequence
  Description of Artificial Sequence: Synthetic oligonucleotide
  Antisense strand to SEQ ID NO: 1957172
aaucuuggccgaaucuaag

SEQ ID NO: 1957174 - RNA, 19 nt, Artificial Sequence
  Description of Artificial Sequence: Synthetic oligonucleotide
  Sense strand starting at position 2691 of SEQ ID NO: 1880303
aagauugucuuauugguaa

SEQ ID NO: 1957175 - RNA, 19 nt, Artificial Sequence
  Description of Artificial Sequence: Synthetic oligonucleotide
  Antisense strand to SEQ ID NO: 1957174
uuaccaauaagacaaucuu

SEQ ID NO: 1957176 - RNA, 19 nt, Artificial Sequence
  Description of Artificial Sequence: Synthetic oligonucleotide
  Sense strand starting at position 2727 of SEQ ID NO: 1880303
cgugacgcccugagaguua

SEQ ID NO: 1957177 - RNA, 19 nt, Artificial Sequence
  Description of Artificial Sequence: Synthetic oligonucleotide
  Antisense strand to SEQ ID NO: 1957176
uaacucucagggcgucacg

SEQ ID NO: 1957178 - RNA, 19 nt, Artificial Sequence
  Description of Artificial Sequence: Synthetic oligonucleotide
  Sense strand starting at position 2782 of SEQ ID NO: 1880303
gaaguaggugauuguauua

SEQ ID NO: 1957179 - RNA, 19 nt, Artificial Sequence
  Description of Artificial Sequence: Synthetic oligonucleotide
  Antisense strand to SEQ ID NO: 1957178
uaauacaaucaccuacuuc

SEQ ID NO: 1957180 - RNA, 19 nt, Artificial Sequence
  Description of Artificial Sequence: Synthetic oligonucleotide
  Sense strand starting at position 2805 of SEQ ID NO: 1880303
uggaccuguuggccuaaga

SEQ ID NO: 1957181 - RNA, 19 nt, Artificial Sequence
  Description of Artificial Sequence: Synthetic oligonucleotide
  Antisense strand to SEQ ID NO: 1957180
ucuuaggccaacaggucca

SEQ ID NO: 1957182 - RNA, 19 nt, Artificial Sequence
  Description of Artificial Sequence: Synthetic oligonucleotide
  Sense strand starting at position 2869 of SEQ ID NO: 1880303
ggugaaacugcguauugaa

SEQ ID NO: 1957183 - RNA, 19 nt, Artificial Sequence
  Description of Artificial Sequence: Synthetic oligonucleotide
  Antisense strand to SEQ ID NO: 1957182
uucaauacgcaguuucacc

SEQ ID NO: 1957184 - RNA, 19 nt, Artificial Sequence
  Description of Artificial Sequence: Synthetic oligonucleotide
  Sense strand starting at position 2960 of SEQ ID NO: 1880303
gggaaagucuaucugggua

SEQ ID NO: 1957185 - RNA, 19 nt, Artificial Sequence
  Description of Artificial Sequence: Synthetic oligonucleotide
  Antisense strand to SEQ ID NO: 1957184
uacccagauagacuuuccc

SEQ ID NO: 1957186 - RNA, 19 nt, Artificial Sequence
  Description of Artificial Sequence: Synthetic oligonucleotide
  Sense strand starting at position 2963 of SEQ ID NO: 1880303
aaagucuaucuggguaaua

SEQ ID NO: 1957187 - RNA, 19 nt, Artificial Sequence
  Description of Artificial Sequence: Synthetic oligonucleotide
  Antisense strand to SEQ ID NO: 1957186
uauuacccagauagacuuu

SEQ ID NO: 1957188 - RNA, 19 nt, Artificial Sequence
  Description of Artificial Sequence: Synthetic oligonucleotide
  Sense strand starting at position 2964 of SEQ ID NO: 1880303
aagucuaucuggguaauaa

SEQ ID NO: 1957189 - RNA, 19 nt, Artificial Sequence
  Description of Artificial Sequence: Synthetic oligonucleotide
  Antisense strand to SEQ ID NO: 1957188
uuauuacccagauagacuu

SEQ ID NO: 1957190 - RNA, 19 nt, Artificial Sequence
  Description of Artificial Sequence: Synthetic oligonucleotide
  Sense strand starting at position 2977 of SEQ ID NO: 1880303
uaauaaauucgucacgacu

SEQ ID NO: 1957191 - RNA, 19 nt, Artificial Sequence
  Description of Artificial Sequence: Synthetic oligonucleotide
  Antisense strand to SEQ ID NO: 1957190
agucgugacgaauuuauua

SEQ ID NO: 1957192 - RNA, 19 nt, Artificial Sequence
  Description of Artificial Sequence: Synthetic oligonucleotide
  Sense strand starting at position 2980 of SEQ ID NO: 1880303
uaaauucgucacgacuaau

SEQ ID NO: 1957193 - RNA, 19 nt, Artificial Sequence
  Description of Artificial Sequence: Synthetic oligonucleotide
  Antisense strand to SEQ ID NO: 1957192
auuagucgugacgaauuua

SEQ ID NO: 1957194 - RNA, 19 nt, Artificial Sequence
  Description of Artificial Sequence: Synthetic oligonucleotide
  Sense strand starting at position 3198 of SEQ ID NO: 1880303
cauguaguguaacuagauc

SEQ ID NO: 1957195 - RNA, 19 nt, Artificial Sequence
  Description of Artificial Sequence: Synthetic oligonucleotide
  Antisense strand to SEQ ID NO: 1957194
gaucuaguuacacuacaug

SEQ ID NO: 1957196 - RNA, 19 nt, Artificial Sequence
  Description of Artificial Sequence: Synthetic oligonucleotide
  Sense strand starting at position 3363 of SEQ ID NO: 1880303
uugccauaguuauuuaagu

SEQ ID NO: 1957197 - RNA, 19 nt, Artificial Sequence
  Description of Artificial Sequence: Synthetic oligonucleotide
  Antisense strand to SEQ ID NO: 1957196
acuuaaauaacuauggcaa

SEQ ID NO: 1957198 - RNA, 19 nt, Artificial Sequence
  Description of Artificial Sequence: Synthetic oligonucleotide
  Sense strand starting at position 3364 of SEQ ID NO: 1880303
ugccauaguuauuuaaguu

SEQ ID NO: 1957199 - RNA, 19 nt, Artificial Sequence
  Description of Artificial Sequence: Synthetic oligonucleotide
  Antisense strand to SEQ ID NO: 1957198
aacuuaaauaacuauggca

SEQ ID NO: 1957200 - RNA, 19 nt, Artificial Sequence
  Description of Artificial Sequence: Synthetic oligonucleotide
  Sense strand starting at position 3382 of SEQ ID NO: 1880303
ucacgagauugucucagaa

SEQ ID NO: 1957201 - RNA, 19 nt, Artificial Sequence
  Description of Artificial Sequence: Synthetic oligonucleotide
  Antisense strand to SEQ ID NO: 1957200
uucugagacaaucucguga

SEQ ID NO: 1957202 - RNA, 19 nt, Artificial Sequence
  Description of Artificial Sequence: Synthetic oligonucleotide
  Sense strand starting at position 3467 of SEQ ID NO: 1880303
acauaauacuagucuuggu

SEQ ID NO: 1957203 - RNA, 19 nt, Artificial Sequence
  Description of Artificial Sequence: Synthetic oligonucleotide
  Antisense strand to SEQ ID NO: 1957202
accaagacuaguauuaugu

SEQ ID NO: 1957204 - RNA, 19 nt, Artificial Sequence
  Description of Artificial Sequence: Synthetic oligonucleotide
  Sense strand starting at position 3615 of SEQ ID NO: 1880303
gguuauguucuacaugaag

SEQ ID NO: 1957205 - RNA, 19 nt, Artificial Sequence
  Description of Artificial Sequence: Synthetic oligonucleotide
  Antisense strand to SEQ ID NO: 1957204
cuucauguagaacauaacc

SEQ ID NO: 1957206 - RNA, 19 nt, Artificial Sequence
  Description of Artificial Sequence: Synthetic oligonucleotide
  Sense strand starting at position 3630 of SEQ ID NO: 1880303
gaaggugucagguaacgaa

SEQ ID NO: 1957207 - RNA, 19 nt, Artificial Sequence
  Description of Artificial Sequence: Synthetic oligonucleotide
  Antisense strand to SEQ ID NO: 1957206
uucguuaccugacaccuuc

SEQ ID NO: 1957208 - RNA, 19 nt, Artificial Sequence
  Description of Artificial Sequence: Synthetic oligonucleotide
  Sense strand starting at position 3873 of SEQ ID NO: 1880303
acauuacaagaaugagcuu

SEQ ID NO: 1957209 - RNA, 19 nt, Artificial Sequence
  Description of Artificial Sequence: Synthetic oligonucleotide
  Antisense strand to SEQ ID NO: 1957208
aagcucauucuuguaaugu

SEQ ID NO: 1957210 - RNA, 19 nt, Artificial Sequence
  Description of Artificial Sequence: Synthetic oligonucleotide
  Sense strand starting at position 3911 of SEQ ID NO: 1880303
acaacucacuguuuaguca

SEQ ID NO: 1957211 - RNA, 19 nt, Artificial Sequence
  Description of Artificial Sequence: Synthetic oligonucleotide
  Antisense strand to SEQ ID NO: 1957210
ugacuaaacagugaguugu

SEQ ID NO: 1957212 - RNA, 19 nt, Artificial Sequence
  Description of Artificial Sequence: Synthetic oligonucleotide
  Sense strand starting at position 3918 of SEQ ID NO: 1880303
acuguuuagucaucagacu

SEQ ID NO: 1957213 - RNA, 19 nt, Artificial Sequence
  Description of Artificial Sequence: Synthetic oligonucleotide
  Antisense strand to SEQ ID NO: 1957212
agucugaugacuaaacagu

SEQ ID NO: 1957214 - RNA, 19 nt, Artificial Sequence
  Description of Artificial Sequence: Synthetic oligonucleotide
  Sense strand starting at position 3919 of SEQ ID NO: 1880303
cuguuuagucaucagacua

SEQ ID NO: 1957215 - RNA, 19 nt, Artificial Sequence
  Description of Artificial Sequence: Synthetic oligonucleotide
  Antisense strand to SEQ ID NO: 1957214
uagucugaugacuaaacag

SEQ ID NO: 1957216 - RNA, 19 nt, Artificial Sequence
  Description of Artificial Sequence: Synthetic oligonucleotide
  Sense strand starting at position 22 of SEQ ID NO: 1880304
gucugagaucauggguucu

SEQ ID NO: 1957217 - RNA, 19 nt, Artificial Sequence
  Description of Artificial Sequence: Synthetic oligonucleotide
  Antisense strand to SEQ ID NO: 1957216
agaacccaugaucucagac

SEQ ID NO: 1957218 - RNA, 19 nt, Artificial Sequence
  Description of Artificial Sequence: Synthetic oligonucleotide
  Sense strand starting at position 28 of SEQ ID NO: 1880304
gaucauggguucuuuaacu

SEQ ID NO: 1957219 - RNA, 19 nt, Artificial Sequence
  Description of Artificial Sequence: Synthetic oligonucleotide
  Antisense strand to SEQ ID NO: 1957218
aguuaaagaacccaugauc

SEQ ID NO: 1957220 - RNA, 19 nt, Artificial Sequence
  Description of Artificial Sequence: Synthetic oligonucleotide
  Sense strand starting at position 105 of SEQ ID NO: 1880304
gacuauuauuugcaaaggu

SEQ ID NO: 1957221 - RNA, 19 nt, Artificial Sequence
  Description of Artificial Sequence: Synthetic oligonucleotide
  Antisense strand to SEQ ID NO: 1957220
accuuugcaaauaauaguc

SEQ ID NO: 1957222 - RNA, 19 nt, Artificial Sequence
  Description of Artificial Sequence: Synthetic oligonucleotide
  Sense strand starting at position 121 of SEQ ID NO: 1880304
gguaaugagaagugagucu

SEQ ID NO: 1957223 - RNA, 19 nt, Artificial Sequence
  Description of Artificial Sequence: Synthetic oligonucleotide
  Antisense strand to SEQ ID NO: 1957222
agacucacuucucauuacc

SEQ ID NO: 1957224 - RNA, 19 nt, Artificial Sequence
  Description of Artificial Sequence: Synthetic oligonucleotide
  Sense strand starting at position 183 of SEQ ID NO: 1880304
ucaucugggcccugugaaa

SEQ ID NO: 1957225 - RNA, 19 nt, Artificial Sequence
  Description of Artificial Sequence: Synthetic oligonucleotide
  Antisense strand to SEQ ID NO: 1957224
uuucacagggcccagauga

SEQ ID NO: 1957226 - RNA, 19 nt, Artificial Sequence
  Description of Artificial Sequence: Synthetic oligonucleotide
  Sense strand starting at position 199 of SEQ ID NO: 1880304
aaagaaacuguuuggcaga

SEQ ID NO: 1957227 - RNA, 19 nt, Artificial Sequence
  Description of Artificial Sequence: Synthetic oligonucleotide
  Antisense strand to SEQ ID NO: 1957226
ucugccaaacaguuucuuu

SEQ ID NO: 1957228 - RNA, 19 nt, Artificial Sequence
  Description of Artificial Sequence: Synthetic oligonucleotide
  Sense strand starting at position 201 of SEQ ID NO: 1880304
agaaacuguuuggcagaga

SEQ ID NO: 1957229 - RNA, 19 nt, Artificial Sequence
  Description of Artificial Sequence: Synthetic oligonucleotide
  Antisense strand to SEQ ID NO: 1957228
ucucugccaaacaguuucu

SEQ ID NO: 1957230 - RNA, 19 nt, Artificial Sequence
  Description of Artificial Sequence: Synthetic oligonucleotide
  Sense strand starting at position 215 of SEQ ID NO: 1880304
agagacgguugcuuaucaa

SEQ ID NO: 1957231 - RNA, 19 nt, Artificial Sequence
  Description of Artificial Sequence: Synthetic oligonucleotide
  Antisense strand to SEQ ID NO: 1957230
uugauaagcaaccgucucu

SEQ ID NO: 1957232 - RNA, 19 nt, Artificial Sequence
  Description of Artificial Sequence: Synthetic oligonucleotide
  Sense strand starting at position 356 of SEQ ID NO: 1880304
agcugagagucccuuuaga

SEQ ID NO: 1957233 - RNA, 19 nt, Artificial Sequence
  Description of Artificial Sequence: Synthetic oligonucleotide
  Antisense strand to SEQ ID NO: 1957232
ucuaaagggacucucagcu

SEQ ID NO: 1957234 - RNA, 19 nt, Artificial Sequence
  Description of Artificial Sequence: Synthetic oligonucleotide
  Sense strand starting at position 413 of SEQ ID NO: 1880304
ugaacacccuguccugaau

SEQ ID NO: 1957235 - RNA, 19 nt, Artificial Sequence
  Description of Artificial Sequence: Synthetic oligonucleotide
  Antisense strand to SEQ ID NO: 1957234
auucaggacaggguguuca

SEQ ID NO: 1957236 - RNA, 19 nt, Artificial Sequence
  Description of Artificial Sequence: Synthetic oligonucleotide
  Sense strand starting at position 419 of SEQ ID NO: 1880304
cccuguccugaauggugaa

SEQ ID NO: 1957237 - RNA, 19 nt, Artificial Sequence
  Description of Artificial Sequence: Synthetic oligonucleotide
  Antisense strand to SEQ ID NO: 1957236
uucaccauucaggacaggg

SEQ ID NO: 1957238 - RNA, 19 nt, Artificial Sequence
  Description of Artificial Sequence: Synthetic oligonucleotide
  Sense strand starting at position 420 of SEQ ID NO: 1880304
ccuguccugaauggugaau

SEQ ID NO: 1957239 - RNA, 19 nt, Artificial Sequence
  Description of Artificial Sequence: Synthetic oligonucleotide
  Antisense strand to SEQ ID NO: 1957238
auucaccauucaggacagg

SEQ ID NO: 1957240 - RNA, 19 nt, Artificial Sequence
  Description of Artificial Sequence: Synthetic oligonucleotide
  Sense strand starting at position 516 of SEQ ID NO: 1880304
gaaaguggucuggguggaa

SEQ ID NO: 1957241 - RNA, 19 nt, Artificial Sequence
  Description of Artificial Sequence: Synthetic oligonucleotide
  Antisense strand to SEQ ID NO: 1957240
uuccacccagaccacuuuc

SEQ ID NO: 1957242 - RNA, 19 nt, Artificial Sequence
  Description of Artificial Sequence: Synthetic oligonucleotide
  Sense strand starting at position 970 of SEQ ID NO: 1880304
cucacagaugccugacauu

SEQ ID NO: 1957243 - RNA, 19 nt, Artificial Sequence
  Description of Artificial Sequence: Synthetic oligonucleotide
  Antisense strand to SEQ ID NO: 1957242
aaugucaggcaucugugag

SEQ ID NO: 1957244 - RNA, 19 nt, Artificial Sequence
  Description of Artificial Sequence: Synthetic oligonucleotide
  Sense strand starting at position 999 of SEQ ID NO: 1880304
gggaacaggccuuguauua

SEQ ID NO: 1957245 - RNA, 19 nt, Artificial Sequence
  Description of Artificial Sequence: Synthetic oligonucleotide
  Antisense strand to SEQ ID NO: 1957244
uaauacaaggccuguuccc

SEQ ID NO: 1957246 - RNA, 19 nt, Artificial Sequence
  Description of Artificial Sequence: Synthetic oligonucleotide
  Sense strand starting at position 1057 of SEQ ID NO: 1880304
agacucauaucugagaaag

SEQ ID NO: 1957247 - RNA, 19 nt, Artificial Sequence
  Description of Artificial Sequence: Synthetic oligonucleotide
  Antisense strand to SEQ ID NO: 1957246
cuuucucagauaugagucu

SEQ ID NO: 1957248 - RNA, 19 nt, Artificial Sequence
  Description of Artificial Sequence: Synthetic oligonucleotide
  Sense strand starting at position 1120 of SEQ ID NO: 1880304
guuugucuaggaugguaua

SEQ ID NO: 1957249 - RNA, 19 nt, Artificial Sequence
  Description of Artificial Sequence: Synthetic oligonucleotide
  Antisense strand to SEQ ID NO: 1957248
uauaccauccuagacaaac

SEQ ID NO: 1957250 - RNA, 19 nt, Artificial Sequence
  Description of Artificial Sequence: Synthetic oligonucleotide
  Sense strand starting at position 1121 of SEQ ID NO: 1880304
uuugucuaggaugguauaa

SEQ ID NO: 1957251 - RNA, 19 nt, Artificial Sequence
  Description of Artificial Sequence: Synthetic oligonucleotide
  Antisense strand to SEQ ID NO: 1957250
uuauaccauccuagacaaa

SEQ ID NO: 1957252 - RNA, 19 nt, Artificial Sequence
  Description of Artificial Sequence: Synthetic oligonucleotide
  Sense strand starting at position 1144 of SEQ ID NO: 1880304
gcucaaggccauggaaaua

SEQ ID NO: 1957253 - RNA, 19 nt, Artificial Sequence
  Description of Artificial Sequence: Synthetic oligonucleotide
  Antisense strand to SEQ ID NO: 1957252
uauuuccauggccuugagc

SEQ ID NO: 1957254 - RNA, 19 nt, Artificial Sequence
  Description of Artificial Sequence: Synthetic oligonucleotide
  Sense strand starting at position 1402 of SEQ ID NO: 1880304
agccgagauugagcuauua

SEQ ID NO: 1957255 - RNA, 19 nt, Artificial Sequence
  Description of Artificial Sequence: Synthetic oligonucleotide
  Antisense strand to SEQ ID NO: 1957254
uaauagcucaaucucggcu

SEQ ID NO: 1957256 - RNA, 19 nt, Artificial Sequence
  Description of Artificial Sequence: Synthetic oligonucleotide
  Sense strand starting at position 1404 of SEQ ID NO: 1880304
ccgagauugagcuauuaca

SEQ ID NO: 1957257 - RNA, 19 nt, Artificial Sequence
  Description of Artificial Sequence: Synthetic oligonucleotide
  Antisense strand to SEQ ID NO: 1957256
uguaauagcucaaucucgg

SEQ ID NO: 1957258 - RNA, 19 nt, Artificial Sequence
  Description of Artificial Sequence: Synthetic oligonucleotide
  Sense strand starting at position 1728 of SEQ ID NO: 1880304
ucagaauggcuuuaacuuc

SEQ ID NO: 1957259 - RNA, 19 nt, Artificial Sequence
  Description of Artificial Sequence: Synthetic oligonucleotide
  Antisense strand to SEQ ID NO: 1957258
gaaguuaaagccauucuga

SEQ ID NO: 1957260 - RNA, 19 nt, Artificial Sequence
  Description of Artificial Sequence: Synthetic oligonucleotide
  Sense strand starting at position 1752 of SEQ ID NO: 1880304
gcuuuaagaagcugaggaa

SEQ ID NO: 1957261 - RNA, 19 nt, Artificial Sequence
  Description of Artificial Sequence: Synthetic oligonucleotide
  Antisense strand to SEQ ID NO: 1957260
uuccucagcuucuuaaagc

SEQ ID NO: 1957262 - RNA, 19 nt, Artificial Sequence
  Description of Artificial Sequence: Synthetic oligonucleotide
  Sense strand starting at position 2000 of SEQ ID NO: 1880304
ccucuuauucucgauugaa

SEQ ID NO: 1957263 - RNA, 19 nt, Artificial Sequence
  Description of Artificial Sequence: Synthetic oligonucleotide
  Antisense strand to SEQ ID NO: 1957262
uucaaucgagaauaagagg

SEQ ID NO: 1957264 - RNA, 19 nt, Artificial Sequence
  Description of Artificial Sequence: Synthetic oligonucleotide
  Sense strand starting at position 2003 of SEQ ID NO: 1880304
cuuauucucgauugaaauu

SEQ ID NO: 1957265 - RNA, 19 nt, Artificial Sequence
  Description of Artificial Sequence: Synthetic oligonucleotide
  Antisense strand to SEQ ID NO: 1957264
aauuucaaucgagaauaag

SEQ ID NO: 1957266 - RNA, 19 nt, Artificial Sequence
  Description of Artificial Sequence: Synthetic oligonucleotide
  Sense strand starting at position 2071 of SEQ ID NO: 1880304
uggccauaggguuauauag

SEQ ID NO: 1957267 - RNA, 19 nt, Artificial Sequence
  Description of Artificial Sequence: Synthetic oligonucleotide
  Antisense strand to SEQ ID NO: 1957266
cuauauaacccuauggcca

SEQ ID NO: 1957268 - RNA, 19 nt, Artificial Sequence
  Description of Artificial Sequence: Synthetic oligonucleotide
  Sense strand starting at position 2078 of SEQ ID NO: 1880304
aggguuauauagcucauca

SEQ ID NO: 1957269 - RNA, 19 nt, Artificial Sequence
  Description of Artificial Sequence: Synthetic oligonucleotide
  Antisense strand to SEQ ID NO: 1957268
ugaugagcuauauaacccu

SEQ ID NO: 1957270 - RNA, 19 nt, Artificial Sequence
  Description of Artificial Sequence: Synthetic oligonucleotide
  Sense strand starting at position 2080 of SEQ ID NO: 1880304
gguuauauagcucaucaaa

SEQ ID NO: 1957271 - RNA, 19 nt, Artificial Sequence
  Description of Artificial Sequence: Synthetic oligonucleotide
  Antisense strand to SEQ ID NO: 1957270
uuugaugagcuauauaacc

SEQ ID NO: 1957272 - RNA, 19 nt, Artificial Sequence
  Description of Artificial Sequence: Synthetic oligonucleotide
  Sense strand starting at position 2116 of SEQ ID NO: 1880304
agucgucucccucaucuaa

SEQ ID NO: 1957273 - RNA, 19 nt, Artificial Sequence
  Description of Artificial Sequence: Synthetic oligonucleotide
  Antisense strand to SEQ ID NO: 1957272
uuagaugagggagacgacu

SEQ ID NO: 1957274 - RNA, 19 nt, Artificial Sequence
  Description of Artificial Sequence: Synthetic oligonucleotide
  Sense strand starting at position 2292 of SEQ ID NO: 1880304
gucacauuggcaugaaugu

SEQ ID NO: 1957275 - RNA, 19 nt, Artificial Sequence
  Description of Artificial Sequence: Synthetic oligonucleotide
  Antisense strand to SEQ ID NO: 1957274
acauucaugccaaugugac

SEQ ID NO: 1957276 - RNA, 19 nt, Artificial Sequence
  Description of Artificial Sequence: Synthetic oligonucleotide
  Sense strand starting at position 2299 of SEQ ID NO: 1880304
uggcaugaaugugcaaaga

SEQ ID NO: 1957277 - RNA, 19 nt, Artificial Sequence
  Description of Artificial Sequence: Synthetic oligonucleotide
  Antisense strand to SEQ ID NO: 1957276
ucuuugcacauucaugcca

SEQ ID NO: 1957278 - RNA, 19 nt, Artificial Sequence
  Description of Artificial Sequence: Synthetic oligonucleotide
  Sense strand starting at position 2952 of SEQ ID NO: 1880304
ggaauuuauucugauguau

SEQ ID NO: 1957279 - RNA, 19 nt, Artificial Sequence
  Description of Artificial Sequence: Synthetic oligonucleotide
  Antisense strand to SEQ ID NO: 1957278
auacaucagaauaaauucc

SEQ ID NO: 1957280 - RNA, 19 nt, Artificial Sequence
  Description of Artificial Sequence: Synthetic oligonucleotide
  Sense strand starting at position 2965 of SEQ ID NO: 1880304
auguauuuguaugaccaaa

SEQ ID NO: 1957281 - RNA, 19 nt, Artificial Sequence
  Description of Artificial Sequence: Synthetic oligonucleotide
  Antisense strand to SEQ ID NO: 1957280
uuuggucauacaaauacau

SEQ ID NO: 1957282 - RNA, 19 nt, Artificial Sequence
  Description of Artificial Sequence: Synthetic oligonucleotide
  Sense strand starting at position 3248 of SEQ ID NO: 1880304
gagugaauacucuacuagu

SEQ ID NO: 1957283 - RNA, 19 nt, Artificial Sequence
  Description of Artificial Sequence: Synthetic oligonucleotide
  Antisense strand to SEQ ID NO: 1957282
acuaguagaguauucacuc

SEQ ID NO: 1957284 - RNA, 19 nt, Artificial Sequence
  Description of Artificial Sequence: Synthetic oligonucleotide
  Sense strand starting at position 3636 of SEQ ID NO: 1880304
cauaaugaaggcuggauau

SEQ ID NO: 1957285 - RNA, 19 nt, Artificial Sequence
  Description of Artificial Sequence: Synthetic oligonucleotide
  Antisense strand to SEQ ID NO: 1957284
auauccagccuucauuaug

SEQ ID NO: 1957286 - RNA, 19 nt, Artificial Sequence
  Description of Artificial Sequence: Synthetic oligonucleotide
  Sense strand starting at position 3647 of SEQ ID NO: 1880304
cuggauauaucccuuagga

SEQ ID NO: 1957287 - RNA, 19 nt, Artificial Sequence
  Description of Artificial Sequence: Synthetic oligonucleotide
  Antisense strand to SEQ ID NO: 1957286
uccuaagggauauauccag

SEQ ID NO: 1957288 - RNA, 19 nt, Artificial Sequence
  Description of Artificial Sequence: Synthetic oligonucleotide
  Sense strand starting at position 3707 of SEQ ID NO: 1880304
ccaguaaacagugguagua

SEQ ID NO: 1957289 - RNA, 19 nt, Artificial Sequence
  Description of Artificial Sequence: Synthetic oligonucleotide
  Antisense strand to SEQ ID NO: 1957288
uacuaccacuguuuacugg

SEQ ID NO: 1957290 - RNA, 19 nt, Artificial Sequence
  Description of Artificial Sequence: Synthetic oligonucleotide
  Sense strand starting at position 3721 of SEQ ID NO: 1880304
uaguaaguacuagggucaa

SEQ ID NO: 1957291 - RNA, 19 nt, Artificial Sequence
  Description of Artificial Sequence: Synthetic oligonucleotide
  Antisense strand to SEQ ID NO: 1957290
uugacccuaguacuuacua

SEQ ID NO: 1957292 - RNA, 19 nt, Artificial Sequence
  Description of Artificial Sequence: Synthetic oligonucleotide
  Sense strand starting at position 3761 of SEQ ID NO: 1880304
ggguguuuauagguuuaug

SEQ ID NO: 1957293 - RNA, 19 nt, Artificial Sequence
  Description of Artificial Sequence: Synthetic oligonucleotide
  Antisense strand to SEQ ID NO: 1957292
cauaaaccuauaaacaccc

SEQ ID NO: 1957294 - RNA, 19 nt, Artificial Sequence
  Description of Artificial Sequence: Synthetic oligonucleotide
  Sense strand starting at position 3929 of SEQ ID NO: 1880304
cuucuuggcaucuggaaga

SEQ ID NO: 1957295 - RNA, 19 nt, Artificial Sequence
  Description of Artificial Sequence: Synthetic oligonucleotide
  Antisense strand to SEQ ID NO: 1957294
ucuuccagaugccaagaag

SEQ ID NO: 1957296 - RNA, 19 nt, Artificial Sequence
  Description of Artificial Sequence: Synthetic oligonucleotide
  Sense strand starting at position 66 of SEQ ID NO: 1880305
acaucaguuguagagaucu

SEQ ID NO: 1957297 - RNA, 19 nt, Artificial Sequence
  Description of Artificial Sequence: Synthetic oligonucleotide
  Antisense strand to SEQ ID NO: 1957296
agaucucuacaacugaugu

SEQ ID NO: 1957298 - RNA, 19 nt, Artificial Sequence
  Description of Artificial Sequence: Synthetic oligonucleotide
  Sense strand starting at position 279 of SEQ ID NO: 1880305
auguccuucgccuagaaug

SEQ ID NO: 1957299 - RNA, 19 nt, Artificial Sequence
  Description of Artificial Sequence: Synthetic oligonucleotide
  Antisense strand to SEQ ID NO: 1957298
cauucuaggcgaaggacau

SEQ ID NO: 1957300 - RNA, 19 nt, Artificial Sequence
  Description of Artificial Sequence: Synthetic oligonucleotide
  Sense strand starting at position 295 of SEQ ID NO: 1880305
auguuagauacuugauggu

SEQ ID NO: 1957301 - RNA, 19 nt, Artificial Sequence
  Description of Artificial Sequence: Synthetic oligonucleotide
  Antisense strand to SEQ ID NO: 1957300
accaucaaguaucuaacau

SEQ ID NO: 1957302 - RNA, 19 nt, Artificial Sequence
  Description of Artificial Sequence: Synthetic oligonucleotide
  Sense strand starting at position 434 of SEQ ID NO: 1880305
gcaguauguggucucagcu

SEQ ID NO: 1957303 - RNA, 19 nt, Artificial Sequence
  Description of Artificial Sequence: Synthetic oligonucleotide
  Antisense strand to SEQ ID NO: 1957302
agcugagaccacauacugc

SEQ ID NO: 1957304 - RNA, 19 nt, Artificial Sequence
  Description of Artificial Sequence: Synthetic oligonucleotide
  Sense strand starting at position 675 of SEQ ID NO: 1880305
gccaguaaauguuuaugga

SEQ ID NO: 1957305 - RNA, 19 nt, Artificial Sequence
  Description of Artificial Sequence: Synthetic oligonucleotide
  Antisense strand to SEQ ID NO: 1957304
uccauaaacauuuacuggc

SEQ ID NO: 1957306 - RNA, 19 nt, Artificial Sequence
  Description of Artificial Sequence: Synthetic oligonucleotide
  Sense strand starting at position 690 of SEQ ID NO: 1880305
uggaauggcuguucaguaa

SEQ ID NO: 1957307 - RNA, 19 nt, Artificial Sequence
  Description of Artificial Sequence: Synthetic oligonucleotide
  Antisense strand to SEQ ID NO: 1957306
uuacugaacagccauucca

SEQ ID NO: 1957308 - RNA, 19 nt, Artificial Sequence
  Description of Artificial Sequence: Synthetic oligonucleotide
  Sense strand starting at position 703 of SEQ ID NO: 1880305
caguaacugucauuggaag

SEQ ID NO: 1957309 - RNA, 19 nt, Artificial Sequence
  Description of Artificial Sequence: Synthetic oligonucleotide
  Antisense strand to SEQ ID NO: 1957308
cuuccaaugacaguuacug

SEQ ID NO: 1957310 - RNA, 19 nt, Artificial Sequence
  Description of Artificial Sequence: Synthetic oligonucleotide
  Sense strand starting at position 704 of SEQ ID NO: 1880305
aguaacugucauuggaaga

SEQ ID NO: 1957311 - RNA, 19 nt, Artificial Sequence
  Description of Artificial Sequence: Synthetic oligonucleotide
  Antisense strand to SEQ ID NO: 1957310
ucuuccaaugacaguuacu

SEQ ID NO: 1957312 - RNA, 19 nt, Artificial Sequence
  Description of Artificial Sequence: Synthetic oligonucleotide
  Sense strand starting at position 705 of SEQ ID NO: 1880305
guaacugucauuggaagag

SEQ ID NO: 1957313 - RNA, 19 nt, Artificial Sequence
  Description of Artificial Sequence: Synthetic oligonucleotide
  Antisense strand to SEQ ID NO: 1957312
cucuuccaaugacaguuac

SEQ ID NO: 1957314 - RNA, 19 nt, Artificial Sequence
  Description of Artificial Sequence: Synthetic oligonucleotide
  Sense strand starting at position 726 of SEQ ID NO: 1880305
auguuagauccuuaucuca

SEQ ID NO: 1957315 - RNA, 19 nt, Artificial Sequence
  Description of Artificial Sequence: Synthetic oligonucleotide
  Antisense strand to SEQ ID NO: 1957314
ugagauaaggaucuaacau

SEQ ID NO: 1957316 - RNA, 19 nt, Artificial Sequence
  Description of Artificial Sequence: Synthetic oligonucleotide
  Sense strand starting at position 759 of SEQ ID NO: 1880305
guaaauuccaguugguaua

SEQ ID NO: 1957317 - RNA, 19 nt, Artificial Sequence
  Description of Artificial Sequence: Synthetic oligonucleotide
  Antisense strand to SEQ ID NO: 1957316
uauaccaacuggaauuuac

SEQ ID NO: 1957318 - RNA, 19 nt, Artificial Sequence
  Description of Artificial Sequence: Synthetic oligonucleotide
  Sense strand starting at position 826 of SEQ ID NO: 1880305
guguuccucgaguaaggaa

SEQ ID NO: 1957319 - RNA, 19 nt, Artificial Sequence
  Description of Artificial Sequence: Synthetic oligonucleotide
  Antisense strand to SEQ ID NO: 1957318
uuccuuacucgaggaacac

SEQ ID NO: 1957320 - RNA, 19 nt, Artificial Sequence
  Description of Artificial Sequence: Synthetic oligonucleotide
  Sense strand starting at position 891 of SEQ ID NO: 1880305
auagcuaguaauuggaagu

SEQ ID NO: 1957321 - RNA, 19 nt, Artificial Sequence
  Description of Artificial Sequence: Synthetic oligonucleotide
  Antisense strand to SEQ ID NO: 1957320
acuuccaauuacuagcuau

SEQ ID NO: 1957322 - RNA, 19 nt, Artificial Sequence
  Description of Artificial Sequence: Synthetic oligonucleotide
  Sense strand starting at position 1278 of SEQ ID NO: 1880305
uugaauaaugcagguauua

SEQ ID NO: 1957323 - RNA, 19 nt, Artificial Sequence
  Description of Artificial Sequence: Synthetic oligonucleotide
  Antisense strand to SEQ ID NO: 1957322
uaauaccugcauuauucaa

SEQ ID NO: 1957324 - RNA, 19 nt, Artificial Sequence
  Description of Artificial Sequence: Synthetic oligonucleotide
  Sense strand starting at position 1287 of SEQ ID NO: 1880305
gcagguauuaaggguacca

SEQ ID NO: 1957325 - RNA, 19 nt, Artificial Sequence
  Description of Artificial Sequence: Synthetic oligonucleotide
  Antisense strand to SEQ ID NO: 1957324
ugguacccuuaauaccugc

SEQ ID NO: 1957326 - RNA, 19 nt, Artificial Sequence
  Description of Artificial Sequence: Synthetic oligonucleotide
  Sense strand starting at position 1689 of SEQ ID NO: 1880305
ggauguuguauguauuaua

SEQ ID NO: 1957327 - RNA, 19 nt, Artificial Sequence
  Description of Artificial Sequence: Synthetic oligonucleotide
  Antisense strand to SEQ ID NO: 1957326
uauaauacauacaacaucc

SEQ ID NO: 1957328 - RNA, 19 nt, Artificial Sequence
  Description of Artificial Sequence: Synthetic oligonucleotide
  Sense strand starting at position 1819 of SEQ ID NO: 1880305
uguugaguagccuaaugag

SEQ ID NO: 1957329 - RNA, 19 nt, Artificial Sequence
  Description of Artificial Sequence: Synthetic oligonucleotide
  Antisense strand to SEQ ID NO: 1957328
cucauuaggcuacucaaca

SEQ ID NO: 1957330 - RNA, 19 nt, Artificial Sequence
  Description of Artificial Sequence: Synthetic oligonucleotide
  Sense strand starting at position 1842 of SEQ ID NO: 1880305
aagugaugagguuggucuu

SEQ ID NO: 1957331 - RNA, 19 nt, Artificial Sequence
  Description of Artificial Sequence: Synthetic oligonucleotide
  Antisense strand to SEQ ID NO: 1957330
aagaccaaccucaucacuu

SEQ ID NO: 1957332 - RNA, 19 nt, Artificial Sequence
  Description of Artificial Sequence: Synthetic oligonucleotide
  Sense strand starting at position 1885 of SEQ ID NO: 1880305
uguauauaaguggacuagu

SEQ ID NO: 1957333 - RNA, 19 nt, Artificial Sequence
  Description of Artificial Sequence: Synthetic oligonucleotide
  Antisense strand to SEQ ID NO: 1957332
acuaguccacuuauauaca

SEQ ID NO: 1957334 - RNA, 19 nt, Artificial Sequence
  Description of Artificial Sequence: Synthetic oligonucleotide
  Sense strand starting at position 2333 of SEQ ID NO: 1880305
uauaguucuggacauggca

SEQ ID NO: 1957335 - RNA, 19 nt, Artificial Sequence
  Description of Artificial Sequence: Synthetic oligonucleotide
  Antisense strand to SEQ ID NO: 1957334
ugccauguccagaacuaua

SEQ ID NO: 1957336 - RNA, 19 nt, Artificial Sequence
  Description of Artificial Sequence: Synthetic oligonucleotide
  Sense strand starting at position 2533 of SEQ ID NO: 1880305
auaccaaccguuuaaggua

SEQ ID NO: 1957337 - RNA, 19 nt, Artificial Sequence
  Description of Artificial Sequence: Synthetic oligonucleotide
  Antisense strand to SEQ ID NO: 1957336
uaccuuaaacgguugguau

SEQ ID NO: 1957338 - RNA, 19 nt, Artificial Sequence
  Description of Artificial Sequence: Synthetic oligonucleotide
  Sense strand starting at position 2575 of SEQ ID NO: 1880305
ugaguuugccucuaacaau

SEQ ID NO: 1957339 - RNA, 19 nt, Artificial Sequence
  Description of Artificial Sequence: Synthetic oligonucleotide
  Antisense strand to SEQ ID NO: 1957338
auuguuagaggcaaacuca

SEQ ID NO: 1957340 - RNA, 19 nt, Artificial Sequence
  Description of Artificial Sequence: Synthetic oligonucleotide
  Sense strand starting at position 2601 of SEQ ID NO: 1880305
aaauaacuccauggguguu

SEQ ID NO: 1957341 - RNA, 19 nt, Artificial Sequence
  Description of Artificial Sequence: Synthetic oligonucleotide
  Antisense strand to SEQ ID NO: 1957340
aacacccauggaguuauuu

SEQ ID NO: 1957342 - RNA, 19 nt, Artificial Sequence
  Description of Artificial Sequence: Synthetic oligonucleotide
  Sense strand starting at position 3082 of SEQ ID NO: 1880305
aucucauagcuauagguau

SEQ ID NO: 1957343 - RNA, 19 nt, Artificial Sequence
  Description of Artificial Sequence: Synthetic oligonucleotide
  Antisense strand to SEQ ID NO: 1957342
auaccuauagcuaugagau

SEQ ID NO: 1957344 - RNA, 19 nt, Artificial Sequence
  Description of Artificial Sequence: Synthetic oligonucleotide
  Sense strand starting at position 3088 of SEQ ID NO: 1880305
uagcuauagguaugaaguu

SEQ ID NO: 1957345 - RNA, 19 nt, Artificial Sequence
  Description of Artificial Sequence: Synthetic oligonucleotide
  Antisense strand to SEQ ID NO: 1957344
aacuucauaccuauagcua

SEQ ID NO: 1957346 - RNA, 19 nt, Artificial Sequence
  Description of Artificial Sequence: Synthetic oligonucleotide
  Sense strand starting at position 3145 of SEQ ID NO: 1880305
agaugcuaguuucucacau

SEQ ID NO: 1957347 - RNA, 19 nt, Artificial Sequence
  Description of Artificial Sequence: Synthetic oligonucleotide
  Antisense strand to SEQ ID NO: 1957346
augugagaaacuagcaucu

SEQ ID NO: 1957348 - RNA, 19 nt, Artificial Sequence
  Description of Artificial Sequence: Synthetic oligonucleotide
  Sense strand starting at position 3158 of SEQ ID NO: 1880305
ucacauaauguugauguca

SEQ ID NO: 1957349 - RNA, 19 nt, Artificial Sequence
  Description of Artificial Sequence: Synthetic oligonucleotide
  Antisense strand to SEQ ID NO: 1957348
ugacaucaacauuauguga

SEQ ID NO: 1957350 - RNA, 19 nt, Artificial Sequence
  Description of Artificial Sequence: Synthetic oligonucleotide
  Sense strand starting at position 3167 of SEQ ID NO: 1880305
guugaugucagagacaucu

SEQ ID NO: 1957351 - RNA, 19 nt, Artificial Sequence
  Description of Artificial Sequence: Synthetic oligonucleotide
  Antisense strand to SEQ ID NO: 1957350
agaugucucugacaucaac

SEQ ID NO: 1957352 - RNA, 19 nt, Artificial Sequence
  Description of Artificial Sequence: Synthetic oligonucleotide
  Sense strand starting at position 3236 of SEQ ID NO: 1880305
cuuuguauuuaggugcuau

SEQ ID NO: 1957353 - RNA, 19 nt, Artificial Sequence
  Description of Artificial Sequence: Synthetic oligonucleotide
  Antisense strand to SEQ ID NO: 1957352
auagcaccuaaauacaaag

SEQ ID NO: 1957354 - RNA, 19 nt, Artificial Sequence
  Description of Artificial Sequence: Synthetic oligonucleotide
  Sense strand starting at position 3240 of SEQ ID NO: 1880305
guauuuaggugcuauauuu

SEQ ID NO: 1957355 - RNA, 19 nt, Artificial Sequence
  Description of Artificial Sequence: Synthetic oligonucleotide
  Antisense strand to SEQ ID NO: 1957354
aaauauagcaccuaaauac

SEQ ID NO: 1957356 - RNA, 19 nt, Artificial Sequence
  Description of Artificial Sequence: Synthetic oligonucleotide
  Sense strand starting at position 3361 of SEQ ID NO: 1880305
gaaguauaauucuuagguu

SEQ ID NO: 1957357 - RNA, 19 nt, Artificial Sequence
  Description of Artificial Sequence: Synthetic oligonucleotide
  Antisense strand to SEQ ID NO: 1957356
aaccuaagaauuauacuuc

SEQ ID NO: 1957358 - RNA, 19 nt, Artificial Sequence
  Description of Artificial Sequence: Synthetic oligonucleotide
  Sense strand starting at position 3488 of SEQ ID NO: 1880305
uuguuuacaccuuaguaga

SEQ ID NO: 1957359 - RNA, 19 nt, Artificial Sequence
  Description of Artificial Sequence: Synthetic oligonucleotide
  Antisense strand to SEQ ID NO: 1957358
ucuacuaagguguaaacaa

SEQ ID NO: 1957360 - RNA, 19 nt, Artificial Sequence
  Description of Artificial Sequence: Synthetic oligonucleotide
  Sense strand starting at position 3490 of SEQ ID NO: 1880305
guuuacaccuuaguagauu

SEQ ID NO: 1957361 - RNA, 19 nt, Artificial Sequence
  Description of Artificial Sequence: Synthetic oligonucleotide
  Antisense strand to SEQ ID NO: 1957360
aaucuacuaagguguaaac

SEQ ID NO: 1957362 - RNA, 19 nt, Artificial Sequence
  Description of Artificial Sequence: Synthetic oligonucleotide
  Sense strand starting at position 3572 of SEQ ID NO: 1880305
gcaggaucuguucagugac

SEQ ID NO: 1957363 - RNA, 19 nt, Artificial Sequence
  Description of Artificial Sequence: Synthetic oligonucleotide
  Antisense strand to SEQ ID NO: 1957362
gucacugaacagauccugc

SEQ ID NO: 1957364 - RNA, 19 nt, Artificial Sequence
  Description of Artificial Sequence: Synthetic oligonucleotide
  Sense strand starting at position 3627 of SEQ ID NO: 1880305
gucaguuuauuccucaaag

SEQ ID NO: 1957365 - RNA, 19 nt, Artificial Sequence
  Description of Artificial Sequence: Synthetic oligonucleotide
  Antisense strand to SEQ ID NO: 1957364
cuuugaggaauaaacugac

SEQ ID NO: 1957366 - RNA, 19 nt, Artificial Sequence
  Description of Artificial Sequence: Synthetic oligonucleotide
  Sense strand starting at position 3638 of SEQ ID NO: 1880305
ccucaaagauggccuaauu

SEQ ID NO: 1957367 - RNA, 19 nt, Artificial Sequence
  Description of Artificial Sequence: Synthetic oligonucleotide
  Antisense strand to SEQ ID NO: 1957366
aauuaggccaucuuugagg

SEQ ID NO: 1957368 - RNA, 19 nt, Artificial Sequence
  Description of Artificial Sequence: Synthetic oligonucleotide
  Sense strand starting at position 3854 of SEQ ID NO: 1880305
agucuuugccuaugaggga

SEQ ID NO: 1957369 - RNA, 19 nt, Artificial Sequence
  Description of Artificial Sequence: Synthetic oligonucleotide
  Antisense strand to SEQ ID NO: 1957368
ucccucauaggcaaagacu

SEQ ID NO: 1957370 - RNA, 19 nt, Artificial Sequence
  Description of Artificial Sequence: Synthetic oligonucleotide
  Sense strand starting at position 3887 of SEQ ID NO: 1880305
aaggaauucugacuuuguu

SEQ ID NO: 1957371 - RNA, 19 nt, Artificial Sequence
  Description of Artificial Sequence: Synthetic oligonucleotide
  Antisense strand to SEQ ID NO: 1957370
aacaaagucagaauuccuu

SEQ ID NO: 1957372 - RNA, 19 nt, Artificial Sequence
  Description of Artificial Sequence: Synthetic oligonucleotide
  Sense strand starting at position 3912 of SEQ ID NO: 1880305
auguguugucauuaucacu

SEQ ID NO: 1957373 - RNA, 19 nt, Artificial Sequence
  Description of Artificial Sequence: Synthetic oligonucleotide
  Antisense strand to SEQ ID NO: 1957372
agugauaaugacaacacau

SEQ ID NO: 1957374 - RNA, 19 nt, Artificial Sequence
  Description of Artificial Sequence: Synthetic oligonucleotide
  Sense strand starting at position 3973 of SEQ ID NO: 1880305
ugauuacaugggugaauua

SEQ ID NO: 1957375 - RNA, 19 nt, Artificial Sequence
  Description of Artificial Sequence: Synthetic oligonucleotide
  Antisense strand to SEQ ID NO: 1957374
uaauucacccauguaauca

SEQ ID NO: 1957376 - RNA, 19 nt, Artificial Sequence
  Description of Artificial Sequence: Synthetic oligonucleotide
  Sense strand starting at position 119 of SEQ ID NO: 1880306
gcuucuugaguggaagcuu

SEQ ID NO: 1957377 - RNA, 19 nt, Artificial Sequence
  Description of Artificial Sequence: Synthetic oligonucleotide
  Antisense strand to SEQ ID NO: 1957376
aagcuuccacucaagaagc

SEQ ID NO: 1957378 - RNA, 19 nt, Artificial Sequence
  Description of Artificial Sequence: Synthetic oligonucleotide
  Sense strand starting at position 130 of SEQ ID NO: 1880306
ggaagcuuagagcaguaau

SEQ ID NO: 1957379 - RNA, 19 nt, Artificial Sequence
  Description of Artificial Sequence: Synthetic oligonucleotide
  Antisense strand to SEQ ID NO: 1957378
auuacugcucuaagcuucc

SEQ ID NO: 1957380 - RNA, 19 nt, Artificial Sequence
  Description of Artificial Sequence: Synthetic oligonucleotide
  Sense strand starting at position 583 of SEQ ID NO: 1880306
cuuccacugugauuauuga

SEQ ID NO: 1957381 - RNA, 19 nt, Artificial Sequence
  Description of Artificial Sequence: Synthetic oligonucleotide
  Antisense strand to SEQ ID NO: 1957380
ucaauaaucacaguggaag

SEQ ID NO: 1957382 - RNA, 19 nt, Artificial Sequence
  Description of Artificial Sequence: Synthetic oligonucleotide
  Sense strand starting at position 616 of SEQ ID NO: 1880306
agaagugugacauguaauu

SEQ ID NO: 1957383 - RNA, 19 nt, Artificial Sequence
  Description of Artificial Sequence: Synthetic oligonucleotide
  Antisense strand to SEQ ID NO: 1957382
aauuacaugucacacuucu

SEQ ID NO: 1957384 - RNA, 19 nt, Artificial Sequence
  Description of Artificial Sequence: Synthetic oligonucleotide
  Sense strand starting at position 719 of SEQ ID NO: 1880306
gagauuugcugagacuugu

SEQ ID NO: 1957385 - RNA, 19 nt, Artificial Sequence
  Description of Artificial Sequence: Synthetic oligonucleotide
  Antisense strand to SEQ ID NO: 1957384
acaagucucagcaaaucuc

SEQ ID NO: 1957386 - RNA, 19 nt, Artificial Sequence
  Description of Artificial Sequence: Synthetic oligonucleotide
  Sense strand starting at position 727 of SEQ ID NO: 1880306
cugagacuuguauaagguc

SEQ ID NO: 1957387 - RNA, 19 nt, Artificial Sequence
  Description of Artificial Sequence: Synthetic oligonucleotide
  Antisense strand to SEQ ID NO: 1957386
gaccuuauacaagucucag

SEQ ID NO: 1957388 - RNA, 19 nt, Artificial Sequence
  Description of Artificial Sequence: Synthetic oligonucleotide
  Sense strand starting at position 734 of SEQ ID NO: 1880306
uuguauaagguccaugaua

SEQ ID NO: 1957389 - RNA, 19 nt, Artificial Sequence
  Description of Artificial Sequence: Synthetic oligonucleotide
  Antisense strand to SEQ ID NO: 1957388
uaucauggaccuuauacaa

SEQ ID NO: 1957390 - RNA, 19 nt, Artificial Sequence
  Description of Artificial Sequence: Synthetic oligonucleotide
  Sense strand starting at position 736 of SEQ ID NO: 1880306
guauaagguccaugauaug

SEQ ID NO: 1957391 - RNA, 19 nt, Artificial Sequence
  Description of Artificial Sequence: Synthetic oligonucleotide
  Antisense strand to SEQ ID NO: 1957390
cauaucauggaccuuauac

SEQ ID NO: 1957392 - RNA, 19 nt, Artificial Sequence
  Description of Artificial Sequence: Synthetic oligonucleotide
  Sense strand starting at position 751 of SEQ ID NO: 1880306
uauggucuauuucgauaaa

SEQ ID NO: 1957393 - RNA, 19 nt, Artificial Sequence
  Description of Artificial Sequence: Synthetic oligonucleotide
  Antisense strand to SEQ ID NO: 1957392
uuuaucgaaauagaccaua

SEQ ID NO: 1957394 - RNA, 19 nt, Artificial Sequence
  Description of Artificial Sequence: Synthetic oligonucleotide
  Sense strand starting at position 752 of SEQ ID NO: 1880306
auggucuauuucgauaaac

SEQ ID NO: 1957395 - RNA, 19 nt, Artificial Sequence
  Description of Artificial Sequence: Synthetic oligonucleotide
  Antisense strand to SEQ ID NO: 1957394
guuuaucgaaauagaccau

SEQ ID NO: 1957396 - RNA, 19 nt, Artificial Sequence
  Description of Artificial Sequence: Synthetic oligonucleotide
  Sense strand starting at position 805 of SEQ ID NO: 1880306
uaguguuguacacacguga

SEQ ID NO: 1957397 - RNA, 19 nt, Artificial Sequence
  Description of Artificial Sequence: Synthetic oligonucleotide
  Antisense strand to SEQ ID NO: 1957396
ucacguguguacaacacua

SEQ ID NO: 1957398 - RNA, 19 nt, Artificial Sequence
  Description of Artificial Sequence: Synthetic oligonucleotide
  Sense strand starting at position 809 of SEQ ID NO: 1880306
guuguacacacgugaauua

SEQ ID NO: 1957399 - RNA, 19 nt, Artificial Sequence
  Description of Artificial Sequence: Synthetic oligonucleotide
  Antisense strand to SEQ ID NO: 1957398
uaauucacguguguacaac

SEQ ID NO: 1957400 - RNA, 19 nt, Artificial Sequence
  Description of Artificial Sequence: Synthetic oligonucleotide
  Sense strand starting at position 850 of SEQ ID NO: 1880306
guucaaacugugugagguu

SEQ ID NO: 1957401 - RNA, 19 nt, Artificial Sequence
  Description of Artificial Sequence: Synthetic oligonucleotide
  Antisense strand to SEQ ID NO: 1957400
aaccucacacaguuugaac

SEQ ID NO: 1957402 - RNA, 19 nt, Artificial Sequence
  Description of Artificial Sequence: Synthetic oligonucleotide
  Sense strand starting at position 857 of SEQ ID NO: 1880306
cugugugagguugauucaa

SEQ ID NO: 1957403 - RNA, 19 nt, Artificial Sequence
  Description of Artificial Sequence: Synthetic oligonucleotide
  Antisense strand to SEQ ID NO: 1957402
uugaaucaaccucacacag

SEQ ID NO: 1957404 - RNA, 19 nt, Artificial Sequence
  Description of Artificial Sequence: Synthetic oligonucleotide
  Sense strand starting at position 942 of SEQ ID NO: 1880306
gcugauuuauguugagaug

SEQ ID NO: 1957405 - RNA, 19 nt, Artificial Sequence
  Description of Artificial Sequence: Synthetic oligonucleotide
  Antisense strand to SEQ ID NO: 1957404
caucucaacauaaaucagc

SEQ ID NO: 1957406 - RNA, 19 nt, Artificial Sequence
  Description of Artificial Sequence: Synthetic oligonucleotide
  Sense strand starting at position 945 of SEQ ID NO: 1880306
gauuuauguugagauguug

SEQ ID NO: 1957407 - RNA, 19 nt, Artificial Sequence
  Description of Artificial Sequence: Synthetic oligonucleotide
  Antisense strand to SEQ ID NO: 1957406
caacaucucaacauaaauc

SEQ ID NO: 1957408 - RNA, 19 nt, Artificial Sequence
  Description of Artificial Sequence: Synthetic oligonucleotide
  Sense strand starting at position 969 of SEQ ID NO: 1880306
uccuccaauucgguggaaa

SEQ ID NO: 1957409 - RNA, 19 nt, Artificial Sequence
  Description of Artificial Sequence: Synthetic oligonucleotide
  Antisense strand to SEQ ID NO: 1957408
uuuccaccgaauuggagga

SEQ ID NO: 1957410 - RNA, 19 nt, Artificial Sequence
  Description of Artificial Sequence: Synthetic oligonucleotide
  Sense strand starting at position 1198 of SEQ ID NO: 1880306
ggacaucacuaagaguaac

SEQ ID NO: 1957411 - RNA, 19 nt, Artificial Sequence
  Description of Artificial Sequence: Synthetic oligonucleotide
  Antisense strand to SEQ ID NO: 1957410
guuacucuuagugaugucc

SEQ ID NO: 1957412 - RNA, 19 nt, Artificial Sequence
  Description of Artificial Sequence: Synthetic oligonucleotide
  Sense strand starting at position 1255 of SEQ ID NO: 1880306
ggaagauauuugcaauaac

SEQ ID NO: 1957413 - RNA, 19 nt, Artificial Sequence
  Description of Artificial Sequence: Synthetic oligonucleotide
  Antisense strand to SEQ ID NO: 1957412
guuauugcaaauaucuucc

SEQ ID NO: 1957414 - RNA, 19 nt, Artificial Sequence
  Description of Artificial Sequence: Synthetic oligonucleotide
  Sense strand starting at position 1282 of SEQ ID NO: 1880306
augcgaauccaauaaucca

SEQ ID NO: 1957415 - RNA, 19 nt, Artificial Sequence
  Description of Artificial Sequence: Synthetic oligonucleotide
  Antisense strand to SEQ ID NO: 1957414
uggauuauuggauucgcau

SEQ ID NO: 1957416 - RNA, 19 nt, Artificial Sequence
  Description of Artificial Sequence: Synthetic oligonucleotide
  Sense strand starting at position 1340 of SEQ ID NO: 1880306
ucuccagacucuggaaaga

SEQ ID NO: 1957417 - RNA, 19 nt, Artificial Sequence
  Description of Artificial Sequence: Synthetic oligonucleotide
  Antisense strand to SEQ ID NO: 1957416
ucuuuccagagucuggaga

SEQ ID NO: 1957418 - RNA, 19 nt, Artificial Sequence
  Description of Artificial Sequence: Synthetic oligonucleotide
  Sense strand starting at position 2136 of SEQ ID NO: 1880306
gaauucgggcucugaaaga

SEQ ID NO: 1957419 - RNA, 19 nt, Artificial Sequence
  Description of Artificial Sequence: Synthetic oligonucleotide
  Antisense strand to SEQ ID NO: 1957418
ucuuucagagcccgaauuc

SEQ ID NO: 1957420 - RNA, 19 nt, Artificial Sequence
  Description of Artificial Sequence: Synthetic oligonucleotide
  Sense strand starting at position 2782 of SEQ ID NO: 1880306
cagucaugcuggccauaaa

SEQ ID NO: 1957421 - RNA, 19 nt, Artificial Sequence
  Description of Artificial Sequence: Synthetic oligonucleotide
  Antisense strand to SEQ ID NO: 1957420
uuuauggccagcaugacug

SEQ ID NO: 1957422 - RNA, 19 nt, Artificial Sequence
  Description of Artificial Sequence: Synthetic oligonucleotide
  Sense strand starting at position 2785 of SEQ ID NO: 1880306
ucaugcuggccauaaacaa

SEQ ID NO: 1957423 - RNA, 19 nt, Artificial Sequence
  Description of Artificial Sequence: Synthetic oligonucleotide
  Antisense strand to SEQ ID NO: 1957422
uuguuuauggccagcauga

SEQ ID NO: 1957424 - RNA, 19 nt, Artificial Sequence
  Description of Artificial Sequence: Synthetic oligonucleotide
  Sense strand starting at position 2826 of SEQ ID NO: 1880306
ucuauuaguggguggcuaa

SEQ ID NO: 1957425 - RNA, 19 nt, Artificial Sequence
  Description of Artificial Sequence: Synthetic oligonucleotide
  Antisense strand to SEQ ID NO: 1957424
uuagccacccacuaauaga

SEQ ID NO: 1957426 - RNA, 19 nt, Artificial Sequence
  Description of Artificial Sequence: Synthetic oligonucleotide
  Sense strand starting at position 2877 of SEQ ID NO: 1880306
acagaaacccuuuguagga

SEQ ID NO: 1957427 - RNA, 19 nt, Artificial Sequence
  Description of Artificial Sequence: Synthetic oligonucleotide
  Antisense strand to SEQ ID NO: 1957426
uccuacaaaggguuucugu

SEQ ID NO: 1957428 - RNA, 19 nt, Artificial Sequence
  Description of Artificial Sequence: Synthetic oligonucleotide
  Sense strand starting at position 2898 of SEQ ID NO: 1880306
acgugucccgauguuuauu

SEQ ID NO: 1957429 - RNA, 19 nt, Artificial Sequence
  Description of Artificial Sequence: Synthetic oligonucleotide
  Antisense strand to SEQ ID NO: 1957428
aauaaacaucgggacacgu

SEQ ID NO: 1957430 - RNA, 19 nt, Artificial Sequence
  Description of Artificial Sequence: Synthetic oligonucleotide
  Sense strand starting at position 2933 of SEQ ID NO: 1880306
ugcuguuacuggccgagau

SEQ ID NO: 1957431 - RNA, 19 nt, Artificial Sequence
  Description of Artificial Sequence: Synthetic oligonucleotide
  Antisense strand to SEQ ID NO: 1957430
aucucggccaguaacagca

SEQ ID NO: 1957432 - RNA, 19 nt, Artificial Sequence
  Description of Artificial Sequence: Synthetic oligonucleotide
  Sense strand starting at position 2934 of SEQ ID NO: 1880306
gcuguuacuggccgagauc

SEQ ID NO: 1957433 - RNA, 19 nt, Artificial Sequence
  Description of Artificial Sequence: Synthetic oligonucleotide
  Antisense strand to SEQ ID NO: 1957432
gaucucggccaguaacagc

SEQ ID NO: 1957434 - RNA, 19 nt, Artificial Sequence
  Description of Artificial Sequence: Synthetic oligonucleotide
  Sense strand starting at position 3043 of SEQ ID NO: 1880306
guuggugcugugaggacau

SEQ ID NO: 1957435 - RNA, 19 nt, Artificial Sequence
  Description of Artificial Sequence: Synthetic oligonucleotide
  Antisense strand to SEQ ID NO: 1957434
auguccucacagcaccaac

SEQ ID NO: 1957436 - RNA, 19 nt, Artificial Sequence
  Description of Artificial Sequence: Synthetic oligonucleotide
  Sense strand starting at position 3194 of SEQ ID NO: 1880306
gucaccugggaauguuuau

SEQ ID NO: 1957437 - RNA, 19 nt, Artificial Sequence
  Description of Artificial Sequence: Synthetic oligonucleotide
  Antisense strand to SEQ ID NO: 1957436
auaaacauucccaggugac

SEQ ID NO: 1957438 - RNA, 19 nt, Artificial Sequence
  Description of Artificial Sequence: Synthetic oligonucleotide
  Sense strand starting at position 3209 of SEQ ID NO: 1880306
uuaugugaugcccgaagag

SEQ ID NO: 1957439 - RNA, 19 nt, Artificial Sequence
  Description of Artificial Sequence: Synthetic oligonucleotide
  Antisense strand to SEQ ID NO: 1957438
cucuucgggcaucacauaa

SEQ ID NO: 1957440 - RNA, 19 nt, Artificial Sequence
  Description of Artificial Sequence: Synthetic oligonucleotide
  Sense strand starting at position 3266 of SEQ ID NO: 1880306
ggugacagcauaggugaaa

SEQ ID NO: 1957441 - RNA, 19 nt, Artificial Sequence
  Description of Artificial Sequence: Synthetic oligonucleotide
  Antisense strand to SEQ ID NO: 1957440
uuucaccuaugcugucacc

SEQ ID NO: 1957442 - RNA, 19 nt, Artificial Sequence
  Description of Artificial Sequence: Synthetic oligonucleotide
  Sense strand starting at position 3513 of SEQ ID NO: 1880306
uggagucccaucugagaag

SEQ ID NO: 1957443 - RNA, 19 nt, Artificial Sequence
  Description of Artificial Sequence: Synthetic oligonucleotide
  Antisense strand to SEQ ID NO: 1957442
cuucucagaugggacucca

SEQ ID NO: 1957444 - RNA, 19 nt, Artificial Sequence
  Description of Artificial Sequence: Synthetic oligonucleotide
  Sense strand starting at position 3514 of SEQ ID NO: 1880306
ggagucccaucugagaagu

SEQ ID NO: 1957445 - RNA, 19 nt, Artificial Sequence
  Description of Artificial Sequence: Synthetic oligonucleotide
  Antisense strand to SEQ ID NO: 1957444
acuucucagaugggacucc

SEQ ID NO: 1957446 - RNA, 19 nt, Artificial Sequence
  Description of Artificial Sequence: Synthetic oligonucleotide
  Sense strand starting at position 3611 of SEQ ID NO: 1880306
cuagucgggcucugagaau

SEQ ID NO: 1957447 - RNA, 19 nt, Artificial Sequence
  Description of Artificial Sequence: Synthetic oligonucleotide
  Antisense strand to SEQ ID NO: 1957446
auucucagagcccgacuag

SEQ ID NO: 1957448 - RNA, 19 nt, Artificial Sequence
  Description of Artificial Sequence: Synthetic oligonucleotide
  Sense strand starting at position 3877 of SEQ ID NO: 1880306
ggagaucuguguuugggag

SEQ ID NO: 1957449 - RNA, 19 nt, Artificial Sequence
  Description of Artificial Sequence: Synthetic oligonucleotide
  Antisense strand to SEQ ID NO: 1957448
cucccaaacacagaucucc

SEQ ID NO: 1957450 - RNA, 19 nt, Artificial Sequence
  Description of Artificial Sequence: Synthetic oligonucleotide
  Sense strand starting at position 3900 of SEQ ID NO: 1880306
cgggucaguccugggaauu

SEQ ID NO: 1957451 - RNA, 19 nt, Artificial Sequence
  Description of Artificial Sequence: Synthetic oligonucleotide
  Antisense strand to SEQ ID NO: 1957450
aauucccaggacugacccg

SEQ ID NO: 1957452 - RNA, 19 nt, Artificial Sequence
  Description of Artificial Sequence: Synthetic oligonucleotide
  Sense strand starting at position 3911 of SEQ ID NO: 1880306
ugggaauuuccaugucguc

SEQ ID NO: 1957453 - RNA, 19 nt, Artificial Sequence
  Description of Artificial Sequence: Synthetic oligonucleotide
  Antisense strand to SEQ ID NO: 1957452
gacgacauggaaauuccca

SEQ ID NO: 1957454 - RNA, 19 nt, Artificial Sequence
  Description of Artificial Sequence: Synthetic oligonucleotide
  Sense strand starting at position 3976 of SEQ ID NO: 1880306
cuuaauuaaugagauacag

SEQ ID NO: 1957455 - RNA, 19 nt, Artificial Sequence
  Description of Artificial Sequence: Synthetic oligonucleotide
  Antisense strand to SEQ ID NO: 1957454
cuguaucucauuaauuaag

SEQ ID NO: 1957456 - RNA, 19 nt, Artificial Sequence
  Description of Artificial Sequence: Synthetic oligonucleotide
  Sense strand starting at position 1302 of SEQ ID NO: 1880307
uaagaacuguucguggacu

SEQ ID NO: 1957457 - RNA, 19 nt, Artificial Sequence
  Description of Artificial Sequence: Synthetic oligonucleotide
  Antisense strand to SEQ ID NO: 1957456
aguccacgaacaguucuua

SEQ ID NO: 1957458 - RNA, 19 nt, Artificial Sequence
  Description of Artificial Sequence: Synthetic oligonucleotide
  Sense strand starting at position 1374 of SEQ ID NO: 1880307
ggagucaucucagauaccu

SEQ ID NO: 1957459 - RNA, 19 nt, Artificial Sequence
  Description of Artificial Sequence: Synthetic oligonucleotide
  Antisense strand to SEQ ID NO: 1957458
agguaucugagaugacucc

SEQ ID NO: 1957460 - RNA, 19 nt, Artificial Sequence
  Description of Artificial Sequence: Synthetic oligonucleotide
  Sense strand starting at position 1413 of SEQ ID NO: 1880307
gcagucgcucgauuccauu

SEQ ID NO: 1957461 - RNA, 19 nt, Artificial Sequence
  Description of Artificial Sequence: Synthetic oligonucleotide
  Antisense strand to SEQ ID NO: 1957460
aauggaaucgagcgacugc

SEQ ID NO: 1957462 - RNA, 19 nt, Artificial Sequence
  Description of Artificial Sequence: Synthetic oligonucleotide
  Sense strand starting at position 2056 of SEQ ID NO: 1880307
cgcgucuuucgggcauaca

SEQ ID NO: 1957463 - RNA, 19 nt, Artificial Sequence
  Description of Artificial Sequence: Synthetic oligonucleotide
  Antisense strand to SEQ ID NO: 1957462
uguaugcccgaaagacgcg

SEQ ID NO: 1957464 - RNA, 19 nt, Artificial Sequence
  Description of Artificial Sequence: Synthetic oligonucleotide
  Sense strand starting at position 2466 of SEQ ID NO: 1880307
ugguuuaccgagcagaaga

SEQ ID NO: 1957465 - RNA, 19 nt, Artificial Sequence
  Description of Artificial Sequence: Synthetic oligonucleotide
  Antisense strand to SEQ ID NO: 1957464
ucuucugcucgguaaacca

SEQ ID NO: 1957466 - RNA, 19 nt, Artificial Sequence
  Description of Artificial Sequence: Synthetic oligonucleotide
  Sense strand starting at position 2489 of SEQ ID NO: 1880307
agucauagcccagagucaa

SEQ ID NO: 1957467 - RNA, 19 nt, Artificial Sequence
  Description of Artificial Sequence: Synthetic oligonucleotide
  Antisense strand to SEQ ID NO: 1957466
uugacucugggcuaugacu

SEQ ID NO: 1957468 - RNA, 19 nt, Artificial Sequence
  Description of Artificial Sequence: Synthetic oligonucleotide
  Sense strand starting at position 2748 of SEQ ID NO: 1880307
aagagaaguucuuccacug

SEQ ID NO: 1957469 - RNA, 19 nt, Artificial Sequence
  Description of Artificial Sequence: Synthetic oligonucleotide
  Antisense strand to SEQ ID NO: 1957468
caguggaagaacuucucuu

SEQ ID NO: 1957470 - RNA, 19 nt, Artificial Sequence
  Description of Artificial Sequence: Synthetic oligonucleotide
  Sense strand starting at position 2771 of SEQ ID NO: 1880307
gacuuucagcguggacagu

SEQ ID NO: 1957471 - RNA, 19 nt, Artificial Sequence
  Description of Artificial Sequence: Synthetic oligonucleotide
  Antisense strand to SEQ ID NO: 1957470
acuguccacgcugaaaguc

SEQ ID NO: 1957472 - RNA, 19 nt, Artificial Sequence
  Description of Artificial Sequence: Synthetic oligonucleotide
  Sense strand starting at position 2777 of SEQ ID NO: 1880307
cagcguggacagugaucau

SEQ ID NO: 1957473 - RNA, 19 nt, Artificial Sequence
  Description of Artificial Sequence: Synthetic oligonucleotide
  Antisense strand to SEQ ID NO: 1957472
augaucacuguccacgcug

SEQ ID NO: 1957474 - RNA, 19 nt, Artificial Sequence
  Description of Artificial Sequence: Synthetic oligonucleotide
  Sense strand starting at position 2804 of SEQ ID NO: 1880307
gucaguugauuguuccacu

SEQ ID NO: 1957475 - RNA, 19 nt, Artificial Sequence
  Description of Artificial Sequence: Synthetic oligonucleotide
  Antisense strand to SEQ ID NO: 1957474
aguggaacaaucaacugac

SEQ ID NO: 1957476 - RNA, 19 nt, Artificial Sequence
  Description of Artificial Sequence: Synthetic oligonucleotide
  Sense strand starting at position 2805 of SEQ ID NO: 1880307
ucaguugauuguuccacua

SEQ ID NO: 1957477 - RNA, 19 nt, Artificial Sequence
  Description of Artificial Sequence: Synthetic oligonucleotide
  Antisense strand to SEQ ID NO: 1957476
uaguggaacaaucaacuga

SEQ ID NO: 1957478 - RNA, 19 nt, Artificial Sequence
  Description of Artificial Sequence: Synthetic oligonucleotide
  Sense strand starting at position 2807 of SEQ ID NO: 1880307
aguugauuguuccacuaaa

SEQ ID NO: 1957479 - RNA, 19 nt, Artificial Sequence
  Description of Artificial Sequence: Synthetic oligonucleotide
  Antisense strand to SEQ ID NO: 1957478
uuuaguggaacaaucaacu

SEQ ID NO: 1957480 - RNA, 19 nt, Artificial Sequence
  Description of Artificial Sequence: Synthetic oligonucleotide
  Sense strand starting at position 2838 of SEQ ID NO: 1880307
cagauccgcuaagaugaaa

SEQ ID NO: 1957481 - RNA, 19 nt, Artificial Sequence
  Description of Artificial Sequence: Synthetic oligonucleotide
  Antisense strand to SEQ ID NO: 1957480
uuucaucuuagcggaucug

SEQ ID NO: 1957482 - RNA, 19 nt, Artificial Sequence
  Description of Artificial Sequence: Synthetic oligonucleotide
  Sense strand starting at position 2857 of SEQ ID NO: 1880307
ggcuucucccaaggauucu

SEQ ID NO: 1957483 - RNA, 19 nt, Artificial Sequence
  Description of Artificial Sequence: Synthetic oligonucleotide
  Antisense strand to SEQ ID NO: 1957482
agaauccuugggagaagcc

SEQ ID NO: 1957484 - RNA, 19 nt, Artificial Sequence
  Description of Artificial Sequence: Synthetic oligonucleotide
  Sense strand starting at position 2907 of SEQ ID NO: 1880307
ugccgauucugucugccau

SEQ ID NO: 1957485 - RNA, 19 nt, Artificial Sequence
  Description of Artificial Sequence: Synthetic oligonucleotide
  Antisense strand to SEQ ID NO: 1957484
auggcagacagaaucggca

SEQ ID NO: 1957486 - RNA, 19 nt, Artificial Sequence
  Description of Artificial Sequence: Synthetic oligonucleotide
  Sense strand starting at position 2927 of SEQ ID NO: 1880307
ugguuacucucugccuuua

SEQ ID NO: 1957487 - RNA, 19 nt, Artificial Sequence
  Description of Artificial Sequence: Synthetic oligonucleotide
  Antisense strand to SEQ ID NO: 1957486
uaaaggcagagaguaacca

SEQ ID NO: 1957488 - RNA, 19 nt, Artificial Sequence
  Description of Artificial Sequence: Synthetic oligonucleotide
  Sense strand starting at position 3081 of SEQ ID NO: 1880307
gcauuucugucccuaauug

SEQ ID NO: 1957489 - RNA, 19 nt, Artificial Sequence
  Description of Artificial Sequence: Synthetic oligonucleotide
  Antisense strand to SEQ ID NO: 1957488
caauuagggacagaaaugc

SEQ ID NO: 1957490 - RNA, 19 nt, Artificial Sequence
  Description of Artificial Sequence: Synthetic oligonucleotide
  Sense strand starting at position 3182 of SEQ ID NO: 1880307
cggacucauuccuggccua

SEQ ID NO: 1957491 - RNA, 19 nt, Artificial Sequence
  Description of Artificial Sequence: Synthetic oligonucleotide
  Antisense strand to SEQ ID NO: 1957490
uaggccaggaaugaguccg

SEQ ID NO: 1957492 - RNA, 19 nt, Artificial Sequence
  Description of Artificial Sequence: Synthetic oligonucleotide
  Sense strand starting at position 3183 of SEQ ID NO: 1880307
ggacucauuccuggccuau

SEQ ID NO: 1957493 - RNA, 19 nt, Artificial Sequence
  Description of Artificial Sequence: Synthetic oligonucleotide
  Antisense strand to SEQ ID NO: 1957492
auaggccaggaaugagucc

SEQ ID NO: 1957494 - RNA, 19 nt, Artificial Sequence
  Description of Artificial Sequence: Synthetic oligonucleotide
  Sense strand starting at position 3187 of SEQ ID NO: 1880307
ucauuccuggccuauaaga

SEQ ID NO: 1957495 - RNA, 19 nt, Artificial Sequence
  Description of Artificial Sequence: Synthetic oligonucleotide
  Antisense strand to SEQ ID NO: 1957494
ucuuauaggccaggaauga

SEQ ID NO: 1957496 - RNA, 19 nt, Artificial Sequence
  Description of Artificial Sequence: Synthetic oligonucleotide
  Sense strand starting at position 3252 of SEQ ID NO: 1880307
cugagauucugugacacag

SEQ ID NO: 1957497 - RNA, 19 nt, Artificial Sequence
  Description of Artificial Sequence: Synthetic oligonucleotide
  Antisense strand to SEQ ID NO: 1957496
cugugucacagaaucucag

SEQ ID NO: 1957498 - RNA, 19 nt, Artificial Sequence
  Description of Artificial Sequence: Synthetic oligonucleotide
  Sense strand starting at position 3394 of SEQ ID NO: 1880307
cggugcuuccaucauugua

SEQ ID NO: 1957499 - RNA, 19 nt, Artificial Sequence
  Description of Artificial Sequence: Synthetic oligonucleotide
  Antisense strand to SEQ ID NO: 1957498
uacaaugauggaagcaccg

SEQ ID NO: 1957500 - RNA, 19 nt, Artificial Sequence
  Description of Artificial Sequence: Synthetic oligonucleotide
  Sense strand starting at position 3396 of SEQ ID NO: 1880307
gugcuuccaucauuguaau

SEQ ID NO: 1957501 - RNA, 19 nt, Artificial Sequence
  Description of Artificial Sequence: Synthetic oligonucleotide
  Antisense strand to SEQ ID NO: 1957500
auuacaaugauggaagcac

SEQ ID NO: 1957502 - RNA, 19 nt, Artificial Sequence
  Description of Artificial Sequence: Synthetic oligonucleotide
  Sense strand starting at position 3455 of SEQ ID NO: 1880307
cacuguuuccugcagguua

SEQ ID NO: 1957503 - RNA, 19 nt, Artificial Sequence
  Description of Artificial Sequence: Synthetic oligonucleotide
  Antisense strand to SEQ ID NO: 1957502
uaaccugcaggaaacagug

SEQ ID NO: 1957504 - RNA, 19 nt, Artificial Sequence
  Description of Artificial Sequence: Synthetic oligonucleotide
  Sense strand starting at position 3482 of SEQ ID NO: 1880307
ccaugagccuggguucuau

SEQ ID NO: 1957505 - RNA, 19 nt, Artificial Sequence
  Description of Artificial Sequence: Synthetic oligonucleotide
  Antisense strand to SEQ ID NO: 1957504
auagaacccaggcucaugg

SEQ ID NO: 1957506 - RNA, 19 nt, Artificial Sequence
  Description of Artificial Sequence: Synthetic oligonucleotide
  Sense strand starting at position 3493 of SEQ ID NO: 1880307
gguucuaucaccuggaguc

SEQ ID NO: 1957507 - RNA, 19 nt, Artificial Sequence
  Description of Artificial Sequence: Synthetic oligonucleotide
  Antisense strand to SEQ ID NO: 1957506
gacuccaggugauagaacc

SEQ ID NO: 1957508 - RNA, 19 nt, Artificial Sequence
  Description of Artificial Sequence: Synthetic oligonucleotide
  Sense strand starting at position 3651 of SEQ ID NO: 1880307
acuguugagacguguucca

SEQ ID NO: 1957509 - RNA, 19 nt, Artificial Sequence
  Description of Artificial Sequence: Synthetic oligonucleotide
  Antisense strand to SEQ ID NO: 1957508
uggaacacgucucaacagu

SEQ ID NO: 1957510 - RNA, 19 nt, Artificial Sequence
  Description of Artificial Sequence: Synthetic oligonucleotide
  Sense strand starting at position 3656 of SEQ ID NO: 1880307
ugagacguguuccaucaga

SEQ ID NO: 1957511 - RNA, 19 nt, Artificial Sequence
  Description of Artificial Sequence: Synthetic oligonucleotide
  Antisense strand to SEQ ID NO: 1957510
ucugauggaacacgucuca

SEQ ID NO: 1957512 - RNA, 19 nt, Artificial Sequence
  Description of Artificial Sequence: Synthetic oligonucleotide
  Sense strand starting at position 3661 of SEQ ID NO: 1880307
cguguuccaucagaaacau

SEQ ID NO: 1957513 - RNA, 19 nt, Artificial Sequence
  Description of Artificial Sequence: Synthetic oligonucleotide
  Antisense strand to SEQ ID NO: 1957512
auguuucugauggaacacg

SEQ ID NO: 1957514 - RNA, 19 nt, Artificial Sequence
  Description of Artificial Sequence: Synthetic oligonucleotide
  Sense strand starting at position 21 of SEQ ID NO: 1880308
uucuaaucucaguggaaau

SEQ ID NO: 1957515 - RNA, 19 nt, Artificial Sequence
  Description of Artificial Sequence: Synthetic oligonucleotide
  Antisense strand to SEQ ID NO: 1957514
auuuccacugagauuagaa

SEQ ID NO: 1957516 - RNA, 19 nt, Artificial Sequence
  Description of Artificial Sequence: Synthetic oligonucleotide
  Sense strand starting at position 32 of SEQ ID NO: 1880308
guggaaauuugguaacaca

SEQ ID NO: 1957517 - RNA, 19 nt, Artificial Sequence
  Description of Artificial Sequence: Synthetic oligonucleotide
  Antisense strand to SEQ ID NO: 1957516
uguguuaccaaauuuccac

SEQ ID NO: 1957518 - RNA, 19 nt, Artificial Sequence
  Description of Artificial Sequence: Synthetic oligonucleotide
  Sense strand starting at position 42 of SEQ ID NO: 1880308
gguaacacagcuuauaaau

SEQ ID NO: 1957519 - RNA, 19 nt, Artificial Sequence
  Description of Artificial Sequence: Synthetic oligonucleotide
  Antisense strand to SEQ ID NO: 1957518
auuuauaagcuguguuacc

SEQ ID NO: 1957520 - RNA, 19 nt, Artificial Sequence
  Description of Artificial Sequence: Synthetic oligonucleotide
  Sense strand starting at position 71 of SEQ ID NO: 1880308
aagguuaaauugguuacau

SEQ ID NO: 1957521 - RNA, 19 nt, Artificial Sequence
  Description of Artificial Sequence: Synthetic oligonucleotide
  Antisense strand to SEQ ID NO: 1957520
auguaaccaauuuaaccuu

SEQ ID NO: 1957522 - RNA, 19 nt, Artificial Sequence
  Description of Artificial Sequence: Synthetic oligonucleotide
  Sense strand starting at position 72 of SEQ ID NO: 1880308
agguuaaauugguuacaug

SEQ ID NO: 1957523 - RNA, 19 nt, Artificial Sequence
  Description of Artificial Sequence: Synthetic oligonucleotide
  Antisense strand to SEQ ID NO: 1957522
cauguaaccaauuuaaccu

SEQ ID NO: 1957524 - RNA, 19 nt, Artificial Sequence
  Description of Artificial Sequence: Synthetic oligonucleotide
  Sense strand starting at position 242 of SEQ ID NO: 1880308
uguagcauaccugaucauu

SEQ ID NO: 1957525 - RNA, 19 nt, Artificial Sequence
  Description of Artificial Sequence: Synthetic oligonucleotide
  Antisense strand to SEQ ID NO: 1957524
aaugaucagguaugcuaca

SEQ ID NO: 1957526 - RNA, 19 nt, Artificial Sequence
  Description of Artificial Sequence: Synthetic oligonucleotide
  Sense strand starting at position 318 of SEQ ID NO: 1880308
aguaauuggagugguagga

SEQ ID NO: 1957527 - RNA, 19 nt, Artificial Sequence
  Description of Artificial Sequence: Synthetic oligonucleotide
  Antisense strand to SEQ ID NO: 1957526
uccuaccacuccaauuacu

SEQ ID NO: 1957528 - RNA, 19 nt, Artificial Sequence
  Description of Artificial Sequence: Synthetic oligonucleotide
  Sense strand starting at position 341 of SEQ ID NO: 1880308
cuuggaauaucugaauuua

SEQ ID NO: 1957529 - RNA, 19 nt, Artificial Sequence
  Description of Artificial Sequence: Synthetic oligonucleotide
  Antisense strand to SEQ ID NO: 1957528
uaaauucagauauuccaag

SEQ ID NO: 1957530 - RNA, 19 nt, Artificial Sequence
  Description of Artificial Sequence: Synthetic oligonucleotide
  Sense strand starting at position 432 of SEQ ID NO: 1880308
ucagaaggaucugucuacu

SEQ ID NO: 1957531 - RNA, 19 nt, Artificial Sequence
  Description of Artificial Sequence: Synthetic oligonucleotide
  Antisense strand to SEQ ID NO: 1957530
aguagacagauccuucuga

SEQ ID NO: 1957532 - RNA, 19 nt, Artificial Sequence
  Description of Artificial Sequence: Synthetic oligonucleotide
  Sense strand starting at position 438 of SEQ ID NO: 1880308
ggaucugucuacucaaucu

SEQ ID NO: 1957533 - RNA, 19 nt, Artificial Sequence
  Description of Artificial Sequence: Synthetic oligonucleotide
  Antisense strand to SEQ ID NO: 1957532
agauugaguagacagaucc

SEQ ID NO: 1957534 - RNA, 19 nt, Artificial Sequence
  Description of Artificial Sequence: Synthetic oligonucleotide
  Sense strand starting at position 612 of SEQ ID NO: 1880308
cgacaaucaacauggugaa

SEQ ID NO: 1957535 - RNA, 19 nt, Artificial Sequence
  Description of Artificial Sequence: Synthetic oligonucleotide
  Antisense strand to SEQ ID NO: 1957534
uucaccauguugauugucg

SEQ ID NO: 1957536 - RNA, 19 nt, Artificial Sequence
  Description of Artificial Sequence: Synthetic oligonucleotide
  Sense strand starting at position 786 of SEQ ID NO: 1880308
aaaugacgugggcaaaguu

SEQ ID NO: 1957537 - RNA, 19 nt, Artificial Sequence
  Description of Artificial Sequence: Synthetic oligonucleotide
  Antisense strand to SEQ ID NO: 1957536
aacuuugcccacgucauuu

SEQ ID NO: 1957538 - RNA, 19 nt, Artificial Sequence
  Description of Artificial Sequence: Synthetic oligonucleotide
  Sense strand starting at position 1036 of SEQ ID NO: 1880308
cacugucuaucccuggaga

SEQ ID NO: 1957539 - RNA, 19 nt, Artificial Sequence
  Description of Artificial Sequence: Synthetic oligonucleotide
  Antisense strand to SEQ ID NO: 1957538
ucuccagggauagacagug

SEQ ID NO: 1957540 - RNA, 19 nt, Artificial Sequence
  Description of Artificial Sequence: Synthetic oligonucleotide
  Sense strand starting at position 1357 of SEQ ID NO: 1880308
accugacugcccgaaauca

SEQ ID NO: 1957541 - RNA, 19 nt, Artificial Sequence
  Description of Artificial Sequence: Synthetic oligonucleotide
  Antisense strand to SEQ ID NO: 1957540
ugauuucgggcagucaggu

SEQ ID NO: 1957542 - RNA, 19 nt, Artificial Sequence
  Description of Artificial Sequence: Synthetic oligonucleotide
  Sense strand starting at position 1396 of SEQ ID NO: 1880308
cucuucuuccuggaauagu

SEQ ID NO: 1957543 - RNA, 19 nt, Artificial Sequence
  Description of Artificial Sequence: Synthetic oligonucleotide
  Antisense strand to SEQ ID NO: 1957542
acuauuccaggaagaagag

SEQ ID NO: 1957544 - RNA, 19 nt, Artificial Sequence
  Description of Artificial Sequence: Synthetic oligonucleotide
  Sense strand starting at position 1785 of SEQ ID NO: 1880308
ggagaacugugguuuaaau

SEQ ID NO: 1957545 - RNA, 19 nt, Artificial Sequence
  Description of Artificial Sequence: Synthetic oligonucleotide
  Antisense strand to SEQ ID NO: 1957544
auuuaaaccacaguucucc

SEQ ID NO: 1957546 - RNA, 19 nt, Artificial Sequence
  Description of Artificial Sequence: Synthetic oligonucleotide
  Sense strand starting at position 1821 of SEQ ID NO: 1880308
cuccucuuccuauggagaa

SEQ ID NO: 1957547 - RNA, 19 nt, Artificial Sequence
  Description of Artificial Sequence: Synthetic oligonucleotide
  Antisense strand to SEQ ID NO: 1957546
uucuccauaggaagaggag

SEQ ID NO: 1957548 - RNA, 19 nt, Artificial Sequence
  Description of Artificial Sequence: Synthetic oligonucleotide
  Sense strand starting at position 1877 of SEQ ID NO: 1880308
cgcugauucccucaagaac

SEQ ID NO: 1957549 - RNA, 19 nt, Artificial Sequence
  Description of Artificial Sequence: Synthetic oligonucleotide
  Antisense strand to SEQ ID NO: 1957548
guucuugagggaaucagcg

SEQ ID NO: 1957550 - RNA, 19 nt, Artificial Sequence
  Description of Artificial Sequence: Synthetic oligonucleotide
  Sense strand starting at position 2206 of SEQ ID NO: 1880308
cauguuuccguguuuguca

SEQ ID NO: 1957551 - RNA, 19 nt, Artificial Sequence
  Description of Artificial Sequence: Synthetic oligonucleotide
  Antisense strand to SEQ ID NO: 1957550
ugacaaacacggaaacaug

SEQ ID NO: 1957552 - RNA, 19 nt, Artificial Sequence
  Description of Artificial Sequence: Synthetic oligonucleotide
  Sense strand starting at position 2253 of SEQ ID NO: 1880308
gugcuuuagacgucuuugu

SEQ ID NO: 1957553 - RNA, 19 nt, Artificial Sequence
  Description of Artificial Sequence: Synthetic oligonucleotide
  Antisense strand to SEQ ID NO: 1957552
acaaagacgucuaaagcac

SEQ ID NO: 1957554 - RNA, 19 nt, Artificial Sequence
  Description of Artificial Sequence: Synthetic oligonucleotide
  Sense strand starting at position 2445 of SEQ ID NO: 1880308
guguauuauagugcugcca

SEQ ID NO: 1957555 - RNA, 19 nt, Artificial Sequence
  Description of Artificial Sequence: Synthetic oligonucleotide
  Antisense strand to SEQ ID NO: 1957554
uggcagcacuauaauacac

SEQ ID NO: 1957556 - RNA, 19 nt, Artificial Sequence
  Description of Artificial Sequence: Synthetic oligonucleotide
  Sense strand starting at position 2613 of SEQ ID NO: 1880308
accuccucaugguugaaau

SEQ ID NO: 1957557 - RNA, 19 nt, Artificial Sequence
  Description of Artificial Sequence: Synthetic oligonucleotide
  Antisense strand to SEQ ID NO: 1957556
auuucaaccaugaggaggu

SEQ ID NO: 1957558 - RNA, 19 nt, Artificial Sequence
  Description of Artificial Sequence: Synthetic oligonucleotide
  Sense strand starting at position 2645 of SEQ ID NO: 1880308
gcgugaaaccuugcacugu

SEQ ID NO: 1957559 - RNA, 19 nt, Artificial Sequence
  Description of Artificial Sequence: Synthetic oligonucleotide
  Antisense strand to SEQ ID NO: 1957558
acagugcaagguuucacgc

SEQ ID NO: 1957560 - RNA, 19 nt, Artificial Sequence
  Description of Artificial Sequence: Synthetic oligonucleotide
  Sense strand starting at position 2957 of SEQ ID NO: 1880308
uuucucuuuggugauagaa

SEQ ID NO: 1957561 - RNA, 19 nt, Artificial Sequence
  Description of Artificial Sequence: Synthetic oligonucleotide
  Antisense strand to SEQ ID NO: 1957560
uucuaucaccaaagagaaa

SEQ ID NO: 1957562 - RNA, 19 nt, Artificial Sequence
  Description of Artificial Sequence: Synthetic oligonucleotide
  Sense strand starting at position 2981 of SEQ ID NO: 1880308
caauguuuauuugagagaa

SEQ ID NO: 1957563 - RNA, 19 nt, Artificial Sequence
  Description of Artificial Sequence: Synthetic oligonucleotide
  Antisense strand to SEQ ID NO: 1957562
uucucucaaauaaacauug

SEQ ID NO: 1957564 - RNA, 19 nt, Artificial Sequence
  Description of Artificial Sequence: Synthetic oligonucleotide
  Sense strand starting at position 3139 of SEQ ID NO: 1880308
caauuauuguucucaggga

SEQ ID NO: 1957565 - RNA, 19 nt, Artificial Sequence
  Description of Artificial Sequence: Synthetic oligonucleotide
  Antisense strand to SEQ ID NO: 1957564
ucccugagaacaauaauug

SEQ ID NO: 1957566 - RNA, 19 nt, Artificial Sequence
  Description of Artificial Sequence: Synthetic oligonucleotide
  Sense strand starting at position 3143 of SEQ ID NO: 1880308
uauuguucucagggaacag

SEQ ID NO: 1957567 - RNA, 19 nt, Artificial Sequence
  Description of Artificial Sequence: Synthetic oligonucleotide
  Antisense strand to SEQ ID NO: 1957566
cuguucccugagaacaaua

SEQ ID NO: 1957568 - RNA, 19 nt, Artificial Sequence
  Description of Artificial Sequence: Synthetic oligonucleotide
  Sense strand starting at position 3200 of SEQ ID NO: 1880308
guaauauaaugccugauaa

SEQ ID NO: 1957569 - RNA, 19 nt, Artificial Sequence
  Description of Artificial Sequence: Synthetic oligonucleotide
  Antisense strand to SEQ ID NO: 1957568
uuaucaggcauuauauuac

SEQ ID NO: 1957570 - RNA, 19 nt, Artificial Sequence
  Description of Artificial Sequence: Synthetic oligonucleotide
  Sense strand starting at position 3210 of SEQ ID NO: 1880308
gccugauaauggguagaua

SEQ ID NO: 1957571 - RNA, 19 nt, Artificial Sequence
  Description of Artificial Sequence: Synthetic oligonucleotide
  Antisense strand to SEQ ID NO: 1957570
uaucuacccauuaucaggc

SEQ ID NO: 1957572 - RNA, 19 nt, Artificial Sequence
  Description of Artificial Sequence: Synthetic oligonucleotide
  Sense strand starting at position 3222 of SEQ ID NO: 1880308
guagauaggugucuagaau

SEQ ID NO: 1957573 - RNA, 19 nt, Artificial Sequence
  Description of Artificial Sequence: Synthetic oligonucleotide
  Antisense strand to SEQ ID NO: 1957572
auucuagacaccuaucuac

SEQ ID NO: 1957574 - RNA, 19 nt, Artificial Sequence
  Description of Artificial Sequence: Synthetic oligonucleotide
  Sense strand starting at position 3365 of SEQ ID NO: 1880308
guauauuuguacuuagcau

SEQ ID NO: 1957575 - RNA, 19 nt, Artificial Sequence
  Description of Artificial Sequence: Synthetic oligonucleotide
  Antisense strand to SEQ ID NO: 1957574
augcuaaguacaaauauac

SEQ ID NO: 1957576 - RNA, 19 nt, Artificial Sequence
  Description of Artificial Sequence: Synthetic oligonucleotide
  Sense strand starting at position 3379 of SEQ ID NO: 1880308
agcauaugacuuugauaag

SEQ ID NO: 1957577 - RNA, 19 nt, Artificial Sequence
  Description of Artificial Sequence: Synthetic oligonucleotide
  Antisense strand to SEQ ID NO: 1957576
cuuaucaaagucauaugcu

SEQ ID NO: 1957578 - RNA, 19 nt, Artificial Sequence
  Description of Artificial Sequence: Synthetic oligonucleotide
  Sense strand starting at position 3414 of SEQ ID NO: 1880308
gugacauagacaugaaggu

SEQ ID NO: 1957579 - RNA, 19 nt, Artificial Sequence
  Description of Artificial Sequence: Synthetic oligonucleotide
  Antisense strand to SEQ ID NO: 1957578
accuucaugucuaugucac

SEQ ID NO: 1957580 - RNA, 19 nt, Artificial Sequence
  Description of Artificial Sequence: Synthetic oligonucleotide
  Sense strand starting at position 3433 of SEQ ID NO: 1880308
ggaaauguuggcgaauaga

SEQ ID NO: 1957581 - RNA, 19 nt, Artificial Sequence
  Description of Artificial Sequence: Synthetic oligonucleotide
  Antisense strand to SEQ ID NO: 1957580
ucuauucgccaacauuucc

SEQ ID NO: 1957582 - RNA, 19 nt, Artificial Sequence
  Description of Artificial Sequence: Synthetic oligonucleotide
  Sense strand starting at position 3668 of SEQ ID NO: 1880308
uuagucuuacuuugaaaug

SEQ ID NO: 1957583 - RNA, 19 nt, Artificial Sequence
  Description of Artificial Sequence: Synthetic oligonucleotide
  Antisense strand to SEQ ID NO: 1957582
cauuucaaaguaagacuaa

SEQ ID NO: 1957584 - RNA, 19 nt, Artificial Sequence
  Description of Artificial Sequence: Synthetic oligonucleotide
  Sense strand starting at position 3787 of SEQ ID NO: 1880308
gguguuaaucucgaagaua

SEQ ID NO: 1957585 - RNA, 19 nt, Artificial Sequence
  Description of Artificial Sequence: Synthetic oligonucleotide
  Antisense strand to SEQ ID NO: 1957584
uaucuucgagauuaacacc

SEQ ID NO: 1957586 - RNA, 19 nt, Artificial Sequence
  Description of Artificial Sequence: Synthetic oligonucleotide
  Sense strand starting at position 3790 of SEQ ID NO: 1880308
guuaaucucgaagauacuu

SEQ ID NO: 1957587 - RNA, 19 nt, Artificial Sequence
  Description of Artificial Sequence: Synthetic oligonucleotide
  Antisense strand to SEQ ID NO: 1957586
aaguaucuucgagauuaac

SEQ ID NO: 1957588 - RNA, 19 nt, Artificial Sequence
  Description of Artificial Sequence: Synthetic oligonucleotide
  Sense strand starting at position 3808 of SEQ ID NO: 1880308
ucugguugucaucacuaua

SEQ ID NO: 1957589 - RNA, 19 nt, Artificial Sequence
  Description of Artificial Sequence: Synthetic oligonucleotide
  Antisense strand to SEQ ID NO: 1957588
uauagugaugacaaccaga

SEQ ID NO: 1957590 - RNA, 19 nt, Artificial Sequence
  Description of Artificial Sequence: Synthetic oligonucleotide
  Sense strand starting at position 3811 of SEQ ID NO: 1880308
gguugucaucacuauauag

SEQ ID NO: 1957591 - RNA, 19 nt, Artificial Sequence
  Description of Artificial Sequence: Synthetic oligonucleotide
  Antisense strand to SEQ ID NO: 1957590
cuauauagugaugacaacc

SEQ ID NO: 1957592 - RNA, 19 nt, Artificial Sequence
  Description of Artificial Sequence: Synthetic oligonucleotide
  Sense strand starting at position 3958 of SEQ ID NO: 1880308
ugugguauaauguaugaaa

SEQ ID NO: 1957593 - RNA, 19 nt, Artificial Sequence
  Description of Artificial Sequence: Synthetic oligonucleotide
  Antisense strand to SEQ ID NO: 1957592
uuucauacauuauaccaca

SEQ ID NO: 1957594 - RNA, 19 nt, Artificial Sequence
  Description of Artificial Sequence: Synthetic oligonucleotide
  Sense strand starting at position 674 of SEQ ID NO: 1880309
gucugaaggcauuaaguua

SEQ ID NO: 1957595 - RNA, 19 nt, Artificial Sequence
  Description of Artificial Sequence: Synthetic oligonucleotide
  Antisense strand to SEQ ID NO: 1957594
uaacuuaaugccuucagac

SEQ ID NO: 1957596 - RNA, 19 nt, Artificial Sequence
  Description of Artificial Sequence: Synthetic oligonucleotide
  Sense strand starting at position 738 of SEQ ID NO: 1880309
cuguguugcccugauuauc

SEQ ID NO: 1957597 - RNA, 19 nt, Artificial Sequence
  Description of Artificial Sequence: Synthetic oligonucleotide
  Antisense strand to SEQ ID NO: 1957596
gauaaucagggcaacacag

SEQ ID NO: 1957598 - RNA, 19 nt, Artificial Sequence
  Description of Artificial Sequence: Synthetic oligonucleotide
  Sense strand starting at position 765 of SEQ ID NO: 1880309
augcuacaugcuggaaaga

SEQ ID NO: 1957599 - RNA, 19 nt, Artificial Sequence
  Description of Artificial Sequence: Synthetic oligonucleotide
  Antisense strand to SEQ ID NO: 1957598
ucuuuccagcauguagcau

SEQ ID NO: 1957600 - RNA, 19 nt, Artificial Sequence
  Description of Artificial Sequence: Synthetic oligonucleotide
  Sense strand starting at position 793 of SEQ ID NO: 1880309
gcagguuucuaagucuuua

SEQ ID NO: 1957601 - RNA, 19 nt, Artificial Sequence
  Description of Artificial Sequence: Synthetic oligonucleotide
  Antisense strand to SEQ ID NO: 1957600
uaaagacuuagaaaccugc

SEQ ID NO: 1957602 - RNA, 19 nt, Artificial Sequence
  Description of Artificial Sequence: Synthetic oligonucleotide
  Sense strand starting at position 797 of SEQ ID NO: 1880309
guuucuaagucuuuaaccu

SEQ ID NO: 1957603 - RNA, 19 nt, Artificial Sequence
  Description of Artificial Sequence: Synthetic oligonucleotide
  Antisense strand to SEQ ID NO: 1957602
agguuaaagacuuagaaac

SEQ ID NO: 1957604 - RNA, 19 nt, Artificial Sequence
  Description of Artificial Sequence: Synthetic oligonucleotide
  Sense strand starting at position 844 of SEQ ID NO: 1880309
gagacacuccuacguauag

SEQ ID NO: 1957605 - RNA, 19 nt, Artificial Sequence
  Description of Artificial Sequence: Synthetic oligonucleotide
  Antisense strand to SEQ ID NO: 1957604
cuauacguaggagugucuc

SEQ ID NO: 1957606 - RNA, 19 nt, Artificial Sequence
  Description of Artificial Sequence: Synthetic oligonucleotide
  Sense strand starting at position 1322 of SEQ ID NO: 1880309
aacucuuguguuugguaca

SEQ ID NO: 1957607 - RNA, 19 nt, Artificial Sequence
  Description of Artificial Sequence: Synthetic oligonucleotide
  Antisense strand to SEQ ID NO: 1957606
uguaccaaacacaagaguu

SEQ ID NO: 1957608 - RNA, 19 nt, Artificial Sequence
  Description of Artificial Sequence: Synthetic oligonucleotide
  Sense strand starting at position 1327 of SEQ ID NO: 1880309
uuguguuugguacacagga

SEQ ID NO: 1957609 - RNA, 19 nt, Artificial Sequence
  Description of Artificial Sequence: Synthetic oligonucleotide
  Antisense strand to SEQ ID NO: 1957608
uccuguguaccaaacacaa

SEQ ID NO: 1957610 - RNA, 19 nt, Artificial Sequence
  Description of Artificial Sequence: Synthetic oligonucleotide
  Sense strand starting at position 1352 of SEQ ID NO: 1880309
gcagguguccgguaacuac

SEQ ID NO: 1957611 - RNA, 19 nt, Artificial Sequence
  Description of Artificial Sequence: Synthetic oligonucleotide
  Antisense strand to SEQ ID NO: 1957610
guaguuaccggacaccugc

SEQ ID NO: 1957612 - RNA, 19 nt, Artificial Sequence
  Description of Artificial Sequence: Synthetic oligonucleotide
  Sense strand starting at position 1365 of SEQ ID NO: 1880309
aacuacuugcgagggaaga

SEQ ID NO: 1957613 - RNA, 19 nt, Artificial Sequence
  Description of Artificial Sequence: Synthetic oligonucleotide
  Antisense strand to SEQ ID NO: 1957612
ucuucccucgcaaguaguu

SEQ ID NO: 1957614 - RNA, 19 nt, Artificial Sequence
  Description of Artificial Sequence: Synthetic oligonucleotide
  Sense strand starting at position 1366 of SEQ ID NO: 1880309
acuacuugcgagggaagau

SEQ ID NO: 1957615 - RNA, 19 nt, Artificial Sequence
  Description of Artificial Sequence: Synthetic oligonucleotide
  Antisense strand to SEQ ID NO: 1957614
aucuucccucgcaaguagu

SEQ ID NO: 1957616 - RNA, 19 nt, Artificial Sequence
  Description of Artificial Sequence: Synthetic oligonucleotide
  Sense strand starting at position 1375 of SEQ ID NO: 1880309
gagggaagauacgaauuaa

SEQ ID NO: 1957617 - RNA, 19 nt, Artificial Sequence
  Description of Artificial Sequence: Synthetic oligonucleotide
  Antisense strand to SEQ ID NO: 1957616
uuaauucguaucuucccuc

SEQ ID NO: 1957618 - RNA, 19 nt, Artificial Sequence
  Description of Artificial Sequence: Synthetic oligonucleotide
  Sense strand starting at position 1398 of SEQ ID NO: 1880309
ggaauaaaguguuccaauc

SEQ ID NO: 1957619 - RNA, 19 nt, Artificial Sequence
  Description of Artificial Sequence: Synthetic oligonucleotide
  Antisense strand to SEQ ID NO: 1957618
gauuggaacacuuuauucc

SEQ ID NO: 1957620 - RNA, 19 nt, Artificial Sequence
  Description of Artificial Sequence: Synthetic oligonucleotide
  Sense strand starting at position 1480 of SEQ ID NO: 1880309
aggucuucagcgugaauaa

SEQ ID NO: 1957621 - RNA, 19 nt, Artificial Sequence
  Description of Artificial Sequence: Synthetic oligonucleotide
  Antisense strand to SEQ ID NO: 1957620
uuauucacgcugaagaccu

SEQ ID NO: 1957622 - RNA, 19 nt, Artificial Sequence
  Description of Artificial Sequence: Synthetic oligonucleotide
  Sense strand starting at position 1481 of SEQ ID NO: 1880309
ggucuucagcgugaauaaa

SEQ ID NO: 1957623 - RNA, 19 nt, Artificial Sequence
  Description of Artificial Sequence: Synthetic oligonucleotide
  Antisense strand to SEQ ID NO: 1957622
uuuauucacgcugaagacc

SEQ ID NO: 1957624 - RNA, 19 nt, Artificial Sequence
  Description of Artificial Sequence: Synthetic oligonucleotide
  Sense strand starting at position 1742 of SEQ ID NO: 1880309
gcgagcugucggaacagua

SEQ ID NO: 1957625 - RNA, 19 nt, Artificial Sequence
  Description of Artificial Sequence: Synthetic oligonucleotide
  Antisense strand to SEQ ID NO: 1957624
uacuguuccgacagcucgc

SEQ ID NO: 1957626 - RNA, 19 nt, Artificial Sequence
  Description of Artificial Sequence: Synthetic oligonucleotide
  Sense strand starting at position 2079 of SEQ ID NO: 1880309
gccggugguccagaucaga

SEQ ID NO: 1957627 - RNA, 19 nt, Artificial Sequence
  Description of Artificial Sequence: Synthetic oligonucleotide
  Antisense strand to SEQ ID NO: 1957626
ucugaucuggaccaccggc

SEQ ID NO: 1957628 - RNA, 19 nt, Artificial Sequence
  Description of Artificial Sequence: Synthetic oligonucleotide
  Sense strand starting at position 2300 of SEQ ID NO: 1880309
caggaaaguugauucucau

SEQ ID NO: 1957629 - RNA, 19 nt, Artificial Sequence
  Description of Artificial Sequence: Synthetic oligonucleotide
  Antisense strand to SEQ ID NO: 1957628
augagaaucaacuuuccug

SEQ ID NO: 1957630 - RNA, 19 nt, Artificial Sequence
  Description of Artificial Sequence: Synthetic oligonucleotide
  Sense strand starting at position 2367 of SEQ ID NO: 1880309
uguugccaacuuuaagaaa

SEQ ID NO: 1957631 - RNA, 19 nt, Artificial Sequence
  Description of Artificial Sequence: Synthetic oligonucleotide
  Antisense strand to SEQ ID NO: 1957630
uuucuuaaaguuggcaaca

SEQ ID NO: 1957632 - RNA, 19 nt, Artificial Sequence
  Description of Artificial Sequence: Synthetic oligonucleotide
  Sense strand starting at position 2410 of SEQ ID NO: 1880309
gaguuuauuugggcucagu

SEQ ID NO: 1957633 - RNA, 19 nt, Artificial Sequence
  Description of Artificial Sequence: Synthetic oligonucleotide
  Antisense strand to SEQ ID NO: 1957632
acugagcccaaauaaacuc

SEQ ID NO: 1957634 - RNA, 19 nt, Artificial Sequence
  Description of Artificial Sequence: Synthetic oligonucleotide
  Sense strand starting at position 2419 of SEQ ID NO: 1880309
ugggcucagugcuugagaa

SEQ ID NO: 1957635 - RNA, 19 nt, Artificial Sequence
  Description of Artificial Sequence: Synthetic oligonucleotide
  Antisense strand to SEQ ID NO: 1957634
uucucaagcacugagccca

SEQ ID NO: 1957636 - RNA, 19 nt, Artificial Sequence
  Description of Artificial Sequence: Synthetic oligonucleotide
  Sense strand starting at position 2420 of SEQ ID NO: 1880309
gggcucagugcuugagaau

SEQ ID NO: 1957637 - RNA, 19 nt, Artificial Sequence
  Description of Artificial Sequence: Synthetic oligonucleotide
  Antisense strand to SEQ ID NO: 1957636
auucucaagcacugagccc

SEQ ID NO: 1957638 - RNA, 19 nt, Artificial Sequence
  Description of Artificial Sequence: Synthetic oligonucleotide
  Sense strand starting at position 2421 of SEQ ID NO: 1880309
ggcucagugcuugagaaug

SEQ ID NO: 1957639 - RNA, 19 nt, Artificial Sequence
  Description of Artificial Sequence: Synthetic oligonucleotide
  Antisense strand to SEQ ID NO: 1957638
cauucucaagcacugagcc

SEQ ID NO: 1957640 - RNA, 19 nt, Artificial Sequence
  Description of Artificial Sequence: Synthetic oligonucleotide
  Sense strand starting at position 2489 of SEQ ID NO: 1880309
gcagcagucggaguagguu

SEQ ID NO: 1957641 - RNA, 19 nt, Artificial Sequence
  Description of Artificial Sequence: Synthetic oligonucleotide
  Antisense strand to SEQ ID NO: 1957640
aaccuacuccgacugcugc

SEQ ID NO: 1957642 - RNA, 19 nt, Artificial Sequence
  Description of Artificial Sequence: Synthetic oligonucleotide
  Sense strand starting at position 2830 of SEQ ID NO: 1880309
ggcagagcuuaacuuguuu

SEQ ID NO: 1957643 - RNA, 19 nt, Artificial Sequence
  Description of Artificial Sequence: Synthetic oligonucleotide
  Antisense strand to SEQ ID NO: 1957642
aaacaaguuaagcucugcc

SEQ ID NO: 1957644 - RNA, 19 nt, Artificial Sequence
  Description of Artificial Sequence: Synthetic oligonucleotide
  Sense strand starting at position 2892 of SEQ ID NO: 1880309
ugcuuucuuccuuguauca

SEQ ID NO: 1957645 - RNA, 19 nt, Artificial Sequence
  Description of Artificial Sequence: Synthetic oligonucleotide
  Antisense strand to SEQ ID NO: 1957644
ugauacaaggaagaaagca

SEQ ID NO: 1957646 - RNA, 19 nt, Artificial Sequence
  Description of Artificial Sequence: Synthetic oligonucleotide
  Sense strand starting at position 2936 of SEQ ID NO: 1880309
gggugaggcagcuaauaaa

SEQ ID NO: 1957647 - RNA, 19 nt, Artificial Sequence
  Description of Artificial Sequence: Synthetic oligonucleotide
  Antisense strand to SEQ ID NO: 1957646
uuuauuagcugccucaccc

SEQ ID NO: 1957648 - RNA, 19 nt, Artificial Sequence
  Description of Artificial Sequence: Synthetic oligonucleotide
  Sense strand starting at position 3015 of SEQ ID NO: 1880309
cacuucuguccgggucuaa

SEQ ID NO: 1957649 - RNA, 19 nt, Artificial Sequence
  Description of Artificial Sequence: Synthetic oligonucleotide
  Antisense strand to SEQ ID NO: 1957648
uuagacccggacagaagug

SEQ ID NO: 1957650 - RNA, 19 nt, Artificial Sequence
  Description of Artificial Sequence: Synthetic oligonucleotide
  Sense strand starting at position 3019 of SEQ ID NO: 1880309
ucuguccgggucuaauaaa

SEQ ID NO: 1957651 - RNA, 19 nt, Artificial Sequence
  Description of Artificial Sequence: Synthetic oligonucleotide
  Antisense strand to SEQ ID NO: 1957650
uuuauuagacccggacaga

SEQ ID NO: 1957652 - RNA, 19 nt, Artificial Sequence
  Description of Artificial Sequence: Synthetic oligonucleotide
  Sense strand starting at position 3059 of SEQ ID NO: 1880309
cagacagcucugggcuauu

SEQ ID NO: 1957653 - RNA, 19 nt, Artificial Sequence
  Description of Artificial Sequence: Synthetic oligonucleotide
  Antisense strand to SEQ ID NO: 1957652
aauagcccagagcugucug

SEQ ID NO: 1957654 - RNA, 19 nt, Artificial Sequence
  Description of Artificial Sequence: Synthetic oligonucleotide
  Sense strand starting at position 3116 of SEQ ID NO: 1880309
uguuguacacaauaaucua

SEQ ID NO: 1957655 - RNA, 19 nt, Artificial Sequence
  Description of Artificial Sequence: Synthetic oligonucleotide
  Antisense strand to SEQ ID NO: 1957654
uagauuauuguguacaaca

SEQ ID NO: 1957656 - RNA, 19 nt, Artificial Sequence
  Description of Artificial Sequence: Synthetic oligonucleotide
  Sense strand starting at position 3188 of SEQ ID NO: 1880309
ugaacugccuuauugugau

SEQ ID NO: 1957657 - RNA, 19 nt, Artificial Sequence
  Description of Artificial Sequence: Synthetic oligonucleotide
  Antisense strand to SEQ ID NO: 1957656
aucacaauaaggcaguuca

SEQ ID NO: 1957658 - RNA, 19 nt, Artificial Sequence
  Description of Artificial Sequence: Synthetic oligonucleotide
  Sense strand starting at position 3252 of SEQ ID NO: 1880309
aaaguaugcuuggauuuaa

SEQ ID NO: 1957659 - RNA, 19 nt, Artificial Sequence
  Description of Artificial Sequence: Synthetic oligonucleotide
  Antisense strand to SEQ ID NO: 1957658
uuaaauccaagcauacuuu

SEQ ID NO: 1957660 - RNA, 19 nt, Artificial Sequence
  Description of Artificial Sequence: Synthetic oligonucleotide
  Sense strand starting at position 3338 of SEQ ID NO: 1880309
cucaguucugguuagaguu

SEQ ID NO: 1957661 - RNA, 19 nt, Artificial Sequence
  Description of Artificial Sequence: Synthetic oligonucleotide
  Antisense strand to SEQ ID NO: 1957660
aacucuaaccagaacugag

SEQ ID NO: 1957662 - RNA, 19 nt, Artificial Sequence
  Description of Artificial Sequence: Synthetic oligonucleotide
  Sense strand starting at position 3537 of SEQ ID NO: 1880309
acaucaggauuauagugaa

SEQ ID NO: 1957663 - RNA, 19 nt, Artificial Sequence
  Description of Artificial Sequence: Synthetic oligonucleotide
  Antisense strand to SEQ ID NO: 1957662
uucacuauaauccugaugu

SEQ ID NO: 1957664 - RNA, 19 nt, Artificial Sequence
  Description of Artificial Sequence: Synthetic oligonucleotide
  Sense strand starting at position 3601 of SEQ ID NO: 1880309
ucaguuagugcuuaagucu

SEQ ID NO: 1957665 - RNA, 19 nt, Artificial Sequence
  Description of Artificial Sequence: Synthetic oligonucleotide
  Antisense strand to SEQ ID NO: 1957664
agacuuaagcacuaacuga

SEQ ID NO: 1957666 - RNA, 19 nt, Artificial Sequence
  Description of Artificial Sequence: Synthetic oligonucleotide
  Sense strand starting at position 3604 of SEQ ID NO: 1880309
guuagugcuuaagucuuga

SEQ ID NO: 1957667 - RNA, 19 nt, Artificial Sequence
  Description of Artificial Sequence: Synthetic oligonucleotide
  Antisense strand to SEQ ID NO: 1957666
ucaagacuuaagcacuaac

SEQ ID NO: 1957668 - RNA, 19 nt, Artificial Sequence
  Description of Artificial Sequence: Synthetic oligonucleotide
  Sense strand starting at position 3625 of SEQ ID NO: 1880309
ucccuaauuguuuauaggu

SEQ ID NO: 1957669 - RNA, 19 nt, Artificial Sequence
  Description of Artificial Sequence: Synthetic oligonucleotide
  Antisense strand to SEQ ID NO: 1957668
accuauaaacaauuaggga

SEQ ID NO: 1957670 - RNA, 19 nt, Artificial Sequence
  Description of Artificial Sequence: Synthetic oligonucleotide
  Sense strand starting at position 3705 of SEQ ID NO: 1880309
gguuauauauuggcuuaac

SEQ ID NO: 1957671 - RNA, 19 nt, Artificial Sequence
  Description of Artificial Sequence: Synthetic oligonucleotide
  Antisense strand to SEQ ID NO: 1957670
guuaagccaauauauaacc

SEQ ID NO: 1957672 - RNA, 19 nt, Artificial Sequence
  Description of Artificial Sequence: Synthetic oligonucleotide
  Sense strand starting at position 3800 of SEQ ID NO: 1880309
ggaagcagcuuuccauauu

SEQ ID NO: 1957673 - RNA, 19 nt, Artificial Sequence
  Description of Artificial Sequence: Synthetic oligonucleotide
  Antisense strand to SEQ ID NO: 1957672
aauauggaaagcugcuucc

SEQ ID NO: 1957674 - RNA, 19 nt, Artificial Sequence
  Description of Artificial Sequence: Synthetic oligonucleotide
  Sense strand starting at position 303 of SEQ ID NO: 1880310
aagagauuacguggccaua

SEQ ID NO: 1957675 - RNA, 19 nt, Artificial Sequence
  Description of Artificial Sequence: Synthetic oligonucleotide
  Antisense strand to SEQ ID NO: 1957674
uauggccacguaaucucuu

SEQ ID NO: 1957676 - RNA, 19 nt, Artificial Sequence
  Description of Artificial Sequence: Synthetic oligonucleotide
  Sense strand starting at position 305 of SEQ ID NO: 1880310
gagauuacguggccauaug

SEQ ID NO: 1957677 - RNA, 19 nt, Artificial Sequence
  Description of Artificial Sequence: Synthetic oligonucleotide
  Antisense strand to SEQ ID NO: 1957676
cauauggccacguaaucuc

SEQ ID NO: 1957678 - RNA, 19 nt, Artificial Sequence
  Description of Artificial Sequence: Synthetic oligonucleotide
  Sense strand starting at position 676 of SEQ ID NO: 1880310
cuguuagcucuccagaucu

SEQ ID NO: 1957679 - RNA, 19 nt, Artificial Sequence
  Description of Artificial Sequence: Synthetic oligonucleotide
  Antisense strand to SEQ ID NO: 1957678
agaucuggagagcuaacag

SEQ ID NO: 1957680 - RNA, 19 nt, Artificial Sequence
  Description of Artificial Sequence: Synthetic oligonucleotide
  Sense strand starting at position 678 of SEQ ID NO: 1880310
guuagcucuccagaucuga

SEQ ID NO: 1957681 - RNA, 19 nt, Artificial Sequence
  Description of Artificial Sequence: Synthetic oligonucleotide
  Antisense strand to SEQ ID NO: 1957680
ucagaucuggagagcuaac

SEQ ID NO: 1957682 - RNA, 19 nt, Artificial Sequence
  Description of Artificial Sequence: Synthetic oligonucleotide
  Sense strand starting at position 691 of SEQ ID NO: 1880310
aucugaucagccugggaga

SEQ ID NO: 1957683 - RNA, 19 nt, Artificial Sequence
  Description of Artificial Sequence: Synthetic oligonucleotide
  Antisense strand to SEQ ID NO: 1957682
ucucccaggcugaucagau

SEQ ID NO: 1957684 - RNA, 19 nt, Artificial Sequence
  Description of Artificial Sequence: Synthetic oligonucleotide
  Sense strand starting at position 774 of SEQ ID NO: 1880310
cccauaugugcccagaaca

SEQ ID NO: 1957685 - RNA, 19 nt, Artificial Sequence
  Description of Artificial Sequence: Synthetic oligonucleotide
  Antisense strand to SEQ ID NO: 1957684
uguucugggcacauauggg

SEQ ID NO: 1957686 - RNA, 19 nt, Artificial Sequence
  Description of Artificial Sequence: Synthetic oligonucleotide
  Sense strand starting at position 790 of SEQ ID NO: 1880310
acaggaaagauacguguuu

SEQ ID NO: 1957687 - RNA, 19 nt, Artificial Sequence
  Description of Artificial Sequence: Synthetic oligonucleotide
  Antisense strand to SEQ ID NO: 1957686
aaacacguaucuuuccugu

SEQ ID NO: 1957688 - RNA, 19 nt, Artificial Sequence
  Description of Artificial Sequence: Synthetic oligonucleotide
  Sense strand starting at position 792 of SEQ ID NO: 1880310
aggaaagauacguguuucu

SEQ ID NO: 1957689 - RNA, 19 nt, Artificial Sequence
  Description of Artificial Sequence: Synthetic oligonucleotide
  Antisense strand to SEQ ID NO: 1957688
agaaacacguaucuuuccu

SEQ ID NO: 1957690 - RNA, 19 nt, Artificial Sequence
  Description of Artificial Sequence: Synthetic oligonucleotide
  Sense strand starting at position 795 of SEQ ID NO: 1880310
aaagauacguguuucuuac

SEQ ID NO: 1957691 - RNA, 19 nt, Artificial Sequence
  Description of Artificial Sequence: Synthetic oligonucleotide
  Antisense strand to SEQ ID NO: 1957690
guaagaaacacguaucuuu

SEQ ID NO: 1957692 - RNA, 19 nt, Artificial Sequence
  Description of Artificial Sequence: Synthetic oligonucleotide
  Sense strand starting at position 818 of SEQ ID NO: 1880310
ccgggacuccuaggugaag

SEQ ID NO: 1957693 - RNA, 19 nt, Artificial Sequence
  Description of Artificial Sequence: Synthetic oligonucleotide
  Antisense strand to SEQ ID NO: 1957692
cuucaccuaggagucccgg

SEQ ID NO: 1957694 - RNA, 19 nt, Artificial Sequence
  Description of Artificial Sequence: Synthetic oligonucleotide
  Sense strand starting at position 966 of SEQ ID NO: 1880310
ugaaacaucugggcaguga

SEQ ID NO: 1957695 - RNA, 19 nt, Artificial Sequence
  Description of Artificial Sequence: Synthetic oligonucleotide
  Antisense strand to SEQ ID NO: 1957694
ucacugcccagauguuuca

SEQ ID NO: 1957696 - RNA, 19 nt, Artificial Sequence
  Description of Artificial Sequence: Synthetic oligonucleotide
  Sense strand starting at position 1241 of SEQ ID NO: 1880310
augugaccauccuugauag

SEQ ID NO: 1957697 - RNA, 19 nt, Artificial Sequence
  Description of Artificial Sequence: Synthetic oligonucleotide
  Antisense strand to SEQ ID NO: 1957696
cuaucaaggauggucacau

SEQ ID NO: 1957698 - RNA, 19 nt, Artificial Sequence
  Description of Artificial Sequence: Synthetic oligonucleotide
  Sense strand starting at position 1242 of SEQ ID NO: 1880310
ugugaccauccuugauagu

SEQ ID NO: 1957699 - RNA, 19 nt, Artificial Sequence
  Description of Artificial Sequence: Synthetic oligonucleotide
  Antisense strand to SEQ ID NO: 1957698
acuaucaaggauggucaca

SEQ ID NO: 1957700 - RNA, 19 nt, Artificial Sequence
  Description of Artificial Sequence: Synthetic oligonucleotide
  Sense strand starting at position 1302 of SEQ ID NO: 1880310
agcucuauuagguggcaaa

SEQ ID NO: 1957701 - RNA, 19 nt, Artificial Sequence
  Description of Artificial Sequence: Synthetic oligonucleotide
  Antisense strand to SEQ ID NO: 1957700
uuugccaccuaauagagcu

SEQ ID NO: 1957702 - RNA, 19 nt, Artificial Sequence
  Description of Artificial Sequence: Synthetic oligonucleotide
  Sense strand starting at position 1319 of SEQ ID NO: 1880310
aacugcugucacuagaaga

SEQ ID NO: 1957703 - RNA, 19 nt, Artificial Sequence
  Description of Artificial Sequence: Synthetic oligonucleotide
  Antisense strand to SEQ ID NO: 1957702
ucuucuagugacagcaguu

SEQ ID NO: 1957704 - RNA, 19 nt, Artificial Sequence
  Description of Artificial Sequence: Synthetic oligonucleotide
  Sense strand starting at position 1406 of SEQ ID NO: 1880310
aagggugaauccucgagca

SEQ ID NO: 1957705 - RNA, 19 nt, Artificial Sequence
  Description of Artificial Sequence: Synthetic oligonucleotide
  Antisense strand to SEQ ID NO: 1957704
ugcucgaggauucacccuu

SEQ ID NO: 1957706 - RNA, 19 nt, Artificial Sequence
  Description of Artificial Sequence: Synthetic oligonucleotide
  Sense strand starting at position 1465 of SEQ ID NO: 1880310
uggcuauagcuguaaaugu

SEQ ID NO: 1957707 - RNA, 19 nt, Artificial Sequence
  Description of Artificial Sequence: Synthetic oligonucleotide
  Antisense strand to SEQ ID NO: 1957706
acauuuacagcuauagcca

SEQ ID NO: 1957708 - RNA, 19 nt, Artificial Sequence
  Description of Artificial Sequence: Synthetic oligonucleotide
  Sense strand starting at position 3133 of SEQ ID NO: 1880310
caaagcaaagcgugauaga

SEQ ID NO: 1957709 - RNA, 19 nt, Artificial Sequence
  Description of Artificial Sequence: Synthetic oligonucleotide
  Antisense strand to SEQ ID NO: 1957708
ucuaucacgcuuugcuuug

SEQ ID NO: 1957710 - RNA, 19 nt, Artificial Sequence
  Description of Artificial Sequence: Synthetic oligonucleotide
  Sense strand starting at position 3134 of SEQ ID NO: 1880310
aaagcaaagcgugauagaa

SEQ ID NO: 1957711 - RNA, 19 nt, Artificial Sequence
  Description of Artificial Sequence: Synthetic oligonucleotide
  Antisense strand to SEQ ID NO: 1957710
uucuaucacgcuuugcuuu

SEQ ID NO: 1957712 - RNA, 19 nt, Artificial Sequence
  Description of Artificial Sequence: Synthetic oligonucleotide
  Sense strand starting at position 3228 of SEQ ID NO: 1880310
ccgagugcuguguucauau

SEQ ID NO: 1957713 - RNA, 19 nt, Artificial Sequence
  Description of Artificial Sequence: Synthetic oligonucleotide
  Antisense strand to SEQ ID NO: 1957712
auaugaacacagcacucgg

SEQ ID NO: 1957714 - RNA, 19 nt, Artificial Sequence
  Description of Artificial Sequence: Synthetic oligonucleotide
  Sense strand starting at position 3254 of SEQ ID NO: 1880310
aaugguuuaucugcugaau

SEQ ID NO: 1957715 - RNA, 19 nt, Artificial Sequence
  Description of Artificial Sequence: Synthetic oligonucleotide
  Antisense strand to SEQ ID NO: 1957714
auucagcagauaaaccauu

SEQ ID NO: 1957716 - RNA, 19 nt, Artificial Sequence
  Description of Artificial Sequence: Synthetic oligonucleotide
  Sense strand starting at position 3257 of SEQ ID NO: 1880310
gguuuaucugcugaauaag

SEQ ID NO: 1957717 - RNA, 19 nt, Artificial Sequence
  Description of Artificial Sequence: Synthetic oligonucleotide
  Antisense strand to SEQ ID NO: 1957716
cuuauucagcagauaaacc

SEQ ID NO: 1957718 - RNA, 19 nt, Artificial Sequence
  Description of Artificial Sequence: Synthetic oligonucleotide
  Sense strand starting at position 3260 of SEQ ID NO: 1880310
uuaucugcugaauaagacu

SEQ ID NO: 1957719 - RNA, 19 nt, Artificial Sequence
  Description of Artificial Sequence: Synthetic oligonucleotide
  Antisense strand to SEQ ID NO: 1957718
agucuuauucagcagauaa

SEQ ID NO: 1957720 - RNA, 19 nt, Artificial Sequence
  Description of Artificial Sequence: Synthetic oligonucleotide
  Sense strand starting at position 3311 of SEQ ID NO: 1880310
ggucuuagcggagacaacu

SEQ ID NO: 1957721 - RNA, 19 nt, Artificial Sequence
  Description of Artificial Sequence: Synthetic oligonucleotide
  Antisense strand to SEQ ID NO: 1957720
aguugucuccgcuaagacc

SEQ ID NO: 1957722 - RNA, 19 nt, Artificial Sequence
  Description of Artificial Sequence: Synthetic oligonucleotide
  Sense strand starting at position 3366 of SEQ ID NO: 1880310
gggcucucgugacugagau

SEQ ID NO: 1957723 - RNA, 19 nt, Artificial Sequence
  Description of Artificial Sequence: Synthetic oligonucleotide
  Antisense strand to SEQ ID NO: 1957722
aucucagucacgagagccc

SEQ ID NO: 1957724 - RNA, 19 nt, Artificial Sequence
  Description of Artificial Sequence: Synthetic oligonucleotide
  Sense strand starting at position 3400 of SEQ ID NO: 1880310
ccugguuuccuuggacaac

SEQ ID NO: 1957725 - RNA, 19 nt, Artificial Sequence
  Description of Artificial Sequence: Synthetic oligonucleotide
  Antisense strand to SEQ ID NO: 1957724
guuguccaaggaaaccagg

SEQ ID NO: 1957726 - RNA, 19 nt, Artificial Sequence
  Description of Artificial Sequence: Synthetic oligonucleotide
  Sense strand starting at position 3457 of SEQ ID NO: 1880310
agagccuugucauuggaau

SEQ ID NO: 1957727 - RNA, 19 nt, Artificial Sequence
  Description of Artificial Sequence: Synthetic oligonucleotide
  Antisense strand to SEQ ID NO: 1957726
auuccaaugacaaggcucu

SEQ ID NO: 1957728 - RNA, 19 nt, Artificial Sequence
  Description of Artificial Sequence: Synthetic oligonucleotide
  Sense strand starting at position 3458 of SEQ ID NO: 1880310
gagccuugucauuggaauu

SEQ ID NO: 1957729 - RNA, 19 nt, Artificial Sequence
  Description of Artificial Sequence: Synthetic oligonucleotide
  Antisense strand to SEQ ID NO: 1957728
aauuccaaugacaaggcuc

SEQ ID NO: 1957730 - RNA, 19 nt, Artificial Sequence
  Description of Artificial Sequence: Synthetic oligonucleotide
  Sense strand starting at position 3542 of SEQ ID NO: 1880310
aggagugguucucuuggau

SEQ ID NO: 1957731 - RNA, 19 nt, Artificial Sequence
  Description of Artificial Sequence: Synthetic oligonucleotide
  Antisense strand to SEQ ID NO: 1957730
auccaagagaaccacuccu

SEQ ID NO: 1957732 - RNA, 19 nt, Artificial Sequence
  Description of Artificial Sequence: Synthetic oligonucleotide
  Sense strand starting at position 3633 of SEQ ID NO: 1880310
uguagugguccuggagaaa

SEQ ID NO: 1957733 - RNA, 19 nt, Artificial Sequence
  Description of Artificial Sequence: Synthetic oligonucleotide
  Antisense strand to SEQ ID NO: 1957732
uuucuccaggaccacuaca

SEQ ID NO: 1957734 - RNA, 19 nt, Artificial Sequence
  Description of Artificial Sequence: Synthetic oligonucleotide
  Sense strand starting at position 3662 of SEQ ID NO: 1880310
cucagauuagcuugacgac

SEQ ID NO: 1957735 - RNA, 19 nt, Artificial Sequence
  Description of Artificial Sequence: Synthetic oligonucleotide
  Antisense strand to SEQ ID NO: 1957734
gucgucaagcuaaucugag

SEQ ID NO: 1957736 - RNA, 19 nt, Artificial Sequence
  Description of Artificial Sequence: Synthetic oligonucleotide
  Sense strand starting at position 3663 of SEQ ID NO: 1880310
ucagauuagcuugacgacu

SEQ ID NO: 1957737 - RNA, 19 nt, Artificial Sequence
  Description of Artificial Sequence: Synthetic oligonucleotide
  Antisense strand to SEQ ID NO: 1957736
agucgucaagcuaaucuga

SEQ ID NO: 1957738 - RNA, 19 nt, Artificial Sequence
  Description of Artificial Sequence: Synthetic oligonucleotide
  Sense strand starting at position 3685 of SEQ ID NO: 1880310
aggauguggguuuggagua

SEQ ID NO: 1957739 - RNA, 19 nt, Artificial Sequence
  Description of Artificial Sequence: Synthetic oligonucleotide
  Antisense strand to SEQ ID NO: 1957738
uacuccaaacccacauccu

SEQ ID NO: 1957740 - RNA, 19 nt, Artificial Sequence
  Description of Artificial Sequence: Synthetic oligonucleotide
  Sense strand starting at position 3698 of SEQ ID NO: 1880310
ggaguagauugguuugaga

SEQ ID NO: 1957741 - RNA, 19 nt, Artificial Sequence
  Description of Artificial Sequence: Synthetic oligonucleotide
  Antisense strand to SEQ ID NO: 1957740
ucucaaaccaaucuacucc

SEQ ID NO: 1957742 - RNA, 19 nt, Artificial Sequence
  Description of Artificial Sequence: Synthetic oligonucleotide
  Sense strand starting at position 3741 of SEQ ID NO: 1880310
ggccauagugacugauuga

SEQ ID NO: 1957743 - RNA, 19 nt, Artificial Sequence
  Description of Artificial Sequence: Synthetic oligonucleotide
  Antisense strand to SEQ ID NO: 1957742
ucaaucagucacuauggcc

SEQ ID NO: 1957744 - RNA, 19 nt, Artificial Sequence
  Description of Artificial Sequence: Synthetic oligonucleotide
  Sense strand starting at position 3742 of SEQ ID NO: 1880310
gccauagugacugauugaa

SEQ ID NO: 1957745 - RNA, 19 nt, Artificial Sequence
  Description of Artificial Sequence: Synthetic oligonucleotide
  Antisense strand to SEQ ID NO: 1957744
uucaaucagucacuauggc

SEQ ID NO: 1957746 - RNA, 19 nt, Artificial Sequence
  Description of Artificial Sequence: Synthetic oligonucleotide
  Sense strand starting at position 3744 of SEQ ID NO: 1880310
cauagugacugauugaaau

SEQ ID NO: 1957747 - RNA, 19 nt, Artificial Sequence
  Description of Artificial Sequence: Synthetic oligonucleotide
  Antisense strand to SEQ ID NO: 1957746
auuucaaucagucacuaug

SEQ ID NO: 1957748 - RNA, 19 nt, Artificial Sequence
  Description of Artificial Sequence: Synthetic oligonucleotide
  Sense strand starting at position 3798 of SEQ ID NO: 1880310
cuggguuucuggccugaac

SEQ ID NO: 1957749 - RNA, 19 nt, Artificial Sequence
  Description of Artificial Sequence: Synthetic oligonucleotide
  Antisense strand to SEQ ID NO: 1957748
guucaggccagaaacccag

SEQ ID NO: 1957750 - RNA, 19 nt, Artificial Sequence
  Description of Artificial Sequence: Synthetic oligonucleotide
  Sense strand starting at position 3800 of SEQ ID NO: 1880310
ggguuucuggccugaacag

SEQ ID NO: 1957751 - RNA, 19 nt, Artificial Sequence
  Description of Artificial Sequence: Synthetic oligonucleotide
  Antisense strand to SEQ ID NO: 1957750
cuguucaggccagaaaccc

SEQ ID NO: 1957752 - RNA, 19 nt, Artificial Sequence
  Description of Artificial Sequence: Synthetic oligonucleotide
  Sense strand starting at position 3912 of SEQ ID NO: 1880310
uggaucuguccuggaggca

SEQ ID NO: 1957753 - RNA, 19 nt, Artificial Sequence
  Description of Artificial Sequence: Synthetic oligonucleotide
  Antisense strand to SEQ ID NO: 1957752
ugccuccaggacagaucca

SEQ ID NO: 1957754 - RNA, 19 nt, Artificial Sequence
  Description of Artificial Sequence: Synthetic oligonucleotide
  Sense strand starting at position 198 of SEQ ID NO: 1880311
aaaggugauccuuguauau

SEQ ID NO: 1957755 - RNA, 19 nt, Artificial Sequence
  Description of Artificial Sequence: Synthetic oligonucleotide
  Antisense strand to SEQ ID NO: 1957754
auauacaaggaucaccuuu

SEQ ID NO: 1957756 - RNA, 19 nt, Artificial Sequence
  Description of Artificial Sequence: Synthetic oligonucleotide
  Sense strand starting at position 202 of SEQ ID NO: 1880311
gugauccuuguauaugagu

SEQ ID NO: 1957757 - RNA, 19 nt, Artificial Sequence
  Description of Artificial Sequence: Synthetic oligonucleotide
  Antisense strand to SEQ ID NO: 1957756
acucauauacaaggaucac

SEQ ID NO: 1957758 - RNA, 19 nt, Artificial Sequence
  Description of Artificial Sequence: Synthetic oligonucleotide
  Sense strand starting at position 210 of SEQ ID NO: 1880311
uguauaugaguguagcuga

SEQ ID NO: 1957759 - RNA, 19 nt, Artificial Sequence
  Description of Artificial Sequence: Synthetic oligonucleotide
  Antisense strand to SEQ ID NO: 1957758
ucagcuacacucauauaca

SEQ ID NO: 1957760 - RNA, 19 nt, Artificial Sequence
  Description of Artificial Sequence: Synthetic oligonucleotide
  Sense strand starting at position 215 of SEQ ID NO: 1880311
augaguguagcugaggaaa

SEQ ID NO: 1957761 - RNA, 19 nt, Artificial Sequence
  Description of Artificial Sequence: Synthetic oligonucleotide
  Antisense strand to SEQ ID NO: 1957760
uuuccucagcuacacucau

SEQ ID NO: 1957762 - RNA, 19 nt, Artificial Sequence
  Description of Artificial Sequence: Synthetic oligonucleotide
  Sense strand starting at position 298 of SEQ ID NO: 1880311
cauguugggcucuagggau

SEQ ID NO: 1957763 - RNA, 19 nt, Artificial Sequence
  Description of Artificial Sequence: Synthetic oligonucleotide
  Antisense strand to SEQ ID NO: 1957762
aucccuagagcccaacaug

SEQ ID NO: 1957764 - RNA, 19 nt, Artificial Sequence
  Description of Artificial Sequence: Synthetic oligonucleotide
  Sense strand starting at position 344 of SEQ ID NO: 1880311
uacugagaguuagaugaaa

SEQ ID NO: 1957765 - RNA, 19 nt, Artificial Sequence
  Description of Artificial Sequence: Synthetic oligonucleotide
  Antisense strand to SEQ ID NO: 1957764
uuucaucuaacucucagua

SEQ ID NO: 1957766 - RNA, 19 nt, Artificial Sequence
  Description of Artificial Sequence: Synthetic oligonucleotide
  Sense strand starting at position 464 of SEQ ID NO: 1880311
gggacucauagcugagaag

SEQ ID NO: 1957767 - RNA, 19 nt, Artificial Sequence
  Description of Artificial Sequence: Synthetic oligonucleotide
  Antisense strand to SEQ ID NO: 1957766
cuucucagcuaugaguccc

SEQ ID NO: 1957768 - RNA, 19 nt, Artificial Sequence
  Description of Artificial Sequence: Synthetic oligonucleotide
  Sense strand starting at position 526 of SEQ ID NO: 1880311
aggucaagauggccucaua

SEQ ID NO: 1957769 - RNA, 19 nt, Artificial Sequence
  Description of Artificial Sequence: Synthetic oligonucleotide
  Antisense strand to SEQ ID NO: 1957768
uaugaggccaucuugaccu

SEQ ID NO: 1957770 - RNA, 19 nt, Artificial Sequence
  Description of Artificial Sequence: Synthetic oligonucleotide
  Sense strand starting at position 1025 of SEQ ID NO: 1880311
agaggaauuacuugccuga

SEQ ID NO: 1957771 - RNA, 19 nt, Artificial Sequence
  Description of Artificial Sequence: Synthetic oligonucleotide
  Antisense strand to SEQ ID NO: 1957770
ucaggcaaguaauuccucu

SEQ ID NO: 1957772 - RNA, 19 nt, Artificial Sequence
  Description of Artificial Sequence: Synthetic oligonucleotide
  Sense strand starting at position 1027 of SEQ ID NO: 1880311
aggaauuacuugccugaga

SEQ ID NO: 1957773 - RNA, 19 nt, Artificial Sequence
  Description of Artificial Sequence: Synthetic oligonucleotide
  Antisense strand to SEQ ID NO: 1957772
ucucaggcaaguaauuccu

SEQ ID NO: 1957774 - RNA, 19 nt, Artificial Sequence
  Description of Artificial Sequence: Synthetic oligonucleotide
  Sense strand starting at position 1028 of SEQ ID NO: 1880311
ggaauuacuugccugagau

SEQ ID NO: 1957775 - RNA, 19 nt, Artificial Sequence
  Description of Artificial Sequence: Synthetic oligonucleotide
  Antisense strand to SEQ ID NO: 1957774
aucucaggcaaguaauucc

SEQ ID NO: 1957776 - RNA, 19 nt, Artificial Sequence
  Description of Artificial Sequence: Synthetic oligonucleotide
  Sense strand starting at position 1252 of SEQ ID NO: 1880311
cgugauucgacagaaugac

SEQ ID NO: 1957777 - RNA, 19 nt, Artificial Sequence
  Description of Artificial Sequence: Synthetic oligonucleotide
  Antisense strand to SEQ ID NO: 1957776
gucauucugucgaaucacg

SEQ ID NO: 1957778 - RNA, 19 nt, Artificial Sequence
  Description of Artificial Sequence: Synthetic oligonucleotide
  Sense strand starting at position 1432 of SEQ ID NO: 1880311
acuggagacugcucagagu

SEQ ID NO: 1957779 - RNA, 19 nt, Artificial Sequence
  Description of Artificial Sequence: Synthetic oligonucleotide
  Antisense strand to SEQ ID NO: 1957778
acucugagcagucuccagu

SEQ ID NO: 1957780 - RNA, 19 nt, Artificial Sequence
  Description of Artificial Sequence: Synthetic oligonucleotide
  Sense strand starting at position 1987 of SEQ ID NO: 1880311
agagaugacucacucgaac

SEQ ID NO: 1957781 - RNA, 19 nt, Artificial Sequence
  Description of Artificial Sequence: Synthetic oligonucleotide
  Antisense strand to SEQ ID NO: 1957780
guucgagugagucaucucu

SEQ ID NO: 1957782 - RNA, 19 nt, Artificial Sequence
  Description of Artificial Sequence: Synthetic oligonucleotide
  Sense strand starting at position 2010 of SEQ ID NO: 1880311
aauguuuccuguuuaaagg

SEQ ID NO: 1957783 - RNA, 19 nt, Artificial Sequence
  Description of Artificial Sequence: Synthetic oligonucleotide
  Antisense strand to SEQ ID NO: 1957782
ccuuuaaacaggaaacauu

SEQ ID NO: 1957784 - RNA, 19 nt, Artificial Sequence
  Description of Artificial Sequence: Synthetic oligonucleotide
  Sense strand starting at position 2011 of SEQ ID NO: 1880311
auguuuccuguuuaaagga

SEQ ID NO: 1957785 - RNA, 19 nt, Artificial Sequence
  Description of Artificial Sequence: Synthetic oligonucleotide
  Antisense strand to SEQ ID NO: 1957784
uccuuuaaacaggaaacau

SEQ ID NO: 1957786 - RNA, 19 nt, Artificial Sequence
  Description of Artificial Sequence: Synthetic oligonucleotide
  Sense strand starting at position 2109 of SEQ ID NO: 1880311
ggacaugcuuuauuggaaa

SEQ ID NO: 1957787 - RNA, 19 nt, Artificial Sequence
  Description of Artificial Sequence: Synthetic oligonucleotide
  Antisense strand to SEQ ID NO: 1957786
uuuccaauaaagcaugucc

SEQ ID NO: 1957788 - RNA, 19 nt, Artificial Sequence
  Description of Artificial Sequence: Synthetic oligonucleotide
  Sense strand starting at position 2194 of SEQ ID NO: 1880311
uugcaaagggucugggaau

SEQ ID NO: 1957789 - RNA, 19 nt, Artificial Sequence
  Description of Artificial Sequence: Synthetic oligonucleotide
  Antisense strand to SEQ ID NO: 1957788
auucccagacccuuugcaa

SEQ ID NO: 1957790 - RNA, 19 nt, Artificial Sequence
  Description of Artificial Sequence: Synthetic oligonucleotide
  Sense strand starting at position 2307 of SEQ ID NO: 1880311
agcugaaauguagguagau

SEQ ID NO: 1957791 - RNA, 19 nt, Artificial Sequence
  Description of Artificial Sequence: Synthetic oligonucleotide
  Antisense strand to SEQ ID NO: 1957790
aucuaccuacauuucagcu

SEQ ID NO: 1957792 - RNA, 19 nt, Artificial Sequence
  Description of Artificial Sequence: Synthetic oligonucleotide
  Sense strand starting at position 2308 of SEQ ID NO: 1880311
gcugaaauguagguagauu

SEQ ID NO: 1957793 - RNA, 19 nt, Artificial Sequence
  Description of Artificial Sequence: Synthetic oligonucleotide
  Antisense strand to SEQ ID NO: 1957792
aaucuaccuacauuucagc

SEQ ID NO: 1957794 - RNA, 19 nt, Artificial Sequence
  Description of Artificial Sequence: Synthetic oligonucleotide
  Sense strand starting at position 2316 of SEQ ID NO: 1880311
guagguagauuguucagaa

SEQ ID NO: 1957795 - RNA, 19 nt, Artificial Sequence
  Description of Artificial Sequence: Synthetic oligonucleotide
  Antisense strand to SEQ ID NO: 1957794
uucugaacaaucuaccuac

SEQ ID NO: 1957796 - RNA, 19 nt, Artificial Sequence
  Description of Artificial Sequence: Synthetic oligonucleotide
  Sense strand starting at position 2417 of SEQ ID NO: 1880311
ggccauguucuccaguuua

SEQ ID NO: 1957797 - RNA, 19 nt, Artificial Sequence
  Description of Artificial Sequence: Synthetic oligonucleotide
  Antisense strand to SEQ ID NO: 1957796
uaaacuggagaacauggcc

SEQ ID NO: 1957798 - RNA, 19 nt, Artificial Sequence
  Description of Artificial Sequence: Synthetic oligonucleotide
  Sense strand starting at position 2445 of SEQ ID NO: 1880311
cgugucuuuguagcauuga

SEQ ID NO: 1957799 - RNA, 19 nt, Artificial Sequence
  Description of Artificial Sequence: Synthetic oligonucleotide
  Antisense strand to SEQ ID NO: 1957798
ucaaugcuacaaagacacg

SEQ ID NO: 1957800 - RNA, 19 nt, Artificial Sequence
  Description of Artificial Sequence: Synthetic oligonucleotide
  Sense strand starting at position 2456 of SEQ ID NO: 1880311
agcauugauccuggagugu

SEQ ID NO: 1957801 - RNA, 19 nt, Artificial Sequence
  Description of Artificial Sequence: Synthetic oligonucleotide
  Antisense strand to SEQ ID NO: 1957800
acacuccaggaucaaugcu

SEQ ID NO: 1957802 - RNA, 19 nt, Artificial Sequence
  Description of Artificial Sequence: Synthetic oligonucleotide
  Sense strand starting at position 2484 of SEQ ID NO: 1880311
ugaggucuguucuccaaag

SEQ ID NO: 1957803 - RNA, 19 nt, Artificial Sequence
  Description of Artificial Sequence: Synthetic oligonucleotide
  Antisense strand to SEQ ID NO: 1957802
cuuuggagaacagaccuca

SEQ ID NO: 1957804 - RNA, 19 nt, Artificial Sequence
  Description of Artificial Sequence: Synthetic oligonucleotide
  Sense strand starting at position 2486 of SEQ ID NO: 1880311
aggucuguucuccaaagcu

SEQ ID NO: 1957805 - RNA, 19 nt, Artificial Sequence
  Description of Artificial Sequence: Synthetic oligonucleotide
  Antisense strand to SEQ ID NO: 1957804
agcuuuggagaacagaccu

SEQ ID NO: 1957806 - RNA, 19 nt, Artificial Sequence
  Description of Artificial Sequence: Synthetic oligonucleotide
  Sense strand starting at position 3262 of SEQ ID NO: 1880311
gcaccuugacaugaacuau

SEQ ID NO: 1957807 - RNA, 19 nt, Artificial Sequence
  Description of Artificial Sequence: Synthetic oligonucleotide
  Antisense strand to SEQ ID NO: 1957806
auaguucaugucaaggugc

SEQ ID NO: 1957808 - RNA, 19 nt, Artificial Sequence
  Description of Artificial Sequence: Synthetic oligonucleotide
  Sense strand starting at position 3292 of SEQ ID NO: 1880311
gcagcagaauucucuaauu

SEQ ID NO: 1957809 - RNA, 19 nt, Artificial Sequence
  Description of Artificial Sequence: Synthetic oligonucleotide
  Antisense strand to SEQ ID NO: 1957808
aauuagagaauucugcugc

SEQ ID NO: 1957810 - RNA, 19 nt, Artificial Sequence
  Description of Artificial Sequence: Synthetic oligonucleotide
  Sense strand starting at position 3312 of SEQ ID NO: 1880311
aggguauuguucucccaug

SEQ ID NO: 1957811 - RNA, 19 nt, Artificial Sequence
  Description of Artificial Sequence: Synthetic oligonucleotide
  Antisense strand to SEQ ID NO: 1957810
caugggagaacaauacccu

SEQ ID NO: 1957812 - RNA, 19 nt, Artificial Sequence
  Description of Artificial Sequence: Synthetic oligonucleotide
  Sense strand starting at position 3317 of SEQ ID NO: 1880311
auuguucucccauguuaug

SEQ ID NO: 1957813 - RNA, 19 nt, Artificial Sequence
  Description of Artificial Sequence: Synthetic oligonucleotide
  Antisense strand to SEQ ID NO: 1957812
cauaacaugggagaacaau

SEQ ID NO: 1957814 - RNA, 19 nt, Artificial Sequence
  Description of Artificial Sequence: Synthetic oligonucleotide
  Sense strand starting at position 3487 of SEQ ID NO: 1880311
cuaauagugacuggugcau

SEQ ID NO: 1957815 - RNA, 19 nt, Artificial Sequence
  Description of Artificial Sequence: Synthetic oligonucleotide
  Antisense strand to SEQ ID NO: 1957814
augcaccagucacuauuag

SEQ ID NO: 1957816 - RNA, 19 nt, Artificial Sequence
  Description of Artificial Sequence: Synthetic oligonucleotide
  Sense strand starting at position 3510 of SEQ ID NO: 1880311
ggcagaagguccuugguuu

SEQ ID NO: 1957817 - RNA, 19 nt, Artificial Sequence
  Description of Artificial Sequence: Synthetic oligonucleotide
  Antisense strand to SEQ ID NO: 1957816
aaaccaaggaccuucugcc

SEQ ID NO: 1957818 - RNA, 19 nt, Artificial Sequence
  Description of Artificial Sequence: Synthetic oligonucleotide
  Sense strand starting at position 3525 of SEQ ID NO: 1880311
guuucucagucaccuaaca

SEQ ID NO: 1957819 - RNA, 19 nt, Artificial Sequence
  Description of Artificial Sequence: Synthetic oligonucleotide
  Antisense strand to SEQ ID NO: 1957818
uguuaggugacugagaaac

SEQ ID NO: 1957820 - RNA, 19 nt, Artificial Sequence
  Description of Artificial Sequence: Synthetic oligonucleotide
  Sense strand starting at position 3580 of SEQ ID NO: 1880311
uuaucaaaccauuggcgua

SEQ ID NO: 1957821 - RNA, 19 nt, Artificial Sequence
  Description of Artificial Sequence: Synthetic oligonucleotide
  Antisense strand to SEQ ID NO: 1957820
uacgccaaugguuugauaa

SEQ ID NO: 1957822 - RNA, 19 nt, Artificial Sequence
  Description of Artificial Sequence: Synthetic oligonucleotide
  Sense strand starting at position 3636 of SEQ ID NO: 1880311
ucugaacaguucucagaag

SEQ ID NO: 1957823 - RNA, 19 nt, Artificial Sequence
  Description of Artificial Sequence: Synthetic oligonucleotide
  Antisense strand to SEQ ID NO: 1957822
cuucugagaacuguucaga

SEQ ID NO: 1957824 - RNA, 19 nt, Artificial Sequence
  Description of Artificial Sequence: Synthetic oligonucleotide
  Sense strand starting at position 3743 of SEQ ID NO: 1880311
cagaauaaggucuguuugu

SEQ ID NO: 1957825 - RNA, 19 nt, Artificial Sequence
  Description of Artificial Sequence: Synthetic oligonucleotide
  Antisense strand to SEQ ID NO: 1957824
acaaacagaccuuauucug

SEQ ID NO: 1957826 - RNA, 19 nt, Artificial Sequence
  Description of Artificial Sequence: Synthetic oligonucleotide
  Sense strand starting at position 3744 of SEQ ID NO: 1880311
agaauaaggucuguuuguc

SEQ ID NO: 1957827 - RNA, 19 nt, Artificial Sequence
  Description of Artificial Sequence: Synthetic oligonucleotide
  Antisense strand to SEQ ID NO: 1957826
gacaaacagaccuuauucu

SEQ ID NO: 1957828 - RNA, 19 nt, Artificial Sequence
  Description of Artificial Sequence: Synthetic oligonucleotide
  Sense strand starting at position 3749 of SEQ ID NO: 1880311
aaggucuguuugucucuaa

SEQ ID NO: 1957829 - RNA, 19 nt, Artificial Sequence
  Description of Artificial Sequence: Synthetic oligonucleotide
  Antisense strand to SEQ ID NO: 1957828
uuagagacaaacagaccuu

SEQ ID NO: 1957830 - RNA, 19 nt, Artificial Sequence
  Description of Artificial Sequence: Synthetic oligonucleotide
  Sense strand starting at position 3775 of SEQ ID NO: 1880311
agugguuagucaccaccua

SEQ ID NO: 1957831 - RNA, 19 nt, Artificial Sequence
  Description of Artificial Sequence: Synthetic oligonucleotide
  Antisense strand to SEQ ID NO: 1957830
uagguggugacuaaccacu

SEQ ID NO: 1957832 - RNA, 19 nt, Artificial Sequence
  Description of Artificial Sequence: Synthetic oligonucleotide
  Sense strand starting at position 3776 of SEQ ID NO: 1880311
gugguuagucaccaccuaa

SEQ ID NO: 1957833 - RNA, 19 nt, Artificial Sequence
  Description of Artificial Sequence: Synthetic oligonucleotide
  Antisense strand to SEQ ID NO: 1957832
uuagguggugacuaaccac

SEQ ID NO: 1957834 - RNA, 19 nt, Artificial Sequence
  Description of Artificial Sequence: Synthetic oligonucleotide
  Sense strand starting at position 607 of SEQ ID NO: 1880312
cugugcguuauuuggagau

SEQ ID NO: 1957835 - RNA, 19 nt, Artificial Sequence
  Description of Artificial Sequence: Synthetic oligonucleotide
  Antisense strand to SEQ ID NO: 1957834
aucuccaaauaacgcacag

SEQ ID NO: 1957836 - RNA, 19 nt, Artificial Sequence
  Description of Artificial Sequence: Synthetic oligonucleotide
  Sense strand starting at position 707 of SEQ ID NO: 1880312
ggcacugucauguaggagu

SEQ ID NO: 1957837 - RNA, 19 nt, Artificial Sequence
  Description of Artificial Sequence: Synthetic oligonucleotide
  Antisense strand to SEQ ID NO: 1957836
acuccuacaugacagugcc

SEQ ID NO: 1957838 - RNA, 19 nt, Artificial Sequence
  Description of Artificial Sequence: Synthetic oligonucleotide
  Sense strand starting at position 718 of SEQ ID NO: 1880312
guaggagucugcuuaggcu

SEQ ID NO: 1957839 - RNA, 19 nt, Artificial Sequence
  Description of Artificial Sequence: Synthetic oligonucleotide
  Antisense strand to SEQ ID NO: 1957838
agccuaagcagacuccuac

SEQ ID NO: 1957840 - RNA, 19 nt, Artificial Sequence
  Description of Artificial Sequence: Synthetic oligonucleotide
  Sense strand starting at position 861 of SEQ ID NO: 1880312
acaagugccuucucaaugu

SEQ ID NO: 1957841 - RNA, 19 nt, Artificial Sequence
  Description of Artificial Sequence: Synthetic oligonucleotide
  Antisense strand to SEQ ID NO: 1957840
acauugagaaggcacuugu

SEQ ID NO: 1957842 - RNA, 19 nt, Artificial Sequence
  Description of Artificial Sequence: Synthetic oligonucleotide
  Sense strand starting at position 891 of SEQ ID NO: 1880312
gccuuucuuccgugcauga

SEQ ID NO: 1957843 - RNA, 19 nt, Artificial Sequence
  Description of Artificial Sequence: Synthetic oligonucleotide
  Antisense strand to SEQ ID NO: 1957842
ucaugcacggaagaaaggc

SEQ ID NO: 1957844 - RNA, 19 nt, Artificial Sequence
  Description of Artificial Sequence: Synthetic oligonucleotide
  Sense strand starting at position 893 of SEQ ID NO: 1880312
cuuucuuccgugcaugagu

SEQ ID NO: 1957845 - RNA, 19 nt, Artificial Sequence
  Description of Artificial Sequence: Synthetic oligonucleotide
  Antisense strand to SEQ ID NO: 1957844
acucaugcacggaagaaag

SEQ ID NO: 1957846 - RNA, 19 nt, Artificial Sequence
  Description of Artificial Sequence: Synthetic oligonucleotide
  Sense strand starting at position 900 of SEQ ID NO: 1880312
ccgugcaugagugaagaga

SEQ ID NO: 1957847 - RNA, 19 nt, Artificial Sequence
  Description of Artificial Sequence: Synthetic oligonucleotide
  Antisense strand to SEQ ID NO: 1957846
ucucuucacucaugcacgg

SEQ ID NO: 1957848 - RNA, 19 nt, Artificial Sequence
  Description of Artificial Sequence: Synthetic oligonucleotide
  Sense strand starting at position 914 of SEQ ID NO: 1880312
agagaaagcucucuggcau

SEQ ID NO: 1957849 - RNA, 19 nt, Artificial Sequence
  Description of Artificial Sequence: Synthetic oligonucleotide
  Antisense strand to SEQ ID NO: 1957848
augccagagagcuuucucu

SEQ ID NO: 1957850 - RNA, 19 nt, Artificial Sequence
  Description of Artificial Sequence: Synthetic oligonucleotide
  Sense strand starting at position 915 of SEQ ID NO: 1880312
gagaaagcucucuggcauc

SEQ ID NO: 1957851 - RNA, 19 nt, Artificial Sequence
  Description of Artificial Sequence: Synthetic oligonucleotide
  Antisense strand to SEQ ID NO: 1957850
gaugccagagagcuuucuc

SEQ ID NO: 1957852 - RNA, 19 nt, Artificial Sequence
  Description of Artificial Sequence: Synthetic oligonucleotide
  Sense strand starting at position 949 of SEQ ID NO: 1880312
gggcacuaauccuaucuga

SEQ ID NO: 1957853 - RNA, 19 nt, Artificial Sequence
  Description of Artificial Sequence: Synthetic oligonucleotide
  Antisense strand to SEQ ID NO: 1957852
ucagauaggauuagugccc

SEQ ID NO: 1957854 - RNA, 19 nt, Artificial Sequence
  Description of Artificial Sequence: Synthetic oligonucleotide
  Sense strand starting at position 979 of SEQ ID NO: 1880312
cccuuaugacugcauguaa

SEQ ID NO: 1957855 - RNA, 19 nt, Artificial Sequence
  Description of Artificial Sequence: Synthetic oligonucleotide
  Antisense strand to SEQ ID NO: 1957854
uuacaugcagucauaaggg

SEQ ID NO: 1957856 - RNA, 19 nt, Artificial Sequence
  Description of Artificial Sequence: Synthetic oligonucleotide
  Sense strand starting at position 1081 of SEQ ID NO: 1880312
cugggaagauucucacucu

SEQ ID NO: 1957857 - RNA, 19 nt, Artificial Sequence
  Description of Artificial Sequence: Synthetic oligonucleotide
  Antisense strand to SEQ ID NO: 1957856
agagugagaaucuucccag

SEQ ID NO: 1957858 - RNA, 19 nt, Artificial Sequence
  Description of Artificial Sequence: Synthetic oligonucleotide
  Sense strand starting at position 1084 of SEQ ID NO: 1880312
ggaagauucucacucucac

SEQ ID NO: 1957859 - RNA, 19 nt, Artificial Sequence
  Description of Artificial Sequence: Synthetic oligonucleotide
  Antisense strand to SEQ ID NO: 1957858
gugagagugagaaucuucc

SEQ ID NO: 1957860 - RNA, 19 nt, Artificial Sequence
  Description of Artificial Sequence: Synthetic oligonucleotide
  Sense strand starting at position 1366 of SEQ ID NO: 1880312
gaggaucuuuccuacugga

SEQ ID NO: 1957861 - RNA, 19 nt, Artificial Sequence
  Description of Artificial Sequence: Synthetic oligonucleotide
  Antisense strand to SEQ ID NO: 1957860
uccaguaggaaagauccuc

SEQ ID NO: 1957862 - RNA, 19 nt, Artificial Sequence
  Description of Artificial Sequence: Synthetic oligonucleotide
  Sense strand starting at position 1369 of SEQ ID NO: 1880312
gaucuuuccuacuggaagu

SEQ ID NO: 1957863 - RNA, 19 nt, Artificial Sequence
  Description of Artificial Sequence: Synthetic oligonucleotide
  Antisense strand to SEQ ID NO: 1957862
acuuccaguaggaaagauc

SEQ ID NO: 1957864 - RNA, 19 nt, Artificial Sequence
  Description of Artificial Sequence: Synthetic oligonucleotide
  Sense strand starting at position 1445 of SEQ ID NO: 1880312
guuuggguguucucgggau

SEQ ID NO: 1957865 - RNA, 19 nt, Artificial Sequence
  Description of Artificial Sequence: Synthetic oligonucleotide
  Antisense strand to SEQ ID NO: 1957864
aucccgagaacacccaaac

SEQ ID NO: 1957866 - RNA, 19 nt, Artificial Sequence
  Description of Artificial Sequence: Synthetic oligonucleotide
  Sense strand starting at position 1457 of SEQ ID NO: 1880312
ucgggaucucgcuguguau

SEQ ID NO: 1957867 - RNA, 19 nt, Artificial Sequence
  Description of Artificial Sequence: Synthetic oligonucleotide
  Antisense strand to SEQ ID NO: 1957866
auacacagcgagaucccga

SEQ ID NO: 1957868 - RNA, 19 nt, Artificial Sequence
  Description of Artificial Sequence: Synthetic oligonucleotide
  Sense strand starting at position 1468 of SEQ ID NO: 1880312
cuguguauccaaggaaggu

SEQ ID NO: 1957869 - RNA, 19 nt, Artificial Sequence
  Description of Artificial Sequence: Synthetic oligonucleotide
  Antisense strand to SEQ ID NO: 1957868
accuuccuuggauacacag

SEQ ID NO: 1957870 - RNA, 19 nt, Artificial Sequence
  Description of Artificial Sequence: Synthetic oligonucleotide
  Sense strand starting at position 1469 of SEQ ID NO: 1880312
uguguauccaaggaagguu

SEQ ID NO: 1957871 - RNA, 19 nt, Artificial Sequence
  Description of Artificial Sequence: Synthetic oligonucleotide
  Antisense strand to SEQ ID NO: 1957870
aaccuuccuuggauacaca

SEQ ID NO: 1957872 - RNA, 19 nt, Artificial Sequence
  Description of Artificial Sequence: Synthetic oligonucleotide
  Sense strand starting at position 1679 of SEQ ID NO: 1880312
aucucugcaccugauugaa

SEQ ID NO: 1957873 - RNA, 19 nt, Artificial Sequence
  Description of Artificial Sequence: Synthetic oligonucleotide
  Antisense strand to SEQ ID NO: 1957872
uucaaucaggugcagagau

SEQ ID NO: 1957874 - RNA, 19 nt, Artificial Sequence
  Description of Artificial Sequence: Synthetic oligonucleotide
  Sense strand starting at position 1681 of SEQ ID NO: 1880312
cucugcaccugauugaaau

SEQ ID NO: 1957875 - RNA, 19 nt, Artificial Sequence
  Description of Artificial Sequence: Synthetic oligonucleotide
  Antisense strand to SEQ ID NO: 1957874
auuucaaucaggugcagag

SEQ ID NO: 1957876 - RNA, 19 nt, Artificial Sequence
  Description of Artificial Sequence: Synthetic oligonucleotide
  Sense strand starting at position 1682 of SEQ ID NO: 1880312
ucugcaccugauugaaaug

SEQ ID NO: 1957877 - RNA, 19 nt, Artificial Sequence
  Description of Artificial Sequence: Synthetic oligonucleotide
  Antisense strand to SEQ ID NO: 1957876
cauuucaaucaggugcaga

SEQ ID NO: 1957878 - RNA, 19 nt, Artificial Sequence
  Description of Artificial Sequence: Synthetic oligonucleotide
  Sense strand starting at position 2225 of SEQ ID NO: 1880312
agugucucgggcuagaaau

SEQ ID NO: 1957879 - RNA, 19 nt, Artificial Sequence
  Description of Artificial Sequence: Synthetic oligonucleotide
  Antisense strand to SEQ ID NO: 1957878
auuucuagcccgagacacu

SEQ ID NO: 1957880 - RNA, 19 nt, Artificial Sequence
  Description of Artificial Sequence: Synthetic oligonucleotide
  Sense strand starting at position 2253 of SEQ ID NO: 1880312
uaccgucguaccucgagua

SEQ ID NO: 1957881 - RNA, 19 nt, Artificial Sequence
  Description of Artificial Sequence: Synthetic oligonucleotide
  Antisense strand to SEQ ID NO: 1957880
uacucgagguacgacggua

SEQ ID NO: 1957882 - RNA, 19 nt, Artificial Sequence
  Description of Artificial Sequence: Synthetic oligonucleotide
  Sense strand starting at position 2433 of SEQ ID NO: 1880312
ggcuuaaaccuguauuguc

SEQ ID NO: 1957883 - RNA, 19 nt, Artificial Sequence
  Description of Artificial Sequence: Synthetic oligonucleotide
  Antisense strand to SEQ ID NO: 1957882
gacaauacagguuuaagcc

SEQ ID NO: 1957884 - RNA, 19 nt, Artificial Sequence
  Description of Artificial Sequence: Synthetic oligonucleotide
  Sense strand starting at position 2440 of SEQ ID NO: 1880312
accuguauugucggcacuu

SEQ ID NO: 1957885 - RNA, 19 nt, Artificial Sequence
  Description of Artificial Sequence: Synthetic oligonucleotide
  Antisense strand to SEQ ID NO: 1957884
aagugccgacaauacaggu

SEQ ID NO: 1957886 - RNA, 19 nt, Artificial Sequence
  Description of Artificial Sequence: Synthetic oligonucleotide
  Sense strand starting at position 2441 of SEQ ID NO: 1880312
ccuguauugucggcacuuu

SEQ ID NO: 1957887 - RNA, 19 nt, Artificial Sequence
  Description of Artificial Sequence: Synthetic oligonucleotide
  Antisense strand to SEQ ID NO: 1957886
aaagugccgacaauacagg

SEQ ID NO: 1957888 - RNA, 19 nt, Artificial Sequence
  Description of Artificial Sequence: Synthetic oligonucleotide
  Sense strand starting at position 2737 of SEQ ID NO: 1880312
ccacacucuuacuagguua

SEQ ID NO: 1957889 - RNA, 19 nt, Artificial Sequence
  Description of Artificial Sequence: Synthetic oligonucleotide
  Antisense strand to SEQ ID NO: 1957888
uaaccuaguaagagugugg

SEQ ID NO: 1957890 - RNA, 19 nt, Artificial Sequence
  Description of Artificial Sequence: Synthetic oligonucleotide
  Sense strand starting at position 3015 of SEQ ID NO: 1880312
ggcagaugaucgucgcauc

SEQ ID NO: 1957891 - RNA, 19 nt, Artificial Sequence
  Description of Artificial Sequence: Synthetic oligonucleotide
  Antisense strand to SEQ ID NO: 1957890
gaugcgacgaucaucugcc

SEQ ID NO: 1957892 - RNA, 19 nt, Artificial Sequence
  Description of Artificial Sequence: Synthetic oligonucleotide
  Sense strand starting at position 3078 of SEQ ID NO: 1880312
uccggaugcucaguagcaa

SEQ ID NO: 1957893 - RNA, 19 nt, Artificial Sequence
  Description of Artificial Sequence: Synthetic oligonucleotide
  Antisense strand to SEQ ID NO: 1957892
uugcuacugagcauccgga

SEQ ID NO: 1957894 - RNA, 19 nt, Artificial Sequence
  Description of Artificial Sequence: Synthetic oligonucleotide
  Sense strand starting at position 3079 of SEQ ID NO: 1880312
ccggaugcucaguagcaaa

SEQ ID NO: 1957895 - RNA, 19 nt, Artificial Sequence
  Description of Artificial Sequence: Synthetic oligonucleotide
  Antisense strand to SEQ ID NO: 1957894
uuugcuacugagcauccgg

SEQ ID NO: 1957896 - RNA, 19 nt, Artificial Sequence
  Description of Artificial Sequence: Synthetic oligonucleotide
  Sense strand starting at position 3261 of SEQ ID NO: 1880312
accugagaaucacagacaa

SEQ ID NO: 1957897 - RNA, 19 nt, Artificial Sequence
  Description of Artificial Sequence: Synthetic oligonucleotide
  Antisense strand to SEQ ID NO: 1957896
uugucugugauucucaggu

SEQ ID NO: 1957898 - RNA, 19 nt, Artificial Sequence
  Description of Artificial Sequence: Synthetic oligonucleotide
  Sense strand starting at position 3290 of SEQ ID NO: 1880312
ggaggaccaucacuugagu

SEQ ID NO: 1957899 - RNA, 19 nt, Artificial Sequence
  Description of Artificial Sequence: Synthetic oligonucleotide
  Antisense strand to SEQ ID NO: 1957898
acucaagugaugguccucc

SEQ ID NO: 1957900 - RNA, 19 nt, Artificial Sequence
  Description of Artificial Sequence: Synthetic oligonucleotide
  Sense strand starting at position 3511 of SEQ ID NO: 1880312
gguguuuguugaguguuca

SEQ ID NO: 1957901 - RNA, 19 nt, Artificial Sequence
  Description of Artificial Sequence: Synthetic oligonucleotide
  Antisense strand to SEQ ID NO: 1957900
ugaacacucaacaaacacc

SEQ ID NO: 1957902 - RNA, 19 nt, Artificial Sequence
  Description of Artificial Sequence: Synthetic oligonucleotide
  Sense strand starting at position 3512 of SEQ ID NO: 1880312
guguuuguugaguguucac

SEQ ID NO: 1957903 - RNA, 19 nt, Artificial Sequence
  Description of Artificial Sequence: Synthetic oligonucleotide
  Antisense strand to SEQ ID NO: 1957902
gugaacacucaacaaacac

SEQ ID NO: 1957904 - RNA, 19 nt, Artificial Sequence
  Description of Artificial Sequence: Synthetic oligonucleotide
  Sense strand starting at position 3544 of SEQ ID NO: 1880312
uuucuagauuguuugaucu

SEQ ID NO: 1957905 - RNA, 19 nt, Artificial Sequence
  Description of Artificial Sequence: Synthetic oligonucleotide
  Antisense strand to SEQ ID NO: 1957904
agaucaaacaaucuagaaa

SEQ ID NO: 1957906 - RNA, 19 nt, Artificial Sequence
  Description of Artificial Sequence: Synthetic oligonucleotide
  Sense strand starting at position 3556 of SEQ ID NO: 1880312
uugaucuggucuuuauaac

SEQ ID NO: 1957907 - RNA, 19 nt, Artificial Sequence
  Description of Artificial Sequence: Synthetic oligonucleotide
  Antisense strand to SEQ ID NO: 1957906
guuauaaagaccagaucaa

SEQ ID NO: 1957908 - RNA, 19 nt, Artificial Sequence
  Description of Artificial Sequence: Synthetic oligonucleotide
  Sense strand starting at position 3557 of SEQ ID NO: 1880312
ugaucuggucuuuauaacu

SEQ ID NO: 1957909 - RNA, 19 nt, Artificial Sequence
  Description of Artificial Sequence: Synthetic oligonucleotide
  Antisense strand to SEQ ID NO: 1957908
aguuauaaagaccagauca

SEQ ID NO: 1957910 - RNA, 19 nt, Artificial Sequence
  Description of Artificial Sequence: Synthetic oligonucleotide
  Sense strand starting at position 3567 of SEQ ID NO: 1880312
uuuauaacuccagggaacu

SEQ ID NO: 1957911 - RNA, 19 nt, Artificial Sequence
  Description of Artificial Sequence: Synthetic oligonucleotide
  Antisense strand to SEQ ID NO: 1957910
aguucccuggaguuauaaa

SEQ ID NO: 1957912 - RNA, 19 nt, Artificial Sequence
  Description of Artificial Sequence: Synthetic oligonucleotide
  Sense strand starting at position 3912 of SEQ ID NO: 1880312
agaccagucucccuguguu

SEQ ID NO: 1957913 - RNA, 19 nt, Artificial Sequence
  Description of Artificial Sequence: Synthetic oligonucleotide
  Antisense strand to SEQ ID NO: 1957912
aacacagggagacuggucu

SEQ ID NO: 1957914 - RNA, 19 nt, Artificial Sequence
  Description of Artificial Sequence: Synthetic oligonucleotide
  Sense strand starting at position 42 of SEQ ID NO: 1880313
agucaaagaguuugcuaug

SEQ ID NO: 1957915 - RNA, 19 nt, Artificial Sequence
  Description of Artificial Sequence: Synthetic oligonucleotide
  Antisense strand to SEQ ID NO: 1957914
cauagcaaacucuuugacu

SEQ ID NO: 1957916 - RNA, 19 nt, Artificial Sequence
  Description of Artificial Sequence: Synthetic oligonucleotide
  Sense strand starting at position 43 of SEQ ID NO: 1880313
gucaaagaguuugcuaugu

SEQ ID NO: 1957917 - RNA, 19 nt, Artificial Sequence
  Description of Artificial Sequence: Synthetic oligonucleotide
  Antisense strand to SEQ ID NO: 1957916
acauagcaaacucuuugac

SEQ ID NO: 1957918 - RNA, 19 nt, Artificial Sequence
  Description of Artificial Sequence: Synthetic oligonucleotide
  Sense strand starting at position 45 of SEQ ID NO: 1880313
caaagaguuugcuauguug

SEQ ID NO: 1957919 - RNA, 19 nt, Artificial Sequence
  Description of Artificial Sequence: Synthetic oligonucleotide
  Antisense strand to SEQ ID NO: 1957918
caacauagcaaacucuuug

SEQ ID NO: 1957920 - RNA, 19 nt, Artificial Sequence
  Description of Artificial Sequence: Synthetic oligonucleotide
  Sense strand starting at position 47 of SEQ ID NO: 1880313
aagaguuugcuauguuguc

SEQ ID NO: 1957921 - RNA, 19 nt, Artificial Sequence
  Description of Artificial Sequence: Synthetic oligonucleotide
  Antisense strand to SEQ ID NO: 1957920
gacaacauagcaaacucuu

SEQ ID NO: 1957922 - RNA, 19 nt, Artificial Sequence
  Description of Artificial Sequence: Synthetic oligonucleotide
  Sense strand starting at position 48 of SEQ ID NO: 1880313
agaguuugcuauguuguca

SEQ ID NO: 1957923 - RNA, 19 nt, Artificial Sequence
  Description of Artificial Sequence: Synthetic oligonucleotide
  Antisense strand to SEQ ID NO: 1957922
ugacaacauagcaaacucu

SEQ ID NO: 1957924 - RNA, 19 nt, Artificial Sequence
  Description of Artificial Sequence: Synthetic oligonucleotide
  Sense strand starting at position 52 of SEQ ID NO: 1880313
uuugcuauguugucauugu

SEQ ID NO: 1957925 - RNA, 19 nt, Artificial Sequence
  Description of Artificial Sequence: Synthetic oligonucleotide
  Antisense strand to SEQ ID NO: 1957924
acaaugacaacauagcaaa

SEQ ID NO: 1957926 - RNA, 19 nt, Artificial Sequence
  Description of Artificial Sequence: Synthetic oligonucleotide
  Sense strand starting at position 83 of SEQ ID NO: 1880313
uguuacauguauuagaacu

SEQ ID NO: 1957927 - RNA, 19 nt, Artificial Sequence
  Description of Artificial Sequence: Synthetic oligonucleotide
  Antisense strand to SEQ ID NO: 1957926
aguucuaauacauguaaca

SEQ ID NO: 1957928 - RNA, 19 nt, Artificial Sequence
  Description of Artificial Sequence: Synthetic oligonucleotide
  Sense strand starting at position 91 of SEQ ID NO: 1880313
guauuagaacuguaacuug

SEQ ID NO: 1957929 - RNA, 19 nt, Artificial Sequence
  Description of Artificial Sequence: Synthetic oligonucleotide
  Antisense strand to SEQ ID NO: 1957928
caaguuacaguucuaauac

SEQ ID NO: 1957930 - RNA, 19 nt, Artificial Sequence
  Description of Artificial Sequence: Synthetic oligonucleotide
  Sense strand starting at position 98 of SEQ ID NO: 1880313
aacuguaacuugcagagau

SEQ ID NO: 1957931 - RNA, 19 nt, Artificial Sequence
  Description of Artificial Sequence: Synthetic oligonucleotide
  Antisense strand to SEQ ID NO: 1957930
aucucugcaaguuacaguu

SEQ ID NO: 1957932 - RNA, 19 nt, Artificial Sequence
  Description of Artificial Sequence: Synthetic oligonucleotide
  Sense strand starting at position 100 of SEQ ID NO: 1880313
cuguaacuugcagagauau

SEQ ID NO: 1957933 - RNA, 19 nt, Artificial Sequence
  Description of Artificial Sequence: Synthetic oligonucleotide
  Antisense strand to SEQ ID NO: 1957932
auaucucugcaaguuacag

SEQ ID NO: 1957934 - RNA, 19 nt, Artificial Sequence
  Description of Artificial Sequence: Synthetic oligonucleotide
  Sense strand starting at position 150 of SEQ ID NO: 1880313
ugagacucugucugacuuu

SEQ ID NO: 1957935 - RNA, 19 nt, Artificial Sequence
  Description of Artificial Sequence: Synthetic oligonucleotide
  Antisense strand to SEQ ID NO: 1957934
aaagucagacagagucuca

SEQ ID NO: 1957936 - RNA, 19 nt, Artificial Sequence
  Description of Artificial Sequence: Synthetic oligonucleotide
  Sense strand starting at position 381 of SEQ ID NO: 1880313
aggucauucuaaugaccca

SEQ ID NO: 1957937 - RNA, 19 nt, Artificial Sequence
  Description of Artificial Sequence: Synthetic oligonucleotide
  Antisense strand to SEQ ID NO: 1957936
ugggucauuagaaugaccu

SEQ ID NO: 1957938 - RNA, 19 nt, Artificial Sequence
  Description of Artificial Sequence: Synthetic oligonucleotide
  Sense strand starting at position 655 of SEQ ID NO: 1880313
guugcagugagaugagaau

SEQ ID NO: 1957939 - RNA, 19 nt, Artificial Sequence
  Description of Artificial Sequence: Synthetic oligonucleotide
  Antisense strand to SEQ ID NO: 1957938
auucucaucucacugcaac

SEQ ID NO: 1957940 - RNA, 19 nt, Artificial Sequence
  Description of Artificial Sequence: Synthetic oligonucleotide
  Sense strand starting at position 811 of SEQ ID NO: 1880313
aaggucuggguguaguaaa

SEQ ID NO: 1957941 - RNA, 19 nt, Artificial Sequence
  Description of Artificial Sequence: Synthetic oligonucleotide
  Antisense strand to SEQ ID NO: 1957940
uuuacuacacccagaccuu

SEQ ID NO: 1957942 - RNA, 19 nt, Artificial Sequence
  Description of Artificial Sequence: Synthetic oligonucleotide
  Sense strand starting at position 821 of SEQ ID NO: 1880313
uguaguaaaguggguugau

SEQ ID NO: 1957943 - RNA, 19 nt, Artificial Sequence
  Description of Artificial Sequence: Synthetic oligonucleotide
  Antisense strand to SEQ ID NO: 1957942
aucaacccacuuuacuaca

SEQ ID NO: 1957944 - RNA, 19 nt, Artificial Sequence
  Description of Artificial Sequence: Synthetic oligonucleotide
  Sense strand starting at position 822 of SEQ ID NO: 1880313
guaguaaaguggguugaug

SEQ ID NO: 1957945 - RNA, 19 nt, Artificial Sequence
  Description of Artificial Sequence: Synthetic oligonucleotide
  Antisense strand to SEQ ID NO: 1957944
caucaacccacuuuacuac

SEQ ID NO: 1957946 - RNA, 19 nt, Artificial Sequence
  Description of Artificial Sequence: Synthetic oligonucleotide
  Sense strand starting at position 865 of SEQ ID NO: 1880313
ucugguugccauggagaca

SEQ ID NO: 1957947 - RNA, 19 nt, Artificial Sequence
  Description of Artificial Sequence: Synthetic oligonucleotide
  Antisense strand to SEQ ID NO: 1957946
ugucuccauggcaaccaga

SEQ ID NO: 1957948 - RNA, 19 nt, Artificial Sequence
  Description of Artificial Sequence: Synthetic oligonucleotide
  Sense strand starting at position 1008 of SEQ ID NO: 1880313
gguagucuuagaggauucu

SEQ ID NO: 1957949 - RNA, 19 nt, Artificial Sequence
  Description of Artificial Sequence: Synthetic oligonucleotide
  Antisense strand to SEQ ID NO: 1957948
agaauccucuaagacuacc

SEQ ID NO: 1957950 - RNA, 19 nt, Artificial Sequence
  Description of Artificial Sequence: Synthetic oligonucleotide
  Sense strand starting at position 1014 of SEQ ID NO: 1880313
cuuagaggauucuguucuu

SEQ ID NO: 1957951 - RNA, 19 nt, Artificial Sequence
  Description of Artificial Sequence: Synthetic oligonucleotide
  Antisense strand to SEQ ID NO: 1957950
aagaacagaauccucuaag

SEQ ID NO: 1957952 - RNA, 19 nt, Artificial Sequence
  Description of Artificial Sequence: Synthetic oligonucleotide
  Sense strand starting at position 1324 of SEQ ID NO: 1880313
uuccuugauucuccuggga

SEQ ID NO: 1957953 - RNA, 19 nt, Artificial Sequence
  Description of Artificial Sequence: Synthetic oligonucleotide
  Antisense strand to SEQ ID NO: 1957952
ucccaggagaaucaaggaa

SEQ ID NO: 1957954 - RNA, 19 nt, Artificial Sequence
  Description of Artificial Sequence: Synthetic oligonucleotide
  Sense strand starting at position 1326 of SEQ ID NO: 1880313
ccuugauucuccugggacu

SEQ ID NO: 1957955 - RNA, 19 nt, Artificial Sequence
  Description of Artificial Sequence: Synthetic oligonucleotide
  Antisense strand to SEQ ID NO: 1957954
agucccaggagaaucaagg

SEQ ID NO: 1957956 - RNA, 19 nt, Artificial Sequence
  Description of Artificial Sequence: Synthetic oligonucleotide
  Sense strand starting at position 1328 of SEQ ID NO: 1880313
uugauucuccugggacuca

SEQ ID NO: 1957957 - RNA, 19 nt, Artificial Sequence
  Description of Artificial Sequence: Synthetic oligonucleotide
  Antisense strand to SEQ ID NO: 1957956
ugagucccaggagaaucaa

SEQ ID NO: 1957958 - RNA, 19 nt, Artificial Sequence
  Description of Artificial Sequence: Synthetic oligonucleotide
  Sense strand starting at position 1357 of SEQ ID NO: 1880313
gaggccuguuuguugacau

SEQ ID NO: 1957959 - RNA, 19 nt, Artificial Sequence
  Description of Artificial Sequence: Synthetic oligonucleotide
  Antisense strand to SEQ ID NO: 1957958
augucaacaaacaggccuc

SEQ ID NO: 1957960 - RNA, 19 nt, Artificial Sequence
  Description of Artificial Sequence: Synthetic oligonucleotide
  Sense strand starting at position 1361 of SEQ ID NO: 1880313
ccuguuuguugacauucuu

SEQ ID NO: 1957961 - RNA, 19 nt, Artificial Sequence
  Description of Artificial Sequence: Synthetic oligonucleotide
  Antisense strand to SEQ ID NO: 1957960
aagaaugucaacaaacagg

SEQ ID NO: 1957962 - RNA, 19 nt, Artificial Sequence
  Description of Artificial Sequence: Synthetic oligonucleotide
  Sense strand starting at position 1783 of SEQ ID NO: 1880313
gccugaugcccgucacucu

SEQ ID NO: 1957963 - RNA, 19 nt, Artificial Sequence
  Description of Artificial Sequence: Synthetic oligonucleotide
  Antisense strand to SEQ ID NO: 1957962
agagugacgggcaucaggc

SEQ ID NO: 1957964 - RNA, 19 nt, Artificial Sequence
  Description of Artificial Sequence: Synthetic oligonucleotide
  Sense strand starting at position 1907 of SEQ ID NO: 1880313
gagcgaguuccucauggac

SEQ ID NO: 1957965 - RNA, 19 nt, Artificial Sequence
  Description of Artificial Sequence: Synthetic oligonucleotide
  Antisense strand to SEQ ID NO: 1957964
guccaugaggaacucgcuc

SEQ ID NO: 1957966 - RNA, 19 nt, Artificial Sequence
  Description of Artificial Sequence: Synthetic oligonucleotide
  Sense strand starting at position 2252 of SEQ ID NO: 1880313
cguguuaugaugcaaugua

SEQ ID NO: 1957967 - RNA, 19 nt, Artificial Sequence
  Description of Artificial Sequence: Synthetic oligonucleotide
  Antisense strand to SEQ ID NO: 1957966
uacauugcaucauaacacg

SEQ ID NO: 1957968 - RNA, 19 nt, Artificial Sequence
  Description of Artificial Sequence: Synthetic oligonucleotide
  Sense strand starting at position 2422 of SEQ ID NO: 1880313
agcgaaaccucaucuguac

SEQ ID NO: 1957969 - RNA, 19 nt, Artificial Sequence
  Description of Artificial Sequence: Synthetic oligonucleotide
  Antisense strand to SEQ ID NO: 1957968
guacagaugagguuucgcu

SEQ ID NO: 1957970 - RNA, 19 nt, Artificial Sequence
  Description of Artificial Sequence: Synthetic oligonucleotide
  Sense strand starting at position 2781 of SEQ ID NO: 1880313
gguaaugugugucuguagu

SEQ ID NO: 1957971 - RNA, 19 nt, Artificial Sequence
  Description of Artificial Sequence: Synthetic oligonucleotide
  Antisense strand to SEQ ID NO: 1957970
acuacagacacacauuacc

SEQ ID NO: 1957972 - RNA, 19 nt, Artificial Sequence
  Description of Artificial Sequence: Synthetic oligonucleotide
  Sense strand starting at position 2862 of SEQ ID NO: 1880313
gagcaaugugcgugccacu

SEQ ID NO: 1957973 - RNA, 19 nt, Artificial Sequence
  Description of Artificial Sequence: Synthetic oligonucleotide
  Antisense strand to SEQ ID NO: 1957972
aguggcacgcacauugcuc

SEQ ID NO: 1957974 - RNA, 19 nt, Artificial Sequence
  Description of Artificial Sequence: Synthetic oligonucleotide
  Sense strand starting at position 3406 of SEQ ID NO: 1880313
gaugguuucugguuucugu

SEQ ID NO: 1957975 - RNA, 19 nt, Artificial Sequence
  Description of Artificial Sequence: Synthetic oligonucleotide
  Antisense strand to SEQ ID NO: 1957974
acagaaaccagaaaccauc

SEQ ID NO: 1957976 - RNA, 19 nt, Artificial Sequence
  Description of Artificial Sequence: Synthetic oligonucleotide
  Sense strand starting at position 3415 of SEQ ID NO: 1880313
ugguuucugugggaagguu

SEQ ID NO: 1957977 - RNA, 19 nt, Artificial Sequence
  Description of Artificial Sequence: Synthetic oligonucleotide
  Antisense strand to SEQ ID NO: 1957976
aaccuucccacagaaacca

SEQ ID NO: 1957978 - RNA, 19 nt, Artificial Sequence
  Description of Artificial Sequence: Synthetic oligonucleotide
  Sense strand starting at position 3444 of SEQ ID NO: 1880313
aguaguuuccaguguguaa

SEQ ID NO: 1957979 - RNA, 19 nt, Artificial Sequence
  Description of Artificial Sequence: Synthetic oligonucleotide
  Antisense strand to SEQ ID NO: 1957978
uuacacacuggaaacuacu

SEQ ID NO: 1957980 - RNA, 19 nt, Artificial Sequence
  Description of Artificial Sequence: Synthetic oligonucleotide
  Sense strand starting at position 3446 of SEQ ID NO: 1880313
uaguuuccaguguguaaac

SEQ ID NO: 1957981 - RNA, 19 nt, Artificial Sequence
  Description of Artificial Sequence: Synthetic oligonucleotide
  Antisense strand to SEQ ID NO: 1957980
guuuacacacuggaaacua

SEQ ID NO: 1957982 - RNA, 19 nt, Artificial Sequence
  Description of Artificial Sequence: Synthetic oligonucleotide
  Sense strand starting at position 3650 of SEQ ID NO: 1880313
ggguucagaguuuggguau

SEQ ID NO: 1957983 - RNA, 19 nt, Artificial Sequence
  Description of Artificial Sequence: Synthetic oligonucleotide
  Antisense strand to SEQ ID NO: 1957982
auacccaaacucugaaccc

SEQ ID NO: 1957984 - RNA, 19 nt, Artificial Sequence
  Description of Artificial Sequence: Synthetic oligonucleotide
  Sense strand starting at position 3672 of SEQ ID NO: 1880313
gagaacuuaucaguggcaa

SEQ ID NO: 1957985 - RNA, 19 nt, Artificial Sequence
  Description of Artificial Sequence: Synthetic oligonucleotide
  Antisense strand to SEQ ID NO: 1957984
uugccacugauaaguucuc

SEQ ID NO: 1957986 - RNA, 19 nt, Artificial Sequence
  Description of Artificial Sequence: Synthetic oligonucleotide
  Sense strand starting at position 3673 of SEQ ID NO: 1880313
agaacuuaucaguggcaac

SEQ ID NO: 1957987 - RNA, 19 nt, Artificial Sequence
  Description of Artificial Sequence: Synthetic oligonucleotide
  Antisense strand to SEQ ID NO: 1957986
guugccacugauaaguucu

SEQ ID NO: 1957988 - RNA, 19 nt, Artificial Sequence
  Description of Artificial Sequence: Synthetic oligonucleotide
  Sense strand starting at position 3728 of SEQ ID NO: 1880313
aaaccaguguucugaagug

SEQ ID NO: 1957989 - RNA, 19 nt, Artificial Sequence
  Description of Artificial Sequence: Synthetic oligonucleotide
  Antisense strand to SEQ ID NO: 1957988
cacuucagaacacugguuu

SEQ ID NO: 1957990 - RNA, 19 nt, Artificial Sequence
  Description of Artificial Sequence: Synthetic oligonucleotide
  Sense strand starting at position 3772 of SEQ ID NO: 1880313
ucauaacacgacugcuauu

SEQ ID NO: 1957991 - RNA, 19 nt, Artificial Sequence
  Description of Artificial Sequence: Synthetic oligonucleotide
  Antisense strand to SEQ ID NO: 1957990
aauagcagucguguuauga

SEQ ID NO: 1957992 - RNA, 19 nt, Artificial Sequence
  Description of Artificial Sequence: Synthetic oligonucleotide
  Sense strand starting at position 3802 of SEQ ID NO: 1880313
cuguguaugaaagguguuu

SEQ ID NO: 1957993 - RNA, 19 nt, Artificial Sequence
  Description of Artificial Sequence: Synthetic oligonucleotide
  Antisense strand to SEQ ID NO: 1957992
aaacaccuuucauacacag

SEQ ID NO: 1957994 - RNA, 19 nt, Artificial Sequence
  Description of Artificial Sequence: Synthetic oligonucleotide
  Sense strand starting at position 87 of SEQ ID NO: 1880314
ggguguacaacggaaguuu

SEQ ID NO: 1957995 - RNA, 19 nt, Artificial Sequence
  Description of Artificial Sequence: Synthetic oligonucleotide
  Antisense strand to SEQ ID NO: 1957994
aaacuuccguuguacaccc

SEQ ID NO: 1957996 - RNA, 19 nt, Artificial Sequence
  Description of Artificial Sequence: Synthetic oligonucleotide
  Sense strand starting at position 97 of SEQ ID NO: 1880314
cggaaguuuggauggagga

SEQ ID NO: 1957997 - RNA, 19 nt, Artificial Sequence
  Description of Artificial Sequence: Synthetic oligonucleotide
  Antisense strand to SEQ ID NO: 1957996
uccuccauccaaacuuccg

SEQ ID NO: 1957998 - RNA, 19 nt, Artificial Sequence
  Description of Artificial Sequence: Synthetic oligonucleotide
  Sense strand starting at position 250 of SEQ ID NO: 1880314
ugacguagacugugaggaa

SEQ ID NO: 1957999 - RNA, 19 nt, Artificial Sequence
  Description of Artificial Sequence: Synthetic oligonucleotide
  Antisense strand to SEQ ID NO: 1957998
uuccucacagucuacguca

SEQ ID NO: 1958000 - RNA, 19 nt, Artificial Sequence
  Description of Artificial Sequence: Synthetic oligonucleotide
  Sense strand starting at position 384 of SEQ ID NO: 1880314
cugggaucuuacucccuga

SEQ ID NO: 1958001 - RNA, 19 nt, Artificial Sequence
  Description of Artificial Sequence: Synthetic oligonucleotide
  Antisense strand to SEQ ID NO: 1958000
ucagggaguaagaucccag

SEQ ID NO: 1958002 - RNA, 19 nt, Artificial Sequence
  Description of Artificial Sequence: Synthetic oligonucleotide
  Sense strand starting at position 404 of SEQ ID NO: 1880314
cuuuaucaucuuggugaca

SEQ ID NO: 1958003 - RNA, 19 nt, Artificial Sequence
  Description of Artificial Sequence: Synthetic oligonucleotide
  Antisense strand to SEQ ID NO: 1958002
ugucaccaagaugauaaag

SEQ ID NO: 1958004 - RNA, 19 nt, Artificial Sequence
  Description of Artificial Sequence: Synthetic oligonucleotide
  Sense strand starting at position 405 of SEQ ID NO: 1880314
uuuaucaucuuggugacaa

SEQ ID NO: 1958005 - RNA, 19 nt, Artificial Sequence
  Description of Artificial Sequence: Synthetic oligonucleotide
  Antisense strand to SEQ ID NO: 1958004
uugucaccaagaugauaaa

SEQ ID NO: 1958006 - RNA, 19 nt, Artificial Sequence
  Description of Artificial Sequence: Synthetic oligonucleotide
  Sense strand starting at position 418 of SEQ ID NO: 1880314
ugacaauguugagcuugau

SEQ ID NO: 1958007 - RNA, 19 nt, Artificial Sequence
  Description of Artificial Sequence: Synthetic oligonucleotide
  Antisense strand to SEQ ID NO: 1958006
aucaagcucaacauuguca

SEQ ID NO: 1958008 - RNA, 19 nt, Artificial Sequence
  Description of Artificial Sequence: Synthetic oligonucleotide
  Sense strand starting at position 422 of SEQ ID NO: 1880314
aauguugagcuugaucuga

SEQ ID NO: 1958009 - RNA, 19 nt, Artificial Sequence
  Description of Artificial Sequence: Synthetic oligonucleotide
  Antisense strand to SEQ ID NO: 1958008
ucagaucaagcucaacauu

SEQ ID NO: 1958010 - RNA, 19 nt, Artificial Sequence
  Description of Artificial Sequence: Synthetic oligonucleotide
  Sense strand starting at position 432 of SEQ ID NO: 1880314
uugaucugagcucaugauu

SEQ ID NO: 1958011 - RNA, 19 nt, Artificial Sequence
  Description of Artificial Sequence: Synthetic oligonucleotide
  Antisense strand to SEQ ID NO: 1958010
aaucaugagcucagaucaa

SEQ ID NO: 1958012 - RNA, 19 nt, Artificial Sequence
  Description of Artificial Sequence: Synthetic oligonucleotide
  Sense strand starting at position 435 of SEQ ID NO: 1880314
aucugagcucaugauucua

SEQ ID NO: 1958013 - RNA, 19 nt, Artificial Sequence
  Description of Artificial Sequence: Synthetic oligonucleotide
  Antisense strand to SEQ ID NO: 1958012
uagaaucaugagcucagau

SEQ ID NO: 1958014 - RNA, 19 nt, Artificial Sequence
  Description of Artificial Sequence: Synthetic oligonucleotide
  Sense strand starting at position 437 of SEQ ID NO: 1880314
cugagcucaugauucuaua

SEQ ID NO: 1958015 - RNA, 19 nt, Artificial Sequence
  Description of Artificial Sequence: Synthetic oligonucleotide
  Antisense strand to SEQ ID NO: 1958014
uauagaaucaugagcucag

SEQ ID NO: 1958016 - RNA, 19 nt, Artificial Sequence
  Description of Artificial Sequence: Synthetic oligonucleotide
  Sense strand starting at position 456 of SEQ ID NO: 1880314
aaacacuguugguuggaaa

SEQ ID NO: 1958017 - RNA, 19 nt, Artificial Sequence
  Description of Artificial Sequence: Synthetic oligonucleotide
  Antisense strand to SEQ ID NO: 1958016
uuuccaaccaacaguguuu

SEQ ID NO: 1958018 - RNA, 19 nt, Artificial Sequence
  Description of Artificial Sequence: Synthetic oligonucleotide
  Sense strand starting at position 538 of SEQ ID NO: 1880314
agaugagacuguuugucca

SEQ ID NO: 1958019 - RNA, 19 nt, Artificial Sequence
  Description of Artificial Sequence: Synthetic oligonucleotide
  Antisense strand to SEQ ID NO: 1958018
uggacaaacagucucaucu

SEQ ID NO: 1958020 - RNA, 19 nt, Artificial Sequence
  Description of Artificial Sequence: Synthetic oligonucleotide
  Sense strand starting at position 564 of SEQ ID NO: 1880314
ccgugacuccuguaagacc

SEQ ID NO: 1958021 - RNA, 19 nt, Artificial Sequence
  Description of Artificial Sequence: Synthetic oligonucleotide
  Antisense strand to SEQ ID NO: 1958020
ggucuuacaggagucacgg

SEQ ID NO: 1958022 - RNA, 19 nt, Artificial Sequence
  Description of Artificial Sequence: Synthetic oligonucleotide
  Sense strand starting at position 675 of SEQ ID NO: 1880314
uuugucucaggaugauuaa

SEQ ID NO: 1958023 - RNA, 19 nt, Artificial Sequence
  Description of Artificial Sequence: Synthetic oligonucleotide
  Antisense strand to SEQ ID NO: 1958022
uuaaucauccugagacaaa

SEQ ID NO: 1958024 - RNA, 19 nt, Artificial Sequence
  Description of Artificial Sequence: Synthetic oligonucleotide
  Sense strand starting at position 697 of SEQ ID NO: 1880314
ggauuagaaguuugucccu

SEQ ID NO: 1958025 - RNA, 19 nt, Artificial Sequence
  Description of Artificial Sequence: Synthetic oligonucleotide
  Antisense strand to SEQ ID NO: 1958024
agggacaaacuucuaaucc

SEQ ID NO: 1958026 - RNA, 19 nt, Artificial Sequence
  Description of Artificial Sequence: Synthetic oligonucleotide
  Sense strand starting at position 702 of SEQ ID NO: 1880314
agaaguuugucccucugaa

SEQ ID NO: 1958027 - RNA, 19 nt, Artificial Sequence
  Description of Artificial Sequence: Synthetic oligonucleotide
  Antisense strand to SEQ ID NO: 1958026
uucagagggacaaacuucu

SEQ ID NO: 1958028 - RNA, 19 nt, Artificial Sequence
  Description of Artificial Sequence: Synthetic oligonucleotide
  Sense strand starting at position 759 of SEQ ID NO: 1880314
gacugaaauguaugugauu

SEQ ID NO: 1958029 - RNA, 19 nt, Artificial Sequence
  Description of Artificial Sequence: Synthetic oligonucleotide
  Antisense strand to SEQ ID NO: 1958028
aaucacauacauuucaguc

SEQ ID NO: 1958030 - RNA, 19 nt, Artificial Sequence
  Description of Artificial Sequence: Synthetic oligonucleotide
  Sense strand starting at position 760 of SEQ ID NO: 1880314
acugaaauguaugugauug

SEQ ID NO: 1958031 - RNA, 19 nt, Artificial Sequence
  Description of Artificial Sequence: Synthetic oligonucleotide
  Antisense strand to SEQ ID NO: 1958030
caaucacauacauuucagu

SEQ ID NO: 1958032 - RNA, 19 nt, Artificial Sequence
  Description of Artificial Sequence: Synthetic oligonucleotide
  Sense strand starting at position 761 of SEQ ID NO: 1880314
cugaaauguaugugauugu

SEQ ID NO: 1958033 - RNA, 19 nt, Artificial Sequence
  Description of Artificial Sequence: Synthetic oligonucleotide
  Antisense strand to SEQ ID NO: 1958032
acaaucacauacauuucag

SEQ ID NO: 1958034 - RNA, 19 nt, Artificial Sequence
  Description of Artificial Sequence: Synthetic oligonucleotide
  Sense strand starting at position 776 of SEQ ID NO: 1880314
uuguaaaucuauucccagu

SEQ ID NO: 1958035 - RNA, 19 nt, Artificial Sequence
  Description of Artificial Sequence: Synthetic oligonucleotide
  Antisense strand to SEQ ID NO: 1958034
acugggaauagauuuacaa

SEQ ID NO: 1958036 - RNA, 19 nt, Artificial Sequence
  Description of Artificial Sequence: Synthetic oligonucleotide
  Sense strand starting at position 782 of SEQ ID NO: 1880314
aucuauucccaguguaaag

SEQ ID NO: 1958037 - RNA, 19 nt, Artificial Sequence
  Description of Artificial Sequence: Synthetic oligonucleotide
  Antisense strand to SEQ ID NO: 1958036
cuuuacacugggaauagau

SEQ ID NO: 1958038 - RNA, 19 nt, Artificial Sequence
  Description of Artificial Sequence: Synthetic oligonucleotide
  Sense strand starting at position 938 of SEQ ID NO: 1880314
ugucuuugacacugggaag

SEQ ID NO: 1958039 - RNA, 19 nt, Artificial Sequence
  Description of Artificial Sequence: Synthetic oligonucleotide
  Antisense strand to SEQ ID NO: 1958038
cuucccagugucaaagaca

SEQ ID NO: 1958040 - RNA, 19 nt, Artificial Sequence
  Description of Artificial Sequence: Synthetic oligonucleotide
  Sense strand starting at position 1279 of SEQ ID NO: 1880314
agcggugagacucaguuua

SEQ ID NO: 1958041 - RNA, 19 nt, Artificial Sequence
  Description of Artificial Sequence: Synthetic oligonucleotide
  Antisense strand to SEQ ID NO: 1958040
uaaacugagucucaccgcu

SEQ ID NO: 1958042 - RNA, 19 nt, Artificial Sequence
  Description of Artificial Sequence: Synthetic oligonucleotide
  Sense strand starting at position 1750 of SEQ ID NO: 1880314
cacuguuguggcgauggaa

SEQ ID NO: 1958043 - RNA, 19 nt, Artificial Sequence
  Description of Artificial Sequence: Synthetic oligonucleotide
  Antisense strand to SEQ ID NO: 1958042
uuccaucgccacaacagug

SEQ ID NO: 1958044 - RNA, 19 nt, Artificial Sequence
  Description of Artificial Sequence: Synthetic oligonucleotide
  Sense strand starting at position 1881 of SEQ ID NO: 1880314
cuguuuccagccgcuaauu

SEQ ID NO: 1958045 - RNA, 19 nt, Artificial Sequence
  Description of Artificial Sequence: Synthetic oligonucleotide
  Antisense strand to SEQ ID NO: 1958044
aauuagcggcuggaaacag

SEQ ID NO: 1958046 - RNA, 19 nt, Artificial Sequence
  Description of Artificial Sequence: Synthetic oligonucleotide
  Sense strand starting at position 2033 of SEQ ID NO: 1880314
cagucuaucgguuauccca

SEQ ID NO: 1958047 - RNA, 19 nt, Artificial Sequence
  Description of Artificial Sequence: Synthetic oligonucleotide
  Antisense strand to SEQ ID NO: 1958046
ugggauaaccgauagacug

SEQ ID NO: 1958048 - RNA, 19 nt, Artificial Sequence
  Description of Artificial Sequence: Synthetic oligonucleotide
  Sense strand starting at position 2041 of SEQ ID NO: 1880314
cgguuaucccaaggagaac

SEQ ID NO: 1958049 - RNA, 19 nt, Artificial Sequence
  Description of Artificial Sequence: Synthetic oligonucleotide
  Antisense strand to SEQ ID NO: 1958048
guucuccuugggauaaccg

SEQ ID NO: 1958050 - RNA, 19 nt, Artificial Sequence
  Description of Artificial Sequence: Synthetic oligonucleotide
  Sense strand starting at position 2145 of SEQ ID NO: 1880314
cagugaagcgucuaaggga

SEQ ID NO: 1958051 - RNA, 19 nt, Artificial Sequence
  Description of Artificial Sequence: Synthetic oligonucleotide
  Antisense strand to SEQ ID NO: 1958050
ucccuuagacgcuucacug

SEQ ID NO: 1958052 - RNA, 19 nt, Artificial Sequence
  Description of Artificial Sequence: Synthetic oligonucleotide
  Sense strand starting at position 2560 of SEQ ID NO: 1880314
acgcauuuguguucgaaua

SEQ ID NO: 1958053 - RNA, 19 nt, Artificial Sequence
  Description of Artificial Sequence: Synthetic oligonucleotide
  Antisense strand to SEQ ID NO: 1958052
uauucgaacacaaaugcgu

SEQ ID NO: 1958054 - RNA, 19 nt, Artificial Sequence
  Description of Artificial Sequence: Synthetic oligonucleotide
  Sense strand starting at position 2561 of SEQ ID NO: 1880314
cgcauuuguguucgaauau

SEQ ID NO: 1958055 - RNA, 19 nt, Artificial Sequence
  Description of Artificial Sequence: Synthetic oligonucleotide
  Antisense strand to SEQ ID NO: 1958054
auauucgaacacaaaugcg

SEQ ID NO: 1958056 - RNA, 19 nt, Artificial Sequence
  Description of Artificial Sequence: Synthetic oligonucleotide
  Sense strand starting at position 2572 of SEQ ID NO: 1880314
ucgaauauccgagcgucuu

SEQ ID NO: 1958057 - RNA, 19 nt, Artificial Sequence
  Description of Artificial Sequence: Synthetic oligonucleotide
  Antisense strand to SEQ ID NO: 1958056
aagacgcucggauauucga

SEQ ID NO: 1958058 - RNA, 19 nt, Artificial Sequence
  Description of Artificial Sequence: Synthetic oligonucleotide
  Sense strand starting at position 2665 of SEQ ID NO: 1880314
ugguauuaauuacuuguca

SEQ ID NO: 1958059 - RNA, 19 nt, Artificial Sequence
  Description of Artificial Sequence: Synthetic oligonucleotide
  Antisense strand to SEQ ID NO: 1958058
ugacaaguaauuaauacca

SEQ ID NO: 1958060 - RNA, 19 nt, Artificial Sequence
  Description of Artificial Sequence: Synthetic oligonucleotide
  Sense strand starting at position 2722 of SEQ ID NO: 1880314
gugugcagugugucaaguu

SEQ ID NO: 1958061 - RNA, 19 nt, Artificial Sequence
  Description of Artificial Sequence: Synthetic oligonucleotide
  Antisense strand to SEQ ID NO: 1958060
aacuugacacacugcacac

SEQ ID NO: 1958062 - RNA, 19 nt, Artificial Sequence
  Description of Artificial Sequence: Synthetic oligonucleotide
  Sense strand starting at position 2764 of SEQ ID NO: 1880314
ucuuguccuguagaaauuc

SEQ ID NO: 1958063 - RNA, 19 nt, Artificial Sequence
  Description of Artificial Sequence: Synthetic oligonucleotide
  Antisense strand to SEQ ID NO: 1958062
gaauuucuacaggacaaga

SEQ ID NO: 1958064 - RNA, 19 nt, Artificial Sequence
  Description of Artificial Sequence: Synthetic oligonucleotide
  Sense strand starting at position 2772 of SEQ ID NO: 1880314
uguagaaauucucuuuaga

SEQ ID NO: 1958065 - RNA, 19 nt, Artificial Sequence
  Description of Artificial Sequence: Synthetic oligonucleotide
  Antisense strand to SEQ ID NO: 1958064
ucuaaagagaauuucuaca

SEQ ID NO: 1958066 - RNA, 19 nt, Artificial Sequence
  Description of Artificial Sequence: Synthetic oligonucleotide
  Sense strand starting at position 3716 of SEQ ID NO: 1880314
uuuagaaaguccucaaguc

SEQ ID NO: 1958067 - RNA, 19 nt, Artificial Sequence
  Description of Artificial Sequence: Synthetic oligonucleotide
  Antisense strand to SEQ ID NO: 1958066
gacuugaggacuuucuaaa

SEQ ID NO: 1958068 - RNA, 19 nt, Artificial Sequence
  Description of Artificial Sequence: Synthetic oligonucleotide
  Sense strand starting at position 3717 of SEQ ID NO: 1880314
uuagaaaguccucaaguca

SEQ ID NO: 1958069 - RNA, 19 nt, Artificial Sequence
  Description of Artificial Sequence: Synthetic oligonucleotide
  Antisense strand to SEQ ID NO: 1958068
ugacuugaggacuuucuaa

SEQ ID NO: 1958070 - RNA, 19 nt, Artificial Sequence
  Description of Artificial Sequence: Synthetic oligonucleotide
  Sense strand starting at position 3757 of SEQ ID NO: 1880314
ccuaguaaccacuguuuau

SEQ ID NO: 1958071 - RNA, 19 nt, Artificial Sequence
  Description of Artificial Sequence: Synthetic oligonucleotide
  Antisense strand to SEQ ID NO: 1958070
auaaacagugguuacuagg

SEQ ID NO: 1958072 - RNA, 19 nt, Artificial Sequence
  Description of Artificial Sequence: Synthetic oligonucleotide
  Sense strand starting at position 3881 of SEQ ID NO: 1880314
gguguauuggaugagcuga

SEQ ID NO: 1958073 - RNA, 19 nt, Artificial Sequence
  Description of Artificial Sequence: Synthetic oligonucleotide
  Antisense strand to SEQ ID NO: 1958072
ucagcucauccaauacacc

SEQ ID NO: 1958074 - RNA, 19 nt, Artificial Sequence
  Description of Artificial Sequence: Synthetic oligonucleotide
  Sense strand starting at position 76 of SEQ ID NO: 1880315
gccaauagccauuaaaugu

SEQ ID NO: 1958075 - RNA, 19 nt, Artificial Sequence
  Description of Artificial Sequence: Synthetic oligonucleotide
  Antisense strand to SEQ ID NO: 1958074
acauuuaauggcuauuggc

SEQ ID NO: 1958076 - RNA, 19 nt, Artificial Sequence
  Description of Artificial Sequence: Synthetic oligonucleotide
  Sense strand starting at position 286 of SEQ ID NO: 1880315
ucucuuggccucuaugaua

SEQ ID NO: 1958077 - RNA, 19 nt, Artificial Sequence
  Description of Artificial Sequence: Synthetic oligonucleotide
  Antisense strand to SEQ ID NO: 1958076
uaucauagaggccaagaga

SEQ ID NO: 1958078 - RNA, 19 nt, Artificial Sequence
  Description of Artificial Sequence: Synthetic oligonucleotide
  Sense strand starting at position 384 of SEQ ID NO: 1880315
guugaagugcuccaggauu

SEQ ID NO: 1958079 - RNA, 19 nt, Artificial Sequence
  Description of Artificial Sequence: Synthetic oligonucleotide
  Antisense strand to SEQ ID NO: 1958078
aauccuggagcacuucaac

SEQ ID NO: 1958080 - RNA, 19 nt, Artificial Sequence
  Description of Artificial Sequence: Synthetic oligonucleotide
  Sense strand starting at position 386 of SEQ ID NO: 1880315
ugaagugcuccaggauuag

SEQ ID NO: 1958081 - RNA, 19 nt, Artificial Sequence
  Description of Artificial Sequence: Synthetic oligonucleotide
  Antisense strand to SEQ ID NO: 1958080
cuaauccuggagcacuuca

SEQ ID NO: 1958082 - RNA, 19 nt, Artificial Sequence
  Description of Artificial Sequence: Synthetic oligonucleotide
  Sense strand starting at position 580 of SEQ ID NO: 1880315
agaauucccuaugcuggau

SEQ ID NO: 1958083 - RNA, 19 nt, Artificial Sequence
  Description of Artificial Sequence: Synthetic oligonucleotide
  Antisense strand to SEQ ID NO: 1958082
auccagcauagggaauucu

SEQ ID NO: 1958084 - RNA, 19 nt, Artificial Sequence
  Description of Artificial Sequence: Synthetic oligonucleotide
  Sense strand starting at position 679 of SEQ ID NO: 1880315
guaguugacccagaggcuu

SEQ ID NO: 1958085 - RNA, 19 nt, Artificial Sequence
  Description of Artificial Sequence: Synthetic oligonucleotide
  Antisense strand to SEQ ID NO: 1958084
aagccucugggucaacuac

SEQ ID NO: 1958086 - RNA, 19 nt, Artificial Sequence
  Description of Artificial Sequence: Synthetic oligonucleotide
  Sense strand starting at position 785 of SEQ ID NO: 1880315
cauguuaucggauggaacu

SEQ ID NO: 1958087 - RNA, 19 nt, Artificial Sequence
  Description of Artificial Sequence: Synthetic oligonucleotide
  Antisense strand to SEQ ID NO: 1958086
aguuccauccgauaacaug

SEQ ID NO: 1958088 - RNA, 19 nt, Artificial Sequence
  Description of Artificial Sequence: Synthetic oligonucleotide
  Sense strand starting at position 786 of SEQ ID NO: 1880315
auguuaucggauggaacuu

SEQ ID NO: 1958089 - RNA, 19 nt, Artificial Sequence
  Description of Artificial Sequence: Synthetic oligonucleotide
  Antisense strand to SEQ ID NO: 1958088
aaguuccauccgauaacau

SEQ ID NO: 1958090 - RNA, 19 nt, Artificial Sequence
  Description of Artificial Sequence: Synthetic oligonucleotide
  Sense strand starting at position 865 of SEQ ID NO: 1880315
uugcaugguagagauauau

SEQ ID NO: 1958091 - RNA, 19 nt, Artificial Sequence
  Description of Artificial Sequence: Synthetic oligonucleotide
  Antisense strand to SEQ ID NO: 1958090
auauaucucuaccaugcaa

SEQ ID NO: 1958092 - RNA, 19 nt, Artificial Sequence
  Description of Artificial Sequence: Synthetic oligonucleotide
  Sense strand starting at position 900 of SEQ ID NO: 1880315
uuuccuuuguuacuggaaa

SEQ ID NO: 1958093 - RNA, 19 nt, Artificial Sequence
  Description of Artificial Sequence: Synthetic oligonucleotide
  Antisense strand to SEQ ID NO: 1958092
uuuccaguaacaaaggaaa

SEQ ID NO: 1958094 - RNA, 19 nt, Artificial Sequence
  Description of Artificial Sequence: Synthetic oligonucleotide
  Sense strand starting at position 950 of SEQ ID NO: 1880315
gguauuugauaguauaaga

SEQ ID NO: 1958095 - RNA, 19 nt, Artificial Sequence
  Description of Artificial Sequence: Synthetic oligonucleotide
  Antisense strand to SEQ ID NO: 1958094
ucuuauacuaucaaauacc

SEQ ID NO: 1958096 - RNA, 19 nt, Artificial Sequence
  Description of Artificial Sequence: Synthetic oligonucleotide
  Sense strand starting at position 961 of SEQ ID NO: 1880315
guauaagaggaguaggcua

SEQ ID NO: 1958097 - RNA, 19 nt, Artificial Sequence
  Description of Artificial Sequence: Synthetic oligonucleotide
  Antisense strand to SEQ ID NO: 1958096
uagccuacuccucuuauac

SEQ ID NO: 1958098 - RNA, 19 nt, Artificial Sequence
  Description of Artificial Sequence: Synthetic oligonucleotide
  Sense strand starting at position 1040 of SEQ ID NO: 1880315
uccugcaaaggugaucaau

SEQ ID NO: 1958099 - RNA, 19 nt, Artificial Sequence
  Description of Artificial Sequence: Synthetic oligonucleotide
  Antisense strand to SEQ ID NO: 1958098
auugaucaccuuugcagga

SEQ ID NO: 1958100 - RNA, 19 nt, Artificial Sequence
  Description of Artificial Sequence: Synthetic oligonucleotide
  Sense strand starting at position 1203 of SEQ ID NO: 1880315
ccuaauagacuugguaacu

SEQ ID NO: 1958101 - RNA, 19 nt, Artificial Sequence
  Description of Artificial Sequence: Synthetic oligonucleotide
  Antisense strand to SEQ ID NO: 1958100
aguuaccaagucuauuagg

SEQ ID NO: 1958102 - RNA, 19 nt, Artificial Sequence
  Description of Artificial Sequence: Synthetic oligonucleotide
  Sense strand starting at position 1204 of SEQ ID NO: 1880315
cuaauagacuugguaacuu

SEQ ID NO: 1958103 - RNA, 19 nt, Artificial Sequence
  Description of Artificial Sequence: Synthetic oligonucleotide
  Antisense strand to SEQ ID NO: 1958102
aaguuaccaagucuauuag

SEQ ID NO: 1958104 - RNA, 19 nt, Artificial Sequence
  Description of Artificial Sequence: Synthetic oligonucleotide
  Sense strand starting at position 1508 of SEQ ID NO: 1880315
aggagauaaucgguuucuu

SEQ ID NO: 1958105 - RNA, 19 nt, Artificial Sequence
  Description of Artificial Sequence: Synthetic oligonucleotide
  Antisense strand to SEQ ID NO: 1958104
aagaaaccgauuaucuccu

SEQ ID NO: 1958106 - RNA, 19 nt, Artificial Sequence
  Description of Artificial Sequence: Synthetic oligonucleotide
  Sense strand starting at position 1736 of SEQ ID NO: 1880315
gugauuagcgaucagaaua

SEQ ID NO: 1958107 - RNA, 19 nt, Artificial Sequence
  Description of Artificial Sequence: Synthetic oligonucleotide
  Antisense strand to SEQ ID NO: 1958106
uauucugaucgcuaaucac

SEQ ID NO: 1958108 - RNA, 19 nt, Artificial Sequence
  Description of Artificial Sequence: Synthetic oligonucleotide
  Sense strand starting at position 1870 of SEQ ID NO: 1880315
ugaggacguagucauccaa

SEQ ID NO: 1958109 - RNA, 19 nt, Artificial Sequence
  Description of Artificial Sequence: Synthetic oligonucleotide
  Antisense strand to SEQ ID NO: 1958108
uuggaugacuacguccuca

SEQ ID NO: 1958110 - RNA, 19 nt, Artificial Sequence
  Description of Artificial Sequence: Synthetic oligonucleotide
  Sense strand starting at position 2000 of SEQ ID NO: 1880315
augacuucucaagauggcu

SEQ ID NO: 1958111 - RNA, 19 nt, Artificial Sequence
  Description of Artificial Sequence: Synthetic oligonucleotide
  Antisense strand to SEQ ID NO: 1958110
agccaucuugagaagucau

SEQ ID NO: 1958112 - RNA, 19 nt, Artificial Sequence
  Description of Artificial Sequence: Synthetic oligonucleotide
  Sense strand starting at position 2217 of SEQ ID NO: 1880315
uauugauggcaaggucaca

SEQ ID NO: 1958113 - RNA, 19 nt, Artificial Sequence
  Description of Artificial Sequence: Synthetic oligonucleotide
  Antisense strand to SEQ ID NO: 1958112
ugugaccuugccaucaaua

SEQ ID NO: 1958114 - RNA, 19 nt, Artificial Sequence
  Description of Artificial Sequence: Synthetic oligonucleotide
  Sense strand starting at position 2304 of SEQ ID NO: 1880315
cgggcauaacaagauguuu

SEQ ID NO: 1958115 - RNA, 19 nt, Artificial Sequence
  Description of Artificial Sequence: Synthetic oligonucleotide
  Antisense strand to SEQ ID NO: 1958114
aaacaucuuguuaugcccg

SEQ ID NO: 1958116 - RNA, 19 nt, Artificial Sequence
  Description of Artificial Sequence: Synthetic oligonucleotide
  Sense strand starting at position 2344 of SEQ ID NO: 1880315
uugcucugaccuggaacua

SEQ ID NO: 1958117 - RNA, 19 nt, Artificial Sequence
  Description of Artificial Sequence: Synthetic oligonucleotide
  Antisense strand to SEQ ID NO: 1958116
uaguuccaggucagagcaa

SEQ ID NO: 1958118 - RNA, 19 nt, Artificial Sequence
  Description of Artificial Sequence: Synthetic oligonucleotide
  Sense strand starting at position 2345 of SEQ ID NO: 1880315
ugcucugaccuggaacuaa

SEQ ID NO: 1958119 - RNA, 19 nt, Artificial Sequence
  Description of Artificial Sequence: Synthetic oligonucleotide
  Antisense strand to SEQ ID NO: 1958118
uuaguuccaggucagagca

SEQ ID NO: 1958120 - RNA, 19 nt, Artificial Sequence
  Description of Artificial Sequence: Synthetic oligonucleotide
  Sense strand starting at position 2446 of SEQ ID NO: 1880315
cuacuagguugaucuucua

SEQ ID NO: 1958121 - RNA, 19 nt, Artificial Sequence
  Description of Artificial Sequence: Synthetic oligonucleotide
  Antisense strand to SEQ ID NO: 1958120
uagaagaucaaccuaguag

SEQ ID NO: 1958122 - RNA, 19 nt, Artificial Sequence
  Description of Artificial Sequence: Synthetic oligonucleotide
  Sense strand starting at position 2478 of SEQ ID NO: 1880315
caaugagcaugguuagaaa

SEQ ID NO: 1958123 - RNA, 19 nt, Artificial Sequence
  Description of Artificial Sequence: Synthetic oligonucleotide
  Antisense strand to SEQ ID NO: 1958122
uuucuaaccaugcucauug

SEQ ID NO: 1958124 - RNA, 19 nt, Artificial Sequence
  Description of Artificial Sequence: Synthetic oligonucleotide
  Sense strand starting at position 2738 of SEQ ID NO: 1880315
ggucgagagcgccuguaau

SEQ ID NO: 1958125 - RNA, 19 nt, Artificial Sequence
  Description of Artificial Sequence: Synthetic oligonucleotide
  Antisense strand to SEQ ID NO: 1958124
auuacaggcgcucucgacc

SEQ ID NO: 1958126 - RNA, 19 nt, Artificial Sequence
  Description of Artificial Sequence: Synthetic oligonucleotide
  Sense strand starting at position 2740 of SEQ ID NO: 1880315
ucgagagcgccuguaauuc

SEQ ID NO: 1958127 - RNA, 19 nt, Artificial Sequence
  Description of Artificial Sequence: Synthetic oligonucleotide
  Antisense strand to SEQ ID NO: 1958126
gaauuacaggcgcucucga

SEQ ID NO: 1958128 - RNA, 19 nt, Artificial Sequence
  Description of Artificial Sequence: Synthetic oligonucleotide
  Sense strand starting at position 2911 of SEQ ID NO: 1880315
acgcuuauauuaucuaaag

SEQ ID NO: 1958129 - RNA, 19 nt, Artificial Sequence
  Description of Artificial Sequence: Synthetic oligonucleotide
  Antisense strand to SEQ ID NO: 1958128
cuuuagauaauauaagcgu

SEQ ID NO: 1958130 - RNA, 19 nt, Artificial Sequence
  Description of Artificial Sequence: Synthetic oligonucleotide
  Sense strand starting at position 3292 of SEQ ID NO: 1880315
augucaauuucucucuugu

SEQ ID NO: 1958131 - RNA, 19 nt, Artificial Sequence
  Description of Artificial Sequence: Synthetic oligonucleotide
  Antisense strand to SEQ ID NO: 1958130
acaagagagaaauugacau

SEQ ID NO: 1958132 - RNA, 19 nt, Artificial Sequence
  Description of Artificial Sequence: Synthetic oligonucleotide
  Sense strand starting at position 3294 of SEQ ID NO: 1880315
gucaauuucucucuuguca

SEQ ID NO: 1958133 - RNA, 19 nt, Artificial Sequence
  Description of Artificial Sequence: Synthetic oligonucleotide
  Antisense strand to SEQ ID NO: 1958132
ugacaagagagaaauugac

SEQ ID NO: 1958134 - RNA, 19 nt, Artificial Sequence
  Description of Artificial Sequence: Synthetic oligonucleotide
  Sense strand starting at position 3301 of SEQ ID NO: 1880315
ucucucuugucauuuaggu

SEQ ID NO: 1958135 - RNA, 19 nt, Artificial Sequence
  Description of Artificial Sequence: Synthetic oligonucleotide
  Antisense strand to SEQ ID NO: 1958134
accuaaaugacaagagaga

SEQ ID NO: 1958136 - RNA, 19 nt, Artificial Sequence
  Description of Artificial Sequence: Synthetic oligonucleotide
  Sense strand starting at position 3308 of SEQ ID NO: 1880315
ugucauuuagguugucuga

SEQ ID NO: 1958137 - RNA, 19 nt, Artificial Sequence
  Description of Artificial Sequence: Synthetic oligonucleotide
  Antisense strand to SEQ ID NO: 1958136
ucagacaaccuaaaugaca

SEQ ID NO: 1958138 - RNA, 19 nt, Artificial Sequence
  Description of Artificial Sequence: Synthetic oligonucleotide
  Sense strand starting at position 3352 of SEQ ID NO: 1880315
ggaauuagucauggaagca

SEQ ID NO: 1958139 - RNA, 19 nt, Artificial Sequence
  Description of Artificial Sequence: Synthetic oligonucleotide
  Antisense strand to SEQ ID NO: 1958138
ugcuuccaugacuaauucc

SEQ ID NO: 1958140 - RNA, 19 nt, Artificial Sequence
  Description of Artificial Sequence: Synthetic oligonucleotide
  Sense strand starting at position 3604 of SEQ ID NO: 1880315
gucauucuggguuaauaua

SEQ ID NO: 1958141 - RNA, 19 nt, Artificial Sequence
  Description of Artificial Sequence: Synthetic oligonucleotide
  Antisense strand to SEQ ID NO: 1958140
uauauuaacccagaaugac

SEQ ID NO: 1958142 - RNA, 19 nt, Artificial Sequence
  Description of Artificial Sequence: Synthetic oligonucleotide
  Sense strand starting at position 3612 of SEQ ID NO: 1880315
ggguuaauauacuuaguaa

SEQ ID NO: 1958143 - RNA, 19 nt, Artificial Sequence
  Description of Artificial Sequence: Synthetic oligonucleotide
  Antisense strand to SEQ ID NO: 1958142
uuacuaaguauauuaaccc

SEQ ID NO: 1958144 - RNA, 19 nt, Artificial Sequence
  Description of Artificial Sequence: Synthetic oligonucleotide
  Sense strand starting at position 3697 of SEQ ID NO: 1880315
guguuuguuauguuuccuu

SEQ ID NO: 1958145 - RNA, 19 nt, Artificial Sequence
  Description of Artificial Sequence: Synthetic oligonucleotide
  Antisense strand to SEQ ID NO: 1958144
aaggaaacauaacaaacac

SEQ ID NO: 1958146 - RNA, 19 nt, Artificial Sequence
  Description of Artificial Sequence: Synthetic oligonucleotide
  Sense strand starting at position 3765 of SEQ ID NO: 1880315
gucuguagucuuuauuugu

SEQ ID NO: 1958147 - RNA, 19 nt, Artificial Sequence
  Description of Artificial Sequence: Synthetic oligonucleotide
  Antisense strand to SEQ ID NO: 1958146
acaaauaaagacuacagac

SEQ ID NO: 1958148 - RNA, 19 nt, Artificial Sequence
  Description of Artificial Sequence: Synthetic oligonucleotide
  Sense strand starting at position 3771 of SEQ ID NO: 1880315
agucuuuauuugucacuuu

SEQ ID NO: 1958149 - RNA, 19 nt, Artificial Sequence
  Description of Artificial Sequence: Synthetic oligonucleotide
  Antisense strand to SEQ ID NO: 1958148
aaagugacaaauaaagacu

SEQ ID NO: 1958150 - RNA, 19 nt, Artificial Sequence
  Description of Artificial Sequence: Synthetic oligonucleotide
  Sense strand starting at position 3774 of SEQ ID NO: 1880315
cuuuauuugucacuuuguu

SEQ ID NO: 1958151 - RNA, 19 nt, Artificial Sequence
  Description of Artificial Sequence: Synthetic oligonucleotide
  Antisense strand to SEQ ID NO: 1958150
aacaaagugacaaauaaag

SEQ ID NO: 1958152 - RNA, 19 nt, Artificial Sequence
  Description of Artificial Sequence: Synthetic oligonucleotide
  Sense strand starting at position 3853 of SEQ ID NO: 1880315
auagaauagccgcaagaau

SEQ ID NO: 1958153 - RNA, 19 nt, Artificial Sequence
  Description of Artificial Sequence: Synthetic oligonucleotide
  Antisense strand to SEQ ID NO: 1958152
auucuugcggcuauucuau

SEQ ID NO: 1958154 - RNA, 19 nt, Artificial Sequence
  Description of Artificial Sequence: Synthetic oligonucleotide
  Sense strand starting at position 47 of SEQ ID NO: 1880316
cagaaagucuucuuugguc

SEQ ID NO: 1958155 - RNA, 19 nt, Artificial Sequence
  Description of Artificial Sequence: Synthetic oligonucleotide
  Antisense strand to SEQ ID NO: 1958154
gaccaaagaagacuuucug

SEQ ID NO: 1958156 - RNA, 19 nt, Artificial Sequence
  Description of Artificial Sequence: Synthetic oligonucleotide
  Sense strand starting at position 49 of SEQ ID NO: 1880316
gaaagucuucuuuggucca

SEQ ID NO: 1958157 - RNA, 19 nt, Artificial Sequence
  Description of Artificial Sequence: Synthetic oligonucleotide
  Antisense strand to SEQ ID NO: 1958156
uggaccaaagaagacuuuc

SEQ ID NO: 1958158 - RNA, 19 nt, Artificial Sequence
  Description of Artificial Sequence: Synthetic oligonucleotide
  Sense strand starting at position 199 of SEQ ID NO: 1880316
guaugcguguuacucaaca

SEQ ID NO: 1958159 - RNA, 19 nt, Artificial Sequence
  Description of Artificial Sequence: Synthetic oligonucleotide
  Antisense strand to SEQ ID NO: 1958158
uguugaguaacacgcauac

SEQ ID NO: 1958160 - RNA, 19 nt, Artificial Sequence
  Description of Artificial Sequence: Synthetic oligonucleotide
  Sense strand starting at position 378 of SEQ ID NO: 1880316
ggacguuugaaucacccaa

SEQ ID NO: 1958161 - RNA, 19 nt, Artificial Sequence
  Description of Artificial Sequence: Synthetic oligonucleotide
  Antisense strand to SEQ ID NO: 1958160
uugggugauucaaacgucc

SEQ ID NO: 1958162 - RNA, 19 nt, Artificial Sequence
  Description of Artificial Sequence: Synthetic oligonucleotide
  Sense strand starting at position 413 of SEQ ID NO: 1880316
ugaugcuaacgugauaaac

SEQ ID NO: 1958163 - RNA, 19 nt, Artificial Sequence
  Description of Artificial Sequence: Synthetic oligonucleotide
  Antisense strand to SEQ ID NO: 1958162
guuuaucacguuagcauca

SEQ ID NO: 1958164 - RNA, 19 nt, Artificial Sequence
  Description of Artificial Sequence: Synthetic oligonucleotide
  Sense strand starting at position 421 of SEQ ID NO: 1880316
acgugauaaacagaaacgu

SEQ ID NO: 1958165 - RNA, 19 nt, Artificial Sequence
  Description of Artificial Sequence: Synthetic oligonucleotide
  Antisense strand to SEQ ID NO: 1958164
acguuucuguuuaucacgu

SEQ ID NO: 1958166 - RNA, 19 nt, Artificial Sequence
  Description of Artificial Sequence: Synthetic oligonucleotide
  Sense strand starting at position 450 of SEQ ID NO: 1880316
agaaauuacuagguuagca

SEQ ID NO: 1958167 - RNA, 19 nt, Artificial Sequence
  Description of Artificial Sequence: Synthetic oligonucleotide
  Antisense strand to SEQ ID NO: 1958166
ugcuaaccuaguaauuucu

SEQ ID NO: 1958168 - RNA, 19 nt, Artificial Sequence
  Description of Artificial Sequence: Synthetic oligonucleotide
  Sense strand starting at position 671 of SEQ ID NO: 1880316
uguaauaacucuguaaaga

SEQ ID NO: 1958169 - RNA, 19 nt, Artificial Sequence
  Description of Artificial Sequence: Synthetic oligonucleotide
  Antisense strand to SEQ ID NO: 1958168
ucuuuacagaguuauuaca

SEQ ID NO: 1958170 - RNA, 19 nt, Artificial Sequence
  Description of Artificial Sequence: Synthetic oligonucleotide
  Sense strand starting at position 732 of SEQ ID NO: 1880316
uuaacagugccuugcaguu

SEQ ID NO: 1958171 - RNA, 19 nt, Artificial Sequence
  Description of Artificial Sequence: Synthetic oligonucleotide
  Antisense strand to SEQ ID NO: 1958170
aacugcaaggcacuguuaa

SEQ ID NO: 1958172 - RNA, 19 nt, Artificial Sequence
  Description of Artificial Sequence: Synthetic oligonucleotide
  Sense strand starting at position 810 of SEQ ID NO: 1880316
cgugauauacguuuaccgu

SEQ ID NO: 1958173 - RNA, 19 nt, Artificial Sequence
  Description of Artificial Sequence: Synthetic oligonucleotide
  Antisense strand to SEQ ID NO: 1958172
acgguaaacguauaucacg

SEQ ID NO: 1958174 - RNA, 19 nt, Artificial Sequence
  Description of Artificial Sequence: Synthetic oligonucleotide
  Sense strand starting at position 811 of SEQ ID NO: 1880316
gugauauacguuuaccguu

SEQ ID NO: 1958175 - RNA, 19 nt, Artificial Sequence
  Description of Artificial Sequence: Synthetic oligonucleotide
  Antisense strand to SEQ ID NO: 1958174
aacgguaaacguauaucac

SEQ ID NO: 1958176 - RNA, 19 nt, Artificial Sequence
  Description of Artificial Sequence: Synthetic oligonucleotide
  Sense strand starting at position 813 of SEQ ID NO: 1880316
gauauacguuuaccguuaa

SEQ ID NO: 1958177 - RNA, 19 nt, Artificial Sequence
  Description of Artificial Sequence: Synthetic oligonucleotide
  Antisense strand to SEQ ID NO: 1958176
uuaacgguaaacguauauc

SEQ ID NO: 1958178 - RNA, 19 nt, Artificial Sequence
  Description of Artificial Sequence: Synthetic oligonucleotide
  Sense strand starting at position 1010 of SEQ ID NO: 1880316
agagcuggaacguaauauu

SEQ ID NO: 1958179 - RNA, 19 nt, Artificial Sequence
  Description of Artificial Sequence: Synthetic oligonucleotide
  Antisense strand to SEQ ID NO: 1958178
aauauuacguuccagcucu

SEQ ID NO: 1958180 - RNA, 19 nt, Artificial Sequence
  Description of Artificial Sequence: Synthetic oligonucleotide
  Sense strand starting at position 1013 of SEQ ID NO: 1880316
gcuggaacguaauauuuag

SEQ ID NO: 1958181 - RNA, 19 nt, Artificial Sequence
  Description of Artificial Sequence: Synthetic oligonucleotide
  Antisense strand to SEQ ID NO: 1958180
cuaaauauuacguuccagc

SEQ ID NO: 1958182 - RNA, 19 nt, Artificial Sequence
  Description of Artificial Sequence: Synthetic oligonucleotide
  Sense strand starting at position 1182 of SEQ ID NO: 1880316
uaggcuugacgccaaauaa

SEQ ID NO: 1958183 - RNA, 19 nt, Artificial Sequence
  Description of Artificial Sequence: Synthetic oligonucleotide
  Antisense strand to SEQ ID NO: 1958182
uuauuuggcgucaagccua

SEQ ID NO: 1958184 - RNA, 19 nt, Artificial Sequence
  Description of Artificial Sequence: Synthetic oligonucleotide
  Sense strand starting at position 1207 of SEQ ID NO: 1880316
auaagaacugcugaucuuu

SEQ ID NO: 1958185 - RNA, 19 nt, Artificial Sequence
  Description of Artificial Sequence: Synthetic oligonucleotide
  Antisense strand to SEQ ID NO: 1958184
aaagaucagcaguucuuau

SEQ ID NO: 1958186 - RNA, 19 nt, Artificial Sequence
  Description of Artificial Sequence: Synthetic oligonucleotide
  Sense strand starting at position 2702 of SEQ ID NO: 1880316
cccagaccacuugguuuau

SEQ ID NO: 1958187 - RNA, 19 nt, Artificial Sequence
  Description of Artificial Sequence: Synthetic oligonucleotide
  Antisense strand to SEQ ID NO: 1958186
auaaaccaaguggucuggg

SEQ ID NO: 1958188 - RNA, 19 nt, Artificial Sequence
  Description of Artificial Sequence: Synthetic oligonucleotide
  Sense strand starting at position 2742 of SEQ ID NO: 1880316
ggcaaacgcuauccaacua

SEQ ID NO: 1958189 - RNA, 19 nt, Artificial Sequence
  Description of Artificial Sequence: Synthetic oligonucleotide
  Antisense strand to SEQ ID NO: 1958188
uaguuggauagcguuugcc

SEQ ID NO: 1958190 - RNA, 19 nt, Artificial Sequence
  Description of Artificial Sequence: Synthetic oligonucleotide
  Sense strand starting at position 2778 of SEQ ID NO: 1880316
uucuaaaugagguguugaa

SEQ ID NO: 1958191 - RNA, 19 nt, Artificial Sequence
  Description of Artificial Sequence: Synthetic oligonucleotide
  Antisense strand to SEQ ID NO: 1958190
uucaacaccucauuuagaa

SEQ ID NO: 1958192 - RNA, 19 nt, Artificial Sequence
  Description of Artificial Sequence: Synthetic oligonucleotide
  Sense strand starting at position 2897 of SEQ ID NO: 1880316
aggauuugaugugggaaca

SEQ ID NO: 1958193 - RNA, 19 nt, Artificial Sequence
  Description of Artificial Sequence: Synthetic oligonucleotide
  Antisense strand to SEQ ID NO: 1958192
uguucccacaucaaauccu

SEQ ID NO: 1958194 - RNA, 19 nt, Artificial Sequence
  Description of Artificial Sequence: Synthetic oligonucleotide
  Sense strand starting at position 2938 of SEQ ID NO: 1880316
uccuguauuucuuccugua

SEQ ID NO: 1958195 - RNA, 19 nt, Artificial Sequence
  Description of Artificial Sequence: Synthetic oligonucleotide
  Antisense strand to SEQ ID NO: 1958194
uacaggaagaaauacagga

SEQ ID NO: 1958196 - RNA, 19 nt, Artificial Sequence
  Description of Artificial Sequence: Synthetic oligonucleotide
  Sense strand starting at position 2941 of SEQ ID NO: 1880316
uguauuucuuccuguaaga

SEQ ID NO: 1958197 - RNA, 19 nt, Artificial Sequence
  Description of Artificial Sequence: Synthetic oligonucleotide
  Antisense strand to SEQ ID NO: 1958196
ucuuacaggaagaaauaca

SEQ ID NO: 1958198 - RNA, 19 nt, Artificial Sequence
  Description of Artificial Sequence: Synthetic oligonucleotide
  Sense strand starting at position 2969 of SEQ ID NO: 1880316
ugagcuucacucggaguuu

SEQ ID NO: 1958199 - RNA, 19 nt, Artificial Sequence
  Description of Artificial Sequence: Synthetic oligonucleotide
  Antisense strand to SEQ ID NO: 1958198
aaacuccgagugaagcuca

SEQ ID NO: 1958200 - RNA, 19 nt, Artificial Sequence
  Description of Artificial Sequence: Synthetic oligonucleotide
  Sense strand starting at position 2978 of SEQ ID NO: 1880316
cucggaguuuguguuguga

SEQ ID NO: 1958201 - RNA, 19 nt, Artificial Sequence
  Description of Artificial Sequence: Synthetic oligonucleotide
  Antisense strand to SEQ ID NO: 1958200
ucacaacacaaacuccgag

SEQ ID NO: 1958202 - RNA, 19 nt, Artificial Sequence
  Description of Artificial Sequence: Synthetic oligonucleotide
  Sense strand starting at position 2986 of SEQ ID NO: 1880316
uuguguugugaauaggguu

SEQ ID NO: 1958203 - RNA, 19 nt, Artificial Sequence
  Description of Artificial Sequence: Synthetic oligonucleotide
  Antisense strand to SEQ ID NO: 1958202
aacccuauucacaacacaa

SEQ ID NO: 1958204 - RNA, 19 nt, Artificial Sequence
  Description of Artificial Sequence: Synthetic oligonucleotide
  Sense strand starting at position 2994 of SEQ ID NO: 1880316
ugaauaggguuucuaaguu

SEQ ID NO: 1958205 - RNA, 19 nt, Artificial Sequence
  Description of Artificial Sequence: Synthetic oligonucleotide
  Antisense strand to SEQ ID NO: 1958204
aacuuagaaacccuauuca

SEQ ID NO: 1958206 - RNA, 19 nt, Artificial Sequence
  Description of Artificial Sequence: Synthetic oligonucleotide
  Sense strand starting at position 2998 of SEQ ID NO: 1880316
uaggguuucuaaguuuaaa

SEQ ID NO: 1958207 - RNA, 19 nt, Artificial Sequence
  Description of Artificial Sequence: Synthetic oligonucleotide
  Antisense strand to SEQ ID NO: 1958206
uuuaaacuuagaaacccua

SEQ ID NO: 1958208 - RNA, 19 nt, Artificial Sequence
  Description of Artificial Sequence: Synthetic oligonucleotide
  Sense strand starting at position 3349 of SEQ ID NO: 1880316
ggaggcaagugauuguuau

SEQ ID NO: 1958209 - RNA, 19 nt, Artificial Sequence
  Description of Artificial Sequence: Synthetic oligonucleotide
  Antisense strand to SEQ ID NO: 1958208
auaacaaucacuugccucc

SEQ ID NO: 1958210 - RNA, 19 nt, Artificial Sequence
  Description of Artificial Sequence: Synthetic oligonucleotide
  Sense strand starting at position 3350 of SEQ ID NO: 1880316
gaggcaagugauuguuaug

SEQ ID NO: 1958211 - RNA, 19 nt, Artificial Sequence
  Description of Artificial Sequence: Synthetic oligonucleotide
  Antisense strand to SEQ ID NO: 1958210
cauaacaaucacuugccuc

SEQ ID NO: 1958212 - RNA, 19 nt, Artificial Sequence
  Description of Artificial Sequence: Synthetic oligonucleotide
  Sense strand starting at position 3408 of SEQ ID NO: 1880316
ugauuauaguaggcaguuu

SEQ ID NO: 1958213 - RNA, 19 nt, Artificial Sequence
  Description of Artificial Sequence: Synthetic oligonucleotide
  Antisense strand to SEQ ID NO: 1958212
aaacugccuacuauaauca

SEQ ID NO: 1958214 - RNA, 19 nt, Artificial Sequence
  Description of Artificial Sequence: Synthetic oligonucleotide
  Sense strand starting at position 3478 of SEQ ID NO: 1880316
gcuuacaauuucuggaaua

SEQ ID NO: 1958215 - RNA, 19 nt, Artificial Sequence
  Description of Artificial Sequence: Synthetic oligonucleotide
  Antisense strand to SEQ ID NO: 1958214
uauuccagaaauuguaagc

SEQ ID NO: 1958216 - RNA, 19 nt, Artificial Sequence
  Description of Artificial Sequence: Synthetic oligonucleotide
  Sense strand starting at position 3479 of SEQ ID NO: 1880316
cuuacaauuucuggaauag

SEQ ID NO: 1958217 - RNA, 19 nt, Artificial Sequence
  Description of Artificial Sequence: Synthetic oligonucleotide
  Antisense strand to SEQ ID NO: 1958216
cuauuccagaaauuguaag

SEQ ID NO: 1958218 - RNA, 19 nt, Artificial Sequence
  Description of Artificial Sequence: Synthetic oligonucleotide
  Sense strand starting at position 3544 of SEQ ID NO: 1880316
caguguuucccggcuguaa

SEQ ID NO: 1958219 - RNA, 19 nt, Artificial Sequence
  Description of Artificial Sequence: Synthetic oligonucleotide
  Antisense strand to SEQ ID NO: 1958218
uuacagccgggaaacacug

SEQ ID NO: 1958220 - RNA, 19 nt, Artificial Sequence
  Description of Artificial Sequence: Synthetic oligonucleotide
  Sense strand starting at position 3545 of SEQ ID NO: 1880316
aguguuucccggcuguaau

SEQ ID NO: 1958221 - RNA, 19 nt, Artificial Sequence
  Description of Artificial Sequence: Synthetic oligonucleotide
  Antisense strand to SEQ ID NO: 1958220
auuacagccgggaaacacu

SEQ ID NO: 1958222 - RNA, 19 nt, Artificial Sequence
  Description of Artificial Sequence: Synthetic oligonucleotide
  Sense strand starting at position 3578 of SEQ ID NO: 1880316
aggccaaaguguucuagac

SEQ ID NO: 1958223 - RNA, 19 nt, Artificial Sequence
  Description of Artificial Sequence: Synthetic oligonucleotide
  Antisense strand to SEQ ID NO: 1958222
gucuagaacacuuuggccu

SEQ ID NO: 1958224 - RNA, 19 nt, Artificial Sequence
  Description of Artificial Sequence: Synthetic oligonucleotide
  Sense strand starting at position 3684 of SEQ ID NO: 1880316
uugggaguaucgcuucaac

SEQ ID NO: 1958225 - RNA, 19 nt, Artificial Sequence
  Description of Artificial Sequence: Synthetic oligonucleotide
  Antisense strand to SEQ ID NO: 1958224
guugaagcgauacucccaa

SEQ ID NO: 1958226 - RNA, 19 nt, Artificial Sequence
  Description of Artificial Sequence: Synthetic oligonucleotide
  Sense strand starting at position 3879 of SEQ ID NO: 1880316
acaauagauuguuucuguu

SEQ ID NO: 1958227 - RNA, 19 nt, Artificial Sequence
  Description of Artificial Sequence: Synthetic oligonucleotide
  Antisense strand to SEQ ID NO: 1958226
aacagaaacaaucuauugu

SEQ ID NO: 1958228 - RNA, 19 nt, Artificial Sequence
  Description of Artificial Sequence: Synthetic oligonucleotide
  Sense strand starting at position 3881 of SEQ ID NO: 1880316
aauagauuguuucuguugu

SEQ ID NO: 1958229 - RNA, 19 nt, Artificial Sequence
  Description of Artificial Sequence: Synthetic oligonucleotide
  Antisense strand to SEQ ID NO: 1958228
acaacagaaacaaucuauu

SEQ ID NO: 1958230 - RNA, 19 nt, Artificial Sequence
  Description of Artificial Sequence: Synthetic oligonucleotide
  Sense strand starting at position 3883 of SEQ ID NO: 1880316
uagauuguuucuguuguga

SEQ ID NO: 1958231 - RNA, 19 nt, Artificial Sequence
  Description of Artificial Sequence: Synthetic oligonucleotide
  Antisense strand to SEQ ID NO: 1958230
ucacaacagaaacaaucua

SEQ ID NO: 1958232 - RNA, 19 nt, Artificial Sequence
  Description of Artificial Sequence: Synthetic oligonucleotide
  Sense strand starting at position 3979 of SEQ ID NO: 1880316
ggguguucuagcuaacaag

SEQ ID NO: 1958233 - RNA, 19 nt, Artificial Sequence
  Description of Artificial Sequence: Synthetic oligonucleotide
  Antisense strand to SEQ ID NO: 1958232
cuuguuagcuagaacaccc

SEQ ID NO: 1958234 - RNA, 19 nt, Artificial Sequence
  Description of Artificial Sequence: Synthetic oligonucleotide
  Sense strand starting at position 42 of SEQ ID NO: 1880317
ccuguauuacuuugggaga

SEQ ID NO: 1958235 - RNA, 19 nt, Artificial Sequence
  Description of Artificial Sequence: Synthetic oligonucleotide
  Antisense strand to SEQ ID NO: 1958234
ucucccaaaguaauacagg

SEQ ID NO: 1958236 - RNA, 19 nt, Artificial Sequence
  Description of Artificial Sequence: Synthetic oligonucleotide
  Sense strand starting at position 285 of SEQ ID NO: 1880317
gucagacuuuagguggaaa

SEQ ID NO: 1958237 - RNA, 19 nt, Artificial Sequence
  Description of Artificial Sequence: Synthetic oligonucleotide
  Antisense strand to SEQ ID NO: 1958236
uuuccaccuaaagucugac

SEQ ID NO: 1958238 - RNA, 19 nt, Artificial Sequence
  Description of Artificial Sequence: Synthetic oligonucleotide
  Sense strand starting at position 333 of SEQ ID NO: 1880317
uauuguuagcugcagaauu

SEQ ID NO: 1958239 - RNA, 19 nt, Artificial Sequence
  Description of Artificial Sequence: Synthetic oligonucleotide
  Antisense strand to SEQ ID NO: 1958238
aauucugcagcuaacaaua

SEQ ID NO: 1958240 - RNA, 19 nt, Artificial Sequence
  Description of Artificial Sequence: Synthetic oligonucleotide
  Sense strand starting at position 650 of SEQ ID NO: 1880317
ugggauuacagccgggaaa

SEQ ID NO: 1958241 - RNA, 19 nt, Artificial Sequence
  Description of Artificial Sequence: Synthetic oligonucleotide
  Antisense strand to SEQ ID NO: 1958240
uuucccggcuguaauccca

SEQ ID NO: 1958242 - RNA, 19 nt, Artificial Sequence
  Description of Artificial Sequence: Synthetic oligonucleotide
  Sense strand starting at position 652 of SEQ ID NO: 1880317
ggauuacagccgggaaaca

SEQ ID NO: 1958243 - RNA, 19 nt, Artificial Sequence
  Description of Artificial Sequence: Synthetic oligonucleotide
  Antisense strand to SEQ ID NO: 1958242
uguuucccggcuguaaucc

SEQ ID NO: 1958244 - RNA, 19 nt, Artificial Sequence
  Description of Artificial Sequence: Synthetic oligonucleotide
  Sense strand starting at position 864 of SEQ ID NO: 1880317
ccuccauggucuuuggcaa

SEQ ID NO: 1958245 - RNA, 19 nt, Artificial Sequence
  Description of Artificial Sequence: Synthetic oligonucleotide
  Antisense strand to SEQ ID NO: 1958244
uugccaaagaccauggagg

SEQ ID NO: 1958246 - RNA, 19 nt, Artificial Sequence
  Description of Artificial Sequence: Synthetic oligonucleotide
  Sense strand starting at position 865 of SEQ ID NO: 1880317
cuccauggucuuuggcaaa

SEQ ID NO: 1958247 - RNA, 19 nt, Artificial Sequence
  Description of Artificial Sequence: Synthetic oligonucleotide
  Antisense strand to SEQ ID NO: 1958246
uuugccaaagaccauggag

SEQ ID NO: 1958248 - RNA, 19 nt, Artificial Sequence
  Description of Artificial Sequence: Synthetic oligonucleotide
  Sense strand starting at position 942 of SEQ ID NO: 1880317
ggugcagcagcgagaucua

SEQ ID NO: 1958249 - RNA, 19 nt, Artificial Sequence
  Description of Artificial Sequence: Synthetic oligonucleotide
  Antisense strand to SEQ ID NO: 1958248
uagaucucgcugcugcacc

SEQ ID NO: 1958250 - RNA, 19 nt, Artificial Sequence
  Description of Artificial Sequence: Synthetic oligonucleotide
  Sense strand starting at position 1371 of SEQ ID NO: 1880317
ccuugucucgcagaaacca

SEQ ID NO: 1958251 - RNA, 19 nt, Artificial Sequence
  Description of Artificial Sequence: Synthetic oligonucleotide
  Antisense strand to SEQ ID NO: 1958250
ugguuucugcgagacaagg

SEQ ID NO: 1958252 - RNA, 19 nt, Artificial Sequence
  Description of Artificial Sequence: Synthetic oligonucleotide
  Sense strand starting at position 1442 of SEQ ID NO: 1880317
ucaauuucucguugcuagu

SEQ ID NO: 1958253 - RNA, 19 nt, Artificial Sequence
  Description of Artificial Sequence: Synthetic oligonucleotide
  Antisense strand to SEQ ID NO: 1958252
acuagcaacgagaaauuga

SEQ ID NO: 1958254 - RNA, 19 nt, Artificial Sequence
  Description of Artificial Sequence: Synthetic oligonucleotide
  Sense strand starting at position 1467 of SEQ ID NO: 1880317
gcguuugccaaguaauuug

SEQ ID NO: 1958255 - RNA, 19 nt, Artificial Sequence
  Description of Artificial Sequence: Synthetic oligonucleotide
  Antisense strand to SEQ ID NO: 1958254
caaauuacuuggcaaacgc

SEQ ID NO: 1958256 - RNA, 19 nt, Artificial Sequence
  Description of Artificial Sequence: Synthetic oligonucleotide
  Sense strand starting at position 1500 of SEQ ID NO: 1880317
aaccaaguggucugggauu

SEQ ID NO: 1958257 - RNA, 19 nt, Artificial Sequence
  Description of Artificial Sequence: Synthetic oligonucleotide
  Antisense strand to SEQ ID NO: 1958256
aaucccagaccacuugguu

SEQ ID NO: 1958258 - RNA, 19 nt, Artificial Sequence
  Description of Artificial Sequence: Synthetic oligonucleotide
  Sense strand starting at position 1571 of SEQ ID NO: 1880317
gcgugacuuccugugcacu

SEQ ID NO: 1958259 - RNA, 19 nt, Artificial Sequence
  Description of Artificial Sequence: Synthetic oligonucleotide
  Antisense strand to SEQ ID NO: 1958258
agugcacaggaagucacgc

SEQ ID NO: 1958260 - RNA, 19 nt, Artificial Sequence
  Description of Artificial Sequence: Synthetic oligonucleotide
  Sense strand starting at position 2521 of SEQ ID NO: 1880317
cggucagggaaguaauguu

SEQ ID NO: 1958261 - RNA, 19 nt, Artificial Sequence
  Description of Artificial Sequence: Synthetic oligonucleotide
  Antisense strand to SEQ ID NO: 1958260
aacauuacuucccugaccg

SEQ ID NO: 1958262 - RNA, 19 nt, Artificial Sequence
  Description of Artificial Sequence: Synthetic oligonucleotide
  Sense strand starting at position 2610 of SEQ ID NO: 1880317
ggagccugcguuguguaau

SEQ ID NO: 1958263 - RNA, 19 nt, Artificial Sequence
  Description of Artificial Sequence: Synthetic oligonucleotide
  Antisense strand to SEQ ID NO: 1958262
auuacacaacgcaggcucc

SEQ ID NO: 1958264 - RNA, 19 nt, Artificial Sequence
  Description of Artificial Sequence: Synthetic oligonucleotide
  Sense strand starting at position 2776 of SEQ ID NO: 1880317
ugcugaaaggccuaagugu

SEQ ID NO: 1958265 - RNA, 19 nt, Artificial Sequence
  Description of Artificial Sequence: Synthetic oligonucleotide
  Antisense strand to SEQ ID NO: 1958264
acacuuaggccuuucagca

SEQ ID NO: 1958266 - RNA, 19 nt, Artificial Sequence
  Description of Artificial Sequence: Synthetic oligonucleotide
  Sense strand starting at position 2860 of SEQ ID NO: 1880317
acuggaguucuuuauguuc

SEQ ID NO: 1958267 - RNA, 19 nt, Artificial Sequence
  Description of Artificial Sequence: Synthetic oligonucleotide
  Antisense strand to SEQ ID NO: 1958266
gaacauaaagaacuccagu

SEQ ID NO: 1958268 - RNA, 19 nt, Artificial Sequence
  Description of Artificial Sequence: Synthetic oligonucleotide
  Sense strand starting at position 2942 of SEQ ID NO: 1880317
gucguagccauugauaaau

SEQ ID NO: 1958269 - RNA, 19 nt, Artificial Sequence
  Description of Artificial Sequence: Synthetic oligonucleotide
  Antisense strand to SEQ ID NO: 1958268
auuuaucaauggcuacgac

SEQ ID NO: 1958270 - RNA, 19 nt, Artificial Sequence
  Description of Artificial Sequence: Synthetic oligonucleotide
  Sense strand starting at position 2971 of SEQ ID NO: 1880317
cccucagcgcuguuagagu

SEQ ID NO: 1958271 - RNA, 19 nt, Artificial Sequence
  Description of Artificial Sequence: Synthetic oligonucleotide
  Antisense strand to SEQ ID NO: 1958270
acucuaacagcgcugaggg

SEQ ID NO: 1958272 - RNA, 19 nt, Artificial Sequence
  Description of Artificial Sequence: Synthetic oligonucleotide
  Sense strand starting at position 3013 of SEQ ID NO: 1880317
ccauuuauuuggcgucaag

SEQ ID NO: 1958273 - RNA, 19 nt, Artificial Sequence
  Description of Artificial Sequence: Synthetic oligonucleotide
  Antisense strand to SEQ ID NO: 1958272
cuugacgccaaauaaaugg

SEQ ID NO: 1958274 - RNA, 19 nt, Artificial Sequence
  Description of Artificial Sequence: Synthetic oligonucleotide
  Sense strand starting at position 3024 of SEQ ID NO: 1880317
gcgucaagccuauucucuu

SEQ ID NO: 1958275 - RNA, 19 nt, Artificial Sequence
  Description of Artificial Sequence: Synthetic oligonucleotide
  Antisense strand to SEQ ID NO: 1958274
aagagaauaggcuugacgc

SEQ ID NO: 1958276 - RNA, 19 nt, Artificial Sequence
  Description of Artificial Sequence: Synthetic oligonucleotide
  Sense strand starting at position 3097 of SEQ ID NO: 1880317
ggauuugaaugggagguau

SEQ ID NO: 1958277 - RNA, 19 nt, Artificial Sequence
  Description of Artificial Sequence: Synthetic oligonucleotide
  Antisense strand to SEQ ID NO: 1958276
auaccucccauucaaaucc

SEQ ID NO: 1958278 - RNA, 19 nt, Artificial Sequence
  Description of Artificial Sequence: Synthetic oligonucleotide
  Sense strand starting at position 3147 of SEQ ID NO: 1880317
uuguucugggaaugagauc

SEQ ID NO: 1958279 - RNA, 19 nt, Artificial Sequence
  Description of Artificial Sequence: Synthetic oligonucleotide
  Antisense strand to SEQ ID NO: 1958278
gaucucauucccagaacaa

SEQ ID NO: 1958280 - RNA, 19 nt, Artificial Sequence
  Description of Artificial Sequence: Synthetic oligonucleotide
  Sense strand starting at position 3327 of SEQ ID NO: 1880317
gguaaaucgauacgcagaa

SEQ ID NO: 1958281 - RNA, 19 nt, Artificial Sequence
  Description of Artificial Sequence: Synthetic oligonucleotide
  Antisense strand to SEQ ID NO: 1958280
uucugcguaucgauuuacc

SEQ ID NO: 1958282 - RNA, 19 nt, Artificial Sequence
  Description of Artificial Sequence: Synthetic oligonucleotide
  Sense strand starting at position 3328 of SEQ ID NO: 1880317
guaaaucgauacgcagaaa

SEQ ID NO: 1958283 - RNA, 19 nt, Artificial Sequence
  Description of Artificial Sequence: Synthetic oligonucleotide
  Antisense strand to SEQ ID NO: 1958282
uuucugcguaucgauuuac

SEQ ID NO: 1958284 - RNA, 19 nt, Artificial Sequence
  Description of Artificial Sequence: Synthetic oligonucleotide
  Sense strand starting at position 3354 of SEQ ID NO: 1880317
ggucauugcguuguuggau

SEQ ID NO: 1958285 - RNA, 19 nt, Artificial Sequence
  Description of Artificial Sequence: Synthetic oligonucleotide
  Antisense strand to SEQ ID NO: 1958284
auccaacaacgcaaugacc

SEQ ID NO: 1958286 - RNA, 19 nt, Artificial Sequence
  Description of Artificial Sequence: Synthetic oligonucleotide
  Sense strand starting at position 3357 of SEQ ID NO: 1880317
cauugcguuguuggauuua

SEQ ID NO: 1958287 - RNA, 19 nt, Artificial Sequence
  Description of Artificial Sequence: Synthetic oligonucleotide
  Antisense strand to SEQ ID NO: 1958286
uaaauccaacaacgcaaug

SEQ ID NO: 1958288 - RNA, 19 nt, Artificial Sequence
  Description of Artificial Sequence: Synthetic oligonucleotide
  Sense strand starting at position 3362 of SEQ ID NO: 1880317
cguuguuggauuuaguguu

SEQ ID NO: 1958289 - RNA, 19 nt, Artificial Sequence
  Description of Artificial Sequence: Synthetic oligonucleotide
  Antisense strand to SEQ ID NO: 1958288
aacacuaaauccaacaacg

SEQ ID NO: 1958290 - RNA, 19 nt, Artificial Sequence
  Description of Artificial Sequence: Synthetic oligonucleotide
  Sense strand starting at position 3381 of SEQ ID NO: 1880317
cugaauuaacgguaaacgu

SEQ ID NO: 1958291 - RNA, 19 nt, Artificial Sequence
  Description of Artificial Sequence: Synthetic oligonucleotide
  Antisense strand to SEQ ID NO: 1958290
acguuuaccguuaauucag

SEQ ID NO: 1958292 - RNA, 19 nt, Artificial Sequence
  Description of Artificial Sequence: Synthetic oligonucleotide
  Sense strand starting at position 3396 of SEQ ID NO: 1880317
acguauaucacgugauaaa

SEQ ID NO: 1958293 - RNA, 19 nt, Artificial Sequence
  Description of Artificial Sequence: Synthetic oligonucleotide
  Antisense strand to SEQ ID NO: 1958292
uuuaucacgugauauacgu

SEQ ID NO: 1958294 - RNA, 19 nt, Artificial Sequence
  Description of Artificial Sequence: Synthetic oligonucleotide
  Sense strand starting at position 3397 of SEQ ID NO: 1880317
cguauaucacgugauaaau

SEQ ID NO: 1958295 - RNA, 19 nt, Artificial Sequence
  Description of Artificial Sequence: Synthetic oligonucleotide
  Antisense strand to SEQ ID NO: 1958294
auuuaucacgugauauacg

SEQ ID NO: 1958296 - RNA, 19 nt, Artificial Sequence
  Description of Artificial Sequence: Synthetic oligonucleotide
  Sense strand starting at position 3596 of SEQ ID NO: 1880317
agugauguacaguggaauu

SEQ ID NO: 1958297 - RNA, 19 nt, Artificial Sequence
  Description of Artificial Sequence: Synthetic oligonucleotide
  Antisense strand to SEQ ID NO: 1958296
aauuccacuguacaucacu

SEQ ID NO: 1958298 - RNA, 19 nt, Artificial Sequence
  Description of Artificial Sequence: Synthetic oligonucleotide
  Sense strand starting at position 3643 of SEQ ID NO: 1880317
cuuaauuauguuggacuca

SEQ ID NO: 1958299 - RNA, 19 nt, Artificial Sequence
  Description of Artificial Sequence: Synthetic oligonucleotide
  Antisense strand to SEQ ID NO: 1958298
ugaguccaacauaauuaag

SEQ ID NO: 1958300 - RNA, 19 nt, Artificial Sequence
  Description of Artificial Sequence: Synthetic oligonucleotide
  Sense strand starting at position 3714 of SEQ ID NO: 1880317
agagcuauuuaguagaaau

SEQ ID NO: 1958301 - RNA, 19 nt, Artificial Sequence
  Description of Artificial Sequence: Synthetic oligonucleotide
  Antisense strand to SEQ ID NO: 1958300
auuucuacuaaauagcucu

SEQ ID NO: 1958302 - RNA, 19 nt, Artificial Sequence
  Description of Artificial Sequence: Synthetic oligonucleotide
  Sense strand starting at position 3759 of SEQ ID NO: 1880317
guaauuucuuaagauguca

SEQ ID NO: 1958303 - RNA, 19 nt, Artificial Sequence
  Description of Artificial Sequence: Synthetic oligonucleotide
  Antisense strand to SEQ ID NO: 1958302
ugacaucuuaagaaauuac

SEQ ID NO: 1958304 - RNA, 19 nt, Artificial Sequence
  Description of Artificial Sequence: Synthetic oligonucleotide
  Sense strand starting at position 3850 of SEQ ID NO: 1880317
cagauauaguacgucagga

SEQ ID NO: 1958305 - RNA, 19 nt, Artificial Sequence
  Description of Artificial Sequence: Synthetic oligonucleotide
  Antisense strand to SEQ ID NO: 1958304
uccugacguacuauaucug

SEQ ID NO: 1958306 - RNA, 19 nt, Artificial Sequence
  Description of Artificial Sequence: Synthetic oligonucleotide
  Sense strand starting at position 3852 of SEQ ID NO: 1880317
gauauaguacgucaggagu

SEQ ID NO: 1958307 - RNA, 19 nt, Artificial Sequence
  Description of Artificial Sequence: Synthetic oligonucleotide
  Antisense strand to SEQ ID NO: 1958306
acuccugacguacuauauc

SEQ ID NO: 1958308 - RNA, 19 nt, Artificial Sequence
  Description of Artificial Sequence: Synthetic oligonucleotide
  Sense strand starting at position 3863 of SEQ ID NO: 1880317
ucaggaguauguuuaugua

SEQ ID NO: 1958309 - RNA, 19 nt, Artificial Sequence
  Description of Artificial Sequence: Synthetic oligonucleotide
  Antisense strand to SEQ ID NO: 1958308
uacauaaacauacuccuga

SEQ ID NO: 1958310 - RNA, 19 nt, Artificial Sequence
  Description of Artificial Sequence: Synthetic oligonucleotide
  Sense strand starting at position 3913 of SEQ ID NO: 1880317
guauauaaccuguaaaccu

SEQ ID NO: 1958311 - RNA, 19 nt, Artificial Sequence
  Description of Artificial Sequence: Synthetic oligonucleotide
  Antisense strand to SEQ ID NO: 1958310
agguuuacagguuauauac

SEQ ID NO: 1958312 - RNA, 19 nt, Artificial Sequence
  Description of Artificial Sequence: Synthetic oligonucleotide
  Sense strand starting at position 3975 of SEQ ID NO: 1880317
uuaugaaagauacgaguuu

SEQ ID NO: 1958313 - RNA, 19 nt, Artificial Sequence
  Description of Artificial Sequence: Synthetic oligonucleotide
  Antisense strand to SEQ ID NO: 1958312
aaacucguaucuuucauaa

SEQ ID NO: 1958314 - RNA, 19 nt, Artificial Sequence
  Description of Artificial Sequence: Synthetic oligonucleotide
  Sense strand starting at position 142 of SEQ ID NO: 1880318
cucucuuucgauuacagaa

SEQ ID NO: 1958315 - RNA, 19 nt, Artificial Sequence
  Description of Artificial Sequence: Synthetic oligonucleotide
  Antisense strand to SEQ ID NO: 1958314
uucuguaaucgaaagagag

SEQ ID NO: 1958316 - RNA, 19 nt, Artificial Sequence
  Description of Artificial Sequence: Synthetic oligonucleotide
  Sense strand starting at position 195 of SEQ ID NO: 1880318
ggaagacucuuggagauag

SEQ ID NO: 1958317 - RNA, 19 nt, Artificial Sequence
  Description of Artificial Sequence: Synthetic oligonucleotide
  Antisense strand to SEQ ID NO: 1958316
cuaucuccaagagucuucc

SEQ ID NO: 1958318 - RNA, 19 nt, Artificial Sequence
  Description of Artificial Sequence: Synthetic oligonucleotide
  Sense strand starting at position 363 of SEQ ID NO: 1880318
gguucugaucccuagcugu

SEQ ID NO: 1958319 - RNA, 19 nt, Artificial Sequence
  Description of Artificial Sequence: Synthetic oligonucleotide
  Antisense strand to SEQ ID NO: 1958318
acagcuagggaucagaacc

SEQ ID NO: 1958320 - RNA, 19 nt, Artificial Sequence
  Description of Artificial Sequence: Synthetic oligonucleotide
  Sense strand starting at position 369 of SEQ ID NO: 1880318
gaucccuagcugugugaau

SEQ ID NO: 1958321 - RNA, 19 nt, Artificial Sequence
  Description of Artificial Sequence: Synthetic oligonucleotide
  Antisense strand to SEQ ID NO: 1958320
auucacacagcuagggauc

SEQ ID NO: 1958322 - RNA, 19 nt, Artificial Sequence
  Description of Artificial Sequence: Synthetic oligonucleotide
  Sense strand starting at position 467 of SEQ ID NO: 1880318
ccgaguaagagcuaacauu

SEQ ID NO: 1958323 - RNA, 19 nt, Artificial Sequence
  Description of Artificial Sequence: Synthetic oligonucleotide
  Antisense strand to SEQ ID NO: 1958322
aauguuagcucuuacucgg

SEQ ID NO: 1958324 - RNA, 19 nt, Artificial Sequence
  Description of Artificial Sequence: Synthetic oligonucleotide
  Sense strand starting at position 674 of SEQ ID NO: 1880318
aagaaugagcaaugcuaga

SEQ ID NO: 1958325 - RNA, 19 nt, Artificial Sequence
  Description of Artificial Sequence: Synthetic oligonucleotide
  Antisense strand to SEQ ID NO: 1958324
ucuagcauugcucauucuu

SEQ ID NO: 1958326 - RNA, 19 nt, Artificial Sequence
  Description of Artificial Sequence: Synthetic oligonucleotide
  Sense strand starting at position 743 of SEQ ID NO: 1880318
ggguacaagcgggauucau

SEQ ID NO: 1958327 - RNA, 19 nt, Artificial Sequence
  Description of Artificial Sequence: Synthetic oligonucleotide
  Antisense strand to SEQ ID NO: 1958326
augaaucccgcuuguaccc

SEQ ID NO: 1958328 - RNA, 19 nt, Artificial Sequence
  Description of Artificial Sequence: Synthetic oligonucleotide
  Sense strand starting at position 761 of SEQ ID NO: 1880318
uagggcauuugguagaaca

SEQ ID NO: 1958329 - RNA, 19 nt, Artificial Sequence
  Description of Artificial Sequence: Synthetic oligonucleotide
  Antisense strand to SEQ ID NO: 1958328
uguucuaccaaaugcccua

SEQ ID NO: 1958330 - RNA, 19 nt, Artificial Sequence
  Description of Artificial Sequence: Synthetic oligonucleotide
  Sense strand starting at position 787 of SEQ ID NO: 1880318
ggugucugcgucccuaaca

SEQ ID NO: 1958331 - RNA, 19 nt, Artificial Sequence
  Description of Artificial Sequence: Synthetic oligonucleotide
  Antisense strand to SEQ ID NO: 1958330
uguuagggacgcagacacc

SEQ ID NO: 1958332 - RNA, 19 nt, Artificial Sequence
  Description of Artificial Sequence: Synthetic oligonucleotide
  Sense strand starting at position 901 of SEQ ID NO: 1880318
uaucucagucagggucaaa

SEQ ID NO: 1958333 - RNA, 19 nt, Artificial Sequence
  Description of Artificial Sequence: Synthetic oligonucleotide
  Antisense strand to SEQ ID NO: 1958332
uuugacccugacugagaua

SEQ ID NO: 1958334 - RNA, 19 nt, Artificial Sequence
  Description of Artificial Sequence: Synthetic oligonucleotide
  Sense strand starting at position 958 of SEQ ID NO: 1880318
ggagauaccaucgaggcuu

SEQ ID NO: 1958335 - RNA, 19 nt, Artificial Sequence
  Description of Artificial Sequence: Synthetic oligonucleotide
  Antisense strand to SEQ ID NO: 1958334
aagccucgaugguaucucc

SEQ ID NO: 1958336 - RNA, 19 nt, Artificial Sequence
  Description of Artificial Sequence: Synthetic oligonucleotide
  Sense strand starting at position 984 of SEQ ID NO: 1880318
acggaaaguaucuaaagcu

SEQ ID NO: 1958337 - RNA, 19 nt, Artificial Sequence
  Description of Artificial Sequence: Synthetic oligonucleotide
  Antisense strand to SEQ ID NO: 1958336
agcuuuagauacuuuccgu

SEQ ID NO: 1958338 - RNA, 19 nt, Artificial Sequence
  Description of Artificial Sequence: Synthetic oligonucleotide
  Sense strand starting at position 992 of SEQ ID NO: 1880318
uaucuaaagcuccgagaga

SEQ ID NO: 1958339 - RNA, 19 nt, Artificial Sequence
  Description of Artificial Sequence: Synthetic oligonucleotide
  Antisense strand to SEQ ID NO: 1958338
ucucucggagcuuuagaua

SEQ ID NO: 1958340 - RNA, 19 nt, Artificial Sequence
  Description of Artificial Sequence: Synthetic oligonucleotide
  Sense strand starting at position 1109 of SEQ ID NO: 1880318
cccagaguuagguagccaa

SEQ ID NO: 1958341 - RNA, 19 nt, Artificial Sequence
  Description of Artificial Sequence: Synthetic oligonucleotide
  Antisense strand to SEQ ID NO: 1958340
uuggcuaccuaacucuggg

SEQ ID NO: 1958342 - RNA, 19 nt, Artificial Sequence
  Description of Artificial Sequence: Synthetic oligonucleotide
  Sense strand starting at position 1112 of SEQ ID NO: 1880318
agaguuagguagccaacua

SEQ ID NO: 1958343 - RNA, 19 nt, Artificial Sequence
  Description of Artificial Sequence: Synthetic oligonucleotide
  Antisense strand to SEQ ID NO: 1958342
uaguuggcuaccuaacucu

SEQ ID NO: 1958344 - RNA, 19 nt, Artificial Sequence
  Description of Artificial Sequence: Synthetic oligonucleotide
  Sense strand starting at position 1139 of SEQ ID NO: 1880318
uuucuuaugucaccagagu

SEQ ID NO: 1958345 - RNA, 19 nt, Artificial Sequence
  Description of Artificial Sequence: Synthetic oligonucleotide
  Antisense strand to SEQ ID NO: 1958344
acucuggugacauaagaaa

SEQ ID NO: 1958346 - RNA, 19 nt, Artificial Sequence
  Description of Artificial Sequence: Synthetic oligonucleotide
  Sense strand starting at position 1276 of SEQ ID NO: 1880318
agacgcguuuauuuaauga

SEQ ID NO: 1958347 - RNA, 19 nt, Artificial Sequence
  Description of Artificial Sequence: Synthetic oligonucleotide
  Antisense strand to SEQ ID NO: 1958346
ucauuaaauaaacgcgucu

SEQ ID NO: 1958348 - RNA, 19 nt, Artificial Sequence
  Description of Artificial Sequence: Synthetic oligonucleotide
  Sense strand starting at position 1287 of SEQ ID NO: 1880318
uuuaaugacugagcgaaug

SEQ ID NO: 1958349 - RNA, 19 nt, Artificial Sequence
  Description of Artificial Sequence: Synthetic oligonucleotide
  Antisense strand to SEQ ID NO: 1958348
cauucgcucagucauuaaa

SEQ ID NO: 1958350 - RNA, 19 nt, Artificial Sequence
  Description of Artificial Sequence: Synthetic oligonucleotide
  Sense strand starting at position 1361 of SEQ ID NO: 1880318
agggucagcgagugaacau

SEQ ID NO: 1958351 - RNA, 19 nt, Artificial Sequence
  Description of Artificial Sequence: Synthetic oligonucleotide
  Antisense strand to SEQ ID NO: 1958350
auguucacucgcugacccu

SEQ ID NO: 1958352 - RNA, 19 nt, Artificial Sequence
  Description of Artificial Sequence: Synthetic oligonucleotide
  Sense strand starting at position 1362 of SEQ ID NO: 1880318
gggucagcgagugaacaua

SEQ ID NO: 1958353 - RNA, 19 nt, Artificial Sequence
  Description of Artificial Sequence: Synthetic oligonucleotide
  Antisense strand to SEQ ID NO: 1958352
uauguucacucgcugaccc

SEQ ID NO: 1958354 - RNA, 19 nt, Artificial Sequence
  Description of Artificial Sequence: Synthetic oligonucleotide
  Sense strand starting at position 1420 of SEQ ID NO: 1880318
gccugugccgguuccaaga

SEQ ID NO: 1958355 - RNA, 19 nt, Artificial Sequence
  Description of Artificial Sequence: Synthetic oligonucleotide
  Antisense strand to SEQ ID NO: 1958354
ucuuggaaccggcacaggc

SEQ ID NO: 1958356 - RNA, 19 nt, Artificial Sequence
  Description of Artificial Sequence: Synthetic oligonucleotide
  Sense strand starting at position 1445 of SEQ ID NO: 1880318
cgucuuuacagcccgcaaa

SEQ ID NO: 1958357 - RNA, 19 nt, Artificial Sequence
  Description of Artificial Sequence: Synthetic oligonucleotide
  Antisense strand to SEQ ID NO: 1958356
uuugcgggcuguaaagacg

SEQ ID NO: 1958358 - RNA, 19 nt, Artificial Sequence
  Description of Artificial Sequence: Synthetic oligonucleotide
  Sense strand starting at position 2099 of SEQ ID NO: 1880318
uucggucgugcuucuuaga

SEQ ID NO: 1958359 - RNA, 19 nt, Artificial Sequence
  Description of Artificial Sequence: Synthetic oligonucleotide
  Antisense strand to SEQ ID NO: 1958358
ucuaagaagcacgaccgaa

SEQ ID NO: 1958360 - RNA, 19 nt, Artificial Sequence
  Description of Artificial Sequence: Synthetic oligonucleotide
  Sense strand starting at position 2220 of SEQ ID NO: 1880318
ggacgcaaagugugggaua

SEQ ID NO: 1958361 - RNA, 19 nt, Artificial Sequence
  Description of Artificial Sequence: Synthetic oligonucleotide
  Antisense strand to SEQ ID NO: 1958360
uaucccacacuuugcgucc

SEQ ID NO: 1958362 - RNA, 19 nt, Artificial Sequence
  Description of Artificial Sequence: Synthetic oligonucleotide
  Sense strand starting at position 2348 of SEQ ID NO: 1880318
caagguguccagugucaca

SEQ ID NO: 1958363 - RNA, 19 nt, Artificial Sequence
  Description of Artificial Sequence: Synthetic oligonucleotide
  Antisense strand to SEQ ID NO: 1958362
ugugacacuggacaccuug

SEQ ID NO: 1958364 - RNA, 19 nt, Artificial Sequence
  Description of Artificial Sequence: Synthetic oligonucleotide
  Sense strand starting at position 2367 of SEQ ID NO: 1880318
guuacauagucagugucaa

SEQ ID NO: 1958365 - RNA, 19 nt, Artificial Sequence
  Description of Artificial Sequence: Synthetic oligonucleotide
  Antisense strand to SEQ ID NO: 1958364
uugacacugacuauguaac

SEQ ID NO: 1958366 - RNA, 19 nt, Artificial Sequence
  Description of Artificial Sequence: Synthetic oligonucleotide
  Sense strand starting at position 2368 of SEQ ID NO: 1880318
uuacauagucagugucaac

SEQ ID NO: 1958367 - RNA, 19 nt, Artificial Sequence
  Description of Artificial Sequence: Synthetic oligonucleotide
  Antisense strand to SEQ ID NO: 1958366
guugacacugacuauguaa

SEQ ID NO: 1958368 - RNA, 19 nt, Artificial Sequence
  Description of Artificial Sequence: Synthetic oligonucleotide
  Sense strand starting at position 2813 of SEQ ID NO: 1880318
cuguuaagaguuuaagcca

SEQ ID NO: 1958369 - RNA, 19 nt, Artificial Sequence
  Description of Artificial Sequence: Synthetic oligonucleotide
  Antisense strand to SEQ ID NO: 1958368
uggcuuaaacucuuaacag

SEQ ID NO: 1958370 - RNA, 19 nt, Artificial Sequence
  Description of Artificial Sequence: Synthetic oligonucleotide
  Sense strand starting at position 3241 of SEQ ID NO: 1880318
gcgaguucagagcaggaca

SEQ ID NO: 1958371 - RNA, 19 nt, Artificial Sequence
  Description of Artificial Sequence: Synthetic oligonucleotide
  Antisense strand to SEQ ID NO: 1958370
uguccugcucugaacucgc

SEQ ID NO: 1958372 - RNA, 19 nt, Artificial Sequence
  Description of Artificial Sequence: Synthetic oligonucleotide
  Sense strand starting at position 3456 of SEQ ID NO: 1880318
gcuggagauauguauguga

SEQ ID NO: 1958373 - RNA, 19 nt, Artificial Sequence
  Description of Artificial Sequence: Synthetic oligonucleotide
  Antisense strand to SEQ ID NO: 1958372
ucacauacauaucuccagc

SEQ ID NO: 1958374 - RNA, 19 nt, Artificial Sequence
  Description of Artificial Sequence: Synthetic oligonucleotide
  Sense strand starting at position 3459 of SEQ ID NO: 1880318
ggagauauguaugugagca

SEQ ID NO: 1958375 - RNA, 19 nt, Artificial Sequence
  Description of Artificial Sequence: Synthetic oligonucleotide
  Antisense strand to SEQ ID NO: 1958374
ugcucacauacauaucucc

SEQ ID NO: 1958376 - RNA, 19 nt, Artificial Sequence
  Description of Artificial Sequence: Synthetic oligonucleotide
  Sense strand starting at position 3460 of SEQ ID NO: 1880318
gagauauguaugugagcau

SEQ ID NO: 1958377 - RNA, 19 nt, Artificial Sequence
  Description of Artificial Sequence: Synthetic oligonucleotide
  Antisense strand to SEQ ID NO: 1958376
augcucacauacauaucuc

SEQ ID NO: 1958378 - RNA, 19 nt, Artificial Sequence
  Description of Artificial Sequence: Synthetic oligonucleotide
  Sense strand starting at position 3557 of SEQ ID NO: 1880318
uguauacaucuaugcacau

SEQ ID NO: 1958379 - RNA, 19 nt, Artificial Sequence
  Description of Artificial Sequence: Synthetic oligonucleotide
  Antisense strand to SEQ ID NO: 1958378
augugcauagauguauaca

SEQ ID NO: 1958380 - RNA, 19 nt, Artificial Sequence
  Description of Artificial Sequence: Synthetic oligonucleotide
  Sense strand starting at position 3558 of SEQ ID NO: 1880318
guauacaucuaugcacaua

SEQ ID NO: 1958381 - RNA, 19 nt, Artificial Sequence
  Description of Artificial Sequence: Synthetic oligonucleotide
  Antisense strand to SEQ ID NO: 1958380
uaugugcauagauguauac

SEQ ID NO: 1958382 - RNA, 19 nt, Artificial Sequence
  Description of Artificial Sequence: Synthetic oligonucleotide
  Sense strand starting at position 3570 of SEQ ID NO: 1880318
gcacauaagugagcacaua

SEQ ID NO: 1958383 - RNA, 19 nt, Artificial Sequence
  Description of Artificial Sequence: Synthetic oligonucleotide
  Antisense strand to SEQ ID NO: 1958382
uaugugcucacuuaugugc

SEQ ID NO: 1958384 - RNA, 19 nt, Artificial Sequence
  Description of Artificial Sequence: Synthetic oligonucleotide
  Sense strand starting at position 3653 of SEQ ID NO: 1880318
ugaguuugacgcuagucca

SEQ ID NO: 1958385 - RNA, 19 nt, Artificial Sequence
  Description of Artificial Sequence: Synthetic oligonucleotide
  Antisense strand to SEQ ID NO: 1958384
uggacuagcgucaaacuca

SEQ ID NO: 1958386 - RNA, 19 nt, Artificial Sequence
  Description of Artificial Sequence: Synthetic oligonucleotide
  Sense strand starting at position 3688 of SEQ ID NO: 1880318
guguauuuguauccgagag

SEQ ID NO: 1958387 - RNA, 19 nt, Artificial Sequence
  Description of Artificial Sequence: Synthetic oligonucleotide
  Antisense strand to SEQ ID NO: 1958386
cucucggauacaaauacac

SEQ ID NO: 1958388 - RNA, 19 nt, Artificial Sequence
  Description of Artificial Sequence: Synthetic oligonucleotide
  Sense strand starting at position 3757 of SEQ ID NO: 1880318
cuaacugauggcugugauu

SEQ ID NO: 1958389 - RNA, 19 nt, Artificial Sequence
  Description of Artificial Sequence: Synthetic oligonucleotide
  Antisense strand to SEQ ID NO: 1958388
aaucacagccaucaguuag

SEQ ID NO: 1958390 - RNA, 19 nt, Artificial Sequence
  Description of Artificial Sequence: Synthetic oligonucleotide
  Sense strand starting at position 3807 of SEQ ID NO: 1880318
augccauccuugguacaca

SEQ ID NO: 1958391 - RNA, 19 nt, Artificial Sequence
  Description of Artificial Sequence: Synthetic oligonucleotide
  Antisense strand to SEQ ID NO: 1958390
uguguaccaaggauggcau

SEQ ID NO: 1958392 - RNA, 19 nt, Artificial Sequence
  Description of Artificial Sequence: Synthetic oligonucleotide
  Sense strand starting at position 3823 of SEQ ID NO: 1880318
acaguagugacuugguagu

SEQ ID NO: 1958393 - RNA, 19 nt, Artificial Sequence
  Description of Artificial Sequence: Synthetic oligonucleotide
  Antisense strand to SEQ ID NO: 1958392
acuaccaagucacuacugu

SEQ ID NO: 1958394 - RNA, 19 nt, Artificial Sequence
  Description of Artificial Sequence: Synthetic oligonucleotide
  Sense strand starting at position 315 of SEQ ID NO: 1880319
gguugauugcuguccgcau

SEQ ID NO: 1958395 - RNA, 19 nt, Artificial Sequence
  Description of Artificial Sequence: Synthetic oligonucleotide
  Antisense strand to SEQ ID NO: 1958394
augcggacagcaaucaacc

SEQ ID NO: 1958396 - RNA, 19 nt, Artificial Sequence
  Description of Artificial Sequence: Synthetic oligonucleotide
  Sense strand starting at position 317 of SEQ ID NO: 1880319
uugauugcuguccgcauuu

SEQ ID NO: 1958397 - RNA, 19 nt, Artificial Sequence
  Description of Artificial Sequence: Synthetic oligonucleotide
  Antisense strand to SEQ ID NO: 1958396
aaaugcggacagcaaucaa

SEQ ID NO: 1958398 - RNA, 19 nt, Artificial Sequence
  Description of Artificial Sequence: Synthetic oligonucleotide
  Sense strand starting at position 348 of SEQ ID NO: 1880319
aacggaggcgcagauaauu

SEQ ID NO: 1958399 - RNA, 19 nt, Artificial Sequence
  Description of Artificial Sequence: Synthetic oligonucleotide
  Antisense strand to SEQ ID NO: 1958398
aauuaucugcgccuccguu

SEQ ID NO: 1958400 - RNA, 19 nt, Artificial Sequence
  Description of Artificial Sequence: Synthetic oligonucleotide
  Sense strand starting at position 467 of SEQ ID NO: 1880319
caguuugcugugucuguga

SEQ ID NO: 1958401 - RNA, 19 nt, Artificial Sequence
  Description of Artificial Sequence: Synthetic oligonucleotide
  Antisense strand to SEQ ID NO: 1958400
ucacagacacagcaaacug

SEQ ID NO: 1958402 - RNA, 19 nt, Artificial Sequence
  Description of Artificial Sequence: Synthetic oligonucleotide
  Sense strand starting at position 476 of SEQ ID NO: 1880319
gugucugugaaaugggaac

SEQ ID NO: 1958403 - RNA, 19 nt, Artificial Sequence
  Description of Artificial Sequence: Synthetic oligonucleotide
  Antisense strand to SEQ ID NO: 1958402
guucccauuucacagacac

SEQ ID NO: 1958404 - RNA, 19 nt, Artificial Sequence
  Description of Artificial Sequence: Synthetic oligonucleotide
  Sense strand starting at position 1424 of SEQ ID NO: 1880319
uggaaaugguugucuugug

SEQ ID NO: 1958405 - RNA, 19 nt, Artificial Sequence
  Description of Artificial Sequence: Synthetic oligonucleotide
  Antisense strand to SEQ ID NO: 1958404
cacaagacaaccauuucca

SEQ ID NO: 1958406 - RNA, 19 nt, Artificial Sequence
  Description of Artificial Sequence: Synthetic oligonucleotide
  Sense strand starting at position 1425 of SEQ ID NO: 1880319
ggaaaugguugucuuguga

SEQ ID NO: 1958407 - RNA, 19 nt, Artificial Sequence
  Description of Artificial Sequence: Synthetic oligonucleotide
  Antisense strand to SEQ ID NO: 1958406
ucacaagacaaccauuucc

SEQ ID NO: 1958408 - RNA, 19 nt, Artificial Sequence
  Description of Artificial Sequence: Synthetic oligonucleotide
  Sense strand starting at position 1635 of SEQ ID NO: 1880319
ugaggaacucgcuagagca

SEQ ID NO: 1958409 - RNA, 19 nt, Artificial Sequence
  Description of Artificial Sequence: Synthetic oligonucleotide
  Antisense strand to SEQ ID NO: 1958408
ugcucuagcgaguuccuca

SEQ ID NO: 1958410 - RNA, 19 nt, Artificial Sequence
  Description of Artificial Sequence: Synthetic oligonucleotide
  Sense strand starting at position 1692 of SEQ ID NO: 1880319
ccaggagauuuccaugaga

SEQ ID NO: 1958411 - RNA, 19 nt, Artificial Sequence
  Description of Artificial Sequence: Synthetic oligonucleotide
  Antisense strand to SEQ ID NO: 1958410
ucucauggaaaucuccugg

SEQ ID NO: 1958412 - RNA, 19 nt, Artificial Sequence
  Description of Artificial Sequence: Synthetic oligonucleotide
  Sense strand starting at position 1944 of SEQ ID NO: 1880319
ccugcauugcuggauggaa

SEQ ID NO: 1958413 - RNA, 19 nt, Artificial Sequence
  Description of Artificial Sequence: Synthetic oligonucleotide
  Antisense strand to SEQ ID NO: 1958412
uuccauccagcaaugcagg

SEQ ID NO: 1958414 - RNA, 19 nt, Artificial Sequence
  Description of Artificial Sequence: Synthetic oligonucleotide
  Sense strand starting at position 1946 of SEQ ID NO: 1880319
ugcauugcuggauggaaau

SEQ ID NO: 1958415 - RNA, 19 nt, Artificial Sequence
  Description of Artificial Sequence: Synthetic oligonucleotide
  Antisense strand to SEQ ID NO: 1958414
auuuccauccagcaaugca

SEQ ID NO: 1958416 - RNA, 19 nt, Artificial Sequence
  Description of Artificial Sequence: Synthetic oligonucleotide
  Sense strand starting at position 2166 of SEQ ID NO: 1880319
gcuccugugcugucucauu

SEQ ID NO: 1958417 - RNA, 19 nt, Artificial Sequence
  Description of Artificial Sequence: Synthetic oligonucleotide
  Antisense strand to SEQ ID NO: 1958416
aaugagacagcacaggagc

SEQ ID NO: 1958418 - RNA, 19 nt, Artificial Sequence
  Description of Artificial Sequence: Synthetic oligonucleotide
  Sense strand starting at position 2233 of SEQ ID NO: 1880319
gugggugaugugggugaau

SEQ ID NO: 1958419 - RNA, 19 nt, Artificial Sequence
  Description of Artificial Sequence: Synthetic oligonucleotide
  Antisense strand to SEQ ID NO: 1958418
auucacccacaucacccac

SEQ ID NO: 1958420 - RNA, 19 nt, Artificial Sequence
  Description of Artificial Sequence: Synthetic oligonucleotide
  Sense strand starting at position 2244 of SEQ ID NO: 1880319
gggugaaugcuuggguaga

SEQ ID NO: 1958421 - RNA, 19 nt, Artificial Sequence
  Description of Artificial Sequence: Synthetic oligonucleotide
  Antisense strand to SEQ ID NO: 1958420
ucuacccaagcauucaccc

SEQ ID NO: 1958422 - RNA, 19 nt, Artificial Sequence
  Description of Artificial Sequence: Synthetic oligonucleotide
  Sense strand starting at position 2458 of SEQ ID NO: 1880319
uguugcuguccugaaaccu

SEQ ID NO: 1958423 - RNA, 19 nt, Artificial Sequence
  Description of Artificial Sequence: Synthetic oligonucleotide
  Antisense strand to SEQ ID NO: 1958422
agguuucaggacagcaaca

SEQ ID NO: 1958424 - RNA, 19 nt, Artificial Sequence
  Description of Artificial Sequence: Synthetic oligonucleotide
  Sense strand starting at position 2654 of SEQ ID NO: 1880319
ccgagacuucaugaugugu

SEQ ID NO: 1958425 - RNA, 19 nt, Artificial Sequence
  Description of Artificial Sequence: Synthetic oligonucleotide
  Antisense strand to SEQ ID NO: 1958424
acacaucaugaagucucgg

SEQ ID NO: 1958426 - RNA, 19 nt, Artificial Sequence
  Description of Artificial Sequence: Synthetic oligonucleotide
  Sense strand starting at position 3160 of SEQ ID NO: 1880319
cuuauucuagcauggaaca

SEQ ID NO: 1958427 - RNA, 19 nt, Artificial Sequence
  Description of Artificial Sequence: Synthetic oligonucleotide
  Antisense strand to SEQ ID NO: 1958426
uguuccaugcuagaauaag

SEQ ID NO: 1958428 - RNA, 19 nt, Artificial Sequence
  Description of Artificial Sequence: Synthetic oligonucleotide
  Sense strand starting at position 3161 of SEQ ID NO: 1880319
uuauucuagcauggaacau

SEQ ID NO: 1958429 - RNA, 19 nt, Artificial Sequence
  Description of Artificial Sequence: Synthetic oligonucleotide
  Antisense strand to SEQ ID NO: 1958428
auguuccaugcuagaauaa

SEQ ID NO: 1958430 - RNA, 19 nt, Artificial Sequence
  Description of Artificial Sequence: Synthetic oligonucleotide
  Sense strand starting at position 3219 of SEQ ID NO: 1880319
aagugacaacagugcaaua

SEQ ID NO: 1958431 - RNA, 19 nt, Artificial Sequence
  Description of Artificial Sequence: Synthetic oligonucleotide
  Antisense strand to SEQ ID NO: 1958430
uauugcacuguugucacuu

SEQ ID NO: 1958432 - RNA, 19 nt, Artificial Sequence
  Description of Artificial Sequence: Synthetic oligonucleotide
  Sense strand starting at position 3221 of SEQ ID NO: 1880319
gugacaacagugcaauaua

SEQ ID NO: 1958433 - RNA, 19 nt, Artificial Sequence
  Description of Artificial Sequence: Synthetic oligonucleotide
  Antisense strand to SEQ ID NO: 1958432
uauauugcacuguugucac

SEQ ID NO: 1958434 - RNA, 19 nt, Artificial Sequence
  Description of Artificial Sequence: Synthetic oligonucleotide
  Sense strand starting at position 3323 of SEQ ID NO: 1880319
uugaaugugucccuuagau

SEQ ID NO: 1958435 - RNA, 19 nt, Artificial Sequence
  Description of Artificial Sequence: Synthetic oligonucleotide
  Antisense strand to SEQ ID NO: 1958434
aucuaagggacacauucaa

SEQ ID NO: 1958436 - RNA, 19 nt, Artificial Sequence
  Description of Artificial Sequence: Synthetic oligonucleotide
  Sense strand starting at position 3325 of SEQ ID NO: 1880319
gaaugugucccuuagauau

SEQ ID NO: 1958437 - RNA, 19 nt, Artificial Sequence
  Description of Artificial Sequence: Synthetic oligonucleotide
  Antisense strand to SEQ ID NO: 1958436
auaucuaagggacacauuc

SEQ ID NO: 1958438 - RNA, 19 nt, Artificial Sequence
  Description of Artificial Sequence: Synthetic oligonucleotide
  Sense strand starting at position 3335 of SEQ ID NO: 1880319
cuuagauauuaucuguaca

SEQ ID NO: 1958439 - RNA, 19 nt, Artificial Sequence
  Description of Artificial Sequence: Synthetic oligonucleotide
  Antisense strand to SEQ ID NO: 1958438
uguacagauaauaucuaag

SEQ ID NO: 1958440 - RNA, 19 nt, Artificial Sequence
  Description of Artificial Sequence: Synthetic oligonucleotide
  Sense strand starting at position 3363 of SEQ ID NO: 1880319
guuuauacaucaucuuaga

SEQ ID NO: 1958441 - RNA, 19 nt, Artificial Sequence
  Description of Artificial Sequence: Synthetic oligonucleotide
  Antisense strand to SEQ ID NO: 1958440
ucuaagaugauguauaaac

SEQ ID NO: 1958442 - RNA, 19 nt, Artificial Sequence
  Description of Artificial Sequence: Synthetic oligonucleotide
  Sense strand starting at position 3441 of SEQ ID NO: 1880319
gagagcguucagcagauga

SEQ ID NO: 1958443 - RNA, 19 nt, Artificial Sequence
  Description of Artificial Sequence: Synthetic oligonucleotide
  Antisense strand to SEQ ID NO: 1958442
ucaucugcugaacgcucuc

SEQ ID NO: 1958444 - RNA, 19 nt, Artificial Sequence
  Description of Artificial Sequence: Synthetic oligonucleotide
  Sense strand starting at position 3443 of SEQ ID NO: 1880319
gagcguucagcagaugaag

SEQ ID NO: 1958445 - RNA, 19 nt, Artificial Sequence
  Description of Artificial Sequence: Synthetic oligonucleotide
  Antisense strand to SEQ ID NO: 1958444
cuucaucugcugaacgcuc

SEQ ID NO: 1958446 - RNA, 19 nt, Artificial Sequence
  Description of Artificial Sequence: Synthetic oligonucleotide
  Sense strand starting at position 3474 of SEQ ID NO: 1880319
cuuauaaaugggugcauua

SEQ ID NO: 1958447 - RNA, 19 nt, Artificial Sequence
  Description of Artificial Sequence: Synthetic oligonucleotide
  Antisense strand to SEQ ID NO: 1958446
uaaugcacccauuuauaag

SEQ ID NO: 1958448 - RNA, 19 nt, Artificial Sequence
  Description of Artificial Sequence: Synthetic oligonucleotide
  Sense strand starting at position 3476 of SEQ ID NO: 1880319
uauaaaugggugcauuaua

SEQ ID NO: 1958449 - RNA, 19 nt, Artificial Sequence
  Description of Artificial Sequence: Synthetic oligonucleotide
  Antisense strand to SEQ ID NO: 1958448
uauaaugcacccauuuaua

SEQ ID NO: 1958450 - RNA, 19 nt, Artificial Sequence
  Description of Artificial Sequence: Synthetic oligonucleotide
  Sense strand starting at position 3489 of SEQ ID NO: 1880319
auuauauauggguguucca

SEQ ID NO: 1958451 - RNA, 19 nt, Artificial Sequence
  Description of Artificial Sequence: Synthetic oligonucleotide
  Antisense strand to SEQ ID NO: 1958450
uggaacacccauauauaau

SEQ ID NO: 1958452 - RNA, 19 nt, Artificial Sequence
  Description of Artificial Sequence: Synthetic oligonucleotide
  Sense strand starting at position 3492 of SEQ ID NO: 1880319
auauauggguguuccauaa

SEQ ID NO: 1958453 - RNA, 19 nt, Artificial Sequence
  Description of Artificial Sequence: Synthetic oligonucleotide
  Antisense strand to SEQ ID NO: 1958452
uuauggaacacccauauau

SEQ ID NO: 1958454 - RNA, 19 nt, Artificial Sequence
  Description of Artificial Sequence: Synthetic oligonucleotide
  Sense strand starting at position 3535 of SEQ ID NO: 1880319
uuaggcgauuucucauuau

SEQ ID NO: 1958455 - RNA, 19 nt, Artificial Sequence
  Description of Artificial Sequence: Synthetic oligonucleotide
  Antisense strand to SEQ ID NO: 1958454
auaaugagaaaucgccuaa

SEQ ID NO: 1958456 - RNA, 19 nt, Artificial Sequence
  Description of Artificial Sequence: Synthetic oligonucleotide
  Sense strand starting at position 3538 of SEQ ID NO: 1880319
ggcgauuucucauuauugc

SEQ ID NO: 1958457 - RNA, 19 nt, Artificial Sequence
  Description of Artificial Sequence: Synthetic oligonucleotide
  Antisense strand to SEQ ID NO: 1958456
gcaauaaugagaaaucgcc

SEQ ID NO: 1958458 - RNA, 19 nt, Artificial Sequence
  Description of Artificial Sequence: Synthetic oligonucleotide
  Sense strand starting at position 3539 of SEQ ID NO: 1880319
gcgauuucucauuauugca

SEQ ID NO: 1958459 - RNA, 19 nt, Artificial Sequence
  Description of Artificial Sequence: Synthetic oligonucleotide
  Antisense strand to SEQ ID NO: 1958458
ugcaauaaugagaaaucgc

SEQ ID NO: 1958460 - RNA, 19 nt, Artificial Sequence
  Description of Artificial Sequence: Synthetic oligonucleotide
  Sense strand starting at position 3566 of SEQ ID NO: 1880319
aaggcugugguagauauaa

SEQ ID NO: 1958461 - RNA, 19 nt, Artificial Sequence
  Description of Artificial Sequence: Synthetic oligonucleotide
  Antisense strand to SEQ ID NO: 1958460
uuauaucuaccacagccuu

SEQ ID NO: 1958462 - RNA, 19 nt, Artificial Sequence
  Description of Artificial Sequence: Synthetic oligonucleotide
  Sense strand starting at position 3568 of SEQ ID NO: 1880319
ggcugugguagauauaaug

SEQ ID NO: 1958463 - RNA, 19 nt, Artificial Sequence
  Description of Artificial Sequence: Synthetic oligonucleotide
  Antisense strand to SEQ ID NO: 1958462
cauuauaucuaccacagcc

SEQ ID NO: 1958464 - RNA, 19 nt, Artificial Sequence
  Description of Artificial Sequence: Synthetic oligonucleotide
  Sense strand starting at position 3575 of SEQ ID NO: 1880319
guagauauaauguaucugu

SEQ ID NO: 1958465 - RNA, 19 nt, Artificial Sequence
  Description of Artificial Sequence: Synthetic oligonucleotide
  Antisense strand to SEQ ID NO: 1958464
acagauacauuauaucuac

SEQ ID NO: 1958466 - RNA, 19 nt, Artificial Sequence
  Description of Artificial Sequence: Synthetic oligonucleotide
  Sense strand starting at position 3665 of SEQ ID NO: 1880319
cuuuacaaugaugguuaua

SEQ ID NO: 1958467 - RNA, 19 nt, Artificial Sequence
  Description of Artificial Sequence: Synthetic oligonucleotide
  Antisense strand to SEQ ID NO: 1958466
uauaaccaucauuguaaag

SEQ ID NO: 1958468 - RNA, 19 nt, Artificial Sequence
  Description of Artificial Sequence: Synthetic oligonucleotide
  Sense strand starting at position 3667 of SEQ ID NO: 1880319
uuacaaugaugguuauaac

SEQ ID NO: 1958469 - RNA, 19 nt, Artificial Sequence
  Description of Artificial Sequence: Synthetic oligonucleotide
  Antisense strand to SEQ ID NO: 1958468
guuauaaccaucauuguaa

SEQ ID NO: 1958470 - RNA, 19 nt, Artificial Sequence
  Description of Artificial Sequence: Synthetic oligonucleotide
  Sense strand starting at position 3679 of SEQ ID NO: 1880319
uuauaacuggccuaucgau

SEQ ID NO: 1958471 - RNA, 19 nt, Artificial Sequence
  Description of Artificial Sequence: Synthetic oligonucleotide
  Antisense strand to SEQ ID NO: 1958470
aucgauaggccaguuauaa

SEQ ID NO: 1958472 - RNA, 19 nt, Artificial Sequence
  Description of Artificial Sequence: Synthetic oligonucleotide
  Sense strand starting at position 3875 of SEQ ID NO: 1880319
cuguaucaggagugucaaa

SEQ ID NO: 1958473 - RNA, 19 nt, Artificial Sequence
  Description of Artificial Sequence: Synthetic oligonucleotide
  Antisense strand to SEQ ID NO: 1958472
uuugacacuccugauacag

SEQ ID NO: 1958474 - RNA, 19 nt, Artificial Sequence
  Description of Artificial Sequence: Synthetic oligonucleotide
  Sense strand starting at position 35 of SEQ ID NO: 1880320
uaggauuauucugcugaua

SEQ ID NO: 1958475 - RNA, 19 nt, Artificial Sequence
  Description of Artificial Sequence: Synthetic oligonucleotide
  Antisense strand to SEQ ID NO: 1958474
uaucagcagaauaauccua

SEQ ID NO: 1958476 - RNA, 19 nt, Artificial Sequence
  Description of Artificial Sequence: Synthetic oligonucleotide
  Sense strand starting at position 245 of SEQ ID NO: 1880320
acuacaaugcuguacauga

SEQ ID NO: 1958477 - RNA, 19 nt, Artificial Sequence
  Description of Artificial Sequence: Synthetic oligonucleotide
  Antisense strand to SEQ ID NO: 1958476
ucauguacagcauuguagu

SEQ ID NO: 1958478 - RNA, 19 nt, Artificial Sequence
  Description of Artificial Sequence: Synthetic oligonucleotide
  Sense strand starting at position 253 of SEQ ID NO: 1880320
gcuguacaugacugacaga

SEQ ID NO: 1958479 - RNA, 19 nt, Artificial Sequence
  Description of Artificial Sequence: Synthetic oligonucleotide
  Antisense strand to SEQ ID NO: 1958478
ucugucagucauguacagc

SEQ ID NO: 1958480 - RNA, 19 nt, Artificial Sequence
  Description of Artificial Sequence: Synthetic oligonucleotide
  Sense strand starting at position 256 of SEQ ID NO: 1880320
guacaugacugacagaaag

SEQ ID NO: 1958481 - RNA, 19 nt, Artificial Sequence
  Description of Artificial Sequence: Synthetic oligonucleotide
  Antisense strand to SEQ ID NO: 1958480
cuuucugucagucauguac

SEQ ID NO: 1958482 - RNA, 19 nt, Artificial Sequence
  Description of Artificial Sequence: Synthetic oligonucleotide
  Sense strand starting at position 274 of SEQ ID NO: 1880320
guaagucaugcucaguaca

SEQ ID NO: 1958483 - RNA, 19 nt, Artificial Sequence
  Description of Artificial Sequence: Synthetic oligonucleotide
  Antisense strand to SEQ ID NO: 1958482
uguacugagcaugacuuac

SEQ ID NO: 1958484 - RNA, 19 nt, Artificial Sequence
  Description of Artificial Sequence: Synthetic oligonucleotide
  Sense strand starting at position 276 of SEQ ID NO: 1880320
aagucaugcucaguacaga

SEQ ID NO: 1958485 - RNA, 19 nt, Artificial Sequence
  Description of Artificial Sequence: Synthetic oligonucleotide
  Antisense strand to SEQ ID NO: 1958484
ucuguacugagcaugacuu

SEQ ID NO: 1958486 - RNA, 19 nt, Artificial Sequence
  Description of Artificial Sequence: Synthetic oligonucleotide
  Sense strand starting at position 277 of SEQ ID NO: 1880320
agucaugcucaguacagau

SEQ ID NO: 1958487 - RNA, 19 nt, Artificial Sequence
  Description of Artificial Sequence: Synthetic oligonucleotide
  Antisense strand to SEQ ID NO: 1958486
aucuguacugagcaugacu

SEQ ID NO: 1958488 - RNA, 19 nt, Artificial Sequence
  Description of Artificial Sequence: Synthetic oligonucleotide
  Sense strand starting at position 1024 of SEQ ID NO: 1880320
aucuguaggccaggguuaa

SEQ ID NO: 1958489 - RNA, 19 nt, Artificial Sequence
  Description of Artificial Sequence: Synthetic oligonucleotide
  Antisense strand to SEQ ID NO: 1958488
uuaacccuggccuacagau

SEQ ID NO: 1958490 - RNA, 19 nt, Artificial Sequence
  Description of Artificial Sequence: Synthetic oligonucleotide
  Sense strand starting at position 1025 of SEQ ID NO: 1880320
ucuguaggccaggguuaaa

SEQ ID NO: 1958491 - RNA, 19 nt, Artificial Sequence
  Description of Artificial Sequence: Synthetic oligonucleotide
  Antisense strand to SEQ ID NO: 1958490
uuuaacccuggccuacaga

SEQ ID NO: 1958492 - RNA, 19 nt, Artificial Sequence
  Description of Artificial Sequence: Synthetic oligonucleotide
  Sense strand starting at position 1087 of SEQ ID NO: 1880320
guguauaguggugagcaua

SEQ ID NO: 1958493 - RNA, 19 nt, Artificial Sequence
  Description of Artificial Sequence: Synthetic oligonucleotide
  Antisense strand to SEQ ID NO: 1958492
uaugcucaccacuauacac

SEQ ID NO: 1958494 - RNA, 19 nt, Artificial Sequence
  Description of Artificial Sequence: Synthetic oligonucleotide
  Sense strand starting at position 1325 of SEQ ID NO: 1880320
ggcaucauuccgggaaguu

SEQ ID NO: 1958495 - RNA, 19 nt, Artificial Sequence
  Description of Artificial Sequence: Synthetic oligonucleotide
  Antisense strand to SEQ ID NO: 1958494
aacuucccggaaugaugcc

SEQ ID NO: 1958496 - RNA, 19 nt, Artificial Sequence
  Description of Artificial Sequence: Synthetic oligonucleotide
  Sense strand starting at position 1326 of SEQ ID NO: 1880320
gcaucauuccgggaaguuu

SEQ ID NO: 1958497 - RNA, 19 nt, Artificial Sequence
  Description of Artificial Sequence: Synthetic oligonucleotide
  Antisense strand to SEQ ID NO: 1958496
aaacuucccggaaugaugc

SEQ ID NO: 1958498 - RNA, 19 nt, Artificial Sequence
  Description of Artificial Sequence: Synthetic oligonucleotide
  Sense strand starting at position 1335 of SEQ ID NO: 1880320
cgggaaguuuaggugaagu

SEQ ID NO: 1958499 - RNA, 19 nt, Artificial Sequence
  Description of Artificial Sequence: Synthetic oligonucleotide
  Antisense strand to SEQ ID NO: 1958498
acuucaccuaaacuucccg

SEQ ID NO: 1958500 - RNA, 19 nt, Artificial Sequence
  Description of Artificial Sequence: Synthetic oligonucleotide
  Sense strand starting at position 1337 of SEQ ID NO: 1880320
ggaaguuuaggugaaguuu

SEQ ID NO: 1958501 - RNA, 19 nt, Artificial Sequence
  Description of Artificial Sequence: Synthetic oligonucleotide
  Antisense strand to SEQ ID NO: 1958500
aaacuucaccuaaacuucc

SEQ ID NO: 1958502 - RNA, 19 nt, Artificial Sequence
  Description of Artificial Sequence: Synthetic oligonucleotide
  Sense strand starting at position 1395 of SEQ ID NO: 1880320
gugucaugcaguuaacauc

SEQ ID NO: 1958503 - RNA, 19 nt, Artificial Sequence
  Description of Artificial Sequence: Synthetic oligonucleotide
  Antisense strand to SEQ ID NO: 1958502
gauguuaacugcaugacac

SEQ ID NO: 1958504 - RNA, 19 nt, Artificial Sequence
  Description of Artificial Sequence: Synthetic oligonucleotide
  Sense strand starting at position 1818 of SEQ ID NO: 1880320
acucgccuccagugaauua

SEQ ID NO: 1958505 - RNA, 19 nt, Artificial Sequence
  Description of Artificial Sequence: Synthetic oligonucleotide
  Antisense strand to SEQ ID NO: 1958504
uaauucacuggaggcgagu

SEQ ID NO: 1958506 - RNA, 19 nt, Artificial Sequence
  Description of Artificial Sequence: Synthetic oligonucleotide
  Sense strand starting at position 1838 of SEQ ID NO: 1880320
ggcagugacaccugacuau

SEQ ID NO: 1958507 - RNA, 19 nt, Artificial Sequence
  Description of Artificial Sequence: Synthetic oligonucleotide
  Antisense strand to SEQ ID NO: 1958506
auagucaggugucacugcc

SEQ ID NO: 1958508 - RNA, 19 nt, Artificial Sequence
  Description of Artificial Sequence: Synthetic oligonucleotide
  Sense strand starting at position 1962 of SEQ ID NO: 1880320
cagagucuuaccugaggug

SEQ ID NO: 1958509 - RNA, 19 nt, Artificial Sequence
  Description of Artificial Sequence: Synthetic oligonucleotide
  Antisense strand to SEQ ID NO: 1958508
caccucagguaagacucug

SEQ ID NO: 1958510 - RNA, 19 nt, Artificial Sequence
  Description of Artificial Sequence: Synthetic oligonucleotide
  Sense strand starting at position 2101 of SEQ ID NO: 1880320
gcccucuauguacauuauu

SEQ ID NO: 1958511 - RNA, 19 nt, Artificial Sequence
  Description of Artificial Sequence: Synthetic oligonucleotide
  Antisense strand to SEQ ID NO: 1958510
aauaauguacauagagggc

SEQ ID NO: 1958512 - RNA, 19 nt, Artificial Sequence
  Description of Artificial Sequence: Synthetic oligonucleotide
  Sense strand starting at position 2121 of SEQ ID NO: 1880320
uacggaauguucgcaauaa

SEQ ID NO: 1958513 - RNA, 19 nt, Artificial Sequence
  Description of Artificial Sequence: Synthetic oligonucleotide
  Antisense strand to SEQ ID NO: 1958512
uuauugcgaacauuccgua

SEQ ID NO: 1958514 - RNA, 19 nt, Artificial Sequence
  Description of Artificial Sequence: Synthetic oligonucleotide
  Sense strand starting at position 2153 of SEQ ID NO: 1880320
ugcugaguguaucucauuu

SEQ ID NO: 1958515 - RNA, 19 nt, Artificial Sequence
  Description of Artificial Sequence: Synthetic oligonucleotide
  Antisense strand to SEQ ID NO: 1958514
aaaugagauacacucagca

SEQ ID NO: 1958516 - RNA, 19 nt, Artificial Sequence
  Description of Artificial Sequence: Synthetic oligonucleotide
  Sense strand starting at position 2292 of SEQ ID NO: 1880320
aaacuuaaagugugauagu

SEQ ID NO: 1958517 - RNA, 19 nt, Artificial Sequence
  Description of Artificial Sequence: Synthetic oligonucleotide
  Antisense strand to SEQ ID NO: 1958516
acuaucacacuuuaaguuu

SEQ ID NO: 1958518 - RNA, 19 nt, Artificial Sequence
  Description of Artificial Sequence: Synthetic oligonucleotide
  Sense strand starting at position 2707 of SEQ ID NO: 1880320
ccuaaagaauucguuugca

SEQ ID NO: 1958519 - RNA, 19 nt, Artificial Sequence
  Description of Artificial Sequence: Synthetic oligonucleotide
  Antisense strand to SEQ ID NO: 1958518
ugcaaacgaauucuuuagg

SEQ ID NO: 1958520 - RNA, 19 nt, Artificial Sequence
  Description of Artificial Sequence: Synthetic oligonucleotide
  Sense strand starting at position 2710 of SEQ ID NO: 1880320
aaagaauucguuugcaaag

SEQ ID NO: 1958521 - RNA, 19 nt, Artificial Sequence
  Description of Artificial Sequence: Synthetic oligonucleotide
  Antisense strand to SEQ ID NO: 1958520
cuuugcaaacgaauucuuu

SEQ ID NO: 1958522 - RNA, 19 nt, Artificial Sequence
  Description of Artificial Sequence: Synthetic oligonucleotide
  Sense strand starting at position 2711 of SEQ ID NO: 1880320
aagaauucguuugcaaagu

SEQ ID NO: 1958523 - RNA, 19 nt, Artificial Sequence
  Description of Artificial Sequence: Synthetic oligonucleotide
  Antisense strand to SEQ ID NO: 1958522
acuuugcaaacgaauucuu

SEQ ID NO: 1958524 - RNA, 19 nt, Artificial Sequence
  Description of Artificial Sequence: Synthetic oligonucleotide
  Sense strand starting at position 2794 of SEQ ID NO: 1880320
ugaaguaccgugugcaaga

SEQ ID NO: 1958525 - RNA, 19 nt, Artificial Sequence
  Description of Artificial Sequence: Synthetic oligonucleotide
  Antisense strand to SEQ ID NO: 1958524
ucuugcacacgguacuuca

SEQ ID NO: 1958526 - RNA, 19 nt, Artificial Sequence
  Description of Artificial Sequence: Synthetic oligonucleotide
  Sense strand starting at position 2856 of SEQ ID NO: 1880320
gaaguucuagucuaguuag

SEQ ID NO: 1958527 - RNA, 19 nt, Artificial Sequence
  Description of Artificial Sequence: Synthetic oligonucleotide
  Antisense strand to SEQ ID NO: 1958526
cuaacuagacuagaacuuc

SEQ ID NO: 1958528 - RNA, 19 nt, Artificial Sequence
  Description of Artificial Sequence: Synthetic oligonucleotide
  Sense strand starting at position 2886 of SEQ ID NO: 1880320
acaaauaacugauggaaag

SEQ ID NO: 1958529 - RNA, 19 nt, Artificial Sequence
  Description of Artificial Sequence: Synthetic oligonucleotide
  Antisense strand to SEQ ID NO: 1958528
cuuuccaucaguuauuugu

SEQ ID NO: 1958530 - RNA, 19 nt, Artificial Sequence
  Description of Artificial Sequence: Synthetic oligonucleotide
  Sense strand starting at position 2926 of SEQ ID NO: 1880320
cuucuaauccgaggaaucu

SEQ ID NO: 1958531 - RNA, 19 nt, Artificial Sequence
  Description of Artificial Sequence: Synthetic oligonucleotide
  Antisense strand to SEQ ID NO: 1958530
agauuccucggauuagaag

SEQ ID NO: 1958532 - RNA, 19 nt, Artificial Sequence
  Description of Artificial Sequence: Synthetic oligonucleotide
  Sense strand starting at position 2932 of SEQ ID NO: 1880320
auccgaggaaucuguaaag

SEQ ID NO: 1958533 - RNA, 19 nt, Artificial Sequence
  Description of Artificial Sequence: Synthetic oligonucleotide
  Antisense strand to SEQ ID NO: 1958532
cuuuacagauuccucggau

SEQ ID NO: 1958534 - RNA, 19 nt, Artificial Sequence
  Description of Artificial Sequence: Synthetic oligonucleotide
  Sense strand starting at position 2963 of SEQ ID NO: 1880320
gggugauagcuggagcuaa

SEQ ID NO: 1958535 - RNA, 19 nt, Artificial Sequence
  Description of Artificial Sequence: Synthetic oligonucleotide
  Antisense strand to SEQ ID NO: 1958534
uuagcuccagcuaucaccc

SEQ ID NO: 1958536 - RNA, 19 nt, Artificial Sequence
  Description of Artificial Sequence: Synthetic oligonucleotide
  Sense strand starting at position 3075 of SEQ ID NO: 1880320
ugugguucaucuguguaac

SEQ ID NO: 1958537 - RNA, 19 nt, Artificial Sequence
  Description of Artificial Sequence: Synthetic oligonucleotide
  Antisense strand to SEQ ID NO: 1958536
guuacacagaugaaccaca

SEQ ID NO: 1958538 - RNA, 19 nt, Artificial Sequence
  Description of Artificial Sequence: Synthetic oligonucleotide
  Sense strand starting at position 3119 of SEQ ID NO: 1880320
auaugaauuuagggagaac

SEQ ID NO: 1958539 - RNA, 19 nt, Artificial Sequence
  Description of Artificial Sequence: Synthetic oligonucleotide
  Antisense strand to SEQ ID NO: 1958538
guucucccuaaauucauau

SEQ ID NO: 1958540 - RNA, 19 nt, Artificial Sequence
  Description of Artificial Sequence: Synthetic oligonucleotide
  Sense strand starting at position 3165 of SEQ ID NO: 1880320
uccacuacauugguuugaa

SEQ ID NO: 1958541 - RNA, 19 nt, Artificial Sequence
  Description of Artificial Sequence: Synthetic oligonucleotide
  Antisense strand to SEQ ID NO: 1958540
uucaaaccaauguagugga

SEQ ID NO: 1958542 - RNA, 19 nt, Artificial Sequence
  Description of Artificial Sequence: Synthetic oligonucleotide
  Sense strand starting at position 3166 of SEQ ID NO: 1880320
ccacuacauugguuugaaa

SEQ ID NO: 1958543 - RNA, 19 nt, Artificial Sequence
  Description of Artificial Sequence: Synthetic oligonucleotide
  Antisense strand to SEQ ID NO: 1958542
uuucaaaccaauguagugg

SEQ ID NO: 1958544 - RNA, 19 nt, Artificial Sequence
  Description of Artificial Sequence: Synthetic oligonucleotide
  Sense strand starting at position 3168 of SEQ ID NO: 1880320
acuacauugguuugaaaua

SEQ ID NO: 1958545 - RNA, 19 nt, Artificial Sequence
  Description of Artificial Sequence: Synthetic oligonucleotide
  Antisense strand to SEQ ID NO: 1958544
uauuucaaaccaauguagu

SEQ ID NO: 1958546 - RNA, 19 nt, Artificial Sequence
  Description of Artificial Sequence: Synthetic oligonucleotide
  Sense strand starting at position 3186 of SEQ ID NO: 1880320
accagaauaucaguguuaa

SEQ ID NO: 1958547 - RNA, 19 nt, Artificial Sequence
  Description of Artificial Sequence: Synthetic oligonucleotide
  Antisense strand to SEQ ID NO: 1958546
uuaacacugauauucuggu

SEQ ID NO: 1958548 - RNA, 19 nt, Artificial Sequence
  Description of Artificial Sequence: Synthetic oligonucleotide
  Sense strand starting at position 3187 of SEQ ID NO: 1880320
ccagaauaucaguguuaaa

SEQ ID NO: 1958549 - RNA, 19 nt, Artificial Sequence
  Description of Artificial Sequence: Synthetic oligonucleotide
  Antisense strand to SEQ ID NO: 1958548
uuuaacacugauauucugg

SEQ ID NO: 1958550 - RNA, 19 nt, Artificial Sequence
  Description of Artificial Sequence: Synthetic oligonucleotide
  Sense strand starting at position 3662 of SEQ ID NO: 1880320
aggucauuggaaugguuca

SEQ ID NO: 1958551 - RNA, 19 nt, Artificial Sequence
  Description of Artificial Sequence: Synthetic oligonucleotide
  Antisense strand to SEQ ID NO: 1958550
ugaaccauuccaaugaccu

SEQ ID NO: 1958552 - RNA, 19 nt, Artificial Sequence
  Description of Artificial Sequence: Synthetic oligonucleotide
  Sense strand starting at position 3961 of SEQ ID NO: 1880320
aaaguugucuuugccaaag

SEQ ID NO: 1958553 - RNA, 19 nt, Artificial Sequence
  Description of Artificial Sequence: Synthetic oligonucleotide
  Antisense strand to SEQ ID NO: 1958552
cuuuggcaaagacaacuuu

SEQ ID NO: 1958554 - RNA, 19 nt, Artificial Sequence
  Description of Artificial Sequence: Synthetic oligonucleotide
  Sense strand starting at position 54 of SEQ ID NO: 1880321
aguuacaaaucugucaaga

SEQ ID NO: 1958555 - RNA, 19 nt, Artificial Sequence
  Description of Artificial Sequence: Synthetic oligonucleotide
  Antisense strand to SEQ ID NO: 1958554
ucuugacagauuuguaacu

SEQ ID NO: 1958556 - RNA, 19 nt, Artificial Sequence
  Description of Artificial Sequence: Synthetic oligonucleotide
  Sense strand starting at position 277 of SEQ ID NO: 1880321
ggcucuuugggcuaaucca

SEQ ID NO: 1958557 - RNA, 19 nt, Artificial Sequence
  Description of Artificial Sequence: Synthetic oligonucleotide
  Antisense strand to SEQ ID NO: 1958556
uggauuagcccaaagagcc

SEQ ID NO: 1958558 - RNA, 19 nt, Artificial Sequence
  Description of Artificial Sequence: Synthetic oligonucleotide
  Sense strand starting at position 326 of SEQ ID NO: 1880321
acucgaauugccugaaaga

SEQ ID NO: 1958559 - RNA, 19 nt, Artificial Sequence
  Description of Artificial Sequence: Synthetic oligonucleotide
  Antisense strand to SEQ ID NO: 1958558
ucuuucaggcaauucgagu

SEQ ID NO: 1958560 - RNA, 19 nt, Artificial Sequence
  Description of Artificial Sequence: Synthetic oligonucleotide
  Sense strand starting at position 327 of SEQ ID NO: 1880321
cucgaauugccugaaagac

SEQ ID NO: 1958561 - RNA, 19 nt, Artificial Sequence
  Description of Artificial Sequence: Synthetic oligonucleotide
  Antisense strand to SEQ ID NO: 1958560
gucuuucaggcaauucgag

SEQ ID NO: 1958562 - RNA, 19 nt, Artificial Sequence
  Description of Artificial Sequence: Synthetic oligonucleotide
  Sense strand starting at position 567 of SEQ ID NO: 1880321
uuaagacagugagucuauu

SEQ ID NO: 1958563 - RNA, 19 nt, Artificial Sequence
  Description of Artificial Sequence: Synthetic oligonucleotide
  Antisense strand to SEQ ID NO: 1958562
aauagacucacugucuuaa

SEQ ID NO: 1958564 - RNA, 19 nt, Artificial Sequence
  Description of Artificial Sequence: Synthetic oligonucleotide
  Sense strand starting at position 573 of SEQ ID NO: 1880321
cagugagucuauucuguaa

SEQ ID NO: 1958565 - RNA, 19 nt, Artificial Sequence
  Description of Artificial Sequence: Synthetic oligonucleotide
  Antisense strand to SEQ ID NO: 1958564
uuacagaauagacucacug

SEQ ID NO: 1958566 - RNA, 19 nt, Artificial Sequence
  Description of Artificial Sequence: Synthetic oligonucleotide
  Sense strand starting at position 576 of SEQ ID NO: 1880321
ugagucuauucuguaacau

SEQ ID NO: 1958567 - RNA, 19 nt, Artificial Sequence
  Description of Artificial Sequence: Synthetic oligonucleotide
  Antisense strand to SEQ ID NO: 1958566
auguuacagaauagacuca

SEQ ID NO: 1958568 - RNA, 19 nt, Artificial Sequence
  Description of Artificial Sequence: Synthetic oligonucleotide
  Sense strand starting at position 714 of SEQ ID NO: 1880321
caaguagaguaaccuugau

SEQ ID NO: 1958569 - RNA, 19 nt, Artificial Sequence
  Description of Artificial Sequence: Synthetic oligonucleotide
  Antisense strand to SEQ ID NO: 1958568
aucaagguuacucuacuug

SEQ ID NO: 1958570 - RNA, 19 nt, Artificial Sequence
  Description of Artificial Sequence: Synthetic oligonucleotide
  Sense strand starting at position 878 of SEQ ID NO: 1880321
cuguuaagucuauaaggcu

SEQ ID NO: 1958571 - RNA, 19 nt, Artificial Sequence
  Description of Artificial Sequence: Synthetic oligonucleotide
  Antisense strand to SEQ ID NO: 1958570
agccuuauagacuuaacag

SEQ ID NO: 1958572 - RNA, 19 nt, Artificial Sequence
  Description of Artificial Sequence: Synthetic oligonucleotide
  Sense strand starting at position 895 of SEQ ID NO: 1880321
cuauuugacuaagacguga

SEQ ID NO: 1958573 - RNA, 19 nt, Artificial Sequence
  Description of Artificial Sequence: Synthetic oligonucleotide
  Antisense strand to SEQ ID NO: 1958572
ucacgucuuagucaaauag

SEQ ID NO: 1958574 - RNA, 19 nt, Artificial Sequence
  Description of Artificial Sequence: Synthetic oligonucleotide
  Sense strand starting at position 920 of SEQ ID NO: 1880321
acucgaaguauuuguugua

SEQ ID NO: 1958575 - RNA, 19 nt, Artificial Sequence
  Description of Artificial Sequence: Synthetic oligonucleotide
  Antisense strand to SEQ ID NO: 1958574
uacaacaaauacuucgagu

SEQ ID NO: 1958576 - RNA, 19 nt, Artificial Sequence
  Description of Artificial Sequence: Synthetic oligonucleotide
  Sense strand starting at position 921 of SEQ ID NO: 1880321
cucgaaguauuuguuguaa

SEQ ID NO: 1958577 - RNA, 19 nt, Artificial Sequence
  Description of Artificial Sequence: Synthetic oligonucleotide
  Antisense strand to SEQ ID NO: 1958576
uuacaacaaauacuucgag

SEQ ID NO: 1958578 - RNA, 19 nt, Artificial Sequence
  Description of Artificial Sequence: Synthetic oligonucleotide
  Sense strand starting at position 932 of SEQ ID NO: 1880321
uguuguaaacuacagcauu

SEQ ID NO: 1958579 - RNA, 19 nt, Artificial Sequence
  Description of Artificial Sequence: Synthetic oligonucleotide
  Antisense strand to SEQ ID NO: 1958578
aaugcuguaguuuacaaca

SEQ ID NO: 1958580 - RNA, 19 nt, Artificial Sequence
  Description of Artificial Sequence: Synthetic oligonucleotide
  Sense strand starting at position 1041 of SEQ ID NO: 1880321
uccaauaaucuagggucaa

SEQ ID NO: 1958581 - RNA, 19 nt, Artificial Sequence
  Description of Artificial Sequence: Synthetic oligonucleotide
  Antisense strand to SEQ ID NO: 1958580
uugacccuagauuauugga

SEQ ID NO: 1958582 - RNA, 19 nt, Artificial Sequence
  Description of Artificial Sequence: Synthetic oligonucleotide
  Sense strand starting at position 1207 of SEQ ID NO: 1880321
agaacucuuguguaggcau

SEQ ID NO: 1958583 - RNA, 19 nt, Artificial Sequence
  Description of Artificial Sequence: Synthetic oligonucleotide
  Antisense strand to SEQ ID NO: 1958582
augccuacacaagaguucu

SEQ ID NO: 1958584 - RNA, 19 nt, Artificial Sequence
  Description of Artificial Sequence: Synthetic oligonucleotide
  Sense strand starting at position 1209 of SEQ ID NO: 1880321
aacucuuguguaggcauaa

SEQ ID NO: 1958585 - RNA, 19 nt, Artificial Sequence
  Description of Artificial Sequence: Synthetic oligonucleotide
  Antisense strand to SEQ ID NO: 1958584
uuaugccuacacaagaguu

SEQ ID NO: 1958586 - RNA, 19 nt, Artificial Sequence
  Description of Artificial Sequence: Synthetic oligonucleotide
  Sense strand starting at position 1218 of SEQ ID NO: 1880321
guaggcauaaucugugaga

SEQ ID NO: 1958587 - RNA, 19 nt, Artificial Sequence
  Description of Artificial Sequence: Synthetic oligonucleotide
  Antisense strand to SEQ ID NO: 1958586
ucucacagauuaugccuac

SEQ ID NO: 1958588 - RNA, 19 nt, Artificial Sequence
  Description of Artificial Sequence: Synthetic oligonucleotide
  Sense strand starting at position 1219 of SEQ ID NO: 1880321
uaggcauaaucugugagau

SEQ ID NO: 1958589 - RNA, 19 nt, Artificial Sequence
  Description of Artificial Sequence: Synthetic oligonucleotide
  Antisense strand to SEQ ID NO: 1958588
aucucacagauuaugccua

SEQ ID NO: 1958590 - RNA, 19 nt, Artificial Sequence
  Description of Artificial Sequence: Synthetic oligonucleotide
  Sense strand starting at position 1220 of SEQ ID NO: 1880321
aggcauaaucugugagaug

SEQ ID NO: 1958591 - RNA, 19 nt, Artificial Sequence
  Description of Artificial Sequence: Synthetic oligonucleotide
  Antisense strand to SEQ ID NO: 1958590
caucucacagauuaugccu

SEQ ID NO: 1958592 - RNA, 19 nt, Artificial Sequence
  Description of Artificial Sequence: Synthetic oligonucleotide
  Sense strand starting at position 1229 of SEQ ID NO: 1880321
cugugagauguuuauaguu

SEQ ID NO: 1958593 - RNA, 19 nt, Artificial Sequence
  Description of Artificial Sequence: Synthetic oligonucleotide
  Antisense strand to SEQ ID NO: 1958592
aacuauaaacaucucacag

SEQ ID NO: 1958594 - RNA, 19 nt, Artificial Sequence
  Description of Artificial Sequence: Synthetic oligonucleotide
  Sense strand starting at position 2256 of SEQ ID NO: 1880321
uggagauucuuauugcaua

SEQ ID NO: 1958595 - RNA, 19 nt, Artificial Sequence
  Description of Artificial Sequence: Synthetic oligonucleotide
  Antisense strand to SEQ ID NO: 1958594
uaugcaauaagaaucucca

SEQ ID NO: 1958596 - RNA, 19 nt, Artificial Sequence
  Description of Artificial Sequence: Synthetic oligonucleotide
  Sense strand starting at position 2323 of SEQ ID NO: 1880321
gauggaucccacuggccaa

SEQ ID NO: 1958597 - RNA, 19 nt, Artificial Sequence
  Description of Artificial Sequence: Synthetic oligonucleotide
  Antisense strand to SEQ ID NO: 1958596
uuggccagugggauccauc

SEQ ID NO: 1958598 - RNA, 19 nt, Artificial Sequence
  Description of Artificial Sequence: Synthetic oligonucleotide
  Sense strand starting at position 2397 of SEQ ID NO: 1880321
gaggguucccuggagagca

SEQ ID NO: 1958599 - RNA, 19 nt, Artificial Sequence
  Description of Artificial Sequence: Synthetic oligonucleotide
  Antisense strand to SEQ ID NO: 1958598
ugcucuccagggaacccuc

SEQ ID NO: 1958600 - RNA, 19 nt, Artificial Sequence
  Description of Artificial Sequence: Synthetic oligonucleotide
  Sense strand starting at position 2678 of SEQ ID NO: 1880321
aaagaagugucaccuggaa

SEQ ID NO: 1958601 - RNA, 19 nt, Artificial Sequence
  Description of Artificial Sequence: Synthetic oligonucleotide
  Antisense strand to SEQ ID NO: 1958600
uuccaggugacacuucuuu

SEQ ID NO: 1958602 - RNA, 19 nt, Artificial Sequence
  Description of Artificial Sequence: Synthetic oligonucleotide
  Sense strand starting at position 2732 of SEQ ID NO: 1880321
ccugauaacugagauuucu

SEQ ID NO: 1958603 - RNA, 19 nt, Artificial Sequence
  Description of Artificial Sequence: Synthetic oligonucleotide
  Antisense strand to SEQ ID NO: 1958602
agaaaucucaguuaucagg

SEQ ID NO: 1958604 - RNA, 19 nt, Artificial Sequence
  Description of Artificial Sequence: Synthetic oligonucleotide
  Sense strand starting at position 2791 of SEQ ID NO: 1880321
ggaggcuagugauucucaa

SEQ ID NO: 1958605 - RNA, 19 nt, Artificial Sequence
  Description of Artificial Sequence: Synthetic oligonucleotide
  Antisense strand to SEQ ID NO: 1958604
uugagaaucacuagccucc

SEQ ID NO: 1958606 - RNA, 19 nt, Artificial Sequence
  Description of Artificial Sequence: Synthetic oligonucleotide
  Sense strand starting at position 2812 of SEQ ID NO: 1880321
gugguugcacauuaaaguu

SEQ ID NO: 1958607 - RNA, 19 nt, Artificial Sequence
  Description of Artificial Sequence: Synthetic oligonucleotide
  Antisense strand to SEQ ID NO: 1958606
aacuuuaaugugcaaccac

SEQ ID NO: 1958608 - RNA, 19 nt, Artificial Sequence
  Description of Artificial Sequence: Synthetic oligonucleotide
  Sense strand starting at position 2973 of SEQ ID NO: 1880321
cucuaagcagggugauaaa

SEQ ID NO: 1958609 - RNA, 19 nt, Artificial Sequence
  Description of Artificial Sequence: Synthetic oligonucleotide
  Antisense strand to SEQ ID NO: 1958608
uuuaucacccugcuuagag

SEQ ID NO: 1958610 - RNA, 19 nt, Artificial Sequence
  Description of Artificial Sequence: Synthetic oligonucleotide
  Sense strand starting at position 2996 of SEQ ID NO: 1880321
ggagcugaguacuuguaau

SEQ ID NO: 1958611 - RNA, 19 nt, Artificial Sequence
  Description of Artificial Sequence: Synthetic oligonucleotide
  Antisense strand to SEQ ID NO: 1958610
auuacaaguacucagcucc

SEQ ID NO: 1958612 - RNA, 19 nt, Artificial Sequence
  Description of Artificial Sequence: Synthetic oligonucleotide
  Sense strand starting at position 3032 of SEQ ID NO: 1880321
gaaagugagucccugggaa

SEQ ID NO: 1958613 - RNA, 19 nt, Artificial Sequence
  Description of Artificial Sequence: Synthetic oligonucleotide
  Antisense strand to SEQ ID NO: 1958612
uucccagggacucacuuuc

SEQ ID NO: 1958614 - RNA, 19 nt, Artificial Sequence
  Description of Artificial Sequence: Synthetic oligonucleotide
  Sense strand starting at position 3236 of SEQ ID NO: 1880321
ccucauuccuggucacacu

SEQ ID NO: 1958615 - RNA, 19 nt, Artificial Sequence
  Description of Artificial Sequence: Synthetic oligonucleotide
  Antisense strand to SEQ ID NO: 1958614
agugugaccaggaaugagg

SEQ ID NO: 1958616 - RNA, 19 nt, Artificial Sequence
  Description of Artificial Sequence: Synthetic oligonucleotide
  Sense strand starting at position 3273 of SEQ ID NO: 1880321
cuaacuauagcaggaguuu

SEQ ID NO: 1958617 - RNA, 19 nt, Artificial Sequence
  Description of Artificial Sequence: Synthetic oligonucleotide
  Antisense strand to SEQ ID NO: 1958616
aaacuccugcuauaguuag

SEQ ID NO: 1958618 - RNA, 19 nt, Artificial Sequence
  Description of Artificial Sequence: Synthetic oligonucleotide
  Sense strand starting at position 3285 of SEQ ID NO: 1880321
ggaguuucucaagguucuu

SEQ ID NO: 1958619 - RNA, 19 nt, Artificial Sequence
  Description of Artificial Sequence: Synthetic oligonucleotide
  Antisense strand to SEQ ID NO: 1958618
aagaaccuugagaaacucc

SEQ ID NO: 1958620 - RNA, 19 nt, Artificial Sequence
  Description of Artificial Sequence: Synthetic oligonucleotide
  Sense strand starting at position 3369 of SEQ ID NO: 1880321
cuaggacucuuacuguuua

SEQ ID NO: 1958621 - RNA, 19 nt, Artificial Sequence
  Description of Artificial Sequence: Synthetic oligonucleotide
  Antisense strand to SEQ ID NO: 1958620
uaaacaguaagaguccuag

SEQ ID NO: 1958622 - RNA, 19 nt, Artificial Sequence
  Description of Artificial Sequence: Synthetic oligonucleotide
  Sense strand starting at position 3428 of SEQ ID NO: 1880321
ggaagagcuucaguuugau

SEQ ID NO: 1958623 - RNA, 19 nt, Artificial Sequence
  Description of Artificial Sequence: Synthetic oligonucleotide
  Antisense strand to SEQ ID NO: 1958622
aucaaacugaagcucuucc

SEQ ID NO: 1958624 - RNA, 19 nt, Artificial Sequence
  Description of Artificial Sequence: Synthetic oligonucleotide
  Sense strand starting at position 3622 of SEQ ID NO: 1880321
auuagagcucacuggcauu

SEQ ID NO: 1958625 - RNA, 19 nt, Artificial Sequence
  Description of Artificial Sequence: Synthetic oligonucleotide
  Antisense strand to SEQ ID NO: 1958624
aaugccagugagcucuaau

SEQ ID NO: 1958626 - RNA, 19 nt, Artificial Sequence
  Description of Artificial Sequence: Synthetic oligonucleotide
  Sense strand starting at position 3761 of SEQ ID NO: 1880321
ggcuuugaauuguccugaa

SEQ ID NO: 1958627 - RNA, 19 nt, Artificial Sequence
  Description of Artificial Sequence: Synthetic oligonucleotide
  Antisense strand to SEQ ID NO: 1958626
uucaggacaauucaaagcc

SEQ ID NO: 1958628 - RNA, 19 nt, Artificial Sequence
  Description of Artificial Sequence: Synthetic oligonucleotide
  Sense strand starting at position 3786 of SEQ ID NO: 1880321
aguaauaaggauuguguuu

SEQ ID NO: 1958629 - RNA, 19 nt, Artificial Sequence
  Description of Artificial Sequence: Synthetic oligonucleotide
  Antisense strand to SEQ ID NO: 1958628
aaacacaauccuuauuacu

SEQ ID NO: 1958630 - RNA, 19 nt, Artificial Sequence
  Description of Artificial Sequence: Synthetic oligonucleotide
  Sense strand starting at position 3950 of SEQ ID NO: 1880321
ucuccugaacuuuagguau

SEQ ID NO: 1958631 - RNA, 19 nt, Artificial Sequence
  Description of Artificial Sequence: Synthetic oligonucleotide
  Antisense strand to SEQ ID NO: 1958630
auaccuaaaguucaggaga

SEQ ID NO: 1958632 - RNA, 19 nt, Artificial Sequence
  Description of Artificial Sequence: Synthetic oligonucleotide
  Sense strand starting at position 3953 of SEQ ID NO: 1880321
ccugaacuuuagguauuau

SEQ ID NO: 1958633 - RNA, 19 nt, Artificial Sequence
  Description of Artificial Sequence: Synthetic oligonucleotide
  Antisense strand to SEQ ID NO: 1958632
auaauaccuaaaguucagg

SEQ ID NO: 1958634 - RNA, 19 nt, Artificial Sequence
  Description of Artificial Sequence: Synthetic oligonucleotide
  Sense strand starting at position 160 of SEQ ID NO: 1880322
gauuccaguguuugcauuu

SEQ ID NO: 1958635 - RNA, 19 nt, Artificial Sequence
  Description of Artificial Sequence: Synthetic oligonucleotide
  Antisense strand to SEQ ID NO: 1958634
aaaugcaaacacuggaauc

SEQ ID NO: 1958636 - RNA, 19 nt, Artificial Sequence
  Description of Artificial Sequence: Synthetic oligonucleotide
  Sense strand starting at position 463 of SEQ ID NO: 1880322
cagucuaacccugggaacu

SEQ ID NO: 1958637 - RNA, 19 nt, Artificial Sequence
  Description of Artificial Sequence: Synthetic oligonucleotide
  Antisense strand to SEQ ID NO: 1958636
aguucccaggguuagacug

SEQ ID NO: 1958638 - RNA, 19 nt, Artificial Sequence
  Description of Artificial Sequence: Synthetic oligonucleotide
  Sense strand starting at position 464 of SEQ ID NO: 1880322
agucuaacccugggaacuu

SEQ ID NO: 1958639 - RNA, 19 nt, Artificial Sequence
  Description of Artificial Sequence: Synthetic oligonucleotide
  Antisense strand to SEQ ID NO: 1958638
aaguucccaggguuagacu

SEQ ID NO: 1958640 - RNA, 19 nt, Artificial Sequence
  Description of Artificial Sequence: Synthetic oligonucleotide
  Sense strand starting at position 562 of SEQ ID NO: 1880322
gaagaauggaagcgaucua

SEQ ID NO: 1958641 - RNA, 19 nt, Artificial Sequence
  Description of Artificial Sequence: Synthetic oligonucleotide
  Antisense strand to SEQ ID NO: 1958640
uagaucgcuuccauucuuc

SEQ ID NO: 1958642 - RNA, 19 nt, Artificial Sequence
  Description of Artificial Sequence: Synthetic oligonucleotide
  Sense strand starting at position 660 of SEQ ID NO: 1880322
guaguaggugagggaugaa

SEQ ID NO: 1958643 - RNA, 19 nt, Artificial Sequence
  Description of Artificial Sequence: Synthetic oligonucleotide
  Antisense strand to SEQ ID NO: 1958642
uucaucccucaccuacuac

SEQ ID NO: 1958644 - RNA, 19 nt, Artificial Sequence
  Description of Artificial Sequence: Synthetic oligonucleotide
  Sense strand starting at position 701 of SEQ ID NO: 1880322
ucuguaacuugaguuauag

SEQ ID NO: 1958645 - RNA, 19 nt, Artificial Sequence
  Description of Artificial Sequence: Synthetic oligonucleotide
  Antisense strand to SEQ ID NO: 1958644
cuauaacucaaguuacaga

SEQ ID NO: 1958646 - RNA, 19 nt, Artificial Sequence
  Description of Artificial Sequence: Synthetic oligonucleotide
  Sense strand starting at position 881 of SEQ ID NO: 1880322
ggagcuaugucaccaaaga

SEQ ID NO: 1958647 - RNA, 19 nt, Artificial Sequence
  Description of Artificial Sequence: Synthetic oligonucleotide
  Antisense strand to SEQ ID NO: 1958646
ucuuuggugacauagcucc

SEQ ID NO: 1958648 - RNA, 19 nt, Artificial Sequence
  Description of Artificial Sequence: Synthetic oligonucleotide
  Sense strand starting at position 882 of SEQ ID NO: 1880322
gagcuaugucaccaaagau

SEQ ID NO: 1958649 - RNA, 19 nt, Artificial Sequence
  Description of Artificial Sequence: Synthetic oligonucleotide
  Antisense strand to SEQ ID NO: 1958648
aucuuuggugacauagcuc

SEQ ID NO: 1958650 - RNA, 19 nt, Artificial Sequence
  Description of Artificial Sequence: Synthetic oligonucleotide
  Sense strand starting at position 959 of SEQ ID NO: 1880322
gaggguacuagaugguaca

SEQ ID NO: 1958651 - RNA, 19 nt, Artificial Sequence
  Description of Artificial Sequence: Synthetic oligonucleotide
  Antisense strand to SEQ ID NO: 1958650
uguaccaucuaguacccuc

SEQ ID NO: 1958652 - RNA, 19 nt, Artificial Sequence
  Description of Artificial Sequence: Synthetic oligonucleotide
  Sense strand starting at position 979 of SEQ ID NO: 1880322
agaacugagcccugaugua

SEQ ID NO: 1958653 - RNA, 19 nt, Artificial Sequence
  Description of Artificial Sequence: Synthetic oligonucleotide
  Antisense strand to SEQ ID NO: 1958652
uacaucagggcucaguucu

SEQ ID NO: 1958654 - RNA, 19 nt, Artificial Sequence
  Description of Artificial Sequence: Synthetic oligonucleotide
  Sense strand starting at position 1013 of SEQ ID NO: 1880322
ugccauuucuuaguuguau

SEQ ID NO: 1958655 - RNA, 19 nt, Artificial Sequence
  Description of Artificial Sequence: Synthetic oligonucleotide
  Antisense strand to SEQ ID NO: 1958654
auacaacuaagaaauggca

SEQ ID NO: 1958656 - RNA, 19 nt, Artificial Sequence
  Description of Artificial Sequence: Synthetic oligonucleotide
  Sense strand starting at position 1014 of SEQ ID NO: 1880322
gccauuucuuaguuguauc

SEQ ID NO: 1958657 - RNA, 19 nt, Artificial Sequence
  Description of Artificial Sequence: Synthetic oligonucleotide
  Antisense strand to SEQ ID NO: 1958656
gauacaacuaagaaauggc

SEQ ID NO: 1958658 - RNA, 19 nt, Artificial Sequence
  Description of Artificial Sequence: Synthetic oligonucleotide
  Sense strand starting at position 1022 of SEQ ID NO: 1880322
uuaguuguaucacuuagaa

SEQ ID NO: 1958659 - RNA, 19 nt, Artificial Sequence
  Description of Artificial Sequence: Synthetic oligonucleotide
  Antisense strand to SEQ ID NO: 1958658
uucuaagugauacaacuaa

SEQ ID NO: 1958660 - RNA, 19 nt, Artificial Sequence
  Description of Artificial Sequence: Synthetic oligonucleotide
  Sense strand starting at position 1024 of SEQ ID NO: 1880322
aguuguaucacuuagaagu

SEQ ID NO: 1958661 - RNA, 19 nt, Artificial Sequence
  Description of Artificial Sequence: Synthetic oligonucleotide
  Antisense strand to SEQ ID NO: 1958660
acuucuaagugauacaacu

SEQ ID NO: 1958662 - RNA, 19 nt, Artificial Sequence
  Description of Artificial Sequence: Synthetic oligonucleotide
  Sense strand starting at position 1037 of SEQ ID NO: 1880322
agaagucauuucugaggag

SEQ ID NO: 1958663 - RNA, 19 nt, Artificial Sequence
  Description of Artificial Sequence: Synthetic oligonucleotide
  Antisense strand to SEQ ID NO: 1958662
cuccucagaaaugacuucu

SEQ ID NO: 1958664 - RNA, 19 nt, Artificial Sequence
  Description of Artificial Sequence: Synthetic oligonucleotide
  Sense strand starting at position 1038 of SEQ ID NO: 1880322
gaagucauuucugaggagu

SEQ ID NO: 1958665 - RNA, 19 nt, Artificial Sequence
  Description of Artificial Sequence: Synthetic oligonucleotide
  Antisense strand to SEQ ID NO: 1958664
acuccucagaaaugacuuc

SEQ ID NO: 1958666 - RNA, 19 nt, Artificial Sequence
  Description of Artificial Sequence: Synthetic oligonucleotide
  Sense strand starting at position 1084 of SEQ ID NO: 1880322
aguaguuuacacuaugcua

SEQ ID NO: 1958667 - RNA, 19 nt, Artificial Sequence
  Description of Artificial Sequence: Synthetic oligonucleotide
  Antisense strand to SEQ ID NO: 1958666
uagcauaguguaaacuacu

SEQ ID NO: 1958668 - RNA, 19 nt, Artificial Sequence
  Description of Artificial Sequence: Synthetic oligonucleotide
  Sense strand starting at position 1106 of SEQ ID NO: 1880322
guaccaaauuguuuaccca

SEQ ID NO: 1958669 - RNA, 19 nt, Artificial Sequence
  Description of Artificial Sequence: Synthetic oligonucleotide
  Antisense strand to SEQ ID NO: 1958668
uggguaaacaauuugguac

SEQ ID NO: 1958670 - RNA, 19 nt, Artificial Sequence
  Description of Artificial Sequence: Synthetic oligonucleotide
  Sense strand starting at position 1192 of SEQ ID NO: 1880322
ccaaucguucgagacauua

SEQ ID NO: 1958671 - RNA, 19 nt, Artificial Sequence
  Description of Artificial Sequence: Synthetic oligonucleotide
  Antisense strand to SEQ ID NO: 1958670
uaaugucucgaacgauugg

SEQ ID NO: 1958672 - RNA, 19 nt, Artificial Sequence
  Description of Artificial Sequence: Synthetic oligonucleotide
  Sense strand starting at position 1215 of SEQ ID NO: 1880322
aggcuuugugaggaguaug

SEQ ID NO: 1958673 - RNA, 19 nt, Artificial Sequence
  Description of Artificial Sequence: Synthetic oligonucleotide
  Antisense strand to SEQ ID NO: 1958672
cauacuccucacaaagccu

SEQ ID NO: 1958674 - RNA, 19 nt, Artificial Sequence
  Description of Artificial Sequence: Synthetic oligonucleotide
  Sense strand starting at position 1220 of SEQ ID NO: 1880322
uugugaggaguaugaggaa

SEQ ID NO: 1958675 - RNA, 19 nt, Artificial Sequence
  Description of Artificial Sequence: Synthetic oligonucleotide
  Antisense strand to SEQ ID NO: 1958674
uuccucauacuccucacaa

SEQ ID NO: 1958676 - RNA, 19 nt, Artificial Sequence
  Description of Artificial Sequence: Synthetic oligonucleotide
  Sense strand starting at position 1302 of SEQ ID NO: 1880322
agaaguuauuagcucuaaa

SEQ ID NO: 1958677 - RNA, 19 nt, Artificial Sequence
  Description of Artificial Sequence: Synthetic oligonucleotide
  Antisense strand to SEQ ID NO: 1958676
uuuagagcuaauaacuucu

SEQ ID NO: 1958678 - RNA, 19 nt, Artificial Sequence
  Description of Artificial Sequence: Synthetic oligonucleotide
  Sense strand starting at position 1305 of SEQ ID NO: 1880322
aguuauuagcucuaaagau

SEQ ID NO: 1958679 - RNA, 19 nt, Artificial Sequence
  Description of Artificial Sequence: Synthetic oligonucleotide
  Antisense strand to SEQ ID NO: 1958678
aucuuuagagcuaauaacu

SEQ ID NO: 1958680 - RNA, 19 nt, Artificial Sequence
  Description of Artificial Sequence: Synthetic oligonucleotide
  Sense strand starting at position 1660 of SEQ ID NO: 1880322
gauauaagacauugguauc

SEQ ID NO: 1958681 - RNA, 19 nt, Artificial Sequence
  Description of Artificial Sequence: Synthetic oligonucleotide
  Antisense strand to SEQ ID NO: 1958680
gauaccaaugucuuauauc

SEQ ID NO: 1958682 - RNA, 19 nt, Artificial Sequence
  Description of Artificial Sequence: Synthetic oligonucleotide
  Sense strand starting at position 1672 of SEQ ID NO: 1880322
ugguaucaucguuauauca

SEQ ID NO: 1958683 - RNA, 19 nt, Artificial Sequence
  Description of Artificial Sequence: Synthetic oligonucleotide
  Antisense strand to SEQ ID NO: 1958682
ugauauaacgaugauacca

SEQ ID NO: 1958684 - RNA, 19 nt, Artificial Sequence
  Description of Artificial Sequence: Synthetic oligonucleotide
  Sense strand starting at position 1733 of SEQ ID NO: 1880322
gagagagguuguguuauag

SEQ ID NO: 1958685 - RNA, 19 nt, Artificial Sequence
  Description of Artificial Sequence: Synthetic oligonucleotide
  Antisense strand to SEQ ID NO: 1958684
cuauaacacaaccucucuc

SEQ ID NO: 1958686 - RNA, 19 nt, Artificial Sequence
  Description of Artificial Sequence: Synthetic oligonucleotide
  Sense strand starting at position 2046 of SEQ ID NO: 1880322
aacguuagauugguaauag

SEQ ID NO: 1958687 - RNA, 19 nt, Artificial Sequence
  Description of Artificial Sequence: Synthetic oligonucleotide
  Antisense strand to SEQ ID NO: 1958686
cuauuaccaaucuaacguu

SEQ ID NO: 1958688 - RNA, 19 nt, Artificial Sequence
  Description of Artificial Sequence: Synthetic oligonucleotide
  Sense strand starting at position 2088 of SEQ ID NO: 1880322
guauaacucccguaaacac

SEQ ID NO: 1958689 - RNA, 19 nt, Artificial Sequence
  Description of Artificial Sequence: Synthetic oligonucleotide
  Antisense strand to SEQ ID NO: 1958688
guguuuacgggaguuauac

SEQ ID NO: 1958690 - RNA, 19 nt, Artificial Sequence
  Description of Artificial Sequence: Synthetic oligonucleotide
  Sense strand starting at position 2199 of SEQ ID NO: 1880322
aucccagagguaugccaau

SEQ ID NO: 1958691 - RNA, 19 nt, Artificial Sequence
  Description of Artificial Sequence: Synthetic oligonucleotide
  Antisense strand to SEQ ID NO: 1958690
auuggcauaccucugggau

SEQ ID NO: 1958692 - RNA, 19 nt, Artificial Sequence
  Description of Artificial Sequence: Synthetic oligonucleotide
  Sense strand starting at position 2366 of SEQ ID NO: 1880322
cucucagucugccuuauuu

SEQ ID NO: 1958693 - RNA, 19 nt, Artificial Sequence
  Description of Artificial Sequence: Synthetic oligonucleotide
  Antisense strand to SEQ ID NO: 1958692
aaauaaggcagacugagag

SEQ ID NO: 1958694 - RNA, 19 nt, Artificial Sequence
  Description of Artificial Sequence: Synthetic oligonucleotide
  Sense strand starting at position 2649 of SEQ ID NO: 1880322
uaaggauucgcugcucgua

SEQ ID NO: 1958695 - RNA, 19 nt, Artificial Sequence
  Description of Artificial Sequence: Synthetic oligonucleotide
  Antisense strand to SEQ ID NO: 1958694
uacgagcagcgaauccuua

SEQ ID NO: 1958696 - RNA, 19 nt, Artificial Sequence
  Description of Artificial Sequence: Synthetic oligonucleotide
  Sense strand starting at position 2723 of SEQ ID NO: 1880322
ugaauaguauuugaaugag

SEQ ID NO: 1958697 - RNA, 19 nt, Artificial Sequence
  Description of Artificial Sequence: Synthetic oligonucleotide
  Antisense strand to SEQ ID NO: 1958696
cucauucaaauacuauuca

SEQ ID NO: 1958698 - RNA, 19 nt, Artificial Sequence
  Description of Artificial Sequence: Synthetic oligonucleotide
  Sense strand starting at position 2986 of SEQ ID NO: 1880322
acucuuacuuggccuugaa

SEQ ID NO: 1958699 - RNA, 19 nt, Artificial Sequence
  Description of Artificial Sequence: Synthetic oligonucleotide
  Antisense strand to SEQ ID NO: 1958698
uucaaggccaaguaagagu

SEQ ID NO: 1958700 - RNA, 19 nt, Artificial Sequence
  Description of Artificial Sequence: Synthetic oligonucleotide
  Sense strand starting at position 2990 of SEQ ID NO: 1880322
uuacuuggccuugaagacu

SEQ ID NO: 1958701 - RNA, 19 nt, Artificial Sequence
  Description of Artificial Sequence: Synthetic oligonucleotide
  Antisense strand to SEQ ID NO: 1958700
agucuucaaggccaaguaa

SEQ ID NO: 1958702 - RNA, 19 nt, Artificial Sequence
  Description of Artificial Sequence: Synthetic oligonucleotide
  Sense strand starting at position 3019 of SEQ ID NO: 1880322
agaaguuagucuucccaga

SEQ ID NO: 1958703 - RNA, 19 nt, Artificial Sequence
  Description of Artificial Sequence: Synthetic oligonucleotide
  Antisense strand to SEQ ID NO: 1958702
ucugggaagacuaacuucu

SEQ ID NO: 1958704 - RNA, 19 nt, Artificial Sequence
  Description of Artificial Sequence: Synthetic oligonucleotide
  Sense strand starting at position 3032 of SEQ ID NO: 1880322
cccagaaagccuuagccuu

SEQ ID NO: 1958705 - RNA, 19 nt, Artificial Sequence
  Description of Artificial Sequence: Synthetic oligonucleotide
  Antisense strand to SEQ ID NO: 1958704
aaggcuaaggcuuucuggg

SEQ ID NO: 1958706 - RNA, 19 nt, Artificial Sequence
  Description of Artificial Sequence: Synthetic oligonucleotide
  Sense strand starting at position 3061 of SEQ ID NO: 1880322
gugcucuuccuugagaaga

SEQ ID NO: 1958707 - RNA, 19 nt, Artificial Sequence
  Description of Artificial Sequence: Synthetic oligonucleotide
  Antisense strand to SEQ ID NO: 1958706
ucuucucaaggaagagcac

SEQ ID NO: 1958708 - RNA, 19 nt, Artificial Sequence
  Description of Artificial Sequence: Synthetic oligonucleotide
  Sense strand starting at position 3213 of SEQ ID NO: 1880322
gcaggugcccaauaaauuc

SEQ ID NO: 1958709 - RNA, 19 nt, Artificial Sequence
  Description of Artificial Sequence: Synthetic oligonucleotide
  Antisense strand to SEQ ID NO: 1958708
gaauuuauugggcaccugc

SEQ ID NO: 1958710 - RNA, 19 nt, Artificial Sequence
  Description of Artificial Sequence: Synthetic oligonucleotide
  Sense strand starting at position 3228 of SEQ ID NO: 1880322
auuccuguagaaugaauau

SEQ ID NO: 1958711 - RNA, 19 nt, Artificial Sequence
  Description of Artificial Sequence: Synthetic oligonucleotide
  Antisense strand to SEQ ID NO: 1958710
auauucauucuacaggaau

SEQ ID NO: 1958712 - RNA, 19 nt, Artificial Sequence
  Description of Artificial Sequence: Synthetic oligonucleotide
  Sense strand starting at position 3607 of SEQ ID NO: 1880322
agugauaagaaagguaagu

SEQ ID NO: 1958713 - RNA, 19 nt, Artificial Sequence
  Description of Artificial Sequence: Synthetic oligonucleotide
  Antisense strand to SEQ ID NO: 1958712
acuuaccuuucuuaucacu

SEQ ID NO: 1958714 - RNA, 19 nt, Artificial Sequence
  Description of Artificial Sequence: Synthetic oligonucleotide
  Sense strand starting at position 88 of SEQ ID NO: 1880323
ccauuaugcucucuggacu

SEQ ID NO: 1958715 - RNA, 19 nt, Artificial Sequence
  Description of Artificial Sequence: Synthetic oligonucleotide
  Antisense strand to SEQ ID NO: 1958714
aguccagagagcauaaugg

SEQ ID NO: 1958716 - RNA, 19 nt, Artificial Sequence
  Description of Artificial Sequence: Synthetic oligonucleotide
  Sense strand starting at position 120 of SEQ ID NO: 1880323
gaagaugugagcuguaaag

SEQ ID NO: 1958717 - RNA, 19 nt, Artificial Sequence
  Description of Artificial Sequence: Synthetic oligonucleotide
  Antisense strand to SEQ ID NO: 1958716
cuuuacagcucacaucuuc

SEQ ID NO: 1958718 - RNA, 19 nt, Artificial Sequence
  Description of Artificial Sequence: Synthetic oligonucleotide
  Sense strand starting at position 122 of SEQ ID NO: 1880323
agaugugagcuguaaagca

SEQ ID NO: 1958719 - RNA, 19 nt, Artificial Sequence
  Description of Artificial Sequence: Synthetic oligonucleotide
  Antisense strand to SEQ ID NO: 1958718
ugcuuuacagcucacaucu

SEQ ID NO: 1958720 - RNA, 19 nt, Artificial Sequence
  Description of Artificial Sequence: Synthetic oligonucleotide
  Sense strand starting at position 366 of SEQ ID NO: 1880323
gcaguauaaucauccauga

SEQ ID NO: 1958721 - RNA, 19 nt, Artificial Sequence
  Description of Artificial Sequence: Synthetic oligonucleotide
  Antisense strand to SEQ ID NO: 1958720
ucauggaugauuauacugc

SEQ ID NO: 1958722 - RNA, 19 nt, Artificial Sequence
  Description of Artificial Sequence: Synthetic oligonucleotide
  Sense strand starting at position 495 of SEQ ID NO: 1880323
acacauggcugucccauua

SEQ ID NO: 1958723 - RNA, 19 nt, Artificial Sequence
  Description of Artificial Sequence: Synthetic oligonucleotide
  Antisense strand to SEQ ID NO: 1958722
uaaugggacagccaugugu

SEQ ID NO: 1958724 - RNA, 19 nt, Artificial Sequence
  Description of Artificial Sequence: Synthetic oligonucleotide
  Sense strand starting at position 599 of SEQ ID NO: 1880323
ccugaaauguacuucugag

SEQ ID NO: 1958725 - RNA, 19 nt, Artificial Sequence
  Description of Artificial Sequence: Synthetic oligonucleotide
  Antisense strand to SEQ ID NO: 1958724
cucagaaguacauuucagg

SEQ ID NO: 1958726 - RNA, 19 nt, Artificial Sequence
  Description of Artificial Sequence: Synthetic oligonucleotide
  Sense strand starting at position 748 of SEQ ID NO: 1880323
ccaaaugaguuucuuagaa

SEQ ID NO: 1958727 - RNA, 19 nt, Artificial Sequence
  Description of Artificial Sequence: Synthetic oligonucleotide
  Antisense strand to SEQ ID NO: 1958726
uucuaagaaacucauuugg

SEQ ID NO: 1958728 - RNA, 19 nt, Artificial Sequence
  Description of Artificial Sequence: Synthetic oligonucleotide
  Sense strand starting at position 760 of SEQ ID NO: 1880323
cuuagaauauuugacuaug

SEQ ID NO: 1958729 - RNA, 19 nt, Artificial Sequence
  Description of Artificial Sequence: Synthetic oligonucleotide
  Antisense strand to SEQ ID NO: 1958728
cauagucaaauauucuaag

SEQ ID NO: 1958730 - RNA, 19 nt, Artificial Sequence
  Description of Artificial Sequence: Synthetic oligonucleotide
  Sense strand starting at position 1199 of SEQ ID NO: 1880323
gccucugaaauggaauguu

SEQ ID NO: 1958731 - RNA, 19 nt, Artificial Sequence
  Description of Artificial Sequence: Synthetic oligonucleotide
  Antisense strand to SEQ ID NO: 1958730
aacauuccauuucagaggc

SEQ ID NO: 1958732 - RNA, 19 nt, Artificial Sequence
  Description of Artificial Sequence: Synthetic oligonucleotide
  Sense strand starting at position 1202 of SEQ ID NO: 1880323
ucugaaauggaauguuaau

SEQ ID NO: 1958733 - RNA, 19 nt, Artificial Sequence
  Description of Artificial Sequence: Synthetic oligonucleotide
  Antisense strand to SEQ ID NO: 1958732
auuaacauuccauuucaga

SEQ ID NO: 1958734 - RNA, 19 nt, Artificial Sequence
  Description of Artificial Sequence: Synthetic oligonucleotide
  Sense strand starting at position 1211 of SEQ ID NO: 1880323
gaauguuaauuagugugga

SEQ ID NO: 1958735 - RNA, 19 nt, Artificial Sequence
  Description of Artificial Sequence: Synthetic oligonucleotide
  Antisense strand to SEQ ID NO: 1958734
uccacacuaauuaacauuc

SEQ ID NO: 1958736 - RNA, 19 nt, Artificial Sequence
  Description of Artificial Sequence: Synthetic oligonucleotide
  Sense strand starting at position 1216 of SEQ ID NO: 1880323
uuaauuaguguggaucuuu

SEQ ID NO: 1958737 - RNA, 19 nt, Artificial Sequence
  Description of Artificial Sequence: Synthetic oligonucleotide
  Antisense strand to SEQ ID NO: 1958736
aaagauccacacuaauuaa

SEQ ID NO: 1958738 - RNA, 19 nt, Artificial Sequence
  Description of Artificial Sequence: Synthetic oligonucleotide
  Sense strand starting at position 1327 of SEQ ID NO: 1880323
aaggaaggcgcuuaacaau

SEQ ID NO: 1958739 - RNA, 19 nt, Artificial Sequence
  Description of Artificial Sequence: Synthetic oligonucleotide
  Antisense strand to SEQ ID NO: 1958738
auuguuaagcgccuuccuu

SEQ ID NO: 1958740 - RNA, 19 nt, Artificial Sequence
  Description of Artificial Sequence: Synthetic oligonucleotide
  Sense strand starting at position 1333 of SEQ ID NO: 1880323
ggcgcuuaacaauaacuuu

SEQ ID NO: 1958741 - RNA, 19 nt, Artificial Sequence
  Description of Artificial Sequence: Synthetic oligonucleotide
  Antisense strand to SEQ ID NO: 1958740
aaaguuauuguuaagcgcc

SEQ ID NO: 1958742 - RNA, 19 nt, Artificial Sequence
  Description of Artificial Sequence: Synthetic oligonucleotide
  Sense strand starting at position 2086 of SEQ ID NO: 1880323
gggugauuccugggagcuc

SEQ ID NO: 1958743 - RNA, 19 nt, Artificial Sequence
  Description of Artificial Sequence: Synthetic oligonucleotide
  Antisense strand to SEQ ID NO: 1958742
gagcucccaggaaucaccc

SEQ ID NO: 1958744 - RNA, 19 nt, Artificial Sequence
  Description of Artificial Sequence: Synthetic oligonucleotide
  Sense strand starting at position 2131 of SEQ ID NO: 1880323
aauagacagcgcgacuuau

SEQ ID NO: 1958745 - RNA, 19 nt, Artificial Sequence
  Description of Artificial Sequence: Synthetic oligonucleotide
  Antisense strand to SEQ ID NO: 1958744
auaagucgcgcugucuauu

SEQ ID NO: 1958746 - RNA, 19 nt, Artificial Sequence
  Description of Artificial Sequence: Synthetic oligonucleotide
  Sense strand starting at position 2142 of SEQ ID NO: 1880323
cgacuuauggcaugggaua

SEQ ID NO: 1958747 - RNA, 19 nt, Artificial Sequence
  Description of Artificial Sequence: Synthetic oligonucleotide
  Antisense strand to SEQ ID NO: 1958746
uaucccaugccauaagucg

SEQ ID NO: 1958748 - RNA, 19 nt, Artificial Sequence
  Description of Artificial Sequence: Synthetic oligonucleotide
  Sense strand starting at position 2143 of SEQ ID NO: 1880323
gacuuauggcaugggauac

SEQ ID NO: 1958749 - RNA, 19 nt, Artificial Sequence
  Description of Artificial Sequence: Synthetic oligonucleotide
  Antisense strand to SEQ ID NO: 1958748
guaucccaugccauaaguc

SEQ ID NO: 1958750 - RNA, 19 nt, Artificial Sequence
  Description of Artificial Sequence: Synthetic oligonucleotide
  Sense strand starting at position 2444 of SEQ ID NO: 1880323
guaucuuucccugacuccu

SEQ ID NO: 1958751 - RNA, 19 nt, Artificial Sequence
  Description of Artificial Sequence: Synthetic oligonucleotide
  Antisense strand to SEQ ID NO: 1958750
aggagucagggaaagauac

SEQ ID NO: 1958752 - RNA, 19 nt, Artificial Sequence
  Description of Artificial Sequence: Synthetic oligonucleotide
  Sense strand starting at position 2642 of SEQ ID NO: 1880323
uuggaauagauugaugugu

SEQ ID NO: 1958753 - RNA, 19 nt, Artificial Sequence
  Description of Artificial Sequence: Synthetic oligonucleotide
  Antisense strand to SEQ ID NO: 1958752
acacaucaaucuauuccaa

SEQ ID NO: 1958754 - RNA, 19 nt, Artificial Sequence
  Description of Artificial Sequence: Synthetic oligonucleotide
  Sense strand starting at position 2728 of SEQ ID NO: 1880323
ugaagaaacuguuuauguc

SEQ ID NO: 1958755 - RNA, 19 nt, Artificial Sequence
  Description of Artificial Sequence: Synthetic oligonucleotide
  Antisense strand to SEQ ID NO: 1958754
gacauaaacaguuucuuca

SEQ ID NO: 1958756 - RNA, 19 nt, Artificial Sequence
  Description of Artificial Sequence: Synthetic oligonucleotide
  Sense strand starting at position 2738 of SEQ ID NO: 1880323
guuuauguccuugauacug

SEQ ID NO: 1958757 - RNA, 19 nt, Artificial Sequence
  Description of Artificial Sequence: Synthetic oligonucleotide
  Antisense strand to SEQ ID NO: 1958756
caguaucaaggacauaaac

SEQ ID NO: 1958758 - RNA, 19 nt, Artificial Sequence
  Description of Artificial Sequence: Synthetic oligonucleotide
  Sense strand starting at position 2746 of SEQ ID NO: 1880323
ccuugauacugauauuuag

SEQ ID NO: 1958759 - RNA, 19 nt, Artificial Sequence
  Description of Artificial Sequence: Synthetic oligonucleotide
  Antisense strand to SEQ ID NO: 1958758
cuaaauaucaguaucaagg

SEQ ID NO: 1958760 - RNA, 19 nt, Artificial Sequence
  Description of Artificial Sequence: Synthetic oligonucleotide
  Sense strand starting at position 2880 of SEQ ID NO: 1880323
aggaacuguccuugucuca

SEQ ID NO: 1958761 - RNA, 19 nt, Artificial Sequence
  Description of Artificial Sequence: Synthetic oligonucleotide
  Antisense strand to SEQ ID NO: 1958760
ugagacaaggacaguuccu

SEQ ID NO: 1958762 - RNA, 19 nt, Artificial Sequence
  Description of Artificial Sequence: Synthetic oligonucleotide
  Sense strand starting at position 2918 of SEQ ID NO: 1880323
ugauacuugcuugauguua

SEQ ID NO: 1958763 - RNA, 19 nt, Artificial Sequence
  Description of Artificial Sequence: Synthetic oligonucleotide
  Antisense strand to SEQ ID NO: 1958762
uaacaucaagcaaguauca

SEQ ID NO: 1958764 - RNA, 19 nt, Artificial Sequence
  Description of Artificial Sequence: Synthetic oligonucleotide
  Sense strand starting at position 2941 of SEQ ID NO: 1880323
uggcuucauguugacgaga

SEQ ID NO: 1958765 - RNA, 19 nt, Artificial Sequence
  Description of Artificial Sequence: Synthetic oligonucleotide
  Antisense strand to SEQ ID NO: 1958764
ucucgucaacaugaagcca

SEQ ID NO: 1958766 - RNA, 19 nt, Artificial Sequence
  Description of Artificial Sequence: Synthetic oligonucleotide
  Sense strand starting at position 2946 of SEQ ID NO: 1880323
ucauguugacgagaggcua

SEQ ID NO: 1958767 - RNA, 19 nt, Artificial Sequence
  Description of Artificial Sequence: Synthetic oligonucleotide
  Antisense strand to SEQ ID NO: 1958766
uagccucucgucaacauga

SEQ ID NO: 1958768 - RNA, 19 nt, Artificial Sequence
  Description of Artificial Sequence: Synthetic oligonucleotide
  Sense strand starting at position 2967 of SEQ ID NO: 1880323
guaagaguccagugagggu

SEQ ID NO: 1958769 - RNA, 19 nt, Artificial Sequence
  Description of Artificial Sequence: Synthetic oligonucleotide
  Antisense strand to SEQ ID NO: 1958768
acccucacuggacucuuac

SEQ ID NO: 1958770 - RNA, 19 nt, Artificial Sequence
  Description of Artificial Sequence: Synthetic oligonucleotide
  Sense strand starting at position 3037 of SEQ ID NO: 1880323
gcucuuucccaaugggaaa

SEQ ID NO: 1958771 - RNA, 19 nt, Artificial Sequence
  Description of Artificial Sequence: Synthetic oligonucleotide
  Antisense strand to SEQ ID NO: 1958770
uuucccauugggaaagagc

SEQ ID NO: 1958772 - RNA, 19 nt, Artificial Sequence
  Description of Artificial Sequence: Synthetic oligonucleotide
  Sense strand starting at position 3270 of SEQ ID NO: 1880323
ucaugucugugacuuaaac

SEQ ID NO: 1958773 - RNA, 19 nt, Artificial Sequence
  Description of Artificial Sequence: Synthetic oligonucleotide
  Antisense strand to SEQ ID NO: 1958772
guuuaagucacagacauga

SEQ ID NO: 1958774 - RNA, 19 nt, Artificial Sequence
  Description of Artificial Sequence: Synthetic oligonucleotide
  Sense strand starting at position 3308 of SEQ ID NO: 1880323
ggaacuguaccuugucuua

SEQ ID NO: 1958775 - RNA, 19 nt, Artificial Sequence
  Description of Artificial Sequence: Synthetic oligonucleotide
  Antisense strand to SEQ ID NO: 1958774
uaagacaagguacaguucc

SEQ ID NO: 1958776 - RNA, 19 nt, Artificial Sequence
  Description of Artificial Sequence: Synthetic oligonucleotide
  Sense strand starting at position 3662 of SEQ ID NO: 1880323
guucuuuguccauauugau

SEQ ID NO: 1958777 - RNA, 19 nt, Artificial Sequence
  Description of Artificial Sequence: Synthetic oligonucleotide
  Antisense strand to SEQ ID NO: 1958776
aucaauauggacaaagaac

SEQ ID NO: 1958778 - RNA, 19 nt, Artificial Sequence
  Description of Artificial Sequence: Synthetic oligonucleotide
  Sense strand starting at position 3668 of SEQ ID NO: 1880323
uguccauauugauuacuca

SEQ ID NO: 1958779 - RNA, 19 nt, Artificial Sequence
  Description of Artificial Sequence: Synthetic oligonucleotide
  Antisense strand to SEQ ID NO: 1958778
ugaguaaucaauauggaca

SEQ ID NO: 1958780 - RNA, 19 nt, Artificial Sequence
  Description of Artificial Sequence: Synthetic oligonucleotide
  Sense strand starting at position 3671 of SEQ ID NO: 1880323
ccauauugauuacucagua

SEQ ID NO: 1958781 - RNA, 19 nt, Artificial Sequence
  Description of Artificial Sequence: Synthetic oligonucleotide
  Antisense strand to SEQ ID NO: 1958780
uacugaguaaucaauaugg

SEQ ID NO: 1958782 - RNA, 19 nt, Artificial Sequence
  Description of Artificial Sequence: Synthetic oligonucleotide
  Sense strand starting at position 3675 of SEQ ID NO: 1880323
auugauuacucaguaacug

SEQ ID NO: 1958783 - RNA, 19 nt, Artificial Sequence
  Description of Artificial Sequence: Synthetic oligonucleotide
  Antisense strand to SEQ ID NO: 1958782
caguuacugaguaaucaau

SEQ ID NO: 1958784 - RNA, 19 nt, Artificial Sequence
  Description of Artificial Sequence: Synthetic oligonucleotide
  Sense strand starting at position 3676 of SEQ ID NO: 1880323
uugauuacucaguaacugu

SEQ ID NO: 1958785 - RNA, 19 nt, Artificial Sequence
  Description of Artificial Sequence: Synthetic oligonucleotide
  Antisense strand to SEQ ID NO: 1958784
acaguuacugaguaaucaa

SEQ ID NO: 1958786 - RNA, 19 nt, Artificial Sequence
  Description of Artificial Sequence: Synthetic oligonucleotide
  Sense strand starting at position 3738 of SEQ ID NO: 1880323
gcuuuaguuccuucuguuu

SEQ ID NO: 1958787 - RNA, 19 nt, Artificial Sequence
  Description of Artificial Sequence: Synthetic oligonucleotide
  Antisense strand to SEQ ID NO: 1958786
aaacagaaggaacuaaagc

SEQ ID NO: 1958788 - RNA, 19 nt, Artificial Sequence
  Description of Artificial Sequence: Synthetic oligonucleotide
  Sense strand starting at position 3759 of SEQ ID NO: 1880323
uugguacaaagcuguagau

SEQ ID NO: 1958789 - RNA, 19 nt, Artificial Sequence
  Description of Artificial Sequence: Synthetic oligonucleotide
  Antisense strand to SEQ ID NO: 1958788
aucuacagcuuuguaccaa

SEQ ID NO: 1958790 - RNA, 19 nt, Artificial Sequence
  Description of Artificial Sequence: Synthetic oligonucleotide
  Sense strand starting at position 3901 of SEQ ID NO: 1880323
uaccaaggcuugguuugaa

SEQ ID NO: 1958791 - RNA, 19 nt, Artificial Sequence
  Description of Artificial Sequence: Synthetic oligonucleotide
  Antisense strand to SEQ ID NO: 1958790
uucaaaccaagccuuggua

SEQ ID NO: 1958792 - RNA, 19 nt, Artificial Sequence
  Description of Artificial Sequence: Synthetic oligonucleotide
  Sense strand starting at position 3904 of SEQ ID NO: 1880323
caaggcuugguuugaaauc

SEQ ID NO: 1958793 - RNA, 19 nt, Artificial Sequence
  Description of Artificial Sequence: Synthetic oligonucleotide
  Antisense strand to SEQ ID NO: 1958792
gauuucaaaccaagccuug

SEQ ID NO: 1958794 - RNA, 19 nt, Artificial Sequence
  Description of Artificial Sequence: Synthetic oligonucleotide
  Sense strand starting at position 306 of SEQ ID NO: 1880324
auuauaagcucuuugauug

SEQ ID NO: 1958795 - RNA, 19 nt, Artificial Sequence
  Description of Artificial Sequence: Synthetic oligonucleotide
  Antisense strand to SEQ ID NO: 1958794
caaucaaagagcuuauaau

SEQ ID NO: 1958796 - RNA, 19 nt, Artificial Sequence
  Description of Artificial Sequence: Synthetic oligonucleotide
  Sense strand starting at position 307 of SEQ ID NO: 1880324
uuauaagcucuuugauuga

SEQ ID NO: 1958797 - RNA, 19 nt, Artificial Sequence
  Description of Artificial Sequence: Synthetic oligonucleotide
  Antisense strand to SEQ ID NO: 1958796
ucaaucaaagagcuuauaa

SEQ ID NO: 1958798 - RNA, 19 nt, Artificial Sequence
  Description of Artificial Sequence: Synthetic oligonucleotide
  Sense strand starting at position 310 of SEQ ID NO: 1880324
uaagcucuuugauugaagu

SEQ ID NO: 1958799 - RNA, 19 nt, Artificial Sequence
  Description of Artificial Sequence: Synthetic oligonucleotide
  Antisense strand to SEQ ID NO: 1958798
acuucaaucaaagagcuua

SEQ ID NO: 1958800 - RNA, 19 nt, Artificial Sequence
  Description of Artificial Sequence: Synthetic oligonucleotide
  Sense strand starting at position 489 of SEQ ID NO: 1880324
ugagaauucuuccugcgaa

SEQ ID NO: 1958801 - RNA, 19 nt, Artificial Sequence
  Description of Artificial Sequence: Synthetic oligonucleotide
  Antisense strand to SEQ ID NO: 1958800
uucgcaggaagaauucuca

SEQ ID NO: 1958802 - RNA, 19 nt, Artificial Sequence
  Description of Artificial Sequence: Synthetic oligonucleotide
  Sense strand starting at position 492 of SEQ ID NO: 1880324
gaauucuuccugcgaagaa

SEQ ID NO: 1958803 - RNA, 19 nt, Artificial Sequence
  Description of Artificial Sequence: Synthetic oligonucleotide
  Antisense strand to SEQ ID NO: 1958802
uucuucgcaggaagaauuc

SEQ ID NO: 1958804 - RNA, 19 nt, Artificial Sequence
  Description of Artificial Sequence: Synthetic oligonucleotide
  Sense strand starting at position 547 of SEQ ID NO: 1880324
cacguuugaccucagaacu

SEQ ID NO: 1958805 - RNA, 19 nt, Artificial Sequence
  Description of Artificial Sequence: Synthetic oligonucleotide
  Antisense strand to SEQ ID NO: 1958804
aguucugaggucaaacgug

SEQ ID NO: 1958806 - RNA, 19 nt, Artificial Sequence
  Description of Artificial Sequence: Synthetic oligonucleotide
  Sense strand starting at position 622 of SEQ ID NO: 1880324
caguuaacacugggcuuau

SEQ ID NO: 1958807 - RNA, 19 nt, Artificial Sequence
  Description of Artificial Sequence: Synthetic oligonucleotide
  Antisense strand to SEQ ID NO: 1958806
auaagcccaguguuaacug

SEQ ID NO: 1958808 - RNA, 19 nt, Artificial Sequence
  Description of Artificial Sequence: Synthetic oligonucleotide
  Sense strand starting at position 623 of SEQ ID NO: 1880324
aguuaacacugggcuuauu

SEQ ID NO: 1958809 - RNA, 19 nt, Artificial Sequence
  Description of Artificial Sequence: Synthetic oligonucleotide
  Antisense strand to SEQ ID NO: 1958808
aauaagcccaguguuaacu

SEQ ID NO: 1958810 - RNA, 19 nt, Artificial Sequence
  Description of Artificial Sequence: Synthetic oligonucleotide
  Sense strand starting at position 649 of SEQ ID NO: 1880324
cucaauaugugauuguaaa

SEQ ID NO: 1958811 - RNA, 19 nt, Artificial Sequence
  Description of Artificial Sequence: Synthetic oligonucleotide
  Antisense strand to SEQ ID NO: 1958810
uuuacaaucacauauugag

SEQ ID NO: 1958812 - RNA, 19 nt, Artificial Sequence
  Description of Artificial Sequence: Synthetic oligonucleotide
  Sense strand starting at position 662 of SEQ ID NO: 1880324
uguaaauuaacuggugaag

SEQ ID NO: 1958813 - RNA, 19 nt, Artificial Sequence
  Description of Artificial Sequence: Synthetic oligonucleotide
  Antisense strand to SEQ ID NO: 1958812
cuucaccaguuaauuuaca

SEQ ID NO: 1958814 - RNA, 19 nt, Artificial Sequence
  Description of Artificial Sequence: Synthetic oligonucleotide
  Sense strand starting at position 832 of SEQ ID NO: 1880324
cugugaaguccucaaaccu

SEQ ID NO: 1958815 - RNA, 19 nt, Artificial Sequence
  Description of Artificial Sequence: Synthetic oligonucleotide
  Antisense strand to SEQ ID NO: 1958814
agguuugaggacuucacag

SEQ ID NO: 1958816 - RNA, 19 nt, Artificial Sequence
  Description of Artificial Sequence: Synthetic oligonucleotide
  Sense strand starting at position 840 of SEQ ID NO: 1880324
uccucaaaccugugaguag

SEQ ID NO: 1958817 - RNA, 19 nt, Artificial Sequence
  Description of Artificial Sequence: Synthetic oligonucleotide
  Antisense strand to SEQ ID NO: 1958816
cuacucacagguuugagga

SEQ ID NO: 1958818 - RNA, 19 nt, Artificial Sequence
  Description of Artificial Sequence: Synthetic oligonucleotide
  Sense strand starting at position 862 of SEQ ID NO: 1880324
ugacccuagccuugaauga

SEQ ID NO: 1958819 - RNA, 19 nt, Artificial Sequence
  Description of Artificial Sequence: Synthetic oligonucleotide
  Antisense strand to SEQ ID NO: 1958818
ucauucaaggcuaggguca

SEQ ID NO: 1958820 - RNA, 19 nt, Artificial Sequence
  Description of Artificial Sequence: Synthetic oligonucleotide
  Sense strand starting at position 991 of SEQ ID NO: 1880324
cuggguugagugugggauu

SEQ ID NO: 1958821 - RNA, 19 nt, Artificial Sequence
  Description of Artificial Sequence: Synthetic oligonucleotide
  Antisense strand to SEQ ID NO: 1958820
aaucccacacucaacccag

SEQ ID NO: 1958822 - RNA, 19 nt, Artificial Sequence
  Description of Artificial Sequence: Synthetic oligonucleotide
  Sense strand starting at position 1220 of SEQ ID NO: 1880324
ccaugagagaugugcaaca

SEQ ID NO: 1958823 - RNA, 19 nt, Artificial Sequence
  Description of Artificial Sequence: Synthetic oligonucleotide
  Antisense strand to SEQ ID NO: 1958822
uguugcacaucucucaugg

SEQ ID NO: 1958824 - RNA, 19 nt, Artificial Sequence
  Description of Artificial Sequence: Synthetic oligonucleotide
  Sense strand starting at position 1236 of SEQ ID NO: 1880324
acaccauaagguuggugau

SEQ ID NO: 1958825 - RNA, 19 nt, Artificial Sequence
  Description of Artificial Sequence: Synthetic oligonucleotide
  Antisense strand to SEQ ID NO: 1958824
aucaccaaccuuauggugu

SEQ ID NO: 1958826 - RNA, 19 nt, Artificial Sequence
  Description of Artificial Sequence: Synthetic oligonucleotide
  Sense strand starting at position 1237 of SEQ ID NO: 1880324
caccauaagguuggugauu

SEQ ID NO: 1958827 - RNA, 19 nt, Artificial Sequence
  Description of Artificial Sequence: Synthetic oligonucleotide
  Antisense strand to SEQ ID NO: 1958826
aaucaccaaccuuauggug

SEQ ID NO: 1958828 - RNA, 19 nt, Artificial Sequence
  Description of Artificial Sequence: Synthetic oligonucleotide
  Sense strand starting at position 1719 of SEQ ID NO: 1880324
ugacuacaggcuuguacua

SEQ ID NO: 1958829 - RNA, 19 nt, Artificial Sequence
  Description of Artificial Sequence: Synthetic oligonucleotide
  Antisense strand to SEQ ID NO: 1958828
uaguacaagccuguaguca

SEQ ID NO: 1958830 - RNA, 19 nt, Artificial Sequence
  Description of Artificial Sequence: Synthetic oligonucleotide
  Sense strand starting at position 2000 of SEQ ID NO: 1880324
guucuugcuggcgcaauaa

SEQ ID NO: 1958831 - RNA, 19 nt, Artificial Sequence
  Description of Artificial Sequence: Synthetic oligonucleotide
  Antisense strand to SEQ ID NO: 1958830
uuauugcgccagcaagaac

SEQ ID NO: 1958832 - RNA, 19 nt, Artificial Sequence
  Description of Artificial Sequence: Synthetic oligonucleotide
  Sense strand starting at position 2079 of SEQ ID NO: 1880324
ugugacguuaaugggaaau

SEQ ID NO: 1958833 - RNA, 19 nt, Artificial Sequence
  Description of Artificial Sequence: Synthetic oligonucleotide
  Antisense strand to SEQ ID NO: 1958832
auuucccauuaacgucaca

SEQ ID NO: 1958834 - RNA, 19 nt, Artificial Sequence
  Description of Artificial Sequence: Synthetic oligonucleotide
  Sense strand starting at position 2090 of SEQ ID NO: 1880324
ugggaaaugucagcgguaa

SEQ ID NO: 1958835 - RNA, 19 nt, Artificial Sequence
  Description of Artificial Sequence: Synthetic oligonucleotide
  Antisense strand to SEQ ID NO: 1958834
uuaccgcugacauuuccca

SEQ ID NO: 1958836 - RNA, 19 nt, Artificial Sequence
  Description of Artificial Sequence: Synthetic oligonucleotide
  Sense strand starting at position 2332 of SEQ ID NO: 1880324
agcucagucucuuccaaga

SEQ ID NO: 1958837 - RNA, 19 nt, Artificial Sequence
  Description of Artificial Sequence: Synthetic oligonucleotide
  Antisense strand to SEQ ID NO: 1958836
ucuuggaagagacugagcu

SEQ ID NO: 1958838 - RNA, 19 nt, Artificial Sequence
  Description of Artificial Sequence: Synthetic oligonucleotide
  Sense strand starting at position 2584 of SEQ ID NO: 1880324
ggagaauguggugaaguuu

SEQ ID NO: 1958839 - RNA, 19 nt, Artificial Sequence
  Description of Artificial Sequence: Synthetic oligonucleotide
  Antisense strand to SEQ ID NO: 1958838
aaacuucaccacauucucc

SEQ ID NO: 1958840 - RNA, 19 nt, Artificial Sequence
  Description of Artificial Sequence: Synthetic oligonucleotide
  Sense strand starting at position 2608 of SEQ ID NO: 1880324
caaggacuuuguuugauaa

SEQ ID NO: 1958841 - RNA, 19 nt, Artificial Sequence
  Description of Artificial Sequence: Synthetic oligonucleotide
  Antisense strand to SEQ ID NO: 1958840
uuaucaaacaaaguccuug

SEQ ID NO: 1958842 - RNA, 19 nt, Artificial Sequence
  Description of Artificial Sequence: Synthetic oligonucleotide
  Sense strand starting at position 2609 of SEQ ID NO: 1880324
aaggacuuuguuugauaag

SEQ ID NO: 1958843 - RNA, 19 nt, Artificial Sequence
  Description of Artificial Sequence: Synthetic oligonucleotide
  Antisense strand to SEQ ID NO: 1958842
cuuaucaaacaaaguccuu

SEQ ID NO: 1958844 - RNA, 19 nt, Artificial Sequence
  Description of Artificial Sequence: Synthetic oligonucleotide
  Sense strand starting at position 2629 of SEQ ID NO: 1880324
aaggacauuuaucagugaa

SEQ ID NO: 1958845 - RNA, 19 nt, Artificial Sequence
  Description of Artificial Sequence: Synthetic oligonucleotide
  Antisense strand to SEQ ID NO: 1958844
uucacugauaaauguccuu

SEQ ID NO: 1958846 - RNA, 19 nt, Artificial Sequence
  Description of Artificial Sequence: Synthetic oligonucleotide
  Sense strand starting at position 2708 of SEQ ID NO: 1880324
gguguuucccuguuugcuu

SEQ ID NO: 1958847 - RNA, 19 nt, Artificial Sequence
  Description of Artificial Sequence: Synthetic oligonucleotide
  Antisense strand to SEQ ID NO: 1958846
aagcaaacagggaaacacc

SEQ ID NO: 1958848 - RNA, 19 nt, Artificial Sequence
  Description of Artificial Sequence: Synthetic oligonucleotide
  Sense strand starting at position 2742 of SEQ ID NO: 1880324
gcaaauacuccaugauuag

SEQ ID NO: 1958849 - RNA, 19 nt, Artificial Sequence
  Description of Artificial Sequence: Synthetic oligonucleotide
  Antisense strand to SEQ ID NO: 1958848
cuaaucauggaguauuugc

SEQ ID NO: 1958850 - RNA, 19 nt, Artificial Sequence
  Description of Artificial Sequence: Synthetic oligonucleotide
  Sense strand starting at position 2752 of SEQ ID NO: 1880324
caugauuagagacguguga

SEQ ID NO: 1958851 - RNA, 19 nt, Artificial Sequence
  Description of Artificial Sequence: Synthetic oligonucleotide
  Antisense strand to SEQ ID NO: 1958850
ucacacgucucuaaucaug

SEQ ID NO: 1958852 - RNA, 19 nt, Artificial Sequence
  Description of Artificial Sequence: Synthetic oligonucleotide
  Sense strand starting at position 2781 of SEQ ID NO: 1880324
auagaauagcagugaugga

SEQ ID NO: 1958853 - RNA, 19 nt, Artificial Sequence
  Description of Artificial Sequence: Synthetic oligonucleotide
  Antisense strand to SEQ ID NO: 1958852
uccaucacugcuauucuau

SEQ ID NO: 1958854 - RNA, 19 nt, Artificial Sequence
  Description of Artificial Sequence: Synthetic oligonucleotide
  Sense strand starting at position 2837 of SEQ ID NO: 1880324
uggauucagcacuggguau

SEQ ID NO: 1958855 - RNA, 19 nt, Artificial Sequence
  Description of Artificial Sequence: Synthetic oligonucleotide
  Antisense strand to SEQ ID NO: 1958854
auacccagugcugaaucca

SEQ ID NO: 1958856 - RNA, 19 nt, Artificial Sequence
  Description of Artificial Sequence: Synthetic oligonucleotide
  Sense strand starting at position 3417 of SEQ ID NO: 1880324
ugugaaucaugucuccuau

SEQ ID NO: 1958857 - RNA, 19 nt, Artificial Sequence
  Description of Artificial Sequence: Synthetic oligonucleotide
  Antisense strand to SEQ ID NO: 1958856
auaggagacaugauucaca

SEQ ID NO: 1958858 - RNA, 19 nt, Artificial Sequence
  Description of Artificial Sequence: Synthetic oligonucleotide
  Sense strand starting at position 3427 of SEQ ID NO: 1880324
gucuccuauuuccuuguua

SEQ ID NO: 1958859 - RNA, 19 nt, Artificial Sequence
  Description of Artificial Sequence: Synthetic oligonucleotide
  Antisense strand to SEQ ID NO: 1958858
uaacaaggaaauaggagac

SEQ ID NO: 1958860 - RNA, 19 nt, Artificial Sequence
  Description of Artificial Sequence: Synthetic oligonucleotide
  Sense strand starting at position 3441 of SEQ ID NO: 1880324
uguuaaugaugcuuauuga

SEQ ID NO: 1958861 - RNA, 19 nt, Artificial Sequence
  Description of Artificial Sequence: Synthetic oligonucleotide
  Antisense strand to SEQ ID NO: 1958860
ucaauaagcaucauuaaca

SEQ ID NO: 1958862 - RNA, 19 nt, Artificial Sequence
  Description of Artificial Sequence: Synthetic oligonucleotide
  Sense strand starting at position 3442 of SEQ ID NO: 1880324
guuaaugaugcuuauugau

SEQ ID NO: 1958863 - RNA, 19 nt, Artificial Sequence
  Description of Artificial Sequence: Synthetic oligonucleotide
  Antisense strand to SEQ ID NO: 1958862
aucaauaagcaucauuaac

SEQ ID NO: 1958864 - RNA, 19 nt, Artificial Sequence
  Description of Artificial Sequence: Synthetic oligonucleotide
  Sense strand starting at position 3448 of SEQ ID NO: 1880324
gaugcuuauugauuauaga

SEQ ID NO: 1958865 - RNA, 19 nt, Artificial Sequence
  Description of Artificial Sequence: Synthetic oligonucleotide
  Antisense strand to SEQ ID NO: 1958864
ucuauaaucaauaagcauc

SEQ ID NO: 1958866 - RNA, 19 nt, Artificial Sequence
  Description of Artificial Sequence: Synthetic oligonucleotide
  Sense strand starting at position 3449 of SEQ ID NO: 1880324
augcuuauugauuauagac

SEQ ID NO: 1958867 - RNA, 19 nt, Artificial Sequence
  Description of Artificial Sequence: Synthetic oligonucleotide
  Antisense strand to SEQ ID NO: 1958866
gucuauaaucaauaagcau

SEQ ID NO: 1958868 - RNA, 19 nt, Artificial Sequence
  Description of Artificial Sequence: Synthetic oligonucleotide
  Sense strand starting at position 3824 of SEQ ID NO: 1880324
auuguuuaauccuuaguug

SEQ ID NO: 1958869 - RNA, 19 nt, Artificial Sequence
  Description of Artificial Sequence: Synthetic oligonucleotide
  Antisense strand to SEQ ID NO: 1958868
caacuaaggauuaaacaau

SEQ ID NO: 1958870 - RNA, 19 nt, Artificial Sequence
  Description of Artificial Sequence: Synthetic oligonucleotide
  Sense strand starting at position 3836 of SEQ ID NO: 1880324
uuaguugugggccaagcaa

SEQ ID NO: 1958871 - RNA, 19 nt, Artificial Sequence
  Description of Artificial Sequence: Synthetic oligonucleotide
  Antisense strand to SEQ ID NO: 1958870
uugcuuggcccacaacuaa

SEQ ID NO: 1958872 - RNA, 19 nt, Artificial Sequence
  Description of Artificial Sequence: Synthetic oligonucleotide
  Sense strand starting at position 3901 of SEQ ID NO: 1880324
aaggacuuaccuggugaau

SEQ ID NO: 1958873 - RNA, 19 nt, Artificial Sequence
  Description of Artificial Sequence: Synthetic oligonucleotide
  Antisense strand to SEQ ID NO: 1958872
auucaccagguaaguccuu

SEQ ID NO: 1958874 - RNA, 19 nt, Artificial Sequence
  Description of Artificial Sequence: Synthetic oligonucleotide
  Sense strand starting at position 28 of SEQ ID NO: 1880325
aaugauuagugugcacacu

SEQ ID NO: 1958875 - RNA, 19 nt, Artificial Sequence
  Description of Artificial Sequence: Synthetic oligonucleotide
  Antisense strand to SEQ ID NO: 1958874
agugugcacacuaaucauu

SEQ ID NO: 1958876 - RNA, 19 nt, Artificial Sequence
  Description of Artificial Sequence: Synthetic oligonucleotide
  Sense strand starting at position 29 of SEQ ID NO: 1880325
augauuagugugcacacua

SEQ ID NO: 1958877 - RNA, 19 nt, Artificial Sequence
  Description of Artificial Sequence: Synthetic oligonucleotide
  Antisense strand to SEQ ID NO: 1958876
uagugugcacacuaaucau

SEQ ID NO: 1958878 - RNA, 19 nt, Artificial Sequence
  Description of Artificial Sequence: Synthetic oligonucleotide
  Sense strand starting at position 40 of SEQ ID NO: 1880325
gcacacuaaugcuugagaa

SEQ ID NO: 1958879 - RNA, 19 nt, Artificial Sequence
  Description of Artificial Sequence: Synthetic oligonucleotide
  Antisense strand to SEQ ID NO: 1958878
uucucaagcauuagugugc

SEQ ID NO: 1958880 - RNA, 19 nt, Artificial Sequence
  Description of Artificial Sequence: Synthetic oligonucleotide
  Sense strand starting at position 75 of SEQ ID NO: 1880325
cccagacuuguccauaaug

SEQ ID NO: 1958881 - RNA, 19 nt, Artificial Sequence
  Description of Artificial Sequence: Synthetic oligonucleotide
  Antisense strand to SEQ ID NO: 1958880
cauuauggacaagucuggg

SEQ ID NO: 1958882 - RNA, 19 nt, Artificial Sequence
  Description of Artificial Sequence: Synthetic oligonucleotide
  Sense strand starting at position 302 of SEQ ID NO: 1880325
acuagaguaguauaguagu

SEQ ID NO: 1958883 - RNA, 19 nt, Artificial Sequence
  Description of Artificial Sequence: Synthetic oligonucleotide
  Antisense strand to SEQ ID NO: 1958882
acuacuauacuacucuagu

SEQ ID NO: 1958884 - RNA, 19 nt, Artificial Sequence
  Description of Artificial Sequence: Synthetic oligonucleotide
  Sense strand starting at position 600 of SEQ ID NO: 1880325
ugaguaaguuuccugacga

SEQ ID NO: 1958885 - RNA, 19 nt, Artificial Sequence
  Description of Artificial Sequence: Synthetic oligonucleotide
  Antisense strand to SEQ ID NO: 1958884
ucgucaggaaacuuacuca

SEQ ID NO: 1958886 - RNA, 19 nt, Artificial Sequence
  Description of Artificial Sequence: Synthetic oligonucleotide
  Sense strand starting at position 683 of SEQ ID NO: 1880325
cauuaugugccaggaauug

SEQ ID NO: 1958887 - RNA, 19 nt, Artificial Sequence
  Description of Artificial Sequence: Synthetic oligonucleotide
  Antisense strand to SEQ ID NO: 1958886
caauuccuggcacauaaug

SEQ ID NO: 1958888 - RNA, 19 nt, Artificial Sequence
  Description of Artificial Sequence: Synthetic oligonucleotide
  Sense strand starting at position 693 of SEQ ID NO: 1880325
caggaauugcaagaugcau

SEQ ID NO: 1958889 - RNA, 19 nt, Artificial Sequence
  Description of Artificial Sequence: Synthetic oligonucleotide
  Antisense strand to SEQ ID NO: 1958888
augcaucuugcaauuccug

SEQ ID NO: 1958890 - RNA, 19 nt, Artificial Sequence
  Description of Artificial Sequence: Synthetic oligonucleotide
  Sense strand starting at position 699 of SEQ ID NO: 1880325
uugcaagaugcauaagauu

SEQ ID NO: 1958891 - RNA, 19 nt, Artificial Sequence
  Description of Artificial Sequence: Synthetic oligonucleotide
  Antisense strand to SEQ ID NO: 1958890
aaucuuaugcaucuugcaa

SEQ ID NO: 1958892 - RNA, 19 nt, Artificial Sequence
  Description of Artificial Sequence: Synthetic oligonucleotide
  Sense strand starting at position 838 of SEQ ID NO: 1880325
ugaugugcacacuaaucau

SEQ ID NO: 1958893 - RNA, 19 nt, Artificial Sequence
  Description of Artificial Sequence: Synthetic oligonucleotide
  Antisense strand to SEQ ID NO: 1958892
augauuagugugcacauca

SEQ ID NO: 1958894 - RNA, 19 nt, Artificial Sequence
  Description of Artificial Sequence: Synthetic oligonucleotide
  Sense strand starting at position 844 of SEQ ID NO: 1880325
gcacacuaaucauuaggga

SEQ ID NO: 1958895 - RNA, 19 nt, Artificial Sequence
  Description of Artificial Sequence: Synthetic oligonucleotide
  Antisense strand to SEQ ID NO: 1958894
ucccuaaugauuagugugc

SEQ ID NO: 1958896 - RNA, 19 nt, Artificial Sequence
  Description of Artificial Sequence: Synthetic oligonucleotide
  Sense strand starting at position 948 of SEQ ID NO: 1880325
guuggcauuugaguagcaa

SEQ ID NO: 1958897 - RNA, 19 nt, Artificial Sequence
  Description of Artificial Sequence: Synthetic oligonucleotide
  Antisense strand to SEQ ID NO: 1958896
uugcuacucaaaugccaac

SEQ ID NO: 1958898 - RNA, 19 nt, Artificial Sequence
  Description of Artificial Sequence: Synthetic oligonucleotide
  Sense strand starting at position 965 of SEQ ID NO: 1880325
aaagcugugccguauuuaa

SEQ ID NO: 1958899 - RNA, 19 nt, Artificial Sequence
  Description of Artificial Sequence: Synthetic oligonucleotide
  Antisense strand to SEQ ID NO: 1958898
uuaaauacggcacagcuuu

SEQ ID NO: 1958900 - RNA, 19 nt, Artificial Sequence
  Description of Artificial Sequence: Synthetic oligonucleotide
  Sense strand starting at position 1081 of SEQ ID NO: 1880325
ggcacugagaagugaacuu

SEQ ID NO: 1958901 - RNA, 19 nt, Artificial Sequence
  Description of Artificial Sequence: Synthetic oligonucleotide
  Antisense strand to SEQ ID NO: 1958900
aaguucacuucucagugcc

SEQ ID NO: 1958902 - RNA, 19 nt, Artificial Sequence
  Description of Artificial Sequence: Synthetic oligonucleotide
  Sense strand starting at position 1200 of SEQ ID NO: 1880325
uuaauagguaacgagaguu

SEQ ID NO: 1958903 - RNA, 19 nt, Artificial Sequence
  Description of Artificial Sequence: Synthetic oligonucleotide
  Antisense strand to SEQ ID NO: 1958902
aacucucguuaccuauuaa

SEQ ID NO: 1958904 - RNA, 19 nt, Artificial Sequence
  Description of Artificial Sequence: Synthetic oligonucleotide
  Sense strand starting at position 1592 of SEQ ID NO: 1880325
cuaccuguucgagagccau

SEQ ID NO: 1958905 - RNA, 19 nt, Artificial Sequence
  Description of Artificial Sequence: Synthetic oligonucleotide
  Antisense strand to SEQ ID NO: 1958904
auggcucucgaacagguag

SEQ ID NO: 1958906 - RNA, 19 nt, Artificial Sequence
  Description of Artificial Sequence: Synthetic oligonucleotide
  Sense strand starting at position 1724 of SEQ ID NO: 1880325
ggagaagaguguccuguca

SEQ ID NO: 1958907 - RNA, 19 nt, Artificial Sequence
  Description of Artificial Sequence: Synthetic oligonucleotide
  Antisense strand to SEQ ID NO: 1958906
ugacaggacacucuucucc

SEQ ID NO: 1958908 - RNA, 19 nt, Artificial Sequence
  Description of Artificial Sequence: Synthetic oligonucleotide
  Sense strand starting at position 1731 of SEQ ID NO: 1880325
aguguccugucauuuacca

SEQ ID NO: 1958909 - RNA, 19 nt, Artificial Sequence
  Description of Artificial Sequence: Synthetic oligonucleotide
  Antisense strand to SEQ ID NO: 1958908
ugguaaaugacaggacacu

SEQ ID NO: 1958910 - RNA, 19 nt, Artificial Sequence
  Description of Artificial Sequence: Synthetic oligonucleotide
  Sense strand starting at position 1824 of SEQ ID NO: 1880325
ucuccugggucuuuccaaa

SEQ ID NO: 1958911 - RNA, 19 nt, Artificial Sequence
  Description of Artificial Sequence: Synthetic oligonucleotide
  Antisense strand to SEQ ID NO: 1958910
uuuggaaagacccaggaga

SEQ ID NO: 1958912 - RNA, 19 nt, Artificial Sequence
  Description of Artificial Sequence: Synthetic oligonucleotide
  Sense strand starting at position 2109 of SEQ ID NO: 1880325
uuucguaagguguagaaau

SEQ ID NO: 1958913 - RNA, 19 nt, Artificial Sequence
  Description of Artificial Sequence: Synthetic oligonucleotide
  Antisense strand to SEQ ID NO: 1958912
auuucuacaccuuacgaaa

SEQ ID NO: 1958914 - RNA, 19 nt, Artificial Sequence
  Description of Artificial Sequence: Synthetic oligonucleotide
  Sense strand starting at position 2111 of SEQ ID NO: 1880325
ucguaagguguagaaauga

SEQ ID NO: 1958915 - RNA, 19 nt, Artificial Sequence
  Description of Artificial Sequence: Synthetic oligonucleotide
  Antisense strand to SEQ ID NO: 1958914
ucauuucuacaccuuacga

SEQ ID NO: 1958916 - RNA, 19 nt, Artificial Sequence
  Description of Artificial Sequence: Synthetic oligonucleotide
  Sense strand starting at position 2143 of SEQ ID NO: 1880325
uacgaauuuguuggcuaca

SEQ ID NO: 1958917 - RNA, 19 nt, Artificial Sequence
  Description of Artificial Sequence: Synthetic oligonucleotide
  Antisense strand to SEQ ID NO: 1958916
uguagccaacaaauucgua

SEQ ID NO: 1958918 - RNA, 19 nt, Artificial Sequence
  Description of Artificial Sequence: Synthetic oligonucleotide
  Sense strand starting at position 2145 of SEQ ID NO: 1880325
cgaauuuguuggcuacaac

SEQ ID NO: 1958919 - RNA, 19 nt, Artificial Sequence
  Description of Artificial Sequence: Synthetic oligonucleotide
  Antisense strand to SEQ ID NO: 1958918
guuguagccaacaaauucg

SEQ ID NO: 1958920 - RNA, 19 nt, Artificial Sequence
  Description of Artificial Sequence: Synthetic oligonucleotide
  Sense strand starting at position 2513 of SEQ ID NO: 1880325
cuagcauuuguccaugugu

SEQ ID NO: 1958921 - RNA, 19 nt, Artificial Sequence
  Description of Artificial Sequence: Synthetic oligonucleotide
  Antisense strand to SEQ ID NO: 1958920
acacauggacaaaugcuag

SEQ ID NO: 1958922 - RNA, 19 nt, Artificial Sequence
  Description of Artificial Sequence: Synthetic oligonucleotide
  Sense strand starting at position 2526 of SEQ ID NO: 1880325
augugugucccguccuaca

SEQ ID NO: 1958923 - RNA, 19 nt, Artificial Sequence
  Description of Artificial Sequence: Synthetic oligonucleotide
  Antisense strand to SEQ ID NO: 1958922
uguaggacgggacacacau

SEQ ID NO: 1958924 - RNA, 19 nt, Artificial Sequence
  Description of Artificial Sequence: Synthetic oligonucleotide
  Sense strand starting at position 2615 of SEQ ID NO: 1880325
cacggacaguuccugauua

SEQ ID NO: 1958925 - RNA, 19 nt, Artificial Sequence
  Description of Artificial Sequence: Synthetic oligonucleotide
  Antisense strand to SEQ ID NO: 1958924
uaaucaggaacuguccgug

SEQ ID NO: 1958926 - RNA, 19 nt, Artificial Sequence
  Description of Artificial Sequence: Synthetic oligonucleotide
  Sense strand starting at position 2653 of SEQ ID NO: 1880325
ugguuacugucauuaacuc

SEQ ID NO: 1958927 - RNA, 19 nt, Artificial Sequence
  Description of Artificial Sequence: Synthetic oligonucleotide
  Antisense strand to SEQ ID NO: 1958926
gaguuaaugacaguaacca

SEQ ID NO: 1958928 - RNA, 19 nt, Artificial Sequence
  Description of Artificial Sequence: Synthetic oligonucleotide
  Sense strand starting at position 2654 of SEQ ID NO: 1880325
gguuacugucauuaacuca

SEQ ID NO: 1958929 - RNA, 19 nt, Artificial Sequence
  Description of Artificial Sequence: Synthetic oligonucleotide
  Antisense strand to SEQ ID NO: 1958928
ugaguuaaugacaguaacc

SEQ ID NO: 1958930 - RNA, 19 nt, Artificial Sequence
  Description of Artificial Sequence: Synthetic oligonucleotide
  Sense strand starting at position 2689 of SEQ ID NO: 1880325
gggaccauuuguuaccuca

SEQ ID NO: 1958931 - RNA, 19 nt, Artificial Sequence
  Description of Artificial Sequence: Synthetic oligonucleotide
  Antisense strand to SEQ ID NO: 1958930
ugagguaacaaaugguccc

SEQ ID NO: 1958932 - RNA, 19 nt, Artificial Sequence
  Description of Artificial Sequence: Synthetic oligonucleotide
  Sense strand starting at position 2719 of SEQ ID NO: 1880325
cugucucugguggaaucau

SEQ ID NO: 1958933 - RNA, 19 nt, Artificial Sequence
  Description of Artificial Sequence: Synthetic oligonucleotide
  Antisense strand to SEQ ID NO: 1958932
augauuccaccagagacag

SEQ ID NO: 1958934 - RNA, 19 nt, Artificial Sequence
  Description of Artificial Sequence: Synthetic oligonucleotide
  Sense strand starting at position 2936 of SEQ ID NO: 1880325
ggauaaaccagucgugauu

SEQ ID NO: 1958935 - RNA, 19 nt, Artificial Sequence
  Description of Artificial Sequence: Synthetic oligonucleotide
  Antisense strand to SEQ ID NO: 1958934
aaucacgacugguuuaucc

SEQ ID NO: 1958936 - RNA, 19 nt, Artificial Sequence
  Description of Artificial Sequence: Synthetic oligonucleotide
  Sense strand starting at position 2939 of SEQ ID NO: 1880325
uaaaccagucgugauugau

SEQ ID NO: 1958937 - RNA, 19 nt, Artificial Sequence
  Description of Artificial Sequence: Synthetic oligonucleotide
  Antisense strand to SEQ ID NO: 1958936
aucaaucacgacugguuua

SEQ ID NO: 1958938 - RNA, 19 nt, Artificial Sequence
  Description of Artificial Sequence: Synthetic oligonucleotide
  Sense strand starting at position 2943 of SEQ ID NO: 1880325
ccagucgugauugauccau

SEQ ID NO: 1958939 - RNA, 19 nt, Artificial Sequence
  Description of Artificial Sequence: Synthetic oligonucleotide
  Antisense strand to SEQ ID NO: 1958938
auggaucaaucacgacugg

SEQ ID NO: 1958940 - RNA, 19 nt, Artificial Sequence
  Description of Artificial Sequence: Synthetic oligonucleotide
  Sense strand starting at position 2947 of SEQ ID NO: 1880325
ucgugauugauccauacga

SEQ ID NO: 1958941 - RNA, 19 nt, Artificial Sequence
  Description of Artificial Sequence: Synthetic oligonucleotide
  Antisense strand to SEQ ID NO: 1958940
ucguauggaucaaucacga

SEQ ID NO: 1958942 - RNA, 19 nt, Artificial Sequence
  Description of Artificial Sequence: Synthetic oligonucleotide
  Sense strand starting at position 3052 of SEQ ID NO: 1880325
aagccagaaccguaugauu

SEQ ID NO: 1958943 - RNA, 19 nt, Artificial Sequence
  Description of Artificial Sequence: Synthetic oligonucleotide
  Antisense strand to SEQ ID NO: 1958942
aaucauacgguucuggcuu

SEQ ID NO: 1958944 - RNA, 19 nt, Artificial Sequence
  Description of Artificial Sequence: Synthetic oligonucleotide
  Sense strand starting at position 3057 of SEQ ID NO: 1880325
agaaccguaugauuccauu

SEQ ID NO: 1958945 - RNA, 19 nt, Artificial Sequence
  Description of Artificial Sequence: Synthetic oligonucleotide
  Antisense strand to SEQ ID NO: 1958944
aauggaaucauacgguucu

SEQ ID NO: 1958946 - RNA, 19 nt, Artificial Sequence
  Description of Artificial Sequence: Synthetic oligonucleotide
  Sense strand starting at position 3127 of SEQ ID NO: 1880325
gggcgguugcuagcggaua

SEQ ID NO: 1958947 - RNA, 19 nt, Artificial Sequence
  Description of Artificial Sequence: Synthetic oligonucleotide
  Antisense strand to SEQ ID NO: 1958946
uauccgcuagcaaccgccc

SEQ ID NO: 1958948 - RNA, 19 nt, Artificial Sequence
  Description of Artificial Sequence: Synthetic oligonucleotide
  Sense strand starting at position 3277 of SEQ ID NO: 1880325
cacuaaguaugugcgauuu

SEQ ID NO: 1958949 - RNA, 19 nt, Artificial Sequence
  Description of Artificial Sequence: Synthetic oligonucleotide
  Antisense strand to SEQ ID NO: 1958948
aaaucgcacauacuuagug

SEQ ID NO: 1958950 - RNA, 19 nt, Artificial Sequence
  Description of Artificial Sequence: Synthetic oligonucleotide
  Sense strand starting at position 3428 of SEQ ID NO: 1880325
uagugugaaucuucugaaa

SEQ ID NO: 1958951 - RNA, 19 nt, Artificial Sequence
  Description of Artificial Sequence: Synthetic oligonucleotide
  Antisense strand to SEQ ID NO: 1958950
uuucagaagauucacacua

SEQ ID NO: 1958952 - RNA, 19 nt, Artificial Sequence
  Description of Artificial Sequence: Synthetic oligonucleotide
  Sense strand starting at position 3923 of SEQ ID NO: 1880325
aguccauagcaagaaugua

SEQ ID NO: 1958953 - RNA, 19 nt, Artificial Sequence
  Description of Artificial Sequence: Synthetic oligonucleotide
  Antisense strand to SEQ ID NO: 1958952
uacauucuugcuauggacu

SEQ ID NO: 1958954 - RNA, 19 nt, Artificial Sequence
  Description of Artificial Sequence: Synthetic oligonucleotide
  Sense strand starting at position 5 of SEQ ID NO: 1880326
ucaccacagugguuaaaga

SEQ ID NO: 1958955 - RNA, 19 nt, Artificial Sequence
  Description of Artificial Sequence: Synthetic oligonucleotide
  Antisense strand to SEQ ID NO: 1958954
ucuuuaaccacugugguga

SEQ ID NO: 1958956 - RNA, 19 nt, Artificial Sequence
  Description of Artificial Sequence: Synthetic oligonucleotide
  Sense strand starting at position 155 of SEQ ID NO: 1880326
auaucucuuuaggaaagaa

SEQ ID NO: 1958957 - RNA, 19 nt, Artificial Sequence
  Description of Artificial Sequence: Synthetic oligonucleotide
  Antisense strand to SEQ ID NO: 1958956
uucuuuccuaaagagauau

SEQ ID NO: 1958958 - RNA, 19 nt, Artificial Sequence
  Description of Artificial Sequence: Synthetic oligonucleotide
  Sense strand starting at position 389 of SEQ ID NO: 1880326
aagugaauucuaggcucag

SEQ ID NO: 1958959 - RNA, 19 nt, Artificial Sequence
  Description of Artificial Sequence: Synthetic oligonucleotide
  Antisense strand to SEQ ID NO: 1958958
cugagccuagaauucacuu

SEQ ID NO: 1958960 - RNA, 19 nt, Artificial Sequence
  Description of Artificial Sequence: Synthetic oligonucleotide
  Sense strand starting at position 390 of SEQ ID NO: 1880326
agugaauucuaggcucagu

SEQ ID NO: 1958961 - RNA, 19 nt, Artificial Sequence
  Description of Artificial Sequence: Synthetic oligonucleotide
  Antisense strand to SEQ ID NO: 1958960
acugagccuagaauucacu

SEQ ID NO: 1958962 - RNA, 19 nt, Artificial Sequence
  Description of Artificial Sequence: Synthetic oligonucleotide
  Sense strand starting at position 569 of SEQ ID NO: 1880326
uaacguguuugaucaaaug

SEQ ID NO: 1958963 - RNA, 19 nt, Artificial Sequence
  Description of Artificial Sequence: Synthetic oligonucleotide
  Antisense strand to SEQ ID NO: 1958962
cauuugaucaaacacguua

SEQ ID NO: 1958964 - RNA, 19 nt, Artificial Sequence
  Description of Artificial Sequence: Synthetic oligonucleotide
  Sense strand starting at position 635 of SEQ ID NO: 1880326
uaggcuguucucguagcua

SEQ ID NO: 1958965 - RNA, 19 nt, Artificial Sequence
  Description of Artificial Sequence: Synthetic oligonucleotide
  Antisense strand to SEQ ID NO: 1958964
uagcuacgagaacagccua

SEQ ID NO: 1958966 - RNA, 19 nt, Artificial Sequence
  Description of Artificial Sequence: Synthetic oligonucleotide
  Sense strand starting at position 638 of SEQ ID NO: 1880326
gcuguucucguagcuauca

SEQ ID NO: 1958967 - RNA, 19 nt, Artificial Sequence
  Description of Artificial Sequence: Synthetic oligonucleotide
  Antisense strand to SEQ ID NO: 1958966
ugauagcuacgagaacagc

SEQ ID NO: 1958968 - RNA, 19 nt, Artificial Sequence
  Description of Artificial Sequence: Synthetic oligonucleotide
  Sense strand starting at position 690 of SEQ ID NO: 1880326
agcugaauacuuugaacgu

SEQ ID NO: 1958969 - RNA, 19 nt, Artificial Sequence
  Description of Artificial Sequence: Synthetic oligonucleotide
  Antisense strand to SEQ ID NO: 1958968
acguucaaaguauucagcu

SEQ ID NO: 1958970 - RNA, 19 nt, Artificial Sequence
  Description of Artificial Sequence: Synthetic oligonucleotide
  Sense strand starting at position 732 of SEQ ID NO: 1880326
cuuaaagucagguacguau

SEQ ID NO: 1958971 - RNA, 19 nt, Artificial Sequence
  Description of Artificial Sequence: Synthetic oligonucleotide
  Antisense strand to SEQ ID NO: 1958970
auacguaccugacuuuaag

SEQ ID NO: 1958972 - RNA, 19 nt, Artificial Sequence
  Description of Artificial Sequence: Synthetic oligonucleotide
  Sense strand starting at position 813 of SEQ ID NO: 1880326
gucauugcagacugagaaa

SEQ ID NO: 1958973 - RNA, 19 nt, Artificial Sequence
  Description of Artificial Sequence: Synthetic oligonucleotide
  Antisense strand to SEQ ID NO: 1958972
uuucucagucugcaaugac

SEQ ID NO: 1958974 - RNA, 19 nt, Artificial Sequence
  Description of Artificial Sequence: Synthetic oligonucleotide
  Sense strand starting at position 920 of SEQ ID NO: 1880326
gucuccugagauuacaguu

SEQ ID NO: 1958975 - RNA, 19 nt, Artificial Sequence
  Description of Artificial Sequence: Synthetic oligonucleotide
  Antisense strand to SEQ ID NO: 1958974
aacuguaaucucaggagac

SEQ ID NO: 1958976 - RNA, 19 nt, Artificial Sequence
  Description of Artificial Sequence: Synthetic oligonucleotide
  Sense strand starting at position 1238 of SEQ ID NO: 1880326
aaucuuugugcguuugcaa

SEQ ID NO: 1958977 - RNA, 19 nt, Artificial Sequence
  Description of Artificial Sequence: Synthetic oligonucleotide
  Antisense strand to SEQ ID NO: 1958976
uugcaaacgcacaaagauu

SEQ ID NO: 1958978 - RNA, 19 nt, Artificial Sequence
  Description of Artificial Sequence: Synthetic oligonucleotide
  Sense strand starting at position 1239 of SEQ ID NO: 1880326
aucuuugugcguuugcaaa

SEQ ID NO: 1958979 - RNA, 19 nt, Artificial Sequence
  Description of Artificial Sequence: Synthetic oligonucleotide
  Antisense strand to SEQ ID NO: 1958978
uuugcaaacgcacaaagau

SEQ ID NO: 1958980 - RNA, 19 nt, Artificial Sequence
  Description of Artificial Sequence: Synthetic oligonucleotide
  Sense strand starting at position 1713 of SEQ ID NO: 1880326
aguuauucacgcguuauug

SEQ ID NO: 1958981 - RNA, 19 nt, Artificial Sequence
  Description of Artificial Sequence: Synthetic oligonucleotide
  Antisense strand to SEQ ID NO: 1958980
caauaacgcgugaauaacu

SEQ ID NO: 1958982 - RNA, 19 nt, Artificial Sequence
  Description of Artificial Sequence: Synthetic oligonucleotide
  Sense strand starting at position 1714 of SEQ ID NO: 1880326
guuauucacgcguuauugu

SEQ ID NO: 1958983 - RNA, 19 nt, Artificial Sequence
  Description of Artificial Sequence: Synthetic oligonucleotide
  Antisense strand to SEQ ID NO: 1958982
acaauaacgcgugaauaac

SEQ ID NO: 1958984 - RNA, 19 nt, Artificial Sequence
  Description of Artificial Sequence: Synthetic oligonucleotide
  Sense strand starting at position 1778 of SEQ ID NO: 1880326
gcacuugucgcugccauca

SEQ ID NO: 1958985 - RNA, 19 nt, Artificial Sequence
  Description of Artificial Sequence: Synthetic oligonucleotide
  Antisense strand to SEQ ID NO: 1958984
ugauggcagcgacaagugc

SEQ ID NO: 1958986 - RNA, 19 nt, Artificial Sequence
  Description of Artificial Sequence: Synthetic oligonucleotide
  Sense strand starting at position 2430 of SEQ ID NO: 1880326
gcugcauuccucuccguuu

SEQ ID NO: 1958987 - RNA, 19 nt, Artificial Sequence
  Description of Artificial Sequence: Synthetic oligonucleotide
  Antisense strand to SEQ ID NO: 1958986
aaacggagaggaaugcagc

SEQ ID NO: 1958988 - RNA, 19 nt, Artificial Sequence
  Description of Artificial Sequence: Synthetic oligonucleotide
  Sense strand starting at position 2473 of SEQ ID NO: 1880326
ugaugaaauugacacacau

SEQ ID NO: 1958989 - RNA, 19 nt, Artificial Sequence
  Description of Artificial Sequence: Synthetic oligonucleotide
  Antisense strand to SEQ ID NO: 1958988
augugugucaauuucauca

SEQ ID NO: 1958990 - RNA, 19 nt, Artificial Sequence
  Description of Artificial Sequence: Synthetic oligonucleotide
  Sense strand starting at position 2685 of SEQ ID NO: 1880326
aucugauaaucacuggcaa

SEQ ID NO: 1958991 - RNA, 19 nt, Artificial Sequence
  Description of Artificial Sequence: Synthetic oligonucleotide
  Antisense strand to SEQ ID NO: 1958990
uugccagugauuaucagau

SEQ ID NO: 1958992 - RNA, 19 nt, Artificial Sequence
  Description of Artificial Sequence: Synthetic oligonucleotide
  Sense strand starting at position 2686 of SEQ ID NO: 1880326
ucugauaaucacuggcaac

SEQ ID NO: 1958993 - RNA, 19 nt, Artificial Sequence
  Description of Artificial Sequence: Synthetic oligonucleotide
  Antisense strand to SEQ ID NO: 1958992
guugccagugauuaucaga

SEQ ID NO: 1958994 - RNA, 19 nt, Artificial Sequence
  Description of Artificial Sequence: Synthetic oligonucleotide
  Sense strand starting at position 2817 of SEQ ID NO: 1880326
uucgucguugucguuuaau

SEQ ID NO: 1958995 - RNA, 19 nt, Artificial Sequence
  Description of Artificial Sequence: Synthetic oligonucleotide
  Antisense strand to SEQ ID NO: 1958994
auuaaacgacaacgacgaa

SEQ ID NO: 1958996 - RNA, 19 nt, Artificial Sequence
  Description of Artificial Sequence: Synthetic oligonucleotide
  Sense strand starting at position 2819 of SEQ ID NO: 1880326
cgucguugucguuuaaugu

SEQ ID NO: 1958997 - RNA, 19 nt, Artificial Sequence
  Description of Artificial Sequence: Synthetic oligonucleotide
  Antisense strand to SEQ ID NO: 1958996
acauuaaacgacaacgacg

SEQ ID NO: 1958998 - RNA, 19 nt, Artificial Sequence
  Description of Artificial Sequence: Synthetic oligonucleotide
  Sense strand starting at position 2864 of SEQ ID NO: 1880326
gcuauauguguucccuguu

SEQ ID NO: 1958999 - RNA, 19 nt, Artificial Sequence
  Description of Artificial Sequence: Synthetic oligonucleotide
  Antisense strand to SEQ ID NO: 1958998
aacagggaacacauauagc

SEQ ID NO: 1959000 - RNA, 19 nt, Artificial Sequence
  Description of Artificial Sequence: Synthetic oligonucleotide
  Sense strand starting at position 2871 of SEQ ID NO: 1880326
guguucccuguuuaagaaa

SEQ ID NO: 1959001 - RNA, 19 nt, Artificial Sequence
  Description of Artificial Sequence: Synthetic oligonucleotide
  Antisense strand to SEQ ID NO: 1959000
uuucuuaaacagggaacac

SEQ ID NO: 1959002 - RNA, 19 nt, Artificial Sequence
  Description of Artificial Sequence: Synthetic oligonucleotide
  Sense strand starting at position 2905 of SEQ ID NO: 1880326
uguuucucugcuuagggau

SEQ ID NO: 1959003 - RNA, 19 nt, Artificial Sequence
  Description of Artificial Sequence: Synthetic oligonucleotide
  Antisense strand to SEQ ID NO: 1959002
aucccuaagcagagaaaca

SEQ ID NO: 1959004 - RNA, 19 nt, Artificial Sequence
  Description of Artificial Sequence: Synthetic oligonucleotide
  Sense strand starting at position 2934 of SEQ ID NO: 1880326
uuugguaucugaucaugua

SEQ ID NO: 1959005 - RNA, 19 nt, Artificial Sequence
  Description of Artificial Sequence: Synthetic oligonucleotide
  Antisense strand to SEQ ID NO: 1959004
uacaugaucagauaccaaa

SEQ ID NO: 1959006 - RNA, 19 nt, Artificial Sequence
  Description of Artificial Sequence: Synthetic oligonucleotide
  Sense strand starting at position 2935 of SEQ ID NO: 1880326
uugguaucugaucauguag

SEQ ID NO: 1959007 - RNA, 19 nt, Artificial Sequence
  Description of Artificial Sequence: Synthetic oligonucleotide
  Antisense strand to SEQ ID NO: 1959006
cuacaugaucagauaccaa

SEQ ID NO: 1959008 - RNA, 19 nt, Artificial Sequence
  Description of Artificial Sequence: Synthetic oligonucleotide
  Sense strand starting at position 2946 of SEQ ID NO: 1880326
ucauguagaucuucucuuu

SEQ ID NO: 1959009 - RNA, 19 nt, Artificial Sequence
  Description of Artificial Sequence: Synthetic oligonucleotide
  Antisense strand to SEQ ID NO: 1959008
aaagagaagaucuacauga

SEQ ID NO: 1959010 - RNA, 19 nt, Artificial Sequence
  Description of Artificial Sequence: Synthetic oligonucleotide
  Sense strand starting at position 2985 of SEQ ID NO: 1880326
ggcgucuuuccucuuaguu

SEQ ID NO: 1959011 - RNA, 19 nt, Artificial Sequence
  Description of Artificial Sequence: Synthetic oligonucleotide
  Antisense strand to SEQ ID NO: 1959010
aacuaagaggaaagacgcc

SEQ ID NO: 1959012 - RNA, 19 nt, Artificial Sequence
  Description of Artificial Sequence: Synthetic oligonucleotide
  Sense strand starting at position 2986 of SEQ ID NO: 1880326
gcgucuuuccucuuaguuc

SEQ ID NO: 1959013 - RNA, 19 nt, Artificial Sequence
  Description of Artificial Sequence: Synthetic oligonucleotide
  Antisense strand to SEQ ID NO: 1959012
gaacuaagaggaaagacgc

SEQ ID NO: 1959014 - RNA, 19 nt, Artificial Sequence
  Description of Artificial Sequence: Synthetic oligonucleotide
  Sense strand starting at position 3017 of SEQ ID NO: 1880326
agugucuucucucccauuu

SEQ ID NO: 1959015 - RNA, 19 nt, Artificial Sequence
  Description of Artificial Sequence: Synthetic oligonucleotide
  Antisense strand to SEQ ID NO: 1959014
aaaugggagagaagacacu

SEQ ID NO: 1959016 - RNA, 19 nt, Artificial Sequence
  Description of Artificial Sequence: Synthetic oligonucleotide
  Sense strand starting at position 3275 of SEQ ID NO: 1880326
augggcaaguguuuaagau

SEQ ID NO: 1959017 - RNA, 19 nt, Artificial Sequence
  Description of Artificial Sequence: Synthetic oligonucleotide
  Antisense strand to SEQ ID NO: 1959016
aucuuaaacacuugcccau

SEQ ID NO: 1959018 - RNA, 19 nt, Artificial Sequence
  Description of Artificial Sequence: Synthetic oligonucleotide
  Sense strand starting at position 3276 of SEQ ID NO: 1880326
ugggcaaguguuuaagaug

SEQ ID NO: 1959019 - RNA, 19 nt, Artificial Sequence
  Description of Artificial Sequence: Synthetic oligonucleotide
  Antisense strand to SEQ ID NO: 1959018
caucuuaaacacuugccca

SEQ ID NO: 1959020 - RNA, 19 nt, Artificial Sequence
  Description of Artificial Sequence: Synthetic oligonucleotide
  Sense strand starting at position 3291 of SEQ ID NO: 1880326
gaugcuauauguuuggaau

SEQ ID NO: 1959021 - RNA, 19 nt, Artificial Sequence
  Description of Artificial Sequence: Synthetic oligonucleotide
  Antisense strand to SEQ ID NO: 1959020
auuccaaacauauagcauc

SEQ ID NO: 1959022 - RNA, 19 nt, Artificial Sequence
  Description of Artificial Sequence: Synthetic oligonucleotide
  Sense strand starting at position 3292 of SEQ ID NO: 1880326
augcuauauguuuggaauu

SEQ ID NO: 1959023 - RNA, 19 nt, Artificial Sequence
  Description of Artificial Sequence: Synthetic oligonucleotide
  Antisense strand to SEQ ID NO: 1959022
aauuccaaacauauagcau

SEQ ID NO: 1959024 - RNA, 19 nt, Artificial Sequence
  Description of Artificial Sequence: Synthetic oligonucleotide
  Sense strand starting at position 3468 of SEQ ID NO: 1880326
ucaagaaagcuuuguggga

SEQ ID NO: 1959025 - RNA, 19 nt, Artificial Sequence
  Description of Artificial Sequence: Synthetic oligonucleotide
  Antisense strand to SEQ ID NO: 1959024
ucccacaaagcuuucuuga

SEQ ID NO: 1959026 - RNA, 19 nt, Artificial Sequence
  Description of Artificial Sequence: Synthetic oligonucleotide
  Sense strand starting at position 3469 of SEQ ID NO: 1880326
caagaaagcuuugugggau

SEQ ID NO: 1959027 - RNA, 19 nt, Artificial Sequence
  Description of Artificial Sequence: Synthetic oligonucleotide
  Antisense strand to SEQ ID NO: 1959026
aucccacaaagcuuucuug

SEQ ID NO: 1959028 - RNA, 19 nt, Artificial Sequence
  Description of Artificial Sequence: Synthetic oligonucleotide
  Sense strand starting at position 3472 of SEQ ID NO: 1880326
gaaagcuuugugggauaga

SEQ ID NO: 1959029 - RNA, 19 nt, Artificial Sequence
  Description of Artificial Sequence: Synthetic oligonucleotide
  Antisense strand to SEQ ID NO: 1959028
ucuaucccacaaagcuuuc

SEQ ID NO: 1959030 - RNA, 19 nt, Artificial Sequence
  Description of Artificial Sequence: Synthetic oligonucleotide
  Sense strand starting at position 3501 of SEQ ID NO: 1880326
auauaaagauugcugcuaa

SEQ ID NO: 1959031 - RNA, 19 nt, Artificial Sequence
  Description of Artificial Sequence: Synthetic oligonucleotide
  Antisense strand to SEQ ID NO: 1959030
uuagcagcaaucuuuauau

SEQ ID NO: 1959032 - RNA, 19 nt, Artificial Sequence
  Description of Artificial Sequence: Synthetic oligonucleotide
  Sense strand starting at position 3844 of SEQ ID NO: 1880326
ucccaugauuuauagguaa

SEQ ID NO: 1959033 - RNA, 19 nt, Artificial Sequence
  Description of Artificial Sequence: Synthetic oligonucleotide
  Antisense strand to SEQ ID NO: 1959032
uuaccuauaaaucauggga

SEQ ID NO: 1959034 - RNA, 19 nt, Artificial Sequence
  Description of Artificial Sequence: Synthetic oligonucleotide
  Sense strand starting at position 64 of SEQ ID NO: 1880327
gcaggaugcucacugcaca

SEQ ID NO: 1959035 - RNA, 19 nt, Artificial Sequence
  Description of Artificial Sequence: Synthetic oligonucleotide
  Antisense strand to SEQ ID NO: 1959034
ugugcagugagcauccugc

SEQ ID NO: 1959036 - RNA, 19 nt, Artificial Sequence
  Description of Artificial Sequence: Synthetic oligonucleotide
  Sense strand starting at position 95 of SEQ ID NO: 1880327
uuauuucuacugugagcau

SEQ ID NO: 1959037 - RNA, 19 nt, Artificial Sequence
  Description of Artificial Sequence: Synthetic oligonucleotide
  Antisense strand to SEQ ID NO: 1959036
augcucacaguagaaauaa

SEQ ID NO: 1959038 - RNA, 19 nt, Artificial Sequence
  Description of Artificial Sequence: Synthetic oligonucleotide
  Sense strand starting at position 98 of SEQ ID NO: 1880327
uuucuacugugagcauaga

SEQ ID NO: 1959039 - RNA, 19 nt, Artificial Sequence
  Description of Artificial Sequence: Synthetic oligonucleotide
  Antisense strand to SEQ ID NO: 1959038
ucuaugcucacaguagaaa

SEQ ID NO: 1959040 - RNA, 19 nt, Artificial Sequence
  Description of Artificial Sequence: Synthetic oligonucleotide
  Sense strand starting at position 115 of SEQ ID NO: 1880327
gacgauuugugucuguacu

SEQ ID NO: 1959041 - RNA, 19 nt, Artificial Sequence
  Description of Artificial Sequence: Synthetic oligonucleotide
  Antisense strand to SEQ ID NO: 1959040
aguacagacacaaaucguc

SEQ ID NO: 1959042 - RNA, 19 nt, Artificial Sequence
  Description of Artificial Sequence: Synthetic oligonucleotide
  Sense strand starting at position 116 of SEQ ID NO: 1880327
acgauuugugucuguacug

SEQ ID NO: 1959043 - RNA, 19 nt, Artificial Sequence
  Description of Artificial Sequence: Synthetic oligonucleotide
  Antisense strand to SEQ ID NO: 1959042
caguacagacacaaaucgu

SEQ ID NO: 1959044 - RNA, 19 nt, Artificial Sequence
  Description of Artificial Sequence: Synthetic oligonucleotide
  Sense strand starting at position 117 of SEQ ID NO: 1880327
cgauuugugucuguacugu

SEQ ID NO: 1959045 - RNA, 19 nt, Artificial Sequence
  Description of Artificial Sequence: Synthetic oligonucleotide
  Antisense strand to SEQ ID NO: 1959044
acaguacagacacaaaucg

SEQ ID NO: 1959046 - RNA, 19 nt, Artificial Sequence
  Description of Artificial Sequence: Synthetic oligonucleotide
  Sense strand starting at position 309 of SEQ ID NO: 1880327
ccuggagaacaguguccaa

SEQ ID NO: 1959047 - RNA, 19 nt, Artificial Sequence
  Description of Artificial Sequence: Synthetic oligonucleotide
  Antisense strand to SEQ ID NO: 1959046
uuggacacuguucuccagg

SEQ ID NO: 1959048 - RNA, 19 nt, Artificial Sequence
  Description of Artificial Sequence: Synthetic oligonucleotide
  Sense strand starting at position 333 of SEQ ID NO: 1880327
acgggaucuccaugcagaa

SEQ ID NO: 1959049 - RNA, 19 nt, Artificial Sequence
  Description of Artificial Sequence: Synthetic oligonucleotide
  Antisense strand to SEQ ID NO: 1959048
uucugcauggagaucccgu

SEQ ID NO: 1959050 - RNA, 19 nt, Artificial Sequence
  Description of Artificial Sequence: Synthetic oligonucleotide
  Sense strand starting at position 705 of SEQ ID NO: 1880327
ggcauucuuacgugcucua

SEQ ID NO: 1959051 - RNA, 19 nt, Artificial Sequence
  Description of Artificial Sequence: Synthetic oligonucleotide
  Antisense strand to SEQ ID NO: 1959050
uagagcacguaagaaugcc

SEQ ID NO: 1959052 - RNA, 19 nt, Artificial Sequence
  Description of Artificial Sequence: Synthetic oligonucleotide
  Sense strand starting at position 706 of SEQ ID NO: 1880327
gcauucuuacgugcucuau

SEQ ID NO: 1959053 - RNA, 19 nt, Artificial Sequence
  Description of Artificial Sequence: Synthetic oligonucleotide
  Antisense strand to SEQ ID NO: 1959052
auagagcacguaagaaugc

SEQ ID NO: 1959054 - RNA, 19 nt, Artificial Sequence
  Description of Artificial Sequence: Synthetic oligonucleotide
  Sense strand starting at position 1251 of SEQ ID NO: 1880327
gccucugaagugugucaca

SEQ ID NO: 1959055 - RNA, 19 nt, Artificial Sequence
  Description of Artificial Sequence: Synthetic oligonucleotide
  Antisense strand to SEQ ID NO: 1959054
ugugacacacuucagaggc

SEQ ID NO: 1959056 - RNA, 19 nt, Artificial Sequence
  Description of Artificial Sequence: Synthetic oligonucleotide
  Sense strand starting at position 1254 of SEQ ID NO: 1880327
ucugaagugugucacagau

SEQ ID NO: 1959057 - RNA, 19 nt, Artificial Sequence
  Description of Artificial Sequence: Synthetic oligonucleotide
  Antisense strand to SEQ ID NO: 1959056
aucugugacacacuucaga

SEQ ID NO: 1959058 - RNA, 19 nt, Artificial Sequence
  Description of Artificial Sequence: Synthetic oligonucleotide
  Sense strand starting at position 1879 of SEQ ID NO: 1880327
ggugucuucccuuaccaca

SEQ ID NO: 1959059 - RNA, 19 nt, Artificial Sequence
  Description of Artificial Sequence: Synthetic oligonucleotide
  Antisense strand to SEQ ID NO: 1959058
ugugguaagggaagacacc

SEQ ID NO: 1959060 - RNA, 19 nt, Artificial Sequence
  Description of Artificial Sequence: Synthetic oligonucleotide
  Sense strand starting at position 2425 of SEQ ID NO: 1880327
ccaagaaagcuccagaguu

SEQ ID NO: 1959061 - RNA, 19 nt, Artificial Sequence
  Description of Artificial Sequence: Synthetic oligonucleotide
  Antisense strand to SEQ ID NO: 1959060
aacucuggagcuuucuugg

SEQ ID NO: 1959062 - RNA, 19 nt, Artificial Sequence
  Description of Artificial Sequence: Synthetic oligonucleotide
  Sense strand starting at position 2427 of SEQ ID NO: 1880327
aagaaagcuccagaguugu

SEQ ID NO: 1959063 - RNA, 19 nt, Artificial Sequence
  Description of Artificial Sequence: Synthetic oligonucleotide
  Antisense strand to SEQ ID NO: 1959062
acaacucuggagcuuucuu

SEQ ID NO: 1959064 - RNA, 19 nt, Artificial Sequence
  Description of Artificial Sequence: Synthetic oligonucleotide
  Sense strand starting at position 2435 of SEQ ID NO: 1880327
uccagaguuguuuccgugu

SEQ ID NO: 1959065 - RNA, 19 nt, Artificial Sequence
  Description of Artificial Sequence: Synthetic oligonucleotide
  Antisense strand to SEQ ID NO: 1959064
acacggaaacaacucugga

SEQ ID NO: 1959066 - RNA, 19 nt, Artificial Sequence
  Description of Artificial Sequence: Synthetic oligonucleotide
  Sense strand starting at position 2437 of SEQ ID NO: 1880327
cagaguuguuuccguguau

SEQ ID NO: 1959067 - RNA, 19 nt, Artificial Sequence
  Description of Artificial Sequence: Synthetic oligonucleotide
  Antisense strand to SEQ ID NO: 1959066
auacacggaaacaacucug

SEQ ID NO: 1959068 - RNA, 19 nt, Artificial Sequence
  Description of Artificial Sequence: Synthetic oligonucleotide
  Sense strand starting at position 2438 of SEQ ID NO: 1880327
agaguuguuuccguguauu

SEQ ID NO: 1959069 - RNA, 19 nt, Artificial Sequence
  Description of Artificial Sequence: Synthetic oligonucleotide
  Antisense strand to SEQ ID NO: 1959068
aauacacggaaacaacucu

SEQ ID NO: 1959070 - RNA, 19 nt, Artificial Sequence
  Description of Artificial Sequence: Synthetic oligonucleotide
  Sense strand starting at position 2440 of SEQ ID NO: 1880327
aguuguuuccguguauuau

SEQ ID NO: 1959071 - RNA, 19 nt, Artificial Sequence
  Description of Artificial Sequence: Synthetic oligonucleotide
  Antisense strand to SEQ ID NO: 1959070
auaauacacggaaacaacu

SEQ ID NO: 1959072 - RNA, 19 nt, Artificial Sequence
  Description of Artificial Sequence: Synthetic oligonucleotide
  Sense strand starting at position 2441 of SEQ ID NO: 1880327
guuguuuccguguauuaua

SEQ ID NO: 1959073 - RNA, 19 nt, Artificial Sequence
  Description of Artificial Sequence: Synthetic oligonucleotide
  Antisense strand to SEQ ID NO: 1959072
uauaauacacggaaacaac

SEQ ID NO: 1959074 - RNA, 19 nt, Artificial Sequence
  Description of Artificial Sequence: Synthetic oligonucleotide
  Sense strand starting at position 2444 of SEQ ID NO: 1880327
guuuccguguauuauaaau

SEQ ID NO: 1959075 - RNA, 19 nt, Artificial Sequence
  Description of Artificial Sequence: Synthetic oligonucleotide
  Antisense strand to SEQ ID NO: 1959074
auuuauaauacacggaaac

SEQ ID NO: 1959076 - RNA, 19 nt, Artificial Sequence
  Description of Artificial Sequence: Synthetic oligonucleotide
  Sense strand starting at position 2978 of SEQ ID NO: 1880327
gaaacucacuccugaguug

SEQ ID NO: 1959077 - RNA, 19 nt, Artificial Sequence
  Description of Artificial Sequence: Synthetic oligonucleotide
  Antisense strand to SEQ ID NO: 1959076
caacucaggagugaguuuc

SEQ ID NO: 1959078 - RNA, 19 nt, Artificial Sequence
  Description of Artificial Sequence: Synthetic oligonucleotide
  Sense strand starting at position 2981 of SEQ ID NO: 1880327
acucacuccugaguugaaa

SEQ ID NO: 1959079 - RNA, 19 nt, Artificial Sequence
  Description of Artificial Sequence: Synthetic oligonucleotide
  Antisense strand to SEQ ID NO: 1959078
uuucaacucaggagugagu

SEQ ID NO: 1959080 - RNA, 19 nt, Artificial Sequence
  Description of Artificial Sequence: Synthetic oligonucleotide
  Sense strand starting at position 3309 of SEQ ID NO: 1880327
ggaccuaccucaugaaagu

SEQ ID NO: 1959081 - RNA, 19 nt, Artificial Sequence
  Description of Artificial Sequence: Synthetic oligonucleotide
  Antisense strand to SEQ ID NO: 1959080
acuuucaugagguaggucc

SEQ ID NO: 1959082 - RNA, 19 nt, Artificial Sequence
  Description of Artificial Sequence: Synthetic oligonucleotide
  Sense strand starting at position 3562 of SEQ ID NO: 1880327
cggagaaguuaagcaguaa

SEQ ID NO: 1959083 - RNA, 19 nt, Artificial Sequence
  Description of Artificial Sequence: Synthetic oligonucleotide
  Antisense strand to SEQ ID NO: 1959082
uuacugcuuaacuucuccg

SEQ ID NO: 1959084 - RNA, 19 nt, Artificial Sequence
  Description of Artificial Sequence: Synthetic oligonucleotide
  Sense strand starting at position 3594 of SEQ ID NO: 1880327
aucucuguuugacacugau

SEQ ID NO: 1959085 - RNA, 19 nt, Artificial Sequence
  Description of Artificial Sequence: Synthetic oligonucleotide
  Antisense strand to SEQ ID NO: 1959084
aucagugucaaacagagau

SEQ ID NO: 1959086 - RNA, 19 nt, Artificial Sequence
  Description of Artificial Sequence: Synthetic oligonucleotide
  Sense strand starting at position 3782 of SEQ ID NO: 1880327
gcgucauuaccguuggcuu

SEQ ID NO: 1959087 - RNA, 19 nt, Artificial Sequence
  Description of Artificial Sequence: Synthetic oligonucleotide
  Antisense strand to SEQ ID NO: 1959086
aagccaacgguaaugacgc

SEQ ID NO: 1959088 - RNA, 19 nt, Artificial Sequence
  Description of Artificial Sequence: Synthetic oligonucleotide
  Sense strand starting at position 8 of SEQ ID NO: 1880328
ugggacuguaugugguaaa

SEQ ID NO: 1959089 - RNA, 19 nt, Artificial Sequence
  Description of Artificial Sequence: Synthetic oligonucleotide
  Antisense strand to SEQ ID NO: 1959088
uuuaccacauacaguccca

SEQ ID NO: 1959090 - RNA, 19 nt, Artificial Sequence
  Description of Artificial Sequence: Synthetic oligonucleotide
  Sense strand starting at position 55 of SEQ ID NO: 1880328
auagaauaccaugggcuaa

SEQ ID NO: 1959091 - RNA, 19 nt, Artificial Sequence
  Description of Artificial Sequence: Synthetic oligonucleotide
  Antisense strand to SEQ ID NO: 1959090
uuagcccaugguauucuau

SEQ ID NO: 1959092 - RNA, 19 nt, Artificial Sequence
  Description of Artificial Sequence: Synthetic oligonucleotide
  Sense strand starting at position 66 of SEQ ID NO: 1880328
ugggcuaaaucuucuacaa

SEQ ID NO: 1959093 - RNA, 19 nt, Artificial Sequence
  Description of Artificial Sequence: Synthetic oligonucleotide
  Antisense strand to SEQ ID NO: 1959092
uuguagaagauuuagccca

SEQ ID NO: 1959094 - RNA, 19 nt, Artificial Sequence
  Description of Artificial Sequence: Synthetic oligonucleotide
  Sense strand starting at position 202 of SEQ ID NO: 1880328
ccaggaugguucuccaaca

SEQ ID NO: 1959095 - RNA, 19 nt, Artificial Sequence
  Description of Artificial Sequence: Synthetic oligonucleotide
  Antisense strand to SEQ ID NO: 1959094
uguuggagaaccauccugg

SEQ ID NO: 1959096 - RNA, 19 nt, Artificial Sequence
  Description of Artificial Sequence: Synthetic oligonucleotide
  Sense strand starting at position 203 of SEQ ID NO: 1880328
caggaugguucuccaacau

SEQ ID NO: 1959097 - RNA, 19 nt, Artificial Sequence
  Description of Artificial Sequence: Synthetic oligonucleotide
  Antisense strand to SEQ ID NO: 1959096
auguuggagaaccauccug

SEQ ID NO: 1959098 - RNA, 19 nt, Artificial Sequence
  Description of Artificial Sequence: Synthetic oligonucleotide
  Sense strand starting at position 297 of SEQ ID NO: 1880328
cgugauccugugcuguuua

SEQ ID NO: 1959099 - RNA, 19 nt, Artificial Sequence
  Description of Artificial Sequence: Synthetic oligonucleotide
  Antisense strand to SEQ ID NO: 1959098
uaaacagcacaggaucacg

SEQ ID NO: 1959100 - RNA, 19 nt, Artificial Sequence
  Description of Artificial Sequence: Synthetic oligonucleotide
  Sense strand starting at position 313 of SEQ ID NO: 1880328
uuagacgacucacuuuaaa

SEQ ID NO: 1959101 - RNA, 19 nt, Artificial Sequence
  Description of Artificial Sequence: Synthetic oligonucleotide
  Antisense strand to SEQ ID NO: 1959100
uuuaaagugagucgucuaa

SEQ ID NO: 1959102 - RNA, 19 nt, Artificial Sequence
  Description of Artificial Sequence: Synthetic oligonucleotide
  Sense strand starting at position 325 of SEQ ID NO: 1880328
cuuuaaauugugcacaaga

SEQ ID NO: 1959103 - RNA, 19 nt, Artificial Sequence
  Description of Artificial Sequence: Synthetic oligonucleotide
  Antisense strand to SEQ ID NO: 1959102
ucuugugcacaauuuaaag

SEQ ID NO: 1959104 - RNA, 19 nt, Artificial Sequence
  Description of Artificial Sequence: Synthetic oligonucleotide
  Sense strand starting at position 327 of SEQ ID NO: 1880328
uuaaauugugcacaagauu

SEQ ID NO: 1959105 - RNA, 19 nt, Artificial Sequence
  Description of Artificial Sequence: Synthetic oligonucleotide
  Antisense strand to SEQ ID NO: 1959104
aaucuugugcacaauuuaa

SEQ ID NO: 1959106 - RNA, 19 nt, Artificial Sequence
  Description of Artificial Sequence: Synthetic oligonucleotide
  Sense strand starting at position 381 of SEQ ID NO: 1880328
aauuuaagugcuggcggau

SEQ ID NO: 1959107 - RNA, 19 nt, Artificial Sequence
  Description of Artificial Sequence: Synthetic oligonucleotide
  Antisense strand to SEQ ID NO: 1959106
auccgccagcacuuaaauu

SEQ ID NO: 1959108 - RNA, 19 nt, Artificial Sequence
  Description of Artificial Sequence: Synthetic oligonucleotide
  Sense strand starting at position 394 of SEQ ID NO: 1880328
gcggauguuccugaggaag

SEQ ID NO: 1959109 - RNA, 19 nt, Artificial Sequence
  Description of Artificial Sequence: Synthetic oligonucleotide
  Antisense strand to SEQ ID NO: 1959108
cuuccucaggaacauccgc

SEQ ID NO: 1959110 - RNA, 19 nt, Artificial Sequence
  Description of Artificial Sequence: Synthetic oligonucleotide
  Sense strand starting at position 405 of SEQ ID NO: 1880328
ugaggaagguguuuacuga

SEQ ID NO: 1959111 - RNA, 19 nt, Artificial Sequence
  Description of Artificial Sequence: Synthetic oligonucleotide
  Antisense strand to SEQ ID NO: 1959110
ucaguaaacaccuuccuca

SEQ ID NO: 1959112 - RNA, 19 nt, Artificial Sequence
  Description of Artificial Sequence: Synthetic oligonucleotide
  Sense strand starting at position 503 of SEQ ID NO: 1880328
guuauugucccauaggaac

SEQ ID NO: 1959113 - RNA, 19 nt, Artificial Sequence
  Description of Artificial Sequence: Synthetic oligonucleotide
  Antisense strand to SEQ ID NO: 1959112
guuccuaugggacaauaac

SEQ ID NO: 1959114 - RNA, 19 nt, Artificial Sequence
  Description of Artificial Sequence: Synthetic oligonucleotide
  Sense strand starting at position 525 of SEQ ID NO: 1880328
auccucugauacguaucaa

SEQ ID NO: 1959115 - RNA, 19 nt, Artificial Sequence
  Description of Artificial Sequence: Synthetic oligonucleotide
  Antisense strand to SEQ ID NO: 1959114
uugauacguaucagaggau

SEQ ID NO: 1959116 - RNA, 19 nt, Artificial Sequence
  Description of Artificial Sequence: Synthetic oligonucleotide
  Sense strand starting at position 1986 of SEQ ID NO: 1880328
acaagaaagcguuacugga

SEQ ID NO: 1959117 - RNA, 19 nt, Artificial Sequence
  Description of Artificial Sequence: Synthetic oligonucleotide
  Antisense strand to SEQ ID NO: 1959116
uccaguaacgcuuucuugu

SEQ ID NO: 1959118 - RNA, 19 nt, Artificial Sequence
  Description of Artificial Sequence: Synthetic oligonucleotide
  Sense strand starting at position 2064 of SEQ ID NO: 1880328
uggagacaacaguguuaca

SEQ ID NO: 1959119 - RNA, 19 nt, Artificial Sequence
  Description of Artificial Sequence: Synthetic oligonucleotide
  Antisense strand to SEQ ID NO: 1959118
uguaacacuguugucucca

SEQ ID NO: 1959120 - RNA, 19 nt, Artificial Sequence
  Description of Artificial Sequence: Synthetic oligonucleotide
  Sense strand starting at position 2166 of SEQ ID NO: 1880328
acagauguugaaugaacgu

SEQ ID NO: 1959121 - RNA, 19 nt, Artificial Sequence
  Description of Artificial Sequence: Synthetic oligonucleotide
  Antisense strand to SEQ ID NO: 1959120
acguucauucaacaucugu

SEQ ID NO: 1959122 - RNA, 19 nt, Artificial Sequence
  Description of Artificial Sequence: Synthetic oligonucleotide
  Sense strand starting at position 2527 of SEQ ID NO: 1880328
uaggcuacuccugauauga

SEQ ID NO: 1959123 - RNA, 19 nt, Artificial Sequence
  Description of Artificial Sequence: Synthetic oligonucleotide
  Antisense strand to SEQ ID NO: 1959122
ucauaucaggaguagccua

SEQ ID NO: 1959124 - RNA, 19 nt, Artificial Sequence
  Description of Artificial Sequence: Synthetic oligonucleotide
  Sense strand starting at position 2537 of SEQ ID NO: 1880328
cugauaugaccuggucaca

SEQ ID NO: 1959125 - RNA, 19 nt, Artificial Sequence
  Description of Artificial Sequence: Synthetic oligonucleotide
  Antisense strand to SEQ ID NO: 1959124
ugugaccaggucauaucag

SEQ ID NO: 1959126 - RNA, 19 nt, Artificial Sequence
  Description of Artificial Sequence: Synthetic oligonucleotide
  Sense strand starting at position 2577 of SEQ ID NO: 1880328
agggauucucuuggaugca

SEQ ID NO: 1959127 - RNA, 19 nt, Artificial Sequence
  Description of Artificial Sequence: Synthetic oligonucleotide
  Antisense strand to SEQ ID NO: 1959126
ugcauccaagagaaucccu

SEQ ID NO: 1959128 - RNA, 19 nt, Artificial Sequence
  Description of Artificial Sequence: Synthetic oligonucleotide
  Sense strand starting at position 2616 of SEQ ID NO: 1880328
ucuuaaaugugauuaucag

SEQ ID NO: 1959129 - RNA, 19 nt, Artificial Sequence
  Description of Artificial Sequence: Synthetic oligonucleotide
  Antisense strand to SEQ ID NO: 1959128
cugauaaucacauuuaaga

SEQ ID NO: 1959130 - RNA, 19 nt, Artificial Sequence
  Description of Artificial Sequence: Synthetic oligonucleotide
  Sense strand starting at position 2740 of SEQ ID NO: 1880328
gucacaucacauuguugaa

SEQ ID NO: 1959131 - RNA, 19 nt, Artificial Sequence
  Description of Artificial Sequence: Synthetic oligonucleotide
  Antisense strand to SEQ ID NO: 1959130
uucaacaaugugaugugac

SEQ ID NO: 1959132 - RNA, 19 nt, Artificial Sequence
  Description of Artificial Sequence: Synthetic oligonucleotide
  Sense strand starting at position 2864 of SEQ ID NO: 1880328
agugcucucagagauaaug

SEQ ID NO: 1959133 - RNA, 19 nt, Artificial Sequence
  Description of Artificial Sequence: Synthetic oligonucleotide
  Antisense strand to SEQ ID NO: 1959132
cauuaucucugagagcacu

SEQ ID NO: 1959134 - RNA, 19 nt, Artificial Sequence
  Description of Artificial Sequence: Synthetic oligonucleotide
  Sense strand starting at position 3062 of SEQ ID NO: 1880328
cauaaagaucuguguguaa

SEQ ID NO: 1959135 - RNA, 19 nt, Artificial Sequence
  Description of Artificial Sequence: Synthetic oligonucleotide
  Antisense strand to SEQ ID NO: 1959134
uuacacacagaucuuuaug

SEQ ID NO: 1959136 - RNA, 19 nt, Artificial Sequence
  Description of Artificial Sequence: Synthetic oligonucleotide
  Sense strand starting at position 3064 of SEQ ID NO: 1880328
uaaagaucuguguguaaca

SEQ ID NO: 1959137 - RNA, 19 nt, Artificial Sequence
  Description of Artificial Sequence: Synthetic oligonucleotide
  Antisense strand to SEQ ID NO: 1959136
uguuacacacagaucuuua

SEQ ID NO: 1959138 - RNA, 19 nt, Artificial Sequence
  Description of Artificial Sequence: Synthetic oligonucleotide
  Sense strand starting at position 3066 of SEQ ID NO: 1880328
aagaucuguguguaacaga

SEQ ID NO: 1959139 - RNA, 19 nt, Artificial Sequence
  Description of Artificial Sequence: Synthetic oligonucleotide
  Antisense strand to SEQ ID NO: 1959138
ucuguuacacacagaucuu

SEQ ID NO: 1959140 - RNA, 19 nt, Artificial Sequence
  Description of Artificial Sequence: Synthetic oligonucleotide
  Sense strand starting at position 3157 of SEQ ID NO: 1880328
ccacuauuaguaggugaca

SEQ ID NO: 1959141 - RNA, 19 nt, Artificial Sequence
  Description of Artificial Sequence: Synthetic oligonucleotide
  Antisense strand to SEQ ID NO: 1959140
ugucaccuacuaauagugg

SEQ ID NO: 1959142 - RNA, 19 nt, Artificial Sequence
  Description of Artificial Sequence: Synthetic oligonucleotide
  Sense strand starting at position 3158 of SEQ ID NO: 1880328
cacuauuaguaggugacaa

SEQ ID NO: 1959143 - RNA, 19 nt, Artificial Sequence
  Description of Artificial Sequence: Synthetic oligonucleotide
  Antisense strand to SEQ ID NO: 1959142
uugucaccuacuaauagug

SEQ ID NO: 1959144 - RNA, 19 nt, Artificial Sequence
  Description of Artificial Sequence: Synthetic oligonucleotide
  Sense strand starting at position 3159 of SEQ ID NO: 1880328
acuauuaguaggugacaag

SEQ ID NO: 1959145 - RNA, 19 nt, Artificial Sequence
  Description of Artificial Sequence: Synthetic oligonucleotide
  Antisense strand to SEQ ID NO: 1959144
cuugucaccuacuaauagu

SEQ ID NO: 1959146 - RNA, 19 nt, Artificial Sequence
  Description of Artificial Sequence: Synthetic oligonucleotide
  Sense strand starting at position 3183 of SEQ ID NO: 1880328
gcuagcucaguuguucuua

SEQ ID NO: 1959147 - RNA, 19 nt, Artificial Sequence
  Description of Artificial Sequence: Synthetic oligonucleotide
  Antisense strand to SEQ ID NO: 1959146
uaagaacaacugagcuagc

SEQ ID NO: 1959148 - RNA, 19 nt, Artificial Sequence
  Description of Artificial Sequence: Synthetic oligonucleotide
  Sense strand starting at position 3347 of SEQ ID NO: 1880328
acguuacuucuuuauacca

SEQ ID NO: 1959149 - RNA, 19 nt, Artificial Sequence
  Description of Artificial Sequence: Synthetic oligonucleotide
  Antisense strand to SEQ ID NO: 1959148
ugguauaaagaaguaacgu

SEQ ID NO: 1959150 - RNA, 19 nt, Artificial Sequence
  Description of Artificial Sequence: Synthetic oligonucleotide
  Sense strand starting at position 3402 of SEQ ID NO: 1880328
ccuagaauaccucgugaca

SEQ ID NO: 1959151 - RNA, 19 nt, Artificial Sequence
  Description of Artificial Sequence: Synthetic oligonucleotide
  Antisense strand to SEQ ID NO: 1959150
ugucacgagguauucuagg

SEQ ID NO: 1959152 - RNA, 19 nt, Artificial Sequence
  Description of Artificial Sequence: Synthetic oligonucleotide
  Sense strand starting at position 3405 of SEQ ID NO: 1880328
agaauaccucgugacauac

SEQ ID NO: 1959153 - RNA, 19 nt, Artificial Sequence
  Description of Artificial Sequence: Synthetic oligonucleotide
  Antisense strand to SEQ ID NO: 1959152
guaugucacgagguauucu

SEQ ID NO: 1959154 - RNA, 19 nt, Artificial Sequence
  Description of Artificial Sequence: Synthetic oligonucleotide
  Sense strand starting at position 3435 of SEQ ID NO: 1880328
ccagguauugcccaguuaa

SEQ ID NO: 1959155 - RNA, 19 nt, Artificial Sequence
  Description of Artificial Sequence: Synthetic oligonucleotide
  Antisense strand to SEQ ID NO: 1959154
uuaacugggcaauaccugg

SEQ ID NO: 1959156 - RNA, 19 nt, Artificial Sequence
  Description of Artificial Sequence: Synthetic oligonucleotide
  Sense strand starting at position 3471 of SEQ ID NO: 1880328
aaugauauguggccagaac

SEQ ID NO: 1959157 - RNA, 19 nt, Artificial Sequence
  Description of Artificial Sequence: Synthetic oligonucleotide
  Antisense strand to SEQ ID NO: 1959156
guucuggccacauaucauu

SEQ ID NO: 1959158 - RNA, 19 nt, Artificial Sequence
  Description of Artificial Sequence: Synthetic oligonucleotide
  Sense strand starting at position 3472 of SEQ ID NO: 1880328
augauauguggccagaacu

SEQ ID NO: 1959159 - RNA, 19 nt, Artificial Sequence
  Description of Artificial Sequence: Synthetic oligonucleotide
  Antisense strand to SEQ ID NO: 1959158
aguucuggccacauaucau

SEQ ID NO: 1959160 - RNA, 19 nt, Artificial Sequence
  Description of Artificial Sequence: Synthetic oligonucleotide
  Sense strand starting at position 3659 of SEQ ID NO: 1880328
gggcauuacucacugacca

SEQ ID NO: 1959161 - RNA, 19 nt, Artificial Sequence
  Description of Artificial Sequence: Synthetic oligonucleotide
  Antisense strand to SEQ ID NO: 1959160
uggucagugaguaaugccc

SEQ ID NO: 1959162 - RNA, 19 nt, Artificial Sequence
  Description of Artificial Sequence: Synthetic oligonucleotide
  Sense strand starting at position 3685 of SEQ ID NO: 1880328
gcacuugaccuauggaaau

SEQ ID NO: 1959163 - RNA, 19 nt, Artificial Sequence
  Description of Artificial Sequence: Synthetic oligonucleotide
  Antisense strand to SEQ ID NO: 1959162
auuuccauaggucaagugc

SEQ ID NO: 1959164 - RNA, 19 nt, Artificial Sequence
  Description of Artificial Sequence: Synthetic oligonucleotide
  Sense strand starting at position 3747 of SEQ ID NO: 1880328
gcgugacuugcuccaugua

SEQ ID NO: 1959165 - RNA, 19 nt, Artificial Sequence
  Description of Artificial Sequence: Synthetic oligonucleotide
  Antisense strand to SEQ ID NO: 1959164
uacauggagcaagucacgc

SEQ ID NO: 1959166 - RNA, 19 nt, Artificial Sequence
  Description of Artificial Sequence: Synthetic oligonucleotide
  Sense strand starting at position 3794 of SEQ ID NO: 1880328
aagucugucugaucugaag

SEQ ID NO: 1959167 - RNA, 19 nt, Artificial Sequence
  Description of Artificial Sequence: Synthetic oligonucleotide
  Antisense strand to SEQ ID NO: 1959166
cuucagaucagacagacuu

SEQ ID NO: 1959168 - RNA, 19 nt, Artificial Sequence
  Description of Artificial Sequence: Synthetic oligonucleotide
  Sense strand starting at position 19 of SEQ ID NO: 1880329
uacugauuacugcaaacgu

SEQ ID NO: 1959169 - RNA, 19 nt, Artificial Sequence
  Description of Artificial Sequence: Synthetic oligonucleotide
  Antisense strand to SEQ ID NO: 1959168
acguuugcaguaaucagua

SEQ ID NO: 1959170 - RNA, 19 nt, Artificial Sequence
  Description of Artificial Sequence: Synthetic oligonucleotide
  Sense strand starting at position 28 of SEQ ID NO: 1880329
cugcaaacguaaucagagu

SEQ ID NO: 1959171 - RNA, 19 nt, Artificial Sequence
  Description of Artificial Sequence: Synthetic oligonucleotide
  Antisense strand to SEQ ID NO: 1959170
acucugauuacguuugcag

SEQ ID NO: 1959172 - RNA, 19 nt, Artificial Sequence
  Description of Artificial Sequence: Synthetic oligonucleotide
  Sense strand starting at position 29 of SEQ ID NO: 1880329
ugcaaacguaaucagaguu

SEQ ID NO: 1959173 - RNA, 19 nt, Artificial Sequence
  Description of Artificial Sequence: Synthetic oligonucleotide
  Antisense strand to SEQ ID NO: 1959172
aacucugauuacguuugca

SEQ ID NO: 1959174 - RNA, 19 nt, Artificial Sequence
  Description of Artificial Sequence: Synthetic oligonucleotide
  Sense strand starting at position 44 of SEQ ID NO: 1880329
aguuauaucugaguugcug

SEQ ID NO: 1959175 - RNA, 19 nt, Artificial Sequence
  Description of Artificial Sequence: Synthetic oligonucleotide
  Antisense strand to SEQ ID NO: 1959174
cagcaacucagauauaacu

SEQ ID NO: 1959176 - RNA, 19 nt, Artificial Sequence
  Description of Artificial Sequence: Synthetic oligonucleotide
  Sense strand starting at position 50 of SEQ ID NO: 1880329
aucugaguugcugacagaa

SEQ ID NO: 1959177 - RNA, 19 nt, Artificial Sequence
  Description of Artificial Sequence: Synthetic oligonucleotide
  Antisense strand to SEQ ID NO: 1959176
uucugucagcaacucagau

SEQ ID NO: 1959178 - RNA, 19 nt, Artificial Sequence
  Description of Artificial Sequence: Synthetic oligonucleotide
  Sense strand starting at position 52 of SEQ ID NO: 1880329
cugaguugcugacagaauc

SEQ ID NO: 1959179 - RNA, 19 nt, Artificial Sequence
  Description of Artificial Sequence: Synthetic oligonucleotide
  Antisense strand to SEQ ID NO: 1959178
gauucugucagcaacucag

SEQ ID NO: 1959180 - RNA, 19 nt, Artificial Sequence
  Description of Artificial Sequence: Synthetic oligonucleotide
  Sense strand starting at position 115 of SEQ ID NO: 1880329
ggacuuuaaucacacacga

SEQ ID NO: 1959181 - RNA, 19 nt, Artificial Sequence
  Description of Artificial Sequence: Synthetic oligonucleotide
  Antisense strand to SEQ ID NO: 1959180
ucgugugugauuaaagucc

SEQ ID NO: 1959182 - RNA, 19 nt, Artificial Sequence
  Description of Artificial Sequence: Synthetic oligonucleotide
  Sense strand starting at position 215 of SEQ ID NO: 1880329
uccuaaacgcaauguuaac

SEQ ID NO: 1959183 - RNA, 19 nt, Artificial Sequence
  Description of Artificial Sequence: Synthetic oligonucleotide
  Antisense strand to SEQ ID NO: 1959182
guuaacauugcguuuagga

SEQ ID NO: 1959184 - RNA, 19 nt, Artificial Sequence
  Description of Artificial Sequence: Synthetic oligonucleotide
  Sense strand starting at position 270 of SEQ ID NO: 1880329
ucagaaaugcuucgagcaa

SEQ ID NO: 1959185 - RNA, 19 nt, Artificial Sequence
  Description of Artificial Sequence: Synthetic oligonucleotide
  Antisense strand to SEQ ID NO: 1959184
uugcucgaagcauuucuga

SEQ ID NO: 1959186 - RNA, 19 nt, Artificial Sequence
  Description of Artificial Sequence: Synthetic oligonucleotide
  Sense strand starting at position 271 of SEQ ID NO: 1880329
cagaaaugcuucgagcaaa

SEQ ID NO: 1959187 - RNA, 19 nt, Artificial Sequence
  Description of Artificial Sequence: Synthetic oligonucleotide
  Antisense strand to SEQ ID NO: 1959186
uuugcucgaagcauuucug

SEQ ID NO: 1959188 - RNA, 19 nt, Artificial Sequence
  Description of Artificial Sequence: Synthetic oligonucleotide
  Sense strand starting at position 380 of SEQ ID NO: 1880329
ugugucuuccgcuacaauu

SEQ ID NO: 1959189 - RNA, 19 nt, Artificial Sequence
  Description of Artificial Sequence: Synthetic oligonucleotide
  Antisense strand to SEQ ID NO: 1959188
aauuguagcggaagacaca

SEQ ID NO: 1959190 - RNA, 19 nt, Artificial Sequence
  Description of Artificial Sequence: Synthetic oligonucleotide
  Sense strand starting at position 451 of SEQ ID NO: 1880329
ucgugacacuaauaacuau

SEQ ID NO: 1959191 - RNA, 19 nt, Artificial Sequence
  Description of Artificial Sequence: Synthetic oligonucleotide
  Antisense strand to SEQ ID NO: 1959190
auaguuauuagugucacga

SEQ ID NO: 1959192 - RNA, 19 nt, Artificial Sequence
  Description of Artificial Sequence: Synthetic oligonucleotide
  Sense strand starting at position 495 of SEQ ID NO: 1880329
ggaccagccugaguauaau

SEQ ID NO: 1959193 - RNA, 19 nt, Artificial Sequence
  Description of Artificial Sequence: Synthetic oligonucleotide
  Antisense strand to SEQ ID NO: 1959192
auuauacucaggcuggucc

SEQ ID NO: 1959194 - RNA, 19 nt, Artificial Sequence
  Description of Artificial Sequence: Synthetic oligonucleotide
  Sense strand starting at position 915 of SEQ ID NO: 1880329
gccagcuuaauauggugaa

SEQ ID NO: 1959195 - RNA, 19 nt, Artificial Sequence
  Description of Artificial Sequence: Synthetic oligonucleotide
  Antisense strand to SEQ ID NO: 1959194
uucaccauauuaagcuggc

SEQ ID NO: 1959196 - RNA, 19 nt, Artificial Sequence
  Description of Artificial Sequence: Synthetic oligonucleotide
  Sense strand starting at position 916 of SEQ ID NO: 1880329
ccagcuuaauauggugaaa

SEQ ID NO: 1959197 - RNA, 19 nt, Artificial Sequence
  Description of Artificial Sequence: Synthetic oligonucleotide
  Antisense strand to SEQ ID NO: 1959196
uuucaccauauuaagcugg

SEQ ID NO: 1959198 - RNA, 19 nt, Artificial Sequence
  Description of Artificial Sequence: Synthetic oligonucleotide
  Sense strand starting at position 919 of SEQ ID NO: 1880329
gcuuaauauggugaaacuc

SEQ ID NO: 1959199 - RNA, 19 nt, Artificial Sequence
  Description of Artificial Sequence: Synthetic oligonucleotide
  Antisense strand to SEQ ID NO: 1959198
gaguuucaccauauuaagc

SEQ ID NO: 1959200 - RNA, 19 nt, Artificial Sequence
  Description of Artificial Sequence: Synthetic oligonucleotide
  Sense strand starting at position 1175 of SEQ ID NO: 1880329
ucaccugacuucugucaca

SEQ ID NO: 1959201 - RNA, 19 nt, Artificial Sequence
  Description of Artificial Sequence: Synthetic oligonucleotide
  Antisense strand to SEQ ID NO: 1959200
ugugacagaagucagguga

SEQ ID NO: 1959202 - RNA, 19 nt, Artificial Sequence
  Description of Artificial Sequence: Synthetic oligonucleotide
  Sense strand starting at position 1282 of SEQ ID NO: 1880329
cgauguuuacgccgacacu

SEQ ID NO: 1959203 - RNA, 19 nt, Artificial Sequence
  Description of Artificial Sequence: Synthetic oligonucleotide
  Antisense strand to SEQ ID NO: 1959202
agugucggcguaaacaucg

SEQ ID NO: 1959204 - RNA, 19 nt, Artificial Sequence
  Description of Artificial Sequence: Synthetic oligonucleotide
  Sense strand starting at position 1283 of SEQ ID NO: 1880329
gauguuuacgccgacacuu

SEQ ID NO: 1959205 - RNA, 19 nt, Artificial Sequence
  Description of Artificial Sequence: Synthetic oligonucleotide
  Antisense strand to SEQ ID NO: 1959204
aagugucggcguaaacauc

SEQ ID NO: 1959206 - RNA, 19 nt, Artificial Sequence
  Description of Artificial Sequence: Synthetic oligonucleotide
  Sense strand starting at position 1337 of SEQ ID NO: 1880329
ccgucucuuucuccacuua

SEQ ID NO: 1959207 - RNA, 19 nt, Artificial Sequence
  Description of Artificial Sequence: Synthetic oligonucleotide
  Antisense strand to SEQ ID NO: 1959206
uaaguggagaaagagacgg

SEQ ID NO: 1959208 - RNA, 19 nt, Artificial Sequence
  Description of Artificial Sequence: Synthetic oligonucleotide
  Sense strand starting at position 1849 of SEQ ID NO: 1880329
agacaaagcuuguaacgca

SEQ ID NO: 1959209 - RNA, 19 nt, Artificial Sequence
  Description of Artificial Sequence: Synthetic oligonucleotide
  Antisense strand to SEQ ID NO: 1959208
ugcguuacaagcuuugucu

SEQ ID NO: 1959210 - RNA, 19 nt, Artificial Sequence
  Description of Artificial Sequence: Synthetic oligonucleotide
  Sense strand starting at position 1932 of SEQ ID NO: 1880329
cgucgagacucgucucgaa

SEQ ID NO: 1959211 - RNA, 19 nt, Artificial Sequence
  Description of Artificial Sequence: Synthetic oligonucleotide
  Antisense strand to SEQ ID NO: 1959210
uucgagacgagucucgacg

SEQ ID NO: 1959212 - RNA, 19 nt, Artificial Sequence
  Description of Artificial Sequence: Synthetic oligonucleotide
  Sense strand starting at position 2151 of SEQ ID NO: 1880329
aggaacaacuugugaacaa

SEQ ID NO: 1959213 - RNA, 19 nt, Artificial Sequence
  Description of Artificial Sequence: Synthetic oligonucleotide
  Antisense strand to SEQ ID NO: 1959212
uuguucacaaguuguuccu

SEQ ID NO: 1959214 - RNA, 19 nt, Artificial Sequence
  Description of Artificial Sequence: Synthetic oligonucleotide
  Sense strand starting at position 2200 of SEQ ID NO: 1880329
gcauguacccuguuagcga

SEQ ID NO: 1959215 - RNA, 19 nt, Artificial Sequence
  Description of Artificial Sequence: Synthetic oligonucleotide
  Antisense strand to SEQ ID NO: 1959214
ucgcuaacaggguacaugc

SEQ ID NO: 1959216 - RNA, 19 nt, Artificial Sequence
  Description of Artificial Sequence: Synthetic oligonucleotide
  Sense strand starting at position 2208 of SEQ ID NO: 1880329
ccuguuagcgaccacuaaa

SEQ ID NO: 1959217 - RNA, 19 nt, Artificial Sequence
  Description of Artificial Sequence: Synthetic oligonucleotide
  Antisense strand to SEQ ID NO: 1959216
uuuaguggucgcuaacagg

SEQ ID NO: 1959218 - RNA, 19 nt, Artificial Sequence
  Description of Artificial Sequence: Synthetic oligonucleotide
  Sense strand starting at position 2396 of SEQ ID NO: 1880329
agcgucagauggcuucaaa

SEQ ID NO: 1959219 - RNA, 19 nt, Artificial Sequence
  Description of Artificial Sequence: Synthetic oligonucleotide
  Antisense strand to SEQ ID NO: 1959218
uuugaagccaucugacgcu

SEQ ID NO: 1959220 - RNA, 19 nt, Artificial Sequence
  Description of Artificial Sequence: Synthetic oligonucleotide
  Sense strand starting at position 2410 of SEQ ID NO: 1880329
ucaaauuacuaaugggauc

SEQ ID NO: 1959221 - RNA, 19 nt, Artificial Sequence
  Description of Artificial Sequence: Synthetic oligonucleotide
  Antisense strand to SEQ ID NO: 1959220
gaucccauuaguaauuuga

SEQ ID NO: 1959222 - RNA, 19 nt, Artificial Sequence
  Description of Artificial Sequence: Synthetic oligonucleotide
  Sense strand starting at position 2510 of SEQ ID NO: 1880329
ccucccugucuaugauacu

SEQ ID NO: 1959223 - RNA, 19 nt, Artificial Sequence
  Description of Artificial Sequence: Synthetic oligonucleotide
  Antisense strand to SEQ ID NO: 1959222
aguaucauagacagggagg

SEQ ID NO: 1959224 - RNA, 19 nt, Artificial Sequence
  Description of Artificial Sequence: Synthetic oligonucleotide
  Sense strand starting at position 2511 of SEQ ID NO: 1880329
cucccugucuaugauacuu

SEQ ID NO: 1959225 - RNA, 19 nt, Artificial Sequence
  Description of Artificial Sequence: Synthetic oligonucleotide
  Antisense strand to SEQ ID NO: 1959224
aaguaucauagacagggag

SEQ ID NO: 1959226 - RNA, 19 nt, Artificial Sequence
  Description of Artificial Sequence: Synthetic oligonucleotide
  Sense strand starting at position 2584 of SEQ ID NO: 1880329
agggaaggccagcguuaaa

SEQ ID NO: 1959227 - RNA, 19 nt, Artificial Sequence
  Description of Artificial Sequence: Synthetic oligonucleotide
  Antisense strand to SEQ ID NO: 1959226
uuuaacgcuggccuucccu

SEQ ID NO: 1959228 - RNA, 19 nt, Artificial Sequence
  Description of Artificial Sequence: Synthetic oligonucleotide
  Sense strand starting at position 2587 of SEQ ID NO: 1880329
gaaggccagcguuaaagau

SEQ ID NO: 1959229 - RNA, 19 nt, Artificial Sequence
  Description of Artificial Sequence: Synthetic oligonucleotide
  Antisense strand to SEQ ID NO: 1959228
aucuuuaacgcuggccuuc

SEQ ID NO: 1959230 - RNA, 19 nt, Artificial Sequence
  Description of Artificial Sequence: Synthetic oligonucleotide
  Sense strand starting at position 2633 of SEQ ID NO: 1880329
gggcuuuauguccagccua

SEQ ID NO: 1959231 - RNA, 19 nt, Artificial Sequence
  Description of Artificial Sequence: Synthetic oligonucleotide
  Antisense strand to SEQ ID NO: 1959230
uaggcuggacauaaagccc

SEQ ID NO: 1959232 - RNA, 19 nt, Artificial Sequence
  Description of Artificial Sequence: Synthetic oligonucleotide
  Sense strand starting at position 2647 of SEQ ID NO: 1880329
gccuaagaccuacagaagu

SEQ ID NO: 1959233 - RNA, 19 nt, Artificial Sequence
  Description of Artificial Sequence: Synthetic oligonucleotide
  Antisense strand to SEQ ID NO: 1959232
acuucuguaggucuuaggc

SEQ ID NO: 1959234 - RNA, 19 nt, Artificial Sequence
  Description of Artificial Sequence: Synthetic oligonucleotide
  Sense strand starting at position 2765 of SEQ ID NO: 1880329
auguuaagauguucccaua

SEQ ID NO: 1959235 - RNA, 19 nt, Artificial Sequence
  Description of Artificial Sequence: Synthetic oligonucleotide
  Antisense strand to SEQ ID NO: 1959234
uaugggaacaucuuaacau

SEQ ID NO: 1959236 - RNA, 19 nt, Artificial Sequence
  Description of Artificial Sequence: Synthetic oligonucleotide
  Sense strand starting at position 2768 of SEQ ID NO: 1880329
uuaagauguucccauaaug

SEQ ID NO: 1959237 - RNA, 19 nt, Artificial Sequence
  Description of Artificial Sequence: Synthetic oligonucleotide
  Antisense strand to SEQ ID NO: 1959236
cauuaugggaacaucuuaa

SEQ ID NO: 1959238 - RNA, 19 nt, Artificial Sequence
  Description of Artificial Sequence: Synthetic oligonucleotide
  Sense strand starting at position 2810 of SEQ ID NO: 1880329
gcagaauguggugguaguu

SEQ ID NO: 1959239 - RNA, 19 nt, Artificial Sequence
  Description of Artificial Sequence: Synthetic oligonucleotide
  Antisense strand to SEQ ID NO: 1959238
aacuaccaccacauucugc

SEQ ID NO: 1959240 - RNA, 19 nt, Artificial Sequence
  Description of Artificial Sequence: Synthetic oligonucleotide
  Sense strand starting at position 3116 of SEQ ID NO: 1880329
gcacuuucucccggcagaa

SEQ ID NO: 1959241 - RNA, 19 nt, Artificial Sequence
  Description of Artificial Sequence: Synthetic oligonucleotide
  Antisense strand to SEQ ID NO: 1959240
uucugccgggagaaagugc

SEQ ID NO: 1959242 - RNA, 19 nt, Artificial Sequence
  Description of Artificial Sequence: Synthetic oligonucleotide
  Sense strand starting at position 3118 of SEQ ID NO: 1880329
acuuucucccggcagaaua

SEQ ID NO: 1959243 - RNA, 19 nt, Artificial Sequence
  Description of Artificial Sequence: Synthetic oligonucleotide
  Antisense strand to SEQ ID NO: 1959242
uauucugccgggagaaagu

SEQ ID NO: 1959244 - RNA, 19 nt, Artificial Sequence
  Description of Artificial Sequence: Synthetic oligonucleotide
  Sense strand starting at position 3386 of SEQ ID NO: 1880329
aguggcagaguuuagaaua

SEQ ID NO: 1959245 - RNA, 19 nt, Artificial Sequence
  Description of Artificial Sequence: Synthetic oligonucleotide
  Antisense strand to SEQ ID NO: 1959244
uauucuaaacucugccacu

SEQ ID NO: 1959246 - RNA, 19 nt, Artificial Sequence
  Description of Artificial Sequence: Synthetic oligonucleotide
  Sense strand starting at position 3800 of SEQ ID NO: 1880329
auguaaagucauuaguaug

SEQ ID NO: 1959247 - RNA, 19 nt, Artificial Sequence
  Description of Artificial Sequence: Synthetic oligonucleotide
  Antisense strand to SEQ ID NO: 1959246
cauacuaaugacuuuacau

SEQ ID NO: 1959248 - RNA, 19 nt, Artificial Sequence
  Description of Artificial Sequence: Synthetic oligonucleotide
  Sense strand starting at position 39 of SEQ ID NO: 1880330
cuugaauggugaucaucag

SEQ ID NO: 1959249 - RNA, 19 nt, Artificial Sequence
  Description of Artificial Sequence: Synthetic oligonucleotide
  Antisense strand to SEQ ID NO: 1959248
cugaugaucaccauucaag

SEQ ID NO: 1959250 - RNA, 19 nt, Artificial Sequence
  Description of Artificial Sequence: Synthetic oligonucleotide
  Sense strand starting at position 45 of SEQ ID NO: 1880330
uggugaucaucagcaaaua

SEQ ID NO: 1959251 - RNA, 19 nt, Artificial Sequence
  Description of Artificial Sequence: Synthetic oligonucleotide
  Antisense strand to SEQ ID NO: 1959250
uauuugcugaugaucacca

SEQ ID NO: 1959252 - RNA, 19 nt, Artificial Sequence
  Description of Artificial Sequence: Synthetic oligonucleotide
  Sense strand starting at position 191 of SEQ ID NO: 1880330
guuggaagauccuugcaaa

SEQ ID NO: 1959253 - RNA, 19 nt, Artificial Sequence
  Description of Artificial Sequence: Synthetic oligonucleotide
  Antisense strand to SEQ ID NO: 1959252
uuugcaaggaucuuccaac

SEQ ID NO: 1959254 - RNA, 19 nt, Artificial Sequence
  Description of Artificial Sequence: Synthetic oligonucleotide
  Sense strand starting at position 192 of SEQ ID NO: 1880330
uuggaagauccuugcaaac

SEQ ID NO: 1959255 - RNA, 19 nt, Artificial Sequence
  Description of Artificial Sequence: Synthetic oligonucleotide
  Antisense strand to SEQ ID NO: 1959254
guuugcaaggaucuuccaa

SEQ ID NO: 1959256 - RNA, 19 nt, Artificial Sequence
  Description of Artificial Sequence: Synthetic oligonucleotide
  Sense strand starting at position 1665 of SEQ ID NO: 1880330
ccucuaauccugcagagcu

SEQ ID NO: 1959257 - RNA, 19 nt, Artificial Sequence
  Description of Artificial Sequence: Synthetic oligonucleotide
  Antisense strand to SEQ ID NO: 1959256
agcucugcaggauuagagg

SEQ ID NO: 1959258 - RNA, 19 nt, Artificial Sequence
  Description of Artificial Sequence: Synthetic oligonucleotide
  Sense strand starting at position 1853 of SEQ ID NO: 1880330
ggaagugucgcccagauug

SEQ ID NO: 1959259 - RNA, 19 nt, Artificial Sequence
  Description of Artificial Sequence: Synthetic oligonucleotide
  Antisense strand to SEQ ID NO: 1959258
caaucugggcgacacuucc

SEQ ID NO: 1959260 - RNA, 19 nt, Artificial Sequence
  Description of Artificial Sequence: Synthetic oligonucleotide
  Sense strand starting at position 1903 of SEQ ID NO: 1880330
ugaaguuuccugcacuaag

SEQ ID NO: 1959261 - RNA, 19 nt, Artificial Sequence
  Description of Artificial Sequence: Synthetic oligonucleotide
  Antisense strand to SEQ ID NO: 1959260
cuuagugcaggaaacuuca

SEQ ID NO: 1959262 - RNA, 19 nt, Artificial Sequence
  Description of Artificial Sequence: Synthetic oligonucleotide
  Sense strand starting at position 1988 of SEQ ID NO: 1880330
aguguaacugccuaacagu

SEQ ID NO: 1959263 - RNA, 19 nt, Artificial Sequence
  Description of Artificial Sequence: Synthetic oligonucleotide
  Antisense strand to SEQ ID NO: 1959262
acuguuaggcaguuacacu

SEQ ID NO: 1959264 - RNA, 19 nt, Artificial Sequence
  Description of Artificial Sequence: Synthetic oligonucleotide
  Sense strand starting at position 2017 of SEQ ID NO: 1880330
uugcgcaguuauuuggaua

SEQ ID NO: 1959265 - RNA, 19 nt, Artificial Sequence
  Description of Artificial Sequence: Synthetic oligonucleotide
  Antisense strand to SEQ ID NO: 1959264
uauccaaauaacugcgcaa

SEQ ID NO: 1959266 - RNA, 19 nt, Artificial Sequence
  Description of Artificial Sequence: Synthetic oligonucleotide
  Sense strand starting at position 2018 of SEQ ID NO: 1880330
ugcgcaguuauuuggauau

SEQ ID NO: 1959267 - RNA, 19 nt, Artificial Sequence
  Description of Artificial Sequence: Synthetic oligonucleotide
  Antisense strand to SEQ ID NO: 1959266
auauccaaauaacugcgca

SEQ ID NO: 1959268 - RNA, 19 nt, Artificial Sequence
  Description of Artificial Sequence: Synthetic oligonucleotide
  Sense strand starting at position 2020 of SEQ ID NO: 1880330
cgcaguuauuuggauauuu

SEQ ID NO: 1959269 - RNA, 19 nt, Artificial Sequence
  Description of Artificial Sequence: Synthetic oligonucleotide
  Antisense strand to SEQ ID NO: 1959268
aaauauccaaauaacugcg

SEQ ID NO: 1959270 - RNA, 19 nt, Artificial Sequence
  Description of Artificial Sequence: Synthetic oligonucleotide
  Sense strand starting at position 2038 of SEQ ID NO: 1880330
uuauucuguguuuacucau

SEQ ID NO: 1959271 - RNA, 19 nt, Artificial Sequence
  Description of Artificial Sequence: Synthetic oligonucleotide
  Antisense strand to SEQ ID NO: 1959270
augaguaaacacagaauaa

SEQ ID NO: 1959272 - RNA, 19 nt, Artificial Sequence
  Description of Artificial Sequence: Synthetic oligonucleotide
  Sense strand starting at position 2045 of SEQ ID NO: 1880330
guguuuacucauuaacuga

SEQ ID NO: 1959273 - RNA, 19 nt, Artificial Sequence
  Description of Artificial Sequence: Synthetic oligonucleotide
  Antisense strand to SEQ ID NO: 1959272
ucaguuaaugaguaaacac

SEQ ID NO: 1959274 - RNA, 19 nt, Artificial Sequence
  Description of Artificial Sequence: Synthetic oligonucleotide
  Sense strand starting at position 2267 of SEQ ID NO: 1880330
gaaauauagauaggugguu

SEQ ID NO: 1959275 - RNA, 19 nt, Artificial Sequence
  Description of Artificial Sequence: Synthetic oligonucleotide
  Antisense strand to SEQ ID NO: 1959274
aaccaccuaucuauauuuc

SEQ ID NO: 1959276 - RNA, 19 nt, Artificial Sequence
  Description of Artificial Sequence: Synthetic oligonucleotide
  Sense strand starting at position 2291 of SEQ ID NO: 1880330
guggguuaauaggcuaaga

SEQ ID NO: 1959277 - RNA, 19 nt, Artificial Sequence
  Description of Artificial Sequence: Synthetic oligonucleotide
  Antisense strand to SEQ ID NO: 1959276
ucuuagccuauuaacccac

SEQ ID NO: 1959278 - RNA, 19 nt, Artificial Sequence
  Description of Artificial Sequence: Synthetic oligonucleotide
  Sense strand starting at position 2411 of SEQ ID NO: 1880330
gugguuucacguguaugua

SEQ ID NO: 1959279 - RNA, 19 nt, Artificial Sequence
  Description of Artificial Sequence: Synthetic oligonucleotide
  Antisense strand to SEQ ID NO: 1959278
uacauacacgugaaaccac

SEQ ID NO: 1959280 - RNA, 19 nt, Artificial Sequence
  Description of Artificial Sequence: Synthetic oligonucleotide
  Sense strand starting at position 2421 of SEQ ID NO: 1880330
guguauguaguauauggaa

SEQ ID NO: 1959281 - RNA, 19 nt, Artificial Sequence
  Description of Artificial Sequence: Synthetic oligonucleotide
  Antisense strand to SEQ ID NO: 1959280
uuccauauacuacauacac

SEQ ID NO: 1959282 - RNA, 19 nt, Artificial Sequence
  Description of Artificial Sequence: Synthetic oligonucleotide
  Sense strand starting at position 2438 of SEQ ID NO: 1880330
aaguaagagucuucuaguu

SEQ ID NO: 1959283 - RNA, 19 nt, Artificial Sequence
  Description of Artificial Sequence: Synthetic oligonucleotide
  Antisense strand to SEQ ID NO: 1959282
aacuagaagacucuuacuu

SEQ ID NO: 1959284 - RNA, 19 nt, Artificial Sequence
  Description of Artificial Sequence: Synthetic oligonucleotide
  Sense strand starting at position 2533 of SEQ ID NO: 1880330
gauguauuagucuauccug

SEQ ID NO: 1959285 - RNA, 19 nt, Artificial Sequence
  Description of Artificial Sequence: Synthetic oligonucleotide
  Antisense strand to SEQ ID NO: 1959284
caggauagacuaauacauc

SEQ ID NO: 1959286 - RNA, 19 nt, Artificial Sequence
  Description of Artificial Sequence: Synthetic oligonucleotide
  Sense strand starting at position 2675 of SEQ ID NO: 1880330
ucucuuucuagcgugcaga

SEQ ID NO: 1959287 - RNA, 19 nt, Artificial Sequence
  Description of Artificial Sequence: Synthetic oligonucleotide
  Antisense strand to SEQ ID NO: 1959286
ucugcacgcuagaaagaga

SEQ ID NO: 1959288 - RNA, 19 nt, Artificial Sequence
  Description of Artificial Sequence: Synthetic oligonucleotide
  Sense strand starting at position 2942 of SEQ ID NO: 1880330
ccacauaucuggguuagua

SEQ ID NO: 1959289 - RNA, 19 nt, Artificial Sequence
  Description of Artificial Sequence: Synthetic oligonucleotide
  Antisense strand to SEQ ID NO: 1959288
uacuaacccagauaugugg

SEQ ID NO: 1959290 - RNA, 19 nt, Artificial Sequence
  Description of Artificial Sequence: Synthetic oligonucleotide
  Sense strand starting at position 2984 of SEQ ID NO: 1880330
ggcuauuuguauccucgga

SEQ ID NO: 1959291 - RNA, 19 nt, Artificial Sequence
  Description of Artificial Sequence: Synthetic oligonucleotide
  Antisense strand to SEQ ID NO: 1959290
uccgaggauacaaauagcc

SEQ ID NO: 1959292 - RNA, 19 nt, Artificial Sequence
  Description of Artificial Sequence: Synthetic oligonucleotide
  Sense strand starting at position 2988 of SEQ ID NO: 1880330
auuuguauccucggaccuu

SEQ ID NO: 1959293 - RNA, 19 nt, Artificial Sequence
  Description of Artificial Sequence: Synthetic oligonucleotide
  Antisense strand to SEQ ID NO: 1959292
aagguccgaggauacaaau

SEQ ID NO: 1959294 - RNA, 19 nt, Artificial Sequence
  Description of Artificial Sequence: Synthetic oligonucleotide
  Sense strand starting at position 3194 of SEQ ID NO: 1880330
gcccuacgaagagauguaa

SEQ ID NO: 1959295 - RNA, 19 nt, Artificial Sequence
  Description of Artificial Sequence: Synthetic oligonucleotide
  Antisense strand to SEQ ID NO: 1959294
uuacaucucuucguagggc

SEQ ID NO: 1959296 - RNA, 19 nt, Artificial Sequence
  Description of Artificial Sequence: Synthetic oligonucleotide
  Sense strand starting at position 3213 of SEQ ID NO: 1880330
aguuaauaacacugcagua

SEQ ID NO: 1959297 - RNA, 19 nt, Artificial Sequence
  Description of Artificial Sequence: Synthetic oligonucleotide
  Antisense strand to SEQ ID NO: 1959296
uacugcaguguuauuaacu

SEQ ID NO: 1959298 - RNA, 19 nt, Artificial Sequence
  Description of Artificial Sequence: Synthetic oligonucleotide
  Sense strand starting at position 3225 of SEQ ID NO: 1880330
ugcaguauuugggcuuagu

SEQ ID NO: 1959299 - RNA, 19 nt, Artificial Sequence
  Description of Artificial Sequence: Synthetic oligonucleotide
  Antisense strand to SEQ ID NO: 1959298
acuaagcccaaauacugca

SEQ ID NO: 1959300 - RNA, 19 nt, Artificial Sequence
  Description of Artificial Sequence: Synthetic oligonucleotide
  Sense strand starting at position 3235 of SEQ ID NO: 1880330
gggcuuagucaauauuaua

SEQ ID NO: 1959301 - RNA, 19 nt, Artificial Sequence
  Description of Artificial Sequence: Synthetic oligonucleotide
  Antisense strand to SEQ ID NO: 1959300
uauaauauugacuaagccc

SEQ ID NO: 1959302 - RNA, 19 nt, Artificial Sequence
  Description of Artificial Sequence: Synthetic oligonucleotide
  Sense strand starting at position 3255 of SEQ ID NO: 1880330
aaguguugaagauguugaa

SEQ ID NO: 1959303 - RNA, 19 nt, Artificial Sequence
  Description of Artificial Sequence: Synthetic oligonucleotide
  Antisense strand to SEQ ID NO: 1959302
uucaacaucuucaacacuu

SEQ ID NO: 1959304 - RNA, 19 nt, Artificial Sequence
  Description of Artificial Sequence: Synthetic oligonucleotide
  Sense strand starting at position 3572 of SEQ ID NO: 1880330
gaaacagaaugggagaauu

SEQ ID NO: 1959305 - RNA, 19 nt, Artificial Sequence
  Description of Artificial Sequence: Synthetic oligonucleotide
  Antisense strand to SEQ ID NO: 1959304
aauucucccauucuguuuc

SEQ ID NO: 1959306 - RNA, 19 nt, Artificial Sequence
  Description of Artificial Sequence: Synthetic oligonucleotide
  Sense strand starting at position 3674 of SEQ ID NO: 1880330
acagauauguuucuaggua

SEQ ID NO: 1959307 - RNA, 19 nt, Artificial Sequence
  Description of Artificial Sequence: Synthetic oligonucleotide
  Antisense strand to SEQ ID NO: 1959306
uaccuagaaacauaucugu

SEQ ID NO: 1959308 - RNA, 19 nt, Artificial Sequence
  Description of Artificial Sequence: Synthetic oligonucleotide
  Sense strand starting at position 3876 of SEQ ID NO: 1880330
auagaauguugagucuaua

SEQ ID NO: 1959309 - RNA, 19 nt, Artificial Sequence
  Description of Artificial Sequence: Synthetic oligonucleotide
  Antisense strand to SEQ ID NO: 1959308
uauagacucaacauucuau

SEQ ID NO: 1959310 - RNA, 19 nt, Artificial Sequence
  Description of Artificial Sequence: Synthetic oligonucleotide
  Sense strand starting at position 3879 of SEQ ID NO: 1880330
gaauguugagucuauaacu

SEQ ID NO: 1959311 - RNA, 19 nt, Artificial Sequence
  Description of Artificial Sequence: Synthetic oligonucleotide
  Antisense strand to SEQ ID NO: 1959310
aguuauagacucaacauuc

SEQ ID NO: 1959312 - RNA, 19 nt, Artificial Sequence
  Description of Artificial Sequence: Synthetic oligonucleotide
  Sense strand starting at position 3884 of SEQ ID NO: 1880330
uugagucuauaacucugua

SEQ ID NO: 1959313 - RNA, 19 nt, Artificial Sequence
  Description of Artificial Sequence: Synthetic oligonucleotide
  Antisense strand to SEQ ID NO: 1959312
uacagaguuauagacucaa

SEQ ID NO: 1959314 - RNA, 19 nt, Artificial Sequence
  Description of Artificial Sequence: Synthetic oligonucleotide
  Sense strand starting at position 3903 of SEQ ID NO: 1880330
acccaaauccuaggcuaga

SEQ ID NO: 1959315 - RNA, 19 nt, Artificial Sequence
  Description of Artificial Sequence: Synthetic oligonucleotide
  Antisense strand to SEQ ID NO: 1959314
ucuagccuaggauuugggu

SEQ ID NO: 1959316 - RNA, 19 nt, Artificial Sequence
  Description of Artificial Sequence: Synthetic oligonucleotide
  Sense strand starting at position 3904 of SEQ ID NO: 1880330
cccaaauccuaggcuagaa

SEQ ID NO: 1959317 - RNA, 19 nt, Artificial Sequence
  Description of Artificial Sequence: Synthetic oligonucleotide
  Antisense strand to SEQ ID NO: 1959316
uucuagccuaggauuuggg

SEQ ID NO: 1959318 - RNA, 19 nt, Artificial Sequence
  Description of Artificial Sequence: Synthetic oligonucleotide
  Sense strand starting at position 3908 of SEQ ID NO: 1880330
aauccuaggcuagaaguua

SEQ ID NO: 1959319 - RNA, 19 nt, Artificial Sequence
  Description of Artificial Sequence: Synthetic oligonucleotide
  Antisense strand to SEQ ID NO: 1959318
uaacuucuagccuaggauu

SEQ ID NO: 1959320 - RNA, 19 nt, Artificial Sequence
  Description of Artificial Sequence: Synthetic oligonucleotide
  Sense strand starting at position 3922 of SEQ ID NO: 1880330
aguuaaugaaagggcuaaa

SEQ ID NO: 1959321 - RNA, 19 nt, Artificial Sequence
  Description of Artificial Sequence: Synthetic oligonucleotide
  Antisense strand to SEQ ID NO: 1959320
uuuagcccuuucauuaacu

SEQ ID NO: 1959322 - RNA, 19 nt, Artificial Sequence
  Description of Artificial Sequence: Synthetic oligonucleotide
  Sense strand starting at position 3959 of SEQ ID NO: 1880330
agagaucacuuaguuauca

SEQ ID NO: 1959323 - RNA, 19 nt, Artificial Sequence
  Description of Artificial Sequence: Synthetic oligonucleotide
  Antisense strand to SEQ ID NO: 1959322
ugauaacuaagugaucucu

SEQ ID NO: 1959324 - RNA, 19 nt, Artificial Sequence
  Description of Artificial Sequence: Synthetic oligonucleotide
  Sense strand starting at position 3963 of SEQ ID NO: 1880330
aucacuuaguuaucaagga

SEQ ID NO: 1959325 - RNA, 19 nt, Artificial Sequence
  Description of Artificial Sequence: Synthetic oligonucleotide
  Antisense strand to SEQ ID NO: 1959324
uccuugauaacuaagugau

SEQ ID NO: 1959326 - RNA, 19 nt, Artificial Sequence
  Description of Artificial Sequence: Synthetic oligonucleotide
  Sense strand starting at position 3967 of SEQ ID NO: 1880330
cuuaguuaucaaggaacag

SEQ ID NO: 1959327 - RNA, 19 nt, Artificial Sequence
  Description of Artificial Sequence: Synthetic oligonucleotide
  Antisense strand to SEQ ID NO: 1959326
cuguuccuugauaacuaag

SEQ ID NO: 1959328 - RNA, 19 nt, Artificial Sequence
  Description of Artificial Sequence: Synthetic oligonucleotide
  Sense strand starting at position 141 of SEQ ID NO: 1880331
ggguuaaacguggaauccu

SEQ ID NO: 1959329 - RNA, 19 nt, Artificial Sequence
  Description of Artificial Sequence: Synthetic oligonucleotide
  Antisense strand to SEQ ID NO: 1959328
aggauuccacguuuaaccc

SEQ ID NO: 1959330 - RNA, 19 nt, Artificial Sequence
  Description of Artificial Sequence: Synthetic oligonucleotide
  Sense strand starting at position 150 of SEQ ID NO: 1880331
guggaauccugagaggaaa

SEQ ID NO: 1959331 - RNA, 19 nt, Artificial Sequence
  Description of Artificial Sequence: Synthetic oligonucleotide
  Antisense strand to SEQ ID NO: 1959330
uuuccucucaggauuccac

SEQ ID NO: 1959332 - RNA, 19 nt, Artificial Sequence
  Description of Artificial Sequence: Synthetic oligonucleotide
  Sense strand starting at position 631 of SEQ ID NO: 1880331
ugaggagguuccucucacu

SEQ ID NO: 1959333 - RNA, 19 nt, Artificial Sequence
  Description of Artificial Sequence: Synthetic oligonucleotide
  Antisense strand to SEQ ID NO: 1959332
agugagaggaaccuccuca

SEQ ID NO: 1959334 - RNA, 19 nt, Artificial Sequence
  Description of Artificial Sequence: Synthetic oligonucleotide
  Sense strand starting at position 751 of SEQ ID NO: 1880331
gcuucuuaccaagagcaca

SEQ ID NO: 1959335 - RNA, 19 nt, Artificial Sequence
  Description of Artificial Sequence: Synthetic oligonucleotide
  Antisense strand to SEQ ID NO: 1959334
ugugcucuugguaagaagc

SEQ ID NO: 1959336 - RNA, 19 nt, Artificial Sequence
  Description of Artificial Sequence: Synthetic oligonucleotide
  Sense strand starting at position 821 of SEQ ID NO: 1880331
accggugugcucucuucua

SEQ ID NO: 1959337 - RNA, 19 nt, Artificial Sequence
  Description of Artificial Sequence: Synthetic oligonucleotide
  Antisense strand to SEQ ID NO: 1959336
uagaagagagcacaccggu

SEQ ID NO: 1959338 - RNA, 19 nt, Artificial Sequence
  Description of Artificial Sequence: Synthetic oligonucleotide
  Sense strand starting at position 872 of SEQ ID NO: 1880331
aucgaauagcugugaaaga

SEQ ID NO: 1959339 - RNA, 19 nt, Artificial Sequence
  Description of Artificial Sequence: Synthetic oligonucleotide
  Antisense strand to SEQ ID NO: 1959338
ucuuucacagcuauucgau

SEQ ID NO: 1959340 - RNA, 19 nt, Artificial Sequence
  Description of Artificial Sequence: Synthetic oligonucleotide
  Sense strand starting at position 873 of SEQ ID NO: 1880331
ucgaauagcugugaaagau

SEQ ID NO: 1959341 - RNA, 19 nt, Artificial Sequence
  Description of Artificial Sequence: Synthetic oligonucleotide
  Antisense strand to SEQ ID NO: 1959340
aucuuucacagcuauucga

SEQ ID NO: 1959342 - RNA, 19 nt, Artificial Sequence
  Description of Artificial Sequence: Synthetic oligonucleotide
  Sense strand starting at position 944 of SEQ ID NO: 1880331
uccagcuaugcacaugaga

SEQ ID NO: 1959343 - RNA, 19 nt, Artificial Sequence
  Description of Artificial Sequence: Synthetic oligonucleotide
  Antisense strand to SEQ ID NO: 1959342
ucucaugugcauagcugga

SEQ ID NO: 1959344 - RNA, 19 nt, Artificial Sequence
  Description of Artificial Sequence: Synthetic oligonucleotide
  Sense strand starting at position 957 of SEQ ID NO: 1880331
augagauggcuuuaaacgu

SEQ ID NO: 1959345 - RNA, 19 nt, Artificial Sequence
  Description of Artificial Sequence: Synthetic oligonucleotide
  Antisense strand to SEQ ID NO: 1959344
acguuuaaagccaucucau

SEQ ID NO: 1959346 - RNA, 19 nt, Artificial Sequence
  Description of Artificial Sequence: Synthetic oligonucleotide
  Sense strand starting at position 1141 of SEQ ID NO: 1880331
aaagucuuucccuggaaag

SEQ ID NO: 1959347 - RNA, 19 nt, Artificial Sequence
  Description of Artificial Sequence: Synthetic oligonucleotide
  Antisense strand to SEQ ID NO: 1959346
cuuuccagggaaagacuuu

SEQ ID NO: 1959348 - RNA, 19 nt, Artificial Sequence
  Description of Artificial Sequence: Synthetic oligonucleotide
  Sense strand starting at position 1142 of SEQ ID NO: 1880331
aagucuuucccuggaaagu

SEQ ID NO: 1959349 - RNA, 19 nt, Artificial Sequence
  Description of Artificial Sequence: Synthetic oligonucleotide
  Antisense strand to SEQ ID NO: 1959348
acuuuccagggaaagacuu

SEQ ID NO: 1959350 - RNA, 19 nt, Artificial Sequence
  Description of Artificial Sequence: Synthetic oligonucleotide
  Sense strand starting at position 1143 of SEQ ID NO: 1880331
agucuuucccuggaaaguu

SEQ ID NO: 1959351 - RNA, 19 nt, Artificial Sequence
  Description of Artificial Sequence: Synthetic oligonucleotide
  Antisense strand to SEQ ID NO: 1959350
aacuuuccagggaaagacu

SEQ ID NO: 1959352 - RNA, 19 nt, Artificial Sequence
  Description of Artificial Sequence: Synthetic oligonucleotide
  Sense strand starting at position 1287 of SEQ ID NO: 1880331
caggaacaaucgucagguu

SEQ ID NO: 1959353 - RNA, 19 nt, Artificial Sequence
  Description of Artificial Sequence: Synthetic oligonucleotide
  Antisense strand to SEQ ID NO: 1959352
aaccugacgauuguuccug

SEQ ID NO: 1959354 - RNA, 19 nt, Artificial Sequence
  Description of Artificial Sequence: Synthetic oligonucleotide
  Sense strand starting at position 1326 of SEQ ID NO: 1880331
gcgguuuggaauuagcgaa

SEQ ID NO: 1959355 - RNA, 19 nt, Artificial Sequence
  Description of Artificial Sequence: Synthetic oligonucleotide
  Antisense strand to SEQ ID NO: 1959354
uucgcuaauuccaaaccgc

SEQ ID NO: 1959356 - RNA, 19 nt, Artificial Sequence
  Description of Artificial Sequence: Synthetic oligonucleotide
  Sense strand starting at position 1330 of SEQ ID NO: 1880331
uuuggaauuagcgaagacu

SEQ ID NO: 1959357 - RNA, 19 nt, Artificial Sequence
  Description of Artificial Sequence: Synthetic oligonucleotide
  Antisense strand to SEQ ID NO: 1959356
agucuucgcuaauuccaaa

SEQ ID NO: 1959358 - RNA, 19 nt, Artificial Sequence
  Description of Artificial Sequence: Synthetic oligonucleotide
  Sense strand starting at position 1333 of SEQ ID NO: 1880331
ggaauuagcgaagacuguu

SEQ ID NO: 1959359 - RNA, 19 nt, Artificial Sequence
  Description of Artificial Sequence: Synthetic oligonucleotide
  Antisense strand to SEQ ID NO: 1959358
aacagucuucgcuaauucc

SEQ ID NO: 1959360 - RNA, 19 nt, Artificial Sequence
  Description of Artificial Sequence: Synthetic oligonucleotide
  Sense strand starting at position 1428 of SEQ ID NO: 1880331
cggaucccaucucaucaau

SEQ ID NO: 1959361 - RNA, 19 nt, Artificial Sequence
  Description of Artificial Sequence: Synthetic oligonucleotide
  Antisense strand to SEQ ID NO: 1959360
auugaugagaugggauccg

SEQ ID NO: 1959362 - RNA, 19 nt, Artificial Sequence
  Description of Artificial Sequence: Synthetic oligonucleotide
  Sense strand starting at position 1441 of SEQ ID NO: 1880331
aucaauaggcuccacgaau

SEQ ID NO: 1959363 - RNA, 19 nt, Artificial Sequence
  Description of Artificial Sequence: Synthetic oligonucleotide
  Antisense strand to SEQ ID NO: 1959362
auucguggagccuauugau

SEQ ID NO: 1959364 - RNA, 19 nt, Artificial Sequence
  Description of Artificial Sequence: Synthetic oligonucleotide
  Sense strand starting at position 1486 of SEQ ID NO: 1880331
gaacucuggugccagauuu

SEQ ID NO: 1959365 - RNA, 19 nt, Artificial Sequence
  Description of Artificial Sequence: Synthetic oligonucleotide
  Antisense strand to SEQ ID NO: 1959364
aaaucuggcaccagaguuc

SEQ ID NO: 1959366 - RNA, 19 nt, Artificial Sequence
  Description of Artificial Sequence: Synthetic oligonucleotide
  Sense strand starting at position 2038 of SEQ ID NO: 1880331
aagcaugacuacuguggaa

SEQ ID NO: 1959367 - RNA, 19 nt, Artificial Sequence
  Description of Artificial Sequence: Synthetic oligonucleotide
  Antisense strand to SEQ ID NO: 1959366
uuccacaguagucaugcuu

SEQ ID NO: 1959368 - RNA, 19 nt, Artificial Sequence
  Description of Artificial Sequence: Synthetic oligonucleotide
  Sense strand starting at position 2040 of SEQ ID NO: 1880331
gcaugacuacuguggaaau

SEQ ID NO: 1959369 - RNA, 19 nt, Artificial Sequence
  Description of Artificial Sequence: Synthetic oligonucleotide
  Antisense strand to SEQ ID NO: 1959368
auuuccacaguagucaugc

SEQ ID NO: 1959370 - RNA, 19 nt, Artificial Sequence
  Description of Artificial Sequence: Synthetic oligonucleotide
  Sense strand starting at position 2041 of SEQ ID NO: 1880331
caugacuacuguggaaauu

SEQ ID NO: 1959371 - RNA, 19 nt, Artificial Sequence
  Description of Artificial Sequence: Synthetic oligonucleotide
  Antisense strand to SEQ ID NO: 1959370
aauuuccacaguagucaug

SEQ ID NO: 1959372 - RNA, 19 nt, Artificial Sequence
  Description of Artificial Sequence: Synthetic oligonucleotide
  Sense strand starting at position 2348 of SEQ ID NO: 1880331
agcggaaccuucuuuaaga

SEQ ID NO: 1959373 - RNA, 19 nt, Artificial Sequence
  Description of Artificial Sequence: Synthetic oligonucleotide
  Antisense strand to SEQ ID NO: 1959372
ucuuaaagaagguuccgcu

SEQ ID NO: 1959374 - RNA, 19 nt, Artificial Sequence
  Description of Artificial Sequence: Synthetic oligonucleotide
  Sense strand starting at position 2349 of SEQ ID NO: 1880331
gcggaaccuucuuuaagaa

SEQ ID NO: 1959375 - RNA, 19 nt, Artificial Sequence
  Description of Artificial Sequence: Synthetic oligonucleotide
  Antisense strand to SEQ ID NO: 1959374
uucuuaaagaagguuccgc

SEQ ID NO: 1959376 - RNA, 19 nt, Artificial Sequence
  Description of Artificial Sequence: Synthetic oligonucleotide
  Sense strand starting at position 2682 of SEQ ID NO: 1880331
gccagaugguuucacagga

SEQ ID NO: 1959377 - RNA, 19 nt, Artificial Sequence
  Description of Artificial Sequence: Synthetic oligonucleotide
  Antisense strand to SEQ ID NO: 1959376
uccugugaaaccaucuggc

SEQ ID NO: 1959378 - RNA, 19 nt, Artificial Sequence
  Description of Artificial Sequence: Synthetic oligonucleotide
  Sense strand starting at position 2798 of SEQ ID NO: 1880331
aguugauuauuacccugau

SEQ ID NO: 1959379 - RNA, 19 nt, Artificial Sequence
  Description of Artificial Sequence: Synthetic oligonucleotide
  Antisense strand to SEQ ID NO: 1959378
aucaggguaauaaucaacu

SEQ ID NO: 1959380 - RNA, 19 nt, Artificial Sequence
  Description of Artificial Sequence: Synthetic oligonucleotide
  Sense strand starting at position 2799 of SEQ ID NO: 1880331
guugauuauuacccugaua

SEQ ID NO: 1959381 - RNA, 19 nt, Artificial Sequence
  Description of Artificial Sequence: Synthetic oligonucleotide
  Antisense strand to SEQ ID NO: 1959380
uaucaggguaauaaucaac

SEQ ID NO: 1959382 - RNA, 19 nt, Artificial Sequence
  Description of Artificial Sequence: Synthetic oligonucleotide
  Sense strand starting at position 2954 of SEQ ID NO: 1880331
ggguuucauccaggaaugu

SEQ ID NO: 1959383 - RNA, 19 nt, Artificial Sequence
  Description of Artificial Sequence: Synthetic oligonucleotide
  Antisense strand to SEQ ID NO: 1959382
acauuccuggaugaaaccc

SEQ ID NO: 1959384 - RNA, 19 nt, Artificial Sequence
  Description of Artificial Sequence: Synthetic oligonucleotide
  Sense strand starting at position 2955 of SEQ ID NO: 1880331
gguuucauccaggaaugug

SEQ ID NO: 1959385 - RNA, 19 nt, Artificial Sequence
  Description of Artificial Sequence: Synthetic oligonucleotide
  Antisense strand to SEQ ID NO: 1959384
cacauuccuggaugaaacc

SEQ ID NO: 1959386 - RNA, 19 nt, Artificial Sequence
  Description of Artificial Sequence: Synthetic oligonucleotide
  Sense strand starting at position 2969 of SEQ ID NO: 1880331
augugaggcuaugucaaua

SEQ ID NO: 1959387 - RNA, 19 nt, Artificial Sequence
  Description of Artificial Sequence: Synthetic oligonucleotide
  Antisense strand to SEQ ID NO: 1959386
uauugacauagccucacau

SEQ ID NO: 1959388 - RNA, 19 nt, Artificial Sequence
  Description of Artificial Sequence: Synthetic oligonucleotide
  Sense strand starting at position 3142 of SEQ ID NO: 1880331
uaaagagcaucugucaaag

SEQ ID NO: 1959389 - RNA, 19 nt, Artificial Sequence
  Description of Artificial Sequence: Synthetic oligonucleotide
  Antisense strand to SEQ ID NO: 1959388
cuuugacagaugcucuuua

SEQ ID NO: 1959390 - RNA, 19 nt, Artificial Sequence
  Description of Artificial Sequence: Synthetic oligonucleotide
  Sense strand starting at position 3199 of SEQ ID NO: 1880331
uggaauguuuccuuccuga

SEQ ID NO: 1959391 - RNA, 19 nt, Artificial Sequence
  Description of Artificial Sequence: Synthetic oligonucleotide
  Antisense strand to SEQ ID NO: 1959390
ucaggaaggaaacauucca

SEQ ID NO: 1959392 - RNA, 19 nt, Artificial Sequence
  Description of Artificial Sequence: Synthetic oligonucleotide
  Sense strand starting at position 3204 of SEQ ID NO: 1880331
uguuuccuuccugagauca

SEQ ID NO: 1959393 - RNA, 19 nt, Artificial Sequence
  Description of Artificial Sequence: Synthetic oligonucleotide
  Antisense strand to SEQ ID NO: 1959392
ugaucucaggaaggaaaca

SEQ ID NO: 1959394 - RNA, 19 nt, Artificial Sequence
  Description of Artificial Sequence: Synthetic oligonucleotide
  Sense strand starting at position 3357 of SEQ ID NO: 1880331
augacaugguugucuacuu

SEQ ID NO: 1959395 - RNA, 19 nt, Artificial Sequence
  Description of Artificial Sequence: Synthetic oligonucleotide
  Antisense strand to SEQ ID NO: 1959394
aaguagacaaccaugucau

SEQ ID NO: 1959396 - RNA, 19 nt, Artificial Sequence
  Description of Artificial Sequence: Synthetic oligonucleotide
  Sense strand starting at position 3358 of SEQ ID NO: 1880331
ugacaugguugucuacuua

SEQ ID NO: 1959397 - RNA, 19 nt, Artificial Sequence
  Description of Artificial Sequence: Synthetic oligonucleotide
  Antisense strand to SEQ ID NO: 1959396
uaaguagacaaccauguca

SEQ ID NO: 1959398 - RNA, 19 nt, Artificial Sequence
  Description of Artificial Sequence: Synthetic oligonucleotide
  Sense strand starting at position 3412 of SEQ ID NO: 1880331
cuauuaaaucagugugaca

SEQ ID NO: 1959399 - RNA, 19 nt, Artificial Sequence
  Description of Artificial Sequence: Synthetic oligonucleotide
  Antisense strand to SEQ ID NO: 1959398
ugucacacugauuuaauag

SEQ ID NO: 1959400 - RNA, 19 nt, Artificial Sequence
  Description of Artificial Sequence: Synthetic oligonucleotide
  Sense strand starting at position 3688 of SEQ ID NO: 1880331
ggugcagugaguugagguu

SEQ ID NO: 1959401 - RNA, 19 nt, Artificial Sequence
  Description of Artificial Sequence: Synthetic oligonucleotide
  Antisense strand to SEQ ID NO: 1959400
aaccucaacucacugcacc

SEQ ID NO: 1959402 - RNA, 19 nt, Artificial Sequence
  Description of Artificial Sequence: Synthetic oligonucleotide
  Sense strand starting at position 3855 of SEQ ID NO: 1880331
aaggaauacuuagguguaa

SEQ ID NO: 1959403 - RNA, 19 nt, Artificial Sequence
  Description of Artificial Sequence: Synthetic oligonucleotide
  Antisense strand to SEQ ID NO: 1959402
uuacaccuaaguauuccuu

SEQ ID NO: 1959404 - RNA, 19 nt, Artificial Sequence
  Description of Artificial Sequence: Synthetic oligonucleotide
  Sense strand starting at position 3856 of SEQ ID NO: 1880331
aggaauacuuagguguaaa

SEQ ID NO: 1959405 - RNA, 19 nt, Artificial Sequence
  Description of Artificial Sequence: Synthetic oligonucleotide
  Antisense strand to SEQ ID NO: 1959404
uuuacaccuaaguauuccu

SEQ ID NO: 1959406 - RNA, 19 nt, Artificial Sequence
  Description of Artificial Sequence: Synthetic oligonucleotide
  Sense strand starting at position 3857 of SEQ ID NO: 1880331
ggaauacuuagguguaaau

SEQ ID NO: 1959407 - RNA, 19 nt, Artificial Sequence
  Description of Artificial Sequence: Synthetic oligonucleotide
  Antisense strand to SEQ ID NO: 1959406
auuuacaccuaaguauucc

SEQ ID NO: 1959408 - RNA, 19 nt, Artificial Sequence
  Description of Artificial Sequence: Synthetic oligonucleotide
  Sense strand starting at position 2060 of SEQ ID NO: 1880332
ugcuaaauaguugagcaau

SEQ ID NO: 1959409 - RNA, 19 nt, Artificial Sequence
  Description of Artificial Sequence: Synthetic oligonucleotide
  Antisense strand to SEQ ID NO: 1959408
auugcucaacuauuuagca

SEQ ID NO: 1959410 - RNA, 19 nt, Artificial Sequence
  Description of Artificial Sequence: Synthetic oligonucleotide
  Sense strand starting at position 2068 of SEQ ID NO: 1880332
aguugagcaauccagguuu

SEQ ID NO: 1959411 - RNA, 19 nt, Artificial Sequence
  Description of Artificial Sequence: Synthetic oligonucleotide
  Antisense strand to SEQ ID NO: 1959410
aaaccuggauugcucaacu

SEQ ID NO: 1959412 - RNA, 19 nt, Artificial Sequence
  Description of Artificial Sequence: Synthetic oligonucleotide
  Sense strand starting at position 2142 of SEQ ID NO: 1880332
gucaaaucauuugagaaca

SEQ ID NO: 1959413 - RNA, 19 nt, Artificial Sequence
  Description of Artificial Sequence: Synthetic oligonucleotide
  Antisense strand to SEQ ID NO: 1959412
uguucucaaaugauuugac

SEQ ID NO: 1959414 - RNA, 19 nt, Artificial Sequence
  Description of Artificial Sequence: Synthetic oligonucleotide
  Sense strand starting at position 2247 of SEQ ID NO: 1880332
gugcuuucagagggaagaa

SEQ ID NO: 1959415 - RNA, 19 nt, Artificial Sequence
  Description of Artificial Sequence: Synthetic oligonucleotide
  Antisense strand to SEQ ID NO: 1959414
uucuucccucugaaagcac

SEQ ID NO: 1959416 - RNA, 19 nt, Artificial Sequence
  Description of Artificial Sequence: Synthetic oligonucleotide
  Sense strand starting at position 2274 of SEQ ID NO: 1880332
ggacuauauugucuuucuu

SEQ ID NO: 1959417 - RNA, 19 nt, Artificial Sequence
  Description of Artificial Sequence: Synthetic oligonucleotide
  Antisense strand to SEQ ID NO: 1959416
aagaaagacaauauagucc

SEQ ID NO: 1959418 - RNA, 19 nt, Artificial Sequence
  Description of Artificial Sequence: Synthetic oligonucleotide
  Sense strand starting at position 2306 of SEQ ID NO: 1880332
augcuccucuuauugaaga

SEQ ID NO: 1959419 - RNA, 19 nt, Artificial Sequence
  Description of Artificial Sequence: Synthetic oligonucleotide
  Antisense strand to SEQ ID NO: 1959418
ucuucaauaagaggagcau

SEQ ID NO: 1959420 - RNA, 19 nt, Artificial Sequence
  Description of Artificial Sequence: Synthetic oligonucleotide
  Sense strand starting at position 2452 of SEQ ID NO: 1880332
aauaauuggccaugaugga

SEQ ID NO: 1959421 - RNA, 19 nt, Artificial Sequence
  Description of Artificial Sequence: Synthetic oligonucleotide
  Antisense strand to SEQ ID NO: 1959420
uccaucauggccaauuauu

SEQ ID NO: 1959422 - RNA, 19 nt, Artificial Sequence
  Description of Artificial Sequence: Synthetic oligonucleotide
  Sense strand starting at position 2478 of SEQ ID NO: 1880332
auguaaauuagucagaggu

SEQ ID NO: 1959423 - RNA, 19 nt, Artificial Sequence
  Description of Artificial Sequence: Synthetic oligonucleotide
  Antisense strand to SEQ ID NO: 1959422
accucugacuaauuuacau

SEQ ID NO: 1959424 - RNA, 19 nt, Artificial Sequence
  Description of Artificial Sequence: Synthetic oligonucleotide
  Sense strand starting at position 2493 of SEQ ID NO: 1880332
aggugaagagucuguuaag

SEQ ID NO: 1959425 - RNA, 19 nt, Artificial Sequence
  Description of Artificial Sequence: Synthetic oligonucleotide
  Antisense strand to SEQ ID NO: 1959424
cuuaacagacucuucaccu

SEQ ID NO: 1959426 - RNA, 19 nt, Artificial Sequence
  Description of Artificial Sequence: Synthetic oligonucleotide
  Sense strand starting at position 2494 of SEQ ID NO: 1880332
ggugaagagucuguuaaga

SEQ ID NO: 1959427 - RNA, 19 nt, Artificial Sequence
  Description of Artificial Sequence: Synthetic oligonucleotide
  Antisense strand to SEQ ID NO: 1959426
ucuuaacagacucuucacc

SEQ ID NO: 1959428 - RNA, 19 nt, Artificial Sequence
  Description of Artificial Sequence: Synthetic oligonucleotide
  Sense strand starting at position 2516 of SEQ ID NO: 1880332
accugaauguggcuuaauu

SEQ ID NO: 1959429 - RNA, 19 nt, Artificial Sequence
  Description of Artificial Sequence: Synthetic oligonucleotide
  Antisense strand to SEQ ID NO: 1959428
aauuaagccacauucaggu

SEQ ID NO: 1959430 - RNA, 19 nt, Artificial Sequence
  Description of Artificial Sequence: Synthetic oligonucleotide
  Sense strand starting at position 2518 of SEQ ID NO: 1880332
cugaauguggcuuaauugu

SEQ ID NO: 1959431 - RNA, 19 nt, Artificial Sequence
  Description of Artificial Sequence: Synthetic oligonucleotide
  Antisense strand to SEQ ID NO: 1959430
acaauuaagccacauucag

SEQ ID NO: 1959432 - RNA, 19 nt, Artificial Sequence
  Description of Artificial Sequence: Synthetic oligonucleotide
  Sense strand starting at position 2541 of SEQ ID NO: 1880332
ugaacugaaugucccaauu

SEQ ID NO: 1959433 - RNA, 19 nt, Artificial Sequence
  Description of Artificial Sequence: Synthetic oligonucleotide
  Antisense strand to SEQ ID NO: 1959432
aauugggacauucaguuca

SEQ ID NO: 1959434 - RNA, 19 nt, Artificial Sequence
  Description of Artificial Sequence: Synthetic oligonucleotide
  Sense strand starting at position 2776 of SEQ ID NO: 1880332
accuuauuacuaugucuga

SEQ ID NO: 1959435 - RNA, 19 nt, Artificial Sequence
  Description of Artificial Sequence: Synthetic oligonucleotide
  Antisense strand to SEQ ID NO: 1959434
ucagacauaguaauaaggu

SEQ ID NO: 1959436 - RNA, 19 nt, Artificial Sequence
  Description of Artificial Sequence: Synthetic oligonucleotide
  Sense strand starting at position 2777 of SEQ ID NO: 1880332
ccuuauuacuaugucugau

SEQ ID NO: 1959437 - RNA, 19 nt, Artificial Sequence
  Description of Artificial Sequence: Synthetic oligonucleotide
  Antisense strand to SEQ ID NO: 1959436
aucagacauaguaauaagg

SEQ ID NO: 1959438 - RNA, 19 nt, Artificial Sequence
  Description of Artificial Sequence: Synthetic oligonucleotide
  Sense strand starting at position 2779 of SEQ ID NO: 1880332
uuauuacuaugucugauga

SEQ ID NO: 1959439 - RNA, 19 nt, Artificial Sequence
  Description of Artificial Sequence: Synthetic oligonucleotide
  Antisense strand to SEQ ID NO: 1959438
ucaucagacauaguaauaa

SEQ ID NO: 1959440 - RNA, 19 nt, Artificial Sequence
  Description of Artificial Sequence: Synthetic oligonucleotide
  Sense strand starting at position 2833 of SEQ ID NO: 1880332
uggauacauuucuaaaggu

SEQ ID NO: 1959441 - RNA, 19 nt, Artificial Sequence
  Description of Artificial Sequence: Synthetic oligonucleotide
  Antisense strand to SEQ ID NO: 1959440
accuuuagaaauguaucca

SEQ ID NO: 1959442 - RNA, 19 nt, Artificial Sequence
  Description of Artificial Sequence: Synthetic oligonucleotide
  Sense strand starting at position 2954 of SEQ ID NO: 1880332
ugcuuaagaguaggaagaa

SEQ ID NO: 1959443 - RNA, 19 nt, Artificial Sequence
  Description of Artificial Sequence: Synthetic oligonucleotide
  Antisense strand to SEQ ID NO: 1959442
uucuuccuacucuuaagca

SEQ ID NO: 1959444 - RNA, 19 nt, Artificial Sequence
  Description of Artificial Sequence: Synthetic oligonucleotide
  Sense strand starting at position 2995 of SEQ ID NO: 1880332
aggugucuggcaugaauga

SEQ ID NO: 1959445 - RNA, 19 nt, Artificial Sequence
  Description of Artificial Sequence: Synthetic oligonucleotide
  Antisense strand to SEQ ID NO: 1959444
ucauucaugccagacaccu

SEQ ID NO: 1959446 - RNA, 19 nt, Artificial Sequence
  Description of Artificial Sequence: Synthetic oligonucleotide
  Sense strand starting at position 3164 of SEQ ID NO: 1880332
agagauacuuucuuuggca

SEQ ID NO: 1959447 - RNA, 19 nt, Artificial Sequence
  Description of Artificial Sequence: Synthetic oligonucleotide
  Antisense strand to SEQ ID NO: 1959446
ugccaaagaaaguaucucu

SEQ ID NO: 1959448 - RNA, 19 nt, Artificial Sequence
  Description of Artificial Sequence: Synthetic oligonucleotide
  Sense strand starting at position 3166 of SEQ ID NO: 1880332
agauacuuucuuuggcaaa

SEQ ID NO: 1959449 - RNA, 19 nt, Artificial Sequence
  Description of Artificial Sequence: Synthetic oligonucleotide
  Antisense strand to SEQ ID NO: 1959448
uuugccaaagaaaguaucu

SEQ ID NO: 1959450 - RNA, 19 nt, Artificial Sequence
  Description of Artificial Sequence: Synthetic oligonucleotide
  Sense strand starting at position 3228 of SEQ ID NO: 1880332
augccucuguguguuauuu

SEQ ID NO: 1959451 - RNA, 19 nt, Artificial Sequence
  Description of Artificial Sequence: Synthetic oligonucleotide
  Antisense strand to SEQ ID NO: 1959450
aaauaacacacagaggcau

SEQ ID NO: 1959452 - RNA, 19 nt, Artificial Sequence
  Description of Artificial Sequence: Synthetic oligonucleotide
  Sense strand starting at position 3256 of SEQ ID NO: 1880332
gagacuguagacugaguua

SEQ ID NO: 1959453 - RNA, 19 nt, Artificial Sequence
  Description of Artificial Sequence: Synthetic oligonucleotide
  Antisense strand to SEQ ID NO: 1959452
uaacucagucuacagucuc

SEQ ID NO: 1959454 - RNA, 19 nt, Artificial Sequence
  Description of Artificial Sequence: Synthetic oligonucleotide
  Sense strand starting at position 3259 of SEQ ID NO: 1880332
acuguagacugaguuacaa

SEQ ID NO: 1959455 - RNA, 19 nt, Artificial Sequence
  Description of Artificial Sequence: Synthetic oligonucleotide
  Antisense strand to SEQ ID NO: 1959454
uuguaacucagucuacagu

SEQ ID NO: 1959456 - RNA, 19 nt, Artificial Sequence
  Description of Artificial Sequence: Synthetic oligonucleotide
  Sense strand starting at position 3419 of SEQ ID NO: 1880332
cucuuuauuugauuguguu

SEQ ID NO: 1959457 - RNA, 19 nt, Artificial Sequence
  Description of Artificial Sequence: Synthetic oligonucleotide
  Antisense strand to SEQ ID NO: 1959456
aacacaaucaaauaaagag

SEQ ID NO: 1959458 - RNA, 19 nt, Artificial Sequence
  Description of Artificial Sequence: Synthetic oligonucleotide
  Sense strand starting at position 3457 of SEQ ID NO: 1880332
ugguacaucucuuuggaau

SEQ ID NO: 1959459 - RNA, 19 nt, Artificial Sequence
  Description of Artificial Sequence: Synthetic oligonucleotide
  Antisense strand to SEQ ID NO: 1959458
auuccaaagagauguacca

SEQ ID NO: 1959460 - RNA, 19 nt, Artificial Sequence
  Description of Artificial Sequence: Synthetic oligonucleotide
  Sense strand starting at position 3458 of SEQ ID NO: 1880332
gguacaucucuuuggaauu

SEQ ID NO: 1959461 - RNA, 19 nt, Artificial Sequence
  Description of Artificial Sequence: Synthetic oligonucleotide
  Antisense strand to SEQ ID NO: 1959460
aauuccaaagagauguacc

SEQ ID NO: 1959462 - RNA, 19 nt, Artificial Sequence
  Description of Artificial Sequence: Synthetic oligonucleotide
  Sense strand starting at position 3569 of SEQ ID NO: 1880332
ucuuguaggagauagcaua

SEQ ID NO: 1959463 - RNA, 19 nt, Artificial Sequence
  Description of Artificial Sequence: Synthetic oligonucleotide
  Antisense strand to SEQ ID NO: 1959462
uaugcuaucuccuacaaga

SEQ ID NO: 1959464 - RNA, 19 nt, Artificial Sequence
  Description of Artificial Sequence: Synthetic oligonucleotide
  Sense strand starting at position 3621 of SEQ ID NO: 1880332
uacaauagucagugagaau

SEQ ID NO: 1959465 - RNA, 19 nt, Artificial Sequence
  Description of Artificial Sequence: Synthetic oligonucleotide
  Antisense strand to SEQ ID NO: 1959464
auucucacugacuauugua

SEQ ID NO: 1959466 - RNA, 19 nt, Artificial Sequence
  Description of Artificial Sequence: Synthetic oligonucleotide
  Sense strand starting at position 3624 of SEQ ID NO: 1880332
aauagucagugagaauuua

SEQ ID NO: 1959467 - RNA, 19 nt, Artificial Sequence
  Description of Artificial Sequence: Synthetic oligonucleotide
  Antisense strand to SEQ ID NO: 1959466
uaaauucucacugacuauu

SEQ ID NO: 1959468 - RNA, 19 nt, Artificial Sequence
  Description of Artificial Sequence: Synthetic oligonucleotide
  Sense strand starting at position 3658 of SEQ ID NO: 1880332
uuggcuuuauuccuccaga

SEQ ID NO: 1959469 - RNA, 19 nt, Artificial Sequence
  Description of Artificial Sequence: Synthetic oligonucleotide
  Antisense strand to SEQ ID NO: 1959468
ucuggaggaauaaagccaa

SEQ ID NO: 1959470 - RNA, 19 nt, Artificial Sequence
  Description of Artificial Sequence: Synthetic oligonucleotide
  Sense strand starting at position 3659 of SEQ ID NO: 1880332
uggcuuuauuccuccagaa

SEQ ID NO: 1959471 - RNA, 19 nt, Artificial Sequence
  Description of Artificial Sequence: Synthetic oligonucleotide
  Antisense strand to SEQ ID NO: 1959470
uucuggaggaauaaagcca

SEQ ID NO: 1959472 - RNA, 19 nt, Artificial Sequence
  Description of Artificial Sequence: Synthetic oligonucleotide
  Sense strand starting at position 3714 of SEQ ID NO: 1880332
uugaaucagucacuaugau

SEQ ID NO: 1959473 - RNA, 19 nt, Artificial Sequence
  Description of Artificial Sequence: Synthetic oligonucleotide
  Antisense strand to SEQ ID NO: 1959472
aucauagugacugauucaa

SEQ ID NO: 1959474 - RNA, 19 nt, Artificial Sequence
  Description of Artificial Sequence: Synthetic oligonucleotide
  Sense strand starting at position 3787 of SEQ ID NO: 1880332
guaauaacuucuguucuga

SEQ ID NO: 1959475 - RNA, 19 nt, Artificial Sequence
  Description of Artificial Sequence: Synthetic oligonucleotide
  Antisense strand to SEQ ID NO: 1959474
ucagaacagaaguuauuac

SEQ ID NO: 1959476 - RNA, 19 nt, Artificial Sequence
  Description of Artificial Sequence: Synthetic oligonucleotide
  Sense strand starting at position 3860 of SEQ ID NO: 1880332
cuacaacuaugggucauua

SEQ ID NO: 1959477 - RNA, 19 nt, Artificial Sequence
  Description of Artificial Sequence: Synthetic oligonucleotide
  Antisense strand to SEQ ID NO: 1959476
uaaugacccauaguuguag

SEQ ID NO: 1959478 - RNA, 19 nt, Artificial Sequence
  Description of Artificial Sequence: Synthetic oligonucleotide
  Sense strand starting at position 3864 of SEQ ID NO: 1880332
aacuaugggucauuaagcu

SEQ ID NO: 1959479 - RNA, 19 nt, Artificial Sequence
  Description of Artificial Sequence: Synthetic oligonucleotide
  Antisense strand to SEQ ID NO: 1959478
agcuuaaugacccauaguu

SEQ ID NO: 1959480 - RNA, 19 nt, Artificial Sequence
  Description of Artificial Sequence: Synthetic oligonucleotide
  Sense strand starting at position 3870 of SEQ ID NO: 1880332
gggucauuaagcugaguag

SEQ ID NO: 1959481 - RNA, 19 nt, Artificial Sequence
  Description of Artificial Sequence: Synthetic oligonucleotide
  Antisense strand to SEQ ID NO: 1959480
cuacucagcuuaaugaccc

SEQ ID NO: 1959482 - RNA, 19 nt, Artificial Sequence
  Description of Artificial Sequence: Synthetic oligonucleotide
  Sense strand starting at position 3871 of SEQ ID NO: 1880332
ggucauuaagcugaguaga

SEQ ID NO: 1959483 - RNA, 19 nt, Artificial Sequence
  Description of Artificial Sequence: Synthetic oligonucleotide
  Antisense strand to SEQ ID NO: 1959482
ucuacucagcuuaaugacc

SEQ ID NO: 1959484 - RNA, 19 nt, Artificial Sequence
  Description of Artificial Sequence: Synthetic oligonucleotide
  Sense strand starting at position 3873 of SEQ ID NO: 1880332
ucauuaagcugaguagaaa

SEQ ID NO: 1959485 - RNA, 19 nt, Artificial Sequence
  Description of Artificial Sequence: Synthetic oligonucleotide
  Antisense strand to SEQ ID NO: 1959484
uuucuacucagcuuaauga

SEQ ID NO: 1959486 - RNA, 19 nt, Artificial Sequence
  Description of Artificial Sequence: Synthetic oligonucleotide
  Sense strand starting at position 3981 of SEQ ID NO: 1880332
guguauauacccugugaaa

SEQ ID NO: 1959487 - RNA, 19 nt, Artificial Sequence
  Description of Artificial Sequence: Synthetic oligonucleotide
  Antisense strand to SEQ ID NO: 1959486
uuucacaggguauauacac

SEQ ID NO: 1959488 - RNA, 19 nt, Artificial Sequence
  Description of Artificial Sequence: Synthetic oligonucleotide
  Sense strand starting at position 35 of SEQ ID NO: 1880333
guacucagacauuauugua

SEQ ID NO: 1959489 - RNA, 19 nt, Artificial Sequence
  Description of Artificial Sequence: Synthetic oligonucleotide
  Antisense strand to SEQ ID NO: 1959488
uacaauaaugucugaguac

SEQ ID NO: 1959490 - RNA, 19 nt, Artificial Sequence
  Description of Artificial Sequence: Synthetic oligonucleotide
  Sense strand starting at position 230 of SEQ ID NO: 1880333
cuauuuaucuguuuauguc

SEQ ID NO: 1959491 - RNA, 19 nt, Artificial Sequence
  Description of Artificial Sequence: Synthetic oligonucleotide
  Antisense strand to SEQ ID NO: 1959490
gacauaaacagauaaauag

SEQ ID NO: 1959492 - RNA, 19 nt, Artificial Sequence
  Description of Artificial Sequence: Synthetic oligonucleotide
  Sense strand starting at position 240 of SEQ ID NO: 1880333
guuuaugucuggcuuauuu

SEQ ID NO: 1959493 - RNA, 19 nt, Artificial Sequence
  Description of Artificial Sequence: Synthetic oligonucleotide
  Antisense strand to SEQ ID NO: 1959492
aaauaagccagacauaaac

SEQ ID NO: 1959494 - RNA, 19 nt, Artificial Sequence
  Description of Artificial Sequence: Synthetic oligonucleotide
  Sense strand starting at position 279 of SEQ ID NO: 1880333
agguucguccguguuguaa

SEQ ID NO: 1959495 - RNA, 19 nt, Artificial Sequence
  Description of Artificial Sequence: Synthetic oligonucleotide
  Antisense strand to SEQ ID NO: 1959494
uuacaacacggacgaaccu

SEQ ID NO: 1959496 - RNA, 19 nt, Artificial Sequence
  Description of Artificial Sequence: Synthetic oligonucleotide
  Sense strand starting at position 280 of SEQ ID NO: 1880333
gguucguccguguuguaac

SEQ ID NO: 1959497 - RNA, 19 nt, Artificial Sequence
  Description of Artificial Sequence: Synthetic oligonucleotide
  Antisense strand to SEQ ID NO: 1959496
guuacaacacggacgaacc

SEQ ID NO: 1959498 - RNA, 19 nt, Artificial Sequence
  Description of Artificial Sequence: Synthetic oligonucleotide
  Sense strand starting at position 290 of SEQ ID NO: 1880333
uguuguaacaaguaugagu

SEQ ID NO: 1959499 - RNA, 19 nt, Artificial Sequence
  Description of Artificial Sequence: Synthetic oligonucleotide
  Antisense strand to SEQ ID NO: 1959498
acucauacuuguuacaaca

SEQ ID NO: 1959500 - RNA, 19 nt, Artificial Sequence
  Description of Artificial Sequence: Synthetic oligonucleotide
  Sense strand starting at position 332 of SEQ ID NO: 1880333
aggauacuucguuauguac

SEQ ID NO: 1959501 - RNA, 19 nt, Artificial Sequence
  Description of Artificial Sequence: Synthetic oligonucleotide
  Antisense strand to SEQ ID NO: 1959500
guacauaacgaaguauccu

SEQ ID NO: 1959502 - RNA, 19 nt, Artificial Sequence
  Description of Artificial Sequence: Synthetic oligonucleotide
  Sense strand starting at position 835 of SEQ ID NO: 1880333
ugauguaguaauuauggca

SEQ ID NO: 1959503 - RNA, 19 nt, Artificial Sequence
  Description of Artificial Sequence: Synthetic oligonucleotide
  Antisense strand to SEQ ID NO: 1959502
ugccauaauuacuacauca

SEQ ID NO: 1959504 - RNA, 19 nt, Artificial Sequence
  Description of Artificial Sequence: Synthetic oligonucleotide
  Sense strand starting at position 988 of SEQ ID NO: 1880333
uuggaaugugacugugaag

SEQ ID NO: 1959505 - RNA, 19 nt, Artificial Sequence
  Description of Artificial Sequence: Synthetic oligonucleotide
  Antisense strand to SEQ ID NO: 1959504
cuucacagucacauuccaa

SEQ ID NO: 1959506 - RNA, 19 nt, Artificial Sequence
  Description of Artificial Sequence: Synthetic oligonucleotide
  Sense strand starting at position 1042 of SEQ ID NO: 1880333
agaggucuuagagaguagu

SEQ ID NO: 1959507 - RNA, 19 nt, Artificial Sequence
  Description of Artificial Sequence: Synthetic oligonucleotide
  Antisense strand to SEQ ID NO: 1959506
acuacucucuaagaccucu

SEQ ID NO: 1959508 - RNA, 19 nt, Artificial Sequence
  Description of Artificial Sequence: Synthetic oligonucleotide
  Sense strand starting at position 1045 of SEQ ID NO: 1880333
ggucuuagagaguagugga

SEQ ID NO: 1959509 - RNA, 19 nt, Artificial Sequence
  Description of Artificial Sequence: Synthetic oligonucleotide
  Antisense strand to SEQ ID NO: 1959508
uccacuacucucuaagacc

SEQ ID NO: 1959510 - RNA, 19 nt, Artificial Sequence
  Description of Artificial Sequence: Synthetic oligonucleotide
  Sense strand starting at position 1061 of SEQ ID NO: 1880333
ggaagugugcccugaagaa

SEQ ID NO: 1959511 - RNA, 19 nt, Artificial Sequence
  Description of Artificial Sequence: Synthetic oligonucleotide
  Antisense strand to SEQ ID NO: 1959510
uucuucagggcacacuucc

SEQ ID NO: 1959512 - RNA, 19 nt, Artificial Sequence
  Description of Artificial Sequence: Synthetic oligonucleotide
  Sense strand starting at position 1115 of SEQ ID NO: 1880333
ggaguccuugcugaucaag

SEQ ID NO: 1959513 - RNA, 19 nt, Artificial Sequence
  Description of Artificial Sequence: Synthetic oligonucleotide
  Antisense strand to SEQ ID NO: 1959512
cuugaucagcaaggacucc

SEQ ID NO: 1959514 - RNA, 19 nt, Artificial Sequence
  Description of Artificial Sequence: Synthetic oligonucleotide
  Sense strand starting at position 1142 of SEQ ID NO: 1880333
ggcuauaaucuugagaagu

SEQ ID NO: 1959515 - RNA, 19 nt, Artificial Sequence
  Description of Artificial Sequence: Synthetic oligonucleotide
  Antisense strand to SEQ ID NO: 1959514
acuucucaagauuauagcc

SEQ ID NO: 1959516 - RNA, 19 nt, Artificial Sequence
  Description of Artificial Sequence: Synthetic oligonucleotide
  Sense strand starting at position 1152 of SEQ ID NO: 1880333
uugagaaguccauggcaaa

SEQ ID NO: 1959517 - RNA, 19 nt, Artificial Sequence
  Description of Artificial Sequence: Synthetic oligonucleotide
  Antisense strand to SEQ ID NO: 1959516
uuugccauggacuucucaa

SEQ ID NO: 1959518 - RNA, 19 nt, Artificial Sequence
  Description of Artificial Sequence: Synthetic oligonucleotide
  Sense strand starting at position 1213 of SEQ ID NO: 1880333
ugugaaggaugcccagaau

SEQ ID NO: 1959519 - RNA, 19 nt, Artificial Sequence
  Description of Artificial Sequence: Synthetic oligonucleotide
  Antisense strand to SEQ ID NO: 1959518
auucugggcauccuucaca

SEQ ID NO: 1959520 - RNA, 19 nt, Artificial Sequence
  Description of Artificial Sequence: Synthetic oligonucleotide
  Sense strand starting at position 1542 of SEQ ID NO: 1880333
agcagacugggcuaacauu

SEQ ID NO: 1959521 - RNA, 19 nt, Artificial Sequence
  Description of Artificial Sequence: Synthetic oligonucleotide
  Antisense strand to SEQ ID NO: 1959520
aauguuagcccagucugcu

SEQ ID NO: 1959522 - RNA, 19 nt, Artificial Sequence
  Description of Artificial Sequence: Synthetic oligonucleotide
  Sense strand starting at position 1566 of SEQ ID NO: 1880333
gguagaagguccuucggaa

SEQ ID NO: 1959523 - RNA, 19 nt, Artificial Sequence
  Description of Artificial Sequence: Synthetic oligonucleotide
  Antisense strand to SEQ ID NO: 1959522
uuccgaaggaccuucuacc

SEQ ID NO: 1959524 - RNA, 19 nt, Artificial Sequence
  Description of Artificial Sequence: Synthetic oligonucleotide
  Sense strand starting at position 1683 of SEQ ID NO: 1880333
ggacaauggccagguaaca

SEQ ID NO: 1959525 - RNA, 19 nt, Artificial Sequence
  Description of Artificial Sequence: Synthetic oligonucleotide
  Antisense strand to SEQ ID NO: 1959524
uguuaccuggccauugucc

SEQ ID NO: 1959526 - RNA, 19 nt, Artificial Sequence
  Description of Artificial Sequence: Synthetic oligonucleotide
  Sense strand starting at position 1725 of SEQ ID NO: 1880333
guagaauaccaccguagaa

SEQ ID NO: 1959527 - RNA, 19 nt, Artificial Sequence
  Description of Artificial Sequence: Synthetic oligonucleotide
  Antisense strand to SEQ ID NO: 1959526
uucuacggugguauucuac

SEQ ID NO: 1959528 - RNA, 19 nt, Artificial Sequence
  Description of Artificial Sequence: Synthetic oligonucleotide
  Sense strand starting at position 1727 of SEQ ID NO: 1880333
agaauaccaccguagaagu

SEQ ID NO: 1959529 - RNA, 19 nt, Artificial Sequence
  Description of Artificial Sequence: Synthetic oligonucleotide
  Antisense strand to SEQ ID NO: 1959528
acuucuacggugguauucu

SEQ ID NO: 1959530 - RNA, 19 nt, Artificial Sequence
  Description of Artificial Sequence: Synthetic oligonucleotide
  Sense strand starting at position 1869 of SEQ ID NO: 1880333
cagguagacaucggugaca

SEQ ID NO: 1959531 - RNA, 19 nt, Artificial Sequence
  Description of Artificial Sequence: Synthetic oligonucleotide
  Antisense strand to SEQ ID NO: 1959530
ugucaccgaugucuaccug

SEQ ID NO: 1959532 - RNA, 19 nt, Artificial Sequence
  Description of Artificial Sequence: Synthetic oligonucleotide
  Sense strand starting at position 1981 of SEQ ID NO: 1880333
auaauugauuucuagggau

SEQ ID NO: 1959533 - RNA, 19 nt, Artificial Sequence
  Description of Artificial Sequence: Synthetic oligonucleotide
  Antisense strand to SEQ ID NO: 1959532
aucccuagaaaucaauuau

SEQ ID NO: 1959534 - RNA, 19 nt, Artificial Sequence
  Description of Artificial Sequence: Synthetic oligonucleotide
  Sense strand starting at position 1993 of SEQ ID NO: 1880333
uagggauucuggccaacau

SEQ ID NO: 1959535 - RNA, 19 nt, Artificial Sequence
  Description of Artificial Sequence: Synthetic oligonucleotide
  Antisense strand to SEQ ID NO: 1959534
auguuggccagaaucccua

SEQ ID NO: 1959536 - RNA, 19 nt, Artificial Sequence
  Description of Artificial Sequence: Synthetic oligonucleotide
  Sense strand starting at position 2077 of SEQ ID NO: 1880333
gaagaugucuucccacaug

SEQ ID NO: 1959537 - RNA, 19 nt, Artificial Sequence
  Description of Artificial Sequence: Synthetic oligonucleotide
  Antisense strand to SEQ ID NO: 1959536
caugugggaagacaucuuc

SEQ ID NO: 1959538 - RNA, 19 nt, Artificial Sequence
  Description of Artificial Sequence: Synthetic oligonucleotide
  Sense strand starting at position 2218 of SEQ ID NO: 1880333
gggauaggauucuuugugu

SEQ ID NO: 1959539 - RNA, 19 nt, Artificial Sequence
  Description of Artificial Sequence: Synthetic oligonucleotide
  Antisense strand to SEQ ID NO: 1959538
acacaaagaauccuauccc

SEQ ID NO: 1959540 - RNA, 19 nt, Artificial Sequence
  Description of Artificial Sequence: Synthetic oligonucleotide
  Sense strand starting at position 2242 of SEQ ID NO: 1880333
uguauauuacauggaagua

SEQ ID NO: 1959541 - RNA, 19 nt, Artificial Sequence
  Description of Artificial Sequence: Synthetic oligonucleotide
  Antisense strand to SEQ ID NO: 1959540
uacuuccauguaauauaca

SEQ ID NO: 1959542 - RNA, 19 nt, Artificial Sequence
  Description of Artificial Sequence: Synthetic oligonucleotide
  Sense strand starting at position 2304 of SEQ ID NO: 1880333
gaggcaauguuagugauaa

SEQ ID NO: 1959543 - RNA, 19 nt, Artificial Sequence
  Description of Artificial Sequence: Synthetic oligonucleotide
  Antisense strand to SEQ ID NO: 1959542
uuaucacuaacauugccuc

SEQ ID NO: 1959544 - RNA, 19 nt, Artificial Sequence
  Description of Artificial Sequence: Synthetic oligonucleotide
  Sense strand starting at position 2306 of SEQ ID NO: 1880333
ggcaauguuagugauaaau

SEQ ID NO: 1959545 - RNA, 19 nt, Artificial Sequence
  Description of Artificial Sequence: Synthetic oligonucleotide
  Antisense strand to SEQ ID NO: 1959544
auuuaucacuaacauugcc

SEQ ID NO: 1959546 - RNA, 19 nt, Artificial Sequence
  Description of Artificial Sequence: Synthetic oligonucleotide
  Sense strand starting at position 2370 of SEQ ID NO: 1880333
ggacacauauucuugcauu

SEQ ID NO: 1959547 - RNA, 19 nt, Artificial Sequence
  Description of Artificial Sequence: Synthetic oligonucleotide
  Antisense strand to SEQ ID NO: 1959546
aaugcaagaauaugugucc

SEQ ID NO: 1959548 - RNA, 19 nt, Artificial Sequence
  Description of Artificial Sequence: Synthetic oligonucleotide
  Sense strand starting at position 2420 of SEQ ID NO: 1880333
uagaauguucccuguggau

SEQ ID NO: 1959549 - RNA, 19 nt, Artificial Sequence
  Description of Artificial Sequence: Synthetic oligonucleotide
  Antisense strand to SEQ ID NO: 1959548
auccacagggaacauucua

SEQ ID NO: 1959550 - RNA, 19 nt, Artificial Sequence
  Description of Artificial Sequence: Synthetic oligonucleotide
  Sense strand starting at position 2422 of SEQ ID NO: 1880333
gaauguucccuguggauaa

SEQ ID NO: 1959551 - RNA, 19 nt, Artificial Sequence
  Description of Artificial Sequence: Synthetic oligonucleotide
  Antisense strand to SEQ ID NO: 1959550
uuauccacagggaacauuc

SEQ ID NO: 1959552 - RNA, 19 nt, Artificial Sequence
  Description of Artificial Sequence: Synthetic oligonucleotide
  Sense strand starting at position 2424 of SEQ ID NO: 1880333
auguucccuguggauaaua

SEQ ID NO: 1959553 - RNA, 19 nt, Artificial Sequence
  Description of Artificial Sequence: Synthetic oligonucleotide
  Antisense strand to SEQ ID NO: 1959552
uauuauccacagggaacau

SEQ ID NO: 1959554 - RNA, 19 nt, Artificial Sequence
  Description of Artificial Sequence: Synthetic oligonucleotide
  Sense strand starting at position 2591 of SEQ ID NO: 1880333
cagaucaagguuugacuau

SEQ ID NO: 1959555 - RNA, 19 nt, Artificial Sequence
  Description of Artificial Sequence: Synthetic oligonucleotide
  Antisense strand to SEQ ID NO: 1959554
auagucaaaccuugaucug

SEQ ID NO: 1959556 - RNA, 19 nt, Artificial Sequence
  Description of Artificial Sequence: Synthetic oligonucleotide
  Sense strand starting at position 2682 of SEQ ID NO: 1880333
ugaacaguagcauggaguu

SEQ ID NO: 1959557 - RNA, 19 nt, Artificial Sequence
  Description of Artificial Sequence: Synthetic oligonucleotide
  Antisense strand to SEQ ID NO: 1959556
aacuccaugcuacuguuca

SEQ ID NO: 1959558 - RNA, 19 nt, Artificial Sequence
  Description of Artificial Sequence: Synthetic oligonucleotide
  Sense strand starting at position 2734 of SEQ ID NO: 1880333
auuaguaaggcccagcauu

SEQ ID NO: 1959559 - RNA, 19 nt, Artificial Sequence
  Description of Artificial Sequence: Synthetic oligonucleotide
  Antisense strand to SEQ ID NO: 1959558
aaugcugggccuuacuaau

SEQ ID NO: 1959560 - RNA, 19 nt, Artificial Sequence
  Description of Artificial Sequence: Synthetic oligonucleotide
  Sense strand starting at position 3196 of SEQ ID NO: 1880333
gcggauugccugagcagga

SEQ ID NO: 1959561 - RNA, 19 nt, Artificial Sequence
  Description of Artificial Sequence: Synthetic oligonucleotide
  Antisense strand to SEQ ID NO: 1959560
uccugcucaggcaauccgc

SEQ ID NO: 1959562 - RNA, 19 nt, Artificial Sequence
  Description of Artificial Sequence: Synthetic oligonucleotide
  Sense strand starting at position 3502 of SEQ ID NO: 1880333
agaaacguaacagguuauu

SEQ ID NO: 1959563 - RNA, 19 nt, Artificial Sequence
  Description of Artificial Sequence: Synthetic oligonucleotide
  Antisense strand to SEQ ID NO: 1959562
aauaaccuguuacguuucu

SEQ ID NO: 1959564 - RNA, 19 nt, Artificial Sequence
  Description of Artificial Sequence: Synthetic oligonucleotide
  Sense strand starting at position 3921 of SEQ ID NO: 1880333
ugccuuagagucuaaggga

SEQ ID NO: 1959565 - RNA, 19 nt, Artificial Sequence
  Description of Artificial Sequence: Synthetic oligonucleotide
  Antisense strand to SEQ ID NO: 1959564
ucccuuagacucuaaggca

SEQ ID NO: 1959566 - RNA, 19 nt, Artificial Sequence
  Description of Artificial Sequence: Synthetic oligonucleotide
  Sense strand starting at position 3961 of SEQ ID NO: 1880333
gguccaaguccauaaccua

SEQ ID NO: 1959567 - RNA, 19 nt, Artificial Sequence
  Description of Artificial Sequence: Synthetic oligonucleotide
  Antisense strand to SEQ ID NO: 1959566
uagguuauggacuuggacc

SEQ ID NO: 1959568 - RNA, 19 nt, Artificial Sequence
  Description of Artificial Sequence: Synthetic oligonucleotide
  Sense strand starting at position 715 of SEQ ID NO: 1880334
auacacauuuggugauaca

SEQ ID NO: 1959569 - RNA, 19 nt, Artificial Sequence
  Description of Artificial Sequence: Synthetic oligonucleotide
  Antisense strand to SEQ ID NO: 1959568
uguaucaccaaauguguau

SEQ ID NO: 1959570 - RNA, 19 nt, Artificial Sequence
  Description of Artificial Sequence: Synthetic oligonucleotide
  Sense strand starting at position 824 of SEQ ID NO: 1880334
cugcuagccucaucuaaga

SEQ ID NO: 1959571 - RNA, 19 nt, Artificial Sequence
  Description of Artificial Sequence: Synthetic oligonucleotide
  Antisense strand to SEQ ID NO: 1959570
ucuuagaugaggcuagcag

SEQ ID NO: 1959572 - RNA, 19 nt, Artificial Sequence
  Description of Artificial Sequence: Synthetic oligonucleotide
  Sense strand starting at position 863 of SEQ ID NO: 1880334
ggauaaguguggcuccaug

SEQ ID NO: 1959573 - RNA, 19 nt, Artificial Sequence
  Description of Artificial Sequence: Synthetic oligonucleotide
  Antisense strand to SEQ ID NO: 1959572
cauggagccacacuuaucc

SEQ ID NO: 1959574 - RNA, 19 nt, Artificial Sequence
  Description of Artificial Sequence: Synthetic oligonucleotide
  Sense strand starting at position 880 of SEQ ID NO: 1880334
ugcuuuaagccagagaauu

SEQ ID NO: 1959575 - RNA, 19 nt, Artificial Sequence
  Description of Artificial Sequence: Synthetic oligonucleotide
  Antisense strand to SEQ ID NO: 1959574
aauucucuggcuuaaagca

SEQ ID NO: 1959576 - RNA, 19 nt, Artificial Sequence
  Description of Artificial Sequence: Synthetic oligonucleotide
  Sense strand starting at position 1084 of SEQ ID NO: 1880334
accacaaaugugugagguu

SEQ ID NO: 1959577 - RNA, 19 nt, Artificial Sequence
  Description of Artificial Sequence: Synthetic oligonucleotide
  Antisense strand to SEQ ID NO: 1959576
aaccucacacauuuguggu

SEQ ID NO: 1959578 - RNA, 19 nt, Artificial Sequence
  Description of Artificial Sequence: Synthetic oligonucleotide
  Sense strand starting at position 1163 of SEQ ID NO: 1880334
uuuacucuugcaggaguca

SEQ ID NO: 1959579 - RNA, 19 nt, Artificial Sequence
  Description of Artificial Sequence: Synthetic oligonucleotide
  Antisense strand to SEQ ID NO: 1959578
ugacuccugcaagaguaaa

SEQ ID NO: 1959580 - RNA, 19 nt, Artificial Sequence
  Description of Artificial Sequence: Synthetic oligonucleotide
  Sense strand starting at position 1232 of SEQ ID NO: 1880334
uuacauacugucuaauggu

SEQ ID NO: 1959581 - RNA, 19 nt, Artificial Sequence
  Description of Artificial Sequence: Synthetic oligonucleotide
  Antisense strand to SEQ ID NO: 1959580
accauuagacaguauguaa

SEQ ID NO: 1959582 - RNA, 19 nt, Artificial Sequence
  Description of Artificial Sequence: Synthetic oligonucleotide
  Sense strand starting at position 1340 of SEQ ID NO: 1880334
uuugcaggccacugauuua

SEQ ID NO: 1959583 - RNA, 19 nt, Artificial Sequence
  Description of Artificial Sequence: Synthetic oligonucleotide
  Antisense strand to SEQ ID NO: 1959582
uaaaucaguggccugcaaa

SEQ ID NO: 1959584 - RNA, 19 nt, Artificial Sequence
  Description of Artificial Sequence: Synthetic oligonucleotide
  Sense strand starting at position 1347 of SEQ ID NO: 1880334
gccacugauuuagaguaag

SEQ ID NO: 1959585 - RNA, 19 nt, Artificial Sequence
  Description of Artificial Sequence: Synthetic oligonucleotide
  Antisense strand to SEQ ID NO: 1959584
cuuacucuaaaucaguggc

SEQ ID NO: 1959586 - RNA, 19 nt, Artificial Sequence
  Description of Artificial Sequence: Synthetic oligonucleotide
  Sense strand starting at position 1444 of SEQ ID NO: 1880334
agcccaucucucuaguuga

SEQ ID NO: 1959587 - RNA, 19 nt, Artificial Sequence
  Description of Artificial Sequence: Synthetic oligonucleotide
  Antisense strand to SEQ ID NO: 1959586
ucaacuagagagaugggcu

SEQ ID NO: 1959588 - RNA, 19 nt, Artificial Sequence
  Description of Artificial Sequence: Synthetic oligonucleotide
  Sense strand starting at position 1625 of SEQ ID NO: 1880334
cacguuuguguuuccugua

SEQ ID NO: 1959589 - RNA, 19 nt, Artificial Sequence
  Description of Artificial Sequence: Synthetic oligonucleotide
  Antisense strand to SEQ ID NO: 1959588
uacaggaaacacaaacgug

SEQ ID NO: 1959590 - RNA, 19 nt, Artificial Sequence
  Description of Artificial Sequence: Synthetic oligonucleotide
  Sense strand starting at position 1672 of SEQ ID NO: 1880334
ccugguuaccacugacuuu

SEQ ID NO: 1959591 - RNA, 19 nt, Artificial Sequence
  Description of Artificial Sequence: Synthetic oligonucleotide
  Antisense strand to SEQ ID NO: 1959590
aaagucagugguaaccagg

SEQ ID NO: 1959592 - RNA, 19 nt, Artificial Sequence
  Description of Artificial Sequence: Synthetic oligonucleotide
  Sense strand starting at position 1791 of SEQ ID NO: 1880334
ugcaguggcccaggaauua

SEQ ID NO: 1959593 - RNA, 19 nt, Artificial Sequence
  Description of Artificial Sequence: Synthetic oligonucleotide
  Antisense strand to SEQ ID NO: 1959592
uaauuccugggccacugca

SEQ ID NO: 1959594 - RNA, 19 nt, Artificial Sequence
  Description of Artificial Sequence: Synthetic oligonucleotide
  Sense strand starting at position 1997 of SEQ ID NO: 1880334
aguugaagucaaugcuuag

SEQ ID NO: 1959595 - RNA, 19 nt, Artificial Sequence
  Description of Artificial Sequence: Synthetic oligonucleotide
  Antisense strand to SEQ ID NO: 1959594
cuaagcauugacuucaacu

SEQ ID NO: 1959596 - RNA, 19 nt, Artificial Sequence
  Description of Artificial Sequence: Synthetic oligonucleotide
  Sense strand starting at position 2000 of SEQ ID NO: 1880334
ugaagucaaugcuuagaac

SEQ ID NO: 1959597 - RNA, 19 nt, Artificial Sequence
  Description of Artificial Sequence: Synthetic oligonucleotide
  Antisense strand to SEQ ID NO: 1959596
guucuaagcauugacuuca

SEQ ID NO: 1959598 - RNA, 19 nt, Artificial Sequence
  Description of Artificial Sequence: Synthetic oligonucleotide
  Sense strand starting at position 2023 of SEQ ID NO: 1880334
gugggaagauguucucaaa

SEQ ID NO: 1959599 - RNA, 19 nt, Artificial Sequence
  Description of Artificial Sequence: Synthetic oligonucleotide
  Antisense strand to SEQ ID NO: 1959598
uuugagaacaucuucccac

SEQ ID NO: 1959600 - RNA, 19 nt, Artificial Sequence
  Description of Artificial Sequence: Synthetic oligonucleotide
  Sense strand starting at position 2155 of SEQ ID NO: 1880334
ggaauauucuggagggagg

SEQ ID NO: 1959601 - RNA, 19 nt, Artificial Sequence
  Description of Artificial Sequence: Synthetic oligonucleotide
  Antisense strand to SEQ ID NO: 1959600
ccucccuccagaauauucc

SEQ ID NO: 1959602 - RNA, 19 nt, Artificial Sequence
  Description of Artificial Sequence: Synthetic oligonucleotide
  Sense strand starting at position 2176 of SEQ ID NO: 1880334
guuggugaagacugguaaa

SEQ ID NO: 1959603 - RNA, 19 nt, Artificial Sequence
  Description of Artificial Sequence: Synthetic oligonucleotide
  Antisense strand to SEQ ID NO: 1959602
uuuaccagucuucaccaac

SEQ ID NO: 1959604 - RNA, 19 nt, Artificial Sequence
  Description of Artificial Sequence: Synthetic oligonucleotide
  Sense strand starting at position 2231 of SEQ ID NO: 1880334
uuaucuggucucuaacaug

SEQ ID NO: 1959605 - RNA, 19 nt, Artificial Sequence
  Description of Artificial Sequence: Synthetic oligonucleotide
  Antisense strand to SEQ ID NO: 1959604
cauguuagagaccagauaa

SEQ ID NO: 1959606 - RNA, 19 nt, Artificial Sequence
  Description of Artificial Sequence: Synthetic oligonucleotide
  Sense strand starting at position 2265 of SEQ ID NO: 1880334
gugguauauuaauuaaguc

SEQ ID NO: 1959607 - RNA, 19 nt, Artificial Sequence
  Description of Artificial Sequence: Synthetic oligonucleotide
  Antisense strand to SEQ ID NO: 1959606
gacuuaauuaauauaccac

SEQ ID NO: 1959608 - RNA, 19 nt, Artificial Sequence
  Description of Artificial Sequence: Synthetic oligonucleotide
  Sense strand starting at position 2397 of SEQ ID NO: 1880334
ugucacuuccuuuaacguu

SEQ ID NO: 1959609 - RNA, 19 nt, Artificial Sequence
  Description of Artificial Sequence: Synthetic oligonucleotide
  Antisense strand to SEQ ID NO: 1959608
aacguuaaaggaagugaca

SEQ ID NO: 1959610 - RNA, 19 nt, Artificial Sequence
  Description of Artificial Sequence: Synthetic oligonucleotide
  Sense strand starting at position 2484 of SEQ ID NO: 1880334
agaaacugucgaugacauu

SEQ ID NO: 1959611 - RNA, 19 nt, Artificial Sequence
  Description of Artificial Sequence: Synthetic oligonucleotide
  Antisense strand to SEQ ID NO: 1959610
aaugucaucgacaguuucu

SEQ ID NO: 1959612 - RNA, 19 nt, Artificial Sequence
  Description of Artificial Sequence: Synthetic oligonucleotide
  Sense strand starting at position 2490 of SEQ ID NO: 1880334
ugucgaugacauuaaguga

SEQ ID NO: 1959613 - RNA, 19 nt, Artificial Sequence
  Description of Artificial Sequence: Synthetic oligonucleotide
  Antisense strand to SEQ ID NO: 1959612
ucacuuaaugucaucgaca

SEQ ID NO: 1959614 - RNA, 19 nt, Artificial Sequence
  Description of Artificial Sequence: Synthetic oligonucleotide
  Sense strand starting at position 2493 of SEQ ID NO: 1880334
cgaugacauuaagugagaa

SEQ ID NO: 1959615 - RNA, 19 nt, Artificial Sequence
  Description of Artificial Sequence: Synthetic oligonucleotide
  Antisense strand to SEQ ID NO: 1959614
uucucacuuaaugucaucg

SEQ ID NO: 1959616 - RNA, 19 nt, Artificial Sequence
  Description of Artificial Sequence: Synthetic oligonucleotide
  Sense strand starting at position 2573 of SEQ ID NO: 1880334
gguagacaguucucucuuu

SEQ ID NO: 1959617 - RNA, 19 nt, Artificial Sequence
  Description of Artificial Sequence: Synthetic oligonucleotide
  Antisense strand to SEQ ID NO: 1959616
aaagagagaacugucuacc

SEQ ID NO: 1959618 - RNA, 19 nt, Artificial Sequence
  Description of Artificial Sequence: Synthetic oligonucleotide
  Sense strand starting at position 2918 of SEQ ID NO: 1880334
gauggugaguggccacaua

SEQ ID NO: 1959619 - RNA, 19 nt, Artificial Sequence
  Description of Artificial Sequence: Synthetic oligonucleotide
  Antisense strand to SEQ ID NO: 1959618
uauguggccacucaccauc

SEQ ID NO: 1959620 - RNA, 19 nt, Artificial Sequence
  Description of Artificial Sequence: Synthetic oligonucleotide
  Sense strand starting at position 2979 of SEQ ID NO: 1880334
uggaaugacucauccuucu

SEQ ID NO: 1959621 - RNA, 19 nt, Artificial Sequence
  Description of Artificial Sequence: Synthetic oligonucleotide
  Antisense strand to SEQ ID NO: 1959620
agaaggaugagucauucca

SEQ ID NO: 1959622 - RNA, 19 nt, Artificial Sequence
  Description of Artificial Sequence: Synthetic oligonucleotide
  Sense strand starting at position 3188 of SEQ ID NO: 1880334
ucacaauauggguguggga

SEQ ID NO: 1959623 - RNA, 19 nt, Artificial Sequence
  Description of Artificial Sequence: Synthetic oligonucleotide
  Antisense strand to SEQ ID NO: 1959622
ucccacacccauauuguga

SEQ ID NO: 1959624 - RNA, 19 nt, Artificial Sequence
  Description of Artificial Sequence: Synthetic oligonucleotide
  Sense strand starting at position 3444 of SEQ ID NO: 1880334
caagauucugugggcucaa

SEQ ID NO: 1959625 - RNA, 19 nt, Artificial Sequence
  Description of Artificial Sequence: Synthetic oligonucleotide
  Antisense strand to SEQ ID NO: 1959624
uugagcccacagaaucuug

SEQ ID NO: 1959626 - RNA, 19 nt, Artificial Sequence
  Description of Artificial Sequence: Synthetic oligonucleotide
  Sense strand starting at position 3455 of SEQ ID NO: 1880334
gggcucaaggacugaguua

SEQ ID NO: 1959627 - RNA, 19 nt, Artificial Sequence
  Description of Artificial Sequence: Synthetic oligonucleotide
  Antisense strand to SEQ ID NO: 1959626
uaacucaguccuugagccc

SEQ ID NO: 1959628 - RNA, 19 nt, Artificial Sequence
  Description of Artificial Sequence: Synthetic oligonucleotide
  Sense strand starting at position 3493 of SEQ ID NO: 1880334
gugguaacagaguaugcuu

SEQ ID NO: 1959629 - RNA, 19 nt, Artificial Sequence
  Description of Artificial Sequence: Synthetic oligonucleotide
  Antisense strand to SEQ ID NO: 1959628
aagcauacucuguuaccac

SEQ ID NO: 1959630 - RNA, 19 nt, Artificial Sequence
  Description of Artificial Sequence: Synthetic oligonucleotide
  Sense strand starting at position 3498 of SEQ ID NO: 1880334
aacagaguaugcuugacga

SEQ ID NO: 1959631 - RNA, 19 nt, Artificial Sequence
  Description of Artificial Sequence: Synthetic oligonucleotide
  Antisense strand to SEQ ID NO: 1959630
ucgucaagcauacucuguu

SEQ ID NO: 1959632 - RNA, 19 nt, Artificial Sequence
  Description of Artificial Sequence: Synthetic oligonucleotide
  Sense strand starting at position 3500 of SEQ ID NO: 1880334
cagaguaugcuugacgaag

SEQ ID NO: 1959633 - RNA, 19 nt, Artificial Sequence
  Description of Artificial Sequence: Synthetic oligonucleotide
  Antisense strand to SEQ ID NO: 1959632
cuucgucaagcauacucug

SEQ ID NO: 1959634 - RNA, 19 nt, Artificial Sequence
  Description of Artificial Sequence: Synthetic oligonucleotide
  Sense strand starting at position 3539 of SEQ ID NO: 1880334
aaagauaacugagagaaag

SEQ ID NO: 1959635 - RNA, 19 nt, Artificial Sequence
  Description of Artificial Sequence: Synthetic oligonucleotide
  Antisense strand to SEQ ID NO: 1959634
cuuucucucaguuaucuuu

SEQ ID NO: 1959636 - RNA, 19 nt, Artificial Sequence
  Description of Artificial Sequence: Synthetic oligonucleotide
  Sense strand starting at position 3627 of SEQ ID NO: 1880334
acaguauuccguuaucacu

SEQ ID NO: 1959637 - RNA, 19 nt, Artificial Sequence
  Description of Artificial Sequence: Synthetic oligonucleotide
  Antisense strand to SEQ ID NO: 1959636
agugauaacggaauacugu

SEQ ID NO: 1959638 - RNA, 19 nt, Artificial Sequence
  Description of Artificial Sequence: Synthetic oligonucleotide
  Sense strand starting at position 3637 of SEQ ID NO: 1880334
guuaucacugugcaaguaa

SEQ ID NO: 1959639 - RNA, 19 nt, Artificial Sequence
  Description of Artificial Sequence: Synthetic oligonucleotide
  Antisense strand to SEQ ID NO: 1959638
uuacuugcacagugauaac

SEQ ID NO: 1959640 - RNA, 19 nt, Artificial Sequence
  Description of Artificial Sequence: Synthetic oligonucleotide
  Sense strand starting at position 3669 of SEQ ID NO: 1880334
aaguuacucugaguggguu

SEQ ID NO: 1959641 - RNA, 19 nt, Artificial Sequence
  Description of Artificial Sequence: Synthetic oligonucleotide
  Antisense strand to SEQ ID NO: 1959640
aacccacucagaguaacuu

SEQ ID NO: 1959642 - RNA, 19 nt, Artificial Sequence
  Description of Artificial Sequence: Synthetic oligonucleotide
  Sense strand starting at position 3794 of SEQ ID NO: 1880334
aaguaaguccuagagucca

SEQ ID NO: 1959643 - RNA, 19 nt, Artificial Sequence
  Description of Artificial Sequence: Synthetic oligonucleotide
  Antisense strand to SEQ ID NO: 1959642
uggacucuaggacuuacuu

SEQ ID NO: 1959644 - RNA, 19 nt, Artificial Sequence
  Description of Artificial Sequence: Synthetic oligonucleotide
  Sense strand starting at position 3897 of SEQ ID NO: 1880334
gcaauugugguauaucugu

SEQ ID NO: 1959645 - RNA, 19 nt, Artificial Sequence
  Description of Artificial Sequence: Synthetic oligonucleotide
  Antisense strand to SEQ ID NO: 1959644
acagauauaccacaauugc

SEQ ID NO: 1959646 - RNA, 19 nt, Artificial Sequence
  Description of Artificial Sequence: Synthetic oligonucleotide
  Sense strand starting at position 3902 of SEQ ID NO: 1880334
ugugguauaucuguuuaua

SEQ ID NO: 1959647 - RNA, 19 nt, Artificial Sequence
  Description of Artificial Sequence: Synthetic oligonucleotide
  Antisense strand to SEQ ID NO: 1959646
uauaaacagauauaccaca

SEQ ID NO: 1959648 - RNA, 19 nt, Artificial Sequence
  Description of Artificial Sequence: Synthetic oligonucleotide
  Sense strand starting at position 2573 of SEQ ID NO: 1880335
gagucuugggaucggguuu

SEQ ID NO: 1959649 - RNA, 19 nt, Artificial Sequence
  Description of Artificial Sequence: Synthetic oligonucleotide
  Antisense strand to SEQ ID NO: 1959648
aaacccgaucccaagacuc

SEQ ID NO: 1959650 - RNA, 19 nt, Artificial Sequence
  Description of Artificial Sequence: Synthetic oligonucleotide
  Sense strand starting at position 2860 of SEQ ID NO: 1880335
ggaugugugauguggucaa

SEQ ID NO: 1959651 - RNA, 19 nt, Artificial Sequence
  Description of Artificial Sequence: Synthetic oligonucleotide
  Antisense strand to SEQ ID NO: 1959650
uugaccacaucacacaucc

SEQ ID NO: 1959652 - RNA, 19 nt, Artificial Sequence
  Description of Artificial Sequence: Synthetic oligonucleotide
  Sense strand starting at position 3042 of SEQ ID NO: 1880335
gggacagucucuuaucuuc

SEQ ID NO: 1959653 - RNA, 19 nt, Artificial Sequence
  Description of Artificial Sequence: Synthetic oligonucleotide
  Antisense strand to SEQ ID NO: 1959652
gaagauaagagacuguccc

SEQ ID NO: 1959654 - RNA, 19 nt, Artificial Sequence
  Description of Artificial Sequence: Synthetic oligonucleotide
  Sense strand starting at position 152 of SEQ ID NO: 1880336
cuucuacagucaucucgaa

SEQ ID NO: 1959655 - RNA, 19 nt, Artificial Sequence
  Description of Artificial Sequence: Synthetic oligonucleotide
  Antisense strand to SEQ ID NO: 1959654
uucgagaugacuguagaag

SEQ ID NO: 1959656 - RNA, 19 nt, Artificial Sequence
  Description of Artificial Sequence: Synthetic oligonucleotide
  Sense strand starting at position 549 of SEQ ID NO: 1880336
agaugucagcaauaaguuc

SEQ ID NO: 1959657 - RNA, 19 nt, Artificial Sequence
  Description of Artificial Sequence: Synthetic oligonucleotide
  Antisense strand to SEQ ID NO: 1959656
gaacuuauugcugacaucu

SEQ ID NO: 1959658 - RNA, 19 nt, Artificial Sequence
  Description of Artificial Sequence: Synthetic oligonucleotide
  Sense strand starting at position 966 of SEQ ID NO: 1880336
augacaugcuucucacaag

SEQ ID NO: 1959659 - RNA, 19 nt, Artificial Sequence
  Description of Artificial Sequence: Synthetic oligonucleotide
  Antisense strand to SEQ ID NO: 1959658
cuugugagaagcaugucau

SEQ ID NO: 1959660 - RNA, 19 nt, Artificial Sequence
  Description of Artificial Sequence: Synthetic oligonucleotide
  Sense strand starting at position 1818 of SEQ ID NO: 1880336
ccugcuguccucuggguaa

SEQ ID NO: 1959661 - RNA, 19 nt, Artificial Sequence
  Description of Artificial Sequence: Synthetic oligonucleotide
  Antisense strand to SEQ ID NO: 1959660
uuacccagaggacagcagg

SEQ ID NO: 1959662 - RNA, 19 nt, Artificial Sequence
  Description of Artificial Sequence: Synthetic oligonucleotide
  Sense strand starting at position 2653 of SEQ ID NO: 1880336
ggaugugugauguggucaa

SEQ ID NO: 1959663 - RNA, 19 nt, Artificial Sequence
  Description of Artificial Sequence: Synthetic oligonucleotide
  Antisense strand to SEQ ID NO: 1959662
uugaccacaucacacaucc

SEQ ID NO: 1959664 - RNA, 19 nt, Artificial Sequence
  Description of Artificial Sequence: Synthetic oligonucleotide
  Sense strand starting at position 3453 of SEQ ID NO: 1880336
gugaccaucucuccagaca

SEQ ID NO: 1959665 - RNA, 19 nt, Artificial Sequence
  Description of Artificial Sequence: Synthetic oligonucleotide
  Antisense strand to SEQ ID NO: 1959664
ugucuggagagauggucac

SEQ ID NO: 1959666 - RNA, 19 nt, Artificial Sequence
  Description of Artificial Sequence: Synthetic oligonucleotide
  Sense strand starting at position 185 of SEQ ID NO: 1880337
gccuccagagcuuagagaa

SEQ ID NO: 1959667 - RNA, 19 nt, Artificial Sequence
  Description of Artificial Sequence: Synthetic oligonucleotide
  Antisense strand to SEQ ID NO: 1959666
uucucuaagcucuggaggc

SEQ ID NO: 1959668 - RNA, 19 nt, Artificial Sequence
  Description of Artificial Sequence: Synthetic oligonucleotide
  Sense strand starting at position 290 of SEQ ID NO: 1880337
gugagaucauaguccacua

SEQ ID NO: 1959669 - RNA, 19 nt, Artificial Sequence
  Description of Artificial Sequence: Synthetic oligonucleotide
  Antisense strand to SEQ ID NO: 1959668
uaguggacuaugaucucac

SEQ ID NO: 1959670 - RNA, 19 nt, Artificial Sequence
  Description of Artificial Sequence: Synthetic oligonucleotide
  Sense strand starting at position 782 of SEQ ID NO: 1880337
gagugaaacuccgugacug

SEQ ID NO: 1959671 - RNA, 19 nt, Artificial Sequence
  Description of Artificial Sequence: Synthetic oligonucleotide
  Antisense strand to SEQ ID NO: 1959670
cagucacggaguuucacuc

SEQ ID NO: 1959672 - RNA, 19 nt, Artificial Sequence
  Description of Artificial Sequence: Synthetic oligonucleotide
  Sense strand starting at position 888 of SEQ ID NO: 1880337
gcgacucguucguggucau

SEQ ID NO: 1959673 - RNA, 19 nt, Artificial Sequence
  Description of Artificial Sequence: Synthetic oligonucleotide
  Antisense strand to SEQ ID NO: 1959672
augaccacgaacgagucgc

SEQ ID NO: 1959674 - RNA, 19 nt, Artificial Sequence
  Description of Artificial Sequence: Synthetic oligonucleotide
  Sense strand starting at position 889 of SEQ ID NO: 1880337
cgacucguucguggucauu

SEQ ID NO: 1959675 - RNA, 19 nt, Artificial Sequence
  Description of Artificial Sequence: Synthetic oligonucleotide
  Antisense strand to SEQ ID NO: 1959674
aaugaccacgaacgagucg

SEQ ID NO: 1959676 - RNA, 19 nt, Artificial Sequence
  Description of Artificial Sequence: Synthetic oligonucleotide
  Sense strand starting at position 891 of SEQ ID NO: 1880337
acucguucguggucauuca

SEQ ID NO: 1959677 - RNA, 19 nt, Artificial Sequence
  Description of Artificial Sequence: Synthetic oligonucleotide
  Antisense strand to SEQ ID NO: 1959676
ugaaugaccacgaacgagu

SEQ ID NO: 1959678 - RNA, 19 nt, Artificial Sequence
  Description of Artificial Sequence: Synthetic oligonucleotide
  Sense strand starting at position 979 of SEQ ID NO: 1880337
guucucagcccgcuuugaa

SEQ ID NO: 1959679 - RNA, 19 nt, Artificial Sequence
  Description of Artificial Sequence: Synthetic oligonucleotide
  Antisense strand to SEQ ID NO: 1959678
uucaaagcgggcugagaac

SEQ ID NO: 1959680 - RNA, 19 nt, Artificial Sequence
  Description of Artificial Sequence: Synthetic oligonucleotide
  Sense strand starting at position 1450 of SEQ ID NO: 1880337
ggaaguggccaaggguaau

SEQ ID NO: 1959681 - RNA, 19 nt, Artificial Sequence
  Description of Artificial Sequence: Synthetic oligonucleotide
  Antisense strand to SEQ ID NO: 1959680
auuacccuuggccacuucc

SEQ ID NO: 1959682 - RNA, 19 nt, Artificial Sequence
  Description of Artificial Sequence: Synthetic oligonucleotide
  Sense strand starting at position 1477 of SEQ ID NO: 1880337
uuaugcacguuguacaaau

SEQ ID NO: 1959683 - RNA, 19 nt, Artificial Sequence
  Description of Artificial Sequence: Synthetic oligonucleotide
  Antisense strand to SEQ ID NO: 1959682
auuuguacaacgugcauaa

SEQ ID NO: 1959684 - RNA, 19 nt, Artificial Sequence
  Description of Artificial Sequence: Synthetic oligonucleotide
  Sense strand starting at position 1495 of SEQ ID NO: 1880337
uugaaacacgcuugcagaa

SEQ ID NO: 1959685 - RNA, 19 nt, Artificial Sequence
  Description of Artificial Sequence: Synthetic oligonucleotide
  Antisense strand to SEQ ID NO: 1959684
uucugcaagcguguuucaa

SEQ ID NO: 1959686 - RNA, 19 nt, Artificial Sequence
  Description of Artificial Sequence: Synthetic oligonucleotide
  Sense strand starting at position 2234 of SEQ ID NO: 1880337
gcuggaggguucuccagaa

SEQ ID NO: 1959687 - RNA, 19 nt, Artificial Sequence
  Description of Artificial Sequence: Synthetic oligonucleotide
  Antisense strand to SEQ ID NO: 1959686
uucuggagaacccuccagc

SEQ ID NO: 1959688 - RNA, 19 nt, Artificial Sequence
  Description of Artificial Sequence: Synthetic oligonucleotide
  Sense strand starting at position 2892 of SEQ ID NO: 1880337
augccaaucucugagcaga

SEQ ID NO: 1959689 - RNA, 19 nt, Artificial Sequence
  Description of Artificial Sequence: Synthetic oligonucleotide
  Antisense strand to SEQ ID NO: 1959688
ucugcucagagauuggcau

SEQ ID NO: 1959690 - RNA, 19 nt, Artificial Sequence
  Description of Artificial Sequence: Synthetic oligonucleotide
  Sense strand starting at position 2894 of SEQ ID NO: 1880337
gccaaucucugagcagaug

SEQ ID NO: 1959691 - RNA, 19 nt, Artificial Sequence
  Description of Artificial Sequence: Synthetic oligonucleotide
  Antisense strand to SEQ ID NO: 1959690
caucugcucagagauuggc

SEQ ID NO: 1959692 - RNA, 19 nt, Artificial Sequence
  Description of Artificial Sequence: Synthetic oligonucleotide
  Sense strand starting at position 2993 of SEQ ID NO: 1880337
gcagauggguccugguagu

SEQ ID NO: 1959693 - RNA, 19 nt, Artificial Sequence
  Description of Artificial Sequence: Synthetic oligonucleotide
  Antisense strand to SEQ ID NO: 1959692
acuaccaggacccaucugc

SEQ ID NO: 1959694 - RNA, 19 nt, Artificial Sequence
  Description of Artificial Sequence: Synthetic oligonucleotide
  Sense strand starting at position 3031 of SEQ ID NO: 1880337
cuggauuuguccuggugau

SEQ ID NO: 1959695 - RNA, 19 nt, Artificial Sequence
  Description of Artificial Sequence: Synthetic oligonucleotide
  Antisense strand to SEQ ID NO: 1959694
aucaccaggacaaauccag

SEQ ID NO: 1959696 - RNA, 19 nt, Artificial Sequence
  Description of Artificial Sequence: Synthetic oligonucleotide
  Sense strand starting at position 3118 of SEQ ID NO: 1880337
accuucuucccaggugaau

SEQ ID NO: 1959697 - RNA, 19 nt, Artificial Sequence
  Description of Artificial Sequence: Synthetic oligonucleotide
  Antisense strand to SEQ ID NO: 1959696
auucaccugggaagaaggu

SEQ ID NO: 1959698 - RNA, 19 nt, Artificial Sequence
  Description of Artificial Sequence: Synthetic oligonucleotide
  Sense strand starting at position 3190 of SEQ ID NO: 1880337
gcccuugcucugcagauga

SEQ ID NO: 1959699 - RNA, 19 nt, Artificial Sequence
  Description of Artificial Sequence: Synthetic oligonucleotide
  Antisense strand to SEQ ID NO: 1959698
ucaucugcagagcaagggc

SEQ ID NO: 1959700 - RNA, 19 nt, Artificial Sequence
  Description of Artificial Sequence: Synthetic oligonucleotide
  Sense strand starting at position 3192 of SEQ ID NO: 1880337
ccuugcucugcagaugagu

SEQ ID NO: 1959701 - RNA, 19 nt, Artificial Sequence
  Description of Artificial Sequence: Synthetic oligonucleotide
  Antisense strand to SEQ ID NO: 1959700
acucaucugcagagcaagg

SEQ ID NO: 1959702 - RNA, 19 nt, Artificial Sequence
  Description of Artificial Sequence: Synthetic oligonucleotide
  Sense strand starting at position 3201 of SEQ ID NO: 1880337
gcagaugagugugggaguu

SEQ ID NO: 1959703 - RNA, 19 nt, Artificial Sequence
  Description of Artificial Sequence: Synthetic oligonucleotide
  Antisense strand to SEQ ID NO: 1959702
aacucccacacucaucugc

SEQ ID NO: 1959704 - RNA, 19 nt, Artificial Sequence
  Description of Artificial Sequence: Synthetic oligonucleotide
  Sense strand starting at position 3211 of SEQ ID NO: 1880337
gugggaguuugcccauugu

SEQ ID NO: 1959705 - RNA, 19 nt, Artificial Sequence
  Description of Artificial Sequence: Synthetic oligonucleotide
  Antisense strand to SEQ ID NO: 1959704
acaaugggcaaacucccac

SEQ ID NO: 1959706 - RNA, 19 nt, Artificial Sequence
  Description of Artificial Sequence: Synthetic oligonucleotide
  Sense strand starting at position 3215 of SEQ ID NO: 1880337
gaguuugcccauugucaag

SEQ ID NO: 1959707 - RNA, 19 nt, Artificial Sequence
  Description of Artificial Sequence: Synthetic oligonucleotide
  Antisense strand to SEQ ID NO: 1959706
cuugacaaugggcaaacuc

SEQ ID NO: 1959708 - RNA, 19 nt, Artificial Sequence
  Description of Artificial Sequence: Synthetic oligonucleotide
  Sense strand starting at position 3221 of SEQ ID NO: 1880337
gcccauugucaaggguaac

SEQ ID NO: 1959709 - RNA, 19 nt, Artificial Sequence
  Description of Artificial Sequence: Synthetic oligonucleotide
  Antisense strand to SEQ ID NO: 1959708
guuacccuugacaaugggc

SEQ ID NO: 1959710 - RNA, 19 nt, Artificial Sequence
  Description of Artificial Sequence: Synthetic oligonucleotide
  Sense strand starting at position 3231 of SEQ ID NO: 1880337
aaggguaacuguugcaauu

SEQ ID NO: 1959711 - RNA, 19 nt, Artificial Sequence
  Description of Artificial Sequence: Synthetic oligonucleotide
  Antisense strand to SEQ ID NO: 1959710
aauugcaacaguuacccuu

SEQ ID NO: 1959712 - RNA, 19 nt, Artificial Sequence
  Description of Artificial Sequence: Synthetic oligonucleotide
  Sense strand starting at position 3233 of SEQ ID NO: 1880337
ggguaacuguugcaauuac

SEQ ID NO: 1959713 - RNA, 19 nt, Artificial Sequence
  Description of Artificial Sequence: Synthetic oligonucleotide
  Antisense strand to SEQ ID NO: 1959712
guaauugcaacaguuaccc

SEQ ID NO: 1959714 - RNA, 19 nt, Artificial Sequence
  Description of Artificial Sequence: Synthetic oligonucleotide
  Sense strand starting at position 3956 of SEQ ID NO: 1880337
ggaguuuagagacgacugu

SEQ ID NO: 1959715 - RNA, 19 nt, Artificial Sequence
  Description of Artificial Sequence: Synthetic oligonucleotide
  Antisense strand to SEQ ID NO: 1959714
acagucgucucuaaacucc

SEQ ID NO: 1959716 - RNA, 19 nt, Artificial Sequence
  Description of Artificial Sequence: Synthetic oligonucleotide
  Sense strand starting at position 3957 of SEQ ID NO: 1880337
gaguuuagagacgacugua

SEQ ID NO: 1959717 - RNA, 19 nt, Artificial Sequence
  Description of Artificial Sequence: Synthetic oligonucleotide
  Antisense strand to SEQ ID NO: 1959716
uacagucgucucuaaacuc

SEQ ID NO: 1959718 - RNA, 19 nt, Artificial Sequence
  Description of Artificial Sequence: Synthetic oligonucleotide
  Sense strand starting at position 25 of SEQ ID NO: 1880338
agucuuauuccaggacuaa

SEQ ID NO: 1959719 - RNA, 19 nt, Artificial Sequence
  Description of Artificial Sequence: Synthetic oligonucleotide
  Antisense strand to SEQ ID NO: 1959718
uuaguccuggaauaagacu

SEQ ID NO: 1959720 - RNA, 19 nt, Artificial Sequence
  Description of Artificial Sequence: Synthetic oligonucleotide
  Sense strand starting at position 120 of SEQ ID NO: 1880338
agguaagaucgcuacccua

SEQ ID NO: 1959721 - RNA, 19 nt, Artificial Sequence
  Description of Artificial Sequence: Synthetic oligonucleotide
  Antisense strand to SEQ ID NO: 1959720
uaggguagcgaucuuaccu

SEQ ID NO: 1959722 - RNA, 19 nt, Artificial Sequence
  Description of Artificial Sequence: Synthetic oligonucleotide
  Sense strand starting at position 146 of SEQ ID NO: 1880338
gauaauagaugggauuugu

SEQ ID NO: 1959723 - RNA, 19 nt, Artificial Sequence
  Description of Artificial Sequence: Synthetic oligonucleotide
  Antisense strand to SEQ ID NO: 1959722
acaaaucccaucuauuauc

SEQ ID NO: 1959724 - RNA, 19 nt, Artificial Sequence
  Description of Artificial Sequence: Synthetic oligonucleotide
  Sense strand starting at position 167 of SEQ ID NO: 1880338
ucagauuucugauaaccag

SEQ ID NO: 1959725 - RNA, 19 nt, Artificial Sequence
  Description of Artificial Sequence: Synthetic oligonucleotide
  Antisense strand to SEQ ID NO: 1959724
cugguuaucagaaaucuga

SEQ ID NO: 1959726 - RNA, 19 nt, Artificial Sequence
  Description of Artificial Sequence: Synthetic oligonucleotide
  Sense strand starting at position 273 of SEQ ID NO: 1880338
auucgaaucccaugaguau

SEQ ID NO: 1959727 - RNA, 19 nt, Artificial Sequence
  Description of Artificial Sequence: Synthetic oligonucleotide
  Antisense strand to SEQ ID NO: 1959726
auacucaugggauucgaau

SEQ ID NO: 1959728 - RNA, 19 nt, Artificial Sequence
  Description of Artificial Sequence: Synthetic oligonucleotide
  Sense strand starting at position 274 of SEQ ID NO: 1880338
uucgaaucccaugaguaua

SEQ ID NO: 1959729 - RNA, 19 nt, Artificial Sequence
  Description of Artificial Sequence: Synthetic oligonucleotide
  Antisense strand to SEQ ID NO: 1959728
uauacucaugggauucgaa

SEQ ID NO: 1959730 - RNA, 19 nt, Artificial Sequence
  Description of Artificial Sequence: Synthetic oligonucleotide
  Sense strand starting at position 276 of SEQ ID NO: 1880338
cgaaucccaugaguauaau

SEQ ID NO: 1959731 - RNA, 19 nt, Artificial Sequence
  Description of Artificial Sequence: Synthetic oligonucleotide
  Antisense strand to SEQ ID NO: 1959730
auuauacucaugggauucg

SEQ ID NO: 1959732 - RNA, 19 nt, Artificial Sequence
  Description of Artificial Sequence: Synthetic oligonucleotide
  Sense strand starting at position 315 of SEQ ID NO: 1880338
augugauacugaucaugaa

SEQ ID NO: 1959733 - RNA, 19 nt, Artificial Sequence
  Description of Artificial Sequence: Synthetic oligonucleotide
  Antisense strand to SEQ ID NO: 1959732
uucaugaucaguaucacau

SEQ ID NO: 1959734 - RNA, 19 nt, Artificial Sequence
  Description of Artificial Sequence: Synthetic oligonucleotide
  Sense strand starting at position 386 of SEQ ID NO: 1880338
caggaaugacgaugugacu

SEQ ID NO: 1959735 - RNA, 19 nt, Artificial Sequence
  Description of Artificial Sequence: Synthetic oligonucleotide
  Antisense strand to SEQ ID NO: 1959734
agucacaucgucauuccug

SEQ ID NO: 1959736 - RNA, 19 nt, Artificial Sequence
  Description of Artificial Sequence: Synthetic oligonucleotide
  Sense strand starting at position 530 of SEQ ID NO: 1880338
uagguaccuguguaauauu

SEQ ID NO: 1959737 - RNA, 19 nt, Artificial Sequence
  Description of Artificial Sequence: Synthetic oligonucleotide
  Antisense strand to SEQ ID NO: 1959736
aauauuacacagguaccua

SEQ ID NO: 1959738 - RNA, 19 nt, Artificial Sequence
  Description of Artificial Sequence: Synthetic oligonucleotide
  Sense strand starting at position 590 of SEQ ID NO: 1880338
gauagaaugccuggcacaa

SEQ ID NO: 1959739 - RNA, 19 nt, Artificial Sequence
  Description of Artificial Sequence: Synthetic oligonucleotide
  Antisense strand to SEQ ID NO: 1959738
uugugccaggcauucuauc

SEQ ID NO: 1959740 - RNA, 19 nt, Artificial Sequence
  Description of Artificial Sequence: Synthetic oligonucleotide
  Sense strand starting at position 606 of SEQ ID NO: 1880338
caaaguagauguuuguaaa

SEQ ID NO: 1959741 - RNA, 19 nt, Artificial Sequence
  Description of Artificial Sequence: Synthetic oligonucleotide
  Antisense strand to SEQ ID NO: 1959740
uuuacaaacaucuacuuug

SEQ ID NO: 1959742 - RNA, 19 nt, Artificial Sequence
  Description of Artificial Sequence: Synthetic oligonucleotide
  Sense strand starting at position 785 of SEQ ID NO: 1880338
cacuuugugccagacuaag

SEQ ID NO: 1959743 - RNA, 19 nt, Artificial Sequence
  Description of Artificial Sequence: Synthetic oligonucleotide
  Antisense strand to SEQ ID NO: 1959742
cuuagucuggcacaaagug

SEQ ID NO: 1959744 - RNA, 19 nt, Artificial Sequence
  Description of Artificial Sequence: Synthetic oligonucleotide
  Sense strand starting at position 806 of SEQ ID NO: 1880338
acuaccaagucaguugaaa

SEQ ID NO: 1959745 - RNA, 19 nt, Artificial Sequence
  Description of Artificial Sequence: Synthetic oligonucleotide
  Antisense strand to SEQ ID NO: 1959744
uuucaacugacuugguagu

SEQ ID NO: 1959746 - RNA, 19 nt, Artificial Sequence
  Description of Artificial Sequence: Synthetic oligonucleotide
  Sense strand starting at position 1027 of SEQ ID NO: 1880338
auuguaugcguuucuuguu

SEQ ID NO: 1959747 - RNA, 19 nt, Artificial Sequence
  Description of Artificial Sequence: Synthetic oligonucleotide
  Antisense strand to SEQ ID NO: 1959746
aacaagaaacgcauacaau

SEQ ID NO: 1959748 - RNA, 19 nt, Artificial Sequence
  Description of Artificial Sequence: Synthetic oligonucleotide
  Sense strand starting at position 1289 of SEQ ID NO: 1880338
aguugaaagggcuguuaga

SEQ ID NO: 1959749 - RNA, 19 nt, Artificial Sequence
  Description of Artificial Sequence: Synthetic oligonucleotide
  Antisense strand to SEQ ID NO: 1959748
ucuaacagcccuuucaacu

SEQ ID NO: 1959750 - RNA, 19 nt, Artificial Sequence
  Description of Artificial Sequence: Synthetic oligonucleotide
  Sense strand starting at position 2101 of SEQ ID NO: 1880338
augcacaaucccugggaaa

SEQ ID NO: 1959751 - RNA, 19 nt, Artificial Sequence
  Description of Artificial Sequence: Synthetic oligonucleotide
  Antisense strand to SEQ ID NO: 1959750
uuucccagggauugugcau

SEQ ID NO: 1959752 - RNA, 19 nt, Artificial Sequence
  Description of Artificial Sequence: Synthetic oligonucleotide
  Sense strand starting at position 2132 of SEQ ID NO: 1880338
acuaguaaucgauauguac

SEQ ID NO: 1959753 - RNA, 19 nt, Artificial Sequence
  Description of Artificial Sequence: Synthetic oligonucleotide
  Antisense strand to SEQ ID NO: 1959752
guacauaucgauuacuagu

SEQ ID NO: 1959754 - RNA, 19 nt, Artificial Sequence
  Description of Artificial Sequence: Synthetic oligonucleotide
  Sense strand starting at position 2163 of SEQ ID NO: 1880338
uuccuaaugcuuuagcaag

SEQ ID NO: 1959755 - RNA, 19 nt, Artificial Sequence
  Description of Artificial Sequence: Synthetic oligonucleotide
  Antisense strand to SEQ ID NO: 1959754
cuugcuaaagcauuaggaa

SEQ ID NO: 1959756 - RNA, 19 nt, Artificial Sequence
  Description of Artificial Sequence: Synthetic oligonucleotide
  Sense strand starting at position 2208 of SEQ ID NO: 1880338
ugccaauauguuuaaugac

SEQ ID NO: 1959757 - RNA, 19 nt, Artificial Sequence
  Description of Artificial Sequence: Synthetic oligonucleotide
  Antisense strand to SEQ ID NO: 1959756
gucauuaaacauauuggca

SEQ ID NO: 1959758 - RNA, 19 nt, Artificial Sequence
  Description of Artificial Sequence: Synthetic oligonucleotide
  Sense strand starting at position 2309 of SEQ ID NO: 1880338
aggaguuaccgagaaugca

SEQ ID NO: 1959759 - RNA, 19 nt, Artificial Sequence
  Description of Artificial Sequence: Synthetic oligonucleotide
  Antisense strand to SEQ ID NO: 1959758
ugcauucucgguaacuccu

SEQ ID NO: 1959760 - RNA, 19 nt, Artificial Sequence
  Description of Artificial Sequence: Synthetic oligonucleotide
  Sense strand starting at position 2319 of SEQ ID NO: 1880338
gagaaugcauuugagguga

SEQ ID NO: 1959761 - RNA, 19 nt, Artificial Sequence
  Description of Artificial Sequence: Synthetic oligonucleotide
  Antisense strand to SEQ ID NO: 1959760
ucaccucaaaugcauucuc

SEQ ID NO: 1959762 - RNA, 19 nt, Artificial Sequence
  Description of Artificial Sequence: Synthetic oligonucleotide
  Sense strand starting at position 2344 of SEQ ID NO: 1880338
cccaaaucacguggauaau

SEQ ID NO: 1959763 - RNA, 19 nt, Artificial Sequence
  Description of Artificial Sequence: Synthetic oligonucleotide
  Antisense strand to SEQ ID NO: 1959762
auuauccacgugauuuggg

SEQ ID NO: 1959764 - RNA, 19 nt, Artificial Sequence
  Description of Artificial Sequence: Synthetic oligonucleotide
  Sense strand starting at position 2345 of SEQ ID NO: 1880338
ccaaaucacguggauaauu

SEQ ID NO: 1959765 - RNA, 19 nt, Artificial Sequence
  Description of Artificial Sequence: Synthetic oligonucleotide
  Antisense strand to SEQ ID NO: 1959764
aauuauccacgugauuugg

SEQ ID NO: 1959766 - RNA, 19 nt, Artificial Sequence
  Description of Artificial Sequence: Synthetic oligonucleotide
  Sense strand starting at position 2422 of SEQ ID NO: 1880338
aaguuaugugugcuguagu

SEQ ID NO: 1959767 - RNA, 19 nt, Artificial Sequence
  Description of Artificial Sequence: Synthetic oligonucleotide
  Antisense strand to SEQ ID NO: 1959766
acuacagcacacauaacuu

SEQ ID NO: 1959768 - RNA, 19 nt, Artificial Sequence
  Description of Artificial Sequence: Synthetic oligonucleotide
  Sense strand starting at position 2459 of SEQ ID NO: 1880338
ccgucuggcucccuaauuu

SEQ ID NO: 1959769 - RNA, 19 nt, Artificial Sequence
  Description of Artificial Sequence: Synthetic oligonucleotide
  Antisense strand to SEQ ID NO: 1959768
aaauuagggagccagacgg

SEQ ID NO: 1959770 - RNA, 19 nt, Artificial Sequence
  Description of Artificial Sequence: Synthetic oligonucleotide
  Sense strand starting at position 2499 of SEQ ID NO: 1880338
ugugguaagcaacaugaga

SEQ ID NO: 1959771 - RNA, 19 nt, Artificial Sequence
  Description of Artificial Sequence: Synthetic oligonucleotide
  Antisense strand to SEQ ID NO: 1959770
ucucauguugcuuaccaca

SEQ ID NO: 1959772 - RNA, 19 nt, Artificial Sequence
  Description of Artificial Sequence: Synthetic oligonucleotide
  Sense strand starting at position 2516 of SEQ ID NO: 1880338
gaaguaaggucaucuuaga

SEQ ID NO: 1959773 - RNA, 19 nt, Artificial Sequence
  Description of Artificial Sequence: Synthetic oligonucleotide
  Antisense strand to SEQ ID NO: 1959772
ucuaagaugaccuuacuuc

SEQ ID NO: 1959774 - RNA, 19 nt, Artificial Sequence
  Description of Artificial Sequence: Synthetic oligonucleotide
  Sense strand starting at position 2908 of SEQ ID NO: 1880338
cagauaguauaggucuaga

SEQ ID NO: 1959775 - RNA, 19 nt, Artificial Sequence
  Description of Artificial Sequence: Synthetic oligonucleotide
  Antisense strand to SEQ ID NO: 1959774
ucuagaccuauacuaucug

SEQ ID NO: 1959776 - RNA, 19 nt, Artificial Sequence
  Description of Artificial Sequence: Synthetic oligonucleotide
  Sense strand starting at position 2936 of SEQ ID NO: 1880338
gacauuguggcagaguuau

SEQ ID NO: 1959777 - RNA, 19 nt, Artificial Sequence
  Description of Artificial Sequence: Synthetic oligonucleotide
  Antisense strand to SEQ ID NO: 1959776
auaacucugccacaauguc

SEQ ID NO: 1959778 - RNA, 19 nt, Artificial Sequence
  Description of Artificial Sequence: Synthetic oligonucleotide
  Sense strand starting at position 3141 of SEQ ID NO: 1880338
guaaccugguauccugaau

SEQ ID NO: 1959779 - RNA, 19 nt, Artificial Sequence
  Description of Artificial Sequence: Synthetic oligonucleotide
  Antisense strand to SEQ ID NO: 1959778
auucaggauaccagguuac

SEQ ID NO: 1959780 - RNA, 19 nt, Artificial Sequence
  Description of Artificial Sequence: Synthetic oligonucleotide
  Sense strand starting at position 3263 of SEQ ID NO: 1880338
gacaucuggugcucagaaa

SEQ ID NO: 1959781 - RNA, 19 nt, Artificial Sequence
  Description of Artificial Sequence: Synthetic oligonucleotide
  Antisense strand to SEQ ID NO: 1959780
uuucugagcaccagauguc

SEQ ID NO: 1959782 - RNA, 19 nt, Artificial Sequence
  Description of Artificial Sequence: Synthetic oligonucleotide
  Sense strand starting at position 3457 of SEQ ID NO: 1880338
cugagaauguuauuaagua

SEQ ID NO: 1959783 - RNA, 19 nt, Artificial Sequence
  Description of Artificial Sequence: Synthetic oligonucleotide
  Antisense strand to SEQ ID NO: 1959782
uacuuaauaacauucucag

SEQ ID NO: 1959784 - RNA, 19 nt, Artificial Sequence
  Description of Artificial Sequence: Synthetic oligonucleotide
  Sense strand starting at position 3461 of SEQ ID NO: 1880338
gaauguuauuaaguauggu

SEQ ID NO: 1959785 - RNA, 19 nt, Artificial Sequence
  Description of Artificial Sequence: Synthetic oligonucleotide
  Antisense strand to SEQ ID NO: 1959784
accauacuuaauaacauuc

SEQ ID NO: 1959786 - RNA, 19 nt, Artificial Sequence
  Description of Artificial Sequence: Synthetic oligonucleotide
  Sense strand starting at position 3545 of SEQ ID NO: 1880338
uagaguacauauguaaaug

SEQ ID NO: 1959787 - RNA, 19 nt, Artificial Sequence
  Description of Artificial Sequence: Synthetic oligonucleotide
  Antisense strand to SEQ ID NO: 1959786
cauuuacauauguacucua

SEQ ID NO: 1959788 - RNA, 19 nt, Artificial Sequence
  Description of Artificial Sequence: Synthetic oligonucleotide
  Sense strand starting at position 3557 of SEQ ID NO: 1880338
guaaaugaaugagagauuu

SEQ ID NO: 1959789 - RNA, 19 nt, Artificial Sequence
  Description of Artificial Sequence: Synthetic oligonucleotide
  Antisense strand to SEQ ID NO: 1959788
aaaucucucauucauuuac

SEQ ID NO: 1959790 - RNA, 19 nt, Artificial Sequence
  Description of Artificial Sequence: Synthetic oligonucleotide
  Sense strand starting at position 3565 of SEQ ID NO: 1880338
augagagauuuccacauua

SEQ ID NO: 1959791 - RNA, 19 nt, Artificial Sequence
  Description of Artificial Sequence: Synthetic oligonucleotide
  Antisense strand to SEQ ID NO: 1959790
uaauguggaaaucucucau

SEQ ID NO: 1959792 - RNA, 19 nt, Artificial Sequence
  Description of Artificial Sequence: Synthetic oligonucleotide
  Sense strand starting at position 3851 of SEQ ID NO: 1880338
uaaguaagguuggcauaaa

SEQ ID NO: 1959793 - RNA, 19 nt, Artificial Sequence
  Description of Artificial Sequence: Synthetic oligonucleotide
  Antisense strand to SEQ ID NO: 1959792
uuuaugccaaccuuacuua

SEQ ID NO: 1959794 - RNA, 19 nt, Artificial Sequence
  Description of Artificial Sequence: Synthetic oligonucleotide
  Sense strand starting at position 3860 of SEQ ID NO: 1880338
uuggcauaaaucugaaggu

SEQ ID NO: 1959795 - RNA, 19 nt, Artificial Sequence
  Description of Artificial Sequence: Synthetic oligonucleotide
  Antisense strand to SEQ ID NO: 1959794
accuucagauuuaugccaa

SEQ ID NO: 1959796 - RNA, 19 nt, Artificial Sequence
  Description of Artificial Sequence: Synthetic oligonucleotide
  Sense strand starting at position 3923 of SEQ ID NO: 1880338
ucauaacccuguguaaaca

SEQ ID NO: 1959797 - RNA, 19 nt, Artificial Sequence
  Description of Artificial Sequence: Synthetic oligonucleotide
  Antisense strand to SEQ ID NO: 1959796
uguuuacacaggguuauga

SEQ ID NO: 1959798 - RNA, 19 nt, Artificial Sequence
  Description of Artificial Sequence: Synthetic oligonucleotide
  Sense strand starting at position 123 of SEQ ID NO: 1880339
ugcgcuguugccucaguau

SEQ ID NO: 1959799 - RNA, 19 nt, Artificial Sequence
  Description of Artificial Sequence: Synthetic oligonucleotide
  Antisense strand to SEQ ID NO: 1959798
auacugaggcaacagcgca

SEQ ID NO: 1959800 - RNA, 19 nt, Artificial Sequence
  Description of Artificial Sequence: Synthetic oligonucleotide
  Sense strand starting at position 286 of SEQ ID NO: 1880339
acagacuuguuagcgaaau

SEQ ID NO: 1959801 - RNA, 19 nt, Artificial Sequence
  Description of Artificial Sequence: Synthetic oligonucleotide
  Antisense strand to SEQ ID NO: 1959800
auuucgcuaacaagucugu

SEQ ID NO: 1959802 - RNA, 19 nt, Artificial Sequence
  Description of Artificial Sequence: Synthetic oligonucleotide
  Sense strand starting at position 419 of SEQ ID NO: 1880339
agcugaacggcucaacaau

SEQ ID NO: 1959803 - RNA, 19 nt, Artificial Sequence
  Description of Artificial Sequence: Synthetic oligonucleotide
  Antisense strand to SEQ ID NO: 1959802
auuguugagccguucagcu

SEQ ID NO: 1959804 - RNA, 19 nt, Artificial Sequence
  Description of Artificial Sequence: Synthetic oligonucleotide
  Sense strand starting at position 437 of SEQ ID NO: 1880339
ugauacuacugagcugaga

SEQ ID NO: 1959805 - RNA, 19 nt, Artificial Sequence
  Description of Artificial Sequence: Synthetic oligonucleotide
  Antisense strand to SEQ ID NO: 1959804
ucucagcucaguaguauca

SEQ ID NO: 1959806 - RNA, 19 nt, Artificial Sequence
  Description of Artificial Sequence: Synthetic oligonucleotide
  Sense strand starting at position 488 of SEQ ID NO: 1880339
uugcuucuucccuaguaga

SEQ ID NO: 1959807 - RNA, 19 nt, Artificial Sequence
  Description of Artificial Sequence: Synthetic oligonucleotide
  Antisense strand to SEQ ID NO: 1959806
ucuacuagggaagaagcaa

SEQ ID NO: 1959808 - RNA, 19 nt, Artificial Sequence
  Description of Artificial Sequence: Synthetic oligonucleotide
  Sense strand starting at position 515 of SEQ ID NO: 1880339
gcuggugauaaccaguaaa

SEQ ID NO: 1959809 - RNA, 19 nt, Artificial Sequence
  Description of Artificial Sequence: Synthetic oligonucleotide
  Antisense strand to SEQ ID NO: 1959808
uuuacugguuaucaccagc

SEQ ID NO: 1959810 - RNA, 19 nt, Artificial Sequence
  Description of Artificial Sequence: Synthetic oligonucleotide
  Sense strand starting at position 2380 of SEQ ID NO: 1880339
aacggagguccuuauguuu

SEQ ID NO: 1959811 - RNA, 19 nt, Artificial Sequence
  Description of Artificial Sequence: Synthetic oligonucleotide
  Antisense strand to SEQ ID NO: 1959810
aaacauaaggaccuccguu

SEQ ID NO: 1959812 - RNA, 19 nt, Artificial Sequence
  Description of Artificial Sequence: Synthetic oligonucleotide
  Sense strand starting at position 2438 of SEQ ID NO: 1880339
gaaguugcaucucuggaca

SEQ ID NO: 1959813 - RNA, 19 nt, Artificial Sequence
  Description of Artificial Sequence: Synthetic oligonucleotide
  Antisense strand to SEQ ID NO: 1959812
uguccagagaugcaacuuc

SEQ ID NO: 1959814 - RNA, 19 nt, Artificial Sequence
  Description of Artificial Sequence: Synthetic oligonucleotide
  Sense strand starting at position 2441 of SEQ ID NO: 1880339
guugcaucucuggacaagu

SEQ ID NO: 1959815 - RNA, 19 nt, Artificial Sequence
  Description of Artificial Sequence: Synthetic oligonucleotide
  Antisense strand to SEQ ID NO: 1959814
acuuguccagagaugcaac

SEQ ID NO: 1959816 - RNA, 19 nt, Artificial Sequence
  Description of Artificial Sequence: Synthetic oligonucleotide
  Sense strand starting at position 2443 of SEQ ID NO: 1880339
ugcaucucuggacaaguaa

SEQ ID NO: 1959817 - RNA, 19 nt, Artificial Sequence
  Description of Artificial Sequence: Synthetic oligonucleotide
  Antisense strand to SEQ ID NO: 1959816
uuacuuguccagagaugca

SEQ ID NO: 1959818 - RNA, 19 nt, Artificial Sequence
  Description of Artificial Sequence: Synthetic oligonucleotide
  Sense strand starting at position 2524 of SEQ ID NO: 1880339
cggagauggucccugauga

SEQ ID NO: 1959819 - RNA, 19 nt, Artificial Sequence
  Description of Artificial Sequence: Synthetic oligonucleotide
  Antisense strand to SEQ ID NO: 1959818
ucaucagggaccaucuccg

SEQ ID NO: 1959820 - RNA, 19 nt, Artificial Sequence
  Description of Artificial Sequence: Synthetic oligonucleotide
  Sense strand starting at position 2525 of SEQ ID NO: 1880339
ggagauggucccugaugag

SEQ ID NO: 1959821 - RNA, 19 nt, Artificial Sequence
  Description of Artificial Sequence: Synthetic oligonucleotide
  Antisense strand to SEQ ID NO: 1959820
cucaucagggaccaucucc

SEQ ID NO: 1959822 - RNA, 19 nt, Artificial Sequence
  Description of Artificial Sequence: Synthetic oligonucleotide
  Sense strand starting at position 2562 of SEQ ID NO: 1880339
cuggacuggucucccgaaa

SEQ ID NO: 1959823 - RNA, 19 nt, Artificial Sequence
  Description of Artificial Sequence: Synthetic oligonucleotide
  Antisense strand to SEQ ID NO: 1959822
uuucgggagaccaguccag

SEQ ID NO: 1959824 - RNA, 19 nt, Artificial Sequence
  Description of Artificial Sequence: Synthetic oligonucleotide
  Sense strand starting at position 2639 of SEQ ID NO: 1880339
cguagugucaggccuguau

SEQ ID NO: 1959825 - RNA, 19 nt, Artificial Sequence
  Description of Artificial Sequence: Synthetic oligonucleotide
  Antisense strand to SEQ ID NO: 1959824
auacaggccugacacuacg

SEQ ID NO: 1959826 - RNA, 19 nt, Artificial Sequence
  Description of Artificial Sequence: Synthetic oligonucleotide
  Sense strand starting at position 2650 of SEQ ID NO: 1880339
gccuguauugcacauuuau

SEQ ID NO: 1959827 - RNA, 19 nt, Artificial Sequence
  Description of Artificial Sequence: Synthetic oligonucleotide
  Antisense strand to SEQ ID NO: 1959826
auaaaugugcaauacaggc

SEQ ID NO: 1959828 - RNA, 19 nt, Artificial Sequence
  Description of Artificial Sequence: Synthetic oligonucleotide
  Sense strand starting at position 2662 of SEQ ID NO: 1880339
cauuuaugucuguggugca

SEQ ID NO: 1959829 - RNA, 19 nt, Artificial Sequence
  Description of Artificial Sequence: Synthetic oligonucleotide
  Antisense strand to SEQ ID NO: 1959828
ugcaccacagacauaaaug

SEQ ID NO: 1959830 - RNA, 19 nt, Artificial Sequence
  Description of Artificial Sequence: Synthetic oligonucleotide
  Sense strand starting at position 2712 of SEQ ID NO: 1880339
ggugucuuauuugucuuga

SEQ ID NO: 1959831 - RNA, 19 nt, Artificial Sequence
  Description of Artificial Sequence: Synthetic oligonucleotide
  Antisense strand to SEQ ID NO: 1959830
ucaagacaaauaagacacc

SEQ ID NO: 1959832 - RNA, 19 nt, Artificial Sequence
  Description of Artificial Sequence: Synthetic oligonucleotide
  Sense strand starting at position 2713 of SEQ ID NO: 1880339
gugucuuauuugucuugau

SEQ ID NO: 1959833 - RNA, 19 nt, Artificial Sequence
  Description of Artificial Sequence: Synthetic oligonucleotide
  Antisense strand to SEQ ID NO: 1959832
aucaagacaaauaagacac

SEQ ID NO: 1959834 - RNA, 19 nt, Artificial Sequence
  Description of Artificial Sequence: Synthetic oligonucleotide
  Sense strand starting at position 2714 of SEQ ID NO: 1880339
ugucuuauuugucuugauu

SEQ ID NO: 1959835 - RNA, 19 nt, Artificial Sequence
  Description of Artificial Sequence: Synthetic oligonucleotide
  Antisense strand to SEQ ID NO: 1959834
aaucaagacaaauaagaca

SEQ ID NO: 1959836 - RNA, 19 nt, Artificial Sequence
  Description of Artificial Sequence: Synthetic oligonucleotide
  Sense strand starting at position 2748 of SEQ ID NO: 1880339
ggacgaagugcucagcaaa

SEQ ID NO: 1959837 - RNA, 19 nt, Artificial Sequence
  Description of Artificial Sequence: Synthetic oligonucleotide
  Antisense strand to SEQ ID NO: 1959836
uuugcugagcacuucgucc

SEQ ID NO: 1959838 - RNA, 19 nt, Artificial Sequence
  Description of Artificial Sequence: Synthetic oligonucleotide
  Sense strand starting at position 2751 of SEQ ID NO: 1880339
cgaagugcucagcaaauau

SEQ ID NO: 1959839 - RNA, 19 nt, Artificial Sequence
  Description of Artificial Sequence: Synthetic oligonucleotide
  Antisense strand to SEQ ID NO: 1959838
auauuugcugagcacuucg

SEQ ID NO: 1959840 - RNA, 19 nt, Artificial Sequence
  Description of Artificial Sequence: Synthetic oligonucleotide
  Sense strand starting at position 2773 of SEQ ID NO: 1880339
uuaaaugaauggcuguuua

SEQ ID NO: 1959841 - RNA, 19 nt, Artificial Sequence
  Description of Artificial Sequence: Synthetic oligonucleotide
  Antisense strand to SEQ ID NO: 1959840
uaaacagccauucauuuaa

SEQ ID NO: 1959842 - RNA, 19 nt, Artificial Sequence
  Description of Artificial Sequence: Synthetic oligonucleotide
  Sense strand starting at position 2777 of SEQ ID NO: 1880339
augaauggcuguuuauuga

SEQ ID NO: 1959843 - RNA, 19 nt, Artificial Sequence
  Description of Artificial Sequence: Synthetic oligonucleotide
  Antisense strand to SEQ ID NO: 1959842
ucaauaaacagccauucau

SEQ ID NO: 1959844 - RNA, 19 nt, Artificial Sequence
  Description of Artificial Sequence: Synthetic oligonucleotide
  Sense strand starting at position 2854 of SEQ ID NO: 1880339
ggugaaucccugcaaucuu

SEQ ID NO: 1959845 - RNA, 19 nt, Artificial Sequence
  Description of Artificial Sequence: Synthetic oligonucleotide
  Antisense strand to SEQ ID NO: 1959844
aagauugcagggauucacc

SEQ ID NO: 1959846 - RNA, 19 nt, Artificial Sequence
  Description of Artificial Sequence: Synthetic oligonucleotide
  Sense strand starting at position 2861 of SEQ ID NO: 1880339
cccugcaaucuuggaacuu

SEQ ID NO: 1959847 - RNA, 19 nt, Artificial Sequence
  Description of Artificial Sequence: Synthetic oligonucleotide
  Antisense strand to SEQ ID NO: 1959846
aaguuccaagauugcaggg

SEQ ID NO: 1959848 - RNA, 19 nt, Artificial Sequence
  Description of Artificial Sequence: Synthetic oligonucleotide
  Sense strand starting at position 2931 of SEQ ID NO: 1880339
ggcuuagagaguuggaagu

SEQ ID NO: 1959849 - RNA, 19 nt, Artificial Sequence
  Description of Artificial Sequence: Synthetic oligonucleotide
  Antisense strand to SEQ ID NO: 1959848
acuuccaacucucuaagcc

SEQ ID NO: 1959850 - RNA, 19 nt, Artificial Sequence
  Description of Artificial Sequence: Synthetic oligonucleotide
  Sense strand starting at position 2972 of SEQ ID NO: 1880339
gggaguauugagggaaggu

SEQ ID NO: 1959851 - RNA, 19 nt, Artificial Sequence
  Description of Artificial Sequence: Synthetic oligonucleotide
  Antisense strand to SEQ ID NO: 1959850
accuucccucaauacuccc

SEQ ID NO: 1959852 - RNA, 19 nt, Artificial Sequence
  Description of Artificial Sequence: Synthetic oligonucleotide
  Sense strand starting at position 2981 of SEQ ID NO: 1880339
gagggaaggugacauuuga

SEQ ID NO: 1959853 - RNA, 19 nt, Artificial Sequence
  Description of Artificial Sequence: Synthetic oligonucleotide
  Antisense strand to SEQ ID NO: 1959852
ucaaaugucaccuucccuc

SEQ ID NO: 1959854 - RNA, 19 nt, Artificial Sequence
  Description of Artificial Sequence: Synthetic oligonucleotide
  Sense strand starting at position 2988 of SEQ ID NO: 1880339
ggugacauuugagaaaguu

SEQ ID NO: 1959855 - RNA, 19 nt, Artificial Sequence
  Description of Artificial Sequence: Synthetic oligonucleotide
  Antisense strand to SEQ ID NO: 1959854
aacuuucucaaaugucacc

SEQ ID NO: 1959856 - RNA, 19 nt, Artificial Sequence
  Description of Artificial Sequence: Synthetic oligonucleotide
  Sense strand starting at position 3129 of SEQ ID NO: 1880339
gcagaaguuggccaucaca

SEQ ID NO: 1959857 - RNA, 19 nt, Artificial Sequence
  Description of Artificial Sequence: Synthetic oligonucleotide
  Antisense strand to SEQ ID NO: 1959856
ugugauggccaacuucugc

SEQ ID NO: 1959858 - RNA, 19 nt, Artificial Sequence
  Description of Artificial Sequence: Synthetic oligonucleotide
  Sense strand starting at position 3248 of SEQ ID NO: 1880339
gccuaaucuccaugggaac

SEQ ID NO: 1959859 - RNA, 19 nt, Artificial Sequence
  Description of Artificial Sequence: Synthetic oligonucleotide
  Antisense strand to SEQ ID NO: 1959858
guucccauggagauuaggc

SEQ ID NO: 1959860 - RNA, 19 nt, Artificial Sequence
  Description of Artificial Sequence: Synthetic oligonucleotide
  Sense strand starting at position 3249 of SEQ ID NO: 1880339
ccuaaucuccaugggaacu

SEQ ID NO: 1959861 - RNA, 19 nt, Artificial Sequence
  Description of Artificial Sequence: Synthetic oligonucleotide
  Antisense strand to SEQ ID NO: 1959860
aguucccauggagauuagg

SEQ ID NO: 1959862 - RNA, 19 nt, Artificial Sequence
  Description of Artificial Sequence: Synthetic oligonucleotide
  Sense strand starting at position 3300 of SEQ ID NO: 1880339
uaggaucgauguuuaagaa

SEQ ID NO: 1959863 - RNA, 19 nt, Artificial Sequence
  Description of Artificial Sequence: Synthetic oligonucleotide
  Antisense strand to SEQ ID NO: 1959862
uucuuaaacaucgauccua

SEQ ID NO: 1959864 - RNA, 19 nt, Artificial Sequence
  Description of Artificial Sequence: Synthetic oligonucleotide
  Sense strand starting at position 3323 of SEQ ID NO: 1880339
aaggaagacuucucuggca

SEQ ID NO: 1959865 - RNA, 19 nt, Artificial Sequence
  Description of Artificial Sequence: Synthetic oligonucleotide
  Antisense strand to SEQ ID NO: 1959864
ugccagagaagucuuccuu

SEQ ID NO: 1959866 - RNA, 19 nt, Artificial Sequence
  Description of Artificial Sequence: Synthetic oligonucleotide
  Sense strand starting at position 3325 of SEQ ID NO: 1880339
ggaagacuucucuggcagu

SEQ ID NO: 1959867 - RNA, 19 nt, Artificial Sequence
  Description of Artificial Sequence: Synthetic oligonucleotide
  Antisense strand to SEQ ID NO: 1959866
acugccagagaagucuucc

SEQ ID NO: 1959868 - RNA, 19 nt, Artificial Sequence
  Description of Artificial Sequence: Synthetic oligonucleotide
  Sense strand starting at position 3676 of SEQ ID NO: 1880339
aguacacugaaguguaaga

SEQ ID NO: 1959869 - RNA, 19 nt, Artificial Sequence
  Description of Artificial Sequence: Synthetic oligonucleotide
  Antisense strand to SEQ ID NO: 1959868
ucuuacacuucaguguacu

SEQ ID NO: 1959870 - RNA, 19 nt, Artificial Sequence
  Description of Artificial Sequence: Synthetic oligonucleotide
  Sense strand starting at position 3687 of SEQ ID NO: 1880339
guguaagaaaugcagguuu

SEQ ID NO: 1959871 - RNA, 19 nt, Artificial Sequence
  Description of Artificial Sequence: Synthetic oligonucleotide
  Antisense strand to SEQ ID NO: 1959870
aaaccugcauuucuuacac

SEQ ID NO: 1959872 - RNA, 19 nt, Artificial Sequence
  Description of Artificial Sequence: Synthetic oligonucleotide
  Sense strand starting at position 3808 of SEQ ID NO: 1880339
gcuugugugggccagauuu

SEQ ID NO: 1959873 - RNA, 19 nt, Artificial Sequence
  Description of Artificial Sequence: Synthetic oligonucleotide
  Antisense strand to SEQ ID NO: 1959872
aaaucuggcccacacaagc

SEQ ID NO: 1959874 - RNA, 19 nt, Artificial Sequence
  Description of Artificial Sequence: Synthetic oligonucleotide
  Sense strand starting at position 3864 of SEQ ID NO: 1880339
uaggguauuguugagauua

SEQ ID NO: 1959875 - RNA, 19 nt, Artificial Sequence
  Description of Artificial Sequence: Synthetic oligonucleotide
  Antisense strand to SEQ ID NO: 1959874
uaaucucaacaauacccua

SEQ ID NO: 1959876 - RNA, 19 nt, Artificial Sequence
  Description of Artificial Sequence: Synthetic oligonucleotide
  Sense strand starting at position 3872 of SEQ ID NO: 1880339
uguugagauuagguacuuu

SEQ ID NO: 1959877 - RNA, 19 nt, Artificial Sequence
  Description of Artificial Sequence: Synthetic oligonucleotide
  Antisense strand to SEQ ID NO: 1959876
aaaguaccuaaucucaaca

SEQ ID NO: 1959878 - RNA, 19 nt, Artificial Sequence
  Description of Artificial Sequence: Synthetic oligonucleotide
  Sense strand starting at position 22 of SEQ ID NO: 1880340
guacuuugucuauauuaac

SEQ ID NO: 1959879 - RNA, 19 nt, Artificial Sequence
  Description of Artificial Sequence: Synthetic oligonucleotide
  Antisense strand to SEQ ID NO: 1959878
guuaauauagacaaaguac

SEQ ID NO: 1959880 - RNA, 19 nt, Artificial Sequence
  Description of Artificial Sequence: Synthetic oligonucleotide
  Sense strand starting at position 45 of SEQ ID NO: 1880340
ugcaaauauguauauguga

SEQ ID NO: 1959881 - RNA, 19 nt, Artificial Sequence
  Description of Artificial Sequence: Synthetic oligonucleotide
  Antisense strand to SEQ ID NO: 1959880
ucacauauacauauuugca

SEQ ID NO: 1959882 - RNA, 19 nt, Artificial Sequence
  Description of Artificial Sequence: Synthetic oligonucleotide
  Sense strand starting at position 488 of SEQ ID NO: 1880340
accugaugucaugaucuau

SEQ ID NO: 1959883 - RNA, 19 nt, Artificial Sequence
  Description of Artificial Sequence: Synthetic oligonucleotide
  Antisense strand to SEQ ID NO: 1959882
auagaucaugacaucaggu

SEQ ID NO: 1959884 - RNA, 19 nt, Artificial Sequence
  Description of Artificial Sequence: Synthetic oligonucleotide
  Sense strand starting at position 494 of SEQ ID NO: 1880340
ugucaugaucuaugaauau

SEQ ID NO: 1959885 - RNA, 19 nt, Artificial Sequence
  Description of Artificial Sequence: Synthetic oligonucleotide
  Antisense strand to SEQ ID NO: 1959884
auauucauagaucaugaca

SEQ ID NO: 1959886 - RNA, 19 nt, Artificial Sequence
  Description of Artificial Sequence: Synthetic oligonucleotide
  Sense strand starting at position 624 of SEQ ID NO: 1880340
ugaugccuccacgauaacu

SEQ ID NO: 1959887 - RNA, 19 nt, Artificial Sequence
  Description of Artificial Sequence: Synthetic oligonucleotide
  Antisense strand to SEQ ID NO: 1959886
aguuaucguggaggcauca

SEQ ID NO: 1959888 - RNA, 19 nt, Artificial Sequence
  Description of Artificial Sequence: Synthetic oligonucleotide
  Sense strand starting at position 626 of SEQ ID NO: 1880340
augccuccacgauaacuaa

SEQ ID NO: 1959889 - RNA, 19 nt, Artificial Sequence
  Description of Artificial Sequence: Synthetic oligonucleotide
  Antisense strand to SEQ ID NO: 1959888
uuaguuaucguggaggcau

SEQ ID NO: 1959890 - RNA, 19 nt, Artificial Sequence
  Description of Artificial Sequence: Synthetic oligonucleotide
  Sense strand starting at position 653 of SEQ ID NO: 1880340
aguagaaguugggcuuaga

SEQ ID NO: 1959891 - RNA, 19 nt, Artificial Sequence
  Description of Artificial Sequence: Synthetic oligonucleotide
  Antisense strand to SEQ ID NO: 1959890
ucuaagcccaacuucuacu

SEQ ID NO: 1959892 - RNA, 19 nt, Artificial Sequence
  Description of Artificial Sequence: Synthetic oligonucleotide
  Sense strand starting at position 697 of SEQ ID NO: 1880340
ggguauguuguguucuugu

SEQ ID NO: 1959893 - RNA, 19 nt, Artificial Sequence
  Description of Artificial Sequence: Synthetic oligonucleotide
  Antisense strand to SEQ ID NO: 1959892
acaagaacacaacauaccc

SEQ ID NO: 1959894 - RNA, 19 nt, Artificial Sequence
  Description of Artificial Sequence: Synthetic oligonucleotide
  Sense strand starting at position 820 of SEQ ID NO: 1880340
gccauagaugcgucuuucu

SEQ ID NO: 1959895 - RNA, 19 nt, Artificial Sequence
  Description of Artificial Sequence: Synthetic oligonucleotide
  Antisense strand to SEQ ID NO: 1959894
agaaagacgcaucuauggc

SEQ ID NO: 1959896 - RNA, 19 nt, Artificial Sequence
  Description of Artificial Sequence: Synthetic oligonucleotide
  Sense strand starting at position 1091 of SEQ ID NO: 1880340
agaggcugucacuggagaa

SEQ ID NO: 1959897 - RNA, 19 nt, Artificial Sequence
  Description of Artificial Sequence: Synthetic oligonucleotide
  Antisense strand to SEQ ID NO: 1959896
uucuccagugacagccucu

SEQ ID NO: 1959898 - RNA, 19 nt, Artificial Sequence
  Description of Artificial Sequence: Synthetic oligonucleotide
  Sense strand starting at position 1092 of SEQ ID NO: 1880340
gaggcugucacuggagaau

SEQ ID NO: 1959899 - RNA, 19 nt, Artificial Sequence
  Description of Artificial Sequence: Synthetic oligonucleotide
  Antisense strand to SEQ ID NO: 1959898
auucuccagugacagccuc

SEQ ID NO: 1959900 - RNA, 19 nt, Artificial Sequence
  Description of Artificial Sequence: Synthetic oligonucleotide
  Sense strand starting at position 1101 of SEQ ID NO: 1880340
acuggagaauggucucacu

SEQ ID NO: 1959901 - RNA, 19 nt, Artificial Sequence
  Description of Artificial Sequence: Synthetic oligonucleotide
  Antisense strand to SEQ ID NO: 1959900
agugagaccauucuccagu

SEQ ID NO: 1959902 - RNA, 19 nt, Artificial Sequence
  Description of Artificial Sequence: Synthetic oligonucleotide
  Sense strand starting at position 1318 of SEQ ID NO: 1880340
caugcaguuuaagugauuu

SEQ ID NO: 1959903 - RNA, 19 nt, Artificial Sequence
  Description of Artificial Sequence: Synthetic oligonucleotide
  Antisense strand to SEQ ID NO: 1959902
aaaucacuuaaacugcaug

SEQ ID NO: 1959904 - RNA, 19 nt, Artificial Sequence
  Description of Artificial Sequence: Synthetic oligonucleotide
  Sense strand starting at position 1399 of SEQ ID NO: 1880340
aagagcauucuguaccaga

SEQ ID NO: 1959905 - RNA, 19 nt, Artificial Sequence
  Description of Artificial Sequence: Synthetic oligonucleotide
  Antisense strand to SEQ ID NO: 1959904
ucugguacagaaugcucuu

SEQ ID NO: 1959906 - RNA, 19 nt, Artificial Sequence
  Description of Artificial Sequence: Synthetic oligonucleotide
  Sense strand starting at position 1429 of SEQ ID NO: 1880340
gcuuuccuuguguuugcua

SEQ ID NO: 1959907 - RNA, 19 nt, Artificial Sequence
  Description of Artificial Sequence: Synthetic oligonucleotide
  Antisense strand to SEQ ID NO: 1959906
uagcaaacacaaggaaagc

SEQ ID NO: 1959908 - RNA, 19 nt, Artificial Sequence
  Description of Artificial Sequence: Synthetic oligonucleotide
  Sense strand starting at position 1485 of SEQ ID NO: 1880340
cuacuuuggcaacauagau

SEQ ID NO: 1959909 - RNA, 19 nt, Artificial Sequence
  Description of Artificial Sequence: Synthetic oligonucleotide
  Antisense strand to SEQ ID NO: 1959908
aucuauguugccaaaguag

SEQ ID NO: 1959910 - RNA, 19 nt, Artificial Sequence
  Description of Artificial Sequence: Synthetic oligonucleotide
  Sense strand starting at position 1847 of SEQ ID NO: 1880340
ugagaaucccuauguaggu

SEQ ID NO: 1959911 - RNA, 19 nt, Artificial Sequence
  Description of Artificial Sequence: Synthetic oligonucleotide
  Antisense strand to SEQ ID NO: 1959910
accuacauagggauucuca

SEQ ID NO: 1959912 - RNA, 19 nt, Artificial Sequence
  Description of Artificial Sequence: Synthetic oligonucleotide
  Sense strand starting at position 1848 of SEQ ID NO: 1880340
gagaaucccuauguaggua

SEQ ID NO: 1959913 - RNA, 19 nt, Artificial Sequence
  Description of Artificial Sequence: Synthetic oligonucleotide
  Antisense strand to SEQ ID NO: 1959912
uaccuacauagggauucuc

SEQ ID NO: 1959914 - RNA, 19 nt, Artificial Sequence
  Description of Artificial Sequence: Synthetic oligonucleotide
  Sense strand starting at position 1900 of SEQ ID NO: 1880340
cucaguagagagugguaua

SEQ ID NO: 1959915 - RNA, 19 nt, Artificial Sequence
  Description of Artificial Sequence: Synthetic oligonucleotide
  Antisense strand to SEQ ID NO: 1959914
uauaccacucucuacugag

SEQ ID NO: 1959916 - RNA, 19 nt, Artificial Sequence
  Description of Artificial Sequence: Synthetic oligonucleotide
  Sense strand starting at position 1901 of SEQ ID NO: 1880340
ucaguagagagugguauaa

SEQ ID NO: 1959917 - RNA, 19 nt, Artificial Sequence
  Description of Artificial Sequence: Synthetic oligonucleotide
  Antisense strand to SEQ ID NO: 1959916
uuauaccacucucuacuga

SEQ ID NO: 1959918 - RNA, 19 nt, Artificial Sequence
  Description of Artificial Sequence: Synthetic oligonucleotide
  Sense strand starting at position 1942 of SEQ ID NO: 1880340
ucaagauacuaagaagaaa

SEQ ID NO: 1959919 - RNA, 19 nt, Artificial Sequence
  Description of Artificial Sequence: Synthetic oligonucleotide
  Antisense strand to SEQ ID NO: 1959918
uuucuucuuaguaucuuga

SEQ ID NO: 1959920 - RNA, 19 nt, Artificial Sequence
  Description of Artificial Sequence: Synthetic oligonucleotide
  Sense strand starting at position 2080 of SEQ ID NO: 1880340
uguggaaauuaccucagau

SEQ ID NO: 1959921 - RNA, 19 nt, Artificial Sequence
  Description of Artificial Sequence: Synthetic oligonucleotide
  Antisense strand to SEQ ID NO: 1959920
aucugagguaauuuccaca

SEQ ID NO: 1959922 - RNA, 19 nt, Artificial Sequence
  Description of Artificial Sequence: Synthetic oligonucleotide
  Sense strand starting at position 2404 of SEQ ID NO: 1880340
uuucuagagguaugugaag

SEQ ID NO: 1959923 - RNA, 19 nt, Artificial Sequence
  Description of Artificial Sequence: Synthetic oligonucleotide
  Antisense strand to SEQ ID NO: 1959922
cuucacauaccucuagaaa

SEQ ID NO: 1959924 - RNA, 19 nt, Artificial Sequence
  Description of Artificial Sequence: Synthetic oligonucleotide
  Sense strand starting at position 2677 of SEQ ID NO: 1880340
ugauuaucugugugauaaa

SEQ ID NO: 1959925 - RNA, 19 nt, Artificial Sequence
  Description of Artificial Sequence: Synthetic oligonucleotide
  Antisense strand to SEQ ID NO: 1959924
uuuaucacacagauaauca

SEQ ID NO: 1959926 - RNA, 19 nt, Artificial Sequence
  Description of Artificial Sequence: Synthetic oligonucleotide
  Sense strand starting at position 2684 of SEQ ID NO: 1880340
cugugugauaaagaagguu

SEQ ID NO: 1959927 - RNA, 19 nt, Artificial Sequence
  Description of Artificial Sequence: Synthetic oligonucleotide
  Antisense strand to SEQ ID NO: 1959926
aaccuucuuuaucacacag

SEQ ID NO: 1959928 - RNA, 19 nt, Artificial Sequence
  Description of Artificial Sequence: Synthetic oligonucleotide
  Sense strand starting at position 3295 of SEQ ID NO: 1880340
agaugucuauaauugugaa

SEQ ID NO: 1959929 - RNA, 19 nt, Artificial Sequence
  Description of Artificial Sequence: Synthetic oligonucleotide
  Antisense strand to SEQ ID NO: 1959928
uucacaauuauagacaucu

SEQ ID NO: 1959930 - RNA, 19 nt, Artificial Sequence
  Description of Artificial Sequence: Synthetic oligonucleotide
  Sense strand starting at position 3308 of SEQ ID NO: 1880340
ugugaaauaucaguuaucu

SEQ ID NO: 1959931 - RNA, 19 nt, Artificial Sequence
  Description of Artificial Sequence: Synthetic oligonucleotide
  Antisense strand to SEQ ID NO: 1959930
agauaacugauauuucaca

SEQ ID NO: 1959932 - RNA, 19 nt, Artificial Sequence
  Description of Artificial Sequence: Synthetic oligonucleotide
  Sense strand starting at position 3327 of SEQ ID NO: 1880340
gcuaaagaaugggugucaa

SEQ ID NO: 1959933 - RNA, 19 nt, Artificial Sequence
  Description of Artificial Sequence: Synthetic oligonucleotide
  Antisense strand to SEQ ID NO: 1959932
uugacacccauucuuuagc

SEQ ID NO: 1959934 - RNA, 19 nt, Artificial Sequence
  Description of Artificial Sequence: Synthetic oligonucleotide
  Sense strand starting at position 3337 of SEQ ID NO: 1880340
gggugucaauaacugugaa

SEQ ID NO: 1959935 - RNA, 19 nt, Artificial Sequence
  Description of Artificial Sequence: Synthetic oligonucleotide
  Antisense strand to SEQ ID NO: 1959934
uucacaguuauugacaccc

SEQ ID NO: 1959936 - RNA, 19 nt, Artificial Sequence
  Description of Artificial Sequence: Synthetic oligonucleotide
  Sense strand starting at position 3338 of SEQ ID NO: 1880340
ggugucaauaacugugaag

SEQ ID NO: 1959937 - RNA, 19 nt, Artificial Sequence
  Description of Artificial Sequence: Synthetic oligonucleotide
  Antisense strand to SEQ ID NO: 1959936
cuucacaguuauugacacc

SEQ ID NO: 1959938 - RNA, 19 nt, Artificial Sequence
  Description of Artificial Sequence: Synthetic oligonucleotide
  Sense strand starting at position 3442 of SEQ ID NO: 1880340
gucagagacaaaugauagu

SEQ ID NO: 1959939 - RNA, 19 nt, Artificial Sequence
  Description of Artificial Sequence: Synthetic oligonucleotide
  Antisense strand to SEQ ID NO: 1959938
acuaucauuugucucugac

SEQ ID NO: 1959940 - RNA, 19 nt, Artificial Sequence
  Description of Artificial Sequence: Synthetic oligonucleotide
  Sense strand starting at position 3503 of SEQ ID NO: 1880340
ugagcccuauuccuauaga

SEQ ID NO: 1959941 - RNA, 19 nt, Artificial Sequence
  Description of Artificial Sequence: Synthetic oligonucleotide
  Antisense strand to SEQ ID NO: 1959940
ucuauaggaauagggcuca

SEQ ID NO: 1959942 - RNA, 19 nt, Artificial Sequence
  Description of Artificial Sequence: Synthetic oligonucleotide
  Sense strand starting at position 3514 of SEQ ID NO: 1880340
ccuauagagcaauguuaag

SEQ ID NO: 1959943 - RNA, 19 nt, Artificial Sequence
  Description of Artificial Sequence: Synthetic oligonucleotide
  Antisense strand to SEQ ID NO: 1959942
cuuaacauugcucuauagg

SEQ ID NO: 1959944 - RNA, 19 nt, Artificial Sequence
  Description of Artificial Sequence: Synthetic oligonucleotide
  Sense strand starting at position 3523 of SEQ ID NO: 1880340
caauguuaagagggcuaga

SEQ ID NO: 1959945 - RNA, 19 nt, Artificial Sequence
  Description of Artificial Sequence: Synthetic oligonucleotide
  Antisense strand to SEQ ID NO: 1959944
ucuagcccucuuaacauug

SEQ ID NO: 1959946 - RNA, 19 nt, Artificial Sequence
  Description of Artificial Sequence: Synthetic oligonucleotide
  Sense strand starting at position 3576 of SEQ ID NO: 1880340
gaggcauucugaguuuaaa

SEQ ID NO: 1959947 - RNA, 19 nt, Artificial Sequence
  Description of Artificial Sequence: Synthetic oligonucleotide
  Antisense strand to SEQ ID NO: 1959946
uuuaaacucagaaugccuc

SEQ ID NO: 1959948 - RNA, 19 nt, Artificial Sequence
  Description of Artificial Sequence: Synthetic oligonucleotide
  Sense strand starting at position 3579 of SEQ ID NO: 1880340
gcauucugaguuuaaagaa

SEQ ID NO: 1959949 - RNA, 19 nt, Artificial Sequence
  Description of Artificial Sequence: Synthetic oligonucleotide
  Antisense strand to SEQ ID NO: 1959948
uucuuuaaacucagaaugc

SEQ ID NO: 1959950 - RNA, 19 nt, Artificial Sequence
  Description of Artificial Sequence: Synthetic oligonucleotide
  Sense strand starting at position 3693 of SEQ ID NO: 1880340
auagcaguaauucgagaga

SEQ ID NO: 1959951 - RNA, 19 nt, Artificial Sequence
  Description of Artificial Sequence: Synthetic oligonucleotide
  Antisense strand to SEQ ID NO: 1959950
ucucucgaauuacugcuau

SEQ ID NO: 1959952 - RNA, 19 nt, Artificial Sequence
  Description of Artificial Sequence: Synthetic oligonucleotide
  Sense strand starting at position 3696 of SEQ ID NO: 1880340
gcaguaauucgagagaacc

SEQ ID NO: 1959953 - RNA, 19 nt, Artificial Sequence
  Description of Artificial Sequence: Synthetic oligonucleotide
  Antisense strand to SEQ ID NO: 1959952
gguucucucgaauuacugc

SEQ ID NO: 1959954 - RNA, 19 nt, Artificial Sequence
  Description of Artificial Sequence: Synthetic oligonucleotide
  Sense strand starting at position 3714 of SEQ ID NO: 1880340
cauggagaauugucuucua

SEQ ID NO: 1959955 - RNA, 19 nt, Artificial Sequence
  Description of Artificial Sequence: Synthetic oligonucleotide
  Antisense strand to SEQ ID NO: 1959954
uagaagacaauucuccaug

SEQ ID NO: 1959956 - RNA, 19 nt, Artificial Sequence
  Description of Artificial Sequence: Synthetic oligonucleotide
  Sense strand starting at position 3717 of SEQ ID NO: 1880340
ggagaauugucuucuaaca

SEQ ID NO: 1959957 - RNA, 19 nt, Artificial Sequence
  Description of Artificial Sequence: Synthetic oligonucleotide
  Antisense strand to SEQ ID NO: 1959956
uguuagaagacaauucucc

SEQ ID NO: 1959958 - RNA, 19 nt, Artificial Sequence
  Description of Artificial Sequence: Synthetic oligonucleotide
  Sense strand starting at position 29 of SEQ ID NO: 1880341
cugauaaacggauacguaa

SEQ ID NO: 1959959 - RNA, 19 nt, Artificial Sequence
  Description of Artificial Sequence: Synthetic oligonucleotide
  Antisense strand to SEQ ID NO: 1959958
uuacguauccguuuaucag

SEQ ID NO: 1959960 - RNA, 19 nt, Artificial Sequence
  Description of Artificial Sequence: Synthetic oligonucleotide
  Sense strand starting at position 93 of SEQ ID NO: 1880341
aauucugaugcaugugaca

SEQ ID NO: 1959961 - RNA, 19 nt, Artificial Sequence
  Description of Artificial Sequence: Synthetic oligonucleotide
  Antisense strand to SEQ ID NO: 1959960
ugucacaugcaucagaauu

SEQ ID NO: 1959962 - RNA, 19 nt, Artificial Sequence
  Description of Artificial Sequence: Synthetic oligonucleotide
  Sense strand starting at position 225 of SEQ ID NO: 1880341
acagacuagugguugcuua

SEQ ID NO: 1959963 - RNA, 19 nt, Artificial Sequence
  Description of Artificial Sequence: Synthetic oligonucleotide
  Antisense strand to SEQ ID NO: 1959962
uaagcaaccacuagucugu

SEQ ID NO: 1959964 - RNA, 19 nt, Artificial Sequence
  Description of Artificial Sequence: Synthetic oligonucleotide
  Sense strand starting at position 263 of SEQ ID NO: 1880341
uacugaggugacugcuuaa

SEQ ID NO: 1959965 - RNA, 19 nt, Artificial Sequence
  Description of Artificial Sequence: Synthetic oligonucleotide
  Antisense strand to SEQ ID NO: 1959964
uuaagcagucaccucagua

SEQ ID NO: 1959966 - RNA, 19 nt, Artificial Sequence
  Description of Artificial Sequence: Synthetic oligonucleotide
  Sense strand starting at position 329 of SEQ ID NO: 1880341
ugugguagugauuacaugu

SEQ ID NO: 1959967 - RNA, 19 nt, Artificial Sequence
  Description of Artificial Sequence: Synthetic oligonucleotide
  Antisense strand to SEQ ID NO: 1959966
acauguaaucacuaccaca

SEQ ID NO: 1959968 - RNA, 19 nt, Artificial Sequence
  Description of Artificial Sequence: Synthetic oligonucleotide
  Sense strand starting at position 335 of SEQ ID NO: 1880341
agugauuacauguaucugu

SEQ ID NO: 1959969 - RNA, 19 nt, Artificial Sequence
  Description of Artificial Sequence: Synthetic oligonucleotide
  Antisense strand to SEQ ID NO: 1959968
acagauacauguaaucacu

SEQ ID NO: 1959970 - RNA, 19 nt, Artificial Sequence
  Description of Artificial Sequence: Synthetic oligonucleotide
  Sense strand starting at position 338 of SEQ ID NO: 1880341
gauuacauguaucugugaa

SEQ ID NO: 1959971 - RNA, 19 nt, Artificial Sequence
  Description of Artificial Sequence: Synthetic oligonucleotide
  Antisense strand to SEQ ID NO: 1959970
uucacagauacauguaauc

SEQ ID NO: 1959972 - RNA, 19 nt, Artificial Sequence
  Description of Artificial Sequence: Synthetic oligonucleotide
  Sense strand starting at position 340 of SEQ ID NO: 1880341
uuacauguaucugugaaug

SEQ ID NO: 1959973 - RNA, 19 nt, Artificial Sequence
  Description of Artificial Sequence: Synthetic oligonucleotide
  Antisense strand to SEQ ID NO: 1959972
cauucacagauacauguaa

SEQ ID NO: 1959974 - RNA, 19 nt, Artificial Sequence
  Description of Artificial Sequence: Synthetic oligonucleotide
  Sense strand starting at position 345 of SEQ ID NO: 1880341
uguaucugugaaugcauua

SEQ ID NO: 1959975 - RNA, 19 nt, Artificial Sequence
  Description of Artificial Sequence: Synthetic oligonucleotide
  Antisense strand to SEQ ID NO: 1959974
uaaugcauucacagauaca

SEQ ID NO: 1959976 - RNA, 19 nt, Artificial Sequence
  Description of Artificial Sequence: Synthetic oligonucleotide
  Sense strand starting at position 350 of SEQ ID NO: 1880341
cugugaaugcauuaaauau

SEQ ID NO: 1959977 - RNA, 19 nt, Artificial Sequence
  Description of Artificial Sequence: Synthetic oligonucleotide
  Antisense strand to SEQ ID NO: 1959976
auauuuaaugcauucacag

SEQ ID NO: 1959978 - RNA, 19 nt, Artificial Sequence
  Description of Artificial Sequence: Synthetic oligonucleotide
  Sense strand starting at position 463 of SEQ ID NO: 1880341
acugauguauguuuagaau

SEQ ID NO: 1959979 - RNA, 19 nt, Artificial Sequence
  Description of Artificial Sequence: Synthetic oligonucleotide
  Antisense strand to SEQ ID NO: 1959978
auucuaaacauacaucagu

SEQ ID NO: 1959980 - RNA, 19 nt, Artificial Sequence
  Description of Artificial Sequence: Synthetic oligonucleotide
  Sense strand starting at position 469 of SEQ ID NO: 1880341
guauguuuagaauaugcuu

SEQ ID NO: 1959981 - RNA, 19 nt, Artificial Sequence
  Description of Artificial Sequence: Synthetic oligonucleotide
  Antisense strand to SEQ ID NO: 1959980
aagcauauucuaaacauac

SEQ ID NO: 1959982 - RNA, 19 nt, Artificial Sequence
  Description of Artificial Sequence: Synthetic oligonucleotide
  Sense strand starting at position 533 of SEQ ID NO: 1880341
guggcaaaucuugauaguu

SEQ ID NO: 1959983 - RNA, 19 nt, Artificial Sequence
  Description of Artificial Sequence: Synthetic oligonucleotide
  Antisense strand to SEQ ID NO: 1959982
aacuaucaagauuugccac

SEQ ID NO: 1959984 - RNA, 19 nt, Artificial Sequence
  Description of Artificial Sequence: Synthetic oligonucleotide
  Sense strand starting at position 622 of SEQ ID NO: 1880341
ggaugaggcugacuguuaa

SEQ ID NO: 1959985 - RNA, 19 nt, Artificial Sequence
  Description of Artificial Sequence: Synthetic oligonucleotide
  Antisense strand to SEQ ID NO: 1959984
uuaacagucagccucaucc

SEQ ID NO: 1959986 - RNA, 19 nt, Artificial Sequence
  Description of Artificial Sequence: Synthetic oligonucleotide
  Sense strand starting at position 817 of SEQ ID NO: 1880341
ucugaacaaucugugguuu

SEQ ID NO: 1959987 - RNA, 19 nt, Artificial Sequence
  Description of Artificial Sequence: Synthetic oligonucleotide
  Antisense strand to SEQ ID NO: 1959986
aaaccacagauuguucaga

SEQ ID NO: 1959988 - RNA, 19 nt, Artificial Sequence
  Description of Artificial Sequence: Synthetic oligonucleotide
  Sense strand starting at position 853 of SEQ ID NO: 1880341
ugcuuuaaguugguauuua

SEQ ID NO: 1959989 - RNA, 19 nt, Artificial Sequence
  Description of Artificial Sequence: Synthetic oligonucleotide
  Antisense strand to SEQ ID NO: 1959988
uaaauaccaacuuaaagca

SEQ ID NO: 1959990 - RNA, 19 nt, Artificial Sequence
  Description of Artificial Sequence: Synthetic oligonucleotide
  Sense strand starting at position 927 of SEQ ID NO: 1880341
uuuacugccuagucuuauu

SEQ ID NO: 1959991 - RNA, 19 nt, Artificial Sequence
  Description of Artificial Sequence: Synthetic oligonucleotide
  Antisense strand to SEQ ID NO: 1959990
aauaagacuaggcaguaaa

SEQ ID NO: 1959992 - RNA, 19 nt, Artificial Sequence
  Description of Artificial Sequence: Synthetic oligonucleotide
  Sense strand starting at position 932 of SEQ ID NO: 1880341
ugccuagucuuauuucgga

SEQ ID NO: 1959993 - RNA, 19 nt, Artificial Sequence
  Description of Artificial Sequence: Synthetic oligonucleotide
  Antisense strand to SEQ ID NO: 1959992
uccgaaauaagacuaggca

SEQ ID NO: 1959994 - RNA, 19 nt, Artificial Sequence
  Description of Artificial Sequence: Synthetic oligonucleotide
  Sense strand starting at position 937 of SEQ ID NO: 1880341
agucuuauuucggacccau

SEQ ID NO: 1959995 - RNA, 19 nt, Artificial Sequence
  Description of Artificial Sequence: Synthetic oligonucleotide
  Antisense strand to SEQ ID NO: 1959994
auggguccgaaauaagacu

SEQ ID NO: 1959996 - RNA, 19 nt, Artificial Sequence
  Description of Artificial Sequence: Synthetic oligonucleotide
  Sense strand starting at position 986 of SEQ ID NO: 1880341
guaggcaugugguucuaua

SEQ ID NO: 1959997 - RNA, 19 nt, Artificial Sequence
  Description of Artificial Sequence: Synthetic oligonucleotide
  Antisense strand to SEQ ID NO: 1959996
uauagaaccacaugccuac

SEQ ID NO: 1959998 - RNA, 19 nt, Artificial Sequence
  Description of Artificial Sequence: Synthetic oligonucleotide
  Sense strand starting at position 1021 of SEQ ID NO: 1880341
ucaacagugaggugaauua

SEQ ID NO: 1959999 - RNA, 19 nt, Artificial Sequence
  Description of Artificial Sequence: Synthetic oligonucleotide
  Antisense strand to SEQ ID NO: 1959998
uaauucaccucacuguuga

SEQ ID NO: 1960000 - RNA, 19 nt, Artificial Sequence
  Description of Artificial Sequence: Synthetic oligonucleotide
  Sense strand starting at position 1204 of SEQ ID NO: 1880341
acucuuaggcuuuaaguua

SEQ ID NO: 1960001 - RNA, 19 nt, Artificial Sequence
  Description of Artificial Sequence: Synthetic oligonucleotide
  Antisense strand to SEQ ID NO: 1960000
uaacuuaaagccuaagagu

SEQ ID NO: 1960002 - RNA, 19 nt, Artificial Sequence
  Description of Artificial Sequence: Synthetic oligonucleotide
  Sense strand starting at position 1308 of SEQ ID NO: 1880341
ggcuuaaugaggugaccaa

SEQ ID NO: 1960003 - RNA, 19 nt, Artificial Sequence
  Description of Artificial Sequence: Synthetic oligonucleotide
  Antisense strand to SEQ ID NO: 1960002
uuggucaccucauuaagcc

SEQ ID NO: 1960004 - RNA, 19 nt, Artificial Sequence
  Description of Artificial Sequence: Synthetic oligonucleotide
  Sense strand starting at position 1333 of SEQ ID NO: 1880341
gaauaauuguuuccaggua

SEQ ID NO: 1960005 - RNA, 19 nt, Artificial Sequence
  Description of Artificial Sequence: Synthetic oligonucleotide
  Antisense strand to SEQ ID NO: 1960004
uaccuggaaacaauuauuc

SEQ ID NO: 1960006 - RNA, 19 nt, Artificial Sequence
  Description of Artificial Sequence: Synthetic oligonucleotide
  Sense strand starting at position 2018 of SEQ ID NO: 1880341
cggcuucucccaggaacua

SEQ ID NO: 1960007 - RNA, 19 nt, Artificial Sequence
  Description of Artificial Sequence: Synthetic oligonucleotide
  Antisense strand to SEQ ID NO: 1960006
uaguuccugggagaagccg

SEQ ID NO: 1960008 - RNA, 19 nt, Artificial Sequence
  Description of Artificial Sequence: Synthetic oligonucleotide
  Sense strand starting at position 2483 of SEQ ID NO: 1880341
cugggauugaguuacucuu

SEQ ID NO: 1960009 - RNA, 19 nt, Artificial Sequence
  Description of Artificial Sequence: Synthetic oligonucleotide
  Antisense strand to SEQ ID NO: 1960008
aagaguaacucaaucccag

SEQ ID NO: 1960010 - RNA, 19 nt, Artificial Sequence
  Description of Artificial Sequence: Synthetic oligonucleotide
  Sense strand starting at position 2495 of SEQ ID NO: 1880341
uacucuuucccggaggcuu

SEQ ID NO: 1960011 - RNA, 19 nt, Artificial Sequence
  Description of Artificial Sequence: Synthetic oligonucleotide
  Antisense strand to SEQ ID NO: 1960010
aagccuccgggaaagagua

SEQ ID NO: 1960012 - RNA, 19 nt, Artificial Sequence
  Description of Artificial Sequence: Synthetic oligonucleotide
  Sense strand starting at position 2642 of SEQ ID NO: 1880341
cuaagauauuccucgucga

SEQ ID NO: 1960013 - RNA, 19 nt, Artificial Sequence
  Description of Artificial Sequence: Synthetic oligonucleotide
  Antisense strand to SEQ ID NO: 1960012
ucgacgaggaauaucuuag

SEQ ID NO: 1960014 - RNA, 19 nt, Artificial Sequence
  Description of Artificial Sequence: Synthetic oligonucleotide
  Sense strand starting at position 2643 of SEQ ID NO: 1880341
uaagauauuccucgucgau

SEQ ID NO: 1960015 - RNA, 19 nt, Artificial Sequence
  Description of Artificial Sequence: Synthetic oligonucleotide
  Antisense strand to SEQ ID NO: 1960014
aucgacgaggaauaucuua

SEQ ID NO: 1960016 - RNA, 19 nt, Artificial Sequence
  Description of Artificial Sequence: Synthetic oligonucleotide
  Sense strand starting at position 2645 of SEQ ID NO: 1880341
agauauuccucgucgaugu

SEQ ID NO: 1960017 - RNA, 19 nt, Artificial Sequence
  Description of Artificial Sequence: Synthetic oligonucleotide
  Antisense strand to SEQ ID NO: 1960016
acaucgacgaggaauaucu

SEQ ID NO: 1960018 - RNA, 19 nt, Artificial Sequence
  Description of Artificial Sequence: Synthetic oligonucleotide
  Sense strand starting at position 2655 of SEQ ID NO: 1880341
cgucgaugucucuaaguaa

SEQ ID NO: 1960019 - RNA, 19 nt, Artificial Sequence
  Description of Artificial Sequence: Synthetic oligonucleotide
  Antisense strand to SEQ ID NO: 1960018
uuacuuagagacaucgacg

SEQ ID NO: 1960020 - RNA, 19 nt, Artificial Sequence
  Description of Artificial Sequence: Synthetic oligonucleotide
  Sense strand starting at position 3074 of SEQ ID NO: 1880341
augaauuggccuugucugu

SEQ ID NO: 1960021 - RNA, 19 nt, Artificial Sequence
  Description of Artificial Sequence: Synthetic oligonucleotide
  Antisense strand to SEQ ID NO: 1960020
acagacaaggccaauucau

SEQ ID NO: 1960022 - RNA, 19 nt, Artificial Sequence
  Description of Artificial Sequence: Synthetic oligonucleotide
  Sense strand starting at position 3459 of SEQ ID NO: 1880341
ugaugacauuaagugagua

SEQ ID NO: 1960023 - RNA, 19 nt, Artificial Sequence
  Description of Artificial Sequence: Synthetic oligonucleotide
  Antisense strand to SEQ ID NO: 1960022
uacucacuuaaugucauca

SEQ ID NO: 1960024 - RNA, 19 nt, Artificial Sequence
  Description of Artificial Sequence: Synthetic oligonucleotide
  Sense strand starting at position 3463 of SEQ ID NO: 1880341
gacauuaagugaguacuua

SEQ ID NO: 1960025 - RNA, 19 nt, Artificial Sequence
  Description of Artificial Sequence: Synthetic oligonucleotide
  Antisense strand to SEQ ID NO: 1960024
uaaguacucacuuaauguc

SEQ ID NO: 1960026 - RNA, 19 nt, Artificial Sequence
  Description of Artificial Sequence: Synthetic oligonucleotide
  Sense strand starting at position 3467 of SEQ ID NO: 1880341
uuaagugaguacuuacagu

SEQ ID NO: 1960027 - RNA, 19 nt, Artificial Sequence
  Description of Artificial Sequence: Synthetic oligonucleotide
  Antisense strand to SEQ ID NO: 1960026
acuguaaguacucacuuaa

SEQ ID NO: 1960028 - RNA, 19 nt, Artificial Sequence
  Description of Artificial Sequence: Synthetic oligonucleotide
  Sense strand starting at position 3504 of SEQ ID NO: 1880341
gucacaguuuaaguguuua

SEQ ID NO: 1960029 - RNA, 19 nt, Artificial Sequence
  Description of Artificial Sequence: Synthetic oligonucleotide
  Antisense strand to SEQ ID NO: 1960028
uaaacacuuaaacugugac

SEQ ID NO: 1960030 - RNA, 19 nt, Artificial Sequence
  Description of Artificial Sequence: Synthetic oligonucleotide
  Sense strand starting at position 3508 of SEQ ID NO: 1880341
caguuuaaguguuuaguaa

SEQ ID NO: 1960031 - RNA, 19 nt, Artificial Sequence
  Description of Artificial Sequence: Synthetic oligonucleotide
  Antisense strand to SEQ ID NO: 1960030
uuacuaaacacuuaaacug

SEQ ID NO: 1960032 - RNA, 19 nt, Artificial Sequence
  Description of Artificial Sequence: Synthetic oligonucleotide
  Sense strand starting at position 3614 of SEQ ID NO: 1880341
gguagagugcuuuguauau

SEQ ID NO: 1960033 - RNA, 19 nt, Artificial Sequence
  Description of Artificial Sequence: Synthetic oligonucleotide
  Antisense strand to SEQ ID NO: 1960032
auauacaaagcacucuacc

SEQ ID NO: 1960034 - RNA, 19 nt, Artificial Sequence
  Description of Artificial Sequence: Synthetic oligonucleotide
  Sense strand starting at position 3636 of SEQ ID NO: 1880341
uagagagugcuacaauagu

SEQ ID NO: 1960035 - RNA, 19 nt, Artificial Sequence
  Description of Artificial Sequence: Synthetic oligonucleotide
  Antisense strand to SEQ ID NO: 1960034
acuauuguagcacucucua

SEQ ID NO: 1960036 - RNA, 19 nt, Artificial Sequence
  Description of Artificial Sequence: Synthetic oligonucleotide
  Sense strand starting at position 3674 of SEQ ID NO: 1880341
ugcagcugucacugagaaa

SEQ ID NO: 1960037 - RNA, 19 nt, Artificial Sequence
  Description of Artificial Sequence: Synthetic oligonucleotide
  Antisense strand to SEQ ID NO: 1960036
uuucucagugacagcugca

SEQ ID NO: 1960038 - RNA, 19 nt, Artificial Sequence
  Description of Artificial Sequence: Synthetic oligonucleotide
  Sense strand starting at position 159 of SEQ ID NO: 1880342
gucaucuaauacuuggagu

SEQ ID NO: 1960039 - RNA, 19 nt, Artificial Sequence
  Description of Artificial Sequence: Synthetic oligonucleotide
  Antisense strand to SEQ ID NO: 1960038
acuccaaguauuagaugac

SEQ ID NO: 1960040 - RNA, 19 nt, Artificial Sequence
  Description of Artificial Sequence: Synthetic oligonucleotide
  Sense strand starting at position 207 of SEQ ID NO: 1880342
uuuccuguuugauuguuaa

SEQ ID NO: 1960041 - RNA, 19 nt, Artificial Sequence
  Description of Artificial Sequence: Synthetic oligonucleotide
  Antisense strand to SEQ ID NO: 1960040
uuaacaaucaaacaggaaa

SEQ ID NO: 1960042 - RNA, 19 nt, Artificial Sequence
  Description of Artificial Sequence: Synthetic oligonucleotide
  Sense strand starting at position 210 of SEQ ID NO: 1880342
ccuguuugauuguuaagag

SEQ ID NO: 1960043 - RNA, 19 nt, Artificial Sequence
  Description of Artificial Sequence: Synthetic oligonucleotide
  Antisense strand to SEQ ID NO: 1960042
cucuuaacaaucaaacagg

SEQ ID NO: 1960044 - RNA, 19 nt, Artificial Sequence
  Description of Artificial Sequence: Synthetic oligonucleotide
  Sense strand starting at position 250 of SEQ ID NO: 1880342
ggaaguugcagagauguau

SEQ ID NO: 1960045 - RNA, 19 nt, Artificial Sequence
  Description of Artificial Sequence: Synthetic oligonucleotide
  Antisense strand to SEQ ID NO: 1960044
auacaucucugcaacuucc

SEQ ID NO: 1960046 - RNA, 19 nt, Artificial Sequence
  Description of Artificial Sequence: Synthetic oligonucleotide
  Sense strand starting at position 279 of SEQ ID NO: 1880342
ugaagaacuuccuucuuga

SEQ ID NO: 1960047 - RNA, 19 nt, Artificial Sequence
  Description of Artificial Sequence: Synthetic oligonucleotide
  Antisense strand to SEQ ID NO: 1960046
ucaagaaggaaguucuuca

SEQ ID NO: 1960048 - RNA, 19 nt, Artificial Sequence
  Description of Artificial Sequence: Synthetic oligonucleotide
  Sense strand starting at position 322 of SEQ ID NO: 1880342
gcccuauaugcagauaauu

SEQ ID NO: 1960049 - RNA, 19 nt, Artificial Sequence
  Description of Artificial Sequence: Synthetic oligonucleotide
  Antisense strand to SEQ ID NO: 1960048
aauuaucugcauauagggc

SEQ ID NO: 1960050 - RNA, 19 nt, Artificial Sequence
  Description of Artificial Sequence: Synthetic oligonucleotide
  Sense strand starting at position 330 of SEQ ID NO: 1880342
ugcagauaauugcccauua

SEQ ID NO: 1960051 - RNA, 19 nt, Artificial Sequence
  Description of Artificial Sequence: Synthetic oligonucleotide
  Antisense strand to SEQ ID NO: 1960050
uaaugggcaauuaucugca

SEQ ID NO: 1960052 - RNA, 19 nt, Artificial Sequence
  Description of Artificial Sequence: Synthetic oligonucleotide
  Sense strand starting at position 331 of SEQ ID NO: 1880342
gcagauaauugcccauuau

SEQ ID NO: 1960053 - RNA, 19 nt, Artificial Sequence
  Description of Artificial Sequence: Synthetic oligonucleotide
  Antisense strand to SEQ ID NO: 1960052
auaaugggcaauuaucugc

SEQ ID NO: 1960054 - RNA, 19 nt, Artificial Sequence
  Description of Artificial Sequence: Synthetic oligonucleotide
  Sense strand starting at position 461 of SEQ ID NO: 1880342
agaaauauuugagaucuug

SEQ ID NO: 1960055 - RNA, 19 nt, Artificial Sequence
  Description of Artificial Sequence: Synthetic oligonucleotide
  Antisense strand to SEQ ID NO: 1960054
caagaucucaaauauuucu

SEQ ID NO: 1960056 - RNA, 19 nt, Artificial Sequence
  Description of Artificial Sequence: Synthetic oligonucleotide
  Sense strand starting at position 471 of SEQ ID NO: 1880342
gagaucuuguaguccagac

SEQ ID NO: 1960057 - RNA, 19 nt, Artificial Sequence
  Description of Artificial Sequence: Synthetic oligonucleotide
  Antisense strand to SEQ ID NO: 1960056
gucuggacuacaagaucuc

SEQ ID NO: 1960058 - RNA, 19 nt, Artificial Sequence
  Description of Artificial Sequence: Synthetic oligonucleotide
  Sense strand starting at position 495 of SEQ ID NO: 1880342
ccuuauaggccuggacaga

SEQ ID NO: 1960059 - RNA, 19 nt, Artificial Sequence
  Description of Artificial Sequence: Synthetic oligonucleotide
  Antisense strand to SEQ ID NO: 1960058
ucuguccaggccuauaagg

SEQ ID NO: 1960060 - RNA, 19 nt, Artificial Sequence
  Description of Artificial Sequence: Synthetic oligonucleotide
  Sense strand starting at position 533 of SEQ ID NO: 1880342
cagcacaucuguucuggaa

SEQ ID NO: 1960061 - RNA, 19 nt, Artificial Sequence
  Description of Artificial Sequence: Synthetic oligonucleotide
  Antisense strand to SEQ ID NO: 1960060
uuccagaacagaugugcug

SEQ ID NO: 1960062 - RNA, 19 nt, Artificial Sequence
  Description of Artificial Sequence: Synthetic oligonucleotide
  Sense strand starting at position 681 of SEQ ID NO: 1880342
acgagaucgcauuacaugu

SEQ ID NO: 1960063 - RNA, 19 nt, Artificial Sequence
  Description of Artificial Sequence: Synthetic oligonucleotide
  Antisense strand to SEQ ID NO: 1960062
acauguaaugcgaucucgu

SEQ ID NO: 1960064 - RNA, 19 nt, Artificial Sequence
  Description of Artificial Sequence: Synthetic oligonucleotide
  Sense strand starting at position 694 of SEQ ID NO: 1880342
acaugugcacgccauuaaa

SEQ ID NO: 1960065 - RNA, 19 nt, Artificial Sequence
  Description of Artificial Sequence: Synthetic oligonucleotide
  Antisense strand to SEQ ID NO: 1960064
uuuaauggcgugcacaugu

SEQ ID NO: 1960066 - RNA, 19 nt, Artificial Sequence
  Description of Artificial Sequence: Synthetic oligonucleotide
  Sense strand starting at position 793 of SEQ ID NO: 1880342
acauguuagccagaggcau

SEQ ID NO: 1960067 - RNA, 19 nt, Artificial Sequence
  Description of Artificial Sequence: Synthetic oligonucleotide
  Antisense strand to SEQ ID NO: 1960066
augccucuggcuaacaugu

SEQ ID NO: 1960068 - RNA, 19 nt, Artificial Sequence
  Description of Artificial Sequence: Synthetic oligonucleotide
  Sense strand starting at position 821 of SEQ ID NO: 1880342
auaacaguauauccuagua

SEQ ID NO: 1960069 - RNA, 19 nt, Artificial Sequence
  Description of Artificial Sequence: Synthetic oligonucleotide
  Antisense strand to SEQ ID NO: 1960068
uacuaggauauacuguuau

SEQ ID NO: 1960070 - RNA, 19 nt, Artificial Sequence
  Description of Artificial Sequence: Synthetic oligonucleotide
  Sense strand starting at position 903 of SEQ ID NO: 1880342
auuaaaggcucugcaauau

SEQ ID NO: 1960071 - RNA, 19 nt, Artificial Sequence
  Description of Artificial Sequence: Synthetic oligonucleotide
  Antisense strand to SEQ ID NO: 1960070
auauugcagagccuuuaau

SEQ ID NO: 1960072 - RNA, 19 nt, Artificial Sequence
  Description of Artificial Sequence: Synthetic oligonucleotide
  Sense strand starting at position 913 of SEQ ID NO: 1880342
cugcaauauucuguaguaa

SEQ ID NO: 1960073 - RNA, 19 nt, Artificial Sequence
  Description of Artificial Sequence: Synthetic oligonucleotide
  Antisense strand to SEQ ID NO: 1960072
uuacuacagaauauugcag

SEQ ID NO: 1960074 - RNA, 19 nt, Artificial Sequence
  Description of Artificial Sequence: Synthetic oligonucleotide
  Sense strand starting at position 914 of SEQ ID NO: 1880342
ugcaauauucuguaguaaa

SEQ ID NO: 1960075 - RNA, 19 nt, Artificial Sequence
  Description of Artificial Sequence: Synthetic oligonucleotide
  Antisense strand to SEQ ID NO: 1960074
uuuacuacagaauauugca

SEQ ID NO: 1960076 - RNA, 19 nt, Artificial Sequence
  Description of Artificial Sequence: Synthetic oligonucleotide
  Sense strand starting at position 927 of SEQ ID NO: 1880342
aguaaaguuuaaccacgaa

SEQ ID NO: 1960077 - RNA, 19 nt, Artificial Sequence
  Description of Artificial Sequence: Synthetic oligonucleotide
  Antisense strand to SEQ ID NO: 1960076
uucgugguuaaacuuuacu

SEQ ID NO: 1960078 - RNA, 19 nt, Artificial Sequence
  Description of Artificial Sequence: Synthetic oligonucleotide
  Sense strand starting at position 1024 of SEQ ID NO: 1880342
aggcuuuggcaguacauua

SEQ ID NO: 1960079 - RNA, 19 nt, Artificial Sequence
  Description of Artificial Sequence: Synthetic oligonucleotide
  Antisense strand to SEQ ID NO: 1960078
uaauguacugccaaagccu

SEQ ID NO: 1960080 - RNA, 19 nt, Artificial Sequence
  Description of Artificial Sequence: Synthetic oligonucleotide
  Sense strand starting at position 1029 of SEQ ID NO: 1880342
uuggcaguacauuaaguaa

SEQ ID NO: 1960081 - RNA, 19 nt, Artificial Sequence
  Description of Artificial Sequence: Synthetic oligonucleotide
  Antisense strand to SEQ ID NO: 1960080
uuacuuaauguacugccaa

SEQ ID NO: 1960082 - RNA, 19 nt, Artificial Sequence
  Description of Artificial Sequence: Synthetic oligonucleotide
  Sense strand starting at position 1040 of SEQ ID NO: 1880342
uuaaguaaaggaugucaau

SEQ ID NO: 1960083 - RNA, 19 nt, Artificial Sequence
  Description of Artificial Sequence: Synthetic oligonucleotide
  Antisense strand to SEQ ID NO: 1960082
auugacauccuuuacuuaa

SEQ ID NO: 1960084 - RNA, 19 nt, Artificial Sequence
  Description of Artificial Sequence: Synthetic oligonucleotide
  Sense strand starting at position 1144 of SEQ ID NO: 1880342
gcaauaaaugacgguaagu

SEQ ID NO: 1960085 - RNA, 19 nt, Artificial Sequence
  Description of Artificial Sequence: Synthetic oligonucleotide
  Antisense strand to SEQ ID NO: 1960084
acuuaccgucauuuauugc

SEQ ID NO: 1960086 - RNA, 19 nt, Artificial Sequence
  Description of Artificial Sequence: Synthetic oligonucleotide
  Sense strand starting at position 1146 of SEQ ID NO: 1880342
aauaaaugacgguaaguuu

SEQ ID NO: 1960087 - RNA, 19 nt, Artificial Sequence
  Description of Artificial Sequence: Synthetic oligonucleotide
  Antisense strand to SEQ ID NO: 1960086
aaacuuaccgucauuuauu

SEQ ID NO: 1960088 - RNA, 19 nt, Artificial Sequence
  Description of Artificial Sequence: Synthetic oligonucleotide
  Sense strand starting at position 1186 of SEQ ID NO: 1880342
agcagagauccuuaucugu

SEQ ID NO: 1960089 - RNA, 19 nt, Artificial Sequence
  Description of Artificial Sequence: Synthetic oligonucleotide
  Antisense strand to SEQ ID NO: 1960088
acagauaaggaucucugcu

SEQ ID NO: 1960090 - RNA, 19 nt, Artificial Sequence
  Description of Artificial Sequence: Synthetic oligonucleotide
  Sense strand starting at position 1188 of SEQ ID NO: 1880342
cagagauccuuaucugugu

SEQ ID NO: 1960091 - RNA, 19 nt, Artificial Sequence
  Description of Artificial Sequence: Synthetic oligonucleotide
  Antisense strand to SEQ ID NO: 1960090
acacagauaaggaucucug

SEQ ID NO: 1960092 - RNA, 19 nt, Artificial Sequence
  Description of Artificial Sequence: Synthetic oligonucleotide
  Sense strand starting at position 1191 of SEQ ID NO: 1880342
agauccuuaucugugugau

SEQ ID NO: 1960093 - RNA, 19 nt, Artificial Sequence
  Description of Artificial Sequence: Synthetic oligonucleotide
  Antisense strand to SEQ ID NO: 1960092
aucacacagauaaggaucu

SEQ ID NO: 1960094 - RNA, 19 nt, Artificial Sequence
  Description of Artificial Sequence: Synthetic oligonucleotide
  Sense strand starting at position 1192 of SEQ ID NO: 1880342
gauccuuaucugugugauu

SEQ ID NO: 1960095 - RNA, 19 nt, Artificial Sequence
  Description of Artificial Sequence: Synthetic oligonucleotide
  Antisense strand to SEQ ID NO: 1960094
aaucacacagauaaggauc

SEQ ID NO: 1960096 - RNA, 19 nt, Artificial Sequence
  Description of Artificial Sequence: Synthetic oligonucleotide
  Sense strand starting at position 1193 of SEQ ID NO: 1880342
auccuuaucugugugauuu

SEQ ID NO: 1960097 - RNA, 19 nt, Artificial Sequence
  Description of Artificial Sequence: Synthetic oligonucleotide
  Antisense strand to SEQ ID NO: 1960096
aaaucacacagauaaggau

SEQ ID NO: 1960098 - RNA, 19 nt, Artificial Sequence
  Description of Artificial Sequence: Synthetic oligonucleotide
  Sense strand starting at position 1194 of SEQ ID NO: 1880342
uccuuaucugugugauuua

SEQ ID NO: 1960099 - RNA, 19 nt, Artificial Sequence
  Description of Artificial Sequence: Synthetic oligonucleotide
  Antisense strand to SEQ ID NO: 1960098
uaaaucacacagauaagga

SEQ ID NO: 1960100 - RNA, 19 nt, Artificial Sequence
  Description of Artificial Sequence: Synthetic oligonucleotide
  Sense strand starting at position 1197 of SEQ ID NO: 1880342
uuaucugugugauuuagcu

SEQ ID NO: 1960101 - RNA, 19 nt, Artificial Sequence
  Description of Artificial Sequence: Synthetic oligonucleotide
  Antisense strand to SEQ ID NO: 1960100
agcuaaaucacacagauaa

SEQ ID NO: 1960102 - RNA, 19 nt, Artificial Sequence
  Description of Artificial Sequence: Synthetic oligonucleotide
  Sense strand starting at position 1203 of SEQ ID NO: 1880342
gugugauuuagcugugguu

SEQ ID NO: 1960103 - RNA, 19 nt, Artificial Sequence
  Description of Artificial Sequence: Synthetic oligonucleotide
  Antisense strand to SEQ ID NO: 1960102
aaccacagcuaaaucacac

SEQ ID NO: 1960104 - RNA, 19 nt, Artificial Sequence
  Description of Artificial Sequence: Synthetic oligonucleotide
  Sense strand starting at position 1205 of SEQ ID NO: 1880342
gugauuuagcugugguucu

SEQ ID NO: 1960105 - RNA, 19 nt, Artificial Sequence
  Description of Artificial Sequence: Synthetic oligonucleotide
  Antisense strand to SEQ ID NO: 1960104
agaaccacagcuaaaucac

SEQ ID NO: 1960106 - RNA, 19 nt, Artificial Sequence
  Description of Artificial Sequence: Synthetic oligonucleotide
  Sense strand starting at position 1215 of SEQ ID NO: 1880342
ugugguucugucuaaagac

SEQ ID NO: 1960107 - RNA, 19 nt, Artificial Sequence
  Description of Artificial Sequence: Synthetic oligonucleotide
  Antisense strand to SEQ ID NO: 1960106
gucuuuagacagaaccaca

SEQ ID NO: 1960108 - RNA, 19 nt, Artificial Sequence
  Description of Artificial Sequence: Synthetic oligonucleotide
  Sense strand starting at position 1257 of SEQ ID NO: 1880342
aggaucaucuugccagcua

SEQ ID NO: 1960109 - RNA, 19 nt, Artificial Sequence
  Description of Artificial Sequence: Synthetic oligonucleotide
  Antisense strand to SEQ ID NO: 1960108
uagcuggcaagaugauccu

SEQ ID NO: 1960110 - RNA, 19 nt, Artificial Sequence
  Description of Artificial Sequence: Synthetic oligonucleotide
  Sense strand starting at position 1329 of SEQ ID NO: 1880342
cugugaguccuuuacgauu

SEQ ID NO: 1960111 - RNA, 19 nt, Artificial Sequence
  Description of Artificial Sequence: Synthetic oligonucleotide
  Antisense strand to SEQ ID NO: 1960110
aaucguaaaggacucacag

SEQ ID NO: 1960112 - RNA, 19 nt, Artificial Sequence
  Description of Artificial Sequence: Synthetic oligonucleotide
  Sense strand starting at position 1362 of SEQ ID NO: 1880342
agacgaauuucucaaccau

SEQ ID NO: 1960113 - RNA, 19 nt, Artificial Sequence
  Description of Artificial Sequence: Synthetic oligonucleotide
  Antisense strand to SEQ ID NO: 1960112
augguugagaaauucgucu

SEQ ID NO: 1960114 - RNA, 19 nt, Artificial Sequence
  Description of Artificial Sequence: Synthetic oligonucleotide
  Sense strand starting at position 3805 of SEQ ID NO: 1880342
ucaaccauccuuggauuga

SEQ ID NO: 1960115 - RNA, 19 nt, Artificial Sequence
  Description of Artificial Sequence: Synthetic oligonucleotide
  Antisense strand to SEQ ID NO: 1960114
ucaauccaaggaugguuga

SEQ ID NO: 1960116 - RNA, 19 nt, Artificial Sequence
  Description of Artificial Sequence: Synthetic oligonucleotide
  Sense strand starting at position 3843 of SEQ ID NO: 1880342
gaugguugugucuauagua

SEQ ID NO: 1960117 - RNA, 19 nt, Artificial Sequence
  Description of Artificial Sequence: Synthetic oligonucleotide
  Antisense strand to SEQ ID NO: 1960116
uacuauagacacaaccauc

SEQ ID NO: 1960118 - RNA, 19 nt, Artificial Sequence
  Description of Artificial Sequence: Synthetic oligonucleotide
  Sense strand starting at position 94 of SEQ ID NO: 1880343
gacuaaauugguuguugag

SEQ ID NO: 1960119 - RNA, 19 nt, Artificial Sequence
  Description of Artificial Sequence: Synthetic oligonucleotide
  Antisense strand to SEQ ID NO: 1960118
cucaacaaccaauuuaguc

SEQ ID NO: 1960120 - RNA, 19 nt, Artificial Sequence
  Description of Artificial Sequence: Synthetic oligonucleotide
  Sense strand starting at position 96 of SEQ ID NO: 1880343
cuaaauugguuguugagaa

SEQ ID NO: 1960121 - RNA, 19 nt, Artificial Sequence
  Description of Artificial Sequence: Synthetic oligonucleotide
  Antisense strand to SEQ ID NO: 1960120
uucucaacaaccaauuuag

SEQ ID NO: 1960122 - RNA, 19 nt, Artificial Sequence
  Description of Artificial Sequence: Synthetic oligonucleotide
  Sense strand starting at position 289 of SEQ ID NO: 1880343
gacagugagauaugagucu

SEQ ID NO: 1960123 - RNA, 19 nt, Artificial Sequence
  Description of Artificial Sequence: Synthetic oligonucleotide
  Antisense strand to SEQ ID NO: 1960122
agacucauaucucacuguc

SEQ ID NO: 1960124 - RNA, 19 nt, Artificial Sequence
  Description of Artificial Sequence: Synthetic oligonucleotide
  Sense strand starting at position 295 of SEQ ID NO: 1880343
gagauaugagucugaaguu

SEQ ID NO: 1960125 - RNA, 19 nt, Artificial Sequence
  Description of Artificial Sequence: Synthetic oligonucleotide
  Antisense strand to SEQ ID NO: 1960124
aacuucagacucauaucuc

SEQ ID NO: 1960126 - RNA, 19 nt, Artificial Sequence
  Description of Artificial Sequence: Synthetic oligonucleotide
  Sense strand starting at position 315 of SEQ ID NO: 1880343
agaagaguuucugucuagg

SEQ ID NO: 1960127 - RNA, 19 nt, Artificial Sequence
  Description of Artificial Sequence: Synthetic oligonucleotide
  Antisense strand to SEQ ID NO: 1960126
ccuagacagaaacucuucu

SEQ ID NO: 1960128 - RNA, 19 nt, Artificial Sequence
  Description of Artificial Sequence: Synthetic oligonucleotide
  Sense strand starting at position 451 of SEQ ID NO: 1880343
gagagaauguugcccagga

SEQ ID NO: 1960129 - RNA, 19 nt, Artificial Sequence
  Description of Artificial Sequence: Synthetic oligonucleotide
  Antisense strand to SEQ ID NO: 1960128
uccugggcaacauucucuc

SEQ ID NO: 1960130 - RNA, 19 nt, Artificial Sequence
  Description of Artificial Sequence: Synthetic oligonucleotide
  Sense strand starting at position 452 of SEQ ID NO: 1880343
agagaauguugcccaggaa

SEQ ID NO: 1960131 - RNA, 19 nt, Artificial Sequence
  Description of Artificial Sequence: Synthetic oligonucleotide
  Antisense strand to SEQ ID NO: 1960130
uuccugggcaacauucucu

SEQ ID NO: 1960132 - RNA, 19 nt, Artificial Sequence
  Description of Artificial Sequence: Synthetic oligonucleotide
  Sense strand starting at position 534 of SEQ ID NO: 1880343
uuaggaugagcuugggaaa

SEQ ID NO: 1960133 - RNA, 19 nt, Artificial Sequence
  Description of Artificial Sequence: Synthetic oligonucleotide
  Antisense strand to SEQ ID NO: 1960132
uuucccaagcucauccuaa

SEQ ID NO: 1960134 - RNA, 19 nt, Artificial Sequence
  Description of Artificial Sequence: Synthetic oligonucleotide
  Sense strand starting at position 535 of SEQ ID NO: 1880343
uaggaugagcuugggaaau

SEQ ID NO: 1960135 - RNA, 19 nt, Artificial Sequence
  Description of Artificial Sequence: Synthetic oligonucleotide
  Antisense strand to SEQ ID NO: 1960134
auuucccaagcucauccua

SEQ ID NO: 1960136 - RNA, 19 nt, Artificial Sequence
  Description of Artificial Sequence: Synthetic oligonucleotide
  Sense strand starting at position 641 of SEQ ID NO: 1880343
auagcaauggaucgagaag

SEQ ID NO: 1960137 - RNA, 19 nt, Artificial Sequence
  Description of Artificial Sequence: Synthetic oligonucleotide
  Antisense strand to SEQ ID NO: 1960136
cuucucgauccauugcuau

SEQ ID NO: 1960138 - RNA, 19 nt, Artificial Sequence
  Description of Artificial Sequence: Synthetic oligonucleotide
  Sense strand starting at position 642 of SEQ ID NO: 1880343
uagcaauggaucgagaagu

SEQ ID NO: 1960139 - RNA, 19 nt, Artificial Sequence
  Description of Artificial Sequence: Synthetic oligonucleotide
  Antisense strand to SEQ ID NO: 1960138
acuucucgauccauugcua

SEQ ID NO: 1960140 - RNA, 19 nt, Artificial Sequence
  Description of Artificial Sequence: Synthetic oligonucleotide
  Sense strand starting at position 675 of SEQ ID NO: 1880343
gauagagaauguguacuca

SEQ ID NO: 1960141 - RNA, 19 nt, Artificial Sequence
  Description of Artificial Sequence: Synthetic oligonucleotide
  Antisense strand to SEQ ID NO: 1960140
ugaguacacauucucuauc

SEQ ID NO: 1960142 - RNA, 19 nt, Artificial Sequence
  Description of Artificial Sequence: Synthetic oligonucleotide
  Sense strand starting at position 697 of SEQ ID NO: 1880343
ugaguaguucagcagagaa

SEQ ID NO: 1960143 - RNA, 19 nt, Artificial Sequence
  Description of Artificial Sequence: Synthetic oligonucleotide
  Antisense strand to SEQ ID NO: 1960142
uucucugcugaacuacuca

SEQ ID NO: 1960144 - RNA, 19 nt, Artificial Sequence
  Description of Artificial Sequence: Synthetic oligonucleotide
  Sense strand starting at position 1398 of SEQ ID NO: 1880343
agcgcuuguauuugaugaa

SEQ ID NO: 1960145 - RNA, 19 nt, Artificial Sequence
  Description of Artificial Sequence: Synthetic oligonucleotide
  Antisense strand to SEQ ID NO: 1960144
uucaucaaauacaagcgcu

SEQ ID NO: 1960146 - RNA, 19 nt, Artificial Sequence
  Description of Artificial Sequence: Synthetic oligonucleotide
  Sense strand starting at position 1634 of SEQ ID NO: 1880343
ucggauauucuugagugau

SEQ ID NO: 1960147 - RNA, 19 nt, Artificial Sequence
  Description of Artificial Sequence: Synthetic oligonucleotide
  Antisense strand to SEQ ID NO: 1960146
aucacucaagaauauccga

SEQ ID NO: 1960148 - RNA, 19 nt, Artificial Sequence
  Description of Artificial Sequence: Synthetic oligonucleotide
  Sense strand starting at position 1657 of SEQ ID NO: 1880343
ccagcauccugacuagaaa

SEQ ID NO: 1960149 - RNA, 19 nt, Artificial Sequence
  Description of Artificial Sequence: Synthetic oligonucleotide
  Antisense strand to SEQ ID NO: 1960148
uuucuagucaggaugcugg

SEQ ID NO: 1960150 - RNA, 19 nt, Artificial Sequence
  Description of Artificial Sequence: Synthetic oligonucleotide
  Sense strand starting at position 1674 of SEQ ID NO: 1880343
aagacaagugaccgauagu

SEQ ID NO: 1960151 - RNA, 19 nt, Artificial Sequence
  Description of Artificial Sequence: Synthetic oligonucleotide
  Antisense strand to SEQ ID NO: 1960150
acuaucggucacuugucuu

SEQ ID NO: 1960152 - RNA, 19 nt, Artificial Sequence
  Description of Artificial Sequence: Synthetic oligonucleotide
  Sense strand starting at position 1677 of SEQ ID NO: 1880343
acaagugaccgauagugau

SEQ ID NO: 1960153 - RNA, 19 nt, Artificial Sequence
  Description of Artificial Sequence: Synthetic oligonucleotide
  Antisense strand to SEQ ID NO: 1960152
aucacuaucggucacuugu

SEQ ID NO: 1960154 - RNA, 19 nt, Artificial Sequence
  Description of Artificial Sequence: Synthetic oligonucleotide
  Sense strand starting at position 1715 of SEQ ID NO: 1880343
gagauugugucaucugaga

SEQ ID NO: 1960155 - RNA, 19 nt, Artificial Sequence
  Description of Artificial Sequence: Synthetic oligonucleotide
  Antisense strand to SEQ ID NO: 1960154
ucucagaugacacaaucuc

SEQ ID NO: 1960156 - RNA, 19 nt, Artificial Sequence
  Description of Artificial Sequence: Synthetic oligonucleotide
  Sense strand starting at position 1870 of SEQ ID NO: 1880343
guuugugugacagauacaa

SEQ ID NO: 1960157 - RNA, 19 nt, Artificial Sequence
  Description of Artificial Sequence: Synthetic oligonucleotide
  Antisense strand to SEQ ID NO: 1960156
uuguaucugucacacaaac

SEQ ID NO: 1960158 - RNA, 19 nt, Artificial Sequence
  Description of Artificial Sequence: Synthetic oligonucleotide
  Sense strand starting at position 1899 of SEQ ID NO: 1880343
agcuguauaccugacuuga

SEQ ID NO: 1960159 - RNA, 19 nt, Artificial Sequence
  Description of Artificial Sequence: Synthetic oligonucleotide
  Antisense strand to SEQ ID NO: 1960158
ucaagucagguauacagcu

SEQ ID NO: 1960160 - RNA, 19 nt, Artificial Sequence
  Description of Artificial Sequence: Synthetic oligonucleotide
  Sense strand starting at position 2055 of SEQ ID NO: 1880343
gagauugauuuccauuaug

SEQ ID NO: 1960161 - RNA, 19 nt, Artificial Sequence
  Description of Artificial Sequence: Synthetic oligonucleotide
  Antisense strand to SEQ ID NO: 1960160
cauaauggaaaucaaucuc

SEQ ID NO: 1960162 - RNA, 19 nt, Artificial Sequence
  Description of Artificial Sequence: Synthetic oligonucleotide
  Sense strand starting at position 2063 of SEQ ID NO: 1880343
uuuccauuaugaucagaug

SEQ ID NO: 1960163 - RNA, 19 nt, Artificial Sequence
  Description of Artificial Sequence: Synthetic oligonucleotide
  Antisense strand to SEQ ID NO: 1960162
caucugaucauaauggaaa

SEQ ID NO: 1960164 - RNA, 19 nt, Artificial Sequence
  Description of Artificial Sequence: Synthetic oligonucleotide
  Sense strand starting at position 2430 of SEQ ID NO: 1880343
auaagugaagcauauagca

SEQ ID NO: 1960165 - RNA, 19 nt, Artificial Sequence
  Description of Artificial Sequence: Synthetic oligonucleotide
  Antisense strand to SEQ ID NO: 1960164
ugcuauaugcuucacuuau

SEQ ID NO: 1960166 - RNA, 19 nt, Artificial Sequence
  Description of Artificial Sequence: Synthetic oligonucleotide
  Sense strand starting at position 2495 of SEQ ID NO: 1880343
ccuggaagucacuggauau

SEQ ID NO: 1960167 - RNA, 19 nt, Artificial Sequence
  Description of Artificial Sequence: Synthetic oligonucleotide
  Antisense strand to SEQ ID NO: 1960166
auauccagugacuuccagg

SEQ ID NO: 1960168 - RNA, 19 nt, Artificial Sequence
  Description of Artificial Sequence: Synthetic oligonucleotide
  Sense strand starting at position 2496 of SEQ ID NO: 1880343
cuggaagucacuggauauu

SEQ ID NO: 1960169 - RNA, 19 nt, Artificial Sequence
  Description of Artificial Sequence: Synthetic oligonucleotide
  Antisense strand to SEQ ID NO: 1960168
aauauccagugacuuccag

SEQ ID NO: 1960170 - RNA, 19 nt, Artificial Sequence
  Description of Artificial Sequence: Synthetic oligonucleotide
  Sense strand starting at position 2635 of SEQ ID NO: 1880343
aggccuuaucuaugaaauc

SEQ ID NO: 1960171 - RNA, 19 nt, Artificial Sequence
  Description of Artificial Sequence: Synthetic oligonucleotide
  Antisense strand to SEQ ID NO: 1960170
gauuucauagauaaggccu

SEQ ID NO: 1960172 - RNA, 19 nt, Artificial Sequence
  Description of Artificial Sequence: Synthetic oligonucleotide
  Sense strand starting at position 2716 of SEQ ID NO: 1880343
uccugugaauaucuggaau

SEQ ID NO: 1960173 - RNA, 19 nt, Artificial Sequence
  Description of Artificial Sequence: Synthetic oligonucleotide
  Antisense strand to SEQ ID NO: 1960172
auuccagauauucacagga

SEQ ID NO: 1960174 - RNA, 19 nt, Artificial Sequence
  Description of Artificial Sequence: Synthetic oligonucleotide
  Sense strand starting at position 2800 of SEQ ID NO: 1880343
cugacuccugaaggacuua

SEQ ID NO: 1960175 - RNA, 19 nt, Artificial Sequence
  Description of Artificial Sequence: Synthetic oligonucleotide
  Antisense strand to SEQ ID NO: 1960174
uaaguccuucaggagucag

SEQ ID NO: 1960176 - RNA, 19 nt, Artificial Sequence
  Description of Artificial Sequence: Synthetic oligonucleotide
  Sense strand starting at position 2903 of SEQ ID NO: 1880343
cuccucuaggagugggaaa

SEQ ID NO: 1960177 - RNA, 19 nt, Artificial Sequence
  Description of Artificial Sequence: Synthetic oligonucleotide
  Antisense strand to SEQ ID NO: 1960176
uuucccacuccuagaggag

SEQ ID NO: 1960178 - RNA, 19 nt, Artificial Sequence
  Description of Artificial Sequence: Synthetic oligonucleotide
  Sense strand starting at position 3142 of SEQ ID NO: 1880343
cuaagacuauuggcagaca

SEQ ID NO: 1960179 - RNA, 19 nt, Artificial Sequence
  Description of Artificial Sequence: Synthetic oligonucleotide
  Antisense strand to SEQ ID NO: 1960178
ugucugccaauagucuuag

SEQ ID NO: 1960180 - RNA, 19 nt, Artificial Sequence
  Description of Artificial Sequence: Synthetic oligonucleotide
  Sense strand starting at position 3314 of SEQ ID NO: 1880343
aggauuguccuaugggaua

SEQ ID NO: 1960181 - RNA, 19 nt, Artificial Sequence
  Description of Artificial Sequence: Synthetic oligonucleotide
  Antisense strand to SEQ ID NO: 1960180
uaucccauaggacaauccu

SEQ ID NO: 1960182 - RNA, 19 nt, Artificial Sequence
  Description of Artificial Sequence: Synthetic oligonucleotide
  Sense strand starting at position 3363 of SEQ ID NO: 1880343
agcaccuaccuguagagau

SEQ ID NO: 1960183 - RNA, 19 nt, Artificial Sequence
  Description of Artificial Sequence: Synthetic oligonucleotide
  Antisense strand to SEQ ID NO: 1960182
aucucuacagguaggugcu

SEQ ID NO: 1960184 - RNA, 19 nt, Artificial Sequence
  Description of Artificial Sequence: Synthetic oligonucleotide
  Sense strand starting at position 3454 of SEQ ID NO: 1880343
cugucaucuguggaaugga

SEQ ID NO: 1960185 - RNA, 19 nt, Artificial Sequence
  Description of Artificial Sequence: Synthetic oligonucleotide
  Antisense strand to SEQ ID NO: 1960184
uccauuccacagaugacag

SEQ ID NO: 1960186 - RNA, 19 nt, Artificial Sequence
  Description of Artificial Sequence: Synthetic oligonucleotide
  Sense strand starting at position 3518 of SEQ ID NO: 1880343
gagauagugaaguacaugu

SEQ ID NO: 1960187 - RNA, 19 nt, Artificial Sequence
  Description of Artificial Sequence: Synthetic oligonucleotide
  Antisense strand to SEQ ID NO: 1960186
acauguacuucacuaucuc

SEQ ID NO: 1960188 - RNA, 19 nt, Artificial Sequence
  Description of Artificial Sequence: Synthetic oligonucleotide
  Sense strand starting at position 3520 of SEQ ID NO: 1880343
gauagugaaguacauguau

SEQ ID NO: 1960189 - RNA, 19 nt, Artificial Sequence
  Description of Artificial Sequence: Synthetic oligonucleotide
  Antisense strand to SEQ ID NO: 1960188
auacauguacuucacuauc

SEQ ID NO: 1960190 - RNA, 19 nt, Artificial Sequence
  Description of Artificial Sequence: Synthetic oligonucleotide
  Sense strand starting at position 3736 of SEQ ID NO: 1880343
ugcagcauuugaguuccua

SEQ ID NO: 1960191 - RNA, 19 nt, Artificial Sequence
  Description of Artificial Sequence: Synthetic oligonucleotide
  Antisense strand to SEQ ID NO: 1960190
uaggaacucaaaugcugca

SEQ ID NO: 1960192 - RNA, 19 nt, Artificial Sequence
  Description of Artificial Sequence: Synthetic oligonucleotide
  Sense strand starting at position 3740 of SEQ ID NO: 1880343
gcauuugaguuccuacugu

SEQ ID NO: 1960193 - RNA, 19 nt, Artificial Sequence
  Description of Artificial Sequence: Synthetic oligonucleotide
  Antisense strand to SEQ ID NO: 1960192
acaguaggaacucaaaugc

SEQ ID NO: 1960194 - RNA, 19 nt, Artificial Sequence
  Description of Artificial Sequence: Synthetic oligonucleotide
  Sense strand starting at position 3759 of SEQ ID NO: 1880343
gcgcaagucaucguggaua

SEQ ID NO: 1960195 - RNA, 19 nt, Artificial Sequence
  Description of Artificial Sequence: Synthetic oligonucleotide
  Antisense strand to SEQ ID NO: 1960194
uauccacgaugacuugcgc

SEQ ID NO: 1960196 - RNA, 19 nt, Artificial Sequence
  Description of Artificial Sequence: Synthetic oligonucleotide
  Sense strand starting at position 3937 of SEQ ID NO: 1880343
uuaaauaucuugcucagag

SEQ ID NO: 1960197 - RNA, 19 nt, Artificial Sequence
  Description of Artificial Sequence: Synthetic oligonucleotide
  Antisense strand to SEQ ID NO: 1960196
cucugagcaagauauuuaa

SEQ ID NO: 1960198 - RNA, 19 nt, Artificial Sequence
  Description of Artificial Sequence: Synthetic oligonucleotide
  Sense strand starting at position 106 of SEQ ID NO: 1880345
agacauugccggugggaua

SEQ ID NO: 1960199 - RNA, 19 nt, Artificial Sequence
  Description of Artificial Sequence: Synthetic oligonucleotide
  Antisense strand to SEQ ID NO: 1960198
uaucccaccggcaaugucu

SEQ ID NO: 1960200 - RNA, 19 nt, Artificial Sequence
  Description of Artificial Sequence: Synthetic oligonucleotide
  Sense strand starting at position 539 of SEQ ID NO: 1880345
cggaguugcguucuccuca

SEQ ID NO: 1960201 - RNA, 19 nt, Artificial Sequence
  Description of Artificial Sequence: Synthetic oligonucleotide
  Antisense strand to SEQ ID NO: 1960200
ugaggagaacgcaacuccg

SEQ ID NO: 1960202 - RNA, 19 nt, Artificial Sequence
  Description of Artificial Sequence: Synthetic oligonucleotide
  Sense strand starting at position 544 of SEQ ID NO: 1880345
uugcguucuccucagcaca

SEQ ID NO: 1960203 - RNA, 19 nt, Artificial Sequence
  Description of Artificial Sequence: Synthetic oligonucleotide
  Antisense strand to SEQ ID NO: 1960202
ugugcugaggagaacgcaa

SEQ ID NO: 1960204 - RNA, 19 nt, Artificial Sequence
  Description of Artificial Sequence: Synthetic oligonucleotide
  Sense strand starting at position 776 of SEQ ID NO: 1880345
cugccuggcuuugugacaa

SEQ ID NO: 1960205 - RNA, 19 nt, Artificial Sequence
  Description of Artificial Sequence: Synthetic oligonucleotide
  Antisense strand to SEQ ID NO: 1960204
uugucacaaagccaggcag

SEQ ID NO: 1960206 - RNA, 19 nt, Artificial Sequence
  Description of Artificial Sequence: Synthetic oligonucleotide
  Sense strand starting at position 840 of SEQ ID NO: 1880345
gugaauaaucaagguuaga

SEQ ID NO: 1960207 - RNA, 19 nt, Artificial Sequence
  Description of Artificial Sequence: Synthetic oligonucleotide
  Antisense strand to SEQ ID NO: 1960206
ucuaaccuugauuauucac

SEQ ID NO: 1960208 - RNA, 19 nt, Artificial Sequence
  Description of Artificial Sequence: Synthetic oligonucleotide
  Sense strand starting at position 919 of SEQ ID NO: 1880345
cagcgagauucucccaaag

SEQ ID NO: 1960209 - RNA, 19 nt, Artificial Sequence
  Description of Artificial Sequence: Synthetic oligonucleotide
  Antisense strand to SEQ ID NO: 1960208
cuuugggagaaucucgcug

SEQ ID NO: 1960210 - RNA, 19 nt, Artificial Sequence
  Description of Artificial Sequence: Synthetic oligonucleotide
  Sense strand starting at position 921 of SEQ ID NO: 1880345
gcgagauucucccaaagca

SEQ ID NO: 1960211 - RNA, 19 nt, Artificial Sequence
  Description of Artificial Sequence: Synthetic oligonucleotide
  Antisense strand to SEQ ID NO: 1960210
ugcuuugggagaaucucgc

SEQ ID NO: 1960212 - RNA, 19 nt, Artificial Sequence
  Description of Artificial Sequence: Synthetic oligonucleotide
  Sense strand starting at position 1763 of SEQ ID NO: 1880345
caacgucugugcugagaag

SEQ ID NO: 1960213 - RNA, 19 nt, Artificial Sequence
  Description of Artificial Sequence: Synthetic oligonucleotide
  Antisense strand to SEQ ID NO: 1960212
cuucucagcacagacguug

SEQ ID NO: 1960214 - RNA, 19 nt, Artificial Sequence
  Description of Artificial Sequence: Synthetic oligonucleotide
  Sense strand starting at position 1764 of SEQ ID NO: 1880345
aacgucugugcugagaaga

SEQ ID NO: 1960215 - RNA, 19 nt, Artificial Sequence
  Description of Artificial Sequence: Synthetic oligonucleotide
  Antisense strand to SEQ ID NO: 1960214
ucuucucagcacagacguu

SEQ ID NO: 1960216 - RNA, 19 nt, Artificial Sequence
  Description of Artificial Sequence: Synthetic oligonucleotide
  Sense strand starting at position 1810 of SEQ ID NO: 1880345
caggucugugcugaacaga

SEQ ID NO: 1960217 - RNA, 19 nt, Artificial Sequence
  Description of Artificial Sequence: Synthetic oligonucleotide
  Antisense strand to SEQ ID NO: 1960216
ucuguucagcacagaccug

SEQ ID NO: 1960218 - RNA, 19 nt, Artificial Sequence
  Description of Artificial Sequence: Synthetic oligonucleotide
  Sense strand starting at position 1867 of SEQ ID NO: 1880345
ccgggucugaccugagaag

SEQ ID NO: 1960219 - RNA, 19 nt, Artificial Sequence
  Description of Artificial Sequence: Synthetic oligonucleotide
  Antisense strand to SEQ ID NO: 1960218
cuucucaggucagacccgg

SEQ ID NO: 1960220 - RNA, 19 nt, Artificial Sequence
  Description of Artificial Sequence: Synthetic oligonucleotide
  Sense strand starting at position 2231 of SEQ ID NO: 1880345
gaguguugcagucguacau

SEQ ID NO: 1960221 - RNA, 19 nt, Artificial Sequence
  Description of Artificial Sequence: Synthetic oligonucleotide
  Antisense strand to SEQ ID NO: 1960220
auguacgacugcaacacuc

SEQ ID NO: 1960222 - RNA, 19 nt, Artificial Sequence
  Description of Artificial Sequence: Synthetic oligonucleotide
  Sense strand starting at position 2232 of SEQ ID NO: 1880345
aguguugcagucguacauu

SEQ ID NO: 1960223 - RNA, 19 nt, Artificial Sequence
  Description of Artificial Sequence: Synthetic oligonucleotide
  Antisense strand to SEQ ID NO: 1960222
aauguacgacugcaacacu

SEQ ID NO: 1960224 - RNA, 19 nt, Artificial Sequence
  Description of Artificial Sequence: Synthetic oligonucleotide
  Sense strand starting at position 2325 of SEQ ID NO: 1880345
acgaguggaaccugaguaa

SEQ ID NO: 1960225 - RNA, 19 nt, Artificial Sequence
  Description of Artificial Sequence: Synthetic oligonucleotide
  Antisense strand to SEQ ID NO: 1960224
uuacucagguuccacucgu

SEQ ID NO: 1960226 - RNA, 19 nt, Artificial Sequence
  Description of Artificial Sequence: Synthetic oligonucleotide
  Sense strand starting at position 2328 of SEQ ID NO: 1880345
aguggaaccugaguaaucu

SEQ ID NO: 1960227 - RNA, 19 nt, Artificial Sequence
  Description of Artificial Sequence: Synthetic oligonucleotide
  Antisense strand to SEQ ID NO: 1960226
agauuacucagguuccacu

SEQ ID NO: 1960228 - RNA, 19 nt, Artificial Sequence
  Description of Artificial Sequence: Synthetic oligonucleotide
  Sense strand starting at position 2810 of SEQ ID NO: 1880345
gagcuauuacugcggagag

SEQ ID NO: 1960229 - RNA, 19 nt, Artificial Sequence
  Description of Artificial Sequence: Synthetic oligonucleotide
  Antisense strand to SEQ ID NO: 1960228
cucuccgcaguaauagcuc

SEQ ID NO: 1960230 - RNA, 19 nt, Artificial Sequence
  Description of Artificial Sequence: Synthetic oligonucleotide
  Sense strand starting at position 2812 of SEQ ID NO: 1880345
gcuauuacugcggagagcu

SEQ ID NO: 1960231 - RNA, 19 nt, Artificial Sequence
  Description of Artificial Sequence: Synthetic oligonucleotide
  Antisense strand to SEQ ID NO: 1960230
agcucuccgcaguaauagc

SEQ ID NO: 1960232 - RNA, 19 nt, Artificial Sequence
  Description of Artificial Sequence: Synthetic oligonucleotide
  Sense strand starting at position 2839 of SEQ ID NO: 1880345
aguuauuaacuuggaagac

SEQ ID NO: 1960233 - RNA, 19 nt, Artificial Sequence
  Description of Artificial Sequence: Synthetic oligonucleotide
  Antisense strand to SEQ ID NO: 1960232
gucuuccaaguuaauaacu

SEQ ID NO: 1960234 - RNA, 19 nt, Artificial Sequence
  Description of Artificial Sequence: Synthetic oligonucleotide
  Sense strand starting at position 2840 of SEQ ID NO: 1880345
guuauuaacuuggaagaca

SEQ ID NO: 1960235 - RNA, 19 nt, Artificial Sequence
  Description of Artificial Sequence: Synthetic oligonucleotide
  Antisense strand to SEQ ID NO: 1960234
ugucuuccaaguuaauaac

SEQ ID NO: 1960236 - RNA, 19 nt, Artificial Sequence
  Description of Artificial Sequence: Synthetic oligonucleotide
  Sense strand starting at position 2944 of SEQ ID NO: 1880345
ggaggaguaggcugauacu

SEQ ID NO: 1960237 - RNA, 19 nt, Artificial Sequence
  Description of Artificial Sequence: Synthetic oligonucleotide
  Antisense strand to SEQ ID NO: 1960236
aguaucagccuacuccucc

SEQ ID NO: 1960238 - RNA, 19 nt, Artificial Sequence
  Description of Artificial Sequence: Synthetic oligonucleotide
  Sense strand starting at position 2980 of SEQ ID NO: 1880345
gaguccugugcagggauuu

SEQ ID NO: 1960239 - RNA, 19 nt, Artificial Sequence
  Description of Artificial Sequence: Synthetic oligonucleotide
  Antisense strand to SEQ ID NO: 1960238
aaaucccugcacaggacuc

SEQ ID NO: 1960240 - RNA, 19 nt, Artificial Sequence
  Description of Artificial Sequence: Synthetic oligonucleotide
  Sense strand starting at position 3091 of SEQ ID NO: 1880345
cccacuuagccuuguggga

SEQ ID NO: 1960241 - RNA, 19 nt, Artificial Sequence
  Description of Artificial Sequence: Synthetic oligonucleotide
  Antisense strand to SEQ ID NO: 1960240
ucccacaaggcuaaguggg

SEQ ID NO: 1960242 - RNA, 19 nt, Artificial Sequence
  Description of Artificial Sequence: Synthetic oligonucleotide
  Sense strand starting at position 3106 of SEQ ID NO: 1880345
gggaccuccucacuugauu

SEQ ID NO: 1960243 - RNA, 19 nt, Artificial Sequence
  Description of Artificial Sequence: Synthetic oligonucleotide
  Antisense strand to SEQ ID NO: 1960242
aaucaagugaggagguccc

SEQ ID NO: 1960244 - RNA, 19 nt, Artificial Sequence
  Description of Artificial Sequence: Synthetic oligonucleotide
  Sense strand starting at position 3112 of SEQ ID NO: 1880345
uccucacuugauugaggua

SEQ ID NO: 1960245 - RNA, 19 nt, Artificial Sequence
  Description of Artificial Sequence: Synthetic oligonucleotide
  Antisense strand to SEQ ID NO: 1960244
uaccucaaucaagugagga

SEQ ID NO: 1960246 - RNA, 19 nt, Artificial Sequence
  Description of Artificial Sequence: Synthetic oligonucleotide
  Sense strand starting at position 3115 of SEQ ID NO: 1880345
ucacuugauugagguacau

SEQ ID NO: 1960247 - RNA, 19 nt, Artificial Sequence
  Description of Artificial Sequence: Synthetic oligonucleotide
  Antisense strand to SEQ ID NO: 1960246
auguaccucaaucaaguga

SEQ ID NO: 1960248 - RNA, 19 nt, Artificial Sequence
  Description of Artificial Sequence: Synthetic oligonucleotide
  Sense strand starting at position 3117 of SEQ ID NO: 1880345
acuugauugagguacaugu

SEQ ID NO: 1960249 - RNA, 19 nt, Artificial Sequence
  Description of Artificial Sequence: Synthetic oligonucleotide
  Antisense strand to SEQ ID NO: 1960248
acauguaccucaaucaagu

SEQ ID NO: 1960250 - RNA, 19 nt, Artificial Sequence
  Description of Artificial Sequence: Synthetic oligonucleotide
  Sense strand starting at position 3200 of SEQ ID NO: 1880345
gcggucacguuuguaucua

SEQ ID NO: 1960251 - RNA, 19 nt, Artificial Sequence
  Description of Artificial Sequence: Synthetic oligonucleotide
  Antisense strand to SEQ ID NO: 1960250
uagauacaaacgugaccgc

SEQ ID NO: 1960252 - RNA, 19 nt, Artificial Sequence
  Description of Artificial Sequence: Synthetic oligonucleotide
  Sense strand starting at position 3949 of SEQ ID NO: 1880345
aagaaaugauaugcaugua

SEQ ID NO: 1960253 - RNA, 19 nt, Artificial Sequence
  Description of Artificial Sequence: Synthetic oligonucleotide
  Antisense strand to SEQ ID NO: 1960252
uacaugcauaucauuucuu

SEQ ID NO: 1960254 - RNA, 19 nt, Artificial Sequence
  Description of Artificial Sequence: Synthetic oligonucleotide
  Sense strand starting at position 391 of SEQ ID NO: 1880344
gaggccuacuucuagugaa

SEQ ID NO: 1960255 - RNA, 19 nt, Artificial Sequence
  Description of Artificial Sequence: Synthetic oligonucleotide
  Antisense strand to SEQ ID NO: 1960254
uucacuagaaguaggccuc

SEQ ID NO: 1960256 - RNA, 19 nt, Artificial Sequence
  Description of Artificial Sequence: Synthetic oligonucleotide
  Sense strand starting at position 394 of SEQ ID NO: 1880344
gccuacuucuagugaaacu

SEQ ID NO: 1960257 - RNA, 19 nt, Artificial Sequence
  Description of Artificial Sequence: Synthetic oligonucleotide
  Antisense strand to SEQ ID NO: 1960256
aguuucacuagaaguaggc

SEQ ID NO: 1960258 - RNA, 19 nt, Artificial Sequence
  Description of Artificial Sequence: Synthetic oligonucleotide
  Sense strand starting at position 2070 of SEQ ID NO: 1880344
cggcaauuugcgcagucau

SEQ ID NO: 1960259 - RNA, 19 nt, Artificial Sequence
  Description of Artificial Sequence: Synthetic oligonucleotide
  Antisense strand to SEQ ID NO: 1960258
augacugcgcaaauugccg

SEQ ID NO: 1960260 - RNA, 19 nt, Artificial Sequence
  Description of Artificial Sequence: Synthetic oligonucleotide
  Sense strand starting at position 2247 of SEQ ID NO: 1880344
agacauugccggugggaua

SEQ ID NO: 1960261 - RNA, 19 nt, Artificial Sequence
  Description of Artificial Sequence: Synthetic oligonucleotide
  Antisense strand to SEQ ID NO: 1960260
uaucccaccggcaaugucu

SEQ ID NO: 1960262 - RNA, 19 nt, Artificial Sequence
  Description of Artificial Sequence: Synthetic oligonucleotide
  Sense strand starting at position 2680 of SEQ ID NO: 1880344
cggaguugcguucuccuca

SEQ ID NO: 1960263 - RNA, 19 nt, Artificial Sequence
  Description of Artificial Sequence: Synthetic oligonucleotide
  Antisense strand to SEQ ID NO: 1960262
ugaggagaacgcaacuccg

SEQ ID NO: 1960264 - RNA, 19 nt, Artificial Sequence
  Description of Artificial Sequence: Synthetic oligonucleotide
  Sense strand starting at position 2685 of SEQ ID NO: 1880344
uugcguucuccucagcaca

SEQ ID NO: 1960265 - RNA, 19 nt, Artificial Sequence
  Description of Artificial Sequence: Synthetic oligonucleotide
  Antisense strand to SEQ ID NO: 1960264
ugugcugaggagaacgcaa

SEQ ID NO: 1960266 - RNA, 19 nt, Artificial Sequence
  Description of Artificial Sequence: Synthetic oligonucleotide
  Sense strand starting at position 2917 of SEQ ID NO: 1880344
cugccuggcuuugugacaa

SEQ ID NO: 1960267 - RNA, 19 nt, Artificial Sequence
  Description of Artificial Sequence: Synthetic oligonucleotide
  Antisense strand to SEQ ID NO: 1960266
uugucacaaagccaggcag

SEQ ID NO: 1960268 - RNA, 19 nt, Artificial Sequence
  Description of Artificial Sequence: Synthetic oligonucleotide
  Sense strand starting at position 2981 of SEQ ID NO: 1880344
gugaauaaucaagguuaga

SEQ ID NO: 1960269 - RNA, 19 nt, Artificial Sequence
  Description of Artificial Sequence: Synthetic oligonucleotide
  Antisense strand to SEQ ID NO: 1960268
ucuaaccuugauuauucac

SEQ ID NO: 1960270 - RNA, 19 nt, Artificial Sequence
  Description of Artificial Sequence: Synthetic oligonucleotide
  Sense strand starting at position 3060 of SEQ ID NO: 1880344
cagcgagauucucccaaag

SEQ ID NO: 1960271 - RNA, 19 nt, Artificial Sequence
  Description of Artificial Sequence: Synthetic oligonucleotide
  Antisense strand to SEQ ID NO: 1960270
cuuugggagaaucucgcug

SEQ ID NO: 1960272 - RNA, 19 nt, Artificial Sequence
  Description of Artificial Sequence: Synthetic oligonucleotide
  Sense strand starting at position 3062 of SEQ ID NO: 1880344
gcgagauucucccaaagca

SEQ ID NO: 1960273 - RNA, 19 nt, Artificial Sequence
  Description of Artificial Sequence: Synthetic oligonucleotide
  Antisense strand to SEQ ID NO: 1960272
ugcuuugggagaaucucgc

SEQ ID NO: 1960274 - RNA, 19 nt, Artificial Sequence
  Description of Artificial Sequence: Synthetic oligonucleotide
  Sense strand starting at position 3904 of SEQ ID NO: 1880344
caacgucugugcugagaag

SEQ ID NO: 1960275 - RNA, 19 nt, Artificial Sequence
  Description of Artificial Sequence: Synthetic oligonucleotide
  Antisense strand to SEQ ID NO: 1960274
cuucucagcacagacguug

SEQ ID NO: 1960276 - RNA, 19 nt, Artificial Sequence
  Description of Artificial Sequence: Synthetic oligonucleotide
  Sense strand starting at position 3905 of SEQ ID NO: 1880344
aacgucugugcugagaaga

SEQ ID NO: 1960277 - RNA, 19 nt, Artificial Sequence
  Description of Artificial Sequence: Synthetic oligonucleotide
  Antisense strand to SEQ ID NO: 1960276
ucuucucagcacagacguu

SEQ ID NO: 1960278 - RNA, 19 nt, Artificial Sequence
  Description of Artificial Sequence: Synthetic oligonucleotide
  Sense strand starting at position 3951 of SEQ ID NO: 1880344
caggucugugcugaacaga

SEQ ID NO: 1960279 - RNA, 19 nt, Artificial Sequence
  Description of Artificial Sequence: Synthetic oligonucleotide
  Antisense strand to SEQ ID NO: 1960278
ucuguucagcacagaccug

SEQ ID NO: 1960280 - RNA, 19 nt, Artificial Sequence
  Description of Artificial Sequence: Synthetic oligonucleotide
  Sense strand starting at position 79 of SEQ ID NO: 1880346
guaagacaguccuuuacac

SEQ ID NO: 1960281 - RNA, 19 nt, Artificial Sequence
  Description of Artificial Sequence: Synthetic oligonucleotide
  Antisense strand to SEQ ID NO: 1960280
guguaaaggacugucuuac

SEQ ID NO: 1960282 - RNA, 19 nt, Artificial Sequence
  Description of Artificial Sequence: Synthetic oligonucleotide
  Sense strand starting at position 127 of SEQ ID NO: 1880346
ggaggaaugcucuggaaau

SEQ ID NO: 1960283 - RNA, 19 nt, Artificial Sequence
  Description of Artificial Sequence: Synthetic oligonucleotide
  Antisense strand to SEQ ID NO: 1960282
auuuccagagcauuccucc

SEQ ID NO: 1960284 - RNA, 19 nt, Artificial Sequence
  Description of Artificial Sequence: Synthetic oligonucleotide
  Sense strand starting at position 154 of SEQ ID NO: 1880346
uguguaauugcacauaccu

SEQ ID NO: 1960285 - RNA, 19 nt, Artificial Sequence
  Description of Artificial Sequence: Synthetic oligonucleotide
  Antisense strand to SEQ ID NO: 1960284
agguaugugcaauuacaca

SEQ ID NO: 1960286 - RNA, 19 nt, Artificial Sequence
  Description of Artificial Sequence: Synthetic oligonucleotide
  Sense strand starting at position 213 of SEQ ID NO: 1880346
cuguguguuagugcuguua

SEQ ID NO: 1960287 - RNA, 19 nt, Artificial Sequence
  Description of Artificial Sequence: Synthetic oligonucleotide
  Antisense strand to SEQ ID NO: 1960286
uaacagcacuaacacacag

SEQ ID NO: 1960288 - RNA, 19 nt, Artificial Sequence
  Description of Artificial Sequence: Synthetic oligonucleotide
  Sense strand starting at position 257 of SEQ ID NO: 1880346
ugcacauagcaggauugua

SEQ ID NO: 1960289 - RNA, 19 nt, Artificial Sequence
  Description of Artificial Sequence: Synthetic oligonucleotide
  Antisense strand to SEQ ID NO: 1960288
uacaauccugcuaugugca

SEQ ID NO: 1960290 - RNA, 19 nt, Artificial Sequence
  Description of Artificial Sequence: Synthetic oligonucleotide
  Sense strand starting at position 306 of SEQ ID NO: 1880346
uucuuuggccagugagaug

SEQ ID NO: 1960291 - RNA, 19 nt, Artificial Sequence
  Description of Artificial Sequence: Synthetic oligonucleotide
  Antisense strand to SEQ ID NO: 1960290
caucucacuggccaaagaa

SEQ ID NO: 1960292 - RNA, 19 nt, Artificial Sequence
  Description of Artificial Sequence: Synthetic oligonucleotide
  Sense strand starting at position 552 of SEQ ID NO: 1880346
ugucuauuacuccagcaca

SEQ ID NO: 1960293 - RNA, 19 nt, Artificial Sequence
  Description of Artificial Sequence: Synthetic oligonucleotide
  Antisense strand to SEQ ID NO: 1960292
ugugcuggaguaauagaca

SEQ ID NO: 1960294 - RNA, 19 nt, Artificial Sequence
  Description of Artificial Sequence: Synthetic oligonucleotide
  Sense strand starting at position 576 of SEQ ID NO: 1880346
acugauccugacugauaca

SEQ ID NO: 1960295 - RNA, 19 nt, Artificial Sequence
  Description of Artificial Sequence: Synthetic oligonucleotide
  Antisense strand to SEQ ID NO: 1960294
uguaucagucaggaucagu

SEQ ID NO: 1960296 - RNA, 19 nt, Artificial Sequence
  Description of Artificial Sequence: Synthetic oligonucleotide
  Sense strand starting at position 1101 of SEQ ID NO: 1880346
auagauauccuacacgugu

SEQ ID NO: 1960297 - RNA, 19 nt, Artificial Sequence
  Description of Artificial Sequence: Synthetic oligonucleotide
  Antisense strand to SEQ ID NO: 1960296
acacguguaggauaucuau

SEQ ID NO: 1960298 - RNA, 19 nt, Artificial Sequence
  Description of Artificial Sequence: Synthetic oligonucleotide
  Sense strand starting at position 1228 of SEQ ID NO: 1880346
uucagagguccuggauugu

SEQ ID NO: 1960299 - RNA, 19 nt, Artificial Sequence
  Description of Artificial Sequence: Synthetic oligonucleotide
  Antisense strand to SEQ ID NO: 1960298
acaauccaggaccucugaa

SEQ ID NO: 1960300 - RNA, 19 nt, Artificial Sequence
  Description of Artificial Sequence: Synthetic oligonucleotide
  Sense strand starting at position 1253 of SEQ ID NO: 1880346
uggauucugacauguagua

SEQ ID NO: 1960301 - RNA, 19 nt, Artificial Sequence
  Description of Artificial Sequence: Synthetic oligonucleotide
  Antisense strand to SEQ ID NO: 1960300
uacuacaugucagaaucca

SEQ ID NO: 1960302 - RNA, 19 nt, Artificial Sequence
  Description of Artificial Sequence: Synthetic oligonucleotide
  Sense strand starting at position 1265 of SEQ ID NO: 1880346
uguaguagugaaugaccuu

SEQ ID NO: 1960303 - RNA, 19 nt, Artificial Sequence
  Description of Artificial Sequence: Synthetic oligonucleotide
  Antisense strand to SEQ ID NO: 1960302
aaggucauucacuacuaca

SEQ ID NO: 1960304 - RNA, 19 nt, Artificial Sequence
  Description of Artificial Sequence: Synthetic oligonucleotide
  Sense strand starting at position 1303 of SEQ ID NO: 1880346
gcgccaguucucuuaucug

SEQ ID NO: 1960305 - RNA, 19 nt, Artificial Sequence
  Description of Artificial Sequence: Synthetic oligonucleotide
  Antisense strand to SEQ ID NO: 1960304
cagauaagagaacuggcgc

SEQ ID NO: 1960306 - RNA, 19 nt, Artificial Sequence
  Description of Artificial Sequence: Synthetic oligonucleotide
  Sense strand starting at position 1561 of SEQ ID NO: 1880346
uauggauaucgggauguau

SEQ ID NO: 1960307 - RNA, 19 nt, Artificial Sequence
  Description of Artificial Sequence: Synthetic oligonucleotide
  Antisense strand to SEQ ID NO: 1960306
auacaucccgauauccaua

SEQ ID NO: 1960308 - RNA, 19 nt, Artificial Sequence
  Description of Artificial Sequence: Synthetic oligonucleotide
  Sense strand starting at position 1634 of SEQ ID NO: 1880346
auuacucauuagcugaaga

SEQ ID NO: 1960309 - RNA, 19 nt, Artificial Sequence
  Description of Artificial Sequence: Synthetic oligonucleotide
  Antisense strand to SEQ ID NO: 1960308
ucuucagcuaaugaguaau

SEQ ID NO: 1960310 - RNA, 19 nt, Artificial Sequence
  Description of Artificial Sequence: Synthetic oligonucleotide
  Sense strand starting at position 1671 of SEQ ID NO: 1880346
ugaggagguuagucacauc

SEQ ID NO: 1960311 - RNA, 19 nt, Artificial Sequence
  Description of Artificial Sequence: Synthetic oligonucleotide
  Antisense strand to SEQ ID NO: 1960310
gaugugacuaaccuccuca

SEQ ID NO: 1960312 - RNA, 19 nt, Artificial Sequence
  Description of Artificial Sequence: Synthetic oligonucleotide
  Sense strand starting at position 1922 of SEQ ID NO: 1880346
cuccucuagcaaggagauu

SEQ ID NO: 1960313 - RNA, 19 nt, Artificial Sequence
  Description of Artificial Sequence: Synthetic oligonucleotide
  Antisense strand to SEQ ID NO: 1960312
aaucuccuugcuagaggag

SEQ ID NO: 1960314 - RNA, 19 nt, Artificial Sequence
  Description of Artificial Sequence: Synthetic oligonucleotide
  Sense strand starting at position 1987 of SEQ ID NO: 1880346
gcgggagcagucgccuaaa

SEQ ID NO: 1960315 - RNA, 19 nt, Artificial Sequence
  Description of Artificial Sequence: Synthetic oligonucleotide
  Antisense strand to SEQ ID NO: 1960314
uuuaggcgacugcucccgc

SEQ ID NO: 1960316 - RNA, 19 nt, Artificial Sequence
  Description of Artificial Sequence: Synthetic oligonucleotide
  Sense strand starting at position 2405 of SEQ ID NO: 1880346
cgcaaugugaaugggaaua

SEQ ID NO: 1960317 - RNA, 19 nt, Artificial Sequence
  Description of Artificial Sequence: Synthetic oligonucleotide
  Antisense strand to SEQ ID NO: 1960316
uauucccauucacauugcg

SEQ ID NO: 1960318 - RNA, 19 nt, Artificial Sequence
  Description of Artificial Sequence: Synthetic oligonucleotide
  Sense strand starting at position 2458 of SEQ ID NO: 1880346
gcaggaccugaggaguuua

SEQ ID NO: 1960319 - RNA, 19 nt, Artificial Sequence
  Description of Artificial Sequence: Synthetic oligonucleotide
  Antisense strand to SEQ ID NO: 1960318
uaaacuccucagguccugc

SEQ ID NO: 1960320 - RNA, 19 nt, Artificial Sequence
  Description of Artificial Sequence: Synthetic oligonucleotide
  Sense strand starting at position 2504 of SEQ ID NO: 1880346
caguuugugcaagucguaa

SEQ ID NO: 1960321 - RNA, 19 nt, Artificial Sequence
  Description of Artificial Sequence: Synthetic oligonucleotide
  Antisense strand to SEQ ID NO: 1960320
uuacgacuugcacaaacug

SEQ ID NO: 1960322 - RNA, 19 nt, Artificial Sequence
  Description of Artificial Sequence: Synthetic oligonucleotide
  Sense strand starting at position 2532 of SEQ ID NO: 1880346
gaaagaagccuaugggucu

SEQ ID NO: 1960323 - RNA, 19 nt, Artificial Sequence
  Description of Artificial Sequence: Synthetic oligonucleotide
  Antisense strand to SEQ ID NO: 1960322
agacccauaggcuucuuuc

SEQ ID NO: 1960324 - RNA, 19 nt, Artificial Sequence
  Description of Artificial Sequence: Synthetic oligonucleotide
  Sense strand starting at position 2672 of SEQ ID NO: 1880346
guuuguaguaacugggaaa

SEQ ID NO: 1960325 - RNA, 19 nt, Artificial Sequence
  Description of Artificial Sequence: Synthetic oligonucleotide
  Antisense strand to SEQ ID NO: 1960324
uuucccaguuacuacaaac

SEQ ID NO: 1960326 - RNA, 19 nt, Artificial Sequence
  Description of Artificial Sequence: Synthetic oligonucleotide
  Sense strand starting at position 2722 of SEQ ID NO: 1880346
cgaugagauaacuguuccu

SEQ ID NO: 1960327 - RNA, 19 nt, Artificial Sequence
  Description of Artificial Sequence: Synthetic oligonucleotide
  Antisense strand to SEQ ID NO: 1960326
aggaacaguuaucucaucg

SEQ ID NO: 1960328 - RNA, 19 nt, Artificial Sequence
  Description of Artificial Sequence: Synthetic oligonucleotide
  Sense strand starting at position 2727 of SEQ ID NO: 1880346
agauaacuguuccuaggca

SEQ ID NO: 1960329 - RNA, 19 nt, Artificial Sequence
  Description of Artificial Sequence: Synthetic oligonucleotide
  Antisense strand to SEQ ID NO: 1960328
ugccuaggaacaguuaucu

SEQ ID NO: 1960330 - RNA, 19 nt, Artificial Sequence
  Description of Artificial Sequence: Synthetic oligonucleotide
  Sense strand starting at position 2785 of SEQ ID NO: 1880346
ucuggaaucaucugagcag

SEQ ID NO: 1960331 - RNA, 19 nt, Artificial Sequence
  Description of Artificial Sequence: Synthetic oligonucleotide
  Antisense strand to SEQ ID NO: 1960330
cugcucagaugauuccaga

SEQ ID NO: 1960332 - RNA, 19 nt, Artificial Sequence
  Description of Artificial Sequence: Synthetic oligonucleotide
  Sense strand starting at position 2824 of SEQ ID NO: 1880346
gcacuuaugacuugcagga

SEQ ID NO: 1960333 - RNA, 19 nt, Artificial Sequence
  Description of Artificial Sequence: Synthetic oligonucleotide
  Antisense strand to SEQ ID NO: 1960332
uccugcaagucauaagugc

SEQ ID NO: 1960334 - RNA, 19 nt, Artificial Sequence
  Description of Artificial Sequence: Synthetic oligonucleotide
  Sense strand starting at position 3252 of SEQ ID NO: 1880346
agugaauggcaccagcauu

SEQ ID NO: 1960335 - RNA, 19 nt, Artificial Sequence
  Description of Artificial Sequence: Synthetic oligonucleotide
  Antisense strand to SEQ ID NO: 1960334
aaugcuggugccauucacu

SEQ ID NO: 1960336 - RNA, 19 nt, Artificial Sequence
  Description of Artificial Sequence: Synthetic oligonucleotide
  Sense strand starting at position 3311 of SEQ ID NO: 1880346
ucucauagauugcuggcaa

SEQ ID NO: 1960337 - RNA, 19 nt, Artificial Sequence
  Description of Artificial Sequence: Synthetic oligonucleotide
  Antisense strand to SEQ ID NO: 1960336
uugccagcaaucuaugaga

SEQ ID NO: 1960338 - RNA, 19 nt, Artificial Sequence
  Description of Artificial Sequence: Synthetic oligonucleotide
  Sense strand starting at position 3415 of SEQ ID NO: 1880346
aacuuacuagcugagugau

SEQ ID NO: 1960339 - RNA, 19 nt, Artificial Sequence
  Description of Artificial Sequence: Synthetic oligonucleotide
  Antisense strand to SEQ ID NO: 1960338
aucacucagcuaguaaguu

SEQ ID NO: 1960340 - RNA, 19 nt, Artificial Sequence
  Description of Artificial Sequence: Synthetic oligonucleotide
  Sense strand starting at position 3427 of SEQ ID NO: 1880346
gagugauccugggcaaguu

SEQ ID NO: 1960341 - RNA, 19 nt, Artificial Sequence
  Description of Artificial Sequence: Synthetic oligonucleotide
  Antisense strand to SEQ ID NO: 1960340
aacuugcccaggaucacuc

SEQ ID NO: 1960342 - RNA, 19 nt, Artificial Sequence
  Description of Artificial Sequence: Synthetic oligonucleotide
  Sense strand starting at position 3493 of SEQ ID NO: 1880346
accucacaagguugucaua

SEQ ID NO: 1960343 - RNA, 19 nt, Artificial Sequence
  Description of Artificial Sequence: Synthetic oligonucleotide
  Antisense strand to SEQ ID NO: 1960342
uaugacaaccuugugaggu

SEQ ID NO: 1960344 - RNA, 19 nt, Artificial Sequence
  Description of Artificial Sequence: Synthetic oligonucleotide
  Sense strand starting at position 3495 of SEQ ID NO: 1880346
cucacaagguugucauaug

SEQ ID NO: 1960345 - RNA, 19 nt, Artificial Sequence
  Description of Artificial Sequence: Synthetic oligonucleotide
  Antisense strand to SEQ ID NO: 1960344
cauaugacaaccuugugag

SEQ ID NO: 1960346 - RNA, 19 nt, Artificial Sequence
  Description of Artificial Sequence: Synthetic oligonucleotide
  Sense strand starting at position 3567 of SEQ ID NO: 1880346
cuuggauucccuugaagau

SEQ ID NO: 1960347 - RNA, 19 nt, Artificial Sequence
  Description of Artificial Sequence: Synthetic oligonucleotide
  Antisense strand to SEQ ID NO: 1960346
aucuucaagggaauccaag

SEQ ID NO: 1960348 - RNA, 19 nt, Artificial Sequence
  Description of Artificial Sequence: Synthetic oligonucleotide
  Sense strand starting at position 3608 of SEQ ID NO: 1880346
acuguuaccaaguggcaga

SEQ ID NO: 1960349 - RNA, 19 nt, Artificial Sequence
  Description of Artificial Sequence: Synthetic oligonucleotide
  Antisense strand to SEQ ID NO: 1960348
ucugccacuugguaacagu

SEQ ID NO: 1960350 - RNA, 19 nt, Artificial Sequence
  Description of Artificial Sequence: Synthetic oligonucleotide
  Sense strand starting at position 3713 of SEQ ID NO: 1880346
gggaaaugccuaugguaca

SEQ ID NO: 1960351 - RNA, 19 nt, Artificial Sequence
  Description of Artificial Sequence: Synthetic oligonucleotide
  Antisense strand to SEQ ID NO: 1960350
uguaccauaggcauuuccc

SEQ ID NO: 1960352 - RNA, 19 nt, Artificial Sequence
  Description of Artificial Sequence: Synthetic oligonucleotide
  Sense strand starting at position 3757 of SEQ ID NO: 1880346
auuguauaaucagugugag

SEQ ID NO: 1960353 - RNA, 19 nt, Artificial Sequence
  Description of Artificial Sequence: Synthetic oligonucleotide
  Antisense strand to SEQ ID NO: 1960352
cucacacugauuauacaau

SEQ ID NO: 1960354 - RNA, 19 nt, Artificial Sequence
  Description of Artificial Sequence: Synthetic oligonucleotide
  Sense strand starting at position 3760 of SEQ ID NO: 1880346
guauaaucagugugaguaa

SEQ ID NO: 1960355 - RNA, 19 nt, Artificial Sequence
  Description of Artificial Sequence: Synthetic oligonucleotide
  Antisense strand to SEQ ID NO: 1960354
uuacucacacugauuauac

SEQ ID NO: 1960356 - RNA, 19 nt, Artificial Sequence
  Description of Artificial Sequence: Synthetic oligonucleotide
  Sense strand starting at position 3763 of SEQ ID NO: 1880346
uaaucagugugaguaaauc

SEQ ID NO: 1960357 - RNA, 19 nt, Artificial Sequence
  Description of Artificial Sequence: Synthetic oligonucleotide
  Antisense strand to SEQ ID NO: 1960356
gauuuacucacacugauua

SEQ ID NO: 1960358 - RNA, 19 nt, Artificial Sequence
  Description of Artificial Sequence: Synthetic oligonucleotide
  Sense strand starting at position 3818 of SEQ ID NO: 1880346
gguuaaauaugguuguaau

SEQ ID NO: 1960359 - RNA, 19 nt, Artificial Sequence
  Description of Artificial Sequence: Synthetic oligonucleotide
  Antisense strand to SEQ ID NO: 1960358
auuacaaccauauuuaacc

SEQ ID NO: 1960360 - RNA, 19 nt, Artificial Sequence
  Description of Artificial Sequence: Synthetic oligonucleotide
  Sense strand starting at position 18 of SEQ ID NO: 1880347
cuuugucaagcagagcaau

SEQ ID NO: 1960361 - RNA, 19 nt, Artificial Sequence
  Description of Artificial Sequence: Synthetic oligonucleotide
  Antisense strand to SEQ ID NO: 1960360
auugcucugcuugacaaag

SEQ ID NO: 1960362 - RNA, 19 nt, Artificial Sequence
  Description of Artificial Sequence: Synthetic oligonucleotide
  Sense strand starting at position 187 of SEQ ID NO: 1880347
uagugagugcuugcugcau

SEQ ID NO: 1960363 - RNA, 19 nt, Artificial Sequence
  Description of Artificial Sequence: Synthetic oligonucleotide
  Antisense strand to SEQ ID NO: 1960362
augcagcaagcacucacua

SEQ ID NO: 1960364 - RNA, 19 nt, Artificial Sequence
  Description of Artificial Sequence: Synthetic oligonucleotide
  Sense strand starting at position 363 of SEQ ID NO: 1880347
uguccuggucauuaaugga

SEQ ID NO: 1960365 - RNA, 19 nt, Artificial Sequence
  Description of Artificial Sequence: Synthetic oligonucleotide
  Antisense strand to SEQ ID NO: 1960364
uccauuaaugaccaggaca

SEQ ID NO: 1960366 - RNA, 19 nt, Artificial Sequence
  Description of Artificial Sequence: Synthetic oligonucleotide
  Sense strand starting at position 536 of SEQ ID NO: 1880347
agagaaagcuagucacaga

SEQ ID NO: 1960367 - RNA, 19 nt, Artificial Sequence
  Description of Artificial Sequence: Synthetic oligonucleotide
  Antisense strand to SEQ ID NO: 1960366
ucugugacuagcuuucucu

SEQ ID NO: 1960368 - RNA, 19 nt, Artificial Sequence
  Description of Artificial Sequence: Synthetic oligonucleotide
  Sense strand starting at position 627 of SEQ ID NO: 1880347
ccgggacucuucccucaaa

SEQ ID NO: 1960369 - RNA, 19 nt, Artificial Sequence
  Description of Artificial Sequence: Synthetic oligonucleotide
  Antisense strand to SEQ ID NO: 1960368
uuugagggaagagucccgg

SEQ ID NO: 1960370 - RNA, 19 nt, Artificial Sequence
  Description of Artificial Sequence: Synthetic oligonucleotide
  Sense strand starting at position 1054 of SEQ ID NO: 1880347
ugaagaggucucugcugaa

SEQ ID NO: 1960371 - RNA, 19 nt, Artificial Sequence
  Description of Artificial Sequence: Synthetic oligonucleotide
  Antisense strand to SEQ ID NO: 1960370
uucagcagagaccucuuca

SEQ ID NO: 1960372 - RNA, 19 nt, Artificial Sequence
  Description of Artificial Sequence: Synthetic oligonucleotide
  Sense strand starting at position 1074 of SEQ ID NO: 1880347
gggaucaguugacuuauca

SEQ ID NO: 1960373 - RNA, 19 nt, Artificial Sequence
  Description of Artificial Sequence: Synthetic oligonucleotide
  Antisense strand to SEQ ID NO: 1960372
ugauaagucaacugauccc

SEQ ID NO: 1960374 - RNA, 19 nt, Artificial Sequence
  Description of Artificial Sequence: Synthetic oligonucleotide
  Sense strand starting at position 1127 of SEQ ID NO: 1880347
auaaguguugacugggaag

SEQ ID NO: 1960375 - RNA, 19 nt, Artificial Sequence
  Description of Artificial Sequence: Synthetic oligonucleotide
  Antisense strand to SEQ ID NO: 1960374
cuucccagucaacacuuau

SEQ ID NO: 1960376 - RNA, 19 nt, Artificial Sequence
  Description of Artificial Sequence: Synthetic oligonucleotide
  Sense strand starting at position 1129 of SEQ ID NO: 1880347
aaguguugacugggaagca

SEQ ID NO: 1960377 - RNA, 19 nt, Artificial Sequence
  Description of Artificial Sequence: Synthetic oligonucleotide
  Antisense strand to SEQ ID NO: 1960376
ugcuucccagucaacacuu

SEQ ID NO: 1960378 - RNA, 19 nt, Artificial Sequence
  Description of Artificial Sequence: Synthetic oligonucleotide
  Sense strand starting at position 1186 of SEQ ID NO: 1880347
uagguaccaccaggugauu

SEQ ID NO: 1960379 - RNA, 19 nt, Artificial Sequence
  Description of Artificial Sequence: Synthetic oligonucleotide
  Antisense strand to SEQ ID NO: 1960378
aaucaccuggugguaccua

SEQ ID NO: 1960380 - RNA, 19 nt, Artificial Sequence
  Description of Artificial Sequence: Synthetic oligonucleotide
  Sense strand starting at position 1299 of SEQ ID NO: 1880347
aggucacagagcuguauua

SEQ ID NO: 1960381 - RNA, 19 nt, Artificial Sequence
  Description of Artificial Sequence: Synthetic oligonucleotide
  Antisense strand to SEQ ID NO: 1960380
uaauacagcucugugaccu

SEQ ID NO: 1960382 - RNA, 19 nt, Artificial Sequence
  Description of Artificial Sequence: Synthetic oligonucleotide
  Sense strand starting at position 1301 of SEQ ID NO: 1880347
gucacagagcuguauuaug

SEQ ID NO: 1960383 - RNA, 19 nt, Artificial Sequence
  Description of Artificial Sequence: Synthetic oligonucleotide
  Antisense strand to SEQ ID NO: 1960382
cauaauacagcucugugac

SEQ ID NO: 1960384 - RNA, 19 nt, Artificial Sequence
  Description of Artificial Sequence: Synthetic oligonucleotide
  Sense strand starting at position 1327 of SEQ ID NO: 1880347
ugggaacacucagccaaua

SEQ ID NO: 1960385 - RNA, 19 nt, Artificial Sequence
  Description of Artificial Sequence: Synthetic oligonucleotide
  Antisense strand to SEQ ID NO: 1960384
uauuggcugaguguuccca

SEQ ID NO: 1960386 - RNA, 19 nt, Artificial Sequence
  Description of Artificial Sequence: Synthetic oligonucleotide
  Sense strand starting at position 1497 of SEQ ID NO: 1880347
agaagcaacugguuggaaa

SEQ ID NO: 1960387 - RNA, 19 nt, Artificial Sequence
  Description of Artificial Sequence: Synthetic oligonucleotide
  Antisense strand to SEQ ID NO: 1960386
uuuccaaccaguugcuucu

SEQ ID NO: 1960388 - RNA, 19 nt, Artificial Sequence
  Description of Artificial Sequence: Synthetic oligonucleotide
  Sense strand starting at position 1546 of SEQ ID NO: 1880347
cccggauuccugcaaauga

SEQ ID NO: 1960389 - RNA, 19 nt, Artificial Sequence
  Description of Artificial Sequence: Synthetic oligonucleotide
  Antisense strand to SEQ ID NO: 1960388
ucauuugcaggaauccggg

SEQ ID NO: 1960390 - RNA, 19 nt, Artificial Sequence
  Description of Artificial Sequence: Synthetic oligonucleotide
  Sense strand starting at position 1590 of SEQ ID NO: 1880347
gguagcuuugcauaggacu

SEQ ID NO: 1960391 - RNA, 19 nt, Artificial Sequence
  Description of Artificial Sequence: Synthetic oligonucleotide
  Antisense strand to SEQ ID NO: 1960390
aguccuaugcaaagcuacc

SEQ ID NO: 1960392 - RNA, 19 nt, Artificial Sequence
  Description of Artificial Sequence: Synthetic oligonucleotide
  Sense strand starting at position 1671 of SEQ ID NO: 1880347
ccaauuaaagaguauugcu

SEQ ID NO: 1960393 - RNA, 19 nt, Artificial Sequence
  Description of Artificial Sequence: Synthetic oligonucleotide
  Antisense strand to SEQ ID NO: 1960392
agcaauacucuuuaauugg

SEQ ID NO: 1960394 - RNA, 19 nt, Artificial Sequence
  Description of Artificial Sequence: Synthetic oligonucleotide
  Sense strand starting at position 1826 of SEQ ID NO: 1880347
cugagcagucuuggauaaa

SEQ ID NO: 1960395 - RNA, 19 nt, Artificial Sequence
  Description of Artificial Sequence: Synthetic oligonucleotide
  Antisense strand to SEQ ID NO: 1960394
uuuauccaagacugcucag

SEQ ID NO: 1960396 - RNA, 19 nt, Artificial Sequence
  Description of Artificial Sequence: Synthetic oligonucleotide
  Sense strand starting at position 1866 of SEQ ID NO: 1880347
gaaagauaccuucgucgga

SEQ ID NO: 1960397 - RNA, 19 nt, Artificial Sequence
  Description of Artificial Sequence: Synthetic oligonucleotide
  Antisense strand to SEQ ID NO: 1960396
uccgacgaagguaucuuuc

SEQ ID NO: 1960398 - RNA, 19 nt, Artificial Sequence
  Description of Artificial Sequence: Synthetic oligonucleotide
  Sense strand starting at position 1868 of SEQ ID NO: 1880347
aagauaccuucgucggaca

SEQ ID NO: 1960399 - RNA, 19 nt, Artificial Sequence
  Description of Artificial Sequence: Synthetic oligonucleotide
  Antisense strand to SEQ ID NO: 1960398
uguccgacgaagguaucuu

SEQ ID NO: 1960400 - RNA, 19 nt, Artificial Sequence
  Description of Artificial Sequence: Synthetic oligonucleotide
  Sense strand starting at position 1870 of SEQ ID NO: 1880347
gauaccuucgucggacaga

SEQ ID NO: 1960401 - RNA, 19 nt, Artificial Sequence
  Description of Artificial Sequence: Synthetic oligonucleotide
  Antisense strand to SEQ ID NO: 1960400
ucuguccgacgaagguauc

SEQ ID NO: 1960402 - RNA, 19 nt, Artificial Sequence
  Description of Artificial Sequence: Synthetic oligonucleotide
  Sense strand starting at position 1875 of SEQ ID NO: 1880347
cuucgucggacagaugaga

SEQ ID NO: 1960403 - RNA, 19 nt, Artificial Sequence
  Description of Artificial Sequence: Synthetic oligonucleotide
  Antisense strand to SEQ ID NO: 1960402
ucucaucuguccgacgaag

SEQ ID NO: 1960404 - RNA, 19 nt, Artificial Sequence
  Description of Artificial Sequence: Synthetic oligonucleotide
  Sense strand starting at position 2310 of SEQ ID NO: 1880347
aaagcagaggcuugauguu

SEQ ID NO: 1960405 - RNA, 19 nt, Artificial Sequence
  Description of Artificial Sequence: Synthetic oligonucleotide
  Antisense strand to SEQ ID NO: 1960404
aacaucaagccucugcuuu

SEQ ID NO: 1960406 - RNA, 19 nt, Artificial Sequence
  Description of Artificial Sequence: Synthetic oligonucleotide
  Sense strand starting at position 2330 of SEQ ID NO: 1880347
caaguuuaguuccuggaag

SEQ ID NO: 1960407 - RNA, 19 nt, Artificial Sequence
  Description of Artificial Sequence: Synthetic oligonucleotide
  Antisense strand to SEQ ID NO: 1960406
cuuccaggaacuaaacuug

SEQ ID NO: 1960408 - RNA, 19 nt, Artificial Sequence
  Description of Artificial Sequence: Synthetic oligonucleotide
  Sense strand starting at position 2341 of SEQ ID NO: 1880347
ccuggaagcugauugaaau

SEQ ID NO: 1960409 - RNA, 19 nt, Artificial Sequence
  Description of Artificial Sequence: Synthetic oligonucleotide
  Antisense strand to SEQ ID NO: 1960408
auuucaaucagcuuccagg

SEQ ID NO: 1960410 - RNA, 19 nt, Artificial Sequence
  Description of Artificial Sequence: Synthetic oligonucleotide
  Sense strand starting at position 2342 of SEQ ID NO: 1880347
cuggaagcugauugaaaug

SEQ ID NO: 1960411 - RNA, 19 nt, Artificial Sequence
  Description of Artificial Sequence: Synthetic oligonucleotide
  Antisense strand to SEQ ID NO: 1960410
cauuucaaucagcuuccag

SEQ ID NO: 1960412 - RNA, 19 nt, Artificial Sequence
  Description of Artificial Sequence: Synthetic oligonucleotide
  Sense strand starting at position 2655 of SEQ ID NO: 1880347
gauggagacugcuuacaua

SEQ ID NO: 1960413 - RNA, 19 nt, Artificial Sequence
  Description of Artificial Sequence: Synthetic oligonucleotide
  Antisense strand to SEQ ID NO: 1960412
uauguaagcagucuccauc

SEQ ID NO: 1960414 - RNA, 19 nt, Artificial Sequence
  Description of Artificial Sequence: Synthetic oligonucleotide
  Sense strand starting at position 2719 of SEQ ID NO: 1880347
gugguuucuguggauuaaa

SEQ ID NO: 1960415 - RNA, 19 nt, Artificial Sequence
  Description of Artificial Sequence: Synthetic oligonucleotide
  Antisense strand to SEQ ID NO: 1960414
uuuaauccacagaaaccac

SEQ ID NO: 1960416 - RNA, 19 nt, Artificial Sequence
  Description of Artificial Sequence: Synthetic oligonucleotide
  Sense strand starting at position 2722 of SEQ ID NO: 1880347
guuucuguggauuaaacca

SEQ ID NO: 1960417 - RNA, 19 nt, Artificial Sequence
  Description of Artificial Sequence: Synthetic oligonucleotide
  Antisense strand to SEQ ID NO: 1960416
ugguuuaauccacagaaac

SEQ ID NO: 1960418 - RNA, 19 nt, Artificial Sequence
  Description of Artificial Sequence: Synthetic oligonucleotide
  Sense strand starting at position 2774 of SEQ ID NO: 1880347
ugguuacaacuguaccaaa

SEQ ID NO: 1960419 - RNA, 19 nt, Artificial Sequence
  Description of Artificial Sequence: Synthetic oligonucleotide
  Antisense strand to SEQ ID NO: 1960418
uuugguacaguuguaacca

SEQ ID NO: 1960420 - RNA, 19 nt, Artificial Sequence
  Description of Artificial Sequence: Synthetic oligonucleotide
  Sense strand starting at position 3066 of SEQ ID NO: 1880347
cacguuucucauuacugga

SEQ ID NO: 1960421 - RNA, 19 nt, Artificial Sequence
  Description of Artificial Sequence: Synthetic oligonucleotide
  Antisense strand to SEQ ID NO: 1960420
uccaguaaugagaaacgug

SEQ ID NO: 1960422 - RNA, 19 nt, Artificial Sequence
  Description of Artificial Sequence: Synthetic oligonucleotide
  Sense strand starting at position 3068 of SEQ ID NO: 1880347
cguuucucauuacuggaaa

SEQ ID NO: 1960423 - RNA, 19 nt, Artificial Sequence
  Description of Artificial Sequence: Synthetic oligonucleotide
  Antisense strand to SEQ ID NO: 1960422
uuuccaguaaugagaaacg

SEQ ID NO: 1960424 - RNA, 19 nt, Artificial Sequence
  Description of Artificial Sequence: Synthetic oligonucleotide
  Sense strand starting at position 3084 of SEQ ID NO: 1880347
aaaugagaguaggaaauau

SEQ ID NO: 1960425 - RNA, 19 nt, Artificial Sequence
  Description of Artificial Sequence: Synthetic oligonucleotide
  Antisense strand to SEQ ID NO: 1960424
auauuuccuacucucauuu

SEQ ID NO: 1960426 - RNA, 19 nt, Artificial Sequence
  Description of Artificial Sequence: Synthetic oligonucleotide
  Sense strand starting at position 3155 of SEQ ID NO: 1880347
cucaguuugcaauauguag

SEQ ID NO: 1960427 - RNA, 19 nt, Artificial Sequence
  Description of Artificial Sequence: Synthetic oligonucleotide
  Antisense strand to SEQ ID NO: 1960426
cuacauauugcaaacugag

SEQ ID NO: 1960428 - RNA, 19 nt, Artificial Sequence
  Description of Artificial Sequence: Synthetic oligonucleotide
  Sense strand starting at position 3161 of SEQ ID NO: 1880347
uugcaauauguagagguau

SEQ ID NO: 1960429 - RNA, 19 nt, Artificial Sequence
  Description of Artificial Sequence: Synthetic oligonucleotide
  Antisense strand to SEQ ID NO: 1960428
auaccucuacauauugcaa

SEQ ID NO: 1960430 - RNA, 19 nt, Artificial Sequence
  Description of Artificial Sequence: Synthetic oligonucleotide
  Sense strand starting at position 3163 of SEQ ID NO: 1880347
gcaauauguagagguauaa

SEQ ID NO: 1960431 - RNA, 19 nt, Artificial Sequence
  Description of Artificial Sequence: Synthetic oligonucleotide
  Antisense strand to SEQ ID NO: 1960430
uuauaccucuacauauugc

SEQ ID NO: 1960432 - RNA, 19 nt, Artificial Sequence
  Description of Artificial Sequence: Synthetic oligonucleotide
  Sense strand starting at position 3236 of SEQ ID NO: 1880347
acuauuguggacugcauau

SEQ ID NO: 1960433 - RNA, 19 nt, Artificial Sequence
  Description of Artificial Sequence: Synthetic oligonucleotide
  Antisense strand to SEQ ID NO: 1960432
auaugcaguccacaauagu

SEQ ID NO: 1960434 - RNA, 19 nt, Artificial Sequence
  Description of Artificial Sequence: Synthetic oligonucleotide
  Sense strand starting at position 3371 of SEQ ID NO: 1880347
ccaugauuggacugugucu

SEQ ID NO: 1960435 - RNA, 19 nt, Artificial Sequence
  Description of Artificial Sequence: Synthetic oligonucleotide
  Antisense strand to SEQ ID NO: 1960434
agacacaguccaaucaugg

SEQ ID NO: 1960436 - RNA, 19 nt, Artificial Sequence
  Description of Artificial Sequence: Synthetic oligonucleotide
  Sense strand starting at position 3373 of SEQ ID NO: 1880347
augauuggacugugucuuu

SEQ ID NO: 1960437 - RNA, 19 nt, Artificial Sequence
  Description of Artificial Sequence: Synthetic oligonucleotide
  Antisense strand to SEQ ID NO: 1960436
aaagacacaguccaaucau

SEQ ID NO: 1960438 - RNA, 19 nt, Artificial Sequence
  Description of Artificial Sequence: Synthetic oligonucleotide
  Sense strand starting at position 3617 of SEQ ID NO: 1880347
agauauaaaguuggaaugu

SEQ ID NO: 1960439 - RNA, 19 nt, Artificial Sequence
  Description of Artificial Sequence: Synthetic oligonucleotide
  Antisense strand to SEQ ID NO: 1960438
acauuccaacuuuauaucu

SEQ ID NO: 1960440 - RNA, 19 nt, Artificial Sequence
  Description of Artificial Sequence: Synthetic oligonucleotide
  Sense strand starting at position 98 of SEQ ID NO: 1880348
ccagaaucccuauggaacu

SEQ ID NO: 1960441 - RNA, 19 nt, Artificial Sequence
  Description of Artificial Sequence: Synthetic oligonucleotide
  Antisense strand to SEQ ID NO: 1960440
aguuccauagggauucugg

SEQ ID NO: 1960442 - RNA, 19 nt, Artificial Sequence
  Description of Artificial Sequence: Synthetic oligonucleotide
  Sense strand starting at position 349 of SEQ ID NO: 1880348
ucauuaggcucccuuggaa

SEQ ID NO: 1960443 - RNA, 19 nt, Artificial Sequence
  Description of Artificial Sequence: Synthetic oligonucleotide
  Antisense strand to SEQ ID NO: 1960442
uuccaagggagccuaauga

SEQ ID NO: 1960444 - RNA, 19 nt, Artificial Sequence
  Description of Artificial Sequence: Synthetic oligonucleotide
  Sense strand starting at position 478 of SEQ ID NO: 1880348
cccacuguuggguauauaa

SEQ ID NO: 1960445 - RNA, 19 nt, Artificial Sequence
  Description of Artificial Sequence: Synthetic oligonucleotide
  Antisense strand to SEQ ID NO: 1960444
uuauauacccaacaguggg

SEQ ID NO: 1960446 - RNA, 19 nt, Artificial Sequence
  Description of Artificial Sequence: Synthetic oligonucleotide
  Sense strand starting at position 705 of SEQ ID NO: 1880348
aggccauaauccuaaacga

SEQ ID NO: 1960447 - RNA, 19 nt, Artificial Sequence
  Description of Artificial Sequence: Synthetic oligonucleotide
  Antisense strand to SEQ ID NO: 1960446
ucguuuaggauuauggccu

SEQ ID NO: 1960448 - RNA, 19 nt, Artificial Sequence
  Description of Artificial Sequence: Synthetic oligonucleotide
  Sense strand starting at position 791 of SEQ ID NO: 1880348
acacuuacaagugggagua

SEQ ID NO: 1960449 - RNA, 19 nt, Artificial Sequence
  Description of Artificial Sequence: Synthetic oligonucleotide
  Antisense strand to SEQ ID NO: 1960448
uacucccacuuguaagugu

SEQ ID NO: 1960450 - RNA, 19 nt, Artificial Sequence
  Description of Artificial Sequence: Synthetic oligonucleotide
  Sense strand starting at position 1243 of SEQ ID NO: 1880348
gcaauauacccaugugacu

SEQ ID NO: 1960451 - RNA, 19 nt, Artificial Sequence
  Description of Artificial Sequence: Synthetic oligonucleotide
  Antisense strand to SEQ ID NO: 1960450
agucacauggguauauugc

SEQ ID NO: 1960452 - RNA, 19 nt, Artificial Sequence
  Description of Artificial Sequence: Synthetic oligonucleotide
  Sense strand starting at position 1333 of SEQ ID NO: 1880348
uaaaguguaucacugugga

SEQ ID NO: 1960453 - RNA, 19 nt, Artificial Sequence
  Description of Artificial Sequence: Synthetic oligonucleotide
  Antisense strand to SEQ ID NO: 1960452
uccacagugauacacuuua

SEQ ID NO: 1960454 - RNA, 19 nt, Artificial Sequence
  Description of Artificial Sequence: Synthetic oligonucleotide
  Sense strand starting at position 1336 of SEQ ID NO: 1880348
aguguaucacuguggaaag

SEQ ID NO: 1960455 - RNA, 19 nt, Artificial Sequence
  Description of Artificial Sequence: Synthetic oligonucleotide
  Antisense strand to SEQ ID NO: 1960454
cuuuccacagugauacacu

SEQ ID NO: 1960456 - RNA, 19 nt, Artificial Sequence
  Description of Artificial Sequence: Synthetic oligonucleotide
  Sense strand starting at position 1358 of SEQ ID NO: 1880348
aaacgucaaggacauguua

SEQ ID NO: 1960457 - RNA, 19 nt, Artificial Sequence
  Description of Artificial Sequence: Synthetic oligonucleotide
  Antisense strand to SEQ ID NO: 1960456
uaacauguccuugacguuu

SEQ ID NO: 1960458 - RNA, 19 nt, Artificial Sequence
  Description of Artificial Sequence: Synthetic oligonucleotide
  Sense strand starting at position 1360 of SEQ ID NO: 1880348
acgucaaggacauguuaua

SEQ ID NO: 1960459 - RNA, 19 nt, Artificial Sequence
  Description of Artificial Sequence: Synthetic oligonucleotide
  Antisense strand to SEQ ID NO: 1960458
uauaacauguccuugacgu

SEQ ID NO: 1960460 - RNA, 19 nt, Artificial Sequence
  Description of Artificial Sequence: Synthetic oligonucleotide
  Sense strand starting at position 2228 of SEQ ID NO: 1880348
guuacaaggcuuugcucau

SEQ ID NO: 1960461 - RNA, 19 nt, Artificial Sequence
  Description of Artificial Sequence: Synthetic oligonucleotide
  Antisense strand to SEQ ID NO: 1960460
augagcaaagccuuguaac

SEQ ID NO: 1960462 - RNA, 19 nt, Artificial Sequence
  Description of Artificial Sequence: Synthetic oligonucleotide
  Sense strand starting at position 2229 of SEQ ID NO: 1880348
uuacaaggcuuugcucauu

SEQ ID NO: 1960463 - RNA, 19 nt, Artificial Sequence
  Description of Artificial Sequence: Synthetic oligonucleotide
  Antisense strand to SEQ ID NO: 1960462
aaugagcaaagccuuguaa

SEQ ID NO: 1960464 - RNA, 19 nt, Artificial Sequence
  Description of Artificial Sequence: Synthetic oligonucleotide
  Sense strand starting at position 2262 of SEQ ID NO: 1880348
cugcucauuuauuggacaa

SEQ ID NO: 1960465 - RNA, 19 nt, Artificial Sequence
  Description of Artificial Sequence: Synthetic oligonucleotide
  Antisense strand to SEQ ID NO: 1960464
uuguccaauaaaugagcag

SEQ ID NO: 1960466 - RNA, 19 nt, Artificial Sequence
  Description of Artificial Sequence: Synthetic oligonucleotide
  Sense strand starting at position 2264 of SEQ ID NO: 1880348
gcucauuuauuggacaacu

SEQ ID NO: 1960467 - RNA, 19 nt, Artificial Sequence
  Description of Artificial Sequence: Synthetic oligonucleotide
  Antisense strand to SEQ ID NO: 1960466
aguuguccaauaaaugagc

SEQ ID NO: 1960468 - RNA, 19 nt, Artificial Sequence
  Description of Artificial Sequence: Synthetic oligonucleotide
  Sense strand starting at position 2572 of SEQ ID NO: 1880348
ggaagcguguugagaggaa

SEQ ID NO: 1960469 - RNA, 19 nt, Artificial Sequence
  Description of Artificial Sequence: Synthetic oligonucleotide
  Antisense strand to SEQ ID NO: 1960468
uuccucucaacacgcuucc

SEQ ID NO: 1960470 - RNA, 19 nt, Artificial Sequence
  Description of Artificial Sequence: Synthetic oligonucleotide
  Sense strand starting at position 2576 of SEQ ID NO: 1880348
gcguguugagaggaaacaa

SEQ ID NO: 1960471 - RNA, 19 nt, Artificial Sequence
  Description of Artificial Sequence: Synthetic oligonucleotide
  Antisense strand to SEQ ID NO: 1960470
uuguuuccucucaacacgc

SEQ ID NO: 1960472 - RNA, 19 nt, Artificial Sequence
  Description of Artificial Sequence: Synthetic oligonucleotide
  Sense strand starting at position 2586 of SEQ ID NO: 1880348
aggaaacaaucguuaagua

SEQ ID NO: 1960473 - RNA, 19 nt, Artificial Sequence
  Description of Artificial Sequence: Synthetic oligonucleotide
  Antisense strand to SEQ ID NO: 1960472
uacuuaacgauuguuuccu

SEQ ID NO: 1960474 - RNA, 19 nt, Artificial Sequence
  Description of Artificial Sequence: Synthetic oligonucleotide
  Sense strand starting at position 2587 of SEQ ID NO: 1880348
ggaaacaaucguuaaguac

SEQ ID NO: 1960475 - RNA, 19 nt, Artificial Sequence
  Description of Artificial Sequence: Synthetic oligonucleotide
  Antisense strand to SEQ ID NO: 1960474
guacuuaacgauuguuucc

SEQ ID NO: 1960476 - RNA, 19 nt, Artificial Sequence
  Description of Artificial Sequence: Synthetic oligonucleotide
  Sense strand starting at position 2595 of SEQ ID NO: 1880348
ucguuaaguacgggaccua

SEQ ID NO: 1960477 - RNA, 19 nt, Artificial Sequence
  Description of Artificial Sequence: Synthetic oligonucleotide
  Antisense strand to SEQ ID NO: 1960476
uaggucccguacuuaacga

SEQ ID NO: 1960478 - RNA, 19 nt, Artificial Sequence
  Description of Artificial Sequence: Synthetic oligonucleotide
  Sense strand starting at position 2618 of SEQ ID NO: 1880348
acaccaauauuguagaugu

SEQ ID NO: 1960479 - RNA, 19 nt, Artificial Sequence
  Description of Artificial Sequence: Synthetic oligonucleotide
  Antisense strand to SEQ ID NO: 1960478
acaucuacaauauuggugu

SEQ ID NO: 1960480 - RNA, 19 nt, Artificial Sequence
  Description of Artificial Sequence: Synthetic oligonucleotide
  Sense strand starting at position 2628 of SEQ ID NO: 1880348
uguagaugugagcaaagga

SEQ ID NO: 1960481 - RNA, 19 nt, Artificial Sequence
  Description of Artificial Sequence: Synthetic oligonucleotide
  Antisense strand to SEQ ID NO: 1960480
uccuuugcucacaucuaca

SEQ ID NO: 1960482 - RNA, 19 nt, Artificial Sequence
  Description of Artificial Sequence: Synthetic oligonucleotide
  Sense strand starting at position 2722 of SEQ ID NO: 1880348
auucucaagcuauggagau

SEQ ID NO: 1960483 - RNA, 19 nt, Artificial Sequence
  Description of Artificial Sequence: Synthetic oligonucleotide
  Antisense strand to SEQ ID NO: 1960482
aucuccauagcuugagaau

SEQ ID NO: 1960484 - RNA, 19 nt, Artificial Sequence
  Description of Artificial Sequence: Synthetic oligonucleotide
  Sense strand starting at position 2744 of SEQ ID NO: 1880348
guguccauuggugaccaua

SEQ ID NO: 1960485 - RNA, 19 nt, Artificial Sequence
  Description of Artificial Sequence: Synthetic oligonucleotide
  Antisense strand to SEQ ID NO: 1960484
uauggucaccaauggacac

SEQ ID NO: 1960486 - RNA, 19 nt, Artificial Sequence
  Description of Artificial Sequence: Synthetic oligonucleotide
  Sense strand starting at position 2746 of SEQ ID NO: 1880348
guccauuggugaccauaga

SEQ ID NO: 1960487 - RNA, 19 nt, Artificial Sequence
  Description of Artificial Sequence: Synthetic oligonucleotide
  Antisense strand to SEQ ID NO: 1960486
ucuauggucaccaauggac

SEQ ID NO: 1960488 - RNA, 19 nt, Artificial Sequence
  Description of Artificial Sequence: Synthetic oligonucleotide
  Sense strand starting at position 2928 of SEQ ID NO: 1880348
gcuggugaaucgcuuuaac

SEQ ID NO: 1960489 - RNA, 19 nt, Artificial Sequence
  Description of Artificial Sequence: Synthetic oligonucleotide
  Antisense strand to SEQ ID NO: 1960488
guuaaagcgauucaccagc

SEQ ID NO: 1960490 - RNA, 19 nt, Artificial Sequence
  Description of Artificial Sequence: Synthetic oligonucleotide
  Sense strand starting at position 3046 of SEQ ID NO: 1880348
ggaucaaacuucgggaaua

SEQ ID NO: 1960491 - RNA, 19 nt, Artificial Sequence
  Description of Artificial Sequence: Synthetic oligonucleotide
  Antisense strand to SEQ ID NO: 1960490
uauucccgaaguuugaucc

SEQ ID NO: 1960492 - RNA, 19 nt, Artificial Sequence
  Description of Artificial Sequence: Synthetic oligonucleotide
  Sense strand starting at position 3070 of SEQ ID NO: 1880348
uggacagaugcuugaacca

SEQ ID NO: 1960493 - RNA, 19 nt, Artificial Sequence
  Description of Artificial Sequence: Synthetic oligonucleotide
  Antisense strand to SEQ ID NO: 1960492
ugguucaagcaucugucca

SEQ ID NO: 1960494 - RNA, 19 nt, Artificial Sequence
  Description of Artificial Sequence: Synthetic oligonucleotide
  Sense strand starting at position 3089 of SEQ ID NO: 1880348
ccguaugcuccauauugaa

SEQ ID NO: 1960495 - RNA, 19 nt, Artificial Sequence
  Description of Artificial Sequence: Synthetic oligonucleotide
  Antisense strand to SEQ ID NO: 1960494
uucaauauggagcauacgg

SEQ ID NO: 1960496 - RNA, 19 nt, Artificial Sequence
  Description of Artificial Sequence: Synthetic oligonucleotide
  Sense strand starting at position 3122 of SEQ ID NO: 1880348
gcauuaaauugugccuaua

SEQ ID NO: 1960497 - RNA, 19 nt, Artificial Sequence
  Description of Artificial Sequence: Synthetic oligonucleotide
  Antisense strand to SEQ ID NO: 1960496
uauaggcacaauuuaaugc

SEQ ID NO: 1960498 - RNA, 19 nt, Artificial Sequence
  Description of Artificial Sequence: Synthetic oligonucleotide
  Sense strand starting at position 3437 of SEQ ID NO: 1880348
guugcaguagucuaagaaa

SEQ ID NO: 1960499 - RNA, 19 nt, Artificial Sequence
  Description of Artificial Sequence: Synthetic oligonucleotide
  Antisense strand to SEQ ID NO: 1960498
uuucuuagacuacugcaac

SEQ ID NO: 1960500 - RNA, 19 nt, Artificial Sequence
  Description of Artificial Sequence: Synthetic oligonucleotide
  Sense strand starting at position 3459 of SEQ ID NO: 1880348
caggguuucccuuaguaac

SEQ ID NO: 1960501 - RNA, 19 nt, Artificial Sequence
  Description of Artificial Sequence: Synthetic oligonucleotide
  Antisense strand to SEQ ID NO: 1960500
guuacuaagggaaacccug

SEQ ID NO: 1960502 - RNA, 19 nt, Artificial Sequence
  Description of Artificial Sequence: Synthetic oligonucleotide
  Sense strand starting at position 3461 of SEQ ID NO: 1880348
ggguuucccuuaguaacua

SEQ ID NO: 1960503 - RNA, 19 nt, Artificial Sequence
  Description of Artificial Sequence: Synthetic oligonucleotide
  Antisense strand to SEQ ID NO: 1960502
uaguuacuaagggaaaccc

SEQ ID NO: 1960504 - RNA, 19 nt, Artificial Sequence
  Description of Artificial Sequence: Synthetic oligonucleotide
  Sense strand starting at position 3477 of SEQ ID NO: 1880348
cuaugagcuccaugaaggu

SEQ ID NO: 1960505 - RNA, 19 nt, Artificial Sequence
  Description of Artificial Sequence: Synthetic oligonucleotide
  Antisense strand to SEQ ID NO: 1960504
accuucauggagcucauag

SEQ ID NO: 1960506 - RNA, 19 nt, Artificial Sequence
  Description of Artificial Sequence: Synthetic oligonucleotide
  Sense strand starting at position 3534 of SEQ ID NO: 1880348
gccucaaucgauguuugcu

SEQ ID NO: 1960507 - RNA, 19 nt, Artificial Sequence
  Description of Artificial Sequence: Synthetic oligonucleotide
  Antisense strand to SEQ ID NO: 1960506
agcaaacaucgauugaggc

SEQ ID NO: 1960508 - RNA, 19 nt, Artificial Sequence
  Description of Artificial Sequence: Synthetic oligonucleotide
  Sense strand starting at position 3536 of SEQ ID NO: 1880348
cucaaucgauguuugcuua

SEQ ID NO: 1960509 - RNA, 19 nt, Artificial Sequence
  Description of Artificial Sequence: Synthetic oligonucleotide
  Antisense strand to SEQ ID NO: 1960508
uaagcaaacaucgauugag

SEQ ID NO: 1960510 - RNA, 19 nt, Artificial Sequence
  Description of Artificial Sequence: Synthetic oligonucleotide
  Sense strand starting at position 3537 of SEQ ID NO: 1880348
ucaaucgauguuugcuuaa

SEQ ID NO: 1960511 - RNA, 19 nt, Artificial Sequence
  Description of Artificial Sequence: Synthetic oligonucleotide
  Antisense strand to SEQ ID NO: 1960510
uuaagcaaacaucgauuga

SEQ ID NO: 1960512 - RNA, 19 nt, Artificial Sequence
  Description of Artificial Sequence: Synthetic oligonucleotide
  Sense strand starting at position 3539 of SEQ ID NO: 1880348
aaucgauguuugcuuaaag

SEQ ID NO: 1960513 - RNA, 19 nt, Artificial Sequence
  Description of Artificial Sequence: Synthetic oligonucleotide
  Antisense strand to SEQ ID NO: 1960512
cuuuaagcaaacaucgauu

SEQ ID NO: 1960514 - RNA, 19 nt, Artificial Sequence
  Description of Artificial Sequence: Synthetic oligonucleotide
  Sense strand starting at position 3540 of SEQ ID NO: 1880348
aucgauguuugcuuaaaga

SEQ ID NO: 1960515 - RNA, 19 nt, Artificial Sequence
  Description of Artificial Sequence: Synthetic oligonucleotide
  Antisense strand to SEQ ID NO: 1960514
ucuuuaagcaaacaucgau

SEQ ID NO: 1960516 - RNA, 19 nt, Artificial Sequence
  Description of Artificial Sequence: Synthetic oligonucleotide
  Sense strand starting at position 3644 of SEQ ID NO: 1880348
uugucuuugaaauguagag

SEQ ID NO: 1960517 - RNA, 19 nt, Artificial Sequence
  Description of Artificial Sequence: Synthetic oligonucleotide
  Antisense strand to SEQ ID NO: 1960516
cucuacauuucaaagacaa

SEQ ID NO: 1960518 - RNA, 19 nt, Artificial Sequence
  Description of Artificial Sequence: Synthetic oligonucleotide
  Sense strand starting at position 3650 of SEQ ID NO: 1880348
uugaaauguagaggguaga

SEQ ID NO: 1960519 - RNA, 19 nt, Artificial Sequence
  Description of Artificial Sequence: Synthetic oligonucleotide
  Antisense strand to SEQ ID NO: 1960518
ucuacccucuacauuucaa

SEQ ID NO: 1960520 - RNA, 19 nt, Artificial Sequence
  Description of Artificial Sequence: Synthetic oligonucleotide
  Sense strand starting at position 678 of SEQ ID NO: 1880349
ucucauuauuucucugugu

SEQ ID NO: 1960521 - RNA, 19 nt, Artificial Sequence
  Description of Artificial Sequence: Synthetic oligonucleotide
  Antisense strand to SEQ ID NO: 1960520
acacagagaaauaaugaga

SEQ ID NO: 1960522 - RNA, 19 nt, Artificial Sequence
  Description of Artificial Sequence: Synthetic oligonucleotide
  Sense strand starting at position 680 of SEQ ID NO: 1880349
ucauuauuucucuguguga

SEQ ID NO: 1960523 - RNA, 19 nt, Artificial Sequence
  Description of Artificial Sequence: Synthetic oligonucleotide
  Antisense strand to SEQ ID NO: 1960522
ucacacagagaaauaauga

SEQ ID NO: 1960524 - RNA, 19 nt, Artificial Sequence
  Description of Artificial Sequence: Synthetic oligonucleotide
  Sense strand starting at position 816 of SEQ ID NO: 1880349
cauguuaugucuuuaggaa

SEQ ID NO: 1960525 - RNA, 19 nt, Artificial Sequence
  Description of Artificial Sequence: Synthetic oligonucleotide
  Antisense strand to SEQ ID NO: 1960524
uuccuaaagacauaacaug

SEQ ID NO: 1960526 - RNA, 19 nt, Artificial Sequence
  Description of Artificial Sequence: Synthetic oligonucleotide
  Sense strand starting at position 817 of SEQ ID NO: 1880349
auguuaugucuuuaggaaa

SEQ ID NO: 1960527 - RNA, 19 nt, Artificial Sequence
  Description of Artificial Sequence: Synthetic oligonucleotide
  Antisense strand to SEQ ID NO: 1960526
uuuccuaaagacauaacau

SEQ ID NO: 1960528 - RNA, 19 nt, Artificial Sequence
  Description of Artificial Sequence: Synthetic oligonucleotide
  Sense strand starting at position 1054 of SEQ ID NO: 1880349
gggccaagguuuccaacua

SEQ ID NO: 1960529 - RNA, 19 nt, Artificial Sequence
  Description of Artificial Sequence: Synthetic oligonucleotide
  Antisense strand to SEQ ID NO: 1960528
uaguuggaaaccuuggccc

SEQ ID NO: 1960530 - RNA, 19 nt, Artificial Sequence
  Description of Artificial Sequence: Synthetic oligonucleotide
  Sense strand starting at position 1228 of SEQ ID NO: 1880349
guuguaaauuuacagagaa

SEQ ID NO: 1960531 - RNA, 19 nt, Artificial Sequence
  Description of Artificial Sequence: Synthetic oligonucleotide
  Antisense strand to SEQ ID NO: 1960530
uucucuguaaauuuacaac

SEQ ID NO: 1960532 - RNA, 19 nt, Artificial Sequence
  Description of Artificial Sequence: Synthetic oligonucleotide
  Sense strand starting at position 1308 of SEQ ID NO: 1880349
ucgcaagagcaucgaauuu

SEQ ID NO: 1960533 - RNA, 19 nt, Artificial Sequence
  Description of Artificial Sequence: Synthetic oligonucleotide
  Antisense strand to SEQ ID NO: 1960532
aaauucgaugcucuugcga

SEQ ID NO: 1960534 - RNA, 19 nt, Artificial Sequence
  Description of Artificial Sequence: Synthetic oligonucleotide
  Sense strand starting at position 1359 of SEQ ID NO: 1880349
ggaggaaguccucgggaug

SEQ ID NO: 1960535 - RNA, 19 nt, Artificial Sequence
  Description of Artificial Sequence: Synthetic oligonucleotide
  Antisense strand to SEQ ID NO: 1960534
caucccgaggacuuccucc

SEQ ID NO: 1960536 - RNA, 19 nt, Artificial Sequence
  Description of Artificial Sequence: Synthetic oligonucleotide
  Sense strand starting at position 1376 of SEQ ID NO: 1880349
uggcuuucagggugucauu

SEQ ID NO: 1960537 - RNA, 19 nt, Artificial Sequence
  Description of Artificial Sequence: Synthetic oligonucleotide
  Antisense strand to SEQ ID NO: 1960536
aaugacacccugaaagcca

SEQ ID NO: 1960538 - RNA, 19 nt, Artificial Sequence
  Description of Artificial Sequence: Synthetic oligonucleotide
  Sense strand starting at position 1407 of SEQ ID NO: 1880349
guauauaauuacucagagu

SEQ ID NO: 1960539 - RNA, 19 nt, Artificial Sequence
  Description of Artificial Sequence: Synthetic oligonucleotide
  Antisense strand to SEQ ID NO: 1960538
acucugaguaauuauauac

SEQ ID NO: 1960540 - RNA, 19 nt, Artificial Sequence
  Description of Artificial Sequence: Synthetic oligonucleotide
  Sense strand starting at position 1493 of SEQ ID NO: 1880349
uuauguagcuucucuuuga

SEQ ID NO: 1960541 - RNA, 19 nt, Artificial Sequence
  Description of Artificial Sequence: Synthetic oligonucleotide
  Antisense strand to SEQ ID NO: 1960540
ucaaagagaagcuacauaa

SEQ ID NO: 1960542 - RNA, 19 nt, Artificial Sequence
  Description of Artificial Sequence: Synthetic oligonucleotide
  Sense strand starting at position 1552 of SEQ ID NO: 1880349
guccuaauaucccugcgga

SEQ ID NO: 1960543 - RNA, 19 nt, Artificial Sequence
  Description of Artificial Sequence: Synthetic oligonucleotide
  Antisense strand to SEQ ID NO: 1960542
uccgcagggauauuaggac

SEQ ID NO: 1960544 - RNA, 19 nt, Artificial Sequence
  Description of Artificial Sequence: Synthetic oligonucleotide
  Sense strand starting at position 1553 of SEQ ID NO: 1880349
uccuaauaucccugcggau

SEQ ID NO: 1960545 - RNA, 19 nt, Artificial Sequence
  Description of Artificial Sequence: Synthetic oligonucleotide
  Antisense strand to SEQ ID NO: 1960544
auccgcagggauauuagga

SEQ ID NO: 1960546 - RNA, 19 nt, Artificial Sequence
  Description of Artificial Sequence: Synthetic oligonucleotide
  Sense strand starting at position 1555 of SEQ ID NO: 1880349
cuaauaucccugcggauug

SEQ ID NO: 1960547 - RNA, 19 nt, Artificial Sequence
  Description of Artificial Sequence: Synthetic oligonucleotide
  Antisense strand to SEQ ID NO: 1960546
caauccgcagggauauuag

SEQ ID NO: 1960548 - RNA, 19 nt, Artificial Sequence
  Description of Artificial Sequence: Synthetic oligonucleotide
  Sense strand starting at position 1572 of SEQ ID NO: 1880349
ugguuaagaagcgagcauu

SEQ ID NO: 1960549 - RNA, 19 nt, Artificial Sequence
  Description of Artificial Sequence: Synthetic oligonucleotide
  Antisense strand to SEQ ID NO: 1960548
aaugcucgcuucuuaacca

SEQ ID NO: 1960550 - RNA, 19 nt, Artificial Sequence
  Description of Artificial Sequence: Synthetic oligonucleotide
  Sense strand starting at position 1575 of SEQ ID NO: 1880349
uuaagaagcgagcauuaca

SEQ ID NO: 1960551 - RNA, 19 nt, Artificial Sequence
  Description of Artificial Sequence: Synthetic oligonucleotide
  Antisense strand to SEQ ID NO: 1960550
uguaaugcucgcuucuuaa

SEQ ID NO: 1960552 - RNA, 19 nt, Artificial Sequence
  Description of Artificial Sequence: Synthetic oligonucleotide
  Sense strand starting at position 1595 of SEQ ID NO: 1880349
gugguuuguggauaauuaa

SEQ ID NO: 1960553 - RNA, 19 nt, Artificial Sequence
  Description of Artificial Sequence: Synthetic oligonucleotide
  Antisense strand to SEQ ID NO: 1960552
uuaauuauccacaaaccac

SEQ ID NO: 1960554 - RNA, 19 nt, Artificial Sequence
  Description of Artificial Sequence: Synthetic oligonucleotide
  Sense strand starting at position 1598 of SEQ ID NO: 1880349
guuuguggauaauuaaauc

SEQ ID NO: 1960555 - RNA, 19 nt, Artificial Sequence
  Description of Artificial Sequence: Synthetic oligonucleotide
  Antisense strand to SEQ ID NO: 1960554
gauuuaauuauccacaaac

SEQ ID NO: 1960556 - RNA, 19 nt, Artificial Sequence
  Description of Artificial Sequence: Synthetic oligonucleotide
  Sense strand starting at position 1615 of SEQ ID NO: 1880349
ucaauugauuaugucaagu

SEQ ID NO: 1960557 - RNA, 19 nt, Artificial Sequence
  Description of Artificial Sequence: Synthetic oligonucleotide
  Antisense strand to SEQ ID NO: 1960556
acuugacauaaucaauuga

SEQ ID NO: 1960558 - RNA, 19 nt, Artificial Sequence
  Description of Artificial Sequence: Synthetic oligonucleotide
  Sense strand starting at position 1712 of SEQ ID NO: 1880349
uguacuuuaauguguuuga

SEQ ID NO: 1960559 - RNA, 19 nt, Artificial Sequence
  Description of Artificial Sequence: Synthetic oligonucleotide
  Antisense strand to SEQ ID NO: 1960558
ucaaacacauuaaaguaca

SEQ ID NO: 1960560 - RNA, 19 nt, Artificial Sequence
  Description of Artificial Sequence: Synthetic oligonucleotide
  Sense strand starting at position 1713 of SEQ ID NO: 1880349
guacuuuaauguguuugaa

SEQ ID NO: 1960561 - RNA, 19 nt, Artificial Sequence
  Description of Artificial Sequence: Synthetic oligonucleotide
  Antisense strand to SEQ ID NO: 1960560
uucaaacacauuaaaguac

SEQ ID NO: 1960562 - RNA, 19 nt, Artificial Sequence
  Description of Artificial Sequence: Synthetic oligonucleotide
  Sense strand starting at position 1735 of SEQ ID NO: 1880349
ugaccucggacaugaaagu

SEQ ID NO: 1960563 - RNA, 19 nt, Artificial Sequence
  Description of Artificial Sequence: Synthetic oligonucleotide
  Antisense strand to SEQ ID NO: 1960562
acuuucauguccgagguca

SEQ ID NO: 1960564 - RNA, 19 nt, Artificial Sequence
  Description of Artificial Sequence: Synthetic oligonucleotide
  Sense strand starting at position 1752 of SEQ ID NO: 1880349
guacgaaucacuggaacug

SEQ ID NO: 1960565 - RNA, 19 nt, Artificial Sequence
  Description of Artificial Sequence: Synthetic oligonucleotide
  Antisense strand to SEQ ID NO: 1960564
caguuccagugauucguac

SEQ ID NO: 1960566 - RNA, 19 nt, Artificial Sequence
  Description of Artificial Sequence: Synthetic oligonucleotide
  Sense strand starting at position 2061 of SEQ ID NO: 1880349
ucacgugacgaguguuaaa

SEQ ID NO: 1960567 - RNA, 19 nt, Artificial Sequence
  Description of Artificial Sequence: Synthetic oligonucleotide
  Antisense strand to SEQ ID NO: 1960566
uuuaacacucgucacguga

SEQ ID NO: 1960568 - RNA, 19 nt, Artificial Sequence
  Description of Artificial Sequence: Synthetic oligonucleotide
  Sense strand starting at position 2072 of SEQ ID NO: 1880349
guguuaaaugcccacacuu

SEQ ID NO: 1960569 - RNA, 19 nt, Artificial Sequence
  Description of Artificial Sequence: Synthetic oligonucleotide
  Antisense strand to SEQ ID NO: 1960568
aagugugggcauuuaacac

SEQ ID NO: 1960570 - RNA, 19 nt, Artificial Sequence
  Description of Artificial Sequence: Synthetic oligonucleotide
  Sense strand starting at position 2485 of SEQ ID NO: 1880349
acagucuaguggcugauau

SEQ ID NO: 1960571 - RNA, 19 nt, Artificial Sequence
  Description of Artificial Sequence: Synthetic oligonucleotide
  Antisense strand to SEQ ID NO: 1960570
auaucagccacuagacugu

SEQ ID NO: 1960572 - RNA, 19 nt, Artificial Sequence
  Description of Artificial Sequence: Synthetic oligonucleotide
  Sense strand starting at position 2766 of SEQ ID NO: 1880349
gucccuuacuccgccaaga

SEQ ID NO: 1960573 - RNA, 19 nt, Artificial Sequence
  Description of Artificial Sequence: Synthetic oligonucleotide
  Antisense strand to SEQ ID NO: 1960572
ucuuggcggaguaagggac

SEQ ID NO: 1960574 - RNA, 19 nt, Artificial Sequence
  Description of Artificial Sequence: Synthetic oligonucleotide
  Sense strand starting at position 2785 of SEQ ID NO: 1880349
gcagcuaugaccugggcua

SEQ ID NO: 1960575 - RNA, 19 nt, Artificial Sequence
  Description of Artificial Sequence: Synthetic oligonucleotide
  Antisense strand to SEQ ID NO: 1960574
uagcccaggucauagcugc

SEQ ID NO: 1960576 - RNA, 19 nt, Artificial Sequence
  Description of Artificial Sequence: Synthetic oligonucleotide
  Sense strand starting at position 2893 of SEQ ID NO: 1880349
gugccgagucggucuaguu

SEQ ID NO: 1960577 - RNA, 19 nt, Artificial Sequence
  Description of Artificial Sequence: Synthetic oligonucleotide
  Antisense strand to SEQ ID NO: 1960576
aacuagaccgacucggcac

SEQ ID NO: 1960578 - RNA, 19 nt, Artificial Sequence
  Description of Artificial Sequence: Synthetic oligonucleotide
  Sense strand starting at position 2894 of SEQ ID NO: 1880349
ugccgagucggucuaguua

SEQ ID NO: 1960579 - RNA, 19 nt, Artificial Sequence
  Description of Artificial Sequence: Synthetic oligonucleotide
  Antisense strand to SEQ ID NO: 1960578
uaacuagaccgacucggca

SEQ ID NO: 1960580 - RNA, 19 nt, Artificial Sequence
  Description of Artificial Sequence: Synthetic oligonucleotide
  Sense strand starting at position 3093 of SEQ ID NO: 1880349
gugcucugccugccucaua

SEQ ID NO: 1960581 - RNA, 19 nt, Artificial Sequence
  Description of Artificial Sequence: Synthetic oligonucleotide
  Antisense strand to SEQ ID NO: 1960580
uaugaggcaggcagagcac

SEQ ID NO: 1960582 - RNA, 19 nt, Artificial Sequence
  Description of Artificial Sequence: Synthetic oligonucleotide
  Sense strand starting at position 3323 of SEQ ID NO: 1880349
cuggguugcgcuguucuua

SEQ ID NO: 1960583 - RNA, 19 nt, Artificial Sequence
  Description of Artificial Sequence: Synthetic oligonucleotide
  Antisense strand to SEQ ID NO: 1960582
uaagaacagcgcaacccag

SEQ ID NO: 1960584 - RNA, 19 nt, Artificial Sequence
  Description of Artificial Sequence: Synthetic oligonucleotide
  Sense strand starting at position 3343 of SEQ ID NO: 1880349
gauucuuuaucguugcaga

SEQ ID NO: 1960585 - RNA, 19 nt, Artificial Sequence
  Description of Artificial Sequence: Synthetic oligonucleotide
  Antisense strand to SEQ ID NO: 1960584
ucugcaacgauaaagaauc

SEQ ID NO: 1960586 - RNA, 19 nt, Artificial Sequence
  Description of Artificial Sequence: Synthetic oligonucleotide
  Sense strand starting at position 3344 of SEQ ID NO: 1880349
auucuuuaucguugcagag

SEQ ID NO: 1960587 - RNA, 19 nt, Artificial Sequence
  Description of Artificial Sequence: Synthetic oligonucleotide
  Antisense strand to SEQ ID NO: 1960586
cucugcaacgauaaagaau

SEQ ID NO: 1960588 - RNA, 19 nt, Artificial Sequence
  Description of Artificial Sequence: Synthetic oligonucleotide
  Sense strand starting at position 3368 of SEQ ID NO: 1880349
ggaccuugagccugaaauu

SEQ ID NO: 1960589 - RNA, 19 nt, Artificial Sequence
  Description of Artificial Sequence: Synthetic oligonucleotide
  Antisense strand to SEQ ID NO: 1960588
aauuucaggcucaaggucc

SEQ ID NO: 1960590 - RNA, 19 nt, Artificial Sequence
  Description of Artificial Sequence: Synthetic oligonucleotide
  Sense strand starting at position 3685 of SEQ ID NO: 1880349
guaagcuucuaggcccaaa

SEQ ID NO: 1960591 - RNA, 19 nt, Artificial Sequence
  Description of Artificial Sequence: Synthetic oligonucleotide
  Antisense strand to SEQ ID NO: 1960590
uuugggccuagaagcuuac

SEQ ID NO: 1960592 - RNA, 19 nt, Artificial Sequence
  Description of Artificial Sequence: Synthetic oligonucleotide
  Sense strand starting at position 3756 of SEQ ID NO: 1880349
acagaaaucccguaccucu

SEQ ID NO: 1960593 - RNA, 19 nt, Artificial Sequence
  Description of Artificial Sequence: Synthetic oligonucleotide
  Antisense strand to SEQ ID NO: 1960592
agagguacgggauuucugu

SEQ ID NO: 1960594 - RNA, 19 nt, Artificial Sequence
  Description of Artificial Sequence: Synthetic oligonucleotide
  Sense strand starting at position 3778 of SEQ ID NO: 1880349
uacugauuaagcgggugaa

SEQ ID NO: 1960595 - RNA, 19 nt, Artificial Sequence
  Description of Artificial Sequence: Synthetic oligonucleotide
  Antisense strand to SEQ ID NO: 1960594
uucacccgcuuaaucagua

SEQ ID NO: 1960596 - RNA, 19 nt, Artificial Sequence
  Description of Artificial Sequence: Synthetic oligonucleotide
  Sense strand starting at position 3779 of SEQ ID NO: 1880349
acugauuaagcgggugaaa

SEQ ID NO: 1960597 - RNA, 19 nt, Artificial Sequence
  Description of Artificial Sequence: Synthetic oligonucleotide
  Antisense strand to SEQ ID NO: 1960596
uuucacccgcuuaaucagu

SEQ ID NO: 1960598 - RNA, 19 nt, Artificial Sequence
  Description of Artificial Sequence: Synthetic oligonucleotide
  Sense strand starting at position 3781 of SEQ ID NO: 1880349
ugauuaagcgggugaaaua

SEQ ID NO: 1960599 - RNA, 19 nt, Artificial Sequence
  Description of Artificial Sequence: Synthetic oligonucleotide
  Antisense strand to SEQ ID NO: 1960598
uauuucacccgcuuaauca

SEQ ID NO: 1960600 - RNA, 19 nt, Artificial Sequence
  Description of Artificial Sequence: Synthetic oligonucleotide
  Sense strand starting at position 201 of SEQ ID NO: 1880350
aauggcaaaucagugugaa

SEQ ID NO: 1960601 - RNA, 19 nt, Artificial Sequence
  Description of Artificial Sequence: Synthetic oligonucleotide
  Antisense strand to SEQ ID NO: 1960600
uucacacugauuugccauu

SEQ ID NO: 1960602 - RNA, 19 nt, Artificial Sequence
  Description of Artificial Sequence: Synthetic oligonucleotide
  Sense strand starting at position 202 of SEQ ID NO: 1880350
auggcaaaucagugugaau

SEQ ID NO: 1960603 - RNA, 19 nt, Artificial Sequence
  Description of Artificial Sequence: Synthetic oligonucleotide
  Antisense strand to SEQ ID NO: 1960602
auucacacugauuugccau

SEQ ID NO: 1960604 - RNA, 19 nt, Artificial Sequence
  Description of Artificial Sequence: Synthetic oligonucleotide
  Sense strand starting at position 249 of SEQ ID NO: 1880350
acauccauguagcuagauu

SEQ ID NO: 1960605 - RNA, 19 nt, Artificial Sequence
  Description of Artificial Sequence: Synthetic oligonucleotide
  Antisense strand to SEQ ID NO: 1960604
aaucuagcuacauggaugu

SEQ ID NO: 1960606 - RNA, 19 nt, Artificial Sequence
  Description of Artificial Sequence: Synthetic oligonucleotide
  Sense strand starting at position 267 of SEQ ID NO: 1880350
uugugaaaucacugaagau

SEQ ID NO: 1960607 - RNA, 19 nt, Artificial Sequence
  Description of Artificial Sequence: Synthetic oligonucleotide
  Antisense strand to SEQ ID NO: 1960606
aucuucagugauuucacaa

SEQ ID NO: 1960608 - RNA, 19 nt, Artificial Sequence
  Description of Artificial Sequence: Synthetic oligonucleotide
  Sense strand starting at position 295 of SEQ ID NO: 1880350
aaggucaugagugguagua

SEQ ID NO: 1960609 - RNA, 19 nt, Artificial Sequence
  Description of Artificial Sequence: Synthetic oligonucleotide
  Antisense strand to SEQ ID NO: 1960608
uacuaccacucaugaccuu

SEQ ID NO: 1960610 - RNA, 19 nt, Artificial Sequence
  Description of Artificial Sequence: Synthetic oligonucleotide
  Sense strand starting at position 422 of SEQ ID NO: 1880350
aguuauagcguugccugua

SEQ ID NO: 1960611 - RNA, 19 nt, Artificial Sequence
  Description of Artificial Sequence: Synthetic oligonucleotide
  Antisense strand to SEQ ID NO: 1960610
uacaggcaacgcuauaacu

SEQ ID NO: 1960612 - RNA, 19 nt, Artificial Sequence
  Description of Artificial Sequence: Synthetic oligonucleotide
  Sense strand starting at position 638 of SEQ ID NO: 1880350
cccggaguuuccucagaag

SEQ ID NO: 1960613 - RNA, 19 nt, Artificial Sequence
  Description of Artificial Sequence: Synthetic oligonucleotide
  Antisense strand to SEQ ID NO: 1960612
cuucugaggaaacuccggg

SEQ ID NO: 1960614 - RNA, 19 nt, Artificial Sequence
  Description of Artificial Sequence: Synthetic oligonucleotide
  Sense strand starting at position 649 of SEQ ID NO: 1880350
cucagaaggugcuuauacu

SEQ ID NO: 1960615 - RNA, 19 nt, Artificial Sequence
  Description of Artificial Sequence: Synthetic oligonucleotide
  Antisense strand to SEQ ID NO: 1960614
aguauaagcaccuucugag

SEQ ID NO: 1960616 - RNA, 19 nt, Artificial Sequence
  Description of Artificial Sequence: Synthetic oligonucleotide
  Sense strand starting at position 744 of SEQ ID NO: 1880350
ucauguuugguguaaguag

SEQ ID NO: 1960617 - RNA, 19 nt, Artificial Sequence
  Description of Artificial Sequence: Synthetic oligonucleotide
  Antisense strand to SEQ ID NO: 1960616
cuacuuacaccaaacauga

SEQ ID NO: 1960618 - RNA, 19 nt, Artificial Sequence
  Description of Artificial Sequence: Synthetic oligonucleotide
  Sense strand starting at position 778 of SEQ ID NO: 1880350
agagaagggaaucgguuau

SEQ ID NO: 1960619 - RNA, 19 nt, Artificial Sequence
  Description of Artificial Sequence: Synthetic oligonucleotide
  Antisense strand to SEQ ID NO: 1960618
auaaccgauucccuucucu

SEQ ID NO: 1960620 - RNA, 19 nt, Artificial Sequence
  Description of Artificial Sequence: Synthetic oligonucleotide
  Sense strand starting at position 868 of SEQ ID NO: 1880350
uuccaaagagaucguaaug

SEQ ID NO: 1960621 - RNA, 19 nt, Artificial Sequence
  Description of Artificial Sequence: Synthetic oligonucleotide
  Antisense strand to SEQ ID NO: 1960620
cauuacgaucucuuuggaa

SEQ ID NO: 1960622 - RNA, 19 nt, Artificial Sequence
  Description of Artificial Sequence: Synthetic oligonucleotide
  Sense strand starting at position 1364 of SEQ ID NO: 1880350
gagggaaucgcugggcaga

SEQ ID NO: 1960623 - RNA, 19 nt, Artificial Sequence
  Description of Artificial Sequence: Synthetic oligonucleotide
  Antisense strand to SEQ ID NO: 1960622
ucugcccagcgauucccuc

SEQ ID NO: 1960624 - RNA, 19 nt, Artificial Sequence
  Description of Artificial Sequence: Synthetic oligonucleotide
  Sense strand starting at position 2344 of SEQ ID NO: 1880350
ucuggauucugagucauac

SEQ ID NO: 1960625 - RNA, 19 nt, Artificial Sequence
  Description of Artificial Sequence: Synthetic oligonucleotide
  Antisense strand to SEQ ID NO: 1960624
guaugacucagaauccaga

SEQ ID NO: 1960626 - RNA, 19 nt, Artificial Sequence
  Description of Artificial Sequence: Synthetic oligonucleotide
  Sense strand starting at position 2550 of SEQ ID NO: 1880350
auaaguugugauugguaac

SEQ ID NO: 1960627 - RNA, 19 nt, Artificial Sequence
  Description of Artificial Sequence: Synthetic oligonucleotide
  Antisense strand to SEQ ID NO: 1960626
guuaccaaucacaacuuau

SEQ ID NO: 1960628 - RNA, 19 nt, Artificial Sequence
  Description of Artificial Sequence: Synthetic oligonucleotide
  Sense strand starting at position 2621 of SEQ ID NO: 1880350
aggaucuauggcuaagcua

SEQ ID NO: 1960629 - RNA, 19 nt, Artificial Sequence
  Description of Artificial Sequence: Synthetic oligonucleotide
  Antisense strand to SEQ ID NO: 1960628
uagcuuagccauagauccu

SEQ ID NO: 1960630 - RNA, 19 nt, Artificial Sequence
  Description of Artificial Sequence: Synthetic oligonucleotide
  Sense strand starting at position 2624 of SEQ ID NO: 1880350
aucuauggcuaagcuaaua

SEQ ID NO: 1960631 - RNA, 19 nt, Artificial Sequence
  Description of Artificial Sequence: Synthetic oligonucleotide
  Antisense strand to SEQ ID NO: 1960630
uauuagcuuagccauagau

SEQ ID NO: 1960632 - RNA, 19 nt, Artificial Sequence
  Description of Artificial Sequence: Synthetic oligonucleotide
  Sense strand starting at position 2634 of SEQ ID NO: 1880350
aagcuaauacuugguagga

SEQ ID NO: 1960633 - RNA, 19 nt, Artificial Sequence
  Description of Artificial Sequence: Synthetic oligonucleotide
  Antisense strand to SEQ ID NO: 1960632
uccuaccaaguauuagcuu

SEQ ID NO: 1960634 - RNA, 19 nt, Artificial Sequence
  Description of Artificial Sequence: Synthetic oligonucleotide
  Sense strand starting at position 2635 of SEQ ID NO: 1880350
agcuaauacuugguaggaa

SEQ ID NO: 1960635 - RNA, 19 nt, Artificial Sequence
  Description of Artificial Sequence: Synthetic oligonucleotide
  Antisense strand to SEQ ID NO: 1960634
uuccuaccaaguauuagcu

SEQ ID NO: 1960636 - RNA, 19 nt, Artificial Sequence
  Description of Artificial Sequence: Synthetic oligonucleotide
  Sense strand starting at position 2719 of SEQ ID NO: 1880350
gucucaggaacuggucuaa

SEQ ID NO: 1960637 - RNA, 19 nt, Artificial Sequence
  Description of Artificial Sequence: Synthetic oligonucleotide
  Antisense strand to SEQ ID NO: 1960636
uuagaccaguuccugagac

SEQ ID NO: 1960638 - RNA, 19 nt, Artificial Sequence
  Description of Artificial Sequence: Synthetic oligonucleotide
  Sense strand starting at position 2745 of SEQ ID NO: 1880350
uguaguaacucauuuaguc

SEQ ID NO: 1960639 - RNA, 19 nt, Artificial Sequence
  Description of Artificial Sequence: Synthetic oligonucleotide
  Antisense strand to SEQ ID NO: 1960638
gacuaaaugaguuacuaca

SEQ ID NO: 1960640 - RNA, 19 nt, Artificial Sequence
  Description of Artificial Sequence: Synthetic oligonucleotide
  Sense strand starting at position 2778 of SEQ ID NO: 1880350
acaagauaguggcuccuau

SEQ ID NO: 1960641 - RNA, 19 nt, Artificial Sequence
  Description of Artificial Sequence: Synthetic oligonucleotide
  Antisense strand to SEQ ID NO: 1960640
auaggagccacuaucuugu

SEQ ID NO: 1960642 - RNA, 19 nt, Artificial Sequence
  Description of Artificial Sequence: Synthetic oligonucleotide
  Sense strand starting at position 2874 of SEQ ID NO: 1880350
cuaugauguuaagcauuau

SEQ ID NO: 1960643 - RNA, 19 nt, Artificial Sequence
  Description of Artificial Sequence: Synthetic oligonucleotide
  Antisense strand to SEQ ID NO: 1960642
auaaugcuuaacaucauag

SEQ ID NO: 1960644 - RNA, 19 nt, Artificial Sequence
  Description of Artificial Sequence: Synthetic oligonucleotide
  Sense strand starting at position 2878 of SEQ ID NO: 1880350
gauguuaagcauuaugaca

SEQ ID NO: 1960645 - RNA, 19 nt, Artificial Sequence
  Description of Artificial Sequence: Synthetic oligonucleotide
  Antisense strand to SEQ ID NO: 1960644
ugucauaaugcuuaacauc

SEQ ID NO: 1960646 - RNA, 19 nt, Artificial Sequence
  Description of Artificial Sequence: Synthetic oligonucleotide
  Sense strand starting at position 2911 of SEQ ID NO: 1880350
uuuguuacacacuguaaca

SEQ ID NO: 1960647 - RNA, 19 nt, Artificial Sequence
  Description of Artificial Sequence: Synthetic oligonucleotide
  Antisense strand to SEQ ID NO: 1960646
uguuacaguguguaacaaa

SEQ ID NO: 1960648 - RNA, 19 nt, Artificial Sequence
  Description of Artificial Sequence: Synthetic oligonucleotide
  Sense strand starting at position 3027 of SEQ ID NO: 1880350
ucuaucucuuaggugauga

SEQ ID NO: 1960649 - RNA, 19 nt, Artificial Sequence
  Description of Artificial Sequence: Synthetic oligonucleotide
  Antisense strand to SEQ ID NO: 1960648
ucaucaccuaagagauaga

SEQ ID NO: 1960650 - RNA, 19 nt, Artificial Sequence
  Description of Artificial Sequence: Synthetic oligonucleotide
  Sense strand starting at position 3028 of SEQ ID NO: 1880350
cuaucucuuaggugaugag

SEQ ID NO: 1960651 - RNA, 19 nt, Artificial Sequence
  Description of Artificial Sequence: Synthetic oligonucleotide
  Antisense strand to SEQ ID NO: 1960650
cucaucaccuaagagauag

SEQ ID NO: 1960652 - RNA, 19 nt, Artificial Sequence
  Description of Artificial Sequence: Synthetic oligonucleotide
  Sense strand starting at position 3158 of SEQ ID NO: 1880350
uaggguaaaugcuuuaaga

SEQ ID NO: 1960653 - RNA, 19 nt, Artificial Sequence
  Description of Artificial Sequence: Synthetic oligonucleotide
  Antisense strand to SEQ ID NO: 1960652
ucuuaaagcauuuacccua

SEQ ID NO: 1960654 - RNA, 19 nt, Artificial Sequence
  Description of Artificial Sequence: Synthetic oligonucleotide
  Sense strand starting at position 3474 of SEQ ID NO: 1880350
guaagagauggugauuggu

SEQ ID NO: 1960655 - RNA, 19 nt, Artificial Sequence
  Description of Artificial Sequence: Synthetic oligonucleotide
  Antisense strand to SEQ ID NO: 1960654
accaaucaccaucucuuac

SEQ ID NO: 1960656 - RNA, 19 nt, Artificial Sequence
  Description of Artificial Sequence: Synthetic oligonucleotide
  Sense strand starting at position 3480 of SEQ ID NO: 1880350
gauggugauugguuggaua

SEQ ID NO: 1960657 - RNA, 19 nt, Artificial Sequence
  Description of Artificial Sequence: Synthetic oligonucleotide
  Antisense strand to SEQ ID NO: 1960656
uauccaaccaaucaccauc

SEQ ID NO: 1960658 - RNA, 19 nt, Artificial Sequence
  Description of Artificial Sequence: Synthetic oligonucleotide
  Sense strand starting at position 3482 of SEQ ID NO: 1880350
uggugauugguuggauaug

SEQ ID NO: 1960659 - RNA, 19 nt, Artificial Sequence
  Description of Artificial Sequence: Synthetic oligonucleotide
  Antisense strand to SEQ ID NO: 1960658
cauauccaaccaaucacca

SEQ ID NO: 1960660 - RNA, 19 nt, Artificial Sequence
  Description of Artificial Sequence: Synthetic oligonucleotide
  Sense strand starting at position 3534 of SEQ ID NO: 1880350
acuucuuauggcugaauac

SEQ ID NO: 1960661 - RNA, 19 nt, Artificial Sequence
  Description of Artificial Sequence: Synthetic oligonucleotide
  Antisense strand to SEQ ID NO: 1960660
guauucagccauaagaagu

SEQ ID NO: 1960662 - RNA, 19 nt, Artificial Sequence
  Description of Artificial Sequence: Synthetic oligonucleotide
  Sense strand starting at position 3535 of SEQ ID NO: 1880350
cuucuuauggcugaauacu

SEQ ID NO: 1960663 - RNA, 19 nt, Artificial Sequence
  Description of Artificial Sequence: Synthetic oligonucleotide
  Antisense strand to SEQ ID NO: 1960662
aguauucagccauaagaag

SEQ ID NO: 1960664 - RNA, 19 nt, Artificial Sequence
  Description of Artificial Sequence: Synthetic oligonucleotide
  Sense strand starting at position 3544 of SEQ ID NO: 1880350
gcugaauacuacccacuga

SEQ ID NO: 1960665 - RNA, 19 nt, Artificial Sequence
  Description of Artificial Sequence: Synthetic oligonucleotide
  Antisense strand to SEQ ID NO: 1960664
ucaguggguaguauucagc

SEQ ID NO: 1960666 - RNA, 19 nt, Artificial Sequence
  Description of Artificial Sequence: Synthetic oligonucleotide
  Sense strand starting at position 3590 of SEQ ID NO: 1880350
aggguucugacuuggacau

SEQ ID NO: 1960667 - RNA, 19 nt, Artificial Sequence
  Description of Artificial Sequence: Synthetic oligonucleotide
  Antisense strand to SEQ ID NO: 1960666
auguccaagucagaacccu

SEQ ID NO: 1960668 - RNA, 19 nt, Artificial Sequence
  Description of Artificial Sequence: Synthetic oligonucleotide
  Sense strand starting at position 3591 of SEQ ID NO: 1880350
ggguucugacuuggacaua

SEQ ID NO: 1960669 - RNA, 19 nt, Artificial Sequence
  Description of Artificial Sequence: Synthetic oligonucleotide
  Antisense strand to SEQ ID NO: 1960668
uauguccaagucagaaccc

SEQ ID NO: 1960670 - RNA, 19 nt, Artificial Sequence
  Description of Artificial Sequence: Synthetic oligonucleotide
  Sense strand starting at position 3640 of SEQ ID NO: 1880350
gugaauauacccugcauaa

SEQ ID NO: 1960671 - RNA, 19 nt, Artificial Sequence
  Description of Artificial Sequence: Synthetic oligonucleotide
  Antisense strand to SEQ ID NO: 1960670
uuaugcaggguauauucac

SEQ ID NO: 1960672 - RNA, 19 nt, Artificial Sequence
  Description of Artificial Sequence: Synthetic oligonucleotide
  Sense strand starting at position 3664 of SEQ ID NO: 1880350
auggguaaugucuagauug

SEQ ID NO: 1960673 - RNA, 19 nt, Artificial Sequence
  Description of Artificial Sequence: Synthetic oligonucleotide
  Antisense strand to SEQ ID NO: 1960672
caaucuagacauuacccau

SEQ ID NO: 1960674 - RNA, 19 nt, Artificial Sequence
  Description of Artificial Sequence: Synthetic oligonucleotide
  Sense strand starting at position 3716 of SEQ ID NO: 1880350
caaagaaagugugcagaau

SEQ ID NO: 1960675 - RNA, 19 nt, Artificial Sequence
  Description of Artificial Sequence: Synthetic oligonucleotide
  Antisense strand to SEQ ID NO: 1960674
auucugcacacuuucuuug

SEQ ID NO: 1960676 - RNA, 19 nt, Artificial Sequence
  Description of Artificial Sequence: Synthetic oligonucleotide
  Sense strand starting at position 3722 of SEQ ID NO: 1880350
aagugugcagaauaaguaa

SEQ ID NO: 1960677 - RNA, 19 nt, Artificial Sequence
  Description of Artificial Sequence: Synthetic oligonucleotide
  Antisense strand to SEQ ID NO: 1960676
uuacuuauucugcacacuu

SEQ ID NO: 1960678 - RNA, 19 nt, Artificial Sequence
  Description of Artificial Sequence: Synthetic oligonucleotide
  Sense strand starting at position 3866 of SEQ ID NO: 1880350
cuguucuuacuauauggua

SEQ ID NO: 1960679 - RNA, 19 nt, Artificial Sequence
  Description of Artificial Sequence: Synthetic oligonucleotide
  Antisense strand to SEQ ID NO: 1960678
uaccauauaguaagaacag

SEQ ID NO: 1960680 - RNA, 19 nt, Artificial Sequence
  Description of Artificial Sequence: Synthetic oligonucleotide
  Sense strand starting at position 51 of SEQ ID NO: 1880351
gggagacuacuacguacuu

SEQ ID NO: 1960681 - RNA, 19 nt, Artificial Sequence
  Description of Artificial Sequence: Synthetic oligonucleotide
  Antisense strand to SEQ ID NO: 1960680
aaguacguaguagucuccc

SEQ ID NO: 1960682 - RNA, 19 nt, Artificial Sequence
  Description of Artificial Sequence: Synthetic oligonucleotide
  Sense strand starting at position 853 of SEQ ID NO: 1880351
auuaaaucauacugagaag

SEQ ID NO: 1960683 - RNA, 19 nt, Artificial Sequence
  Description of Artificial Sequence: Synthetic oligonucleotide
  Antisense strand to SEQ ID NO: 1960682
cuucucaguaugauuuaau

SEQ ID NO: 1960684 - RNA, 19 nt, Artificial Sequence
  Description of Artificial Sequence: Synthetic oligonucleotide
  Sense strand starting at position 868 of SEQ ID NO: 1880351
gaaguuagcauguggauuc

SEQ ID NO: 1960685 - RNA, 19 nt, Artificial Sequence
  Description of Artificial Sequence: Synthetic oligonucleotide
  Antisense strand to SEQ ID NO: 1960684
gaauccacaugcuaacuuc

SEQ ID NO: 1960686 - RNA, 19 nt, Artificial Sequence
  Description of Artificial Sequence: Synthetic oligonucleotide
  Sense strand starting at position 1067 of SEQ ID NO: 1880351
cugacuuuacugugaaaug

SEQ ID NO: 1960687 - RNA, 19 nt, Artificial Sequence
  Description of Artificial Sequence: Synthetic oligonucleotide
  Antisense strand to SEQ ID NO: 1960686
cauuucacaguaaagucag

SEQ ID NO: 1960688 - RNA, 19 nt, Artificial Sequence
  Description of Artificial Sequence: Synthetic oligonucleotide
  Sense strand starting at position 1076 of SEQ ID NO: 1880351
cugugaaauguugagccuu

SEQ ID NO: 1960689 - RNA, 19 nt, Artificial Sequence
  Description of Artificial Sequence: Synthetic oligonucleotide
  Antisense strand to SEQ ID NO: 1960688
aaggcucaacauuucacag

SEQ ID NO: 1960690 - RNA, 19 nt, Artificial Sequence
  Description of Artificial Sequence: Synthetic oligonucleotide
  Sense strand starting at position 1100 of SEQ ID NO: 1880351
auugccuuccuguaaugca

SEQ ID NO: 1960691 - RNA, 19 nt, Artificial Sequence
  Description of Artificial Sequence: Synthetic oligonucleotide
  Antisense strand to SEQ ID NO: 1960690
ugcauuacaggaaggcaau

SEQ ID NO: 1960692 - RNA, 19 nt, Artificial Sequence
  Description of Artificial Sequence: Synthetic oligonucleotide
  Sense strand starting at position 1114 of SEQ ID NO: 1880351
augcacuucccuuaagaug

SEQ ID NO: 1960693 - RNA, 19 nt, Artificial Sequence
  Description of Artificial Sequence: Synthetic oligonucleotide
  Antisense strand to SEQ ID NO: 1960692
caucuuaagggaagugcau

SEQ ID NO: 1960694 - RNA, 19 nt, Artificial Sequence
  Description of Artificial Sequence: Synthetic oligonucleotide
  Sense strand starting at position 1122 of SEQ ID NO: 1880351
cccuuaagauguuuaaagu

SEQ ID NO: 1960695 - RNA, 19 nt, Artificial Sequence
  Description of Artificial Sequence: Synthetic oligonucleotide
  Antisense strand to SEQ ID NO: 1960694
acuuuaaacaucuuaaggg

SEQ ID NO: 1960696 - RNA, 19 nt, Artificial Sequence
  Description of Artificial Sequence: Synthetic oligonucleotide
  Sense strand starting at position 1123 of SEQ ID NO: 1880351
ccuuaagauguuuaaaguu

SEQ ID NO: 1960697 - RNA, 19 nt, Artificial Sequence
  Description of Artificial Sequence: Synthetic oligonucleotide
  Antisense strand to SEQ ID NO: 1960696
aacuuuaaacaucuuaagg

SEQ ID NO: 1960698 - RNA, 19 nt, Artificial Sequence
  Description of Artificial Sequence: Synthetic oligonucleotide
  Sense strand starting at position 1129 of SEQ ID NO: 1880351
gauguuuaaaguuagguga

SEQ ID NO: 1960699 - RNA, 19 nt, Artificial Sequence
  Description of Artificial Sequence: Synthetic oligonucleotide
  Antisense strand to SEQ ID NO: 1960698
ucaccuaacuuuaaacauc

SEQ ID NO: 1960700 - RNA, 19 nt, Artificial Sequence
  Description of Artificial Sequence: Synthetic oligonucleotide
  Sense strand starting at position 1132 of SEQ ID NO: 1880351
guuuaaaguuaggugagaa

SEQ ID NO: 1960701 - RNA, 19 nt, Artificial Sequence
  Description of Artificial Sequence: Synthetic oligonucleotide
  Antisense strand to SEQ ID NO: 1960700
uucucaccuaacuuuaaac

SEQ ID NO: 1960702 - RNA, 19 nt, Artificial Sequence
  Description of Artificial Sequence: Synthetic oligonucleotide
  Sense strand starting at position 1133 of SEQ ID NO: 1880351
uuuaaaguuaggugagaaa

SEQ ID NO: 1960703 - RNA, 19 nt, Artificial Sequence
  Description of Artificial Sequence: Synthetic oligonucleotide
  Antisense strand to SEQ ID NO: 1960702
uuucucaccuaacuuuaaa

SEQ ID NO: 1960704 - RNA, 19 nt, Artificial Sequence
  Description of Artificial Sequence: Synthetic oligonucleotide
  Sense strand starting at position 1318 of SEQ ID NO: 1880351
gucacauugucagcuaaag

SEQ ID NO: 1960705 - RNA, 19 nt, Artificial Sequence
  Description of Artificial Sequence: Synthetic oligonucleotide
  Antisense strand to SEQ ID NO: 1960704
cuuuagcugacaaugugac

SEQ ID NO: 1960706 - RNA, 19 nt, Artificial Sequence
  Description of Artificial Sequence: Synthetic oligonucleotide
  Sense strand starting at position 1353 of SEQ ID NO: 1880351
cgucgaggucacguucgaa

SEQ ID NO: 1960707 - RNA, 19 nt, Artificial Sequence
  Description of Artificial Sequence: Synthetic oligonucleotide
  Antisense strand to SEQ ID NO: 1960706
uucgaacgugaccucgacg

SEQ ID NO: 1960708 - RNA, 19 nt, Artificial Sequence
  Description of Artificial Sequence: Synthetic oligonucleotide
  Sense strand starting at position 2244 of SEQ ID NO: 1880351
caggucucuccgcaucaaa

SEQ ID NO: 1960709 - RNA, 19 nt, Artificial Sequence
  Description of Artificial Sequence: Synthetic oligonucleotide
  Antisense strand to SEQ ID NO: 1960708
uuugaugcggagagaccug

SEQ ID NO: 1960710 - RNA, 19 nt, Artificial Sequence
  Description of Artificial Sequence: Synthetic oligonucleotide
  Sense strand starting at position 2261 of SEQ ID NO: 1880351
aagucaucuccaugggcaa

SEQ ID NO: 1960711 - RNA, 19 nt, Artificial Sequence
  Description of Artificial Sequence: Synthetic oligonucleotide
  Antisense strand to SEQ ID NO: 1960710
uugcccauggagaugacuu

SEQ ID NO: 1960712 - RNA, 19 nt, Artificial Sequence
  Description of Artificial Sequence: Synthetic oligonucleotide
  Sense strand starting at position 2528 of SEQ ID NO: 1880351
ccucuaagccuugaaugua

SEQ ID NO: 1960713 - RNA, 19 nt, Artificial Sequence
  Description of Artificial Sequence: Synthetic oligonucleotide
  Antisense strand to SEQ ID NO: 1960712
uacauucaaggcuuagagg

SEQ ID NO: 1960714 - RNA, 19 nt, Artificial Sequence
  Description of Artificial Sequence: Synthetic oligonucleotide
  Sense strand starting at position 2748 of SEQ ID NO: 1880351
cugcauucccgucacgaga

SEQ ID NO: 1960715 - RNA, 19 nt, Artificial Sequence
  Description of Artificial Sequence: Synthetic oligonucleotide
  Antisense strand to SEQ ID NO: 1960714
ucucgugacgggaaugcag

SEQ ID NO: 1960716 - RNA, 19 nt, Artificial Sequence
  Description of Artificial Sequence: Synthetic oligonucleotide
  Sense strand starting at position 3034 of SEQ ID NO: 1880351
guggaaucuguugguuaag

SEQ ID NO: 1960717 - RNA, 19 nt, Artificial Sequence
  Description of Artificial Sequence: Synthetic oligonucleotide
  Antisense strand to SEQ ID NO: 1960716
cuuaaccaacagauuccac

SEQ ID NO: 1960718 - RNA, 19 nt, Artificial Sequence
  Description of Artificial Sequence: Synthetic oligonucleotide
  Sense strand starting at position 3035 of SEQ ID NO: 1880351
uggaaucuguugguuaaga

SEQ ID NO: 1960719 - RNA, 19 nt, Artificial Sequence
  Description of Artificial Sequence: Synthetic oligonucleotide
  Antisense strand to SEQ ID NO: 1960718
ucuuaaccaacagauucca

SEQ ID NO: 1960720 - RNA, 19 nt, Artificial Sequence
  Description of Artificial Sequence: Synthetic oligonucleotide
  Sense strand starting at position 3036 of SEQ ID NO: 1880351
ggaaucuguugguuaagaa

SEQ ID NO: 1960721 - RNA, 19 nt, Artificial Sequence
  Description of Artificial Sequence: Synthetic oligonucleotide
  Antisense strand to SEQ ID NO: 1960720
uucuuaaccaacagauucc

SEQ ID NO: 1960722 - RNA, 19 nt, Artificial Sequence
  Description of Artificial Sequence: Synthetic oligonucleotide
  Sense strand starting at position 3065 of SEQ ID NO: 1880351
ucaucaaaucagugaccga

SEQ ID NO: 1960723 - RNA, 19 nt, Artificial Sequence
  Description of Artificial Sequence: Synthetic oligonucleotide
  Antisense strand to SEQ ID NO: 1960722
ucggucacugauuugauga

SEQ ID NO: 1960724 - RNA, 19 nt, Artificial Sequence
  Description of Artificial Sequence: Synthetic oligonucleotide
  Sense strand starting at position 3069 of SEQ ID NO: 1880351
caaaucagugaccgaggaa

SEQ ID NO: 1960725 - RNA, 19 nt, Artificial Sequence
  Description of Artificial Sequence: Synthetic oligonucleotide
  Antisense strand to SEQ ID NO: 1960724
uuccucggucacugauuug

SEQ ID NO: 1960726 - RNA, 19 nt, Artificial Sequence
  Description of Artificial Sequence: Synthetic oligonucleotide
  Sense strand starting at position 3082 of SEQ ID NO: 1880351
gaggaaagauuagaaccua

SEQ ID NO: 1960727 - RNA, 19 nt, Artificial Sequence
  Description of Artificial Sequence: Synthetic oligonucleotide
  Antisense strand to SEQ ID NO: 1960726
uagguucuaaucuuuccuc

SEQ ID NO: 1960728 - RNA, 19 nt, Artificial Sequence
  Description of Artificial Sequence: Synthetic oligonucleotide
  Sense strand starting at position 3124 of SEQ ID NO: 1880351
gcucuuuccgucguuguau

SEQ ID NO: 1960729 - RNA, 19 nt, Artificial Sequence
  Description of Artificial Sequence: Synthetic oligonucleotide
  Antisense strand to SEQ ID NO: 1960728
auacaacgacggaaagagc

SEQ ID NO: 1960730 - RNA, 19 nt, Artificial Sequence
  Description of Artificial Sequence: Synthetic oligonucleotide
  Sense strand starting at position 3157 of SEQ ID NO: 1880351
cuccgaaagagcuguuaag

SEQ ID NO: 1960731 - RNA, 19 nt, Artificial Sequence
  Description of Artificial Sequence: Synthetic oligonucleotide
  Antisense strand to SEQ ID NO: 1960730
cuuaacagcucuuucggag

SEQ ID NO: 1960732 - RNA, 19 nt, Artificial Sequence
  Description of Artificial Sequence: Synthetic oligonucleotide
  Sense strand starting at position 3212 of SEQ ID NO: 1880351
cucaguaaauguuuacuua

SEQ ID NO: 1960733 - RNA, 19 nt, Artificial Sequence
  Description of Artificial Sequence: Synthetic oligonucleotide
  Antisense strand to SEQ ID NO: 1960732
uaaguaaacauuuacugag

SEQ ID NO: 1960734 - RNA, 19 nt, Artificial Sequence
  Description of Artificial Sequence: Synthetic oligonucleotide
  Sense strand starting at position 3213 of SEQ ID NO: 1880351
ucaguaaauguuuacuuag

SEQ ID NO: 1960735 - RNA, 19 nt, Artificial Sequence
  Description of Artificial Sequence: Synthetic oligonucleotide
  Antisense strand to SEQ ID NO: 1960734
cuaaguaaacauuuacuga

SEQ ID NO: 1960736 - RNA, 19 nt, Artificial Sequence
  Description of Artificial Sequence: Synthetic oligonucleotide
  Sense strand starting at position 3216 of SEQ ID NO: 1880351
guaaauguuuacuuagugu

SEQ ID NO: 1960737 - RNA, 19 nt, Artificial Sequence
  Description of Artificial Sequence: Synthetic oligonucleotide
  Antisense strand to SEQ ID NO: 1960736
acacuaaguaaacauuuac

SEQ ID NO: 1960738 - RNA, 19 nt, Artificial Sequence
  Description of Artificial Sequence: Synthetic oligonucleotide
  Sense strand starting at position 3274 of SEQ ID NO: 1880351
guguaugugcuagcauagu

SEQ ID NO: 1960739 - RNA, 19 nt, Artificial Sequence
  Description of Artificial Sequence: Synthetic oligonucleotide
  Antisense strand to SEQ ID NO: 1960738
acuaugcuagcacauacac

SEQ ID NO: 1960740 - RNA, 19 nt, Artificial Sequence
  Description of Artificial Sequence: Synthetic oligonucleotide
  Sense strand starting at position 3368 of SEQ ID NO: 1880351
cuagcucaggccuguaaua

SEQ ID NO: 1960741 - RNA, 19 nt, Artificial Sequence
  Description of Artificial Sequence: Synthetic oligonucleotide
  Antisense strand to SEQ ID NO: 1960740
uauuacaggccugagcuag

SEQ ID NO: 1960742 - RNA, 19 nt, Artificial Sequence
  Description of Artificial Sequence: Synthetic oligonucleotide
  Sense strand starting at position 3370 of SEQ ID NO: 1880351
agcucaggccuguaauaca

SEQ ID NO: 1960743 - RNA, 19 nt, Artificial Sequence
  Description of Artificial Sequence: Synthetic oligonucleotide
  Antisense strand to SEQ ID NO: 1960742
uguauuacaggccugagcu

SEQ ID NO: 1960744 - RNA, 19 nt, Artificial Sequence
  Description of Artificial Sequence: Synthetic oligonucleotide
  Sense strand starting at position 3737 of SEQ ID NO: 1880351
uuuauuagccagugcaauu

SEQ ID NO: 1960745 - RNA, 19 nt, Artificial Sequence
  Description of Artificial Sequence: Synthetic oligonucleotide
  Antisense strand to SEQ ID NO: 1960744
aauugcacuggcuaauaaa

SEQ ID NO: 1960746 - RNA, 19 nt, Artificial Sequence
  Description of Artificial Sequence: Synthetic oligonucleotide
  Sense strand starting at position 3747 of SEQ ID NO: 1880351
agugcaauuagacaagagu

SEQ ID NO: 1960747 - RNA, 19 nt, Artificial Sequence
  Description of Artificial Sequence: Synthetic oligonucleotide
  Antisense strand to SEQ ID NO: 1960746
acucuugucuaauugcacu

SEQ ID NO: 1960748 - RNA, 19 nt, Artificial Sequence
  Description of Artificial Sequence: Synthetic oligonucleotide
  Sense strand starting at position 3823 of SEQ ID NO: 1880351
uacgauuguuuaccuggaa

SEQ ID NO: 1960749 - RNA, 19 nt, Artificial Sequence
  Description of Artificial Sequence: Synthetic oligonucleotide
  Antisense strand to SEQ ID NO: 1960748
uuccagguaaacaaucgua

SEQ ID NO: 1960750 - RNA, 19 nt, Artificial Sequence
  Description of Artificial Sequence: Synthetic oligonucleotide
  Sense strand starting at position 3824 of SEQ ID NO: 1880351
acgauuguuuaccuggaaa

SEQ ID NO: 1960751 - RNA, 19 nt, Artificial Sequence
  Description of Artificial Sequence: Synthetic oligonucleotide
  Antisense strand to SEQ ID NO: 1960750
uuuccagguaaacaaucgu

SEQ ID NO: 1960752 - RNA, 19 nt, Artificial Sequence
  Description of Artificial Sequence: Synthetic oligonucleotide
  Sense strand starting at position 3826 of SEQ ID NO: 1880351
gauuguuuaccuggaaacc

SEQ ID NO: 1960753 - RNA, 19 nt, Artificial Sequence
  Description of Artificial Sequence: Synthetic oligonucleotide
  Antisense strand to SEQ ID NO: 1960752
gguuuccagguaaacaauc

SEQ ID NO: 1960754 - RNA, 19 nt, Artificial Sequence
  Description of Artificial Sequence: Synthetic oligonucleotide
  Sense strand starting at position 3922 of SEQ ID NO: 1880351
acuuuauuguguccaaauu

SEQ ID NO: 1960755 - RNA, 19 nt, Artificial Sequence
  Description of Artificial Sequence: Synthetic oligonucleotide
  Antisense strand to SEQ ID NO: 1960754
aauuuggacacaauaaagu

SEQ ID NO: 1960756 - RNA, 19 nt, Artificial Sequence
  Description of Artificial Sequence: Synthetic oligonucleotide
  Sense strand starting at position 3923 of SEQ ID NO: 1880351
cuuuauuguguccaaauua

SEQ ID NO: 1960757 - RNA, 19 nt, Artificial Sequence
  Description of Artificial Sequence: Synthetic oligonucleotide
  Antisense strand to SEQ ID NO: 1960756
uaauuuggacacaauaaag

SEQ ID NO: 1960758 - RNA, 19 nt, Artificial Sequence
  Description of Artificial Sequence: Synthetic oligonucleotide
  Sense strand starting at position 3945 of SEQ ID NO: 1880351
ucaguuggaauguguaauu

SEQ ID NO: 1960759 - RNA, 19 nt, Artificial Sequence
  Description of Artificial Sequence: Synthetic oligonucleotide
  Antisense strand to SEQ ID NO: 1960758
aauuacacauuccaacuga

SEQ ID NO: 1960760 - RNA, 19 nt, Artificial Sequence
  Description of Artificial Sequence: Synthetic oligonucleotide
  Sense strand starting at position 19 of SEQ ID NO: 1880352
gcaggagaauguuucuuua

SEQ ID NO: 1960761 - RNA, 19 nt, Artificial Sequence
  Description of Artificial Sequence: Synthetic oligonucleotide
  Antisense strand to SEQ ID NO: 1960760
uaaagaaacauucuccugc

SEQ ID NO: 1960762 - RNA, 19 nt, Artificial Sequence
  Description of Artificial Sequence: Synthetic oligonucleotide
  Sense strand starting at position 21 of SEQ ID NO: 1880352
aggagaauguuucuuuaaa

SEQ ID NO: 1960763 - RNA, 19 nt, Artificial Sequence
  Description of Artificial Sequence: Synthetic oligonucleotide
  Antisense strand to SEQ ID NO: 1960762
uuuaaagaaacauucuccu

SEQ ID NO: 1960764 - RNA, 19 nt, Artificial Sequence
  Description of Artificial Sequence: Synthetic oligonucleotide
  Sense strand starting at position 84 of SEQ ID NO: 1880352
ccuucuaagguguaaggua

SEQ ID NO: 1960765 - RNA, 19 nt, Artificial Sequence
  Description of Artificial Sequence: Synthetic oligonucleotide
  Antisense strand to SEQ ID NO: 1960764
uaccuuacaccuuagaagg

SEQ ID NO: 1960766 - RNA, 19 nt, Artificial Sequence
  Description of Artificial Sequence: Synthetic oligonucleotide
  Sense strand starting at position 92 of SEQ ID NO: 1880352
gguguaagguauuccaaca

SEQ ID NO: 1960767 - RNA, 19 nt, Artificial Sequence
  Description of Artificial Sequence: Synthetic oligonucleotide
  Antisense strand to SEQ ID NO: 1960766
uguuggaauaccuuacacc

SEQ ID NO: 1960768 - RNA, 19 nt, Artificial Sequence
  Description of Artificial Sequence: Synthetic oligonucleotide
  Sense strand starting at position 115 of SEQ ID NO: 1880352
uuguuuggacguuagaauu

SEQ ID NO: 1960769 - RNA, 19 nt, Artificial Sequence
  Description of Artificial Sequence: Synthetic oligonucleotide
  Antisense strand to SEQ ID NO: 1960768
aauucuaacguccaaacaa

SEQ ID NO: 1960770 - RNA, 19 nt, Artificial Sequence
  Description of Artificial Sequence: Synthetic oligonucleotide
  Sense strand starting at position 241 of SEQ ID NO: 1880352
guuuacaugugauuaaguu

SEQ ID NO: 1960771 - RNA, 19 nt, Artificial Sequence
  Description of Artificial Sequence: Synthetic oligonucleotide
  Antisense strand to SEQ ID NO: 1960770
aacuuaaucacauguaaac

SEQ ID NO: 1960772 - RNA, 19 nt, Artificial Sequence
  Description of Artificial Sequence: Synthetic oligonucleotide
  Sense strand starting at position 298 of SEQ ID NO: 1880352
auguucuuagcuugacaaa

SEQ ID NO: 1960773 - RNA, 19 nt, Artificial Sequence
  Description of Artificial Sequence: Synthetic oligonucleotide
  Antisense strand to SEQ ID NO: 1960772
uuugucaagcuaagaacau

SEQ ID NO: 1960774 - RNA, 19 nt, Artificial Sequence
  Description of Artificial Sequence: Synthetic oligonucleotide
  Sense strand starting at position 550 of SEQ ID NO: 1880352
guacuuauccugugugaca

SEQ ID NO: 1960775 - RNA, 19 nt, Artificial Sequence
  Description of Artificial Sequence: Synthetic oligonucleotide
  Antisense strand to SEQ ID NO: 1960774
ugucacacaggauaaguac

SEQ ID NO: 1960776 - RNA, 19 nt, Artificial Sequence
  Description of Artificial Sequence: Synthetic oligonucleotide
  Sense strand starting at position 551 of SEQ ID NO: 1880352
uacuuauccugugugacag

SEQ ID NO: 1960777 - RNA, 19 nt, Artificial Sequence
  Description of Artificial Sequence: Synthetic oligonucleotide
  Antisense strand to SEQ ID NO: 1960776
cugucacacaggauaagua

SEQ ID NO: 1960778 - RNA, 19 nt, Artificial Sequence
  Description of Artificial Sequence: Synthetic oligonucleotide
  Sense strand starting at position 552 of SEQ ID NO: 1880352
acuuauccugugugacaga

SEQ ID NO: 1960779 - RNA, 19 nt, Artificial Sequence
  Description of Artificial Sequence: Synthetic oligonucleotide
  Antisense strand to SEQ ID NO: 1960778
ucugucacacaggauaagu

SEQ ID NO: 1960780 - RNA, 19 nt, Artificial Sequence
  Description of Artificial Sequence: Synthetic oligonucleotide
  Sense strand starting at position 562 of SEQ ID NO: 1880352
ugugacagauaucucugua

SEQ ID NO: 1960781 - RNA, 19 nt, Artificial Sequence
  Description of Artificial Sequence: Synthetic oligonucleotide
  Antisense strand to SEQ ID NO: 1960780
uacagagauaucugucaca

SEQ ID NO: 1960782 - RNA, 19 nt, Artificial Sequence
  Description of Artificial Sequence: Synthetic oligonucleotide
  Sense strand starting at position 601 of SEQ ID NO: 1880352
ucaagcagauuguccgaaa

SEQ ID NO: 1960783 - RNA, 19 nt, Artificial Sequence
  Description of Artificial Sequence: Synthetic oligonucleotide
  Antisense strand to SEQ ID NO: 1960782
uuucggacaaucugcuuga

SEQ ID NO: 1960784 - RNA, 19 nt, Artificial Sequence
  Description of Artificial Sequence: Synthetic oligonucleotide
  Sense strand starting at position 602 of SEQ ID NO: 1880352
caagcagauuguccgaaau

SEQ ID NO: 1960785 - RNA, 19 nt, Artificial Sequence
  Description of Artificial Sequence: Synthetic oligonucleotide
  Antisense strand to SEQ ID NO: 1960784
auuucggacaaucugcuug

SEQ ID NO: 1960786 - RNA, 19 nt, Artificial Sequence
  Description of Artificial Sequence: Synthetic oligonucleotide
  Sense strand starting at position 722 of SEQ ID NO: 1880352
agaauuacaugugagggaa

SEQ ID NO: 1960787 - RNA, 19 nt, Artificial Sequence
  Description of Artificial Sequence: Synthetic oligonucleotide
  Antisense strand to SEQ ID NO: 1960786
uucccucacauguaauucu

SEQ ID NO: 1960788 - RNA, 19 nt, Artificial Sequence
  Description of Artificial Sequence: Synthetic oligonucleotide
  Sense strand starting at position 749 of SEQ ID NO: 1880352
uugucauaauuacuggaua

SEQ ID NO: 1960789 - RNA, 19 nt, Artificial Sequence
  Description of Artificial Sequence: Synthetic oligonucleotide
  Antisense strand to SEQ ID NO: 1960788
uauccaguaauuaugacaa

SEQ ID NO: 1960790 - RNA, 19 nt, Artificial Sequence
  Description of Artificial Sequence: Synthetic oligonucleotide
  Sense strand starting at position 963 of SEQ ID NO: 1880352
ggugauuacugauauauuu

SEQ ID NO: 1960791 - RNA, 19 nt, Artificial Sequence
  Description of Artificial Sequence: Synthetic oligonucleotide
  Antisense strand to SEQ ID NO: 1960790
aaauauaucaguaaucacc

SEQ ID NO: 1960792 - RNA, 19 nt, Artificial Sequence
  Description of Artificial Sequence: Synthetic oligonucleotide
  Sense strand starting at position 1002 of SEQ ID NO: 1880352
uaggaaguaucguuacaau

SEQ ID NO: 1960793 - RNA, 19 nt, Artificial Sequence
  Description of Artificial Sequence: Synthetic oligonucleotide
  Antisense strand to SEQ ID NO: 1960792
auuguaacgauacuuccua

SEQ ID NO: 1960794 - RNA, 19 nt, Artificial Sequence
  Description of Artificial Sequence: Synthetic oligonucleotide
  Sense strand starting at position 1148 of SEQ ID NO: 1880352
ggagccaguccuuagccaa

SEQ ID NO: 1960795 - RNA, 19 nt, Artificial Sequence
  Description of Artificial Sequence: Synthetic oligonucleotide
  Antisense strand to SEQ ID NO: 1960794
uuggcuaaggacuggcucc

SEQ ID NO: 1960796 - RNA, 19 nt, Artificial Sequence
  Description of Artificial Sequence: Synthetic oligonucleotide
  Sense strand starting at position 1224 of SEQ ID NO: 1880352
cugucuugugcugaauaca

SEQ ID NO: 1960797 - RNA, 19 nt, Artificial Sequence
  Description of Artificial Sequence: Synthetic oligonucleotide
  Antisense strand to SEQ ID NO: 1960796
uguauucagcacaagacag

SEQ ID NO: 1960798 - RNA, 19 nt, Artificial Sequence
  Description of Artificial Sequence: Synthetic oligonucleotide
  Sense strand starting at position 1227 of SEQ ID NO: 1880352
ucuugugcugaauacauga

SEQ ID NO: 1960799 - RNA, 19 nt, Artificial Sequence
  Description of Artificial Sequence: Synthetic oligonucleotide
  Antisense strand to SEQ ID NO: 1960798
ucauguauucagcacaaga

SEQ ID NO: 1960800 - RNA, 19 nt, Artificial Sequence
  Description of Artificial Sequence: Synthetic oligonucleotide
  Sense strand starting at position 1268 of SEQ ID NO: 1880352
ccugccauuucuccgguaa

SEQ ID NO: 1960801 - RNA, 19 nt, Artificial Sequence
  Description of Artificial Sequence: Synthetic oligonucleotide
  Antisense strand to SEQ ID NO: 1960800
uuaccggagaaauggcagg

SEQ ID NO: 1960802 - RNA, 19 nt, Artificial Sequence
  Description of Artificial Sequence: Synthetic oligonucleotide
  Sense strand starting at position 1269 of SEQ ID NO: 1880352
cugccauuucuccgguaag

SEQ ID NO: 1960803 - RNA, 19 nt, Artificial Sequence
  Description of Artificial Sequence: Synthetic oligonucleotide
  Antisense strand to SEQ ID NO: 1960802
cuuaccggagaaauggcag

SEQ ID NO: 1960804 - RNA, 19 nt, Artificial Sequence
  Description of Artificial Sequence: Synthetic oligonucleotide
  Sense strand starting at position 1298 of SEQ ID NO: 1880352
caaccugugccugagacuu

SEQ ID NO: 1960805 - RNA, 19 nt, Artificial Sequence
  Description of Artificial Sequence: Synthetic oligonucleotide
  Antisense strand to SEQ ID NO: 1960804
aagucucaggcacagguug

SEQ ID NO: 1960806 - RNA, 19 nt, Artificial Sequence
  Description of Artificial Sequence: Synthetic oligonucleotide
  Sense strand starting at position 1398 of SEQ ID NO: 1880352
ugucuauccgcgguaauuc

SEQ ID NO: 1960807 - RNA, 19 nt, Artificial Sequence
  Description of Artificial Sequence: Synthetic oligonucleotide
  Antisense strand to SEQ ID NO: 1960806
gaauuaccgcggauagaca

SEQ ID NO: 1960808 - RNA, 19 nt, Artificial Sequence
  Description of Artificial Sequence: Synthetic oligonucleotide
  Sense strand starting at position 1514 of SEQ ID NO: 1880352
agguuugccguguuguuua

SEQ ID NO: 1960809 - RNA, 19 nt, Artificial Sequence
  Description of Artificial Sequence: Synthetic oligonucleotide
  Antisense strand to SEQ ID NO: 1960808
uaaacaacacggcaaaccu

SEQ ID NO: 1960810 - RNA, 19 nt, Artificial Sequence
  Description of Artificial Sequence: Synthetic oligonucleotide
  Sense strand starting at position 1595 of SEQ ID NO: 1880352
cgguaaaccuacuuugaau

SEQ ID NO: 1960811 - RNA, 19 nt, Artificial Sequence
  Description of Artificial Sequence: Synthetic oligonucleotide
  Antisense strand to SEQ ID NO: 1960810
auucaaaguagguuuaccg

SEQ ID NO: 1960812 - RNA, 19 nt, Artificial Sequence
  Description of Artificial Sequence: Synthetic oligonucleotide
  Sense strand starting at position 1619 of SEQ ID NO: 1880352
aggguuguguugaagaaag

SEQ ID NO: 1960813 - RNA, 19 nt, Artificial Sequence
  Description of Artificial Sequence: Synthetic oligonucleotide
  Antisense strand to SEQ ID NO: 1960812
cuuucuucaacacaacccu

SEQ ID NO: 1960814 - RNA, 19 nt, Artificial Sequence
  Description of Artificial Sequence: Synthetic oligonucleotide
  Sense strand starting at position 1651 of SEQ ID NO: 1880352
gacuuaagauuugaagguu

SEQ ID NO: 1960815 - RNA, 19 nt, Artificial Sequence
  Description of Artificial Sequence: Synthetic oligonucleotide
  Antisense strand to SEQ ID NO: 1960814
aaccuucaaaucuuaaguc

SEQ ID NO: 1960816 - RNA, 19 nt, Artificial Sequence
  Description of Artificial Sequence: Synthetic oligonucleotide
  Sense strand starting at position 1716 of SEQ ID NO: 1880352
aucagagucuuaucaucau

SEQ ID NO: 1960817 - RNA, 19 nt, Artificial Sequence
  Description of Artificial Sequence: Synthetic oligonucleotide
  Antisense strand to SEQ ID NO: 1960816
augaugauaagacucugau

SEQ ID NO: 1960818 - RNA, 19 nt, Artificial Sequence
  Description of Artificial Sequence: Synthetic oligonucleotide
  Sense strand starting at position 1719 of SEQ ID NO: 1880352
agagucuuaucaucauuac

SEQ ID NO: 1960819 - RNA, 19 nt, Artificial Sequence
  Description of Artificial Sequence: Synthetic oligonucleotide
  Antisense strand to SEQ ID NO: 1960818
guaaugaugauaagacucu

SEQ ID NO: 1960820 - RNA, 19 nt, Artificial Sequence
  Description of Artificial Sequence: Synthetic oligonucleotide
  Sense strand starting at position 1722 of SEQ ID NO: 1880352
gucuuaucaucauuacagu

SEQ ID NO: 1960821 - RNA, 19 nt, Artificial Sequence
  Description of Artificial Sequence: Synthetic oligonucleotide
  Antisense strand to SEQ ID NO: 1960820
acuguaaugaugauaagac

SEQ ID NO: 1960822 - RNA, 19 nt, Artificial Sequence
  Description of Artificial Sequence: Synthetic oligonucleotide
  Sense strand starting at position 1731 of SEQ ID NO: 1880352
ucauuacaguucuuauggu

SEQ ID NO: 1960823 - RNA, 19 nt, Artificial Sequence
  Description of Artificial Sequence: Synthetic oligonucleotide
  Antisense strand to SEQ ID NO: 1960822
accauaagaacuguaauga

SEQ ID NO: 1960824 - RNA, 19 nt, Artificial Sequence
  Description of Artificial Sequence: Synthetic oligonucleotide
  Sense strand starting at position 1765 of SEQ ID NO: 1880352
aggaguuccaccgacguga

SEQ ID NO: 1960825 - RNA, 19 nt, Artificial Sequence
  Description of Artificial Sequence: Synthetic oligonucleotide
  Antisense strand to SEQ ID NO: 1960824
ucacgucgguggaacuccu

SEQ ID NO: 1960826 - RNA, 19 nt, Artificial Sequence
  Description of Artificial Sequence: Synthetic oligonucleotide
  Sense strand starting at position 3240 of SEQ ID NO: 1880352
cguagucugcugagcggaa

SEQ ID NO: 1960827 - RNA, 19 nt, Artificial Sequence
  Description of Artificial Sequence: Synthetic oligonucleotide
  Antisense strand to SEQ ID NO: 1960826
uuccgcucagcagacuacg

SEQ ID NO: 1960828 - RNA, 19 nt, Artificial Sequence
  Description of Artificial Sequence: Synthetic oligonucleotide
  Sense strand starting at position 3439 of SEQ ID NO: 1880352
uuuagaaaucuguagcaua

SEQ ID NO: 1960829 - RNA, 19 nt, Artificial Sequence
  Description of Artificial Sequence: Synthetic oligonucleotide
  Antisense strand to SEQ ID NO: 1960828
uaugcuacagauuucuaaa

SEQ ID NO: 1960830 - RNA, 19 nt, Artificial Sequence
  Description of Artificial Sequence: Synthetic oligonucleotide
  Sense strand starting at position 3624 of SEQ ID NO: 1880352
ucacguuugcaucaauuag

SEQ ID NO: 1960831 - RNA, 19 nt, Artificial Sequence
  Description of Artificial Sequence: Synthetic oligonucleotide
  Antisense strand to SEQ ID NO: 1960830
cuaauugaugcaaacguga

SEQ ID NO: 1960832 - RNA, 19 nt, Artificial Sequence
  Description of Artificial Sequence: Synthetic oligonucleotide
  Sense strand starting at position 3665 of SEQ ID NO: 1880352
cacuuaggucagggauuaa

SEQ ID NO: 1960833 - RNA, 19 nt, Artificial Sequence
  Description of Artificial Sequence: Synthetic oligonucleotide
  Antisense strand to SEQ ID NO: 1960832
uuaaucccugaccuaagug

SEQ ID NO: 1960834 - RNA, 19 nt, Artificial Sequence
  Description of Artificial Sequence: Synthetic oligonucleotide
  Sense strand starting at position 3844 of SEQ ID NO: 1880352
gcguauucuaagcacugaa

SEQ ID NO: 1960835 - RNA, 19 nt, Artificial Sequence
  Description of Artificial Sequence: Synthetic oligonucleotide
  Antisense strand to SEQ ID NO: 1960834
uucagugcuuagaauacgc

SEQ ID NO: 1960836 - RNA, 19 nt, Artificial Sequence
  Description of Artificial Sequence: Synthetic oligonucleotide
  Sense strand starting at position 3882 of SEQ ID NO: 1880352
guccaaaucgcccaggagu

SEQ ID NO: 1960837 - RNA, 19 nt, Artificial Sequence
  Description of Artificial Sequence: Synthetic oligonucleotide
  Antisense strand to SEQ ID NO: 1960836
acuccugggcgauuuggac

SEQ ID NO: 1960838 - RNA, 19 nt, Artificial Sequence
  Description of Artificial Sequence: Synthetic oligonucleotide
  Sense strand starting at position 3924 of SEQ ID NO: 1880352
gccagcgaugcuguuauua

SEQ ID NO: 1960839 - RNA, 19 nt, Artificial Sequence
  Description of Artificial Sequence: Synthetic oligonucleotide
  Antisense strand to SEQ ID NO: 1960838
uaauaacagcaucgcuggc

SEQ ID NO: 1960840 - RNA, 19 nt, Artificial Sequence
  Description of Artificial Sequence: Synthetic oligonucleotide
  Sense strand starting at position 33 of SEQ ID NO: 1880353
gcgugauauggugagaccu

SEQ ID NO: 1960841 - RNA, 19 nt, Artificial Sequence
  Description of Artificial Sequence: Synthetic oligonucleotide
  Antisense strand to SEQ ID NO: 1960840
aggucucaccauaucacgc

SEQ ID NO: 1960842 - RNA, 19 nt, Artificial Sequence
  Description of Artificial Sequence: Synthetic oligonucleotide
  Sense strand starting at position 110 of SEQ ID NO: 1880353
gcccuaagcuacucaggau

SEQ ID NO: 1960843 - RNA, 19 nt, Artificial Sequence
  Description of Artificial Sequence: Synthetic oligonucleotide
  Antisense strand to SEQ ID NO: 1960842
auccugaguagcuuagggc

SEQ ID NO: 1960844 - RNA, 19 nt, Artificial Sequence
  Description of Artificial Sequence: Synthetic oligonucleotide
  Sense strand starting at position 215 of SEQ ID NO: 1880353
agagcaauaccuugucuua

SEQ ID NO: 1960845 - RNA, 19 nt, Artificial Sequence
  Description of Artificial Sequence: Synthetic oligonucleotide
  Antisense strand to SEQ ID NO: 1960844
uaagacaagguauugcucu

SEQ ID NO: 1960846 - RNA, 19 nt, Artificial Sequence
  Description of Artificial Sequence: Synthetic oligonucleotide
  Sense strand starting at position 273 of SEQ ID NO: 1880353
ugcguaaucccagaacuuu

SEQ ID NO: 1960847 - RNA, 19 nt, Artificial Sequence
  Description of Artificial Sequence: Synthetic oligonucleotide
  Antisense strand to SEQ ID NO: 1960846
aaaguucugggauuacgca

SEQ ID NO: 1960848 - RNA, 19 nt, Artificial Sequence
  Description of Artificial Sequence: Synthetic oligonucleotide
  Sense strand starting at position 699 of SEQ ID NO: 1880353
gcacuacugucacugucau

SEQ ID NO: 1960849 - RNA, 19 nt, Artificial Sequence
  Description of Artificial Sequence: Synthetic oligonucleotide
  Antisense strand to SEQ ID NO: 1960848
augacagugacaguagugc

SEQ ID NO: 1960850 - RNA, 19 nt, Artificial Sequence
  Description of Artificial Sequence: Synthetic oligonucleotide
  Sense strand starting at position 801 of SEQ ID NO: 1880353
acuuguucccagcgauuug

SEQ ID NO: 1960851 - RNA, 19 nt, Artificial Sequence
  Description of Artificial Sequence: Synthetic oligonucleotide
  Antisense strand to SEQ ID NO: 1960850
caaaucgcugggaacaagu

SEQ ID NO: 1960852 - RNA, 19 nt, Artificial Sequence
  Description of Artificial Sequence: Synthetic oligonucleotide
  Sense strand starting at position 806 of SEQ ID NO: 1880353
uucccagcgauuugcagaa

SEQ ID NO: 1960853 - RNA, 19 nt, Artificial Sequence
  Description of Artificial Sequence: Synthetic oligonucleotide
  Antisense strand to SEQ ID NO: 1960852
uucugcaaaucgcugggaa

SEQ ID NO: 1960854 - RNA, 19 nt, Artificial Sequence
  Description of Artificial Sequence: Synthetic oligonucleotide
  Sense strand starting at position 879 of SEQ ID NO: 1880353
cucagaaguuugccgauuu

SEQ ID NO: 1960855 - RNA, 19 nt, Artificial Sequence
  Description of Artificial Sequence: Synthetic oligonucleotide
  Antisense strand to SEQ ID NO: 1960854
aaaucggcaaacuucugag

SEQ ID NO: 1960856 - RNA, 19 nt, Artificial Sequence
  Description of Artificial Sequence: Synthetic oligonucleotide
  Sense strand starting at position 1000 of SEQ ID NO: 1880353
caagucucacguugaauuu

SEQ ID NO: 1960857 - RNA, 19 nt, Artificial Sequence
  Description of Artificial Sequence: Synthetic oligonucleotide
  Antisense strand to SEQ ID NO: 1960856
aaauucaacgugagacuug

SEQ ID NO: 1960858 - RNA, 19 nt, Artificial Sequence
  Description of Artificial Sequence: Synthetic oligonucleotide
  Sense strand starting at position 1046 of SEQ ID NO: 1880353
ggaucuucugcggaagcca

SEQ ID NO: 1960859 - RNA, 19 nt, Artificial Sequence
  Description of Artificial Sequence: Synthetic oligonucleotide
  Antisense strand to SEQ ID NO: 1960858
uggcuuccgcagaagaucc

SEQ ID NO: 1960860 - RNA, 19 nt, Artificial Sequence
  Description of Artificial Sequence: Synthetic oligonucleotide
  Sense strand starting at position 1097 of SEQ ID NO: 1880353
caaacaagcugggaugaaa

SEQ ID NO: 1960861 - RNA, 19 nt, Artificial Sequence
  Description of Artificial Sequence: Synthetic oligonucleotide
  Antisense strand to SEQ ID NO: 1960860
uuucaucccagcuuguuug

SEQ ID NO: 1960862 - RNA, 19 nt, Artificial Sequence
  Description of Artificial Sequence: Synthetic oligonucleotide
  Sense strand starting at position 1367 of SEQ ID NO: 1880353
ggguuuacacgucagucau

SEQ ID NO: 1960863 - RNA, 19 nt, Artificial Sequence
  Description of Artificial Sequence: Synthetic oligonucleotide
  Antisense strand to SEQ ID NO: 1960862
augacugacguguaaaccc

SEQ ID NO: 1960864 - RNA, 19 nt, Artificial Sequence
  Description of Artificial Sequence: Synthetic oligonucleotide
  Sense strand starting at position 1369 of SEQ ID NO: 1880353
guuuacacgucagucauca

SEQ ID NO: 1960865 - RNA, 19 nt, Artificial Sequence
  Description of Artificial Sequence: Synthetic oligonucleotide
  Antisense strand to SEQ ID NO: 1960864
ugaugacugacguguaaac

SEQ ID NO: 1960866 - RNA, 19 nt, Artificial Sequence
  Description of Artificial Sequence: Synthetic oligonucleotide
  Sense strand starting at position 1373 of SEQ ID NO: 1880353
acacgucagucaucaccau

SEQ ID NO: 1960867 - RNA, 19 nt, Artificial Sequence
  Description of Artificial Sequence: Synthetic oligonucleotide
  Antisense strand to SEQ ID NO: 1960866
auggugaugacugacgugu

SEQ ID NO: 1960868 - RNA, 19 nt, Artificial Sequence
  Description of Artificial Sequence: Synthetic oligonucleotide
  Sense strand starting at position 1920 of SEQ ID NO: 1880353
gccaaauucgaagggauug

SEQ ID NO: 1960869 - RNA, 19 nt, Artificial Sequence
  Description of Artificial Sequence: Synthetic oligonucleotide
  Antisense strand to SEQ ID NO: 1960868
caaucccuucgaauuuggc

SEQ ID NO: 1960870 - RNA, 19 nt, Artificial Sequence
  Description of Artificial Sequence: Synthetic oligonucleotide
  Sense strand starting at position 2405 of SEQ ID NO: 1880353
cuggaaacgcuguguuuga

SEQ ID NO: 1960871 - RNA, 19 nt, Artificial Sequence
  Description of Artificial Sequence: Synthetic oligonucleotide
  Antisense strand to SEQ ID NO: 1960870
ucaaacacagcguuuccag

SEQ ID NO: 1960872 - RNA, 19 nt, Artificial Sequence
  Description of Artificial Sequence: Synthetic oligonucleotide
  Sense strand starting at position 2476 of SEQ ID NO: 1880353
ggagaaccaugggaucgau

SEQ ID NO: 1960873 - RNA, 19 nt, Artificial Sequence
  Description of Artificial Sequence: Synthetic oligonucleotide
  Antisense strand to SEQ ID NO: 1960872
aucgaucccaugguucucc

SEQ ID NO: 1960874 - RNA, 19 nt, Artificial Sequence
  Description of Artificial Sequence: Synthetic oligonucleotide
  Sense strand starting at position 2958 of SEQ ID NO: 1880353
ucaugaugauaauaggaaa

SEQ ID NO: 1960875 - RNA, 19 nt, Artificial Sequence
  Description of Artificial Sequence: Synthetic oligonucleotide
  Antisense strand to SEQ ID NO: 1960874
uuuccuauuaucaucauga

SEQ ID NO: 1960876 - RNA, 19 nt, Artificial Sequence
  Description of Artificial Sequence: Synthetic oligonucleotide
  Sense strand starting at position 3030 of SEQ ID NO: 1880353
cuagaaagcgcucaguagu

SEQ ID NO: 1960877 - RNA, 19 nt, Artificial Sequence
  Description of Artificial Sequence: Synthetic oligonucleotide
  Antisense strand to SEQ ID NO: 1960876
acuacugagcgcuuucuag

SEQ ID NO: 1960878 - RNA, 19 nt, Artificial Sequence
  Description of Artificial Sequence: Synthetic oligonucleotide
  Sense strand starting at position 3045 of SEQ ID NO: 1880353
uaguguuugcuguuaucuu

SEQ ID NO: 1960879 - RNA, 19 nt, Artificial Sequence
  Description of Artificial Sequence: Synthetic oligonucleotide
  Antisense strand to SEQ ID NO: 1960878
aagauaacagcaaacacua

SEQ ID NO: 1960880 - RNA, 19 nt, Artificial Sequence
  Description of Artificial Sequence: Synthetic oligonucleotide
  Sense strand starting at position 3080 of SEQ ID NO: 1880353
cuggacauuucucagguga

SEQ ID NO: 1960881 - RNA, 19 nt, Artificial Sequence
  Description of Artificial Sequence: Synthetic oligonucleotide
  Antisense strand to SEQ ID NO: 1960880
ucaccugagaaauguccag

SEQ ID NO: 1960882 - RNA, 19 nt, Artificial Sequence
  Description of Artificial Sequence: Synthetic oligonucleotide
  Sense strand starting at position 3082 of SEQ ID NO: 1880353
ggacauuucucaggugaga

SEQ ID NO: 1960883 - RNA, 19 nt, Artificial Sequence
  Description of Artificial Sequence: Synthetic oligonucleotide
  Antisense strand to SEQ ID NO: 1960882
ucucaccugagaaaugucc

SEQ ID NO: 1960884 - RNA, 19 nt, Artificial Sequence
  Description of Artificial Sequence: Synthetic oligonucleotide
  Sense strand starting at position 3132 of SEQ ID NO: 1880353
cuaucuauaugugccauau

SEQ ID NO: 1960885 - RNA, 19 nt, Artificial Sequence
  Description of Artificial Sequence: Synthetic oligonucleotide
  Antisense strand to SEQ ID NO: 1960884
auauggcacauauagauag

SEQ ID NO: 1960886 - RNA, 19 nt, Artificial Sequence
  Description of Artificial Sequence: Synthetic oligonucleotide
  Sense strand starting at position 3155 of SEQ ID NO: 1880353
aguugucagcuagacauca

SEQ ID NO: 1960887 - RNA, 19 nt, Artificial Sequence
  Description of Artificial Sequence: Synthetic oligonucleotide
  Antisense strand to SEQ ID NO: 1960886
ugaugucuagcugacaacu

SEQ ID NO: 1960888 - RNA, 19 nt, Artificial Sequence
  Description of Artificial Sequence: Synthetic oligonucleotide
  Sense strand starting at position 3173 of SEQ ID NO: 1880353
acuuucucugcuuagcaga

SEQ ID NO: 1960889 - RNA, 19 nt, Artificial Sequence
  Description of Artificial Sequence: Synthetic oligonucleotide
  Antisense strand to SEQ ID NO: 1960888
ucugcuaagcagagaaagu

SEQ ID NO: 1960890 - RNA, 19 nt, Artificial Sequence
  Description of Artificial Sequence: Synthetic oligonucleotide
  Sense strand starting at position 3178 of SEQ ID NO: 1880353
cucugcuuagcagaagaaa

SEQ ID NO: 1960891 - RNA, 19 nt, Artificial Sequence
  Description of Artificial Sequence: Synthetic oligonucleotide
  Antisense strand to SEQ ID NO: 1960890
uuucuucugcuaagcagag

SEQ ID NO: 1960892 - RNA, 19 nt, Artificial Sequence
  Description of Artificial Sequence: Synthetic oligonucleotide
  Sense strand starting at position 3226 of SEQ ID NO: 1880353
uguguagcccuggauuaca

SEQ ID NO: 1960893 - RNA, 19 nt, Artificial Sequence
  Description of Artificial Sequence: Synthetic oligonucleotide
  Antisense strand to SEQ ID NO: 1960892
uguaauccagggcuacaca

SEQ ID NO: 1960894 - RNA, 19 nt, Artificial Sequence
  Description of Artificial Sequence: Synthetic oligonucleotide
  Sense strand starting at position 3267 of SEQ ID NO: 1880353
accuuucgaggcgauuauu

SEQ ID NO: 1960895 - RNA, 19 nt, Artificial Sequence
  Description of Artificial Sequence: Synthetic oligonucleotide
  Antisense strand to SEQ ID NO: 1960894
aauaaucgccucgaaaggu

SEQ ID NO: 1960896 - RNA, 19 nt, Artificial Sequence
  Description of Artificial Sequence: Synthetic oligonucleotide
  Sense strand starting at position 3270 of SEQ ID NO: 1880353
uuucgaggcgauuauucuu

SEQ ID NO: 1960897 - RNA, 19 nt, Artificial Sequence
  Description of Artificial Sequence: Synthetic oligonucleotide
  Antisense strand to SEQ ID NO: 1960896
aagaauaaucgccucgaaa

SEQ ID NO: 1960898 - RNA, 19 nt, Artificial Sequence
  Description of Artificial Sequence: Synthetic oligonucleotide
  Sense strand starting at position 3275 of SEQ ID NO: 1880353
aggcgauuauucuugggag

SEQ ID NO: 1960899 - RNA, 19 nt, Artificial Sequence
  Description of Artificial Sequence: Synthetic oligonucleotide
  Antisense strand to SEQ ID NO: 1960898
cucccaagaauaaucgccu

SEQ ID NO: 1960900 - RNA, 19 nt, Artificial Sequence
  Description of Artificial Sequence: Synthetic oligonucleotide
  Sense strand starting at position 3367 of SEQ ID NO: 1880353
caagaaauugcugguagcu

SEQ ID NO: 1960901 - RNA, 19 nt, Artificial Sequence
  Description of Artificial Sequence: Synthetic oligonucleotide
  Antisense strand to SEQ ID NO: 1960900
agcuaccagcaauuucuug

SEQ ID NO: 1960902 - RNA, 19 nt, Artificial Sequence
  Description of Artificial Sequence: Synthetic oligonucleotide
  Sense strand starting at position 3380 of SEQ ID NO: 1880353
guagcuuucuaaguguuga

SEQ ID NO: 1960903 - RNA, 19 nt, Artificial Sequence
  Description of Artificial Sequence: Synthetic oligonucleotide
  Antisense strand to SEQ ID NO: 1960902
ucaacacuuagaaagcuac

SEQ ID NO: 1960904 - RNA, 19 nt, Artificial Sequence
  Description of Artificial Sequence: Synthetic oligonucleotide
  Sense strand starting at position 3418 of SEQ ID NO: 1880353
ccaugagcucuugagacca

SEQ ID NO: 1960905 - RNA, 19 nt, Artificial Sequence
  Description of Artificial Sequence: Synthetic oligonucleotide
  Antisense strand to SEQ ID NO: 1960904
uggucucaagagcucaugg

SEQ ID NO: 1960906 - RNA, 19 nt, Artificial Sequence
  Description of Artificial Sequence: Synthetic oligonucleotide
  Sense strand starting at position 3495 of SEQ ID NO: 1880353
ccagcauuuguguaagcuc

SEQ ID NO: 1960907 - RNA, 19 nt, Artificial Sequence
  Description of Artificial Sequence: Synthetic oligonucleotide
  Antisense strand to SEQ ID NO: 1960906
gagcuuacacaaaugcugg

SEQ ID NO: 1960908 - RNA, 19 nt, Artificial Sequence
  Description of Artificial Sequence: Synthetic oligonucleotide
  Sense strand starting at position 3502 of SEQ ID NO: 1880353
uuguguaagcucgcgauua

SEQ ID NO: 1960909 - RNA, 19 nt, Artificial Sequence
  Description of Artificial Sequence: Synthetic oligonucleotide
  Antisense strand to SEQ ID NO: 1960908
uaaucgcgagcuuacacaa

SEQ ID NO: 1960910 - RNA, 19 nt, Artificial Sequence
  Description of Artificial Sequence: Synthetic oligonucleotide
  Sense strand starting at position 3506 of SEQ ID NO: 1880353
guaagcucgcgauuauauu

SEQ ID NO: 1960911 - RNA, 19 nt, Artificial Sequence
  Description of Artificial Sequence: Synthetic oligonucleotide
  Antisense strand to SEQ ID NO: 1960910
aauauaaucgcgagcuuac

SEQ ID NO: 1960912 - RNA, 19 nt, Artificial Sequence
  Description of Artificial Sequence: Synthetic oligonucleotide
  Sense strand starting at position 3507 of SEQ ID NO: 1880353
uaagcucgcgauuauauua

SEQ ID NO: 1960913 - RNA, 19 nt, Artificial Sequence
  Description of Artificial Sequence: Synthetic oligonucleotide
  Antisense strand to SEQ ID NO: 1960912
uaauauaaucgcgagcuua

SEQ ID NO: 1960914 - RNA, 19 nt, Artificial Sequence
  Description of Artificial Sequence: Synthetic oligonucleotide
  Sense strand starting at position 3590 of SEQ ID NO: 1880353
ucuggaaggauauggguua

SEQ ID NO: 1960915 - RNA, 19 nt, Artificial Sequence
  Description of Artificial Sequence: Synthetic oligonucleotide
  Antisense strand to SEQ ID NO: 1960914
uaacccauauccuuccaga

SEQ ID NO: 1960916 - RNA, 19 nt, Artificial Sequence
  Description of Artificial Sequence: Synthetic oligonucleotide
  Sense strand starting at position 3602 of SEQ ID NO: 1880353
uggguuauauuguuauuac

SEQ ID NO: 1960917 - RNA, 19 nt, Artificial Sequence
  Description of Artificial Sequence: Synthetic oligonucleotide
  Antisense strand to SEQ ID NO: 1960916
guaauaacaauauaaccca

SEQ ID NO: 1960918 - RNA, 19 nt, Artificial Sequence
  Description of Artificial Sequence: Synthetic oligonucleotide
  Sense strand starting at position 3605 of SEQ ID NO: 1880353
guuauauuguuauuaccag

SEQ ID NO: 1960919 - RNA, 19 nt, Artificial Sequence
  Description of Artificial Sequence: Synthetic oligonucleotide
  Antisense strand to SEQ ID NO: 1960918
cugguaauaacaauauaac

SEQ ID NO: 1960920 - RNA, 19 nt, Artificial Sequence
  Description of Artificial Sequence: Synthetic oligonucleotide
  Sense strand starting at position 39 of SEQ ID NO: 1880354
aguggaaacagugagugua

SEQ ID NO: 1960921 - RNA, 19 nt, Artificial Sequence
  Description of Artificial Sequence: Synthetic oligonucleotide
  Antisense strand to SEQ ID NO: 1960920
uacacucacuguuuccacu

SEQ ID NO: 1960922 - RNA, 19 nt, Artificial Sequence
  Description of Artificial Sequence: Synthetic oligonucleotide
  Sense strand starting at position 41 of SEQ ID NO: 1880354
uggaaacagugaguguaaa

SEQ ID NO: 1960923 - RNA, 19 nt, Artificial Sequence
  Description of Artificial Sequence: Synthetic oligonucleotide
  Antisense strand to SEQ ID NO: 1960922
uuuacacucacuguuucca

SEQ ID NO: 1960924 - RNA, 19 nt, Artificial Sequence
  Description of Artificial Sequence: Synthetic oligonucleotide
  Sense strand starting at position 68 of SEQ ID NO: 1880354
ucaagaaguuuagcuguga

SEQ ID NO: 1960925 - RNA, 19 nt, Artificial Sequence
  Description of Artificial Sequence: Synthetic oligonucleotide
  Antisense strand to SEQ ID NO: 1960924
ucacagcuaaacuucuuga

SEQ ID NO: 1960926 - RNA, 19 nt, Artificial Sequence
  Description of Artificial Sequence: Synthetic oligonucleotide
  Sense strand starting at position 69 of SEQ ID NO: 1880354
caagaaguuuagcugugaa

SEQ ID NO: 1960927 - RNA, 19 nt, Artificial Sequence
  Description of Artificial Sequence: Synthetic oligonucleotide
  Antisense strand to SEQ ID NO: 1960926
uucacagcuaaacuucuug

SEQ ID NO: 1960928 - RNA, 19 nt, Artificial Sequence
  Description of Artificial Sequence: Synthetic oligonucleotide
  Sense strand starting at position 325 of SEQ ID NO: 1880354
gcaagacuucgucaccaaa

SEQ ID NO: 1960929 - RNA, 19 nt, Artificial Sequence
  Description of Artificial Sequence: Synthetic oligonucleotide
  Antisense strand to SEQ ID NO: 1960928
uuuggugacgaagucuugc

SEQ ID NO: 1960930 - RNA, 19 nt, Artificial Sequence
  Description of Artificial Sequence: Synthetic oligonucleotide
  Sense strand starting at position 361 of SEQ ID NO: 1880354
aaaguuuagcugugaagag

SEQ ID NO: 1960931 - RNA, 19 nt, Artificial Sequence
  Description of Artificial Sequence: Synthetic oligonucleotide
  Antisense strand to SEQ ID NO: 1960930
cucuucacagcuaaacuuu

SEQ ID NO: 1960932 - RNA, 19 nt, Artificial Sequence
  Description of Artificial Sequence: Synthetic oligonucleotide
  Sense strand starting at position 621 of SEQ ID NO: 1880354
ugcugugagaaaugagaaa

SEQ ID NO: 1960933 - RNA, 19 nt, Artificial Sequence
  Description of Artificial Sequence: Synthetic oligonucleotide
  Antisense strand to SEQ ID NO: 1960932
uuucucauuucucacagca

SEQ ID NO: 1960934 - RNA, 19 nt, Artificial Sequence
  Description of Artificial Sequence: Synthetic oligonucleotide
  Sense strand starting at position 1055 of SEQ ID NO: 1880354
uguugagggcccugauaac

SEQ ID NO: 1960935 - RNA, 19 nt, Artificial Sequence
  Description of Artificial Sequence: Synthetic oligonucleotide
  Antisense strand to SEQ ID NO: 1960934
guuaucagggcccucaaca

SEQ ID NO: 1960936 - RNA, 19 nt, Artificial Sequence
  Description of Artificial Sequence: Synthetic oligonucleotide
  Sense strand starting at position 1087 of SEQ ID NO: 1880354
gcaucugguccugaacaag

SEQ ID NO: 1960937 - RNA, 19 nt, Artificial Sequence
  Description of Artificial Sequence: Synthetic oligonucleotide
  Antisense strand to SEQ ID NO: 1960936
cuuguucaggaccagaugc

SEQ ID NO: 1960938 - RNA, 19 nt, Artificial Sequence
  Description of Artificial Sequence: Synthetic oligonucleotide
  Sense strand starting at position 1110 of SEQ ID NO: 1880354
gaaaucagccuuugcagga

SEQ ID NO: 1960939 - RNA, 19 nt, Artificial Sequence
  Description of Artificial Sequence: Synthetic oligonucleotide
  Antisense strand to SEQ ID NO: 1960938
uccugcaaaggcugauuuc

SEQ ID NO: 1960940 - RNA, 19 nt, Artificial Sequence
  Description of Artificial Sequence: Synthetic oligonucleotide
  Sense strand starting at position 1174 of SEQ ID NO: 1880354
gagauaauuugaugaaugg

SEQ ID NO: 1960941 - RNA, 19 nt, Artificial Sequence
  Description of Artificial Sequence: Synthetic oligonucleotide
  Antisense strand to SEQ ID NO: 1960940
ccauucaucaaauuaucuc

SEQ ID NO: 1960942 - RNA, 19 nt, Artificial Sequence
  Description of Artificial Sequence: Synthetic oligonucleotide
  Sense strand starting at position 1208 of SEQ ID NO: 1880354
aaauauaaagcguggacaa

SEQ ID NO: 1960943 - RNA, 19 nt, Artificial Sequence
  Description of Artificial Sequence: Synthetic oligonucleotide
  Antisense strand to SEQ ID NO: 1960942
uuguccacgcuuuauauuu

SEQ ID NO: 1960944 - RNA, 19 nt, Artificial Sequence
  Description of Artificial Sequence: Synthetic oligonucleotide
  Sense strand starting at position 2183 of SEQ ID NO: 1880354
ggaauucucgacggugaua

SEQ ID NO: 1960945 - RNA, 19 nt, Artificial Sequence
  Description of Artificial Sequence: Synthetic oligonucleotide
  Antisense strand to SEQ ID NO: 1960944
uaucaccgucgagaauucc

SEQ ID NO: 1960946 - RNA, 19 nt, Artificial Sequence
  Description of Artificial Sequence: Synthetic oligonucleotide
  Sense strand starting at position 2185 of SEQ ID NO: 1880354
aauucucgacggugauaac

SEQ ID NO: 1960947 - RNA, 19 nt, Artificial Sequence
  Description of Artificial Sequence: Synthetic oligonucleotide
  Antisense strand to SEQ ID NO: 1960946
guuaucaccgucgagaauu

SEQ ID NO: 1960948 - RNA, 19 nt, Artificial Sequence
  Description of Artificial Sequence: Synthetic oligonucleotide
  Sense strand starting at position 2192 of SEQ ID NO: 1880354
gacggugauaacugaaagu

SEQ ID NO: 1960949 - RNA, 19 nt, Artificial Sequence
  Description of Artificial Sequence: Synthetic oligonucleotide
  Antisense strand to SEQ ID NO: 1960948
acuuucaguuaucaccguc

SEQ ID NO: 1960950 - RNA, 19 nt, Artificial Sequence
  Description of Artificial Sequence: Synthetic oligonucleotide
  Sense strand starting at position 2213 of SEQ ID NO: 1880354
ugaggugauaacugaaagu

SEQ ID NO: 1960951 - RNA, 19 nt, Artificial Sequence
  Description of Artificial Sequence: Synthetic oligonucleotide
  Antisense strand to SEQ ID NO: 1960950
acuuucaguuaucaccuca

SEQ ID NO: 1960952 - RNA, 19 nt, Artificial Sequence
  Description of Artificial Sequence: Synthetic oligonucleotide
  Sense strand starting at position 2554 of SEQ ID NO: 1880354
ucauuuauucgugagcucu

SEQ ID NO: 1960953 - RNA, 19 nt, Artificial Sequence
  Description of Artificial Sequence: Synthetic oligonucleotide
  Antisense strand to SEQ ID NO: 1960952
agagcucacgaauaaauga

SEQ ID NO: 1960954 - RNA, 19 nt, Artificial Sequence
  Description of Artificial Sequence: Synthetic oligonucleotide
  Sense strand starting at position 2556 of SEQ ID NO: 1880354
auuuauucgugagcucugu

SEQ ID NO: 1960955 - RNA, 19 nt, Artificial Sequence
  Description of Artificial Sequence: Synthetic oligonucleotide
  Antisense strand to SEQ ID NO: 1960954
acagagcucacgaauaaau

SEQ ID NO: 1960956 - RNA, 19 nt, Artificial Sequence
  Description of Artificial Sequence: Synthetic oligonucleotide
  Sense strand starting at position 2557 of SEQ ID NO: 1880354
uuuauucgugagcucuguu

SEQ ID NO: 1960957 - RNA, 19 nt, Artificial Sequence
  Description of Artificial Sequence: Synthetic oligonucleotide
  Antisense strand to SEQ ID NO: 1960956
aacagagcucacgaauaaa

SEQ ID NO: 1960958 - RNA, 19 nt, Artificial Sequence
  Description of Artificial Sequence: Synthetic oligonucleotide
  Sense strand starting at position 2597 of SEQ ID NO: 1880354
aguguugaugcuuaguaaa

SEQ ID NO: 1960959 - RNA, 19 nt, Artificial Sequence
  Description of Artificial Sequence: Synthetic oligonucleotide
  Antisense strand to SEQ ID NO: 1960958
uuuacuaagcaucaacacu

SEQ ID NO: 1960960 - RNA, 19 nt, Artificial Sequence
  Description of Artificial Sequence: Synthetic oligonucleotide
  Sense strand starting at position 2724 of SEQ ID NO: 1880354
ugacgaaugaguuaucguu

SEQ ID NO: 1960961 - RNA, 19 nt, Artificial Sequence
  Description of Artificial Sequence: Synthetic oligonucleotide
  Antisense strand to SEQ ID NO: 1960960
aacgauaacucauucguca

SEQ ID NO: 1960962 - RNA, 19 nt, Artificial Sequence
  Description of Artificial Sequence: Synthetic oligonucleotide
  Sense strand starting at position 2731 of SEQ ID NO: 1880354
ugaguuaucguugaccuau

SEQ ID NO: 1960963 - RNA, 19 nt, Artificial Sequence
  Description of Artificial Sequence: Synthetic oligonucleotide
  Antisense strand to SEQ ID NO: 1960962
auaggucaacgauaacuca

SEQ ID NO: 1960964 - RNA, 19 nt, Artificial Sequence
  Description of Artificial Sequence: Synthetic oligonucleotide
  Sense strand starting at position 2778 of SEQ ID NO: 1880354
gauacuuauucguuugaau

SEQ ID NO: 1960965 - RNA, 19 nt, Artificial Sequence
  Description of Artificial Sequence: Synthetic oligonucleotide
  Antisense strand to SEQ ID NO: 1960964
auucaaacgaauaaguauc

SEQ ID NO: 1960966 - RNA, 19 nt, Artificial Sequence
  Description of Artificial Sequence: Synthetic oligonucleotide
  Sense strand starting at position 2838 of SEQ ID NO: 1880354
guaaacagagcauguuaau

SEQ ID NO: 1960967 - RNA, 19 nt, Artificial Sequence
  Description of Artificial Sequence: Synthetic oligonucleotide
  Antisense strand to SEQ ID NO: 1960966
auuaacaugcucuguuuac

SEQ ID NO: 1960968 - RNA, 19 nt, Artificial Sequence
  Description of Artificial Sequence: Synthetic oligonucleotide
  Sense strand starting at position 2851 of SEQ ID NO: 1880354
guuaauuuagcuggagcca

SEQ ID NO: 1960969 - RNA, 19 nt, Artificial Sequence
  Description of Artificial Sequence: Synthetic oligonucleotide
  Antisense strand to SEQ ID NO: 1960968
uggcuccagcuaaauuaac

SEQ ID NO: 1960970 - RNA, 19 nt, Artificial Sequence
  Description of Artificial Sequence: Synthetic oligonucleotide
  Sense strand starting at position 2894 of SEQ ID NO: 1880354
ugccucuacguauaaacua

SEQ ID NO: 1960971 - RNA, 19 nt, Artificial Sequence
  Description of Artificial Sequence: Synthetic oligonucleotide
  Antisense strand to SEQ ID NO: 1960970
uaguuuauacguagaggca

SEQ ID NO: 1960972 - RNA, 19 nt, Artificial Sequence
  Description of Artificial Sequence: Synthetic oligonucleotide
  Sense strand starting at position 3037 of SEQ ID NO: 1880354
gguugcugugauuagaaca

SEQ ID NO: 1960973 - RNA, 19 nt, Artificial Sequence
  Description of Artificial Sequence: Synthetic oligonucleotide
  Antisense strand to SEQ ID NO: 1960972
uguucuaaucacagcaacc

SEQ ID NO: 1960974 - RNA, 19 nt, Artificial Sequence
  Description of Artificial Sequence: Synthetic oligonucleotide
  Sense strand starting at position 3060 of SEQ ID NO: 1880354
ccagcacauguuugaaaua

SEQ ID NO: 1960975 - RNA, 19 nt, Artificial Sequence
  Description of Artificial Sequence: Synthetic oligonucleotide
  Antisense strand to SEQ ID NO: 1960974
uauuucaaacaugugcugg

SEQ ID NO: 1960976 - RNA, 19 nt, Artificial Sequence
  Description of Artificial Sequence: Synthetic oligonucleotide
  Sense strand starting at position 3219 of SEQ ID NO: 1880354
agaggccuucucuaaucuu

SEQ ID NO: 1960977 - RNA, 19 nt, Artificial Sequence
  Description of Artificial Sequence: Synthetic oligonucleotide
  Antisense strand to SEQ ID NO: 1960976
aagauuagagaaggccucu

SEQ ID NO: 1960978 - RNA, 19 nt, Artificial Sequence
  Description of Artificial Sequence: Synthetic oligonucleotide
  Sense strand starting at position 3271 of SEQ ID NO: 1880354
cagugucacggucauaauu

SEQ ID NO: 1960979 - RNA, 19 nt, Artificial Sequence
  Description of Artificial Sequence: Synthetic oligonucleotide
  Antisense strand to SEQ ID NO: 1960978
aauuaugaccgugacacug

SEQ ID NO: 1960980 - RNA, 19 nt, Artificial Sequence
  Description of Artificial Sequence: Synthetic oligonucleotide
  Sense strand starting at position 3603 of SEQ ID NO: 1880354
ucucgagaagacugcauau

SEQ ID NO: 1960981 - RNA, 19 nt, Artificial Sequence
  Description of Artificial Sequence: Synthetic oligonucleotide
  Antisense strand to SEQ ID NO: 1960980
auaugcagucuucucgaga

SEQ ID NO: 1960982 - RNA, 19 nt, Artificial Sequence
  Description of Artificial Sequence: Synthetic oligonucleotide
  Sense strand starting at position 3617 of SEQ ID NO: 1880354
cauauuguugcagaaugga

SEQ ID NO: 1960983 - RNA, 19 nt, Artificial Sequence
  Description of Artificial Sequence: Synthetic oligonucleotide
  Antisense strand to SEQ ID NO: 1960982
uccauucugcaacaauaug

SEQ ID NO: 1960984 - RNA, 19 nt, Artificial Sequence
  Description of Artificial Sequence: Synthetic oligonucleotide
  Sense strand starting at position 3620 of SEQ ID NO: 1880354
auuguugcagaauggagaa

SEQ ID NO: 1960985 - RNA, 19 nt, Artificial Sequence
  Description of Artificial Sequence: Synthetic oligonucleotide
  Antisense strand to SEQ ID NO: 1960984
uucuccauucugcaacaau

SEQ ID NO: 1960986 - RNA, 19 nt, Artificial Sequence
  Description of Artificial Sequence: Synthetic oligonucleotide
  Sense strand starting at position 3697 of SEQ ID NO: 1880354
uuuggcauuccacaugcau

SEQ ID NO: 1960987 - RNA, 19 nt, Artificial Sequence
  Description of Artificial Sequence: Synthetic oligonucleotide
  Antisense strand to SEQ ID NO: 1960986
augcauguggaaugccaaa

SEQ ID NO: 1960988 - RNA, 19 nt, Artificial Sequence
  Description of Artificial Sequence: Synthetic oligonucleotide
  Sense strand starting at position 3708 of SEQ ID NO: 1880354
acaugcauuugcuuaugua

SEQ ID NO: 1960989 - RNA, 19 nt, Artificial Sequence
  Description of Artificial Sequence: Synthetic oligonucleotide
  Antisense strand to SEQ ID NO: 1960988
uacauaagcaaaugcaugu

SEQ ID NO: 1960990 - RNA, 19 nt, Artificial Sequence
  Description of Artificial Sequence: Synthetic oligonucleotide
  Sense strand starting at position 3712 of SEQ ID NO: 1880354
gcauuugcuuauguaaauc

SEQ ID NO: 1960991 - RNA, 19 nt, Artificial Sequence
  Description of Artificial Sequence: Synthetic oligonucleotide
  Antisense strand to SEQ ID NO: 1960990
gauuuacauaagcaaaugc

SEQ ID NO: 1960992 - RNA, 19 nt, Artificial Sequence
  Description of Artificial Sequence: Synthetic oligonucleotide
  Sense strand starting at position 3844 of SEQ ID NO: 1880354
aggcuuugacuccacaacu

SEQ ID NO: 1960993 - RNA, 19 nt, Artificial Sequence
  Description of Artificial Sequence: Synthetic oligonucleotide
  Antisense strand to SEQ ID NO: 1960992
aguuguggagucaaagccu

SEQ ID NO: 1960994 - RNA, 19 nt, Artificial Sequence
  Description of Artificial Sequence: Synthetic oligonucleotide
  Sense strand starting at position 3908 of SEQ ID NO: 1880354
acgacuagauucucuacaa

SEQ ID NO: 1960995 - RNA, 19 nt, Artificial Sequence
  Description of Artificial Sequence: Synthetic oligonucleotide
  Antisense strand to SEQ ID NO: 1960994
uuguagagaaucuagucgu

SEQ ID NO: 1960996 - RNA, 19 nt, Artificial Sequence
  Description of Artificial Sequence: Synthetic oligonucleotide
  Sense strand starting at position 3909 of SEQ ID NO: 1880354
cgacuagauucucuacaac

SEQ ID NO: 1960997 - RNA, 19 nt, Artificial Sequence
  Description of Artificial Sequence: Synthetic oligonucleotide
  Antisense strand to SEQ ID NO: 1960996
guuguagagaaucuagucg

SEQ ID NO: 1960998 - RNA, 19 nt, Artificial Sequence
  Description of Artificial Sequence: Synthetic oligonucleotide
  Sense strand starting at position 3981 of SEQ ID NO: 1880354
agugguccaggcuaaagaa

SEQ ID NO: 1960999 - RNA, 19 nt, Artificial Sequence
  Description of Artificial Sequence: Synthetic oligonucleotide
  Antisense strand to SEQ ID NO: 1960998
uucuuuagccuggaccacu

SEQ ID NO: 1961000 - RNA, 19 nt, Artificial Sequence
  Description of Artificial Sequence: Synthetic oligonucleotide
  Sense strand starting at position 259 of SEQ ID NO: 1880355
gaaauuaggucauucuguu

SEQ ID NO: 1961001 - RNA, 19 nt, Artificial Sequence
  Description of Artificial Sequence: Synthetic oligonucleotide
  Antisense strand to SEQ ID NO: 1961000
aacagaaugaccuaauuuc

SEQ ID NO: 1961002 - RNA, 19 nt, Artificial Sequence
  Description of Artificial Sequence: Synthetic oligonucleotide
  Sense strand starting at position 263 of SEQ ID NO: 1880355
uuaggucauucuguucuca

SEQ ID NO: 1961003 - RNA, 19 nt, Artificial Sequence
  Description of Artificial Sequence: Synthetic oligonucleotide
  Antisense strand to SEQ ID NO: 1961002
ugagaacagaaugaccuaa

SEQ ID NO: 1961004 - RNA, 19 nt, Artificial Sequence
  Description of Artificial Sequence: Synthetic oligonucleotide
  Sense strand starting at position 265 of SEQ ID NO: 1880355
aggucauucuguucucaag

SEQ ID NO: 1961005 - RNA, 19 nt, Artificial Sequence
  Description of Artificial Sequence: Synthetic oligonucleotide
  Antisense strand to SEQ ID NO: 1961004
cuugagaacagaaugaccu

SEQ ID NO: 1961006 - RNA, 19 nt, Artificial Sequence
  Description of Artificial Sequence: Synthetic oligonucleotide
  Sense strand starting at position 267 of SEQ ID NO: 1880355
gucauucuguucucaagcu

SEQ ID NO: 1961007 - RNA, 19 nt, Artificial Sequence
  Description of Artificial Sequence: Synthetic oligonucleotide
  Antisense strand to SEQ ID NO: 1961006
agcuugagaacagaaugac

SEQ ID NO: 1961008 - RNA, 19 nt, Artificial Sequence
  Description of Artificial Sequence: Synthetic oligonucleotide
  Sense strand starting at position 300 of SEQ ID NO: 1880355
agguaugaguguuuaugag

SEQ ID NO: 1961009 - RNA, 19 nt, Artificial Sequence
  Description of Artificial Sequence: Synthetic oligonucleotide
  Antisense strand to SEQ ID NO: 1961008
cucauaaacacucauaccu

SEQ ID NO: 1961010 - RNA, 19 nt, Artificial Sequence
  Description of Artificial Sequence: Synthetic oligonucleotide
  Sense strand starting at position 306 of SEQ ID NO: 1880355
gaguguuuaugagucuaau

SEQ ID NO: 1961011 - RNA, 19 nt, Artificial Sequence
  Description of Artificial Sequence: Synthetic oligonucleotide
  Antisense strand to SEQ ID NO: 1961010
auuagacucauaaacacuc

SEQ ID NO: 1961012 - RNA, 19 nt, Artificial Sequence
  Description of Artificial Sequence: Synthetic oligonucleotide
  Sense strand starting at position 309 of SEQ ID NO: 1880355
uguuuaugagucuaauaca

SEQ ID NO: 1961013 - RNA, 19 nt, Artificial Sequence
  Description of Artificial Sequence: Synthetic oligonucleotide
  Antisense strand to SEQ ID NO: 1961012
uguauuagacucauaaaca

SEQ ID NO: 1961014 - RNA, 19 nt, Artificial Sequence
  Description of Artificial Sequence: Synthetic oligonucleotide
  Sense strand starting at position 312 of SEQ ID NO: 1880355
uuaugagucuaauacauug

SEQ ID NO: 1961015 - RNA, 19 nt, Artificial Sequence
  Description of Artificial Sequence: Synthetic oligonucleotide
  Antisense strand to SEQ ID NO: 1961014
caauguauuagacucauaa

SEQ ID NO: 1961016 - RNA, 19 nt, Artificial Sequence
  Description of Artificial Sequence: Synthetic oligonucleotide
  Sense strand starting at position 317 of SEQ ID NO: 1880355
agucuaauacauuguuuac

SEQ ID NO: 1961017 - RNA, 19 nt, Artificial Sequence
  Description of Artificial Sequence: Synthetic oligonucleotide
  Antisense strand to SEQ ID NO: 1961016
guaaacaauguauuagacu

SEQ ID NO: 1961018 - RNA, 19 nt, Artificial Sequence
  Description of Artificial Sequence: Synthetic oligonucleotide
  Sense strand starting at position 386 of SEQ ID NO: 1880355
gcucuuuccuuagcaagag

SEQ ID NO: 1961019 - RNA, 19 nt, Artificial Sequence
  Description of Artificial Sequence: Synthetic oligonucleotide
  Antisense strand to SEQ ID NO: 1961018
cucuugcuaaggaaagagc

SEQ ID NO: 1961020 - RNA, 19 nt, Artificial Sequence
  Description of Artificial Sequence: Synthetic oligonucleotide
  Sense strand starting at position 615 of SEQ ID NO: 1880355
gcguaauuucaaggugguc

SEQ ID NO: 1961021 - RNA, 19 nt, Artificial Sequence
  Description of Artificial Sequence: Synthetic oligonucleotide
  Antisense strand to SEQ ID NO: 1961020
gaccaccuugaaauuacgc

SEQ ID NO: 1961022 - RNA, 19 nt, Artificial Sequence
  Description of Artificial Sequence: Synthetic oligonucleotide
  Sense strand starting at position 664 of SEQ ID NO: 1880355
ugcugugaacgccagagaa

SEQ ID NO: 1961023 - RNA, 19 nt, Artificial Sequence
  Description of Artificial Sequence: Synthetic oligonucleotide
  Antisense strand to SEQ ID NO: 1961022
uucucuggcguucacagca

SEQ ID NO: 1961024 - RNA, 19 nt, Artificial Sequence
  Description of Artificial Sequence: Synthetic oligonucleotide
  Sense strand starting at position 717 of SEQ ID NO: 1880355
ggcggcaacuccucugaga

SEQ ID NO: 1961025 - RNA, 19 nt, Artificial Sequence
  Description of Artificial Sequence: Synthetic oligonucleotide
  Antisense strand to SEQ ID NO: 1961024
ucucagaggaguugccgcc

SEQ ID NO: 1961026 - RNA, 19 nt, Artificial Sequence
  Description of Artificial Sequence: Synthetic oligonucleotide
  Sense strand starting at position 719 of SEQ ID NO: 1880355
cggcaacuccucugagaga

SEQ ID NO: 1961027 - RNA, 19 nt, Artificial Sequence
  Description of Artificial Sequence: Synthetic oligonucleotide
  Antisense strand to SEQ ID NO: 1961026
ucucucagaggaguugccg

SEQ ID NO: 1961028 - RNA, 19 nt, Artificial Sequence
  Description of Artificial Sequence: Synthetic oligonucleotide
  Sense strand starting at position 925 of SEQ ID NO: 1880355
gugucaaggaguuacauuc

SEQ ID NO: 1961029 - RNA, 19 nt, Artificial Sequence
  Description of Artificial Sequence: Synthetic oligonucleotide
  Antisense strand to SEQ ID NO: 1961028
gaauguaacuccuugacac

SEQ ID NO: 1961030 - RNA, 19 nt, Artificial Sequence
  Description of Artificial Sequence: Synthetic oligonucleotide
  Sense strand starting at position 932 of SEQ ID NO: 1880355
ggaguuacauucucacgca

SEQ ID NO: 1961031 - RNA, 19 nt, Artificial Sequence
  Description of Artificial Sequence: Synthetic oligonucleotide
  Antisense strand to SEQ ID NO: 1961030
ugcgugagaauguaacucc

SEQ ID NO: 1961032 - RNA, 19 nt, Artificial Sequence
  Description of Artificial Sequence: Synthetic oligonucleotide
  Sense strand starting at position 995 of SEQ ID NO: 1880355
gcucaaaugccuuguacau

SEQ ID NO: 1961033 - RNA, 19 nt, Artificial Sequence
  Description of Artificial Sequence: Synthetic oligonucleotide
  Antisense strand to SEQ ID NO: 1961032
auguacaaggcauuugagc

SEQ ID NO: 1961034 - RNA, 19 nt, Artificial Sequence
  Description of Artificial Sequence: Synthetic oligonucleotide
  Sense strand starting at position 1004 of SEQ ID NO: 1880355
ccuuguacauaaguuugaa

SEQ ID NO: 1961035 - RNA, 19 nt, Artificial Sequence
  Description of Artificial Sequence: Synthetic oligonucleotide
  Antisense strand to SEQ ID NO: 1961034
uucaaacuuauguacaagg

SEQ ID NO: 1961036 - RNA, 19 nt, Artificial Sequence
  Description of Artificial Sequence: Synthetic oligonucleotide
  Sense strand starting at position 1018 of SEQ ID NO: 1880355
uugaauauaucgucgugca

SEQ ID NO: 1961037 - RNA, 19 nt, Artificial Sequence
  Description of Artificial Sequence: Synthetic oligonucleotide
  Antisense strand to SEQ ID NO: 1961036
ugcacgacgauauauucaa

SEQ ID NO: 1961038 - RNA, 19 nt, Artificial Sequence
  Description of Artificial Sequence: Synthetic oligonucleotide
  Sense strand starting at position 1019 of SEQ ID NO: 1880355
ugaauauaucgucgugcac

SEQ ID NO: 1961039 - RNA, 19 nt, Artificial Sequence
  Description of Artificial Sequence: Synthetic oligonucleotide
  Antisense strand to SEQ ID NO: 1961038
gugcacgacgauauauuca

SEQ ID NO: 1961040 - RNA, 19 nt, Artificial Sequence
  Description of Artificial Sequence: Synthetic oligonucleotide
  Sense strand starting at position 1067 of SEQ ID NO: 1880355
agagcuugcugguuaucca

SEQ ID NO: 1961041 - RNA, 19 nt, Artificial Sequence
  Description of Artificial Sequence: Synthetic oligonucleotide
  Antisense strand to SEQ ID NO: 1961040
uggauaaccagcaagcucu

SEQ ID NO: 1961042 - RNA, 19 nt, Artificial Sequence
  Description of Artificial Sequence: Synthetic oligonucleotide
  Sense strand starting at position 1068 of SEQ ID NO: 1880355
gagcuugcugguuauccaa

SEQ ID NO: 1961043 - RNA, 19 nt, Artificial Sequence
  Description of Artificial Sequence: Synthetic oligonucleotide
  Antisense strand to SEQ ID NO: 1961042
uuggauaaccagcaagcuc

SEQ ID NO: 1961044 - RNA, 19 nt, Artificial Sequence
  Description of Artificial Sequence: Synthetic oligonucleotide
  Sense strand starting at position 1104 of SEQ ID NO: 1880355
uccuucuucccuggucaua

SEQ ID NO: 1961045 - RNA, 19 nt, Artificial Sequence
  Description of Artificial Sequence: Synthetic oligonucleotide
  Antisense strand to SEQ ID NO: 1961044
uaugaccagggaagaagga

SEQ ID NO: 1961046 - RNA, 19 nt, Artificial Sequence
  Description of Artificial Sequence: Synthetic oligonucleotide
  Sense strand starting at position 1106 of SEQ ID NO: 1880355
cuucuucccuggucauaga

SEQ ID NO: 1961047 - RNA, 19 nt, Artificial Sequence
  Description of Artificial Sequence: Synthetic oligonucleotide
  Antisense strand to SEQ ID NO: 1961046
ucuaugaccagggaagaag

SEQ ID NO: 1961048 - RNA, 19 nt, Artificial Sequence
  Description of Artificial Sequence: Synthetic oligonucleotide
  Sense strand starting at position 1150 of SEQ ID NO: 1880355
uuuacagaagccuagcaau

SEQ ID NO: 1961049 - RNA, 19 nt, Artificial Sequence
  Description of Artificial Sequence: Synthetic oligonucleotide
  Antisense strand to SEQ ID NO: 1961048
auugcuaggcuucuguaaa

SEQ ID NO: 1961050 - RNA, 19 nt, Artificial Sequence
  Description of Artificial Sequence: Synthetic oligonucleotide
  Sense strand starting at position 1190 of SEQ ID NO: 1880355
cggccaucacccuagcaau

SEQ ID NO: 1961051 - RNA, 19 nt, Artificial Sequence
  Description of Artificial Sequence: Synthetic oligonucleotide
  Antisense strand to SEQ ID NO: 1961050
auugcuagggugauggccg

SEQ ID NO: 1961052 - RNA, 19 nt, Artificial Sequence
  Description of Artificial Sequence: Synthetic oligonucleotide
  Sense strand starting at position 1270 of SEQ ID NO: 1880355
aguauucggguucagucau

SEQ ID NO: 1961053 - RNA, 19 nt, Artificial Sequence
  Description of Artificial Sequence: Synthetic oligonucleotide
  Antisense strand to SEQ ID NO: 1961052
augacugaacccgaauacu

SEQ ID NO: 1961054 - RNA, 19 nt, Artificial Sequence
  Description of Artificial Sequence: Synthetic oligonucleotide
  Sense strand starting at position 1276 of SEQ ID NO: 1880355
cggguucagucauugaaag

SEQ ID NO: 1961055 - RNA, 19 nt, Artificial Sequence
  Description of Artificial Sequence: Synthetic oligonucleotide
  Antisense strand to SEQ ID NO: 1961054
cuuucaaugacugaacccg

SEQ ID NO: 1961056 - RNA, 19 nt, Artificial Sequence
  Description of Artificial Sequence: Synthetic oligonucleotide
  Sense strand starting at position 1277 of SEQ ID NO: 1880355
ggguucagucauugaaagc

SEQ ID NO: 1961057 - RNA, 19 nt, Artificial Sequence
  Description of Artificial Sequence: Synthetic oligonucleotide
  Antisense strand to SEQ ID NO: 1961056
gcuuucaaugacugaaccc

SEQ ID NO: 1961058 - RNA, 19 nt, Artificial Sequence
  Description of Artificial Sequence: Synthetic oligonucleotide
  Sense strand starting at position 1313 of SEQ ID NO: 1880355
aggguauuuguuuguaauu

SEQ ID NO: 1961059 - RNA, 19 nt, Artificial Sequence
  Description of Artificial Sequence: Synthetic oligonucleotide
  Antisense strand to SEQ ID NO: 1961058
aauuacaaacaaauacccu

SEQ ID NO: 1961060 - RNA, 19 nt, Artificial Sequence
  Description of Artificial Sequence: Synthetic oligonucleotide
  Sense strand starting at position 1484 of SEQ ID NO: 1880355
ggaaauuacuuaugaccuc

SEQ ID NO: 1961061 - RNA, 19 nt, Artificial Sequence
  Description of Artificial Sequence: Synthetic oligonucleotide
  Antisense strand to SEQ ID NO: 1961060
gaggucauaaguaauuucc

SEQ ID NO: 1961062 - RNA, 19 nt, Artificial Sequence
  Description of Artificial Sequence: Synthetic oligonucleotide
  Sense strand starting at position 1661 of SEQ ID NO: 1880355
cgacguagcgcaaagaguu

SEQ ID NO: 1961063 - RNA, 19 nt, Artificial Sequence
  Description of Artificial Sequence: Synthetic oligonucleotide
  Antisense strand to SEQ ID NO: 1961062
aacucuuugcgcuacgucg

SEQ ID NO: 1961064 - RNA, 19 nt, Artificial Sequence
  Description of Artificial Sequence: Synthetic oligonucleotide
  Sense strand starting at position 1848 of SEQ ID NO: 1880355
gcggguucagucguucgau

SEQ ID NO: 1961065 - RNA, 19 nt, Artificial Sequence
  Description of Artificial Sequence: Synthetic oligonucleotide
  Antisense strand to SEQ ID NO: 1961064
aucgaacgacugaacccgc

SEQ ID NO: 1961066 - RNA, 19 nt, Artificial Sequence
  Description of Artificial Sequence: Synthetic oligonucleotide
  Sense strand starting at position 1850 of SEQ ID NO: 1880355
ggguucagucguucgaucu

SEQ ID NO: 1961067 - RNA, 19 nt, Artificial Sequence
  Description of Artificial Sequence: Synthetic oligonucleotide
  Antisense strand to SEQ ID NO: 1961066
agaucgaacgacugaaccc

SEQ ID NO: 1961068 - RNA, 19 nt, Artificial Sequence
  Description of Artificial Sequence: Synthetic oligonucleotide
  Sense strand starting at position 2124 of SEQ ID NO: 1880355
acgcgaagucuugcgcuca

SEQ ID NO: 1961069 - RNA, 19 nt, Artificial Sequence
  Description of Artificial Sequence: Synthetic oligonucleotide
  Antisense strand to SEQ ID NO: 1961068
ugagcgcaagacuucgcgu

SEQ ID NO: 1961070 - RNA, 19 nt, Artificial Sequence
  Description of Artificial Sequence: Synthetic oligonucleotide
  Sense strand starting at position 2129 of SEQ ID NO: 1880355
aagucuugcgcucaggaca

SEQ ID NO: 1961071 - RNA, 19 nt, Artificial Sequence
  Description of Artificial Sequence: Synthetic oligonucleotide
  Antisense strand to SEQ ID NO: 1961070
uguccugagcgcaagacuu

SEQ ID NO: 1961072 - RNA, 19 nt, Artificial Sequence
  Description of Artificial Sequence: Synthetic oligonucleotide
  Sense strand starting at position 2190 of SEQ ID NO: 1880355
guacuugagcaccagcaua

SEQ ID NO: 1961073 - RNA, 19 nt, Artificial Sequence
  Description of Artificial Sequence: Synthetic oligonucleotide
  Antisense strand to SEQ ID NO: 1961072
uaugcuggugcucaaguac

SEQ ID NO: 1961074 - RNA, 19 nt, Artificial Sequence
  Description of Artificial Sequence: Synthetic oligonucleotide
  Sense strand starting at position 2993 of SEQ ID NO: 1880355
caaacuuuguccuugcgga

SEQ ID NO: 1961075 - RNA, 19 nt, Artificial Sequence
  Description of Artificial Sequence: Synthetic oligonucleotide
  Antisense strand to SEQ ID NO: 1961074
uccgcaaggacaaaguuug

SEQ ID NO: 1961076 - RNA, 19 nt, Artificial Sequence
  Description of Artificial Sequence: Synthetic oligonucleotide
  Sense strand starting at position 2994 of SEQ ID NO: 1880355
aaacuuuguccuugcggaa

SEQ ID NO: 1961077 - RNA, 19 nt, Artificial Sequence
  Description of Artificial Sequence: Synthetic oligonucleotide
  Antisense strand to SEQ ID NO: 1961076
uuccgcaaggacaaaguuu

SEQ ID NO: 1961078 - RNA, 19 nt, Artificial Sequence
  Description of Artificial Sequence: Synthetic oligonucleotide
  Sense strand starting at position 3738 of SEQ ID NO: 1880355
cagggagcuuccuuguacu

SEQ ID NO: 1961079 - RNA, 19 nt, Artificial Sequence
  Description of Artificial Sequence: Synthetic oligonucleotide
  Antisense strand to SEQ ID NO: 1961078
aguacaaggaagcucccug

SEQ ID NO: 1961080 - RNA, 19 nt, Artificial Sequence
  Description of Artificial Sequence: Synthetic oligonucleotide
  Sense strand starting at position 91 of SEQ ID NO: 1880356
uccuuuacaguguaauaua

SEQ ID NO: 1961081 - RNA, 19 nt, Artificial Sequence
  Description of Artificial Sequence: Synthetic oligonucleotide
  Antisense strand to SEQ ID NO: 1961080
uauauuacacuguaaagga

SEQ ID NO: 1961082 - RNA, 19 nt, Artificial Sequence
  Description of Artificial Sequence: Synthetic oligonucleotide
  Sense strand starting at position 213 of SEQ ID NO: 1880356
aacuguaaaguguggauaa

SEQ ID NO: 1961083 - RNA, 19 nt, Artificial Sequence
  Description of Artificial Sequence: Synthetic oligonucleotide
  Antisense strand to SEQ ID NO: 1961082
uuauccacacuuuacaguu

SEQ ID NO: 1961084 - RNA, 19 nt, Artificial Sequence
  Description of Artificial Sequence: Synthetic oligonucleotide
  Sense strand starting at position 489 of SEQ ID NO: 1880356
gguagaaagcucuggaauu

SEQ ID NO: 1961085 - RNA, 19 nt, Artificial Sequence
  Description of Artificial Sequence: Synthetic oligonucleotide
  Antisense strand to SEQ ID NO: 1961084
aauuccagagcuuucuacc

SEQ ID NO: 1961086 - RNA, 19 nt, Artificial Sequence
  Description of Artificial Sequence: Synthetic oligonucleotide
  Sense strand starting at position 509 of SEQ ID NO: 1880356
uggagugggugcaaugaaa

SEQ ID NO: 1961087 - RNA, 19 nt, Artificial Sequence
  Description of Artificial Sequence: Synthetic oligonucleotide
  Antisense strand to SEQ ID NO: 1961086
uuucauugcacccacucca

SEQ ID NO: 1961088 - RNA, 19 nt, Artificial Sequence
  Description of Artificial Sequence: Synthetic oligonucleotide
  Sense strand starting at position 571 of SEQ ID NO: 1880356
cguaaagagaaauguuauu

SEQ ID NO: 1961089 - RNA, 19 nt, Artificial Sequence
  Description of Artificial Sequence: Synthetic oligonucleotide
  Antisense strand to SEQ ID NO: 1961088
aauaacauuucucuuuacg

SEQ ID NO: 1961090 - RNA, 19 nt, Artificial Sequence
  Description of Artificial Sequence: Synthetic oligonucleotide
  Sense strand starting at position 591 of SEQ ID NO: 1880356
uuauuauuguucuccagag

SEQ ID NO: 1961091 - RNA, 19 nt, Artificial Sequence
  Description of Artificial Sequence: Synthetic oligonucleotide
  Antisense strand to SEQ ID NO: 1961090
cucuggagaacaauaauaa

SEQ ID NO: 1961092 - RNA, 19 nt, Artificial Sequence
  Description of Artificial Sequence: Synthetic oligonucleotide
  Sense strand starting at position 593 of SEQ ID NO: 1880356
auuauuguucuccagagau

SEQ ID NO: 1961093 - RNA, 19 nt, Artificial Sequence
  Description of Artificial Sequence: Synthetic oligonucleotide
  Antisense strand to SEQ ID NO: 1961092
aucucuggagaacaauaau

SEQ ID NO: 1961094 - RNA, 19 nt, Artificial Sequence
  Description of Artificial Sequence: Synthetic oligonucleotide
  Sense strand starting at position 826 of SEQ ID NO: 1880356
aucauuauaccauguguua

SEQ ID NO: 1961095 - RNA, 19 nt, Artificial Sequence
  Description of Artificial Sequence: Synthetic oligonucleotide
  Antisense strand to SEQ ID NO: 1961094
uaacacaugguauaaugau

SEQ ID NO: 1961096 - RNA, 19 nt, Artificial Sequence
  Description of Artificial Sequence: Synthetic oligonucleotide
  Sense strand starting at position 946 of SEQ ID NO: 1880356
gagaauaaggcccgggaau

SEQ ID NO: 1961097 - RNA, 19 nt, Artificial Sequence
  Description of Artificial Sequence: Synthetic oligonucleotide
  Antisense strand to SEQ ID NO: 1961096
auucccgggccuuauucuc

SEQ ID NO: 1961098 - RNA, 19 nt, Artificial Sequence
  Description of Artificial Sequence: Synthetic oligonucleotide
  Sense strand starting at position 947 of SEQ ID NO: 1880356
agaauaaggcccgggaaua

SEQ ID NO: 1961099 - RNA, 19 nt, Artificial Sequence
  Description of Artificial Sequence: Synthetic oligonucleotide
  Antisense strand to SEQ ID NO: 1961098
uauucccgggccuuauucu

SEQ ID NO: 1961100 - RNA, 19 nt, Artificial Sequence
  Description of Artificial Sequence: Synthetic oligonucleotide
  Sense strand starting at position 948 of SEQ ID NO: 1880356
gaauaaggcccgggaauau

SEQ ID NO: 1961101 - RNA, 19 nt, Artificial Sequence
  Description of Artificial Sequence: Synthetic oligonucleotide
  Antisense strand to SEQ ID NO: 1961100
auauucccgggccuuauuc

SEQ ID NO: 1961102 - RNA, 19 nt, Artificial Sequence
  Description of Artificial Sequence: Synthetic oligonucleotide
  Sense strand starting at position 1120 of SEQ ID NO: 1880356
ugggccaucuucguuauuu

SEQ ID NO: 1961103 - RNA, 19 nt, Artificial Sequence
  Description of Artificial Sequence: Synthetic oligonucleotide
  Antisense strand to SEQ ID NO: 1961102
aaauaacgaagauggccca

SEQ ID NO: 1961104 - RNA, 19 nt, Artificial Sequence
  Description of Artificial Sequence: Synthetic oligonucleotide
  Sense strand starting at position 1121 of SEQ ID NO: 1880356
gggccaucuucguuauuug

SEQ ID NO: 1961105 - RNA, 19 nt, Artificial Sequence
  Description of Artificial Sequence: Synthetic oligonucleotide
  Antisense strand to SEQ ID NO: 1961104
caaauaacgaagauggccc

SEQ ID NO: 1961106 - RNA, 19 nt, Artificial Sequence
  Description of Artificial Sequence: Synthetic oligonucleotide
  Sense strand starting at position 1994 of SEQ ID NO: 1880356
guguccauaccugauucua

SEQ ID NO: 1961107 - RNA, 19 nt, Artificial Sequence
  Description of Artificial Sequence: Synthetic oligonucleotide
  Antisense strand to SEQ ID NO: 1961106
uagaaucagguauggacac

SEQ ID NO: 1961108 - RNA, 19 nt, Artificial Sequence
  Description of Artificial Sequence: Synthetic oligonucleotide
  Sense strand starting at position 1996 of SEQ ID NO: 1880356
guccauaccugauucuaag

SEQ ID NO: 1961109 - RNA, 19 nt, Artificial Sequence
  Description of Artificial Sequence: Synthetic oligonucleotide
  Antisense strand to SEQ ID NO: 1961108
cuuagaaucagguauggac

SEQ ID NO: 1961110 - RNA, 19 nt, Artificial Sequence
  Description of Artificial Sequence: Synthetic oligonucleotide
  Sense strand starting at position 2003 of SEQ ID NO: 1880356
ccugauucuaagcgaggga

SEQ ID NO: 1961111 - RNA, 19 nt, Artificial Sequence
  Description of Artificial Sequence: Synthetic oligonucleotide
  Antisense strand to SEQ ID NO: 1961110
ucccucgcuuagaaucagg

SEQ ID NO: 1961112 - RNA, 19 nt, Artificial Sequence
  Description of Artificial Sequence: Synthetic oligonucleotide
  Sense strand starting at position 2072 of SEQ ID NO: 1880356
gaagucuugaguugggaga

SEQ ID NO: 1961113 - RNA, 19 nt, Artificial Sequence
  Description of Artificial Sequence: Synthetic oligonucleotide
  Antisense strand to SEQ ID NO: 1961112
ucucccaacucaagacuuc

SEQ ID NO: 1961114 - RNA, 19 nt, Artificial Sequence
  Description of Artificial Sequence: Synthetic oligonucleotide
  Sense strand starting at position 2101 of SEQ ID NO: 1880356
ccugguaguggaugaacaa

SEQ ID NO: 1961115 - RNA, 19 nt, Artificial Sequence
  Description of Artificial Sequence: Synthetic oligonucleotide
  Antisense strand to SEQ ID NO: 1961114
uuguucauccacuaccagg

SEQ ID NO: 1961116 - RNA, 19 nt, Artificial Sequence
  Description of Artificial Sequence: Synthetic oligonucleotide
  Sense strand starting at position 2310 of SEQ ID NO: 1880356
gccaaugggagguauuagu

SEQ ID NO: 1961117 - RNA, 19 nt, Artificial Sequence
  Description of Artificial Sequence: Synthetic oligonucleotide
  Antisense strand to SEQ ID NO: 1961116
acuaauaccucccauuggc

SEQ ID NO: 1961118 - RNA, 19 nt, Artificial Sequence
  Description of Artificial Sequence: Synthetic oligonucleotide
  Sense strand starting at position 2320 of SEQ ID NO: 1880356
gguauuaguguuuaaguaa

SEQ ID NO: 1961119 - RNA, 19 nt, Artificial Sequence
  Description of Artificial Sequence: Synthetic oligonucleotide
  Antisense strand to SEQ ID NO: 1961118
uuacuuaaacacuaauacc

SEQ ID NO: 1961120 - RNA, 19 nt, Artificial Sequence
  Description of Artificial Sequence: Synthetic oligonucleotide
  Sense strand starting at position 2594 of SEQ ID NO: 1880356
gaggauauguaccuuggua

SEQ ID NO: 1961121 - RNA, 19 nt, Artificial Sequence
  Description of Artificial Sequence: Synthetic oligonucleotide
  Antisense strand to SEQ ID NO: 1961120
uaccaagguacauauccuc

SEQ ID NO: 1961122 - RNA, 19 nt, Artificial Sequence
  Description of Artificial Sequence: Synthetic oligonucleotide
  Sense strand starting at position 2596 of SEQ ID NO: 1880356
ggauauguaccuugguaga

SEQ ID NO: 1961123 - RNA, 19 nt, Artificial Sequence
  Description of Artificial Sequence: Synthetic oligonucleotide
  Antisense strand to SEQ ID NO: 1961122
ucuaccaagguacauaucc

SEQ ID NO: 1961124 - RNA, 19 nt, Artificial Sequence
  Description of Artificial Sequence: Synthetic oligonucleotide
  Sense strand starting at position 2598 of SEQ ID NO: 1880356
auauguaccuugguagaug

SEQ ID NO: 1961125 - RNA, 19 nt, Artificial Sequence
  Description of Artificial Sequence: Synthetic oligonucleotide
  Antisense strand to SEQ ID NO: 1961124
caucuaccaagguacauau

SEQ ID NO: 1961126 - RNA, 19 nt, Artificial Sequence
  Description of Artificial Sequence: Synthetic oligonucleotide
  Sense strand starting at position 2606 of SEQ ID NO: 1880356
cuugguagaugguugugaa

SEQ ID NO: 1961127 - RNA, 19 nt, Artificial Sequence
  Description of Artificial Sequence: Synthetic oligonucleotide
  Antisense strand to SEQ ID NO: 1961126
uucacaaccaucuaccaag

SEQ ID NO: 1961128 - RNA, 19 nt, Artificial Sequence
  Description of Artificial Sequence: Synthetic oligonucleotide
  Sense strand starting at position 2607 of SEQ ID NO: 1880356
uugguagaugguugugaag

SEQ ID NO: 1961129 - RNA, 19 nt, Artificial Sequence
  Description of Artificial Sequence: Synthetic oligonucleotide
  Antisense strand to SEQ ID NO: 1961128
cuucacaaccaucuaccaa

SEQ ID NO: 1961130 - RNA, 19 nt, Artificial Sequence
  Description of Artificial Sequence: Synthetic oligonucleotide
  Sense strand starting at position 2643 of SEQ ID NO: 1880356
uguauaaagcucugacaug

SEQ ID NO: 1961131 - RNA, 19 nt, Artificial Sequence
  Description of Artificial Sequence: Synthetic oligonucleotide
  Antisense strand to SEQ ID NO: 1961130
caugucagagcuuuauaca

SEQ ID NO: 1961132 - RNA, 19 nt, Artificial Sequence
  Description of Artificial Sequence: Synthetic oligonucleotide
  Sense strand starting at position 2650 of SEQ ID NO: 1880356
agcucugacauguggaaga

SEQ ID NO: 1961133 - RNA, 19 nt, Artificial Sequence
  Description of Artificial Sequence: Synthetic oligonucleotide
  Antisense strand to SEQ ID NO: 1961132
ucuuccacaugucagagcu

SEQ ID NO: 1961134 - RNA, 19 nt, Artificial Sequence
  Description of Artificial Sequence: Synthetic oligonucleotide
  Sense strand starting at position 2660 of SEQ ID NO: 1880356
uguggaagaugcuuaauaa

SEQ ID NO: 1961135 - RNA, 19 nt, Artificial Sequence
  Description of Artificial Sequence: Synthetic oligonucleotide
  Antisense strand to SEQ ID NO: 1961134
uuauuaagcaucuuccaca

SEQ ID NO: 1961136 - RNA, 19 nt, Artificial Sequence
  Description of Artificial Sequence: Synthetic oligonucleotide
  Sense strand starting at position 2808 of SEQ ID NO: 1880356
cugugagcccuugaugaua

SEQ ID NO: 1961137 - RNA, 19 nt, Artificial Sequence
  Description of Artificial Sequence: Synthetic oligonucleotide
  Antisense strand to SEQ ID NO: 1961136
uaucaucaagggcucacag

SEQ ID NO: 1961138 - RNA, 19 nt, Artificial Sequence
  Description of Artificial Sequence: Synthetic oligonucleotide
  Sense strand starting at position 2894 of SEQ ID NO: 1880356
auacaucccuaguuugaua

SEQ ID NO: 1961139 - RNA, 19 nt, Artificial Sequence
  Description of Artificial Sequence: Synthetic oligonucleotide
  Antisense strand to SEQ ID NO: 1961138
uaucaaacuagggauguau

SEQ ID NO: 1961140 - RNA, 19 nt, Artificial Sequence
  Description of Artificial Sequence: Synthetic oligonucleotide
  Sense strand starting at position 2964 of SEQ ID NO: 1880356
aaaugucuuguuugauuga

SEQ ID NO: 1961141 - RNA, 19 nt, Artificial Sequence
  Description of Artificial Sequence: Synthetic oligonucleotide
  Antisense strand to SEQ ID NO: 1961140
ucaaucaaacaagacauuu

SEQ ID NO: 1961142 - RNA, 19 nt, Artificial Sequence
  Description of Artificial Sequence: Synthetic oligonucleotide
  Sense strand starting at position 2967 of SEQ ID NO: 1880356
ugucuuguuugauugagga

SEQ ID NO: 1961143 - RNA, 19 nt, Artificial Sequence
  Description of Artificial Sequence: Synthetic oligonucleotide
  Antisense strand to SEQ ID NO: 1961142
uccucaaucaaacaagaca

SEQ ID NO: 1961144 - RNA, 19 nt, Artificial Sequence
  Description of Artificial Sequence: Synthetic oligonucleotide
  Sense strand starting at position 3007 of SEQ ID NO: 1880356
aggguaugucuugaucaac

SEQ ID NO: 1961145 - RNA, 19 nt, Artificial Sequence
  Description of Artificial Sequence: Synthetic oligonucleotide
  Antisense strand to SEQ ID NO: 1961144
guugaucaagacauacccu

SEQ ID NO: 1961146 - RNA, 19 nt, Artificial Sequence
  Description of Artificial Sequence: Synthetic oligonucleotide
  Sense strand starting at position 3010 of SEQ ID NO: 1880356
guaugucuugaucaacaca

SEQ ID NO: 1961147 - RNA, 19 nt, Artificial Sequence
  Description of Artificial Sequence: Synthetic oligonucleotide
  Antisense strand to SEQ ID NO: 1961146
uguguugaucaagacauac

SEQ ID NO: 1961148 - RNA, 19 nt, Artificial Sequence
  Description of Artificial Sequence: Synthetic oligonucleotide
  Sense strand starting at position 3046 of SEQ ID NO: 1880356
uguugaauuugcuuaguac

SEQ ID NO: 1961149 - RNA, 19 nt, Artificial Sequence
  Description of Artificial Sequence: Synthetic oligonucleotide
  Antisense strand to SEQ ID NO: 1961148
guacuaagcaaauucaaca

SEQ ID NO: 1961150 - RNA, 19 nt, Artificial Sequence
  Description of Artificial Sequence: Synthetic oligonucleotide
  Sense strand starting at position 3074 of SEQ ID NO: 1880356
gauaauggcugacugguua

SEQ ID NO: 1961151 - RNA, 19 nt, Artificial Sequence
  Description of Artificial Sequence: Synthetic oligonucleotide
  Antisense strand to SEQ ID NO: 1961150
uaaccagucagccauuauc

SEQ ID NO: 1961152 - RNA, 19 nt, Artificial Sequence
  Description of Artificial Sequence: Synthetic oligonucleotide
  Sense strand starting at position 3088 of SEQ ID NO: 1880356
gguuauucccauugaucca

SEQ ID NO: 1961153 - RNA, 19 nt, Artificial Sequence
  Description of Artificial Sequence: Synthetic oligonucleotide
  Antisense strand to SEQ ID NO: 1961152
uggaucaaugggaauaacc

SEQ ID NO: 1961154 - RNA, 19 nt, Artificial Sequence
  Description of Artificial Sequence: Synthetic oligonucleotide
  Sense strand starting at position 3218 of SEQ ID NO: 1880356
cuuacugcuccugaaggga

SEQ ID NO: 1961155 - RNA, 19 nt, Artificial Sequence
  Description of Artificial Sequence: Synthetic oligonucleotide
  Antisense strand to SEQ ID NO: 1961154
ucccuucaggagcaguaag

SEQ ID NO: 1961156 - RNA, 19 nt, Artificial Sequence
  Description of Artificial Sequence: Synthetic oligonucleotide
  Sense strand starting at position 3840 of SEQ ID NO: 1880356
guauguucuccacaucgag

SEQ ID NO: 1961157 - RNA, 19 nt, Artificial Sequence
  Description of Artificial Sequence: Synthetic oligonucleotide
  Antisense strand to SEQ ID NO: 1961156
cucgauguggagaacauac

SEQ ID NO: 1961158 - RNA, 19 nt, Artificial Sequence
  Description of Artificial Sequence: Synthetic oligonucleotide
  Sense strand starting at position 3903 of SEQ ID NO: 1880356
ucaagugccaaguggaaau

SEQ ID NO: 1961159 - RNA, 19 nt, Artificial Sequence
  Description of Artificial Sequence: Synthetic oligonucleotide
  Antisense strand to SEQ ID NO: 1961158
auuuccacuuggcacuuga

SEQ ID NO: 1961160 - RNA, 19 nt, Artificial Sequence
  Description of Artificial Sequence: Synthetic oligonucleotide
  Sense strand starting at position 257 of SEQ ID NO: 1880357
aacaaaggcuguuuguauu

SEQ ID NO: 1961161 - RNA, 19 nt, Artificial Sequence
  Description of Artificial Sequence: Synthetic oligonucleotide
  Antisense strand to SEQ ID NO: 1961160
aauacaaacagccuuuguu

SEQ ID NO: 1961162 - RNA, 19 nt, Artificial Sequence
  Description of Artificial Sequence: Synthetic oligonucleotide
  Sense strand starting at position 260 of SEQ ID NO: 1880357
aaaggcuguuuguauugua

SEQ ID NO: 1961163 - RNA, 19 nt, Artificial Sequence
  Description of Artificial Sequence: Synthetic oligonucleotide
  Antisense strand to SEQ ID NO: 1961162
uacaauacaaacagccuuu

SEQ ID NO: 1961164 - RNA, 19 nt, Artificial Sequence
  Description of Artificial Sequence: Synthetic oligonucleotide
  Sense strand starting at position 326 of SEQ ID NO: 1880357
ugguccucgccuggagauu

SEQ ID NO: 1961165 - RNA, 19 nt, Artificial Sequence
  Description of Artificial Sequence: Synthetic oligonucleotide
  Antisense strand to SEQ ID NO: 1961164
aaucuccaggcgaggacca

SEQ ID NO: 1961166 - RNA, 19 nt, Artificial Sequence
  Description of Artificial Sequence: Synthetic oligonucleotide
  Sense strand starting at position 361 of SEQ ID NO: 1880357
gugaaagacucauuagacu

SEQ ID NO: 1961167 - RNA, 19 nt, Artificial Sequence
  Description of Artificial Sequence: Synthetic oligonucleotide
  Antisense strand to SEQ ID NO: 1961166
agucuaaugagucuuucac

SEQ ID NO: 1961168 - RNA, 19 nt, Artificial Sequence
  Description of Artificial Sequence: Synthetic oligonucleotide
  Sense strand starting at position 430 of SEQ ID NO: 1880357
ugacuucucugcccugcua

SEQ ID NO: 1961169 - RNA, 19 nt, Artificial Sequence
  Description of Artificial Sequence: Synthetic oligonucleotide
  Antisense strand to SEQ ID NO: 1961168
uagcagggcagagaaguca

SEQ ID NO: 1961170 - RNA, 19 nt, Artificial Sequence
  Description of Artificial Sequence: Synthetic oligonucleotide
  Sense strand starting at position 575 of SEQ ID NO: 1880357
ccuacaauguccgauuuaa

SEQ ID NO: 1961171 - RNA, 19 nt, Artificial Sequence
  Description of Artificial Sequence: Synthetic oligonucleotide
  Antisense strand to SEQ ID NO: 1961170
uuaaaucggacauuguagg

SEQ ID NO: 1961172 - RNA, 19 nt, Artificial Sequence
  Description of Artificial Sequence: Synthetic oligonucleotide
  Sense strand starting at position 881 of SEQ ID NO: 1880357
cgcgccaggccugauuuaa

SEQ ID NO: 1961173 - RNA, 19 nt, Artificial Sequence
  Description of Artificial Sequence: Synthetic oligonucleotide
  Antisense strand to SEQ ID NO: 1961172
uuaaaucaggccuggcgcg

SEQ ID NO: 1961174 - RNA, 19 nt, Artificial Sequence
  Description of Artificial Sequence: Synthetic oligonucleotide
  Sense strand starting at position 892 of SEQ ID NO: 1880357
ugauuuaauucuugacgcu

SEQ ID NO: 1961175 - RNA, 19 nt, Artificial Sequence
  Description of Artificial Sequence: Synthetic oligonucleotide
  Antisense strand to SEQ ID NO: 1961174
agcgucaagaauuaaauca

SEQ ID NO: 1961176 - RNA, 19 nt, Artificial Sequence
  Description of Artificial Sequence: Synthetic oligonucleotide
  Sense strand starting at position 899 of SEQ ID NO: 1880357
auucuugacgcuuguggaa

SEQ ID NO: 1961177 - RNA, 19 nt, Artificial Sequence
  Description of Artificial Sequence: Synthetic oligonucleotide
  Antisense strand to SEQ ID NO: 1961176
uuccacaagcgucaagaau

SEQ ID NO: 1961178 - RNA, 19 nt, Artificial Sequence
  Description of Artificial Sequence: Synthetic oligonucleotide
  Sense strand starting at position 915 of SEQ ID NO: 1880357
gaagguagguacuguuagu

SEQ ID NO: 1961179 - RNA, 19 nt, Artificial Sequence
  Description of Artificial Sequence: Synthetic oligonucleotide
  Antisense strand to SEQ ID NO: 1961178
acuaacaguaccuaccuuc

SEQ ID NO: 1961180 - RNA, 19 nt, Artificial Sequence
  Description of Artificial Sequence: Synthetic oligonucleotide
  Sense strand starting at position 960 of SEQ ID NO: 1880357
gcuuaaagcgguuaaggga

SEQ ID NO: 1961181 - RNA, 19 nt, Artificial Sequence
  Description of Artificial Sequence: Synthetic oligonucleotide
  Antisense strand to SEQ ID NO: 1961180
ucccuuaaccgcuuuaagc

SEQ ID NO: 1961182 - RNA, 19 nt, Artificial Sequence
  Description of Artificial Sequence: Synthetic oligonucleotide
  Sense strand starting at position 989 of SEQ ID NO: 1880357
guuacacagucuuaaagcu

SEQ ID NO: 1961183 - RNA, 19 nt, Artificial Sequence
  Description of Artificial Sequence: Synthetic oligonucleotide
  Antisense strand to SEQ ID NO: 1961182
agcuuuaagacuguguaac

SEQ ID NO: 1961184 - RNA, 19 nt, Artificial Sequence
  Description of Artificial Sequence: Synthetic oligonucleotide
  Sense strand starting at position 1712 of SEQ ID NO: 1880357
ccauccguguggucggaaa

SEQ ID NO: 1961185 - RNA, 19 nt, Artificial Sequence
  Description of Artificial Sequence: Synthetic oligonucleotide
  Antisense strand to SEQ ID NO: 1961184
uuuccgaccacacggaugg

SEQ ID NO: 1961186 - RNA, 19 nt, Artificial Sequence
  Description of Artificial Sequence: Synthetic oligonucleotide
  Sense strand starting at position 1734 of SEQ ID NO: 1880357
ccgggaaccugguucuagu

SEQ ID NO: 1961187 - RNA, 19 nt, Artificial Sequence
  Description of Artificial Sequence: Synthetic oligonucleotide
  Antisense strand to SEQ ID NO: 1961186
acuagaaccagguucccgg

SEQ ID NO: 1961188 - RNA, 19 nt, Artificial Sequence
  Description of Artificial Sequence: Synthetic oligonucleotide
  Sense strand starting at position 2172 of SEQ ID NO: 1880357
gggcgcugccugaaaguuu

SEQ ID NO: 1961189 - RNA, 19 nt, Artificial Sequence
  Description of Artificial Sequence: Synthetic oligonucleotide
  Antisense strand to SEQ ID NO: 1961188
aaacuuucaggcagcgccc

SEQ ID NO: 1961190 - RNA, 19 nt, Artificial Sequence
  Description of Artificial Sequence: Synthetic oligonucleotide
  Sense strand starting at position 2705 of SEQ ID NO: 1880357
gagucuggaccuuguuuaa

SEQ ID NO: 1961191 - RNA, 19 nt, Artificial Sequence
  Description of Artificial Sequence: Synthetic oligonucleotide
  Antisense strand to SEQ ID NO: 1961190
uuaaacaagguccagacuc

SEQ ID NO: 1961192 - RNA, 19 nt, Artificial Sequence
  Description of Artificial Sequence: Synthetic oligonucleotide
  Sense strand starting at position 2835 of SEQ ID NO: 1880357
gggugagaacaaugauggu

SEQ ID NO: 1961193 - RNA, 19 nt, Artificial Sequence
  Description of Artificial Sequence: Synthetic oligonucleotide
  Antisense strand to SEQ ID NO: 1961192
accaucauuguucucaccc

SEQ ID NO: 1961194 - RNA, 19 nt, Artificial Sequence
  Description of Artificial Sequence: Synthetic oligonucleotide
  Sense strand starting at position 2866 of SEQ ID NO: 1880357
ggagaaggugaguguucau

SEQ ID NO: 1961195 - RNA, 19 nt, Artificial Sequence
  Description of Artificial Sequence: Synthetic oligonucleotide
  Antisense strand to SEQ ID NO: 1961194
augaacacucaccuucucc

SEQ ID NO: 1961196 - RNA, 19 nt, Artificial Sequence
  Description of Artificial Sequence: Synthetic oligonucleotide
  Sense strand starting at position 2869 of SEQ ID NO: 1880357
gaaggugaguguucauaga

SEQ ID NO: 1961197 - RNA, 19 nt, Artificial Sequence
  Description of Artificial Sequence: Synthetic oligonucleotide
  Antisense strand to SEQ ID NO: 1961196
ucuaugaacacucaccuuc

SEQ ID NO: 1961198 - RNA, 19 nt, Artificial Sequence
  Description of Artificial Sequence: Synthetic oligonucleotide
  Sense strand starting at position 2902 of SEQ ID NO: 1880357
aacugacagcucuggauga

SEQ ID NO: 1961199 - RNA, 19 nt, Artificial Sequence
  Description of Artificial Sequence: Synthetic oligonucleotide
  Antisense strand to SEQ ID NO: 1961198
ucauccagagcugucaguu

SEQ ID NO: 1961200 - RNA, 19 nt, Artificial Sequence
  Description of Artificial Sequence: Synthetic oligonucleotide
  Sense strand starting at position 2987 of SEQ ID NO: 1880357
agggcugaucauggagaca

SEQ ID NO: 1961201 - RNA, 19 nt, Artificial Sequence
  Description of Artificial Sequence: Synthetic oligonucleotide
  Antisense strand to SEQ ID NO: 1961200
ugucuccaugaucagcccu

SEQ ID NO: 1961202 - RNA, 19 nt, Artificial Sequence
  Description of Artificial Sequence: Synthetic oligonucleotide
  Sense strand starting at position 3137 of SEQ ID NO: 1880357
gaaggucaccaccgauaua

SEQ ID NO: 1961203 - RNA, 19 nt, Artificial Sequence
  Description of Artificial Sequence: Synthetic oligonucleotide
  Antisense strand to SEQ ID NO: 1961202
uauaucgguggugaccuuc

SEQ ID NO: 1961204 - RNA, 19 nt, Artificial Sequence
  Description of Artificial Sequence: Synthetic oligonucleotide
  Sense strand starting at position 3559 of SEQ ID NO: 1880357
uaaguuacagccugaaaga

SEQ ID NO: 1961205 - RNA, 19 nt, Artificial Sequence
  Description of Artificial Sequence: Synthetic oligonucleotide
  Antisense strand to SEQ ID NO: 1961204
ucuuucaggcuguaacuua

SEQ ID NO: 1961206 - RNA, 19 nt, Artificial Sequence
  Description of Artificial Sequence: Synthetic oligonucleotide
  Sense strand starting at position 3880 of SEQ ID NO: 1880357
guacgcugcuuaugggauu

SEQ ID NO: 1961207 - RNA, 19 nt, Artificial Sequence
  Description of Artificial Sequence: Synthetic oligonucleotide
  Antisense strand to SEQ ID NO: 1961206
aaucccauaagcagcguac

SEQ ID NO: 1961208 - RNA, 19 nt, Artificial Sequence
  Description of Artificial Sequence: Synthetic oligonucleotide
  Sense strand starting at position 3883 of SEQ ID NO: 1880357
cgcugcuuaugggauuaua

SEQ ID NO: 1961209 - RNA, 19 nt, Artificial Sequence
  Description of Artificial Sequence: Synthetic oligonucleotide
  Antisense strand to SEQ ID NO: 1961208
uauaaucccauaagcagcg

SEQ ID NO: 1961210 - RNA, 19 nt, Artificial Sequence
  Description of Artificial Sequence: Synthetic oligonucleotide
  Sense strand starting at position 473 of SEQ ID NO: 1880358
uacugaaguggagguaaau

SEQ ID NO: 1961211 - RNA, 19 nt, Artificial Sequence
  Description of Artificial Sequence: Synthetic oligonucleotide
  Antisense strand to SEQ ID NO: 1961210
auuuaccuccacuucagua

SEQ ID NO: 1961212 - RNA, 19 nt, Artificial Sequence
  Description of Artificial Sequence: Synthetic oligonucleotide
  Sense strand starting at position 1202 of SEQ ID NO: 1880358
ucuuaauguuacggugagu

SEQ ID NO: 1961213 - RNA, 19 nt, Artificial Sequence
  Description of Artificial Sequence: Synthetic oligonucleotide
  Antisense strand to SEQ ID NO: 1961212
acucaccguaacauuaaga

SEQ ID NO: 1961214 - RNA, 19 nt, Artificial Sequence
  Description of Artificial Sequence: Synthetic oligonucleotide
  Sense strand starting at position 1306 of SEQ ID NO: 1880358
auauucugauucugacaag

SEQ ID NO: 1961215 - RNA, 19 nt, Artificial Sequence
  Description of Artificial Sequence: Synthetic oligonucleotide
  Antisense strand to SEQ ID NO: 1961214
cuugucagaaucagaauau

SEQ ID NO: 1961216 - RNA, 19 nt, Artificial Sequence
  Description of Artificial Sequence: Synthetic oligonucleotide
  Sense strand starting at position 1309 of SEQ ID NO: 1880358
uucugauucugacaaggac

SEQ ID NO: 1961217 - RNA, 19 nt, Artificial Sequence
  Description of Artificial Sequence: Synthetic oligonucleotide
  Antisense strand to SEQ ID NO: 1961216
guccuugucagaaucagaa

SEQ ID NO: 1961218 - RNA, 19 nt, Artificial Sequence
  Description of Artificial Sequence: Synthetic oligonucleotide
  Sense strand starting at position 2698 of SEQ ID NO: 1880358
acuggagauuaauaucuaa

SEQ ID NO: 1961219 - RNA, 19 nt, Artificial Sequence
  Description of Artificial Sequence: Synthetic oligonucleotide
  Antisense strand to SEQ ID NO: 1961218
uuagauauuaaucuccagu

SEQ ID NO: 1961220 - RNA, 19 nt, Artificial Sequence
  Description of Artificial Sequence: Synthetic oligonucleotide
  Sense strand starting at position 2803 of SEQ ID NO: 1880358
acaggagcuuaguaucuaa

SEQ ID NO: 1961221 - RNA, 19 nt, Artificial Sequence
  Description of Artificial Sequence: Synthetic oligonucleotide
  Antisense strand to SEQ ID NO: 1961220
uuagauacuaagcuccugu

SEQ ID NO: 1961222 - RNA, 19 nt, Artificial Sequence
  Description of Artificial Sequence: Synthetic oligonucleotide
  Sense strand starting at position 2988 of SEQ ID NO: 1880358
gacaaugagguaugaucuu

SEQ ID NO: 1961223 - RNA, 19 nt, Artificial Sequence
  Description of Artificial Sequence: Synthetic oligonucleotide
  Antisense strand to SEQ ID NO: 1961222
aagaucauaccucauuguc

SEQ ID NO: 1961224 - RNA, 19 nt, Artificial Sequence
  Description of Artificial Sequence: Synthetic oligonucleotide
  Sense strand starting at position 2994 of SEQ ID NO: 1880358
gagguaugaucuuacucca

SEQ ID NO: 1961225 - RNA, 19 nt, Artificial Sequence
  Description of Artificial Sequence: Synthetic oligonucleotide
  Antisense strand to SEQ ID NO: 1961224
uggaguaagaucauaccuc

SEQ ID NO: 1961226 - RNA, 19 nt, Artificial Sequence
  Description of Artificial Sequence: Synthetic oligonucleotide
  Sense strand starting at position 3078 of SEQ ID NO: 1880358
acucuuauccacuguugau

SEQ ID NO: 1961227 - RNA, 19 nt, Artificial Sequence
  Description of Artificial Sequence: Synthetic oligonucleotide
  Antisense strand to SEQ ID NO: 1961226
aucaacaguggauaagagu

SEQ ID NO: 1961228 - RNA, 19 nt, Artificial Sequence
  Description of Artificial Sequence: Synthetic oligonucleotide
  Sense strand starting at position 3383 of SEQ ID NO: 1880358
gauugaacuguaggacauu

SEQ ID NO: 1961229 - RNA, 19 nt, Artificial Sequence
  Description of Artificial Sequence: Synthetic oligonucleotide
  Antisense strand to SEQ ID NO: 1961228
aauguccuacaguucaauc

SEQ ID NO: 1961230 - RNA, 19 nt, Artificial Sequence
  Description of Artificial Sequence: Synthetic oligonucleotide
  Sense strand starting at position 3441 of SEQ ID NO: 1880358
ugcacauucucacucgaau

SEQ ID NO: 1961231 - RNA, 19 nt, Artificial Sequence
  Description of Artificial Sequence: Synthetic oligonucleotide
  Antisense strand to SEQ ID NO: 1961230
auucgagugagaaugugca

SEQ ID NO: 1961232 - RNA, 19 nt, Artificial Sequence
  Description of Artificial Sequence: Synthetic oligonucleotide
  Sense strand starting at position 3447 of SEQ ID NO: 1880358
uucucacucgaauguggaa

SEQ ID NO: 1961233 - RNA, 19 nt, Artificial Sequence
  Description of Artificial Sequence: Synthetic oligonucleotide
  Antisense strand to SEQ ID NO: 1961232
uuccacauucgagugagaa

SEQ ID NO: 1961234 - RNA, 19 nt, Artificial Sequence
  Description of Artificial Sequence: Synthetic oligonucleotide
  Sense strand starting at position 3628 of SEQ ID NO: 1880358
gcaauaacauguuauauag

SEQ ID NO: 1961235 - RNA, 19 nt, Artificial Sequence
  Description of Artificial Sequence: Synthetic oligonucleotide
  Antisense strand to SEQ ID NO: 1961234
cuauauaacauguuauugc

SEQ ID NO: 1961236 - RNA, 19 nt, Artificial Sequence
  Description of Artificial Sequence: Synthetic oligonucleotide
  Sense strand starting at position 3695 of SEQ ID NO: 1880358
ugaucaagguuugagauga

SEQ ID NO: 1961237 - RNA, 19 nt, Artificial Sequence
  Description of Artificial Sequence: Synthetic oligonucleotide
  Antisense strand to SEQ ID NO: 1961236
ucaucucaaaccuugauca

SEQ ID NO: 1961238 - RNA, 19 nt, Artificial Sequence
  Description of Artificial Sequence: Synthetic oligonucleotide
  Sense strand starting at position 52 of SEQ ID NO: 1880359
gccuaagagcuguaauaug

SEQ ID NO: 1961239 - RNA, 19 nt, Artificial Sequence
  Description of Artificial Sequence: Synthetic oligonucleotide
  Antisense strand to SEQ ID NO: 1961238
cauauuacagcucuuaggc

SEQ ID NO: 1961240 - RNA, 19 nt, Artificial Sequence
  Description of Artificial Sequence: Synthetic oligonucleotide
  Sense strand starting at position 61 of SEQ ID NO: 1880359
cuguaauaugugugcccau

SEQ ID NO: 1961241 - RNA, 19 nt, Artificial Sequence
  Description of Artificial Sequence: Synthetic oligonucleotide
  Antisense strand to SEQ ID NO: 1961240
augggcacacauauuacag

SEQ ID NO: 1961242 - RNA, 19 nt, Artificial Sequence
  Description of Artificial Sequence: Synthetic oligonucleotide
  Sense strand starting at position 260 of SEQ ID NO: 1880359
auaggaguccuaggauucu

SEQ ID NO: 1961243 - RNA, 19 nt, Artificial Sequence
  Description of Artificial Sequence: Synthetic oligonucleotide
  Antisense strand to SEQ ID NO: 1961242
agaauccuaggacuccuau

SEQ ID NO: 1961244 - RNA, 19 nt, Artificial Sequence
  Description of Artificial Sequence: Synthetic oligonucleotide
  Sense strand starting at position 2636 of SEQ ID NO: 1880359
ugcagauugaccuguggua

SEQ ID NO: 1961245 - RNA, 19 nt, Artificial Sequence
  Description of Artificial Sequence: Synthetic oligonucleotide
  Antisense strand to SEQ ID NO: 1961244
uaccacaggucaaucugca

SEQ ID NO: 1961246 - RNA, 19 nt, Artificial Sequence
  Description of Artificial Sequence: Synthetic oligonucleotide
  Sense strand starting at position 2643 of SEQ ID NO: 1880359
ugaccugugguacguuaau

SEQ ID NO: 1961247 - RNA, 19 nt, Artificial Sequence
  Description of Artificial Sequence: Synthetic oligonucleotide
  Antisense strand to SEQ ID NO: 1961246
auuaacguaccacagguca

SEQ ID NO: 1961248 - RNA, 19 nt, Artificial Sequence
  Description of Artificial Sequence: Synthetic oligonucleotide
  Sense strand starting at position 2649 of SEQ ID NO: 1880359
gugguacguuaauguuuau

SEQ ID NO: 1961249 - RNA, 19 nt, Artificial Sequence
  Description of Artificial Sequence: Synthetic oligonucleotide
  Antisense strand to SEQ ID NO: 1961248
auaaacauuaacguaccac

SEQ ID NO: 1961250 - RNA, 19 nt, Artificial Sequence
  Description of Artificial Sequence: Synthetic oligonucleotide
  Sense strand starting at position 2652 of SEQ ID NO: 1880359
guacguuaauguuuaugca

SEQ ID NO: 1961251 - RNA, 19 nt, Artificial Sequence
  Description of Artificial Sequence: Synthetic oligonucleotide
  Antisense strand to SEQ ID NO: 1961250
ugcauaaacauuaacguac

SEQ ID NO: 1961252 - RNA, 19 nt, Artificial Sequence
  Description of Artificial Sequence: Synthetic oligonucleotide
  Sense strand starting at position 2653 of SEQ ID NO: 1880359
uacguuaauguuuaugcau

SEQ ID NO: 1961253 - RNA, 19 nt, Artificial Sequence
  Description of Artificial Sequence: Synthetic oligonucleotide
  Antisense strand to SEQ ID NO: 1961252
augcauaaacauuaacgua

SEQ ID NO: 1961254 - RNA, 19 nt, Artificial Sequence
  Description of Artificial Sequence: Synthetic oligonucleotide
  Sense strand starting at position 2655 of SEQ ID NO: 1880359
cguuaauguuuaugcauag

SEQ ID NO: 1961255 - RNA, 19 nt, Artificial Sequence
  Description of Artificial Sequence: Synthetic oligonucleotide
  Antisense strand to SEQ ID NO: 1961254
cuaugcauaaacauuaacg

SEQ ID NO: 1961256 - RNA, 19 nt, Artificial Sequence
  Description of Artificial Sequence: Synthetic oligonucleotide
  Sense strand starting at position 2869 of SEQ ID NO: 1880359
ggugaauucgggcaacaau

SEQ ID NO: 1961257 - RNA, 19 nt, Artificial Sequence
  Description of Artificial Sequence: Synthetic oligonucleotide
  Antisense strand to SEQ ID NO: 1961256
auuguugcccgaauucacc

SEQ ID NO: 1961258 - RNA, 19 nt, Artificial Sequence
  Description of Artificial Sequence: Synthetic oligonucleotide
  Sense strand starting at position 3002 of SEQ ID NO: 1880359
cauuuagguacgugugaga

SEQ ID NO: 1961259 - RNA, 19 nt, Artificial Sequence
  Description of Artificial Sequence: Synthetic oligonucleotide
  Antisense strand to SEQ ID NO: 1961258
ucucacacguaccuaaaug

SEQ ID NO: 1961260 - RNA, 19 nt, Artificial Sequence
  Description of Artificial Sequence: Synthetic oligonucleotide
  Sense strand starting at position 3005 of SEQ ID NO: 1880359
uuagguacgugugagacaa

SEQ ID NO: 1961261 - RNA, 19 nt, Artificial Sequence
  Description of Artificial Sequence: Synthetic oligonucleotide
  Antisense strand to SEQ ID NO: 1961260
uugucucacacguaccuaa

SEQ ID NO: 1961262 - RNA, 19 nt, Artificial Sequence
  Description of Artificial Sequence: Synthetic oligonucleotide
  Sense strand starting at position 3249 of SEQ ID NO: 1880359
ggguuaaguaaauguauua

SEQ ID NO: 1961263 - RNA, 19 nt, Artificial Sequence
  Description of Artificial Sequence: Synthetic oligonucleotide
  Antisense strand to SEQ ID NO: 1961262
uaauacauuuacuuaaccc

SEQ ID NO: 1961264 - RNA, 19 nt, Artificial Sequence
  Description of Artificial Sequence: Synthetic oligonucleotide
  Sense strand starting at position 3752 of SEQ ID NO: 1880359
acagaagacucuucgguga

SEQ ID NO: 1961265 - RNA, 19 nt, Artificial Sequence
  Description of Artificial Sequence: Synthetic oligonucleotide
  Antisense strand to SEQ ID NO: 1961264
ucaccgaagagucuucugu

SEQ ID NO: 1961266 - RNA, 19 nt, Artificial Sequence
  Description of Artificial Sequence: Synthetic oligonucleotide
  Sense strand starting at position 3754 of SEQ ID NO: 1880359
agaagacucuucggugaua

SEQ ID NO: 1961267 - RNA, 19 nt, Artificial Sequence
  Description of Artificial Sequence: Synthetic oligonucleotide
  Antisense strand to SEQ ID NO: 1961266
uaucaccgaagagucuucu

SEQ ID NO: 1961268 - RNA, 19 nt, Artificial Sequence
  Description of Artificial Sequence: Synthetic oligonucleotide
  Sense strand starting at position 3756 of SEQ ID NO: 1880359
aagacucuucggugauauu

SEQ ID NO: 1961269 - RNA, 19 nt, Artificial Sequence
  Description of Artificial Sequence: Synthetic oligonucleotide
  Antisense strand to SEQ ID NO: 1961268
aauaucaccgaagagucuu

SEQ ID NO: 1961270 - RNA, 19 nt, Artificial Sequence
  Description of Artificial Sequence: Synthetic oligonucleotide
  Sense strand starting at position 3956 of SEQ ID NO: 1880359
guguuaguccagugacaca

SEQ ID NO: 1961271 - RNA, 19 nt, Artificial Sequence
  Description of Artificial Sequence: Synthetic oligonucleotide
  Antisense strand to SEQ ID NO: 1961270
ugugucacuggacuaacac

SEQ ID NO: 1961272 - RNA, 19 nt, Artificial Sequence
  Description of Artificial Sequence: Synthetic oligonucleotide
  Sense strand starting at position 157 of SEQ ID NO: 1880360
gcaacuuagaagugacuga

SEQ ID NO: 1961273 - RNA, 19 nt, Artificial Sequence
  Description of Artificial Sequence: Synthetic oligonucleotide
  Antisense strand to SEQ ID NO: 1961272
ucagucacuucuaaguugc

SEQ ID NO: 1961274 - RNA, 19 nt, Artificial Sequence
  Description of Artificial Sequence: Synthetic oligonucleotide
  Sense strand starting at position 168 of SEQ ID NO: 1880360
gugacugacuccuuuacca

SEQ ID NO: 1961275 - RNA, 19 nt, Artificial Sequence
  Description of Artificial Sequence: Synthetic oligonucleotide
  Antisense strand to SEQ ID NO: 1961274
ugguaaaggagucagucac

SEQ ID NO: 1961276 - RNA, 19 nt, Artificial Sequence
  Description of Artificial Sequence: Synthetic oligonucleotide
  Sense strand starting at position 201 of SEQ ID NO: 1880360
ugaguuuaaucuuugggaa

SEQ ID NO: 1961277 - RNA, 19 nt, Artificial Sequence
  Description of Artificial Sequence: Synthetic oligonucleotide
  Antisense strand to SEQ ID NO: 1961276
uucccaaagauuaaacuca

SEQ ID NO: 1961278 - RNA, 19 nt, Artificial Sequence
  Description of Artificial Sequence: Synthetic oligonucleotide
  Sense strand starting at position 202 of SEQ ID NO: 1880360
gaguuuaaucuuugggaag

SEQ ID NO: 1961279 - RNA, 19 nt, Artificial Sequence
  Description of Artificial Sequence: Synthetic oligonucleotide
  Antisense strand to SEQ ID NO: 1961278
cuucccaaagauuaaacuc

SEQ ID NO: 1961280 - RNA, 19 nt, Artificial Sequence
  Description of Artificial Sequence: Synthetic oligonucleotide
  Sense strand starting at position 257 of SEQ ID NO: 1880360
auagauugcucuuuagagg

SEQ ID NO: 1961281 - RNA, 19 nt, Artificial Sequence
  Description of Artificial Sequence: Synthetic oligonucleotide
  Antisense strand to SEQ ID NO: 1961280
ccucuaaagagcaaucuau

SEQ ID NO: 1961282 - RNA, 19 nt, Artificial Sequence
  Description of Artificial Sequence: Synthetic oligonucleotide
  Sense strand starting at position 262 of SEQ ID NO: 1880360
uugcucuuuagaggagaca

SEQ ID NO: 1961283 - RNA, 19 nt, Artificial Sequence
  Description of Artificial Sequence: Synthetic oligonucleotide
  Antisense strand to SEQ ID NO: 1961282
ugucuccucuaaagagcaa

SEQ ID NO: 1961284 - RNA, 19 nt, Artificial Sequence
  Description of Artificial Sequence: Synthetic oligonucleotide
  Sense strand starting at position 298 of SEQ ID NO: 1880360
uucucauagagcugagaug

SEQ ID NO: 1961285 - RNA, 19 nt, Artificial Sequence
  Description of Artificial Sequence: Synthetic oligonucleotide
  Antisense strand to SEQ ID NO: 1961284
caucucagcucuaugagaa

SEQ ID NO: 1961286 - RNA, 19 nt, Artificial Sequence
  Description of Artificial Sequence: Synthetic oligonucleotide
  Sense strand starting at position 555 of SEQ ID NO: 1880360
ugccuuacucuggauaacu

SEQ ID NO: 1961287 - RNA, 19 nt, Artificial Sequence
  Description of Artificial Sequence: Synthetic oligonucleotide
  Antisense strand to SEQ ID NO: 1961286
aguuauccagaguaaggca

SEQ ID NO: 1961288 - RNA, 19 nt, Artificial Sequence
  Description of Artificial Sequence: Synthetic oligonucleotide
  Sense strand starting at position 578 of SEQ ID NO: 1880360
guuguuugucuguugguga

SEQ ID NO: 1961289 - RNA, 19 nt, Artificial Sequence
  Description of Artificial Sequence: Synthetic oligonucleotide
  Antisense strand to SEQ ID NO: 1961288
ucaccaacagacaaacaac

SEQ ID NO: 1961290 - RNA, 19 nt, Artificial Sequence
  Description of Artificial Sequence: Synthetic oligonucleotide
  Sense strand starting at position 583 of SEQ ID NO: 1880360
uugucuguuggugaaagau

SEQ ID NO: 1961291 - RNA, 19 nt, Artificial Sequence
  Description of Artificial Sequence: Synthetic oligonucleotide
  Antisense strand to SEQ ID NO: 1961290
aucuuucaccaacagacaa

SEQ ID NO: 1961292 - RNA, 19 nt, Artificial Sequence
  Description of Artificial Sequence: Synthetic oligonucleotide
  Sense strand starting at position 591 of SEQ ID NO: 1880360
uggugaaagauuggucaca

SEQ ID NO: 1961293 - RNA, 19 nt, Artificial Sequence
  Description of Artificial Sequence: Synthetic oligonucleotide
  Antisense strand to SEQ ID NO: 1961292
ugugaccaaucuuucacca

SEQ ID NO: 1961294 - RNA, 19 nt, Artificial Sequence
  Description of Artificial Sequence: Synthetic oligonucleotide
  Sense strand starting at position 592 of SEQ ID NO: 1880360
ggugaaagauuggucacaa

SEQ ID NO: 1961295 - RNA, 19 nt, Artificial Sequence
  Description of Artificial Sequence: Synthetic oligonucleotide
  Antisense strand to SEQ ID NO: 1961294
uugugaccaaucuuucacc

SEQ ID NO: 1961296 - RNA, 19 nt, Artificial Sequence
  Description of Artificial Sequence: Synthetic oligonucleotide
  Sense strand starting at position 593 of SEQ ID NO: 1880360
gugaaagauuggucacaaa

SEQ ID NO: 1961297 - RNA, 19 nt, Artificial Sequence
  Description of Artificial Sequence: Synthetic oligonucleotide
  Antisense strand to SEQ ID NO: 1961296
uuugugaccaaucuuucac

SEQ ID NO: 1961298 - RNA, 19 nt, Artificial Sequence
  Description of Artificial Sequence: Synthetic oligonucleotide
  Sense strand starting at position 689 of SEQ ID NO: 1880360
ucaguuaguccucaaucau

SEQ ID NO: 1961299 - RNA, 19 nt, Artificial Sequence
  Description of Artificial Sequence: Synthetic oligonucleotide
  Antisense strand to SEQ ID NO: 1961298
augauugaggacuaacuga

SEQ ID NO: 1961300 - RNA, 19 nt, Artificial Sequence
  Description of Artificial Sequence: Synthetic oligonucleotide
  Sense strand starting at position 708 of SEQ ID NO: 1880360
aaguuuggugucugagaag

SEQ ID NO: 1961301 - RNA, 19 nt, Artificial Sequence
  Description of Artificial Sequence: Synthetic oligonucleotide
  Antisense strand to SEQ ID NO: 1961300
cuucucagacaccaaacuu

SEQ ID NO: 1961302 - RNA, 19 nt, Artificial Sequence
  Description of Artificial Sequence: Synthetic oligonucleotide
  Sense strand starting at position 1085 of SEQ ID NO: 1880360
gugaauugagcagauggca

SEQ ID NO: 1961303 - RNA, 19 nt, Artificial Sequence
  Description of Artificial Sequence: Synthetic oligonucleotide
  Antisense strand to SEQ ID NO: 1961302
ugccaucugcucaauucac

SEQ ID NO: 1961304 - RNA, 19 nt, Artificial Sequence
  Description of Artificial Sequence: Synthetic oligonucleotide
  Sense strand starting at position 1123 of SEQ ID NO: 1880360
uggacugguguccacaaca

SEQ ID NO: 1961305 - RNA, 19 nt, Artificial Sequence
  Description of Artificial Sequence: Synthetic oligonucleotide
  Antisense strand to SEQ ID NO: 1961304
uguuguggacaccagucca

SEQ ID NO: 1961306 - RNA, 19 nt, Artificial Sequence
  Description of Artificial Sequence: Synthetic oligonucleotide
  Sense strand starting at position 1218 of SEQ ID NO: 1880360
cucagugauuugcuuaucu

SEQ ID NO: 1961307 - RNA, 19 nt, Artificial Sequence
  Description of Artificial Sequence: Synthetic oligonucleotide
  Antisense strand to SEQ ID NO: 1961306
agauaagcaaaucacugag

SEQ ID NO: 1961308 - RNA, 19 nt, Artificial Sequence
  Description of Artificial Sequence: Synthetic oligonucleotide
  Sense strand starting at position 1222 of SEQ ID NO: 1880360
gugauuugcuuaucuguau

SEQ ID NO: 1961309 - RNA, 19 nt, Artificial Sequence
  Description of Artificial Sequence: Synthetic oligonucleotide
  Antisense strand to SEQ ID NO: 1961308
auacagauaagcaaaucac

SEQ ID NO: 1961310 - RNA, 19 nt, Artificial Sequence
  Description of Artificial Sequence: Synthetic oligonucleotide
  Sense strand starting at position 1236 of SEQ ID NO: 1880360
uguauccgugucugauuua

SEQ ID NO: 1961311 - RNA, 19 nt, Artificial Sequence
  Description of Artificial Sequence: Synthetic oligonucleotide
  Antisense strand to SEQ ID NO: 1961310
uaaaucagacacggauaca

SEQ ID NO: 1961312 - RNA, 19 nt, Artificial Sequence
  Description of Artificial Sequence: Synthetic oligonucleotide
  Sense strand starting at position 1257 of SEQ ID NO: 1880360
cagugaacacgugaugguu

SEQ ID NO: 1961313 - RNA, 19 nt, Artificial Sequence
  Description of Artificial Sequence: Synthetic oligonucleotide
  Antisense strand to SEQ ID NO: 1961312
aaccaucacguguucacug

SEQ ID NO: 1961314 - RNA, 19 nt, Artificial Sequence
  Description of Artificial Sequence: Synthetic oligonucleotide
  Sense strand starting at position 1303 of SEQ ID NO: 1880360
uugagauccgcuuauaacc

SEQ ID NO: 1961315 - RNA, 19 nt, Artificial Sequence
  Description of Artificial Sequence: Synthetic oligonucleotide
  Antisense strand to SEQ ID NO: 1961314
gguuauaagcggaucucaa

SEQ ID NO: 1961316 - RNA, 19 nt, Artificial Sequence
  Description of Artificial Sequence: Synthetic oligonucleotide
  Sense strand starting at position 1400 of SEQ ID NO: 1880360
auauauccauucccgagau

SEQ ID NO: 1961317 - RNA, 19 nt, Artificial Sequence
  Description of Artificial Sequence: Synthetic oligonucleotide
  Antisense strand to SEQ ID NO: 1961316
aucucgggaauggauauau

SEQ ID NO: 1961318 - RNA, 19 nt, Artificial Sequence
  Description of Artificial Sequence: Synthetic oligonucleotide
  Sense strand starting at position 1472 of SEQ ID NO: 1880360
acauaaauguugucuagga

SEQ ID NO: 1961319 - RNA, 19 nt, Artificial Sequence
  Description of Artificial Sequence: Synthetic oligonucleotide
  Antisense strand to SEQ ID NO: 1961318
uccuagacaacauuuaugu

SEQ ID NO: 1961320 - RNA, 19 nt, Artificial Sequence
  Description of Artificial Sequence: Synthetic oligonucleotide
  Sense strand starting at position 1473 of SEQ ID NO: 1880360
cauaaauguugucuaggaa

SEQ ID NO: 1961321 - RNA, 19 nt, Artificial Sequence
  Description of Artificial Sequence: Synthetic oligonucleotide
  Antisense strand to SEQ ID NO: 1961320
uuccuagacaacauuuaug

SEQ ID NO: 1961322 - RNA, 19 nt, Artificial Sequence
  Description of Artificial Sequence: Synthetic oligonucleotide
  Sense strand starting at position 2415 of SEQ ID NO: 1880360
gguacauucuacucugauu

SEQ ID NO: 1961323 - RNA, 19 nt, Artificial Sequence
  Description of Artificial Sequence: Synthetic oligonucleotide
  Antisense strand to SEQ ID NO: 1961322
aaucagaguagaauguacc

SEQ ID NO: 1961324 - RNA, 19 nt, Artificial Sequence
  Description of Artificial Sequence: Synthetic oligonucleotide
  Sense strand starting at position 2545 of SEQ ID NO: 1880360
cccacuaaugagugauagu

SEQ ID NO: 1961325 - RNA, 19 nt, Artificial Sequence
  Description of Artificial Sequence: Synthetic oligonucleotide
  Antisense strand to SEQ ID NO: 1961324
acuaucacucauuaguggg

SEQ ID NO: 1961326 - RNA, 19 nt, Artificial Sequence
  Description of Artificial Sequence: Synthetic oligonucleotide
  Sense strand starting at position 2691 of SEQ ID NO: 1880360
ucgggauuuggacgcauca

SEQ ID NO: 1961327 - RNA, 19 nt, Artificial Sequence
  Description of Artificial Sequence: Synthetic oligonucleotide
  Antisense strand to SEQ ID NO: 1961326
ugaugcguccaaaucccga

SEQ ID NO: 1961328 - RNA, 19 nt, Artificial Sequence
  Description of Artificial Sequence: Synthetic oligonucleotide
  Sense strand starting at position 3464 of SEQ ID NO: 1880360
gcuguacuccuguauuugu

SEQ ID NO: 1961329 - RNA, 19 nt, Artificial Sequence
  Description of Artificial Sequence: Synthetic oligonucleotide
  Antisense strand to SEQ ID NO: 1961328
acaaauacaggaguacagc

SEQ ID NO: 1961330 - RNA, 19 nt, Artificial Sequence
  Description of Artificial Sequence: Synthetic oligonucleotide
  Sense strand starting at position 3473 of SEQ ID NO: 1880360
cuguauuuguggccaacuu

SEQ ID NO: 1961331 - RNA, 19 nt, Artificial Sequence
  Description of Artificial Sequence: Synthetic oligonucleotide
  Antisense strand to SEQ ID NO: 1961330
aaguuggccacaaauacag

SEQ ID NO: 1961332 - RNA, 19 nt, Artificial Sequence
  Description of Artificial Sequence: Synthetic oligonucleotide
  Sense strand starting at position 3495 of SEQ ID NO: 1880360
guugcaauuguuuaacaac

SEQ ID NO: 1961333 - RNA, 19 nt, Artificial Sequence
  Description of Artificial Sequence: Synthetic oligonucleotide
  Antisense strand to SEQ ID NO: 1961332
guuguuaaacaauugcaac

SEQ ID NO: 1961334 - RNA, 19 nt, Artificial Sequence
  Description of Artificial Sequence: Synthetic oligonucleotide
  Sense strand starting at position 3523 of SEQ ID NO: 1880360
acaugaauguugguuaaua

SEQ ID NO: 1961335 - RNA, 19 nt, Artificial Sequence
  Description of Artificial Sequence: Synthetic oligonucleotide
  Antisense strand to SEQ ID NO: 1961334
uauuaaccaacauucaugu

SEQ ID NO: 1961336 - RNA, 19 nt, Artificial Sequence
  Description of Artificial Sequence: Synthetic oligonucleotide
  Sense strand starting at position 3553 of SEQ ID NO: 1880360
auuugugauuaagaugaga

SEQ ID NO: 1961337 - RNA, 19 nt, Artificial Sequence
  Description of Artificial Sequence: Synthetic oligonucleotide
  Antisense strand to SEQ ID NO: 1961336
ucucaucuuaaucacaaau

SEQ ID NO: 1961338 - RNA, 19 nt, Artificial Sequence
  Description of Artificial Sequence: Synthetic oligonucleotide
  Sense strand starting at position 3555 of SEQ ID NO: 1880360
uugugauuaagaugagagu

SEQ ID NO: 1961339 - RNA, 19 nt, Artificial Sequence
  Description of Artificial Sequence: Synthetic oligonucleotide
  Antisense strand to SEQ ID NO: 1961338
acucucaucuuaaucacaa

SEQ ID NO: 1961340 - RNA, 19 nt, Artificial Sequence
  Description of Artificial Sequence: Synthetic oligonucleotide
  Sense strand starting at position 3579 of SEQ ID NO: 1880360
auccaagaucuaugucaga

SEQ ID NO: 1961341 - RNA, 19 nt, Artificial Sequence
  Description of Artificial Sequence: Synthetic oligonucleotide
  Antisense strand to SEQ ID NO: 1961340
ucugacauagaucuuggau

SEQ ID NO: 1961342 - RNA, 19 nt, Artificial Sequence
  Description of Artificial Sequence: Synthetic oligonucleotide
  Sense strand starting at position 3584 of SEQ ID NO: 1880360
agaucuaugucagaauuuc

SEQ ID NO: 1961343 - RNA, 19 nt, Artificial Sequence
  Description of Artificial Sequence: Synthetic oligonucleotide
  Antisense strand to SEQ ID NO: 1961342
gaaauucugacauagaucu

SEQ ID NO: 1961344 - RNA, 19 nt, Artificial Sequence
  Description of Artificial Sequence: Synthetic oligonucleotide
  Sense strand starting at position 3765 of SEQ ID NO: 1880360
aguuuaaauguccaauguu

SEQ ID NO: 1961345 - RNA, 19 nt, Artificial Sequence
  Description of Artificial Sequence: Synthetic oligonucleotide
  Antisense strand to SEQ ID NO: 1961344
aacauuggacauuuaaacu

SEQ ID NO: 1961346 - RNA, 19 nt, Artificial Sequence
  Description of Artificial Sequence: Synthetic oligonucleotide
  Sense strand starting at position 3768 of SEQ ID NO: 1880360
uuaaauguccaauguuuag

SEQ ID NO: 1961347 - RNA, 19 nt, Artificial Sequence
  Description of Artificial Sequence: Synthetic oligonucleotide
  Antisense strand to SEQ ID NO: 1961346
cuaaacauuggacauuuaa

SEQ ID NO: 1961348 - RNA, 19 nt, Artificial Sequence
  Description of Artificial Sequence: Synthetic oligonucleotide
  Sense strand starting at position 3791 of SEQ ID NO: 1880360
ugcugauuuccaugauguc

SEQ ID NO: 1961349 - RNA, 19 nt, Artificial Sequence
  Description of Artificial Sequence: Synthetic oligonucleotide
  Antisense strand to SEQ ID NO: 1961348
gacaucauggaaaucagca

SEQ ID NO: 1961350 - RNA, 19 nt, Artificial Sequence
  Description of Artificial Sequence: Synthetic oligonucleotide
  Sense strand starting at position 3880 of SEQ ID NO: 1880360
cuaguagcacaccauuaua

SEQ ID NO: 1961351 - RNA, 19 nt, Artificial Sequence
  Description of Artificial Sequence: Synthetic oligonucleotide
  Antisense strand to SEQ ID NO: 1961350
uauaauggugugcuacuag

SEQ ID NO: 1961352 - RNA, 19 nt, Artificial Sequence
  Description of Artificial Sequence: Synthetic oligonucleotide
  Sense strand starting at position 45 of SEQ ID NO: 1880361
uugggaauguuuccaccau

SEQ ID NO: 1961353 - RNA, 19 nt, Artificial Sequence
  Description of Artificial Sequence: Synthetic oligonucleotide
  Antisense strand to SEQ ID NO: 1961352
augguggaaacauucccaa

SEQ ID NO: 1961354 - RNA, 19 nt, Artificial Sequence
  Description of Artificial Sequence: Synthetic oligonucleotide
  Sense strand starting at position 111 of SEQ ID NO: 1880361
ucacuaagccuauaugagu

SEQ ID NO: 1961355 - RNA, 19 nt, Artificial Sequence
  Description of Artificial Sequence: Synthetic oligonucleotide
  Antisense strand to SEQ ID NO: 1961354
acucauauaggcuuaguga

SEQ ID NO: 1961356 - RNA, 19 nt, Artificial Sequence
  Description of Artificial Sequence: Synthetic oligonucleotide
  Sense strand starting at position 554 of SEQ ID NO: 1880361
ucaagugauucggccaaag

SEQ ID NO: 1961357 - RNA, 19 nt, Artificial Sequence
  Description of Artificial Sequence: Synthetic oligonucleotide
  Antisense strand to SEQ ID NO: 1961356
cuuuggccgaaucacuuga

SEQ ID NO: 1961358 - RNA, 19 nt, Artificial Sequence
  Description of Artificial Sequence: Synthetic oligonucleotide
  Sense strand starting at position 556 of SEQ ID NO: 1880361
aagugauucggccaaagua

SEQ ID NO: 1961359 - RNA, 19 nt, Artificial Sequence
  Description of Artificial Sequence: Synthetic oligonucleotide
  Antisense strand to SEQ ID NO: 1961358
uacuuuggccgaaucacuu

SEQ ID NO: 1961360 - RNA, 19 nt, Artificial Sequence
  Description of Artificial Sequence: Synthetic oligonucleotide
  Sense strand starting at position 644 of SEQ ID NO: 1880361
auaguaaauuucuagggaa

SEQ ID NO: 1961361 - RNA, 19 nt, Artificial Sequence
  Description of Artificial Sequence: Synthetic oligonucleotide
  Antisense strand to SEQ ID NO: 1961360
uucccuagaaauuuacuau

SEQ ID NO: 1961362 - RNA, 19 nt, Artificial Sequence
  Description of Artificial Sequence: Synthetic oligonucleotide
  Sense strand starting at position 711 of SEQ ID NO: 1880361
aaggguuacuuccuuaagu

SEQ ID NO: 1961363 - RNA, 19 nt, Artificial Sequence
  Description of Artificial Sequence: Synthetic oligonucleotide
  Antisense strand to SEQ ID NO: 1961362
acuuaaggaaguaacccuu

SEQ ID NO: 1961364 - RNA, 19 nt, Artificial Sequence
  Description of Artificial Sequence: Synthetic oligonucleotide
  Sense strand starting at position 712 of SEQ ID NO: 1880361
aggguuacuuccuuaagug

SEQ ID NO: 1961365 - RNA, 19 nt, Artificial Sequence
  Description of Artificial Sequence: Synthetic oligonucleotide
  Antisense strand to SEQ ID NO: 1961364
cacuuaaggaaguaacccu

SEQ ID NO: 1961366 - RNA, 19 nt, Artificial Sequence
  Description of Artificial Sequence: Synthetic oligonucleotide
  Sense strand starting at position 713 of SEQ ID NO: 1880361
ggguuacuuccuuaagugu

SEQ ID NO: 1961367 - RNA, 19 nt, Artificial Sequence
  Description of Artificial Sequence: Synthetic oligonucleotide
  Antisense strand to SEQ ID NO: 1961366
acacuuaaggaaguaaccc

SEQ ID NO: 1961368 - RNA, 19 nt, Artificial Sequence
  Description of Artificial Sequence: Synthetic oligonucleotide
  Sense strand starting at position 1193 of SEQ ID NO: 1880361
cgguucuggacagaaucua

SEQ ID NO: 1961369 - RNA, 19 nt, Artificial Sequence
  Description of Artificial Sequence: Synthetic oligonucleotide
  Antisense strand to SEQ ID NO: 1961368
uagauucuguccagaaccg

SEQ ID NO: 1961370 - RNA, 19 nt, Artificial Sequence
  Description of Artificial Sequence: Synthetic oligonucleotide
  Sense strand starting at position 1201 of SEQ ID NO: 1880361
gacagaaucuacccaguga

SEQ ID NO: 1961371 - RNA, 19 nt, Artificial Sequence
  Description of Artificial Sequence: Synthetic oligonucleotide
  Antisense strand to SEQ ID NO: 1961370
ucacuggguagauucuguc

SEQ ID NO: 1961372 - RNA, 19 nt, Artificial Sequence
  Description of Artificial Sequence: Synthetic oligonucleotide
  Sense strand starting at position 1205 of SEQ ID NO: 1880361
gaaucuacccagugaccga

SEQ ID NO: 1961373 - RNA, 19 nt, Artificial Sequence
  Description of Artificial Sequence: Synthetic oligonucleotide
  Antisense strand to SEQ ID NO: 1961372
ucggucacuggguagauuc

SEQ ID NO: 1961374 - RNA, 19 nt, Artificial Sequence
  Description of Artificial Sequence: Synthetic oligonucleotide
  Sense strand starting at position 1402 of SEQ ID NO: 1880361
ccguuuaaagcugauauga

SEQ ID NO: 1961375 - RNA, 19 nt, Artificial Sequence
  Description of Artificial Sequence: Synthetic oligonucleotide
  Antisense strand to SEQ ID NO: 1961374
ucauaucagcuuuaaacgg

SEQ ID NO: 1961376 - RNA, 19 nt, Artificial Sequence
  Description of Artificial Sequence: Synthetic oligonucleotide
  Sense strand starting at position 1562 of SEQ ID NO: 1880361
cggagauucuggguauagu

SEQ ID NO: 1961377 - RNA, 19 nt, Artificial Sequence
  Description of Artificial Sequence: Synthetic oligonucleotide
  Antisense strand to SEQ ID NO: 1961376
acuauacccagaaucuccg

SEQ ID NO: 1961378 - RNA, 19 nt, Artificial Sequence
  Description of Artificial Sequence: Synthetic oligonucleotide
  Sense strand starting at position 1563 of SEQ ID NO: 1880361
ggagauucuggguauaguu

SEQ ID NO: 1961379 - RNA, 19 nt, Artificial Sequence
  Description of Artificial Sequence: Synthetic oligonucleotide
  Antisense strand to SEQ ID NO: 1961378
aacuauacccagaaucucc

SEQ ID NO: 1961380 - RNA, 19 nt, Artificial Sequence
  Description of Artificial Sequence: Synthetic oligonucleotide
  Sense strand starting at position 2247 of SEQ ID NO: 1880361
cccaguuacucaccugaga

SEQ ID NO: 1961381 - RNA, 19 nt, Artificial Sequence
  Description of Artificial Sequence: Synthetic oligonucleotide
  Antisense strand to SEQ ID NO: 1961380
ucucaggugaguaacuggg

SEQ ID NO: 1961382 - RNA, 19 nt, Artificial Sequence
  Description of Artificial Sequence: Synthetic oligonucleotide
  Sense strand starting at position 2509 of SEQ ID NO: 1880361
ggcgcuauuccgcuguaac

SEQ ID NO: 1961383 - RNA, 19 nt, Artificial Sequence
  Description of Artificial Sequence: Synthetic oligonucleotide
  Antisense strand to SEQ ID NO: 1961382
guuacagcggaauagcgcc

SEQ ID NO: 1961384 - RNA, 19 nt, Artificial Sequence
  Description of Artificial Sequence: Synthetic oligonucleotide
  Sense strand starting at position 2549 of SEQ ID NO: 1880361
guugauguccugcaucuaa

SEQ ID NO: 1961385 - RNA, 19 nt, Artificial Sequence
  Description of Artificial Sequence: Synthetic oligonucleotide
  Antisense strand to SEQ ID NO: 1961384
uuagaugcaggacaucaac

SEQ ID NO: 1961386 - RNA, 19 nt, Artificial Sequence
  Description of Artificial Sequence: Synthetic oligonucleotide
  Sense strand starting at position 2589 of SEQ ID NO: 1880361
gagcgagcuccggaggaau

SEQ ID NO: 1961387 - RNA, 19 nt, Artificial Sequence
  Description of Artificial Sequence: Synthetic oligonucleotide
  Antisense strand to SEQ ID NO: 1961386
auuccuccggagcucgcuc

SEQ ID NO: 1961388 - RNA, 19 nt, Artificial Sequence
  Description of Artificial Sequence: Synthetic oligonucleotide
  Sense strand starting at position 2591 of SEQ ID NO: 1880361
gcgagcuccggaggaauuu

SEQ ID NO: 1961389 - RNA, 19 nt, Artificial Sequence
  Description of Artificial Sequence: Synthetic oligonucleotide
  Antisense strand to SEQ ID NO: 1961388
aaauuccuccggagcucgc

SEQ ID NO: 1961390 - RNA, 19 nt, Artificial Sequence
  Description of Artificial Sequence: Synthetic oligonucleotide
  Sense strand starting at position 2701 of SEQ ID NO: 1880361
gugggagaacuucggguuu

SEQ ID NO: 1961391 - RNA, 19 nt, Artificial Sequence
  Description of Artificial Sequence: Synthetic oligonucleotide
  Antisense strand to SEQ ID NO: 1961390
aaacccgaaguucucccac

SEQ ID NO: 1961392 - RNA, 19 nt, Artificial Sequence
  Description of Artificial Sequence: Synthetic oligonucleotide
  Sense strand starting at position 2871 of SEQ ID NO: 1880361
uugagaguuccucagucuc

SEQ ID NO: 1961393 - RNA, 19 nt, Artificial Sequence
  Description of Artificial Sequence: Synthetic oligonucleotide
  Antisense strand to SEQ ID NO: 1961392
gagacugaggaacucucaa

SEQ ID NO: 1961394 - RNA, 19 nt, Artificial Sequence
  Description of Artificial Sequence: Synthetic oligonucleotide
  Sense strand starting at position 2873 of SEQ ID NO: 1880361
gagaguuccucagucucua

SEQ ID NO: 1961395 - RNA, 19 nt, Artificial Sequence
  Description of Artificial Sequence: Synthetic oligonucleotide
  Antisense strand to SEQ ID NO: 1961394
uagagacugaggaacucuc

SEQ ID NO: 1961396 - RNA, 19 nt, Artificial Sequence
  Description of Artificial Sequence: Synthetic oligonucleotide
  Sense strand starting at position 2891 of SEQ ID NO: 1880361
acccuagugucagugauag

SEQ ID NO: 1961397 - RNA, 19 nt, Artificial Sequence
  Description of Artificial Sequence: Synthetic oligonucleotide
  Antisense strand to SEQ ID NO: 1961396
cuaucacugacacuagggu

SEQ ID NO: 1961398 - RNA, 19 nt, Artificial Sequence
  Description of Artificial Sequence: Synthetic oligonucleotide
  Sense strand starting at position 2893 of SEQ ID NO: 1880361
ccuagugucagugauagug

SEQ ID NO: 1961399 - RNA, 19 nt, Artificial Sequence
  Description of Artificial Sequence: Synthetic oligonucleotide
  Antisense strand to SEQ ID NO: 1961398
cacuaucacugacacuagg

SEQ ID NO: 1961400 - RNA, 19 nt, Artificial Sequence
  Description of Artificial Sequence: Synthetic oligonucleotide
  Sense strand starting at position 2958 of SEQ ID NO: 1880361
uuaggauuaucuccuugac

SEQ ID NO: 1961401 - RNA, 19 nt, Artificial Sequence
  Description of Artificial Sequence: Synthetic oligonucleotide
  Antisense strand to SEQ ID NO: 1961400
gucaaggagauaauccuaa

SEQ ID NO: 1961402 - RNA, 19 nt, Artificial Sequence
  Description of Artificial Sequence: Synthetic oligonucleotide
  Sense strand starting at position 2960 of SEQ ID NO: 1880361
aggauuaucuccuugacuu

SEQ ID NO: 1961403 - RNA, 19 nt, Artificial Sequence
  Description of Artificial Sequence: Synthetic oligonucleotide
  Antisense strand to SEQ ID NO: 1961402
aagucaaggagauaauccu

SEQ ID NO: 1961404 - RNA, 19 nt, Artificial Sequence
  Description of Artificial Sequence: Synthetic oligonucleotide
  Sense strand starting at position 2961 of SEQ ID NO: 1880361
ggauuaucuccuugacuua

SEQ ID NO: 1961405 - RNA, 19 nt, Artificial Sequence
  Description of Artificial Sequence: Synthetic oligonucleotide
  Antisense strand to SEQ ID NO: 1961404
uaagucaaggagauaaucc

SEQ ID NO: 1961406 - RNA, 19 nt, Artificial Sequence
  Description of Artificial Sequence: Synthetic oligonucleotide
  Sense strand starting at position 2973 of SEQ ID NO: 1880361
ugacuuaaagucgauaucu

SEQ ID NO: 1961407 - RNA, 19 nt, Artificial Sequence
  Description of Artificial Sequence: Synthetic oligonucleotide
  Antisense strand to SEQ ID NO: 1961406
agauaucgacuuuaaguca

SEQ ID NO: 1961408 - RNA, 19 nt, Artificial Sequence
  Description of Artificial Sequence: Synthetic oligonucleotide
  Sense strand starting at position 2975 of SEQ ID NO: 1880361
acuuaaagucgauaucuca

SEQ ID NO: 1961409 - RNA, 19 nt, Artificial Sequence
  Description of Artificial Sequence: Synthetic oligonucleotide
  Antisense strand to SEQ ID NO: 1961408
ugagauaucgacuuuaagu

SEQ ID NO: 1961410 - RNA, 19 nt, Artificial Sequence
  Description of Artificial Sequence: Synthetic oligonucleotide
  Sense strand starting at position 2978 of SEQ ID NO: 1880361
uaaagucgauaucucagaa

SEQ ID NO: 1961411 - RNA, 19 nt, Artificial Sequence
  Description of Artificial Sequence: Synthetic oligonucleotide
  Antisense strand to SEQ ID NO: 1961410
uucugagauaucgacuuua

SEQ ID NO: 1961412 - RNA, 19 nt, Artificial Sequence
  Description of Artificial Sequence: Synthetic oligonucleotide
  Sense strand starting at position 2991 of SEQ ID NO: 1880361
ucagaagaguccucaacua

SEQ ID NO: 1961413 - RNA, 19 nt, Artificial Sequence
  Description of Artificial Sequence: Synthetic oligonucleotide
  Antisense strand to SEQ ID NO: 1961412
uaguugaggacucuucuga

SEQ ID NO: 1961414 - RNA, 19 nt, Artificial Sequence
  Description of Artificial Sequence: Synthetic oligonucleotide
  Sense strand starting at position 3130 of SEQ ID NO: 1880361
ugccaugugggacauaauu

SEQ ID NO: 1961415 - RNA, 19 nt, Artificial Sequence
  Description of Artificial Sequence: Synthetic oligonucleotide
  Antisense strand to SEQ ID NO: 1961414
aauuaugucccacauggca

SEQ ID NO: 1961416 - RNA, 19 nt, Artificial Sequence
  Description of Artificial Sequence: Synthetic oligonucleotide
  Sense strand starting at position 3192 of SEQ ID NO: 1880361
gucuuacguauugggaaua

SEQ ID NO: 1961417 - RNA, 19 nt, Artificial Sequence
  Description of Artificial Sequence: Synthetic oligonucleotide
  Antisense strand to SEQ ID NO: 1961416
uauucccaauacguaagac

SEQ ID NO: 1961418 - RNA, 19 nt, Artificial Sequence
  Description of Artificial Sequence: Synthetic oligonucleotide
  Sense strand starting at position 3241 of SEQ ID NO: 1880361
acauucuaguguuugagag

SEQ ID NO: 1961419 - RNA, 19 nt, Artificial Sequence
  Description of Artificial Sequence: Synthetic oligonucleotide
  Antisense strand to SEQ ID NO: 1961418
cucucaaacacuagaaugu

SEQ ID NO: 1961420 - RNA, 19 nt, Artificial Sequence
  Description of Artificial Sequence: Synthetic oligonucleotide
  Sense strand starting at position 3322 of SEQ ID NO: 1880361
cgcuuagagguguaagaug

SEQ ID NO: 1961421 - RNA, 19 nt, Artificial Sequence
  Description of Artificial Sequence: Synthetic oligonucleotide
  Antisense strand to SEQ ID NO: 1961420
caucuuacaccucuaagcg

SEQ ID NO: 1961422 - RNA, 19 nt, Artificial Sequence
  Description of Artificial Sequence: Synthetic oligonucleotide
  Sense strand starting at position 3327 of SEQ ID NO: 1880361
agagguguaagaugaaguu

SEQ ID NO: 1961423 - RNA, 19 nt, Artificial Sequence
  Description of Artificial Sequence: Synthetic oligonucleotide
  Antisense strand to SEQ ID NO: 1961422
aacuucaucuuacaccucu

SEQ ID NO: 1961424 - RNA, 19 nt, Artificial Sequence
  Description of Artificial Sequence: Synthetic oligonucleotide
  Sense strand starting at position 3548 of SEQ ID NO: 1880361
gcaauugaccauuguauau

SEQ ID NO: 1961425 - RNA, 19 nt, Artificial Sequence
  Description of Artificial Sequence: Synthetic oligonucleotide
  Antisense strand to SEQ ID NO: 1961424
auauacaauggucaauugc

SEQ ID NO: 1961426 - RNA, 19 nt, Artificial Sequence
  Description of Artificial Sequence: Synthetic oligonucleotide
  Sense strand starting at position 3552 of SEQ ID NO: 1880361
uugaccauuguauauguaa

SEQ ID NO: 1961427 - RNA, 19 nt, Artificial Sequence
  Description of Artificial Sequence: Synthetic oligonucleotide
  Antisense strand to SEQ ID NO: 1961426
uuacauauacaauggucaa

SEQ ID NO: 1961428 - RNA, 19 nt, Artificial Sequence
  Description of Artificial Sequence: Synthetic oligonucleotide
  Sense strand starting at position 3561 of SEQ ID NO: 1880361
guauauguaaauggagacu

SEQ ID NO: 1961429 - RNA, 19 nt, Artificial Sequence
  Description of Artificial Sequence: Synthetic oligonucleotide
  Antisense strand to SEQ ID NO: 1961428
agucuccauuuacauauac

SEQ ID NO: 1961430 - RNA, 19 nt, Artificial Sequence
  Description of Artificial Sequence: Synthetic oligonucleotide
  Sense strand starting at position 3721 of SEQ ID NO: 1880361
uuggaugauaguugacuuu

SEQ ID NO: 1961431 - RNA, 19 nt, Artificial Sequence
  Description of Artificial Sequence: Synthetic oligonucleotide
  Antisense strand to SEQ ID NO: 1961430
aaagucaacuaucauccaa

SEQ ID NO: 1961432 - RNA, 19 nt, Artificial Sequence
  Description of Artificial Sequence: Synthetic oligonucleotide
  Sense strand starting at position 7 of SEQ ID NO: 1880362
gcagaauugacagagacgu

SEQ ID NO: 1961433 - RNA, 19 nt, Artificial Sequence
  Description of Artificial Sequence: Synthetic oligonucleotide
  Antisense strand to SEQ ID NO: 1961432
acgucucugucaauucugc

SEQ ID NO: 1961434 - RNA, 19 nt, Artificial Sequence
  Description of Artificial Sequence: Synthetic oligonucleotide
  Sense strand starting at position 161 of SEQ ID NO: 1880362
gugucuaggugucuucuga

SEQ ID NO: 1961435 - RNA, 19 nt, Artificial Sequence
  Description of Artificial Sequence: Synthetic oligonucleotide
  Antisense strand to SEQ ID NO: 1961434
ucagaagacaccuagacac

SEQ ID NO: 1961436 - RNA, 19 nt, Artificial Sequence
  Description of Artificial Sequence: Synthetic oligonucleotide
  Sense strand starting at position 165 of SEQ ID NO: 1880362
cuaggugucuucugagguu

SEQ ID NO: 1961437 - RNA, 19 nt, Artificial Sequence
  Description of Artificial Sequence: Synthetic oligonucleotide
  Antisense strand to SEQ ID NO: 1961436
aaccucagaagacaccuag

SEQ ID NO: 1961438 - RNA, 19 nt, Artificial Sequence
  Description of Artificial Sequence: Synthetic oligonucleotide
  Sense strand starting at position 167 of SEQ ID NO: 1880362
aggugucuucugagguugu

SEQ ID NO: 1961439 - RNA, 19 nt, Artificial Sequence
  Description of Artificial Sequence: Synthetic oligonucleotide
  Antisense strand to SEQ ID NO: 1961438
acaaccucagaagacaccu

SEQ ID NO: 1961440 - RNA, 19 nt, Artificial Sequence
  Description of Artificial Sequence: Synthetic oligonucleotide
  Sense strand starting at position 168 of SEQ ID NO: 1880362
ggugucuucugagguugua

SEQ ID NO: 1961441 - RNA, 19 nt, Artificial Sequence
  Description of Artificial Sequence: Synthetic oligonucleotide
  Antisense strand to SEQ ID NO: 1961440
uacaaccucagaagacacc

SEQ ID NO: 1961442 - RNA, 19 nt, Artificial Sequence
  Description of Artificial Sequence: Synthetic oligonucleotide
  Sense strand starting at position 433 of SEQ ID NO: 1880362
uuuauauguucuugucuga

SEQ ID NO: 1961443 - RNA, 19 nt, Artificial Sequence
  Description of Artificial Sequence: Synthetic oligonucleotide
  Antisense strand to SEQ ID NO: 1961442
ucagacaagaacauauaaa

SEQ ID NO: 1961444 - RNA, 19 nt, Artificial Sequence
  Description of Artificial Sequence: Synthetic oligonucleotide
  Sense strand starting at position 436 of SEQ ID NO: 1880362
auauguucuugucugacaa

SEQ ID NO: 1961445 - RNA, 19 nt, Artificial Sequence
  Description of Artificial Sequence: Synthetic oligonucleotide
  Antisense strand to SEQ ID NO: 1961444
uugucagacaagaacauau

SEQ ID NO: 1961446 - RNA, 19 nt, Artificial Sequence
  Description of Artificial Sequence: Synthetic oligonucleotide
  Sense strand starting at position 438 of SEQ ID NO: 1880362
auguucuugucugacaacu

SEQ ID NO: 1961447 - RNA, 19 nt, Artificial Sequence
  Description of Artificial Sequence: Synthetic oligonucleotide
  Antisense strand to SEQ ID NO: 1961446
aguugucagacaagaacau

SEQ ID NO: 1961448 - RNA, 19 nt, Artificial Sequence
  Description of Artificial Sequence: Synthetic oligonucleotide
  Sense strand starting at position 516 of SEQ ID NO: 1880362
aguguaaccugagacauuc

SEQ ID NO: 1961449 - RNA, 19 nt, Artificial Sequence
  Description of Artificial Sequence: Synthetic oligonucleotide
  Antisense strand to SEQ ID NO: 1961448
gaaugucucagguuacacu

SEQ ID NO: 1961450 - RNA, 19 nt, Artificial Sequence
  Description of Artificial Sequence: Synthetic oligonucleotide
  Sense strand starting at position 705 of SEQ ID NO: 1880362
cccagagcucuccagauca

SEQ ID NO: 1961451 - RNA, 19 nt, Artificial Sequence
  Description of Artificial Sequence: Synthetic oligonucleotide
  Antisense strand to SEQ ID NO: 1961450
ugaucuggagagcucuggg

SEQ ID NO: 1961452 - RNA, 19 nt, Artificial Sequence
  Description of Artificial Sequence: Synthetic oligonucleotide
  Sense strand starting at position 731 of SEQ ID NO: 1880362
guuauuugaucagacacuu

SEQ ID NO: 1961453 - RNA, 19 nt, Artificial Sequence
  Description of Artificial Sequence: Synthetic oligonucleotide
  Antisense strand to SEQ ID NO: 1961452
aagugucugaucaaauaac

SEQ ID NO: 1961454 - RNA, 19 nt, Artificial Sequence
  Description of Artificial Sequence: Synthetic oligonucleotide
  Sense strand starting at position 844 of SEQ ID NO: 1880362
uggccuuagccuugaggaa

SEQ ID NO: 1961455 - RNA, 19 nt, Artificial Sequence
  Description of Artificial Sequence: Synthetic oligonucleotide
  Antisense strand to SEQ ID NO: 1961454
uuccucaaggcuaaggcca

SEQ ID NO: 1961456 - RNA, 19 nt, Artificial Sequence
  Description of Artificial Sequence: Synthetic oligonucleotide
  Sense strand starting at position 892 of SEQ ID NO: 1880362
ggugcugcuccaggaugau

SEQ ID NO: 1961457 - RNA, 19 nt, Artificial Sequence
  Description of Artificial Sequence: Synthetic oligonucleotide
  Antisense strand to SEQ ID NO: 1961456
aucauccuggagcagcacc

SEQ ID NO: 1961458 - RNA, 19 nt, Artificial Sequence
  Description of Artificial Sequence: Synthetic oligonucleotide
  Sense strand starting at position 920 of SEQ ID NO: 1880362
aguugugcaccaggucaua

SEQ ID NO: 1961459 - RNA, 19 nt, Artificial Sequence
  Description of Artificial Sequence: Synthetic oligonucleotide
  Antisense strand to SEQ ID NO: 1961458
uaugaccuggugcacaacu

SEQ ID NO: 1961460 - RNA, 19 nt, Artificial Sequence
  Description of Artificial Sequence: Synthetic oligonucleotide
  Sense strand starting at position 932 of SEQ ID NO: 1880362
ggucauaggcccugcagaa

SEQ ID NO: 1961461 - RNA, 19 nt, Artificial Sequence
  Description of Artificial Sequence: Synthetic oligonucleotide
  Antisense strand to SEQ ID NO: 1961460
uucugcagggccuaugacc

SEQ ID NO: 1961462 - RNA, 19 nt, Artificial Sequence
  Description of Artificial Sequence: Synthetic oligonucleotide
  Sense strand starting at position 1061 of SEQ ID NO: 1880362
ugggauuccugcaggguga

SEQ ID NO: 1961463 - RNA, 19 nt, Artificial Sequence
  Description of Artificial Sequence: Synthetic oligonucleotide
  Antisense strand to SEQ ID NO: 1961462
ucacccugcaggaauccca

SEQ ID NO: 1961464 - RNA, 19 nt, Artificial Sequence
  Description of Artificial Sequence: Synthetic oligonucleotide
  Sense strand starting at position 1576 of SEQ ID NO: 1880362
agcccaaucucagaaugga

SEQ ID NO: 1961465 - RNA, 19 nt, Artificial Sequence
  Description of Artificial Sequence: Synthetic oligonucleotide
  Antisense strand to SEQ ID NO: 1961464
uccauucugagauugggcu

SEQ ID NO: 1961466 - RNA, 19 nt, Artificial Sequence
  Description of Artificial Sequence: Synthetic oligonucleotide
  Sense strand starting at position 1634 of SEQ ID NO: 1880362
agcagugcuucuggaugaa

SEQ ID NO: 1961467 - RNA, 19 nt, Artificial Sequence
  Description of Artificial Sequence: Synthetic oligonucleotide
  Antisense strand to SEQ ID NO: 1961466
uucauccagaagcacugcu

SEQ ID NO: 1961468 - RNA, 19 nt, Artificial Sequence
  Description of Artificial Sequence: Synthetic oligonucleotide
  Sense strand starting at position 2074 of SEQ ID NO: 1880362
cacugugguuccucaaaga

SEQ ID NO: 1961469 - RNA, 19 nt, Artificial Sequence
  Description of Artificial Sequence: Synthetic oligonucleotide
  Antisense strand to SEQ ID NO: 1961468
ucuuugaggaaccacagug

SEQ ID NO: 1961470 - RNA, 19 nt, Artificial Sequence
  Description of Artificial Sequence: Synthetic oligonucleotide
  Sense strand starting at position 2092 of SEQ ID NO: 1880362
agguuagguuuaccuagga

SEQ ID NO: 1961471 - RNA, 19 nt, Artificial Sequence
  Description of Artificial Sequence: Synthetic oligonucleotide
  Antisense strand to SEQ ID NO: 1961470
uccuagguaaaccuaaccu

SEQ ID NO: 1961472 - RNA, 19 nt, Artificial Sequence
  Description of Artificial Sequence: Synthetic oligonucleotide
  Sense strand starting at position 2161 of SEQ ID NO: 1880362
gaacucuguucuggaccua

SEQ ID NO: 1961473 - RNA, 19 nt, Artificial Sequence
  Description of Artificial Sequence: Synthetic oligonucleotide
  Antisense strand to SEQ ID NO: 1961472
uagguccagaacagaguuc

SEQ ID NO: 1961474 - RNA, 19 nt, Artificial Sequence
  Description of Artificial Sequence: Synthetic oligonucleotide
  Sense strand starting at position 2244 of SEQ ID NO: 1880362
gcaugaaauucucuuccag

SEQ ID NO: 1961475 - RNA, 19 nt, Artificial Sequence
  Description of Artificial Sequence: Synthetic oligonucleotide
  Antisense strand to SEQ ID NO: 1961474
cuggaagagaauuucaugc

SEQ ID NO: 1961476 - RNA, 19 nt, Artificial Sequence
  Description of Artificial Sequence: Synthetic oligonucleotide
  Sense strand starting at position 2454 of SEQ ID NO: 1880362
cucgauuucuucuagucau

SEQ ID NO: 1961477 - RNA, 19 nt, Artificial Sequence
  Description of Artificial Sequence: Synthetic oligonucleotide
  Antisense strand to SEQ ID NO: 1961476
augacuagaagaaaucgag

SEQ ID NO: 1961478 - RNA, 19 nt, Artificial Sequence
  Description of Artificial Sequence: Synthetic oligonucleotide
  Sense strand starting at position 2494 of SEQ ID NO: 1880362
cugugcagcugauaugaua

SEQ ID NO: 1961479 - RNA, 19 nt, Artificial Sequence
  Description of Artificial Sequence: Synthetic oligonucleotide
  Antisense strand to SEQ ID NO: 1961478
uaucauaucagcugcacag

SEQ ID NO: 1961480 - RNA, 19 nt, Artificial Sequence
  Description of Artificial Sequence: Synthetic oligonucleotide
  Sense strand starting at position 2799 of SEQ ID NO: 1880362
caaucacaguuguggguua

SEQ ID NO: 1961481 - RNA, 19 nt, Artificial Sequence
  Description of Artificial Sequence: Synthetic oligonucleotide
  Antisense strand to SEQ ID NO: 1961480
uaacccacaacugugauug

SEQ ID NO: 1961482 - RNA, 19 nt, Artificial Sequence
  Description of Artificial Sequence: Synthetic oligonucleotide
  Sense strand starting at position 2891 of SEQ ID NO: 1880362
acuccuacuugccacgaaa

SEQ ID NO: 1961483 - RNA, 19 nt, Artificial Sequence
  Description of Artificial Sequence: Synthetic oligonucleotide
  Antisense strand to SEQ ID NO: 1961482
uuucguggcaaguaggagu

SEQ ID NO: 1961484 - RNA, 19 nt, Artificial Sequence
  Description of Artificial Sequence: Synthetic oligonucleotide
  Sense strand starting at position 2894 of SEQ ID NO: 1880362
ccuacuugccacgaaaugu

SEQ ID NO: 1961485 - RNA, 19 nt, Artificial Sequence
  Description of Artificial Sequence: Synthetic oligonucleotide
  Antisense strand to SEQ ID NO: 1961484
acauuucguggcaaguagg

SEQ ID NO: 1961486 - RNA, 19 nt, Artificial Sequence
  Description of Artificial Sequence: Synthetic oligonucleotide
  Sense strand starting at position 3303 of SEQ ID NO: 1880362
cagggacagucucuuacau

SEQ ID NO: 1961487 - RNA, 19 nt, Artificial Sequence
  Description of Artificial Sequence: Synthetic oligonucleotide
  Antisense strand to SEQ ID NO: 1961486
auguaagagacugucccug

SEQ ID NO: 1961488 - RNA, 19 nt, Artificial Sequence
  Description of Artificial Sequence: Synthetic oligonucleotide
  Sense strand starting at position 3305 of SEQ ID NO: 1880362
gggacagucucuuacauuu

SEQ ID NO: 1961489 - RNA, 19 nt, Artificial Sequence
  Description of Artificial Sequence: Synthetic oligonucleotide
  Antisense strand to SEQ ID NO: 1961488
aaauguaagagacuguccc

SEQ ID NO: 1961490 - RNA, 19 nt, Artificial Sequence
  Description of Artificial Sequence: Synthetic oligonucleotide
  Sense strand starting at position 3505 of SEQ ID NO: 1880362
gcuggcugacacuggaaau

SEQ ID NO: 1961491 - RNA, 19 nt, Artificial Sequence
  Description of Artificial Sequence: Synthetic oligonucleotide
  Antisense strand to SEQ ID NO: 1961490
auuuccagugucagccagc

SEQ ID NO: 1961492 - RNA, 19 nt, Artificial Sequence
  Description of Artificial Sequence: Synthetic oligonucleotide
  Sense strand starting at position 3560 of SEQ ID NO: 1880362
ggugaugcuccaggaccau

SEQ ID NO: 1961493 - RNA, 19 nt, Artificial Sequence
  Description of Artificial Sequence: Synthetic oligonucleotide
  Antisense strand to SEQ ID NO: 1961492
augguccuggagcaucacc

SEQ ID NO: 1961494 - RNA, 19 nt, Artificial Sequence
  Description of Artificial Sequence: Synthetic oligonucleotide
  Sense strand starting at position 3828 of SEQ ID NO: 1880362
agggucugaucucccaaua

SEQ ID NO: 1961495 - RNA, 19 nt, Artificial Sequence
  Description of Artificial Sequence: Synthetic oligonucleotide
  Antisense strand to SEQ ID NO: 1961494
uauugggagaucagacccu

SEQ ID NO: 1961496 - RNA, 19 nt, Artificial Sequence
  Description of Artificial Sequence: Synthetic oligonucleotide
  Sense strand starting at position 3957 of SEQ ID NO: 1880362
cuuuauguuugucuuguga

SEQ ID NO: 1961497 - RNA, 19 nt, Artificial Sequence
  Description of Artificial Sequence: Synthetic oligonucleotide
  Antisense strand to SEQ ID NO: 1961496
ucacaagacaaacauaaag

SEQ ID NO: 1961498 - RNA, 19 nt, Artificial Sequence
  Description of Artificial Sequence: Synthetic oligonucleotide
  Sense strand starting at position 3959 of SEQ ID NO: 1880362
uuauguuugucuugugaga

SEQ ID NO: 1961499 - RNA, 19 nt, Artificial Sequence
  Description of Artificial Sequence: Synthetic oligonucleotide
  Antisense strand to SEQ ID NO: 1961498
ucucacaagacaaacauaa

SEQ ID NO: 1961500 - RNA, 19 nt, Artificial Sequence
  Description of Artificial Sequence: Synthetic oligonucleotide
  Sense strand starting at position 3961 of SEQ ID NO: 1880362
auguuugucuugugagaau

SEQ ID NO: 1961501 - RNA, 19 nt, Artificial Sequence
  Description of Artificial Sequence: Synthetic oligonucleotide
  Antisense strand to SEQ ID NO: 1961500
auucucacaagacaaacau

SEQ ID NO: 1961502 - RNA, 19 nt, Artificial Sequence
  Description of Artificial Sequence: Synthetic oligonucleotide
  Sense strand starting at position 3970 of SEQ ID NO: 1880362
uugugagaaucucugagca

SEQ ID NO: 1961503 - RNA, 19 nt, Artificial Sequence
  Description of Artificial Sequence: Synthetic oligonucleotide
  Antisense strand to SEQ ID NO: 1961502
ugcucagagauucucacaa

SEQ ID NO: 1961504 - RNA, 19 nt, Artificial Sequence
  Description of Artificial Sequence: Synthetic oligonucleotide
  Sense strand starting at position 3972 of SEQ ID NO: 1880362
gugagaaucucugagcaag

SEQ ID NO: 1961505 - RNA, 19 nt, Artificial Sequence
  Description of Artificial Sequence: Synthetic oligonucleotide
  Antisense strand to SEQ ID NO: 1961504
cuugcucagagauucucac

SEQ ID NO: 1961506 - RNA, 19 nt, Artificial Sequence
  Description of Artificial Sequence: Synthetic oligonucleotide
  Sense strand starting at position 3974 of SEQ ID NO: 1880362
gagaaucucugagcaagau

SEQ ID NO: 1961507 - RNA, 19 nt, Artificial Sequence
  Description of Artificial Sequence: Synthetic oligonucleotide
  Antisense strand to SEQ ID NO: 1961506
aucuugcucagagauucuc

SEQ ID NO: 1961508 - RNA, 19 nt, Artificial Sequence
  Description of Artificial Sequence: Synthetic oligonucleotide
  Sense strand starting at position 9 of SEQ ID NO: 1880363
gcacaagcgcaucaauaaa

SEQ ID NO: 1961509 - RNA, 19 nt, Artificial Sequence
  Description of Artificial Sequence: Synthetic oligonucleotide
  Antisense strand to SEQ ID NO: 1961508
uuuauugaugcgcuugugc

SEQ ID NO: 1961510 - RNA, 19 nt, Artificial Sequence
  Description of Artificial Sequence: Synthetic oligonucleotide
  Sense strand starting at position 237 of SEQ ID NO: 1880363
ccaagaugucagcaguaug

SEQ ID NO: 1961511 - RNA, 19 nt, Artificial Sequence
  Description of Artificial Sequence: Synthetic oligonucleotide
  Antisense strand to SEQ ID NO: 1961510
cauacugcugacaucuugg

SEQ ID NO: 1961512 - RNA, 19 nt, Artificial Sequence
  Description of Artificial Sequence: Synthetic oligonucleotide
  Sense strand starting at position 292 of SEQ ID NO: 1880363
gaagcagcuccguaacaga

SEQ ID NO: 1961513 - RNA, 19 nt, Artificial Sequence
  Description of Artificial Sequence: Synthetic oligonucleotide
  Antisense strand to SEQ ID NO: 1961512
ucuguuacggagcugcuuc

SEQ ID NO: 1961514 - RNA, 19 nt, Artificial Sequence
  Description of Artificial Sequence: Synthetic oligonucleotide
  Sense strand starting at position 295 of SEQ ID NO: 1880363
gcagcuccguaacagauau

SEQ ID NO: 1961515 - RNA, 19 nt, Artificial Sequence
  Description of Artificial Sequence: Synthetic oligonucleotide
  Antisense strand to SEQ ID NO: 1961514
auaucuguuacggagcugc

SEQ ID NO: 1961516 - RNA, 19 nt, Artificial Sequence
  Description of Artificial Sequence: Synthetic oligonucleotide
  Sense strand starting at position 657 of SEQ ID NO: 1880363
augacauguuucucacaag

SEQ ID NO: 1961517 - RNA, 19 nt, Artificial Sequence
  Description of Artificial Sequence: Synthetic oligonucleotide
  Antisense strand to SEQ ID NO: 1961516
cuugugagaaacaugucau

SEQ ID NO: 1961518 - RNA, 19 nt, Artificial Sequence
  Description of Artificial Sequence: Synthetic oligonucleotide
  Sense strand starting at position 660 of SEQ ID NO: 1880363
acauguuucucacaaggug

SEQ ID NO: 1961519 - RNA, 19 nt, Artificial Sequence
  Description of Artificial Sequence: Synthetic oligonucleotide
  Antisense strand to SEQ ID NO: 1961518
caccuugugagaaacaugu

SEQ ID NO: 1961520 - RNA, 19 nt, Artificial Sequence
  Description of Artificial Sequence: Synthetic oligonucleotide
  Sense strand starting at position 723 of SEQ ID NO: 1880363
gcuguucuccuuuaugauc

SEQ ID NO: 1961521 - RNA, 19 nt, Artificial Sequence
  Description of Artificial Sequence: Synthetic oligonucleotide
  Antisense strand to SEQ ID NO: 1961520
gaucauaaaggagaacagc

SEQ ID NO: 1961522 - RNA, 19 nt, Artificial Sequence
  Description of Artificial Sequence: Synthetic oligonucleotide
  Sense strand starting at position 925 of SEQ ID NO: 1880363
accuguggugucuacauua

SEQ ID NO: 1961523 - RNA, 19 nt, Artificial Sequence
  Description of Artificial Sequence: Synthetic oligonucleotide
  Antisense strand to SEQ ID NO: 1961522
uaauguagacaccacaggu

SEQ ID NO: 1961524 - RNA, 19 nt, Artificial Sequence
  Description of Artificial Sequence: Synthetic oligonucleotide
  Sense strand starting at position 1506 of SEQ ID NO: 1880363
gccugcuguccucugguua

SEQ ID NO: 1961525 - RNA, 19 nt, Artificial Sequence
  Description of Artificial Sequence: Synthetic oligonucleotide
  Antisense strand to SEQ ID NO: 1961524
uaaccagaggacagcaggc

SEQ ID NO: 1961526 - RNA, 19 nt, Artificial Sequence
  Description of Artificial Sequence: Synthetic oligonucleotide
  Sense strand starting at position 1507 of SEQ ID NO: 1880363
ccugcuguccucugguuaa

SEQ ID NO: 1961527 - RNA, 19 nt, Artificial Sequence
  Description of Artificial Sequence: Synthetic oligonucleotide
  Antisense strand to SEQ ID NO: 1961526
uuaaccagaggacagcagg

SEQ ID NO: 1961528 - RNA, 19 nt, Artificial Sequence
  Description of Artificial Sequence: Synthetic oligonucleotide
  Sense strand starting at position 1510 of SEQ ID NO: 1880363
gcuguccucugguuaagga

SEQ ID NO: 1961529 - RNA, 19 nt, Artificial Sequence
  Description of Artificial Sequence: Synthetic oligonucleotide
  Antisense strand to SEQ ID NO: 1961528
uccuuaaccagaggacagc

SEQ ID NO: 1961530 - RNA, 19 nt, Artificial Sequence
  Description of Artificial Sequence: Synthetic oligonucleotide
  Sense strand starting at position 2081 of SEQ ID NO: 1880363
cagagauggugugucauuc

SEQ ID NO: 1961531 - RNA, 19 nt, Artificial Sequence
  Description of Artificial Sequence: Synthetic oligonucleotide
  Antisense strand to SEQ ID NO: 1961530
gaaugacacaccaucucug

SEQ ID NO: 1961532 - RNA, 19 nt, Artificial Sequence
  Description of Artificial Sequence: Synthetic oligonucleotide
  Sense strand starting at position 2328 of SEQ ID NO: 1880363
ggacgugugauguggucaa

SEQ ID NO: 1961533 - RNA, 19 nt, Artificial Sequence
  Description of Artificial Sequence: Synthetic oligonucleotide
  Antisense strand to SEQ ID NO: 1961532
uugaccacaucacacgucc

SEQ ID NO: 1961534 - RNA, 19 nt, Artificial Sequence
  Description of Artificial Sequence: Synthetic oligonucleotide
  Sense strand starting at position 3468 of SEQ ID NO: 1880363
ccaggaccuuacugacaaa

SEQ ID NO: 1961535 - RNA, 19 nt, Artificial Sequence
  Description of Artificial Sequence: Synthetic oligonucleotide
  Antisense strand to SEQ ID NO: 1961534
uuugucaguaagguccugg

SEQ ID NO: 1961536 - RNA, 19 nt, Artificial Sequence
  Description of Artificial Sequence: Synthetic oligonucleotide
  Sense strand starting at position 3655 of SEQ ID NO: 1880363
ugagcuccuuacugacaau

SEQ ID NO: 1961537 - RNA, 19 nt, Artificial Sequence
  Description of Artificial Sequence: Synthetic oligonucleotide
  Antisense strand to SEQ ID NO: 1961536
auugucaguaaggagcuca

SEQ ID NO: 1961538 - RNA, 19 nt, Artificial Sequence
  Description of Artificial Sequence: Synthetic oligonucleotide
  Sense strand starting at position 3969 of SEQ ID NO: 1880363
cugacaagguccuuauuga

SEQ ID NO: 1961539 - RNA, 19 nt, Artificial Sequence
  Description of Artificial Sequence: Synthetic oligonucleotide
  Antisense strand to SEQ ID NO: 1961538
ucaauaaggaccuugucag

SEQ ID NO: 1961540 - RNA, 19 nt, Artificial Sequence
  Description of Artificial Sequence: Synthetic oligonucleotide
  Sense strand starting at position 77 of SEQ ID NO: 1880364
auacaagaguuuggaauua

SEQ ID NO: 1961541 - RNA, 19 nt, Artificial Sequence
  Description of Artificial Sequence: Synthetic oligonucleotide
  Antisense strand to SEQ ID NO: 1961540
uaauuccaaacucuuguau

SEQ ID NO: 1961542 - RNA, 19 nt, Artificial Sequence
  Description of Artificial Sequence: Synthetic oligonucleotide
  Sense strand starting at position 183 of SEQ ID NO: 1880364
uuauguuacucaguucucu

SEQ ID NO: 1961543 - RNA, 19 nt, Artificial Sequence
  Description of Artificial Sequence: Synthetic oligonucleotide
  Antisense strand to SEQ ID NO: 1961542
agagaacugaguaacauaa

SEQ ID NO: 1961544 - RNA, 19 nt, Artificial Sequence
  Description of Artificial Sequence: Synthetic oligonucleotide
  Sense strand starting at position 328 of SEQ ID NO: 1880364
guucuaagucaucaaacgu

SEQ ID NO: 1961545 - RNA, 19 nt, Artificial Sequence
  Description of Artificial Sequence: Synthetic oligonucleotide
  Antisense strand to SEQ ID NO: 1961544
acguuugaugacuuagaac

SEQ ID NO: 1961546 - RNA, 19 nt, Artificial Sequence
  Description of Artificial Sequence: Synthetic oligonucleotide
  Sense strand starting at position 760 of SEQ ID NO: 1880364
caugucgaccuauguaaca

SEQ ID NO: 1961547 - RNA, 19 nt, Artificial Sequence
  Description of Artificial Sequence: Synthetic oligonucleotide
  Antisense strand to SEQ ID NO: 1961546
uguuacauaggucgacaug

SEQ ID NO: 1961548 - RNA, 19 nt, Artificial Sequence
  Description of Artificial Sequence: Synthetic oligonucleotide
  Sense strand starting at position 1180 of SEQ ID NO: 1880364
ccgccaugucgccaaguga

SEQ ID NO: 1961549 - RNA, 19 nt, Artificial Sequence
  Description of Artificial Sequence: Synthetic oligonucleotide
  Antisense strand to SEQ ID NO: 1961548
ucacuuggcgacauggcgg

SEQ ID NO: 1961550 - RNA, 19 nt, Artificial Sequence
  Description of Artificial Sequence: Synthetic oligonucleotide
  Sense strand starting at position 1386 of SEQ ID NO: 1880364
caccgucugcguccuauua

SEQ ID NO: 1961551 - RNA, 19 nt, Artificial Sequence
  Description of Artificial Sequence: Synthetic oligonucleotide
  Antisense strand to SEQ ID NO: 1961550
uaauaggacgcagacggug

SEQ ID NO: 1961552 - RNA, 19 nt, Artificial Sequence
  Description of Artificial Sequence: Synthetic oligonucleotide
  Sense strand starting at position 1549 of SEQ ID NO: 1880364
ccuugugucguccaggcua

SEQ ID NO: 1961553 - RNA, 19 nt, Artificial Sequence
  Description of Artificial Sequence: Synthetic oligonucleotide
  Antisense strand to SEQ ID NO: 1961552
uagccuggacgacacaagg

SEQ ID NO: 1961554 - RNA, 19 nt, Artificial Sequence
  Description of Artificial Sequence: Synthetic oligonucleotide
  Sense strand starting at position 1551 of SEQ ID NO: 1880364
uugugucguccaggcuaga

SEQ ID NO: 1961555 - RNA, 19 nt, Artificial Sequence
  Description of Artificial Sequence: Synthetic oligonucleotide
  Antisense strand to SEQ ID NO: 1961554
ucuagccuggacgacacaa

SEQ ID NO: 1961556 - RNA, 19 nt, Artificial Sequence
  Description of Artificial Sequence: Synthetic oligonucleotide
  Sense strand starting at position 3479 of SEQ ID NO: 1880364
uguuguaucuuuggagcau

SEQ ID NO: 1961557 - RNA, 19 nt, Artificial Sequence
  Description of Artificial Sequence: Synthetic oligonucleotide
  Antisense strand to SEQ ID NO: 1961556
augcuccaaagauacaaca

SEQ ID NO: 1961558 - RNA, 19 nt, Artificial Sequence
  Description of Artificial Sequence: Synthetic oligonucleotide
  Sense strand starting at position 3480 of SEQ ID NO: 1880364
guuguaucuuuggagcauc

SEQ ID NO: 1961559 - RNA, 19 nt, Artificial Sequence
  Description of Artificial Sequence: Synthetic oligonucleotide
  Antisense strand to SEQ ID NO: 1961558
gaugcuccaaagauacaac

SEQ ID NO: 1961560 - RNA, 19 nt, Artificial Sequence
  Description of Artificial Sequence: Synthetic oligonucleotide
  Sense strand starting at position 3490 of SEQ ID NO: 1880364
uggagcaucugccgucuaa

SEQ ID NO: 1961561 - RNA, 19 nt, Artificial Sequence
  Description of Artificial Sequence: Synthetic oligonucleotide
  Antisense strand to SEQ ID NO: 1961560
uuagacggcagaugcucca

SEQ ID NO: 1961562 - RNA, 19 nt, Artificial Sequence
  Description of Artificial Sequence: Synthetic oligonucleotide
  Sense strand starting at position 3494 of SEQ ID NO: 1880364
gcaucugccgucuaaucuu

SEQ ID NO: 1961563 - RNA, 19 nt, Artificial Sequence
  Description of Artificial Sequence: Synthetic oligonucleotide
  Antisense strand to SEQ ID NO: 1961562
aagauuagacggcagaugc

SEQ ID NO: 1961564 - RNA, 19 nt, Artificial Sequence
  Description of Artificial Sequence: Synthetic oligonucleotide
  Sense strand starting at position 3570 of SEQ ID NO: 1880364
ugauuaagaucccaaagau

SEQ ID NO: 1961565 - RNA, 19 nt, Artificial Sequence
  Description of Artificial Sequence: Synthetic oligonucleotide
  Antisense strand to SEQ ID NO: 1961564
aucuuugggaucuuaauca

SEQ ID NO: 1961566 - RNA, 19 nt, Artificial Sequence
  Description of Artificial Sequence: Synthetic oligonucleotide
  Sense strand starting at position 3812 of SEQ ID NO: 1880364
ugguaauaauguguauuga

SEQ ID NO: 1961567 - RNA, 19 nt, Artificial Sequence
  Description of Artificial Sequence: Synthetic oligonucleotide
  Antisense strand to SEQ ID NO: 1961566
ucaauacacauuauuacca

SEQ ID NO: 1961568 - RNA, 19 nt, Artificial Sequence
  Description of Artificial Sequence: Synthetic oligonucleotide
  Sense strand starting at position 3813 of SEQ ID NO: 1880364
gguaauaauguguauugac

SEQ ID NO: 1961569 - RNA, 19 nt, Artificial Sequence
  Description of Artificial Sequence: Synthetic oligonucleotide
  Antisense strand to SEQ ID NO: 1961568
gucaauacacauuauuacc

SEQ ID NO: 1961570 - RNA, 19 nt, Artificial Sequence
  Description of Artificial Sequence: Synthetic oligonucleotide
  Sense strand starting at position 3823 of SEQ ID NO: 1880364
uguauugacuugcuuaaag

SEQ ID NO: 1961571 - RNA, 19 nt, Artificial Sequence
  Description of Artificial Sequence: Synthetic oligonucleotide
  Antisense strand to SEQ ID NO: 1961570
cuuuaagcaagucaauaca

SEQ ID NO: 1961572 - RNA, 19 nt, Artificial Sequence
  Description of Artificial Sequence: Synthetic oligonucleotide
  Sense strand starting at position 3941 of SEQ ID NO: 1880364
agucgaaaugcguauaaug

SEQ ID NO: 1961573 - RNA, 19 nt, Artificial Sequence
  Description of Artificial Sequence: Synthetic oligonucleotide
  Antisense strand to SEQ ID NO: 1961572
cauuauacgcauuucgacu

SEQ ID NO: 1961574 - RNA, 19 nt, Artificial Sequence
  Description of Artificial Sequence: Synthetic oligonucleotide
  Sense strand starting at position 8 of SEQ ID NO: 1880365
augggucgaaauugaaaca

SEQ ID NO: 1961575 - RNA, 19 nt, Artificial Sequence
  Description of Artificial Sequence: Synthetic oligonucleotide
  Antisense strand to SEQ ID NO: 1961574
uguuucaauuucgacccau

SEQ ID NO: 1961576 - RNA, 19 nt, Artificial Sequence
  Description of Artificial Sequence: Synthetic oligonucleotide
  Sense strand starting at position 162 of SEQ ID NO: 1880365
ugcaauaagcagggauaca

SEQ ID NO: 1961577 - RNA, 19 nt, Artificial Sequence
  Description of Artificial Sequence: Synthetic oligonucleotide
  Antisense strand to SEQ ID NO: 1961576
uguaucccugcuuauugca

SEQ ID NO: 1961578 - RNA, 19 nt, Artificial Sequence
  Description of Artificial Sequence: Synthetic oligonucleotide
  Sense strand starting at position 375 of SEQ ID NO: 1880365
auagcagaauuugaucaaa

SEQ ID NO: 1961579 - RNA, 19 nt, Artificial Sequence
  Description of Artificial Sequence: Synthetic oligonucleotide
  Antisense strand to SEQ ID NO: 1961578
uuugaucaaauucugcuau

SEQ ID NO: 1961580 - RNA, 19 nt, Artificial Sequence
  Description of Artificial Sequence: Synthetic oligonucleotide
  Sense strand starting at position 862 of SEQ ID NO: 1880365
ucaagucaugcugaaacaa

SEQ ID NO: 1961581 - RNA, 19 nt, Artificial Sequence
  Description of Artificial Sequence: Synthetic oligonucleotide
  Antisense strand to SEQ ID NO: 1961580
uuguuucagcaugacuuga

SEQ ID NO: 1961582 - RNA, 19 nt, Artificial Sequence
  Description of Artificial Sequence: Synthetic oligonucleotide
  Sense strand starting at position 955 of SEQ ID NO: 1880365
uugagaaguaaugguuaga

SEQ ID NO: 1961583 - RNA, 19 nt, Artificial Sequence
  Description of Artificial Sequence: Synthetic oligonucleotide
  Antisense strand to SEQ ID NO: 1961582
ucuaaccauuacuucucaa

SEQ ID NO: 1961584 - RNA, 19 nt, Artificial Sequence
  Description of Artificial Sequence: Synthetic oligonucleotide
  Sense strand starting at position 1069 of SEQ ID NO: 1880365
gcuaaccuuccagguugau

SEQ ID NO: 1961585 - RNA, 19 nt, Artificial Sequence
  Description of Artificial Sequence: Synthetic oligonucleotide
  Antisense strand to SEQ ID NO: 1961584
aucaaccuggaagguuagc

SEQ ID NO: 1961586 - RNA, 19 nt, Artificial Sequence
  Description of Artificial Sequence: Synthetic oligonucleotide
  Sense strand starting at position 1208 of SEQ ID NO: 1880365
acaaaucaacgcuguauca

SEQ ID NO: 1961587 - RNA, 19 nt, Artificial Sequence
  Description of Artificial Sequence: Synthetic oligonucleotide
  Antisense strand to SEQ ID NO: 1961586
ugauacagcguugauuugu

SEQ ID NO: 1961588 - RNA, 19 nt, Artificial Sequence
  Description of Artificial Sequence: Synthetic oligonucleotide
  Sense strand starting at position 1439 of SEQ ID NO: 1880365
cagcucaaugguuagcaua

SEQ ID NO: 1961589 - RNA, 19 nt, Artificial Sequence
  Description of Artificial Sequence: Synthetic oligonucleotide
  Antisense strand to SEQ ID NO: 1961588
uaugcuaaccauugagcug

SEQ ID NO: 1961590 - RNA, 19 nt, Artificial Sequence
  Description of Artificial Sequence: Synthetic oligonucleotide
  Sense strand starting at position 1441 of SEQ ID NO: 1880365
gcucaaugguuagcauaga

SEQ ID NO: 1961591 - RNA, 19 nt, Artificial Sequence
  Description of Artificial Sequence: Synthetic oligonucleotide
  Antisense strand to SEQ ID NO: 1961590
ucuaugcuaaccauugagc

SEQ ID NO: 1961592 - RNA, 19 nt, Artificial Sequence
  Description of Artificial Sequence: Synthetic oligonucleotide
  Sense strand starting at position 1648 of SEQ ID NO: 1880365
gaaggaagccuccguaucu

SEQ ID NO: 1961593 - RNA, 19 nt, Artificial Sequence
  Description of Artificial Sequence: Synthetic oligonucleotide
  Antisense strand to SEQ ID NO: 1961592
agauacggaggcuuccuuc

SEQ ID NO: 1961594 - RNA, 19 nt, Artificial Sequence
  Description of Artificial Sequence: Synthetic oligonucleotide
  Sense strand starting at position 1694 of SEQ ID NO: 1880365
aaacgugcugggugggaaa

SEQ ID NO: 1961595 - RNA, 19 nt, Artificial Sequence
  Description of Artificial Sequence: Synthetic oligonucleotide
  Antisense strand to SEQ ID NO: 1961594
uuucccacccagcacguuu

SEQ ID NO: 1961596 - RNA, 19 nt, Artificial Sequence
  Description of Artificial Sequence: Synthetic oligonucleotide
  Sense strand starting at position 1807 of SEQ ID NO: 1880365
cucagaagucaggguuauu

SEQ ID NO: 1961597 - RNA, 19 nt, Artificial Sequence
  Description of Artificial Sequence: Synthetic oligonucleotide
  Antisense strand to SEQ ID NO: 1961596
aauaacccugacuucugag

SEQ ID NO: 1961598 - RNA, 19 nt, Artificial Sequence
  Description of Artificial Sequence: Synthetic oligonucleotide
  Sense strand starting at position 1817 of SEQ ID NO: 1880365
aggguuauuccugguccca

SEQ ID NO: 1961599 - RNA, 19 nt, Artificial Sequence
  Description of Artificial Sequence: Synthetic oligonucleotide
  Antisense strand to SEQ ID NO: 1961598
ugggaccaggaauaacccu

SEQ ID NO: 1961600 - RNA, 19 nt, Artificial Sequence
  Description of Artificial Sequence: Synthetic oligonucleotide
  Sense strand starting at position 1819 of SEQ ID NO: 1880365
gguuauuccuggucccaac

SEQ ID NO: 1961601 - RNA, 19 nt, Artificial Sequence
  Description of Artificial Sequence: Synthetic oligonucleotide
  Antisense strand to SEQ ID NO: 1961600
guugggaccaggaauaacc

SEQ ID NO: 1961602 - RNA, 19 nt, Artificial Sequence
  Description of Artificial Sequence: Synthetic oligonucleotide
  Sense strand starting at position 1873 of SEQ ID NO: 1880365
cucauaucucaggguuuau

SEQ ID NO: 1961603 - RNA, 19 nt, Artificial Sequence
  Description of Artificial Sequence: Synthetic oligonucleotide
  Antisense strand to SEQ ID NO: 1961602
auaaacccugagauaugag

SEQ ID NO: 1961604 - RNA, 19 nt, Artificial Sequence
  Description of Artificial Sequence: Synthetic oligonucleotide
  Sense strand starting at position 1888 of SEQ ID NO: 1880365
uuauaaccuuucuucgaga

SEQ ID NO: 1961605 - RNA, 19 nt, Artificial Sequence
  Description of Artificial Sequence: Synthetic oligonucleotide
  Antisense strand to SEQ ID NO: 1961604
ucucgaagaaagguuauaa

SEQ ID NO: 1961606 - RNA, 19 nt, Artificial Sequence
  Description of Artificial Sequence: Synthetic oligonucleotide
  Sense strand starting at position 1890 of SEQ ID NO: 1880365
auaaccuuucuucgagaga

SEQ ID NO: 1961607 - RNA, 19 nt, Artificial Sequence
  Description of Artificial Sequence: Synthetic oligonucleotide
  Antisense strand to SEQ ID NO: 1961606
ucucucgaagaaagguuau

SEQ ID NO: 1961608 - RNA, 19 nt, Artificial Sequence
  Description of Artificial Sequence: Synthetic oligonucleotide
  Sense strand starting at position 1893 of SEQ ID NO: 1880365
accuuucuucgagagacau

SEQ ID NO: 1961609 - RNA, 19 nt, Artificial Sequence
  Description of Artificial Sequence: Synthetic oligonucleotide
  Antisense strand to SEQ ID NO: 1961608
augucucucgaagaaaggu

SEQ ID NO: 1961610 - RNA, 19 nt, Artificial Sequence
  Description of Artificial Sequence: Synthetic oligonucleotide
  Sense strand starting at position 1899 of SEQ ID NO: 1880365
cuucgagagacaugaccuu

SEQ ID NO: 1961611 - RNA, 19 nt, Artificial Sequence
  Description of Artificial Sequence: Synthetic oligonucleotide
  Antisense strand to SEQ ID NO: 1961610
aaggucaugucucucgaag

SEQ ID NO: 1961612 - RNA, 19 nt, Artificial Sequence
  Description of Artificial Sequence: Synthetic oligonucleotide
  Sense strand starting at position 1911 of SEQ ID NO: 1880365
ugaccuuucccaugagacc

SEQ ID NO: 1961613 - RNA, 19 nt, Artificial Sequence
  Description of Artificial Sequence: Synthetic oligonucleotide
  Antisense strand to SEQ ID NO: 1961612
ggucucaugggaaagguca

SEQ ID NO: 1961614 - RNA, 19 nt, Artificial Sequence
  Description of Artificial Sequence: Synthetic oligonucleotide
  Sense strand starting at position 1979 of SEQ ID NO: 1880365
gaagucacgcacuacauau

SEQ ID NO: 1961615 - RNA, 19 nt, Artificial Sequence
  Description of Artificial Sequence: Synthetic oligonucleotide
  Antisense strand to SEQ ID NO: 1961614
auauguagugcgugacuuc

SEQ ID NO: 1961616 - RNA, 19 nt, Artificial Sequence
  Description of Artificial Sequence: Synthetic oligonucleotide
  Sense strand starting at position 2052 of SEQ ID NO: 1880365
gggaauucugggcauugua

SEQ ID NO: 1961617 - RNA, 19 nt, Artificial Sequence
  Description of Artificial Sequence: Synthetic oligonucleotide
  Antisense strand to SEQ ID NO: 1961616
uacaaugcccagaauuccc

SEQ ID NO: 1961618 - RNA, 19 nt, Artificial Sequence
  Description of Artificial Sequence: Synthetic oligonucleotide
  Sense strand starting at position 2065 of SEQ ID NO: 1880365
auuguaguuccucauugag

SEQ ID NO: 1961619 - RNA, 19 nt, Artificial Sequence
  Description of Artificial Sequence: Synthetic oligonucleotide
  Antisense strand to SEQ ID NO: 1961618
cucaaugaggaacuacaau

SEQ ID NO: 1961620 - RNA, 19 nt, Artificial Sequence
  Description of Artificial Sequence: Synthetic oligonucleotide
  Sense strand starting at position 2068 of SEQ ID NO: 1880365
guaguuccucauugaggga

SEQ ID NO: 1961621 - RNA, 19 nt, Artificial Sequence
  Description of Artificial Sequence: Synthetic oligonucleotide
  Antisense strand to SEQ ID NO: 1961620
ucccucaaugaggaacuac

SEQ ID NO: 1961622 - RNA, 19 nt, Artificial Sequence
  Description of Artificial Sequence: Synthetic oligonucleotide
  Sense strand starting at position 2106 of SEQ ID NO: 1880365
gcuuaagcuguugaagaag

SEQ ID NO: 1961623 - RNA, 19 nt, Artificial Sequence
  Description of Artificial Sequence: Synthetic oligonucleotide
  Antisense strand to SEQ ID NO: 1961622
cuucuucaacagcuuaagc

SEQ ID NO: 1961624 - RNA, 19 nt, Artificial Sequence
  Description of Artificial Sequence: Synthetic oligonucleotide
  Sense strand starting at position 2118 of SEQ ID NO: 1880365
gaagaagauauaggucguu

SEQ ID NO: 1961625 - RNA, 19 nt, Artificial Sequence
  Description of Artificial Sequence: Synthetic oligonucleotide
  Antisense strand to SEQ ID NO: 1961624
aacgaccuauaucuucuuc

SEQ ID NO: 1961626 - RNA, 19 nt, Artificial Sequence
  Description of Artificial Sequence: Synthetic oligonucleotide
  Sense strand starting at position 2121 of SEQ ID NO: 1880365
gaagauauaggucguuuag

SEQ ID NO: 1961627 - RNA, 19 nt, Artificial Sequence
  Description of Artificial Sequence: Synthetic oligonucleotide
  Antisense strand to SEQ ID NO: 1961626
cuaaacgaccuauaucuuc

SEQ ID NO: 1961628 - RNA, 19 nt, Artificial Sequence
  Description of Artificial Sequence: Synthetic oligonucleotide
  Sense strand starting at position 2136 of SEQ ID NO: 1880365
uuaggugauucucuacuau

SEQ ID NO: 1961629 - RNA, 19 nt, Artificial Sequence
  Description of Artificial Sequence: Synthetic oligonucleotide
  Antisense strand to SEQ ID NO: 1961628
auaguagagaaucaccuaa

SEQ ID NO: 1961630 - RNA, 19 nt, Artificial Sequence
  Description of Artificial Sequence: Synthetic oligonucleotide
  Sense strand starting at position 2153 of SEQ ID NO: 1880365
aucuaagguuguucuccua

SEQ ID NO: 1961631 - RNA, 19 nt, Artificial Sequence
  Description of Artificial Sequence: Synthetic oligonucleotide
  Antisense strand to SEQ ID NO: 1961630
uaggagaacaaccuuagau

SEQ ID NO: 1961632 - RNA, 19 nt, Artificial Sequence
  Description of Artificial Sequence: Synthetic oligonucleotide
  Sense strand starting at position 2165 of SEQ ID NO: 1880365
ucuccuaguccuuggaagu

SEQ ID NO: 1961633 - RNA, 19 nt, Artificial Sequence
  Description of Artificial Sequence: Synthetic oligonucleotide
  Antisense strand to SEQ ID NO: 1961632
acuuccaaggacuaggaga

SEQ ID NO: 1961634 - RNA, 19 nt, Artificial Sequence
  Description of Artificial Sequence: Synthetic oligonucleotide
  Sense strand starting at position 2290 of SEQ ID NO: 1880365
acgaaauaacucugucgag

SEQ ID NO: 1961635 - RNA, 19 nt, Artificial Sequence
  Description of Artificial Sequence: Synthetic oligonucleotide
  Antisense strand to SEQ ID NO: 1961634
cucgacagaguuauuucgu

SEQ ID NO: 1961636 - RNA, 19 nt, Artificial Sequence
  Description of Artificial Sequence: Synthetic oligonucleotide
  Sense strand starting at position 2297 of SEQ ID NO: 1880365
aacucugucgaguaacuuu

SEQ ID NO: 1961637 - RNA, 19 nt, Artificial Sequence
  Description of Artificial Sequence: Synthetic oligonucleotide
  Antisense strand to SEQ ID NO: 1961636
aaaguuacucgacagaguu

SEQ ID NO: 1961638 - RNA, 19 nt, Artificial Sequence
  Description of Artificial Sequence: Synthetic oligonucleotide
  Sense strand starting at position 2312 of SEQ ID NO: 1880365
cuuugaaaguaugcaaacu

SEQ ID NO: 1961639 - RNA, 19 nt, Artificial Sequence
  Description of Artificial Sequence: Synthetic oligonucleotide
  Antisense strand to SEQ ID NO: 1961638
aguuugcauacuuucaaag

SEQ ID NO: 1961640 - RNA, 19 nt, Artificial Sequence
  Description of Artificial Sequence: Synthetic oligonucleotide
  Sense strand starting at position 2349 of SEQ ID NO: 1880365
acuuaugucguggauaggu

SEQ ID NO: 1961641 - RNA, 19 nt, Artificial Sequence
  Description of Artificial Sequence: Synthetic oligonucleotide
  Antisense strand to SEQ ID NO: 1961640
accuauccacgacauaagu

SEQ ID NO: 1961642 - RNA, 19 nt, Artificial Sequence
  Description of Artificial Sequence: Synthetic oligonucleotide
  Sense strand starting at position 2474 of SEQ ID NO: 1880365
guggaaugcuuaccaaagu

SEQ ID NO: 1961643 - RNA, 19 nt, Artificial Sequence
  Description of Artificial Sequence: Synthetic oligonucleotide
  Antisense strand to SEQ ID NO: 1961642
acuuugguaagcauuccac

SEQ ID NO: 1961644 - RNA, 19 nt, Artificial Sequence
  Description of Artificial Sequence: Synthetic oligonucleotide
  Sense strand starting at position 2531 of SEQ ID NO: 1880365
aaaguaaggcucuaaaggu

SEQ ID NO: 1961645 - RNA, 19 nt, Artificial Sequence
  Description of Artificial Sequence: Synthetic oligonucleotide
  Antisense strand to SEQ ID NO: 1961644
accuuuagagccuuacuuu

SEQ ID NO: 1961646 - RNA, 19 nt, Artificial Sequence
  Description of Artificial Sequence: Synthetic oligonucleotide
  Sense strand starting at position 2548 of SEQ ID NO: 1880365
guaccaaacugauauuugu

SEQ ID NO: 1961647 - RNA, 19 nt, Artificial Sequence
  Description of Artificial Sequence: Synthetic oligonucleotide
  Antisense strand to SEQ ID NO: 1961646
acaaauaucaguuugguac

SEQ ID NO: 1961648 - RNA, 19 nt, Artificial Sequence
  Description of Artificial Sequence: Synthetic oligonucleotide
  Sense strand starting at position 2555 of SEQ ID NO: 1880365
acugauauuuguuggaaua

SEQ ID NO: 1961649 - RNA, 19 nt, Artificial Sequence
  Description of Artificial Sequence: Synthetic oligonucleotide
  Antisense strand to SEQ ID NO: 1961648
uauuccaacaaauaucagu

SEQ ID NO: 1961650 - RNA, 19 nt, Artificial Sequence
  Description of Artificial Sequence: Synthetic oligonucleotide
  Sense strand starting at position 2557 of SEQ ID NO: 1880365
ugauauuuguuggaauaug

SEQ ID NO: 1961651 - RNA, 19 nt, Artificial Sequence
  Description of Artificial Sequence: Synthetic oligonucleotide
  Antisense strand to SEQ ID NO: 1961650
cauauuccaacaaauauca

SEQ ID NO: 1961652 - RNA, 19 nt, Artificial Sequence
  Description of Artificial Sequence: Synthetic oligonucleotide
  Sense strand starting at position 2569 of SEQ ID NO: 1880365
gaauaugcugugcaacuuu

SEQ ID NO: 1961653 - RNA, 19 nt, Artificial Sequence
  Description of Artificial Sequence: Synthetic oligonucleotide
  Antisense strand to SEQ ID NO: 1961652
aaaguugcacagcauauuc

SEQ ID NO: 1961654 - RNA, 19 nt, Artificial Sequence
  Description of Artificial Sequence: Synthetic oligonucleotide
  Sense strand starting at position 152 of SEQ ID NO: 1880366
gagaauaaagagugugagu

SEQ ID NO: 1961655 - RNA, 19 nt, Artificial Sequence
  Description of Artificial Sequence: Synthetic oligonucleotide
  Antisense strand to SEQ ID NO: 1961654
acucacacucuuuauucuc

SEQ ID NO: 1961656 - RNA, 19 nt, Artificial Sequence
  Description of Artificial Sequence: Synthetic oligonucleotide
  Sense strand starting at position 154 of SEQ ID NO: 1880366
gaauaaagagugugaguug

SEQ ID NO: 1961657 - RNA, 19 nt, Artificial Sequence
  Description of Artificial Sequence: Synthetic oligonucleotide
  Antisense strand to SEQ ID NO: 1961656
caacucacacucuuuauuc

SEQ ID NO: 1961658 - RNA, 19 nt, Artificial Sequence
  Description of Artificial Sequence: Synthetic oligonucleotide
  Sense strand starting at position 157 of SEQ ID NO: 1880366
uaaagagugugaguugaac

SEQ ID NO: 1961659 - RNA, 19 nt, Artificial Sequence
  Description of Artificial Sequence: Synthetic oligonucleotide
  Antisense strand to SEQ ID NO: 1961658
guucaacucacacucuuua

SEQ ID NO: 1961660 - RNA, 19 nt, Artificial Sequence
  Description of Artificial Sequence: Synthetic oligonucleotide
  Sense strand starting at position 169 of SEQ ID NO: 1880366
guugaacucgugccauugu

SEQ ID NO: 1961661 - RNA, 19 nt, Artificial Sequence
  Description of Artificial Sequence: Synthetic oligonucleotide
  Antisense strand to SEQ ID NO: 1961660
acaauggcacgaguucaac

SEQ ID NO: 1961662 - RNA, 19 nt, Artificial Sequence
  Description of Artificial Sequence: Synthetic oligonucleotide
  Sense strand starting at position 189 of SEQ ID NO: 1880366
gugacucaucucgggcaga

SEQ ID NO: 1961663 - RNA, 19 nt, Artificial Sequence
  Description of Artificial Sequence: Synthetic oligonucleotide
  Antisense strand to SEQ ID NO: 1961662
ucugcccgagaugagucac

SEQ ID NO: 1961664 - RNA, 19 nt, Artificial Sequence
  Description of Artificial Sequence: Synthetic oligonucleotide
  Sense strand starting at position 1596 of SEQ ID NO: 1880366
cccguucuccaucagucau

SEQ ID NO: 1961665 - RNA, 19 nt, Artificial Sequence
  Description of Artificial Sequence: Synthetic oligonucleotide
  Antisense strand to SEQ ID NO: 1961664
augacugauggagaacggg

SEQ ID NO: 1961666 - RNA, 19 nt, Artificial Sequence
  Description of Artificial Sequence: Synthetic oligonucleotide
  Sense strand starting at position 1598 of SEQ ID NO: 1880366
cguucuccaucagucauaa

SEQ ID NO: 1961667 - RNA, 19 nt, Artificial Sequence
  Description of Artificial Sequence: Synthetic oligonucleotide
  Antisense strand to SEQ ID NO: 1961666
uuaugacugauggagaacg

SEQ ID NO: 1961668 - RNA, 19 nt, Artificial Sequence
  Description of Artificial Sequence: Synthetic oligonucleotide
  Sense strand starting at position 1642 of SEQ ID NO: 1880366
ccagaaacaugguuggacu

SEQ ID NO: 1961669 - RNA, 19 nt, Artificial Sequence
  Description of Artificial Sequence: Synthetic oligonucleotide
  Antisense strand to SEQ ID NO: 1961668
aguccaaccauguuucugg

SEQ ID NO: 1961670 - RNA, 19 nt, Artificial Sequence
  Description of Artificial Sequence: Synthetic oligonucleotide
  Sense strand starting at position 1795 of SEQ ID NO: 1880366
acccgucuucuguaaggau

SEQ ID NO: 1961671 - RNA, 19 nt, Artificial Sequence
  Description of Artificial Sequence: Synthetic oligonucleotide
  Antisense strand to SEQ ID NO: 1961670
auccuuacagaagacgggu

SEQ ID NO: 1961672 - RNA, 19 nt, Artificial Sequence
  Description of Artificial Sequence: Synthetic oligonucleotide
  Sense strand starting at position 2010 of SEQ ID NO: 1880366
gugcgugugaucucugugu

SEQ ID NO: 1961673 - RNA, 19 nt, Artificial Sequence
  Description of Artificial Sequence: Synthetic oligonucleotide
  Antisense strand to SEQ ID NO: 1961672
acacagagaucacacgcac

SEQ ID NO: 1961674 - RNA, 19 nt, Artificial Sequence
  Description of Artificial Sequence: Synthetic oligonucleotide
  Sense strand starting at position 2017 of SEQ ID NO: 1880366
ugaucucuguguuuauaaa

SEQ ID NO: 1961675 - RNA, 19 nt, Artificial Sequence
  Description of Artificial Sequence: Synthetic oligonucleotide
  Antisense strand to SEQ ID NO: 1961674
uuuauaaacacagagauca

SEQ ID NO: 1961676 - RNA, 19 nt, Artificial Sequence
  Description of Artificial Sequence: Synthetic oligonucleotide
  Sense strand starting at position 2171 of SEQ ID NO: 1880366
aucuguggagucuagcaua

SEQ ID NO: 1961677 - RNA, 19 nt, Artificial Sequence
  Description of Artificial Sequence: Synthetic oligonucleotide
  Antisense strand to SEQ ID NO: 1961676
uaugcuagacuccacagau

SEQ ID NO: 1961678 - RNA, 19 nt, Artificial Sequence
  Description of Artificial Sequence: Synthetic oligonucleotide
  Sense strand starting at position 2205 of SEQ ID NO: 1880366
ggaugcucaugcuccauaa

SEQ ID NO: 1961679 - RNA, 19 nt, Artificial Sequence
  Description of Artificial Sequence: Synthetic oligonucleotide
  Antisense strand to SEQ ID NO: 1961678
uuauggagcaugagcaucc

SEQ ID NO: 1961680 - RNA, 19 nt, Artificial Sequence
  Description of Artificial Sequence: Synthetic oligonucleotide
  Sense strand starting at position 2274 of SEQ ID NO: 1880366
guggacucagcuggaaaga

SEQ ID NO: 1961681 - RNA, 19 nt, Artificial Sequence
  Description of Artificial Sequence: Synthetic oligonucleotide
  Antisense strand to SEQ ID NO: 1961680
ucuuuccagcugaguccac

SEQ ID NO: 1961682 - RNA, 19 nt, Artificial Sequence
  Description of Artificial Sequence: Synthetic oligonucleotide
  Sense strand starting at position 2338 of SEQ ID NO: 1880366
guuccaaagugauucccua

SEQ ID NO: 1961683 - RNA, 19 nt, Artificial Sequence
  Description of Artificial Sequence: Synthetic oligonucleotide
  Antisense strand to SEQ ID NO: 1961682
uagggaaucacuuuggaac

SEQ ID NO: 1961684 - RNA, 19 nt, Artificial Sequence
  Description of Artificial Sequence: Synthetic oligonucleotide
  Sense strand starting at position 2521 of SEQ ID NO: 1880366
ugauuauguuugcuuccca

SEQ ID NO: 1961685 - RNA, 19 nt, Artificial Sequence
  Description of Artificial Sequence: Synthetic oligonucleotide
  Antisense strand to SEQ ID NO: 1961684
ugggaagcaaacauaauca

SEQ ID NO: 1961686 - RNA, 19 nt, Artificial Sequence
  Description of Artificial Sequence: Synthetic oligonucleotide
  Sense strand starting at position 2549 of SEQ ID NO: 1880366
gugguuuguguugaaugua

SEQ ID NO: 1961687 - RNA, 19 nt, Artificial Sequence
  Description of Artificial Sequence: Synthetic oligonucleotide
  Antisense strand to SEQ ID NO: 1961686
uacauucaacacaaaccac

SEQ ID NO: 1961688 - RNA, 19 nt, Artificial Sequence
  Description of Artificial Sequence: Synthetic oligonucleotide
  Sense strand starting at position 2552 of SEQ ID NO: 1880366
guuuguguugaauguaaac

SEQ ID NO: 1961689 - RNA, 19 nt, Artificial Sequence
  Description of Artificial Sequence: Synthetic oligonucleotide
  Antisense strand to SEQ ID NO: 1961688
guuuacauucaacacaaac

SEQ ID NO: 1961690 - RNA, 19 nt, Artificial Sequence
  Description of Artificial Sequence: Synthetic oligonucleotide
  Sense strand starting at position 2678 of SEQ ID NO: 1880366
ugauuucuucucuguucuu

SEQ ID NO: 1961691 - RNA, 19 nt, Artificial Sequence
  Description of Artificial Sequence: Synthetic oligonucleotide
  Antisense strand to SEQ ID NO: 1961690
aagaacagagaagaaauca

SEQ ID NO: 1961692 - RNA, 19 nt, Artificial Sequence
  Description of Artificial Sequence: Synthetic oligonucleotide
  Sense strand starting at position 2714 of SEQ ID NO: 1880366
agcagugaucauuggagua

SEQ ID NO: 1961693 - RNA, 19 nt, Artificial Sequence
  Description of Artificial Sequence: Synthetic oligonucleotide
  Antisense strand to SEQ ID NO: 1961692
uacuccaaugaucacugcu

SEQ ID NO: 1961694 - RNA, 19 nt, Artificial Sequence
  Description of Artificial Sequence: Synthetic oligonucleotide
  Sense strand starting at position 2806 of SEQ ID NO: 1880366
acugaauaaucugugucac

SEQ ID NO: 1961695 - RNA, 19 nt, Artificial Sequence
  Description of Artificial Sequence: Synthetic oligonucleotide
  Antisense strand to SEQ ID NO: 1961694
gugacacagauuauucagu

SEQ ID NO: 1961696 - RNA, 19 nt, Artificial Sequence
  Description of Artificial Sequence: Synthetic oligonucleotide
  Sense strand starting at position 2807 of SEQ ID NO: 1880366
cugaauaaucugugucacu

SEQ ID NO: 1961697 - RNA, 19 nt, Artificial Sequence
  Description of Artificial Sequence: Synthetic oligonucleotide
  Antisense strand to SEQ ID NO: 1961696
agugacacagauuauucag

SEQ ID NO: 1961698 - RNA, 19 nt, Artificial Sequence
  Description of Artificial Sequence: Synthetic oligonucleotide
  Sense strand starting at position 2808 of SEQ ID NO: 1880366
ugaauaaucugugucacua

SEQ ID NO: 1961699 - RNA, 19 nt, Artificial Sequence
  Description of Artificial Sequence: Synthetic oligonucleotide
  Antisense strand to SEQ ID NO: 1961698
uagugacacagauuauuca

SEQ ID NO: 1961700 - RNA, 19 nt, Artificial Sequence
  Description of Artificial Sequence: Synthetic oligonucleotide
  Sense strand starting at position 2919 of SEQ ID NO: 1880366
aguccagcagaguguaaua

SEQ ID NO: 1961701 - RNA, 19 nt, Artificial Sequence
  Description of Artificial Sequence: Synthetic oligonucleotide
  Antisense strand to SEQ ID NO: 1961700
uauuacacucugcuggacu

SEQ ID NO: 1961702 - RNA, 19 nt, Artificial Sequence
  Description of Artificial Sequence: Synthetic oligonucleotide
  Sense strand starting at position 2978 of SEQ ID NO: 1880366
ccuagcaugcuguaacaca

SEQ ID NO: 1961703 - RNA, 19 nt, Artificial Sequence
  Description of Artificial Sequence: Synthetic oligonucleotide
  Antisense strand to SEQ ID NO: 1961702
uguguuacagcaugcuagg

SEQ ID NO: 1961704 - RNA, 19 nt, Artificial Sequence
  Description of Artificial Sequence: Synthetic oligonucleotide
  Sense strand starting at position 2986 of SEQ ID NO: 1880366
gcuguaacacaugaguauu

SEQ ID NO: 1961705 - RNA, 19 nt, Artificial Sequence
  Description of Artificial Sequence: Synthetic oligonucleotide
  Antisense strand to SEQ ID NO: 1961704
aauacucauguguuacagc

SEQ ID NO: 1961706 - RNA, 19 nt, Artificial Sequence
  Description of Artificial Sequence: Synthetic oligonucleotide
  Sense strand starting at position 3104 of SEQ ID NO: 1880366
gguaaugccacuugagaca

SEQ ID NO: 1961707 - RNA, 19 nt, Artificial Sequence
  Description of Artificial Sequence: Synthetic oligonucleotide
  Antisense strand to SEQ ID NO: 1961706
ugucucaaguggcauuacc

SEQ ID NO: 1961708 - RNA, 19 nt, Artificial Sequence
  Description of Artificial Sequence: Synthetic oligonucleotide
  Sense strand starting at position 3266 of SEQ ID NO: 1880366
ucacaagucuaugcuauga

SEQ ID NO: 1961709 - RNA, 19 nt, Artificial Sequence
  Description of Artificial Sequence: Synthetic oligonucleotide
  Antisense strand to SEQ ID NO: 1961708
ucauagcauagacuuguga

SEQ ID NO: 1961710 - RNA, 19 nt, Artificial Sequence
  Description of Artificial Sequence: Synthetic oligonucleotide
  Sense strand starting at position 3292 of SEQ ID NO: 1880366
cgaucuugggcucaaggua

SEQ ID NO: 1961711 - RNA, 19 nt, Artificial Sequence
  Description of Artificial Sequence: Synthetic oligonucleotide
  Antisense strand to SEQ ID NO: 1961710
uaccuugagcccaagaucg

SEQ ID NO: 1961712 - RNA, 19 nt, Artificial Sequence
  Description of Artificial Sequence: Synthetic oligonucleotide
  Sense strand starting at position 3437 of SEQ ID NO: 1880366
augagacaguucucugguu

SEQ ID NO: 1961713 - RNA, 19 nt, Artificial Sequence
  Description of Artificial Sequence: Synthetic oligonucleotide
  Antisense strand to SEQ ID NO: 1961712
aaccagagaacugucucau

SEQ ID NO: 1961714 - RNA, 19 nt, Artificial Sequence
  Description of Artificial Sequence: Synthetic oligonucleotide
  Sense strand starting at position 3438 of SEQ ID NO: 1880366
ugagacaguucucugguuu

SEQ ID NO: 1961715 - RNA, 19 nt, Artificial Sequence
  Description of Artificial Sequence: Synthetic oligonucleotide
  Antisense strand to SEQ ID NO: 1961714
aaaccagagaacugucuca

SEQ ID NO: 1961716 - RNA, 19 nt, Artificial Sequence
  Description of Artificial Sequence: Synthetic oligonucleotide
  Sense strand starting at position 3503 of SEQ ID NO: 1880366
gguccaauauuccugauua

SEQ ID NO: 1961717 - RNA, 19 nt, Artificial Sequence
  Description of Artificial Sequence: Synthetic oligonucleotide
  Antisense strand to SEQ ID NO: 1961716
uaaucaggaauauuggacc

SEQ ID NO: 1961718 - RNA, 19 nt, Artificial Sequence
  Description of Artificial Sequence: Synthetic oligonucleotide
  Sense strand starting at position 3625 of SEQ ID NO: 1880366
ggagcagacuagucuuugu

SEQ ID NO: 1961719 - RNA, 19 nt, Artificial Sequence
  Description of Artificial Sequence: Synthetic oligonucleotide
  Antisense strand to SEQ ID NO: 1961718
acaaagacuagucugcucc

SEQ ID NO: 1961720 - RNA, 19 nt, Artificial Sequence
  Description of Artificial Sequence: Synthetic oligonucleotide
  Sense strand starting at position 3630 of SEQ ID NO: 1880366
agacuagucuuuguuacag

SEQ ID NO: 1961721 - RNA, 19 nt, Artificial Sequence
  Description of Artificial Sequence: Synthetic oligonucleotide
  Antisense strand to SEQ ID NO: 1961720
cuguaacaaagacuagucu

SEQ ID NO: 1961722 - RNA, 19 nt, Artificial Sequence
  Description of Artificial Sequence: Synthetic oligonucleotide
  Sense strand starting at position 3658 of SEQ ID NO: 1880366
uuauauauggcaggaacuu

SEQ ID NO: 1961723 - RNA, 19 nt, Artificial Sequence
  Description of Artificial Sequence: Synthetic oligonucleotide
  Antisense strand to SEQ ID NO: 1961722
aaguuccugccauauauaa

SEQ ID NO: 1961724 - RNA, 19 nt, Artificial Sequence
  Description of Artificial Sequence: Synthetic oligonucleotide
  Sense strand starting at position 3716 of SEQ ID NO: 1880366
aucucaaagguuggucauu

SEQ ID NO: 1961725 - RNA, 19 nt, Artificial Sequence
  Description of Artificial Sequence: Synthetic oligonucleotide
  Antisense strand to SEQ ID NO: 1961724
aaugaccaaccuuugagau

SEQ ID NO: 1961726 - RNA, 19 nt, Artificial Sequence
  Description of Artificial Sequence: Synthetic oligonucleotide
  Sense strand starting at position 3721 of SEQ ID NO: 1880366
aaagguuggucauugguga

SEQ ID NO: 1961727 - RNA, 19 nt, Artificial Sequence
  Description of Artificial Sequence: Synthetic oligonucleotide
  Antisense strand to SEQ ID NO: 1961726
ucaccaaugaccaaccuuu

SEQ ID NO: 1961728 - RNA, 19 nt, Artificial Sequence
  Description of Artificial Sequence: Synthetic oligonucleotide
  Sense strand starting at position 3722 of SEQ ID NO: 1880366
aagguuggucauuggugau

SEQ ID NO: 1961729 - RNA, 19 nt, Artificial Sequence
  Description of Artificial Sequence: Synthetic oligonucleotide
  Antisense strand to SEQ ID NO: 1961728
aucaccaaugaccaaccuu

SEQ ID NO: 1961730 - RNA, 19 nt, Artificial Sequence
  Description of Artificial Sequence: Synthetic oligonucleotide
  Sense strand starting at position 3874 of SEQ ID NO: 1880366
guuucagggccugagcauu

SEQ ID NO: 1961731 - RNA, 19 nt, Artificial Sequence
  Description of Artificial Sequence: Synthetic oligonucleotide
  Antisense strand to SEQ ID NO: 1961730
aaugcucaggcccugaaac

SEQ ID NO: 1961732 - RNA, 19 nt, Artificial Sequence
  Description of Artificial Sequence: Synthetic oligonucleotide
  Sense strand starting at position 3880 of SEQ ID NO: 1880366
gggccugagcauuacgcaa

SEQ ID NO: 1961733 - RNA, 19 nt, Artificial Sequence
  Description of Artificial Sequence: Synthetic oligonucleotide
  Antisense strand to SEQ ID NO: 1961732
uugcguaaugcucaggccc

SEQ ID NO: 1961734 - RNA, 19 nt, Artificial Sequence
  Description of Artificial Sequence: Synthetic oligonucleotide
  Sense strand starting at position 71 of SEQ ID NO: 1880367
ccuggaaagucucagauaa

SEQ ID NO: 1961735 - RNA, 19 nt, Artificial Sequence
  Description of Artificial Sequence: Synthetic oligonucleotide
  Antisense strand to SEQ ID NO: 1961734
uuaucugagacuuuccagg

SEQ ID NO: 1961736 - RNA, 19 nt, Artificial Sequence
  Description of Artificial Sequence: Synthetic oligonucleotide
  Sense strand starting at position 73 of SEQ ID NO: 1880367
uggaaagucucagauaaag

SEQ ID NO: 1961737 - RNA, 19 nt, Artificial Sequence
  Description of Artificial Sequence: Synthetic oligonucleotide
  Antisense strand to SEQ ID NO: 1961736
cuuuaucugagacuuucca

SEQ ID NO: 1961738 - RNA, 19 nt, Artificial Sequence
  Description of Artificial Sequence: Synthetic oligonucleotide
  Sense strand starting at position 268 of SEQ ID NO: 1880367
cagagugaauuuggauguu

SEQ ID NO: 1961739 - RNA, 19 nt, Artificial Sequence
  Description of Artificial Sequence: Synthetic oligonucleotide
  Antisense strand to SEQ ID NO: 1961738
aacauccaaauucacucug

SEQ ID NO: 1961740 - RNA, 19 nt, Artificial Sequence
  Description of Artificial Sequence: Synthetic oligonucleotide
  Sense strand starting at position 463 of SEQ ID NO: 1880367
ucugcaguuacguuguauu

SEQ ID NO: 1961741 - RNA, 19 nt, Artificial Sequence
  Description of Artificial Sequence: Synthetic oligonucleotide
  Antisense strand to SEQ ID NO: 1961740
aauacaacguaacugcaga

SEQ ID NO: 1961742 - RNA, 19 nt, Artificial Sequence
  Description of Artificial Sequence: Synthetic oligonucleotide
  Sense strand starting at position 466 of SEQ ID NO: 1880367
gcaguuacguuguauugua

SEQ ID NO: 1961743 - RNA, 19 nt, Artificial Sequence
  Description of Artificial Sequence: Synthetic oligonucleotide
  Antisense strand to SEQ ID NO: 1961742
uacaauacaacguaacugc

SEQ ID NO: 1961744 - RNA, 19 nt, Artificial Sequence
  Description of Artificial Sequence: Synthetic oligonucleotide
  Sense strand starting at position 480 of SEQ ID NO: 1880367
uuguauuugcuuugucaca

SEQ ID NO: 1961745 - RNA, 19 nt, Artificial Sequence
  Description of Artificial Sequence: Synthetic oligonucleotide
  Antisense strand to SEQ ID NO: 1961744
ugugacaaagcaaauacaa

SEQ ID NO: 1961746 - RNA, 19 nt, Artificial Sequence
  Description of Artificial Sequence: Synthetic oligonucleotide
  Sense strand starting at position 485 of SEQ ID NO: 1880367
uuugcuuugucacacauca

SEQ ID NO: 1961747 - RNA, 19 nt, Artificial Sequence
  Description of Artificial Sequence: Synthetic oligonucleotide
  Antisense strand to SEQ ID NO: 1961746
ugaugugugacaaagcaaa

SEQ ID NO: 1961748 - RNA, 19 nt, Artificial Sequence
  Description of Artificial Sequence: Synthetic oligonucleotide
  Sense strand starting at position 514 of SEQ ID NO: 1880367
cuaucaacucucggucuga

SEQ ID NO: 1961749 - RNA, 19 nt, Artificial Sequence
  Description of Artificial Sequence: Synthetic oligonucleotide
  Antisense strand to SEQ ID NO: 1961748
ucagaccgagaguugauag

SEQ ID NO: 1961750 - RNA, 19 nt, Artificial Sequence
  Description of Artificial Sequence: Synthetic oligonucleotide
  Sense strand starting at position 515 of SEQ ID NO: 1880367
uaucaacucucggucugaa

SEQ ID NO: 1961751 - RNA, 19 nt, Artificial Sequence
  Description of Artificial Sequence: Synthetic oligonucleotide
  Antisense strand to SEQ ID NO: 1961750
uucagaccgagaguugaua

SEQ ID NO: 1961752 - RNA, 19 nt, Artificial Sequence
  Description of Artificial Sequence: Synthetic oligonucleotide
  Sense strand starting at position 518 of SEQ ID NO: 1880367
caacucucggucugaaaug

SEQ ID NO: 1961753 - RNA, 19 nt, Artificial Sequence
  Description of Artificial Sequence: Synthetic oligonucleotide
  Antisense strand to SEQ ID NO: 1961752
cauuucagaccgagaguug

SEQ ID NO: 1961754 - RNA, 19 nt, Artificial Sequence
  Description of Artificial Sequence: Synthetic oligonucleotide
  Sense strand starting at position 912 of SEQ ID NO: 1880367
ggaacucaaucaguuguga

SEQ ID NO: 1961755 - RNA, 19 nt, Artificial Sequence
  Description of Artificial Sequence: Synthetic oligonucleotide
  Antisense strand to SEQ ID NO: 1961754
ucacaacugauugaguucc

SEQ ID NO: 1961756 - RNA, 19 nt, Artificial Sequence
  Description of Artificial Sequence: Synthetic oligonucleotide
  Sense strand starting at position 917 of SEQ ID NO: 1880367
ucaaucaguugugaugguu

SEQ ID NO: 1961757 - RNA, 19 nt, Artificial Sequence
  Description of Artificial Sequence: Synthetic oligonucleotide
  Antisense strand to SEQ ID NO: 1961756
aaccaucacaacugauuga

SEQ ID NO: 1961758 - RNA, 19 nt, Artificial Sequence
  Description of Artificial Sequence: Synthetic oligonucleotide
  Sense strand starting at position 926 of SEQ ID NO: 1880367
ugugaugguuugucacaga

SEQ ID NO: 1961759 - RNA, 19 nt, Artificial Sequence
  Description of Artificial Sequence: Synthetic oligonucleotide
  Antisense strand to SEQ ID NO: 1961758
ucugugacaaaccaucaca

SEQ ID NO: 1961760 - RNA, 19 nt, Artificial Sequence
  Description of Artificial Sequence: Synthetic oligonucleotide
  Sense strand starting at position 999 of SEQ ID NO: 1880367
gcuggagguaucugagcaa

SEQ ID NO: 1961761 - RNA, 19 nt, Artificial Sequence
  Description of Artificial Sequence: Synthetic oligonucleotide
  Antisense strand to SEQ ID NO: 1961760
uugcucagauaccuccagc

SEQ ID NO: 1961762 - RNA, 19 nt, Artificial Sequence
  Description of Artificial Sequence: Synthetic oligonucleotide
  Sense strand starting at position 1002 of SEQ ID NO: 1880367
ggagguaucugagcaaacu

SEQ ID NO: 1961763 - RNA, 19 nt, Artificial Sequence
  Description of Artificial Sequence: Synthetic oligonucleotide
  Antisense strand to SEQ ID NO: 1961762
aguuugcucagauaccucc

SEQ ID NO: 1961764 - RNA, 19 nt, Artificial Sequence
  Description of Artificial Sequence: Synthetic oligonucleotide
  Sense strand starting at position 1301 of SEQ ID NO: 1880367
ugcucaucuuuaccaggaa

SEQ ID NO: 1961765 - RNA, 19 nt, Artificial Sequence
  Description of Artificial Sequence: Synthetic oligonucleotide
  Antisense strand to SEQ ID NO: 1961764
uuccugguaaagaugagca

SEQ ID NO: 1961766 - RNA, 19 nt, Artificial Sequence
  Description of Artificial Sequence: Synthetic oligonucleotide
  Sense strand starting at position 1302 of SEQ ID NO: 1880367
gcucaucuuuaccaggaaa

SEQ ID NO: 1961767 - RNA, 19 nt, Artificial Sequence
  Description of Artificial Sequence: Synthetic oligonucleotide
  Antisense strand to SEQ ID NO: 1961766
uuuccugguaaagaugagc

SEQ ID NO: 1961768 - RNA, 19 nt, Artificial Sequence
  Description of Artificial Sequence: Synthetic oligonucleotide
  Sense strand starting at position 1858 of SEQ ID NO: 1880367
ugcugccucccucauagaa

SEQ ID NO: 1961769 - RNA, 19 nt, Artificial Sequence
  Description of Artificial Sequence: Synthetic oligonucleotide
  Antisense strand to SEQ ID NO: 1961768
uucuaugagggaggcagca

SEQ ID NO: 1961770 - RNA, 19 nt, Artificial Sequence
  Description of Artificial Sequence: Synthetic oligonucleotide
  Sense strand starting at position 1912 of SEQ ID NO: 1880367
gugcgagcucagugguuca

SEQ ID NO: 1961771 - RNA, 19 nt, Artificial Sequence
  Description of Artificial Sequence: Synthetic oligonucleotide
  Antisense strand to SEQ ID NO: 1961770
ugaaccacugagcucgcac

SEQ ID NO: 1961772 - RNA, 19 nt, Artificial Sequence
  Description of Artificial Sequence: Synthetic oligonucleotide
  Sense strand starting at position 1985 of SEQ ID NO: 1880367
agggcuuugucugcacuua

SEQ ID NO: 1961773 - RNA, 19 nt, Artificial Sequence
  Description of Artificial Sequence: Synthetic oligonucleotide
  Antisense strand to SEQ ID NO: 1961772
uaagugcagacaaagcccu

SEQ ID NO: 1961774 - RNA, 19 nt, Artificial Sequence
  Description of Artificial Sequence: Synthetic oligonucleotide
  Sense strand starting at position 2064 of SEQ ID NO: 1880367
cguggaaggaacugugaau

SEQ ID NO: 1961775 - RNA, 19 nt, Artificial Sequence
  Description of Artificial Sequence: Synthetic oligonucleotide
  Antisense strand to SEQ ID NO: 1961774
auucacaguuccuuccacg

SEQ ID NO: 1961776 - RNA, 19 nt, Artificial Sequence
  Description of Artificial Sequence: Synthetic oligonucleotide
  Sense strand starting at position 2269 of SEQ ID NO: 1880367
cccucagauucucacuguu

SEQ ID NO: 1961777 - RNA, 19 nt, Artificial Sequence
  Description of Artificial Sequence: Synthetic oligonucleotide
  Antisense strand to SEQ ID NO: 1961776
aacagugagaaucugaggg

SEQ ID NO: 1961778 - RNA, 19 nt, Artificial Sequence
  Description of Artificial Sequence: Synthetic oligonucleotide
  Sense strand starting at position 2326 of SEQ ID NO: 1880367
cacuuaaucuugccgguaa

SEQ ID NO: 1961779 - RNA, 19 nt, Artificial Sequence
  Description of Artificial Sequence: Synthetic oligonucleotide
  Antisense strand to SEQ ID NO: 1961778
uuaccggcaagauuaagug

SEQ ID NO: 1961780 - RNA, 19 nt, Artificial Sequence
  Description of Artificial Sequence: Synthetic oligonucleotide
  Sense strand starting at position 2327 of SEQ ID NO: 1880367
acuuaaucuugccgguaag

SEQ ID NO: 1961781 - RNA, 19 nt, Artificial Sequence
  Description of Artificial Sequence: Synthetic oligonucleotide
  Antisense strand to SEQ ID NO: 1961780
cuuaccggcaagauuaagu

SEQ ID NO: 1961782 - RNA, 19 nt, Artificial Sequence
  Description of Artificial Sequence: Synthetic oligonucleotide
  Sense strand starting at position 2365 of SEQ ID NO: 1880367
guagaauggcguuggaaag

SEQ ID NO: 1961783 - RNA, 19 nt, Artificial Sequence
  Description of Artificial Sequence: Synthetic oligonucleotide
  Antisense strand to SEQ ID NO: 1961782
cuuuccaacgccauucuac

SEQ ID NO: 1961784 - RNA, 19 nt, Artificial Sequence
  Description of Artificial Sequence: Synthetic oligonucleotide
  Sense strand starting at position 2408 of SEQ ID NO: 1880367
agcagagugcugugugaac

SEQ ID NO: 1961785 - RNA, 19 nt, Artificial Sequence
  Description of Artificial Sequence: Synthetic oligonucleotide
  Antisense strand to SEQ ID NO: 1961784
guucacacagcacucugcu

SEQ ID NO: 1961786 - RNA, 19 nt, Artificial Sequence
  Description of Artificial Sequence: Synthetic oligonucleotide
  Sense strand starting at position 2419 of SEQ ID NO: 1880367
gugugaacgcucuggguuu

SEQ ID NO: 1961787 - RNA, 19 nt, Artificial Sequence
  Description of Artificial Sequence: Synthetic oligonucleotide
  Antisense strand to SEQ ID NO: 1961786
aaacccagagcguucacac

SEQ ID NO: 1961788 - RNA, 19 nt, Artificial Sequence
  Description of Artificial Sequence: Synthetic oligonucleotide
  Sense strand starting at position 2446 of SEQ ID NO: 1880367
aguggauguuccuagugca

SEQ ID NO: 1961789 - RNA, 19 nt, Artificial Sequence
  Description of Artificial Sequence: Synthetic oligonucleotide
  Antisense strand to SEQ ID NO: 1961788
ugcacuaggaacauccacu

SEQ ID NO: 1961790 - RNA, 19 nt, Artificial Sequence
  Description of Artificial Sequence: Synthetic oligonucleotide
  Sense strand starting at position 2449 of SEQ ID NO: 1880367
ggauguuccuagugcauug

SEQ ID NO: 1961791 - RNA, 19 nt, Artificial Sequence
  Description of Artificial Sequence: Synthetic oligonucleotide
  Antisense strand to SEQ ID NO: 1961790
caaugcacuaggaacaucc

SEQ ID NO: 1961792 - RNA, 19 nt, Artificial Sequence
  Description of Artificial Sequence: Synthetic oligonucleotide
  Sense strand starting at position 2504 of SEQ ID NO: 1880367
ccgccaucguucccaaaca

SEQ ID NO: 1961793 - RNA, 19 nt, Artificial Sequence
  Description of Artificial Sequence: Synthetic oligonucleotide
  Antisense strand to SEQ ID NO: 1961792
uguuugggaacgauggcgg

SEQ ID NO: 1961794 - RNA, 19 nt, Artificial Sequence
  Description of Artificial Sequence: Synthetic oligonucleotide
  Sense strand starting at position 2505 of SEQ ID NO: 1880367
cgccaucguucccaaacaa

SEQ ID NO: 1961795 - RNA, 19 nt, Artificial Sequence
  Description of Artificial Sequence: Synthetic oligonucleotide
  Antisense strand to SEQ ID NO: 1961794
uuguuugggaacgauggcg

SEQ ID NO: 1961796 - RNA, 19 nt, Artificial Sequence
  Description of Artificial Sequence: Synthetic oligonucleotide
  Sense strand starting at position 2538 of SEQ ID NO: 1880367
acugaugccugauccacaa

SEQ ID NO: 1961797 - RNA, 19 nt, Artificial Sequence
  Description of Artificial Sequence: Synthetic oligonucleotide
  Antisense strand to SEQ ID NO: 1961796
uuguggaucaggcaucagu

SEQ ID NO: 1961798 - RNA, 19 nt, Artificial Sequence
  Description of Artificial Sequence: Synthetic oligonucleotide
  Sense strand starting at position 2773 of SEQ ID NO: 1880367
cguggcaucuagucaggaa

SEQ ID NO: 1961799 - RNA, 19 nt, Artificial Sequence
  Description of Artificial Sequence: Synthetic oligonucleotide
  Antisense strand to SEQ ID NO: 1961798
uuccugacuagaugccacg

SEQ ID NO: 1961800 - RNA, 19 nt, Artificial Sequence
  Description of Artificial Sequence: Synthetic oligonucleotide
  Sense strand starting at position 3499 of SEQ ID NO: 1880367
gggcaaaugaucuggcuga

SEQ ID NO: 1961801 - RNA, 19 nt, Artificial Sequence
  Description of Artificial Sequence: Synthetic oligonucleotide
  Antisense strand to SEQ ID NO: 1961800
ucagccagaucauuugccc

SEQ ID NO: 1961802 - RNA, 19 nt, Artificial Sequence
  Description of Artificial Sequence: Synthetic oligonucleotide
  Sense strand starting at position 3503 of SEQ ID NO: 1880367
aaaugaucuggcugaggga

SEQ ID NO: 1961803 - RNA, 19 nt, Artificial Sequence
  Description of Artificial Sequence: Synthetic oligonucleotide
  Antisense strand to SEQ ID NO: 1961802
ucccucagccagaucauuu

SEQ ID NO: 1961804 - RNA, 19 nt, Artificial Sequence
  Description of Artificial Sequence: Synthetic oligonucleotide
  Sense strand starting at position 3675 of SEQ ID NO: 1880367
ccgguaaucccuugagcug

SEQ ID NO: 1961805 - RNA, 19 nt, Artificial Sequence
  Description of Artificial Sequence: Synthetic oligonucleotide
  Antisense strand to SEQ ID NO: 1961804
cagcucaagggauuaccgg

SEQ ID NO: 1961806 - RNA, 19 nt, Artificial Sequence
  Description of Artificial Sequence: Synthetic oligonucleotide
  Sense strand starting at position 3702 of SEQ ID NO: 1880367
uggccuagucuggguuaga

SEQ ID NO: 1961807 - RNA, 19 nt, Artificial Sequence
  Description of Artificial Sequence: Synthetic oligonucleotide
  Antisense strand to SEQ ID NO: 1961806
ucuaacccagacuaggcca

SEQ ID NO: 1961808 - RNA, 19 nt, Artificial Sequence
  Description of Artificial Sequence: Synthetic oligonucleotide
  Sense strand starting at position 3703 of SEQ ID NO: 1880367
ggccuagucuggguuagag

SEQ ID NO: 1961809 - RNA, 19 nt, Artificial Sequence
  Description of Artificial Sequence: Synthetic oligonucleotide
  Antisense strand to SEQ ID NO: 1961808
cucuaacccagacuaggcc

SEQ ID NO: 1961810 - RNA, 19 nt, Artificial Sequence
  Description of Artificial Sequence: Synthetic oligonucleotide
  Sense strand starting at position 3705 of SEQ ID NO: 1880367
ccuagucuggguuagagga

SEQ ID NO: 1961811 - RNA, 19 nt, Artificial Sequence
  Description of Artificial Sequence: Synthetic oligonucleotide
  Antisense strand to SEQ ID NO: 1961810
uccucuaacccagacuagg

SEQ ID NO: 1961812 - RNA, 19 nt, Artificial Sequence
  Description of Artificial Sequence: Synthetic oligonucleotide
  Sense strand starting at position 1 of SEQ ID NO: 1880368
uuucucugucuauaaagua

SEQ ID NO: 1961813 - RNA, 19 nt, Artificial Sequence
  Description of Artificial Sequence: Synthetic oligonucleotide
  Antisense strand to SEQ ID NO: 1961812
uacuuuauagacagagaaa

SEQ ID NO: 1961814 - RNA, 19 nt, Artificial Sequence
  Description of Artificial Sequence: Synthetic oligonucleotide
  Sense strand starting at position 39 of SEQ ID NO: 1880368
gagauuuauugagagcauc

SEQ ID NO: 1961815 - RNA, 19 nt, Artificial Sequence
  Description of Artificial Sequence: Synthetic oligonucleotide
  Antisense strand to SEQ ID NO: 1961814
gaugcucucaauaaaucuc

SEQ ID NO: 1961816 - RNA, 19 nt, Artificial Sequence
  Description of Artificial Sequence: Synthetic oligonucleotide
  Sense strand starting at position 61 of SEQ ID NO: 1880368
ugagauaauccaugcagag

SEQ ID NO: 1961817 - RNA, 19 nt, Artificial Sequence
  Description of Artificial Sequence: Synthetic oligonucleotide
  Antisense strand to SEQ ID NO: 1961816
cucugcauggauuaucuca

SEQ ID NO: 1961818 - RNA, 19 nt, Artificial Sequence
  Description of Artificial Sequence: Synthetic oligonucleotide
  Sense strand starting at position 471 of SEQ ID NO: 1880368
gggcauugguggguggaga

SEQ ID NO: 1961819 - RNA, 19 nt, Artificial Sequence
  Description of Artificial Sequence: Synthetic oligonucleotide
  Antisense strand to SEQ ID NO: 1961818
ucuccacccaccaaugccc

SEQ ID NO: 1961820 - RNA, 19 nt, Artificial Sequence
  Description of Artificial Sequence: Synthetic oligonucleotide
  Sense strand starting at position 555 of SEQ ID NO: 1880368
ccaugcaaguccucacaga

SEQ ID NO: 1961821 - RNA, 19 nt, Artificial Sequence
  Description of Artificial Sequence: Synthetic oligonucleotide
  Antisense strand to SEQ ID NO: 1961820
ucugugaggacuugcaugg

SEQ ID NO: 1961822 - RNA, 19 nt, Artificial Sequence
  Description of Artificial Sequence: Synthetic oligonucleotide
  Sense strand starting at position 683 of SEQ ID NO: 1880368
aucgaacagugaccucaaa

SEQ ID NO: 1961823 - RNA, 19 nt, Artificial Sequence
  Description of Artificial Sequence: Synthetic oligonucleotide
  Antisense strand to SEQ ID NO: 1961822
uuugaggucacuguucgau

SEQ ID NO: 1961824 - RNA, 19 nt, Artificial Sequence
  Description of Artificial Sequence: Synthetic oligonucleotide
  Sense strand starting at position 841 of SEQ ID NO: 1880368
cgaauuagugaacgaugga

SEQ ID NO: 1961825 - RNA, 19 nt, Artificial Sequence
  Description of Artificial Sequence: Synthetic oligonucleotide
  Antisense strand to SEQ ID NO: 1961824
uccaucguucacuaauucg

SEQ ID NO: 1961826 - RNA, 19 nt, Artificial Sequence
  Description of Artificial Sequence: Synthetic oligonucleotide
  Sense strand starting at position 844 of SEQ ID NO: 1880368
auuagugaacgauggacau

SEQ ID NO: 1961827 - RNA, 19 nt, Artificial Sequence
  Description of Artificial Sequence: Synthetic oligonucleotide
  Antisense strand to SEQ ID NO: 1961826
auguccaucguucacuaau

SEQ ID NO: 1961828 - RNA, 19 nt, Artificial Sequence
  Description of Artificial Sequence: Synthetic oligonucleotide
  Sense strand starting at position 1112 of SEQ ID NO: 1880368
cacuaugagccgugggaga

SEQ ID NO: 1961829 - RNA, 19 nt, Artificial Sequence
  Description of Artificial Sequence: Synthetic oligonucleotide
  Antisense strand to SEQ ID NO: 1961828
ucucccacggcucauagug

SEQ ID NO: 1961830 - RNA, 19 nt, Artificial Sequence
  Description of Artificial Sequence: Synthetic oligonucleotide
  Sense strand starting at position 1114 of SEQ ID NO: 1880368
cuaugagccgugggagaaa

SEQ ID NO: 1961831 - RNA, 19 nt, Artificial Sequence
  Description of Artificial Sequence: Synthetic oligonucleotide
  Antisense strand to SEQ ID NO: 1961830
uuucucccacggcucauag

SEQ ID NO: 1961832 - RNA, 19 nt, Artificial Sequence
  Description of Artificial Sequence: Synthetic oligonucleotide
  Sense strand starting at position 1133 of SEQ ID NO: 1880368
uuugaaagggcuuggauca

SEQ ID NO: 1961833 - RNA, 19 nt, Artificial Sequence
  Description of Artificial Sequence: Synthetic oligonucleotide
  Antisense strand to SEQ ID NO: 1961832
ugauccaagcccuuucaaa

SEQ ID NO: 1961834 - RNA, 19 nt, Artificial Sequence
  Description of Artificial Sequence: Synthetic oligonucleotide
  Sense strand starting at position 1166 of SEQ ID NO: 1880368
gagggugguccugacaucu

SEQ ID NO: 1961835 - RNA, 19 nt, Artificial Sequence
  Description of Artificial Sequence: Synthetic oligonucleotide
  Antisense strand to SEQ ID NO: 1961834
agaugucaggaccacccuc

SEQ ID NO: 1961836 - RNA, 19 nt, Artificial Sequence
  Description of Artificial Sequence: Synthetic oligonucleotide
  Sense strand starting at position 1200 of SEQ ID NO: 1880368
uuaaacaugggcuauguau

SEQ ID NO: 1961837 - RNA, 19 nt, Artificial Sequence
  Description of Artificial Sequence: Synthetic oligonucleotide
  Antisense strand to SEQ ID NO: 1961836
auacauagcccauguuuaa

SEQ ID NO: 1961838 - RNA, 19 nt, Artificial Sequence
  Description of Artificial Sequence: Synthetic oligonucleotide
  Sense strand starting at position 1202 of SEQ ID NO: 1880368
aaacaugggcuauguauga

SEQ ID NO: 1961839 - RNA, 19 nt, Artificial Sequence
  Description of Artificial Sequence: Synthetic oligonucleotide
  Antisense strand to SEQ ID NO: 1961838
ucauacauagcccauguuu

SEQ ID NO: 1961840 - RNA, 19 nt, Artificial Sequence
  Description of Artificial Sequence: Synthetic oligonucleotide
  Sense strand starting at position 1302 of SEQ ID NO: 1880368
acaacagcacugugaguua

SEQ ID NO: 1961841 - RNA, 19 nt, Artificial Sequence
  Description of Artificial Sequence: Synthetic oligonucleotide
  Antisense strand to SEQ ID NO: 1961840
uaacucacagugcuguugu

SEQ ID NO: 1961842 - RNA, 19 nt, Artificial Sequence
  Description of Artificial Sequence: Synthetic oligonucleotide
  Sense strand starting at position 1305 of SEQ ID NO: 1880368
acagcacugugaguuagaa

SEQ ID NO: 1961843 - RNA, 19 nt, Artificial Sequence
  Description of Artificial Sequence: Synthetic oligonucleotide
  Antisense strand to SEQ ID NO: 1961842
uucuaacucacagugcugu

SEQ ID NO: 1961844 - RNA, 19 nt, Artificial Sequence
  Description of Artificial Sequence: Synthetic oligonucleotide
  Sense strand starting at position 1307 of SEQ ID NO: 1880368
agcacugugaguuagaagu

SEQ ID NO: 1961845 - RNA, 19 nt, Artificial Sequence
  Description of Artificial Sequence: Synthetic oligonucleotide
  Antisense strand to SEQ ID NO: 1961844
acuucuaacucacagugcu

SEQ ID NO: 1961846 - RNA, 19 nt, Artificial Sequence
  Description of Artificial Sequence: Synthetic oligonucleotide
  Sense strand starting at position 1388 of SEQ ID NO: 1880368
aggacuagugagugacaga

SEQ ID NO: 1961847 - RNA, 19 nt, Artificial Sequence
  Description of Artificial Sequence: Synthetic oligonucleotide
  Antisense strand to SEQ ID NO: 1961846
ucugucacucacuaguccu

SEQ ID NO: 1961848 - RNA, 19 nt, Artificial Sequence
  Description of Artificial Sequence: Synthetic oligonucleotide
  Sense strand starting at position 1426 of SEQ ID NO: 1880368
agucuauguguuuaaccac

SEQ ID NO: 1961849 - RNA, 19 nt, Artificial Sequence
  Description of Artificial Sequence: Synthetic oligonucleotide
  Antisense strand to SEQ ID NO: 1961848
gugguuaaacacauagacu

SEQ ID NO: 1961850 - RNA, 19 nt, Artificial Sequence
  Description of Artificial Sequence: Synthetic oligonucleotide
  Sense strand starting at position 1433 of SEQ ID NO: 1880368
guguuuaaccacuacacca

SEQ ID NO: 1961851 - RNA, 19 nt, Artificial Sequence
  Description of Artificial Sequence: Synthetic oligonucleotide
  Antisense strand to SEQ ID NO: 1961850
ugguguagugguuaaacac

SEQ ID NO: 1961852 - RNA, 19 nt, Artificial Sequence
  Description of Artificial Sequence: Synthetic oligonucleotide
  Sense strand starting at position 1504 of SEQ ID NO: 1880368
gagauuagauucucuuuag

SEQ ID NO: 1961853 - RNA, 19 nt, Artificial Sequence
  Description of Artificial Sequence: Synthetic oligonucleotide
  Antisense strand to SEQ ID NO: 1961852
cuaaagagaaucuaaucuc

SEQ ID NO: 1961854 - RNA, 19 nt, Artificial Sequence
  Description of Artificial Sequence: Synthetic oligonucleotide
  Sense strand starting at position 1507 of SEQ ID NO: 1880368
auuagauucucuuuaggau

SEQ ID NO: 1961855 - RNA, 19 nt, Artificial Sequence
  Description of Artificial Sequence: Synthetic oligonucleotide
  Antisense strand to SEQ ID NO: 1961854
auccuaaagagaaucuaau

SEQ ID NO: 1961856 - RNA, 19 nt, Artificial Sequence
  Description of Artificial Sequence: Synthetic oligonucleotide
  Sense strand starting at position 1703 of SEQ ID NO: 1880368
ggaagauccuggucuccaa

SEQ ID NO: 1961857 - RNA, 19 nt, Artificial Sequence
  Description of Artificial Sequence: Synthetic oligonucleotide
  Antisense strand to SEQ ID NO: 1961856
uuggagaccaggaucuucc

SEQ ID NO: 1961858 - RNA, 19 nt, Artificial Sequence
  Description of Artificial Sequence: Synthetic oligonucleotide
  Sense strand starting at position 1721 of SEQ ID NO: 1880368
agggcuguacccuacugau

SEQ ID NO: 1961859 - RNA, 19 nt, Artificial Sequence
  Description of Artificial Sequence: Synthetic oligonucleotide
  Antisense strand to SEQ ID NO: 1961858
aucaguaggguacagcccu

SEQ ID NO: 1961860 - RNA, 19 nt, Artificial Sequence
  Description of Artificial Sequence: Synthetic oligonucleotide
  Sense strand starting at position 1731 of SEQ ID NO: 1880368
ccuacugauccggaggcaa

SEQ ID NO: 1961861 - RNA, 19 nt, Artificial Sequence
  Description of Artificial Sequence: Synthetic oligonucleotide
  Antisense strand to SEQ ID NO: 1961860
uugccuccggaucaguagg

SEQ ID NO: 1961862 - RNA, 19 nt, Artificial Sequence
  Description of Artificial Sequence: Synthetic oligonucleotide
  Sense strand starting at position 1788 of SEQ ID NO: 1880368
uacucuucggcagaagcau

SEQ ID NO: 1961863 - RNA, 19 nt, Artificial Sequence
  Description of Artificial Sequence: Synthetic oligonucleotide
  Antisense strand to SEQ ID NO: 1961862
augcuucugccgaagagua

SEQ ID NO: 1961864 - RNA, 19 nt, Artificial Sequence
  Description of Artificial Sequence: Synthetic oligonucleotide
  Sense strand starting at position 1856 of SEQ ID NO: 1880368
uauaucagagucugaagau

SEQ ID NO: 1961865 - RNA, 19 nt, Artificial Sequence
  Description of Artificial Sequence: Synthetic oligonucleotide
  Antisense strand to SEQ ID NO: 1961864
aucuucagacucugauaua

SEQ ID NO: 1961866 - RNA, 19 nt, Artificial Sequence
  Description of Artificial Sequence: Synthetic oligonucleotide
  Sense strand starting at position 1896 of SEQ ID NO: 1880368
agggaauuccuuugaaucu

SEQ ID NO: 1961867 - RNA, 19 nt, Artificial Sequence
  Description of Artificial Sequence: Synthetic oligonucleotide
  Antisense strand to SEQ ID NO: 1961866
agauucaaaggaauucccu

SEQ ID NO: 1961868 - RNA, 19 nt, Artificial Sequence
  Description of Artificial Sequence: Synthetic oligonucleotide
  Sense strand starting at position 2120 of SEQ ID NO: 1880368
ggagaaguucuaggcaauu

SEQ ID NO: 1961869 - RNA, 19 nt, Artificial Sequence
  Description of Artificial Sequence: Synthetic oligonucleotide
  Antisense strand to SEQ ID NO: 1961868
aauugccuagaacuucucc

SEQ ID NO: 1961870 - RNA, 19 nt, Artificial Sequence
  Description of Artificial Sequence: Synthetic oligonucleotide
  Sense strand starting at position 2347 of SEQ ID NO: 1880368
uuuguaaguuacucauaca

SEQ ID NO: 1961871 - RNA, 19 nt, Artificial Sequence
  Description of Artificial Sequence: Synthetic oligonucleotide
  Antisense strand to SEQ ID NO: 1961870
uguaugaguaacuuacaaa

SEQ ID NO: 1961872 - RNA, 19 nt, Artificial Sequence
  Description of Artificial Sequence: Synthetic oligonucleotide
  Sense strand starting at position 2477 of SEQ ID NO: 1880368
uccugcuagagauggcaaa

SEQ ID NO: 1961873 - RNA, 19 nt, Artificial Sequence
  Description of Artificial Sequence: Synthetic oligonucleotide
  Antisense strand to SEQ ID NO: 1961872
uuugccaucucuagcagga

SEQ ID NO: 1961874 - RNA, 19 nt, Artificial Sequence
  Description of Artificial Sequence: Synthetic oligonucleotide
  Sense strand starting at position 2601 of SEQ ID NO: 1880368
augacugguuagucuugau

SEQ ID NO: 1961875 - RNA, 19 nt, Artificial Sequence
  Description of Artificial Sequence: Synthetic oligonucleotide
  Antisense strand to SEQ ID NO: 1961874
aucaagacuaaccagucau

SEQ ID NO: 1961876 - RNA, 19 nt, Artificial Sequence
  Description of Artificial Sequence: Synthetic oligonucleotide
  Sense strand starting at position 2617 of SEQ ID NO: 1880368
gaucguaagccauauaauc

SEQ ID NO: 1961877 - RNA, 19 nt, Artificial Sequence
  Description of Artificial Sequence: Synthetic oligonucleotide
  Antisense strand to SEQ ID NO: 1961876
gauuauauggcuuacgauc

SEQ ID NO: 1961878 - RNA, 19 nt, Artificial Sequence
  Description of Artificial Sequence: Synthetic oligonucleotide
  Sense strand starting at position 2727 of SEQ ID NO: 1880368
auaagcuuccaggaugcaa

SEQ ID NO: 1961879 - RNA, 19 nt, Artificial Sequence
  Description of Artificial Sequence: Synthetic oligonucleotide
  Antisense strand to SEQ ID NO: 1961878
uugcauccuggaagcuuau

SEQ ID NO: 1961880 - RNA, 19 nt, Artificial Sequence
  Description of Artificial Sequence: Synthetic oligonucleotide
  Sense strand starting at position 2958 of SEQ ID NO: 1880368
gcagcaaggagucagaauu

SEQ ID NO: 1961881 - RNA, 19 nt, Artificial Sequence
  Description of Artificial Sequence: Synthetic oligonucleotide
  Antisense strand to SEQ ID NO: 1961880
aauucugacuccuugcugc

SEQ ID NO: 1961882 - RNA, 19 nt, Artificial Sequence
  Description of Artificial Sequence: Synthetic oligonucleotide
  Sense strand starting at position 3030 of SEQ ID NO: 1880368
aggucagccacggagaaau

SEQ ID NO: 1961883 - RNA, 19 nt, Artificial Sequence
  Description of Artificial Sequence: Synthetic oligonucleotide
  Antisense strand to SEQ ID NO: 1961882
auuucuccguggcugaccu

SEQ ID NO: 1961884 - RNA, 19 nt, Artificial Sequence
  Description of Artificial Sequence: Synthetic oligonucleotide
  Sense strand starting at position 3032 of SEQ ID NO: 1880368
gucagccacggagaaauua

SEQ ID NO: 1961885 - RNA, 19 nt, Artificial Sequence
  Description of Artificial Sequence: Synthetic oligonucleotide
  Antisense strand to SEQ ID NO: 1961884
uaauuucuccguggcugac

SEQ ID NO: 1961886 - RNA, 19 nt, Artificial Sequence
  Description of Artificial Sequence: Synthetic oligonucleotide
  Sense strand starting at position 3138 of SEQ ID NO: 1880368
gcaugacugcgggagcaaa

SEQ ID NO: 1961887 - RNA, 19 nt, Artificial Sequence
  Description of Artificial Sequence: Synthetic oligonucleotide
  Antisense strand to SEQ ID NO: 1961886
uuugcucccgcagucaugc

SEQ ID NO: 1961888 - RNA, 19 nt, Artificial Sequence
  Description of Artificial Sequence: Synthetic oligonucleotide
  Sense strand starting at position 3223 of SEQ ID NO: 1880368
ggacaagucacaggugcaa

SEQ ID NO: 1961889 - RNA, 19 nt, Artificial Sequence
  Description of Artificial Sequence: Synthetic oligonucleotide
  Antisense strand to SEQ ID NO: 1961888
uugcaccugugacuugucc

SEQ ID NO: 1961890 - RNA, 19 nt, Artificial Sequence
  Description of Artificial Sequence: Synthetic oligonucleotide
  Sense strand starting at position 3276 of SEQ ID NO: 1880368
gcaagaucucccgcagcgu

SEQ ID NO: 1961891 - RNA, 19 nt, Artificial Sequence
  Description of Artificial Sequence: Synthetic oligonucleotide
  Antisense strand to SEQ ID NO: 1961890
acgcugcgggagaucuugc

SEQ ID NO: 1961892 - RNA, 19 nt, Artificial Sequence
  Description of Artificial Sequence: Synthetic oligonucleotide
  Sense strand starting at position 150 of SEQ ID NO: 1880369
aggcauagauccguagaaa

SEQ ID NO: 1961893 - RNA, 19 nt, Artificial Sequence
  Description of Artificial Sequence: Synthetic oligonucleotide
  Antisense strand to SEQ ID NO: 1961892
uuucuacggaucuaugccu

SEQ ID NO: 1961894 - RNA, 19 nt, Artificial Sequence
  Description of Artificial Sequence: Synthetic oligonucleotide
  Sense strand starting at position 151 of SEQ ID NO: 1880369
ggcauagauccguagaaau

SEQ ID NO: 1961895 - RNA, 19 nt, Artificial Sequence
  Description of Artificial Sequence: Synthetic oligonucleotide
  Antisense strand to SEQ ID NO: 1961894
auuucuacggaucuaugcc

SEQ ID NO: 1961896 - RNA, 19 nt, Artificial Sequence
  Description of Artificial Sequence: Synthetic oligonucleotide
  Sense strand starting at position 230 of SEQ ID NO: 1880369
uuggcugucuaacccauua

SEQ ID NO: 1961897 - RNA, 19 nt, Artificial Sequence
  Description of Artificial Sequence: Synthetic oligonucleotide
  Antisense strand to SEQ ID NO: 1961896
uaauggguuagacagccaa

SEQ ID NO: 1961898 - RNA, 19 nt, Artificial Sequence
  Description of Artificial Sequence: Synthetic oligonucleotide
  Sense strand starting at position 410 of SEQ ID NO: 1880369
ggacuugaccucggucaca

SEQ ID NO: 1961899 - RNA, 19 nt, Artificial Sequence
  Description of Artificial Sequence: Synthetic oligonucleotide
  Antisense strand to SEQ ID NO: 1961898
ugugaccgaggucaagucc

SEQ ID NO: 1961900 - RNA, 19 nt, Artificial Sequence
  Description of Artificial Sequence: Synthetic oligonucleotide
  Sense strand starting at position 457 of SEQ ID NO: 1880369
gauccauggucauccaaag

SEQ ID NO: 1961901 - RNA, 19 nt, Artificial Sequence
  Description of Artificial Sequence: Synthetic oligonucleotide
  Antisense strand to SEQ ID NO: 1961900
cuuuggaugaccauggauc

SEQ ID NO: 1961902 - RNA, 19 nt, Artificial Sequence
  Description of Artificial Sequence: Synthetic oligonucleotide
  Sense strand starting at position 630 of SEQ ID NO: 1880369
cggcucaucccagaaggau

SEQ ID NO: 1961903 - RNA, 19 nt, Artificial Sequence
  Description of Artificial Sequence: Synthetic oligonucleotide
  Antisense strand to SEQ ID NO: 1961902
auccuucugggaugagccg

SEQ ID NO: 1961904 - RNA, 19 nt, Artificial Sequence
  Description of Artificial Sequence: Synthetic oligonucleotide
  Sense strand starting at position 645 of SEQ ID NO: 1880369
ggauacuuggcauagccau

SEQ ID NO: 1961905 - RNA, 19 nt, Artificial Sequence
  Description of Artificial Sequence: Synthetic oligonucleotide
  Antisense strand to SEQ ID NO: 1961904
auggcuaugccaaguaucc

SEQ ID NO: 1961906 - RNA, 19 nt, Artificial Sequence
  Description of Artificial Sequence: Synthetic oligonucleotide
  Sense strand starting at position 1163 of SEQ ID NO: 1880369
gagccagggagcugagauu

SEQ ID NO: 1961907 - RNA, 19 nt, Artificial Sequence
  Description of Artificial Sequence: Synthetic oligonucleotide
  Antisense strand to SEQ ID NO: 1961906
aaucucagcucccuggcuc

SEQ ID NO: 1961908 - RNA, 19 nt, Artificial Sequence
  Description of Artificial Sequence: Synthetic oligonucleotide
  Sense strand starting at position 1275 of SEQ ID NO: 1880369
ggcugaaacauuugcugca

SEQ ID NO: 1961909 - RNA, 19 nt, Artificial Sequence
  Description of Artificial Sequence: Synthetic oligonucleotide
  Antisense strand to SEQ ID NO: 1961908
ugcagcaaauguuucagcc

SEQ ID NO: 1961910 - RNA, 19 nt, Artificial Sequence
  Description of Artificial Sequence: Synthetic oligonucleotide
  Sense strand starting at position 1399 of SEQ ID NO: 1880369
gcacgugucaugcuguguu

SEQ ID NO: 1961911 - RNA, 19 nt, Artificial Sequence
  Description of Artificial Sequence: Synthetic oligonucleotide
  Antisense strand to SEQ ID NO: 1961910
aacacagcaugacacgugc

SEQ ID NO: 1961912 - RNA, 19 nt, Artificial Sequence
  Description of Artificial Sequence: Synthetic oligonucleotide
  Sense strand starting at position 1428 of SEQ ID NO: 1880369
gcagaaagccacuguugga

SEQ ID NO: 1961913 - RNA, 19 nt, Artificial Sequence
  Description of Artificial Sequence: Synthetic oligonucleotide
  Antisense strand to SEQ ID NO: 1961912
uccaacaguggcuuucugc

SEQ ID NO: 1961914 - RNA, 19 nt, Artificial Sequence
  Description of Artificial Sequence: Synthetic oligonucleotide
  Sense strand starting at position 1532 of SEQ ID NO: 1880369
cgaguaagauaaucuacau

SEQ ID NO: 1961915 - RNA, 19 nt, Artificial Sequence
  Description of Artificial Sequence: Synthetic oligonucleotide
  Antisense strand to SEQ ID NO: 1961914
auguagauuaucuuacucg

SEQ ID NO: 1961916 - RNA, 19 nt, Artificial Sequence
  Description of Artificial Sequence: Synthetic oligonucleotide
  Sense strand starting at position 1560 of SEQ ID NO: 1880369
uuguaugggaucugaugau

SEQ ID NO: 1961917 - RNA, 19 nt, Artificial Sequence
  Description of Artificial Sequence: Synthetic oligonucleotide
  Antisense strand to SEQ ID NO: 1961916
aucaucagaucccauacaa

SEQ ID NO: 1961918 - RNA, 19 nt, Artificial Sequence
  Description of Artificial Sequence: Synthetic oligonucleotide
  Sense strand starting at position 1596 of SEQ ID NO: 1880369
aucagauaaugugcaacau

SEQ ID NO: 1961919 - RNA, 19 nt, Artificial Sequence
  Description of Artificial Sequence: Synthetic oligonucleotide
  Antisense strand to SEQ ID NO: 1961918
auguugcacauuaucugau

SEQ ID NO: 1961920 - RNA, 19 nt, Artificial Sequence
  Description of Artificial Sequence: Synthetic oligonucleotide
  Sense strand starting at position 1605 of SEQ ID NO: 1880369
ugugcaacaugcuuugaca

SEQ ID NO: 1961921 - RNA, 19 nt, Artificial Sequence
  Description of Artificial Sequence: Synthetic oligonucleotide
  Antisense strand to SEQ ID NO: 1961920
ugucaaagcauguugcaca

SEQ ID NO: 1961922 - RNA, 19 nt, Artificial Sequence
  Description of Artificial Sequence: Synthetic oligonucleotide
  Sense strand starting at position 1607 of SEQ ID NO: 1880369
ugcaacaugcuuugacaca

SEQ ID NO: 1961923 - RNA, 19 nt, Artificial Sequence
  Description of Artificial Sequence: Synthetic oligonucleotide
  Antisense strand to SEQ ID NO: 1961922
ugugucaaagcauguugca

SEQ ID NO: 1961924 - RNA, 19 nt, Artificial Sequence
  Description of Artificial Sequence: Synthetic oligonucleotide
  Sense strand starting at position 1767 of SEQ ID NO: 1880369
gggccuuccauguagaaga

SEQ ID NO: 1961925 - RNA, 19 nt, Artificial Sequence
  Description of Artificial Sequence: Synthetic oligonucleotide
  Antisense strand to SEQ ID NO: 1961924
ucuucuacauggaaggccc

SEQ ID NO: 1961926 - RNA, 19 nt, Artificial Sequence
  Description of Artificial Sequence: Synthetic oligonucleotide
  Sense strand starting at position 1769 of SEQ ID NO: 1880369
gccuuccauguagaagaaa

SEQ ID NO: 1961927 - RNA, 19 nt, Artificial Sequence
  Description of Artificial Sequence: Synthetic oligonucleotide
  Antisense strand to SEQ ID NO: 1961926
uuucuucuacauggaaggc

SEQ ID NO: 1961928 - RNA, 19 nt, Artificial Sequence
  Description of Artificial Sequence: Synthetic oligonucleotide
  Sense strand starting at position 1852 of SEQ ID NO: 1880369
cugaacgugcagugaauaa

SEQ ID NO: 1961929 - RNA, 19 nt, Artificial Sequence
  Description of Artificial Sequence: Synthetic oligonucleotide
  Antisense strand to SEQ ID NO: 1961928
uuauucacugcacguucag

SEQ ID NO: 1961930 - RNA, 19 nt, Artificial Sequence
  Description of Artificial Sequence: Synthetic oligonucleotide
  Sense strand starting at position 1856 of SEQ ID NO: 1880369
acgugcagugaauaacaua

SEQ ID NO: 1961931 - RNA, 19 nt, Artificial Sequence
  Description of Artificial Sequence: Synthetic oligonucleotide
  Antisense strand to SEQ ID NO: 1961930
uauguuauucacugcacgu

SEQ ID NO: 1961932 - RNA, 19 nt, Artificial Sequence
  Description of Artificial Sequence: Synthetic oligonucleotide
  Sense strand starting at position 1984 of SEQ ID NO: 1880369
gggugacagcuuggaauga

SEQ ID NO: 1961933 - RNA, 19 nt, Artificial Sequence
  Description of Artificial Sequence: Synthetic oligonucleotide
  Antisense strand to SEQ ID NO: 1961932
ucauuccaagcugucaccc

SEQ ID NO: 1961934 - RNA, 19 nt, Artificial Sequence
  Description of Artificial Sequence: Synthetic oligonucleotide
  Sense strand starting at position 2093 of SEQ ID NO: 1880369
aggacuagugcguauagga

SEQ ID NO: 1961935 - RNA, 19 nt, Artificial Sequence
  Description of Artificial Sequence: Synthetic oligonucleotide
  Antisense strand to SEQ ID NO: 1961934
uccuauacgcacuaguccu

SEQ ID NO: 1961936 - RNA, 19 nt, Artificial Sequence
  Description of Artificial Sequence: Synthetic oligonucleotide
  Sense strand starting at position 2321 of SEQ ID NO: 1880369
uuaacagaagcuuagcuaa

SEQ ID NO: 1961937 - RNA, 19 nt, Artificial Sequence
  Description of Artificial Sequence: Synthetic oligonucleotide
  Antisense strand to SEQ ID NO: 1961936
uuagcuaagcuucuguuaa

SEQ ID NO: 1961938 - RNA, 19 nt, Artificial Sequence
  Description of Artificial Sequence: Synthetic oligonucleotide
  Sense strand starting at position 2357 of SEQ ID NO: 1880369
ucaggucuccagugaggga

SEQ ID NO: 1961939 - RNA, 19 nt, Artificial Sequence
  Description of Artificial Sequence: Synthetic oligonucleotide
  Antisense strand to SEQ ID NO: 1961938
ucccucacuggagaccuga

SEQ ID NO: 1961940 - RNA, 19 nt, Artificial Sequence
  Description of Artificial Sequence: Synthetic oligonucleotide
  Sense strand starting at position 2379 of SEQ ID NO: 1880369
ucagguuucaggugcggaa

SEQ ID NO: 1961941 - RNA, 19 nt, Artificial Sequence
  Description of Artificial Sequence: Synthetic oligonucleotide
  Antisense strand to SEQ ID NO: 1961940
uuccgcaccugaaaccuga

SEQ ID NO: 1961942 - RNA, 19 nt, Artificial Sequence
  Description of Artificial Sequence: Synthetic oligonucleotide
  Sense strand starting at position 2817 of SEQ ID NO: 1880369
gccacauguccugucguuu

SEQ ID NO: 1961943 - RNA, 19 nt, Artificial Sequence
  Description of Artificial Sequence: Synthetic oligonucleotide
  Antisense strand to SEQ ID NO: 1961942
aaacgacaggacauguggc

SEQ ID NO: 1961944 - RNA, 19 nt, Artificial Sequence
  Description of Artificial Sequence: Synthetic oligonucleotide
  Sense strand starting at position 2920 of SEQ ID NO: 1880369
gggugagacugcuugaggu

SEQ ID NO: 1961945 - RNA, 19 nt, Artificial Sequence
  Description of Artificial Sequence: Synthetic oligonucleotide
  Antisense strand to SEQ ID NO: 1961944
accucaagcagucucaccc

SEQ ID NO: 1961946 - RNA, 19 nt, Artificial Sequence
  Description of Artificial Sequence: Synthetic oligonucleotide
  Sense strand starting at position 2926 of SEQ ID NO: 1880369
gacugcuugaggugggaaa

SEQ ID NO: 1961947 - RNA, 19 nt, Artificial Sequence
  Description of Artificial Sequence: Synthetic oligonucleotide
  Antisense strand to SEQ ID NO: 1961946
uuucccaccucaagcaguc

SEQ ID NO: 1961948 - RNA, 19 nt, Artificial Sequence
  Description of Artificial Sequence: Synthetic oligonucleotide
  Sense strand starting at position 2927 of SEQ ID NO: 1880369
acugcuugaggugggaaau

SEQ ID NO: 1961949 - RNA, 19 nt, Artificial Sequence
  Description of Artificial Sequence: Synthetic oligonucleotide
  Antisense strand to SEQ ID NO: 1961948
auuucccaccucaagcagu

SEQ ID NO: 1961950 - RNA, 19 nt, Artificial Sequence
  Description of Artificial Sequence: Synthetic oligonucleotide
  Sense strand starting at position 3052 of SEQ ID NO: 1880369
aggugaggccucuagguga

SEQ ID NO: 1961951 - RNA, 19 nt, Artificial Sequence
  Description of Artificial Sequence: Synthetic oligonucleotide
  Antisense strand to SEQ ID NO: 1961950
ucaccuagaggccucaccu

SEQ ID NO: 1961952 - RNA, 19 nt, Artificial Sequence
  Description of Artificial Sequence: Synthetic oligonucleotide
  Sense strand starting at position 3068 of SEQ ID NO: 1880369
ugaaguguucaggaggcau

SEQ ID NO: 1961953 - RNA, 19 nt, Artificial Sequence
  Description of Artificial Sequence: Synthetic oligonucleotide
  Antisense strand to SEQ ID NO: 1961952
augccuccugaacacuuca

SEQ ID NO: 1961954 - RNA, 19 nt, Artificial Sequence
  Description of Artificial Sequence: Synthetic oligonucleotide
  Sense strand starting at position 3097 of SEQ ID NO: 1880369
ggauguggccuugaaugga

SEQ ID NO: 1961955 - RNA, 19 nt, Artificial Sequence
  Description of Artificial Sequence: Synthetic oligonucleotide
  Antisense strand to SEQ ID NO: 1961954
uccauucaaggccacaucc

SEQ ID NO: 1961956 - RNA, 19 nt, Artificial Sequence
  Description of Artificial Sequence: Synthetic oligonucleotide
  Sense strand starting at position 3111 of SEQ ID NO: 1880369
auggauguccugugggaag

SEQ ID NO: 1961957 - RNA, 19 nt, Artificial Sequence
  Description of Artificial Sequence: Synthetic oligonucleotide
  Antisense strand to SEQ ID NO: 1961956
cuucccacaggacauccau

SEQ ID NO: 1961958 - RNA, 19 nt, Artificial Sequence
  Description of Artificial Sequence: Synthetic oligonucleotide
  Sense strand starting at position 3238 of SEQ ID NO: 1880369
cagaguggccugggagaau

SEQ ID NO: 1961959 - RNA, 19 nt, Artificial Sequence
  Description of Artificial Sequence: Synthetic oligonucleotide
  Antisense strand to SEQ ID NO: 1961958
auucucccaggccacucug

SEQ ID NO: 1961960 - RNA, 19 nt, Artificial Sequence
  Description of Artificial Sequence: Synthetic oligonucleotide
  Sense strand starting at position 3250 of SEQ ID NO: 1880369
ggagaaucgcugcaugaac

SEQ ID NO: 1961961 - RNA, 19 nt, Artificial Sequence
  Description of Artificial Sequence: Synthetic oligonucleotide
  Antisense strand to SEQ ID NO: 1961960
guucaugcagcgauucucc

SEQ ID NO: 1961962 - RNA, 19 nt, Artificial Sequence
  Description of Artificial Sequence: Synthetic oligonucleotide
  Sense strand starting at position 3324 of SEQ ID NO: 1880369
agguguggucaguggugaa

SEQ ID NO: 1961963 - RNA, 19 nt, Artificial Sequence
  Description of Artificial Sequence: Synthetic oligonucleotide
  Antisense strand to SEQ ID NO: 1961962
uucaccacugaccacaccu

SEQ ID NO: 1961964 - RNA, 19 nt, Artificial Sequence
  Description of Artificial Sequence: Synthetic oligonucleotide
  Sense strand starting at position 3573 of SEQ ID NO: 1880369
ggcuaaguugcacaaggua

SEQ ID NO: 1961965 - RNA, 19 nt, Artificial Sequence
  Description of Artificial Sequence: Synthetic oligonucleotide
  Antisense strand to SEQ ID NO: 1961964
uaccuugugcaacuuagcc

SEQ ID NO: 1961966 - RNA, 19 nt, Artificial Sequence
  Description of Artificial Sequence: Synthetic oligonucleotide
  Sense strand starting at position 3663 of SEQ ID NO: 1880369
ccaguugugcugccaaguu

SEQ ID NO: 1961967 - RNA, 19 nt, Artificial Sequence
  Description of Artificial Sequence: Synthetic oligonucleotide
  Antisense strand to SEQ ID NO: 1961966
aacuuggcagcacaacugg

SEQ ID NO: 1961968 - RNA, 19 nt, Artificial Sequence
  Description of Artificial Sequence: Synthetic oligonucleotide
  Sense strand starting at position 3769 of SEQ ID NO: 1880369
guguuuaaagccucacguu

SEQ ID NO: 1961969 - RNA, 19 nt, Artificial Sequence
  Description of Artificial Sequence: Synthetic oligonucleotide
  Antisense strand to SEQ ID NO: 1961968
aacgugaggcuuuaaacac

SEQ ID NO: 1961970 - RNA, 19 nt, Artificial Sequence
  Description of Artificial Sequence: Synthetic oligonucleotide
  Sense strand starting at position 3887 of SEQ ID NO: 1880369
ugagaauagcucuggguug

SEQ ID NO: 1961971 - RNA, 19 nt, Artificial Sequence
  Description of Artificial Sequence: Synthetic oligonucleotide
  Antisense strand to SEQ ID NO: 1961970
caacccagagcuauucuca

SEQ ID NO: 1961972 - RNA, 19 nt, Artificial Sequence
  Description of Artificial Sequence: Synthetic oligonucleotide
  Sense strand starting at position 31 of SEQ ID NO: 1880370
ggguccucagcgugaauuu

SEQ ID NO: 1961973 - RNA, 19 nt, Artificial Sequence
  Description of Artificial Sequence: Synthetic oligonucleotide
  Antisense strand to SEQ ID NO: 1961972
aaauucacgcugaggaccc

SEQ ID NO: 1961974 - RNA, 19 nt, Artificial Sequence
  Description of Artificial Sequence: Synthetic oligonucleotide
  Sense strand starting at position 281 of SEQ ID NO: 1880370
ccaugccauggacauuaua

SEQ ID NO: 1961975 - RNA, 19 nt, Artificial Sequence
  Description of Artificial Sequence: Synthetic oligonucleotide
  Antisense strand to SEQ ID NO: 1961974
uauaauguccauggcaugg

SEQ ID NO: 1961976 - RNA, 19 nt, Artificial Sequence
  Description of Artificial Sequence: Synthetic oligonucleotide
  Sense strand starting at position 331 of SEQ ID NO: 1880370
acaugacaauugucuaagu

SEQ ID NO: 1961977 - RNA, 19 nt, Artificial Sequence
  Description of Artificial Sequence: Synthetic oligonucleotide
  Antisense strand to SEQ ID NO: 1961976
acuuagacaauugucaugu

SEQ ID NO: 1961978 - RNA, 19 nt, Artificial Sequence
  Description of Artificial Sequence: Synthetic oligonucleotide
  Sense strand starting at position 333 of SEQ ID NO: 1880370
augacaauugucuaaguuc

SEQ ID NO: 1961979 - RNA, 19 nt, Artificial Sequence
  Description of Artificial Sequence: Synthetic oligonucleotide
  Antisense strand to SEQ ID NO: 1961978
gaacuuagacaauugucau

SEQ ID NO: 1961980 - RNA, 19 nt, Artificial Sequence
  Description of Artificial Sequence: Synthetic oligonucleotide
  Sense strand starting at position 372 of SEQ ID NO: 1880370
ucuaaaucaguuuaaaguc

SEQ ID NO: 1961981 - RNA, 19 nt, Artificial Sequence
  Description of Artificial Sequence: Synthetic oligonucleotide
  Antisense strand to SEQ ID NO: 1961980
gacuuuaaacugauuuaga

SEQ ID NO: 1961982 - RNA, 19 nt, Artificial Sequence
  Description of Artificial Sequence: Synthetic oligonucleotide
  Sense strand starting at position 517 of SEQ ID NO: 1880370
aguacucuagaauagcauu

SEQ ID NO: 1961983 - RNA, 19 nt, Artificial Sequence
  Description of Artificial Sequence: Synthetic oligonucleotide
  Antisense strand to SEQ ID NO: 1961982
aaugcuauucuagaguacu

SEQ ID NO: 1961984 - RNA, 19 nt, Artificial Sequence
  Description of Artificial Sequence: Synthetic oligonucleotide
  Sense strand starting at position 702 of SEQ ID NO: 1880370
acaaauauuuaaugagggu

SEQ ID NO: 1961985 - RNA, 19 nt, Artificial Sequence
  Description of Artificial Sequence: Synthetic oligonucleotide
  Antisense strand to SEQ ID NO: 1961984
acccucauuaaauauuugu

SEQ ID NO: 1961986 - RNA, 19 nt, Artificial Sequence
  Description of Artificial Sequence: Synthetic oligonucleotide
  Sense strand starting at position 795 of SEQ ID NO: 1880370
guggucuaacucugagaca

SEQ ID NO: 1961987 - RNA, 19 nt, Artificial Sequence
  Description of Artificial Sequence: Synthetic oligonucleotide
  Antisense strand to SEQ ID NO: 1961986
ugucucagaguuagaccac

SEQ ID NO: 1961988 - RNA, 19 nt, Artificial Sequence
  Description of Artificial Sequence: Synthetic oligonucleotide
  Sense strand starting at position 807 of SEQ ID NO: 1880370
ugagacacgcguuaaacuu

SEQ ID NO: 1961989 - RNA, 19 nt, Artificial Sequence
  Description of Artificial Sequence: Synthetic oligonucleotide
  Antisense strand to SEQ ID NO: 1961988
aaguuuaacgcgugucuca

SEQ ID NO: 1961990 - RNA, 19 nt, Artificial Sequence
  Description of Artificial Sequence: Synthetic oligonucleotide
  Sense strand starting at position 842 of SEQ ID NO: 1880370
agugcucuggugcaaauaa

SEQ ID NO: 1961991 - RNA, 19 nt, Artificial Sequence
  Description of Artificial Sequence: Synthetic oligonucleotide
  Antisense strand to SEQ ID NO: 1961990
uuauuugcaccagagcacu

SEQ ID NO: 1961992 - RNA, 19 nt, Artificial Sequence
  Description of Artificial Sequence: Synthetic oligonucleotide
  Sense strand starting at position 862 of SEQ ID NO: 1880370
ggugcucucccucaauaaa

SEQ ID NO: 1961993 - RNA, 19 nt, Artificial Sequence
  Description of Artificial Sequence: Synthetic oligonucleotide
  Antisense strand to SEQ ID NO: 1961992
uuuauugagggagagcacc

SEQ ID NO: 1961994 - RNA, 19 nt, Artificial Sequence
  Description of Artificial Sequence: Synthetic oligonucleotide
  Sense strand starting at position 1167 of SEQ ID NO: 1880370
uuaauugucucaucaggca

SEQ ID NO: 1961995 - RNA, 19 nt, Artificial Sequence
  Description of Artificial Sequence: Synthetic oligonucleotide
  Antisense strand to SEQ ID NO: 1961994
ugccugaugagacaauuaa

SEQ ID NO: 1961996 - RNA, 19 nt, Artificial Sequence
  Description of Artificial Sequence: Synthetic oligonucleotide
  Sense strand starting at position 1404 of SEQ ID NO: 1880370
acacucuguguuugggaca

SEQ ID NO: 1961997 - RNA, 19 nt, Artificial Sequence
  Description of Artificial Sequence: Synthetic oligonucleotide
  Antisense strand to SEQ ID NO: 1961996
ugucccaaacacagagugu

SEQ ID NO: 1961998 - RNA, 19 nt, Artificial Sequence
  Description of Artificial Sequence: Synthetic oligonucleotide
  Sense strand starting at position 1462 of SEQ ID NO: 1880370
uuggaugaccucuggugau

SEQ ID NO: 1961999 - RNA, 19 nt, Artificial Sequence
  Description of Artificial Sequence: Synthetic oligonucleotide
  Antisense strand to SEQ ID NO: 1961998
aucaccagaggucauccaa

SEQ ID NO: 1962000 - RNA, 19 nt, Artificial Sequence
  Description of Artificial Sequence: Synthetic oligonucleotide
  Sense strand starting at position 2150 of SEQ ID NO: 1880370
uuucguuugcucuuccgua

SEQ ID NO: 1962001 - RNA, 19 nt, Artificial Sequence
  Description of Artificial Sequence: Synthetic oligonucleotide
  Antisense strand to SEQ ID NO: 1962000
uacggaagagcaaacgaaa

SEQ ID NO: 1962002 - RNA, 19 nt, Artificial Sequence
  Description of Artificial Sequence: Synthetic oligonucleotide
  Sense strand starting at position 2215 of SEQ ID NO: 1880370
ggcauuggcaucuaaugau

SEQ ID NO: 1962003 - RNA, 19 nt, Artificial Sequence
  Description of Artificial Sequence: Synthetic oligonucleotide
  Antisense strand to SEQ ID NO: 1962002
aucauuagaugccaaugcc

SEQ ID NO: 1962004 - RNA, 19 nt, Artificial Sequence
  Description of Artificial Sequence: Synthetic oligonucleotide
  Sense strand starting at position 2523 of SEQ ID NO: 1880370
ucguguagcaaggauuaaa

SEQ ID NO: 1962005 - RNA, 19 nt, Artificial Sequence
  Description of Artificial Sequence: Synthetic oligonucleotide
  Antisense strand to SEQ ID NO: 1962004
uuuaauccuugcuacacga

SEQ ID NO: 1962006 - RNA, 19 nt, Artificial Sequence
  Description of Artificial Sequence: Synthetic oligonucleotide
  Sense strand starting at position 2724 of SEQ ID NO: 1880370
guaacauaaugaguguuaa

SEQ ID NO: 1962007 - RNA, 19 nt, Artificial Sequence
  Description of Artificial Sequence: Synthetic oligonucleotide
  Antisense strand to SEQ ID NO: 1962006
uuaacacucauuauguuac

SEQ ID NO: 1962008 - RNA, 19 nt, Artificial Sequence
  Description of Artificial Sequence: Synthetic oligonucleotide
  Sense strand starting at position 2775 of SEQ ID NO: 1880370
ucaucauuguacuuagaug

SEQ ID NO: 1962009 - RNA, 19 nt, Artificial Sequence
  Description of Artificial Sequence: Synthetic oligonucleotide
  Antisense strand to SEQ ID NO: 1962008
caucuaaguacaaugauga

SEQ ID NO: 1962010 - RNA, 19 nt, Artificial Sequence
  Description of Artificial Sequence: Synthetic oligonucleotide
  Sense strand starting at position 2843 of SEQ ID NO: 1880370
ggaguguuggcagguagga

SEQ ID NO: 1962011 - RNA, 19 nt, Artificial Sequence
  Description of Artificial Sequence: Synthetic oligonucleotide
  Antisense strand to SEQ ID NO: 1962010
uccuaccugccaacacucc

SEQ ID NO: 1962012 - RNA, 19 nt, Artificial Sequence
  Description of Artificial Sequence: Synthetic oligonucleotide
  Sense strand starting at position 2881 of SEQ ID NO: 1880370
ggguguuaaccucaggauc

SEQ ID NO: 1962013 - RNA, 19 nt, Artificial Sequence
  Description of Artificial Sequence: Synthetic oligonucleotide
  Antisense strand to SEQ ID NO: 1962012
gauccugagguuaacaccc

SEQ ID NO: 1962014 - RNA, 19 nt, Artificial Sequence
  Description of Artificial Sequence: Synthetic oligonucleotide
  Sense strand starting at position 3145 of SEQ ID NO: 1880370
acuaaaucugcauagaagu

SEQ ID NO: 1962015 - RNA, 19 nt, Artificial Sequence
  Description of Artificial Sequence: Synthetic oligonucleotide
  Antisense strand to SEQ ID NO: 1962014
acuucuaugcagauuuagu

SEQ ID NO: 1962016 - RNA, 19 nt, Artificial Sequence
  Description of Artificial Sequence: Synthetic oligonucleotide
  Sense strand starting at position 3155 of SEQ ID NO: 1880370
cauagaagugcauaaagua

SEQ ID NO: 1962017 - RNA, 19 nt, Artificial Sequence
  Description of Artificial Sequence: Synthetic oligonucleotide
  Antisense strand to SEQ ID NO: 1962016
uacuuuaugcacuucuaug

SEQ ID NO: 1962018 - RNA, 19 nt, Artificial Sequence
  Description of Artificial Sequence: Synthetic oligonucleotide
  Sense strand starting at position 3162 of SEQ ID NO: 1880370
gugcauaaaguagauacau

SEQ ID NO: 1962019 - RNA, 19 nt, Artificial Sequence
  Description of Artificial Sequence: Synthetic oligonucleotide
  Antisense strand to SEQ ID NO: 1962018
auguaucuacuuuaugcac

SEQ ID NO: 1962020 - RNA, 19 nt, Artificial Sequence
  Description of Artificial Sequence: Synthetic oligonucleotide
  Sense strand starting at position 3339 of SEQ ID NO: 1880370
uaaugugguguccaaaugu

SEQ ID NO: 1962021 - RNA, 19 nt, Artificial Sequence
  Description of Artificial Sequence: Synthetic oligonucleotide
  Antisense strand to SEQ ID NO: 1962020
acauuuggacaccacauua

SEQ ID NO: 1962022 - RNA, 19 nt, Artificial Sequence
  Description of Artificial Sequence: Synthetic oligonucleotide
  Sense strand starting at position 3446 of SEQ ID NO: 1880370
gcguaauaacauuacaucu

SEQ ID NO: 1962023 - RNA, 19 nt, Artificial Sequence
  Description of Artificial Sequence: Synthetic oligonucleotide
  Antisense strand to SEQ ID NO: 1962022
agauguaauguuauuacgc

SEQ ID NO: 1962024 - RNA, 19 nt, Artificial Sequence
  Description of Artificial Sequence: Synthetic oligonucleotide
  Sense strand starting at position 3515 of SEQ ID NO: 1880370
ugguucuagcuguagaaac

SEQ ID NO: 1962025 - RNA, 19 nt, Artificial Sequence
  Description of Artificial Sequence: Synthetic oligonucleotide
  Antisense strand to SEQ ID NO: 1962024
guuucuacagcuagaacca

SEQ ID NO: 1962026 - RNA, 19 nt, Artificial Sequence
  Description of Artificial Sequence: Synthetic oligonucleotide
  Sense strand starting at position 3573 of SEQ ID NO: 1880370
ucucuuucucccgagagac

SEQ ID NO: 1962027 - RNA, 19 nt, Artificial Sequence
  Description of Artificial Sequence: Synthetic oligonucleotide
  Antisense strand to SEQ ID NO: 1962026
gucucucgggagaaagaga

SEQ ID NO: 1962028 - RNA, 19 nt, Artificial Sequence
  Description of Artificial Sequence: Synthetic oligonucleotide
  Sense strand starting at position 3583 of SEQ ID NO: 1880370
ccgagagacuguuccuuac

SEQ ID NO: 1962029 - RNA, 19 nt, Artificial Sequence
  Description of Artificial Sequence: Synthetic oligonucleotide
  Antisense strand to SEQ ID NO: 1962028
guaaggaacagucucucgg

SEQ ID NO: 1962030 - RNA, 19 nt, Artificial Sequence
  Description of Artificial Sequence: Synthetic oligonucleotide
  Sense strand starting at position 3586 of SEQ ID NO: 1880370
agagacuguuccuuacgga

SEQ ID NO: 1962031 - RNA, 19 nt, Artificial Sequence
  Description of Artificial Sequence: Synthetic oligonucleotide
  Antisense strand to SEQ ID NO: 1962030
uccguaaggaacagucucu

SEQ ID NO: 1962032 - RNA, 19 nt, Artificial Sequence
  Description of Artificial Sequence: Synthetic oligonucleotide
  Sense strand starting at position 3587 of SEQ ID NO: 1880370
gagacuguuccuuacggag

SEQ ID NO: 1962033 - RNA, 19 nt, Artificial Sequence
  Description of Artificial Sequence: Synthetic oligonucleotide
  Antisense strand to SEQ ID NO: 1962032
cuccguaaggaacagucuc

SEQ ID NO: 1962034 - RNA, 19 nt, Artificial Sequence
  Description of Artificial Sequence: Synthetic oligonucleotide
  Sense strand starting at position 3631 of SEQ ID NO: 1880370
agauaacauuucugaaagc

SEQ ID NO: 1962035 - RNA, 19 nt, Artificial Sequence
  Description of Artificial Sequence: Synthetic oligonucleotide
  Antisense strand to SEQ ID NO: 1962034
gcuuucagaaauguuaucu

SEQ ID NO: 1962036 - RNA, 19 nt, Artificial Sequence
  Description of Artificial Sequence: Synthetic oligonucleotide
  Sense strand starting at position 3788 of SEQ ID NO: 1880370
caaccugucccaugagaag

SEQ ID NO: 1962037 - RNA, 19 nt, Artificial Sequence
  Description of Artificial Sequence: Synthetic oligonucleotide
  Antisense strand to SEQ ID NO: 1962036
cuucucaugggacagguug

SEQ ID NO: 1962038 - RNA, 19 nt, Artificial Sequence
  Description of Artificial Sequence: Synthetic oligonucleotide
  Sense strand starting at position 3797 of SEQ ID NO: 1880370
ccaugagaaguuuagcgau

SEQ ID NO: 1962039 - RNA, 19 nt, Artificial Sequence
  Description of Artificial Sequence: Synthetic oligonucleotide
  Antisense strand to SEQ ID NO: 1962038
aucgcuaaacuucucaugg

SEQ ID NO: 1962040 - RNA, 19 nt, Artificial Sequence
  Description of Artificial Sequence: Synthetic oligonucleotide
  Sense strand starting at position 3803 of SEQ ID NO: 1880370
gaaguuuagcgauacgauu

SEQ ID NO: 1962041 - RNA, 19 nt, Artificial Sequence
  Description of Artificial Sequence: Synthetic oligonucleotide
  Antisense strand to SEQ ID NO: 1962040
aaucguaucgcuaaacuuc

SEQ ID NO: 1962042 - RNA, 19 nt, Artificial Sequence
  Description of Artificial Sequence: Synthetic oligonucleotide
  Sense strand starting at position 3810 of SEQ ID NO: 1880370
agcgauacgauugaaagua

SEQ ID NO: 1962043 - RNA, 19 nt, Artificial Sequence
  Description of Artificial Sequence: Synthetic oligonucleotide
  Antisense strand to SEQ ID NO: 1962042
uacuuucaaucguaucgcu

SEQ ID NO: 1962044 - RNA, 19 nt, Artificial Sequence
  Description of Artificial Sequence: Synthetic oligonucleotide
  Sense strand starting at position 3852 of SEQ ID NO: 1880370
gaaaguuaccaucgguuac

SEQ ID NO: 1962045 - RNA, 19 nt, Artificial Sequence
  Description of Artificial Sequence: Synthetic oligonucleotide
  Antisense strand to SEQ ID NO: 1962044
guaaccgaugguaacuuuc

SEQ ID NO: 1962046 - RNA, 19 nt, Artificial Sequence
  Description of Artificial Sequence: Synthetic oligonucleotide
  Sense strand starting at position 3856 of SEQ ID NO: 1880370
guuaccaucgguuacuuua

SEQ ID NO: 1962047 - RNA, 19 nt, Artificial Sequence
  Description of Artificial Sequence: Synthetic oligonucleotide
  Antisense strand to SEQ ID NO: 1962046
uaaaguaaccgaugguaac

SEQ ID NO: 1962048 - RNA, 19 nt, Artificial Sequence
  Description of Artificial Sequence: Synthetic oligonucleotide
  Sense strand starting at position 3924 of SEQ ID NO: 1880370
gucacauuucugugugcau

SEQ ID NO: 1962049 - RNA, 19 nt, Artificial Sequence
  Description of Artificial Sequence: Synthetic oligonucleotide
  Antisense strand to SEQ ID NO: 1962048
augcacacagaaaugugac

SEQ ID NO: 1962050 - RNA, 19 nt, Artificial Sequence
  Description of Artificial Sequence: Synthetic oligonucleotide
  Sense strand starting at position 3981 of SEQ ID NO: 1880370
gagggagucuuccuacuuu

SEQ ID NO: 1962051 - RNA, 19 nt, Artificial Sequence
  Description of Artificial Sequence: Synthetic oligonucleotide
  Antisense strand to SEQ ID NO: 1962050
aaaguaggaagacucccuc

SEQ ID NO: 1962052 - RNA, 19 nt, Artificial Sequence
  Description of Artificial Sequence: Synthetic oligonucleotide
  Sense strand starting at position 2 of SEQ ID NO: 1880371
ggauguauacuuugugaau

SEQ ID NO: 1962053 - RNA, 19 nt, Artificial Sequence
  Description of Artificial Sequence: Synthetic oligonucleotide
  Antisense strand to SEQ ID NO: 1962052
auucacaaaguauacaucc

SEQ ID NO: 1962054 - RNA, 19 nt, Artificial Sequence
  Description of Artificial Sequence: Synthetic oligonucleotide
  Sense strand starting at position 3 of SEQ ID NO: 1880371
gauguauacuuugugaaua

SEQ ID NO: 1962055 - RNA, 19 nt, Artificial Sequence
  Description of Artificial Sequence: Synthetic oligonucleotide
  Antisense strand to SEQ ID NO: 1962054
uauucacaaaguauacauc

SEQ ID NO: 1962056 - RNA, 19 nt, Artificial Sequence
  Description of Artificial Sequence: Synthetic oligonucleotide
  Sense strand starting at position 84 of SEQ ID NO: 1880371
cuugaaagaucucuuggau

SEQ ID NO: 1962057 - RNA, 19 nt, Artificial Sequence
  Description of Artificial Sequence: Synthetic oligonucleotide
  Antisense strand to SEQ ID NO: 1962056
auccaagagaucuuucaag

SEQ ID NO: 1962058 - RNA, 19 nt, Artificial Sequence
  Description of Artificial Sequence: Synthetic oligonucleotide
  Sense strand starting at position 96 of SEQ ID NO: 1880371
cuuggauucuguguaguuc

SEQ ID NO: 1962059 - RNA, 19 nt, Artificial Sequence
  Description of Artificial Sequence: Synthetic oligonucleotide
  Antisense strand to SEQ ID NO: 1962058
gaacuacacagaauccaag

SEQ ID NO: 1962060 - RNA, 19 nt, Artificial Sequence
  Description of Artificial Sequence: Synthetic oligonucleotide
  Sense strand starting at position 100 of SEQ ID NO: 1880371
gauucuguguaguucuaua

SEQ ID NO: 1962061 - RNA, 19 nt, Artificial Sequence
  Description of Artificial Sequence: Synthetic oligonucleotide
  Antisense strand to SEQ ID NO: 1962060
uauagaacuacacagaauc

SEQ ID NO: 1962062 - RNA, 19 nt, Artificial Sequence
  Description of Artificial Sequence: Synthetic oligonucleotide
  Sense strand starting at position 456 of SEQ ID NO: 1880371
ggauguucuuucucucuau

SEQ ID NO: 1962063 - RNA, 19 nt, Artificial Sequence
  Description of Artificial Sequence: Synthetic oligonucleotide
  Antisense strand to SEQ ID NO: 1962062
auagagagaaagaacaucc

SEQ ID NO: 1962064 - RNA, 19 nt, Artificial Sequence
  Description of Artificial Sequence: Synthetic oligonucleotide
  Sense strand starting at position 547 of SEQ ID NO: 1880371
aggucuuauuucuguaaau

SEQ ID NO: 1962065 - RNA, 19 nt, Artificial Sequence
  Description of Artificial Sequence: Synthetic oligonucleotide
  Antisense strand to SEQ ID NO: 1962064
auuuacagaaauaagaccu

SEQ ID NO: 1962066 - RNA, 19 nt, Artificial Sequence
  Description of Artificial Sequence: Synthetic oligonucleotide
  Sense strand starting at position 595 of SEQ ID NO: 1880371
auaccagagucaugcuuaa

SEQ ID NO: 1962067 - RNA, 19 nt, Artificial Sequence
  Description of Artificial Sequence: Synthetic oligonucleotide
  Antisense strand to SEQ ID NO: 1962066
uuaagcaugacucugguau

SEQ ID NO: 1962068 - RNA, 19 nt, Artificial Sequence
  Description of Artificial Sequence: Synthetic oligonucleotide
  Sense strand starting at position 621 of SEQ ID NO: 1880371
gcugucuuccaccauccau

SEQ ID NO: 1962069 - RNA, 19 nt, Artificial Sequence
  Description of Artificial Sequence: Synthetic oligonucleotide
  Antisense strand to SEQ ID NO: 1962068
auggaugguggaagacagc

SEQ ID NO: 1962070 - RNA, 19 nt, Artificial Sequence
  Description of Artificial Sequence: Synthetic oligonucleotide
  Sense strand starting at position 670 of SEQ ID NO: 1880371
guuguuguuccuggauuac

SEQ ID NO: 1962071 - RNA, 19 nt, Artificial Sequence
  Description of Artificial Sequence: Synthetic oligonucleotide
  Antisense strand to SEQ ID NO: 1962070
guaauccaggaacaacaac

SEQ ID NO: 1962072 - RNA, 19 nt, Artificial Sequence
  Description of Artificial Sequence: Synthetic oligonucleotide
  Sense strand starting at position 739 of SEQ ID NO: 1880371
gagagaaugucucccuguc

SEQ ID NO: 1962073 - RNA, 19 nt, Artificial Sequence
  Description of Artificial Sequence: Synthetic oligonucleotide
  Antisense strand to SEQ ID NO: 1962072
gacagggagacauucucuc

SEQ ID NO: 1962074 - RNA, 19 nt, Artificial Sequence
  Description of Artificial Sequence: Synthetic oligonucleotide
  Sense strand starting at position 741 of SEQ ID NO: 1880371
gagaaugucucccugucac

SEQ ID NO: 1962075 - RNA, 19 nt, Artificial Sequence
  Description of Artificial Sequence: Synthetic oligonucleotide
  Antisense strand to SEQ ID NO: 1962074
gugacagggagacauucuc

SEQ ID NO: 1962076 - RNA, 19 nt, Artificial Sequence
  Description of Artificial Sequence: Synthetic oligonucleotide
  Sense strand starting at position 983 of SEQ ID NO: 1880371
ugcugagauuuaggcauga

SEQ ID NO: 1962077 - RNA, 19 nt, Artificial Sequence
  Description of Artificial Sequence: Synthetic oligonucleotide
  Antisense strand to SEQ ID NO: 1962076
ucaugccuaaaucucagca

SEQ ID NO: 1962078 - RNA, 19 nt, Artificial Sequence
  Description of Artificial Sequence: Synthetic oligonucleotide
  Sense strand starting at position 1093 of SEQ ID NO: 1880371
uuaagugggugucuuggaa

SEQ ID NO: 1962079 - RNA, 19 nt, Artificial Sequence
  Description of Artificial Sequence: Synthetic oligonucleotide
  Antisense strand to SEQ ID NO: 1962078
uuccaagacacccacuuaa

SEQ ID NO: 1962080 - RNA, 19 nt, Artificial Sequence
  Description of Artificial Sequence: Synthetic oligonucleotide
  Sense strand starting at position 1097 of SEQ ID NO: 1880371
gugggugucuuggaacaac

SEQ ID NO: 1962081 - RNA, 19 nt, Artificial Sequence
  Description of Artificial Sequence: Synthetic oligonucleotide
  Antisense strand to SEQ ID NO: 1962080
guuguuccaagacacccac

SEQ ID NO: 1962082 - RNA, 19 nt, Artificial Sequence
  Description of Artificial Sequence: Synthetic oligonucleotide
  Sense strand starting at position 1100 of SEQ ID NO: 1880371
ggugucuuggaacaacuua

SEQ ID NO: 1962083 - RNA, 19 nt, Artificial Sequence
  Description of Artificial Sequence: Synthetic oligonucleotide
  Antisense strand to SEQ ID NO: 1962082
uaaguuguuccaagacacc

SEQ ID NO: 1962084 - RNA, 19 nt, Artificial Sequence
  Description of Artificial Sequence: Synthetic oligonucleotide
  Sense strand starting at position 1236 of SEQ ID NO: 1880371
gugugcuugucaaagaggu

SEQ ID NO: 1962085 - RNA, 19 nt, Artificial Sequence
  Description of Artificial Sequence: Synthetic oligonucleotide
  Antisense strand to SEQ ID NO: 1962084
accucuuugacaagcacac

SEQ ID NO: 1962086 - RNA, 19 nt, Artificial Sequence
  Description of Artificial Sequence: Synthetic oligonucleotide
  Sense strand starting at position 1238 of SEQ ID NO: 1880371
gugcuugucaaagagguau

SEQ ID NO: 1962087 - RNA, 19 nt, Artificial Sequence
  Description of Artificial Sequence: Synthetic oligonucleotide
  Antisense strand to SEQ ID NO: 1962086
auaccucuuugacaagcac

SEQ ID NO: 1962088 - RNA, 19 nt, Artificial Sequence
  Description of Artificial Sequence: Synthetic oligonucleotide
  Sense strand starting at position 1240 of SEQ ID NO: 1880371
gcuugucaaagagguauuc

SEQ ID NO: 1962089 - RNA, 19 nt, Artificial Sequence
  Description of Artificial Sequence: Synthetic oligonucleotide
  Antisense strand to SEQ ID NO: 1962088
gaauaccucuuugacaagc

SEQ ID NO: 1962090 - RNA, 19 nt, Artificial Sequence
  Description of Artificial Sequence: Synthetic oligonucleotide
  Sense strand starting at position 1250 of SEQ ID NO: 1880371
gagguauucugccacgcca

SEQ ID NO: 1962091 - RNA, 19 nt, Artificial Sequence
  Description of Artificial Sequence: Synthetic oligonucleotide
  Antisense strand to SEQ ID NO: 1962090
uggcguggcagaauaccuc

SEQ ID NO: 1962092 - RNA, 19 nt, Artificial Sequence
  Description of Artificial Sequence: Synthetic oligonucleotide
  Sense strand starting at position 1252 of SEQ ID NO: 1880371
gguauucugccacgccaga

SEQ ID NO: 1962093 - RNA, 19 nt, Artificial Sequence
  Description of Artificial Sequence: Synthetic oligonucleotide
  Antisense strand to SEQ ID NO: 1962092
ucuggcguggcagaauacc

SEQ ID NO: 1962094 - RNA, 19 nt, Artificial Sequence
  Description of Artificial Sequence: Synthetic oligonucleotide
  Sense strand starting at position 1649 of SEQ ID NO: 1880371
gccacaucaucgcugucaa

SEQ ID NO: 1962095 - RNA, 19 nt, Artificial Sequence
  Description of Artificial Sequence: Synthetic oligonucleotide
  Antisense strand to SEQ ID NO: 1962094
uugacagcgaugauguggc

SEQ ID NO: 1962096 - RNA, 19 nt, Artificial Sequence
  Description of Artificial Sequence: Synthetic oligonucleotide
  Sense strand starting at position 1650 of SEQ ID NO: 1880371
ccacaucaucgcugucaaa

SEQ ID NO: 1962097 - RNA, 19 nt, Artificial Sequence
  Description of Artificial Sequence: Synthetic oligonucleotide
  Antisense strand to SEQ ID NO: 1962096
uuugacagcgaugaugugg

SEQ ID NO: 1962098 - RNA, 19 nt, Artificial Sequence
  Description of Artificial Sequence: Synthetic oligonucleotide
  Sense strand starting at position 1653 of SEQ ID NO: 1880371
caucaucgcugucaaagua

SEQ ID NO: 1962099 - RNA, 19 nt, Artificial Sequence
  Description of Artificial Sequence: Synthetic oligonucleotide
  Antisense strand to SEQ ID NO: 1962098
uacuuugacagcgaugaug

SEQ ID NO: 1962100 - RNA, 19 nt, Artificial Sequence
  Description of Artificial Sequence: Synthetic oligonucleotide
  Sense strand starting at position 1740 of SEQ ID NO: 1880371
cugagucuuggugguaguu

SEQ ID NO: 1962101 - RNA, 19 nt, Artificial Sequence
  Description of Artificial Sequence: Synthetic oligonucleotide
  Antisense strand to SEQ ID NO: 1962100
aacuaccaccaagacucag

SEQ ID NO: 1962102 - RNA, 19 nt, Artificial Sequence
  Description of Artificial Sequence: Synthetic oligonucleotide
  Sense strand starting at position 1785 of SEQ ID NO: 1880371
ucgucaugccggcgacuaa

SEQ ID NO: 1962103 - RNA, 19 nt, Artificial Sequence
  Description of Artificial Sequence: Synthetic oligonucleotide
  Antisense strand to SEQ ID NO: 1962102
uuagucgccggcaugacga

SEQ ID NO: 1962104 - RNA, 19 nt, Artificial Sequence
  Description of Artificial Sequence: Synthetic oligonucleotide
  Sense strand starting at position 1977 of SEQ ID NO: 1880371
gaccacucucggcgaagaa

SEQ ID NO: 1962105 - RNA, 19 nt, Artificial Sequence
  Description of Artificial Sequence: Synthetic oligonucleotide
  Antisense strand to SEQ ID NO: 1962104
uucuucgccgagagugguc

SEQ ID NO: 1962106 - RNA, 19 nt, Artificial Sequence
  Description of Artificial Sequence: Synthetic oligonucleotide
  Sense strand starting at position 1989 of SEQ ID NO: 1880371
cgaagaacgucucaacuuu

SEQ ID NO: 1962107 - RNA, 19 nt, Artificial Sequence
  Description of Artificial Sequence: Synthetic oligonucleotide
  Antisense strand to SEQ ID NO: 1962106
aaaguugagacguucuucg

SEQ ID NO: 1962108 - RNA, 19 nt, Artificial Sequence
  Description of Artificial Sequence: Synthetic oligonucleotide
  Sense strand starting at position 2287 of SEQ ID NO: 1880371
cgccauucucccgucucaa

SEQ ID NO: 1962109 - RNA, 19 nt, Artificial Sequence
  Description of Artificial Sequence: Synthetic oligonucleotide
  Antisense strand to SEQ ID NO: 1962108
uugagacgggagaauggcg

SEQ ID NO: 1962110 - RNA, 19 nt, Artificial Sequence
  Description of Artificial Sequence: Synthetic oligonucleotide
  Sense strand starting at position 2338 of SEQ ID NO: 1880371
ccaagacgcucggcugauu

SEQ ID NO: 1962111 - RNA, 19 nt, Artificial Sequence
  Description of Artificial Sequence: Synthetic oligonucleotide
  Antisense strand to SEQ ID NO: 1962110
aaucagccgagcgucuugg

SEQ ID NO: 1962112 - RNA, 19 nt, Artificial Sequence
  Description of Artificial Sequence: Synthetic oligonucleotide
  Sense strand starting at position 2656 of SEQ ID NO: 1880371
uccuuucuggaguaguaau

SEQ ID NO: 1962113 - RNA, 19 nt, Artificial Sequence
  Description of Artificial Sequence: Synthetic oligonucleotide
  Antisense strand to SEQ ID NO: 1962112
auuacuacuccagaaagga

SEQ ID NO: 1962114 - RNA, 19 nt, Artificial Sequence
  Description of Artificial Sequence: Synthetic oligonucleotide
  Sense strand starting at position 2740 of SEQ ID NO: 1880371
gcuuuaagcuguuucuuag

SEQ ID NO: 1962115 - RNA, 19 nt, Artificial Sequence
  Description of Artificial Sequence: Synthetic oligonucleotide
  Antisense strand to SEQ ID NO: 1962114
cuaagaaacagcuuaaagc

SEQ ID NO: 1962116 - RNA, 19 nt, Artificial Sequence
  Description of Artificial Sequence: Synthetic oligonucleotide
  Sense strand starting at position 2774 of SEQ ID NO: 1880371
ucagaagcaucugaauuau

SEQ ID NO: 1962117 - RNA, 19 nt, Artificial Sequence
  Description of Artificial Sequence: Synthetic oligonucleotide
  Antisense strand to SEQ ID NO: 1962116
auaauucagaugcuucuga

SEQ ID NO: 1962118 - RNA, 19 nt, Artificial Sequence
  Description of Artificial Sequence: Synthetic oligonucleotide
  Sense strand starting at position 2860 of SEQ ID NO: 1880371
ucaagaucuucuuguggcu

SEQ ID NO: 1962119 - RNA, 19 nt, Artificial Sequence
  Description of Artificial Sequence: Synthetic oligonucleotide
  Antisense strand to SEQ ID NO: 1962118
agccacaagaagaucuuga

SEQ ID NO: 1962120 - RNA, 19 nt, Artificial Sequence
  Description of Artificial Sequence: Synthetic oligonucleotide
  Sense strand starting at position 2927 of SEQ ID NO: 1880371
ggcggaucucuaggucaag

SEQ ID NO: 1962121 - RNA, 19 nt, Artificial Sequence
  Description of Artificial Sequence: Synthetic oligonucleotide
  Antisense strand to SEQ ID NO: 1962120
cuugaccuagagauccgcc

SEQ ID NO: 1962122 - RNA, 19 nt, Artificial Sequence
  Description of Artificial Sequence: Synthetic oligonucleotide
  Sense strand starting at position 2928 of SEQ ID NO: 1880371
gcggaucucuaggucaaga

SEQ ID NO: 1962123 - RNA, 19 nt, Artificial Sequence
  Description of Artificial Sequence: Synthetic oligonucleotide
  Antisense strand to SEQ ID NO: 1962122
ucuugaccuagagauccgc

SEQ ID NO: 1962124 - RNA, 19 nt, Artificial Sequence
  Description of Artificial Sequence: Synthetic oligonucleotide
  Sense strand starting at position 3196 of SEQ ID NO: 1880371
uugcaacuggaaugauauu

SEQ ID NO: 1962125 - RNA, 19 nt, Artificial Sequence
  Description of Artificial Sequence: Synthetic oligonucleotide
  Antisense strand to SEQ ID NO: 1962124
aauaucauuccaguugcaa

SEQ ID NO: 1962126 - RNA, 19 nt, Artificial Sequence
  Description of Artificial Sequence: Synthetic oligonucleotide
  Sense strand starting at position 3222 of SEQ ID NO: 1880371
ccaggaguuugacacaauu

SEQ ID NO: 1962127 - RNA, 19 nt, Artificial Sequence
  Description of Artificial Sequence: Synthetic oligonucleotide
  Antisense strand to SEQ ID NO: 1962126
aauugugucaaacuccugg

SEQ ID NO: 1962128 - RNA, 19 nt, Artificial Sequence
  Description of Artificial Sequence: Synthetic oligonucleotide
  Sense strand starting at position 3232 of SEQ ID NO: 1880371
gacacaauuuaggagguuu

SEQ ID NO: 1962129 - RNA, 19 nt, Artificial Sequence
  Description of Artificial Sequence: Synthetic oligonucleotide
  Antisense strand to SEQ ID NO: 1962128
aaaccuccuaaauuguguc

SEQ ID NO: 1962130 - RNA, 19 nt, Artificial Sequence
  Description of Artificial Sequence: Synthetic oligonucleotide
  Sense strand starting at position 3329 of SEQ ID NO: 1880371
ccauuagaauaggaacuau

SEQ ID NO: 1962131 - RNA, 19 nt, Artificial Sequence
  Description of Artificial Sequence: Synthetic oligonucleotide
  Antisense strand to SEQ ID NO: 1962130
auaguuccuauucuaaugg

SEQ ID NO: 1962132 - RNA, 19 nt, Artificial Sequence
  Description of Artificial Sequence: Synthetic oligonucleotide
  Sense strand starting at position 1 of SEQ ID NO: 1880372
guuucuuuccaagaguagu

SEQ ID NO: 1962133 - RNA, 19 nt, Artificial Sequence
  Description of Artificial Sequence: Synthetic oligonucleotide
  Antisense strand to SEQ ID NO: 1962132
acuacucuuggaaagaaac

SEQ ID NO: 1962134 - RNA, 19 nt, Artificial Sequence
  Description of Artificial Sequence: Synthetic oligonucleotide
  Sense strand starting at position 45 of SEQ ID NO: 1880372
agaagaguccagugucaga

SEQ ID NO: 1962135 - RNA, 19 nt, Artificial Sequence
  Description of Artificial Sequence: Synthetic oligonucleotide
  Antisense strand to SEQ ID NO: 1962134
ucugacacuggacucuucu

SEQ ID NO: 1962136 - RNA, 19 nt, Artificial Sequence
  Description of Artificial Sequence: Synthetic oligonucleotide
  Sense strand starting at position 61 of SEQ ID NO: 1880372
agagauagauucugauauc

SEQ ID NO: 1962137 - RNA, 19 nt, Artificial Sequence
  Description of Artificial Sequence: Synthetic oligonucleotide
  Antisense strand to SEQ ID NO: 1962136
gauaucagaaucuaucucu

SEQ ID NO: 1962138 - RNA, 19 nt, Artificial Sequence
  Description of Artificial Sequence: Synthetic oligonucleotide
  Sense strand starting at position 62 of SEQ ID NO: 1880372
gagauagauucugauaucu

SEQ ID NO: 1962139 - RNA, 19 nt, Artificial Sequence
  Description of Artificial Sequence: Synthetic oligonucleotide
  Antisense strand to SEQ ID NO: 1962138
agauaucagaaucuaucuc

SEQ ID NO: 1962140 - RNA, 19 nt, Artificial Sequence
  Description of Artificial Sequence: Synthetic oligonucleotide
  Sense strand starting at position 64 of SEQ ID NO: 1880372
gauagauucugauaucugg

SEQ ID NO: 1962141 - RNA, 19 nt, Artificial Sequence
  Description of Artificial Sequence: Synthetic oligonucleotide
  Antisense strand to SEQ ID NO: 1962140
ccagauaucagaaucuauc

SEQ ID NO: 1962142 - RNA, 19 nt, Artificial Sequence
  Description of Artificial Sequence: Synthetic oligonucleotide
  Sense strand starting at position 103 of SEQ ID NO: 1880372
gucagucuuggcuggagga

SEQ ID NO: 1962143 - RNA, 19 nt, Artificial Sequence
  Description of Artificial Sequence: Synthetic oligonucleotide
  Antisense strand to SEQ ID NO: 1962142
uccuccagccaagacugac

SEQ ID NO: 1962144 - RNA, 19 nt, Artificial Sequence
  Description of Artificial Sequence: Synthetic oligonucleotide
  Sense strand starting at position 201 of SEQ ID NO: 1880372
gcuacagagccuuaaggaa

SEQ ID NO: 1962145 - RNA, 19 nt, Artificial Sequence
  Description of Artificial Sequence: Synthetic oligonucleotide
  Antisense strand to SEQ ID NO: 1962144
uuccuuaaggcucuguagc

SEQ ID NO: 1962146 - RNA, 19 nt, Artificial Sequence
  Description of Artificial Sequence: Synthetic oligonucleotide
  Sense strand starting at position 295 of SEQ ID NO: 1880372
ggccaugguugagaaauuu

SEQ ID NO: 1962147 - RNA, 19 nt, Artificial Sequence
  Description of Artificial Sequence: Synthetic oligonucleotide
  Antisense strand to SEQ ID NO: 1962146
aaauuucucaaccauggcc

SEQ ID NO: 1962148 - RNA, 19 nt, Artificial Sequence
  Description of Artificial Sequence: Synthetic oligonucleotide
  Sense strand starting at position 344 of SEQ ID NO: 1880372
gggagucccuacccaguaa

SEQ ID NO: 1962149 - RNA, 19 nt, Artificial Sequence
  Description of Artificial Sequence: Synthetic oligonucleotide
  Antisense strand to SEQ ID NO: 1962148
uuacuggguagggacuccc

SEQ ID NO: 1962150 - RNA, 19 nt, Artificial Sequence
  Description of Artificial Sequence: Synthetic oligonucleotide
  Sense strand starting at position 399 of SEQ ID NO: 1880372
cucacaacacuguggaauu

SEQ ID NO: 1962151 - RNA, 19 nt, Artificial Sequence
  Description of Artificial Sequence: Synthetic oligonucleotide
  Antisense strand to SEQ ID NO: 1962150
aauuccacaguguugugag

SEQ ID NO: 1962152 - RNA, 19 nt, Artificial Sequence
  Description of Artificial Sequence: Synthetic oligonucleotide
  Sense strand starting at position 411 of SEQ ID NO: 1880372
uggaauucagguugaguca

SEQ ID NO: 1962153 - RNA, 19 nt, Artificial Sequence
  Description of Artificial Sequence: Synthetic oligonucleotide
  Antisense strand to SEQ ID NO: 1962152
ugacucaaccugaauucca

SEQ ID NO: 1962154 - RNA, 19 nt, Artificial Sequence
  Description of Artificial Sequence: Synthetic oligonucleotide
  Sense strand starting at position 430 of SEQ ID NO: 1880372
acagaacccuugucaaagu

SEQ ID NO: 1962155 - RNA, 19 nt, Artificial Sequence
  Description of Artificial Sequence: Synthetic oligonucleotide
  Antisense strand to SEQ ID NO: 1962154
acuuugacaaggguucugu

SEQ ID NO: 1962156 - RNA, 19 nt, Artificial Sequence
  Description of Artificial Sequence: Synthetic oligonucleotide
  Sense strand starting at position 2286 of SEQ ID NO: 1880372
ggcaaauguccaggugaau

SEQ ID NO: 1962157 - RNA, 19 nt, Artificial Sequence
  Description of Artificial Sequence: Synthetic oligonucleotide
  Antisense strand to SEQ ID NO: 1962156
auucaccuggacauuugcc

SEQ ID NO: 1962158 - RNA, 19 nt, Artificial Sequence
  Description of Artificial Sequence: Synthetic oligonucleotide
  Sense strand starting at position 2295 of SEQ ID NO: 1880372
ccaggugaauuaucuuuga

SEQ ID NO: 1962159 - RNA, 19 nt, Artificial Sequence
  Description of Artificial Sequence: Synthetic oligonucleotide
  Antisense strand to SEQ ID NO: 1962158
ucaaagauaauucaccugg

SEQ ID NO: 1962160 - RNA, 19 nt, Artificial Sequence
  Description of Artificial Sequence: Synthetic oligonucleotide
  Sense strand starting at position 2411 of SEQ ID NO: 1880372
aaaccugagugagaaauua

SEQ ID NO: 1962161 - RNA, 19 nt, Artificial Sequence
  Description of Artificial Sequence: Synthetic oligonucleotide
  Antisense strand to SEQ ID NO: 1962160
uaauuucucacucagguuu

SEQ ID NO: 1962162 - RNA, 19 nt, Artificial Sequence
  Description of Artificial Sequence: Synthetic oligonucleotide
  Sense strand starting at position 2485 of SEQ ID NO: 1880372
cgaagugucaucuguggga

SEQ ID NO: 1962163 - RNA, 19 nt, Artificial Sequence
  Description of Artificial Sequence: Synthetic oligonucleotide
  Antisense strand to SEQ ID NO: 1962162
ucccacagaugacacuucg

SEQ ID NO: 1962164 - RNA, 19 nt, Artificial Sequence
  Description of Artificial Sequence: Synthetic oligonucleotide
  Sense strand starting at position 2487 of SEQ ID NO: 1880372
aagugucaucugugggaag

SEQ ID NO: 1962165 - RNA, 19 nt, Artificial Sequence
  Description of Artificial Sequence: Synthetic oligonucleotide
  Antisense strand to SEQ ID NO: 1962164
cuucccacagaugacacuu

SEQ ID NO: 1962166 - RNA, 19 nt, Artificial Sequence
  Description of Artificial Sequence: Synthetic oligonucleotide
  Sense strand starting at position 2489 of SEQ ID NO: 1880372
gugucaucugugggaaggu

SEQ ID NO: 1962167 - RNA, 19 nt, Artificial Sequence
  Description of Artificial Sequence: Synthetic oligonucleotide
  Antisense strand to SEQ ID NO: 1962166
accuucccacagaugacac

SEQ ID NO: 1962168 - RNA, 19 nt, Artificial Sequence
  Description of Artificial Sequence: Synthetic oligonucleotide
  Sense strand starting at position 2524 of SEQ ID NO: 1880372
uaugcuuugggaggcagau

SEQ ID NO: 1962169 - RNA, 19 nt, Artificial Sequence
  Description of Artificial Sequence: Synthetic oligonucleotide
  Antisense strand to SEQ ID NO: 1962168
aucugccucccaaagcaua

SEQ ID NO: 1962170 - RNA, 19 nt, Artificial Sequence
  Description of Artificial Sequence: Synthetic oligonucleotide
  Sense strand starting at position 2604 of SEQ ID NO: 1880372
gugcuuucucagccugcaa

SEQ ID NO: 1962171 - RNA, 19 nt, Artificial Sequence
  Description of Artificial Sequence: Synthetic oligonucleotide
  Antisense strand to SEQ ID NO: 1962170
uugcaggcugagaaagcac

SEQ ID NO: 1962172 - RNA, 19 nt, Artificial Sequence
  Description of Artificial Sequence: Synthetic oligonucleotide
  Sense strand starting at position 2606 of SEQ ID NO: 1880372
gcuuucucagccugcaaca

SEQ ID NO: 1962173 - RNA, 19 nt, Artificial Sequence
  Description of Artificial Sequence: Synthetic oligonucleotide
  Antisense strand to SEQ ID NO: 1962172
uguugcaggcugagaaagc

SEQ ID NO: 1962174 - RNA, 19 nt, Artificial Sequence
  Description of Artificial Sequence: Synthetic oligonucleotide
  Sense strand starting at position 2672 of SEQ ID NO: 1880372
cugggaacccucugcaaau

SEQ ID NO: 1962175 - RNA, 19 nt, Artificial Sequence
  Description of Artificial Sequence: Synthetic oligonucleotide
  Antisense strand to SEQ ID NO: 1962174
auuugcagaggguucccag

SEQ ID NO: 1962176 - RNA, 19 nt, Artificial Sequence
  Description of Artificial Sequence: Synthetic oligonucleotide
  Sense strand starting at position 2698 of SEQ ID NO: 1880372
ccauuaucgggcugaggaa

SEQ ID NO: 1962177 - RNA, 19 nt, Artificial Sequence
  Description of Artificial Sequence: Synthetic oligonucleotide
  Antisense strand to SEQ ID NO: 1962176
uuccucagcccgauaaugg

SEQ ID NO: 1962178 - RNA, 19 nt, Artificial Sequence
  Description of Artificial Sequence: Synthetic oligonucleotide
  Sense strand starting at position 2710 of SEQ ID NO: 1880372
ugaggaaggcaugguucua

SEQ ID NO: 1962179 - RNA, 19 nt, Artificial Sequence
  Description of Artificial Sequence: Synthetic oligonucleotide
  Antisense strand to SEQ ID NO: 1962178
uagaaccaugccuuccuca

SEQ ID NO: 1962180 - RNA, 19 nt, Artificial Sequence
  Description of Artificial Sequence: Synthetic oligonucleotide
  Sense strand starting at position 2715 of SEQ ID NO: 1880372
aaggcaugguucuaauuga

SEQ ID NO: 1962181 - RNA, 19 nt, Artificial Sequence
  Description of Artificial Sequence: Synthetic oligonucleotide
  Antisense strand to SEQ ID NO: 1962180
ucaauuagaaccaugccuu

SEQ ID NO: 1962182 - RNA, 19 nt, Artificial Sequence
  Description of Artificial Sequence: Synthetic oligonucleotide
  Sense strand starting at position 2851 of SEQ ID NO: 1880372
aggaauuaagucugaacuu

SEQ ID NO: 1962183 - RNA, 19 nt, Artificial Sequence
  Description of Artificial Sequence: Synthetic oligonucleotide
  Antisense strand to SEQ ID NO: 1962182
aaguucagacuuaauuccu

SEQ ID NO: 1962184 - RNA, 19 nt, Artificial Sequence
  Description of Artificial Sequence: Synthetic oligonucleotide
  Sense strand starting at position 2852 of SEQ ID NO: 1880372
ggaauuaagucugaacuuu

SEQ ID NO: 1962185 - RNA, 19 nt, Artificial Sequence
  Description of Artificial Sequence: Synthetic oligonucleotide
  Antisense strand to SEQ ID NO: 1962184
aaaguucagacuuaauucc

SEQ ID NO: 1962186 - RNA, 19 nt, Artificial Sequence
  Description of Artificial Sequence: Synthetic oligonucleotide
  Sense strand starting at position 2900 of SEQ ID NO: 1880372
cuucuugcugcuggaauuu

SEQ ID NO: 1962187 - RNA, 19 nt, Artificial Sequence
  Description of Artificial Sequence: Synthetic oligonucleotide
  Antisense strand to SEQ ID NO: 1962186
aaauuccagcagcaagaag

SEQ ID NO: 1962188 - RNA, 19 nt, Artificial Sequence
  Description of Artificial Sequence: Synthetic oligonucleotide
  Sense strand starting at position 2911 of SEQ ID NO: 1880372
uggaauuucuugugcucau

SEQ ID NO: 1962189 - RNA, 19 nt, Artificial Sequence
  Description of Artificial Sequence: Synthetic oligonucleotide
  Antisense strand to SEQ ID NO: 1962188
augagcacaagaaauucca

SEQ ID NO: 1962190 - RNA, 19 nt, Artificial Sequence
  Description of Artificial Sequence: Synthetic oligonucleotide
  Sense strand starting at position 2912 of SEQ ID NO: 1880372
ggaauuucuugugcucauc

SEQ ID NO: 1962191 - RNA, 19 nt, Artificial Sequence
  Description of Artificial Sequence: Synthetic oligonucleotide
  Antisense strand to SEQ ID NO: 1962190
gaugagcacaagaaauucc

SEQ ID NO: 1962192 - RNA, 19 nt, Artificial Sequence
  Description of Artificial Sequence: Synthetic oligonucleotide
  Sense strand starting at position 3006 of SEQ ID NO: 1880372
ggcagaaacuuugaugggu

SEQ ID NO: 1962193 - RNA, 19 nt, Artificial Sequence
  Description of Artificial Sequence: Synthetic oligonucleotide
  Antisense strand to SEQ ID NO: 1962192
acccaucaaaguuucugcc

SEQ ID NO: 1962194 - RNA, 19 nt, Artificial Sequence
  Description of Artificial Sequence: Synthetic oligonucleotide
  Sense strand starting at position 3011 of SEQ ID NO: 1880372
aaacuuugauggguagauc

SEQ ID NO: 1962195 - RNA, 19 nt, Artificial Sequence
  Description of Artificial Sequence: Synthetic oligonucleotide
  Antisense strand to SEQ ID NO: 1962194
gaucuacccaucaaaguuu

SEQ ID NO: 1962196 - RNA, 19 nt, Artificial Sequence
  Description of Artificial Sequence: Synthetic oligonucleotide
  Sense strand starting at position 3336 of SEQ ID NO: 1880372
gucgucucauggcugaauu

SEQ ID NO: 1962197 - RNA, 19 nt, Artificial Sequence
  Description of Artificial Sequence: Synthetic oligonucleotide
  Antisense strand to SEQ ID NO: 1962196
aauucagccaugagacgac

SEQ ID NO: 1962198 - RNA, 19 nt, Artificial Sequence
  Description of Artificial Sequence: Synthetic oligonucleotide
  Sense strand starting at position 3337 of SEQ ID NO: 1880372
ucgucucauggcugaauua

SEQ ID NO: 1962199 - RNA, 19 nt, Artificial Sequence
  Description of Artificial Sequence: Synthetic oligonucleotide
  Antisense strand to SEQ ID NO: 1962198
uaauucagccaugagacga

SEQ ID NO: 1962200 - RNA, 19 nt, Artificial Sequence
  Description of Artificial Sequence: Synthetic oligonucleotide
  Sense strand starting at position 3457 of SEQ ID NO: 1880372
uugucaggaugcuccaaau

SEQ ID NO: 1962201 - RNA, 19 nt, Artificial Sequence
  Description of Artificial Sequence: Synthetic oligonucleotide
  Antisense strand to SEQ ID NO: 1962200
auuuggagcauccugacaa

SEQ ID NO: 1962202 - RNA, 19 nt, Artificial Sequence
  Description of Artificial Sequence: Synthetic oligonucleotide
  Sense strand starting at position 3572 of SEQ ID NO: 1880372
acugaucuguuugcaauuu

SEQ ID NO: 1962203 - RNA, 19 nt, Artificial Sequence
  Description of Artificial Sequence: Synthetic oligonucleotide
  Antisense strand to SEQ ID NO: 1962202
aaauugcaaacagaucagu

SEQ ID NO: 1962204 - RNA, 19 nt, Artificial Sequence
  Description of Artificial Sequence: Synthetic oligonucleotide
  Sense strand starting at position 3618 of SEQ ID NO: 1880372
ucaggaucuuuacacugau

SEQ ID NO: 1962205 - RNA, 19 nt, Artificial Sequence
  Description of Artificial Sequence: Synthetic oligonucleotide
  Antisense strand to SEQ ID NO: 1962204
aucaguguaaagauccuga

SEQ ID NO: 1962206 - RNA, 19 nt, Artificial Sequence
  Description of Artificial Sequence: Synthetic oligonucleotide
  Sense strand starting at position 3732 of SEQ ID NO: 1880372
ucucgaguccugggagucu

SEQ ID NO: 1962207 - RNA, 19 nt, Artificial Sequence
  Description of Artificial Sequence: Synthetic oligonucleotide
  Antisense strand to SEQ ID NO: 1962206
agacucccaggacucgaga

SEQ ID NO: 1962208 - RNA, 19 nt, Artificial Sequence
  Description of Artificial Sequence: Synthetic oligonucleotide
  Sense strand starting at position 3771 of SEQ ID NO: 1880372
guucccuuccagcaugaua

SEQ ID NO: 1962209 - RNA, 19 nt, Artificial Sequence
  Description of Artificial Sequence: Synthetic oligonucleotide
  Antisense strand to SEQ ID NO: 1962208
uaucaugcuggaagggaac

SEQ ID NO: 1962210 - RNA, 19 nt, Artificial Sequence
  Description of Artificial Sequence: Synthetic oligonucleotide
  Sense strand starting at position 3890 of SEQ ID NO: 1880372
aggguucaugcauaaguga

SEQ ID NO: 1962211 - RNA, 19 nt, Artificial Sequence
  Description of Artificial Sequence: Synthetic oligonucleotide
  Antisense strand to SEQ ID NO: 1962210
ucacuuaugcaugaacccu

SEQ ID NO: 1962212 - RNA, 19 nt, Artificial Sequence
  Description of Artificial Sequence: Synthetic oligonucleotide
  Sense strand starting at position 127 of SEQ ID NO: 1880373
uugaaauuaggaugcucaa

SEQ ID NO: 1962213 - RNA, 19 nt, Artificial Sequence
  Description of Artificial Sequence: Synthetic oligonucleotide
  Antisense strand to SEQ ID NO: 1962212
uugagcauccuaauuucaa

SEQ ID NO: 1962214 - RNA, 19 nt, Artificial Sequence
  Description of Artificial Sequence: Synthetic oligonucleotide
  Sense strand starting at position 282 of SEQ ID NO: 1880373
ugcgaaugugauuaaguua

SEQ ID NO: 1962215 - RNA, 19 nt, Artificial Sequence
  Description of Artificial Sequence: Synthetic oligonucleotide
  Antisense strand to SEQ ID NO: 1962214
uaacuuaaucacauucgca

SEQ ID NO: 1962216 - RNA, 19 nt, Artificial Sequence
  Description of Artificial Sequence: Synthetic oligonucleotide
  Sense strand starting at position 312 of SEQ ID NO: 1880373
ccagaagcuuauccuggau

SEQ ID NO: 1962217 - RNA, 19 nt, Artificial Sequence
  Description of Artificial Sequence: Synthetic oligonucleotide
  Antisense strand to SEQ ID NO: 1962216
auccaggauaagcuucugg

SEQ ID NO: 1962218 - RNA, 19 nt, Artificial Sequence
  Description of Artificial Sequence: Synthetic oligonucleotide
  Sense strand starting at position 315 of SEQ ID NO: 1880373
gaagcuuauccuggaugau

SEQ ID NO: 1962219 - RNA, 19 nt, Artificial Sequence
  Description of Artificial Sequence: Synthetic oligonucleotide
  Antisense strand to SEQ ID NO: 1962218
aucauccaggauaagcuuc

SEQ ID NO: 1962220 - RNA, 19 nt, Artificial Sequence
  Description of Artificial Sequence: Synthetic oligonucleotide
  Sense strand starting at position 446 of SEQ ID NO: 1880373
cuuuacuucuggccaagaa

SEQ ID NO: 1962221 - RNA, 19 nt, Artificial Sequence
  Description of Artificial Sequence: Synthetic oligonucleotide
  Antisense strand to SEQ ID NO: 1962220
uucuuggccagaaguaaag

SEQ ID NO: 1962222 - RNA, 19 nt, Artificial Sequence
  Description of Artificial Sequence: Synthetic oligonucleotide
  Sense strand starting at position 447 of SEQ ID NO: 1880373
uuuacuucuggccaagaag

SEQ ID NO: 1962223 - RNA, 19 nt, Artificial Sequence
  Description of Artificial Sequence: Synthetic oligonucleotide
  Antisense strand to SEQ ID NO: 1962222
cuucuuggccagaaguaaa

SEQ ID NO: 1962224 - RNA, 19 nt, Artificial Sequence
  Description of Artificial Sequence: Synthetic oligonucleotide
  Sense strand starting at position 501 of SEQ ID NO: 1880373
gccacuacucaccggaaca

SEQ ID NO: 1962225 - RNA, 19 nt, Artificial Sequence
  Description of Artificial Sequence: Synthetic oligonucleotide
  Antisense strand to SEQ ID NO: 1962224
uguuccggugaguaguggc

SEQ ID NO: 1962226 - RNA, 19 nt, Artificial Sequence
  Description of Artificial Sequence: Synthetic oligonucleotide
  Sense strand starting at position 587 of SEQ ID NO: 1880373
ggaggcuuagcccagagaa

SEQ ID NO: 1962227 - RNA, 19 nt, Artificial Sequence
  Description of Artificial Sequence: Synthetic oligonucleotide
  Antisense strand to SEQ ID NO: 1962226
uucucugggcuaagccucc

SEQ ID NO: 1962228 - RNA, 19 nt, Artificial Sequence
  Description of Artificial Sequence: Synthetic oligonucleotide
  Sense strand starting at position 615 of SEQ ID NO: 1880373
guuucuggacucuagaacu

SEQ ID NO: 1962229 - RNA, 19 nt, Artificial Sequence
  Description of Artificial Sequence: Synthetic oligonucleotide
  Antisense strand to SEQ ID NO: 1962228
aguucuagaguccagaaac

SEQ ID NO: 1962230 - RNA, 19 nt, Artificial Sequence
  Description of Artificial Sequence: Synthetic oligonucleotide
  Sense strand starting at position 723 of SEQ ID NO: 1880373
cccagaaugcuggaaaugu

SEQ ID NO: 1962231 - RNA, 19 nt, Artificial Sequence
  Description of Artificial Sequence: Synthetic oligonucleotide
  Antisense strand to SEQ ID NO: 1962230
acauuuccagcauucuggg

SEQ ID NO: 1962232 - RNA, 19 nt, Artificial Sequence
  Description of Artificial Sequence: Synthetic oligonucleotide
  Sense strand starting at position 812 of SEQ ID NO: 1880373
gcaaguggccugcaggaau

SEQ ID NO: 1962233 - RNA, 19 nt, Artificial Sequence
  Description of Artificial Sequence: Synthetic oligonucleotide
  Antisense strand to SEQ ID NO: 1962232
auuccugcaggccacuugc

SEQ ID NO: 1962234 - RNA, 19 nt, Artificial Sequence
  Description of Artificial Sequence: Synthetic oligonucleotide
  Sense strand starting at position 861 of SEQ ID NO: 1880373
uuacaugcuguccacauua

SEQ ID NO: 1962235 - RNA, 19 nt, Artificial Sequence
  Description of Artificial Sequence: Synthetic oligonucleotide
  Antisense strand to SEQ ID NO: 1962234
uaauguggacagcauguaa

SEQ ID NO: 1962236 - RNA, 19 nt, Artificial Sequence
  Description of Artificial Sequence: Synthetic oligonucleotide
  Sense strand starting at position 922 of SEQ ID NO: 1880373
gaaguagauguuggagaca

SEQ ID NO: 1962237 - RNA, 19 nt, Artificial Sequence
  Description of Artificial Sequence: Synthetic oligonucleotide
  Antisense strand to SEQ ID NO: 1962236
ugucuccaacaucuacuuc

SEQ ID NO: 1962238 - RNA, 19 nt, Artificial Sequence
  Description of Artificial Sequence: Synthetic oligonucleotide
  Sense strand starting at position 981 of SEQ ID NO: 1880373
ugagauuaucaagguuuaa

SEQ ID NO: 1962239 - RNA, 19 nt, Artificial Sequence
  Description of Artificial Sequence: Synthetic oligonucleotide
  Antisense strand to SEQ ID NO: 1962238
uuaaaccuugauaaucuca

SEQ ID NO: 1962240 - RNA, 19 nt, Artificial Sequence
  Description of Artificial Sequence: Synthetic oligonucleotide
  Sense strand starting at position 1115 of SEQ ID NO: 1880373
gugagaccaucuccacuuu

SEQ ID NO: 1962241 - RNA, 19 nt, Artificial Sequence
  Description of Artificial Sequence: Synthetic oligonucleotide
  Antisense strand to SEQ ID NO: 1962240
aaaguggagauggucucac

SEQ ID NO: 1962242 - RNA, 19 nt, Artificial Sequence
  Description of Artificial Sequence: Synthetic oligonucleotide
  Sense strand starting at position 1306 of SEQ ID NO: 1880373
uagugaaucugagcucacu

SEQ ID NO: 1962243 - RNA, 19 nt, Artificial Sequence
  Description of Artificial Sequence: Synthetic oligonucleotide
  Antisense strand to SEQ ID NO: 1962242
agugagcucagauucacua

SEQ ID NO: 1962244 - RNA, 19 nt, Artificial Sequence
  Description of Artificial Sequence: Synthetic oligonucleotide
  Sense strand starting at position 1542 of SEQ ID NO: 1880373
gugaacauauuacuaugau

SEQ ID NO: 1962245 - RNA, 19 nt, Artificial Sequence
  Description of Artificial Sequence: Synthetic oligonucleotide
  Antisense strand to SEQ ID NO: 1962244
aucauaguaauauguucac

SEQ ID NO: 1962246 - RNA, 19 nt, Artificial Sequence
  Description of Artificial Sequence: Synthetic oligonucleotide
  Sense strand starting at position 1655 of SEQ ID NO: 1880373
agcacugagcccuaaguuu

SEQ ID NO: 1962247 - RNA, 19 nt, Artificial Sequence
  Description of Artificial Sequence: Synthetic oligonucleotide
  Antisense strand to SEQ ID NO: 1962246
aaacuuagggcucagugcu

SEQ ID NO: 1962248 - RNA, 19 nt, Artificial Sequence
  Description of Artificial Sequence: Synthetic oligonucleotide
  Sense strand starting at position 1678 of SEQ ID NO: 1880373
cucucugauccuugaugga

SEQ ID NO: 1962249 - RNA, 19 nt, Artificial Sequence
  Description of Artificial Sequence: Synthetic oligonucleotide
  Antisense strand to SEQ ID NO: 1962248
uccaucaaggaucagagag

SEQ ID NO: 1962250 - RNA, 19 nt, Artificial Sequence
  Description of Artificial Sequence: Synthetic oligonucleotide
  Sense strand starting at position 1819 of SEQ ID NO: 1880373
uguaucaaauaugugggaa

SEQ ID NO: 1962251 - RNA, 19 nt, Artificial Sequence
  Description of Artificial Sequence: Synthetic oligonucleotide
  Antisense strand to SEQ ID NO: 1962250
uucccacauauuugauaca

SEQ ID NO: 1962252 - RNA, 19 nt, Artificial Sequence
  Description of Artificial Sequence: Synthetic oligonucleotide
  Sense strand starting at position 1820 of SEQ ID NO: 1880373
guaucaaauaugugggaac

SEQ ID NO: 1962253 - RNA, 19 nt, Artificial Sequence
  Description of Artificial Sequence: Synthetic oligonucleotide
  Antisense strand to SEQ ID NO: 1962252
guucccacauauuugauac

SEQ ID NO: 1962254 - RNA, 19 nt, Artificial Sequence
  Description of Artificial Sequence: Synthetic oligonucleotide
  Sense strand starting at position 1914 of SEQ ID NO: 1880373
aggcuauugagaggugaag

SEQ ID NO: 1962255 - RNA, 19 nt, Artificial Sequence
  Description of Artificial Sequence: Synthetic oligonucleotide
  Antisense strand to SEQ ID NO: 1962254
cuucaccucucaauagccu

SEQ ID NO: 1962256 - RNA, 19 nt, Artificial Sequence
  Description of Artificial Sequence: Synthetic oligonucleotide
  Sense strand starting at position 2139 of SEQ ID NO: 1880373
ggaccaaucagccagaugu

SEQ ID NO: 1962257 - RNA, 19 nt, Artificial Sequence
  Description of Artificial Sequence: Synthetic oligonucleotide
  Antisense strand to SEQ ID NO: 1962256
acaucuggcugauuggucc

SEQ ID NO: 1962258 - RNA, 19 nt, Artificial Sequence
  Description of Artificial Sequence: Synthetic oligonucleotide
  Sense strand starting at position 2623 of SEQ ID NO: 1880373
gagauccuggcuugcauau

SEQ ID NO: 1962259 - RNA, 19 nt, Artificial Sequence
  Description of Artificial Sequence: Synthetic oligonucleotide
  Antisense strand to SEQ ID NO: 1962258
auaugcaagccaggaucuc

SEQ ID NO: 1962260 - RNA, 19 nt, Artificial Sequence
  Description of Artificial Sequence: Synthetic oligonucleotide
  Sense strand starting at position 2667 of SEQ ID NO: 1880373
aagggauucuacgugacag

SEQ ID NO: 1962261 - RNA, 19 nt, Artificial Sequence
  Description of Artificial Sequence: Synthetic oligonucleotide
  Antisense strand to SEQ ID NO: 1962260
cugucacguagaaucccuu

SEQ ID NO: 1962262 - RNA, 19 nt, Artificial Sequence
  Description of Artificial Sequence: Synthetic oligonucleotide
  Sense strand starting at position 2668 of SEQ ID NO: 1880373
agggauucuacgugacaga

SEQ ID NO: 1962263 - RNA, 19 nt, Artificial Sequence
  Description of Artificial Sequence: Synthetic oligonucleotide
  Antisense strand to SEQ ID NO: 1962262
ucugucacguagaaucccu

SEQ ID NO: 1962264 - RNA, 19 nt, Artificial Sequence
  Description of Artificial Sequence: Synthetic oligonucleotide
  Sense strand starting at position 2721 of SEQ ID NO: 1880373
uggcuaagcagugauguuu

SEQ ID NO: 1962265 - RNA, 19 nt, Artificial Sequence
  Description of Artificial Sequence: Synthetic oligonucleotide
  Antisense strand to SEQ ID NO: 1962264
aaacaucacugcuuagcca

SEQ ID NO: 1962266 - RNA, 19 nt, Artificial Sequence
  Description of Artificial Sequence: Synthetic oligonucleotide
  Sense strand starting at position 2727 of SEQ ID NO: 1880373
agcagugauguuuauguaa

SEQ ID NO: 1962267 - RNA, 19 nt, Artificial Sequence
  Description of Artificial Sequence: Synthetic oligonucleotide
  Antisense strand to SEQ ID NO: 1962266
uuacauaaacaucacugcu

SEQ ID NO: 1962268 - RNA, 19 nt, Artificial Sequence
  Description of Artificial Sequence: Synthetic oligonucleotide
  Sense strand starting at position 2730 of SEQ ID NO: 1880373
agugauguuuauguaagua

SEQ ID NO: 1962269 - RNA, 19 nt, Artificial Sequence
  Description of Artificial Sequence: Synthetic oligonucleotide
  Antisense strand to SEQ ID NO: 1962268
uacuuacauaaacaucacu

SEQ ID NO: 1962270 - RNA, 19 nt, Artificial Sequence
  Description of Artificial Sequence: Synthetic oligonucleotide
  Sense strand starting at position 2932 of SEQ ID NO: 1880373
cccgcaaguccucugcauu

SEQ ID NO: 1962271 - RNA, 19 nt, Artificial Sequence
  Description of Artificial Sequence: Synthetic oligonucleotide
  Antisense strand to SEQ ID NO: 1962270
aaugcagaggacuugcggg

SEQ ID NO: 1962272 - RNA, 19 nt, Artificial Sequence
  Description of Artificial Sequence: Synthetic oligonucleotide
  Sense strand starting at position 3140 of SEQ ID NO: 1880373
cuucuauaacuagagguuu

SEQ ID NO: 1962273 - RNA, 19 nt, Artificial Sequence
  Description of Artificial Sequence: Synthetic oligonucleotide
  Antisense strand to SEQ ID NO: 1962272
aaaccucuaguuauagaag

SEQ ID NO: 1962274 - RNA, 19 nt, Artificial Sequence
  Description of Artificial Sequence: Synthetic oligonucleotide
  Sense strand starting at position 3188 of SEQ ID NO: 1880373
ggaugaauucuauguaccg

SEQ ID NO: 1962275 - RNA, 19 nt, Artificial Sequence
  Description of Artificial Sequence: Synthetic oligonucleotide
  Antisense strand to SEQ ID NO: 1962274
cgguacauagaauucaucc

SEQ ID NO: 1962276 - RNA, 19 nt, Artificial Sequence
  Description of Artificial Sequence: Synthetic oligonucleotide
  Sense strand starting at position 3356 of SEQ ID NO: 1880373
acuccuagcuaugugauga

SEQ ID NO: 1962277 - RNA, 19 nt, Artificial Sequence
  Description of Artificial Sequence: Synthetic oligonucleotide
  Antisense strand to SEQ ID NO: 1962276
ucaucacauagcuaggagu

SEQ ID NO: 1962278 - RNA, 19 nt, Artificial Sequence
  Description of Artificial Sequence: Synthetic oligonucleotide
  Sense strand starting at position 3413 of SEQ ID NO: 1880373
aaauuucugguuugcaguu

SEQ ID NO: 1962279 - RNA, 19 nt, Artificial Sequence
  Description of Artificial Sequence: Synthetic oligonucleotide
  Antisense strand to SEQ ID NO: 1962278
aacugcaaaccagaaauuu

SEQ ID NO: 1962280 - RNA, 19 nt, Artificial Sequence
  Description of Artificial Sequence: Synthetic oligonucleotide
  Sense strand starting at position 3425 of SEQ ID NO: 1880373
ugcaguuugacuugugaag

SEQ ID NO: 1962281 - RNA, 19 nt, Artificial Sequence
  Description of Artificial Sequence: Synthetic oligonucleotide
  Antisense strand to SEQ ID NO: 1962280
cuucacaagucaaacugca

SEQ ID NO: 1962282 - RNA, 19 nt, Artificial Sequence
  Description of Artificial Sequence: Synthetic oligonucleotide
  Sense strand starting at position 3636 of SEQ ID NO: 1880373
aaggguuucguuugggaua

SEQ ID NO: 1962283 - RNA, 19 nt, Artificial Sequence
  Description of Artificial Sequence: Synthetic oligonucleotide
  Antisense strand to SEQ ID NO: 1962282
uaucccaaacgaaacccuu

SEQ ID NO: 1962284 - RNA, 19 nt, Artificial Sequence
  Description of Artificial Sequence: Synthetic oligonucleotide
  Sense strand starting at position 3641 of SEQ ID NO: 1880373
uuucguuugggauaaugac

SEQ ID NO: 1962285 - RNA, 19 nt, Artificial Sequence
  Description of Artificial Sequence: Synthetic oligonucleotide
  Antisense strand to SEQ ID NO: 1962284
gucauuaucccaaacgaaa

SEQ ID NO: 1962286 - RNA, 19 nt, Artificial Sequence
  Description of Artificial Sequence: Synthetic oligonucleotide
  Sense strand starting at position 3838 of SEQ ID NO: 1880373
guggaucugcucuauucua

SEQ ID NO: 1962287 - RNA, 19 nt, Artificial Sequence
  Description of Artificial Sequence: Synthetic oligonucleotide
  Antisense strand to SEQ ID NO: 1962286
uagaauagagcagauccac

SEQ ID NO: 1962288 - RNA, 19 nt, Artificial Sequence
  Description of Artificial Sequence: Synthetic oligonucleotide
  Sense strand starting at position 3902 of SEQ ID NO: 1880373
gcaggaaugccaugacauu

SEQ ID NO: 1962289 - RNA, 19 nt, Artificial Sequence
  Description of Artificial Sequence: Synthetic oligonucleotide
  Antisense strand to SEQ ID NO: 1962288
aaugucauggcauuccugc

SEQ ID NO: 1962290 - RNA, 19 nt, Artificial Sequence
  Description of Artificial Sequence: Synthetic oligonucleotide
  Sense strand starting at position 3968 of SEQ ID NO: 1880373
gcaucaccuuagguuuaau

SEQ ID NO: 1962291 - RNA, 19 nt, Artificial Sequence
  Description of Artificial Sequence: Synthetic oligonucleotide
  Antisense strand to SEQ ID NO: 1962290
auuaaaccuaaggugaugc

SEQ ID NO: 1962292 - RNA, 19 nt, Artificial Sequence
  Description of Artificial Sequence: Synthetic oligonucleotide
  Sense strand starting at position 46 of SEQ ID NO: 1880374
cauuacaauguuuggaguu

SEQ ID NO: 1962293 - RNA, 19 nt, Artificial Sequence
  Description of Artificial Sequence: Synthetic oligonucleotide
  Antisense strand to SEQ ID NO: 1962292
aacuccaaacauuguaaug

SEQ ID NO: 1962294 - RNA, 19 nt, Artificial Sequence
  Description of Artificial Sequence: Synthetic oligonucleotide
  Sense strand starting at position 214 of SEQ ID NO: 1880374
uaccaaugugcagaaguga

SEQ ID NO: 1962295 - RNA, 19 nt, Artificial Sequence
  Description of Artificial Sequence: Synthetic oligonucleotide
  Antisense strand to SEQ ID NO: 1962294
ucacuucugcacauuggua

SEQ ID NO: 1962296 - RNA, 19 nt, Artificial Sequence
  Description of Artificial Sequence: Synthetic oligonucleotide
  Sense strand starting at position 485 of SEQ ID NO: 1880374
cucagacaucauggagcaa

SEQ ID NO: 1962297 - RNA, 19 nt, Artificial Sequence
  Description of Artificial Sequence: Synthetic oligonucleotide
  Antisense strand to SEQ ID NO: 1962296
uugcuccaugaugucugag

SEQ ID NO: 1962298 - RNA, 19 nt, Artificial Sequence
  Description of Artificial Sequence: Synthetic oligonucleotide
  Sense strand starting at position 676 of SEQ ID NO: 1880374
ugagauguugcagagcuca

SEQ ID NO: 1962299 - RNA, 19 nt, Artificial Sequence
  Description of Artificial Sequence: Synthetic oligonucleotide
  Antisense strand to SEQ ID NO: 1962298
ugagcucugcaacaucuca

SEQ ID NO: 1962300 - RNA, 19 nt, Artificial Sequence
  Description of Artificial Sequence: Synthetic oligonucleotide
  Sense strand starting at position 707 of SEQ ID NO: 1880374
cagcauaaagucugagaca

SEQ ID NO: 1962301 - RNA, 19 nt, Artificial Sequence
  Description of Artificial Sequence: Synthetic oligonucleotide
  Antisense strand to SEQ ID NO: 1962300
ugucucagacuuuaugcug

SEQ ID NO: 1962302 - RNA, 19 nt, Artificial Sequence
  Description of Artificial Sequence: Synthetic oligonucleotide
  Sense strand starting at position 805 of SEQ ID NO: 1880374
cuuucuucuguauggauga

SEQ ID NO: 1962303 - RNA, 19 nt, Artificial Sequence
  Description of Artificial Sequence: Synthetic oligonucleotide
  Antisense strand to SEQ ID NO: 1962302
ucauccauacagaagaaag

SEQ ID NO: 1962304 - RNA, 19 nt, Artificial Sequence
  Description of Artificial Sequence: Synthetic oligonucleotide
  Sense strand starting at position 810 of SEQ ID NO: 1880374
uucuguauggaugaaguga

SEQ ID NO: 1962305 - RNA, 19 nt, Artificial Sequence
  Description of Artificial Sequence: Synthetic oligonucleotide
  Antisense strand to SEQ ID NO: 1962304
ucacuucauccauacagaa

SEQ ID NO: 1962306 - RNA, 19 nt, Artificial Sequence
  Description of Artificial Sequence: Synthetic oligonucleotide
  Sense strand starting at position 1038 of SEQ ID NO: 1880374
ccuuguuugcaugauaacu

SEQ ID NO: 1962307 - RNA, 19 nt, Artificial Sequence
  Description of Artificial Sequence: Synthetic oligonucleotide
  Antisense strand to SEQ ID NO: 1962306
aguuaucaugcaaacaagg

SEQ ID NO: 1962308 - RNA, 19 nt, Artificial Sequence
  Description of Artificial Sequence: Synthetic oligonucleotide
  Sense strand starting at position 1238 of SEQ ID NO: 1880374
ccaauuauuccauggagau

SEQ ID NO: 1962309 - RNA, 19 nt, Artificial Sequence
  Description of Artificial Sequence: Synthetic oligonucleotide
  Antisense strand to SEQ ID NO: 1962308
aucuccauggaauaauugg

SEQ ID NO: 1962310 - RNA, 19 nt, Artificial Sequence
  Description of Artificial Sequence: Synthetic oligonucleotide
  Sense strand starting at position 1283 of SEQ ID NO: 1880374
cguuaauucccagaaagca

SEQ ID NO: 1962311 - RNA, 19 nt, Artificial Sequence
  Description of Artificial Sequence: Synthetic oligonucleotide
  Antisense strand to SEQ ID NO: 1962310
ugcuuucugggaauuaacg

SEQ ID NO: 1962312 - RNA, 19 nt, Artificial Sequence
  Description of Artificial Sequence: Synthetic oligonucleotide
  Sense strand starting at position 1345 of SEQ ID NO: 1880374
agaggaagagcuggcuaua

SEQ ID NO: 1962313 - RNA, 19 nt, Artificial Sequence
  Description of Artificial Sequence: Synthetic oligonucleotide
  Antisense strand to SEQ ID NO: 1962312
uauagccagcucuuccucu

SEQ ID NO: 1962314 - RNA, 19 nt, Artificial Sequence
  Description of Artificial Sequence: Synthetic oligonucleotide
  Sense strand starting at position 1356 of SEQ ID NO: 1880374
uggcuauauaacuggguga

SEQ ID NO: 1962315 - RNA, 19 nt, Artificial Sequence
  Description of Artificial Sequence: Synthetic oligonucleotide
  Antisense strand to SEQ ID NO: 1962314
ucacccaguuauauagcca

SEQ ID NO: 1962316 - RNA, 19 nt, Artificial Sequence
  Description of Artificial Sequence: Synthetic oligonucleotide
  Sense strand starting at position 1358 of SEQ ID NO: 1880374
gcuauauaacugggugaga

SEQ ID NO: 1962317 - RNA, 19 nt, Artificial Sequence
  Description of Artificial Sequence: Synthetic oligonucleotide
  Antisense strand to SEQ ID NO: 1962316
ucucacccaguuauauagc

SEQ ID NO: 1962318 - RNA, 19 nt, Artificial Sequence
  Description of Artificial Sequence: Synthetic oligonucleotide
  Sense strand starting at position 1414 of SEQ ID NO: 1880374
augaaaucaggucaucugu

SEQ ID NO: 1962319 - RNA, 19 nt, Artificial Sequence
  Description of Artificial Sequence: Synthetic oligonucleotide
  Antisense strand to SEQ ID NO: 1962318
acagaugaccugauuucau

SEQ ID NO: 1962320 - RNA, 19 nt, Artificial Sequence
  Description of Artificial Sequence: Synthetic oligonucleotide
  Sense strand starting at position 1416 of SEQ ID NO: 1880374
gaaaucaggucaucuguga

SEQ ID NO: 1962321 - RNA, 19 nt, Artificial Sequence
  Description of Artificial Sequence: Synthetic oligonucleotide
  Antisense strand to SEQ ID NO: 1962320
ucacagaugaccugauuuc

SEQ ID NO: 1962322 - RNA, 19 nt, Artificial Sequence
  Description of Artificial Sequence: Synthetic oligonucleotide
  Sense strand starting at position 1577 of SEQ ID NO: 1880374
uaguaaacagccuggguaa

SEQ ID NO: 1962323 - RNA, 19 nt, Artificial Sequence
  Description of Artificial Sequence: Synthetic oligonucleotide
  Antisense strand to SEQ ID NO: 1962322
uuacccaggcuguuuacua

SEQ ID NO: 1962324 - RNA, 19 nt, Artificial Sequence
  Description of Artificial Sequence: Synthetic oligonucleotide
  Sense strand starting at position 1590 of SEQ ID NO: 1880374
ggguaaaggcugggaagua

SEQ ID NO: 1962325 - RNA, 19 nt, Artificial Sequence
  Description of Artificial Sequence: Synthetic oligonucleotide
  Antisense strand to SEQ ID NO: 1962324
uacuucccagccuuuaccc

SEQ ID NO: 1962326 - RNA, 19 nt, Artificial Sequence
  Description of Artificial Sequence: Synthetic oligonucleotide
  Sense strand starting at position 1637 of SEQ ID NO: 1880374
acauaaaggcaguguaaau

SEQ ID NO: 1962327 - RNA, 19 nt, Artificial Sequence
  Description of Artificial Sequence: Synthetic oligonucleotide
  Antisense strand to SEQ ID NO: 1962326
auuuacacugccuuuaugu

SEQ ID NO: 1962328 - RNA, 19 nt, Artificial Sequence
  Description of Artificial Sequence: Synthetic oligonucleotide
  Sense strand starting at position 1718 of SEQ ID NO: 1880374
gaccauuauggcugacgga

SEQ ID NO: 1962329 - RNA, 19 nt, Artificial Sequence
  Description of Artificial Sequence: Synthetic oligonucleotide
  Antisense strand to SEQ ID NO: 1962328
uccgucagccauaaugguc

SEQ ID NO: 1962330 - RNA, 19 nt, Artificial Sequence
  Description of Artificial Sequence: Synthetic oligonucleotide
  Sense strand starting at position 1719 of SEQ ID NO: 1880374
accauuauggcugacggau

SEQ ID NO: 1962331 - RNA, 19 nt, Artificial Sequence
  Description of Artificial Sequence: Synthetic oligonucleotide
  Antisense strand to SEQ ID NO: 1962330
auccgucagccauaauggu

SEQ ID NO: 1962332 - RNA, 19 nt, Artificial Sequence
  Description of Artificial Sequence: Synthetic oligonucleotide
  Sense strand starting at position 1969 of SEQ ID NO: 1880374
cugcauuguccugaaacca

SEQ ID NO: 1962333 - RNA, 19 nt, Artificial Sequence
  Description of Artificial Sequence: Synthetic oligonucleotide
  Antisense strand to SEQ ID NO: 1962332
ugguuucaggacaaugcag

SEQ ID NO: 1962334 - RNA, 19 nt, Artificial Sequence
  Description of Artificial Sequence: Synthetic oligonucleotide
  Sense strand starting at position 2030 of SEQ ID NO: 1880374
gguggaugcucauuaauug

SEQ ID NO: 1962335 - RNA, 19 nt, Artificial Sequence
  Description of Artificial Sequence: Synthetic oligonucleotide
  Antisense strand to SEQ ID NO: 1962334
caauuaaugagcauccacc

SEQ ID NO: 1962336 - RNA, 19 nt, Artificial Sequence
  Description of Artificial Sequence: Synthetic oligonucleotide
  Sense strand starting at position 2031 of SEQ ID NO: 1880374
guggaugcucauuaauuga

SEQ ID NO: 1962337 - RNA, 19 nt, Artificial Sequence
  Description of Artificial Sequence: Synthetic oligonucleotide
  Antisense strand to SEQ ID NO: 1962336
ucaauuaaugagcauccac

SEQ ID NO: 1962338 - RNA, 19 nt, Artificial Sequence
  Description of Artificial Sequence: Synthetic oligonucleotide
  Sense strand starting at position 2067 of SEQ ID NO: 1880374
agaugauaucuguggguuc

SEQ ID NO: 1962339 - RNA, 19 nt, Artificial Sequence
  Description of Artificial Sequence: Synthetic oligonucleotide
  Antisense strand to SEQ ID NO: 1962338
gaacccacagauaucaucu

SEQ ID NO: 1962340 - RNA, 19 nt, Artificial Sequence
  Description of Artificial Sequence: Synthetic oligonucleotide
  Sense strand starting at position 2175 of SEQ ID NO: 1880374
aggugucucaaggacucua

SEQ ID NO: 1962341 - RNA, 19 nt, Artificial Sequence
  Description of Artificial Sequence: Synthetic oligonucleotide
  Antisense strand to SEQ ID NO: 1962340
uagaguccuugagacaccu

SEQ ID NO: 1962342 - RNA, 19 nt, Artificial Sequence
  Description of Artificial Sequence: Synthetic oligonucleotide
  Sense strand starting at position 2291 of SEQ ID NO: 1880374
gggaauucuuauguacacu

SEQ ID NO: 1962343 - RNA, 19 nt, Artificial Sequence
  Description of Artificial Sequence: Synthetic oligonucleotide
  Antisense strand to SEQ ID NO: 1962342
aguguacauaagaauuccc

SEQ ID NO: 1962344 - RNA, 19 nt, Artificial Sequence
  Description of Artificial Sequence: Synthetic oligonucleotide
  Sense strand starting at position 2350 of SEQ ID NO: 1880374
gucucacaagcugaugaau

SEQ ID NO: 1962345 - RNA, 19 nt, Artificial Sequence
  Description of Artificial Sequence: Synthetic oligonucleotide
  Antisense strand to SEQ ID NO: 1962344
auucaucagcuugugagac

SEQ ID NO: 1962346 - RNA, 19 nt, Artificial Sequence
  Description of Artificial Sequence: Synthetic oligonucleotide
  Sense strand starting at position 2369 of SEQ ID NO: 1880374
uuggucuggguuuaacuaa

SEQ ID NO: 1962347 - RNA, 19 nt, Artificial Sequence
  Description of Artificial Sequence: Synthetic oligonucleotide
  Antisense strand to SEQ ID NO: 1962346
uuaguuaaacccagaccaa

SEQ ID NO: 1962348 - RNA, 19 nt, Artificial Sequence
  Description of Artificial Sequence: Synthetic oligonucleotide
  Sense strand starting at position 2508 of SEQ ID NO: 1880374
auaugugaggacugcacaa

SEQ ID NO: 1962349 - RNA, 19 nt, Artificial Sequence
  Description of Artificial Sequence: Synthetic oligonucleotide
  Antisense strand to SEQ ID NO: 1962348
uugugcaguccucacauau

SEQ ID NO: 1962350 - RNA, 19 nt, Artificial Sequence
  Description of Artificial Sequence: Synthetic oligonucleotide
  Sense strand starting at position 2549 of SEQ ID NO: 1880374
cauuaauugugggugacca

SEQ ID NO: 1962351 - RNA, 19 nt, Artificial Sequence
  Description of Artificial Sequence: Synthetic oligonucleotide
  Antisense strand to SEQ ID NO: 1962350
uggucacccacaauuaaug

SEQ ID NO: 1962352 - RNA, 19 nt, Artificial Sequence
  Description of Artificial Sequence: Synthetic oligonucleotide
  Sense strand starting at position 2609 of SEQ ID NO: 1880374
guguaagauaaggagguuu

SEQ ID NO: 1962353 - RNA, 19 nt, Artificial Sequence
  Description of Artificial Sequence: Synthetic oligonucleotide
  Antisense strand to SEQ ID NO: 1962352
aaaccuccuuaucuuacac

SEQ ID NO: 1962354 - RNA, 19 nt, Artificial Sequence
  Description of Artificial Sequence: Synthetic oligonucleotide
  Sense strand starting at position 2658 of SEQ ID NO: 1880374
agggcauucuaauucuaag

SEQ ID NO: 1962355 - RNA, 19 nt, Artificial Sequence
  Description of Artificial Sequence: Synthetic oligonucleotide
  Antisense strand to SEQ ID NO: 1962354
cuuagaauuagaaugcccu

SEQ ID NO: 1962356 - RNA, 19 nt, Artificial Sequence
  Description of Artificial Sequence: Synthetic oligonucleotide
  Sense strand starting at position 2882 of SEQ ID NO: 1880374
auuaguaaacaugguugaa

SEQ ID NO: 1962357 - RNA, 19 nt, Artificial Sequence
  Description of Artificial Sequence: Synthetic oligonucleotide
  Antisense strand to SEQ ID NO: 1962356
uucaaccauguuuacuaau

SEQ ID NO: 1962358 - RNA, 19 nt, Artificial Sequence
  Description of Artificial Sequence: Synthetic oligonucleotide
  Sense strand starting at position 2884 of SEQ ID NO: 1880374
uaguaaacaugguugaaca

SEQ ID NO: 1962359 - RNA, 19 nt, Artificial Sequence
  Description of Artificial Sequence: Synthetic oligonucleotide
  Antisense strand to SEQ ID NO: 1962358
uguucaaccauguuuacua

SEQ ID NO: 1962360 - RNA, 19 nt, Artificial Sequence
  Description of Artificial Sequence: Synthetic oligonucleotide
  Sense strand starting at position 3001 of SEQ ID NO: 1880374
uugauucuccguggaggga

SEQ ID NO: 1962361 - RNA, 19 nt, Artificial Sequence
  Description of Artificial Sequence: Synthetic oligonucleotide
  Antisense strand to SEQ ID NO: 1962360
ucccuccacggagaaucaa

SEQ ID NO: 1962362 - RNA, 19 nt, Artificial Sequence
  Description of Artificial Sequence: Synthetic oligonucleotide
  Sense strand starting at position 3002 of SEQ ID NO: 1880374
ugauucuccguggagggaa

SEQ ID NO: 1962363 - RNA, 19 nt, Artificial Sequence
  Description of Artificial Sequence: Synthetic oligonucleotide
  Antisense strand to SEQ ID NO: 1962362
uucccuccacggagaauca

SEQ ID NO: 1962364 - RNA, 19 nt, Artificial Sequence
  Description of Artificial Sequence: Synthetic oligonucleotide
  Sense strand starting at position 3152 of SEQ ID NO: 1880374
uguguuggcauugauaaua

SEQ ID NO: 1962365 - RNA, 19 nt, Artificial Sequence
  Description of Artificial Sequence: Synthetic oligonucleotide
  Antisense strand to SEQ ID NO: 1962364
uauuaucaaugccaacaca

SEQ ID NO: 1962366 - RNA, 19 nt, Artificial Sequence
  Description of Artificial Sequence: Synthetic oligonucleotide
  Sense strand starting at position 3273 of SEQ ID NO: 1880374
agaucacuuuagcucagua

SEQ ID NO: 1962367 - RNA, 19 nt, Artificial Sequence
  Description of Artificial Sequence: Synthetic oligonucleotide
  Antisense strand to SEQ ID NO: 1962366
uacugagcuaaagugaucu

SEQ ID NO: 1962368 - RNA, 19 nt, Artificial Sequence
  Description of Artificial Sequence: Synthetic oligonucleotide
  Sense strand starting at position 3619 of SEQ ID NO: 1880374
agagcuugauggcuuauaa

SEQ ID NO: 1962369 - RNA, 19 nt, Artificial Sequence
  Description of Artificial Sequence: Synthetic oligonucleotide
  Antisense strand to SEQ ID NO: 1962368
uuauaagccaucaagcucu

SEQ ID NO: 1962370 - RNA, 19 nt, Artificial Sequence
  Description of Artificial Sequence: Synthetic oligonucleotide
  Sense strand starting at position 3815 of SEQ ID NO: 1880374
aguggaacuguucagguga

SEQ ID NO: 1962371 - RNA, 19 nt, Artificial Sequence
  Description of Artificial Sequence: Synthetic oligonucleotide
  Antisense strand to SEQ ID NO: 1962370
ucaccugaacaguuccacu

SEQ ID NO: 1962372 - RNA, 19 nt, Artificial Sequence
  Description of Artificial Sequence: Synthetic oligonucleotide
  Sense strand starting at position 29 of SEQ ID NO: 1880375
gacuuaagguacgugacuu

SEQ ID NO: 1962373 - RNA, 19 nt, Artificial Sequence
  Description of Artificial Sequence: Synthetic oligonucleotide
  Antisense strand to SEQ ID NO: 1962372
aagucacguaccuuaaguc

SEQ ID NO: 1962374 - RNA, 19 nt, Artificial Sequence
  Description of Artificial Sequence: Synthetic oligonucleotide
  Sense strand starting at position 30 of SEQ ID NO: 1880375
acuuaagguacgugacuua

SEQ ID NO: 1962375 - RNA, 19 nt, Artificial Sequence
  Description of Artificial Sequence: Synthetic oligonucleotide
  Antisense strand to SEQ ID NO: 1962374
uaagucacguaccuuaagu

SEQ ID NO: 1962376 - RNA, 19 nt, Artificial Sequence
  Description of Artificial Sequence: Synthetic oligonucleotide
  Sense strand starting at position 33 of SEQ ID NO: 1880375
uaagguacgugacuuaaag

SEQ ID NO: 1962377 - RNA, 19 nt, Artificial Sequence
  Description of Artificial Sequence: Synthetic oligonucleotide
  Antisense strand to SEQ ID NO: 1962376
cuuuaagucacguaccuua

SEQ ID NO: 1962378 - RNA, 19 nt, Artificial Sequence
  Description of Artificial Sequence: Synthetic oligonucleotide
  Sense strand starting at position 155 of SEQ ID NO: 1880375
cccucuguacuguacuuaa

SEQ ID NO: 1962379 - RNA, 19 nt, Artificial Sequence
  Description of Artificial Sequence: Synthetic oligonucleotide
  Antisense strand to SEQ ID NO: 1962378
uuaaguacaguacagaggg

SEQ ID NO: 1962380 - RNA, 19 nt, Artificial Sequence
  Description of Artificial Sequence: Synthetic oligonucleotide
  Sense strand starting at position 164 of SEQ ID NO: 1880375
cuguacuuaacuggugaga

SEQ ID NO: 1962381 - RNA, 19 nt, Artificial Sequence
  Description of Artificial Sequence: Synthetic oligonucleotide
  Antisense strand to SEQ ID NO: 1962380
ucucaccaguuaaguacag

SEQ ID NO: 1962382 - RNA, 19 nt, Artificial Sequence
  Description of Artificial Sequence: Synthetic oligonucleotide
  Sense strand starting at position 344 of SEQ ID NO: 1880375
cgggccaaaucugugaaga

SEQ ID NO: 1962383 - RNA, 19 nt, Artificial Sequence
  Description of Artificial Sequence: Synthetic oligonucleotide
  Antisense strand to SEQ ID NO: 1962382
ucuucacagauuuggcccg

SEQ ID NO: 1962384 - RNA, 19 nt, Artificial Sequence
  Description of Artificial Sequence: Synthetic oligonucleotide
  Sense strand starting at position 345 of SEQ ID NO: 1880375
gggccaaaucugugaagag

SEQ ID NO: 1962385 - RNA, 19 nt, Artificial Sequence
  Description of Artificial Sequence: Synthetic oligonucleotide
  Antisense strand to SEQ ID NO: 1962384
cucuucacagauuuggccc

SEQ ID NO: 1962386 - RNA, 19 nt, Artificial Sequence
  Description of Artificial Sequence: Synthetic oligonucleotide
  Sense strand starting at position 518 of SEQ ID NO: 1880375
agguaagagugagccuaua

SEQ ID NO: 1962387 - RNA, 19 nt, Artificial Sequence
  Description of Artificial Sequence: Synthetic oligonucleotide
  Antisense strand to SEQ ID NO: 1962386
uauaggcucacucuuaccu

SEQ ID NO: 1962388 - RNA, 19 nt, Artificial Sequence
  Description of Artificial Sequence: Synthetic oligonucleotide
  Sense strand starting at position 1074 of SEQ ID NO: 1880375
ccagaaacaucacauggua

SEQ ID NO: 1962389 - RNA, 19 nt, Artificial Sequence
  Description of Artificial Sequence: Synthetic oligonucleotide
  Antisense strand to SEQ ID NO: 1962388
uaccaugugauguuucugg

SEQ ID NO: 1962390 - RNA, 19 nt, Artificial Sequence
  Description of Artificial Sequence: Synthetic oligonucleotide
  Sense strand starting at position 2301 of SEQ ID NO: 1880375
gaaagcugagcuggucuaa

SEQ ID NO: 1962391 - RNA, 19 nt, Artificial Sequence
  Description of Artificial Sequence: Synthetic oligonucleotide
  Antisense strand to SEQ ID NO: 1962390
uuagaccagcucagcuuuc

SEQ ID NO: 1962392 - RNA, 19 nt, Artificial Sequence
  Description of Artificial Sequence: Synthetic oligonucleotide
  Sense strand starting at position 2354 of SEQ ID NO: 1880375
gcgcaauuaucucccauaa

SEQ ID NO: 1962393 - RNA, 19 nt, Artificial Sequence
  Description of Artificial Sequence: Synthetic oligonucleotide
  Antisense strand to SEQ ID NO: 1962392
uuaugggagauaauugcgc

SEQ ID NO: 1962394 - RNA, 19 nt, Artificial Sequence
  Description of Artificial Sequence: Synthetic oligonucleotide
  Sense strand starting at position 2684 of SEQ ID NO: 1880375
gugagucuuggguaaguca

SEQ ID NO: 1962395 - RNA, 19 nt, Artificial Sequence
  Description of Artificial Sequence: Synthetic oligonucleotide
  Antisense strand to SEQ ID NO: 1962394
ugacuuacccaagacucac

SEQ ID NO: 1962396 - RNA, 19 nt, Artificial Sequence
  Description of Artificial Sequence: Synthetic oligonucleotide
  Sense strand starting at position 2720 of SEQ ID NO: 1880375
uucgauuccucaucuguaa

SEQ ID NO: 1962397 - RNA, 19 nt, Artificial Sequence
  Description of Artificial Sequence: Synthetic oligonucleotide
  Antisense strand to SEQ ID NO: 1962396
uuacagaugaggaaucgaa

SEQ ID NO: 1962398 - RNA, 19 nt, Artificial Sequence
  Description of Artificial Sequence: Synthetic oligonucleotide
  Sense strand starting at position 2801 of SEQ ID NO: 1880375
gcugguguuaucugaccac

SEQ ID NO: 1962399 - RNA, 19 nt, Artificial Sequence
  Description of Artificial Sequence: Synthetic oligonucleotide
  Antisense strand to SEQ ID NO: 1962398
guggucagauaacaccagc

SEQ ID NO: 1962400 - RNA, 19 nt, Artificial Sequence
  Description of Artificial Sequence: Synthetic oligonucleotide
  Sense strand starting at position 2804 of SEQ ID NO: 1880375
gguguuaucugaccacuca

SEQ ID NO: 1962401 - RNA, 19 nt, Artificial Sequence
  Description of Artificial Sequence: Synthetic oligonucleotide
  Antisense strand to SEQ ID NO: 1962400
ugaguggucagauaacacc

SEQ ID NO: 1962402 - RNA, 19 nt, Artificial Sequence
  Description of Artificial Sequence: Synthetic oligonucleotide
  Sense strand starting at position 2805 of SEQ ID NO: 1880375
guguuaucugaccacucaa

SEQ ID NO: 1962403 - RNA, 19 nt, Artificial Sequence
  Description of Artificial Sequence: Synthetic oligonucleotide
  Antisense strand to SEQ ID NO: 1962402
uugaguggucagauaacac

SEQ ID NO: 1962404 - RNA, 19 nt, Artificial Sequence
  Description of Artificial Sequence: Synthetic oligonucleotide
  Sense strand starting at position 2828 of SEQ ID NO: 1880375
gggaaaccuugcucugucu

SEQ ID NO: 1962405 - RNA, 19 nt, Artificial Sequence
  Description of Artificial Sequence: Synthetic oligonucleotide
  Antisense strand to SEQ ID NO: 1962404
agacagagcaagguuuccc

SEQ ID NO: 1962406 - RNA, 19 nt, Artificial Sequence
  Description of Artificial Sequence: Synthetic oligonucleotide
  Sense strand starting at position 3013 of SEQ ID NO: 1880375
aggugagacagcuguaaau

SEQ ID NO: 1962407 - RNA, 19 nt, Artificial Sequence
  Description of Artificial Sequence: Synthetic oligonucleotide
  Antisense strand to SEQ ID NO: 1962406
auuuacagcugucucaccu

SEQ ID NO: 1962408 - RNA, 19 nt, Artificial Sequence
  Description of Artificial Sequence: Synthetic oligonucleotide
  Sense strand starting at position 3015 of SEQ ID NO: 1880375
gugagacagcuguaaauca

SEQ ID NO: 1962409 - RNA, 19 nt, Artificial Sequence
  Description of Artificial Sequence: Synthetic oligonucleotide
  Antisense strand to SEQ ID NO: 1962408
ugauuuacagcugucucac

SEQ ID NO: 1962410 - RNA, 19 nt, Artificial Sequence
  Description of Artificial Sequence: Synthetic oligonucleotide
  Sense strand starting at position 3028 of SEQ ID NO: 1880375
aaaucagggcucuggaauu

SEQ ID NO: 1962411 - RNA, 19 nt, Artificial Sequence
  Description of Artificial Sequence: Synthetic oligonucleotide
  Antisense strand to SEQ ID NO: 1962410
aauuccagagcccugauuu

SEQ ID NO: 1962412 - RNA, 19 nt, Artificial Sequence
  Description of Artificial Sequence: Synthetic oligonucleotide
  Sense strand starting at position 3161 of SEQ ID NO: 1880375
cucagagaguucuugacug

SEQ ID NO: 1962413 - RNA, 19 nt, Artificial Sequence
  Description of Artificial Sequence: Synthetic oligonucleotide
  Antisense strand to SEQ ID NO: 1962412
cagucaagaacucucugag

SEQ ID NO: 1962414 - RNA, 19 nt, Artificial Sequence
  Description of Artificial Sequence: Synthetic oligonucleotide
  Sense strand starting at position 3165 of SEQ ID NO: 1880375
gagaguucuugacuggacu

SEQ ID NO: 1962415 - RNA, 19 nt, Artificial Sequence
  Description of Artificial Sequence: Synthetic oligonucleotide
  Antisense strand to SEQ ID NO: 1962414
aguccagucaagaacucuc

SEQ ID NO: 1962416 - RNA, 19 nt, Artificial Sequence
  Description of Artificial Sequence: Synthetic oligonucleotide
  Sense strand starting at position 3167 of SEQ ID NO: 1880375
gaguucuugacuggacugu

SEQ ID NO: 1962417 - RNA, 19 nt, Artificial Sequence
  Description of Artificial Sequence: Synthetic oligonucleotide
  Antisense strand to SEQ ID NO: 1962416
acaguccagucaagaacuc

SEQ ID NO: 1962418 - RNA, 19 nt, Artificial Sequence
  Description of Artificial Sequence: Synthetic oligonucleotide
  Sense strand starting at position 3205 of SEQ ID NO: 1880375
gggaaccgcaguugaaauu

SEQ ID NO: 1962419 - RNA, 19 nt, Artificial Sequence
  Description of Artificial Sequence: Synthetic oligonucleotide
  Antisense strand to SEQ ID NO: 1962418
aauuucaacugcgguuccc

SEQ ID NO: 1962420 - RNA, 19 nt, Artificial Sequence
  Description of Artificial Sequence: Synthetic oligonucleotide
  Sense strand starting at position 3393 of SEQ ID NO: 1880375
ccagguagaugaucaucau

SEQ ID NO: 1962421 - RNA, 19 nt, Artificial Sequence
  Description of Artificial Sequence: Synthetic oligonucleotide
  Antisense strand to SEQ ID NO: 1962420
augaugaucaucuaccugg

SEQ ID NO: 1962422 - RNA, 19 nt, Artificial Sequence
  Description of Artificial Sequence: Synthetic oligonucleotide
  Sense strand starting at position 3499 of SEQ ID NO: 1880375
gcaguuucgggccugcaaa

SEQ ID NO: 1962423 - RNA, 19 nt, Artificial Sequence
  Description of Artificial Sequence: Synthetic oligonucleotide
  Antisense strand to SEQ ID NO: 1962422
uuugcaggcccgaaacugc

SEQ ID NO: 1962424 - RNA, 19 nt, Artificial Sequence
  Description of Artificial Sequence: Synthetic oligonucleotide
  Sense strand starting at position 3604 of SEQ ID NO: 1880375
cauugcucagcgcuuugua

SEQ ID NO: 1962425 - RNA, 19 nt, Artificial Sequence
  Description of Artificial Sequence: Synthetic oligonucleotide
  Antisense strand to SEQ ID NO: 1962424
uacaaagcgcugagcaaug

SEQ ID NO: 1962426 - RNA, 19 nt, Artificial Sequence
  Description of Artificial Sequence: Synthetic oligonucleotide
  Sense strand starting at position 3605 of SEQ ID NO: 1880375
auugcucagcgcuuuguaa

SEQ ID NO: 1962427 - RNA, 19 nt, Artificial Sequence
  Description of Artificial Sequence: Synthetic oligonucleotide
  Antisense strand to SEQ ID NO: 1962426
uuacaaagcgcugagcaau

SEQ ID NO: 1962428 - RNA, 19 nt, Artificial Sequence
  Description of Artificial Sequence: Synthetic oligonucleotide
  Sense strand starting at position 3606 of SEQ ID NO: 1880375
uugcucagcgcuuuguaau

SEQ ID NO: 1962429 - RNA, 19 nt, Artificial Sequence
  Description of Artificial Sequence: Synthetic oligonucleotide
  Antisense strand to SEQ ID NO: 1962428
auuacaaagcgcugagcaa

SEQ ID NO: 1962430 - RNA, 19 nt, Artificial Sequence
  Description of Artificial Sequence: Synthetic oligonucleotide
  Sense strand starting at position 3617 of SEQ ID NO: 1880375
uuuguaaugccgcuucuga

SEQ ID NO: 1962431 - RNA, 19 nt, Artificial Sequence
  Description of Artificial Sequence: Synthetic oligonucleotide
  Antisense strand to SEQ ID NO: 1962430
ucagaagcggcauuacaaa

SEQ ID NO: 1962432 - RNA, 19 nt, Artificial Sequence
  Description of Artificial Sequence: Synthetic oligonucleotide
  Sense strand starting at position 3619 of SEQ ID NO: 1880375
uguaaugccgcuucugagu

SEQ ID NO: 1962433 - RNA, 19 nt, Artificial Sequence
  Description of Artificial Sequence: Synthetic oligonucleotide
  Antisense strand to SEQ ID NO: 1962432
acucagaagcggcauuaca

SEQ ID NO: 1962434 - RNA, 19 nt, Artificial Sequence
  Description of Artificial Sequence: Synthetic oligonucleotide
  Sense strand starting at position 3625 of SEQ ID NO: 1880375
gccgcuucugaguaacaga

SEQ ID NO: 1962435 - RNA, 19 nt, Artificial Sequence
  Description of Artificial Sequence: Synthetic oligonucleotide
  Antisense strand to SEQ ID NO: 1962434
ucuguuacucagaagcggc

SEQ ID NO: 1962436 - RNA, 19 nt, Artificial Sequence
  Description of Artificial Sequence: Synthetic oligonucleotide
  Sense strand starting at position 3632 of SEQ ID NO: 1880375
cugaguaacagauggcaga

SEQ ID NO: 1962437 - RNA, 19 nt, Artificial Sequence
  Description of Artificial Sequence: Synthetic oligonucleotide
  Antisense strand to SEQ ID NO: 1962436
ucugccaucuguuacucag

SEQ ID NO: 1962438 - RNA, 19 nt, Artificial Sequence
  Description of Artificial Sequence: Synthetic oligonucleotide
  Sense strand starting at position 3807 of SEQ ID NO: 1880375
gucucagagagugggaauu

SEQ ID NO: 1962439 - RNA, 19 nt, Artificial Sequence
  Description of Artificial Sequence: Synthetic oligonucleotide
  Antisense strand to SEQ ID NO: 1962438
aauucccacucucugagac

SEQ ID NO: 1962440 - RNA, 19 nt, Artificial Sequence
  Description of Artificial Sequence: Synthetic oligonucleotide
  Sense strand starting at position 3820 of SEQ ID NO: 1880375
ggaauuuccuuccaggaau

SEQ ID NO: 1962441 - RNA, 19 nt, Artificial Sequence
  Description of Artificial Sequence: Synthetic oligonucleotide
  Antisense strand to SEQ ID NO: 1962440
auuccuggaaggaaauucc

SEQ ID NO: 1962442 - RNA, 19 nt, Artificial Sequence
  Description of Artificial Sequence: Synthetic oligonucleotide
  Sense strand starting at position 3931 of SEQ ID NO: 1880375
ggugucauuagcugaucca

SEQ ID NO: 1962443 - RNA, 19 nt, Artificial Sequence
  Description of Artificial Sequence: Synthetic oligonucleotide
  Antisense strand to SEQ ID NO: 1962442
uggaucagcuaaugacacc

SEQ ID NO: 1962444 - RNA, 19 nt, Artificial Sequence
  Description of Artificial Sequence: Synthetic oligonucleotide
  Sense strand starting at position 3932 of SEQ ID NO: 1880375
gugucauuagcugauccau

SEQ ID NO: 1962445 - RNA, 19 nt, Artificial Sequence
  Description of Artificial Sequence: Synthetic oligonucleotide
  Antisense strand to SEQ ID NO: 1962444
auggaucagcuaaugacac

SEQ ID NO: 1962446 - RNA, 19 nt, Artificial Sequence
  Description of Artificial Sequence: Synthetic oligonucleotide
  Sense strand starting at position 3964 of SEQ ID NO: 1880375
cagauaucaguuuggguug

SEQ ID NO: 1962447 - RNA, 19 nt, Artificial Sequence
  Description of Artificial Sequence: Synthetic oligonucleotide
  Antisense strand to SEQ ID NO: 1962446
caacccaaacugauaucug

SEQ ID NO: 1962448 - RNA, 19 nt, Artificial Sequence
  Description of Artificial Sequence: Synthetic oligonucleotide
  Sense strand starting at position 3967 of SEQ ID NO: 1880375
auaucaguuuggguuguca

SEQ ID NO: 1962449 - RNA, 19 nt, Artificial Sequence
  Description of Artificial Sequence: Synthetic oligonucleotide
  Antisense strand to SEQ ID NO: 1962448
ugacaacccaaacugauau

SEQ ID NO: 1962450 - RNA, 19 nt, Artificial Sequence
  Description of Artificial Sequence: Synthetic oligonucleotide
  Sense strand starting at position 3969 of SEQ ID NO: 1880375
aucaguuuggguugucaaa

SEQ ID NO: 1962451 - RNA, 19 nt, Artificial Sequence
  Description of Artificial Sequence: Synthetic oligonucleotide
  Antisense strand to SEQ ID NO: 1962450
uuugacaacccaaacugau

SEQ ID NO: 1962452 - RNA, 19 nt, Artificial Sequence
  Description of Artificial Sequence: Synthetic oligonucleotide
  Sense strand starting at position 85 of SEQ ID NO: 1880376
auguuuccagcugaaagau

SEQ ID NO: 1962453 - RNA, 19 nt, Artificial Sequence
  Description of Artificial Sequence: Synthetic oligonucleotide
  Antisense strand to SEQ ID NO: 1962452
aucuuucagcuggaaacau

SEQ ID NO: 1962454 - RNA, 19 nt, Artificial Sequence
  Description of Artificial Sequence: Synthetic oligonucleotide
  Sense strand starting at position 97 of SEQ ID NO: 1880376
gaaagauguggucauguua

SEQ ID NO: 1962455 - RNA, 19 nt, Artificial Sequence
  Description of Artificial Sequence: Synthetic oligonucleotide
  Antisense strand to SEQ ID NO: 1962454
uaacaugaccacaucuuuc

SEQ ID NO: 1962456 - RNA, 19 nt, Artificial Sequence
  Description of Artificial Sequence: Synthetic oligonucleotide
  Sense strand starting at position 112 of SEQ ID NO: 1880376
guuaccaacuuguuauaac

SEQ ID NO: 1962457 - RNA, 19 nt, Artificial Sequence
  Description of Artificial Sequence: Synthetic oligonucleotide
  Antisense strand to SEQ ID NO: 1962456
guuauaacaaguugguaac

SEQ ID NO: 1962458 - RNA, 19 nt, Artificial Sequence
  Description of Artificial Sequence: Synthetic oligonucleotide
  Sense strand starting at position 156 of SEQ ID NO: 1880376
agaaacaaugucugcuaga

SEQ ID NO: 1962459 - RNA, 19 nt, Artificial Sequence
  Description of Artificial Sequence: Synthetic oligonucleotide
  Antisense strand to SEQ ID NO: 1962458
ucuagcagacauuguuucu

SEQ ID NO: 1962460 - RNA, 19 nt, Artificial Sequence
  Description of Artificial Sequence: Synthetic oligonucleotide
  Sense strand starting at position 638 of SEQ ID NO: 1880376
aauguuacagguugacauu

SEQ ID NO: 1962461 - RNA, 19 nt, Artificial Sequence
  Description of Artificial Sequence: Synthetic oligonucleotide
  Antisense strand to SEQ ID NO: 1962460
aaugucaaccuguaacauu

SEQ ID NO: 1962462 - RNA, 19 nt, Artificial Sequence
  Description of Artificial Sequence: Synthetic oligonucleotide
  Sense strand starting at position 753 of SEQ ID NO: 1880376
caagucuuuggucacaaga

SEQ ID NO: 1962463 - RNA, 19 nt, Artificial Sequence
  Description of Artificial Sequence: Synthetic oligonucleotide
  Antisense strand to SEQ ID NO: 1962462
ucuugugaccaaagacuug

SEQ ID NO: 1962464 - RNA, 19 nt, Artificial Sequence
  Description of Artificial Sequence: Synthetic oligonucleotide
  Sense strand starting at position 913 of SEQ ID NO: 1880376
ccuaucucaugguuaucau

SEQ ID NO: 1962465 - RNA, 19 nt, Artificial Sequence
  Description of Artificial Sequence: Synthetic oligonucleotide
  Antisense strand to SEQ ID NO: 1962464
augauaaccaugagauagg

SEQ ID NO: 1962466 - RNA, 19 nt, Artificial Sequence
  Description of Artificial Sequence: Synthetic oligonucleotide
  Sense strand starting at position 916 of SEQ ID NO: 1880376
aucucaugguuaucaugaa

SEQ ID NO: 1962467 - RNA, 19 nt, Artificial Sequence
  Description of Artificial Sequence: Synthetic oligonucleotide
  Antisense strand to SEQ ID NO: 1962466
uucaugauaaccaugagau

SEQ ID NO: 1962468 - RNA, 19 nt, Artificial Sequence
  Description of Artificial Sequence: Synthetic oligonucleotide
  Sense strand starting at position 920 of SEQ ID NO: 1880376
caugguuaucaugaagcuu

SEQ ID NO: 1962469 - RNA, 19 nt, Artificial Sequence
  Description of Artificial Sequence: Synthetic oligonucleotide
  Antisense strand to SEQ ID NO: 1962468
aagcuucaugauaaccaug

SEQ ID NO: 1962470 - RNA, 19 nt, Artificial Sequence
  Description of Artificial Sequence: Synthetic oligonucleotide
  Sense strand starting at position 946 of SEQ ID NO: 1880376
ggaacugagugguuaggca

SEQ ID NO: 1962471 - RNA, 19 nt, Artificial Sequence
  Description of Artificial Sequence: Synthetic oligonucleotide
  Antisense strand to SEQ ID NO: 1962470
ugccuaaccacucaguucc

SEQ ID NO: 1962472 - RNA, 19 nt, Artificial Sequence
  Description of Artificial Sequence: Synthetic oligonucleotide
  Sense strand starting at position 1073 of SEQ ID NO: 1880376
acucuuuggcaauguagaa

SEQ ID NO: 1962473 - RNA, 19 nt, Artificial Sequence
  Description of Artificial Sequence: Synthetic oligonucleotide
  Antisense strand to SEQ ID NO: 1962472
uucuacauugccaaagagu

SEQ ID NO: 1962474 - RNA, 19 nt, Artificial Sequence
  Description of Artificial Sequence: Synthetic oligonucleotide
  Sense strand starting at position 1305 of SEQ ID NO: 1880376
uugagaucccuuggagcaa

SEQ ID NO: 1962475 - RNA, 19 nt, Artificial Sequence
  Description of Artificial Sequence: Synthetic oligonucleotide
  Antisense strand to SEQ ID NO: 1962474
uugcuccaagggaucucaa

SEQ ID NO: 1962476 - RNA, 19 nt, Artificial Sequence
  Description of Artificial Sequence: Synthetic oligonucleotide
  Sense strand starting at position 1643 of SEQ ID NO: 1880376
uggcaauucguacacaaac

SEQ ID NO: 1962477 - RNA, 19 nt, Artificial Sequence
  Description of Artificial Sequence: Synthetic oligonucleotide
  Antisense strand to SEQ ID NO: 1962476
guuuguguacgaauugcca

SEQ ID NO: 1962478 - RNA, 19 nt, Artificial Sequence
  Description of Artificial Sequence: Synthetic oligonucleotide
  Sense strand starting at position 2217 of SEQ ID NO: 1880376
ggaacauuggauugcagga

SEQ ID NO: 1962479 - RNA, 19 nt, Artificial Sequence
  Description of Artificial Sequence: Synthetic oligonucleotide
  Antisense strand to SEQ ID NO: 1962478
uccugcaauccaauguucc

SEQ ID NO: 1962480 - RNA, 19 nt, Artificial Sequence
  Description of Artificial Sequence: Synthetic oligonucleotide
  Sense strand starting at position 2241 of SEQ ID NO: 1880376
cucucaguccuccaaaggu

SEQ ID NO: 1962481 - RNA, 19 nt, Artificial Sequence
  Description of Artificial Sequence: Synthetic oligonucleotide
  Antisense strand to SEQ ID NO: 1962480
accuuuggaggacugagag

SEQ ID NO: 1962482 - RNA, 19 nt, Artificial Sequence
  Description of Artificial Sequence: Synthetic oligonucleotide
  Sense strand starting at position 2315 of SEQ ID NO: 1880376
aggcauuuguggccagcau

SEQ ID NO: 1962483 - RNA, 19 nt, Artificial Sequence
  Description of Artificial Sequence: Synthetic oligonucleotide
  Antisense strand to SEQ ID NO: 1962482
augcuggccacaaaugccu

SEQ ID NO: 1962484 - RNA, 19 nt, Artificial Sequence
  Description of Artificial Sequence: Synthetic oligonucleotide
  Sense strand starting at position 2513 of SEQ ID NO: 1880376
ggaggagacucuguagagu

SEQ ID NO: 1962485 - RNA, 19 nt, Artificial Sequence
  Description of Artificial Sequence: Synthetic oligonucleotide
  Antisense strand to SEQ ID NO: 1962484
acucuacagagucuccucc

SEQ ID NO: 1962486 - RNA, 19 nt, Artificial Sequence
  Description of Artificial Sequence: Synthetic oligonucleotide
  Sense strand starting at position 2775 of SEQ ID NO: 1880376
acaguauguaucgaguaaa

SEQ ID NO: 1962487 - RNA, 19 nt, Artificial Sequence
  Description of Artificial Sequence: Synthetic oligonucleotide
  Antisense strand to SEQ ID NO: 1962486
uuuacucgauacauacugu

SEQ ID NO: 1962488 - RNA, 19 nt, Artificial Sequence
  Description of Artificial Sequence: Synthetic oligonucleotide
  Sense strand starting at position 2778 of SEQ ID NO: 1880376
guauguaucgaguaaaugg

SEQ ID NO: 1962489 - RNA, 19 nt, Artificial Sequence
  Description of Artificial Sequence: Synthetic oligonucleotide
  Antisense strand to SEQ ID NO: 1962488
ccauuuacucgauacauac

SEQ ID NO: 1962490 - RNA, 19 nt, Artificial Sequence
  Description of Artificial Sequence: Synthetic oligonucleotide
  Sense strand starting at position 2788 of SEQ ID NO: 1880376
aguaaaugguagcugauua

SEQ ID NO: 1962491 - RNA, 19 nt, Artificial Sequence
  Description of Artificial Sequence: Synthetic oligonucleotide
  Antisense strand to SEQ ID NO: 1962490
uaaucagcuaccauuuacu

SEQ ID NO: 1962492 - RNA, 19 nt, Artificial Sequence
  Description of Artificial Sequence: Synthetic oligonucleotide
  Sense strand starting at position 2798 of SEQ ID NO: 1880376
agcugauuauuacuaggua

SEQ ID NO: 1962493 - RNA, 19 nt, Artificial Sequence
  Description of Artificial Sequence: Synthetic oligonucleotide
  Antisense strand to SEQ ID NO: 1962492
uaccuaguaauaaucagcu

SEQ ID NO: 1962494 - RNA, 19 nt, Artificial Sequence
  Description of Artificial Sequence: Synthetic oligonucleotide
  Sense strand starting at position 2918 of SEQ ID NO: 1880376
uggugugugaccuaagaug

SEQ ID NO: 1962495 - RNA, 19 nt, Artificial Sequence
  Description of Artificial Sequence: Synthetic oligonucleotide
  Antisense strand to SEQ ID NO: 1962494
caucuuaggucacacacca

SEQ ID NO: 1962496 - RNA, 19 nt, Artificial Sequence
  Description of Artificial Sequence: Synthetic oligonucleotide
  Sense strand starting at position 3110 of SEQ ID NO: 1880376
uguuauuaaugguccagau

SEQ ID NO: 1962497 - RNA, 19 nt, Artificial Sequence
  Description of Artificial Sequence: Synthetic oligonucleotide
  Antisense strand to SEQ ID NO: 1962496
aucuggaccauuaauaaca

SEQ ID NO: 1962498 - RNA, 19 nt, Artificial Sequence
  Description of Artificial Sequence: Synthetic oligonucleotide
  Sense strand starting at position 3151 of SEQ ID NO: 1880376
ccaaguuaagagcaacuua

SEQ ID NO: 1962499 - RNA, 19 nt, Artificial Sequence
  Description of Artificial Sequence: Synthetic oligonucleotide
  Antisense strand to SEQ ID NO: 1962498
uaaguugcucuuaacuugg

SEQ ID NO: 1962500 - RNA, 19 nt, Artificial Sequence
  Description of Artificial Sequence: Synthetic oligonucleotide
  Sense strand starting at position 3220 of SEQ ID NO: 1880376
auagcagguuaacuagaua

SEQ ID NO: 1962501 - RNA, 19 nt, Artificial Sequence
  Description of Artificial Sequence: Synthetic oligonucleotide
  Antisense strand to SEQ ID NO: 1962500
uaucuaguuaaccugcuau

SEQ ID NO: 1962502 - RNA, 19 nt, Artificial Sequence
  Description of Artificial Sequence: Synthetic oligonucleotide
  Sense strand starting at position 3223 of SEQ ID NO: 1880376
gcagguuaacuagauacua

SEQ ID NO: 1962503 - RNA, 19 nt, Artificial Sequence
  Description of Artificial Sequence: Synthetic oligonucleotide
  Antisense strand to SEQ ID NO: 1962502
uaguaucuaguuaaccugc

SEQ ID NO: 1962504 - RNA, 19 nt, Artificial Sequence
  Description of Artificial Sequence: Synthetic oligonucleotide
  Sense strand starting at position 3291 of SEQ ID NO: 1880376
aguuacauuccaggaguuu

SEQ ID NO: 1962505 - RNA, 19 nt, Artificial Sequence
  Description of Artificial Sequence: Synthetic oligonucleotide
  Antisense strand to SEQ ID NO: 1962504
aaacuccuggaauguaacu

SEQ ID NO: 1962506 - RNA, 19 nt, Artificial Sequence
  Description of Artificial Sequence: Synthetic oligonucleotide
  Sense strand starting at position 3292 of SEQ ID NO: 1880376
guuacauuccaggaguuug

SEQ ID NO: 1962507 - RNA, 19 nt, Artificial Sequence
  Description of Artificial Sequence: Synthetic oligonucleotide
  Antisense strand to SEQ ID NO: 1962506
caaacuccuggaauguaac

SEQ ID NO: 1962508 - RNA, 19 nt, Artificial Sequence
  Description of Artificial Sequence: Synthetic oligonucleotide
  Sense strand starting at position 3303 of SEQ ID NO: 1880376
ggaguuuggcuacaucaau

SEQ ID NO: 1962509 - RNA, 19 nt, Artificial Sequence
  Description of Artificial Sequence: Synthetic oligonucleotide
  Antisense strand to SEQ ID NO: 1962508
auugauguagccaaacucc

SEQ ID NO: 1962510 - RNA, 19 nt, Artificial Sequence
  Description of Artificial Sequence: Synthetic oligonucleotide
  Sense strand starting at position 3330 of SEQ ID NO: 1880376
aagaguugauguucucaca

SEQ ID NO: 1962511 - RNA, 19 nt, Artificial Sequence
  Description of Artificial Sequence: Synthetic oligonucleotide
  Antisense strand to SEQ ID NO: 1962510
ugugagaacaucaacucuu

SEQ ID NO: 1962512 - RNA, 19 nt, Artificial Sequence
  Description of Artificial Sequence: Synthetic oligonucleotide
  Sense strand starting at position 3338 of SEQ ID NO: 1880376
auguucucacaguagaacu

SEQ ID NO: 1962513 - RNA, 19 nt, Artificial Sequence
  Description of Artificial Sequence: Synthetic oligonucleotide
  Antisense strand to SEQ ID NO: 1962512
aguucuacugugagaacau

SEQ ID NO: 1962514 - RNA, 19 nt, Artificial Sequence
  Description of Artificial Sequence: Synthetic oligonucleotide
  Sense strand starting at position 3590 of SEQ ID NO: 1880376
guugucauuggacaggaau

SEQ ID NO: 1962515 - RNA, 19 nt, Artificial Sequence
  Description of Artificial Sequence: Synthetic oligonucleotide
  Antisense strand to SEQ ID NO: 1962514
auuccuguccaaugacaac

SEQ ID NO: 1962516 - RNA, 19 nt, Artificial Sequence
  Description of Artificial Sequence: Synthetic oligonucleotide
  Sense strand starting at position 3632 of SEQ ID NO: 1880376
cagguauaauguucuugac

SEQ ID NO: 1962517 - RNA, 19 nt, Artificial Sequence
  Description of Artificial Sequence: Synthetic oligonucleotide
  Antisense strand to SEQ ID NO: 1962516
gucaagaacauuauaccug

SEQ ID NO: 1962518 - RNA, 19 nt, Artificial Sequence
  Description of Artificial Sequence: Synthetic oligonucleotide
  Sense strand starting at position 3634 of SEQ ID NO: 1880376
gguauaauguucuugacca

SEQ ID NO: 1962519 - RNA, 19 nt, Artificial Sequence
  Description of Artificial Sequence: Synthetic oligonucleotide
  Antisense strand to SEQ ID NO: 1962518
uggucaagaacauuauacc

SEQ ID NO: 1962520 - RNA, 19 nt, Artificial Sequence
  Description of Artificial Sequence: Synthetic oligonucleotide
  Sense strand starting at position 3716 of SEQ ID NO: 1880376
auaguaagugcugaaaucu

SEQ ID NO: 1962521 - RNA, 19 nt, Artificial Sequence
  Description of Artificial Sequence: Synthetic oligonucleotide
  Antisense strand to SEQ ID NO: 1962520
agauuucagcacuuacuau

SEQ ID NO: 1962522 - RNA, 19 nt, Artificial Sequence
  Description of Artificial Sequence: Synthetic oligonucleotide
  Sense strand starting at position 3778 of SEQ ID NO: 1880376
uuaugaauugauugugagu

SEQ ID NO: 1962523 - RNA, 19 nt, Artificial Sequence
  Description of Artificial Sequence: Synthetic oligonucleotide
  Antisense strand to SEQ ID NO: 1962522
acucacaaucaauucauaa

SEQ ID NO: 1962524 - RNA, 19 nt, Artificial Sequence
  Description of Artificial Sequence: Synthetic oligonucleotide
  Sense strand starting at position 3783 of SEQ ID NO: 1880376
aauugauugugaguacucu

SEQ ID NO: 1962525 - RNA, 19 nt, Artificial Sequence
  Description of Artificial Sequence: Synthetic oligonucleotide
  Antisense strand to SEQ ID NO: 1962524
agaguacucacaaucaauu

SEQ ID NO: 1962526 - RNA, 19 nt, Artificial Sequence
  Description of Artificial Sequence: Synthetic oligonucleotide
  Sense strand starting at position 3787 of SEQ ID NO: 1880376
gauugugaguacucugaga

SEQ ID NO: 1962527 - RNA, 19 nt, Artificial Sequence
  Description of Artificial Sequence: Synthetic oligonucleotide
  Antisense strand to SEQ ID NO: 1962526
ucucagaguacucacaauc

SEQ ID NO: 1962528 - RNA, 19 nt, Artificial Sequence
  Description of Artificial Sequence: Synthetic oligonucleotide
  Sense strand starting at position 3914 of SEQ ID NO: 1880376
cuaugaccuguuuaacgaa

SEQ ID NO: 1962529 - RNA, 19 nt, Artificial Sequence
  Description of Artificial Sequence: Synthetic oligonucleotide
  Antisense strand to SEQ ID NO: 1962528
uucguuaaacaggucauag

SEQ ID NO: 1962530 - RNA, 19 nt, Artificial Sequence
  Description of Artificial Sequence: Synthetic oligonucleotide
  Sense strand starting at position 3921 of SEQ ID NO: 1880376
cuguuuaacgaauauguuu

SEQ ID NO: 1962531 - RNA, 19 nt, Artificial Sequence
  Description of Artificial Sequence: Synthetic oligonucleotide
  Antisense strand to SEQ ID NO: 1962530
aaacauauucguuaaacag

SEQ ID NO: 1962532 - RNA, 19 nt, Artificial Sequence
  Description of Artificial Sequence: Synthetic oligonucleotide
  Sense strand starting at position 178 of SEQ ID NO: 1880377
ucaaauguuugaucaaggu

SEQ ID NO: 1962533 - RNA, 19 nt, Artificial Sequence
  Description of Artificial Sequence: Synthetic oligonucleotide
  Antisense strand to SEQ ID NO: 1962532
accuugaucaaacauuuga

SEQ ID NO: 1962534 - RNA, 19 nt, Artificial Sequence
  Description of Artificial Sequence: Synthetic oligonucleotide
  Sense strand starting at position 182 of SEQ ID NO: 1880377
auguuugaucaagguauaa

SEQ ID NO: 1962535 - RNA, 19 nt, Artificial Sequence
  Description of Artificial Sequence: Synthetic oligonucleotide
  Antisense strand to SEQ ID NO: 1962534
uuauaccuugaucaaacau

SEQ ID NO: 1962536 - RNA, 19 nt, Artificial Sequence
  Description of Artificial Sequence: Synthetic oligonucleotide
  Sense strand starting at position 264 of SEQ ID NO: 1880377
auuguaucugcugagauac

SEQ ID NO: 1962537 - RNA, 19 nt, Artificial Sequence
  Description of Artificial Sequence: Synthetic oligonucleotide
  Antisense strand to SEQ ID NO: 1962536
guaucucagcagauacaau

SEQ ID NO: 1962538 - RNA, 19 nt, Artificial Sequence
  Description of Artificial Sequence: Synthetic oligonucleotide
  Sense strand starting at position 392 of SEQ ID NO: 1880377
ucuagcucauugguuuaaa

SEQ ID NO: 1962539 - RNA, 19 nt, Artificial Sequence
  Description of Artificial Sequence: Synthetic oligonucleotide
  Antisense strand to SEQ ID NO: 1962538
uuuaaaccaaugagcuaga

SEQ ID NO: 1962540 - RNA, 19 nt, Artificial Sequence
  Description of Artificial Sequence: Synthetic oligonucleotide
  Sense strand starting at position 393 of SEQ ID NO: 1880377
cuagcucauugguuuaaac

SEQ ID NO: 1962541 - RNA, 19 nt, Artificial Sequence
  Description of Artificial Sequence: Synthetic oligonucleotide
  Antisense strand to SEQ ID NO: 1962540
guuuaaaccaaugagcuag

SEQ ID NO: 1962542 - RNA, 19 nt, Artificial Sequence
  Description of Artificial Sequence: Synthetic oligonucleotide
  Sense strand starting at position 395 of SEQ ID NO: 1880377
agcucauugguuuaaacau

SEQ ID NO: 1962543 - RNA, 19 nt, Artificial Sequence
  Description of Artificial Sequence: Synthetic oligonucleotide
  Antisense strand to SEQ ID NO: 1962542
auguuuaaaccaaugagcu

SEQ ID NO: 1962544 - RNA, 19 nt, Artificial Sequence
  Description of Artificial Sequence: Synthetic oligonucleotide
  Sense strand starting at position 451 of SEQ ID NO: 1880377
ucagcaguucccuauugau

SEQ ID NO: 1962545 - RNA, 19 nt, Artificial Sequence
  Description of Artificial Sequence: Synthetic oligonucleotide
  Antisense strand to SEQ ID NO: 1962544
aucaauagggaacugcuga

SEQ ID NO: 1962546 - RNA, 19 nt, Artificial Sequence
  Description of Artificial Sequence: Synthetic oligonucleotide
  Sense strand starting at position 458 of SEQ ID NO: 1880377
uucccuauugauggauauu

SEQ ID NO: 1962547 - RNA, 19 nt, Artificial Sequence
  Description of Artificial Sequence: Synthetic oligonucleotide
  Antisense strand to SEQ ID NO: 1962546
aauauccaucaauagggaa

SEQ ID NO: 1962548 - RNA, 19 nt, Artificial Sequence
  Description of Artificial Sequence: Synthetic oligonucleotide
  Sense strand starting at position 527 of SEQ ID NO: 1880377
uugucucaugaugaaucau

SEQ ID NO: 1962549 - RNA, 19 nt, Artificial Sequence
  Description of Artificial Sequence: Synthetic oligonucleotide
  Antisense strand to SEQ ID NO: 1962548
augauucaucaugagacaa

SEQ ID NO: 1962550 - RNA, 19 nt, Artificial Sequence
  Description of Artificial Sequence: Synthetic oligonucleotide
  Sense strand starting at position 778 of SEQ ID NO: 1880377
agccuucugggagaugauu

SEQ ID NO: 1962551 - RNA, 19 nt, Artificial Sequence
  Description of Artificial Sequence: Synthetic oligonucleotide
  Antisense strand to SEQ ID NO: 1962550
aaucaucucccagaaggcu

SEQ ID NO: 1962552 - RNA, 19 nt, Artificial Sequence
  Description of Artificial Sequence: Synthetic oligonucleotide
  Sense strand starting at position 1134 of SEQ ID NO: 1880377
cccaguuauuuccaaugga

SEQ ID NO: 1962553 - RNA, 19 nt, Artificial Sequence
  Description of Artificial Sequence: Synthetic oligonucleotide
  Antisense strand to SEQ ID NO: 1962552
uccauuggaaauaacuggg

SEQ ID NO: 1962554 - RNA, 19 nt, Artificial Sequence
  Description of Artificial Sequence: Synthetic oligonucleotide
  Sense strand starting at position 1518 of SEQ ID NO: 1880377
cuuauuuagugguuccauu

SEQ ID NO: 1962555 - RNA, 19 nt, Artificial Sequence
  Description of Artificial Sequence: Synthetic oligonucleotide
  Antisense strand to SEQ ID NO: 1962554
aauggaaccacuaaauaag

SEQ ID NO: 1962556 - RNA, 19 nt, Artificial Sequence
  Description of Artificial Sequence: Synthetic oligonucleotide
  Sense strand starting at position 1594 of SEQ ID NO: 1880377
cuaguuaugaaggguuacu

SEQ ID NO: 1962557 - RNA, 19 nt, Artificial Sequence
  Description of Artificial Sequence: Synthetic oligonucleotide
  Antisense strand to SEQ ID NO: 1962556
aguaacccuucauaacuag

SEQ ID NO: 1962558 - RNA, 19 nt, Artificial Sequence
  Description of Artificial Sequence: Synthetic oligonucleotide
  Sense strand starting at position 1987 of SEQ ID NO: 1880377
ggcggugugggcagaagua

SEQ ID NO: 1962559 - RNA, 19 nt, Artificial Sequence
  Description of Artificial Sequence: Synthetic oligonucleotide
  Antisense strand to SEQ ID NO: 1962558
uacuucugcccacaccgcc

SEQ ID NO: 1962560 - RNA, 19 nt, Artificial Sequence
  Description of Artificial Sequence: Synthetic oligonucleotide
  Sense strand starting at position 2048 of SEQ ID NO: 1880377
ucacauguguaauuccaga

SEQ ID NO: 1962561 - RNA, 19 nt, Artificial Sequence
  Description of Artificial Sequence: Synthetic oligonucleotide
  Antisense strand to SEQ ID NO: 1962560
ucuggaauuacacauguga

SEQ ID NO: 1962562 - RNA, 19 nt, Artificial Sequence
  Description of Artificial Sequence: Synthetic oligonucleotide
  Sense strand starting at position 2053 of SEQ ID NO: 1880377
uguguaauuccagaacuuu

SEQ ID NO: 1962563 - RNA, 19 nt, Artificial Sequence
  Description of Artificial Sequence: Synthetic oligonucleotide
  Antisense strand to SEQ ID NO: 1962562
aaaguucuggaauuacaca

SEQ ID NO: 1962564 - RNA, 19 nt, Artificial Sequence
  Description of Artificial Sequence: Synthetic oligonucleotide
  Sense strand starting at position 2323 of SEQ ID NO: 1880377
cuguaauccuagcuagauc

SEQ ID NO: 1962565 - RNA, 19 nt, Artificial Sequence
  Description of Artificial Sequence: Synthetic oligonucleotide
  Antisense strand to SEQ ID NO: 1962564
gaucuagcuaggauuacag

SEQ ID NO: 1962566 - RNA, 19 nt, Artificial Sequence
  Description of Artificial Sequence: Synthetic oligonucleotide
  Sense strand starting at position 2704 of SEQ ID NO: 1880377
uguacuuaccucuauuaga

SEQ ID NO: 1962567 - RNA, 19 nt, Artificial Sequence
  Description of Artificial Sequence: Synthetic oligonucleotide
  Antisense strand to SEQ ID NO: 1962566
ucuaauagagguaaguaca

SEQ ID NO: 1962568 - RNA, 19 nt, Artificial Sequence
  Description of Artificial Sequence: Synthetic oligonucleotide
  Sense strand starting at position 2772 of SEQ ID NO: 1880377
acuguuagcuucuugagga

SEQ ID NO: 1962569 - RNA, 19 nt, Artificial Sequence
  Description of Artificial Sequence: Synthetic oligonucleotide
  Antisense strand to SEQ ID NO: 1962568
uccucaagaagcuaacagu

SEQ ID NO: 1962570 - RNA, 19 nt, Artificial Sequence
  Description of Artificial Sequence: Synthetic oligonucleotide
  Sense strand starting at position 2777 of SEQ ID NO: 1880377
uagcuucuugaggacauua

SEQ ID NO: 1962571 - RNA, 19 nt, Artificial Sequence
  Description of Artificial Sequence: Synthetic oligonucleotide
  Antisense strand to SEQ ID NO: 1962570
uaauguccucaagaagcua

SEQ ID NO: 1962572 - RNA, 19 nt, Artificial Sequence
  Description of Artificial Sequence: Synthetic oligonucleotide
  Sense strand starting at position 2785 of SEQ ID NO: 1880377
ugaggacauuagcuaaauu

SEQ ID NO: 1962573 - RNA, 19 nt, Artificial Sequence
  Description of Artificial Sequence: Synthetic oligonucleotide
  Antisense strand to SEQ ID NO: 1962572
aauuuagcuaauguccuca

SEQ ID NO: 1962574 - RNA, 19 nt, Artificial Sequence
  Description of Artificial Sequence: Synthetic oligonucleotide
  Sense strand starting at position 2802 of SEQ ID NO: 1880377
uuguauuucucuuuguagu

SEQ ID NO: 1962575 - RNA, 19 nt, Artificial Sequence
  Description of Artificial Sequence: Synthetic oligonucleotide
  Antisense strand to SEQ ID NO: 1962574
acuacaaagagaaauacaa

SEQ ID NO: 1962576 - RNA, 19 nt, Artificial Sequence
  Description of Artificial Sequence: Synthetic oligonucleotide
  Sense strand starting at position 2803 of SEQ ID NO: 1880377
uguauuucucuuuguaguc

SEQ ID NO: 1962577 - RNA, 19 nt, Artificial Sequence
  Description of Artificial Sequence: Synthetic oligonucleotide
  Antisense strand to SEQ ID NO: 1962576
gacuacaaagagaaauaca

SEQ ID NO: 1962578 - RNA, 19 nt, Artificial Sequence
  Description of Artificial Sequence: Synthetic oligonucleotide
  Sense strand starting at position 2815 of SEQ ID NO: 1880377
uguagucuuggguaaugua

SEQ ID NO: 1962579 - RNA, 19 nt, Artificial Sequence
  Description of Artificial Sequence: Synthetic oligonucleotide
  Antisense strand to SEQ ID NO: 1962578
uacauuacccaagacuaca

SEQ ID NO: 1962580 - RNA, 19 nt, Artificial Sequence
  Description of Artificial Sequence: Synthetic oligonucleotide
  Sense strand starting at position 2823 of SEQ ID NO: 1880377
uggguaauguacuugacac

SEQ ID NO: 1962581 - RNA, 19 nt, Artificial Sequence
  Description of Artificial Sequence: Synthetic oligonucleotide
  Antisense strand to SEQ ID NO: 1962580
gugucaaguacauuaccca

SEQ ID NO: 1962582 - RNA, 19 nt, Artificial Sequence
  Description of Artificial Sequence: Synthetic oligonucleotide
  Sense strand starting at position 2824 of SEQ ID NO: 1880377
ggguaauguacuugacaca

SEQ ID NO: 1962583 - RNA, 19 nt, Artificial Sequence
  Description of Artificial Sequence: Synthetic oligonucleotide
  Antisense strand to SEQ ID NO: 1962582
ugugucaaguacauuaccc

SEQ ID NO: 1962584 - RNA, 19 nt, Artificial Sequence
  Description of Artificial Sequence: Synthetic oligonucleotide
  Sense strand starting at position 3115 of SEQ ID NO: 1880377
agcugauacucugcaaaug

SEQ ID NO: 1962585 - RNA, 19 nt, Artificial Sequence
  Description of Artificial Sequence: Synthetic oligonucleotide
  Antisense strand to SEQ ID NO: 1962584
cauuugcagaguaucagcu

SEQ ID NO: 1962586 - RNA, 19 nt, Artificial Sequence
  Description of Artificial Sequence: Synthetic oligonucleotide
  Sense strand starting at position 3116 of SEQ ID NO: 1880377
gcugauacucugcaaaugu

SEQ ID NO: 1962587 - RNA, 19 nt, Artificial Sequence
  Description of Artificial Sequence: Synthetic oligonucleotide
  Antisense strand to SEQ ID NO: 1962586
acauuugcagaguaucagc

SEQ ID NO: 1962588 - RNA, 19 nt, Artificial Sequence
  Description of Artificial Sequence: Synthetic oligonucleotide
  Sense strand starting at position 3124 of SEQ ID NO: 1880377
ucugcaaauguuuaauaga

SEQ ID NO: 1962589 - RNA, 19 nt, Artificial Sequence
  Description of Artificial Sequence: Synthetic oligonucleotide
  Antisense strand to SEQ ID NO: 1962588
ucuauuaaacauuugcaga

SEQ ID NO: 1962590 - RNA, 19 nt, Artificial Sequence
  Description of Artificial Sequence: Synthetic oligonucleotide
  Sense strand starting at position 3131 of SEQ ID NO: 1880377
auguuuaauagauguugga

SEQ ID NO: 1962591 - RNA, 19 nt, Artificial Sequence
  Description of Artificial Sequence: Synthetic oligonucleotide
  Antisense strand to SEQ ID NO: 1962590
uccaacaucuauuaaacau

SEQ ID NO: 1962592 - RNA, 19 nt, Artificial Sequence
  Description of Artificial Sequence: Synthetic oligonucleotide
  Sense strand starting at position 3296 of SEQ ID NO: 1880377
uguauaguccuuuacagau

SEQ ID NO: 1962593 - RNA, 19 nt, Artificial Sequence
  Description of Artificial Sequence: Synthetic oligonucleotide
  Antisense strand to SEQ ID NO: 1962592
aucuguaaaggacuauaca

SEQ ID NO: 1962594 - RNA, 19 nt, Artificial Sequence
  Description of Artificial Sequence: Synthetic oligonucleotide
  Sense strand starting at position 3373 of SEQ ID NO: 1880377
gugccaauacuguaaauua

SEQ ID NO: 1962595 - RNA, 19 nt, Artificial Sequence
  Description of Artificial Sequence: Synthetic oligonucleotide
  Antisense strand to SEQ ID NO: 1962594
uaauuuacaguauuggcac

SEQ ID NO: 1962596 - RNA, 19 nt, Artificial Sequence
  Description of Artificial Sequence: Synthetic oligonucleotide
  Sense strand starting at position 3384 of SEQ ID NO: 1880377
guaaauuaaucaccagucu

SEQ ID NO: 1962597 - RNA, 19 nt, Artificial Sequence
  Description of Artificial Sequence: Synthetic oligonucleotide
  Antisense strand to SEQ ID NO: 1962596
agacuggugauuaauuuac

SEQ ID NO: 1962598 - RNA, 19 nt, Artificial Sequence
  Description of Artificial Sequence: Synthetic oligonucleotide
  Sense strand starting at position 3398 of SEQ ID NO: 1880377
agucucagaucauauauuu

SEQ ID NO: 1962599 - RNA, 19 nt, Artificial Sequence
  Description of Artificial Sequence: Synthetic oligonucleotide
  Antisense strand to SEQ ID NO: 1962598
aaauauaugaucugagacu

SEQ ID NO: 1962600 - RNA, 19 nt, Artificial Sequence
  Description of Artificial Sequence: Synthetic oligonucleotide
  Sense strand starting at position 3534 of SEQ ID NO: 1880377
gaguaucagcaauagguaa

SEQ ID NO: 1962601 - RNA, 19 nt, Artificial Sequence
  Description of Artificial Sequence: Synthetic oligonucleotide
  Antisense strand to SEQ ID NO: 1962600
uuaccuauugcugauacuc

SEQ ID NO: 1962602 - RNA, 19 nt, Artificial Sequence
  Description of Artificial Sequence: Synthetic oligonucleotide
  Sense strand starting at position 3595 of SEQ ID NO: 1880377
acuuuaagcagaggguauu

SEQ ID NO: 1962603 - RNA, 19 nt, Artificial Sequence
  Description of Artificial Sequence: Synthetic oligonucleotide
  Antisense strand to SEQ ID NO: 1962602
aauacccucugcuuaaagu

SEQ ID NO: 1962604 - RNA, 19 nt, Artificial Sequence
  Description of Artificial Sequence: Synthetic oligonucleotide
  Sense strand starting at position 3620 of SEQ ID NO: 1880377
ugagauccuuguucucuua

SEQ ID NO: 1962605 - RNA, 19 nt, Artificial Sequence
  Description of Artificial Sequence: Synthetic oligonucleotide
  Antisense strand to SEQ ID NO: 1962604
uaagagaacaaggaucuca

SEQ ID NO: 1962606 - RNA, 19 nt, Artificial Sequence
  Description of Artificial Sequence: Synthetic oligonucleotide
  Sense strand starting at position 3649 of SEQ ID NO: 1880377
ucugaaaucuagucaguuu

SEQ ID NO: 1962607 - RNA, 19 nt, Artificial Sequence
  Description of Artificial Sequence: Synthetic oligonucleotide
  Antisense strand to SEQ ID NO: 1962606
aaacugacuagauuucaga

SEQ ID NO: 1962608 - RNA, 19 nt, Artificial Sequence
  Description of Artificial Sequence: Synthetic oligonucleotide
  Sense strand starting at position 3678 of SEQ ID NO: 1880377
auccuugucccuugggaua

SEQ ID NO: 1962609 - RNA, 19 nt, Artificial Sequence
  Description of Artificial Sequence: Synthetic oligonucleotide
  Antisense strand to SEQ ID NO: 1962608
uaucccaagggacaaggau

SEQ ID NO: 1962610 - RNA, 19 nt, Artificial Sequence
  Description of Artificial Sequence: Synthetic oligonucleotide
  Sense strand starting at position 3716 of SEQ ID NO: 1880377
agugcuauguaacuauuaa

SEQ ID NO: 1962611 - RNA, 19 nt, Artificial Sequence
  Description of Artificial Sequence: Synthetic oligonucleotide
  Antisense strand to SEQ ID NO: 1962610
uuaauaguuacauagcacu

SEQ ID NO: 1962612 - RNA, 19 nt, Artificial Sequence
  Description of Artificial Sequence: Synthetic oligonucleotide
  Sense strand starting at position 96 of SEQ ID NO: 1880378
uccauagagucccagauuu

SEQ ID NO: 1962613 - RNA, 19 nt, Artificial Sequence
  Description of Artificial Sequence: Synthetic oligonucleotide
  Antisense strand to SEQ ID NO: 1962612
aaaucugggacucuaugga

SEQ ID NO: 1962614 - RNA, 19 nt, Artificial Sequence
  Description of Artificial Sequence: Synthetic oligonucleotide
  Sense strand starting at position 240 of SEQ ID NO: 1880378
acagcugauucuuuaagac

SEQ ID NO: 1962615 - RNA, 19 nt, Artificial Sequence
  Description of Artificial Sequence: Synthetic oligonucleotide
  Antisense strand to SEQ ID NO: 1962614
gucuuaaagaaucagcugu

SEQ ID NO: 1962616 - RNA, 19 nt, Artificial Sequence
  Description of Artificial Sequence: Synthetic oligonucleotide
  Sense strand starting at position 244 of SEQ ID NO: 1880378
cugauucuuuaagacaaug

SEQ ID NO: 1962617 - RNA, 19 nt, Artificial Sequence
  Description of Artificial Sequence: Synthetic oligonucleotide
  Antisense strand to SEQ ID NO: 1962616
cauugucuuaaagaaucag

SEQ ID NO: 1962618 - RNA, 19 nt, Artificial Sequence
  Description of Artificial Sequence: Synthetic oligonucleotide
  Sense strand starting at position 354 of SEQ ID NO: 1880378
gucuacagaugcugaguuu

SEQ ID NO: 1962619 - RNA, 19 nt, Artificial Sequence
  Description of Artificial Sequence: Synthetic oligonucleotide
  Antisense strand to SEQ ID NO: 1962618
aaacucagcaucuguagac

SEQ ID NO: 1962620 - RNA, 19 nt, Artificial Sequence
  Description of Artificial Sequence: Synthetic oligonucleotide
  Sense strand starting at position 361 of SEQ ID NO: 1880378
gaugcugaguuucucaaug

SEQ ID NO: 1962621 - RNA, 19 nt, Artificial Sequence
  Description of Artificial Sequence: Synthetic oligonucleotide
  Antisense strand to SEQ ID NO: 1962620
cauugagaaacucagcauc

SEQ ID NO: 1962622 - RNA, 19 nt, Artificial Sequence
  Description of Artificial Sequence: Synthetic oligonucleotide
  Sense strand starting at position 669 of SEQ ID NO: 1880378
gcgauacucugucucggaa

SEQ ID NO: 1962623 - RNA, 19 nt, Artificial Sequence
  Description of Artificial Sequence: Synthetic oligonucleotide
  Antisense strand to SEQ ID NO: 1962622
uuccgagacagaguaucgc

SEQ ID NO: 1962624 - RNA, 19 nt, Artificial Sequence
  Description of Artificial Sequence: Synthetic oligonucleotide
  Sense strand starting at position 671 of SEQ ID NO: 1880378
gauacucugucucggaaac

SEQ ID NO: 1962625 - RNA, 19 nt, Artificial Sequence
  Description of Artificial Sequence: Synthetic oligonucleotide
  Antisense strand to SEQ ID NO: 1962624
guuuccgagacagaguauc

SEQ ID NO: 1962626 - RNA, 19 nt, Artificial Sequence
  Description of Artificial Sequence: Synthetic oligonucleotide
  Sense strand starting at position 672 of SEQ ID NO: 1880378
auacucugucucggaaaca

SEQ ID NO: 1962627 - RNA, 19 nt, Artificial Sequence
  Description of Artificial Sequence: Synthetic oligonucleotide
  Antisense strand to SEQ ID NO: 1962626
uguuuccgagacagaguau

SEQ ID NO: 1962628 - RNA, 19 nt, Artificial Sequence
  Description of Artificial Sequence: Synthetic oligonucleotide
  Sense strand starting at position 1005 of SEQ ID NO: 1880378
aguggaguuuauccaaaga

SEQ ID NO: 1962629 - RNA, 19 nt, Artificial Sequence
  Description of Artificial Sequence: Synthetic oligonucleotide
  Antisense strand to SEQ ID NO: 1962628
ucuuuggauaaacuccacu

SEQ ID NO: 1962630 - RNA, 19 nt, Artificial Sequence
  Description of Artificial Sequence: Synthetic oligonucleotide
  Sense strand starting at position 1106 of SEQ ID NO: 1880378
cccaaaggcuacuuagaga

SEQ ID NO: 1962631 - RNA, 19 nt, Artificial Sequence
  Description of Artificial Sequence: Synthetic oligonucleotide
  Antisense strand to SEQ ID NO: 1962630
ucucuaaguagccuuuggg

SEQ ID NO: 1962632 - RNA, 19 nt, Artificial Sequence
  Description of Artificial Sequence: Synthetic oligonucleotide
  Sense strand starting at position 2359 of SEQ ID NO: 1880378
ccaggaugugcauguggua

SEQ ID NO: 1962633 - RNA, 19 nt, Artificial Sequence
  Description of Artificial Sequence: Synthetic oligonucleotide
  Antisense strand to SEQ ID NO: 1962632
uaccacaugcacauccugg

SEQ ID NO: 1962634 - RNA, 19 nt, Artificial Sequence
  Description of Artificial Sequence: Synthetic oligonucleotide
  Sense strand starting at position 2551 of SEQ ID NO: 1880378
ugggcaggacuuggugaau

SEQ ID NO: 1962635 - RNA, 19 nt, Artificial Sequence
  Description of Artificial Sequence: Synthetic oligonucleotide
  Antisense strand to SEQ ID NO: 1962634
auucaccaaguccugccca

SEQ ID NO: 1962636 - RNA, 19 nt, Artificial Sequence
  Description of Artificial Sequence: Synthetic oligonucleotide
  Sense strand starting at position 2919 of SEQ ID NO: 1880378
gagguagucuaggaaugga

SEQ ID NO: 1962637 - RNA, 19 nt, Artificial Sequence
  Description of Artificial Sequence: Synthetic oligonucleotide
  Antisense strand to SEQ ID NO: 1962636
uccauuccuagacuaccuc

SEQ ID NO: 1962638 - RNA, 19 nt, Artificial Sequence
  Description of Artificial Sequence: Synthetic oligonucleotide
  Sense strand starting at position 2969 of SEQ ID NO: 1880378
uccaaaugccaucguggaa

SEQ ID NO: 1962639 - RNA, 19 nt, Artificial Sequence
  Description of Artificial Sequence: Synthetic oligonucleotide
  Antisense strand to SEQ ID NO: 1962638
uuccacgauggcauuugga

SEQ ID NO: 1962640 - RNA, 19 nt, Artificial Sequence
  Description of Artificial Sequence: Synthetic oligonucleotide
  Sense strand starting at position 3021 of SEQ ID NO: 1880378
ggccgauagugugauacau

SEQ ID NO: 1962641 - RNA, 19 nt, Artificial Sequence
  Description of Artificial Sequence: Synthetic oligonucleotide
  Antisense strand to SEQ ID NO: 1962640
auguaucacacuaucggcc

SEQ ID NO: 1962642 - RNA, 19 nt, Artificial Sequence
  Description of Artificial Sequence: Synthetic oligonucleotide
  Sense strand starting at position 3023 of SEQ ID NO: 1880378
ccgauagugugauacauuu

SEQ ID NO: 1962643 - RNA, 19 nt, Artificial Sequence
  Description of Artificial Sequence: Synthetic oligonucleotide
  Antisense strand to SEQ ID NO: 1962642
aaauguaucacacuaucgg

SEQ ID NO: 1962644 - RNA, 19 nt, Artificial Sequence
  Description of Artificial Sequence: Synthetic oligonucleotide
  Sense strand starting at position 670 of SEQ ID NO: 1880380
aaggucaauuaaucguuau

SEQ ID NO: 1962645 - RNA, 19 nt, Artificial Sequence
  Description of Artificial Sequence: Synthetic oligonucleotide
  Antisense strand to SEQ ID NO: 1962644
auaacgauuaauugaccuu

SEQ ID NO: 1962646 - RNA, 19 nt, Artificial Sequence
  Description of Artificial Sequence: Synthetic oligonucleotide
  Sense strand starting at position 683 of SEQ ID NO: 1880380
cguuauuauguccaaugcu

SEQ ID NO: 1962647 - RNA, 19 nt, Artificial Sequence
  Description of Artificial Sequence: Synthetic oligonucleotide
  Antisense strand to SEQ ID NO: 1962646
agcauuggacauaauaacg

SEQ ID NO: 1962648 - RNA, 19 nt, Artificial Sequence
  Description of Artificial Sequence: Synthetic oligonucleotide
  Sense strand starting at position 692 of SEQ ID NO: 1880380
guccaaugcuaacugaauc

SEQ ID NO: 1962649 - RNA, 19 nt, Artificial Sequence
  Description of Artificial Sequence: Synthetic oligonucleotide
  Antisense strand to SEQ ID NO: 1962648
gauucaguuagcauuggac

SEQ ID NO: 1962650 - RNA, 19 nt, Artificial Sequence
  Description of Artificial Sequence: Synthetic oligonucleotide
  Sense strand starting at position 700 of SEQ ID NO: 1880380
cuaacugaauccuagauag

SEQ ID NO: 1962651 - RNA, 19 nt, Artificial Sequence
  Description of Artificial Sequence: Synthetic oligonucleotide
  Antisense strand to SEQ ID NO: 1962650
cuaucuaggauucaguuag

SEQ ID NO: 1962652 - RNA, 19 nt, Artificial Sequence
  Description of Artificial Sequence: Synthetic oligonucleotide
  Sense strand starting at position 712 of SEQ ID NO: 1880380
uagauaggcuacuguuaac

SEQ ID NO: 1962653 - RNA, 19 nt, Artificial Sequence
  Description of Artificial Sequence: Synthetic oligonucleotide
  Antisense strand to SEQ ID NO: 1962652
guuaacaguagccuaucua

SEQ ID NO: 1962654 - RNA, 19 nt, Artificial Sequence
  Description of Artificial Sequence: Synthetic oligonucleotide
  Sense strand starting at position 725 of SEQ ID NO: 1880380
guuaacagccaguauaaua

SEQ ID NO: 1962655 - RNA, 19 nt, Artificial Sequence
  Description of Artificial Sequence: Synthetic oligonucleotide
  Antisense strand to SEQ ID NO: 1962654
uauuauacuggcuguuaac

SEQ ID NO: 1962656 - RNA, 19 nt, Artificial Sequence
  Description of Artificial Sequence: Synthetic oligonucleotide
  Sense strand starting at position 941 of SEQ ID NO: 1880380
ugggacucccgccaucauu

SEQ ID NO: 1962657 - RNA, 19 nt, Artificial Sequence
  Description of Artificial Sequence: Synthetic oligonucleotide
  Antisense strand to SEQ ID NO: 1962656
aaugauggcgggaguccca

SEQ ID NO: 1962658 - RNA, 19 nt, Artificial Sequence
  Description of Artificial Sequence: Synthetic oligonucleotide
  Sense strand starting at position 1123 of SEQ ID NO: 1880380
acuuuacuacuguauuagu

SEQ ID NO: 1962659 - RNA, 19 nt, Artificial Sequence
  Description of Artificial Sequence: Synthetic oligonucleotide
  Antisense strand to SEQ ID NO: 1962658
acuaauacaguaguaaagu

SEQ ID NO: 1962660 - RNA, 19 nt, Artificial Sequence
  Description of Artificial Sequence: Synthetic oligonucleotide
  Sense strand starting at position 1126 of SEQ ID NO: 1880380
uuacuacuguauuagucau

SEQ ID NO: 1962661 - RNA, 19 nt, Artificial Sequence
  Description of Artificial Sequence: Synthetic oligonucleotide
  Antisense strand to SEQ ID NO: 1962660
augacuaauacaguaguaa

SEQ ID NO: 1962662 - RNA, 19 nt, Artificial Sequence
  Description of Artificial Sequence: Synthetic oligonucleotide
  Sense strand starting at position 1132 of SEQ ID NO: 1880380
cuguauuagucauccaaua

SEQ ID NO: 1962663 - RNA, 19 nt, Artificial Sequence
  Description of Artificial Sequence: Synthetic oligonucleotide
  Antisense strand to SEQ ID NO: 1962662
uauuggaugacuaauacag

SEQ ID NO: 1962664 - RNA, 19 nt, Artificial Sequence
  Description of Artificial Sequence: Synthetic oligonucleotide
  Sense strand starting at position 1256 of SEQ ID NO: 1880380
gaagaaaccuguuaacgag

SEQ ID NO: 1962665 - RNA, 19 nt, Artificial Sequence
  Description of Artificial Sequence: Synthetic oligonucleotide
  Antisense strand to SEQ ID NO: 1962664
cucguuaacagguuucuuc

SEQ ID NO: 1962666 - RNA, 19 nt, Artificial Sequence
  Description of Artificial Sequence: Synthetic oligonucleotide
  Sense strand starting at position 1259 of SEQ ID NO: 1880380
gaaaccuguuaacgagaaa

SEQ ID NO: 1962667 - RNA, 19 nt, Artificial Sequence
  Description of Artificial Sequence: Synthetic oligonucleotide
  Antisense strand to SEQ ID NO: 1962666
uuucucguuaacagguuuc

SEQ ID NO: 1962668 - RNA, 19 nt, Artificial Sequence
  Description of Artificial Sequence: Synthetic oligonucleotide
  Sense strand starting at position 1282 of SEQ ID NO: 1880380
ucuccauacuauuaguuga

SEQ ID NO: 1962669 - RNA, 19 nt, Artificial Sequence
  Description of Artificial Sequence: Synthetic oligonucleotide
  Antisense strand to SEQ ID NO: 1962668
ucaacuaauaguauggaga

SEQ ID NO: 1962670 - RNA, 19 nt, Artificial Sequence
  Description of Artificial Sequence: Synthetic oligonucleotide
  Sense strand starting at position 1284 of SEQ ID NO: 1880380
uccauacuauuaguugaga

SEQ ID NO: 1962671 - RNA, 19 nt, Artificial Sequence
  Description of Artificial Sequence: Synthetic oligonucleotide
  Antisense strand to SEQ ID NO: 1962670
ucucaacuaauaguaugga

SEQ ID NO: 1962672 - RNA, 19 nt, Artificial Sequence
  Description of Artificial Sequence: Synthetic oligonucleotide
  Sense strand starting at position 1285 of SEQ ID NO: 1880380
ccauacuauuaguugagau

SEQ ID NO: 1962673 - RNA, 19 nt, Artificial Sequence
  Description of Artificial Sequence: Synthetic oligonucleotide
  Antisense strand to SEQ ID NO: 1962672
aucucaacuaauaguaugg

SEQ ID NO: 1962674 - RNA, 19 nt, Artificial Sequence
  Description of Artificial Sequence: Synthetic oligonucleotide
  Sense strand starting at position 1299 of SEQ ID NO: 1880380
gagauuaaauguggaauuc

SEQ ID NO: 1962675 - RNA, 19 nt, Artificial Sequence
  Description of Artificial Sequence: Synthetic oligonucleotide
  Antisense strand to SEQ ID NO: 1962674
gaauuccacauuuaaucuc

SEQ ID NO: 1962676 - RNA, 19 nt, Artificial Sequence
  Description of Artificial Sequence: Synthetic oligonucleotide
  Sense strand starting at position 1308 of SEQ ID NO: 1880380
uguggaauuccaggccaga

SEQ ID NO: 1962677 - RNA, 19 nt, Artificial Sequence
  Description of Artificial Sequence: Synthetic oligonucleotide
  Antisense strand to SEQ ID NO: 1962676
ucuggccuggaauuccaca

SEQ ID NO: 1962678 - RNA, 19 nt, Artificial Sequence
  Description of Artificial Sequence: Synthetic oligonucleotide
  Sense strand starting at position 1503 of SEQ ID NO: 1880380
agaugaagcuagugagaga

SEQ ID NO: 1962679 - RNA, 19 nt, Artificial Sequence
  Description of Artificial Sequence: Synthetic oligonucleotide
  Antisense strand to SEQ ID NO: 1962678
ucucucacuagcuucaucu

SEQ ID NO: 1962680 - RNA, 19 nt, Artificial Sequence
  Description of Artificial Sequence: Synthetic oligonucleotide
  Sense strand starting at position 1785 of SEQ ID NO: 1880380
caguguguaucacuauguu

SEQ ID NO: 1962681 - RNA, 19 nt, Artificial Sequence
  Description of Artificial Sequence: Synthetic oligonucleotide
  Antisense strand to SEQ ID NO: 1962680
aacauagugauacacacug

SEQ ID NO: 1962682 - RNA, 19 nt, Artificial Sequence
  Description of Artificial Sequence: Synthetic oligonucleotide
  Sense strand starting at position 2116 of SEQ ID NO: 1880380
gugaguugugguccugcca

SEQ ID NO: 1962683 - RNA, 19 nt, Artificial Sequence
  Description of Artificial Sequence: Synthetic oligonucleotide
  Antisense strand to SEQ ID NO: 1962682
uggcaggaccacaacucac

SEQ ID NO: 1962684 - RNA, 19 nt, Artificial Sequence
  Description of Artificial Sequence: Synthetic oligonucleotide
  Sense strand starting at position 2486 of SEQ ID NO: 1880380
uggguucugguucauggau

SEQ ID NO: 1962685 - RNA, 19 nt, Artificial Sequence
  Description of Artificial Sequence: Synthetic oligonucleotide
  Antisense strand to SEQ ID NO: 1962684
auccaugaaccagaaccca

SEQ ID NO: 1962686 - RNA, 19 nt, Artificial Sequence
  Description of Artificial Sequence: Synthetic oligonucleotide
  Sense strand starting at position 2533 of SEQ ID NO: 1880380
uuuaauugcgucuguacca

SEQ ID NO: 1962687 - RNA, 19 nt, Artificial Sequence
  Description of Artificial Sequence: Synthetic oligonucleotide
  Antisense strand to SEQ ID NO: 1962686
ugguacagacgcaauuaaa

SEQ ID NO: 1962688 - RNA, 19 nt, Artificial Sequence
  Description of Artificial Sequence: Synthetic oligonucleotide
  Sense strand starting at position 2534 of SEQ ID NO: 1880380
uuaauugcgucuguaccaa

SEQ ID NO: 1962689 - RNA, 19 nt, Artificial Sequence
  Description of Artificial Sequence: Synthetic oligonucleotide
  Antisense strand to SEQ ID NO: 1962688
uugguacagacgcaauuaa

SEQ ID NO: 1962690 - RNA, 19 nt, Artificial Sequence
  Description of Artificial Sequence: Synthetic oligonucleotide
  Sense strand starting at position 2620 of SEQ ID NO: 1880380
gcauuuauguuguauuaag

SEQ ID NO: 1962691 - RNA, 19 nt, Artificial Sequence
  Description of Artificial Sequence: Synthetic oligonucleotide
  Antisense strand to SEQ ID NO: 1962690
cuuaauacaacauaaaugc

SEQ ID NO: 1962692 - RNA, 19 nt, Artificial Sequence
  Description of Artificial Sequence: Synthetic oligonucleotide
  Sense strand starting at position 2643 of SEQ ID NO: 1880380
auaaguaaucuagaggugu

SEQ ID NO: 1962693 - RNA, 19 nt, Artificial Sequence
  Description of Artificial Sequence: Synthetic oligonucleotide
  Antisense strand to SEQ ID NO: 1962692
acaccucuagauuacuuau

SEQ ID NO: 1962694 - RNA, 19 nt, Artificial Sequence
  Description of Artificial Sequence: Synthetic oligonucleotide
  Sense strand starting at position 2647 of SEQ ID NO: 1880380
guaaucuagagguguuaaa

SEQ ID NO: 1962695 - RNA, 19 nt, Artificial Sequence
  Description of Artificial Sequence: Synthetic oligonucleotide
  Antisense strand to SEQ ID NO: 1962694
uuuaacaccucuagauuac

SEQ ID NO: 1962696 - RNA, 19 nt, Artificial Sequence
  Description of Artificial Sequence: Synthetic oligonucleotide
  Sense strand starting at position 2665 of SEQ ID NO: 1880380
aguauauagaaguauguac

SEQ ID NO: 1962697 - RNA, 19 nt, Artificial Sequence
  Description of Artificial Sequence: Synthetic oligonucleotide
  Antisense strand to SEQ ID NO: 1962696
guacauacuucuauauacu

SEQ ID NO: 1962698 - RNA, 19 nt, Artificial Sequence
  Description of Artificial Sequence: Synthetic oligonucleotide
  Sense strand starting at position 2871 of SEQ ID NO: 1880380
cccuguugccucuguuuaa

SEQ ID NO: 1962699 - RNA, 19 nt, Artificial Sequence
  Description of Artificial Sequence: Synthetic oligonucleotide
  Antisense strand to SEQ ID NO: 1962698
uuaaacagaggcaacaggg

SEQ ID NO: 1962700 - RNA, 19 nt, Artificial Sequence
  Description of Artificial Sequence: Synthetic oligonucleotide
  Sense strand starting at position 2872 of SEQ ID NO: 1880380
ccuguugccucuguuuaaa

SEQ ID NO: 1962701 - RNA, 19 nt, Artificial Sequence
  Description of Artificial Sequence: Synthetic oligonucleotide
  Antisense strand to SEQ ID NO: 1962700
uuuaaacagaggcaacagg

SEQ ID NO: 1962702 - RNA, 19 nt, Artificial Sequence
  Description of Artificial Sequence: Synthetic oligonucleotide
  Sense strand starting at position 2875 of SEQ ID NO: 1880380
guugccucuguuuaaauga

SEQ ID NO: 1962703 - RNA, 19 nt, Artificial Sequence
  Description of Artificial Sequence: Synthetic oligonucleotide
  Antisense strand to SEQ ID NO: 1962702
ucauuuaaacagaggcaac

SEQ ID NO: 1962704 - RNA, 19 nt, Artificial Sequence
  Description of Artificial Sequence: Synthetic oligonucleotide
  Sense strand starting at position 2918 of SEQ ID NO: 1880380
augucuaaagcuuagaaac

SEQ ID NO: 1962705 - RNA, 19 nt, Artificial Sequence
  Description of Artificial Sequence: Synthetic oligonucleotide
  Antisense strand to SEQ ID NO: 1962704
guuucuaagcuuuagacau

SEQ ID NO: 1962706 - RNA, 19 nt, Artificial Sequence
  Description of Artificial Sequence: Synthetic oligonucleotide
  Sense strand starting at position 2984 of SEQ ID NO: 1880380
ugccuuccuucugaaaggu

SEQ ID NO: 1962707 - RNA, 19 nt, Artificial Sequence
  Description of Artificial Sequence: Synthetic oligonucleotide
  Antisense strand to SEQ ID NO: 1962706
accuuucagaaggaaggca

SEQ ID NO: 1962708 - RNA, 19 nt, Artificial Sequence
  Description of Artificial Sequence: Synthetic oligonucleotide
  Sense strand starting at position 3026 of SEQ ID NO: 1880380
gcagacuccaagggagauu

SEQ ID NO: 1962709 - RNA, 19 nt, Artificial Sequence
  Description of Artificial Sequence: Synthetic oligonucleotide
  Antisense strand to SEQ ID NO: 1962708
aaucucccuuggagucugc

SEQ ID NO: 1962710 - RNA, 19 nt, Artificial Sequence
  Description of Artificial Sequence: Synthetic oligonucleotide
  Sense strand starting at position 3037 of SEQ ID NO: 1880380
gggagauuauccuguucuu

SEQ ID NO: 1962711 - RNA, 19 nt, Artificial Sequence
  Description of Artificial Sequence: Synthetic oligonucleotide
  Antisense strand to SEQ ID NO: 1962710
aagaacaggauaaucuccc

SEQ ID NO: 1962712 - RNA, 19 nt, Artificial Sequence
  Description of Artificial Sequence: Synthetic oligonucleotide
  Sense strand starting at position 3040 of SEQ ID NO: 1880380
agauuauccuguucuuacu

SEQ ID NO: 1962713 - RNA, 19 nt, Artificial Sequence
  Description of Artificial Sequence: Synthetic oligonucleotide
  Antisense strand to SEQ ID NO: 1962712
aguaagaacaggauaaucu

SEQ ID NO: 1962714 - RNA, 19 nt, Artificial Sequence
  Description of Artificial Sequence: Synthetic oligonucleotide
  Sense strand starting at position 3696 of SEQ ID NO: 1880380
acuacaaugagucgugauu

SEQ ID NO: 1962715 - RNA, 19 nt, Artificial Sequence
  Description of Artificial Sequence: Synthetic oligonucleotide
  Antisense strand to SEQ ID NO: 1962714
aaucacgacucauuguagu

SEQ ID NO: 1962716 - RNA, 19 nt, Artificial Sequence
  Description of Artificial Sequence: Synthetic oligonucleotide
  Sense strand starting at position 3830 of SEQ ID NO: 1880380
cugaaauuagaaugcaucu

SEQ ID NO: 1962717 - RNA, 19 nt, Artificial Sequence
  Description of Artificial Sequence: Synthetic oligonucleotide
  Antisense strand to SEQ ID NO: 1962716
agaugcauucuaauuucag

SEQ ID NO: 1962718 - RNA, 19 nt, Artificial Sequence
  Description of Artificial Sequence: Synthetic oligonucleotide
  Sense strand starting at position 3881 of SEQ ID NO: 1880380
cugggugcgaguuguguua

SEQ ID NO: 1962719 - RNA, 19 nt, Artificial Sequence
  Description of Artificial Sequence: Synthetic oligonucleotide
  Antisense strand to SEQ ID NO: 1962718
uaacacaacucgcacccag

SEQ ID NO: 1962720 - RNA, 19 nt, Artificial Sequence
  Description of Artificial Sequence: Synthetic oligonucleotide
  Sense strand starting at position 3892 of SEQ ID NO: 1880380
uuguguuacagcugucuga

SEQ ID NO: 1962721 - RNA, 19 nt, Artificial Sequence
  Description of Artificial Sequence: Synthetic oligonucleotide
  Antisense strand to SEQ ID NO: 1962720
ucagacagcuguaacacaa

SEQ ID NO: 1962722 - RNA, 19 nt, Artificial Sequence
  Description of Artificial Sequence: Synthetic oligonucleotide
  Sense strand starting at position 3896 of SEQ ID NO: 1880380
guuacagcugucugaacaa

SEQ ID NO: 1962723 - RNA, 19 nt, Artificial Sequence
  Description of Artificial Sequence: Synthetic oligonucleotide
  Antisense strand to SEQ ID NO: 1962722
uuguucagacagcuguaac

SEQ ID NO: 1962724 - RNA, 19 nt, Artificial Sequence
  Description of Artificial Sequence: Synthetic oligonucleotide
  Sense strand starting at position 145 of SEQ ID NO: 1880379
aguguuagcuucuccauga

SEQ ID NO: 1962725 - RNA, 19 nt, Artificial Sequence
  Description of Artificial Sequence: Synthetic oligonucleotide
  Antisense strand to SEQ ID NO: 1962724
ucauggagaagcuaacacu

SEQ ID NO: 1962726 - RNA, 19 nt, Artificial Sequence
  Description of Artificial Sequence: Synthetic oligonucleotide
  Sense strand starting at position 146 of SEQ ID NO: 1880379
guguuagcuucuccaugag

SEQ ID NO: 1962727 - RNA, 19 nt, Artificial Sequence
  Description of Artificial Sequence: Synthetic oligonucleotide
  Antisense strand to SEQ ID NO: 1962726
cucauggagaagcuaacac

SEQ ID NO: 1962728 - RNA, 19 nt, Artificial Sequence
  Description of Artificial Sequence: Synthetic oligonucleotide
  Sense strand starting at position 307 of SEQ ID NO: 1880379
aggaauuguuuggucuguu

SEQ ID NO: 1962729 - RNA, 19 nt, Artificial Sequence
  Description of Artificial Sequence: Synthetic oligonucleotide
  Antisense strand to SEQ ID NO: 1962728
aacagaccaaacaauuccu

SEQ ID NO: 1962730 - RNA, 19 nt, Artificial Sequence
  Description of Artificial Sequence: Synthetic oligonucleotide
  Sense strand starting at position 308 of SEQ ID NO: 1880379
ggaauuguuuggucuguuu

SEQ ID NO: 1962731 - RNA, 19 nt, Artificial Sequence
  Description of Artificial Sequence: Synthetic oligonucleotide
  Antisense strand to SEQ ID NO: 1962730
aaacagaccaaacaauucc

SEQ ID NO: 1962732 - RNA, 19 nt, Artificial Sequence
  Description of Artificial Sequence: Synthetic oligonucleotide
  Sense strand starting at position 334 of SEQ ID NO: 1880379
aguacuuaacaguguagua

SEQ ID NO: 1962733 - RNA, 19 nt, Artificial Sequence
  Description of Artificial Sequence: Synthetic oligonucleotide
  Antisense strand to SEQ ID NO: 1962732
uacuacacuguuaaguacu

SEQ ID NO: 1962734 - RNA, 19 nt, Artificial Sequence
  Description of Artificial Sequence: Synthetic oligonucleotide
  Sense strand starting at position 346 of SEQ ID NO: 1880379
uguaguaagugcucaacag

SEQ ID NO: 1962735 - RNA, 19 nt, Artificial Sequence
  Description of Artificial Sequence: Synthetic oligonucleotide
  Antisense strand to SEQ ID NO: 1962734
cuguugagcacuuacuaca

SEQ ID NO: 1962736 - RNA, 19 nt, Artificial Sequence
  Description of Artificial Sequence: Synthetic oligonucleotide
  Sense strand starting at position 350 of SEQ ID NO: 1880379
guaagugcucaacagggua

SEQ ID NO: 1962737 - RNA, 19 nt, Artificial Sequence
  Description of Artificial Sequence: Synthetic oligonucleotide
  Antisense strand to SEQ ID NO: 1962736
uacccuguugagcacuuac

SEQ ID NO: 1962738 - RNA, 19 nt, Artificial Sequence
  Description of Artificial Sequence: Synthetic oligonucleotide
  Sense strand starting at position 515 of SEQ ID NO: 1880379
accaguguauuccuugaug

SEQ ID NO: 1962739 - RNA, 19 nt, Artificial Sequence
  Description of Artificial Sequence: Synthetic oligonucleotide
  Antisense strand to SEQ ID NO: 1962738
caucaaggaauacacuggu

SEQ ID NO: 1962740 - RNA, 19 nt, Artificial Sequence
  Description of Artificial Sequence: Synthetic oligonucleotide
  Sense strand starting at position 517 of SEQ ID NO: 1880379
caguguauuccuugauguu

SEQ ID NO: 1962741 - RNA, 19 nt, Artificial Sequence
  Description of Artificial Sequence: Synthetic oligonucleotide
  Antisense strand to SEQ ID NO: 1962740
aacaucaaggaauacacug

SEQ ID NO: 1962742 - RNA, 19 nt, Artificial Sequence
  Description of Artificial Sequence: Synthetic oligonucleotide
  Sense strand starting at position 518 of SEQ ID NO: 1880379
aguguauuccuugauguua

SEQ ID NO: 1962743 - RNA, 19 nt, Artificial Sequence
  Description of Artificial Sequence: Synthetic oligonucleotide
  Antisense strand to SEQ ID NO: 1962742
uaacaucaaggaauacacu

SEQ ID NO: 1962744 - RNA, 19 nt, Artificial Sequence
  Description of Artificial Sequence: Synthetic oligonucleotide
  Sense strand starting at position 530 of SEQ ID NO: 1880379
gauguuaaauuucgaaaga

SEQ ID NO: 1962745 - RNA, 19 nt, Artificial Sequence
  Description of Artificial Sequence: Synthetic oligonucleotide
  Antisense strand to SEQ ID NO: 1962744
ucuuucgaaauuuaacauc

SEQ ID NO: 1962746 - RNA, 19 nt, Artificial Sequence
  Description of Artificial Sequence: Synthetic oligonucleotide
  Sense strand starting at position 604 of SEQ ID NO: 1880379
ccucuucuguugucaacau

SEQ ID NO: 1962747 - RNA, 19 nt, Artificial Sequence
  Description of Artificial Sequence: Synthetic oligonucleotide
  Antisense strand to SEQ ID NO: 1962746
auguugacaacagaagagg

SEQ ID NO: 1962748 - RNA, 19 nt, Artificial Sequence
  Description of Artificial Sequence: Synthetic oligonucleotide
  Sense strand starting at position 608 of SEQ ID NO: 1880379
uucuguugucaacaucuga

SEQ ID NO: 1962749 - RNA, 19 nt, Artificial Sequence
  Description of Artificial Sequence: Synthetic oligonucleotide
  Antisense strand to SEQ ID NO: 1962748
ucagauguugacaacagaa

SEQ ID NO: 1962750 - RNA, 19 nt, Artificial Sequence
  Description of Artificial Sequence: Synthetic oligonucleotide
  Sense strand starting at position 612 of SEQ ID NO: 1880379
guugucaacaucugaugua

SEQ ID NO: 1962751 - RNA, 19 nt, Artificial Sequence
  Description of Artificial Sequence: Synthetic oligonucleotide
  Antisense strand to SEQ ID NO: 1962750
uacaucagauguugacaac

SEQ ID NO: 1962752 - RNA, 19 nt, Artificial Sequence
  Description of Artificial Sequence: Synthetic oligonucleotide
  Sense strand starting at position 648 of SEQ ID NO: 1880379
ccaguuugagcacaucaga

SEQ ID NO: 1962753 - RNA, 19 nt, Artificial Sequence
  Description of Artificial Sequence: Synthetic oligonucleotide
  Antisense strand to SEQ ID NO: 1962752
ucugaugugcucaaacugg

SEQ ID NO: 1962754 - RNA, 19 nt, Artificial Sequence
  Description of Artificial Sequence: Synthetic oligonucleotide
  Sense strand starting at position 883 of SEQ ID NO: 1880379
gcacaacauugggaaucaa

SEQ ID NO: 1962755 - RNA, 19 nt, Artificial Sequence
  Description of Artificial Sequence: Synthetic oligonucleotide
  Antisense strand to SEQ ID NO: 1962754
uugauucccaauguugugc

SEQ ID NO: 1962756 - RNA, 19 nt, Artificial Sequence
  Description of Artificial Sequence: Synthetic oligonucleotide
  Sense strand starting at position 915 of SEQ ID NO: 1880379
caauguauguagcucuaga

SEQ ID NO: 1962757 - RNA, 19 nt, Artificial Sequence
  Description of Artificial Sequence: Synthetic oligonucleotide
  Antisense strand to SEQ ID NO: 1962756
ucuagagcuacauacauug

SEQ ID NO: 1962758 - RNA, 19 nt, Artificial Sequence
  Description of Artificial Sequence: Synthetic oligonucleotide
  Sense strand starting at position 995 of SEQ ID NO: 1880379
uuaccuuucuuacagagag

SEQ ID NO: 1962759 - RNA, 19 nt, Artificial Sequence
  Description of Artificial Sequence: Synthetic oligonucleotide
  Antisense strand to SEQ ID NO: 1962758
cucucuguaagaaagguaa

SEQ ID NO: 1962760 - RNA, 19 nt, Artificial Sequence
  Description of Artificial Sequence: Synthetic oligonucleotide
  Sense strand starting at position 1010 of SEQ ID NO: 1880379
agagacuacguguguuuaa

SEQ ID NO: 1962761 - RNA, 19 nt, Artificial Sequence
  Description of Artificial Sequence: Synthetic oligonucleotide
  Antisense strand to SEQ ID NO: 1962760
uuaaacacacguagucucu

SEQ ID NO: 1962762 - RNA, 19 nt, Artificial Sequence
  Description of Artificial Sequence: Synthetic oligonucleotide
  Sense strand starting at position 1011 of SEQ ID NO: 1880379
gagacuacguguguuuaag

SEQ ID NO: 1962763 - RNA, 19 nt, Artificial Sequence
  Description of Artificial Sequence: Synthetic oligonucleotide
  Antisense strand to SEQ ID NO: 1962762
cuuaaacacacguagucuc

SEQ ID NO: 1962764 - RNA, 19 nt, Artificial Sequence
  Description of Artificial Sequence: Synthetic oligonucleotide
  Sense strand starting at position 1023 of SEQ ID NO: 1880379
guuuaagugcuuugacuug

SEQ ID NO: 1962765 - RNA, 19 nt, Artificial Sequence
  Description of Artificial Sequence: Synthetic oligonucleotide
  Antisense strand to SEQ ID NO: 1962764
caagucaaagcacuuaaac

SEQ ID NO: 1962766 - RNA, 19 nt, Artificial Sequence
  Description of Artificial Sequence: Synthetic oligonucleotide
  Sense strand starting at position 1028 of SEQ ID NO: 1880379
agugcuuugacuugcagga

SEQ ID NO: 1962767 - RNA, 19 nt, Artificial Sequence
  Description of Artificial Sequence: Synthetic oligonucleotide
  Antisense strand to SEQ ID NO: 1962766
uccugcaagucaaagcacu

SEQ ID NO: 1962768 - RNA, 19 nt, Artificial Sequence
  Description of Artificial Sequence: Synthetic oligonucleotide
  Sense strand starting at position 1101 of SEQ ID NO: 1880379
cguuauugcuucccaaaca

SEQ ID NO: 1962769 - RNA, 19 nt, Artificial Sequence
  Description of Artificial Sequence: Synthetic oligonucleotide
  Antisense strand to SEQ ID NO: 1962768
uguuugggaagcaauaacg

SEQ ID NO: 1962770 - RNA, 19 nt, Artificial Sequence
  Description of Artificial Sequence: Synthetic oligonucleotide
  Sense strand starting at position 1154 of SEQ ID NO: 1880379
cccuguucgcuugauuuau

SEQ ID NO: 1962771 - RNA, 19 nt, Artificial Sequence
  Description of Artificial Sequence: Synthetic oligonucleotide
  Antisense strand to SEQ ID NO: 1962770
auaaaucaagcgaacaggg

SEQ ID NO: 1962772 - RNA, 19 nt, Artificial Sequence
  Description of Artificial Sequence: Synthetic oligonucleotide
  Sense strand starting at position 1156 of SEQ ID NO: 1880379
cuguucgcuugauuuaugu

SEQ ID NO: 1962773 - RNA, 19 nt, Artificial Sequence
  Description of Artificial Sequence: Synthetic oligonucleotide
  Antisense strand to SEQ ID NO: 1962772
acauaaaucaagcgaacag

SEQ ID NO: 1962774 - RNA, 19 nt, Artificial Sequence
  Description of Artificial Sequence: Synthetic oligonucleotide
  Sense strand starting at position 1158 of SEQ ID NO: 1880379
guucgcuugauuuauguuu

SEQ ID NO: 1962775 - RNA, 19 nt, Artificial Sequence
  Description of Artificial Sequence: Synthetic oligonucleotide
  Antisense strand to SEQ ID NO: 1962774
aaacauaaaucaagcgaac

SEQ ID NO: 1962776 - RNA, 19 nt, Artificial Sequence
  Description of Artificial Sequence: Synthetic oligonucleotide
  Sense strand starting at position 1205 of SEQ ID NO: 1880379
uuuggaaacugacacuuaa

SEQ ID NO: 1962777 - RNA, 19 nt, Artificial Sequence
  Description of Artificial Sequence: Synthetic oligonucleotide
  Antisense strand to SEQ ID NO: 1962776
uuaagugucaguuuccaaa

SEQ ID NO: 1962778 - RNA, 19 nt, Artificial Sequence
  Description of Artificial Sequence: Synthetic oligonucleotide
  Sense strand starting at position 1212 of SEQ ID NO: 1880379
acugacacuuaaggauaau

SEQ ID NO: 1962779 - RNA, 19 nt, Artificial Sequence
  Description of Artificial Sequence: Synthetic oligonucleotide
  Antisense strand to SEQ ID NO: 1962778
auuauccuuaagugucagu

SEQ ID NO: 1962780 - RNA, 19 nt, Artificial Sequence
  Description of Artificial Sequence: Synthetic oligonucleotide
  Sense strand starting at position 1372 of SEQ ID NO: 1880379
ggagucuccuccguccaga

SEQ ID NO: 1962781 - RNA, 19 nt, Artificial Sequence
  Description of Artificial Sequence: Synthetic oligonucleotide
  Antisense strand to SEQ ID NO: 1962780
ucuggacggaggagacucc

SEQ ID NO: 1962782 - RNA, 19 nt, Artificial Sequence
  Description of Artificial Sequence: Synthetic oligonucleotide
  Sense strand starting at position 2133 of SEQ ID NO: 1880379
gcccgagacccggaugaaa

SEQ ID NO: 1962783 - RNA, 19 nt, Artificial Sequence
  Description of Artificial Sequence: Synthetic oligonucleotide
  Antisense strand to SEQ ID NO: 1962782
uuucauccgggucucgggc

SEQ ID NO: 1962784 - RNA, 19 nt, Artificial Sequence
  Description of Artificial Sequence: Synthetic oligonucleotide
  Sense strand starting at position 2223 of SEQ ID NO: 1880379
ccuugaguugagugguguu

SEQ ID NO: 1962785 - RNA, 19 nt, Artificial Sequence
  Description of Artificial Sequence: Synthetic oligonucleotide
  Antisense strand to SEQ ID NO: 1962784
aacaccacucaacucaagg

SEQ ID NO: 1962786 - RNA, 19 nt, Artificial Sequence
  Description of Artificial Sequence: Synthetic oligonucleotide
  Sense strand starting at position 2468 of SEQ ID NO: 1880379
ucugguagaacugggaauu

SEQ ID NO: 1962787 - RNA, 19 nt, Artificial Sequence
  Description of Artificial Sequence: Synthetic oligonucleotide
  Antisense strand to SEQ ID NO: 1962786
aauucccaguucuaccaga

SEQ ID NO: 1962788 - RNA, 19 nt, Artificial Sequence
  Description of Artificial Sequence: Synthetic oligonucleotide
  Sense strand starting at position 2494 of SEQ ID NO: 1880379
gaguguuguacugggacag

SEQ ID NO: 1962789 - RNA, 19 nt, Artificial Sequence
  Description of Artificial Sequence: Synthetic oligonucleotide
  Antisense strand to SEQ ID NO: 1962788
cugucccaguacaacacuc

SEQ ID NO: 1962790 - RNA, 19 nt, Artificial Sequence
  Description of Artificial Sequence: Synthetic oligonucleotide
  Sense strand starting at position 2683 of SEQ ID NO: 1880379
gggcguccuguguuugcua

SEQ ID NO: 1962791 - RNA, 19 nt, Artificial Sequence
  Description of Artificial Sequence: Synthetic oligonucleotide
  Antisense strand to SEQ ID NO: 1962790
uagcaaacacaggacgccc

SEQ ID NO: 1962792 - RNA, 19 nt, Artificial Sequence
  Description of Artificial Sequence: Synthetic oligonucleotide
  Sense strand starting at position 2708 of SEQ ID NO: 1880379
gcaacucuauccuuaggca

SEQ ID NO: 1962793 - RNA, 19 nt, Artificial Sequence
  Description of Artificial Sequence: Synthetic oligonucleotide
  Antisense strand to SEQ ID NO: 1962792
ugccuaaggauagaguugc

SEQ ID NO: 1962794 - RNA, 19 nt, Artificial Sequence
  Description of Artificial Sequence: Synthetic oligonucleotide
  Sense strand starting at position 2774 of SEQ ID NO: 1880379
uccugucagcuuuaaagau

SEQ ID NO: 1962795 - RNA, 19 nt, Artificial Sequence
  Description of Artificial Sequence: Synthetic oligonucleotide
  Antisense strand to SEQ ID NO: 1962794
aucuuuaaagcugacagga

SEQ ID NO: 1962796 - RNA, 19 nt, Artificial Sequence
  Description of Artificial Sequence: Synthetic oligonucleotide
  Sense strand starting at position 3367 of SEQ ID NO: 1880379
cugagauugcggugagcca

SEQ ID NO: 1962797 - RNA, 19 nt, Artificial Sequence
  Description of Artificial Sequence: Synthetic oligonucleotide
  Antisense strand to SEQ ID NO: 1962796
uggcucaccgcaaucucag

SEQ ID NO: 1962798 - RNA, 19 nt, Artificial Sequence
  Description of Artificial Sequence: Synthetic oligonucleotide
  Sense strand starting at position 3588 of SEQ ID NO: 1880379
uggcuucuguccuuuccua

SEQ ID NO: 1962799 - RNA, 19 nt, Artificial Sequence
  Description of Artificial Sequence: Synthetic oligonucleotide
  Antisense strand to SEQ ID NO: 1962798
uaggaaaggacagaagcca

SEQ ID NO: 1962800 - RNA, 19 nt, Artificial Sequence
  Description of Artificial Sequence: Synthetic oligonucleotide
  Sense strand starting at position 3611 of SEQ ID NO: 1880379
ccuauugcuugcccuaaga

SEQ ID NO: 1962801 - RNA, 19 nt, Artificial Sequence
  Description of Artificial Sequence: Synthetic oligonucleotide
  Antisense strand to SEQ ID NO: 1962800
ucuuagggcaagcaauagg

SEQ ID NO: 1962802 - RNA, 19 nt, Artificial Sequence
  Description of Artificial Sequence: Synthetic oligonucleotide
  Sense strand starting at position 3645 of SEQ ID NO: 1880379
gguugauaacuggagucuu

SEQ ID NO: 1962803 - RNA, 19 nt, Artificial Sequence
  Description of Artificial Sequence: Synthetic oligonucleotide
  Antisense strand to SEQ ID NO: 1962802
aagacuccaguuaucaacc

SEQ ID NO: 1962804 - RNA, 19 nt, Artificial Sequence
  Description of Artificial Sequence: Synthetic oligonucleotide
  Sense strand starting at position 299 of SEQ ID NO: 1880381
uggcaaugcagacaugauu

SEQ ID NO: 1962805 - RNA, 19 nt, Artificial Sequence
  Description of Artificial Sequence: Synthetic oligonucleotide
  Antisense strand to SEQ ID NO: 1962804
aaucaugucugcauugcca

SEQ ID NO: 1962806 - RNA, 19 nt, Artificial Sequence
  Description of Artificial Sequence: Synthetic oligonucleotide
  Sense strand starting at position 436 of SEQ ID NO: 1880381
gaggccuugucucuccaaa

SEQ ID NO: 1962807 - RNA, 19 nt, Artificial Sequence
  Description of Artificial Sequence: Synthetic oligonucleotide
  Antisense strand to SEQ ID NO: 1962806
uuuggagagacaaggccuc

SEQ ID NO: 1962808 - RNA, 19 nt, Artificial Sequence
  Description of Artificial Sequence: Synthetic oligonucleotide
  Sense strand starting at position 438 of SEQ ID NO: 1880381
ggccuugucucuccaaaca

SEQ ID NO: 1962809 - RNA, 19 nt, Artificial Sequence
  Description of Artificial Sequence: Synthetic oligonucleotide
  Antisense strand to SEQ ID NO: 1962808
uguuuggagagacaaggcc

SEQ ID NO: 1962810 - RNA, 19 nt, Artificial Sequence
  Description of Artificial Sequence: Synthetic oligonucleotide
  Sense strand starting at position 528 of SEQ ID NO: 1880381
ugcagugaccugugaauca

SEQ ID NO: 1962811 - RNA, 19 nt, Artificial Sequence
  Description of Artificial Sequence: Synthetic oligonucleotide
  Antisense strand to SEQ ID NO: 1962810
ugauucacaggucacugca

SEQ ID NO: 1962812 - RNA, 19 nt, Artificial Sequence
  Description of Artificial Sequence: Synthetic oligonucleotide
  Sense strand starting at position 610 of SEQ ID NO: 1880381
accuaagcuguuuaggaau

SEQ ID NO: 1962813 - RNA, 19 nt, Artificial Sequence
  Description of Artificial Sequence: Synthetic oligonucleotide
  Antisense strand to SEQ ID NO: 1962812
auuccuaaacagcuuaggu

SEQ ID NO: 1962814 - RNA, 19 nt, Artificial Sequence
  Description of Artificial Sequence: Synthetic oligonucleotide
  Sense strand starting at position 1020 of SEQ ID NO: 1880381
caaguuauguuacugguuu

SEQ ID NO: 1962815 - RNA, 19 nt, Artificial Sequence
  Description of Artificial Sequence: Synthetic oligonucleotide
  Antisense strand to SEQ ID NO: 1962814
aaaccaguaacauaacuug

SEQ ID NO: 1962816 - RNA, 19 nt, Artificial Sequence
  Description of Artificial Sequence: Synthetic oligonucleotide
  Sense strand starting at position 1132 of SEQ ID NO: 1880381
ugagccucugcagagauau

SEQ ID NO: 1962817 - RNA, 19 nt, Artificial Sequence
  Description of Artificial Sequence: Synthetic oligonucleotide
  Antisense strand to SEQ ID NO: 1962816
auaucucugcagaggcuca

SEQ ID NO: 1962818 - RNA, 19 nt, Artificial Sequence
  Description of Artificial Sequence: Synthetic oligonucleotide
  Sense strand starting at position 1469 of SEQ ID NO: 1880381
acaggcgugcaagaaauau

SEQ ID NO: 1962819 - RNA, 19 nt, Artificial Sequence
  Description of Artificial Sequence: Synthetic oligonucleotide
  Antisense strand to SEQ ID NO: 1962818
auauuucuugcacgccugu

SEQ ID NO: 1962820 - RNA, 19 nt, Artificial Sequence
  Description of Artificial Sequence: Synthetic oligonucleotide
  Sense strand starting at position 1480 of SEQ ID NO: 1880381
agaaauauuuggcaaaucu

SEQ ID NO: 1962821 - RNA, 19 nt, Artificial Sequence
  Description of Artificial Sequence: Synthetic oligonucleotide
  Antisense strand to SEQ ID NO: 1962820
agauuugccaaauauuucu

SEQ ID NO: 1962822 - RNA, 19 nt, Artificial Sequence
  Description of Artificial Sequence: Synthetic oligonucleotide
  Sense strand starting at position 1513 of SEQ ID NO: 1880381
gugcuagcacuguauuaau

SEQ ID NO: 1962823 - RNA, 19 nt, Artificial Sequence
  Description of Artificial Sequence: Synthetic oligonucleotide
  Antisense strand to SEQ ID NO: 1962822
auuaauacagugcuagcac

SEQ ID NO: 1962824 - RNA, 19 nt, Artificial Sequence
  Description of Artificial Sequence: Synthetic oligonucleotide
  Sense strand starting at position 1546 of SEQ ID NO: 1880381
guaacuugccuccgagaaa

SEQ ID NO: 1962825 - RNA, 19 nt, Artificial Sequence
  Description of Artificial Sequence: Synthetic oligonucleotide
  Antisense strand to SEQ ID NO: 1962824
uuucucggaggcaaguuac

SEQ ID NO: 1962826 - RNA, 19 nt, Artificial Sequence
  Description of Artificial Sequence: Synthetic oligonucleotide
  Sense strand starting at position 1612 of SEQ ID NO: 1880381
ccgaguaugcccugaaggu

SEQ ID NO: 1962827 - RNA, 19 nt, Artificial Sequence
  Description of Artificial Sequence: Synthetic oligonucleotide
  Antisense strand to SEQ ID NO: 1962826
accuucagggcauacucgg

SEQ ID NO: 1962828 - RNA, 19 nt, Artificial Sequence
  Description of Artificial Sequence: Synthetic oligonucleotide
  Sense strand starting at position 1985 of SEQ ID NO: 1880381
agagaaacuuccgcaaugu

SEQ ID NO: 1962829 - RNA, 19 nt, Artificial Sequence
  Description of Artificial Sequence: Synthetic oligonucleotide
  Antisense strand to SEQ ID NO: 1962828
acauugcggaaguuucucu

SEQ ID NO: 1962830 - RNA, 19 nt, Artificial Sequence
  Description of Artificial Sequence: Synthetic oligonucleotide
  Sense strand starting at position 1986 of SEQ ID NO: 1880381
gagaaacuuccgcaauguu

SEQ ID NO: 1962831 - RNA, 19 nt, Artificial Sequence
  Description of Artificial Sequence: Synthetic oligonucleotide
  Antisense strand to SEQ ID NO: 1962830
aacauugcggaaguuucuc

SEQ ID NO: 1962832 - RNA, 19 nt, Artificial Sequence
  Description of Artificial Sequence: Synthetic oligonucleotide
  Sense strand starting at position 2271 of SEQ ID NO: 1880381
cgaggagcaugccugucau

SEQ ID NO: 1962833 - RNA, 19 nt, Artificial Sequence
  Description of Artificial Sequence: Synthetic oligonucleotide
  Antisense strand to SEQ ID NO: 1962832
augacaggcaugcuccucg

SEQ ID NO: 1962834 - RNA, 19 nt, Artificial Sequence
  Description of Artificial Sequence: Synthetic oligonucleotide
  Sense strand starting at position 2340 of SEQ ID NO: 1880381
gggcuuauucgguagccga

SEQ ID NO: 1962835 - RNA, 19 nt, Artificial Sequence
  Description of Artificial Sequence: Synthetic oligonucleotide
  Antisense strand to SEQ ID NO: 1962834
ucggcuaccgaauaagccc

SEQ ID NO: 1962836 - RNA, 19 nt, Artificial Sequence
  Description of Artificial Sequence: Synthetic oligonucleotide
  Sense strand starting at position 2484 of SEQ ID NO: 1880381
cacauuguucccgcgaguu

SEQ ID NO: 1962837 - RNA, 19 nt, Artificial Sequence
  Description of Artificial Sequence: Synthetic oligonucleotide
  Antisense strand to SEQ ID NO: 1962836
aacucgcgggaacaaugug

SEQ ID NO: 1962838 - RNA, 19 nt, Artificial Sequence
  Description of Artificial Sequence: Synthetic oligonucleotide
  Sense strand starting at position 2539 of SEQ ID NO: 1880381
ggcagucacccucagugaa

SEQ ID NO: 1962839 - RNA, 19 nt, Artificial Sequence
  Description of Artificial Sequence: Synthetic oligonucleotide
  Antisense strand to SEQ ID NO: 1962838
uucacugagggugacugcc

SEQ ID NO: 1962840 - RNA, 19 nt, Artificial Sequence
  Description of Artificial Sequence: Synthetic oligonucleotide
  Sense strand starting at position 2542 of SEQ ID NO: 1880381
agucacccucagugaacua

SEQ ID NO: 1962841 - RNA, 19 nt, Artificial Sequence
  Description of Artificial Sequence: Synthetic oligonucleotide
  Antisense strand to SEQ ID NO: 1962840
uaguucacugagggugacu

SEQ ID NO: 1962842 - RNA, 19 nt, Artificial Sequence
  Description of Artificial Sequence: Synthetic oligonucleotide
  Sense strand starting at position 2570 of SEQ ID NO: 1880381
cgugaccuucaggaugaau

SEQ ID NO: 1962843 - RNA, 19 nt, Artificial Sequence
  Description of Artificial Sequence: Synthetic oligonucleotide
  Antisense strand to SEQ ID NO: 1962842
auucauccugaaggucacg

SEQ ID NO: 1962844 - RNA, 19 nt, Artificial Sequence
  Description of Artificial Sequence: Synthetic oligonucleotide
  Sense strand starting at position 2579 of SEQ ID NO: 1880381
caggaugaaugcuuggauu

SEQ ID NO: 1962845 - RNA, 19 nt, Artificial Sequence
  Description of Artificial Sequence: Synthetic oligonucleotide
  Antisense strand to SEQ ID NO: 1962844
aauccaagcauucauccug

SEQ ID NO: 1962846 - RNA, 19 nt, Artificial Sequence
  Description of Artificial Sequence: Synthetic oligonucleotide
  Sense strand starting at position 2642 of SEQ ID NO: 1880381
cacugaaggucccucagaa

SEQ ID NO: 1962847 - RNA, 19 nt, Artificial Sequence
  Description of Artificial Sequence: Synthetic oligonucleotide
  Antisense strand to SEQ ID NO: 1962846
uucugagggaccuucagug

SEQ ID NO: 1962848 - RNA, 19 nt, Artificial Sequence
  Description of Artificial Sequence: Synthetic oligonucleotide
  Sense strand starting at position 2654 of SEQ ID NO: 1880381
cucagaaacucaggaaaga

SEQ ID NO: 1962849 - RNA, 19 nt, Artificial Sequence
  Description of Artificial Sequence: Synthetic oligonucleotide
  Antisense strand to SEQ ID NO: 1962848
ucuuuccugaguuucugag

SEQ ID NO: 1962850 - RNA, 19 nt, Artificial Sequence
  Description of Artificial Sequence: Synthetic oligonucleotide
  Sense strand starting at position 2664 of SEQ ID NO: 1880381
caggaaagaugaugaaaga

SEQ ID NO: 1962851 - RNA, 19 nt, Artificial Sequence
  Description of Artificial Sequence: Synthetic oligonucleotide
  Antisense strand to SEQ ID NO: 1962850
ucuuucaucaucuuuccug

SEQ ID NO: 1962852 - RNA, 19 nt, Artificial Sequence
  Description of Artificial Sequence: Synthetic oligonucleotide
  Sense strand starting at position 2728 of SEQ ID NO: 1880381
gacccuuuguagcugcaaa

SEQ ID NO: 1962853 - RNA, 19 nt, Artificial Sequence
  Description of Artificial Sequence: Synthetic oligonucleotide
  Antisense strand to SEQ ID NO: 1962852
uuugcagcuacaaaggguc

SEQ ID NO: 1962854 - RNA, 19 nt, Artificial Sequence
  Description of Artificial Sequence: Synthetic oligonucleotide
  Sense strand starting at position 2799 of SEQ ID NO: 1880381
gcuaguggugugagucaug

SEQ ID NO: 1962855 - RNA, 19 nt, Artificial Sequence
  Description of Artificial Sequence: Synthetic oligonucleotide
  Antisense strand to SEQ ID NO: 1962854
caugacucacaccacuagc

SEQ ID NO: 1962856 - RNA, 19 nt, Artificial Sequence
  Description of Artificial Sequence: Synthetic oligonucleotide
  Sense strand starting at position 2808 of SEQ ID NO: 1880381
gugagucaugggcaaguca

SEQ ID NO: 1962857 - RNA, 19 nt, Artificial Sequence
  Description of Artificial Sequence: Synthetic oligonucleotide
  Antisense strand to SEQ ID NO: 1962856
ugacuugcccaugacucac

SEQ ID NO: 1962858 - RNA, 19 nt, Artificial Sequence
  Description of Artificial Sequence: Synthetic oligonucleotide
  Sense strand starting at position 2880 of SEQ ID NO: 1880381
caggguuguagugaaugca

SEQ ID NO: 1962859 - RNA, 19 nt, Artificial Sequence
  Description of Artificial Sequence: Synthetic oligonucleotide
  Antisense strand to SEQ ID NO: 1962858
ugcauucacuacaacccug

SEQ ID NO: 1962860 - RNA, 19 nt, Artificial Sequence
  Description of Artificial Sequence: Synthetic oligonucleotide
  Sense strand starting at position 2957 of SEQ ID NO: 1880381
uugcauaaugucuggaaca

SEQ ID NO: 1962861 - RNA, 19 nt, Artificial Sequence
  Description of Artificial Sequence: Synthetic oligonucleotide
  Antisense strand to SEQ ID NO: 1962860
uguuccagacauuaugcaa

SEQ ID NO: 1962862 - RNA, 19 nt, Artificial Sequence
  Description of Artificial Sequence: Synthetic oligonucleotide
  Sense strand starting at position 2959 of SEQ ID NO: 1880381
gcauaaugucuggaacauu

SEQ ID NO: 1962863 - RNA, 19 nt, Artificial Sequence
  Description of Artificial Sequence: Synthetic oligonucleotide
  Antisense strand to SEQ ID NO: 1962862
aauguuccagacauuaugc

SEQ ID NO: 1962864 - RNA, 19 nt, Artificial Sequence
  Description of Artificial Sequence: Synthetic oligonucleotide
  Sense strand starting at position 2973 of SEQ ID NO: 1880381
acauucuggugcucagaaa

SEQ ID NO: 1962865 - RNA, 19 nt, Artificial Sequence
  Description of Artificial Sequence: Synthetic oligonucleotide
  Antisense strand to SEQ ID NO: 1962864
uuucugagcaccagaaugu

SEQ ID NO: 1962866 - RNA, 19 nt, Artificial Sequence
  Description of Artificial Sequence: Synthetic oligonucleotide
  Sense strand starting at position 2974 of SEQ ID NO: 1880381
cauucuggugcucagaaau

SEQ ID NO: 1962867 - RNA, 19 nt, Artificial Sequence
  Description of Artificial Sequence: Synthetic oligonucleotide
  Antisense strand to SEQ ID NO: 1962866
auuucugagcaccagaaug

SEQ ID NO: 1962868 - RNA, 19 nt, Artificial Sequence
  Description of Artificial Sequence: Synthetic oligonucleotide
  Sense strand starting at position 3110 of SEQ ID NO: 1880381
accguaucauagucuaaua

SEQ ID NO: 1962869 - RNA, 19 nt, Artificial Sequence
  Description of Artificial Sequence: Synthetic oligonucleotide
  Antisense strand to SEQ ID NO: 1962868
uauuagacuaugauacggu

SEQ ID NO: 1962870 - RNA, 19 nt, Artificial Sequence
  Description of Artificial Sequence: Synthetic oligonucleotide
  Sense strand starting at position 3112 of SEQ ID NO: 1880381
cguaucauagucuaauaaa

SEQ ID NO: 1962871 - RNA, 19 nt, Artificial Sequence
  Description of Artificial Sequence: Synthetic oligonucleotide
  Antisense strand to SEQ ID NO: 1962870
uuuauuagacuaugauacg

SEQ ID NO: 1962872 - RNA, 19 nt, Artificial Sequence
  Description of Artificial Sequence: Synthetic oligonucleotide
  Sense strand starting at position 3192 of SEQ ID NO: 1880381
gcggaaaugacggaucuga

SEQ ID NO: 1962873 - RNA, 19 nt, Artificial Sequence
  Description of Artificial Sequence: Synthetic oligonucleotide
  Antisense strand to SEQ ID NO: 1962872
ucagauccgucauuuccgc

SEQ ID NO: 1962874 - RNA, 19 nt, Artificial Sequence
  Description of Artificial Sequence: Synthetic oligonucleotide
  Sense strand starting at position 3284 of SEQ ID NO: 1880381
guuacuuguccaggcugaa

SEQ ID NO: 1962875 - RNA, 19 nt, Artificial Sequence
  Description of Artificial Sequence: Synthetic oligonucleotide
  Antisense strand to SEQ ID NO: 1962874
uucagccuggacaaguaac

SEQ ID NO: 1962876 - RNA, 19 nt, Artificial Sequence
  Description of Artificial Sequence: Synthetic oligonucleotide
  Sense strand starting at position 3629 of SEQ ID NO: 1880381
ccagcuccuccaggagaaa

SEQ ID NO: 1962877 - RNA, 19 nt, Artificial Sequence
  Description of Artificial Sequence: Synthetic oligonucleotide
  Antisense strand to SEQ ID NO: 1962876
uuucuccuggaggagcugg

SEQ ID NO: 1962878 - RNA, 19 nt, Artificial Sequence
  Description of Artificial Sequence: Synthetic oligonucleotide
  Sense strand starting at position 3707 of SEQ ID NO: 1880381
aagagagcuuaauaugaag

SEQ ID NO: 1962879 - RNA, 19 nt, Artificial Sequence
  Description of Artificial Sequence: Synthetic oligonucleotide
  Antisense strand to SEQ ID NO: 1962878
cuucauauuaagcucucuu

SEQ ID NO: 1962880 - RNA, 19 nt, Artificial Sequence
  Description of Artificial Sequence: Synthetic oligonucleotide
  Sense strand starting at position 3764 of SEQ ID NO: 1880381
ugaauacuccuguggcauc

SEQ ID NO: 1962881 - RNA, 19 nt, Artificial Sequence
  Description of Artificial Sequence: Synthetic oligonucleotide
  Antisense strand to SEQ ID NO: 1962880
gaugccacaggaguauuca

SEQ ID NO: 1962882 - RNA, 19 nt, Artificial Sequence
  Description of Artificial Sequence: Synthetic oligonucleotide
  Sense strand starting at position 3945 of SEQ ID NO: 1880381
agucauaaucagugccuaa

SEQ ID NO: 1962883 - RNA, 19 nt, Artificial Sequence
  Description of Artificial Sequence: Synthetic oligonucleotide
  Antisense strand to SEQ ID NO: 1962882
uuaggcacugauuaugacu

SEQ ID NO: 1962884 - RNA, 19 nt, Artificial Sequence
  Description of Artificial Sequence: Synthetic oligonucleotide
  Sense strand starting at position 15 of SEQ ID NO: 1880382
uuucgagacuuccucagaa

SEQ ID NO: 1962885 - RNA, 19 nt, Artificial Sequence
  Description of Artificial Sequence: Synthetic oligonucleotide
  Antisense strand to SEQ ID NO: 1962884
uucugaggaagucucgaaa

SEQ ID NO: 1962886 - RNA, 19 nt, Artificial Sequence
  Description of Artificial Sequence: Synthetic oligonucleotide
  Sense strand starting at position 178 of SEQ ID NO: 1880382
uagguaugguaaguggaau

SEQ ID NO: 1962887 - RNA, 19 nt, Artificial Sequence
  Description of Artificial Sequence: Synthetic oligonucleotide
  Antisense strand to SEQ ID NO: 1962886
auuccacuuaccauaccua

SEQ ID NO: 1962888 - RNA, 19 nt, Artificial Sequence
  Description of Artificial Sequence: Synthetic oligonucleotide
  Sense strand starting at position 189 of SEQ ID NO: 1880382
aguggaaucugcucagaau

SEQ ID NO: 1962889 - RNA, 19 nt, Artificial Sequence
  Description of Artificial Sequence: Synthetic oligonucleotide
  Antisense strand to SEQ ID NO: 1962888
auucugagcagauuccacu

SEQ ID NO: 1962890 - RNA, 19 nt, Artificial Sequence
  Description of Artificial Sequence: Synthetic oligonucleotide
  Sense strand starting at position 190 of SEQ ID NO: 1880382
guggaaucugcucagaauc

SEQ ID NO: 1962891 - RNA, 19 nt, Artificial Sequence
  Description of Artificial Sequence: Synthetic oligonucleotide
  Antisense strand to SEQ ID NO: 1962890
gauucugagcagauuccac

SEQ ID NO: 1962892 - RNA, 19 nt, Artificial Sequence
  Description of Artificial Sequence: Synthetic oligonucleotide
  Sense strand starting at position 209 of SEQ ID NO: 1880382
acuggaugcucuuuacuaa

SEQ ID NO: 1962893 - RNA, 19 nt, Artificial Sequence
  Description of Artificial Sequence: Synthetic oligonucleotide
  Antisense strand to SEQ ID NO: 1962892
uuaguaaagagcauccagu

SEQ ID NO: 1962894 - RNA, 19 nt, Artificial Sequence
  Description of Artificial Sequence: Synthetic oligonucleotide
  Sense strand starting at position 210 of SEQ ID NO: 1880382
cuggaugcucuuuacuaau

SEQ ID NO: 1962895 - RNA, 19 nt, Artificial Sequence
  Description of Artificial Sequence: Synthetic oligonucleotide
  Antisense strand to SEQ ID NO: 1962894
auuaguaaagagcauccag

SEQ ID NO: 1962896 - RNA, 19 nt, Artificial Sequence
  Description of Artificial Sequence: Synthetic oligonucleotide
  Sense strand starting at position 389 of SEQ ID NO: 1880382
caaguagccugauuauguu

SEQ ID NO: 1962897 - RNA, 19 nt, Artificial Sequence
  Description of Artificial Sequence: Synthetic oligonucleotide
  Antisense strand to SEQ ID NO: 1962896
aacauaaucaggcuacuug

SEQ ID NO: 1962898 - RNA, 19 nt, Artificial Sequence
  Description of Artificial Sequence: Synthetic oligonucleotide
  Sense strand starting at position 471 of SEQ ID NO: 1880382
acuccuuugguggaacauu

SEQ ID NO: 1962899 - RNA, 19 nt, Artificial Sequence
  Description of Artificial Sequence: Synthetic oligonucleotide
  Antisense strand to SEQ ID NO: 1962898
aauguuccaccaaaggagu

SEQ ID NO: 1962900 - RNA, 19 nt, Artificial Sequence
  Description of Artificial Sequence: Synthetic oligonucleotide
  Sense strand starting at position 509 of SEQ ID NO: 1880382
ccacuuugucaaggaugga

SEQ ID NO: 1962901 - RNA, 19 nt, Artificial Sequence
  Description of Artificial Sequence: Synthetic oligonucleotide
  Antisense strand to SEQ ID NO: 1962900
uccauccuugacaaagugg

SEQ ID NO: 1962902 - RNA, 19 nt, Artificial Sequence
  Description of Artificial Sequence: Synthetic oligonucleotide
  Sense strand starting at position 879 of SEQ ID NO: 1880382
ucauuaaauuagcuagaag

SEQ ID NO: 1962903 - RNA, 19 nt, Artificial Sequence
  Description of Artificial Sequence: Synthetic oligonucleotide
  Antisense strand to SEQ ID NO: 1962902
cuucuagcuaauuuaauga

SEQ ID NO: 1962904 - RNA, 19 nt, Artificial Sequence
  Description of Artificial Sequence: Synthetic oligonucleotide
  Sense strand starting at position 888 of SEQ ID NO: 1880382
uagcuagaagcccgagaau

SEQ ID NO: 1962905 - RNA, 19 nt, Artificial Sequence
  Description of Artificial Sequence: Synthetic oligonucleotide
  Antisense strand to SEQ ID NO: 1962904
auucucgggcuucuagcua

SEQ ID NO: 1962906 - RNA, 19 nt, Artificial Sequence
  Description of Artificial Sequence: Synthetic oligonucleotide
  Sense strand starting at position 897 of SEQ ID NO: 1880382
gcccgagaauuugcuaugu

SEQ ID NO: 1962907 - RNA, 19 nt, Artificial Sequence
  Description of Artificial Sequence: Synthetic oligonucleotide
  Antisense strand to SEQ ID NO: 1962906
acauagcaaauucucgggc

SEQ ID NO: 1962908 - RNA, 19 nt, Artificial Sequence
  Description of Artificial Sequence: Synthetic oligonucleotide
  Sense strand starting at position 924 of SEQ ID NO: 1880382
agucauguaagucauguga

SEQ ID NO: 1962909 - RNA, 19 nt, Artificial Sequence
  Description of Artificial Sequence: Synthetic oligonucleotide
  Antisense strand to SEQ ID NO: 1962908
ucacaugacuuacaugacu

SEQ ID NO: 1962910 - RNA, 19 nt, Artificial Sequence
  Description of Artificial Sequence: Synthetic oligonucleotide
  Sense strand starting at position 1349 of SEQ ID NO: 1880382
ugagcuaugcccuaacaua

SEQ ID NO: 1962911 - RNA, 19 nt, Artificial Sequence
  Description of Artificial Sequence: Synthetic oligonucleotide
  Antisense strand to SEQ ID NO: 1962910
uauguuagggcauagcuca

SEQ ID NO: 1962912 - RNA, 19 nt, Artificial Sequence
  Description of Artificial Sequence: Synthetic oligonucleotide
  Sense strand starting at position 1429 of SEQ ID NO: 1880382
uucccuauaucaucgauga

SEQ ID NO: 1962913 - RNA, 19 nt, Artificial Sequence
  Description of Artificial Sequence: Synthetic oligonucleotide
  Antisense strand to SEQ ID NO: 1962912
ucaucgaugauauagggaa

SEQ ID NO: 1962914 - RNA, 19 nt, Artificial Sequence
  Description of Artificial Sequence: Synthetic oligonucleotide
  Sense strand starting at position 1430 of SEQ ID NO: 1880382
ucccuauaucaucgaugaa

SEQ ID NO: 1962915 - RNA, 19 nt, Artificial Sequence
  Description of Artificial Sequence: Synthetic oligonucleotide
  Antisense strand to SEQ ID NO: 1962914
uucaucgaugauauaggga

SEQ ID NO: 1962916 - RNA, 19 nt, Artificial Sequence
  Description of Artificial Sequence: Synthetic oligonucleotide
  Sense strand starting at position 1433 of SEQ ID NO: 1880382
cuauaucaucgaugaagga

SEQ ID NO: 1962917 - RNA, 19 nt, Artificial Sequence
  Description of Artificial Sequence: Synthetic oligonucleotide
  Antisense strand to SEQ ID NO: 1962916
uccuucaucgaugauauag

SEQ ID NO: 1962918 - RNA, 19 nt, Artificial Sequence
  Description of Artificial Sequence: Synthetic oligonucleotide
  Sense strand starting at position 1476 of SEQ ID NO: 1880382
cuuauaugguaagcuugau

SEQ ID NO: 1962919 - RNA, 19 nt, Artificial Sequence
  Description of Artificial Sequence: Synthetic oligonucleotide
  Antisense strand to SEQ ID NO: 1962918
aucaagcuuaccauauaag

SEQ ID NO: 1962920 - RNA, 19 nt, Artificial Sequence
  Description of Artificial Sequence: Synthetic oligonucleotide
  Sense strand starting at position 1480 of SEQ ID NO: 1880382
uaugguaagcuugaucaau

SEQ ID NO: 1962921 - RNA, 19 nt, Artificial Sequence
  Description of Artificial Sequence: Synthetic oligonucleotide
  Antisense strand to SEQ ID NO: 1962920
auugaucaagcuuaccaua

SEQ ID NO: 1962922 - RNA, 19 nt, Artificial Sequence
  Description of Artificial Sequence: Synthetic oligonucleotide
  Sense strand starting at position 1482 of SEQ ID NO: 1880382
ugguaagcuugaucaaugu

SEQ ID NO: 1962923 - RNA, 19 nt, Artificial Sequence
  Description of Artificial Sequence: Synthetic oligonucleotide
  Antisense strand to SEQ ID NO: 1962922
acauugaucaagcuuacca

SEQ ID NO: 1962924 - RNA, 19 nt, Artificial Sequence
  Description of Artificial Sequence: Synthetic oligonucleotide
  Sense strand starting at position 1512 of SEQ ID NO: 1880382
uaucuaugcugggcugaga

SEQ ID NO: 1962925 - RNA, 19 nt, Artificial Sequence
  Description of Artificial Sequence: Synthetic oligonucleotide
  Antisense strand to SEQ ID NO: 1962924
ucucagcccagcauagaua

SEQ ID NO: 1962926 - RNA, 19 nt, Artificial Sequence
  Description of Artificial Sequence: Synthetic oligonucleotide
  Sense strand starting at position 1649 of SEQ ID NO: 1880382
ucauuaguucgcuagauca

SEQ ID NO: 1962927 - RNA, 19 nt, Artificial Sequence
  Description of Artificial Sequence: Synthetic oligonucleotide
  Antisense strand to SEQ ID NO: 1962926
ugaucuagcgaacuaauga

SEQ ID NO: 1962928 - RNA, 19 nt, Artificial Sequence
  Description of Artificial Sequence: Synthetic oligonucleotide
  Sense strand starting at position 1651 of SEQ ID NO: 1880382
auuaguucgcuagaucaga

SEQ ID NO: 1962929 - RNA, 19 nt, Artificial Sequence
  Description of Artificial Sequence: Synthetic oligonucleotide
  Antisense strand to SEQ ID NO: 1962928
ucugaucuagcgaacuaau

SEQ ID NO: 1962930 - RNA, 19 nt, Artificial Sequence
  Description of Artificial Sequence: Synthetic oligonucleotide
  Sense strand starting at position 1659 of SEQ ID NO: 1880382
gcuagaucagaucggagaa

SEQ ID NO: 1962931 - RNA, 19 nt, Artificial Sequence
  Description of Artificial Sequence: Synthetic oligonucleotide
  Antisense strand to SEQ ID NO: 1962930
uucuccgaucugaucuagc

SEQ ID NO: 1962932 - RNA, 19 nt, Artificial Sequence
  Description of Artificial Sequence: Synthetic oligonucleotide
  Sense strand starting at position 2368 of SEQ ID NO: 1880382
ucaaguuugugccuacaaa

SEQ ID NO: 1962933 - RNA, 19 nt, Artificial Sequence
  Description of Artificial Sequence: Synthetic oligonucleotide
  Antisense strand to SEQ ID NO: 1962932
uuuguaggcacaaacuuga

SEQ ID NO: 1962934 - RNA, 19 nt, Artificial Sequence
  Description of Artificial Sequence: Synthetic oligonucleotide
  Sense strand starting at position 2369 of SEQ ID NO: 1880382
caaguuugugccuacaaag

SEQ ID NO: 1962935 - RNA, 19 nt, Artificial Sequence
  Description of Artificial Sequence: Synthetic oligonucleotide
  Antisense strand to SEQ ID NO: 1962934
cuuuguaggcacaaacuug

SEQ ID NO: 1962936 - RNA, 19 nt, Artificial Sequence
  Description of Artificial Sequence: Synthetic oligonucleotide
  Sense strand starting at position 2467 of SEQ ID NO: 1880382
agguguccgcaauaggaaa

SEQ ID NO: 1962937 - RNA, 19 nt, Artificial Sequence
  Description of Artificial Sequence: Synthetic oligonucleotide
  Antisense strand to SEQ ID NO: 1962936
uuuccuauugcggacaccu

SEQ ID NO: 1962938 - RNA, 19 nt, Artificial Sequence
  Description of Artificial Sequence: Synthetic oligonucleotide
  Sense strand starting at position 2587 of SEQ ID NO: 1880382
ggagcagaguucuccucuu

SEQ ID NO: 1962939 - RNA, 19 nt, Artificial Sequence
  Description of Artificial Sequence: Synthetic oligonucleotide
  Antisense strand to SEQ ID NO: 1962938
aagaggagaacucugcucc

SEQ ID NO: 1962940 - RNA, 19 nt, Artificial Sequence
  Description of Artificial Sequence: Synthetic oligonucleotide
  Sense strand starting at position 2630 of SEQ ID NO: 1880382
ugaccuggauggcuugaaa

SEQ ID NO: 1962941 - RNA, 19 nt, Artificial Sequence
  Description of Artificial Sequence: Synthetic oligonucleotide
  Antisense strand to SEQ ID NO: 1962940
uuucaagccauccagguca

SEQ ID NO: 1962942 - RNA, 19 nt, Artificial Sequence
  Description of Artificial Sequence: Synthetic oligonucleotide
  Sense strand starting at position 3132 of SEQ ID NO: 1880382
acguguaaugucugauuuc

SEQ ID NO: 1962943 - RNA, 19 nt, Artificial Sequence
  Description of Artificial Sequence: Synthetic oligonucleotide
  Antisense strand to SEQ ID NO: 1962942
gaaaucagacauuacacgu

SEQ ID NO: 1962944 - RNA, 19 nt, Artificial Sequence
  Description of Artificial Sequence: Synthetic oligonucleotide
  Sense strand starting at position 3139 of SEQ ID NO: 1880382
augucugauuuccugcuua

SEQ ID NO: 1962945 - RNA, 19 nt, Artificial Sequence
  Description of Artificial Sequence: Synthetic oligonucleotide
  Antisense strand to SEQ ID NO: 1962944
uaagcaggaaaucagacau

SEQ ID NO: 1962946 - RNA, 19 nt, Artificial Sequence
  Description of Artificial Sequence: Synthetic oligonucleotide
  Sense strand starting at position 3165 of SEQ ID NO: 1880382
ucacuuuaagguugcauca

SEQ ID NO: 1962947 - RNA, 19 nt, Artificial Sequence
  Description of Artificial Sequence: Synthetic oligonucleotide
  Antisense strand to SEQ ID NO: 1962946
ugaugcaaccuuaaaguga

SEQ ID NO: 1962948 - RNA, 19 nt, Artificial Sequence
  Description of Artificial Sequence: Synthetic oligonucleotide
  Sense strand starting at position 3208 of SEQ ID NO: 1880382
uguaccacccucugacaua

SEQ ID NO: 1962949 - RNA, 19 nt, Artificial Sequence
  Description of Artificial Sequence: Synthetic oligonucleotide
  Antisense strand to SEQ ID NO: 1962948
uaugucagagggugguaca

SEQ ID NO: 1962950 - RNA, 19 nt, Artificial Sequence
  Description of Artificial Sequence: Synthetic oligonucleotide
  Sense strand starting at position 3219 of SEQ ID NO: 1880382
cugacauagcuuuacagua

SEQ ID NO: 1962951 - RNA, 19 nt, Artificial Sequence
  Description of Artificial Sequence: Synthetic oligonucleotide
  Antisense strand to SEQ ID NO: 1962950
uacuguaaagcuaugucag

SEQ ID NO: 1962952 - RNA, 19 nt, Artificial Sequence
  Description of Artificial Sequence: Synthetic oligonucleotide
  Sense strand starting at position 3224 of SEQ ID NO: 1880382
auagcuuuacaguagaaug

SEQ ID NO: 1962953 - RNA, 19 nt, Artificial Sequence
  Description of Artificial Sequence: Synthetic oligonucleotide
  Antisense strand to SEQ ID NO: 1962952
cauucuacuguaaagcuau

SEQ ID NO: 1962954 - RNA, 19 nt, Artificial Sequence
  Description of Artificial Sequence: Synthetic oligonucleotide
  Sense strand starting at position 3357 of SEQ ID NO: 1880382
aggaaauucugccuuacau

SEQ ID NO: 1962955 - RNA, 19 nt, Artificial Sequence
  Description of Artificial Sequence: Synthetic oligonucleotide
  Antisense strand to SEQ ID NO: 1962954
auguaaggcagaauuuccu

SEQ ID NO: 1962956 - RNA, 19 nt, Artificial Sequence
  Description of Artificial Sequence: Synthetic oligonucleotide
  Sense strand starting at position 3367 of SEQ ID NO: 1880382
gccuuacauugagcuaaca

SEQ ID NO: 1962957 - RNA, 19 nt, Artificial Sequence
  Description of Artificial Sequence: Synthetic oligonucleotide
  Antisense strand to SEQ ID NO: 1962956
uguuagcucaauguaaggc

SEQ ID NO: 1962958 - RNA, 19 nt, Artificial Sequence
  Description of Artificial Sequence: Synthetic oligonucleotide
  Sense strand starting at position 3527 of SEQ ID NO: 1880382
augauauaguuucucucca

SEQ ID NO: 1962959 - RNA, 19 nt, Artificial Sequence
  Description of Artificial Sequence: Synthetic oligonucleotide
  Antisense strand to SEQ ID NO: 1962958
uggagagaaacuauaucau

SEQ ID NO: 1962960 - RNA, 19 nt, Artificial Sequence
  Description of Artificial Sequence: Synthetic oligonucleotide
  Sense strand starting at position 3528 of SEQ ID NO: 1880382
ugauauaguuucucuccau

SEQ ID NO: 1962961 - RNA, 19 nt, Artificial Sequence
  Description of Artificial Sequence: Synthetic oligonucleotide
  Antisense strand to SEQ ID NO: 1962960
auggagagaaacuauauca

SEQ ID NO: 1962962 - RNA, 19 nt, Artificial Sequence
  Description of Artificial Sequence: Synthetic oligonucleotide
  Sense strand starting at position 3847 of SEQ ID NO: 1880382
cuuggugaaugguucaaag

SEQ ID NO: 1962963 - RNA, 19 nt, Artificial Sequence
  Description of Artificial Sequence: Synthetic oligonucleotide
  Antisense strand to SEQ ID NO: 1962962
cuuugaaccauucaccaag

SEQ ID NO: 1962964 - RNA, 19 nt, Artificial Sequence
  Description of Artificial Sequence: Synthetic oligonucleotide
  Sense strand starting at position 445 of SEQ ID NO: 1880383
gucaguccucucugauuug

SEQ ID NO: 1962965 - RNA, 19 nt, Artificial Sequence
  Description of Artificial Sequence: Synthetic oligonucleotide
  Antisense strand to SEQ ID NO: 1962964
caaaucagagaggacugac

SEQ ID NO: 1962966 - RNA, 19 nt, Artificial Sequence
  Description of Artificial Sequence: Synthetic oligonucleotide
  Sense strand starting at position 527 of SEQ ID NO: 1880383
gguuacaucuacucagaua

SEQ ID NO: 1962967 - RNA, 19 nt, Artificial Sequence
  Description of Artificial Sequence: Synthetic oligonucleotide
  Antisense strand to SEQ ID NO: 1962966
uaucugaguagauguaacc

SEQ ID NO: 1962968 - RNA, 19 nt, Artificial Sequence
  Description of Artificial Sequence: Synthetic oligonucleotide
  Sense strand starting at position 573 of SEQ ID NO: 1880383
cuacuauaguaugccagaa

SEQ ID NO: 1962969 - RNA, 19 nt, Artificial Sequence
  Description of Artificial Sequence: Synthetic oligonucleotide
  Antisense strand to SEQ ID NO: 1962968
uucuggcauacuauaguag

SEQ ID NO: 1962970 - RNA, 19 nt, Artificial Sequence
  Description of Artificial Sequence: Synthetic oligonucleotide
  Sense strand starting at position 602 of SEQ ID NO: 1880383
ugaagaugagcuggaguua

SEQ ID NO: 1962971 - RNA, 19 nt, Artificial Sequence
  Description of Artificial Sequence: Synthetic oligonucleotide
  Antisense strand to SEQ ID NO: 1962970
uaacuccagcucaucuuca

SEQ ID NO: 1962972 - RNA, 19 nt, Artificial Sequence
  Description of Artificial Sequence: Synthetic oligonucleotide
  Sense strand starting at position 611 of SEQ ID NO: 1880383
gcuggaguuagacagacuu

SEQ ID NO: 1962973 - RNA, 19 nt, Artificial Sequence
  Description of Artificial Sequence: Synthetic oligonucleotide
  Antisense strand to SEQ ID NO: 1962972
aagucugucuaacuccagc

SEQ ID NO: 1962974 - RNA, 19 nt, Artificial Sequence
  Description of Artificial Sequence: Synthetic oligonucleotide
  Sense strand starting at position 823 of SEQ ID NO: 1880383
gggauaaccacuugagccu

SEQ ID NO: 1962975 - RNA, 19 nt, Artificial Sequence
  Description of Artificial Sequence: Synthetic oligonucleotide
  Antisense strand to SEQ ID NO: 1962974
aggcucaagugguuauccc

SEQ ID NO: 1962976 - RNA, 19 nt, Artificial Sequence
  Description of Artificial Sequence: Synthetic oligonucleotide
  Sense strand starting at position 857 of SEQ ID NO: 1880383
cagugaaccgucgaucaug

SEQ ID NO: 1962977 - RNA, 19 nt, Artificial Sequence
  Description of Artificial Sequence: Synthetic oligonucleotide
  Antisense strand to SEQ ID NO: 1962976
caugaucgacgguucacug

SEQ ID NO: 1962978 - RNA, 19 nt, Artificial Sequence
  Description of Artificial Sequence: Synthetic oligonucleotide
  Sense strand starting at position 929 of SEQ ID NO: 1880383
gacagacuuugggaaggaa

SEQ ID NO: 1962979 - RNA, 19 nt, Artificial Sequence
  Description of Artificial Sequence: Synthetic oligonucleotide
  Antisense strand to SEQ ID NO: 1962978
uuccuucccaaagucuguc

SEQ ID NO: 1962980 - RNA, 19 nt, Artificial Sequence
  Description of Artificial Sequence: Synthetic oligonucleotide
  Sense strand starting at position 1424 of SEQ ID NO: 1880383
cuuggauugggcugagaca

SEQ ID NO: 1962981 - RNA, 19 nt, Artificial Sequence
  Description of Artificial Sequence: Synthetic oligonucleotide
  Antisense strand to SEQ ID NO: 1962980
ugucucagcccaauccaag

SEQ ID NO: 1962982 - RNA, 19 nt, Artificial Sequence
  Description of Artificial Sequence: Synthetic oligonucleotide
  Sense strand starting at position 1528 of SEQ ID NO: 1880383
gcccacuuugucuauggga

SEQ ID NO: 1962983 - RNA, 19 nt, Artificial Sequence
  Description of Artificial Sequence: Synthetic oligonucleotide
  Antisense strand to SEQ ID NO: 1962982
ucccauagacaaagugggc

SEQ ID NO: 1962984 - RNA, 19 nt, Artificial Sequence
  Description of Artificial Sequence: Synthetic oligonucleotide
  Sense strand starting at position 1530 of SEQ ID NO: 1880383
ccacuuugucuaugggauu

SEQ ID NO: 1962985 - RNA, 19 nt, Artificial Sequence
  Description of Artificial Sequence: Synthetic oligonucleotide
  Antisense strand to SEQ ID NO: 1962984
aaucccauagacaaagugg

SEQ ID NO: 1962986 - RNA, 19 nt, Artificial Sequence
  Description of Artificial Sequence: Synthetic oligonucleotide
  Sense strand starting at position 1644 of SEQ ID NO: 1880383
gugggauggcccuaggacu

SEQ ID NO: 1962987 - RNA, 19 nt, Artificial Sequence
  Description of Artificial Sequence: Synthetic oligonucleotide
  Antisense strand to SEQ ID NO: 1962986
aguccuagggccaucccac

SEQ ID NO: 1962988 - RNA, 19 nt, Artificial Sequence
  Description of Artificial Sequence: Synthetic oligonucleotide
  Sense strand starting at position 1674 of SEQ ID NO: 1880383
caaagaggcccugggaauu

SEQ ID NO: 1962989 - RNA, 19 nt, Artificial Sequence
  Description of Artificial Sequence: Synthetic oligonucleotide
  Antisense strand to SEQ ID NO: 1962988
aauucccagggccucuuug

SEQ ID NO: 1962990 - RNA, 19 nt, Artificial Sequence
  Description of Artificial Sequence: Synthetic oligonucleotide
  Sense strand starting at position 1718 of SEQ ID NO: 1880383
gaguguaguggauggaguu

SEQ ID NO: 1962991 - RNA, 19 nt, Artificial Sequence
  Description of Artificial Sequence: Synthetic oligonucleotide
  Antisense strand to SEQ ID NO: 1962990
aacuccauccacuacacuc

SEQ ID NO: 1962992 - RNA, 19 nt, Artificial Sequence
  Description of Artificial Sequence: Synthetic oligonucleotide
  Sense strand starting at position 1719 of SEQ ID NO: 1880383
aguguaguggauggaguuu

SEQ ID NO: 1962993 - RNA, 19 nt, Artificial Sequence
  Description of Artificial Sequence: Synthetic oligonucleotide
  Antisense strand to SEQ ID NO: 1962992
aaacuccauccacuacacu

SEQ ID NO: 1962994 - RNA, 19 nt, Artificial Sequence
  Description of Artificial Sequence: Synthetic oligonucleotide
  Sense strand starting at position 2005 of SEQ ID NO: 1880383
cugucugucucccuggaaa

SEQ ID NO: 1962995 - RNA, 19 nt, Artificial Sequence
  Description of Artificial Sequence: Synthetic oligonucleotide
  Antisense strand to SEQ ID NO: 1962994
uuuccagggagacagacag

SEQ ID NO: 1962996 - RNA, 19 nt, Artificial Sequence
  Description of Artificial Sequence: Synthetic oligonucleotide
  Sense strand starting at position 2007 of SEQ ID NO: 1880383
gucugucucccuggaaacu

SEQ ID NO: 1962997 - RNA, 19 nt, Artificial Sequence
  Description of Artificial Sequence: Synthetic oligonucleotide
  Antisense strand to SEQ ID NO: 1962996
aguuuccagggagacagac

SEQ ID NO: 1962998 - RNA, 19 nt, Artificial Sequence
  Description of Artificial Sequence: Synthetic oligonucleotide
  Sense strand starting at position 2079 of SEQ ID NO: 1880383
ugcauugugacucagguuu

SEQ ID NO: 1962999 - RNA, 19 nt, Artificial Sequence
  Description of Artificial Sequence: Synthetic oligonucleotide
  Antisense strand to SEQ ID NO: 1962998
aaaccugagucacaaugca

SEQ ID NO: 1963000 - RNA, 19 nt, Artificial Sequence
  Description of Artificial Sequence: Synthetic oligonucleotide
  Sense strand starting at position 2087 of SEQ ID NO: 1880383
gacucagguuuguucuuga

SEQ ID NO: 1963001 - RNA, 19 nt, Artificial Sequence
  Description of Artificial Sequence: Synthetic oligonucleotide
  Antisense strand to SEQ ID NO: 1963000
ucaagaacaaaccugaguc

SEQ ID NO: 1963002 - RNA, 19 nt, Artificial Sequence
  Description of Artificial Sequence: Synthetic oligonucleotide
  Sense strand starting at position 2217 of SEQ ID NO: 1880383
guaacuggcuguguaaaga

SEQ ID NO: 1963003 - RNA, 19 nt, Artificial Sequence
  Description of Artificial Sequence: Synthetic oligonucleotide
  Antisense strand to SEQ ID NO: 1963002
ucuuuacacagccaguuac

SEQ ID NO: 1963004 - RNA, 19 nt, Artificial Sequence
  Description of Artificial Sequence: Synthetic oligonucleotide
  Sense strand starting at position 2242 of SEQ ID NO: 1880383
gagggcuugggcugauaga

SEQ ID NO: 1963005 - RNA, 19 nt, Artificial Sequence
  Description of Artificial Sequence: Synthetic oligonucleotide
  Antisense strand to SEQ ID NO: 1963004
ucuaucagcccaagcccuc

SEQ ID NO: 1963006 - RNA, 19 nt, Artificial Sequence
  Description of Artificial Sequence: Synthetic oligonucleotide
  Sense strand starting at position 2243 of SEQ ID NO: 1880383
agggcuugggcugauagau

SEQ ID NO: 1963007 - RNA, 19 nt, Artificial Sequence
  Description of Artificial Sequence: Synthetic oligonucleotide
  Antisense strand to SEQ ID NO: 1963006
aucuaucagcccaagcccu

SEQ ID NO: 1963008 - RNA, 19 nt, Artificial Sequence
  Description of Artificial Sequence: Synthetic oligonucleotide
  Sense strand starting at position 2522 of SEQ ID NO: 1880383
guggguugaggagguaaua

SEQ ID NO: 1963009 - RNA, 19 nt, Artificial Sequence
  Description of Artificial Sequence: Synthetic oligonucleotide
  Antisense strand to SEQ ID NO: 1963008
uauuaccuccucaacccac

SEQ ID NO: 1963010 - RNA, 19 nt, Artificial Sequence
  Description of Artificial Sequence: Synthetic oligonucleotide
  Sense strand starting at position 2970 of SEQ ID NO: 1880383
ucccuuuauuuggauagga

SEQ ID NO: 1963011 - RNA, 19 nt, Artificial Sequence
  Description of Artificial Sequence: Synthetic oligonucleotide
  Antisense strand to SEQ ID NO: 1963010
uccuauccaaauaaaggga

SEQ ID NO: 1963012 - RNA, 19 nt, Artificial Sequence
  Description of Artificial Sequence: Synthetic oligonucleotide
  Sense strand starting at position 2975 of SEQ ID NO: 1880383
uuauuuggauaggagacau

SEQ ID NO: 1963013 - RNA, 19 nt, Artificial Sequence
  Description of Artificial Sequence: Synthetic oligonucleotide
  Antisense strand to SEQ ID NO: 1963012
augucuccuauccaaauaa

SEQ ID NO: 1963014 - RNA, 19 nt, Artificial Sequence
  Description of Artificial Sequence: Synthetic oligonucleotide
  Sense strand starting at position 3011 of SEQ ID NO: 1880383
gcaauaugggagugaccua

SEQ ID NO: 1963015 - RNA, 19 nt, Artificial Sequence
  Description of Artificial Sequence: Synthetic oligonucleotide
  Antisense strand to SEQ ID NO: 1963014
uaggucacucccauauugc

SEQ ID NO: 1963016 - RNA, 19 nt, Artificial Sequence
  Description of Artificial Sequence: Synthetic oligonucleotide
  Sense strand starting at position 3118 of SEQ ID NO: 1880383
agaguagagugaagggauu

SEQ ID NO: 1963017 - RNA, 19 nt, Artificial Sequence
  Description of Artificial Sequence: Synthetic oligonucleotide
  Antisense strand to SEQ ID NO: 1963016
aaucccuucacucuacucu

SEQ ID NO: 1963018 - RNA, 19 nt, Artificial Sequence
  Description of Artificial Sequence: Synthetic oligonucleotide
  Sense strand starting at position 3124 of SEQ ID NO: 1880383
gagugaagggauugcucuu

SEQ ID NO: 1963019 - RNA, 19 nt, Artificial Sequence
  Description of Artificial Sequence: Synthetic oligonucleotide
  Antisense strand to SEQ ID NO: 1963018
aagagcaaucccuucacuc

SEQ ID NO: 1963020 - RNA, 19 nt, Artificial Sequence
  Description of Artificial Sequence: Synthetic oligonucleotide
  Sense strand starting at position 3130 of SEQ ID NO: 1880383
agggauugcucuucugaua

SEQ ID NO: 1963021 - RNA, 19 nt, Artificial Sequence
  Description of Artificial Sequence: Synthetic oligonucleotide
  Antisense strand to SEQ ID NO: 1963020
uaucagaagagcaaucccu

SEQ ID NO: 1963022 - RNA, 19 nt, Artificial Sequence
  Description of Artificial Sequence: Synthetic oligonucleotide
  Sense strand starting at position 3137 of SEQ ID NO: 1880383
gcucuucugauaggaggaa

SEQ ID NO: 1963023 - RNA, 19 nt, Artificial Sequence
  Description of Artificial Sequence: Synthetic oligonucleotide
  Antisense strand to SEQ ID NO: 1963022
uuccuccuaucagaagagc

SEQ ID NO: 1963024 - RNA, 19 nt, Artificial Sequence
  Description of Artificial Sequence: Synthetic oligonucleotide
  Sense strand starting at position 3210 of SEQ ID NO: 1880383
ucauaaauuuggugaugaa

SEQ ID NO: 1963025 - RNA, 19 nt, Artificial Sequence
  Description of Artificial Sequence: Synthetic oligonucleotide
  Antisense strand to SEQ ID NO: 1963024
uucaucaccaaauuuauga

SEQ ID NO: 1963026 - RNA, 19 nt, Artificial Sequence
  Description of Artificial Sequence: Synthetic oligonucleotide
  Sense strand starting at position 3491 of SEQ ID NO: 1880383
ccugcugaguccuugggau

SEQ ID NO: 1963027 - RNA, 19 nt, Artificial Sequence
  Description of Artificial Sequence: Synthetic oligonucleotide
  Antisense strand to SEQ ID NO: 1963026
aucccaaggacucagcagg

SEQ ID NO: 1963028 - RNA, 19 nt, Artificial Sequence
  Description of Artificial Sequence: Synthetic oligonucleotide
  Sense strand starting at position 3550 of SEQ ID NO: 1880383
ugaagccugccauauauaa

SEQ ID NO: 1963029 - RNA, 19 nt, Artificial Sequence
  Description of Artificial Sequence: Synthetic oligonucleotide
  Antisense strand to SEQ ID NO: 1963028
uuauauauggcaggcuuca

SEQ ID NO: 1963030 - RNA, 19 nt, Artificial Sequence
  Description of Artificial Sequence: Synthetic oligonucleotide
  Sense strand starting at position 3559 of SEQ ID NO: 1880383
ccauauauaaggugaguga

SEQ ID NO: 1963031 - RNA, 19 nt, Artificial Sequence
  Description of Artificial Sequence: Synthetic oligonucleotide
  Antisense strand to SEQ ID NO: 1963030
ucacucaccuuauauaugg

SEQ ID NO: 1963032 - RNA, 19 nt, Artificial Sequence
  Description of Artificial Sequence: Synthetic oligonucleotide
  Sense strand starting at position 3597 of SEQ ID NO: 1880383
gaggcuccaucuucuuaga

SEQ ID NO: 1963033 - RNA, 19 nt, Artificial Sequence
  Description of Artificial Sequence: Synthetic oligonucleotide
  Antisense strand to SEQ ID NO: 1963032
ucuaagaagauggagccuc

SEQ ID NO: 1963034 - RNA, 19 nt, Artificial Sequence
  Description of Artificial Sequence: Synthetic oligonucleotide
  Sense strand starting at position 3667 of SEQ ID NO: 1880383
ccucauccugcuggauuaa

SEQ ID NO: 1963035 - RNA, 19 nt, Artificial Sequence
  Description of Artificial Sequence: Synthetic oligonucleotide
  Antisense strand to SEQ ID NO: 1963034
uuaauccagcaggaugagg

SEQ ID NO: 1963036 - RNA, 19 nt, Artificial Sequence
  Description of Artificial Sequence: Synthetic oligonucleotide
  Sense strand starting at position 3692 of SEQ ID NO: 1880383
auuugagcuuucguuccaa

SEQ ID NO: 1963037 - RNA, 19 nt, Artificial Sequence
  Description of Artificial Sequence: Synthetic oligonucleotide
  Antisense strand to SEQ ID NO: 1963036
uuggaacgaaagcucaaau

SEQ ID NO: 1963038 - RNA, 19 nt, Artificial Sequence
  Description of Artificial Sequence: Synthetic oligonucleotide
  Sense strand starting at position 3700 of SEQ ID NO: 1880383
uuucguuccaaacagugua

SEQ ID NO: 1963039 - RNA, 19 nt, Artificial Sequence
  Description of Artificial Sequence: Synthetic oligonucleotide
  Antisense strand to SEQ ID NO: 1963038
uacacuguuuggaacgaaa

SEQ ID NO: 1963040 - RNA, 19 nt, Artificial Sequence
  Description of Artificial Sequence: Synthetic oligonucleotide
  Sense strand starting at position 3867 of SEQ ID NO: 1880383
cuagcugcuggauauuaua

SEQ ID NO: 1963041 - RNA, 19 nt, Artificial Sequence
  Description of Artificial Sequence: Synthetic oligonucleotide
  Antisense strand to SEQ ID NO: 1963040
uauaauauccagcagcuag

SEQ ID NO: 1963042 - RNA, 19 nt, Artificial Sequence
  Description of Artificial Sequence: Synthetic oligonucleotide
  Sense strand starting at position 3913 of SEQ ID NO: 1880383
aggaacuauugcucuuuaa

SEQ ID NO: 1963043 - RNA, 19 nt, Artificial Sequence
  Description of Artificial Sequence: Synthetic oligonucleotide
  Antisense strand to SEQ ID NO: 1963042
uuaaagagcaauaguuccu

SEQ ID NO: 1963044 - RNA, 19 nt, Artificial Sequence
  Description of Artificial Sequence: Synthetic oligonucleotide
  Sense strand starting at position 236 of SEQ ID NO: 1880384
aagggcaaaugugugaaau

SEQ ID NO: 1963045 - RNA, 19 nt, Artificial Sequence
  Description of Artificial Sequence: Synthetic oligonucleotide
  Antisense strand to SEQ ID NO: 1963044
auuucacacauuugcccuu

SEQ ID NO: 1963046 - RNA, 19 nt, Artificial Sequence
  Description of Artificial Sequence: Synthetic oligonucleotide
  Sense strand starting at position 237 of SEQ ID NO: 1880384
agggcaaaugugugaaaua

SEQ ID NO: 1963047 - RNA, 19 nt, Artificial Sequence
  Description of Artificial Sequence: Synthetic oligonucleotide
  Antisense strand to SEQ ID NO: 1963046
uauuucacacauuugcccu

SEQ ID NO: 1963048 - RNA, 19 nt, Artificial Sequence
  Description of Artificial Sequence: Synthetic oligonucleotide
  Sense strand starting at position 483 of SEQ ID NO: 1880384
gccgaagucaaggaauuga

SEQ ID NO: 1963049 - RNA, 19 nt, Artificial Sequence
  Description of Artificial Sequence: Synthetic oligonucleotide
  Antisense strand to SEQ ID NO: 1963048
ucaauuccuugacuucggc

SEQ ID NO: 1963050 - RNA, 19 nt, Artificial Sequence
  Description of Artificial Sequence: Synthetic oligonucleotide
  Sense strand starting at position 647 of SEQ ID NO: 1880384
uuuguaauuuccucgguca

SEQ ID NO: 1963051 - RNA, 19 nt, Artificial Sequence
  Description of Artificial Sequence: Synthetic oligonucleotide
  Antisense strand to SEQ ID NO: 1963050
ugaccgaggaaauuacaaa

SEQ ID NO: 1963052 - RNA, 19 nt, Artificial Sequence
  Description of Artificial Sequence: Synthetic oligonucleotide
  Sense strand starting at position 648 of SEQ ID NO: 1880384
uuguaauuuccucggucau

SEQ ID NO: 1963053 - RNA, 19 nt, Artificial Sequence
  Description of Artificial Sequence: Synthetic oligonucleotide
  Antisense strand to SEQ ID NO: 1963052
augaccgaggaaauuacaa

SEQ ID NO: 1963054 - RNA, 19 nt, Artificial Sequence
  Description of Artificial Sequence: Synthetic oligonucleotide
  Sense strand starting at position 649 of SEQ ID NO: 1880384
uguaauuuccucggucaua

SEQ ID NO: 1963055 - RNA, 19 nt, Artificial Sequence
  Description of Artificial Sequence: Synthetic oligonucleotide
  Antisense strand to SEQ ID NO: 1963054
uaugaccgaggaaauuaca

SEQ ID NO: 1963056 - RNA, 19 nt, Artificial Sequence
  Description of Artificial Sequence: Synthetic oligonucleotide
  Sense strand starting at position 650 of SEQ ID NO: 1880384
guaauuuccucggucauau

SEQ ID NO: 1963057 - RNA, 19 nt, Artificial Sequence
  Description of Artificial Sequence: Synthetic oligonucleotide
  Antisense strand to SEQ ID NO: 1963056
auaugaccgaggaaauuac

SEQ ID NO: 1963058 - RNA, 19 nt, Artificial Sequence
  Description of Artificial Sequence: Synthetic oligonucleotide
  Sense strand starting at position 675 of SEQ ID NO: 1880384
gcacucuaugcuuaguuua

SEQ ID NO: 1963059 - RNA, 19 nt, Artificial Sequence
  Description of Artificial Sequence: Synthetic oligonucleotide
  Antisense strand to SEQ ID NO: 1963058
uaaacuaagcauagagugc

SEQ ID NO: 1963060 - RNA, 19 nt, Artificial Sequence
  Description of Artificial Sequence: Synthetic oligonucleotide
  Sense strand starting at position 700 of SEQ ID NO: 1880384
ugccaagaagacugaucuu

SEQ ID NO: 1963061 - RNA, 19 nt, Artificial Sequence
  Description of Artificial Sequence: Synthetic oligonucleotide
  Antisense strand to SEQ ID NO: 1963060
aagaucagucuucuuggca

SEQ ID NO: 1963062 - RNA, 19 nt, Artificial Sequence
  Description of Artificial Sequence: Synthetic oligonucleotide
  Sense strand starting at position 926 of SEQ ID NO: 1880384
ggagaccuuuaauuaugca

SEQ ID NO: 1963063 - RNA, 19 nt, Artificial Sequence
  Description of Artificial Sequence: Synthetic oligonucleotide
  Antisense strand to SEQ ID NO: 1963062
ugcauaauuaaaggucucc

SEQ ID NO: 1963064 - RNA, 19 nt, Artificial Sequence
  Description of Artificial Sequence: Synthetic oligonucleotide
  Sense strand starting at position 1226 of SEQ ID NO: 1880384
cugcuaguccuagaaauca

SEQ ID NO: 1963065 - RNA, 19 nt, Artificial Sequence
  Description of Artificial Sequence: Synthetic oligonucleotide
  Antisense strand to SEQ ID NO: 1963064
ugauuucuaggacuagcag

SEQ ID NO: 1963066 - RNA, 19 nt, Artificial Sequence
  Description of Artificial Sequence: Synthetic oligonucleotide
  Sense strand starting at position 1251 of SEQ ID NO: 1880384
acuugaacauucuccguaa

SEQ ID NO: 1963067 - RNA, 19 nt, Artificial Sequence
  Description of Artificial Sequence: Synthetic oligonucleotide
  Antisense strand to SEQ ID NO: 1963066
uuacggagaauguucaagu

SEQ ID NO: 1963068 - RNA, 19 nt, Artificial Sequence
  Description of Artificial Sequence: Synthetic oligonucleotide
  Sense strand starting at position 1253 of SEQ ID NO: 1880384
uugaacauucuccguaacu

SEQ ID NO: 1963069 - RNA, 19 nt, Artificial Sequence
  Description of Artificial Sequence: Synthetic oligonucleotide
  Antisense strand to SEQ ID NO: 1963068
aguuacggagaauguucaa

SEQ ID NO: 1963070 - RNA, 19 nt, Artificial Sequence
  Description of Artificial Sequence: Synthetic oligonucleotide
  Sense strand starting at position 1254 of SEQ ID NO: 1880384
ugaacauucuccguaacuu

SEQ ID NO: 1963071 - RNA, 19 nt, Artificial Sequence
  Description of Artificial Sequence: Synthetic oligonucleotide
  Antisense strand to SEQ ID NO: 1963070
aaguuacggagaauguuca

SEQ ID NO: 1963072 - RNA, 19 nt, Artificial Sequence
  Description of Artificial Sequence: Synthetic oligonucleotide
  Sense strand starting at position 1277 of SEQ ID NO: 1880384
uucucaaauguugguguaa

SEQ ID NO: 1963073 - RNA, 19 nt, Artificial Sequence
  Description of Artificial Sequence: Synthetic oligonucleotide
  Antisense strand to SEQ ID NO: 1963072
uuacaccaacauuugagaa

SEQ ID NO: 1963074 - RNA, 19 nt, Artificial Sequence
  Description of Artificial Sequence: Synthetic oligonucleotide
  Sense strand starting at position 1361 of SEQ ID NO: 1880384
gucaaacuugcagauugaa

SEQ ID NO: 1963075 - RNA, 19 nt, Artificial Sequence
  Description of Artificial Sequence: Synthetic oligonucleotide
  Antisense strand to SEQ ID NO: 1963074
uucaaucugcaaguuugac

SEQ ID NO: 1963076 - RNA, 19 nt, Artificial Sequence
  Description of Artificial Sequence: Synthetic oligonucleotide
  Sense strand starting at position 1369 of SEQ ID NO: 1880384
ugcagauugaaauagugca

SEQ ID NO: 1963077 - RNA, 19 nt, Artificial Sequence
  Description of Artificial Sequence: Synthetic oligonucleotide
  Antisense strand to SEQ ID NO: 1963076
ugcacuauuucaaucugca

SEQ ID NO: 1963078 - RNA, 19 nt, Artificial Sequence
  Description of Artificial Sequence: Synthetic oligonucleotide
  Sense strand starting at position 1374 of SEQ ID NO: 1880384
auugaaauagugcauguaa

SEQ ID NO: 1963079 - RNA, 19 nt, Artificial Sequence
  Description of Artificial Sequence: Synthetic oligonucleotide
  Antisense strand to SEQ ID NO: 1963078
uuacaugcacuauuucaau

SEQ ID NO: 1963080 - RNA, 19 nt, Artificial Sequence
  Description of Artificial Sequence: Synthetic oligonucleotide
  Sense strand starting at position 2278 of SEQ ID NO: 1880384
ccuuuagugcuggacgacu

SEQ ID NO: 1963081 - RNA, 19 nt, Artificial Sequence
  Description of Artificial Sequence: Synthetic oligonucleotide
  Antisense strand to SEQ ID NO: 1963080
agucguccagcacuaaagg

SEQ ID NO: 1963082 - RNA, 19 nt, Artificial Sequence
  Description of Artificial Sequence: Synthetic oligonucleotide
  Sense strand starting at position 2289 of SEQ ID NO: 1880384
ggacgacucccugagcauu

SEQ ID NO: 1963083 - RNA, 19 nt, Artificial Sequence
  Description of Artificial Sequence: Synthetic oligonucleotide
  Antisense strand to SEQ ID NO: 1963082
aaugcucagggagucgucc

SEQ ID NO: 1963084 - RNA, 19 nt, Artificial Sequence
  Description of Artificial Sequence: Synthetic oligonucleotide
  Sense strand starting at position 2303 of SEQ ID NO: 1880384
gcauuuagcuguccuaauu

SEQ ID NO: 1963085 - RNA, 19 nt, Artificial Sequence
  Description of Artificial Sequence: Synthetic oligonucleotide
  Antisense strand to SEQ ID NO: 1963084
aauuaggacagcuaaaugc

SEQ ID NO: 1963086 - RNA, 19 nt, Artificial Sequence
  Description of Artificial Sequence: Synthetic oligonucleotide
  Sense strand starting at position 2482 of SEQ ID NO: 1880384
agauaaaucuccguaccuc

SEQ ID NO: 1963087 - RNA, 19 nt, Artificial Sequence
  Description of Artificial Sequence: Synthetic oligonucleotide
  Antisense strand to SEQ ID NO: 1963086
gagguacggagauuuaucu

SEQ ID NO: 1963088 - RNA, 19 nt, Artificial Sequence
  Description of Artificial Sequence: Synthetic oligonucleotide
  Sense strand starting at position 2491 of SEQ ID NO: 1880384
uccguaccucacugagaga

SEQ ID NO: 1963089 - RNA, 19 nt, Artificial Sequence
  Description of Artificial Sequence: Synthetic oligonucleotide
  Antisense strand to SEQ ID NO: 1963088
ucucucagugagguacgga

SEQ ID NO: 1963090 - RNA, 19 nt, Artificial Sequence
  Description of Artificial Sequence: Synthetic oligonucleotide
  Sense strand starting at position 3039 of SEQ ID NO: 1880384
agucuucagcccggacaga

SEQ ID NO: 1963091 - RNA, 19 nt, Artificial Sequence
  Description of Artificial Sequence: Synthetic oligonucleotide
  Antisense strand to SEQ ID NO: 1963090
ucuguccgggcugaagacu

SEQ ID NO: 1963092 - RNA, 19 nt, Artificial Sequence
  Description of Artificial Sequence: Synthetic oligonucleotide
  Sense strand starting at position 3261 of SEQ ID NO: 1880384
agccuuuaucaagaaagca

SEQ ID NO: 1963093 - RNA, 19 nt, Artificial Sequence
  Description of Artificial Sequence: Synthetic oligonucleotide
  Antisense strand to SEQ ID NO: 1963092
ugcuuucuugauaaaggcu

SEQ ID NO: 1963094 - RNA, 19 nt, Artificial Sequence
  Description of Artificial Sequence: Synthetic oligonucleotide
  Sense strand starting at position 3330 of SEQ ID NO: 1880384
auugguuuguccucauuug

SEQ ID NO: 1963095 - RNA, 19 nt, Artificial Sequence
  Description of Artificial Sequence: Synthetic oligonucleotide
  Antisense strand to SEQ ID NO: 1963094
caaaugaggacaaaccaau

SEQ ID NO: 1963096 - RNA, 19 nt, Artificial Sequence
  Description of Artificial Sequence: Synthetic oligonucleotide
  Sense strand starting at position 3331 of SEQ ID NO: 1880384
uugguuuguccucauuugu

SEQ ID NO: 1963097 - RNA, 19 nt, Artificial Sequence
  Description of Artificial Sequence: Synthetic oligonucleotide
  Antisense strand to SEQ ID NO: 1963096
acaaaugaggacaaaccaa

SEQ ID NO: 1963098 - RNA, 19 nt, Artificial Sequence
  Description of Artificial Sequence: Synthetic oligonucleotide
  Sense strand starting at position 3360 of SEQ ID NO: 1880384
ggccuuaaucucuggacuu

SEQ ID NO: 1963099 - RNA, 19 nt, Artificial Sequence
  Description of Artificial Sequence: Synthetic oligonucleotide
  Antisense strand to SEQ ID NO: 1963098
aaguccagagauuaaggcc

SEQ ID NO: 1963100 - RNA, 19 nt, Artificial Sequence
  Description of Artificial Sequence: Synthetic oligonucleotide
  Sense strand starting at position 3373 of SEQ ID NO: 1880384
ggacuuuguuaugccuuaa

SEQ ID NO: 1963101 - RNA, 19 nt, Artificial Sequence
  Description of Artificial Sequence: Synthetic oligonucleotide
  Antisense strand to SEQ ID NO: 1963100
uuaaggcauaacaaagucc

SEQ ID NO: 1963102 - RNA, 19 nt, Artificial Sequence
  Description of Artificial Sequence: Synthetic oligonucleotide
  Sense strand starting at position 3458 of SEQ ID NO: 1880384
ucagauguuuaccucggaa

SEQ ID NO: 1963103 - RNA, 19 nt, Artificial Sequence
  Description of Artificial Sequence: Synthetic oligonucleotide
  Antisense strand to SEQ ID NO: 1963102
uuccgagguaaacaucuga

SEQ ID NO: 1963104 - RNA, 19 nt, Artificial Sequence
  Description of Artificial Sequence: Synthetic oligonucleotide
  Sense strand starting at position 3460 of SEQ ID NO: 1880384
agauguuuaccucggaauu

SEQ ID NO: 1963105 - RNA, 19 nt, Artificial Sequence
  Description of Artificial Sequence: Synthetic oligonucleotide
  Antisense strand to SEQ ID NO: 1963104
aauuccgagguaaacaucu

SEQ ID NO: 1963106 - RNA, 19 nt, Artificial Sequence
  Description of Artificial Sequence: Synthetic oligonucleotide
  Sense strand starting at position 3461 of SEQ ID NO: 1880384
gauguuuaccucggaauua

SEQ ID NO: 1963107 - RNA, 19 nt, Artificial Sequence
  Description of Artificial Sequence: Synthetic oligonucleotide
  Antisense strand to SEQ ID NO: 1963106
uaauuccgagguaaacauc

SEQ ID NO: 1963108 - RNA, 19 nt, Artificial Sequence
  Description of Artificial Sequence: Synthetic oligonucleotide
  Sense strand starting at position 3488 of SEQ ID NO: 1880384
uguauaggauuugagagaa

SEQ ID NO: 1963109 - RNA, 19 nt, Artificial Sequence
  Description of Artificial Sequence: Synthetic oligonucleotide
  Antisense strand to SEQ ID NO: 1963108
uucucucaaauccuauaca

SEQ ID NO: 1963110 - RNA, 19 nt, Artificial Sequence
  Description of Artificial Sequence: Synthetic oligonucleotide
  Sense strand starting at position 3523 of SEQ ID NO: 1880384
cuuacugaccuuugguaaa

SEQ ID NO: 1963111 - RNA, 19 nt, Artificial Sequence
  Description of Artificial Sequence: Synthetic oligonucleotide
  Antisense strand to SEQ ID NO: 1963110
uuuaccaaaggucaguaag

SEQ ID NO: 1963112 - RNA, 19 nt, Artificial Sequence
  Description of Artificial Sequence: Synthetic oligonucleotide
  Sense strand starting at position 3525 of SEQ ID NO: 1880384
uacugaccuuugguaaagu

SEQ ID NO: 1963113 - RNA, 19 nt, Artificial Sequence
  Description of Artificial Sequence: Synthetic oligonucleotide
  Antisense strand to SEQ ID NO: 1963112
acuuuaccaaaggucagua

SEQ ID NO: 1963114 - RNA, 19 nt, Artificial Sequence
  Description of Artificial Sequence: Synthetic oligonucleotide
  Sense strand starting at position 3538 of SEQ ID NO: 1880384
uaaaguucugcgugggaaa

SEQ ID NO: 1963115 - RNA, 19 nt, Artificial Sequence
  Description of Artificial Sequence: Synthetic oligonucleotide
  Antisense strand to SEQ ID NO: 1963114
uuucccacgcagaacuuua

SEQ ID NO: 1963116 - RNA, 19 nt, Artificial Sequence
  Description of Artificial Sequence: Synthetic oligonucleotide
  Sense strand starting at position 3539 of SEQ ID NO: 1880384
aaaguucugcgugggaaag

SEQ ID NO: 1963117 - RNA, 19 nt, Artificial Sequence
  Description of Artificial Sequence: Synthetic oligonucleotide
  Antisense strand to SEQ ID NO: 1963116
cuuucccacgcagaacuuu

SEQ ID NO: 1963118 - RNA, 19 nt, Artificial Sequence
  Description of Artificial Sequence: Synthetic oligonucleotide
  Sense strand starting at position 3565 of SEQ ID NO: 1880384
gaaggaguauccuuauaua

SEQ ID NO: 1963119 - RNA, 19 nt, Artificial Sequence
  Description of Artificial Sequence: Synthetic oligonucleotide
  Antisense strand to SEQ ID NO: 1963118
uauauaaggauacuccuuc

SEQ ID NO: 1963120 - RNA, 19 nt, Artificial Sequence
  Description of Artificial Sequence: Synthetic oligonucleotide
  Sense strand starting at position 3818 of SEQ ID NO: 1880384
ggaauucuauaaucuagcu

SEQ ID NO: 1963121 - RNA, 19 nt, Artificial Sequence
  Description of Artificial Sequence: Synthetic oligonucleotide
  Antisense strand to SEQ ID NO: 1963120
agcuagauuauagaauucc

SEQ ID NO: 1963122 - RNA, 19 nt, Artificial Sequence
  Description of Artificial Sequence: Synthetic oligonucleotide
  Sense strand starting at position 3876 of SEQ ID NO: 1880384
uugugauaggcgcagagaa

SEQ ID NO: 1963123 - RNA, 19 nt, Artificial Sequence
  Description of Artificial Sequence: Synthetic oligonucleotide
  Antisense strand to SEQ ID NO: 1963122
uucucugcgccuaucacaa

SEQ ID NO: 1963124 - RNA, 19 nt, Artificial Sequence
  Description of Artificial Sequence: Synthetic oligonucleotide
  Sense strand starting at position 239 of SEQ ID NO: 1880385
uauagaaaugguuauugca

SEQ ID NO: 1963125 - RNA, 19 nt, Artificial Sequence
  Description of Artificial Sequence: Synthetic oligonucleotide
  Antisense strand to SEQ ID NO: 1963124
ugcaauaaccauuucuaua

SEQ ID NO: 1963126 - RNA, 19 nt, Artificial Sequence
  Description of Artificial Sequence: Synthetic oligonucleotide
  Sense strand starting at position 241 of SEQ ID NO: 1880385
uagaaaugguuauugcaug

SEQ ID NO: 1963127 - RNA, 19 nt, Artificial Sequence
  Description of Artificial Sequence: Synthetic oligonucleotide
  Antisense strand to SEQ ID NO: 1963126
caugcaauaaccauuucua

SEQ ID NO: 1963128 - RNA, 19 nt, Artificial Sequence
  Description of Artificial Sequence: Synthetic oligonucleotide
  Sense strand starting at position 684 of SEQ ID NO: 1880385
acagaagugauacgaguaa

SEQ ID NO: 1963129 - RNA, 19 nt, Artificial Sequence
  Description of Artificial Sequence: Synthetic oligonucleotide
  Antisense strand to SEQ ID NO: 1963128
uuacucguaucacuucugu

SEQ ID NO: 1963130 - RNA, 19 nt, Artificial Sequence
  Description of Artificial Sequence: Synthetic oligonucleotide
  Sense strand starting at position 754 of SEQ ID NO: 1880385
gauaccaagcauuggugaa

SEQ ID NO: 1963131 - RNA, 19 nt, Artificial Sequence
  Description of Artificial Sequence: Synthetic oligonucleotide
  Antisense strand to SEQ ID NO: 1963130
uucaccaaugcuugguauc

SEQ ID NO: 1963132 - RNA, 19 nt, Artificial Sequence
  Description of Artificial Sequence: Synthetic oligonucleotide
  Sense strand starting at position 801 of SEQ ID NO: 1880385
uauguugcuggauaagaau

SEQ ID NO: 1963133 - RNA, 19 nt, Artificial Sequence
  Description of Artificial Sequence: Synthetic oligonucleotide
  Antisense strand to SEQ ID NO: 1963132
auucuuauccagcaacaua

SEQ ID NO: 1963134 - RNA, 19 nt, Artificial Sequence
  Description of Artificial Sequence: Synthetic oligonucleotide
  Sense strand starting at position 807 of SEQ ID NO: 1880385
gcuggauaagaaugugaaa

SEQ ID NO: 1963135 - RNA, 19 nt, Artificial Sequence
  Description of Artificial Sequence: Synthetic oligonucleotide
  Antisense strand to SEQ ID NO: 1963134
uuucacauucuuauccagc

SEQ ID NO: 1963136 - RNA, 19 nt, Artificial Sequence
  Description of Artificial Sequence: Synthetic oligonucleotide
  Sense strand starting at position 2080 of SEQ ID NO: 1880385
ggaaauguauugucugaaa

SEQ ID NO: 1963137 - RNA, 19 nt, Artificial Sequence
  Description of Artificial Sequence: Synthetic oligonucleotide
  Antisense strand to SEQ ID NO: 1963136
uuucagacaauacauuucc

SEQ ID NO: 1963138 - RNA, 19 nt, Artificial Sequence
  Description of Artificial Sequence: Synthetic oligonucleotide
  Sense strand starting at position 2125 of SEQ ID NO: 1880385
uggcgucuguggaugcaaa

SEQ ID NO: 1963139 - RNA, 19 nt, Artificial Sequence
  Description of Artificial Sequence: Synthetic oligonucleotide
  Antisense strand to SEQ ID NO: 1963138
uuugcauccacagacgcca

SEQ ID NO: 1963140 - RNA, 19 nt, Artificial Sequence
  Description of Artificial Sequence: Synthetic oligonucleotide
  Sense strand starting at position 2298 of SEQ ID NO: 1880385
ugagguuaauaccuauagu

SEQ ID NO: 1963141 - RNA, 19 nt, Artificial Sequence
  Description of Artificial Sequence: Synthetic oligonucleotide
  Antisense strand to SEQ ID NO: 1963140
acuauagguauuaaccuca

SEQ ID NO: 1963142 - RNA, 19 nt, Artificial Sequence
  Description of Artificial Sequence: Synthetic oligonucleotide
  Sense strand starting at position 2301 of SEQ ID NO: 1880385
gguuaauaccuauaguuag

SEQ ID NO: 1963143 - RNA, 19 nt, Artificial Sequence
  Description of Artificial Sequence: Synthetic oligonucleotide
  Antisense strand to SEQ ID NO: 1963142
cuaacuauagguauuaacc

SEQ ID NO: 1963144 - RNA, 19 nt, Artificial Sequence
  Description of Artificial Sequence: Synthetic oligonucleotide
  Sense strand starting at position 2312 of SEQ ID NO: 1880385
auaguuaguugacuuuaag

SEQ ID NO: 1963145 - RNA, 19 nt, Artificial Sequence
  Description of Artificial Sequence: Synthetic oligonucleotide
  Antisense strand to SEQ ID NO: 1963144
cuuaaagucaacuaacuau

SEQ ID NO: 1963146 - RNA, 19 nt, Artificial Sequence
  Description of Artificial Sequence: Synthetic oligonucleotide
  Sense strand starting at position 2315 of SEQ ID NO: 1880385
guuaguugacuuuaaguaa

SEQ ID NO: 1963147 - RNA, 19 nt, Artificial Sequence
  Description of Artificial Sequence: Synthetic oligonucleotide
  Antisense strand to SEQ ID NO: 1963146
uuacuuaaagucaacuaac

SEQ ID NO: 1963148 - RNA, 19 nt, Artificial Sequence
  Description of Artificial Sequence: Synthetic oligonucleotide
  Sense strand starting at position 2360 of SEQ ID NO: 1880385
gagugagacucaucuaacc

SEQ ID NO: 1963149 - RNA, 19 nt, Artificial Sequence
  Description of Artificial Sequence: Synthetic oligonucleotide
  Antisense strand to SEQ ID NO: 1963148
gguuagaugagucucacuc

SEQ ID NO: 1963150 - RNA, 19 nt, Artificial Sequence
  Description of Artificial Sequence: Synthetic oligonucleotide
  Sense strand starting at position 2407 of SEQ ID NO: 1880385
cguuuccugauagaggaau

SEQ ID NO: 1963151 - RNA, 19 nt, Artificial Sequence
  Description of Artificial Sequence: Synthetic oligonucleotide
  Antisense strand to SEQ ID NO: 1963150
auuccucuaucaggaaacg

SEQ ID NO: 1963152 - RNA, 19 nt, Artificial Sequence
  Description of Artificial Sequence: Synthetic oligonucleotide
  Sense strand starting at position 3005 of SEQ ID NO: 1880385
aguuaaguccaggagguua

SEQ ID NO: 1963153 - RNA, 19 nt, Artificial Sequence
  Description of Artificial Sequence: Synthetic oligonucleotide
  Antisense strand to SEQ ID NO: 1963152
uaaccuccuggacuuaacu

SEQ ID NO: 1963154 - RNA, 19 nt, Artificial Sequence
  Description of Artificial Sequence: Synthetic oligonucleotide
  Sense strand starting at position 3007 of SEQ ID NO: 1880385
uuaaguccaggagguuaau

SEQ ID NO: 1963155 - RNA, 19 nt, Artificial Sequence
  Description of Artificial Sequence: Synthetic oligonucleotide
  Antisense strand to SEQ ID NO: 1963154
auuaaccuccuggacuuaa

SEQ ID NO: 1963156 - RNA, 19 nt, Artificial Sequence
  Description of Artificial Sequence: Synthetic oligonucleotide
  Sense strand starting at position 3013 of SEQ ID NO: 1880385
ccaggagguuaauuccaga

SEQ ID NO: 1963157 - RNA, 19 nt, Artificial Sequence
  Description of Artificial Sequence: Synthetic oligonucleotide
  Antisense strand to SEQ ID NO: 1963156
ucuggaauuaaccuccugg

SEQ ID NO: 1963158 - RNA, 19 nt, Artificial Sequence
  Description of Artificial Sequence: Synthetic oligonucleotide
  Sense strand starting at position 3109 of SEQ ID NO: 1880385
gaauaaagcuagguaguca

SEQ ID NO: 1963159 - RNA, 19 nt, Artificial Sequence
  Description of Artificial Sequence: Synthetic oligonucleotide
  Antisense strand to SEQ ID NO: 1963158
ugacuaccuagcuuuauuc

SEQ ID NO: 1963160 - RNA, 19 nt, Artificial Sequence
  Description of Artificial Sequence: Synthetic oligonucleotide
  Sense strand starting at position 3124 of SEQ ID NO: 1880385
gucaacaucaggugaguaa

SEQ ID NO: 1963161 - RNA, 19 nt, Artificial Sequence
  Description of Artificial Sequence: Synthetic oligonucleotide
  Antisense strand to SEQ ID NO: 1963160
uuacucaccugauguugac

SEQ ID NO: 1963162 - RNA, 19 nt, Artificial Sequence
  Description of Artificial Sequence: Synthetic oligonucleotide
  Sense strand starting at position 3179 of SEQ ID NO: 1880385
ggauaagccaauuggguaa

SEQ ID NO: 1963163 - RNA, 19 nt, Artificial Sequence
  Description of Artificial Sequence: Synthetic oligonucleotide
  Antisense strand to SEQ ID NO: 1963162
uuacccaauuggcuuaucc

SEQ ID NO: 1963164 - RNA, 19 nt, Artificial Sequence
  Description of Artificial Sequence: Synthetic oligonucleotide
  Sense strand starting at position 3285 of SEQ ID NO: 1880385
agagguucaggccaagagu

SEQ ID NO: 1963165 - RNA, 19 nt, Artificial Sequence
  Description of Artificial Sequence: Synthetic oligonucleotide
  Antisense strand to SEQ ID NO: 1963164
acucuuggccugaaccucu

SEQ ID NO: 1963166 - RNA, 19 nt, Artificial Sequence
  Description of Artificial Sequence: Synthetic oligonucleotide
  Sense strand starting at position 3288 of SEQ ID NO: 1880385
gguucaggccaagaguuua

SEQ ID NO: 1963167 - RNA, 19 nt, Artificial Sequence
  Description of Artificial Sequence: Synthetic oligonucleotide
  Antisense strand to SEQ ID NO: 1963166
uaaacucuuggccugaacc

SEQ ID NO: 1963168 - RNA, 19 nt, Artificial Sequence
  Description of Artificial Sequence: Synthetic oligonucleotide
  Sense strand starting at position 3302 of SEQ ID NO: 1880385
guuuaaugaguccagguaa

SEQ ID NO: 1963169 - RNA, 19 nt, Artificial Sequence
  Description of Artificial Sequence: Synthetic oligonucleotide
  Antisense strand to SEQ ID NO: 1963168
uuaccuggacucauuaaac

SEQ ID NO: 1963170 - RNA, 19 nt, Artificial Sequence
  Description of Artificial Sequence: Synthetic oligonucleotide
  Sense strand starting at position 3360 of SEQ ID NO: 1880385
ugguaaugccaggauauua

SEQ ID NO: 1963171 - RNA, 19 nt, Artificial Sequence
  Description of Artificial Sequence: Synthetic oligonucleotide
  Antisense strand to SEQ ID NO: 1963170
uaauauccuggcauuacca

SEQ ID NO: 1963172 - RNA, 19 nt, Artificial Sequence
  Description of Artificial Sequence: Synthetic oligonucleotide
  Sense strand starting at position 3387 of SEQ ID NO: 1880385
aguuuaaugccagaugagu

SEQ ID NO: 1963173 - RNA, 19 nt, Artificial Sequence
  Description of Artificial Sequence: Synthetic oligonucleotide
  Antisense strand to SEQ ID NO: 1963172
acucaucuggcauuaaacu

SEQ ID NO: 1963174 - RNA, 19 nt, Artificial Sequence
  Description of Artificial Sequence: Synthetic oligonucleotide
  Sense strand starting at position 3389 of SEQ ID NO: 1880385
uuuaaugccagaugaguga

SEQ ID NO: 1963175 - RNA, 19 nt, Artificial Sequence
  Description of Artificial Sequence: Synthetic oligonucleotide
  Antisense strand to SEQ ID NO: 1963174
ucacucaucuggcauuaaa

SEQ ID NO: 1963176 - RNA, 19 nt, Artificial Sequence
  Description of Artificial Sequence: Synthetic oligonucleotide
  Sense strand starting at position 3414 of SEQ ID NO: 1880385
guggguaaggccuacuuga

SEQ ID NO: 1963177 - RNA, 19 nt, Artificial Sequence
  Description of Artificial Sequence: Synthetic oligonucleotide
  Antisense strand to SEQ ID NO: 1963176
ucaaguaggccuuacccac

SEQ ID NO: 1963178 - RNA, 19 nt, Artificial Sequence
  Description of Artificial Sequence: Synthetic oligonucleotide
  Sense strand starting at position 3471 of SEQ ID NO: 1880385
aucuguagcccuuaggaaa

SEQ ID NO: 1963179 - RNA, 19 nt, Artificial Sequence
  Description of Artificial Sequence: Synthetic oligonucleotide
  Antisense strand to SEQ ID NO: 1963178
uuuccuaagggcuacagau

SEQ ID NO: 1963180 - RNA, 19 nt, Artificial Sequence
  Description of Artificial Sequence: Synthetic oligonucleotide
  Sense strand starting at position 3544 of SEQ ID NO: 1880385
ucacucauuccauggaaag

SEQ ID NO: 1963181 - RNA, 19 nt, Artificial Sequence
  Description of Artificial Sequence: Synthetic oligonucleotide
  Antisense strand to SEQ ID NO: 1963180
cuuuccauggaaugaguga

SEQ ID NO: 1963182 - RNA, 19 nt, Artificial Sequence
  Description of Artificial Sequence: Synthetic oligonucleotide
  Sense strand starting at position 3606 of SEQ ID NO: 1880385
ggcccugauggugagaaau

SEQ ID NO: 1963183 - RNA, 19 nt, Artificial Sequence
  Description of Artificial Sequence: Synthetic oligonucleotide
  Antisense strand to SEQ ID NO: 1963182
auuucucaccaucagggcc

SEQ ID NO: 1963184 - RNA, 19 nt, Artificial Sequence
  Description of Artificial Sequence: Synthetic oligonucleotide
  Sense strand starting at position 3684 of SEQ ID NO: 1880385
cuaucaagcuuucugauga

SEQ ID NO: 1963185 - RNA, 19 nt, Artificial Sequence
  Description of Artificial Sequence: Synthetic oligonucleotide
  Antisense strand to SEQ ID NO: 1963184
ucaucagaaagcuugauag

SEQ ID NO: 1963186 - RNA, 19 nt, Artificial Sequence
  Description of Artificial Sequence: Synthetic oligonucleotide
  Sense strand starting at position 3738 of SEQ ID NO: 1880385
ugagccauccugggacaga

SEQ ID NO: 1963187 - RNA, 19 nt, Artificial Sequence
  Description of Artificial Sequence: Synthetic oligonucleotide
  Antisense strand to SEQ ID NO: 1963186
ucugucccaggauggcuca

SEQ ID NO: 1963188 - RNA, 19 nt, Artificial Sequence
  Description of Artificial Sequence: Synthetic oligonucleotide
  Sense strand starting at position 3792 of SEQ ID NO: 1880385
cauggaaacugugugggau

SEQ ID NO: 1963189 - RNA, 19 nt, Artificial Sequence
  Description of Artificial Sequence: Synthetic oligonucleotide
  Antisense strand to SEQ ID NO: 1963188
aucccacacaguuuccaug

SEQ ID NO: 1963190 - RNA, 19 nt, Artificial Sequence
  Description of Artificial Sequence: Synthetic oligonucleotide
  Sense strand starting at position 3793 of SEQ ID NO: 1880385
auggaaacugugugggaua

SEQ ID NO: 1963191 - RNA, 19 nt, Artificial Sequence
  Description of Artificial Sequence: Synthetic oligonucleotide
  Antisense strand to SEQ ID NO: 1963190
uaucccacacaguuuccau

SEQ ID NO: 1963192 - RNA, 19 nt, Artificial Sequence
  Description of Artificial Sequence: Synthetic oligonucleotide
  Sense strand starting at position 3795 of SEQ ID NO: 1880385
ggaaacugugugggauaau

SEQ ID NO: 1963193 - RNA, 19 nt, Artificial Sequence
  Description of Artificial Sequence: Synthetic oligonucleotide
  Antisense strand to SEQ ID NO: 1963192
auuaucccacacaguuucc

SEQ ID NO: 1963194 - RNA, 19 nt, Artificial Sequence
  Description of Artificial Sequence: Synthetic oligonucleotide
  Sense strand starting at position 3814 of SEQ ID NO: 1880385
acauauuuaucgucauugu

SEQ ID NO: 1963195 - RNA, 19 nt, Artificial Sequence
  Description of Artificial Sequence: Synthetic oligonucleotide
  Antisense strand to SEQ ID NO: 1963194
acaaugacgauaaauaugu

SEQ ID NO: 1963196 - RNA, 19 nt, Artificial Sequence
  Description of Artificial Sequence: Synthetic oligonucleotide
  Sense strand starting at position 3817 of SEQ ID NO: 1880385
uauuuaucgucauuguaag

SEQ ID NO: 1963197 - RNA, 19 nt, Artificial Sequence
  Description of Artificial Sequence: Synthetic oligonucleotide
  Antisense strand to SEQ ID NO: 1963196
cuuacaaugacgauaaaua

SEQ ID NO: 1963198 - RNA, 19 nt, Artificial Sequence
  Description of Artificial Sequence: Synthetic oligonucleotide
  Sense strand starting at position 3877 of SEQ ID NO: 1880385
cuaauacaguaguuagaau

SEQ ID NO: 1963199 - RNA, 19 nt, Artificial Sequence
  Description of Artificial Sequence: Synthetic oligonucleotide
  Antisense strand to SEQ ID NO: 1963198
auucuaacuacuguauuag

SEQ ID NO: 1963200 - RNA, 19 nt, Artificial Sequence
  Description of Artificial Sequence: Synthetic oligonucleotide
  Sense strand starting at position 3932 of SEQ ID NO: 1880385
gaaccagguuagucaugaa

SEQ ID NO: 1963201 - RNA, 19 nt, Artificial Sequence
  Description of Artificial Sequence: Synthetic oligonucleotide
  Antisense strand to SEQ ID NO: 1963200
uucaugacuaaccugguuc

SEQ ID NO: 1963202 - RNA, 19 nt, Artificial Sequence
  Description of Artificial Sequence: Synthetic oligonucleotide
  Sense strand starting at position 3939 of SEQ ID NO: 1880385
guuagucaugaauauguuu

SEQ ID NO: 1963203 - RNA, 19 nt, Artificial Sequence
  Description of Artificial Sequence: Synthetic oligonucleotide
  Antisense strand to SEQ ID NO: 1963202
aaacauauucaugacuaac

SEQ ID NO: 1963204 - RNA, 19 nt, Artificial Sequence
  Description of Artificial Sequence: Synthetic oligonucleotide
  Sense strand starting at position 55 of SEQ ID NO: 1880389
gcugauuccuaggcaucca

SEQ ID NO: 1963205 - RNA, 19 nt, Artificial Sequence
  Description of Artificial Sequence: Synthetic oligonucleotide
  Antisense strand to SEQ ID NO: 1963204
uggaugccuaggaaucagc

SEQ ID NO: 1963206 - RNA, 19 nt, Artificial Sequence
  Description of Artificial Sequence: Synthetic oligonucleotide
  Sense strand starting at position 133 of SEQ ID NO: 1880389
guccaucaguaguccacau

SEQ ID NO: 1963207 - RNA, 19 nt, Artificial Sequence
  Description of Artificial Sequence: Synthetic oligonucleotide
  Antisense strand to SEQ ID NO: 1963206
auguggacuacugauggac

SEQ ID NO: 1963208 - RNA, 19 nt, Artificial Sequence
  Description of Artificial Sequence: Synthetic oligonucleotide
  Sense strand starting at position 209 of SEQ ID NO: 1880389
ggcugugauggcgccuauu

SEQ ID NO: 1963209 - RNA, 19 nt, Artificial Sequence
  Description of Artificial Sequence: Synthetic oligonucleotide
  Antisense strand to SEQ ID NO: 1963208
aauaggcgccaucacagcc

SEQ ID NO: 1963210 - RNA, 19 nt, Artificial Sequence
  Description of Artificial Sequence: Synthetic oligonucleotide
  Sense strand starting at position 211 of SEQ ID NO: 1880389
cugugauggcgccuauucu

SEQ ID NO: 1963211 - RNA, 19 nt, Artificial Sequence
  Description of Artificial Sequence: Synthetic oligonucleotide
  Antisense strand to SEQ ID NO: 1963210
agaauaggcgccaucacag

SEQ ID NO: 1963212 - RNA, 19 nt, Artificial Sequence
  Description of Artificial Sequence: Synthetic oligonucleotide
  Sense strand starting at position 234 of SEQ ID NO: 1880389
acuuccucagaguggaaau

SEQ ID NO: 1963213 - RNA, 19 nt, Artificial Sequence
  Description of Artificial Sequence: Synthetic oligonucleotide
  Antisense strand to SEQ ID NO: 1963212
auuuccacucugaggaagu

SEQ ID NO: 1963214 - RNA, 19 nt, Artificial Sequence
  Description of Artificial Sequence: Synthetic oligonucleotide
  Sense strand starting at position 244 of SEQ ID NO: 1880389
aguggaaauuuaggcaaca

SEQ ID NO: 1963215 - RNA, 19 nt, Artificial Sequence
  Description of Artificial Sequence: Synthetic oligonucleotide
  Antisense strand to SEQ ID NO: 1963214
uguugccuaaauuuccacu

SEQ ID NO: 1963216 - RNA, 19 nt, Artificial Sequence
  Description of Artificial Sequence: Synthetic oligonucleotide
  Sense strand starting at position 326 of SEQ ID NO: 1880389
uaacuuagaggcuguaaua

SEQ ID NO: 1963217 - RNA, 19 nt, Artificial Sequence
  Description of Artificial Sequence: Synthetic oligonucleotide
  Antisense strand to SEQ ID NO: 1963216
uauuacagccucuaaguua

SEQ ID NO: 1963218 - RNA, 19 nt, Artificial Sequence
  Description of Artificial Sequence: Synthetic oligonucleotide
  Sense strand starting at position 336 of SEQ ID NO: 1880389
gcuguaauagauuaacuuu

SEQ ID NO: 1963219 - RNA, 19 nt, Artificial Sequence
  Description of Artificial Sequence: Synthetic oligonucleotide
  Antisense strand to SEQ ID NO: 1963218
aaaguuaaucuauuacagc

SEQ ID NO: 1963220 - RNA, 19 nt, Artificial Sequence
  Description of Artificial Sequence: Synthetic oligonucleotide
  Sense strand starting at position 366 of SEQ ID NO: 1880389
ugauauaagcucugaguag

SEQ ID NO: 1963221 - RNA, 19 nt, Artificial Sequence
  Description of Artificial Sequence: Synthetic oligonucleotide
  Antisense strand to SEQ ID NO: 1963220
cuacucagagcuuauauca

SEQ ID NO: 1963222 - RNA, 19 nt, Artificial Sequence
  Description of Artificial Sequence: Synthetic oligonucleotide
  Sense strand starting at position 378 of SEQ ID NO: 1880389
ugaguagacucuuuagagu

SEQ ID NO: 1963223 - RNA, 19 nt, Artificial Sequence
  Description of Artificial Sequence: Synthetic oligonucleotide
  Antisense strand to SEQ ID NO: 1963222
acucuaaagagucuacuca

SEQ ID NO: 1963224 - RNA, 19 nt, Artificial Sequence
  Description of Artificial Sequence: Synthetic oligonucleotide
  Sense strand starting at position 433 of SEQ ID NO: 1880389
ucauaacuacuguguguaa

SEQ ID NO: 1963225 - RNA, 19 nt, Artificial Sequence
  Description of Artificial Sequence: Synthetic oligonucleotide
  Antisense strand to SEQ ID NO: 1963224
uuacacacaguaguuauga

SEQ ID NO: 1963226 - RNA, 19 nt, Artificial Sequence
  Description of Artificial Sequence: Synthetic oligonucleotide
  Sense strand starting at position 435 of SEQ ID NO: 1880389
auaacuacuguguguaaau

SEQ ID NO: 1963227 - RNA, 19 nt, Artificial Sequence
  Description of Artificial Sequence: Synthetic oligonucleotide
  Antisense strand to SEQ ID NO: 1963226
auuuacacacaguaguuau

SEQ ID NO: 1963228 - RNA, 19 nt, Artificial Sequence
  Description of Artificial Sequence: Synthetic oligonucleotide
  Sense strand starting at position 444 of SEQ ID NO: 1880389
guguguaaauaaccucuau

SEQ ID NO: 1963229 - RNA, 19 nt, Artificial Sequence
  Description of Artificial Sequence: Synthetic oligonucleotide
  Antisense strand to SEQ ID NO: 1963228
auagagguuauuuacacac

SEQ ID NO: 1963230 - RNA, 19 nt, Artificial Sequence
  Description of Artificial Sequence: Synthetic oligonucleotide
  Sense strand starting at position 528 of SEQ ID NO: 1880389
guuggaaaguuugucaaug

SEQ ID NO: 1963231 - RNA, 19 nt, Artificial Sequence
  Description of Artificial Sequence: Synthetic oligonucleotide
  Antisense strand to SEQ ID NO: 1963230
cauugacaaacuuuccaac

SEQ ID NO: 1963232 - RNA, 19 nt, Artificial Sequence
  Description of Artificial Sequence: Synthetic oligonucleotide
  Sense strand starting at position 529 of SEQ ID NO: 1880389
uuggaaaguuugucaaugu

SEQ ID NO: 1963233 - RNA, 19 nt, Artificial Sequence
  Description of Artificial Sequence: Synthetic oligonucleotide
  Antisense strand to SEQ ID NO: 1963232
acauugacaaacuuuccaa

SEQ ID NO: 1963234 - RNA, 19 nt, Artificial Sequence
  Description of Artificial Sequence: Synthetic oligonucleotide
  Sense strand starting at position 533 of SEQ ID NO: 1880389
aaaguuugucaauguaaag

SEQ ID NO: 1963235 - RNA, 19 nt, Artificial Sequence
  Description of Artificial Sequence: Synthetic oligonucleotide
  Antisense strand to SEQ ID NO: 1963234
cuuuacauugacaaacuuu

SEQ ID NO: 1963236 - RNA, 19 nt, Artificial Sequence
  Description of Artificial Sequence: Synthetic oligonucleotide
  Sense strand starting at position 654 of SEQ ID NO: 1880389
acgugagcccauuaacauu

SEQ ID NO: 1963237 - RNA, 19 nt, Artificial Sequence
  Description of Artificial Sequence: Synthetic oligonucleotide
  Antisense strand to SEQ ID NO: 1963236
aauguuaaugggcucacgu

SEQ ID NO: 1963238 - RNA, 19 nt, Artificial Sequence
  Description of Artificial Sequence: Synthetic oligonucleotide
  Sense strand starting at position 702 of SEQ ID NO: 1880389
cgaugcagcacuuaucuga

SEQ ID NO: 1963239 - RNA, 19 nt, Artificial Sequence
  Description of Artificial Sequence: Synthetic oligonucleotide
  Antisense strand to SEQ ID NO: 1963238
ucagauaagugcugcaucg

SEQ ID NO: 1963240 - RNA, 19 nt, Artificial Sequence
  Description of Artificial Sequence: Synthetic oligonucleotide
  Sense strand starting at position 706 of SEQ ID NO: 1880389
gcagcacuuaucugaugga

SEQ ID NO: 1963241 - RNA, 19 nt, Artificial Sequence
  Description of Artificial Sequence: Synthetic oligonucleotide
  Antisense strand to SEQ ID NO: 1963240
uccaucagauaagugcugc

SEQ ID NO: 1963242 - RNA, 19 nt, Artificial Sequence
  Description of Artificial Sequence: Synthetic oligonucleotide
  Sense strand starting at position 737 of SEQ ID NO: 1880389
auugcuucgagguacaagu

SEQ ID NO: 1963243 - RNA, 19 nt, Artificial Sequence
  Description of Artificial Sequence: Synthetic oligonucleotide
  Antisense strand to SEQ ID NO: 1963242
acuuguaccucgaagcaau

SEQ ID NO: 1963244 - RNA, 19 nt, Artificial Sequence
  Description of Artificial Sequence: Synthetic oligonucleotide
  Sense strand starting at position 807 of SEQ ID NO: 1880389
cagacaagcuccucaguga

SEQ ID NO: 1963245 - RNA, 19 nt, Artificial Sequence
  Description of Artificial Sequence: Synthetic oligonucleotide
  Antisense strand to SEQ ID NO: 1963244
ucacugaggagcuugucug

SEQ ID NO: 1963246 - RNA, 19 nt, Artificial Sequence
  Description of Artificial Sequence: Synthetic oligonucleotide
  Sense strand starting at position 808 of SEQ ID NO: 1880389
agacaagcuccucagugaa

SEQ ID NO: 1963247 - RNA, 19 nt, Artificial Sequence
  Description of Artificial Sequence: Synthetic oligonucleotide
  Antisense strand to SEQ ID NO: 1963246
uucacugaggagcuugucu

SEQ ID NO: 1963248 - RNA, 19 nt, Artificial Sequence
  Description of Artificial Sequence: Synthetic oligonucleotide
  Sense strand starting at position 851 of SEQ ID NO: 1880389
gccagucucccagaaagga

SEQ ID NO: 1963249 - RNA, 19 nt, Artificial Sequence
  Description of Artificial Sequence: Synthetic oligonucleotide
  Antisense strand to SEQ ID NO: 1963248
uccuuucugggagacuggc

SEQ ID NO: 1963250 - RNA, 19 nt, Artificial Sequence
  Description of Artificial Sequence: Synthetic oligonucleotide
  Sense strand starting at position 868 of SEQ ID NO: 1880389
gagcauaaggaguguucca

SEQ ID NO: 1963251 - RNA, 19 nt, Artificial Sequence
  Description of Artificial Sequence: Synthetic oligonucleotide
  Antisense strand to SEQ ID NO: 1963250
uggaacacuccuuaugcuc

SEQ ID NO: 1963252 - RNA, 19 nt, Artificial Sequence
  Description of Artificial Sequence: Synthetic oligonucleotide
  Sense strand starting at position 1007 of SEQ ID NO: 1880389
cacaaauugcgagggauag

SEQ ID NO: 1963253 - RNA, 19 nt, Artificial Sequence
  Description of Artificial Sequence: Synthetic oligonucleotide
  Antisense strand to SEQ ID NO: 1963252
cuaucccucgcaauuugug

SEQ ID NO: 1963254 - RNA, 19 nt, Artificial Sequence
  Description of Artificial Sequence: Synthetic oligonucleotide
  Sense strand starting at position 1008 of SEQ ID NO: 1880389
acaaauugcgagggauaga

SEQ ID NO: 1963255 - RNA, 19 nt, Artificial Sequence
  Description of Artificial Sequence: Synthetic oligonucleotide
  Antisense strand to SEQ ID NO: 1963254
ucuaucccucgcaauuugu

SEQ ID NO: 1963256 - RNA, 19 nt, Artificial Sequence
  Description of Artificial Sequence: Synthetic oligonucleotide
  Sense strand starting at position 1167 of SEQ ID NO: 1880389
cugcucuagguuuagaaga

SEQ ID NO: 1963257 - RNA, 19 nt, Artificial Sequence
  Description of Artificial Sequence: Synthetic oligonucleotide
  Antisense strand to SEQ ID NO: 1963256
ucuucuaaaccuagagcag

SEQ ID NO: 1963258 - RNA, 19 nt, Artificial Sequence
  Description of Artificial Sequence: Synthetic oligonucleotide
  Sense strand starting at position 2483 of SEQ ID NO: 1880389
gccucuaagaaagguaagu

SEQ ID NO: 1963259 - RNA, 19 nt, Artificial Sequence
  Description of Artificial Sequence: Synthetic oligonucleotide
  Antisense strand to SEQ ID NO: 1963258
acuuaccuuucuuagaggc

SEQ ID NO: 1963260 - RNA, 19 nt, Artificial Sequence
  Description of Artificial Sequence: Synthetic oligonucleotide
  Sense strand starting at position 2617 of SEQ ID NO: 1880389
acgcguucccgggcgaauu

SEQ ID NO: 1963261 - RNA, 19 nt, Artificial Sequence
  Description of Artificial Sequence: Synthetic oligonucleotide
  Antisense strand to SEQ ID NO: 1963260
aauucgcccgggaacgcgu

SEQ ID NO: 1963262 - RNA, 19 nt, Artificial Sequence
  Description of Artificial Sequence: Synthetic oligonucleotide
  Sense strand starting at position 2627 of SEQ ID NO: 1880389
gggcgaauuccauggaguc

SEQ ID NO: 1963263 - RNA, 19 nt, Artificial Sequence
  Description of Artificial Sequence: Synthetic oligonucleotide
  Antisense strand to SEQ ID NO: 1963262
gacuccauggaauucgccc

SEQ ID NO: 1963264 - RNA, 19 nt, Artificial Sequence
  Description of Artificial Sequence: Synthetic oligonucleotide
  Sense strand starting at position 2628 of SEQ ID NO: 1880389
ggcgaauuccauggagucu

SEQ ID NO: 1963265 - RNA, 19 nt, Artificial Sequence
  Description of Artificial Sequence: Synthetic oligonucleotide
  Antisense strand to SEQ ID NO: 1963264
agacuccauggaauucgcc

SEQ ID NO: 1963266 - RNA, 19 nt, Artificial Sequence
  Description of Artificial Sequence: Synthetic oligonucleotide
  Sense strand starting at position 2640 of SEQ ID NO: 1880389
ggagucugccucgaguaca

SEQ ID NO: 1963267 - RNA, 19 nt, Artificial Sequence
  Description of Artificial Sequence: Synthetic oligonucleotide
  Antisense strand to SEQ ID NO: 1963266
uguacucgaggcagacucc

SEQ ID NO: 1963268 - RNA, 19 nt, Artificial Sequence
  Description of Artificial Sequence: Synthetic oligonucleotide
  Sense strand starting at position 2643 of SEQ ID NO: 1880389
gucugccucgaguacagau

SEQ ID NO: 1963269 - RNA, 19 nt, Artificial Sequence
  Description of Artificial Sequence: Synthetic oligonucleotide
  Antisense strand to SEQ ID NO: 1963268
aucuguacucgaggcagac

SEQ ID NO: 1963270 - RNA, 19 nt, Artificial Sequence
  Description of Artificial Sequence: Synthetic oligonucleotide
  Sense strand starting at position 2670 of SEQ ID NO: 1880389
ugugccaggcauugagaaa

SEQ ID NO: 1963271 - RNA, 19 nt, Artificial Sequence
  Description of Artificial Sequence: Synthetic oligonucleotide
  Antisense strand to SEQ ID NO: 1963270
uuucucaaugccuggcaca

SEQ ID NO: 1963272 - RNA, 19 nt, Artificial Sequence
  Description of Artificial Sequence: Synthetic oligonucleotide
  Sense strand starting at position 2696 of SEQ ID NO: 1880389
gaaggagcucuccguggaa

SEQ ID NO: 1963273 - RNA, 19 nt, Artificial Sequence
  Description of Artificial Sequence: Synthetic oligonucleotide
  Antisense strand to SEQ ID NO: 1963272
uuccacggagagcuccuuc

SEQ ID NO: 1963274 - RNA, 19 nt, Artificial Sequence
  Description of Artificial Sequence: Synthetic oligonucleotide
  Sense strand starting at position 2711 of SEQ ID NO: 1880389
ggaacuucuccugguacaa

SEQ ID NO: 1963275 - RNA, 19 nt, Artificial Sequence
  Description of Artificial Sequence: Synthetic oligonucleotide
  Antisense strand to SEQ ID NO: 1963274
uuguaccaggagaaguucc

SEQ ID NO: 1963276 - RNA, 19 nt, Artificial Sequence
  Description of Artificial Sequence: Synthetic oligonucleotide
  Sense strand starting at position 2723 of SEQ ID NO: 1880389
gguacaaauucuguuccua

SEQ ID NO: 1963277 - RNA, 19 nt, Artificial Sequence
  Description of Artificial Sequence: Synthetic oligonucleotide
  Antisense strand to SEQ ID NO: 1963276
uaggaacagaauuuguacc

SEQ ID NO: 1963278 - RNA, 19 nt, Artificial Sequence
  Description of Artificial Sequence: Synthetic oligonucleotide
  Sense strand starting at position 2727 of SEQ ID NO: 1880389
caaauucuguuccuaggga

SEQ ID NO: 1963279 - RNA, 19 nt, Artificial Sequence
  Description of Artificial Sequence: Synthetic oligonucleotide
  Antisense strand to SEQ ID NO: 1963278
ucccuaggaacagaauuug

SEQ ID NO: 1963280 - RNA, 19 nt, Artificial Sequence
  Description of Artificial Sequence: Synthetic oligonucleotide
  Sense strand starting at position 2761 of SEQ ID NO: 1880389
cugggacuuugauucuaac

SEQ ID NO: 1963281 - RNA, 19 nt, Artificial Sequence
  Description of Artificial Sequence: Synthetic oligonucleotide
  Antisense strand to SEQ ID NO: 1963280
guuagaaucaaagucccag

SEQ ID NO: 1963282 - RNA, 19 nt, Artificial Sequence
  Description of Artificial Sequence: Synthetic oligonucleotide
  Sense strand starting at position 2823 of SEQ ID NO: 1880389
ggcugacgcccugucuuua

SEQ ID NO: 1963283 - RNA, 19 nt, Artificial Sequence
  Description of Artificial Sequence: Synthetic oligonucleotide
  Antisense strand to SEQ ID NO: 1963282
uaaagacagggcgucagcc

SEQ ID NO: 1963284 - RNA, 19 nt, Artificial Sequence
  Description of Artificial Sequence: Synthetic oligonucleotide
  Sense strand starting at position 65 of SEQ ID NO: 1880386
cagccaaauuaguuuccga

SEQ ID NO: 1963285 - RNA, 19 nt, Artificial Sequence
  Description of Artificial Sequence: Synthetic oligonucleotide
  Antisense strand to SEQ ID NO: 1963284
ucggaaacuaauuuggcug

SEQ ID NO: 1963286 - RNA, 19 nt, Artificial Sequence
  Description of Artificial Sequence: Synthetic oligonucleotide
  Sense strand starting at position 119 of SEQ ID NO: 1880386
uucgaauuucuauguguua

SEQ ID NO: 1963287 - RNA, 19 nt, Artificial Sequence
  Description of Artificial Sequence: Synthetic oligonucleotide
  Antisense strand to SEQ ID NO: 1963286
uaacacauagaaauucgaa

SEQ ID NO: 1963288 - RNA, 19 nt, Artificial Sequence
  Description of Artificial Sequence: Synthetic oligonucleotide
  Sense strand starting at position 120 of SEQ ID NO: 1880386
ucgaauuucuauguguuag

SEQ ID NO: 1963289 - RNA, 19 nt, Artificial Sequence
  Description of Artificial Sequence: Synthetic oligonucleotide
  Antisense strand to SEQ ID NO: 1963288
cuaacacauagaaauucga

SEQ ID NO: 1963290 - RNA, 19 nt, Artificial Sequence
  Description of Artificial Sequence: Synthetic oligonucleotide
  Sense strand starting at position 121 of SEQ ID NO: 1880386
cgaauuucuauguguuagg

SEQ ID NO: 1963291 - RNA, 19 nt, Artificial Sequence
  Description of Artificial Sequence: Synthetic oligonucleotide
  Antisense strand to SEQ ID NO: 1963290
ccuaacacauagaaauucg

SEQ ID NO: 1963292 - RNA, 19 nt, Artificial Sequence
  Description of Artificial Sequence: Synthetic oligonucleotide
  Sense strand starting at position 130 of SEQ ID NO: 1880386
auguguuaggaguauuaaa

SEQ ID NO: 1963293 - RNA, 19 nt, Artificial Sequence
  Description of Artificial Sequence: Synthetic oligonucleotide
  Antisense strand to SEQ ID NO: 1963292
uuuaauacuccuaacacau

SEQ ID NO: 1963294 - RNA, 19 nt, Artificial Sequence
  Description of Artificial Sequence: Synthetic oligonucleotide
  Sense strand starting at position 448 of SEQ ID NO: 1880386
uccugagaauuagcugaaa

SEQ ID NO: 1963295 - RNA, 19 nt, Artificial Sequence
  Description of Artificial Sequence: Synthetic oligonucleotide
  Antisense strand to SEQ ID NO: 1963294
uuucagcuaauucucagga

SEQ ID NO: 1963296 - RNA, 19 nt, Artificial Sequence
  Description of Artificial Sequence: Synthetic oligonucleotide
  Sense strand starting at position 459 of SEQ ID NO: 1880386
agcugaaacuucccucuga

SEQ ID NO: 1963297 - RNA, 19 nt, Artificial Sequence
  Description of Artificial Sequence: Synthetic oligonucleotide
  Antisense strand to SEQ ID NO: 1963296
ucagagggaaguuucagcu

SEQ ID NO: 1963298 - RNA, 19 nt, Artificial Sequence
  Description of Artificial Sequence: Synthetic oligonucleotide
  Sense strand starting at position 473 of SEQ ID NO: 1880386
ucugaagucaaguagugaa

SEQ ID NO: 1963299 - RNA, 19 nt, Artificial Sequence
  Description of Artificial Sequence: Synthetic oligonucleotide
  Antisense strand to SEQ ID NO: 1963298
uucacuacuugacuucaga

SEQ ID NO: 1963300 - RNA, 19 nt, Artificial Sequence
  Description of Artificial Sequence: Synthetic oligonucleotide
  Sense strand starting at position 483 of SEQ ID NO: 1880386
aguagugaaucuguuauag

SEQ ID NO: 1963301 - RNA, 19 nt, Artificial Sequence
  Description of Artificial Sequence: Synthetic oligonucleotide
  Antisense strand to SEQ ID NO: 1963300
cuauaacagauucacuacu

SEQ ID NO: 1963302 - RNA, 19 nt, Artificial Sequence
  Description of Artificial Sequence: Synthetic oligonucleotide
  Sense strand starting at position 524 of SEQ ID NO: 1880386
cugggaguucuuggcauua

SEQ ID NO: 1963303 - RNA, 19 nt, Artificial Sequence
  Description of Artificial Sequence: Synthetic oligonucleotide
  Antisense strand to SEQ ID NO: 1963302
uaaugccaagaacucccag

SEQ ID NO: 1963304 - RNA, 19 nt, Artificial Sequence
  Description of Artificial Sequence: Synthetic oligonucleotide
  Sense strand starting at position 583 of SEQ ID NO: 1880386
agaacagaaguuugugagu

SEQ ID NO: 1963305 - RNA, 19 nt, Artificial Sequence
  Description of Artificial Sequence: Synthetic oligonucleotide
  Antisense strand to SEQ ID NO: 1963304
acucacaaacuucuguucu

SEQ ID NO: 1963306 - RNA, 19 nt, Artificial Sequence
  Description of Artificial Sequence: Synthetic oligonucleotide
  Sense strand starting at position 588 of SEQ ID NO: 1880386
agaaguuugugaguaggca

SEQ ID NO: 1963307 - RNA, 19 nt, Artificial Sequence
  Description of Artificial Sequence: Synthetic oligonucleotide
  Antisense strand to SEQ ID NO: 1963306
ugccuacucacaaacuucu

SEQ ID NO: 1963308 - RNA, 19 nt, Artificial Sequence
  Description of Artificial Sequence: Synthetic oligonucleotide
  Sense strand starting at position 638 of SEQ ID NO: 1880386
ggacuauggccugaucacu

SEQ ID NO: 1963309 - RNA, 19 nt, Artificial Sequence
  Description of Artificial Sequence: Synthetic oligonucleotide
  Antisense strand to SEQ ID NO: 1963308
agugaucaggccauagucc

SEQ ID NO: 1963310 - RNA, 19 nt, Artificial Sequence
  Description of Artificial Sequence: Synthetic oligonucleotide
  Sense strand starting at position 666 of SEQ ID NO: 1880386
ugcaacuucccagaguaua

SEQ ID NO: 1963311 - RNA, 19 nt, Artificial Sequence
  Description of Artificial Sequence: Synthetic oligonucleotide
  Antisense strand to SEQ ID NO: 1963310
uauacucugggaaguugca

SEQ ID NO: 1963312 - RNA, 19 nt, Artificial Sequence
  Description of Artificial Sequence: Synthetic oligonucleotide
  Sense strand starting at position 777 of SEQ ID NO: 1880386
gagggcugguucuuagauc

SEQ ID NO: 1963313 - RNA, 19 nt, Artificial Sequence
  Description of Artificial Sequence: Synthetic oligonucleotide
  Antisense strand to SEQ ID NO: 1963312
gaucuaagaaccagcccuc

SEQ ID NO: 1963314 - RNA, 19 nt, Artificial Sequence
  Description of Artificial Sequence: Synthetic oligonucleotide
  Sense strand starting at position 1304 of SEQ ID NO: 1880386
agccaagucagacgaauau

SEQ ID NO: 1963315 - RNA, 19 nt, Artificial Sequence
  Description of Artificial Sequence: Synthetic oligonucleotide
  Antisense strand to SEQ ID NO: 1963314
auauucgucugacuuggcu

SEQ ID NO: 1963316 - RNA, 19 nt, Artificial Sequence
  Description of Artificial Sequence: Synthetic oligonucleotide
  Sense strand starting at position 1364 of SEQ ID NO: 1880386
aucuguaaggcaggaguua

SEQ ID NO: 1963317 - RNA, 19 nt, Artificial Sequence
  Description of Artificial Sequence: Synthetic oligonucleotide
  Antisense strand to SEQ ID NO: 1963316
uaacuccugccuuacagau

SEQ ID NO: 1963318 - RNA, 19 nt, Artificial Sequence
  Description of Artificial Sequence: Synthetic oligonucleotide
  Sense strand starting at position 1376 of SEQ ID NO: 1880386
ggaguuacugcaugagucu

SEQ ID NO: 1963319 - RNA, 19 nt, Artificial Sequence
  Description of Artificial Sequence: Synthetic oligonucleotide
  Antisense strand to SEQ ID NO: 1963318
agacucaugcaguaacucc

SEQ ID NO: 1963320 - RNA, 19 nt, Artificial Sequence
  Description of Artificial Sequence: Synthetic oligonucleotide
  Sense strand starting at position 1377 of SEQ ID NO: 1880386
gaguuacugcaugagucuu

SEQ ID NO: 1963321 - RNA, 19 nt, Artificial Sequence
  Description of Artificial Sequence: Synthetic oligonucleotide
  Antisense strand to SEQ ID NO: 1963320
aagacucaugcaguaacuc

SEQ ID NO: 1963322 - RNA, 19 nt, Artificial Sequence
  Description of Artificial Sequence: Synthetic oligonucleotide
  Sense strand starting at position 1389 of SEQ ID NO: 1880386
gagucuuucuguccuagau

SEQ ID NO: 1963323 - RNA, 19 nt, Artificial Sequence
  Description of Artificial Sequence: Synthetic oligonucleotide
  Antisense strand to SEQ ID NO: 1963322
aucuaggacagaaagacuc

SEQ ID NO: 1963324 - RNA, 19 nt, Artificial Sequence
  Description of Artificial Sequence: Synthetic oligonucleotide
  Sense strand starting at position 1399 of SEQ ID NO: 1880386
guccuagaucuugggcaaa

SEQ ID NO: 1963325 - RNA, 19 nt, Artificial Sequence
  Description of Artificial Sequence: Synthetic oligonucleotide
  Antisense strand to SEQ ID NO: 1963324
uuugcccaagaucuaggac

SEQ ID NO: 1963326 - RNA, 19 nt, Artificial Sequence
  Description of Artificial Sequence: Synthetic oligonucleotide
  Sense strand starting at position 1432 of SEQ ID NO: 1880386
uccuauagcuagucuggau

SEQ ID NO: 1963327 - RNA, 19 nt, Artificial Sequence
  Description of Artificial Sequence: Synthetic oligonucleotide
  Antisense strand to SEQ ID NO: 1963326
auccagacuagcuauagga

SEQ ID NO: 1963328 - RNA, 19 nt, Artificial Sequence
  Description of Artificial Sequence: Synthetic oligonucleotide
  Sense strand starting at position 1436 of SEQ ID NO: 1880386
auagcuagucuggauuauu

SEQ ID NO: 1963329 - RNA, 19 nt, Artificial Sequence
  Description of Artificial Sequence: Synthetic oligonucleotide
  Antisense strand to SEQ ID NO: 1963328
aauaauccagacuagcuau

SEQ ID NO: 1963330 - RNA, 19 nt, Artificial Sequence
  Description of Artificial Sequence: Synthetic oligonucleotide
  Sense strand starting at position 1549 of SEQ ID NO: 1880386
cauggagagcucugguaca

SEQ ID NO: 1963331 - RNA, 19 nt, Artificial Sequence
  Description of Artificial Sequence: Synthetic oligonucleotide
  Antisense strand to SEQ ID NO: 1963330
uguaccagagcucuccaug

SEQ ID NO: 1963332 - RNA, 19 nt, Artificial Sequence
  Description of Artificial Sequence: Synthetic oligonucleotide
  Sense strand starting at position 2123 of SEQ ID NO: 1880386
cggugaguuaaucacccua

SEQ ID NO: 1963333 - RNA, 19 nt, Artificial Sequence
  Description of Artificial Sequence: Synthetic oligonucleotide
  Antisense strand to SEQ ID NO: 1963332
uagggugauuaacucaccg

SEQ ID NO: 1963334 - RNA, 19 nt, Artificial Sequence
  Description of Artificial Sequence: Synthetic oligonucleotide
  Sense strand starting at position 2235 of SEQ ID NO: 1880386
aggagagguuaguucuauu

SEQ ID NO: 1963335 - RNA, 19 nt, Artificial Sequence
  Description of Artificial Sequence: Synthetic oligonucleotide
  Antisense strand to SEQ ID NO: 1963334
aauagaacuaaccucuccu

SEQ ID NO: 1963336 - RNA, 19 nt, Artificial Sequence
  Description of Artificial Sequence: Synthetic oligonucleotide
  Sense strand starting at position 2940 of SEQ ID NO: 1880386
ccguucuuuccgguguauu

SEQ ID NO: 1963337 - RNA, 19 nt, Artificial Sequence
  Description of Artificial Sequence: Synthetic oligonucleotide
  Antisense strand to SEQ ID NO: 1963336
aauacaccggaaagaacgg

SEQ ID NO: 1963338 - RNA, 19 nt, Artificial Sequence
  Description of Artificial Sequence: Synthetic oligonucleotide
  Sense strand starting at position 2982 of SEQ ID NO: 1880386
acaguaagugucugagggu

SEQ ID NO: 1963339 - RNA, 19 nt, Artificial Sequence
  Description of Artificial Sequence: Synthetic oligonucleotide
  Antisense strand to SEQ ID NO: 1963338
acccucagacacuuacugu

SEQ ID NO: 1963340 - RNA, 19 nt, Artificial Sequence
  Description of Artificial Sequence: Synthetic oligonucleotide
  Sense strand starting at position 2995 of SEQ ID NO: 1880386
gaggguagucacuagcauu

SEQ ID NO: 1963341 - RNA, 19 nt, Artificial Sequence
  Description of Artificial Sequence: Synthetic oligonucleotide
  Antisense strand to SEQ ID NO: 1963340
aaugcuagugacuacccuc

SEQ ID NO: 1963342 - RNA, 19 nt, Artificial Sequence
  Description of Artificial Sequence: Synthetic oligonucleotide
  Sense strand starting at position 3030 of SEQ ID NO: 1880386
ggaggguuugguggaguua

SEQ ID NO: 1963343 - RNA, 19 nt, Artificial Sequence
  Description of Artificial Sequence: Synthetic oligonucleotide
  Antisense strand to SEQ ID NO: 1963342
uaacuccaccaaacccucc

SEQ ID NO: 1963344 - RNA, 19 nt, Artificial Sequence
  Description of Artificial Sequence: Synthetic oligonucleotide
  Sense strand starting at position 3039 of SEQ ID NO: 1880386
gguggaguuaguggugaag

SEQ ID NO: 1963345 - RNA, 19 nt, Artificial Sequence
  Description of Artificial Sequence: Synthetic oligonucleotide
  Antisense strand to SEQ ID NO: 1963344
cuucaccacuaacuccacc

SEQ ID NO: 1963346 - RNA, 19 nt, Artificial Sequence
  Description of Artificial Sequence: Synthetic oligonucleotide
  Sense strand starting at position 3042 of SEQ ID NO: 1880386
ggaguuaguggugaagcau

SEQ ID NO: 1963347 - RNA, 19 nt, Artificial Sequence
  Description of Artificial Sequence: Synthetic oligonucleotide
  Antisense strand to SEQ ID NO: 1963346
augcuucaccacuaacucc

SEQ ID NO: 1963348 - RNA, 19 nt, Artificial Sequence
  Description of Artificial Sequence: Synthetic oligonucleotide
  Sense strand starting at position 3270 of SEQ ID NO: 1880386
ucauccucuuggguggaaa

SEQ ID NO: 1963349 - RNA, 19 nt, Artificial Sequence
  Description of Artificial Sequence: Synthetic oligonucleotide
  Antisense strand to SEQ ID NO: 1963348
uuuccacccaagaggauga

SEQ ID NO: 1963350 - RNA, 19 nt, Artificial Sequence
  Description of Artificial Sequence: Synthetic oligonucleotide
  Sense strand starting at position 3366 of SEQ ID NO: 1880386
uccugaacucacugagcaa

SEQ ID NO: 1963351 - RNA, 19 nt, Artificial Sequence
  Description of Artificial Sequence: Synthetic oligonucleotide
  Antisense strand to SEQ ID NO: 1963350
uugcucagugaguucagga

SEQ ID NO: 1963352 - RNA, 19 nt, Artificial Sequence
  Description of Artificial Sequence: Synthetic oligonucleotide
  Sense strand starting at position 3369 of SEQ ID NO: 1880386
ugaacucacugagcaauga

SEQ ID NO: 1963353 - RNA, 19 nt, Artificial Sequence
  Description of Artificial Sequence: Synthetic oligonucleotide
  Antisense strand to SEQ ID NO: 1963352
ucauugcucagugaguuca

SEQ ID NO: 1963354 - RNA, 19 nt, Artificial Sequence
  Description of Artificial Sequence: Synthetic oligonucleotide
  Sense strand starting at position 3373 of SEQ ID NO: 1880386
cucacugagcaaugaaacu

SEQ ID NO: 1963355 - RNA, 19 nt, Artificial Sequence
  Description of Artificial Sequence: Synthetic oligonucleotide
  Antisense strand to SEQ ID NO: 1963354
aguuucauugcucagugag

SEQ ID NO: 1963356 - RNA, 19 nt, Artificial Sequence
  Description of Artificial Sequence: Synthetic oligonucleotide
  Sense strand starting at position 3440 of SEQ ID NO: 1880386
accaauuucuagugaacag

SEQ ID NO: 1963357 - RNA, 19 nt, Artificial Sequence
  Description of Artificial Sequence: Synthetic oligonucleotide
  Antisense strand to SEQ ID NO: 1963356
cuguucacuagaaauuggu

SEQ ID NO: 1963358 - RNA, 19 nt, Artificial Sequence
  Description of Artificial Sequence: Synthetic oligonucleotide
  Sense strand starting at position 3570 of SEQ ID NO: 1880386
auaacagagguguggucaa

SEQ ID NO: 1963359 - RNA, 19 nt, Artificial Sequence
  Description of Artificial Sequence: Synthetic oligonucleotide
  Antisense strand to SEQ ID NO: 1963358
uugaccacaccucuguuau

SEQ ID NO: 1963360 - RNA, 19 nt, Artificial Sequence
  Description of Artificial Sequence: Synthetic oligonucleotide
  Sense strand starting at position 3849 of SEQ ID NO: 1880386
uggaccuacucucuagaga

SEQ ID NO: 1963361 - RNA, 19 nt, Artificial Sequence
  Description of Artificial Sequence: Synthetic oligonucleotide
  Antisense strand to SEQ ID NO: 1963360
ucucuagagaguaggucca

SEQ ID NO: 1963362 - RNA, 19 nt, Artificial Sequence
  Description of Artificial Sequence: Synthetic oligonucleotide
  Sense strand starting at position 3935 of SEQ ID NO: 1880386
cugugucugauuggagaaa

SEQ ID NO: 1963363 - RNA, 19 nt, Artificial Sequence
  Description of Artificial Sequence: Synthetic oligonucleotide
  Antisense strand to SEQ ID NO: 1963362
uuucuccaaucagacacag

SEQ ID NO: 1963364 - RNA, 19 nt, Artificial Sequence
  Description of Artificial Sequence: Synthetic oligonucleotide
  Sense strand starting at position 304 of SEQ ID NO: 1880388
gaccuuaucugacuggcua

SEQ ID NO: 1963365 - RNA, 19 nt, Artificial Sequence
  Description of Artificial Sequence: Synthetic oligonucleotide
  Antisense strand to SEQ ID NO: 1963364
uagccagucagauaagguc

SEQ ID NO: 1963366 - RNA, 19 nt, Artificial Sequence
  Description of Artificial Sequence: Synthetic oligonucleotide
  Sense strand starting at position 305 of SEQ ID NO: 1880388
accuuaucugacuggcuau

SEQ ID NO: 1963367 - RNA, 19 nt, Artificial Sequence
  Description of Artificial Sequence: Synthetic oligonucleotide
  Antisense strand to SEQ ID NO: 1963366
auagccagucagauaaggu

SEQ ID NO: 1963368 - RNA, 19 nt, Artificial Sequence
  Description of Artificial Sequence: Synthetic oligonucleotide
  Sense strand starting at position 519 of SEQ ID NO: 1880388
guccaucaguaguccacau

SEQ ID NO: 1963369 - RNA, 19 nt, Artificial Sequence
  Description of Artificial Sequence: Synthetic oligonucleotide
  Antisense strand to SEQ ID NO: 1963368
auguggacuacugauggac

SEQ ID NO: 1963370 - RNA, 19 nt, Artificial Sequence
  Description of Artificial Sequence: Synthetic oligonucleotide
  Sense strand starting at position 595 of SEQ ID NO: 1880388
ggcugugauggcgccuauu

SEQ ID NO: 1963371 - RNA, 19 nt, Artificial Sequence
  Description of Artificial Sequence: Synthetic oligonucleotide
  Antisense strand to SEQ ID NO: 1963370
aauaggcgccaucacagcc

SEQ ID NO: 1963372 - RNA, 19 nt, Artificial Sequence
  Description of Artificial Sequence: Synthetic oligonucleotide
  Sense strand starting at position 597 of SEQ ID NO: 1880388
cugugauggcgccuauucu

SEQ ID NO: 1963373 - RNA, 19 nt, Artificial Sequence
  Description of Artificial Sequence: Synthetic oligonucleotide
  Antisense strand to SEQ ID NO: 1963372
agaauaggcgccaucacag

SEQ ID NO: 1963374 - RNA, 19 nt, Artificial Sequence
  Description of Artificial Sequence: Synthetic oligonucleotide
  Sense strand starting at position 620 of SEQ ID NO: 1880388
acuuccucagaguggaaau

SEQ ID NO: 1963375 - RNA, 19 nt, Artificial Sequence
  Description of Artificial Sequence: Synthetic oligonucleotide
  Antisense strand to SEQ ID NO: 1963374
auuuccacucugaggaagu

SEQ ID NO: 1963376 - RNA, 19 nt, Artificial Sequence
  Description of Artificial Sequence: Synthetic oligonucleotide
  Sense strand starting at position 630 of SEQ ID NO: 1880388
aguggaaauuuaggcaaca

SEQ ID NO: 1963377 - RNA, 19 nt, Artificial Sequence
  Description of Artificial Sequence: Synthetic oligonucleotide
  Antisense strand to SEQ ID NO: 1963376
uguugccuaaauuuccacu

SEQ ID NO: 1963378 - RNA, 19 nt, Artificial Sequence
  Description of Artificial Sequence: Synthetic oligonucleotide
  Sense strand starting at position 712 of SEQ ID NO: 1880388
uaacuuagaggcuguaaua

SEQ ID NO: 1963379 - RNA, 19 nt, Artificial Sequence
  Description of Artificial Sequence: Synthetic oligonucleotide
  Antisense strand to SEQ ID NO: 1963378
uauuacagccucuaaguua

SEQ ID NO: 1963380 - RNA, 19 nt, Artificial Sequence
  Description of Artificial Sequence: Synthetic oligonucleotide
  Sense strand starting at position 722 of SEQ ID NO: 1880388
gcuguaauagauuaacuuu

SEQ ID NO: 1963381 - RNA, 19 nt, Artificial Sequence
  Description of Artificial Sequence: Synthetic oligonucleotide
  Antisense strand to SEQ ID NO: 1963380
aaaguuaaucuauuacagc

SEQ ID NO: 1963382 - RNA, 19 nt, Artificial Sequence
  Description of Artificial Sequence: Synthetic oligonucleotide
  Sense strand starting at position 752 of SEQ ID NO: 1880388
ugauauaagcucugaguag

SEQ ID NO: 1963383 - RNA, 19 nt, Artificial Sequence
  Description of Artificial Sequence: Synthetic oligonucleotide
  Antisense strand to SEQ ID NO: 1963382
cuacucagagcuuauauca

SEQ ID NO: 1963384 - RNA, 19 nt, Artificial Sequence
  Description of Artificial Sequence: Synthetic oligonucleotide
  Sense strand starting at position 764 of SEQ ID NO: 1880388
ugaguagacucuuuagagu

SEQ ID NO: 1963385 - RNA, 19 nt, Artificial Sequence
  Description of Artificial Sequence: Synthetic oligonucleotide
  Antisense strand to SEQ ID NO: 1963384
acucuaaagagucuacuca

SEQ ID NO: 1963386 - RNA, 19 nt, Artificial Sequence
  Description of Artificial Sequence: Synthetic oligonucleotide
  Sense strand starting at position 819 of SEQ ID NO: 1880388
ucauaacuacuguguguaa

SEQ ID NO: 1963387 - RNA, 19 nt, Artificial Sequence
  Description of Artificial Sequence: Synthetic oligonucleotide
  Antisense strand to SEQ ID NO: 1963386
uuacacacaguaguuauga

SEQ ID NO: 1963388 - RNA, 19 nt, Artificial Sequence
  Description of Artificial Sequence: Synthetic oligonucleotide
  Sense strand starting at position 821 of SEQ ID NO: 1880388
auaacuacuguguguaaau

SEQ ID NO: 1963389 - RNA, 19 nt, Artificial Sequence
  Description of Artificial Sequence: Synthetic oligonucleotide
  Antisense strand to SEQ ID NO: 1963388
auuuacacacaguaguuau

SEQ ID NO: 1963390 - RNA, 19 nt, Artificial Sequence
  Description of Artificial Sequence: Synthetic oligonucleotide
  Sense strand starting at position 830 of SEQ ID NO: 1880388
guguguaaauaaccucuau

SEQ ID NO: 1963391 - RNA, 19 nt, Artificial Sequence
  Description of Artificial Sequence: Synthetic oligonucleotide
  Antisense strand to SEQ ID NO: 1963390
auagagguuauuuacacac

SEQ ID NO: 1963392 - RNA, 19 nt, Artificial Sequence
  Description of Artificial Sequence: Synthetic oligonucleotide
  Sense strand starting at position 914 of SEQ ID NO: 1880388
guuggaaaguuugucaaug

SEQ ID NO: 1963393 - RNA, 19 nt, Artificial Sequence
  Description of Artificial Sequence: Synthetic oligonucleotide
  Antisense strand to SEQ ID NO: 1963392
cauugacaaacuuuccaac

SEQ ID NO: 1963394 - RNA, 19 nt, Artificial Sequence
  Description of Artificial Sequence: Synthetic oligonucleotide
  Sense strand starting at position 915 of SEQ ID NO: 1880388
uuggaaaguuugucaaugu

SEQ ID NO: 1963395 - RNA, 19 nt, Artificial Sequence
  Description of Artificial Sequence: Synthetic oligonucleotide
  Antisense strand to SEQ ID NO: 1963394
acauugacaaacuuuccaa

SEQ ID NO: 1963396 - RNA, 19 nt, Artificial Sequence
  Description of Artificial Sequence: Synthetic oligonucleotide
  Sense strand starting at position 919 of SEQ ID NO: 1880388
aaaguuugucaauguaaag

SEQ ID NO: 1963397 - RNA, 19 nt, Artificial Sequence
  Description of Artificial Sequence: Synthetic oligonucleotide
  Antisense strand to SEQ ID NO: 1963396
cuuuacauugacaaacuuu

SEQ ID NO: 1963398 - RNA, 19 nt, Artificial Sequence
  Description of Artificial Sequence: Synthetic oligonucleotide
  Sense strand starting at position 1040 of SEQ ID NO: 1880388
acgugagcccauuaacauu

SEQ ID NO: 1963399 - RNA, 19 nt, Artificial Sequence
  Description of Artificial Sequence: Synthetic oligonucleotide
  Antisense strand to SEQ ID NO: 1963398
aauguuaaugggcucacgu

SEQ ID NO: 1963400 - RNA, 19 nt, Artificial Sequence
  Description of Artificial Sequence: Synthetic oligonucleotide
  Sense strand starting at position 1088 of SEQ ID NO: 1880388
cgaugcagcacuuaucuga

SEQ ID NO: 1963401 - RNA, 19 nt, Artificial Sequence
  Description of Artificial Sequence: Synthetic oligonucleotide
  Antisense strand to SEQ ID NO: 1963400
ucagauaagugcugcaucg

SEQ ID NO: 1963402 - RNA, 19 nt, Artificial Sequence
  Description of Artificial Sequence: Synthetic oligonucleotide
  Sense strand starting at position 1092 of SEQ ID NO: 1880388
gcagcacuuaucugaugga

SEQ ID NO: 1963403 - RNA, 19 nt, Artificial Sequence
  Description of Artificial Sequence: Synthetic oligonucleotide
  Antisense strand to SEQ ID NO: 1963402
uccaucagauaagugcugc

SEQ ID NO: 1963404 - RNA, 19 nt, Artificial Sequence
  Description of Artificial Sequence: Synthetic oligonucleotide
  Sense strand starting at position 1123 of SEQ ID NO: 1880388
auugcuucgagguacaagu

SEQ ID NO: 1963405 - RNA, 19 nt, Artificial Sequence
  Description of Artificial Sequence: Synthetic oligonucleotide
  Antisense strand to SEQ ID NO: 1963404
acuuguaccucgaagcaau

SEQ ID NO: 1963406 - RNA, 19 nt, Artificial Sequence
  Description of Artificial Sequence: Synthetic oligonucleotide
  Sense strand starting at position 1193 of SEQ ID NO: 1880388
cagacaagcuccucaguga

SEQ ID NO: 1963407 - RNA, 19 nt, Artificial Sequence
  Description of Artificial Sequence: Synthetic oligonucleotide
  Antisense strand to SEQ ID NO: 1963406
ucacugaggagcuugucug

SEQ ID NO: 1963408 - RNA, 19 nt, Artificial Sequence
  Description of Artificial Sequence: Synthetic oligonucleotide
  Sense strand starting at position 1194 of SEQ ID NO: 1880388
agacaagcuccucagugaa

SEQ ID NO: 1963409 - RNA, 19 nt, Artificial Sequence
  Description of Artificial Sequence: Synthetic oligonucleotide
  Antisense strand to SEQ ID NO: 1963408
uucacugaggagcuugucu

SEQ ID NO: 1963410 - RNA, 19 nt, Artificial Sequence
  Description of Artificial Sequence: Synthetic oligonucleotide
  Sense strand starting at position 1237 of SEQ ID NO: 1880388
gccagucucccagaaagga

SEQ ID NO: 1963411 - RNA, 19 nt, Artificial Sequence
  Description of Artificial Sequence: Synthetic oligonucleotide
  Antisense strand to SEQ ID NO: 1963410
uccuuucugggagacuggc

SEQ ID NO: 1963412 - RNA, 19 nt, Artificial Sequence
  Description of Artificial Sequence: Synthetic oligonucleotide
  Sense strand starting at position 1254 of SEQ ID NO: 1880388
gagcauaaggaguguucca

SEQ ID NO: 1963413 - RNA, 19 nt, Artificial Sequence
  Description of Artificial Sequence: Synthetic oligonucleotide
  Antisense strand to SEQ ID NO: 1963412
uggaacacuccuuaugcuc

SEQ ID NO: 1963414 - RNA, 19 nt, Artificial Sequence
  Description of Artificial Sequence: Synthetic oligonucleotide
  Sense strand starting at position 1393 of SEQ ID NO: 1880388
cacaaauugcgagggauag

SEQ ID NO: 1963415 - RNA, 19 nt, Artificial Sequence
  Description of Artificial Sequence: Synthetic oligonucleotide
  Antisense strand to SEQ ID NO: 1963414
cuaucccucgcaauuugug

SEQ ID NO: 1963416 - RNA, 19 nt, Artificial Sequence
  Description of Artificial Sequence: Synthetic oligonucleotide
  Sense strand starting at position 1394 of SEQ ID NO: 1880388
acaaauugcgagggauaga

SEQ ID NO: 1963417 - RNA, 19 nt, Artificial Sequence
  Description of Artificial Sequence: Synthetic oligonucleotide
  Antisense strand to SEQ ID NO: 1963416
ucuaucccucgcaauuugu

SEQ ID NO: 1963418 - RNA, 19 nt, Artificial Sequence
  Description of Artificial Sequence: Synthetic oligonucleotide
  Sense strand starting at position 1553 of SEQ ID NO: 1880388
cugcucuagguuuagaaga

SEQ ID NO: 1963419 - RNA, 19 nt, Artificial Sequence
  Description of Artificial Sequence: Synthetic oligonucleotide
  Antisense strand to SEQ ID NO: 1963418
ucuucuaaaccuagagcag

SEQ ID NO: 1963420 - RNA, 19 nt, Artificial Sequence
  Description of Artificial Sequence: Synthetic oligonucleotide
  Sense strand starting at position 2869 of SEQ ID NO: 1880388
gccucuaagaaagguaagu

SEQ ID NO: 1963421 - RNA, 19 nt, Artificial Sequence
  Description of Artificial Sequence: Synthetic oligonucleotide
  Antisense strand to SEQ ID NO: 1963420
acuuaccuuucuuagaggc

SEQ ID NO: 1963422 - RNA, 19 nt, Artificial Sequence
  Description of Artificial Sequence: Synthetic oligonucleotide
  Sense strand starting at position 3003 of SEQ ID NO: 1880388
acgcguucccgggcgaauu

SEQ ID NO: 1963423 - RNA, 19 nt, Artificial Sequence
  Description of Artificial Sequence: Synthetic oligonucleotide
  Antisense strand to SEQ ID NO: 1963422
aauucgcccgggaacgcgu

SEQ ID NO: 1963424 - RNA, 19 nt, Artificial Sequence
  Description of Artificial Sequence: Synthetic oligonucleotide
  Sense strand starting at position 3013 of SEQ ID NO: 1880388
gggcgaauuccauggaguc

SEQ ID NO: 1963425 - RNA, 19 nt, Artificial Sequence
  Description of Artificial Sequence: Synthetic oligonucleotide
  Antisense strand to SEQ ID NO: 1963424
gacuccauggaauucgccc

SEQ ID NO: 1963426 - RNA, 19 nt, Artificial Sequence
  Description of Artificial Sequence: Synthetic oligonucleotide
  Sense strand starting at position 3026 of SEQ ID NO: 1880388
ggagucugccucgaguaca

SEQ ID NO: 1963427 - RNA, 19 nt, Artificial Sequence
  Description of Artificial Sequence: Synthetic oligonucleotide
  Antisense strand to SEQ ID NO: 1963426
uguacucgaggcagacucc

SEQ ID NO: 1963428 - RNA, 19 nt, Artificial Sequence
  Description of Artificial Sequence: Synthetic oligonucleotide
  Sense strand starting at position 3029 of SEQ ID NO: 1880388
gucugccucgaguacagau

SEQ ID NO: 1963429 - RNA, 19 nt, Artificial Sequence
  Description of Artificial Sequence: Synthetic oligonucleotide
  Antisense strand to SEQ ID NO: 1963428
aucuguacucgaggcagac

SEQ ID NO: 1963430 - RNA, 19 nt, Artificial Sequence
  Description of Artificial Sequence: Synthetic oligonucleotide
  Sense strand starting at position 3056 of SEQ ID NO: 1880388
ugugccaggcauugagaaa

SEQ ID NO: 1963431 - RNA, 19 nt, Artificial Sequence
  Description of Artificial Sequence: Synthetic oligonucleotide
  Antisense strand to SEQ ID NO: 1963430
uuucucaaugccuggcaca

SEQ ID NO: 1963432 - RNA, 19 nt, Artificial Sequence
  Description of Artificial Sequence: Synthetic oligonucleotide
  Sense strand starting at position 3082 of SEQ ID NO: 1880388
gaaggagcucuccguggaa

SEQ ID NO: 1963433 - RNA, 19 nt, Artificial Sequence
  Description of Artificial Sequence: Synthetic oligonucleotide
  Antisense strand to SEQ ID NO: 1963432
uuccacggagagcuccuuc

SEQ ID NO: 1963434 - RNA, 19 nt, Artificial Sequence
  Description of Artificial Sequence: Synthetic oligonucleotide
  Sense strand starting at position 3097 of SEQ ID NO: 1880388
ggaacuucuccugguacaa

SEQ ID NO: 1963435 - RNA, 19 nt, Artificial Sequence
  Description of Artificial Sequence: Synthetic oligonucleotide
  Antisense strand to SEQ ID NO: 1963434
uuguaccaggagaaguucc

SEQ ID NO: 1963436 - RNA, 19 nt, Artificial Sequence
  Description of Artificial Sequence: Synthetic oligonucleotide
  Sense strand starting at position 3109 of SEQ ID NO: 1880388
gguacaaauucuguuccua

SEQ ID NO: 1963437 - RNA, 19 nt, Artificial Sequence
  Description of Artificial Sequence: Synthetic oligonucleotide
  Antisense strand to SEQ ID NO: 1963436
uaggaacagaauuuguacc

SEQ ID NO: 1963438 - RNA, 19 nt, Artificial Sequence
  Description of Artificial Sequence: Synthetic oligonucleotide
  Sense strand starting at position 3113 of SEQ ID NO: 1880388
caaauucuguuccuaggga

SEQ ID NO: 1963439 - RNA, 19 nt, Artificial Sequence
  Description of Artificial Sequence: Synthetic oligonucleotide
  Antisense strand to SEQ ID NO: 1963438
ucccuaggaacagaauuug

SEQ ID NO: 1963440 - RNA, 19 nt, Artificial Sequence
  Description of Artificial Sequence: Synthetic oligonucleotide
  Sense strand starting at position 3147 of SEQ ID NO: 1880388
cugggacuuugauucuaac

SEQ ID NO: 1963441 - RNA, 19 nt, Artificial Sequence
  Description of Artificial Sequence: Synthetic oligonucleotide
  Antisense strand to SEQ ID NO: 1963440
guuagaaucaaagucccag

SEQ ID NO: 1963442 - RNA, 19 nt, Artificial Sequence
  Description of Artificial Sequence: Synthetic oligonucleotide
  Sense strand starting at position 3209 of SEQ ID NO: 1880388
ggcugacgcccugucuuua

SEQ ID NO: 1963443 - RNA, 19 nt, Artificial Sequence
  Description of Artificial Sequence: Synthetic oligonucleotide
  Antisense strand to SEQ ID NO: 1963442
uaaagacagggcgucagcc

SEQ ID NO: 1963444 - RNA, 19 nt, Artificial Sequence
  Description of Artificial Sequence: Synthetic oligonucleotide
  Sense strand starting at position 36 of SEQ ID NO: 1880387
ggaguugugauaggauaag

SEQ ID NO: 1963445 - RNA, 19 nt, Artificial Sequence
  Description of Artificial Sequence: Synthetic oligonucleotide
  Antisense strand to SEQ ID NO: 1963444
cuuauccuaucacaacucc

SEQ ID NO: 1963446 - RNA, 19 nt, Artificial Sequence
  Description of Artificial Sequence: Synthetic oligonucleotide
  Sense strand starting at position 42 of SEQ ID NO: 1880387
gugauaggauaaguaucau

SEQ ID NO: 1963447 - RNA, 19 nt, Artificial Sequence
  Description of Artificial Sequence: Synthetic oligonucleotide
  Antisense strand to SEQ ID NO: 1963446
augauacuuauccuaucac

SEQ ID NO: 1963448 - RNA, 19 nt, Artificial Sequence
  Description of Artificial Sequence: Synthetic oligonucleotide
  Sense strand starting at position 46 of SEQ ID NO: 1880387
uaggauaaguaucauuuga

SEQ ID NO: 1963449 - RNA, 19 nt, Artificial Sequence
  Description of Artificial Sequence: Synthetic oligonucleotide
  Antisense strand to SEQ ID NO: 1963448
ucaaaugauacuuauccua

SEQ ID NO: 1963450 - RNA, 19 nt, Artificial Sequence
  Description of Artificial Sequence: Synthetic oligonucleotide
  Sense strand starting at position 51 of SEQ ID NO: 1880387
uaaguaucauuugagggaa

SEQ ID NO: 1963451 - RNA, 19 nt, Artificial Sequence
  Description of Artificial Sequence: Synthetic oligonucleotide
  Antisense strand to SEQ ID NO: 1963450
uucccucaaaugauacuua

SEQ ID NO: 1963452 - RNA, 19 nt, Artificial Sequence
  Description of Artificial Sequence: Synthetic oligonucleotide
  Sense strand starting at position 53 of SEQ ID NO: 1880387
aguaucauuugagggaaca

SEQ ID NO: 1963453 - RNA, 19 nt, Artificial Sequence
  Description of Artificial Sequence: Synthetic oligonucleotide
  Antisense strand to SEQ ID NO: 1963452
uguucccucaaaugauacu

SEQ ID NO: 1963454 - RNA, 19 nt, Artificial Sequence
  Description of Artificial Sequence: Synthetic oligonucleotide
  Sense strand starting at position 201 of SEQ ID NO: 1880387
agugaagaaacgugucuac

SEQ ID NO: 1963455 - RNA, 19 nt, Artificial Sequence
  Description of Artificial Sequence: Synthetic oligonucleotide
  Antisense strand to SEQ ID NO: 1963454
guagacacguuucuucacu

SEQ ID NO: 1963456 - RNA, 19 nt, Artificial Sequence
  Description of Artificial Sequence: Synthetic oligonucleotide
  Sense strand starting at position 204 of SEQ ID NO: 1880387
gaagaaacgugucuacauu

SEQ ID NO: 1963457 - RNA, 19 nt, Artificial Sequence
  Description of Artificial Sequence: Synthetic oligonucleotide
  Antisense strand to SEQ ID NO: 1963456
aauguagacacguuucuuc

SEQ ID NO: 1963458 - RNA, 19 nt, Artificial Sequence
  Description of Artificial Sequence: Synthetic oligonucleotide
  Sense strand starting at position 239 of SEQ ID NO: 1880387
ucugaagagcucuaacauu

SEQ ID NO: 1963459 - RNA, 19 nt, Artificial Sequence
  Description of Artificial Sequence: Synthetic oligonucleotide
  Antisense strand to SEQ ID NO: 1963458
aauguuagagcucuucaga

SEQ ID NO: 1963460 - RNA, 19 nt, Artificial Sequence
  Description of Artificial Sequence: Synthetic oligonucleotide
  Sense strand starting at position 607 of SEQ ID NO: 1880387
gaccuuaucugacuggcua

SEQ ID NO: 1963461 - RNA, 19 nt, Artificial Sequence
  Description of Artificial Sequence: Synthetic oligonucleotide
  Antisense strand to SEQ ID NO: 1963460
uagccagucagauaagguc

SEQ ID NO: 1963462 - RNA, 19 nt, Artificial Sequence
  Description of Artificial Sequence: Synthetic oligonucleotide
  Sense strand starting at position 608 of SEQ ID NO: 1880387
accuuaucugacuggcuau

SEQ ID NO: 1963463 - RNA, 19 nt, Artificial Sequence
  Description of Artificial Sequence: Synthetic oligonucleotide
  Antisense strand to SEQ ID NO: 1963462
auagccagucagauaaggu

SEQ ID NO: 1963464 - RNA, 19 nt, Artificial Sequence
  Description of Artificial Sequence: Synthetic oligonucleotide
  Sense strand starting at position 898 of SEQ ID NO: 1880387
ggcugugauggcgccuauu

SEQ ID NO: 1963465 - RNA, 19 nt, Artificial Sequence
  Description of Artificial Sequence: Synthetic oligonucleotide
  Antisense strand to SEQ ID NO: 1963464
aauaggcgccaucacagcc

SEQ ID NO: 1963466 - RNA, 19 nt, Artificial Sequence
  Description of Artificial Sequence: Synthetic oligonucleotide
  Sense strand starting at position 900 of SEQ ID NO: 1880387
cugugauggcgccuauucu

SEQ ID NO: 1963467 - RNA, 19 nt, Artificial Sequence
  Description of Artificial Sequence: Synthetic oligonucleotide
  Antisense strand to SEQ ID NO: 1963466
agaauaggcgccaucacag

SEQ ID NO: 1963468 - RNA, 19 nt, Artificial Sequence
  Description of Artificial Sequence: Synthetic oligonucleotide
  Sense strand starting at position 923 of SEQ ID NO: 1880387
acuuccucagaguggaaau

SEQ ID NO: 1963469 - RNA, 19 nt, Artificial Sequence
  Description of Artificial Sequence: Synthetic oligonucleotide
  Antisense strand to SEQ ID NO: 1963468
auuuccacucugaggaagu

SEQ ID NO: 1963470 - RNA, 19 nt, Artificial Sequence
  Description of Artificial Sequence: Synthetic oligonucleotide
  Sense strand starting at position 1015 of SEQ ID NO: 1880387
uaacuuagaggcuguaaua

SEQ ID NO: 1963471 - RNA, 19 nt, Artificial Sequence
  Description of Artificial Sequence: Synthetic oligonucleotide
  Antisense strand to SEQ ID NO: 1963470
uauuacagccucuaaguua

SEQ ID NO: 1963472 - RNA, 19 nt, Artificial Sequence
  Description of Artificial Sequence: Synthetic oligonucleotide
  Sense strand starting at position 1025 of SEQ ID NO: 1880387
gcuguaauagauuaacuuu

SEQ ID NO: 1963473 - RNA, 19 nt, Artificial Sequence
  Description of Artificial Sequence: Synthetic oligonucleotide
  Antisense strand to SEQ ID NO: 1963472
aaaguuaaucuauuacagc

SEQ ID NO: 1963474 - RNA, 19 nt, Artificial Sequence
  Description of Artificial Sequence: Synthetic oligonucleotide
  Sense strand starting at position 1055 of SEQ ID NO: 1880387
ugauauaagcucugaguag

SEQ ID NO: 1963475 - RNA, 19 nt, Artificial Sequence
  Description of Artificial Sequence: Synthetic oligonucleotide
  Antisense strand to SEQ ID NO: 1963474
cuacucagagcuuauauca

SEQ ID NO: 1963476 - RNA, 19 nt, Artificial Sequence
  Description of Artificial Sequence: Synthetic oligonucleotide
  Sense strand starting at position 1067 of SEQ ID NO: 1880387
ugaguagacucuuuagagu

SEQ ID NO: 1963477 - RNA, 19 nt, Artificial Sequence
  Description of Artificial Sequence: Synthetic oligonucleotide
  Antisense strand to SEQ ID NO: 1963476
acucuaaagagucuacuca

SEQ ID NO: 1963478 - RNA, 19 nt, Artificial Sequence
  Description of Artificial Sequence: Synthetic oligonucleotide
  Sense strand starting at position 1124 of SEQ ID NO: 1880387
auaacuacuguguguaaau

SEQ ID NO: 1963479 - RNA, 19 nt, Artificial Sequence
  Description of Artificial Sequence: Synthetic oligonucleotide
  Antisense strand to SEQ ID NO: 1963478
auuuacacacaguaguuau

SEQ ID NO: 1963480 - RNA, 19 nt, Artificial Sequence
  Description of Artificial Sequence: Synthetic oligonucleotide
  Sense strand starting at position 1217 of SEQ ID NO: 1880387
guuggaaaguuugucaaug

SEQ ID NO: 1963481 - RNA, 19 nt, Artificial Sequence
  Description of Artificial Sequence: Synthetic oligonucleotide
  Antisense strand to SEQ ID NO: 1963480
cauugacaaacuuuccaac

SEQ ID NO: 1963482 - RNA, 19 nt, Artificial Sequence
  Description of Artificial Sequence: Synthetic oligonucleotide
  Sense strand starting at position 1218 of SEQ ID NO: 1880387
uuggaaaguuugucaaugu

SEQ ID NO: 1963483 - RNA, 19 nt, Artificial Sequence
  Description of Artificial Sequence: Synthetic oligonucleotide
  Antisense strand to SEQ ID NO: 1963482
acauugacaaacuuuccaa

SEQ ID NO: 1963484 - RNA, 19 nt, Artificial Sequence
  Description of Artificial Sequence: Synthetic oligonucleotide
  Sense strand starting at position 1222 of SEQ ID NO: 1880387
aaaguuugucaauguaaag

SEQ ID NO: 1963485 - RNA, 19 nt, Artificial Sequence
  Description of Artificial Sequence: Synthetic oligonucleotide
  Antisense strand to SEQ ID NO: 1963484
cuuuacauugacaaacuuu

SEQ ID NO: 1963486 - RNA, 19 nt, Artificial Sequence
  Description of Artificial Sequence: Synthetic oligonucleotide
  Sense strand starting at position 1343 of SEQ ID NO: 1880387
acgugagcccauuaacauu

SEQ ID NO: 1963487 - RNA, 19 nt, Artificial Sequence
  Description of Artificial Sequence: Synthetic oligonucleotide
  Antisense strand to SEQ ID NO: 1963486
aauguuaaugggcucacgu

SEQ ID NO: 1963488 - RNA, 19 nt, Artificial Sequence
  Description of Artificial Sequence: Synthetic oligonucleotide
  Sense strand starting at position 1391 of SEQ ID NO: 1880387
cgaugcagcacuuaucuga

SEQ ID NO: 1963489 - RNA, 19 nt, Artificial Sequence
  Description of Artificial Sequence: Synthetic oligonucleotide
  Antisense strand to SEQ ID NO: 1963488
ucagauaagugcugcaucg

SEQ ID NO: 1963490 - RNA, 19 nt, Artificial Sequence
  Description of Artificial Sequence: Synthetic oligonucleotide
  Sense strand starting at position 1395 of SEQ ID NO: 1880387
gcagcacuuaucugaugga

SEQ ID NO: 1963491 - RNA, 19 nt, Artificial Sequence
  Description of Artificial Sequence: Synthetic oligonucleotide
  Antisense strand to SEQ ID NO: 1963490
uccaucagauaagugcugc

SEQ ID NO: 1963492 - RNA, 19 nt, Artificial Sequence
  Description of Artificial Sequence: Synthetic oligonucleotide
  Sense strand starting at position 1496 of SEQ ID NO: 1880387
cagacaagcuccucaguga

SEQ ID NO: 1963493 - RNA, 19 nt, Artificial Sequence
  Description of Artificial Sequence: Synthetic oligonucleotide
  Antisense strand to SEQ ID NO: 1963492
ucacugaggagcuugucug

SEQ ID NO: 1963494 - RNA, 19 nt, Artificial Sequence
  Description of Artificial Sequence: Synthetic oligonucleotide
  Sense strand starting at position 1497 of SEQ ID NO: 1880387
agacaagcuccucagugaa

SEQ ID NO: 1963495 - RNA, 19 nt, Artificial Sequence
  Description of Artificial Sequence: Synthetic oligonucleotide
  Antisense strand to SEQ ID NO: 1963494
uucacugaggagcuugucu

SEQ ID NO: 1963496 - RNA, 19 nt, Artificial Sequence
  Description of Artificial Sequence: Synthetic oligonucleotide
  Sense strand starting at position 1540 of SEQ ID NO: 1880387
gccagucucccagaaagga

SEQ ID NO: 1963497 - RNA, 19 nt, Artificial Sequence
  Description of Artificial Sequence: Synthetic oligonucleotide
  Antisense strand to SEQ ID NO: 1963496
uccuuucugggagacuggc

SEQ ID NO: 1963498 - RNA, 19 nt, Artificial Sequence
  Description of Artificial Sequence: Synthetic oligonucleotide
  Sense strand starting at position 1557 of SEQ ID NO: 1880387
gagcauaaggaguguucca

SEQ ID NO: 1963499 - RNA, 19 nt, Artificial Sequence
  Description of Artificial Sequence: Synthetic oligonucleotide
  Antisense strand to SEQ ID NO: 1963498
uggaacacuccuuaugcuc

SEQ ID NO: 1963500 - RNA, 19 nt, Artificial Sequence
  Description of Artificial Sequence: Synthetic oligonucleotide
  Sense strand starting at position 1696 of SEQ ID NO: 1880387
cacaaauugcgagggauag

SEQ ID NO: 1963501 - RNA, 19 nt, Artificial Sequence
  Description of Artificial Sequence: Synthetic oligonucleotide
  Antisense strand to SEQ ID NO: 1963500
cuaucccucgcaauuugug

SEQ ID NO: 1963502 - RNA, 19 nt, Artificial Sequence
  Description of Artificial Sequence: Synthetic oligonucleotide
  Sense strand starting at position 1697 of SEQ ID NO: 1880387
acaaauugcgagggauaga

SEQ ID NO: 1963503 - RNA, 19 nt, Artificial Sequence
  Description of Artificial Sequence: Synthetic oligonucleotide
  Antisense strand to SEQ ID NO: 1963502
ucuaucccucgcaauuugu

SEQ ID NO: 1963504 - RNA, 19 nt, Artificial Sequence
  Description of Artificial Sequence: Synthetic oligonucleotide
  Sense strand starting at position 1856 of SEQ ID NO: 1880387
cugcucuagguuuagaaga

SEQ ID NO: 1963505 - RNA, 19 nt, Artificial Sequence
  Description of Artificial Sequence: Synthetic oligonucleotide
  Antisense strand to SEQ ID NO: 1963504
ucuucuaaaccuagagcag

SEQ ID NO: 1963506 - RNA, 19 nt, Artificial Sequence
  Description of Artificial Sequence: Synthetic oligonucleotide
  Sense strand starting at position 3172 of SEQ ID NO: 1880387
gccucuaagaaagguaagu

SEQ ID NO: 1963507 - RNA, 19 nt, Artificial Sequence
  Description of Artificial Sequence: Synthetic oligonucleotide
  Antisense strand to SEQ ID NO: 1963506
acuuaccuuucuuagaggc

SEQ ID NO: 1963508 - RNA, 19 nt, Artificial Sequence
  Description of Artificial Sequence: Synthetic oligonucleotide
  Sense strand starting at position 3306 of SEQ ID NO: 1880387
acgcguucccgggcgaauu

SEQ ID NO: 1963509 - RNA, 19 nt, Artificial Sequence
  Description of Artificial Sequence: Synthetic oligonucleotide
  Antisense strand to SEQ ID NO: 1963508
aauucgcccgggaacgcgu

SEQ ID NO: 1963510 - RNA, 19 nt, Artificial Sequence
  Description of Artificial Sequence: Synthetic oligonucleotide
  Sense strand starting at position 3359 of SEQ ID NO: 1880387
ugugccaggcauugagaaa

SEQ ID NO: 1963511 - RNA, 19 nt, Artificial Sequence
  Description of Artificial Sequence: Synthetic oligonucleotide
  Antisense strand to SEQ ID NO: 1963510
uuucucaaugccuggcaca

SEQ ID NO: 1963512 - RNA, 19 nt, Artificial Sequence
  Description of Artificial Sequence: Synthetic oligonucleotide
  Sense strand starting at position 3385 of SEQ ID NO: 1880387
gaaggagcucuccguggaa

SEQ ID NO: 1963513 - RNA, 19 nt, Artificial Sequence
  Description of Artificial Sequence: Synthetic oligonucleotide
  Antisense strand to SEQ ID NO: 1963512
uuccacggagagcuccuuc

SEQ ID NO: 1963514 - RNA, 19 nt, Artificial Sequence
  Description of Artificial Sequence: Synthetic oligonucleotide
  Sense strand starting at position 3400 of SEQ ID NO: 1880387
ggaacuucuccugguacaa

SEQ ID NO: 1963515 - RNA, 19 nt, Artificial Sequence
  Description of Artificial Sequence: Synthetic oligonucleotide
  Antisense strand to SEQ ID NO: 1963514
uuguaccaggagaaguucc

SEQ ID NO: 1963516 - RNA, 19 nt, Artificial Sequence
  Description of Artificial Sequence: Synthetic oligonucleotide
  Sense strand starting at position 3412 of SEQ ID NO: 1880387
gguacaaauucuguuccua

SEQ ID NO: 1963517 - RNA, 19 nt, Artificial Sequence
  Description of Artificial Sequence: Synthetic oligonucleotide
  Antisense strand to SEQ ID NO: 1963516
uaggaacagaauuuguacc

SEQ ID NO: 1963518 - RNA, 19 nt, Artificial Sequence
  Description of Artificial Sequence: Synthetic oligonucleotide
  Sense strand starting at position 3416 of SEQ ID NO: 1880387
caaauucuguuccuaggga

SEQ ID NO: 1963519 - RNA, 19 nt, Artificial Sequence
  Description of Artificial Sequence: Synthetic oligonucleotide
  Antisense strand to SEQ ID NO: 1963518
ucccuaggaacagaauuug

SEQ ID NO: 1963520 - RNA, 19 nt, Artificial Sequence
  Description of Artificial Sequence: Synthetic oligonucleotide
  Sense strand starting at position 3450 of SEQ ID NO: 1880387
cugggacuuugauucuaac

SEQ ID NO: 1963521 - RNA, 19 nt, Artificial Sequence
  Description of Artificial Sequence: Synthetic oligonucleotide
  Antisense strand to SEQ ID NO: 1963520
guuagaaucaaagucccag

SEQ ID NO: 1963522 - RNA, 19 nt, Artificial Sequence
  Description of Artificial Sequence: Synthetic oligonucleotide
  Sense strand starting at position 3512 of SEQ ID NO: 1880387
ggcugacgcccugucuuua

SEQ ID NO: 1963523 - RNA, 19 nt, Artificial Sequence
  Description of Artificial Sequence: Synthetic oligonucleotide
  Antisense strand to SEQ ID NO: 1963522
uaaagacagggcgucagcc

SEQ ID NO: 1963524 - RNA, 19 nt, Artificial Sequence
  Description of Artificial Sequence: Synthetic oligonucleotide
  Sense strand starting at position 333 of SEQ ID NO: 1880390
uucccuucuuggccugaaa

SEQ ID NO: 1963525 - RNA, 19 nt, Artificial Sequence
  Description of Artificial Sequence: Synthetic oligonucleotide
  Antisense strand to SEQ ID NO: 1963524
uuucaggccaagaagggaa

SEQ ID NO: 1963526 - RNA, 19 nt, Artificial Sequence
  Description of Artificial Sequence: Synthetic oligonucleotide
  Sense strand starting at position 451 of SEQ ID NO: 1880390
ugaccacaccucuguuaua

SEQ ID NO: 1963527 - RNA, 19 nt, Artificial Sequence
  Description of Artificial Sequence: Synthetic oligonucleotide
  Antisense strand to SEQ ID NO: 1963526
uauaacagaggugugguca

SEQ ID NO: 1963528 - RNA, 19 nt, Artificial Sequence
  Description of Artificial Sequence: Synthetic oligonucleotide
  Sense strand starting at position 917 of SEQ ID NO: 1880390
gcuggaaccuuguuaggau

SEQ ID NO: 1963529 - RNA, 19 nt, Artificial Sequence
  Description of Artificial Sequence: Synthetic oligonucleotide
  Antisense strand to SEQ ID NO: 1963528
auccuaacaagguuccagc

SEQ ID NO: 1963530 - RNA, 19 nt, Artificial Sequence
  Description of Artificial Sequence: Synthetic oligonucleotide
  Sense strand starting at position 920 of SEQ ID NO: 1880390
ggaaccuuguuaggauuua

SEQ ID NO: 1963531 - RNA, 19 nt, Artificial Sequence
  Description of Artificial Sequence: Synthetic oligonucleotide
  Antisense strand to SEQ ID NO: 1963530
uaaauccuaacaagguucc

SEQ ID NO: 1963532 - RNA, 19 nt, Artificial Sequence
  Description of Artificial Sequence: Synthetic oligonucleotide
  Sense strand starting at position 1028 of SEQ ID NO: 1880390
gcuagugacuacccucaga

SEQ ID NO: 1963533 - RNA, 19 nt, Artificial Sequence
  Description of Artificial Sequence: Synthetic oligonucleotide
  Antisense strand to SEQ ID NO: 1963532
ucugaggguagucacuagc

SEQ ID NO: 1963534 - RNA, 19 nt, Artificial Sequence
  Description of Artificial Sequence: Synthetic oligonucleotide
  Sense strand starting at position 1062 of SEQ ID NO: 1880390
ccuuuaggguguucuuaaa

SEQ ID NO: 1963535 - RNA, 19 nt, Artificial Sequence
  Description of Artificial Sequence: Synthetic oligonucleotide
  Antisense strand to SEQ ID NO: 1963534
uuuaagaacacccuaaagg

SEQ ID NO: 1963536 - RNA, 19 nt, Artificial Sequence
  Description of Artificial Sequence: Synthetic oligonucleotide
  Sense strand starting at position 1111 of SEQ ID NO: 1880390
uggaguguuuccuccacac

SEQ ID NO: 1963537 - RNA, 19 nt, Artificial Sequence
  Description of Artificial Sequence: Synthetic oligonucleotide
  Antisense strand to SEQ ID NO: 1963536
guguggaggaaacacucca

SEQ ID NO: 1963538 - RNA, 19 nt, Artificial Sequence
  Description of Artificial Sequence: Synthetic oligonucleotide
  Sense strand starting at position 1113 of SEQ ID NO: 1880390
gaguguuuccuccacacug

SEQ ID NO: 1963539 - RNA, 19 nt, Artificial Sequence
  Description of Artificial Sequence: Synthetic oligonucleotide
  Antisense strand to SEQ ID NO: 1963538
caguguggaggaaacacuc

SEQ ID NO: 1963540 - RNA, 19 nt, Artificial Sequence
  Description of Artificial Sequence: Synthetic oligonucleotide
  Sense strand starting at position 1115 of SEQ ID NO: 1880390
guguuuccuccacacugga

SEQ ID NO: 1963541 - RNA, 19 nt, Artificial Sequence
  Description of Artificial Sequence: Synthetic oligonucleotide
  Antisense strand to SEQ ID NO: 1963540
uccaguguggaggaaacac

SEQ ID NO: 1963542 - RNA, 19 nt, Artificial Sequence
  Description of Artificial Sequence: Synthetic oligonucleotide
  Sense strand starting at position 1140 of SEQ ID NO: 1880390
ugagucauaucauugugau

SEQ ID NO: 1963543 - RNA, 19 nt, Artificial Sequence
  Description of Artificial Sequence: Synthetic oligonucleotide
  Antisense strand to SEQ ID NO: 1963542
aucacaaugauaugacuca

SEQ ID NO: 1963544 - RNA, 19 nt, Artificial Sequence
  Description of Artificial Sequence: Synthetic oligonucleotide
  Sense strand starting at position 1141 of SEQ ID NO: 1880390
gagucauaucauugugauu

SEQ ID NO: 1963545 - RNA, 19 nt, Artificial Sequence
  Description of Artificial Sequence: Synthetic oligonucleotide
  Antisense strand to SEQ ID NO: 1963544
aaucacaaugauaugacuc

SEQ ID NO: 1963546 - RNA, 19 nt, Artificial Sequence
  Description of Artificial Sequence: Synthetic oligonucleotide
  Sense strand starting at position 1146 of SEQ ID NO: 1880390
auaucauugugauuggugu

SEQ ID NO: 1963547 - RNA, 19 nt, Artificial Sequence
  Description of Artificial Sequence: Synthetic oligonucleotide
  Antisense strand to SEQ ID NO: 1963546
acaccaaucacaaugauau

SEQ ID NO: 1963548 - RNA, 19 nt, Artificial Sequence
  Description of Artificial Sequence: Synthetic oligonucleotide
  Sense strand starting at position 1147 of SEQ ID NO: 1880390
uaucauugugauugguguu

SEQ ID NO: 1963549 - RNA, 19 nt, Artificial Sequence
  Description of Artificial Sequence: Synthetic oligonucleotide
  Antisense strand to SEQ ID NO: 1963548
aacaccaaucacaaugaua

SEQ ID NO: 1963550 - RNA, 19 nt, Artificial Sequence
  Description of Artificial Sequence: Synthetic oligonucleotide
  Sense strand starting at position 2402 of SEQ ID NO: 1880390
ggacauuccuggcccaaca

SEQ ID NO: 1963551 - RNA, 19 nt, Artificial Sequence
  Description of Artificial Sequence: Synthetic oligonucleotide
  Antisense strand to SEQ ID NO: 1963550
uguugggccaggaaugucc

SEQ ID NO: 1963552 - RNA, 19 nt, Artificial Sequence
  Description of Artificial Sequence: Synthetic oligonucleotide
  Sense strand starting at position 2474 of SEQ ID NO: 1880390
accagagcucuccaugaau

SEQ ID NO: 1963553 - RNA, 19 nt, Artificial Sequence
  Description of Artificial Sequence: Synthetic oligonucleotide
  Antisense strand to SEQ ID NO: 1963552
auucauggagagcucuggu

SEQ ID NO: 1963554 - RNA, 19 nt, Artificial Sequence
  Description of Artificial Sequence: Synthetic oligonucleotide
  Sense strand starting at position 2566 of SEQ ID NO: 1880390
guaguauucuuuccuuaaa

SEQ ID NO: 1963555 - RNA, 19 nt, Artificial Sequence
  Description of Artificial Sequence: Synthetic oligonucleotide
  Antisense strand to SEQ ID NO: 1963554
uuuaaggaaagaauacuac

SEQ ID NO: 1963556 - RNA, 19 nt, Artificial Sequence
  Description of Artificial Sequence: Synthetic oligonucleotide
  Sense strand starting at position 2624 of SEQ ID NO: 1880390
gcccaagaucuaggacaga

SEQ ID NO: 1963557 - RNA, 19 nt, Artificial Sequence
  Description of Artificial Sequence: Synthetic oligonucleotide
  Antisense strand to SEQ ID NO: 1963556
ucuguccuagaucuugggc

SEQ ID NO: 1963558 - RNA, 19 nt, Artificial Sequence
  Description of Artificial Sequence: Synthetic oligonucleotide
  Sense strand starting at position 2701 of SEQ ID NO: 1880390
acugcaaaugauuggauau

SEQ ID NO: 1963559 - RNA, 19 nt, Artificial Sequence
  Description of Artificial Sequence: Synthetic oligonucleotide
  Antisense strand to SEQ ID NO: 1963558
auauccaaucauuugcagu

SEQ ID NO: 1963560 - RNA, 19 nt, Artificial Sequence
  Description of Artificial Sequence: Synthetic oligonucleotide
  Sense strand starting at position 2711 of SEQ ID NO: 1880390
auuggauauucgucugacu

SEQ ID NO: 1963561 - RNA, 19 nt, Artificial Sequence
  Description of Artificial Sequence: Synthetic oligonucleotide
  Antisense strand to SEQ ID NO: 1963560
agucagacgaauauccaau

SEQ ID NO: 1963562 - RNA, 19 nt, Artificial Sequence
  Description of Artificial Sequence: Synthetic oligonucleotide
  Sense strand starting at position 2713 of SEQ ID NO: 1880390
uggauauucgucugacuug

SEQ ID NO: 1963563 - RNA, 19 nt, Artificial Sequence
  Description of Artificial Sequence: Synthetic oligonucleotide
  Antisense strand to SEQ ID NO: 1963562
caagucagacgaauaucca

SEQ ID NO: 1963564 - RNA, 19 nt, Artificial Sequence
  Description of Artificial Sequence: Synthetic oligonucleotide
  Sense strand starting at position 2738 of SEQ ID NO: 1880390
cccuaauguguggaacuaa

SEQ ID NO: 1963565 - RNA, 19 nt, Artificial Sequence
  Description of Artificial Sequence: Synthetic oligonucleotide
  Antisense strand to SEQ ID NO: 1963564
uuaguuccacacauuaggg

SEQ ID NO: 1963566 - RNA, 19 nt, Artificial Sequence
  Description of Artificial Sequence: Synthetic oligonucleotide
  Sense strand starting at position 2829 of SEQ ID NO: 1880390
ugccaagguaggugugaaa

SEQ ID NO: 1963567 - RNA, 19 nt, Artificial Sequence
  Description of Artificial Sequence: Synthetic oligonucleotide
  Antisense strand to SEQ ID NO: 1963566
uuucacaccuaccuuggca

SEQ ID NO: 1963568 - RNA, 19 nt, Artificial Sequence
  Description of Artificial Sequence: Synthetic oligonucleotide
  Sense strand starting at position 2838 of SEQ ID NO: 1880390
aggugugaaaccugaggga

SEQ ID NO: 1963569 - RNA, 19 nt, Artificial Sequence
  Description of Artificial Sequence: Synthetic oligonucleotide
  Antisense strand to SEQ ID NO: 1963568
ucccucagguuucacaccu

SEQ ID NO: 1963570 - RNA, 19 nt, Artificial Sequence
  Description of Artificial Sequence: Synthetic oligonucleotide
  Sense strand starting at position 2842 of SEQ ID NO: 1880390
gugaaaccugagggaaguu

SEQ ID NO: 1963571 - RNA, 19 nt, Artificial Sequence
  Description of Artificial Sequence: Synthetic oligonucleotide
  Antisense strand to SEQ ID NO: 1963570
aacuucccucagguuucac

SEQ ID NO: 1963572 - RNA, 19 nt, Artificial Sequence
  Description of Artificial Sequence: Synthetic oligonucleotide
  Sense strand starting at position 2927 of SEQ ID NO: 1880390
gggcauuuguagcuggagu

SEQ ID NO: 1963573 - RNA, 19 nt, Artificial Sequence
  Description of Artificial Sequence: Synthetic oligonucleotide
  Antisense strand to SEQ ID NO: 1963572
acuccagcuacaaaugccc

SEQ ID NO: 1963574 - RNA, 19 nt, Artificial Sequence
  Description of Artificial Sequence: Synthetic oligonucleotide
  Sense strand starting at position 2928 of SEQ ID NO: 1880390
ggcauuuguagcuggagua

SEQ ID NO: 1963575 - RNA, 19 nt, Artificial Sequence
  Description of Artificial Sequence: Synthetic oligonucleotide
  Antisense strand to SEQ ID NO: 1963574
uacuccagcuacaaaugcc

SEQ ID NO: 1963576 - RNA, 19 nt, Artificial Sequence
  Description of Artificial Sequence: Synthetic oligonucleotide
  Sense strand starting at position 2929 of SEQ ID NO: 1880390
gcauuuguagcuggaguag

SEQ ID NO: 1963577 - RNA, 19 nt, Artificial Sequence
  Description of Artificial Sequence: Synthetic oligonucleotide
  Antisense strand to SEQ ID NO: 1963576
cuacuccagcuacaaaugc

SEQ ID NO: 1963578 - RNA, 19 nt, Artificial Sequence
  Description of Artificial Sequence: Synthetic oligonucleotide
  Sense strand starting at position 2984 of SEQ ID NO: 1880390
cugugaugauucuuaucau

SEQ ID NO: 1963579 - RNA, 19 nt, Artificial Sequence
  Description of Artificial Sequence: Synthetic oligonucleotide
  Antisense strand to SEQ ID NO: 1963578
augauaagaaucaucacag

SEQ ID NO: 1963580 - RNA, 19 nt, Artificial Sequence
  Description of Artificial Sequence: Synthetic oligonucleotide
  Sense strand starting at position 3020 of SEQ ID NO: 1880390
cagcaucaccagugcagaa

SEQ ID NO: 1963581 - RNA, 19 nt, Artificial Sequence
  Description of Artificial Sequence: Synthetic oligonucleotide
  Antisense strand to SEQ ID NO: 1963580
uucugcacuggugaugcug

SEQ ID NO: 1963582 - RNA, 19 nt, Artificial Sequence
  Description of Artificial Sequence: Synthetic oligonucleotide
  Sense strand starting at position 3047 of SEQ ID NO: 1880390
ggacuuauguacccaaucu

SEQ ID NO: 1963583 - RNA, 19 nt, Artificial Sequence
  Description of Artificial Sequence: Synthetic oligonucleotide
  Antisense strand to SEQ ID NO: 1963582
agauuggguacauaagucc

SEQ ID NO: 1963584 - RNA, 19 nt, Artificial Sequence
  Description of Artificial Sequence: Synthetic oligonucleotide
  Sense strand starting at position 3224 of SEQ ID NO: 1880390
ccaggccuucugcaagaga

SEQ ID NO: 1963585 - RNA, 19 nt, Artificial Sequence
  Description of Artificial Sequence: Synthetic oligonucleotide
  Antisense strand to SEQ ID NO: 1963584
ucucuugcagaaggccugg

SEQ ID NO: 1963586 - RNA, 19 nt, Artificial Sequence
  Description of Artificial Sequence: Synthetic oligonucleotide
  Sense strand starting at position 3227 of SEQ ID NO: 1880390
ggccuucugcaagagagau

SEQ ID NO: 1963587 - RNA, 19 nt, Artificial Sequence
  Description of Artificial Sequence: Synthetic oligonucleotide
  Antisense strand to SEQ ID NO: 1963586
aucucucuugcagaaggcc

SEQ ID NO: 1963588 - RNA, 19 nt, Artificial Sequence
  Description of Artificial Sequence: Synthetic oligonucleotide
  Sense strand starting at position 3351 of SEQ ID NO: 1880390
auauauacucugggaaguu

SEQ ID NO: 1963589 - RNA, 19 nt, Artificial Sequence
  Description of Artificial Sequence: Synthetic oligonucleotide
  Antisense strand to SEQ ID NO: 1963588
aacuucccagaguauauau

SEQ ID NO: 1963590 - RNA, 19 nt, Artificial Sequence
  Description of Artificial Sequence: Synthetic oligonucleotide
  Sense strand starting at position 3391 of SEQ ID NO: 1880390
gccauaguccugugaagac

SEQ ID NO: 1963591 - RNA, 19 nt, Artificial Sequence
  Description of Artificial Sequence: Synthetic oligonucleotide
  Antisense strand to SEQ ID NO: 1963590
gucuucacaggacuauggc

SEQ ID NO: 1963592 - RNA, 19 nt, Artificial Sequence
  Description of Artificial Sequence: Synthetic oligonucleotide
  Sense strand starting at position 3607 of SEQ ID NO: 1880390
cugugacugucccuugaau

SEQ ID NO: 1963593 - RNA, 19 nt, Artificial Sequence
  Description of Artificial Sequence: Synthetic oligonucleotide
  Antisense strand to SEQ ID NO: 1963592
auucaagggacagucacag

SEQ ID NO: 1963594 - RNA, 19 nt, Artificial Sequence
  Description of Artificial Sequence: Synthetic oligonucleotide
  Sense strand starting at position 3609 of SEQ ID NO: 1880390
gugacugucccuugaauac

SEQ ID NO: 1963595 - RNA, 19 nt, Artificial Sequence
  Description of Artificial Sequence: Synthetic oligonucleotide
  Antisense strand to SEQ ID NO: 1963594
guauucaagggacagucac

SEQ ID NO: 1963596 - RNA, 19 nt, Artificial Sequence
  Description of Artificial Sequence: Synthetic oligonucleotide
  Sense strand starting at position 3690 of SEQ ID NO: 1880390
aaggguuacuucuuuguua

SEQ ID NO: 1963597 - RNA, 19 nt, Artificial Sequence
  Description of Artificial Sequence: Synthetic oligonucleotide
  Antisense strand to SEQ ID NO: 1963596
uaacaaagaaguaacccuu

SEQ ID NO: 1963598 - RNA, 19 nt, Artificial Sequence
  Description of Artificial Sequence: Synthetic oligonucleotide
  Sense strand starting at position 3692 of SEQ ID NO: 1880390
ggguuacuucuuuguuauu

SEQ ID NO: 1963599 - RNA, 19 nt, Artificial Sequence
  Description of Artificial Sequence: Synthetic oligonucleotide
  Antisense strand to SEQ ID NO: 1963598
aauaacaaagaaguaaccc

SEQ ID NO: 1963600 - RNA, 19 nt, Artificial Sequence
  Description of Artificial Sequence: Synthetic oligonucleotide
  Sense strand starting at position 3734 of SEQ ID NO: 1880390
ucuguagucucccuaauga

SEQ ID NO: 1963601 - RNA, 19 nt, Artificial Sequence
  Description of Artificial Sequence: Synthetic oligonucleotide
  Antisense strand to SEQ ID NO: 1963600
ucauuagggagacuacaga

SEQ ID NO: 1963602 - RNA, 19 nt, Artificial Sequence
  Description of Artificial Sequence: Synthetic oligonucleotide
  Sense strand starting at position 3970 of SEQ ID NO: 1880390
gcugaugugucucugauag

SEQ ID NO: 1963603 - RNA, 19 nt, Artificial Sequence
  Description of Artificial Sequence: Synthetic oligonucleotide
  Antisense strand to SEQ ID NO: 1963602
cuaucagagacacaucagc

SEQ ID NO: 1963604 - RNA, 19 nt, Artificial Sequence
  Description of Artificial Sequence: Synthetic oligonucleotide
  Sense strand starting at position 9 of SEQ ID NO: 1880391
ggauaucauccuggccaac

SEQ ID NO: 1963605 - RNA, 19 nt, Artificial Sequence
  Description of Artificial Sequence: Synthetic oligonucleotide
  Antisense strand to SEQ ID NO: 1963604
guuggccaggaugauaucc

SEQ ID NO: 1963606 - RNA, 19 nt, Artificial Sequence
  Description of Artificial Sequence: Synthetic oligonucleotide
  Sense strand starting at position 265 of SEQ ID NO: 1880391
guacaaugaugugcuauaa

SEQ ID NO: 1963607 - RNA, 19 nt, Artificial Sequence
  Description of Artificial Sequence: Synthetic oligonucleotide
  Antisense strand to SEQ ID NO: 1963606
uuauagcacaucauuguac

SEQ ID NO: 1963608 - RNA, 19 nt, Artificial Sequence
  Description of Artificial Sequence: Synthetic oligonucleotide
  Sense strand starting at position 333 of SEQ ID NO: 1880391
agcaguacagauuaauagu

SEQ ID NO: 1963609 - RNA, 19 nt, Artificial Sequence
  Description of Artificial Sequence: Synthetic oligonucleotide
  Antisense strand to SEQ ID NO: 1963608
acuauuaaucuguacugcu

SEQ ID NO: 1963610 - RNA, 19 nt, Artificial Sequence
  Description of Artificial Sequence: Synthetic oligonucleotide
  Sense strand starting at position 341 of SEQ ID NO: 1880391
agauuaauagucuggagug

SEQ ID NO: 1963611 - RNA, 19 nt, Artificial Sequence
  Description of Artificial Sequence: Synthetic oligonucleotide
  Antisense strand to SEQ ID NO: 1963610
cacuccagacuauuaaucu

SEQ ID NO: 1963612 - RNA, 19 nt, Artificial Sequence
  Description of Artificial Sequence: Synthetic oligonucleotide
  Sense strand starting at position 346 of SEQ ID NO: 1880391
aauagucuggagugagaau

SEQ ID NO: 1963613 - RNA, 19 nt, Artificial Sequence
  Description of Artificial Sequence: Synthetic oligonucleotide
  Antisense strand to SEQ ID NO: 1963612
auucucacuccagacuauu

SEQ ID NO: 1963614 - RNA, 19 nt, Artificial Sequence
  Description of Artificial Sequence: Synthetic oligonucleotide
  Sense strand starting at position 355 of SEQ ID NO: 1880391
gagugagaauuccuggauu

SEQ ID NO: 1963615 - RNA, 19 nt, Artificial Sequence
  Description of Artificial Sequence: Synthetic oligonucleotide
  Antisense strand to SEQ ID NO: 1963614
aauccaggaauucucacuc

SEQ ID NO: 1963616 - RNA, 19 nt, Artificial Sequence
  Description of Artificial Sequence: Synthetic oligonucleotide
  Sense strand starting at position 357 of SEQ ID NO: 1880391
gugagaauuccuggauucu

SEQ ID NO: 1963617 - RNA, 19 nt, Artificial Sequence
  Description of Artificial Sequence: Synthetic oligonucleotide
  Antisense strand to SEQ ID NO: 1963616
agaauccaggaauucucac

SEQ ID NO: 1963618 - RNA, 19 nt, Artificial Sequence
  Description of Artificial Sequence: Synthetic oligonucleotide
  Sense strand starting at position 400 of SEQ ID NO: 1880391
uaguaagcucagggaacua

SEQ ID NO: 1963619 - RNA, 19 nt, Artificial Sequence
  Description of Artificial Sequence: Synthetic oligonucleotide
  Antisense strand to SEQ ID NO: 1963618
uaguucccugagcuuacua

SEQ ID NO: 1963620 - RNA, 19 nt, Artificial Sequence
  Description of Artificial Sequence: Synthetic oligonucleotide
  Sense strand starting at position 468 of SEQ ID NO: 1880391
agaauuuacuucgaggaau

SEQ ID NO: 1963621 - RNA, 19 nt, Artificial Sequence
  Description of Artificial Sequence: Synthetic oligonucleotide
  Antisense strand to SEQ ID NO: 1963620
auuccucgaaguaaauucu

SEQ ID NO: 1963622 - RNA, 19 nt, Artificial Sequence
  Description of Artificial Sequence: Synthetic oligonucleotide
  Sense strand starting at position 476 of SEQ ID NO: 1880391
cuucgaggaauguaagcaa

SEQ ID NO: 1963623 - RNA, 19 nt, Artificial Sequence
  Description of Artificial Sequence: Synthetic oligonucleotide
  Antisense strand to SEQ ID NO: 1963622
uugcuuacauuccucgaag

SEQ ID NO: 1963624 - RNA, 19 nt, Artificial Sequence
  Description of Artificial Sequence: Synthetic oligonucleotide
  Sense strand starting at position 479 of SEQ ID NO: 1880391
cgaggaauguaagcaacaa

SEQ ID NO: 1963625 - RNA, 19 nt, Artificial Sequence
  Description of Artificial Sequence: Synthetic oligonucleotide
  Antisense strand to SEQ ID NO: 1963624
uuguugcuuacauuccucg

SEQ ID NO: 1963626 - RNA, 19 nt, Artificial Sequence
  Description of Artificial Sequence: Synthetic oligonucleotide
  Sense strand starting at position 532 of SEQ ID NO: 1880391
ugcacaauucuauaaguag

SEQ ID NO: 1963627 - RNA, 19 nt, Artificial Sequence
  Description of Artificial Sequence: Synthetic oligonucleotide
  Antisense strand to SEQ ID NO: 1963626
cuacuuauagaauugugca

SEQ ID NO: 1963628 - RNA, 19 nt, Artificial Sequence
  Description of Artificial Sequence: Synthetic oligonucleotide
  Sense strand starting at position 535 of SEQ ID NO: 1880391
acaauucuauaaguaggua

SEQ ID NO: 1963629 - RNA, 19 nt, Artificial Sequence
  Description of Artificial Sequence: Synthetic oligonucleotide
  Antisense strand to SEQ ID NO: 1963628
uaccuacuuauagaauugu

SEQ ID NO: 1963630 - RNA, 19 nt, Artificial Sequence
  Description of Artificial Sequence: Synthetic oligonucleotide
  Sense strand starting at position 740 of SEQ ID NO: 1880391
aucuguagagcucacacaa

SEQ ID NO: 1963631 - RNA, 19 nt, Artificial Sequence
  Description of Artificial Sequence: Synthetic oligonucleotide
  Antisense strand to SEQ ID NO: 1963630
uugugugagcucuacagau

SEQ ID NO: 1963632 - RNA, 19 nt, Artificial Sequence
  Description of Artificial Sequence: Synthetic oligonucleotide
  Sense strand starting at position 803 of SEQ ID NO: 1880391
uagagagacuaugaggaau

SEQ ID NO: 1963633 - RNA, 19 nt, Artificial Sequence
  Description of Artificial Sequence: Synthetic oligonucleotide
  Antisense strand to SEQ ID NO: 1963632
auuccucauagucucucua

SEQ ID NO: 1963634 - RNA, 19 nt, Artificial Sequence
  Description of Artificial Sequence: Synthetic oligonucleotide
  Sense strand starting at position 814 of SEQ ID NO: 1880391
ugaggaaugcccuguaaag

SEQ ID NO: 1963635 - RNA, 19 nt, Artificial Sequence
  Description of Artificial Sequence: Synthetic oligonucleotide
  Antisense strand to SEQ ID NO: 1963634
cuuuacagggcauuccuca

SEQ ID NO: 1963636 - RNA, 19 nt, Artificial Sequence
  Description of Artificial Sequence: Synthetic oligonucleotide
  Sense strand starting at position 1079 of SEQ ID NO: 1880391
ggaagcugcccggaacuau

SEQ ID NO: 1963637 - RNA, 19 nt, Artificial Sequence
  Description of Artificial Sequence: Synthetic oligonucleotide
  Antisense strand to SEQ ID NO: 1963636
auaguuccgggcagcuucc

SEQ ID NO: 1963638 - RNA, 19 nt, Artificial Sequence
  Description of Artificial Sequence: Synthetic oligonucleotide
  Sense strand starting at position 1257 of SEQ ID NO: 1880391
cuugaagggucucuagaau

SEQ ID NO: 1963639 - RNA, 19 nt, Artificial Sequence
  Description of Artificial Sequence: Synthetic oligonucleotide
  Antisense strand to SEQ ID NO: 1963638
auucuagagacccuucaag

SEQ ID NO: 1963640 - RNA, 19 nt, Artificial Sequence
  Description of Artificial Sequence: Synthetic oligonucleotide
  Sense strand starting at position 1333 of SEQ ID NO: 1880391
ggaacaaagucuuucucaa

SEQ ID NO: 1963641 - RNA, 19 nt, Artificial Sequence
  Description of Artificial Sequence: Synthetic oligonucleotide
  Antisense strand to SEQ ID NO: 1963640
uugagaaagacuuuguucc

SEQ ID NO: 1963642 - RNA, 19 nt, Artificial Sequence
  Description of Artificial Sequence: Synthetic oligonucleotide
  Sense strand starting at position 1360 of SEQ ID NO: 1880391
uaaauacgauccucggaau

SEQ ID NO: 1963643 - RNA, 19 nt, Artificial Sequence
  Description of Artificial Sequence: Synthetic oligonucleotide
  Antisense strand to SEQ ID NO: 1963642
auuccgaggaucguauuua

SEQ ID NO: 1963644 - RNA, 19 nt, Artificial Sequence
  Description of Artificial Sequence: Synthetic oligonucleotide
  Sense strand starting at position 1361 of SEQ ID NO: 1880391
aaauacgauccucggaaua

SEQ ID NO: 1963645 - RNA, 19 nt, Artificial Sequence
  Description of Artificial Sequence: Synthetic oligonucleotide
  Antisense strand to SEQ ID NO: 1963644
uauuccgaggaucguauuu

SEQ ID NO: 1963646 - RNA, 19 nt, Artificial Sequence
  Description of Artificial Sequence: Synthetic oligonucleotide
  Sense strand starting at position 1366 of SEQ ID NO: 1880391
cgauccucggaauacuaaa

SEQ ID NO: 1963647 - RNA, 19 nt, Artificial Sequence
  Description of Artificial Sequence: Synthetic oligonucleotide
  Antisense strand to SEQ ID NO: 1963646
uuuaguauuccgaggaucg

SEQ ID NO: 1963648 - RNA, 19 nt, Artificial Sequence
  Description of Artificial Sequence: Synthetic oligonucleotide
  Sense strand starting at position 1374 of SEQ ID NO: 1880391
ggaauacuaaagugugaca

SEQ ID NO: 1963649 - RNA, 19 nt, Artificial Sequence
  Description of Artificial Sequence: Synthetic oligonucleotide
  Antisense strand to SEQ ID NO: 1963648
ugucacacuuuaguauucc

SEQ ID NO: 1963650 - RNA, 19 nt, Artificial Sequence
  Description of Artificial Sequence: Synthetic oligonucleotide
  Sense strand starting at position 1376 of SEQ ID NO: 1880391
aauacuaaagugugacaga

SEQ ID NO: 1963651 - RNA, 19 nt, Artificial Sequence
  Description of Artificial Sequence: Synthetic oligonucleotide
  Antisense strand to SEQ ID NO: 1963650
ucugucacacuuuaguauu

SEQ ID NO: 1963652 - RNA, 19 nt, Artificial Sequence
  Description of Artificial Sequence: Synthetic oligonucleotide
  Sense strand starting at position 1411 of SEQ ID NO: 1880391
gaagucagucgagauccaa

SEQ ID NO: 1963653 - RNA, 19 nt, Artificial Sequence
  Description of Artificial Sequence: Synthetic oligonucleotide
  Antisense strand to SEQ ID NO: 1963652
uuggaucucgacugacuuc

SEQ ID NO: 1963654 - RNA, 19 nt, Artificial Sequence
  Description of Artificial Sequence: Synthetic oligonucleotide
  Sense strand starting at position 1469 of SEQ ID NO: 1880391
cucagaaguugacuguagu

SEQ ID NO: 1963655 - RNA, 19 nt, Artificial Sequence
  Description of Artificial Sequence: Synthetic oligonucleotide
  Antisense strand to SEQ ID NO: 1963654
acuacagucaacuucugag

SEQ ID NO: 1963656 - RNA, 19 nt, Artificial Sequence
  Description of Artificial Sequence: Synthetic oligonucleotide
  Sense strand starting at position 2035 of SEQ ID NO: 1880391
acguuagccaauuaaagga

SEQ ID NO: 1963657 - RNA, 19 nt, Artificial Sequence
  Description of Artificial Sequence: Synthetic oligonucleotide
  Antisense strand to SEQ ID NO: 1963656
uccuuuaauuggcuaacgu

SEQ ID NO: 1963658 - RNA, 19 nt, Artificial Sequence
  Description of Artificial Sequence: Synthetic oligonucleotide
  Sense strand starting at position 2096 of SEQ ID NO: 1880391
gggcuaacgccgagaaguc

SEQ ID NO: 1963659 - RNA, 19 nt, Artificial Sequence
  Description of Artificial Sequence: Synthetic oligonucleotide
  Antisense strand to SEQ ID NO: 1963658
gacuucucggcguuagccc

SEQ ID NO: 1963660 - RNA, 19 nt, Artificial Sequence
  Description of Artificial Sequence: Synthetic oligonucleotide
  Sense strand starting at position 2211 of SEQ ID NO: 1880391
gcucucuggcccuaggaaa

SEQ ID NO: 1963661 - RNA, 19 nt, Artificial Sequence
  Description of Artificial Sequence: Synthetic oligonucleotide
  Antisense strand to SEQ ID NO: 1963660
uuuccuagggccagagagc

SEQ ID NO: 1963662 - RNA, 19 nt, Artificial Sequence
  Description of Artificial Sequence: Synthetic oligonucleotide
  Sense strand starting at position 2391 of SEQ ID NO: 1880391
aaauguagagguugaguuu

SEQ ID NO: 1963663 - RNA, 19 nt, Artificial Sequence
  Description of Artificial Sequence: Synthetic oligonucleotide
  Antisense strand to SEQ ID NO: 1963662
aaacucaaccucuacauuu

SEQ ID NO: 1963664 - RNA, 19 nt, Artificial Sequence
  Description of Artificial Sequence: Synthetic oligonucleotide
  Sense strand starting at position 2500 of SEQ ID NO: 1880391
uaacguauacaguaugaua

SEQ ID NO: 1963665 - RNA, 19 nt, Artificial Sequence
  Description of Artificial Sequence: Synthetic oligonucleotide
  Antisense strand to SEQ ID NO: 1963664
uaucauacuguauacguua

SEQ ID NO: 1963666 - RNA, 19 nt, Artificial Sequence
  Description of Artificial Sequence: Synthetic oligonucleotide
  Sense strand starting at position 2502 of SEQ ID NO: 1880391
acguauacaguaugauauu

SEQ ID NO: 1963667 - RNA, 19 nt, Artificial Sequence
  Description of Artificial Sequence: Synthetic oligonucleotide
  Antisense strand to SEQ ID NO: 1963666
aauaucauacuguauacgu

SEQ ID NO: 1963668 - RNA, 19 nt, Artificial Sequence
  Description of Artificial Sequence: Synthetic oligonucleotide
  Sense strand starting at position 2982 of SEQ ID NO: 1880391
uaggccuuguuaguauuua

SEQ ID NO: 1963669 - RNA, 19 nt, Artificial Sequence
  Description of Artificial Sequence: Synthetic oligonucleotide
  Antisense strand to SEQ ID NO: 1963668
uaaauacuaacaaggccua

SEQ ID NO: 1963670 - RNA, 19 nt, Artificial Sequence
  Description of Artificial Sequence: Synthetic oligonucleotide
  Sense strand starting at position 2994 of SEQ ID NO: 1880391
guauuuaguagcuguagga

SEQ ID NO: 1963671 - RNA, 19 nt, Artificial Sequence
  Description of Artificial Sequence: Synthetic oligonucleotide
  Antisense strand to SEQ ID NO: 1963670
uccuacagcuacuaaauac

SEQ ID NO: 1963672 - RNA, 19 nt, Artificial Sequence
  Description of Artificial Sequence: Synthetic oligonucleotide
  Sense strand starting at position 3062 of SEQ ID NO: 1880391
ccacaauguuggcuauaca

SEQ ID NO: 1963673 - RNA, 19 nt, Artificial Sequence
  Description of Artificial Sequence: Synthetic oligonucleotide
  Antisense strand to SEQ ID NO: 1963672
uguauagccaacauugugg

SEQ ID NO: 1963674 - RNA, 19 nt, Artificial Sequence
  Description of Artificial Sequence: Synthetic oligonucleotide
  Sense strand starting at position 3070 of SEQ ID NO: 1880391
uuggcuauacaccagaauu

SEQ ID NO: 1963675 - RNA, 19 nt, Artificial Sequence
  Description of Artificial Sequence: Synthetic oligonucleotide
  Antisense strand to SEQ ID NO: 1963674
aauucugguguauagccaa

SEQ ID NO: 1963676 - RNA, 19 nt, Artificial Sequence
  Description of Artificial Sequence: Synthetic oligonucleotide
  Sense strand starting at position 3276 of SEQ ID NO: 1880391
agauacucagcccaguauu

SEQ ID NO: 1963677 - RNA, 19 nt, Artificial Sequence
  Description of Artificial Sequence: Synthetic oligonucleotide
  Antisense strand to SEQ ID NO: 1963676
aauacugggcugaguaucu

SEQ ID NO: 1963678 - RNA, 19 nt, Artificial Sequence
  Description of Artificial Sequence: Synthetic oligonucleotide
  Sense strand starting at position 3312 of SEQ ID NO: 1880391
agagauggcuuuccugaag

SEQ ID NO: 1963679 - RNA, 19 nt, Artificial Sequence
  Description of Artificial Sequence: Synthetic oligonucleotide
  Antisense strand to SEQ ID NO: 1963678
cuucaggaaagccaucucu

SEQ ID NO: 1963680 - RNA, 19 nt, Artificial Sequence
  Description of Artificial Sequence: Synthetic oligonucleotide
  Sense strand starting at position 3351 of SEQ ID NO: 1880391
ugagaaugcccagauccuu

SEQ ID NO: 1963681 - RNA, 19 nt, Artificial Sequence
  Description of Artificial Sequence: Synthetic oligonucleotide
  Antisense strand to SEQ ID NO: 1963680
aaggaucugggcauucuca

SEQ ID NO: 1963682 - RNA, 19 nt, Artificial Sequence
  Description of Artificial Sequence: Synthetic oligonucleotide
  Sense strand starting at position 3647 of SEQ ID NO: 1880391
gauuacagucgugauccca

SEQ ID NO: 1963683 - RNA, 19 nt, Artificial Sequence
  Description of Artificial Sequence: Synthetic oligonucleotide
  Antisense strand to SEQ ID NO: 1963682
ugggaucacgacuguaauc

SEQ ID NO: 1963684 - RNA, 19 nt, Artificial Sequence
  Description of Artificial Sequence: Synthetic oligonucleotide
  Sense strand starting at position 76 of SEQ ID NO: 1880392
uguaguuggacagauucca

SEQ ID NO: 1963685 - RNA, 19 nt, Artificial Sequence
  Description of Artificial Sequence: Synthetic oligonucleotide
  Antisense strand to SEQ ID NO: 1963684
uggaaucuguccaacuaca

SEQ ID NO: 1963686 - RNA, 19 nt, Artificial Sequence
  Description of Artificial Sequence: Synthetic oligonucleotide
  Sense strand starting at position 96 of SEQ ID NO: 1880392
ccaauagggucaucuggaa

SEQ ID NO: 1963687 - RNA, 19 nt, Artificial Sequence
  Description of Artificial Sequence: Synthetic oligonucleotide
  Antisense strand to SEQ ID NO: 1963686
uuccagaugacccuauugg

SEQ ID NO: 1963688 - RNA, 19 nt, Artificial Sequence
  Description of Artificial Sequence: Synthetic oligonucleotide
  Sense strand starting at position 174 of SEQ ID NO: 1880392
ucagauuuaucuggagaca

SEQ ID NO: 1963689 - RNA, 19 nt, Artificial Sequence
  Description of Artificial Sequence: Synthetic oligonucleotide
  Antisense strand to SEQ ID NO: 1963688
ugucuccagauaaaucuga

SEQ ID NO: 1963690 - RNA, 19 nt, Artificial Sequence
  Description of Artificial Sequence: Synthetic oligonucleotide
  Sense strand starting at position 202 of SEQ ID NO: 1880392
augaaauuccugggcccau

SEQ ID NO: 1963691 - RNA, 19 nt, Artificial Sequence
  Description of Artificial Sequence: Synthetic oligonucleotide
  Antisense strand to SEQ ID NO: 1963690
augggcccaggaauuucau

SEQ ID NO: 1963692 - RNA, 19 nt, Artificial Sequence
  Description of Artificial Sequence: Synthetic oligonucleotide
  Sense strand starting at position 203 of SEQ ID NO: 1880392
ugaaauuccugggcccauu

SEQ ID NO: 1963693 - RNA, 19 nt, Artificial Sequence
  Description of Artificial Sequence: Synthetic oligonucleotide
  Antisense strand to SEQ ID NO: 1963692
aaugggcccaggaauuuca

SEQ ID NO: 1963694 - RNA, 19 nt, Artificial Sequence
  Description of Artificial Sequence: Synthetic oligonucleotide
  Sense strand starting at position 278 of SEQ ID NO: 1880392
ucaugugucccaguugcuu

SEQ ID NO: 1963695 - RNA, 19 nt, Artificial Sequence
  Description of Artificial Sequence: Synthetic oligonucleotide
  Antisense strand to SEQ ID NO: 1963694
aagcaacugggacacauga

SEQ ID NO: 1963696 - RNA, 19 nt, Artificial Sequence
  Description of Artificial Sequence: Synthetic oligonucleotide
  Sense strand starting at position 295 of SEQ ID NO: 1880392
uuggaacagcccugguuua

SEQ ID NO: 1963697 - RNA, 19 nt, Artificial Sequence
  Description of Artificial Sequence: Synthetic oligonucleotide
  Antisense strand to SEQ ID NO: 1963696
uaaaccagggcuguuccaa

SEQ ID NO: 1963698 - RNA, 19 nt, Artificial Sequence
  Description of Artificial Sequence: Synthetic oligonucleotide
  Sense strand starting at position 296 of SEQ ID NO: 1880392
uggaacagcccugguuuau

SEQ ID NO: 1963699 - RNA, 19 nt, Artificial Sequence
  Description of Artificial Sequence: Synthetic oligonucleotide
  Antisense strand to SEQ ID NO: 1963698
auaaaccagggcuguucca

SEQ ID NO: 1963700 - RNA, 19 nt, Artificial Sequence
  Description of Artificial Sequence: Synthetic oligonucleotide
  Sense strand starting at position 805 of SEQ ID NO: 1880392
gucaaaguggcauaauaaa

SEQ ID NO: 1963701 - RNA, 19 nt, Artificial Sequence
  Description of Artificial Sequence: Synthetic oligonucleotide
  Antisense strand to SEQ ID NO: 1963700
uuuauuaugccacuuugac

SEQ ID NO: 1963702 - RNA, 19 nt, Artificial Sequence
  Description of Artificial Sequence: Synthetic oligonucleotide
  Sense strand starting at position 863 of SEQ ID NO: 1880392
ucaauuguggcauaaacaa

SEQ ID NO: 1963703 - RNA, 19 nt, Artificial Sequence
  Description of Artificial Sequence: Synthetic oligonucleotide
  Antisense strand to SEQ ID NO: 1963702
uuguuuaugccacaauuga

SEQ ID NO: 1963704 - RNA, 19 nt, Artificial Sequence
  Description of Artificial Sequence: Synthetic oligonucleotide
  Sense strand starting at position 1042 of SEQ ID NO: 1880392
uugggagacugcuucucua

SEQ ID NO: 1963705 - RNA, 19 nt, Artificial Sequence
  Description of Artificial Sequence: Synthetic oligonucleotide
  Antisense strand to SEQ ID NO: 1963704
uagagaagcagucucccaa

SEQ ID NO: 1963706 - RNA, 19 nt, Artificial Sequence
  Description of Artificial Sequence: Synthetic oligonucleotide
  Sense strand starting at position 1373 of SEQ ID NO: 1880392
guguuacacagcuagucua

SEQ ID NO: 1963707 - RNA, 19 nt, Artificial Sequence
  Description of Artificial Sequence: Synthetic oligonucleotide
  Antisense strand to SEQ ID NO: 1963706
uagacuagcuguguaacac

SEQ ID NO: 1963708 - RNA, 19 nt, Artificial Sequence
  Description of Artificial Sequence: Synthetic oligonucleotide
  Sense strand starting at position 1429 of SEQ ID NO: 1880392
cuaaguuguuaugcugaau

SEQ ID NO: 1963709 - RNA, 19 nt, Artificial Sequence
  Description of Artificial Sequence: Synthetic oligonucleotide
  Antisense strand to SEQ ID NO: 1963708
auucagcauaacaacuuag

SEQ ID NO: 1963710 - RNA, 19 nt, Artificial Sequence
  Description of Artificial Sequence: Synthetic oligonucleotide
  Sense strand starting at position 1432 of SEQ ID NO: 1880392
aguuguuaugcugaaugca

SEQ ID NO: 1963711 - RNA, 19 nt, Artificial Sequence
  Description of Artificial Sequence: Synthetic oligonucleotide
  Antisense strand to SEQ ID NO: 1963710
ugcauucagcauaacaacu

SEQ ID NO: 1963712 - RNA, 19 nt, Artificial Sequence
  Description of Artificial Sequence: Synthetic oligonucleotide
  Sense strand starting at position 1483 of SEQ ID NO: 1880392
caaguucuggcccagacua

SEQ ID NO: 1963713 - RNA, 19 nt, Artificial Sequence
  Description of Artificial Sequence: Synthetic oligonucleotide
  Antisense strand to SEQ ID NO: 1963712
uagucugggccagaacuug

SEQ ID NO: 1963714 - RNA, 19 nt, Artificial Sequence
  Description of Artificial Sequence: Synthetic oligonucleotide
  Sense strand starting at position 1485 of SEQ ID NO: 1880392
aguucuggcccagacuaua

SEQ ID NO: 1963715 - RNA, 19 nt, Artificial Sequence
  Description of Artificial Sequence: Synthetic oligonucleotide
  Antisense strand to SEQ ID NO: 1963714
uauagucugggccagaacu

SEQ ID NO: 1963716 - RNA, 19 nt, Artificial Sequence
  Description of Artificial Sequence: Synthetic oligonucleotide
  Sense strand starting at position 1646 of SEQ ID NO: 1880392
auuucugagccuugcauga

SEQ ID NO: 1963717 - RNA, 19 nt, Artificial Sequence
  Description of Artificial Sequence: Synthetic oligonucleotide
  Antisense strand to SEQ ID NO: 1963716
ucaugcaaggcucagaaau

SEQ ID NO: 1963718 - RNA, 19 nt, Artificial Sequence
  Description of Artificial Sequence: Synthetic oligonucleotide
  Sense strand starting at position 1650 of SEQ ID NO: 1880392
cugagccuugcaugauacu

SEQ ID NO: 1963719 - RNA, 19 nt, Artificial Sequence
  Description of Artificial Sequence: Synthetic oligonucleotide
  Antisense strand to SEQ ID NO: 1963718
aguaucaugcaaggcucag

SEQ ID NO: 1963720 - RNA, 19 nt, Artificial Sequence
  Description of Artificial Sequence: Synthetic oligonucleotide
  Sense strand starting at position 1676 of SEQ ID NO: 1880392
ugaugcuguccacaguaaa

SEQ ID NO: 1963721 - RNA, 19 nt, Artificial Sequence
  Description of Artificial Sequence: Synthetic oligonucleotide
  Antisense strand to SEQ ID NO: 1963720
uuuacuguggacagcauca

SEQ ID NO: 1963722 - RNA, 19 nt, Artificial Sequence
  Description of Artificial Sequence: Synthetic oligonucleotide
  Sense strand starting at position 1694 of SEQ ID NO: 1880392
auguuugcugaaggaauga

SEQ ID NO: 1963723 - RNA, 19 nt, Artificial Sequence
  Description of Artificial Sequence: Synthetic oligonucleotide
  Antisense strand to SEQ ID NO: 1963722
ucauuccuucagcaaacau

SEQ ID NO: 1963724 - RNA, 19 nt, Artificial Sequence
  Description of Artificial Sequence: Synthetic oligonucleotide
  Sense strand starting at position 2049 of SEQ ID NO: 1880392
ggcagacugucacccagaa

SEQ ID NO: 1963725 - RNA, 19 nt, Artificial Sequence
  Description of Artificial Sequence: Synthetic oligonucleotide
  Antisense strand to SEQ ID NO: 1963724
uucugggugacagucugcc

SEQ ID NO: 1963726 - RNA, 19 nt, Artificial Sequence
  Description of Artificial Sequence: Synthetic oligonucleotide
  Sense strand starting at position 2168 of SEQ ID NO: 1880392
uuaugagucuaccuuggca

SEQ ID NO: 1963727 - RNA, 19 nt, Artificial Sequence
  Description of Artificial Sequence: Synthetic oligonucleotide
  Antisense strand to SEQ ID NO: 1963726
ugccaagguagacucauaa

SEQ ID NO: 1963728 - RNA, 19 nt, Artificial Sequence
  Description of Artificial Sequence: Synthetic oligonucleotide
  Sense strand starting at position 2170 of SEQ ID NO: 1880392
augagucuaccuuggcaga

SEQ ID NO: 1963729 - RNA, 19 nt, Artificial Sequence
  Description of Artificial Sequence: Synthetic oligonucleotide
  Antisense strand to SEQ ID NO: 1963728
ucugccaagguagacucau

SEQ ID NO: 1963730 - RNA, 19 nt, Artificial Sequence
  Description of Artificial Sequence: Synthetic oligonucleotide
  Sense strand starting at position 2172 of SEQ ID NO: 1880392
gagucuaccuuggcagacu

SEQ ID NO: 1963731 - RNA, 19 nt, Artificial Sequence
  Description of Artificial Sequence: Synthetic oligonucleotide
  Antisense strand to SEQ ID NO: 1963730
agucugccaagguagacuc

SEQ ID NO: 1963732 - RNA, 19 nt, Artificial Sequence
  Description of Artificial Sequence: Synthetic oligonucleotide
  Sense strand starting at position 2233 of SEQ ID NO: 1880392
cagcaaugaucaguagaaa

SEQ ID NO: 1963733 - RNA, 19 nt, Artificial Sequence
  Description of Artificial Sequence: Synthetic oligonucleotide
  Antisense strand to SEQ ID NO: 1963732
uuucuacugaucauugcug

SEQ ID NO: 1963734 - RNA, 19 nt, Artificial Sequence
  Description of Artificial Sequence: Synthetic oligonucleotide
  Sense strand starting at position 2272 of SEQ ID NO: 1880392
gacucuuaaggaugggagu

SEQ ID NO: 1963735 - RNA, 19 nt, Artificial Sequence
  Description of Artificial Sequence: Synthetic oligonucleotide
  Antisense strand to SEQ ID NO: 1963734
acucccauccuuaagaguc

SEQ ID NO: 1963736 - RNA, 19 nt, Artificial Sequence
  Description of Artificial Sequence: Synthetic oligonucleotide
  Sense strand starting at position 2308 of SEQ ID NO: 1880392
gccacucucccacgaagau

SEQ ID NO: 1963737 - RNA, 19 nt, Artificial Sequence
  Description of Artificial Sequence: Synthetic oligonucleotide
  Antisense strand to SEQ ID NO: 1963736
aucuucgugggagaguggc

SEQ ID NO: 1963738 - RNA, 19 nt, Artificial Sequence
  Description of Artificial Sequence: Synthetic oligonucleotide
  Sense strand starting at position 2352 of SEQ ID NO: 1880392
acugcaauuugguuucuua

SEQ ID NO: 1963739 - RNA, 19 nt, Artificial Sequence
  Description of Artificial Sequence: Synthetic oligonucleotide
  Antisense strand to SEQ ID NO: 1963738
uaagaaaccaaauugcagu

SEQ ID NO: 1963740 - RNA, 19 nt, Artificial Sequence
  Description of Artificial Sequence: Synthetic oligonucleotide
  Sense strand starting at position 2407 of SEQ ID NO: 1880392
gucuaaugugguggaaaga

SEQ ID NO: 1963741 - RNA, 19 nt, Artificial Sequence
  Description of Artificial Sequence: Synthetic oligonucleotide
  Antisense strand to SEQ ID NO: 1963740
ucuuuccaccacauuagac

SEQ ID NO: 1963742 - RNA, 19 nt, Artificial Sequence
  Description of Artificial Sequence: Synthetic oligonucleotide
  Sense strand starting at position 2676 of SEQ ID NO: 1880392
uggaaauggcuuugucuca

SEQ ID NO: 1963743 - RNA, 19 nt, Artificial Sequence
  Description of Artificial Sequence: Synthetic oligonucleotide
  Antisense strand to SEQ ID NO: 1963742
ugagacaaagccauuucca

SEQ ID NO: 1963744 - RNA, 19 nt, Artificial Sequence
  Description of Artificial Sequence: Synthetic oligonucleotide
  Sense strand starting at position 2677 of SEQ ID NO: 1880392
ggaaauggcuuugucucau

SEQ ID NO: 1963745 - RNA, 19 nt, Artificial Sequence
  Description of Artificial Sequence: Synthetic oligonucleotide
  Antisense strand to SEQ ID NO: 1963744
augagacaaagccauuucc

SEQ ID NO: 1963746 - RNA, 19 nt, Artificial Sequence
  Description of Artificial Sequence: Synthetic oligonucleotide
  Sense strand starting at position 2726 of SEQ ID NO: 1880392
ccuuaacaucuuggguaaa

SEQ ID NO: 1963747 - RNA, 19 nt, Artificial Sequence
  Description of Artificial Sequence: Synthetic oligonucleotide
  Antisense strand to SEQ ID NO: 1963746
uuuacccaagauguuaagg

SEQ ID NO: 1963748 - RNA, 19 nt, Artificial Sequence
  Description of Artificial Sequence: Synthetic oligonucleotide
  Sense strand starting at position 2728 of SEQ ID NO: 1880392
uuaacaucuuggguaaaug

SEQ ID NO: 1963749 - RNA, 19 nt, Artificial Sequence
  Description of Artificial Sequence: Synthetic oligonucleotide
  Antisense strand to SEQ ID NO: 1963748
cauuuacccaagauguuaa

SEQ ID NO: 1963750 - RNA, 19 nt, Artificial Sequence
  Description of Artificial Sequence: Synthetic oligonucleotide
  Sense strand starting at position 2738 of SEQ ID NO: 1880392
ggguaaaugcuagaguuau

SEQ ID NO: 1963751 - RNA, 19 nt, Artificial Sequence
  Description of Artificial Sequence: Synthetic oligonucleotide
  Antisense strand to SEQ ID NO: 1963750
auaacucuagcauuuaccc

SEQ ID NO: 1963752 - RNA, 19 nt, Artificial Sequence
  Description of Artificial Sequence: Synthetic oligonucleotide
  Sense strand starting at position 2744 of SEQ ID NO: 1880392
augcuagaguuauccaaau

SEQ ID NO: 1963753 - RNA, 19 nt, Artificial Sequence
  Description of Artificial Sequence: Synthetic oligonucleotide
  Antisense strand to SEQ ID NO: 1963752
auuuggauaacucuagcau

SEQ ID NO: 1963754 - RNA, 19 nt, Artificial Sequence
  Description of Artificial Sequence: Synthetic oligonucleotide
  Sense strand starting at position 3469 of SEQ ID NO: 1880392
gauugagacucguucucag

SEQ ID NO: 1963755 - RNA, 19 nt, Artificial Sequence
  Description of Artificial Sequence: Synthetic oligonucleotide
  Antisense strand to SEQ ID NO: 1963754
cugagaacgagucucaauc

SEQ ID NO: 1963756 - RNA, 19 nt, Artificial Sequence
  Description of Artificial Sequence: Synthetic oligonucleotide
  Sense strand starting at position 3481 of SEQ ID NO: 1880392
uucucaguuguuuaaucaa

SEQ ID NO: 1963757 - RNA, 19 nt, Artificial Sequence
  Description of Artificial Sequence: Synthetic oligonucleotide
  Antisense strand to SEQ ID NO: 1963756
uugauuaaacaacugagaa

SEQ ID NO: 1963758 - RNA, 19 nt, Artificial Sequence
  Description of Artificial Sequence: Synthetic oligonucleotide
  Sense strand starting at position 3484 of SEQ ID NO: 1880392
ucaguuguuuaaucaaauc

SEQ ID NO: 1963759 - RNA, 19 nt, Artificial Sequence
  Description of Artificial Sequence: Synthetic oligonucleotide
  Antisense strand to SEQ ID NO: 1963758
gauuugauuaaacaacuga

SEQ ID NO: 1963760 - RNA, 19 nt, Artificial Sequence
  Description of Artificial Sequence: Synthetic oligonucleotide
  Sense strand starting at position 3652 of SEQ ID NO: 1880392
gcugcaaggcucccuguua

SEQ ID NO: 1963761 - RNA, 19 nt, Artificial Sequence
  Description of Artificial Sequence: Synthetic oligonucleotide
  Antisense strand to SEQ ID NO: 1963760
uaacagggagccuugcagc

SEQ ID NO: 1963762 - RNA, 19 nt, Artificial Sequence
  Description of Artificial Sequence: Synthetic oligonucleotide
  Sense strand starting at position 3950 of SEQ ID NO: 1880392
gaagcaagcccuugaagua

SEQ ID NO: 1963763 - RNA, 19 nt, Artificial Sequence
  Description of Artificial Sequence: Synthetic oligonucleotide
  Antisense strand to SEQ ID NO: 1963762
uacuucaagggcuugcuuc

SEQ ID NO: 1963764 - RNA, 19 nt, Artificial Sequence
  Description of Artificial Sequence: Synthetic oligonucleotide
  Sense strand starting at position 179 of SEQ ID NO: 1880393
guguaaagacacugucuuu

SEQ ID NO: 1963765 - RNA, 19 nt, Artificial Sequence
  Description of Artificial Sequence: Synthetic oligonucleotide
  Antisense strand to SEQ ID NO: 1963764
aaagacagugucuuuacac

SEQ ID NO: 1963766 - RNA, 19 nt, Artificial Sequence
  Description of Artificial Sequence: Synthetic oligonucleotide
  Sense strand starting at position 304 of SEQ ID NO: 1880393
gggaguucaccagagcagu

SEQ ID NO: 1963767 - RNA, 19 nt, Artificial Sequence
  Description of Artificial Sequence: Synthetic oligonucleotide
  Antisense strand to SEQ ID NO: 1963766
acugcucuggugaacuccc

SEQ ID NO: 1963768 - RNA, 19 nt, Artificial Sequence
  Description of Artificial Sequence: Synthetic oligonucleotide
  Sense strand starting at position 389 of SEQ ID NO: 1880393
ggcugaucugaggaaguca

SEQ ID NO: 1963769 - RNA, 19 nt, Artificial Sequence
  Description of Artificial Sequence: Synthetic oligonucleotide
  Antisense strand to SEQ ID NO: 1963768
ugacuuccucagaucagcc

SEQ ID NO: 1963770 - RNA, 19 nt, Artificial Sequence
  Description of Artificial Sequence: Synthetic oligonucleotide
  Sense strand starting at position 433 of SEQ ID NO: 1880393
caguauugcguugaacaaa

SEQ ID NO: 1963771 - RNA, 19 nt, Artificial Sequence
  Description of Artificial Sequence: Synthetic oligonucleotide
  Antisense strand to SEQ ID NO: 1963770
uuuguucaacgcaauacug

SEQ ID NO: 1963772 - RNA, 19 nt, Artificial Sequence
  Description of Artificial Sequence: Synthetic oligonucleotide
  Sense strand starting at position 582 of SEQ ID NO: 1880393
ccugucuguccagaaagau

SEQ ID NO: 1963773 - RNA, 19 nt, Artificial Sequence
  Description of Artificial Sequence: Synthetic oligonucleotide
  Antisense strand to SEQ ID NO: 1963772
aucuuucuggacagacagg

SEQ ID NO: 1963774 - RNA, 19 nt, Artificial Sequence
  Description of Artificial Sequence: Synthetic oligonucleotide
  Sense strand starting at position 819 of SEQ ID NO: 1880393
gcuggcuugcaagaugaga

SEQ ID NO: 1963775 - RNA, 19 nt, Artificial Sequence
  Description of Artificial Sequence: Synthetic oligonucleotide
  Antisense strand to SEQ ID NO: 1963774
ucucaucuugcaagccagc

SEQ ID NO: 1963776 - RNA, 19 nt, Artificial Sequence
  Description of Artificial Sequence: Synthetic oligonucleotide
  Sense strand starting at position 1891 of SEQ ID NO: 1880393
gcagccuucggguaagaau

SEQ ID NO: 1963777 - RNA, 19 nt, Artificial Sequence
  Description of Artificial Sequence: Synthetic oligonucleotide
  Antisense strand to SEQ ID NO: 1963776
auucuuacccgaaggcugc

SEQ ID NO: 1963778 - RNA, 19 nt, Artificial Sequence
  Description of Artificial Sequence: Synthetic oligonucleotide
  Sense strand starting at position 2359 of SEQ ID NO: 1880393
ggugaauucucuguuucua

SEQ ID NO: 1963779 - RNA, 19 nt, Artificial Sequence
  Description of Artificial Sequence: Synthetic oligonucleotide
  Antisense strand to SEQ ID NO: 1963778
uagaaacagagaauucacc

SEQ ID NO: 1963780 - RNA, 19 nt, Artificial Sequence
  Description of Artificial Sequence: Synthetic oligonucleotide
  Sense strand starting at position 2388 of SEQ ID NO: 1880393
gguguuugaaucuaggcuu

SEQ ID NO: 1963781 - RNA, 19 nt, Artificial Sequence
  Description of Artificial Sequence: Synthetic oligonucleotide
  Antisense strand to SEQ ID NO: 1963780
aagccuagauucaaacacc

SEQ ID NO: 1963782 - RNA, 19 nt, Artificial Sequence
  Description of Artificial Sequence: Synthetic oligonucleotide
  Sense strand starting at position 2399 of SEQ ID NO: 1880393
cuaggcuuuagugacugau

SEQ ID NO: 1963783 - RNA, 19 nt, Artificial Sequence
  Description of Artificial Sequence: Synthetic oligonucleotide
  Antisense strand to SEQ ID NO: 1963782
aucagucacuaaagccuag

SEQ ID NO: 1963784 - RNA, 19 nt, Artificial Sequence
  Description of Artificial Sequence: Synthetic oligonucleotide
  Sense strand starting at position 2457 of SEQ ID NO: 1880393
uguuguaugagauggaauu

SEQ ID NO: 1963785 - RNA, 19 nt, Artificial Sequence
  Description of Artificial Sequence: Synthetic oligonucleotide
  Antisense strand to SEQ ID NO: 1963784
aauuccaucucauacaaca

SEQ ID NO: 1963786 - RNA, 19 nt, Artificial Sequence
  Description of Artificial Sequence: Synthetic oligonucleotide
  Sense strand starting at position 2486 of SEQ ID NO: 1880393
uuaaauguuucucuaguuc

SEQ ID NO: 1963787 - RNA, 19 nt, Artificial Sequence
  Description of Artificial Sequence: Synthetic oligonucleotide
  Antisense strand to SEQ ID NO: 1963786
gaacuagagaaacauuuaa

SEQ ID NO: 1963788 - RNA, 19 nt, Artificial Sequence
  Description of Artificial Sequence: Synthetic oligonucleotide
  Sense strand starting at position 2493 of SEQ ID NO: 1880393
uuucucuaguucuuagaga

SEQ ID NO: 1963789 - RNA, 19 nt, Artificial Sequence
  Description of Artificial Sequence: Synthetic oligonucleotide
  Antisense strand to SEQ ID NO: 1963788
ucucuaagaacuagagaaa

SEQ ID NO: 1963790 - RNA, 19 nt, Artificial Sequence
  Description of Artificial Sequence: Synthetic oligonucleotide
  Sense strand starting at position 2533 of SEQ ID NO: 1880393
aggcucuucccgcauauga

SEQ ID NO: 1963791 - RNA, 19 nt, Artificial Sequence
  Description of Artificial Sequence: Synthetic oligonucleotide
  Antisense strand to SEQ ID NO: 1963790
ucauaugcgggaagagccu

SEQ ID NO: 1963792 - RNA, 19 nt, Artificial Sequence
  Description of Artificial Sequence: Synthetic oligonucleotide
  Sense strand starting at position 2546 of SEQ ID NO: 1880393
auaugauaauccgucaggu

SEQ ID NO: 1963793 - RNA, 19 nt, Artificial Sequence
  Description of Artificial Sequence: Synthetic oligonucleotide
  Antisense strand to SEQ ID NO: 1963792
accugacggauuaucauau

SEQ ID NO: 1963794 - RNA, 19 nt, Artificial Sequence
  Description of Artificial Sequence: Synthetic oligonucleotide
  Sense strand starting at position 2548 of SEQ ID NO: 1880393
augauaauccgucagguga

SEQ ID NO: 1963795 - RNA, 19 nt, Artificial Sequence
  Description of Artificial Sequence: Synthetic oligonucleotide
  Antisense strand to SEQ ID NO: 1963794
ucaccugacggauuaucau

SEQ ID NO: 1963796 - RNA, 19 nt, Artificial Sequence
  Description of Artificial Sequence: Synthetic oligonucleotide
  Sense strand starting at position 2675 of SEQ ID NO: 1880393
agacaucucuguguugaaa

SEQ ID NO: 1963797 - RNA, 19 nt, Artificial Sequence
  Description of Artificial Sequence: Synthetic oligonucleotide
  Antisense strand to SEQ ID NO: 1963796
uuucaacacagagaugucu

SEQ ID NO: 1963798 - RNA, 19 nt, Artificial Sequence
  Description of Artificial Sequence: Synthetic oligonucleotide
  Sense strand starting at position 2694 of SEQ ID NO: 1880393
caucguguguuucuuauuu

SEQ ID NO: 1963799 - RNA, 19 nt, Artificial Sequence
  Description of Artificial Sequence: Synthetic oligonucleotide
  Antisense strand to SEQ ID NO: 1963798
aaauaagaaacacacgaug

SEQ ID NO: 1963800 - RNA, 19 nt, Artificial Sequence
  Description of Artificial Sequence: Synthetic oligonucleotide
  Sense strand starting at position 2698 of SEQ ID NO: 1880393
guguguuucuuauuugcca

SEQ ID NO: 1963801 - RNA, 19 nt, Artificial Sequence
  Description of Artificial Sequence: Synthetic oligonucleotide
  Antisense strand to SEQ ID NO: 1963800
uggcaaauaagaaacacac

SEQ ID NO: 1963802 - RNA, 19 nt, Artificial Sequence
  Description of Artificial Sequence: Synthetic oligonucleotide
  Sense strand starting at position 2702 of SEQ ID NO: 1880393
guuucuuauuugccagagu

SEQ ID NO: 1963803 - RNA, 19 nt, Artificial Sequence
  Description of Artificial Sequence: Synthetic oligonucleotide
  Antisense strand to SEQ ID NO: 1963802
acucuggcaaauaagaaac

SEQ ID NO: 1963804 - RNA, 19 nt, Artificial Sequence
  Description of Artificial Sequence: Synthetic oligonucleotide
  Sense strand starting at position 2947 of SEQ ID NO: 1880393
ccucaugaacauugugaaa

SEQ ID NO: 1963805 - RNA, 19 nt, Artificial Sequence
  Description of Artificial Sequence: Synthetic oligonucleotide
  Antisense strand to SEQ ID NO: 1963804
uuucacaauguucaugagg

SEQ ID NO: 1963806 - RNA, 19 nt, Artificial Sequence
  Description of Artificial Sequence: Synthetic oligonucleotide
  Sense strand starting at position 3032 of SEQ ID NO: 1880393
caaagcacccagugguaaa

SEQ ID NO: 1963807 - RNA, 19 nt, Artificial Sequence
  Description of Artificial Sequence: Synthetic oligonucleotide
  Antisense strand to SEQ ID NO: 1963806
uuuaccacugggugcuuug

SEQ ID NO: 1963808 - RNA, 19 nt, Artificial Sequence
  Description of Artificial Sequence: Synthetic oligonucleotide
  Sense strand starting at position 3118 of SEQ ID NO: 1880393
acaugucaucuuuguggaa

SEQ ID NO: 1963809 - RNA, 19 nt, Artificial Sequence
  Description of Artificial Sequence: Synthetic oligonucleotide
  Antisense strand to SEQ ID NO: 1963808
uuccacaaagaugacaugu

SEQ ID NO: 1963810 - RNA, 19 nt, Artificial Sequence
  Description of Artificial Sequence: Synthetic oligonucleotide
  Sense strand starting at position 3122 of SEQ ID NO: 1880393
gucaucuuuguggaaaggu

SEQ ID NO: 1963811 - RNA, 19 nt, Artificial Sequence
  Description of Artificial Sequence: Synthetic oligonucleotide
  Antisense strand to SEQ ID NO: 1963810
accuuuccacaaagaugac

SEQ ID NO: 1963812 - RNA, 19 nt, Artificial Sequence
  Description of Artificial Sequence: Synthetic oligonucleotide
  Sense strand starting at position 3190 of SEQ ID NO: 1880393
acgauuuguggccagcuga

SEQ ID NO: 1963813 - RNA, 19 nt, Artificial Sequence
  Description of Artificial Sequence: Synthetic oligonucleotide
  Antisense strand to SEQ ID NO: 1963812
ucagcuggccacaaaucgu

SEQ ID NO: 1963814 - RNA, 19 nt, Artificial Sequence
  Description of Artificial Sequence: Synthetic oligonucleotide
  Sense strand starting at position 3203 of SEQ ID NO: 1880393
agcugaugccugcaaauua

SEQ ID NO: 1963815 - RNA, 19 nt, Artificial Sequence
  Description of Artificial Sequence: Synthetic oligonucleotide
  Antisense strand to SEQ ID NO: 1963814
uaauuugcaggcaucagcu

SEQ ID NO: 1963816 - RNA, 19 nt, Artificial Sequence
  Description of Artificial Sequence: Synthetic oligonucleotide
  Sense strand starting at position 3211 of SEQ ID NO: 1880393
ccugcaaauuauccuggau

SEQ ID NO: 1963817 - RNA, 19 nt, Artificial Sequence
  Description of Artificial Sequence: Synthetic oligonucleotide
  Antisense strand to SEQ ID NO: 1963816
auccaggauaauuugcagg

SEQ ID NO: 1963818 - RNA, 19 nt, Artificial Sequence
  Description of Artificial Sequence: Synthetic oligonucleotide
  Sense strand starting at position 3214 of SEQ ID NO: 1880393
gcaaauuauccuggaucac

SEQ ID NO: 1963819 - RNA, 19 nt, Artificial Sequence
  Description of Artificial Sequence: Synthetic oligonucleotide
  Antisense strand to SEQ ID NO: 1963818
gugauccaggauaauuugc

SEQ ID NO: 1963820 - RNA, 19 nt, Artificial Sequence
  Description of Artificial Sequence: Synthetic oligonucleotide
  Sense strand starting at position 3254 of SEQ ID NO: 1880393
aagaaacuugagugauugu

SEQ ID NO: 1963821 - RNA, 19 nt, Artificial Sequence
  Description of Artificial Sequence: Synthetic oligonucleotide
  Antisense strand to SEQ ID NO: 1963820
acaaucacucaaguuucuu

SEQ ID NO: 1963822 - RNA, 19 nt, Artificial Sequence
  Description of Artificial Sequence: Synthetic oligonucleotide
  Sense strand starting at position 3257 of SEQ ID NO: 1880393
aaacuugagugauuguuau

SEQ ID NO: 1963823 - RNA, 19 nt, Artificial Sequence
  Description of Artificial Sequence: Synthetic oligonucleotide
  Antisense strand to SEQ ID NO: 1963822
auaacaaucacucaaguuu

SEQ ID NO: 1963824 - RNA, 19 nt, Artificial Sequence
  Description of Artificial Sequence: Synthetic oligonucleotide
  Sense strand starting at position 3589 of SEQ ID NO: 1880393
gguugaugucaugggcaga

SEQ ID NO: 1963825 - RNA, 19 nt, Artificial Sequence
  Description of Artificial Sequence: Synthetic oligonucleotide
  Antisense strand to SEQ ID NO: 1963824
ucugcccaugacaucaacc

SEQ ID NO: 1963826 - RNA, 19 nt, Artificial Sequence
  Description of Artificial Sequence: Synthetic oligonucleotide
  Sense strand starting at position 3590 of SEQ ID NO: 1880393
guugaugucaugggcagau

SEQ ID NO: 1963827 - RNA, 19 nt, Artificial Sequence
  Description of Artificial Sequence: Synthetic oligonucleotide
  Antisense strand to SEQ ID NO: 1963826
aucugcccaugacaucaac

SEQ ID NO: 1963828 - RNA, 19 nt, Artificial Sequence
  Description of Artificial Sequence: Synthetic oligonucleotide
  Sense strand starting at position 3654 of SEQ ID NO: 1880393
uucuuauuggaacgaaaug

SEQ ID NO: 1963829 - RNA, 19 nt, Artificial Sequence
  Description of Artificial Sequence: Synthetic oligonucleotide
  Antisense strand to SEQ ID NO: 1963828
cauuucguuccaauaagaa

SEQ ID NO: 1963830 - RNA, 19 nt, Artificial Sequence
  Description of Artificial Sequence: Synthetic oligonucleotide
  Sense strand starting at position 3664 of SEQ ID NO: 1880393
aacgaaauggucgauugca

SEQ ID NO: 1963831 - RNA, 19 nt, Artificial Sequence
  Description of Artificial Sequence: Synthetic oligonucleotide
  Antisense strand to SEQ ID NO: 1963830
ugcaaucgaccauuucguu

SEQ ID NO: 1963832 - RNA, 19 nt, Artificial Sequence
  Description of Artificial Sequence: Synthetic oligonucleotide
  Sense strand starting at position 3673 of SEQ ID NO: 1880393
gucgauugcaucuaaggga

SEQ ID NO: 1963833 - RNA, 19 nt, Artificial Sequence
  Description of Artificial Sequence: Synthetic oligonucleotide
  Antisense strand to SEQ ID NO: 1963832
ucccuuagaugcaaucgac

SEQ ID NO: 1963834 - RNA, 19 nt, Artificial Sequence
  Description of Artificial Sequence: Synthetic oligonucleotide
  Sense strand starting at position 3711 of SEQ ID NO: 1880393
gaacucucgggccauuagu

SEQ ID NO: 1963835 - RNA, 19 nt, Artificial Sequence
  Description of Artificial Sequence: Synthetic oligonucleotide
  Antisense strand to SEQ ID NO: 1963834
acuaauggcccgagaguuc

SEQ ID NO: 1963836 - RNA, 19 nt, Artificial Sequence
  Description of Artificial Sequence: Synthetic oligonucleotide
  Sense strand starting at position 3719 of SEQ ID NO: 1880393
gggccauuaguccacaaga

SEQ ID NO: 1963837 - RNA, 19 nt, Artificial Sequence
  Description of Artificial Sequence: Synthetic oligonucleotide
  Antisense strand to SEQ ID NO: 1963836
ucuuguggacuaauggccc

SEQ ID NO: 1963838 - RNA, 19 nt, Artificial Sequence
  Description of Artificial Sequence: Synthetic oligonucleotide
  Sense strand starting at position 3721 of SEQ ID NO: 1880393
gccauuaguccacaagaaa

SEQ ID NO: 1963839 - RNA, 19 nt, Artificial Sequence
  Description of Artificial Sequence: Synthetic oligonucleotide
  Antisense strand to SEQ ID NO: 1963838
uuucuuguggacuaauggc

SEQ ID NO: 1963840 - RNA, 19 nt, Artificial Sequence
  Description of Artificial Sequence: Synthetic oligonucleotide
  Sense strand starting at position 3753 of SEQ ID NO: 1880393
guugccacuaccggaaaua

SEQ ID NO: 1963841 - RNA, 19 nt, Artificial Sequence
  Description of Artificial Sequence: Synthetic oligonucleotide
  Antisense strand to SEQ ID NO: 1963840
uauuuccgguaguggcaac

SEQ ID NO: 1963842 - RNA, 19 nt, Artificial Sequence
  Description of Artificial Sequence: Synthetic oligonucleotide
  Sense strand starting at position 3754 of SEQ ID NO: 1880393
uugccacuaccggaaauaa

SEQ ID NO: 1963843 - RNA, 19 nt, Artificial Sequence
  Description of Artificial Sequence: Synthetic oligonucleotide
  Antisense strand to SEQ ID NO: 1963842
uuauuuccgguaguggcaa

SEQ ID NO: 1963844 - RNA, 19 nt, Artificial Sequence
  Description of Artificial Sequence: Synthetic oligonucleotide
  Sense strand starting at position 52 of SEQ ID NO: 1880394
ucugacagguccucucaua

SEQ ID NO: 1963845 - RNA, 19 nt, Artificial Sequence
  Description of Artificial Sequence: Synthetic oligonucleotide
  Antisense strand to SEQ ID NO: 1963844
uaugagaggaccugucaga

SEQ ID NO: 1963846 - RNA, 19 nt, Artificial Sequence
  Description of Artificial Sequence: Synthetic oligonucleotide
  Sense strand starting at position 138 of SEQ ID NO: 1880394
gagucaacccaguguggau

SEQ ID NO: 1963847 - RNA, 19 nt, Artificial Sequence
  Description of Artificial Sequence: Synthetic oligonucleotide
  Antisense strand to SEQ ID NO: 1963846
auccacacuggguugacuc

SEQ ID NO: 1963848 - RNA, 19 nt, Artificial Sequence
  Description of Artificial Sequence: Synthetic oligonucleotide
  Sense strand starting at position 150 of SEQ ID NO: 1880394
uguggauccagugagaacu

SEQ ID NO: 1963849 - RNA, 19 nt, Artificial Sequence
  Description of Artificial Sequence: Synthetic oligonucleotide
  Antisense strand to SEQ ID NO: 1963848
aguucucacuggauccaca

SEQ ID NO: 1963850 - RNA, 19 nt, Artificial Sequence
  Description of Artificial Sequence: Synthetic oligonucleotide
  Sense strand starting at position 346 of SEQ ID NO: 1880394
agacuuguuuaggugcaaa

SEQ ID NO: 1963851 - RNA, 19 nt, Artificial Sequence
  Description of Artificial Sequence: Synthetic oligonucleotide
  Antisense strand to SEQ ID NO: 1963850
uuugcaccuaaacaagucu

SEQ ID NO: 1963852 - RNA, 19 nt, Artificial Sequence
  Description of Artificial Sequence: Synthetic oligonucleotide
  Sense strand starting at position 349 of SEQ ID NO: 1880394
cuuguuuaggugcaaagau

SEQ ID NO: 1963853 - RNA, 19 nt, Artificial Sequence
  Description of Artificial Sequence: Synthetic oligonucleotide
  Antisense strand to SEQ ID NO: 1963852
aucuuugcaccuaaacaag

SEQ ID NO: 1963854 - RNA, 19 nt, Artificial Sequence
  Description of Artificial Sequence: Synthetic oligonucleotide
  Sense strand starting at position 722 of SEQ ID NO: 1880394
gucaucuucccaggcaaga

SEQ ID NO: 1963855 - RNA, 19 nt, Artificial Sequence
  Description of Artificial Sequence: Synthetic oligonucleotide
  Antisense strand to SEQ ID NO: 1963854
ucuugccugggaagaugac

SEQ ID NO: 1963856 - RNA, 19 nt, Artificial Sequence
  Description of Artificial Sequence: Synthetic oligonucleotide
  Sense strand starting at position 806 of SEQ ID NO: 1880394
gauugagucuugcuugaag

SEQ ID NO: 1963857 - RNA, 19 nt, Artificial Sequence
  Description of Artificial Sequence: Synthetic oligonucleotide
  Antisense strand to SEQ ID NO: 1963856
cuucaagcaagacucaauc

SEQ ID NO: 1963858 - RNA, 19 nt, Artificial Sequence
  Description of Artificial Sequence: Synthetic oligonucleotide
  Sense strand starting at position 958 of SEQ ID NO: 1880394
caaaguucuggccagccau

SEQ ID NO: 1963859 - RNA, 19 nt, Artificial Sequence
  Description of Artificial Sequence: Synthetic oligonucleotide
  Antisense strand to SEQ ID NO: 1963858
auggcuggccagaacuuug

SEQ ID NO: 1963860 - RNA, 19 nt, Artificial Sequence
  Description of Artificial Sequence: Synthetic oligonucleotide
  Sense strand starting at position 1004 of SEQ ID NO: 1880394
uggaguucuggucgaccau

SEQ ID NO: 1963861 - RNA, 19 nt, Artificial Sequence
  Description of Artificial Sequence: Synthetic oligonucleotide
  Antisense strand to SEQ ID NO: 1963860
auggucgaccagaacucca

SEQ ID NO: 1963862 - RNA, 19 nt, Artificial Sequence
  Description of Artificial Sequence: Synthetic oligonucleotide
  Sense strand starting at position 1005 of SEQ ID NO: 1880394
ggaguucuggucgaccauu

SEQ ID NO: 1963863 - RNA, 19 nt, Artificial Sequence
  Description of Artificial Sequence: Synthetic oligonucleotide
  Antisense strand to SEQ ID NO: 1963862
aauggucgaccagaacucc

SEQ ID NO: 1963864 - RNA, 19 nt, Artificial Sequence
  Description of Artificial Sequence: Synthetic oligonucleotide
  Sense strand starting at position 1327 of SEQ ID NO: 1880394
uucugagaguuucugagca

SEQ ID NO: 1963865 - RNA, 19 nt, Artificial Sequence
  Description of Artificial Sequence: Synthetic oligonucleotide
  Antisense strand to SEQ ID NO: 1963864
ugcucagaaacucucagaa

SEQ ID NO: 1963866 - RNA, 19 nt, Artificial Sequence
  Description of Artificial Sequence: Synthetic oligonucleotide
  Sense strand starting at position 1332 of SEQ ID NO: 1880394
agaguuucugagcagcgaa

SEQ ID NO: 1963867 - RNA, 19 nt, Artificial Sequence
  Description of Artificial Sequence: Synthetic oligonucleotide
  Antisense strand to SEQ ID NO: 1963866
uucgcugcucagaaacucu

SEQ ID NO: 1963868 - RNA, 19 nt, Artificial Sequence
  Description of Artificial Sequence: Synthetic oligonucleotide
  Sense strand starting at position 1488 of SEQ ID NO: 1880394
ggaggaaguugguuccuau

SEQ ID NO: 1963869 - RNA, 19 nt, Artificial Sequence
  Description of Artificial Sequence: Synthetic oligonucleotide
  Antisense strand to SEQ ID NO: 1963868
auaggaaccaacuuccucc

SEQ ID NO: 1963870 - RNA, 19 nt, Artificial Sequence
  Description of Artificial Sequence: Synthetic oligonucleotide
  Sense strand starting at position 2241 of SEQ ID NO: 1880394
aaacaccugugauuggauu

SEQ ID NO: 1963871 - RNA, 19 nt, Artificial Sequence
  Description of Artificial Sequence: Synthetic oligonucleotide
  Antisense strand to SEQ ID NO: 1963870
aauccaaucacagguguuu

SEQ ID NO: 1963872 - RNA, 19 nt, Artificial Sequence
  Description of Artificial Sequence: Synthetic oligonucleotide
  Sense strand starting at position 2467 of SEQ ID NO: 1880394
aggaucuggccuuauccau

SEQ ID NO: 1963873 - RNA, 19 nt, Artificial Sequence
  Description of Artificial Sequence: Synthetic oligonucleotide
  Antisense strand to SEQ ID NO: 1963872
auggauaaggccagauccu

SEQ ID NO: 1963874 - RNA, 19 nt, Artificial Sequence
  Description of Artificial Sequence: Synthetic oligonucleotide
  Sense strand starting at position 2630 of SEQ ID NO: 1880394
caucgucagguuuagucaa

SEQ ID NO: 1963875 - RNA, 19 nt, Artificial Sequence
  Description of Artificial Sequence: Synthetic oligonucleotide
  Antisense strand to SEQ ID NO: 1963874
uugacuaaaccugacgaug

SEQ ID NO: 1963876 - RNA, 19 nt, Artificial Sequence
  Description of Artificial Sequence: Synthetic oligonucleotide
  Sense strand starting at position 2640 of SEQ ID NO: 1880394
uuuagucaauuguuuggua

SEQ ID NO: 1963877 - RNA, 19 nt, Artificial Sequence
  Description of Artificial Sequence: Synthetic oligonucleotide
  Antisense strand to SEQ ID NO: 1963876
uaccaaacaauugacuaaa

SEQ ID NO: 1963878 - RNA, 19 nt, Artificial Sequence
  Description of Artificial Sequence: Synthetic oligonucleotide
  Sense strand starting at position 2641 of SEQ ID NO: 1880394
uuagucaauuguuugguau

SEQ ID NO: 1963879 - RNA, 19 nt, Artificial Sequence
  Description of Artificial Sequence: Synthetic oligonucleotide
  Antisense strand to SEQ ID NO: 1963878
auaccaaacaauugacuaa

SEQ ID NO: 1963880 - RNA, 19 nt, Artificial Sequence
  Description of Artificial Sequence: Synthetic oligonucleotide
  Sense strand starting at position 2642 of SEQ ID NO: 1880394
uagucaauuguuugguaug

SEQ ID NO: 1963881 - RNA, 19 nt, Artificial Sequence
  Description of Artificial Sequence: Synthetic oligonucleotide
  Antisense strand to SEQ ID NO: 1963880
cauaccaaacaauugacua

SEQ ID NO: 1963882 - RNA, 19 nt, Artificial Sequence
  Description of Artificial Sequence: Synthetic oligonucleotide
  Sense strand starting at position 2675 of SEQ ID NO: 1880394
ggccacauugucuaaacuu

SEQ ID NO: 1963883 - RNA, 19 nt, Artificial Sequence
  Description of Artificial Sequence: Synthetic oligonucleotide
  Antisense strand to SEQ ID NO: 1963882
aaguuuagacaauguggcc

SEQ ID NO: 1963884 - RNA, 19 nt, Artificial Sequence
  Description of Artificial Sequence: Synthetic oligonucleotide
  Sense strand starting at position 2694 of SEQ ID NO: 1880394
gcaaccuucccggaacacu

SEQ ID NO: 1963885 - RNA, 19 nt, Artificial Sequence
  Description of Artificial Sequence: Synthetic oligonucleotide
  Antisense strand to SEQ ID NO: 1963884
aguguuccgggaagguugc

SEQ ID NO: 1963886 - RNA, 19 nt, Artificial Sequence
  Description of Artificial Sequence: Synthetic oligonucleotide
  Sense strand starting at position 2767 of SEQ ID NO: 1880394
ccggccuucuccucauuua

SEQ ID NO: 1963887 - RNA, 19 nt, Artificial Sequence
  Description of Artificial Sequence: Synthetic oligonucleotide
  Antisense strand to SEQ ID NO: 1963886
uaaaugaggagaaggccgg

SEQ ID NO: 1963888 - RNA, 19 nt, Artificial Sequence
  Description of Artificial Sequence: Synthetic oligonucleotide
  Sense strand starting at position 2768 of SEQ ID NO: 1880394
cggccuucuccucauuuau

SEQ ID NO: 1963889 - RNA, 19 nt, Artificial Sequence
  Description of Artificial Sequence: Synthetic oligonucleotide
  Antisense strand to SEQ ID NO: 1963888
auaaaugaggagaaggccg

SEQ ID NO: 1963890 - RNA, 19 nt, Artificial Sequence
  Description of Artificial Sequence: Synthetic oligonucleotide
  Sense strand starting at position 2770 of SEQ ID NO: 1880394
gccuucuccucauuuaugu

SEQ ID NO: 1963891 - RNA, 19 nt, Artificial Sequence
  Description of Artificial Sequence: Synthetic oligonucleotide
  Antisense strand to SEQ ID NO: 1963890
acauaaaugaggagaaggc

SEQ ID NO: 1963892 - RNA, 19 nt, Artificial Sequence
  Description of Artificial Sequence: Synthetic oligonucleotide
  Sense strand starting at position 2948 of SEQ ID NO: 1880394
ccggaagccuuuguagaca

SEQ ID NO: 1963893 - RNA, 19 nt, Artificial Sequence
  Description of Artificial Sequence: Synthetic oligonucleotide
  Antisense strand to SEQ ID NO: 1963892
ugucuacaaaggcuuccgg

SEQ ID NO: 1963894 - RNA, 19 nt, Artificial Sequence
  Description of Artificial Sequence: Synthetic oligonucleotide
  Sense strand starting at position 3195 of SEQ ID NO: 1880394
gggaacuguguaugaaggu

SEQ ID NO: 1963895 - RNA, 19 nt, Artificial Sequence
  Description of Artificial Sequence: Synthetic oligonucleotide
  Antisense strand to SEQ ID NO: 1963894
accuucauacacaguuccc

SEQ ID NO: 1963896 - RNA, 19 nt, Artificial Sequence
  Description of Artificial Sequence: Synthetic oligonucleotide
  Sense strand starting at position 3314 of SEQ ID NO: 1880394
ccggcauugaaggaaugua

SEQ ID NO: 1963897 - RNA, 19 nt, Artificial Sequence
  Description of Artificial Sequence: Synthetic oligonucleotide
  Antisense strand to SEQ ID NO: 1963896
uacauuccuucaaugccgg

SEQ ID NO: 1963898 - RNA, 19 nt, Artificial Sequence
  Description of Artificial Sequence: Synthetic oligonucleotide
  Sense strand starting at position 3472 of SEQ ID NO: 1880394
ggcacaauuuccuuccugu

SEQ ID NO: 1963899 - RNA, 19 nt, Artificial Sequence
  Description of Artificial Sequence: Synthetic oligonucleotide
  Antisense strand to SEQ ID NO: 1963898
acaggaaggaaauugugcc

SEQ ID NO: 1963900 - RNA, 19 nt, Artificial Sequence
  Description of Artificial Sequence: Synthetic oligonucleotide
  Sense strand starting at position 3513 of SEQ ID NO: 1880394
cuuuaaaucugggcaucga

SEQ ID NO: 1963901 - RNA, 19 nt, Artificial Sequence
  Description of Artificial Sequence: Synthetic oligonucleotide
  Antisense strand to SEQ ID NO: 1963900
ucgaugcccagauuuaaag

SEQ ID NO: 1963902 - RNA, 19 nt, Artificial Sequence
  Description of Artificial Sequence: Synthetic oligonucleotide
  Sense strand starting at position 3641 of SEQ ID NO: 1880394
gaagaagugcagugaucca

SEQ ID NO: 1963903 - RNA, 19 nt, Artificial Sequence
  Description of Artificial Sequence: Synthetic oligonucleotide
  Antisense strand to SEQ ID NO: 1963902
uggaucacugcacuucuuc

SEQ ID NO: 1963904 - RNA, 19 nt, Artificial Sequence
  Description of Artificial Sequence: Synthetic oligonucleotide
  Sense strand starting at position 3646 of SEQ ID NO: 1880394
agugcagugauccauuagu

SEQ ID NO: 1963905 - RNA, 19 nt, Artificial Sequence
  Description of Artificial Sequence: Synthetic oligonucleotide
  Antisense strand to SEQ ID NO: 1963904
acuaauggaucacugcacu

SEQ ID NO: 1963906 - RNA, 19 nt, Artificial Sequence
  Description of Artificial Sequence: Synthetic oligonucleotide
  Sense strand starting at position 3651 of SEQ ID NO: 1880394
agugauccauuagugacau

SEQ ID NO: 1963907 - RNA, 19 nt, Artificial Sequence
  Description of Artificial Sequence: Synthetic oligonucleotide
  Antisense strand to SEQ ID NO: 1963906
augucacuaauggaucacu

SEQ ID NO: 1963908 - RNA, 19 nt, Artificial Sequence
  Description of Artificial Sequence: Synthetic oligonucleotide
  Sense strand starting at position 3705 of SEQ ID NO: 1880394
ugcuaaggcuggguuagau

SEQ ID NO: 1963909 - RNA, 19 nt, Artificial Sequence
  Description of Artificial Sequence: Synthetic oligonucleotide
  Antisense strand to SEQ ID NO: 1963908
aucuaacccagccuuagca

SEQ ID NO: 1963910 - RNA, 19 nt, Artificial Sequence
  Description of Artificial Sequence: Synthetic oligonucleotide
  Sense strand starting at position 3714 of SEQ ID NO: 1880394
uggguuagaugcuuuguga

SEQ ID NO: 1963911 - RNA, 19 nt, Artificial Sequence
  Description of Artificial Sequence: Synthetic oligonucleotide
  Antisense strand to SEQ ID NO: 1963910
ucacaaagcaucuaaccca

SEQ ID NO: 1963912 - RNA, 19 nt, Artificial Sequence
  Description of Artificial Sequence: Synthetic oligonucleotide
  Sense strand starting at position 3798 of SEQ ID NO: 1880394
ggaggugaaugggucugaa

SEQ ID NO: 1963913 - RNA, 19 nt, Artificial Sequence
  Description of Artificial Sequence: Synthetic oligonucleotide
  Antisense strand to SEQ ID NO: 1963912
uucagacccauucaccucc

SEQ ID NO: 1963914 - RNA, 19 nt, Artificial Sequence
  Description of Artificial Sequence: Synthetic oligonucleotide
  Sense strand starting at position 3801 of SEQ ID NO: 1880394
ggugaaugggucugaaaug

SEQ ID NO: 1963915 - RNA, 19 nt, Artificial Sequence
  Description of Artificial Sequence: Synthetic oligonucleotide
  Antisense strand to SEQ ID NO: 1963914
cauuucagacccauucacc

SEQ ID NO: 1963916 - RNA, 19 nt, Artificial Sequence
  Description of Artificial Sequence: Synthetic oligonucleotide
  Sense strand starting at position 3810 of SEQ ID NO: 1880394
gucugaaaugaguggcuga

SEQ ID NO: 1963917 - RNA, 19 nt, Artificial Sequence
  Description of Artificial Sequence: Synthetic oligonucleotide
  Antisense strand to SEQ ID NO: 1963916
ucagccacucauuucagac

SEQ ID NO: 1963918 - RNA, 19 nt, Artificial Sequence
  Description of Artificial Sequence: Synthetic oligonucleotide
  Sense strand starting at position 3811 of SEQ ID NO: 1880394
ucugaaaugaguggcugau

SEQ ID NO: 1963919 - RNA, 19 nt, Artificial Sequence
  Description of Artificial Sequence: Synthetic oligonucleotide
  Antisense strand to SEQ ID NO: 1963918
aucagccacucauuucaga

SEQ ID NO: 1963920 - RNA, 19 nt, Artificial Sequence
  Description of Artificial Sequence: Synthetic oligonucleotide
  Sense strand starting at position 3823 of SEQ ID NO: 1880394
ggcugauggcaucacaaau

SEQ ID NO: 1963921 - RNA, 19 nt, Artificial Sequence
  Description of Artificial Sequence: Synthetic oligonucleotide
  Antisense strand to SEQ ID NO: 1963920
auuugugaugccaucagcc

SEQ ID NO: 1963922 - RNA, 19 nt, Artificial Sequence
  Description of Artificial Sequence: Synthetic oligonucleotide
  Sense strand starting at position 3918 of SEQ ID NO: 1880394
agagauggcuccuucccua

SEQ ID NO: 1963923 - RNA, 19 nt, Artificial Sequence
  Description of Artificial Sequence: Synthetic oligonucleotide
  Antisense strand to SEQ ID NO: 1963922
uagggaaggagccaucucu

SEQ ID NO: 1963924 - RNA, 19 nt, Artificial Sequence
  Description of Artificial Sequence: Synthetic oligonucleotide
  Sense strand starting at position 138 of SEQ ID NO: 1880395
cuaggaaugcgucaguauc

SEQ ID NO: 1963925 - RNA, 19 nt, Artificial Sequence
  Description of Artificial Sequence: Synthetic oligonucleotide
  Antisense strand to SEQ ID NO: 1963924
gauacugacgcauuccuag

SEQ ID NO: 1963926 - RNA, 19 nt, Artificial Sequence
  Description of Artificial Sequence: Synthetic oligonucleotide
  Sense strand starting at position 161 of SEQ ID NO: 1880395
agcugcaauguccaagaau

SEQ ID NO: 1963927 - RNA, 19 nt, Artificial Sequence
  Description of Artificial Sequence: Synthetic oligonucleotide
  Antisense strand to SEQ ID NO: 1963926
auucuuggacauugcagcu

SEQ ID NO: 1963928 - RNA, 19 nt, Artificial Sequence
  Description of Artificial Sequence: Synthetic oligonucleotide
  Sense strand starting at position 164 of SEQ ID NO: 1880395
ugcaauguccaagaaucau

SEQ ID NO: 1963929 - RNA, 19 nt, Artificial Sequence
  Description of Artificial Sequence: Synthetic oligonucleotide
  Antisense strand to SEQ ID NO: 1963928
augauucuuggacauugca

SEQ ID NO: 1963930 - RNA, 19 nt, Artificial Sequence
  Description of Artificial Sequence: Synthetic oligonucleotide
  Sense strand starting at position 191 of SEQ ID NO: 1880395
auuugagaaucccaaagau

SEQ ID NO: 1963931 - RNA, 19 nt, Artificial Sequence
  Description of Artificial Sequence: Synthetic oligonucleotide
  Antisense strand to SEQ ID NO: 1963930
aucuuugggauucucaaau

SEQ ID NO: 1963932 - RNA, 19 nt, Artificial Sequence
  Description of Artificial Sequence: Synthetic oligonucleotide
  Sense strand starting at position 212 of SEQ ID NO: 1880395
uuguuuacauuggcuauua

SEQ ID NO: 1963933 - RNA, 19 nt, Artificial Sequence
  Description of Artificial Sequence: Synthetic oligonucleotide
  Antisense strand to SEQ ID NO: 1963932
uaauagccaauguaaacaa

SEQ ID NO: 1963934 - RNA, 19 nt, Artificial Sequence
  Description of Artificial Sequence: Synthetic oligonucleotide
  Sense strand starting at position 213 of SEQ ID NO: 1880395
uguuuacauuggcuauuau

SEQ ID NO: 1963935 - RNA, 19 nt, Artificial Sequence
  Description of Artificial Sequence: Synthetic oligonucleotide
  Antisense strand to SEQ ID NO: 1963934
auaauagccaauguaaaca

SEQ ID NO: 1963936 - RNA, 19 nt, Artificial Sequence
  Description of Artificial Sequence: Synthetic oligonucleotide
  Sense strand starting at position 214 of SEQ ID NO: 1880395
guuuacauuggcuauuauu

SEQ ID NO: 1963937 - RNA, 19 nt, Artificial Sequence
  Description of Artificial Sequence: Synthetic oligonucleotide
  Antisense strand to SEQ ID NO: 1963936
aauaauagccaauguaaac

SEQ ID NO: 1963938 - RNA, 19 nt, Artificial Sequence
  Description of Artificial Sequence: Synthetic oligonucleotide
  Sense strand starting at position 351 of SEQ ID NO: 1880395
gugggaggacucggauagu

SEQ ID NO: 1963939 - RNA, 19 nt, Artificial Sequence
  Description of Artificial Sequence: Synthetic oligonucleotide
  Antisense strand to SEQ ID NO: 1963938
acuauccgaguccucccac

SEQ ID NO: 1963940 - RNA, 19 nt, Artificial Sequence
  Description of Artificial Sequence: Synthetic oligonucleotide
  Sense strand starting at position 908 of SEQ ID NO: 1880395
aguaaauagcugcaaacuu

SEQ ID NO: 1963941 - RNA, 19 nt, Artificial Sequence
  Description of Artificial Sequence: Synthetic oligonucleotide
  Antisense strand to SEQ ID NO: 1963940
aaguuugcagcuauuuacu

SEQ ID NO: 1963942 - RNA, 19 nt, Artificial Sequence
  Description of Artificial Sequence: Synthetic oligonucleotide
  Sense strand starting at position 1063 of SEQ ID NO: 1880395
gugugaagaugucuaucaa

SEQ ID NO: 1963943 - RNA, 19 nt, Artificial Sequence
  Description of Artificial Sequence: Synthetic oligonucleotide
  Antisense strand to SEQ ID NO: 1963942
uugauagacaucuucacac

SEQ ID NO: 1963944 - RNA, 19 nt, Artificial Sequence
  Description of Artificial Sequence: Synthetic oligonucleotide
  Sense strand starting at position 1064 of SEQ ID NO: 1880395
ugugaagaugucuaucaau

SEQ ID NO: 1963945 - RNA, 19 nt, Artificial Sequence
  Description of Artificial Sequence: Synthetic oligonucleotide
  Antisense strand to SEQ ID NO: 1963944
auugauagacaucuucaca

SEQ ID NO: 1963946 - RNA, 19 nt, Artificial Sequence
  Description of Artificial Sequence: Synthetic oligonucleotide
  Sense strand starting at position 1101 of SEQ ID NO: 1880395
gucacaaagcuuuggaacu

SEQ ID NO: 1963947 - RNA, 19 nt, Artificial Sequence
  Description of Artificial Sequence: Synthetic oligonucleotide
  Antisense strand to SEQ ID NO: 1963946
aguuccaaagcuuugugac

SEQ ID NO: 1963948 - RNA, 19 nt, Artificial Sequence
  Description of Artificial Sequence: Synthetic oligonucleotide
  Sense strand starting at position 1220 of SEQ ID NO: 1880395
aagggcaguguauguaaau

SEQ ID NO: 1963949 - RNA, 19 nt, Artificial Sequence
  Description of Artificial Sequence: Synthetic oligonucleotide
  Antisense strand to SEQ ID NO: 1963948
auuuacauacacugcccuu

SEQ ID NO: 1963950 - RNA, 19 nt, Artificial Sequence
  Description of Artificial Sequence: Synthetic oligonucleotide
  Sense strand starting at position 1340 of SEQ ID NO: 1880395
gugagagcuccuuagcgac

SEQ ID NO: 1963951 - RNA, 19 nt, Artificial Sequence
  Description of Artificial Sequence: Synthetic oligonucleotide
  Antisense strand to SEQ ID NO: 1963950
gucgcuaaggagcucucac

SEQ ID NO: 1963952 - RNA, 19 nt, Artificial Sequence
  Description of Artificial Sequence: Synthetic oligonucleotide
  Sense strand starting at position 1368 of SEQ ID NO: 1880395
ugggcaugguuugcaauaa

SEQ ID NO: 1963953 - RNA, 19 nt, Artificial Sequence
  Description of Artificial Sequence: Synthetic oligonucleotide
  Antisense strand to SEQ ID NO: 1963952
uuauugcaaaccaugccca

SEQ ID NO: 1963954 - RNA, 19 nt, Artificial Sequence
  Description of Artificial Sequence: Synthetic oligonucleotide
  Sense strand starting at position 1372 of SEQ ID NO: 1880395
caugguuugcaauaaguac

SEQ ID NO: 1963955 - RNA, 19 nt, Artificial Sequence
  Description of Artificial Sequence: Synthetic oligonucleotide
  Antisense strand to SEQ ID NO: 1963954
guacuuauugcaaaccaug

SEQ ID NO: 1963956 - RNA, 19 nt, Artificial Sequence
  Description of Artificial Sequence: Synthetic oligonucleotide
  Sense strand starting at position 1753 of SEQ ID NO: 1880395
cgcgcuuggaauuagaauu

SEQ ID NO: 1963957 - RNA, 19 nt, Artificial Sequence
  Description of Artificial Sequence: Synthetic oligonucleotide
  Antisense strand to SEQ ID NO: 1963956
aauucuaauuccaagcgcg

SEQ ID NO: 1963958 - RNA, 19 nt, Artificial Sequence
  Description of Artificial Sequence: Synthetic oligonucleotide
  Sense strand starting at position 2082 of SEQ ID NO: 1880395
gcgcccgcucgucuugaua

SEQ ID NO: 1963959 - RNA, 19 nt, Artificial Sequence
  Description of Artificial Sequence: Synthetic oligonucleotide
  Antisense strand to SEQ ID NO: 1963958
uaucaagacgagcgggcgc

SEQ ID NO: 1963960 - RNA, 19 nt, Artificial Sequence
  Description of Artificial Sequence: Synthetic oligonucleotide
  Sense strand starting at position 2705 of SEQ ID NO: 1880395
cugggcugucacuaggaga

SEQ ID NO: 1963961 - RNA, 19 nt, Artificial Sequence
  Description of Artificial Sequence: Synthetic oligonucleotide
  Antisense strand to SEQ ID NO: 1963960
ucuccuagugacagcccag

SEQ ID NO: 1963962 - RNA, 19 nt, Artificial Sequence
  Description of Artificial Sequence: Synthetic oligonucleotide
  Sense strand starting at position 2798 of SEQ ID NO: 1880395
gugcgugaaauugcuagua

SEQ ID NO: 1963963 - RNA, 19 nt, Artificial Sequence
  Description of Artificial Sequence: Synthetic oligonucleotide
  Antisense strand to SEQ ID NO: 1963962
uacuagcaauuucacgcac

SEQ ID NO: 1963964 - RNA, 19 nt, Artificial Sequence
  Description of Artificial Sequence: Synthetic oligonucleotide
  Sense strand starting at position 2826 of SEQ ID NO: 1880395
auguuaaugcgucugucuu

SEQ ID NO: 1963965 - RNA, 19 nt, Artificial Sequence
  Description of Artificial Sequence: Synthetic oligonucleotide
  Antisense strand to SEQ ID NO: 1963964
aagacagacgcauuaacau

SEQ ID NO: 1963966 - RNA, 19 nt, Artificial Sequence
  Description of Artificial Sequence: Synthetic oligonucleotide
  Sense strand starting at position 2862 of SEQ ID NO: 1880395
cauaaacguguuuaaugga

SEQ ID NO: 1963967 - RNA, 19 nt, Artificial Sequence
  Description of Artificial Sequence: Synthetic oligonucleotide
  Antisense strand to SEQ ID NO: 1963966
uccauuaaacacguuuaug

SEQ ID NO: 1963968 - RNA, 19 nt, Artificial Sequence
  Description of Artificial Sequence: Synthetic oligonucleotide
  Sense strand starting at position 3036 of SEQ ID NO: 1880395
ugaauaagcggugaguguu

SEQ ID NO: 1963969 - RNA, 19 nt, Artificial Sequence
  Description of Artificial Sequence: Synthetic oligonucleotide
  Antisense strand to SEQ ID NO: 1963968
aacacucaccgcuuauuca

SEQ ID NO: 1963970 - RNA, 19 nt, Artificial Sequence
  Description of Artificial Sequence: Synthetic oligonucleotide
  Sense strand starting at position 3178 of SEQ ID NO: 1880395
guacuacauugucucacua

SEQ ID NO: 1963971 - RNA, 19 nt, Artificial Sequence
  Description of Artificial Sequence: Synthetic oligonucleotide
  Antisense strand to SEQ ID NO: 1963970
uagugagacaauguaguac

SEQ ID NO: 1963972 - RNA, 19 nt, Artificial Sequence
  Description of Artificial Sequence: Synthetic oligonucleotide
  Sense strand starting at position 3218 of SEQ ID NO: 1880395
uugggugcucgagaucaca

SEQ ID NO: 1963973 - RNA, 19 nt, Artificial Sequence
  Description of Artificial Sequence: Synthetic oligonucleotide
  Antisense strand to SEQ ID NO: 1963972
ugugaucucgagcacccaa

SEQ ID NO: 1963974 - RNA, 19 nt, Artificial Sequence
  Description of Artificial Sequence: Synthetic oligonucleotide
  Sense strand starting at position 3264 of SEQ ID NO: 1880395
gccaauaacuuacuacgaa

SEQ ID NO: 1963975 - RNA, 19 nt, Artificial Sequence
  Description of Artificial Sequence: Synthetic oligonucleotide
  Antisense strand to SEQ ID NO: 1963974
uucguaguaaguuauuggc

SEQ ID NO: 1963976 - RNA, 19 nt, Artificial Sequence
  Description of Artificial Sequence: Synthetic oligonucleotide
  Sense strand starting at position 3287 of SEQ ID NO: 1880395
gccgaggaacguguguauu

SEQ ID NO: 1963977 - RNA, 19 nt, Artificial Sequence
  Description of Artificial Sequence: Synthetic oligonucleotide
  Antisense strand to SEQ ID NO: 1963976
aauacacacguuccucggc

SEQ ID NO: 1963978 - RNA, 19 nt, Artificial Sequence
  Description of Artificial Sequence: Synthetic oligonucleotide
  Sense strand starting at position 3297 of SEQ ID NO: 1880395
guguguauuggcuuuguag

SEQ ID NO: 1963979 - RNA, 19 nt, Artificial Sequence
  Description of Artificial Sequence: Synthetic oligonucleotide
  Antisense strand to SEQ ID NO: 1963978
cuacaaagccaauacacac

SEQ ID NO: 1963980 - RNA, 19 nt, Artificial Sequence
  Description of Artificial Sequence: Synthetic oligonucleotide
  Sense strand starting at position 3318 of SEQ ID NO: 1880395
aauguaaugcccuggaucu

SEQ ID NO: 1963981 - RNA, 19 nt, Artificial Sequence
  Description of Artificial Sequence: Synthetic oligonucleotide
  Antisense strand to SEQ ID NO: 1963980
agauccagggcauuacauu

SEQ ID NO: 1963982 - RNA, 19 nt, Artificial Sequence
  Description of Artificial Sequence: Synthetic oligonucleotide
  Sense strand starting at position 3319 of SEQ ID NO: 1880395
auguaaugcccuggaucuu

SEQ ID NO: 1963983 - RNA, 19 nt, Artificial Sequence
  Description of Artificial Sequence: Synthetic oligonucleotide
  Antisense strand to SEQ ID NO: 1963982
aagauccagggcauuacau

SEQ ID NO: 1963984 - RNA, 19 nt, Artificial Sequence
  Description of Artificial Sequence: Synthetic oligonucleotide
  Sense strand starting at position 3362 of SEQ ID NO: 1880395
gguacuaaccuccacugua

SEQ ID NO: 1963985 - RNA, 19 nt, Artificial Sequence
  Description of Artificial Sequence: Synthetic oligonucleotide
  Antisense strand to SEQ ID NO: 1963984
uacaguggagguuaguacc

SEQ ID NO: 1963986 - RNA, 19 nt, Artificial Sequence
  Description of Artificial Sequence: Synthetic oligonucleotide
  Sense strand starting at position 3425 of SEQ ID NO: 1880395
aaacuauaguccucuggga

SEQ ID NO: 1963987 - RNA, 19 nt, Artificial Sequence
  Description of Artificial Sequence: Synthetic oligonucleotide
  Antisense strand to SEQ ID NO: 1963986
ucccagaggacuauaguuu

SEQ ID NO: 1963988 - RNA, 19 nt, Artificial Sequence
  Description of Artificial Sequence: Synthetic oligonucleotide
  Sense strand starting at position 3427 of SEQ ID NO: 1880395
acuauaguccucugggauu

SEQ ID NO: 1963989 - RNA, 19 nt, Artificial Sequence
  Description of Artificial Sequence: Synthetic oligonucleotide
  Antisense strand to SEQ ID NO: 1963988
aaucccagaggacuauagu

SEQ ID NO: 1963990 - RNA, 19 nt, Artificial Sequence
  Description of Artificial Sequence: Synthetic oligonucleotide
  Sense strand starting at position 3439 of SEQ ID NO: 1880395
ugggauucucugggcuagu

SEQ ID NO: 1963991 - RNA, 19 nt, Artificial Sequence
  Description of Artificial Sequence: Synthetic oligonucleotide
  Antisense strand to SEQ ID NO: 1963990
acuagcccagagaauccca

SEQ ID NO: 1963992 - RNA, 19 nt, Artificial Sequence
  Description of Artificial Sequence: Synthetic oligonucleotide
  Sense strand starting at position 3440 of SEQ ID NO: 1880395
gggauucucugggcuaguu

SEQ ID NO: 1963993 - RNA, 19 nt, Artificial Sequence
  Description of Artificial Sequence: Synthetic oligonucleotide
  Antisense strand to SEQ ID NO: 1963992
aacuagcccagagaauccc

SEQ ID NO: 1963994 - RNA, 19 nt, Artificial Sequence
  Description of Artificial Sequence: Synthetic oligonucleotide
  Sense strand starting at position 3500 of SEQ ID NO: 1880395
cccagacuucccuaucugu

SEQ ID NO: 1963995 - RNA, 19 nt, Artificial Sequence
  Description of Artificial Sequence: Synthetic oligonucleotide
  Antisense strand to SEQ ID NO: 1963994
acagauagggaagucuggg

SEQ ID NO: 1963996 - RNA, 19 nt, Artificial Sequence
  Description of Artificial Sequence: Synthetic oligonucleotide
  Sense strand starting at position 3579 of SEQ ID NO: 1880395
acugcuguuggagauccaa

SEQ ID NO: 1963997 - RNA, 19 nt, Artificial Sequence
  Description of Artificial Sequence: Synthetic oligonucleotide
  Antisense strand to SEQ ID NO: 1963996
uuggaucuccaacagcagu

SEQ ID NO: 1963998 - RNA, 19 nt, Artificial Sequence
  Description of Artificial Sequence: Synthetic oligonucleotide
  Sense strand starting at position 3601 of SEQ ID NO: 1880395
ggagauuggguugggaagu

SEQ ID NO: 1963999 - RNA, 19 nt, Artificial Sequence
  Description of Artificial Sequence: Synthetic oligonucleotide
  Antisense strand to SEQ ID NO: 1963998
acuucccaacccaaucucc

SEQ ID NO: 1964000 - RNA, 19 nt, Artificial Sequence
  Description of Artificial Sequence: Synthetic oligonucleotide
  Sense strand starting at position 3625 of SEQ ID NO: 1880395
ccuugagucucugcuauuu

SEQ ID NO: 1964001 - RNA, 19 nt, Artificial Sequence
  Description of Artificial Sequence: Synthetic oligonucleotide
  Antisense strand to SEQ ID NO: 1964000
aaauagcagagacucaagg

SEQ ID NO: 1964002 - RNA, 19 nt, Artificial Sequence
  Description of Artificial Sequence: Synthetic oligonucleotide
  Sense strand starting at position 3712 of SEQ ID NO: 1880395
uugaguguuugguuaaaug

SEQ ID NO: 1964003 - RNA, 19 nt, Artificial Sequence
  Description of Artificial Sequence: Synthetic oligonucleotide
  Antisense strand to SEQ ID NO: 1964002
cauuuaaccaaacacucaa

SEQ ID NO: 1964004 - RNA, 19 nt, Artificial Sequence
  Description of Artificial Sequence: Synthetic oligonucleotide
  Sense strand starting at position 136 of SEQ ID NO: 1880396
cuaggaaugcgucaguauc

SEQ ID NO: 1964005 - RNA, 19 nt, Artificial Sequence
  Description of Artificial Sequence: Synthetic oligonucleotide
  Antisense strand to SEQ ID NO: 1964004
gauacugacgcauuccuag

SEQ ID NO: 1964006 - RNA, 19 nt, Artificial Sequence
  Description of Artificial Sequence: Synthetic oligonucleotide
  Sense strand starting at position 159 of SEQ ID NO: 1880396
agcugcaauguccaagaau

SEQ ID NO: 1964007 - RNA, 19 nt, Artificial Sequence
  Description of Artificial Sequence: Synthetic oligonucleotide
  Antisense strand to SEQ ID NO: 1964006
auucuuggacauugcagcu

SEQ ID NO: 1964008 - RNA, 19 nt, Artificial Sequence
  Description of Artificial Sequence: Synthetic oligonucleotide
  Sense strand starting at position 162 of SEQ ID NO: 1880396
ugcaauguccaagaaucau

SEQ ID NO: 1964009 - RNA, 19 nt, Artificial Sequence
  Description of Artificial Sequence: Synthetic oligonucleotide
  Antisense strand to SEQ ID NO: 1964008
augauucuuggacauugca

SEQ ID NO: 1964010 - RNA, 19 nt, Artificial Sequence
  Description of Artificial Sequence: Synthetic oligonucleotide
  Sense strand starting at position 189 of SEQ ID NO: 1880396
auuugagaaucccaaagau

SEQ ID NO: 1964011 - RNA, 19 nt, Artificial Sequence
  Description of Artificial Sequence: Synthetic oligonucleotide
  Antisense strand to SEQ ID NO: 1964010
aucuuugggauucucaaau

SEQ ID NO: 1964012 - RNA, 19 nt, Artificial Sequence
  Description of Artificial Sequence: Synthetic oligonucleotide
  Sense strand starting at position 210 of SEQ ID NO: 1880396
uuguuuacauuggcuauua

SEQ ID NO: 1964013 - RNA, 19 nt, Artificial Sequence
  Description of Artificial Sequence: Synthetic oligonucleotide
  Antisense strand to SEQ ID NO: 1964012
uaauagccaauguaaacaa

SEQ ID NO: 1964014 - RNA, 19 nt, Artificial Sequence
  Description of Artificial Sequence: Synthetic oligonucleotide
  Sense strand starting at position 211 of SEQ ID NO: 1880396
uguuuacauuggcuauuau

SEQ ID NO: 1964015 - RNA, 19 nt, Artificial Sequence
  Description of Artificial Sequence: Synthetic oligonucleotide
  Antisense strand to SEQ ID NO: 1964014
auaauagccaauguaaaca

SEQ ID NO: 1964016 - RNA, 19 nt, Artificial Sequence
  Description of Artificial Sequence: Synthetic oligonucleotide
  Sense strand starting at position 212 of SEQ ID NO: 1880396
guuuacauuggcuauuauu

SEQ ID NO: 1964017 - RNA, 19 nt, Artificial Sequence
  Description of Artificial Sequence: Synthetic oligonucleotide
  Antisense strand to SEQ ID NO: 1964016
aauaauagccaauguaaac

SEQ ID NO: 1964018 - RNA, 19 nt, Artificial Sequence
  Description of Artificial Sequence: Synthetic oligonucleotide
  Sense strand starting at position 349 of SEQ ID NO: 1880396
gugggaggacucggauagu

SEQ ID NO: 1964019 - RNA, 19 nt, Artificial Sequence
  Description of Artificial Sequence: Synthetic oligonucleotide
  Antisense strand to SEQ ID NO: 1964018
acuauccgaguccucccac

SEQ ID NO: 1964020 - RNA, 19 nt, Artificial Sequence
  Description of Artificial Sequence: Synthetic oligonucleotide
  Sense strand starting at position 906 of SEQ ID NO: 1880396
aguaaauagcugcaaacuu

SEQ ID NO: 1964021 - RNA, 19 nt, Artificial Sequence
  Description of Artificial Sequence: Synthetic oligonucleotide
  Antisense strand to SEQ ID NO: 1964020
aaguuugcagcuauuuacu

SEQ ID NO: 1964022 - RNA, 19 nt, Artificial Sequence
  Description of Artificial Sequence: Synthetic oligonucleotide
  Sense strand starting at position 1061 of SEQ ID NO: 1880396
gugugaagaugucuaucaa

SEQ ID NO: 1964023 - RNA, 19 nt, Artificial Sequence
  Description of Artificial Sequence: Synthetic oligonucleotide
  Antisense strand to SEQ ID NO: 1964022
uugauagacaucuucacac

SEQ ID NO: 1964024 - RNA, 19 nt, Artificial Sequence
  Description of Artificial Sequence: Synthetic oligonucleotide
  Sense strand starting at position 1062 of SEQ ID NO: 1880396
ugugaagaugucuaucaau

SEQ ID NO: 1964025 - RNA, 19 nt, Artificial Sequence
  Description of Artificial Sequence: Synthetic oligonucleotide
  Antisense strand to SEQ ID NO: 1964024
auugauagacaucuucaca

SEQ ID NO: 1964026 - RNA, 19 nt, Artificial Sequence
  Description of Artificial Sequence: Synthetic oligonucleotide
  Sense strand starting at position 1099 of SEQ ID NO: 1880396
gucacaaagcuuuggaacu

SEQ ID NO: 1964027 - RNA, 19 nt, Artificial Sequence
  Description of Artificial Sequence: Synthetic oligonucleotide
  Antisense strand to SEQ ID NO: 1964026
aguuccaaagcuuugugac

SEQ ID NO: 1964028 - RNA, 19 nt, Artificial Sequence
  Description of Artificial Sequence: Synthetic oligonucleotide
  Sense strand starting at position 1218 of SEQ ID NO: 1880396
aagggcaguguauguaaau

SEQ ID NO: 1964029 - RNA, 19 nt, Artificial Sequence
  Description of Artificial Sequence: Synthetic oligonucleotide
  Antisense strand to SEQ ID NO: 1964028
auuuacauacacugcccuu

SEQ ID NO: 1964030 - RNA, 19 nt, Artificial Sequence
  Description of Artificial Sequence: Synthetic oligonucleotide
  Sense strand starting at position 1338 of SEQ ID NO: 1880396
gugagagcuccuuagcgac

SEQ ID NO: 1964031 - RNA, 19 nt, Artificial Sequence
  Description of Artificial Sequence: Synthetic oligonucleotide
  Antisense strand to SEQ ID NO: 1964030
gucgcuaaggagcucucac

SEQ ID NO: 1964032 - RNA, 19 nt, Artificial Sequence
  Description of Artificial Sequence: Synthetic oligonucleotide
  Sense strand starting at position 1366 of SEQ ID NO: 1880396
ugggcaugguuugcaauaa

SEQ ID NO: 1964033 - RNA, 19 nt, Artificial Sequence
  Description of Artificial Sequence: Synthetic oligonucleotide
  Antisense strand to SEQ ID NO: 1964032
uuauugcaaaccaugccca

SEQ ID NO: 1964034 - RNA, 19 nt, Artificial Sequence
  Description of Artificial Sequence: Synthetic oligonucleotide
  Sense strand starting at position 1370 of SEQ ID NO: 1880396
caugguuugcaauaaguac

SEQ ID NO: 1964035 - RNA, 19 nt, Artificial Sequence
  Description of Artificial Sequence: Synthetic oligonucleotide
  Antisense strand to SEQ ID NO: 1964034
guacuuauugcaaaccaug

SEQ ID NO: 1964036 - RNA, 19 nt, Artificial Sequence
  Description of Artificial Sequence: Synthetic oligonucleotide
  Sense strand starting at position 1751 of SEQ ID NO: 1880396
cgcgcuuggaauuagaauu

SEQ ID NO: 1964037 - RNA, 19 nt, Artificial Sequence
  Description of Artificial Sequence: Synthetic oligonucleotide
  Antisense strand to SEQ ID NO: 1964036
aauucuaauuccaagcgcg

SEQ ID NO: 1964038 - RNA, 19 nt, Artificial Sequence
  Description of Artificial Sequence: Synthetic oligonucleotide
  Sense strand starting at position 2080 of SEQ ID NO: 1880396
gcgcccgcucgucuugaua

SEQ ID NO: 1964039 - RNA, 19 nt, Artificial Sequence
  Description of Artificial Sequence: Synthetic oligonucleotide
  Antisense strand to SEQ ID NO: 1964038
uaucaagacgagcgggcgc

SEQ ID NO: 1964040 - RNA, 19 nt, Artificial Sequence
  Description of Artificial Sequence: Synthetic oligonucleotide
  Sense strand starting at position 2703 of SEQ ID NO: 1880396
cugggcugucacuaggaga

SEQ ID NO: 1964041 - RNA, 19 nt, Artificial Sequence
  Description of Artificial Sequence: Synthetic oligonucleotide
  Antisense strand to SEQ ID NO: 1964040
ucuccuagugacagcccag

SEQ ID NO: 1964042 - RNA, 19 nt, Artificial Sequence
  Description of Artificial Sequence: Synthetic oligonucleotide
  Sense strand starting at position 2796 of SEQ ID NO: 1880396
gugcgugaaauugcuagua

SEQ ID NO: 1964043 - RNA, 19 nt, Artificial Sequence
  Description of Artificial Sequence: Synthetic oligonucleotide
  Antisense strand to SEQ ID NO: 1964042
uacuagcaauuucacgcac

SEQ ID NO: 1964044 - RNA, 19 nt, Artificial Sequence
  Description of Artificial Sequence: Synthetic oligonucleotide
  Sense strand starting at position 2824 of SEQ ID NO: 1880396
auguuaaugcgucugucuu

SEQ ID NO: 1964045 - RNA, 19 nt, Artificial Sequence
  Description of Artificial Sequence: Synthetic oligonucleotide
  Antisense strand to SEQ ID NO: 1964044
aagacagacgcauuaacau

SEQ ID NO: 1964046 - RNA, 19 nt, Artificial Sequence
  Description of Artificial Sequence: Synthetic oligonucleotide
  Sense strand starting at position 2860 of SEQ ID NO: 1880396
cauaaacguguuuaaugga

SEQ ID NO: 1964047 - RNA, 19 nt, Artificial Sequence
  Description of Artificial Sequence: Synthetic oligonucleotide
  Antisense strand to SEQ ID NO: 1964046
uccauuaaacacguuuaug

SEQ ID NO: 1964048 - RNA, 19 nt, Artificial Sequence
  Description of Artificial Sequence: Synthetic oligonucleotide
  Sense strand starting at position 3034 of SEQ ID NO: 1880396
ugaauaagcggugaguguu

SEQ ID NO: 1964049 - RNA, 19 nt, Artificial Sequence
  Description of Artificial Sequence: Synthetic oligonucleotide
  Antisense strand to SEQ ID NO: 1964048
aacacucaccgcuuauuca

SEQ ID NO: 1964050 - RNA, 19 nt, Artificial Sequence
  Description of Artificial Sequence: Synthetic oligonucleotide
  Sense strand starting at position 3176 of SEQ ID NO: 1880396
guacuacauugucucacua

SEQ ID NO: 1964051 - RNA, 19 nt, Artificial Sequence
  Description of Artificial Sequence: Synthetic oligonucleotide
  Antisense strand to SEQ ID NO: 1964050
uagugagacaauguaguac

SEQ ID NO: 1964052 - RNA, 19 nt, Artificial Sequence
  Description of Artificial Sequence: Synthetic oligonucleotide
  Sense strand starting at position 3216 of SEQ ID NO: 1880396
uugggugcucgagaucaca

SEQ ID NO: 1964053 - RNA, 19 nt, Artificial Sequence
  Description of Artificial Sequence: Synthetic oligonucleotide
  Antisense strand to SEQ ID NO: 1964052
ugugaucucgagcacccaa

SEQ ID NO: 1964054 - RNA, 19 nt, Artificial Sequence
  Description of Artificial Sequence: Synthetic oligonucleotide
  Sense strand starting at position 3262 of SEQ ID NO: 1880396
gccaauaacuuacuacgaa

SEQ ID NO: 1964055 - RNA, 19 nt, Artificial Sequence
  Description of Artificial Sequence: Synthetic oligonucleotide
  Antisense strand to SEQ ID NO: 1964054
uucguaguaaguuauuggc

SEQ ID NO: 1964056 - RNA, 19 nt, Artificial Sequence
  Description of Artificial Sequence: Synthetic oligonucleotide
  Sense strand starting at position 3285 of SEQ ID NO: 1880396
gccgaggaacguguguauu

SEQ ID NO: 1964057 - RNA, 19 nt, Artificial Sequence
  Description of Artificial Sequence: Synthetic oligonucleotide
  Antisense strand to SEQ ID NO: 1964056
aauacacacguuccucggc

SEQ ID NO: 1964058 - RNA, 19 nt, Artificial Sequence
  Description of Artificial Sequence: Synthetic oligonucleotide
  Sense strand starting at position 3295 of SEQ ID NO: 1880396
guguguauuggcuuuguag

SEQ ID NO: 1964059 - RNA, 19 nt, Artificial Sequence
  Description of Artificial Sequence: Synthetic oligonucleotide
  Antisense strand to SEQ ID NO: 1964058
cuacaaagccaauacacac

SEQ ID NO: 1964060 - RNA, 19 nt, Artificial Sequence
  Description of Artificial Sequence: Synthetic oligonucleotide
  Sense strand starting at position 3316 of SEQ ID NO: 1880396
aauguaaugcccuggaucu

SEQ ID NO: 1964061 - RNA, 19 nt, Artificial Sequence
  Description of Artificial Sequence: Synthetic oligonucleotide
  Antisense strand to SEQ ID NO: 1964060
agauccagggcauuacauu

SEQ ID NO: 1964062 - RNA, 19 nt, Artificial Sequence
  Description of Artificial Sequence: Synthetic oligonucleotide
  Sense strand starting at position 3317 of SEQ ID NO: 1880396
auguaaugcccuggaucuu

SEQ ID NO: 1964063 - RNA, 19 nt, Artificial Sequence
  Description of Artificial Sequence: Synthetic oligonucleotide
  Antisense strand to SEQ ID NO: 1964062
aagauccagggcauuacau

SEQ ID NO: 1964064 - RNA, 19 nt, Artificial Sequence
  Description of Artificial Sequence: Synthetic oligonucleotide
  Sense strand starting at position 3360 of SEQ ID NO: 1880396
gguacuaaccuccacugua

SEQ ID NO: 1964065 - RNA, 19 nt, Artificial Sequence
  Description of Artificial Sequence: Synthetic oligonucleotide
  Antisense strand to SEQ ID NO: 1964064
uacaguggagguuaguacc

SEQ ID NO: 1964066 - RNA, 19 nt, Artificial Sequence
  Description of Artificial Sequence: Synthetic oligonucleotide
  Sense strand starting at position 3423 of SEQ ID NO: 1880396
aaacuauaguccucuggga

SEQ ID NO: 1964067 - RNA, 19 nt, Artificial Sequence
  Description of Artificial Sequence: Synthetic oligonucleotide
  Antisense strand to SEQ ID NO: 1964066
ucccagaggacuauaguuu

SEQ ID NO: 1964068 - RNA, 19 nt, Artificial Sequence
  Description of Artificial Sequence: Synthetic oligonucleotide
  Sense strand starting at position 3425 of SEQ ID NO: 1880396
acuauaguccucugggauu

SEQ ID NO: 1964069 - RNA, 19 nt, Artificial Sequence
  Description of Artificial Sequence: Synthetic oligonucleotide
  Antisense strand to SEQ ID NO: 1964068
aaucccagaggacuauagu

SEQ ID NO: 1964070 - RNA, 19 nt, Artificial Sequence
  Description of Artificial Sequence: Synthetic oligonucleotide
  Sense strand starting at position 3437 of SEQ ID NO: 1880396
ugggauucucugggcuagu

SEQ ID NO: 1964071 - RNA, 19 nt, Artificial Sequence
  Description of Artificial Sequence: Synthetic oligonucleotide
  Antisense strand to SEQ ID NO: 1964070
acuagcccagagaauccca

SEQ ID NO: 1964072 - RNA, 19 nt, Artificial Sequence
  Description of Artificial Sequence: Synthetic oligonucleotide
  Sense strand starting at position 3438 of SEQ ID NO: 1880396
gggauucucugggcuaguu

SEQ ID NO: 1964073 - RNA, 19 nt, Artificial Sequence
  Description of Artificial Sequence: Synthetic oligonucleotide
  Antisense strand to SEQ ID NO: 1964072
aacuagcccagagaauccc

SEQ ID NO: 1964074 - RNA, 19 nt, Artificial Sequence
  Description of Artificial Sequence: Synthetic oligonucleotide
  Sense strand starting at position 3498 of SEQ ID NO: 1880396
cccagacuucccuaucugu

SEQ ID NO: 1964075 - RNA, 19 nt, Artificial Sequence
  Description of Artificial Sequence: Synthetic oligonucleotide
  Antisense strand to SEQ ID NO: 1964074
acagauagggaagucuggg

SEQ ID NO: 1964076 - RNA, 19 nt, Artificial Sequence
  Description of Artificial Sequence: Synthetic oligonucleotide
  Sense strand starting at position 3577 of SEQ ID NO: 1880396
acugcuguuggagauccaa

SEQ ID NO: 1964077 - RNA, 19 nt, Artificial Sequence
  Description of Artificial Sequence: Synthetic oligonucleotide
  Antisense strand to SEQ ID NO: 1964076
uuggaucuccaacagcagu

SEQ ID NO: 1964078 - RNA, 19 nt, Artificial Sequence
  Description of Artificial Sequence: Synthetic oligonucleotide
  Sense strand starting at position 3599 of SEQ ID NO: 1880396
ggagauuggguugggaagu

SEQ ID NO: 1964079 - RNA, 19 nt, Artificial Sequence
  Description of Artificial Sequence: Synthetic oligonucleotide
  Antisense strand to SEQ ID NO: 1964078
acuucccaacccaaucucc

SEQ ID NO: 1964080 - RNA, 19 nt, Artificial Sequence
  Description of Artificial Sequence: Synthetic oligonucleotide
  Sense strand starting at position 3623 of SEQ ID NO: 1880396
ccuugagucucugcuauuu

SEQ ID NO: 1964081 - RNA, 19 nt, Artificial Sequence
  Description of Artificial Sequence: Synthetic oligonucleotide
  Antisense strand to SEQ ID NO: 1964080
aaauagcagagacucaagg

SEQ ID NO: 1964082 - RNA, 19 nt, Artificial Sequence
  Description of Artificial Sequence: Synthetic oligonucleotide
  Sense strand starting at position 3710 of SEQ ID NO: 1880396
uugaguguuugguuaaaug

SEQ ID NO: 1964083 - RNA, 19 nt, Artificial Sequence
  Description of Artificial Sequence: Synthetic oligonucleotide
  Antisense strand to SEQ ID NO: 1964082
cauuuaaccaaacacucaa

SEQ ID NO: 1964084 - RNA, 19 nt, Artificial Sequence
  Description of Artificial Sequence: Synthetic oligonucleotide
  Sense strand starting at position 168 of SEQ ID NO: 1880397
cguaguaccuuuccuugaa

SEQ ID NO: 1964085 - RNA, 19 nt, Artificial Sequence
  Description of Artificial Sequence: Synthetic oligonucleotide
  Antisense strand to SEQ ID NO: 1964084
uucaaggaaagguacuacg

SEQ ID NO: 1964086 - RNA, 19 nt, Artificial Sequence
  Description of Artificial Sequence: Synthetic oligonucleotide
  Sense strand starting at position 558 of SEQ ID NO: 1880397
ccaaguugacaagguguau

SEQ ID NO: 1964087 - RNA, 19 nt, Artificial Sequence
  Description of Artificial Sequence: Synthetic oligonucleotide
  Antisense strand to SEQ ID NO: 1964086
auacaccuugucaacuugg

SEQ ID NO: 1964088 - RNA, 19 nt, Artificial Sequence
  Description of Artificial Sequence: Synthetic oligonucleotide
  Sense strand starting at position 635 of SEQ ID NO: 1880397
ugaguaguaccacguagau

SEQ ID NO: 1964089 - RNA, 19 nt, Artificial Sequence
  Description of Artificial Sequence: Synthetic oligonucleotide
  Antisense strand to SEQ ID NO: 1964088
aucuacgugguacuacuca

SEQ ID NO: 1964090 - RNA, 19 nt, Artificial Sequence
  Description of Artificial Sequence: Synthetic oligonucleotide
  Sense strand starting at position 637 of SEQ ID NO: 1880397
aguaguaccacguagauca

SEQ ID NO: 1964091 - RNA, 19 nt, Artificial Sequence
  Description of Artificial Sequence: Synthetic oligonucleotide
  Antisense strand to SEQ ID NO: 1964090
ugaucuacgugguacuacu

SEQ ID NO: 1964092 - RNA, 19 nt, Artificial Sequence
  Description of Artificial Sequence: Synthetic oligonucleotide
  Sense strand starting at position 644 of SEQ ID NO: 1880397
ccacguagaucaguuuauc

SEQ ID NO: 1964093 - RNA, 19 nt, Artificial Sequence
  Description of Artificial Sequence: Synthetic oligonucleotide
  Antisense strand to SEQ ID NO: 1964092
gauaaacugaucuacgugg

SEQ ID NO: 1964094 - RNA, 19 nt, Artificial Sequence
  Description of Artificial Sequence: Synthetic oligonucleotide
  Sense strand starting at position 647 of SEQ ID NO: 1880397
cguagaucaguuuaucuuc

SEQ ID NO: 1964095 - RNA, 19 nt, Artificial Sequence
  Description of Artificial Sequence: Synthetic oligonucleotide
  Antisense strand to SEQ ID NO: 1964094
gaagauaaacugaucuacg

SEQ ID NO: 1964096 - RNA, 19 nt, Artificial Sequence
  Description of Artificial Sequence: Synthetic oligonucleotide
  Sense strand starting at position 1019 of SEQ ID NO: 1880397
auuaaauucugggcagcaa

SEQ ID NO: 1964097 - RNA, 19 nt, Artificial Sequence
  Description of Artificial Sequence: Synthetic oligonucleotide
  Antisense strand to SEQ ID NO: 1964096
uugcugcccagaauuuaau

SEQ ID NO: 1964098 - RNA, 19 nt, Artificial Sequence
  Description of Artificial Sequence: Synthetic oligonucleotide
  Sense strand starting at position 1020 of SEQ ID NO: 1880397
uuaaauucugggcagcaau

SEQ ID NO: 1964099 - RNA, 19 nt, Artificial Sequence
  Description of Artificial Sequence: Synthetic oligonucleotide
  Antisense strand to SEQ ID NO: 1964098
auugcugcccagaauuuaa

SEQ ID NO: 1964100 - RNA, 19 nt, Artificial Sequence
  Description of Artificial Sequence: Synthetic oligonucleotide
  Sense strand starting at position 1368 of SEQ ID NO: 1880397
aaauuaguugagugugauu

SEQ ID NO: 1964101 - RNA, 19 nt, Artificial Sequence
  Description of Artificial Sequence: Synthetic oligonucleotide
  Antisense strand to SEQ ID NO: 1964100
aaucacacucaacuaauuu

SEQ ID NO: 1964102 - RNA, 19 nt, Artificial Sequence
  Description of Artificial Sequence: Synthetic oligonucleotide
  Sense strand starting at position 1370 of SEQ ID NO: 1880397
auuaguugagugugauugu

SEQ ID NO: 1964103 - RNA, 19 nt, Artificial Sequence
  Description of Artificial Sequence: Synthetic oligonucleotide
  Antisense strand to SEQ ID NO: 1964102
acaaucacacucaacuaau

SEQ ID NO: 1964104 - RNA, 19 nt, Artificial Sequence
  Description of Artificial Sequence: Synthetic oligonucleotide
  Sense strand starting at position 1561 of SEQ ID NO: 1880397
gcaaacaaucaauggaguu

SEQ ID NO: 1964105 - RNA, 19 nt, Artificial Sequence
  Description of Artificial Sequence: Synthetic oligonucleotide
  Antisense strand to SEQ ID NO: 1964104
aacuccauugauuguuugc

SEQ ID NO: 1964106 - RNA, 19 nt, Artificial Sequence
  Description of Artificial Sequence: Synthetic oligonucleotide
  Sense strand starting at position 1608 of SEQ ID NO: 1880397
ggaccugcuucuguaacuu

SEQ ID NO: 1964107 - RNA, 19 nt, Artificial Sequence
  Description of Artificial Sequence: Synthetic oligonucleotide
  Antisense strand to SEQ ID NO: 1964106
aaguuacagaagcaggucc

SEQ ID NO: 1964108 - RNA, 19 nt, Artificial Sequence
  Description of Artificial Sequence: Synthetic oligonucleotide
  Sense strand starting at position 2162 of SEQ ID NO: 1880397
cggguuucugcagagucua

SEQ ID NO: 1964109 - RNA, 19 nt, Artificial Sequence
  Description of Artificial Sequence: Synthetic oligonucleotide
  Antisense strand to SEQ ID NO: 1964108
uagacucugcagaaacccg

SEQ ID NO: 1964110 - RNA, 19 nt, Artificial Sequence
  Description of Artificial Sequence: Synthetic oligonucleotide
  Sense strand starting at position 2200 of SEQ ID NO: 1880397
gggaguccgguuugggauu

SEQ ID NO: 1964111 - RNA, 19 nt, Artificial Sequence
  Description of Artificial Sequence: Synthetic oligonucleotide
  Antisense strand to SEQ ID NO: 1964110
aaucccaaaccggacuccc

SEQ ID NO: 1964112 - RNA, 19 nt, Artificial Sequence
  Description of Artificial Sequence: Synthetic oligonucleotide
  Sense strand starting at position 2265 of SEQ ID NO: 1880397
ccaacucuucgccagcaua

SEQ ID NO: 1964113 - RNA, 19 nt, Artificial Sequence
  Description of Artificial Sequence: Synthetic oligonucleotide
  Antisense strand to SEQ ID NO: 1964112
uaugcuggcgaagaguugg

SEQ ID NO: 1964114 - RNA, 19 nt, Artificial Sequence
  Description of Artificial Sequence: Synthetic oligonucleotide
  Sense strand starting at position 2281 of SEQ ID NO: 1880397
auaucaucccggcagguaa

SEQ ID NO: 1964115 - RNA, 19 nt, Artificial Sequence
  Description of Artificial Sequence: Synthetic oligonucleotide
  Antisense strand to SEQ ID NO: 1964114
uuaccugccgggaugauau

SEQ ID NO: 1964116 - RNA, 19 nt, Artificial Sequence
  Description of Artificial Sequence: Synthetic oligonucleotide
  Sense strand starting at position 2345 of SEQ ID NO: 1880397
ggcucuaauuccgcagaag

SEQ ID NO: 1964117 - RNA, 19 nt, Artificial Sequence
  Description of Artificial Sequence: Synthetic oligonucleotide
  Antisense strand to SEQ ID NO: 1964116
cuucugcggaauuagagcc

SEQ ID NO: 1964118 - RNA, 19 nt, Artificial Sequence
  Description of Artificial Sequence: Synthetic oligonucleotide
  Sense strand starting at position 2482 of SEQ ID NO: 1880397
gaugcuggaugcuuggaua

SEQ ID NO: 1964119 - RNA, 19 nt, Artificial Sequence
  Description of Artificial Sequence: Synthetic oligonucleotide
  Antisense strand to SEQ ID NO: 1964118
uauccaagcauccagcauc

SEQ ID NO: 1964120 - RNA, 19 nt, Artificial Sequence
  Description of Artificial Sequence: Synthetic oligonucleotide
  Sense strand starting at position 2608 of SEQ ID NO: 1880397
gguggaaguugcaagaaug

SEQ ID NO: 1964121 - RNA, 19 nt, Artificial Sequence
  Description of Artificial Sequence: Synthetic oligonucleotide
  Antisense strand to SEQ ID NO: 1964120
cauucuugcaacuuccacc

SEQ ID NO: 1964122 - RNA, 19 nt, Artificial Sequence
  Description of Artificial Sequence: Synthetic oligonucleotide
  Sense strand starting at position 2635 of SEQ ID NO: 1880397
agacuaagccuggagugua

SEQ ID NO: 1964123 - RNA, 19 nt, Artificial Sequence
  Description of Artificial Sequence: Synthetic oligonucleotide
  Antisense strand to SEQ ID NO: 1964122
uacacuccaggcuuagucu

SEQ ID NO: 1964124 - RNA, 19 nt, Artificial Sequence
  Description of Artificial Sequence: Synthetic oligonucleotide
  Sense strand starting at position 3072 of SEQ ID NO: 1880397
cgcacacgcagagauaaau

SEQ ID NO: 1964125 - RNA, 19 nt, Artificial Sequence
  Description of Artificial Sequence: Synthetic oligonucleotide
  Antisense strand to SEQ ID NO: 1964124
auuuaucucugcgugugcg

SEQ ID NO: 1964126 - RNA, 19 nt, Artificial Sequence
  Description of Artificial Sequence: Synthetic oligonucleotide
  Sense strand starting at position 3082 of SEQ ID NO: 1880397
gagauaaauugugcuccca

SEQ ID NO: 1964127 - RNA, 19 nt, Artificial Sequence
  Description of Artificial Sequence: Synthetic oligonucleotide
  Antisense strand to SEQ ID NO: 1964126
ugggagcacaauuuaucuc

SEQ ID NO: 1964128 - RNA, 19 nt, Artificial Sequence
  Description of Artificial Sequence: Synthetic oligonucleotide
  Sense strand starting at position 3084 of SEQ ID NO: 1880397
gauaaauugugcucccaug

SEQ ID NO: 1964129 - RNA, 19 nt, Artificial Sequence
  Description of Artificial Sequence: Synthetic oligonucleotide
  Antisense strand to SEQ ID NO: 1964128
caugggagcacaauuuauc

SEQ ID NO: 1964130 - RNA, 19 nt, Artificial Sequence
  Description of Artificial Sequence: Synthetic oligonucleotide
  Sense strand starting at position 3101 of SEQ ID NO: 1880397
ugaccuuuauuuggaaagu

SEQ ID NO: 1964131 - RNA, 19 nt, Artificial Sequence
  Description of Artificial Sequence: Synthetic oligonucleotide
  Antisense strand to SEQ ID NO: 1964130
acuuuccaaauaaagguca

SEQ ID NO: 1964132 - RNA, 19 nt, Artificial Sequence
  Description of Artificial Sequence: Synthetic oligonucleotide
  Sense strand starting at position 3102 of SEQ ID NO: 1880397
gaccuuuauuuggaaagug

SEQ ID NO: 1964133 - RNA, 19 nt, Artificial Sequence
  Description of Artificial Sequence: Synthetic oligonucleotide
  Antisense strand to SEQ ID NO: 1964132
cacuuuccaaauaaagguc

SEQ ID NO: 1964134 - RNA, 19 nt, Artificial Sequence
  Description of Artificial Sequence: Synthetic oligonucleotide
  Sense strand starting at position 3193 of SEQ ID NO: 1880397
cugucuggcagguacuaaa

SEQ ID NO: 1964135 - RNA, 19 nt, Artificial Sequence
  Description of Artificial Sequence: Synthetic oligonucleotide
  Antisense strand to SEQ ID NO: 1964134
uuuaguaccugccagacag

SEQ ID NO: 1964136 - RNA, 19 nt, Artificial Sequence
  Description of Artificial Sequence: Synthetic oligonucleotide
  Sense strand starting at position 3218 of SEQ ID NO: 1880397
uaaauucuccugugagugu

SEQ ID NO: 1964137 - RNA, 19 nt, Artificial Sequence
  Description of Artificial Sequence: Synthetic oligonucleotide
  Antisense strand to SEQ ID NO: 1964136
acacucacaggagaauuua

SEQ ID NO: 1964138 - RNA, 19 nt, Artificial Sequence
  Description of Artificial Sequence: Synthetic oligonucleotide
  Sense strand starting at position 3232 of SEQ ID NO: 1880397
aguguucuguauguuaaca

SEQ ID NO: 1964139 - RNA, 19 nt, Artificial Sequence
  Description of Artificial Sequence: Synthetic oligonucleotide
  Antisense strand to SEQ ID NO: 1964138
uguuaacauacagaacacu

SEQ ID NO: 1964140 - RNA, 19 nt, Artificial Sequence
  Description of Artificial Sequence: Synthetic oligonucleotide
  Sense strand starting at position 3289 of SEQ ID NO: 1880397
ucaguugagucugcaagac

SEQ ID NO: 1964141 - RNA, 19 nt, Artificial Sequence
  Description of Artificial Sequence: Synthetic oligonucleotide
  Antisense strand to SEQ ID NO: 1964140
gucuugcagacucaacuga

SEQ ID NO: 1964142 - RNA, 19 nt, Artificial Sequence
  Description of Artificial Sequence: Synthetic oligonucleotide
  Sense strand starting at position 3347 of SEQ ID NO: 1880397
aggugagaauuagcaaauu

SEQ ID NO: 1964143 - RNA, 19 nt, Artificial Sequence
  Description of Artificial Sequence: Synthetic oligonucleotide
  Antisense strand to SEQ ID NO: 1964142
aauuugcuaauucucaccu

SEQ ID NO: 1964144 - RNA, 19 nt, Artificial Sequence
  Description of Artificial Sequence: Synthetic oligonucleotide
  Sense strand starting at position 3377 of SEQ ID NO: 1880397
ucuguacuuucuuugaugu

SEQ ID NO: 1964145 - RNA, 19 nt, Artificial Sequence
  Description of Artificial Sequence: Synthetic oligonucleotide
  Antisense strand to SEQ ID NO: 1964144
acaucaaagaaaguacaga

SEQ ID NO: 1964146 - RNA, 19 nt, Artificial Sequence
  Description of Artificial Sequence: Synthetic oligonucleotide
  Sense strand starting at position 3506 of SEQ ID NO: 1880397
agugucuuaucugcaagag

SEQ ID NO: 1964147 - RNA, 19 nt, Artificial Sequence
  Description of Artificial Sequence: Synthetic oligonucleotide
  Antisense strand to SEQ ID NO: 1964146
cucuugcagauaagacacu

SEQ ID NO: 1964148 - RNA, 19 nt, Artificial Sequence
  Description of Artificial Sequence: Synthetic oligonucleotide
  Sense strand starting at position 3507 of SEQ ID NO: 1880397
gugucuuaucugcaagaga

SEQ ID NO: 1964149 - RNA, 19 nt, Artificial Sequence
  Description of Artificial Sequence: Synthetic oligonucleotide
  Antisense strand to SEQ ID NO: 1964148
ucucuugcagauaagacac

SEQ ID NO: 1964150 - RNA, 19 nt, Artificial Sequence
  Description of Artificial Sequence: Synthetic oligonucleotide
  Sense strand starting at position 3644 of SEQ ID NO: 1880397
auuguuauuccagguuuau

SEQ ID NO: 1964151 - RNA, 19 nt, Artificial Sequence
  Description of Artificial Sequence: Synthetic oligonucleotide
  Antisense strand to SEQ ID NO: 1964150
auaaaccuggaauaacaau

SEQ ID NO: 1964152 - RNA, 19 nt, Artificial Sequence
  Description of Artificial Sequence: Synthetic oligonucleotide
  Sense strand starting at position 3665 of SEQ ID NO: 1880397
ucuggaauugcacaauuau

SEQ ID NO: 1964153 - RNA, 19 nt, Artificial Sequence
  Description of Artificial Sequence: Synthetic oligonucleotide
  Antisense strand to SEQ ID NO: 1964152
auaauugugcaauuccaga

SEQ ID NO: 1964154 - RNA, 19 nt, Artificial Sequence
  Description of Artificial Sequence: Synthetic oligonucleotide
  Sense strand starting at position 3759 of SEQ ID NO: 1880397
gggauuggguuggagacaa

SEQ ID NO: 1964155 - RNA, 19 nt, Artificial Sequence
  Description of Artificial Sequence: Synthetic oligonucleotide
  Antisense strand to SEQ ID NO: 1964154
uugucuccaacccaauccc

SEQ ID NO: 1964156 - RNA, 19 nt, Artificial Sequence
  Description of Artificial Sequence: Synthetic oligonucleotide
  Sense strand starting at position 3863 of SEQ ID NO: 1880397
uuauguuccacaugguagu

SEQ ID NO: 1964157 - RNA, 19 nt, Artificial Sequence
  Description of Artificial Sequence: Synthetic oligonucleotide
  Antisense strand to SEQ ID NO: 1964156
acuaccauguggaacauaa

SEQ ID NO: 1964158 - RNA, 19 nt, Artificial Sequence
  Description of Artificial Sequence: Synthetic oligonucleotide
  Sense strand starting at position 3929 of SEQ ID NO: 1880397
ggcuaaguaaugugaggaa

SEQ ID NO: 1964159 - RNA, 19 nt, Artificial Sequence
  Description of Artificial Sequence: Synthetic oligonucleotide
  Antisense strand to SEQ ID NO: 1964158
uuccucacauuacuuagcc

SEQ ID NO: 1964160 - RNA, 19 nt, Artificial Sequence
  Description of Artificial Sequence: Synthetic oligonucleotide
  Sense strand starting at position 3949 of SEQ ID NO: 1880397
accugaagcgucugaagua

SEQ ID NO: 1964161 - RNA, 19 nt, Artificial Sequence
  Description of Artificial Sequence: Synthetic oligonucleotide
  Antisense strand to SEQ ID NO: 1964160
uacuucagacgcuucaggu

SEQ ID NO: 1964162 - RNA, 19 nt, Artificial Sequence
  Description of Artificial Sequence: Synthetic oligonucleotide
  Sense strand starting at position 3958 of SEQ ID NO: 1880397
gucugaaguaugcauuaug

SEQ ID NO: 1964163 - RNA, 19 nt, Artificial Sequence
  Description of Artificial Sequence: Synthetic oligonucleotide
  Antisense strand to SEQ ID NO: 1964162
cauaaugcauacuucagac

SEQ ID NO: 1964164 - RNA, 19 nt, Artificial Sequence
  Description of Artificial Sequence: Synthetic oligonucleotide
  Sense strand starting at position 47 of SEQ ID NO: 1880398
guauuuguguaagaggaau

SEQ ID NO: 1964165 - RNA, 19 nt, Artificial Sequence
  Description of Artificial Sequence: Synthetic oligonucleotide
  Antisense strand to SEQ ID NO: 1964164
auuccucuuacacaaauac

SEQ ID NO: 1964166 - RNA, 19 nt, Artificial Sequence
  Description of Artificial Sequence: Synthetic oligonucleotide
  Sense strand starting at position 53 of SEQ ID NO: 1880398
guguaagaggaaugcacua

SEQ ID NO: 1964167 - RNA, 19 nt, Artificial Sequence
  Description of Artificial Sequence: Synthetic oligonucleotide
  Antisense strand to SEQ ID NO: 1964166
uagugcauuccucuuacac

SEQ ID NO: 1964168 - RNA, 19 nt, Artificial Sequence
  Description of Artificial Sequence: Synthetic oligonucleotide
  Sense strand starting at position 95 of SEQ ID NO: 1880398
aacucaugagucugguaga

SEQ ID NO: 1964169 - RNA, 19 nt, Artificial Sequence
  Description of Artificial Sequence: Synthetic oligonucleotide
  Antisense strand to SEQ ID NO: 1964168
ucuaccagacucaugaguu

SEQ ID NO: 1964170 - RNA, 19 nt, Artificial Sequence
  Description of Artificial Sequence: Synthetic oligonucleotide
  Sense strand starting at position 296 of SEQ ID NO: 1880398
uccagaagccauuaagucu

SEQ ID NO: 1964171 - RNA, 19 nt, Artificial Sequence
  Description of Artificial Sequence: Synthetic oligonucleotide
  Antisense strand to SEQ ID NO: 1964170
agacuuaauggcuucugga

SEQ ID NO: 1964172 - RNA, 19 nt, Artificial Sequence
  Description of Artificial Sequence: Synthetic oligonucleotide
  Sense strand starting at position 416 of SEQ ID NO: 1880398
auuagaaaugucugccauu

SEQ ID NO: 1964173 - RNA, 19 nt, Artificial Sequence
  Description of Artificial Sequence: Synthetic oligonucleotide
  Antisense strand to SEQ ID NO: 1964172
aauggcagacauuucuaau

SEQ ID NO: 1964174 - RNA, 19 nt, Artificial Sequence
  Description of Artificial Sequence: Synthetic oligonucleotide
  Sense strand starting at position 522 of SEQ ID NO: 1880398
uuccaauaacuuugagagu

SEQ ID NO: 1964175 - RNA, 19 nt, Artificial Sequence
  Description of Artificial Sequence: Synthetic oligonucleotide
  Antisense strand to SEQ ID NO: 1964174
acucucaaaguuauuggaa

SEQ ID NO: 1964176 - RNA, 19 nt, Artificial Sequence
  Description of Artificial Sequence: Synthetic oligonucleotide
  Sense strand starting at position 536 of SEQ ID NO: 1880398
agaguuagaaaguguauac

SEQ ID NO: 1964177 - RNA, 19 nt, Artificial Sequence
  Description of Artificial Sequence: Synthetic oligonucleotide
  Antisense strand to SEQ ID NO: 1964176
guauacacuuucuaacucu

SEQ ID NO: 1964178 - RNA, 19 nt, Artificial Sequence
  Description of Artificial Sequence: Synthetic oligonucleotide
  Sense strand starting at position 629 of SEQ ID NO: 1880398
gguuacauuaccuguguga

SEQ ID NO: 1964179 - RNA, 19 nt, Artificial Sequence
  Description of Artificial Sequence: Synthetic oligonucleotide
  Antisense strand to SEQ ID NO: 1964178
ucacacagguaauguaacc

SEQ ID NO: 1964180 - RNA, 19 nt, Artificial Sequence
  Description of Artificial Sequence: Synthetic oligonucleotide
  Sense strand starting at position 719 of SEQ ID NO: 1880398
auguaaugagcucagcagu

SEQ ID NO: 1964181 - RNA, 19 nt, Artificial Sequence
  Description of Artificial Sequence: Synthetic oligonucleotide
  Antisense strand to SEQ ID NO: 1964180
acugcugagcucauuacau

SEQ ID NO: 1964182 - RNA, 19 nt, Artificial Sequence
  Description of Artificial Sequence: Synthetic oligonucleotide
  Sense strand starting at position 798 of SEQ ID NO: 1880398
cccgguacucagggagaua

SEQ ID NO: 1964183 - RNA, 19 nt, Artificial Sequence
  Description of Artificial Sequence: Synthetic oligonucleotide
  Antisense strand to SEQ ID NO: 1964182
uaucucccugaguaccggg

SEQ ID NO: 1964184 - RNA, 19 nt, Artificial Sequence
  Description of Artificial Sequence: Synthetic oligonucleotide
  Sense strand starting at position 812 of SEQ ID NO: 1880398
agauaaggagcuugcucaa

SEQ ID NO: 1964185 - RNA, 19 nt, Artificial Sequence
  Description of Artificial Sequence: Synthetic oligonucleotide
  Antisense strand to SEQ ID NO: 1964184
uugagcaagcuccuuaucu

SEQ ID NO: 1964186 - RNA, 19 nt, Artificial Sequence
  Description of Artificial Sequence: Synthetic oligonucleotide
  Sense strand starting at position 819 of SEQ ID NO: 1880398
gagcuugcucaaggacaca

SEQ ID NO: 1964187 - RNA, 19 nt, Artificial Sequence
  Description of Artificial Sequence: Synthetic oligonucleotide
  Antisense strand to SEQ ID NO: 1964186
uguguccuugagcaagcuc

SEQ ID NO: 1964188 - RNA, 19 nt, Artificial Sequence
  Description of Artificial Sequence: Synthetic oligonucleotide
  Sense strand starting at position 924 of SEQ ID NO: 1880398
agaacucgucgguauugua

SEQ ID NO: 1964189 - RNA, 19 nt, Artificial Sequence
  Description of Artificial Sequence: Synthetic oligonucleotide
  Antisense strand to SEQ ID NO: 1964188
uacaauaccgacgaguucu

SEQ ID NO: 1964190 - RNA, 19 nt, Artificial Sequence
  Description of Artificial Sequence: Synthetic oligonucleotide
  Sense strand starting at position 1325 of SEQ ID NO: 1880398
agagguugggcuggugaga

SEQ ID NO: 1964191 - RNA, 19 nt, Artificial Sequence
  Description of Artificial Sequence: Synthetic oligonucleotide
  Antisense strand to SEQ ID NO: 1964190
ucucaccagcccaaccucu

SEQ ID NO: 1964192 - RNA, 19 nt, Artificial Sequence
  Description of Artificial Sequence: Synthetic oligonucleotide
  Sense strand starting at position 1571 of SEQ ID NO: 1880398
gggcuaccugcuggauaaa

SEQ ID NO: 1964193 - RNA, 19 nt, Artificial Sequence
  Description of Artificial Sequence: Synthetic oligonucleotide
  Antisense strand to SEQ ID NO: 1964192
uuuauccagcagguagccc

SEQ ID NO: 1964194 - RNA, 19 nt, Artificial Sequence
  Description of Artificial Sequence: Synthetic oligonucleotide
  Sense strand starting at position 1574 of SEQ ID NO: 1880398
cuaccugcuggauaaaguu

SEQ ID NO: 1964195 - RNA, 19 nt, Artificial Sequence
  Description of Artificial Sequence: Synthetic oligonucleotide
  Antisense strand to SEQ ID NO: 1964194
aacuuuauccagcagguag

SEQ ID NO: 1964196 - RNA, 19 nt, Artificial Sequence
  Description of Artificial Sequence: Synthetic oligonucleotide
  Sense strand starting at position 1671 of SEQ ID NO: 1880398
ucugucuuauaaucugagu

SEQ ID NO: 1964197 - RNA, 19 nt, Artificial Sequence
  Description of Artificial Sequence: Synthetic oligonucleotide
  Antisense strand to SEQ ID NO: 1964196
acucagauuauaagacaga

SEQ ID NO: 1964198 - RNA, 19 nt, Artificial Sequence
  Description of Artificial Sequence: Synthetic oligonucleotide
  Sense strand starting at position 1677 of SEQ ID NO: 1880398
uuauaaucugaguguggga

SEQ ID NO: 1964199 - RNA, 19 nt, Artificial Sequence
  Description of Artificial Sequence: Synthetic oligonucleotide
  Antisense strand to SEQ ID NO: 1964198
ucccacacucagauuauaa

SEQ ID NO: 1964200 - RNA, 19 nt, Artificial Sequence
  Description of Artificial Sequence: Synthetic oligonucleotide
  Sense strand starting at position 1679 of SEQ ID NO: 1880398
auaaucugagugugggaaa

SEQ ID NO: 1964201 - RNA, 19 nt, Artificial Sequence
  Description of Artificial Sequence: Synthetic oligonucleotide
  Antisense strand to SEQ ID NO: 1964200
uuucccacacucagauuau

SEQ ID NO: 1964202 - RNA, 19 nt, Artificial Sequence
  Description of Artificial Sequence: Synthetic oligonucleotide
  Sense strand starting at position 1713 of SEQ ID NO: 1880398
aguaaucagucauccagaa

SEQ ID NO: 1964203 - RNA, 19 nt, Artificial Sequence
  Description of Artificial Sequence: Synthetic oligonucleotide
  Antisense strand to SEQ ID NO: 1964202
uucuggaugacugauuacu

SEQ ID NO: 1964204 - RNA, 19 nt, Artificial Sequence
  Description of Artificial Sequence: Synthetic oligonucleotide
  Sense strand starting at position 2091 of SEQ ID NO: 1880398
gugugaacucuugagcuag

SEQ ID NO: 1964205 - RNA, 19 nt, Artificial Sequence
  Description of Artificial Sequence: Synthetic oligonucleotide
  Antisense strand to SEQ ID NO: 1964204
cuagcucaagaguucacac

SEQ ID NO: 1964206 - RNA, 19 nt, Artificial Sequence
  Description of Artificial Sequence: Synthetic oligonucleotide
  Sense strand starting at position 2093 of SEQ ID NO: 1880398
gugaacucuugagcuagau

SEQ ID NO: 1964207 - RNA, 19 nt, Artificial Sequence
  Description of Artificial Sequence: Synthetic oligonucleotide
  Antisense strand to SEQ ID NO: 1964206
aucuagcucaagaguucac

SEQ ID NO: 1964208 - RNA, 19 nt, Artificial Sequence
  Description of Artificial Sequence: Synthetic oligonucleotide
  Sense strand starting at position 2163 of SEQ ID NO: 1880398
ccuggcuuccuuggaaagu

SEQ ID NO: 1964209 - RNA, 19 nt, Artificial Sequence
  Description of Artificial Sequence: Synthetic oligonucleotide
  Antisense strand to SEQ ID NO: 1964208
acuuuccaaggaagccagg

SEQ ID NO: 1964210 - RNA, 19 nt, Artificial Sequence
  Description of Artificial Sequence: Synthetic oligonucleotide
  Sense strand starting at position 2240 of SEQ ID NO: 1880398
uagggcauugguugacaau

SEQ ID NO: 1964211 - RNA, 19 nt, Artificial Sequence
  Description of Artificial Sequence: Synthetic oligonucleotide
  Antisense strand to SEQ ID NO: 1964210
auugucaaccaaugcccua

SEQ ID NO: 1964212 - RNA, 19 nt, Artificial Sequence
  Description of Artificial Sequence: Synthetic oligonucleotide
  Sense strand starting at position 2252 of SEQ ID NO: 1880398
ugacaauccuagcuaugcu

SEQ ID NO: 1964213 - RNA, 19 nt, Artificial Sequence
  Description of Artificial Sequence: Synthetic oligonucleotide
  Antisense strand to SEQ ID NO: 1964212
agcauagcuaggauuguca

SEQ ID NO: 1964214 - RNA, 19 nt, Artificial Sequence
  Description of Artificial Sequence: Synthetic oligonucleotide
  Sense strand starting at position 2411 of SEQ ID NO: 1880398
ccucaaauucgugacauac

SEQ ID NO: 1964215 - RNA, 19 nt, Artificial Sequence
  Description of Artificial Sequence: Synthetic oligonucleotide
  Antisense strand to SEQ ID NO: 1964214
guaugucacgaauuugagg

SEQ ID NO: 1964216 - RNA, 19 nt, Artificial Sequence
  Description of Artificial Sequence: Synthetic oligonucleotide
  Sense strand starting at position 2508 of SEQ ID NO: 1880398
ugaacagaaugcucaauca

SEQ ID NO: 1964217 - RNA, 19 nt, Artificial Sequence
  Description of Artificial Sequence: Synthetic oligonucleotide
  Antisense strand to SEQ ID NO: 1964216
ugauugagcauucuguuca

SEQ ID NO: 1964218 - RNA, 19 nt, Artificial Sequence
  Description of Artificial Sequence: Synthetic oligonucleotide
  Sense strand starting at position 2530 of SEQ ID NO: 1880398
gcagauuccagauggcaaa

SEQ ID NO: 1964219 - RNA, 19 nt, Artificial Sequence
  Description of Artificial Sequence: Synthetic oligonucleotide
  Antisense strand to SEQ ID NO: 1964218
uuugccaucuggaaucugc

SEQ ID NO: 1964220 - RNA, 19 nt, Artificial Sequence
  Description of Artificial Sequence: Synthetic oligonucleotide
  Sense strand starting at position 2603 of SEQ ID NO: 1880398
cugauugcccaguaacaga

SEQ ID NO: 1964221 - RNA, 19 nt, Artificial Sequence
  Description of Artificial Sequence: Synthetic oligonucleotide
  Antisense strand to SEQ ID NO: 1964220
ucuguuacugggcaaucag

SEQ ID NO: 1964222 - RNA, 19 nt, Artificial Sequence
  Description of Artificial Sequence: Synthetic oligonucleotide
  Sense strand starting at position 2719 of SEQ ID NO: 1880398
ugcccuacugaguauauca

SEQ ID NO: 1964223 - RNA, 19 nt, Artificial Sequence
  Description of Artificial Sequence: Synthetic oligonucleotide
  Antisense strand to SEQ ID NO: 1964222
ugauauacucaguagggca

SEQ ID NO: 1964224 - RNA, 19 nt, Artificial Sequence
  Description of Artificial Sequence: Synthetic oligonucleotide
  Sense strand starting at position 2852 of SEQ ID NO: 1880398
agacgcaaugaagguaaua

SEQ ID NO: 1964225 - RNA, 19 nt, Artificial Sequence
  Description of Artificial Sequence: Synthetic oligonucleotide
  Antisense strand to SEQ ID NO: 1964224
uauuaccuucauugcgucu

SEQ ID NO: 1964226 - RNA, 19 nt, Artificial Sequence
  Description of Artificial Sequence: Synthetic oligonucleotide
  Sense strand starting at position 2854 of SEQ ID NO: 1880398
acgcaaugaagguaauauu

SEQ ID NO: 1964227 - RNA, 19 nt, Artificial Sequence
  Description of Artificial Sequence: Synthetic oligonucleotide
  Antisense strand to SEQ ID NO: 1964226
aauauuaccuucauugcgu

SEQ ID NO: 1964228 - RNA, 19 nt, Artificial Sequence
  Description of Artificial Sequence: Synthetic oligonucleotide
  Sense strand starting at position 2900 of SEQ ID NO: 1880398
cuugauauucuggauucuu

SEQ ID NO: 1964229 - RNA, 19 nt, Artificial Sequence
  Description of Artificial Sequence: Synthetic oligonucleotide
  Antisense strand to SEQ ID NO: 1964228
aagaauccagaauaucaag

SEQ ID NO: 1964230 - RNA, 19 nt, Artificial Sequence
  Description of Artificial Sequence: Synthetic oligonucleotide
  Sense strand starting at position 2909 of SEQ ID NO: 1880398
cuggauucuucugccacua

SEQ ID NO: 1964231 - RNA, 19 nt, Artificial Sequence
  Description of Artificial Sequence: Synthetic oligonucleotide
  Antisense strand to SEQ ID NO: 1964230
uaguggcagaagaauccag

SEQ ID NO: 1964232 - RNA, 19 nt, Artificial Sequence
  Description of Artificial Sequence: Synthetic oligonucleotide
  Sense strand starting at position 3011 of SEQ ID NO: 1880398
uaggaagugucaguagaag

SEQ ID NO: 1964233 - RNA, 19 nt, Artificial Sequence
  Description of Artificial Sequence: Synthetic oligonucleotide
  Antisense strand to SEQ ID NO: 1964232
cuucuacugacacuuccua

SEQ ID NO: 1964234 - RNA, 19 nt, Artificial Sequence
  Description of Artificial Sequence: Synthetic oligonucleotide
  Sense strand starting at position 3097 of SEQ ID NO: 1880398
cuucuuauucuggguuuga

SEQ ID NO: 1964235 - RNA, 19 nt, Artificial Sequence
  Description of Artificial Sequence: Synthetic oligonucleotide
  Antisense strand to SEQ ID NO: 1964234
ucaaacccagaauaagaag

SEQ ID NO: 1964236 - RNA, 19 nt, Artificial Sequence
  Description of Artificial Sequence: Synthetic oligonucleotide
  Sense strand starting at position 3098 of SEQ ID NO: 1880398
uucuuauucuggguuugaa

SEQ ID NO: 1964237 - RNA, 19 nt, Artificial Sequence
  Description of Artificial Sequence: Synthetic oligonucleotide
  Antisense strand to SEQ ID NO: 1964236
uucaaacccagaauaagaa

SEQ ID NO: 1964238 - RNA, 19 nt, Artificial Sequence
  Description of Artificial Sequence: Synthetic oligonucleotide
  Sense strand starting at position 3613 of SEQ ID NO: 1880398
uugaguaucaccuggacag

SEQ ID NO: 1964239 - RNA, 19 nt, Artificial Sequence
  Description of Artificial Sequence: Synthetic oligonucleotide
  Antisense strand to SEQ ID NO: 1964238
cuguccaggugauacucaa

SEQ ID NO: 1964240 - RNA, 19 nt, Artificial Sequence
  Description of Artificial Sequence: Synthetic oligonucleotide
  Sense strand starting at position 3614 of SEQ ID NO: 1880398
ugaguaucaccuggacagu

SEQ ID NO: 1964241 - RNA, 19 nt, Artificial Sequence
  Description of Artificial Sequence: Synthetic oligonucleotide
  Antisense strand to SEQ ID NO: 1964240
acuguccaggugauacuca

SEQ ID NO: 1964242 - RNA, 19 nt, Artificial Sequence
  Description of Artificial Sequence: Synthetic oligonucleotide
  Sense strand starting at position 3915 of SEQ ID NO: 1880398
cuucuuccuggcuagaaga

SEQ ID NO: 1964243 - RNA, 19 nt, Artificial Sequence
  Description of Artificial Sequence: Synthetic oligonucleotide
  Antisense strand to SEQ ID NO: 1964242
ucuucuagccaggaagaag

SEQ ID NO: 1964244 - RNA, 19 nt, Artificial Sequence
  Description of Artificial Sequence: Synthetic oligonucleotide
  Sense strand starting at position 32 of SEQ ID NO: 1880399
accugauaguauuccuaga

SEQ ID NO: 1964245 - RNA, 19 nt, Artificial Sequence
  Description of Artificial Sequence: Synthetic oligonucleotide
  Antisense strand to SEQ ID NO: 1964244
ucuaggaauacuaucaggu

SEQ ID NO: 1964246 - RNA, 19 nt, Artificial Sequence
  Description of Artificial Sequence: Synthetic oligonucleotide
  Sense strand starting at position 34 of SEQ ID NO: 1880399
cugauaguauuccuagaag

SEQ ID NO: 1964247 - RNA, 19 nt, Artificial Sequence
  Description of Artificial Sequence: Synthetic oligonucleotide
  Antisense strand to SEQ ID NO: 1964246
cuucuaggaauacuaucag

SEQ ID NO: 1964248 - RNA, 19 nt, Artificial Sequence
  Description of Artificial Sequence: Synthetic oligonucleotide
  Sense strand starting at position 37 of SEQ ID NO: 1880399
auaguauuccuagaaguuu

SEQ ID NO: 1964249 - RNA, 19 nt, Artificial Sequence
  Description of Artificial Sequence: Synthetic oligonucleotide
  Antisense strand to SEQ ID NO: 1964248
aaacuucuaggaauacuau

SEQ ID NO: 1964250 - RNA, 19 nt, Artificial Sequence
  Description of Artificial Sequence: Synthetic oligonucleotide
  Sense strand starting at position 89 of SEQ ID NO: 1880399
auuuaacuguuccagaaag

SEQ ID NO: 1964251 - RNA, 19 nt, Artificial Sequence
  Description of Artificial Sequence: Synthetic oligonucleotide
  Antisense strand to SEQ ID NO: 1964250
cuuucuggaacaguuaaau

SEQ ID NO: 1964252 - RNA, 19 nt, Artificial Sequence
  Description of Artificial Sequence: Synthetic oligonucleotide
  Sense strand starting at position 184 of SEQ ID NO: 1880399
gggagccuucugcauaaua

SEQ ID NO: 1964253 - RNA, 19 nt, Artificial Sequence
  Description of Artificial Sequence: Synthetic oligonucleotide
  Antisense strand to SEQ ID NO: 1964252
uauuaugcagaaggcuccc

SEQ ID NO: 1964254 - RNA, 19 nt, Artificial Sequence
  Description of Artificial Sequence: Synthetic oligonucleotide
  Sense strand starting at position 524 of SEQ ID NO: 1880399
cugugauaccuugggaaag

SEQ ID NO: 1964255 - RNA, 19 nt, Artificial Sequence
  Description of Artificial Sequence: Synthetic oligonucleotide
  Antisense strand to SEQ ID NO: 1964254
cuuucccaagguaucacag

SEQ ID NO: 1964256 - RNA, 19 nt, Artificial Sequence
  Description of Artificial Sequence: Synthetic oligonucleotide
  Sense strand starting at position 579 of SEQ ID NO: 1880399
ugaauuaauuuggagcuaa

SEQ ID NO: 1964257 - RNA, 19 nt, Artificial Sequence
  Description of Artificial Sequence: Synthetic oligonucleotide
  Antisense strand to SEQ ID NO: 1964256
uuagcuccaaauuaauuca

SEQ ID NO: 1964258 - RNA, 19 nt, Artificial Sequence
  Description of Artificial Sequence: Synthetic oligonucleotide
  Sense strand starting at position 650 of SEQ ID NO: 1880399
ugugucagucaauaaacau

SEQ ID NO: 1964259 - RNA, 19 nt, Artificial Sequence
  Description of Artificial Sequence: Synthetic oligonucleotide
  Antisense strand to SEQ ID NO: 1964258
auguuuauugacugacaca

SEQ ID NO: 1964260 - RNA, 19 nt, Artificial Sequence
  Description of Artificial Sequence: Synthetic oligonucleotide
  Sense strand starting at position 755 of SEQ ID NO: 1880399
agaauuucuucugauagau

SEQ ID NO: 1964261 - RNA, 19 nt, Artificial Sequence
  Description of Artificial Sequence: Synthetic oligonucleotide
  Antisense strand to SEQ ID NO: 1964260
aucuaucagaagaaauucu

SEQ ID NO: 1964262 - RNA, 19 nt, Artificial Sequence
  Description of Artificial Sequence: Synthetic oligonucleotide
  Sense strand starting at position 765 of SEQ ID NO: 1880399
cugauagauuuguaaugaa

SEQ ID NO: 1964263 - RNA, 19 nt, Artificial Sequence
  Description of Artificial Sequence: Synthetic oligonucleotide
  Antisense strand to SEQ ID NO: 1964262
uucauuacaaaucuaucag

SEQ ID NO: 1964264 - RNA, 19 nt, Artificial Sequence
  Description of Artificial Sequence: Synthetic oligonucleotide
  Sense strand starting at position 860 of SEQ ID NO: 1880399
agguaaauguucuugaaau

SEQ ID NO: 1964265 - RNA, 19 nt, Artificial Sequence
  Description of Artificial Sequence: Synthetic oligonucleotide
  Antisense strand to SEQ ID NO: 1964264
auuucaagaacauuuaccu

SEQ ID NO: 1964266 - RNA, 19 nt, Artificial Sequence
  Description of Artificial Sequence: Synthetic oligonucleotide
  Sense strand starting at position 902 of SEQ ID NO: 1880399
uuauacuuagaaggcaaua

SEQ ID NO: 1964267 - RNA, 19 nt, Artificial Sequence
  Description of Artificial Sequence: Synthetic oligonucleotide
  Antisense strand to SEQ ID NO: 1964266
uauugccuucuaaguauaa

SEQ ID NO: 1964268 - RNA, 19 nt, Artificial Sequence
  Description of Artificial Sequence: Synthetic oligonucleotide
  Sense strand starting at position 1241 of SEQ ID NO: 1880399
agugcaaagagauguaaca

SEQ ID NO: 1964269 - RNA, 19 nt, Artificial Sequence
  Description of Artificial Sequence: Synthetic oligonucleotide
  Antisense strand to SEQ ID NO: 1964268
uguuacaucucuuugcacu

SEQ ID NO: 1964270 - RNA, 19 nt, Artificial Sequence
  Description of Artificial Sequence: Synthetic oligonucleotide
  Sense strand starting at position 1381 of SEQ ID NO: 1880399
ucaugagaauguccugaaa

SEQ ID NO: 1964271 - RNA, 19 nt, Artificial Sequence
  Description of Artificial Sequence: Synthetic oligonucleotide
  Antisense strand to SEQ ID NO: 1964270
uuucaggacauucucauga

SEQ ID NO: 1964272 - RNA, 19 nt, Artificial Sequence
  Description of Artificial Sequence: Synthetic oligonucleotide
  Sense strand starting at position 1562 of SEQ ID NO: 1880399
gcaaguagucaucacaaag

SEQ ID NO: 1964273 - RNA, 19 nt, Artificial Sequence
  Description of Artificial Sequence: Synthetic oligonucleotide
  Antisense strand to SEQ ID NO: 1964272
cuuugugaugacuacuugc

SEQ ID NO: 1964274 - RNA, 19 nt, Artificial Sequence
  Description of Artificial Sequence: Synthetic oligonucleotide
  Sense strand starting at position 1580 of SEQ ID NO: 1880399
gcaacuaaggaguagcaaa

SEQ ID NO: 1964275 - RNA, 19 nt, Artificial Sequence
  Description of Artificial Sequence: Synthetic oligonucleotide
  Antisense strand to SEQ ID NO: 1964274
uuugcuacuccuuaguugc

SEQ ID NO: 1964276 - RNA, 19 nt, Artificial Sequence
  Description of Artificial Sequence: Synthetic oligonucleotide
  Sense strand starting at position 1702 of SEQ ID NO: 1880399
gcuuucuaagaguaguuga

SEQ ID NO: 1964277 - RNA, 19 nt, Artificial Sequence
  Description of Artificial Sequence: Synthetic oligonucleotide
  Antisense strand to SEQ ID NO: 1964276
ucaacuacucuuagaaagc

SEQ ID NO: 1964278 - RNA, 19 nt, Artificial Sequence
  Description of Artificial Sequence: Synthetic oligonucleotide
  Sense strand starting at position 1710 of SEQ ID NO: 1880399
agaguaguugaaggucuau

SEQ ID NO: 1964279 - RNA, 19 nt, Artificial Sequence
  Description of Artificial Sequence: Synthetic oligonucleotide
  Antisense strand to SEQ ID NO: 1964278
auagaccuucaacuacucu

SEQ ID NO: 1964280 - RNA, 19 nt, Artificial Sequence
  Description of Artificial Sequence: Synthetic oligonucleotide
  Sense strand starting at position 1716 of SEQ ID NO: 1880399
guugaaggucuaugaauaa

SEQ ID NO: 1964281 - RNA, 19 nt, Artificial Sequence
  Description of Artificial Sequence: Synthetic oligonucleotide
  Antisense strand to SEQ ID NO: 1964280
uuauucauagaccuucaac

SEQ ID NO: 1964282 - RNA, 19 nt, Artificial Sequence
  Description of Artificial Sequence: Synthetic oligonucleotide
  Sense strand starting at position 1899 of SEQ ID NO: 1880399
guaauugaugcuuacccaa

SEQ ID NO: 1964283 - RNA, 19 nt, Artificial Sequence
  Description of Artificial Sequence: Synthetic oligonucleotide
  Antisense strand to SEQ ID NO: 1964282
uuggguaagcaucaauuac

SEQ ID NO: 1964284 - RNA, 19 nt, Artificial Sequence
  Description of Artificial Sequence: Synthetic oligonucleotide
  Sense strand starting at position 2047 of SEQ ID NO: 1880399
aaauuugauuuguggccaa

SEQ ID NO: 1964285 - RNA, 19 nt, Artificial Sequence
  Description of Artificial Sequence: Synthetic oligonucleotide
  Antisense strand to SEQ ID NO: 1964284
uuggccacaaaucaaauuu

SEQ ID NO: 1964286 - RNA, 19 nt, Artificial Sequence
  Description of Artificial Sequence: Synthetic oligonucleotide
  Sense strand starting at position 2059 of SEQ ID NO: 1880399
uggccaaaucuaugacuug

SEQ ID NO: 1964287 - RNA, 19 nt, Artificial Sequence
  Description of Artificial Sequence: Synthetic oligonucleotide
  Antisense strand to SEQ ID NO: 1964286
caagucauagauuuggcca

SEQ ID NO: 1964288 - RNA, 19 nt, Artificial Sequence
  Description of Artificial Sequence: Synthetic oligonucleotide
  Sense strand starting at position 2153 of SEQ ID NO: 1880399
ugaguaaucccuugagagg

SEQ ID NO: 1964289 - RNA, 19 nt, Artificial Sequence
  Description of Artificial Sequence: Synthetic oligonucleotide
  Antisense strand to SEQ ID NO: 1964288
ccucucaagggauuacuca

SEQ ID NO: 1964290 - RNA, 19 nt, Artificial Sequence
  Description of Artificial Sequence: Synthetic oligonucleotide
  Sense strand starting at position 2207 of SEQ ID NO: 1880399
acuucucaggcugauuaau

SEQ ID NO: 1964291 - RNA, 19 nt, Artificial Sequence
  Description of Artificial Sequence: Synthetic oligonucleotide
  Antisense strand to SEQ ID NO: 1964290
auuaaucagccugagaagu

SEQ ID NO: 1964292 - RNA, 19 nt, Artificial Sequence
  Description of Artificial Sequence: Synthetic oligonucleotide
  Sense strand starting at position 2209 of SEQ ID NO: 1880399
uucucaggcugauuaauaa

SEQ ID NO: 1964293 - RNA, 19 nt, Artificial Sequence
  Description of Artificial Sequence: Synthetic oligonucleotide
  Antisense strand to SEQ ID NO: 1964292
uuauuaaucagccugagaa

SEQ ID NO: 1964294 - RNA, 19 nt, Artificial Sequence
  Description of Artificial Sequence: Synthetic oligonucleotide
  Sense strand starting at position 2446 of SEQ ID NO: 1880399
uuagaaauucucugucuag

SEQ ID NO: 1964295 - RNA, 19 nt, Artificial Sequence
  Description of Artificial Sequence: Synthetic oligonucleotide
  Antisense strand to SEQ ID NO: 1964294
cuagacagagaauuucuaa

SEQ ID NO: 1964296 - RNA, 19 nt, Artificial Sequence
  Description of Artificial Sequence: Synthetic oligonucleotide
  Sense strand starting at position 2447 of SEQ ID NO: 1880399
uagaaauucucugucuagg

SEQ ID NO: 1964297 - RNA, 19 nt, Artificial Sequence
  Description of Artificial Sequence: Synthetic oligonucleotide
  Antisense strand to SEQ ID NO: 1964296
ccuagacagagaauuucua

SEQ ID NO: 1964298 - RNA, 19 nt, Artificial Sequence
  Description of Artificial Sequence: Synthetic oligonucleotide
  Sense strand starting at position 2612 of SEQ ID NO: 1880399
cuaagaagcuucccucaag

SEQ ID NO: 1964299 - RNA, 19 nt, Artificial Sequence
  Description of Artificial Sequence: Synthetic oligonucleotide
  Antisense strand to SEQ ID NO: 1964298
cuugagggaagcuucuuag

SEQ ID NO: 1964300 - RNA, 19 nt, Artificial Sequence
  Description of Artificial Sequence: Synthetic oligonucleotide
  Sense strand starting at position 2720 of SEQ ID NO: 1880399
uugcgaugacccuaucaug

SEQ ID NO: 1964301 - RNA, 19 nt, Artificial Sequence
  Description of Artificial Sequence: Synthetic oligonucleotide
  Antisense strand to SEQ ID NO: 1964300
caugauagggucaucgcaa

SEQ ID NO: 1964302 - RNA, 19 nt, Artificial Sequence
  Description of Artificial Sequence: Synthetic oligonucleotide
  Sense strand starting at position 2746 of SEQ ID NO: 1880399
ucaaccuacguuuauaagu

SEQ ID NO: 1964303 - RNA, 19 nt, Artificial Sequence
  Description of Artificial Sequence: Synthetic oligonucleotide
  Antisense strand to SEQ ID NO: 1964302
acuuauaaacguagguuga

SEQ ID NO: 1964304 - RNA, 19 nt, Artificial Sequence
  Description of Artificial Sequence: Synthetic oligonucleotide
  Sense strand starting at position 3115 of SEQ ID NO: 1880399
aagggagaguuaucaguac

SEQ ID NO: 1964305 - RNA, 19 nt, Artificial Sequence
  Description of Artificial Sequence: Synthetic oligonucleotide
  Antisense strand to SEQ ID NO: 1964304
guacugauaacucucccuu

SEQ ID NO: 1964306 - RNA, 19 nt, Artificial Sequence
  Description of Artificial Sequence: Synthetic oligonucleotide
  Sense strand starting at position 3293 of SEQ ID NO: 1880399
ccguaaauuagaggaauua

SEQ ID NO: 1964307 - RNA, 19 nt, Artificial Sequence
  Description of Artificial Sequence: Synthetic oligonucleotide
  Antisense strand to SEQ ID NO: 1964306
uaauuccucuaauuuacgg

SEQ ID NO: 1964308 - RNA, 19 nt, Artificial Sequence
  Description of Artificial Sequence: Synthetic oligonucleotide
  Sense strand starting at position 3304 of SEQ ID NO: 1880399
aggaauuaggucugcacau

SEQ ID NO: 1964309 - RNA, 19 nt, Artificial Sequence
  Description of Artificial Sequence: Synthetic oligonucleotide
  Antisense strand to SEQ ID NO: 1964308
augugcagaccuaauuccu

SEQ ID NO: 1964310 - RNA, 19 nt, Artificial Sequence
  Description of Artificial Sequence: Synthetic oligonucleotide
  Sense strand starting at position 3305 of SEQ ID NO: 1880399
ggaauuaggucugcacauu

SEQ ID NO: 1964311 - RNA, 19 nt, Artificial Sequence
  Description of Artificial Sequence: Synthetic oligonucleotide
  Antisense strand to SEQ ID NO: 1964310
aaugugcagaccuaauucc

SEQ ID NO: 1964312 - RNA, 19 nt, Artificial Sequence
  Description of Artificial Sequence: Synthetic oligonucleotide
  Sense strand starting at position 3306 of SEQ ID NO: 1880399
gaauuaggucugcacauua

SEQ ID NO: 1964313 - RNA, 19 nt, Artificial Sequence
  Description of Artificial Sequence: Synthetic oligonucleotide
  Antisense strand to SEQ ID NO: 1964312
uaaugugcagaccuaauuc

SEQ ID NO: 1964314 - RNA, 19 nt, Artificial Sequence
  Description of Artificial Sequence: Synthetic oligonucleotide
  Sense strand starting at position 3311 of SEQ ID NO: 1880399
aggucugcacauuauuauu

SEQ ID NO: 1964315 - RNA, 19 nt, Artificial Sequence
  Description of Artificial Sequence: Synthetic oligonucleotide
  Antisense strand to SEQ ID NO: 1964314
aauaauaaugugcagaccu

SEQ ID NO: 1964316 - RNA, 19 nt, Artificial Sequence
  Description of Artificial Sequence: Synthetic oligonucleotide
  Sense strand starting at position 3617 of SEQ ID NO: 1880399
gaaauucugcaggaguauu

SEQ ID NO: 1964317 - RNA, 19 nt, Artificial Sequence
  Description of Artificial Sequence: Synthetic oligonucleotide
  Antisense strand to SEQ ID NO: 1964316
aauacuccugcagaauuuc

SEQ ID NO: 1964318 - RNA, 19 nt, Artificial Sequence
  Description of Artificial Sequence: Synthetic oligonucleotide
  Sense strand starting at position 3771 of SEQ ID NO: 1880399
ggauaagacuguuuaagua

SEQ ID NO: 1964319 - RNA, 19 nt, Artificial Sequence
  Description of Artificial Sequence: Synthetic oligonucleotide
  Antisense strand to SEQ ID NO: 1964318
uacuuaaacagucuuaucc

SEQ ID NO: 1964320 - RNA, 19 nt, Artificial Sequence
  Description of Artificial Sequence: Synthetic oligonucleotide
  Sense strand starting at position 3900 of SEQ ID NO: 1880399
accagagauuaggcuggua

SEQ ID NO: 1964321 - RNA, 19 nt, Artificial Sequence
  Description of Artificial Sequence: Synthetic oligonucleotide
  Antisense strand to SEQ ID NO: 1964320
uaccagccuaaucucuggu

SEQ ID NO: 1964322 - RNA, 19 nt, Artificial Sequence
  Description of Artificial Sequence: Synthetic oligonucleotide
  Sense strand starting at position 3903 of SEQ ID NO: 1880399
agagauuaggcugguaaag

SEQ ID NO: 1964323 - RNA, 19 nt, Artificial Sequence
  Description of Artificial Sequence: Synthetic oligonucleotide
  Antisense strand to SEQ ID NO: 1964322
cuuuaccagccuaaucucu

SEQ ID NO: 1964324 - RNA, 19 nt, Artificial Sequence
  Description of Artificial Sequence: Synthetic oligonucleotide
  Sense strand starting at position 30 of SEQ ID NO: 1880400
gagaguaucagguggauaa

SEQ ID NO: 1964325 - RNA, 19 nt, Artificial Sequence
  Description of Artificial Sequence: Synthetic oligonucleotide
  Antisense strand to SEQ ID NO: 1964324
uuauccaccugauacucuc

SEQ ID NO: 1964326 - RNA, 19 nt, Artificial Sequence
  Description of Artificial Sequence: Synthetic oligonucleotide
  Sense strand starting at position 42 of SEQ ID NO: 1880400
uggauaacugcucaagcca

SEQ ID NO: 1964327 - RNA, 19 nt, Artificial Sequence
  Description of Artificial Sequence: Synthetic oligonucleotide
  Antisense strand to SEQ ID NO: 1964326
uggcuugagcaguuaucca

SEQ ID NO: 1964328 - RNA, 19 nt, Artificial Sequence
  Description of Artificial Sequence: Synthetic oligonucleotide
  Sense strand starting at position 67 of SEQ ID NO: 1880400
caggcuuagccuugauaua

SEQ ID NO: 1964329 - RNA, 19 nt, Artificial Sequence
  Description of Artificial Sequence: Synthetic oligonucleotide
  Antisense strand to SEQ ID NO: 1964328
uauaucaaggcuaagccug

SEQ ID NO: 1964330 - RNA, 19 nt, Artificial Sequence
  Description of Artificial Sequence: Synthetic oligonucleotide
  Sense strand starting at position 68 of SEQ ID NO: 1880400
aggcuuagccuugauauau

SEQ ID NO: 1964331 - RNA, 19 nt, Artificial Sequence
  Description of Artificial Sequence: Synthetic oligonucleotide
  Antisense strand to SEQ ID NO: 1964330
auauaucaaggcuaagccu

SEQ ID NO: 1964332 - RNA, 19 nt, Artificial Sequence
  Description of Artificial Sequence: Synthetic oligonucleotide
  Sense strand starting at position 221 of SEQ ID NO: 1880400
cuaguuguucuccauacuu

SEQ ID NO: 1964333 - RNA, 19 nt, Artificial Sequence
  Description of Artificial Sequence: Synthetic oligonucleotide
  Antisense strand to SEQ ID NO: 1964332
aaguauggagaacaacuag

SEQ ID NO: 1964334 - RNA, 19 nt, Artificial Sequence
  Description of Artificial Sequence: Synthetic oligonucleotide
  Sense strand starting at position 223 of SEQ ID NO: 1880400
aguuguucuccauacuucu

SEQ ID NO: 1964335 - RNA, 19 nt, Artificial Sequence
  Description of Artificial Sequence: Synthetic oligonucleotide
  Antisense strand to SEQ ID NO: 1964334
agaaguauggagaacaacu

SEQ ID NO: 1964336 - RNA, 19 nt, Artificial Sequence
  Description of Artificial Sequence: Synthetic oligonucleotide
  Sense strand starting at position 245 of SEQ ID NO: 1880400
ucuugucuccacgaagauu

SEQ ID NO: 1964337 - RNA, 19 nt, Artificial Sequence
  Description of Artificial Sequence: Synthetic oligonucleotide
  Antisense strand to SEQ ID NO: 1964336
aaucuucguggagacaaga

SEQ ID NO: 1964338 - RNA, 19 nt, Artificial Sequence
  Description of Artificial Sequence: Synthetic oligonucleotide
  Sense strand starting at position 360 of SEQ ID NO: 1880400
ucuccuuugcuagacaugu

SEQ ID NO: 1964339 - RNA, 19 nt, Artificial Sequence
  Description of Artificial Sequence: Synthetic oligonucleotide
  Antisense strand to SEQ ID NO: 1964338
acaugucuagcaaaggaga

SEQ ID NO: 1964340 - RNA, 19 nt, Artificial Sequence
  Description of Artificial Sequence: Synthetic oligonucleotide
  Sense strand starting at position 491 of SEQ ID NO: 1880400
ucauuucuaucuguuuguu

SEQ ID NO: 1964341 - RNA, 19 nt, Artificial Sequence
  Description of Artificial Sequence: Synthetic oligonucleotide
  Antisense strand to SEQ ID NO: 1964340
aacaaacagauagaaauga

SEQ ID NO: 1964342 - RNA, 19 nt, Artificial Sequence
  Description of Artificial Sequence: Synthetic oligonucleotide
  Sense strand starting at position 692 of SEQ ID NO: 1880400
cguggagaguucucaauac

SEQ ID NO: 1964343 - RNA, 19 nt, Artificial Sequence
  Description of Artificial Sequence: Synthetic oligonucleotide
  Antisense strand to SEQ ID NO: 1964342
guauugagaacucuccacg

SEQ ID NO: 1964344 - RNA, 19 nt, Artificial Sequence
  Description of Artificial Sequence: Synthetic oligonucleotide
  Sense strand starting at position 696 of SEQ ID NO: 1880400
gagaguucucaauacugua

SEQ ID NO: 1964345 - RNA, 19 nt, Artificial Sequence
  Description of Artificial Sequence: Synthetic oligonucleotide
  Antisense strand to SEQ ID NO: 1964344
uacaguauugagaacucuc

SEQ ID NO: 1964346 - RNA, 19 nt, Artificial Sequence
  Description of Artificial Sequence: Synthetic oligonucleotide
  Sense strand starting at position 913 of SEQ ID NO: 1880400
ugucuucaucugggaagga

SEQ ID NO: 1964347 - RNA, 19 nt, Artificial Sequence
  Description of Artificial Sequence: Synthetic oligonucleotide
  Antisense strand to SEQ ID NO: 1964346
uccuucccagaugaagaca

SEQ ID NO: 1964348 - RNA, 19 nt, Artificial Sequence
  Description of Artificial Sequence: Synthetic oligonucleotide
  Sense strand starting at position 982 of SEQ ID NO: 1880400
ugaguuaauacugggacau

SEQ ID NO: 1964349 - RNA, 19 nt, Artificial Sequence
  Description of Artificial Sequence: Synthetic oligonucleotide
  Antisense strand to SEQ ID NO: 1964348
augucccaguauuaacuca

SEQ ID NO: 1964350 - RNA, 19 nt, Artificial Sequence
  Description of Artificial Sequence: Synthetic oligonucleotide
  Sense strand starting at position 1036 of SEQ ID NO: 1880400
ucuuuaggcggguauaaua

SEQ ID NO: 1964351 - RNA, 19 nt, Artificial Sequence
  Description of Artificial Sequence: Synthetic oligonucleotide
  Antisense strand to SEQ ID NO: 1964350
uauuauacccgccuaaaga

SEQ ID NO: 1964352 - RNA, 19 nt, Artificial Sequence
  Description of Artificial Sequence: Synthetic oligonucleotide
  Sense strand starting at position 1333 of SEQ ID NO: 1880400
uccauucggucuucuagaa

SEQ ID NO: 1964353 - RNA, 19 nt, Artificial Sequence
  Description of Artificial Sequence: Synthetic oligonucleotide
  Antisense strand to SEQ ID NO: 1964352
uucuagaagaccgaaugga

SEQ ID NO: 1964354 - RNA, 19 nt, Artificial Sequence
  Description of Artificial Sequence: Synthetic oligonucleotide
  Sense strand starting at position 1711 of SEQ ID NO: 1880400
gcaguacucgcuguuacca

SEQ ID NO: 1964355 - RNA, 19 nt, Artificial Sequence
  Description of Artificial Sequence: Synthetic oligonucleotide
  Antisense strand to SEQ ID NO: 1964354
ugguaacagcgaguacugc

SEQ ID NO: 1964356 - RNA, 19 nt, Artificial Sequence
  Description of Artificial Sequence: Synthetic oligonucleotide
  Sense strand starting at position 1777 of SEQ ID NO: 1880400
uggacucuccgaggagcaa

SEQ ID NO: 1964357 - RNA, 19 nt, Artificial Sequence
  Description of Artificial Sequence: Synthetic oligonucleotide
  Antisense strand to SEQ ID NO: 1964356
uugcuccucggagagucca

SEQ ID NO: 1964358 - RNA, 19 nt, Artificial Sequence
  Description of Artificial Sequence: Synthetic oligonucleotide
  Sense strand starting at position 2203 of SEQ ID NO: 1880400
aaguuuggugaauguauac

SEQ ID NO: 1964359 - RNA, 19 nt, Artificial Sequence
  Description of Artificial Sequence: Synthetic oligonucleotide
  Antisense strand to SEQ ID NO: 1964358
guauacauucaccaaacuu

SEQ ID NO: 1964360 - RNA, 19 nt, Artificial Sequence
  Description of Artificial Sequence: Synthetic oligonucleotide
  Sense strand starting at position 2299 of SEQ ID NO: 1880400
acaguuggguggaggaaua

SEQ ID NO: 1964361 - RNA, 19 nt, Artificial Sequence
  Description of Artificial Sequence: Synthetic oligonucleotide
  Antisense strand to SEQ ID NO: 1964360
uauuccuccacccaacugu

SEQ ID NO: 1964362 - RNA, 19 nt, Artificial Sequence
  Description of Artificial Sequence: Synthetic oligonucleotide
  Sense strand starting at position 2342 of SEQ ID NO: 1880400
ggccgaaaugguuaaacag

SEQ ID NO: 1964363 - RNA, 19 nt, Artificial Sequence
  Description of Artificial Sequence: Synthetic oligonucleotide
  Antisense strand to SEQ ID NO: 1964362
cuguuuaaccauuucggcc

SEQ ID NO: 1964364 - RNA, 19 nt, Artificial Sequence
  Description of Artificial Sequence: Synthetic oligonucleotide
  Sense strand starting at position 2377 of SEQ ID NO: 1880400
gcagaugcaguuuagguau

SEQ ID NO: 1964365 - RNA, 19 nt, Artificial Sequence
  Description of Artificial Sequence: Synthetic oligonucleotide
  Antisense strand to SEQ ID NO: 1964364
auaccuaaacugcaucugc

SEQ ID NO: 1964366 - RNA, 19 nt, Artificial Sequence
  Description of Artificial Sequence: Synthetic oligonucleotide
  Sense strand starting at position 2524 of SEQ ID NO: 1880400
caaucuaaguguccugaug

SEQ ID NO: 1964367 - RNA, 19 nt, Artificial Sequence
  Description of Artificial Sequence: Synthetic oligonucleotide
  Antisense strand to SEQ ID NO: 1964366
caucaggacacuuagauug

SEQ ID NO: 1964368 - RNA, 19 nt, Artificial Sequence
  Description of Artificial Sequence: Synthetic oligonucleotide
  Sense strand starting at position 2535 of SEQ ID NO: 1880400
uccugaugaauugguguau

SEQ ID NO: 1964369 - RNA, 19 nt, Artificial Sequence
  Description of Artificial Sequence: Synthetic oligonucleotide
  Antisense strand to SEQ ID NO: 1964368
auacaccaauucaucagga

SEQ ID NO: 1964370 - RNA, 19 nt, Artificial Sequence
  Description of Artificial Sequence: Synthetic oligonucleotide
  Sense strand starting at position 2539 of SEQ ID NO: 1880400
gaugaauugguguauccau

SEQ ID NO: 1964371 - RNA, 19 nt, Artificial Sequence
  Description of Artificial Sequence: Synthetic oligonucleotide
  Antisense strand to SEQ ID NO: 1964370
auggauacaccaauucauc

SEQ ID NO: 1964372 - RNA, 19 nt, Artificial Sequence
  Description of Artificial Sequence: Synthetic oligonucleotide
  Sense strand starting at position 2599 of SEQ ID NO: 1880400
ccagaaggcuaucuaggaa

SEQ ID NO: 1964373 - RNA, 19 nt, Artificial Sequence
  Description of Artificial Sequence: Synthetic oligonucleotide
  Antisense strand to SEQ ID NO: 1964372
uuccuagauagccuucugg

SEQ ID NO: 1964374 - RNA, 19 nt, Artificial Sequence
  Description of Artificial Sequence: Synthetic oligonucleotide
  Sense strand starting at position 2602 of SEQ ID NO: 1880400
gaaggcuaucuaggaaauu

SEQ ID NO: 1964375 - RNA, 19 nt, Artificial Sequence
  Description of Artificial Sequence: Synthetic oligonucleotide
  Antisense strand to SEQ ID NO: 1964374
aauuuccuagauagccuuc

SEQ ID NO: 1964376 - RNA, 19 nt, Artificial Sequence
  Description of Artificial Sequence: Synthetic oligonucleotide
  Sense strand starting at position 2774 of SEQ ID NO: 1880400
ugugcugauacacgaaaua

SEQ ID NO: 1964377 - RNA, 19 nt, Artificial Sequence
  Description of Artificial Sequence: Synthetic oligonucleotide
  Antisense strand to SEQ ID NO: 1964376
uauuucguguaucagcaca

SEQ ID NO: 1964378 - RNA, 19 nt, Artificial Sequence
  Description of Artificial Sequence: Synthetic oligonucleotide
  Sense strand starting at position 3049 of SEQ ID NO: 1880400
aagauuaugugaucugauu

SEQ ID NO: 1964379 - RNA, 19 nt, Artificial Sequence
  Description of Artificial Sequence: Synthetic oligonucleotide
  Antisense strand to SEQ ID NO: 1964378
aaucagaucacauaaucuu

SEQ ID NO: 1964380 - RNA, 19 nt, Artificial Sequence
  Description of Artificial Sequence: Synthetic oligonucleotide
  Sense strand starting at position 3109 of SEQ ID NO: 1880400
aggaauguauaccuguuaa

SEQ ID NO: 1964381 - RNA, 19 nt, Artificial Sequence
  Description of Artificial Sequence: Synthetic oligonucleotide
  Antisense strand to SEQ ID NO: 1964380
uuaacagguauacauuccu

SEQ ID NO: 1964382 - RNA, 19 nt, Artificial Sequence
  Description of Artificial Sequence: Synthetic oligonucleotide
  Sense strand starting at position 3123 of SEQ ID NO: 1880400
guuaauguugguuaacugu

SEQ ID NO: 1964383 - RNA, 19 nt, Artificial Sequence
  Description of Artificial Sequence: Synthetic oligonucleotide
  Antisense strand to SEQ ID NO: 1964382
acaguuaaccaacauuaac

SEQ ID NO: 1964384 - RNA, 19 nt, Artificial Sequence
  Description of Artificial Sequence: Synthetic oligonucleotide
  Sense strand starting at position 3254 of SEQ ID NO: 1880400
auauaugagugucugagca

SEQ ID NO: 1964385 - RNA, 19 nt, Artificial Sequence
  Description of Artificial Sequence: Synthetic oligonucleotide
  Antisense strand to SEQ ID NO: 1964384
ugcucagacacucauauau

SEQ ID NO: 1964386 - RNA, 19 nt, Artificial Sequence
  Description of Artificial Sequence: Synthetic oligonucleotide
  Sense strand starting at position 3361 of SEQ ID NO: 1880400
ucauguaguaugugauuau

SEQ ID NO: 1964387 - RNA, 19 nt, Artificial Sequence
  Description of Artificial Sequence: Synthetic oligonucleotide
  Antisense strand to SEQ ID NO: 1964386
auaaucacauacuacauga

SEQ ID NO: 1964388 - RNA, 19 nt, Artificial Sequence
  Description of Artificial Sequence: Synthetic oligonucleotide
  Sense strand starting at position 3364 of SEQ ID NO: 1880400
uguaguaugugauuaugaa

SEQ ID NO: 1964389 - RNA, 19 nt, Artificial Sequence
  Description of Artificial Sequence: Synthetic oligonucleotide
  Antisense strand to SEQ ID NO: 1964388
uucauaaucacauacuaca

SEQ ID NO: 1964390 - RNA, 19 nt, Artificial Sequence
  Description of Artificial Sequence: Synthetic oligonucleotide
  Sense strand starting at position 3365 of SEQ ID NO: 1880400
guaguaugugauuaugaaa

SEQ ID NO: 1964391 - RNA, 19 nt, Artificial Sequence
  Description of Artificial Sequence: Synthetic oligonucleotide
  Antisense strand to SEQ ID NO: 1964390
uuucauaaucacauacuac

SEQ ID NO: 1964392 - RNA, 19 nt, Artificial Sequence
  Description of Artificial Sequence: Synthetic oligonucleotide
  Sense strand starting at position 3396 of SEQ ID NO: 1880400
gucagacaagccuauuauc

SEQ ID NO: 1964393 - RNA, 19 nt, Artificial Sequence
  Description of Artificial Sequence: Synthetic oligonucleotide
  Antisense strand to SEQ ID NO: 1964392
gauaauaggcuugucugac

SEQ ID NO: 1964394 - RNA, 19 nt, Artificial Sequence
  Description of Artificial Sequence: Synthetic oligonucleotide
  Sense strand starting at position 3492 of SEQ ID NO: 1880400
gcucuauaagauggaauac

SEQ ID NO: 1964395 - RNA, 19 nt, Artificial Sequence
  Description of Artificial Sequence: Synthetic oligonucleotide
  Antisense strand to SEQ ID NO: 1964394
guauuccaucuuauagagc

SEQ ID NO: 1964396 - RNA, 19 nt, Artificial Sequence
  Description of Artificial Sequence: Synthetic oligonucleotide
  Sense strand starting at position 3646 of SEQ ID NO: 1880400
agguuucuagccuaaguau

SEQ ID NO: 1964397 - RNA, 19 nt, Artificial Sequence
  Description of Artificial Sequence: Synthetic oligonucleotide
  Antisense strand to SEQ ID NO: 1964396
auacuuaggcuagaaaccu

SEQ ID NO: 1964398 - RNA, 19 nt, Artificial Sequence
  Description of Artificial Sequence: Synthetic oligonucleotide
  Sense strand starting at position 3714 of SEQ ID NO: 1880400
gcaaguuaagaagggaauu

SEQ ID NO: 1964399 - RNA, 19 nt, Artificial Sequence
  Description of Artificial Sequence: Synthetic oligonucleotide
  Antisense strand to SEQ ID NO: 1964398
aauucccuucuuaacuugc

SEQ ID NO: 1964400 - RNA, 19 nt, Artificial Sequence
  Description of Artificial Sequence: Synthetic oligonucleotide
  Sense strand starting at position 3810 of SEQ ID NO: 1880400
caaggaugaaagugugagu

SEQ ID NO: 1964401 - RNA, 19 nt, Artificial Sequence
  Description of Artificial Sequence: Synthetic oligonucleotide
  Antisense strand to SEQ ID NO: 1964400
acucacacuuucauccuug

SEQ ID NO: 1964402 - RNA, 19 nt, Artificial Sequence
  Description of Artificial Sequence: Synthetic oligonucleotide
  Sense strand starting at position 3833 of SEQ ID NO: 1880400
augucaucagcguaauacu

SEQ ID NO: 1964403 - RNA, 19 nt, Artificial Sequence
  Description of Artificial Sequence: Synthetic oligonucleotide
  Antisense strand to SEQ ID NO: 1964402
aguauuacgcugaugacau

SEQ ID NO: 1964404 - RNA, 19 nt, Artificial Sequence
  Description of Artificial Sequence: Synthetic oligonucleotide
  Sense strand starting at position 452 of SEQ ID NO: 1880401
uugaguaagucuuucuauc

SEQ ID NO: 1964405 - RNA, 19 nt, Artificial Sequence
  Description of Artificial Sequence: Synthetic oligonucleotide
  Antisense strand to SEQ ID NO: 1964404
gauagaaagacuuacucaa

SEQ ID NO: 1964406 - RNA, 19 nt, Artificial Sequence
  Description of Artificial Sequence: Synthetic oligonucleotide
  Sense strand starting at position 495 of SEQ ID NO: 1880401
ugucaaggucacuggugaa

SEQ ID NO: 1964407 - RNA, 19 nt, Artificial Sequence
  Description of Artificial Sequence: Synthetic oligonucleotide
  Antisense strand to SEQ ID NO: 1964406
uucaccagugaccuugaca

SEQ ID NO: 1964408 - RNA, 19 nt, Artificial Sequence
  Description of Artificial Sequence: Synthetic oligonucleotide
  Sense strand starting at position 588 of SEQ ID NO: 1880401
agaaguuacuucuccugga

SEQ ID NO: 1964409 - RNA, 19 nt, Artificial Sequence
  Description of Artificial Sequence: Synthetic oligonucleotide
  Antisense strand to SEQ ID NO: 1964408
uccaggagaaguaacuucu

SEQ ID NO: 1964410 - RNA, 19 nt, Artificial Sequence
  Description of Artificial Sequence: Synthetic oligonucleotide
  Sense strand starting at position 589 of SEQ ID NO: 1880401
gaaguuacuucuccuggaa

SEQ ID NO: 1964411 - RNA, 19 nt, Artificial Sequence
  Description of Artificial Sequence: Synthetic oligonucleotide
  Antisense strand to SEQ ID NO: 1964410
uuccaggagaaguaacuuc

SEQ ID NO: 1964412 - RNA, 19 nt, Artificial Sequence
  Description of Artificial Sequence: Synthetic oligonucleotide
  Sense strand starting at position 592 of SEQ ID NO: 1880401
guuacuucuccuggaaaca

SEQ ID NO: 1964413 - RNA, 19 nt, Artificial Sequence
  Description of Artificial Sequence: Synthetic oligonucleotide
  Antisense strand to SEQ ID NO: 1964412
uguuuccaggagaaguaac

SEQ ID NO: 1964414 - RNA, 19 nt, Artificial Sequence
  Description of Artificial Sequence: Synthetic oligonucleotide
  Sense strand starting at position 639 of SEQ ID NO: 1880401
cauggaucaugucuuugau

SEQ ID NO: 1964415 - RNA, 19 nt, Artificial Sequence
  Description of Artificial Sequence: Synthetic oligonucleotide
  Antisense strand to SEQ ID NO: 1964414
aucaaagacaugauccaug

SEQ ID NO: 1964416 - RNA, 19 nt, Artificial Sequence
  Description of Artificial Sequence: Synthetic oligonucleotide
  Sense strand starting at position 641 of SEQ ID NO: 1880401
uggaucaugucuuugauuc

SEQ ID NO: 1964417 - RNA, 19 nt, Artificial Sequence
  Description of Artificial Sequence: Synthetic oligonucleotide
  Antisense strand to SEQ ID NO: 1964416
gaaucaaagacaugaucca

SEQ ID NO: 1964418 - RNA, 19 nt, Artificial Sequence
  Description of Artificial Sequence: Synthetic oligonucleotide
  Sense strand starting at position 642 of SEQ ID NO: 1880401
ggaucaugucuuugauucc

SEQ ID NO: 1964419 - RNA, 19 nt, Artificial Sequence
  Description of Artificial Sequence: Synthetic oligonucleotide
  Antisense strand to SEQ ID NO: 1964418
ggaaucaaagacaugaucc

SEQ ID NO: 1964420 - RNA, 19 nt, Artificial Sequence
  Description of Artificial Sequence: Synthetic oligonucleotide
  Sense strand starting at position 966 of SEQ ID NO: 1880401
gaauacagggcacguaaua

SEQ ID NO: 1964421 - RNA, 19 nt, Artificial Sequence
  Description of Artificial Sequence: Synthetic oligonucleotide
  Antisense strand to SEQ ID NO: 1964420
uauuacgugcccuguauuc

SEQ ID NO: 1964422 - RNA, 19 nt, Artificial Sequence
  Description of Artificial Sequence: Synthetic oligonucleotide
  Sense strand starting at position 1125 of SEQ ID NO: 1880401
cugugaagcgguuagaaca

SEQ ID NO: 1964423 - RNA, 19 nt, Artificial Sequence
  Description of Artificial Sequence: Synthetic oligonucleotide
  Antisense strand to SEQ ID NO: 1964422
uguucuaaccgcuucacag

SEQ ID NO: 1964424 - RNA, 19 nt, Artificial Sequence
  Description of Artificial Sequence: Synthetic oligonucleotide
  Sense strand starting at position 1164 of SEQ ID NO: 1880401
guaauaccuguuggaaauu

SEQ ID NO: 1964425 - RNA, 19 nt, Artificial Sequence
  Description of Artificial Sequence: Synthetic oligonucleotide
  Antisense strand to SEQ ID NO: 1964424
aauuuccaacagguauuac

SEQ ID NO: 1964426 - RNA, 19 nt, Artificial Sequence
  Description of Artificial Sequence: Synthetic oligonucleotide
  Sense strand starting at position 1175 of SEQ ID NO: 1880401
uggaaauuauucuuacgaa

SEQ ID NO: 1964427 - RNA, 19 nt, Artificial Sequence
  Description of Artificial Sequence: Synthetic oligonucleotide
  Antisense strand to SEQ ID NO: 1964426
uucguaagaauaauuucca

SEQ ID NO: 1964428 - RNA, 19 nt, Artificial Sequence
  Description of Artificial Sequence: Synthetic oligonucleotide
  Sense strand starting at position 1212 of SEQ ID NO: 1880401
ugugcaagugcuguguaaa

SEQ ID NO: 1964429 - RNA, 19 nt, Artificial Sequence
  Description of Artificial Sequence: Synthetic oligonucleotide
  Antisense strand to SEQ ID NO: 1964428
uuuacacagcacuugcaca

SEQ ID NO: 1964430 - RNA, 19 nt, Artificial Sequence
  Description of Artificial Sequence: Synthetic oligonucleotide
  Sense strand starting at position 1288 of SEQ ID NO: 1880401
agcaaaugucaauaaugcu

SEQ ID NO: 1964431 - RNA, 19 nt, Artificial Sequence
  Description of Artificial Sequence: Synthetic oligonucleotide
  Antisense strand to SEQ ID NO: 1964430
agcauuauugacauuugcu

SEQ ID NO: 1964432 - RNA, 19 nt, Artificial Sequence
  Description of Artificial Sequence: Synthetic oligonucleotide
  Sense strand starting at position 1337 of SEQ ID NO: 1880401
ggaccuagguguuuccaca

SEQ ID NO: 1964433 - RNA, 19 nt, Artificial Sequence
  Description of Artificial Sequence: Synthetic oligonucleotide
  Antisense strand to SEQ ID NO: 1964432
uguggaaacaccuaggucc

SEQ ID NO: 1964434 - RNA, 19 nt, Artificial Sequence
  Description of Artificial Sequence: Synthetic oligonucleotide
  Sense strand starting at position 1361 of SEQ ID NO: 1880401
ccguauuuguuaccgugaa

SEQ ID NO: 1964435 - RNA, 19 nt, Artificial Sequence
  Description of Artificial Sequence: Synthetic oligonucleotide
  Antisense strand to SEQ ID NO: 1964434
uucacgguaacaaauacgg

SEQ ID NO: 1964436 - RNA, 19 nt, Artificial Sequence
  Description of Artificial Sequence: Synthetic oligonucleotide
  Sense strand starting at position 1502 of SEQ ID NO: 1880401
gggagaucuaaguguauga

SEQ ID NO: 1964437 - RNA, 19 nt, Artificial Sequence
  Description of Artificial Sequence: Synthetic oligonucleotide
  Antisense strand to SEQ ID NO: 1964436
ucauacacuuagaucuccc

SEQ ID NO: 1964438 - RNA, 19 nt, Artificial Sequence
  Description of Artificial Sequence: Synthetic oligonucleotide
  Sense strand starting at position 1544 of SEQ ID NO: 1880401
auacucuaucccgaggcau

SEQ ID NO: 1964439 - RNA, 19 nt, Artificial Sequence
  Description of Artificial Sequence: Synthetic oligonucleotide
  Antisense strand to SEQ ID NO: 1964438
augccucgggauagaguau

SEQ ID NO: 1964440 - RNA, 19 nt, Artificial Sequence
  Description of Artificial Sequence: Synthetic oligonucleotide
  Sense strand starting at position 1546 of SEQ ID NO: 1880401
acucuaucccgaggcauau

SEQ ID NO: 1964441 - RNA, 19 nt, Artificial Sequence
  Description of Artificial Sequence: Synthetic oligonucleotide
  Antisense strand to SEQ ID NO: 1964440
auaugccucgggauagagu

SEQ ID NO: 1964442 - RNA, 19 nt, Artificial Sequence
  Description of Artificial Sequence: Synthetic oligonucleotide
  Sense strand starting at position 1714 of SEQ ID NO: 1880401
ucacuuacgcguucgacau

SEQ ID NO: 1964443 - RNA, 19 nt, Artificial Sequence
  Description of Artificial Sequence: Synthetic oligonucleotide
  Antisense strand to SEQ ID NO: 1964442
augucgaacgcguaaguga

SEQ ID NO: 1964444 - RNA, 19 nt, Artificial Sequence
  Description of Artificial Sequence: Synthetic oligonucleotide
  Sense strand starting at position 1865 of SEQ ID NO: 1880401
aaaccaggacugcgagaau

SEQ ID NO: 1964445 - RNA, 19 nt, Artificial Sequence
  Description of Artificial Sequence: Synthetic oligonucleotide
  Antisense strand to SEQ ID NO: 1964444
auucucgcaguccugguuu

SEQ ID NO: 1964446 - RNA, 19 nt, Artificial Sequence
  Description of Artificial Sequence: Synthetic oligonucleotide
  Sense strand starting at position 1868 of SEQ ID NO: 1880401
ccaggacugcgagaaucuu

SEQ ID NO: 1964447 - RNA, 19 nt, Artificial Sequence
  Description of Artificial Sequence: Synthetic oligonucleotide
  Antisense strand to SEQ ID NO: 1964446
aagauucucgcaguccugg

SEQ ID NO: 1964448 - RNA, 19 nt, Artificial Sequence
  Description of Artificial Sequence: Synthetic oligonucleotide
  Sense strand starting at position 1885 of SEQ ID NO: 1880401
uucugcuucgggcaggaaa

SEQ ID NO: 1964449 - RNA, 19 nt, Artificial Sequence
  Description of Artificial Sequence: Synthetic oligonucleotide
  Antisense strand to SEQ ID NO: 1964448
uuuccugcccgaagcagaa

SEQ ID NO: 1964450 - RNA, 19 nt, Artificial Sequence
  Description of Artificial Sequence: Synthetic oligonucleotide
  Sense strand starting at position 2293 of SEQ ID NO: 1880401
gggcaaggcccuuaaugau

SEQ ID NO: 1964451 - RNA, 19 nt, Artificial Sequence
  Description of Artificial Sequence: Synthetic oligonucleotide
  Antisense strand to SEQ ID NO: 1964450
aucauuaagggccuugccc

SEQ ID NO: 1964452 - RNA, 19 nt, Artificial Sequence
  Description of Artificial Sequence: Synthetic oligonucleotide
  Sense strand starting at position 2332 of SEQ ID NO: 1880401
ucuguaaacuggguauaac

SEQ ID NO: 1964453 - RNA, 19 nt, Artificial Sequence
  Description of Artificial Sequence: Synthetic oligonucleotide
  Antisense strand to SEQ ID NO: 1964452
guuauacccaguuuacaga

SEQ ID NO: 1964454 - RNA, 19 nt, Artificial Sequence
  Description of Artificial Sequence: Synthetic oligonucleotide
  Sense strand starting at position 2343 of SEQ ID NO: 1880401
gguauaacagucguucguu

SEQ ID NO: 1964455 - RNA, 19 nt, Artificial Sequence
  Description of Artificial Sequence: Synthetic oligonucleotide
  Antisense strand to SEQ ID NO: 1964454
aacgaacgacuguuauacc

SEQ ID NO: 1964456 - RNA, 19 nt, Artificial Sequence
  Description of Artificial Sequence: Synthetic oligonucleotide
  Sense strand starting at position 2472 of SEQ ID NO: 1880401
gggugcguuguaaauguaa

SEQ ID NO: 1964457 - RNA, 19 nt, Artificial Sequence
  Description of Artificial Sequence: Synthetic oligonucleotide
  Antisense strand to SEQ ID NO: 1964456
uuacauuuacaacgcaccc

SEQ ID NO: 1964458 - RNA, 19 nt, Artificial Sequence
  Description of Artificial Sequence: Synthetic oligonucleotide
  Sense strand starting at position 2527 of SEQ ID NO: 1880401
ucgcuaugaguguuggcuu

SEQ ID NO: 1964459 - RNA, 19 nt, Artificial Sequence
  Description of Artificial Sequence: Synthetic oligonucleotide
  Antisense strand to SEQ ID NO: 1964458
aagccaacacucauagcga

SEQ ID NO: 1964460 - RNA, 19 nt, Artificial Sequence
  Description of Artificial Sequence: Synthetic oligonucleotide
  Sense strand starting at position 2569 of SEQ ID NO: 1880401
uuaguaacuguugagguuu

SEQ ID NO: 1964461 - RNA, 19 nt, Artificial Sequence
  Description of Artificial Sequence: Synthetic oligonucleotide
  Antisense strand to SEQ ID NO: 1964460
aaaccucaacaguuacuaa

SEQ ID NO: 1964462 - RNA, 19 nt, Artificial Sequence
  Description of Artificial Sequence: Synthetic oligonucleotide
  Sense strand starting at position 2617 of SEQ ID NO: 1880401
auuggaacgccagguuuaa

SEQ ID NO: 1964463 - RNA, 19 nt, Artificial Sequence
  Description of Artificial Sequence: Synthetic oligonucleotide
  Antisense strand to SEQ ID NO: 1964462
uuaaaccuggcguuccaau

SEQ ID NO: 1964464 - RNA, 19 nt, Artificial Sequence
  Description of Artificial Sequence: Synthetic oligonucleotide
  Sense strand starting at position 2852 of SEQ ID NO: 1880401
ggagaaugguguccagccu

SEQ ID NO: 1964465 - RNA, 19 nt, Artificial Sequence
  Description of Artificial Sequence: Synthetic oligonucleotide
  Antisense strand to SEQ ID NO: 1964464
aggcuggacaccauucucc

SEQ ID NO: 1964466 - RNA, 19 nt, Artificial Sequence
  Description of Artificial Sequence: Synthetic oligonucleotide
  Sense strand starting at position 3089 of SEQ ID NO: 1880401
gagaaaucuccagggcuug

SEQ ID NO: 1964467 - RNA, 19 nt, Artificial Sequence
  Description of Artificial Sequence: Synthetic oligonucleotide
  Antisense strand to SEQ ID NO: 1964466
caagcccuggagauuucuc

SEQ ID NO: 1964468 - RNA, 19 nt, Artificial Sequence
  Description of Artificial Sequence: Synthetic oligonucleotide
  Sense strand starting at position 3178 of SEQ ID NO: 1880401
gggcacacucgugacaaga

SEQ ID NO: 1964469 - RNA, 19 nt, Artificial Sequence
  Description of Artificial Sequence: Synthetic oligonucleotide
  Antisense strand to SEQ ID NO: 1964468
ucuugucacgagugugccc

SEQ ID NO: 1964470 - RNA, 19 nt, Artificial Sequence
  Description of Artificial Sequence: Synthetic oligonucleotide
  Sense strand starting at position 3253 of SEQ ID NO: 1880401
ggaaguuguguggauucaa

SEQ ID NO: 1964471 - RNA, 19 nt, Artificial Sequence
  Description of Artificial Sequence: Synthetic oligonucleotide
  Antisense strand to SEQ ID NO: 1964470
uugaauccacacaacuucc

SEQ ID NO: 1964472 - RNA, 19 nt, Artificial Sequence
  Description of Artificial Sequence: Synthetic oligonucleotide
  Sense strand starting at position 3272 of SEQ ID NO: 1880401
gggagcaguccuuauccua

SEQ ID NO: 1964473 - RNA, 19 nt, Artificial Sequence
  Description of Artificial Sequence: Synthetic oligonucleotide
  Antisense strand to SEQ ID NO: 1964472
uaggauaaggacugcuccc

SEQ ID NO: 1964474 - RNA, 19 nt, Artificial Sequence
  Description of Artificial Sequence: Synthetic oligonucleotide
  Sense strand starting at position 3373 of SEQ ID NO: 1880401
agagaauucgcccacauua

SEQ ID NO: 1964475 - RNA, 19 nt, Artificial Sequence
  Description of Artificial Sequence: Synthetic oligonucleotide
  Antisense strand to SEQ ID NO: 1964474
uaaugugggcgaauucucu

SEQ ID NO: 1964476 - RNA, 19 nt, Artificial Sequence
  Description of Artificial Sequence: Synthetic oligonucleotide
  Sense strand starting at position 3375 of SEQ ID NO: 1880401
agaauucgcccacauuaua

SEQ ID NO: 1964477 - RNA, 19 nt, Artificial Sequence
  Description of Artificial Sequence: Synthetic oligonucleotide
  Antisense strand to SEQ ID NO: 1964476
uauaaugugggcgaauucu

SEQ ID NO: 1964478 - RNA, 19 nt, Artificial Sequence
  Description of Artificial Sequence: Synthetic oligonucleotide
  Sense strand starting at position 3424 of SEQ ID NO: 1880401
acacguguuaaauaggaau

SEQ ID NO: 1964479 - RNA, 19 nt, Artificial Sequence
  Description of Artificial Sequence: Synthetic oligonucleotide
  Antisense strand to SEQ ID NO: 1964478
auuccuauuuaacacgugu

SEQ ID NO: 1964480 - RNA, 19 nt, Artificial Sequence
  Description of Artificial Sequence: Synthetic oligonucleotide
  Sense strand starting at position 3426 of SEQ ID NO: 1880401
acguguuaaauaggaauaa

SEQ ID NO: 1964481 - RNA, 19 nt, Artificial Sequence
  Description of Artificial Sequence: Synthetic oligonucleotide
  Antisense strand to SEQ ID NO: 1964480
uuauuccuauuuaacacgu

SEQ ID NO: 1964482 - RNA, 19 nt, Artificial Sequence
  Description of Artificial Sequence: Synthetic oligonucleotide
  Sense strand starting at position 3908 of SEQ ID NO: 1880401
ugcuccaugcuauagaaua

SEQ ID NO: 1964483 - RNA, 19 nt, Artificial Sequence
  Description of Artificial Sequence: Synthetic oligonucleotide
  Antisense strand to SEQ ID NO: 1964482
uauucuauagcauggagca

SEQ ID NO: 1964484 - RNA, 19 nt, Artificial Sequence
  Description of Artificial Sequence: Synthetic oligonucleotide
  Sense strand starting at position 40 of SEQ ID NO: 1880403
gauagcagcucuguaacaa

SEQ ID NO: 1964485 - RNA, 19 nt, Artificial Sequence
  Description of Artificial Sequence: Synthetic oligonucleotide
  Antisense strand to SEQ ID NO: 1964484
uuguuacagagcugcuauc

SEQ ID NO: 1964486 - RNA, 19 nt, Artificial Sequence
  Description of Artificial Sequence: Synthetic oligonucleotide
  Sense strand starting at position 70 of SEQ ID NO: 1880403
aagcaacgucuugggaauu

SEQ ID NO: 1964487 - RNA, 19 nt, Artificial Sequence
  Description of Artificial Sequence: Synthetic oligonucleotide
  Antisense strand to SEQ ID NO: 1964486
aauucccaagacguugcuu

SEQ ID NO: 1964488 - RNA, 19 nt, Artificial Sequence
  Description of Artificial Sequence: Synthetic oligonucleotide
  Sense strand starting at position 95 of SEQ ID NO: 1880403
uaaccuucgugugugaaac

SEQ ID NO: 1964489 - RNA, 19 nt, Artificial Sequence
  Description of Artificial Sequence: Synthetic oligonucleotide
  Antisense strand to SEQ ID NO: 1964488
guuucacacacgaagguua

SEQ ID NO: 1964490 - RNA, 19 nt, Artificial Sequence
  Description of Artificial Sequence: Synthetic oligonucleotide
  Sense strand starting at position 147 of SEQ ID NO: 1880403
uauuguugccacugucaag

SEQ ID NO: 1964491 - RNA, 19 nt, Artificial Sequence
  Description of Artificial Sequence: Synthetic oligonucleotide
  Antisense strand to SEQ ID NO: 1964490
cuugacaguggcaacaaua

SEQ ID NO: 1964492 - RNA, 19 nt, Artificial Sequence
  Description of Artificial Sequence: Synthetic oligonucleotide
  Sense strand starting at position 202 of SEQ ID NO: 1880403
guauccuguggguaaucuu

SEQ ID NO: 1964493 - RNA, 19 nt, Artificial Sequence
  Description of Artificial Sequence: Synthetic oligonucleotide
  Antisense strand to SEQ ID NO: 1964492
aagauuacccacaggauac

SEQ ID NO: 1964494 - RNA, 19 nt, Artificial Sequence
  Description of Artificial Sequence: Synthetic oligonucleotide
  Sense strand starting at position 292 of SEQ ID NO: 1880403
ccuacuaucuaaguggaau

SEQ ID NO: 1964495 - RNA, 19 nt, Artificial Sequence
  Description of Artificial Sequence: Synthetic oligonucleotide
  Antisense strand to SEQ ID NO: 1964494
auuccacuuagauaguagg

SEQ ID NO: 1964496 - RNA, 19 nt, Artificial Sequence
  Description of Artificial Sequence: Synthetic oligonucleotide
  Sense strand starting at position 305 of SEQ ID NO: 1880403
uggaauagguugucugcuu

SEQ ID NO: 1964497 - RNA, 19 nt, Artificial Sequence
  Description of Artificial Sequence: Synthetic oligonucleotide
  Antisense strand to SEQ ID NO: 1964496
aagcagacaaccuauucca

SEQ ID NO: 1964498 - RNA, 19 nt, Artificial Sequence
  Description of Artificial Sequence: Synthetic oligonucleotide
  Sense strand starting at position 306 of SEQ ID NO: 1880403
ggaauagguugucugcuuu

SEQ ID NO: 1964499 - RNA, 19 nt, Artificial Sequence
  Description of Artificial Sequence: Synthetic oligonucleotide
  Antisense strand to SEQ ID NO: 1964498
aaagcagacaaccuauucc

SEQ ID NO: 1964500 - RNA, 19 nt, Artificial Sequence
  Description of Artificial Sequence: Synthetic oligonucleotide
  Sense strand starting at position 331 of SEQ ID NO: 1880403
gcacgucuugcuuuccuaa

SEQ ID NO: 1964501 - RNA, 19 nt, Artificial Sequence
  Description of Artificial Sequence: Synthetic oligonucleotide
  Antisense strand to SEQ ID NO: 1964500
uuaggaaagcaagacgugc

SEQ ID NO: 1964502 - RNA, 19 nt, Artificial Sequence
  Description of Artificial Sequence: Synthetic oligonucleotide
  Sense strand starting at position 358 of SEQ ID NO: 1880403
agcugucucacagagauag

SEQ ID NO: 1964503 - RNA, 19 nt, Artificial Sequence
  Description of Artificial Sequence: Synthetic oligonucleotide
  Antisense strand to SEQ ID NO: 1964502
cuaucucugugagacagcu

SEQ ID NO: 1964504 - RNA, 19 nt, Artificial Sequence
  Description of Artificial Sequence: Synthetic oligonucleotide
  Sense strand starting at position 395 of SEQ ID NO: 1880403
uccuuaugcugcuuaagag

SEQ ID NO: 1964505 - RNA, 19 nt, Artificial Sequence
  Description of Artificial Sequence: Synthetic oligonucleotide
  Antisense strand to SEQ ID NO: 1964504
cucuuaagcagcauaagga

SEQ ID NO: 1964506 - RNA, 19 nt, Artificial Sequence
  Description of Artificial Sequence: Synthetic oligonucleotide
  Sense strand starting at position 629 of SEQ ID NO: 1880403
uuggcauagcuaugaucca

SEQ ID NO: 1964507 - RNA, 19 nt, Artificial Sequence
  Description of Artificial Sequence: Synthetic oligonucleotide
  Antisense strand to SEQ ID NO: 1964506
uggaucauagcuaugccaa

SEQ ID NO: 1964508 - RNA, 19 nt, Artificial Sequence
  Description of Artificial Sequence: Synthetic oligonucleotide
  Sense strand starting at position 798 of SEQ ID NO: 1880403
gcuagucaccugcagugaa

SEQ ID NO: 1964509 - RNA, 19 nt, Artificial Sequence
  Description of Artificial Sequence: Synthetic oligonucleotide
  Antisense strand to SEQ ID NO: 1964508
uucacugcaggugacuagc

SEQ ID NO: 1964510 - RNA, 19 nt, Artificial Sequence
  Description of Artificial Sequence: Synthetic oligonucleotide
  Sense strand starting at position 901 of SEQ ID NO: 1880403
auuccuauugaguauccau

SEQ ID NO: 1964511 - RNA, 19 nt, Artificial Sequence
  Description of Artificial Sequence: Synthetic oligonucleotide
  Antisense strand to SEQ ID NO: 1964510
auggauacucaauaggaau

SEQ ID NO: 1964512 - RNA, 19 nt, Artificial Sequence
  Description of Artificial Sequence: Synthetic oligonucleotide
  Sense strand starting at position 1002 of SEQ ID NO: 1880403
cgaguugucccauacucaa

SEQ ID NO: 1964513 - RNA, 19 nt, Artificial Sequence
  Description of Artificial Sequence: Synthetic oligonucleotide
  Antisense strand to SEQ ID NO: 1964512
uugaguaugggacaacucg

SEQ ID NO: 1964514 - RNA, 19 nt, Artificial Sequence
  Description of Artificial Sequence: Synthetic oligonucleotide
  Sense strand starting at position 1165 of SEQ ID NO: 1880403
auaugaauucguugaaagc

SEQ ID NO: 1964515 - RNA, 19 nt, Artificial Sequence
  Description of Artificial Sequence: Synthetic oligonucleotide
  Antisense strand to SEQ ID NO: 1964514
gcuuucaacgaauucauau

SEQ ID NO: 1964516 - RNA, 19 nt, Artificial Sequence
  Description of Artificial Sequence: Synthetic oligonucleotide
  Sense strand starting at position 1166 of SEQ ID NO: 1880403
uaugaauucguugaaagcu

SEQ ID NO: 1964517 - RNA, 19 nt, Artificial Sequence
  Description of Artificial Sequence: Synthetic oligonucleotide
  Antisense strand to SEQ ID NO: 1964516
agcuuucaacgaauucaua

SEQ ID NO: 1964518 - RNA, 19 nt, Artificial Sequence
  Description of Artificial Sequence: Synthetic oligonucleotide
  Sense strand starting at position 1172 of SEQ ID NO: 1880403
uucguugaaagcuaaggau

SEQ ID NO: 1964519 - RNA, 19 nt, Artificial Sequence
  Description of Artificial Sequence: Synthetic oligonucleotide
  Antisense strand to SEQ ID NO: 1964518
auccuuagcuuucaacgaa

SEQ ID NO: 1964520 - RNA, 19 nt, Artificial Sequence
  Description of Artificial Sequence: Synthetic oligonucleotide
  Sense strand starting at position 1355 of SEQ ID NO: 1880403
uguuaaguacuucguaaua

SEQ ID NO: 1964521 - RNA, 19 nt, Artificial Sequence
  Description of Artificial Sequence: Synthetic oligonucleotide
  Antisense strand to SEQ ID NO: 1964520
uauuacgaaguacuuaaca

SEQ ID NO: 1964522 - RNA, 19 nt, Artificial Sequence
  Description of Artificial Sequence: Synthetic oligonucleotide
  Sense strand starting at position 1367 of SEQ ID NO: 1880403
cguaauauuccagaguugu

SEQ ID NO: 1964523 - RNA, 19 nt, Artificial Sequence
  Description of Artificial Sequence: Synthetic oligonucleotide
  Antisense strand to SEQ ID NO: 1964522
acaacucuggaauauuacg

SEQ ID NO: 1964524 - RNA, 19 nt, Artificial Sequence
  Description of Artificial Sequence: Synthetic oligonucleotide
  Sense strand starting at position 1373 of SEQ ID NO: 1880403
auuccagaguuguuuacau

SEQ ID NO: 1964525 - RNA, 19 nt, Artificial Sequence
  Description of Artificial Sequence: Synthetic oligonucleotide
  Antisense strand to SEQ ID NO: 1964524
auguaaacaacucuggaau

SEQ ID NO: 1964526 - RNA, 19 nt, Artificial Sequence
  Description of Artificial Sequence: Synthetic oligonucleotide
  Sense strand starting at position 1375 of SEQ ID NO: 1880403
uccagaguuguuuacauaa

SEQ ID NO: 1964527 - RNA, 19 nt, Artificial Sequence
  Description of Artificial Sequence: Synthetic oligonucleotide
  Antisense strand to SEQ ID NO: 1964526
uuauguaaacaacucugga

SEQ ID NO: 1964528 - RNA, 19 nt, Artificial Sequence
  Description of Artificial Sequence: Synthetic oligonucleotide
  Sense strand starting at position 1555 of SEQ ID NO: 1880403
agggcuaugacucgcauuu

SEQ ID NO: 1964529 - RNA, 19 nt, Artificial Sequence
  Description of Artificial Sequence: Synthetic oligonucleotide
  Antisense strand to SEQ ID NO: 1964528
aaaugcgagucauagcccu

SEQ ID NO: 1964530 - RNA, 19 nt, Artificial Sequence
  Description of Artificial Sequence: Synthetic oligonucleotide
  Sense strand starting at position 2155 of SEQ ID NO: 1880403
gcgcauauucaguagggaa

SEQ ID NO: 1964531 - RNA, 19 nt, Artificial Sequence
  Description of Artificial Sequence: Synthetic oligonucleotide
  Antisense strand to SEQ ID NO: 1964530
uucccuacugaauaugcgc

SEQ ID NO: 1964532 - RNA, 19 nt, Artificial Sequence
  Description of Artificial Sequence: Synthetic oligonucleotide
  Sense strand starting at position 2157 of SEQ ID NO: 1880403
gcauauucaguagggaaag

SEQ ID NO: 1964533 - RNA, 19 nt, Artificial Sequence
  Description of Artificial Sequence: Synthetic oligonucleotide
  Antisense strand to SEQ ID NO: 1964532
cuuucccuacugaauaugc

SEQ ID NO: 1964534 - RNA, 19 nt, Artificial Sequence
  Description of Artificial Sequence: Synthetic oligonucleotide
  Sense strand starting at position 2648 of SEQ ID NO: 1880403
gugguuaacuuuccuaugu

SEQ ID NO: 1964535 - RNA, 19 nt, Artificial Sequence
  Description of Artificial Sequence: Synthetic oligonucleotide
  Antisense strand to SEQ ID NO: 1964534
acauaggaaaguuaaccac

SEQ ID NO: 1964536 - RNA, 19 nt, Artificial Sequence
  Description of Artificial Sequence: Synthetic oligonucleotide
  Sense strand starting at position 2711 of SEQ ID NO: 1880403
cuuuguauccuccagagaa

SEQ ID NO: 1964537 - RNA, 19 nt, Artificial Sequence
  Description of Artificial Sequence: Synthetic oligonucleotide
  Antisense strand to SEQ ID NO: 1964536
uucucuggaggauacaaag

SEQ ID NO: 1964538 - RNA, 19 nt, Artificial Sequence
  Description of Artificial Sequence: Synthetic oligonucleotide
  Sense strand starting at position 2756 of SEQ ID NO: 1880403
ucaaauguugacugaucaa

SEQ ID NO: 1964539 - RNA, 19 nt, Artificial Sequence
  Description of Artificial Sequence: Synthetic oligonucleotide
  Antisense strand to SEQ ID NO: 1964538
uugaucagucaacauuuga

SEQ ID NO: 1964540 - RNA, 19 nt, Artificial Sequence
  Description of Artificial Sequence: Synthetic oligonucleotide
  Sense strand starting at position 2766 of SEQ ID NO: 1880403
acugaucaauaauugguua

SEQ ID NO: 1964541 - RNA, 19 nt, Artificial Sequence
  Description of Artificial Sequence: Synthetic oligonucleotide
  Antisense strand to SEQ ID NO: 1964540
uaaccaauuauugaucagu

SEQ ID NO: 1964542 - RNA, 19 nt, Artificial Sequence
  Description of Artificial Sequence: Synthetic oligonucleotide
  Sense strand starting at position 2786 of SEQ ID NO: 1880403
uugguugacugacugacaa

SEQ ID NO: 1964543 - RNA, 19 nt, Artificial Sequence
  Description of Artificial Sequence: Synthetic oligonucleotide
  Antisense strand to SEQ ID NO: 1964542
uugucagucagucaaccaa

SEQ ID NO: 1964544 - RNA, 19 nt, Artificial Sequence
  Description of Artificial Sequence: Synthetic oligonucleotide
  Sense strand starting at position 2854 of SEQ ID NO: 1880403
ugauaaaucucacccggga

SEQ ID NO: 1964545 - RNA, 19 nt, Artificial Sequence
  Description of Artificial Sequence: Synthetic oligonucleotide
  Antisense strand to SEQ ID NO: 1964544
ucccgggugagauuuauca

SEQ ID NO: 1964546 - RNA, 19 nt, Artificial Sequence
  Description of Artificial Sequence: Synthetic oligonucleotide
  Sense strand starting at position 2969 of SEQ ID NO: 1880403
agacuucguuucuauuuaa

SEQ ID NO: 1964547 - RNA, 19 nt, Artificial Sequence
  Description of Artificial Sequence: Synthetic oligonucleotide
  Antisense strand to SEQ ID NO: 1964546
uuaaauagaaacgaagucu

SEQ ID NO: 1964548 - RNA, 19 nt, Artificial Sequence
  Description of Artificial Sequence: Synthetic oligonucleotide
  Sense strand starting at position 3058 of SEQ ID NO: 1880403
ucacgaguucaggaguaca

SEQ ID NO: 1964549 - RNA, 19 nt, Artificial Sequence
  Description of Artificial Sequence: Synthetic oligonucleotide
  Antisense strand to SEQ ID NO: 1964548
uguacuccugaacucguga

SEQ ID NO: 1964550 - RNA, 19 nt, Artificial Sequence
  Description of Artificial Sequence: Synthetic oligonucleotide
  Sense strand starting at position 3182 of SEQ ID NO: 1880403
gugggagaaucucucaaac

SEQ ID NO: 1964551 - RNA, 19 nt, Artificial Sequence
  Description of Artificial Sequence: Synthetic oligonucleotide
  Antisense strand to SEQ ID NO: 1964550
guuugagagauucucccac

SEQ ID NO: 1964552 - RNA, 19 nt, Artificial Sequence
  Description of Artificial Sequence: Synthetic oligonucleotide
  Sense strand starting at position 3340 of SEQ ID NO: 1880403
agcuguguuccacaaagau

SEQ ID NO: 1964553 - RNA, 19 nt, Artificial Sequence
  Description of Artificial Sequence: Synthetic oligonucleotide
  Antisense strand to SEQ ID NO: 1964552
aucuuuguggaacacagcu

SEQ ID NO: 1964554 - RNA, 19 nt, Artificial Sequence
  Description of Artificial Sequence: Synthetic oligonucleotide
  Sense strand starting at position 3447 of SEQ ID NO: 1880403
caaagaguaucccaggaca

SEQ ID NO: 1964555 - RNA, 19 nt, Artificial Sequence
  Description of Artificial Sequence: Synthetic oligonucleotide
  Antisense strand to SEQ ID NO: 1964554
uguccugggauacucuuug

SEQ ID NO: 1964556 - RNA, 19 nt, Artificial Sequence
  Description of Artificial Sequence: Synthetic oligonucleotide
  Sense strand starting at position 3623 of SEQ ID NO: 1880403
agcuuaaggccauagaaau

SEQ ID NO: 1964557 - RNA, 19 nt, Artificial Sequence
  Description of Artificial Sequence: Synthetic oligonucleotide
  Antisense strand to SEQ ID NO: 1964556
auuucuauggccuuaagcu

SEQ ID NO: 1964558 - RNA, 19 nt, Artificial Sequence
  Description of Artificial Sequence: Synthetic oligonucleotide
  Sense strand starting at position 3717 of SEQ ID NO: 1880403
ggguucugcuauuucucua

SEQ ID NO: 1964559 - RNA, 19 nt, Artificial Sequence
  Description of Artificial Sequence: Synthetic oligonucleotide
  Antisense strand to SEQ ID NO: 1964558
uagagaaauagcagaaccc

SEQ ID NO: 1964560 - RNA, 19 nt, Artificial Sequence
  Description of Artificial Sequence: Synthetic oligonucleotide
  Sense strand starting at position 3798 of SEQ ID NO: 1880403
gcacaccacguuuaucauu

SEQ ID NO: 1964561 - RNA, 19 nt, Artificial Sequence
  Description of Artificial Sequence: Synthetic oligonucleotide
  Antisense strand to SEQ ID NO: 1964560
aaugauaaacguggugugc

SEQ ID NO: 1964562 - RNA, 19 nt, Artificial Sequence
  Description of Artificial Sequence: Synthetic oligonucleotide
  Sense strand starting at position 3853 of SEQ ID NO: 1880403
gguaucuuaucccauuuau

SEQ ID NO: 1964563 - RNA, 19 nt, Artificial Sequence
  Description of Artificial Sequence: Synthetic oligonucleotide
  Antisense strand to SEQ ID NO: 1964562
auaaaugggauaagauacc

SEQ ID NO: 1964564 - RNA, 19 nt, Artificial Sequence
  Description of Artificial Sequence: Synthetic oligonucleotide
  Sense strand starting at position 252 of SEQ ID NO: 1880402
guaacuguaucacucauca

SEQ ID NO: 1964565 - RNA, 19 nt, Artificial Sequence
  Description of Artificial Sequence: Synthetic oligonucleotide
  Antisense strand to SEQ ID NO: 1964564
ugaugagugauacaguuac

SEQ ID NO: 1964566 - RNA, 19 nt, Artificial Sequence
  Description of Artificial Sequence: Synthetic oligonucleotide
  Sense strand starting at position 256 of SEQ ID NO: 1880402
cuguaucacucaucaggua

SEQ ID NO: 1964567 - RNA, 19 nt, Artificial Sequence
  Description of Artificial Sequence: Synthetic oligonucleotide
  Antisense strand to SEQ ID NO: 1964566
uaccugaugagugauacag

SEQ ID NO: 1964568 - RNA, 19 nt, Artificial Sequence
  Description of Artificial Sequence: Synthetic oligonucleotide
  Sense strand starting at position 272 of SEQ ID NO: 1880402
guagucaauuuaugaaacu

SEQ ID NO: 1964569 - RNA, 19 nt, Artificial Sequence
  Description of Artificial Sequence: Synthetic oligonucleotide
  Antisense strand to SEQ ID NO: 1964568
aguuucauaaauugacuac

SEQ ID NO: 1964570 - RNA, 19 nt, Artificial Sequence
  Description of Artificial Sequence: Synthetic oligonucleotide
  Sense strand starting at position 302 of SEQ ID NO: 1880402
uaacauaggcugggugaaa

SEQ ID NO: 1964571 - RNA, 19 nt, Artificial Sequence
  Description of Artificial Sequence: Synthetic oligonucleotide
  Antisense strand to SEQ ID NO: 1964570
uuucacccagccuauguua

SEQ ID NO: 1964572 - RNA, 19 nt, Artificial Sequence
  Description of Artificial Sequence: Synthetic oligonucleotide
  Sense strand starting at position 359 of SEQ ID NO: 1880402
gauagcagcucuguaacaa

SEQ ID NO: 1964573 - RNA, 19 nt, Artificial Sequence
  Description of Artificial Sequence: Synthetic oligonucleotide
  Antisense strand to SEQ ID NO: 1964572
uuguuacagagcugcuauc

SEQ ID NO: 1964574 - RNA, 19 nt, Artificial Sequence
  Description of Artificial Sequence: Synthetic oligonucleotide
  Sense strand starting at position 389 of SEQ ID NO: 1880402
aagcaacgucuugggaauu

SEQ ID NO: 1964575 - RNA, 19 nt, Artificial Sequence
  Description of Artificial Sequence: Synthetic oligonucleotide
  Antisense strand to SEQ ID NO: 1964574
aauucccaagacguugcuu

SEQ ID NO: 1964576 - RNA, 19 nt, Artificial Sequence
  Description of Artificial Sequence: Synthetic oligonucleotide
  Sense strand starting at position 414 of SEQ ID NO: 1880402
uaaccuucgugugugaaac

SEQ ID NO: 1964577 - RNA, 19 nt, Artificial Sequence
  Description of Artificial Sequence: Synthetic oligonucleotide
  Antisense strand to SEQ ID NO: 1964576
guuucacacacgaagguua

SEQ ID NO: 1964578 - RNA, 19 nt, Artificial Sequence
  Description of Artificial Sequence: Synthetic oligonucleotide
  Sense strand starting at position 521 of SEQ ID NO: 1880402
guauccuguggguaaucuu

SEQ ID NO: 1964579 - RNA, 19 nt, Artificial Sequence
  Description of Artificial Sequence: Synthetic oligonucleotide
  Antisense strand to SEQ ID NO: 1964578
aagauuacccacaggauac

SEQ ID NO: 1964580 - RNA, 19 nt, Artificial Sequence
  Description of Artificial Sequence: Synthetic oligonucleotide
  Sense strand starting at position 611 of SEQ ID NO: 1880402
ccuacuaucuaaguggaau

SEQ ID NO: 1964581 - RNA, 19 nt, Artificial Sequence
  Description of Artificial Sequence: Synthetic oligonucleotide
  Antisense strand to SEQ ID NO: 1964580
auuccacuuagauaguagg

SEQ ID NO: 1964582 - RNA, 19 nt, Artificial Sequence
  Description of Artificial Sequence: Synthetic oligonucleotide
  Sense strand starting at position 624 of SEQ ID NO: 1880402
uggaauagguugucugcuu

SEQ ID NO: 1964583 - RNA, 19 nt, Artificial Sequence
  Description of Artificial Sequence: Synthetic oligonucleotide
  Antisense strand to SEQ ID NO: 1964582
aagcagacaaccuauucca

SEQ ID NO: 1964584 - RNA, 19 nt, Artificial Sequence
  Description of Artificial Sequence: Synthetic oligonucleotide
  Sense strand starting at position 625 of SEQ ID NO: 1880402
ggaauagguugucugcuuu

SEQ ID NO: 1964585 - RNA, 19 nt, Artificial Sequence
  Description of Artificial Sequence: Synthetic oligonucleotide
  Antisense strand to SEQ ID NO: 1964584
aaagcagacaaccuauucc

SEQ ID NO: 1964586 - RNA, 19 nt, Artificial Sequence
  Description of Artificial Sequence: Synthetic oligonucleotide
  Sense strand starting at position 650 of SEQ ID NO: 1880402
gcacgucuugcuuuccuaa

SEQ ID NO: 1964587 - RNA, 19 nt, Artificial Sequence
  Description of Artificial Sequence: Synthetic oligonucleotide
  Antisense strand to SEQ ID NO: 1964586
uuaggaaagcaagacgugc

SEQ ID NO: 1964588 - RNA, 19 nt, Artificial Sequence
  Description of Artificial Sequence: Synthetic oligonucleotide
  Sense strand starting at position 677 of SEQ ID NO: 1880402
agcugucucacagagauag

SEQ ID NO: 1964589 - RNA, 19 nt, Artificial Sequence
  Description of Artificial Sequence: Synthetic oligonucleotide
  Antisense strand to SEQ ID NO: 1964588
cuaucucugugagacagcu

SEQ ID NO: 1964590 - RNA, 19 nt, Artificial Sequence
  Description of Artificial Sequence: Synthetic oligonucleotide
  Sense strand starting at position 714 of SEQ ID NO: 1880402
uccuuaugcugcuuaagag

SEQ ID NO: 1964591 - RNA, 19 nt, Artificial Sequence
  Description of Artificial Sequence: Synthetic oligonucleotide
  Antisense strand to SEQ ID NO: 1964590
cucuuaagcagcauaagga

SEQ ID NO: 1964592 - RNA, 19 nt, Artificial Sequence
  Description of Artificial Sequence: Synthetic oligonucleotide
  Sense strand starting at position 948 of SEQ ID NO: 1880402
uuggcauagcuaugaucca

SEQ ID NO: 1964593 - RNA, 19 nt, Artificial Sequence
  Description of Artificial Sequence: Synthetic oligonucleotide
  Antisense strand to SEQ ID NO: 1964592
uggaucauagcuaugccaa

SEQ ID NO: 1964594 - RNA, 19 nt, Artificial Sequence
  Description of Artificial Sequence: Synthetic oligonucleotide
  Sense strand starting at position 1117 of SEQ ID NO: 1880402
gcuagucaccugcagugaa

SEQ ID NO: 1964595 - RNA, 19 nt, Artificial Sequence
  Description of Artificial Sequence: Synthetic oligonucleotide
  Antisense strand to SEQ ID NO: 1964594
uucacugcaggugacuagc

SEQ ID NO: 1964596 - RNA, 19 nt, Artificial Sequence
  Description of Artificial Sequence: Synthetic oligonucleotide
  Sense strand starting at position 1220 of SEQ ID NO: 1880402
auuccuauugaguauccau

SEQ ID NO: 1964597 - RNA, 19 nt, Artificial Sequence
  Description of Artificial Sequence: Synthetic oligonucleotide
  Antisense strand to SEQ ID NO: 1964596
auggauacucaauaggaau

SEQ ID NO: 1964598 - RNA, 19 nt, Artificial Sequence
  Description of Artificial Sequence: Synthetic oligonucleotide
  Sense strand starting at position 1321 of SEQ ID NO: 1880402
cgaguugucccauacucaa

SEQ ID NO: 1964599 - RNA, 19 nt, Artificial Sequence
  Description of Artificial Sequence: Synthetic oligonucleotide
  Antisense strand to SEQ ID NO: 1964598
uugaguaugggacaacucg

SEQ ID NO: 1964600 - RNA, 19 nt, Artificial Sequence
  Description of Artificial Sequence: Synthetic oligonucleotide
  Sense strand starting at position 1484 of SEQ ID NO: 1880402
auaugaauucguugaaagc

SEQ ID NO: 1964601 - RNA, 19 nt, Artificial Sequence
  Description of Artificial Sequence: Synthetic oligonucleotide
  Antisense strand to SEQ ID NO: 1964600
gcuuucaacgaauucauau

SEQ ID NO: 1964602 - RNA, 19 nt, Artificial Sequence
  Description of Artificial Sequence: Synthetic oligonucleotide
  Sense strand starting at position 1485 of SEQ ID NO: 1880402
uaugaauucguugaaagcu

SEQ ID NO: 1964603 - RNA, 19 nt, Artificial Sequence
  Description of Artificial Sequence: Synthetic oligonucleotide
  Antisense strand to SEQ ID NO: 1964602
agcuuucaacgaauucaua

SEQ ID NO: 1964604 - RNA, 19 nt, Artificial Sequence
  Description of Artificial Sequence: Synthetic oligonucleotide
  Sense strand starting at position 1491 of SEQ ID NO: 1880402
uucguugaaagcuaaggau

SEQ ID NO: 1964605 - RNA, 19 nt, Artificial Sequence
  Description of Artificial Sequence: Synthetic oligonucleotide
  Antisense strand to SEQ ID NO: 1964604
auccuuagcuuucaacgaa

SEQ ID NO: 1964606 - RNA, 19 nt, Artificial Sequence
  Description of Artificial Sequence: Synthetic oligonucleotide
  Sense strand starting at position 1674 of SEQ ID NO: 1880402
uguuaaguacuucguaaua

SEQ ID NO: 1964607 - RNA, 19 nt, Artificial Sequence
  Description of Artificial Sequence: Synthetic oligonucleotide
  Antisense strand to SEQ ID NO: 1964606
uauuacgaaguacuuaaca

SEQ ID NO: 1964608 - RNA, 19 nt, Artificial Sequence
  Description of Artificial Sequence: Synthetic oligonucleotide
  Sense strand starting at position 1686 of SEQ ID NO: 1880402
cguaauauuccagaguugu

SEQ ID NO: 1964609 - RNA, 19 nt, Artificial Sequence
  Description of Artificial Sequence: Synthetic oligonucleotide
  Antisense strand to SEQ ID NO: 1964608
acaacucuggaauauuacg

SEQ ID NO: 1964610 - RNA, 19 nt, Artificial Sequence
  Description of Artificial Sequence: Synthetic oligonucleotide
  Sense strand starting at position 1692 of SEQ ID NO: 1880402
auuccagaguuguuuacau

SEQ ID NO: 1964611 - RNA, 19 nt, Artificial Sequence
  Description of Artificial Sequence: Synthetic oligonucleotide
  Antisense strand to SEQ ID NO: 1964610
auguaaacaacucuggaau

SEQ ID NO: 1964612 - RNA, 19 nt, Artificial Sequence
  Description of Artificial Sequence: Synthetic oligonucleotide
  Sense strand starting at position 1694 of SEQ ID NO: 1880402
uccagaguuguuuacauaa

SEQ ID NO: 1964613 - RNA, 19 nt, Artificial Sequence
  Description of Artificial Sequence: Synthetic oligonucleotide
  Antisense strand to SEQ ID NO: 1964612
uuauguaaacaacucugga

SEQ ID NO: 1964614 - RNA, 19 nt, Artificial Sequence
  Description of Artificial Sequence: Synthetic oligonucleotide
  Sense strand starting at position 1874 of SEQ ID NO: 1880402
agggcuaugacucgcauuu

SEQ ID NO: 1964615 - RNA, 19 nt, Artificial Sequence
  Description of Artificial Sequence: Synthetic oligonucleotide
  Antisense strand to SEQ ID NO: 1964614
aaaugcgagucauagcccu

SEQ ID NO: 1964616 - RNA, 19 nt, Artificial Sequence
  Description of Artificial Sequence: Synthetic oligonucleotide
  Sense strand starting at position 2474 of SEQ ID NO: 1880402
gcgcauauucaguagggaa

SEQ ID NO: 1964617 - RNA, 19 nt, Artificial Sequence
  Description of Artificial Sequence: Synthetic oligonucleotide
  Antisense strand to SEQ ID NO: 1964616
uucccuacugaauaugcgc

SEQ ID NO: 1964618 - RNA, 19 nt, Artificial Sequence
  Description of Artificial Sequence: Synthetic oligonucleotide
  Sense strand starting at position 2476 of SEQ ID NO: 1880402
gcauauucaguagggaaag

SEQ ID NO: 1964619 - RNA, 19 nt, Artificial Sequence
  Description of Artificial Sequence: Synthetic oligonucleotide
  Antisense strand to SEQ ID NO: 1964618
cuuucccuacugaauaugc

SEQ ID NO: 1964620 - RNA, 19 nt, Artificial Sequence
  Description of Artificial Sequence: Synthetic oligonucleotide
  Sense strand starting at position 2967 of SEQ ID NO: 1880402
gugguuaacuuuccuaugu

SEQ ID NO: 1964621 - RNA, 19 nt, Artificial Sequence
  Description of Artificial Sequence: Synthetic oligonucleotide
  Antisense strand to SEQ ID NO: 1964620
acauaggaaaguuaaccac

SEQ ID NO: 1964622 - RNA, 19 nt, Artificial Sequence
  Description of Artificial Sequence: Synthetic oligonucleotide
  Sense strand starting at position 3030 of SEQ ID NO: 1880402
cuuuguauccuccagagaa

SEQ ID NO: 1964623 - RNA, 19 nt, Artificial Sequence
  Description of Artificial Sequence: Synthetic oligonucleotide
  Antisense strand to SEQ ID NO: 1964622
uucucuggaggauacaaag

SEQ ID NO: 1964624 - RNA, 19 nt, Artificial Sequence
  Description of Artificial Sequence: Synthetic oligonucleotide
  Sense strand starting at position 3075 of SEQ ID NO: 1880402
ucaaauguugacugaucaa

SEQ ID NO: 1964625 - RNA, 19 nt, Artificial Sequence
  Description of Artificial Sequence: Synthetic oligonucleotide
  Antisense strand to SEQ ID NO: 1964624
uugaucagucaacauuuga

SEQ ID NO: 1964626 - RNA, 19 nt, Artificial Sequence
  Description of Artificial Sequence: Synthetic oligonucleotide
  Sense strand starting at position 3085 of SEQ ID NO: 1880402
acugaucaauaauugguua

SEQ ID NO: 1964627 - RNA, 19 nt, Artificial Sequence
  Description of Artificial Sequence: Synthetic oligonucleotide
  Antisense strand to SEQ ID NO: 1964626
uaaccaauuauugaucagu

SEQ ID NO: 1964628 - RNA, 19 nt, Artificial Sequence
  Description of Artificial Sequence: Synthetic oligonucleotide
  Sense strand starting at position 3105 of SEQ ID NO: 1880402
uugguugacugacugacaa

SEQ ID NO: 1964629 - RNA, 19 nt, Artificial Sequence
  Description of Artificial Sequence: Synthetic oligonucleotide
  Antisense strand to SEQ ID NO: 1964628
uugucagucagucaaccaa

SEQ ID NO: 1964630 - RNA, 19 nt, Artificial Sequence
  Description of Artificial Sequence: Synthetic oligonucleotide
  Sense strand starting at position 3173 of SEQ ID NO: 1880402
ugauaaaucucacccggga

SEQ ID NO: 1964631 - RNA, 19 nt, Artificial Sequence
  Description of Artificial Sequence: Synthetic oligonucleotide
  Antisense strand to SEQ ID NO: 1964630
ucccgggugagauuuauca

SEQ ID NO: 1964632 - RNA, 19 nt, Artificial Sequence
  Description of Artificial Sequence: Synthetic oligonucleotide
  Sense strand starting at position 3288 of SEQ ID NO: 1880402
agacuucguuucuauuuaa

SEQ ID NO: 1964633 - RNA, 19 nt, Artificial Sequence
  Description of Artificial Sequence: Synthetic oligonucleotide
  Antisense strand to SEQ ID NO: 1964632
uuaaauagaaacgaagucu

SEQ ID NO: 1964634 - RNA, 19 nt, Artificial Sequence
  Description of Artificial Sequence: Synthetic oligonucleotide
  Sense strand starting at position 3377 of SEQ ID NO: 1880402
ucacgaguucaggaguaca

SEQ ID NO: 1964635 - RNA, 19 nt, Artificial Sequence
  Description of Artificial Sequence: Synthetic oligonucleotide
  Antisense strand to SEQ ID NO: 1964634
uguacuccugaacucguga

SEQ ID NO: 1964636 - RNA, 19 nt, Artificial Sequence
  Description of Artificial Sequence: Synthetic oligonucleotide
  Sense strand starting at position 3501 of SEQ ID NO: 1880402
gugggagaaucucucaaac

SEQ ID NO: 1964637 - RNA, 19 nt, Artificial Sequence
  Description of Artificial Sequence: Synthetic oligonucleotide
  Antisense strand to SEQ ID NO: 1964636
guuugagagauucucccac

SEQ ID NO: 1964638 - RNA, 19 nt, Artificial Sequence
  Description of Artificial Sequence: Synthetic oligonucleotide
  Sense strand starting at position 3659 of SEQ ID NO: 1880402
agcuguguuccacaaagau

SEQ ID NO: 1964639 - RNA, 19 nt, Artificial Sequence
  Description of Artificial Sequence: Synthetic oligonucleotide
  Antisense strand to SEQ ID NO: 1964638
aucuuuguggaacacagcu

SEQ ID NO: 1964640 - RNA, 19 nt, Artificial Sequence
  Description of Artificial Sequence: Synthetic oligonucleotide
  Sense strand starting at position 3766 of SEQ ID NO: 1880402
caaagaguaucccaggaca

SEQ ID NO: 1964641 - RNA, 19 nt, Artificial Sequence
  Description of Artificial Sequence: Synthetic oligonucleotide
  Antisense strand to SEQ ID NO: 1964640
uguccugggauacucuuug

SEQ ID NO: 1964642 - RNA, 19 nt, Artificial Sequence
  Description of Artificial Sequence: Synthetic oligonucleotide
  Sense strand starting at position 3942 of SEQ ID NO: 1880402
agcuuaaggccauagaaau

SEQ ID NO: 1964643 - RNA, 19 nt, Artificial Sequence
  Description of Artificial Sequence: Synthetic oligonucleotide
  Antisense strand to SEQ ID NO: 1964642
auuucuauggccuuaagcu

SEQ ID NO: 1964644 - RNA, 19 nt, Artificial Sequence
  Description of Artificial Sequence: Synthetic oligonucleotide
  Sense strand starting at position 381 of SEQ ID NO: 1880404
uguccugagccacaaugaa

SEQ ID NO: 1964645 - RNA, 19 nt, Artificial Sequence
  Description of Artificial Sequence: Synthetic oligonucleotide
  Antisense strand to SEQ ID NO: 1964644
uucauuguggcucaggaca

SEQ ID NO: 1964646 - RNA, 19 nt, Artificial Sequence
  Description of Artificial Sequence: Synthetic oligonucleotide
  Sense strand starting at position 460 of SEQ ID NO: 1880404
uaggguugguuaucuagag

SEQ ID NO: 1964647 - RNA, 19 nt, Artificial Sequence
  Description of Artificial Sequence: Synthetic oligonucleotide
  Antisense strand to SEQ ID NO: 1964646
cucuagauaaccaacccua

SEQ ID NO: 1964648 - RNA, 19 nt, Artificial Sequence
  Description of Artificial Sequence: Synthetic oligonucleotide
  Sense strand starting at position 461 of SEQ ID NO: 1880404
aggguugguuaucuagagu

SEQ ID NO: 1964649 - RNA, 19 nt, Artificial Sequence
  Description of Artificial Sequence: Synthetic oligonucleotide
  Antisense strand to SEQ ID NO: 1964648
acucuagauaaccaacccu

SEQ ID NO: 1964650 - RNA, 19 nt, Artificial Sequence
  Description of Artificial Sequence: Synthetic oligonucleotide
  Sense strand starting at position 480 of SEQ ID NO: 1880404
ccguuccuucccuacuuau

SEQ ID NO: 1964651 - RNA, 19 nt, Artificial Sequence
  Description of Artificial Sequence: Synthetic oligonucleotide
  Antisense strand to SEQ ID NO: 1964650
auaaguagggaaggaacgg

SEQ ID NO: 1964652 - RNA, 19 nt, Artificial Sequence
  Description of Artificial Sequence: Synthetic oligonucleotide
  Sense strand starting at position 565 of SEQ ID NO: 1880404
aaauguauacugcaucgua

SEQ ID NO: 1964653 - RNA, 19 nt, Artificial Sequence
  Description of Artificial Sequence: Synthetic oligonucleotide
  Antisense strand to SEQ ID NO: 1964652
uacgaugcaguauacauuu

SEQ ID NO: 1964654 - RNA, 19 nt, Artificial Sequence
  Description of Artificial Sequence: Synthetic oligonucleotide
  Sense strand starting at position 688 of SEQ ID NO: 1880404
gcaguuuacagaugcuaga

SEQ ID NO: 1964655 - RNA, 19 nt, Artificial Sequence
  Description of Artificial Sequence: Synthetic oligonucleotide
  Antisense strand to SEQ ID NO: 1964654
ucuagcaucuguaaacugc

SEQ ID NO: 1964656 - RNA, 19 nt, Artificial Sequence
  Description of Artificial Sequence: Synthetic oligonucleotide
  Sense strand starting at position 874 of SEQ ID NO: 1880404
ggagguuucuuuccaaaua

SEQ ID NO: 1964657 - RNA, 19 nt, Artificial Sequence
  Description of Artificial Sequence: Synthetic oligonucleotide
  Antisense strand to SEQ ID NO: 1964656
uauuuggaaagaaaccucc

SEQ ID NO: 1964658 - RNA, 19 nt, Artificial Sequence
  Description of Artificial Sequence: Synthetic oligonucleotide
  Sense strand starting at position 976 of SEQ ID NO: 1880404
auaguagcagucuauguua

SEQ ID NO: 1964659 - RNA, 19 nt, Artificial Sequence
  Description of Artificial Sequence: Synthetic oligonucleotide
  Antisense strand to SEQ ID NO: 1964658
uaacauagacugcuacuau

SEQ ID NO: 1964660 - RNA, 19 nt, Artificial Sequence
  Description of Artificial Sequence: Synthetic oligonucleotide
  Sense strand starting at position 979 of SEQ ID NO: 1880404
guagcagucuauguuauuu

SEQ ID NO: 1964661 - RNA, 19 nt, Artificial Sequence
  Description of Artificial Sequence: Synthetic oligonucleotide
  Antisense strand to SEQ ID NO: 1964660
aaauaacauagacugcuac

SEQ ID NO: 1964662 - RNA, 19 nt, Artificial Sequence
  Description of Artificial Sequence: Synthetic oligonucleotide
  Sense strand starting at position 1017 of SEQ ID NO: 1880404
augcuuucuuauuugagca

SEQ ID NO: 1964663 - RNA, 19 nt, Artificial Sequence
  Description of Artificial Sequence: Synthetic oligonucleotide
  Antisense strand to SEQ ID NO: 1964662
ugcucaaauaagaaagcau

SEQ ID NO: 1964664 - RNA, 19 nt, Artificial Sequence
  Description of Artificial Sequence: Synthetic oligonucleotide
  Sense strand starting at position 1209 of SEQ ID NO: 1880404
uggacacaucuagggcaaa

SEQ ID NO: 1964665 - RNA, 19 nt, Artificial Sequence
  Description of Artificial Sequence: Synthetic oligonucleotide
  Antisense strand to SEQ ID NO: 1964664
uuugcccuagaugugucca

SEQ ID NO: 1964666 - RNA, 19 nt, Artificial Sequence
  Description of Artificial Sequence: Synthetic oligonucleotide
  Sense strand starting at position 1411 of SEQ ID NO: 1880404
ucuguuguacgucuguuua

SEQ ID NO: 1964667 - RNA, 19 nt, Artificial Sequence
  Description of Artificial Sequence: Synthetic oligonucleotide
  Antisense strand to SEQ ID NO: 1964666
uaaacagacguacaacaga

SEQ ID NO: 1964668 - RNA, 19 nt, Artificial Sequence
  Description of Artificial Sequence: Synthetic oligonucleotide
  Sense strand starting at position 1414 of SEQ ID NO: 1880404
guuguacgucuguuuaacu

SEQ ID NO: 1964669 - RNA, 19 nt, Artificial Sequence
  Description of Artificial Sequence: Synthetic oligonucleotide
  Antisense strand to SEQ ID NO: 1964668
aguuaaacagacguacaac

SEQ ID NO: 1964670 - RNA, 19 nt, Artificial Sequence
  Description of Artificial Sequence: Synthetic oligonucleotide
  Sense strand starting at position 1419 of SEQ ID NO: 1880404
acgucuguuuaacuaaagu

SEQ ID NO: 1964671 - RNA, 19 nt, Artificial Sequence
  Description of Artificial Sequence: Synthetic oligonucleotide
  Antisense strand to SEQ ID NO: 1964670
acuuuaguuaaacagacgu

SEQ ID NO: 1964672 - RNA, 19 nt, Artificial Sequence
  Description of Artificial Sequence: Synthetic oligonucleotide
  Sense strand starting at position 1797 of SEQ ID NO: 1880404
gaaauacccggaugacuuu

SEQ ID NO: 1964673 - RNA, 19 nt, Artificial Sequence
  Description of Artificial Sequence: Synthetic oligonucleotide
  Antisense strand to SEQ ID NO: 1964672
aaagucauccggguauuuc

SEQ ID NO: 1964674 - RNA, 19 nt, Artificial Sequence
  Description of Artificial Sequence: Synthetic oligonucleotide
  Sense strand starting at position 1808 of SEQ ID NO: 1880404
augacuuucugcucagguu

SEQ ID NO: 1964675 - RNA, 19 nt, Artificial Sequence
  Description of Artificial Sequence: Synthetic oligonucleotide
  Antisense strand to SEQ ID NO: 1964674
aaccugagcagaaagucau

SEQ ID NO: 1964676 - RNA, 19 nt, Artificial Sequence
  Description of Artificial Sequence: Synthetic oligonucleotide
  Sense strand starting at position 1809 of SEQ ID NO: 1880404
ugacuuucugcucagguuu

SEQ ID NO: 1964677 - RNA, 19 nt, Artificial Sequence
  Description of Artificial Sequence: Synthetic oligonucleotide
  Antisense strand to SEQ ID NO: 1964676
aaaccugagcagaaaguca

SEQ ID NO: 1964678 - RNA, 19 nt, Artificial Sequence
  Description of Artificial Sequence: Synthetic oligonucleotide
  Sense strand starting at position 1860 of SEQ ID NO: 1880404
ccauuacucacguggaugu

SEQ ID NO: 1964679 - RNA, 19 nt, Artificial Sequence
  Description of Artificial Sequence: Synthetic oligonucleotide
  Antisense strand to SEQ ID NO: 1964678
acauccacgugaguaaugg

SEQ ID NO: 1964680 - RNA, 19 nt, Artificial Sequence
  Description of Artificial Sequence: Synthetic oligonucleotide
  Sense strand starting at position 1861 of SEQ ID NO: 1880404
cauuacucacguggaugua

SEQ ID NO: 1964681 - RNA, 19 nt, Artificial Sequence
  Description of Artificial Sequence: Synthetic oligonucleotide
  Antisense strand to SEQ ID NO: 1964680
uacauccacgugaguaaug

SEQ ID NO: 1964682 - RNA, 19 nt, Artificial Sequence
  Description of Artificial Sequence: Synthetic oligonucleotide
  Sense strand starting at position 1862 of SEQ ID NO: 1880404
auuacucacguggauguaa

SEQ ID NO: 1964683 - RNA, 19 nt, Artificial Sequence
  Description of Artificial Sequence: Synthetic oligonucleotide
  Antisense strand to SEQ ID NO: 1964682
uuacauccacgugaguaau

SEQ ID NO: 1964684 - RNA, 19 nt, Artificial Sequence
  Description of Artificial Sequence: Synthetic oligonucleotide
  Sense strand starting at position 1985 of SEQ ID NO: 1880404
ggacaaucagcaugauguc

SEQ ID NO: 1964685 - RNA, 19 nt, Artificial Sequence
  Description of Artificial Sequence: Synthetic oligonucleotide
  Antisense strand to SEQ ID NO: 1964684
gacaucaugcugauugucc

SEQ ID NO: 1964686 - RNA, 19 nt, Artificial Sequence
  Description of Artificial Sequence: Synthetic oligonucleotide
  Sense strand starting at position 1994 of SEQ ID NO: 1880404
gcaugaugucagugaugau

SEQ ID NO: 1964687 - RNA, 19 nt, Artificial Sequence
  Description of Artificial Sequence: Synthetic oligonucleotide
  Antisense strand to SEQ ID NO: 1964686
aucaucacugacaucaugc

SEQ ID NO: 1964688 - RNA, 19 nt, Artificial Sequence
  Description of Artificial Sequence: Synthetic oligonucleotide
  Sense strand starting at position 1995 of SEQ ID NO: 1880404
caugaugucagugaugaug

SEQ ID NO: 1964689 - RNA, 19 nt, Artificial Sequence
  Description of Artificial Sequence: Synthetic oligonucleotide
  Antisense strand to SEQ ID NO: 1964688
caucaucacugacaucaug

SEQ ID NO: 1964690 - RNA, 19 nt, Artificial Sequence
  Description of Artificial Sequence: Synthetic oligonucleotide
  Sense strand starting at position 2048 of SEQ ID NO: 1880404
uaugauguugcucgaggga

SEQ ID NO: 1964691 - RNA, 19 nt, Artificial Sequence
  Description of Artificial Sequence: Synthetic oligonucleotide
  Antisense strand to SEQ ID NO: 1964690
ucccucgagcaacaucaua

SEQ ID NO: 1964692 - RNA, 19 nt, Artificial Sequence
  Description of Artificial Sequence: Synthetic oligonucleotide
  Sense strand starting at position 2111 of SEQ ID NO: 1880404
gugcuauggaagugagacu

SEQ ID NO: 1964693 - RNA, 19 nt, Artificial Sequence
  Description of Artificial Sequence: Synthetic oligonucleotide
  Antisense strand to SEQ ID NO: 1964692
agucucacuuccauagcac

SEQ ID NO: 1964694 - RNA, 19 nt, Artificial Sequence
  Description of Artificial Sequence: Synthetic oligonucleotide
  Sense strand starting at position 2145 of SEQ ID NO: 1880404
ccuauugcucuggaguaca

SEQ ID NO: 1964695 - RNA, 19 nt, Artificial Sequence
  Description of Artificial Sequence: Synthetic oligonucleotide
  Antisense strand to SEQ ID NO: 1964694
uguacuccagagcaauagg

SEQ ID NO: 1964696 - RNA, 19 nt, Artificial Sequence
  Description of Artificial Sequence: Synthetic oligonucleotide
  Sense strand starting at position 2291 of SEQ ID NO: 1880404
aggccuuccacaugggaca

SEQ ID NO: 1964697 - RNA, 19 nt, Artificial Sequence
  Description of Artificial Sequence: Synthetic oligonucleotide
  Antisense strand to SEQ ID NO: 1964696
ugucccauguggaaggccu

SEQ ID NO: 1964698 - RNA, 19 nt, Artificial Sequence
  Description of Artificial Sequence: Synthetic oligonucleotide
  Sense strand starting at position 2320 of SEQ ID NO: 1880404
augccuacugcugggagaa

SEQ ID NO: 1964699 - RNA, 19 nt, Artificial Sequence
  Description of Artificial Sequence: Synthetic oligonucleotide
  Antisense strand to SEQ ID NO: 1964698
uucucccagcaguaggcau

SEQ ID NO: 1964700 - RNA, 19 nt, Artificial Sequence
  Description of Artificial Sequence: Synthetic oligonucleotide
  Sense strand starting at position 2409 of SEQ ID NO: 1880404
gccacauuccaauggcaaa

SEQ ID NO: 1964701 - RNA, 19 nt, Artificial Sequence
  Description of Artificial Sequence: Synthetic oligonucleotide
  Antisense strand to SEQ ID NO: 1964700
uuugccauuggaauguggc

SEQ ID NO: 1964702 - RNA, 19 nt, Artificial Sequence
  Description of Artificial Sequence: Synthetic oligonucleotide
  Sense strand starting at position 2430 of SEQ ID NO: 1880404
ucguuccuggccuauuaga

SEQ ID NO: 1964703 - RNA, 19 nt, Artificial Sequence
  Description of Artificial Sequence: Synthetic oligonucleotide
  Antisense strand to SEQ ID NO: 1964702
ucuaauaggccaggaacga

SEQ ID NO: 1964704 - RNA, 19 nt, Artificial Sequence
  Description of Artificial Sequence: Synthetic oligonucleotide
  Sense strand starting at position 2440 of SEQ ID NO: 1880404
ccuauuagagucggguaca

SEQ ID NO: 1964705 - RNA, 19 nt, Artificial Sequence
  Description of Artificial Sequence: Synthetic oligonucleotide
  Antisense strand to SEQ ID NO: 1964704
uguacccgacucuaauagg

SEQ ID NO: 1964706 - RNA, 19 nt, Artificial Sequence
  Description of Artificial Sequence: Synthetic oligonucleotide
  Sense strand starting at position 2443 of SEQ ID NO: 1880404
auuagagucggguacaaca

SEQ ID NO: 1964707 - RNA, 19 nt, Artificial Sequence
  Description of Artificial Sequence: Synthetic oligonucleotide
  Antisense strand to SEQ ID NO: 1964706
uguuguacccgacucuaau

SEQ ID NO: 1964708 - RNA, 19 nt, Artificial Sequence
  Description of Artificial Sequence: Synthetic oligonucleotide
  Sense strand starting at position 2667 of SEQ ID NO: 1880404
guaauaacaccuuggcaga

SEQ ID NO: 1964709 - RNA, 19 nt, Artificial Sequence
  Description of Artificial Sequence: Synthetic oligonucleotide
  Antisense strand to SEQ ID NO: 1964708
ucugccaagguguuauuac

SEQ ID NO: 1964710 - RNA, 19 nt, Artificial Sequence
  Description of Artificial Sequence: Synthetic oligonucleotide
  Sense strand starting at position 3009 of SEQ ID NO: 1880404
acaagucaugccuaauaga

SEQ ID NO: 1964711 - RNA, 19 nt, Artificial Sequence
  Description of Artificial Sequence: Synthetic oligonucleotide
  Antisense strand to SEQ ID NO: 1964710
ucuauuaggcaugacuugu

SEQ ID NO: 1964712 - RNA, 19 nt, Artificial Sequence
  Description of Artificial Sequence: Synthetic oligonucleotide
  Sense strand starting at position 3314 of SEQ ID NO: 1880404
gauguagucuaucuuaguc

SEQ ID NO: 1964713 - RNA, 19 nt, Artificial Sequence
  Description of Artificial Sequence: Synthetic oligonucleotide
  Antisense strand to SEQ ID NO: 1964712
gacuaagauagacuacauc

SEQ ID NO: 1964714 - RNA, 19 nt, Artificial Sequence
  Description of Artificial Sequence: Synthetic oligonucleotide
  Sense strand starting at position 3318 of SEQ ID NO: 1880404
uagucuaucuuagucaugu

SEQ ID NO: 1964715 - RNA, 19 nt, Artificial Sequence
  Description of Artificial Sequence: Synthetic oligonucleotide
  Antisense strand to SEQ ID NO: 1964714
acaugacuaagauagacua

SEQ ID NO: 1964716 - RNA, 19 nt, Artificial Sequence
  Description of Artificial Sequence: Synthetic oligonucleotide
  Sense strand starting at position 3319 of SEQ ID NO: 1880404
agucuaucuuagucaugug

SEQ ID NO: 1964717 - RNA, 19 nt, Artificial Sequence
  Description of Artificial Sequence: Synthetic oligonucleotide
  Antisense strand to SEQ ID NO: 1964716
cacaugacuaagauagacu

SEQ ID NO: 1964718 - RNA, 19 nt, Artificial Sequence
  Description of Artificial Sequence: Synthetic oligonucleotide
  Sense strand starting at position 3371 of SEQ ID NO: 1880404
uuucuuaagcaaggauuaa

SEQ ID NO: 1964719 - RNA, 19 nt, Artificial Sequence
  Description of Artificial Sequence: Synthetic oligonucleotide
  Antisense strand to SEQ ID NO: 1964718
uuaauccuugcuuaagaaa

SEQ ID NO: 1964720 - RNA, 19 nt, Artificial Sequence
  Description of Artificial Sequence: Synthetic oligonucleotide
  Sense strand starting at position 3386 of SEQ ID NO: 1880404
uuaagacuuuccuaaggaa

SEQ ID NO: 1964721 - RNA, 19 nt, Artificial Sequence
  Description of Artificial Sequence: Synthetic oligonucleotide
  Antisense strand to SEQ ID NO: 1964720
uuccuuaggaaagucuuaa

SEQ ID NO: 1964722 - RNA, 19 nt, Artificial Sequence
  Description of Artificial Sequence: Synthetic oligonucleotide
  Sense strand starting at position 3514 of SEQ ID NO: 1880404
cgucuuugucugccaagca

SEQ ID NO: 1964723 - RNA, 19 nt, Artificial Sequence
  Description of Artificial Sequence: Synthetic oligonucleotide
  Antisense strand to SEQ ID NO: 1964722
ugcuuggcagacaaagacg

SEQ ID NO: 1964724 - RNA, 19 nt, Artificial Sequence
  Description of Artificial Sequence: Synthetic oligonucleotide
  Sense strand starting at position 19 of SEQ ID NO: 1880405
ggcaaauccugcuuuggau

SEQ ID NO: 1964725 - RNA, 19 nt, Artificial Sequence
  Description of Artificial Sequence: Synthetic oligonucleotide
  Antisense strand to SEQ ID NO: 1964724
auccaaagcaggauuugcc

SEQ ID NO: 1964726 - RNA, 19 nt, Artificial Sequence
  Description of Artificial Sequence: Synthetic oligonucleotide
  Sense strand starting at position 81 of SEQ ID NO: 1880405
cugucacuaagcgaagaaa

SEQ ID NO: 1964727 - RNA, 19 nt, Artificial Sequence
  Description of Artificial Sequence: Synthetic oligonucleotide
  Antisense strand to SEQ ID NO: 1964726
uuucuucgcuuagugacag

SEQ ID NO: 1964728 - RNA, 19 nt, Artificial Sequence
  Description of Artificial Sequence: Synthetic oligonucleotide
  Sense strand starting at position 206 of SEQ ID NO: 1880405
gacugucuucuuggacuuu

SEQ ID NO: 1964729 - RNA, 19 nt, Artificial Sequence
  Description of Artificial Sequence: Synthetic oligonucleotide
  Antisense strand to SEQ ID NO: 1964728
aaaguccaagaagacaguc

SEQ ID NO: 1964730 - RNA, 19 nt, Artificial Sequence
  Description of Artificial Sequence: Synthetic oligonucleotide
  Sense strand starting at position 279 of SEQ ID NO: 1880405
ccaucuuuccugcagaaug

SEQ ID NO: 1964731 - RNA, 19 nt, Artificial Sequence
  Description of Artificial Sequence: Synthetic oligonucleotide
  Antisense strand to SEQ ID NO: 1964730
cauucugcaggaaagaugg

SEQ ID NO: 1964732 - RNA, 19 nt, Artificial Sequence
  Description of Artificial Sequence: Synthetic oligonucleotide
  Sense strand starting at position 604 of SEQ ID NO: 1880405
cauagaggguguucucuuu

SEQ ID NO: 1964733 - RNA, 19 nt, Artificial Sequence
  Description of Artificial Sequence: Synthetic oligonucleotide
  Antisense strand to SEQ ID NO: 1964732
aaagagaacacccucuaug

SEQ ID NO: 1964734 - RNA, 19 nt, Artificial Sequence
  Description of Artificial Sequence: Synthetic oligonucleotide
  Sense strand starting at position 614 of SEQ ID NO: 1880405
guucucuuucuggagggau

SEQ ID NO: 1964735 - RNA, 19 nt, Artificial Sequence
  Description of Artificial Sequence: Synthetic oligonucleotide
  Antisense strand to SEQ ID NO: 1964734
aucccuccagaaagagaac

SEQ ID NO: 1964736 - RNA, 19 nt, Artificial Sequence
  Description of Artificial Sequence: Synthetic oligonucleotide
  Sense strand starting at position 871 of SEQ ID NO: 1880405
cagguaucaaguggguaga

SEQ ID NO: 1964737 - RNA, 19 nt, Artificial Sequence
  Description of Artificial Sequence: Synthetic oligonucleotide
  Antisense strand to SEQ ID NO: 1964736
ucuacccacuugauaccug

SEQ ID NO: 1964738 - RNA, 19 nt, Artificial Sequence
  Description of Artificial Sequence: Synthetic oligonucleotide
  Sense strand starting at position 881 of SEQ ID NO: 1880405
guggguagagcucaugcau

SEQ ID NO: 1964739 - RNA, 19 nt, Artificial Sequence
  Description of Artificial Sequence: Synthetic oligonucleotide
  Antisense strand to SEQ ID NO: 1964738
augcaugagcucuacccac

SEQ ID NO: 1964740 - RNA, 19 nt, Artificial Sequence
  Description of Artificial Sequence: Synthetic oligonucleotide
  Sense strand starting at position 1287 of SEQ ID NO: 1880405
ccaggucuccuccagggau

SEQ ID NO: 1964741 - RNA, 19 nt, Artificial Sequence
  Description of Artificial Sequence: Synthetic oligonucleotide
  Antisense strand to SEQ ID NO: 1964740
aucccuggaggagaccugg

SEQ ID NO: 1964742 - RNA, 19 nt, Artificial Sequence
  Description of Artificial Sequence: Synthetic oligonucleotide
  Sense strand starting at position 1291 of SEQ ID NO: 1880405
gucuccuccagggauggua

SEQ ID NO: 1964743 - RNA, 19 nt, Artificial Sequence
  Description of Artificial Sequence: Synthetic oligonucleotide
  Antisense strand to SEQ ID NO: 1964742
uaccaucccuggaggagac

SEQ ID NO: 1964744 - RNA, 19 nt, Artificial Sequence
  Description of Artificial Sequence: Synthetic oligonucleotide
  Sense strand starting at position 1643 of SEQ ID NO: 1880405
gggacuucuccacgggagu

SEQ ID NO: 1964745 - RNA, 19 nt, Artificial Sequence
  Description of Artificial Sequence: Synthetic oligonucleotide
  Antisense strand to SEQ ID NO: 1964744
acucccguggagaaguccc

SEQ ID NO: 1964746 - RNA, 19 nt, Artificial Sequence
  Description of Artificial Sequence: Synthetic oligonucleotide
  Sense strand starting at position 1644 of SEQ ID NO: 1880405
ggacuucuccacgggagua

SEQ ID NO: 1964747 - RNA, 19 nt, Artificial Sequence
  Description of Artificial Sequence: Synthetic oligonucleotide
  Antisense strand to SEQ ID NO: 1964746
uacucccguggagaagucc

SEQ ID NO: 1964748 - RNA, 19 nt, Artificial Sequence
  Description of Artificial Sequence: Synthetic oligonucleotide
  Sense strand starting at position 1995 of SEQ ID NO: 1880405
gcgugugaccauguaaggu

SEQ ID NO: 1964749 - RNA, 19 nt, Artificial Sequence
  Description of Artificial Sequence: Synthetic oligonucleotide
  Antisense strand to SEQ ID NO: 1964748
accuuacauggucacacgc

SEQ ID NO: 1964750 - RNA, 19 nt, Artificial Sequence
  Description of Artificial Sequence: Synthetic oligonucleotide
  Sense strand starting at position 2297 of SEQ ID NO: 1880405
ccacuagaugccuggcaga

SEQ ID NO: 1964751 - RNA, 19 nt, Artificial Sequence
  Description of Artificial Sequence: Synthetic oligonucleotide
  Antisense strand to SEQ ID NO: 1964750
ucugccaggcaucuagugg

SEQ ID NO: 1964752 - RNA, 19 nt, Artificial Sequence
  Description of Artificial Sequence: Synthetic oligonucleotide
  Sense strand starting at position 2979 of SEQ ID NO: 1880405
cagagcuucgauggugaga

SEQ ID NO: 1964753 - RNA, 19 nt, Artificial Sequence
  Description of Artificial Sequence: Synthetic oligonucleotide
  Antisense strand to SEQ ID NO: 1964752
ucucaccaucgaagcucug

SEQ ID NO: 1964754 - RNA, 19 nt, Artificial Sequence
  Description of Artificial Sequence: Synthetic oligonucleotide
  Sense strand starting at position 3187 of SEQ ID NO: 1880405
agaauucggugcuuaagag

SEQ ID NO: 1964755 - RNA, 19 nt, Artificial Sequence
  Description of Artificial Sequence: Synthetic oligonucleotide
  Antisense strand to SEQ ID NO: 1964754
cucuuaagcaccgaauucu

SEQ ID NO: 1964756 - RNA, 19 nt, Artificial Sequence
  Description of Artificial Sequence: Synthetic oligonucleotide
  Sense strand starting at position 3188 of SEQ ID NO: 1880405
gaauucggugcuuaagaga

SEQ ID NO: 1964757 - RNA, 19 nt, Artificial Sequence
  Description of Artificial Sequence: Synthetic oligonucleotide
  Antisense strand to SEQ ID NO: 1964756
ucucuuaagcaccgaauuc

SEQ ID NO: 1964758 - RNA, 19 nt, Artificial Sequence
  Description of Artificial Sequence: Synthetic oligonucleotide
  Sense strand starting at position 3193 of SEQ ID NO: 1880405
cggugcuuaagagaugaga

SEQ ID NO: 1964759 - RNA, 19 nt, Artificial Sequence
  Description of Artificial Sequence: Synthetic oligonucleotide
  Antisense strand to SEQ ID NO: 1964758
ucucaucucuuaagcaccg

SEQ ID NO: 1964760 - RNA, 19 nt, Artificial Sequence
  Description of Artificial Sequence: Synthetic oligonucleotide
  Sense strand starting at position 3195 of SEQ ID NO: 1880405
gugcuuaagagaugagaaa

SEQ ID NO: 1964761 - RNA, 19 nt, Artificial Sequence
  Description of Artificial Sequence: Synthetic oligonucleotide
  Antisense strand to SEQ ID NO: 1964760
uuucucaucucuuaagcac

SEQ ID NO: 1964762 - RNA, 19 nt, Artificial Sequence
  Description of Artificial Sequence: Synthetic oligonucleotide
  Sense strand starting at position 3206 of SEQ ID NO: 1880405
augagaaacuucguucuac

SEQ ID NO: 1964763 - RNA, 19 nt, Artificial Sequence
  Description of Artificial Sequence: Synthetic oligonucleotide
  Antisense strand to SEQ ID NO: 1964762
guagaacgaaguuucucau

SEQ ID NO: 1964764 - RNA, 19 nt, Artificial Sequence
  Description of Artificial Sequence: Synthetic oligonucleotide
  Sense strand starting at position 3207 of SEQ ID NO: 1880405
ugagaaacuucguucuacc

SEQ ID NO: 1964765 - RNA, 19 nt, Artificial Sequence
  Description of Artificial Sequence: Synthetic oligonucleotide
  Antisense strand to SEQ ID NO: 1964764
gguagaacgaaguuucuca

SEQ ID NO: 1964766 - RNA, 19 nt, Artificial Sequence
  Description of Artificial Sequence: Synthetic oligonucleotide
  Sense strand starting at position 3216 of SEQ ID NO: 1880405
ucguucuaccaguaaugga

SEQ ID NO: 1964767 - RNA, 19 nt, Artificial Sequence
  Description of Artificial Sequence: Synthetic oligonucleotide
  Antisense strand to SEQ ID NO: 1964766
uccauuacugguagaacga

SEQ ID NO: 1964768 - RNA, 19 nt, Artificial Sequence
  Description of Artificial Sequence: Synthetic oligonucleotide
  Sense strand starting at position 3274 of SEQ ID NO: 1880405
ucccuuugacuauguagga

SEQ ID NO: 1964769 - RNA, 19 nt, Artificial Sequence
  Description of Artificial Sequence: Synthetic oligonucleotide
  Antisense strand to SEQ ID NO: 1964768
uccuacauagucaaaggga

SEQ ID NO: 1964770 - RNA, 19 nt, Artificial Sequence
  Description of Artificial Sequence: Synthetic oligonucleotide
  Sense strand starting at position 3283 of SEQ ID NO: 1880405
cuauguaggacucgauaac

SEQ ID NO: 1964771 - RNA, 19 nt, Artificial Sequence
  Description of Artificial Sequence: Synthetic oligonucleotide
  Antisense strand to SEQ ID NO: 1964770
guuaucgaguccuacauag

SEQ ID NO: 1964772 - RNA, 19 nt, Artificial Sequence
  Description of Artificial Sequence: Synthetic oligonucleotide
  Sense strand starting at position 3424 of SEQ ID NO: 1880405
uggaauucuguuggccaga

SEQ ID NO: 1964773 - RNA, 19 nt, Artificial Sequence
  Description of Artificial Sequence: Synthetic oligonucleotide
  Antisense strand to SEQ ID NO: 1964772
ucuggccaacagaauucca

SEQ ID NO: 1964774 - RNA, 19 nt, Artificial Sequence
  Description of Artificial Sequence: Synthetic oligonucleotide
  Sense strand starting at position 3425 of SEQ ID NO: 1880405
ggaauucuguuggccagau

SEQ ID NO: 1964775 - RNA, 19 nt, Artificial Sequence
  Description of Artificial Sequence: Synthetic oligonucleotide
  Antisense strand to SEQ ID NO: 1964774
aucuggccaacagaauucc

SEQ ID NO: 1964776 - RNA, 19 nt, Artificial Sequence
  Description of Artificial Sequence: Synthetic oligonucleotide
  Sense strand starting at position 3426 of SEQ ID NO: 1880405
gaauucuguuggccagauu

SEQ ID NO: 1964777 - RNA, 19 nt, Artificial Sequence
  Description of Artificial Sequence: Synthetic oligonucleotide
  Antisense strand to SEQ ID NO: 1964776
aaucuggccaacagaauuc

SEQ ID NO: 1964778 - RNA, 19 nt, Artificial Sequence
  Description of Artificial Sequence: Synthetic oligonucleotide
  Sense strand starting at position 3458 of SEQ ID NO: 1880405
guaugaguauaauuggaac

SEQ ID NO: 1964779 - RNA, 19 nt, Artificial Sequence
  Description of Artificial Sequence: Synthetic oligonucleotide
  Antisense strand to SEQ ID NO: 1964778
guuccaauuauacucauac

SEQ ID NO: 1964780 - RNA, 19 nt, Artificial Sequence
  Description of Artificial Sequence: Synthetic oligonucleotide
  Sense strand starting at position 3507 of SEQ ID NO: 1880405
gcaauuagaugugcaagga

SEQ ID NO: 1964781 - RNA, 19 nt, Artificial Sequence
  Description of Artificial Sequence: Synthetic oligonucleotide
  Antisense strand to SEQ ID NO: 1964780
uccuugcacaucuaauugc

SEQ ID NO: 1964782 - RNA, 19 nt, Artificial Sequence
  Description of Artificial Sequence: Synthetic oligonucleotide
  Sense strand starting at position 3546 of SEQ ID NO: 1880405
cacgacuuugagcgaauua

SEQ ID NO: 1964783 - RNA, 19 nt, Artificial Sequence
  Description of Artificial Sequence: Synthetic oligonucleotide
  Antisense strand to SEQ ID NO: 1964782
uaauucgcucaaagucgug

SEQ ID NO: 1964784 - RNA, 19 nt, Artificial Sequence
  Description of Artificial Sequence: Synthetic oligonucleotide
  Sense strand starting at position 3547 of SEQ ID NO: 1880405
acgacuuugagcgaauuac

SEQ ID NO: 1964785 - RNA, 19 nt, Artificial Sequence
  Description of Artificial Sequence: Synthetic oligonucleotide
  Antisense strand to SEQ ID NO: 1964784
guaauucgcucaaagucgu

SEQ ID NO: 1964786 - RNA, 19 nt, Artificial Sequence
  Description of Artificial Sequence: Synthetic oligonucleotide
  Sense strand starting at position 3556 of SEQ ID NO: 1880405
agcgaauuacugggucaga

SEQ ID NO: 1964787 - RNA, 19 nt, Artificial Sequence
  Description of Artificial Sequence: Synthetic oligonucleotide
  Antisense strand to SEQ ID NO: 1964786
ucugacccaguaauucgcu

SEQ ID NO: 1964788 - RNA, 19 nt, Artificial Sequence
  Description of Artificial Sequence: Synthetic oligonucleotide
  Sense strand starting at position 3557 of SEQ ID NO: 1880405
gcgaauuacugggucagaa

SEQ ID NO: 1964789 - RNA, 19 nt, Artificial Sequence
  Description of Artificial Sequence: Synthetic oligonucleotide
  Antisense strand to SEQ ID NO: 1964788
uucugacccaguaauucgc

SEQ ID NO: 1964790 - RNA, 19 nt, Artificial Sequence
  Description of Artificial Sequence: Synthetic oligonucleotide
  Sense strand starting at position 3566 of SEQ ID NO: 1880405
ugggucagaacuuguaucu

SEQ ID NO: 1964791 - RNA, 19 nt, Artificial Sequence
  Description of Artificial Sequence: Synthetic oligonucleotide
  Antisense strand to SEQ ID NO: 1964790
agauacaaguucugaccca

SEQ ID NO: 1964792 - RNA, 19 nt, Artificial Sequence
  Description of Artificial Sequence: Synthetic oligonucleotide
  Sense strand starting at position 3607 of SEQ ID NO: 1880405
gugggauccgcguugucua

SEQ ID NO: 1964793 - RNA, 19 nt, Artificial Sequence
  Description of Artificial Sequence: Synthetic oligonucleotide
  Antisense strand to SEQ ID NO: 1964792
uagacaacgcggaucccac

SEQ ID NO: 1964794 - RNA, 19 nt, Artificial Sequence
  Description of Artificial Sequence: Synthetic oligonucleotide
  Sense strand starting at position 3614 of SEQ ID NO: 1880405
ccgcguugucuaguuguua

SEQ ID NO: 1964795 - RNA, 19 nt, Artificial Sequence
  Description of Artificial Sequence: Synthetic oligonucleotide
  Antisense strand to SEQ ID NO: 1964794
uaacaacuagacaacgcgg

SEQ ID NO: 1964796 - RNA, 19 nt, Artificial Sequence
  Description of Artificial Sequence: Synthetic oligonucleotide
  Sense strand starting at position 3625 of SEQ ID NO: 1880405
aguuguuaugaagagucaa

SEQ ID NO: 1964797 - RNA, 19 nt, Artificial Sequence
  Description of Artificial Sequence: Synthetic oligonucleotide
  Antisense strand to SEQ ID NO: 1964796
uugacucuucauaacaacu

SEQ ID NO: 1964798 - RNA, 19 nt, Artificial Sequence
  Description of Artificial Sequence: Synthetic oligonucleotide
  Sense strand starting at position 3676 of SEQ ID NO: 1880405
ugacacuauuaggugaaua

SEQ ID NO: 1964799 - RNA, 19 nt, Artificial Sequence
  Description of Artificial Sequence: Synthetic oligonucleotide
  Antisense strand to SEQ ID NO: 1964798
uauucaccuaauaguguca

SEQ ID NO: 1964800 - RNA, 19 nt, Artificial Sequence
  Description of Artificial Sequence: Synthetic oligonucleotide
  Sense strand starting at position 3720 of SEQ ID NO: 1880405
ccacuugagcuauguaaac

SEQ ID NO: 1964801 - RNA, 19 nt, Artificial Sequence
  Description of Artificial Sequence: Synthetic oligonucleotide
  Antisense strand to SEQ ID NO: 1964800
guuuacauagcucaagugg

SEQ ID NO: 1964802 - RNA, 19 nt, Artificial Sequence
  Description of Artificial Sequence: Synthetic oligonucleotide
  Sense strand starting at position 3768 of SEQ ID NO: 1880405
aauagaaucuuggagauag

SEQ ID NO: 1964803 - RNA, 19 nt, Artificial Sequence
  Description of Artificial Sequence: Synthetic oligonucleotide
  Antisense strand to SEQ ID NO: 1964802
cuaucuccaagauucuauu

SEQ ID NO: 1964804 - RNA, 19 nt, Artificial Sequence
  Description of Artificial Sequence: Synthetic oligonucleotide
  Sense strand starting at position 338 of SEQ ID NO: 1880406
uuuauagucuaagugagga

SEQ ID NO: 1964805 - RNA, 19 nt, Artificial Sequence
  Description of Artificial Sequence: Synthetic oligonucleotide
  Antisense strand to SEQ ID NO: 1964804
uccucacuuagacuauaaa

SEQ ID NO: 1964806 - RNA, 19 nt, Artificial Sequence
  Description of Artificial Sequence: Synthetic oligonucleotide
  Sense strand starting at position 432 of SEQ ID NO: 1880406
aguggaaccuacuuuagau

SEQ ID NO: 1964807 - RNA, 19 nt, Artificial Sequence
  Description of Artificial Sequence: Synthetic oligonucleotide
  Antisense strand to SEQ ID NO: 1964806
aucuaaaguagguuccacu

SEQ ID NO: 1964808 - RNA, 19 nt, Artificial Sequence
  Description of Artificial Sequence: Synthetic oligonucleotide
  Sense strand starting at position 440 of SEQ ID NO: 1880406
cuacuuuagauagggugau

SEQ ID NO: 1964809 - RNA, 19 nt, Artificial Sequence
  Description of Artificial Sequence: Synthetic oligonucleotide
  Antisense strand to SEQ ID NO: 1964808
aucacccuaucuaaaguag

SEQ ID NO: 1964810 - RNA, 19 nt, Artificial Sequence
  Description of Artificial Sequence: Synthetic oligonucleotide
  Sense strand starting at position 599 of SEQ ID NO: 1880406
ccagaaugucuguagucca

SEQ ID NO: 1964811 - RNA, 19 nt, Artificial Sequence
  Description of Artificial Sequence: Synthetic oligonucleotide
  Antisense strand to SEQ ID NO: 1964810
uggacuacagacauucugg

SEQ ID NO: 1964812 - RNA, 19 nt, Artificial Sequence
  Description of Artificial Sequence: Synthetic oligonucleotide
  Sense strand starting at position 607 of SEQ ID NO: 1880406
ucuguaguccaauauguga

SEQ ID NO: 1964813 - RNA, 19 nt, Artificial Sequence
  Description of Artificial Sequence: Synthetic oligonucleotide
  Antisense strand to SEQ ID NO: 1964812
ucacauauuggacuacaga

SEQ ID NO: 1964814 - RNA, 19 nt, Artificial Sequence
  Description of Artificial Sequence: Synthetic oligonucleotide
  Sense strand starting at position 642 of SEQ ID NO: 1880406
agauguugcgggagcucau

SEQ ID NO: 1964815 - RNA, 19 nt, Artificial Sequence
  Description of Artificial Sequence: Synthetic oligonucleotide
  Antisense strand to SEQ ID NO: 1964814
augagcucccgcaacaucu

SEQ ID NO: 1964816 - RNA, 19 nt, Artificial Sequence
  Description of Artificial Sequence: Synthetic oligonucleotide
  Sense strand starting at position 735 of SEQ ID NO: 1880406
accagucugcuuuagauag

SEQ ID NO: 1964817 - RNA, 19 nt, Artificial Sequence
  Description of Artificial Sequence: Synthetic oligonucleotide
  Antisense strand to SEQ ID NO: 1964816
cuaucuaaagcagacuggu

SEQ ID NO: 1964818 - RNA, 19 nt, Artificial Sequence
  Description of Artificial Sequence: Synthetic oligonucleotide
  Sense strand starting at position 781 of SEQ ID NO: 1880406
uuuacaauuugagggaaga

SEQ ID NO: 1964819 - RNA, 19 nt, Artificial Sequence
  Description of Artificial Sequence: Synthetic oligonucleotide
  Antisense strand to SEQ ID NO: 1964818
ucuucccucaaauuguaaa

SEQ ID NO: 1964820 - RNA, 19 nt, Artificial Sequence
  Description of Artificial Sequence: Synthetic oligonucleotide
  Sense strand starting at position 801 of SEQ ID NO: 1880406
auggaaucagccuaagcau

SEQ ID NO: 1964821 - RNA, 19 nt, Artificial Sequence
  Description of Artificial Sequence: Synthetic oligonucleotide
  Antisense strand to SEQ ID NO: 1964820
augcuuaggcugauuccau

SEQ ID NO: 1964822 - RNA, 19 nt, Artificial Sequence
  Description of Artificial Sequence: Synthetic oligonucleotide
  Sense strand starting at position 888 of SEQ ID NO: 1880406
uugccaagauaucuggaau

SEQ ID NO: 1964823 - RNA, 19 nt, Artificial Sequence
  Description of Artificial Sequence: Synthetic oligonucleotide
  Antisense strand to SEQ ID NO: 1964822
auuccagauaucuuggcaa

SEQ ID NO: 1964824 - RNA, 19 nt, Artificial Sequence
  Description of Artificial Sequence: Synthetic oligonucleotide
  Sense strand starting at position 944 of SEQ ID NO: 1880406
ggucuuauauaccuaugau

SEQ ID NO: 1964825 - RNA, 19 nt, Artificial Sequence
  Description of Artificial Sequence: Synthetic oligonucleotide
  Antisense strand to SEQ ID NO: 1964824
aucauagguauauaagacc

SEQ ID NO: 1964826 - RNA, 19 nt, Artificial Sequence
  Description of Artificial Sequence: Synthetic oligonucleotide
  Sense strand starting at position 1125 of SEQ ID NO: 1880406
gugcuucucaaggaauuag

SEQ ID NO: 1964827 - RNA, 19 nt, Artificial Sequence
  Description of Artificial Sequence: Synthetic oligonucleotide
  Antisense strand to SEQ ID NO: 1964826
cuaauuccuugagaagcac

SEQ ID NO: 1964828 - RNA, 19 nt, Artificial Sequence
  Description of Artificial Sequence: Synthetic oligonucleotide
  Sense strand starting at position 1219 of SEQ ID NO: 1880406
agacucuguuugcugaaga

SEQ ID NO: 1964829 - RNA, 19 nt, Artificial Sequence
  Description of Artificial Sequence: Synthetic oligonucleotide
  Antisense strand to SEQ ID NO: 1964828
ucuucagcaaacagagucu

SEQ ID NO: 1964830 - RNA, 19 nt, Artificial Sequence
  Description of Artificial Sequence: Synthetic oligonucleotide
  Sense strand starting at position 1314 of SEQ ID NO: 1880406
uuuauuuagccauguugua

SEQ ID NO: 1964831 - RNA, 19 nt, Artificial Sequence
  Description of Artificial Sequence: Synthetic oligonucleotide
  Antisense strand to SEQ ID NO: 1964830
uacaacauggcuaaauaaa

SEQ ID NO: 1964832 - RNA, 19 nt, Artificial Sequence
  Description of Artificial Sequence: Synthetic oligonucleotide
  Sense strand starting at position 1360 of SEQ ID NO: 1880406
uugcuucuagaagauuauu

SEQ ID NO: 1964833 - RNA, 19 nt, Artificial Sequence
  Description of Artificial Sequence: Synthetic oligonucleotide
  Antisense strand to SEQ ID NO: 1964832
aauaaucuucuagaagcaa

SEQ ID NO: 1964834 - RNA, 19 nt, Artificial Sequence
  Description of Artificial Sequence: Synthetic oligonucleotide
  Sense strand starting at position 1365 of SEQ ID NO: 1880406
ucuagaagauuauugaagu

SEQ ID NO: 1964835 - RNA, 19 nt, Artificial Sequence
  Description of Artificial Sequence: Synthetic oligonucleotide
  Antisense strand to SEQ ID NO: 1964834
acuucaauaaucuucuaga

SEQ ID NO: 1964836 - RNA, 19 nt, Artificial Sequence
  Description of Artificial Sequence: Synthetic oligonucleotide
  Sense strand starting at position 1383 of SEQ ID NO: 1880406
ugggacuugcgagacauau

SEQ ID NO: 1964837 - RNA, 19 nt, Artificial Sequence
  Description of Artificial Sequence: Synthetic oligonucleotide
  Antisense strand to SEQ ID NO: 1964836
auaugucucgcaaguccca

SEQ ID NO: 1964838 - RNA, 19 nt, Artificial Sequence
  Description of Artificial Sequence: Synthetic oligonucleotide
  Sense strand starting at position 1609 of SEQ ID NO: 1880406
gaaagagugcgguacaaau

SEQ ID NO: 1964839 - RNA, 19 nt, Artificial Sequence
  Description of Artificial Sequence: Synthetic oligonucleotide
  Antisense strand to SEQ ID NO: 1964838
auuuguaccgcacucuuuc

SEQ ID NO: 1964840 - RNA, 19 nt, Artificial Sequence
  Description of Artificial Sequence: Synthetic oligonucleotide
  Sense strand starting at position 1693 of SEQ ID NO: 1880406
cuuggucuugacuacaaau

SEQ ID NO: 1964841 - RNA, 19 nt, Artificial Sequence
  Description of Artificial Sequence: Synthetic oligonucleotide
  Antisense strand to SEQ ID NO: 1964840
auuuguagucaagaccaag

SEQ ID NO: 1964842 - RNA, 19 nt, Artificial Sequence
  Description of Artificial Sequence: Synthetic oligonucleotide
  Sense strand starting at position 1783 of SEQ ID NO: 1880406
uuucuuccacgucagaaau

SEQ ID NO: 1964843 - RNA, 19 nt, Artificial Sequence
  Description of Artificial Sequence: Synthetic oligonucleotide
  Antisense strand to SEQ ID NO: 1964842
auuucugacguggaagaaa

SEQ ID NO: 1964844 - RNA, 19 nt, Artificial Sequence
  Description of Artificial Sequence: Synthetic oligonucleotide
  Sense strand starting at position 1793 of SEQ ID NO: 1880406
gucagaaaugcccaucaca

SEQ ID NO: 1964845 - RNA, 19 nt, Artificial Sequence
  Description of Artificial Sequence: Synthetic oligonucleotide
  Antisense strand to SEQ ID NO: 1964844
ugugaugggcauuucugac

SEQ ID NO: 1964846 - RNA, 19 nt, Artificial Sequence
  Description of Artificial Sequence: Synthetic oligonucleotide
  Sense strand starting at position 2029 of SEQ ID NO: 1880406
gguggccuccuggagacau

SEQ ID NO: 1964847 - RNA, 19 nt, Artificial Sequence
  Description of Artificial Sequence: Synthetic oligonucleotide
  Antisense strand to SEQ ID NO: 1964846
augucuccaggaggccacc

SEQ ID NO: 1964848 - RNA, 19 nt, Artificial Sequence
  Description of Artificial Sequence: Synthetic oligonucleotide
  Sense strand starting at position 2255 of SEQ ID NO: 1880406
uuuggaaggcaguauuauu

SEQ ID NO: 1964849 - RNA, 19 nt, Artificial Sequence
  Description of Artificial Sequence: Synthetic oligonucleotide
  Antisense strand to SEQ ID NO: 1964848
aauaauacugccuuccaaa

SEQ ID NO: 1964850 - RNA, 19 nt, Artificial Sequence
  Description of Artificial Sequence: Synthetic oligonucleotide
  Sense strand starting at position 2531 of SEQ ID NO: 1880406
accauaacacugugugaca

SEQ ID NO: 1964851 - RNA, 19 nt, Artificial Sequence
  Description of Artificial Sequence: Synthetic oligonucleotide
  Antisense strand to SEQ ID NO: 1964850
ugucacacaguguuauggu

SEQ ID NO: 1964852 - RNA, 19 nt, Artificial Sequence
  Description of Artificial Sequence: Synthetic oligonucleotide
  Sense strand starting at position 2605 of SEQ ID NO: 1880406
guuccaucacaaggauaua

SEQ ID NO: 1964853 - RNA, 19 nt, Artificial Sequence
  Description of Artificial Sequence: Synthetic oligonucleotide
  Antisense strand to SEQ ID NO: 1964852
uauauccuugugauggaac

SEQ ID NO: 1964854 - RNA, 19 nt, Artificial Sequence
  Description of Artificial Sequence: Synthetic oligonucleotide
  Sense strand starting at position 3051 of SEQ ID NO: 1880406
caugacuaugagugaaauu

SEQ ID NO: 1964855 - RNA, 19 nt, Artificial Sequence
  Description of Artificial Sequence: Synthetic oligonucleotide
  Antisense strand to SEQ ID NO: 1964854
aauuucacucauagucaug

SEQ ID NO: 1964856 - RNA, 19 nt, Artificial Sequence
  Description of Artificial Sequence: Synthetic oligonucleotide
  Sense strand starting at position 3078 of SEQ ID NO: 1880406
uuaagauaugcacauguuu

SEQ ID NO: 1964857 - RNA, 19 nt, Artificial Sequence
  Description of Artificial Sequence: Synthetic oligonucleotide
  Antisense strand to SEQ ID NO: 1964856
aaacaugugcauaucuuaa

SEQ ID NO: 1964858 - RNA, 19 nt, Artificial Sequence
  Description of Artificial Sequence: Synthetic oligonucleotide
  Sense strand starting at position 3086 of SEQ ID NO: 1880406
ugcacauguuuaguauuua

SEQ ID NO: 1964859 - RNA, 19 nt, Artificial Sequence
  Description of Artificial Sequence: Synthetic oligonucleotide
  Antisense strand to SEQ ID NO: 1964858
uaaauacuaaacaugugca

SEQ ID NO: 1964860 - RNA, 19 nt, Artificial Sequence
  Description of Artificial Sequence: Synthetic oligonucleotide
  Sense strand starting at position 3098 of SEQ ID NO: 1880406
guauuuauucuuggccuuu

SEQ ID NO: 1964861 - RNA, 19 nt, Artificial Sequence
  Description of Artificial Sequence: Synthetic oligonucleotide
  Antisense strand to SEQ ID NO: 1964860
aaaggccaagaauaaauac

SEQ ID NO: 1964862 - RNA, 19 nt, Artificial Sequence
  Description of Artificial Sequence: Synthetic oligonucleotide
  Sense strand starting at position 3203 of SEQ ID NO: 1880406
cuaaauauuguaggaugau

SEQ ID NO: 1964863 - RNA, 19 nt, Artificial Sequence
  Description of Artificial Sequence: Synthetic oligonucleotide
  Antisense strand to SEQ ID NO: 1964862
aucauccuacaauauuuag

SEQ ID NO: 1964864 - RNA, 19 nt, Artificial Sequence
  Description of Artificial Sequence: Synthetic oligonucleotide
  Sense strand starting at position 3215 of SEQ ID NO: 1880406
ggaugauggugaguuaaug

SEQ ID NO: 1964865 - RNA, 19 nt, Artificial Sequence
  Description of Artificial Sequence: Synthetic oligonucleotide
  Antisense strand to SEQ ID NO: 1964864
cauuaacucaccaucaucc

SEQ ID NO: 1964866 - RNA, 19 nt, Artificial Sequence
  Description of Artificial Sequence: Synthetic oligonucleotide
  Sense strand starting at position 3224 of SEQ ID NO: 1880406
ugaguuaaugggcagucau

SEQ ID NO: 1964867 - RNA, 19 nt, Artificial Sequence
  Description of Artificial Sequence: Synthetic oligonucleotide
  Antisense strand to SEQ ID NO: 1964866
augacugcccauuaacuca

SEQ ID NO: 1964868 - RNA, 19 nt, Artificial Sequence
  Description of Artificial Sequence: Synthetic oligonucleotide
  Sense strand starting at position 3267 of SEQ ID NO: 1880406
auuccuucucaggaggcaa

SEQ ID NO: 1964869 - RNA, 19 nt, Artificial Sequence
  Description of Artificial Sequence: Synthetic oligonucleotide
  Antisense strand to SEQ ID NO: 1964868
uugccuccugagaaggaau

SEQ ID NO: 1964870 - RNA, 19 nt, Artificial Sequence
  Description of Artificial Sequence: Synthetic oligonucleotide
  Sense strand starting at position 3300 of SEQ ID NO: 1880406
ugaucaauagucugaccau

SEQ ID NO: 1964871 - RNA, 19 nt, Artificial Sequence
  Description of Artificial Sequence: Synthetic oligonucleotide
  Antisense strand to SEQ ID NO: 1964870
auggucagacuauugauca

SEQ ID NO: 1964872 - RNA, 19 nt, Artificial Sequence
  Description of Artificial Sequence: Synthetic oligonucleotide
  Sense strand starting at position 3457 of SEQ ID NO: 1880406
agaauuacccagugaagca

SEQ ID NO: 1964873 - RNA, 19 nt, Artificial Sequence
  Description of Artificial Sequence: Synthetic oligonucleotide
  Antisense strand to SEQ ID NO: 1964872
ugcuucacuggguaauucu

SEQ ID NO: 1964874 - RNA, 19 nt, Artificial Sequence
  Description of Artificial Sequence: Synthetic oligonucleotide
  Sense strand starting at position 3469 of SEQ ID NO: 1880406
ugaagcaaucucugagcaa

SEQ ID NO: 1964875 - RNA, 19 nt, Artificial Sequence
  Description of Artificial Sequence: Synthetic oligonucleotide
  Antisense strand to SEQ ID NO: 1964874
uugcucagagauugcuuca

SEQ ID NO: 1964876 - RNA, 19 nt, Artificial Sequence
  Description of Artificial Sequence: Synthetic oligonucleotide
  Sense strand starting at position 3503 of SEQ ID NO: 1880406
auguccuuccuugagaaau

SEQ ID NO: 1964877 - RNA, 19 nt, Artificial Sequence
  Description of Artificial Sequence: Synthetic oligonucleotide
  Antisense strand to SEQ ID NO: 1964876
auuucucaaggaaggacau

SEQ ID NO: 1964878 - RNA, 19 nt, Artificial Sequence
  Description of Artificial Sequence: Synthetic oligonucleotide
  Sense strand starting at position 3716 of SEQ ID NO: 1880406
acacaaguauuggauuuau

SEQ ID NO: 1964879 - RNA, 19 nt, Artificial Sequence
  Description of Artificial Sequence: Synthetic oligonucleotide
  Antisense strand to SEQ ID NO: 1964878
auaaauccaauacuugugu

SEQ ID NO: 1964880 - RNA, 19 nt, Artificial Sequence
  Description of Artificial Sequence: Synthetic oligonucleotide
  Sense strand starting at position 3817 of SEQ ID NO: 1880406
gucccaguccuuuaucaag

SEQ ID NO: 1964881 - RNA, 19 nt, Artificial Sequence
  Description of Artificial Sequence: Synthetic oligonucleotide
  Antisense strand to SEQ ID NO: 1964880
cuugauaaaggacugggac

SEQ ID NO: 1964882 - RNA, 19 nt, Artificial Sequence
  Description of Artificial Sequence: Synthetic oligonucleotide
  Sense strand starting at position 3893 of SEQ ID NO: 1880406
uuuggaguaccucauaauc

SEQ ID NO: 1964883 - RNA, 19 nt, Artificial Sequence
  Description of Artificial Sequence: Synthetic oligonucleotide
  Antisense strand to SEQ ID NO: 1964882
gauuaugagguacuccaaa

SEQ ID NO: 1964884 - RNA, 19 nt, Artificial Sequence
  Description of Artificial Sequence: Synthetic oligonucleotide
  Sense strand starting at position 1986 of SEQ ID NO: 1880407
cgcaguagcgcuuucugaa

SEQ ID NO: 1964885 - RNA, 19 nt, Artificial Sequence
  Description of Artificial Sequence: Synthetic oligonucleotide
  Antisense strand to SEQ ID NO: 1964884
uucagaaagcgcuacugcg

SEQ ID NO: 1964886 - RNA, 19 nt, Artificial Sequence
  Description of Artificial Sequence: Synthetic oligonucleotide
  Sense strand starting at position 1987 of SEQ ID NO: 1880407
gcaguagcgcuuucugaaa

SEQ ID NO: 1964887 - RNA, 19 nt, Artificial Sequence
  Description of Artificial Sequence: Synthetic oligonucleotide
  Antisense strand to SEQ ID NO: 1964886
uuucagaaagcgcuacugc

SEQ ID NO: 1964888 - RNA, 19 nt, Artificial Sequence
  Description of Artificial Sequence: Synthetic oligonucleotide
  Sense strand starting at position 2067 of SEQ ID NO: 1880407
ggacuuugcucccugaacu

SEQ ID NO: 1964889 - RNA, 19 nt, Artificial Sequence
  Description of Artificial Sequence: Synthetic oligonucleotide
  Antisense strand to SEQ ID NO: 1964888
aguucagggagcaaagucc

SEQ ID NO: 1964890 - RNA, 19 nt, Artificial Sequence
  Description of Artificial Sequence: Synthetic oligonucleotide
  Sense strand starting at position 2139 of SEQ ID NO: 1880407
ggagcaagcucuucgcuga

SEQ ID NO: 1964891 - RNA, 19 nt, Artificial Sequence
  Description of Artificial Sequence: Synthetic oligonucleotide
  Antisense strand to SEQ ID NO: 1964890
ucagcgaagagcuugcucc

SEQ ID NO: 1964892 - RNA, 19 nt, Artificial Sequence
  Description of Artificial Sequence: Synthetic oligonucleotide
  Sense strand starting at position 2142 of SEQ ID NO: 1880407
gcaagcucuucgcugagau

SEQ ID NO: 1964893 - RNA, 19 nt, Artificial Sequence
  Description of Artificial Sequence: Synthetic oligonucleotide
  Antisense strand to SEQ ID NO: 1964892
aucucagcgaagagcuugc

SEQ ID NO: 1964894 - RNA, 19 nt, Artificial Sequence
  Description of Artificial Sequence: Synthetic oligonucleotide
  Sense strand starting at position 2143 of SEQ ID NO: 1880407
caagcucuucgcugagauu

SEQ ID NO: 1964895 - RNA, 19 nt, Artificial Sequence
  Description of Artificial Sequence: Synthetic oligonucleotide
  Antisense strand to SEQ ID NO: 1964894
aaucucagcgaagagcuug

SEQ ID NO: 1964896 - RNA, 19 nt, Artificial Sequence
  Description of Artificial Sequence: Synthetic oligonucleotide
  Sense strand starting at position 2155 of SEQ ID NO: 1880407
ugagauuguccuuguccac

SEQ ID NO: 1964897 - RNA, 19 nt, Artificial Sequence
  Description of Artificial Sequence: Synthetic oligonucleotide
  Antisense strand to SEQ ID NO: 1964896
guggacaaggacaaucuca

SEQ ID NO: 1964898 - RNA, 19 nt, Artificial Sequence
  Description of Artificial Sequence: Synthetic oligonucleotide
  Sense strand starting at position 2184 of SEQ ID NO: 1880407
ggguuauuccgaggguccu

SEQ ID NO: 1964899 - RNA, 19 nt, Artificial Sequence
  Description of Artificial Sequence: Synthetic oligonucleotide
  Antisense strand to SEQ ID NO: 1964898
aggacccucggaauaaccc

SEQ ID NO: 1964900 - RNA, 19 nt, Artificial Sequence
  Description of Artificial Sequence: Synthetic oligonucleotide
  Sense strand starting at position 2246 of SEQ ID NO: 1880407
ccggcaauccgagacuaaa

SEQ ID NO: 1964901 - RNA, 19 nt, Artificial Sequence
  Description of Artificial Sequence: Synthetic oligonucleotide
  Antisense strand to SEQ ID NO: 1964900
uuuagucucggauugccgg

SEQ ID NO: 1964902 - RNA, 19 nt, Artificial Sequence
  Description of Artificial Sequence: Synthetic oligonucleotide
  Sense strand starting at position 2256 of SEQ ID NO: 1880407
gagacuaaaggucguuuau

SEQ ID NO: 1964903 - RNA, 19 nt, Artificial Sequence
  Description of Artificial Sequence: Synthetic oligonucleotide
  Antisense strand to SEQ ID NO: 1964902
auaaacgaccuuuagucuc

SEQ ID NO: 1964904 - RNA, 19 nt, Artificial Sequence
  Description of Artificial Sequence: Synthetic oligonucleotide
  Sense strand starting at position 2258 of SEQ ID NO: 1880407
gacuaaaggucguuuauug

SEQ ID NO: 1964905 - RNA, 19 nt, Artificial Sequence
  Description of Artificial Sequence: Synthetic oligonucleotide
  Antisense strand to SEQ ID NO: 1964904
caauaaacgaccuuuaguc

SEQ ID NO: 1964906 - RNA, 19 nt, Artificial Sequence
  Description of Artificial Sequence: Synthetic oligonucleotide
  Sense strand starting at position 2350 of SEQ ID NO: 1880407
ggugugugggugcaagaua

SEQ ID NO: 1964907 - RNA, 19 nt, Artificial Sequence
  Description of Artificial Sequence: Synthetic oligonucleotide
  Antisense strand to SEQ ID NO: 1964906
uaucuugcacccacacacc

SEQ ID NO: 1964908 - RNA, 19 nt, Artificial Sequence
  Description of Artificial Sequence: Synthetic oligonucleotide
  Sense strand starting at position 2351 of SEQ ID NO: 1880407
gugugugggugcaagauaa

SEQ ID NO: 1964909 - RNA, 19 nt, Artificial Sequence
  Description of Artificial Sequence: Synthetic oligonucleotide
  Antisense strand to SEQ ID NO: 1964908
uuaucuugcacccacacac

SEQ ID NO: 1964910 - RNA, 19 nt, Artificial Sequence
  Description of Artificial Sequence: Synthetic oligonucleotide
  Sense strand starting at position 2511 of SEQ ID NO: 1880407
cccgaaaugucugaaugga

SEQ ID NO: 1964911 - RNA, 19 nt, Artificial Sequence
  Description of Artificial Sequence: Synthetic oligonucleotide
  Antisense strand to SEQ ID NO: 1964910
uccauucagacauuucggg

SEQ ID NO: 1964912 - RNA, 19 nt, Artificial Sequence
  Description of Artificial Sequence: Synthetic oligonucleotide
  Sense strand starting at position 2535 of SEQ ID NO: 1880407
aaaggaaucugagaaggug

SEQ ID NO: 1964913 - RNA, 19 nt, Artificial Sequence
  Description of Artificial Sequence: Synthetic oligonucleotide
  Antisense strand to SEQ ID NO: 1964912
caccuucucagauuccuuu

SEQ ID NO: 1964914 - RNA, 19 nt, Artificial Sequence
  Description of Artificial Sequence: Synthetic oligonucleotide
  Sense strand starting at position 2620 of SEQ ID NO: 1880407
cuccgugcaucucuugaga

SEQ ID NO: 1964915 - RNA, 19 nt, Artificial Sequence
  Description of Artificial Sequence: Synthetic oligonucleotide
  Antisense strand to SEQ ID NO: 1964914
ucucaagagaugcacggag

SEQ ID NO: 1964916 - RNA, 19 nt, Artificial Sequence
  Description of Artificial Sequence: Synthetic oligonucleotide
  Sense strand starting at position 2625 of SEQ ID NO: 1880407
ugcaucucuugagaaggau

SEQ ID NO: 1964917 - RNA, 19 nt, Artificial Sequence
  Description of Artificial Sequence: Synthetic oligonucleotide
  Antisense strand to SEQ ID NO: 1964916
auccuucucaagagaugca

SEQ ID NO: 1964918 - RNA, 19 nt, Artificial Sequence
  Description of Artificial Sequence: Synthetic oligonucleotide
  Sense strand starting at position 2634 of SEQ ID NO: 1880407
ugagaaggaucgugaacag

SEQ ID NO: 1964919 - RNA, 19 nt, Artificial Sequence
  Description of Artificial Sequence: Synthetic oligonucleotide
  Antisense strand to SEQ ID NO: 1964918
cuguucacgauccuucuca

SEQ ID NO: 1964920 - RNA, 19 nt, Artificial Sequence
  Description of Artificial Sequence: Synthetic oligonucleotide
  Sense strand starting at position 2849 of SEQ ID NO: 1880407
gaguuccaguacugagaaa

SEQ ID NO: 1964921 - RNA, 19 nt, Artificial Sequence
  Description of Artificial Sequence: Synthetic oligonucleotide
  Antisense strand to SEQ ID NO: 1964920
uuucucaguacuggaacuc

SEQ ID NO: 1964922 - RNA, 19 nt, Artificial Sequence
  Description of Artificial Sequence: Synthetic oligonucleotide
  Sense strand starting at position 2996 of SEQ ID NO: 1880407
auguuuaggagcuguccaa

SEQ ID NO: 1964923 - RNA, 19 nt, Artificial Sequence
  Description of Artificial Sequence: Synthetic oligonucleotide
  Antisense strand to SEQ ID NO: 1964922
uuggacagcuccuaaacau

SEQ ID NO: 1964924 - RNA, 19 nt, Artificial Sequence
  Description of Artificial Sequence: Synthetic oligonucleotide
  Sense strand starting at position 3122 of SEQ ID NO: 1880407
guaaguaauugagagcaga

SEQ ID NO: 1964925 - RNA, 19 nt, Artificial Sequence
  Description of Artificial Sequence: Synthetic oligonucleotide
  Antisense strand to SEQ ID NO: 1964924
ucugcucucaauuacuuac

SEQ ID NO: 1964926 - RNA, 19 nt, Artificial Sequence
  Description of Artificial Sequence: Synthetic oligonucleotide
  Sense strand starting at position 3170 of SEQ ID NO: 1880407
ggaugcaugagugaagguu

SEQ ID NO: 1964927 - RNA, 19 nt, Artificial Sequence
  Description of Artificial Sequence: Synthetic oligonucleotide
  Antisense strand to SEQ ID NO: 1964926
aaccuucacucaugcaucc

SEQ ID NO: 1964928 - RNA, 19 nt, Artificial Sequence
  Description of Artificial Sequence: Synthetic oligonucleotide
  Sense strand starting at position 3201 of SEQ ID NO: 1880407
uggugauaugccugggaug

SEQ ID NO: 1964929 - RNA, 19 nt, Artificial Sequence
  Description of Artificial Sequence: Synthetic oligonucleotide
  Antisense strand to SEQ ID NO: 1964928
caucccaggcauaucacca

SEQ ID NO: 1964930 - RNA, 19 nt, Artificial Sequence
  Description of Artificial Sequence: Synthetic oligonucleotide
  Sense strand starting at position 3203 of SEQ ID NO: 1880407
gugauaugccugggaugca

SEQ ID NO: 1964931 - RNA, 19 nt, Artificial Sequence
  Description of Artificial Sequence: Synthetic oligonucleotide
  Antisense strand to SEQ ID NO: 1964930
ugcaucccaggcauaucac

SEQ ID NO: 1964932 - RNA, 19 nt, Artificial Sequence
  Description of Artificial Sequence: Synthetic oligonucleotide
  Sense strand starting at position 3255 of SEQ ID NO: 1880407
uuuauugcacauuaaguga

SEQ ID NO: 1964933 - RNA, 19 nt, Artificial Sequence
  Description of Artificial Sequence: Synthetic oligonucleotide
  Antisense strand to SEQ ID NO: 1964932
ucacuuaaugugcaauaaa

SEQ ID NO: 1964934 - RNA, 19 nt, Artificial Sequence
  Description of Artificial Sequence: Synthetic oligonucleotide
  Sense strand starting at position 3400 of SEQ ID NO: 1880407
ggcucugcucuuugaucca

SEQ ID NO: 1964935 - RNA, 19 nt, Artificial Sequence
  Description of Artificial Sequence: Synthetic oligonucleotide
  Antisense strand to SEQ ID NO: 1964934
uggaucaaagagcagagcc

SEQ ID NO: 1964936 - RNA, 19 nt, Artificial Sequence
  Description of Artificial Sequence: Synthetic oligonucleotide
  Sense strand starting at position 3439 of SEQ ID NO: 1880407
aaguguguugcucagcuuu

SEQ ID NO: 1964937 - RNA, 19 nt, Artificial Sequence
  Description of Artificial Sequence: Synthetic oligonucleotide
  Antisense strand to SEQ ID NO: 1964936
aaagcugagcaacacacuu

SEQ ID NO: 1964938 - RNA, 19 nt, Artificial Sequence
  Description of Artificial Sequence: Synthetic oligonucleotide
  Sense strand starting at position 3462 of SEQ ID NO: 1880407
gagggcauuaugugaaugu

SEQ ID NO: 1964939 - RNA, 19 nt, Artificial Sequence
  Description of Artificial Sequence: Synthetic oligonucleotide
  Antisense strand to SEQ ID NO: 1964938
acauucacauaaugcccuc

SEQ ID NO: 1964940 - RNA, 19 nt, Artificial Sequence
  Description of Artificial Sequence: Synthetic oligonucleotide
  Sense strand starting at position 3506 of SEQ ID NO: 1880407
gagugagcccuuuaccaag

SEQ ID NO: 1964941 - RNA, 19 nt, Artificial Sequence
  Description of Artificial Sequence: Synthetic oligonucleotide
  Antisense strand to SEQ ID NO: 1964940
cuugguaaagggcucacuc

SEQ ID NO: 1964942 - RNA, 19 nt, Artificial Sequence
  Description of Artificial Sequence: Synthetic oligonucleotide
  Sense strand starting at position 3544 of SEQ ID NO: 1880407
uucccaucuuugucaagga

SEQ ID NO: 1964943 - RNA, 19 nt, Artificial Sequence
  Description of Artificial Sequence: Synthetic oligonucleotide
  Antisense strand to SEQ ID NO: 1964942
uccuugacaaagaugggaa

SEQ ID NO: 1964944 - RNA, 19 nt, Artificial Sequence
  Description of Artificial Sequence: Synthetic oligonucleotide
  Sense strand starting at position 3548 of SEQ ID NO: 1880407
caucuuugucaaggagucu

SEQ ID NO: 1964945 - RNA, 19 nt, Artificial Sequence
  Description of Artificial Sequence: Synthetic oligonucleotide
  Antisense strand to SEQ ID NO: 1964944
agacuccuugacaaagaug

SEQ ID NO: 1964946 - RNA, 19 nt, Artificial Sequence
  Description of Artificial Sequence: Synthetic oligonucleotide
  Sense strand starting at position 3686 of SEQ ID NO: 1880407
caaggaaagugacauaaug

SEQ ID NO: 1964947 - RNA, 19 nt, Artificial Sequence
  Description of Artificial Sequence: Synthetic oligonucleotide
  Antisense strand to SEQ ID NO: 1964946
cauuaugucacuuuccuug

SEQ ID NO: 1964948 - RNA, 19 nt, Artificial Sequence
  Description of Artificial Sequence: Synthetic oligonucleotide
  Sense strand starting at position 3761 of SEQ ID NO: 1880407
gcacaucaguuucugacuu

SEQ ID NO: 1964949 - RNA, 19 nt, Artificial Sequence
  Description of Artificial Sequence: Synthetic oligonucleotide
  Antisense strand to SEQ ID NO: 1964948
aagucagaaacugaugugc

SEQ ID NO: 1964950 - RNA, 19 nt, Artificial Sequence
  Description of Artificial Sequence: Synthetic oligonucleotide
  Sense strand starting at position 3825 of SEQ ID NO: 1880407
ccugcucuaaggugugaau

SEQ ID NO: 1964951 - RNA, 19 nt, Artificial Sequence
  Description of Artificial Sequence: Synthetic oligonucleotide
  Antisense strand to SEQ ID NO: 1964950
auucacaccuuagagcagg

SEQ ID NO: 1964952 - RNA, 19 nt, Artificial Sequence
  Description of Artificial Sequence: Synthetic oligonucleotide
  Sense strand starting at position 3834 of SEQ ID NO: 1880407
aggugugaauccuccagcu

SEQ ID NO: 1964953 - RNA, 19 nt, Artificial Sequence
  Description of Artificial Sequence: Synthetic oligonucleotide
  Antisense strand to SEQ ID NO: 1964952
agcuggaggauucacaccu

SEQ ID NO: 1964954 - RNA, 19 nt, Artificial Sequence
  Description of Artificial Sequence: Synthetic oligonucleotide
  Sense strand starting at position 3836 of SEQ ID NO: 1880407
gugugaauccuccagcugu

SEQ ID NO: 1964955 - RNA, 19 nt, Artificial Sequence
  Description of Artificial Sequence: Synthetic oligonucleotide
  Antisense strand to SEQ ID NO: 1964954
acagcuggaggauucacac

SEQ ID NO: 1964956 - RNA, 19 nt, Artificial Sequence
  Description of Artificial Sequence: Synthetic oligonucleotide
  Sense strand starting at position 3859 of SEQ ID NO: 1880407
gguggaauguaggaacaaa

SEQ ID NO: 1964957 - RNA, 19 nt, Artificial Sequence
  Description of Artificial Sequence: Synthetic oligonucleotide
  Antisense strand to SEQ ID NO: 1964956
uuuguuccuacauuccacc

SEQ ID NO: 1964958 - RNA, 19 nt, Artificial Sequence
  Description of Artificial Sequence: Synthetic oligonucleotide
  Sense strand starting at position 3928 of SEQ ID NO: 1880407
gccuucuuccuacaaagga

SEQ ID NO: 1964959 - RNA, 19 nt, Artificial Sequence
  Description of Artificial Sequence: Synthetic oligonucleotide
  Antisense strand to SEQ ID NO: 1964958
uccuuuguaggaagaaggc

SEQ ID NO: 1964960 - RNA, 19 nt, Artificial Sequence
  Description of Artificial Sequence: Synthetic oligonucleotide
  Sense strand starting at position 3955 of SEQ ID NO: 1880407
ggugcuuacccagguauga

SEQ ID NO: 1964961 - RNA, 19 nt, Artificial Sequence
  Description of Artificial Sequence: Synthetic oligonucleotide
  Antisense strand to SEQ ID NO: 1964960
ucauaccuggguaagcacc

SEQ ID NO: 1964962 - RNA, 19 nt, Artificial Sequence
  Description of Artificial Sequence: Synthetic oligonucleotide
  Sense strand starting at position 3982 of SEQ ID NO: 1880407
ccagaauaaguguggcaga

SEQ ID NO: 1964963 - RNA, 19 nt, Artificial Sequence
  Description of Artificial Sequence: Synthetic oligonucleotide
  Antisense strand to SEQ ID NO: 1964962
ucugccacacuuauucugg

SEQ ID NO: 1964964 - RNA, 19 nt, Artificial Sequence
  Description of Artificial Sequence: Synthetic oligonucleotide
  Sense strand starting at position 2300 of SEQ ID NO: 1880408
aacuaagagcuacguuuga

SEQ ID NO: 1964965 - RNA, 19 nt, Artificial Sequence
  Description of Artificial Sequence: Synthetic oligonucleotide
  Antisense strand to SEQ ID NO: 1964964
ucaaacguagcucuuaguu

SEQ ID NO: 1964966 - RNA, 19 nt, Artificial Sequence
  Description of Artificial Sequence: Synthetic oligonucleotide
  Sense strand starting at position 2696 of SEQ ID NO: 1880408
ucaccauuugcccgcaaga

SEQ ID NO: 1964967 - RNA, 19 nt, Artificial Sequence
  Description of Artificial Sequence: Synthetic oligonucleotide
  Antisense strand to SEQ ID NO: 1964966
ucuugcgggcaaaugguga

SEQ ID NO: 1964968 - RNA, 19 nt, Artificial Sequence
  Description of Artificial Sequence: Synthetic oligonucleotide
  Sense strand starting at position 3150 of SEQ ID NO: 1880408
gguuuacagcaaugaugac

SEQ ID NO: 1964969 - RNA, 19 nt, Artificial Sequence
  Description of Artificial Sequence: Synthetic oligonucleotide
  Antisense strand to SEQ ID NO: 1964968
gucaucauugcuguaaacc

SEQ ID NO: 1964970 - RNA, 19 nt, Artificial Sequence
  Description of Artificial Sequence: Synthetic oligonucleotide
  Sense strand starting at position 3740 of SEQ ID NO: 1880408
aaagccuauggcugaugaa

SEQ ID NO: 1964971 - RNA, 19 nt, Artificial Sequence
  Description of Artificial Sequence: Synthetic oligonucleotide
  Antisense strand to SEQ ID NO: 1964970
uucaucagccauaggcuuu

SEQ ID NO: 1964972 - RNA, 19 nt, Artificial Sequence
  Description of Artificial Sequence: Synthetic oligonucleotide
  Sense strand starting at position 3741 of SEQ ID NO: 1880408
aagccuauggcugaugaaa

SEQ ID NO: 1964973 - RNA, 19 nt, Artificial Sequence
  Description of Artificial Sequence: Synthetic oligonucleotide
  Antisense strand to SEQ ID NO: 1964972
uuucaucagccauaggcuu

SEQ ID NO: 1964974 - RNA, 19 nt, Artificial Sequence
  Description of Artificial Sequence: Synthetic oligonucleotide
  Sense strand starting at position 3743 of SEQ ID NO: 1880408
gccuauggcugaugaaaca

SEQ ID NO: 1964975 - RNA, 19 nt, Artificial Sequence
  Description of Artificial Sequence: Synthetic oligonucleotide
  Antisense strand to SEQ ID NO: 1964974
uguuucaucagccauaggc

SEQ ID NO: 1964976 - RNA, 19 nt, Artificial Sequence
  Description of Artificial Sequence: Synthetic oligonucleotide
  Sense strand starting at position 428 of SEQ ID NO: 1880409
gggaguaucuaucuaucua

SEQ ID NO: 1964977 - RNA, 19 nt, Artificial Sequence
  Description of Artificial Sequence: Synthetic oligonucleotide
  Antisense strand to SEQ ID NO: 1964976
uagauagauagauacuccc

SEQ ID NO: 1964978 - RNA, 19 nt, Artificial Sequence
  Description of Artificial Sequence: Synthetic oligonucleotide
  Sense strand starting at position 715 of SEQ ID NO: 1880409
gugaguugugaagauaagu

SEQ ID NO: 1964979 - RNA, 19 nt, Artificial Sequence
  Description of Artificial Sequence: Synthetic oligonucleotide
  Antisense strand to SEQ ID NO: 1964978
acuuaucuucacaacucac

SEQ ID NO: 1964980 - RNA, 19 nt, Artificial Sequence
  Description of Artificial Sequence: Synthetic oligonucleotide
  Sense strand starting at position 720 of SEQ ID NO: 1880409
uugugaagauaagugacau

SEQ ID NO: 1964981 - RNA, 19 nt, Artificial Sequence
  Description of Artificial Sequence: Synthetic oligonucleotide
  Antisense strand to SEQ ID NO: 1964980
augucacuuaucuucacaa

SEQ ID NO: 1964982 - RNA, 19 nt, Artificial Sequence
  Description of Artificial Sequence: Synthetic oligonucleotide
  Sense strand starting at position 721 of SEQ ID NO: 1880409
ugugaagauaagugacauc

SEQ ID NO: 1964983 - RNA, 19 nt, Artificial Sequence
  Description of Artificial Sequence: Synthetic oligonucleotide
  Antisense strand to SEQ ID NO: 1964982
gaugucacuuaucuucaca

SEQ ID NO: 1964984 - RNA, 19 nt, Artificial Sequence
  Description of Artificial Sequence: Synthetic oligonucleotide
  Sense strand starting at position 770 of SEQ ID NO: 1880409
agaaccgggucaguuaaau

SEQ ID NO: 1964985 - RNA, 19 nt, Artificial Sequence
  Description of Artificial Sequence: Synthetic oligonucleotide
  Antisense strand to SEQ ID NO: 1964984
auuuaacugacccgguucu

SEQ ID NO: 1964986 - RNA, 19 nt, Artificial Sequence
  Description of Artificial Sequence: Synthetic oligonucleotide
  Sense strand starting at position 815 of SEQ ID NO: 1880409
ugggauacgcaguaauucu

SEQ ID NO: 1964987 - RNA, 19 nt, Artificial Sequence
  Description of Artificial Sequence: Synthetic oligonucleotide
  Antisense strand to SEQ ID NO: 1964986
agaauuacugcguauccca

SEQ ID NO: 1964988 - RNA, 19 nt, Artificial Sequence
  Description of Artificial Sequence: Synthetic oligonucleotide
  Sense strand starting at position 835 of SEQ ID NO: 1880409
agcucacaacuuugaauga

SEQ ID NO: 1964989 - RNA, 19 nt, Artificial Sequence
  Description of Artificial Sequence: Synthetic oligonucleotide
  Antisense strand to SEQ ID NO: 1964988
ucauucaaaguugugagcu

SEQ ID NO: 1964990 - RNA, 19 nt, Artificial Sequence
  Description of Artificial Sequence: Synthetic oligonucleotide
  Sense strand starting at position 952 of SEQ ID NO: 1880409
uagaguuaacaguauguuc

SEQ ID NO: 1964991 - RNA, 19 nt, Artificial Sequence
  Description of Artificial Sequence: Synthetic oligonucleotide
  Antisense strand to SEQ ID NO: 1964990
gaacauacuguuaacucua

SEQ ID NO: 1964992 - RNA, 19 nt, Artificial Sequence
  Description of Artificial Sequence: Synthetic oligonucleotide
  Sense strand starting at position 967 of SEQ ID NO: 1880409
guucuauauguguauugag

SEQ ID NO: 1964993 - RNA, 19 nt, Artificial Sequence
  Description of Artificial Sequence: Synthetic oligonucleotide
  Antisense strand to SEQ ID NO: 1964992
cucaauacacauauagaac

SEQ ID NO: 1964994 - RNA, 19 nt, Artificial Sequence
  Description of Artificial Sequence: Synthetic oligonucleotide
  Sense strand starting at position 1085 of SEQ ID NO: 1880409
uuaccaacagucuguaauu

SEQ ID NO: 1964995 - RNA, 19 nt, Artificial Sequence
  Description of Artificial Sequence: Synthetic oligonucleotide
  Antisense strand to SEQ ID NO: 1964994
aauuacagacuguugguaa

SEQ ID NO: 1964996 - RNA, 19 nt, Artificial Sequence
  Description of Artificial Sequence: Synthetic oligonucleotide
  Sense strand starting at position 1167 of SEQ ID NO: 1880409
uuucuaacguaauuacuga

SEQ ID NO: 1964997 - RNA, 19 nt, Artificial Sequence
  Description of Artificial Sequence: Synthetic oligonucleotide
  Antisense strand to SEQ ID NO: 1964996
ucaguaauuacguuagaaa

SEQ ID NO: 1964998 - RNA, 19 nt, Artificial Sequence
  Description of Artificial Sequence: Synthetic oligonucleotide
  Sense strand starting at position 1237 of SEQ ID NO: 1880409
guuaccaagugaucaggaa

SEQ ID NO: 1964999 - RNA, 19 nt, Artificial Sequence
  Description of Artificial Sequence: Synthetic oligonucleotide
  Antisense strand to SEQ ID NO: 1964998
uuccugaucacuugguaac

SEQ ID NO: 1965000 - RNA, 19 nt, Artificial Sequence
  Description of Artificial Sequence: Synthetic oligonucleotide
  Sense strand starting at position 1326 of SEQ ID NO: 1880409
augucuuaccgacaaggca

SEQ ID NO: 1965001 - RNA, 19 nt, Artificial Sequence
  Description of Artificial Sequence: Synthetic oligonucleotide
  Antisense strand to SEQ ID NO: 1965000
ugccuugucgguaagacau

SEQ ID NO: 1965002 - RNA, 19 nt, Artificial Sequence
  Description of Artificial Sequence: Synthetic oligonucleotide
  Sense strand starting at position 1573 of SEQ ID NO: 1880409
cugcgcugcaguuuggaaa

SEQ ID NO: 1965003 - RNA, 19 nt, Artificial Sequence
  Description of Artificial Sequence: Synthetic oligonucleotide
  Antisense strand to SEQ ID NO: 1965002
uuuccaaacugcagcgcag

SEQ ID NO: 1965004 - RNA, 19 nt, Artificial Sequence
  Description of Artificial Sequence: Synthetic oligonucleotide
  Sense strand starting at position 1648 of SEQ ID NO: 1880409
gggauuucuucguucucug

SEQ ID NO: 1965005 - RNA, 19 nt, Artificial Sequence
  Description of Artificial Sequence: Synthetic oligonucleotide
  Antisense strand to SEQ ID NO: 1965004
cagagaacgaagaaauccc

SEQ ID NO: 1965006 - RNA, 19 nt, Artificial Sequence
  Description of Artificial Sequence: Synthetic oligonucleotide
  Sense strand starting at position 1658 of SEQ ID NO: 1880409
cguucucugggauaaugca

SEQ ID NO: 1965007 - RNA, 19 nt, Artificial Sequence
  Description of Artificial Sequence: Synthetic oligonucleotide
  Antisense strand to SEQ ID NO: 1965006
ugcauuaucccagagaacg

SEQ ID NO: 1965008 - RNA, 19 nt, Artificial Sequence
  Description of Artificial Sequence: Synthetic oligonucleotide
  Sense strand starting at position 1888 of SEQ ID NO: 1880409
uuacauggcagucaggauu

SEQ ID NO: 1965009 - RNA, 19 nt, Artificial Sequence
  Description of Artificial Sequence: Synthetic oligonucleotide
  Antisense strand to SEQ ID NO: 1965008
aauccugacugccauguaa

SEQ ID NO: 1965010 - RNA, 19 nt, Artificial Sequence
  Description of Artificial Sequence: Synthetic oligonucleotide
  Sense strand starting at position 1952 of SEQ ID NO: 1880409
ugacacagucuuugucaga

SEQ ID NO: 1965011 - RNA, 19 nt, Artificial Sequence
  Description of Artificial Sequence: Synthetic oligonucleotide
  Antisense strand to SEQ ID NO: 1965010
ucugacaaagacuguguca

SEQ ID NO: 1965012 - RNA, 19 nt, Artificial Sequence
  Description of Artificial Sequence: Synthetic oligonucleotide
  Sense strand starting at position 1953 of SEQ ID NO: 1880409
gacacagucuuugucagag

SEQ ID NO: 1965013 - RNA, 19 nt, Artificial Sequence
  Description of Artificial Sequence: Synthetic oligonucleotide
  Antisense strand to SEQ ID NO: 1965012
cucugacaaagacuguguc

SEQ ID NO: 1965014 - RNA, 19 nt, Artificial Sequence
  Description of Artificial Sequence: Synthetic oligonucleotide
  Sense strand starting at position 2025 of SEQ ID NO: 1880409
cuuguaagccuccaagaga

SEQ ID NO: 1965015 - RNA, 19 nt, Artificial Sequence
  Description of Artificial Sequence: Synthetic oligonucleotide
  Antisense strand to SEQ ID NO: 1965014
ucucuuggaggcuuacaag

SEQ ID NO: 1965016 - RNA, 19 nt, Artificial Sequence
  Description of Artificial Sequence: Synthetic oligonucleotide
  Sense strand starting at position 2187 of SEQ ID NO: 1880409
gcacacucugaggagcauu

SEQ ID NO: 1965017 - RNA, 19 nt, Artificial Sequence
  Description of Artificial Sequence: Synthetic oligonucleotide
  Antisense strand to SEQ ID NO: 1965016
aaugcuccucagagugugc

SEQ ID NO: 1965018 - RNA, 19 nt, Artificial Sequence
  Description of Artificial Sequence: Synthetic oligonucleotide
  Sense strand starting at position 2299 of SEQ ID NO: 1880409
aacuaagagcuacguuuga

SEQ ID NO: 1965019 - RNA, 19 nt, Artificial Sequence
  Description of Artificial Sequence: Synthetic oligonucleotide
  Antisense strand to SEQ ID NO: 1965018
ucaaacguagcucuuaguu

SEQ ID NO: 1965020 - RNA, 19 nt, Artificial Sequence
  Description of Artificial Sequence: Synthetic oligonucleotide
  Sense strand starting at position 2335 of SEQ ID NO: 1880409
acugguacauagucacaaa

SEQ ID NO: 1965021 - RNA, 19 nt, Artificial Sequence
  Description of Artificial Sequence: Synthetic oligonucleotide
  Antisense strand to SEQ ID NO: 1965020
uuugugacuauguaccagu

SEQ ID NO: 1965022 - RNA, 19 nt, Artificial Sequence
  Description of Artificial Sequence: Synthetic oligonucleotide
  Sense strand starting at position 2553 of SEQ ID NO: 1880409
cugugauugaguuagcaau

SEQ ID NO: 1965023 - RNA, 19 nt, Artificial Sequence
  Description of Artificial Sequence: Synthetic oligonucleotide
  Antisense strand to SEQ ID NO: 1965022
auugcuaacucaaucacag

SEQ ID NO: 1965024 - RNA, 19 nt, Artificial Sequence
  Description of Artificial Sequence: Synthetic oligonucleotide
  Sense strand starting at position 2695 of SEQ ID NO: 1880409
ucaccauuugcccgcaaga

SEQ ID NO: 1965025 - RNA, 19 nt, Artificial Sequence
  Description of Artificial Sequence: Synthetic oligonucleotide
  Antisense strand to SEQ ID NO: 1965024
ucuugcgggcaaaugguga

SEQ ID NO: 1965026 - RNA, 19 nt, Artificial Sequence
  Description of Artificial Sequence: Synthetic oligonucleotide
  Sense strand starting at position 2908 of SEQ ID NO: 1880409
cuacuucuggccuggaaac

SEQ ID NO: 1965027 - RNA, 19 nt, Artificial Sequence
  Description of Artificial Sequence: Synthetic oligonucleotide
  Antisense strand to SEQ ID NO: 1965026
guuuccaggccagaaguag

SEQ ID NO: 1965028 - RNA, 19 nt, Artificial Sequence
  Description of Artificial Sequence: Synthetic oligonucleotide
  Sense strand starting at position 3112 of SEQ ID NO: 1880409
guucuaaauugaguaagac

SEQ ID NO: 1965029 - RNA, 19 nt, Artificial Sequence
  Description of Artificial Sequence: Synthetic oligonucleotide
  Antisense strand to SEQ ID NO: 1965028
gucuuacucaauuuagaac

SEQ ID NO: 1965030 - RNA, 19 nt, Artificial Sequence
  Description of Artificial Sequence: Synthetic oligonucleotide
  Sense strand starting at position 3122 of SEQ ID NO: 1880409
gaguaagacuugucucaua

SEQ ID NO: 1965031 - RNA, 19 nt, Artificial Sequence
  Description of Artificial Sequence: Synthetic oligonucleotide
  Antisense strand to SEQ ID NO: 1965030
uaugagacaagucuuacuc

SEQ ID NO: 1965032 - RNA, 19 nt, Artificial Sequence
  Description of Artificial Sequence: Synthetic oligonucleotide
  Sense strand starting at position 3146 of SEQ ID NO: 1880409
uuugguuuacagcaaugau

SEQ ID NO: 1965033 - RNA, 19 nt, Artificial Sequence
  Description of Artificial Sequence: Synthetic oligonucleotide
  Antisense strand to SEQ ID NO: 1965032
aucauugcuguaaaccaaa

SEQ ID NO: 1965034 - RNA, 19 nt, Artificial Sequence
  Description of Artificial Sequence: Synthetic oligonucleotide
  Sense strand starting at position 3149 of SEQ ID NO: 1880409
gguuuacagcaaugaugac

SEQ ID NO: 1965035 - RNA, 19 nt, Artificial Sequence
  Description of Artificial Sequence: Synthetic oligonucleotide
  Antisense strand to SEQ ID NO: 1965034
gucaucauugcuguaaacc

SEQ ID NO: 1965036 - RNA, 19 nt, Artificial Sequence
  Description of Artificial Sequence: Synthetic oligonucleotide
  Sense strand starting at position 3437 of SEQ ID NO: 1880409
auagguguuaguuacaaau

SEQ ID NO: 1965037 - RNA, 19 nt, Artificial Sequence
  Description of Artificial Sequence: Synthetic oligonucleotide
  Antisense strand to SEQ ID NO: 1965036
auuuguaacuaacaccuau

SEQ ID NO: 1965038 - RNA, 19 nt, Artificial Sequence
  Description of Artificial Sequence: Synthetic oligonucleotide
  Sense strand starting at position 3546 of SEQ ID NO: 1880409
guuguuaaucccuauguga

SEQ ID NO: 1965039 - RNA, 19 nt, Artificial Sequence
  Description of Artificial Sequence: Synthetic oligonucleotide
  Antisense strand to SEQ ID NO: 1965038
ucacauagggauuaacaac

SEQ ID NO: 1965040 - RNA, 19 nt, Artificial Sequence
  Description of Artificial Sequence: Synthetic oligonucleotide
  Sense strand starting at position 3548 of SEQ ID NO: 1880409
uguuaaucccuaugugaga

SEQ ID NO: 1965041 - RNA, 19 nt, Artificial Sequence
  Description of Artificial Sequence: Synthetic oligonucleotide
  Antisense strand to SEQ ID NO: 1965040
ucucacauagggauuaaca

SEQ ID NO: 1965042 - RNA, 19 nt, Artificial Sequence
  Description of Artificial Sequence: Synthetic oligonucleotide
  Sense strand starting at position 3549 of SEQ ID NO: 1880409
guuaaucccuaugugagaa

SEQ ID NO: 1965043 - RNA, 19 nt, Artificial Sequence
  Description of Artificial Sequence: Synthetic oligonucleotide
  Antisense strand to SEQ ID NO: 1965042
uucucacauagggauuaac

SEQ ID NO: 1965044 - RNA, 19 nt, Artificial Sequence
  Description of Artificial Sequence: Synthetic oligonucleotide
  Sense strand starting at position 3576 of SEQ ID NO: 1880409
acauaauuacugggaagca

SEQ ID NO: 1965045 - RNA, 19 nt, Artificial Sequence
  Description of Artificial Sequence: Synthetic oligonucleotide
  Antisense strand to SEQ ID NO: 1965044
ugcuucccaguaauuaugu

SEQ ID NO: 1965046 - RNA, 19 nt, Artificial Sequence
  Description of Artificial Sequence: Synthetic oligonucleotide
  Sense strand starting at position 3592 of SEQ ID NO: 1880409
gcacaaugguuagccagaa

SEQ ID NO: 1965047 - RNA, 19 nt, Artificial Sequence
  Description of Artificial Sequence: Synthetic oligonucleotide
  Antisense strand to SEQ ID NO: 1965046
uucuggcuaaccauugugc

SEQ ID NO: 1965048 - RNA, 19 nt, Artificial Sequence
  Description of Artificial Sequence: Synthetic oligonucleotide
  Sense strand starting at position 3593 of SEQ ID NO: 1880409
cacaaugguuagccagaaa

SEQ ID NO: 1965049 - RNA, 19 nt, Artificial Sequence
  Description of Artificial Sequence: Synthetic oligonucleotide
  Antisense strand to SEQ ID NO: 1965048
uuucuggcuaaccauugug

SEQ ID NO: 1965050 - RNA, 19 nt, Artificial Sequence
  Description of Artificial Sequence: Synthetic oligonucleotide
  Sense strand starting at position 3649 of SEQ ID NO: 1880409
gggaccaagucuuucuacu

SEQ ID NO: 1965051 - RNA, 19 nt, Artificial Sequence
  Description of Artificial Sequence: Synthetic oligonucleotide
  Antisense strand to SEQ ID NO: 1965050
aguagaaagacuugguccc

SEQ ID NO: 1965052 - RNA, 19 nt, Artificial Sequence
  Description of Artificial Sequence: Synthetic oligonucleotide
  Sense strand starting at position 3739 of SEQ ID NO: 1880409
aaagccuauggcugaugaa

SEQ ID NO: 1965053 - RNA, 19 nt, Artificial Sequence
  Description of Artificial Sequence: Synthetic oligonucleotide
  Antisense strand to SEQ ID NO: 1965052
uucaucagccauaggcuuu

SEQ ID NO: 1965054 - RNA, 19 nt, Artificial Sequence
  Description of Artificial Sequence: Synthetic oligonucleotide
  Sense strand starting at position 3740 of SEQ ID NO: 1880409
aagccuauggcugaugaaa

SEQ ID NO: 1965055 - RNA, 19 nt, Artificial Sequence
  Description of Artificial Sequence: Synthetic oligonucleotide
  Antisense strand to SEQ ID NO: 1965054
uuucaucagccauaggcuu

SEQ ID NO: 1965056 - RNA, 19 nt, Artificial Sequence
  Description of Artificial Sequence: Synthetic oligonucleotide
  Sense strand starting at position 2300 of SEQ ID NO: 1880410
aacuaagagcuacguuuga

SEQ ID NO: 1965057 - RNA, 19 nt, Artificial Sequence
  Description of Artificial Sequence: Synthetic oligonucleotide
  Antisense strand to SEQ ID NO: 1965056
ucaaacguagcucuuaguu

SEQ ID NO: 1965058 - RNA, 19 nt, Artificial Sequence
  Description of Artificial Sequence: Synthetic oligonucleotide
  Sense strand starting at position 2696 of SEQ ID NO: 1880410
ucaccauuugcccgcaaga

SEQ ID NO: 1965059 - RNA, 19 nt, Artificial Sequence
  Description of Artificial Sequence: Synthetic oligonucleotide
  Antisense strand to SEQ ID NO: 1965058
ucuugcgggcaaaugguga

SEQ ID NO: 1965060 - RNA, 19 nt, Artificial Sequence
  Description of Artificial Sequence: Synthetic oligonucleotide
  Sense strand starting at position 3150 of SEQ ID NO: 1880410
gguuuacagcaaugaugac

SEQ ID NO: 1965061 - RNA, 19 nt, Artificial Sequence
  Description of Artificial Sequence: Synthetic oligonucleotide
  Antisense strand to SEQ ID NO: 1965060
gucaucauugcuguaaacc

SEQ ID NO: 1965062 - RNA, 19 nt, Artificial Sequence
  Description of Artificial Sequence: Synthetic oligonucleotide
  Sense strand starting at position 3740 of SEQ ID NO: 1880410
aaagccuauggcugaugaa

SEQ ID NO: 1965063 - RNA, 19 nt, Artificial Sequence
  Description of Artificial Sequence: Synthetic oligonucleotide
  Antisense strand to SEQ ID NO: 1965062
uucaucagccauaggcuuu

SEQ ID NO: 1965064 - RNA, 19 nt, Artificial Sequence
  Description of Artificial Sequence: Synthetic oligonucleotide
  Sense strand starting at position 3741 of SEQ ID NO: 1880410
aagccuauggcugaugaaa

SEQ ID NO: 1965065 - RNA, 19 nt, Artificial Sequence
  Description of Artificial Sequence: Synthetic oligonucleotide
  Antisense strand to SEQ ID NO: 1965064
uuucaucagccauaggcuu

SEQ ID NO: 1965066 - RNA, 19 nt, Artificial Sequence
  Description of Artificial Sequence: Synthetic oligonucleotide
  Sense strand starting at position 3743 of SEQ ID NO: 1880410
gccuauggcugaugaaaca

SEQ ID NO: 1965067 - RNA, 19 nt, Artificial Sequence
  Description of Artificial Sequence: Synthetic oligonucleotide
  Antisense strand to SEQ ID NO: 1965066
uguuucaucagccauaggc

SEQ ID NO: 1965068 - RNA, 19 nt, Artificial Sequence
  Description of Artificial Sequence: Synthetic oligonucleotide
  Sense strand starting at position 428 of SEQ ID NO: 1880411
gggaguaucuaucuaucua

SEQ ID NO: 1965069 - RNA, 19 nt, Artificial Sequence
  Description of Artificial Sequence: Synthetic oligonucleotide
  Antisense strand to SEQ ID NO: 1965068
uagauagauagauacuccc

SEQ ID NO: 1965070 - RNA, 19 nt, Artificial Sequence
  Description of Artificial Sequence: Synthetic oligonucleotide
  Sense strand starting at position 715 of SEQ ID NO: 1880411
gugaguugugaagauaagu

SEQ ID NO: 1965071 - RNA, 19 nt, Artificial Sequence
  Description of Artificial Sequence: Synthetic oligonucleotide
  Antisense strand to SEQ ID NO: 1965070
acuuaucuucacaacucac

SEQ ID NO: 1965072 - RNA, 19 nt, Artificial Sequence
  Description of Artificial Sequence: Synthetic oligonucleotide
  Sense strand starting at position 720 of SEQ ID NO: 1880411
uugugaagauaagugacau

SEQ ID NO: 1965073 - RNA, 19 nt, Artificial Sequence
  Description of Artificial Sequence: Synthetic oligonucleotide
  Antisense strand to SEQ ID NO: 1965072
augucacuuaucuucacaa

SEQ ID NO: 1965074 - RNA, 19 nt, Artificial Sequence
  Description of Artificial Sequence: Synthetic oligonucleotide
  Sense strand starting at position 721 of SEQ ID NO: 1880411
ugugaagauaagugacauc

SEQ ID NO: 1965075 - RNA, 19 nt, Artificial Sequence
  Description of Artificial Sequence: Synthetic oligonucleotide
  Antisense strand to SEQ ID NO: 1965074
gaugucacuuaucuucaca

SEQ ID NO: 1965076 - RNA, 19 nt, Artificial Sequence
  Description of Artificial Sequence: Synthetic oligonucleotide
  Sense strand starting at position 770 of SEQ ID NO: 1880411
agaaccgggucaguuaaau

SEQ ID NO: 1965077 - RNA, 19 nt, Artificial Sequence
  Description of Artificial Sequence: Synthetic oligonucleotide
  Antisense strand to SEQ ID NO: 1965076
auuuaacugacccgguucu

SEQ ID NO: 1965078 - RNA, 19 nt, Artificial Sequence
  Description of Artificial Sequence: Synthetic oligonucleotide
  Sense strand starting at position 815 of SEQ ID NO: 1880411
ugggauacgcaguaauucu

SEQ ID NO: 1965079 - RNA, 19 nt, Artificial Sequence
  Description of Artificial Sequence: Synthetic oligonucleotide
  Antisense strand to SEQ ID NO: 1965078
agaauuacugcguauccca

SEQ ID NO: 1965080 - RNA, 19 nt, Artificial Sequence
  Description of Artificial Sequence: Synthetic oligonucleotide
  Sense strand starting at position 835 of SEQ ID NO: 1880411
agcucacaacuuugaauga

SEQ ID NO: 1965081 - RNA, 19 nt, Artificial Sequence
  Description of Artificial Sequence: Synthetic oligonucleotide
  Antisense strand to SEQ ID NO: 1965080
ucauucaaaguugugagcu

SEQ ID NO: 1965082 - RNA, 19 nt, Artificial Sequence
  Description of Artificial Sequence: Synthetic oligonucleotide
  Sense strand starting at position 952 of SEQ ID NO: 1880411
uagaguuaacaguauguuc

SEQ ID NO: 1965083 - RNA, 19 nt, Artificial Sequence
  Description of Artificial Sequence: Synthetic oligonucleotide
  Antisense strand to SEQ ID NO: 1965082
gaacauacuguuaacucua

SEQ ID NO: 1965084 - RNA, 19 nt, Artificial Sequence
  Description of Artificial Sequence: Synthetic oligonucleotide
  Sense strand starting at position 967 of SEQ ID NO: 1880411
guucuauauguguauugag

SEQ ID NO: 1965085 - RNA, 19 nt, Artificial Sequence
  Description of Artificial Sequence: Synthetic oligonucleotide
  Antisense strand to SEQ ID NO: 1965084
cucaauacacauauagaac

SEQ ID NO: 1965086 - RNA, 19 nt, Artificial Sequence
  Description of Artificial Sequence: Synthetic oligonucleotide
  Sense strand starting at position 1085 of SEQ ID NO: 1880411
uuaccaacagucuguaauu

SEQ ID NO: 1965087 - RNA, 19 nt, Artificial Sequence
  Description of Artificial Sequence: Synthetic oligonucleotide
  Antisense strand to SEQ ID NO: 1965086
aauuacagacuguugguaa

SEQ ID NO: 1965088 - RNA, 19 nt, Artificial Sequence
  Description of Artificial Sequence: Synthetic oligonucleotide
  Sense strand starting at position 1167 of SEQ ID NO: 1880411
uuucuaacguaauuacuga

SEQ ID NO: 1965089 - RNA, 19 nt, Artificial Sequence
  Description of Artificial Sequence: Synthetic oligonucleotide
  Antisense strand to SEQ ID NO: 1965088
ucaguaauuacguuagaaa

SEQ ID NO: 1965090 - RNA, 19 nt, Artificial Sequence
  Description of Artificial Sequence: Synthetic oligonucleotide
  Sense strand starting at position 1237 of SEQ ID NO: 1880411
guuaccaagugaucaggaa

SEQ ID NO: 1965091 - RNA, 19 nt, Artificial Sequence
  Description of Artificial Sequence: Synthetic oligonucleotide
  Antisense strand to SEQ ID NO: 1965090
uuccugaucacuugguaac

SEQ ID NO: 1965092 - RNA, 19 nt, Artificial Sequence
  Description of Artificial Sequence: Synthetic oligonucleotide
  Sense strand starting at position 1326 of SEQ ID NO: 1880411
augucuuaccgacaaggca

SEQ ID NO: 1965093 - RNA, 19 nt, Artificial Sequence
  Description of Artificial Sequence: Synthetic oligonucleotide
  Antisense strand to SEQ ID NO: 1965092
ugccuugucgguaagacau

SEQ ID NO: 1965094 - RNA, 19 nt, Artificial Sequence
  Description of Artificial Sequence: Synthetic oligonucleotide
  Sense strand starting at position 1573 of SEQ ID NO: 1880411
cugcgcugcaguuuggaaa

SEQ ID NO: 1965095 - RNA, 19 nt, Artificial Sequence
  Description of Artificial Sequence: Synthetic oligonucleotide
  Antisense strand to SEQ ID NO: 1965094
uuuccaaacugcagcgcag

SEQ ID NO: 1965096 - RNA, 19 nt, Artificial Sequence
  Description of Artificial Sequence: Synthetic oligonucleotide
  Sense strand starting at position 1648 of SEQ ID NO: 1880411
gggauuucuucguucucug

SEQ ID NO: 1965097 - RNA, 19 nt, Artificial Sequence
  Description of Artificial Sequence: Synthetic oligonucleotide
  Antisense strand to SEQ ID NO: 1965096
cagagaacgaagaaauccc

SEQ ID NO: 1965098 - RNA, 19 nt, Artificial Sequence
  Description of Artificial Sequence: Synthetic oligonucleotide
  Sense strand starting at position 1658 of SEQ ID NO: 1880411
cguucucugggauaaugca

SEQ ID NO: 1965099 - RNA, 19 nt, Artificial Sequence
  Description of Artificial Sequence: Synthetic oligonucleotide
  Antisense strand to SEQ ID NO: 1965098
ugcauuaucccagagaacg

SEQ ID NO: 1965100 - RNA, 19 nt, Artificial Sequence
  Description of Artificial Sequence: Synthetic oligonucleotide
  Sense strand starting at position 1888 of SEQ ID NO: 1880411
uuacauggcagucaggauu

SEQ ID NO: 1965101 - RNA, 19 nt, Artificial Sequence
  Description of Artificial Sequence: Synthetic oligonucleotide
  Antisense strand to SEQ ID NO: 1965100
aauccugacugccauguaa

SEQ ID NO: 1965102 - RNA, 19 nt, Artificial Sequence
  Description of Artificial Sequence: Synthetic oligonucleotide
  Sense strand starting at position 1952 of SEQ ID NO: 1880411
ugacacagucuuugucaga

SEQ ID NO: 1965103 - RNA, 19 nt, Artificial Sequence
  Description of Artificial Sequence: Synthetic oligonucleotide
  Antisense strand to SEQ ID NO: 1965102
ucugacaaagacuguguca

SEQ ID NO: 1965104 - RNA, 19 nt, Artificial Sequence
  Description of Artificial Sequence: Synthetic oligonucleotide
  Sense strand starting at position 1953 of SEQ ID NO: 1880411
gacacagucuuugucagag

SEQ ID NO: 1965105 - RNA, 19 nt, Artificial Sequence
  Description of Artificial Sequence: Synthetic oligonucleotide
  Antisense strand to SEQ ID NO: 1965104
cucugacaaagacuguguc

SEQ ID NO: 1965106 - RNA, 19 nt, Artificial Sequence
  Description of Artificial Sequence: Synthetic oligonucleotide
  Sense strand starting at position 2025 of SEQ ID NO: 1880411
cuuguaagccuccaagaga

SEQ ID NO: 1965107 - RNA, 19 nt, Artificial Sequence
  Description of Artificial Sequence: Synthetic oligonucleotide
  Antisense strand to SEQ ID NO: 1965106
ucucuuggaggcuuacaag

SEQ ID NO: 1965108 - RNA, 19 nt, Artificial Sequence
  Description of Artificial Sequence: Synthetic oligonucleotide
  Sense strand starting at position 2187 of SEQ ID NO: 1880411
gcacacucugaggagcauu

SEQ ID NO: 1965109 - RNA, 19 nt, Artificial Sequence
  Description of Artificial Sequence: Synthetic oligonucleotide
  Antisense strand to SEQ ID NO: 1965108
aaugcuccucagagugugc

SEQ ID NO: 1965110 - RNA, 19 nt, Artificial Sequence
  Description of Artificial Sequence: Synthetic oligonucleotide
  Sense strand starting at position 2299 of SEQ ID NO: 1880411
aacuaagagcuacguuuga

SEQ ID NO: 1965111 - RNA, 19 nt, Artificial Sequence
  Description of Artificial Sequence: Synthetic oligonucleotide
  Antisense strand to SEQ ID NO: 1965110
ucaaacguagcucuuaguu

SEQ ID NO: 1965112 - RNA, 19 nt, Artificial Sequence
  Description of Artificial Sequence: Synthetic oligonucleotide
  Sense strand starting at position 2335 of SEQ ID NO: 1880411
acugguacauagucacaaa

SEQ ID NO: 1965113 - RNA, 19 nt, Artificial Sequence
  Description of Artificial Sequence: Synthetic oligonucleotide
  Antisense strand to SEQ ID NO: 1965112
uuugugacuauguaccagu

SEQ ID NO: 1965114 - RNA, 19 nt, Artificial Sequence
  Description of Artificial Sequence: Synthetic oligonucleotide
  Sense strand starting at position 2553 of SEQ ID NO: 1880411
cugugauugaguuagcaau

SEQ ID NO: 1965115 - RNA, 19 nt, Artificial Sequence
  Description of Artificial Sequence: Synthetic oligonucleotide
  Antisense strand to SEQ ID NO: 1965114
auugcuaacucaaucacag

SEQ ID NO: 1965116 - RNA, 19 nt, Artificial Sequence
  Description of Artificial Sequence: Synthetic oligonucleotide
  Sense strand starting at position 2695 of SEQ ID NO: 1880411
ucaccauuugcccgcaaga

SEQ ID NO: 1965117 - RNA, 19 nt, Artificial Sequence
  Description of Artificial Sequence: Synthetic oligonucleotide
  Antisense strand to SEQ ID NO: 1965116
ucuugcgggcaaaugguga

SEQ ID NO: 1965118 - RNA, 19 nt, Artificial Sequence
  Description of Artificial Sequence: Synthetic oligonucleotide
  Sense strand starting at position 2908 of SEQ ID NO: 1880411
cuacuucuggccuggaaac

SEQ ID NO: 1965119 - RNA, 19 nt, Artificial Sequence
  Description of Artificial Sequence: Synthetic oligonucleotide
  Antisense strand to SEQ ID NO: 1965118
guuuccaggccagaaguag

SEQ ID NO: 1965120 - RNA, 19 nt, Artificial Sequence
  Description of Artificial Sequence: Synthetic oligonucleotide
  Sense strand starting at position 3112 of SEQ ID NO: 1880411
guucuaaauugaguaagac

SEQ ID NO: 1965121 - RNA, 19 nt, Artificial Sequence
  Description of Artificial Sequence: Synthetic oligonucleotide
  Antisense strand to SEQ ID NO: 1965120
gucuuacucaauuuagaac

SEQ ID NO: 1965122 - RNA, 19 nt, Artificial Sequence
  Description of Artificial Sequence: Synthetic oligonucleotide
  Sense strand starting at position 3122 of SEQ ID NO: 1880411
gaguaagacuugucucaua

SEQ ID NO: 1965123 - RNA, 19 nt, Artificial Sequence
  Description of Artificial Sequence: Synthetic oligonucleotide
  Antisense strand to SEQ ID NO: 1965122
uaugagacaagucuuacuc

SEQ ID NO: 1965124 - RNA, 19 nt, Artificial Sequence
  Description of Artificial Sequence: Synthetic oligonucleotide
  Sense strand starting at position 3146 of SEQ ID NO: 1880411
uuugguuuacagcaaugau

SEQ ID NO: 1965125 - RNA, 19 nt, Artificial Sequence
  Description of Artificial Sequence: Synthetic oligonucleotide
  Antisense strand to SEQ ID NO: 1965124
aucauugcuguaaaccaaa

SEQ ID NO: 1965126 - RNA, 19 nt, Artificial Sequence
  Description of Artificial Sequence: Synthetic oligonucleotide
  Sense strand starting at position 3149 of SEQ ID NO: 1880411
gguuuacagcaaugaugac

SEQ ID NO: 1965127 - RNA, 19 nt, Artificial Sequence
  Description of Artificial Sequence: Synthetic oligonucleotide
  Antisense strand to SEQ ID NO: 1965126
gucaucauugcuguaaacc

SEQ ID NO: 1965128 - RNA, 19 nt, Artificial Sequence
  Description of Artificial Sequence: Synthetic oligonucleotide
  Sense strand starting at position 3437 of SEQ ID NO: 1880411
auagguguuaguuacaaau

SEQ ID NO: 1965129 - RNA, 19 nt, Artificial Sequence
  Description of Artificial Sequence: Synthetic oligonucleotide
  Antisense strand to SEQ ID NO: 1965128
auuuguaacuaacaccuau

SEQ ID NO: 1965130 - RNA, 19 nt, Artificial Sequence
  Description of Artificial Sequence: Synthetic oligonucleotide
  Sense strand starting at position 3546 of SEQ ID NO: 1880411
guuguuaaucccuauguga

SEQ ID NO: 1965131 - RNA, 19 nt, Artificial Sequence
  Description of Artificial Sequence: Synthetic oligonucleotide
  Antisense strand to SEQ ID NO: 1965130
ucacauagggauuaacaac

SEQ ID NO: 1965132 - RNA, 19 nt, Artificial Sequence
  Description of Artificial Sequence: Synthetic oligonucleotide
  Sense strand starting at position 3548 of SEQ ID NO: 1880411
uguuaaucccuaugugaga

SEQ ID NO: 1965133 - RNA, 19 nt, Artificial Sequence
  Description of Artificial Sequence: Synthetic oligonucleotide
  Antisense strand to SEQ ID NO: 1965132
ucucacauagggauuaaca

SEQ ID NO: 1965134 - RNA, 19 nt, Artificial Sequence
  Description of Artificial Sequence: Synthetic oligonucleotide
  Sense strand starting at position 3549 of SEQ ID NO: 1880411
guuaaucccuaugugagaa

SEQ ID NO: 1965135 - RNA, 19 nt, Artificial Sequence
  Description of Artificial Sequence: Synthetic oligonucleotide
  Antisense strand to SEQ ID NO: 1965134
uucucacauagggauuaac

SEQ ID NO: 1965136 - RNA, 19 nt, Artificial Sequence
  Description of Artificial Sequence: Synthetic oligonucleotide
  Sense strand starting at position 3576 of SEQ ID NO: 1880411
acauaauuacugggaagca

SEQ ID NO: 1965137 - RNA, 19 nt, Artificial Sequence
  Description of Artificial Sequence: Synthetic oligonucleotide
  Antisense strand to SEQ ID NO: 1965136
ugcuucccaguaauuaugu

SEQ ID NO: 1965138 - RNA, 19 nt, Artificial Sequence
  Description of Artificial Sequence: Synthetic oligonucleotide
  Sense strand starting at position 3592 of SEQ ID NO: 1880411
gcacaaugguuagccagaa

SEQ ID NO: 1965139 - RNA, 19 nt, Artificial Sequence
  Description of Artificial Sequence: Synthetic oligonucleotide
  Antisense strand to SEQ ID NO: 1965138
uucuggcuaaccauugugc

SEQ ID NO: 1965140 - RNA, 19 nt, Artificial Sequence
  Description of Artificial Sequence: Synthetic oligonucleotide
  Sense strand starting at position 3593 of SEQ ID NO: 1880411
cacaaugguuagccagaaa

SEQ ID NO: 1965141 - RNA, 19 nt, Artificial Sequence
  Description of Artificial Sequence: Synthetic oligonucleotide
  Antisense strand to SEQ ID NO: 1965140
uuucuggcuaaccauugug

SEQ ID NO: 1965142 - RNA, 19 nt, Artificial Sequence
  Description of Artificial Sequence: Synthetic oligonucleotide
  Sense strand starting at position 3649 of SEQ ID NO: 1880411
gggaccaagucuuucuacu

SEQ ID NO: 1965143 - RNA, 19 nt, Artificial Sequence
  Description of Artificial Sequence: Synthetic oligonucleotide
  Antisense strand to SEQ ID NO: 1965142
aguagaaagacuugguccc

SEQ ID NO: 1965144 - RNA, 19 nt, Artificial Sequence
  Description of Artificial Sequence: Synthetic oligonucleotide
  Sense strand starting at position 3739 of SEQ ID NO: 1880411
aaagccuauggcugaugaa

SEQ ID NO: 1965145 - RNA, 19 nt, Artificial Sequence
  Description of Artificial Sequence: Synthetic oligonucleotide
  Antisense strand to SEQ ID NO: 1965144
uucaucagccauaggcuuu

SEQ ID NO: 1965146 - RNA, 19 nt, Artificial Sequence
  Description of Artificial Sequence: Synthetic oligonucleotide
  Sense strand starting at position 3740 of SEQ ID NO: 1880411
aagccuauggcugaugaaa

SEQ ID NO: 1965147 - RNA, 19 nt, Artificial Sequence
  Description of Artificial Sequence: Synthetic oligonucleotide
  Antisense strand to SEQ ID NO: 1965146
uuucaucagccauaggcuu

SEQ ID NO: 1965148 - RNA, 19 nt, Artificial Sequence
  Description of Artificial Sequence: Synthetic oligonucleotide
  Sense strand starting at position 2300 of SEQ ID NO: 1880412
aacuaagagcuacguuuga

SEQ ID NO: 1965149 - RNA, 19 nt, Artificial Sequence
  Description of Artificial Sequence: Synthetic oligonucleotide
  Antisense strand to SEQ ID NO: 1965148
ucaaacguagcucuuaguu

SEQ ID NO: 1965150 - RNA, 19 nt, Artificial Sequence
  Description of Artificial Sequence: Synthetic oligonucleotide
  Sense strand starting at position 2696 of SEQ ID NO: 1880412
ucaccauuugcccgcaaga

SEQ ID NO: 1965151 - RNA, 19 nt, Artificial Sequence
  Description of Artificial Sequence: Synthetic oligonucleotide
  Antisense strand to SEQ ID NO: 1965150
ucuugcgggcaaaugguga

SEQ ID NO: 1965152 - RNA, 19 nt, Artificial Sequence
  Description of Artificial Sequence: Synthetic oligonucleotide
  Sense strand starting at position 3150 of SEQ ID NO: 1880412
gguuuacagcaaugaugac

SEQ ID NO: 1965153 - RNA, 19 nt, Artificial Sequence
  Description of Artificial Sequence: Synthetic oligonucleotide
  Antisense strand to SEQ ID NO: 1965152
gucaucauugcuguaaacc

SEQ ID NO: 1965154 - RNA, 19 nt, Artificial Sequence
  Description of Artificial Sequence: Synthetic oligonucleotide
  Sense strand starting at position 3740 of SEQ ID NO: 1880412
aaagccuauggcugaugaa

SEQ ID NO: 1965155 - RNA, 19 nt, Artificial Sequence
  Description of Artificial Sequence: Synthetic oligonucleotide
  Antisense strand to SEQ ID NO: 1965154
uucaucagccauaggcuuu

SEQ ID NO: 1965156 - RNA, 19 nt, Artificial Sequence
  Description of Artificial Sequence: Synthetic oligonucleotide
  Sense strand starting at position 3741 of SEQ ID NO: 1880412
aagccuauggcugaugaaa

SEQ ID NO: 1965157 - RNA, 19 nt, Artificial Sequence
  Description of Artificial Sequence: Synthetic oligonucleotide
  Antisense strand to SEQ ID NO: 1965156
uuucaucagccauaggcuu

SEQ ID NO: 1965158 - RNA, 19 nt, Artificial Sequence
  Description of Artificial Sequence: Synthetic oligonucleotide
  Sense strand starting at position 3743 of SEQ ID NO: 1880412
gccuauggcugaugaaaca

SEQ ID NO: 1965159 - RNA, 19 nt, Artificial Sequence
  Description of Artificial Sequence: Synthetic oligonucleotide
  Antisense strand to SEQ ID NO: 1965158
uguuucaucagccauaggc

SEQ ID NO: 1965160 - RNA, 19 nt, Artificial Sequence
  Description of Artificial Sequence: Synthetic oligonucleotide
  Sense strand starting at position 428 of SEQ ID NO: 1880413
gggaguaucuaucuaucua

SEQ ID NO: 1965161 - RNA, 19 nt, Artificial Sequence
  Description of Artificial Sequence: Synthetic oligonucleotide
  Antisense strand to SEQ ID NO: 1965160
uagauagauagauacuccc

SEQ ID NO: 1965162 - RNA, 19 nt, Artificial Sequence
  Description of Artificial Sequence: Synthetic oligonucleotide
  Sense strand starting at position 715 of SEQ ID NO: 1880413
gugaguugugaagauaagu

SEQ ID NO: 1965163 - RNA, 19 nt, Artificial Sequence
  Description of Artificial Sequence: Synthetic oligonucleotide
  Antisense strand to SEQ ID NO: 1965162
acuuaucuucacaacucac

SEQ ID NO: 1965164 - RNA, 19 nt, Artificial Sequence
  Description of Artificial Sequence: Synthetic oligonucleotide
  Sense strand starting at position 720 of SEQ ID NO: 1880413
uugugaagauaagugacau

SEQ ID NO: 1965165 - RNA, 19 nt, Artificial Sequence
  Description of Artificial Sequence: Synthetic oligonucleotide
  Antisense strand to SEQ ID NO: 1965164
augucacuuaucuucacaa

SEQ ID NO: 1965166 - RNA, 19 nt, Artificial Sequence
  Description of Artificial Sequence: Synthetic oligonucleotide
  Sense strand starting at position 721 of SEQ ID NO: 1880413
ugugaagauaagugacauc

SEQ ID NO: 1965167 - RNA, 19 nt, Artificial Sequence
  Description of Artificial Sequence: Synthetic oligonucleotide
  Antisense strand to SEQ ID NO: 1965166
gaugucacuuaucuucaca

SEQ ID NO: 1965168 - RNA, 19 nt, Artificial Sequence
  Description of Artificial Sequence: Synthetic oligonucleotide
  Sense strand starting at position 770 of SEQ ID NO: 1880413
agaaccgggucaguuaaau

SEQ ID NO: 1965169 - RNA, 19 nt, Artificial Sequence
  Description of Artificial Sequence: Synthetic oligonucleotide
  Antisense strand to SEQ ID NO: 1965168
auuuaacugacccgguucu

SEQ ID NO: 1965170 - RNA, 19 nt, Artificial Sequence
  Description of Artificial Sequence: Synthetic oligonucleotide
  Sense strand starting at position 815 of SEQ ID NO: 1880413
ugggauacgcaguaauucu

SEQ ID NO: 1965171 - RNA, 19 nt, Artificial Sequence
  Description of Artificial Sequence: Synthetic oligonucleotide
  Antisense strand to SEQ ID NO: 1965170
agaauuacugcguauccca

SEQ ID NO: 1965172 - RNA, 19 nt, Artificial Sequence
  Description of Artificial Sequence: Synthetic oligonucleotide
  Sense strand starting at position 835 of SEQ ID NO: 1880413
agcucacaacuuugaauga

SEQ ID NO: 1965173 - RNA, 19 nt, Artificial Sequence
  Description of Artificial Sequence: Synthetic oligonucleotide
  Antisense strand to SEQ ID NO: 1965172
ucauucaaaguugugagcu

SEQ ID NO: 1965174 - RNA, 19 nt, Artificial Sequence
  Description of Artificial Sequence: Synthetic oligonucleotide
  Sense strand starting at position 952 of SEQ ID NO: 1880413
uagaguuaacaguauguuc

SEQ ID NO: 1965175 - RNA, 19 nt, Artificial Sequence
  Description of Artificial Sequence: Synthetic oligonucleotide
  Antisense strand to SEQ ID NO: 1965174
gaacauacuguuaacucua

SEQ ID NO: 1965176 - RNA, 19 nt, Artificial Sequence
  Description of Artificial Sequence: Synthetic oligonucleotide
  Sense strand starting at position 967 of SEQ ID NO: 1880413
guucuauauguguauugag

SEQ ID NO: 1965177 - RNA, 19 nt, Artificial Sequence
  Description of Artificial Sequence: Synthetic oligonucleotide
  Antisense strand to SEQ ID NO: 1965176
cucaauacacauauagaac

SEQ ID NO: 1965178 - RNA, 19 nt, Artificial Sequence
  Description of Artificial Sequence: Synthetic oligonucleotide
  Sense strand starting at position 1085 of SEQ ID NO: 1880413
uuaccaacagucuguaauu

SEQ ID NO: 1965179 - RNA, 19 nt, Artificial Sequence
  Description of Artificial Sequence: Synthetic oligonucleotide
  Antisense strand to SEQ ID NO: 1965178
aauuacagacuguugguaa

SEQ ID NO: 1965180 - RNA, 19 nt, Artificial Sequence
  Description of Artificial Sequence: Synthetic oligonucleotide
  Sense strand starting at position 1167 of SEQ ID NO: 1880413
uuucuaacguaauuacuga

SEQ ID NO: 1965181 - RNA, 19 nt, Artificial Sequence
  Description of Artificial Sequence: Synthetic oligonucleotide
  Antisense strand to SEQ ID NO: 1965180
ucaguaauuacguuagaaa

SEQ ID NO: 1965182 - RNA, 19 nt, Artificial Sequence
  Description of Artificial Sequence: Synthetic oligonucleotide
  Sense strand starting at position 1237 of SEQ ID NO: 1880413
guuaccaagugaucaggaa

SEQ ID NO: 1965183 - RNA, 19 nt, Artificial Sequence
  Description of Artificial Sequence: Synthetic oligonucleotide
  Antisense strand to SEQ ID NO: 1965182
uuccugaucacuugguaac

SEQ ID NO: 1965184 - RNA, 19 nt, Artificial Sequence
  Description of Artificial Sequence: Synthetic oligonucleotide
  Sense strand starting at position 1326 of SEQ ID NO: 1880413
augucuuaccgacaaggca

SEQ ID NO: 1965185 - RNA, 19 nt, Artificial Sequence
  Description of Artificial Sequence: Synthetic oligonucleotide
  Antisense strand to SEQ ID NO: 1965184
ugccuugucgguaagacau

SEQ ID NO: 1965186 - RNA, 19 nt, Artificial Sequence
  Description of Artificial Sequence: Synthetic oligonucleotide
  Sense strand starting at position 1573 of SEQ ID NO: 1880413
cugcgcugcaguuuggaaa

SEQ ID NO: 1965187 - RNA, 19 nt, Artificial Sequence
  Description of Artificial Sequence: Synthetic oligonucleotide
  Antisense strand to SEQ ID NO: 1965186
uuuccaaacugcagcgcag

SEQ ID NO: 1965188 - RNA, 19 nt, Artificial Sequence
  Description of Artificial Sequence: Synthetic oligonucleotide
  Sense strand starting at position 1648 of SEQ ID NO: 1880413
gggauuucuucguucucug

SEQ ID NO: 1965189 - RNA, 19 nt, Artificial Sequence
  Description of Artificial Sequence: Synthetic oligonucleotide
  Antisense strand to SEQ ID NO: 1965188
cagagaacgaagaaauccc

SEQ ID NO: 1965190 - RNA, 19 nt, Artificial Sequence
  Description of Artificial Sequence: Synthetic oligonucleotide
  Sense strand starting at position 1658 of SEQ ID NO: 1880413
cguucucugggauaaugca

SEQ ID NO: 1965191 - RNA, 19 nt, Artificial Sequence
  Description of Artificial Sequence: Synthetic oligonucleotide
  Antisense strand to SEQ ID NO: 1965190
ugcauuaucccagagaacg

SEQ ID NO: 1965192 - RNA, 19 nt, Artificial Sequence
  Description of Artificial Sequence: Synthetic oligonucleotide
  Sense strand starting at position 1888 of SEQ ID NO: 1880413
uuacauggcagucaggauu

SEQ ID NO: 1965193 - RNA, 19 nt, Artificial Sequence
  Description of Artificial Sequence: Synthetic oligonucleotide
  Antisense strand to SEQ ID NO: 1965192
aauccugacugccauguaa

SEQ ID NO: 1965194 - RNA, 19 nt, Artificial Sequence
  Description of Artificial Sequence: Synthetic oligonucleotide
  Sense strand starting at position 1952 of SEQ ID NO: 1880413
ugacacagucuuugucaga

SEQ ID NO: 1965195 - RNA, 19 nt, Artificial Sequence
  Description of Artificial Sequence: Synthetic oligonucleotide
  Antisense strand to SEQ ID NO: 1965194
ucugacaaagacuguguca

SEQ ID NO: 1965196 - RNA, 19 nt, Artificial Sequence
  Description of Artificial Sequence: Synthetic oligonucleotide
  Sense strand starting at position 1953 of SEQ ID NO: 1880413
gacacagucuuugucagag

SEQ ID NO: 1965197 - RNA, 19 nt, Artificial Sequence
  Description of Artificial Sequence: Synthetic oligonucleotide
  Antisense strand to SEQ ID NO: 1965196
cucugacaaagacuguguc

SEQ ID NO: 1965198 - RNA, 19 nt, Artificial Sequence
  Description of Artificial Sequence: Synthetic oligonucleotide
  Sense strand starting at position 2025 of SEQ ID NO: 1880413
cuuguaagccuccaagaga

SEQ ID NO: 1965199 - RNA, 19 nt, Artificial Sequence
  Description of Artificial Sequence: Synthetic oligonucleotide
  Antisense strand to SEQ ID NO: 1965198
ucucuuggaggcuuacaag

SEQ ID NO: 1965200 - RNA, 19 nt, Artificial Sequence
  Description of Artificial Sequence: Synthetic oligonucleotide
  Sense strand starting at position 2187 of SEQ ID NO: 1880413
gcacacucugaggagcauu

SEQ ID NO: 1965201 - RNA, 19 nt, Artificial Sequence
  Description of Artificial Sequence: Synthetic oligonucleotide
  Antisense strand to SEQ ID NO: 1965200
aaugcuccucagagugugc

SEQ ID NO: 1965202 - RNA, 19 nt, Artificial Sequence
  Description of Artificial Sequence: Synthetic oligonucleotide
  Sense strand starting at position 2299 of SEQ ID NO: 1880413
aacuaagagcuacguuuga

SEQ ID NO: 1965203 - RNA, 19 nt, Artificial Sequence
  Description of Artificial Sequence: Synthetic oligonucleotide
  Antisense strand to SEQ ID NO: 1965202
ucaaacguagcucuuaguu

SEQ ID NO: 1965204 - RNA, 19 nt, Artificial Sequence
  Description of Artificial Sequence: Synthetic oligonucleotide
  Sense strand starting at position 2335 of SEQ ID NO: 1880413
acugguacauagucacaaa

SEQ ID NO: 1965205 - RNA, 19 nt, Artificial Sequence
  Description of Artificial Sequence: Synthetic oligonucleotide
  Antisense strand to SEQ ID NO: 1965204
uuugugacuauguaccagu

SEQ ID NO: 1965206 - RNA, 19 nt, Artificial Sequence
  Description of Artificial Sequence: Synthetic oligonucleotide
  Sense strand starting at position 2553 of SEQ ID NO: 1880413
cugugauugaguuagcaau

SEQ ID NO: 1965207 - RNA, 19 nt, Artificial Sequence
  Description of Artificial Sequence: Synthetic oligonucleotide
  Antisense strand to SEQ ID NO: 1965206
auugcuaacucaaucacag

SEQ ID NO: 1965208 - RNA, 19 nt, Artificial Sequence
  Description of Artificial Sequence: Synthetic oligonucleotide
  Sense strand starting at position 2695 of SEQ ID NO: 1880413
ucaccauuugcccgcaaga

SEQ ID NO: 1965209 - RNA, 19 nt, Artificial Sequence
  Description of Artificial Sequence: Synthetic oligonucleotide
  Antisense strand to SEQ ID NO: 1965208
ucuugcgggcaaaugguga

SEQ ID NO: 1965210 - RNA, 19 nt, Artificial Sequence
  Description of Artificial Sequence: Synthetic oligonucleotide
  Sense strand starting at position 2908 of SEQ ID NO: 1880413
cuacuucuggccuggaaac

SEQ ID NO: 1965211 - RNA, 19 nt, Artificial Sequence
  Description of Artificial Sequence: Synthetic oligonucleotide
  Antisense strand to SEQ ID NO: 1965210
guuuccaggccagaaguag

SEQ ID NO: 1965212 - RNA, 19 nt, Artificial Sequence
  Description of Artificial Sequence: Synthetic oligonucleotide
  Sense strand starting at position 3112 of SEQ ID NO: 1880413
guucuaaauugaguaagac

SEQ ID NO: 1965213 - RNA, 19 nt, Artificial Sequence
  Description of Artificial Sequence: Synthetic oligonucleotide
  Antisense strand to SEQ ID NO: 1965212
gucuuacucaauuuagaac

SEQ ID NO: 1965214 - RNA, 19 nt, Artificial Sequence
  Description of Artificial Sequence: Synthetic oligonucleotide
  Sense strand starting at position 3122 of SEQ ID NO: 1880413
gaguaagacuugucucaua

SEQ ID NO: 1965215 - RNA, 19 nt, Artificial Sequence
  Description of Artificial Sequence: Synthetic oligonucleotide
  Antisense strand to SEQ ID NO: 1965214
uaugagacaagucuuacuc

SEQ ID NO: 1965216 - RNA, 19 nt, Artificial Sequence
  Description of Artificial Sequence: Synthetic oligonucleotide
  Sense strand starting at position 3146 of SEQ ID NO: 1880413
uuugguuuacagcaaugau

SEQ ID NO: 1965217 - RNA, 19 nt, Artificial Sequence
  Description of Artificial Sequence: Synthetic oligonucleotide
  Antisense strand to SEQ ID NO: 1965216
aucauugcuguaaaccaaa

SEQ ID NO: 1965218 - RNA, 19 nt, Artificial Sequence
  Description of Artificial Sequence: Synthetic oligonucleotide
  Sense strand starting at position 3149 of SEQ ID NO: 1880413
gguuuacagcaaugaugac

SEQ ID NO: 1965219 - RNA, 19 nt, Artificial Sequence
  Description of Artificial Sequence: Synthetic oligonucleotide
  Antisense strand to SEQ ID NO: 1965218
gucaucauugcuguaaacc

SEQ ID NO: 1965220 - RNA, 19 nt, Artificial Sequence
  Description of Artificial Sequence: Synthetic oligonucleotide
  Sense strand starting at position 3437 of SEQ ID NO: 1880413
auagguguuaguuacaaau

SEQ ID NO: 1965221 - RNA, 19 nt, Artificial Sequence
  Description of Artificial Sequence: Synthetic oligonucleotide
  Antisense strand to SEQ ID NO: 1965220
auuuguaacuaacaccuau

SEQ ID NO: 1965222 - RNA, 19 nt, Artificial Sequence
  Description of Artificial Sequence: Synthetic oligonucleotide
  Sense strand starting at position 3546 of SEQ ID NO: 1880413
guuguuaaucccuauguga

SEQ ID NO: 1965223 - RNA, 19 nt, Artificial Sequence
  Description of Artificial Sequence: Synthetic oligonucleotide
  Antisense strand to SEQ ID NO: 1965222
ucacauagggauuaacaac

SEQ ID NO: 1965224 - RNA, 19 nt, Artificial Sequence
  Description of Artificial Sequence: Synthetic oligonucleotide
  Sense strand starting at position 3548 of SEQ ID NO: 1880413
uguuaaucccuaugugaga

SEQ ID NO: 1965225 - RNA, 19 nt, Artificial Sequence
  Description of Artificial Sequence: Synthetic oligonucleotide
  Antisense strand to SEQ ID NO: 1965224
ucucacauagggauuaaca

SEQ ID NO: 1965226 - RNA, 19 nt, Artificial Sequence
  Description of Artificial Sequence: Synthetic oligonucleotide
  Sense strand starting at position 3549 of SEQ ID NO: 1880413
guuaaucccuaugugagaa

SEQ ID NO: 1965227 - RNA, 19 nt, Artificial Sequence
  Description of Artificial Sequence: Synthetic oligonucleotide
  Antisense strand to SEQ ID NO: 1965226
uucucacauagggauuaac

SEQ ID NO: 1965228 - RNA, 19 nt, Artificial Sequence
  Description of Artificial Sequence: Synthetic oligonucleotide
  Sense strand starting at position 3576 of SEQ ID NO: 1880413
acauaauuacugggaagca

SEQ ID NO: 1965229 - RNA, 19 nt, Artificial Sequence
  Description of Artificial Sequence: Synthetic oligonucleotide
  Antisense strand to SEQ ID NO: 1965228
ugcuucccaguaauuaugu

SEQ ID NO: 1965230 - RNA, 19 nt, Artificial Sequence
  Description of Artificial Sequence: Synthetic oligonucleotide
  Sense strand starting at position 3592 of SEQ ID NO: 1880413
gcacaaugguuagccagaa

SEQ ID NO: 1965231 - RNA, 19 nt, Artificial Sequence
  Description of Artificial Sequence: Synthetic oligonucleotide
  Antisense strand to SEQ ID NO: 1965230
uucuggcuaaccauugugc

SEQ ID NO: 1965232 - RNA, 19 nt, Artificial Sequence
  Description of Artificial Sequence: Synthetic oligonucleotide
  Sense strand starting at position 3593 of SEQ ID NO: 1880413
cacaaugguuagccagaaa

SEQ ID NO: 1965233 - RNA, 19 nt, Artificial Sequence
  Description of Artificial Sequence: Synthetic oligonucleotide
  Antisense strand to SEQ ID NO: 1965232
uuucuggcuaaccauugug

SEQ ID NO: 1965234 - RNA, 19 nt, Artificial Sequence
  Description of Artificial Sequence: Synthetic oligonucleotide
  Sense strand starting at position 3649 of SEQ ID NO: 1880413
gggaccaagucuuucuacu

SEQ ID NO: 1965235 - RNA, 19 nt, Artificial Sequence
  Description of Artificial Sequence: Synthetic oligonucleotide
  Antisense strand to SEQ ID NO: 1965234
aguagaaagacuugguccc

SEQ ID NO: 1965236 - RNA, 19 nt, Artificial Sequence
  Description of Artificial Sequence: Synthetic oligonucleotide
  Sense strand starting at position 3739 of SEQ ID NO: 1880413
aaagccuauggcugaugaa

SEQ ID NO: 1965237 - RNA, 19 nt, Artificial Sequence
  Description of Artificial Sequence: Synthetic oligonucleotide
  Antisense strand to SEQ ID NO: 1965236
uucaucagccauaggcuuu

SEQ ID NO: 1965238 - RNA, 19 nt, Artificial Sequence
  Description of Artificial Sequence: Synthetic oligonucleotide
  Sense strand starting at position 3740 of SEQ ID NO: 1880413
aagccuauggcugaugaaa

SEQ ID NO: 1965239 - RNA, 19 nt, Artificial Sequence
  Description of Artificial Sequence: Synthetic oligonucleotide
  Antisense strand to SEQ ID NO: 1965238
uuucaucagccauaggcuu

SEQ ID NO: 1965240 - RNA, 19 nt, Artificial Sequence
  Description of Artificial Sequence: Synthetic oligonucleotide
  Sense strand starting at position 247 of SEQ ID NO: 1880414
agauauuucucugaaacag

SEQ ID NO: 1965241 - RNA, 19 nt, Artificial Sequence
  Description of Artificial Sequence: Synthetic oligonucleotide
  Antisense strand to SEQ ID NO: 1965240
cuguuucagagaaauaucu

SEQ ID NO: 1965242 - RNA, 19 nt, Artificial Sequence
  Description of Artificial Sequence: Synthetic oligonucleotide
  Sense strand starting at position 647 of SEQ ID NO: 1880414
uucugauaagccggauaug

SEQ ID NO: 1965243 - RNA, 19 nt, Artificial Sequence
  Description of Artificial Sequence: Synthetic oligonucleotide
  Antisense strand to SEQ ID NO: 1965242
cauauccggcuuaucagaa

SEQ ID NO: 1965244 - RNA, 19 nt, Artificial Sequence
  Description of Artificial Sequence: Synthetic oligonucleotide
  Sense strand starting at position 648 of SEQ ID NO: 1880414
ucugauaagccggauaugu

SEQ ID NO: 1965245 - RNA, 19 nt, Artificial Sequence
  Description of Artificial Sequence: Synthetic oligonucleotide
  Antisense strand to SEQ ID NO: 1965244
acauauccggcuuaucaga

SEQ ID NO: 1965246 - RNA, 19 nt, Artificial Sequence
  Description of Artificial Sequence: Synthetic oligonucleotide
  Sense strand starting at position 650 of SEQ ID NO: 1880414
ugauaagccggauauguca

SEQ ID NO: 1965247 - RNA, 19 nt, Artificial Sequence
  Description of Artificial Sequence: Synthetic oligonucleotide
  Antisense strand to SEQ ID NO: 1965246
ugacauauccggcuuauca

SEQ ID NO: 1965248 - RNA, 19 nt, Artificial Sequence
  Description of Artificial Sequence: Synthetic oligonucleotide
  Sense strand starting at position 876 of SEQ ID NO: 1880414
acuuuauaaggauguguga

SEQ ID NO: 1965249 - RNA, 19 nt, Artificial Sequence
  Description of Artificial Sequence: Synthetic oligonucleotide
  Antisense strand to SEQ ID NO: 1965248
ucacacauccuuauaaagu

SEQ ID NO: 1965250 - RNA, 19 nt, Artificial Sequence
  Description of Artificial Sequence: Synthetic oligonucleotide
  Sense strand starting at position 892 of SEQ ID NO: 1880414
ugagcaauuggucaugaua

SEQ ID NO: 1965251 - RNA, 19 nt, Artificial Sequence
  Description of Artificial Sequence: Synthetic oligonucleotide
  Antisense strand to SEQ ID NO: 1965250
uaucaugaccaauugcuca

SEQ ID NO: 1965252 - RNA, 19 nt, Artificial Sequence
  Description of Artificial Sequence: Synthetic oligonucleotide
  Sense strand starting at position 895 of SEQ ID NO: 1880414
gcaauuggucaugauauau

SEQ ID NO: 1965253 - RNA, 19 nt, Artificial Sequence
  Description of Artificial Sequence: Synthetic oligonucleotide
  Antisense strand to SEQ ID NO: 1965252
auauaucaugaccaauugc

SEQ ID NO: 1965254 - RNA, 19 nt, Artificial Sequence
  Description of Artificial Sequence: Synthetic oligonucleotide
  Sense strand starting at position 954 of SEQ ID NO: 1880414
uugagucuccuauauccau

SEQ ID NO: 1965255 - RNA, 19 nt, Artificial Sequence
  Description of Artificial Sequence: Synthetic oligonucleotide
  Antisense strand to SEQ ID NO: 1965254
auggauauaggagacucaa

SEQ ID NO: 1965256 - RNA, 19 nt, Artificial Sequence
  Description of Artificial Sequence: Synthetic oligonucleotide
  Sense strand starting at position 963 of SEQ ID NO: 1880414
cuauauccaugggcuuaua

SEQ ID NO: 1965257 - RNA, 19 nt, Artificial Sequence
  Description of Artificial Sequence: Synthetic oligonucleotide
  Antisense strand to SEQ ID NO: 1965256
uauaagcccauggauauag

SEQ ID NO: 1965258 - RNA, 19 nt, Artificial Sequence
  Description of Artificial Sequence: Synthetic oligonucleotide
  Sense strand starting at position 966 of SEQ ID NO: 1880414
uauccaugggcuuauaguu

SEQ ID NO: 1965259 - RNA, 19 nt, Artificial Sequence
  Description of Artificial Sequence: Synthetic oligonucleotide
  Antisense strand to SEQ ID NO: 1965258
aacuauaagcccauggaua

SEQ ID NO: 1965260 - RNA, 19 nt, Artificial Sequence
  Description of Artificial Sequence: Synthetic oligonucleotide
  Sense strand starting at position 1064 of SEQ ID NO: 1880414
ugcaucuuagacugauauc

SEQ ID NO: 1965261 - RNA, 19 nt, Artificial Sequence
  Description of Artificial Sequence: Synthetic oligonucleotide
  Antisense strand to SEQ ID NO: 1965260
gauaucagucuaagaugca

SEQ ID NO: 1965262 - RNA, 19 nt, Artificial Sequence
  Description of Artificial Sequence: Synthetic oligonucleotide
  Sense strand starting at position 1087 of SEQ ID NO: 1880414
aggucacugaggcauuauu

SEQ ID NO: 1965263 - RNA, 19 nt, Artificial Sequence
  Description of Artificial Sequence: Synthetic oligonucleotide
  Antisense strand to SEQ ID NO: 1965262
aauaaugccucagugaccu

SEQ ID NO: 1965264 - RNA, 19 nt, Artificial Sequence
  Description of Artificial Sequence: Synthetic oligonucleotide
  Sense strand starting at position 1256 of SEQ ID NO: 1880414
ggcaguaaaccggagcaau

SEQ ID NO: 1965265 - RNA, 19 nt, Artificial Sequence
  Description of Artificial Sequence: Synthetic oligonucleotide
  Antisense strand to SEQ ID NO: 1965264
auugcuccgguuuacugcc

SEQ ID NO: 1965266 - RNA, 19 nt, Artificial Sequence
  Description of Artificial Sequence: Synthetic oligonucleotide
  Sense strand starting at position 1726 of SEQ ID NO: 1880414
agaggccacuucuuaauau

SEQ ID NO: 1965267 - RNA, 19 nt, Artificial Sequence
  Description of Artificial Sequence: Synthetic oligonucleotide
  Antisense strand to SEQ ID NO: 1965266
auauuaagaaguggccucu

SEQ ID NO: 1965268 - RNA, 19 nt, Artificial Sequence
  Description of Artificial Sequence: Synthetic oligonucleotide
  Sense strand starting at position 1763 of SEQ ID NO: 1880414
auugauuacuuuguaagca

SEQ ID NO: 1965269 - RNA, 19 nt, Artificial Sequence
  Description of Artificial Sequence: Synthetic oligonucleotide
  Antisense strand to SEQ ID NO: 1965268
ugcuuacaaaguaaucaau

SEQ ID NO: 1965270 - RNA, 19 nt, Artificial Sequence
  Description of Artificial Sequence: Synthetic oligonucleotide
  Sense strand starting at position 1874 of SEQ ID NO: 1880414
acaggaauguuggcugagu

SEQ ID NO: 1965271 - RNA, 19 nt, Artificial Sequence
  Description of Artificial Sequence: Synthetic oligonucleotide
  Antisense strand to SEQ ID NO: 1965270
acucagccaacauuccugu

SEQ ID NO: 1965272 - RNA, 19 nt, Artificial Sequence
  Description of Artificial Sequence: Synthetic oligonucleotide
  Sense strand starting at position 2233 of SEQ ID NO: 1880414
uuuaaugcuuaacugugaa

SEQ ID NO: 1965273 - RNA, 19 nt, Artificial Sequence
  Description of Artificial Sequence: Synthetic oligonucleotide
  Antisense strand to SEQ ID NO: 1965272
uucacaguuaagcauuaaa

SEQ ID NO: 1965274 - RNA, 19 nt, Artificial Sequence
  Description of Artificial Sequence: Synthetic oligonucleotide
  Sense strand starting at position 2358 of SEQ ID NO: 1880414
ugaaguugucaugauugau

SEQ ID NO: 1965275 - RNA, 19 nt, Artificial Sequence
  Description of Artificial Sequence: Synthetic oligonucleotide
  Antisense strand to SEQ ID NO: 1965274
aucaaucaugacaacuuca

SEQ ID NO: 1965276 - RNA, 19 nt, Artificial Sequence
  Description of Artificial Sequence: Synthetic oligonucleotide
  Sense strand starting at position 2361 of SEQ ID NO: 1880414
aguugucaugauugauuag

SEQ ID NO: 1965277 - RNA, 19 nt, Artificial Sequence
  Description of Artificial Sequence: Synthetic oligonucleotide
  Antisense strand to SEQ ID NO: 1965276
cuaaucaaucaugacaacu

SEQ ID NO: 1965278 - RNA, 19 nt, Artificial Sequence
  Description of Artificial Sequence: Synthetic oligonucleotide
  Sense strand starting at position 2364 of SEQ ID NO: 1880414
ugucaugauugauuaggau

SEQ ID NO: 1965279 - RNA, 19 nt, Artificial Sequence
  Description of Artificial Sequence: Synthetic oligonucleotide
  Antisense strand to SEQ ID NO: 1965278
auccuaaucaaucaugaca

SEQ ID NO: 1965280 - RNA, 19 nt, Artificial Sequence
  Description of Artificial Sequence: Synthetic oligonucleotide
  Sense strand starting at position 2370 of SEQ ID NO: 1880414
gauugauuaggauggguuu

SEQ ID NO: 1965281 - RNA, 19 nt, Artificial Sequence
  Description of Artificial Sequence: Synthetic oligonucleotide
  Antisense strand to SEQ ID NO: 1965280
aaacccauccuaaucaauc

SEQ ID NO: 1965282 - RNA, 19 nt, Artificial Sequence
  Description of Artificial Sequence: Synthetic oligonucleotide
  Sense strand starting at position 2371 of SEQ ID NO: 1880414
auugauuaggauggguuua

SEQ ID NO: 1965283 - RNA, 19 nt, Artificial Sequence
  Description of Artificial Sequence: Synthetic oligonucleotide
  Antisense strand to SEQ ID NO: 1965282
uaaacccauccuaaucaau

SEQ ID NO: 1965284 - RNA, 19 nt, Artificial Sequence
  Description of Artificial Sequence: Synthetic oligonucleotide
  Sense strand starting at position 2372 of SEQ ID NO: 1880414
uugauuaggauggguuuaa

SEQ ID NO: 1965285 - RNA, 19 nt, Artificial Sequence
  Description of Artificial Sequence: Synthetic oligonucleotide
  Antisense strand to SEQ ID NO: 1965284
uuaaacccauccuaaucaa

SEQ ID NO: 1965286 - RNA, 19 nt, Artificial Sequence
  Description of Artificial Sequence: Synthetic oligonucleotide
  Sense strand starting at position 2395 of SEQ ID NO: 1880414
ggcuuuggucguuauuugu

SEQ ID NO: 1965287 - RNA, 19 nt, Artificial Sequence
  Description of Artificial Sequence: Synthetic oligonucleotide
  Antisense strand to SEQ ID NO: 1965286
acaaauaacgaccaaagcc

SEQ ID NO: 1965288 - RNA, 19 nt, Artificial Sequence
  Description of Artificial Sequence: Synthetic oligonucleotide
  Sense strand starting at position 2408 of SEQ ID NO: 1880414
auuuguugccauggucaga

SEQ ID NO: 1965289 - RNA, 19 nt, Artificial Sequence
  Description of Artificial Sequence: Synthetic oligonucleotide
  Antisense strand to SEQ ID NO: 1965288
ucugaccauggcaacaaau

SEQ ID NO: 1965290 - RNA, 19 nt, Artificial Sequence
  Description of Artificial Sequence: Synthetic oligonucleotide
  Sense strand starting at position 2411 of SEQ ID NO: 1880414
uguugccauggucagauaa

SEQ ID NO: 1965291 - RNA, 19 nt, Artificial Sequence
  Description of Artificial Sequence: Synthetic oligonucleotide
  Antisense strand to SEQ ID NO: 1965290
uuaucugaccauggcaaca

SEQ ID NO: 1965292 - RNA, 19 nt, Artificial Sequence
  Description of Artificial Sequence: Synthetic oligonucleotide
  Sense strand starting at position 2490 of SEQ ID NO: 1880414
aucagucagaguugcagaa

SEQ ID NO: 1965293 - RNA, 19 nt, Artificial Sequence
  Description of Artificial Sequence: Synthetic oligonucleotide
  Antisense strand to SEQ ID NO: 1965292
uucugcaacucugacugau

SEQ ID NO: 1965294 - RNA, 19 nt, Artificial Sequence
  Description of Artificial Sequence: Synthetic oligonucleotide
  Sense strand starting at position 2515 of SEQ ID NO: 1880414
cuaggaauucuccagagcu

SEQ ID NO: 1965295 - RNA, 19 nt, Artificial Sequence
  Description of Artificial Sequence: Synthetic oligonucleotide
  Antisense strand to SEQ ID NO: 1965294
agcucuggagaauuccuag

SEQ ID NO: 1965296 - RNA, 19 nt, Artificial Sequence
  Description of Artificial Sequence: Synthetic oligonucleotide
  Sense strand starting at position 2517 of SEQ ID NO: 1880414
aggaauucuccagagcuuu

SEQ ID NO: 1965297 - RNA, 19 nt, Artificial Sequence
  Description of Artificial Sequence: Synthetic oligonucleotide
  Antisense strand to SEQ ID NO: 1965296
aaagcucuggagaauuccu

SEQ ID NO: 1965298 - RNA, 19 nt, Artificial Sequence
  Description of Artificial Sequence: Synthetic oligonucleotide
  Sense strand starting at position 2757 of SEQ ID NO: 1880414
gaagacaagucucagauuu

SEQ ID NO: 1965299 - RNA, 19 nt, Artificial Sequence
  Description of Artificial Sequence: Synthetic oligonucleotide
  Antisense strand to SEQ ID NO: 1965298
aaaucugagacuugucuuc

SEQ ID NO: 1965300 - RNA, 19 nt, Artificial Sequence
  Description of Artificial Sequence: Synthetic oligonucleotide
  Sense strand starting at position 2765 of SEQ ID NO: 1880414
gucucagauuuguugaguc

SEQ ID NO: 1965301 - RNA, 19 nt, Artificial Sequence
  Description of Artificial Sequence: Synthetic oligonucleotide
  Antisense strand to SEQ ID NO: 1965300
gacucaacaaaucugagac

SEQ ID NO: 1965302 - RNA, 19 nt, Artificial Sequence
  Description of Artificial Sequence: Synthetic oligonucleotide
  Sense strand starting at position 2938 of SEQ ID NO: 1880414
gcauacugcccugauugga

SEQ ID NO: 1965303 - RNA, 19 nt, Artificial Sequence
  Description of Artificial Sequence: Synthetic oligonucleotide
  Antisense strand to SEQ ID NO: 1965302
uccaaucagggcaguaugc

SEQ ID NO: 1965304 - RNA, 19 nt, Artificial Sequence
  Description of Artificial Sequence: Synthetic oligonucleotide
  Sense strand starting at position 3168 of SEQ ID NO: 1880414
uaaugauacugaguguucu

SEQ ID NO: 1965305 - RNA, 19 nt, Artificial Sequence
  Description of Artificial Sequence: Synthetic oligonucleotide
  Antisense strand to SEQ ID NO: 1965304
agaacacucaguaucauua

SEQ ID NO: 1965306 - RNA, 19 nt, Artificial Sequence
  Description of Artificial Sequence: Synthetic oligonucleotide
  Sense strand starting at position 3172 of SEQ ID NO: 1880414
gauacugaguguucugauc

SEQ ID NO: 1965307 - RNA, 19 nt, Artificial Sequence
  Description of Artificial Sequence: Synthetic oligonucleotide
  Antisense strand to SEQ ID NO: 1965306
gaucagaacacucaguauc

SEQ ID NO: 1965308 - RNA, 19 nt, Artificial Sequence
  Description of Artificial Sequence: Synthetic oligonucleotide
  Sense strand starting at position 3434 of SEQ ID NO: 1880414
auuguuucucuagauucuu

SEQ ID NO: 1965309 - RNA, 19 nt, Artificial Sequence
  Description of Artificial Sequence: Synthetic oligonucleotide
  Antisense strand to SEQ ID NO: 1965308
aagaaucuagagaaacaau

SEQ ID NO: 1965310 - RNA, 19 nt, Artificial Sequence
  Description of Artificial Sequence: Synthetic oligonucleotide
  Sense strand starting at position 3446 of SEQ ID NO: 1880414
gauucuuuggagcauucua

SEQ ID NO: 1965311 - RNA, 19 nt, Artificial Sequence
  Description of Artificial Sequence: Synthetic oligonucleotide
  Antisense strand to SEQ ID NO: 1965310
uagaaugcuccaaagaauc

SEQ ID NO: 1965312 - RNA, 19 nt, Artificial Sequence
  Description of Artificial Sequence: Synthetic oligonucleotide
  Sense strand starting at position 3453 of SEQ ID NO: 1880414
uggagcauucuauguagac

SEQ ID NO: 1965313 - RNA, 19 nt, Artificial Sequence
  Description of Artificial Sequence: Synthetic oligonucleotide
  Antisense strand to SEQ ID NO: 1965312
gucuacauagaaugcucca

SEQ ID NO: 1965314 - RNA, 19 nt, Artificial Sequence
  Description of Artificial Sequence: Synthetic oligonucleotide
  Sense strand starting at position 3454 of SEQ ID NO: 1880414
ggagcauucuauguagaca

SEQ ID NO: 1965315 - RNA, 19 nt, Artificial Sequence
  Description of Artificial Sequence: Synthetic oligonucleotide
  Antisense strand to SEQ ID NO: 1965314
ugucuacauagaaugcucc

SEQ ID NO: 1965316 - RNA, 19 nt, Artificial Sequence
  Description of Artificial Sequence: Synthetic oligonucleotide
  Sense strand starting at position 3748 of SEQ ID NO: 1880414
aagaucuuguuaguuugaa

SEQ ID NO: 1965317 - RNA, 19 nt, Artificial Sequence
  Description of Artificial Sequence: Synthetic oligonucleotide
  Antisense strand to SEQ ID NO: 1965316
uucaaacuaacaagaucuu

SEQ ID NO: 1965318 - RNA, 19 nt, Artificial Sequence
  Description of Artificial Sequence: Synthetic oligonucleotide
  Sense strand starting at position 3749 of SEQ ID NO: 1880414
agaucuuguuaguuugaau

SEQ ID NO: 1965319 - RNA, 19 nt, Artificial Sequence
  Description of Artificial Sequence: Synthetic oligonucleotide
  Antisense strand to SEQ ID NO: 1965318
auucaaacuaacaagaucu

SEQ ID NO: 1965320 - RNA, 19 nt, Artificial Sequence
  Description of Artificial Sequence: Synthetic oligonucleotide
  Sense strand starting at position 346 of SEQ ID NO: 1880415
ucuauaaacgaguaagguu

SEQ ID NO: 1965321 - RNA, 19 nt, Artificial Sequence
  Description of Artificial Sequence: Synthetic oligonucleotide
  Antisense strand to SEQ ID NO: 1965320
aaccuuacucguuuauaga

SEQ ID NO: 1965322 - RNA, 19 nt, Artificial Sequence
  Description of Artificial Sequence: Synthetic oligonucleotide
  Sense strand starting at position 383 of SEQ ID NO: 1880415
uuggaaucuuguucucuca

SEQ ID NO: 1965323 - RNA, 19 nt, Artificial Sequence
  Description of Artificial Sequence: Synthetic oligonucleotide
  Antisense strand to SEQ ID NO: 1965322
ugagagaacaagauuccaa

SEQ ID NO: 1965324 - RNA, 19 nt, Artificial Sequence
  Description of Artificial Sequence: Synthetic oligonucleotide
  Sense strand starting at position 653 of SEQ ID NO: 1880415
uuggaagccaaauguguua

SEQ ID NO: 1965325 - RNA, 19 nt, Artificial Sequence
  Description of Artificial Sequence: Synthetic oligonucleotide
  Antisense strand to SEQ ID NO: 1965324
uaacacauuuggcuuccaa

SEQ ID NO: 1965326 - RNA, 19 nt, Artificial Sequence
  Description of Artificial Sequence: Synthetic oligonucleotide
  Sense strand starting at position 747 of SEQ ID NO: 1880415
gggagcuggucacuuacau

SEQ ID NO: 1965327 - RNA, 19 nt, Artificial Sequence
  Description of Artificial Sequence: Synthetic oligonucleotide
  Antisense strand to SEQ ID NO: 1965326
auguaagugaccagcuccc

SEQ ID NO: 1965328 - RNA, 19 nt, Artificial Sequence
  Description of Artificial Sequence: Synthetic oligonucleotide
  Sense strand starting at position 769 of SEQ ID NO: 1880415
ggcggcauccuaagucgau

SEQ ID NO: 1965329 - RNA, 19 nt, Artificial Sequence
  Description of Artificial Sequence: Synthetic oligonucleotide
  Antisense strand to SEQ ID NO: 1965328
aucgacuuaggaugccgcc

SEQ ID NO: 1965330 - RNA, 19 nt, Artificial Sequence
  Description of Artificial Sequence: Synthetic oligonucleotide
  Sense strand starting at position 884 of SEQ ID NO: 1880415
ggugcugacucauuauuaa

SEQ ID NO: 1965331 - RNA, 19 nt, Artificial Sequence
  Description of Artificial Sequence: Synthetic oligonucleotide
  Antisense strand to SEQ ID NO: 1965330
uuaauaaugagucagcacc

SEQ ID NO: 1965332 - RNA, 19 nt, Artificial Sequence
  Description of Artificial Sequence: Synthetic oligonucleotide
  Sense strand starting at position 1080 of SEQ ID NO: 1880415
uuuacuugacaguaaagcu

SEQ ID NO: 1965333 - RNA, 19 nt, Artificial Sequence
  Description of Artificial Sequence: Synthetic oligonucleotide
  Antisense strand to SEQ ID NO: 1965332
agcuuuacugucaaguaaa

SEQ ID NO: 1965334 - RNA, 19 nt, Artificial Sequence
  Description of Artificial Sequence: Synthetic oligonucleotide
  Sense strand starting at position 1348 of SEQ ID NO: 1880415
ugguauuucucacacugaa

SEQ ID NO: 1965335 - RNA, 19 nt, Artificial Sequence
  Description of Artificial Sequence: Synthetic oligonucleotide
  Antisense strand to SEQ ID NO: 1965334
uucagugugagaaauacca

SEQ ID NO: 1965336 - RNA, 19 nt, Artificial Sequence
  Description of Artificial Sequence: Synthetic oligonucleotide
  Sense strand starting at position 2257 of SEQ ID NO: 1880415
caugaacuuugugugcauu

SEQ ID NO: 1965337 - RNA, 19 nt, Artificial Sequence
  Description of Artificial Sequence: Synthetic oligonucleotide
  Antisense strand to SEQ ID NO: 1965336
aaugcacacaaaguucaug

SEQ ID NO: 1965338 - RNA, 19 nt, Artificial Sequence
  Description of Artificial Sequence: Synthetic oligonucleotide
  Sense strand starting at position 2258 of SEQ ID NO: 1880415
augaacuuugugugcauuu

SEQ ID NO: 1965339 - RNA, 19 nt, Artificial Sequence
  Description of Artificial Sequence: Synthetic oligonucleotide
  Antisense strand to SEQ ID NO: 1965338
aaaugcacacaaaguucau

SEQ ID NO: 1965340 - RNA, 19 nt, Artificial Sequence
  Description of Artificial Sequence: Synthetic oligonucleotide
  Sense strand starting at position 2308 of SEQ ID NO: 1880415
gugcuacaggcucauguau

SEQ ID NO: 1965341 - RNA, 19 nt, Artificial Sequence
  Description of Artificial Sequence: Synthetic oligonucleotide
  Antisense strand to SEQ ID NO: 1965340
auacaugagccuguagcac

SEQ ID NO: 1965342 - RNA, 19 nt, Artificial Sequence
  Description of Artificial Sequence: Synthetic oligonucleotide
  Sense strand starting at position 2314 of SEQ ID NO: 1880415
caggcucauguaugaaauu

SEQ ID NO: 1965343 - RNA, 19 nt, Artificial Sequence
  Description of Artificial Sequence: Synthetic oligonucleotide
  Antisense strand to SEQ ID NO: 1965342
aauuucauacaugagccug

SEQ ID NO: 1965344 - RNA, 19 nt, Artificial Sequence
  Description of Artificial Sequence: Synthetic oligonucleotide
  Sense strand starting at position 2362 of SEQ ID NO: 1880415
agagaagcauaagauauuu

SEQ ID NO: 1965345 - RNA, 19 nt, Artificial Sequence
  Description of Artificial Sequence: Synthetic oligonucleotide
  Antisense strand to SEQ ID NO: 1965344
aaauaucuuaugcuucucu

SEQ ID NO: 1965346 - RNA, 19 nt, Artificial Sequence
  Description of Artificial Sequence: Synthetic oligonucleotide
  Sense strand starting at position 2402 of SEQ ID NO: 1880415
gauuuacuuugcucuggua

SEQ ID NO: 1965347 - RNA, 19 nt, Artificial Sequence
  Description of Artificial Sequence: Synthetic oligonucleotide
  Antisense strand to SEQ ID NO: 1965346
uaccagagcaaaguaaauc

SEQ ID NO: 1965348 - RNA, 19 nt, Artificial Sequence
  Description of Artificial Sequence: Synthetic oligonucleotide
  Sense strand starting at position 2404 of SEQ ID NO: 1880415
uuuacuuugcucugguaau

SEQ ID NO: 1965349 - RNA, 19 nt, Artificial Sequence
  Description of Artificial Sequence: Synthetic oligonucleotide
  Antisense strand to SEQ ID NO: 1965348
auuaccagagcaaaguaaa

SEQ ID NO: 1965350 - RNA, 19 nt, Artificial Sequence
  Description of Artificial Sequence: Synthetic oligonucleotide
  Sense strand starting at position 2521 of SEQ ID NO: 1880415
guucgugcccuguuuauaa

SEQ ID NO: 1965351 - RNA, 19 nt, Artificial Sequence
  Description of Artificial Sequence: Synthetic oligonucleotide
  Antisense strand to SEQ ID NO: 1965350
uuauaaacagggcacgaac

SEQ ID NO: 1965352 - RNA, 19 nt, Artificial Sequence
  Description of Artificial Sequence: Synthetic oligonucleotide
  Sense strand starting at position 2528 of SEQ ID NO: 1880415
cccuguuuauaaguuuaca

SEQ ID NO: 1965353 - RNA, 19 nt, Artificial Sequence
  Description of Artificial Sequence: Synthetic oligonucleotide
  Antisense strand to SEQ ID NO: 1965352
uguaaacuuauaaacaggg

SEQ ID NO: 1965354 - RNA, 19 nt, Artificial Sequence
  Description of Artificial Sequence: Synthetic oligonucleotide
  Sense strand starting at position 2645 of SEQ ID NO: 1880415
ucuuaauaauuguuggaga

SEQ ID NO: 1965355 - RNA, 19 nt, Artificial Sequence
  Description of Artificial Sequence: Synthetic oligonucleotide
  Antisense strand to SEQ ID NO: 1965354
ucuccaacaauuauuaaga

SEQ ID NO: 1965356 - RNA, 19 nt, Artificial Sequence
  Description of Artificial Sequence: Synthetic oligonucleotide
  Sense strand starting at position 2653 of SEQ ID NO: 1880415
auuguuggagaauguuuau

SEQ ID NO: 1965357 - RNA, 19 nt, Artificial Sequence
  Description of Artificial Sequence: Synthetic oligonucleotide
  Antisense strand to SEQ ID NO: 1965356
auaaacauucuccaacaau

SEQ ID NO: 1965358 - RNA, 19 nt, Artificial Sequence
  Description of Artificial Sequence: Synthetic oligonucleotide
  Sense strand starting at position 2656 of SEQ ID NO: 1880415
guuggagaauguuuaucug

SEQ ID NO: 1965359 - RNA, 19 nt, Artificial Sequence
  Description of Artificial Sequence: Synthetic oligonucleotide
  Antisense strand to SEQ ID NO: 1965358
cagauaaacauucuccaac

SEQ ID NO: 1965360 - RNA, 19 nt, Artificial Sequence
  Description of Artificial Sequence: Synthetic oligonucleotide
  Sense strand starting at position 2659 of SEQ ID NO: 1880415
ggagaauguuuaucugcaa

SEQ ID NO: 1965361 - RNA, 19 nt, Artificial Sequence
  Description of Artificial Sequence: Synthetic oligonucleotide
  Antisense strand to SEQ ID NO: 1965360
uugcagauaaacauucucc

SEQ ID NO: 1965362 - RNA, 19 nt, Artificial Sequence
  Description of Artificial Sequence: Synthetic oligonucleotide
  Sense strand starting at position 2660 of SEQ ID NO: 1880415
gagaauguuuaucugcaag

SEQ ID NO: 1965363 - RNA, 19 nt, Artificial Sequence
  Description of Artificial Sequence: Synthetic oligonucleotide
  Antisense strand to SEQ ID NO: 1965362
cuugcagauaaacauucuc

SEQ ID NO: 1965364 - RNA, 19 nt, Artificial Sequence
  Description of Artificial Sequence: Synthetic oligonucleotide
  Sense strand starting at position 2666 of SEQ ID NO: 1880415
guuuaucugcaagaaucaa

SEQ ID NO: 1965365 - RNA, 19 nt, Artificial Sequence
  Description of Artificial Sequence: Synthetic oligonucleotide
  Antisense strand to SEQ ID NO: 1965364
uugauucuugcagauaaac

SEQ ID NO: 1965366 - RNA, 19 nt, Artificial Sequence
  Description of Artificial Sequence: Synthetic oligonucleotide
  Sense strand starting at position 2782 of SEQ ID NO: 1880415
gugagcagaauccauguga

SEQ ID NO: 1965367 - RNA, 19 nt, Artificial Sequence
  Description of Artificial Sequence: Synthetic oligonucleotide
  Antisense strand to SEQ ID NO: 1965366
ucacauggauucugcucac

SEQ ID NO: 1965368 - RNA, 19 nt, Artificial Sequence
  Description of Artificial Sequence: Synthetic oligonucleotide
  Sense strand starting at position 2804 of SEQ ID NO: 1880415
uuagcagcugcucaagaaa

SEQ ID NO: 1965369 - RNA, 19 nt, Artificial Sequence
  Description of Artificial Sequence: Synthetic oligonucleotide
  Antisense strand to SEQ ID NO: 1965368
uuucuugagcagcugcuaa

SEQ ID NO: 1965370 - RNA, 19 nt, Artificial Sequence
  Description of Artificial Sequence: Synthetic oligonucleotide
  Sense strand starting at position 2958 of SEQ ID NO: 1880415
gauauagacuuagaguaaa

SEQ ID NO: 1965371 - RNA, 19 nt, Artificial Sequence
  Description of Artificial Sequence: Synthetic oligonucleotide
  Antisense strand to SEQ ID NO: 1965370
uuuacucuaagucuauauc

SEQ ID NO: 1965372 - RNA, 19 nt, Artificial Sequence
  Description of Artificial Sequence: Synthetic oligonucleotide
  Sense strand starting at position 3027 of SEQ ID NO: 1880415
cuagauuuaucuuagggaa

SEQ ID NO: 1965373 - RNA, 19 nt, Artificial Sequence
  Description of Artificial Sequence: Synthetic oligonucleotide
  Antisense strand to SEQ ID NO: 1965372
uucccuaagauaaaucuag

SEQ ID NO: 1965374 - RNA, 19 nt, Artificial Sequence
  Description of Artificial Sequence: Synthetic oligonucleotide
  Sense strand starting at position 3127 of SEQ ID NO: 1880415
cggugaguucccuaugaaa

SEQ ID NO: 1965375 - RNA, 19 nt, Artificial Sequence
  Description of Artificial Sequence: Synthetic oligonucleotide
  Antisense strand to SEQ ID NO: 1965374
uuucauagggaacucaccg

SEQ ID NO: 1965376 - RNA, 19 nt, Artificial Sequence
  Description of Artificial Sequence: Synthetic oligonucleotide
  Sense strand starting at position 3129 of SEQ ID NO: 1880415
gugaguucccuaugaaagu

SEQ ID NO: 1965377 - RNA, 19 nt, Artificial Sequence
  Description of Artificial Sequence: Synthetic oligonucleotide
  Antisense strand to SEQ ID NO: 1965376
acuuucauagggaacucac

SEQ ID NO: 1965378 - RNA, 19 nt, Artificial Sequence
  Description of Artificial Sequence: Synthetic oligonucleotide
  Sense strand starting at position 3252 of SEQ ID NO: 1880415
uuaggaaugucuguauugu

SEQ ID NO: 1965379 - RNA, 19 nt, Artificial Sequence
  Description of Artificial Sequence: Synthetic oligonucleotide
  Antisense strand to SEQ ID NO: 1965378
acaauacagacauuccuaa

SEQ ID NO: 1965380 - RNA, 19 nt, Artificial Sequence
  Description of Artificial Sequence: Synthetic oligonucleotide
  Sense strand starting at position 3253 of SEQ ID NO: 1880415
uaggaaugucuguauugug

SEQ ID NO: 1965381 - RNA, 19 nt, Artificial Sequence
  Description of Artificial Sequence: Synthetic oligonucleotide
  Antisense strand to SEQ ID NO: 1965380
cacaauacagacauuccua

SEQ ID NO: 1965382 - RNA, 19 nt, Artificial Sequence
  Description of Artificial Sequence: Synthetic oligonucleotide
  Sense strand starting at position 3443 of SEQ ID NO: 1880415
gaggauguggguuguuaug

SEQ ID NO: 1965383 - RNA, 19 nt, Artificial Sequence
  Description of Artificial Sequence: Synthetic oligonucleotide
  Antisense strand to SEQ ID NO: 1965382
cauaacaacccacauccuc

SEQ ID NO: 1965384 - RNA, 19 nt, Artificial Sequence
  Description of Artificial Sequence: Synthetic oligonucleotide
  Sense strand starting at position 3445 of SEQ ID NO: 1880415
ggauguggguuguuauguu

SEQ ID NO: 1965385 - RNA, 19 nt, Artificial Sequence
  Description of Artificial Sequence: Synthetic oligonucleotide
  Antisense strand to SEQ ID NO: 1965384
aacauaacaacccacaucc

SEQ ID NO: 1965386 - RNA, 19 nt, Artificial Sequence
  Description of Artificial Sequence: Synthetic oligonucleotide
  Sense strand starting at position 3461 of SEQ ID NO: 1880415
guuuguucucuauguggaa

SEQ ID NO: 1965387 - RNA, 19 nt, Artificial Sequence
  Description of Artificial Sequence: Synthetic oligonucleotide
  Antisense strand to SEQ ID NO: 1965386
uuccacauagagaacaaac

SEQ ID NO: 1965388 - RNA, 19 nt, Artificial Sequence
  Description of Artificial Sequence: Synthetic oligonucleotide
  Sense strand starting at position 3462 of SEQ ID NO: 1880415
uuuguucucuauguggaaa

SEQ ID NO: 1965389 - RNA, 19 nt, Artificial Sequence
  Description of Artificial Sequence: Synthetic oligonucleotide
  Antisense strand to SEQ ID NO: 1965388
uuuccacauagagaacaaa

SEQ ID NO: 1965390 - RNA, 19 nt, Artificial Sequence
  Description of Artificial Sequence: Synthetic oligonucleotide
  Sense strand starting at position 3463 of SEQ ID NO: 1880415
uuguucucuauguggaaag

SEQ ID NO: 1965391 - RNA, 19 nt, Artificial Sequence
  Description of Artificial Sequence: Synthetic oligonucleotide
  Antisense strand to SEQ ID NO: 1965390
cuuuccacauagagaacaa

SEQ ID NO: 1965392 - RNA, 19 nt, Artificial Sequence
  Description of Artificial Sequence: Synthetic oligonucleotide
  Sense strand starting at position 3531 of SEQ ID NO: 1880415
auuaauuccuaggagaacu

SEQ ID NO: 1965393 - RNA, 19 nt, Artificial Sequence
  Description of Artificial Sequence: Synthetic oligonucleotide
  Antisense strand to SEQ ID NO: 1965392
aguucuccuaggaauuaau

SEQ ID NO: 1965394 - RNA, 19 nt, Artificial Sequence
  Description of Artificial Sequence: Synthetic oligonucleotide
  Sense strand starting at position 3688 of SEQ ID NO: 1880415
aggagccuucuggaucauu

SEQ ID NO: 1965395 - RNA, 19 nt, Artificial Sequence
  Description of Artificial Sequence: Synthetic oligonucleotide
  Antisense strand to SEQ ID NO: 1965394
aaugauccagaaggcuccu

SEQ ID NO: 1965396 - RNA, 19 nt, Artificial Sequence
  Description of Artificial Sequence: Synthetic oligonucleotide
  Sense strand starting at position 3848 of SEQ ID NO: 1880415
cccuucucauuuggaaaug

SEQ ID NO: 1965397 - RNA, 19 nt, Artificial Sequence
  Description of Artificial Sequence: Synthetic oligonucleotide
  Antisense strand to SEQ ID NO: 1965396
cauuuccaaaugagaaggg

SEQ ID NO: 1965398 - RNA, 19 nt, Artificial Sequence
  Description of Artificial Sequence: Synthetic oligonucleotide
  Sense strand starting at position 3859 of SEQ ID NO: 1880415
uggaaaugggcuggaaagu

SEQ ID NO: 1965399 - RNA, 19 nt, Artificial Sequence
  Description of Artificial Sequence: Synthetic oligonucleotide
  Antisense strand to SEQ ID NO: 1965398
acuuuccagcccauuucca

SEQ ID NO: 1965400 - RNA, 19 nt, Artificial Sequence
  Description of Artificial Sequence: Synthetic oligonucleotide
  Sense strand starting at position 73 of SEQ ID NO: 1880416
gugucagaacccuauggga

SEQ ID NO: 1965401 - RNA, 19 nt, Artificial Sequence
  Description of Artificial Sequence: Synthetic oligonucleotide
  Antisense strand to SEQ ID NO: 1965400
ucccauaggguucugacac

SEQ ID NO: 1965402 - RNA, 19 nt, Artificial Sequence
  Description of Artificial Sequence: Synthetic oligonucleotide
  Sense strand starting at position 93 of SEQ ID NO: 1880416
agcugaguccaugaccaga

SEQ ID NO: 1965403 - RNA, 19 nt, Artificial Sequence
  Description of Artificial Sequence: Synthetic oligonucleotide
  Antisense strand to SEQ ID NO: 1965402
ucuggucauggacucagcu

SEQ ID NO: 1965404 - RNA, 19 nt, Artificial Sequence
  Description of Artificial Sequence: Synthetic oligonucleotide
  Sense strand starting at position 95 of SEQ ID NO: 1880416
cugaguccaugaccagaau

SEQ ID NO: 1965405 - RNA, 19 nt, Artificial Sequence
  Description of Artificial Sequence: Synthetic oligonucleotide
  Antisense strand to SEQ ID NO: 1965404
auucuggucauggacucag

SEQ ID NO: 1965406 - RNA, 19 nt, Artificial Sequence
  Description of Artificial Sequence: Synthetic oligonucleotide
  Sense strand starting at position 345 of SEQ ID NO: 1880416
gaggcuugacuguauuaac

SEQ ID NO: 1965407 - RNA, 19 nt, Artificial Sequence
  Description of Artificial Sequence: Synthetic oligonucleotide
  Antisense strand to SEQ ID NO: 1965406
guuaauacagucaagccuc

SEQ ID NO: 1965408 - RNA, 19 nt, Artificial Sequence
  Description of Artificial Sequence: Synthetic oligonucleotide
  Sense strand starting at position 472 of SEQ ID NO: 1880416
acuuacucccuuggauaga

SEQ ID NO: 1965409 - RNA, 19 nt, Artificial Sequence
  Description of Artificial Sequence: Synthetic oligonucleotide
  Antisense strand to SEQ ID NO: 1965408
ucuauccaagggaguaagu

SEQ ID NO: 1965410 - RNA, 19 nt, Artificial Sequence
  Description of Artificial Sequence: Synthetic oligonucleotide
  Sense strand starting at position 512 of SEQ ID NO: 1880416
uguggaauuccacacugua

SEQ ID NO: 1965411 - RNA, 19 nt, Artificial Sequence
  Description of Artificial Sequence: Synthetic oligonucleotide
  Antisense strand to SEQ ID NO: 1965410
uacaguguggaauuccaca

SEQ ID NO: 1965412 - RNA, 19 nt, Artificial Sequence
  Description of Artificial Sequence: Synthetic oligonucleotide
  Sense strand starting at position 573 of SEQ ID NO: 1880416
gcuuauuuaggcugaaggu

SEQ ID NO: 1965413 - RNA, 19 nt, Artificial Sequence
  Description of Artificial Sequence: Synthetic oligonucleotide
  Antisense strand to SEQ ID NO: 1965412
accuucagccuaaauaagc

SEQ ID NO: 1965414 - RNA, 19 nt, Artificial Sequence
  Description of Artificial Sequence: Synthetic oligonucleotide
  Sense strand starting at position 642 of SEQ ID NO: 1880416
auuggugucagaugacaag

SEQ ID NO: 1965415 - RNA, 19 nt, Artificial Sequence
  Description of Artificial Sequence: Synthetic oligonucleotide
  Antisense strand to SEQ ID NO: 1965414
cuugucaucugacaccaau

SEQ ID NO: 1965416 - RNA, 19 nt, Artificial Sequence
  Description of Artificial Sequence: Synthetic oligonucleotide
  Sense strand starting at position 734 of SEQ ID NO: 1880416
uggccuuuacuuuaggaaa

SEQ ID NO: 1965417 - RNA, 19 nt, Artificial Sequence
  Description of Artificial Sequence: Synthetic oligonucleotide
  Antisense strand to SEQ ID NO: 1965416
uuuccuaaaguaaaggcca

SEQ ID NO: 1965418 - RNA, 19 nt, Artificial Sequence
  Description of Artificial Sequence: Synthetic oligonucleotide
  Sense strand starting at position 800 of SEQ ID NO: 1880416
guuacuauucgcccuuguu

SEQ ID NO: 1965419 - RNA, 19 nt, Artificial Sequence
  Description of Artificial Sequence: Synthetic oligonucleotide
  Antisense strand to SEQ ID NO: 1965418
aacaagggcgaauaguaac

SEQ ID NO: 1965420 - RNA, 19 nt, Artificial Sequence
  Description of Artificial Sequence: Synthetic oligonucleotide
  Sense strand starting at position 895 of SEQ ID NO: 1880416
gucacuuguggguagaaac

SEQ ID NO: 1965421 - RNA, 19 nt, Artificial Sequence
  Description of Artificial Sequence: Synthetic oligonucleotide
  Antisense strand to SEQ ID NO: 1965420
guuucuacccacaagugac

SEQ ID NO: 1965422 - RNA, 19 nt, Artificial Sequence
  Description of Artificial Sequence: Synthetic oligonucleotide
  Sense strand starting at position 905 of SEQ ID NO: 1880416
gguagaaacauaugguuua

SEQ ID NO: 1965423 - RNA, 19 nt, Artificial Sequence
  Description of Artificial Sequence: Synthetic oligonucleotide
  Antisense strand to SEQ ID NO: 1965422
uaaaccauauguuucuacc

SEQ ID NO: 1965424 - RNA, 19 nt, Artificial Sequence
  Description of Artificial Sequence: Synthetic oligonucleotide
  Sense strand starting at position 918 of SEQ ID NO: 1880416
gguuuacaaauggguugau

SEQ ID NO: 1965425 - RNA, 19 nt, Artificial Sequence
  Description of Artificial Sequence: Synthetic oligonucleotide
  Antisense strand to SEQ ID NO: 1965424
aucaacccauuuguaaacc

SEQ ID NO: 1965426 - RNA, 19 nt, Artificial Sequence
  Description of Artificial Sequence: Synthetic oligonucleotide
  Sense strand starting at position 921 of SEQ ID NO: 1880416
uuacaaauggguugaugau

SEQ ID NO: 1965427 - RNA, 19 nt, Artificial Sequence
  Description of Artificial Sequence: Synthetic oligonucleotide
  Antisense strand to SEQ ID NO: 1965426
aucaucaacccauuuguaa

SEQ ID NO: 1965428 - RNA, 19 nt, Artificial Sequence
  Description of Artificial Sequence: Synthetic oligonucleotide
  Sense strand starting at position 1320 of SEQ ID NO: 1880416
agaagaaucugucucucca

SEQ ID NO: 1965429 - RNA, 19 nt, Artificial Sequence
  Description of Artificial Sequence: Synthetic oligonucleotide
  Antisense strand to SEQ ID NO: 1965428
uggagagacagauucuucu

SEQ ID NO: 1965430 - RNA, 19 nt, Artificial Sequence
  Description of Artificial Sequence: Synthetic oligonucleotide
  Sense strand starting at position 1491 of SEQ ID NO: 1880416
gaguaagacuguuccucaa

SEQ ID NO: 1965431 - RNA, 19 nt, Artificial Sequence
  Description of Artificial Sequence: Synthetic oligonucleotide
  Antisense strand to SEQ ID NO: 1965430
uugaggaacagucuuacuc

SEQ ID NO: 1965432 - RNA, 19 nt, Artificial Sequence
  Description of Artificial Sequence: Synthetic oligonucleotide
  Sense strand starting at position 2113 of SEQ ID NO: 1880416
agccuaauccucuaagguu

SEQ ID NO: 1965433 - RNA, 19 nt, Artificial Sequence
  Description of Artificial Sequence: Synthetic oligonucleotide
  Antisense strand to SEQ ID NO: 1965432
aaccuuagaggauuaggcu

SEQ ID NO: 1965434 - RNA, 19 nt, Artificial Sequence
  Description of Artificial Sequence: Synthetic oligonucleotide
  Sense strand starting at position 2202 of SEQ ID NO: 1880416
uauggacaucagugauuga

SEQ ID NO: 1965435 - RNA, 19 nt, Artificial Sequence
  Description of Artificial Sequence: Synthetic oligonucleotide
  Antisense strand to SEQ ID NO: 1965434
ucaaucacugauguccaua

SEQ ID NO: 1965436 - RNA, 19 nt, Artificial Sequence
  Description of Artificial Sequence: Synthetic oligonucleotide
  Sense strand starting at position 2205 of SEQ ID NO: 1880416
ggacaucagugauugacac

SEQ ID NO: 1965437 - RNA, 19 nt, Artificial Sequence
  Description of Artificial Sequence: Synthetic oligonucleotide
  Antisense strand to SEQ ID NO: 1965436
gugucaaucacugaugucc

SEQ ID NO: 1965438 - RNA, 19 nt, Artificial Sequence
  Description of Artificial Sequence: Synthetic oligonucleotide
  Sense strand starting at position 2223 of SEQ ID NO: 1880416
cccugauuguacuuagaau

SEQ ID NO: 1965439 - RNA, 19 nt, Artificial Sequence
  Description of Artificial Sequence: Synthetic oligonucleotide
  Antisense strand to SEQ ID NO: 1965438
auucuaaguacaaucaggg

SEQ ID NO: 1965440 - RNA, 19 nt, Artificial Sequence
  Description of Artificial Sequence: Synthetic oligonucleotide
  Sense strand starting at position 2341 of SEQ ID NO: 1880416
ccaagcucuccagaugagu

SEQ ID NO: 1965441 - RNA, 19 nt, Artificial Sequence
  Description of Artificial Sequence: Synthetic oligonucleotide
  Antisense strand to SEQ ID NO: 1965440
acucaucuggagagcuugg

SEQ ID NO: 1965442 - RNA, 19 nt, Artificial Sequence
  Description of Artificial Sequence: Synthetic oligonucleotide
  Sense strand starting at position 2418 of SEQ ID NO: 1880416
agcugucucaggcaggaaa

SEQ ID NO: 1965443 - RNA, 19 nt, Artificial Sequence
  Description of Artificial Sequence: Synthetic oligonucleotide
  Antisense strand to SEQ ID NO: 1965442
uuuccugccugagacagcu

SEQ ID NO: 1965444 - RNA, 19 nt, Artificial Sequence
  Description of Artificial Sequence: Synthetic oligonucleotide
  Sense strand starting at position 2432 of SEQ ID NO: 1880416
ggaaauguagaauggcagu

SEQ ID NO: 1965445 - RNA, 19 nt, Artificial Sequence
  Description of Artificial Sequence: Synthetic oligonucleotide
  Antisense strand to SEQ ID NO: 1965444
acugccauucuacauuucc

SEQ ID NO: 1965446 - RNA, 19 nt, Artificial Sequence
  Description of Artificial Sequence: Synthetic oligonucleotide
  Sense strand starting at position 2456 of SEQ ID NO: 1880416
cuguuagcccuggagaaga

SEQ ID NO: 1965447 - RNA, 19 nt, Artificial Sequence
  Description of Artificial Sequence: Synthetic oligonucleotide
  Antisense strand to SEQ ID NO: 1965446
ucuucuccagggcuaacag

SEQ ID NO: 1965448 - RNA, 19 nt, Artificial Sequence
  Description of Artificial Sequence: Synthetic oligonucleotide
  Sense strand starting at position 2606 of SEQ ID NO: 1880416
uaugauggucaacggagaa

SEQ ID NO: 1965449 - RNA, 19 nt, Artificial Sequence
  Description of Artificial Sequence: Synthetic oligonucleotide
  Antisense strand to SEQ ID NO: 1965448
uucuccguugaccaucaua

SEQ ID NO: 1965450 - RNA, 19 nt, Artificial Sequence
  Description of Artificial Sequence: Synthetic oligonucleotide
  Sense strand starting at position 2667 of SEQ ID NO: 1880416
ggcaaugagccagaacucu

SEQ ID NO: 1965451 - RNA, 19 nt, Artificial Sequence
  Description of Artificial Sequence: Synthetic oligonucleotide
  Antisense strand to SEQ ID NO: 1965450
agaguucuggcucauugcc

SEQ ID NO: 1965452 - RNA, 19 nt, Artificial Sequence
  Description of Artificial Sequence: Synthetic oligonucleotide
  Sense strand starting at position 2766 of SEQ ID NO: 1880416
aaagucagcgucuggauuu

SEQ ID NO: 1965453 - RNA, 19 nt, Artificial Sequence
  Description of Artificial Sequence: Synthetic oligonucleotide
  Antisense strand to SEQ ID NO: 1965452
aaauccagacgcugacuuu

SEQ ID NO: 1965454 - RNA, 19 nt, Artificial Sequence
  Description of Artificial Sequence: Synthetic oligonucleotide
  Sense strand starting at position 2979 of SEQ ID NO: 1880416
aauaguucuugauuaugga

SEQ ID NO: 1965455 - RNA, 19 nt, Artificial Sequence
  Description of Artificial Sequence: Synthetic oligonucleotide
  Antisense strand to SEQ ID NO: 1965454
uccauaaucaagaacuauu

SEQ ID NO: 1965456 - RNA, 19 nt, Artificial Sequence
  Description of Artificial Sequence: Synthetic oligonucleotide
  Sense strand starting at position 3000 of SEQ ID NO: 1880416
uaauuauggccuuggaaga

SEQ ID NO: 1965457 - RNA, 19 nt, Artificial Sequence
  Description of Artificial Sequence: Synthetic oligonucleotide
  Antisense strand to SEQ ID NO: 1965456
ucuuccaaggccauaauua

SEQ ID NO: 1965458 - RNA, 19 nt, Artificial Sequence
  Description of Artificial Sequence: Synthetic oligonucleotide
  Sense strand starting at position 3001 of SEQ ID NO: 1880416
aauuauggccuuggaagaa

SEQ ID NO: 1965459 - RNA, 19 nt, Artificial Sequence
  Description of Artificial Sequence: Synthetic oligonucleotide
  Antisense strand to SEQ ID NO: 1965458
uucuuccaaggccauaauu

SEQ ID NO: 1965460 - RNA, 19 nt, Artificial Sequence
  Description of Artificial Sequence: Synthetic oligonucleotide
  Sense strand starting at position 3022 of SEQ ID NO: 1880416
cuguuuauauaagcaagaa

SEQ ID NO: 1965461 - RNA, 19 nt, Artificial Sequence
  Description of Artificial Sequence: Synthetic oligonucleotide
  Antisense strand to SEQ ID NO: 1965460
uucuugcuuauauaaacag

SEQ ID NO: 1965462 - RNA, 19 nt, Artificial Sequence
  Description of Artificial Sequence: Synthetic oligonucleotide
  Sense strand starting at position 3278 of SEQ ID NO: 1880416
uuccgaauuuaugaagaaa

SEQ ID NO: 1965463 - RNA, 19 nt, Artificial Sequence
  Description of Artificial Sequence: Synthetic oligonucleotide
  Antisense strand to SEQ ID NO: 1965462
uuucuucauaaauucggaa

SEQ ID NO: 1965464 - RNA, 19 nt, Artificial Sequence
  Description of Artificial Sequence: Synthetic oligonucleotide
  Sense strand starting at position 3504 of SEQ ID NO: 1880416
ccuucuucccugggaugga

SEQ ID NO: 1965465 - RNA, 19 nt, Artificial Sequence
  Description of Artificial Sequence: Synthetic oligonucleotide
  Antisense strand to SEQ ID NO: 1965464
uccaucccagggaagaagg

SEQ ID NO: 1965466 - RNA, 19 nt, Artificial Sequence
  Description of Artificial Sequence: Synthetic oligonucleotide
  Sense strand starting at position 3731 of SEQ ID NO: 1880416
agaacaagaguuuguccaa

SEQ ID NO: 1965467 - RNA, 19 nt, Artificial Sequence
  Description of Artificial Sequence: Synthetic oligonucleotide
  Antisense strand to SEQ ID NO: 1965466
uuggacaaacucuuguucu

SEQ ID NO: 1965468 - RNA, 19 nt, Artificial Sequence
  Description of Artificial Sequence: Synthetic oligonucleotide
  Sense strand starting at position 3732 of SEQ ID NO: 1880416
gaacaagaguuuguccaac

SEQ ID NO: 1965469 - RNA, 19 nt, Artificial Sequence
  Description of Artificial Sequence: Synthetic oligonucleotide
  Antisense strand to SEQ ID NO: 1965468
guuggacaaacucuuguuc

SEQ ID NO: 1965470 - RNA, 19 nt, Artificial Sequence
  Description of Artificial Sequence: Synthetic oligonucleotide
  Sense strand starting at position 3734 of SEQ ID NO: 1880416
acaagaguuuguccaacaa

SEQ ID NO: 1965471 - RNA, 19 nt, Artificial Sequence
  Description of Artificial Sequence: Synthetic oligonucleotide
  Antisense strand to SEQ ID NO: 1965470
uuguuggacaaacucuugu

SEQ ID NO: 1965472 - RNA, 19 nt, Artificial Sequence
  Description of Artificial Sequence: Synthetic oligonucleotide
  Sense strand starting at position 3738 of SEQ ID NO: 1880416
gaguuuguccaacaacuga

SEQ ID NO: 1965473 - RNA, 19 nt, Artificial Sequence
  Description of Artificial Sequence: Synthetic oligonucleotide
  Antisense strand to SEQ ID NO: 1965472
ucaguuguuggacaaacuc

SEQ ID NO: 1965474 - RNA, 19 nt, Artificial Sequence
  Description of Artificial Sequence: Synthetic oligonucleotide
  Sense strand starting at position 3781 of SEQ ID NO: 1880416
uggaaaucuauuugugugu

SEQ ID NO: 1965475 - RNA, 19 nt, Artificial Sequence
  Description of Artificial Sequence: Synthetic oligonucleotide
  Antisense strand to SEQ ID NO: 1965474
acacacaaauagauuucca

SEQ ID NO: 1965476 - RNA, 19 nt, Artificial Sequence
  Description of Artificial Sequence: Synthetic oligonucleotide
  Sense strand starting at position 3788 of SEQ ID NO: 1880416
cuauuuguguguuccagag

SEQ ID NO: 1965477 - RNA, 19 nt, Artificial Sequence
  Description of Artificial Sequence: Synthetic oligonucleotide
  Antisense strand to SEQ ID NO: 1965476
cucuggaacacacaaauag

SEQ ID NO: 1965478 - RNA, 19 nt, Artificial Sequence
  Description of Artificial Sequence: Synthetic oligonucleotide
  Sense strand starting at position 3820 of SEQ ID NO: 1880416
agaccuacacaugguuauu

SEQ ID NO: 1965479 - RNA, 19 nt, Artificial Sequence
  Description of Artificial Sequence: Synthetic oligonucleotide
  Antisense strand to SEQ ID NO: 1965478
aauaaccauguguaggucu

SEQ ID NO: 1965480 - RNA, 19 nt, Artificial Sequence
  Description of Artificial Sequence: Synthetic oligonucleotide
  Sense strand starting at position 374 of SEQ ID NO: 1880417
caaacauuccuggagcugu

SEQ ID NO: 1965481 - RNA, 19 nt, Artificial Sequence
  Description of Artificial Sequence: Synthetic oligonucleotide
  Antisense strand to SEQ ID NO: 1965480
acagcuccaggaauguuug

SEQ ID NO: 1965482 - RNA, 19 nt, Artificial Sequence
  Description of Artificial Sequence: Synthetic oligonucleotide
  Sense strand starting at position 388 of SEQ ID NO: 1880417
gcugucaaagucuacacau

SEQ ID NO: 1965483 - RNA, 19 nt, Artificial Sequence
  Description of Artificial Sequence: Synthetic oligonucleotide
  Antisense strand to SEQ ID NO: 1965482
auguguagacuuugacagc

SEQ ID NO: 1965484 - RNA, 19 nt, Artificial Sequence
  Description of Artificial Sequence: Synthetic oligonucleotide
  Sense strand starting at position 420 of SEQ ID NO: 1880417
acuuaaacccgccagaguu

SEQ ID NO: 1965485 - RNA, 19 nt, Artificial Sequence
  Description of Artificial Sequence: Synthetic oligonucleotide
  Antisense strand to SEQ ID NO: 1965484
aacucuggcggguuuaagu

SEQ ID NO: 1965486 - RNA, 19 nt, Artificial Sequence
  Description of Artificial Sequence: Synthetic oligonucleotide
  Sense strand starting at position 472 of SEQ ID NO: 1880417
aguaacaagugcucaauca

SEQ ID NO: 1965487 - RNA, 19 nt, Artificial Sequence
  Description of Artificial Sequence: Synthetic oligonucleotide
  Antisense strand to SEQ ID NO: 1965486
ugauugagcacuuguuacu

SEQ ID NO: 1965488 - RNA, 19 nt, Artificial Sequence
  Description of Artificial Sequence: Synthetic oligonucleotide
  Sense strand starting at position 473 of SEQ ID NO: 1880417
guaacaagugcucaaucaa

SEQ ID NO: 1965489 - RNA, 19 nt, Artificial Sequence
  Description of Artificial Sequence: Synthetic oligonucleotide
  Antisense strand to SEQ ID NO: 1965488
uugauugagcacuuguuac

SEQ ID NO: 1965490 - RNA, 19 nt, Artificial Sequence
  Description of Artificial Sequence: Synthetic oligonucleotide
  Sense strand starting at position 778 of SEQ ID NO: 1880417
ugucguguggaguuugagu

SEQ ID NO: 1965491 - RNA, 19 nt, Artificial Sequence
  Description of Artificial Sequence: Synthetic oligonucleotide
  Antisense strand to SEQ ID NO: 1965490
acucaaacuccacacgaca

SEQ ID NO: 1965492 - RNA, 19 nt, Artificial Sequence
  Description of Artificial Sequence: Synthetic oligonucleotide
  Sense strand starting at position 883 of SEQ ID NO: 1880417
agaagaauagucuguagca

SEQ ID NO: 1965493 - RNA, 19 nt, Artificial Sequence
  Description of Artificial Sequence: Synthetic oligonucleotide
  Antisense strand to SEQ ID NO: 1965492
ugcuacagacuauucuucu

SEQ ID NO: 1965494 - RNA, 19 nt, Artificial Sequence
  Description of Artificial Sequence: Synthetic oligonucleotide
  Sense strand starting at position 884 of SEQ ID NO: 1880417
gaagaauagucuguagcaa

SEQ ID NO: 1965495 - RNA, 19 nt, Artificial Sequence
  Description of Artificial Sequence: Synthetic oligonucleotide
  Antisense strand to SEQ ID NO: 1965494
uugcuacagacuauucuuc

SEQ ID NO: 1965496 - RNA, 19 nt, Artificial Sequence
  Description of Artificial Sequence: Synthetic oligonucleotide
  Sense strand starting at position 885 of SEQ ID NO: 1880417
aagaauagucuguagcaag

SEQ ID NO: 1965497 - RNA, 19 nt, Artificial Sequence
  Description of Artificial Sequence: Synthetic oligonucleotide
  Antisense strand to SEQ ID NO: 1965496
cuugcuacagacuauucuu

SEQ ID NO: 1965498 - RNA, 19 nt, Artificial Sequence
  Description of Artificial Sequence: Synthetic oligonucleotide
  Sense strand starting at position 1167 of SEQ ID NO: 1880417
ucaagaguuuggcuuuaga

SEQ ID NO: 1965499 - RNA, 19 nt, Artificial Sequence
  Description of Artificial Sequence: Synthetic oligonucleotide
  Antisense strand to SEQ ID NO: 1965498
ucuaaagccaaacucuuga

SEQ ID NO: 1965500 - RNA, 19 nt, Artificial Sequence
  Description of Artificial Sequence: Synthetic oligonucleotide
  Sense strand starting at position 1170 of SEQ ID NO: 1880417
agaguuuggcuuuagaucu

SEQ ID NO: 1965501 - RNA, 19 nt, Artificial Sequence
  Description of Artificial Sequence: Synthetic oligonucleotide
  Antisense strand to SEQ ID NO: 1965500
agaucuaaagccaaacucu

SEQ ID NO: 1965502 - RNA, 19 nt, Artificial Sequence
  Description of Artificial Sequence: Synthetic oligonucleotide
  Sense strand starting at position 1176 of SEQ ID NO: 1880417
uggcuuuagaucuagugag

SEQ ID NO: 1965503 - RNA, 19 nt, Artificial Sequence
  Description of Artificial Sequence: Synthetic oligonucleotide
  Antisense strand to SEQ ID NO: 1965502
cucacuagaucuaaagcca

SEQ ID NO: 1965504 - RNA, 19 nt, Artificial Sequence
  Description of Artificial Sequence: Synthetic oligonucleotide
  Sense strand starting at position 1183 of SEQ ID NO: 1880417
agaucuagugagugggaaa

SEQ ID NO: 1965505 - RNA, 19 nt, Artificial Sequence
  Description of Artificial Sequence: Synthetic oligonucleotide
  Antisense strand to SEQ ID NO: 1965504
uuucccacucacuagaucu

SEQ ID NO: 1965506 - RNA, 19 nt, Artificial Sequence
  Description of Artificial Sequence: Synthetic oligonucleotide
  Sense strand starting at position 1184 of SEQ ID NO: 1880417
gaucuagugagugggaaac

SEQ ID NO: 1965507 - RNA, 19 nt, Artificial Sequence
  Description of Artificial Sequence: Synthetic oligonucleotide
  Antisense strand to SEQ ID NO: 1965506
guuucccacucacuagauc

SEQ ID NO: 1965508 - RNA, 19 nt, Artificial Sequence
  Description of Artificial Sequence: Synthetic oligonucleotide
  Sense strand starting at position 1279 of SEQ ID NO: 1880417
ggaacuaagugugugggau

SEQ ID NO: 1965509 - RNA, 19 nt, Artificial Sequence
  Description of Artificial Sequence: Synthetic oligonucleotide
  Antisense strand to SEQ ID NO: 1965508
aucccacacacuuaguucc

SEQ ID NO: 1965510 - RNA, 19 nt, Artificial Sequence
  Description of Artificial Sequence: Synthetic oligonucleotide
  Sense strand starting at position 1280 of SEQ ID NO: 1880417
gaacuaagugugugggauu

SEQ ID NO: 1965511 - RNA, 19 nt, Artificial Sequence
  Description of Artificial Sequence: Synthetic oligonucleotide
  Antisense strand to SEQ ID NO: 1965510
aaucccacacacuuaguuc

SEQ ID NO: 1965512 - RNA, 19 nt, Artificial Sequence
  Description of Artificial Sequence: Synthetic oligonucleotide
  Sense strand starting at position 2010 of SEQ ID NO: 1880417
guucgaaaggccugggaga

SEQ ID NO: 1965513 - RNA, 19 nt, Artificial Sequence
  Description of Artificial Sequence: Synthetic oligonucleotide
  Antisense strand to SEQ ID NO: 1965512
ucucccaggccuuucgaac

SEQ ID NO: 1965514 - RNA, 19 nt, Artificial Sequence
  Description of Artificial Sequence: Synthetic oligonucleotide
  Sense strand starting at position 2012 of SEQ ID NO: 1880417
ucgaaaggccugggagaua

SEQ ID NO: 1965515 - RNA, 19 nt, Artificial Sequence
  Description of Artificial Sequence: Synthetic oligonucleotide
  Antisense strand to SEQ ID NO: 1965514
uaucucccaggccuuucga

SEQ ID NO: 1965516 - RNA, 19 nt, Artificial Sequence
  Description of Artificial Sequence: Synthetic oligonucleotide
  Sense strand starting at position 2245 of SEQ ID NO: 1880417
uacagucuagugggauaaa

SEQ ID NO: 1965517 - RNA, 19 nt, Artificial Sequence
  Description of Artificial Sequence: Synthetic oligonucleotide
  Antisense strand to SEQ ID NO: 1965516
uuuaucccacuagacugua

SEQ ID NO: 1965518 - RNA, 19 nt, Artificial Sequence
  Description of Artificial Sequence: Synthetic oligonucleotide
  Sense strand starting at position 2301 of SEQ ID NO: 1880417
gugauaaggcucuaaguga

SEQ ID NO: 1965519 - RNA, 19 nt, Artificial Sequence
  Description of Artificial Sequence: Synthetic oligonucleotide
  Antisense strand to SEQ ID NO: 1965518
ucacuuagagccuuaucac

SEQ ID NO: 1965520 - RNA, 19 nt, Artificial Sequence
  Description of Artificial Sequence: Synthetic oligonucleotide
  Sense strand starting at position 2316 of SEQ ID NO: 1880417
gugaauaucgcacaugaca

SEQ ID NO: 1965521 - RNA, 19 nt, Artificial Sequence
  Description of Artificial Sequence: Synthetic oligonucleotide
  Antisense strand to SEQ ID NO: 1965520
ugucaugugcgauauucac

SEQ ID NO: 1965522 - RNA, 19 nt, Artificial Sequence
  Description of Artificial Sequence: Synthetic oligonucleotide
  Sense strand starting at position 2357 of SEQ ID NO: 1880417
agagguuccuucuugagga

SEQ ID NO: 1965523 - RNA, 19 nt, Artificial Sequence
  Description of Artificial Sequence: Synthetic oligonucleotide
  Antisense strand to SEQ ID NO: 1965522
uccucaagaaggaaccucu

SEQ ID NO: 1965524 - RNA, 19 nt, Artificial Sequence
  Description of Artificial Sequence: Synthetic oligonucleotide
  Sense strand starting at position 2538 of SEQ ID NO: 1880417
ggaagugguucacugagaa

SEQ ID NO: 1965525 - RNA, 19 nt, Artificial Sequence
  Description of Artificial Sequence: Synthetic oligonucleotide
  Antisense strand to SEQ ID NO: 1965524
uucucagugaaccacuucc

SEQ ID NO: 1965526 - RNA, 19 nt, Artificial Sequence
  Description of Artificial Sequence: Synthetic oligonucleotide
  Sense strand starting at position 2765 of SEQ ID NO: 1880417
cuucuuuagggcuaugacu

SEQ ID NO: 1965527 - RNA, 19 nt, Artificial Sequence
  Description of Artificial Sequence: Synthetic oligonucleotide
  Antisense strand to SEQ ID NO: 1965526
agucauagcccuaaagaag

SEQ ID NO: 1965528 - RNA, 19 nt, Artificial Sequence
  Description of Artificial Sequence: Synthetic oligonucleotide
  Sense strand starting at position 2767 of SEQ ID NO: 1880417
ucuuuagggcuaugacuau

SEQ ID NO: 1965529 - RNA, 19 nt, Artificial Sequence
  Description of Artificial Sequence: Synthetic oligonucleotide
  Antisense strand to SEQ ID NO: 1965528
auagucauagcccuaaaga

SEQ ID NO: 1965530 - RNA, 19 nt, Artificial Sequence
  Description of Artificial Sequence: Synthetic oligonucleotide
  Sense strand starting at position 2796 of SEQ ID NO: 1880417
ucacuauacugaguuaagu

SEQ ID NO: 1965531 - RNA, 19 nt, Artificial Sequence
  Description of Artificial Sequence: Synthetic oligonucleotide
  Antisense strand to SEQ ID NO: 1965530
acuuaacucaguauaguga

SEQ ID NO: 1965532 - RNA, 19 nt, Artificial Sequence
  Description of Artificial Sequence: Synthetic oligonucleotide
  Sense strand starting at position 2806 of SEQ ID NO: 1880417
gaguuaagucuguagagca

SEQ ID NO: 1965533 - RNA, 19 nt, Artificial Sequence
  Description of Artificial Sequence: Synthetic oligonucleotide
  Antisense strand to SEQ ID NO: 1965532
ugcucuacagacuuaacuc

SEQ ID NO: 1965534 - RNA, 19 nt, Artificial Sequence
  Description of Artificial Sequence: Synthetic oligonucleotide
  Sense strand starting at position 2978 of SEQ ID NO: 1880417
cuggguagcugauuauuaa

SEQ ID NO: 1965535 - RNA, 19 nt, Artificial Sequence
  Description of Artificial Sequence: Synthetic oligonucleotide
  Antisense strand to SEQ ID NO: 1965534
uuaauaaucagcuacccag

SEQ ID NO: 1965536 - RNA, 19 nt, Artificial Sequence
  Description of Artificial Sequence: Synthetic oligonucleotide
  Sense strand starting at position 2979 of SEQ ID NO: 1880417
uggguagcugauuauuaag

SEQ ID NO: 1965537 - RNA, 19 nt, Artificial Sequence
  Description of Artificial Sequence: Synthetic oligonucleotide
  Antisense strand to SEQ ID NO: 1965536
cuuaauaaucagcuaccca

SEQ ID NO: 1965538 - RNA, 19 nt, Artificial Sequence
  Description of Artificial Sequence: Synthetic oligonucleotide
  Sense strand starting at position 2985 of SEQ ID NO: 1880417
gcugauuauuaagcuaaac

SEQ ID NO: 1965539 - RNA, 19 nt, Artificial Sequence
  Description of Artificial Sequence: Synthetic oligonucleotide
  Antisense strand to SEQ ID NO: 1965538
guuuagcuuaauaaucagc

SEQ ID NO: 1965540 - RNA, 19 nt, Artificial Sequence
  Description of Artificial Sequence: Synthetic oligonucleotide
  Sense strand starting at position 2997 of SEQ ID NO: 1880417
gcuaaacacuccuuugaug

SEQ ID NO: 1965541 - RNA, 19 nt, Artificial Sequence
  Description of Artificial Sequence: Synthetic oligonucleotide
  Antisense strand to SEQ ID NO: 1965540
caucaaaggaguguuuagc

SEQ ID NO: 1965542 - RNA, 19 nt, Artificial Sequence
  Description of Artificial Sequence: Synthetic oligonucleotide
  Sense strand starting at position 3003 of SEQ ID NO: 1880417
cacuccuuugaugguugaa

SEQ ID NO: 1965543 - RNA, 19 nt, Artificial Sequence
  Description of Artificial Sequence: Synthetic oligonucleotide
  Antisense strand to SEQ ID NO: 1965542
uucaaccaucaaaggagug

SEQ ID NO: 1965544 - RNA, 19 nt, Artificial Sequence
  Description of Artificial Sequence: Synthetic oligonucleotide
  Sense strand starting at position 3214 of SEQ ID NO: 1880417
gacaauucucaagguguuu

SEQ ID NO: 1965545 - RNA, 19 nt, Artificial Sequence
  Description of Artificial Sequence: Synthetic oligonucleotide
  Antisense strand to SEQ ID NO: 1965544
aaacaccuugagaauuguc

SEQ ID NO: 1965546 - RNA, 19 nt, Artificial Sequence
  Description of Artificial Sequence: Synthetic oligonucleotide
  Sense strand starting at position 3220 of SEQ ID NO: 1880417
ucucaagguguuuauacua

SEQ ID NO: 1965547 - RNA, 19 nt, Artificial Sequence
  Description of Artificial Sequence: Synthetic oligonucleotide
  Antisense strand to SEQ ID NO: 1965546
uaguauaaacaccuugaga

SEQ ID NO: 1965548 - RNA, 19 nt, Artificial Sequence
  Description of Artificial Sequence: Synthetic oligonucleotide
  Sense strand starting at position 3245 of SEQ ID NO: 1880417
uguauuugauccuugcaac

SEQ ID NO: 1965549 - RNA, 19 nt, Artificial Sequence
  Description of Artificial Sequence: Synthetic oligonucleotide
  Antisense strand to SEQ ID NO: 1965548
guugcaaggaucaaauaca

SEQ ID NO: 1965550 - RNA, 19 nt, Artificial Sequence
  Description of Artificial Sequence: Synthetic oligonucleotide
  Sense strand starting at position 3246 of SEQ ID NO: 1880417
guauuugauccuugcaacu

SEQ ID NO: 1965551 - RNA, 19 nt, Artificial Sequence
  Description of Artificial Sequence: Synthetic oligonucleotide
  Antisense strand to SEQ ID NO: 1965550
aguugcaaggaucaaauac

SEQ ID NO: 1965552 - RNA, 19 nt, Artificial Sequence
  Description of Artificial Sequence: Synthetic oligonucleotide
  Sense strand starting at position 3264 of SEQ ID NO: 1880417
ugccaugugaauuaggcaa

SEQ ID NO: 1965553 - RNA, 19 nt, Artificial Sequence
  Description of Artificial Sequence: Synthetic oligonucleotide
  Antisense strand to SEQ ID NO: 1965552
uugccuaauucacauggca

SEQ ID NO: 1965554 - RNA, 19 nt, Artificial Sequence
  Description of Artificial Sequence: Synthetic oligonucleotide
  Sense strand starting at position 3320 of SEQ ID NO: 1880417
cugagacauuaagugauau

SEQ ID NO: 1965555 - RNA, 19 nt, Artificial Sequence
  Description of Artificial Sequence: Synthetic oligonucleotide
  Antisense strand to SEQ ID NO: 1965554
auaucacuuaaugucucag

SEQ ID NO: 1965556 - RNA, 19 nt, Artificial Sequence
  Description of Artificial Sequence: Synthetic oligonucleotide
  Sense strand starting at position 3535 of SEQ ID NO: 1880417
uugucuggauaaucaaauu

SEQ ID NO: 1965557 - RNA, 19 nt, Artificial Sequence
  Description of Artificial Sequence: Synthetic oligonucleotide
  Antisense strand to SEQ ID NO: 1965556
aauuugauuauccagacaa

SEQ ID NO: 1965558 - RNA, 19 nt, Artificial Sequence
  Description of Artificial Sequence: Synthetic oligonucleotide
  Sense strand starting at position 3656 of SEQ ID NO: 1880417
gcuuaaucacaugacgguu

SEQ ID NO: 1965559 - RNA, 19 nt, Artificial Sequence
  Description of Artificial Sequence: Synthetic oligonucleotide
  Antisense strand to SEQ ID NO: 1965558
aaccgucaugugauuaagc

SEQ ID NO: 1965560 - RNA, 19 nt, Artificial Sequence
  Description of Artificial Sequence: Synthetic oligonucleotide
  Sense strand starting at position 469 of SEQ ID NO: 1880418
agguauuuaugcucuaucu

SEQ ID NO: 1965561 - RNA, 19 nt, Artificial Sequence
  Description of Artificial Sequence: Synthetic oligonucleotide
  Antisense strand to SEQ ID NO: 1965560
agauagagcauaaauaccu

SEQ ID NO: 1965562 - RNA, 19 nt, Artificial Sequence
  Description of Artificial Sequence: Synthetic oligonucleotide
  Sense strand starting at position 555 of SEQ ID NO: 1880418
uugaucaugcaguagauau

SEQ ID NO: 1965563 - RNA, 19 nt, Artificial Sequence
  Description of Artificial Sequence: Synthetic oligonucleotide
  Antisense strand to SEQ ID NO: 1965562
auaucuacugcaugaucaa

SEQ ID NO: 1965564 - RNA, 19 nt, Artificial Sequence
  Description of Artificial Sequence: Synthetic oligonucleotide
  Sense strand starting at position 568 of SEQ ID NO: 1880418
agauauaacugggcagguu

SEQ ID NO: 1965565 - RNA, 19 nt, Artificial Sequence
  Description of Artificial Sequence: Synthetic oligonucleotide
  Antisense strand to SEQ ID NO: 1965564
aaccugcccaguuauaucu

SEQ ID NO: 1965566 - RNA, 19 nt, Artificial Sequence
  Description of Artificial Sequence: Synthetic oligonucleotide
  Sense strand starting at position 569 of SEQ ID NO: 1880418
gauauaacugggcagguuu

SEQ ID NO: 1965567 - RNA, 19 nt, Artificial Sequence
  Description of Artificial Sequence: Synthetic oligonucleotide
  Antisense strand to SEQ ID NO: 1965566
aaaccugcccaguuauauc

SEQ ID NO: 1965568 - RNA, 19 nt, Artificial Sequence
  Description of Artificial Sequence: Synthetic oligonucleotide
  Sense strand starting at position 1031 of SEQ ID NO: 1880418
ggcugugccaaacaaugaa

SEQ ID NO: 1965569 - RNA, 19 nt, Artificial Sequence
  Description of Artificial Sequence: Synthetic oligonucleotide
  Antisense strand to SEQ ID NO: 1965568
uucauuguuuggcacagcc

SEQ ID NO: 1965570 - RNA, 19 nt, Artificial Sequence
  Description of Artificial Sequence: Synthetic oligonucleotide
  Sense strand starting at position 1227 of SEQ ID NO: 1880418
ccagguucuuuccuaauga

SEQ ID NO: 1965571 - RNA, 19 nt, Artificial Sequence
  Description of Artificial Sequence: Synthetic oligonucleotide
  Antisense strand to SEQ ID NO: 1965570
ucauuaggaaagaaccugg

SEQ ID NO: 1965572 - RNA, 19 nt, Artificial Sequence
  Description of Artificial Sequence: Synthetic oligonucleotide
  Sense strand starting at position 1298 of SEQ ID NO: 1880418
ucagaccucugcuuuagau

SEQ ID NO: 1965573 - RNA, 19 nt, Artificial Sequence
  Description of Artificial Sequence: Synthetic oligonucleotide
  Antisense strand to SEQ ID NO: 1965572
aucuaaagcagaggucuga

SEQ ID NO: 1965574 - RNA, 19 nt, Artificial Sequence
  Description of Artificial Sequence: Synthetic oligonucleotide
  Sense strand starting at position 1300 of SEQ ID NO: 1880418
agaccucugcuuuagaucu

SEQ ID NO: 1965575 - RNA, 19 nt, Artificial Sequence
  Description of Artificial Sequence: Synthetic oligonucleotide
  Antisense strand to SEQ ID NO: 1965574
agaucuaaagcagaggucu

SEQ ID NO: 1965576 - RNA, 19 nt, Artificial Sequence
  Description of Artificial Sequence: Synthetic oligonucleotide
  Sense strand starting at position 1324 of SEQ ID NO: 1880418
ggaggaaguuucuuaguca

SEQ ID NO: 1965577 - RNA, 19 nt, Artificial Sequence
  Description of Artificial Sequence: Synthetic oligonucleotide
  Antisense strand to SEQ ID NO: 1965576
ugacuaagaaacuuccucc

SEQ ID NO: 1965578 - RNA, 19 nt, Artificial Sequence
  Description of Artificial Sequence: Synthetic oligonucleotide
  Sense strand starting at position 1327 of SEQ ID NO: 1880418
ggaaguuucuuagucacau

SEQ ID NO: 1965579 - RNA, 19 nt, Artificial Sequence
  Description of Artificial Sequence: Synthetic oligonucleotide
  Antisense strand to SEQ ID NO: 1965578
augugacuaagaaacuucc

SEQ ID NO: 1965580 - RNA, 19 nt, Artificial Sequence
  Description of Artificial Sequence: Synthetic oligonucleotide
  Sense strand starting at position 1362 of SEQ ID NO: 1880418
guguauuaucgccacauuu

SEQ ID NO: 1965581 - RNA, 19 nt, Artificial Sequence
  Description of Artificial Sequence: Synthetic oligonucleotide
  Antisense strand to SEQ ID NO: 1965580
aaauguggcgauaauacac

SEQ ID NO: 1965582 - RNA, 19 nt, Artificial Sequence
  Description of Artificial Sequence: Synthetic oligonucleotide
  Sense strand starting at position 1370 of SEQ ID NO: 1880418
ucgccacauuugguauuaa

SEQ ID NO: 1965583 - RNA, 19 nt, Artificial Sequence
  Description of Artificial Sequence: Synthetic oligonucleotide
  Antisense strand to SEQ ID NO: 1965582
uuaauaccaaauguggcga

SEQ ID NO: 1965584 - RNA, 19 nt, Artificial Sequence
  Description of Artificial Sequence: Synthetic oligonucleotide
  Sense strand starting at position 1454 of SEQ ID NO: 1880418
cuguuaugucaagacuguc

SEQ ID NO: 1965585 - RNA, 19 nt, Artificial Sequence
  Description of Artificial Sequence: Synthetic oligonucleotide
  Antisense strand to SEQ ID NO: 1965584
gacagucuugacauaacag

SEQ ID NO: 1965586 - RNA, 19 nt, Artificial Sequence
  Description of Artificial Sequence: Synthetic oligonucleotide
  Sense strand starting at position 1462 of SEQ ID NO: 1880418
ucaagacugucucugaaac

SEQ ID NO: 1965587 - RNA, 19 nt, Artificial Sequence
  Description of Artificial Sequence: Synthetic oligonucleotide
  Antisense strand to SEQ ID NO: 1965586
guuucagagacagucuuga

SEQ ID NO: 1965588 - RNA, 19 nt, Artificial Sequence
  Description of Artificial Sequence: Synthetic oligonucleotide
  Sense strand starting at position 1484 of SEQ ID NO: 1880418
uaggauuccgagcaauugu

SEQ ID NO: 1965589 - RNA, 19 nt, Artificial Sequence
  Description of Artificial Sequence: Synthetic oligonucleotide
  Antisense strand to SEQ ID NO: 1965588
acaauugcucggaauccua

SEQ ID NO: 1965590 - RNA, 19 nt, Artificial Sequence
  Description of Artificial Sequence: Synthetic oligonucleotide
  Sense strand starting at position 1508 of SEQ ID NO: 1880418
gguauacucuuacuugaau

SEQ ID NO: 1965591 - RNA, 19 nt, Artificial Sequence
  Description of Artificial Sequence: Synthetic oligonucleotide
  Antisense strand to SEQ ID NO: 1965590
auucaaguaagaguauacc

SEQ ID NO: 1965592 - RNA, 19 nt, Artificial Sequence
  Description of Artificial Sequence: Synthetic oligonucleotide
  Sense strand starting at position 1509 of SEQ ID NO: 1880418
guauacucuuacuugaaug

SEQ ID NO: 1965593 - RNA, 19 nt, Artificial Sequence
  Description of Artificial Sequence: Synthetic oligonucleotide
  Antisense strand to SEQ ID NO: 1965592
cauucaaguaagaguauac

SEQ ID NO: 1965594 - RNA, 19 nt, Artificial Sequence
  Description of Artificial Sequence: Synthetic oligonucleotide
  Sense strand starting at position 1514 of SEQ ID NO: 1880418
cucuuacuugaauguggaa

SEQ ID NO: 1965595 - RNA, 19 nt, Artificial Sequence
  Description of Artificial Sequence: Synthetic oligonucleotide
  Antisense strand to SEQ ID NO: 1965594
uuccacauucaaguaagag

SEQ ID NO: 1965596 - RNA, 19 nt, Artificial Sequence
  Description of Artificial Sequence: Synthetic oligonucleotide
  Sense strand starting at position 1527 of SEQ ID NO: 1880418
guggaauuguuccugauug

SEQ ID NO: 1965597 - RNA, 19 nt, Artificial Sequence
  Description of Artificial Sequence: Synthetic oligonucleotide
  Antisense strand to SEQ ID NO: 1965596
caaucaggaacaauuccac

SEQ ID NO: 1965598 - RNA, 19 nt, Artificial Sequence
  Description of Artificial Sequence: Synthetic oligonucleotide
  Sense strand starting at position 1596 of SEQ ID NO: 1880418
uagcucugggaaugugaaa

SEQ ID NO: 1965599 - RNA, 19 nt, Artificial Sequence
  Description of Artificial Sequence: Synthetic oligonucleotide
  Antisense strand to SEQ ID NO: 1965598
uuucacauucccagagcua

SEQ ID NO: 1965600 - RNA, 19 nt, Artificial Sequence
  Description of Artificial Sequence: Synthetic oligonucleotide
  Sense strand starting at position 1603 of SEQ ID NO: 1880418
gggaaugugaaagguccua

SEQ ID NO: 1965601 - RNA, 19 nt, Artificial Sequence
  Description of Artificial Sequence: Synthetic oligonucleotide
  Antisense strand to SEQ ID NO: 1965600
uaggaccuuucacauuccc

SEQ ID NO: 1965602 - RNA, 19 nt, Artificial Sequence
  Description of Artificial Sequence: Synthetic oligonucleotide
  Sense strand starting at position 1694 of SEQ ID NO: 1880418
ggagaacuauguucuccca

SEQ ID NO: 1965603 - RNA, 19 nt, Artificial Sequence
  Description of Artificial Sequence: Synthetic oligonucleotide
  Antisense strand to SEQ ID NO: 1965602
ugggagaacauaguucucc

SEQ ID NO: 1965604 - RNA, 19 nt, Artificial Sequence
  Description of Artificial Sequence: Synthetic oligonucleotide
  Sense strand starting at position 1805 of SEQ ID NO: 1880418
uugcaaacagauugcuaaa

SEQ ID NO: 1965605 - RNA, 19 nt, Artificial Sequence
  Description of Artificial Sequence: Synthetic oligonucleotide
  Antisense strand to SEQ ID NO: 1965604
uuuagcaaucuguuugcaa

SEQ ID NO: 1965606 - RNA, 19 nt, Artificial Sequence
  Description of Artificial Sequence: Synthetic oligonucleotide
  Sense strand starting at position 1807 of SEQ ID NO: 1880418
gcaaacagauugcuaaacu

SEQ ID NO: 1965607 - RNA, 19 nt, Artificial Sequence
  Description of Artificial Sequence: Synthetic oligonucleotide
  Antisense strand to SEQ ID NO: 1965606
aguuuagcaaucuguuugc

SEQ ID NO: 1965608 - RNA, 19 nt, Artificial Sequence
  Description of Artificial Sequence: Synthetic oligonucleotide
  Sense strand starting at position 2022 of SEQ ID NO: 1880418
ugcaauuuguaagcaguca

SEQ ID NO: 1965609 - RNA, 19 nt, Artificial Sequence
  Description of Artificial Sequence: Synthetic oligonucleotide
  Antisense strand to SEQ ID NO: 1965608
ugacugcuuacaaauugca

SEQ ID NO: 1965610 - RNA, 19 nt, Artificial Sequence
  Description of Artificial Sequence: Synthetic oligonucleotide
  Sense strand starting at position 2141 of SEQ ID NO: 1880418
ugccuuugugguguuuauu

SEQ ID NO: 1965611 - RNA, 19 nt, Artificial Sequence
  Description of Artificial Sequence: Synthetic oligonucleotide
  Antisense strand to SEQ ID NO: 1965610
aauaaacaccacaaaggca

SEQ ID NO: 1965612 - RNA, 19 nt, Artificial Sequence
  Description of Artificial Sequence: Synthetic oligonucleotide
  Sense strand starting at position 2393 of SEQ ID NO: 1880418
ucacauagcaagugguaga

SEQ ID NO: 1965613 - RNA, 19 nt, Artificial Sequence
  Description of Artificial Sequence: Synthetic oligonucleotide
  Antisense strand to SEQ ID NO: 1965612
ucuaccacuugcuauguga

SEQ ID NO: 1965614 - RNA, 19 nt, Artificial Sequence
  Description of Artificial Sequence: Synthetic oligonucleotide
  Sense strand starting at position 2409 of SEQ ID NO: 1880418
agaugcaaaugcuuggaaa

SEQ ID NO: 1965615 - RNA, 19 nt, Artificial Sequence
  Description of Artificial Sequence: Synthetic oligonucleotide
  Antisense strand to SEQ ID NO: 1965614
uuuccaagcauuugcaucu

SEQ ID NO: 1965616 - RNA, 19 nt, Artificial Sequence
  Description of Artificial Sequence: Synthetic oligonucleotide
  Sense strand starting at position 2410 of SEQ ID NO: 1880418
gaugcaaaugcuuggaaau

SEQ ID NO: 1965617 - RNA, 19 nt, Artificial Sequence
  Description of Artificial Sequence: Synthetic oligonucleotide
  Antisense strand to SEQ ID NO: 1965616
auuuccaagcauuugcauc

SEQ ID NO: 1965618 - RNA, 19 nt, Artificial Sequence
  Description of Artificial Sequence: Synthetic oligonucleotide
  Sense strand starting at position 2426 of SEQ ID NO: 1880418
aauaaaucguaggcacuua

SEQ ID NO: 1965619 - RNA, 19 nt, Artificial Sequence
  Description of Artificial Sequence: Synthetic oligonucleotide
  Antisense strand to SEQ ID NO: 1965618
uaagugccuacgauuuauu

SEQ ID NO: 1965620 - RNA, 19 nt, Artificial Sequence
  Description of Artificial Sequence: Synthetic oligonucleotide
  Sense strand starting at position 2449 of SEQ ID NO: 1880418
agccguaauuauuuaucuu

SEQ ID NO: 1965621 - RNA, 19 nt, Artificial Sequence
  Description of Artificial Sequence: Synthetic oligonucleotide
  Antisense strand to SEQ ID NO: 1965620
aagauaaauaauuacggcu

SEQ ID NO: 1965622 - RNA, 19 nt, Artificial Sequence
  Description of Artificial Sequence: Synthetic oligonucleotide
  Sense strand starting at position 2630 of SEQ ID NO: 1880418
cuugcugaaguccaucaaa

SEQ ID NO: 1965623 - RNA, 19 nt, Artificial Sequence
  Description of Artificial Sequence: Synthetic oligonucleotide
  Antisense strand to SEQ ID NO: 1965622
uuugauggacuucagcaag

SEQ ID NO: 1965624 - RNA, 19 nt, Artificial Sequence
  Description of Artificial Sequence: Synthetic oligonucleotide
  Sense strand starting at position 2633 of SEQ ID NO: 1880418
gcugaaguccaucaaacua

SEQ ID NO: 1965625 - RNA, 19 nt, Artificial Sequence
  Description of Artificial Sequence: Synthetic oligonucleotide
  Antisense strand to SEQ ID NO: 1965624
uaguuugauggacuucagc

SEQ ID NO: 1965626 - RNA, 19 nt, Artificial Sequence
  Description of Artificial Sequence: Synthetic oligonucleotide
  Sense strand starting at position 3153 of SEQ ID NO: 1880418
gugccaagaggugaguuau

SEQ ID NO: 1965627 - RNA, 19 nt, Artificial Sequence
  Description of Artificial Sequence: Synthetic oligonucleotide
  Antisense strand to SEQ ID NO: 1965626
auaacucaccucuuggcac

SEQ ID NO: 1965628 - RNA, 19 nt, Artificial Sequence
  Description of Artificial Sequence: Synthetic oligonucleotide
  Sense strand starting at position 3225 of SEQ ID NO: 1880418
ccacguuuacuccagaaag

SEQ ID NO: 1965629 - RNA, 19 nt, Artificial Sequence
  Description of Artificial Sequence: Synthetic oligonucleotide
  Antisense strand to SEQ ID NO: 1965628
cuuucuggaguaaacgugg

SEQ ID NO: 1965630 - RNA, 19 nt, Artificial Sequence
  Description of Artificial Sequence: Synthetic oligonucleotide
  Sense strand starting at position 3266 of SEQ ID NO: 1880418
ugcugcuuccgaguccuau

SEQ ID NO: 1965631 - RNA, 19 nt, Artificial Sequence
  Description of Artificial Sequence: Synthetic oligonucleotide
  Antisense strand to SEQ ID NO: 1965630
auaggacucggaagcagca

SEQ ID NO: 1965632 - RNA, 19 nt, Artificial Sequence
  Description of Artificial Sequence: Synthetic oligonucleotide
  Sense strand starting at position 3366 of SEQ ID NO: 1880418
ugcagaaacuuccuuugag

SEQ ID NO: 1965633 - RNA, 19 nt, Artificial Sequence
  Description of Artificial Sequence: Synthetic oligonucleotide
  Antisense strand to SEQ ID NO: 1965632
cucaaaggaaguuucugca

SEQ ID NO: 1965634 - RNA, 19 nt, Artificial Sequence
  Description of Artificial Sequence: Synthetic oligonucleotide
  Sense strand starting at position 3367 of SEQ ID NO: 1880418
gcagaaacuuccuuugaga

SEQ ID NO: 1965635 - RNA, 19 nt, Artificial Sequence
  Description of Artificial Sequence: Synthetic oligonucleotide
  Antisense strand to SEQ ID NO: 1965634
ucucaaaggaaguuucugc

SEQ ID NO: 1965636 - RNA, 19 nt, Artificial Sequence
  Description of Artificial Sequence: Synthetic oligonucleotide
  Sense strand starting at position 3378 of SEQ ID NO: 1880418
cuuugagaaggcugauaaa

SEQ ID NO: 1965637 - RNA, 19 nt, Artificial Sequence
  Description of Artificial Sequence: Synthetic oligonucleotide
  Antisense strand to SEQ ID NO: 1965636
uuuaucagccuucucaaag

SEQ ID NO: 1965638 - RNA, 19 nt, Artificial Sequence
  Description of Artificial Sequence: Synthetic oligonucleotide
  Sense strand starting at position 3577 of SEQ ID NO: 1880418
gcugcuguugccuuuacua

SEQ ID NO: 1965639 - RNA, 19 nt, Artificial Sequence
  Description of Artificial Sequence: Synthetic oligonucleotide
  Antisense strand to SEQ ID NO: 1965638
uaguaaaggcaacagcagc

SEQ ID NO: 1965640 - RNA, 19 nt, Artificial Sequence
  Description of Artificial Sequence: Synthetic oligonucleotide
  Sense strand starting at position 25 of SEQ ID NO: 1880419
cugagaauggcuggagaug

SEQ ID NO: 1965641 - RNA, 19 nt, Artificial Sequence
  Description of Artificial Sequence: Synthetic oligonucleotide
  Antisense strand to SEQ ID NO: 1965640
caucuccagccauucucag

SEQ ID NO: 1965642 - RNA, 19 nt, Artificial Sequence
  Description of Artificial Sequence: Synthetic oligonucleotide
  Sense strand starting at position 476 of SEQ ID NO: 1880419
gugaguugacuccaguauu

SEQ ID NO: 1965643 - RNA, 19 nt, Artificial Sequence
  Description of Artificial Sequence: Synthetic oligonucleotide
  Antisense strand to SEQ ID NO: 1965642
aauacuggagucaacucac

SEQ ID NO: 1965644 - RNA, 19 nt, Artificial Sequence
  Description of Artificial Sequence: Synthetic oligonucleotide
  Sense strand starting at position 572 of SEQ ID NO: 1880419
aagauauguuuggugacau

SEQ ID NO: 1965645 - RNA, 19 nt, Artificial Sequence
  Description of Artificial Sequence: Synthetic oligonucleotide
  Antisense strand to SEQ ID NO: 1965644
augucaccaaacauaucuu

SEQ ID NO: 1965646 - RNA, 19 nt, Artificial Sequence
  Description of Artificial Sequence: Synthetic oligonucleotide
  Sense strand starting at position 706 of SEQ ID NO: 1880419
ugcauaaggcaguaauaau

SEQ ID NO: 1965647 - RNA, 19 nt, Artificial Sequence
  Description of Artificial Sequence: Synthetic oligonucleotide
  Antisense strand to SEQ ID NO: 1965646
auuauuacugccuuaugca

SEQ ID NO: 1965648 - RNA, 19 nt, Artificial Sequence
  Description of Artificial Sequence: Synthetic oligonucleotide
  Sense strand starting at position 898 of SEQ ID NO: 1880419
cugaauuauugaucucugu

SEQ ID NO: 1965649 - RNA, 19 nt, Artificial Sequence
  Description of Artificial Sequence: Synthetic oligonucleotide
  Antisense strand to SEQ ID NO: 1965648
acagagaucaauaauucag

SEQ ID NO: 1965650 - RNA, 19 nt, Artificial Sequence
  Description of Artificial Sequence: Synthetic oligonucleotide
  Sense strand starting at position 934 of SEQ ID NO: 1880419
gucaucaaauuguugauaa

SEQ ID NO: 1965651 - RNA, 19 nt, Artificial Sequence
  Description of Artificial Sequence: Synthetic oligonucleotide
  Antisense strand to SEQ ID NO: 1965650
uuaucaacaauuugaugac

SEQ ID NO: 1965652 - RNA, 19 nt, Artificial Sequence
  Description of Artificial Sequence: Synthetic oligonucleotide
  Sense strand starting at position 1176 of SEQ ID NO: 1880419
ggcaucauugaaugaacau

SEQ ID NO: 1965653 - RNA, 19 nt, Artificial Sequence
  Description of Artificial Sequence: Synthetic oligonucleotide
  Antisense strand to SEQ ID NO: 1965652
auguucauucaaugaugcc

SEQ ID NO: 1965654 - RNA, 19 nt, Artificial Sequence
  Description of Artificial Sequence: Synthetic oligonucleotide
  Sense strand starting at position 1251 of SEQ ID NO: 1880419
augggcaauugauucucaa

SEQ ID NO: 1965655 - RNA, 19 nt, Artificial Sequence
  Description of Artificial Sequence: Synthetic oligonucleotide
  Antisense strand to SEQ ID NO: 1965654
uugagaaucaauugcccau

SEQ ID NO: 1965656 - RNA, 19 nt, Artificial Sequence
  Description of Artificial Sequence: Synthetic oligonucleotide
  Sense strand starting at position 1254 of SEQ ID NO: 1880419
ggcaauugauucucaauua

SEQ ID NO: 1965657 - RNA, 19 nt, Artificial Sequence
  Description of Artificial Sequence: Synthetic oligonucleotide
  Antisense strand to SEQ ID NO: 1965656
uaauugagaaucaauugcc

SEQ ID NO: 1965658 - RNA, 19 nt, Artificial Sequence
  Description of Artificial Sequence: Synthetic oligonucleotide
  Sense strand starting at position 1272 of SEQ ID NO: 1880419
auagaaagcguuggagaga

SEQ ID NO: 1965659 - RNA, 19 nt, Artificial Sequence
  Description of Artificial Sequence: Synthetic oligonucleotide
  Antisense strand to SEQ ID NO: 1965658
ucucuccaacgcuuucuau

SEQ ID NO: 1965660 - RNA, 19 nt, Artificial Sequence
  Description of Artificial Sequence: Synthetic oligonucleotide
  Sense strand starting at position 1430 of SEQ ID NO: 1880419
gaggaaacuggcugagcua

SEQ ID NO: 1965661 - RNA, 19 nt, Artificial Sequence
  Description of Artificial Sequence: Synthetic oligonucleotide
  Antisense strand to SEQ ID NO: 1965660
uagcucagccaguuuccuc

SEQ ID NO: 1965662 - RNA, 19 nt, Artificial Sequence
  Description of Artificial Sequence: Synthetic oligonucleotide
  Sense strand starting at position 1442 of SEQ ID NO: 1880419
ugagcuagauucucucuaa

SEQ ID NO: 1965663 - RNA, 19 nt, Artificial Sequence
  Description of Artificial Sequence: Synthetic oligonucleotide
  Antisense strand to SEQ ID NO: 1965662
uuagagagaaucuagcuca

SEQ ID NO: 1965664 - RNA, 19 nt, Artificial Sequence
  Description of Artificial Sequence: Synthetic oligonucleotide
  Sense strand starting at position 1510 of SEQ ID NO: 1880419
cgauuaaacguagagcaaa

SEQ ID NO: 1965665 - RNA, 19 nt, Artificial Sequence
  Description of Artificial Sequence: Synthetic oligonucleotide
  Antisense strand to SEQ ID NO: 1965664
uuugcucuacguuuaaucg

SEQ ID NO: 1965666 - RNA, 19 nt, Artificial Sequence
  Description of Artificial Sequence: Synthetic oligonucleotide
  Sense strand starting at position 1558 of SEQ ID NO: 1880419
guucuugagugacugagga

SEQ ID NO: 1965667 - RNA, 19 nt, Artificial Sequence
  Description of Artificial Sequence: Synthetic oligonucleotide
  Antisense strand to SEQ ID NO: 1965666
uccucagucacucaagaac

SEQ ID NO: 1965668 - RNA, 19 nt, Artificial Sequence
  Description of Artificial Sequence: Synthetic oligonucleotide
  Sense strand starting at position 1634 of SEQ ID NO: 1880419
gacgaugauuauguugaua

SEQ ID NO: 1965669 - RNA, 19 nt, Artificial Sequence
  Description of Artificial Sequence: Synthetic oligonucleotide
  Antisense strand to SEQ ID NO: 1965668
uaucaacauaaucaucguc

SEQ ID NO: 1965670 - RNA, 19 nt, Artificial Sequence
  Description of Artificial Sequence: Synthetic oligonucleotide
  Sense strand starting at position 1707 of SEQ ID NO: 1880419
uuucuuucccagugagaau

SEQ ID NO: 1965671 - RNA, 19 nt, Artificial Sequence
  Description of Artificial Sequence: Synthetic oligonucleotide
  Antisense strand to SEQ ID NO: 1965670
auucucacugggaaagaaa

SEQ ID NO: 1965672 - RNA, 19 nt, Artificial Sequence
  Description of Artificial Sequence: Synthetic oligonucleotide
  Sense strand starting at position 1788 of SEQ ID NO: 1880419
augagagauuuggagucaa

SEQ ID NO: 1965673 - RNA, 19 nt, Artificial Sequence
  Description of Artificial Sequence: Synthetic oligonucleotide
  Antisense strand to SEQ ID NO: 1965672
uugacuccaaaucucucau

SEQ ID NO: 1965674 - RNA, 19 nt, Artificial Sequence
  Description of Artificial Sequence: Synthetic oligonucleotide
  Sense strand starting at position 1818 of SEQ ID NO: 1880419
uucuaucugccagacagaa

SEQ ID NO: 1965675 - RNA, 19 nt, Artificial Sequence
  Description of Artificial Sequence: Synthetic oligonucleotide
  Antisense strand to SEQ ID NO: 1965674
uucugucuggcagauagaa

SEQ ID NO: 1965676 - RNA, 19 nt, Artificial Sequence
  Description of Artificial Sequence: Synthetic oligonucleotide
  Sense strand starting at position 1840 of SEQ ID NO: 1880419
ugccaaauucuagaaagua

SEQ ID NO: 1965677 - RNA, 19 nt, Artificial Sequence
  Description of Artificial Sequence: Synthetic oligonucleotide
  Antisense strand to SEQ ID NO: 1965676
uacuuucuagaauuuggca

SEQ ID NO: 1965678 - RNA, 19 nt, Artificial Sequence
  Description of Artificial Sequence: Synthetic oligonucleotide
  Sense strand starting at position 1885 of SEQ ID NO: 1880419
agaugaauaccuuaucgug

SEQ ID NO: 1965679 - RNA, 19 nt, Artificial Sequence
  Description of Artificial Sequence: Synthetic oligonucleotide
  Antisense strand to SEQ ID NO: 1965678
cacgauaagguauucaucu

SEQ ID NO: 1965680 - RNA, 19 nt, Artificial Sequence
  Description of Artificial Sequence: Synthetic oligonucleotide
  Sense strand starting at position 1887 of SEQ ID NO: 1880419
augaauaccuuaucgugga

SEQ ID NO: 1965681 - RNA, 19 nt, Artificial Sequence
  Description of Artificial Sequence: Synthetic oligonucleotide
  Antisense strand to SEQ ID NO: 1965680
uccacgauaagguauucau

SEQ ID NO: 1965682 - RNA, 19 nt, Artificial Sequence
  Description of Artificial Sequence: Synthetic oligonucleotide
  Sense strand starting at position 1916 of SEQ ID NO: 1880419
ugauauuaugugcagagca

SEQ ID NO: 1965683 - RNA, 19 nt, Artificial Sequence
  Description of Artificial Sequence: Synthetic oligonucleotide
  Antisense strand to SEQ ID NO: 1965682
ugcucugcacauaauauca

SEQ ID NO: 1965684 - RNA, 19 nt, Artificial Sequence
  Description of Artificial Sequence: Synthetic oligonucleotide
  Sense strand starting at position 1918 of SEQ ID NO: 1880419
auauuaugugcagagcacu

SEQ ID NO: 1965685 - RNA, 19 nt, Artificial Sequence
  Description of Artificial Sequence: Synthetic oligonucleotide
  Antisense strand to SEQ ID NO: 1965684
agugcucugcacauaauau

SEQ ID NO: 1965686 - RNA, 19 nt, Artificial Sequence
  Description of Artificial Sequence: Synthetic oligonucleotide
  Sense strand starting at position 2075 of SEQ ID NO: 1880419
ggaaaucuuaaaggcuagu

SEQ ID NO: 1965687 - RNA, 19 nt, Artificial Sequence
  Description of Artificial Sequence: Synthetic oligonucleotide
  Antisense strand to SEQ ID NO: 1965686
acuagccuuuaagauuucc

SEQ ID NO: 1965688 - RNA, 19 nt, Artificial Sequence
  Description of Artificial Sequence: Synthetic oligonucleotide
  Sense strand starting at position 2078 of SEQ ID NO: 1880419
aaucuuaaaggcuagugua

SEQ ID NO: 1965689 - RNA, 19 nt, Artificial Sequence
  Description of Artificial Sequence: Synthetic oligonucleotide
  Antisense strand to SEQ ID NO: 1965688
uacacuagccuuuaagauu

SEQ ID NO: 1965690 - RNA, 19 nt, Artificial Sequence
  Description of Artificial Sequence: Synthetic oligonucleotide
  Sense strand starting at position 2128 of SEQ ID NO: 1880419
ugaagucuucucugauaaa

SEQ ID NO: 1965691 - RNA, 19 nt, Artificial Sequence
  Description of Artificial Sequence: Synthetic oligonucleotide
  Antisense strand to SEQ ID NO: 1965690
uuuaucagagaagacuuca

SEQ ID NO: 1965692 - RNA, 19 nt, Artificial Sequence
  Description of Artificial Sequence: Synthetic oligonucleotide
  Sense strand starting at position 2710 of SEQ ID NO: 1880419
ucauguuauguccaagaca

SEQ ID NO: 1965693 - RNA, 19 nt, Artificial Sequence
  Description of Artificial Sequence: Synthetic oligonucleotide
  Antisense strand to SEQ ID NO: 1965692
ugucuuggacauaacauga

SEQ ID NO: 1965694 - RNA, 19 nt, Artificial Sequence
  Description of Artificial Sequence: Synthetic oligonucleotide
  Sense strand starting at position 2885 of SEQ ID NO: 1880419
gaaugaagugagugguuau

SEQ ID NO: 1965695 - RNA, 19 nt, Artificial Sequence
  Description of Artificial Sequence: Synthetic oligonucleotide
  Antisense strand to SEQ ID NO: 1965694
auaaccacucacuucauuc

SEQ ID NO: 1965696 - RNA, 19 nt, Artificial Sequence
  Description of Artificial Sequence: Synthetic oligonucleotide
  Sense strand starting at position 2886 of SEQ ID NO: 1880419
aaugaagugagugguuaua

SEQ ID NO: 1965697 - RNA, 19 nt, Artificial Sequence
  Description of Artificial Sequence: Synthetic oligonucleotide
  Antisense strand to SEQ ID NO: 1965696
uauaaccacucacuucauu

SEQ ID NO: 1965698 - RNA, 19 nt, Artificial Sequence
  Description of Artificial Sequence: Synthetic oligonucleotide
  Sense strand starting at position 3049 of SEQ ID NO: 1880419
aagagaggcuggccugaau

SEQ ID NO: 1965699 - RNA, 19 nt, Artificial Sequence
  Description of Artificial Sequence: Synthetic oligonucleotide
  Antisense strand to SEQ ID NO: 1965698
auucaggccagccucucuu

SEQ ID NO: 1965700 - RNA, 19 nt, Artificial Sequence
  Description of Artificial Sequence: Synthetic oligonucleotide
  Sense strand starting at position 3060 of SEQ ID NO: 1880419
gccugaauguuauuaugga

SEQ ID NO: 1965701 - RNA, 19 nt, Artificial Sequence
  Description of Artificial Sequence: Synthetic oligonucleotide
  Antisense strand to SEQ ID NO: 1965700
uccauaauaacauucaggc

SEQ ID NO: 1965702 - RNA, 19 nt, Artificial Sequence
  Description of Artificial Sequence: Synthetic oligonucleotide
  Sense strand starting at position 3279 of SEQ ID NO: 1880419
ugcucuuagucugucauuu

SEQ ID NO: 1965703 - RNA, 19 nt, Artificial Sequence
  Description of Artificial Sequence: Synthetic oligonucleotide
  Antisense strand to SEQ ID NO: 1965702
aaaugacagacuaagagca

SEQ ID NO: 1965704 - RNA, 19 nt, Artificial Sequence
  Description of Artificial Sequence: Synthetic oligonucleotide
  Sense strand starting at position 3370 of SEQ ID NO: 1880419
ccaucugugauccacgaga

SEQ ID NO: 1965705 - RNA, 19 nt, Artificial Sequence
  Description of Artificial Sequence: Synthetic oligonucleotide
  Antisense strand to SEQ ID NO: 1965704
ucucguggaucacagaugg

SEQ ID NO: 1965706 - RNA, 19 nt, Artificial Sequence
  Description of Artificial Sequence: Synthetic oligonucleotide
  Sense strand starting at position 3705 of SEQ ID NO: 1880419
uggcuaccuugaucugaga

SEQ ID NO: 1965707 - RNA, 19 nt, Artificial Sequence
  Description of Artificial Sequence: Synthetic oligonucleotide
  Antisense strand to SEQ ID NO: 1965706
ucucagaucaagguagcca

SEQ ID NO: 1965708 - RNA, 19 nt, Artificial Sequence
  Description of Artificial Sequence: Synthetic oligonucleotide
  Sense strand starting at position 3738 of SEQ ID NO: 1880419
ccuugaucagccuggauac

SEQ ID NO: 1965709 - RNA, 19 nt, Artificial Sequence
  Description of Artificial Sequence: Synthetic oligonucleotide
  Antisense strand to SEQ ID NO: 1965708
guauccaggcugaucaagg

SEQ ID NO: 1965710 - RNA, 19 nt, Artificial Sequence
  Description of Artificial Sequence: Synthetic oligonucleotide
  Sense strand starting at position 3739 of SEQ ID NO: 1880419
cuugaucagccuggauacu

SEQ ID NO: 1965711 - RNA, 19 nt, Artificial Sequence
  Description of Artificial Sequence: Synthetic oligonucleotide
  Antisense strand to SEQ ID NO: 1965710
aguauccaggcugaucaag

SEQ ID NO: 1965712 - RNA, 19 nt, Artificial Sequence
  Description of Artificial Sequence: Synthetic oligonucleotide
  Sense strand starting at position 3836 of SEQ ID NO: 1880419
auccucaguucuccaggau

SEQ ID NO: 1965713 - RNA, 19 nt, Artificial Sequence
  Description of Artificial Sequence: Synthetic oligonucleotide
  Antisense strand to SEQ ID NO: 1965712
auccuggagaacugaggau

SEQ ID NO: 1965714 - RNA, 19 nt, Artificial Sequence
  Description of Artificial Sequence: Synthetic oligonucleotide
  Sense strand starting at position 3839 of SEQ ID NO: 1880419
cucaguucuccaggaucau

SEQ ID NO: 1965715 - RNA, 19 nt, Artificial Sequence
  Description of Artificial Sequence: Synthetic oligonucleotide
  Antisense strand to SEQ ID NO: 1965714
augauccuggagaacugag

SEQ ID NO: 1965716 - RNA, 19 nt, Artificial Sequence
  Description of Artificial Sequence: Synthetic oligonucleotide
  Sense strand starting at position 3840 of SEQ ID NO: 1880419
ucaguucuccaggaucauc

SEQ ID NO: 1965717 - RNA, 19 nt, Artificial Sequence
  Description of Artificial Sequence: Synthetic oligonucleotide
  Antisense strand to SEQ ID NO: 1965716
gaugauccuggagaacuga

SEQ ID NO: 1965718 - RNA, 19 nt, Artificial Sequence
  Description of Artificial Sequence: Synthetic oligonucleotide
  Sense strand starting at position 3970 of SEQ ID NO: 1880419
ccugaaucuucccuggaga

SEQ ID NO: 1965719 - RNA, 19 nt, Artificial Sequence
  Description of Artificial Sequence: Synthetic oligonucleotide
  Antisense strand to SEQ ID NO: 1965718
ucuccagggaagauucagg

SEQ ID NO: 1965720 - RNA, 19 nt, Artificial Sequence
  Description of Artificial Sequence: Synthetic oligonucleotide
  Sense strand starting at position 134 of SEQ ID NO: 1880420
ucaggcuccucacuguuaa

SEQ ID NO: 1965721 - RNA, 19 nt, Artificial Sequence
  Description of Artificial Sequence: Synthetic oligonucleotide
  Antisense strand to SEQ ID NO: 1965720
uuaacagugaggagccuga

SEQ ID NO: 1965722 - RNA, 19 nt, Artificial Sequence
  Description of Artificial Sequence: Synthetic oligonucleotide
  Sense strand starting at position 167 of SEQ ID NO: 1880420
agugaaagagcuugggcaa

SEQ ID NO: 1965723 - RNA, 19 nt, Artificial Sequence
  Description of Artificial Sequence: Synthetic oligonucleotide
  Antisense strand to SEQ ID NO: 1965722
uugcccaagcucuuucacu

SEQ ID NO: 1965724 - RNA, 19 nt, Artificial Sequence
  Description of Artificial Sequence: Synthetic oligonucleotide
  Sense strand starting at position 168 of SEQ ID NO: 1880420
gugaaagagcuugggcaaa

SEQ ID NO: 1965725 - RNA, 19 nt, Artificial Sequence
  Description of Artificial Sequence: Synthetic oligonucleotide
  Antisense strand to SEQ ID NO: 1965724
uuugcccaagcucuuucac

SEQ ID NO: 1965726 - RNA, 19 nt, Artificial Sequence
  Description of Artificial Sequence: Synthetic oligonucleotide
  Sense strand starting at position 170 of SEQ ID NO: 1880420
gaaagagcuugggcaaagu

SEQ ID NO: 1965727 - RNA, 19 nt, Artificial Sequence
  Description of Artificial Sequence: Synthetic oligonucleotide
  Antisense strand to SEQ ID NO: 1965726
acuuugcccaagcucuuuc

SEQ ID NO: 1965728 - RNA, 19 nt, Artificial Sequence
  Description of Artificial Sequence: Synthetic oligonucleotide
  Sense strand starting at position 181 of SEQ ID NO: 1880420
ggcaaaguuaugggcauau

SEQ ID NO: 1965729 - RNA, 19 nt, Artificial Sequence
  Description of Artificial Sequence: Synthetic oligonucleotide
  Antisense strand to SEQ ID NO: 1965728
auaugcccauaacuuugcc

SEQ ID NO: 1965730 - RNA, 19 nt, Artificial Sequence
  Description of Artificial Sequence: Synthetic oligonucleotide
  Sense strand starting at position 279 of SEQ ID NO: 1880420
ccaagugauaacugacguu

SEQ ID NO: 1965731 - RNA, 19 nt, Artificial Sequence
  Description of Artificial Sequence: Synthetic oligonucleotide
  Antisense strand to SEQ ID NO: 1965730
aacgucaguuaucacuugg

SEQ ID NO: 1965732 - RNA, 19 nt, Artificial Sequence
  Description of Artificial Sequence: Synthetic oligonucleotide
  Sense strand starting at position 286 of SEQ ID NO: 1880420
auaacugacguuuaucaca

SEQ ID NO: 1965733 - RNA, 19 nt, Artificial Sequence
  Description of Artificial Sequence: Synthetic oligonucleotide
  Antisense strand to SEQ ID NO: 1965732
ugugauaaacgucaguuau

SEQ ID NO: 1965734 - RNA, 19 nt, Artificial Sequence
  Description of Artificial Sequence: Synthetic oligonucleotide
  Sense strand starting at position 375 of SEQ ID NO: 1880420
acacaaacauugucaaugu

SEQ ID NO: 1965735 - RNA, 19 nt, Artificial Sequence
  Description of Artificial Sequence: Synthetic oligonucleotide
  Antisense strand to SEQ ID NO: 1965734
acauugacaauguuugugu

SEQ ID NO: 1965736 - RNA, 19 nt, Artificial Sequence
  Description of Artificial Sequence: Synthetic oligonucleotide
  Sense strand starting at position 383 of SEQ ID NO: 1880420
auugucaaugucugcauuu

SEQ ID NO: 1965737 - RNA, 19 nt, Artificial Sequence
  Description of Artificial Sequence: Synthetic oligonucleotide
  Antisense strand to SEQ ID NO: 1965736
aaaugcagacauugacaau

SEQ ID NO: 1965738 - RNA, 19 nt, Artificial Sequence
  Description of Artificial Sequence: Synthetic oligonucleotide
  Sense strand starting at position 403 of SEQ ID NO: 1880420
ccagaagacgacuguaaag

SEQ ID NO: 1965739 - RNA, 19 nt, Artificial Sequence
  Description of Artificial Sequence: Synthetic oligonucleotide
  Antisense strand to SEQ ID NO: 1965738
cuuuacagucgucuucugg

SEQ ID NO: 1965740 - RNA, 19 nt, Artificial Sequence
  Description of Artificial Sequence: Synthetic oligonucleotide
  Sense strand starting at position 559 of SEQ ID NO: 1880420
guuuccauuugaggaucua

SEQ ID NO: 1965741 - RNA, 19 nt, Artificial Sequence
  Description of Artificial Sequence: Synthetic oligonucleotide
  Antisense strand to SEQ ID NO: 1965740
uagauccucaaauggaaac

SEQ ID NO: 1965742 - RNA, 19 nt, Artificial Sequence
  Description of Artificial Sequence: Synthetic oligonucleotide
  Sense strand starting at position 569 of SEQ ID NO: 1880420
gaggaucuaucauuccaug

SEQ ID NO: 1965743 - RNA, 19 nt, Artificial Sequence
  Description of Artificial Sequence: Synthetic oligonucleotide
  Antisense strand to SEQ ID NO: 1965742
cauggaaugauagauccuc

SEQ ID NO: 1965744 - RNA, 19 nt, Artificial Sequence
  Description of Artificial Sequence: Synthetic oligonucleotide
  Sense strand starting at position 634 of SEQ ID NO: 1880420
guugacaaauguuuaugaa

SEQ ID NO: 1965745 - RNA, 19 nt, Artificial Sequence
  Description of Artificial Sequence: Synthetic oligonucleotide
  Antisense strand to SEQ ID NO: 1965744
uucauaaacauuugucaac

SEQ ID NO: 1965746 - RNA, 19 nt, Artificial Sequence
  Description of Artificial Sequence: Synthetic oligonucleotide
  Sense strand starting at position 692 of SEQ ID NO: 1880420
uggagaauugucugcagaa

SEQ ID NO: 1965747 - RNA, 19 nt, Artificial Sequence
  Description of Artificial Sequence: Synthetic oligonucleotide
  Antisense strand to SEQ ID NO: 1965746
uucugcagacaauucucca

SEQ ID NO: 1965748 - RNA, 19 nt, Artificial Sequence
  Description of Artificial Sequence: Synthetic oligonucleotide
  Sense strand starting at position 693 of SEQ ID NO: 1880420
ggagaauugucugcagaau

SEQ ID NO: 1965749 - RNA, 19 nt, Artificial Sequence
  Description of Artificial Sequence: Synthetic oligonucleotide
  Antisense strand to SEQ ID NO: 1965748
auucugcagacaauucucc

SEQ ID NO: 1965750 - RNA, 19 nt, Artificial Sequence
  Description of Artificial Sequence: Synthetic oligonucleotide
  Sense strand starting at position 699 of SEQ ID NO: 1880420
uugucugcagaaugagaaa

SEQ ID NO: 1965751 - RNA, 19 nt, Artificial Sequence
  Description of Artificial Sequence: Synthetic oligonucleotide
  Antisense strand to SEQ ID NO: 1965750
uuucucauucugcagacaa

SEQ ID NO: 1965752 - RNA, 19 nt, Artificial Sequence
  Description of Artificial Sequence: Synthetic oligonucleotide
  Sense strand starting at position 814 of SEQ ID NO: 1880420
gauccaaucccugggcaga

SEQ ID NO: 1965753 - RNA, 19 nt, Artificial Sequence
  Description of Artificial Sequence: Synthetic oligonucleotide
  Antisense strand to SEQ ID NO: 1965752
ucugcccagggauuggauc

SEQ ID NO: 1965754 - RNA, 19 nt, Artificial Sequence
  Description of Artificial Sequence: Synthetic oligonucleotide
  Sense strand starting at position 816 of SEQ ID NO: 1880420
uccaaucccugggcagaaa

SEQ ID NO: 1965755 - RNA, 19 nt, Artificial Sequence
  Description of Artificial Sequence: Synthetic oligonucleotide
  Antisense strand to SEQ ID NO: 1965754
uuucugcccagggauugga

SEQ ID NO: 1965756 - RNA, 19 nt, Artificial Sequence
  Description of Artificial Sequence: Synthetic oligonucleotide
  Sense strand starting at position 878 of SEQ ID NO: 1880420
uguguaaacacguggucau

SEQ ID NO: 1965757 - RNA, 19 nt, Artificial Sequence
  Description of Artificial Sequence: Synthetic oligonucleotide
  Antisense strand to SEQ ID NO: 1965756
augaccacguguuuacaca

SEQ ID NO: 1965758 - RNA, 19 nt, Artificial Sequence
  Description of Artificial Sequence: Synthetic oligonucleotide
  Sense strand starting at position 879 of SEQ ID NO: 1880420
guguaaacacguggucauu

SEQ ID NO: 1965759 - RNA, 19 nt, Artificial Sequence
  Description of Artificial Sequence: Synthetic oligonucleotide
  Antisense strand to SEQ ID NO: 1965758
aaugaccacguguuuacac

SEQ ID NO: 1965760 - RNA, 19 nt, Artificial Sequence
  Description of Artificial Sequence: Synthetic oligonucleotide
  Sense strand starting at position 1033 of SEQ ID NO: 1880420
accuucgauuagucacagu

SEQ ID NO: 1965761 - RNA, 19 nt, Artificial Sequence
  Description of Artificial Sequence: Synthetic oligonucleotide
  Antisense strand to SEQ ID NO: 1965760
acugugacuaaucgaaggu

SEQ ID NO: 1965762 - RNA, 19 nt, Artificial Sequence
  Description of Artificial Sequence: Synthetic oligonucleotide
  Sense strand starting at position 1557 of SEQ ID NO: 1880420
ucuuaagacugauagacca

SEQ ID NO: 1965763 - RNA, 19 nt, Artificial Sequence
  Description of Artificial Sequence: Synthetic oligonucleotide
  Antisense strand to SEQ ID NO: 1965762
uggucuaucagucuuaaga

SEQ ID NO: 1965764 - RNA, 19 nt, Artificial Sequence
  Description of Artificial Sequence: Synthetic oligonucleotide
  Sense strand starting at position 2028 of SEQ ID NO: 1880420
cagaaauugcccugugcag

SEQ ID NO: 1965765 - RNA, 19 nt, Artificial Sequence
  Description of Artificial Sequence: Synthetic oligonucleotide
  Antisense strand to SEQ ID NO: 1965764
cugcacagggcaauuucug

SEQ ID NO: 1965766 - RNA, 19 nt, Artificial Sequence
  Description of Artificial Sequence: Synthetic oligonucleotide
  Sense strand starting at position 2115 of SEQ ID NO: 1880420
aaggguauucccugaacca

SEQ ID NO: 1965767 - RNA, 19 nt, Artificial Sequence
  Description of Artificial Sequence: Synthetic oligonucleotide
  Antisense strand to SEQ ID NO: 1965766
ugguucagggaauacccuu

SEQ ID NO: 1965768 - RNA, 19 nt, Artificial Sequence
  Description of Artificial Sequence: Synthetic oligonucleotide
  Sense strand starting at position 2505 of SEQ ID NO: 1880420
ucucaaggagucugaauuc

SEQ ID NO: 1965769 - RNA, 19 nt, Artificial Sequence
  Description of Artificial Sequence: Synthetic oligonucleotide
  Antisense strand to SEQ ID NO: 1965768
gaauucagacuccuugaga

SEQ ID NO: 1965770 - RNA, 19 nt, Artificial Sequence
  Description of Artificial Sequence: Synthetic oligonucleotide
  Sense strand starting at position 2748 of SEQ ID NO: 1880420
ggugcaguauucuucuaaa

SEQ ID NO: 1965771 - RNA, 19 nt, Artificial Sequence
  Description of Artificial Sequence: Synthetic oligonucleotide
  Antisense strand to SEQ ID NO: 1965770
uuuagaagaauacugcacc

SEQ ID NO: 1965772 - RNA, 19 nt, Artificial Sequence
  Description of Artificial Sequence: Synthetic oligonucleotide
  Sense strand starting at position 2832 of SEQ ID NO: 1880420
aagggaacguccuuugaaa

SEQ ID NO: 1965773 - RNA, 19 nt, Artificial Sequence
  Description of Artificial Sequence: Synthetic oligonucleotide
  Antisense strand to SEQ ID NO: 1965772
uuucaaaggacguucccuu

SEQ ID NO: 1965774 - RNA, 19 nt, Artificial Sequence
  Description of Artificial Sequence: Synthetic oligonucleotide
  Sense strand starting at position 2911 of SEQ ID NO: 1880420
acaaaugcuugaguauauc

SEQ ID NO: 1965775 - RNA, 19 nt, Artificial Sequence
  Description of Artificial Sequence: Synthetic oligonucleotide
  Antisense strand to SEQ ID NO: 1965774
gauauacucaagcauuugu

SEQ ID NO: 1965776 - RNA, 19 nt, Artificial Sequence
  Description of Artificial Sequence: Synthetic oligonucleotide
  Sense strand starting at position 2953 of SEQ ID NO: 1880420
gagauagugcaaugaacaa

SEQ ID NO: 1965777 - RNA, 19 nt, Artificial Sequence
  Description of Artificial Sequence: Synthetic oligonucleotide
  Antisense strand to SEQ ID NO: 1965776
uuguucauugcacuaucuc

SEQ ID NO: 1965778 - RNA, 19 nt, Artificial Sequence
  Description of Artificial Sequence: Synthetic oligonucleotide
  Sense strand starting at position 3001 of SEQ ID NO: 1880420
uucuauccugguggacaaa

SEQ ID NO: 1965779 - RNA, 19 nt, Artificial Sequence
  Description of Artificial Sequence: Synthetic oligonucleotide
  Antisense strand to SEQ ID NO: 1965778
uuuguccaccaggauagaa

SEQ ID NO: 1965780 - RNA, 19 nt, Artificial Sequence
  Description of Artificial Sequence: Synthetic oligonucleotide
  Sense strand starting at position 3219 of SEQ ID NO: 1880420
uggugcugaggucaaagau

SEQ ID NO: 1965781 - RNA, 19 nt, Artificial Sequence
  Description of Artificial Sequence: Synthetic oligonucleotide
  Antisense strand to SEQ ID NO: 1965780
aucuuugaccucagcacca

SEQ ID NO: 1965782 - RNA, 19 nt, Artificial Sequence
  Description of Artificial Sequence: Synthetic oligonucleotide
  Sense strand starting at position 3267 of SEQ ID NO: 1880420
cugagucaggacuagcauu

SEQ ID NO: 1965783 - RNA, 19 nt, Artificial Sequence
  Description of Artificial Sequence: Synthetic oligonucleotide
  Antisense strand to SEQ ID NO: 1965782
aaugcuaguccugacucag

SEQ ID NO: 1965784 - RNA, 19 nt, Artificial Sequence
  Description of Artificial Sequence: Synthetic oligonucleotide
  Sense strand starting at position 3414 of SEQ ID NO: 1880420
cuggccucgugaucaauga

SEQ ID NO: 1965785 - RNA, 19 nt, Artificial Sequence
  Description of Artificial Sequence: Synthetic oligonucleotide
  Antisense strand to SEQ ID NO: 1965784
ucauugaucacgaggccag

SEQ ID NO: 1965786 - RNA, 19 nt, Artificial Sequence
  Description of Artificial Sequence: Synthetic oligonucleotide
  Sense strand starting at position 3415 of SEQ ID NO: 1880420
uggccucgugaucaaugau

SEQ ID NO: 1965787 - RNA, 19 nt, Artificial Sequence
  Description of Artificial Sequence: Synthetic oligonucleotide
  Antisense strand to SEQ ID NO: 1965786
aucauugaucacgaggcca

SEQ ID NO: 1965788 - RNA, 19 nt, Artificial Sequence
  Description of Artificial Sequence: Synthetic oligonucleotide
  Sense strand starting at position 3418 of SEQ ID NO: 1880420
ccucgugaucaaugauggu

SEQ ID NO: 1965789 - RNA, 19 nt, Artificial Sequence
  Description of Artificial Sequence: Synthetic oligonucleotide
  Antisense strand to SEQ ID NO: 1965788
accaucauugaucacgagg

SEQ ID NO: 1965790 - RNA, 19 nt, Artificial Sequence
  Description of Artificial Sequence: Synthetic oligonucleotide
  Sense strand starting at position 3422 of SEQ ID NO: 1880420
gugaucaaugaugguggau

SEQ ID NO: 1965791 - RNA, 19 nt, Artificial Sequence
  Description of Artificial Sequence: Synthetic oligonucleotide
  Antisense strand to SEQ ID NO: 1965790
auccaccaucauugaucac

SEQ ID NO: 1965792 - RNA, 19 nt, Artificial Sequence
  Description of Artificial Sequence: Synthetic oligonucleotide
  Sense strand starting at position 3424 of SEQ ID NO: 1880420
gaucaaugaugguggauuu

SEQ ID NO: 1965793 - RNA, 19 nt, Artificial Sequence
  Description of Artificial Sequence: Synthetic oligonucleotide
  Antisense strand to SEQ ID NO: 1965792
aaauccaccaucauugauc

SEQ ID NO: 1965794 - RNA, 19 nt, Artificial Sequence
  Description of Artificial Sequence: Synthetic oligonucleotide
  Sense strand starting at position 3490 of SEQ ID NO: 1880420
aaacgauuuccuugcugua

SEQ ID NO: 1965795 - RNA, 19 nt, Artificial Sequence
  Description of Artificial Sequence: Synthetic oligonucleotide
  Antisense strand to SEQ ID NO: 1965794
uacagcaaggaaaucguuu

SEQ ID NO: 1965796 - RNA, 19 nt, Artificial Sequence
  Description of Artificial Sequence: Synthetic oligonucleotide
  Sense strand starting at position 3566 of SEQ ID NO: 1880420
auggaauauuucugcacuc

SEQ ID NO: 1965797 - RNA, 19 nt, Artificial Sequence
  Description of Artificial Sequence: Synthetic oligonucleotide
  Antisense strand to SEQ ID NO: 1965796
gagugcagaaauauuccau

SEQ ID NO: 1965798 - RNA, 19 nt, Artificial Sequence
  Description of Artificial Sequence: Synthetic oligonucleotide
  Sense strand starting at position 3601 of SEQ ID NO: 1880420
ggcucauucccagacauaa

SEQ ID NO: 1965799 - RNA, 19 nt, Artificial Sequence
  Description of Artificial Sequence: Synthetic oligonucleotide
  Antisense strand to SEQ ID NO: 1965798
uuaugucugggaaugagcc

SEQ ID NO: 1965800 - RNA, 19 nt, Artificial Sequence
  Description of Artificial Sequence: Synthetic oligonucleotide
  Sense strand starting at position 56 of SEQ ID NO: 1880421
gcugucaugauggagucua

SEQ ID NO: 1965801 - RNA, 19 nt, Artificial Sequence
  Description of Artificial Sequence: Synthetic oligonucleotide
  Antisense strand to SEQ ID NO: 1965800
uagacuccaucaugacagc

SEQ ID NO: 1965802 - RNA, 19 nt, Artificial Sequence
  Description of Artificial Sequence: Synthetic oligonucleotide
  Sense strand starting at position 357 of SEQ ID NO: 1880421
ugggacaauguuuauguga

SEQ ID NO: 1965803 - RNA, 19 nt, Artificial Sequence
  Description of Artificial Sequence: Synthetic oligonucleotide
  Antisense strand to SEQ ID NO: 1965802
ucacauaaacauuguccca

SEQ ID NO: 1965804 - RNA, 19 nt, Artificial Sequence
  Description of Artificial Sequence: Synthetic oligonucleotide
  Sense strand starting at position 454 of SEQ ID NO: 1880421
aggucacauuuagauuaaa

SEQ ID NO: 1965805 - RNA, 19 nt, Artificial Sequence
  Description of Artificial Sequence: Synthetic oligonucleotide
  Antisense strand to SEQ ID NO: 1965804
uuuaaucuaaaugugaccu

SEQ ID NO: 1965806 - RNA, 19 nt, Artificial Sequence
  Description of Artificial Sequence: Synthetic oligonucleotide
  Sense strand starting at position 617 of SEQ ID NO: 1880421
gcagcagcucguuucaaga

SEQ ID NO: 1965807 - RNA, 19 nt, Artificial Sequence
  Description of Artificial Sequence: Synthetic oligonucleotide
  Antisense strand to SEQ ID NO: 1965806
ucuugaaacgagcugcugc

SEQ ID NO: 1965808 - RNA, 19 nt, Artificial Sequence
  Description of Artificial Sequence: Synthetic oligonucleotide
  Sense strand starting at position 641 of SEQ ID NO: 1880421
gguguugcggcauuaauuc

SEQ ID NO: 1965809 - RNA, 19 nt, Artificial Sequence
  Description of Artificial Sequence: Synthetic oligonucleotide
  Antisense strand to SEQ ID NO: 1965808
gaauuaaugccgcaacacc

SEQ ID NO: 1965810 - RNA, 19 nt, Artificial Sequence
  Description of Artificial Sequence: Synthetic oligonucleotide
  Sense strand starting at position 811 of SEQ ID NO: 1880421
uggcuugcuccguucagau

SEQ ID NO: 1965811 - RNA, 19 nt, Artificial Sequence
  Description of Artificial Sequence: Synthetic oligonucleotide
  Antisense strand to SEQ ID NO: 1965810
aucugaacggagcaagcca

SEQ ID NO: 1965812 - RNA, 19 nt, Artificial Sequence
  Description of Artificial Sequence: Synthetic oligonucleotide
  Sense strand starting at position 859 of SEQ ID NO: 1880421
uucuauggccucugaggga

SEQ ID NO: 1965813 - RNA, 19 nt, Artificial Sequence
  Description of Artificial Sequence: Synthetic oligonucleotide
  Antisense strand to SEQ ID NO: 1965812
ucccucagaggccauagaa

SEQ ID NO: 1965814 - RNA, 19 nt, Artificial Sequence
  Description of Artificial Sequence: Synthetic oligonucleotide
  Sense strand starting at position 958 of SEQ ID NO: 1880421
cacuguugcccggagacuu

SEQ ID NO: 1965815 - RNA, 19 nt, Artificial Sequence
  Description of Artificial Sequence: Synthetic oligonucleotide
  Antisense strand to SEQ ID NO: 1965814
aagucuccgggcaacagug

SEQ ID NO: 1965816 - RNA, 19 nt, Artificial Sequence
  Description of Artificial Sequence: Synthetic oligonucleotide
  Sense strand starting at position 1160 of SEQ ID NO: 1880421
acaguaacauuggauuuga

SEQ ID NO: 1965817 - RNA, 19 nt, Artificial Sequence
  Description of Artificial Sequence: Synthetic oligonucleotide
  Antisense strand to SEQ ID NO: 1965816
ucaaauccaauguuacugu

SEQ ID NO: 1965818 - RNA, 19 nt, Artificial Sequence
  Description of Artificial Sequence: Synthetic oligonucleotide
  Sense strand starting at position 1203 of SEQ ID NO: 1880421
agagcuucggauugauuac

SEQ ID NO: 1965819 - RNA, 19 nt, Artificial Sequence
  Description of Artificial Sequence: Synthetic oligonucleotide
  Antisense strand to SEQ ID NO: 1965818
guaaucaauccgaagcucu

SEQ ID NO: 1965820 - RNA, 19 nt, Artificial Sequence
  Description of Artificial Sequence: Synthetic oligonucleotide
  Sense strand starting at position 1210 of SEQ ID NO: 1880421
cggauugauuacgcuaaac

SEQ ID NO: 1965821 - RNA, 19 nt, Artificial Sequence
  Description of Artificial Sequence: Synthetic oligonucleotide
  Antisense strand to SEQ ID NO: 1965820
guuuagcguaaucaauccg

SEQ ID NO: 1965822 - RNA, 19 nt, Artificial Sequence
  Description of Artificial Sequence: Synthetic oligonucleotide
  Sense strand starting at position 1299 of SEQ ID NO: 1880421
uccucuauuugggauggau

SEQ ID NO: 1965823 - RNA, 19 nt, Artificial Sequence
  Description of Artificial Sequence: Synthetic oligonucleotide
  Antisense strand to SEQ ID NO: 1965822
auccaucccaaauagagga

SEQ ID NO: 1965824 - RNA, 19 nt, Artificial Sequence
  Description of Artificial Sequence: Synthetic oligonucleotide
  Sense strand starting at position 1437 of SEQ ID NO: 1880421
acauuucucgucugaugcu

SEQ ID NO: 1965825 - RNA, 19 nt, Artificial Sequence
  Description of Artificial Sequence: Synthetic oligonucleotide
  Antisense strand to SEQ ID NO: 1965824
agcaucagacgagaaaugu

SEQ ID NO: 1965826 - RNA, 19 nt, Artificial Sequence
  Description of Artificial Sequence: Synthetic oligonucleotide
  Sense strand starting at position 1486 of SEQ ID NO: 1880421
agacucauuuaauagauga

SEQ ID NO: 1965827 - RNA, 19 nt, Artificial Sequence
  Description of Artificial Sequence: Synthetic oligonucleotide
  Antisense strand to SEQ ID NO: 1965826
ucaucuauuaaaugagucu

SEQ ID NO: 1965828 - RNA, 19 nt, Artificial Sequence
  Description of Artificial Sequence: Synthetic oligonucleotide
  Sense strand starting at position 1575 of SEQ ID NO: 1880421
agcuccaauucuguggauu

SEQ ID NO: 1965829 - RNA, 19 nt, Artificial Sequence
  Description of Artificial Sequence: Synthetic oligonucleotide
  Antisense strand to SEQ ID NO: 1965828
aauccacagaauuggagcu

SEQ ID NO: 1965830 - RNA, 19 nt, Artificial Sequence
  Description of Artificial Sequence: Synthetic oligonucleotide
  Sense strand starting at position 1820 of SEQ ID NO: 1880421
gcugacuugaaaggugaca

SEQ ID NO: 1965831 - RNA, 19 nt, Artificial Sequence
  Description of Artificial Sequence: Synthetic oligonucleotide
  Antisense strand to SEQ ID NO: 1965830
ugucaccuuucaagucagc

SEQ ID NO: 1965832 - RNA, 19 nt, Artificial Sequence
  Description of Artificial Sequence: Synthetic oligonucleotide
  Sense strand starting at position 1878 of SEQ ID NO: 1880421
auuaguucuuucucuuaga

SEQ ID NO: 1965833 - RNA, 19 nt, Artificial Sequence
  Description of Artificial Sequence: Synthetic oligonucleotide
  Antisense strand to SEQ ID NO: 1965832
ucuaagagaaagaacuaau

SEQ ID NO: 1965834 - RNA, 19 nt, Artificial Sequence
  Description of Artificial Sequence: Synthetic oligonucleotide
  Sense strand starting at position 1879 of SEQ ID NO: 1880421
uuaguucuuucucuuagag

SEQ ID NO: 1965835 - RNA, 19 nt, Artificial Sequence
  Description of Artificial Sequence: Synthetic oligonucleotide
  Antisense strand to SEQ ID NO: 1965834
cucuaagagaaagaacuaa

SEQ ID NO: 1965836 - RNA, 19 nt, Artificial Sequence
  Description of Artificial Sequence: Synthetic oligonucleotide
  Sense strand starting at position 2083 of SEQ ID NO: 1880421
gcucuuaagccagaugagu

SEQ ID NO: 1965837 - RNA, 19 nt, Artificial Sequence
  Description of Artificial Sequence: Synthetic oligonucleotide
  Antisense strand to SEQ ID NO: 1965836
acucaucuggcuuaagagc

SEQ ID NO: 1965838 - RNA, 19 nt, Artificial Sequence
  Description of Artificial Sequence: Synthetic oligonucleotide
  Sense strand starting at position 2128 of SEQ ID NO: 1880421
gucuguguucuugugguau

SEQ ID NO: 1965839 - RNA, 19 nt, Artificial Sequence
  Description of Artificial Sequence: Synthetic oligonucleotide
  Antisense strand to SEQ ID NO: 1965838
auaccacaagaacacagac

SEQ ID NO: 1965840 - RNA, 19 nt, Artificial Sequence
  Description of Artificial Sequence: Synthetic oligonucleotide
  Sense strand starting at position 2161 of SEQ ID NO: 1880421
auggauuauuagccacagu

SEQ ID NO: 1965841 - RNA, 19 nt, Artificial Sequence
  Description of Artificial Sequence: Synthetic oligonucleotide
  Antisense strand to SEQ ID NO: 1965840
acuguggcuaauaauccau

SEQ ID NO: 1965842 - RNA, 19 nt, Artificial Sequence
  Description of Artificial Sequence: Synthetic oligonucleotide
  Sense strand starting at position 2164 of SEQ ID NO: 1880421
gauuauuagccacaguuga

SEQ ID NO: 1965843 - RNA, 19 nt, Artificial Sequence
  Description of Artificial Sequence: Synthetic oligonucleotide
  Antisense strand to SEQ ID NO: 1965842
ucaacuguggcuaauaauc

SEQ ID NO: 1965844 - RNA, 19 nt, Artificial Sequence
  Description of Artificial Sequence: Synthetic oligonucleotide
  Sense strand starting at position 2175 of SEQ ID NO: 1880421
acaguugaccuuugcaaag

SEQ ID NO: 1965845 - RNA, 19 nt, Artificial Sequence
  Description of Artificial Sequence: Synthetic oligonucleotide
  Antisense strand to SEQ ID NO: 1965844
cuuugcaaaggucaacugu

SEQ ID NO: 1965846 - RNA, 19 nt, Artificial Sequence
  Description of Artificial Sequence: Synthetic oligonucleotide
  Sense strand starting at position 2187 of SEQ ID NO: 1880421
ugcaaaguucuccaaguau

SEQ ID NO: 1965847 - RNA, 19 nt, Artificial Sequence
  Description of Artificial Sequence: Synthetic oligonucleotide
  Antisense strand to SEQ ID NO: 1965846
auacuuggagaacuuugca

SEQ ID NO: 1965848 - RNA, 19 nt, Artificial Sequence
  Description of Artificial Sequence: Synthetic oligonucleotide
  Sense strand starting at position 2230 of SEQ ID NO: 1880421
gagugaucagcauacacga

SEQ ID NO: 1965849 - RNA, 19 nt, Artificial Sequence
  Description of Artificial Sequence: Synthetic oligonucleotide
  Antisense strand to SEQ ID NO: 1965848
ucguguaugcugaucacuc

SEQ ID NO: 1965850 - RNA, 19 nt, Artificial Sequence
  Description of Artificial Sequence: Synthetic oligonucleotide
  Sense strand starting at position 2434 of SEQ ID NO: 1880421
ccaccaaauguugagaguu

SEQ ID NO: 1965851 - RNA, 19 nt, Artificial Sequence
  Description of Artificial Sequence: Synthetic oligonucleotide
  Antisense strand to SEQ ID NO: 1965850
aacucucaacauuuggugg

SEQ ID NO: 1965852 - RNA, 19 nt, Artificial Sequence
  Description of Artificial Sequence: Synthetic oligonucleotide
  Sense strand starting at position 2440 of SEQ ID NO: 1880421
aauguugagaguugacuag

SEQ ID NO: 1965853 - RNA, 19 nt, Artificial Sequence
  Description of Artificial Sequence: Synthetic oligonucleotide
  Antisense strand to SEQ ID NO: 1965852
cuagucaacucucaacauu

SEQ ID NO: 1965854 - RNA, 19 nt, Artificial Sequence
  Description of Artificial Sequence: Synthetic oligonucleotide
  Sense strand starting at position 2452 of SEQ ID NO: 1880421
ugacuaguugccuaauagu

SEQ ID NO: 1965855 - RNA, 19 nt, Artificial Sequence
  Description of Artificial Sequence: Synthetic oligonucleotide
  Antisense strand to SEQ ID NO: 1965854
acuauuaggcaacuaguca

SEQ ID NO: 1965856 - RNA, 19 nt, Artificial Sequence
  Description of Artificial Sequence: Synthetic oligonucleotide
  Sense strand starting at position 3005 of SEQ ID NO: 1880421
gggugaguggaguaaaucu

SEQ ID NO: 1965857 - RNA, 19 nt, Artificial Sequence
  Description of Artificial Sequence: Synthetic oligonucleotide
  Antisense strand to SEQ ID NO: 1965856
agauuuacuccacucaccc

SEQ ID NO: 1965858 - RNA, 19 nt, Artificial Sequence
  Description of Artificial Sequence: Synthetic oligonucleotide
  Sense strand starting at position 3051 of SEQ ID NO: 1880421
auauccuagccuugaaguu

SEQ ID NO: 1965859 - RNA, 19 nt, Artificial Sequence
  Description of Artificial Sequence: Synthetic oligonucleotide
  Antisense strand to SEQ ID NO: 1965858
aacuucaaggcuaggauau

SEQ ID NO: 1965860 - RNA, 19 nt, Artificial Sequence
  Description of Artificial Sequence: Synthetic oligonucleotide
  Sense strand starting at position 3120 of SEQ ID NO: 1880421
gcaagauucuaaucagcac

SEQ ID NO: 1965861 - RNA, 19 nt, Artificial Sequence
  Description of Artificial Sequence: Synthetic oligonucleotide
  Antisense strand to SEQ ID NO: 1965860
gugcugauuagaaucuugc

SEQ ID NO: 1965862 - RNA, 19 nt, Artificial Sequence
  Description of Artificial Sequence: Synthetic oligonucleotide
  Sense strand starting at position 3341 of SEQ ID NO: 1880421
aucccauugugcuugagaa

SEQ ID NO: 1965863 - RNA, 19 nt, Artificial Sequence
  Description of Artificial Sequence: Synthetic oligonucleotide
  Antisense strand to SEQ ID NO: 1965862
uucucaagcacaaugggau

SEQ ID NO: 1965864 - RNA, 19 nt, Artificial Sequence
  Description of Artificial Sequence: Synthetic oligonucleotide
  Sense strand starting at position 3548 of SEQ ID NO: 1880421
guccaucauggagguaaga

SEQ ID NO: 1965865 - RNA, 19 nt, Artificial Sequence
  Description of Artificial Sequence: Synthetic oligonucleotide
  Antisense strand to SEQ ID NO: 1965864
ucuuaccuccaugauggac

SEQ ID NO: 1965866 - RNA, 19 nt, Artificial Sequence
  Description of Artificial Sequence: Synthetic oligonucleotide
  Sense strand starting at position 3628 of SEQ ID NO: 1880421
ggcugaaagauguaaugug

SEQ ID NO: 1965867 - RNA, 19 nt, Artificial Sequence
  Description of Artificial Sequence: Synthetic oligonucleotide
  Antisense strand to SEQ ID NO: 1965866
cacauuacaucuuucagcc

SEQ ID NO: 1965868 - RNA, 19 nt, Artificial Sequence
  Description of Artificial Sequence: Synthetic oligonucleotide
  Sense strand starting at position 3635 of SEQ ID NO: 1880421
agauguaaugugcaagaac

SEQ ID NO: 1965869 - RNA, 19 nt, Artificial Sequence
  Description of Artificial Sequence: Synthetic oligonucleotide
  Antisense strand to SEQ ID NO: 1965868
guucuugcacauuacaucu

SEQ ID NO: 1965870 - RNA, 19 nt, Artificial Sequence
  Description of Artificial Sequence: Synthetic oligonucleotide
  Sense strand starting at position 3644 of SEQ ID NO: 1880421
gugcaagaaccucgagaaa

SEQ ID NO: 1965871 - RNA, 19 nt, Artificial Sequence
  Description of Artificial Sequence: Synthetic oligonucleotide
  Antisense strand to SEQ ID NO: 1965870
uuucucgagguucuugcac

SEQ ID NO: 1965872 - RNA, 19 nt, Artificial Sequence
  Description of Artificial Sequence: Synthetic oligonucleotide
  Sense strand starting at position 3670 of SEQ ID NO: 1880421
cugugucuugguggaaaga

SEQ ID NO: 1965873 - RNA, 19 nt, Artificial Sequence
  Description of Artificial Sequence: Synthetic oligonucleotide
  Antisense strand to SEQ ID NO: 1965872
ucuuuccaccaagacacag

SEQ ID NO: 1965874 - RNA, 19 nt, Artificial Sequence
  Description of Artificial Sequence: Synthetic oligonucleotide
  Sense strand starting at position 3671 of SEQ ID NO: 1880421
ugugucuugguggaaagaa

SEQ ID NO: 1965875 - RNA, 19 nt, Artificial Sequence
  Description of Artificial Sequence: Synthetic oligonucleotide
  Antisense strand to SEQ ID NO: 1965874
uucuuuccaccaagacaca

SEQ ID NO: 1965876 - RNA, 19 nt, Artificial Sequence
  Description of Artificial Sequence: Synthetic oligonucleotide
  Sense strand starting at position 3698 of SEQ ID NO: 1880421
cuaucaggagucuguccaa

SEQ ID NO: 1965877 - RNA, 19 nt, Artificial Sequence
  Description of Artificial Sequence: Synthetic oligonucleotide
  Antisense strand to SEQ ID NO: 1965876
uuggacagacuccugauag

SEQ ID NO: 1965878 - RNA, 19 nt, Artificial Sequence
  Description of Artificial Sequence: Synthetic oligonucleotide
  Sense strand starting at position 3911 of SEQ ID NO: 1880421
uguguuauccuauagcaga

SEQ ID NO: 1965879 - RNA, 19 nt, Artificial Sequence
  Description of Artificial Sequence: Synthetic oligonucleotide
  Antisense strand to SEQ ID NO: 1965878
ucugcuauaggauaacaca

SEQ ID NO: 1965880 - RNA, 19 nt, Artificial Sequence
  Description of Artificial Sequence: Synthetic oligonucleotide
  Sense strand starting at position 48 of SEQ ID NO: 1880422
ccuuaugugcuuuauaguu

SEQ ID NO: 1965881 - RNA, 19 nt, Artificial Sequence
  Description of Artificial Sequence: Synthetic oligonucleotide
  Antisense strand to SEQ ID NO: 1965880
aacuauaaagcacauaagg

SEQ ID NO: 1965882 - RNA, 19 nt, Artificial Sequence
  Description of Artificial Sequence: Synthetic oligonucleotide
  Sense strand starting at position 61 of SEQ ID NO: 1880422
auaguuggcuccggucauu

SEQ ID NO: 1965883 - RNA, 19 nt, Artificial Sequence
  Description of Artificial Sequence: Synthetic oligonucleotide
  Antisense strand to SEQ ID NO: 1965882
aaugaccggagccaacuau

SEQ ID NO: 1965884 - RNA, 19 nt, Artificial Sequence
  Description of Artificial Sequence: Synthetic oligonucleotide
  Sense strand starting at position 64 of SEQ ID NO: 1880422
guuggcuccggucauuuau

SEQ ID NO: 1965885 - RNA, 19 nt, Artificial Sequence
  Description of Artificial Sequence: Synthetic oligonucleotide
  Antisense strand to SEQ ID NO: 1965884
auaaaugaccggagccaac

SEQ ID NO: 1965886 - RNA, 19 nt, Artificial Sequence
  Description of Artificial Sequence: Synthetic oligonucleotide
  Sense strand starting at position 270 of SEQ ID NO: 1880422
agaauuggccucuauacau

SEQ ID NO: 1965887 - RNA, 19 nt, Artificial Sequence
  Description of Artificial Sequence: Synthetic oligonucleotide
  Antisense strand to SEQ ID NO: 1965886
auguauagaggccaauucu

SEQ ID NO: 1965888 - RNA, 19 nt, Artificial Sequence
  Description of Artificial Sequence: Synthetic oligonucleotide
  Sense strand starting at position 378 of SEQ ID NO: 1880422
ugggauucguuccaaugug

SEQ ID NO: 1965889 - RNA, 19 nt, Artificial Sequence
  Description of Artificial Sequence: Synthetic oligonucleotide
  Antisense strand to SEQ ID NO: 1965888
cacauuggaacgaauccca

SEQ ID NO: 1965890 - RNA, 19 nt, Artificial Sequence
  Description of Artificial Sequence: Synthetic oligonucleotide
  Sense strand starting at position 386 of SEQ ID NO: 1880422
guuccaauguguuggguua

SEQ ID NO: 1965891 - RNA, 19 nt, Artificial Sequence
  Description of Artificial Sequence: Synthetic oligonucleotide
  Antisense strand to SEQ ID NO: 1965890
uaacccaacacauuggaac

SEQ ID NO: 1965892 - RNA, 19 nt, Artificial Sequence
  Description of Artificial Sequence: Synthetic oligonucleotide
  Sense strand starting at position 388 of SEQ ID NO: 1880422
uccaauguguuggguuaga

SEQ ID NO: 1965893 - RNA, 19 nt, Artificial Sequence
  Description of Artificial Sequence: Synthetic oligonucleotide
  Antisense strand to SEQ ID NO: 1965892
ucuaacccaacacauugga

SEQ ID NO: 1965894 - RNA, 19 nt, Artificial Sequence
  Description of Artificial Sequence: Synthetic oligonucleotide
  Sense strand starting at position 392 of SEQ ID NO: 1880422
auguguuggguuagaacgu

SEQ ID NO: 1965895 - RNA, 19 nt, Artificial Sequence
  Description of Artificial Sequence: Synthetic oligonucleotide
  Antisense strand to SEQ ID NO: 1965894
acguucuaacccaacacau

SEQ ID NO: 1965896 - RNA, 19 nt, Artificial Sequence
  Description of Artificial Sequence: Synthetic oligonucleotide
  Sense strand starting at position 964 of SEQ ID NO: 1880422
gcacuuuaguugucccuuu

SEQ ID NO: 1965897 - RNA, 19 nt, Artificial Sequence
  Description of Artificial Sequence: Synthetic oligonucleotide
  Antisense strand to SEQ ID NO: 1965896
aaagggacaacuaaagugc

SEQ ID NO: 1965898 - RNA, 19 nt, Artificial Sequence
  Description of Artificial Sequence: Synthetic oligonucleotide
  Sense strand starting at position 1031 of SEQ ID NO: 1880422
cuggauuccucagagugag

SEQ ID NO: 1965899 - RNA, 19 nt, Artificial Sequence
  Description of Artificial Sequence: Synthetic oligonucleotide
  Antisense strand to SEQ ID NO: 1965898
cucacucugaggaauccag

SEQ ID NO: 1965900 - RNA, 19 nt, Artificial Sequence
  Description of Artificial Sequence: Synthetic oligonucleotide
  Sense strand starting at position 1058 of SEQ ID NO: 1880422
aagaauaagucuucugguu

SEQ ID NO: 1965901 - RNA, 19 nt, Artificial Sequence
  Description of Artificial Sequence: Synthetic oligonucleotide
  Antisense strand to SEQ ID NO: 1965900
aaccagaagacuuauucuu

SEQ ID NO: 1965902 - RNA, 19 nt, Artificial Sequence
  Description of Artificial Sequence: Synthetic oligonucleotide
  Sense strand starting at position 1060 of SEQ ID NO: 1880422
gaauaagucuucugguuug

SEQ ID NO: 1965903 - RNA, 19 nt, Artificial Sequence
  Description of Artificial Sequence: Synthetic oligonucleotide
  Antisense strand to SEQ ID NO: 1965902
caaaccagaagacuuauuc

SEQ ID NO: 1965904 - RNA, 19 nt, Artificial Sequence
  Description of Artificial Sequence: Synthetic oligonucleotide
  Sense strand starting at position 1066 of SEQ ID NO: 1880422
gucuucugguuuguggaga

SEQ ID NO: 1965905 - RNA, 19 nt, Artificial Sequence
  Description of Artificial Sequence: Synthetic oligonucleotide
  Antisense strand to SEQ ID NO: 1965904
ucuccacaaaccagaagac

SEQ ID NO: 1965906 - RNA, 19 nt, Artificial Sequence
  Description of Artificial Sequence: Synthetic oligonucleotide
  Sense strand starting at position 1071 of SEQ ID NO: 1880422
cugguuuguggagacaaca

SEQ ID NO: 1965907 - RNA, 19 nt, Artificial Sequence
  Description of Artificial Sequence: Synthetic oligonucleotide
  Antisense strand to SEQ ID NO: 1965906
uguugucuccacaaaccag

SEQ ID NO: 1965908 - RNA, 19 nt, Artificial Sequence
  Description of Artificial Sequence: Synthetic oligonucleotide
  Sense strand starting at position 1112 of SEQ ID NO: 1880422
gacucagacuuagagagau

SEQ ID NO: 1965909 - RNA, 19 nt, Artificial Sequence
  Description of Artificial Sequence: Synthetic oligonucleotide
  Antisense strand to SEQ ID NO: 1965908
aucucucuaagucugaguc

SEQ ID NO: 1965910 - RNA, 19 nt, Artificial Sequence
  Description of Artificial Sequence: Synthetic oligonucleotide
  Sense strand starting at position 1206 of SEQ ID NO: 1880422
gggugagggucagccuaaa

SEQ ID NO: 1965911 - RNA, 19 nt, Artificial Sequence
  Description of Artificial Sequence: Synthetic oligonucleotide
  Antisense strand to SEQ ID NO: 1965910
uuuaggcugacccucaccc

SEQ ID NO: 1965912 - RNA, 19 nt, Artificial Sequence
  Description of Artificial Sequence: Synthetic oligonucleotide
  Sense strand starting at position 1329 of SEQ ID NO: 1880422
gcagccuggcucuguagaa

SEQ ID NO: 1965913 - RNA, 19 nt, Artificial Sequence
  Description of Artificial Sequence: Synthetic oligonucleotide
  Antisense strand to SEQ ID NO: 1965912
uucuacagagccaggcugc

SEQ ID NO: 1965914 - RNA, 19 nt, Artificial Sequence
  Description of Artificial Sequence: Synthetic oligonucleotide
  Sense strand starting at position 1330 of SEQ ID NO: 1880422
cagccuggcucuguagaaa

SEQ ID NO: 1965915 - RNA, 19 nt, Artificial Sequence
  Description of Artificial Sequence: Synthetic oligonucleotide
  Antisense strand to SEQ ID NO: 1965914
uuucuacagagccaggcug

SEQ ID NO: 1965916 - RNA, 19 nt, Artificial Sequence
  Description of Artificial Sequence: Synthetic oligonucleotide
  Sense strand starting at position 1904 of SEQ ID NO: 1880422
ggauaugucaguugcuggu

SEQ ID NO: 1965917 - RNA, 19 nt, Artificial Sequence
  Description of Artificial Sequence: Synthetic oligonucleotide
  Antisense strand to SEQ ID NO: 1965916
accagcaacugacauaucc

SEQ ID NO: 1965918 - RNA, 19 nt, Artificial Sequence
  Description of Artificial Sequence: Synthetic oligonucleotide
  Sense strand starting at position 2262 of SEQ ID NO: 1880422
uuaguauugauuuguguag

SEQ ID NO: 1965919 - RNA, 19 nt, Artificial Sequence
  Description of Artificial Sequence: Synthetic oligonucleotide
  Antisense strand to SEQ ID NO: 1965918
cuacacaaaucaauacuaa

SEQ ID NO: 1965920 - RNA, 19 nt, Artificial Sequence
  Description of Artificial Sequence: Synthetic oligonucleotide
  Sense strand starting at position 2264 of SEQ ID NO: 1880422
aguauugauuuguguagau

SEQ ID NO: 1965921 - RNA, 19 nt, Artificial Sequence
  Description of Artificial Sequence: Synthetic oligonucleotide
  Antisense strand to SEQ ID NO: 1965920
aucuacacaaaucaauacu

SEQ ID NO: 1965922 - RNA, 19 nt, Artificial Sequence
  Description of Artificial Sequence: Synthetic oligonucleotide
  Sense strand starting at position 2379 of SEQ ID NO: 1880422
guauuaguguguagugguc

SEQ ID NO: 1965923 - RNA, 19 nt, Artificial Sequence
  Description of Artificial Sequence: Synthetic oligonucleotide
  Antisense strand to SEQ ID NO: 1965922
gaccacuacacacuaauac

SEQ ID NO: 1965924 - RNA, 19 nt, Artificial Sequence
  Description of Artificial Sequence: Synthetic oligonucleotide
  Sense strand starting at position 2758 of SEQ ID NO: 1880422
guaggaguucuuuguauuu

SEQ ID NO: 1965925 - RNA, 19 nt, Artificial Sequence
  Description of Artificial Sequence: Synthetic oligonucleotide
  Antisense strand to SEQ ID NO: 1965924
aaauacaaagaacuccuac

SEQ ID NO: 1965926 - RNA, 19 nt, Artificial Sequence
  Description of Artificial Sequence: Synthetic oligonucleotide
  Sense strand starting at position 2792 of SEQ ID NO: 1880422
uggccuuuccagcaagguu

SEQ ID NO: 1965927 - RNA, 19 nt, Artificial Sequence
  Description of Artificial Sequence: Synthetic oligonucleotide
  Antisense strand to SEQ ID NO: 1965926
aaccuugcuggaaaggcca

SEQ ID NO: 1965928 - RNA, 19 nt, Artificial Sequence
  Description of Artificial Sequence: Synthetic oligonucleotide
  Sense strand starting at position 2897 of SEQ ID NO: 1880422
agaauuggcuucuuuauau

SEQ ID NO: 1965929 - RNA, 19 nt, Artificial Sequence
  Description of Artificial Sequence: Synthetic oligonucleotide
  Antisense strand to SEQ ID NO: 1965928
auauaaagaagccaauucu

SEQ ID NO: 1965930 - RNA, 19 nt, Artificial Sequence
  Description of Artificial Sequence: Synthetic oligonucleotide
  Sense strand starting at position 3166 of SEQ ID NO: 1880422
uggauuggguucugccauu

SEQ ID NO: 1965931 - RNA, 19 nt, Artificial Sequence
  Description of Artificial Sequence: Synthetic oligonucleotide
  Antisense strand to SEQ ID NO: 1965930
aauggcagaacccaaucca

SEQ ID NO: 1965932 - RNA, 19 nt, Artificial Sequence
  Description of Artificial Sequence: Synthetic oligonucleotide
  Sense strand starting at position 3177 of SEQ ID NO: 1880422
cugccauuguccugagucu

SEQ ID NO: 1965933 - RNA, 19 nt, Artificial Sequence
  Description of Artificial Sequence: Synthetic oligonucleotide
  Antisense strand to SEQ ID NO: 1965932
agacucaggacaauggcag

SEQ ID NO: 1965934 - RNA, 19 nt, Artificial Sequence
  Description of Artificial Sequence: Synthetic oligonucleotide
  Sense strand starting at position 3178 of SEQ ID NO: 1880422
ugccauuguccugagucuu

SEQ ID NO: 1965935 - RNA, 19 nt, Artificial Sequence
  Description of Artificial Sequence: Synthetic oligonucleotide
  Antisense strand to SEQ ID NO: 1965934
aagacucaggacaauggca

SEQ ID NO: 1965936 - RNA, 19 nt, Artificial Sequence
  Description of Artificial Sequence: Synthetic oligonucleotide
  Sense strand starting at position 3184 of SEQ ID NO: 1880422
uguccugagucuugaugau

SEQ ID NO: 1965937 - RNA, 19 nt, Artificial Sequence
  Description of Artificial Sequence: Synthetic oligonucleotide
  Antisense strand to SEQ ID NO: 1965936
aucaucaagacucaggaca

SEQ ID NO: 1965938 - RNA, 19 nt, Artificial Sequence
  Description of Artificial Sequence: Synthetic oligonucleotide
  Sense strand starting at position 3284 of SEQ ID NO: 1880422
ggugugguuguuugaagga

SEQ ID NO: 1965939 - RNA, 19 nt, Artificial Sequence
  Description of Artificial Sequence: Synthetic oligonucleotide
  Antisense strand to SEQ ID NO: 1965938
uccuucaaacaaccacacc

SEQ ID NO: 1965940 - RNA, 19 nt, Artificial Sequence
  Description of Artificial Sequence: Synthetic oligonucleotide
  Sense strand starting at position 3289 of SEQ ID NO: 1880422
gguuguuugaaggacauau

SEQ ID NO: 1965941 - RNA, 19 nt, Artificial Sequence
  Description of Artificial Sequence: Synthetic oligonucleotide
  Antisense strand to SEQ ID NO: 1965940
auauguccuucaaacaacc

SEQ ID NO: 1965942 - RNA, 19 nt, Artificial Sequence
  Description of Artificial Sequence: Synthetic oligonucleotide
  Sense strand starting at position 3581 of SEQ ID NO: 1880422
gagucuugcuuggucaugu

SEQ ID NO: 1965943 - RNA, 19 nt, Artificial Sequence
  Description of Artificial Sequence: Synthetic oligonucleotide
  Antisense strand to SEQ ID NO: 1965942
acaugaccaagcaagacuc

SEQ ID NO: 1965944 - RNA, 19 nt, Artificial Sequence
  Description of Artificial Sequence: Synthetic oligonucleotide
  Sense strand starting at position 3918 of SEQ ID NO: 1880422
gguucccugucuguuauga

SEQ ID NO: 1965945 - RNA, 19 nt, Artificial Sequence
  Description of Artificial Sequence: Synthetic oligonucleotide
  Antisense strand to SEQ ID NO: 1965944
ucauaacagacagggaacc

SEQ ID NO: 1965946 - RNA, 19 nt, Artificial Sequence
  Description of Artificial Sequence: Synthetic oligonucleotide
  Sense strand starting at position 3963 of SEQ ID NO: 1880422
ggagaugggcuuuggucaa

SEQ ID NO: 1965947 - RNA, 19 nt, Artificial Sequence
  Description of Artificial Sequence: Synthetic oligonucleotide
  Antisense strand to SEQ ID NO: 1965946
uugaccaaagcccaucucc

SEQ ID NO: 1965948 - RNA, 19 nt, Artificial Sequence
  Description of Artificial Sequence: Synthetic oligonucleotide
  Sense strand starting at position 175 of SEQ ID NO: 1880423
gcauaaagcccuuguacaa

SEQ ID NO: 1965949 - RNA, 19 nt, Artificial Sequence
  Description of Artificial Sequence: Synthetic oligonucleotide
  Antisense strand to SEQ ID NO: 1965948
uuguacaagggcuuuaugc

SEQ ID NO: 1965950 - RNA, 19 nt, Artificial Sequence
  Description of Artificial Sequence: Synthetic oligonucleotide
  Sense strand starting at position 297 of SEQ ID NO: 1880423
aggagagacucucagaaga

SEQ ID NO: 1965951 - RNA, 19 nt, Artificial Sequence
  Description of Artificial Sequence: Synthetic oligonucleotide
  Antisense strand to SEQ ID NO: 1965950
ucuucugagagucucuccu

SEQ ID NO: 1965952 - RNA, 19 nt, Artificial Sequence
  Description of Artificial Sequence: Synthetic oligonucleotide
  Sense strand starting at position 299 of SEQ ID NO: 1880423
gagagacucucagaagaac

SEQ ID NO: 1965953 - RNA, 19 nt, Artificial Sequence
  Description of Artificial Sequence: Synthetic oligonucleotide
  Antisense strand to SEQ ID NO: 1965952
guucuucugagagucucuc

SEQ ID NO: 1965954 - RNA, 19 nt, Artificial Sequence
  Description of Artificial Sequence: Synthetic oligonucleotide
  Sense strand starting at position 319 of SEQ ID NO: 1880423
uagugaggacuaugucaaa

SEQ ID NO: 1965955 - RNA, 19 nt, Artificial Sequence
  Description of Artificial Sequence: Synthetic oligonucleotide
  Antisense strand to SEQ ID NO: 1965954
uuugacauaguccucacua

SEQ ID NO: 1965956 - RNA, 19 nt, Artificial Sequence
  Description of Artificial Sequence: Synthetic oligonucleotide
  Sense strand starting at position 446 of SEQ ID NO: 1880423
ccuccugggccauaaauga

SEQ ID NO: 1965957 - RNA, 19 nt, Artificial Sequence
  Description of Artificial Sequence: Synthetic oligonucleotide
  Antisense strand to SEQ ID NO: 1965956
ucauuuauggcccaggagg

SEQ ID NO: 1965958 - RNA, 19 nt, Artificial Sequence
  Description of Artificial Sequence: Synthetic oligonucleotide
  Sense strand starting at position 571 of SEQ ID NO: 1880423
cccacacuuggucacgaua

SEQ ID NO: 1965959 - RNA, 19 nt, Artificial Sequence
  Description of Artificial Sequence: Synthetic oligonucleotide
  Antisense strand to SEQ ID NO: 1965958
uaucgugaccaaguguggg

SEQ ID NO: 1965960 - RNA, 19 nt, Artificial Sequence
  Description of Artificial Sequence: Synthetic oligonucleotide
  Sense strand starting at position 574 of SEQ ID NO: 1880423
acacuuggucacgauacau

SEQ ID NO: 1965961 - RNA, 19 nt, Artificial Sequence
  Description of Artificial Sequence: Synthetic oligonucleotide
  Antisense strand to SEQ ID NO: 1965960
auguaucgugaccaagugu

SEQ ID NO: 1965962 - RNA, 19 nt, Artificial Sequence
  Description of Artificial Sequence: Synthetic oligonucleotide
  Sense strand starting at position 672 of SEQ ID NO: 1880423
gagagaguggucugugauu

SEQ ID NO: 1965963 - RNA, 19 nt, Artificial Sequence
  Description of Artificial Sequence: Synthetic oligonucleotide
  Antisense strand to SEQ ID NO: 1965962
aaucacagaccacucucuc

SEQ ID NO: 1965964 - RNA, 19 nt, Artificial Sequence
  Description of Artificial Sequence: Synthetic oligonucleotide
  Sense strand starting at position 677 of SEQ ID NO: 1880423
aguggucugugauuucuca

SEQ ID NO: 1965965 - RNA, 19 nt, Artificial Sequence
  Description of Artificial Sequence: Synthetic oligonucleotide
  Antisense strand to SEQ ID NO: 1965964
ugagaaaucacagaccacu

SEQ ID NO: 1965966 - RNA, 19 nt, Artificial Sequence
  Description of Artificial Sequence: Synthetic oligonucleotide
  Sense strand starting at position 696 of SEQ ID NO: 1880423
aaaugaccuggucagguuu

SEQ ID NO: 1965967 - RNA, 19 nt, Artificial Sequence
  Description of Artificial Sequence: Synthetic oligonucleotide
  Antisense strand to SEQ ID NO: 1965966
aaaccugaccaggucauuu

SEQ ID NO: 1965968 - RNA, 19 nt, Artificial Sequence
  Description of Artificial Sequence: Synthetic oligonucleotide
  Sense strand starting at position 754 of SEQ ID NO: 1880423
aaguguuugcaauagcacu

SEQ ID NO: 1965969 - RNA, 19 nt, Artificial Sequence
  Description of Artificial Sequence: Synthetic oligonucleotide
  Antisense strand to SEQ ID NO: 1965968
agugcuauugcaaacacuu

SEQ ID NO: 1965970 - RNA, 19 nt, Artificial Sequence
  Description of Artificial Sequence: Synthetic oligonucleotide
  Sense strand starting at position 1307 of SEQ ID NO: 1880423
acaagauuauuauuaggca

SEQ ID NO: 1965971 - RNA, 19 nt, Artificial Sequence
  Description of Artificial Sequence: Synthetic oligonucleotide
  Antisense strand to SEQ ID NO: 1965970
ugccuaauaauaaucuugu

SEQ ID NO: 1965972 - RNA, 19 nt, Artificial Sequence
  Description of Artificial Sequence: Synthetic oligonucleotide
  Sense strand starting at position 1772 of SEQ ID NO: 1880423
ucagauaauucugugaacu

SEQ ID NO: 1965973 - RNA, 19 nt, Artificial Sequence
  Description of Artificial Sequence: Synthetic oligonucleotide
  Antisense strand to SEQ ID NO: 1965972
aguucacagaauuaucuga

SEQ ID NO: 1965974 - RNA, 19 nt, Artificial Sequence
  Description of Artificial Sequence: Synthetic oligonucleotide
  Sense strand starting at position 1773 of SEQ ID NO: 1880423
cagauaauucugugaacug

SEQ ID NO: 1965975 - RNA, 19 nt, Artificial Sequence
  Description of Artificial Sequence: Synthetic oligonucleotide
  Antisense strand to SEQ ID NO: 1965974
caguucacagaauuaucug

SEQ ID NO: 1965976 - RNA, 19 nt, Artificial Sequence
  Description of Artificial Sequence: Synthetic oligonucleotide
  Sense strand starting at position 2328 of SEQ ID NO: 1880423
cccagaguucgaggaguug

SEQ ID NO: 1965977 - RNA, 19 nt, Artificial Sequence
  Description of Artificial Sequence: Synthetic oligonucleotide
  Antisense strand to SEQ ID NO: 1965976
caacuccucgaacucuggg

SEQ ID NO: 1965978 - RNA, 19 nt, Artificial Sequence
  Description of Artificial Sequence: Synthetic oligonucleotide
  Sense strand starting at position 2395 of SEQ ID NO: 1880423
gugaauagcacucguuaaa

SEQ ID NO: 1965979 - RNA, 19 nt, Artificial Sequence
  Description of Artificial Sequence: Synthetic oligonucleotide
  Antisense strand to SEQ ID NO: 1965978
uuuaacgagugcuauucac

SEQ ID NO: 1965980 - RNA, 19 nt, Artificial Sequence
  Description of Artificial Sequence: Synthetic oligonucleotide
  Sense strand starting at position 2471 of SEQ ID NO: 1880423
gucguuaaaccguuuaagu

SEQ ID NO: 1965981 - RNA, 19 nt, Artificial Sequence
  Description of Artificial Sequence: Synthetic oligonucleotide
  Antisense strand to SEQ ID NO: 1965980
acuuaaacgguuuaacgac

SEQ ID NO: 1965982 - RNA, 19 nt, Artificial Sequence
  Description of Artificial Sequence: Synthetic oligonucleotide
  Sense strand starting at position 2499 of SEQ ID NO: 1880423
cccagugagggcuauguua

SEQ ID NO: 1965983 - RNA, 19 nt, Artificial Sequence
  Description of Artificial Sequence: Synthetic oligonucleotide
  Antisense strand to SEQ ID NO: 1965982
uaacauagcccucacuggg

SEQ ID NO: 1965984 - RNA, 19 nt, Artificial Sequence
  Description of Artificial Sequence: Synthetic oligonucleotide
  Sense strand starting at position 2525 of SEQ ID NO: 1880423
cgccguuuccagccgugaa

SEQ ID NO: 1965985 - RNA, 19 nt, Artificial Sequence
  Description of Artificial Sequence: Synthetic oligonucleotide
  Antisense strand to SEQ ID NO: 1965984
uucacggcuggaaacggcg

SEQ ID NO: 1965986 - RNA, 19 nt, Artificial Sequence
  Description of Artificial Sequence: Synthetic oligonucleotide
  Sense strand starting at position 2676 of SEQ ID NO: 1880423
acacacgugugacuuagau

SEQ ID NO: 1965987 - RNA, 19 nt, Artificial Sequence
  Description of Artificial Sequence: Synthetic oligonucleotide
  Antisense strand to SEQ ID NO: 1965986
aucuaagucacacgugugu

SEQ ID NO: 1965988 - RNA, 19 nt, Artificial Sequence
  Description of Artificial Sequence: Synthetic oligonucleotide
  Sense strand starting at position 2735 of SEQ ID NO: 1880423
guaguuaagguuuaauucu

SEQ ID NO: 1965989 - RNA, 19 nt, Artificial Sequence
  Description of Artificial Sequence: Synthetic oligonucleotide
  Antisense strand to SEQ ID NO: 1965988
agaauuaaaccuuaacuac

SEQ ID NO: 1965990 - RNA, 19 nt, Artificial Sequence
  Description of Artificial Sequence: Synthetic oligonucleotide
  Sense strand starting at position 2795 of SEQ ID NO: 1880423
augaacaugugcucucaca

SEQ ID NO: 1965991 - RNA, 19 nt, Artificial Sequence
  Description of Artificial Sequence: Synthetic oligonucleotide
  Antisense strand to SEQ ID NO: 1965990
ugugagagcacauguucau

SEQ ID NO: 1965992 - RNA, 19 nt, Artificial Sequence
  Description of Artificial Sequence: Synthetic oligonucleotide
  Sense strand starting at position 2852 of SEQ ID NO: 1880423
ggaucaagcuccucggagu

SEQ ID NO: 1965993 - RNA, 19 nt, Artificial Sequence
  Description of Artificial Sequence: Synthetic oligonucleotide
  Antisense strand to SEQ ID NO: 1965992
acuccgaggagcuugaucc

SEQ ID NO: 1965994 - RNA, 19 nt, Artificial Sequence
  Description of Artificial Sequence: Synthetic oligonucleotide
  Sense strand starting at position 2884 of SEQ ID NO: 1880423
gaacuugaacagugacacu

SEQ ID NO: 1965995 - RNA, 19 nt, Artificial Sequence
  Description of Artificial Sequence: Synthetic oligonucleotide
  Antisense strand to SEQ ID NO: 1965994
agugucacuguucaaguuc

SEQ ID NO: 1965996 - RNA, 19 nt, Artificial Sequence
  Description of Artificial Sequence: Synthetic oligonucleotide
  Sense strand starting at position 2939 of SEQ ID NO: 1880423
gggugaucuugaguaagga

SEQ ID NO: 1965997 - RNA, 19 nt, Artificial Sequence
  Description of Artificial Sequence: Synthetic oligonucleotide
  Antisense strand to SEQ ID NO: 1965996
uccuuacucaagaucaccc

SEQ ID NO: 1965998 - RNA, 19 nt, Artificial Sequence
  Description of Artificial Sequence: Synthetic oligonucleotide
  Sense strand starting at position 2956 of SEQ ID NO: 1880423
gagcccuggccuuauccua

SEQ ID NO: 1965999 - RNA, 19 nt, Artificial Sequence
  Description of Artificial Sequence: Synthetic oligonucleotide
  Antisense strand to SEQ ID NO: 1965998
uaggauaaggccagggcuc

SEQ ID NO: 1966000 - RNA, 19 nt, Artificial Sequence
  Description of Artificial Sequence: Synthetic oligonucleotide
  Sense strand starting at position 2995 of SEQ ID NO: 1880423
gggaaagaaugagaauaga

SEQ ID NO: 1966001 - RNA, 19 nt, Artificial Sequence
  Description of Artificial Sequence: Synthetic oligonucleotide
  Antisense strand to SEQ ID NO: 1966000
ucuauucucauucuuuccc

SEQ ID NO: 1966002 - RNA, 19 nt, Artificial Sequence
  Description of Artificial Sequence: Synthetic oligonucleotide
  Sense strand starting at position 3067 of SEQ ID NO: 1880423
ccuagcuaacuuuaugaga

SEQ ID NO: 1966003 - RNA, 19 nt, Artificial Sequence
  Description of Artificial Sequence: Synthetic oligonucleotide
  Antisense strand to SEQ ID NO: 1966002
ucucauaaaguuagcuagg

SEQ ID NO: 1966004 - RNA, 19 nt, Artificial Sequence
  Description of Artificial Sequence: Synthetic oligonucleotide
  Sense strand starting at position 3078 of SEQ ID NO: 1880423
uuaugagauuagcccaaau

SEQ ID NO: 1966005 - RNA, 19 nt, Artificial Sequence
  Description of Artificial Sequence: Synthetic oligonucleotide
  Antisense strand to SEQ ID NO: 1966004
auuugggcuaaucucauaa

SEQ ID NO: 1966006 - RNA, 19 nt, Artificial Sequence
  Description of Artificial Sequence: Synthetic oligonucleotide
  Sense strand starting at position 3321 of SEQ ID NO: 1880423
gaagcaaggucucuguaag

SEQ ID NO: 1966007 - RNA, 19 nt, Artificial Sequence
  Description of Artificial Sequence: Synthetic oligonucleotide
  Antisense strand to SEQ ID NO: 1966006
cuuacagagaccuugcuuc

SEQ ID NO: 1966008 - RNA, 19 nt, Artificial Sequence
  Description of Artificial Sequence: Synthetic oligonucleotide
  Sense strand starting at position 3327 of SEQ ID NO: 1880423
aggucucuguaaguaaucu

SEQ ID NO: 1966009 - RNA, 19 nt, Artificial Sequence
  Description of Artificial Sequence: Synthetic oligonucleotide
  Antisense strand to SEQ ID NO: 1966008
agauuacuuacagagaccu

SEQ ID NO: 1966010 - RNA, 19 nt, Artificial Sequence
  Description of Artificial Sequence: Synthetic oligonucleotide
  Sense strand starting at position 3353 of SEQ ID NO: 1880423
cccauaaagcagggucaua

SEQ ID NO: 1966011 - RNA, 19 nt, Artificial Sequence
  Description of Artificial Sequence: Synthetic oligonucleotide
  Antisense strand to SEQ ID NO: 1966010
uaugacccugcuuuauggg

SEQ ID NO: 1966012 - RNA, 19 nt, Artificial Sequence
  Description of Artificial Sequence: Synthetic oligonucleotide
  Sense strand starting at position 3392 of SEQ ID NO: 1880423
ucaugugaaguagguugua

SEQ ID NO: 1966013 - RNA, 19 nt, Artificial Sequence
  Description of Artificial Sequence: Synthetic oligonucleotide
  Antisense strand to SEQ ID NO: 1966012
uacaaccuacuucacauga

SEQ ID NO: 1966014 - RNA, 19 nt, Artificial Sequence
  Description of Artificial Sequence: Synthetic oligonucleotide
  Sense strand starting at position 3395 of SEQ ID NO: 1880423
ugugaaguagguuguaaga

SEQ ID NO: 1966015 - RNA, 19 nt, Artificial Sequence
  Description of Artificial Sequence: Synthetic oligonucleotide
  Antisense strand to SEQ ID NO: 1966014
ucuuacaaccuacuucaca

SEQ ID NO: 1966016 - RNA, 19 nt, Artificial Sequence
  Description of Artificial Sequence: Synthetic oligonucleotide
  Sense strand starting at position 3453 of SEQ ID NO: 1880423
agaagugucaugcagagac

SEQ ID NO: 1966017 - RNA, 19 nt, Artificial Sequence
  Description of Artificial Sequence: Synthetic oligonucleotide
  Antisense strand to SEQ ID NO: 1966016
gucucugcaugacacuucu

SEQ ID NO: 1966018 - RNA, 19 nt, Artificial Sequence
  Description of Artificial Sequence: Synthetic oligonucleotide
  Sense strand starting at position 3643 of SEQ ID NO: 1880423
uaagguuccugugucacau

SEQ ID NO: 1966019 - RNA, 19 nt, Artificial Sequence
  Description of Artificial Sequence: Synthetic oligonucleotide
  Antisense strand to SEQ ID NO: 1966018
augugacacaggaaccuua

SEQ ID NO: 1966020 - RNA, 19 nt, Artificial Sequence
  Description of Artificial Sequence: Synthetic oligonucleotide
  Sense strand starting at position 3690 of SEQ ID NO: 1880423
ucauuaaccuuguuauagg

SEQ ID NO: 1966021 - RNA, 19 nt, Artificial Sequence
  Description of Artificial Sequence: Synthetic oligonucleotide
  Antisense strand to SEQ ID NO: 1966020
ccuauaacaagguuaauga

SEQ ID NO: 1966022 - RNA, 19 nt, Artificial Sequence
  Description of Artificial Sequence: Synthetic oligonucleotide
  Sense strand starting at position 3708 of SEQ ID NO: 1880423
gggugucagccauaacccu

SEQ ID NO: 1966023 - RNA, 19 nt, Artificial Sequence
  Description of Artificial Sequence: Synthetic oligonucleotide
  Antisense strand to SEQ ID NO: 1966022
aggguuauggcugacaccc

SEQ ID NO: 1966024 - RNA, 19 nt, Artificial Sequence
  Description of Artificial Sequence: Synthetic oligonucleotide
  Sense strand starting at position 3762 of SEQ ID NO: 1880423
acgaaaugaugacagauuu

SEQ ID NO: 1966025 - RNA, 19 nt, Artificial Sequence
  Description of Artificial Sequence: Synthetic oligonucleotide
  Antisense strand to SEQ ID NO: 1966024
aaaucugucaucauuucgu

SEQ ID NO: 1966026 - RNA, 19 nt, Artificial Sequence
  Description of Artificial Sequence: Synthetic oligonucleotide
  Sense strand starting at position 3963 of SEQ ID NO: 1880423
aaauuugaguggcaaagaa

SEQ ID NO: 1966027 - RNA, 19 nt, Artificial Sequence
  Description of Artificial Sequence: Synthetic oligonucleotide
  Antisense strand to SEQ ID NO: 1966026
uucuuugccacucaaauuu

SEQ ID NO: 1966028 - RNA, 19 nt, Artificial Sequence
  Description of Artificial Sequence: Synthetic oligonucleotide
  Sense strand starting at position 115 of SEQ ID NO: 1880424
ugaauucugagauguuuga

SEQ ID NO: 1966029 - RNA, 19 nt, Artificial Sequence
  Description of Artificial Sequence: Synthetic oligonucleotide
  Antisense strand to SEQ ID NO: 1966028
ucaaacaucucagaauuca

SEQ ID NO: 1966030 - RNA, 19 nt, Artificial Sequence
  Description of Artificial Sequence: Synthetic oligonucleotide
  Sense strand starting at position 119 of SEQ ID NO: 1880424
uucugagauguuugagaac

SEQ ID NO: 1966031 - RNA, 19 nt, Artificial Sequence
  Description of Artificial Sequence: Synthetic oligonucleotide
  Antisense strand to SEQ ID NO: 1966030
guucucaaacaucucagaa

SEQ ID NO: 1966032 - RNA, 19 nt, Artificial Sequence
  Description of Artificial Sequence: Synthetic oligonucleotide
  Sense strand starting at position 482 of SEQ ID NO: 1880424
ucuucuugcuuauuuguau

SEQ ID NO: 1966033 - RNA, 19 nt, Artificial Sequence
  Description of Artificial Sequence: Synthetic oligonucleotide
  Antisense strand to SEQ ID NO: 1966032
auacaaauaagcaagaaga

SEQ ID NO: 1966034 - RNA, 19 nt, Artificial Sequence
  Description of Artificial Sequence: Synthetic oligonucleotide
  Sense strand starting at position 534 of SEQ ID NO: 1880424
ucugcaauuuauuaaagga

SEQ ID NO: 1966035 - RNA, 19 nt, Artificial Sequence
  Description of Artificial Sequence: Synthetic oligonucleotide
  Antisense strand to SEQ ID NO: 1966034
uccuuuaauaaauugcaga

SEQ ID NO: 1966036 - RNA, 19 nt, Artificial Sequence
  Description of Artificial Sequence: Synthetic oligonucleotide
  Sense strand starting at position 807 of SEQ ID NO: 1880424
ccagauauccucuaggcca

SEQ ID NO: 1966037 - RNA, 19 nt, Artificial Sequence
  Description of Artificial Sequence: Synthetic oligonucleotide
  Antisense strand to SEQ ID NO: 1966036
uggccuagaggauaucugg

SEQ ID NO: 1966038 - RNA, 19 nt, Artificial Sequence
  Description of Artificial Sequence: Synthetic oligonucleotide
  Sense strand starting at position 809 of SEQ ID NO: 1880424
agauauccucuaggccaaa

SEQ ID NO: 1966039 - RNA, 19 nt, Artificial Sequence
  Description of Artificial Sequence: Synthetic oligonucleotide
  Antisense strand to SEQ ID NO: 1966038
uuuggccuagaggauaucu

SEQ ID NO: 1966040 - RNA, 19 nt, Artificial Sequence
  Description of Artificial Sequence: Synthetic oligonucleotide
  Sense strand starting at position 1484 of SEQ ID NO: 1880424
acugaaugucaucaggcuu

SEQ ID NO: 1966041 - RNA, 19 nt, Artificial Sequence
  Description of Artificial Sequence: Synthetic oligonucleotide
  Antisense strand to SEQ ID NO: 1966040
aagccugaugacauucagu

SEQ ID NO: 1966042 - RNA, 19 nt, Artificial Sequence
  Description of Artificial Sequence: Synthetic oligonucleotide
  Sense strand starting at position 1536 of SEQ ID NO: 1880424
auaaucaaaugguuucgaa

SEQ ID NO: 1966043 - RNA, 19 nt, Artificial Sequence
  Description of Artificial Sequence: Synthetic oligonucleotide
  Antisense strand to SEQ ID NO: 1966042
uucgaaaccauuugauuau

SEQ ID NO: 1966044 - RNA, 19 nt, Artificial Sequence
  Description of Artificial Sequence: Synthetic oligonucleotide
  Sense strand starting at position 1621 of SEQ ID NO: 1880424
acugguauuguauauaaca

SEQ ID NO: 1966045 - RNA, 19 nt, Artificial Sequence
  Description of Artificial Sequence: Synthetic oligonucleotide
  Antisense strand to SEQ ID NO: 1966044
uguuauauacaauaccagu

SEQ ID NO: 1966046 - RNA, 19 nt, Artificial Sequence
  Description of Artificial Sequence: Synthetic oligonucleotide
  Sense strand starting at position 1697 of SEQ ID NO: 1880424
uuaagaaacuucuucgagu

SEQ ID NO: 1966047 - RNA, 19 nt, Artificial Sequence
  Description of Artificial Sequence: Synthetic oligonucleotide
  Antisense strand to SEQ ID NO: 1966046
acucgaagaaguuucuuaa

SEQ ID NO: 1966048 - RNA, 19 nt, Artificial Sequence
  Description of Artificial Sequence: Synthetic oligonucleotide
  Sense strand starting at position 1698 of SEQ ID NO: 1880424
uaagaaacuucuucgaguc

SEQ ID NO: 1966049 - RNA, 19 nt, Artificial Sequence
  Description of Artificial Sequence: Synthetic oligonucleotide
  Antisense strand to SEQ ID NO: 1966048
gacucgaagaaguuucuua

SEQ ID NO: 1966050 - RNA, 19 nt, Artificial Sequence
  Description of Artificial Sequence: Synthetic oligonucleotide
  Sense strand starting at position 1699 of SEQ ID NO: 1880424
aagaaacuucuucgagucu

SEQ ID NO: 1966051 - RNA, 19 nt, Artificial Sequence
  Description of Artificial Sequence: Synthetic oligonucleotide
  Antisense strand to SEQ ID NO: 1966050
agacucgaagaaguuucuu

SEQ ID NO: 1966052 - RNA, 19 nt, Artificial Sequence
  Description of Artificial Sequence: Synthetic oligonucleotide
  Sense strand starting at position 1711 of SEQ ID NO: 1880424
cgagucucacaguaauaga

SEQ ID NO: 1966053 - RNA, 19 nt, Artificial Sequence
  Description of Artificial Sequence: Synthetic oligonucleotide
  Antisense strand to SEQ ID NO: 1966052
ucuauuacugugagacucg

SEQ ID NO: 1966054 - RNA, 19 nt, Artificial Sequence
  Description of Artificial Sequence: Synthetic oligonucleotide
  Sense strand starting at position 1770 of SEQ ID NO: 1880424
auaauuucugugugccuau

SEQ ID NO: 1966055 - RNA, 19 nt, Artificial Sequence
  Description of Artificial Sequence: Synthetic oligonucleotide
  Antisense strand to SEQ ID NO: 1966054
auaggcacacagaaauuau

SEQ ID NO: 1966056 - RNA, 19 nt, Artificial Sequence
  Description of Artificial Sequence: Synthetic oligonucleotide
  Sense strand starting at position 1839 of SEQ ID NO: 1880424
uggguuagauccuuaacaa

SEQ ID NO: 1966057 - RNA, 19 nt, Artificial Sequence
  Description of Artificial Sequence: Synthetic oligonucleotide
  Antisense strand to SEQ ID NO: 1966056
uuguuaaggaucuaaccca

SEQ ID NO: 1966058 - RNA, 19 nt, Artificial Sequence
  Description of Artificial Sequence: Synthetic oligonucleotide
  Sense strand starting at position 2150 of SEQ ID NO: 1880424
gcuagcucugaguaacaua

SEQ ID NO: 1966059 - RNA, 19 nt, Artificial Sequence
  Description of Artificial Sequence: Synthetic oligonucleotide
  Antisense strand to SEQ ID NO: 1966058
uauguuacucagagcuagc

SEQ ID NO: 1966060 - RNA, 19 nt, Artificial Sequence
  Description of Artificial Sequence: Synthetic oligonucleotide
  Sense strand starting at position 2290 of SEQ ID NO: 1880424
acagaaucugcucaagcga

SEQ ID NO: 1966061 - RNA, 19 nt, Artificial Sequence
  Description of Artificial Sequence: Synthetic oligonucleotide
  Antisense strand to SEQ ID NO: 1966060
ucgcuugagcagauucugu

SEQ ID NO: 1966062 - RNA, 19 nt, Artificial Sequence
  Description of Artificial Sequence: Synthetic oligonucleotide
  Sense strand starting at position 2306 of SEQ ID NO: 1880424
cgaacacuucuaugaacca

SEQ ID NO: 1966063 - RNA, 19 nt, Artificial Sequence
  Description of Artificial Sequence: Synthetic oligonucleotide
  Antisense strand to SEQ ID NO: 1966062
ugguucauagaaguguucg

SEQ ID NO: 1966064 - RNA, 19 nt, Artificial Sequence
  Description of Artificial Sequence: Synthetic oligonucleotide
  Sense strand starting at position 2332 of SEQ ID NO: 1880424
agagacaagugcuuuauga

SEQ ID NO: 1966065 - RNA, 19 nt, Artificial Sequence
  Description of Artificial Sequence: Synthetic oligonucleotide
  Antisense strand to SEQ ID NO: 1966064
ucauaaagcacuugucucu

SEQ ID NO: 1966066 - RNA, 19 nt, Artificial Sequence
  Description of Artificial Sequence: Synthetic oligonucleotide
  Sense strand starting at position 2334 of SEQ ID NO: 1880424
agacaagugcuuuaugaua

SEQ ID NO: 1966067 - RNA, 19 nt, Artificial Sequence
  Description of Artificial Sequence: Synthetic oligonucleotide
  Antisense strand to SEQ ID NO: 1966066
uaucauaaagcacuugucu

SEQ ID NO: 1966068 - RNA, 19 nt, Artificial Sequence
  Description of Artificial Sequence: Synthetic oligonucleotide
  Sense strand starting at position 2402 of SEQ ID NO: 1880424
ugcugaaagcuacauaucu

SEQ ID NO: 1966069 - RNA, 19 nt, Artificial Sequence
  Description of Artificial Sequence: Synthetic oligonucleotide
  Antisense strand to SEQ ID NO: 1966068
agauauguagcuuucagca

SEQ ID NO: 1966070 - RNA, 19 nt, Artificial Sequence
  Description of Artificial Sequence: Synthetic oligonucleotide
  Sense strand starting at position 2410 of SEQ ID NO: 1880424
gcuacauaucuagaguaaa

SEQ ID NO: 1966071 - RNA, 19 nt, Artificial Sequence
  Description of Artificial Sequence: Synthetic oligonucleotide
  Antisense strand to SEQ ID NO: 1966070
uuuacucuagauauguagc

SEQ ID NO: 1966072 - RNA, 19 nt, Artificial Sequence
  Description of Artificial Sequence: Synthetic oligonucleotide
  Sense strand starting at position 2545 of SEQ ID NO: 1880424
gcgugugagaguuauuuau

SEQ ID NO: 1966073 - RNA, 19 nt, Artificial Sequence
  Description of Artificial Sequence: Synthetic oligonucleotide
  Antisense strand to SEQ ID NO: 1966072
auaaauaacucucacacgc

SEQ ID NO: 1966074 - RNA, 19 nt, Artificial Sequence
  Description of Artificial Sequence: Synthetic oligonucleotide
  Sense strand starting at position 2761 of SEQ ID NO: 1880424
uaguauagucuugggauua

SEQ ID NO: 1966075 - RNA, 19 nt, Artificial Sequence
  Description of Artificial Sequence: Synthetic oligonucleotide
  Antisense strand to SEQ ID NO: 1966074
uaaucccaagacuauacua

SEQ ID NO: 1966076 - RNA, 19 nt, Artificial Sequence
  Description of Artificial Sequence: Synthetic oligonucleotide
  Sense strand starting at position 2779 of SEQ ID NO: 1880424
aguggaaaugucugucuaa

SEQ ID NO: 1966077 - RNA, 19 nt, Artificial Sequence
  Description of Artificial Sequence: Synthetic oligonucleotide
  Antisense strand to SEQ ID NO: 1966076
uuagacagacauuuccacu

SEQ ID NO: 1966078 - RNA, 19 nt, Artificial Sequence
  Description of Artificial Sequence: Synthetic oligonucleotide
  Sense strand starting at position 2782 of SEQ ID NO: 1880424
ggaaaugucugucuaauga

SEQ ID NO: 1966079 - RNA, 19 nt, Artificial Sequence
  Description of Artificial Sequence: Synthetic oligonucleotide
  Antisense strand to SEQ ID NO: 1966078
ucauuagacagacauuucc

SEQ ID NO: 1966080 - RNA, 19 nt, Artificial Sequence
  Description of Artificial Sequence: Synthetic oligonucleotide
  Sense strand starting at position 2817 of SEQ ID NO: 1880424
ugagcacaugccugaauaa

SEQ ID NO: 1966081 - RNA, 19 nt, Artificial Sequence
  Description of Artificial Sequence: Synthetic oligonucleotide
  Antisense strand to SEQ ID NO: 1966080
uuauucaggcaugugcuca

SEQ ID NO: 1966082 - RNA, 19 nt, Artificial Sequence
  Description of Artificial Sequence: Synthetic oligonucleotide
  Sense strand starting at position 2818 of SEQ ID NO: 1880424
gagcacaugccugaauaag

SEQ ID NO: 1966083 - RNA, 19 nt, Artificial Sequence
  Description of Artificial Sequence: Synthetic oligonucleotide
  Antisense strand to SEQ ID NO: 1966082
cuuauucaggcaugugcuc

SEQ ID NO: 1966084 - RNA, 19 nt, Artificial Sequence
  Description of Artificial Sequence: Synthetic oligonucleotide
  Sense strand starting at position 2829 of SEQ ID NO: 1880424
ugaauaagcuacuuguuga

SEQ ID NO: 1966085 - RNA, 19 nt, Artificial Sequence
  Description of Artificial Sequence: Synthetic oligonucleotide
  Antisense strand to SEQ ID NO: 1966084
ucaacaaguagcuuauuca

SEQ ID NO: 1966086 - RNA, 19 nt, Artificial Sequence
  Description of Artificial Sequence: Synthetic oligonucleotide
  Sense strand starting at position 2834 of SEQ ID NO: 1880424
aagcuacuuguugauugaa

SEQ ID NO: 1966087 - RNA, 19 nt, Artificial Sequence
  Description of Artificial Sequence: Synthetic oligonucleotide
  Antisense strand to SEQ ID NO: 1966086
uucaaucaacaaguagcuu

SEQ ID NO: 1966088 - RNA, 19 nt, Artificial Sequence
  Description of Artificial Sequence: Synthetic oligonucleotide
  Sense strand starting at position 3018 of SEQ ID NO: 1880424
cucacucuuggccaguaaa

SEQ ID NO: 1966089 - RNA, 19 nt, Artificial Sequence
  Description of Artificial Sequence: Synthetic oligonucleotide
  Antisense strand to SEQ ID NO: 1966088
uuuacuggccaagagugag

SEQ ID NO: 1966090 - RNA, 19 nt, Artificial Sequence
  Description of Artificial Sequence: Synthetic oligonucleotide
  Sense strand starting at position 3021 of SEQ ID NO: 1880424
acucuuggccaguaaagua

SEQ ID NO: 1966091 - RNA, 19 nt, Artificial Sequence
  Description of Artificial Sequence: Synthetic oligonucleotide
  Antisense strand to SEQ ID NO: 1966090
uacuuuacuggccaagagu

SEQ ID NO: 1966092 - RNA, 19 nt, Artificial Sequence
  Description of Artificial Sequence: Synthetic oligonucleotide
  Sense strand starting at position 3063 of SEQ ID NO: 1880424
uuuagauugauguggaugu

SEQ ID NO: 1966093 - RNA, 19 nt, Artificial Sequence
  Description of Artificial Sequence: Synthetic oligonucleotide
  Antisense strand to SEQ ID NO: 1966092
acauccacaucaaucuaaa

SEQ ID NO: 1966094 - RNA, 19 nt, Artificial Sequence
  Description of Artificial Sequence: Synthetic oligonucleotide
  Sense strand starting at position 3065 of SEQ ID NO: 1880424
uagauugauguggauguua

SEQ ID NO: 1966095 - RNA, 19 nt, Artificial Sequence
  Description of Artificial Sequence: Synthetic oligonucleotide
  Antisense strand to SEQ ID NO: 1966094
uaacauccacaucaaucua

SEQ ID NO: 1966096 - RNA, 19 nt, Artificial Sequence
  Description of Artificial Sequence: Synthetic oligonucleotide
  Sense strand starting at position 3067 of SEQ ID NO: 1880424
gauugauguggauguuaca

SEQ ID NO: 1966097 - RNA, 19 nt, Artificial Sequence
  Description of Artificial Sequence: Synthetic oligonucleotide
  Antisense strand to SEQ ID NO: 1966096
uguaacauccacaucaauc

SEQ ID NO: 1966098 - RNA, 19 nt, Artificial Sequence
  Description of Artificial Sequence: Synthetic oligonucleotide
  Sense strand starting at position 3205 of SEQ ID NO: 1880424
aggucauaaucuuugaacu

SEQ ID NO: 1966099 - RNA, 19 nt, Artificial Sequence
  Description of Artificial Sequence: Synthetic oligonucleotide
  Antisense strand to SEQ ID NO: 1966098
aguucaaagauuaugaccu

SEQ ID NO: 1966100 - RNA, 19 nt, Artificial Sequence
  Description of Artificial Sequence: Synthetic oligonucleotide
  Sense strand starting at position 3206 of SEQ ID NO: 1880424
ggucauaaucuuugaacua

SEQ ID NO: 1966101 - RNA, 19 nt, Artificial Sequence
  Description of Artificial Sequence: Synthetic oligonucleotide
  Antisense strand to SEQ ID NO: 1966100
uaguucaaagauuaugacc

SEQ ID NO: 1966102 - RNA, 19 nt, Artificial Sequence
  Description of Artificial Sequence: Synthetic oligonucleotide
  Sense strand starting at position 3451 of SEQ ID NO: 1880424
caacguccacucugggaau

SEQ ID NO: 1966103 - RNA, 19 nt, Artificial Sequence
  Description of Artificial Sequence: Synthetic oligonucleotide
  Antisense strand to SEQ ID NO: 1966102
auucccagaguggacguug

SEQ ID NO: 1966104 - RNA, 19 nt, Artificial Sequence
  Description of Artificial Sequence: Synthetic oligonucleotide
  Sense strand starting at position 3462 of SEQ ID NO: 1880424
cugggaaucugagcucuga

SEQ ID NO: 1966105 - RNA, 19 nt, Artificial Sequence
  Description of Artificial Sequence: Synthetic oligonucleotide
  Antisense strand to SEQ ID NO: 1966104
ucagagcucagauucccag

SEQ ID NO: 1966106 - RNA, 19 nt, Artificial Sequence
  Description of Artificial Sequence: Synthetic oligonucleotide
  Sense strand starting at position 3551 of SEQ ID NO: 1880424
gcuucuugaguuugcauuu

SEQ ID NO: 1966107 - RNA, 19 nt, Artificial Sequence
  Description of Artificial Sequence: Synthetic oligonucleotide
  Antisense strand to SEQ ID NO: 1966106
aaaugcaaacucaagaagc

SEQ ID NO: 1966108 - RNA, 19 nt, Artificial Sequence
  Description of Artificial Sequence: Synthetic oligonucleotide
  Sense strand starting at position 149 of SEQ ID NO: 1880425
gagaauauacaguguguua

SEQ ID NO: 1966109 - RNA, 19 nt, Artificial Sequence
  Description of Artificial Sequence: Synthetic oligonucleotide
  Antisense strand to SEQ ID NO: 1966108
uaacacacuguauauucuc

SEQ ID NO: 1966110 - RNA, 19 nt, Artificial Sequence
  Description of Artificial Sequence: Synthetic oligonucleotide
  Sense strand starting at position 151 of SEQ ID NO: 1880425
gaauauacaguguguuauu

SEQ ID NO: 1966111 - RNA, 19 nt, Artificial Sequence
  Description of Artificial Sequence: Synthetic oligonucleotide
  Antisense strand to SEQ ID NO: 1966110
aauaacacacuguauauuc

SEQ ID NO: 1966112 - RNA, 19 nt, Artificial Sequence
  Description of Artificial Sequence: Synthetic oligonucleotide
  Sense strand starting at position 172 of SEQ ID NO: 1880425
uuggucuaaucacugcaga

SEQ ID NO: 1966113 - RNA, 19 nt, Artificial Sequence
  Description of Artificial Sequence: Synthetic oligonucleotide
  Antisense strand to SEQ ID NO: 1966112
ucugcagugauuagaccaa

SEQ ID NO: 1966114 - RNA, 19 nt, Artificial Sequence
  Description of Artificial Sequence: Synthetic oligonucleotide
  Sense strand starting at position 173 of SEQ ID NO: 1880425
uggucuaaucacugcagau

SEQ ID NO: 1966115 - RNA, 19 nt, Artificial Sequence
  Description of Artificial Sequence: Synthetic oligonucleotide
  Antisense strand to SEQ ID NO: 1966114
aucugcagugauuagacca

SEQ ID NO: 1966116 - RNA, 19 nt, Artificial Sequence
  Description of Artificial Sequence: Synthetic oligonucleotide
  Sense strand starting at position 275 of SEQ ID NO: 1880425
cuguaauacuggcuacuga

SEQ ID NO: 1966117 - RNA, 19 nt, Artificial Sequence
  Description of Artificial Sequence: Synthetic oligonucleotide
  Antisense strand to SEQ ID NO: 1966116
ucaguagccaguauuacag

SEQ ID NO: 1966118 - RNA, 19 nt, Artificial Sequence
  Description of Artificial Sequence: Synthetic oligonucleotide
  Sense strand starting at position 458 of SEQ ID NO: 1880425
uggagagucuggaggauug

SEQ ID NO: 1966119 - RNA, 19 nt, Artificial Sequence
  Description of Artificial Sequence: Synthetic oligonucleotide
  Antisense strand to SEQ ID NO: 1966118
caauccuccagacucucca

SEQ ID NO: 1966120 - RNA, 19 nt, Artificial Sequence
  Description of Artificial Sequence: Synthetic oligonucleotide
  Sense strand starting at position 797 of SEQ ID NO: 1880425
ggguuaugccagcaguaaa

SEQ ID NO: 1966121 - RNA, 19 nt, Artificial Sequence
  Description of Artificial Sequence: Synthetic oligonucleotide
  Antisense strand to SEQ ID NO: 1966120
uuuacugcuggcauaaccc

SEQ ID NO: 1966122 - RNA, 19 nt, Artificial Sequence
  Description of Artificial Sequence: Synthetic oligonucleotide
  Sense strand starting at position 824 of SEQ ID NO: 1880425
ugcgguauugcucucacuu

SEQ ID NO: 1966123 - RNA, 19 nt, Artificial Sequence
  Description of Artificial Sequence: Synthetic oligonucleotide
  Antisense strand to SEQ ID NO: 1966122
aagugagagcaauaccgca

SEQ ID NO: 1966124 - RNA, 19 nt, Artificial Sequence
  Description of Artificial Sequence: Synthetic oligonucleotide
  Sense strand starting at position 825 of SEQ ID NO: 1880425
gcgguauugcucucacuug

SEQ ID NO: 1966125 - RNA, 19 nt, Artificial Sequence
  Description of Artificial Sequence: Synthetic oligonucleotide
  Antisense strand to SEQ ID NO: 1966124
caagugagagcaauaccgc

SEQ ID NO: 1966126 - RNA, 19 nt, Artificial Sequence
  Description of Artificial Sequence: Synthetic oligonucleotide
  Sense strand starting at position 839 of SEQ ID NO: 1880425
acuugauuugcugguuugu

SEQ ID NO: 1966127 - RNA, 19 nt, Artificial Sequence
  Description of Artificial Sequence: Synthetic oligonucleotide
  Antisense strand to SEQ ID NO: 1966126
acaaaccagcaaaucaagu

SEQ ID NO: 1966128 - RNA, 19 nt, Artificial Sequence
  Description of Artificial Sequence: Synthetic oligonucleotide
  Sense strand starting at position 1010 of SEQ ID NO: 1880425
agcaccuccucauugagaa

SEQ ID NO: 1966129 - RNA, 19 nt, Artificial Sequence
  Description of Artificial Sequence: Synthetic oligonucleotide
  Antisense strand to SEQ ID NO: 1966128
uucucaaugaggaggugcu

SEQ ID NO: 1966130 - RNA, 19 nt, Artificial Sequence
  Description of Artificial Sequence: Synthetic oligonucleotide
  Sense strand starting at position 1011 of SEQ ID NO: 1880425
gcaccuccucauugagaag

SEQ ID NO: 1966131 - RNA, 19 nt, Artificial Sequence
  Description of Artificial Sequence: Synthetic oligonucleotide
  Antisense strand to SEQ ID NO: 1966130
cuucucaaugaggaggugc

SEQ ID NO: 1966132 - RNA, 19 nt, Artificial Sequence
  Description of Artificial Sequence: Synthetic oligonucleotide
  Sense strand starting at position 1085 of SEQ ID NO: 1880425
ccacaagacucuguuguga

SEQ ID NO: 1966133 - RNA, 19 nt, Artificial Sequence
  Description of Artificial Sequence: Synthetic oligonucleotide
  Antisense strand to SEQ ID NO: 1966132
ucacaacagagucuugugg

SEQ ID NO: 1966134 - RNA, 19 nt, Artificial Sequence
  Description of Artificial Sequence: Synthetic oligonucleotide
  Sense strand starting at position 1106 of SEQ ID NO: 1880425
ggaugugaugcucagagcu

SEQ ID NO: 1966135 - RNA, 19 nt, Artificial Sequence
  Description of Artificial Sequence: Synthetic oligonucleotide
  Antisense strand to SEQ ID NO: 1966134
agcucugagcaucacaucc

SEQ ID NO: 1966136 - RNA, 19 nt, Artificial Sequence
  Description of Artificial Sequence: Synthetic oligonucleotide
  Sense strand starting at position 1225 of SEQ ID NO: 1880425
agcauuuguuacgcaagau

SEQ ID NO: 1966137 - RNA, 19 nt, Artificial Sequence
  Description of Artificial Sequence: Synthetic oligonucleotide
  Antisense strand to SEQ ID NO: 1966136
aucuugcguaacaaaugcu

SEQ ID NO: 1966138 - RNA, 19 nt, Artificial Sequence
  Description of Artificial Sequence: Synthetic oligonucleotide
  Sense strand starting at position 1229 of SEQ ID NO: 1880425
uuuguuacgcaagauaaua

SEQ ID NO: 1966139 - RNA, 19 nt, Artificial Sequence
  Description of Artificial Sequence: Synthetic oligonucleotide
  Antisense strand to SEQ ID NO: 1966138
uauuaucuugcguaacaaa

SEQ ID NO: 1966140 - RNA, 19 nt, Artificial Sequence
  Description of Artificial Sequence: Synthetic oligonucleotide
  Sense strand starting at position 1273 of SEQ ID NO: 1880425
ggaguuggaucugcaguua

SEQ ID NO: 1966141 - RNA, 19 nt, Artificial Sequence
  Description of Artificial Sequence: Synthetic oligonucleotide
  Antisense strand to SEQ ID NO: 1966140
uaacugcagauccaacucc

SEQ ID NO: 1966142 - RNA, 19 nt, Artificial Sequence
  Description of Artificial Sequence: Synthetic oligonucleotide
  Sense strand starting at position 1349 of SEQ ID NO: 1880425
gaacaugugugccugggaa

SEQ ID NO: 1966143 - RNA, 19 nt, Artificial Sequence
  Description of Artificial Sequence: Synthetic oligonucleotide
  Antisense strand to SEQ ID NO: 1966142
uucccaggcacacauguuc

SEQ ID NO: 1966144 - RNA, 19 nt, Artificial Sequence
  Description of Artificial Sequence: Synthetic oligonucleotide
  Sense strand starting at position 1361 of SEQ ID NO: 1880425
cugggaaucucugcuauaa

SEQ ID NO: 1966145 - RNA, 19 nt, Artificial Sequence
  Description of Artificial Sequence: Synthetic oligonucleotide
  Antisense strand to SEQ ID NO: 1966144
uuauagcagagauucccag

SEQ ID NO: 1966146 - RNA, 19 nt, Artificial Sequence
  Description of Artificial Sequence: Synthetic oligonucleotide
  Sense strand starting at position 1398 of SEQ ID NO: 1880425
aggauucuucuacaagcca

SEQ ID NO: 1966147 - RNA, 19 nt, Artificial Sequence
  Description of Artificial Sequence: Synthetic oligonucleotide
  Antisense strand to SEQ ID NO: 1966146
uggcuuguagaagaauccu

SEQ ID NO: 1966148 - RNA, 19 nt, Artificial Sequence
  Description of Artificial Sequence: Synthetic oligonucleotide
  Sense strand starting at position 1501 of SEQ ID NO: 1880425
gacacuugguacgcugaaa

SEQ ID NO: 1966149 - RNA, 19 nt, Artificial Sequence
  Description of Artificial Sequence: Synthetic oligonucleotide
  Antisense strand to SEQ ID NO: 1966148
uuucagcguaccaaguguc

SEQ ID NO: 1966150 - RNA, 19 nt, Artificial Sequence
  Description of Artificial Sequence: Synthetic oligonucleotide
  Sense strand starting at position 1555 of SEQ ID NO: 1880425
acgugaugcugacuggaga

SEQ ID NO: 1966151 - RNA, 19 nt, Artificial Sequence
  Description of Artificial Sequence: Synthetic oligonucleotide
  Antisense strand to SEQ ID NO: 1966150
ucuccagucagcaucacgu

SEQ ID NO: 1966152 - RNA, 19 nt, Artificial Sequence
  Description of Artificial Sequence: Synthetic oligonucleotide
  Sense strand starting at position 1614 of SEQ ID NO: 1880425
ucuagugucgaugaauaac

SEQ ID NO: 1966153 - RNA, 19 nt, Artificial Sequence
  Description of Artificial Sequence: Synthetic oligonucleotide
  Antisense strand to SEQ ID NO: 1966152
guuauucaucgacacuaga

SEQ ID NO: 1966154 - RNA, 19 nt, Artificial Sequence
  Description of Artificial Sequence: Synthetic oligonucleotide
  Sense strand starting at position 1824 of SEQ ID NO: 1880425
gccucaaagcucuaaagaa

SEQ ID NO: 1966155 - RNA, 19 nt, Artificial Sequence
  Description of Artificial Sequence: Synthetic oligonucleotide
  Antisense strand to SEQ ID NO: 1966154
uucuuuagagcuuugaggc

SEQ ID NO: 1966156 - RNA, 19 nt, Artificial Sequence
  Description of Artificial Sequence: Synthetic oligonucleotide
  Sense strand starting at position 2019 of SEQ ID NO: 1880425
cagguaagauugcuuagga

SEQ ID NO: 1966157 - RNA, 19 nt, Artificial Sequence
  Description of Artificial Sequence: Synthetic oligonucleotide
  Antisense strand to SEQ ID NO: 1966156
uccuaagcaaucuuaccug

SEQ ID NO: 1966158 - RNA, 19 nt, Artificial Sequence
  Description of Artificial Sequence: Synthetic oligonucleotide
  Sense strand starting at position 2020 of SEQ ID NO: 1880425
agguaagauugcuuaggag

SEQ ID NO: 1966159 - RNA, 19 nt, Artificial Sequence
  Description of Artificial Sequence: Synthetic oligonucleotide
  Antisense strand to SEQ ID NO: 1966158
cuccuaagcaaucuuaccu

SEQ ID NO: 1966160 - RNA, 19 nt, Artificial Sequence
  Description of Artificial Sequence: Synthetic oligonucleotide
  Sense strand starting at position 2255 of SEQ ID NO: 1880425
guaauuaaugauggauauc

SEQ ID NO: 1966161 - RNA, 19 nt, Artificial Sequence
  Description of Artificial Sequence: Synthetic oligonucleotide
  Antisense strand to SEQ ID NO: 1966160
gauauccaucauuaauuac

SEQ ID NO: 1966162 - RNA, 19 nt, Artificial Sequence
  Description of Artificial Sequence: Synthetic oligonucleotide
  Sense strand starting at position 2470 of SEQ ID NO: 1880425
ugggucauggcuggugaga

SEQ ID NO: 1966163 - RNA, 19 nt, Artificial Sequence
  Description of Artificial Sequence: Synthetic oligonucleotide
  Antisense strand to SEQ ID NO: 1966162
ucucaccagccaugaccca

SEQ ID NO: 1966164 - RNA, 19 nt, Artificial Sequence
  Description of Artificial Sequence: Synthetic oligonucleotide
  Sense strand starting at position 2482 of SEQ ID NO: 1880425
ggugagagucuauguggga

SEQ ID NO: 1966165 - RNA, 19 nt, Artificial Sequence
  Description of Artificial Sequence: Synthetic oligonucleotide
  Antisense strand to SEQ ID NO: 1966164
ucccacauagacucucacc

SEQ ID NO: 1966166 - RNA, 19 nt, Artificial Sequence
  Description of Artificial Sequence: Synthetic oligonucleotide
  Sense strand starting at position 2483 of SEQ ID NO: 1880425
gugagagucuaugugggau

SEQ ID NO: 1966167 - RNA, 19 nt, Artificial Sequence
  Description of Artificial Sequence: Synthetic oligonucleotide
  Antisense strand to SEQ ID NO: 1966166
aucccacauagacucucac

SEQ ID NO: 1966168 - RNA, 19 nt, Artificial Sequence
  Description of Artificial Sequence: Synthetic oligonucleotide
  Sense strand starting at position 2486 of SEQ ID NO: 1880425
agagucuaugugggauauu

SEQ ID NO: 1966169 - RNA, 19 nt, Artificial Sequence
  Description of Artificial Sequence: Synthetic oligonucleotide
  Antisense strand to SEQ ID NO: 1966168
aauaucccacauagacucu

SEQ ID NO: 1966170 - RNA, 19 nt, Artificial Sequence
  Description of Artificial Sequence: Synthetic oligonucleotide
  Sense strand starting at position 2526 of SEQ ID NO: 1880425
auaaauguucuguaagcac

SEQ ID NO: 1966171 - RNA, 19 nt, Artificial Sequence
  Description of Artificial Sequence: Synthetic oligonucleotide
  Antisense strand to SEQ ID NO: 1966170
gugcuuacagaacauuuau

SEQ ID NO: 1966172 - RNA, 19 nt, Artificial Sequence
  Description of Artificial Sequence: Synthetic oligonucleotide
  Sense strand starting at position 2533 of SEQ ID NO: 1880425
uucuguaagcaccaaaguu

SEQ ID NO: 1966173 - RNA, 19 nt, Artificial Sequence
  Description of Artificial Sequence: Synthetic oligonucleotide
  Antisense strand to SEQ ID NO: 1966172
aacuuuggugcuuacagaa

SEQ ID NO: 1966174 - RNA, 19 nt, Artificial Sequence
  Description of Artificial Sequence: Synthetic oligonucleotide
  Sense strand starting at position 2541 of SEQ ID NO: 1880425
gcaccaaaguuguuagauc

SEQ ID NO: 1966175 - RNA, 19 nt, Artificial Sequence
  Description of Artificial Sequence: Synthetic oligonucleotide
  Antisense strand to SEQ ID NO: 1966174
gaucuaacaacuuuggugc

SEQ ID NO: 1966176 - RNA, 19 nt, Artificial Sequence
  Description of Artificial Sequence: Synthetic oligonucleotide
  Sense strand starting at position 3571 of SEQ ID NO: 1880425
gugcaugaucacgcgucua

SEQ ID NO: 1966177 - RNA, 19 nt, Artificial Sequence
  Description of Artificial Sequence: Synthetic oligonucleotide
  Antisense strand to SEQ ID NO: 1966176
uagacgcgugaucaugcac

SEQ ID NO: 1966178 - RNA, 19 nt, Artificial Sequence
  Description of Artificial Sequence: Synthetic oligonucleotide
  Sense strand starting at position 3573 of SEQ ID NO: 1880425
gcaugaucacgcgucuaug

SEQ ID NO: 1966179 - RNA, 19 nt, Artificial Sequence
  Description of Artificial Sequence: Synthetic oligonucleotide
  Antisense strand to SEQ ID NO: 1966178
cauagacgcgugaucaugc

SEQ ID NO: 1966180 - RNA, 19 nt, Artificial Sequence
  Description of Artificial Sequence: Synthetic oligonucleotide
  Sense strand starting at position 3576 of SEQ ID NO: 1880425
ugaucacgcgucuaugaaa

SEQ ID NO: 1966181 - RNA, 19 nt, Artificial Sequence
  Description of Artificial Sequence: Synthetic oligonucleotide
  Antisense strand to SEQ ID NO: 1966180
uuucauagacgcgugauca

SEQ ID NO: 1966182 - RNA, 19 nt, Artificial Sequence
  Description of Artificial Sequence: Synthetic oligonucleotide
  Sense strand starting at position 3583 of SEQ ID NO: 1880425
gcgucuaugaaaggauaug

SEQ ID NO: 1966183 - RNA, 19 nt, Artificial Sequence
  Description of Artificial Sequence: Synthetic oligonucleotide
  Antisense strand to SEQ ID NO: 1966182
cauauccuuucauagacgc

SEQ ID NO: 1966184 - RNA, 19 nt, Artificial Sequence
  Description of Artificial Sequence: Synthetic oligonucleotide
  Sense strand starting at position 3644 of SEQ ID NO: 1880425
uucucuccagaaugagaua

SEQ ID NO: 1966185 - RNA, 19 nt, Artificial Sequence
  Description of Artificial Sequence: Synthetic oligonucleotide
  Antisense strand to SEQ ID NO: 1966184
uaucucauucuggagagaa

SEQ ID NO: 1966186 - RNA, 19 nt, Artificial Sequence
  Description of Artificial Sequence: Synthetic oligonucleotide
  Sense strand starting at position 3647 of SEQ ID NO: 1880425
ucuccagaaugagauauuu

SEQ ID NO: 1966187 - RNA, 19 nt, Artificial Sequence
  Description of Artificial Sequence: Synthetic oligonucleotide
  Antisense strand to SEQ ID NO: 1966186
aaauaucucauucuggaga

SEQ ID NO: 1966188 - RNA, 19 nt, Artificial Sequence
  Description of Artificial Sequence: Synthetic oligonucleotide
  Sense strand starting at position 251 of SEQ ID NO: 1880426
gagaauauacaguguguua

SEQ ID NO: 1966189 - RNA, 19 nt, Artificial Sequence
  Description of Artificial Sequence: Synthetic oligonucleotide
  Antisense strand to SEQ ID NO: 1966188
uaacacacuguauauucuc

SEQ ID NO: 1966190 - RNA, 19 nt, Artificial Sequence
  Description of Artificial Sequence: Synthetic oligonucleotide
  Sense strand starting at position 253 of SEQ ID NO: 1880426
gaauauacaguguguuauu

SEQ ID NO: 1966191 - RNA, 19 nt, Artificial Sequence
  Description of Artificial Sequence: Synthetic oligonucleotide
  Antisense strand to SEQ ID NO: 1966190
aauaacacacuguauauuc

SEQ ID NO: 1966192 - RNA, 19 nt, Artificial Sequence
  Description of Artificial Sequence: Synthetic oligonucleotide
  Sense strand starting at position 274 of SEQ ID NO: 1880426
uuggucuaaucacugcaga

SEQ ID NO: 1966193 - RNA, 19 nt, Artificial Sequence
  Description of Artificial Sequence: Synthetic oligonucleotide
  Antisense strand to SEQ ID NO: 1966192
ucugcagugauuagaccaa

SEQ ID NO: 1966194 - RNA, 19 nt, Artificial Sequence
  Description of Artificial Sequence: Synthetic oligonucleotide
  Sense strand starting at position 275 of SEQ ID NO: 1880426
uggucuaaucacugcagau

SEQ ID NO: 1966195 - RNA, 19 nt, Artificial Sequence
  Description of Artificial Sequence: Synthetic oligonucleotide
  Antisense strand to SEQ ID NO: 1966194
aucugcagugauuagacca

SEQ ID NO: 1966196 - RNA, 19 nt, Artificial Sequence
  Description of Artificial Sequence: Synthetic oligonucleotide
  Sense strand starting at position 377 of SEQ ID NO: 1880426
cuguaauacuggcuacuga

SEQ ID NO: 1966197 - RNA, 19 nt, Artificial Sequence
  Description of Artificial Sequence: Synthetic oligonucleotide
  Antisense strand to SEQ ID NO: 1966196
ucaguagccaguauuacag

SEQ ID NO: 1966198 - RNA, 19 nt, Artificial Sequence
  Description of Artificial Sequence: Synthetic oligonucleotide
  Sense strand starting at position 560 of SEQ ID NO: 1880426
uggagagucuggaggauug

SEQ ID NO: 1966199 - RNA, 19 nt, Artificial Sequence
  Description of Artificial Sequence: Synthetic oligonucleotide
  Antisense strand to SEQ ID NO: 1966198
caauccuccagacucucca

SEQ ID NO: 1966200 - RNA, 19 nt, Artificial Sequence
  Description of Artificial Sequence: Synthetic oligonucleotide
  Sense strand starting at position 899 of SEQ ID NO: 1880426
ggguuaugccagcaguaaa

SEQ ID NO: 1966201 - RNA, 19 nt, Artificial Sequence
  Description of Artificial Sequence: Synthetic oligonucleotide
  Antisense strand to SEQ ID NO: 1966200
uuuacugcuggcauaaccc

SEQ ID NO: 1966202 - RNA, 19 nt, Artificial Sequence
  Description of Artificial Sequence: Synthetic oligonucleotide
  Sense strand starting at position 926 of SEQ ID NO: 1880426
ugcgguauugcucucacuu

SEQ ID NO: 1966203 - RNA, 19 nt, Artificial Sequence
  Description of Artificial Sequence: Synthetic oligonucleotide
  Antisense strand to SEQ ID NO: 1966202
aagugagagcaauaccgca

SEQ ID NO: 1966204 - RNA, 19 nt, Artificial Sequence
  Description of Artificial Sequence: Synthetic oligonucleotide
  Sense strand starting at position 927 of SEQ ID NO: 1880426
gcgguauugcucucacuug

SEQ ID NO: 1966205 - RNA, 19 nt, Artificial Sequence
  Description of Artificial Sequence: Synthetic oligonucleotide
  Antisense strand to SEQ ID NO: 1966204
caagugagagcaauaccgc

SEQ ID NO: 1966206 - RNA, 19 nt, Artificial Sequence
  Description of Artificial Sequence: Synthetic oligonucleotide
  Sense strand starting at position 941 of SEQ ID NO: 1880426
acuugauuugcugguuugu

SEQ ID NO: 1966207 - RNA, 19 nt, Artificial Sequence
  Description of Artificial Sequence: Synthetic oligonucleotide
  Antisense strand to SEQ ID NO: 1966206
acaaaccagcaaaucaagu

SEQ ID NO: 1966208 - RNA, 19 nt, Artificial Sequence
  Description of Artificial Sequence: Synthetic oligonucleotide
  Sense strand starting at position 1112 of SEQ ID NO: 1880426
agcaccuccucauugagaa

SEQ ID NO: 1966209 - RNA, 19 nt, Artificial Sequence
  Description of Artificial Sequence: Synthetic oligonucleotide
  Antisense strand to SEQ ID NO: 1966208
uucucaaugaggaggugcu

SEQ ID NO: 1966210 - RNA, 19 nt, Artificial Sequence
  Description of Artificial Sequence: Synthetic oligonucleotide
  Sense strand starting at position 1113 of SEQ ID NO: 1880426
gcaccuccucauugagaag

SEQ ID NO: 1966211 - RNA, 19 nt, Artificial Sequence
  Description of Artificial Sequence: Synthetic oligonucleotide
  Antisense strand to SEQ ID NO: 1966210
cuucucaaugaggaggugc

SEQ ID NO: 1966212 - RNA, 19 nt, Artificial Sequence
  Description of Artificial Sequence: Synthetic oligonucleotide
  Sense strand starting at position 1187 of SEQ ID NO: 1880426
ccacaagacucuguuguga

SEQ ID NO: 1966213 - RNA, 19 nt, Artificial Sequence
  Description of Artificial Sequence: Synthetic oligonucleotide
  Antisense strand to SEQ ID NO: 1966212
ucacaacagagucuugugg

SEQ ID NO: 1966214 - RNA, 19 nt, Artificial Sequence
  Description of Artificial Sequence: Synthetic oligonucleotide
  Sense strand starting at position 1208 of SEQ ID NO: 1880426
ggaugugaugcucagagcu

SEQ ID NO: 1966215 - RNA, 19 nt, Artificial Sequence
  Description of Artificial Sequence: Synthetic oligonucleotide
  Antisense strand to SEQ ID NO: 1966214
agcucugagcaucacaucc

SEQ ID NO: 1966216 - RNA, 19 nt, Artificial Sequence
  Description of Artificial Sequence: Synthetic oligonucleotide
  Sense strand starting at position 1327 of SEQ ID NO: 1880426
agcauuuguuacgcaagau

SEQ ID NO: 1966217 - RNA, 19 nt, Artificial Sequence
  Description of Artificial Sequence: Synthetic oligonucleotide
  Antisense strand to SEQ ID NO: 1966216
aucuugcguaacaaaugcu

SEQ ID NO: 1966218 - RNA, 19 nt, Artificial Sequence
  Description of Artificial Sequence: Synthetic oligonucleotide
  Sense strand starting at position 1331 of SEQ ID NO: 1880426
uuuguuacgcaagauaaua

SEQ ID NO: 1966219 - RNA, 19 nt, Artificial Sequence
  Description of Artificial Sequence: Synthetic oligonucleotide
  Antisense strand to SEQ ID NO: 1966218
uauuaucuugcguaacaaa

SEQ ID NO: 1966220 - RNA, 19 nt, Artificial Sequence
  Description of Artificial Sequence: Synthetic oligonucleotide
  Sense strand starting at position 1375 of SEQ ID NO: 1880426
ggaguuggaucugcaguua

SEQ ID NO: 1966221 - RNA, 19 nt, Artificial Sequence
  Description of Artificial Sequence: Synthetic oligonucleotide
  Antisense strand to SEQ ID NO: 1966220
uaacugcagauccaacucc

SEQ ID NO: 1966222 - RNA, 19 nt, Artificial Sequence
  Description of Artificial Sequence: Synthetic oligonucleotide
  Sense strand starting at position 1451 of SEQ ID NO: 1880426
gaacaugugugccugggaa

SEQ ID NO: 1966223 - RNA, 19 nt, Artificial Sequence
  Description of Artificial Sequence: Synthetic oligonucleotide
  Antisense strand to SEQ ID NO: 1966222
uucccaggcacacauguuc

SEQ ID NO: 1966224 - RNA, 19 nt, Artificial Sequence
  Description of Artificial Sequence: Synthetic oligonucleotide
  Sense strand starting at position 1463 of SEQ ID NO: 1880426
cugggaaucucugcuauaa

SEQ ID NO: 1966225 - RNA, 19 nt, Artificial Sequence
  Description of Artificial Sequence: Synthetic oligonucleotide
  Antisense strand to SEQ ID NO: 1966224
uuauagcagagauucccag

SEQ ID NO: 1966226 - RNA, 19 nt, Artificial Sequence
  Description of Artificial Sequence: Synthetic oligonucleotide
  Sense strand starting at position 1500 of SEQ ID NO: 1880426
aggauucuucuacaagcca

SEQ ID NO: 1966227 - RNA, 19 nt, Artificial Sequence
  Description of Artificial Sequence: Synthetic oligonucleotide
  Antisense strand to SEQ ID NO: 1966226
uggcuuguagaagaauccu

SEQ ID NO: 1966228 - RNA, 19 nt, Artificial Sequence
  Description of Artificial Sequence: Synthetic oligonucleotide
  Sense strand starting at position 1603 of SEQ ID NO: 1880426
gacacuugguacgcugaaa

SEQ ID NO: 1966229 - RNA, 19 nt, Artificial Sequence
  Description of Artificial Sequence: Synthetic oligonucleotide
  Antisense strand to SEQ ID NO: 1966228
uuucagcguaccaaguguc

SEQ ID NO: 1966230 - RNA, 19 nt, Artificial Sequence
  Description of Artificial Sequence: Synthetic oligonucleotide
  Sense strand starting at position 1657 of SEQ ID NO: 1880426
acgugaugcugacuggaga

SEQ ID NO: 1966231 - RNA, 19 nt, Artificial Sequence
  Description of Artificial Sequence: Synthetic oligonucleotide
  Antisense strand to SEQ ID NO: 1966230
ucuccagucagcaucacgu

SEQ ID NO: 1966232 - RNA, 19 nt, Artificial Sequence
  Description of Artificial Sequence: Synthetic oligonucleotide
  Sense strand starting at position 1716 of SEQ ID NO: 1880426
ucuagugucgaugaauaac

SEQ ID NO: 1966233 - RNA, 19 nt, Artificial Sequence
  Description of Artificial Sequence: Synthetic oligonucleotide
  Antisense strand to SEQ ID NO: 1966232
guuauucaucgacacuaga

SEQ ID NO: 1966234 - RNA, 19 nt, Artificial Sequence
  Description of Artificial Sequence: Synthetic oligonucleotide
  Sense strand starting at position 1926 of SEQ ID NO: 1880426
gccucaaagcucuaaagaa

SEQ ID NO: 1966235 - RNA, 19 nt, Artificial Sequence
  Description of Artificial Sequence: Synthetic oligonucleotide
  Antisense strand to SEQ ID NO: 1966234
uucuuuagagcuuugaggc

SEQ ID NO: 1966236 - RNA, 19 nt, Artificial Sequence
  Description of Artificial Sequence: Synthetic oligonucleotide
  Sense strand starting at position 2121 of SEQ ID NO: 1880426
cagguaagauugcuuagga

SEQ ID NO: 1966237 - RNA, 19 nt, Artificial Sequence
  Description of Artificial Sequence: Synthetic oligonucleotide
  Antisense strand to SEQ ID NO: 1966236
uccuaagcaaucuuaccug

SEQ ID NO: 1966238 - RNA, 19 nt, Artificial Sequence
  Description of Artificial Sequence: Synthetic oligonucleotide
  Sense strand starting at position 2122 of SEQ ID NO: 1880426
agguaagauugcuuaggag

SEQ ID NO: 1966239 - RNA, 19 nt, Artificial Sequence
  Description of Artificial Sequence: Synthetic oligonucleotide
  Antisense strand to SEQ ID NO: 1966238
cuccuaagcaaucuuaccu

SEQ ID NO: 1966240 - RNA, 19 nt, Artificial Sequence
  Description of Artificial Sequence: Synthetic oligonucleotide
  Sense strand starting at position 2357 of SEQ ID NO: 1880426
guaauuaaugauggauauc

SEQ ID NO: 1966241 - RNA, 19 nt, Artificial Sequence
  Description of Artificial Sequence: Synthetic oligonucleotide
  Antisense strand to SEQ ID NO: 1966240
gauauccaucauuaauuac

SEQ ID NO: 1966242 - RNA, 19 nt, Artificial Sequence
  Description of Artificial Sequence: Synthetic oligonucleotide
  Sense strand starting at position 2572 of SEQ ID NO: 1880426
ugggucauggcuggugaga

SEQ ID NO: 1966243 - RNA, 19 nt, Artificial Sequence
  Description of Artificial Sequence: Synthetic oligonucleotide
  Antisense strand to SEQ ID NO: 1966242
ucucaccagccaugaccca

SEQ ID NO: 1966244 - RNA, 19 nt, Artificial Sequence
  Description of Artificial Sequence: Synthetic oligonucleotide
  Sense strand starting at position 2584 of SEQ ID NO: 1880426
ggugagagucuauguggga

SEQ ID NO: 1966245 - RNA, 19 nt, Artificial Sequence
  Description of Artificial Sequence: Synthetic oligonucleotide
  Antisense strand to SEQ ID NO: 1966244
ucccacauagacucucacc

SEQ ID NO: 1966246 - RNA, 19 nt, Artificial Sequence
  Description of Artificial Sequence: Synthetic oligonucleotide
  Sense strand starting at position 2585 of SEQ ID NO: 1880426
gugagagucuaugugggau

SEQ ID NO: 1966247 - RNA, 19 nt, Artificial Sequence
  Description of Artificial Sequence: Synthetic oligonucleotide
  Antisense strand to SEQ ID NO: 1966246
aucccacauagacucucac

SEQ ID NO: 1966248 - RNA, 19 nt, Artificial Sequence
  Description of Artificial Sequence: Synthetic oligonucleotide
  Sense strand starting at position 2588 of SEQ ID NO: 1880426
agagucuaugugggauauu

SEQ ID NO: 1966249 - RNA, 19 nt, Artificial Sequence
  Description of Artificial Sequence: Synthetic oligonucleotide
  Antisense strand to SEQ ID NO: 1966248
aauaucccacauagacucu

SEQ ID NO: 1966250 - RNA, 19 nt, Artificial Sequence
  Description of Artificial Sequence: Synthetic oligonucleotide
  Sense strand starting at position 2628 of SEQ ID NO: 1880426
auaaauguucuguaagcac

SEQ ID NO: 1966251 - RNA, 19 nt, Artificial Sequence
  Description of Artificial Sequence: Synthetic oligonucleotide
  Antisense strand to SEQ ID NO: 1966250
gugcuuacagaacauuuau

SEQ ID NO: 1966252 - RNA, 19 nt, Artificial Sequence
  Description of Artificial Sequence: Synthetic oligonucleotide
  Sense strand starting at position 2635 of SEQ ID NO: 1880426
uucuguaagcaccaaaguu

SEQ ID NO: 1966253 - RNA, 19 nt, Artificial Sequence
  Description of Artificial Sequence: Synthetic oligonucleotide
  Antisense strand to SEQ ID NO: 1966252
aacuuuggugcuuacagaa

SEQ ID NO: 1966254 - RNA, 19 nt, Artificial Sequence
  Description of Artificial Sequence: Synthetic oligonucleotide
  Sense strand starting at position 2643 of SEQ ID NO: 1880426
gcaccaaaguuguuagauc

SEQ ID NO: 1966255 - RNA, 19 nt, Artificial Sequence
  Description of Artificial Sequence: Synthetic oligonucleotide
  Antisense strand to SEQ ID NO: 1966254
gaucuaacaacuuuggugc

SEQ ID NO: 1966256 - RNA, 19 nt, Artificial Sequence
  Description of Artificial Sequence: Synthetic oligonucleotide
  Sense strand starting at position 3673 of SEQ ID NO: 1880426
gugcaugaucacgcgucua

SEQ ID NO: 1966257 - RNA, 19 nt, Artificial Sequence
  Description of Artificial Sequence: Synthetic oligonucleotide
  Antisense strand to SEQ ID NO: 1966256
uagacgcgugaucaugcac

SEQ ID NO: 1966258 - RNA, 19 nt, Artificial Sequence
  Description of Artificial Sequence: Synthetic oligonucleotide
  Sense strand starting at position 3675 of SEQ ID NO: 1880426
gcaugaucacgcgucuaug

SEQ ID NO: 1966259 - RNA, 19 nt, Artificial Sequence
  Description of Artificial Sequence: Synthetic oligonucleotide
  Antisense strand to SEQ ID NO: 1966258
cauagacgcgugaucaugc

SEQ ID NO: 1966260 - RNA, 19 nt, Artificial Sequence
  Description of Artificial Sequence: Synthetic oligonucleotide
  Sense strand starting at position 3678 of SEQ ID NO: 1880426
ugaucacgcgucuaugaaa

SEQ ID NO: 1966261 - RNA, 19 nt, Artificial Sequence
  Description of Artificial Sequence: Synthetic oligonucleotide
  Antisense strand to SEQ ID NO: 1966260
uuucauagacgcgugauca

SEQ ID NO: 1966262 - RNA, 19 nt, Artificial Sequence
  Description of Artificial Sequence: Synthetic oligonucleotide
  Sense strand starting at position 3685 of SEQ ID NO: 1880426
gcgucuaugaaaggauaug

SEQ ID NO: 1966263 - RNA, 19 nt, Artificial Sequence
  Description of Artificial Sequence: Synthetic oligonucleotide
  Antisense strand to SEQ ID NO: 1966262
cauauccuuucauagacgc

SEQ ID NO: 1966264 - RNA, 19 nt, Artificial Sequence
  Description of Artificial Sequence: Synthetic oligonucleotide
  Sense strand starting at position 3746 of SEQ ID NO: 1880426
uucucuccagaaugagaua

SEQ ID NO: 1966265 - RNA, 19 nt, Artificial Sequence
  Description of Artificial Sequence: Synthetic oligonucleotide
  Antisense strand to SEQ ID NO: 1966264
uaucucauucuggagagaa

SEQ ID NO: 1966266 - RNA, 19 nt, Artificial Sequence
  Description of Artificial Sequence: Synthetic oligonucleotide
  Sense strand starting at position 3749 of SEQ ID NO: 1880426
ucuccagaaugagauauuu

SEQ ID NO: 1966267 - RNA, 19 nt, Artificial Sequence
  Description of Artificial Sequence: Synthetic oligonucleotide
  Antisense strand to SEQ ID NO: 1966266
aaauaucucauucuggaga

SEQ ID NO: 1966268 - RNA, 19 nt, Artificial Sequence
  Description of Artificial Sequence: Synthetic oligonucleotide
  Sense strand starting at position 69 of SEQ ID NO: 1880427
aauggcuucccagauguca

SEQ ID NO: 1966269 - RNA, 19 nt, Artificial Sequence
  Description of Artificial Sequence: Synthetic oligonucleotide
  Antisense strand to SEQ ID NO: 1966268
ugacaucugggaagccauu

SEQ ID NO: 1966270 - RNA, 19 nt, Artificial Sequence
  Description of Artificial Sequence: Synthetic oligonucleotide
  Sense strand starting at position 141 of SEQ ID NO: 1880427
gauagcugcaccgagaaga

SEQ ID NO: 1966271 - RNA, 19 nt, Artificial Sequence
  Description of Artificial Sequence: Synthetic oligonucleotide
  Antisense strand to SEQ ID NO: 1966270
ucuucucggugcagcuauc

SEQ ID NO: 1966272 - RNA, 19 nt, Artificial Sequence
  Description of Artificial Sequence: Synthetic oligonucleotide
  Sense strand starting at position 210 of SEQ ID NO: 1880427
ggaaauugaaaucggguuu

SEQ ID NO: 1966273 - RNA, 19 nt, Artificial Sequence
  Description of Artificial Sequence: Synthetic oligonucleotide
  Antisense strand to SEQ ID NO: 1966272
aaacccgauuucaauuucc

SEQ ID NO: 1966274 - RNA, 19 nt, Artificial Sequence
  Description of Artificial Sequence: Synthetic oligonucleotide
  Sense strand starting at position 623 of SEQ ID NO: 1880427
guuggacaaguuugaaaua

SEQ ID NO: 1966275 - RNA, 19 nt, Artificial Sequence
  Description of Artificial Sequence: Synthetic oligonucleotide
  Antisense strand to SEQ ID NO: 1966274
uauuucaaacuuguccaac

SEQ ID NO: 1966276 - RNA, 19 nt, Artificial Sequence
  Description of Artificial Sequence: Synthetic oligonucleotide
  Sense strand starting at position 987 of SEQ ID NO: 1880427
gggauauaagucuguguaa

SEQ ID NO: 1966277 - RNA, 19 nt, Artificial Sequence
  Description of Artificial Sequence: Synthetic oligonucleotide
  Antisense strand to SEQ ID NO: 1966276
uuacacagacuuauauccc

SEQ ID NO: 1966278 - RNA, 19 nt, Artificial Sequence
  Description of Artificial Sequence: Synthetic oligonucleotide
  Sense strand starting at position 988 of SEQ ID NO: 1880427
ggauauaagucuguguaau

SEQ ID NO: 1966279 - RNA, 19 nt, Artificial Sequence
  Description of Artificial Sequence: Synthetic oligonucleotide
  Antisense strand to SEQ ID NO: 1966278
auuacacagacuuauaucc

SEQ ID NO: 1966280 - RNA, 19 nt, Artificial Sequence
  Description of Artificial Sequence: Synthetic oligonucleotide
  Sense strand starting at position 989 of SEQ ID NO: 1880427
gauauaagucuguguaaug

SEQ ID NO: 1966281 - RNA, 19 nt, Artificial Sequence
  Description of Artificial Sequence: Synthetic oligonucleotide
  Antisense strand to SEQ ID NO: 1966280
cauuacacagacuuauauc

SEQ ID NO: 1966282 - RNA, 19 nt, Artificial Sequence
  Description of Artificial Sequence: Synthetic oligonucleotide
  Sense strand starting at position 1005 of SEQ ID NO: 1880427
auguguguuacauaugaug

SEQ ID NO: 1966283 - RNA, 19 nt, Artificial Sequence
  Description of Artificial Sequence: Synthetic oligonucleotide
  Antisense strand to SEQ ID NO: 1966282
caucauauguaacacacau

SEQ ID NO: 1966284 - RNA, 19 nt, Artificial Sequence
  Description of Artificial Sequence: Synthetic oligonucleotide
  Sense strand starting at position 1076 of SEQ ID NO: 1880427
guguguuuacaucuguggu

SEQ ID NO: 1966285 - RNA, 19 nt, Artificial Sequence
  Description of Artificial Sequence: Synthetic oligonucleotide
  Antisense strand to SEQ ID NO: 1966284
accacagauguaaacacac

SEQ ID NO: 1966286 - RNA, 19 nt, Artificial Sequence
  Description of Artificial Sequence: Synthetic oligonucleotide
  Sense strand starting at position 1222 of SEQ ID NO: 1880427
ugguauuguguguuuaugu

SEQ ID NO: 1966287 - RNA, 19 nt, Artificial Sequence
  Description of Artificial Sequence: Synthetic oligonucleotide
  Antisense strand to SEQ ID NO: 1966286
acauaaacacacaauacca

SEQ ID NO: 1966288 - RNA, 19 nt, Artificial Sequence
  Description of Artificial Sequence: Synthetic oligonucleotide
  Sense strand starting at position 1288 of SEQ ID NO: 1880427
uggcauuuguguguuuaua

SEQ ID NO: 1966289 - RNA, 19 nt, Artificial Sequence
  Description of Artificial Sequence: Synthetic oligonucleotide
  Antisense strand to SEQ ID NO: 1966288
uauaaacacacaaaugcca

SEQ ID NO: 1966290 - RNA, 19 nt, Artificial Sequence
  Description of Artificial Sequence: Synthetic oligonucleotide
  Sense strand starting at position 1366 of SEQ ID NO: 1880427
guggaauauguguaugcau

SEQ ID NO: 1966291 - RNA, 19 nt, Artificial Sequence
  Description of Artificial Sequence: Synthetic oligonucleotide
  Antisense strand to SEQ ID NO: 1966290
augcauacacauauuccac

SEQ ID NO: 1966292 - RNA, 19 nt, Artificial Sequence
  Description of Artificial Sequence: Synthetic oligonucleotide
  Sense strand starting at position 1415 of SEQ ID NO: 1880427
gugugugauaucucugugu

SEQ ID NO: 1966293 - RNA, 19 nt, Artificial Sequence
  Description of Artificial Sequence: Synthetic oligonucleotide
  Antisense strand to SEQ ID NO: 1966292
acacagagauaucacacac

SEQ ID NO: 1966294 - RNA, 19 nt, Artificial Sequence
  Description of Artificial Sequence: Synthetic oligonucleotide
  Sense strand starting at position 1494 of SEQ ID NO: 1880427
guguguuuaagugugugau

SEQ ID NO: 1966295 - RNA, 19 nt, Artificial Sequence
  Description of Artificial Sequence: Synthetic oligonucleotide
  Antisense strand to SEQ ID NO: 1966294
aucacacacuuaaacacac

SEQ ID NO: 1966296 - RNA, 19 nt, Artificial Sequence
  Description of Artificial Sequence: Synthetic oligonucleotide
  Sense strand starting at position 1504 of SEQ ID NO: 1880427
gugugugauauauacauac

SEQ ID NO: 1966297 - RNA, 19 nt, Artificial Sequence
  Description of Artificial Sequence: Synthetic oligonucleotide
  Antisense strand to SEQ ID NO: 1966296
guauguauauaucacacac

SEQ ID NO: 1966298 - RNA, 19 nt, Artificial Sequence
  Description of Artificial Sequence: Synthetic oligonucleotide
  Sense strand starting at position 1651 of SEQ ID NO: 1880427
uguugugugggauauaagu

SEQ ID NO: 1966299 - RNA, 19 nt, Artificial Sequence
  Description of Artificial Sequence: Synthetic oligonucleotide
  Antisense strand to SEQ ID NO: 1966298
acuuauaucccacacaaca

SEQ ID NO: 1966300 - RNA, 19 nt, Artificial Sequence
  Description of Artificial Sequence: Synthetic oligonucleotide
  Sense strand starting at position 1689 of SEQ ID NO: 1880427
ccaggagauucucuuuggu

SEQ ID NO: 1966301 - RNA, 19 nt, Artificial Sequence
  Description of Artificial Sequence: Synthetic oligonucleotide
  Antisense strand to SEQ ID NO: 1966300
accaaagagaaucuccugg

SEQ ID NO: 1966302 - RNA, 19 nt, Artificial Sequence
  Description of Artificial Sequence: Synthetic oligonucleotide
  Sense strand starting at position 1692 of SEQ ID NO: 1880427
ggagauucucuuugguuga

SEQ ID NO: 1966303 - RNA, 19 nt, Artificial Sequence
  Description of Artificial Sequence: Synthetic oligonucleotide
  Antisense strand to SEQ ID NO: 1966302
ucaaccaaagagaaucucc

SEQ ID NO: 1966304 - RNA, 19 nt, Artificial Sequence
  Description of Artificial Sequence: Synthetic oligonucleotide
  Sense strand starting at position 1694 of SEQ ID NO: 1880427
agauucucuuugguugaau

SEQ ID NO: 1966305 - RNA, 19 nt, Artificial Sequence
  Description of Artificial Sequence: Synthetic oligonucleotide
  Antisense strand to SEQ ID NO: 1966304
auucaaccaaagagaaucu

SEQ ID NO: 1966306 - RNA, 19 nt, Artificial Sequence
  Description of Artificial Sequence: Synthetic oligonucleotide
  Sense strand starting at position 1695 of SEQ ID NO: 1880427
gauucucuuugguugaauc

SEQ ID NO: 1966307 - RNA, 19 nt, Artificial Sequence
  Description of Artificial Sequence: Synthetic oligonucleotide
  Antisense strand to SEQ ID NO: 1966306
gauucaaccaaagagaauc

SEQ ID NO: 1966308 - RNA, 19 nt, Artificial Sequence
  Description of Artificial Sequence: Synthetic oligonucleotide
  Sense strand starting at position 1711 of SEQ ID NO: 1880427
aucucaugccaugagacuu

SEQ ID NO: 1966309 - RNA, 19 nt, Artificial Sequence
  Description of Artificial Sequence: Synthetic oligonucleotide
  Antisense strand to SEQ ID NO: 1966308
aagucucauggcaugagau

SEQ ID NO: 1966310 - RNA, 19 nt, Artificial Sequence
  Description of Artificial Sequence: Synthetic oligonucleotide
  Sense strand starting at position 1783 of SEQ ID NO: 1880427
aagggaacaccguguagaa

SEQ ID NO: 1966311 - RNA, 19 nt, Artificial Sequence
  Description of Artificial Sequence: Synthetic oligonucleotide
  Antisense strand to SEQ ID NO: 1966310
uucuacacgguguucccuu

SEQ ID NO: 1966312 - RNA, 19 nt, Artificial Sequence
  Description of Artificial Sequence: Synthetic oligonucleotide
  Sense strand starting at position 2121 of SEQ ID NO: 1880427
cuggaauugccauguacaa

SEQ ID NO: 1966313 - RNA, 19 nt, Artificial Sequence
  Description of Artificial Sequence: Synthetic oligonucleotide
  Antisense strand to SEQ ID NO: 1966312
uuguacauggcaauuccag

SEQ ID NO: 1966314 - RNA, 19 nt, Artificial Sequence
  Description of Artificial Sequence: Synthetic oligonucleotide
  Sense strand starting at position 2149 of SEQ ID NO: 1880427
guauuuauggugugucuga

SEQ ID NO: 1966315 - RNA, 19 nt, Artificial Sequence
  Description of Artificial Sequence: Synthetic oligonucleotide
  Antisense strand to SEQ ID NO: 1966314
ucagacacaccauaaauac

SEQ ID NO: 1966316 - RNA, 19 nt, Artificial Sequence
  Description of Artificial Sequence: Synthetic oligonucleotide
  Sense strand starting at position 2263 of SEQ ID NO: 1880427
accugacuuucugugaaua

SEQ ID NO: 1966317 - RNA, 19 nt, Artificial Sequence
  Description of Artificial Sequence: Synthetic oligonucleotide
  Antisense strand to SEQ ID NO: 1966316
uauucacagaaagucaggu

SEQ ID NO: 1966318 - RNA, 19 nt, Artificial Sequence
  Description of Artificial Sequence: Synthetic oligonucleotide
  Sense strand starting at position 2264 of SEQ ID NO: 1880427
ccugacuuucugugaauag

SEQ ID NO: 1966319 - RNA, 19 nt, Artificial Sequence
  Description of Artificial Sequence: Synthetic oligonucleotide
  Antisense strand to SEQ ID NO: 1966318
cuauucacagaaagucagg

SEQ ID NO: 1966320 - RNA, 19 nt, Artificial Sequence
  Description of Artificial Sequence: Synthetic oligonucleotide
  Sense strand starting at position 2355 of SEQ ID NO: 1880427
ggauguagaaaucagcagu

SEQ ID NO: 1966321 - RNA, 19 nt, Artificial Sequence
  Description of Artificial Sequence: Synthetic oligonucleotide
  Antisense strand to SEQ ID NO: 1966320
acugcugauuucuacaucc

SEQ ID NO: 1966322 - RNA, 19 nt, Artificial Sequence
  Description of Artificial Sequence: Synthetic oligonucleotide
  Sense strand starting at position 2431 of SEQ ID NO: 1880427
ggaggaaccucacagaaga

SEQ ID NO: 1966323 - RNA, 19 nt, Artificial Sequence
  Description of Artificial Sequence: Synthetic oligonucleotide
  Antisense strand to SEQ ID NO: 1966322
ucuucugugagguuccucc

SEQ ID NO: 1966324 - RNA, 19 nt, Artificial Sequence
  Description of Artificial Sequence: Synthetic oligonucleotide
  Sense strand starting at position 2642 of SEQ ID NO: 1880427
gcauucuugucacugaaag

SEQ ID NO: 1966325 - RNA, 19 nt, Artificial Sequence
  Description of Artificial Sequence: Synthetic oligonucleotide
  Antisense strand to SEQ ID NO: 1966324
cuuucagugacaagaaugc

SEQ ID NO: 1966326 - RNA, 19 nt, Artificial Sequence
  Description of Artificial Sequence: Synthetic oligonucleotide
  Sense strand starting at position 2769 of SEQ ID NO: 1880427
gcaggcaauggugaugaua

SEQ ID NO: 1966327 - RNA, 19 nt, Artificial Sequence
  Description of Artificial Sequence: Synthetic oligonucleotide
  Antisense strand to SEQ ID NO: 1966326
uaucaucaccauugccugc

SEQ ID NO: 1966328 - RNA, 19 nt, Artificial Sequence
  Description of Artificial Sequence: Synthetic oligonucleotide
  Sense strand starting at position 2900 of SEQ ID NO: 1880427
gccgcauccuaauuuagaa

SEQ ID NO: 1966329 - RNA, 19 nt, Artificial Sequence
  Description of Artificial Sequence: Synthetic oligonucleotide
  Antisense strand to SEQ ID NO: 1966328
uucuaaauuaggaugcggc

SEQ ID NO: 1966330 - RNA, 19 nt, Artificial Sequence
  Description of Artificial Sequence: Synthetic oligonucleotide
  Sense strand starting at position 3051 of SEQ ID NO: 1880427
ugaaaucacucaguuauag

SEQ ID NO: 1966331 - RNA, 19 nt, Artificial Sequence
  Description of Artificial Sequence: Synthetic oligonucleotide
  Antisense strand to SEQ ID NO: 1966330
cuauaacugagugauuuca

SEQ ID NO: 1966332 - RNA, 19 nt, Artificial Sequence
  Description of Artificial Sequence: Synthetic oligonucleotide
  Sense strand starting at position 3130 of SEQ ID NO: 1880427
gggcaauucgagugagaaa

SEQ ID NO: 1966333 - RNA, 19 nt, Artificial Sequence
  Description of Artificial Sequence: Synthetic oligonucleotide
  Antisense strand to SEQ ID NO: 1966332
uuucucacucgaauugccc

SEQ ID NO: 1966334 - RNA, 19 nt, Artificial Sequence
  Description of Artificial Sequence: Synthetic oligonucleotide
  Sense strand starting at position 3131 of SEQ ID NO: 1880427
ggcaauucgagugagaaac

SEQ ID NO: 1966335 - RNA, 19 nt, Artificial Sequence
  Description of Artificial Sequence: Synthetic oligonucleotide
  Antisense strand to SEQ ID NO: 1966334
guuucucacucgaauugcc

SEQ ID NO: 1966336 - RNA, 19 nt, Artificial Sequence
  Description of Artificial Sequence: Synthetic oligonucleotide
  Sense strand starting at position 3165 of SEQ ID NO: 1880427
agccucuuggacuaucaga

SEQ ID NO: 1966337 - RNA, 19 nt, Artificial Sequence
  Description of Artificial Sequence: Synthetic oligonucleotide
  Antisense strand to SEQ ID NO: 1966336
ucugauaguccaagaggcu

SEQ ID NO: 1966338 - RNA, 19 nt, Artificial Sequence
  Description of Artificial Sequence: Synthetic oligonucleotide
  Sense strand starting at position 3205 of SEQ ID NO: 1880427
ugaaauauguggucuaaca

SEQ ID NO: 1966339 - RNA, 19 nt, Artificial Sequence
  Description of Artificial Sequence: Synthetic oligonucleotide
  Antisense strand to SEQ ID NO: 1966338
uguuagaccacauauuuca

SEQ ID NO: 1966340 - RNA, 19 nt, Artificial Sequence
  Description of Artificial Sequence: Synthetic oligonucleotide
  Sense strand starting at position 3551 of SEQ ID NO: 1880427
ggauuugucugggaggagg

SEQ ID NO: 1966341 - RNA, 19 nt, Artificial Sequence
  Description of Artificial Sequence: Synthetic oligonucleotide
  Antisense strand to SEQ ID NO: 1966340
ccuccucccagacaaaucc

SEQ ID NO: 1966342 - RNA, 19 nt, Artificial Sequence
  Description of Artificial Sequence: Synthetic oligonucleotide
  Sense strand starting at position 3608 of SEQ ID NO: 1880427
cacugcucaccuggagaga

SEQ ID NO: 1966343 - RNA, 19 nt, Artificial Sequence
  Description of Artificial Sequence: Synthetic oligonucleotide
  Antisense strand to SEQ ID NO: 1966342
ucucuccaggugagcagug

SEQ ID NO: 1966344 - RNA, 19 nt, Artificial Sequence
  Description of Artificial Sequence: Synthetic oligonucleotide
  Sense strand starting at position 3655 of SEQ ID NO: 1880427
uugagaaaugcccaggcga

SEQ ID NO: 1966345 - RNA, 19 nt, Artificial Sequence
  Description of Artificial Sequence: Synthetic oligonucleotide
  Antisense strand to SEQ ID NO: 1966344
ucgccugggcauuucucaa

SEQ ID NO: 1966346 - RNA, 19 nt, Artificial Sequence
  Description of Artificial Sequence: Synthetic oligonucleotide
  Sense strand starting at position 3657 of SEQ ID NO: 1880427
gagaaaugcccaggcgaag

SEQ ID NO: 1966347 - RNA, 19 nt, Artificial Sequence
  Description of Artificial Sequence: Synthetic oligonucleotide
  Antisense strand to SEQ ID NO: 1966346
cuucgccugggcauuucuc

SEQ ID NO: 1966348 - RNA, 19 nt, Artificial Sequence
  Description of Artificial Sequence: Synthetic oligonucleotide
  Sense strand starting at position 6 of SEQ ID NO: 1880428
uguaaaugaucuccaggac

SEQ ID NO: 1966349 - RNA, 19 nt, Artificial Sequence
  Description of Artificial Sequence: Synthetic oligonucleotide
  Antisense strand to SEQ ID NO: 1966348
guccuggagaucauuuaca

SEQ ID NO: 1966350 - RNA, 19 nt, Artificial Sequence
  Description of Artificial Sequence: Synthetic oligonucleotide
  Sense strand starting at position 9 of SEQ ID NO: 1880428
aaaugaucuccaggacagu

SEQ ID NO: 1966351 - RNA, 19 nt, Artificial Sequence
  Description of Artificial Sequence: Synthetic oligonucleotide
  Antisense strand to SEQ ID NO: 1966350
acuguccuggagaucauuu

SEQ ID NO: 1966352 - RNA, 19 nt, Artificial Sequence
  Description of Artificial Sequence: Synthetic oligonucleotide
  Sense strand starting at position 66 of SEQ ID NO: 1880428
ucagaucagcauugugauc

SEQ ID NO: 1966353 - RNA, 19 nt, Artificial Sequence
  Description of Artificial Sequence: Synthetic oligonucleotide
  Antisense strand to SEQ ID NO: 1966352
gaucacaaugcugaucuga

SEQ ID NO: 1966354 - RNA, 19 nt, Artificial Sequence
  Description of Artificial Sequence: Synthetic oligonucleotide
  Sense strand starting at position 71 of SEQ ID NO: 1880428
ucagcauugugaucugaag

SEQ ID NO: 1966355 - RNA, 19 nt, Artificial Sequence
  Description of Artificial Sequence: Synthetic oligonucleotide
  Antisense strand to SEQ ID NO: 1966354
cuucagaucacaaugcuga

SEQ ID NO: 1966356 - RNA, 19 nt, Artificial Sequence
  Description of Artificial Sequence: Synthetic oligonucleotide
  Sense strand starting at position 175 of SEQ ID NO: 1880428
ccuggaucugcuuaucaga

SEQ ID NO: 1966357 - RNA, 19 nt, Artificial Sequence
  Description of Artificial Sequence: Synthetic oligonucleotide
  Antisense strand to SEQ ID NO: 1966356
ucugauaagcagauccagg

SEQ ID NO: 1966358 - RNA, 19 nt, Artificial Sequence
  Description of Artificial Sequence: Synthetic oligonucleotide
  Sense strand starting at position 177 of SEQ ID NO: 1880428
uggaucugcuuaucagaag

SEQ ID NO: 1966359 - RNA, 19 nt, Artificial Sequence
  Description of Artificial Sequence: Synthetic oligonucleotide
  Antisense strand to SEQ ID NO: 1966358
cuucugauaagcagaucca

SEQ ID NO: 1966360 - RNA, 19 nt, Artificial Sequence
  Description of Artificial Sequence: Synthetic oligonucleotide
  Sense strand starting at position 344 of SEQ ID NO: 1880428
acgggaauggucgaucuua

SEQ ID NO: 1966361 - RNA, 19 nt, Artificial Sequence
  Description of Artificial Sequence: Synthetic oligonucleotide
  Antisense strand to SEQ ID NO: 1966360
uaagaucgaccauucccgu

SEQ ID NO: 1966362 - RNA, 19 nt, Artificial Sequence
  Description of Artificial Sequence: Synthetic oligonucleotide
  Sense strand starting at position 413 of SEQ ID NO: 1880428
gugcuuccuccuggagaag

SEQ ID NO: 1966363 - RNA, 19 nt, Artificial Sequence
  Description of Artificial Sequence: Synthetic oligonucleotide
  Antisense strand to SEQ ID NO: 1966362
cuucuccaggaggaagcac

SEQ ID NO: 1966364 - RNA, 19 nt, Artificial Sequence
  Description of Artificial Sequence: Synthetic oligonucleotide
  Sense strand starting at position 533 of SEQ ID NO: 1880428
ucaaauugucaggguagaa

SEQ ID NO: 1966365 - RNA, 19 nt, Artificial Sequence
  Description of Artificial Sequence: Synthetic oligonucleotide
  Antisense strand to SEQ ID NO: 1966364
uucuacccugacaauuuga

SEQ ID NO: 1966366 - RNA, 19 nt, Artificial Sequence
  Description of Artificial Sequence: Synthetic oligonucleotide
  Sense strand starting at position 655 of SEQ ID NO: 1880428
ggcuaugcauuuguuagga

SEQ ID NO: 1966367 - RNA, 19 nt, Artificial Sequence
  Description of Artificial Sequence: Synthetic oligonucleotide
  Antisense strand to SEQ ID NO: 1966366
uccuaacaaaugcauagcc

SEQ ID NO: 1966368 - RNA, 19 nt, Artificial Sequence
  Description of Artificial Sequence: Synthetic oligonucleotide
  Sense strand starting at position 767 of SEQ ID NO: 1880428
guggaagagugguuucuag

SEQ ID NO: 1966369 - RNA, 19 nt, Artificial Sequence
  Description of Artificial Sequence: Synthetic oligonucleotide
  Antisense strand to SEQ ID NO: 1966368
cuagaaaccacucuuccac

SEQ ID NO: 1966370 - RNA, 19 nt, Artificial Sequence
  Description of Artificial Sequence: Synthetic oligonucleotide
  Sense strand starting at position 830 of SEQ ID NO: 1880428
cagaaagugcagugcucaa

SEQ ID NO: 1966371 - RNA, 19 nt, Artificial Sequence
  Description of Artificial Sequence: Synthetic oligonucleotide
  Antisense strand to SEQ ID NO: 1966370
uugagcacugcacuuucug

SEQ ID NO: 1966372 - RNA, 19 nt, Artificial Sequence
  Description of Artificial Sequence: Synthetic oligonucleotide
  Sense strand starting at position 864 of SEQ ID NO: 1880428
aaugcauucuggcuguaaa

SEQ ID NO: 1966373 - RNA, 19 nt, Artificial Sequence
  Description of Artificial Sequence: Synthetic oligonucleotide
  Antisense strand to SEQ ID NO: 1966372
uuuacagccagaaugcauu

SEQ ID NO: 1966374 - RNA, 19 nt, Artificial Sequence
  Description of Artificial Sequence: Synthetic oligonucleotide
  Sense strand starting at position 932 of SEQ ID NO: 1880428
gcuuccaaucaugaauaug

SEQ ID NO: 1966375 - RNA, 19 nt, Artificial Sequence
  Description of Artificial Sequence: Synthetic oligonucleotide
  Antisense strand to SEQ ID NO: 1966374
cauauucaugauuggaagc

SEQ ID NO: 1966376 - RNA, 19 nt, Artificial Sequence
  Description of Artificial Sequence: Synthetic oligonucleotide
  Sense strand starting at position 955 of SEQ ID NO: 1880428
ggcaauugcaagcagagaa

SEQ ID NO: 1966377 - RNA, 19 nt, Artificial Sequence
  Description of Artificial Sequence: Synthetic oligonucleotide
  Antisense strand to SEQ ID NO: 1966376
uucucugcuugcaauugcc

SEQ ID NO: 1966378 - RNA, 19 nt, Artificial Sequence
  Description of Artificial Sequence: Synthetic oligonucleotide
  Sense strand starting at position 973 of SEQ ID NO: 1880428
auuugcuugucauugauac

SEQ ID NO: 1966379 - RNA, 19 nt, Artificial Sequence
  Description of Artificial Sequence: Synthetic oligonucleotide
  Antisense strand to SEQ ID NO: 1966378
guaucaaugacaagcaaau

SEQ ID NO: 1966380 - RNA, 19 nt, Artificial Sequence
  Description of Artificial Sequence: Synthetic oligonucleotide
  Sense strand starting at position 994 of SEQ ID NO: 1880428
aguugaagccaucaauaau

SEQ ID NO: 1966381 - RNA, 19 nt, Artificial Sequence
  Description of Artificial Sequence: Synthetic oligonucleotide
  Antisense strand to SEQ ID NO: 1966380
auuauugauggcuucaacu

SEQ ID NO: 1966382 - RNA, 19 nt, Artificial Sequence
  Description of Artificial Sequence: Synthetic oligonucleotide
  Sense strand starting at position 1753 of SEQ ID NO: 1880428
gagauagaauugccucugu

SEQ ID NO: 1966383 - RNA, 19 nt, Artificial Sequence
  Description of Artificial Sequence: Synthetic oligonucleotide
  Antisense strand to SEQ ID NO: 1966382
acagaggcaauucuaucuc

SEQ ID NO: 1966384 - RNA, 19 nt, Artificial Sequence
  Description of Artificial Sequence: Synthetic oligonucleotide
  Sense strand starting at position 1795 of SEQ ID NO: 1880428
agaugaaguugcuuacuca

SEQ ID NO: 1966385 - RNA, 19 nt, Artificial Sequence
  Description of Artificial Sequence: Synthetic oligonucleotide
  Antisense strand to SEQ ID NO: 1966384
ugaguaagcaacuucaucu

SEQ ID NO: 1966386 - RNA, 19 nt, Artificial Sequence
  Description of Artificial Sequence: Synthetic oligonucleotide
  Sense strand starting at position 1796 of SEQ ID NO: 1880428
gaugaaguugcuuacucau

SEQ ID NO: 1966387 - RNA, 19 nt, Artificial Sequence
  Description of Artificial Sequence: Synthetic oligonucleotide
  Antisense strand to SEQ ID NO: 1966386
augaguaagcaacuucauc

SEQ ID NO: 1966388 - RNA, 19 nt, Artificial Sequence
  Description of Artificial Sequence: Synthetic oligonucleotide
  Sense strand starting at position 2208 of SEQ ID NO: 1880428
ggauuacauaucugugguu

SEQ ID NO: 1966389 - RNA, 19 nt, Artificial Sequence
  Description of Artificial Sequence: Synthetic oligonucleotide
  Antisense strand to SEQ ID NO: 1966388
aaccacagauauguaaucc

SEQ ID NO: 1966390 - RNA, 19 nt, Artificial Sequence
  Description of Artificial Sequence: Synthetic oligonucleotide
  Sense strand starting at position 2210 of SEQ ID NO: 1880428
auuacauaucugugguucu

SEQ ID NO: 1966391 - RNA, 19 nt, Artificial Sequence
  Description of Artificial Sequence: Synthetic oligonucleotide
  Antisense strand to SEQ ID NO: 1966390
agaaccacagauauguaau

SEQ ID NO: 1966392 - RNA, 19 nt, Artificial Sequence
  Description of Artificial Sequence: Synthetic oligonucleotide
  Sense strand starting at position 2213 of SEQ ID NO: 1880428
acauaucugugguucugau

SEQ ID NO: 1966393 - RNA, 19 nt, Artificial Sequence
  Description of Artificial Sequence: Synthetic oligonucleotide
  Antisense strand to SEQ ID NO: 1966392
aucagaaccacagauaugu

SEQ ID NO: 1966394 - RNA, 19 nt, Artificial Sequence
  Description of Artificial Sequence: Synthetic oligonucleotide
  Sense strand starting at position 2242 of SEQ ID NO: 1880428
aguccagcccugcaugaaa

SEQ ID NO: 1966395 - RNA, 19 nt, Artificial Sequence
  Description of Artificial Sequence: Synthetic oligonucleotide
  Antisense strand to SEQ ID NO: 1966394
uuucaugcagggcuggacu

SEQ ID NO: 1966396 - RNA, 19 nt, Artificial Sequence
  Description of Artificial Sequence: Synthetic oligonucleotide
  Sense strand starting at position 2254 of SEQ ID NO: 1880428
caugaaaggucucugugca

SEQ ID NO: 1966397 - RNA, 19 nt, Artificial Sequence
  Description of Artificial Sequence: Synthetic oligonucleotide
  Antisense strand to SEQ ID NO: 1966396
ugcacagagaccuuucaug

SEQ ID NO: 1966398 - RNA, 19 nt, Artificial Sequence
  Description of Artificial Sequence: Synthetic oligonucleotide
  Sense strand starting at position 2255 of SEQ ID NO: 1880428
augaaaggucucugugcag

SEQ ID NO: 1966399 - RNA, 19 nt, Artificial Sequence
  Description of Artificial Sequence: Synthetic oligonucleotide
  Antisense strand to SEQ ID NO: 1966398
cugcacagagaccuuucau

SEQ ID NO: 1966400 - RNA, 19 nt, Artificial Sequence
  Description of Artificial Sequence: Synthetic oligonucleotide
  Sense strand starting at position 2442 of SEQ ID NO: 1880428
uuagguccacccugaagaa

SEQ ID NO: 1966401 - RNA, 19 nt, Artificial Sequence
  Description of Artificial Sequence: Synthetic oligonucleotide
  Antisense strand to SEQ ID NO: 1966400
uucuucaggguggaccuaa

SEQ ID NO: 1966402 - RNA, 19 nt, Artificial Sequence
  Description of Artificial Sequence: Synthetic oligonucleotide
  Sense strand starting at position 2571 of SEQ ID NO: 1880428
ggaaauaaugguggugaua

SEQ ID NO: 1966403 - RNA, 19 nt, Artificial Sequence
  Description of Artificial Sequence: Synthetic oligonucleotide
  Antisense strand to SEQ ID NO: 1966402
uaucaccaccauuauuucc

SEQ ID NO: 1966404 - RNA, 19 nt, Artificial Sequence
  Description of Artificial Sequence: Synthetic oligonucleotide
  Sense strand starting at position 2580 of SEQ ID NO: 1880428
gguggugauauuugcuagu

SEQ ID NO: 1966405 - RNA, 19 nt, Artificial Sequence
  Description of Artificial Sequence: Synthetic oligonucleotide
  Antisense strand to SEQ ID NO: 1966404
acuagcaaauaucaccacc

SEQ ID NO: 1966406 - RNA, 19 nt, Artificial Sequence
  Description of Artificial Sequence: Synthetic oligonucleotide
  Sense strand starting at position 2582 of SEQ ID NO: 1880428
uggugauauuugcuaguau

SEQ ID NO: 1966407 - RNA, 19 nt, Artificial Sequence
  Description of Artificial Sequence: Synthetic oligonucleotide
  Antisense strand to SEQ ID NO: 1966406
auacuagcaaauaucacca

SEQ ID NO: 1966408 - RNA, 19 nt, Artificial Sequence
  Description of Artificial Sequence: Synthetic oligonucleotide
  Sense strand starting at position 3307 of SEQ ID NO: 1880428
ccugccucuguagauuaaa

SEQ ID NO: 1966409 - RNA, 19 nt, Artificial Sequence
  Description of Artificial Sequence: Synthetic oligonucleotide
  Antisense strand to SEQ ID NO: 1966408
uuuaaucuacagaggcagg

SEQ ID NO: 1966410 - RNA, 19 nt, Artificial Sequence
  Description of Artificial Sequence: Synthetic oligonucleotide
  Sense strand starting at position 3464 of SEQ ID NO: 1880428
ugggcaacagucugugaau

SEQ ID NO: 1966411 - RNA, 19 nt, Artificial Sequence
  Description of Artificial Sequence: Synthetic oligonucleotide
  Antisense strand to SEQ ID NO: 1966410
auucacagacuguugccca

SEQ ID NO: 1966412 - RNA, 19 nt, Artificial Sequence
  Description of Artificial Sequence: Synthetic oligonucleotide
  Sense strand starting at position 3465 of SEQ ID NO: 1880428
gggcaacagucugugaauc

SEQ ID NO: 1966413 - RNA, 19 nt, Artificial Sequence
  Description of Artificial Sequence: Synthetic oligonucleotide
  Antisense strand to SEQ ID NO: 1966412
gauucacagacuguugccc

SEQ ID NO: 1966414 - RNA, 19 nt, Artificial Sequence
  Description of Artificial Sequence: Synthetic oligonucleotide
  Sense strand starting at position 3748 of SEQ ID NO: 1880428
cugaaugccauugguguaa

SEQ ID NO: 1966415 - RNA, 19 nt, Artificial Sequence
  Description of Artificial Sequence: Synthetic oligonucleotide
  Antisense strand to SEQ ID NO: 1966414
uuacaccaauggcauucag

SEQ ID NO: 1966416 - RNA, 19 nt, Artificial Sequence
  Description of Artificial Sequence: Synthetic oligonucleotide
  Sense strand starting at position 3757 of SEQ ID NO: 1880428
auugguguaacuugucaga

SEQ ID NO: 1966417 - RNA, 19 nt, Artificial Sequence
  Description of Artificial Sequence: Synthetic oligonucleotide
  Antisense strand to SEQ ID NO: 1966416
ucugacaaguuacaccaau

SEQ ID NO: 1966418 - RNA, 19 nt, Artificial Sequence
  Description of Artificial Sequence: Synthetic oligonucleotide
  Sense strand starting at position 3759 of SEQ ID NO: 1880428
ugguguaacuugucagauu

SEQ ID NO: 1966419 - RNA, 19 nt, Artificial Sequence
  Description of Artificial Sequence: Synthetic oligonucleotide
  Antisense strand to SEQ ID NO: 1966418
aaucugacaaguuacacca

SEQ ID NO: 1966420 - RNA, 19 nt, Artificial Sequence
  Description of Artificial Sequence: Synthetic oligonucleotide
  Sense strand starting at position 3795 of SEQ ID NO: 1880428
gggagauguacuugaguua

SEQ ID NO: 1966421 - RNA, 19 nt, Artificial Sequence
  Description of Artificial Sequence: Synthetic oligonucleotide
  Antisense strand to SEQ ID NO: 1966420
uaacucaaguacaucuccc

SEQ ID NO: 1966422 - RNA, 19 nt, Artificial Sequence
  Description of Artificial Sequence: Synthetic oligonucleotide
  Sense strand starting at position 3796 of SEQ ID NO: 1880428
ggagauguacuugaguuac

SEQ ID NO: 1966423 - RNA, 19 nt, Artificial Sequence
  Description of Artificial Sequence: Synthetic oligonucleotide
  Antisense strand to SEQ ID NO: 1966422
guaacucaaguacaucucc

SEQ ID NO: 1966424 - RNA, 19 nt, Artificial Sequence
  Description of Artificial Sequence: Synthetic oligonucleotide
  Sense strand starting at position 3807 of SEQ ID NO: 1880428
ugaguuacccaaugucauc

SEQ ID NO: 1966425 - RNA, 19 nt, Artificial Sequence
  Description of Artificial Sequence: Synthetic oligonucleotide
  Antisense strand to SEQ ID NO: 1966424
gaugacauuggguaacuca

SEQ ID NO: 1966426 - RNA, 19 nt, Artificial Sequence
  Description of Artificial Sequence: Synthetic oligonucleotide
  Sense strand starting at position 3909 of SEQ ID NO: 1880428
uuuccuuugguuuggacaa

SEQ ID NO: 1966427 - RNA, 19 nt, Artificial Sequence
  Description of Artificial Sequence: Synthetic oligonucleotide
  Antisense strand to SEQ ID NO: 1966426
uuguccaaaccaaaggaaa

SEQ ID NO: 1966428 - RNA, 19 nt, Artificial Sequence
  Description of Artificial Sequence: Synthetic oligonucleotide
  Sense strand starting at position 115 of SEQ ID NO: 1880429
uggguacagcugcaauaaa

SEQ ID NO: 1966429 - RNA, 19 nt, Artificial Sequence
  Description of Artificial Sequence: Synthetic oligonucleotide
  Antisense strand to SEQ ID NO: 1966428
uuuauugcagcuguaccca

SEQ ID NO: 1966430 - RNA, 19 nt, Artificial Sequence
  Description of Artificial Sequence: Synthetic oligonucleotide
  Sense strand starting at position 166 of SEQ ID NO: 1880429
cagggaaacccuggucuga

SEQ ID NO: 1966431 - RNA, 19 nt, Artificial Sequence
  Description of Artificial Sequence: Synthetic oligonucleotide
  Antisense strand to SEQ ID NO: 1966430
ucagaccaggguuucccug

SEQ ID NO: 1966432 - RNA, 19 nt, Artificial Sequence
  Description of Artificial Sequence: Synthetic oligonucleotide
  Sense strand starting at position 168 of SEQ ID NO: 1880429
gggaaacccuggucugaac

SEQ ID NO: 1966433 - RNA, 19 nt, Artificial Sequence
  Description of Artificial Sequence: Synthetic oligonucleotide
  Antisense strand to SEQ ID NO: 1966432
guucagaccaggguuuccc

SEQ ID NO: 1966434 - RNA, 19 nt, Artificial Sequence
  Description of Artificial Sequence: Synthetic oligonucleotide
  Sense strand starting at position 199 of SEQ ID NO: 1880429
gggcuauagagcuauaagu

SEQ ID NO: 1966435 - RNA, 19 nt, Artificial Sequence
  Description of Artificial Sequence: Synthetic oligonucleotide
  Antisense strand to SEQ ID NO: 1966434
acuuauagcucuauagccc

SEQ ID NO: 1966436 - RNA, 19 nt, Artificial Sequence
  Description of Artificial Sequence: Synthetic oligonucleotide
  Sense strand starting at position 713 of SEQ ID NO: 1880429
guuacugccuuacuggaaa

SEQ ID NO: 1966437 - RNA, 19 nt, Artificial Sequence
  Description of Artificial Sequence: Synthetic oligonucleotide
  Antisense strand to SEQ ID NO: 1966436
uuuccaguaaggcaguaac

SEQ ID NO: 1966438 - RNA, 19 nt, Artificial Sequence
  Description of Artificial Sequence: Synthetic oligonucleotide
  Sense strand starting at position 873 of SEQ ID NO: 1880429
aagugcuagagucagagau

SEQ ID NO: 1966439 - RNA, 19 nt, Artificial Sequence
  Description of Artificial Sequence: Synthetic oligonucleotide
  Antisense strand to SEQ ID NO: 1966438
aucucugacucuagcacuu

SEQ ID NO: 1966440 - RNA, 19 nt, Artificial Sequence
  Description of Artificial Sequence: Synthetic oligonucleotide
  Sense strand starting at position 954 of SEQ ID NO: 1880429
caaucacuugggugucuaa

SEQ ID NO: 1966441 - RNA, 19 nt, Artificial Sequence
  Description of Artificial Sequence: Synthetic oligonucleotide
  Antisense strand to SEQ ID NO: 1966440
uuagacacccaagugauug

SEQ ID NO: 1966442 - RNA, 19 nt, Artificial Sequence
  Description of Artificial Sequence: Synthetic oligonucleotide
  Sense strand starting at position 1597 of SEQ ID NO: 1880429
ggaauacucuucccuagga

SEQ ID NO: 1966443 - RNA, 19 nt, Artificial Sequence
  Description of Artificial Sequence: Synthetic oligonucleotide
  Antisense strand to SEQ ID NO: 1966442
uccuagggaagaguauucc

SEQ ID NO: 1966444 - RNA, 19 nt, Artificial Sequence
  Description of Artificial Sequence: Synthetic oligonucleotide
  Sense strand starting at position 1610 of SEQ ID NO: 1880429
cuaggauaggcucaugguu

SEQ ID NO: 1966445 - RNA, 19 nt, Artificial Sequence
  Description of Artificial Sequence: Synthetic oligonucleotide
  Antisense strand to SEQ ID NO: 1966444
aaccaugagccuauccuag

SEQ ID NO: 1966446 - RNA, 19 nt, Artificial Sequence
  Description of Artificial Sequence: Synthetic oligonucleotide
  Sense strand starting at position 1789 of SEQ ID NO: 1880429
ccuucuauuuguguuaucu

SEQ ID NO: 1966447 - RNA, 19 nt, Artificial Sequence
  Description of Artificial Sequence: Synthetic oligonucleotide
  Antisense strand to SEQ ID NO: 1966446
agauaacacaaauagaagg

SEQ ID NO: 1966448 - RNA, 19 nt, Artificial Sequence
  Description of Artificial Sequence: Synthetic oligonucleotide
  Sense strand starting at position 1914 of SEQ ID NO: 1880429
uagcgugcucaguuaauac

SEQ ID NO: 1966449 - RNA, 19 nt, Artificial Sequence
  Description of Artificial Sequence: Synthetic oligonucleotide
  Antisense strand to SEQ ID NO: 1966448
guauuaacugagcacgcua

SEQ ID NO: 1966450 - RNA, 19 nt, Artificial Sequence
  Description of Artificial Sequence: Synthetic oligonucleotide
  Sense strand starting at position 1941 of SEQ ID NO: 1880429
uugauuaguuaacuagcau

SEQ ID NO: 1966451 - RNA, 19 nt, Artificial Sequence
  Description of Artificial Sequence: Synthetic oligonucleotide
  Antisense strand to SEQ ID NO: 1966450
augcuaguuaacuaaucaa

SEQ ID NO: 1966452 - RNA, 19 nt, Artificial Sequence
  Description of Artificial Sequence: Synthetic oligonucleotide
  Sense strand starting at position 1947 of SEQ ID NO: 1880429
aguuaacuagcaugaauag

SEQ ID NO: 1966453 - RNA, 19 nt, Artificial Sequence
  Description of Artificial Sequence: Synthetic oligonucleotide
  Antisense strand to SEQ ID NO: 1966452
cuauucaugcuaguuaacu

SEQ ID NO: 1966454 - RNA, 19 nt, Artificial Sequence
  Description of Artificial Sequence: Synthetic oligonucleotide
  Sense strand starting at position 2108 of SEQ ID NO: 1880429
uggcgugugcucgugauac

SEQ ID NO: 1966455 - RNA, 19 nt, Artificial Sequence
  Description of Artificial Sequence: Synthetic oligonucleotide
  Antisense strand to SEQ ID NO: 1966454
guaucacgagcacacgcca

SEQ ID NO: 1966456 - RNA, 19 nt, Artificial Sequence
  Description of Artificial Sequence: Synthetic oligonucleotide
  Sense strand starting at position 2208 of SEQ ID NO: 1880429
cucuauuacucaucauggu

SEQ ID NO: 1966457 - RNA, 19 nt, Artificial Sequence
  Description of Artificial Sequence: Synthetic oligonucleotide
  Antisense strand to SEQ ID NO: 1966456
accaugaugaguaauagag

SEQ ID NO: 1966458 - RNA, 19 nt, Artificial Sequence
  Description of Artificial Sequence: Synthetic oligonucleotide
  Sense strand starting at position 2209 of SEQ ID NO: 1880429
ucuauuacucaucaugguu

SEQ ID NO: 1966459 - RNA, 19 nt, Artificial Sequence
  Description of Artificial Sequence: Synthetic oligonucleotide
  Antisense strand to SEQ ID NO: 1966458
aaccaugaugaguaauaga

SEQ ID NO: 1966460 - RNA, 19 nt, Artificial Sequence
  Description of Artificial Sequence: Synthetic oligonucleotide
  Sense strand starting at position 2404 of SEQ ID NO: 1880429
cccugacagcccgacaauu

SEQ ID NO: 1966461 - RNA, 19 nt, Artificial Sequence
  Description of Artificial Sequence: Synthetic oligonucleotide
  Antisense strand to SEQ ID NO: 1966460
aauugucgggcugucaggg

SEQ ID NO: 1966462 - RNA, 19 nt, Artificial Sequence
  Description of Artificial Sequence: Synthetic oligonucleotide
  Sense strand starting at position 2539 of SEQ ID NO: 1880429
cuaagauagucacuuagau

SEQ ID NO: 1966463 - RNA, 19 nt, Artificial Sequence
  Description of Artificial Sequence: Synthetic oligonucleotide
  Antisense strand to SEQ ID NO: 1966462
aucuaagugacuaucuuag

SEQ ID NO: 1966464 - RNA, 19 nt, Artificial Sequence
  Description of Artificial Sequence: Synthetic oligonucleotide
  Sense strand starting at position 2574 of SEQ ID NO: 1880429
uuugaaauguuccuacaga

SEQ ID NO: 1966465 - RNA, 19 nt, Artificial Sequence
  Description of Artificial Sequence: Synthetic oligonucleotide
  Antisense strand to SEQ ID NO: 1966464
ucuguaggaacauuucaaa

SEQ ID NO: 1966466 - RNA, 19 nt, Artificial Sequence
  Description of Artificial Sequence: Synthetic oligonucleotide
  Sense strand starting at position 2631 of SEQ ID NO: 1880429
cugugaaaucaauggugac

SEQ ID NO: 1966467 - RNA, 19 nt, Artificial Sequence
  Description of Artificial Sequence: Synthetic oligonucleotide
  Antisense strand to SEQ ID NO: 1966466
gucaccauugauuucacag

SEQ ID NO: 1966468 - RNA, 19 nt, Artificial Sequence
  Description of Artificial Sequence: Synthetic oligonucleotide
  Sense strand starting at position 2632 of SEQ ID NO: 1880429
ugugaaaucaauggugacu

SEQ ID NO: 1966469 - RNA, 19 nt, Artificial Sequence
  Description of Artificial Sequence: Synthetic oligonucleotide
  Antisense strand to SEQ ID NO: 1966468
agucaccauugauuucaca

SEQ ID NO: 1966470 - RNA, 19 nt, Artificial Sequence
  Description of Artificial Sequence: Synthetic oligonucleotide
  Sense strand starting at position 2675 of SEQ ID NO: 1880429
uugccagaagcauaacaua

SEQ ID NO: 1966471 - RNA, 19 nt, Artificial Sequence
  Description of Artificial Sequence: Synthetic oligonucleotide
  Antisense strand to SEQ ID NO: 1966470
uauguuaugcuucuggcaa

SEQ ID NO: 1966472 - RNA, 19 nt, Artificial Sequence
  Description of Artificial Sequence: Synthetic oligonucleotide
  Sense strand starting at position 3098 of SEQ ID NO: 1880429
acccaauguuggguuauau

SEQ ID NO: 1966473 - RNA, 19 nt, Artificial Sequence
  Description of Artificial Sequence: Synthetic oligonucleotide
  Antisense strand to SEQ ID NO: 1966472
auauaacccaacauugggu

SEQ ID NO: 1966474 - RNA, 19 nt, Artificial Sequence
  Description of Artificial Sequence: Synthetic oligonucleotide
  Sense strand starting at position 3144 of SEQ ID NO: 1880429
augugaaacaauggacagu

SEQ ID NO: 1966475 - RNA, 19 nt, Artificial Sequence
  Description of Artificial Sequence: Synthetic oligonucleotide
  Antisense strand to SEQ ID NO: 1966474
acuguccauuguuucacau

SEQ ID NO: 1966476 - RNA, 19 nt, Artificial Sequence
  Description of Artificial Sequence: Synthetic oligonucleotide
  Sense strand starting at position 3159 of SEQ ID NO: 1880429
caguguaguggacaucaca

SEQ ID NO: 1966477 - RNA, 19 nt, Artificial Sequence
  Description of Artificial Sequence: Synthetic oligonucleotide
  Antisense strand to SEQ ID NO: 1966476
ugugauguccacuacacug

SEQ ID NO: 1966478 - RNA, 19 nt, Artificial Sequence
  Description of Artificial Sequence: Synthetic oligonucleotide
  Sense strand starting at position 3292 of SEQ ID NO: 1880429
cgaguaaacagcgauccaa

SEQ ID NO: 1966479 - RNA, 19 nt, Artificial Sequence
  Description of Artificial Sequence: Synthetic oligonucleotide
  Antisense strand to SEQ ID NO: 1966478
uuggaucgcuguuuacucg

SEQ ID NO: 1966480 - RNA, 19 nt, Artificial Sequence
  Description of Artificial Sequence: Synthetic oligonucleotide
  Sense strand starting at position 3332 of SEQ ID NO: 1880429
cagccauggccacaguaau

SEQ ID NO: 1966481 - RNA, 19 nt, Artificial Sequence
  Description of Artificial Sequence: Synthetic oligonucleotide
  Antisense strand to SEQ ID NO: 1966480
auuacuguggccauggcug

SEQ ID NO: 1966482 - RNA, 19 nt, Artificial Sequence
  Description of Artificial Sequence: Synthetic oligonucleotide
  Sense strand starting at position 3344 of SEQ ID NO: 1880429
caguaauuggcccagggau

SEQ ID NO: 1966483 - RNA, 19 nt, Artificial Sequence
  Description of Artificial Sequence: Synthetic oligonucleotide
  Antisense strand to SEQ ID NO: 1966482
aucccugggccaauuacug

SEQ ID NO: 1966484 - RNA, 19 nt, Artificial Sequence
  Description of Artificial Sequence: Synthetic oligonucleotide
  Sense strand starting at position 3412 of SEQ ID NO: 1880429
aguaguuaagcagaagacu

SEQ ID NO: 1966485 - RNA, 19 nt, Artificial Sequence
  Description of Artificial Sequence: Synthetic oligonucleotide
  Antisense strand to SEQ ID NO: 1966484
agucuucugcuuaacuacu

SEQ ID NO: 1966486 - RNA, 19 nt, Artificial Sequence
  Description of Artificial Sequence: Synthetic oligonucleotide
  Sense strand starting at position 3465 of SEQ ID NO: 1880429
gguguaagaacuuggcaag

SEQ ID NO: 1966487 - RNA, 19 nt, Artificial Sequence
  Description of Artificial Sequence: Synthetic oligonucleotide
  Antisense strand to SEQ ID NO: 1966486
cuugccaaguucuuacacc

SEQ ID NO: 1966488 - RNA, 19 nt, Artificial Sequence
  Description of Artificial Sequence: Synthetic oligonucleotide
  Sense strand starting at position 3504 of SEQ ID NO: 1880429
ccaguuucuuggguaggaa

SEQ ID NO: 1966489 - RNA, 19 nt, Artificial Sequence
  Description of Artificial Sequence: Synthetic oligonucleotide
  Antisense strand to SEQ ID NO: 1966488
uuccuacccaagaaacugg

SEQ ID NO: 1966490 - RNA, 19 nt, Artificial Sequence
  Description of Artificial Sequence: Synthetic oligonucleotide
  Sense strand starting at position 3505 of SEQ ID NO: 1880429
caguuucuuggguaggaaa

SEQ ID NO: 1966491 - RNA, 19 nt, Artificial Sequence
  Description of Artificial Sequence: Synthetic oligonucleotide
  Antisense strand to SEQ ID NO: 1966490
uuuccuacccaagaaacug

SEQ ID NO: 1966492 - RNA, 19 nt, Artificial Sequence
  Description of Artificial Sequence: Synthetic oligonucleotide
  Sense strand starting at position 3507 of SEQ ID NO: 1880429
guuucuuggguaggaaauu

SEQ ID NO: 1966493 - RNA, 19 nt, Artificial Sequence
  Description of Artificial Sequence: Synthetic oligonucleotide
  Antisense strand to SEQ ID NO: 1966492
aauuuccuacccaagaaac

SEQ ID NO: 1966494 - RNA, 19 nt, Artificial Sequence
  Description of Artificial Sequence: Synthetic oligonucleotide
  Sense strand starting at position 3596 of SEQ ID NO: 1880429
ccaugcuugguacauauua

SEQ ID NO: 1966495 - RNA, 19 nt, Artificial Sequence
  Description of Artificial Sequence: Synthetic oligonucleotide
  Antisense strand to SEQ ID NO: 1966494
uaauauguaccaagcaugg

SEQ ID NO: 1966496 - RNA, 19 nt, Artificial Sequence
  Description of Artificial Sequence: Synthetic oligonucleotide
  Sense strand starting at position 3786 of SEQ ID NO: 1880429
cuagaugugccugauauca

SEQ ID NO: 1966497 - RNA, 19 nt, Artificial Sequence
  Description of Artificial Sequence: Synthetic oligonucleotide
  Antisense strand to SEQ ID NO: 1966496
ugauaucaggcacaucuag

SEQ ID NO: 1966498 - RNA, 19 nt, Artificial Sequence
  Description of Artificial Sequence: Synthetic oligonucleotide
  Sense strand starting at position 3875 of SEQ ID NO: 1880429
uccugacucuugccugaaa

SEQ ID NO: 1966499 - RNA, 19 nt, Artificial Sequence
  Description of Artificial Sequence: Synthetic oligonucleotide
  Antisense strand to SEQ ID NO: 1966498
uuucaggcaagagucagga

SEQ ID NO: 1966500 - RNA, 19 nt, Artificial Sequence
  Description of Artificial Sequence: Synthetic oligonucleotide
  Sense strand starting at position 3876 of SEQ ID NO: 1880429
ccugacucuugccugaaag

SEQ ID NO: 1966501 - RNA, 19 nt, Artificial Sequence
  Description of Artificial Sequence: Synthetic oligonucleotide
  Antisense strand to SEQ ID NO: 1966500
cuuucaggcaagagucagg

SEQ ID NO: 1966502 - RNA, 19 nt, Artificial Sequence
  Description of Artificial Sequence: Synthetic oligonucleotide
  Sense strand starting at position 3877 of SEQ ID NO: 1880429
cugacucuugccugaaaga

SEQ ID NO: 1966503 - RNA, 19 nt, Artificial Sequence
  Description of Artificial Sequence: Synthetic oligonucleotide
  Antisense strand to SEQ ID NO: 1966502
ucuuucaggcaagagucag

SEQ ID NO: 1966504 - RNA, 19 nt, Artificial Sequence
  Description of Artificial Sequence: Synthetic oligonucleotide
  Sense strand starting at position 3888 of SEQ ID NO: 1880429
cugaaagagcucugccuaa

SEQ ID NO: 1966505 - RNA, 19 nt, Artificial Sequence
  Description of Artificial Sequence: Synthetic oligonucleotide
  Antisense strand to SEQ ID NO: 1966504
uuaggcagagcucuuucag

SEQ ID NO: 1966506 - RNA, 19 nt, Artificial Sequence
  Description of Artificial Sequence: Synthetic oligonucleotide
  Sense strand starting at position 3921 of SEQ ID NO: 1880429
cuaggcaauguguaauuaa

SEQ ID NO: 1966507 - RNA, 19 nt, Artificial Sequence
  Description of Artificial Sequence: Synthetic oligonucleotide
  Antisense strand to SEQ ID NO: 1966506
uuaauuacacauugccuag

SEQ ID NO: 1966508 - RNA, 19 nt, Artificial Sequence
  Description of Artificial Sequence: Synthetic oligonucleotide
  Sense strand starting at position 211 of SEQ ID NO: 1880430
gucagagucuuggcaaaga

SEQ ID NO: 1966509 - RNA, 19 nt, Artificial Sequence
  Description of Artificial Sequence: Synthetic oligonucleotide
  Antisense strand to SEQ ID NO: 1966508
ucuuugccaagacucugac

SEQ ID NO: 1966510 - RNA, 19 nt, Artificial Sequence
  Description of Artificial Sequence: Synthetic oligonucleotide
  Sense strand starting at position 241 of SEQ ID NO: 1880430
agagccuguguguaaauga

SEQ ID NO: 1966511 - RNA, 19 nt, Artificial Sequence
  Description of Artificial Sequence: Synthetic oligonucleotide
  Antisense strand to SEQ ID NO: 1966510
ucauuuacacacaggcucu

SEQ ID NO: 1966512 - RNA, 19 nt, Artificial Sequence
  Description of Artificial Sequence: Synthetic oligonucleotide
  Sense strand starting at position 246 of SEQ ID NO: 1880430
cuguguguaaaugaguaau

SEQ ID NO: 1966513 - RNA, 19 nt, Artificial Sequence
  Description of Artificial Sequence: Synthetic oligonucleotide
  Antisense strand to SEQ ID NO: 1966512
auuacucauuuacacacag

SEQ ID NO: 1966514 - RNA, 19 nt, Artificial Sequence
  Description of Artificial Sequence: Synthetic oligonucleotide
  Sense strand starting at position 249 of SEQ ID NO: 1880430
uguguaaaugaguaauguc

SEQ ID NO: 1966515 - RNA, 19 nt, Artificial Sequence
  Description of Artificial Sequence: Synthetic oligonucleotide
  Antisense strand to SEQ ID NO: 1966514
gacauuacucauuuacaca

SEQ ID NO: 1966516 - RNA, 19 nt, Artificial Sequence
  Description of Artificial Sequence: Synthetic oligonucleotide
  Sense strand starting at position 346 of SEQ ID NO: 1880430
agcugugacaccuaagaug

SEQ ID NO: 1966517 - RNA, 19 nt, Artificial Sequence
  Description of Artificial Sequence: Synthetic oligonucleotide
  Antisense strand to SEQ ID NO: 1966516
caucuuaggugucacagcu

SEQ ID NO: 1966518 - RNA, 19 nt, Artificial Sequence
  Description of Artificial Sequence: Synthetic oligonucleotide
  Sense strand starting at position 795 of SEQ ID NO: 1880430
cuuggaauccugugaagga

SEQ ID NO: 1966519 - RNA, 19 nt, Artificial Sequence
  Description of Artificial Sequence: Synthetic oligonucleotide
  Antisense strand to SEQ ID NO: 1966518
uccuucacaggauuccaag

SEQ ID NO: 1966520 - RNA, 19 nt, Artificial Sequence
  Description of Artificial Sequence: Synthetic oligonucleotide
  Sense strand starting at position 799 of SEQ ID NO: 1880430
gaauccugugaaggaguca

SEQ ID NO: 1966521 - RNA, 19 nt, Artificial Sequence
  Description of Artificial Sequence: Synthetic oligonucleotide
  Antisense strand to SEQ ID NO: 1966520
ugacuccuucacaggauuc

SEQ ID NO: 1966522 - RNA, 19 nt, Artificial Sequence
  Description of Artificial Sequence: Synthetic oligonucleotide
  Sense strand starting at position 874 of SEQ ID NO: 1880430
gggaucuucuuaccuauga

SEQ ID NO: 1966523 - RNA, 19 nt, Artificial Sequence
  Description of Artificial Sequence: Synthetic oligonucleotide
  Antisense strand to SEQ ID NO: 1966522
ucauagguaagaagauccc

SEQ ID NO: 1966524 - RNA, 19 nt, Artificial Sequence
  Description of Artificial Sequence: Synthetic oligonucleotide
  Sense strand starting at position 875 of SEQ ID NO: 1880430
ggaucuucuuaccuaugaa

SEQ ID NO: 1966525 - RNA, 19 nt, Artificial Sequence
  Description of Artificial Sequence: Synthetic oligonucleotide
  Antisense strand to SEQ ID NO: 1966524
uucauagguaagaagaucc

SEQ ID NO: 1966526 - RNA, 19 nt, Artificial Sequence
  Description of Artificial Sequence: Synthetic oligonucleotide
  Sense strand starting at position 2158 of SEQ ID NO: 1880430
cuuguuucuuuagcuauuu

SEQ ID NO: 1966527 - RNA, 19 nt, Artificial Sequence
  Description of Artificial Sequence: Synthetic oligonucleotide
  Antisense strand to SEQ ID NO: 1966526
aaauagcuaaagaaacaag

SEQ ID NO: 1966528 - RNA, 19 nt, Artificial Sequence
  Description of Artificial Sequence: Synthetic oligonucleotide
  Sense strand starting at position 2190 of SEQ ID NO: 1880430
aguggaucugcugaugaua

SEQ ID NO: 1966529 - RNA, 19 nt, Artificial Sequence
  Description of Artificial Sequence: Synthetic oligonucleotide
  Antisense strand to SEQ ID NO: 1966528
uaucaucagcagauccacu

SEQ ID NO: 1966530 - RNA, 19 nt, Artificial Sequence
  Description of Artificial Sequence: Synthetic oligonucleotide
  Sense strand starting at position 2438 of SEQ ID NO: 1880430
cuggauagcuucuuccuca

SEQ ID NO: 1966531 - RNA, 19 nt, Artificial Sequence
  Description of Artificial Sequence: Synthetic oligonucleotide
  Antisense strand to SEQ ID NO: 1966530
ugaggaagaagcuauccag

SEQ ID NO: 1966532 - RNA, 19 nt, Artificial Sequence
  Description of Artificial Sequence: Synthetic oligonucleotide
  Sense strand starting at position 2439 of SEQ ID NO: 1880430
uggauagcuucuuccucau

SEQ ID NO: 1966533 - RNA, 19 nt, Artificial Sequence
  Description of Artificial Sequence: Synthetic oligonucleotide
  Antisense strand to SEQ ID NO: 1966532
augaggaagaagcuaucca

SEQ ID NO: 1966534 - RNA, 19 nt, Artificial Sequence
  Description of Artificial Sequence: Synthetic oligonucleotide
  Sense strand starting at position 2498 of SEQ ID NO: 1880430
gccuacaauugguuauaaa

SEQ ID NO: 1966535 - RNA, 19 nt, Artificial Sequence
  Description of Artificial Sequence: Synthetic oligonucleotide
  Antisense strand to SEQ ID NO: 1966534
uuuauaaccaauuguaggc

SEQ ID NO: 1966536 - RNA, 19 nt, Artificial Sequence
  Description of Artificial Sequence: Synthetic oligonucleotide
  Sense strand starting at position 2526 of SEQ ID NO: 1880430
gacagcuugccuuaugagu

SEQ ID NO: 1966537 - RNA, 19 nt, Artificial Sequence
  Description of Artificial Sequence: Synthetic oligonucleotide
  Antisense strand to SEQ ID NO: 1966536
acucauaaggcaagcuguc

SEQ ID NO: 1966538 - RNA, 19 nt, Artificial Sequence
  Description of Artificial Sequence: Synthetic oligonucleotide
  Sense strand starting at position 2553 of SEQ ID NO: 1880430
uuaggucucuguuugauaa

SEQ ID NO: 1966539 - RNA, 19 nt, Artificial Sequence
  Description of Artificial Sequence: Synthetic oligonucleotide
  Antisense strand to SEQ ID NO: 1966538
uuaucaaacagagaccuaa

SEQ ID NO: 1966540 - RNA, 19 nt, Artificial Sequence
  Description of Artificial Sequence: Synthetic oligonucleotide
  Sense strand starting at position 2554 of SEQ ID NO: 1880430
uaggucucuguuugauaag

SEQ ID NO: 1966541 - RNA, 19 nt, Artificial Sequence
  Description of Artificial Sequence: Synthetic oligonucleotide
  Antisense strand to SEQ ID NO: 1966540
cuuaucaaacagagaccua

SEQ ID NO: 1966542 - RNA, 19 nt, Artificial Sequence
  Description of Artificial Sequence: Synthetic oligonucleotide
  Sense strand starting at position 2668 of SEQ ID NO: 1880430
uggagaagaucacuguacu

SEQ ID NO: 1966543 - RNA, 19 nt, Artificial Sequence
  Description of Artificial Sequence: Synthetic oligonucleotide
  Antisense strand to SEQ ID NO: 1966542
aguacagugaucuucucca

SEQ ID NO: 1966544 - RNA, 19 nt, Artificial Sequence
  Description of Artificial Sequence: Synthetic oligonucleotide
  Sense strand starting at position 2669 of SEQ ID NO: 1880430
ggagaagaucacuguacuc

SEQ ID NO: 1966545 - RNA, 19 nt, Artificial Sequence
  Description of Artificial Sequence: Synthetic oligonucleotide
  Antisense strand to SEQ ID NO: 1966544
gaguacagugaucuucucc

SEQ ID NO: 1966546 - RNA, 19 nt, Artificial Sequence
  Description of Artificial Sequence: Synthetic oligonucleotide
  Sense strand starting at position 2714 of SEQ ID NO: 1880430
uauugacuugaguggcauu

SEQ ID NO: 1966547 - RNA, 19 nt, Artificial Sequence
  Description of Artificial Sequence: Synthetic oligonucleotide
  Antisense strand to SEQ ID NO: 1966546
aaugccacucaagucaaua

SEQ ID NO: 1966548 - RNA, 19 nt, Artificial Sequence
  Description of Artificial Sequence: Synthetic oligonucleotide
  Sense strand starting at position 2741 of SEQ ID NO: 1880430
uuguuuggucagcaggauu

SEQ ID NO: 1966549 - RNA, 19 nt, Artificial Sequence
  Description of Artificial Sequence: Synthetic oligonucleotide
  Antisense strand to SEQ ID NO: 1966548
aauccugcugaccaaacaa

SEQ ID NO: 1966550 - RNA, 19 nt, Artificial Sequence
  Description of Artificial Sequence: Synthetic oligonucleotide
  Sense strand starting at position 2782 of SEQ ID NO: 1880430
ugggaugacgcaugucaug

SEQ ID NO: 1966551 - RNA, 19 nt, Artificial Sequence
  Description of Artificial Sequence: Synthetic oligonucleotide
  Antisense strand to SEQ ID NO: 1966550
caugacaugcgucauccca

SEQ ID NO: 1966552 - RNA, 19 nt, Artificial Sequence
  Description of Artificial Sequence: Synthetic oligonucleotide
  Sense strand starting at position 2789 of SEQ ID NO: 1880430
acgcaugucauguauagag

SEQ ID NO: 1966553 - RNA, 19 nt, Artificial Sequence
  Description of Artificial Sequence: Synthetic oligonucleotide
  Antisense strand to SEQ ID NO: 1966552
cucuauacaugacaugcgu

SEQ ID NO: 1966554 - RNA, 19 nt, Artificial Sequence
  Description of Artificial Sequence: Synthetic oligonucleotide
  Sense strand starting at position 2791 of SEQ ID NO: 1880430
gcaugucauguauagaggu

SEQ ID NO: 1966555 - RNA, 19 nt, Artificial Sequence
  Description of Artificial Sequence: Synthetic oligonucleotide
  Antisense strand to SEQ ID NO: 1966554
accucuauacaugacaugc

SEQ ID NO: 1966556 - RNA, 19 nt, Artificial Sequence
  Description of Artificial Sequence: Synthetic oligonucleotide
  Sense strand starting at position 2793 of SEQ ID NO: 1880430
augucauguauagagguga

SEQ ID NO: 1966557 - RNA, 19 nt, Artificial Sequence
  Description of Artificial Sequence: Synthetic oligonucleotide
  Antisense strand to SEQ ID NO: 1966556
ucaccucuauacaugacau

SEQ ID NO: 1966558 - RNA, 19 nt, Artificial Sequence
  Description of Artificial Sequence: Synthetic oligonucleotide
  Sense strand starting at position 2804 of SEQ ID NO: 1880430
agaggugaaugguucaaug

SEQ ID NO: 1966559 - RNA, 19 nt, Artificial Sequence
  Description of Artificial Sequence: Synthetic oligonucleotide
  Antisense strand to SEQ ID NO: 1966558
cauugaaccauucaccucu

SEQ ID NO: 1966560 - RNA, 19 nt, Artificial Sequence
  Description of Artificial Sequence: Synthetic oligonucleotide
  Sense strand starting at position 2806 of SEQ ID NO: 1880430
aggugaaugguucaauguc

SEQ ID NO: 1966561 - RNA, 19 nt, Artificial Sequence
  Description of Artificial Sequence: Synthetic oligonucleotide
  Antisense strand to SEQ ID NO: 1966560
gacauugaaccauucaccu

SEQ ID NO: 1966562 - RNA, 19 nt, Artificial Sequence
  Description of Artificial Sequence: Synthetic oligonucleotide
  Sense strand starting at position 2823 of SEQ ID NO: 1880430
ucccauugacugugauguu

SEQ ID NO: 1966563 - RNA, 19 nt, Artificial Sequence
  Description of Artificial Sequence: Synthetic oligonucleotide
  Antisense strand to SEQ ID NO: 1966562
aacaucacagucaauggga

SEQ ID NO: 1966564 - RNA, 19 nt, Artificial Sequence
  Description of Artificial Sequence: Synthetic oligonucleotide
  Sense strand starting at position 2832 of SEQ ID NO: 1880430
cugugauguuuccuauuuc

SEQ ID NO: 1966565 - RNA, 19 nt, Artificial Sequence
  Description of Artificial Sequence: Synthetic oligonucleotide
  Antisense strand to SEQ ID NO: 1966564
gaaauaggaaacaucacag

SEQ ID NO: 1966566 - RNA, 19 nt, Artificial Sequence
  Description of Artificial Sequence: Synthetic oligonucleotide
  Sense strand starting at position 3143 of SEQ ID NO: 1880430
gacacugugccuggaugaa

SEQ ID NO: 1966567 - RNA, 19 nt, Artificial Sequence
  Description of Artificial Sequence: Synthetic oligonucleotide
  Antisense strand to SEQ ID NO: 1966566
uucauccaggcacaguguc

SEQ ID NO: 1966568 - RNA, 19 nt, Artificial Sequence
  Description of Artificial Sequence: Synthetic oligonucleotide
  Sense strand starting at position 3147 of SEQ ID NO: 1880430
cugugccuggaugaauauu

SEQ ID NO: 1966569 - RNA, 19 nt, Artificial Sequence
  Description of Artificial Sequence: Synthetic oligonucleotide
  Antisense strand to SEQ ID NO: 1966568
aauauucauccaggcacag

SEQ ID NO: 1966570 - RNA, 19 nt, Artificial Sequence
  Description of Artificial Sequence: Synthetic oligonucleotide
  Sense strand starting at position 3489 of SEQ ID NO: 1880430
ugagaauucucucccacug

SEQ ID NO: 1966571 - RNA, 19 nt, Artificial Sequence
  Description of Artificial Sequence: Synthetic oligonucleotide
  Antisense strand to SEQ ID NO: 1966570
cagugggagagaauucuca

SEQ ID NO: 1966572 - RNA, 19 nt, Artificial Sequence
  Description of Artificial Sequence: Synthetic oligonucleotide
  Sense strand starting at position 3578 of SEQ ID NO: 1880430
ggagguuugggcuggacuu

SEQ ID NO: 1966573 - RNA, 19 nt, Artificial Sequence
  Description of Artificial Sequence: Synthetic oligonucleotide
  Antisense strand to SEQ ID NO: 1966572
aaguccagcccaaaccucc

SEQ ID NO: 1966574 - RNA, 19 nt, Artificial Sequence
  Description of Artificial Sequence: Synthetic oligonucleotide
  Sense strand starting at position 3588 of SEQ ID NO: 1880430
gcuggacuuccaggguuua

SEQ ID NO: 1966575 - RNA, 19 nt, Artificial Sequence
  Description of Artificial Sequence: Synthetic oligonucleotide
  Antisense strand to SEQ ID NO: 1966574
uaaacccuggaaguccagc

SEQ ID NO: 1966576 - RNA, 19 nt, Artificial Sequence
  Description of Artificial Sequence: Synthetic oligonucleotide
  Sense strand starting at position 3589 of SEQ ID NO: 1880430
cuggacuuccaggguuuaa

SEQ ID NO: 1966577 - RNA, 19 nt, Artificial Sequence
  Description of Artificial Sequence: Synthetic oligonucleotide
  Antisense strand to SEQ ID NO: 1966576
uuaaacccuggaaguccag

SEQ ID NO: 1966578 - RNA, 19 nt, Artificial Sequence
  Description of Artificial Sequence: Synthetic oligonucleotide
  Sense strand starting at position 3709 of SEQ ID NO: 1880430
cucauagaguugcuauaaa

SEQ ID NO: 1966579 - RNA, 19 nt, Artificial Sequence
  Description of Artificial Sequence: Synthetic oligonucleotide
  Antisense strand to SEQ ID NO: 1966578
uuuauagcaacucuaugag

SEQ ID NO: 1966580 - RNA, 19 nt, Artificial Sequence
  Description of Artificial Sequence: Synthetic oligonucleotide
  Sense strand starting at position 3738 of SEQ ID NO: 1880430
cgauuuaaguaccuugcua

SEQ ID NO: 1966581 - RNA, 19 nt, Artificial Sequence
  Description of Artificial Sequence: Synthetic oligonucleotide
  Antisense strand to SEQ ID NO: 1966580
uagcaagguacuuaaaucg

SEQ ID NO: 1966582 - RNA, 19 nt, Artificial Sequence
  Description of Artificial Sequence: Synthetic oligonucleotide
  Sense strand starting at position 3745 of SEQ ID NO: 1880430
aguaccuugcuacauauau

SEQ ID NO: 1966583 - RNA, 19 nt, Artificial Sequence
  Description of Artificial Sequence: Synthetic oligonucleotide
  Antisense strand to SEQ ID NO: 1966582
auauauguagcaagguacu

SEQ ID NO: 1966584 - RNA, 19 nt, Artificial Sequence
  Description of Artificial Sequence: Synthetic oligonucleotide
  Sense strand starting at position 3754 of SEQ ID NO: 1880430
cuacauauaucagugcuuu

SEQ ID NO: 1966585 - RNA, 19 nt, Artificial Sequence
  Description of Artificial Sequence: Synthetic oligonucleotide
  Antisense strand to SEQ ID NO: 1966584
aaagcacugauauauguag

SEQ ID NO: 1966586 - RNA, 19 nt, Artificial Sequence
  Description of Artificial Sequence: Synthetic oligonucleotide
  Sense strand starting at position 3758 of SEQ ID NO: 1880430
auauaucagugcuuucuau

SEQ ID NO: 1966587 - RNA, 19 nt, Artificial Sequence
  Description of Artificial Sequence: Synthetic oligonucleotide
  Antisense strand to SEQ ID NO: 1966586
auagaaagcacugauauau

SEQ ID NO: 1966588 - RNA, 19 nt, Artificial Sequence
  Description of Artificial Sequence: Synthetic oligonucleotide
  Sense strand starting at position 87 of SEQ ID NO: 1880431
cugcaaugaccauaggagu

SEQ ID NO: 1966589 - RNA, 19 nt, Artificial Sequence
  Description of Artificial Sequence: Synthetic oligonucleotide
  Antisense strand to SEQ ID NO: 1966588
acuccuauggucauugcag

SEQ ID NO: 1966590 - RNA, 19 nt, Artificial Sequence
  Description of Artificial Sequence: Synthetic oligonucleotide
  Sense strand starting at position 143 of SEQ ID NO: 1880431
aucaaaucuuguuucccga

SEQ ID NO: 1966591 - RNA, 19 nt, Artificial Sequence
  Description of Artificial Sequence: Synthetic oligonucleotide
  Antisense strand to SEQ ID NO: 1966590
ucgggaaacaagauuugau

SEQ ID NO: 1966592 - RNA, 19 nt, Artificial Sequence
  Description of Artificial Sequence: Synthetic oligonucleotide
  Sense strand starting at position 179 of SEQ ID NO: 1880431
gcugauaaggcuuaaguac

SEQ ID NO: 1966593 - RNA, 19 nt, Artificial Sequence
  Description of Artificial Sequence: Synthetic oligonucleotide
  Antisense strand to SEQ ID NO: 1966592
guacuuaagccuuaucagc

SEQ ID NO: 1966594 - RNA, 19 nt, Artificial Sequence
  Description of Artificial Sequence: Synthetic oligonucleotide
  Sense strand starting at position 635 of SEQ ID NO: 1880431
agaagagacuuaggauuua

SEQ ID NO: 1966595 - RNA, 19 nt, Artificial Sequence
  Description of Artificial Sequence: Synthetic oligonucleotide
  Antisense strand to SEQ ID NO: 1966594
uaaauccuaagucucuucu

SEQ ID NO: 1966596 - RNA, 19 nt, Artificial Sequence
  Description of Artificial Sequence: Synthetic oligonucleotide
  Sense strand starting at position 1042 of SEQ ID NO: 1880431
uggucucuguucuuagaca

SEQ ID NO: 1966597 - RNA, 19 nt, Artificial Sequence
  Description of Artificial Sequence: Synthetic oligonucleotide
  Antisense strand to SEQ ID NO: 1966596
ugucuaagaacagagacca

SEQ ID NO: 1966598 - RNA, 19 nt, Artificial Sequence
  Description of Artificial Sequence: Synthetic oligonucleotide
  Sense strand starting at position 1196 of SEQ ID NO: 1880431
cuguuuccugggcaauuga

SEQ ID NO: 1966599 - RNA, 19 nt, Artificial Sequence
  Description of Artificial Sequence: Synthetic oligonucleotide
  Antisense strand to SEQ ID NO: 1966598
ucaauugcccaggaaacag

SEQ ID NO: 1966600 - RNA, 19 nt, Artificial Sequence
  Description of Artificial Sequence: Synthetic oligonucleotide
  Sense strand starting at position 1718 of SEQ ID NO: 1880431
ggcuuuguugucuagagag

SEQ ID NO: 1966601 - RNA, 19 nt, Artificial Sequence
  Description of Artificial Sequence: Synthetic oligonucleotide
  Antisense strand to SEQ ID NO: 1966600
cucucuagacaacaaagcc

SEQ ID NO: 1966602 - RNA, 19 nt, Artificial Sequence
  Description of Artificial Sequence: Synthetic oligonucleotide
  Sense strand starting at position 1730 of SEQ ID NO: 1880431
uagagagccucauccggaa

SEQ ID NO: 1966603 - RNA, 19 nt, Artificial Sequence
  Description of Artificial Sequence: Synthetic oligonucleotide
  Antisense strand to SEQ ID NO: 1966602
uuccggaugaggcucucua

SEQ ID NO: 1966604 - RNA, 19 nt, Artificial Sequence
  Description of Artificial Sequence: Synthetic oligonucleotide
  Sense strand starting at position 1734 of SEQ ID NO: 1880431
gagccucauccggaagaug

SEQ ID NO: 1966605 - RNA, 19 nt, Artificial Sequence
  Description of Artificial Sequence: Synthetic oligonucleotide
  Antisense strand to SEQ ID NO: 1966604
caucuuccggaugaggcuc

SEQ ID NO: 1966606 - RNA, 19 nt, Artificial Sequence
  Description of Artificial Sequence: Synthetic oligonucleotide
  Sense strand starting at position 1793 of SEQ ID NO: 1880431
ggucgguucgggucaguua

SEQ ID NO: 1966607 - RNA, 19 nt, Artificial Sequence
  Description of Artificial Sequence: Synthetic oligonucleotide
  Antisense strand to SEQ ID NO: 1966606
uaacugacccgaaccgacc

SEQ ID NO: 1966608 - RNA, 19 nt, Artificial Sequence
  Description of Artificial Sequence: Synthetic oligonucleotide
  Sense strand starting at position 1795 of SEQ ID NO: 1880431
ucgguucgggucaguuaga

SEQ ID NO: 1966609 - RNA, 19 nt, Artificial Sequence
  Description of Artificial Sequence: Synthetic oligonucleotide
  Antisense strand to SEQ ID NO: 1966608
ucuaacugacccgaaccga

SEQ ID NO: 1966610 - RNA, 19 nt, Artificial Sequence
  Description of Artificial Sequence: Synthetic oligonucleotide
  Sense strand starting at position 1843 of SEQ ID NO: 1880431
gggaacuccacgugggaaa

SEQ ID NO: 1966611 - RNA, 19 nt, Artificial Sequence
  Description of Artificial Sequence: Synthetic oligonucleotide
  Antisense strand to SEQ ID NO: 1966610
uuucccacguggaguuccc

SEQ ID NO: 1966612 - RNA, 19 nt, Artificial Sequence
  Description of Artificial Sequence: Synthetic oligonucleotide
  Sense strand starting at position 2288 of SEQ ID NO: 1880431
acaaauuaagaguguccua

SEQ ID NO: 1966613 - RNA, 19 nt, Artificial Sequence
  Description of Artificial Sequence: Synthetic oligonucleotide
  Antisense strand to SEQ ID NO: 1966612
uaggacacucuuaauuugu

SEQ ID NO: 1966614 - RNA, 19 nt, Artificial Sequence
  Description of Artificial Sequence: Synthetic oligonucleotide
  Sense strand starting at position 2291 of SEQ ID NO: 1880431
aauuaagaguguccuagga

SEQ ID NO: 1966615 - RNA, 19 nt, Artificial Sequence
  Description of Artificial Sequence: Synthetic oligonucleotide
  Antisense strand to SEQ ID NO: 1966614
uccuaggacacucuuaauu

SEQ ID NO: 1966616 - RNA, 19 nt, Artificial Sequence
  Description of Artificial Sequence: Synthetic oligonucleotide
  Sense strand starting at position 2295 of SEQ ID NO: 1880431
aagaguguccuaggauucu

SEQ ID NO: 1966617 - RNA, 19 nt, Artificial Sequence
  Description of Artificial Sequence: Synthetic oligonucleotide
  Antisense strand to SEQ ID NO: 1966616
agaauccuaggacacucuu

SEQ ID NO: 1966618 - RNA, 19 nt, Artificial Sequence
  Description of Artificial Sequence: Synthetic oligonucleotide
  Sense strand starting at position 2301 of SEQ ID NO: 1880431
guccuaggauucuuggauu

SEQ ID NO: 1966619 - RNA, 19 nt, Artificial Sequence
  Description of Artificial Sequence: Synthetic oligonucleotide
  Antisense strand to SEQ ID NO: 1966618
aauccaagaauccuaggac

SEQ ID NO: 1966620 - RNA, 19 nt, Artificial Sequence
  Description of Artificial Sequence: Synthetic oligonucleotide
  Sense strand starting at position 2402 of SEQ ID NO: 1880431
aguuuaaggaagugauucu

SEQ ID NO: 1966621 - RNA, 19 nt, Artificial Sequence
  Description of Artificial Sequence: Synthetic oligonucleotide
  Antisense strand to SEQ ID NO: 1966620
agaaucacuuccuuaaacu

SEQ ID NO: 1966622 - RNA, 19 nt, Artificial Sequence
  Description of Artificial Sequence: Synthetic oligonucleotide
  Sense strand starting at position 2433 of SEQ ID NO: 1880431
ucauguucuugaucaccca

SEQ ID NO: 1966623 - RNA, 19 nt, Artificial Sequence
  Description of Artificial Sequence: Synthetic oligonucleotide
  Antisense strand to SEQ ID NO: 1966622
ugggugaucaagaacauga

SEQ ID NO: 1966624 - RNA, 19 nt, Artificial Sequence
  Description of Artificial Sequence: Synthetic oligonucleotide
  Sense strand starting at position 2564 of SEQ ID NO: 1880431
ggaacuucugugcagaauu

SEQ ID NO: 1966625 - RNA, 19 nt, Artificial Sequence
  Description of Artificial Sequence: Synthetic oligonucleotide
  Antisense strand to SEQ ID NO: 1966624
aauucugcacagaaguucc

SEQ ID NO: 1966626 - RNA, 19 nt, Artificial Sequence
  Description of Artificial Sequence: Synthetic oligonucleotide
  Sense strand starting at position 2824 of SEQ ID NO: 1880431
gagccagucccagggaaua

SEQ ID NO: 1966627 - RNA, 19 nt, Artificial Sequence
  Description of Artificial Sequence: Synthetic oligonucleotide
  Antisense strand to SEQ ID NO: 1966626
uauucccugggacuggcuc

SEQ ID NO: 1966628 - RNA, 19 nt, Artificial Sequence
  Description of Artificial Sequence: Synthetic oligonucleotide
  Sense strand starting at position 2844 of SEQ ID NO: 1880431
auggcagauccauguuuaa

SEQ ID NO: 1966629 - RNA, 19 nt, Artificial Sequence
  Description of Artificial Sequence: Synthetic oligonucleotide
  Antisense strand to SEQ ID NO: 1966628
uuaaacauggaucugccau

SEQ ID NO: 1966630 - RNA, 19 nt, Artificial Sequence
  Description of Artificial Sequence: Synthetic oligonucleotide
  Sense strand starting at position 2936 of SEQ ID NO: 1880431
ucucucugacguuagaaag

SEQ ID NO: 1966631 - RNA, 19 nt, Artificial Sequence
  Description of Artificial Sequence: Synthetic oligonucleotide
  Antisense strand to SEQ ID NO: 1966630
cuuucuaacgucagagaga

SEQ ID NO: 1966632 - RNA, 19 nt, Artificial Sequence
  Description of Artificial Sequence: Synthetic oligonucleotide
  Sense strand starting at position 2968 of SEQ ID NO: 1880431
gugugucugcuugcuaauu

SEQ ID NO: 1966633 - RNA, 19 nt, Artificial Sequence
  Description of Artificial Sequence: Synthetic oligonucleotide
  Antisense strand to SEQ ID NO: 1966632
aauuagcaagcagacacac

SEQ ID NO: 1966634 - RNA, 19 nt, Artificial Sequence
  Description of Artificial Sequence: Synthetic oligonucleotide
  Sense strand starting at position 2995 of SEQ ID NO: 1880431
uucuaauuguaugugugaa

SEQ ID NO: 1966635 - RNA, 19 nt, Artificial Sequence
  Description of Artificial Sequence: Synthetic oligonucleotide
  Antisense strand to SEQ ID NO: 1966634
uucacacauacaauuagaa

SEQ ID NO: 1966636 - RNA, 19 nt, Artificial Sequence
  Description of Artificial Sequence: Synthetic oligonucleotide
  Sense strand starting at position 2997 of SEQ ID NO: 1880431
cuaauuguaugugugaacu

SEQ ID NO: 1966637 - RNA, 19 nt, Artificial Sequence
  Description of Artificial Sequence: Synthetic oligonucleotide
  Antisense strand to SEQ ID NO: 1966636
aguucacacauacaauuag

SEQ ID NO: 1966638 - RNA, 19 nt, Artificial Sequence
  Description of Artificial Sequence: Synthetic oligonucleotide
  Sense strand starting at position 3023 of SEQ ID NO: 1880431
uacuucuugggauguugau

SEQ ID NO: 1966639 - RNA, 19 nt, Artificial Sequence
  Description of Artificial Sequence: Synthetic oligonucleotide
  Antisense strand to SEQ ID NO: 1966638
aucaacaucccaagaagua

SEQ ID NO: 1966640 - RNA, 19 nt, Artificial Sequence
  Description of Artificial Sequence: Synthetic oligonucleotide
  Sense strand starting at position 3057 of SEQ ID NO: 1880431
uuggauguauucuuuaugu

SEQ ID NO: 1966641 - RNA, 19 nt, Artificial Sequence
  Description of Artificial Sequence: Synthetic oligonucleotide
  Antisense strand to SEQ ID NO: 1966640
acauaaagaauacauccaa

SEQ ID NO: 1966642 - RNA, 19 nt, Artificial Sequence
  Description of Artificial Sequence: Synthetic oligonucleotide
  Sense strand starting at position 3059 of SEQ ID NO: 1880431
ggauguauucuuuaugugg

SEQ ID NO: 1966643 - RNA, 19 nt, Artificial Sequence
  Description of Artificial Sequence: Synthetic oligonucleotide
  Antisense strand to SEQ ID NO: 1966642
ccacauaaagaauacaucc

SEQ ID NO: 1966644 - RNA, 19 nt, Artificial Sequence
  Description of Artificial Sequence: Synthetic oligonucleotide
  Sense strand starting at position 3068 of SEQ ID NO: 1880431
cuuuaugugguagagauag

SEQ ID NO: 1966645 - RNA, 19 nt, Artificial Sequence
  Description of Artificial Sequence: Synthetic oligonucleotide
  Antisense strand to SEQ ID NO: 1966644
cuaucucuaccacauaaag

SEQ ID NO: 1966646 - RNA, 19 nt, Artificial Sequence
  Description of Artificial Sequence: Synthetic oligonucleotide
  Sense strand starting at position 3070 of SEQ ID NO: 1880431
uuaugugguagagauaguu

SEQ ID NO: 1966647 - RNA, 19 nt, Artificial Sequence
  Description of Artificial Sequence: Synthetic oligonucleotide
  Antisense strand to SEQ ID NO: 1966646
aacuaucucuaccacauaa

SEQ ID NO: 1966648 - RNA, 19 nt, Artificial Sequence
  Description of Artificial Sequence: Synthetic oligonucleotide
  Sense strand starting at position 3119 of SEQ ID NO: 1880431
cugagugagaccuggaauu

SEQ ID NO: 1966649 - RNA, 19 nt, Artificial Sequence
  Description of Artificial Sequence: Synthetic oligonucleotide
  Antisense strand to SEQ ID NO: 1966648
aauuccaggucucacucag

SEQ ID NO: 1966650 - RNA, 19 nt, Artificial Sequence
  Description of Artificial Sequence: Synthetic oligonucleotide
  Sense strand starting at position 3131 of SEQ ID NO: 1880431
uggaauucacgugguccaa

SEQ ID NO: 1966651 - RNA, 19 nt, Artificial Sequence
  Description of Artificial Sequence: Synthetic oligonucleotide
  Antisense strand to SEQ ID NO: 1966650
uuggaccacgugaauucca

SEQ ID NO: 1966652 - RNA, 19 nt, Artificial Sequence
  Description of Artificial Sequence: Synthetic oligonucleotide
  Sense strand starting at position 3269 of SEQ ID NO: 1880431
auagccuuugcagaaguaa

SEQ ID NO: 1966653 - RNA, 19 nt, Artificial Sequence
  Description of Artificial Sequence: Synthetic oligonucleotide
  Antisense strand to SEQ ID NO: 1966652
uuacuucugcaaaggcuau

SEQ ID NO: 1966654 - RNA, 19 nt, Artificial Sequence
  Description of Artificial Sequence: Synthetic oligonucleotide
  Sense strand starting at position 3277 of SEQ ID NO: 1880431
ugcagaaguaauugggagu

SEQ ID NO: 1966655 - RNA, 19 nt, Artificial Sequence
  Description of Artificial Sequence: Synthetic oligonucleotide
  Antisense strand to SEQ ID NO: 1966654
acucccaauuacuucugca

SEQ ID NO: 1966656 - RNA, 19 nt, Artificial Sequence
  Description of Artificial Sequence: Synthetic oligonucleotide
  Sense strand starting at position 3490 of SEQ ID NO: 1880431
gaaagauuccucgaggcuu

SEQ ID NO: 1966657 - RNA, 19 nt, Artificial Sequence
  Description of Artificial Sequence: Synthetic oligonucleotide
  Antisense strand to SEQ ID NO: 1966656
aagccucgaggaaucuuuc

SEQ ID NO: 1966658 - RNA, 19 nt, Artificial Sequence
  Description of Artificial Sequence: Synthetic oligonucleotide
  Sense strand starting at position 3683 of SEQ ID NO: 1880431
ggucauuacuaaguccaga

SEQ ID NO: 1966659 - RNA, 19 nt, Artificial Sequence
  Description of Artificial Sequence: Synthetic oligonucleotide
  Antisense strand to SEQ ID NO: 1966658
ucuggacuuaguaaugacc

SEQ ID NO: 1966660 - RNA, 19 nt, Artificial Sequence
  Description of Artificial Sequence: Synthetic oligonucleotide
  Sense strand starting at position 3688 of SEQ ID NO: 1880431
uuacuaaguccagaguuga

SEQ ID NO: 1966661 - RNA, 19 nt, Artificial Sequence
  Description of Artificial Sequence: Synthetic oligonucleotide
  Antisense strand to SEQ ID NO: 1966660
ucaacucuggacuuaguaa

SEQ ID NO: 1966662 - RNA, 19 nt, Artificial Sequence
  Description of Artificial Sequence: Synthetic oligonucleotide
  Sense strand starting at position 3804 of SEQ ID NO: 1880431
gaacucuguagcuguagga

SEQ ID NO: 1966663 - RNA, 19 nt, Artificial Sequence
  Description of Artificial Sequence: Synthetic oligonucleotide
  Antisense strand to SEQ ID NO: 1966662
uccuacagcuacagaguuc

SEQ ID NO: 1966664 - RNA, 19 nt, Artificial Sequence
  Description of Artificial Sequence: Synthetic oligonucleotide
  Sense strand starting at position 3921 of SEQ ID NO: 1880431
ucucaaaugaguuaugugu

SEQ ID NO: 1966665 - RNA, 19 nt, Artificial Sequence
  Description of Artificial Sequence: Synthetic oligonucleotide
  Antisense strand to SEQ ID NO: 1966664
acacauaacucauuugaga

SEQ ID NO: 1966666 - RNA, 19 nt, Artificial Sequence
  Description of Artificial Sequence: Synthetic oligonucleotide
  Sense strand starting at position 3944 of SEQ ID NO: 1880431
cuccuaacagucugaauag

SEQ ID NO: 1966667 - RNA, 19 nt, Artificial Sequence
  Description of Artificial Sequence: Synthetic oligonucleotide
  Antisense strand to SEQ ID NO: 1966666
cuauucagacuguuaggag

SEQ ID NO: 1966668 - RNA, 19 nt, Artificial Sequence
  Description of Artificial Sequence: Synthetic oligonucleotide
  Sense strand starting at position 2030 of SEQ ID NO: 1880432
ccgacaugcugcucuaaau

SEQ ID NO: 1966669 - RNA, 19 nt, Artificial Sequence
  Description of Artificial Sequence: Synthetic oligonucleotide
  Antisense strand to SEQ ID NO: 1966668
auuuagagcagcaugucgg

SEQ ID NO: 1966670 - RNA, 19 nt, Artificial Sequence
  Description of Artificial Sequence: Synthetic oligonucleotide
  Sense strand starting at position 2039 of SEQ ID NO: 1880432
ugcucuaaaugagauuauc

SEQ ID NO: 1966671 - RNA, 19 nt, Artificial Sequence
  Description of Artificial Sequence: Synthetic oligonucleotide
  Antisense strand to SEQ ID NO: 1966670
gauaaucucauuuagagca

SEQ ID NO: 1966672 - RNA, 19 nt, Artificial Sequence
  Description of Artificial Sequence: Synthetic oligonucleotide
  Sense strand starting at position 2047 of SEQ ID NO: 1880432
augagauuauccugacucu

SEQ ID NO: 1966673 - RNA, 19 nt, Artificial Sequence
  Description of Artificial Sequence: Synthetic oligonucleotide
  Antisense strand to SEQ ID NO: 1966672
agagucaggauaaucucau

SEQ ID NO: 1966674 - RNA, 19 nt, Artificial Sequence
  Description of Artificial Sequence: Synthetic oligonucleotide
  Sense strand starting at position 2202 of SEQ ID NO: 1880432
ucauaugacccaugaggca

SEQ ID NO: 1966675 - RNA, 19 nt, Artificial Sequence
  Description of Artificial Sequence: Synthetic oligonucleotide
  Antisense strand to SEQ ID NO: 1966674
ugccucaugggucauauga

SEQ ID NO: 1966676 - RNA, 19 nt, Artificial Sequence
  Description of Artificial Sequence: Synthetic oligonucleotide
  Sense strand starting at position 2682 of SEQ ID NO: 1880432
gugagcuuguccugucuag

SEQ ID NO: 1966677 - RNA, 19 nt, Artificial Sequence
  Description of Artificial Sequence: Synthetic oligonucleotide
  Antisense strand to SEQ ID NO: 1966676
cuagacaggacaagcucac

SEQ ID NO: 1966678 - RNA, 19 nt, Artificial Sequence
  Description of Artificial Sequence: Synthetic oligonucleotide
  Sense strand starting at position 2689 of SEQ ID NO: 1880432
uguccugucuagggccaaa

SEQ ID NO: 1966679 - RNA, 19 nt, Artificial Sequence
  Description of Artificial Sequence: Synthetic oligonucleotide
  Antisense strand to SEQ ID NO: 1966678
uuuggcccuagacaggaca

SEQ ID NO: 1966680 - RNA, 19 nt, Artificial Sequence
  Description of Artificial Sequence: Synthetic oligonucleotide
  Sense strand starting at position 2760 of SEQ ID NO: 1880432
ggcugcuuucugcacauga

SEQ ID NO: 1966681 - RNA, 19 nt, Artificial Sequence
  Description of Artificial Sequence: Synthetic oligonucleotide
  Antisense strand to SEQ ID NO: 1966680
ucaugugcagaaagcagcc

SEQ ID NO: 1966682 - RNA, 19 nt, Artificial Sequence
  Description of Artificial Sequence: Synthetic oligonucleotide
  Sense strand starting at position 2762 of SEQ ID NO: 1880432
cugcuuucugcacaugaac

SEQ ID NO: 1966683 - RNA, 19 nt, Artificial Sequence
  Description of Artificial Sequence: Synthetic oligonucleotide
  Antisense strand to SEQ ID NO: 1966682
guucaugugcagaaagcag

SEQ ID NO: 1966684 - RNA, 19 nt, Artificial Sequence
  Description of Artificial Sequence: Synthetic oligonucleotide
  Sense strand starting at position 3076 of SEQ ID NO: 1880432
guucuucuaccauaaaggu

SEQ ID NO: 1966685 - RNA, 19 nt, Artificial Sequence
  Description of Artificial Sequence: Synthetic oligonucleotide
  Antisense strand to SEQ ID NO: 1966684
accuuuaugguagaagaac

SEQ ID NO: 1966686 - RNA, 19 nt, Artificial Sequence
  Description of Artificial Sequence: Synthetic oligonucleotide
  Sense strand starting at position 3374 of SEQ ID NO: 1880432
ccgaguccucugcauggua

SEQ ID NO: 1966687 - RNA, 19 nt, Artificial Sequence
  Description of Artificial Sequence: Synthetic oligonucleotide
  Antisense strand to SEQ ID NO: 1966686
uaccaugcagaggacucgg

SEQ ID NO: 1966688 - RNA, 19 nt, Artificial Sequence
  Description of Artificial Sequence: Synthetic oligonucleotide
  Sense strand starting at position 3376 of SEQ ID NO: 1880432
gaguccucugcaugguaau

SEQ ID NO: 1966689 - RNA, 19 nt, Artificial Sequence
  Description of Artificial Sequence: Synthetic oligonucleotide
  Antisense strand to SEQ ID NO: 1966688
auuaccaugcagaggacuc

SEQ ID NO: 1966690 - RNA, 19 nt, Artificial Sequence
  Description of Artificial Sequence: Synthetic oligonucleotide
  Sense strand starting at position 3386 of SEQ ID NO: 1880432
caugguaauccuggcuacu

SEQ ID NO: 1966691 - RNA, 19 nt, Artificial Sequence
  Description of Artificial Sequence: Synthetic oligonucleotide
  Antisense strand to SEQ ID NO: 1966690
aguagccaggauuaccaug

SEQ ID NO: 1966692 - RNA, 19 nt, Artificial Sequence
  Description of Artificial Sequence: Synthetic oligonucleotide
  Sense strand starting at position 3388 of SEQ ID NO: 1880432
ugguaauccuggcuacuuu

SEQ ID NO: 1966693 - RNA, 19 nt, Artificial Sequence
  Description of Artificial Sequence: Synthetic oligonucleotide
  Antisense strand to SEQ ID NO: 1966692
aaaguagccaggauuacca

SEQ ID NO: 1966694 - RNA, 19 nt, Artificial Sequence
  Description of Artificial Sequence: Synthetic oligonucleotide
  Sense strand starting at position 3401 of SEQ ID NO: 1880432
uacuuucugcaguggaaca

SEQ ID NO: 1966695 - RNA, 19 nt, Artificial Sequence
  Description of Artificial Sequence: Synthetic oligonucleotide
  Antisense strand to SEQ ID NO: 1966694
uguuccacugcagaaagua

SEQ ID NO: 1966696 - RNA, 19 nt, Artificial Sequence
  Description of Artificial Sequence: Synthetic oligonucleotide
  Sense strand starting at position 3450 of SEQ ID NO: 1880432
gccucuuggcaacgaagaa

SEQ ID NO: 1966697 - RNA, 19 nt, Artificial Sequence
  Description of Artificial Sequence: Synthetic oligonucleotide
  Antisense strand to SEQ ID NO: 1966696
uucuucguugccaagaggc

SEQ ID NO: 1966698 - RNA, 19 nt, Artificial Sequence
  Description of Artificial Sequence: Synthetic oligonucleotide
  Sense strand starting at position 3465 of SEQ ID NO: 1880432
agaauuguacagugccaua

SEQ ID NO: 1966699 - RNA, 19 nt, Artificial Sequence
  Description of Artificial Sequence: Synthetic oligonucleotide
  Antisense strand to SEQ ID NO: 1966698
uauggcacuguacaauucu

SEQ ID NO: 1966700 - RNA, 19 nt, Artificial Sequence
  Description of Artificial Sequence: Synthetic oligonucleotide
  Sense strand starting at position 3559 of SEQ ID NO: 1880432
uguggcuccauuuguggaa

SEQ ID NO: 1966701 - RNA, 19 nt, Artificial Sequence
  Description of Artificial Sequence: Synthetic oligonucleotide
  Antisense strand to SEQ ID NO: 1966700
uuccacaaauggagccaca

SEQ ID NO: 1966702 - RNA, 19 nt, Artificial Sequence
  Description of Artificial Sequence: Synthetic oligonucleotide
  Sense strand starting at position 3562 of SEQ ID NO: 1880432
ggcuccauuuguggaacaa

SEQ ID NO: 1966703 - RNA, 19 nt, Artificial Sequence
  Description of Artificial Sequence: Synthetic oligonucleotide
  Antisense strand to SEQ ID NO: 1966702
uuguuccacaaauggagcc

SEQ ID NO: 1966704 - RNA, 19 nt, Artificial Sequence
  Description of Artificial Sequence: Synthetic oligonucleotide
  Sense strand starting at position 3754 of SEQ ID NO: 1880432
ggccgucaugaggaagaau

SEQ ID NO: 1966705 - RNA, 19 nt, Artificial Sequence
  Description of Artificial Sequence: Synthetic oligonucleotide
  Antisense strand to SEQ ID NO: 1966704
auucuuccucaugacggcc

SEQ ID NO: 1966706 - RNA, 19 nt, Artificial Sequence
  Description of Artificial Sequence: Synthetic oligonucleotide
  Sense strand starting at position 3848 of SEQ ID NO: 1880432
agcucugaggcauggacua

SEQ ID NO: 1966707 - RNA, 19 nt, Artificial Sequence
  Description of Artificial Sequence: Synthetic oligonucleotide
  Antisense strand to SEQ ID NO: 1966706
uaguccaugccucagagcu

SEQ ID NO: 1966708 - RNA, 19 nt, Artificial Sequence
  Description of Artificial Sequence: Synthetic oligonucleotide
  Sense strand starting at position 3868 of SEQ ID NO: 1880432
ugccaucugcuuuauagaa

SEQ ID NO: 1966709 - RNA, 19 nt, Artificial Sequence
  Description of Artificial Sequence: Synthetic oligonucleotide
  Antisense strand to SEQ ID NO: 1966708
uucuauaaagcagauggca

SEQ ID NO: 1966710 - RNA, 19 nt, Artificial Sequence
  Description of Artificial Sequence: Synthetic oligonucleotide
  Sense strand starting at position 3889 of SEQ ID NO: 1880432
auuaacuucggaugaauug

SEQ ID NO: 1966711 - RNA, 19 nt, Artificial Sequence
  Description of Artificial Sequence: Synthetic oligonucleotide
  Antisense strand to SEQ ID NO: 1966710
caauucauccgaaguuaau

SEQ ID NO: 1966712 - RNA, 19 nt, Artificial Sequence
  Description of Artificial Sequence: Synthetic oligonucleotide
  Sense strand starting at position 3906 of SEQ ID NO: 1880432
ugaagaguuaaaugugcca

SEQ ID NO: 1966713 - RNA, 19 nt, Artificial Sequence
  Description of Artificial Sequence: Synthetic oligonucleotide
  Antisense strand to SEQ ID NO: 1966712
uggcacauuuaacucuuca

SEQ ID NO: 1966714 - RNA, 19 nt, Artificial Sequence
  Description of Artificial Sequence: Synthetic oligonucleotide
  Sense strand starting at position 11 of SEQ ID NO: 1880433
uucuauuugcaaugcaaug

SEQ ID NO: 1966715 - RNA, 19 nt, Artificial Sequence
  Description of Artificial Sequence: Synthetic oligonucleotide
  Antisense strand to SEQ ID NO: 1966714
cauugcauugcaaauagaa

SEQ ID NO: 1966716 - RNA, 19 nt, Artificial Sequence
  Description of Artificial Sequence: Synthetic oligonucleotide
  Sense strand starting at position 84 of SEQ ID NO: 1880433
cuucuuaucgcagcaguuu

SEQ ID NO: 1966717 - RNA, 19 nt, Artificial Sequence
  Description of Artificial Sequence: Synthetic oligonucleotide
  Antisense strand to SEQ ID NO: 1966716
aaacugcugcgauaagaag

SEQ ID NO: 1966718 - RNA, 19 nt, Artificial Sequence
  Description of Artificial Sequence: Synthetic oligonucleotide
  Sense strand starting at position 171 of SEQ ID NO: 1880433
ucaggagucuauuccugga

SEQ ID NO: 1966719 - RNA, 19 nt, Artificial Sequence
  Description of Artificial Sequence: Synthetic oligonucleotide
  Antisense strand to SEQ ID NO: 1966718
uccaggaauagacuccuga

SEQ ID NO: 1966720 - RNA, 19 nt, Artificial Sequence
  Description of Artificial Sequence: Synthetic oligonucleotide
  Sense strand starting at position 175 of SEQ ID NO: 1880433
gagucuauuccuggacauu

SEQ ID NO: 1966721 - RNA, 19 nt, Artificial Sequence
  Description of Artificial Sequence: Synthetic oligonucleotide
  Antisense strand to SEQ ID NO: 1966720
aauguccaggaauagacuc

SEQ ID NO: 1966722 - RNA, 19 nt, Artificial Sequence
  Description of Artificial Sequence: Synthetic oligonucleotide
  Sense strand starting at position 176 of SEQ ID NO: 1880433
agucuauuccuggacauua

SEQ ID NO: 1966723 - RNA, 19 nt, Artificial Sequence
  Description of Artificial Sequence: Synthetic oligonucleotide
  Antisense strand to SEQ ID NO: 1966722
uaauguccaggaauagacu

SEQ ID NO: 1966724 - RNA, 19 nt, Artificial Sequence
  Description of Artificial Sequence: Synthetic oligonucleotide
  Sense strand starting at position 308 of SEQ ID NO: 1880433
gcagaaaugugacccuuga

SEQ ID NO: 1966725 - RNA, 19 nt, Artificial Sequence
  Description of Artificial Sequence: Synthetic oligonucleotide
  Antisense strand to SEQ ID NO: 1966724
ucaagggucacauuucugc

SEQ ID NO: 1966726 - RNA, 19 nt, Artificial Sequence
  Description of Artificial Sequence: Synthetic oligonucleotide
  Sense strand starting at position 315 of SEQ ID NO: 1880433
ugugacccuugauuaagau

SEQ ID NO: 1966727 - RNA, 19 nt, Artificial Sequence
  Description of Artificial Sequence: Synthetic oligonucleotide
  Antisense strand to SEQ ID NO: 1966726
aucuuaaucaagggucaca

SEQ ID NO: 1966728 - RNA, 19 nt, Artificial Sequence
  Description of Artificial Sequence: Synthetic oligonucleotide
  Sense strand starting at position 324 of SEQ ID NO: 1880433
ugauuaagaucugugcuuu

SEQ ID NO: 1966729 - RNA, 19 nt, Artificial Sequence
  Description of Artificial Sequence: Synthetic oligonucleotide
  Antisense strand to SEQ ID NO: 1966728
aaagcacagaucuuaauca

SEQ ID NO: 1966730 - RNA, 19 nt, Artificial Sequence
  Description of Artificial Sequence: Synthetic oligonucleotide
  Sense strand starting at position 447 of SEQ ID NO: 1880433
cuuaacaagugguaauuua

SEQ ID NO: 1966731 - RNA, 19 nt, Artificial Sequence
  Description of Artificial Sequence: Synthetic oligonucleotide
  Antisense strand to SEQ ID NO: 1966730
uaaauuaccacuuguuaag

SEQ ID NO: 1966732 - RNA, 19 nt, Artificial Sequence
  Description of Artificial Sequence: Synthetic oligonucleotide
  Sense strand starting at position 455 of SEQ ID NO: 1880433
gugguaauuuaauagauug

SEQ ID NO: 1966733 - RNA, 19 nt, Artificial Sequence
  Description of Artificial Sequence: Synthetic oligonucleotide
  Antisense strand to SEQ ID NO: 1966732
caaucuauuaaauuaccac

SEQ ID NO: 1966734 - RNA, 19 nt, Artificial Sequence
  Description of Artificial Sequence: Synthetic oligonucleotide
  Sense strand starting at position 807 of SEQ ID NO: 1880433
uguucuauugcagaaauac

SEQ ID NO: 1966735 - RNA, 19 nt, Artificial Sequence
  Description of Artificial Sequence: Synthetic oligonucleotide
  Antisense strand to SEQ ID NO: 1966734
guauuucugcaauagaaca

SEQ ID NO: 1966736 - RNA, 19 nt, Artificial Sequence
  Description of Artificial Sequence: Synthetic oligonucleotide
  Sense strand starting at position 816 of SEQ ID NO: 1880433
gcagaaauacacugacuau

SEQ ID NO: 1966737 - RNA, 19 nt, Artificial Sequence
  Description of Artificial Sequence: Synthetic oligonucleotide
  Antisense strand to SEQ ID NO: 1966736
auagucaguguauuucugc

SEQ ID NO: 1966738 - RNA, 19 nt, Artificial Sequence
  Description of Artificial Sequence: Synthetic oligonucleotide
  Sense strand starting at position 830 of SEQ ID NO: 1880433
acuauuaaaugggaaagga

SEQ ID NO: 1966739 - RNA, 19 nt, Artificial Sequence
  Description of Artificial Sequence: Synthetic oligonucleotide
  Antisense strand to SEQ ID NO: 1966738
uccuuucccauuuaauagu

SEQ ID NO: 1966740 - RNA, 19 nt, Artificial Sequence
  Description of Artificial Sequence: Synthetic oligonucleotide
  Sense strand starting at position 869 of SEQ ID NO: 1880433
gcccaauucuuuccaagga

SEQ ID NO: 1966741 - RNA, 19 nt, Artificial Sequence
  Description of Artificial Sequence: Synthetic oligonucleotide
  Antisense strand to SEQ ID NO: 1966740
uccuuggaaagaauugggc

SEQ ID NO: 1966742 - RNA, 19 nt, Artificial Sequence
  Description of Artificial Sequence: Synthetic oligonucleotide
  Sense strand starting at position 919 of SEQ ID NO: 1880433
augccuuuguaguuagaaa

SEQ ID NO: 1966743 - RNA, 19 nt, Artificial Sequence
  Description of Artificial Sequence: Synthetic oligonucleotide
  Antisense strand to SEQ ID NO: 1966742
uuucuaacuacaaaggcau

SEQ ID NO: 1966744 - RNA, 19 nt, Artificial Sequence
  Description of Artificial Sequence: Synthetic oligonucleotide
  Sense strand starting at position 1169 of SEQ ID NO: 1880433
guuggacaccuaggucauu

SEQ ID NO: 1966745 - RNA, 19 nt, Artificial Sequence
  Description of Artificial Sequence: Synthetic oligonucleotide
  Antisense strand to SEQ ID NO: 1966744
aaugaccuagguguccaac

SEQ ID NO: 1966746 - RNA, 19 nt, Artificial Sequence
  Description of Artificial Sequence: Synthetic oligonucleotide
  Sense strand starting at position 1278 of SEQ ID NO: 1880433
uaauuaguuugggugaaau

SEQ ID NO: 1966747 - RNA, 19 nt, Artificial Sequence
  Description of Artificial Sequence: Synthetic oligonucleotide
  Antisense strand to SEQ ID NO: 1966746
auuucacccaaacuaauua

SEQ ID NO: 1966748 - RNA, 19 nt, Artificial Sequence
  Description of Artificial Sequence: Synthetic oligonucleotide
  Sense strand starting at position 1280 of SEQ ID NO: 1880433
auuaguuugggugaaaugu

SEQ ID NO: 1966749 - RNA, 19 nt, Artificial Sequence
  Description of Artificial Sequence: Synthetic oligonucleotide
  Antisense strand to SEQ ID NO: 1966748
acauuucacccaaacuaau

SEQ ID NO: 1966750 - RNA, 19 nt, Artificial Sequence
  Description of Artificial Sequence: Synthetic oligonucleotide
  Sense strand starting at position 1289 of SEQ ID NO: 1880433
ggugaaaugucauuauauu

SEQ ID NO: 1966751 - RNA, 19 nt, Artificial Sequence
  Description of Artificial Sequence: Synthetic oligonucleotide
  Antisense strand to SEQ ID NO: 1966750
aauauaaugacauuucacc

SEQ ID NO: 1966752 - RNA, 19 nt, Artificial Sequence
  Description of Artificial Sequence: Synthetic oligonucleotide
  Sense strand starting at position 1425 of SEQ ID NO: 1880433
uuggcuagagguuaauaua

SEQ ID NO: 1966753 - RNA, 19 nt, Artificial Sequence
  Description of Artificial Sequence: Synthetic oligonucleotide
  Antisense strand to SEQ ID NO: 1966752
uauauuaaccucuagccaa

SEQ ID NO: 1966754 - RNA, 19 nt, Artificial Sequence
  Description of Artificial Sequence: Synthetic oligonucleotide
  Sense strand starting at position 2115 of SEQ ID NO: 1880433
aggaguaguauguacguua

SEQ ID NO: 1966755 - RNA, 19 nt, Artificial Sequence
  Description of Artificial Sequence: Synthetic oligonucleotide
  Antisense strand to SEQ ID NO: 1966754
uaacguacauacuacuccu

SEQ ID NO: 1966756 - RNA, 19 nt, Artificial Sequence
  Description of Artificial Sequence: Synthetic oligonucleotide
  Sense strand starting at position 2116 of SEQ ID NO: 1880433
ggaguaguauguacguuau

SEQ ID NO: 1966757 - RNA, 19 nt, Artificial Sequence
  Description of Artificial Sequence: Synthetic oligonucleotide
  Antisense strand to SEQ ID NO: 1966756
auaacguacauacuacucc

SEQ ID NO: 1966758 - RNA, 19 nt, Artificial Sequence
  Description of Artificial Sequence: Synthetic oligonucleotide
  Sense strand starting at position 2229 of SEQ ID NO: 1880433
uuuacugggucuuuacuua

SEQ ID NO: 1966759 - RNA, 19 nt, Artificial Sequence
  Description of Artificial Sequence: Synthetic oligonucleotide
  Antisense strand to SEQ ID NO: 1966758
uaaguaaagacccaguaaa

SEQ ID NO: 1966760 - RNA, 19 nt, Artificial Sequence
  Description of Artificial Sequence: Synthetic oligonucleotide
  Sense strand starting at position 2245 of SEQ ID NO: 1880433
uuacuugcccuuggagaga

SEQ ID NO: 1966761 - RNA, 19 nt, Artificial Sequence
  Description of Artificial Sequence: Synthetic oligonucleotide
  Antisense strand to SEQ ID NO: 1966760
ucucuccaagggcaaguaa

SEQ ID NO: 1966762 - RNA, 19 nt, Artificial Sequence
  Description of Artificial Sequence: Synthetic oligonucleotide
  Sense strand starting at position 2250 of SEQ ID NO: 1880433
ugcccuuggagagauguua

SEQ ID NO: 1966763 - RNA, 19 nt, Artificial Sequence
  Description of Artificial Sequence: Synthetic oligonucleotide
  Antisense strand to SEQ ID NO: 1966762
uaacaucucuccaagggca

SEQ ID NO: 1966764 - RNA, 19 nt, Artificial Sequence
  Description of Artificial Sequence: Synthetic oligonucleotide
  Sense strand starting at position 2258 of SEQ ID NO: 1880433
gagagauguuaugacauuu

SEQ ID NO: 1966765 - RNA, 19 nt, Artificial Sequence
  Description of Artificial Sequence: Synthetic oligonucleotide
  Antisense strand to SEQ ID NO: 1966764
aaaugucauaacaucucuc

SEQ ID NO: 1966766 - RNA, 19 nt, Artificial Sequence
  Description of Artificial Sequence: Synthetic oligonucleotide
  Sense strand starting at position 2267 of SEQ ID NO: 1880433
uaugacauuugguagauaa

SEQ ID NO: 1966767 - RNA, 19 nt, Artificial Sequence
  Description of Artificial Sequence: Synthetic oligonucleotide
  Antisense strand to SEQ ID NO: 1966766
uuaucuaccaaaugucaua

SEQ ID NO: 1966768 - RNA, 19 nt, Artificial Sequence
  Description of Artificial Sequence: Synthetic oligonucleotide
  Sense strand starting at position 2292 of SEQ ID NO: 1880433
gaauaaacuugggaagaau

SEQ ID NO: 1966769 - RNA, 19 nt, Artificial Sequence
  Description of Artificial Sequence: Synthetic oligonucleotide
  Antisense strand to SEQ ID NO: 1966768
auucuucccaaguuuauuc

SEQ ID NO: 1966770 - RNA, 19 nt, Artificial Sequence
  Description of Artificial Sequence: Synthetic oligonucleotide
  Sense strand starting at position 2303 of SEQ ID NO: 1880433
ggaagaauugcugggcaug

SEQ ID NO: 1966771 - RNA, 19 nt, Artificial Sequence
  Description of Artificial Sequence: Synthetic oligonucleotide
  Antisense strand to SEQ ID NO: 1966770
caugcccagcaauucuucc

SEQ ID NO: 1966772 - RNA, 19 nt, Artificial Sequence
  Description of Artificial Sequence: Synthetic oligonucleotide
  Sense strand starting at position 2573 of SEQ ID NO: 1880433
acuauuuauccgggucucu

SEQ ID NO: 1966773 - RNA, 19 nt, Artificial Sequence
  Description of Artificial Sequence: Synthetic oligonucleotide
  Antisense strand to SEQ ID NO: 1966772
agagacccggauaaauagu

SEQ ID NO: 1966774 - RNA, 19 nt, Artificial Sequence
  Description of Artificial Sequence: Synthetic oligonucleotide
  Sense strand starting at position 2657 of SEQ ID NO: 1880433
gaauacaggugauauuuau

SEQ ID NO: 1966775 - RNA, 19 nt, Artificial Sequence
  Description of Artificial Sequence: Synthetic oligonucleotide
  Antisense strand to SEQ ID NO: 1966774
auaaauaucaccuguauuc

SEQ ID NO: 1966776 - RNA, 19 nt, Artificial Sequence
  Description of Artificial Sequence: Synthetic oligonucleotide
  Sense strand starting at position 2794 of SEQ ID NO: 1880433
gagguuugaagguaaaugu

SEQ ID NO: 1966777 - RNA, 19 nt, Artificial Sequence
  Description of Artificial Sequence: Synthetic oligonucleotide
  Antisense strand to SEQ ID NO: 1966776
acauuuaccuucaaaccuc

SEQ ID NO: 1966778 - RNA, 19 nt, Artificial Sequence
  Description of Artificial Sequence: Synthetic oligonucleotide
  Sense strand starting at position 2843 of SEQ ID NO: 1880433
aggaacucauaggauauuu

SEQ ID NO: 1966779 - RNA, 19 nt, Artificial Sequence
  Description of Artificial Sequence: Synthetic oligonucleotide
  Antisense strand to SEQ ID NO: 1966778
aaauauccuaugaguuccu

SEQ ID NO: 1966780 - RNA, 19 nt, Artificial Sequence
  Description of Artificial Sequence: Synthetic oligonucleotide
  Sense strand starting at position 3120 of SEQ ID NO: 1880433
agagaaacuuaauucuggu

SEQ ID NO: 1966781 - RNA, 19 nt, Artificial Sequence
  Description of Artificial Sequence: Synthetic oligonucleotide
  Antisense strand to SEQ ID NO: 1966780
accagaauuaaguuucucu

SEQ ID NO: 1966782 - RNA, 19 nt, Artificial Sequence
  Description of Artificial Sequence: Synthetic oligonucleotide
  Sense strand starting at position 3126 of SEQ ID NO: 1880433
acuuaauucugguuugagc

SEQ ID NO: 1966783 - RNA, 19 nt, Artificial Sequence
  Description of Artificial Sequence: Synthetic oligonucleotide
  Antisense strand to SEQ ID NO: 1966782
gcucaaaccagaauuaagu

SEQ ID NO: 1966784 - RNA, 19 nt, Artificial Sequence
  Description of Artificial Sequence: Synthetic oligonucleotide
  Sense strand starting at position 3128 of SEQ ID NO: 1880433
uuaauucugguuugagcaa

SEQ ID NO: 1966785 - RNA, 19 nt, Artificial Sequence
  Description of Artificial Sequence: Synthetic oligonucleotide
  Antisense strand to SEQ ID NO: 1966784
uugcucaaaccagaauuaa

SEQ ID NO: 1966786 - RNA, 19 nt, Artificial Sequence
  Description of Artificial Sequence: Synthetic oligonucleotide
  Sense strand starting at position 3524 of SEQ ID NO: 1880433
aguuucuaucagggucuau

SEQ ID NO: 1966787 - RNA, 19 nt, Artificial Sequence
  Description of Artificial Sequence: Synthetic oligonucleotide
  Antisense strand to SEQ ID NO: 1966786
auagacccugauagaaacu

SEQ ID NO: 1966788 - RNA, 19 nt, Artificial Sequence
  Description of Artificial Sequence: Synthetic oligonucleotide
  Sense strand starting at position 3575 of SEQ ID NO: 1880433
auggaaaucugagguauuu

SEQ ID NO: 1966789 - RNA, 19 nt, Artificial Sequence
  Description of Artificial Sequence: Synthetic oligonucleotide
  Antisense strand to SEQ ID NO: 1966788
aaauaccucagauuuccau

SEQ ID NO: 1966790 - RNA, 19 nt, Artificial Sequence
  Description of Artificial Sequence: Synthetic oligonucleotide
  Sense strand starting at position 3878 of SEQ ID NO: 1880433
gugaguaaucuuuagcacu

SEQ ID NO: 1966791 - RNA, 19 nt, Artificial Sequence
  Description of Artificial Sequence: Synthetic oligonucleotide
  Antisense strand to SEQ ID NO: 1966790
agugcuaaagauuacucac

SEQ ID NO: 1966792 - RNA, 19 nt, Artificial Sequence
  Description of Artificial Sequence: Synthetic oligonucleotide
  Sense strand starting at position 3886 of SEQ ID NO: 1880433
ucuuuagcacuguauguaa

SEQ ID NO: 1966793 - RNA, 19 nt, Artificial Sequence
  Description of Artificial Sequence: Synthetic oligonucleotide
  Antisense strand to SEQ ID NO: 1966792
uuacauacagugcuaaaga

SEQ ID NO: 1966794 - RNA, 19 nt, Artificial Sequence
  Description of Artificial Sequence: Synthetic oligonucleotide
  Sense strand starting at position 60 of SEQ ID NO: 1880434
ucuauuauaugugcugaga

SEQ ID NO: 1966795 - RNA, 19 nt, Artificial Sequence
  Description of Artificial Sequence: Synthetic oligonucleotide
  Antisense strand to SEQ ID NO: 1966794
ucucagcacauauaauaga

SEQ ID NO: 1966796 - RNA, 19 nt, Artificial Sequence
  Description of Artificial Sequence: Synthetic oligonucleotide
  Sense strand starting at position 63 of SEQ ID NO: 1880434
auuauaugugcugagauga

SEQ ID NO: 1966797 - RNA, 19 nt, Artificial Sequence
  Description of Artificial Sequence: Synthetic oligonucleotide
  Antisense strand to SEQ ID NO: 1966796
ucaucucagcacauauaau

SEQ ID NO: 1966798 - RNA, 19 nt, Artificial Sequence
  Description of Artificial Sequence: Synthetic oligonucleotide
  Sense strand starting at position 533 of SEQ ID NO: 1880434
uugggagcagcaugagauu

SEQ ID NO: 1966799 - RNA, 19 nt, Artificial Sequence
  Description of Artificial Sequence: Synthetic oligonucleotide
  Antisense strand to SEQ ID NO: 1966798
aaucucaugcugcucccaa

SEQ ID NO: 1966800 - RNA, 19 nt, Artificial Sequence
  Description of Artificial Sequence: Synthetic oligonucleotide
  Sense strand starting at position 825 of SEQ ID NO: 1880434
uggugagugacaggcaauu

SEQ ID NO: 1966801 - RNA, 19 nt, Artificial Sequence
  Description of Artificial Sequence: Synthetic oligonucleotide
  Antisense strand to SEQ ID NO: 1966800
aauugccugucacucacca

SEQ ID NO: 1966802 - RNA, 19 nt, Artificial Sequence
  Description of Artificial Sequence: Synthetic oligonucleotide
  Sense strand starting at position 1012 of SEQ ID NO: 1880434
ccauccuguccucauggau

SEQ ID NO: 1966803 - RNA, 19 nt, Artificial Sequence
  Description of Artificial Sequence: Synthetic oligonucleotide
  Antisense strand to SEQ ID NO: 1966802
auccaugaggacaggaugg

SEQ ID NO: 1966804 - RNA, 19 nt, Artificial Sequence
  Description of Artificial Sequence: Synthetic oligonucleotide
  Sense strand starting at position 1095 of SEQ ID NO: 1880434
ucuuaucucuuguuugaug

SEQ ID NO: 1966805 - RNA, 19 nt, Artificial Sequence
  Description of Artificial Sequence: Synthetic oligonucleotide
  Antisense strand to SEQ ID NO: 1966804
caucaaacaagagauaaga

SEQ ID NO: 1966806 - RNA, 19 nt, Artificial Sequence
  Description of Artificial Sequence: Synthetic oligonucleotide
  Sense strand starting at position 1097 of SEQ ID NO: 1880434
uuaucucuuguuugaugga

SEQ ID NO: 1966807 - RNA, 19 nt, Artificial Sequence
  Description of Artificial Sequence: Synthetic oligonucleotide
  Antisense strand to SEQ ID NO: 1966806
uccaucaaacaagagauaa

SEQ ID NO: 1966808 - RNA, 19 nt, Artificial Sequence
  Description of Artificial Sequence: Synthetic oligonucleotide
  Sense strand starting at position 1240 of SEQ ID NO: 1880434
cccugcuucccaggaagau

SEQ ID NO: 1966809 - RNA, 19 nt, Artificial Sequence
  Description of Artificial Sequence: Synthetic oligonucleotide
  Antisense strand to SEQ ID NO: 1966808
aucuuccugggaagcaggg

SEQ ID NO: 1966810 - RNA, 19 nt, Artificial Sequence
  Description of Artificial Sequence: Synthetic oligonucleotide
  Sense strand starting at position 1241 of SEQ ID NO: 1880434
ccugcuucccaggaagaua

SEQ ID NO: 1966811 - RNA, 19 nt, Artificial Sequence
  Description of Artificial Sequence: Synthetic oligonucleotide
  Antisense strand to SEQ ID NO: 1966810
uaucuuccugggaagcagg

SEQ ID NO: 1966812 - RNA, 19 nt, Artificial Sequence
  Description of Artificial Sequence: Synthetic oligonucleotide
  Sense strand starting at position 1255 of SEQ ID NO: 1880434
agauaccuuguggguagau

SEQ ID NO: 1966813 - RNA, 19 nt, Artificial Sequence
  Description of Artificial Sequence: Synthetic oligonucleotide
  Antisense strand to SEQ ID NO: 1966812
aucuacccacaagguaucu

SEQ ID NO: 1966814 - RNA, 19 nt, Artificial Sequence
  Description of Artificial Sequence: Synthetic oligonucleotide
  Sense strand starting at position 1316 of SEQ ID NO: 1880434
gcuguuaaauauucuggga

SEQ ID NO: 1966815 - RNA, 19 nt, Artificial Sequence
  Description of Artificial Sequence: Synthetic oligonucleotide
  Antisense strand to SEQ ID NO: 1966814
ucccagaauauuuaacagc

SEQ ID NO: 1966816 - RNA, 19 nt, Artificial Sequence
  Description of Artificial Sequence: Synthetic oligonucleotide
  Sense strand starting at position 1411 of SEQ ID NO: 1880434
ggaaaccuccagugcagaa

SEQ ID NO: 1966817 - RNA, 19 nt, Artificial Sequence
  Description of Artificial Sequence: Synthetic oligonucleotide
  Antisense strand to SEQ ID NO: 1966816
uucugcacuggagguuucc

SEQ ID NO: 1966818 - RNA, 19 nt, Artificial Sequence
  Description of Artificial Sequence: Synthetic oligonucleotide
  Sense strand starting at position 1425 of SEQ ID NO: 1880434
cagaaaucguacucugcca

SEQ ID NO: 1966819 - RNA, 19 nt, Artificial Sequence
  Description of Artificial Sequence: Synthetic oligonucleotide
  Antisense strand to SEQ ID NO: 1966818
uggcagaguacgauuucug

SEQ ID NO: 1966820 - RNA, 19 nt, Artificial Sequence
  Description of Artificial Sequence: Synthetic oligonucleotide
  Sense strand starting at position 1754 of SEQ ID NO: 1880434
cguuccauuccguuuaagu

SEQ ID NO: 1966821 - RNA, 19 nt, Artificial Sequence
  Description of Artificial Sequence: Synthetic oligonucleotide
  Antisense strand to SEQ ID NO: 1966820
acuuaaacggaauggaacg

SEQ ID NO: 1966822 - RNA, 19 nt, Artificial Sequence
  Description of Artificial Sequence: Synthetic oligonucleotide
  Sense strand starting at position 1756 of SEQ ID NO: 1880434
uuccauuccguuuaaguaa

SEQ ID NO: 1966823 - RNA, 19 nt, Artificial Sequence
  Description of Artificial Sequence: Synthetic oligonucleotide
  Antisense strand to SEQ ID NO: 1966822
uuacuuaaacggaauggaa

SEQ ID NO: 1966824 - RNA, 19 nt, Artificial Sequence
  Description of Artificial Sequence: Synthetic oligonucleotide
  Sense strand starting at position 1856 of SEQ ID NO: 1880434
gccuguuuaccugacagau

SEQ ID NO: 1966825 - RNA, 19 nt, Artificial Sequence
  Description of Artificial Sequence: Synthetic oligonucleotide
  Antisense strand to SEQ ID NO: 1966824
aucugucagguaaacaggc

SEQ ID NO: 1966826 - RNA, 19 nt, Artificial Sequence
  Description of Artificial Sequence: Synthetic oligonucleotide
  Sense strand starting at position 1921 of SEQ ID NO: 1880434
ccgcuaaucccagaguaaa

SEQ ID NO: 1966827 - RNA, 19 nt, Artificial Sequence
  Description of Artificial Sequence: Synthetic oligonucleotide
  Antisense strand to SEQ ID NO: 1966826
uuuacucugggauuagcgg

SEQ ID NO: 1966828 - RNA, 19 nt, Artificial Sequence
  Description of Artificial Sequence: Synthetic oligonucleotide
  Sense strand starting at position 2440 of SEQ ID NO: 1880434
auaagugauggcuguuuau

SEQ ID NO: 1966829 - RNA, 19 nt, Artificial Sequence
  Description of Artificial Sequence: Synthetic oligonucleotide
  Antisense strand to SEQ ID NO: 1966828
auaaacagccaucacuuau

SEQ ID NO: 1966830 - RNA, 19 nt, Artificial Sequence
  Description of Artificial Sequence: Synthetic oligonucleotide
  Sense strand starting at position 2449 of SEQ ID NO: 1880434
ggcuguuuaugauuaggga

SEQ ID NO: 1966831 - RNA, 19 nt, Artificial Sequence
  Description of Artificial Sequence: Synthetic oligonucleotide
  Antisense strand to SEQ ID NO: 1966830
ucccuaaucauaaacagcc

SEQ ID NO: 1966832 - RNA, 19 nt, Artificial Sequence
  Description of Artificial Sequence: Synthetic oligonucleotide
  Sense strand starting at position 2450 of SEQ ID NO: 1880434
gcuguuuaugauuagggag

SEQ ID NO: 1966833 - RNA, 19 nt, Artificial Sequence
  Description of Artificial Sequence: Synthetic oligonucleotide
  Antisense strand to SEQ ID NO: 1966832
cucccuaaucauaaacagc

SEQ ID NO: 1966834 - RNA, 19 nt, Artificial Sequence
  Description of Artificial Sequence: Synthetic oligonucleotide
  Sense strand starting at position 2468 of SEQ ID NO: 1880434
gggagugaggcugagucuu

SEQ ID NO: 1966835 - RNA, 19 nt, Artificial Sequence
  Description of Artificial Sequence: Synthetic oligonucleotide
  Antisense strand to SEQ ID NO: 1966834
aagacucagccucacuccc

SEQ ID NO: 1966836 - RNA, 19 nt, Artificial Sequence
  Description of Artificial Sequence: Synthetic oligonucleotide
  Sense strand starting at position 2480 of SEQ ID NO: 1880434
gagucuugaagcuggaaug

SEQ ID NO: 1966837 - RNA, 19 nt, Artificial Sequence
  Description of Artificial Sequence: Synthetic oligonucleotide
  Antisense strand to SEQ ID NO: 1966836
cauuccagcuucaagacuc

SEQ ID NO: 1966838 - RNA, 19 nt, Artificial Sequence
  Description of Artificial Sequence: Synthetic oligonucleotide
  Sense strand starting at position 2512 of SEQ ID NO: 1880434
gaggguauuccaggcugga

SEQ ID NO: 1966839 - RNA, 19 nt, Artificial Sequence
  Description of Artificial Sequence: Synthetic oligonucleotide
  Antisense strand to SEQ ID NO: 1966838
uccagccuggaauacccuc

SEQ ID NO: 1966840 - RNA, 19 nt, Artificial Sequence
  Description of Artificial Sequence: Synthetic oligonucleotide
  Sense strand starting at position 2558 of SEQ ID NO: 1880434
cucagauggcaaugaauag

SEQ ID NO: 1966841 - RNA, 19 nt, Artificial Sequence
  Description of Artificial Sequence: Synthetic oligonucleotide
  Antisense strand to SEQ ID NO: 1966840
cuauucauugccaucugag

SEQ ID NO: 1966842 - RNA, 19 nt, Artificial Sequence
  Description of Artificial Sequence: Synthetic oligonucleotide
  Sense strand starting at position 2575 of SEQ ID NO: 1880434
aguguuugucugggagacu

SEQ ID NO: 1966843 - RNA, 19 nt, Artificial Sequence
  Description of Artificial Sequence: Synthetic oligonucleotide
  Antisense strand to SEQ ID NO: 1966842
agucucccagacaaacacu

SEQ ID NO: 1966844 - RNA, 19 nt, Artificial Sequence
  Description of Artificial Sequence: Synthetic oligonucleotide
  Sense strand starting at position 2578 of SEQ ID NO: 1880434
guuugucugggagacugaa

SEQ ID NO: 1966845 - RNA, 19 nt, Artificial Sequence
  Description of Artificial Sequence: Synthetic oligonucleotide
  Antisense strand to SEQ ID NO: 1966844
uucagucucccagacaaac

SEQ ID NO: 1966846 - RNA, 19 nt, Artificial Sequence
  Description of Artificial Sequence: Synthetic oligonucleotide
  Sense strand starting at position 2620 of SEQ ID NO: 1880434
auuauuguagggugguuau

SEQ ID NO: 1966847 - RNA, 19 nt, Artificial Sequence
  Description of Artificial Sequence: Synthetic oligonucleotide
  Antisense strand to SEQ ID NO: 1966846
auaaccacccuacaauaau

SEQ ID NO: 1966848 - RNA, 19 nt, Artificial Sequence
  Description of Artificial Sequence: Synthetic oligonucleotide
  Sense strand starting at position 2633 of SEQ ID NO: 1880434
gguuauuucugggaaggaa

SEQ ID NO: 1966849 - RNA, 19 nt, Artificial Sequence
  Description of Artificial Sequence: Synthetic oligonucleotide
  Antisense strand to SEQ ID NO: 1966848
uuccuucccagaaauaacc

SEQ ID NO: 1966850 - RNA, 19 nt, Artificial Sequence
  Description of Artificial Sequence: Synthetic oligonucleotide
  Sense strand starting at position 2715 of SEQ ID NO: 1880434
aguuuccucguuuauaaau

SEQ ID NO: 1966851 - RNA, 19 nt, Artificial Sequence
  Description of Artificial Sequence: Synthetic oligonucleotide
  Antisense strand to SEQ ID NO: 1966850
auuuauaaacgaggaaacu

SEQ ID NO: 1966852 - RNA, 19 nt, Artificial Sequence
  Description of Artificial Sequence: Synthetic oligonucleotide
  Sense strand starting at position 2746 of SEQ ID NO: 1880434
ucuuguaucgaaggacuuu

SEQ ID NO: 1966853 - RNA, 19 nt, Artificial Sequence
  Description of Artificial Sequence: Synthetic oligonucleotide
  Antisense strand to SEQ ID NO: 1966852
aaaguccuucgauacaaga

SEQ ID NO: 1966854 - RNA, 19 nt, Artificial Sequence
  Description of Artificial Sequence: Synthetic oligonucleotide
  Sense strand starting at position 2818 of SEQ ID NO: 1880434
gggcuuuagaaaggucaag

SEQ ID NO: 1966855 - RNA, 19 nt, Artificial Sequence
  Description of Artificial Sequence: Synthetic oligonucleotide
  Antisense strand to SEQ ID NO: 1966854
cuugaccuuucuaaagccc

SEQ ID NO: 1966856 - RNA, 19 nt, Artificial Sequence
  Description of Artificial Sequence: Synthetic oligonucleotide
  Sense strand starting at position 2829 of SEQ ID NO: 1880434
aggucaaguucucccagua

SEQ ID NO: 1966857 - RNA, 19 nt, Artificial Sequence
  Description of Artificial Sequence: Synthetic oligonucleotide
  Antisense strand to SEQ ID NO: 1966856
uacugggagaacuugaccu

SEQ ID NO: 1966858 - RNA, 19 nt, Artificial Sequence
  Description of Artificial Sequence: Synthetic oligonucleotide
  Sense strand starting at position 3126 of SEQ ID NO: 1880434
uucuuuaugcccugaauga

SEQ ID NO: 1966859 - RNA, 19 nt, Artificial Sequence
  Description of Artificial Sequence: Synthetic oligonucleotide
  Antisense strand to SEQ ID NO: 1966858
ucauucagggcauaaagaa

SEQ ID NO: 1966860 - RNA, 19 nt, Artificial Sequence
  Description of Artificial Sequence: Synthetic oligonucleotide
  Sense strand starting at position 3127 of SEQ ID NO: 1880434
ucuuuaugcccugaaugag

SEQ ID NO: 1966861 - RNA, 19 nt, Artificial Sequence
  Description of Artificial Sequence: Synthetic oligonucleotide
  Antisense strand to SEQ ID NO: 1966860
cucauucagggcauaaaga

SEQ ID NO: 1966862 - RNA, 19 nt, Artificial Sequence
  Description of Artificial Sequence: Synthetic oligonucleotide
  Sense strand starting at position 3151 of SEQ ID NO: 1880434
gggagucugguggagucaa

SEQ ID NO: 1966863 - RNA, 19 nt, Artificial Sequence
  Description of Artificial Sequence: Synthetic oligonucleotide
  Antisense strand to SEQ ID NO: 1966862
uugacuccaccagacuccc

SEQ ID NO: 1966864 - RNA, 19 nt, Artificial Sequence
  Description of Artificial Sequence: Synthetic oligonucleotide
  Sense strand starting at position 3192 of SEQ ID NO: 1880434
ccacuuggucacuagcaga

SEQ ID NO: 1966865 - RNA, 19 nt, Artificial Sequence
  Description of Artificial Sequence: Synthetic oligonucleotide
  Antisense strand to SEQ ID NO: 1966864
ucugcuagugaccaagugg

SEQ ID NO: 1966866 - RNA, 19 nt, Artificial Sequence
  Description of Artificial Sequence: Synthetic oligonucleotide
  Sense strand starting at position 3421 of SEQ ID NO: 1880434
gugagaaaugcuuagggua

SEQ ID NO: 1966867 - RNA, 19 nt, Artificial Sequence
  Description of Artificial Sequence: Synthetic oligonucleotide
  Antisense strand to SEQ ID NO: 1966866
uacccuaagcauuucucac

SEQ ID NO: 1966868 - RNA, 19 nt, Artificial Sequence
  Description of Artificial Sequence: Synthetic oligonucleotide
  Sense strand starting at position 3426 of SEQ ID NO: 1880434
aaaugcuuaggguaaguua

SEQ ID NO: 1966869 - RNA, 19 nt, Artificial Sequence
  Description of Artificial Sequence: Synthetic oligonucleotide
  Antisense strand to SEQ ID NO: 1966868
uaacuuacccuaagcauuu

SEQ ID NO: 1966870 - RNA, 19 nt, Artificial Sequence
  Description of Artificial Sequence: Synthetic oligonucleotide
  Sense strand starting at position 3618 of SEQ ID NO: 1880434
gauagaaacguuuggcuuc

SEQ ID NO: 1966871 - RNA, 19 nt, Artificial Sequence
  Description of Artificial Sequence: Synthetic oligonucleotide
  Antisense strand to SEQ ID NO: 1966870
gaagccaaacguuucuauc

SEQ ID NO: 1966872 - RNA, 19 nt, Artificial Sequence
  Description of Artificial Sequence: Synthetic oligonucleotide
  Sense strand starting at position 3655 of SEQ ID NO: 1880434
cucacuguggcuuaaacaa

SEQ ID NO: 1966873 - RNA, 19 nt, Artificial Sequence
  Description of Artificial Sequence: Synthetic oligonucleotide
  Antisense strand to SEQ ID NO: 1966872
uuguuuaagccacagugag

SEQ ID NO: 1966874 - RNA, 19 nt, Artificial Sequence
  Description of Artificial Sequence: Synthetic oligonucleotide
  Sense strand starting at position 188 of SEQ ID NO: 1880435
gaaaguggcccugauggua

SEQ ID NO: 1966875 - RNA, 19 nt, Artificial Sequence
  Description of Artificial Sequence: Synthetic oligonucleotide
  Antisense strand to SEQ ID NO: 1966874
uaccaucagggccacuuuc

SEQ ID NO: 1966876 - RNA, 19 nt, Artificial Sequence
  Description of Artificial Sequence: Synthetic oligonucleotide
  Sense strand starting at position 221 of SEQ ID NO: 1880435
agacuuacuguugggugau

SEQ ID NO: 1966877 - RNA, 19 nt, Artificial Sequence
  Description of Artificial Sequence: Synthetic oligonucleotide
  Antisense strand to SEQ ID NO: 1966876
aucacccaacaguaagucu

SEQ ID NO: 1966878 - RNA, 19 nt, Artificial Sequence
  Description of Artificial Sequence: Synthetic oligonucleotide
  Sense strand starting at position 231 of SEQ ID NO: 1880435
uugggugauccuggaaauc

SEQ ID NO: 1966879 - RNA, 19 nt, Artificial Sequence
  Description of Artificial Sequence: Synthetic oligonucleotide
  Antisense strand to SEQ ID NO: 1966878
gauuuccaggaucacccaa

SEQ ID NO: 1966880 - RNA, 19 nt, Artificial Sequence
  Description of Artificial Sequence: Synthetic oligonucleotide
  Sense strand starting at position 295 of SEQ ID NO: 1880435
uuuccucuuccuuauguga

SEQ ID NO: 1966881 - RNA, 19 nt, Artificial Sequence
  Description of Artificial Sequence: Synthetic oligonucleotide
  Antisense strand to SEQ ID NO: 1966880
ucacauaaggaagaggaaa

SEQ ID NO: 1966882 - RNA, 19 nt, Artificial Sequence
  Description of Artificial Sequence: Synthetic oligonucleotide
  Sense strand starting at position 418 of SEQ ID NO: 1880435
guaauaaguagggagucua

SEQ ID NO: 1966883 - RNA, 19 nt, Artificial Sequence
  Description of Artificial Sequence: Synthetic oligonucleotide
  Antisense strand to SEQ ID NO: 1966882
uagacucccuacuuauuac

SEQ ID NO: 1966884 - RNA, 19 nt, Artificial Sequence
  Description of Artificial Sequence: Synthetic oligonucleotide
  Sense strand starting at position 447 of SEQ ID NO: 1880435
acuaaaggucuuggugacu

SEQ ID NO: 1966885 - RNA, 19 nt, Artificial Sequence
  Description of Artificial Sequence: Synthetic oligonucleotide
  Antisense strand to SEQ ID NO: 1966884
agucaccaagaccuuuagu

SEQ ID NO: 1966886 - RNA, 19 nt, Artificial Sequence
  Description of Artificial Sequence: Synthetic oligonucleotide
  Sense strand starting at position 573 of SEQ ID NO: 1880435
agaaauggcaucuggaagu

SEQ ID NO: 1966887 - RNA, 19 nt, Artificial Sequence
  Description of Artificial Sequence: Synthetic oligonucleotide
  Antisense strand to SEQ ID NO: 1966886
acuuccagaugccauuucu

SEQ ID NO: 1966888 - RNA, 19 nt, Artificial Sequence
  Description of Artificial Sequence: Synthetic oligonucleotide
  Sense strand starting at position 762 of SEQ ID NO: 1880435
aucuauauccuauguggaa

SEQ ID NO: 1966889 - RNA, 19 nt, Artificial Sequence
  Description of Artificial Sequence: Synthetic oligonucleotide
  Antisense strand to SEQ ID NO: 1966888
uuccacauaggauauagau

SEQ ID NO: 1966890 - RNA, 19 nt, Artificial Sequence
  Description of Artificial Sequence: Synthetic oligonucleotide
  Sense strand starting at position 763 of SEQ ID NO: 1880435
ucuauauccuauguggaau

SEQ ID NO: 1966891 - RNA, 19 nt, Artificial Sequence
  Description of Artificial Sequence: Synthetic oligonucleotide
  Antisense strand to SEQ ID NO: 1966890
auuccacauaggauauaga

SEQ ID NO: 1966892 - RNA, 19 nt, Artificial Sequence
  Description of Artificial Sequence: Synthetic oligonucleotide
  Sense strand starting at position 777 of SEQ ID NO: 1880435
ggaauuacuuaggcagaac

SEQ ID NO: 1966893 - RNA, 19 nt, Artificial Sequence
  Description of Artificial Sequence: Synthetic oligonucleotide
  Antisense strand to SEQ ID NO: 1966892
guucugccuaaguaauucc

SEQ ID NO: 1966894 - RNA, 19 nt, Artificial Sequence
  Description of Artificial Sequence: Synthetic oligonucleotide
  Sense strand starting at position 842 of SEQ ID NO: 1880435
uuauuugucguuuacucua

SEQ ID NO: 1966895 - RNA, 19 nt, Artificial Sequence
  Description of Artificial Sequence: Synthetic oligonucleotide
  Antisense strand to SEQ ID NO: 1966894
uagaguaaacgacaaauaa

SEQ ID NO: 1966896 - RNA, 19 nt, Artificial Sequence
  Description of Artificial Sequence: Synthetic oligonucleotide
  Sense strand starting at position 901 of SEQ ID NO: 1880435
augauaugccaauauguga

SEQ ID NO: 1966897 - RNA, 19 nt, Artificial Sequence
  Description of Artificial Sequence: Synthetic oligonucleotide
  Antisense strand to SEQ ID NO: 1966896
ucacauauuggcauaucau

SEQ ID NO: 1966898 - RNA, 19 nt, Artificial Sequence
  Description of Artificial Sequence: Synthetic oligonucleotide
  Sense strand starting at position 956 of SEQ ID NO: 1880435
ugaauuggucaagggcaau

SEQ ID NO: 1966899 - RNA, 19 nt, Artificial Sequence
  Description of Artificial Sequence: Synthetic oligonucleotide
  Antisense strand to SEQ ID NO: 1966898
auugcccuugaccaauuca

SEQ ID NO: 1966900 - RNA, 19 nt, Artificial Sequence
  Description of Artificial Sequence: Synthetic oligonucleotide
  Sense strand starting at position 962 of SEQ ID NO: 1880435
ggucaagggcaaugacaau

SEQ ID NO: 1966901 - RNA, 19 nt, Artificial Sequence
  Description of Artificial Sequence: Synthetic oligonucleotide
  Antisense strand to SEQ ID NO: 1966900
auugucauugcccuugacc

SEQ ID NO: 1966902 - RNA, 19 nt, Artificial Sequence
  Description of Artificial Sequence: Synthetic oligonucleotide
  Sense strand starting at position 1034 of SEQ ID NO: 1880435
ggugcuucgccaucuuauc

SEQ ID NO: 1966903 - RNA, 19 nt, Artificial Sequence
  Description of Artificial Sequence: Synthetic oligonucleotide
  Antisense strand to SEQ ID NO: 1966902
gauaagauggcgaagcacc

SEQ ID NO: 1966904 - RNA, 19 nt, Artificial Sequence
  Description of Artificial Sequence: Synthetic oligonucleotide
  Sense strand starting at position 1051 of SEQ ID NO: 1880435
ucuaaagcuucuucugaga

SEQ ID NO: 1966905 - RNA, 19 nt, Artificial Sequence
  Description of Artificial Sequence: Synthetic oligonucleotide
  Antisense strand to SEQ ID NO: 1966904
ucucagaagaagcuuuaga

SEQ ID NO: 1966906 - RNA, 19 nt, Artificial Sequence
  Description of Artificial Sequence: Synthetic oligonucleotide
  Sense strand starting at position 1129 of SEQ ID NO: 1880435
agaagagcauuugacacaa

SEQ ID NO: 1966907 - RNA, 19 nt, Artificial Sequence
  Description of Artificial Sequence: Synthetic oligonucleotide
  Antisense strand to SEQ ID NO: 1966906
uugugucaaaugcucuucu

SEQ ID NO: 1966908 - RNA, 19 nt, Artificial Sequence
  Description of Artificial Sequence: Synthetic oligonucleotide
  Sense strand starting at position 1163 of SEQ ID NO: 1880435
gaugacucccaaugaaggu

SEQ ID NO: 1966909 - RNA, 19 nt, Artificial Sequence
  Description of Artificial Sequence: Synthetic oligonucleotide
  Antisense strand to SEQ ID NO: 1966908
accuucauugggagucauc

SEQ ID NO: 1966910 - RNA, 19 nt, Artificial Sequence
  Description of Artificial Sequence: Synthetic oligonucleotide
  Sense strand starting at position 1172 of SEQ ID NO: 1880435
caaugaaggucauuguuua

SEQ ID NO: 1966911 - RNA, 19 nt, Artificial Sequence
  Description of Artificial Sequence: Synthetic oligonucleotide
  Antisense strand to SEQ ID NO: 1966910
uaaacaaugaccuucauug

SEQ ID NO: 1966912 - RNA, 19 nt, Artificial Sequence
  Description of Artificial Sequence: Synthetic oligonucleotide
  Sense strand starting at position 1173 of SEQ ID NO: 1880435
aaugaaggucauuguuuaa

SEQ ID NO: 1966913 - RNA, 19 nt, Artificial Sequence
  Description of Artificial Sequence: Synthetic oligonucleotide
  Antisense strand to SEQ ID NO: 1966912
uuaaacaaugaccuucauu

SEQ ID NO: 1966914 - RNA, 19 nt, Artificial Sequence
  Description of Artificial Sequence: Synthetic oligonucleotide
  Sense strand starting at position 1177 of SEQ ID NO: 1880435
aaggucauuguuuaaagca

SEQ ID NO: 1966915 - RNA, 19 nt, Artificial Sequence
  Description of Artificial Sequence: Synthetic oligonucleotide
  Antisense strand to SEQ ID NO: 1966914
ugcuuuaaacaaugaccuu

SEQ ID NO: 1966916 - RNA, 19 nt, Artificial Sequence
  Description of Artificial Sequence: Synthetic oligonucleotide
  Sense strand starting at position 1280 of SEQ ID NO: 1880435
ggaggagagucuuuauucu

SEQ ID NO: 1966917 - RNA, 19 nt, Artificial Sequence
  Description of Artificial Sequence: Synthetic oligonucleotide
  Antisense strand to SEQ ID NO: 1966916
agaauaaagacucuccucc

SEQ ID NO: 1966918 - RNA, 19 nt, Artificial Sequence
  Description of Artificial Sequence: Synthetic oligonucleotide
  Sense strand starting at position 1523 of SEQ ID NO: 1880435
gccaaugugggcgaggaaa

SEQ ID NO: 1966919 - RNA, 19 nt, Artificial Sequence
  Description of Artificial Sequence: Synthetic oligonucleotide
  Antisense strand to SEQ ID NO: 1966918
uuuccucgcccacauuggc

SEQ ID NO: 1966920 - RNA, 19 nt, Artificial Sequence
  Description of Artificial Sequence: Synthetic oligonucleotide
  Sense strand starting at position 2108 of SEQ ID NO: 1880435
aggguugaaagacguuaaa

SEQ ID NO: 1966921 - RNA, 19 nt, Artificial Sequence
  Description of Artificial Sequence: Synthetic oligonucleotide
  Antisense strand to SEQ ID NO: 1966920
uuuaacgucuuucaacccu

SEQ ID NO: 1966922 - RNA, 19 nt, Artificial Sequence
  Description of Artificial Sequence: Synthetic oligonucleotide
  Sense strand starting at position 2541 of SEQ ID NO: 1880435
gggacuguaaaguguauau

SEQ ID NO: 1966923 - RNA, 19 nt, Artificial Sequence
  Description of Artificial Sequence: Synthetic oligonucleotide
  Antisense strand to SEQ ID NO: 1966922
auauacacuuuacaguccc

SEQ ID NO: 1966924 - RNA, 19 nt, Artificial Sequence
  Description of Artificial Sequence: Synthetic oligonucleotide
  Sense strand starting at position 2543 of SEQ ID NO: 1880435
gacuguaaaguguauauag

SEQ ID NO: 1966925 - RNA, 19 nt, Artificial Sequence
  Description of Artificial Sequence: Synthetic oligonucleotide
  Antisense strand to SEQ ID NO: 1966924
cuauauacacuuuacaguc

SEQ ID NO: 1966926 - RNA, 19 nt, Artificial Sequence
  Description of Artificial Sequence: Synthetic oligonucleotide
  Sense strand starting at position 2545 of SEQ ID NO: 1880435
cuguaaaguguauauagaa

SEQ ID NO: 1966927 - RNA, 19 nt, Artificial Sequence
  Description of Artificial Sequence: Synthetic oligonucleotide
  Antisense strand to SEQ ID NO: 1966926
uucuauauacacuuuacag

SEQ ID NO: 1966928 - RNA, 19 nt, Artificial Sequence
  Description of Artificial Sequence: Synthetic oligonucleotide
  Sense strand starting at position 2656 of SEQ ID NO: 1880435
uccugcuuugggcaggaaa

SEQ ID NO: 1966929 - RNA, 19 nt, Artificial Sequence
  Description of Artificial Sequence: Synthetic oligonucleotide
  Antisense strand to SEQ ID NO: 1966928
uuuccugcccaaagcagga

SEQ ID NO: 1966930 - RNA, 19 nt, Artificial Sequence
  Description of Artificial Sequence: Synthetic oligonucleotide
  Sense strand starting at position 2773 of SEQ ID NO: 1880435
uuugauagaucaguuccuu

SEQ ID NO: 1966931 - RNA, 19 nt, Artificial Sequence
  Description of Artificial Sequence: Synthetic oligonucleotide
  Antisense strand to SEQ ID NO: 1966930
aaggaacugaucuaucaaa

SEQ ID NO: 1966932 - RNA, 19 nt, Artificial Sequence
  Description of Artificial Sequence: Synthetic oligonucleotide
  Sense strand starting at position 2976 of SEQ ID NO: 1880435
uaugaaguauucccaagga

SEQ ID NO: 1966933 - RNA, 19 nt, Artificial Sequence
  Description of Artificial Sequence: Synthetic oligonucleotide
  Antisense strand to SEQ ID NO: 1966932
uccuugggaauacuucaua

SEQ ID NO: 1966934 - RNA, 19 nt, Artificial Sequence
  Description of Artificial Sequence: Synthetic oligonucleotide
  Sense strand starting at position 3254 of SEQ ID NO: 1880435
guggccugucaauaauaau

SEQ ID NO: 1966935 - RNA, 19 nt, Artificial Sequence
  Description of Artificial Sequence: Synthetic oligonucleotide
  Antisense strand to SEQ ID NO: 1966934
auuauuauugacaggccac

SEQ ID NO: 1966936 - RNA, 19 nt, Artificial Sequence
  Description of Artificial Sequence: Synthetic oligonucleotide
  Sense strand starting at position 3281 of SEQ ID NO: 1880435
auguaaaggucuucuuaaa

SEQ ID NO: 1966937 - RNA, 19 nt, Artificial Sequence
  Description of Artificial Sequence: Synthetic oligonucleotide
  Antisense strand to SEQ ID NO: 1966936
uuuaagaagaccuuuacau

SEQ ID NO: 1966938 - RNA, 19 nt, Artificial Sequence
  Description of Artificial Sequence: Synthetic oligonucleotide
  Sense strand starting at position 3596 of SEQ ID NO: 1880435
agaugugacuucuuaacaa

SEQ ID NO: 1966939 - RNA, 19 nt, Artificial Sequence
  Description of Artificial Sequence: Synthetic oligonucleotide
  Antisense strand to SEQ ID NO: 1966938
uuguuaagaagucacaucu

SEQ ID NO: 1966940 - RNA, 19 nt, Artificial Sequence
  Description of Artificial Sequence: Synthetic oligonucleotide
  Sense strand starting at position 3663 of SEQ ID NO: 1880435
auaagcauccgugaauaug

SEQ ID NO: 1966941 - RNA, 19 nt, Artificial Sequence
  Description of Artificial Sequence: Synthetic oligonucleotide
  Antisense strand to SEQ ID NO: 1966940
cauauucacggaugcuuau

SEQ ID NO: 1966942 - RNA, 19 nt, Artificial Sequence
  Description of Artificial Sequence: Synthetic oligonucleotide
  Sense strand starting at position 3725 of SEQ ID NO: 1880435
gcaaucauagaaugugaag

SEQ ID NO: 1966943 - RNA, 19 nt, Artificial Sequence
  Description of Artificial Sequence: Synthetic oligonucleotide
  Antisense strand to SEQ ID NO: 1966942
cuucacauucuaugauugc

SEQ ID NO: 1966944 - RNA, 19 nt, Artificial Sequence
  Description of Artificial Sequence: Synthetic oligonucleotide
  Sense strand starting at position 3775 of SEQ ID NO: 1880435
ggaucagggcuacgagaau

SEQ ID NO: 1966945 - RNA, 19 nt, Artificial Sequence
  Description of Artificial Sequence: Synthetic oligonucleotide
  Antisense strand to SEQ ID NO: 1966944
auucucguagcccugaucc

SEQ ID NO: 1966946 - RNA, 19 nt, Artificial Sequence
  Description of Artificial Sequence: Synthetic oligonucleotide
  Sense strand starting at position 3784 of SEQ ID NO: 1880435
cuacgagaaucagcugaaa

SEQ ID NO: 1966947 - RNA, 19 nt, Artificial Sequence
  Description of Artificial Sequence: Synthetic oligonucleotide
  Antisense strand to SEQ ID NO: 1966946
uuucagcugauucucguag

SEQ ID NO: 1966948 - RNA, 19 nt, Artificial Sequence
  Description of Artificial Sequence: Synthetic oligonucleotide
  Sense strand starting at position 3787 of SEQ ID NO: 1880435
cgagaaucagcugaaagcu

SEQ ID NO: 1966949 - RNA, 19 nt, Artificial Sequence
  Description of Artificial Sequence: Synthetic oligonucleotide
  Antisense strand to SEQ ID NO: 1966948
agcuuucagcugauucucg

SEQ ID NO: 1966950 - RNA, 19 nt, Artificial Sequence
  Description of Artificial Sequence: Synthetic oligonucleotide
  Sense strand starting at position 3945 of SEQ ID NO: 1880435
aagagaaaugcguaggguu

SEQ ID NO: 1966951 - RNA, 19 nt, Artificial Sequence
  Description of Artificial Sequence: Synthetic oligonucleotide
  Antisense strand to SEQ ID NO: 1966950
aacccuacgcauuucucuu

SEQ ID NO: 1966952 - RNA, 19 nt, Artificial Sequence
  Description of Artificial Sequence: Synthetic oligonucleotide
  Sense strand starting at position 3957 of SEQ ID NO: 1880435
uaggguuaguaauuaagau

SEQ ID NO: 1966953 - RNA, 19 nt, Artificial Sequence
  Description of Artificial Sequence: Synthetic oligonucleotide
  Antisense strand to SEQ ID NO: 1966952
aucuuaauuacuaacccua

SEQ ID NO: 1966954 - RNA, 19 nt, Artificial Sequence
  Description of Artificial Sequence: Synthetic oligonucleotide
  Sense strand starting at position 344 of SEQ ID NO: 1880436
caauguggucuccaguuga

SEQ ID NO: 1966955 - RNA, 19 nt, Artificial Sequence
  Description of Artificial Sequence: Synthetic oligonucleotide
  Antisense strand to SEQ ID NO: 1966954
ucaacuggagaccacauug

SEQ ID NO: 1966956 - RNA, 19 nt, Artificial Sequence
  Description of Artificial Sequence: Synthetic oligonucleotide
  Sense strand starting at position 427 of SEQ ID NO: 1880436
gaggcaugaccuugggcua

SEQ ID NO: 1966957 - RNA, 19 nt, Artificial Sequence
  Description of Artificial Sequence: Synthetic oligonucleotide
  Antisense strand to SEQ ID NO: 1966956
uagcccaaggucaugccuc

SEQ ID NO: 1966958 - RNA, 19 nt, Artificial Sequence
  Description of Artificial Sequence: Synthetic oligonucleotide
  Sense strand starting at position 534 of SEQ ID NO: 1880436
uugaguccuaacgagaugu

SEQ ID NO: 1966959 - RNA, 19 nt, Artificial Sequence
  Description of Artificial Sequence: Synthetic oligonucleotide
  Antisense strand to SEQ ID NO: 1966958
acaucucguuaggacucaa

SEQ ID NO: 1966960 - RNA, 19 nt, Artificial Sequence
  Description of Artificial Sequence: Synthetic oligonucleotide
  Sense strand starting at position 593 of SEQ ID NO: 1880436
aucuuaaaccuagaaucgu

SEQ ID NO: 1966961 - RNA, 19 nt, Artificial Sequence
  Description of Artificial Sequence: Synthetic oligonucleotide
  Antisense strand to SEQ ID NO: 1966960
acgauucuagguuuaagau

SEQ ID NO: 1966962 - RNA, 19 nt, Artificial Sequence
  Description of Artificial Sequence: Synthetic oligonucleotide
  Sense strand starting at position 686 of SEQ ID NO: 1880436
agagguacccaagguuagu

SEQ ID NO: 1966963 - RNA, 19 nt, Artificial Sequence
  Description of Artificial Sequence: Synthetic oligonucleotide
  Antisense strand to SEQ ID NO: 1966962
acuaaccuuggguaccucu

SEQ ID NO: 1966964 - RNA, 19 nt, Artificial Sequence
  Description of Artificial Sequence: Synthetic oligonucleotide
  Sense strand starting at position 714 of SEQ ID NO: 1880436
cguagauacuacuccuaca

SEQ ID NO: 1966965 - RNA, 19 nt, Artificial Sequence
  Description of Artificial Sequence: Synthetic oligonucleotide
  Antisense strand to SEQ ID NO: 1966964
uguaggaguaguaucuacg

SEQ ID NO: 1966966 - RNA, 19 nt, Artificial Sequence
  Description of Artificial Sequence: Synthetic oligonucleotide
  Sense strand starting at position 740 of SEQ ID NO: 1880436
agcagugaaucaucucuuu

SEQ ID NO: 1966967 - RNA, 19 nt, Artificial Sequence
  Description of Artificial Sequence: Synthetic oligonucleotide
  Antisense strand to SEQ ID NO: 1966966
aaagagaugauucacugcu

SEQ ID NO: 1966968 - RNA, 19 nt, Artificial Sequence
  Description of Artificial Sequence: Synthetic oligonucleotide
  Sense strand starting at position 743 of SEQ ID NO: 1880436
agugaaucaucucuuugua

SEQ ID NO: 1966969 - RNA, 19 nt, Artificial Sequence
  Description of Artificial Sequence: Synthetic oligonucleotide
  Antisense strand to SEQ ID NO: 1966968
uacaaagagaugauucacu

SEQ ID NO: 1966970 - RNA, 19 nt, Artificial Sequence
  Description of Artificial Sequence: Synthetic oligonucleotide
  Sense strand starting at position 755 of SEQ ID NO: 1880436
cuuuguacaccuugagaga

SEQ ID NO: 1966971 - RNA, 19 nt, Artificial Sequence
  Description of Artificial Sequence: Synthetic oligonucleotide
  Antisense strand to SEQ ID NO: 1966970
ucucucaagguguacaaag

SEQ ID NO: 1966972 - RNA, 19 nt, Artificial Sequence
  Description of Artificial Sequence: Synthetic oligonucleotide
  Sense strand starting at position 789 of SEQ ID NO: 1880436
gggaaccucuaguugugau

SEQ ID NO: 1966973 - RNA, 19 nt, Artificial Sequence
  Description of Artificial Sequence: Synthetic oligonucleotide
  Antisense strand to SEQ ID NO: 1966972
aucacaacuagagguuccc

SEQ ID NO: 1966974 - RNA, 19 nt, Artificial Sequence
  Description of Artificial Sequence: Synthetic oligonucleotide
  Sense strand starting at position 815 of SEQ ID NO: 1880436
uuacuuauaucuucuaggu

SEQ ID NO: 1966975 - RNA, 19 nt, Artificial Sequence
  Description of Artificial Sequence: Synthetic oligonucleotide
  Antisense strand to SEQ ID NO: 1966974
accuagaagauauaaguaa

SEQ ID NO: 1966976 - RNA, 19 nt, Artificial Sequence
  Description of Artificial Sequence: Synthetic oligonucleotide
  Sense strand starting at position 819 of SEQ ID NO: 1880436
uuauaucuucuagguggaa

SEQ ID NO: 1966977 - RNA, 19 nt, Artificial Sequence
  Description of Artificial Sequence: Synthetic oligonucleotide
  Antisense strand to SEQ ID NO: 1966976
uuccaccuagaagauauaa

SEQ ID NO: 1966978 - RNA, 19 nt, Artificial Sequence
  Description of Artificial Sequence: Synthetic oligonucleotide
  Sense strand starting at position 820 of SEQ ID NO: 1880436
uauaucuucuagguggaaa

SEQ ID NO: 1966979 - RNA, 19 nt, Artificial Sequence
  Description of Artificial Sequence: Synthetic oligonucleotide
  Antisense strand to SEQ ID NO: 1966978
uuuccaccuagaagauaua

SEQ ID NO: 1966980 - RNA, 19 nt, Artificial Sequence
  Description of Artificial Sequence: Synthetic oligonucleotide
  Sense strand starting at position 822 of SEQ ID NO: 1880436
uaucuucuagguggaaauu

SEQ ID NO: 1966981 - RNA, 19 nt, Artificial Sequence
  Description of Artificial Sequence: Synthetic oligonucleotide
  Antisense strand to SEQ ID NO: 1966980
aauuuccaccuagaagaua

SEQ ID NO: 1966982 - RNA, 19 nt, Artificial Sequence
  Description of Artificial Sequence: Synthetic oligonucleotide
  Sense strand starting at position 844 of SEQ ID NO: 1880436
cuuugauaacaguaacugu

SEQ ID NO: 1966983 - RNA, 19 nt, Artificial Sequence
  Description of Artificial Sequence: Synthetic oligonucleotide
  Antisense strand to SEQ ID NO: 1966982
acaguuacuguuaucaaag

SEQ ID NO: 1966984 - RNA, 19 nt, Artificial Sequence
  Description of Artificial Sequence: Synthetic oligonucleotide
  Sense strand starting at position 847 of SEQ ID NO: 1880436
ugauaacaguaacuguauu

SEQ ID NO: 1966985 - RNA, 19 nt, Artificial Sequence
  Description of Artificial Sequence: Synthetic oligonucleotide
  Antisense strand to SEQ ID NO: 1966984
aauacaguuacuguuauca

SEQ ID NO: 1966986 - RNA, 19 nt, Artificial Sequence
  Description of Artificial Sequence: Synthetic oligonucleotide
  Sense strand starting at position 994 of SEQ ID NO: 1880436
uccacuaaguagucagaau

SEQ ID NO: 1966987 - RNA, 19 nt, Artificial Sequence
  Description of Artificial Sequence: Synthetic oligonucleotide
  Antisense strand to SEQ ID NO: 1966986
auucugacuacuuagugga

SEQ ID NO: 1966988 - RNA, 19 nt, Artificial Sequence
  Description of Artificial Sequence: Synthetic oligonucleotide
  Sense strand starting at position 1069 of SEQ ID NO: 1880436
uggaaaguagcucauacua

SEQ ID NO: 1966989 - RNA, 19 nt, Artificial Sequence
  Description of Artificial Sequence: Synthetic oligonucleotide
  Antisense strand to SEQ ID NO: 1966988
uaguaugagcuacuuucca

SEQ ID NO: 1966990 - RNA, 19 nt, Artificial Sequence
  Description of Artificial Sequence: Synthetic oligonucleotide
  Sense strand starting at position 1562 of SEQ ID NO: 1880436
guaucuaguugaccuuuga

SEQ ID NO: 1966991 - RNA, 19 nt, Artificial Sequence
  Description of Artificial Sequence: Synthetic oligonucleotide
  Antisense strand to SEQ ID NO: 1966990
ucaaaggucaacuagauac

SEQ ID NO: 1966992 - RNA, 19 nt, Artificial Sequence
  Description of Artificial Sequence: Synthetic oligonucleotide
  Sense strand starting at position 1669 of SEQ ID NO: 1880436
ugcuguuggccagaaaccu

SEQ ID NO: 1966993 - RNA, 19 nt, Artificial Sequence
  Description of Artificial Sequence: Synthetic oligonucleotide
  Antisense strand to SEQ ID NO: 1966992
agguuucuggccaacagca

SEQ ID NO: 1966994 - RNA, 19 nt, Artificial Sequence
  Description of Artificial Sequence: Synthetic oligonucleotide
  Sense strand starting at position 1678 of SEQ ID NO: 1880436
ccagaaaccuugcuaguaa

SEQ ID NO: 1966995 - RNA, 19 nt, Artificial Sequence
  Description of Artificial Sequence: Synthetic oligonucleotide
  Antisense strand to SEQ ID NO: 1966994
uuacuagcaagguuucugg

SEQ ID NO: 1966996 - RNA, 19 nt, Artificial Sequence
  Description of Artificial Sequence: Synthetic oligonucleotide
  Sense strand starting at position 1724 of SEQ ID NO: 1880436
guguguuauaugcacuaua

SEQ ID NO: 1966997 - RNA, 19 nt, Artificial Sequence
  Description of Artificial Sequence: Synthetic oligonucleotide
  Antisense strand to SEQ ID NO: 1966996
uauagugcauauaacacac

SEQ ID NO: 1966998 - RNA, 19 nt, Artificial Sequence
  Description of Artificial Sequence: Synthetic oligonucleotide
  Sense strand starting at position 1998 of SEQ ID NO: 1880436
aagggucaacucuguaaua

SEQ ID NO: 1966999 - RNA, 19 nt, Artificial Sequence
  Description of Artificial Sequence: Synthetic oligonucleotide
  Antisense strand to SEQ ID NO: 1966998
uauuacagaguugacccuu

SEQ ID NO: 1967000 - RNA, 19 nt, Artificial Sequence
  Description of Artificial Sequence: Synthetic oligonucleotide
  Sense strand starting at position 1999 of SEQ ID NO: 1880436
agggucaacucuguaauaa

SEQ ID NO: 1967001 - RNA, 19 nt, Artificial Sequence
  Description of Artificial Sequence: Synthetic oligonucleotide
  Antisense strand to SEQ ID NO: 1967000
uuauuacagaguugacccu

SEQ ID NO: 1967002 - RNA, 19 nt, Artificial Sequence
  Description of Artificial Sequence: Synthetic oligonucleotide
  Sense strand starting at position 2300 of SEQ ID NO: 1880436
guguguauugaacacauau

SEQ ID NO: 1967003 - RNA, 19 nt, Artificial Sequence
  Description of Artificial Sequence: Synthetic oligonucleotide
  Antisense strand to SEQ ID NO: 1967002
auauguguucaauacacac

SEQ ID NO: 1967004 - RNA, 19 nt, Artificial Sequence
  Description of Artificial Sequence: Synthetic oligonucleotide
  Sense strand starting at position 2327 of SEQ ID NO: 1880436
ucacuacgucucuaagcuu

SEQ ID NO: 1967005 - RNA, 19 nt, Artificial Sequence
  Description of Artificial Sequence: Synthetic oligonucleotide
  Antisense strand to SEQ ID NO: 1967004
aagcuuagagacguaguga

SEQ ID NO: 1967006 - RNA, 19 nt, Artificial Sequence
  Description of Artificial Sequence: Synthetic oligonucleotide
  Sense strand starting at position 2450 of SEQ ID NO: 1880436
gauaauguaguuuguaagu

SEQ ID NO: 1967007 - RNA, 19 nt, Artificial Sequence
  Description of Artificial Sequence: Synthetic oligonucleotide
  Antisense strand to SEQ ID NO: 1967006
acuuacaaacuacauuauc

SEQ ID NO: 1967008 - RNA, 19 nt, Artificial Sequence
  Description of Artificial Sequence: Synthetic oligonucleotide
  Sense strand starting at position 2456 of SEQ ID NO: 1880436
guaguuuguaaguacugaa

SEQ ID NO: 1967009 - RNA, 19 nt, Artificial Sequence
  Description of Artificial Sequence: Synthetic oligonucleotide
  Antisense strand to SEQ ID NO: 1967008
uucaguacuuacaaacuac

SEQ ID NO: 1967010 - RNA, 19 nt, Artificial Sequence
  Description of Artificial Sequence: Synthetic oligonucleotide
  Sense strand starting at position 2488 of SEQ ID NO: 1880436
uucuuugugagacagaguu

SEQ ID NO: 1967011 - RNA, 19 nt, Artificial Sequence
  Description of Artificial Sequence: Synthetic oligonucleotide
  Antisense strand to SEQ ID NO: 1967010
aacucugucucacaaagaa

SEQ ID NO: 1967012 - RNA, 19 nt, Artificial Sequence
  Description of Artificial Sequence: Synthetic oligonucleotide
  Sense strand starting at position 2498 of SEQ ID NO: 1880436
gacagaguuucgcucugag

SEQ ID NO: 1967013 - RNA, 19 nt, Artificial Sequence
  Description of Artificial Sequence: Synthetic oligonucleotide
  Antisense strand to SEQ ID NO: 1967012
cucagagcgaaacucuguc

SEQ ID NO: 1967014 - RNA, 19 nt, Artificial Sequence
  Description of Artificial Sequence: Synthetic oligonucleotide
  Sense strand starting at position 2773 of SEQ ID NO: 1880436
gauuacuuggccuggccaa

SEQ ID NO: 1967015 - RNA, 19 nt, Artificial Sequence
  Description of Artificial Sequence: Synthetic oligonucleotide
  Antisense strand to SEQ ID NO: 1967014
uuggccaggccaaguaauc

SEQ ID NO: 1967016 - RNA, 19 nt, Artificial Sequence
  Description of Artificial Sequence: Synthetic oligonucleotide
  Sense strand starting at position 2874 of SEQ ID NO: 1880436
uguacugagcuauagucaa

SEQ ID NO: 1967017 - RNA, 19 nt, Artificial Sequence
  Description of Artificial Sequence: Synthetic oligonucleotide
  Antisense strand to SEQ ID NO: 1967016
uugacuauagcucaguaca

SEQ ID NO: 1967018 - RNA, 19 nt, Artificial Sequence
  Description of Artificial Sequence: Synthetic oligonucleotide
  Sense strand starting at position 2881 of SEQ ID NO: 1880436
agcuauagucaaggagaag

SEQ ID NO: 1967019 - RNA, 19 nt, Artificial Sequence
  Description of Artificial Sequence: Synthetic oligonucleotide
  Antisense strand to SEQ ID NO: 1967018
cuucuccuugacuauagcu

SEQ ID NO: 1967020 - RNA, 19 nt, Artificial Sequence
  Description of Artificial Sequence: Synthetic oligonucleotide
  Sense strand starting at position 2957 of SEQ ID NO: 1880436
ccaguuguauucuccaaac

SEQ ID NO: 1967021 - RNA, 19 nt, Artificial Sequence
  Description of Artificial Sequence: Synthetic oligonucleotide
  Antisense strand to SEQ ID NO: 1967020
guuuggagaauacaacugg

SEQ ID NO: 1967022 - RNA, 19 nt, Artificial Sequence
  Description of Artificial Sequence: Synthetic oligonucleotide
  Sense strand starting at position 2999 of SEQ ID NO: 1880436
uuagguacccacuagaugu

SEQ ID NO: 1967023 - RNA, 19 nt, Artificial Sequence
  Description of Artificial Sequence: Synthetic oligonucleotide
  Antisense strand to SEQ ID NO: 1967022
acaucuaguggguaccuaa

SEQ ID NO: 1967024 - RNA, 19 nt, Artificial Sequence
  Description of Artificial Sequence: Synthetic oligonucleotide
  Sense strand starting at position 3030 of SEQ ID NO: 1880436
auugauuuagcccguuuaa

SEQ ID NO: 1967025 - RNA, 19 nt, Artificial Sequence
  Description of Artificial Sequence: Synthetic oligonucleotide
  Antisense strand to SEQ ID NO: 1967024
uuaaacgggcuaaaucaau

SEQ ID NO: 1967026 - RNA, 19 nt, Artificial Sequence
  Description of Artificial Sequence: Synthetic oligonucleotide
  Sense strand starting at position 3088 of SEQ ID NO: 1880436
guuauaaaugcagaaggcu

SEQ ID NO: 1967027 - RNA, 19 nt, Artificial Sequence
  Description of Artificial Sequence: Synthetic oligonucleotide
  Antisense strand to SEQ ID NO: 1967026
agccuucugcauuuauaac

SEQ ID NO: 1967028 - RNA, 19 nt, Artificial Sequence
  Description of Artificial Sequence: Synthetic oligonucleotide
  Sense strand starting at position 3151 of SEQ ID NO: 1880436
auacuauuagacuagugua

SEQ ID NO: 1967029 - RNA, 19 nt, Artificial Sequence
  Description of Artificial Sequence: Synthetic oligonucleotide
  Antisense strand to SEQ ID NO: 1967028
uacacuagucuaauaguau

SEQ ID NO: 1967030 - RNA, 19 nt, Artificial Sequence
  Description of Artificial Sequence: Synthetic oligonucleotide
  Sense strand starting at position 3156 of SEQ ID NO: 1880436
auuagacuaguguaccaau

SEQ ID NO: 1967031 - RNA, 19 nt, Artificial Sequence
  Description of Artificial Sequence: Synthetic oligonucleotide
  Antisense strand to SEQ ID NO: 1967030
auugguacacuagucuaau

SEQ ID NO: 1967032 - RNA, 19 nt, Artificial Sequence
  Description of Artificial Sequence: Synthetic oligonucleotide
  Sense strand starting at position 3480 of SEQ ID NO: 1880436
gguaccaugugucuugaaa

SEQ ID NO: 1967033 - RNA, 19 nt, Artificial Sequence
  Description of Artificial Sequence: Synthetic oligonucleotide
  Antisense strand to SEQ ID NO: 1967032
uuucaagacacaugguacc

SEQ ID NO: 1967034 - RNA, 19 nt, Artificial Sequence
  Description of Artificial Sequence: Synthetic oligonucleotide
  Sense strand starting at position 13 of SEQ ID NO: 1880437
caugauuguggugaagguu

SEQ ID NO: 1967035 - RNA, 19 nt, Artificial Sequence
  Description of Artificial Sequence: Synthetic oligonucleotide
  Antisense strand to SEQ ID NO: 1967034
aaccuucaccacaaucaug

SEQ ID NO: 1967036 - RNA, 19 nt, Artificial Sequence
  Description of Artificial Sequence: Synthetic oligonucleotide
  Sense strand starting at position 25 of SEQ ID NO: 1880437
gaagguuuagaucacguau

SEQ ID NO: 1967037 - RNA, 19 nt, Artificial Sequence
  Description of Artificial Sequence: Synthetic oligonucleotide
  Antisense strand to SEQ ID NO: 1967036
auacgugaucuaaaccuuc

SEQ ID NO: 1967038 - RNA, 19 nt, Artificial Sequence
  Description of Artificial Sequence: Synthetic oligonucleotide
  Sense strand starting at position 115 of SEQ ID NO: 1880437
ucuugaagacuuggucuga

SEQ ID NO: 1967039 - RNA, 19 nt, Artificial Sequence
  Description of Artificial Sequence: Synthetic oligonucleotide
  Antisense strand to SEQ ID NO: 1967038
ucagaccaagucuucaaga

SEQ ID NO: 1967040 - RNA, 19 nt, Artificial Sequence
  Description of Artificial Sequence: Synthetic oligonucleotide
  Sense strand starting at position 119 of SEQ ID NO: 1880437
gaagacuuggucugagcaa

SEQ ID NO: 1967041 - RNA, 19 nt, Artificial Sequence
  Description of Artificial Sequence: Synthetic oligonucleotide
  Antisense strand to SEQ ID NO: 1967040
uugcucagaccaagucuuc

SEQ ID NO: 1967042 - RNA, 19 nt, Artificial Sequence
  Description of Artificial Sequence: Synthetic oligonucleotide
  Sense strand starting at position 691 of SEQ ID NO: 1880437
ucccucugcuggguagaua

SEQ ID NO: 1967043 - RNA, 19 nt, Artificial Sequence
  Description of Artificial Sequence: Synthetic oligonucleotide
  Antisense strand to SEQ ID NO: 1967042
uaucuacccagcagaggga

SEQ ID NO: 1967044 - RNA, 19 nt, Artificial Sequence
  Description of Artificial Sequence: Synthetic oligonucleotide
  Sense strand starting at position 692 of SEQ ID NO: 1880437
cccucugcuggguagauau

SEQ ID NO: 1967045 - RNA, 19 nt, Artificial Sequence
  Description of Artificial Sequence: Synthetic oligonucleotide
  Antisense strand to SEQ ID NO: 1967044
auaucuacccagcagaggg

SEQ ID NO: 1967046 - RNA, 19 nt, Artificial Sequence
  Description of Artificial Sequence: Synthetic oligonucleotide
  Sense strand starting at position 720 of SEQ ID NO: 1880437
aggcaaucaguauguugaa

SEQ ID NO: 1967047 - RNA, 19 nt, Artificial Sequence
  Description of Artificial Sequence: Synthetic oligonucleotide
  Antisense strand to SEQ ID NO: 1967046
uucaacauacugauugccu

SEQ ID NO: 1967048 - RNA, 19 nt, Artificial Sequence
  Description of Artificial Sequence: Synthetic oligonucleotide
  Sense strand starting at position 842 of SEQ ID NO: 1880437
auguauauacaguggagua

SEQ ID NO: 1967049 - RNA, 19 nt, Artificial Sequence
  Description of Artificial Sequence: Synthetic oligonucleotide
  Antisense strand to SEQ ID NO: 1967048
uacuccacuguauauacau

SEQ ID NO: 1967050 - RNA, 19 nt, Artificial Sequence
  Description of Artificial Sequence: Synthetic oligonucleotide
  Sense strand starting at position 892 of SEQ ID NO: 1880437
ugucauuugcagcggcaua

SEQ ID NO: 1967051 - RNA, 19 nt, Artificial Sequence
  Description of Artificial Sequence: Synthetic oligonucleotide
  Antisense strand to SEQ ID NO: 1967050
uaugccgcugcaaaugaca

SEQ ID NO: 1967052 - RNA, 19 nt, Artificial Sequence
  Description of Artificial Sequence: Synthetic oligonucleotide
  Sense strand starting at position 1209 of SEQ ID NO: 1880437
uggaauguucccgacacaa

SEQ ID NO: 1967053 - RNA, 19 nt, Artificial Sequence
  Description of Artificial Sequence: Synthetic oligonucleotide
  Antisense strand to SEQ ID NO: 1967052
uugugucgggaacauucca

SEQ ID NO: 1967054 - RNA, 19 nt, Artificial Sequence
  Description of Artificial Sequence: Synthetic oligonucleotide
  Sense strand starting at position 1241 of SEQ ID NO: 1880437
guuugaggucuuggauauc

SEQ ID NO: 1967055 - RNA, 19 nt, Artificial Sequence
  Description of Artificial Sequence: Synthetic oligonucleotide
  Antisense strand to SEQ ID NO: 1967054
gauauccaagaccucaaac

SEQ ID NO: 1967056 - RNA, 19 nt, Artificial Sequence
  Description of Artificial Sequence: Synthetic oligonucleotide
  Sense strand starting at position 1247 of SEQ ID NO: 1880437
ggucuuggauaucccaauu

SEQ ID NO: 1967057 - RNA, 19 nt, Artificial Sequence
  Description of Artificial Sequence: Synthetic oligonucleotide
  Antisense strand to SEQ ID NO: 1967056
aauugggauauccaagacc

SEQ ID NO: 1967058 - RNA, 19 nt, Artificial Sequence
  Description of Artificial Sequence: Synthetic oligonucleotide
  Sense strand starting at position 1344 of SEQ ID NO: 1880437
aguuuagaaauaggugaca

SEQ ID NO: 1967059 - RNA, 19 nt, Artificial Sequence
  Description of Artificial Sequence: Synthetic oligonucleotide
  Antisense strand to SEQ ID NO: 1967058
ugucaccuauuucuaaacu

SEQ ID NO: 1967060 - RNA, 19 nt, Artificial Sequence
  Description of Artificial Sequence: Synthetic oligonucleotide
  Sense strand starting at position 1400 of SEQ ID NO: 1880437
aggacugugugaguaaaug

SEQ ID NO: 1967061 - RNA, 19 nt, Artificial Sequence
  Description of Artificial Sequence: Synthetic oligonucleotide
  Antisense strand to SEQ ID NO: 1967060
cauuuacucacacaguccu

SEQ ID NO: 1967062 - RNA, 19 nt, Artificial Sequence
  Description of Artificial Sequence: Synthetic oligonucleotide
  Sense strand starting at position 1425 of SEQ ID NO: 1880437
cugagauuaccugagccuu

SEQ ID NO: 1967063 - RNA, 19 nt, Artificial Sequence
  Description of Artificial Sequence: Synthetic oligonucleotide
  Antisense strand to SEQ ID NO: 1967062
aaggcucagguaaucucag

SEQ ID NO: 1967064 - RNA, 19 nt, Artificial Sequence
  Description of Artificial Sequence: Synthetic oligonucleotide
  Sense strand starting at position 2043 of SEQ ID NO: 1880437
agcagugaucucgggagag

SEQ ID NO: 1967065 - RNA, 19 nt, Artificial Sequence
  Description of Artificial Sequence: Synthetic oligonucleotide
  Antisense strand to SEQ ID NO: 1967064
cucucccgagaucacugcu

SEQ ID NO: 1967066 - RNA, 19 nt, Artificial Sequence
  Description of Artificial Sequence: Synthetic oligonucleotide
  Sense strand starting at position 2047 of SEQ ID NO: 1880437
gugaucucgggagagaagu

SEQ ID NO: 1967067 - RNA, 19 nt, Artificial Sequence
  Description of Artificial Sequence: Synthetic oligonucleotide
  Antisense strand to SEQ ID NO: 1967066
acuucucucccgagaucac

SEQ ID NO: 1967068 - RNA, 19 nt, Artificial Sequence
  Description of Artificial Sequence: Synthetic oligonucleotide
  Sense strand starting at position 2069 of SEQ ID NO: 1880437
ccaucugucuccuuaugau

SEQ ID NO: 1967069 - RNA, 19 nt, Artificial Sequence
  Description of Artificial Sequence: Synthetic oligonucleotide
  Antisense strand to SEQ ID NO: 1967068
aucauaaggagacagaugg

SEQ ID NO: 1967070 - RNA, 19 nt, Artificial Sequence
  Description of Artificial Sequence: Synthetic oligonucleotide
  Sense strand starting at position 2174 of SEQ ID NO: 1880437
ucagucggguugguauaaa

SEQ ID NO: 1967071 - RNA, 19 nt, Artificial Sequence
  Description of Artificial Sequence: Synthetic oligonucleotide
  Antisense strand to SEQ ID NO: 1967070
uuuauaccaacccgacuga

SEQ ID NO: 1967072 - RNA, 19 nt, Artificial Sequence
  Description of Artificial Sequence: Synthetic oligonucleotide
  Sense strand starting at position 2203 of SEQ ID NO: 1880437
uuaucugugucuccagacu

SEQ ID NO: 1967073 - RNA, 19 nt, Artificial Sequence
  Description of Artificial Sequence: Synthetic oligonucleotide
  Antisense strand to SEQ ID NO: 1967072
agucuggagacacagauaa

SEQ ID NO: 1967074 - RNA, 19 nt, Artificial Sequence
  Description of Artificial Sequence: Synthetic oligonucleotide
  Sense strand starting at position 2366 of SEQ ID NO: 1880437
gcaguaaagagauacgucu

SEQ ID NO: 1967075 - RNA, 19 nt, Artificial Sequence
  Description of Artificial Sequence: Synthetic oligonucleotide
  Antisense strand to SEQ ID NO: 1967074
agacguaucucuuuacugc

SEQ ID NO: 1967076 - RNA, 19 nt, Artificial Sequence
  Description of Artificial Sequence: Synthetic oligonucleotide
  Sense strand starting at position 2450 of SEQ ID NO: 1880437
gggagaaugucagcauauc

SEQ ID NO: 1967077 - RNA, 19 nt, Artificial Sequence
  Description of Artificial Sequence: Synthetic oligonucleotide
  Antisense strand to SEQ ID NO: 1967076
gauaugcugacauucuccc

SEQ ID NO: 1967078 - RNA, 19 nt, Artificial Sequence
  Description of Artificial Sequence: Synthetic oligonucleotide
  Sense strand starting at position 2494 of SEQ ID NO: 1880437
caaauccggucucugaaua

SEQ ID NO: 1967079 - RNA, 19 nt, Artificial Sequence
  Description of Artificial Sequence: Synthetic oligonucleotide
  Antisense strand to SEQ ID NO: 1967078
uauucagagaccggauuug

SEQ ID NO: 1967080 - RNA, 19 nt, Artificial Sequence
  Description of Artificial Sequence: Synthetic oligonucleotide
  Sense strand starting at position 2808 of SEQ ID NO: 1880437
ggcaguccugcacaagaca

SEQ ID NO: 1967081 - RNA, 19 nt, Artificial Sequence
  Description of Artificial Sequence: Synthetic oligonucleotide
  Antisense strand to SEQ ID NO: 1967080
ugucuugugcaggacugcc

SEQ ID NO: 1967082 - RNA, 19 nt, Artificial Sequence
  Description of Artificial Sequence: Synthetic oligonucleotide
  Sense strand starting at position 2957 of SEQ ID NO: 1880437
uggugaaauugccucaaag

SEQ ID NO: 1967083 - RNA, 19 nt, Artificial Sequence
  Description of Artificial Sequence: Synthetic oligonucleotide
  Antisense strand to SEQ ID NO: 1967082
cuuugaggcaauuucacca

SEQ ID NO: 1967084 - RNA, 19 nt, Artificial Sequence
  Description of Artificial Sequence: Synthetic oligonucleotide
  Sense strand starting at position 2967 of SEQ ID NO: 1880437
gccucaaagggugguuauu

SEQ ID NO: 1967085 - RNA, 19 nt, Artificial Sequence
  Description of Artificial Sequence: Synthetic oligonucleotide
  Antisense strand to SEQ ID NO: 1967084
aauaaccacccuuugaggc

SEQ ID NO: 1967086 - RNA, 19 nt, Artificial Sequence
  Description of Artificial Sequence: Synthetic oligonucleotide
  Sense strand starting at position 3018 of SEQ ID NO: 1880437
agcaucuuguuuguagaaa

SEQ ID NO: 1967087 - RNA, 19 nt, Artificial Sequence
  Description of Artificial Sequence: Synthetic oligonucleotide
  Antisense strand to SEQ ID NO: 1967086
uuucuacaaacaagaugcu

SEQ ID NO: 1967088 - RNA, 19 nt, Artificial Sequence
  Description of Artificial Sequence: Synthetic oligonucleotide
  Sense strand starting at position 3264 of SEQ ID NO: 1880437
agacuuaucuuuccuguca

SEQ ID NO: 1967089 - RNA, 19 nt, Artificial Sequence
  Description of Artificial Sequence: Synthetic oligonucleotide
  Antisense strand to SEQ ID NO: 1967088
ugacaggaaagauaagucu

SEQ ID NO: 1967090 - RNA, 19 nt, Artificial Sequence
  Description of Artificial Sequence: Synthetic oligonucleotide
  Sense strand starting at position 3293 of SEQ ID NO: 1880437
uccuuaauuuaauggagau

SEQ ID NO: 1967091 - RNA, 19 nt, Artificial Sequence
  Description of Artificial Sequence: Synthetic oligonucleotide
  Antisense strand to SEQ ID NO: 1967090
aucuccauuaaauuaagga

SEQ ID NO: 1967092 - RNA, 19 nt, Artificial Sequence
  Description of Artificial Sequence: Synthetic oligonucleotide
  Sense strand starting at position 3368 of SEQ ID NO: 1880437
uuaguaaugcuuuaucagu

SEQ ID NO: 1967093 - RNA, 19 nt, Artificial Sequence
  Description of Artificial Sequence: Synthetic oligonucleotide
  Antisense strand to SEQ ID NO: 1967092
acugauaaagcauuacuaa

SEQ ID NO: 1967094 - RNA, 19 nt, Artificial Sequence
  Description of Artificial Sequence: Synthetic oligonucleotide
  Sense strand starting at position 3370 of SEQ ID NO: 1880437
aguaaugcuuuaucaguua

SEQ ID NO: 1967095 - RNA, 19 nt, Artificial Sequence
  Description of Artificial Sequence: Synthetic oligonucleotide
  Antisense strand to SEQ ID NO: 1967094
uaacugauaaagcauuacu

SEQ ID NO: 1967096 - RNA, 19 nt, Artificial Sequence
  Description of Artificial Sequence: Synthetic oligonucleotide
  Sense strand starting at position 3393 of SEQ ID NO: 1880437
gaaagaugaugacugcuuu

SEQ ID NO: 1967097 - RNA, 19 nt, Artificial Sequence
  Description of Artificial Sequence: Synthetic oligonucleotide
  Antisense strand to SEQ ID NO: 1967096
aaagcagucaucaucuuuc

SEQ ID NO: 1967098 - RNA, 19 nt, Artificial Sequence
  Description of Artificial Sequence: Synthetic oligonucleotide
  Sense strand starting at position 3459 of SEQ ID NO: 1880437
uauuuauccgaguguaugu

SEQ ID NO: 1967099 - RNA, 19 nt, Artificial Sequence
  Description of Artificial Sequence: Synthetic oligonucleotide
  Antisense strand to SEQ ID NO: 1967098
acauacacucggauaaaua

SEQ ID NO: 1967100 - RNA, 19 nt, Artificial Sequence
  Description of Artificial Sequence: Synthetic oligonucleotide
  Sense strand starting at position 3461 of SEQ ID NO: 1880437
uuuauccgaguguauguua

SEQ ID NO: 1967101 - RNA, 19 nt, Artificial Sequence
  Description of Artificial Sequence: Synthetic oligonucleotide
  Antisense strand to SEQ ID NO: 1967100
uaacauacacucggauaaa

SEQ ID NO: 1967102 - RNA, 19 nt, Artificial Sequence
  Description of Artificial Sequence: Synthetic oligonucleotide
  Sense strand starting at position 3698 of SEQ ID NO: 1880437
agaagcauguucuuguuaa

SEQ ID NO: 1967103 - RNA, 19 nt, Artificial Sequence
  Description of Artificial Sequence: Synthetic oligonucleotide
  Antisense strand to SEQ ID NO: 1967102
uuaacaagaacaugcuucu

SEQ ID NO: 1967104 - RNA, 19 nt, Artificial Sequence
  Description of Artificial Sequence: Synthetic oligonucleotide
  Sense strand starting at position 3746 of SEQ ID NO: 1880437
ggcuuacaucugugcauuu

SEQ ID NO: 1967105 - RNA, 19 nt, Artificial Sequence
  Description of Artificial Sequence: Synthetic oligonucleotide
  Antisense strand to SEQ ID NO: 1967104
aaaugcacagauguaagcc

SEQ ID NO: 1967106 - RNA, 19 nt, Artificial Sequence
  Description of Artificial Sequence: Synthetic oligonucleotide
  Sense strand starting at position 3747 of SEQ ID NO: 1880437
gcuuacaucugugcauuua

SEQ ID NO: 1967107 - RNA, 19 nt, Artificial Sequence
  Description of Artificial Sequence: Synthetic oligonucleotide
  Antisense strand to SEQ ID NO: 1967106
uaaaugcacagauguaagc

SEQ ID NO: 1967108 - RNA, 19 nt, Artificial Sequence
  Description of Artificial Sequence: Synthetic oligonucleotide
  Sense strand starting at position 3779 of SEQ ID NO: 1880437
aaggcaucuugcucaguaa

SEQ ID NO: 1967109 - RNA, 19 nt, Artificial Sequence
  Description of Artificial Sequence: Synthetic oligonucleotide
  Antisense strand to SEQ ID NO: 1967108
uuacugagcaagaugccuu

SEQ ID NO: 1967110 - RNA, 19 nt, Artificial Sequence
  Description of Artificial Sequence: Synthetic oligonucleotide
  Sense strand starting at position 3780 of SEQ ID NO: 1880437
aggcaucuugcucaguaaa

SEQ ID NO: 1967111 - RNA, 19 nt, Artificial Sequence
  Description of Artificial Sequence: Synthetic oligonucleotide
  Antisense strand to SEQ ID NO: 1967110
uuuacugagcaagaugccu

SEQ ID NO: 1967112 - RNA, 19 nt, Artificial Sequence
  Description of Artificial Sequence: Synthetic oligonucleotide
  Sense strand starting at position 3944 of SEQ ID NO: 1880437
ggagcauucuccucagcaa

SEQ ID NO: 1967113 - RNA, 19 nt, Artificial Sequence
  Description of Artificial Sequence: Synthetic oligonucleotide
  Antisense strand to SEQ ID NO: 1967112
uugcugaggagaaugcucc

SEQ ID NO: 1967114 - RNA, 19 nt, Artificial Sequence
  Description of Artificial Sequence: Synthetic oligonucleotide
  Sense strand starting at position 50 of SEQ ID NO: 1880438
gccacagucuucuugagga

SEQ ID NO: 1967115 - RNA, 19 nt, Artificial Sequence
  Description of Artificial Sequence: Synthetic oligonucleotide
  Antisense strand to SEQ ID NO: 1967114
uccucaagaagacuguggc

SEQ ID NO: 1967116 - RNA, 19 nt, Artificial Sequence
  Description of Artificial Sequence: Synthetic oligonucleotide
  Sense strand starting at position 99 of SEQ ID NO: 1880438
gucaucuucccagaaauug

SEQ ID NO: 1967117 - RNA, 19 nt, Artificial Sequence
  Description of Artificial Sequence: Synthetic oligonucleotide
  Antisense strand to SEQ ID NO: 1967116
caauuucugggaagaugac

SEQ ID NO: 1967118 - RNA, 19 nt, Artificial Sequence
  Description of Artificial Sequence: Synthetic oligonucleotide
  Sense strand starting at position 176 of SEQ ID NO: 1880438
ugcacuagacucuggauau

SEQ ID NO: 1967119 - RNA, 19 nt, Artificial Sequence
  Description of Artificial Sequence: Synthetic oligonucleotide
  Antisense strand to SEQ ID NO: 1967118
auauccagagucuagugca

SEQ ID NO: 1967120 - RNA, 19 nt, Artificial Sequence
  Description of Artificial Sequence: Synthetic oligonucleotide
  Sense strand starting at position 266 of SEQ ID NO: 1880438
guacaaucuuauguaauag

SEQ ID NO: 1967121 - RNA, 19 nt, Artificial Sequence
  Description of Artificial Sequence: Synthetic oligonucleotide
  Antisense strand to SEQ ID NO: 1967120
cuauuacauaagauuguac

SEQ ID NO: 1967122 - RNA, 19 nt, Artificial Sequence
  Description of Artificial Sequence: Synthetic oligonucleotide
  Sense strand starting at position 425 of SEQ ID NO: 1880438
uaagcagaggcaugaagau

SEQ ID NO: 1967123 - RNA, 19 nt, Artificial Sequence
  Description of Artificial Sequence: Synthetic oligonucleotide
  Antisense strand to SEQ ID NO: 1967122
aucuucaugccucugcuua

SEQ ID NO: 1967124 - RNA, 19 nt, Artificial Sequence
  Description of Artificial Sequence: Synthetic oligonucleotide
  Sense strand starting at position 480 of SEQ ID NO: 1880438
auaguugucacggaagcaa

SEQ ID NO: 1967125 - RNA, 19 nt, Artificial Sequence
  Description of Artificial Sequence: Synthetic oligonucleotide
  Antisense strand to SEQ ID NO: 1967124
uugcuuccgugacaacuau

SEQ ID NO: 1967126 - RNA, 19 nt, Artificial Sequence
  Description of Artificial Sequence: Synthetic oligonucleotide
  Sense strand starting at position 555 of SEQ ID NO: 1880438
gagaucacguccuccaaua

SEQ ID NO: 1967127 - RNA, 19 nt, Artificial Sequence
  Description of Artificial Sequence: Synthetic oligonucleotide
  Antisense strand to SEQ ID NO: 1967126
uauuggaggacgugaucuc

SEQ ID NO: 1967128 - RNA, 19 nt, Artificial Sequence
  Description of Artificial Sequence: Synthetic oligonucleotide
  Sense strand starting at position 627 of SEQ ID NO: 1880438
ggaggcaagugagauuuaa

SEQ ID NO: 1967129 - RNA, 19 nt, Artificial Sequence
  Description of Artificial Sequence: Synthetic oligonucleotide
  Antisense strand to SEQ ID NO: 1967128
uuaaaucucacuugccucc

SEQ ID NO: 1967130 - RNA, 19 nt, Artificial Sequence
  Description of Artificial Sequence: Synthetic oligonucleotide
  Sense strand starting at position 760 of SEQ ID NO: 1880438
guggaucagucauccugga

SEQ ID NO: 1967131 - RNA, 19 nt, Artificial Sequence
  Description of Artificial Sequence: Synthetic oligonucleotide
  Antisense strand to SEQ ID NO: 1967130
uccaggaugacugauccac

SEQ ID NO: 1967132 - RNA, 19 nt, Artificial Sequence
  Description of Artificial Sequence: Synthetic oligonucleotide
  Sense strand starting at position 764 of SEQ ID NO: 1880438
aucagucauccuggagauu

SEQ ID NO: 1967133 - RNA, 19 nt, Artificial Sequence
  Description of Artificial Sequence: Synthetic oligonucleotide
  Antisense strand to SEQ ID NO: 1967132
aaucuccaggaugacugau

SEQ ID NO: 1967134 - RNA, 19 nt, Artificial Sequence
  Description of Artificial Sequence: Synthetic oligonucleotide
  Sense strand starting at position 798 of SEQ ID NO: 1880438
auggcucagagucaucaga

SEQ ID NO: 1967135 - RNA, 19 nt, Artificial Sequence
  Description of Artificial Sequence: Synthetic oligonucleotide
  Antisense strand to SEQ ID NO: 1967134
ucugaugacucugagccau

SEQ ID NO: 1967136 - RNA, 19 nt, Artificial Sequence
  Description of Artificial Sequence: Synthetic oligonucleotide
  Sense strand starting at position 800 of SEQ ID NO: 1880438
ggcucagagucaucagaac

SEQ ID NO: 1967137 - RNA, 19 nt, Artificial Sequence
  Description of Artificial Sequence: Synthetic oligonucleotide
  Antisense strand to SEQ ID NO: 1967136
guucugaugacucugagcc

SEQ ID NO: 1967138 - RNA, 19 nt, Artificial Sequence
  Description of Artificial Sequence: Synthetic oligonucleotide
  Sense strand starting at position 998 of SEQ ID NO: 1880438
ggcucacaucugcacugau

SEQ ID NO: 1967139 - RNA, 19 nt, Artificial Sequence
  Description of Artificial Sequence: Synthetic oligonucleotide
  Antisense strand to SEQ ID NO: 1967138
aucagugcagaugugagcc

SEQ ID NO: 1967140 - RNA, 19 nt, Artificial Sequence
  Description of Artificial Sequence: Synthetic oligonucleotide
  Sense strand starting at position 1159 of SEQ ID NO: 1880438
cacagaguccauggguaau

SEQ ID NO: 1967141 - RNA, 19 nt, Artificial Sequence
  Description of Artificial Sequence: Synthetic oligonucleotide
  Antisense strand to SEQ ID NO: 1967140
auuacccauggacucugug

SEQ ID NO: 1967142 - RNA, 19 nt, Artificial Sequence
  Description of Artificial Sequence: Synthetic oligonucleotide
  Sense strand starting at position 1256 of SEQ ID NO: 1880438
ggaguuugaaccugucaug

SEQ ID NO: 1967143 - RNA, 19 nt, Artificial Sequence
  Description of Artificial Sequence: Synthetic oligonucleotide
  Antisense strand to SEQ ID NO: 1967142
caugacagguucaaacucc

SEQ ID NO: 1967144 - RNA, 19 nt, Artificial Sequence
  Description of Artificial Sequence: Synthetic oligonucleotide
  Sense strand starting at position 1262 of SEQ ID NO: 1880438
ugaaccugucauggcaaau

SEQ ID NO: 1967145 - RNA, 19 nt, Artificial Sequence
  Description of Artificial Sequence: Synthetic oligonucleotide
  Antisense strand to SEQ ID NO: 1967144
auuugccaugacagguuca

SEQ ID NO: 1967146 - RNA, 19 nt, Artificial Sequence
  Description of Artificial Sequence: Synthetic oligonucleotide
  Sense strand starting at position 1420 of SEQ ID NO: 1880438
ccagcauuccaugaugagu

SEQ ID NO: 1967147 - RNA, 19 nt, Artificial Sequence
  Description of Artificial Sequence: Synthetic oligonucleotide
  Antisense strand to SEQ ID NO: 1967146
acucaucauggaaugcugg

SEQ ID NO: 1967148 - RNA, 19 nt, Artificial Sequence
  Description of Artificial Sequence: Synthetic oligonucleotide
  Sense strand starting at position 1532 of SEQ ID NO: 1880438
uuggcuggauccucucuaa

SEQ ID NO: 1967149 - RNA, 19 nt, Artificial Sequence
  Description of Artificial Sequence: Synthetic oligonucleotide
  Antisense strand to SEQ ID NO: 1967148
uuagagaggauccagccaa

SEQ ID NO: 1967150 - RNA, 19 nt, Artificial Sequence
  Description of Artificial Sequence: Synthetic oligonucleotide
  Sense strand starting at position 1653 of SEQ ID NO: 1880438
gcaaaucaaucugucugau

SEQ ID NO: 1967151 - RNA, 19 nt, Artificial Sequence
  Description of Artificial Sequence: Synthetic oligonucleotide
  Antisense strand to SEQ ID NO: 1967150
aucagacagauugauuugc

SEQ ID NO: 1967152 - RNA, 19 nt, Artificial Sequence
  Description of Artificial Sequence: Synthetic oligonucleotide
  Sense strand starting at position 2022 of SEQ ID NO: 1880438
gcgugauauaacucgcucu

SEQ ID NO: 1967153 - RNA, 19 nt, Artificial Sequence
  Description of Artificial Sequence: Synthetic oligonucleotide
  Antisense strand to SEQ ID NO: 1967152
agagcgaguuauaucacgc

SEQ ID NO: 1967154 - RNA, 19 nt, Artificial Sequence
  Description of Artificial Sequence: Synthetic oligonucleotide
  Sense strand starting at position 2309 of SEQ ID NO: 1880438
uuauaaagagucuaguguu

SEQ ID NO: 1967155 - RNA, 19 nt, Artificial Sequence
  Description of Artificial Sequence: Synthetic oligonucleotide
  Antisense strand to SEQ ID NO: 1967154
aacacuagacucuuuauaa

SEQ ID NO: 1967156 - RNA, 19 nt, Artificial Sequence
  Description of Artificial Sequence: Synthetic oligonucleotide
  Sense strand starting at position 2337 of SEQ ID NO: 1880438
auaccuaucgauugaaauc

SEQ ID NO: 1967157 - RNA, 19 nt, Artificial Sequence
  Description of Artificial Sequence: Synthetic oligonucleotide
  Antisense strand to SEQ ID NO: 1967156
gauuucaaucgauagguau

SEQ ID NO: 1967158 - RNA, 19 nt, Artificial Sequence
  Description of Artificial Sequence: Synthetic oligonucleotide
  Sense strand starting at position 2488 of SEQ ID NO: 1880438
aguaaccauguaggaaauu

SEQ ID NO: 1967159 - RNA, 19 nt, Artificial Sequence
  Description of Artificial Sequence: Synthetic oligonucleotide
  Antisense strand to SEQ ID NO: 1967158
aauuuccuacaugguuacu

SEQ ID NO: 1967160 - RNA, 19 nt, Artificial Sequence
  Description of Artificial Sequence: Synthetic oligonucleotide
  Sense strand starting at position 2526 of SEQ ID NO: 1880438
uuaaucaugucguuggaag

SEQ ID NO: 1967161 - RNA, 19 nt, Artificial Sequence
  Description of Artificial Sequence: Synthetic oligonucleotide
  Antisense strand to SEQ ID NO: 1967160
cuuccaacgacaugauuaa

SEQ ID NO: 1967162 - RNA, 19 nt, Artificial Sequence
  Description of Artificial Sequence: Synthetic oligonucleotide
  Sense strand starting at position 2527 of SEQ ID NO: 1880438
uaaucaugucguuggaaga

SEQ ID NO: 1967163 - RNA, 19 nt, Artificial Sequence
  Description of Artificial Sequence: Synthetic oligonucleotide
  Antisense strand to SEQ ID NO: 1967162
ucuuccaacgacaugauua

SEQ ID NO: 1967164 - RNA, 19 nt, Artificial Sequence
  Description of Artificial Sequence: Synthetic oligonucleotide
  Sense strand starting at position 2528 of SEQ ID NO: 1880438
aaucaugucguuggaagaa

SEQ ID NO: 1967165 - RNA, 19 nt, Artificial Sequence
  Description of Artificial Sequence: Synthetic oligonucleotide
  Antisense strand to SEQ ID NO: 1967164
uucuuccaacgacaugauu

SEQ ID NO: 1967166 - RNA, 19 nt, Artificial Sequence
  Description of Artificial Sequence: Synthetic oligonucleotide
  Sense strand starting at position 2601 of SEQ ID NO: 1880438
guuccaguuccagaaauaa

SEQ ID NO: 1967167 - RNA, 19 nt, Artificial Sequence
  Description of Artificial Sequence: Synthetic oligonucleotide
  Antisense strand to SEQ ID NO: 1967166
uuauuucuggaacuggaac

SEQ ID NO: 1967168 - RNA, 19 nt, Artificial Sequence
  Description of Artificial Sequence: Synthetic oligonucleotide
  Sense strand starting at position 2852 of SEQ ID NO: 1880438
cucugugacccggacaaau

SEQ ID NO: 1967169 - RNA, 19 nt, Artificial Sequence
  Description of Artificial Sequence: Synthetic oligonucleotide
  Antisense strand to SEQ ID NO: 1967168
auuuguccgggucacagag

SEQ ID NO: 1967170 - RNA, 19 nt, Artificial Sequence
  Description of Artificial Sequence: Synthetic oligonucleotide
  Sense strand starting at position 2938 of SEQ ID NO: 1880438
ugaugcgucgcuguuaaga

SEQ ID NO: 1967171 - RNA, 19 nt, Artificial Sequence
  Description of Artificial Sequence: Synthetic oligonucleotide
  Antisense strand to SEQ ID NO: 1967170
ucuuaacagcgacgcauca

SEQ ID NO: 1967172 - RNA, 19 nt, Artificial Sequence
  Description of Artificial Sequence: Synthetic oligonucleotide
  Sense strand starting at position 3184 of SEQ ID NO: 1880438
ccacaucucuguguuagaa

SEQ ID NO: 1967173 - RNA, 19 nt, Artificial Sequence
  Description of Artificial Sequence: Synthetic oligonucleotide
  Antisense strand to SEQ ID NO: 1967172
uucuaacacagagaugugg

SEQ ID NO: 1967174 - RNA, 19 nt, Artificial Sequence
  Description of Artificial Sequence: Synthetic oligonucleotide
  Sense strand starting at position 3245 of SEQ ID NO: 1880438
uacuguaugccagaguacu

SEQ ID NO: 1967175 - RNA, 19 nt, Artificial Sequence
  Description of Artificial Sequence: Synthetic oligonucleotide
  Antisense strand to SEQ ID NO: 1967174
aguacucuggcauacagua

SEQ ID NO: 1967176 - RNA, 19 nt, Artificial Sequence
  Description of Artificial Sequence: Synthetic oligonucleotide
  Sense strand starting at position 3251 of SEQ ID NO: 1880438
augccagaguacucucuaa

SEQ ID NO: 1967177 - RNA, 19 nt, Artificial Sequence
  Description of Artificial Sequence: Synthetic oligonucleotide
  Antisense strand to SEQ ID NO: 1967176
uuagagaguacucuggcau

SEQ ID NO: 1967178 - RNA, 19 nt, Artificial Sequence
  Description of Artificial Sequence: Synthetic oligonucleotide
  Sense strand starting at position 3364 of SEQ ID NO: 1880438
aggugauuccaaugcauaa

SEQ ID NO: 1967179 - RNA, 19 nt, Artificial Sequence
  Description of Artificial Sequence: Synthetic oligonucleotide
  Antisense strand to SEQ ID NO: 1967178
uuaugcauuggaaucaccu

SEQ ID NO: 1967180 - RNA, 19 nt, Artificial Sequence
  Description of Artificial Sequence: Synthetic oligonucleotide
  Sense strand starting at position 3406 of SEQ ID NO: 1880438
uauagaugugguuaguguu

SEQ ID NO: 1967181 - RNA, 19 nt, Artificial Sequence
  Description of Artificial Sequence: Synthetic oligonucleotide
  Antisense strand to SEQ ID NO: 1967180
aacacuaaccacaucuaua

SEQ ID NO: 1967182 - RNA, 19 nt, Artificial Sequence
  Description of Artificial Sequence: Synthetic oligonucleotide
  Sense strand starting at position 3420 of SEQ ID NO: 1880438
guguuaaauccaggaacca

SEQ ID NO: 1967183 - RNA, 19 nt, Artificial Sequence
  Description of Artificial Sequence: Synthetic oligonucleotide
  Antisense strand to SEQ ID NO: 1967182
ugguuccuggauuuaacac

SEQ ID NO: 1967184 - RNA, 19 nt, Artificial Sequence
  Description of Artificial Sequence: Synthetic oligonucleotide
  Sense strand starting at position 3465 of SEQ ID NO: 1880438
augucaauugcccaagcua

SEQ ID NO: 1967185 - RNA, 19 nt, Artificial Sequence
  Description of Artificial Sequence: Synthetic oligonucleotide
  Antisense strand to SEQ ID NO: 1967184
uagcuugggcaauugacau

SEQ ID NO: 1967186 - RNA, 19 nt, Artificial Sequence
  Description of Artificial Sequence: Synthetic oligonucleotide
  Sense strand starting at position 3660 of SEQ ID NO: 1880438
gacuuuauaggagggcaau

SEQ ID NO: 1967187 - RNA, 19 nt, Artificial Sequence
  Description of Artificial Sequence: Synthetic oligonucleotide
  Antisense strand to SEQ ID NO: 1967186
auugcccuccuauaaaguc

SEQ ID NO: 1967188 - RNA, 19 nt, Artificial Sequence
  Description of Artificial Sequence: Synthetic oligonucleotide
  Sense strand starting at position 3661 of SEQ ID NO: 1880438
acuuuauaggagggcaaua

SEQ ID NO: 1967189 - RNA, 19 nt, Artificial Sequence
  Description of Artificial Sequence: Synthetic oligonucleotide
  Antisense strand to SEQ ID NO: 1967188
uauugcccuccuauaaagu

SEQ ID NO: 1967190 - RNA, 19 nt, Artificial Sequence
  Description of Artificial Sequence: Synthetic oligonucleotide
  Sense strand starting at position 3673 of SEQ ID NO: 1880438
ggcaauagagauuggucuu

SEQ ID NO: 1967191 - RNA, 19 nt, Artificial Sequence
  Description of Artificial Sequence: Synthetic oligonucleotide
  Antisense strand to SEQ ID NO: 1967190
aagaccaaucucuauugcc

SEQ ID NO: 1967192 - RNA, 19 nt, Artificial Sequence
  Description of Artificial Sequence: Synthetic oligonucleotide
  Sense strand starting at position 3674 of SEQ ID NO: 1880438
gcaauagagauuggucuuu

SEQ ID NO: 1967193 - RNA, 19 nt, Artificial Sequence
  Description of Artificial Sequence: Synthetic oligonucleotide
  Antisense strand to SEQ ID NO: 1967192
aaagaccaaucucuauugc

SEQ ID NO: 1967194 - RNA, 19 nt, Artificial Sequence
  Description of Artificial Sequence: Synthetic oligonucleotide
  Sense strand starting at position 24 of SEQ ID NO: 1880439
cgcucagagcagcauuauu

SEQ ID NO: 1967195 - RNA, 19 nt, Artificial Sequence
  Description of Artificial Sequence: Synthetic oligonucleotide
  Antisense strand to SEQ ID NO: 1967194
aauaaugcugcucugagcg

SEQ ID NO: 1967196 - RNA, 19 nt, Artificial Sequence
  Description of Artificial Sequence: Synthetic oligonucleotide
  Sense strand starting at position 110 of SEQ ID NO: 1880439
guagguaaguaacagaaua

SEQ ID NO: 1967197 - RNA, 19 nt, Artificial Sequence
  Description of Artificial Sequence: Synthetic oligonucleotide
  Antisense strand to SEQ ID NO: 1967196
uauucuguuacuuaccuac

SEQ ID NO: 1967198 - RNA, 19 nt, Artificial Sequence
  Description of Artificial Sequence: Synthetic oligonucleotide
  Sense strand starting at position 146 of SEQ ID NO: 1880439
guaacaagcuacugauaca

SEQ ID NO: 1967199 - RNA, 19 nt, Artificial Sequence
  Description of Artificial Sequence: Synthetic oligonucleotide
  Antisense strand to SEQ ID NO: 1967198
uguaucaguagcuuguuac

SEQ ID NO: 1967200 - RNA, 19 nt, Artificial Sequence
  Description of Artificial Sequence: Synthetic oligonucleotide
  Sense strand starting at position 184 of SEQ ID NO: 1880439
ccuugcaaacuuugauaga

SEQ ID NO: 1967201 - RNA, 19 nt, Artificial Sequence
  Description of Artificial Sequence: Synthetic oligonucleotide
  Antisense strand to SEQ ID NO: 1967200
ucuaucaaaguuugcaagg

SEQ ID NO: 1967202 - RNA, 19 nt, Artificial Sequence
  Description of Artificial Sequence: Synthetic oligonucleotide
  Sense strand starting at position 185 of SEQ ID NO: 1880439
cuugcaaacuuugauagaa

SEQ ID NO: 1967203 - RNA, 19 nt, Artificial Sequence
  Description of Artificial Sequence: Synthetic oligonucleotide
  Antisense strand to SEQ ID NO: 1967202
uucuaucaaaguuugcaag

SEQ ID NO: 1967204 - RNA, 19 nt, Artificial Sequence
  Description of Artificial Sequence: Synthetic oligonucleotide
  Sense strand starting at position 217 of SEQ ID NO: 1880439
gacccaguguugugugacu

SEQ ID NO: 1967205 - RNA, 19 nt, Artificial Sequence
  Description of Artificial Sequence: Synthetic oligonucleotide
  Antisense strand to SEQ ID NO: 1967204
agucacacaacacuggguc

SEQ ID NO: 1967206 - RNA, 19 nt, Artificial Sequence
  Description of Artificial Sequence: Synthetic oligonucleotide
  Sense strand starting at position 222 of SEQ ID NO: 1880439
aguguugugugacuucauu

SEQ ID NO: 1967207 - RNA, 19 nt, Artificial Sequence
  Description of Artificial Sequence: Synthetic oligonucleotide
  Antisense strand to SEQ ID NO: 1967206
aaugaagucacacaacacu

SEQ ID NO: 1967208 - RNA, 19 nt, Artificial Sequence
  Description of Artificial Sequence: Synthetic oligonucleotide
  Sense strand starting at position 249 of SEQ ID NO: 1880439
uggucuagaauaggcaaau

SEQ ID NO: 1967209 - RNA, 19 nt, Artificial Sequence
  Description of Artificial Sequence: Synthetic oligonucleotide
  Antisense strand to SEQ ID NO: 1967208
auuugccuauucuagacca

SEQ ID NO: 1967210 - RNA, 19 nt, Artificial Sequence
  Description of Artificial Sequence: Synthetic oligonucleotide
  Sense strand starting at position 273 of SEQ ID NO: 1880439
gacugaaagugauuacgga

SEQ ID NO: 1967211 - RNA, 19 nt, Artificial Sequence
  Description of Artificial Sequence: Synthetic oligonucleotide
  Antisense strand to SEQ ID NO: 1967210
uccguaaucacuuucaguc

SEQ ID NO: 1967212 - RNA, 19 nt, Artificial Sequence
  Description of Artificial Sequence: Synthetic oligonucleotide
  Sense strand starting at position 277 of SEQ ID NO: 1880439
gaaagugauuacggauuuc

SEQ ID NO: 1967213 - RNA, 19 nt, Artificial Sequence
  Description of Artificial Sequence: Synthetic oligonucleotide
  Antisense strand to SEQ ID NO: 1967212
gaaauccguaaucacuuuc

SEQ ID NO: 1967214 - RNA, 19 nt, Artificial Sequence
  Description of Artificial Sequence: Synthetic oligonucleotide
  Sense strand starting at position 339 of SEQ ID NO: 1880439
gguaguaguuucuucugga

SEQ ID NO: 1967215 - RNA, 19 nt, Artificial Sequence
  Description of Artificial Sequence: Synthetic oligonucleotide
  Antisense strand to SEQ ID NO: 1967214
uccagaagaaacuacuacc

SEQ ID NO: 1967216 - RNA, 19 nt, Artificial Sequence
  Description of Artificial Sequence: Synthetic oligonucleotide
  Sense strand starting at position 340 of SEQ ID NO: 1880439
guaguaguuucuucuggag

SEQ ID NO: 1967217 - RNA, 19 nt, Artificial Sequence
  Description of Artificial Sequence: Synthetic oligonucleotide
  Antisense strand to SEQ ID NO: 1967216
cuccagaagaaacuacuac

SEQ ID NO: 1967218 - RNA, 19 nt, Artificial Sequence
  Description of Artificial Sequence: Synthetic oligonucleotide
  Sense strand starting at position 343 of SEQ ID NO: 1880439
guaguuucuucuggaguga

SEQ ID NO: 1967219 - RNA, 19 nt, Artificial Sequence
  Description of Artificial Sequence: Synthetic oligonucleotide
  Antisense strand to SEQ ID NO: 1967218
ucacuccagaagaaacuac

SEQ ID NO: 1967220 - RNA, 19 nt, Artificial Sequence
  Description of Artificial Sequence: Synthetic oligonucleotide
  Sense strand starting at position 344 of SEQ ID NO: 1880439
uaguuucuucuggagugau

SEQ ID NO: 1967221 - RNA, 19 nt, Artificial Sequence
  Description of Artificial Sequence: Synthetic oligonucleotide
  Antisense strand to SEQ ID NO: 1967220
aucacuccagaagaaacua

SEQ ID NO: 1967222 - RNA, 19 nt, Artificial Sequence
  Description of Artificial Sequence: Synthetic oligonucleotide
  Sense strand starting at position 347 of SEQ ID NO: 1880439
uuucuucuggagugaugaa

SEQ ID NO: 1967223 - RNA, 19 nt, Artificial Sequence
  Description of Artificial Sequence: Synthetic oligonucleotide
  Antisense strand to SEQ ID NO: 1967222
uucaucacuccagaagaaa

SEQ ID NO: 1967224 - RNA, 19 nt, Artificial Sequence
  Description of Artificial Sequence: Synthetic oligonucleotide
  Sense strand starting at position 354 of SEQ ID NO: 1880439
uggagugaugaauguucua

SEQ ID NO: 1967225 - RNA, 19 nt, Artificial Sequence
  Description of Artificial Sequence: Synthetic oligonucleotide
  Antisense strand to SEQ ID NO: 1967224
uagaacauucaucacucca

SEQ ID NO: 1967226 - RNA, 19 nt, Artificial Sequence
  Description of Artificial Sequence: Synthetic oligonucleotide
  Sense strand starting at position 513 of SEQ ID NO: 1880439
gccuuggagucggugagaa

SEQ ID NO: 1967227 - RNA, 19 nt, Artificial Sequence
  Description of Artificial Sequence: Synthetic oligonucleotide
  Antisense strand to SEQ ID NO: 1967226
uucucaccgacuccaaggc

SEQ ID NO: 1967228 - RNA, 19 nt, Artificial Sequence
  Description of Artificial Sequence: Synthetic oligonucleotide
  Sense strand starting at position 587 of SEQ ID NO: 1880439
ggcugugcgccacauacau

SEQ ID NO: 1967229 - RNA, 19 nt, Artificial Sequence
  Description of Artificial Sequence: Synthetic oligonucleotide
  Antisense strand to SEQ ID NO: 1967228
auguauguggcgcacagcc

SEQ ID NO: 1967230 - RNA, 19 nt, Artificial Sequence
  Description of Artificial Sequence: Synthetic oligonucleotide
  Sense strand starting at position 660 of SEQ ID NO: 1880439
gggcacuucugcgacguga

SEQ ID NO: 1967231 - RNA, 19 nt, Artificial Sequence
  Description of Artificial Sequence: Synthetic oligonucleotide
  Antisense strand to SEQ ID NO: 1967230
ucacgucgcagaagugccc

SEQ ID NO: 1967232 - RNA, 19 nt, Artificial Sequence
  Description of Artificial Sequence: Synthetic oligonucleotide
  Sense strand starting at position 662 of SEQ ID NO: 1880439
gcacuucugcgacgugacu

SEQ ID NO: 1967233 - RNA, 19 nt, Artificial Sequence
  Description of Artificial Sequence: Synthetic oligonucleotide
  Antisense strand to SEQ ID NO: 1967232
agucacgucgcagaagugc

SEQ ID NO: 1967234 - RNA, 19 nt, Artificial Sequence
  Description of Artificial Sequence: Synthetic oligonucleotide
  Sense strand starting at position 671 of SEQ ID NO: 1880439
cgacgugacugugugcauu

SEQ ID NO: 1967235 - RNA, 19 nt, Artificial Sequence
  Description of Artificial Sequence: Synthetic oligonucleotide
  Antisense strand to SEQ ID NO: 1967234
aaugcacacagucacgucg

SEQ ID NO: 1967236 - RNA, 19 nt, Artificial Sequence
  Description of Artificial Sequence: Synthetic oligonucleotide
  Sense strand starting at position 674 of SEQ ID NO: 1880439
cgugacugugugcauucau

SEQ ID NO: 1967237 - RNA, 19 nt, Artificial Sequence
  Description of Artificial Sequence: Synthetic oligonucleotide
  Antisense strand to SEQ ID NO: 1967236
augaaugcacacagucacg

SEQ ID NO: 1967238 - RNA, 19 nt, Artificial Sequence
  Description of Artificial Sequence: Synthetic oligonucleotide
  Sense strand starting at position 889 of SEQ ID NO: 1880439
cgucggugcuucgcauaga

SEQ ID NO: 1967239 - RNA, 19 nt, Artificial Sequence
  Description of Artificial Sequence: Synthetic oligonucleotide
  Antisense strand to SEQ ID NO: 1967238
ucuaugcgaagcaccgacg

SEQ ID NO: 1967240 - RNA, 19 nt, Artificial Sequence
  Description of Artificial Sequence: Synthetic oligonucleotide
  Sense strand starting at position 1368 of SEQ ID NO: 1880439
acaguggugugggagagau

SEQ ID NO: 1967241 - RNA, 19 nt, Artificial Sequence
  Description of Artificial Sequence: Synthetic oligonucleotide
  Antisense strand to SEQ ID NO: 1967240
aucucucccacaccacugu

SEQ ID NO: 1967242 - RNA, 19 nt, Artificial Sequence
  Description of Artificial Sequence: Synthetic oligonucleotide
  Sense strand starting at position 1899 of SEQ ID NO: 1880439
gcgcuacugccguuucaag

SEQ ID NO: 1967243 - RNA, 19 nt, Artificial Sequence
  Description of Artificial Sequence: Synthetic oligonucleotide
  Antisense strand to SEQ ID NO: 1967242
cuugaaacggcaguagcgc

SEQ ID NO: 1967244 - RNA, 19 nt, Artificial Sequence
  Description of Artificial Sequence: Synthetic oligonucleotide
  Sense strand starting at position 1980 of SEQ ID NO: 1880439
gcagaagaguucgcucaau

SEQ ID NO: 1967245 - RNA, 19 nt, Artificial Sequence
  Description of Artificial Sequence: Synthetic oligonucleotide
  Antisense strand to SEQ ID NO: 1967244
auugagcgaacucuucugc

SEQ ID NO: 1967246 - RNA, 19 nt, Artificial Sequence
  Description of Artificial Sequence: Synthetic oligonucleotide
  Sense strand starting at position 2577 of SEQ ID NO: 1880439
ucgggacccucacucuaau

SEQ ID NO: 1967247 - RNA, 19 nt, Artificial Sequence
  Description of Artificial Sequence: Synthetic oligonucleotide
  Antisense strand to SEQ ID NO: 1967246
auuagagugagggucccga

SEQ ID NO: 1967248 - RNA, 19 nt, Artificial Sequence
  Description of Artificial Sequence: Synthetic oligonucleotide
  Sense strand starting at position 2607 of SEQ ID NO: 1880439
ggccauggugccuaaacaa

SEQ ID NO: 1967249 - RNA, 19 nt, Artificial Sequence
  Description of Artificial Sequence: Synthetic oligonucleotide
  Antisense strand to SEQ ID NO: 1967248
uuguuuaggcaccauggcc

SEQ ID NO: 1967250 - RNA, 19 nt, Artificial Sequence
  Description of Artificial Sequence: Synthetic oligonucleotide
  Sense strand starting at position 2719 of SEQ ID NO: 1880439
cccuuauguuagguguagu

SEQ ID NO: 1967251 - RNA, 19 nt, Artificial Sequence
  Description of Artificial Sequence: Synthetic oligonucleotide
  Antisense strand to SEQ ID NO: 1967250
acuacaccuaacauaaggg

SEQ ID NO: 1967252 - RNA, 19 nt, Artificial Sequence
  Description of Artificial Sequence: Synthetic oligonucleotide
  Sense strand starting at position 2730 of SEQ ID NO: 1880439
gguguaguccuaugaccag

SEQ ID NO: 1967253 - RNA, 19 nt, Artificial Sequence
  Description of Artificial Sequence: Synthetic oligonucleotide
  Antisense strand to SEQ ID NO: 1967252
cuggucauaggacuacacc

SEQ ID NO: 1967254 - RNA, 19 nt, Artificial Sequence
  Description of Artificial Sequence: Synthetic oligonucleotide
  Sense strand starting at position 2893 of SEQ ID NO: 1880439
gaaagauucuggguuccug

SEQ ID NO: 1967255 - RNA, 19 nt, Artificial Sequence
  Description of Artificial Sequence: Synthetic oligonucleotide
  Antisense strand to SEQ ID NO: 1967254
caggaacccagaaucuuuc

SEQ ID NO: 1967256 - RNA, 19 nt, Artificial Sequence
  Description of Artificial Sequence: Synthetic oligonucleotide
  Sense strand starting at position 2984 of SEQ ID NO: 1880439
augugaagucagugaaauc

SEQ ID NO: 1967257 - RNA, 19 nt, Artificial Sequence
  Description of Artificial Sequence: Synthetic oligonucleotide
  Antisense strand to SEQ ID NO: 1967256
gauuucacugacuucacau

SEQ ID NO: 1967258 - RNA, 19 nt, Artificial Sequence
  Description of Artificial Sequence: Synthetic oligonucleotide
  Sense strand starting at position 2985 of SEQ ID NO: 1880439
ugugaagucagugaaaucu

SEQ ID NO: 1967259 - RNA, 19 nt, Artificial Sequence
  Description of Artificial Sequence: Synthetic oligonucleotide
  Antisense strand to SEQ ID NO: 1967258
agauuucacugacuucaca

SEQ ID NO: 1967260 - RNA, 19 nt, Artificial Sequence
  Description of Artificial Sequence: Synthetic oligonucleotide
  Sense strand starting at position 3415 of SEQ ID NO: 1880439
ggcugagaaugguggauca

SEQ ID NO: 1967261 - RNA, 19 nt, Artificial Sequence
  Description of Artificial Sequence: Synthetic oligonucleotide
  Antisense strand to SEQ ID NO: 1967260
ugauccaccauucucagcc

SEQ ID NO: 1967262 - RNA, 19 nt, Artificial Sequence
  Description of Artificial Sequence: Synthetic oligonucleotide
  Sense strand starting at position 3682 of SEQ ID NO: 1880439
ccacacuguuagcuaagua

SEQ ID NO: 1967263 - RNA, 19 nt, Artificial Sequence
  Description of Artificial Sequence: Synthetic oligonucleotide
  Antisense strand to SEQ ID NO: 1967262
uacuuagcuaacagugugg

SEQ ID NO: 1967264 - RNA, 19 nt, Artificial Sequence
  Description of Artificial Sequence: Synthetic oligonucleotide
  Sense strand starting at position 3755 of SEQ ID NO: 1880439
guuccuaugcaauguuuga

SEQ ID NO: 1967265 - RNA, 19 nt, Artificial Sequence
  Description of Artificial Sequence: Synthetic oligonucleotide
  Antisense strand to SEQ ID NO: 1967264
ucaaacauugcauaggaac

SEQ ID NO: 1967266 - RNA, 19 nt, Artificial Sequence
  Description of Artificial Sequence: Synthetic oligonucleotide
  Sense strand starting at position 3970 of SEQ ID NO: 1880439
agaucucacuuccagaaga

SEQ ID NO: 1967267 - RNA, 19 nt, Artificial Sequence
  Description of Artificial Sequence: Synthetic oligonucleotide
  Antisense strand to SEQ ID NO: 1967266
ucuucuggaagugagaucu

SEQ ID NO: 1967268 - RNA, 19 nt, Artificial Sequence
  Description of Artificial Sequence: Synthetic oligonucleotide
  Sense strand starting at position 527 of SEQ ID NO: 1880440
gugggcuuaacagguaaua

SEQ ID NO: 1967269 - RNA, 19 nt, Artificial Sequence
  Description of Artificial Sequence: Synthetic oligonucleotide
  Antisense strand to SEQ ID NO: 1967268
uauuaccuguuaagcccac

SEQ ID NO: 1967270 - RNA, 19 nt, Artificial Sequence
  Description of Artificial Sequence: Synthetic oligonucleotide
  Sense strand starting at position 538 of SEQ ID NO: 1880440
agguaauaauugcuccgua

SEQ ID NO: 1967271 - RNA, 19 nt, Artificial Sequence
  Description of Artificial Sequence: Synthetic oligonucleotide
  Antisense strand to SEQ ID NO: 1967270
uacggagcaauuauuaccu

SEQ ID NO: 1967272 - RNA, 19 nt, Artificial Sequence
  Description of Artificial Sequence: Synthetic oligonucleotide
  Sense strand starting at position 543 of SEQ ID NO: 1880440
auaauugcuccguauuacu

SEQ ID NO: 1967273 - RNA, 19 nt, Artificial Sequence
  Description of Artificial Sequence: Synthetic oligonucleotide
  Antisense strand to SEQ ID NO: 1967272
aguaauacggagcaauuau

SEQ ID NO: 1967274 - RNA, 19 nt, Artificial Sequence
  Description of Artificial Sequence: Synthetic oligonucleotide
  Sense strand starting at position 550 of SEQ ID NO: 1880440
cuccguauuacucagagug

SEQ ID NO: 1967275 - RNA, 19 nt, Artificial Sequence
  Description of Artificial Sequence: Synthetic oligonucleotide
  Antisense strand to SEQ ID NO: 1967274
cacucugaguaauacggag

SEQ ID NO: 1967276 - RNA, 19 nt, Artificial Sequence
  Description of Artificial Sequence: Synthetic oligonucleotide
  Sense strand starting at position 555 of SEQ ID NO: 1880440
uauuacucagaguguggau

SEQ ID NO: 1967277 - RNA, 19 nt, Artificial Sequence
  Description of Artificial Sequence: Synthetic oligonucleotide
  Antisense strand to SEQ ID NO: 1967276
auccacacucugaguaaua

SEQ ID NO: 1967278 - RNA, 19 nt, Artificial Sequence
  Description of Artificial Sequence: Synthetic oligonucleotide
  Sense strand starting at position 1048 of SEQ ID NO: 1880440
gaauguguggcucacaguu

SEQ ID NO: 1967279 - RNA, 19 nt, Artificial Sequence
  Description of Artificial Sequence: Synthetic oligonucleotide
  Antisense strand to SEQ ID NO: 1967278
aacugugagccacacauuc

SEQ ID NO: 1967280 - RNA, 19 nt, Artificial Sequence
  Description of Artificial Sequence: Synthetic oligonucleotide
  Sense strand starting at position 1274 of SEQ ID NO: 1880440
gacauauucugaccguuga

SEQ ID NO: 1967281 - RNA, 19 nt, Artificial Sequence
  Description of Artificial Sequence: Synthetic oligonucleotide
  Antisense strand to SEQ ID NO: 1967280
ucaacggucagaauauguc

SEQ ID NO: 1967282 - RNA, 19 nt, Artificial Sequence
  Description of Artificial Sequence: Synthetic oligonucleotide
  Sense strand starting at position 1275 of SEQ ID NO: 1880440
acauauucugaccguugaa

SEQ ID NO: 1967283 - RNA, 19 nt, Artificial Sequence
  Description of Artificial Sequence: Synthetic oligonucleotide
  Antisense strand to SEQ ID NO: 1967282
uucaacggucagaauaugu

SEQ ID NO: 1967284 - RNA, 19 nt, Artificial Sequence
  Description of Artificial Sequence: Synthetic oligonucleotide
  Sense strand starting at position 1287 of SEQ ID NO: 1880440
cguugaacucuuuaaagca

SEQ ID NO: 1967285 - RNA, 19 nt, Artificial Sequence
  Description of Artificial Sequence: Synthetic oligonucleotide
  Antisense strand to SEQ ID NO: 1967284
ugcuuuaaagaguucaacg

SEQ ID NO: 1967286 - RNA, 19 nt, Artificial Sequence
  Description of Artificial Sequence: Synthetic oligonucleotide
  Sense strand starting at position 1352 of SEQ ID NO: 1880440
gugggaagaguuugacugu

SEQ ID NO: 1967287 - RNA, 19 nt, Artificial Sequence
  Description of Artificial Sequence: Synthetic oligonucleotide
  Antisense strand to SEQ ID NO: 1967286
acagucaaacucuucccac

SEQ ID NO: 1967288 - RNA, 19 nt, Artificial Sequence
  Description of Artificial Sequence: Synthetic oligonucleotide
  Sense strand starting at position 1355 of SEQ ID NO: 1880440
ggaagaguuugacugucca

SEQ ID NO: 1967289 - RNA, 19 nt, Artificial Sequence
  Description of Artificial Sequence: Synthetic oligonucleotide
  Antisense strand to SEQ ID NO: 1967288
uggacagucaaacucuucc

SEQ ID NO: 1967290 - RNA, 19 nt, Artificial Sequence
  Description of Artificial Sequence: Synthetic oligonucleotide
  Sense strand starting at position 1359 of SEQ ID NO: 1880440
gaguuugacuguccagaua

SEQ ID NO: 1967291 - RNA, 19 nt, Artificial Sequence
  Description of Artificial Sequence: Synthetic oligonucleotide
  Antisense strand to SEQ ID NO: 1967290
uaucuggacagucaaacuc

SEQ ID NO: 1967292 - RNA, 19 nt, Artificial Sequence
  Description of Artificial Sequence: Synthetic oligonucleotide
  Sense strand starting at position 1568 of SEQ ID NO: 1880440
cagggucucgaguaugcaa

SEQ ID NO: 1967293 - RNA, 19 nt, Artificial Sequence
  Description of Artificial Sequence: Synthetic oligonucleotide
  Antisense strand to SEQ ID NO: 1967292
uugcauacucgagacccug

SEQ ID NO: 1967294 - RNA, 19 nt, Artificial Sequence
  Description of Artificial Sequence: Synthetic oligonucleotide
  Sense strand starting at position 1570 of SEQ ID NO: 1880440
gggucucgaguaugcaaau

SEQ ID NO: 1967295 - RNA, 19 nt, Artificial Sequence
  Description of Artificial Sequence: Synthetic oligonucleotide
  Antisense strand to SEQ ID NO: 1967294
auuugcauacucgagaccc

SEQ ID NO: 1967296 - RNA, 19 nt, Artificial Sequence
  Description of Artificial Sequence: Synthetic oligonucleotide
  Sense strand starting at position 1571 of SEQ ID NO: 1880440
ggucucgaguaugcaaaua

SEQ ID NO: 1967297 - RNA, 19 nt, Artificial Sequence
  Description of Artificial Sequence: Synthetic oligonucleotide
  Antisense strand to SEQ ID NO: 1967296
uauuugcauacucgagacc

SEQ ID NO: 1967298 - RNA, 19 nt, Artificial Sequence
  Description of Artificial Sequence: Synthetic oligonucleotide
  Sense strand starting at position 1576 of SEQ ID NO: 1880440
cgaguaugcaaauaaugga

SEQ ID NO: 1967299 - RNA, 19 nt, Artificial Sequence
  Description of Artificial Sequence: Synthetic oligonucleotide
  Antisense strand to SEQ ID NO: 1967298
uccauuauuugcauacucg

SEQ ID NO: 1967300 - RNA, 19 nt, Artificial Sequence
  Description of Artificial Sequence: Synthetic oligonucleotide
  Sense strand starting at position 1590 of SEQ ID NO: 1880440
auggaagacugacauggaa

SEQ ID NO: 1967301 - RNA, 19 nt, Artificial Sequence
  Description of Artificial Sequence: Synthetic oligonucleotide
  Antisense strand to SEQ ID NO: 1967300
uuccaugucagucuuccau

SEQ ID NO: 1967302 - RNA, 19 nt, Artificial Sequence
  Description of Artificial Sequence: Synthetic oligonucleotide
  Sense strand starting at position 1605 of SEQ ID NO: 1880440
ggaaguagucuauguugua

SEQ ID NO: 1967303 - RNA, 19 nt, Artificial Sequence
  Description of Artificial Sequence: Synthetic oligonucleotide
  Antisense strand to SEQ ID NO: 1967302
uacaacauagacuacuucc

SEQ ID NO: 1967304 - RNA, 19 nt, Artificial Sequence
  Description of Artificial Sequence: Synthetic oligonucleotide
  Sense strand starting at position 1606 of SEQ ID NO: 1880440
gaaguagucuauguuguaa

SEQ ID NO: 1967305 - RNA, 19 nt, Artificial Sequence
  Description of Artificial Sequence: Synthetic oligonucleotide
  Antisense strand to SEQ ID NO: 1967304
uuacaacauagacuacuuc

SEQ ID NO: 1967306 - RNA, 19 nt, Artificial Sequence
  Description of Artificial Sequence: Synthetic oligonucleotide
  Sense strand starting at position 1620 of SEQ ID NO: 1880440
uguaaccauccuugcgaca

SEQ ID NO: 1967307 - RNA, 19 nt, Artificial Sequence
  Description of Artificial Sequence: Synthetic oligonucleotide
  Antisense strand to SEQ ID NO: 1967306
ugucgcaaggaugguuaca

SEQ ID NO: 1967308 - RNA, 19 nt, Artificial Sequence
  Description of Artificial Sequence: Synthetic oligonucleotide
  Sense strand starting at position 1771 of SEQ ID NO: 1880440
acucgcuuccugggaacuu

SEQ ID NO: 1967309 - RNA, 19 nt, Artificial Sequence
  Description of Artificial Sequence: Synthetic oligonucleotide
  Antisense strand to SEQ ID NO: 1967308
aaguucccaggaagcgagu

SEQ ID NO: 1967310 - RNA, 19 nt, Artificial Sequence
  Description of Artificial Sequence: Synthetic oligonucleotide
  Sense strand starting at position 1822 of SEQ ID NO: 1880440
ccaaaucagcagugacaca

SEQ ID NO: 1967311 - RNA, 19 nt, Artificial Sequence
  Description of Artificial Sequence: Synthetic oligonucleotide
  Antisense strand to SEQ ID NO: 1967310
ugugucacugcugauuugg

SEQ ID NO: 1967312 - RNA, 19 nt, Artificial Sequence
  Description of Artificial Sequence: Synthetic oligonucleotide
  Sense strand starting at position 1868 of SEQ ID NO: 1880440
aguuacaugcuagagcuua

SEQ ID NO: 1967313 - RNA, 19 nt, Artificial Sequence
  Description of Artificial Sequence: Synthetic oligonucleotide
  Antisense strand to SEQ ID NO: 1967312
uaagcucuagcauguaacu

SEQ ID NO: 1967314 - RNA, 19 nt, Artificial Sequence
  Description of Artificial Sequence: Synthetic oligonucleotide
  Sense strand starting at position 1873 of SEQ ID NO: 1880440
caugcuagagcuuauuaga

SEQ ID NO: 1967315 - RNA, 19 nt, Artificial Sequence
  Description of Artificial Sequence: Synthetic oligonucleotide
  Antisense strand to SEQ ID NO: 1967314
ucuaauaagcucuagcaug

SEQ ID NO: 1967316 - RNA, 19 nt, Artificial Sequence
  Description of Artificial Sequence: Synthetic oligonucleotide
  Sense strand starting at position 1887 of SEQ ID NO: 1880440
uuagauguagcuuggacua

SEQ ID NO: 1967317 - RNA, 19 nt, Artificial Sequence
  Description of Artificial Sequence: Synthetic oligonucleotide
  Antisense strand to SEQ ID NO: 1967316
uaguccaagcuacaucuaa

SEQ ID NO: 1967318 - RNA, 19 nt, Artificial Sequence
  Description of Artificial Sequence: Synthetic oligonucleotide
  Sense strand starting at position 2089 of SEQ ID NO: 1880440
ucgaauagauaaucuacua

SEQ ID NO: 1967319 - RNA, 19 nt, Artificial Sequence
  Description of Artificial Sequence: Synthetic oligonucleotide
  Antisense strand to SEQ ID NO: 1967318
uaguagauuaucuauucga

SEQ ID NO: 1967320 - RNA, 19 nt, Artificial Sequence
  Description of Artificial Sequence: Synthetic oligonucleotide
  Sense strand starting at position 2300 of SEQ ID NO: 1880440
gcaccaacaucuguagaaa

SEQ ID NO: 1967321 - RNA, 19 nt, Artificial Sequence
  Description of Artificial Sequence: Synthetic oligonucleotide
  Antisense strand to SEQ ID NO: 1967320
uuucuacagauguuggugc

SEQ ID NO: 1967322 - RNA, 19 nt, Artificial Sequence
  Description of Artificial Sequence: Synthetic oligonucleotide
  Sense strand starting at position 2314 of SEQ ID NO: 1880440
agaaacauuugagaaagcu

SEQ ID NO: 1967323 - RNA, 19 nt, Artificial Sequence
  Description of Artificial Sequence: Synthetic oligonucleotide
  Antisense strand to SEQ ID NO: 1967322
agcuuucucaaauguuucu

SEQ ID NO: 1967324 - RNA, 19 nt, Artificial Sequence
  Description of Artificial Sequence: Synthetic oligonucleotide
  Sense strand starting at position 2385 of SEQ ID NO: 1880440
gagagugugugccuauaug

SEQ ID NO: 1967325 - RNA, 19 nt, Artificial Sequence
  Description of Artificial Sequence: Synthetic oligonucleotide
  Antisense strand to SEQ ID NO: 1967324
cauauaggcacacacucuc

SEQ ID NO: 1967326 - RNA, 19 nt, Artificial Sequence
  Description of Artificial Sequence: Synthetic oligonucleotide
  Sense strand starting at position 2498 of SEQ ID NO: 1880440
auguguaucaugcaugaug

SEQ ID NO: 1967327 - RNA, 19 nt, Artificial Sequence
  Description of Artificial Sequence: Synthetic oligonucleotide
  Antisense strand to SEQ ID NO: 1967326
caucaugcaugauacacau

SEQ ID NO: 1967328 - RNA, 19 nt, Artificial Sequence
  Description of Artificial Sequence: Synthetic oligonucleotide
  Sense strand starting at position 2746 of SEQ ID NO: 1880440
cggugucaugcuuugcuga

SEQ ID NO: 1967329 - RNA, 19 nt, Artificial Sequence
  Description of Artificial Sequence: Synthetic oligonucleotide
  Antisense strand to SEQ ID NO: 1967328
ucagcaaagcaugacaccg

SEQ ID NO: 1967330 - RNA, 19 nt, Artificial Sequence
  Description of Artificial Sequence: Synthetic oligonucleotide
  Sense strand starting at position 2767 of SEQ ID NO: 1880440
gucaaagcccuguaucuuu

SEQ ID NO: 1967331 - RNA, 19 nt, Artificial Sequence
  Description of Artificial Sequence: Synthetic oligonucleotide
  Antisense strand to SEQ ID NO: 1967330
aaagauacagggcuuugac

SEQ ID NO: 1967332 - RNA, 19 nt, Artificial Sequence
  Description of Artificial Sequence: Synthetic oligonucleotide
  Sense strand starting at position 2772 of SEQ ID NO: 1880440
agcccuguaucuuuaggga

SEQ ID NO: 1967333 - RNA, 19 nt, Artificial Sequence
  Description of Artificial Sequence: Synthetic oligonucleotide
  Antisense strand to SEQ ID NO: 1967332
ucccuaaagauacagggcu

SEQ ID NO: 1967334 - RNA, 19 nt, Artificial Sequence
  Description of Artificial Sequence: Synthetic oligonucleotide
  Sense strand starting at position 3006 of SEQ ID NO: 1880440
ugcugucauuugccuucua

SEQ ID NO: 1967335 - RNA, 19 nt, Artificial Sequence
  Description of Artificial Sequence: Synthetic oligonucleotide
  Antisense strand to SEQ ID NO: 1967334
uagaaggcaaaugacagca

SEQ ID NO: 1967336 - RNA, 19 nt, Artificial Sequence
  Description of Artificial Sequence: Synthetic oligonucleotide
  Sense strand starting at position 3090 of SEQ ID NO: 1880440
gugugacagacuuggagau

SEQ ID NO: 1967337 - RNA, 19 nt, Artificial Sequence
  Description of Artificial Sequence: Synthetic oligonucleotide
  Antisense strand to SEQ ID NO: 1967336
aucuccaagucugucacac

SEQ ID NO: 1967338 - RNA, 19 nt, Artificial Sequence
  Description of Artificial Sequence: Synthetic oligonucleotide
  Sense strand starting at position 3195 of SEQ ID NO: 1880440
ggaucuucccagugaugag

SEQ ID NO: 1967339 - RNA, 19 nt, Artificial Sequence
  Description of Artificial Sequence: Synthetic oligonucleotide
  Antisense strand to SEQ ID NO: 1967338
cucaucacugggaagaucc

SEQ ID NO: 1967340 - RNA, 19 nt, Artificial Sequence
  Description of Artificial Sequence: Synthetic oligonucleotide
  Sense strand starting at position 3411 of SEQ ID NO: 1880440
guauccugacuuugucuca

SEQ ID NO: 1967341 - RNA, 19 nt, Artificial Sequence
  Description of Artificial Sequence: Synthetic oligonucleotide
  Antisense strand to SEQ ID NO: 1967340
ugagacaaagucaggauac

SEQ ID NO: 1967342 - RNA, 19 nt, Artificial Sequence
  Description of Artificial Sequence: Synthetic oligonucleotide
  Sense strand starting at position 3596 of SEQ ID NO: 1880440
agggucaucucagcgauuc

SEQ ID NO: 1967343 - RNA, 19 nt, Artificial Sequence
  Description of Artificial Sequence: Synthetic oligonucleotide
  Antisense strand to SEQ ID NO: 1967342
gaaucgcugagaugacccu

SEQ ID NO: 1967344 - RNA, 19 nt, Artificial Sequence
  Description of Artificial Sequence: Synthetic oligonucleotide
  Sense strand starting at position 3846 of SEQ ID NO: 1880440
agaagucuccacgauguuu

SEQ ID NO: 1967345 - RNA, 19 nt, Artificial Sequence
  Description of Artificial Sequence: Synthetic oligonucleotide
  Antisense strand to SEQ ID NO: 1967344
aaacaucguggagacuucu

SEQ ID NO: 1967346 - RNA, 19 nt, Artificial Sequence
  Description of Artificial Sequence: Synthetic oligonucleotide
  Sense strand starting at position 3936 of SEQ ID NO: 1880440
cccacagagcugggauauu

SEQ ID NO: 1967347 - RNA, 19 nt, Artificial Sequence
  Description of Artificial Sequence: Synthetic oligonucleotide
  Antisense strand to SEQ ID NO: 1967346
aauaucccagcucuguggg

SEQ ID NO: 1967348 - RNA, 19 nt, Artificial Sequence
  Description of Artificial Sequence: Synthetic oligonucleotide
  Sense strand starting at position 409 of SEQ ID NO: 1880441
guucuuugugaagaguaaa

SEQ ID NO: 1967349 - RNA, 19 nt, Artificial Sequence
  Description of Artificial Sequence: Synthetic oligonucleotide
  Antisense strand to SEQ ID NO: 1967348
uuuacucuucacaaagaac

SEQ ID NO: 1967350 - RNA, 19 nt, Artificial Sequence
  Description of Artificial Sequence: Synthetic oligonucleotide
  Sense strand starting at position 412 of SEQ ID NO: 1880441
cuuugugaagaguaaaucu

SEQ ID NO: 1967351 - RNA, 19 nt, Artificial Sequence
  Description of Artificial Sequence: Synthetic oligonucleotide
  Antisense strand to SEQ ID NO: 1967350
agauuuacucuucacaaag

SEQ ID NO: 1967352 - RNA, 19 nt, Artificial Sequence
  Description of Artificial Sequence: Synthetic oligonucleotide
  Sense strand starting at position 561 of SEQ ID NO: 1880441
ucaugaaacuucccaucga

SEQ ID NO: 1967353 - RNA, 19 nt, Artificial Sequence
  Description of Artificial Sequence: Synthetic oligonucleotide
  Antisense strand to SEQ ID NO: 1967352
ucgaugggaaguuucauga

SEQ ID NO: 1967354 - RNA, 19 nt, Artificial Sequence
  Description of Artificial Sequence: Synthetic oligonucleotide
  Sense strand starting at position 583 of SEQ ID NO: 1880441
cucacaacgucacuggaaa

SEQ ID NO: 1967355 - RNA, 19 nt, Artificial Sequence
  Description of Artificial Sequence: Synthetic oligonucleotide
  Antisense strand to SEQ ID NO: 1967354
uuuccagugacguugugag

SEQ ID NO: 1967356 - RNA, 19 nt, Artificial Sequence
  Description of Artificial Sequence: Synthetic oligonucleotide
  Sense strand starting at position 602 of SEQ ID NO: 1880441
gaggcauugccgucugcau

SEQ ID NO: 1967357 - RNA, 19 nt, Artificial Sequence
  Description of Artificial Sequence: Synthetic oligonucleotide
  Antisense strand to SEQ ID NO: 1967356
augcagacggcaaugccuc

SEQ ID NO: 1967358 - RNA, 19 nt, Artificial Sequence
  Description of Artificial Sequence: Synthetic oligonucleotide
  Sense strand starting at position 603 of SEQ ID NO: 1880441
aggcauugccgucugcauu

SEQ ID NO: 1967359 - RNA, 19 nt, Artificial Sequence
  Description of Artificial Sequence: Synthetic oligonucleotide
  Antisense strand to SEQ ID NO: 1967358
aaugcagacggcaaugccu

SEQ ID NO: 1967360 - RNA, 19 nt, Artificial Sequence
  Description of Artificial Sequence: Synthetic oligonucleotide
  Sense strand starting at position 643 of SEQ ID NO: 1880441
cuggaagggcuccaucauu

SEQ ID NO: 1967361 - RNA, 19 nt, Artificial Sequence
  Description of Artificial Sequence: Synthetic oligonucleotide
  Antisense strand to SEQ ID NO: 1967360
aaugauggagcccuuccag

SEQ ID NO: 1967362 - RNA, 19 nt, Artificial Sequence
  Description of Artificial Sequence: Synthetic oligonucleotide
  Sense strand starting at position 862 of SEQ ID NO: 1880441
cuuaguuguacgucuguuu

SEQ ID NO: 1967363 - RNA, 19 nt, Artificial Sequence
  Description of Artificial Sequence: Synthetic oligonucleotide
  Antisense strand to SEQ ID NO: 1967362
aaacagacguacaacuaag

SEQ ID NO: 1967364 - RNA, 19 nt, Artificial Sequence
  Description of Artificial Sequence: Synthetic oligonucleotide
  Sense strand starting at position 891 of SEQ ID NO: 1880441
gcuggaugccuugaagaua

SEQ ID NO: 1967365 - RNA, 19 nt, Artificial Sequence
  Description of Artificial Sequence: Synthetic oligonucleotide
  Antisense strand to SEQ ID NO: 1967364
uaucuucaaggcauccagc

SEQ ID NO: 1967366 - RNA, 19 nt, Artificial Sequence
  Description of Artificial Sequence: Synthetic oligonucleotide
  Sense strand starting at position 925 of SEQ ID NO: 1880441
cccuaaugcuuagcacaga

SEQ ID NO: 1967367 - RNA, 19 nt, Artificial Sequence
  Description of Artificial Sequence: Synthetic oligonucleotide
  Antisense strand to SEQ ID NO: 1967366
ucugugcuaagcauuaggg

SEQ ID NO: 1967368 - RNA, 19 nt, Artificial Sequence
  Description of Artificial Sequence: Synthetic oligonucleotide
  Sense strand starting at position 946 of SEQ ID NO: 1880441
uguacucaggaggguuaau

SEQ ID NO: 1967369 - RNA, 19 nt, Artificial Sequence
  Description of Artificial Sequence: Synthetic oligonucleotide
  Antisense strand to SEQ ID NO: 1967368
auuaacccuccugaguaca

SEQ ID NO: 1967370 - RNA, 19 nt, Artificial Sequence
  Description of Artificial Sequence: Synthetic oligonucleotide
  Sense strand starting at position 968 of SEQ ID NO: 1880441
auuaauuaauggucagcaa

SEQ ID NO: 1967371 - RNA, 19 nt, Artificial Sequence
  Description of Artificial Sequence: Synthetic oligonucleotide
  Antisense strand to SEQ ID NO: 1967370
uugcugaccauuaauuaau

SEQ ID NO: 1967372 - RNA, 19 nt, Artificial Sequence
  Description of Artificial Sequence: Synthetic oligonucleotide
  Sense strand starting at position 969 of SEQ ID NO: 1880441
uuaauuaauggucagcaaa

SEQ ID NO: 1967373 - RNA, 19 nt, Artificial Sequence
  Description of Artificial Sequence: Synthetic oligonucleotide
  Antisense strand to SEQ ID NO: 1967372
uuugcugaccauuaauuaa

SEQ ID NO: 1967374 - RNA, 19 nt, Artificial Sequence
  Description of Artificial Sequence: Synthetic oligonucleotide
  Sense strand starting at position 1074 of SEQ ID NO: 1880441
cuauguuaggaauguugga

SEQ ID NO: 1967375 - RNA, 19 nt, Artificial Sequence
  Description of Artificial Sequence: Synthetic oligonucleotide
  Antisense strand to SEQ ID NO: 1967374
uccaacauuccuaacauag

SEQ ID NO: 1967376 - RNA, 19 nt, Artificial Sequence
  Description of Artificial Sequence: Synthetic oligonucleotide
  Sense strand starting at position 1095 of SEQ ID NO: 1880441
uagguauacugguuacaga

SEQ ID NO: 1967377 - RNA, 19 nt, Artificial Sequence
  Description of Artificial Sequence: Synthetic oligonucleotide
  Antisense strand to SEQ ID NO: 1967376
ucuguaaccaguauaccua

SEQ ID NO: 1967378 - RNA, 19 nt, Artificial Sequence
  Description of Artificial Sequence: Synthetic oligonucleotide
  Sense strand starting at position 1114 of SEQ ID NO: 1880441
auaguaucagagcaagguu

SEQ ID NO: 1967379 - RNA, 19 nt, Artificial Sequence
  Description of Artificial Sequence: Synthetic oligonucleotide
  Antisense strand to SEQ ID NO: 1967378
aaccuugcucugauacuau

SEQ ID NO: 1967380 - RNA, 19 nt, Artificial Sequence
  Description of Artificial Sequence: Synthetic oligonucleotide
  Sense strand starting at position 1117 of SEQ ID NO: 1880441
guaucagagcaagguuaaa

SEQ ID NO: 1967381 - RNA, 19 nt, Artificial Sequence
  Description of Artificial Sequence: Synthetic oligonucleotide
  Antisense strand to SEQ ID NO: 1967380
uuuaaccuugcucugauac

SEQ ID NO: 1967382 - RNA, 19 nt, Artificial Sequence
  Description of Artificial Sequence: Synthetic oligonucleotide
  Sense strand starting at position 1214 of SEQ ID NO: 1880441
auggaaugucaccaugcuu

SEQ ID NO: 1967383 - RNA, 19 nt, Artificial Sequence
  Description of Artificial Sequence: Synthetic oligonucleotide
  Antisense strand to SEQ ID NO: 1967382
aagcauggugacauuccau

SEQ ID NO: 1967384 - RNA, 19 nt, Artificial Sequence
  Description of Artificial Sequence: Synthetic oligonucleotide
  Sense strand starting at position 1354 of SEQ ID NO: 1880441
agcacagguggaugugauu

SEQ ID NO: 1967385 - RNA, 19 nt, Artificial Sequence
  Description of Artificial Sequence: Synthetic oligonucleotide
  Antisense strand to SEQ ID NO: 1967384
aaucacauccaccugugcu

SEQ ID NO: 1967386 - RNA, 19 nt, Artificial Sequence
  Description of Artificial Sequence: Synthetic oligonucleotide
  Sense strand starting at position 1406 of SEQ ID NO: 1880441
guuugucccacugaugaug

SEQ ID NO: 1967387 - RNA, 19 nt, Artificial Sequence
  Description of Artificial Sequence: Synthetic oligonucleotide
  Antisense strand to SEQ ID NO: 1967386
caucaucagugggacaaac

SEQ ID NO: 1967388 - RNA, 19 nt, Artificial Sequence
  Description of Artificial Sequence: Synthetic oligonucleotide
  Sense strand starting at position 1468 of SEQ ID NO: 1880441
uugagauuccugggcauug

SEQ ID NO: 1967389 - RNA, 19 nt, Artificial Sequence
  Description of Artificial Sequence: Synthetic oligonucleotide
  Antisense strand to SEQ ID NO: 1967388
caaugcccaggaaucucaa

SEQ ID NO: 1967390 - RNA, 19 nt, Artificial Sequence
  Description of Artificial Sequence: Synthetic oligonucleotide
  Sense strand starting at position 1470 of SEQ ID NO: 1880441
gagauuccugggcauugua

SEQ ID NO: 1967391 - RNA, 19 nt, Artificial Sequence
  Description of Artificial Sequence: Synthetic oligonucleotide
  Antisense strand to SEQ ID NO: 1967390
uacaaugcccaggaaucuc

SEQ ID NO: 1967392 - RNA, 19 nt, Artificial Sequence
  Description of Artificial Sequence: Synthetic oligonucleotide
  Sense strand starting at position 1620 of SEQ ID NO: 1880441
agauuucuuucuuaggaug

SEQ ID NO: 1967393 - RNA, 19 nt, Artificial Sequence
  Description of Artificial Sequence: Synthetic oligonucleotide
  Antisense strand to SEQ ID NO: 1967392
cauccuaagaaagaaaucu

SEQ ID NO: 1967394 - RNA, 19 nt, Artificial Sequence
  Description of Artificial Sequence: Synthetic oligonucleotide
  Sense strand starting at position 1635 of SEQ ID NO: 1880441
gaugaauggcucugcacau

SEQ ID NO: 1967395 - RNA, 19 nt, Artificial Sequence
  Description of Artificial Sequence: Synthetic oligonucleotide
  Antisense strand to SEQ ID NO: 1967394
augugcagagccauucauc

SEQ ID NO: 1967396 - RNA, 19 nt, Artificial Sequence
  Description of Artificial Sequence: Synthetic oligonucleotide
  Sense strand starting at position 1636 of SEQ ID NO: 1880441
augaauggcucugcacaua

SEQ ID NO: 1967397 - RNA, 19 nt, Artificial Sequence
  Description of Artificial Sequence: Synthetic oligonucleotide
  Antisense strand to SEQ ID NO: 1967396
uaugugcagagccauucau

SEQ ID NO: 1967398 - RNA, 19 nt, Artificial Sequence
  Description of Artificial Sequence: Synthetic oligonucleotide
  Sense strand starting at position 1705 of SEQ ID NO: 1880441
ggcuaauucccugcgcauu

SEQ ID NO: 1967399 - RNA, 19 nt, Artificial Sequence
  Description of Artificial Sequence: Synthetic oligonucleotide
  Antisense strand to SEQ ID NO: 1967398
aaugcgcagggaauuagcc

SEQ ID NO: 1967400 - RNA, 19 nt, Artificial Sequence
  Description of Artificial Sequence: Synthetic oligonucleotide
  Sense strand starting at position 1773 of SEQ ID NO: 1880441
gaguccuaguggccaaaua

SEQ ID NO: 1967401 - RNA, 19 nt, Artificial Sequence
  Description of Artificial Sequence: Synthetic oligonucleotide
  Antisense strand to SEQ ID NO: 1967400
uauuuggccacuaggacuc

SEQ ID NO: 1967402 - RNA, 19 nt, Artificial Sequence
  Description of Artificial Sequence: Synthetic oligonucleotide
  Sense strand starting at position 1848 of SEQ ID NO: 1880441
auguuaauguauuccugau

SEQ ID NO: 1967403 - RNA, 19 nt, Artificial Sequence
  Description of Artificial Sequence: Synthetic oligonucleotide
  Antisense strand to SEQ ID NO: 1967402
aucaggaauacauuaacau

SEQ ID NO: 1967404 - RNA, 19 nt, Artificial Sequence
  Description of Artificial Sequence: Synthetic oligonucleotide
  Sense strand starting at position 1850 of SEQ ID NO: 1880441
guuaauguauuccugauga

SEQ ID NO: 1967405 - RNA, 19 nt, Artificial Sequence
  Description of Artificial Sequence: Synthetic oligonucleotide
  Antisense strand to SEQ ID NO: 1967404
ucaucaggaauacauuaac

SEQ ID NO: 1967406 - RNA, 19 nt, Artificial Sequence
  Description of Artificial Sequence: Synthetic oligonucleotide
  Sense strand starting at position 1892 of SEQ ID NO: 1880441
uuaucagcuuggguuuaaa

SEQ ID NO: 1967407 - RNA, 19 nt, Artificial Sequence
  Description of Artificial Sequence: Synthetic oligonucleotide
  Antisense strand to SEQ ID NO: 1967406
uuuaaacccaagcugauaa

SEQ ID NO: 1967408 - RNA, 19 nt, Artificial Sequence
  Description of Artificial Sequence: Synthetic oligonucleotide
  Sense strand starting at position 2147 of SEQ ID NO: 1880441
gucauuugguaacugcaua

SEQ ID NO: 1967409 - RNA, 19 nt, Artificial Sequence
  Description of Artificial Sequence: Synthetic oligonucleotide
  Antisense strand to SEQ ID NO: 1967408
uaugcaguuaccaaaugac

SEQ ID NO: 1967410 - RNA, 19 nt, Artificial Sequence
  Description of Artificial Sequence: Synthetic oligonucleotide
  Sense strand starting at position 2211 of SEQ ID NO: 1880441
guuaacagucucuaguuau

SEQ ID NO: 1967411 - RNA, 19 nt, Artificial Sequence
  Description of Artificial Sequence: Synthetic oligonucleotide
  Antisense strand to SEQ ID NO: 1967410
auaacuagagacuguuaac

SEQ ID NO: 1967412 - RNA, 19 nt, Artificial Sequence
  Description of Artificial Sequence: Synthetic oligonucleotide
  Sense strand starting at position 2602 of SEQ ID NO: 1880441
agaauuccagcaugacaca

SEQ ID NO: 1967413 - RNA, 19 nt, Artificial Sequence
  Description of Artificial Sequence: Synthetic oligonucleotide
  Antisense strand to SEQ ID NO: 1967412
ugugucaugcuggaauucu

SEQ ID NO: 1967414 - RNA, 19 nt, Artificial Sequence
  Description of Artificial Sequence: Synthetic oligonucleotide
  Sense strand starting at position 2668 of SEQ ID NO: 1880441
uuuaaagaaugcuucugaa

SEQ ID NO: 1967415 - RNA, 19 nt, Artificial Sequence
  Description of Artificial Sequence: Synthetic oligonucleotide
  Antisense strand to SEQ ID NO: 1967414
uucagaagcauucuuuaaa

SEQ ID NO: 1967416 - RNA, 19 nt, Artificial Sequence
  Description of Artificial Sequence: Synthetic oligonucleotide
  Sense strand starting at position 2913 of SEQ ID NO: 1880441
ccuguuguuugauuucuaa

SEQ ID NO: 1967417 - RNA, 19 nt, Artificial Sequence
  Description of Artificial Sequence: Synthetic oligonucleotide
  Antisense strand to SEQ ID NO: 1967416
uuagaaaucaaacaacagg

SEQ ID NO: 1967418 - RNA, 19 nt, Artificial Sequence
  Description of Artificial Sequence: Synthetic oligonucleotide
  Sense strand starting at position 3150 of SEQ ID NO: 1880441
ugggcaaguucccucagau

SEQ ID NO: 1967419 - RNA, 19 nt, Artificial Sequence
  Description of Artificial Sequence: Synthetic oligonucleotide
  Antisense strand to SEQ ID NO: 1967418
aucugagggaacuugccca

SEQ ID NO: 1967420 - RNA, 19 nt, Artificial Sequence
  Description of Artificial Sequence: Synthetic oligonucleotide
  Sense strand starting at position 3163 of SEQ ID NO: 1880441
ucagaugagcugcaaucuu

SEQ ID NO: 1967421 - RNA, 19 nt, Artificial Sequence
  Description of Artificial Sequence: Synthetic oligonucleotide
  Antisense strand to SEQ ID NO: 1967420
aagauugcagcucaucuga

SEQ ID NO: 1967422 - RNA, 19 nt, Artificial Sequence
  Description of Artificial Sequence: Synthetic oligonucleotide
  Sense strand starting at position 3369 of SEQ ID NO: 1880441
ugucuauacuaccuaugga

SEQ ID NO: 1967423 - RNA, 19 nt, Artificial Sequence
  Description of Artificial Sequence: Synthetic oligonucleotide
  Antisense strand to SEQ ID NO: 1967422
uccauagguaguauagaca

SEQ ID NO: 1967424 - RNA, 19 nt, Artificial Sequence
  Description of Artificial Sequence: Synthetic oligonucleotide
  Sense strand starting at position 3400 of SEQ ID NO: 1880441
ugcuauuacccuugagaau

SEQ ID NO: 1967425 - RNA, 19 nt, Artificial Sequence
  Description of Artificial Sequence: Synthetic oligonucleotide
  Antisense strand to SEQ ID NO: 1967424
auucucaaggguaauagca

SEQ ID NO: 1967426 - RNA, 19 nt, Artificial Sequence
  Description of Artificial Sequence: Synthetic oligonucleotide
  Sense strand starting at position 3401 of SEQ ID NO: 1880441
gcuauuacccuugagaaug

SEQ ID NO: 1967427 - RNA, 19 nt, Artificial Sequence
  Description of Artificial Sequence: Synthetic oligonucleotide
  Antisense strand to SEQ ID NO: 1967426
cauucucaaggguaauagc

SEQ ID NO: 1967428 - RNA, 19 nt, Artificial Sequence
  Description of Artificial Sequence: Synthetic oligonucleotide
  Sense strand starting at position 215 of SEQ ID NO: 1880442
cuugcuagauagccuaaua

SEQ ID NO: 1967429 - RNA, 19 nt, Artificial Sequence
  Description of Artificial Sequence: Synthetic oligonucleotide
  Antisense strand to SEQ ID NO: 1967428
uauuaggcuaucuagcaag

SEQ ID NO: 1967430 - RNA, 19 nt, Artificial Sequence
  Description of Artificial Sequence: Synthetic oligonucleotide
  Sense strand starting at position 673 of SEQ ID NO: 1880442
gagaacuugugauuaucuu

SEQ ID NO: 1967431 - RNA, 19 nt, Artificial Sequence
  Description of Artificial Sequence: Synthetic oligonucleotide
  Antisense strand to SEQ ID NO: 1967430
aagauaaucacaaguucuc

SEQ ID NO: 1967432 - RNA, 19 nt, Artificial Sequence
  Description of Artificial Sequence: Synthetic oligonucleotide
  Sense strand starting at position 762 of SEQ ID NO: 1880442
uaaagaaaggaauguguuu

SEQ ID NO: 1967433 - RNA, 19 nt, Artificial Sequence
  Description of Artificial Sequence: Synthetic oligonucleotide
  Antisense strand to SEQ ID NO: 1967432
aaacacauuccuuucuuua

SEQ ID NO: 1967434 - RNA, 19 nt, Artificial Sequence
  Description of Artificial Sequence: Synthetic oligonucleotide
  Sense strand starting at position 767 of SEQ ID NO: 1880442
aaaggaauguguuuacuaa

SEQ ID NO: 1967435 - RNA, 19 nt, Artificial Sequence
  Description of Artificial Sequence: Synthetic oligonucleotide
  Antisense strand to SEQ ID NO: 1967434
uuaguaaacacauuccuuu

SEQ ID NO: 1967436 - RNA, 19 nt, Artificial Sequence
  Description of Artificial Sequence: Synthetic oligonucleotide
  Sense strand starting at position 771 of SEQ ID NO: 1880442
gaauguguuuacuaaggaa

SEQ ID NO: 1967437 - RNA, 19 nt, Artificial Sequence
  Description of Artificial Sequence: Synthetic oligonucleotide
  Antisense strand to SEQ ID NO: 1967436
uuccuuaguaaacacauuc

SEQ ID NO: 1967438 - RNA, 19 nt, Artificial Sequence
  Description of Artificial Sequence: Synthetic oligonucleotide
  Sense strand starting at position 855 of SEQ ID NO: 1880442
gacgguguguucuucaagu

SEQ ID NO: 1967439 - RNA, 19 nt, Artificial Sequence
  Description of Artificial Sequence: Synthetic oligonucleotide
  Antisense strand to SEQ ID NO: 1967438
acuugaagaacacaccguc

SEQ ID NO: 1967440 - RNA, 19 nt, Artificial Sequence
  Description of Artificial Sequence: Synthetic oligonucleotide
  Sense strand starting at position 857 of SEQ ID NO: 1880442
cgguguguucuucaaguuc

SEQ ID NO: 1967441 - RNA, 19 nt, Artificial Sequence
  Description of Artificial Sequence: Synthetic oligonucleotide
  Antisense strand to SEQ ID NO: 1967440
gaacuugaagaacacaccg

SEQ ID NO: 1967442 - RNA, 19 nt, Artificial Sequence
  Description of Artificial Sequence: Synthetic oligonucleotide
  Sense strand starting at position 881 of SEQ ID NO: 1880442
ccaggauuccucuggcauu

SEQ ID NO: 1967443 - RNA, 19 nt, Artificial Sequence
  Description of Artificial Sequence: Synthetic oligonucleotide
  Antisense strand to SEQ ID NO: 1967442
aaugccagaggaauccugg

SEQ ID NO: 1967444 - RNA, 19 nt, Artificial Sequence
  Description of Artificial Sequence: Synthetic oligonucleotide
  Sense strand starting at position 882 of SEQ ID NO: 1880442
caggauuccucuggcauuu

SEQ ID NO: 1967445 - RNA, 19 nt, Artificial Sequence
  Description of Artificial Sequence: Synthetic oligonucleotide
  Antisense strand to SEQ ID NO: 1967444
aaaugccagaggaauccug

SEQ ID NO: 1967446 - RNA, 19 nt, Artificial Sequence
  Description of Artificial Sequence: Synthetic oligonucleotide
  Sense strand starting at position 940 of SEQ ID NO: 1880442
augucuauuuccugaguag

SEQ ID NO: 1967447 - RNA, 19 nt, Artificial Sequence
  Description of Artificial Sequence: Synthetic oligonucleotide
  Antisense strand to SEQ ID NO: 1967446
cuacucaggaaauagacau

SEQ ID NO: 1967448 - RNA, 19 nt, Artificial Sequence
  Description of Artificial Sequence: Synthetic oligonucleotide
  Sense strand starting at position 1067 of SEQ ID NO: 1880442
caguuaugccacuaagacg

SEQ ID NO: 1967449 - RNA, 19 nt, Artificial Sequence
  Description of Artificial Sequence: Synthetic oligonucleotide
  Antisense strand to SEQ ID NO: 1967448
cgucuuaguggcauaacug

SEQ ID NO: 1967450 - RNA, 19 nt, Artificial Sequence
  Description of Artificial Sequence: Synthetic oligonucleotide
  Sense strand starting at position 1114 of SEQ ID NO: 1880442
ggauucaaagcgugugaca

SEQ ID NO: 1967451 - RNA, 19 nt, Artificial Sequence
  Description of Artificial Sequence: Synthetic oligonucleotide
  Antisense strand to SEQ ID NO: 1967450
ugucacacgcuuugaaucc

SEQ ID NO: 1967452 - RNA, 19 nt, Artificial Sequence
  Description of Artificial Sequence: Synthetic oligonucleotide
  Sense strand starting at position 1190 of SEQ ID NO: 1880442
ugaagacugucuccacuca

SEQ ID NO: 1967453 - RNA, 19 nt, Artificial Sequence
  Description of Artificial Sequence: Synthetic oligonucleotide
  Antisense strand to SEQ ID NO: 1967452
ugaguggagacagucuuca

SEQ ID NO: 1967454 - RNA, 19 nt, Artificial Sequence
  Description of Artificial Sequence: Synthetic oligonucleotide
  Sense strand starting at position 1281 of SEQ ID NO: 1880442
gagcacuaguugcuguuaa

SEQ ID NO: 1967455 - RNA, 19 nt, Artificial Sequence
  Description of Artificial Sequence: Synthetic oligonucleotide
  Antisense strand to SEQ ID NO: 1967454
uuaacagcaacuagugcuc

SEQ ID NO: 1967456 - RNA, 19 nt, Artificial Sequence
  Description of Artificial Sequence: Synthetic oligonucleotide
  Sense strand starting at position 1351 of SEQ ID NO: 1880442
ggugcagaguguccacaau

SEQ ID NO: 1967457 - RNA, 19 nt, Artificial Sequence
  Description of Artificial Sequence: Synthetic oligonucleotide
  Antisense strand to SEQ ID NO: 1967456
auuguggacacucugcacc

SEQ ID NO: 1967458 - RNA, 19 nt, Artificial Sequence
  Description of Artificial Sequence: Synthetic oligonucleotide
  Sense strand starting at position 1492 of SEQ ID NO: 1880442
uuccaaagcagcugugaga

SEQ ID NO: 1967459 - RNA, 19 nt, Artificial Sequence
  Description of Artificial Sequence: Synthetic oligonucleotide
  Antisense strand to SEQ ID NO: 1967458
ucucacagcugcuuuggaa

SEQ ID NO: 1967460 - RNA, 19 nt, Artificial Sequence
  Description of Artificial Sequence: Synthetic oligonucleotide
  Sense strand starting at position 1523 of SEQ ID NO: 1880442
uguggagaauaauucucaa

SEQ ID NO: 1967461 - RNA, 19 nt, Artificial Sequence
  Description of Artificial Sequence: Synthetic oligonucleotide
  Antisense strand to SEQ ID NO: 1967460
uugagaauuauucuccaca

SEQ ID NO: 1967462 - RNA, 19 nt, Artificial Sequence
  Description of Artificial Sequence: Synthetic oligonucleotide
  Sense strand starting at position 1526 of SEQ ID NO: 1880442
ggagaauaauucucaaugc

SEQ ID NO: 1967463 - RNA, 19 nt, Artificial Sequence
  Description of Artificial Sequence: Synthetic oligonucleotide
  Antisense strand to SEQ ID NO: 1967462
gcauugagaauuauucucc

SEQ ID NO: 1967464 - RNA, 19 nt, Artificial Sequence
  Description of Artificial Sequence: Synthetic oligonucleotide
  Sense strand starting at position 1561 of SEQ ID NO: 1880442
aucaaauacugaucagguu

SEQ ID NO: 1967465 - RNA, 19 nt, Artificial Sequence
  Description of Artificial Sequence: Synthetic oligonucleotide
  Antisense strand to SEQ ID NO: 1967464
aaccugaucaguauuugau

SEQ ID NO: 1967466 - RNA, 19 nt, Artificial Sequence
  Description of Artificial Sequence: Synthetic oligonucleotide
  Sense strand starting at position 1627 of SEQ ID NO: 1880442
gcguucacaugugucagaa

SEQ ID NO: 1967467 - RNA, 19 nt, Artificial Sequence
  Description of Artificial Sequence: Synthetic oligonucleotide
  Antisense strand to SEQ ID NO: 1967466
uucugacacaugugaacgc

SEQ ID NO: 1967468 - RNA, 19 nt, Artificial Sequence
  Description of Artificial Sequence: Synthetic oligonucleotide
  Sense strand starting at position 1711 of SEQ ID NO: 1880442
uggugucugagacggcaau

SEQ ID NO: 1967469 - RNA, 19 nt, Artificial Sequence
  Description of Artificial Sequence: Synthetic oligonucleotide
  Antisense strand to SEQ ID NO: 1967468
auugccgucucagacacca

SEQ ID NO: 1967470 - RNA, 19 nt, Artificial Sequence
  Description of Artificial Sequence: Synthetic oligonucleotide
  Sense strand starting at position 1788 of SEQ ID NO: 1880442
cgauccaauuuccauguaa

SEQ ID NO: 1967471 - RNA, 19 nt, Artificial Sequence
  Description of Artificial Sequence: Synthetic oligonucleotide
  Antisense strand to SEQ ID NO: 1967470
uuacauggaaauuggaucg

SEQ ID NO: 1967472 - RNA, 19 nt, Artificial Sequence
  Description of Artificial Sequence: Synthetic oligonucleotide
  Sense strand starting at position 1880 of SEQ ID NO: 1880442
ggagcucugagguaaacgu

SEQ ID NO: 1967473 - RNA, 19 nt, Artificial Sequence
  Description of Artificial Sequence: Synthetic oligonucleotide
  Antisense strand to SEQ ID NO: 1967472
acguuuaccucagagcucc

SEQ ID NO: 1967474 - RNA, 19 nt, Artificial Sequence
  Description of Artificial Sequence: Synthetic oligonucleotide
  Sense strand starting at position 3001 of SEQ ID NO: 1880442
gcuccaguuuccuugugga

SEQ ID NO: 1967475 - RNA, 19 nt, Artificial Sequence
  Description of Artificial Sequence: Synthetic oligonucleotide
  Antisense strand to SEQ ID NO: 1967474
uccacaaggaaacuggagc

SEQ ID NO: 1967476 - RNA, 19 nt, Artificial Sequence
  Description of Artificial Sequence: Synthetic oligonucleotide
  Sense strand starting at position 3006 of SEQ ID NO: 1880442
aguuuccuuguggacaaau

SEQ ID NO: 1967477 - RNA, 19 nt, Artificial Sequence
  Description of Artificial Sequence: Synthetic oligonucleotide
  Antisense strand to SEQ ID NO: 1967476
auuuguccacaaggaaacu

SEQ ID NO: 1967478 - RNA, 19 nt, Artificial Sequence
  Description of Artificial Sequence: Synthetic oligonucleotide
  Sense strand starting at position 3118 of SEQ ID NO: 1880442
gucagaacuuguuuauccu

SEQ ID NO: 1967479 - RNA, 19 nt, Artificial Sequence
  Description of Artificial Sequence: Synthetic oligonucleotide
  Antisense strand to SEQ ID NO: 1967478
aggauaaacaaguucugac

SEQ ID NO: 1967480 - RNA, 19 nt, Artificial Sequence
  Description of Artificial Sequence: Synthetic oligonucleotide
  Sense strand starting at position 3124 of SEQ ID NO: 1880442
acuuguuuauccuuaaguc

SEQ ID NO: 1967481 - RNA, 19 nt, Artificial Sequence
  Description of Artificial Sequence: Synthetic oligonucleotide
  Antisense strand to SEQ ID NO: 1967480
gacuuaaggauaaacaagu

SEQ ID NO: 1967482 - RNA, 19 nt, Artificial Sequence
  Description of Artificial Sequence: Synthetic oligonucleotide
  Sense strand starting at position 3125 of SEQ ID NO: 1880442
cuuguuuauccuuaagucu

SEQ ID NO: 1967483 - RNA, 19 nt, Artificial Sequence
  Description of Artificial Sequence: Synthetic oligonucleotide
  Antisense strand to SEQ ID NO: 1967482
agacuuaaggauaaacaag

SEQ ID NO: 1967484 - RNA, 19 nt, Artificial Sequence
  Description of Artificial Sequence: Synthetic oligonucleotide
  Sense strand starting at position 3163 of SEQ ID NO: 1880442
ccugauaugguuuggacuu

SEQ ID NO: 1967485 - RNA, 19 nt, Artificial Sequence
  Description of Artificial Sequence: Synthetic oligonucleotide
  Antisense strand to SEQ ID NO: 1967484
aaguccaaaccauaucagg

SEQ ID NO: 1967486 - RNA, 19 nt, Artificial Sequence
  Description of Artificial Sequence: Synthetic oligonucleotide
  Sense strand starting at position 3338 of SEQ ID NO: 1880442
ucacgagggugagugaauu

SEQ ID NO: 1967487 - RNA, 19 nt, Artificial Sequence
  Description of Artificial Sequence: Synthetic oligonucleotide
  Antisense strand to SEQ ID NO: 1967486
aauucacucacccucguga

SEQ ID NO: 1967488 - RNA, 19 nt, Artificial Sequence
  Description of Artificial Sequence: Synthetic oligonucleotide
  Sense strand starting at position 3494 of SEQ ID NO: 1880442
aagauuuguucuuauggua

SEQ ID NO: 1967489 - RNA, 19 nt, Artificial Sequence
  Description of Artificial Sequence: Synthetic oligonucleotide
  Antisense strand to SEQ ID NO: 1967488
uaccauaagaacaaaucuu

SEQ ID NO: 1967490 - RNA, 19 nt, Artificial Sequence
  Description of Artificial Sequence: Synthetic oligonucleotide
  Sense strand starting at position 3497 of SEQ ID NO: 1880442
auuuguucuuaugguagau

SEQ ID NO: 1967491 - RNA, 19 nt, Artificial Sequence
  Description of Artificial Sequence: Synthetic oligonucleotide
  Antisense strand to SEQ ID NO: 1967490
aucuaccauaagaacaaau

SEQ ID NO: 1967492 - RNA, 19 nt, Artificial Sequence
  Description of Artificial Sequence: Synthetic oligonucleotide
  Sense strand starting at position 3501 of SEQ ID NO: 1880442
guucuuaugguagauauua

SEQ ID NO: 1967493 - RNA, 19 nt, Artificial Sequence
  Description of Artificial Sequence: Synthetic oligonucleotide
  Antisense strand to SEQ ID NO: 1967492
uaauaucuaccauaagaac

SEQ ID NO: 1967494 - RNA, 19 nt, Artificial Sequence
  Description of Artificial Sequence: Synthetic oligonucleotide
  Sense strand starting at position 3544 of SEQ ID NO: 1880442
cuuccuucuuaaguagaga

SEQ ID NO: 1967495 - RNA, 19 nt, Artificial Sequence
  Description of Artificial Sequence: Synthetic oligonucleotide
  Antisense strand to SEQ ID NO: 1967494
ucucuacuuaagaaggaag

SEQ ID NO: 1967496 - RNA, 19 nt, Artificial Sequence
  Description of Artificial Sequence: Synthetic oligonucleotide
  Sense strand starting at position 3685 of SEQ ID NO: 1880442
aggcacuugugaucugcau

SEQ ID NO: 1967497 - RNA, 19 nt, Artificial Sequence
  Description of Artificial Sequence: Synthetic oligonucleotide
  Antisense strand to SEQ ID NO: 1967496
augcagaucacaagugccu

SEQ ID NO: 1967498 - RNA, 19 nt, Artificial Sequence
  Description of Artificial Sequence: Synthetic oligonucleotide
  Sense strand starting at position 3689 of SEQ ID NO: 1880442
acuugugaucugcaucagu

SEQ ID NO: 1967499 - RNA, 19 nt, Artificial Sequence
  Description of Artificial Sequence: Synthetic oligonucleotide
  Antisense strand to SEQ ID NO: 1967498
acugaugcagaucacaagu

SEQ ID NO: 1967500 - RNA, 19 nt, Artificial Sequence
  Description of Artificial Sequence: Synthetic oligonucleotide
  Sense strand starting at position 3764 of SEQ ID NO: 1880442
cauggaucugcugggcaaa

SEQ ID NO: 1967501 - RNA, 19 nt, Artificial Sequence
  Description of Artificial Sequence: Synthetic oligonucleotide
  Antisense strand to SEQ ID NO: 1967500
uuugcccagcagauccaug

SEQ ID NO: 1967502 - RNA, 19 nt, Artificial Sequence
  Description of Artificial Sequence: Synthetic oligonucleotide
  Sense strand starting at position 3830 of SEQ ID NO: 1880442
agucauaaugcucagaaua

SEQ ID NO: 1967503 - RNA, 19 nt, Artificial Sequence
  Description of Artificial Sequence: Synthetic oligonucleotide
  Antisense strand to SEQ ID NO: 1967502
uauucugagcauuaugacu

SEQ ID NO: 1967504 - RNA, 19 nt, Artificial Sequence
  Description of Artificial Sequence: Synthetic oligonucleotide
  Sense strand starting at position 3840 of SEQ ID NO: 1880442
cucagaauagcaugaaagu

SEQ ID NO: 1967505 - RNA, 19 nt, Artificial Sequence
  Description of Artificial Sequence: Synthetic oligonucleotide
  Antisense strand to SEQ ID NO: 1967504
acuuucaugcuauucugag

SEQ ID NO: 1967506 - RNA, 19 nt, Artificial Sequence
  Description of Artificial Sequence: Synthetic oligonucleotide
  Sense strand starting at position 3851 of SEQ ID NO: 1880442
augaaaguuugagaccagu

SEQ ID NO: 1967507 - RNA, 19 nt, Artificial Sequence
  Description of Artificial Sequence: Synthetic oligonucleotide
  Antisense strand to SEQ ID NO: 1967506
acuggucucaaacuuucau

SEQ ID NO: 1967508 - RNA, 19 nt, Artificial Sequence
  Description of Artificial Sequence: Synthetic oligonucleotide
  Sense strand starting at position 110 of SEQ ID NO: 1880443
auuguuuaugcagaaagua

SEQ ID NO: 1967509 - RNA, 19 nt, Artificial Sequence
  Description of Artificial Sequence: Synthetic oligonucleotide
  Antisense strand to SEQ ID NO: 1967508
uacuuucugcauaaacaau

SEQ ID NO: 1967510 - RNA, 19 nt, Artificial Sequence
  Description of Artificial Sequence: Synthetic oligonucleotide
  Sense strand starting at position 132 of SEQ ID NO: 1880443
gggaacaaauuccaauaau

SEQ ID NO: 1967511 - RNA, 19 nt, Artificial Sequence
  Description of Artificial Sequence: Synthetic oligonucleotide
  Antisense strand to SEQ ID NO: 1967510
auuauuggaauuuguuccc

SEQ ID NO: 1967512 - RNA, 19 nt, Artificial Sequence
  Description of Artificial Sequence: Synthetic oligonucleotide
  Sense strand starting at position 172 of SEQ ID NO: 1880443
gcuaaauauuuggaaccuu

SEQ ID NO: 1967513 - RNA, 19 nt, Artificial Sequence
  Description of Artificial Sequence: Synthetic oligonucleotide
  Antisense strand to SEQ ID NO: 1967512
aagguuccaaauauuuagc

SEQ ID NO: 1967514 - RNA, 19 nt, Artificial Sequence
  Description of Artificial Sequence: Synthetic oligonucleotide
  Sense strand starting at position 473 of SEQ ID NO: 1880443
uauggaauauaguuucuga

SEQ ID NO: 1967515 - RNA, 19 nt, Artificial Sequence
  Description of Artificial Sequence: Synthetic oligonucleotide
  Antisense strand to SEQ ID NO: 1967514
ucagaaacuauauuccaua

SEQ ID NO: 1967516 - RNA, 19 nt, Artificial Sequence
  Description of Artificial Sequence: Synthetic oligonucleotide
  Sense strand starting at position 824 of SEQ ID NO: 1880443
guauaaaguuuccuuucga

SEQ ID NO: 1967517 - RNA, 19 nt, Artificial Sequence
  Description of Artificial Sequence: Synthetic oligonucleotide
  Antisense strand to SEQ ID NO: 1967516
ucgaaaggaaacuuuauac

SEQ ID NO: 1967518 - RNA, 19 nt, Artificial Sequence
  Description of Artificial Sequence: Synthetic oligonucleotide
  Sense strand starting at position 930 of SEQ ID NO: 1880443
acauuuguuucuguaaguc

SEQ ID NO: 1967519 - RNA, 19 nt, Artificial Sequence
  Description of Artificial Sequence: Synthetic oligonucleotide
  Antisense strand to SEQ ID NO: 1967518
gacuuacagaaacaaaugu

SEQ ID NO: 1967520 - RNA, 19 nt, Artificial Sequence
  Description of Artificial Sequence: Synthetic oligonucleotide
  Sense strand starting at position 1126 of SEQ ID NO: 1880443
uuucuuagagcucaaagcu

SEQ ID NO: 1967521 - RNA, 19 nt, Artificial Sequence
  Description of Artificial Sequence: Synthetic oligonucleotide
  Antisense strand to SEQ ID NO: 1967520
agcuuugagcucuaagaaa

SEQ ID NO: 1967522 - RNA, 19 nt, Artificial Sequence
  Description of Artificial Sequence: Synthetic oligonucleotide
  Sense strand starting at position 1134 of SEQ ID NO: 1880443
agcucaaagcuuugacagu

SEQ ID NO: 1967523 - RNA, 19 nt, Artificial Sequence
  Description of Artificial Sequence: Synthetic oligonucleotide
  Antisense strand to SEQ ID NO: 1967522
acugucaaagcuuugagcu

SEQ ID NO: 1967524 - RNA, 19 nt, Artificial Sequence
  Description of Artificial Sequence: Synthetic oligonucleotide
  Sense strand starting at position 1140 of SEQ ID NO: 1880443
aagcuuugacaguaaaugu

SEQ ID NO: 1967525 - RNA, 19 nt, Artificial Sequence
  Description of Artificial Sequence: Synthetic oligonucleotide
  Antisense strand to SEQ ID NO: 1967524
acauuuacugucaaagcuu

SEQ ID NO: 1967526 - RNA, 19 nt, Artificial Sequence
  Description of Artificial Sequence: Synthetic oligonucleotide
  Sense strand starting at position 1166 of SEQ ID NO: 1880443
cacugaaguugacuuguua

SEQ ID NO: 1967527 - RNA, 19 nt, Artificial Sequence
  Description of Artificial Sequence: Synthetic oligonucleotide
  Antisense strand to SEQ ID NO: 1967526
uaacaagucaacuucagug

SEQ ID NO: 1967528 - RNA, 19 nt, Artificial Sequence
  Description of Artificial Sequence: Synthetic oligonucleotide
  Sense strand starting at position 1170 of SEQ ID NO: 1880443
gaaguugacuuguuagcuu

SEQ ID NO: 1967529 - RNA, 19 nt, Artificial Sequence
  Description of Artificial Sequence: Synthetic oligonucleotide
  Antisense strand to SEQ ID NO: 1967528
aagcuaacaagucaacuuc

SEQ ID NO: 1967530 - RNA, 19 nt, Artificial Sequence
  Description of Artificial Sequence: Synthetic oligonucleotide
  Sense strand starting at position 1198 of SEQ ID NO: 1880443
gccuuacugcugucggcua

SEQ ID NO: 1967531 - RNA, 19 nt, Artificial Sequence
  Description of Artificial Sequence: Synthetic oligonucleotide
  Antisense strand to SEQ ID NO: 1967530
uagccgacagcaguaaggc

SEQ ID NO: 1967532 - RNA, 19 nt, Artificial Sequence
  Description of Artificial Sequence: Synthetic oligonucleotide
  Sense strand starting at position 1317 of SEQ ID NO: 1880443
ggcauauaauucccacugu

SEQ ID NO: 1967533 - RNA, 19 nt, Artificial Sequence
  Description of Artificial Sequence: Synthetic oligonucleotide
  Antisense strand to SEQ ID NO: 1967532
acagugggaauuauaugcc

SEQ ID NO: 1967534 - RNA, 19 nt, Artificial Sequence
  Description of Artificial Sequence: Synthetic oligonucleotide
  Sense strand starting at position 1388 of SEQ ID NO: 1880443
ucaagagauccuuggcggu

SEQ ID NO: 1967535 - RNA, 19 nt, Artificial Sequence
  Description of Artificial Sequence: Synthetic oligonucleotide
  Antisense strand to SEQ ID NO: 1967534
accgccaaggaucucuuga

SEQ ID NO: 1967536 - RNA, 19 nt, Artificial Sequence
  Description of Artificial Sequence: Synthetic oligonucleotide
  Sense strand starting at position 1404 of SEQ ID NO: 1880443
gguuccauuugcccuugaa

SEQ ID NO: 1967537 - RNA, 19 nt, Artificial Sequence
  Description of Artificial Sequence: Synthetic oligonucleotide
  Antisense strand to SEQ ID NO: 1967536
uucaagggcaaauggaacc

SEQ ID NO: 1967538 - RNA, 19 nt, Artificial Sequence
  Description of Artificial Sequence: Synthetic oligonucleotide
  Sense strand starting at position 1453 of SEQ ID NO: 1880443
cuuugcacuuagucuagaa

SEQ ID NO: 1967539 - RNA, 19 nt, Artificial Sequence
  Description of Artificial Sequence: Synthetic oligonucleotide
  Antisense strand to SEQ ID NO: 1967538
uucuagacuaagugcaaag

SEQ ID NO: 1967540 - RNA, 19 nt, Artificial Sequence
  Description of Artificial Sequence: Synthetic oligonucleotide
  Sense strand starting at position 1507 of SEQ ID NO: 1880443
ugcgcaagucucuacaaga

SEQ ID NO: 1967541 - RNA, 19 nt, Artificial Sequence
  Description of Artificial Sequence: Synthetic oligonucleotide
  Antisense strand to SEQ ID NO: 1967540
ucuuguagagacuugcgca

SEQ ID NO: 1967542 - RNA, 19 nt, Artificial Sequence
  Description of Artificial Sequence: Synthetic oligonucleotide
  Sense strand starting at position 1530 of SEQ ID NO: 1880443
ggaggaucuacgugguaac

SEQ ID NO: 1967543 - RNA, 19 nt, Artificial Sequence
  Description of Artificial Sequence: Synthetic oligonucleotide
  Antisense strand to SEQ ID NO: 1967542
guuaccacguagauccucc

SEQ ID NO: 1967544 - RNA, 19 nt, Artificial Sequence
  Description of Artificial Sequence: Synthetic oligonucleotide
  Sense strand starting at position 1531 of SEQ ID NO: 1880443
gaggaucuacgugguaacu

SEQ ID NO: 1967545 - RNA, 19 nt, Artificial Sequence
  Description of Artificial Sequence: Synthetic oligonucleotide
  Antisense strand to SEQ ID NO: 1967544
aguuaccacguagauccuc

SEQ ID NO: 1967546 - RNA, 19 nt, Artificial Sequence
  Description of Artificial Sequence: Synthetic oligonucleotide
  Sense strand starting at position 1540 of SEQ ID NO: 1880443
cgugguaacuaacuuuaac

SEQ ID NO: 1967547 - RNA, 19 nt, Artificial Sequence
  Description of Artificial Sequence: Synthetic oligonucleotide
  Antisense strand to SEQ ID NO: 1967546
guuaaaguuaguuaccacg

SEQ ID NO: 1967548 - RNA, 19 nt, Artificial Sequence
  Description of Artificial Sequence: Synthetic oligonucleotide
  Sense strand starting at position 1571 of SEQ ID NO: 1880443
ggcuuuauuaacgaguuua

SEQ ID NO: 1967549 - RNA, 19 nt, Artificial Sequence
  Description of Artificial Sequence: Synthetic oligonucleotide
  Antisense strand to SEQ ID NO: 1967548
uaaacucguuaauaaagcc

SEQ ID NO: 1967550 - RNA, 19 nt, Artificial Sequence
  Description of Artificial Sequence: Synthetic oligonucleotide
  Sense strand starting at position 1611 of SEQ ID NO: 1880443
gcaagauguggcuaauucu

SEQ ID NO: 1967551 - RNA, 19 nt, Artificial Sequence
  Description of Artificial Sequence: Synthetic oligonucleotide
  Antisense strand to SEQ ID NO: 1967550
agaauuagccacaucuugc

SEQ ID NO: 1967552 - RNA, 19 nt, Artificial Sequence
  Description of Artificial Sequence: Synthetic oligonucleotide
  Sense strand starting at position 1614 of SEQ ID NO: 1880443
agauguggcuaauucuuaa

SEQ ID NO: 1967553 - RNA, 19 nt, Artificial Sequence
  Description of Artificial Sequence: Synthetic oligonucleotide
  Antisense strand to SEQ ID NO: 1967552
uuaagaauuagccacaucu

SEQ ID NO: 1967554 - RNA, 19 nt, Artificial Sequence
  Description of Artificial Sequence: Synthetic oligonucleotide
  Sense strand starting at position 1666 of SEQ ID NO: 1880443
aaaugaugccacgaaaugu

SEQ ID NO: 1967555 - RNA, 19 nt, Artificial Sequence
  Description of Artificial Sequence: Synthetic oligonucleotide
  Antisense strand to SEQ ID NO: 1967554
acauuucguggcaucauuu

SEQ ID NO: 1967556 - RNA, 19 nt, Artificial Sequence
  Description of Artificial Sequence: Synthetic oligonucleotide
  Sense strand starting at position 2789 of SEQ ID NO: 1880443
ucguuacaaucugcaauau

SEQ ID NO: 1967557 - RNA, 19 nt, Artificial Sequence
  Description of Artificial Sequence: Synthetic oligonucleotide
  Antisense strand to SEQ ID NO: 1967556
auauugcagauuguaacga

SEQ ID NO: 1967558 - RNA, 19 nt, Artificial Sequence
  Description of Artificial Sequence: Synthetic oligonucleotide
  Sense strand starting at position 2790 of SEQ ID NO: 1880443
cguuacaaucugcaauaua

SEQ ID NO: 1967559 - RNA, 19 nt, Artificial Sequence
  Description of Artificial Sequence: Synthetic oligonucleotide
  Antisense strand to SEQ ID NO: 1967558
uauauugcagauuguaacg

SEQ ID NO: 1967560 - RNA, 19 nt, Artificial Sequence
  Description of Artificial Sequence: Synthetic oligonucleotide
  Sense strand starting at position 2821 of SEQ ID NO: 1880443
aaguauugacaauguguga

SEQ ID NO: 1967561 - RNA, 19 nt, Artificial Sequence
  Description of Artificial Sequence: Synthetic oligonucleotide
  Antisense strand to SEQ ID NO: 1967560
ucacacauugucaauacuu

SEQ ID NO: 1967562 - RNA, 19 nt, Artificial Sequence
  Description of Artificial Sequence: Synthetic oligonucleotide
  Sense strand starting at position 2852 of SEQ ID NO: 1880443
cccggagcucucgucugua

SEQ ID NO: 1967563 - RNA, 19 nt, Artificial Sequence
  Description of Artificial Sequence: Synthetic oligonucleotide
  Antisense strand to SEQ ID NO: 1967562
uacagacgagagcuccggg

SEQ ID NO: 1967564 - RNA, 19 nt, Artificial Sequence
  Description of Artificial Sequence: Synthetic oligonucleotide
  Sense strand starting at position 2854 of SEQ ID NO: 1880443
cggagcucucgucuguaau

SEQ ID NO: 1967565 - RNA, 19 nt, Artificial Sequence
  Description of Artificial Sequence: Synthetic oligonucleotide
  Antisense strand to SEQ ID NO: 1967564
auuacagacgagagcuccg

SEQ ID NO: 1967566 - RNA, 19 nt, Artificial Sequence
  Description of Artificial Sequence: Synthetic oligonucleotide
  Sense strand starting at position 2981 of SEQ ID NO: 1880443
ugcuucucugucuauuaca

SEQ ID NO: 1967567 - RNA, 19 nt, Artificial Sequence
  Description of Artificial Sequence: Synthetic oligonucleotide
  Antisense strand to SEQ ID NO: 1967566
uguaauagacagagaagca

SEQ ID NO: 1967568 - RNA, 19 nt, Artificial Sequence
  Description of Artificial Sequence: Synthetic oligonucleotide
  Sense strand starting at position 3123 of SEQ ID NO: 1880443
uuguguuuacaaggccaca

SEQ ID NO: 1967569 - RNA, 19 nt, Artificial Sequence
  Description of Artificial Sequence: Synthetic oligonucleotide
  Antisense strand to SEQ ID NO: 1967568
uguggccuuguaaacacaa

SEQ ID NO: 1967570 - RNA, 19 nt, Artificial Sequence
  Description of Artificial Sequence: Synthetic oligonucleotide
  Sense strand starting at position 3185 of SEQ ID NO: 1880443
acugauauacugcgaguaa

SEQ ID NO: 1967571 - RNA, 19 nt, Artificial Sequence
  Description of Artificial Sequence: Synthetic oligonucleotide
  Antisense strand to SEQ ID NO: 1967570
uuacucgcaguauaucagu

SEQ ID NO: 1967572 - RNA, 19 nt, Artificial Sequence
  Description of Artificial Sequence: Synthetic oligonucleotide
  Sense strand starting at position 3189 of SEQ ID NO: 1880443
auauacugcgaguaaugaa

SEQ ID NO: 1967573 - RNA, 19 nt, Artificial Sequence
  Description of Artificial Sequence: Synthetic oligonucleotide
  Antisense strand to SEQ ID NO: 1967572
uucauuacucgcaguauau

SEQ ID NO: 1967574 - RNA, 19 nt, Artificial Sequence
  Description of Artificial Sequence: Synthetic oligonucleotide
  Sense strand starting at position 3264 of SEQ ID NO: 1880443
cacagaugcgcccagaaga

SEQ ID NO: 1967575 - RNA, 19 nt, Artificial Sequence
  Description of Artificial Sequence: Synthetic oligonucleotide
  Antisense strand to SEQ ID NO: 1967574
ucuucugggcgcaucugug

SEQ ID NO: 1967576 - RNA, 19 nt, Artificial Sequence
  Description of Artificial Sequence: Synthetic oligonucleotide
  Sense strand starting at position 3526 of SEQ ID NO: 1880443
uguacauauccaugucagu

SEQ ID NO: 1967577 - RNA, 19 nt, Artificial Sequence
  Description of Artificial Sequence: Synthetic oligonucleotide
  Antisense strand to SEQ ID NO: 1967576
acugacauggauauguaca

SEQ ID NO: 1967578 - RNA, 19 nt, Artificial Sequence
  Description of Artificial Sequence: Synthetic oligonucleotide
  Sense strand starting at position 3620 of SEQ ID NO: 1880443
guguugagcgguguuguuu

SEQ ID NO: 1967579 - RNA, 19 nt, Artificial Sequence
  Description of Artificial Sequence: Synthetic oligonucleotide
  Antisense strand to SEQ ID NO: 1967578
aaacaacaccgcucaacac

SEQ ID NO: 1967580 - RNA, 19 nt, Artificial Sequence
  Description of Artificial Sequence: Synthetic oligonucleotide
  Sense strand starting at position 3836 of SEQ ID NO: 1880443
uuugguaagacuuggcuau

SEQ ID NO: 1967581 - RNA, 19 nt, Artificial Sequence
  Description of Artificial Sequence: Synthetic oligonucleotide
  Antisense strand to SEQ ID NO: 1967580
auagccaagucuuaccaaa

SEQ ID NO: 1967582 - RNA, 19 nt, Artificial Sequence
  Description of Artificial Sequence: Synthetic oligonucleotide
  Sense strand starting at position 3837 of SEQ ID NO: 1880443
uugguaagacuuggcuaua

SEQ ID NO: 1967583 - RNA, 19 nt, Artificial Sequence
  Description of Artificial Sequence: Synthetic oligonucleotide
  Antisense strand to SEQ ID NO: 1967582
uauagccaagucuuaccaa

SEQ ID NO: 1967584 - RNA, 19 nt, Artificial Sequence
  Description of Artificial Sequence: Synthetic oligonucleotide
  Sense strand starting at position 3838 of SEQ ID NO: 1880443
ugguaagacuuggcuauag

SEQ ID NO: 1967585 - RNA, 19 nt, Artificial Sequence
  Description of Artificial Sequence: Synthetic oligonucleotide
  Antisense strand to SEQ ID NO: 1967584
cuauagccaagucuuacca

SEQ ID NO: 1967586 - RNA, 19 nt, Artificial Sequence
  Description of Artificial Sequence: Synthetic oligonucleotide
  Sense strand starting at position 3909 of SEQ ID NO: 1880443
uuaaauagauacgugauca

SEQ ID NO: 1967587 - RNA, 19 nt, Artificial Sequence
  Description of Artificial Sequence: Synthetic oligonucleotide
  Antisense strand to SEQ ID NO: 1967586
ugaucacguaucuauuuaa

SEQ ID NO: 1967588 - RNA, 19 nt, Artificial Sequence
  Description of Artificial Sequence: Synthetic oligonucleotide
  Sense strand starting at position 463 of SEQ ID NO: 1880444
guguuuggcaggugggaaa

SEQ ID NO: 1967589 - RNA, 19 nt, Artificial Sequence
  Description of Artificial Sequence: Synthetic oligonucleotide
  Antisense strand to SEQ ID NO: 1967588
uuucccaccugccaaacac

SEQ ID NO: 1967590 - RNA, 19 nt, Artificial Sequence
  Description of Artificial Sequence: Synthetic oligonucleotide
  Sense strand starting at position 632 of SEQ ID NO: 1880444
cggugacugacauggauau

SEQ ID NO: 1967591 - RNA, 19 nt, Artificial Sequence
  Description of Artificial Sequence: Synthetic oligonucleotide
  Antisense strand to SEQ ID NO: 1967590
auauccaugucagucaccg

SEQ ID NO: 1967592 - RNA, 19 nt, Artificial Sequence
  Description of Artificial Sequence: Synthetic oligonucleotide
  Sense strand starting at position 634 of SEQ ID NO: 1880444
gugacugacauggauaugu

SEQ ID NO: 1967593 - RNA, 19 nt, Artificial Sequence
  Description of Artificial Sequence: Synthetic oligonucleotide
  Antisense strand to SEQ ID NO: 1967592
acauauccaugucagucac

SEQ ID NO: 1967594 - RNA, 19 nt, Artificial Sequence
  Description of Artificial Sequence: Synthetic oligonucleotide
  Sense strand starting at position 767 of SEQ ID NO: 1880444
uauugagaccgcggaaagu

SEQ ID NO: 1967595 - RNA, 19 nt, Artificial Sequence
  Description of Artificial Sequence: Synthetic oligonucleotide
  Antisense strand to SEQ ID NO: 1967594
acuuuccgcggucucaaua

SEQ ID NO: 1967596 - RNA, 19 nt, Artificial Sequence
  Description of Artificial Sequence: Synthetic oligonucleotide
  Sense strand starting at position 917 of SEQ ID NO: 1880444
ggagcuauuaagugggaua

SEQ ID NO: 1967597 - RNA, 19 nt, Artificial Sequence
  Description of Artificial Sequence: Synthetic oligonucleotide
  Antisense strand to SEQ ID NO: 1967596
uaucccacuuaauagcucc

SEQ ID NO: 1967598 - RNA, 19 nt, Artificial Sequence
  Description of Artificial Sequence: Synthetic oligonucleotide
  Sense strand starting at position 931 of SEQ ID NO: 1880444
ggauaaucccucuggccuu

SEQ ID NO: 1967599 - RNA, 19 nt, Artificial Sequence
  Description of Artificial Sequence: Synthetic oligonucleotide
  Antisense strand to SEQ ID NO: 1967598
aaggccagagggauuaucc

SEQ ID NO: 1967600 - RNA, 19 nt, Artificial Sequence
  Description of Artificial Sequence: Synthetic oligonucleotide
  Sense strand starting at position 938 of SEQ ID NO: 1880444
cccucuggccuuugauaca

SEQ ID NO: 1967601 - RNA, 19 nt, Artificial Sequence
  Description of Artificial Sequence: Synthetic oligonucleotide
  Antisense strand to SEQ ID NO: 1967600
uguaucaaaggccagaggg

SEQ ID NO: 1967602 - RNA, 19 nt, Artificial Sequence
  Description of Artificial Sequence: Synthetic oligonucleotide
  Sense strand starting at position 950 of SEQ ID NO: 1880444
ugauacauuucuggacaug

SEQ ID NO: 1967603 - RNA, 19 nt, Artificial Sequence
  Description of Artificial Sequence: Synthetic oligonucleotide
  Antisense strand to SEQ ID NO: 1967602
cauguccagaaauguauca

SEQ ID NO: 1967604 - RNA, 19 nt, Artificial Sequence
  Description of Artificial Sequence: Synthetic oligonucleotide
  Sense strand starting at position 984 of SEQ ID NO: 1880444
gcaguauaucaguaggauc

SEQ ID NO: 1967605 - RNA, 19 nt, Artificial Sequence
  Description of Artificial Sequence: Synthetic oligonucleotide
  Antisense strand to SEQ ID NO: 1967604
gauccuacugauauacugc

SEQ ID NO: 1967606 - RNA, 19 nt, Artificial Sequence
  Description of Artificial Sequence: Synthetic oligonucleotide
  Sense strand starting at position 986 of SEQ ID NO: 1880444
aguauaucaguaggaucau

SEQ ID NO: 1967607 - RNA, 19 nt, Artificial Sequence
  Description of Artificial Sequence: Synthetic oligonucleotide
  Antisense strand to SEQ ID NO: 1967606
augauccuacugauauacu

SEQ ID NO: 1967608 - RNA, 19 nt, Artificial Sequence
  Description of Artificial Sequence: Synthetic oligonucleotide
  Sense strand starting at position 1292 of SEQ ID NO: 1880444
uguggauaaaugugcugau

SEQ ID NO: 1967609 - RNA, 19 nt, Artificial Sequence
  Description of Artificial Sequence: Synthetic oligonucleotide
  Antisense strand to SEQ ID NO: 1967608
aucagcacauuuauccaca

SEQ ID NO: 1967610 - RNA, 19 nt, Artificial Sequence
  Description of Artificial Sequence: Synthetic oligonucleotide
  Sense strand starting at position 1293 of SEQ ID NO: 1880444
guggauaaaugugcugauu

SEQ ID NO: 1967611 - RNA, 19 nt, Artificial Sequence
  Description of Artificial Sequence: Synthetic oligonucleotide
  Antisense strand to SEQ ID NO: 1967610
aaucagcacauuuauccac

SEQ ID NO: 1967612 - RNA, 19 nt, Artificial Sequence
  Description of Artificial Sequence: Synthetic oligonucleotide
  Sense strand starting at position 1338 of SEQ ID NO: 1880444
agucucacacauugucaau

SEQ ID NO: 1967613 - RNA, 19 nt, Artificial Sequence
  Description of Artificial Sequence: Synthetic oligonucleotide
  Antisense strand to SEQ ID NO: 1967612
auugacaaugugugagacu

SEQ ID NO: 1967614 - RNA, 19 nt, Artificial Sequence
  Description of Artificial Sequence: Synthetic oligonucleotide
  Sense strand starting at position 1347 of SEQ ID NO: 1880444
cauugucaauacuucggaa

SEQ ID NO: 1967615 - RNA, 19 nt, Artificial Sequence
  Description of Artificial Sequence: Synthetic oligonucleotide
  Antisense strand to SEQ ID NO: 1967614
uuccgaaguauugacaaug

SEQ ID NO: 1967616 - RNA, 19 nt, Artificial Sequence
  Description of Artificial Sequence: Synthetic oligonucleotide
  Sense strand starting at position 1349 of SEQ ID NO: 1880444
uugucaauacuucggaaga

SEQ ID NO: 1967617 - RNA, 19 nt, Artificial Sequence
  Description of Artificial Sequence: Synthetic oligonucleotide
  Antisense strand to SEQ ID NO: 1967616
ucuuccgaaguauugacaa

SEQ ID NO: 1967618 - RNA, 19 nt, Artificial Sequence
  Description of Artificial Sequence: Synthetic oligonucleotide
  Sense strand starting at position 2454 of SEQ ID NO: 1880444
auauuaaugcguuaaguga

SEQ ID NO: 1967619 - RNA, 19 nt, Artificial Sequence
  Description of Artificial Sequence: Synthetic oligonucleotide
  Antisense strand to SEQ ID NO: 1967618
ucacuuaacgcauuaauau

SEQ ID NO: 1967620 - RNA, 19 nt, Artificial Sequence
  Description of Artificial Sequence: Synthetic oligonucleotide
  Sense strand starting at position 2463 of SEQ ID NO: 1880444
cguuaagugaaaugggaaa

SEQ ID NO: 1967621 - RNA, 19 nt, Artificial Sequence
  Description of Artificial Sequence: Synthetic oligonucleotide
  Antisense strand to SEQ ID NO: 1967620
uuucccauuucacuuaacg

SEQ ID NO: 1967622 - RNA, 19 nt, Artificial Sequence
  Description of Artificial Sequence: Synthetic oligonucleotide
  Sense strand starting at position 2494 of SEQ ID NO: 1880444
ggcacauuucguggcauca

SEQ ID NO: 1967623 - RNA, 19 nt, Artificial Sequence
  Description of Artificial Sequence: Synthetic oligonucleotide
  Antisense strand to SEQ ID NO: 1967622
ugaugccacgaaaugugcc

SEQ ID NO: 1967624 - RNA, 19 nt, Artificial Sequence
  Description of Artificial Sequence: Synthetic oligonucleotide
  Sense strand starting at position 2558 of SEQ ID NO: 1880444
agccacaucuugccugaaa

SEQ ID NO: 1967625 - RNA, 19 nt, Artificial Sequence
  Description of Artificial Sequence: Synthetic oligonucleotide
  Antisense strand to SEQ ID NO: 1967624
uuucaggcaagauguggcu

SEQ ID NO: 1967626 - RNA, 19 nt, Artificial Sequence
  Description of Artificial Sequence: Synthetic oligonucleotide
  Sense strand starting at position 2559 of SEQ ID NO: 1880444
gccacaucuugccugaaag

SEQ ID NO: 1967627 - RNA, 19 nt, Artificial Sequence
  Description of Artificial Sequence: Synthetic oligonucleotide
  Antisense strand to SEQ ID NO: 1967626
cuuucaggcaagauguggc

SEQ ID NO: 1967628 - RNA, 19 nt, Artificial Sequence
  Description of Artificial Sequence: Synthetic oligonucleotide
  Sense strand starting at position 2560 of SEQ ID NO: 1880444
ccacaucuugccugaaagu

SEQ ID NO: 1967629 - RNA, 19 nt, Artificial Sequence
  Description of Artificial Sequence: Synthetic oligonucleotide
  Antisense strand to SEQ ID NO: 1967628
acuuucaggcaagaugugg

SEQ ID NO: 1967630 - RNA, 19 nt, Artificial Sequence
  Description of Artificial Sequence: Synthetic oligonucleotide
  Sense strand starting at position 2625 of SEQ ID NO: 1880444
uaaaguuaguuaccacgua

SEQ ID NO: 1967631 - RNA, 19 nt, Artificial Sequence
  Description of Artificial Sequence: Synthetic oligonucleotide
  Antisense strand to SEQ ID NO: 1967630
uacgugguaacuaacuuua

SEQ ID NO: 1967632 - RNA, 19 nt, Artificial Sequence
  Description of Artificial Sequence: Synthetic oligonucleotide
  Sense strand starting at position 2651 of SEQ ID NO: 1880444
cagucucuuguagagacuu

SEQ ID NO: 1967633 - RNA, 19 nt, Artificial Sequence
  Description of Artificial Sequence: Synthetic oligonucleotide
  Antisense strand to SEQ ID NO: 1967632
aagucucuacaagagacug

SEQ ID NO: 1967634 - RNA, 19 nt, Artificial Sequence
  Description of Artificial Sequence: Synthetic oligonucleotide
  Sense strand starting at position 2661 of SEQ ID NO: 1880444
uagagacuugcgcagguua

SEQ ID NO: 1967635 - RNA, 19 nt, Artificial Sequence
  Description of Artificial Sequence: Synthetic oligonucleotide
  Antisense strand to SEQ ID NO: 1967634
uaaccugcgcaagucucua

SEQ ID NO: 1967636 - RNA, 19 nt, Artificial Sequence
  Description of Artificial Sequence: Synthetic oligonucleotide
  Sense strand starting at position 2709 of SEQ ID NO: 1880444
uuucuagacuaagugcaaa

SEQ ID NO: 1967637 - RNA, 19 nt, Artificial Sequence
  Description of Artificial Sequence: Synthetic oligonucleotide
  Antisense strand to SEQ ID NO: 1967636
uuugcacuuagucuagaaa

SEQ ID NO: 1967638 - RNA, 19 nt, Artificial Sequence
  Description of Artificial Sequence: Synthetic oligonucleotide
  Sense strand starting at position 2777 of SEQ ID NO: 1880444
cgccaaggaucucuugaaa

SEQ ID NO: 1967639 - RNA, 19 nt, Artificial Sequence
  Description of Artificial Sequence: Synthetic oligonucleotide
  Antisense strand to SEQ ID NO: 1967638
uuucaagagauccuuggcg

SEQ ID NO: 1967640 - RNA, 19 nt, Artificial Sequence
  Description of Artificial Sequence: Synthetic oligonucleotide
  Sense strand starting at position 2841 of SEQ ID NO: 1880444
aauuuacagugggaauuau

SEQ ID NO: 1967641 - RNA, 19 nt, Artificial Sequence
  Description of Artificial Sequence: Synthetic oligonucleotide
  Antisense strand to SEQ ID NO: 1967640
auaauucccacuguaaauu

SEQ ID NO: 1967642 - RNA, 19 nt, Artificial Sequence
  Description of Artificial Sequence: Synthetic oligonucleotide
  Sense strand starting at position 2849 of SEQ ID NO: 1880444
gugggaauuauaugcccau

SEQ ID NO: 1967643 - RNA, 19 nt, Artificial Sequence
  Description of Artificial Sequence: Synthetic oligonucleotide
  Antisense strand to SEQ ID NO: 1967642
augggcauauaauucccac

SEQ ID NO: 1967644 - RNA, 19 nt, Artificial Sequence
  Description of Artificial Sequence: Synthetic oligonucleotide
  Sense strand starting at position 2852 of SEQ ID NO: 1880444
ggaauuauaugcccauguu

SEQ ID NO: 1967645 - RNA, 19 nt, Artificial Sequence
  Description of Artificial Sequence: Synthetic oligonucleotide
  Antisense strand to SEQ ID NO: 1967644
aacaugggcauauaauucc

SEQ ID NO: 1967646 - RNA, 19 nt, Artificial Sequence
  Description of Artificial Sequence: Synthetic oligonucleotide
  Sense strand starting at position 2902 of SEQ ID NO: 1880444
aagggauguucuuuaguga

SEQ ID NO: 1967647 - RNA, 19 nt, Artificial Sequence
  Description of Artificial Sequence: Synthetic oligonucleotide
  Antisense strand to SEQ ID NO: 1967646
ucacuaaagaacaucccuu

SEQ ID NO: 1967648 - RNA, 19 nt, Artificial Sequence
  Description of Artificial Sequence: Synthetic oligonucleotide
  Sense strand starting at position 2903 of SEQ ID NO: 1880444
agggauguucuuuagugau

SEQ ID NO: 1967649 - RNA, 19 nt, Artificial Sequence
  Description of Artificial Sequence: Synthetic oligonucleotide
  Antisense strand to SEQ ID NO: 1967648
aucacuaaagaacaucccu

SEQ ID NO: 1967650 - RNA, 19 nt, Artificial Sequence
  Description of Artificial Sequence: Synthetic oligonucleotide
  Sense strand starting at position 2905 of SEQ ID NO: 1880444
ggauguucuuuagugauua

SEQ ID NO: 1967651 - RNA, 19 nt, Artificial Sequence
  Description of Artificial Sequence: Synthetic oligonucleotide
  Antisense strand to SEQ ID NO: 1967650
uaaucacuaaagaacaucc

SEQ ID NO: 1967652 - RNA, 19 nt, Artificial Sequence
  Description of Artificial Sequence: Synthetic oligonucleotide
  Sense strand starting at position 3037 of SEQ ID NO: 1880444
agcuuugagcucuaagaaa

SEQ ID NO: 1967653 - RNA, 19 nt, Artificial Sequence
  Description of Artificial Sequence: Synthetic oligonucleotide
  Antisense strand to SEQ ID NO: 1967652
uuucuuagagcucaaagcu

SEQ ID NO: 1967654 - RNA, 19 nt, Artificial Sequence
  Description of Artificial Sequence: Synthetic oligonucleotide
  Sense strand starting at position 3168 of SEQ ID NO: 1880444
ugcagaugcauuugcggau

SEQ ID NO: 1967655 - RNA, 19 nt, Artificial Sequence
  Description of Artificial Sequence: Synthetic oligonucleotide
  Antisense strand to SEQ ID NO: 1967654
auccgcaaaugcaucugca

SEQ ID NO: 1967656 - RNA, 19 nt, Artificial Sequence
  Description of Artificial Sequence: Synthetic oligonucleotide
  Sense strand starting at position 3169 of SEQ ID NO: 1880444
gcagaugcauuugcggaua

SEQ ID NO: 1967657 - RNA, 19 nt, Artificial Sequence
  Description of Artificial Sequence: Synthetic oligonucleotide
  Antisense strand to SEQ ID NO: 1967656
uauccgcaaaugcaucugc

SEQ ID NO: 1967658 - RNA, 19 nt, Artificial Sequence
  Description of Artificial Sequence: Synthetic oligonucleotide
  Sense strand starting at position 3296 of SEQ ID NO: 1880444
cauguagaaaugugggaua

SEQ ID NO: 1967659 - RNA, 19 nt, Artificial Sequence
  Description of Artificial Sequence: Synthetic oligonucleotide
  Antisense strand to SEQ ID NO: 1967658
uaucccacauuucuacaug

SEQ ID NO: 1967660 - RNA, 19 nt, Artificial Sequence
  Description of Artificial Sequence: Synthetic oligonucleotide
  Sense strand starting at position 3464 of SEQ ID NO: 1880444
ccauguuugcuguaaguag

SEQ ID NO: 1967661 - RNA, 19 nt, Artificial Sequence
  Description of Artificial Sequence: Synthetic oligonucleotide
  Antisense strand to SEQ ID NO: 1967660
cuacuuacagcaaacaugg

SEQ ID NO: 1967662 - RNA, 19 nt, Artificial Sequence
  Description of Artificial Sequence: Synthetic oligonucleotide
  Sense strand starting at position 3505 of SEQ ID NO: 1880444
auauaauccugucuaagga

SEQ ID NO: 1967663 - RNA, 19 nt, Artificial Sequence
  Description of Artificial Sequence: Synthetic oligonucleotide
  Antisense strand to SEQ ID NO: 1967662
uccuuagacaggauuauau

SEQ ID NO: 1967664 - RNA, 19 nt, Artificial Sequence
  Description of Artificial Sequence: Synthetic oligonucleotide
  Sense strand starting at position 3818 of SEQ ID NO: 1880444
guguguuugagggaaugga

SEQ ID NO: 1967665 - RNA, 19 nt, Artificial Sequence
  Description of Artificial Sequence: Synthetic oligonucleotide
  Antisense strand to SEQ ID NO: 1967664
uccauucccucaaacacac

SEQ ID NO: 1967666 - RNA, 19 nt, Artificial Sequence
  Description of Artificial Sequence: Synthetic oligonucleotide
  Sense strand starting at position 3909 of SEQ ID NO: 1880444
uucuaagugguagaaguau

SEQ ID NO: 1967667 - RNA, 19 nt, Artificial Sequence
  Description of Artificial Sequence: Synthetic oligonucleotide
  Antisense strand to SEQ ID NO: 1967666
auacuucuaccacuuagaa

SEQ ID NO: 1967668 - RNA, 19 nt, Artificial Sequence
  Description of Artificial Sequence: Synthetic oligonucleotide
  Sense strand starting at position 165 of SEQ ID NO: 1880445
gacagugauggcuggaaca

SEQ ID NO: 1967669 - RNA, 19 nt, Artificial Sequence
  Description of Artificial Sequence: Synthetic oligonucleotide
  Antisense strand to SEQ ID NO: 1967668
uguuccagccaucacuguc

SEQ ID NO: 1967670 - RNA, 19 nt, Artificial Sequence
  Description of Artificial Sequence: Synthetic oligonucleotide
  Sense strand starting at position 233 of SEQ ID NO: 1880445
uugcucuuggcaggacaaa

SEQ ID NO: 1967671 - RNA, 19 nt, Artificial Sequence
  Description of Artificial Sequence: Synthetic oligonucleotide
  Antisense strand to SEQ ID NO: 1967670
uuuguccugccaagagcaa

SEQ ID NO: 1967672 - RNA, 19 nt, Artificial Sequence
  Description of Artificial Sequence: Synthetic oligonucleotide
  Sense strand starting at position 316 of SEQ ID NO: 1880445
uugugaggcucgguuuaaa

SEQ ID NO: 1967673 - RNA, 19 nt, Artificial Sequence
  Description of Artificial Sequence: Synthetic oligonucleotide
  Antisense strand to SEQ ID NO: 1967672
uuuaaaccgagccucacaa

SEQ ID NO: 1967674 - RNA, 19 nt, Artificial Sequence
  Description of Artificial Sequence: Synthetic oligonucleotide
  Sense strand starting at position 319 of SEQ ID NO: 1880445
ugaggcucgguuuaaauua

SEQ ID NO: 1967675 - RNA, 19 nt, Artificial Sequence
  Description of Artificial Sequence: Synthetic oligonucleotide
  Antisense strand to SEQ ID NO: 1967674
uaauuuaaaccgagccuca

SEQ ID NO: 1967676 - RNA, 19 nt, Artificial Sequence
  Description of Artificial Sequence: Synthetic oligonucleotide
  Sense strand starting at position 326 of SEQ ID NO: 1880445
cgguuuaaauuagcuguca

SEQ ID NO: 1967677 - RNA, 19 nt, Artificial Sequence
  Description of Artificial Sequence: Synthetic oligonucleotide
  Antisense strand to SEQ ID NO: 1967676
ugacagcuaauuuaaaccg

SEQ ID NO: 1967678 - RNA, 19 nt, Artificial Sequence
  Description of Artificial Sequence: Synthetic oligonucleotide
  Sense strand starting at position 328 of SEQ ID NO: 1880445
guuuaaauuagcugucagg

SEQ ID NO: 1967679 - RNA, 19 nt, Artificial Sequence
  Description of Artificial Sequence: Synthetic oligonucleotide
  Antisense strand to SEQ ID NO: 1967678
ccugacagcuaauuuaaac

SEQ ID NO: 1967680 - RNA, 19 nt, Artificial Sequence
  Description of Artificial Sequence: Synthetic oligonucleotide
  Sense strand starting at position 339 of SEQ ID NO: 1880445
cugucagggcuccauugaa

SEQ ID NO: 1967681 - RNA, 19 nt, Artificial Sequence
  Description of Artificial Sequence: Synthetic oligonucleotide
  Antisense strand to SEQ ID NO: 1967680
uucaauggagcccugacag

SEQ ID NO: 1967682 - RNA, 19 nt, Artificial Sequence
  Description of Artificial Sequence: Synthetic oligonucleotide
  Sense strand starting at position 361 of SEQ ID NO: 1880445
gguuuaauuguugauuggu

SEQ ID NO: 1967683 - RNA, 19 nt, Artificial Sequence
  Description of Artificial Sequence: Synthetic oligonucleotide
  Antisense strand to SEQ ID NO: 1967682
accaaucaacaauuaaacc

SEQ ID NO: 1967684 - RNA, 19 nt, Artificial Sequence
  Description of Artificial Sequence: Synthetic oligonucleotide
  Sense strand starting at position 371 of SEQ ID NO: 1880445
uugauuggugcugaaauga

SEQ ID NO: 1967685 - RNA, 19 nt, Artificial Sequence
  Description of Artificial Sequence: Synthetic oligonucleotide
  Antisense strand to SEQ ID NO: 1967684
ucauuucagcaccaaucaa

SEQ ID NO: 1967686 - RNA, 19 nt, Artificial Sequence
  Description of Artificial Sequence: Synthetic oligonucleotide
  Sense strand starting at position 387 of SEQ ID NO: 1880445
ugaugaaugagauguggcu

SEQ ID NO: 1967687 - RNA, 19 nt, Artificial Sequence
  Description of Artificial Sequence: Synthetic oligonucleotide
  Antisense strand to SEQ ID NO: 1967686
agccacaucucauucauca

SEQ ID NO: 1967688 - RNA, 19 nt, Artificial Sequence
  Description of Artificial Sequence: Synthetic oligonucleotide
  Sense strand starting at position 389 of SEQ ID NO: 1880445
augaaugagauguggcuuu

SEQ ID NO: 1967689 - RNA, 19 nt, Artificial Sequence
  Description of Artificial Sequence: Synthetic oligonucleotide
  Antisense strand to SEQ ID NO: 1967688
aaagccacaucucauucau

SEQ ID NO: 1967690 - RNA, 19 nt, Artificial Sequence
  Description of Artificial Sequence: Synthetic oligonucleotide
  Sense strand starting at position 564 of SEQ ID NO: 1880445
guggucuaguguuccagga

SEQ ID NO: 1967691 - RNA, 19 nt, Artificial Sequence
  Description of Artificial Sequence: Synthetic oligonucleotide
  Antisense strand to SEQ ID NO: 1967690
uccuggaacacuagaccac

SEQ ID NO: 1967692 - RNA, 19 nt, Artificial Sequence
  Description of Artificial Sequence: Synthetic oligonucleotide
  Sense strand starting at position 568 of SEQ ID NO: 1880445
ucuaguguuccaggacaga

SEQ ID NO: 1967693 - RNA, 19 nt, Artificial Sequence
  Description of Artificial Sequence: Synthetic oligonucleotide
  Antisense strand to SEQ ID NO: 1967692
ucuguccuggaacacuaga

SEQ ID NO: 1967694 - RNA, 19 nt, Artificial Sequence
  Description of Artificial Sequence: Synthetic oligonucleotide
  Sense strand starting at position 733 of SEQ ID NO: 1880445
agaccaaucuuccuagagu

SEQ ID NO: 1967695 - RNA, 19 nt, Artificial Sequence
  Description of Artificial Sequence: Synthetic oligonucleotide
  Antisense strand to SEQ ID NO: 1967694
acucuaggaagauuggucu

SEQ ID NO: 1967696 - RNA, 19 nt, Artificial Sequence
  Description of Artificial Sequence: Synthetic oligonucleotide
  Sense strand starting at position 736 of SEQ ID NO: 1880445
ccaaucuuccuagaguuga

SEQ ID NO: 1967697 - RNA, 19 nt, Artificial Sequence
  Description of Artificial Sequence: Synthetic oligonucleotide
  Antisense strand to SEQ ID NO: 1967696
ucaacucuaggaagauugg

SEQ ID NO: 1967698 - RNA, 19 nt, Artificial Sequence
  Description of Artificial Sequence: Synthetic oligonucleotide
  Sense strand starting at position 841 of SEQ ID NO: 1880445
acugcauggcuuugagaag

SEQ ID NO: 1967699 - RNA, 19 nt, Artificial Sequence
  Description of Artificial Sequence: Synthetic oligonucleotide
  Antisense strand to SEQ ID NO: 1967698
cuucucaaagccaugcagu

SEQ ID NO: 1967700 - RNA, 19 nt, Artificial Sequence
  Description of Artificial Sequence: Synthetic oligonucleotide
  Sense strand starting at position 853 of SEQ ID NO: 1880445
ugagaagucauaugagcuc

SEQ ID NO: 1967701 - RNA, 19 nt, Artificial Sequence
  Description of Artificial Sequence: Synthetic oligonucleotide
  Antisense strand to SEQ ID NO: 1967700
gagcucauaugacuucuca

SEQ ID NO: 1967702 - RNA, 19 nt, Artificial Sequence
  Description of Artificial Sequence: Synthetic oligonucleotide
  Sense strand starting at position 862 of SEQ ID NO: 1880445
auaugagcucucugagccu

SEQ ID NO: 1967703 - RNA, 19 nt, Artificial Sequence
  Description of Artificial Sequence: Synthetic oligonucleotide
  Antisense strand to SEQ ID NO: 1967702
aggcucagagagcucauau

SEQ ID NO: 1967704 - RNA, 19 nt, Artificial Sequence
  Description of Artificial Sequence: Synthetic oligonucleotide
  Sense strand starting at position 934 of SEQ ID NO: 1880445
ggagcuguugagggaucaa

SEQ ID NO: 1967705 - RNA, 19 nt, Artificial Sequence
  Description of Artificial Sequence: Synthetic oligonucleotide
  Antisense strand to SEQ ID NO: 1967704
uugaucccucaacagcucc

SEQ ID NO: 1967706 - RNA, 19 nt, Artificial Sequence
  Description of Artificial Sequence: Synthetic oligonucleotide
  Sense strand starting at position 1748 of SEQ ID NO: 1880445
ugagcucaccugugacagu

SEQ ID NO: 1967707 - RNA, 19 nt, Artificial Sequence
  Description of Artificial Sequence: Synthetic oligonucleotide
  Antisense strand to SEQ ID NO: 1967706
acugucacaggugagcuca

SEQ ID NO: 1967708 - RNA, 19 nt, Artificial Sequence
  Description of Artificial Sequence: Synthetic oligonucleotide
  Sense strand starting at position 2420 of SEQ ID NO: 1880445
cgugccauuucgucuucua

SEQ ID NO: 1967709 - RNA, 19 nt, Artificial Sequence
  Description of Artificial Sequence: Synthetic oligonucleotide
  Antisense strand to SEQ ID NO: 1967708
uagaagacgaaauggcacg

SEQ ID NO: 1967710 - RNA, 19 nt, Artificial Sequence
  Description of Artificial Sequence: Synthetic oligonucleotide
  Sense strand starting at position 3139 of SEQ ID NO: 1880445
acaugugaaguugguauua

SEQ ID NO: 1967711 - RNA, 19 nt, Artificial Sequence
  Description of Artificial Sequence: Synthetic oligonucleotide
  Antisense strand to SEQ ID NO: 1967710
uaauaccaacuucacaugu

SEQ ID NO: 1967712 - RNA, 19 nt, Artificial Sequence
  Description of Artificial Sequence: Synthetic oligonucleotide
  Sense strand starting at position 3152 of SEQ ID NO: 1880445
guauuauuggaaugccuac

SEQ ID NO: 1967713 - RNA, 19 nt, Artificial Sequence
  Description of Artificial Sequence: Synthetic oligonucleotide
  Antisense strand to SEQ ID NO: 1967712
guaggcauuccaauaauac

SEQ ID NO: 1967714 - RNA, 19 nt, Artificial Sequence
  Description of Artificial Sequence: Synthetic oligonucleotide
  Sense strand starting at position 3186 of SEQ ID NO: 1880445
aaacgaaaguagguauuau

SEQ ID NO: 1967715 - RNA, 19 nt, Artificial Sequence
  Description of Artificial Sequence: Synthetic oligonucleotide
  Antisense strand to SEQ ID NO: 1967714
auaauaccuacuuucguuu

SEQ ID NO: 1967716 - RNA, 19 nt, Artificial Sequence
  Description of Artificial Sequence: Synthetic oligonucleotide
  Sense strand starting at position 3231 of SEQ ID NO: 1880445
aagguuuggagagguuaaa

SEQ ID NO: 1967717 - RNA, 19 nt, Artificial Sequence
  Description of Artificial Sequence: Synthetic oligonucleotide
  Antisense strand to SEQ ID NO: 1967716
uuuaaccucuccaaaccuu

SEQ ID NO: 1967718 - RNA, 19 nt, Artificial Sequence
  Description of Artificial Sequence: Synthetic oligonucleotide
  Sense strand starting at position 3315 of SEQ ID NO: 1880445
ggaagugcauuugagacau

SEQ ID NO: 1967719 - RNA, 19 nt, Artificial Sequence
  Description of Artificial Sequence: Synthetic oligonucleotide
  Antisense strand to SEQ ID NO: 1967718
augucucaaaugcacuucc

SEQ ID NO: 1967720 - RNA, 19 nt, Artificial Sequence
  Description of Artificial Sequence: Synthetic oligonucleotide
  Sense strand starting at position 3390 of SEQ ID NO: 1880445
uggcaacucagagauguua

SEQ ID NO: 1967721 - RNA, 19 nt, Artificial Sequence
  Description of Artificial Sequence: Synthetic oligonucleotide
  Antisense strand to SEQ ID NO: 1967720
uaacaucucugaguugcca

SEQ ID NO: 1967722 - RNA, 19 nt, Artificial Sequence
  Description of Artificial Sequence: Synthetic oligonucleotide
  Sense strand starting at position 3392 of SEQ ID NO: 1880445
gcaacucagagauguuaag

SEQ ID NO: 1967723 - RNA, 19 nt, Artificial Sequence
  Description of Artificial Sequence: Synthetic oligonucleotide
  Antisense strand to SEQ ID NO: 1967722
cuuaacaucucugaguugc

SEQ ID NO: 1967724 - RNA, 19 nt, Artificial Sequence
  Description of Artificial Sequence: Synthetic oligonucleotide
  Sense strand starting at position 3398 of SEQ ID NO: 1880445
cagagauguuaagaaauga

SEQ ID NO: 1967725 - RNA, 19 nt, Artificial Sequence
  Description of Artificial Sequence: Synthetic oligonucleotide
  Antisense strand to SEQ ID NO: 1967724
ucauuucuuaacaucucug

SEQ ID NO: 1967726 - RNA, 19 nt, Artificial Sequence
  Description of Artificial Sequence: Synthetic oligonucleotide
  Sense strand starting at position 3538 of SEQ ID NO: 1880445
uucccuuugccuggaguua

SEQ ID NO: 1967727 - RNA, 19 nt, Artificial Sequence
  Description of Artificial Sequence: Synthetic oligonucleotide
  Antisense strand to SEQ ID NO: 1967726
uaacuccaggcaaagggaa

SEQ ID NO: 1967728 - RNA, 19 nt, Artificial Sequence
  Description of Artificial Sequence: Synthetic oligonucleotide
  Sense strand starting at position 3551 of SEQ ID NO: 1880445
gaguuagauuuaggacuua

SEQ ID NO: 1967729 - RNA, 19 nt, Artificial Sequence
  Description of Artificial Sequence: Synthetic oligonucleotide
  Antisense strand to SEQ ID NO: 1967728
uaaguccuaaaucuaacuc

SEQ ID NO: 1967730 - RNA, 19 nt, Artificial Sequence
  Description of Artificial Sequence: Synthetic oligonucleotide
  Sense strand starting at position 3683 of SEQ ID NO: 1880445
ugaaucuucuaccuggagu

SEQ ID NO: 1967731 - RNA, 19 nt, Artificial Sequence
  Description of Artificial Sequence: Synthetic oligonucleotide
  Antisense strand to SEQ ID NO: 1967730
acuccagguagaagauuca

SEQ ID NO: 1967732 - RNA, 19 nt, Artificial Sequence
  Description of Artificial Sequence: Synthetic oligonucleotide
  Sense strand starting at position 3744 of SEQ ID NO: 1880445
uggucucagagcuggaaga

SEQ ID NO: 1967733 - RNA, 19 nt, Artificial Sequence
  Description of Artificial Sequence: Synthetic oligonucleotide
  Antisense strand to SEQ ID NO: 1967732
ucuuccagcucugagacca

SEQ ID NO: 1967734 - RNA, 19 nt, Artificial Sequence
  Description of Artificial Sequence: Synthetic oligonucleotide
  Sense strand starting at position 3794 of SEQ ID NO: 1880445
cgucaugaucuugagccaa

SEQ ID NO: 1967735 - RNA, 19 nt, Artificial Sequence
  Description of Artificial Sequence: Synthetic oligonucleotide
  Antisense strand to SEQ ID NO: 1967734
uuggcucaagaucaugacg

SEQ ID NO: 1967736 - RNA, 19 nt, Artificial Sequence
  Description of Artificial Sequence: Synthetic oligonucleotide
  Sense strand starting at position 3796 of SEQ ID NO: 1880445
ucaugaucuugagccaacu

SEQ ID NO: 1967737 - RNA, 19 nt, Artificial Sequence
  Description of Artificial Sequence: Synthetic oligonucleotide
  Antisense strand to SEQ ID NO: 1967736
aguuggcucaagaucauga

SEQ ID NO: 1967738 - RNA, 19 nt, Artificial Sequence
  Description of Artificial Sequence: Synthetic oligonucleotide
  Sense strand starting at position 3845 of SEQ ID NO: 1880445
uuuguaaagaugggaaagu

SEQ ID NO: 1967739 - RNA, 19 nt, Artificial Sequence
  Description of Artificial Sequence: Synthetic oligonucleotide
  Antisense strand to SEQ ID NO: 1967738
acuuucccaucuuuacaaa

SEQ ID NO: 1967740 - RNA, 19 nt, Artificial Sequence
  Description of Artificial Sequence: Synthetic oligonucleotide
  Sense strand starting at position 3846 of SEQ ID NO: 1880445
uuguaaagaugggaaagua

SEQ ID NO: 1967741 - RNA, 19 nt, Artificial Sequence
  Description of Artificial Sequence: Synthetic oligonucleotide
  Antisense strand to SEQ ID NO: 1967740
uacuuucccaucuuuacaa

SEQ ID NO: 1967742 - RNA, 19 nt, Artificial Sequence
  Description of Artificial Sequence: Synthetic oligonucleotide
  Sense strand starting at position 3877 of SEQ ID NO: 1880445
aaagaacguuguguggauu

SEQ ID NO: 1967743 - RNA, 19 nt, Artificial Sequence
  Description of Artificial Sequence: Synthetic oligonucleotide
  Antisense strand to SEQ ID NO: 1967742
aauccacacaacguucuuu

SEQ ID NO: 1967744 - RNA, 19 nt, Artificial Sequence
  Description of Artificial Sequence: Synthetic oligonucleotide
  Sense strand starting at position 3941 of SEQ ID NO: 1880445
aggguuggcaucugauaaa

SEQ ID NO: 1967745 - RNA, 19 nt, Artificial Sequence
  Description of Artificial Sequence: Synthetic oligonucleotide
  Antisense strand to SEQ ID NO: 1967744
uuuaucagaugccaacccu

SEQ ID NO: 1967746 - RNA, 19 nt, Artificial Sequence
  Description of Artificial Sequence: Synthetic oligonucleotide
  Sense strand starting at position 3955 of SEQ ID NO: 1880445
auaaauacuggcugaaucu

SEQ ID NO: 1967747 - RNA, 19 nt, Artificial Sequence
  Description of Artificial Sequence: Synthetic oligonucleotide
  Antisense strand to SEQ ID NO: 1967746
agauucagccaguauuuau

SEQ ID NO: 1967748 - RNA, 19 nt, Artificial Sequence
  Description of Artificial Sequence: Synthetic oligonucleotide
  Sense strand starting at position 395 of SEQ ID NO: 1880446
gugucagugaccugugcua

SEQ ID NO: 1967749 - RNA, 19 nt, Artificial Sequence
  Description of Artificial Sequence: Synthetic oligonucleotide
  Antisense strand to SEQ ID NO: 1967748
uagcacaggucacugacac

SEQ ID NO: 1967750 - RNA, 19 nt, Artificial Sequence
  Description of Artificial Sequence: Synthetic oligonucleotide
  Sense strand starting at position 659 of SEQ ID NO: 1880446
ggucaaucagguugcaaua

SEQ ID NO: 1967751 - RNA, 19 nt, Artificial Sequence
  Description of Artificial Sequence: Synthetic oligonucleotide
  Antisense strand to SEQ ID NO: 1967750
uauugcaaccugauugacc

SEQ ID NO: 1967752 - RNA, 19 nt, Artificial Sequence
  Description of Artificial Sequence: Synthetic oligonucleotide
  Sense strand starting at position 1001 of SEQ ID NO: 1880446
ggguuagggcuucaccuaa

SEQ ID NO: 1967753 - RNA, 19 nt, Artificial Sequence
  Description of Artificial Sequence: Synthetic oligonucleotide
  Antisense strand to SEQ ID NO: 1967752
uuaggugaagcccuaaccc

SEQ ID NO: 1967754 - RNA, 19 nt, Artificial Sequence
  Description of Artificial Sequence: Synthetic oligonucleotide
  Sense strand starting at position 1026 of SEQ ID NO: 1880446
acaugcauuccauagcaga

SEQ ID NO: 1967755 - RNA, 19 nt, Artificial Sequence
  Description of Artificial Sequence: Synthetic oligonucleotide
  Antisense strand to SEQ ID NO: 1967754
ucugcuauggaaugcaugu

SEQ ID NO: 1967756 - RNA, 19 nt, Artificial Sequence
  Description of Artificial Sequence: Synthetic oligonucleotide
  Sense strand starting at position 1084 of SEQ ID NO: 1880446
ccugcuuugucccuauacu

SEQ ID NO: 1967757 - RNA, 19 nt, Artificial Sequence
  Description of Artificial Sequence: Synthetic oligonucleotide
  Antisense strand to SEQ ID NO: 1967756
aguauagggacaaagcagg

SEQ ID NO: 1967758 - RNA, 19 nt, Artificial Sequence
  Description of Artificial Sequence: Synthetic oligonucleotide
  Sense strand starting at position 1085 of SEQ ID NO: 1880446
cugcuuugucccuauacuu

SEQ ID NO: 1967759 - RNA, 19 nt, Artificial Sequence
  Description of Artificial Sequence: Synthetic oligonucleotide
  Antisense strand to SEQ ID NO: 1967758
aaguauagggacaaagcag

SEQ ID NO: 1967760 - RNA, 19 nt, Artificial Sequence
  Description of Artificial Sequence: Synthetic oligonucleotide
  Sense strand starting at position 1135 of SEQ ID NO: 1880446
gugggcuucugcucuagaa

SEQ ID NO: 1967761 - RNA, 19 nt, Artificial Sequence
  Description of Artificial Sequence: Synthetic oligonucleotide
  Antisense strand to SEQ ID NO: 1967760
uucuagagcagaagcccac

SEQ ID NO: 1967762 - RNA, 19 nt, Artificial Sequence
  Description of Artificial Sequence: Synthetic oligonucleotide
  Sense strand starting at position 1137 of SEQ ID NO: 1880446
gggcuucugcucuagaagu

SEQ ID NO: 1967763 - RNA, 19 nt, Artificial Sequence
  Description of Artificial Sequence: Synthetic oligonucleotide
  Antisense strand to SEQ ID NO: 1967762
acuucuagagcagaagccc

SEQ ID NO: 1967764 - RNA, 19 nt, Artificial Sequence
  Description of Artificial Sequence: Synthetic oligonucleotide
  Sense strand starting at position 1139 of SEQ ID NO: 1880446
gcuucugcucuagaagugu

SEQ ID NO: 1967765 - RNA, 19 nt, Artificial Sequence
  Description of Artificial Sequence: Synthetic oligonucleotide
  Antisense strand to SEQ ID NO: 1967764
acacuucuagagcagaagc

SEQ ID NO: 1967766 - RNA, 19 nt, Artificial Sequence
  Description of Artificial Sequence: Synthetic oligonucleotide
  Sense strand starting at position 1326 of SEQ ID NO: 1880446
ucaugagauugcuacaaag

SEQ ID NO: 1967767 - RNA, 19 nt, Artificial Sequence
  Description of Artificial Sequence: Synthetic oligonucleotide
  Antisense strand to SEQ ID NO: 1967766
cuuuguagcaaucucauga

SEQ ID NO: 1967768 - RNA, 19 nt, Artificial Sequence
  Description of Artificial Sequence: Synthetic oligonucleotide
  Sense strand starting at position 1343 of SEQ ID NO: 1880446
aguggauugucaagaggag

SEQ ID NO: 1967769 - RNA, 19 nt, Artificial Sequence
  Description of Artificial Sequence: Synthetic oligonucleotide
  Antisense strand to SEQ ID NO: 1967768
cuccucuugacaauccacu

SEQ ID NO: 1967770 - RNA, 19 nt, Artificial Sequence
  Description of Artificial Sequence: Synthetic oligonucleotide
  Sense strand starting at position 2046 of SEQ ID NO: 1880446
ggugaagagugcucagauc

SEQ ID NO: 1967771 - RNA, 19 nt, Artificial Sequence
  Description of Artificial Sequence: Synthetic oligonucleotide
  Antisense strand to SEQ ID NO: 1967770
gaucugagcacucuucacc

SEQ ID NO: 1967772 - RNA, 19 nt, Artificial Sequence
  Description of Artificial Sequence: Synthetic oligonucleotide
  Sense strand starting at position 2086 of SEQ ID NO: 1880446
gucgccuucccuugggaga

SEQ ID NO: 1967773 - RNA, 19 nt, Artificial Sequence
  Description of Artificial Sequence: Synthetic oligonucleotide
  Antisense strand to SEQ ID NO: 1967772
ucucccaagggaaggcgac

SEQ ID NO: 1967774 - RNA, 19 nt, Artificial Sequence
  Description of Artificial Sequence: Synthetic oligonucleotide
  Sense strand starting at position 2087 of SEQ ID NO: 1880446
ucgccuucccuugggagaa

SEQ ID NO: 1967775 - RNA, 19 nt, Artificial Sequence
  Description of Artificial Sequence: Synthetic oligonucleotide
  Antisense strand to SEQ ID NO: 1967774
uucucccaagggaaggcga

SEQ ID NO: 1967776 - RNA, 19 nt, Artificial Sequence
  Description of Artificial Sequence: Synthetic oligonucleotide
  Sense strand starting at position 2118 of SEQ ID NO: 1880446
gacccagguggcugugaaa

SEQ ID NO: 1967777 - RNA, 19 nt, Artificial Sequence
  Description of Artificial Sequence: Synthetic oligonucleotide
  Antisense strand to SEQ ID NO: 1967776
uuucacagccaccuggguc

SEQ ID NO: 1967778 - RNA, 19 nt, Artificial Sequence
  Description of Artificial Sequence: Synthetic oligonucleotide
  Sense strand starting at position 2224 of SEQ ID NO: 1880446
ggagguggcuuuccuagga

SEQ ID NO: 1967779 - RNA, 19 nt, Artificial Sequence
  Description of Artificial Sequence: Synthetic oligonucleotide
  Antisense strand to SEQ ID NO: 1967778
uccuaggaaagccaccucc

SEQ ID NO: 1967780 - RNA, 19 nt, Artificial Sequence
  Description of Artificial Sequence: Synthetic oligonucleotide
  Sense strand starting at position 2228 of SEQ ID NO: 1880446
guggcuuuccuaggacaca

SEQ ID NO: 1967781 - RNA, 19 nt, Artificial Sequence
  Description of Artificial Sequence: Synthetic oligonucleotide
  Antisense strand to SEQ ID NO: 1967780
uguguccuaggaaagccac

SEQ ID NO: 1967782 - RNA, 19 nt, Artificial Sequence
  Description of Artificial Sequence: Synthetic oligonucleotide
  Sense strand starting at position 2426 of SEQ ID NO: 1880446
ugugucagaguauauguuu

SEQ ID NO: 1967783 - RNA, 19 nt, Artificial Sequence
  Description of Artificial Sequence: Synthetic oligonucleotide
  Antisense strand to SEQ ID NO: 1967782
aaacauauacucugacaca

SEQ ID NO: 1967784 - RNA, 19 nt, Artificial Sequence
  Description of Artificial Sequence: Synthetic oligonucleotide
  Sense strand starting at position 2450 of SEQ ID NO: 1880446
ugugaaagaguaugcauga

SEQ ID NO: 1967785 - RNA, 19 nt, Artificial Sequence
  Description of Artificial Sequence: Synthetic oligonucleotide
  Antisense strand to SEQ ID NO: 1967784
ucaugcauacucuuucaca

SEQ ID NO: 1967786 - RNA, 19 nt, Artificial Sequence
  Description of Artificial Sequence: Synthetic oligonucleotide
  Sense strand starting at position 2459 of SEQ ID NO: 1880446
guaugcaugagcgugugua

SEQ ID NO: 1967787 - RNA, 19 nt, Artificial Sequence
  Description of Artificial Sequence: Synthetic oligonucleotide
  Antisense strand to SEQ ID NO: 1967786
uacacacgcucaugcauac

SEQ ID NO: 1967788 - RNA, 19 nt, Artificial Sequence
  Description of Artificial Sequence: Synthetic oligonucleotide
  Sense strand starting at position 2825 of SEQ ID NO: 1880446
gcugacagguccuccgaga

SEQ ID NO: 1967789 - RNA, 19 nt, Artificial Sequence
  Description of Artificial Sequence: Synthetic oligonucleotide
  Antisense strand to SEQ ID NO: 1967788
ucucggaggaccugucagc

SEQ ID NO: 1967790 - RNA, 19 nt, Artificial Sequence
  Description of Artificial Sequence: Synthetic oligonucleotide
  Sense strand starting at position 2938 of SEQ ID NO: 1880446
uggugucucucgucugacu

SEQ ID NO: 1967791 - RNA, 19 nt, Artificial Sequence
  Description of Artificial Sequence: Synthetic oligonucleotide
  Antisense strand to SEQ ID NO: 1967790
agucagacgagagacacca

SEQ ID NO: 1967792 - RNA, 19 nt, Artificial Sequence
  Description of Artificial Sequence: Synthetic oligonucleotide
  Sense strand starting at position 2951 of SEQ ID NO: 1880446
cugacuugcccaugucuuu

SEQ ID NO: 1967793 - RNA, 19 nt, Artificial Sequence
  Description of Artificial Sequence: Synthetic oligonucleotide
  Antisense strand to SEQ ID NO: 1967792
aaagacaugggcaagucag

SEQ ID NO: 1967794 - RNA, 19 nt, Artificial Sequence
  Description of Artificial Sequence: Synthetic oligonucleotide
  Sense strand starting at position 2973 of SEQ ID NO: 1880446
gucuuaucucaauggcucu

SEQ ID NO: 1967795 - RNA, 19 nt, Artificial Sequence
  Description of Artificial Sequence: Synthetic oligonucleotide
  Antisense strand to SEQ ID NO: 1967794
agagccauugagauaagac

SEQ ID NO: 1967796 - RNA, 19 nt, Artificial Sequence
  Description of Artificial Sequence: Synthetic oligonucleotide
  Sense strand starting at position 3000 of SEQ ID NO: 1880446
cccugagauguggauaggu

SEQ ID NO: 1967797 - RNA, 19 nt, Artificial Sequence
  Description of Artificial Sequence: Synthetic oligonucleotide
  Antisense strand to SEQ ID NO: 1967796
accuauccacaucucaggg

SEQ ID NO: 1967798 - RNA, 19 nt, Artificial Sequence
  Description of Artificial Sequence: Synthetic oligonucleotide
  Sense strand starting at position 3009 of SEQ ID NO: 1880446
guggauagguuuguuccca

SEQ ID NO: 1967799 - RNA, 19 nt, Artificial Sequence
  Description of Artificial Sequence: Synthetic oligonucleotide
  Antisense strand to SEQ ID NO: 1967798
ugggaacaaaccuauccac

SEQ ID NO: 1967800 - RNA, 19 nt, Artificial Sequence
  Description of Artificial Sequence: Synthetic oligonucleotide
  Sense strand starting at position 3010 of SEQ ID NO: 1880446
uggauagguuuguucccau

SEQ ID NO: 1967801 - RNA, 19 nt, Artificial Sequence
  Description of Artificial Sequence: Synthetic oligonucleotide
  Antisense strand to SEQ ID NO: 1967800
augggaacaaaccuaucca

SEQ ID NO: 1967802 - RNA, 19 nt, Artificial Sequence
  Description of Artificial Sequence: Synthetic oligonucleotide
  Sense strand starting at position 3051 of SEQ ID NO: 1880446
cccaauaggugaucugcaa

SEQ ID NO: 1967803 - RNA, 19 nt, Artificial Sequence
  Description of Artificial Sequence: Synthetic oligonucleotide
  Antisense strand to SEQ ID NO: 1967802
uugcagaucaccuauuggg

SEQ ID NO: 1967804 - RNA, 19 nt, Artificial Sequence
  Description of Artificial Sequence: Synthetic oligonucleotide
  Sense strand starting at position 3306 of SEQ ID NO: 1880446
ccaguucuuccucaucuga

SEQ ID NO: 1967805 - RNA, 19 nt, Artificial Sequence
  Description of Artificial Sequence: Synthetic oligonucleotide
  Antisense strand to SEQ ID NO: 1967804
ucagaugaggaagaacugg

SEQ ID NO: 1967806 - RNA, 19 nt, Artificial Sequence
  Description of Artificial Sequence: Synthetic oligonucleotide
  Sense strand starting at position 3308 of SEQ ID NO: 1880446
aguucuuccucaucugaga

SEQ ID NO: 1967807 - RNA, 19 nt, Artificial Sequence
  Description of Artificial Sequence: Synthetic oligonucleotide
  Antisense strand to SEQ ID NO: 1967806
ucucagaugaggaagaacu

SEQ ID NO: 1967808 - RNA, 19 nt, Artificial Sequence
  Description of Artificial Sequence: Synthetic oligonucleotide
  Sense strand starting at position 3321 of SEQ ID NO: 1880446
cugagagacucauuccuuu

SEQ ID NO: 1967809 - RNA, 19 nt, Artificial Sequence
  Description of Artificial Sequence: Synthetic oligonucleotide
  Antisense strand to SEQ ID NO: 1967808
aaaggaaugagucucucag

SEQ ID NO: 1967810 - RNA, 19 nt, Artificial Sequence
  Description of Artificial Sequence: Synthetic oligonucleotide
  Sense strand starting at position 3325 of SEQ ID NO: 1880446
gagacucauuccuuuggca

SEQ ID NO: 1967811 - RNA, 19 nt, Artificial Sequence
  Description of Artificial Sequence: Synthetic oligonucleotide
  Antisense strand to SEQ ID NO: 1967810
ugccaaaggaaugagucuc

SEQ ID NO: 1967812 - RNA, 19 nt, Artificial Sequence
  Description of Artificial Sequence: Synthetic oligonucleotide
  Sense strand starting at position 3327 of SEQ ID NO: 1880446
gacucauuccuuuggcaga

SEQ ID NO: 1967813 - RNA, 19 nt, Artificial Sequence
  Description of Artificial Sequence: Synthetic oligonucleotide
  Antisense strand to SEQ ID NO: 1967812
ucugccaaaggaaugaguc

SEQ ID NO: 1967814 - RNA, 19 nt, Artificial Sequence
  Description of Artificial Sequence: Synthetic oligonucleotide
  Sense strand starting at position 3332 of SEQ ID NO: 1880446
auuccuuuggcagaagucu

SEQ ID NO: 1967815 - RNA, 19 nt, Artificial Sequence
  Description of Artificial Sequence: Synthetic oligonucleotide
  Antisense strand to SEQ ID NO: 1967814
agacuucugccaaaggaau

SEQ ID NO: 1967816 - RNA, 19 nt, Artificial Sequence
  Description of Artificial Sequence: Synthetic oligonucleotide
  Sense strand starting at position 3341 of SEQ ID NO: 1880446
gcagaagucuuccuuucca

SEQ ID NO: 1967817 - RNA, 19 nt, Artificial Sequence
  Description of Artificial Sequence: Synthetic oligonucleotide
  Antisense strand to SEQ ID NO: 1967816
uggaaaggaagacuucugc

SEQ ID NO: 1967818 - RNA, 19 nt, Artificial Sequence
  Description of Artificial Sequence: Synthetic oligonucleotide
  Sense strand starting at position 3504 of SEQ ID NO: 1880446
gcuaaugugcaaugagaau

SEQ ID NO: 1967819 - RNA, 19 nt, Artificial Sequence
  Description of Artificial Sequence: Synthetic oligonucleotide
  Antisense strand to SEQ ID NO: 1967818
auucucauugcacauuagc

SEQ ID NO: 1967820 - RNA, 19 nt, Artificial Sequence
  Description of Artificial Sequence: Synthetic oligonucleotide
  Sense strand starting at position 3553 of SEQ ID NO: 1880446
ggaacauguggcugccaga

SEQ ID NO: 1967821 - RNA, 19 nt, Artificial Sequence
  Description of Artificial Sequence: Synthetic oligonucleotide
  Antisense strand to SEQ ID NO: 1967820
ucuggcagccacauguucc

SEQ ID NO: 1967822 - RNA, 19 nt, Artificial Sequence
  Description of Artificial Sequence: Synthetic oligonucleotide
  Sense strand starting at position 3579 of SEQ ID NO: 1880446
gggcacugguuccugaaga

SEQ ID NO: 1967823 - RNA, 19 nt, Artificial Sequence
  Description of Artificial Sequence: Synthetic oligonucleotide
  Antisense strand to SEQ ID NO: 1967822
ucuucaggaaccagugccc

SEQ ID NO: 1967824 - RNA, 19 nt, Artificial Sequence
  Description of Artificial Sequence: Synthetic oligonucleotide
  Sense strand starting at position 3664 of SEQ ID NO: 1880446
cuggcagaacucgagacau

SEQ ID NO: 1967825 - RNA, 19 nt, Artificial Sequence
  Description of Artificial Sequence: Synthetic oligonucleotide
  Antisense strand to SEQ ID NO: 1967824
augucucgaguucugccag

SEQ ID NO: 1967826 - RNA, 19 nt, Artificial Sequence
  Description of Artificial Sequence: Synthetic oligonucleotide
  Sense strand starting at position 3812 of SEQ ID NO: 1880446
guuucuauuuacccgcaau

SEQ ID NO: 1967827 - RNA, 19 nt, Artificial Sequence
  Description of Artificial Sequence: Synthetic oligonucleotide
  Antisense strand to SEQ ID NO: 1967826
auugcggguaaauagaaac

SEQ ID NO: 1967828 - RNA, 19 nt, Artificial Sequence
  Description of Artificial Sequence: Synthetic oligonucleotide
  Sense strand starting at position 10 of SEQ ID NO: 1880447
auuagauucgcauaaagug

SEQ ID NO: 1967829 - RNA, 19 nt, Artificial Sequence
  Description of Artificial Sequence: Synthetic oligonucleotide
  Antisense strand to SEQ ID NO: 1967828
cacuuuaugcgaaucuaau

SEQ ID NO: 1967830 - RNA, 19 nt, Artificial Sequence
  Description of Artificial Sequence: Synthetic oligonucleotide
  Sense strand starting at position 381 of SEQ ID NO: 1880447
ggcaaaucccuguacugag

SEQ ID NO: 1967831 - RNA, 19 nt, Artificial Sequence
  Description of Artificial Sequence: Synthetic oligonucleotide
  Antisense strand to SEQ ID NO: 1967830
cucaguacagggauuugcc

SEQ ID NO: 1967832 - RNA, 19 nt, Artificial Sequence
  Description of Artificial Sequence: Synthetic oligonucleotide
  Sense strand starting at position 543 of SEQ ID NO: 1880447
gaguguggaaguuaacuga

SEQ ID NO: 1967833 - RNA, 19 nt, Artificial Sequence
  Description of Artificial Sequence: Synthetic oligonucleotide
  Antisense strand to SEQ ID NO: 1967832
ucaguuaacuuccacacuc

SEQ ID NO: 1967834 - RNA, 19 nt, Artificial Sequence
  Description of Artificial Sequence: Synthetic oligonucleotide
  Sense strand starting at position 546 of SEQ ID NO: 1880447
uguggaaguuaacugaaau

SEQ ID NO: 1967835 - RNA, 19 nt, Artificial Sequence
  Description of Artificial Sequence: Synthetic oligonucleotide
  Antisense strand to SEQ ID NO: 1967834
auuucaguuaacuuccaca

SEQ ID NO: 1967836 - RNA, 19 nt, Artificial Sequence
  Description of Artificial Sequence: Synthetic oligonucleotide
  Sense strand starting at position 547 of SEQ ID NO: 1880447
guggaaguuaacugaaaug

SEQ ID NO: 1967837 - RNA, 19 nt, Artificial Sequence
  Description of Artificial Sequence: Synthetic oligonucleotide
  Antisense strand to SEQ ID NO: 1967836
cauuucaguuaacuuccac

SEQ ID NO: 1967838 - RNA, 19 nt, Artificial Sequence
  Description of Artificial Sequence: Synthetic oligonucleotide
  Sense strand starting at position 557 of SEQ ID NO: 1880447
acugaaauguggccaucaa

SEQ ID NO: 1967839 - RNA, 19 nt, Artificial Sequence
  Description of Artificial Sequence: Synthetic oligonucleotide
  Antisense strand to SEQ ID NO: 1967838
uugauggccacauuucagu

SEQ ID NO: 1967840 - RNA, 19 nt, Artificial Sequence
  Description of Artificial Sequence: Synthetic oligonucleotide
  Sense strand starting at position 558 of SEQ ID NO: 1880447
cugaaauguggccaucaag

SEQ ID NO: 1967841 - RNA, 19 nt, Artificial Sequence
  Description of Artificial Sequence: Synthetic oligonucleotide
  Antisense strand to SEQ ID NO: 1967840
cuugauggccacauuucag

SEQ ID NO: 1967842 - RNA, 19 nt, Artificial Sequence
  Description of Artificial Sequence: Synthetic oligonucleotide
  Sense strand starting at position 577 of SEQ ID NO: 1880447
gcuggugcuuaagugauuu

SEQ ID NO: 1967843 - RNA, 19 nt, Artificial Sequence
  Description of Artificial Sequence: Synthetic oligonucleotide
  Antisense strand to SEQ ID NO: 1967842
aaaucacuuaagcaccagc

SEQ ID NO: 1967844 - RNA, 19 nt, Artificial Sequence
  Description of Artificial Sequence: Synthetic oligonucleotide
  Sense strand starting at position 597 of SEQ ID NO: 1880447
gggaauuaaaucugugacc

SEQ ID NO: 1967845 - RNA, 19 nt, Artificial Sequence
  Description of Artificial Sequence: Synthetic oligonucleotide
  Antisense strand to SEQ ID NO: 1967844
ggucacagauuuaauuccc

SEQ ID NO: 1967846 - RNA, 19 nt, Artificial Sequence
  Description of Artificial Sequence: Synthetic oligonucleotide
  Sense strand starting at position 619 of SEQ ID NO: 1880447
acugucuucugacuacuga

SEQ ID NO: 1967847 - RNA, 19 nt, Artificial Sequence
  Description of Artificial Sequence: Synthetic oligonucleotide
  Antisense strand to SEQ ID NO: 1967846
ucaguagucagaagacagu

SEQ ID NO: 1967848 - RNA, 19 nt, Artificial Sequence
  Description of Artificial Sequence: Synthetic oligonucleotide
  Sense strand starting at position 620 of SEQ ID NO: 1880447
cugucuucugacuacugau

SEQ ID NO: 1967849 - RNA, 19 nt, Artificial Sequence
  Description of Artificial Sequence: Synthetic oligonucleotide
  Antisense strand to SEQ ID NO: 1967848
aucaguagucagaagacag

SEQ ID NO: 1967850 - RNA, 19 nt, Artificial Sequence
  Description of Artificial Sequence: Synthetic oligonucleotide
  Sense strand starting at position 670 of SEQ ID NO: 1880447
gugggcagugucuaaauga

SEQ ID NO: 1967851 - RNA, 19 nt, Artificial Sequence
  Description of Artificial Sequence: Synthetic oligonucleotide
  Antisense strand to SEQ ID NO: 1967850
ucauuuagacacugcccac

SEQ ID NO: 1967852 - RNA, 19 nt, Artificial Sequence
  Description of Artificial Sequence: Synthetic oligonucleotide
  Sense strand starting at position 731 of SEQ ID NO: 1880447
acucgaauuuaacaagaca

SEQ ID NO: 1967853 - RNA, 19 nt, Artificial Sequence
  Description of Artificial Sequence: Synthetic oligonucleotide
  Antisense strand to SEQ ID NO: 1967852
ugucuuguuaaauucgagu

SEQ ID NO: 1967854 - RNA, 19 nt, Artificial Sequence
  Description of Artificial Sequence: Synthetic oligonucleotide
  Sense strand starting at position 752 of SEQ ID NO: 1880447
gcguguguucagucaugag

SEQ ID NO: 1967855 - RNA, 19 nt, Artificial Sequence
  Description of Artificial Sequence: Synthetic oligonucleotide
  Antisense strand to SEQ ID NO: 1967854
cucaugacugaacacacgc

SEQ ID NO: 1967856 - RNA, 19 nt, Artificial Sequence
  Description of Artificial Sequence: Synthetic oligonucleotide
  Sense strand starting at position 756 of SEQ ID NO: 1880447
guguucagucaugagugaa

SEQ ID NO: 1967857 - RNA, 19 nt, Artificial Sequence
  Description of Artificial Sequence: Synthetic oligonucleotide
  Antisense strand to SEQ ID NO: 1967856
uucacucaugacugaacac

SEQ ID NO: 1967858 - RNA, 19 nt, Artificial Sequence
  Description of Artificial Sequence: Synthetic oligonucleotide
  Sense strand starting at position 766 of SEQ ID NO: 1880447
augagugaauauucuacua

SEQ ID NO: 1967859 - RNA, 19 nt, Artificial Sequence
  Description of Artificial Sequence: Synthetic oligonucleotide
  Antisense strand to SEQ ID NO: 1967858
uaguagaauauucacucau

SEQ ID NO: 1967860 - RNA, 19 nt, Artificial Sequence
  Description of Artificial Sequence: Synthetic oligonucleotide
  Sense strand starting at position 857 of SEQ ID NO: 1880447
guuuccuggucaccugaaa

SEQ ID NO: 1967861 - RNA, 19 nt, Artificial Sequence
  Description of Artificial Sequence: Synthetic oligonucleotide
  Antisense strand to SEQ ID NO: 1967860
uuucaggugaccaggaaac

SEQ ID NO: 1967862 - RNA, 19 nt, Artificial Sequence
  Description of Artificial Sequence: Synthetic oligonucleotide
  Sense strand starting at position 963 of SEQ ID NO: 1880447
uuaguauuacagcagcaga

SEQ ID NO: 1967863 - RNA, 19 nt, Artificial Sequence
  Description of Artificial Sequence: Synthetic oligonucleotide
  Antisense strand to SEQ ID NO: 1967862
ucugcugcuguaauacuaa

SEQ ID NO: 1967864 - RNA, 19 nt, Artificial Sequence
  Description of Artificial Sequence: Synthetic oligonucleotide
  Sense strand starting at position 966 of SEQ ID NO: 1880447
guauuacagcagcagaauu

SEQ ID NO: 1967865 - RNA, 19 nt, Artificial Sequence
  Description of Artificial Sequence: Synthetic oligonucleotide
  Antisense strand to SEQ ID NO: 1967864
aauucugcugcuguaauac

SEQ ID NO: 1967866 - RNA, 19 nt, Artificial Sequence
  Description of Artificial Sequence: Synthetic oligonucleotide
  Sense strand starting at position 1122 of SEQ ID NO: 1880447
guaaauuacguguaaagag

SEQ ID NO: 1967867 - RNA, 19 nt, Artificial Sequence
  Description of Artificial Sequence: Synthetic oligonucleotide
  Antisense strand to SEQ ID NO: 1967866
cucuuuacacguaauuuac

SEQ ID NO: 1967868 - RNA, 19 nt, Artificial Sequence
  Description of Artificial Sequence: Synthetic oligonucleotide
  Sense strand starting at position 1433 of SEQ ID NO: 1880447
uuauauccaccugauugua

SEQ ID NO: 1967869 - RNA, 19 nt, Artificial Sequence
  Description of Artificial Sequence: Synthetic oligonucleotide
  Antisense strand to SEQ ID NO: 1967868
uacaaucagguggauauaa

SEQ ID NO: 1967870 - RNA, 19 nt, Artificial Sequence
  Description of Artificial Sequence: Synthetic oligonucleotide
  Sense strand starting at position 1435 of SEQ ID NO: 1880447
auauccaccugauuguauu

SEQ ID NO: 1967871 - RNA, 19 nt, Artificial Sequence
  Description of Artificial Sequence: Synthetic oligonucleotide
  Antisense strand to SEQ ID NO: 1967870
aauacaaucagguggauau

SEQ ID NO: 1967872 - RNA, 19 nt, Artificial Sequence
  Description of Artificial Sequence: Synthetic oligonucleotide
  Sense strand starting at position 1608 of SEQ ID NO: 1880447
aagacuuuggccuguaauc

SEQ ID NO: 1967873 - RNA, 19 nt, Artificial Sequence
  Description of Artificial Sequence: Synthetic oligonucleotide
  Antisense strand to SEQ ID NO: 1967872
gauuacaggccaaagucuu

SEQ ID NO: 1967874 - RNA, 19 nt, Artificial Sequence
  Description of Artificial Sequence: Synthetic oligonucleotide
  Sense strand starting at position 2044 of SEQ ID NO: 1880447
ucacaugaccuccgugaca

SEQ ID NO: 1967875 - RNA, 19 nt, Artificial Sequence
  Description of Artificial Sequence: Synthetic oligonucleotide
  Antisense strand to SEQ ID NO: 1967874
ugucacggaggucauguga

SEQ ID NO: 1967876 - RNA, 19 nt, Artificial Sequence
  Description of Artificial Sequence: Synthetic oligonucleotide
  Sense strand starting at position 2056 of SEQ ID NO: 1880447
cgugacaggucaucacaga

SEQ ID NO: 1967877 - RNA, 19 nt, Artificial Sequence
  Description of Artificial Sequence: Synthetic oligonucleotide
  Antisense strand to SEQ ID NO: 1967876
ucugugaugaccugucacg

SEQ ID NO: 1967878 - RNA, 19 nt, Artificial Sequence
  Description of Artificial Sequence: Synthetic oligonucleotide
  Sense strand starting at position 2215 of SEQ ID NO: 1880447
auucucuguguaugaaaca

SEQ ID NO: 1967879 - RNA, 19 nt, Artificial Sequence
  Description of Artificial Sequence: Synthetic oligonucleotide
  Antisense strand to SEQ ID NO: 1967878
uguuucauacacagagaau

SEQ ID NO: 1967880 - RNA, 19 nt, Artificial Sequence
  Description of Artificial Sequence: Synthetic oligonucleotide
  Sense strand starting at position 2366 of SEQ ID NO: 1880447
uuuacuauuccugagucau

SEQ ID NO: 1967881 - RNA, 19 nt, Artificial Sequence
  Description of Artificial Sequence: Synthetic oligonucleotide
  Antisense strand to SEQ ID NO: 1967880
augacucaggaauaguaaa

SEQ ID NO: 1967882 - RNA, 19 nt, Artificial Sequence
  Description of Artificial Sequence: Synthetic oligonucleotide
  Sense strand starting at position 2372 of SEQ ID NO: 1880447
auuccugagucaucagaaa

SEQ ID NO: 1967883 - RNA, 19 nt, Artificial Sequence
  Description of Artificial Sequence: Synthetic oligonucleotide
  Antisense strand to SEQ ID NO: 1967882
uuucugaugacucaggaau

SEQ ID NO: 1967884 - RNA, 19 nt, Artificial Sequence
  Description of Artificial Sequence: Synthetic oligonucleotide
  Sense strand starting at position 2414 of SEQ ID NO: 1880447
uuuguuccagauuaaaguu

SEQ ID NO: 1967885 - RNA, 19 nt, Artificial Sequence
  Description of Artificial Sequence: Synthetic oligonucleotide
  Antisense strand to SEQ ID NO: 1967884
aacuuuaaucuggaacaaa

SEQ ID NO: 1967886 - RNA, 19 nt, Artificial Sequence
  Description of Artificial Sequence: Synthetic oligonucleotide
  Sense strand starting at position 2487 of SEQ ID NO: 1880447
acaguaacuguaugaaauc

SEQ ID NO: 1967887 - RNA, 19 nt, Artificial Sequence
  Description of Artificial Sequence: Synthetic oligonucleotide
  Antisense strand to SEQ ID NO: 1967886
gauuucauacaguuacugu

SEQ ID NO: 1967888 - RNA, 19 nt, Artificial Sequence
  Description of Artificial Sequence: Synthetic oligonucleotide
  Sense strand starting at position 2605 of SEQ ID NO: 1880447
ucugucaauguguauauga

SEQ ID NO: 1967889 - RNA, 19 nt, Artificial Sequence
  Description of Artificial Sequence: Synthetic oligonucleotide
  Antisense strand to SEQ ID NO: 1967888
ucauauacacauugacaga

SEQ ID NO: 1967890 - RNA, 19 nt, Artificial Sequence
  Description of Artificial Sequence: Synthetic oligonucleotide
  Sense strand starting at position 2630 of SEQ ID NO: 1880447
ggcuauucacucggagaug

SEQ ID NO: 1967891 - RNA, 19 nt, Artificial Sequence
  Description of Artificial Sequence: Synthetic oligonucleotide
  Antisense strand to SEQ ID NO: 1967890
caucuccgagugaauagcc

SEQ ID NO: 1967892 - RNA, 19 nt, Artificial Sequence
  Description of Artificial Sequence: Synthetic oligonucleotide
  Sense strand starting at position 2674 of SEQ ID NO: 1880447
accaauguguuguuugaaa

SEQ ID NO: 1967893 - RNA, 19 nt, Artificial Sequence
  Description of Artificial Sequence: Synthetic oligonucleotide
  Antisense strand to SEQ ID NO: 1967892
uuucaaacaacacauuggu

SEQ ID NO: 1967894 - RNA, 19 nt, Artificial Sequence
  Description of Artificial Sequence: Synthetic oligonucleotide
  Sense strand starting at position 3393 of SEQ ID NO: 1880447
ccuuccuuggaggguuauu

SEQ ID NO: 1967895 - RNA, 19 nt, Artificial Sequence
  Description of Artificial Sequence: Synthetic oligonucleotide
  Antisense strand to SEQ ID NO: 1967894
aauaacccuccaaggaagg

SEQ ID NO: 1967896 - RNA, 19 nt, Artificial Sequence
  Description of Artificial Sequence: Synthetic oligonucleotide
  Sense strand starting at position 3455 of SEQ ID NO: 1880447
gguauuaagcauuacauau

SEQ ID NO: 1967897 - RNA, 19 nt, Artificial Sequence
  Description of Artificial Sequence: Synthetic oligonucleotide
  Antisense strand to SEQ ID NO: 1967896
auauguaaugcuuaauacc

SEQ ID NO: 1967898 - RNA, 19 nt, Artificial Sequence
  Description of Artificial Sequence: Synthetic oligonucleotide
  Sense strand starting at position 3595 of SEQ ID NO: 1880447
gaagaaaugucugcuuccu

SEQ ID NO: 1967899 - RNA, 19 nt, Artificial Sequence
  Description of Artificial Sequence: Synthetic oligonucleotide
  Antisense strand to SEQ ID NO: 1967898
aggaagcagacauuucuuc

SEQ ID NO: 1967900 - RNA, 19 nt, Artificial Sequence
  Description of Artificial Sequence: Synthetic oligonucleotide
  Sense strand starting at position 3597 of SEQ ID NO: 1880447
agaaaugucugcuuccuau

SEQ ID NO: 1967901 - RNA, 19 nt, Artificial Sequence
  Description of Artificial Sequence: Synthetic oligonucleotide
  Antisense strand to SEQ ID NO: 1967900
auaggaagcagacauuucu

SEQ ID NO: 1967902 - RNA, 19 nt, Artificial Sequence
  Description of Artificial Sequence: Synthetic oligonucleotide
  Sense strand starting at position 3827 of SEQ ID NO: 1880447
ccaacagucccuggacaau

SEQ ID NO: 1967903 - RNA, 19 nt, Artificial Sequence
  Description of Artificial Sequence: Synthetic oligonucleotide
  Antisense strand to SEQ ID NO: 1967902
auuguccagggacuguugg

SEQ ID NO: 1967904 - RNA, 19 nt, Artificial Sequence
  Description of Artificial Sequence: Synthetic oligonucleotide
  Sense strand starting at position 3910 of SEQ ID NO: 1880447
acugcaugggugugggaaa

SEQ ID NO: 1967905 - RNA, 19 nt, Artificial Sequence
  Description of Artificial Sequence: Synthetic oligonucleotide
  Antisense strand to SEQ ID NO: 1967904
uuucccacacccaugcagu

SEQ ID NO: 1967906 - RNA, 19 nt, Artificial Sequence
  Description of Artificial Sequence: Synthetic oligonucleotide
  Sense strand starting at position 3933 of SEQ ID NO: 1880447
gucauuuccuccgcuguaa

SEQ ID NO: 1967907 - RNA, 19 nt, Artificial Sequence
  Description of Artificial Sequence: Synthetic oligonucleotide
  Antisense strand to SEQ ID NO: 1967906
uuacagcggaggaaaugac

SEQ ID NO: 1967908 - RNA, 19 nt, Artificial Sequence
  Description of Artificial Sequence: Synthetic oligonucleotide
  Sense strand starting at position 94 of SEQ ID NO: 1880448
ggccguguccacuugucua

SEQ ID NO: 1967909 - RNA, 19 nt, Artificial Sequence
  Description of Artificial Sequence: Synthetic oligonucleotide
  Antisense strand to SEQ ID NO: 1967908
uagacaaguggacacggcc

SEQ ID NO: 1967910 - RNA, 19 nt, Artificial Sequence
  Description of Artificial Sequence: Synthetic oligonucleotide
  Sense strand starting at position 531 of SEQ ID NO: 1880448
uguuccugacaugauguua

SEQ ID NO: 1967911 - RNA, 19 nt, Artificial Sequence
  Description of Artificial Sequence: Synthetic oligonucleotide
  Antisense strand to SEQ ID NO: 1967910
uaacaucaugucaggaaca

SEQ ID NO: 1967912 - RNA, 19 nt, Artificial Sequence
  Description of Artificial Sequence: Synthetic oligonucleotide
  Sense strand starting at position 539 of SEQ ID NO: 1880448
acaugauguuaagcacuaa

SEQ ID NO: 1967913 - RNA, 19 nt, Artificial Sequence
  Description of Artificial Sequence: Synthetic oligonucleotide
  Antisense strand to SEQ ID NO: 1967912
uuagugcuuaacaucaugu

SEQ ID NO: 1967914 - RNA, 19 nt, Artificial Sequence
  Description of Artificial Sequence: Synthetic oligonucleotide
  Sense strand starting at position 589 of SEQ ID NO: 1880448
cuauuagucugaguaggga

SEQ ID NO: 1967915 - RNA, 19 nt, Artificial Sequence
  Description of Artificial Sequence: Synthetic oligonucleotide
  Antisense strand to SEQ ID NO: 1967914
ucccuacucagacuaauag

SEQ ID NO: 1967916 - RNA, 19 nt, Artificial Sequence
  Description of Artificial Sequence: Synthetic oligonucleotide
  Sense strand starting at position 610 of SEQ ID NO: 1880448
gcagauaugugaucuauua

SEQ ID NO: 1967917 - RNA, 19 nt, Artificial Sequence
  Description of Artificial Sequence: Synthetic oligonucleotide
  Antisense strand to SEQ ID NO: 1967916
uaauagaucacauaucugc

SEQ ID NO: 1967918 - RNA, 19 nt, Artificial Sequence
  Description of Artificial Sequence: Synthetic oligonucleotide
  Sense strand starting at position 1017 of SEQ ID NO: 1880448
aagagaaauuuccagguau

SEQ ID NO: 1967919 - RNA, 19 nt, Artificial Sequence
  Description of Artificial Sequence: Synthetic oligonucleotide
  Antisense strand to SEQ ID NO: 1967918
auaccuggaaauuucucuu

SEQ ID NO: 1967920 - RNA, 19 nt, Artificial Sequence
  Description of Artificial Sequence: Synthetic oligonucleotide
  Sense strand starting at position 1263 of SEQ ID NO: 1880448
cacguuggaaucugggaaa

SEQ ID NO: 1967921 - RNA, 19 nt, Artificial Sequence
  Description of Artificial Sequence: Synthetic oligonucleotide
  Antisense strand to SEQ ID NO: 1967920
uuucccagauuccaacgug

SEQ ID NO: 1967922 - RNA, 19 nt, Artificial Sequence
  Description of Artificial Sequence: Synthetic oligonucleotide
  Sense strand starting at position 1312 of SEQ ID NO: 1880448
gcauguguaguuucaguuu

SEQ ID NO: 1967923 - RNA, 19 nt, Artificial Sequence
  Description of Artificial Sequence: Synthetic oligonucleotide
  Antisense strand to SEQ ID NO: 1967922
aaacugaaacuacacaugc

SEQ ID NO: 1967924 - RNA, 19 nt, Artificial Sequence
  Description of Artificial Sequence: Synthetic oligonucleotide
  Sense strand starting at position 1616 of SEQ ID NO: 1880448
aaauguacccauggugaaa

SEQ ID NO: 1967925 - RNA, 19 nt, Artificial Sequence
  Description of Artificial Sequence: Synthetic oligonucleotide
  Antisense strand to SEQ ID NO: 1967924
uuucaccauggguacauuu

SEQ ID NO: 1967926 - RNA, 19 nt, Artificial Sequence
  Description of Artificial Sequence: Synthetic oligonucleotide
  Sense strand starting at position 1807 of SEQ ID NO: 1880448
gcuuaauuaguuuagucaa

SEQ ID NO: 1967927 - RNA, 19 nt, Artificial Sequence
  Description of Artificial Sequence: Synthetic oligonucleotide
  Antisense strand to SEQ ID NO: 1967926
uugacuaaacuaauuaagc

SEQ ID NO: 1967928 - RNA, 19 nt, Artificial Sequence
  Description of Artificial Sequence: Synthetic oligonucleotide
  Sense strand starting at position 1930 of SEQ ID NO: 1880448
cagagaugucuguauucua

SEQ ID NO: 1967929 - RNA, 19 nt, Artificial Sequence
  Description of Artificial Sequence: Synthetic oligonucleotide
  Antisense strand to SEQ ID NO: 1967928
uagaauacagacaucucug

SEQ ID NO: 1967930 - RNA, 19 nt, Artificial Sequence
  Description of Artificial Sequence: Synthetic oligonucleotide
  Sense strand starting at position 2023 of SEQ ID NO: 1880448
uguagccugaaaugagaua

SEQ ID NO: 1967931 - RNA, 19 nt, Artificial Sequence
  Description of Artificial Sequence: Synthetic oligonucleotide
  Antisense strand to SEQ ID NO: 1967930
uaucucauuucaggcuaca

SEQ ID NO: 1967932 - RNA, 19 nt, Artificial Sequence
  Description of Artificial Sequence: Synthetic oligonucleotide
  Sense strand starting at position 2136 of SEQ ID NO: 1880448
uggagucuugcauacuuga

SEQ ID NO: 1967933 - RNA, 19 nt, Artificial Sequence
  Description of Artificial Sequence: Synthetic oligonucleotide
  Antisense strand to SEQ ID NO: 1967932
ucaaguaugcaagacucca

SEQ ID NO: 1967934 - RNA, 19 nt, Artificial Sequence
  Description of Artificial Sequence: Synthetic oligonucleotide
  Sense strand starting at position 2177 of SEQ ID NO: 1880448
agcuuuaucugaucaggaa

SEQ ID NO: 1967935 - RNA, 19 nt, Artificial Sequence
  Description of Artificial Sequence: Synthetic oligonucleotide
  Antisense strand to SEQ ID NO: 1967934
uuccugaucagauaaagcu

SEQ ID NO: 1967936 - RNA, 19 nt, Artificial Sequence
  Description of Artificial Sequence: Synthetic oligonucleotide
  Sense strand starting at position 2406 of SEQ ID NO: 1880448
ggagguaaccagggcauaa

SEQ ID NO: 1967937 - RNA, 19 nt, Artificial Sequence
  Description of Artificial Sequence: Synthetic oligonucleotide
  Antisense strand to SEQ ID NO: 1967936
uuaugcccugguuaccucc

SEQ ID NO: 1967938 - RNA, 19 nt, Artificial Sequence
  Description of Artificial Sequence: Synthetic oligonucleotide
  Sense strand starting at position 2421 of SEQ ID NO: 1880448
auaaguaauuaucuccagu

SEQ ID NO: 1967939 - RNA, 19 nt, Artificial Sequence
  Description of Artificial Sequence: Synthetic oligonucleotide
  Antisense strand to SEQ ID NO: 1967938
acuggagauaauuacuuau

SEQ ID NO: 1967940 - RNA, 19 nt, Artificial Sequence
  Description of Artificial Sequence: Synthetic oligonucleotide
  Sense strand starting at position 2459 of SEQ ID NO: 1880448
gugaauggucaagguaaag

SEQ ID NO: 1967941 - RNA, 19 nt, Artificial Sequence
  Description of Artificial Sequence: Synthetic oligonucleotide
  Antisense strand to SEQ ID NO: 1967940
cuuuaccuugaccauucac

SEQ ID NO: 1967942 - RNA, 19 nt, Artificial Sequence
  Description of Artificial Sequence: Synthetic oligonucleotide
  Sense strand starting at position 2575 of SEQ ID NO: 1880448
uucguaaaggcagagaaua

SEQ ID NO: 1967943 - RNA, 19 nt, Artificial Sequence
  Description of Artificial Sequence: Synthetic oligonucleotide
  Antisense strand to SEQ ID NO: 1967942
uauucucugccuuuacgaa

SEQ ID NO: 1967944 - RNA, 19 nt, Artificial Sequence
  Description of Artificial Sequence: Synthetic oligonucleotide
  Sense strand starting at position 2577 of SEQ ID NO: 1880448
cguaaaggcagagaauauu

SEQ ID NO: 1967945 - RNA, 19 nt, Artificial Sequence
  Description of Artificial Sequence: Synthetic oligonucleotide
  Antisense strand to SEQ ID NO: 1967944
aauauucucugccuuuacg

SEQ ID NO: 1967946 - RNA, 19 nt, Artificial Sequence
  Description of Artificial Sequence: Synthetic oligonucleotide
  Sense strand starting at position 2586 of SEQ ID NO: 1880448
agagaauauucugcucauu

SEQ ID NO: 1967947 - RNA, 19 nt, Artificial Sequence
  Description of Artificial Sequence: Synthetic oligonucleotide
  Antisense strand to SEQ ID NO: 1967946
aaugagcagaauauucucu

SEQ ID NO: 1967948 - RNA, 19 nt, Artificial Sequence
  Description of Artificial Sequence: Synthetic oligonucleotide
  Sense strand starting at position 2615 of SEQ ID NO: 1880448
cagggcuuggcauacaaau

SEQ ID NO: 1967949 - RNA, 19 nt, Artificial Sequence
  Description of Artificial Sequence: Synthetic oligonucleotide
  Antisense strand to SEQ ID NO: 1967948
auuuguaugccaagcccug

SEQ ID NO: 1967950 - RNA, 19 nt, Artificial Sequence
  Description of Artificial Sequence: Synthetic oligonucleotide
  Sense strand starting at position 2658 of SEQ ID NO: 1880448
ugaacucuagcuugacuaa

SEQ ID NO: 1967951 - RNA, 19 nt, Artificial Sequence
  Description of Artificial Sequence: Synthetic oligonucleotide
  Antisense strand to SEQ ID NO: 1967950
uuagucaagcuagaguuca

SEQ ID NO: 1967952 - RNA, 19 nt, Artificial Sequence
  Description of Artificial Sequence: Synthetic oligonucleotide
  Sense strand starting at position 2678 of SEQ ID NO: 1880448
gagagaggcugaucuuuau

SEQ ID NO: 1967953 - RNA, 19 nt, Artificial Sequence
  Description of Artificial Sequence: Synthetic oligonucleotide
  Antisense strand to SEQ ID NO: 1967952
auaaagaucagccucucuc

SEQ ID NO: 1967954 - RNA, 19 nt, Artificial Sequence
  Description of Artificial Sequence: Synthetic oligonucleotide
  Sense strand starting at position 2681 of SEQ ID NO: 1880448
agaggcugaucuuuauuaa

SEQ ID NO: 1967955 - RNA, 19 nt, Artificial Sequence
  Description of Artificial Sequence: Synthetic oligonucleotide
  Antisense strand to SEQ ID NO: 1967954
uuaauaaagaucagccucu

SEQ ID NO: 1967956 - RNA, 19 nt, Artificial Sequence
  Description of Artificial Sequence: Synthetic oligonucleotide
  Sense strand starting at position 2841 of SEQ ID NO: 1880448
cuuguuguuccuuaaacau

SEQ ID NO: 1967957 - RNA, 19 nt, Artificial Sequence
  Description of Artificial Sequence: Synthetic oligonucleotide
  Antisense strand to SEQ ID NO: 1967956
auguuuaaggaacaacaag

SEQ ID NO: 1967958 - RNA, 19 nt, Artificial Sequence
  Description of Artificial Sequence: Synthetic oligonucleotide
  Sense strand starting at position 2912 of SEQ ID NO: 1880448
gaaugacguuuccuggaua

SEQ ID NO: 1967959 - RNA, 19 nt, Artificial Sequence
  Description of Artificial Sequence: Synthetic oligonucleotide
  Antisense strand to SEQ ID NO: 1967958
uauccaggaaacgucauuc

SEQ ID NO: 1967960 - RNA, 19 nt, Artificial Sequence
  Description of Artificial Sequence: Synthetic oligonucleotide
  Sense strand starting at position 3208 of SEQ ID NO: 1880448
cuagaauagugucugauau

SEQ ID NO: 1967961 - RNA, 19 nt, Artificial Sequence
  Description of Artificial Sequence: Synthetic oligonucleotide
  Antisense strand to SEQ ID NO: 1967960
auaucagacacuauucuag

SEQ ID NO: 1967962 - RNA, 19 nt, Artificial Sequence
  Description of Artificial Sequence: Synthetic oligonucleotide
  Sense strand starting at position 3209 of SEQ ID NO: 1880448
uagaauagugucugauaug

SEQ ID NO: 1967963 - RNA, 19 nt, Artificial Sequence
  Description of Artificial Sequence: Synthetic oligonucleotide
  Antisense strand to SEQ ID NO: 1967962
cauaucagacacuauucua

SEQ ID NO: 1967964 - RNA, 19 nt, Artificial Sequence
  Description of Artificial Sequence: Synthetic oligonucleotide
  Sense strand starting at position 3230 of SEQ ID NO: 1880448
guagacucucaauaaacgu

SEQ ID NO: 1967965 - RNA, 19 nt, Artificial Sequence
  Description of Artificial Sequence: Synthetic oligonucleotide
  Antisense strand to SEQ ID NO: 1967964
acguuuauugagagucuac

SEQ ID NO: 1967966 - RNA, 19 nt, Artificial Sequence
  Description of Artificial Sequence: Synthetic oligonucleotide
  Sense strand starting at position 3251 of SEQ ID NO: 1880448
cugaaugaauggucugcaa

SEQ ID NO: 1967967 - RNA, 19 nt, Artificial Sequence
  Description of Artificial Sequence: Synthetic oligonucleotide
  Antisense strand to SEQ ID NO: 1967966
uugcagaccauucauucag

SEQ ID NO: 1967968 - RNA, 19 nt, Artificial Sequence
  Description of Artificial Sequence: Synthetic oligonucleotide
  Sense strand starting at position 3253 of SEQ ID NO: 1880448
gaaugaauggucugcaaag

SEQ ID NO: 1967969 - RNA, 19 nt, Artificial Sequence
  Description of Artificial Sequence: Synthetic oligonucleotide
  Antisense strand to SEQ ID NO: 1967968
cuuugcagaccauucauuc

SEQ ID NO: 1967970 - RNA, 19 nt, Artificial Sequence
  Description of Artificial Sequence: Synthetic oligonucleotide
  Sense strand starting at position 3254 of SEQ ID NO: 1880448
aaugaauggucugcaaagu

SEQ ID NO: 1967971 - RNA, 19 nt, Artificial Sequence
  Description of Artificial Sequence: Synthetic oligonucleotide
  Antisense strand to SEQ ID NO: 1967970
acuuugcagaccauucauu

SEQ ID NO: 1967972 - RNA, 19 nt, Artificial Sequence
  Description of Artificial Sequence: Synthetic oligonucleotide
  Sense strand starting at position 3255 of SEQ ID NO: 1880448
augaauggucugcaaaguu

SEQ ID NO: 1967973 - RNA, 19 nt, Artificial Sequence
  Description of Artificial Sequence: Synthetic oligonucleotide
  Antisense strand to SEQ ID NO: 1967972
aacuuugcagaccauucau

SEQ ID NO: 1967974 - RNA, 19 nt, Artificial Sequence
  Description of Artificial Sequence: Synthetic oligonucleotide
  Sense strand starting at position 3329 of SEQ ID NO: 1880448
uaagcuaaacugugauaga

SEQ ID NO: 1967975 - RNA, 19 nt, Artificial Sequence
  Description of Artificial Sequence: Synthetic oligonucleotide
  Antisense strand to SEQ ID NO: 1967974
ucuaucacaguuuagcuua

SEQ ID NO: 1967976 - RNA, 19 nt, Artificial Sequence
  Description of Artificial Sequence: Synthetic oligonucleotide
  Sense strand starting at position 3587 of SEQ ID NO: 1880448
aaggaauagcacugagcau

SEQ ID NO: 1967977 - RNA, 19 nt, Artificial Sequence
  Description of Artificial Sequence: Synthetic oligonucleotide
  Antisense strand to SEQ ID NO: 1967976
augcucagugcuauuccuu

SEQ ID NO: 1967978 - RNA, 19 nt, Artificial Sequence
  Description of Artificial Sequence: Synthetic oligonucleotide
  Sense strand starting at position 3588 of SEQ ID NO: 1880448
aggaauagcacugagcauu

SEQ ID NO: 1967979 - RNA, 19 nt, Artificial Sequence
  Description of Artificial Sequence: Synthetic oligonucleotide
  Antisense strand to SEQ ID NO: 1967978
aaugcucagugcuauuccu

SEQ ID NO: 1967980 - RNA, 19 nt, Artificial Sequence
  Description of Artificial Sequence: Synthetic oligonucleotide
  Sense strand starting at position 3613 of SEQ ID NO: 1880448
acagcaauuccagaugcua

SEQ ID NO: 1967981 - RNA, 19 nt, Artificial Sequence
  Description of Artificial Sequence: Synthetic oligonucleotide
  Antisense strand to SEQ ID NO: 1967980
uagcaucuggaauugcugu

SEQ ID NO: 1967982 - RNA, 19 nt, Artificial Sequence
  Description of Artificial Sequence: Synthetic oligonucleotide
  Sense strand starting at position 3700 of SEQ ID NO: 1880448
agcagucugaugcaacaga

SEQ ID NO: 1967983 - RNA, 19 nt, Artificial Sequence
  Description of Artificial Sequence: Synthetic oligonucleotide
  Antisense strand to SEQ ID NO: 1967982
ucuguugcaucagacugcu

SEQ ID NO: 1967984 - RNA, 19 nt, Artificial Sequence
  Description of Artificial Sequence: Synthetic oligonucleotide
  Sense strand starting at position 3764 of SEQ ID NO: 1880448
gacucugagcagugggaua

SEQ ID NO: 1967985 - RNA, 19 nt, Artificial Sequence
  Description of Artificial Sequence: Synthetic oligonucleotide
  Antisense strand to SEQ ID NO: 1967984
uaucccacugcucagaguc

SEQ ID NO: 1967986 - RNA, 19 nt, Artificial Sequence
  Description of Artificial Sequence: Synthetic oligonucleotide
  Sense strand starting at position 3829 of SEQ ID NO: 1880448
uguggaaucucagcaagga

SEQ ID NO: 1967987 - RNA, 19 nt, Artificial Sequence
  Description of Artificial Sequence: Synthetic oligonucleotide
  Antisense strand to SEQ ID NO: 1967986
uccuugcugagauuccaca

SEQ ID NO: 1967988 - RNA, 19 nt, Artificial Sequence
  Description of Artificial Sequence: Synthetic oligonucleotide
  Sense strand starting at position 55 of SEQ ID NO: 1880449
gcuaauuaccagcagaaag

SEQ ID NO: 1967989 - RNA, 19 nt, Artificial Sequence
  Description of Artificial Sequence: Synthetic oligonucleotide
  Antisense strand to SEQ ID NO: 1967988
cuuucugcugguaauuagc

SEQ ID NO: 1967990 - RNA, 19 nt, Artificial Sequence
  Description of Artificial Sequence: Synthetic oligonucleotide
  Sense strand starting at position 91 of SEQ ID NO: 1880449
gugauuagaagaggcugaa

SEQ ID NO: 1967991 - RNA, 19 nt, Artificial Sequence
  Description of Artificial Sequence: Synthetic oligonucleotide
  Antisense strand to SEQ ID NO: 1967990
uucagccucuucuaaucac

SEQ ID NO: 1967992 - RNA, 19 nt, Artificial Sequence
  Description of Artificial Sequence: Synthetic oligonucleotide
  Sense strand starting at position 256 of SEQ ID NO: 1880449
gggucauuacugcaaccau

SEQ ID NO: 1967993 - RNA, 19 nt, Artificial Sequence
  Description of Artificial Sequence: Synthetic oligonucleotide
  Antisense strand to SEQ ID NO: 1967992
augguugcaguaaugaccc

SEQ ID NO: 1967994 - RNA, 19 nt, Artificial Sequence
  Description of Artificial Sequence: Synthetic oligonucleotide
  Sense strand starting at position 352 of SEQ ID NO: 1880449
agaguuacuuuggcuuuga

SEQ ID NO: 1967995 - RNA, 19 nt, Artificial Sequence
  Description of Artificial Sequence: Synthetic oligonucleotide
  Antisense strand to SEQ ID NO: 1967994
ucaaagccaaaguaacucu

SEQ ID NO: 1967996 - RNA, 19 nt, Artificial Sequence
  Description of Artificial Sequence: Synthetic oligonucleotide
  Sense strand starting at position 430 of SEQ ID NO: 1880449
agcaauaauucuguaaguc

SEQ ID NO: 1967997 - RNA, 19 nt, Artificial Sequence
  Description of Artificial Sequence: Synthetic oligonucleotide
  Antisense strand to SEQ ID NO: 1967996
gacuuacagaauuauugcu

SEQ ID NO: 1967998 - RNA, 19 nt, Artificial Sequence
  Description of Artificial Sequence: Synthetic oligonucleotide
  Sense strand starting at position 431 of SEQ ID NO: 1880449
gcaauaauucuguaaguca

SEQ ID NO: 1967999 - RNA, 19 nt, Artificial Sequence
  Description of Artificial Sequence: Synthetic oligonucleotide
  Antisense strand to SEQ ID NO: 1967998
ugacuuacagaauuauugc

SEQ ID NO: 1968000 - RNA, 19 nt, Artificial Sequence
  Description of Artificial Sequence: Synthetic oligonucleotide
  Sense strand starting at position 434 of SEQ ID NO: 1880449
auaauucuguaagucaaag

SEQ ID NO: 1968001 - RNA, 19 nt, Artificial Sequence
  Description of Artificial Sequence: Synthetic oligonucleotide
  Antisense strand to SEQ ID NO: 1968000
cuuugacuuacagaauuau

SEQ ID NO: 1968002 - RNA, 19 nt, Artificial Sequence
  Description of Artificial Sequence: Synthetic oligonucleotide
  Sense strand starting at position 515 of SEQ ID NO: 1880449
gcagcuccuggugagagau

SEQ ID NO: 1968003 - RNA, 19 nt, Artificial Sequence
  Description of Artificial Sequence: Synthetic oligonucleotide
  Antisense strand to SEQ ID NO: 1968002
aucucucaccaggagcugc

SEQ ID NO: 1968004 - RNA, 19 nt, Artificial Sequence
  Description of Artificial Sequence: Synthetic oligonucleotide
  Sense strand starting at position 525 of SEQ ID NO: 1880449
gugagagauccuugucaac

SEQ ID NO: 1968005 - RNA, 19 nt, Artificial Sequence
  Description of Artificial Sequence: Synthetic oligonucleotide
  Antisense strand to SEQ ID NO: 1968004
guugacaaggaucucucac

SEQ ID NO: 1968006 - RNA, 19 nt, Artificial Sequence
  Description of Artificial Sequence: Synthetic oligonucleotide
  Sense strand starting at position 527 of SEQ ID NO: 1880449
gagagauccuugucaacag

SEQ ID NO: 1968007 - RNA, 19 nt, Artificial Sequence
  Description of Artificial Sequence: Synthetic oligonucleotide
  Antisense strand to SEQ ID NO: 1968006
cuguugacaaggaucucuc

SEQ ID NO: 1968008 - RNA, 19 nt, Artificial Sequence
  Description of Artificial Sequence: Synthetic oligonucleotide
  Sense strand starting at position 630 of SEQ ID NO: 1880449
uauagacuucccugggauu

SEQ ID NO: 1968009 - RNA, 19 nt, Artificial Sequence
  Description of Artificial Sequence: Synthetic oligonucleotide
  Antisense strand to SEQ ID NO: 1968008
aaucccagggaagucuaua

SEQ ID NO: 1968010 - RNA, 19 nt, Artificial Sequence
  Description of Artificial Sequence: Synthetic oligonucleotide
  Sense strand starting at position 654 of SEQ ID NO: 1880449
agugaaacauggcuuuaaa

SEQ ID NO: 1968011 - RNA, 19 nt, Artificial Sequence
  Description of Artificial Sequence: Synthetic oligonucleotide
  Antisense strand to SEQ ID NO: 1968010
uuuaaagccauguuucacu

SEQ ID NO: 1968012 - RNA, 19 nt, Artificial Sequence
  Description of Artificial Sequence: Synthetic oligonucleotide
  Sense strand starting at position 715 of SEQ ID NO: 1880449
ggcaccaauuccuugggua

SEQ ID NO: 1968013 - RNA, 19 nt, Artificial Sequence
  Description of Artificial Sequence: Synthetic oligonucleotide
  Antisense strand to SEQ ID NO: 1968012
uacccaaggaauuggugcc

SEQ ID NO: 1968014 - RNA, 19 nt, Artificial Sequence
  Description of Artificial Sequence: Synthetic oligonucleotide
  Sense strand starting at position 717 of SEQ ID NO: 1880449
caccaauuccuuggguaug

SEQ ID NO: 1968015 - RNA, 19 nt, Artificial Sequence
  Description of Artificial Sequence: Synthetic oligonucleotide
  Antisense strand to SEQ ID NO: 1968014
cauacccaaggaauuggug

SEQ ID NO: 1968016 - RNA, 19 nt, Artificial Sequence
  Description of Artificial Sequence: Synthetic oligonucleotide
  Sense strand starting at position 731 of SEQ ID NO: 1880449
guaugugaaccucagccua

SEQ ID NO: 1968017 - RNA, 19 nt, Artificial Sequence
  Description of Artificial Sequence: Synthetic oligonucleotide
  Antisense strand to SEQ ID NO: 1968016
uaggcugagguucacauac

SEQ ID NO: 1968018 - RNA, 19 nt, Artificial Sequence
  Description of Artificial Sequence: Synthetic oligonucleotide
  Sense strand starting at position 733 of SEQ ID NO: 1880449
augugaaccucagccuaau

SEQ ID NO: 1968019 - RNA, 19 nt, Artificial Sequence
  Description of Artificial Sequence: Synthetic oligonucleotide
  Antisense strand to SEQ ID NO: 1968018
auuaggcugagguucacau

SEQ ID NO: 1968020 - RNA, 19 nt, Artificial Sequence
  Description of Artificial Sequence: Synthetic oligonucleotide
  Sense strand starting at position 768 of SEQ ID NO: 1880449
agugguauuaaucaucugu

SEQ ID NO: 1968021 - RNA, 19 nt, Artificial Sequence
  Description of Artificial Sequence: Synthetic oligonucleotide
  Antisense strand to SEQ ID NO: 1968020
acagaugauuaauaccacu

SEQ ID NO: 1968022 - RNA, 19 nt, Artificial Sequence
  Description of Artificial Sequence: Synthetic oligonucleotide
  Sense strand starting at position 770 of SEQ ID NO: 1880449
ugguauuaaucaucuguac

SEQ ID NO: 1968023 - RNA, 19 nt, Artificial Sequence
  Description of Artificial Sequence: Synthetic oligonucleotide
  Antisense strand to SEQ ID NO: 1968022
guacagaugauuaauacca

SEQ ID NO: 1968024 - RNA, 19 nt, Artificial Sequence
  Description of Artificial Sequence: Synthetic oligonucleotide
  Sense strand starting at position 774 of SEQ ID NO: 1880449
auuaaucaucuguacagua

SEQ ID NO: 1968025 - RNA, 19 nt, Artificial Sequence
  Description of Artificial Sequence: Synthetic oligonucleotide
  Antisense strand to SEQ ID NO: 1968024
uacuguacagaugauuaau

SEQ ID NO: 1968026 - RNA, 19 nt, Artificial Sequence
  Description of Artificial Sequence: Synthetic oligonucleotide
  Sense strand starting at position 1121 of SEQ ID NO: 1880449
caucaaauaggcugugaca

SEQ ID NO: 1968027 - RNA, 19 nt, Artificial Sequence
  Description of Artificial Sequence: Synthetic oligonucleotide
  Antisense strand to SEQ ID NO: 1968026
ugucacagccuauuugaug

SEQ ID NO: 1968028 - RNA, 19 nt, Artificial Sequence
  Description of Artificial Sequence: Synthetic oligonucleotide
  Sense strand starting at position 1448 of SEQ ID NO: 1880449
acuuucuguuugucauaaa

SEQ ID NO: 1968029 - RNA, 19 nt, Artificial Sequence
  Description of Artificial Sequence: Synthetic oligonucleotide
  Antisense strand to SEQ ID NO: 1968028
uuuaugacaaacagaaagu

SEQ ID NO: 1968030 - RNA, 19 nt, Artificial Sequence
  Description of Artificial Sequence: Synthetic oligonucleotide
  Sense strand starting at position 1546 of SEQ ID NO: 1880449
gggaaagcucucuagggcu

SEQ ID NO: 1968031 - RNA, 19 nt, Artificial Sequence
  Description of Artificial Sequence: Synthetic oligonucleotide
  Antisense strand to SEQ ID NO: 1968030
agcccuagagagcuuuccc

SEQ ID NO: 1968032 - RNA, 19 nt, Artificial Sequence
  Description of Artificial Sequence: Synthetic oligonucleotide
  Sense strand starting at position 1667 of SEQ ID NO: 1880449
gaaguacagguuuauguua

SEQ ID NO: 1968033 - RNA, 19 nt, Artificial Sequence
  Description of Artificial Sequence: Synthetic oligonucleotide
  Antisense strand to SEQ ID NO: 1968032
uaacauaaaccuguacuuc

SEQ ID NO: 1968034 - RNA, 19 nt, Artificial Sequence
  Description of Artificial Sequence: Synthetic oligonucleotide
  Sense strand starting at position 1762 of SEQ ID NO: 1880449
uugucauucugauuguaag

SEQ ID NO: 1968035 - RNA, 19 nt, Artificial Sequence
  Description of Artificial Sequence: Synthetic oligonucleotide
  Antisense strand to SEQ ID NO: 1968034
cuuacaaucagaaugacaa

SEQ ID NO: 1968036 - RNA, 19 nt, Artificial Sequence
  Description of Artificial Sequence: Synthetic oligonucleotide
  Sense strand starting at position 1990 of SEQ ID NO: 1880449
cagagacauucugcaguga

SEQ ID NO: 1968037 - RNA, 19 nt, Artificial Sequence
  Description of Artificial Sequence: Synthetic oligonucleotide
  Antisense strand to SEQ ID NO: 1968036
ucacugcagaaugucucug

SEQ ID NO: 1968038 - RNA, 19 nt, Artificial Sequence
  Description of Artificial Sequence: Synthetic oligonucleotide
  Sense strand starting at position 1994 of SEQ ID NO: 1880449
gacauucugcagugagaag

SEQ ID NO: 1968039 - RNA, 19 nt, Artificial Sequence
  Description of Artificial Sequence: Synthetic oligonucleotide
  Antisense strand to SEQ ID NO: 1968038
cuucucacugcagaauguc

SEQ ID NO: 1968040 - RNA, 19 nt, Artificial Sequence
  Description of Artificial Sequence: Synthetic oligonucleotide
  Sense strand starting at position 2019 of SEQ ID NO: 1880449
agagcaauuugugacauga

SEQ ID NO: 1968041 - RNA, 19 nt, Artificial Sequence
  Description of Artificial Sequence: Synthetic oligonucleotide
  Antisense strand to SEQ ID NO: 1968040
ucaugucacaaauugcucu

SEQ ID NO: 1968042 - RNA, 19 nt, Artificial Sequence
  Description of Artificial Sequence: Synthetic oligonucleotide
  Sense strand starting at position 2021 of SEQ ID NO: 1880449
agcaauuugugacaugaga

SEQ ID NO: 1968043 - RNA, 19 nt, Artificial Sequence
  Description of Artificial Sequence: Synthetic oligonucleotide
  Antisense strand to SEQ ID NO: 1968042
ucucaugucacaaauugcu

SEQ ID NO: 1968044 - RNA, 19 nt, Artificial Sequence
  Description of Artificial Sequence: Synthetic oligonucleotide
  Sense strand starting at position 2096 of SEQ ID NO: 1880449
aagucuauuuguccuguga

SEQ ID NO: 1968045 - RNA, 19 nt, Artificial Sequence
  Description of Artificial Sequence: Synthetic oligonucleotide
  Antisense strand to SEQ ID NO: 1968044
ucacaggacaaauagacuu

SEQ ID NO: 1968046 - RNA, 19 nt, Artificial Sequence
  Description of Artificial Sequence: Synthetic oligonucleotide
  Sense strand starting at position 2196 of SEQ ID NO: 1880449
caguguaagcuuuaugaau

SEQ ID NO: 1968047 - RNA, 19 nt, Artificial Sequence
  Description of Artificial Sequence: Synthetic oligonucleotide
  Antisense strand to SEQ ID NO: 1968046
auucauaaagcuuacacug

SEQ ID NO: 1968048 - RNA, 19 nt, Artificial Sequence
  Description of Artificial Sequence: Synthetic oligonucleotide
  Sense strand starting at position 2386 of SEQ ID NO: 1880449
acguuauaauuaccaguga

SEQ ID NO: 1968049 - RNA, 19 nt, Artificial Sequence
  Description of Artificial Sequence: Synthetic oligonucleotide
  Antisense strand to SEQ ID NO: 1968048
ucacugguaauuauaacgu

SEQ ID NO: 1968050 - RNA, 19 nt, Artificial Sequence
  Description of Artificial Sequence: Synthetic oligonucleotide
  Sense strand starting at position 2616 of SEQ ID NO: 1880449
ugaauaccuuuguuuggua

SEQ ID NO: 1968051 - RNA, 19 nt, Artificial Sequence
  Description of Artificial Sequence: Synthetic oligonucleotide
  Antisense strand to SEQ ID NO: 1968050
uaccaaacaaagguauuca

SEQ ID NO: 1968052 - RNA, 19 nt, Artificial Sequence
  Description of Artificial Sequence: Synthetic oligonucleotide
  Sense strand starting at position 2617 of SEQ ID NO: 1880449
gaauaccuuuguuugguau

SEQ ID NO: 1968053 - RNA, 19 nt, Artificial Sequence
  Description of Artificial Sequence: Synthetic oligonucleotide
  Antisense strand to SEQ ID NO: 1968052
auaccaaacaaagguauuc

SEQ ID NO: 1968054 - RNA, 19 nt, Artificial Sequence
  Description of Artificial Sequence: Synthetic oligonucleotide
  Sense strand starting at position 2753 of SEQ ID NO: 1880449
auguuugcaccugaauaac

SEQ ID NO: 1968055 - RNA, 19 nt, Artificial Sequence
  Description of Artificial Sequence: Synthetic oligonucleotide
  Antisense strand to SEQ ID NO: 1968054
guuauucaggugcaaacau

SEQ ID NO: 1968056 - RNA, 19 nt, Artificial Sequence
  Description of Artificial Sequence: Synthetic oligonucleotide
  Sense strand starting at position 2798 of SEQ ID NO: 1880449
cacuuaaauguuuggaaga

SEQ ID NO: 1968057 - RNA, 19 nt, Artificial Sequence
  Description of Artificial Sequence: Synthetic oligonucleotide
  Antisense strand to SEQ ID NO: 1968056
ucuuccaaacauuuaagug

SEQ ID NO: 1968058 - RNA, 19 nt, Artificial Sequence
  Description of Artificial Sequence: Synthetic oligonucleotide
  Sense strand starting at position 2882 of SEQ ID NO: 1880449
uccaauuucuaguaaugag

SEQ ID NO: 1968059 - RNA, 19 nt, Artificial Sequence
  Description of Artificial Sequence: Synthetic oligonucleotide
  Antisense strand to SEQ ID NO: 1968058
cucauuacuagaaauugga

SEQ ID NO: 1968060 - RNA, 19 nt, Artificial Sequence
  Description of Artificial Sequence: Synthetic oligonucleotide
  Sense strand starting at position 3384 of SEQ ID NO: 1880449
agguaauaggcacaaaguu

SEQ ID NO: 1968061 - RNA, 19 nt, Artificial Sequence
  Description of Artificial Sequence: Synthetic oligonucleotide
  Antisense strand to SEQ ID NO: 1968060
aacuuugugccuauuaccu

SEQ ID NO: 1968062 - RNA, 19 nt, Artificial Sequence
  Description of Artificial Sequence: Synthetic oligonucleotide
  Sense strand starting at position 3397 of SEQ ID NO: 1880449
aaaguuuccuugguaguga

SEQ ID NO: 1968063 - RNA, 19 nt, Artificial Sequence
  Description of Artificial Sequence: Synthetic oligonucleotide
  Antisense strand to SEQ ID NO: 1968062
ucacuaccaaggaaacuuu

SEQ ID NO: 1968064 - RNA, 19 nt, Artificial Sequence
  Description of Artificial Sequence: Synthetic oligonucleotide
  Sense strand starting at position 3449 of SEQ ID NO: 1880449
uggaauuccuuucugguaa

SEQ ID NO: 1968065 - RNA, 19 nt, Artificial Sequence
  Description of Artificial Sequence: Synthetic oligonucleotide
  Antisense strand to SEQ ID NO: 1968064
uuaccagaaaggaauucca

SEQ ID NO: 1968066 - RNA, 19 nt, Artificial Sequence
  Description of Artificial Sequence: Synthetic oligonucleotide
  Sense strand starting at position 3977 of SEQ ID NO: 1880449
ggugcacugacugaaauua

SEQ ID NO: 1968067 - RNA, 19 nt, Artificial Sequence
  Description of Artificial Sequence: Synthetic oligonucleotide
  Antisense strand to SEQ ID NO: 1968066
uaauuucagucagugcacc

SEQ ID NO: 1968068 - RNA, 19 nt, Artificial Sequence
  Description of Artificial Sequence: Synthetic oligonucleotide
  Sense strand starting at position 35 of SEQ ID NO: 1880450
cgcucagagcagcauuauu

SEQ ID NO: 1968069 - RNA, 19 nt, Artificial Sequence
  Description of Artificial Sequence: Synthetic oligonucleotide
  Antisense strand to SEQ ID NO: 1968068
aauaaugcugcucugagcg

SEQ ID NO: 1968070 - RNA, 19 nt, Artificial Sequence
  Description of Artificial Sequence: Synthetic oligonucleotide
  Sense strand starting at position 121 of SEQ ID NO: 1880450
guagguaaguaacagaaua

SEQ ID NO: 1968071 - RNA, 19 nt, Artificial Sequence
  Description of Artificial Sequence: Synthetic oligonucleotide
  Antisense strand to SEQ ID NO: 1968070
uauucuguuacuuaccuac

SEQ ID NO: 1968072 - RNA, 19 nt, Artificial Sequence
  Description of Artificial Sequence: Synthetic oligonucleotide
  Sense strand starting at position 157 of SEQ ID NO: 1880450
guaacaagcuacugauaca

SEQ ID NO: 1968073 - RNA, 19 nt, Artificial Sequence
  Description of Artificial Sequence: Synthetic oligonucleotide
  Antisense strand to SEQ ID NO: 1968072
uguaucaguagcuuguuac

SEQ ID NO: 1968074 - RNA, 19 nt, Artificial Sequence
  Description of Artificial Sequence: Synthetic oligonucleotide
  Sense strand starting at position 2589 of SEQ ID NO: 1880450
ucgggacccucacucuaau

SEQ ID NO: 1968075 - RNA, 19 nt, Artificial Sequence
  Description of Artificial Sequence: Synthetic oligonucleotide
  Antisense strand to SEQ ID NO: 1968074
auuagagugagggucccga

SEQ ID NO: 1968076 - RNA, 19 nt, Artificial Sequence
  Description of Artificial Sequence: Synthetic oligonucleotide
  Sense strand starting at position 2619 of SEQ ID NO: 1880450
ggccauggugccuaaacaa

SEQ ID NO: 1968077 - RNA, 19 nt, Artificial Sequence
  Description of Artificial Sequence: Synthetic oligonucleotide
  Antisense strand to SEQ ID NO: 1968076
uuguuuaggcaccauggcc

SEQ ID NO: 1968078 - RNA, 19 nt, Artificial Sequence
  Description of Artificial Sequence: Synthetic oligonucleotide
  Sense strand starting at position 2746 of SEQ ID NO: 1880450
gguguaguccuaugaccag

SEQ ID NO: 1968079 - RNA, 19 nt, Artificial Sequence
  Description of Artificial Sequence: Synthetic oligonucleotide
  Antisense strand to SEQ ID NO: 1968078
cuggucauaggacuacacc

SEQ ID NO: 1968080 - RNA, 19 nt, Artificial Sequence
  Description of Artificial Sequence: Synthetic oligonucleotide
  Sense strand starting at position 2909 of SEQ ID NO: 1880450
gaaagauucuggguuccug

SEQ ID NO: 1968081 - RNA, 19 nt, Artificial Sequence
  Description of Artificial Sequence: Synthetic oligonucleotide
  Antisense strand to SEQ ID NO: 1968080
caggaacccagaaucuuuc

SEQ ID NO: 1968082 - RNA, 19 nt, Artificial Sequence
  Description of Artificial Sequence: Synthetic oligonucleotide
  Sense strand starting at position 3000 of SEQ ID NO: 1880450
augugaagucagugaaauc

SEQ ID NO: 1968083 - RNA, 19 nt, Artificial Sequence
  Description of Artificial Sequence: Synthetic oligonucleotide
  Antisense strand to SEQ ID NO: 1968082
gauuucacugacuucacau

SEQ ID NO: 1968084 - RNA, 19 nt, Artificial Sequence
  Description of Artificial Sequence: Synthetic oligonucleotide
  Sense strand starting at position 3001 of SEQ ID NO: 1880450
ugugaagucagugaaaucu

SEQ ID NO: 1968085 - RNA, 19 nt, Artificial Sequence
  Description of Artificial Sequence: Synthetic oligonucleotide
  Antisense strand to SEQ ID NO: 1968084
agauuucacugacuucaca

SEQ ID NO: 1968086 - RNA, 19 nt, Artificial Sequence
  Description of Artificial Sequence: Synthetic oligonucleotide
  Sense strand starting at position 3044 of SEQ ID NO: 1880450
acauguaacuaauguaucu

SEQ ID NO: 1968087 - RNA, 19 nt, Artificial Sequence
  Description of Artificial Sequence: Synthetic oligonucleotide
  Antisense strand to SEQ ID NO: 1968086
agauacauuaguuacaugu

SEQ ID NO: 1968088 - RNA, 19 nt, Artificial Sequence
  Description of Artificial Sequence: Synthetic oligonucleotide
  Sense strand starting at position 3698 of SEQ ID NO: 1880450
ccacacuguuagcuaagua

SEQ ID NO: 1968089 - RNA, 19 nt, Artificial Sequence
  Description of Artificial Sequence: Synthetic oligonucleotide
  Antisense strand to SEQ ID NO: 1968088
uacuuagcuaacagugugg

SEQ ID NO: 1968090 - RNA, 19 nt, Artificial Sequence
  Description of Artificial Sequence: Synthetic oligonucleotide
  Sense strand starting at position 3771 of SEQ ID NO: 1880450
guuccuaugcaauguuuga

SEQ ID NO: 1968091 - RNA, 19 nt, Artificial Sequence
  Description of Artificial Sequence: Synthetic oligonucleotide
  Antisense strand to SEQ ID NO: 1968090
ucaaacauugcauaggaac

SEQ ID NO: 1968092 - RNA, 19 nt, Artificial Sequence
  Description of Artificial Sequence: Synthetic oligonucleotide
  Sense strand starting at position 35 of SEQ ID NO: 1880451
cgcucagagcagcauuauu

SEQ ID NO: 1968093 - RNA, 19 nt, Artificial Sequence
  Description of Artificial Sequence: Synthetic oligonucleotide
  Antisense strand to SEQ ID NO: 1968092
aauaaugcugcucugagcg

SEQ ID NO: 1968094 - RNA, 19 nt, Artificial Sequence
  Description of Artificial Sequence: Synthetic oligonucleotide
  Sense strand starting at position 121 of SEQ ID NO: 1880451
guagguaaguaacagaaua

SEQ ID NO: 1968095 - RNA, 19 nt, Artificial Sequence
  Description of Artificial Sequence: Synthetic oligonucleotide
  Antisense strand to SEQ ID NO: 1968094
uauucuguuacuuaccuac

SEQ ID NO: 1968096 - RNA, 19 nt, Artificial Sequence
  Description of Artificial Sequence: Synthetic oligonucleotide
  Sense strand starting at position 157 of SEQ ID NO: 1880451
guaacaagcuacugauaca

SEQ ID NO: 1968097 - RNA, 19 nt, Artificial Sequence
  Description of Artificial Sequence: Synthetic oligonucleotide
  Antisense strand to SEQ ID NO: 1968096
uguaucaguagcuuguuac

SEQ ID NO: 1968098 - RNA, 19 nt, Artificial Sequence
  Description of Artificial Sequence: Synthetic oligonucleotide
  Sense strand starting at position 195 of SEQ ID NO: 1880451
ccuugcaaacuuugauaga

SEQ ID NO: 1968099 - RNA, 19 nt, Artificial Sequence
  Description of Artificial Sequence: Synthetic oligonucleotide
  Antisense strand to SEQ ID NO: 1968098
ucuaucaaaguuugcaagg

SEQ ID NO: 1968100 - RNA, 19 nt, Artificial Sequence
  Description of Artificial Sequence: Synthetic oligonucleotide
  Sense strand starting at position 196 of SEQ ID NO: 1880451
cuugcaaacuuugauagaa

SEQ ID NO: 1968101 - RNA, 19 nt, Artificial Sequence
  Description of Artificial Sequence: Synthetic oligonucleotide
  Antisense strand to SEQ ID NO: 1968100
uucuaucaaaguuugcaag

SEQ ID NO: 1968102 - RNA, 19 nt, Artificial Sequence
  Description of Artificial Sequence: Synthetic oligonucleotide
  Sense strand starting at position 228 of SEQ ID NO: 1880451
gacccaguguugugugacu

SEQ ID NO: 1968103 - RNA, 19 nt, Artificial Sequence
  Description of Artificial Sequence: Synthetic oligonucleotide
  Antisense strand to SEQ ID NO: 1968102
agucacacaacacuggguc

SEQ ID NO: 1968104 - RNA, 19 nt, Artificial Sequence
  Description of Artificial Sequence: Synthetic oligonucleotide
  Sense strand starting at position 233 of SEQ ID NO: 1880451
aguguugugugacuucauu

SEQ ID NO: 1968105 - RNA, 19 nt, Artificial Sequence
  Description of Artificial Sequence: Synthetic oligonucleotide
  Antisense strand to SEQ ID NO: 1968104
aaugaagucacacaacacu

SEQ ID NO: 1968106 - RNA, 19 nt, Artificial Sequence
  Description of Artificial Sequence: Synthetic oligonucleotide
  Sense strand starting at position 260 of SEQ ID NO: 1880451
uggucuagaauaggcaaau

SEQ ID NO: 1968107 - RNA, 19 nt, Artificial Sequence
  Description of Artificial Sequence: Synthetic oligonucleotide
  Antisense strand to SEQ ID NO: 1968106
auuugccuauucuagacca

SEQ ID NO: 1968108 - RNA, 19 nt, Artificial Sequence
  Description of Artificial Sequence: Synthetic oligonucleotide
  Sense strand starting at position 284 of SEQ ID NO: 1880451
gacugaaagugauuacgga

SEQ ID NO: 1968109 - RNA, 19 nt, Artificial Sequence
  Description of Artificial Sequence: Synthetic oligonucleotide
  Antisense strand to SEQ ID NO: 1968108
uccguaaucacuuucaguc

SEQ ID NO: 1968110 - RNA, 19 nt, Artificial Sequence
  Description of Artificial Sequence: Synthetic oligonucleotide
  Sense strand starting at position 288 of SEQ ID NO: 1880451
gaaagugauuacggauuuc

SEQ ID NO: 1968111 - RNA, 19 nt, Artificial Sequence
  Description of Artificial Sequence: Synthetic oligonucleotide
  Antisense strand to SEQ ID NO: 1968110
gaaauccguaaucacuuuc

SEQ ID NO: 1968112 - RNA, 19 nt, Artificial Sequence
  Description of Artificial Sequence: Synthetic oligonucleotide
  Sense strand starting at position 350 of SEQ ID NO: 1880451
gguaguaguuucuucugga

SEQ ID NO: 1968113 - RNA, 19 nt, Artificial Sequence
  Description of Artificial Sequence: Synthetic oligonucleotide
  Antisense strand to SEQ ID NO: 1968112
uccagaagaaacuacuacc

SEQ ID NO: 1968114 - RNA, 19 nt, Artificial Sequence
  Description of Artificial Sequence: Synthetic oligonucleotide
  Sense strand starting at position 351 of SEQ ID NO: 1880451
guaguaguuucuucuggag

SEQ ID NO: 1968115 - RNA, 19 nt, Artificial Sequence
  Description of Artificial Sequence: Synthetic oligonucleotide
  Antisense strand to SEQ ID NO: 1968114
cuccagaagaaacuacuac

SEQ ID NO: 1968116 - RNA, 19 nt, Artificial Sequence
  Description of Artificial Sequence: Synthetic oligonucleotide
  Sense strand starting at position 354 of SEQ ID NO: 1880451
guaguuucuucuggaguga

SEQ ID NO: 1968117 - RNA, 19 nt, Artificial Sequence
  Description of Artificial Sequence: Synthetic oligonucleotide
  Antisense strand to SEQ ID NO: 1968116
ucacuccagaagaaacuac

SEQ ID NO: 1968118 - RNA, 19 nt, Artificial Sequence
  Description of Artificial Sequence: Synthetic oligonucleotide
  Sense strand starting at position 355 of SEQ ID NO: 1880451
uaguuucuucuggagugau

SEQ ID NO: 1968119 - RNA, 19 nt, Artificial Sequence
  Description of Artificial Sequence: Synthetic oligonucleotide
  Antisense strand to SEQ ID NO: 1968118
aucacuccagaagaaacua

SEQ ID NO: 1968120 - RNA, 19 nt, Artificial Sequence
  Description of Artificial Sequence: Synthetic oligonucleotide
  Sense strand starting at position 358 of SEQ ID NO: 1880451
uuucuucuggagugaugaa

SEQ ID NO: 1968121 - RNA, 19 nt, Artificial Sequence
  Description of Artificial Sequence: Synthetic oligonucleotide
  Antisense strand to SEQ ID NO: 1968120
uucaucacuccagaagaaa

SEQ ID NO: 1968122 - RNA, 19 nt, Artificial Sequence
  Description of Artificial Sequence: Synthetic oligonucleotide
  Sense strand starting at position 365 of SEQ ID NO: 1880451
uggagugaugaauguucua

SEQ ID NO: 1968123 - RNA, 19 nt, Artificial Sequence
  Description of Artificial Sequence: Synthetic oligonucleotide
  Antisense strand to SEQ ID NO: 1968122
uagaacauucaucacucca

SEQ ID NO: 1968124 - RNA, 19 nt, Artificial Sequence
  Description of Artificial Sequence: Synthetic oligonucleotide
  Sense strand starting at position 524 of SEQ ID NO: 1880451
gccuuggagucggugagaa

SEQ ID NO: 1968125 - RNA, 19 nt, Artificial Sequence
  Description of Artificial Sequence: Synthetic oligonucleotide
  Antisense strand to SEQ ID NO: 1968124
uucucaccgacuccaaggc

SEQ ID NO: 1968126 - RNA, 19 nt, Artificial Sequence
  Description of Artificial Sequence: Synthetic oligonucleotide
  Sense strand starting at position 598 of SEQ ID NO: 1880451
ggcugugcgccacauacau

SEQ ID NO: 1968127 - RNA, 19 nt, Artificial Sequence
  Description of Artificial Sequence: Synthetic oligonucleotide
  Antisense strand to SEQ ID NO: 1968126
auguauguggcgcacagcc

SEQ ID NO: 1968128 - RNA, 19 nt, Artificial Sequence
  Description of Artificial Sequence: Synthetic oligonucleotide
  Sense strand starting at position 671 of SEQ ID NO: 1880451
gggcacuucugcgacguga

SEQ ID NO: 1968129 - RNA, 19 nt, Artificial Sequence
  Description of Artificial Sequence: Synthetic oligonucleotide
  Antisense strand to SEQ ID NO: 1968128
ucacgucgcagaagugccc

SEQ ID NO: 1968130 - RNA, 19 nt, Artificial Sequence
  Description of Artificial Sequence: Synthetic oligonucleotide
  Sense strand starting at position 673 of SEQ ID NO: 1880451
gcacuucugcgacgugacu

SEQ ID NO: 1968131 - RNA, 19 nt, Artificial Sequence
  Description of Artificial Sequence: Synthetic oligonucleotide
  Antisense strand to SEQ ID NO: 1968130
agucacgucgcagaagugc

SEQ ID NO: 1968132 - RNA, 19 nt, Artificial Sequence
  Description of Artificial Sequence: Synthetic oligonucleotide
  Sense strand starting at position 682 of SEQ ID NO: 1880451
cgacgugacugugugcauu

SEQ ID NO: 1968133 - RNA, 19 nt, Artificial Sequence
  Description of Artificial Sequence: Synthetic oligonucleotide
  Antisense strand to SEQ ID NO: 1968132
aaugcacacagucacgucg

SEQ ID NO: 1968134 - RNA, 19 nt, Artificial Sequence
  Description of Artificial Sequence: Synthetic oligonucleotide
  Sense strand starting at position 685 of SEQ ID NO: 1880451
cgugacugugugcauucau

SEQ ID NO: 1968135 - RNA, 19 nt, Artificial Sequence
  Description of Artificial Sequence: Synthetic oligonucleotide
  Antisense strand to SEQ ID NO: 1968134
augaaugcacacagucacg

SEQ ID NO: 1968136 - RNA, 19 nt, Artificial Sequence
  Description of Artificial Sequence: Synthetic oligonucleotide
  Sense strand starting at position 900 of SEQ ID NO: 1880451
cgucggugcuucgcauaga

SEQ ID NO: 1968137 - RNA, 19 nt, Artificial Sequence
  Description of Artificial Sequence: Synthetic oligonucleotide
  Antisense strand to SEQ ID NO: 1968136
ucuaugcgaagcaccgacg

SEQ ID NO: 1968138 - RNA, 19 nt, Artificial Sequence
  Description of Artificial Sequence: Synthetic oligonucleotide
  Sense strand starting at position 1379 of SEQ ID NO: 1880451
acaguggugugggagagau

SEQ ID NO: 1968139 - RNA, 19 nt, Artificial Sequence
  Description of Artificial Sequence: Synthetic oligonucleotide
  Antisense strand to SEQ ID NO: 1968138
aucucucccacaccacugu

SEQ ID NO: 1968140 - RNA, 19 nt, Artificial Sequence
  Description of Artificial Sequence: Synthetic oligonucleotide
  Sense strand starting at position 1910 of SEQ ID NO: 1880451
gcgcuacugccguuucaag

SEQ ID NO: 1968141 - RNA, 19 nt, Artificial Sequence
  Description of Artificial Sequence: Synthetic oligonucleotide
  Antisense strand to SEQ ID NO: 1968140
cuugaaacggcaguagcgc

SEQ ID NO: 1968142 - RNA, 19 nt, Artificial Sequence
  Description of Artificial Sequence: Synthetic oligonucleotide
  Sense strand starting at position 1991 of SEQ ID NO: 1880451
gcagaagaguucgcucaau

SEQ ID NO: 1968143 - RNA, 19 nt, Artificial Sequence
  Description of Artificial Sequence: Synthetic oligonucleotide
  Antisense strand to SEQ ID NO: 1968142
auugagcgaacucuucugc

SEQ ID NO: 1968144 - RNA, 19 nt, Artificial Sequence
  Description of Artificial Sequence: Synthetic oligonucleotide
  Sense strand starting at position 2588 of SEQ ID NO: 1880451
ucgggacccucacucuaau

SEQ ID NO: 1968145 - RNA, 19 nt, Artificial Sequence
  Description of Artificial Sequence: Synthetic oligonucleotide
  Antisense strand to SEQ ID NO: 1968144
auuagagugagggucccga

SEQ ID NO: 1968146 - RNA, 19 nt, Artificial Sequence
  Description of Artificial Sequence: Synthetic oligonucleotide
  Sense strand starting at position 2618 of SEQ ID NO: 1880451
ggccauggugccuaaacaa

SEQ ID NO: 1968147 - RNA, 19 nt, Artificial Sequence
  Description of Artificial Sequence: Synthetic oligonucleotide
  Antisense strand to SEQ ID NO: 1968146
uuguuuaggcaccauggcc

SEQ ID NO: 1968148 - RNA, 19 nt, Artificial Sequence
  Description of Artificial Sequence: Synthetic oligonucleotide
  Sense strand starting at position 2730 of SEQ ID NO: 1880451
cccuuauguuagguguagu

SEQ ID NO: 1968149 - RNA, 19 nt, Artificial Sequence
  Description of Artificial Sequence: Synthetic oligonucleotide
  Antisense strand to SEQ ID NO: 1968148
acuacaccuaacauaaggg

SEQ ID NO: 1968150 - RNA, 19 nt, Artificial Sequence
  Description of Artificial Sequence: Synthetic oligonucleotide
  Sense strand starting at position 2741 of SEQ ID NO: 1880451
gguguaguccuaugaccag

SEQ ID NO: 1968151 - RNA, 19 nt, Artificial Sequence
  Description of Artificial Sequence: Synthetic oligonucleotide
  Antisense strand to SEQ ID NO: 1968150
cuggucauaggacuacacc

SEQ ID NO: 1968152 - RNA, 19 nt, Artificial Sequence
  Description of Artificial Sequence: Synthetic oligonucleotide
  Sense strand starting at position 2904 of SEQ ID NO: 1880451
gaaagauucuggguuccug

SEQ ID NO: 1968153 - RNA, 19 nt, Artificial Sequence
  Description of Artificial Sequence: Synthetic oligonucleotide
  Antisense strand to SEQ ID NO: 1968152
caggaacccagaaucuuuc

SEQ ID NO: 1968154 - RNA, 19 nt, Artificial Sequence
  Description of Artificial Sequence: Synthetic oligonucleotide
  Sense strand starting at position 2995 of SEQ ID NO: 1880451
augugaagucagugaaauc

SEQ ID NO: 1968155 - RNA, 19 nt, Artificial Sequence
  Description of Artificial Sequence: Synthetic oligonucleotide
  Antisense strand to SEQ ID NO: 1968154
gauuucacugacuucacau

SEQ ID NO: 1968156 - RNA, 19 nt, Artificial Sequence
  Description of Artificial Sequence: Synthetic oligonucleotide
  Sense strand starting at position 2996 of SEQ ID NO: 1880451
ugugaagucagugaaaucu

SEQ ID NO: 1968157 - RNA, 19 nt, Artificial Sequence
  Description of Artificial Sequence: Synthetic oligonucleotide
  Antisense strand to SEQ ID NO: 1968156
agauuucacugacuucaca

SEQ ID NO: 1968158 - RNA, 19 nt, Artificial Sequence
  Description of Artificial Sequence: Synthetic oligonucleotide
  Sense strand starting at position 3426 of SEQ ID NO: 1880451
ggcugagaaugguggauca

SEQ ID NO: 1968159 - RNA, 19 nt, Artificial Sequence
  Description of Artificial Sequence: Synthetic oligonucleotide
  Antisense strand to SEQ ID NO: 1968158
ugauccaccauucucagcc

SEQ ID NO: 1968160 - RNA, 19 nt, Artificial Sequence
  Description of Artificial Sequence: Synthetic oligonucleotide
  Sense strand starting at position 3693 of SEQ ID NO: 1880451
ccacacuguuagcuaagua

SEQ ID NO: 1968161 - RNA, 19 nt, Artificial Sequence
  Description of Artificial Sequence: Synthetic oligonucleotide
  Antisense strand to SEQ ID NO: 1968160
uacuuagcuaacagugugg

SEQ ID NO: 1968162 - RNA, 19 nt, Artificial Sequence
  Description of Artificial Sequence: Synthetic oligonucleotide
  Sense strand starting at position 3766 of SEQ ID NO: 1880451
guuccuaugcaauguuuga

SEQ ID NO: 1968163 - RNA, 19 nt, Artificial Sequence
  Description of Artificial Sequence: Synthetic oligonucleotide
  Antisense strand to SEQ ID NO: 1968162
ucaaacauugcauaggaac

SEQ ID NO: 1968164 - RNA, 19 nt, Artificial Sequence
  Description of Artificial Sequence: Synthetic oligonucleotide
  Sense strand starting at position 3981 of SEQ ID NO: 1880451
agaucucacuuccagaaga

SEQ ID NO: 1968165 - RNA, 19 nt, Artificial Sequence
  Description of Artificial Sequence: Synthetic oligonucleotide
  Antisense strand to SEQ ID NO: 1968164
ucuucuggaagugagaucu

SEQ ID NO: 1968166 - RNA, 19 nt, Artificial Sequence
  Description of Artificial Sequence: Synthetic oligonucleotide
  Sense strand starting at position 122 of SEQ ID NO: 1880452
uccuaaagaccuugcguau

SEQ ID NO: 1968167 - RNA, 19 nt, Artificial Sequence
  Description of Artificial Sequence: Synthetic oligonucleotide
  Antisense strand to SEQ ID NO: 1968166
auacgcaaggucuuuagga

SEQ ID NO: 1968168 - RNA, 19 nt, Artificial Sequence
  Description of Artificial Sequence: Synthetic oligonucleotide
  Sense strand starting at position 125 of SEQ ID NO: 1880452
uaaagaccuugcguauauu

SEQ ID NO: 1968169 - RNA, 19 nt, Artificial Sequence
  Description of Artificial Sequence: Synthetic oligonucleotide
  Antisense strand to SEQ ID NO: 1968168
aauauacgcaaggucuuua

SEQ ID NO: 1968170 - RNA, 19 nt, Artificial Sequence
  Description of Artificial Sequence: Synthetic oligonucleotide
  Sense strand starting at position 126 of SEQ ID NO: 1880452
aaagaccuugcguauauua

SEQ ID NO: 1968171 - RNA, 19 nt, Artificial Sequence
  Description of Artificial Sequence: Synthetic oligonucleotide
  Antisense strand to SEQ ID NO: 1968170
uaauauacgcaaggucuuu

SEQ ID NO: 1968172 - RNA, 19 nt, Artificial Sequence
  Description of Artificial Sequence: Synthetic oligonucleotide
  Sense strand starting at position 128 of SEQ ID NO: 1880452
agaccuugcguauauuaac

SEQ ID NO: 1968173 - RNA, 19 nt, Artificial Sequence
  Description of Artificial Sequence: Synthetic oligonucleotide
  Antisense strand to SEQ ID NO: 1968172
guuaauauacgcaaggucu

SEQ ID NO: 1968174 - RNA, 19 nt, Artificial Sequence
  Description of Artificial Sequence: Synthetic oligonucleotide
  Sense strand starting at position 134 of SEQ ID NO: 1880452
ugcguauauuaacucuuaa

SEQ ID NO: 1968175 - RNA, 19 nt, Artificial Sequence
  Description of Artificial Sequence: Synthetic oligonucleotide
  Antisense strand to SEQ ID NO: 1968174
uuaagaguuaauauacgca

SEQ ID NO: 1968176 - RNA, 19 nt, Artificial Sequence
  Description of Artificial Sequence: Synthetic oligonucleotide
  Sense strand starting at position 344 of SEQ ID NO: 1880452
gcccacugaugguuuaacu

SEQ ID NO: 1968177 - RNA, 19 nt, Artificial Sequence
  Description of Artificial Sequence: Synthetic oligonucleotide
  Antisense strand to SEQ ID NO: 1968176
aguuaaaccaucagugggc

SEQ ID NO: 1968178 - RNA, 19 nt, Artificial Sequence
  Description of Artificial Sequence: Synthetic oligonucleotide
  Sense strand starting at position 441 of SEQ ID NO: 1880452
gaaaguagcuaucagauuc

SEQ ID NO: 1968179 - RNA, 19 nt, Artificial Sequence
  Description of Artificial Sequence: Synthetic oligonucleotide
  Antisense strand to SEQ ID NO: 1968178
gaaucugauagcuacuuuc

SEQ ID NO: 1968180 - RNA, 19 nt, Artificial Sequence
  Description of Artificial Sequence: Synthetic oligonucleotide
  Sense strand starting at position 523 of SEQ ID NO: 1880452
cuucgaagaucucaaagaa

SEQ ID NO: 1968181 - RNA, 19 nt, Artificial Sequence
  Description of Artificial Sequence: Synthetic oligonucleotide
  Antisense strand to SEQ ID NO: 1968180
uucuuugagaucuucgaag

SEQ ID NO: 1968182 - RNA, 19 nt, Artificial Sequence
  Description of Artificial Sequence: Synthetic oligonucleotide
  Sense strand starting at position 664 of SEQ ID NO: 1880452
gucucacgcuucuccaaga

SEQ ID NO: 1968183 - RNA, 19 nt, Artificial Sequence
  Description of Artificial Sequence: Synthetic oligonucleotide
  Antisense strand to SEQ ID NO: 1968182
ucuuggagaagcgugagac

SEQ ID NO: 1968184 - RNA, 19 nt, Artificial Sequence
  Description of Artificial Sequence: Synthetic oligonucleotide
  Sense strand starting at position 669 of SEQ ID NO: 1880452
acgcuucuccaagacucaa

SEQ ID NO: 1968185 - RNA, 19 nt, Artificial Sequence
  Description of Artificial Sequence: Synthetic oligonucleotide
  Antisense strand to SEQ ID NO: 1968184
uugagucuuggagaagcgu

SEQ ID NO: 1968186 - RNA, 19 nt, Artificial Sequence
  Description of Artificial Sequence: Synthetic oligonucleotide
  Sense strand starting at position 885 of SEQ ID NO: 1880452
gugcgagggacccauugua

SEQ ID NO: 1968187 - RNA, 19 nt, Artificial Sequence
  Description of Artificial Sequence: Synthetic oligonucleotide
  Antisense strand to SEQ ID NO: 1968186
uacaaugggucccucgcac

SEQ ID NO: 1968188 - RNA, 19 nt, Artificial Sequence
  Description of Artificial Sequence: Synthetic oligonucleotide
  Sense strand starting at position 897 of SEQ ID NO: 1880452
cauuguauuugggucgcaa

SEQ ID NO: 1968189 - RNA, 19 nt, Artificial Sequence
  Description of Artificial Sequence: Synthetic oligonucleotide
  Antisense strand to SEQ ID NO: 1968188
uugcgacccaaauacaaug

SEQ ID NO: 1968190 - RNA, 19 nt, Artificial Sequence
  Description of Artificial Sequence: Synthetic oligonucleotide
  Sense strand starting at position 923 of SEQ ID NO: 1880452
acccgucuugaguacgaua

SEQ ID NO: 1968191 - RNA, 19 nt, Artificial Sequence
  Description of Artificial Sequence: Synthetic oligonucleotide
  Antisense strand to SEQ ID NO: 1968190
uaucguacucaagacgggu

SEQ ID NO: 1968192 - RNA, 19 nt, Artificial Sequence
  Description of Artificial Sequence: Synthetic oligonucleotide
  Sense strand starting at position 925 of SEQ ID NO: 1880452
ccgucuugaguacgauauu

SEQ ID NO: 1968193 - RNA, 19 nt, Artificial Sequence
  Description of Artificial Sequence: Synthetic oligonucleotide
  Antisense strand to SEQ ID NO: 1968192
aauaucguacucaagacgg

SEQ ID NO: 1968194 - RNA, 19 nt, Artificial Sequence
  Description of Artificial Sequence: Synthetic oligonucleotide
  Sense strand starting at position 928 of SEQ ID NO: 1880452
ucuugaguacgauauucuc

SEQ ID NO: 1968195 - RNA, 19 nt, Artificial Sequence
  Description of Artificial Sequence: Synthetic oligonucleotide
  Antisense strand to SEQ ID NO: 1968194
gagaauaucguacucaaga

SEQ ID NO: 1968196 - RNA, 19 nt, Artificial Sequence
  Description of Artificial Sequence: Synthetic oligonucleotide
  Sense strand starting at position 931 of SEQ ID NO: 1880452
ugaguacgauauucucauu

SEQ ID NO: 1968197 - RNA, 19 nt, Artificial Sequence
  Description of Artificial Sequence: Synthetic oligonucleotide
  Antisense strand to SEQ ID NO: 1968196
aaugagaauaucguacuca

SEQ ID NO: 1968198 - RNA, 19 nt, Artificial Sequence
  Description of Artificial Sequence: Synthetic oligonucleotide
  Sense strand starting at position 936 of SEQ ID NO: 1880452
acgauauucucauuccgca

SEQ ID NO: 1968199 - RNA, 19 nt, Artificial Sequence
  Description of Artificial Sequence: Synthetic oligonucleotide
  Antisense strand to SEQ ID NO: 1968198
ugcggaaugagaauaucgu

SEQ ID NO: 1968200 - RNA, 19 nt, Artificial Sequence
  Description of Artificial Sequence: Synthetic oligonucleotide
  Sense strand starting at position 1047 of SEQ ID NO: 1880452
uuccgaguccguuguaguu

SEQ ID NO: 1968201 - RNA, 19 nt, Artificial Sequence
  Description of Artificial Sequence: Synthetic oligonucleotide
  Antisense strand to SEQ ID NO: 1968200
aacuacaacggacucggaa

SEQ ID NO: 1968202 - RNA, 19 nt, Artificial Sequence
  Description of Artificial Sequence: Synthetic oligonucleotide
  Sense strand starting at position 1053 of SEQ ID NO: 1880452
guccguuguaguuaggcua

SEQ ID NO: 1968203 - RNA, 19 nt, Artificial Sequence
  Description of Artificial Sequence: Synthetic oligonucleotide
  Antisense strand to SEQ ID NO: 1968202
uagccuaacuacaacggac

SEQ ID NO: 1968204 - RNA, 19 nt, Artificial Sequence
  Description of Artificial Sequence: Synthetic oligonucleotide
  Sense strand starting at position 1122 of SEQ ID NO: 1880452
gugcgguucccgugaggaa

SEQ ID NO: 1968205 - RNA, 19 nt, Artificial Sequence
  Description of Artificial Sequence: Synthetic oligonucleotide
  Antisense strand to SEQ ID NO: 1968204
uuccucacgggaaccgcac

SEQ ID NO: 1968206 - RNA, 19 nt, Artificial Sequence
  Description of Artificial Sequence: Synthetic oligonucleotide
  Sense strand starting at position 1124 of SEQ ID NO: 1880452
gcgguucccgugaggaaga

SEQ ID NO: 1968207 - RNA, 19 nt, Artificial Sequence
  Description of Artificial Sequence: Synthetic oligonucleotide
  Antisense strand to SEQ ID NO: 1968206
ucuuccucacgggaaccgc

SEQ ID NO: 1968208 - RNA, 19 nt, Artificial Sequence
  Description of Artificial Sequence: Synthetic oligonucleotide
  Sense strand starting at position 1599 of SEQ ID NO: 1880452
acaagucuguacugacuuu

SEQ ID NO: 1968209 - RNA, 19 nt, Artificial Sequence
  Description of Artificial Sequence: Synthetic oligonucleotide
  Antisense strand to SEQ ID NO: 1968208
aaagucaguacagacuugu

SEQ ID NO: 1968210 - RNA, 19 nt, Artificial Sequence
  Description of Artificial Sequence: Synthetic oligonucleotide
  Sense strand starting at position 1628 of SEQ ID NO: 1880452
ucgggauccucucucguau

SEQ ID NO: 1968211 - RNA, 19 nt, Artificial Sequence
  Description of Artificial Sequence: Synthetic oligonucleotide
  Antisense strand to SEQ ID NO: 1968210
auacgagagaggaucccga

SEQ ID NO: 1968212 - RNA, 19 nt, Artificial Sequence
  Description of Artificial Sequence: Synthetic oligonucleotide
  Sense strand starting at position 1630 of SEQ ID NO: 1880452
gggauccucucucguauga

SEQ ID NO: 1968213 - RNA, 19 nt, Artificial Sequence
  Description of Artificial Sequence: Synthetic oligonucleotide
  Antisense strand to SEQ ID NO: 1968212
ucauacgagagaggauccc

SEQ ID NO: 1968214 - RNA, 19 nt, Artificial Sequence
  Description of Artificial Sequence: Synthetic oligonucleotide
  Sense strand starting at position 1632 of SEQ ID NO: 1880452
gauccucucucguaugauu

SEQ ID NO: 1968215 - RNA, 19 nt, Artificial Sequence
  Description of Artificial Sequence: Synthetic oligonucleotide
  Antisense strand to SEQ ID NO: 1968214
aaucauacgagagaggauc

SEQ ID NO: 1968216 - RNA, 19 nt, Artificial Sequence
  Description of Artificial Sequence: Synthetic oligonucleotide
  Sense strand starting at position 1639 of SEQ ID NO: 1880452
ucucguaugauuugugguu

SEQ ID NO: 1968217 - RNA, 19 nt, Artificial Sequence
  Description of Artificial Sequence: Synthetic oligonucleotide
  Antisense strand to SEQ ID NO: 1968216
aaccacaaaucauacgaga

SEQ ID NO: 1968218 - RNA, 19 nt, Artificial Sequence
  Description of Artificial Sequence: Synthetic oligonucleotide
  Sense strand starting at position 1640 of SEQ ID NO: 1880452
cucguaugauuugugguuu

SEQ ID NO: 1968219 - RNA, 19 nt, Artificial Sequence
  Description of Artificial Sequence: Synthetic oligonucleotide
  Antisense strand to SEQ ID NO: 1968218
aaaccacaaaucauacgag

SEQ ID NO: 1968220 - RNA, 19 nt, Artificial Sequence
  Description of Artificial Sequence: Synthetic oligonucleotide
  Sense strand starting at position 1651 of SEQ ID NO: 1880452
ugugguuugugggaccaca

SEQ ID NO: 1968221 - RNA, 19 nt, Artificial Sequence
  Description of Artificial Sequence: Synthetic oligonucleotide
  Antisense strand to SEQ ID NO: 1968220
uguggucccacaaaccaca

SEQ ID NO: 1968222 - RNA, 19 nt, Artificial Sequence
  Description of Artificial Sequence: Synthetic oligonucleotide
  Sense strand starting at position 1958 of SEQ ID NO: 1880452
aaaguuguggccugaggaa

SEQ ID NO: 1968223 - RNA, 19 nt, Artificial Sequence
  Description of Artificial Sequence: Synthetic oligonucleotide
  Antisense strand to SEQ ID NO: 1968222
uuccucaggccacaacuuu

SEQ ID NO: 1968224 - RNA, 19 nt, Artificial Sequence
  Description of Artificial Sequence: Synthetic oligonucleotide
  Sense strand starting at position 2608 of SEQ ID NO: 1880452
aggagcuuuguggauucaa

SEQ ID NO: 1968225 - RNA, 19 nt, Artificial Sequence
  Description of Artificial Sequence: Synthetic oligonucleotide
  Antisense strand to SEQ ID NO: 1968224
uugaauccacaaagcuccu

SEQ ID NO: 1968226 - RNA, 19 nt, Artificial Sequence
  Description of Artificial Sequence: Synthetic oligonucleotide
  Sense strand starting at position 2651 of SEQ ID NO: 1880452
agccgcuauucuuugauga

SEQ ID NO: 1968227 - RNA, 19 nt, Artificial Sequence
  Description of Artificial Sequence: Synthetic oligonucleotide
  Antisense strand to SEQ ID NO: 1968226
ucaucaaagaauagcggcu

SEQ ID NO: 1968228 - RNA, 19 nt, Artificial Sequence
  Description of Artificial Sequence: Synthetic oligonucleotide
  Sense strand starting at position 2652 of SEQ ID NO: 1880452
gccgcuauucuuugaugau

SEQ ID NO: 1968229 - RNA, 19 nt, Artificial Sequence
  Description of Artificial Sequence: Synthetic oligonucleotide
  Antisense strand to SEQ ID NO: 1968228
aucaucaaagaauagcggc

SEQ ID NO: 1968230 - RNA, 19 nt, Artificial Sequence
  Description of Artificial Sequence: Synthetic oligonucleotide
  Sense strand starting at position 2653 of SEQ ID NO: 1880452
ccgcuauucuuugaugauu

SEQ ID NO: 1968231 - RNA, 19 nt, Artificial Sequence
  Description of Artificial Sequence: Synthetic oligonucleotide
  Antisense strand to SEQ ID NO: 1968230
aaucaucaaagaauagcgg

SEQ ID NO: 1968232 - RNA, 19 nt, Artificial Sequence
  Description of Artificial Sequence: Synthetic oligonucleotide
  Sense strand starting at position 2658 of SEQ ID NO: 1880452
auucuuugaugauugggua

SEQ ID NO: 1968233 - RNA, 19 nt, Artificial Sequence
  Description of Artificial Sequence: Synthetic oligonucleotide
  Antisense strand to SEQ ID NO: 1968232
uacccaaucaucaaagaau

SEQ ID NO: 1968234 - RNA, 19 nt, Artificial Sequence
  Description of Artificial Sequence: Synthetic oligonucleotide
  Sense strand starting at position 2736 of SEQ ID NO: 1880452
uuaucaaauucuuggaggu

SEQ ID NO: 1968235 - RNA, 19 nt, Artificial Sequence
  Description of Artificial Sequence: Synthetic oligonucleotide
  Antisense strand to SEQ ID NO: 1968234
accuccaagaauuugauaa

SEQ ID NO: 1968236 - RNA, 19 nt, Artificial Sequence
  Description of Artificial Sequence: Synthetic oligonucleotide
  Sense strand starting at position 2740 of SEQ ID NO: 1880452
caaauucuuggaggugauc

SEQ ID NO: 1968237 - RNA, 19 nt, Artificial Sequence
  Description of Artificial Sequence: Synthetic oligonucleotide
  Antisense strand to SEQ ID NO: 1968236
gaucaccuccaagaauuug

SEQ ID NO: 1968238 - RNA, 19 nt, Artificial Sequence
  Description of Artificial Sequence: Synthetic oligonucleotide
  Sense strand starting at position 3178 of SEQ ID NO: 1880452
gcguggauccgggauuguu

SEQ ID NO: 1968239 - RNA, 19 nt, Artificial Sequence
  Description of Artificial Sequence: Synthetic oligonucleotide
  Antisense strand to SEQ ID NO: 1968238
aacaaucccggauccacgc

SEQ ID NO: 1968240 - RNA, 19 nt, Artificial Sequence
  Description of Artificial Sequence: Synthetic oligonucleotide
  Sense strand starting at position 3423 of SEQ ID NO: 1880452
gccugcuuccucuaaggcu

SEQ ID NO: 1968241 - RNA, 19 nt, Artificial Sequence
  Description of Artificial Sequence: Synthetic oligonucleotide
  Antisense strand to SEQ ID NO: 1968240
agccuuagaggaagcaggc

SEQ ID NO: 1968242 - RNA, 19 nt, Artificial Sequence
  Description of Artificial Sequence: Synthetic oligonucleotide
  Sense strand starting at position 3460 of SEQ ID NO: 1880452
ccaaguaguuuagcaagaa

SEQ ID NO: 1968243 - RNA, 19 nt, Artificial Sequence
  Description of Artificial Sequence: Synthetic oligonucleotide
  Antisense strand to SEQ ID NO: 1968242
uucuugcuaaacuacuugg

SEQ ID NO: 1968244 - RNA, 19 nt, Artificial Sequence
  Description of Artificial Sequence: Synthetic oligonucleotide
  Sense strand starting at position 3461 of SEQ ID NO: 1880452
caaguaguuuagcaagaag

SEQ ID NO: 1968245 - RNA, 19 nt, Artificial Sequence
  Description of Artificial Sequence: Synthetic oligonucleotide
  Antisense strand to SEQ ID NO: 1968244
cuucuugcuaaacuacuug

SEQ ID NO: 1968246 - RNA, 19 nt, Artificial Sequence
  Description of Artificial Sequence: Synthetic oligonucleotide
  Sense strand starting at position 79 of SEQ ID NO: 1880453
ugcuuaauuuccugagacu

SEQ ID NO: 1968247 - RNA, 19 nt, Artificial Sequence
  Description of Artificial Sequence: Synthetic oligonucleotide
  Antisense strand to SEQ ID NO: 1968246
agucucaggaaauuaagca

SEQ ID NO: 1968248 - RNA, 19 nt, Artificial Sequence
  Description of Artificial Sequence: Synthetic oligonucleotide
  Sense strand starting at position 162 of SEQ ID NO: 1880453
cagguuaccugggagacaa

SEQ ID NO: 1968249 - RNA, 19 nt, Artificial Sequence
  Description of Artificial Sequence: Synthetic oligonucleotide
  Antisense strand to SEQ ID NO: 1968248
uugucucccagguaaccug

SEQ ID NO: 1968250 - RNA, 19 nt, Artificial Sequence
  Description of Artificial Sequence: Synthetic oligonucleotide
  Sense strand starting at position 1099 of SEQ ID NO: 1880453
ugcaauuagcugugauuau

SEQ ID NO: 1968251 - RNA, 19 nt, Artificial Sequence
  Description of Artificial Sequence: Synthetic oligonucleotide
  Antisense strand to SEQ ID NO: 1968250
auaaucacagcuaauugca

SEQ ID NO: 1968252 - RNA, 19 nt, Artificial Sequence
  Description of Artificial Sequence: Synthetic oligonucleotide
  Sense strand starting at position 1529 of SEQ ID NO: 1880453
ccggccuaacccuguuauu

SEQ ID NO: 1968253 - RNA, 19 nt, Artificial Sequence
  Description of Artificial Sequence: Synthetic oligonucleotide
  Antisense strand to SEQ ID NO: 1968252
aauaacaggguuaggccgg

SEQ ID NO: 1968254 - RNA, 19 nt, Artificial Sequence
  Description of Artificial Sequence: Synthetic oligonucleotide
  Sense strand starting at position 1581 of SEQ ID NO: 1880453
gaggguuaguuagcauaug

SEQ ID NO: 1968255 - RNA, 19 nt, Artificial Sequence
  Description of Artificial Sequence: Synthetic oligonucleotide
  Antisense strand to SEQ ID NO: 1968254
cauaugcuaacuaacccuc

SEQ ID NO: 1968256 - RNA, 19 nt, Artificial Sequence
  Description of Artificial Sequence: Synthetic oligonucleotide
  Sense strand starting at position 1592 of SEQ ID NO: 1880453
agcauauggugguucuuua

SEQ ID NO: 1968257 - RNA, 19 nt, Artificial Sequence
  Description of Artificial Sequence: Synthetic oligonucleotide
  Antisense strand to SEQ ID NO: 1968256
uaaagaaccaccauaugcu

SEQ ID NO: 1968258 - RNA, 19 nt, Artificial Sequence
  Description of Artificial Sequence: Synthetic oligonucleotide
  Sense strand starting at position 1596 of SEQ ID NO: 1880453
uauggugguucuuuauacu

SEQ ID NO: 1968259 - RNA, 19 nt, Artificial Sequence
  Description of Artificial Sequence: Synthetic oligonucleotide
  Antisense strand to SEQ ID NO: 1968258
aguauaaagaaccaccaua

SEQ ID NO: 1968260 - RNA, 19 nt, Artificial Sequence
  Description of Artificial Sequence: Synthetic oligonucleotide
  Sense strand starting at position 1627 of SEQ ID NO: 1880453
uuugcauauguuuggaaau

SEQ ID NO: 1968261 - RNA, 19 nt, Artificial Sequence
  Description of Artificial Sequence: Synthetic oligonucleotide
  Antisense strand to SEQ ID NO: 1968260
auuuccaaacauaugcaaa

SEQ ID NO: 1968262 - RNA, 19 nt, Artificial Sequence
  Description of Artificial Sequence: Synthetic oligonucleotide
  Sense strand starting at position 1803 of SEQ ID NO: 1880453
agguaaagcaucuguguuc

SEQ ID NO: 1968263 - RNA, 19 nt, Artificial Sequence
  Description of Artificial Sequence: Synthetic oligonucleotide
  Antisense strand to SEQ ID NO: 1968262
gaacacagaugcuuuaccu

SEQ ID NO: 1968264 - RNA, 19 nt, Artificial Sequence
  Description of Artificial Sequence: Synthetic oligonucleotide
  Sense strand starting at position 1855 of SEQ ID NO: 1880453
ccacuuaggcuugaaguga

SEQ ID NO: 1968265 - RNA, 19 nt, Artificial Sequence
  Description of Artificial Sequence: Synthetic oligonucleotide
  Antisense strand to SEQ ID NO: 1968264
ucacuucaagccuaagugg

SEQ ID NO: 1968266 - RNA, 19 nt, Artificial Sequence
  Description of Artificial Sequence: Synthetic oligonucleotide
  Sense strand starting at position 1866 of SEQ ID NO: 1880453
ugaagugaggcccauguuu

SEQ ID NO: 1968267 - RNA, 19 nt, Artificial Sequence
  Description of Artificial Sequence: Synthetic oligonucleotide
  Antisense strand to SEQ ID NO: 1968266
aaacaugggccucacuuca

SEQ ID NO: 1968268 - RNA, 19 nt, Artificial Sequence
  Description of Artificial Sequence: Synthetic oligonucleotide
  Sense strand starting at position 1898 of SEQ ID NO: 1880453
acagcaauauaccuuggau

SEQ ID NO: 1968269 - RNA, 19 nt, Artificial Sequence
  Description of Artificial Sequence: Synthetic oligonucleotide
  Antisense strand to SEQ ID NO: 1968268
auccaagguauauugcugu

SEQ ID NO: 1968270 - RNA, 19 nt, Artificial Sequence
  Description of Artificial Sequence: Synthetic oligonucleotide
  Sense strand starting at position 1901 of SEQ ID NO: 1880453
gcaauauaccuuggaucca

SEQ ID NO: 1968271 - RNA, 19 nt, Artificial Sequence
  Description of Artificial Sequence: Synthetic oligonucleotide
  Antisense strand to SEQ ID NO: 1968270
uggauccaagguauauugc

SEQ ID NO: 1968272 - RNA, 19 nt, Artificial Sequence
  Description of Artificial Sequence: Synthetic oligonucleotide
  Sense strand starting at position 2058 of SEQ ID NO: 1880453
ugaagucauacacggaagu

SEQ ID NO: 1968273 - RNA, 19 nt, Artificial Sequence
  Description of Artificial Sequence: Synthetic oligonucleotide
  Antisense strand to SEQ ID NO: 1968272
acuuccguguaugacuuca

SEQ ID NO: 1968274 - RNA, 19 nt, Artificial Sequence
  Description of Artificial Sequence: Synthetic oligonucleotide
  Sense strand starting at position 2464 of SEQ ID NO: 1880453
aacaaaguguugcugcuua

SEQ ID NO: 1968275 - RNA, 19 nt, Artificial Sequence
  Description of Artificial Sequence: Synthetic oligonucleotide
  Antisense strand to SEQ ID NO: 1968274
uaagcagcaacacuuuguu

SEQ ID NO: 1968276 - RNA, 19 nt, Artificial Sequence
  Description of Artificial Sequence: Synthetic oligonucleotide
  Sense strand starting at position 2469 of SEQ ID NO: 1880453
aguguugcugcuuauuaua

SEQ ID NO: 1968277 - RNA, 19 nt, Artificial Sequence
  Description of Artificial Sequence: Synthetic oligonucleotide
  Antisense strand to SEQ ID NO: 1968276
uauaauaagcagcaacacu

SEQ ID NO: 1968278 - RNA, 19 nt, Artificial Sequence
  Description of Artificial Sequence: Synthetic oligonucleotide
  Sense strand starting at position 2471 of SEQ ID NO: 1880453
uguugcugcuuauuauauu

SEQ ID NO: 1968279 - RNA, 19 nt, Artificial Sequence
  Description of Artificial Sequence: Synthetic oligonucleotide
  Antisense strand to SEQ ID NO: 1968278
aauauaauaagcagcaaca

SEQ ID NO: 1968280 - RNA, 19 nt, Artificial Sequence
  Description of Artificial Sequence: Synthetic oligonucleotide
  Sense strand starting at position 2612 of SEQ ID NO: 1880453
auuauaguaccuuguacua

SEQ ID NO: 1968281 - RNA, 19 nt, Artificial Sequence
  Description of Artificial Sequence: Synthetic oligonucleotide
  Antisense strand to SEQ ID NO: 1968280
uaguacaagguacuauaau

SEQ ID NO: 1968282 - RNA, 19 nt, Artificial Sequence
  Description of Artificial Sequence: Synthetic oligonucleotide
  Sense strand starting at position 2717 of SEQ ID NO: 1880453
cuuacagugucuguuccau

SEQ ID NO: 1968283 - RNA, 19 nt, Artificial Sequence
  Description of Artificial Sequence: Synthetic oligonucleotide
  Antisense strand to SEQ ID NO: 1968282
auggaacagacacuguaag

SEQ ID NO: 1968284 - RNA, 19 nt, Artificial Sequence
  Description of Artificial Sequence: Synthetic oligonucleotide
  Sense strand starting at position 2726 of SEQ ID NO: 1880453
ucuguuccauggcugagau

SEQ ID NO: 1968285 - RNA, 19 nt, Artificial Sequence
  Description of Artificial Sequence: Synthetic oligonucleotide
  Antisense strand to SEQ ID NO: 1968284
aucucagccauggaacaga

SEQ ID NO: 1968286 - RNA, 19 nt, Artificial Sequence
  Description of Artificial Sequence: Synthetic oligonucleotide
  Sense strand starting at position 3132 of SEQ ID NO: 1880453
uguguagaugcugacugaa

SEQ ID NO: 1968287 - RNA, 19 nt, Artificial Sequence
  Description of Artificial Sequence: Synthetic oligonucleotide
  Antisense strand to SEQ ID NO: 1968286
uucagucagcaucuacaca

SEQ ID NO: 1968288 - RNA, 19 nt, Artificial Sequence
  Description of Artificial Sequence: Synthetic oligonucleotide
  Sense strand starting at position 3134 of SEQ ID NO: 1880453
uguagaugcugacugaauc

SEQ ID NO: 1968289 - RNA, 19 nt, Artificial Sequence
  Description of Artificial Sequence: Synthetic oligonucleotide
  Antisense strand to SEQ ID NO: 1968288
gauucagucagcaucuaca

SEQ ID NO: 1968290 - RNA, 19 nt, Artificial Sequence
  Description of Artificial Sequence: Synthetic oligonucleotide
  Sense strand starting at position 3145 of SEQ ID NO: 1880453
acugaaucgucucccaguu

SEQ ID NO: 1968291 - RNA, 19 nt, Artificial Sequence
  Description of Artificial Sequence: Synthetic oligonucleotide
  Antisense strand to SEQ ID NO: 1968290
aacugggagacgauucagu

SEQ ID NO: 1968292 - RNA, 19 nt, Artificial Sequence
  Description of Artificial Sequence: Synthetic oligonucleotide
  Sense strand starting at position 3177 of SEQ ID NO: 1880453
gucugagaucaagacguca

SEQ ID NO: 1968293 - RNA, 19 nt, Artificial Sequence
  Description of Artificial Sequence: Synthetic oligonucleotide
  Antisense strand to SEQ ID NO: 1968292
ugacgucuugaucucagac

SEQ ID NO: 1968294 - RNA, 19 nt, Artificial Sequence
  Description of Artificial Sequence: Synthetic oligonucleotide
  Sense strand starting at position 3222 of SEQ ID NO: 1880453
gagggaagucucuguucca

SEQ ID NO: 1968295 - RNA, 19 nt, Artificial Sequence
  Description of Artificial Sequence: Synthetic oligonucleotide
  Antisense strand to SEQ ID NO: 1968294
uggaacagagacuucccuc

SEQ ID NO: 1968296 - RNA, 19 nt, Artificial Sequence
  Description of Artificial Sequence: Synthetic oligonucleotide
  Sense strand starting at position 3223 of SEQ ID NO: 1880453
agggaagucucuguuccag

SEQ ID NO: 1968297 - RNA, 19 nt, Artificial Sequence
  Description of Artificial Sequence: Synthetic oligonucleotide
  Antisense strand to SEQ ID NO: 1968296
cuggaacagagacuucccu

SEQ ID NO: 1968298 - RNA, 19 nt, Artificial Sequence
  Description of Artificial Sequence: Synthetic oligonucleotide
  Sense strand starting at position 3225 of SEQ ID NO: 1880453
ggaagucucuguuccagga

SEQ ID NO: 1968299 - RNA, 19 nt, Artificial Sequence
  Description of Artificial Sequence: Synthetic oligonucleotide
  Antisense strand to SEQ ID NO: 1968298
uccuggaacagagacuucc

SEQ ID NO: 1968300 - RNA, 19 nt, Artificial Sequence
  Description of Artificial Sequence: Synthetic oligonucleotide
  Sense strand starting at position 3265 of SEQ ID NO: 1880453
ucuccuugggcuugcaaga

SEQ ID NO: 1968301 - RNA, 19 nt, Artificial Sequence
  Description of Artificial Sequence: Synthetic oligonucleotide
  Antisense strand to SEQ ID NO: 1968300
ucuugcaagcccaaggaga

SEQ ID NO: 1968302 - RNA, 19 nt, Artificial Sequence
  Description of Artificial Sequence: Synthetic oligonucleotide
  Sense strand starting at position 3467 of SEQ ID NO: 1880453
gguaccauguaaucuguaa

SEQ ID NO: 1968303 - RNA, 19 nt, Artificial Sequence
  Description of Artificial Sequence: Synthetic oligonucleotide
  Antisense strand to SEQ ID NO: 1968302
uuacagauuacaugguacc

SEQ ID NO: 1968304 - RNA, 19 nt, Artificial Sequence
  Description of Artificial Sequence: Synthetic oligonucleotide
  Sense strand starting at position 3471 of SEQ ID NO: 1880453
ccauguaaucuguaacagc

SEQ ID NO: 1968305 - RNA, 19 nt, Artificial Sequence
  Description of Artificial Sequence: Synthetic oligonucleotide
  Antisense strand to SEQ ID NO: 1968304
gcuguuacagauuacaugg

SEQ ID NO: 1968306 - RNA, 19 nt, Artificial Sequence
  Description of Artificial Sequence: Synthetic oligonucleotide
  Sense strand starting at position 3636 of SEQ ID NO: 1880453
ccaaaugacugguaaauag

SEQ ID NO: 1968307 - RNA, 19 nt, Artificial Sequence
  Description of Artificial Sequence: Synthetic oligonucleotide
  Antisense strand to SEQ ID NO: 1968306
cuauuuaccagucauuugg

SEQ ID NO: 1968308 - RNA, 19 nt, Artificial Sequence
  Description of Artificial Sequence: Synthetic oligonucleotide
  Sense strand starting at position 3754 of SEQ ID NO: 1880453
ugaguuugcaaaugcugaa

SEQ ID NO: 1968309 - RNA, 19 nt, Artificial Sequence
  Description of Artificial Sequence: Synthetic oligonucleotide
  Antisense strand to SEQ ID NO: 1968308
uucagcauuugcaaacuca

SEQ ID NO: 1968310 - RNA, 19 nt, Artificial Sequence
  Description of Artificial Sequence: Synthetic oligonucleotide
  Sense strand starting at position 3773 of SEQ ID NO: 1880453
agcguaaccugguugauca

SEQ ID NO: 1968311 - RNA, 19 nt, Artificial Sequence
  Description of Artificial Sequence: Synthetic oligonucleotide
  Antisense strand to SEQ ID NO: 1968310
ugaucaaccagguuacgcu

SEQ ID NO: 1968312 - RNA, 19 nt, Artificial Sequence
  Description of Artificial Sequence: Synthetic oligonucleotide
  Sense strand starting at position 3780 of SEQ ID NO: 1880453
ccugguugaucaguacaaa

SEQ ID NO: 1968313 - RNA, 19 nt, Artificial Sequence
  Description of Artificial Sequence: Synthetic oligonucleotide
  Antisense strand to SEQ ID NO: 1968312
uuuguacugaucaaccagg

SEQ ID NO: 1968314 - RNA, 19 nt, Artificial Sequence
  Description of Artificial Sequence: Synthetic oligonucleotide
  Sense strand starting at position 3781 of SEQ ID NO: 1880453
cugguugaucaguacaaau

SEQ ID NO: 1968315 - RNA, 19 nt, Artificial Sequence
  Description of Artificial Sequence: Synthetic oligonucleotide
  Antisense strand to SEQ ID NO: 1968314
auuuguacugaucaaccag

SEQ ID NO: 1968316 - RNA, 19 nt, Artificial Sequence
  Description of Artificial Sequence: Synthetic oligonucleotide
  Sense strand starting at position 3901 of SEQ ID NO: 1880453
cgggcauuacaaugggaau

SEQ ID NO: 1968317 - RNA, 19 nt, Artificial Sequence
  Description of Artificial Sequence: Synthetic oligonucleotide
  Antisense strand to SEQ ID NO: 1968316
auucccauuguaaugcccg

SEQ ID NO: 1968318 - RNA, 19 nt, Artificial Sequence
  Description of Artificial Sequence: Synthetic oligonucleotide
  Sense strand starting at position 3904 of SEQ ID NO: 1880453
gcauuacaaugggaauaag

SEQ ID NO: 1968319 - RNA, 19 nt, Artificial Sequence
  Description of Artificial Sequence: Synthetic oligonucleotide
  Antisense strand to SEQ ID NO: 1968318
cuuauucccauuguaaugc

SEQ ID NO: 1968320 - RNA, 19 nt, Artificial Sequence
  Description of Artificial Sequence: Synthetic oligonucleotide
  Sense strand starting at position 3913 of SEQ ID NO: 1880453
ugggaauaaguauggaugu

SEQ ID NO: 1968321 - RNA, 19 nt, Artificial Sequence
  Description of Artificial Sequence: Synthetic oligonucleotide
  Antisense strand to SEQ ID NO: 1968320
acauccauacuuauuccca

SEQ ID NO: 1968322 - RNA, 19 nt, Artificial Sequence
  Description of Artificial Sequence: Synthetic oligonucleotide
  Sense strand starting at position 3915 of SEQ ID NO: 1880453
ggaauaaguauggaugugu

SEQ ID NO: 1968323 - RNA, 19 nt, Artificial Sequence
  Description of Artificial Sequence: Synthetic oligonucleotide
  Antisense strand to SEQ ID NO: 1968322
acacauccauacuuauucc

SEQ ID NO: 1968324 - RNA, 19 nt, Artificial Sequence
  Description of Artificial Sequence: Synthetic oligonucleotide
  Sense strand starting at position 3926 of SEQ ID NO: 1880453
ggauguguuccaggaggua

SEQ ID NO: 1968325 - RNA, 19 nt, Artificial Sequence
  Description of Artificial Sequence: Synthetic oligonucleotide
  Antisense strand to SEQ ID NO: 1968324
uaccuccuggaacacaucc

SEQ ID NO: 1968326 - RNA, 19 nt, Artificial Sequence
  Description of Artificial Sequence: Synthetic oligonucleotide
  Sense strand starting at position 65 of SEQ ID NO: 1880454
gcagccauacuggaaguau

SEQ ID NO: 1968327 - RNA, 19 nt, Artificial Sequence
  Description of Artificial Sequence: Synthetic oligonucleotide
  Antisense strand to SEQ ID NO: 1968326
auacuuccaguauggcugc

SEQ ID NO: 1968328 - RNA, 19 nt, Artificial Sequence
  Description of Artificial Sequence: Synthetic oligonucleotide
  Sense strand starting at position 116 of SEQ ID NO: 1880454
gaaguuaacucagugucca

SEQ ID NO: 1968329 - RNA, 19 nt, Artificial Sequence
  Description of Artificial Sequence: Synthetic oligonucleotide
  Antisense strand to SEQ ID NO: 1968328
uggacacugaguuaacuuc

SEQ ID NO: 1968330 - RNA, 19 nt, Artificial Sequence
  Description of Artificial Sequence: Synthetic oligonucleotide
  Sense strand starting at position 156 of SEQ ID NO: 1880454
aggaaauucccuggguggu

SEQ ID NO: 1968331 - RNA, 19 nt, Artificial Sequence
  Description of Artificial Sequence: Synthetic oligonucleotide
  Antisense strand to SEQ ID NO: 1968330
accacccagggaauuuccu

SEQ ID NO: 1968332 - RNA, 19 nt, Artificial Sequence
  Description of Artificial Sequence: Synthetic oligonucleotide
  Sense strand starting at position 157 of SEQ ID NO: 1880454
ggaaauucccugggugguu

SEQ ID NO: 1968333 - RNA, 19 nt, Artificial Sequence
  Description of Artificial Sequence: Synthetic oligonucleotide
  Antisense strand to SEQ ID NO: 1968332
aaccacccagggaauuucc

SEQ ID NO: 1968334 - RNA, 19 nt, Artificial Sequence
  Description of Artificial Sequence: Synthetic oligonucleotide
  Sense strand starting at position 158 of SEQ ID NO: 1880454
gaaauucccugggugguuu

SEQ ID NO: 1968335 - RNA, 19 nt, Artificial Sequence
  Description of Artificial Sequence: Synthetic oligonucleotide
  Antisense strand to SEQ ID NO: 1968334
aaaccacccagggaauuuc

SEQ ID NO: 1968336 - RNA, 19 nt, Artificial Sequence
  Description of Artificial Sequence: Synthetic oligonucleotide
  Sense strand starting at position 218 of SEQ ID NO: 1880454
uuaauuaccuaguuaggaa

SEQ ID NO: 1968337 - RNA, 19 nt, Artificial Sequence
  Description of Artificial Sequence: Synthetic oligonucleotide
  Antisense strand to SEQ ID NO: 1968336
uuccuaacuagguaauuaa

SEQ ID NO: 1968338 - RNA, 19 nt, Artificial Sequence
  Description of Artificial Sequence: Synthetic oligonucleotide
  Sense strand starting at position 291 of SEQ ID NO: 1880454
gaccuagcuggugagaagu

SEQ ID NO: 1968339 - RNA, 19 nt, Artificial Sequence
  Description of Artificial Sequence: Synthetic oligonucleotide
  Antisense strand to SEQ ID NO: 1968338
acuucucaccagcuagguc

SEQ ID NO: 1968340 - RNA, 19 nt, Artificial Sequence
  Description of Artificial Sequence: Synthetic oligonucleotide
  Sense strand starting at position 306 of SEQ ID NO: 1880454
aagugagggacuugguaaa

SEQ ID NO: 1968341 - RNA, 19 nt, Artificial Sequence
  Description of Artificial Sequence: Synthetic oligonucleotide
  Antisense strand to SEQ ID NO: 1968340
uuuaccaagucccucacuu

SEQ ID NO: 1968342 - RNA, 19 nt, Artificial Sequence
  Description of Artificial Sequence: Synthetic oligonucleotide
  Sense strand starting at position 323 of SEQ ID NO: 1880454
aaauaaauguggugauaac

SEQ ID NO: 1968343 - RNA, 19 nt, Artificial Sequence
  Description of Artificial Sequence: Synthetic oligonucleotide
  Antisense strand to SEQ ID NO: 1968342
guuaucaccacauuuauuu

SEQ ID NO: 1968344 - RNA, 19 nt, Artificial Sequence
  Description of Artificial Sequence: Synthetic oligonucleotide
  Sense strand starting at position 2137 of SEQ ID NO: 1880454
uugcgauauucuggcauuu

SEQ ID NO: 1968345 - RNA, 19 nt, Artificial Sequence
  Description of Artificial Sequence: Synthetic oligonucleotide
  Antisense strand to SEQ ID NO: 1968344
aaaugccagaauaucgcaa

SEQ ID NO: 1968346 - RNA, 19 nt, Artificial Sequence
  Description of Artificial Sequence: Synthetic oligonucleotide
  Sense strand starting at position 2803 of SEQ ID NO: 1880454
cguuauucgucguggcuca

SEQ ID NO: 1968347 - RNA, 19 nt, Artificial Sequence
  Description of Artificial Sequence: Synthetic oligonucleotide
  Antisense strand to SEQ ID NO: 1968346
ugagccacgacgaauaacg

SEQ ID NO: 1968348 - RNA, 19 nt, Artificial Sequence
  Description of Artificial Sequence: Synthetic oligonucleotide
  Sense strand starting at position 2804 of SEQ ID NO: 1880454
guuauucgucguggcucaa

SEQ ID NO: 1968349 - RNA, 19 nt, Artificial Sequence
  Description of Artificial Sequence: Synthetic oligonucleotide
  Antisense strand to SEQ ID NO: 1968348
uugagccacgacgaauaac

SEQ ID NO: 1968350 - RNA, 19 nt, Artificial Sequence
  Description of Artificial Sequence: Synthetic oligonucleotide
  Sense strand starting at position 2932 of SEQ ID NO: 1880454
cgacuucuugugcaaggua

SEQ ID NO: 1968351 - RNA, 19 nt, Artificial Sequence
  Description of Artificial Sequence: Synthetic oligonucleotide
  Antisense strand to SEQ ID NO: 1968350
uaccuugcacaagaagucg

SEQ ID NO: 1968352 - RNA, 19 nt, Artificial Sequence
  Description of Artificial Sequence: Synthetic oligonucleotide
  Sense strand starting at position 2981 of SEQ ID NO: 1880454
cguuguaguucuuggacuu

SEQ ID NO: 1968353 - RNA, 19 nt, Artificial Sequence
  Description of Artificial Sequence: Synthetic oligonucleotide
  Antisense strand to SEQ ID NO: 1968352
aaguccaagaacuacaacg

SEQ ID NO: 1968354 - RNA, 19 nt, Artificial Sequence
  Description of Artificial Sequence: Synthetic oligonucleotide
  Sense strand starting at position 2982 of SEQ ID NO: 1880454
guuguaguucuuggacuuu

SEQ ID NO: 1968355 - RNA, 19 nt, Artificial Sequence
  Description of Artificial Sequence: Synthetic oligonucleotide
  Antisense strand to SEQ ID NO: 1968354
aaaguccaagaacuacaac

SEQ ID NO: 1968356 - RNA, 19 nt, Artificial Sequence
  Description of Artificial Sequence: Synthetic oligonucleotide
  Sense strand starting at position 3040 of SEQ ID NO: 1880454
ugccuuucaggucgggaaa

SEQ ID NO: 1968357 - RNA, 19 nt, Artificial Sequence
  Description of Artificial Sequence: Synthetic oligonucleotide
  Antisense strand to SEQ ID NO: 1968356
uuucccgaccugaaaggca

SEQ ID NO: 1968358 - RNA, 19 nt, Artificial Sequence
  Description of Artificial Sequence: Synthetic oligonucleotide
  Sense strand starting at position 3042 of SEQ ID NO: 1880454
ccuuucaggucgggaaagu

SEQ ID NO: 1968359 - RNA, 19 nt, Artificial Sequence
  Description of Artificial Sequence: Synthetic oligonucleotide
  Antisense strand to SEQ ID NO: 1968358
acuuucccgaccugaaagg

SEQ ID NO: 1968360 - RNA, 19 nt, Artificial Sequence
  Description of Artificial Sequence: Synthetic oligonucleotide
  Sense strand starting at position 3333 of SEQ ID NO: 1880454
gucgggauccgccaagagu

SEQ ID NO: 1968361 - RNA, 19 nt, Artificial Sequence
  Description of Artificial Sequence: Synthetic oligonucleotide
  Antisense strand to SEQ ID NO: 1968360
acucuuggcggaucccgac

SEQ ID NO: 1968362 - RNA, 19 nt, Artificial Sequence
  Description of Artificial Sequence: Synthetic oligonucleotide
  Sense strand starting at position 3367 of SEQ ID NO: 1880454
aaagaaucaggcugggagu

SEQ ID NO: 1968363 - RNA, 19 nt, Artificial Sequence
  Description of Artificial Sequence: Synthetic oligonucleotide
  Antisense strand to SEQ ID NO: 1968362
acucccagccugauucuuu

SEQ ID NO: 1968364 - RNA, 19 nt, Artificial Sequence
  Description of Artificial Sequence: Synthetic oligonucleotide
  Sense strand starting at position 3462 of SEQ ID NO: 1880454
agagaaaucccuggccaac

SEQ ID NO: 1968365 - RNA, 19 nt, Artificial Sequence
  Description of Artificial Sequence: Synthetic oligonucleotide
  Antisense strand to SEQ ID NO: 1968364
guuggccagggauuucucu

SEQ ID NO: 1968366 - RNA, 19 nt, Artificial Sequence
  Description of Artificial Sequence: Synthetic oligonucleotide
  Sense strand starting at position 308 of SEQ ID NO: 1880455
gguccaauugccugucaag

SEQ ID NO: 1968367 - RNA, 19 nt, Artificial Sequence
  Description of Artificial Sequence: Synthetic oligonucleotide
  Antisense strand to SEQ ID NO: 1968366
cuugacaggcaauuggacc

SEQ ID NO: 1968368 - RNA, 19 nt, Artificial Sequence
  Description of Artificial Sequence: Synthetic oligonucleotide
  Sense strand starting at position 323 of SEQ ID NO: 1880455
caaguagaaucccuuguga

SEQ ID NO: 1968369 - RNA, 19 nt, Artificial Sequence
  Description of Artificial Sequence: Synthetic oligonucleotide
  Antisense strand to SEQ ID NO: 1968368
ucacaagggauucuacuug

SEQ ID NO: 1968370 - RNA, 19 nt, Artificial Sequence
  Description of Artificial Sequence: Synthetic oligonucleotide
  Sense strand starting at position 325 of SEQ ID NO: 1880455
aguagaaucccuugugaag

SEQ ID NO: 1968371 - RNA, 19 nt, Artificial Sequence
  Description of Artificial Sequence: Synthetic oligonucleotide
  Antisense strand to SEQ ID NO: 1968370
cuucacaagggauucuacu

SEQ ID NO: 1968372 - RNA, 19 nt, Artificial Sequence
  Description of Artificial Sequence: Synthetic oligonucleotide
  Sense strand starting at position 352 of SEQ ID NO: 1880455
ucuccuuugggcugagaaa

SEQ ID NO: 1968373 - RNA, 19 nt, Artificial Sequence
  Description of Artificial Sequence: Synthetic oligonucleotide
  Antisense strand to SEQ ID NO: 1968372
uuucucagcccaaaggaga

SEQ ID NO: 1968374 - RNA, 19 nt, Artificial Sequence
  Description of Artificial Sequence: Synthetic oligonucleotide
  Sense strand starting at position 1025 of SEQ ID NO: 1880455
cucagugucuaaucaggga

SEQ ID NO: 1968375 - RNA, 19 nt, Artificial Sequence
  Description of Artificial Sequence: Synthetic oligonucleotide
  Antisense strand to SEQ ID NO: 1968374
ucccugauuagacacugag

SEQ ID NO: 1968376 - RNA, 19 nt, Artificial Sequence
  Description of Artificial Sequence: Synthetic oligonucleotide
  Sense strand starting at position 1190 of SEQ ID NO: 1880455
uguucuaggcucuaaggau

SEQ ID NO: 1968377 - RNA, 19 nt, Artificial Sequence
  Description of Artificial Sequence: Synthetic oligonucleotide
  Antisense strand to SEQ ID NO: 1968376
auccuuagagccuagaaca

SEQ ID NO: 1968378 - RNA, 19 nt, Artificial Sequence
  Description of Artificial Sequence: Synthetic oligonucleotide
  Sense strand starting at position 1280 of SEQ ID NO: 1880455
gauguauuguaagcaauac

SEQ ID NO: 1968379 - RNA, 19 nt, Artificial Sequence
  Description of Artificial Sequence: Synthetic oligonucleotide
  Antisense strand to SEQ ID NO: 1968378
guauugcuuacaauacauc

SEQ ID NO: 1968380 - RNA, 19 nt, Artificial Sequence
  Description of Artificial Sequence: Synthetic oligonucleotide
  Sense strand starting at position 1379 of SEQ ID NO: 1880455
ggcaauuggcauuaucugu

SEQ ID NO: 1968381 - RNA, 19 nt, Artificial Sequence
  Description of Artificial Sequence: Synthetic oligonucleotide
  Antisense strand to SEQ ID NO: 1968380
acagauaaugccaauugcc

SEQ ID NO: 1968382 - RNA, 19 nt, Artificial Sequence
  Description of Artificial Sequence: Synthetic oligonucleotide
  Sense strand starting at position 1411 of SEQ ID NO: 1880455
gcagcaucgcccgugaguu

SEQ ID NO: 1968383 - RNA, 19 nt, Artificial Sequence
  Description of Artificial Sequence: Synthetic oligonucleotide
  Antisense strand to SEQ ID NO: 1968382
aacucacgggcgaugcugc

SEQ ID NO: 1968384 - RNA, 19 nt, Artificial Sequence
  Description of Artificial Sequence: Synthetic oligonucleotide
  Sense strand starting at position 1428 of SEQ ID NO: 1880455
uuuguaagccuugaucuga

SEQ ID NO: 1968385 - RNA, 19 nt, Artificial Sequence
  Description of Artificial Sequence: Synthetic oligonucleotide
  Antisense strand to SEQ ID NO: 1968384
ucagaucaaggcuuacaaa

SEQ ID NO: 1968386 - RNA, 19 nt, Artificial Sequence
  Description of Artificial Sequence: Synthetic oligonucleotide
  Sense strand starting at position 1535 of SEQ ID NO: 1880455
aaggguugcuaaguacaaa

SEQ ID NO: 1968387 - RNA, 19 nt, Artificial Sequence
  Description of Artificial Sequence: Synthetic oligonucleotide
  Antisense strand to SEQ ID NO: 1968386
uuuguacuuagcaacccuu

SEQ ID NO: 1968388 - RNA, 19 nt, Artificial Sequence
  Description of Artificial Sequence: Synthetic oligonucleotide
  Sense strand starting at position 1597 of SEQ ID NO: 1880455
aaucguauaccauaaagug

SEQ ID NO: 1968389 - RNA, 19 nt, Artificial Sequence
  Description of Artificial Sequence: Synthetic oligonucleotide
  Antisense strand to SEQ ID NO: 1968388
cacuuuaugguauacgauu

SEQ ID NO: 1968390 - RNA, 19 nt, Artificial Sequence
  Description of Artificial Sequence: Synthetic oligonucleotide
  Sense strand starting at position 1613 of SEQ ID NO: 1880455
gugauaaugcauugauaac

SEQ ID NO: 1968391 - RNA, 19 nt, Artificial Sequence
  Description of Artificial Sequence: Synthetic oligonucleotide
  Antisense strand to SEQ ID NO: 1968390
guuaucaaugcauuaucac

SEQ ID NO: 1968392 - RNA, 19 nt, Artificial Sequence
  Description of Artificial Sequence: Synthetic oligonucleotide
  Sense strand starting at position 1632 of SEQ ID NO: 1880455
agaucauacuuacuuguuu

SEQ ID NO: 1968393 - RNA, 19 nt, Artificial Sequence
  Description of Artificial Sequence: Synthetic oligonucleotide
  Antisense strand to SEQ ID NO: 1968392
aaacaaguaaguaugaucu

SEQ ID NO: 1968394 - RNA, 19 nt, Artificial Sequence
  Description of Artificial Sequence: Synthetic oligonucleotide
  Sense strand starting at position 1766 of SEQ ID NO: 1880455
uucucaaagcugugaauga

SEQ ID NO: 1968395 - RNA, 19 nt, Artificial Sequence
  Description of Artificial Sequence: Synthetic oligonucleotide
  Antisense strand to SEQ ID NO: 1968394
ucauucacagcuuugagaa

SEQ ID NO: 1968396 - RNA, 19 nt, Artificial Sequence
  Description of Artificial Sequence: Synthetic oligonucleotide
  Sense strand starting at position 1814 of SEQ ID NO: 1880455
acaggcugcgucuaacaaa

SEQ ID NO: 1968397 - RNA, 19 nt, Artificial Sequence
  Description of Artificial Sequence: Synthetic oligonucleotide
  Antisense strand to SEQ ID NO: 1968396
uuuguuagacgcagccugu

SEQ ID NO: 1968398 - RNA, 19 nt, Artificial Sequence
  Description of Artificial Sequence: Synthetic oligonucleotide
  Sense strand starting at position 2180 of SEQ ID NO: 1880455
gguaaauggugucuuaccu

SEQ ID NO: 1968399 - RNA, 19 nt, Artificial Sequence
  Description of Artificial Sequence: Synthetic oligonucleotide
  Antisense strand to SEQ ID NO: 1968398
agguaagacaccauuuacc

SEQ ID NO: 1968400 - RNA, 19 nt, Artificial Sequence
  Description of Artificial Sequence: Synthetic oligonucleotide
  Sense strand starting at position 2184 of SEQ ID NO: 1880455
aauggugucuuaccugaau

SEQ ID NO: 1968401 - RNA, 19 nt, Artificial Sequence
  Description of Artificial Sequence: Synthetic oligonucleotide
  Antisense strand to SEQ ID NO: 1968400
auucagguaagacaccauu

SEQ ID NO: 1968402 - RNA, 19 nt, Artificial Sequence
  Description of Artificial Sequence: Synthetic oligonucleotide
  Sense strand starting at position 2187 of SEQ ID NO: 1880455
ggugucuuaccugaaucau

SEQ ID NO: 1968403 - RNA, 19 nt, Artificial Sequence
  Description of Artificial Sequence: Synthetic oligonucleotide
  Antisense strand to SEQ ID NO: 1968402
augauucagguaagacacc

SEQ ID NO: 1968404 - RNA, 19 nt, Artificial Sequence
  Description of Artificial Sequence: Synthetic oligonucleotide
  Sense strand starting at position 2390 of SEQ ID NO: 1880455
ccuggucucagagaaguca

SEQ ID NO: 1968405 - RNA, 19 nt, Artificial Sequence
  Description of Artificial Sequence: Synthetic oligonucleotide
  Antisense strand to SEQ ID NO: 1968404
ugacuucucugagaccagg

SEQ ID NO: 1968406 - RNA, 19 nt, Artificial Sequence
  Description of Artificial Sequence: Synthetic oligonucleotide
  Sense strand starting at position 2507 of SEQ ID NO: 1880455
ggaccuagccguuaauucu

SEQ ID NO: 1968407 - RNA, 19 nt, Artificial Sequence
  Description of Artificial Sequence: Synthetic oligonucleotide
  Antisense strand to SEQ ID NO: 1968406
agaauuaacggcuaggucc

SEQ ID NO: 1968408 - RNA, 19 nt, Artificial Sequence
  Description of Artificial Sequence: Synthetic oligonucleotide
  Sense strand starting at position 2535 of SEQ ID NO: 1880455
cugagagcuccaugagcuu

SEQ ID NO: 1968409 - RNA, 19 nt, Artificial Sequence
  Description of Artificial Sequence: Synthetic oligonucleotide
  Antisense strand to SEQ ID NO: 1968408
aagcucauggagcucucag

SEQ ID NO: 1968410 - RNA, 19 nt, Artificial Sequence
  Description of Artificial Sequence: Synthetic oligonucleotide
  Sense strand starting at position 2578 of SEQ ID NO: 1880455
cggcucuuuaggcagaaga

SEQ ID NO: 1968411 - RNA, 19 nt, Artificial Sequence
  Description of Artificial Sequence: Synthetic oligonucleotide
  Antisense strand to SEQ ID NO: 1968410
ucuucugccuaaagagccg

SEQ ID NO: 1968412 - RNA, 19 nt, Artificial Sequence
  Description of Artificial Sequence: Synthetic oligonucleotide
  Sense strand starting at position 2580 of SEQ ID NO: 1880455
gcucuuuaggcagaagaag

SEQ ID NO: 1968413 - RNA, 19 nt, Artificial Sequence
  Description of Artificial Sequence: Synthetic oligonucleotide
  Antisense strand to SEQ ID NO: 1968412
cuucuucugccuaaagagc

SEQ ID NO: 1968414 - RNA, 19 nt, Artificial Sequence
  Description of Artificial Sequence: Synthetic oligonucleotide
  Sense strand starting at position 2625 of SEQ ID NO: 1880455
agaggagcuguccaaguuu

SEQ ID NO: 1968415 - RNA, 19 nt, Artificial Sequence
  Description of Artificial Sequence: Synthetic oligonucleotide
  Antisense strand to SEQ ID NO: 1968414
aaacuuggacagcuccucu

SEQ ID NO: 1968416 - RNA, 19 nt, Artificial Sequence
  Description of Artificial Sequence: Synthetic oligonucleotide
  Sense strand starting at position 2700 of SEQ ID NO: 1880455
gggagugucuaguuagaug

SEQ ID NO: 1968417 - RNA, 19 nt, Artificial Sequence
  Description of Artificial Sequence: Synthetic oligonucleotide
  Antisense strand to SEQ ID NO: 1968416
caucuaacuagacacuccc

SEQ ID NO: 1968418 - RNA, 19 nt, Artificial Sequence
  Description of Artificial Sequence: Synthetic oligonucleotide
  Sense strand starting at position 2725 of SEQ ID NO: 1880455
uuucguucucgugcuugua

SEQ ID NO: 1968419 - RNA, 19 nt, Artificial Sequence
  Description of Artificial Sequence: Synthetic oligonucleotide
  Antisense strand to SEQ ID NO: 1968418
uacaagcacgagaacgaaa

SEQ ID NO: 1968420 - RNA, 19 nt, Artificial Sequence
  Description of Artificial Sequence: Synthetic oligonucleotide
  Sense strand starting at position 2726 of SEQ ID NO: 1880455
uucguucucgugcuuguaa

SEQ ID NO: 1968421 - RNA, 19 nt, Artificial Sequence
  Description of Artificial Sequence: Synthetic oligonucleotide
  Antisense strand to SEQ ID NO: 1968420
uuacaagcacgagaacgaa

SEQ ID NO: 1968422 - RNA, 19 nt, Artificial Sequence
  Description of Artificial Sequence: Synthetic oligonucleotide
  Sense strand starting at position 2729 of SEQ ID NO: 1880455
guucucgugcuuguaaauc

SEQ ID NO: 1968423 - RNA, 19 nt, Artificial Sequence
  Description of Artificial Sequence: Synthetic oligonucleotide
  Antisense strand to SEQ ID NO: 1968422
gauuuacaagcacgagaac

SEQ ID NO: 1968424 - RNA, 19 nt, Artificial Sequence
  Description of Artificial Sequence: Synthetic oligonucleotide
  Sense strand starting at position 2849 of SEQ ID NO: 1880455
uuaaauauugagggcugaa

SEQ ID NO: 1968425 - RNA, 19 nt, Artificial Sequence
  Description of Artificial Sequence: Synthetic oligonucleotide
  Antisense strand to SEQ ID NO: 1968424
uucagcccucaauauuuaa

SEQ ID NO: 1968426 - RNA, 19 nt, Artificial Sequence
  Description of Artificial Sequence: Synthetic oligonucleotide
  Sense strand starting at position 2852 of SEQ ID NO: 1880455
aauauugagggcugaauau

SEQ ID NO: 1968427 - RNA, 19 nt, Artificial Sequence
  Description of Artificial Sequence: Synthetic oligonucleotide
  Antisense strand to SEQ ID NO: 1968426
auauucagcccucaauauu

SEQ ID NO: 1968428 - RNA, 19 nt, Artificial Sequence
  Description of Artificial Sequence: Synthetic oligonucleotide
  Sense strand starting at position 2885 of SEQ ID NO: 1880455
auggcaaaucuuugacaga

SEQ ID NO: 1968429 - RNA, 19 nt, Artificial Sequence
  Description of Artificial Sequence: Synthetic oligonucleotide
  Antisense strand to SEQ ID NO: 1968428
ucugucaaagauuugccau

SEQ ID NO: 1968430 - RNA, 19 nt, Artificial Sequence
  Description of Artificial Sequence: Synthetic oligonucleotide
  Sense strand starting at position 3067 of SEQ ID NO: 1880455
cuuugaaaccuuuagcaag

SEQ ID NO: 1968431 - RNA, 19 nt, Artificial Sequence
  Description of Artificial Sequence: Synthetic oligonucleotide
  Antisense strand to SEQ ID NO: 1968430
cuugcuaaagguuucaaag

SEQ ID NO: 1968432 - RNA, 19 nt, Artificial Sequence
  Description of Artificial Sequence: Synthetic oligonucleotide
  Sense strand starting at position 3069 of SEQ ID NO: 1880455
uugaaaccuuuagcaagua

SEQ ID NO: 1968433 - RNA, 19 nt, Artificial Sequence
  Description of Artificial Sequence: Synthetic oligonucleotide
  Antisense strand to SEQ ID NO: 1968432
uacuugcuaaagguuucaa

SEQ ID NO: 1968434 - RNA, 19 nt, Artificial Sequence
  Description of Artificial Sequence: Synthetic oligonucleotide
  Sense strand starting at position 3199 of SEQ ID NO: 1880455
acucacauaucggcugauu

SEQ ID NO: 1968435 - RNA, 19 nt, Artificial Sequence
  Description of Artificial Sequence: Synthetic oligonucleotide
  Antisense strand to SEQ ID NO: 1968434
aaucagccgauaugugagu

SEQ ID NO: 1968436 - RNA, 19 nt, Artificial Sequence
  Description of Artificial Sequence: Synthetic oligonucleotide
  Sense strand starting at position 3202 of SEQ ID NO: 1880455
cacauaucggcugauugga

SEQ ID NO: 1968437 - RNA, 19 nt, Artificial Sequence
  Description of Artificial Sequence: Synthetic oligonucleotide
  Antisense strand to SEQ ID NO: 1968436
uccaaucagccgauaugug

SEQ ID NO: 1968438 - RNA, 19 nt, Artificial Sequence
  Description of Artificial Sequence: Synthetic oligonucleotide
  Sense strand starting at position 3245 of SEQ ID NO: 1880455
aguguuaugguguauuaac

SEQ ID NO: 1968439 - RNA, 19 nt, Artificial Sequence
  Description of Artificial Sequence: Synthetic oligonucleotide
  Antisense strand to SEQ ID NO: 1968438
guuaauacaccauaacacu

SEQ ID NO: 1968440 - RNA, 19 nt, Artificial Sequence
  Description of Artificial Sequence: Synthetic oligonucleotide
  Sense strand starting at position 3401 of SEQ ID NO: 1880455
ugugaccuuaguuggagau

SEQ ID NO: 1968441 - RNA, 19 nt, Artificial Sequence
  Description of Artificial Sequence: Synthetic oligonucleotide
  Antisense strand to SEQ ID NO: 1968440
aucuccaacuaaggucaca

SEQ ID NO: 1968442 - RNA, 19 nt, Artificial Sequence
  Description of Artificial Sequence: Synthetic oligonucleotide
  Sense strand starting at position 3774 of SEQ ID NO: 1880455
ggugguacuuugucaugac

SEQ ID NO: 1968443 - RNA, 19 nt, Artificial Sequence
  Description of Artificial Sequence: Synthetic oligonucleotide
  Antisense strand to SEQ ID NO: 1968442
gucaugacaaaguaccacc

SEQ ID NO: 1968444 - RNA, 19 nt, Artificial Sequence
  Description of Artificial Sequence: Synthetic oligonucleotide
  Sense strand starting at position 3955 of SEQ ID NO: 1880455
auccacauucuuggaagau

SEQ ID NO: 1968445 - RNA, 19 nt, Artificial Sequence
  Description of Artificial Sequence: Synthetic oligonucleotide
  Antisense strand to SEQ ID NO: 1968444
aucuuccaagaauguggau

SEQ ID NO: 1968446 - RNA, 19 nt, Artificial Sequence
  Description of Artificial Sequence: Synthetic oligonucleotide
  Sense strand starting at position 118 of SEQ ID NO: 1880456
ccaggugucucuccagaau

SEQ ID NO: 1968447 - RNA, 19 nt, Artificial Sequence
  Description of Artificial Sequence: Synthetic oligonucleotide
  Antisense strand to SEQ ID NO: 1968446
auucuggagagacaccugg

SEQ ID NO: 1968448 - RNA, 19 nt, Artificial Sequence
  Description of Artificial Sequence: Synthetic oligonucleotide
  Sense strand starting at position 352 of SEQ ID NO: 1880456
ugguguguuaccgaagauu

SEQ ID NO: 1968449 - RNA, 19 nt, Artificial Sequence
  Description of Artificial Sequence: Synthetic oligonucleotide
  Antisense strand to SEQ ID NO: 1968448
aaucuucgguaacacacca

SEQ ID NO: 1968450 - RNA, 19 nt, Artificial Sequence
  Description of Artificial Sequence: Synthetic oligonucleotide
  Sense strand starting at position 385 of SEQ ID NO: 1880456
uccgauggguuucuuaaag

SEQ ID NO: 1968451 - RNA, 19 nt, Artificial Sequence
  Description of Artificial Sequence: Synthetic oligonucleotide
  Antisense strand to SEQ ID NO: 1968450
cuuuaagaaacccaucgga

SEQ ID NO: 1968452 - RNA, 19 nt, Artificial Sequence
  Description of Artificial Sequence: Synthetic oligonucleotide
  Sense strand starting at position 411 of SEQ ID NO: 1880456
ugaauuaugcuagggaaac

SEQ ID NO: 1968453 - RNA, 19 nt, Artificial Sequence
  Description of Artificial Sequence: Synthetic oligonucleotide
  Antisense strand to SEQ ID NO: 1968452
guuucccuagcauaauuca

SEQ ID NO: 1968454 - RNA, 19 nt, Artificial Sequence
  Description of Artificial Sequence: Synthetic oligonucleotide
  Sense strand starting at position 531 of SEQ ID NO: 1880456
gccugagcuccagaucaca

SEQ ID NO: 1968455 - RNA, 19 nt, Artificial Sequence
  Description of Artificial Sequence: Synthetic oligonucleotide
  Antisense strand to SEQ ID NO: 1968454
ugugaucuggagcucaggc

SEQ ID NO: 1968456 - RNA, 19 nt, Artificial Sequence
  Description of Artificial Sequence: Synthetic oligonucleotide
  Sense strand starting at position 673 of SEQ ID NO: 1880456
gagaguucgggacgggauu

SEQ ID NO: 1968457 - RNA, 19 nt, Artificial Sequence
  Description of Artificial Sequence: Synthetic oligonucleotide
  Antisense strand to SEQ ID NO: 1968456
aaucccgucccgaacucuc

SEQ ID NO: 1968458 - RNA, 19 nt, Artificial Sequence
  Description of Artificial Sequence: Synthetic oligonucleotide
  Sense strand starting at position 905 of SEQ ID NO: 1880456
cgaggacaccucugaccau

SEQ ID NO: 1968459 - RNA, 19 nt, Artificial Sequence
  Description of Artificial Sequence: Synthetic oligonucleotide
  Antisense strand to SEQ ID NO: 1968458
auggucagagguguccucg

SEQ ID NO: 1968460 - RNA, 19 nt, Artificial Sequence
  Description of Artificial Sequence: Synthetic oligonucleotide
  Sense strand starting at position 925 of SEQ ID NO: 1880456
ggccuuggucgggaggaau

SEQ ID NO: 1968461 - RNA, 19 nt, Artificial Sequence
  Description of Artificial Sequence: Synthetic oligonucleotide
  Antisense strand to SEQ ID NO: 1968460
auuccucccgaccaaggcc

SEQ ID NO: 1968462 - RNA, 19 nt, Artificial Sequence
  Description of Artificial Sequence: Synthetic oligonucleotide
  Sense strand starting at position 988 of SEQ ID NO: 1880456
caaugaauguauccgaggu

SEQ ID NO: 1968463 - RNA, 19 nt, Artificial Sequence
  Description of Artificial Sequence: Synthetic oligonucleotide
  Antisense strand to SEQ ID NO: 1968462
accucggauacauucauug

SEQ ID NO: 1968464 - RNA, 19 nt, Artificial Sequence
  Description of Artificial Sequence: Synthetic oligonucleotide
  Sense strand starting at position 1064 of SEQ ID NO: 1880456
ucguaaucccguuuccuuu

SEQ ID NO: 1968465 - RNA, 19 nt, Artificial Sequence
  Description of Artificial Sequence: Synthetic oligonucleotide
  Antisense strand to SEQ ID NO: 1968464
aaaggaaacgggauuacga

SEQ ID NO: 1968466 - RNA, 19 nt, Artificial Sequence
  Description of Artificial Sequence: Synthetic oligonucleotide
  Sense strand starting at position 1119 of SEQ ID NO: 1880456
gucaucucuuaggcaaaca

SEQ ID NO: 1968467 - RNA, 19 nt, Artificial Sequence
  Description of Artificial Sequence: Synthetic oligonucleotide
  Antisense strand to SEQ ID NO: 1968466
uguuugccuaagagaugac

SEQ ID NO: 1968468 - RNA, 19 nt, Artificial Sequence
  Description of Artificial Sequence: Synthetic oligonucleotide
  Sense strand starting at position 1179 of SEQ ID NO: 1880456
aaagaaauguucuuggcag

SEQ ID NO: 1968469 - RNA, 19 nt, Artificial Sequence
  Description of Artificial Sequence: Synthetic oligonucleotide
  Antisense strand to SEQ ID NO: 1968468
cugccaagaacauuucuuu

SEQ ID NO: 1968470 - RNA, 19 nt, Artificial Sequence
  Description of Artificial Sequence: Synthetic oligonucleotide
  Sense strand starting at position 1359 of SEQ ID NO: 1880456
acgcucuuccacgaaauaa

SEQ ID NO: 1968471 - RNA, 19 nt, Artificial Sequence
  Description of Artificial Sequence: Synthetic oligonucleotide
  Antisense strand to SEQ ID NO: 1968470
uuauuucguggaagagcgu

SEQ ID NO: 1968472 - RNA, 19 nt, Artificial Sequence
  Description of Artificial Sequence: Synthetic oligonucleotide
  Sense strand starting at position 1422 of SEQ ID NO: 1880456
agccucugacuugaaguua

SEQ ID NO: 1968473 - RNA, 19 nt, Artificial Sequence
  Description of Artificial Sequence: Synthetic oligonucleotide
  Antisense strand to SEQ ID NO: 1968472
uaacuucaagucagaggcu

SEQ ID NO: 1968474 - RNA, 19 nt, Artificial Sequence
  Description of Artificial Sequence: Synthetic oligonucleotide
  Sense strand starting at position 1571 of SEQ ID NO: 1880456
ggccuugguggaugaucua

SEQ ID NO: 1968475 - RNA, 19 nt, Artificial Sequence
  Description of Artificial Sequence: Synthetic oligonucleotide
  Antisense strand to SEQ ID NO: 1968474
uagaucauccaccaaggcc

SEQ ID NO: 1968476 - RNA, 19 nt, Artificial Sequence
  Description of Artificial Sequence: Synthetic oligonucleotide
  Sense strand starting at position 1574 of SEQ ID NO: 1880456
cuugguggaugaucuaaga

SEQ ID NO: 1968477 - RNA, 19 nt, Artificial Sequence
  Description of Artificial Sequence: Synthetic oligonucleotide
  Antisense strand to SEQ ID NO: 1968476
ucuuagaucauccaccaag

SEQ ID NO: 1968478 - RNA, 19 nt, Artificial Sequence
  Description of Artificial Sequence: Synthetic oligonucleotide
  Sense strand starting at position 1732 of SEQ ID NO: 1880456
agaugucgccuggagaaau

SEQ ID NO: 1968479 - RNA, 19 nt, Artificial Sequence
  Description of Artificial Sequence: Synthetic oligonucleotide
  Antisense strand to SEQ ID NO: 1968478
auuucuccaggcgacaucu

SEQ ID NO: 1968480 - RNA, 19 nt, Artificial Sequence
  Description of Artificial Sequence: Synthetic oligonucleotide
  Sense strand starting at position 2209 of SEQ ID NO: 1880456
gaucgaucgccggagaaac

SEQ ID NO: 1968481 - RNA, 19 nt, Artificial Sequence
  Description of Artificial Sequence: Synthetic oligonucleotide
  Antisense strand to SEQ ID NO: 1968480
guuucuccggcgaucgauc

SEQ ID NO: 1968482 - RNA, 19 nt, Artificial Sequence
  Description of Artificial Sequence: Synthetic oligonucleotide
  Sense strand starting at position 2411 of SEQ ID NO: 1880456
aagucccgccauuagaaau

SEQ ID NO: 1968483 - RNA, 19 nt, Artificial Sequence
  Description of Artificial Sequence: Synthetic oligonucleotide
  Antisense strand to SEQ ID NO: 1968482
auuucuaauggcgggacuu

SEQ ID NO: 1968484 - RNA, 19 nt, Artificial Sequence
  Description of Artificial Sequence: Synthetic oligonucleotide
  Sense strand starting at position 2440 of SEQ ID NO: 1880456
ggcugauauuaccuucuuu

SEQ ID NO: 1968485 - RNA, 19 nt, Artificial Sequence
  Description of Artificial Sequence: Synthetic oligonucleotide
  Antisense strand to SEQ ID NO: 1968484
aaagaagguaauaucagcc

SEQ ID NO: 1968486 - RNA, 19 nt, Artificial Sequence
  Description of Artificial Sequence: Synthetic oligonucleotide
  Sense strand starting at position 2486 of SEQ ID NO: 1880456
ugguaagacuccucuugac

SEQ ID NO: 1968487 - RNA, 19 nt, Artificial Sequence
  Description of Artificial Sequence: Synthetic oligonucleotide
  Antisense strand to SEQ ID NO: 1968486
gucaagaggagucuuacca

SEQ ID NO: 1968488 - RNA, 19 nt, Artificial Sequence
  Description of Artificial Sequence: Synthetic oligonucleotide
  Sense strand starting at position 2535 of SEQ ID NO: 1880456
uggcuagaacagcaauaau

SEQ ID NO: 1968489 - RNA, 19 nt, Artificial Sequence
  Description of Artificial Sequence: Synthetic oligonucleotide
  Antisense strand to SEQ ID NO: 1968488
auuauugcuguucuagcca

SEQ ID NO: 1968490 - RNA, 19 nt, Artificial Sequence
  Description of Artificial Sequence: Synthetic oligonucleotide
  Sense strand starting at position 2646 of SEQ ID NO: 1880456
aauguuaguccuggugaac

SEQ ID NO: 1968491 - RNA, 19 nt, Artificial Sequence
  Description of Artificial Sequence: Synthetic oligonucleotide
  Antisense strand to SEQ ID NO: 1968490
guucaccaggacuaacauu

SEQ ID NO: 1968492 - RNA, 19 nt, Artificial Sequence
  Description of Artificial Sequence: Synthetic oligonucleotide
  Sense strand starting at position 2707 of SEQ ID NO: 1880456
caguauuugcuaugugcua

SEQ ID NO: 1968493 - RNA, 19 nt, Artificial Sequence
  Description of Artificial Sequence: Synthetic oligonucleotide
  Antisense strand to SEQ ID NO: 1968492
uagcacauagcaaauacug

SEQ ID NO: 1968494 - RNA, 19 nt, Artificial Sequence
  Description of Artificial Sequence: Synthetic oligonucleotide
  Sense strand starting at position 2708 of SEQ ID NO: 1880456
aguauuugcuaugugcuau

SEQ ID NO: 1968495 - RNA, 19 nt, Artificial Sequence
  Description of Artificial Sequence: Synthetic oligonucleotide
  Antisense strand to SEQ ID NO: 1968494
auagcacauagcaaauacu

SEQ ID NO: 1968496 - RNA, 19 nt, Artificial Sequence
  Description of Artificial Sequence: Synthetic oligonucleotide
  Sense strand starting at position 2720 of SEQ ID NO: 1880456
gugcuaugauccucauaag

SEQ ID NO: 1968497 - RNA, 19 nt, Artificial Sequence
  Description of Artificial Sequence: Synthetic oligonucleotide
  Antisense strand to SEQ ID NO: 1968496
cuuaugaggaucauagcac

SEQ ID NO: 1968498 - RNA, 19 nt, Artificial Sequence
  Description of Artificial Sequence: Synthetic oligonucleotide
  Sense strand starting at position 2721 of SEQ ID NO: 1880456
ugcuaugauccucauaagu

SEQ ID NO: 1968499 - RNA, 19 nt, Artificial Sequence
  Description of Artificial Sequence: Synthetic oligonucleotide
  Antisense strand to SEQ ID NO: 1968498
acuuaugaggaucauagca

SEQ ID NO: 1968500 - RNA, 19 nt, Artificial Sequence
  Description of Artificial Sequence: Synthetic oligonucleotide
  Sense strand starting at position 2755 of SEQ ID NO: 1880456
cgaguaaugcucuauuaug

SEQ ID NO: 1968501 - RNA, 19 nt, Artificial Sequence
  Description of Artificial Sequence: Synthetic oligonucleotide
  Antisense strand to SEQ ID NO: 1968500
cauaauagagcauuacucg

SEQ ID NO: 1968502 - RNA, 19 nt, Artificial Sequence
  Description of Artificial Sequence: Synthetic oligonucleotide
  Sense strand starting at position 2773 of SEQ ID NO: 1880456
guuacuguguaauuuacuu

SEQ ID NO: 1968503 - RNA, 19 nt, Artificial Sequence
  Description of Artificial Sequence: Synthetic oligonucleotide
  Antisense strand to SEQ ID NO: 1968502
aaguaaauuacacaguaac

SEQ ID NO: 1968504 - RNA, 19 nt, Artificial Sequence
  Description of Artificial Sequence: Synthetic oligonucleotide
  Sense strand starting at position 3017 of SEQ ID NO: 1880456
ggugcuaccggucaggaau

SEQ ID NO: 1968505 - RNA, 19 nt, Artificial Sequence
  Description of Artificial Sequence: Synthetic oligonucleotide
  Antisense strand to SEQ ID NO: 1968504
auuccugaccgguagcacc

SEQ ID NO: 1968506 - RNA, 19 nt, Artificial Sequence
  Description of Artificial Sequence: Synthetic oligonucleotide
  Sense strand starting at position 3285 of SEQ ID NO: 1880456
ggguuugccaaguagaaau

SEQ ID NO: 1968507 - RNA, 19 nt, Artificial Sequence
  Description of Artificial Sequence: Synthetic oligonucleotide
  Antisense strand to SEQ ID NO: 1968506
auuucuacuuggcaaaccc

SEQ ID NO: 1968508 - RNA, 19 nt, Artificial Sequence
  Description of Artificial Sequence: Synthetic oligonucleotide
  Sense strand starting at position 3392 of SEQ ID NO: 1880456
aucauaaauguggguggaa

SEQ ID NO: 1968509 - RNA, 19 nt, Artificial Sequence
  Description of Artificial Sequence: Synthetic oligonucleotide
  Antisense strand to SEQ ID NO: 1968508
uuccacccacauuuaugau

SEQ ID NO: 1968510 - RNA, 19 nt, Artificial Sequence
  Description of Artificial Sequence: Synthetic oligonucleotide
  Sense strand starting at position 3393 of SEQ ID NO: 1880456
ucauaaauguggguggaaa

SEQ ID NO: 1968511 - RNA, 19 nt, Artificial Sequence
  Description of Artificial Sequence: Synthetic oligonucleotide
  Antisense strand to SEQ ID NO: 1968510
uuuccacccacauuuauga

SEQ ID NO: 1968512 - RNA, 19 nt, Artificial Sequence
  Description of Artificial Sequence: Synthetic oligonucleotide
  Sense strand starting at position 3458 of SEQ ID NO: 1880456
aacagacagccugguuauu

SEQ ID NO: 1968513 - RNA, 19 nt, Artificial Sequence
  Description of Artificial Sequence: Synthetic oligonucleotide
  Antisense strand to SEQ ID NO: 1968512
aauaaccaggcugucuguu

SEQ ID NO: 1968514 - RNA, 19 nt, Artificial Sequence
  Description of Artificial Sequence: Synthetic oligonucleotide
  Sense strand starting at position 3503 of SEQ ID NO: 1880456
gcuguauuaauagaggcau

SEQ ID NO: 1968515 - RNA, 19 nt, Artificial Sequence
  Description of Artificial Sequence: Synthetic oligonucleotide
  Antisense strand to SEQ ID NO: 1968514
augccucuauuaauacagc

SEQ ID NO: 1968516 - RNA, 19 nt, Artificial Sequence
  Description of Artificial Sequence: Synthetic oligonucleotide
  Sense strand starting at position 3505 of SEQ ID NO: 1880456
uguauuaauagaggcauga

SEQ ID NO: 1968517 - RNA, 19 nt, Artificial Sequence
  Description of Artificial Sequence: Synthetic oligonucleotide
  Antisense strand to SEQ ID NO: 1968516
ucaugccucuauuaauaca

SEQ ID NO: 1968518 - RNA, 19 nt, Artificial Sequence
  Description of Artificial Sequence: Synthetic oligonucleotide
  Sense strand starting at position 3509 of SEQ ID NO: 1880456
uuaauagaggcaugauuac

SEQ ID NO: 1968519 - RNA, 19 nt, Artificial Sequence
  Description of Artificial Sequence: Synthetic oligonucleotide
  Antisense strand to SEQ ID NO: 1968518
guaaucaugccucuauuaa

SEQ ID NO: 1968520 - RNA, 19 nt, Artificial Sequence
  Description of Artificial Sequence: Synthetic oligonucleotide
  Sense strand starting at position 3611 of SEQ ID NO: 1880456
gacucuugaggcugaagaa

SEQ ID NO: 1968521 - RNA, 19 nt, Artificial Sequence
  Description of Artificial Sequence: Synthetic oligonucleotide
  Antisense strand to SEQ ID NO: 1968520
uucuucagccucaagaguc

SEQ ID NO: 1968522 - RNA, 19 nt, Artificial Sequence
  Description of Artificial Sequence: Synthetic oligonucleotide
  Sense strand starting at position 3635 of SEQ ID NO: 1880456
uaggaauuguccuuuaaga

SEQ ID NO: 1968523 - RNA, 19 nt, Artificial Sequence
  Description of Artificial Sequence: Synthetic oligonucleotide
  Antisense strand to SEQ ID NO: 1968522
ucuuaaaggacaauuccua

SEQ ID NO: 1968524 - RNA, 19 nt, Artificial Sequence
  Description of Artificial Sequence: Synthetic oligonucleotide
  Sense strand starting at position 3793 of SEQ ID NO: 1880456
cagacaagugucuacaagu

SEQ ID NO: 1968525 - RNA, 19 nt, Artificial Sequence
  Description of Artificial Sequence: Synthetic oligonucleotide
  Antisense strand to SEQ ID NO: 1968524
acuuguagacacuugucug

SEQ ID NO: 1968526 - RNA, 19 nt, Artificial Sequence
  Description of Artificial Sequence: Synthetic oligonucleotide
  Sense strand starting at position 109 of SEQ ID NO: 1880457
uguguuaugcaaugaauuc

SEQ ID NO: 1968527 - RNA, 19 nt, Artificial Sequence
  Description of Artificial Sequence: Synthetic oligonucleotide
  Antisense strand to SEQ ID NO: 1968526
gaauucauugcauaacaca

SEQ ID NO: 1968528 - RNA, 19 nt, Artificial Sequence
  Description of Artificial Sequence: Synthetic oligonucleotide
  Sense strand starting at position 134 of SEQ ID NO: 1880457
cguugugaauaugcauaga

SEQ ID NO: 1968529 - RNA, 19 nt, Artificial Sequence
  Description of Artificial Sequence: Synthetic oligonucleotide
  Antisense strand to SEQ ID NO: 1968528
ucuaugcauauucacaacg

SEQ ID NO: 1968530 - RNA, 19 nt, Artificial Sequence
  Description of Artificial Sequence: Synthetic oligonucleotide
  Sense strand starting at position 149 of SEQ ID NO: 1880457
uagaaagguagcgguauuu

SEQ ID NO: 1968531 - RNA, 19 nt, Artificial Sequence
  Description of Artificial Sequence: Synthetic oligonucleotide
  Antisense strand to SEQ ID NO: 1968530
aaauaccgcuaccuuucua

SEQ ID NO: 1968532 - RNA, 19 nt, Artificial Sequence
  Description of Artificial Sequence: Synthetic oligonucleotide
  Sense strand starting at position 177 of SEQ ID NO: 1880457
gcaaguuuggaagagcaga

SEQ ID NO: 1968533 - RNA, 19 nt, Artificial Sequence
  Description of Artificial Sequence: Synthetic oligonucleotide
  Antisense strand to SEQ ID NO: 1968532
ucugcucuuccaaacuugc

SEQ ID NO: 1968534 - RNA, 19 nt, Artificial Sequence
  Description of Artificial Sequence: Synthetic oligonucleotide
  Sense strand starting at position 258 of SEQ ID NO: 1880457
cugacaagucaauaaugcu

SEQ ID NO: 1968535 - RNA, 19 nt, Artificial Sequence
  Description of Artificial Sequence: Synthetic oligonucleotide
  Antisense strand to SEQ ID NO: 1968534
agcauuauugacuugucag

SEQ ID NO: 1968536 - RNA, 19 nt, Artificial Sequence
  Description of Artificial Sequence: Synthetic oligonucleotide
  Sense strand starting at position 274 of SEQ ID NO: 1880457
gcuacuccugagcaaaguu

SEQ ID NO: 1968537 - RNA, 19 nt, Artificial Sequence
  Description of Artificial Sequence: Synthetic oligonucleotide
  Antisense strand to SEQ ID NO: 1968536
aacuuugcucaggaguagc

SEQ ID NO: 1968538 - RNA, 19 nt, Artificial Sequence
  Description of Artificial Sequence: Synthetic oligonucleotide
  Sense strand starting at position 404 of SEQ ID NO: 1880457
agaaaucucuaguuuggcu

SEQ ID NO: 1968539 - RNA, 19 nt, Artificial Sequence
  Description of Artificial Sequence: Synthetic oligonucleotide
  Antisense strand to SEQ ID NO: 1968538
agccaaacuagagauuucu

SEQ ID NO: 1968540 - RNA, 19 nt, Artificial Sequence
  Description of Artificial Sequence: Synthetic oligonucleotide
  Sense strand starting at position 425 of SEQ ID NO: 1880457
uucucuuuggcugaaccaa

SEQ ID NO: 1968541 - RNA, 19 nt, Artificial Sequence
  Description of Artificial Sequence: Synthetic oligonucleotide
  Antisense strand to SEQ ID NO: 1968540
uugguucagccaaagagaa

SEQ ID NO: 1968542 - RNA, 19 nt, Artificial Sequence
  Description of Artificial Sequence: Synthetic oligonucleotide
  Sense strand starting at position 480 of SEQ ID NO: 1880457
gcuuaaugugacuaguguu

SEQ ID NO: 1968543 - RNA, 19 nt, Artificial Sequence
  Description of Artificial Sequence: Synthetic oligonucleotide
  Antisense strand to SEQ ID NO: 1968542
aacacuagucacauuaagc

SEQ ID NO: 1968544 - RNA, 19 nt, Artificial Sequence
  Description of Artificial Sequence: Synthetic oligonucleotide
  Sense strand starting at position 527 of SEQ ID NO: 1880457
ccaauaugcucugcucaga

SEQ ID NO: 1968545 - RNA, 19 nt, Artificial Sequence
  Description of Artificial Sequence: Synthetic oligonucleotide
  Antisense strand to SEQ ID NO: 1968544
ucugagcagagcauauugg

SEQ ID NO: 1968546 - RNA, 19 nt, Artificial Sequence
  Description of Artificial Sequence: Synthetic oligonucleotide
  Sense strand starting at position 530 of SEQ ID NO: 1880457
auaugcucugcucagaaau

SEQ ID NO: 1968547 - RNA, 19 nt, Artificial Sequence
  Description of Artificial Sequence: Synthetic oligonucleotide
  Antisense strand to SEQ ID NO: 1968546
auuucugagcagagcauau

SEQ ID NO: 1968548 - RNA, 19 nt, Artificial Sequence
  Description of Artificial Sequence: Synthetic oligonucleotide
  Sense strand starting at position 744 of SEQ ID NO: 1880457
ggcaucaacuguuuccaaa

SEQ ID NO: 1968549 - RNA, 19 nt, Artificial Sequence
  Description of Artificial Sequence: Synthetic oligonucleotide
  Antisense strand to SEQ ID NO: 1968548
uuuggaaacaguugaugcc

SEQ ID NO: 1968550 - RNA, 19 nt, Artificial Sequence
  Description of Artificial Sequence: Synthetic oligonucleotide
  Sense strand starting at position 938 of SEQ ID NO: 1880457
cuggacuuggccuagcuau

SEQ ID NO: 1968551 - RNA, 19 nt, Artificial Sequence
  Description of Artificial Sequence: Synthetic oligonucleotide
  Antisense strand to SEQ ID NO: 1968550
auagcuaggccaaguccag

SEQ ID NO: 1968552 - RNA, 19 nt, Artificial Sequence
  Description of Artificial Sequence: Synthetic oligonucleotide
  Sense strand starting at position 964 of SEQ ID NO: 1880457
ggccauguuuaucuaauua

SEQ ID NO: 1968553 - RNA, 19 nt, Artificial Sequence
  Description of Artificial Sequence: Synthetic oligonucleotide
  Antisense strand to SEQ ID NO: 1968552
uaauuagauaaacauggcc

SEQ ID NO: 1968554 - RNA, 19 nt, Artificial Sequence
  Description of Artificial Sequence: Synthetic oligonucleotide
  Sense strand starting at position 1120 of SEQ ID NO: 1880457
gaaugaaguguagggaugu

SEQ ID NO: 1968555 - RNA, 19 nt, Artificial Sequence
  Description of Artificial Sequence: Synthetic oligonucleotide
  Antisense strand to SEQ ID NO: 1968554
acaucccuacacuucauuc

SEQ ID NO: 1968556 - RNA, 19 nt, Artificial Sequence
  Description of Artificial Sequence: Synthetic oligonucleotide
  Sense strand starting at position 1130 of SEQ ID NO: 1880457
uagggauguccugguuagu

SEQ ID NO: 1968557 - RNA, 19 nt, Artificial Sequence
  Description of Artificial Sequence: Synthetic oligonucleotide
  Antisense strand to SEQ ID NO: 1968556
acuaaccaggacaucccua

SEQ ID NO: 1968558 - RNA, 19 nt, Artificial Sequence
  Description of Artificial Sequence: Synthetic oligonucleotide
  Sense strand starting at position 1419 of SEQ ID NO: 1880457
aguccugauucucugggaa

SEQ ID NO: 1968559 - RNA, 19 nt, Artificial Sequence
  Description of Artificial Sequence: Synthetic oligonucleotide
  Antisense strand to SEQ ID NO: 1968558
uucccagagaaucaggacu

SEQ ID NO: 1968560 - RNA, 19 nt, Artificial Sequence
  Description of Artificial Sequence: Synthetic oligonucleotide
  Sense strand starting at position 1828 of SEQ ID NO: 1880457
acacuuaccgagcaaacuu

SEQ ID NO: 1968561 - RNA, 19 nt, Artificial Sequence
  Description of Artificial Sequence: Synthetic oligonucleotide
  Antisense strand to SEQ ID NO: 1968560
aaguuugcucgguaagugu

SEQ ID NO: 1968562 - RNA, 19 nt, Artificial Sequence
  Description of Artificial Sequence: Synthetic oligonucleotide
  Sense strand starting at position 1991 of SEQ ID NO: 1880457
ccagcucuccacuagucua

SEQ ID NO: 1968563 - RNA, 19 nt, Artificial Sequence
  Description of Artificial Sequence: Synthetic oligonucleotide
  Antisense strand to SEQ ID NO: 1968562
uagacuaguggagagcugg

SEQ ID NO: 1968564 - RNA, 19 nt, Artificial Sequence
  Description of Artificial Sequence: Synthetic oligonucleotide
  Sense strand starting at position 2071 of SEQ ID NO: 1880457
cuuguuauauacuuuggau

SEQ ID NO: 1968565 - RNA, 19 nt, Artificial Sequence
  Description of Artificial Sequence: Synthetic oligonucleotide
  Antisense strand to SEQ ID NO: 1968564
auccaaaguauauaacaag

SEQ ID NO: 1968566 - RNA, 19 nt, Artificial Sequence
  Description of Artificial Sequence: Synthetic oligonucleotide
  Sense strand starting at position 2184 of SEQ ID NO: 1880457
gagaauuaaguacgacgaa

SEQ ID NO: 1968567 - RNA, 19 nt, Artificial Sequence
  Description of Artificial Sequence: Synthetic oligonucleotide
  Antisense strand to SEQ ID NO: 1968566
uucgucguacuuaauucuc

SEQ ID NO: 1968568 - RNA, 19 nt, Artificial Sequence
  Description of Artificial Sequence: Synthetic oligonucleotide
  Sense strand starting at position 2230 of SEQ ID NO: 1880457
ucggaacagaaguguguuu

SEQ ID NO: 1968569 - RNA, 19 nt, Artificial Sequence
  Description of Artificial Sequence: Synthetic oligonucleotide
  Antisense strand to SEQ ID NO: 1968568
aaacacacuucuguuccga

SEQ ID NO: 1968570 - RNA, 19 nt, Artificial Sequence
  Description of Artificial Sequence: Synthetic oligonucleotide
  Sense strand starting at position 2232 of SEQ ID NO: 1880457
ggaacagaaguguguuucu

SEQ ID NO: 1968571 - RNA, 19 nt, Artificial Sequence
  Description of Artificial Sequence: Synthetic oligonucleotide
  Antisense strand to SEQ ID NO: 1968570
agaaacacacuucuguucc

SEQ ID NO: 1968572 - RNA, 19 nt, Artificial Sequence
  Description of Artificial Sequence: Synthetic oligonucleotide
  Sense strand starting at position 2248 of SEQ ID NO: 1880457
ucuguuaucgaggagcaca

SEQ ID NO: 1968573 - RNA, 19 nt, Artificial Sequence
  Description of Artificial Sequence: Synthetic oligonucleotide
  Antisense strand to SEQ ID NO: 1968572
ugugcuccucgauaacaga

SEQ ID NO: 1968574 - RNA, 19 nt, Artificial Sequence
  Description of Artificial Sequence: Synthetic oligonucleotide
  Sense strand starting at position 2317 of SEQ ID NO: 1880457
gaaaguggaucuguuugca

SEQ ID NO: 1968575 - RNA, 19 nt, Artificial Sequence
  Description of Artificial Sequence: Synthetic oligonucleotide
  Antisense strand to SEQ ID NO: 1968574
ugcaaacagauccacuuuc

SEQ ID NO: 1968576 - RNA, 19 nt, Artificial Sequence
  Description of Artificial Sequence: Synthetic oligonucleotide
  Sense strand starting at position 2337 of SEQ ID NO: 1880457
aggcgcuaucacguuucau

SEQ ID NO: 1968577 - RNA, 19 nt, Artificial Sequence
  Description of Artificial Sequence: Synthetic oligonucleotide
  Antisense strand to SEQ ID NO: 1968576
augaaacgugauagcgccu

SEQ ID NO: 1968578 - RNA, 19 nt, Artificial Sequence
  Description of Artificial Sequence: Synthetic oligonucleotide
  Sense strand starting at position 2610 of SEQ ID NO: 1880457
ugaaaucuguguuccaucu

SEQ ID NO: 1968579 - RNA, 19 nt, Artificial Sequence
  Description of Artificial Sequence: Synthetic oligonucleotide
  Antisense strand to SEQ ID NO: 1968578
agauggaacacagauuuca

SEQ ID NO: 1968580 - RNA, 19 nt, Artificial Sequence
  Description of Artificial Sequence: Synthetic oligonucleotide
  Sense strand starting at position 2637 of SEQ ID NO: 1880457
uacauauacgcauacguaa

SEQ ID NO: 1968581 - RNA, 19 nt, Artificial Sequence
  Description of Artificial Sequence: Synthetic oligonucleotide
  Antisense strand to SEQ ID NO: 1968580
uuacguaugcguauaugua

SEQ ID NO: 1968582 - RNA, 19 nt, Artificial Sequence
  Description of Artificial Sequence: Synthetic oligonucleotide
  Sense strand starting at position 2731 of SEQ ID NO: 1880457
guaucuauaccuuggcaau

SEQ ID NO: 1968583 - RNA, 19 nt, Artificial Sequence
  Description of Artificial Sequence: Synthetic oligonucleotide
  Antisense strand to SEQ ID NO: 1968582
auugccaagguauagauac

SEQ ID NO: 1968584 - RNA, 19 nt, Artificial Sequence
  Description of Artificial Sequence: Synthetic oligonucleotide
  Sense strand starting at position 2835 of SEQ ID NO: 1880457
aguguuaaucuugagauca

SEQ ID NO: 1968585 - RNA, 19 nt, Artificial Sequence
  Description of Artificial Sequence: Synthetic oligonucleotide
  Antisense strand to SEQ ID NO: 1968584
ugaucucaagauuaacacu

SEQ ID NO: 1968586 - RNA, 19 nt, Artificial Sequence
  Description of Artificial Sequence: Synthetic oligonucleotide
  Sense strand starting at position 3136 of SEQ ID NO: 1880457
uuuauugaauguccgaguu

SEQ ID NO: 1968587 - RNA, 19 nt, Artificial Sequence
  Description of Artificial Sequence: Synthetic oligonucleotide
  Antisense strand to SEQ ID NO: 1968586
aacucggacauucaauaaa

SEQ ID NO: 1968588 - RNA, 19 nt, Artificial Sequence
  Description of Artificial Sequence: Synthetic oligonucleotide
  Sense strand starting at position 3142 of SEQ ID NO: 1880457
gaauguccgaguuggguua

SEQ ID NO: 1968589 - RNA, 19 nt, Artificial Sequence
  Description of Artificial Sequence: Synthetic oligonucleotide
  Antisense strand to SEQ ID NO: 1968588
uaacccaacucggacauuc

SEQ ID NO: 1968590 - RNA, 19 nt, Artificial Sequence
  Description of Artificial Sequence: Synthetic oligonucleotide
  Sense strand starting at position 3154 of SEQ ID NO: 1880457
uggguuaguucauuggaaa

SEQ ID NO: 1968591 - RNA, 19 nt, Artificial Sequence
  Description of Artificial Sequence: Synthetic oligonucleotide
  Antisense strand to SEQ ID NO: 1968590
uuuccaaugaacuaaccca

SEQ ID NO: 1968592 - RNA, 19 nt, Artificial Sequence
  Description of Artificial Sequence: Synthetic oligonucleotide
  Sense strand starting at position 3155 of SEQ ID NO: 1880457
ggguuaguucauuggaaau

SEQ ID NO: 1968593 - RNA, 19 nt, Artificial Sequence
  Description of Artificial Sequence: Synthetic oligonucleotide
  Antisense strand to SEQ ID NO: 1968592
auuuccaaugaacuaaccc

SEQ ID NO: 1968594 - RNA, 19 nt, Artificial Sequence
  Description of Artificial Sequence: Synthetic oligonucleotide
  Sense strand starting at position 3354 of SEQ ID NO: 1880457
cuggguuagagcugagaaa

SEQ ID NO: 1968595 - RNA, 19 nt, Artificial Sequence
  Description of Artificial Sequence: Synthetic oligonucleotide
  Antisense strand to SEQ ID NO: 1968594
uuucucagcucuaacccag

SEQ ID NO: 1968596 - RNA, 19 nt, Artificial Sequence
  Description of Artificial Sequence: Synthetic oligonucleotide
  Sense strand starting at position 3619 of SEQ ID NO: 1880457
gucgaauacacuuacgaug

SEQ ID NO: 1968597 - RNA, 19 nt, Artificial Sequence
  Description of Artificial Sequence: Synthetic oligonucleotide
  Antisense strand to SEQ ID NO: 1968596
caucguaaguguauucgac

SEQ ID NO: 1968598 - RNA, 19 nt, Artificial Sequence
  Description of Artificial Sequence: Synthetic oligonucleotide
  Sense strand starting at position 3624 of SEQ ID NO: 1880457
auacacuuacgaugaaucu

SEQ ID NO: 1968599 - RNA, 19 nt, Artificial Sequence
  Description of Artificial Sequence: Synthetic oligonucleotide
  Antisense strand to SEQ ID NO: 1968598
agauucaucguaaguguau

SEQ ID NO: 1968600 - RNA, 19 nt, Artificial Sequence
  Description of Artificial Sequence: Synthetic oligonucleotide
  Sense strand starting at position 3869 of SEQ ID NO: 1880457
gcagguuucccagaugaug

SEQ ID NO: 1968601 - RNA, 19 nt, Artificial Sequence
  Description of Artificial Sequence: Synthetic oligonucleotide
  Antisense strand to SEQ ID NO: 1968600
caucaucugggaaaccugc

SEQ ID NO: 1968602 - RNA, 19 nt, Artificial Sequence
  Description of Artificial Sequence: Synthetic oligonucleotide
  Sense strand starting at position 3881 of SEQ ID NO: 1880457
gaugauggcauccgagaac

SEQ ID NO: 1968603 - RNA, 19 nt, Artificial Sequence
  Description of Artificial Sequence: Synthetic oligonucleotide
  Antisense strand to SEQ ID NO: 1968602
guucucggaugccaucauc

SEQ ID NO: 1968604 - RNA, 19 nt, Artificial Sequence
  Description of Artificial Sequence: Synthetic oligonucleotide
  Sense strand starting at position 3884 of SEQ ID NO: 1880457
gauggcauccgagaacuua

SEQ ID NO: 1968605 - RNA, 19 nt, Artificial Sequence
  Description of Artificial Sequence: Synthetic oligonucleotide
  Antisense strand to SEQ ID NO: 1968604
uaaguucucggaugccauc

SEQ ID NO: 1968606 - RNA, 19 nt, Artificial Sequence
  Description of Artificial Sequence: Synthetic oligonucleotide
  Sense strand starting at position 123 of SEQ ID NO: 1880458
cauggacugcagcagaaau

SEQ ID NO: 1968607 - RNA, 19 nt, Artificial Sequence
  Description of Artificial Sequence: Synthetic oligonucleotide
  Antisense strand to SEQ ID NO: 1968606
auuucugcugcaguccaug

SEQ ID NO: 1968608 - RNA, 19 nt, Artificial Sequence
  Description of Artificial Sequence: Synthetic oligonucleotide
  Sense strand starting at position 192 of SEQ ID NO: 1880458
ggacuuccauuugggauaa

SEQ ID NO: 1968609 - RNA, 19 nt, Artificial Sequence
  Description of Artificial Sequence: Synthetic oligonucleotide
  Antisense strand to SEQ ID NO: 1968608
uuaucccaaauggaagucc

SEQ ID NO: 1968610 - RNA, 19 nt, Artificial Sequence
  Description of Artificial Sequence: Synthetic oligonucleotide
  Sense strand starting at position 194 of SEQ ID NO: 1880458
acuuccauuugggauaaga

SEQ ID NO: 1968611 - RNA, 19 nt, Artificial Sequence
  Description of Artificial Sequence: Synthetic oligonucleotide
  Antisense strand to SEQ ID NO: 1968610
ucuuaucccaaauggaagu

SEQ ID NO: 1968612 - RNA, 19 nt, Artificial Sequence
  Description of Artificial Sequence: Synthetic oligonucleotide
  Sense strand starting at position 216 of SEQ ID NO: 1880458
ggugucaaucaagaggcaa

SEQ ID NO: 1968613 - RNA, 19 nt, Artificial Sequence
  Description of Artificial Sequence: Synthetic oligonucleotide
  Antisense strand to SEQ ID NO: 1968612
uugccucuugauugacacc

SEQ ID NO: 1968614 - RNA, 19 nt, Artificial Sequence
  Description of Artificial Sequence: Synthetic oligonucleotide
  Sense strand starting at position 327 of SEQ ID NO: 1880458
agucacuuagcuuaugaca

SEQ ID NO: 1968615 - RNA, 19 nt, Artificial Sequence
  Description of Artificial Sequence: Synthetic oligonucleotide
  Antisense strand to SEQ ID NO: 1968614
ugucauaagcuaagugacu

SEQ ID NO: 1968616 - RNA, 19 nt, Artificial Sequence
  Description of Artificial Sequence: Synthetic oligonucleotide
  Sense strand starting at position 593 of SEQ ID NO: 1880458
accauauauuguguaacca

SEQ ID NO: 1968617 - RNA, 19 nt, Artificial Sequence
  Description of Artificial Sequence: Synthetic oligonucleotide
  Antisense strand to SEQ ID NO: 1968616
ugguuacacaauauauggu

SEQ ID NO: 1968618 - RNA, 19 nt, Artificial Sequence
  Description of Artificial Sequence: Synthetic oligonucleotide
  Sense strand starting at position 618 of SEQ ID NO: 1880458
ucaguuacacuuugcguaa

SEQ ID NO: 1968619 - RNA, 19 nt, Artificial Sequence
  Description of Artificial Sequence: Synthetic oligonucleotide
  Antisense strand to SEQ ID NO: 1968618
uuacgcaaaguguaacuga

SEQ ID NO: 1968620 - RNA, 19 nt, Artificial Sequence
  Description of Artificial Sequence: Synthetic oligonucleotide
  Sense strand starting at position 621 of SEQ ID NO: 1880458
guuacacuuugcguaacuu

SEQ ID NO: 1968621 - RNA, 19 nt, Artificial Sequence
  Description of Artificial Sequence: Synthetic oligonucleotide
  Antisense strand to SEQ ID NO: 1968620
aaguuacgcaaaguguaac

SEQ ID NO: 1968622 - RNA, 19 nt, Artificial Sequence
  Description of Artificial Sequence: Synthetic oligonucleotide
  Sense strand starting at position 681 of SEQ ID NO: 1880458
gcaauaaacuuucugagaa

SEQ ID NO: 1968623 - RNA, 19 nt, Artificial Sequence
  Description of Artificial Sequence: Synthetic oligonucleotide
  Antisense strand to SEQ ID NO: 1968622
uucucagaaaguuuauugc

SEQ ID NO: 1968624 - RNA, 19 nt, Artificial Sequence
  Description of Artificial Sequence: Synthetic oligonucleotide
  Sense strand starting at position 720 of SEQ ID NO: 1880458
augaauaccuacuggagaa

SEQ ID NO: 1968625 - RNA, 19 nt, Artificial Sequence
  Description of Artificial Sequence: Synthetic oligonucleotide
  Antisense strand to SEQ ID NO: 1968624
uucuccaguagguauucau

SEQ ID NO: 1968626 - RNA, 19 nt, Artificial Sequence
  Description of Artificial Sequence: Synthetic oligonucleotide
  Sense strand starting at position 800 of SEQ ID NO: 1880458
aauauuagguagcagaauu

SEQ ID NO: 1968627 - RNA, 19 nt, Artificial Sequence
  Description of Artificial Sequence: Synthetic oligonucleotide
  Antisense strand to SEQ ID NO: 1968626
aauucugcuaccuaauauu

SEQ ID NO: 1968628 - RNA, 19 nt, Artificial Sequence
  Description of Artificial Sequence: Synthetic oligonucleotide
  Sense strand starting at position 862 of SEQ ID NO: 1880458
uccagucauuaguaauaaa

SEQ ID NO: 1968629 - RNA, 19 nt, Artificial Sequence
  Description of Artificial Sequence: Synthetic oligonucleotide
  Antisense strand to SEQ ID NO: 1968628
uuuauuacuaaugacugga

SEQ ID NO: 1968630 - RNA, 19 nt, Artificial Sequence
  Description of Artificial Sequence: Synthetic oligonucleotide
  Sense strand starting at position 901 of SEQ ID NO: 1880458
guauuuaauugcuugaucu

SEQ ID NO: 1968631 - RNA, 19 nt, Artificial Sequence
  Description of Artificial Sequence: Synthetic oligonucleotide
  Antisense strand to SEQ ID NO: 1968630
agaucaagcaauuaaauac

SEQ ID NO: 1968632 - RNA, 19 nt, Artificial Sequence
  Description of Artificial Sequence: Synthetic oligonucleotide
  Sense strand starting at position 905 of SEQ ID NO: 1880458
uuaauugcuugaucugauu

SEQ ID NO: 1968633 - RNA, 19 nt, Artificial Sequence
  Description of Artificial Sequence: Synthetic oligonucleotide
  Antisense strand to SEQ ID NO: 1968632
aaucagaucaagcaauuaa

SEQ ID NO: 1968634 - RNA, 19 nt, Artificial Sequence
  Description of Artificial Sequence: Synthetic oligonucleotide
  Sense strand starting at position 911 of SEQ ID NO: 1880458
gcuugaucugauuggugcu

SEQ ID NO: 1968635 - RNA, 19 nt, Artificial Sequence
  Description of Artificial Sequence: Synthetic oligonucleotide
  Antisense strand to SEQ ID NO: 1968634
agcaccaaucagaucaagc

SEQ ID NO: 1968636 - RNA, 19 nt, Artificial Sequence
  Description of Artificial Sequence: Synthetic oligonucleotide
  Sense strand starting at position 1035 of SEQ ID NO: 1880458
uuguuauauuugcagacau

SEQ ID NO: 1968637 - RNA, 19 nt, Artificial Sequence
  Description of Artificial Sequence: Synthetic oligonucleotide
  Antisense strand to SEQ ID NO: 1968636
augucugcaaauauaacaa

SEQ ID NO: 1968638 - RNA, 19 nt, Artificial Sequence
  Description of Artificial Sequence: Synthetic oligonucleotide
  Sense strand starting at position 1050 of SEQ ID NO: 1880458
acaugugucucacacauuu

SEQ ID NO: 1968639 - RNA, 19 nt, Artificial Sequence
  Description of Artificial Sequence: Synthetic oligonucleotide
  Antisense strand to SEQ ID NO: 1968638
aaaugugugagacacaugu

SEQ ID NO: 1968640 - RNA, 19 nt, Artificial Sequence
  Description of Artificial Sequence: Synthetic oligonucleotide
  Sense strand starting at position 1104 of SEQ ID NO: 1880458
auuacagaucugggcuuua

SEQ ID NO: 1968641 - RNA, 19 nt, Artificial Sequence
  Description of Artificial Sequence: Synthetic oligonucleotide
  Antisense strand to SEQ ID NO: 1968640
uaaagcccagaucuguaau

SEQ ID NO: 1968642 - RNA, 19 nt, Artificial Sequence
  Description of Artificial Sequence: Synthetic oligonucleotide
  Sense strand starting at position 1175 of SEQ ID NO: 1880458
gugauauagaauugagguc

SEQ ID NO: 1968643 - RNA, 19 nt, Artificial Sequence
  Description of Artificial Sequence: Synthetic oligonucleotide
  Antisense strand to SEQ ID NO: 1968642
gaccucaauucuauaucac

SEQ ID NO: 1968644 - RNA, 19 nt, Artificial Sequence
  Description of Artificial Sequence: Synthetic oligonucleotide
  Sense strand starting at position 1284 of SEQ ID NO: 1880458
uccaguaucugggcaaguu

SEQ ID NO: 1968645 - RNA, 19 nt, Artificial Sequence
  Description of Artificial Sequence: Synthetic oligonucleotide
  Antisense strand to SEQ ID NO: 1968644
aacuugcccagauacugga

SEQ ID NO: 1968646 - RNA, 19 nt, Artificial Sequence
  Description of Artificial Sequence: Synthetic oligonucleotide
  Sense strand starting at position 1304 of SEQ ID NO: 1880458
acuuuauuccuucgcagga

SEQ ID NO: 1968647 - RNA, 19 nt, Artificial Sequence
  Description of Artificial Sequence: Synthetic oligonucleotide
  Antisense strand to SEQ ID NO: 1968646
uccugcgaaggaauaaagu

SEQ ID NO: 1968648 - RNA, 19 nt, Artificial Sequence
  Description of Artificial Sequence: Synthetic oligonucleotide
  Sense strand starting at position 1305 of SEQ ID NO: 1880458
cuuuauuccuucgcaggaa

SEQ ID NO: 1968649 - RNA, 19 nt, Artificial Sequence
  Description of Artificial Sequence: Synthetic oligonucleotide
  Antisense strand to SEQ ID NO: 1968648
uuccugcgaaggaauaaag

SEQ ID NO: 1968650 - RNA, 19 nt, Artificial Sequence
  Description of Artificial Sequence: Synthetic oligonucleotide
  Sense strand starting at position 1496 of SEQ ID NO: 1880458
cucuuccuugcucgggaaa

SEQ ID NO: 1968651 - RNA, 19 nt, Artificial Sequence
  Description of Artificial Sequence: Synthetic oligonucleotide
  Antisense strand to SEQ ID NO: 1968650
uuucccgagcaaggaagag

SEQ ID NO: 1968652 - RNA, 19 nt, Artificial Sequence
  Description of Artificial Sequence: Synthetic oligonucleotide
  Sense strand starting at position 1499 of SEQ ID NO: 1880458
uuccuugcucgggaaacuu

SEQ ID NO: 1968653 - RNA, 19 nt, Artificial Sequence
  Description of Artificial Sequence: Synthetic oligonucleotide
  Antisense strand to SEQ ID NO: 1968652
aaguuucccgagcaaggaa

SEQ ID NO: 1968654 - RNA, 19 nt, Artificial Sequence
  Description of Artificial Sequence: Synthetic oligonucleotide
  Sense strand starting at position 1691 of SEQ ID NO: 1880458
gccucuucgggacaacauu

SEQ ID NO: 1968655 - RNA, 19 nt, Artificial Sequence
  Description of Artificial Sequence: Synthetic oligonucleotide
  Antisense strand to SEQ ID NO: 1968654
aauguugucccgaagaggc

SEQ ID NO: 1968656 - RNA, 19 nt, Artificial Sequence
  Description of Artificial Sequence: Synthetic oligonucleotide
  Sense strand starting at position 2064 of SEQ ID NO: 1880458
ccgcgugcagcauuaaaua

SEQ ID NO: 1968657 - RNA, 19 nt, Artificial Sequence
  Description of Artificial Sequence: Synthetic oligonucleotide
  Antisense strand to SEQ ID NO: 1968656
uauuuaaugcugcacgcgg

SEQ ID NO: 1968658 - RNA, 19 nt, Artificial Sequence
  Description of Artificial Sequence: Synthetic oligonucleotide
  Sense strand starting at position 2087 of SEQ ID NO: 1880458
uagggaugcuacuuucuua

SEQ ID NO: 1968659 - RNA, 19 nt, Artificial Sequence
  Description of Artificial Sequence: Synthetic oligonucleotide
  Antisense strand to SEQ ID NO: 1968658
uaagaaaguagcaucccua

SEQ ID NO: 1968660 - RNA, 19 nt, Artificial Sequence
  Description of Artificial Sequence: Synthetic oligonucleotide
  Sense strand starting at position 2258 of SEQ ID NO: 1880458
aucgucaagucacuuauuu

SEQ ID NO: 1968661 - RNA, 19 nt, Artificial Sequence
  Description of Artificial Sequence: Synthetic oligonucleotide
  Antisense strand to SEQ ID NO: 1968660
aaauaagugacuugacgau

SEQ ID NO: 1968662 - RNA, 19 nt, Artificial Sequence
  Description of Artificial Sequence: Synthetic oligonucleotide
  Sense strand starting at position 2405 of SEQ ID NO: 1880458
aagggagucuguuuaacuu

SEQ ID NO: 1968663 - RNA, 19 nt, Artificial Sequence
  Description of Artificial Sequence: Synthetic oligonucleotide
  Antisense strand to SEQ ID NO: 1968662
aaguuaaacagacucccuu

SEQ ID NO: 1968664 - RNA, 19 nt, Artificial Sequence
  Description of Artificial Sequence: Synthetic oligonucleotide
  Sense strand starting at position 2427 of SEQ ID NO: 1880458
uggcuuugggagcgagaaa

SEQ ID NO: 1968665 - RNA, 19 nt, Artificial Sequence
  Description of Artificial Sequence: Synthetic oligonucleotide
  Antisense strand to SEQ ID NO: 1968664
uuucucgcucccaaagcca

SEQ ID NO: 1968666 - RNA, 19 nt, Artificial Sequence
  Description of Artificial Sequence: Synthetic oligonucleotide
  Sense strand starting at position 2438 of SEQ ID NO: 1880458
gcgagaaaguuugcccuuu

SEQ ID NO: 1968667 - RNA, 19 nt, Artificial Sequence
  Description of Artificial Sequence: Synthetic oligonucleotide
  Antisense strand to SEQ ID NO: 1968666
aaagggcaaacuuucucgc

SEQ ID NO: 1968668 - RNA, 19 nt, Artificial Sequence
  Description of Artificial Sequence: Synthetic oligonucleotide
  Sense strand starting at position 2440 of SEQ ID NO: 1880458
gagaaaguuugcccuuugu

SEQ ID NO: 1968669 - RNA, 19 nt, Artificial Sequence
  Description of Artificial Sequence: Synthetic oligonucleotide
  Antisense strand to SEQ ID NO: 1968668
acaaagggcaaacuuucuc

SEQ ID NO: 1968670 - RNA, 19 nt, Artificial Sequence
  Description of Artificial Sequence: Synthetic oligonucleotide
  Sense strand starting at position 2449 of SEQ ID NO: 1880458
ugcccuuuguuucuggaaa

SEQ ID NO: 1968671 - RNA, 19 nt, Artificial Sequence
  Description of Artificial Sequence: Synthetic oligonucleotide
  Antisense strand to SEQ ID NO: 1968670
uuuccagaaacaaagggca

SEQ ID NO: 1968672 - RNA, 19 nt, Artificial Sequence
  Description of Artificial Sequence: Synthetic oligonucleotide
  Sense strand starting at position 2731 of SEQ ID NO: 1880458
ccggcuucucuccgggaga

SEQ ID NO: 1968673 - RNA, 19 nt, Artificial Sequence
  Description of Artificial Sequence: Synthetic oligonucleotide
  Antisense strand to SEQ ID NO: 1968672
ucucccggagagaagccgg

SEQ ID NO: 1968674 - RNA, 19 nt, Artificial Sequence
  Description of Artificial Sequence: Synthetic oligonucleotide
  Sense strand starting at position 2733 of SEQ ID NO: 1880458
ggcuucucuccgggagagu

SEQ ID NO: 1968675 - RNA, 19 nt, Artificial Sequence
  Description of Artificial Sequence: Synthetic oligonucleotide
  Antisense strand to SEQ ID NO: 1968674
acucucccggagagaagcc

SEQ ID NO: 1968676 - RNA, 19 nt, Artificial Sequence
  Description of Artificial Sequence: Synthetic oligonucleotide
  Sense strand starting at position 3015 of SEQ ID NO: 1880458
agucuugggcgccaucuaa

SEQ ID NO: 1968677 - RNA, 19 nt, Artificial Sequence
  Description of Artificial Sequence: Synthetic oligonucleotide
  Antisense strand to SEQ ID NO: 1968676
uuagauggcgcccaagacu

SEQ ID NO: 1968678 - RNA, 19 nt, Artificial Sequence
  Description of Artificial Sequence: Synthetic oligonucleotide
  Sense strand starting at position 3372 of SEQ ID NO: 1880458
uuuccuuuggccugugaug

SEQ ID NO: 1968679 - RNA, 19 nt, Artificial Sequence
  Description of Artificial Sequence: Synthetic oligonucleotide
  Antisense strand to SEQ ID NO: 1968678
caucacaggccaaaggaaa

SEQ ID NO: 1968680 - RNA, 19 nt, Artificial Sequence
  Description of Artificial Sequence: Synthetic oligonucleotide
  Sense strand starting at position 3374 of SEQ ID NO: 1880458
uccuuuggccugugaugga

SEQ ID NO: 1968681 - RNA, 19 nt, Artificial Sequence
  Description of Artificial Sequence: Synthetic oligonucleotide
  Antisense strand to SEQ ID NO: 1968680
uccaucacaggccaaagga

SEQ ID NO: 1968682 - RNA, 19 nt, Artificial Sequence
  Description of Artificial Sequence: Synthetic oligonucleotide
  Sense strand starting at position 3567 of SEQ ID NO: 1880458
gcgggucuccugggaggaa

SEQ ID NO: 1968683 - RNA, 19 nt, Artificial Sequence
  Description of Artificial Sequence: Synthetic oligonucleotide
  Antisense strand to SEQ ID NO: 1968682
uuccucccaggagacccgc

SEQ ID NO: 1968684 - RNA, 19 nt, Artificial Sequence
  Description of Artificial Sequence: Synthetic oligonucleotide
  Sense strand starting at position 3637 of SEQ ID NO: 1880458
gaccaugaccaguggugaa

SEQ ID NO: 1968685 - RNA, 19 nt, Artificial Sequence
  Description of Artificial Sequence: Synthetic oligonucleotide
  Antisense strand to SEQ ID NO: 1968684
uucaccacuggucaugguc

SEQ ID NO: 1968686 - RNA, 19 nt, Artificial Sequence
  Description of Artificial Sequence: Synthetic oligonucleotide
  Sense strand starting at position 2 of SEQ ID NO: 1880459
uuugcauuccugggaaauu

SEQ ID NO: 1968687 - RNA, 19 nt, Artificial Sequence
  Description of Artificial Sequence: Synthetic oligonucleotide
  Antisense strand to SEQ ID NO: 1968686
aauuucccaggaaugcaaa

SEQ ID NO: 1968688 - RNA, 19 nt, Artificial Sequence
  Description of Artificial Sequence: Synthetic oligonucleotide
  Sense strand starting at position 77 of SEQ ID NO: 1880459
guguucuaaccauauauua

SEQ ID NO: 1968689 - RNA, 19 nt, Artificial Sequence
  Description of Artificial Sequence: Synthetic oligonucleotide
  Antisense strand to SEQ ID NO: 1968688
uaauauaugguuagaacac

SEQ ID NO: 1968690 - RNA, 19 nt, Artificial Sequence
  Description of Artificial Sequence: Synthetic oligonucleotide
  Sense strand starting at position 117 of SEQ ID NO: 1880459
caugaaagugaauguuuga

SEQ ID NO: 1968691 - RNA, 19 nt, Artificial Sequence
  Description of Artificial Sequence: Synthetic oligonucleotide
  Antisense strand to SEQ ID NO: 1968690
ucaaacauucacuuucaug

SEQ ID NO: 1968692 - RNA, 19 nt, Artificial Sequence
  Description of Artificial Sequence: Synthetic oligonucleotide
  Sense strand starting at position 120 of SEQ ID NO: 1880459
gaaagugaauguuugauga

SEQ ID NO: 1968693 - RNA, 19 nt, Artificial Sequence
  Description of Artificial Sequence: Synthetic oligonucleotide
  Antisense strand to SEQ ID NO: 1968692
ucaucaaacauucacuuuc

SEQ ID NO: 1968694 - RNA, 19 nt, Artificial Sequence
  Description of Artificial Sequence: Synthetic oligonucleotide
  Sense strand starting at position 133 of SEQ ID NO: 1880459
ugaugagacguuugaaggu

SEQ ID NO: 1968695 - RNA, 19 nt, Artificial Sequence
  Description of Artificial Sequence: Synthetic oligonucleotide
  Antisense strand to SEQ ID NO: 1968694
accuucaaacgucucauca

SEQ ID NO: 1968696 - RNA, 19 nt, Artificial Sequence
  Description of Artificial Sequence: Synthetic oligonucleotide
  Sense strand starting at position 238 of SEQ ID NO: 1880459
cccugaaucucccugugaa

SEQ ID NO: 1968697 - RNA, 19 nt, Artificial Sequence
  Description of Artificial Sequence: Synthetic oligonucleotide
  Antisense strand to SEQ ID NO: 1968696
uucacagggagauucaggg

SEQ ID NO: 1968698 - RNA, 19 nt, Artificial Sequence
  Description of Artificial Sequence: Synthetic oligonucleotide
  Sense strand starting at position 239 of SEQ ID NO: 1880459
ccugaaucucccugugaau

SEQ ID NO: 1968699 - RNA, 19 nt, Artificial Sequence
  Description of Artificial Sequence: Synthetic oligonucleotide
  Antisense strand to SEQ ID NO: 1968698
auucacagggagauucagg

SEQ ID NO: 1968700 - RNA, 19 nt, Artificial Sequence
  Description of Artificial Sequence: Synthetic oligonucleotide
  Sense strand starting at position 681 of SEQ ID NO: 1880459
cuuugaaauguauguacau

SEQ ID NO: 1968701 - RNA, 19 nt, Artificial Sequence
  Description of Artificial Sequence: Synthetic oligonucleotide
  Antisense strand to SEQ ID NO: 1968700
auguacauacauuucaaag

SEQ ID NO: 1968702 - RNA, 19 nt, Artificial Sequence
  Description of Artificial Sequence: Synthetic oligonucleotide
  Sense strand starting at position 767 of SEQ ID NO: 1880459
gagccaucucuuggaaaug

SEQ ID NO: 1968703 - RNA, 19 nt, Artificial Sequence
  Description of Artificial Sequence: Synthetic oligonucleotide
  Antisense strand to SEQ ID NO: 1968702
cauuuccaagagauggcuc

SEQ ID NO: 1968704 - RNA, 19 nt, Artificial Sequence
  Description of Artificial Sequence: Synthetic oligonucleotide
  Sense strand starting at position 815 of SEQ ID NO: 1880459
ugucucuaggaggguuuaa

SEQ ID NO: 1968705 - RNA, 19 nt, Artificial Sequence
  Description of Artificial Sequence: Synthetic oligonucleotide
  Antisense strand to SEQ ID NO: 1968704
uuaaacccuccuagagaca

SEQ ID NO: 1968706 - RNA, 19 nt, Artificial Sequence
  Description of Artificial Sequence: Synthetic oligonucleotide
  Sense strand starting at position 885 of SEQ ID NO: 1880459
gacaauuaauagguaugua

SEQ ID NO: 1968707 - RNA, 19 nt, Artificial Sequence
  Description of Artificial Sequence: Synthetic oligonucleotide
  Antisense strand to SEQ ID NO: 1968706
uacauaccuauuaauuguc

SEQ ID NO: 1968708 - RNA, 19 nt, Artificial Sequence
  Description of Artificial Sequence: Synthetic oligonucleotide
  Sense strand starting at position 895 of SEQ ID NO: 1880459
agguauguaauggauugua

SEQ ID NO: 1968709 - RNA, 19 nt, Artificial Sequence
  Description of Artificial Sequence: Synthetic oligonucleotide
  Antisense strand to SEQ ID NO: 1968708
uacaauccauuacauaccu

SEQ ID NO: 1968710 - RNA, 19 nt, Artificial Sequence
  Description of Artificial Sequence: Synthetic oligonucleotide
  Sense strand starting at position 914 of SEQ ID NO: 1880459
cgugccugaccauaugaaa

SEQ ID NO: 1968711 - RNA, 19 nt, Artificial Sequence
  Description of Artificial Sequence: Synthetic oligonucleotide
  Antisense strand to SEQ ID NO: 1968710
uuucauauggucaggcacg

SEQ ID NO: 1968712 - RNA, 19 nt, Artificial Sequence
  Description of Artificial Sequence: Synthetic oligonucleotide
  Sense strand starting at position 1053 of SEQ ID NO: 1880459
ugcgcauuucguggaaaga

SEQ ID NO: 1968713 - RNA, 19 nt, Artificial Sequence
  Description of Artificial Sequence: Synthetic oligonucleotide
  Antisense strand to SEQ ID NO: 1968712
ucuuuccacgaaaugcgca

SEQ ID NO: 1968714 - RNA, 19 nt, Artificial Sequence
  Description of Artificial Sequence: Synthetic oligonucleotide
  Sense strand starting at position 1054 of SEQ ID NO: 1880459
gcgcauuucguggaaagaa

SEQ ID NO: 1968715 - RNA, 19 nt, Artificial Sequence
  Description of Artificial Sequence: Synthetic oligonucleotide
  Antisense strand to SEQ ID NO: 1968714
uucuuuccacgaaaugcgc

SEQ ID NO: 1968716 - RNA, 19 nt, Artificial Sequence
  Description of Artificial Sequence: Synthetic oligonucleotide
  Sense strand starting at position 1224 of SEQ ID NO: 1880459
agacaacccuggcuuuaaa

SEQ ID NO: 1968717 - RNA, 19 nt, Artificial Sequence
  Description of Artificial Sequence: Synthetic oligonucleotide
  Antisense strand to SEQ ID NO: 1968716
uuuaaagccaggguugucu

SEQ ID NO: 1968718 - RNA, 19 nt, Artificial Sequence
  Description of Artificial Sequence: Synthetic oligonucleotide
  Sense strand starting at position 1265 of SEQ ID NO: 1880459
gaaguacuguauguugaag

SEQ ID NO: 1968719 - RNA, 19 nt, Artificial Sequence
  Description of Artificial Sequence: Synthetic oligonucleotide
  Antisense strand to SEQ ID NO: 1968718
cuucaacauacaguacuuc

SEQ ID NO: 1968720 - RNA, 19 nt, Artificial Sequence
  Description of Artificial Sequence: Synthetic oligonucleotide
  Sense strand starting at position 1279 of SEQ ID NO: 1880459
ugaaguaacuucucugaac

SEQ ID NO: 1968721 - RNA, 19 nt, Artificial Sequence
  Description of Artificial Sequence: Synthetic oligonucleotide
  Antisense strand to SEQ ID NO: 1968720
guucagagaaguuacuuca

SEQ ID NO: 1968722 - RNA, 19 nt, Artificial Sequence
  Description of Artificial Sequence: Synthetic oligonucleotide
  Sense strand starting at position 1334 of SEQ ID NO: 1880459
uacgucauagauuaaguau

SEQ ID NO: 1968723 - RNA, 19 nt, Artificial Sequence
  Description of Artificial Sequence: Synthetic oligonucleotide
  Antisense strand to SEQ ID NO: 1968722
auacuuaaucuaugacgua

SEQ ID NO: 1968724 - RNA, 19 nt, Artificial Sequence
  Description of Artificial Sequence: Synthetic oligonucleotide
  Sense strand starting at position 1337 of SEQ ID NO: 1880459
gucauagauuaaguaugga

SEQ ID NO: 1968725 - RNA, 19 nt, Artificial Sequence
  Description of Artificial Sequence: Synthetic oligonucleotide
  Antisense strand to SEQ ID NO: 1968724
uccauacuuaaucuaugac

SEQ ID NO: 1968726 - RNA, 19 nt, Artificial Sequence
  Description of Artificial Sequence: Synthetic oligonucleotide
  Sense strand starting at position 1394 of SEQ ID NO: 1880459
aaacgaaguuauccuaggu

SEQ ID NO: 1968727 - RNA, 19 nt, Artificial Sequence
  Description of Artificial Sequence: Synthetic oligonucleotide
  Antisense strand to SEQ ID NO: 1968726
accuaggauaacuucguuu

SEQ ID NO: 1968728 - RNA, 19 nt, Artificial Sequence
  Description of Artificial Sequence: Synthetic oligonucleotide
  Sense strand starting at position 1424 of SEQ ID NO: 1880459
cuaaaugugugcuccauuu

SEQ ID NO: 1968729 - RNA, 19 nt, Artificial Sequence
  Description of Artificial Sequence: Synthetic oligonucleotide
  Antisense strand to SEQ ID NO: 1968728
aaauggagcacacauuuag

SEQ ID NO: 1968730 - RNA, 19 nt, Artificial Sequence
  Description of Artificial Sequence: Synthetic oligonucleotide
  Sense strand starting at position 1473 of SEQ ID NO: 1880459
aggauauaguguccacuaa

SEQ ID NO: 1968731 - RNA, 19 nt, Artificial Sequence
  Description of Artificial Sequence: Synthetic oligonucleotide
  Antisense strand to SEQ ID NO: 1968730
uuaguggacacuauauccu

SEQ ID NO: 1968732 - RNA, 19 nt, Artificial Sequence
  Description of Artificial Sequence: Synthetic oligonucleotide
  Sense strand starting at position 1732 of SEQ ID NO: 1880459
uggagauuugcaugugcga

SEQ ID NO: 1968733 - RNA, 19 nt, Artificial Sequence
  Description of Artificial Sequence: Synthetic oligonucleotide
  Antisense strand to SEQ ID NO: 1968732
ucgcacaugcaaaucucca

SEQ ID NO: 1968734 - RNA, 19 nt, Artificial Sequence
  Description of Artificial Sequence: Synthetic oligonucleotide
  Sense strand starting at position 1734 of SEQ ID NO: 1880459
gagauuugcaugugcgaag

SEQ ID NO: 1968735 - RNA, 19 nt, Artificial Sequence
  Description of Artificial Sequence: Synthetic oligonucleotide
  Antisense strand to SEQ ID NO: 1968734
cuucgcacaugcaaaucuc

SEQ ID NO: 1968736 - RNA, 19 nt, Artificial Sequence
  Description of Artificial Sequence: Synthetic oligonucleotide
  Sense strand starting at position 1735 of SEQ ID NO: 1880459
agauuugcaugugcgaagu

SEQ ID NO: 1968737 - RNA, 19 nt, Artificial Sequence
  Description of Artificial Sequence: Synthetic oligonucleotide
  Antisense strand to SEQ ID NO: 1968736
acuucgcacaugcaaaucu

SEQ ID NO: 1968738 - RNA, 19 nt, Artificial Sequence
  Description of Artificial Sequence: Synthetic oligonucleotide
  Sense strand starting at position 2632 of SEQ ID NO: 1880459
gggcgcguucugucuuuaa

SEQ ID NO: 1968739 - RNA, 19 nt, Artificial Sequence
  Description of Artificial Sequence: Synthetic oligonucleotide
  Antisense strand to SEQ ID NO: 1968738
uuaaagacagaacgcgccc

SEQ ID NO: 1968740 - RNA, 19 nt, Artificial Sequence
  Description of Artificial Sequence: Synthetic oligonucleotide
  Sense strand starting at position 2795 of SEQ ID NO: 1880459
ggaagucauaagcgaacca

SEQ ID NO: 1968741 - RNA, 19 nt, Artificial Sequence
  Description of Artificial Sequence: Synthetic oligonucleotide
  Antisense strand to SEQ ID NO: 1968740
ugguucgcuuaugacuucc

SEQ ID NO: 1968742 - RNA, 19 nt, Artificial Sequence
  Description of Artificial Sequence: Synthetic oligonucleotide
  Sense strand starting at position 2820 of SEQ ID NO: 1880459
gacgaagaguucucauuaa

SEQ ID NO: 1968743 - RNA, 19 nt, Artificial Sequence
  Description of Artificial Sequence: Synthetic oligonucleotide
  Antisense strand to SEQ ID NO: 1968742
uuaaugagaacucuucguc

SEQ ID NO: 1968744 - RNA, 19 nt, Artificial Sequence
  Description of Artificial Sequence: Synthetic oligonucleotide
  Sense strand starting at position 3408 of SEQ ID NO: 1880459
agguuccuaaucugacgaa

SEQ ID NO: 1968745 - RNA, 19 nt, Artificial Sequence
  Description of Artificial Sequence: Synthetic oligonucleotide
  Antisense strand to SEQ ID NO: 1968744
uucgucagauuaggaaccu

SEQ ID NO: 1968746 - RNA, 19 nt, Artificial Sequence
  Description of Artificial Sequence: Synthetic oligonucleotide
  Sense strand starting at position 3421 of SEQ ID NO: 1880459
gacgaauagagacguugaa

SEQ ID NO: 1968747 - RNA, 19 nt, Artificial Sequence
  Description of Artificial Sequence: Synthetic oligonucleotide
  Antisense strand to SEQ ID NO: 1968746
uucaacgucucuauucguc

SEQ ID NO: 1968748 - RNA, 19 nt, Artificial Sequence
  Description of Artificial Sequence: Synthetic oligonucleotide
  Sense strand starting at position 3447 of SEQ ID NO: 1880459
uccuccucgcuggaaauaa

SEQ ID NO: 1968749 - RNA, 19 nt, Artificial Sequence
  Description of Artificial Sequence: Synthetic oligonucleotide
  Antisense strand to SEQ ID NO: 1968748
uuauuuccagcgaggagga

SEQ ID NO: 1968750 - RNA, 19 nt, Artificial Sequence
  Description of Artificial Sequence: Synthetic oligonucleotide
  Sense strand starting at position 3526 of SEQ ID NO: 1880459
uuuaucacuuaugugacua

SEQ ID NO: 1968751 - RNA, 19 nt, Artificial Sequence
  Description of Artificial Sequence: Synthetic oligonucleotide
  Antisense strand to SEQ ID NO: 1968750
uagucacauaagugauaaa

SEQ ID NO: 1968752 - RNA, 19 nt, Artificial Sequence
  Description of Artificial Sequence: Synthetic oligonucleotide
  Sense strand starting at position 3530 of SEQ ID NO: 1880459
ucacuuaugugacuauaua

SEQ ID NO: 1968753 - RNA, 19 nt, Artificial Sequence
  Description of Artificial Sequence: Synthetic oligonucleotide
  Antisense strand to SEQ ID NO: 1968752
uauauagucacauaaguga

SEQ ID NO: 1968754 - RNA, 19 nt, Artificial Sequence
  Description of Artificial Sequence: Synthetic oligonucleotide
  Sense strand starting at position 3615 of SEQ ID NO: 1880459
gcaagaaagucuccuauau

SEQ ID NO: 1968755 - RNA, 19 nt, Artificial Sequence
  Description of Artificial Sequence: Synthetic oligonucleotide
  Antisense strand to SEQ ID NO: 1968754
auauaggagacuuucuugc

SEQ ID NO: 1968756 - RNA, 19 nt, Artificial Sequence
  Description of Artificial Sequence: Synthetic oligonucleotide
  Sense strand starting at position 3817 of SEQ ID NO: 1880459
uguuaaaugcuguacuaag

SEQ ID NO: 1968757 - RNA, 19 nt, Artificial Sequence
  Description of Artificial Sequence: Synthetic oligonucleotide
  Antisense strand to SEQ ID NO: 1968756
cuuaguacagcauuuaaca

SEQ ID NO: 1968758 - RNA, 19 nt, Artificial Sequence
  Description of Artificial Sequence: Synthetic oligonucleotide
  Sense strand starting at position 3855 of SEQ ID NO: 1880459
guuuaugaacuugacucuu

SEQ ID NO: 1968759 - RNA, 19 nt, Artificial Sequence
  Description of Artificial Sequence: Synthetic oligonucleotide
  Antisense strand to SEQ ID NO: 1968758
aagagucaaguucauaaac

SEQ ID NO: 1968760 - RNA, 19 nt, Artificial Sequence
  Description of Artificial Sequence: Synthetic oligonucleotide
  Sense strand starting at position 3891 of SEQ ID NO: 1880459
uccagugacccucagaagu

SEQ ID NO: 1968761 - RNA, 19 nt, Artificial Sequence
  Description of Artificial Sequence: Synthetic oligonucleotide
  Antisense strand to SEQ ID NO: 1968760
acuucugagggucacugga

SEQ ID NO: 1968762 - RNA, 19 nt, Artificial Sequence
  Description of Artificial Sequence: Synthetic oligonucleotide
  Sense strand starting at position 3909 of SEQ ID NO: 1880459
uaggcugaugucuaguaga

SEQ ID NO: 1968763 - RNA, 19 nt, Artificial Sequence
  Description of Artificial Sequence: Synthetic oligonucleotide
  Antisense strand to SEQ ID NO: 1968762
ucuacuagacaucagccua

SEQ ID NO: 1968764 - RNA, 19 nt, Artificial Sequence
  Description of Artificial Sequence: Synthetic oligonucleotide
  Sense strand starting at position 3973 of SEQ ID NO: 1880459
agaacaaugccauagcuau

SEQ ID NO: 1968765 - RNA, 19 nt, Artificial Sequence
  Description of Artificial Sequence: Synthetic oligonucleotide
  Antisense strand to SEQ ID NO: 1968764
auagcuauggcauuguucu

SEQ ID NO: 1968766 - RNA, 19 nt, Artificial Sequence
  Description of Artificial Sequence: Synthetic oligonucleotide
  Sense strand starting at position 30 of SEQ ID NO: 1880460
aucucuggugagggaauau

SEQ ID NO: 1968767 - RNA, 19 nt, Artificial Sequence
  Description of Artificial Sequence: Synthetic oligonucleotide
  Antisense strand to SEQ ID NO: 1968766
auauucccucaccagagau

SEQ ID NO: 1968768 - RNA, 19 nt, Artificial Sequence
  Description of Artificial Sequence: Synthetic oligonucleotide
  Sense strand starting at position 49 of SEQ ID NO: 1880460
guugaugaggccuaagugu

SEQ ID NO: 1968769 - RNA, 19 nt, Artificial Sequence
  Description of Artificial Sequence: Synthetic oligonucleotide
  Antisense strand to SEQ ID NO: 1968768
acacuuaggccucaucaac

SEQ ID NO: 1968770 - RNA, 19 nt, Artificial Sequence
  Description of Artificial Sequence: Synthetic oligonucleotide
  Sense strand starting at position 90 of SEQ ID NO: 1880460
aaggcaguuucuguacaua

SEQ ID NO: 1968771 - RNA, 19 nt, Artificial Sequence
  Description of Artificial Sequence: Synthetic oligonucleotide
  Antisense strand to SEQ ID NO: 1968770
uauguacagaaacugccuu

SEQ ID NO: 1968772 - RNA, 19 nt, Artificial Sequence
  Description of Artificial Sequence: Synthetic oligonucleotide
  Sense strand starting at position 93 of SEQ ID NO: 1880460
gcaguuucuguacauaaua

SEQ ID NO: 1968773 - RNA, 19 nt, Artificial Sequence
  Description of Artificial Sequence: Synthetic oligonucleotide
  Antisense strand to SEQ ID NO: 1968772
uauuauguacagaaacugc

SEQ ID NO: 1968774 - RNA, 19 nt, Artificial Sequence
  Description of Artificial Sequence: Synthetic oligonucleotide
  Sense strand starting at position 122 of SEQ ID NO: 1880460
uugggagcucugggacaua

SEQ ID NO: 1968775 - RNA, 19 nt, Artificial Sequence
  Description of Artificial Sequence: Synthetic oligonucleotide
  Antisense strand to SEQ ID NO: 1968774
uaugucccagagcucccaa

SEQ ID NO: 1968776 - RNA, 19 nt, Artificial Sequence
  Description of Artificial Sequence: Synthetic oligonucleotide
  Sense strand starting at position 416 of SEQ ID NO: 1880460
ggaaaugaguaaucauggu

SEQ ID NO: 1968777 - RNA, 19 nt, Artificial Sequence
  Description of Artificial Sequence: Synthetic oligonucleotide
  Antisense strand to SEQ ID NO: 1968776
accaugauuacucauuucc

SEQ ID NO: 1968778 - RNA, 19 nt, Artificial Sequence
  Description of Artificial Sequence: Synthetic oligonucleotide
  Sense strand starting at position 420 of SEQ ID NO: 1880460
augaguaaucaugguuugu

SEQ ID NO: 1968779 - RNA, 19 nt, Artificial Sequence
  Description of Artificial Sequence: Synthetic oligonucleotide
  Antisense strand to SEQ ID NO: 1968778
acaaaccaugauuacucau

SEQ ID NO: 1968780 - RNA, 19 nt, Artificial Sequence
  Description of Artificial Sequence: Synthetic oligonucleotide
  Sense strand starting at position 442 of SEQ ID NO: 1880460
ugagguuauugucuagaau

SEQ ID NO: 1968781 - RNA, 19 nt, Artificial Sequence
  Description of Artificial Sequence: Synthetic oligonucleotide
  Antisense strand to SEQ ID NO: 1968780
auucuagacaauaaccuca

SEQ ID NO: 1968782 - RNA, 19 nt, Artificial Sequence
  Description of Artificial Sequence: Synthetic oligonucleotide
  Sense strand starting at position 443 of SEQ ID NO: 1880460
gagguuauugucuagaauu

SEQ ID NO: 1968783 - RNA, 19 nt, Artificial Sequence
  Description of Artificial Sequence: Synthetic oligonucleotide
  Antisense strand to SEQ ID NO: 1968782
aauucuagacaauaaccuc

SEQ ID NO: 1968784 - RNA, 19 nt, Artificial Sequence
  Description of Artificial Sequence: Synthetic oligonucleotide
  Sense strand starting at position 445 of SEQ ID NO: 1880460
gguuauugucuagaauugc

SEQ ID NO: 1968785 - RNA, 19 nt, Artificial Sequence
  Description of Artificial Sequence: Synthetic oligonucleotide
  Antisense strand to SEQ ID NO: 1968784
gcaauucuagacaauaacc

SEQ ID NO: 1968786 - RNA, 19 nt, Artificial Sequence
  Description of Artificial Sequence: Synthetic oligonucleotide
  Sense strand starting at position 514 of SEQ ID NO: 1880460
ugguguggaaguuguaaga

SEQ ID NO: 1968787 - RNA, 19 nt, Artificial Sequence
  Description of Artificial Sequence: Synthetic oligonucleotide
  Antisense strand to SEQ ID NO: 1968786
ucuuacaacuuccacacca

SEQ ID NO: 1968788 - RNA, 19 nt, Artificial Sequence
  Description of Artificial Sequence: Synthetic oligonucleotide
  Sense strand starting at position 1208 of SEQ ID NO: 1880460
cucgaauaugcacaguuua

SEQ ID NO: 1968789 - RNA, 19 nt, Artificial Sequence
  Description of Artificial Sequence: Synthetic oligonucleotide
  Antisense strand to SEQ ID NO: 1968788
uaaacugugcauauucgag

SEQ ID NO: 1968790 - RNA, 19 nt, Artificial Sequence
  Description of Artificial Sequence: Synthetic oligonucleotide
  Sense strand starting at position 1234 of SEQ ID NO: 1880460
augcguguuaccguugcaa

SEQ ID NO: 1968791 - RNA, 19 nt, Artificial Sequence
  Description of Artificial Sequence: Synthetic oligonucleotide
  Antisense strand to SEQ ID NO: 1968790
uugcaacgguaacacgcau

SEQ ID NO: 1968792 - RNA, 19 nt, Artificial Sequence
  Description of Artificial Sequence: Synthetic oligonucleotide
  Sense strand starting at position 1253 of SEQ ID NO: 1880460
cgcucugcuccugaacaaa

SEQ ID NO: 1968793 - RNA, 19 nt, Artificial Sequence
  Description of Artificial Sequence: Synthetic oligonucleotide
  Antisense strand to SEQ ID NO: 1968792
uuuguucaggagcagagcg

SEQ ID NO: 1968794 - RNA, 19 nt, Artificial Sequence
  Description of Artificial Sequence: Synthetic oligonucleotide
  Sense strand starting at position 2009 of SEQ ID NO: 1880460
gcggagagcgguucgcaaa

SEQ ID NO: 1968795 - RNA, 19 nt, Artificial Sequence
  Description of Artificial Sequence: Synthetic oligonucleotide
  Antisense strand to SEQ ID NO: 1968794
uuugcgaaccgcucuccgc

SEQ ID NO: 1968796 - RNA, 19 nt, Artificial Sequence
  Description of Artificial Sequence: Synthetic oligonucleotide
  Sense strand starting at position 2098 of SEQ ID NO: 1880460
gucgcucuucuugcaugaa

SEQ ID NO: 1968797 - RNA, 19 nt, Artificial Sequence
  Description of Artificial Sequence: Synthetic oligonucleotide
  Antisense strand to SEQ ID NO: 1968796
uucaugcaagaagagcgac

SEQ ID NO: 1968798 - RNA, 19 nt, Artificial Sequence
  Description of Artificial Sequence: Synthetic oligonucleotide
  Sense strand starting at position 2102 of SEQ ID NO: 1880460
cucuucuugcaugaagcua

SEQ ID NO: 1968799 - RNA, 19 nt, Artificial Sequence
  Description of Artificial Sequence: Synthetic oligonucleotide
  Antisense strand to SEQ ID NO: 1968798
uagcuucaugcaagaagag

SEQ ID NO: 1968800 - RNA, 19 nt, Artificial Sequence
  Description of Artificial Sequence: Synthetic oligonucleotide
  Sense strand starting at position 2127 of SEQ ID NO: 1880460
ucuagugugacggauuauc

SEQ ID NO: 1968801 - RNA, 19 nt, Artificial Sequence
  Description of Artificial Sequence: Synthetic oligonucleotide
  Antisense strand to SEQ ID NO: 1968800
gauaauccgucacacuaga

SEQ ID NO: 1968802 - RNA, 19 nt, Artificial Sequence
  Description of Artificial Sequence: Synthetic oligonucleotide
  Sense strand starting at position 2377 of SEQ ID NO: 1880460
gccgguucucaggagagaa

SEQ ID NO: 1968803 - RNA, 19 nt, Artificial Sequence
  Description of Artificial Sequence: Synthetic oligonucleotide
  Antisense strand to SEQ ID NO: 1968802
uucucuccugagaaccggc

SEQ ID NO: 1968804 - RNA, 19 nt, Artificial Sequence
  Description of Artificial Sequence: Synthetic oligonucleotide
  Sense strand starting at position 2602 of SEQ ID NO: 1880460
cacccucuccggugagaga

SEQ ID NO: 1968805 - RNA, 19 nt, Artificial Sequence
  Description of Artificial Sequence: Synthetic oligonucleotide
  Antisense strand to SEQ ID NO: 1968804
ucucucaccggagagggug

SEQ ID NO: 1968806 - RNA, 19 nt, Artificial Sequence
  Description of Artificial Sequence: Synthetic oligonucleotide
  Sense strand starting at position 2813 of SEQ ID NO: 1880460
guuguaucuguuuaccaca

SEQ ID NO: 1968807 - RNA, 19 nt, Artificial Sequence
  Description of Artificial Sequence: Synthetic oligonucleotide
  Antisense strand to SEQ ID NO: 1968806
ugugguaaacagauacaac

SEQ ID NO: 1968808 - RNA, 19 nt, Artificial Sequence
  Description of Artificial Sequence: Synthetic oligonucleotide
  Sense strand starting at position 3017 of SEQ ID NO: 1880460
auugaaccugcgugaggau

SEQ ID NO: 1968809 - RNA, 19 nt, Artificial Sequence
  Description of Artificial Sequence: Synthetic oligonucleotide
  Antisense strand to SEQ ID NO: 1968808
auccucacgcagguucaau

SEQ ID NO: 1968810 - RNA, 19 nt, Artificial Sequence
  Description of Artificial Sequence: Synthetic oligonucleotide
  Sense strand starting at position 3341 of SEQ ID NO: 1880460
uuggcaacuagugggauaa

SEQ ID NO: 1968811 - RNA, 19 nt, Artificial Sequence
  Description of Artificial Sequence: Synthetic oligonucleotide
  Antisense strand to SEQ ID NO: 1968810
uuaucccacuaguugccaa

SEQ ID NO: 1968812 - RNA, 19 nt, Artificial Sequence
  Description of Artificial Sequence: Synthetic oligonucleotide
  Sense strand starting at position 3342 of SEQ ID NO: 1880460
uggcaacuagugggauaaa

SEQ ID NO: 1968813 - RNA, 19 nt, Artificial Sequence
  Description of Artificial Sequence: Synthetic oligonucleotide
  Antisense strand to SEQ ID NO: 1968812
uuuaucccacuaguugcca

SEQ ID NO: 1968814 - RNA, 19 nt, Artificial Sequence
  Description of Artificial Sequence: Synthetic oligonucleotide
  Sense strand starting at position 3366 of SEQ ID NO: 1880460
ggugccauugaggauguuu

SEQ ID NO: 1968815 - RNA, 19 nt, Artificial Sequence
  Description of Artificial Sequence: Synthetic oligonucleotide
  Antisense strand to SEQ ID NO: 1968814
aaacauccucaauggcacc

SEQ ID NO: 1968816 - RNA, 19 nt, Artificial Sequence
  Description of Artificial Sequence: Synthetic oligonucleotide
  Sense strand starting at position 3371 of SEQ ID NO: 1880460
cauugaggauguuuacaac

SEQ ID NO: 1968817 - RNA, 19 nt, Artificial Sequence
  Description of Artificial Sequence: Synthetic oligonucleotide
  Antisense strand to SEQ ID NO: 1968816
guuguaaacauccucaaug

SEQ ID NO: 1968818 - RNA, 19 nt, Artificial Sequence
  Description of Artificial Sequence: Synthetic oligonucleotide
  Sense strand starting at position 3404 of SEQ ID NO: 1880460
agauaaccucaaggucuuu

SEQ ID NO: 1968819 - RNA, 19 nt, Artificial Sequence
  Description of Artificial Sequence: Synthetic oligonucleotide
  Antisense strand to SEQ ID NO: 1968818
aaagaccuugagguuaucu

SEQ ID NO: 1968820 - RNA, 19 nt, Artificial Sequence
  Description of Artificial Sequence: Synthetic oligonucleotide
  Sense strand starting at position 3432 of SEQ ID NO: 1880460
auggccuuuccaugacuca

SEQ ID NO: 1968821 - RNA, 19 nt, Artificial Sequence
  Description of Artificial Sequence: Synthetic oligonucleotide
  Antisense strand to SEQ ID NO: 1968820
ugagucauggaaaggccau

SEQ ID NO: 1968822 - RNA, 19 nt, Artificial Sequence
  Description of Artificial Sequence: Synthetic oligonucleotide
  Sense strand starting at position 3433 of SEQ ID NO: 1880460
uggccuuuccaugacucau

SEQ ID NO: 1968823 - RNA, 19 nt, Artificial Sequence
  Description of Artificial Sequence: Synthetic oligonucleotide
  Antisense strand to SEQ ID NO: 1968822
augagucauggaaaggcca

SEQ ID NO: 1968824 - RNA, 19 nt, Artificial Sequence
  Description of Artificial Sequence: Synthetic oligonucleotide
  Sense strand starting at position 3540 of SEQ ID NO: 1880460
uggaauugguucucaccca

SEQ ID NO: 1968825 - RNA, 19 nt, Artificial Sequence
  Description of Artificial Sequence: Synthetic oligonucleotide
  Antisense strand to SEQ ID NO: 1968824
ugggugagaaccaauucca

SEQ ID NO: 1968826 - RNA, 19 nt, Artificial Sequence
  Description of Artificial Sequence: Synthetic oligonucleotide
  Sense strand starting at position 3651 of SEQ ID NO: 1880460
ccuaauuucugguaggaag

SEQ ID NO: 1968827 - RNA, 19 nt, Artificial Sequence
  Description of Artificial Sequence: Synthetic oligonucleotide
  Antisense strand to SEQ ID NO: 1968826
cuuccuaccagaaauuagg

SEQ ID NO: 1968828 - RNA, 19 nt, Artificial Sequence
  Description of Artificial Sequence: Synthetic oligonucleotide
  Sense strand starting at position 3670 of SEQ ID NO: 1880460
guaccaucugguggauauu

SEQ ID NO: 1968829 - RNA, 19 nt, Artificial Sequence
  Description of Artificial Sequence: Synthetic oligonucleotide
  Antisense strand to SEQ ID NO: 1968828
aauauccaccagaugguac

SEQ ID NO: 1968830 - RNA, 19 nt, Artificial Sequence
  Description of Artificial Sequence: Synthetic oligonucleotide
  Sense strand starting at position 3680 of SEQ ID NO: 1880460
guggauauuugugaaacug

SEQ ID NO: 1968831 - RNA, 19 nt, Artificial Sequence
  Description of Artificial Sequence: Synthetic oligonucleotide
  Antisense strand to SEQ ID NO: 1968830
caguuucacaaauauccac

SEQ ID NO: 1968832 - RNA, 19 nt, Artificial Sequence
  Description of Artificial Sequence: Synthetic oligonucleotide
  Sense strand starting at position 3826 of SEQ ID NO: 1880460
uguguaugugacuauguca

SEQ ID NO: 1968833 - RNA, 19 nt, Artificial Sequence
  Description of Artificial Sequence: Synthetic oligonucleotide
  Antisense strand to SEQ ID NO: 1968832
ugacauagucacauacaca

SEQ ID NO: 1968834 - RNA, 19 nt, Artificial Sequence
  Description of Artificial Sequence: Synthetic oligonucleotide
  Sense strand starting at position 3829 of SEQ ID NO: 1880460
guaugugacuaugucauaa

SEQ ID NO: 1968835 - RNA, 19 nt, Artificial Sequence
  Description of Artificial Sequence: Synthetic oligonucleotide
  Antisense strand to SEQ ID NO: 1968834
uuaugacauagucacauac

SEQ ID NO: 1968836 - RNA, 19 nt, Artificial Sequence
  Description of Artificial Sequence: Synthetic oligonucleotide
  Sense strand starting at position 3941 of SEQ ID NO: 1880460
ccgugacaggcacauugau

SEQ ID NO: 1968837 - RNA, 19 nt, Artificial Sequence
  Description of Artificial Sequence: Synthetic oligonucleotide
  Antisense strand to SEQ ID NO: 1968836
aucaaugugccugucacgg

SEQ ID NO: 1968838 - RNA, 19 nt, Artificial Sequence
  Description of Artificial Sequence: Synthetic oligonucleotide
  Sense strand starting at position 3947 of SEQ ID NO: 1880460
caggcacauugaucuauga

SEQ ID NO: 1968839 - RNA, 19 nt, Artificial Sequence
  Description of Artificial Sequence: Synthetic oligonucleotide
  Antisense strand to SEQ ID NO: 1968838
ucauagaucaaugugccug

SEQ ID NO: 1968840 - RNA, 19 nt, Artificial Sequence
  Description of Artificial Sequence: Synthetic oligonucleotide
  Sense strand starting at position 3951 of SEQ ID NO: 1880460
cacauugaucuaugagagu

SEQ ID NO: 1968841 - RNA, 19 nt, Artificial Sequence
  Description of Artificial Sequence: Synthetic oligonucleotide
  Antisense strand to SEQ ID NO: 1968840
acucucauagaucaaugug

SEQ ID NO: 1968842 - RNA, 19 nt, Artificial Sequence
  Description of Artificial Sequence: Synthetic oligonucleotide
  Sense strand starting at position 3960 of SEQ ID NO: 1880460
cuaugagaguugucucuug

SEQ ID NO: 1968843 - RNA, 19 nt, Artificial Sequence
  Description of Artificial Sequence: Synthetic oligonucleotide
  Antisense strand to SEQ ID NO: 1968842
caagagacaacucucauag

SEQ ID NO: 1968844 - RNA, 19 nt, Artificial Sequence
  Description of Artificial Sequence: Synthetic oligonucleotide
  Sense strand starting at position 3977 of SEQ ID NO: 1880460
ugggaaaucuagucauauc

SEQ ID NO: 1968845 - RNA, 19 nt, Artificial Sequence
  Description of Artificial Sequence: Synthetic oligonucleotide
  Antisense strand to SEQ ID NO: 1968844
gauaugacuagauuuccca

SEQ ID NO: 1968846 - RNA, 19 nt, Artificial Sequence
  Description of Artificial Sequence: Synthetic oligonucleotide
  Sense strand starting at position 152 of SEQ ID NO: 1880461
guccuaguuggagauguaa

SEQ ID NO: 1968847 - RNA, 19 nt, Artificial Sequence
  Description of Artificial Sequence: Synthetic oligonucleotide
  Antisense strand to SEQ ID NO: 1968846
uuacaucuccaacuaggac

SEQ ID NO: 1968848 - RNA, 19 nt, Artificial Sequence
  Description of Artificial Sequence: Synthetic oligonucleotide
  Sense strand starting at position 154 of SEQ ID NO: 1880461
ccuaguuggagauguaaca

SEQ ID NO: 1968849 - RNA, 19 nt, Artificial Sequence
  Description of Artificial Sequence: Synthetic oligonucleotide
  Antisense strand to SEQ ID NO: 1968848
uguuacaucuccaacuagg

SEQ ID NO: 1968850 - RNA, 19 nt, Artificial Sequence
  Description of Artificial Sequence: Synthetic oligonucleotide
  Sense strand starting at position 209 of SEQ ID NO: 1880461
gaaggauucgccgguuuaa

SEQ ID NO: 1968851 - RNA, 19 nt, Artificial Sequence
  Description of Artificial Sequence: Synthetic oligonucleotide
  Antisense strand to SEQ ID NO: 1968850
uuaaaccggcgaauccuuc

SEQ ID NO: 1968852 - RNA, 19 nt, Artificial Sequence
  Description of Artificial Sequence: Synthetic oligonucleotide
  Sense strand starting at position 354 of SEQ ID NO: 1880461
agaauaagucucuguaauu

SEQ ID NO: 1968853 - RNA, 19 nt, Artificial Sequence
  Description of Artificial Sequence: Synthetic oligonucleotide
  Antisense strand to SEQ ID NO: 1968852
aauuacagagacuuauucu

SEQ ID NO: 1968854 - RNA, 19 nt, Artificial Sequence
  Description of Artificial Sequence: Synthetic oligonucleotide
  Sense strand starting at position 390 of SEQ ID NO: 1880461
gcaguuuguuccuugauca

SEQ ID NO: 1968855 - RNA, 19 nt, Artificial Sequence
  Description of Artificial Sequence: Synthetic oligonucleotide
  Antisense strand to SEQ ID NO: 1968854
ugaucaaggaacaaacugc

SEQ ID NO: 1968856 - RNA, 19 nt, Artificial Sequence
  Description of Artificial Sequence: Synthetic oligonucleotide
  Sense strand starting at position 469 of SEQ ID NO: 1880461
gggcaauacucuucuaaau

SEQ ID NO: 1968857 - RNA, 19 nt, Artificial Sequence
  Description of Artificial Sequence: Synthetic oligonucleotide
  Antisense strand to SEQ ID NO: 1968856
auuuagaagaguauugccc

SEQ ID NO: 1968858 - RNA, 19 nt, Artificial Sequence
  Description of Artificial Sequence: Synthetic oligonucleotide
  Sense strand starting at position 486 of SEQ ID NO: 1880461
auaugcuucucagaauaga

SEQ ID NO: 1968859 - RNA, 19 nt, Artificial Sequence
  Description of Artificial Sequence: Synthetic oligonucleotide
  Antisense strand to SEQ ID NO: 1968858
ucuauucugagaagcauau

SEQ ID NO: 1968860 - RNA, 19 nt, Artificial Sequence
  Description of Artificial Sequence: Synthetic oligonucleotide
  Sense strand starting at position 622 of SEQ ID NO: 1880461
auuguagcauagucuuaga

SEQ ID NO: 1968861 - RNA, 19 nt, Artificial Sequence
  Description of Artificial Sequence: Synthetic oligonucleotide
  Antisense strand to SEQ ID NO: 1968860
ucuaagacuaugcuacaau

SEQ ID NO: 1968862 - RNA, 19 nt, Artificial Sequence
  Description of Artificial Sequence: Synthetic oligonucleotide
  Sense strand starting at position 625 of SEQ ID NO: 1880461
guagcauagucuuagagga

SEQ ID NO: 1968863 - RNA, 19 nt, Artificial Sequence
  Description of Artificial Sequence: Synthetic oligonucleotide
  Antisense strand to SEQ ID NO: 1968862
uccucuaagacuaugcuac

SEQ ID NO: 1968864 - RNA, 19 nt, Artificial Sequence
  Description of Artificial Sequence: Synthetic oligonucleotide
  Sense strand starting at position 627 of SEQ ID NO: 1880461
agcauagucuuagaggaag

SEQ ID NO: 1968865 - RNA, 19 nt, Artificial Sequence
  Description of Artificial Sequence: Synthetic oligonucleotide
  Antisense strand to SEQ ID NO: 1968864
cuuccucuaagacuaugcu

SEQ ID NO: 1968866 - RNA, 19 nt, Artificial Sequence
  Description of Artificial Sequence: Synthetic oligonucleotide
  Sense strand starting at position 639 of SEQ ID NO: 1880461
gaggaagauuugugacuuu

SEQ ID NO: 1968867 - RNA, 19 nt, Artificial Sequence
  Description of Artificial Sequence: Synthetic oligonucleotide
  Antisense strand to SEQ ID NO: 1968866
aaagucacaaaucuuccuc

SEQ ID NO: 1968868 - RNA, 19 nt, Artificial Sequence
  Description of Artificial Sequence: Synthetic oligonucleotide
  Sense strand starting at position 655 of SEQ ID NO: 1880461
uuuaaauacugacgacauu

SEQ ID NO: 1968869 - RNA, 19 nt, Artificial Sequence
  Description of Artificial Sequence: Synthetic oligonucleotide
  Antisense strand to SEQ ID NO: 1968868
aaugucgucaguauuuaaa

SEQ ID NO: 1968870 - RNA, 19 nt, Artificial Sequence
  Description of Artificial Sequence: Synthetic oligonucleotide
  Sense strand starting at position 682 of SEQ ID NO: 1880461
gaagguacacagugaucaa
